United States Patent Application Publication US 2006/0003322 A1 - sequence listing, part 12

SEQ ID NO: 467535 - RNA, 23 nt, Human
ccaggccuguuugauuguagcua

SEQ ID NO: 467536 - RNA, 19 nt, Human
ccaguugggggagcaggaa

SEQ ID NO: 467537 - RNA, 20 nt, Human
ccuggcacaggaagaagucc

SEQ ID NO: 467538 - RNA, 22 nt, Human
ccuggcacaggaagaaguccaa

SEQ ID NO: 467539 - RNA, 18 nt, Human
cggcaccgacagcugcug

SEQ ID NO: 467540 - RNA, 29 nt, Human
cgggggacagagaagggggagggagggag

SEQ ID NO: 467541 - RNA, 23 nt, Human
cucgcagugccccgaaugaggcc

SEQ ID NO: 467542 - RNA, 18 nt, Human
cugagacccuccuccccu

SEQ ID NO: 467543 - RNA, 20 nt, Human
gaaaaacagacucacacaga

SEQ ID NO: 467544 - RNA, 22 nt, Human
gaaugccagccagaagcaugaa

SEQ ID NO: 467545 - RNA, 18 nt, Human
gcugcagaggccgccaga

SEQ ID NO: 467546 - RNA, 20 nt, Human
gcuuuuguuguucuaccuga

SEQ ID NO: 467547 - RNA, 21 nt, Human
gggccggggugagcgagaggc

SEQ ID NO: 467548 - RNA, 18 nt, Human
gggggagggagggagcgc

SEQ ID NO: 467549 - RNA, 23 nt, Human
gggugagcgagaggcgggggaca

SEQ ID NO: 467550 - RNA, 22 nt, Human
uaaacaugcagaaugccagcca

SEQ ID NO: 467551 - RNA, 23 nt, Human
ucagauacccaggccuguuugau

SEQ ID NO: 467552 - RNA, 19 nt, Human
uccaagggagcaaagcacc

SEQ ID NO: 467553 - RNA, 19 nt, Human
uccgaaagagucucccccu

SEQ ID NO: 467554 - RNA, 22 nt, Human
ugaaaaacagacucacacagau

SEQ ID NO: 467555 - RNA, 22 nt, Human
ugagacccuccuccccuccucc

SEQ ID NO: 467556 - RNA, 19 nt, Human
ugaggccggcugugcugcu

SEQ ID NO: 467557 - RNA, 24 nt, Human
ugaggccggcugugcugcugcaga

SEQ ID NO: 467558 - RNA, 18 nt, Human
ugcagggagcaugagguu

SEQ ID NO: 467559 - RNA, 22 nt, Human
ugcuuuuguuguucuaccugau

SEQ ID NO: 467560 - RNA, 25 nt, Human
uggacacaagccaagcaagccucag

SEQ ID NO: 467561 - RNA, 24 nt, Human
uggcacaggaagaaguccaaacaa

SEQ ID NO: 467562 - RNA, 24 nt, Human
uggcacaggaagaaguccaaacag

SEQ ID NO: 467563 - RNA, 23 nt, Human
ugugugcauugacaacuguauag

SEQ ID NO: 467564 - RNA, 23 nt, Human
uucuucaggucccccgacuugga

SEQ ID NO: 467565 - RNA, 23 nt, Human
uugggggagcaggaauagggggu

SEQ ID NO: 467566 - RNA, 22 nt, Human
caacggggcugccuuuauucuc

SEQ ID NO: 467567 - RNA, 21 nt, Human
cccaggauugugcccccauga

SEQ ID NO: 467568 - RNA, 22 nt, Human
gaagcuccuccugcaggugccc

SEQ ID NO: 467569 - RNA, 23 nt, Human
gccccaggauugugcccccauga

SEQ ID NO: 467570 - RNA, 25 nt, Human
ugcaggugccccaggauugugcccc

SEQ ID NO: 467571 - RNA, 18 nt, Human
ugcgaagcuccuccugca

SEQ ID NO: 467572 - RNA, 23 nt, Human
aaacucccgaccucaggcaaucc

SEQ ID NO: 467573 - RNA, 23 nt, Human
aaagugaugggauuacagcauga

SEQ ID NO: 467574 - RNA, 19 nt, Human
aaagugcuaggauuacagg

SEQ ID NO: 467575 - RNA, 20 nt, Human
aaagugcuaggauuacaggg

SEQ ID NO: 467576 - RNA, 24 nt, Human
aaaguucugggaccacaggcauga

SEQ ID NO: 467577 - RNA, 24 nt, Human
aagugaucugcccgucucggccuc

SEQ ID NO: 467578 - RNA, 26 nt, Human
aagugcuaggauuacaggggugagcc

SEQ ID NO: 467579 - RNA, 18 nt, Human
acaggguuucaccauguu

SEQ ID NO: 467580 - RNA, 19 nt, Human
acaggguuucaccauguug

SEQ ID NO: 467581 - RNA, 24 nt, Human
acaggguuucaccauguugcccag

SEQ ID NO: 467582 - RNA, 23 nt, Human
accauguugcccagcuggucucg

SEQ ID NO: 467583 - RNA, 18 nt, Human
accauguuggccaggcug

SEQ ID NO: 467584 - RNA, 18 nt, Human
accguguuggccaggcug

SEQ ID NO: 467585 - RNA, 24 nt, Human
acgaggucucaccauguuggccag

SEQ ID NO: 467586 - RNA, 23 nt, Human
agacaggguuucaccauguugcc

SEQ ID NO: 467587 - RNA, 19 nt, Human
agagaugggguuucaccgu

SEQ ID NO: 467588 - RNA, 24 nt, Human
agcuggucucgaacuccugaccuc

SEQ ID NO: 467589 - RNA, 23 nt, Human
aggagugcaguagugugaucuca

SEQ ID NO: 467590 - RNA, 22 nt, Human
aggcaauccaccugcccuggcc

SEQ ID NO: 467591 - RNA, 24 nt, Human
aggcaauccaccugcccuggccuc

SEQ ID NO: 467592 - RNA, 23 nt, Human
aggcaugagccacugugcccggc

SEQ ID NO: 467593 - RNA, 23 nt, Human
aggguucaagugauucuccugcc

SEQ ID NO: 467594 - RNA, 22 nt, Human
aggucucaccauguuggccagg

SEQ ID NO: 467595 - RNA, 20 nt, Human
aguagagaugggguuucacc

SEQ ID NO: 467596 - RNA, 18 nt, Human
aguagcugggauuacaga

SEQ ID NO: 467597 - RNA, 18 nt, Human
aguagcugggauuacagg

SEQ ID NO: 467598 - RNA, 24 nt, Human
agugauucuccugccucagccucc

SEQ ID NO: 467599 - RNA, 21 nt, Human
agugcaguagugugaucucag

SEQ ID NO: 467600 - RNA, 24 nt, Human
agugcaguagugugaucucagcuc

SEQ ID NO: 467601 - RNA, 24 nt, Human
agugcaguggcuccaucucggcuc

SEQ ID NO: 467602 - RNA, 21 nt, Human
aucauuuccauuuagcucagg

SEQ ID NO: 467603 - RNA, 23 nt, Human
augggguuucaccguguuggcca

SEQ ID NO: 467604 - RNA, 24 nt, Human
augggguuucaccguguuggccag

SEQ ID NO: 467605 - RNA, 18 nt, Human
auucuccugccucagccu

SEQ ID NO: 467606 - RNA, 24 nt, Human
auuuuuguauuuuuaguagagaug

SEQ ID NO: 467607 - RNA, 24 nt, Human
caaagugcuaggauuacaggggug

SEQ ID NO: 467608 - RNA, 24 nt, Human
caaaguucugggaccacaggcaug

SEQ ID NO: 467609 - RNA, 22 nt, Human
caagccauucuucugccucagc

SEQ ID NO: 467610 - RNA, 23 nt, Human
caagggaacagugaauuuggccc

SEQ ID NO: 467611 - RNA, 20 nt, Human
caagugauucuccugccuca

SEQ ID NO: 467612 - RNA, 22 nt, Human
caagugauucuccugccucagc

SEQ ID NO: 467613 - RNA, 23 nt, Human
cacaggcaugagccacugugccc

SEQ ID NO: 467614 - RNA, 20 nt, Human
caccacaaccucugccucca

SEQ ID NO: 467615 - RNA, 20 nt, Human
caccacaaccucugccucca

SEQ ID NO: 467616 - RNA, 23 nt, Human
caccauguugcccagcuggucuc

SEQ ID NO: 467617 - RNA, 26 nt, Human
caccauguugcccagcuggucucgaa

SEQ ID NO: 467618 - RNA, 21 nt, Human
caccauguuggccaggcuggu

SEQ ID NO: 467619 - RNA, 24 nt, Human
caccauguuggccaggcuggucuc

SEQ ID NO: 467620 - RNA, 23 nt, Human
cacccgccucagccucccaaagu

SEQ ID NO: 467621 - RNA, 18 nt, Human
caccguguuggccaggcu

SEQ ID NO: 467622 - RNA, 19 nt, Human
caccguguuggccaggcug

SEQ ID NO: 467623 - RNA, 22 nt, Human
caccguguuggccaggcuguuc

SEQ ID NO: 467624 - RNA, 24 nt, Human
caccguguuggccaggcuguucuc

SEQ ID NO: 467625 - RNA, 19 nt, Human
caccucugccuccaggguu

SEQ ID NO: 467626 - RNA, 23 nt, Human
caccugcccuggccucccaaagu

SEQ ID NO: 467627 - RNA, 24 nt, Human
cacucugucaccugggcuggagug

SEQ ID NO: 467628 - RNA, 18 nt, Human
cagaggcccugagcugag

SEQ ID NO: 467629 - RNA, 21 nt, Human
caggcgcccgccacuacgccc

SEQ ID NO: 467630 - RNA, 21 nt, Human
caggguucaagccauucuucu

SEQ ID NO: 467631 - RNA, 18 nt, Human
caggguuucaccauguug

SEQ ID NO: 467632 - RNA, 20 nt, Human
cauguugcccagcuggucuc

SEQ ID NO: 467633 - RNA, 23 nt, Human
cauguugcccagcuggucucgaa

SEQ ID NO: 467634 - RNA, 23 nt, Human
cauguuggccaggcuggucucaa

SEQ ID NO: 467635 - RNA, 20 nt, Human
cauuuccauuuagcucagga

SEQ ID NO: 467636 - RNA, 19 nt, Human
ccaaagugaugggauuaca

SEQ ID NO: 467637 - RNA, 23 nt, Human
ccaaagugaugggauuacagcau

SEQ ID NO: 467638 - RNA, 19 nt, Human
ccaaagugcuaggauuaca

SEQ ID NO: 467639 - RNA, 24 nt, Human
ccaaaguucugggaccacaggcau

SEQ ID NO: 467640 - RNA, 24 nt, Human
ccacaaccucugccuccaggguuc

SEQ ID NO: 467641 - RNA, 19 nt, Human
ccaggguucaagccauucu

SEQ ID NO: 467642 - RNA, 20 nt, Human
ccaggguucaagugauucuc

SEQ ID NO: 467643 - RNA, 23 nt, Human
ccaggguucaagugauucuccug

SEQ ID NO: 467644 - RNA, 22 nt, Human
ccaugcccagcuaauuuuugua

SEQ ID NO: 467645 - RNA, 23 nt, Human
cccgaccucaggcaauccaccug

SEQ ID NO: 467646 - RNA, 19 nt, Human
cccgaguagcugggauuac

SEQ ID NO: 467647 - RNA, 23 nt, Human
cccgaguagcugggauuacaggc

SEQ ID NO: 467648 - RNA, 24 nt, Human
cccgaguagcugggauuacaggcg

SEQ ID NO: 467649 - RNA, 23 nt, Human
cccugagcugaggccacccuggc

SEQ ID NO: 467650 - RNA, 22 nt, Human
ccgaguagcugggauuacaggc

SEQ ID NO: 467651 - RNA, 24 nt, Human
ccgccucagccucccaaagugcua

SEQ ID NO: 467652 - RNA, 21 nt, Human
ccgcgccuggccuaauuucug

SEQ ID NO: 467653 - RNA, 21 nt, Human
ccuacaccuuuaucuccuuac

SEQ ID NO: 467654 - RNA, 21 nt, Human
ccuacauuugaaaaaauccau

SEQ ID NO: 467655 - RNA, 24 nt, Human
ccuccaggguucaagugauucucc

SEQ ID NO: 467656 - RNA, 19 nt, Human
ccugaccucaagugaucug

SEQ ID NO: 467657 - RNA, 22 nt, Human
ccugaccucaagugaucugccc

SEQ ID NO: 467658 - RNA, 21 nt, Human
ccugaccucgugauucacccg

SEQ ID NO: 467659 - RNA, 23 nt, Human
ccugccucagccucccgaguagc

SEQ ID NO: 467660 - RNA, 24 nt, Human
cgaggucucaccauguuggccagg

SEQ ID NO: 467661 - RNA, 24 nt, Human
cgccucagccucccaaagugcuag

SEQ ID NO: 467662 - RNA, 24 nt, Human
cgugauucacccgccucagccucc

SEQ ID NO: 467663 - RNA, 23 nt, Human
cuauccuacauuugaaaaaaucc

SEQ ID NO: 467664 - RNA, 24 nt, Human
cucacucugucaccugggcuggag

SEQ ID NO: 467665 - RNA, 24 nt, Human
cucagccucccgaguagcugggau

SEQ ID NO: 467666 - RNA, 24 nt, Human
cucagccucccgaguagcugggau

SEQ ID NO: 467667 - RNA, 19 nt, Human
cuccaggguucaagugauu

SEQ ID NO: 467668 - RNA, 26 nt, Human
cuccaucucggcucacuaccaccucu

SEQ ID NO: 467669 - RNA, 25 nt, Human
cuccugaccucaagugaucugcccg

SEQ ID NO: 467670 - RNA, 24 nt, Human
cuccugaccucgugauucacccgc

SEQ ID NO: 467671 - RNA, 23 nt, Human
cucugucaccugggcuggagugc

SEQ ID NO: 467672 - RNA, 23 nt, Human
cugccucagccucccgaguagcu

SEQ ID NO: 467673 - RNA, 20 nt, Human
cugccuccaggguucaagcc

SEQ ID NO: 467674 - RNA, 19 nt, Human
cugucaccugggcuggagu

SEQ ID NO: 467675 - RNA, 22 nt, Human
gaaaaaauccaucuaaccagaa

SEQ ID NO: 467676 - RNA, 22 nt, Human
gaauaauauaauuuugaccuuc

SEQ ID NO: 467677 - RNA, 21 nt, Human
gaccacaggcaugagccacug

SEQ ID NO: 467678 - RNA, 24 nt, Human
gaccucaagugaucugcccgucuc

SEQ ID NO: 467679 - RNA, 22 nt, Human
gaccucgugauucacccgccuc

SEQ ID NO: 467680 - RNA, 24 nt, Human
gaccucgugauucacccgccucag

SEQ ID NO: 467681 - RNA, 19 nt, Human
gaccuucuaaaacacacca

SEQ ID NO: 467682 - RNA, 18 nt, Human
gagaugggguuucaccgu

SEQ ID NO: 467683 - RNA, 24 nt, Human
gagaugggguuucaccguguuggc

SEQ ID NO: 467684 - RNA, 24 nt, Human
gagccacugugcccggccuacacc

SEQ ID NO: 467685 - RNA, 24 nt, Human
gaguagcugggauuacagacacac

SEQ ID NO: 467686 - RNA, 25 nt, Human
gaguagcugggauuacaggcgcccg

SEQ ID NO: 467687 - RNA, 22 nt, Human
gauuacagacacacgccgccau

SEQ ID NO: 467688 - RNA, 21 nt, Human
gauuacagcaugaaccacugc

SEQ ID NO: 467689 - RNA, 18 nt, Human
gauuacaggcgcccgcca

SEQ ID NO: 467690 - RNA, 18 nt, Human
gauuacaggggugagcca

SEQ ID NO: 467691 - RNA, 23 nt, Human
gcaggagugcaguagugugaucu

SEQ ID NO: 467692 - RNA, 22 nt, Human
gcccagcuaauuuuuguauuuu

SEQ ID NO: 467693 - RNA, 18 nt, Human
gcccugugaauaauauaa

SEQ ID NO: 467694 - RNA, 18 nt, Human
gcuggagugcaguggcuc

SEQ ID NO: 467695 - RNA, 23 nt, Human
gcuggucucaaucuccugaccuc

SEQ ID NO: 467696 - RNA, 20 nt, Human
ggaccacaggcaugagccac

SEQ ID NO: 467697 - RNA, 22 nt, Human
ggauuacaggggugagccaccg

SEQ ID NO: 467698 - RNA, 23 nt, Human
ggcaauccaccugcccuggccuc

SEQ ID NO: 467699 - RNA, 24 nt, Human
ggcuggucucaaucuccugaccuc

SEQ ID NO: 467700 - RNA, 22 nt, Human
gggguuucaccguguuggccag

SEQ ID NO: 467701 - RNA, 23 nt, Human
ggguucaagugauucuccugccu

SEQ ID NO: 467702 - RNA, 18 nt, Human
ggucucaccauguuggcc

SEQ ID NO: 467703 - RNA, 19 nt, Human
ggucucgaacuccugaccu

SEQ ID NO: 467704 - RNA, 23 nt, Human
ggugagcagagauggggaaggga

SEQ ID NO: 467705 - RNA, 24 nt, Human
gguuuuguauuuuuaguagagaca

SEQ ID NO: 467706 - RNA, 18 nt, Human
guagcugggauuacaggc

SEQ ID NO: 467707 - RNA, 24 nt, Human
gugauucacccgccucagccuccc

SEQ ID NO: 467708 - RNA, 24 nt, Human
gugauucuccugccucagccuccc

SEQ ID NO: 467709 - RNA, 24 nt, Human
uaauuucuguauuuuuaguaaaga

SEQ ID NO: 467710 - RNA, 24 nt, Human
uaauuuuuguauuuuuaguagaga

SEQ ID NO: 467711 - RNA, 24 nt, Human
uacagacacacgccgccaugccca

SEQ ID NO: 467712 - RNA, 22 nt, Human
uacaggggugagccaccgcgcc

SEQ ID NO: 467713 - RNA, 22 nt, Human
uacaggggugagccaccgcgcc

SEQ ID NO: 467714 - RNA, 23 nt, Human
uacaggggugagccaccgcgccu

SEQ ID NO: 467715 - RNA, 22 nt, Human
uagagacaggguuucaccaugu

SEQ ID NO: 467716 - RNA, 22 nt, Human
uaggauuacaggggugagccac

SEQ ID NO: 467717 - RNA, 23 nt, Human
uaggauuacaggggugagccacc

SEQ ID NO: 467718 - RNA, 24 nt, Human
uaggauuacaggggugagccaccg

SEQ ID NO: 467719 - RNA, 26 nt, Human
uaguaaagacgaggucucaccauguu

SEQ ID NO: 467720 - RNA, 24 nt, Human
uaguagagacaggguuucaccaug

SEQ ID NO: 467721 - RNA, 26 nt, Human
uaguagagacaggguuucaccauguu

SEQ ID NO: 467722 - RNA, 21 nt, Human
uaguagagaugggguuucacc

SEQ ID NO: 467723 - RNA, 24 nt, Human
uaguagagaugggguuucaccgug

SEQ ID NO: 467724 - RNA, 26 nt, Human
uaguagagaugggguuucaccguguu

SEQ ID NO: 467725 - RNA, 24 nt, Human
uagugugaucucagcucaccacaa

SEQ ID NO: 467726 - RNA, 25 nt, Human
ucaagccauucuucugccucagccu

SEQ ID NO: 467727 - RNA, 19 nt, Human
ucaagugauucuccugccu

SEQ ID NO: 467728 - RNA, 25 nt, Human
ucaccacaaccucugccuccagggu

SEQ ID NO: 467729 - RNA, 27 nt, Human
ucaccacaaccucugccuccaggguuc

SEQ ID NO: 467730 - RNA, 19 nt, Human
ucaccguguuggccaggcu

SEQ ID NO: 467731 - RNA, 24 nt, Human
ucaccugggcuggagugcaguggc

SEQ ID NO: 467732 - RNA, 20 nt, Human
ucagccucccgaguagcugg

SEQ ID NO: 467733 - RNA, 20 nt, Human
ucagccucccgaguagcugg

SEQ ID NO: 467734 - RNA, 24 nt, Human
uccaggguucaagccauucuucug

SEQ ID NO: 467735 - RNA, 24 nt, Human
uccaggguucaagugauucuccug

SEQ ID NO: 467736 - RNA, 22 nt, Human
ucccaaagugaugggauuacag

SEQ ID NO: 467737 - RNA, 23 nt, Human
ucccaaagugcuaggauuacagg

SEQ ID NO: 467738 - RNA, 18 nt, Human
ucccaaaguucugggacc

SEQ ID NO: 467739 - RNA, 24 nt, Human
ucccaaaguucugggaccacaggc

SEQ ID NO: 467740 - RNA, 18 nt, Human
ucccgaguagcugggauu

SEQ ID NO: 467741 - RNA, 24 nt, Human
ucccgaguagcugggauuacaggc

SEQ ID NO: 467742 - RNA, 23 nt, Human
ucuaaccagaagaacuuugagcc

SEQ ID NO: 467743 - RNA, 18 nt, Human
ucuauccuacauuugaaa

SEQ ID NO: 467744 - RNA, 24 nt, Human
ucucaccauguuggccaggcuggu

SEQ ID NO: 467745 - RNA, 23 nt, Human
ucucacucugucaccugggcugg

SEQ ID NO: 467746 - RNA, 24 nt, Human
ucucacucugucaccugggcugga

SEQ ID NO: 467747 - RNA, 24 nt, Human
ucuccugccucagccucccgagua

SEQ ID NO: 467748 - RNA, 19 nt, Human
ucucgaacuccugaccucg

SEQ ID NO: 467749 - RNA, 24 nt, Human
ucugccucagccucccgaguagcu

SEQ ID NO: 467750 - RNA, 24 nt, Human
ucugccuccaggguucaagugauu

SEQ ID NO: 467751 - RNA, 24 nt, Human
ucugucaccugggcuggagugcag

SEQ ID NO: 467752 - RNA, 19 nt, Human
ucuguggauguggggacua

SEQ ID NO: 467753 - RNA, 19 nt, Human
ucuuuauuuugagacagag

SEQ ID NO: 467754 - RNA, 18 nt, Human
ugaccucaagugaucugc

SEQ ID NO: 467755 - RNA, 24 nt, Human
ugaccucaagugaucugcccgucu

SEQ ID NO: 467756 - RNA, 18 nt, Human
ugagacagagucucacuc

SEQ ID NO: 467757 - RNA, 22 nt, Human
ugagacagagucucacucuguc

SEQ ID NO: 467758 - RNA, 22 nt, Human
ugagacagagucucagucgccc

SEQ ID NO: 467759 - RNA, 20 nt, Human
ugcaggagugcaguaguguu

SEQ ID NO: 467760 - RNA, 22 nt, Human
ugcaguagugugaucucagcuc

SEQ ID NO: 467761 - RNA, 22 nt, Human
ugcaguggcuccaucucggcuc

SEQ ID NO: 467762 - RNA, 24 nt, Human
ugccucagccucccgaguagcugg

SEQ ID NO: 467763 - RNA, 24 nt, Human
ugccucagccucccgaguagcugg

SEQ ID NO: 467764 - RNA, 20 nt, Human
uggaagacugggcaccuggu

SEQ ID NO: 467765 - RNA, 23 nt, Human
uggagugcaguggcuccaucucg

SEQ ID NO: 467766 - RNA, 24 nt, Human
uggagugcaguggcuccaucucgg

SEQ ID NO: 467767 - RNA, 24 nt, Human
uggccaggcuggucucaaucuccu

SEQ ID NO: 467768 - RNA, 21 nt, Human
uggccaggcuguucucaaacu

SEQ ID NO: 467769 - RNA, 21 nt, Human
ugggaccacaggcaugagcca

SEQ ID NO: 467770 - RNA, 22 nt, Human
ugggaccacaggcaugagccac

SEQ ID NO: 467771 - RNA, 23 nt, Human
ugggaccacaggcaugagccacu

SEQ ID NO: 467772 - RNA, 24 nt, Human
ugggaccacaggcaugagccacug

SEQ ID NO: 467773 - RNA, 26 nt, Human
ugggaccacaggcaugagccacugug

SEQ ID NO: 467774 - RNA, 21 nt, Human
ugggauuacagacacacgccg

SEQ ID NO: 467775 - RNA, 22 nt, Human
ugggauuacagacacacgccgc

SEQ ID NO: 467776 - RNA, 24 nt, Human
ugggauuacagacacacgccgcca

SEQ ID NO: 467777 - RNA, 25 nt, Human
ugggauuacagacacacgccgccau

SEQ ID NO: 467778 - RNA, 21 nt, Human
ugggauuacagcaugaaccac

SEQ ID NO: 467779 - RNA, 23 nt, Human
ugggauuacagcaugaaccacug

SEQ ID NO: 467780 - RNA, 25 nt, Human
ugggauuacagcaugaaccacugcg

SEQ ID NO: 467781 - RNA, 21 nt, Human
ugggauuacaggcgcccgcca

SEQ ID NO: 467782 - RNA, 22 nt, Human
ugggauuacaggcgcccgccac

SEQ ID NO: 467783 - RNA, 22 nt, Human
ugggauuacaggcgcccgccac

SEQ ID NO: 467784 - RNA, 24 nt, Human
ugggauuacaggcgcccgccacua

SEQ ID NO: 467785 - RNA, 21 nt, Human
ugggcaccuggugccaggccc

SEQ ID NO: 467786 - RNA, 18 nt, Human
uggggaagggaguugcuc

SEQ ID NO: 467787 - RNA, 24 nt, Human
ugggguuucaccguguuggccagg

SEQ ID NO: 467788 - RNA, 24 nt, Human
ugucacagaggcccugagcugagg

SEQ ID NO: 467789 - RNA, 19 nt, Human
uguucucaaacucccgacc

SEQ ID NO: 467790 - RNA, 22 nt, Human
uguuggccaggcuguucucaaa

SEQ ID NO: 467791 - RNA, 24 nt, Human
uuaguagagacaggguuucaccau

SEQ ID NO: 467792 - RNA, 18 nt, Human
uuaguagagaugggguuu

SEQ ID NO: 467793 - RNA, 22 nt, Human
uuaguagagaugggguuucacc

SEQ ID NO: 467794 - RNA, 24 nt, Human
uuaguagagaugggguuucaccgu

SEQ ID NO: 467795 - RNA, 18 nt, Human
uucaagccauucuucugc

SEQ ID NO: 467796 - RNA, 21 nt, Human
uucaagccauucuucugccuc

SEQ ID NO: 467797 - RNA, 21 nt, Human
uucaagugauucuccugccuc

SEQ ID NO: 467798 - RNA, 23 nt, Human
uucaagugauucuccugccucag

SEQ ID NO: 467799 - RNA, 24 nt, Human
uucaagugauucuccugccucagc

SEQ ID NO: 467800 - RNA, 21 nt, Human
uucacccgccucagccuccca

SEQ ID NO: 467801 - RNA, 24 nt, Human
uugcccagcuggucucgaacuccu

SEQ ID NO: 467802 - RNA, 23 nt, Human
uuguauuuuuaguagagaugggg

SEQ ID NO: 467803 - RNA, 18 nt, Human
uuucaccauguugcccag

SEQ ID NO: 467804 - RNA, 21 nt, Human
uuucaccguguuggccaggcu

SEQ ID NO: 467805 - RNA, 21 nt, Human
uuuucaguaagucaaacacua

SEQ ID NO: 467806 - RNA, 19 nt, Human
uuuuguauuuuuaguagag

SEQ ID NO: 467807 - RNA, 20 nt, Human
uuuuguauuuuuaguagaga

SEQ ID NO: 467808 - RNA, 24 nt, Human
uuuuuaguagagacaggguuucac

SEQ ID NO: 467809 - RNA, 24 nt, Human
uuuuuaguagagaugggguuucac

SEQ ID NO: 467810 - RNA, 20 nt, Human
uuuuuguauuuuuaguagag

SEQ ID NO: 467811 - RNA, 20 nt, Human
uuuuuuuuuuugagacagag

SEQ ID NO: 467812 - RNA, 26 nt, Human
uuuuuuuuuuuugagacagagucuca

SEQ ID NO: 467813 - RNA, 18 nt, Human
uuuuuuuuuuuuuuuuug

SEQ ID NO: 467814 - RNA, 26 nt, Human
aaaagaaacccuacaacccuaaaacc

SEQ ID NO: 467815 - RNA, 24 nt, Human
aaagugcugggauuacaggcguga

SEQ ID NO: 467816 - RNA, 18 nt, Human
aacccuaaaacccuaaaa

SEQ ID NO: 467817 - RNA, 22 nt, Human
aacccuacaacccuaaaacccu

SEQ ID NO: 467818 - RNA, 19 nt, Human
aacuccuucaacuacguga

SEQ ID NO: 467819 - RNA, 23 nt, Human
aagaaacccuacaacccuaaaac

SEQ ID NO: 467820 - RNA, 20 nt, Human
aagacaguaaaaccuuuugg

SEQ ID NO: 467821 - RNA, 24 nt, Human
aagccaaggaauugcuuuaaacac

SEQ ID NO: 467822 - RNA, 19 nt, Human
aagugcugggauuacaggc

SEQ ID NO: 467823 - RNA, 19 nt, Human
aagugcugggauuacaggc

SEQ ID NO: 467824 - RNA, 26 nt, Human
aagugcugggauuacaggcgugagcc

SEQ ID NO: 467825 - RNA, 23 nt, Human
aaguuugagauagaagauugucu

SEQ ID NO: 467826 - RNA, 23 nt, Human
accccgcaggacagaauuacuuc

SEQ ID NO: 467827 - RNA, 20 nt, Human
acccuaaaacccuaaaacca

SEQ ID NO: 467828 - RNA, 19 nt, Human
acccuacaacccuaaaacc

SEQ ID NO: 467829 - RNA, 21 nt, Human
acccuacaacccuaaaacccu

SEQ ID NO: 467830 - RNA, 22 nt, Human
acccuacaacccuaaaacccua

SEQ ID NO: 467831 - RNA, 22 nt, Human
acccuacaacccuaaaacccuu

SEQ ID NO: 467832 - RNA, 22 nt, Human
accgcaccuggccucuaugcuc

SEQ ID NO: 467833 - RNA, 23 nt, Human
acgcugcauauuaaacuguaggc

SEQ ID NO: 467834 - RNA, 18 nt, Human
acgggguuucaucauguu

SEQ ID NO: 467835 - RNA, 23 nt, Human
acgggguuucaucauguuggcca

SEQ ID NO: 467836 - RNA, 24 nt, Human
acgggguuucaucauguuggccag

SEQ ID NO: 467837 - RNA, 19 nt, Human
acuacaggcgugugccacc

SEQ ID NO: 467838 - RNA, 21 nt, Human
agaaaaaccaucuggaaucag

SEQ ID NO: 467839 - RNA, 22 nt, Human
agaguucuaccugaaagaccuu

SEQ ID NO: 467840 - RNA, 21 nt, Human
agcaaugcugccucagccucc

SEQ ID NO: 467841 - RNA, 20 nt, Human
agccaccgcaccuggccucu

SEQ ID NO: 467842 - RNA, 21 nt, Human
agccucucccuggcuuguauu

SEQ ID NO: 467843 - RNA, 22 nt, Human
agcugggacuacaggcgugugc

SEQ ID NO: 467844 - RNA, 22 nt, Human
aggaguggagugggguuggggc

SEQ ID NO: 467845 - RNA, 24 nt, Human
aggcgugugccaccacacccggcu

SEQ ID NO: 467846 - RNA, 25 nt, Human
aggcuggagugcaguggugugaucu

SEQ ID NO: 467847 - RNA, 23 nt, Human
aguagcugggacuacaggcgugu

SEQ ID NO: 467848 - RNA, 23 nt, Human
agugcaguggugugaucuuggcu

SEQ ID NO: 467849 - RNA, 24 nt, Human
agugcaguggugugaucuuggcuc

SEQ ID NO: 467850 - RNA, 18 nt, Human
agugcugggauuacaggc

SEQ ID NO: 467851 - RNA, 20 nt, Human
aguucccugauccuuugacc

SEQ ID NO: 467852 - RNA, 20 nt, Human
aguuuuucuuuuuuuuuuuu

SEQ ID NO: 467853 - RNA, 27 nt, Human
aucaguuuuucuuuuuuuuuuuuuuuu

SEQ ID NO: 467854 - RNA, 24 nt, Human
caaagugcugggauuacaggcgug

SEQ ID NO: 467855 - RNA, 20 nt, Human
caaccuccaccuccuggguu

SEQ ID NO: 467856 - RNA, 23 nt, Human
caaccuccaccuccuggguucaa

SEQ ID NO: 467857 - RNA, 19 nt, Human
caaggaacauuuguaggcu

SEQ ID NO: 467858 - RNA, 19 nt, Human
caagugacacgccugcccc

SEQ ID NO: 467859 - RNA, 19 nt, Human
caaugaaacauaccagaac

SEQ ID NO: 467860 - RNA, 24 nt, Human
cacagacccucgccaaagucuccc

SEQ ID NO: 467861 - RNA, 24 nt, Human
caccacacccggcuaauuuuugua

SEQ ID NO: 467862 - RNA, 22 nt, Human
cacgccugccucaaccucccaa

SEQ ID NO: 467863 - RNA, 21 nt, Human
cacugcaaccuccaccuccug

SEQ ID NO: 467864 - RNA, 23 nt, Human
cacugcaaccuccaccuccuggg

SEQ ID NO: 467865 - RNA, 26 nt, Human
cagacaguguaaacaucaguuaaaga

SEQ ID NO: 467866 - RNA, 25 nt, Human
cagcugacaacaaauaucagcggaa

SEQ ID NO: 467867 - RNA, 23 nt, Human
cagguggagaaauuguccuacaa

SEQ ID NO: 467868 - RNA, 25 nt, Human
caguagcugggacuacaggcgugug

SEQ ID NO: 467869 - RNA, 19 nt, Human
cauaggcauuacuagggac

SEQ ID NO: 467870 - RNA, 19 nt, Human
cauauuaaguuuugcuuca

SEQ ID NO: 467871 - RNA, 24 nt, Human
caucauguuggccaggcuggucuc

SEQ ID NO: 467872 - RNA, 27 nt, Human
caucauguuggccaggcuggucucgaa

SEQ ID NO: 467873 - RNA, 18 nt, Human
cauguuggccaggcuggu

SEQ ID NO: 467874 - RNA, 21 nt, Human
cauguuggccaggcuggucuc

SEQ ID NO: 467875 - RNA, 22 nt, Human
cauguuggccaggcuggucucg

SEQ ID NO: 467876 - RNA, 24 nt, Human
cauguuggccaggcuggucucgaa

SEQ ID NO: 467877 - RNA, 22 nt, Human
ccaaagugcugggauuacaggc

SEQ ID NO: 467878 - RNA, 22 nt, Human
ccaaagugcugggauuacaggc

SEQ ID NO: 467879 - RNA, 24 nt, Human
ccaaagugcugggauuacaggcgu

SEQ ID NO: 467880 - RNA, 20 nt, Human
ccaccacacccggcuaauuu

SEQ ID NO: 467881 - RNA, 22 nt, Human
ccaucuccgaugccuugcugac

SEQ ID NO: 467882 - RNA, 19 nt, Human
cccacaaggaacauuugua

SEQ ID NO: 467883 - RNA, 19 nt, Human
cccaggcuggagugcagug

SEQ ID NO: 467884 - RNA, 23 nt, Human
cccaguagcugggacuacaggcg

SEQ ID NO: 467885 - RNA, 19 nt, Human
cccuaccucuccaaaagaa

SEQ ID NO: 467886 - RNA, 24 nt, Human
cccucugucgcccaggcuggagug

SEQ ID NO: 467887 - RNA, 22 nt, Human
ccuaaaaccaauccaaaucaug

SEQ ID NO: 467888 - RNA, 25 nt, Human
ccuaaaacccuaaaaccaauccaaa

SEQ ID NO: 467889 - RNA, 19 nt, Human
ccuccaccuccuggguuca

SEQ ID NO: 467890 - RNA, 23 nt, Human
ccucuccaaaagaaacccuacaa

SEQ ID NO: 467891 - RNA, 25 nt, Human
ccucugucgcccaggcuggagugca

SEQ ID NO: 467892 - RNA, 21 nt, Human
ccuggccucaagugacacgcc

SEQ ID NO: 467893 - RNA, 22 nt, Human
ccuggccucaagugacacgccu

SEQ ID NO: 467894 - RNA, 23 nt, Human
ccuggccucaagugacacgccug

SEQ ID NO: 467895 - RNA, 23 nt, Human
cuaaaacccuaaaaccaauccaa

SEQ ID NO: 467896 - RNA, 20 nt, Human
cuaggcgcagcacccgcgcc

SEQ ID NO: 467897 - RNA, 24 nt, Human
cucacugcaaccuccaccuccugg

SEQ ID NO: 467898 - RNA, 26 nt, Human
cucacugcaaccuccaccuccugggu

SEQ ID NO: 467899 - RNA, 24 nt, Human
cucagccuccccaguagcugggac

SEQ ID NO: 467900 - RNA, 24 nt, Human
cuccaaaagaaacccuacaacccc

SEQ ID NO: 467901 - RNA, 24 nt, Human
cucccucugucgcccaggcuggag

SEQ ID NO: 467902 - RNA, 18 nt, Human
cugcaaccuccaccuccu

SEQ ID NO: 467903 - RNA, 24 nt, Human
cugcaaccuccaccuccuggguuc

SEQ ID NO: 467904 - RNA, 24 nt, Human
cugccucaaccucccaaagugcug

SEQ ID NO: 467905 - RNA, 24 nt, Human
cugcuccugacuacuauaaggacg

SEQ ID NO: 467906 - RNA, 23 nt, Human
gaaacccuacaacccuaaaaccc

SEQ ID NO: 467907 - RNA, 19 nt, Human
gaaagacagcuuuaagaca

SEQ ID NO: 467908 - RNA, 22 nt, Human
gacaagugcuaugaauauuccu

SEQ ID NO: 467909 - RNA, 22 nt, Human
gagaacauagcaauuagccccc

SEQ ID NO: 467910 - RNA, 18 nt, Human
gagacgggguuucaucau

SEQ ID NO: 467911 - RNA, 24 nt, Human
gagacgggguuucaucauguuggc

SEQ ID NO: 467912 - RNA, 18 nt, Human
gauuacaggcgugagcca

SEQ ID NO: 467913 - RNA, 22 nt, Human
gauuacaggcgugagccaccgc

SEQ ID NO: 467914 - RNA, 23 nt, Human
gauuacaggcgugagccaccgca

SEQ ID NO: 467915 - RNA, 20 nt, Human
gcccaggcuggagugcagug

SEQ ID NO: 467916 - RNA, 23 nt, Human
gcccaggcuggagugcaguggug

SEQ ID NO: 467917 - RNA, 24 nt, Human
gcccaggcuggagugcaguggugu

SEQ ID NO: 467918 - RNA, 24 nt, Human
gcugccucagccuccccaguagcu

SEQ ID NO: 467919 - RNA, 23 nt, Human
gcuggucucgaacuccuggccuc

SEQ ID NO: 467920 - RNA, 19 nt, Human
ggacuacaggcgugugcca

SEQ ID NO: 467921 - RNA, 19 nt, Human
ggagacuggcauagaaagu

SEQ ID NO: 467922 - RNA, 24 nt, Human
ggccucaagugacacgccugccuc

SEQ ID NO: 467923 - RNA, 22 nt, Human
ggcuggagugcaguggugugau

SEQ ID NO: 467924 - RNA, 24 nt, Human
ggcuggucucgaacuccuggccuc

SEQ ID NO: 467925 - RNA, 19 nt, Human
gggcuuaggagagagcaau

SEQ ID NO: 467926 - RNA, 26 nt, Human
gggcuuaggagagagcaauguggcuc

SEQ ID NO: 467927 - RNA, 18 nt, Human
gggguuggggcuuaggag

SEQ ID NO: 467928 - RNA, 23 nt, Human
gggguuucaucauguuggccagg

SEQ ID NO: 467929 - RNA, 22 nt, Human
ggguuucaucauguuggccagg

SEQ ID NO: 467930 - RNA, 22 nt, Human
gguuuauucaguucucugaugg

SEQ ID NO: 467931 - RNA, 23 nt, Human
guagagacgggguuucaucaugu

SEQ ID NO: 467932 - RNA, 18 nt, Human
guagcugggacuacaggc

SEQ ID NO: 467933 - RNA, 24 nt, Human
guaguagagacgggguuucaucau

SEQ ID NO: 467934 - RNA, 21 nt, Human
gugaaucuggguucccagagu

SEQ ID NO: 467935 - RNA, 24 nt, Human
gugacaagugcuaugaauauuccu

SEQ ID NO: 467936 - RNA, 19 nt, Human
guggagaaauuguccuaca

SEQ ID NO: 467937 - RNA, 27 nt, Human
guugccuucuauuugugacaagugcua

SEQ ID NO: 467938 - RNA, 20 nt, Human
uaaaacccuaaaaccaaucc

SEQ ID NO: 467939 - RNA, 22 nt, Human
uaaaacccuaaaaccaauccaa

SEQ ID NO: 467940 - RNA, 19 nt, Human
uaaacacaagaugaaaaua

SEQ ID NO: 467941 - RNA, 20 nt, Human
uaaacuguaggcagcugaca

SEQ ID NO: 467942 - RNA, 24 nt, Human
uaauuuuuguauuuguaguagaga

SEQ ID NO: 467943 - RNA, 22 nt, Human
uacaggcgugagccaccgcacc

SEQ ID NO: 467944 - RNA, 23 nt, Human
uacaggcgugagccaccgcaccu

SEQ ID NO: 467945 - RNA, 23 nt, Human
uacaggcgugugccaccacaccc

SEQ ID NO: 467946 - RNA, 22 nt, Human
uaccugaaagaccuugcaggug

SEQ ID NO: 467947 - RNA, 22 nt, Human
uagaagaaauagguuuucagug

SEQ ID NO: 467948 - RNA, 19 nt, Human
uagcuguggagaaguccuu

SEQ ID NO: 467949 - RNA, 18 nt, Human
uagguuucaccaucaguu

SEQ ID NO: 467950 - RNA, 23 nt, Human
uaguagagacgggguuucaucau

SEQ ID NO: 467951 - RNA, 24 nt, Human
uaguagagacgggguuucaucaug

SEQ ID NO: 467952 - RNA, 24 nt, Human
uaguucccugauccuuugaccucc

SEQ ID NO: 467953 - RNA, 23 nt, Human
ucaaaagccugauuuuugcuggc

SEQ ID NO: 467954 - RNA, 23 nt, Human
ucacugcaaccuccaccuccugg

SEQ ID NO: 467955 - RNA, 24 nt, Human
ucacugcaaccuccaccuccuggg

SEQ ID NO: 467956 - RNA, 25 nt, Human
ucacugcaaccuccaccuccugggu

SEQ ID NO: 467957 - RNA, 27 nt, Human
ucacugcaaccuccaccuccuggguuc

SEQ ID NO: 467958 - RNA, 22 nt, Human
ucagaaagacagcuuuaagaca

SEQ ID NO: 467959 - RNA, 20 nt, Human
ucagccuccccaguagcugg

SEQ ID NO: 467960 - RNA, 18 nt, Human
ucaguguguacgacugaa

SEQ ID NO: 467961 - RNA, 24 nt, Human
ucccaaagugcugggauuacaggc

SEQ ID NO: 467962 - RNA, 21 nt, Human
ucccagaguguggagcaagug

SEQ ID NO: 467963 - RNA, 22 nt, Human
uccccaguagcugggacuacag

SEQ ID NO: 467964 - RNA, 24 nt, Human
uccccaguagcugggacuacaggc

SEQ ID NO: 467965 - RNA, 20 nt, Human
ucccucugucgcccaggcug

SEQ ID NO: 467966 - RNA, 24 nt, Human
ucccucugucgcccaggcuggagu

SEQ ID NO: 467967 - RNA, 18 nt, Human
uccuggguucaagcaaug

SEQ ID NO: 467968 - RNA, 24 nt, Human
ucgcccaggcuggagugcaguggu

SEQ ID NO: 467969 - RNA, 21 nt, Human
ucuaccugaaagaccuugcag

SEQ ID NO: 467970 - RNA, 21 nt, Human
ucuccaaaagaaacccuacaa

SEQ ID NO: 467971 - RNA, 23 nt, Human
ucucccucugucgcccaggcugg

SEQ ID NO: 467972 - RNA, 24 nt, Human
ucucccucugucgcccaggcugga

SEQ ID NO: 467973 - RNA, 21 nt, Human
ucucgaacuccuggccucaag

SEQ ID NO: 467974 - RNA, 19 nt, Human
ucugcaaaaccaggauggc

SEQ ID NO: 467975 - RNA, 18 nt, Human
ucuguacaucuugcuggu

SEQ ID NO: 467976 - RNA, 24 nt, Human
ucugucgcccaggcuggagugcag

SEQ ID NO: 467977 - RNA, 24 nt, Human
ugaaguuugagauagaagauuguc

SEQ ID NO: 467978 - RNA, 25 nt, Human
ugacagggcagacuggugaaucugg

SEQ ID NO: 467979 - RNA, 21 nt, Human
ugacauggguagcuguggguc

SEQ ID NO: 467980 - RNA, 23 nt, Human
ugaggcaaaaaauuaaaauuguu

SEQ ID NO: 467981 - RNA, 22 nt, Human
ugcaguggugugaucuuggcuc

SEQ ID NO: 467982 - RNA, 19 nt, Human
ugcaucagagaauggccca

SEQ ID NO: 467983 - RNA, 24 nt, Human
ugccucaaccucccaaagugcugg

SEQ ID NO: 467984 - RNA, 21 nt, Human
ugccucagccuccccaguagc

SEQ ID NO: 467985 - RNA, 24 nt, Human
ugccucagccuccccaguagcugg

SEQ ID NO: 467986 - RNA, 24 nt, Human
ugcugggauuacaggcgugagcca

SEQ ID NO: 467987 - RNA, 21 nt, Human
uggaaucagccccaucauguc

SEQ ID NO: 467988 - RNA, 20 nt, Human
uggaccccuggccacaggag

SEQ ID NO: 467989 - RNA, 19 nt, Human
uggagugcaguggugugau

SEQ ID NO: 467990 - RNA, 23 nt, Human
uggagugcaguggugugaucuug

SEQ ID NO: 467991 - RNA, 24 nt, Human
uggagugcaguggugugaucuugg

SEQ ID NO: 467992 - RNA, 23 nt, Human
uggagugggguuggggcuuagga

SEQ ID NO: 467993 - RNA, 19 nt, Human
uggcagcuguuuugugaac

SEQ ID NO: 467994 - RNA, 24 nt, Human
uggccaggcuggucucgaacuccu

SEQ ID NO: 467995 - RNA, 23 nt, Human
uggcccagggggaacgugcauga

SEQ ID NO: 467996 - RNA, 24 nt, Human
uggccucaagugacacgccugccu

SEQ ID NO: 467997 - RNA, 21 nt, Human
uggccucuaugcucgaauuuc

SEQ ID NO: 467998 - RNA, 18 nt, Human
ugggacuacaggcgugug

SEQ ID NO: 467999 - RNA, 21 nt, Human
ugggacuacaggcgugugcca

SEQ ID NO: 468000 - RNA, 22 nt, Human
ugggacuacaggcgugugccac

SEQ ID NO: 468001 - RNA, 24 nt, Human
ugggacuacaggcgugugccacca

SEQ ID NO: 468002 - RNA, 18 nt, Human
ugggauuacaggcgugag

SEQ ID NO: 468003 - RNA, 19 nt, Human
ugggauuacaggcgugagc

SEQ ID NO: 468004 - RNA, 21 nt, Human
ugggauuacaggcgugagcca

SEQ ID NO: 468005 - RNA, 22 nt, Human
ugggauuacaggcgugagccac

SEQ ID NO: 468006 - RNA, 23 nt, Human
ugggauuacaggcgugagccacc

SEQ ID NO: 468007 - RNA, 24 nt, Human
ugggauuacaggcgugagccaccg

SEQ ID NO: 468008 - RNA, 26 nt, Human
uggguagcugugggucaaccaggaac

SEQ ID NO: 468009 - RNA, 23 nt, Human
uggugaaucuggguucccagagu

SEQ ID NO: 468010 - RNA, 23 nt, Human
uguaaacacaggcguucuguaca

SEQ ID NO: 468011 - RNA, 19 nt, Human
uguaauacaagccucuccc

SEQ ID NO: 468012 - RNA, 28 nt, Human
uuaagacaguaaaaccuuuuggcaaugg

SEQ ID NO: 468013 - RNA, 24 nt, Human
uuacuccuaacaaaguuugagauu

SEQ ID NO: 468014 - RNA, 23 nt, Human
uuauucugcuaguuccauaaaaa

SEQ ID NO: 468015 - RNA, 19 nt, Human
uucacaaaauuuaugaggc

SEQ ID NO: 468016 - RNA, 23 nt, Human
uuccuuuuuaagaagugauacaa

SEQ ID NO: 468017 - RNA, 23 nt, Human
uuucaucauguuggccaggcugu

SEQ ID NO: 468018 - RNA, 24 nt, Human
uuuguaguagagacgggguuucau

SEQ ID NO: 468019 - RNA, 20 nt, Human
uuuuuguauuuguaguagag

SEQ ID NO: 468020 - RNA, 23 nt, Human
uuuuuguauuuguaguagagacg

SEQ ID NO: 468021 - RNA, 23 nt, Human
uuuuuuuuuuuuuuuugcauagg

SEQ ID NO: 468022 - RNA, 18 nt, Human
uuuuuuuuuuuuuuuuug

SEQ ID NO: 468023 - RNA, 24 nt, Human
aaaaaaaaaaaaacacaaaaacca

SEQ ID NO: 468024 - RNA, 28 nt, Human
aaaaaaaaaaaacacaaaaaccacaggg

SEQ ID NO: 468025 - RNA, 25 nt, Human
aaaaaaaaaaacacaaaaaccacag

SEQ ID NO: 468026 - RNA, 26 nt, Human
aaaaaaaaaaacacaaaaaccacagg

SEQ ID NO: 468027 - RNA, 21 nt, Human
aaaaaaaacacaaaaaccaca

SEQ ID NO: 468028 - RNA, 20 nt, Human
aaaaaaacacaaaaaccaca

SEQ ID NO: 468029 - RNA, 26 nt, Human
aaaaaaacacaaaaaccacaggggua

SEQ ID NO: 468030 - RNA, 22 nt, Human
aaaaaacacauagcccccucac

SEQ ID NO: 468031 - RNA, 22 nt, Human
aaaaagaaaaaaaaaaaaacac

SEQ ID NO: 468032 - RNA, 26 nt, Human
aaaagaaaaaaaaaaaaacacaaaaa

SEQ ID NO: 468033 - RNA, 24 nt, Human
aaacaaaucaaacucaaugcccuc

SEQ ID NO: 468034 - RNA, 20 nt, Human
aaacacauagcccccucaca

SEQ ID NO: 468035 - RNA, 21 nt, Human
aaccacagggguaaggaaaaa

SEQ ID NO: 468036 - RNA, 20 nt, Human
aagcagaaucaugauucgug

SEQ ID NO: 468037 - RNA, 21 nt, Human
aagcagaaucaugauucgugc

SEQ ID NO: 468038 - RNA, 20 nt, Human
aaugucugccuaagcuaaca

SEQ ID NO: 468039 - RNA, 19 nt, Human
accaaagggaaaacaaauc

SEQ ID NO: 468040 - RNA, 18 nt, Human
accgaauccuucagcagc

SEQ ID NO: 468041 - RNA, 20 nt, Human
agcagccagaggcccccgaa

SEQ ID NO: 468042 - RNA, 18 nt, Human
agccagaggcccccgaac

SEQ ID NO: 468043 - RNA, 23 nt, Human
agccucuccugggcuggggagag

SEQ ID NO: 468044 - RNA, 18 nt, Human
aggaaaaacuuguaggug

SEQ ID NO: 468045 - RNA, 22 nt, Human
agggagaaaaagaguucucuac

SEQ ID NO: 468046 - RNA, 20 nt, Human
augagccaucuuugaauuag

SEQ ID NO: 468047 - RNA, 20 nt, Human
caacaaaacugcccagaaga

SEQ ID NO: 468048 - RNA, 19 nt, Human
caagucccacgacgcaggg

SEQ ID NO: 468049 - RNA, 20 nt, Human
cacuggaagagcaaaccgca

SEQ ID NO: 468050 - RNA, 22 nt, Human
cagccuaacagcacagcccucc

SEQ ID NO: 468051 - RNA, 22 nt, Human
caucccccaaaagccacacaac

SEQ ID NO: 468052 - RNA, 18 nt, Human
ccagaagagaugguucau

SEQ ID NO: 468053 - RNA, 24 nt, Human
ccagaccaaagggaaaacaaauca

SEQ ID NO: 468054 - RNA, 19 nt, Human
cccagaccaaagggaaaac

SEQ ID NO: 468055 - RNA, 20 nt, Human
ccccaaaagccacacaaccc

SEQ ID NO: 468056 - RNA, 23 nt, Human
cccccaaaagccacacaacccag

SEQ ID NO: 468057 - RNA, 21 nt, Human
cccccgaacacuggaagagca

SEQ ID NO: 468058 - RNA, 24 nt, Human
cccccucacacgcaucccccaaaa

SEQ ID NO: 468059 - RNA, 22 nt, Human
ccccucacacgcaucccccaaa

SEQ ID NO: 468060 - RNA, 25 nt, Human
ccccucacacgcaucccccaaaagc

SEQ ID NO: 468061 - RNA, 19 nt, Human
ccuauaaaaagaugccagg

SEQ ID NO: 468062 - RNA, 24 nt, Human
ccucacacgcaucccccaaaagcc

SEQ ID NO: 468063 - RNA, 21 nt, Human
cgcaaccuuccagauucuuca

SEQ ID NO: 468064 - RNA, 19 nt, Human
cgccggggcgcccgaguag

SEQ ID NO: 468065 - RNA, 18 nt, Human
cgugcggaaccugccucc

SEQ ID NO: 468066 - RNA, 22 nt, Human
cugcggcuccgcagccucuccu

SEQ ID NO: 468067 - RNA, 23 nt, Human
cugcggcuccgcagccucuccug

SEQ ID NO: 468068 - RNA, 18 nt, Human
cugggcuggggagaggug

SEQ ID NO: 468069 - RNA, 24 nt, Human
cuugcagucgcaggcugaucugag

SEQ ID NO: 468070 - RNA, 19 nt, Human
gaacacuggaagagcaaac

SEQ ID NO: 468071 - RNA, 25 nt, Human
gaauccuucagcagccagaggcccc

SEQ ID NO: 468072 - RNA, 18 nt, Human
ggaaaacaaaucaaacuc

SEQ ID NO: 468073 - RNA, 21 nt, Human
gguaaggaaaaacuuguaggu

SEQ ID NO: 468074 - RNA, 22 nt, Human
uaaaaaacacauagcccccuca

SEQ ID NO: 468075 - RNA, 21 nt, Human
uaaaaagaugccaggucaaaa

SEQ ID NO: 468076 - RNA, 19 nt, Human
uaagcuaacagaaagcaga

SEQ ID NO: 468077 - RNA, 22 nt, Human
uaagcuaacagaaagcagaauc

SEQ ID NO: 468078 - RNA, 22 nt, Human
uaaggaaaaacuuguaggugaa

SEQ ID NO: 468079 - RNA, 23 nt, Human
uauggaaaaagaaaaaaaaaaaa

SEQ ID NO: 468080 - RNA, 21 nt, Human
uccaccacgcaagcgcaggcu

SEQ ID NO: 468081 - RNA, 22 nt, Human
uccacugccuacaaaggccauu

SEQ ID NO: 468082 - RNA, 19 nt, Human
uccgcagccucuccugggc

SEQ ID NO: 468083 - RNA, 19 nt, Human
uccugggcuggggagaggu

SEQ ID NO: 468084 - RNA, 23 nt, Human
uccuugcaaguuuuccacugccu

SEQ ID NO: 468085 - RNA, 22 nt, Human
ucgugcggaaccugccucccgc

SEQ ID NO: 468086 - RNA, 18 nt, Human
ugaaaucaaagagaaacc

SEQ ID NO: 468087 - RNA, 19 nt, Human
ugccuaagcuaacagaaag

SEQ ID NO: 468088 - RNA, 25 nt, Human
uggaaaaagaaaaaaaaaaaaacac

SEQ ID NO: 468089 - RNA, 21 nt, Human
ugggcuggggagagguggcgg

SEQ ID NO: 468090 - RNA, 18 nt, Human
uucaacaaaacugcccag

SEQ ID NO: 468091 - RNA, 26 nt, Human
uuccuauggaaaaagaaaaaaaaaaa

SEQ ID NO: 468092 - RNA, 18 nt, Human
uuuuuuuuuuuuuuuuug

SEQ ID NO: 468093 - RNA, 25 nt, Human
aaaacccugagcccuuacuggaggg

SEQ ID NO: 468094 - RNA, 18 nt, Human
aaaauucagucucaccac

SEQ ID NO: 468095 - RNA, 25 nt, Human
aaaauucagucucaccacaagaagg

SEQ ID NO: 468096 - RNA, 20 nt, Human
aaacagacucucuaaccccc

SEQ ID NO: 468097 - RNA, 22 nt, Human
aaacagcaccaaacugcauuca

SEQ ID NO: 468098 - RNA, 18 nt, Human
aaagacacccagcuugaa

SEQ ID NO: 468099 - RNA, 19 nt, Human
aaagacacccagcuugaag

SEQ ID NO: 468100 - RNA, 21 nt, Human
aaagaggcccccugaaggccc

SEQ ID NO: 468101 - RNA, 20 nt, Human
aaagcaaaacccugagcccu

SEQ ID NO: 468102 - RNA, 18 nt, Human
aaagccacauggaucuag

SEQ ID NO: 468103 - RNA, 21 nt, Human
aaauugauacaaacuccucua

SEQ ID NO: 468104 - RNA, 23 nt, Human
aacacaaaacacccaaccagcuc

SEQ ID NO: 468105 - RNA, 20 nt, Human
aagcaacucagggcauccca

SEQ ID NO: 468106 - RNA, 24 nt, Human
aagcaacucagggcaucccaagag

SEQ ID NO: 468107 - RNA, 27 nt, Human
aagcagcuccacagaguaccgccccca

SEQ ID NO: 468108 - RNA, 19 nt, Human
aauacaguaugacaagggc

SEQ ID NO: 468109 - RNA, 21 nt, Human
aaugaaaagaggcccccugaa

SEQ ID NO: 468110 - RNA, 24 nt, Human
acacccaacagggaugcacucaac

SEQ ID NO: 468111 - RNA, 22 nt, Human
acacuagaaaaggacggcuaga

SEQ ID NO: 468112 - RNA, 23 nt, Human
acagcaccaaacugcauucauac

SEQ ID NO: 468113 - RNA, 20 nt, Human
acaggcaugccacaugaccc

SEQ ID NO: 468114 - RNA, 21 nt, Human
acauacuguaccuuuccaggc

SEQ ID NO: 468115 - RNA, 20 nt, Human
acaugacccaguugaggugg

SEQ ID NO: 468116 - RNA, 22 nt, Human
acuggaggagaaggggaggggg

SEQ ID NO: 468117 - RNA, 24 nt, Human
agaaaaggacggcuagaaagagga

SEQ ID NO: 468118 - RNA, 23 nt, Human
agaaggaaggggagacuaaaagc

SEQ ID NO: 468119 - RNA, 19 nt, Human
agacuccaggcuucagccu

SEQ ID NO: 468120 - RNA, 19 nt, Human
agaguaccgcccccaaggc

SEQ ID NO: 468121 - RNA, 19 nt, Human
agaguggcaagguacuaac

SEQ ID NO: 468122 - RNA, 18 nt, Human
agcaaggcugucaacuac

SEQ ID NO: 468123 - RNA, 19 nt, Human
agcagggugugaaauacaa

SEQ ID NO: 468124 - RNA, 21 nt, Human
aggaaagguacaaaaaaauau

SEQ ID NO: 468125 - RNA, 18 nt, Human
aggaguaggcaagaaggg

SEQ ID NO: 468126 - RNA, 21 nt, Human
aggcagggggcuggggagcag

SEQ ID NO: 468127 - RNA, 22 nt, Human
aggcagggggcuggggagcagg

SEQ ID NO: 468128 - RNA, 18 nt, Human
aggccuggggcuauaggg

SEQ ID NO: 468129 - RNA, 18 nt, Human
aggcuucagccugggagc

SEQ ID NO: 468130 - RNA, 24 nt, Human
agggaagugggggcagacuccagg

SEQ ID NO: 468131 - RNA, 23 nt, Human
agggaugcacucaacuuguuggu

SEQ ID NO: 468132 - RNA, 19 nt, Human
aggggagggggaucauagg

SEQ ID NO: 468133 - RNA, 18 nt, Human
agggucagggagggcagc

SEQ ID NO: 468134 - RNA, 21 nt, Human
aggugccgaagacccuaggcu

SEQ ID NO: 468135 - RNA, 19 nt, Human
aguagaagggggcuauggu

SEQ ID NO: 468136 - RNA, 23 nt, Human
auaggguacccauuucuccccag

SEQ ID NO: 468137 - RNA, 22 nt, Human
caaaacagacucucuaaccccc

SEQ ID NO: 468138 - RNA, 18 nt, Human
caacacaaaacacccaac

SEQ ID NO: 468139 - RNA, 22 nt, Human
caaccaagcaggugagagauug

SEQ ID NO: 468140 - RNA, 21 nt, Human
caagaggcuguugcugguguc

SEQ ID NO: 468141 - RNA, 23 nt, Human
cacaagaaggggaggcugguggc

SEQ ID NO: 468142 - RNA, 21 nt, Human
caccaaacugcauucauacac

SEQ ID NO: 468143 - RNA, 22 nt, Human
cacccaacagggaugcacucaa

SEQ ID NO: 468144 - RNA, 24 nt, Human
cacguacacagucaauacaguaug

SEQ ID NO: 468145 - RNA, 23 nt, Human
cagaaaacaucaaucaaaacaga

SEQ ID NO: 468146 - RNA, 24 nt, Human
cagcaaccuagaaagaaagagagg

SEQ ID NO: 468147 - RNA, 21 nt, Human
cagcagcccaggcugcacagg

SEQ ID NO: 468148 - RNA, 22 nt, Human
caggcauacucuaaaacagcac

SEQ ID NO: 468149 - RNA, 21 nt, Human
cccacauaccccccaugaggc

SEQ ID NO: 468150 - RNA, 22 nt, Human
ccccagggauucagguucccuc

SEQ ID NO: 468151 - RNA, 20 nt, Human
ccccugaaggcccugaaccu

SEQ ID NO: 468152 - RNA, 18 nt, Human
cccucugacaguuuuggc

SEQ ID NO: 468153 - RNA, 21 nt, Human
cccugcuggggcuagacuggc

SEQ ID NO: 468154 - RNA, 18 nt, Human
cggccaggaugguagggc

SEQ ID NO: 468155 - RNA, 19 nt, Human
cuauaacuuaaacucuucc

SEQ ID NO: 468156 - RNA, 19 nt, Human
cucaacacaaaacacccaa

SEQ ID NO: 468157 - RNA, 27 nt, Human
cucccucuaacucacgucucacagucc

SEQ ID NO: 468158 - RNA, 26 nt, Human
cucccuuggugcccugcuccucaccg

SEQ ID NO: 468159 - RNA, 18 nt, Human
cucuucccccaccagaag

SEQ ID NO: 468160 - RNA, 23 nt, Human
cucuucuacauacuguaccuuuc

SEQ ID NO: 468161 - RNA, 22 nt, Human
cugcucccugcagcuucucaac

SEQ ID NO: 468162 - RNA, 20 nt, Human
cuguaccuuuccaggccuaa

SEQ ID NO: 468163 - RNA, 18 nt, Human
gaagucuuaaaaguuccu

SEQ ID NO: 468164 - RNA, 20 nt, Human
gagacagugggaguccugga

SEQ ID NO: 468165 - RNA, 19 nt, Human
gagcaagcacagugcacac

SEQ ID NO: 468166 - RNA, 23 nt, Human
gagcaagcacagugcacacuccc

SEQ ID NO: 468167 - RNA, 18 nt, Human
gaggcugguggccccugc

SEQ ID NO: 468168 - RNA, 21 nt, Human
gcaaaggcuggaaagacaccc

SEQ ID NO: 468169 - RNA, 23 nt, Human
gcagaguuuucuccaagcuucag

SEQ ID NO: 468170 - RNA, 26 nt, Human
gccaaaugcccuauaacuuaaacucu

SEQ ID NO: 468171 - RNA, 23 nt, Human
gcccugaaccuggauaggaacaa

SEQ ID NO: 468172 - RNA, 21 nt, Human
gcugccucguucccuagauuc

SEQ ID NO: 468173 - RNA, 18 nt, Human
gcugguggccccugcccc

SEQ ID NO: 468174 - RNA, 22 nt, Human
ggaauagcauuacagucuaaca

SEQ ID NO: 468175 - RNA, 21 nt, Human
ggaggagaaggggagggggau

SEQ ID NO: 468176 - RNA, 18 nt, Human
ggcccuaguggacuggcg

SEQ ID NO: 468177 - RNA, 21 nt, Human
ggccuggaaaccuagaguucc

SEQ ID NO: 468178 - RNA, 21 nt, Human
gggaagcaacucagggcaucc

SEQ ID NO: 468179 - RNA, 22 nt, Human
gggaauaacuggaagucacugu

SEQ ID NO: 468180 - RNA, 23 nt, Human
gggugaggggaggaccuauguuc

SEQ ID NO: 468181 - RNA, 20 nt, Human
gugaacagacggccaggaug

SEQ ID NO: 468182 - RNA, 18 nt, Human
guggccugcaugucuccu

SEQ ID NO: 468183 - RNA, 19 nt, Human
gugguugucuccuugaguc

SEQ ID NO: 468184 - RNA, 21 nt, Human
gugugcccuuucccugccuag

SEQ ID NO: 468185 - RNA, 21 nt, Human
uaaaaaaaaauccugaagcau

SEQ ID NO: 468186 - RNA, 25 nt, Human
uaacaaucagaauucuguuacacac

SEQ ID NO: 468187 - RNA, 26 nt, Human
uacacacauacacaggcaugccacau

SEQ ID NO: 468188 - RNA, 27 nt, Human
uacacacauacacaggcaugccacaug

SEQ ID NO: 468189 - RNA, 19 nt, Human
uacacaggcaugccacaug

SEQ ID NO: 468190 - RNA, 21 nt, Human
uacccauuucuccccagcaac

SEQ ID NO: 468191 - RNA, 23 nt, Human
uagaguggcaagguacuaacuaa

SEQ ID NO: 468192 - RNA, 28 nt, Human
uaggguacccauuucuccccagcaaccu

SEQ ID NO: 468193 - RNA, 21 nt, Human
uauguucauagguaccaagaa

SEQ ID NO: 468194 - RNA, 19 nt, Human
ucaaaacagacucucuaac

SEQ ID NO: 468195 - RNA, 22 nt, Human
ucaaucaaaacagacucucuaa

SEQ ID NO: 468196 - RNA, 23 nt, Human
ucagccagucucaacacaaaaca

SEQ ID NO: 468197 - RNA, 23 nt, Human
ucagccuugggauggcuucaccc

SEQ ID NO: 468198 - RNA, 18 nt, Human
uccaggcagggggcuggg

SEQ ID NO: 468199 - RNA, 20 nt, Human
uccccacauaccccccauga

SEQ ID NO: 468200 - RNA, 18 nt, Human
uccguguugcaccuaaga

SEQ ID NO: 468201 - RNA, 19 nt, Human
uccuccagcaucacugcuc

SEQ ID NO: 468202 - RNA, 21 nt, Human
ucuagaauacaggagccucca

SEQ ID NO: 468203 - RNA, 20 nt, Human
ucuagcaccuugggcuugug

SEQ ID NO: 468204 - RNA, 20 nt, Human
ucucaccacaagaaggggag

SEQ ID NO: 468205 - RNA, 21 nt, Human
ucucaccacaagaaggggagg

SEQ ID NO: 468206 - RNA, 20 nt, Human
ucuccaagcuucagcuuggc

SEQ ID NO: 468207 - RNA, 26 nt, Human
ucucugagcaagcacagugcacacuc

SEQ ID NO: 468208 - RNA, 18 nt, Human
ucugcacgcugaccuagg

SEQ ID NO: 468209 - RNA, 24 nt, Human
ucuuccucuguccucaucccaagg

SEQ ID NO: 468210 - RNA, 21 nt, Human
ugaagcaugcucaaggugaaa

SEQ ID NO: 468211 - RNA, 25 nt, Human
ugacacgucacauggucaaagucuc

SEQ ID NO: 468212 - RNA, 22 nt, Human
ugagcacacacuagaaaaggaa

SEQ ID NO: 468213 - RNA, 24 nt, Human
ugagcugucagccuugggauggcu

SEQ ID NO: 468214 - RNA, 19 nt, Human
ugauguaacugggacucac

SEQ ID NO: 468215 - RNA, 24 nt, Human
ugcccugcucccugcagcuucuca

SEQ ID NO: 468216 - RNA, 25 nt, Human
ugccucguucccuagauucccucca

SEQ ID NO: 468217 - RNA, 20 nt, Human
ugcuggugucugagcccaaa

SEQ ID NO: 468218 - RNA, 23 nt, Human
uggaaagacacccagcuugaagg

SEQ ID NO: 468219 - RNA, 21 nt, Human
uggaggagaaggggaggggga

SEQ ID NO: 468220 - RNA, 20 nt, Human
uggagggagauucagcucuu

SEQ ID NO: 468221 - RNA, 23 nt, Human
uggagggagauucagcucuugga

SEQ ID NO: 468222 - RNA, 24 nt, Human
uggauuauagaaaagggaaguggg

SEQ ID NO: 468223 - RNA, 20 nt, Human
uggcagggcgagagggaaag

SEQ ID NO: 468224 - RNA, 25 nt, Human
uggcagugaggaguaggcaagaagg

SEQ ID NO: 468225 - RNA, 28 nt, Human
uggcagugaggaguaggcaagaaggguu

SEQ ID NO: 468226 - RNA, 22 nt, Human
uggccccugccccuucugucuc

SEQ ID NO: 468227 - RNA, 20 nt, Human
uggcugugaagugcccaagu

SEQ ID NO: 468228 - RNA, 19 nt, Human
ugggagaaaaugaaaagag

SEQ ID NO: 468229 - RNA, 19 nt, Human
ugggagaggagcaaggcug

SEQ ID NO: 468230 - RNA, 18 nt, Human
ugggagcaggguuuggcc

SEQ ID NO: 468231 - RNA, 21 nt, Human
ugggauggcuucaccccaugg

SEQ ID NO: 468232 - RNA, 19 nt, Human
uggggaccaggagugaggg

SEQ ID NO: 468233 - RNA, 24 nt, Human
uggggauaccccaucccuucccca

SEQ ID NO: 468234 - RNA, 24 nt, Human
uggggcuagacuggcaaaggcugg

SEQ ID NO: 468235 - RNA, 20 nt, Human
uggggguagaguggcaaggu

SEQ ID NO: 468236 - RNA, 26 nt, Human
ugguggccccugccccuucugucucc

SEQ ID NO: 468237 - RNA, 21 nt, Human
ugguguguccuccagcaucac

SEQ ID NO: 468238 - RNA, 19 nt, Human
ugugcccuuucccugccua

SEQ ID NO: 468239 - RNA, 23 nt, Human
uguuacacacauacacaggcaug

SEQ ID NO: 468240 - RNA, 21 nt, Human
uuaguguuaauuuggcuuauu

SEQ ID NO: 468241 - RNA, 19 nt, Human
uucagucucaccacaagaa

SEQ ID NO: 468242 - RNA, 22 nt, Human
uuccaggcagggggcuggggag

SEQ ID NO: 468243 - RNA, 26 nt, Human
uuccccacauaccccccaugaggccu

SEQ ID NO: 468244 - RNA, 18 nt, Human
uucccuagauucccucca

SEQ ID NO: 468245 - RNA, 22 nt, Human
uugaacucugguucccucaugu

SEQ ID NO: 468246 - RNA, 20 nt, Human
uugcccagcuucuacucggg

SEQ ID NO: 468247 - RNA, 22 nt, Human
uugucuccuugagucuguugac

SEQ ID NO: 468248 - RNA, 22 nt, Human
aaaaaaaaaaaaaaagggcguc

SEQ ID NO: 468249 - RNA, 19 nt, Human
aaaaaaaaaaaaaagggcg

SEQ ID NO: 468250 - RNA, 19 nt, Human
aaguuuuuauugcaagcac

SEQ ID NO: 468251 - RNA, 21 nt, Human
agcacagugagcagaaagaga

SEQ ID NO: 468252 - RNA, 19 nt, Human
auaaaauaacuccugcucg

SEQ ID NO: 468253 - RNA, 22 nt, Human
cacgcaaaauaaaauaacuccu

SEQ ID NO: 468254 - RNA, 21 nt, Human
cagaaagagaugucuucucac

SEQ ID NO: 468255 - RNA, 23 nt, Human
cagugagcagaaagagaugucuu

SEQ ID NO: 468256 - RNA, 23 nt, Human
cccucucuccucuacuuuggcua

SEQ ID NO: 468257 - RNA, 18 nt, Human
ccuguugccaucuuuuau

SEQ ID NO: 468258 - RNA, 25 nt, Human
cgcaagaucuaugcugcugugaaga

SEQ ID NO: 468259 - RNA, 21 nt, Human
cuucuaugcagccuacauguu

SEQ ID NO: 468260 - RNA, 25 nt, Human
cuucuggcugcuaacggguaccauc

SEQ ID NO: 468261 - RNA, 18 nt, Human
gaguggaccacggccaag

SEQ ID NO: 468262 - RNA, 21 nt, Human
gaguucauccccucucuccuc

SEQ ID NO: 468263 - RNA, 27 nt, Human
ggaguucauccccucucuccucuacuu

SEQ ID NO: 468264 - RNA, 22 nt, Human
ggucuuguccuucuggcugcua

SEQ ID NO: 468265 - RNA, 23 nt, Human
uaacuaaaucucuuugacaagcc

SEQ ID NO: 468266 - RNA, 23 nt, Human
uaccaucggcuucuaugcagccu

SEQ ID NO: 468267 - RNA, 18 nt, Human
ucacacaaaguggccaca

SEQ ID NO: 468268 - RNA, 19 nt, Human
uccgcucgcgaucuagaac

SEQ ID NO: 468269 - RNA, 24 nt, Human
uggaauguaacaaaaaaaaaaaaa

SEQ ID NO: 468270 - RNA, 18 nt, Human
uggaguggaccacggcca

SEQ ID NO: 468271 - RNA, 19 nt, Human
uuuuuuuuuuuuuugccaa

SEQ ID NO: 468272 - RNA, 21 nt, Human
uuuuuuuuuuuuuuuuuuugg

SEQ ID NO: 468273 - RNA, 19 nt, Human
aaaaaguguccuugugccc

SEQ ID NO: 468274 - RNA, 23 nt, Human
aaacaaaauguaccaacugguga

SEQ ID NO: 468275 - RNA, 25 nt, Human
aaaguguccuugugcccaaagucuc

SEQ ID NO: 468276 - RNA, 20 nt, Human
aagccagguccaggcuggga

SEQ ID NO: 468277 - RNA, 20 nt, Human
acuggccccagcccacauca

SEQ ID NO: 468278 - RNA, 18 nt, Human
aggcaggaagccaggucc

SEQ ID NO: 468279 - RNA, 18 nt, Human
agguaauuaucugggggu

SEQ ID NO: 468280 - RNA, 24 nt, Human
agguccuccugcuuggcguugccu

SEQ ID NO: 468281 - RNA, 22 nt, Human
caaaaacaaaauguaccaacug

SEQ ID NO: 468282 - RNA, 21 nt, Human
caagcaggucagagcacccgu

SEQ ID NO: 468283 - RNA, 19 nt, Human
cagacagacacagacuagc

SEQ ID NO: 468284 - RNA, 22 nt, Human
cagcccacaucaguguagugau

SEQ ID NO: 468285 - RNA, 21 nt, Human
cagcgccuugucaggggagcc

SEQ ID NO: 468286 - RNA, 23 nt, Human
ccaaaaaaaaaaaaaaaaaaaaa

SEQ ID NO: 468287 - RNA, 22 nt, Human
cccaacccuuccagagcugccc

SEQ ID NO: 468288 - RNA, 21 nt, Human
cccuguggcagcacugggauc

SEQ ID NO: 468289 - RNA, 22 nt, Human
ccucuuccaagcaggucagagc

SEQ ID NO: 468290 - RNA, 21 nt, Human
ccugccccuacuggccccagc

SEQ ID NO: 468291 - RNA, 22 nt, Human
ccuggcaccuguccugccccua

SEQ ID NO: 468292 - RNA, 18 nt, Human
ccugguggugucccugug

SEQ ID NO: 468293 - RNA, 20 nt, Human
ccuugugcccaaagucucag

SEQ ID NO: 468294 - RNA, 19 nt, Human
cugccccguuggccucuuc

SEQ ID NO: 468295 - RNA, 24 nt, Human
cuggccaagggcuagcggccacag

SEQ ID NO: 468296 - RNA, 21 nt, Human
cugggacagccuccuucccua

SEQ ID NO: 468297 - RNA, 21 nt, Human
cugguggugucccuguggcag

SEQ ID NO: 468298 - RNA, 23 nt, Human
cuguccugccccuacuggcccca

SEQ ID NO: 468299 - RNA, 19 nt, Human
gagcccccaacccuuccag

SEQ ID NO: 468300 - RNA, 18 nt, Human
gagguccuccugcuuggc

SEQ ID NO: 468301 - RNA, 18 nt, Human
gcugcagccccagcgccu

SEQ ID NO: 468302 - RNA, 28 nt, Human
gugagauuccaaaaaaaaaaaaaaaaaa

SEQ ID NO: 468303 - RNA, 21 nt, Human
gugaggcaggaagccaggucc

SEQ ID NO: 468304 - RNA, 24 nt, Human
uagaaacagcucuuuuggauccca

SEQ ID NO: 468305 - RNA, 21 nt, Human
ucaguguagugauauggaaug

SEQ ID NO: 468306 - RNA, 23 nt, Human
uccaaaaaaaaaaaaaaaaaaaa

SEQ ID NO: 468307 - RNA, 22 nt, Human
uccacgaaggugauucuaaaca

SEQ ID NO: 468308 - RNA, 19 nt, Human
uccaggcugggacagccuc

SEQ ID NO: 468309 - RNA, 20 nt, Human
uccugggcuggaagcgaggc

SEQ ID NO: 468310 - RNA, 18 nt, Human
uccuucugaucagacaga

SEQ ID NO: 468311 - RNA, 22 nt, Human
ugagauuccaaaaaaaaaaaaa

SEQ ID NO: 468312 - RNA, 19 nt, Human
ugagguccuccugcuuggc

SEQ ID NO: 468313 - RNA, 23 nt, Human
ugagguccuccugcuuggcguug

SEQ ID NO: 468314 - RNA, 23 nt, Human
ugcaccaggcaugcagaggaaca

SEQ ID NO: 468315 - RNA, 20 nt, Human
ugccccguuggccucuucca

SEQ ID NO: 468316 - RNA, 21 nt, Human
ugccugguggugucccugugg

SEQ ID NO: 468317 - RNA, 24 nt, Human
ugcuuggaguguggcuagaaacag

SEQ ID NO: 468318 - RNA, 23 nt, Human
uggccaagggcuagcggccacag

SEQ ID NO: 468319 - RNA, 18 nt, Human
uggccuggccaagggcua

SEQ ID NO: 468320 - RNA, 23 nt, Human
uggcuagaaacagcucuuuugga

SEQ ID NO: 468321 - RNA, 24 nt, Human
ugggacagccuccuucccuagggc

SEQ ID NO: 468322 - RNA, 22 nt, Human
ugggauucuaacaucagggucc

SEQ ID NO: 468323 - RNA, 18 nt, Human
ugggugagguccuccugc

SEQ ID NO: 468324 - RNA, 20 nt, Human
uguacaaacacaaaagaauc

SEQ ID NO: 468325 - RNA, 21 nt, Human
uguacaaacacaaaagaaucc

SEQ ID NO: 468326 - RNA, 23 nt, Human
uguacaaacacaaaagaauccau

SEQ ID NO: 468327 - RNA, 19 nt, Human
uuccagagcugccccguug

SEQ ID NO: 468328 - RNA, 21 nt, Human
acccauacucccagcugggac

SEQ ID NO: 468329 - RNA, 22 nt, Human
acccauacucccagcugggacc

SEQ ID NO: 468330 - RNA, 25 nt, Human
auagagcucacacccauacucccag

SEQ ID NO: 468331 - RNA, 22 nt, Human
cgcuggaguccucggcccgcuc

SEQ ID NO: 468332 - RNA, 23 nt, Human
gacccagccuucccugauggcug

SEQ ID NO: 468333 - RNA, 20 nt, Human
gagcucacacccauacuccc

SEQ ID NO: 468334 - RNA, 20 nt, Human
gaguccucggcccgcuccuc

SEQ ID NO: 468335 - RNA, 23 nt, Human
ucccugauggcugccauccaagu

SEQ ID NO: 468336 - RNA, 18 nt, Human
ucuuuuuuuuuuuuuuuu

SEQ ID NO: 468337 - RNA, 21 nt, Human
uuuuuuuuuuuuuuucacagg

SEQ ID NO: 468338 - RNA, 23 nt, Human
uuuuuuuuuuuuuuuuucacagg

SEQ ID NO: 468339 - RNA, 24 nt, Human
uuuuuuuuuuuuuuuuuucuuuuu

SEQ ID NO: 468340 - RNA, 24 nt, Human
uuuuuuuuuuuuuuuuuuucuuuu

SEQ ID NO: 468341 - RNA, 25 nt, Human
uuuuuuuuuuuuuuuuuuucuuuuu

SEQ ID NO: 468342 - RNA, 24 nt, Human
uuuuuuuuuuuuuuuuuuuucuuu

SEQ ID NO: 468343 - RNA, 26 nt, Human
uuuuuuuuuuuuuuuuuuuuuucuuu

SEQ ID NO: 468344 - RNA, 24 nt, Human
acaccaagccacaccaagcucagc

SEQ ID NO: 468345 - RNA, 23 nt, Human
acuucaccagcuuccaagggacc

SEQ ID NO: 468346 - RNA, 20 nt, Human
agcuuccaagggacccuccc

SEQ ID NO: 468347 - RNA, 19 nt, Human
aggauccuaggccaggccu

SEQ ID NO: 468348 - RNA, 22 nt, Human
aggccuucugccacaccaagcc

SEQ ID NO: 468349 - RNA, 18 nt, Human
augguggggagggaugaa

SEQ ID NO: 468350 - RNA, 22 nt, Human
augguggggagggaugaagaug

SEQ ID NO: 468351 - RNA, 24 nt, Human
auguauagccagguaggccacacc

SEQ ID NO: 468352 - RNA, 23 nt, Human
cagcaguacucacaggccuuuaa

SEQ ID NO: 468353 - RNA, 24 nt, Human
cagcaguacucacaggccuuuaau

SEQ ID NO: 468354 - RNA, 21 nt, Human
ccaagccacaccaagcucagc

SEQ ID NO: 468355 - RNA, 18 nt, Human
ccuaggccaggccuucug

SEQ ID NO: 468356 - RNA, 24 nt, Human
ccucucggauauauucugaagccu

SEQ ID NO: 468357 - RNA, 19 nt, Human
cgagggccucagugcagaa

SEQ ID NO: 468358 - RNA, 25 nt, Human
cucucggauauauucugaagccuaa

SEQ ID NO: 468359 - RNA, 22 nt, Human
gcuuccaagggacccuccccac

SEQ ID NO: 468360 - RNA, 22 nt, Human
ggagggaugaagauguauagcc

SEQ ID NO: 468361 - RNA, 21 nt, Human
ggauauauucugaagccuaaa

SEQ ID NO: 468362 - RNA, 27 nt, Human
uaagaacaggacuucaccagcuuccaa

SEQ ID NO: 468363 - RNA, 27 nt, Human
uaauaagaacaggacuucaccagcuuc

SEQ ID NO: 468364 - RNA, 21 nt, Human
ucacuuccccaggaugguggg

SEQ ID NO: 468365 - RNA, 20 nt, Human
uccaagggacccuccccacc

SEQ ID NO: 468366 - RNA, 22 nt, Human
ucugccacaccaagccacacca

SEQ ID NO: 468367 - RNA, 23 nt, Human
ugaguccaagagggaaggacugg

SEQ ID NO: 468368 - RNA, 21 nt, Human
uggccacaccaucacuucccu

SEQ ID NO: 468369 - RNA, 24 nt, Human
uuuuuuuuuuuuuuuuuuuauuuu

SEQ ID NO: 468370 - RNA, 18 nt, Human
aaaccugcagcaauaaac

SEQ ID NO: 468371 - RNA, 19 nt, Human
aaagugcugggauuacagg

SEQ ID NO: 468372 - RNA, 20 nt, Human
aaagugcugggauuacaggc

SEQ ID NO: 468373 - RNA, 23 nt, Human
aaagugcugggauuacaggcgua

SEQ ID NO: 468374 - RNA, 20 nt, Human
aacacaccauaaugauggga

SEQ ID NO: 468375 - RNA, 19 nt, Human
aacagagcaagauacagaa

SEQ ID NO: 468376 - RNA, 22 nt, Human
aacucugcacaaccccgggaaa

SEQ ID NO: 468377 - RNA, 19 nt, Human
aagugcugggauuacaggc

SEQ ID NO: 468378 - RNA, 19 nt, Human
aagugcugggauuacaggc

SEQ ID NO: 468379 - RNA, 26 nt, Human
aagugcugggauuacaggcguaagcc

SEQ ID NO: 468380 - RNA, 19 nt, Human
aauucucuuuagaaauuca

SEQ ID NO: 468381 - RNA, 24 nt, Human
aauuuuguauuuuuaguagagacg

SEQ ID NO: 468382 - RNA, 18 nt, Human
acagagcaagauacagaa

SEQ ID NO: 468383 - RNA, 26 nt, Human
acaugugcuuauaccacauguaugug

SEQ ID NO: 468384 - RNA, 18 nt, Human
acgggguuucuccauguu

SEQ ID NO: 468385 - RNA, 20 nt, Human
acgggguuucuccauguugg

SEQ ID NO: 468386 - RNA, 24 nt, Human
acgggguuucuccauguuggucag

SEQ ID NO: 468387 - RNA, 20 nt, Human
acuaaaaaucaaauacacaa

SEQ ID NO: 468388 - RNA, 20 nt, Human
agaggugguggcugugggac

SEQ ID NO: 468389 - RNA, 24 nt, Human
agcgauuuuccugccucagccucu

SEQ ID NO: 468390 - RNA, 20 nt, Human
aggcaugcaccacuacgccc

SEQ ID NO: 468391 - RNA, 19 nt, Human
aguaacugggauuacaggc

SEQ ID NO: 468392 - RNA, 20 nt, Human
aguaacugggauuacaggca

SEQ ID NO: 468393 - RNA, 21 nt, Human
aguaacugggauuacaggcau

SEQ ID NO: 468394 - RNA, 23 nt, Human
agugcgauggcgcgaucuuggcu

SEQ ID NO: 468395 - RNA, 24 nt, Human
agugcgauggcgcgaucuuggcuc

SEQ ID NO: 468396 - RNA, 18 nt, Human
agugcugggauuacaggc

SEQ ID NO: 468397 - RNA, 20 nt, Human
agugucugauuucauuucca

SEQ ID NO: 468398 - RNA, 18 nt, Human
auacagaacagugugugg

SEQ ID NO: 468399 - RNA, 25 nt, Human
caaaaaaccugcagcaauaaaccau

SEQ ID NO: 468400 - RNA, 24 nt, Human
caaagugcugggauuacaggcgua

SEQ ID NO: 468401 - RNA, 19 nt, Human
caagcaaacagagcaagau

SEQ ID NO: 468402 - RNA, 22 nt, Human
caagcgauuuuccugccucagc

SEQ ID NO: 468403 - RNA, 26 nt, Human
cacaaaaaaccugcagcaauaaacca

SEQ ID NO: 468404 - RNA, 22 nt, Human
cacaguauacugggagcugucc

SEQ ID NO: 468405 - RNA, 19 nt, Human
cacugaaccagcagucauu

SEQ ID NO: 468406 - RNA, 21 nt, Human
cacuguaaccucugccucccg

SEQ ID NO: 468407 - RNA, 23 nt, Human
cacuguaaccucugccucccggg

SEQ ID NO: 468408 - RNA, 18 nt, Human
cacugugccagccaugcu

SEQ ID NO: 468409 - RNA, 25 nt, Human
cagccucagccucccaaagugcugg

SEQ ID NO: 468410 - RNA, 21 nt, Human
caggagagacuauauuuggug

SEQ ID NO: 468411 - RNA, 24 nt, Human
caggugauacgccagccccugaag

SEQ ID NO: 468412 - RNA, 18 nt, Human
caucuggagugucugauu

SEQ ID NO: 468413 - RNA, 23 nt, Human
caugcaccacuacgcccgacuaa

SEQ ID NO: 468414 - RNA, 24 nt, Human
cauguuggucaggcuggucuugaa

SEQ ID NO: 468415 - RNA, 22 nt, Human
ccaaagugcugggauuacaggc

SEQ ID NO: 468416 - RNA, 22 nt, Human
ccaaagugcugggauuacaggc

SEQ ID NO: 468417 - RNA, 24 nt, Human
ccaaagugcugggauuacaggcgu

SEQ ID NO: 468418 - RNA, 22 nt, Human
ccagcagucauuuucucucucu

SEQ ID NO: 468419 - RNA, 19 nt, Human
ccauguuggucaggcuggu

SEQ ID NO: 468420 - RNA, 21 nt, Human
ccauguuggucaggcuggucu

SEQ ID NO: 468421 - RNA, 21 nt, Human
ccauguuggucaggcuggucu

SEQ ID NO: 468422 - RNA, 22 nt, Human
cccaggcuggagugcgauggcg

SEQ ID NO: 468423 - RNA, 21 nt, Human
ccccauaaccaauucucuuua

SEQ ID NO: 468424 - RNA, 18 nt, Human
ccccgggaaaggcaaguc

SEQ ID NO: 468425 - RNA, 23 nt, Human
cccggguucaagcgauuuuccug

SEQ ID NO: 468426 - RNA, 24 nt, Human
ccucaggugauacgccagccucag

SEQ ID NO: 468427 - RNA, 18 nt, Human
ccucuugccuccuccuuc

SEQ ID NO: 468428 - RNA, 25 nt, Human
cuaaucucaaauacacauuucagaa

SEQ ID NO: 468429 - RNA, 24 nt, Human
cuaauuuuguauuuuuaguagaga

SEQ ID NO: 468430 - RNA, 24 nt, Human
cucacuguaaccucugccucccgg

SEQ ID NO: 468431 - RNA, 24 nt, Human
cuccauguuggucaggcuggucuu

SEQ ID NO: 468432 - RNA, 19 nt, Human
cucgaguaacugggauuac

SEQ ID NO: 468433 - RNA, 24 nt, Human
cucgaguaacugggauuacaggca

SEQ ID NO: 468434 - RNA, 18 nt, Human
cucucucucucucucucg

SEQ ID NO: 468435 - RNA, 23 nt, Human
cucugcacaaccccgggaaaggc

SEQ ID NO: 468436 - RNA, 20 nt, Human
cucuuguugcccaggcugga

SEQ ID NO: 468437 - RNA, 21 nt, Human
cucuuguugcccaggcuggag

SEQ ID NO: 468438 - RNA, 22 nt, Human
cucuuguugcccaggcuggagu

SEQ ID NO: 468439 - RNA, 21 nt, Human
cugaggagagaggugguggcu

SEQ ID NO: 468440 - RNA, 23 nt, Human
cugccucagccucucgaguaacu

SEQ ID NO: 468441 - RNA, 18 nt, Human
cugggagcuguccauuua

SEQ ID NO: 468442 - RNA, 24 nt, Human
cuguaaccucugccucccggguuc

SEQ ID NO: 468443 - RNA, 24 nt, Human
cuuguugcccaggcuggagugcga

SEQ ID NO: 468444 - RNA, 24 nt, Human
cuuuuagcuuugaaccaugugcaa

SEQ ID NO: 468445 - RNA, 22 nt, Human
cuuuuccaggcugaggcacucg

SEQ ID NO: 468446 - RNA, 22 nt, Human
gaaacaccuuugucacaaugcc

SEQ ID NO: 468447 - RNA, 23 nt, Human
gagacgggguuucuccauguugg

SEQ ID NO: 468448 - RNA, 24 nt, Human
gagacgggguuucuccauguuggu

SEQ ID NO: 468449 - RNA, 22 nt, Human
gaguaacugggauuacaggcau

SEQ ID NO: 468450 - RNA, 24 nt, Human
gaguaacugggauuacaggcaugc

SEQ ID NO: 468451 - RNA, 18 nt, Human
gauuacaggcguaagcca

SEQ ID NO: 468452 - RNA, 21 nt, Human
gauuacaggcguaagccacug

SEQ ID NO: 468453 - RNA, 24 nt, Human
gauuacaggcguaagccacugugc

SEQ ID NO: 468454 - RNA, 20 nt, Human
gcacaaccccgggaaaggca

SEQ ID NO: 468455 - RNA, 22 nt, Human
gccuccuccuucgccgccgccc

SEQ ID NO: 468456 - RNA, 24 nt, Human
gcgauuuuccugccucagccucuc

SEQ ID NO: 468457 - RNA, 21 nt, Human
gcucacuguaaccucugccuc

SEQ ID NO: 468458 - RNA, 21 nt, Human
gcucuuguugcccaggcugga

SEQ ID NO: 468459 - RNA, 23 nt, Human
gcugaggagagaggugguggcug

SEQ ID NO: 468460 - RNA, 23 nt, Human
gcuggucuugaacucccaaccuc

SEQ ID NO: 468461 - RNA, 24 nt, Human
ggauuacaggcguaagccacugug

SEQ ID NO: 468462 - RNA, 24 nt, Human
ggcuggucuugaacucccaaccuc

SEQ ID NO: 468463 - RNA, 18 nt, Human
gggaauauugaugauuuc

SEQ ID NO: 468464 - RNA, 23 nt, Human
gggguuucuccauguuggucagg

SEQ ID NO: 468465 - RNA, 22 nt, Human
ggguuucuccauguuggucagg

SEQ ID NO: 468466 - RNA, 24 nt, Human
ggugauacgccagccucagccucc

SEQ ID NO: 468467 - RNA, 23 nt, Human
gguggcugugggacagaauggga

SEQ ID NO: 468468 - RNA, 20 nt, Human
guaacugggauuacaggcau

SEQ ID NO: 468469 - RNA, 23 nt, Human
guagagacgggguuucuccaugu

SEQ ID NO: 468470 - RNA, 24 nt, Human
gugauacgccagccucagccuccc

SEQ ID NO: 468471 - RNA, 23 nt, Human
gugcauaucuaacucugcacaaa

SEQ ID NO: 468472 - RNA, 21 nt, Human
gugguggcugugggacagaau

SEQ ID NO: 468473 - RNA, 22 nt, Human
uaaaaaaaaaaucuccugaguu

SEQ ID NO: 468474 - RNA, 29 nt, Human
uaaaaaaaaaaucuccugaguuccucucc

SEQ ID NO: 468475 - RNA, 22 nt, Human
uaaaaaucaaauacacaaaaaa

SEQ ID NO: 468476 - RNA, 23 nt, Human
uacaggcaugcaccacuacgccc

SEQ ID NO: 468477 - RNA, 21 nt, Human
uaguaauuaggagccacuuac

SEQ ID NO: 468478 - RNA, 24 nt, Human
uaguagagacgggguuucuccaug

SEQ ID NO: 468479 - RNA, 21 nt, Human
uauaccacauguaugugcaua

SEQ ID NO: 468480 - RNA, 21 nt, Human
uauauguugacaucuggagug

SEQ ID NO: 468481 - RNA, 22 nt, Human
uauugaugauuucaacauaaaa

SEQ ID NO: 468482 - RNA, 18 nt, Human
ucaaagaacacaccauaa

SEQ ID NO: 468483 - RNA, 21 nt, Human
ucaagcaaacagagcaagaua

SEQ ID NO: 468484 - RNA, 23 nt, Human
ucacuguaaccucugccucccgg

SEQ ID NO: 468485 - RNA, 24 nt, Human
ucacuguaaccucugccucccggg

SEQ ID NO: 468486 - RNA, 18 nt, Human
ucagccucccaaagugcu

SEQ ID NO: 468487 - RNA, 22 nt, Human
ucauugcuggcugaggagagag

SEQ ID NO: 468488 - RNA, 24 nt, Human
ucccaaagugcugggauuacaggc

SEQ ID NO: 468489 - RNA, 18 nt, Human
ucccggguucaagcgauu

SEQ ID NO: 468490 - RNA, 24 nt, Human
ucccggguucaagcgauuuuccug

SEQ ID NO: 468491 - RNA, 24 nt, Human
ucgaguaacugggauuacaggcau

SEQ ID NO: 468492 - RNA, 18 nt, Human
ucuaacucugcacaaccc

SEQ ID NO: 468493 - RNA, 19 nt, Human
ucuaaucucaaauacacau

SEQ ID NO: 468494 - RNA, 24 nt, Human
ucucgaguaacugggauuacaggc

SEQ ID NO: 468495 - RNA, 24 nt, Human
ucugagggacacacacugaaccag

SEQ ID NO: 468496 - RNA, 21 nt, Human
ucugucugcagucuuuagaga

SEQ ID NO: 468497 - RNA, 22 nt, Human
ucuuguugcccaggcuggagug

SEQ ID NO: 468498 - RNA, 28 nt, Human
ucuuuaguuuugauccaacaaauccauu

SEQ ID NO: 468499 - RNA, 22 nt, Human
ugaaaaauaaguuaaaaacuaa

SEQ ID NO: 468500 - RNA, 25 nt, Human
ugaaacaccuuugucacaaugccac

SEQ ID NO: 468501 - RNA, 18 nt, Human
ugcccaggcuggagugcg

SEQ ID NO: 468502 - RNA, 21 nt, Human
ugcccaggcuggagugcgaug

SEQ ID NO: 468503 - RNA, 24 nt, Human
ugccucagccucucgaguaacugg

SEQ ID NO: 468504 - RNA, 23 nt, Human
ugccuccuccuucgccgccgccc

SEQ ID NO: 468505 - RNA, 24 nt, Human
ugcugggauuacaggcguaagcca

SEQ ID NO: 468506 - RNA, 24 nt, Human
uggagugcgauggcgcgaucuugg

SEQ ID NO: 468507 - RNA, 23 nt, Human
uggcgcgaucuuggcucacugua

SEQ ID NO: 468508 - RNA, 24 nt, Human
uggcgcgaucuuggcucacuguaa

SEQ ID NO: 468509 - RNA, 21 nt, Human
ugggaauauugaugauuucaa

SEQ ID NO: 468510 - RNA, 21 nt, Human
ugggauuacaggcaugcacca

SEQ ID NO: 468511 - RNA, 24 nt, Human
ugggauuacaggcaugcaccacua

SEQ ID NO: 468512 - RNA, 24 nt, Human
ugggauuacaggcaugcaccacua

SEQ ID NO: 468513 - RNA, 22 nt, Human
ugggauuacaggcguaagccac

SEQ ID NO: 468514 - RNA, 22 nt, Human
ugggauuacaggcguaagccac

SEQ ID NO: 468515 - RNA, 22 nt, Human
ugggauuacaggcguaagccac

SEQ ID NO: 468516 - RNA, 24 nt, Human
ugggauuacaggcguaagccacug

SEQ ID NO: 468517 - RNA, 26 nt, Human
ugggauuacaggcguaagccacugug

SEQ ID NO: 468518 - RNA, 30 nt, Human
ugggauuacaggcguaagccacugugccaa

SEQ ID NO: 468519 - RNA, 23 nt, Human
uggucaggcuggucuugaacucc

SEQ ID NO: 468520 - RNA, 20 nt, Human
uguaucaagcaaacagagca

SEQ ID NO: 468521 - RNA, 22 nt, Human
uguguacuccucuguacaugug

SEQ ID NO: 468522 - RNA, 20 nt, Human
uguuuuaaaagaggggaaag

SEQ ID NO: 468523 - RNA, 25 nt, Human
uuagagacagcaauagcuuuaacuu

SEQ ID NO: 468524 - RNA, 18 nt, Human
uuaguagagacgggguuu

SEQ ID NO: 468525 - RNA, 24 nt, Human
uuaguagagacgggguuucuccau

SEQ ID NO: 468526 - RNA, 21 nt, Human
uucaagcgauuuuccugccuc

SEQ ID NO: 468527 - RNA, 23 nt, Human
uucaagcgauuuuccugccucag

SEQ ID NO: 468528 - RNA, 24 nt, Human
uucaagcgauuuuccugccucagc

SEQ ID NO: 468529 - RNA, 28 nt, Human
uuccaggcugaggcacucguaaugguau

SEQ ID NO: 468530 - RNA, 18 nt, Human
uucucucucucucucucu

SEQ ID NO: 468531 - RNA, 20 nt, Human
uugacaucuggagugucuga

SEQ ID NO: 468532 - RNA, 18 nt, Human
uugcccaggcuggagugc

SEQ ID NO: 468533 - RNA, 23 nt, Human
uugcucuuguugcccaggcugga

SEQ ID NO: 468534 - RNA, 23 nt, Human
uuguauuuuuaguagagacgggg

SEQ ID NO: 468535 - RNA, 21 nt, Human
uuucuccauguuggucaggcu

SEQ ID NO: 468536 - RNA, 24 nt, Human
uuugcucuuguugcccaggcugga

SEQ ID NO: 468537 - RNA, 18 nt, Human
uuuuagcuuugaaccaug

SEQ ID NO: 468538 - RNA, 24 nt, Human
uuuugcucuuguugcccaggcugg

SEQ ID NO: 468539 - RNA, 19 nt, Human
uuuuguauuuuuaguagag

SEQ ID NO: 468540 - RNA, 20 nt, Human
uuuuguauuuuuaguagaga

SEQ ID NO: 468541 - RNA, 22 nt, Human
uuuuuaguagagacgggguuuc

SEQ ID NO: 468542 - RNA, 19 nt, Human
aaagaaaagaaggaaaaga

SEQ ID NO: 468543 - RNA, 20 nt, Human
aaauucuccuugugccucuc

SEQ ID NO: 468544 - RNA, 23 nt, Human
aaccagaucaccaccccccaacc

SEQ ID NO: 468545 - RNA, 22 nt, Human
aagaaggaaaagaauuaaagaa

SEQ ID NO: 468546 - RNA, 18 nt, Human
aaggugcuuuccaaaccc

SEQ ID NO: 468547 - RNA, 27 nt, Human
aauccauggacccuuaaauucuccuuu

SEQ ID NO: 468548 - RNA, 26 nt, Human
accacaaacaaaaacaggauccaacc

SEQ ID NO: 468549 - RNA, 24 nt, Human
accaccccccaaccaaaaagcaaa

SEQ ID NO: 468550 - RNA, 19 nt, Human
accgacccgcacucccugc

SEQ ID NO: 468551 - RNA, 25 nt, Human
agaaaaucuaacauucaguaacuaa

SEQ ID NO: 468552 - RNA, 22 nt, Human
agaaccagaucaccacccccca

SEQ ID NO: 468553 - RNA, 21 nt, Human
agacugaauccauggacccuu

SEQ ID NO: 468554 - RNA, 22 nt, Human
agaucaccaccccccaaccaaa

SEQ ID NO: 468555 - RNA, 23 nt, Human
aggcagaaaaucuaacauucagu

SEQ ID NO: 468556 - RNA, 19 nt, Human
aggugcuuuccaaacccgg

SEQ ID NO: 468557 - RNA, 21 nt, Human
aucccagagccucagcagcca

SEQ ID NO: 468558 - RNA, 21 nt, Human
aucucgaagucuccauuccgg

SEQ ID NO: 468559 - RNA, 19 nt, Human
caaaaacaggauccaacca

SEQ ID NO: 468560 - RNA, 23 nt, Human
caaacaaaaacaggauccaacca

SEQ ID NO: 468561 - RNA, 28 nt, Human
caaccaaaaagcaaaacaaaauagauau

SEQ ID NO: 468562 - RNA, 21 nt, Human
cacacugaagguuuggccaaa

SEQ ID NO: 468563 - RNA, 25 nt, Human
cagcagccaaaauggcccuagcuga

SEQ ID NO: 468564 - RNA, 19 nt, Human
cauagcccggaggcucagg

SEQ ID NO: 468565 - RNA, 19 nt, Human
cauuucauccagccucauu

SEQ ID NO: 468566 - RNA, 19 nt, Human
ccagagccucagcagccaa

SEQ ID NO: 468567 - RNA, 21 nt, Human
ccauggaguaauuaaaguaac

SEQ ID NO: 468568 - RNA, 21 nt, Human
ccccaaccaaaaagcaaaaca

SEQ ID NO: 468569 - RNA, 20 nt, Human
cccccaaccaaaaagcaaaa

SEQ ID NO: 468570 - RNA, 24 nt, Human
ccccccaaccaaaaagcaaaacaa

SEQ ID NO: 468571 - RNA, 24 nt, Human
cccgggcuuuggugaccaggucuu

SEQ ID NO: 468572 - RNA, 20 nt, Human
ccggcuuuuccugcagcucu

SEQ ID NO: 468573 - RNA, 18 nt, Human
cuaggcagaaaaucuaac

SEQ ID NO: 468574 - RNA, 20 nt, Human
cuccuggaaaagugggauca

SEQ ID NO: 468575 - RNA, 21 nt, Human
cugcagcucuucccgggcuuu

SEQ ID NO: 468576 - RNA, 21 nt, Human
gaaaaacacaaacucccaguc

SEQ ID NO: 468577 - RNA, 26 nt, Human
gaaccgacccgcacucccugcccucg

SEQ ID NO: 468578 - RNA, 18 nt, Human
gaggccacagaagggcug

SEQ ID NO: 468579 - RNA, 25 nt, Human
gcaaaacaaaauagauauagccucu

SEQ ID NO: 468580 - RNA, 21 nt, Human
gccaaauuauuucauacaagu

SEQ ID NO: 468581 - RNA, 19 nt, Human
gcgcgggucaaucggcggc

SEQ ID NO: 468582 - RNA, 22 nt, Human
ggaaagacacauguaccacaaa

SEQ ID NO: 468583 - RNA, 18 nt, Human
gguccugauuguucuugc

SEQ ID NO: 468584 - RNA, 18 nt, Human
uaaagauggugacccugg

SEQ ID NO: 468585 - RNA, 27 nt, Human
uaacuaaaccaaaucccagagccucag

SEQ ID NO: 468586 - RNA, 24 nt, Human
uaagaaccagaucaccacccccca

SEQ ID NO: 468587 - RNA, 24 nt, Human
uaauaguugcagacugggauucca

SEQ ID NO: 468588 - RNA, 18 nt, Human
uacaaguaguucucacug

SEQ ID NO: 468589 - RNA, 25 nt, Human
uaccacaaacaaaaacaggauccaa

SEQ ID NO: 468590 - RNA, 22 nt, Human
uagcugacauuucauccagccu

SEQ ID NO: 468591 - RNA, 26 nt, Human
ucagguggugguggcagcucauuuuc

SEQ ID NO: 468592 - RNA, 24 nt, Human
ucauacaaguaguucucacuggcc

SEQ ID NO: 468593 - RNA, 24 nt, Human
uccaaacccggugacaacagcugg

SEQ ID NO: 468594 - RNA, 18 nt, Human
uccauggaguaauuaaag

SEQ ID NO: 468595 - RNA, 22 nt, Human
ucccagagccucagcagccaaa

SEQ ID NO: 468596 - RNA, 18 nt, Human
ucccagaggugcuuugaa

SEQ ID NO: 468597 - RNA, 20 nt, Human
ucccagaggugcuuugaagu

SEQ ID NO: 468598 - RNA, 21 nt, Human
ucccgggcuuuggugaccagg

SEQ ID NO: 468599 - RNA, 21 nt, Human
ucccugauucuauugagaacc

SEQ ID NO: 468600 - RNA, 18 nt, Human
uccuugugccucuccaaa

SEQ ID NO: 468601 - RNA, 22 nt, Human
ucuccaaagaaaagaaggaaaa

SEQ ID NO: 468602 - RNA, 19 nt, Human
ucuccuggaaaagugggau

SEQ ID NO: 468603 - RNA, 19 nt, Human
ucucuuggaacagaacggc

SEQ ID NO: 468604 - RNA, 24 nt, Human
ugaaaaacacaaacucccagucuc

SEQ ID NO: 468605 - RNA, 25 nt, Human
ugaaaaacacaaacucccagucuca

SEQ ID NO: 468606 - RNA, 19 nt, Human
ugaggccacagaagggcug

SEQ ID NO: 468607 - RNA, 22 nt, Human
ugcagcucuucccgggcuuugg

SEQ ID NO: 468608 - RNA, 19 nt, Human
uguuccuccauccugcagu

SEQ ID NO: 468609 - RNA, 21 nt, Human
uucuccuugugccucuccaaa

SEQ ID NO: 468610 - RNA, 22 nt, Human
uugaguaaaaucauuuccugcu

SEQ ID NO: 468611 - RNA, 21 nt, Human
uugcaaacuucaaccaguggg

SEQ ID NO: 468612 - RNA, 20 nt, Human
uugcuuccaagauguguaag

SEQ ID NO: 468613 - RNA, 23 nt, Human
uuggaaagacacauguaccacaa

SEQ ID NO: 468614 - RNA, 25 nt, Human
uuuuuuuuuuuuuuuuuuuaauugg

SEQ ID NO: 468615 - RNA, 20 nt, Human
acaguucuagaggcugggaa

SEQ ID NO: 468616 - RNA, 19 nt, Human
aggggcaggugccaaguga

SEQ ID NO: 468617 - RNA, 18 nt, Human
cacauugcagaagggcaa

SEQ ID NO: 468618 - RNA, 22 nt, Human
cacugguuucauucaugagggg

SEQ ID NO: 468619 - RNA, 19 nt, Human
ccaagaucaaggcaccagc

SEQ ID NO: 468620 - RNA, 20 nt, Human
ccccagagguagaaaggacc

SEQ ID NO: 468621 - RNA, 22 nt, Human
ccccagagguagaaaggaccuc

SEQ ID NO: 468622 - RNA, 22 nt, Human
cuggugaggaccaguuucucuu

SEQ ID NO: 468623 - RNA, 26 nt, Human
uaagggcacugguuucauucaugagg

SEQ ID NO: 468624 - RNA, 22 nt, Human
ucaaggcaccagcagauucagc

SEQ ID NO: 468625 - RNA, 22 nt, Human
ucuuacaguucuagaggcuggg

SEQ ID NO: 468626 - RNA, 20 nt, Human
ucuuacaguucuagaggcuu

SEQ ID NO: 468627 - RNA, 23 nt, Human
ucuuuggugggguuggguauugc

SEQ ID NO: 468628 - RNA, 19 nt, Human
ugagagugacccccagagg

SEQ ID NO: 468629 - RNA, 24 nt, Human
ugagagugacccccagagguagaa

SEQ ID NO: 468630 - RNA, 22 nt, Human
ugccaagugagagugaccccca

SEQ ID NO: 468631 - RNA, 19 nt, Human
ugggaaguccaagaucaag

SEQ ID NO: 468632 - RNA, 24 nt, Human
ugggaaguccaagaucaaggcacc

SEQ ID NO: 468633 - RNA, 23 nt, Human
ugugacucuucccucuuuuuggg

SEQ ID NO: 468634 - RNA, 21 nt, Human
uuccaagucucaggacccuca

SEQ ID NO: 468635 - RNA, 26 nt, Human
uucccucuuuuuggggaaaaggacuu

SEQ ID NO: 468636 - RNA, 21 nt, Human
uucucugacagugccuucuag

SEQ ID NO: 468637 - RNA, 25 nt, Human
uucuuccauauuccaagucucagga

SEQ ID NO: 468638 - RNA, 22 nt, Human
uuggguauugcuucuuccauau

SEQ ID NO: 468639 - RNA, 25 nt, Human
uuggguauugcuucuuccauauucc

SEQ ID NO: 468640 - RNA, 18 nt, Human
aaaguccuccucugaccg

SEQ ID NO: 468641 - RNA, 22 nt, Human
aacauucucuccucccaguuaa

SEQ ID NO: 468642 - RNA, 21 nt, Human
aacccuuggucccggcgcggg

SEQ ID NO: 468643 - RNA, 24 nt, Human
aaggugaccuuaaugaaacccuug

SEQ ID NO: 468644 - RNA, 22 nt, Human
accaggcugcccagcagcccca

SEQ ID NO: 468645 - RNA, 22 nt, Human
accuucucuggcccccaaguag

SEQ ID NO: 468646 - RNA, 25 nt, Human
agaccuugaagacuaucccggagcc

SEQ ID NO: 468647 - RNA, 19 nt, Human
agcauuggagggggcaggu

SEQ ID NO: 468648 - RNA, 21 nt, Human
agcgcccucugggggcuggua

SEQ ID NO: 468649 - RNA, 20 nt, Human
agcggcgggaagagcuccac

SEQ ID NO: 468650 - RNA, 21 nt, Human
agcuagccugcggccuagagc

SEQ ID NO: 468651 - RNA, 22 nt, Human
aggcggccgcggaaccaaaugc

SEQ ID NO: 468652 - RNA, 19 nt, Human
aggcugcccagcagcccca

SEQ ID NO: 468653 - RNA, 22 nt, Human
aggcugcccagcagccccaggc

SEQ ID NO: 468654 - RNA, 25 nt, Human
aggggcacccaggccgggccgaagg

SEQ ID NO: 468655 - RNA, 19 nt, Human
auggcccucuccgaaguga

SEQ ID NO: 468656 - RNA, 23 nt, Human
caacaccugcauggacacagcca

SEQ ID NO: 468657 - RNA, 22 nt, Human
caccagaaaguuccacgucagg

SEQ ID NO: 468658 - RNA, 20 nt, Human
caccccgcgcggcaggagcu

SEQ ID NO: 468659 - RNA, 21 nt, Human
cacccgcacauagggcuccac

SEQ ID NO: 468660 - RNA, 19 nt, Human
caccugcauggacacagcc

SEQ ID NO: 468661 - RNA, 23 nt, Human
caccugcauggacacagccagca

SEQ ID NO: 468662 - RNA, 24 nt, Human
caccugcauggacacagccagcag

SEQ ID NO: 468663 - RNA, 23 nt, Human
cacugcccgccgcuccagcuggg

SEQ ID NO: 468664 - RNA, 19 nt, Human
cagcagggaggggcggaag

SEQ ID NO: 468665 - RNA, 20 nt, Human
cagcagggaggggcggaagu

SEQ ID NO: 468666 - RNA, 19 nt, Human
cagcggcgggaagagcucc

SEQ ID NO: 468667 - RNA, 21 nt, Human
cagcugggccuccccaggcuc

SEQ ID NO: 468668 - RNA, 21 nt, Human
cauguccuccuccccaccuca

SEQ ID NO: 468669 - RNA, 23 nt, Human
ccaacaccugcauggacacagcc

SEQ ID NO: 468670 - RNA, 24 nt, Human
ccacccccggauccauguccuccu

SEQ ID NO: 468671 - RNA, 20 nt, Human
ccaggcaccccagcugugcu

SEQ ID NO: 468672 - RNA, 22 nt, Human
ccaggcaccccagcugugcucc

SEQ ID NO: 468673 - RNA, 20 nt, Human
ccaguuccuggaagcccaca

SEQ ID NO: 468674 - RNA, 23 nt, Human
ccaucuaagggcgaaggggcgag

SEQ ID NO: 468675 - RNA, 25 nt, Human
ccauucgggcgccgccgccucggcg

SEQ ID NO: 468676 - RNA, 19 nt, Human
cccaccucaucccggcuca

SEQ ID NO: 468677 - RNA, 19 nt, Human
ccccacggccacccccgga

SEQ ID NO: 468678 - RNA, 19 nt, Human
ccccugcugggccugggga

SEQ ID NO: 468679 - RNA, 25 nt, Human
ccccugcugggccuggggaggcucc

SEQ ID NO: 468680 - RNA, 21 nt, Human
cccgcagcugcaggcggaggc

SEQ ID NO: 468681 - RNA, 18 nt, Human
cccugugguacccucucc

SEQ ID NO: 468682 - RNA, 19 nt, Human
cccugugguacccucuccc

SEQ ID NO: 468683 - RNA, 25 nt, Human
cccugugguacccucucccagcccc

SEQ ID NO: 468684 - RNA, 22 nt, Human
ccgcgcccauggccucucggcg

SEQ ID NO: 468685 - RNA, 24 nt, Human
ccgcuccagcugggccuccccagg

SEQ ID NO: 468686 - RNA, 21 nt, Human
ccggauccauguccuccuccc

SEQ ID NO: 468687 - RNA, 25 nt, Human
ccucugccuggaacauucucuccuc

SEQ ID NO: 468688 - RNA, 23 nt, Human
ccugccccaggaaagacacccgc

SEQ ID NO: 468689 - RNA, 21 nt, Human
ccuggaacauucucuccuccc

SEQ ID NO: 468690 - RNA, 18 nt, Human
ccuggaugggugccccaa

SEQ ID NO: 468691 - RNA, 22 nt, Human
cgagcggggggggagaaacugg

SEQ ID NO: 468692 - RNA, 21 nt, Human
cgcccucacggacaaggugac

SEQ ID NO: 468693 - RNA, 24 nt, Human
cgccuucguugagaccuugaagac

SEQ ID NO: 468694 - RNA, 20 nt, Human
cgcgccccacggccaccccc

SEQ ID NO: 468695 - RNA, 21 nt, Human
cggaaccaaaugccuuggcca

SEQ ID NO: 468696 - RNA, 23 nt, Human
cggaaccaaaugccuuggccaac

SEQ ID NO: 468697 - RNA, 26 nt, Human
cggaaccaaaugccuuggccaacgcc

SEQ ID NO: 468698 - RNA, 18 nt, Human
cggacaaggugaccuuaa

SEQ ID NO: 468699 - RNA, 18 nt, Human
cggccccuccccuuaucc

SEQ ID NO: 468700 - RNA, 24 nt, Human
cgggacaacguggaccccugcugg

SEQ ID NO: 468701 - RNA, 24 nt, Human
cgucccgcagcugcaggcggaggc

SEQ ID NO: 468702 - RNA, 23 nt, Human
cguugagaccuugaagacuaucc

SEQ ID NO: 468703 - RNA, 21 nt, Human
cucaagcuccagcucauucuc

SEQ ID NO: 468704 - RNA, 20 nt, Human
cucaucauccagguccugcu

SEQ ID NO: 468705 - RNA, 18 nt, Human
cuccagcugggccucccc

SEQ ID NO: 468706 - RNA, 21 nt, Human
cuccaggcaccccagcugugc

SEQ ID NO: 468707 - RNA, 18 nt, Human
cuccaguagcgcccucug

SEQ ID NO: 468708 - RNA, 19 nt, Human
cuccccaggcuccaguucc

SEQ ID NO: 468709 - RNA, 21 nt, Human
cuccccaggcuccaguuccug

SEQ ID NO: 468710 - RNA, 23 nt, Human
cuccgccagagauggcccucucc

SEQ ID NO: 468711 - RNA, 25 nt, Human
cuccuccccaccucaucccggcuca

SEQ ID NO: 468712 - RNA, 18 nt, Human
cuccucugaccaggcucc

SEQ ID NO: 468713 - RNA, 21 nt, Human
cucuggcucagcagggagggg

SEQ ID NO: 468714 - RNA, 19 nt, Human
cuggcucagcagggagggg

SEQ ID NO: 468715 - RNA, 20 nt, Human
cugugguacccucucccagc

SEQ ID NO: 468716 - RNA, 20 nt, Human
cuuggucccggcgcggguug

SEQ ID NO: 468717 - RNA, 23 nt, Human
gaacccaucuuugguagaacugg

SEQ ID NO: 468718 - RNA, 23 nt, Human
gaagguaggguuaaaccccgccg

SEQ ID NO: 468719 - RNA, 18 nt, Human
gaucauacuccccugugg

SEQ ID NO: 468720 - RNA, 21 nt, Human
gauccauguccuccuccccac

SEQ ID NO: 468721 - RNA, 18 nt, Human
gcagccccaggcgcagcg

SEQ ID NO: 468722 - RNA, 22 nt, Human
gccccaaaguccuccucugacc

SEQ ID NO: 468723 - RNA, 23 nt, Human
gccccaaaguccuccucugacca

SEQ ID NO: 468724 - RNA, 22 nt, Human
gccgggacaacguggaccccug

SEQ ID NO: 468725 - RNA, 22 nt, Human
gcucaccgacgucucgcccucc

SEQ ID NO: 468726 - RNA, 25 nt, Human
ggaaccaaaugccuuggccaacgcc

SEQ ID NO: 468727 - RNA, 19 nt, Human
ggaaccuucucuggccccc

SEQ ID NO: 468728 - RNA, 19 nt, Human
ggaccaggcugcccagcag

SEQ ID NO: 468729 - RNA, 22 nt, Human
ggccagggcuucucuggcucag

SEQ ID NO: 468730 - RNA, 23 nt, Human
ggcuucucuggcucagcagggag

SEQ ID NO: 468731 - RNA, 18 nt, Human
gggaagagcuccacgaag

SEQ ID NO: 468732 - RNA, 18 nt, Human
gggcaccgagcggggggg

SEQ ID NO: 468733 - RNA, 23 nt, Human
ggggguagcauuggagggggcag

SEQ ID NO: 468734 - RNA, 21 nt, Human
ggguccaugcggagucacugc

SEQ ID NO: 468735 - RNA, 18 nt, Human
gucucgcccuccugcccc

SEQ ID NO: 468736 - RNA, 19 nt, Human
gugagccgggacaacgugg

SEQ ID NO: 468737 - RNA, 21 nt, Human
uaagggcgaaggggcgagcca

SEQ ID NO: 468738 - RNA, 20 nt, Human
uacuucaggucaagcuccac

SEQ ID NO: 468739 - RNA, 27 nt, Human
uagcauuggagggggcaggggagugcu

SEQ ID NO: 468740 - RNA, 23 nt, Human
uaucccggagccccgcgccgggg

SEQ ID NO: 468741 - RNA, 21 nt, Human
ucagcugcucguuccauucgg

SEQ ID NO: 468742 - RNA, 19 nt, Human
ucauccagguccugcucca

SEQ ID NO: 468743 - RNA, 20 nt, Human
uccauguccuccuccccacc

SEQ ID NO: 468744 - RNA, 25 nt, Human
uccauguccuccuccccaccucauc

SEQ ID NO: 468745 - RNA, 22 nt, Human
uccauucgggcgccgccgccuc

SEQ ID NO: 468746 - RNA, 19 nt, Human
uccccaccucaucccggcu

SEQ ID NO: 468747 - RNA, 25 nt, Human
uccccaccucaucccggcucacuuc

SEQ ID NO: 468748 - RNA, 20 nt, Human
uccccaggcuccaguuccug

SEQ ID NO: 468749 - RNA, 25 nt, Human
uccccaggcuccaguuccuggaagc

SEQ ID NO: 468750 - RNA, 21 nt, Human
uccccgcgcgcccucacggac

SEQ ID NO: 468751 - RNA, 24 nt, Human
uccucagggaaccuucucuggccc

SEQ ID NO: 468752 - RNA, 21 nt, Human
uccuggaagcccacauugggg

SEQ ID NO: 468753 - RNA, 22 nt, Human
ucguuccauucgggcgccgccg

SEQ ID NO: 468754 - RNA, 20 nt, Human
ucucgcccuccugccccagg

SEQ ID NO: 468755 - RNA, 21 nt, Human
ucucgcccuccugccccagga

SEQ ID NO: 468756 - RNA, 21 nt, Human
ucuggcucagcagggaggggc

SEQ ID NO: 468757 - RNA, 18 nt, Human
ugagccgggacaacgugg

SEQ ID NO: 468758 - RNA, 22 nt, Human
ugcauggacacagccagcagaa

SEQ ID NO: 468759 - RNA, 19 nt, Human
ugccaagaguucagccucc

SEQ ID NO: 468760 - RNA, 23 nt, Human
ugccccaggaaagacacccgcac

SEQ ID NO: 468761 - RNA, 21 nt, Human
ugcccuggggccggggguagc

SEQ ID NO: 468762 - RNA, 21 nt, Human
ugcuccagcucaagcuccagc

SEQ ID NO: 468763 - RNA, 19 nt, Human
uggaacauucucuccuccc

SEQ ID NO: 468764 - RNA, 19 nt, Human
uggacuuuugcauaugccu

SEQ ID NO: 468765 - RNA, 20 nt, Human
uggccagggcuucucuggcu

SEQ ID NO: 468766 - RNA, 27 nt, Human
uggcccccaaguagaucauacuccuuu

SEQ ID NO: 468767 - RNA, 19 nt, Human
uggccuagacuucgagcua

SEQ ID NO: 468768 - RNA, 21 nt, Human
uggccucucggcgggcacccc

SEQ ID NO: 468769 - RNA, 19 nt, Human
uggggaugauuaacucgaa

SEQ ID NO: 468770 - RNA, 21 nt, Human
uguauagggguccaugcggag

SEQ ID NO: 468771 - RNA, 19 nt, Human
uguccgaacagugcccugg

SEQ ID NO: 468772 - RNA, 21 nt, Human
uguccgaacagugcccugggg

SEQ ID NO: 468773 - RNA, 19 nt, Human
uuggucccggcgcgggugu

SEQ ID NO: 468774 - RNA, 31 nt, Human
uuuccagcuccaucucacuccaggcaccccc

SEQ ID NO: 468775 - RNA, 21 nt, Human
uuuuuuuuuuuuuuuuucggg

SEQ ID NO: 468776 - RNA, 22 nt, Human
uuuuuuuuuuuuuuuuucgggu

SEQ ID NO: 468777 - RNA, 22 nt, Human
aaugacacuccacucugccccu

SEQ ID NO: 468778 - RNA, 19 nt, Human
acacacccacugguggcua

SEQ ID NO: 468779 - RNA, 18 nt, Human
accaaggcccgucaauag

SEQ ID NO: 468780 - RNA, 20 nt, Human
acccccacagccacugcccc

SEQ ID NO: 468781 - RNA, 19 nt, Human
acuccacucugccccuccc

SEQ ID NO: 468782 - RNA, 20 nt, Human
agcaaccacccaugagccuc

SEQ ID NO: 468783 - RNA, 21 nt, Human
agcaaccacccaugagccucc

SEQ ID NO: 468784 - RNA, 25 nt, Human
agcgcccaccaacuccgcuugcggc

SEQ ID NO: 468785 - RNA, 24 nt, Human
cacagaguagccaagcacuacaaa

SEQ ID NO: 468786 - RNA, 26 nt, Human
caccaagauucuguucuucauucagc

SEQ ID NO: 468787 - RNA, 21 nt, Human
cacggcaguucauacugggac

SEQ ID NO: 468788 - RNA, 18 nt, Human
cagcagccagacaggcug

SEQ ID NO: 468789 - RNA, 19 nt, Human
cagcaggccauuguuggga

SEQ ID NO: 468790 - RNA, 20 nt, Human
cauacugggaccucagacca

SEQ ID NO: 468791 - RNA, 23 nt, Human
cauccacucacccaggccuggug

SEQ ID NO: 468792 - RNA, 20 nt, Human
ccacccaugagccuccugcu

SEQ ID NO: 468793 - RNA, 22 nt, Human
ccacgaagggcugcuaggcagc

SEQ ID NO: 468794 - RNA, 27 nt, Human
cccacagccacugccccacacacccac

SEQ ID NO: 468795 - RNA, 24 nt, Human
cccacugguggcuaccaaggcccg

SEQ ID NO: 468796 - RNA, 27 nt, Human
ccccacagccacugccccacacaccca

SEQ ID NO: 468797 - RNA, 19 nt, Human
ccccucccucccuccuucc

SEQ ID NO: 468798 - RNA, 19 nt, Human
ccccucccucccuccuucc

SEQ ID NO: 468799 - RNA, 21 nt, Human
ccucagaccacugaaggcaga

SEQ ID NO: 468800 - RNA, 26 nt, Human
ccuccaugacccugggggguugcugg

SEQ ID NO: 468801 - RNA, 18 nt, Human
ccucccucccuccuuccu

SEQ ID NO: 468802 - RNA, 23 nt, Human
ccuccugccaucacagaguagcc

SEQ ID NO: 468803 - RNA, 23 nt, Human
ccugccaucacagaguagccaag

SEQ ID NO: 468804 - RNA, 25 nt, Human
ccuuccuugcucaggguccauguga

SEQ ID NO: 468805 - RNA, 19 nt, Human
cuccaugacccuggggggu

SEQ ID NO: 468806 - RNA, 23 nt, Human
cuccaugacccugggggguugcu

SEQ ID NO: 468807 - RNA, 23 nt, Human
cuccugcuuuauuccaaucgcau

SEQ ID NO: 468808 - RNA, 21 nt, Human
cucugccccucccucccuccu

SEQ ID NO: 468809 - RNA, 20 nt, Human
cugccccacacacccacugg

SEQ ID NO: 468810 - RNA, 19 nt, Human
cugcuuuauuccaaucgca

SEQ ID NO: 468811 - RNA, 24 nt, Human
cuggucccccaucuugguucuuga

SEQ ID NO: 468812 - RNA, 21 nt, Human
cugguguccagguccagcagc

SEQ ID NO: 468813 - RNA, 19 nt, Human
gaacagcaggccauuguug

SEQ ID NO: 468814 - RNA, 21 nt, Human
gaguggccacgaagggcugcu

SEQ ID NO: 468815 - RNA, 18 nt, Human
gcauccacucacccaggc

SEQ ID NO: 468816 - RNA, 22 nt, Human
gccugaaaaccucucucccuuc

SEQ ID NO: 468817 - RNA, 22 nt, Human
ggaggugugugugccugcccca

SEQ ID NO: 468818 - RNA, 20 nt, Human
gguccagcagccagacaggc

SEQ ID NO: 468819 - RNA, 18 nt, Human
uacaggugucaagguugg

SEQ ID NO: 468820 - RNA, 20 nt, Human
uccuggguccuccaugaccc

SEQ ID NO: 468821 - RNA, 21 nt, Human
ugaacagcaggccauuguugg

SEQ ID NO: 468822 - RNA, 21 nt, Human
ugacccugggggguugcuggu

SEQ ID NO: 468823 - RNA, 22 nt, Human
ugagaggaaugcuggaaugaca

SEQ ID NO: 468824 - RNA, 24 nt, Human
ugaguaaagaguggccacgaaggg

SEQ ID NO: 468825 - RNA, 20 nt, Human
ugcagucauucuuacacccc

SEQ ID NO: 468826 - RNA, 22 nt, Human
ugccccacagauggcuguggug

SEQ ID NO: 468827 - RNA, 20 nt, Human
uggaggguccuggguccucc

SEQ ID NO: 468828 - RNA, 18 nt, Human
uggccagauuccugacgg

SEQ ID NO: 468829 - RNA, 22 nt, Human
uggguccuccaugacccugggg

SEQ ID NO: 468830 - RNA, 20 nt, Human
ugugaacagcaggccauugu

SEQ ID NO: 468831 - RNA, 21 nt, Human
uguugcagucauucuuacacc

SEQ ID NO: 468832 - RNA, 19 nt, Human
uuacagggcagauccuguc

SEQ ID NO: 468833 - RNA, 21 nt, Human
uuacaggugucaagguuggag

SEQ ID NO: 468834 - RNA, 18 nt, Human
uugagcccuuaaugaaca

SEQ ID NO: 468835 - RNA, 21 nt, Human
uugggaagugccuguugcagu

SEQ ID NO: 468836 - RNA, 21 nt, Human
uuuuuuuuuuuuuuuuucauu

SEQ ID NO: 468837 - RNA, 21 nt, Human
aaaacaucauuauguagugca

SEQ ID NO: 468838 - RNA, 19 nt, Human
aaacagaagagcauacaac

SEQ ID NO: 468839 - RNA, 23 nt, Human
aaacagaagagcauacaaccuaa

SEQ ID NO: 468840 - RNA, 21 nt, Human
aaacaggcuacaaaccuguac

SEQ ID NO: 468841 - RNA, 22 nt, Human
aaacaggcuacaaaccuguaca

SEQ ID NO: 468842 - RNA, 20 nt, Human
aaaccaggagucugaacacg

SEQ ID NO: 468843 - RNA, 22 nt, Human
aaagacaacaaaggugacaaag

SEQ ID NO: 468844 - RNA, 24 nt, Human
aaauaggauuuugaucacaaaaau

SEQ ID NO: 468845 - RNA, 18 nt, Human
aagaaaggcaauuaggga

SEQ ID NO: 468846 - RNA, 18 nt, Human
aagccuggaagaaaccag

SEQ ID NO: 468847 - RNA, 24 nt, Human
aagccuggaagaaaccaggagucu

SEQ ID NO: 468848 - RNA, 21 nt, Human
aauaccugguauauacaugac

SEQ ID NO: 468849 - RNA, 21 nt, Human
aggaagcugaugauguccacu

SEQ ID NO: 468850 - RNA, 22 nt, Human
aguaguuuuauuuuuucuaaau

SEQ ID NO: 468851 - RNA, 24 nt, Human
aucauguuacugcacugaauacug

SEQ ID NO: 468852 - RNA, 18 nt, Human
caaagacaacaaagguga

SEQ ID NO: 468853 - RNA, 27 nt, Human
caaagacaacaaaggugacaaaggagg

SEQ ID NO: 468854 - RNA, 21 nt, Human
caacaaaggugacaaagucag

SEQ ID NO: 468855 - RNA, 19 nt, Human
ccuaagaaaaaugcaaaac

SEQ ID NO: 468856 - RNA, 20 nt, Human
cgccucggcucucccauugg

SEQ ID NO: 468857 - RNA, 24 nt, Human
ggugacaaagucagguaaaagaaa

SEQ ID NO: 468858 - RNA, 23 nt, Human
guaaaauaauaugcagccuaaag

SEQ ID NO: 468859 - RNA, 22 nt, Human
uaaaacagaagagcauacaacc

SEQ ID NO: 468860 - RNA, 23 nt, Human
uaaaauugugcaaaacaaacccc

SEQ ID NO: 468861 - RNA, 18 nt, Human
uaagccuggaagaaacca

SEQ ID NO: 468862 - RNA, 24 nt, Human
uacaaccuaagaaaaaugcaaaac

SEQ ID NO: 468863 - RNA, 22 nt, Human
uacaguauuauaaucuuaugag

SEQ ID NO: 468864 - RNA, 20 nt, Human
uaggcaacuguaacauaaug

SEQ ID NO: 468865 - RNA, 22 nt, Human
uauauacaugacaaaacaaagc

SEQ ID NO: 468866 - RNA, 27 nt, Human
uauauacaugacaaaacaaagcaugua

SEQ ID NO: 468867 - RNA, 24 nt, Human
ucaaagacaacaaaggugacaaag

SEQ ID NO: 468868 - RNA, 21 nt, Human
uccacuguaagccuggaagaa

SEQ ID NO: 468869 - RNA, 22 nt, Human
uccacuguaagccuggaagaaa

SEQ ID NO: 468870 - RNA, 21 nt, Human
ucuaaacacagaaaagguaua

SEQ ID NO: 468871 - RNA, 21 nt, Human
ucugucauugaccaaaacauc

SEQ ID NO: 468872 - RNA, 22 nt, Human
ugacaaagucagguaaaagaaa

SEQ ID NO: 468873 - RNA, 20 nt, Human
ugauguccacuguaagccug

SEQ ID NO: 468874 - RNA, 18 nt, Human
uggaagaaaccaggaguc

SEQ ID NO: 468875 - RNA, 27 nt, Human
uuaaagcaggaagcugaugauguccac

SEQ ID NO: 468876 - RNA, 19 nt, Human
uucaaagacaacaaaggug

SEQ ID NO: 468877 - RNA, 18 nt, Human
aaacccccaaaagcucag

SEQ ID NO: 468878 - RNA, 22 nt, Human
aaccaacuucaguuaaaaaccc

SEQ ID NO: 468879 - RNA, 19 nt, Human
aagcaaacacacauacucc

SEQ ID NO: 468880 - RNA, 21 nt, Human
aagcaaacacacauacuccac

SEQ ID NO: 468881 - RNA, 22 nt, Human
aagcaaacacacauacuccaca

SEQ ID NO: 468882 - RNA, 21 nt, Human
aagcucagguucugaaaugcc

SEQ ID NO: 468883 - RNA, 24 nt, Human
acaaccaacuucaguuaaaaaccc

SEQ ID NO: 468884 - RNA, 19 nt, Human
acaagaaagauaaaacaac

SEQ ID NO: 468885 - RNA, 31 nt, Human
acacacauacuccacacauacacauaugugg

SEQ ID NO: 468886 - RNA, 22 nt, Human
acacagucccgcucacccacca

SEQ ID NO: 468887 - RNA, 25 nt, Human
aguaauugcaggagaggaauuaccc

SEQ ID NO: 468888 - RNA, 23 nt, Human
auccacuuaaacugguuaacaaa

SEQ ID NO: 468889 - RNA, 18 nt, Human
auuucauccacggagaag

SEQ ID NO: 468890 - RNA, 30 nt, Human
caaacacacauacuccacacauacacauag

SEQ ID NO: 468891 - RNA, 23 nt, Human
cacaaugaggaguuucuauuuca

SEQ ID NO: 468892 - RNA, 22 nt, Human
cacacagucccgcucacccacc

SEQ ID NO: 468893 - RNA, 18 nt, Human
cacacauacuccacacau

SEQ ID NO: 468894 - RNA, 21 nt, Human
cacacauacuccacacauaca

SEQ ID NO: 468895 - RNA, 18 nt, Human
cagcagcacuugugucuc

SEQ ID NO: 468896 - RNA, 18 nt, Human
ccaguaauacgcuucuuu

SEQ ID NO: 468897 - RNA, 19 nt, Human
ccauucuuuguuaaagaaa

SEQ ID NO: 468898 - RNA, 21 nt, Human
ccccauauaagggaugagaac

SEQ ID NO: 468899 - RNA, 26 nt, Human
ccucugagacgcuucacacucagccu

SEQ ID NO: 468900 - RNA, 22 nt, Human
cgcacacacucacacacagucc

SEQ ID NO: 468901 - RNA, 20 nt, Human
cgcgcacacacucacacaca

SEQ ID NO: 468902 - RNA, 21 nt, Human
cucacacacagucccgcucac

SEQ ID NO: 468903 - RNA, 18 nt, Human
cuccacacauacacauau

SEQ ID NO: 468904 - RNA, 22 nt, Human
cuggucacacaaugaggaguuu

SEQ ID NO: 468905 - RNA, 19 nt, Human
cuguauguucucuuuacau

SEQ ID NO: 468906 - RNA, 21 nt, Human
gagaaaggggcauacuuccau

SEQ ID NO: 468907 - RNA, 22 nt, Human
gcucacccaccaaaggcccgcg

SEQ ID NO: 468908 - RNA, 25 nt, Human
ggagaagcaaacacacauacuccac

SEQ ID NO: 468909 - RNA, 19 nt, Human
guuaaaaacccccaaaagc

SEQ ID NO: 468910 - RNA, 19 nt, Human
uaaaaacccccaaaagcuc

SEQ ID NO: 468911 - RNA, 19 nt, Human
uaaaaacccccaaaagcuc

SEQ ID NO: 468912 - RNA, 21 nt, Human
uaaaaacccccaaaagcucag

SEQ ID NO: 468913 - RNA, 22 nt, Human
uaaaaacccccaaaagcucagg

SEQ ID NO: 468914 - RNA, 22 nt, Human
uaaaacaagaaagauaaaacaa

SEQ ID NO: 468915 - RNA, 24 nt, Human
uaaacaguuaaagcacacauuuug

SEQ ID NO: 468916 - RNA, 25 nt, Human
uaccacugucaagucauuuaaacaa

SEQ ID NO: 468917 - RNA, 21 nt, Human
uacccaguaauacgcuucuuu

SEQ ID NO: 468918 - RNA, 23 nt, Human
uacccaguaauacgcuucuuuua

SEQ ID NO: 468919 - RNA, 27 nt, Human
uacgcgcacacacucacacacaguccc

SEQ ID NO: 468920 - RNA, 21 nt, Human
uauaaaacaagaaagauaaaa

SEQ ID NO: 468921 - RNA, 25 nt, Human
uaugugcgcacauacgcgcacacag

SEQ ID NO: 468922 - RNA, 22 nt, Human
uauuuaaaaagguucugacauu

SEQ ID NO: 468923 - RNA, 24 nt, Human
uauuuuugugccuuuaucuuaaaa

SEQ ID NO: 468924 - RNA, 18 nt, Human
ucacccaccaaaggcccg

SEQ ID NO: 468925 - RNA, 22 nt, Human
ucugaaaugccucugagacgcu

SEQ ID NO: 468926 - RNA, 22 nt, Human
ucuucaguucugacauaucaca

SEQ ID NO: 468927 - RNA, 19 nt, Human
ugacauaucacaucagcga

SEQ ID NO: 468928 - RNA, 20 nt, Human
ugccccauauaagggaugag

SEQ ID NO: 468929 - RNA, 21 nt, Human
uggagcacuaccacugucaag

SEQ ID NO: 468930 - RNA, 27 nt, Human
ugugcgcacauacgcgcacacacucac

SEQ ID NO: 468931 - RNA, 19 nt, Human
uguuaaagaaaaaugcccc

SEQ ID NO: 468932 - RNA, 23 nt, Human
uguucucuuuacauauucuuuca

SEQ ID NO: 468933 - RNA, 21 nt, Human
uuaaaaagguucugacauuaa

SEQ ID NO: 468934 - RNA, 25 nt, Human
uuaacaaauaaaaacacuuuauuac

SEQ ID NO: 468935 - RNA, 26 nt, Human
uucccauaaacuuugcuuucuuauuu

SEQ ID NO: 468936 - RNA, 21 nt, Human
uuuaaccauuccuggucacac

SEQ ID NO: 468937 - RNA, 20 nt, Human
uuucacugaaaccauucuuu

SEQ ID NO: 468938 - RNA, 25 nt, Human
uuuuuuuuuuuuuuuuuuuccaagg

SEQ ID NO: 468939 - RNA, 24 nt, Human
aagcaugacauccuugccuugacc

SEQ ID NO: 468940 - RNA, 20 nt, Human
aagggcuguggacuguugcu

SEQ ID NO: 468941 - RNA, 22 nt, Human
acaaggaacagaagccaccaag

SEQ ID NO: 468942 - RNA, 21 nt, Human
acagcuccuggcgcagggcca

SEQ ID NO: 468943 - RNA, 22 nt, Human
accuugggggaggaucaaaggg

SEQ ID NO: 468944 - RNA, 20 nt, Human
agagggcccuggaaacaucu

SEQ ID NO: 468945 - RNA, 20 nt, Human
agauacaacauccaugaagc

SEQ ID NO: 468946 - RNA, 19 nt, Human
agcacaguggggcccgugc

SEQ ID NO: 468947 - RNA, 21 nt, Human
agccucugguccuuaguucag

SEQ ID NO: 468948 - RNA, 21 nt, Human
aggauucccucaguggccucc

SEQ ID NO: 468949 - RNA, 20 nt, Human
aggggaaggaaaggaaaagg

SEQ ID NO: 468950 - RNA, 23 nt, Human
aguggggcccgugcugcuguggg

SEQ ID NO: 468951 - RNA, 18 nt, Human
aucuagggguuggguccu

SEQ ID NO: 468952 - RNA, 22 nt, Human
auuugggcuagccagggaaggc

SEQ ID NO: 468953 - RNA, 18 nt, Human
cacagcagcugccccugc

SEQ ID NO: 468954 - RNA, 18 nt, Human
cacagcagcugccccugc

SEQ ID NO: 468955 - RNA, 21 nt, Human
cacaguggggcccgugcugcu

SEQ ID NO: 468956 - RNA, 18 nt, Human
cacaguugcugaggcugg

SEQ ID NO: 468957 - RNA, 21 nt, Human
cagcugguggcuccuucucag

SEQ ID NO: 468958 - RNA, 22 nt, Human
caggcccugcagcuggcugccc

SEQ ID NO: 468959 - RNA, 22 nt, Human
caggcccugcagcuggcugucc

SEQ ID NO: 468960 - RNA, 23 nt, Human
ccagaaacaucuggcagccucug

SEQ ID NO: 468961 - RNA, 20 nt, Human
ccagacacugauuugcugac

SEQ ID NO: 468962 - RNA, 21 nt, Human
ccagcaggcucccccagaguc

SEQ ID NO: 468963 - RNA, 19 nt, Human
ccagcucccggccaucaag

SEQ ID NO: 468964 - RNA, 20 nt, Human
ccagcugugacagcuccugg

SEQ ID NO: 468965 - RNA, 18 nt, Human
ccaugcucaggcccugca

SEQ ID NO: 468966 - RNA, 20 nt, Human
cccccagagucggugcagcc

SEQ ID NO: 468967 - RNA, 24 nt, Human
cccgcaggucacacucacucugga

SEQ ID NO: 468968 - RNA, 20 nt, Human
cccuggaaacaucuuagggg

SEQ ID NO: 468969 - RNA, 24 nt, Human
ccggcuggcggccugacccuccuc

SEQ ID NO: 468970 - RNA, 19 nt, Human
ccuaguccugauggcugcg

SEQ ID NO: 468971 - RNA, 21 nt, Human
ccuccggcuggcggccugacc

SEQ ID NO: 468972 - RNA, 20 nt, Human
ccugcagcuggcugcccagc

SEQ ID NO: 468973 - RNA, 22 nt, Human
ccugcagcuggcuguccagaca

SEQ ID NO: 468974 - RNA, 19 nt, Human
ccuggccuucaagcaugac

SEQ ID NO: 468975 - RNA, 21 nt, Human
ccuugggggaggaucaaaggg

SEQ ID NO: 468976 - RNA, 25 nt, Human
ccuuuugugaacaucuugggagggu

SEQ ID NO: 468977 - RNA, 23 nt, Human
cucaccuugggggaggaucaaag

SEQ ID NO: 468978 - RNA, 19 nt, Human
cucucaagucuacccuggc

SEQ ID NO: 468979 - RNA, 21 nt, Human
cugaggcuggugcugacugcc

SEQ ID NO: 468980 - RNA, 19 nt, Human
cugcagcacugugcauggg

SEQ ID NO: 468981 - RNA, 23 nt, Human
cugcagcacugugcauggguuuu

SEQ ID NO: 468982 - RNA, 26 nt, Human
cugcagcacugugcauggguuuuggu

SEQ ID NO: 468983 - RNA, 19 nt, Human
cugccccugccagccaugc

SEQ ID NO: 468984 - RNA, 21 nt, Human
cugccccugccagccaugcuc

SEQ ID NO: 468985 - RNA, 19 nt, Human
cuggcggccugacccuccu

SEQ ID NO: 468986 - RNA, 27 nt, Human
cugggcucuggggugauguuccccgag

SEQ ID NO: 468987 - RNA, 20 nt, Human
cuggggugauguuccccgag

SEQ ID NO: 468988 - RNA, 19 nt, Human
cuuaggggaaggaaaggaa

SEQ ID NO: 468989 - RNA, 21 nt, Human
cuugcagcuucugcucaaagc

SEQ ID NO: 468990 - RNA, 22 nt, Human
gaaacugaggcugggagccuca

SEQ ID NO: 468991 - RNA, 18 nt, Human
gaacaugcauuuucaagu

SEQ ID NO: 468992 - RNA, 19 nt, Human
gaacaugcauuuucaaguu

SEQ ID NO: 468993 - RNA, 24 nt, Human
gaaccaaaggcagggcugugggga

SEQ ID NO: 468994 - RNA, 19 nt, Human
gaagccgaggggacaagga

SEQ ID NO: 468995 - RNA, 22 nt, Human
gacaggccacuggcugugggcc

SEQ ID NO: 468996 - RNA, 25 nt, Human
gauuccguucuuuccugggguucua

SEQ ID NO: 468997 - RNA, 18 nt, Human
gcagcugccccugccaga

SEQ ID NO: 468998 - RNA, 18 nt, Human
gcccugcagcuggcugcc

SEQ ID NO: 468999 - RNA, 24 nt, Human
gcucuggggugauguuccccgagu

SEQ ID NO: 469000 - RNA, 21 nt, Human
gcucuggugcagccuccggcu

SEQ ID NO: 469001 - RNA, 20 nt, Human
gcugcuggauaaggcugggc

SEQ ID NO: 469002 - RNA, 24 nt, Human
gcuuggagccccuuuccuccagcu

SEQ ID NO: 469003 - RNA, 23 nt, Human
ggacacgugaggagccagaaaca

SEQ ID NO: 469004 - RNA, 22 nt, Human
ggaccugaagagcagcacagug

SEQ ID NO: 469005 - RNA, 23 nt, Human
ggcugcgaagagaagccgagggg

SEQ ID NO: 469006 - RNA, 25 nt, Human
ggcuggaaggcgcugcuccgccgac

SEQ ID NO: 469007 - RNA, 22 nt, Human
gggaauaaagagaacucuuggc

SEQ ID NO: 469008 - RNA, 24 nt, Human
gggcaccagagggcccuggaaaca

SEQ ID NO: 469009 - RNA, 22 nt, Human
gggcauugaucaaggcuaguug

SEQ ID NO: 469010 - RNA, 19 nt, Human
gggguuggguccuggccag

SEQ ID NO: 469011 - RNA, 23 nt, Human
guugcuugugggcacagggcaau

SEQ ID NO: 469012 - RNA, 20 nt, Human
uaagcccucaccuuggggga

SEQ ID NO: 469013 - RNA, 21 nt, Human
uacauacggacacugaucaag

SEQ ID NO: 469014 - RNA, 21 nt, Human
uacggacacugaucaaggcca

SEQ ID NO: 469015 - RNA, 19 nt, Human
ucaagcaugacauccuugc

SEQ ID NO: 469016 - RNA, 19 nt, Human
ucacacucacucuggacgc

SEQ ID NO: 469017 - RNA, 23 nt, Human
ucaccuugggggaggaucaaagg

SEQ ID NO: 469018 - RNA, 18 nt, Human
ucagauacaacauccaug

SEQ ID NO: 469019 - RNA, 18 nt, Human
ucaggcccugcagcuggc

SEQ ID NO: 469020 - RNA, 22 nt, Human
ucagggccuggccucauucagg

SEQ ID NO: 469021 - RNA, 20 nt, Human
ucaguggccuccuuagugcc

SEQ ID NO: 469022 - RNA, 18 nt, Human
ucccucaguggccuccuu

SEQ ID NO: 469023 - RNA, 18 nt, Human
ucuaaacagauugccugg

SEQ ID NO: 469024 - RNA, 19 nt, Human
ucucugggaacugcauagg

SEQ ID NO: 469025 - RNA, 22 nt, Human
ugaagagcagcacaguggggcc

SEQ ID NO: 469026 - RNA, 21 nt, Human
ugccagacacgcucaggcccu

SEQ ID NO: 469027 - RNA, 22 nt, Human
ugccaggugugaggagaguucc

SEQ ID NO: 469028 - RNA, 18 nt, Human
ugccccugccagacacgc

SEQ ID NO: 469029 - RNA, 18 nt, Human
ugccuaagcccucaccuu

SEQ ID NO: 469030 - RNA, 23 nt, Human
ugcugugggggaaacugaggcug

SEQ ID NO: 469031 - RNA, 27 nt, Human
ugcugugggggaaacugaggcugggag

SEQ ID NO: 469032 - RNA, 20 nt, Human
uggaaggaagaggacagugg

SEQ ID NO: 469033 - RNA, 21 nt, Human
ugggccuguaggucucugcac

SEQ ID NO: 469034 - RNA, 20 nt, Human
ugggggaaacugaggcuggg

SEQ ID NO: 469035 - RNA, 22 nt, Human
ugggggaaacugaggcugggag

SEQ ID NO: 469036 - RNA, 22 nt, Human
ugguggcugggacagccacgug

SEQ ID NO: 469037 - RNA, 18 nt, Human
ugugacagcuccuggcgc

SEQ ID NO: 469038 - RNA, 20 nt, Human
uuccuccagcugguggcucc

SEQ ID NO: 469039 - RNA, 25 nt, Human
uucuacagcugccuaagcccucacc

SEQ ID NO: 469040 - RNA, 21 nt, Human
aaacuuuuauuuuggaaugau

SEQ ID NO: 469041 - RNA, 22 nt, Human
aacagcugaccuuagcuccaug

SEQ ID NO: 469042 - RNA, 24 nt, Human
aauaaacuuuuauuuuggaaugau

SEQ ID NO: 469043 - RNA, 21 nt, Human
aauucuauuacuggucaccuc

SEQ ID NO: 469044 - RNA, 22 nt, Human
accaagcaauuccagccaacag

SEQ ID NO: 469045 - RNA, 21 nt, Human
acccagccuaccccaagguca

SEQ ID NO: 469046 - RNA, 19 nt, Human
acucuguucccuuucccca

SEQ ID NO: 469047 - RNA, 21 nt, Human
acuguccuagucccaguucca

SEQ ID NO: 469048 - RNA, 26 nt, Human
agagaaugcaccccugcuaucccuuc

SEQ ID NO: 469049 - RNA, 19 nt, Human
agagacucacuuccugccc

SEQ ID NO: 469050 - RNA, 20 nt, Human
agaguuccuguauacccuuc

SEQ ID NO: 469051 - RNA, 24 nt, Human
agcuuuguuugcagcuagaggugc

SEQ ID NO: 469052 - RNA, 24 nt, Human
aggccgcguagcgguggcagcccc

SEQ ID NO: 469053 - RNA, 20 nt, Human
aggcugcuacugcaagucug

SEQ ID NO: 469054 - RNA, 21 nt, Human
agucccaguuccaggccaaga

SEQ ID NO: 469055 - RNA, 21 nt, Human
aguuuuauugcaggaggcagu

SEQ ID NO: 469056 - RNA, 25 nt, Human
auaguacaaagaguuccuguauacc

SEQ ID NO: 469057 - RNA, 19 nt, Human
augcaccccugcuaucccu

SEQ ID NO: 469058 - RNA, 25 nt, Human
auggagagacucacuuccugcccca

SEQ ID NO: 469059 - RNA, 23 nt, Human
caacuuucccggggaaagagaau

SEQ ID NO: 469060 - RNA, 23 nt, Human
caauucuguucccugcugucuua

SEQ ID NO: 469061 - RNA, 19 nt, Human
caccucagucaacuuuccc

SEQ ID NO: 469062 - RNA, 19 nt, Human
caccucuuccccuagaccc

SEQ ID NO: 469063 - RNA, 22 nt, Human
cacuguacagugaguccaaggc

SEQ ID NO: 469064 - RNA, 19 nt, Human
cagagagaaagggggaaga

SEQ ID NO: 469065 - RNA, 19 nt, Human
cagcaaaagcuaacuggua

SEQ ID NO: 469066 - RNA, 23 nt, Human
cagcagugcagacaaggaggcac

SEQ ID NO: 469067 - RNA, 21 nt, Human
cagcccccaaaggaguagaag

SEQ ID NO: 469068 - RNA, 22 nt, Human
cagccuaccccaaggucaacau

SEQ ID NO: 469069 - RNA, 20 nt, Human
cagcugagguaacagcugac

SEQ ID NO: 469070 - RNA, 23 nt, Human
cagugcagacaaggaggcacucc

SEQ ID NO: 469071 - RNA, 19 nt, Human
ccaaaggaguagaaguagu

SEQ ID NO: 469072 - RNA, 23 nt, Human
ccaaaggaguagaaguagucacc

SEQ ID NO: 469073 - RNA, 23 nt, Human
ccagcccaaauugccaacccaua

SEQ ID NO: 469074 - RNA, 24 nt, Human
ccagcccaaauugccaacccauag

SEQ ID NO: 469075 - RNA, 24 nt, Human
ccaggcaagugaguaaggcuaucc

SEQ ID NO: 469076 - RNA, 20 nt, Human
ccaggugugucuucugggcu

SEQ ID NO: 469077 - RNA, 24 nt, Human
cccaaaggaguagaaguagucacc

SEQ ID NO: 469078 - RNA, 21 nt, Human
cccaacaccucuuccccuaga

SEQ ID NO: 469079 - RNA, 24 nt, Human
cccaacaccucuuccccuagaccc

SEQ ID NO: 469080 - RNA, 22 nt, Human
cccagagucagacccucucgcc

SEQ ID NO: 469081 - RNA, 25 nt, Human
cccauaccagcagugcagacaagga

SEQ ID NO: 469082 - RNA, 19 nt, Human
ccccaacaccucuuccccu

SEQ ID NO: 469083 - RNA, 24 nt, Human
ccccaacaccucuuccccuagacc

SEQ ID NO: 469084 - RNA, 23 nt, Human
ccccagggacucuugguuuucag

SEQ ID NO: 469085 - RNA, 21 nt, Human
ccccccgacccgcgccggccc

SEQ ID NO: 469086 - RNA, 21 nt, Human
ccccuagacccugagggccag

SEQ ID NO: 469087 - RNA, 21 nt, Human
ccccucgggcgccccccgacc

SEQ ID NO: 469088 - RNA, 18 nt, Human
cccuagacccugagggcc

SEQ ID NO: 469089 - RNA, 22 nt, Human
cccucuggaauguccuaccugg

SEQ ID NO: 469090 - RNA, 18 nt, Human
cccugcccagcguuccuc

SEQ ID NO: 469091 - RNA, 19 nt, Human
cccugcgcgccgccgcucg

SEQ ID NO: 469092 - RNA, 23 nt, Human
cccugcgcgccgccgcucggccc

SEQ ID NO: 469093 - RNA, 19 nt, Human
ccgcccugcgcgccgccgc

SEQ ID NO: 469094 - RNA, 20 nt, Human
ccgcccugcgcgccgccgcu

SEQ ID NO: 469095 - RNA, 24 nt, Human
ccucuggaauguccuaccuggccu

SEQ ID NO: 469096 - RNA, 22 nt, Human
ccugcugucuuagcuuuguuug

SEQ ID NO: 469097 - RNA, 22 nt, Human
ccuggccuaaccccauaccagc

SEQ ID NO: 469098 - RNA, 21 nt, Human
cggcagcggccggaugagcac

SEQ ID NO: 469099 - RNA, 18 nt, Human
cggcccgggccccucggg

SEQ ID NO: 469100 - RNA, 19 nt, Human
cggcccgggccccucgggc

SEQ ID NO: 469101 - RNA, 22 nt, Human
cgggcgccccccgacccgcgcc

SEQ ID NO: 469102 - RNA, 21 nt, Human
cguuccuccugcacgcagccc

SEQ ID NO: 469103 - RNA, 23 nt, Human
cuaccuggccuaaccccauacca

SEQ ID NO: 469104 - RNA, 19 nt, Human
cuagacccugagggccagg

SEQ ID NO: 469105 - RNA, 20 nt, Human
cuaucccuucugcauggccc

SEQ ID NO: 469106 - RNA, 21 nt, Human
cucacuuccugccccaacacc

SEQ ID NO: 469107 - RNA, 19 nt, Human
cucggcccgggccccucgg

SEQ ID NO: 469108 - RNA, 19 nt, Human
cugaggcuuaaaagugccg

SEQ ID NO: 469109 - RNA, 19 nt, Human
cugggccccuuugauccag

SEQ ID NO: 469110 - RNA, 19 nt, Human
cuggggcucccacacugua

SEQ ID NO: 469111 - RNA, 20 nt, Human
gaccauccaggcccagcuga

SEQ ID NO: 469112 - RNA, 22 nt, Human
gacccgcgccggcccugcccag

SEQ ID NO: 469113 - RNA, 23 nt, Human
gagcagcagaacugcccuguuga

SEQ ID NO: 469114 - RNA, 23 nt, Human
gaugccacauugcacugaagaca

SEQ ID NO: 469115 - RNA, 18 nt, Human
gcauggcccagccugcug

SEQ ID NO: 469116 - RNA, 22 nt, Human
gccacaagcucuuugugguucc

SEQ ID NO: 469117 - RNA, 19 nt, Human
gccacauggaggagaacca

SEQ ID NO: 469118 - RNA, 27 nt, Human
gccccaacaccucuuccccuagacccu

SEQ ID NO: 469119 - RNA, 19 nt, Human
gccgcccugcgcgccgccg

SEQ ID NO: 469120 - RNA, 23 nt, Human
gcuuggcggggauggucucucgc

SEQ ID NO: 469121 - RNA, 23 nt, Human
ggcccagccugcuggaggccagg

SEQ ID NO: 469122 - RNA, 23 nt, Human
ggggcacgcugucuggguccucc

SEQ ID NO: 469123 - RNA, 23 nt, Human
guccuaccuggccuaaccccaua

SEQ ID NO: 469124 - RNA, 19 nt, Human
uaaaagugccgagugacca

SEQ ID NO: 469125 - RNA, 18 nt, Human
uacagugaguccaaggcc

SEQ ID NO: 469126 - RNA, 26 nt, Human
uacagugaguccaaggccuuguagcu

SEQ ID NO: 469127 - RNA, 19 nt, Human
uacaguggguccagcccau

SEQ ID NO: 469128 - RNA, 23 nt, Human
uaucccuucugcauggcccagcc

SEQ ID NO: 469129 - RNA, 19 nt, Human
ucacucucuuuggaauccu

SEQ ID NO: 469130 - RNA, 24 nt, Human
uccaaggccuuguagcuggugaga

SEQ ID NO: 469131 - RNA, 23 nt, Human
ucccaguuccaggccaagaacuc

SEQ ID NO: 469132 - RNA, 19 nt, Human
uccccagggacucuugguu

SEQ ID NO: 469133 - RNA, 22 nt, Human
ucccuuagagggcagugagaac

SEQ ID NO: 469134 - RNA, 19 nt, Human
uccuagaccauccaggccc

SEQ ID NO: 469135 - RNA, 24 nt, Human
uccuauugucacagaggugggaac

SEQ ID NO: 469136 - RNA, 21 nt, Human
uccuccugcacgcagccccau

SEQ ID NO: 469137 - RNA, 21 nt, Human
ucucucgcugcaguugcuggu

SEQ ID NO: 469138 - RNA, 22 nt, Human
ucucuugguaaugggaucccag

SEQ ID NO: 469139 - RNA, 25 nt, Human
ucugaccaaaagaacuuagcagaag

SEQ ID NO: 469140 - RNA, 19 nt, Human
ucuuacaucaccaugguac

SEQ ID NO: 469141 - RNA, 20 nt, Human
ugaagguggcagcaggugcc

SEQ ID NO: 469142 - RNA, 22 nt, Human
ugaauaagccugagcuagccug

SEQ ID NO: 469143 - RNA, 24 nt, Human
ugaccuuagcuccaugagggaucc

SEQ ID NO: 469144 - RNA, 24 nt, Human
ugaccuuagcuccaugagggaucc

SEQ ID NO: 469145 - RNA, 20 nt, Human
ugagaacaaggccugccuua

SEQ ID NO: 469146 - RNA, 25 nt, Human
ugagcccagcccaaauugccaaccc

SEQ ID NO: 469147 - RNA, 22 nt, Human
ugauuugcucugaccaaaagaa

SEQ ID NO: 469148 - RNA, 23 nt, Human
ugcaagucugguguggaugcucc

SEQ ID NO: 469149 - RNA, 21 nt, Human
ugcacugaagacacucucccu

SEQ ID NO: 469150 - RNA, 23 nt, Human
ugccgagugaccaaguucccuua

SEQ ID NO: 469151 - RNA, 25 nt, Human
ugcugguaggccgcguagcgguggc

SEQ ID NO: 469152 - RNA, 18 nt, Human
uggaauccugaagccauc

SEQ ID NO: 469153 - RNA, 26 nt, Human
uggaauguccuaccuggccuaacccc

SEQ ID NO: 469154 - RNA, 18 nt, Human
uggacuggacaagcuugg

SEQ ID NO: 469155 - RNA, 18 nt, Human
uggcagagugaggcccca

SEQ ID NO: 469156 - RNA, 25 nt, Human
ugggcucuugaagguggcagcaggu

SEQ ID NO: 469157 - RNA, 24 nt, Human
uggguccagcccauggagagacuc

SEQ ID NO: 469158 - RNA, 20 nt, Human
ugguacaucugucaaaacca

SEQ ID NO: 469159 - RNA, 20 nt, Human
ugguguggaugcucccaggu

SEQ ID NO: 469160 - RNA, 18 nt, Human
uguagcuggugagagggg

SEQ ID NO: 469161 - RNA, 23 nt, Human
uguauacccuucacccagccuac

SEQ ID NO: 469162 - RNA, 22 nt, Human
ugugauaggugaaaaauggcca

SEQ ID NO: 469163 - RNA, 19 nt, Human
uguuacacagcaaaagcua

SEQ ID NO: 469164 - RNA, 18 nt, Human
uuccugccccaacaccuc

SEQ ID NO: 469165 - RNA, 20 nt, Human
uugcacugaagacacucucc

SEQ ID NO: 469166 - RNA, 26 nt, Human
uugcagagauaguacaaagaguuccu

SEQ ID NO: 469167 - RNA, 23 nt, Human
uuuacagagaaguugcagagaua

SEQ ID NO: 469168 - RNA, 24 nt, Human
uuugauccagaggacaucgauggg

SEQ ID NO: 469169 - RNA, 18 nt, Human
uuuuauugcaggaggcag

SEQ ID NO: 469170 - RNA, 25 nt, Human
agagcccuuccacaugcggcccuuc

SEQ ID NO: 469171 - RNA, 27 nt, Human
augaaggaggacacagcucagagcccu

SEQ ID NO: 469172 - RNA, 21 nt, Human
augaggcagcggaagagggaa

SEQ ID NO: 469173 - RNA, 23 nt, Human
caacccugccccacggagaccgg

SEQ ID NO: 469174 - RNA, 26 nt, Human
cccaacccugccccacggagaccggc

SEQ ID NO: 469175 - RNA, 21 nt, Human
cggcccaacccugccccacgg

SEQ ID NO: 469176 - RNA, 21 nt, Human
cuuuuuuuuuuuuuuuuuuuu

SEQ ID NO: 469177 - RNA, 21 nt, Human
gacgaccaaggcuaggaagga

SEQ ID NO: 469178 - RNA, 25 nt, Human
gcucagagcccuuccacaugcggcc

SEQ ID NO: 469179 - RNA, 23 nt, Human
ggaaugaggcagcggaagaggga

SEQ ID NO: 469180 - RNA, 21 nt, Human
uaggaaggaaaggaaugaggc

SEQ ID NO: 469181 - RNA, 18 nt, Human
ucuuuuuuuuuuuuuuuu

SEQ ID NO: 469182 - RNA, 18 nt, Human
ucuuuuuuuuuuuuuuuu

SEQ ID NO: 469183 - RNA, 20 nt, Human
ugacacgagacauaaaaacu

SEQ ID NO: 469184 - RNA, 19 nt, Human
ugccccacggagaccggcc

SEQ ID NO: 469185 - RNA, 18 nt, Human
uuccacaugcggcccaac

SEQ ID NO: 469186 - RNA, 32 nt, Human; identical to SEQ ID NO: 423254

SEQ ID NO: 469187 - RNA, 18 nt, Human
uuuuuuuuuuuuuuuuug

SEQ ID NO: 469188 - RNA, 23 nt, Human
uuuuuuuuuuuuuuuuugacacg

SEQ ID NO: 469189 - RNA, 20 nt, Human
aaacagccagaugaagauac

SEQ ID NO: 469190 - RNA, 19 nt, Human
aagcauaaggucuaaaccc

SEQ ID NO: 469191 - RNA, 21 nt, Human
acagacagagauuccguuuuc

SEQ ID NO: 469192 - RNA, 22 nt, Human
acgagucaagucagacccaaaa

SEQ ID NO: 469193 - RNA, 23 nt, Human
aggcauggcugaagcauggcagc

SEQ ID NO: 469194 - RNA, 21 nt, Human
ccacauguucagcucuucaga

SEQ ID NO: 469195 - RNA, 23 nt, Human
ccagcaaggccugucuguccaga

SEQ ID NO: 469196 - RNA, 22 nt, Human
ccccgggcccccacccgagccc

SEQ ID NO: 469197 - RNA, 23 nt, Human
ccccgggcccccacccgagcccc

SEQ ID NO: 469198 - RNA, 21 nt, Human
ccccggggccccgggccccca

SEQ ID NO: 469199 - RNA, 24 nt, Human
ccccggggccccgggcccccaccc

SEQ ID NO: 469200 - RNA, 26 nt, Human
cccggggccccgggcccccacccgag

SEQ ID NO: 469201 - RNA, 23 nt, Human
ccggcugguggcggagccgggag

SEQ ID NO: 469202 - RNA, 22 nt, Human
ccuccuuccggguauggggcag

SEQ ID NO: 469203 - RNA, 24 nt, Human
ccugggcaaaugcuggagcuucug

SEQ ID NO: 469204 - RNA, 23 nt, Human
cgccaagguagugagugggugcc

SEQ ID NO: 469205 - RNA, 23 nt, Human
cggguccugggcaaaugcuggag

SEQ ID NO: 469206 - RNA, 20 nt, Human
cucccguguuccugggccuu

SEQ ID NO: 469207 - RNA, 21 nt, Human
cugugcagcguuccuccuucc

SEQ ID NO: 469208 - RNA, 21 nt, Human
cuucagaagcucccguguucc

SEQ ID NO: 469209 - RNA, 20 nt, Human
gacguagcacccgcucggca

SEQ ID NO: 469210 - RNA, 20 nt, Human
gagucaagucagacccaaaa

SEQ ID NO: 469211 - RNA, 21 nt, Human
gagugggugccuuaaugugau

SEQ ID NO: 469212 - RNA, 19 nt, Human
gcccccacccgagccccgg

SEQ ID NO: 469213 - RNA, 21 nt, Human
gccccgggcccccacccgagc

SEQ ID NO: 469214 - RNA, 19 nt, Human
gccccggggccccgggccc

SEQ ID NO: 469215 - RNA, 22 nt, Human
gcugguggcggagccgggagaa

SEQ ID NO: 469216 - RNA, 20 nt, Human
gucaagucagacccaaaaaa

SEQ ID NO: 469217 - RNA, 18 nt, Human
gugggggugcgccacccu

SEQ ID NO: 469218 - RNA, 24 nt, Human
guguugagaugaaacuggacaaaa

SEQ ID NO: 469219 - RNA, 22 nt, Human
guucucguuccccucccuccac

SEQ ID NO: 469220 - RNA, 21 nt, Human
uaagaggaaggucuucucugg

SEQ ID NO: 469221 - RNA, 18 nt, Human
uagcacccgcucggcauc

SEQ ID NO: 469222 - RNA, 23 nt, Human
ucagacccaaaaaacgacgccaa

SEQ ID NO: 469223 - RNA, 19 nt, Human
uccagaugcuucuuggccu

SEQ ID NO: 469224 - RNA, 23 nt, Human
ugaaauggggcaggagaagguca

SEQ ID NO: 469225 - RNA, 20 nt, Human
ugaagauacacacaggguga

SEQ ID NO: 469226 - RNA, 21 nt, Human
ugaugccucuuguucccuaag

SEQ ID NO: 469227 - RNA, 20 nt, Human
ugcgccacccucuuggcaca

SEQ ID NO: 469228 - RNA, 20 nt, Human
uggaaugagggucuuaugag

SEQ ID NO: 469229 - RNA, 20 nt, Human
uggcugaagcauggcagcug

SEQ ID NO: 469230 - RNA, 19 nt, Human
ugggagagaccagcaguug

SEQ ID NO: 469231 - RNA, 21 nt, Human
ugggagagaccagcaguugac

SEQ ID NO: 469232 - RNA, 19 nt, Human
ugggugccuuaaugugaug

SEQ ID NO: 469233 - RNA, 23 nt, Human
uuccggguauggggcagcacccu

SEQ ID NO: 469234 - RNA, 19 nt, Human
uuugcaaguuuccaacgac

SEQ ID NO: 469235 - RNA, 22 nt, Human
uuuuuuuuuuuuuuuuauguuu

SEQ ID NO: 469236 - RNA, 21 nt, Human
aaaaggauuauaagggugaga

SEQ ID NO: 469237 - RNA, 19 nt, Human
aacccuccucaccuccucc

SEQ ID NO: 469238 - RNA, 21 nt, Human
acccuccucaccuccuccgcu

SEQ ID NO: 469239 - RNA, 23 nt, Human
agaagggugagcucagagugggg

SEQ ID NO: 469240 - RNA, 22 nt, Human
agacagaagggugagcucagag

SEQ ID NO: 469241 - RNA, 19 nt, Human
agaguggggaauuaggcuc

SEQ ID NO: 469242 - RNA, 20 nt, Human
agcaaacccuccucaccucc

SEQ ID NO: 469243 - RNA, 22 nt, Human
cacccagcaaacccuccucacc

SEQ ID NO: 469244 - RNA, 21 nt, Human
ccacccagcaaacccuccuca

SEQ ID NO: 469245 - RNA, 23 nt, Human
ccagcaaacccuccucaccuccu

SEQ ID NO: 469246 - RNA, 19 nt, Human
cccagcaaacccuccucac

SEQ ID NO: 469247 - RNA, 21 nt, Human
cccagcaaacccuccucaccu

SEQ ID NO: 469248 - RNA, 25 nt, Human
cccagcaaacccuccucaccuccuc

SEQ ID NO: 469249 - RNA, 21 nt, Human
cccauacccacccagcaaacc

SEQ ID NO: 469250 - RNA, 26 nt, Human
cccauacccacccagcaaacccuccu

SEQ ID NO: 469251 - RNA, 26 nt, Human
ccccucccccauacccacccagcaaa

SEQ ID NO: 469252 - RNA, 23 nt, Human
ccugcagagucucccccuccccc

SEQ ID NO: 469253 - RNA, 22 nt, Human
cgggaagaccuagugcugaaaa

SEQ ID NO: 469254 - RNA, 18 nt, Human
gaaggacacugaguugug

SEQ ID NO: 469255 - RNA, 20 nt, Human
gggaagggguagggcccggg

SEQ ID NO: 469256 - RNA, 25 nt, Human
uccugcagagucucccccuccccca

SEQ ID NO: 469257 - RNA, 20 nt, Human
ucucccccucccccauaccc

SEQ ID NO: 469258 - RNA, 18 nt, Human
ugaguuguggggaggggc

SEQ ID NO: 469259 - RNA, 18 nt, Human
ugcagagucucccccucc

SEQ ID NO: 469260 - RNA, 21 nt, Human
uuugaagaaggguggucauug

SEQ ID NO: 469261 - RNA, 24 nt, Human
uuugaaggacacugaguugugggg

SEQ ID NO: 469262 - RNA, 22 nt, Human
uuuuuuuuuuuugaagaagggu

SEQ ID NO: 469263 - RNA, 26 nt, Human
uuuuuuuuuuuugaagaagggugguc

SEQ ID NO: 469264 - RNA, 24 nt, Human
uuuuuuuuuuuuuuugaagaaggg

SEQ ID NO: 469265 - RNA, 21 nt, Human
aaaacugccugguacacuuuc

SEQ ID NO: 469266 - RNA, 21 nt, Human
aaaagacccagacuccaaaug

SEQ ID NO: 469267 - RNA, 23 nt, Human
aaacaaccuacaugugccagagu

SEQ ID NO: 469268 - RNA, 24 nt, Human
aaagugccaggauuauagguguga

SEQ ID NO: 469269 - RNA, 19 nt, Human
aaagugcuaggauuacagg

SEQ ID NO: 469270 - RNA, 24 nt, Human
aaagugcuaggauuacagguguga

SEQ ID NO: 469271 - RNA, 19 nt, Human
aacauggagaaaccccauc

SEQ ID NO: 469272 - RNA, 20 nt, Human
aacauggagaaaccccaucu

SEQ ID NO: 469273 - RNA, 21 nt, Human
aacauggagaaaccccaucuc

SEQ ID NO: 469274 - RNA, 19 nt, Human
aaccgacacuuuucaacau

SEQ ID NO: 469275 - RNA, 19 nt, Human
aagaggcaagggggcuaag

SEQ ID NO: 469276 - RNA, 19 nt, Human
aaggaagaggcaagggggc

SEQ ID NO: 469277 - RNA, 25 nt, Human
aagugauccucccaucucagccucc

SEQ ID NO: 469278 - RNA, 24 nt, Human
aagugccuaacugggaaugguggu

SEQ ID NO: 469279 - RNA, 21 nt, Human
aauagaaaacauggacagaaa

SEQ ID NO: 469280 - RNA, 18 nt, Human
acaaacccucaaaacaac

SEQ ID NO: 469281 - RNA, 20 nt, Human
acaaacccucaaaacaaccu

SEQ ID NO: 469282 - RNA, 19 nt, Human
acaaagaacaaaugucaca

SEQ ID NO: 469283 - RNA, 20 nt, Human
acagacgaugaaaacgaggu

SEQ ID NO: 469284 - RNA, 22 nt, Human
acagaugcccccagagccuggg

SEQ ID NO: 469285 - RNA, 18 nt, Human
accaacaaacccucaaaa

SEQ ID NO: 469286 - RNA, 21 nt, Human
accaaccaaccaaucaaccag

SEQ ID NO: 469287 - RNA, 24 nt, Human
accccaucucuacuaaaaauacaa

SEQ ID NO: 469288 - RNA, 24 nt, Human
accugcggucaggaguuugagacc

SEQ ID NO: 469289 - RNA, 21 nt, Human
acgggguuuuaucauguuggc

SEQ ID NO: 469290 - RNA, 22 nt, Human
acgggguuuuaucauguuggcu

SEQ ID NO: 469291 - RNA, 23 nt, Human
acgggguuuuaucauguuggcua

SEQ ID NO: 469292 - RNA, 24 nt, Human
acgggguuuuaucauguuggcuag

SEQ ID NO: 469293 - RNA, 24 nt, Human
acuaaaaauacaaaauuagccugg

SEQ ID NO: 469294 - RNA, 25 nt, Human
acuauguugcccaggcuggucucaa

SEQ ID NO: 469295 - RNA, 27 nt, Human
acucacuccccagacuucagcaccacc

SEQ ID NO: 469296 - RNA, 25 nt, Human
acucugucgcucaggcuggagugca

SEQ ID NO: 469297 - RNA, 22 nt, Human
agaaaacagccccaugaggugg

SEQ ID NO: 469298 - RNA, 19 nt, Human
agaagaggggauaucuuau

SEQ ID NO: 469299 - RNA, 20 nt, Human
agaggggcaucaaggcggcc

SEQ ID NO: 469300 - RNA, 22 nt, Human
agagggucacaucuuaccaacg

SEQ ID NO: 469301 - RNA, 19 nt, Human
agaugcccccagagccugg

SEQ ID NO: 469302 - RNA, 24 nt, Human
agcaaaggccacagaaugacaaag

SEQ ID NO: 469303 - RNA, 24 nt, Human
agcacuuugggaggccgaggcagg

SEQ ID NO: 469304 - RNA, 23 nt, Human
agccugguguggugacgcaugcc

SEQ ID NO: 469305 - RNA, 23 nt, Human
agcgauucuccugccccagccuc

SEQ ID NO: 469306 - RNA, 22 nt, Human
aggaguguuccagauaaagguc

SEQ ID NO: 469307 - RNA, 20 nt, Human
aggaguuugagaccagccug

SEQ ID NO: 469308 - RNA, 21 nt, Human
aggauuauaggugugagccac

SEQ ID NO: 469309 - RNA, 19 nt, Human
aggcaaaauaagcauggca

SEQ ID NO: 469310 - RNA, 18 nt, Human
aggcagguggaucaccug

SEQ ID NO: 469311 - RNA, 22 nt, Human
aggcagguggaucaccugcggu

SEQ ID NO: 469312 - RNA, 26 nt, Human
aggcagguggaucaccugcggucagg

SEQ ID NO: 469313 - RNA, 21 nt, Human
aggccgaggcagguggaucac

SEQ ID NO: 469314 - RNA, 18 nt, Human
aggcuggagugcaguggc

SEQ ID NO: 469315 - RNA, 19 nt, Human
aggugugagccacuacacc

SEQ ID NO: 469316 - RNA, 19 nt, Human
aggugugagccacuacacc

SEQ ID NO: 469317 - RNA, 23 nt, Human
aguagcugggauuacaggcgugu

SEQ ID NO: 469318 - RNA, 18 nt, Human
agugcaguggcgugaucc

SEQ ID NO: 469319 - RNA, 21 nt, Human
agugcaguggcgugauccuag

SEQ ID NO: 469320 - RNA, 23 nt, Human
agugcaguggcgugauccuagcu

SEQ ID NO: 469321 - RNA, 24 nt, Human
agugcaguggcgugauccuagcuc

SEQ ID NO: 469322 - RNA, 19 nt, Human
agugcugagcccgcaucag

SEQ ID NO: 469323 - RNA, 22 nt, Human
auaaaggucaagucuuaccagg

SEQ ID NO: 469324 - RNA, 18 nt, Human
aucaccugcggucaggag

SEQ ID NO: 469325 - RNA, 24 nt, Human
aucaccugcggucaggaguuugag

SEQ ID NO: 469326 - RNA, 19 nt, Human
augccuguaaucccagcac

SEQ ID NO: 469327 - RNA, 22 nt, Human
augguggugcuugcaacacugg

SEQ ID NO: 469328 - RNA, 24 nt, Human
auugacacuuuccacauacaguua

SEQ ID NO: 469329 - RNA, 19 nt, Human
caaaaacuguaaaggauuc

SEQ ID NO: 469330 - RNA, 18 nt, Human
caaaauauauucguuucu

SEQ ID NO: 469331 - RNA, 24 nt, Human
caaagugccaggauuauaggugug

SEQ ID NO: 469332 - RNA, 24 nt, Human
caaagugcuaggauuacaggugug

SEQ ID NO: 469333 - RNA, 22 nt, Human
caacaaagaacaaaugucacag

SEQ ID NO: 469334 - RNA, 22 nt, Human
caaccagagaguguccuucagg

SEQ ID NO: 469335 - RNA, 18 nt, Human
caaccagccaaccaacca

SEQ ID NO: 469336 - RNA, 20 nt, Human
caagcgauucuccugcccca

SEQ ID NO: 469337 - RNA, 27 nt, Human
caagugauccucccaucucagccuccc

SEQ ID NO: 469338 - RNA, 19 nt, Human
cacacagcuaucaggagug

SEQ ID NO: 469339 - RNA, 22 nt, Human
cacacuguucagucuauaccac

SEQ ID NO: 469340 - RNA, 19 nt, Human
cacagccaugccacccuuc

SEQ ID NO: 469341 - RNA, 18 nt, Human
cacaguucuuaucaaaaa

SEQ ID NO: 469342 - RNA, 24 nt, Human
caccacaccuggcuaauuuuugua

SEQ ID NO: 469343 - RNA, 19 nt, Human
caccauuucucuucaucuc

SEQ ID NO: 469344 - RNA, 24 nt, Human
caccucagccucccaaagugccag

SEQ ID NO: 469345 - RNA, 19 nt, Human
cacuauguugcccaggcug

SEQ ID NO: 469346 - RNA, 24 nt, Human
cacuauguugcccaggcuggucuc

SEQ ID NO: 469347 - RNA, 27 nt, Human
cacuauguugcccaggcuggucucaaa

SEQ ID NO: 469348 - RNA, 22 nt, Human
cacucugucgcucaggcuggag

SEQ ID NO: 469349 - RNA, 21 nt, Human
cacugcaaccucugccuccug

SEQ ID NO: 469350 - RNA, 23 nt, Human
cacugcaaccucugccuccuggg

SEQ ID NO: 469351 - RNA, 18 nt, Human
cacuucauggaugaaaca

SEQ ID NO: 469352 - RNA, 20 nt, Human
cagaaaaaaaguaaucuuau

SEQ ID NO: 469353 - RNA, 19 nt, Human
cagacuucagcaccacccc

SEQ ID NO: 469354 - RNA, 23 nt, Human
cagcacaugacccugaagcacac

SEQ ID NO: 469355 - RNA, 24 nt, Human
cagcacuuugggaggccgaggcag

SEQ ID NO: 469356 - RNA, 26 nt, Human
cagcacuuugggaggccgaggcaggu

SEQ ID NO: 469357 - RNA, 24 nt, Human
cagccugaccaacauggagaaacc

SEQ ID NO: 469358 - RNA, 22 nt, Human
caggauuauaggugugagccac

SEQ ID NO: 469359 - RNA, 24 nt, Human
cagggucucacuauguugcccagg

SEQ ID NO: 469360 - RNA, 22 nt, Human
cagguacagaugcccugggcca

SEQ ID NO: 469361 - RNA, 24 nt, Human
cagguggaucaccugcggucagga

SEQ ID NO: 469362 - RNA, 20 nt, Human
cagguuggcuuuuugccauc

SEQ ID NO: 469363 - RNA, 26 nt, Human
cauaacaaguacauuaguguucuaaa

SEQ ID NO: 469364 - RNA, 18 nt, Human
cauccucaaccacuuaag

SEQ ID NO: 469365 - RNA, 24 nt, Human
caucucagccucccaaagugcuag

SEQ ID NO: 469366 - RNA, 26 nt, Human
caucuuaccaacgccuccaaagcacc

SEQ ID NO: 469367 - RNA, 20 nt, Human
caugccuguaaucccagcac

SEQ ID NO: 469368 - RNA, 24 nt, Human
caugccuguaaucccagcacuuug

SEQ ID NO: 469369 - RNA, 24 nt, Human
cauuaguguucuaaaccaaccaac

SEQ ID NO: 469370 - RNA, 21 nt, Human
ccaaagugccaggauuauagg

SEQ ID NO: 469371 - RNA, 24 nt, Human
ccaaagugccaggauuauaggugu

SEQ ID NO: 469372 - RNA, 21 nt, Human
ccaaagugcuaggauuacagg

SEQ ID NO: 469373 - RNA, 24 nt, Human
ccaaagugcuaggauuacaggugu

SEQ ID NO: 469374 - RNA, 21 nt, Human
ccaaccaacaaacccucaaaa

SEQ ID NO: 469375 - RNA, 24 nt, Human
ccaaccaacaaacccucaaaacaa

SEQ ID NO: 469376 - RNA, 27 nt, Human
ccaaccaaccaacaaacccucaaaaca

SEQ ID NO: 469377 - RNA, 23 nt, Human
ccaaccaaccaaccaacaaaccc

SEQ ID NO: 469378 - RNA, 23 nt, Human
ccaacgccuccaaagcaccaugg

SEQ ID NO: 469379 - RNA, 18 nt, Human
ccacuacaccuggcccag

SEQ ID NO: 469380 - RNA, 27 nt, Human
ccaguaauccucccaccucagccuccc

SEQ ID NO: 469381 - RNA, 20 nt, Human
cccaaccucaagugauccuc

SEQ ID NO: 469382 - RNA, 23 nt, Human
cccgaguagcugggauuacaggc

SEQ ID NO: 469383 - RNA, 24 nt, Human
cccgaguagcugggauuacaggcg

SEQ ID NO: 469384 - RNA, 22 nt, Human
ccgaguagcugggauuacaggc

SEQ ID NO: 469385 - RNA, 24 nt, Human
ccgaguagcugggauuacaggcgu

SEQ ID NO: 469386 - RNA, 19 nt, Human
ccuccaacuugaugggaua

SEQ ID NO: 469387 - RNA, 26 nt, Human
ccucccaccucagccucccaaagugc

SEQ ID NO: 469388 - RNA, 24 nt, Human
ccuccuggguucaagcgauucucc

SEQ ID NO: 469389 - RNA, 19 nt, Human
ccucugccuccuggguuca

SEQ ID NO: 469390 - RNA, 24 nt, Human
ccugaccaacauggagaaacccca

SEQ ID NO: 469391 - RNA, 23 nt, Human
ccugccccagccucccgaguagc

SEQ ID NO: 469392 - RNA, 24 nt, Human
ccugccccagccucccgaguagcu

SEQ ID NO: 469393 - RNA, 22 nt, Human
ccugcggucaggaguuugagac

SEQ ID NO: 469394 - RNA, 23 nt, Human
ccuggguucaagcgauucuccug

SEQ ID NO: 469395 - RNA, 22 nt, Human
ccuguaaucccagcacuuuggg

SEQ ID NO: 469396 - RNA, 21 nt, Human
ccuguaaucccagcuacucgg

SEQ ID NO: 469397 - RNA, 20 nt, Human
cgaggcagguggaucaccug

SEQ ID NO: 469398 - RNA, 26 nt, Human
cgaggcagguggaucaccugcgguca

SEQ ID NO: 469399 - RNA, 24 nt, Human
cgcucaggcuggagugcaguggcg

SEQ ID NO: 469400 - RNA, 24 nt, Human
cuaaaccaaccaaccaaucaacca

SEQ ID NO: 469401 - RNA, 23 nt, Human
cuaauuuuuguauuuuuagucga

SEQ ID NO: 469402 - RNA, 19 nt, Human
cuacuccauggccacuccc

SEQ ID NO: 469403 - RNA, 20 nt, Human
cuagaggagucagaaaguuc

SEQ ID NO: 469404 - RNA, 24 nt, Human
cuagaggagucagaaaguucuaaa

SEQ ID NO: 469405 - RNA, 20 nt, Human
cucaaaauagaacagaaaaa

SEQ ID NO: 469406 - RNA, 23 nt, Human
cucaaacuccugggauccaguaa

SEQ ID NO: 469407 - RNA, 24 nt, Human
cucaagugauccucccaucucagc

SEQ ID NO: 469408 - RNA, 24 nt, Human
cucacucugucgcucaggcuggag

SEQ ID NO: 469409 - RNA, 24 nt, Human
cucacugcaaccucugccuccugg

SEQ ID NO: 469410 - RNA, 24 nt, Human
cucaugccuguaaucccagcacuu

SEQ ID NO: 469411 - RNA, 21 nt, Human
cuccccagacuucagcaccac

SEQ ID NO: 469412 - RNA, 21 nt, Human
cuccuggguucaagcgauucu

SEQ ID NO: 469413 - RNA, 24 nt, Human
cugagccgggcgcgguggcucaug

SEQ ID NO: 469414 - RNA, 19 nt, Human
cugcaaccucugccuccug

SEQ ID NO: 469415 - RNA, 23 nt, Human
cugcaaccucugccuccuggguu

SEQ ID NO: 469416 - RNA, 24 nt, Human
cugcaaccucugccuccuggguuc

SEQ ID NO: 469417 - RNA, 19 nt, Human
cugucgcucaggcuggagu

SEQ ID NO: 469418 - RNA, 19 nt, Human
gaacuucuggggucacccu

SEQ ID NO: 469419 - RNA, 21 nt, Human
gacgcaugccuguaaucccag

SEQ ID NO: 469420 - RNA, 18 nt, Human
gagacgggguuuuaucau

SEQ ID NO: 469421 - RNA, 24 nt, Human
gagacgggguuuuaucauguuggc

SEQ ID NO: 469422 - RNA, 25 nt, Human
gaguagcugggauuacaggcgugua

SEQ ID NO: 469423 - RNA, 24 nt, Human
gaucaccugcggucaggaguuuga

SEQ ID NO: 469424 - RNA, 18 nt, Human
gauuacaggugugagcca

SEQ ID NO: 469425 - RNA, 21 nt, Human
gauuacaggugugagccacca

SEQ ID NO: 469426 - RNA, 24 nt, Human
gauuacaggugugagccaccaugc

SEQ ID NO: 469427 - RNA, 18 nt, Human
gauuauaggugugagcca

SEQ ID NO: 469428 - RNA, 19 nt, Human
gauuauaggugugagccac

SEQ ID NO: 469429 - RNA, 21 nt, Human
gauuauaggugugagccacua

SEQ ID NO: 469430 - RNA, 20 nt, Human
gcucaggcuggagugcagug

SEQ ID NO: 469431 - RNA, 24 nt, Human
gcucaggcuggagugcaguggcgu

SEQ ID NO: 469432 - RNA, 25 nt, Human
gcuggagugcaguggcgugauccua

SEQ ID NO: 469433 - RNA, 22 nt, Human
ggauuacaggugugagccacca

SEQ ID NO: 469434 - RNA, 24 nt, Human
ggauuacaggugugagccaccaug

SEQ ID NO: 469435 - RNA, 22 nt, Human
ggauuauaggugugagccacua

SEQ ID NO: 469436 - RNA, 22 nt, Human
ggcuggagugcaguggcgugau

SEQ ID NO: 469437 - RNA, 23 nt, Human
ggcuuaaggagacagucugggag

SEQ ID NO: 469438 - RNA, 24 nt, Human
gggcgcgguggcucaugccuguaa

SEQ ID NO: 469439 - RNA, 23 nt, Human
gggguuuuaucauguuggcuagg

SEQ ID NO: 469440 - RNA, 22 nt, Human
ggguuuuaucauguuggcuagg

SEQ ID NO: 469441 - RNA, 19 nt, Human
ggucaggaguuugagacca

SEQ ID NO: 469442 - RNA, 24 nt, Human
ggugacgcaugccuguaaucccag

SEQ ID NO: 469443 - RNA, 23 nt, Human
gguggcucaugccuguaauccca

SEQ ID NO: 469444 - RNA, 24 nt, Human
gguggcucaugccuguaaucccag

SEQ ID NO: 469445 - RNA, 21 nt, Human
gguguggugacgcaugccugu

SEQ ID NO: 469446 - RNA, 18 nt, Human
guagcugggauuacaggc

SEQ ID NO: 469447 - RNA, 24 nt, Human
gugauccucccaucucagccuccc

SEQ ID NO: 469448 - RNA, 24 nt, Human
guggaacugugccuuuguggaugg

SEQ ID NO: 469449 - RNA, 19 nt, Human
uaaaaauacaaaauuagcc

SEQ ID NO: 469450 - RNA, 20 nt, Human
uaaaaauacaaaauuagccu

SEQ ID NO: 469451 - RNA, 21 nt, Human
uaaaaauacaaaauuagccug

SEQ ID NO: 469452 - RNA, 21 nt, Human
uaaaagauuuuacaccgaaga

SEQ ID NO: 469453 - RNA, 22 nt, Human
uaaaagggccuguuuugguggc

SEQ ID NO: 469454 - RNA, 22 nt, Human
uaaaccaaccaaccaaucaacc

SEQ ID NO: 469455 - RNA, 23 nt, Human
uaacaaaagacccagacuccaaa

SEQ ID NO: 469456 - RNA, 25 nt, Human
uaacaaaagacccagacuccaaaug

SEQ ID NO: 469457 - RNA, 21 nt, Human
uaacugggaaugguggugcuu

SEQ ID NO: 469458 - RNA, 24 nt, Human
uaauuuuuguauuuuuagucgaga

SEQ ID NO: 469459 - RNA, 22 nt, Human
uacaaaauuagccugguguggu

SEQ ID NO: 469460 - RNA, 21 nt, Human
uacaaccagagaguguccuuc

SEQ ID NO: 469461 - RNA, 22 nt, Human
uacaggcguguaccaccacacc

SEQ ID NO: 469462 - RNA, 22 nt, Human
uacaggugugagccaccaugcc

SEQ ID NO: 469463 - RNA, 22 nt, Human
uacaggugugagccaccaugcc

SEQ ID NO: 469464 - RNA, 23 nt, Human
uacaggugugagccaccaugccu

SEQ ID NO: 469465 - RNA, 22 nt, Human
uaccaccacaccuggcuaauuu

SEQ ID NO: 469466 - RNA, 24 nt, Human
uaccagggacaaaaagugccuaac

SEQ ID NO: 469467 - RNA, 18 nt, Human
uacucaagaaaaaggagg

SEQ ID NO: 469468 - RNA, 21 nt, Human
uacuccauggccacucccacc

SEQ ID NO: 469469 - RNA, 18 nt, Human
uagaaaacauggacagaa

SEQ ID NO: 469470 - RNA, 23 nt, Human
uagcucacugcaaccucugccuc

SEQ ID NO: 469471 - RNA, 24 nt, Human
uaggaauagaaagcaugcucccaa

SEQ ID NO: 469472 - RNA, 18 nt, Human
uaggauuacaggugugag

SEQ ID NO: 469473 - RNA, 22 nt, Human
uaggauuacaggugugagccac

SEQ ID NO: 469474 - RNA, 24 nt, Human
uaggauuacaggugugagccacca

SEQ ID NO: 469475 - RNA, 25 nt, Human
uaggauuacaggugugagccaccau

SEQ ID NO: 469476 - RNA, 24 nt, Human
uagucgagacgggguuuuaucaug

SEQ ID NO: 469477 - RNA, 23 nt, Human
uauaggugugagccacuacaccu

SEQ ID NO: 469478 - RNA, 22 nt, Human
uaucaaaaacuguaaaggauuc

SEQ ID NO: 469479 - RNA, 23 nt, Human
uaucaacaaagaacaaaugucac

SEQ ID NO: 469480 - RNA, 23 nt, Human
uauguugcccaggcuggucucaa

SEQ ID NO: 469481 - RNA, 24 nt, Human
uauguugcccaggcuggucucaaa

SEQ ID NO: 469482 - RNA, 20 nt, Human
ucaaaaacuguaaaggauuc

SEQ ID NO: 469483 - RNA, 23 nt, Human
ucacagaugcccccagagccugg

SEQ ID NO: 469484 - RNA, 24 nt, Human
ucacagcaaaggccacagaaugac

SEQ ID NO: 469485 - RNA, 24 nt, Human
ucacugcaaccucugccuccuggg

SEQ ID NO: 469486 - RNA, 25 nt, Human
ucacugcaaccucugccuccugggu

SEQ ID NO: 469487 - RNA, 27 nt, Human
ucacugcaaccucugccuccuggguuc

SEQ ID NO: 469488 - RNA, 24 nt, Human
ucagcaccacccaccaaaacugcc

SEQ ID NO: 469489 - RNA, 22 nt, Human
ucaugccuguaaucccagcacu

SEQ ID NO: 469490 - RNA, 23 nt, Human
uccaguaauccucccaccucagc

SEQ ID NO: 469491 - RNA, 21 nt, Human
uccaguaauccucccaccucc

SEQ ID NO: 469492 - RNA, 23 nt, Human
ucccaaagugccaggauuauagg

SEQ ID NO: 469493 - RNA, 23 nt, Human
ucccaaagugcuaggauuacagg

SEQ ID NO: 469494 - RNA, 20 nt, Human
ucccaccacugguuuauggg

SEQ ID NO: 469495 - RNA, 24 nt, Human
ucccgaguagcugggauuacaggc

SEQ ID NO: 469496 - RNA, 27 nt, Human
uccucccaucucagccucccaaagugc

SEQ ID NO: 469497 - RNA, 21 nt, Human
uccuggguucaagcgauucuc

SEQ ID NO: 469498 - RNA, 24 nt, Human
uccuggguucaagcgauucuccug

SEQ ID NO: 469499 - RNA, 24 nt, Human
ucgcucaggcuggagugcaguggc

SEQ ID NO: 469500 - RNA, 22 nt, Human
ucuaacccuucccagcauuguc

SEQ ID NO: 469501 - RNA, 27 nt, Human
ucuauaccacugauauguggucaggga

SEQ ID NO: 469502 - RNA, 26 nt, Human
ucuaugaucacagaugcccccagagc

SEQ ID NO: 469503 - RNA, 19 nt, Human
ucucacuauguugcccagg

SEQ ID NO: 469504 - RNA, 23 nt, Human
ucucacuauguugcccaggcugg

SEQ ID NO: 469505 - RNA, 24 nt, Human
ucucacuauguugcccaggcuggu

SEQ ID NO: 469506 - RNA, 26 nt, Human
ucucacuauguugcccaggcuggucu

SEQ ID NO: 469507 - RNA, 23 nt, Human
ucucacucugucgcucaggcugg

SEQ ID NO: 469508 - RNA, 24 nt, Human
ucucacucugucgcucaggcugga

SEQ ID NO: 469509 - RNA, 21 nt, Human
ucucagccucccaaagugcua

SEQ ID NO: 469510 - RNA, 24 nt, Human
ucuccugccccagccucccgagua

SEQ ID NO: 469511 - RNA, 20 nt, Human
ucucuacuaaaaauacaaaa

SEQ ID NO: 469512 - RNA, 24 nt, Human
ucugucgcucaggcuggagugcag

SEQ ID NO: 469513 - RNA, 24 nt, Human
ugaagacuaaacucacuccccaga

SEQ ID NO: 469514 - RNA, 19 nt, Human
ugacaaagcuggaaacuga

SEQ ID NO: 469515 - RNA, 19 nt, Human
ugacagacgaugaaaacga

SEQ ID NO: 469516 - RNA, 24 nt, Human
ugagaccagccugaccaacaugga

SEQ ID NO: 469517 - RNA, 19 nt, Human
ugaggcgucagugaauuaa

SEQ ID NO: 469518 - RNA, 21 nt, Human
ugccaucuacuccauggccac

SEQ ID NO: 469519 - RNA, 24 nt, Human
ugcccaggcuggucucaaacuccu

SEQ ID NO: 469520 - RNA, 24 nt, Human
ugccccagccucccgaguagcugg

SEQ ID NO: 469521 - RNA, 21 nt, Human
ugcccugggccacagcagagu

SEQ ID NO: 469522 - RNA, 23 nt, Human
ugccuguaaucccagcacuuugg

SEQ ID NO: 469523 - RNA, 23 nt, Human
ugccuguaaucccagcuacucgg

SEQ ID NO: 469524 - RNA, 24 nt, Human
ugccuguaaucccagcuacucggg

SEQ ID NO: 469525 - RNA, 18 nt, Human
ugcuaagcacagaugcug

SEQ ID NO: 469526 - RNA, 24 nt, Human
ugcuaggauuacaggugugagcca

SEQ ID NO: 469527 - RNA, 21 nt, Human
ugcugagcccgcaucagaccc

SEQ ID NO: 469528 - RNA, 19 nt, Human
uggagugcaguggcgugau

SEQ ID NO: 469529 - RNA, 19 nt, Human
uggagugcaguggcgugau

SEQ ID NO: 469530 - RNA, 23 nt, Human
uggagugcaguggcgugauccua

SEQ ID NO: 469531 - RNA, 28 nt, Human
uggagugcaguggcgugauggcucuagc

SEQ ID NO: 469532 - RNA, 23 nt, Human
uggaucaccugcggucaggaguu

SEQ ID NO: 469533 - RNA, 24 nt, Human
uggaucaccugcggucaggaguuu

SEQ ID NO: 469534 - RNA, 24 nt, Human
uggcaagagccauucucuaaauac

SEQ ID NO: 469535 - RNA, 21 nt, Human
uggcaguauucuaugaucaca

SEQ ID NO: 469536 - RNA, 20 nt, Human
uggcccaaccucaagugauu

SEQ ID NO: 469537 - RNA, 20 nt, Human
uggcgugauccuagcucacu

SEQ ID NO: 469538 - RNA, 24 nt, Human
uggcgugauccuagcucacugcaa

SEQ ID NO: 469539 - RNA, 24 nt, Human
uggcucaugccuguaaucccagca

SEQ ID NO: 469540 - RNA, 19 nt, Human
ugggaaugguggugcuugc

SEQ ID NO: 469541 - RNA, 19 nt, Human
ugggaaugguggugcuugc

SEQ ID NO: 469542 - RNA, 24 nt, Human
ugggaggccgaggcagguggauca

SEQ ID NO: 469543 - RNA, 23 nt, Human
ugggauccaguaauccucccacc

SEQ ID NO: 469544 - RNA, 21 nt, Human
ugggauuacaggcguguacca

SEQ ID NO: 469545 - RNA, 22 nt, Human
ugggauuacaggcguguaccac

SEQ ID NO: 469546 - RNA, 24 nt, Human
ugggauuacaggcguguaccacca

SEQ ID NO: 469547 - RNA, 23 nt, Human
uggguucaagcgauucuccugcc

SEQ ID NO: 469548 - RNA, 18 nt, Human
uggucagggacauuucgg

SEQ ID NO: 469549 - RNA, 24 nt, Human
uggugacgcaugccuguaauccca

SEQ ID NO: 469550 - RNA, 20 nt, Human
uggugccaagauaugaaccc

SEQ ID NO: 469551 - RNA, 21 nt, Human
ugguguggugacgcaugccug

SEQ ID NO: 469552 - RNA, 24 nt, Human
ugguguggugacgcaugccuguaa

SEQ ID NO: 469553 - RNA, 22 nt, Human
ugucacagcaaaggccacagaa

SEQ ID NO: 469554 - RNA, 23 nt, Human
ugugaguuauuuucaggaguuuu

SEQ ID NO: 469555 - RNA, 23 nt, Human
uguuuacacacacgaucugugug

SEQ ID NO: 469556 - RNA, 24 nt, Human
uuaauuugcuuguuuacacacacu

SEQ ID NO: 469557 - RNA, 18 nt, Human
uuagucgagacgggguuu

SEQ ID NO: 469558 - RNA, 21 nt, Human
uuagucgagacgggguuuuau

SEQ ID NO: 469559 - RNA, 24 nt, Human
uuagucgagacgggguuuuaucau

SEQ ID NO: 469560 - RNA, 24 nt, Human
uucaagcgauucuccugccccagc

SEQ ID NO: 469561 - RNA, 25 nt, Human
uucaaucccuucaacaagccccugc

SEQ ID NO: 469562 - RNA, 21 nt, Human
uucuaaaccaaccaaccaauc

SEQ ID NO: 469563 - RNA, 24 nt, Human
uucucuaaauacaaucugguaccc

SEQ ID NO: 469564 - RNA, 19 nt, Human
uuggagagccuuuuuuuuu

SEQ ID NO: 469565 - RNA, 25 nt, Human
uugggaggccgaggcagguggauca

SEQ ID NO: 469566 - RNA, 19 nt, Human
uuggucggagaggcacugc

SEQ ID NO: 469567 - RNA, 19 nt, Human
uuuuggugcugaacaugac

SEQ ID NO: 469568 - RNA, 24 nt, Human
uuuuuagucgagacgggguuuuau

SEQ ID NO: 469569 - RNA, 21 nt, Human
uuuuugccaucagagggaggc

SEQ ID NO: 469570 - RNA, 20 nt, Human
uuuuuguauuuuuagucgag

SEQ ID NO: 469571 - RNA, 23 nt, Human
uuuuuguauuuuuagucgagacg

SEQ ID NO: 469572 - RNA, 20 nt, Human
uuuuuuuuuuugagacagag

SEQ ID NO: 469573 - RNA, 18 nt, Human
aggccuggggcugguggu

SEQ ID NO: 469574 - RNA, 22 nt, Human
aggguggggggugggagguggg

SEQ ID NO: 469575 - RNA, 23 nt, Human
aggugucaggaaagcuagcgagu

SEQ ID NO: 469576 - RNA, 21 nt, Human
aguggggagaggggcggggag

SEQ ID NO: 469577 - RNA, 18 nt, Human
caggaaagcuagcgagug

SEQ ID NO: 469578 - RNA, 22 nt, Human
caggguggggggugggaggugg

SEQ ID NO: 469579 - RNA, 20 nt, Human
caggugucaggaaagcuagc

SEQ ID NO: 469580 - RNA, 22 nt, Human
cgcgccacgacagagccucgug

SEQ ID NO: 469581 - RNA, 19 nt, Human
cggcgaccccucgcgggcc

SEQ ID NO: 469582 - RNA, 19 nt, Human
cugcuugcugcagccgccu

SEQ ID NO: 469583 - RNA, 24 nt, Human
gaccccucgcgggccucggcgcac

SEQ ID NO: 469584 - RNA, 20 nt, Human
gccuggggcuggugguaacc

SEQ ID NO: 469585 - RNA, 24 nt, Human
gccuggggcuggugguaaccgcuc

SEQ ID NO: 469586 - RNA, 19 nt, Human
gcggaguggggagaggggc

SEQ ID NO: 469587 - RNA, 22 nt, Human
ggagguggggaggggggcgagg

SEQ ID NO: 469588 - RNA, 25 nt, Human
ggaguggggagaggggcggggaggg

SEQ ID NO: 469589 - RNA, 23 nt, Human
ggccacggagcccauuugcagag

SEQ ID NO: 469590 - RNA, 20 nt, Human
gggcggcgaccccucgcggg

SEQ ID NO: 469591 - RNA, 20 nt, Human
ggggugggagguggggaggg

SEQ ID NO: 469592 - RNA, 19 nt, Human
ggugcacaguuccaggugu

SEQ ID NO: 469593 - RNA, 21 nt, Human
uacaggguggggggugggagg

SEQ ID NO: 469594 - RNA, 19 nt, Human
ucacugguuuuuggugucu

SEQ ID NO: 469595 - RNA, 22 nt, Human
ucugcuguguugaugcgaaggu

SEQ ID NO: 469596 - RNA, 22 nt, Human
ugccaggugcacaguuccaggu

SEQ ID NO: 469597 - RNA, 19 nt, Human
uggcuggugggaucugggc

SEQ ID NO: 469598 - RNA, 19 nt, Human
ugggagguggggagggggg

SEQ ID NO: 469599 - RNA, 21 nt, Human
ugggagguggggaggggggcg

SEQ ID NO: 469600 - RNA, 19 nt, Human
uggggagaggggcggggag

SEQ ID NO: 469601 - RNA, 21 nt, Human
uggggagaggggcggggaggg

SEQ ID NO: 469602 - RNA, 21 nt, Human
uggggggugggagguggggag

SEQ ID NO: 469603 - RNA, 24 nt, Human
uggggggugggagguggggagggg

SEQ ID NO: 469604 - RNA, 18 nt, Human
uuggugucugcuguguug

SEQ ID NO: 469605 - RNA, 19 nt, Human
uuggugucugcuguguuga

SEQ ID NO: 469606 - RNA, 22 nt, Human
uuuuuuuuuucggggcuacugg

SEQ ID NO: 469607 - RNA, 23 nt, Human
uuuuuuuuuuuuuuuuuucgggg

SEQ ID NO: 469608 - RNA, 25 nt, Human
aaaaaaaaagacccaaaaaaccaag

SEQ ID NO: 469609 - RNA, 21 nt, Human
aaaaaccacaucuccaagaug

SEQ ID NO: 469610 - RNA, 18 nt, Human
aaacauucugaggucuga

SEQ ID NO: 469611 - RNA, 23 nt, Human
aaagcuugguggcugaggcagug

SEQ ID NO: 469612 - RNA, 22 nt, Human
aaauaccaguaacaaaccucac

SEQ ID NO: 469613 - RNA, 19 nt, Human
aagaaaaacucagcagucc

SEQ ID NO: 469614 - RNA, 21 nt, Human
aaggaggagggccaggugggu

SEQ ID NO: 469615 - RNA, 22 nt, Human
aagucgucccagagccccucca

SEQ ID NO: 469616 - RNA, 23 nt, Human
aaguguguuuucaagucaacuuc

SEQ ID NO: 469617 - RNA, 21 nt, Human
aaguuaaacucagccauucca

SEQ ID NO: 469618 - RNA, 18 nt, Human
accagcugaccccccaug

SEQ ID NO: 469619 - RNA, 19 nt, Human
accagcugaccccccauga

SEQ ID NO: 469620 - RNA, 21 nt, Human
acccaaaaaaccaaaucccaa

SEQ ID NO: 469621 - RNA, 22 nt, Human
acccagcaugguggagcagcuu

SEQ ID NO: 469622 - RNA, 23 nt, Human
accucggugcccugagccuucug

SEQ ID NO: 469623 - RNA, 18 nt, Human
acgugaaaaaaauaccag

SEQ ID NO: 469624 - RNA, 24 nt, Human
agaaagcucuggaggagcucggcu

SEQ ID NO: 469625 - RNA, 21 nt, Human
agaaugacaggcugagacugu

SEQ ID NO: 469626 - RNA, 18 nt, Human
agacaaaauaacucaaac

SEQ ID NO: 469627 - RNA, 25 nt, Human
agaugggaucuggguggcaggagag

SEQ ID NO: 469628 - RNA, 21 nt, Human
agcuugguggcugaggcagug

SEQ ID NO: 469629 - RNA, 22 nt, Human
aggaaauggcaaagaggcaaaa

SEQ ID NO: 469630 - RNA, 20 nt, Human
aggaggagggccaggugggu

SEQ ID NO: 469631 - RNA, 24 nt, Human
aggcaaaaaggaaagcugcaccag

SEQ ID NO: 469632 - RNA, 21 nt, Human
aggggcguuaggauuucacag

SEQ ID NO: 469633 - RNA, 23 nt, Human
aggugcugggggugcuggcagga

SEQ ID NO: 469634 - RNA, 19 nt, Human
aguggcuguggaaaaggag

SEQ ID NO: 469635 - RNA, 23 nt, Human
aguggcuguggaaaaggaggagg

SEQ ID NO: 469636 - RNA, 24 nt, Human
aguuugguuuaacuacuggcuuug

SEQ ID NO: 469637 - RNA, 20 nt, Human
aucuggguggcaggagaggu

SEQ ID NO: 469638 - RNA, 20 nt, Human
augauccuuggcuugagggc

SEQ ID NO: 469639 - RNA, 18 nt, Human
auggcaaagaggcaaaaa

SEQ ID NO: 469640 - RNA, 23 nt, Human
caagauggcaccuguuuccugcc

SEQ ID NO: 469641 - RNA, 22 nt, Human
cacagaagggacaacgaccacc

SEQ ID NO: 469642 - RNA, 22 nt, Human
cacaucuccaagaugaaugccu

SEQ ID NO: 469643 - RNA, 21 nt, Human
caccagcggaggccaggugcc

SEQ ID NO: 469644 - RNA, 23 nt, Human
cagaagaaaaggcacugacgcac

SEQ ID NO: 469645 - RNA, 19 nt, Human
cagaagggacaacgaccac

SEQ ID NO: 469646 - RNA, 21 nt, Human
cagaucuccacccugacgcug

SEQ ID NO: 469647 - RNA, 23 nt, Human
cagcaguccuugguuauucagug

SEQ ID NO: 469648 - RNA, 19 nt, Human
cagcggcacaguugguguc

SEQ ID NO: 469649 - RNA, 21 nt, Human
caggugcugggggugcuggca

SEQ ID NO: 469650 - RNA, 24 nt, Human
caggugcugggggugcuggcagga

SEQ ID NO: 469651 - RNA, 22 nt, Human
caucauaaaaaugggacauaac

SEQ ID NO: 469652 - RNA, 21 nt, Human
ccaggccggcaagugcaccuc

SEQ ID NO: 469653 - RNA, 19 nt, Human
cccagagugucuccuggug

SEQ ID NO: 469654 - RNA, 23 nt, Human
cccgaaaaaccacaucuccaaga

SEQ ID NO: 469655 - RNA, 23 nt, Human
cccugacgcugugguggcugcgg

SEQ ID NO: 469656 - RNA, 20 nt, Human
cccugagccuucuguggggc

SEQ ID NO: 469657 - RNA, 23 nt, Human
cccuggagggcagguugggcgcg

SEQ ID NO: 469658 - RNA, 23 nt, Human
cccuuaaaaaaaaaagacccaaa

SEQ ID NO: 469659 - RNA, 24 nt, Human
ccuccagucugucccacacaccug

SEQ ID NO: 469660 - RNA, 20 nt, Human
ccugguaccaggcuggucuc

SEQ ID NO: 469661 - RNA, 18 nt, Human
ccuuaaaaaaaaaagacc

SEQ ID NO: 469662 - RNA, 20 nt, Human
cgcugcugcacgcugugaac

SEQ ID NO: 469663 - RNA, 19 nt, Human
cuaacuggacaccaaaagc

SEQ ID NO: 469664 - RNA, 24 nt, Human
cuagcaggugcugggggugcuggc

SEQ ID NO: 469665 - RNA, 21 nt, Human
cucuggaggagcucggcuuca

SEQ ID NO: 469666 - RNA, 21 nt, Human
cucuugagaugggaucugggu

SEQ ID NO: 469667 - RNA, 22 nt, Human
cuggcaggaggaggcgcggggc

SEQ ID NO: 469668 - RNA, 21 nt, Human
cuggucucaggcacgugaaaa

SEQ ID NO: 469669 - RNA, 21 nt, Human
cuucacacaucacaaagaccg

SEQ ID NO: 469670 - RNA, 23 nt, Human
cuuugaagcugaguccccucugg

SEQ ID NO: 469671 - RNA, 23 nt, Human
gaaggcgaggccaggggagacac

SEQ ID NO: 469672 - RNA, 24 nt, Human
gaauuuguugcaagaacuucagac

SEQ ID NO: 469673 - RNA, 19 nt, Human
gacaaagucgucccagagc

SEQ ID NO: 469674 - RNA, 20 nt, Human
gaggagggccaggugggugc

SEQ ID NO: 469675 - RNA, 23 nt, Human
gcacgugaaaaaaauaccaguaa

SEQ ID NO: 469676 - RNA, 24 nt, Human
gcccugagccuucuguggggccuc

SEQ ID NO: 469677 - RNA, 20 nt, Human
gcguuaggauuucacaguga

SEQ ID NO: 469678 - RNA, 24 nt, Human
gcuagcaggugcugggggugcugg

SEQ ID NO: 469679 - RNA, 22 nt, Human
gcuccacaauaagaaagaacaa

SEQ ID NO: 469680 - RNA, 20 nt, Human
gcuugguggcugaggcagug

SEQ ID NO: 469681 - RNA, 18 nt, Human
ggagaugcugcuggggaa

SEQ ID NO: 469682 - RNA, 22 nt, Human
ggaggagggccaggugggugcu

SEQ ID NO: 469683 - RNA, 19 nt, Human
ggcaaagaggcaaaaagga

SEQ ID NO: 469684 - RNA, 20 nt, Human
ggcaaagaggcaaaaaggaa

SEQ ID NO: 469685 - RNA, 20 nt, Human
ggcaggaggaggcgcggggc

SEQ ID NO: 469686 - RNA, 19 nt, Human
gggacccagcaugguggag

SEQ ID NO: 469687 - RNA, 22 nt, Human
gggagaugcugcuggggaaccc

SEQ ID NO: 469688 - RNA, 24 nt, Human
gggagccagcggcacaguuggugu

SEQ ID NO: 469689 - RNA, 23 nt, Human
ggggcguuaggauuucacaguga

SEQ ID NO: 469690 - RNA, 20 nt, Human
ggugcccugagccuucugug

SEQ ID NO: 469691 - RNA, 24 nt, Human
gguugguuaaugacuaaaucucac

SEQ ID NO: 469692 - RNA, 21 nt, Human
guaacaugggcgagcucuuga

SEQ ID NO: 469693 - RNA, 19 nt, Human
guagagcauggcaugggau

SEQ ID NO: 469694 - RNA, 20 nt, Human
gucccagagccccuccaggg

SEQ ID NO: 469695 - RNA, 22 nt, Human
gucccagagccccuccagggcc

SEQ ID NO: 469696 - RNA, 23 nt, Human
gucccagagccccuccagggcca

SEQ ID NO: 469697 - RNA, 21 nt, Human
gucugcacagaaagcauagga

SEQ ID NO: 469698 - RNA, 19 nt, Human
gugcuggcaggaggaggcg

SEQ ID NO: 469699 - RNA, 21 nt, Human
gugggcggagaaagcucugga

SEQ ID NO: 469700 - RNA, 22 nt, Human
uaaaaacagauaucuaagacaa

SEQ ID NO: 469701 - RNA, 24 nt, Human
uaaccauuuuuuguucccuuaaaa

SEQ ID NO: 469702 - RNA, 20 nt, Human
uaagacaaaauaacucaaac

SEQ ID NO: 469703 - RNA, 23 nt, Human
uaccacacaguggcagcuuuugg

SEQ ID NO: 469704 - RNA, 21 nt, Human
uagcaggugcugggggugcug

SEQ ID NO: 469705 - RNA, 18 nt, Human
uaggauguauuguauuaa

SEQ ID NO: 469706 - RNA, 20 nt, Human
uauguaaaaaugcaggagaa

SEQ ID NO: 469707 - RNA, 20 nt, Human
ucaaacauucugaggucuga

SEQ ID NO: 469708 - RNA, 27 nt, Human
ucagcaguccuugguuauucaguguuu

SEQ ID NO: 469709 - RNA, 24 nt, Human
ucaggcacgugaaaaaaauaccag

SEQ ID NO: 469710 - RNA, 19 nt, Human
uccacaacugcuaccggug

SEQ ID NO: 469711 - RNA, 23 nt, Human
uccacaauaagaaagaacaaagg

SEQ ID NO: 469712 - RNA, 19 nt, Human
uccacccugacgcuguggu

SEQ ID NO: 469713 - RNA, 23 nt, Human
ucccagagccccuccagggccag

SEQ ID NO: 469714 - RNA, 23 nt, Human
ucccaggccggcaagugcaccuc

SEQ ID NO: 469715 - RNA, 26 nt, Human
ucccuuaaaaaaaaaagacccaaaaa

SEQ ID NO: 469716 - RNA, 21 nt, Human
uccugguaccaggcuggucuc

SEQ ID NO: 469717 - RNA, 22 nt, Human
uccuuggcuugagggcaggcug

SEQ ID NO: 469718 - RNA, 21 nt, Human
ucggcuucagguggcagggag

SEQ ID NO: 469719 - RNA, 20 nt, Human
ucggugcccugagccuucug

SEQ ID NO: 469720 - RNA, 20 nt, Human
ucuggaggagcucggcuuca

SEQ ID NO: 469721 - RNA, 18 nt, Human
ugaagaaaaacucagcag

SEQ ID NO: 469722 - RNA, 18 nt, Human
ugaagggaaggcuucaca

SEQ ID NO: 469723 - RNA, 22 nt, Human
ugacuaaaucucacuacaugaa

SEQ ID NO: 469724 - RNA, 24 nt, Human
ugagaccagcugaccccccaugaa

SEQ ID NO: 469725 - RNA, 24 nt, Human
ugagaggcagaggguagagcaugg

SEQ ID NO: 469726 - RNA, 19 nt, Human
ugagguuguguggggugug

SEQ ID NO: 469727 - RNA, 20 nt, Human
ugaguggcuguggaaaagga

SEQ ID NO: 469728 - RNA, 21 nt, Human
ugauagcagaauuggcaucuc

SEQ ID NO: 469729 - RNA, 19 nt, Human
ugaugaggcagcuagcugg

SEQ ID NO: 469730 - RNA, 23 nt, Human
ugcaagaacuucagacagacgug

SEQ ID NO: 469731 - RNA, 20 nt, Human
ugcacagaagggacaacgac

SEQ ID NO: 469732 - RNA, 24 nt, Human
ugcacagaagggacaacgaccacc

SEQ ID NO: 469733 - RNA, 20 nt, Human
ugcaggagaauucucagaaa

SEQ ID NO: 469734 - RNA, 20 nt, Human
ugcccuccugccugaggguc

SEQ ID NO: 469735 - RNA, 22 nt, Human
ugcccugagccuucuguggggc

SEQ ID NO: 469736 - RNA, 18 nt, Human
ugcugcacgcugugaaca

SEQ ID NO: 469737 - RNA, 22 nt, Human
uggaaaaacuagagauggggcc

SEQ ID NO: 469738 - RNA, 18 nt, Human
uggaggagcucggcuuca

SEQ ID NO: 469739 - RNA, 21 nt, Human
uggcaggagagguugcuuuuc

SEQ ID NO: 469740 - RNA, 21 nt, Human
uggcaucauaaaaaugggaca

SEQ ID NO: 469741 - RNA, 24 nt, Human
uggccgagguggccaagauggcac

SEQ ID NO: 469742 - RNA, 24 nt, Human
uggccuaacuggacaccaaaagcu

SEQ ID NO: 469743 - RNA, 19 nt, Human
uggcuguggaaaaggagga

SEQ ID NO: 469744 - RNA, 18 nt, Human
uggcuugagggcaggcug

SEQ ID NO: 469745 - RNA, 21 nt, Human
ugggaucuggguggcaggaga

SEQ ID NO: 469746 - RNA, 18 nt, Human
ugggaugggcagcugucu

SEQ ID NO: 469747 - RNA, 21 nt, Human
ugggaugggcagcugucuguu

SEQ ID NO: 469748 - RNA, 24 nt, Human
ugggcugcccuggccgagguggaa

SEQ ID NO: 469749 - RNA, 18 nt, Human
ugguaggaaaaagcuugg

SEQ ID NO: 469750 - RNA, 24 nt, Human
ugguaggaaaaagcuugguggcug

SEQ ID NO: 469751 - RNA, 23 nt, Human
uggucagugcccuccugccugag

SEQ ID NO: 469752 - RNA, 22 nt, Human
ugguggccccagugaguggcug

SEQ ID NO: 469753 - RNA, 25 nt, Human
ugguuaaugacuaaaucucacuacc

SEQ ID NO: 469754 - RNA, 19 nt, Human
uguccuggaggcccagagu

SEQ ID NO: 469755 - RNA, 20 nt, Human
uguccuggaggcccagagug

SEQ ID NO: 469756 - RNA, 20 nt, Human
ugucgggagaugcugcuggg

SEQ ID NO: 469757 - RNA, 21 nt, Human
uguggucagugcccuccugcc

SEQ ID NO: 469758 - RNA, 18 nt, Human
ugugugggguguggucag

SEQ ID NO: 469759 - RNA, 23 nt, Human
uugguggccccagugaguggcug

SEQ ID NO: 469760 - RNA, 25 nt, Human
uugguggccccagugaguggcugug

SEQ ID NO: 469761 - RNA, 24 nt, Human
uuguucccuuaaaaaaaaaagacc

SEQ ID NO: 469762 - RNA, 22 nt, Human
uuuauguaaaaaugcaggagaa

SEQ ID NO: 469763 - RNA, 18 nt, Human
uuuguugcaagaacuuca

SEQ ID NO: 469764 - RNA, 24 nt, Human
uuuguugcaagaacuucagacaga

SEQ ID NO: 469765 - RNA, 18 nt, Human
accccucucgguccucca

SEQ ID NO: 469766 - RNA, 25 nt, Human
agcugcccugggcucacuguggguu

SEQ ID NO: 469767 - RNA, 20 nt, Human
agggagcaggugcugggcug

SEQ ID NO: 469768 - RNA, 21 nt, Human
agggcugggcuggagccugag

SEQ ID NO: 469769 - RNA, 22 nt, Human
agggguagggcugggcuggagc

SEQ ID NO: 469770 - RNA, 20 nt, Human
agguggagggcugccccggg

SEQ ID NO: 469771 - RNA, 19 nt, Human
cacagcagggguagggcug

SEQ ID NO: 469772 - RNA, 21 nt, Human
cacugucucccuccacccuca

SEQ ID NO: 469773 - RNA, 18 nt, Human
cagagagcugcccugggc

SEQ ID NO: 469774 - RNA, 20 nt, Human
cagagcauuucccagguggg

SEQ ID NO: 469775 - RNA, 21 nt, Human
cagagcauuucccaggugggu

SEQ ID NO: 469776 - RNA, 20 nt, Human
cagcagggguagggcugggc

SEQ ID NO: 469777 - RNA, 22 nt, Human
caggcagagagcugcccugggc

SEQ ID NO: 469778 - RNA, 19 nt, Human
ccagacaucuguuugcugu

SEQ ID NO: 469779 - RNA, 21 nt, Human
cccacugucucccuccacccu

SEQ ID NO: 469780 - RNA, 19 nt, Human
cccagguggguggagacgg

SEQ ID NO: 469781 - RNA, 21 nt, Human
ccccgggcucgcuguggaccc

SEQ ID NO: 469782 - RNA, 22 nt, Human
ccccgggcucgcuguggacccu

SEQ ID NO: 469783 - RNA, 23 nt, Human
cccgccuccaguccccacacccc

SEQ ID NO: 469784 - RNA, 21 nt, Human
ccgagugguccguugccuccc

SEQ ID NO: 469785 - RNA, 18 nt, Human
ccgucacucaggggaccc

SEQ ID NO: 469786 - RNA, 21 nt, Human
ccuccaguccccacaccccuc

SEQ ID NO: 469787 - RNA, 19 nt, Human
cucacugccagacaucugu

SEQ ID NO: 469788 - RNA, 23 nt, Human
cucacuguggguucagcugaggc

SEQ ID NO: 469789 - RNA, 18 nt, Human
cuccaguccccacacccc

SEQ ID NO: 469790 - RNA, 19 nt, Human
cugagaccccucucggucc

SEQ ID NO: 469791 - RNA, 18 nt, Human
cugaggcuggcuaggucu

SEQ ID NO: 469792 - RNA, 22 nt, Human
cuuggcgggcaggggugggggu

SEQ ID NO: 469793 - RNA, 23 nt, Human
gagcuuggcgggcaggggugggg

SEQ ID NO: 469794 - RNA, 21 nt, Human
gaggcuggcuaggucuucucc

SEQ ID NO: 469795 - RNA, 20 nt, Human
gagugguccguugccuccca

SEQ ID NO: 469796 - RNA, 21 nt, Human
gaucccgccuccaguccccac

SEQ ID NO: 469797 - RNA, 23 nt, Human
gcacagcagggguagggcugggc

SEQ ID NO: 469798 - RNA, 19 nt, Human
gcagagcauuucccaggug

SEQ ID NO: 469799 - RNA, 23 nt, Human
gcagggguggggguccgaguggu

SEQ ID NO: 469800 - RNA, 23 nt, Human
gccuccaguccccacacccccuu

SEQ ID NO: 469801 - RNA, 19 nt, Human
gccugggaacggcugcagu

SEQ ID NO: 469802 - RNA, 21 nt, Human
gcugggcugugggaggggccg

SEQ ID NO: 469803 - RNA, 23 nt, Human
gcuuggcgggcaggggugggggu

SEQ ID NO: 469804 - RNA, 18 nt, Human
ggacccggucuucgaggg

SEQ ID NO: 469805 - RNA, 23 nt, Human
ggagcaggugcugggcuguggga

SEQ ID NO: 469806 - RNA, 22 nt, Human
ggagcuuggcgggcaggggugg

SEQ ID NO: 469807 - RNA, 19 nt, Human
ggcagggguggggguccga

SEQ ID NO: 469808 - RNA, 22 nt, Human
ggcagggguggggguccgagug

SEQ ID NO: 469809 - RNA, 19 nt, Human
ggcucgcuguggacccugg

SEQ ID NO: 469810 - RNA, 20 nt, Human
ggugcugggcugugggaggg

SEQ ID NO: 469811 - RNA, 19 nt, Human
gguucagcugaggcuggcu

SEQ ID NO: 469812 - RNA, 24 nt, Human
gguucugugcagggcugccugcug

SEQ ID NO: 469813 - RNA, 20 nt, Human
gucucccuccacccucacug

SEQ ID NO: 469814 - RNA, 23 nt, Human
ucacugccagacaucuguuugcc

SEQ ID NO: 469815 - RNA, 18 nt, Human
ucagggagcaggugcugg

SEQ ID NO: 469816 - RNA, 20 nt, Human
uccacccucacugccagacc

SEQ ID NO: 469817 - RNA, 19 nt, Human
ucgagggugcugccgccca

SEQ ID NO: 469818 - RNA, 19 nt, Human
ugcacagcagggguagggc

SEQ ID NO: 469819 - RNA, 28 nt, Human
ugcagugcacagcagggguuggaaggcc

SEQ ID NO: 469820 - RNA, 18 nt, Human
ugccagacaucuguuugc

SEQ ID NO: 469821 - RNA, 18 nt, Human
ugcccucuccaggcccug

SEQ ID NO: 469822 - RNA, 18 nt, Human
ugcccucuccaggcugug

SEQ ID NO: 469823 - RNA, 18 nt, Human
ugccugggaacggcugca

SEQ ID NO: 469824 - RNA, 19 nt, Human
ugccugggaacggcugcag

SEQ ID NO: 469825 - RNA, 23 nt, Human
ugcuuggagcuuggcgggcaggg

SEQ ID NO: 469826 - RNA, 21 nt, Human
uggagccugagugaucccgcc

SEQ ID NO: 469827 - RNA, 19 nt, Human
ugggaggggccgcagagca

SEQ ID NO: 469828 - RNA, 18 nt, Human
uguggugagcaggcagag

SEQ ID NO: 469829 - RNA, 21 nt, Human
uguggugagcaggcagagagc

SEQ ID NO: 469830 - RNA, 19 nt, Human
uuggauggugugcccucuc

SEQ ID NO: 469831 - RNA, 20 nt, Human
uuggcgggcagggguggggg

SEQ ID NO: 469832 - RNA, 19 nt, Human
uuggguggugugcccucuc

SEQ ID NO: 469833 - RNA, 24 nt, Human
uuugcugucagcccacgagggggc

SEQ ID NO: 469834 - RNA, 20 nt, Human
agagcuccacuccacuccuc

SEQ ID NO: 469835 - RNA, 22 nt, Human
cacaacuagccccuuugccuuu

SEQ ID NO: 469836 - RNA, 24 nt, Human
ccaaaaauccaguaauacuagaaa

SEQ ID NO: 469837 - RNA, 21 nt, Human
ccccaaaaauccaguaauacu

SEQ ID NO: 469838 - RNA, 24 nt, Human
cuacaaauuuuuccccaaaaaucc

SEQ ID NO: 469839 - RNA, 18 nt, Human
gagcuccacuccacuccu

SEQ ID NO: 469840 - RNA, 22 nt, Human
uaaggaccccugugcucuuaca

SEQ ID NO: 469841 - RNA, 20 nt, Human
uagaaacaaauagauuuccu

SEQ ID NO: 469842 - RNA, 24 nt, Human
uuccugugcaggcaaauggcacaa

SEQ ID NO: 469843 - RNA, 18 nt, Human
aaacucaguuuccccacc

SEQ ID NO: 469844 - RNA, 22 nt, Human
aagaaauggggucuugcuaugu

SEQ ID NO: 469845 - RNA, 22 nt, Human
accgcagcuuccagaagguguc

SEQ ID NO: 469846 - RNA, 18 nt, Human
aggaauccucucaccuca

SEQ ID NO: 469847 - RNA, 20 nt, Human
aggaauccucucaccucagc

SEQ ID NO: 469848 - RNA, 19 nt, Human
aucauuuuucagagaacag

SEQ ID NO: 469849 - RNA, 18 nt, Human
caaaaaugccucaagcga

SEQ ID NO: 469850 - RNA, 24 nt, Human
caagcgaaaaucaggucuuccccu

SEQ ID NO: 469851 - RNA, 25 nt, Human
caccucagccuccugagucacugug

SEQ ID NO: 469852 - RNA, 20 nt, Human
caguucucuucagccgcagc

SEQ ID NO: 469853 - RNA, 26 nt, Human
ccaaagcucuccuaguucacaacugg

SEQ ID NO: 469854 - RNA, 19 nt, Human
ccggccggauucucccucc

SEQ ID NO: 469855 - RNA, 20 nt, Human
ccuaaauucuuuuuuggcgc

SEQ ID NO: 469856 - RNA, 26 nt, Human
ccucccguagagaagcaccacggggc

SEQ ID NO: 469857 - RNA, 24 nt, Human
ccucucaccucagccuccugaguc

SEQ ID NO: 469858 - RNA, 24 nt, Human
cuauguugcccaagguuggucucg

SEQ ID NO: 469859 - RNA, 19 nt, Human
cucaaggaauccucucacc

SEQ ID NO: 469860 - RNA, 22 nt, Human
cuccugagucacugugauuaca

SEQ ID NO: 469861 - RNA, 19 nt, Human
cucgaacccuggccucaag

SEQ ID NO: 469862 - RNA, 22 nt, Human
cucucuugcuugggacagaggu

SEQ ID NO: 469863 - RNA, 18 nt, Human
gacugugugugugugugu

SEQ ID NO: 469864 - RNA, 18 nt, Human
gauuacagugugagcuac

SEQ ID NO: 469865 - RNA, 22 nt, Human
gauuacagugugagcuacugca

SEQ ID NO: 469866 - RNA, 24 nt, Human
gcagcuuuccugucguccccgcgc

SEQ ID NO: 469867 - RNA, 21 nt, Human
ggaauccucucaccucagccu

SEQ ID NO: 469868 - RNA, 22 nt, Human
gggucuugcuauguugcccaag

SEQ ID NO: 469869 - RNA, 21 nt, Human
gugugugugugugugugugug

SEQ ID NO: 469870 - RNA, 21 nt, Human
gugugugugugugugugugug

SEQ ID NO: 469871 - RNA, 21 nt, Human
gugugugugugugugugugug

SEQ ID NO: 469872 - RNA, 20 nt, Human
uagcuccucaggcgacuccu

SEQ ID NO: 469873 - RNA, 18 nt, Human
uauguugcccaagguugg

SEQ ID NO: 469874 - RNA, 22 nt, Human
uauguugcccaagguuggucuc

SEQ ID NO: 469875 - RNA, 25 nt, Human
uauguugcccaagguuggucucgaa

SEQ ID NO: 469876 - RNA, 19 nt, Human
ucagccgcagcuuuccugu

SEQ ID NO: 469877 - RNA, 22 nt, Human
ucaggcgacuccugccaagucc

SEQ ID NO: 469878 - RNA, 21 nt, Human
ucaguuuccccaccgcagcuu

SEQ ID NO: 469879 - RNA, 22 nt, Human
uccccaccgcagcuuccagaag

SEQ ID NO: 469880 - RNA, 24 nt, Human
uccccgcgcggugcugaaccccau

SEQ ID NO: 469881 - RNA, 21 nt, Human
ucuccuaguucacaacugggc

SEQ ID NO: 469882 - RNA, 21 nt, Human
ucucuugcuugggacagaggu

SEQ ID NO: 469883 - RNA, 18 nt, Human
ucugcaauaaacccagga

SEQ ID NO: 469884 - RNA, 19 nt, Human
ucuugcuauguugcccaag

SEQ ID NO: 469885 - RNA, 20 nt, Human
ucuugcuauguugcccaagg

SEQ ID NO: 469886 - RNA, 24 nt, Human
ucuugcuauguugcccaagguugg

SEQ ID NO: 469887 - RNA, 25 nt, Human
ucuugcuauguugcccaagguuggu

SEQ ID NO: 469888 - RNA, 24 nt, Human
ugacugugugugugugugugugug

SEQ ID NO: 469889 - RNA, 19 nt, Human
ugcaauaaacccaggaggc

SEQ ID NO: 469890 - RNA, 23 nt, Human
ugcuauguugcccaagguugguc

SEQ ID NO: 469891 - RNA, 25 nt, Human
uggggucuugcuauguugcccaagg

SEQ ID NO: 469892 - RNA, 23 nt, Human
ugugagcuacugcaucuggagac

SEQ ID NO: 469893 - RNA, 21 nt, Human
ugugauuacagugugagcuac

SEQ ID NO: 469894 - RNA, 23 nt, Human
ugugauuacagugugagcuacug

SEQ ID NO: 469895 - RNA, 21 nt, Human
ugugugugucugucugucugu

SEQ ID NO: 469896 - RNA, 19 nt, Human
ugugugugugugucugucu

SEQ ID NO: 469897 - RNA, 20 nt, Human
ugugugugugugucugucug

SEQ ID NO: 469898 - RNA, 20 nt, Human
ugugugugugugugugucug

SEQ ID NO: 469899 - RNA, 21 nt, Human
ugugugugugugugugucugu

SEQ ID NO: 469900 - RNA, 18 nt, Human
ugugugugugugugugug

SEQ ID NO: 469901 - RNA, 18 nt, Human
ugugugugugugugugug

SEQ ID NO: 469902 - RNA, 18 nt, Human
ugugugugugugugugug

SEQ ID NO: 469903 - RNA, 18 nt, Human
ugugugugugugugugug

SEQ ID NO: 469904 - RNA, 18 nt, Human
ugugugugugugugugug

SEQ ID NO: 469905 - RNA, 18 nt, Human
ugugugugugugugugug

SEQ ID NO: 469906 - RNA, 18 nt, Human
ugugugugugugugugug

SEQ ID NO: 469907 - RNA, 18 nt, Human
ugugugugugugugugug

SEQ ID NO: 469908 - RNA, 18 nt, Human
ugugugugugugugugug

SEQ ID NO: 469909 - RNA, 18 nt, Human
ugugugugugugugugug

SEQ ID NO: 469910 - RNA, 18 nt, Human
ugugugugugugugugug

SEQ ID NO: 469911 - RNA, 18 nt, Human
ugugugugugugugugug

SEQ ID NO: 469912 - RNA, 18 nt, Human
ugugugugugugugugug

SEQ ID NO: 469913 - RNA, 18 nt, Human
ugugugugugugugugug

SEQ ID NO: 469914 - RNA, 22 nt, Human
ugugugugugugugugugucug

SEQ ID NO: 469915 - RNA, 21 nt, Human
ugugugugugugugugugugu

SEQ ID NO: 469916 - RNA, 21 nt, Human
ugugugugugugugugugugu

SEQ ID NO: 469917 - RNA, 21 nt, Human
ugugugugugugugugugugu

SEQ ID NO: 469918 - RNA, 21 nt, Human
ugugugugugugugugugugu

SEQ ID NO: 469919 - RNA, 21 nt, Human
ugugugugugugugugugugu

SEQ ID NO: 469920 - RNA, 21 nt, Human
ugugugugugugugugugugu

SEQ ID NO: 469921 - RNA, 21 nt, Human
ugugugugugugugugugugu

SEQ ID NO: 469922 - RNA, 21 nt, Human
ugugugugugugugugugugu

SEQ ID NO: 469923 - RNA, 21 nt, Human
ugugugugugugugugugugu

SEQ ID NO: 469924 - RNA, 21 nt, Human
ugugugugugugugugugugu

SEQ ID NO: 469925 - RNA, 21 nt, Human
ugugugugugugugugugugu

SEQ ID NO: 469926 - RNA, 21 nt, Human
ugugugugugugugugugugu

SEQ ID NO: 469927 - RNA, 21 nt, Human
ugugugugugugugugugugu

SEQ ID NO: 469928 - RNA, 21 nt, Human
ugugugugugugugugugugu

SEQ ID NO: 469929 - RNA, 21 nt, Human
ugugugugugugugugugugu

SEQ ID NO: 469930 - RNA, 21 nt, Human
ugugugugugugugugugugu

SEQ ID NO: 469931 - RNA, 21 nt, Human
ugugugugugugugugugugu

SEQ ID NO: 469932 - RNA, 21 nt, Human
ugugugugugugugugugugu

SEQ ID NO: 469933 - RNA, 21 nt, Human
ugugugugugugugugugugu

SEQ ID NO: 469934 - RNA, 21 nt, Human
ugugugugugugugugugugu

SEQ ID NO: 469935 - RNA, 21 nt, Human
ugugugugugugugugugugu

SEQ ID NO: 469936 - RNA, 21 nt, Human
ugugugugugugugugugugu

SEQ ID NO: 469937 - RNA, 21 nt, Human
ugugugugugugugugugugu

SEQ ID NO: 469938 - RNA, 21 nt, Human
ugugugugugugugugugugu

SEQ ID NO: 469939 - RNA, 22 nt, Human
ugugugugugugugugugugug

SEQ ID NO: 469940 - RNA, 22 nt, Human
ugugugugugugugugugugug

SEQ ID NO: 469941 - RNA, 22 nt, Human
ugugugugugugugugugugug

SEQ ID NO: 469942 - RNA, 22 nt, Human
ugugugugugugugugugugug

SEQ ID NO: 469943 - RNA, 22 nt, Human
ugugugugugugugugugugug

SEQ ID NO: 469944 - RNA, 22 nt, Human
ugugugugugugugugugugug

SEQ ID NO: 469945 - RNA, 22 nt, Human
ugugugugugugugugugugug

SEQ ID NO: 469946 - RNA, 22 nt, Human
ugugugugugugugugugugug

SEQ ID NO: 469947 - RNA, 22 nt, Human
ugugugugugugugugugugug

SEQ ID NO: 469948 - RNA, 23 nt, Human
ugugugugugugugugugugugu

SEQ ID NO: 469949 - RNA, 21 nt, Human
uuccagaaggugucuguagcc

SEQ ID NO: 469950 - RNA, 26 nt, Human
uucucccucccucccucccguagaga

SEQ ID NO: 469951 - RNA, 19 nt, Human
uuuccugucguccccgcgc

SEQ ID NO: 469952 - RNA, 23 nt, Human
aaaaugcaaaguauugaaggcac

SEQ ID NO: 469953 - RNA, 23 nt, Human
aaaugcaaaguauugaaggcacu

SEQ ID NO: 469954 - RNA, 22 nt, Human
acagagguaacucaacggccca

SEQ ID NO: 469955 - RNA, 18 nt, Human
aggacagaggguaggcaa

SEQ ID NO: 469956 - RNA, 20 nt, Human
aggcaggagcacacggcagc

SEQ ID NO: 469957 - RNA, 19 nt, Human
cacggcagcaaggggcagg

SEQ ID NO: 469958 - RNA, 18 nt, Human
cacuuacaauaacaaggc

SEQ ID NO: 469959 - RNA, 20 nt, Human
cagaagcuacaucaugagca

SEQ ID NO: 469960 - RNA, 21 nt, Human
caggcagccacucugccucca

SEQ ID NO: 469961 - RNA, 19 nt, Human
cgaguuaguggcucuucuc

SEQ ID NO: 469962 - RNA, 21 nt, Human
cggcagcaaggggcaggcugg

SEQ ID NO: 469963 - RNA, 20 nt, Human
cuuuuuuuuuuuuuuuuugg

SEQ ID NO: 469964 - RNA, 25 nt, Human
gaccguggaaugaaugcaggcagcc

SEQ ID NO: 469965 - RNA, 25 nt, Human
gacugucuuuggaacaagcugugga

SEQ ID NO: 469966 - RNA, 21 nt, Human
gaggguaggcaagugggggca

SEQ ID NO: 469967 - RNA, 22 nt, Human
gcccaccugcucacggcccagc

SEQ ID NO: 469968 - RNA, 24 nt, Human
gcggcuagcucuacagaagauaaa

SEQ ID NO: 469969 - RNA, 25 nt, Human
gcuuuuuuuuuuuuuuuuuguuuuu

SEQ ID NO: 469970 - RNA, 20 nt, Human
ggagcacacggcagcaaggg

SEQ ID NO: 469971 - RNA, 18 nt, Human
ggcaagugggggcacggg

SEQ ID NO: 469972 - RNA, 20 nt, Human
uaacucaacggcccaccugc

SEQ ID NO: 469973 - RNA, 25 nt, Human
uaacucaacggcccaccugcucacg

SEQ ID NO: 469974 - RNA, 21 nt, Human
uacaauaacaaggcaggacag

SEQ ID NO: 469975 - RNA, 23 nt, Human
uacaauaacaaggcaggacagag

SEQ ID NO: 469976 - RNA, 20 nt, Human
ucccaaaaugcaaaguauug

SEQ ID NO: 469977 - RNA, 19 nt, Human
ucuacagaagauaaaaauc

SEQ ID NO: 469978 - RNA, 23 nt, Human
ugaaaauaguuugucaagugcag

SEQ ID NO: 469979 - RNA, 23 nt, Human
uggaauggaccguggaaugaaug

SEQ ID NO: 469980 - RNA, 21 nt, Human
uggagaaaaagaaaagcuaca

SEQ ID NO: 469981 - RNA, 19 nt, Human
uggcucuucucagcagcga

SEQ ID NO: 469982 - RNA, 23 nt, Human
uuggcaggggagggagccuuuuu

SEQ ID NO: 469983 - RNA, 24 nt, Human
uuggcaggggagggagccuuuuuu

SEQ ID NO: 469984 - RNA, 27 nt, Human
uuuuuuuuuguuuuuuuuuuuuuuuuu

SEQ ID NO: 469985 - RNA, 24 nt, Human
uuuuuuuuuuggcaggggagggag

SEQ ID NO: 469986 - RNA, 19 nt, Human
uuuuuuuuuuuuggcaggg

SEQ ID NO: 469987 - RNA, 25 nt, Human
uuuuuuuuuuuuuuuuuggcagggg

SEQ ID NO: 469988 - RNA, 22 nt, Human
uuuuuuuuuuuuuuuuuuuggc

SEQ ID NO: 469989 - RNA, 19 nt, Human
aaaaagaccuucuacacuu

SEQ ID NO: 469990 - RNA, 20 nt, Human
aaccauaguuucucaaucug

SEQ ID NO: 469991 - RNA, 19 nt, Human
aagcugucagugaggaugc

SEQ ID NO: 469992 - RNA, 26 nt, Human
acaaagcaggaucgcugcucagcccc

SEQ ID NO: 469993 - RNA, 22 nt, Human
acccagaucaucccccugaguc

SEQ ID NO: 469994 - RNA, 18 nt, Human
acccuggagugaagaccc

SEQ ID NO: 469995 - RNA, 25 nt, Human
agacucagaggugggcugcugagcc

SEQ ID NO: 469996 - RNA, 23 nt, Human
agagccauggccguucaggugug

SEQ ID NO: 469997 - RNA, 20 nt, Human
agauucccucaagccccguc

SEQ ID NO: 469998 - RNA, 18 nt, Human
agcagguggagcccacuc

SEQ ID NO: 469999 - RNA, 24 nt, Human
agccagcccgguccacacacucaa

SEQ ID NO: 470000 - RNA, 19 nt, Human
agccuccagaaagcugcgg

SEQ ID NO: 470001 - RNA, 24 nt, Human
agcggcccaggagccccgggugac

SEQ ID NO: 470002 - RNA, 22 nt, Human
aggaagcccucgaaguagccga

SEQ ID NO: 470003 - RNA, 18 nt, Human
aggugggcugcugagcca

SEQ ID NO: 470004 - RNA, 21 nt, Human
auccuggagcugaaaaaaccc

SEQ ID NO: 470005 - RNA, 21 nt, Human
aucgcugcucagccccagccc

SEQ ID NO: 470006 - RNA, 18 nt, Human
caacccuggguggaggaa

SEQ ID NO: 470007 - RNA, 19 nt, Human
cacgcccuccaggaagccc

SEQ ID NO: 470008 - RNA, 21 nt, Human
cacucuucaugccuuccucag

SEQ ID NO: 470009 - RNA, 21 nt, Human
cagaaugggacccagaucauc

SEQ ID NO: 470010 - RNA, 23 nt, Human
cagaaugggacccagaucauccc

SEQ ID NO: 470011 - RNA, 24 nt, Human
cagaucaucccccugagucaaccc

SEQ ID NO: 470012 - RNA, 20 nt, Human
cagcagcaucgcaaacugcu

SEQ ID NO: 470013 - RNA, 27 nt, Human
cagcagcaucgcaaacugcuggaucuc

SEQ ID NO: 470014 - RNA, 20 nt, Human
cagccccagccgguacuccc

SEQ ID NO: 470015 - RNA, 25 nt, Human
cauggccccgggccccaagggcagg

SEQ ID NO: 470016 - RNA, 19 nt, Human
cauuaugcggcugcagagc

SEQ ID NO: 470017 - RNA, 21 nt, Human
cauuaugcggcugcagagcca

SEQ ID NO: 470018 - RNA, 20 nt, Human
ccagaaugggacccagauca

SEQ ID NO: 470019 - RNA, 20 nt, Human
ccaggagccccgggugacug

SEQ ID NO: 470020 - RNA, 22 nt, Human
cccacucuucaugccuuccuca

SEQ ID NO: 470021 - RNA, 24 nt, Human
ccccaagggcagggagcgagaccc

SEQ ID NO: 470022 - RNA, 19 nt, Human
ccccgggugacugccccgg

SEQ ID NO: 470023 - RNA, 20 nt, Human
ccccugagucaacccugggu

SEQ ID NO: 470024 - RNA, 24 nt, Human
ccccuggagccccggggcucaucc

SEQ ID NO: 470025 - RNA, 22 nt, Human
cccgccccuggagccccggggc

SEQ ID NO: 470026 - RNA, 18 nt, Human
cccucaguaaucccugug

SEQ ID NO: 470027 - RNA, 22 nt, Human
ccgcaacgugaccauguaaucc

SEQ ID NO: 470028 - RNA, 18 nt, Human
ccgcgccaucguagcugc

SEQ ID NO: 470029 - RNA, 23 nt, Human
ccguagagcuucagcaggccugu

SEQ ID NO: 470030 - RNA, 26 nt, Human
ccucgaaguagccgauguccuggucc

SEQ ID NO: 470031 - RNA, 19 nt, Human
ccugcaggacacuccaggu

SEQ ID NO: 470032 - RNA, 21 nt, Human
cucaaucuguaaaauaggacc

SEQ ID NO: 470033 - RNA, 25 nt, Human
cucagccccagcccggcagagcggc

SEQ ID NO: 470034 - RNA, 19 nt, Human
cucccgccccuggagcccc

SEQ ID NO: 470035 - RNA, 20 nt, Human
cuccucugcagcgucccugu

SEQ ID NO: 470036 - RNA, 24 nt, Human
cugagucaacccuggguggaggaa

SEQ ID NO: 470037 - RNA, 21 nt, Human
cugcggcgucgcucccgcccc

SEQ ID NO: 470038 - RNA, 22 nt, Human
cuggagcugaaaaaacccuugu

SEQ ID NO: 470039 - RNA, 24 nt, Human
cuggaucucgaggggccccagcuu

SEQ ID NO: 470040 - RNA, 21 nt, Human
gaagcaaagcugagacucaga

SEQ ID NO: 470041 - RNA, 22 nt, Human
gagacccuggagugaagacccc

SEQ ID NO: 470042 - RNA, 20 nt, Human
gaggguguguucuggggcug

SEQ ID NO: 470043 - RNA, 22 nt, Human
gagucaacccuggguggaggaa

SEQ ID NO: 470044 - RNA, 22 nt, Human
gaugggcagccccagccgguac

SEQ ID NO: 470045 - RNA, 22 nt, Human
gcagggagcgagacccuggagu

SEQ ID NO: 470046 - RNA, 21 nt, Human
gcccuggggauaggguccccg

SEQ ID NO: 470047 - RNA, 18 nt, Human
gcgcacugcggaggccga

SEQ ID NO: 470048 - RNA, 23 nt, Human
ggaaauucuuuucucagucggcc

SEQ ID NO: 470049 - RNA, 18 nt, Human
ggaccgaguucuggaaau

SEQ ID NO: 470050 - RNA, 20 nt, Human
ggaggcacacagagguuacg

SEQ ID NO: 470051 - RNA, 20 nt, Human
gggagccauggaaagaaggu

SEQ ID NO: 470052 - RNA, 22 nt, Human
gggcagccccagccgguacucc

SEQ ID NO: 470053 - RNA, 24 nt, Human
gggcagggagcgagacccuggagu

SEQ ID NO: 470054 - RNA, 20 nt, Human
gggccccaagggcagggagc

SEQ ID NO: 470055 - RNA, 19 nt, Human
gggggggcccuggggauag

SEQ ID NO: 470056 - RNA, 19 nt, Human
guggaggaaaccgucuacu

SEQ ID NO: 470057 - RNA, 18 nt, Human
uaacugcuccaagcccag

SEQ ID NO: 470058 - RNA, 22 nt, Human
uaauccuguaacugcuccaagc

SEQ ID NO: 470059 - RNA, 21 nt, Human
uacugcauggccccgggcccc

SEQ ID NO: 470060 - RNA, 22 nt, Human
uagcugcgcacugcggaggccg

SEQ ID NO: 470061 - RNA, 21 nt, Human
uaguccuggaugggcagcccc

SEQ ID NO: 470062 - RNA, 18 nt, Human
uccacacugacuguacaa

SEQ ID NO: 470063 - RNA, 20 nt, Human
ucccuguggccacccuguuc

SEQ ID NO: 470064 - RNA, 24 nt, Human
uccgggaugaagggccgcauccca

SEQ ID NO: 470065 - RNA, 21 nt, Human
ucgggggccagcgccucgaug

SEQ ID NO: 470066 - RNA, 20 nt, Human
ugagugcgcaggacuccucu

SEQ ID NO: 470067 - RNA, 25 nt, Human
ugccccggacuucagggcccggcuu

SEQ ID NO: 470068 - RNA, 18 nt, Human
ugccucgggccgcugcgc

SEQ ID NO: 470069 - RNA, 21 nt, Human
uggagcugaaaaaacccuugu

SEQ ID NO: 470070 - RNA, 26 nt, Human
uggagugaagaccccccggccccgcc

SEQ ID NO: 470071 - RNA, 20 nt, Human
uggccccgggccccaagggc

SEQ ID NO: 470072 - RNA, 20 nt, Human
ugggagccauggaaagaagg

SEQ ID NO: 470073 - RNA, 19 nt, Human
uguggccacccuguuaggu

SEQ ID NO: 470074 - RNA, 20 nt, Human
uuaaaaagaccuucuacacu

SEQ ID NO: 470075 - RNA, 18 nt, Human
uuagagccuuaaaaagac

SEQ ID NO: 470076 - RNA, 23 nt, Human
uuuagagccuuaaaaagaccuuc

SEQ ID NO: 470077 - RNA, 20 nt, Human
aaccugugccacagcccccc

SEQ ID NO: 470078 - RNA, 24 nt, Human
aagaggccuugccagcuugggggc

SEQ ID NO: 470079 - RNA, 19 nt, Human
accugugccacagcccccc

SEQ ID NO: 470080 - RNA, 19 nt, Human
aggcugugucagacuuccc

SEQ ID NO: 470081 - RNA, 18 nt, Human
aucugcuucacauucucu

SEQ ID NO: 470082 - RNA, 21 nt, Human
caagggcaaccccagccaaag

SEQ ID NO: 470083 - RNA, 24 nt, Human
caccaacaagggaacauugcccca

SEQ ID NO: 470084 - RNA, 19 nt, Human
caggggcgcgccgcgcccc

SEQ ID NO: 470085 - RNA, 21 nt, Human
ccaggggcagagucccuggcc

SEQ ID NO: 470086 - RNA, 21 nt, Human
ccccccgcagcccauggaggu

SEQ ID NO: 470087 - RNA, 23 nt, Human
cccucugcagccucccagcuauu

SEQ ID NO: 470088 - RNA, 29 nt, Human
cccuuaacuccaggacuccaggggcagag

SEQ ID NO: 470089 - RNA, 18 nt, Human
ccgcgccccagggguccg

SEQ ID NO: 470090 - RNA, 19 nt, Human
ccugcagccuugccuucau

SEQ ID NO: 470091 - RNA, 19 nt, Human
ccuuccccugccuucuggg

SEQ ID NO: 470092 - RNA, 21 nt, Human
cucccagcacccucugcagcc

SEQ ID NO: 470093 - RNA, 19 nt, Human
cucuccucacaguggccuu

SEQ ID NO: 470094 - RNA, 21 nt, Human
cugggccagaccugcagccuu

SEQ ID NO: 470095 - RNA, 18 nt, Human
cuucuggggcaaccccuc

SEQ ID NO: 470096 - RNA, 22 nt, Human
gaacuucuaggggcucccagca

SEQ ID NO: 470097 - RNA, 30 nt, Human
gcccaccaacaagggaacauugccccaacc

SEQ ID NO: 470098 - RNA, 24 nt, Human
gccuucuggggcaaccccucuccu

SEQ ID NO: 470099 - RNA, 18 nt, Human
ggcagagucccuggccuu

SEQ ID NO: 470100 - RNA, 25 nt, Human
gggcaaccccagccaaagcucaccc

SEQ ID NO: 470101 - RNA, 25 nt, Human
gggcucccagcacccucugcagccu

SEQ ID NO: 470102 - RNA, 20 nt, Human
uaacuccaggacuccagggg

SEQ ID NO: 470103 - RNA, 21 nt, Human
ucacccugagccuagcucaac

SEQ ID NO: 470104 - RNA, 18 nt, Human
ucagguccuuccccugcc

SEQ ID NO: 470105 - RNA, 20 nt, Human
ucccuggccuucagccaaga

SEQ ID NO: 470106 - RNA, 24 nt, Human
ucccuuaacuccaggacuccaggg

SEQ ID NO: 470107 - RNA, 20 nt, Human
ugccacagccccccggcugu

SEQ ID NO: 470108 - RNA, 21 nt, Human
ugccccaaccugugccacagc

SEQ ID NO: 470109 - RNA, 23 nt, Human
ugccccaaccugugccacagccc

SEQ ID NO: 470110 - RNA, 20 nt, Human
ugccuucuggggcaaccccu

SEQ ID NO: 470111 - RNA, 19 nt, Human
uuaacuccaggacuccagg

SEQ ID NO: 470112 - RNA, 22 nt, Human
uuccccugggccagaccugcag

SEQ ID NO: 470113 - RNA, 19 nt, Human
uugaucugcuucacauucu

SEQ ID NO: 470114 - RNA, 19 nt, Human
aaaaaaaaaaaaaaaaaga

SEQ ID NO: 470115 - RNA, 19 nt, Human
aaaaaaaaaaaaaagaaaa

SEQ ID NO: 470116 - RNA, 19 nt, Human
aaaaaaaaaaagaaaaaaa

SEQ ID NO: 470117 - RNA, 24 nt, Human
aaaaauauuaaaacaaaaccaaga

SEQ ID NO: 470118 - RNA, 22 nt, Human
aaacaaaaccaagaauauacaa

SEQ ID NO: 470119 - RNA, 19 nt, Human
aaaccucaaccucaccacc

SEQ ID NO: 470120 - RNA, 21 nt, Human
aacagcugacccaccuccucg

SEQ ID NO: 470121 - RNA, 18 nt, Human
aacggaacagagaagcca

SEQ ID NO: 470122 - RNA, 26 nt, Human
aagaaaaaaaauauuaaaacaaaacc

SEQ ID NO: 470123 - RNA, 23 nt, Human
aauguggaaggcugagagaagga

SEQ ID NO: 470124 - RNA, 26 nt, Human
acaaaaccaagaauauacaacagaga

SEQ ID NO: 470125 - RNA, 24 nt, Human
acaucugggccaggccuucagugu

SEQ ID NO: 470126 - RNA, 20 nt, Human
accaagccccaaaccucaac

SEQ ID NO: 470127 - RNA, 21 nt, Human
accacagcaagcucgcccagg

SEQ ID NO: 470128 - RNA, 20 nt, Human
accaggaagguauauaagac

SEQ ID NO: 470129 - RNA, 26 nt, Human
agagaagccauaccuuguuucucaga

SEQ ID NO: 470130 - RNA, 21 nt, Human
agagccaaugaggugugugga

SEQ ID NO: 470131 - RNA, 21 nt, Human
agcagcugcagcuggcagggg

SEQ ID NO: 470132 - RNA, 21 nt, Human
aggcuagacaaucauucccag

SEQ ID NO: 470133 - RNA, 19 nt, Human
agggggcuggggcugcacc

SEQ ID NO: 470134 - RNA, 23 nt, Human
auguggaaggcugagagaaggac

SEQ ID NO: 470135 - RNA, 19 nt, Human
caaaguagacugcucgggc

SEQ ID NO: 470136 - RNA, 19 nt, Human
caacagcugacccaccucc

SEQ ID NO: 470137 - RNA, 19 nt, Human
caacugcuaccaagcccca

SEQ ID NO: 470138 - RNA, 19 nt, Human
cagcaugucgggcuggagc

SEQ ID NO: 470139 - RNA, 22 nt, Human
cagccaggcuccgucgccccuc

SEQ ID NO: 470140 - RNA, 18 nt, Human
cagcucggcuucuccagc

SEQ ID NO: 470141 - RNA, 21 nt, Human
caggcuccgucgccccucgug

SEQ ID NO: 470142 - RNA, 22 nt, Human
cagggcagcugaccacggggcu

SEQ ID NO: 470143 - RNA, 22 nt, Human
cagugugagugaagcucgggca

SEQ ID NO: 470144 - RNA, 21 nt, Human
caucgagaauaaucagaguug

SEQ ID NO: 470145 - RNA, 20 nt, Human
ccaaagaugggcccacagcc

SEQ ID NO: 470146 - RNA, 19 nt, Human
ccacagcaagcucgcccag

SEQ ID NO: 470147 - RNA, 19 nt, Human
ccacugagccggcagcaug

SEQ ID NO: 470148 - RNA, 20 nt, Human
ccaggaugggacaaggaaaa

SEQ ID NO: 470149 - RNA, 23 nt, Human
ccaggugcuuauccagggucuca

SEQ ID NO: 470150 - RNA, 21 nt, Human
cccaaaccucaaccucaccac

SEQ ID NO: 470151 - RNA, 18 nt, Human
ccccagaggggccucuuc

SEQ ID NO: 470152 - RNA, 20 nt, Human
ccccuguaggaagccuccca

SEQ ID NO: 470153 - RNA, 18 nt, Human
cccucucaaaaaaaaaaa

SEQ ID NO: 470154 - RNA, 20 nt, Human
ccggcagcaugucgggcugg

SEQ ID NO: 470155 - RNA, 20 nt, Human
ccucccaggcuggagacaga

SEQ ID NO: 470156 - RNA, 24 nt, Human
ccucucaaaaaaaaaaaaaaaaaa

SEQ ID NO: 470157 - RNA, 18 nt, Human
cucaaaaaaaaaaaaaaa

SEQ ID NO: 470158 - RNA, 23 nt, Human
cucaaaaaaaaaaaaaaaaaaaa

SEQ ID NO: 470159 - RNA, 18 nt, Human
cucagguugccugcugug

SEQ ID NO: 470160 - RNA, 20 nt, Human
cuccagcggugagccagcca

SEQ ID NO: 470161 - RNA, 30 nt, Human
cuccagcggugagccagccagaugcggucc

SEQ ID NO: 470162 - RNA, 19 nt, Human
cucccaugcuggauuaaac

SEQ ID NO: 470163 - RNA, 22 nt, Human
cugcacccgagguccauccacc

SEQ ID NO: 470164 - RNA, 22 nt, Human
cugcagcuggcagggggcuggg

SEQ ID NO: 470165 - RNA, 20 nt, Human
gagcauggcuaggauguggc

SEQ ID NO: 470166 - RNA, 23 nt, Human
gagcauggcuaggauguggcggc

SEQ ID NO: 470167 - RNA, 21 nt, Human
gcacugagcauggcuaggaug

SEQ ID NO: 470168 - RNA, 18 nt, Human
gcagggggcuggggcugc

SEQ ID NO: 470169 - RNA, 24 nt, Human
gccccaaaccucaaccucaccacc

SEQ ID NO: 470170 - RNA, 20 nt, Human
gcuccgucgccccucgugcc

SEQ ID NO: 470171 - RNA, 19 nt, Human
gcugagcacauugugcucu

SEQ ID NO: 470172 - RNA, 21 nt, Human
ggcaagaugacccuccagcug

SEQ ID NO: 470173 - RNA, 18 nt, Human
ggggcugcaccuuauggg

SEQ ID NO: 470174 - RNA, 27 nt, Human
gggggcuggggcugcaccuuaugggua

SEQ ID NO: 470175 - RNA, 21 nt, Human
ggugcagugcugcaacagcug

SEQ ID NO: 470176 - RNA, 19 nt, Human
guaacggaacagagaagcc

SEQ ID NO: 470177 - RNA, 22 nt, Human
gucugagggagcaugauuguuc

SEQ ID NO: 470178 - RNA, 20 nt, Human
guucagggagccuggcugag

SEQ ID NO: 470179 - RNA, 18 nt, Human
uaaaacaaaaccaagaau

SEQ ID NO: 470180 - RNA, 20 nt, Human
uaaaacaaaaccaagaauau

SEQ ID NO: 470181 - RNA, 19 nt, Human
uaaucaggagcccauucag

SEQ ID NO: 470182 - RNA, 21 nt, Human
uaccaagccccaaaccucaac

SEQ ID NO: 470183 - RNA, 18 nt, Human
uagacaaucauucccaga

SEQ ID NO: 470184 - RNA, 21 nt, Human
uaggaagccucccagcccagc

SEQ ID NO: 470185 - RNA, 21 nt, Human
uaggauguggcggcagggcag

SEQ ID NO: 470186 - RNA, 19 nt, Human
uauacaacagagacuguau

SEQ ID NO: 470187 - RNA, 19 nt, Human
uaucuuagaccagggguug

SEQ ID NO: 470188 - RNA, 18 nt, Human
uauguggccaccugagua

SEQ ID NO: 470189 - RNA, 23 nt, Human
ucaaaaaaaaaaaaaaaaaaaaa

SEQ ID NO: 470190 - RNA, 20 nt, Human
ucaaccucaccaccugaugu

SEQ ID NO: 470191 - RNA, 22 nt, Human
ucauucccagaucuuuuuucca

SEQ ID NO: 470192 - RNA, 19 nt, Human
ucccaggcuggagacagac

SEQ ID NO: 470193 - RNA, 21 nt, Human
ucccaugcuggauuaaacuuc

SEQ ID NO: 470194 - RNA, 23 nt, Human
ucccucucaaaaaaaaaaaaaaa

SEQ ID NO: 470195 - RNA, 18 nt, Human
uccuuggugcagugcugc

SEQ ID NO: 470196 - RNA, 18 nt, Human
ucggugaggugagucacu

SEQ ID NO: 470197 - RNA, 19 nt, Human
ucucacuccacuugcugcc

SEQ ID NO: 470198 - RNA, 19 nt, Human
ucucacuccacuugcugcc

SEQ ID NO: 470199 - RNA, 25 nt, Human
ucucaugacuggggcaacugcuacc

SEQ ID NO: 470200 - RNA, 18 nt, Human
ucugcugcauguaacgga

SEQ ID NO: 470201 - RNA, 22 nt, Human
ugagcacauugugcucugcagg

SEQ ID NO: 470202 - RNA, 22 nt, Human
ugagggagugcuggauguggga

SEQ ID NO: 470203 - RNA, 18 nt, Human
ugcagauggcauugaggg

SEQ ID NO: 470204 - RNA, 23 nt, Human
ugcagcuggcagggggcuggggc

SEQ ID NO: 470205 - RNA, 21 nt, Human
ugcagugcugcaacagcugac

SEQ ID NO: 470206 - RNA, 22 nt, Human
ugccaaggucaaaauacuuucu

SEQ ID NO: 470207 - RNA, 21 nt, Human
uggaaggaaaugaggauccac

SEQ ID NO: 470208 - RNA, 24 nt, Human
uggaaggaaaugaggauccaccag

SEQ ID NO: 470209 - RNA, 22 nt, Human
uggagacagacucccucucaaa

SEQ ID NO: 470210 - RNA, 23 nt, Human
uggagggaugcaguugcucagga

SEQ ID NO: 470211 - RNA, 18 nt, Human
uggcauugagggagugcu

SEQ ID NO: 470212 - RNA, 24 nt, Human
uggccuggaggaacuuacaaaugu

SEQ ID NO: 470213 - RNA, 19 nt, Human
uggcggcagggcaggugga

SEQ ID NO: 470214 - RNA, 18 nt, Human
uggcugaggaugugggug

SEQ ID NO: 470215 - RNA, 23 nt, Human
ugggacaaggaaaaaaguucagg

SEQ ID NO: 470216 - RNA, 25 nt, Human
ugggagagaugggagcuguccaaau

SEQ ID NO: 470217 - RNA, 22 nt, Human
uggggcaacugcuaccaagccc

SEQ ID NO: 470218 - RNA, 18 nt, Human
ugguuaaaguagcagcug

SEQ ID NO: 470219 - RNA, 20 nt, Human
uguauguggccaccugagua

SEQ ID NO: 470220 - RNA, 27 nt, Human
uuauuuuauuuuuuuuagauggagucu

SEQ ID NO: 470221 - RNA, 21 nt, Human
uucaguuuuauugaccccagg

SEQ ID NO: 470222 - RNA, 23 nt, Human
uugaggcuggaggcuagacaauc

SEQ ID NO: 470223 - RNA, 24 nt, Human
uugaguccuuaaucaggagcccau

SEQ ID NO: 470224 - RNA, 24 nt, Human
uuuucugagccagagccaaugagg

SEQ ID NO: 470225 - RNA, 21 nt, Human
uuuuuuuuagauggagucuca

SEQ ID NO: 470226 - RNA, 18 nt, Human
agccacaggucuggggcc

SEQ ID NO: 470227 - RNA, 18 nt, Human
agggaccaaagaaggggc

SEQ ID NO: 470228 - RNA, 21 nt, Human
caggaugcagcugugcucugg

SEQ ID NO: 470229 - RNA, 23 nt, Human
caggaugcagcugugcucuggug

SEQ ID NO: 470230 - RNA, 21 nt, Human
ccacaacaggaucaucugauc

SEQ ID NO: 470231 - RNA, 23 nt, Human
cccccugacucccuuccccgagc

SEQ ID NO: 470232 - RNA, 19 nt, Human
ccccgagccucugcccggg

SEQ ID NO: 470233 - RNA, 22 nt, Human
ccgccaccgccccccagguccg

SEQ ID NO: 470234 - RNA, 18 nt, Human
ccgccuacaacuuagccg

SEQ ID NO: 470235 - RNA, 19 nt, Human
cgccuacaacuuagccguc

SEQ ID NO: 470236 - RNA, 21 nt, Human
cuggcagcaauguggccaacu

SEQ ID NO: 470237 - RNA, 23 nt, Human
cuggcagcaauguggccaacuuc

SEQ ID NO: 470238 - RNA, 21 nt, Human
cugugcucuggugcacugugg

SEQ ID NO: 470239 - RNA, 22 nt, Human
cuuggcuggcagcaauguggcc

SEQ ID NO: 470240 - RNA, 23 nt, Human
gcccgggcuacgaucugcgaggc

SEQ ID NO: 470241 - RNA, 20 nt, Human
gccuacaacuuagccguccc

SEQ ID NO: 470242 - RNA, 21 nt, Human
ggcaaugauggugaccgcaag

SEQ ID NO: 470243 - RNA, 19 nt, Human
ggccauagggcaggccagc

SEQ ID NO: 470244 - RNA, 19 nt, Human
uacaacuuagccguccaca

SEQ ID NO: 470245 - RNA, 22 nt, Human
uccacaacaggaucaucugauc

SEQ ID NO: 470246 - RNA, 21 nt, Human
ugaccgccaccgccccccagg

SEQ ID NO: 470247 - RNA, 21 nt, Human
ugacucccuuccccgagccuc

SEQ ID NO: 470248 - RNA, 22 nt, Human
ugcgaggcccgcggaccuugac

SEQ ID NO: 470249 - RNA, 24 nt, Human
aaacaggcccuuuuaccagaccga

SEQ ID NO: 470250 - RNA, 19 nt, Human
aaaggucacacuaugaggg

SEQ ID NO: 470251 - RNA, 22 nt, Human
aacaacugaggcucccaaggaa

SEQ ID NO: 470252 - RNA, 18 nt, Human
aacagccaaagaucaucc

SEQ ID NO: 470253 - RNA, 19 nt, Human
aaggguccgccccaacugg

SEQ ID NO: 470254 - RNA, 20 nt, Human
acaggcccuuuuaccagacc

SEQ ID NO: 470255 - RNA, 21 nt, Human
acaguggaguucccuuccucu

SEQ ID NO: 470256 - RNA, 18 nt, Human
accgauuuugucucaccc

SEQ ID NO: 470257 - RNA, 20 nt, Human
agcagcaacagccaaagaag

SEQ ID NO: 470258 - RNA, 21 nt, Human
aggggucaaaggucacacuau

SEQ ID NO: 470259 - RNA, 19 nt, Human
caacaacugaggcucccaa

SEQ ID NO: 470260 - RNA, 19 nt, Human
cagcaacagccaaagauca

SEQ ID NO: 470261 - RNA, 21 nt, Human
caguggaguucccuuccucuc

SEQ ID NO: 470262 - RNA, 19 nt, Human
cccaaggaaugccaaaagu

SEQ ID NO: 470263 - RNA, 26 nt, Human
ccgggcccaagaucacaccagggguc

SEQ ID NO: 470264 - RNA, 18 nt, Human
cgcccccacaacccacac

SEQ ID NO: 470265 - RNA, 24 nt, Human
cucccaaggaaugccaaaaguagg

SEQ ID NO: 470266 - RNA, 18 nt, Human
cugaucucaggggcuggg

SEQ ID NO: 470267 - RNA, 18 nt, Human
gagaaguguuuguggucc

SEQ ID NO: 470268 - RNA, 22 nt, Human
gagcaaauaagaucugaucuca

SEQ ID NO: 470269 - RNA, 21 nt, Human
gaggaaggggguguauuugcu

SEQ ID NO: 470270 - RNA, 19 nt, Human
gcuaaaaugcuaaacccua

SEQ ID NO: 470271 - RNA, 23 nt, Human
gcuaaacccuaguauguccugcc

SEQ ID NO: 470272 - RNA, 21 nt, Human
ggcuggucccagcccgggccc

SEQ ID NO: 470273 - RNA, 21 nt, Human
gggcugggggaggaagagggu

SEQ ID NO: 470274 - RNA, 22 nt, Human
ggggcugggggaggaagagggu

SEQ ID NO: 470275 - RNA, 23 nt, Human
guggccuauucuggaacucaggg

SEQ ID NO: 470276 - RNA, 21 nt, Human
uagccccaccuaggaagacau

SEQ ID NO: 470277 - RNA, 20 nt, Human
ucaaaggucacacuaugagg

SEQ ID NO: 470278 - RNA, 21 nt, Human
ucacacaguggaguucccuuc

SEQ ID NO: 470279 - RNA, 24 nt, Human
ucccugaaaacaggcccuuuuacc

SEQ ID NO: 470280 - RNA, 20 nt, Human
ucccuuccucucuacuguaa

SEQ ID NO: 470281 - RNA, 22 nt, Human
ugaacaacaacugaggcuccca

SEQ ID NO: 470282 - RNA, 25 nt, Human
ugaccuugcagcacggagauaacuu

SEQ ID NO: 470283 - RNA, 18 nt, Human
ugaggcagggauucaucu

SEQ ID NO: 470284 - RNA, 25 nt, Human
ugaggcucccaaggaaugccaaaag

SEQ ID NO: 470285 - RNA, 23 nt, Human
ugaggguuuauaggcaggcgugg

SEQ ID NO: 470286 - RNA, 24 nt, Human
uguccugcccacuuuaaacucuca

SEQ ID NO: 470287 - RNA, 22 nt, Human
uugaaaggacugucacacagug

SEQ ID NO: 470288 - RNA, 24 nt, Human
uugcagcacggagauaacuuuggc

SEQ ID NO: 470289 - RNA, 18 nt, Human
aauuguuucuuaucccaa

SEQ ID NO: 470290 - RNA, 22 nt, Human
acaaauauagaaccacaugcua

SEQ ID NO: 470291 - RNA, 22 nt, Human
acucugucaccggccggaaagu

SEQ ID NO: 470292 - RNA, 24 nt, Human
aggaagagggcuuuggaggagggc

SEQ ID NO: 470293 - RNA, 19 nt, Human
agggcuuuggaggagggcu

SEQ ID NO: 470294 - RNA, 21 nt, Human
caccggccggaaaguggcccu

SEQ ID NO: 470295 - RNA, 19 nt, Human
cacuacaaacucgcucagg

SEQ ID NO: 470296 - RNA, 21 nt, Human
ccgcugagauccaucuagggg

SEQ ID NO: 470297 - RNA, 21 nt, Human
cgccuccggcccccacaacuc

SEQ ID NO: 470298 - RNA, 19 nt, Human
cgcuggacucugucaccgg

SEQ ID NO: 470299 - RNA, 18 nt, Human
cggaaaguggcccucgug

SEQ ID NO: 470300 - RNA, 19 nt, Human
gaggaagagggcuuuggag

SEQ ID NO: 470301 - RNA, 24 nt, Human
gcccccacaacuccgcuggacucu

SEQ ID NO: 470302 - RNA, 20 nt, Human
ggcuuuggaggagggcugcc

SEQ ID NO: 470303 - RNA, 19 nt, Human
gggggugcugugcagugag

SEQ ID NO: 470304 - RNA, 18 nt, Human
gucccagcgguggccuca

SEQ ID NO: 470305 - RNA, 20 nt, Human
uaaugccgcugagauccauc

SEQ ID NO: 470306 - RNA, 24 nt, Human
uaggagcagucccagcgguggccu

SEQ ID NO: 470307 - RNA, 19 nt, Human
ucacuacaaacucgcucag

SEQ ID NO: 470308 - RNA, 21 nt, Human
ucacuacaaacucgcucaggc

SEQ ID NO: 470309 - RNA, 21 nt, Human
ucagccacgugaggaagaggg

SEQ ID NO: 470310 - RNA, 19 nt, Human
ucaggcacagcuuaaugcc

SEQ ID NO: 470311 - RNA, 22 nt, Human
ucuuaucccaauaacuuuacaa

SEQ ID NO: 470312 - RNA, 25 nt, Human
uggaggagggcugccaaguguggcc

SEQ ID NO: 470313 - RNA, 18 nt, Human
ugucaccggccggaaagu

SEQ ID NO: 470314 - RNA, 18 nt, Human
uuuuuuuuuuuuuuucug

SEQ ID NO: 470315 - RNA, 25 nt, Human
uuuuuuuuuuuuuuuuucuguguuu

SEQ ID NO: 470316 - RNA, 21 nt, Human
aaaaagccaaauauaucaucc

SEQ ID NO: 470317 - RNA, 20 nt, Human
cacaauacaagaagacaaga

SEQ ID NO: 470318 - RNA, 25 nt, Human
cacaauacaagaagacaagaaaaua

SEQ ID NO: 470319 - RNA, 22 nt, Human
cagcuuccucacuuugcuccag

SEQ ID NO: 470320 - RNA, 18 nt, Human
caucacuuucagaugaug

SEQ ID NO: 470321 - RNA, 22 nt, Human
uacaagacaaaacugacagcuc

SEQ ID NO: 470322 - RNA, 20 nt, Human
uaucaugcuacucauaauua

SEQ ID NO: 470323 - RNA, 22 nt, Human
ugaaaaaaagccaaauauauca

SEQ ID NO: 470324 - RNA, 25 nt, Human
ugccuuuauuuucauuauuauuuug

SEQ ID NO: 470325 - RNA, 24 nt, Human
uugaaaaaaagccaaauauaucau

SEQ ID NO: 470326 - RNA, 23 nt, Human
aaaaagaaguuugaacuuucaag

SEQ ID NO: 470327 - RNA, 24 nt, Human
aaaaugcuaggauuacaggcguga

SEQ ID NO: 470328 - RNA, 20 nt, Human
aaacaauccucccaccucaa

SEQ ID NO: 470329 - RNA, 24 nt, Human
aaaucaccuucagagccaugcuag

SEQ ID NO: 470330 - RNA, 26 nt, Human
aaaugcuaggauuacaggcgugagcc

SEQ ID NO: 470331 - RNA, 18 nt, Human
aagcaauccacccgccuc

SEQ ID NO: 470332 - RNA, 18 nt, Human
aaggccugcagcuguuuc

SEQ ID NO: 470333 - RNA, 18 nt, Human
acagucaguccugccagu

SEQ ID NO: 470334 - RNA, 21 nt, Human
acccgccucagucacccaaaa

SEQ ID NO: 470335 - RNA, 24 nt, Human
acgggucgcucuccacagccccag

SEQ ID NO: 470336 - RNA, 26 nt, Human
acgggucgcucuccacagccccaggu

SEQ ID NO: 470337 - RNA, 24 nt, Human
acucugucgcucaggcuggagugc

SEQ ID NO: 470338 - RNA, 21 nt, Human
acugacaagauccagauccag

SEQ ID NO: 470339 - RNA, 18 nt, Human
acugcagccucaaccucc

SEQ ID NO: 470340 - RNA, 22 nt, Human
agaacucacugcagccucaacc

SEQ ID NO: 470341 - RNA, 20 nt, Human
agccucaaccuccugggcuc

SEQ ID NO: 470342 - RNA, 18 nt, Human
aggcuggagugcaguggc

SEQ ID NO: 470343 - RNA, 18 nt, Human
aggugguaaacucugaaa

SEQ ID NO: 470344 - RNA, 19 nt, Human
agugcaguggcgcaauuag

SEQ ID NO: 470345 - RNA, 21 nt, Human
auaaaagaaugggccacugga

SEQ ID NO: 470346 - RNA, 24 nt, Human
caaaaugcuaggauuacaggcgug

SEQ ID NO: 470347 - RNA, 27 nt, Human
caaacaauccucccaccucagccuucu

SEQ ID NO: 470348 - RNA, 25 nt, Human
caaccuccugggcucaaacaauccu

SEQ ID NO: 470349 - RNA, 23 nt, Human
caacuucugggcucaagcaaucc

SEQ ID NO: 470350 - RNA, 22 nt, Human
cacauuccugggaaaauugucu

SEQ ID NO: 470351 - RNA, 23 nt, Human
cacccgccucagucacccaaaau

SEQ ID NO: 470352 - RNA, 23 nt, Human
caccucagccuucugaguagcua

SEQ ID NO: 470353 - RNA, 24 nt, Human
caccucagccuucugaguagcuag

SEQ ID NO: 470354 - RNA, 18 nt, Human
cacgcagucaccacgugc

SEQ ID NO: 470355 - RNA, 24 nt, Human
cacucugucgcucaggcuggagug

SEQ ID NO: 470356 - RNA, 19 nt, Human
cacugcagccucaaccucc

SEQ ID NO: 470357 - RNA, 18 nt, Human
cagccccaggucacuccu

SEQ ID NO: 470358 - RNA, 23 nt, Human
cagccucaaccuccugggcucaa

SEQ ID NO: 470359 - RNA, 25 nt, Human
cagccucaaccuccugggcucaaac

SEQ ID NO: 470360 - RNA, 21 nt, Human
cagggugaagcggucuccacc

SEQ ID NO: 470361 - RNA, 18 nt, Human
cauugcgcccagccucaa

SEQ ID NO: 470362 - RNA, 24 nt, Human
ccaaaaugcuaggauuacaggcgu

SEQ ID NO: 470363 - RNA, 21 nt, Human
ccacgugcuggggcacucuuc

SEQ ID NO: 470364 - RNA, 21 nt, Human
ccauugcgcccagccucaaaa

SEQ ID NO: 470365 - RNA, 22 nt, Human
ccauugcgcccagccucaaaac

SEQ ID NO: 470366 - RNA, 24 nt, Human
cccaccucagccuucugaguagcu

SEQ ID NO: 470367 - RNA, 18 nt, Human
ccucaaaacucuucuacc

SEQ ID NO: 470368 - RNA, 19 nt, Human
ccucaaccuccugggcuca

SEQ ID NO: 470369 - RNA, 24 nt, Human
ccucccaccucagccuucugagua

SEQ ID NO: 470370 - RNA, 19 nt, Human
ccugaaaaacaccuucaca

SEQ ID NO: 470371 - RNA, 21 nt, Human
ccuuauuucucaggcuggucu

SEQ ID NO: 470372 - RNA, 19 nt, Human
cgagcuguacugacaccuu

SEQ ID NO: 470373 - RNA, 24 nt, Human
cgcucaggcuggagugcaguggcg

SEQ ID NO: 470374 - RNA, 22 nt, Human
cggucaccgccuccgaaacucu

SEQ ID NO: 470375 - RNA, 21 nt, Human
cucaaacaauccucccaccuc

SEQ ID NO: 470376 - RNA, 24 nt, Human
cucaaacaauccucccaccucagc

SEQ ID NO: 470377 - RNA, 21 nt, Human
cucaagcaauccacccgccuc

SEQ ID NO: 470378 - RNA, 24 nt, Human
cucacucugucgcucaggcuggag

SEQ ID NO: 470379 - RNA, 24 nt, Human
cucacugcagccucaaccuccugg

SEQ ID NO: 470380 - RNA, 22 nt, Human
cugaagaucauuucaaaaaaga

SEQ ID NO: 470381 - RNA, 22 nt, Human
cugcagccucaaccuccugggc

SEQ ID NO: 470382 - RNA, 21 nt, Human
cugggcucaagcaauccaccc

SEQ ID NO: 470383 - RNA, 18 nt, Human
cuuuccgagcuguacuga

SEQ ID NO: 470384 - RNA, 23 nt, Human
cuuuccgagcuguacugacaccu

SEQ ID NO: 470385 - RNA, 21 nt, Human
gacaggguuucaccuuauuuc

SEQ ID NO: 470386 - RNA, 24 nt, Human
gaguagcuagcacuacaggcacac

SEQ ID NO: 470387 - RNA, 18 nt, Human
gauuacaggcgugagcca

SEQ ID NO: 470388 - RNA, 22 nt, Human
gauuacaggcgugagccauugc

SEQ ID NO: 470389 - RNA, 22 nt, Human
gauuacaggcgugagccauugc

SEQ ID NO: 470390 - RNA, 24 nt, Human
gcacccgcagccgauacucccuga

SEQ ID NO: 470391 - RNA, 20 nt, Human
gcacuacaggcacacgccac

SEQ ID NO: 470392 - RNA, 21 nt, Human
gcacucuucccauuccucucc

SEQ ID NO: 470393 - RNA, 18 nt, Human
gccuugcgcacccgcagc

SEQ ID NO: 470394 - RNA, 20 nt, Human
gcucaggcuggagugcagug

SEQ ID NO: 470395 - RNA, 18 nt, Human
gcucuccacagccccagg

SEQ ID NO: 470396 - RNA, 19 nt, Human
gcuggagugcaguggcgca

SEQ ID NO: 470397 - RNA, 24 nt, Human
ggauuacaggcgugagccauugcg

SEQ ID NO: 470398 - RNA, 24 nt, Human
gggucgcucuccacagccccaggu

SEQ ID NO: 470399 - RNA, 19 nt, Human
gguaaacucugaaacacaa

SEQ ID NO: 470400 - RNA, 22 nt, Human
guacugacaccuucuggaagca

SEQ ID NO: 470401 - RNA, 20 nt, Human
uaaaugauuuuuggauuguu

SEQ ID NO: 470402 - RNA, 22 nt, Human
uaacuuuuuguauuuuuuguag

SEQ ID NO: 470403 - RNA, 23 nt, Human
uaacuuuuuguauuuuuuguaga

SEQ ID NO: 470404 - RNA, 24 nt, Human
uacaggcacacgccaccacaccca

SEQ ID NO: 470405 - RNA, 19 nt, Human
uacaggcgugagccauugc

SEQ ID NO: 470406 - RNA, 24 nt, Human
uagcacuacaggcacacgccacca

SEQ ID NO: 470407 - RNA, 18 nt, Human
uagcuagcacuacaggca

SEQ ID NO: 470408 - RNA, 19 nt, Human
uaggauuacaggcgugagc

SEQ ID NO: 470409 - RNA, 21 nt, Human
uaggauuacaggcgugagcca

SEQ ID NO: 470410 - RNA, 21 nt, Human
uaggauuacaggcgugagcca

SEQ ID NO: 470411 - RNA, 22 nt, Human
uaggauuacaggcgugagccau

SEQ ID NO: 470412 - RNA, 24 nt, Human
uaggauuacaggcgugagccauug

SEQ ID NO: 470413 - RNA, 26 nt, Human
uaggauuacaggcgugagccauugcg

SEQ ID NO: 470414 - RNA, 24 nt, Human
uaggugguaaacucugaaacacaa

SEQ ID NO: 470415 - RNA, 19 nt, Human
ucaaaaccugaaaaacacc

SEQ ID NO: 470416 - RNA, 23 nt, Human
ucacccaaaaugcuaggauuaca

SEQ ID NO: 470417 - RNA, 18 nt, Human
ucacggucaccgccuccg

SEQ ID NO: 470418 - RNA, 24 nt, Human
ucacucugucgcucaggcuggagu

SEQ ID NO: 470419 - RNA, 25 nt, Human
ucacugaagucauccuaggugguaa

SEQ ID NO: 470420 - RNA, 23 nt, Human
ucacugcagccucaaccuccugg

SEQ ID NO: 470421 - RNA, 24 nt, Human
ucacugcagccucaaccuccuggg

SEQ ID NO: 470422 - RNA, 20 nt, Human
ucagccuucugaguagcuag

SEQ ID NO: 470423 - RNA, 21 nt, Human
ucauaaagucacugacaagau

SEQ ID NO: 470424 - RNA, 18 nt, Human
ucccugaucagggugaag

SEQ ID NO: 470425 - RNA, 22 nt, Human
uccugggcucaaacaauccucc

SEQ ID NO: 470426 - RNA, 24 nt, Human
uccugggcucaaacaauccuccca

SEQ ID NO: 470427 - RNA, 24 nt, Human
ucgcucaggcuggagugcaguggc

SEQ ID NO: 470428 - RNA, 21 nt, Human
ucuaauuguugcaugcuucuc

SEQ ID NO: 470429 - RNA, 23 nt, Human
ucucacucugucgcucaggcugg

SEQ ID NO: 470430 - RNA, 24 nt, Human
ucucacucugucgcucaggcugga

SEQ ID NO: 470431 - RNA, 18 nt, Human
ucuccucuugggcaccuu

SEQ ID NO: 470432 - RNA, 18 nt, Human
ucugaaacacaaggccac

SEQ ID NO: 470433 - RNA, 24 nt, Human
ucugaagaucauuucaaaaaagaa

SEQ ID NO: 470434 - RNA, 23 nt, Human
ucugaguagcuagcacuacaggc

SEQ ID NO: 470435 - RNA, 24 nt, Human
ucugaguagcuagcacuacaggca

SEQ ID NO: 470436 - RNA, 24 nt, Human
ucugucgcucaggcuggagugcag

SEQ ID NO: 470437 - RNA, 23 nt, Human
ucuucaacuucugggcucaagca

SEQ ID NO: 470438 - RNA, 24 nt, Human
ugcuaggauuacaggcgugagcca

SEQ ID NO: 470439 - RNA, 18 nt, Human
uggagugcaguggcgcaa

SEQ ID NO: 470440 - RNA, 19 nt, Human
uggagugcaguggcgcaau

SEQ ID NO: 470441 - RNA, 21 nt, Human
uggagugcaguggcgcaauua

SEQ ID NO: 470442 - RNA, 28 nt, Human
uggagugcaguggcgcaauucuagcacg

SEQ ID NO: 470443 - RNA, 23 nt, Human
uggcgcaauuagaacucacugca

SEQ ID NO: 470444 - RNA, 20 nt, Human
uuaguaucauuccuuuacaa

SEQ ID NO: 470445 - RNA, 23 nt, Human
uucacaggauaaagauaaaagaa

SEQ ID NO: 470446 - RNA, 20 nt, Human
uucccauuccucuccucuug

SEQ ID NO: 470447 - RNA, 24 nt, Human
uucugaguagcuagcacuacaggc

SEQ ID NO: 470448 - RNA, 21 nt, Human
uucuggaagcacuggguacuu

SEQ ID NO: 470449 - RNA, 23 nt, Human
uugcaugcuucucuuuccgagcu

SEQ ID NO: 470450 - RNA, 20 nt, Human
uuggauguacaaauuccauc

SEQ ID NO: 470451 - RNA, 24 nt, Human
uuguagacaggguuucaccuuauu

SEQ ID NO: 470452 - RNA, 21 nt, Human
uuguugcaugcuucucuuucc

SEQ ID NO: 470453 - RNA, 24 nt, Human
uuuccgagcuguacugacaccuuc

SEQ ID NO: 470454 - RNA, 19 nt, Human
uuuuuguauuuuuuguaga

SEQ ID NO: 470455 - RNA, 21 nt, Human
uuuuuguauuuuuuguagaca

SEQ ID NO: 470456 - RNA, 22 nt, Human
uuuuuuguagacaggguuucac

SEQ ID NO: 470457 - RNA, 20 nt, Human
aagaggccagggcagagaga

SEQ ID NO: 470458 - RNA, 18 nt, Human
aggccagggcagagagaa

SEQ ID NO: 470459 - RNA, 20 nt, Human
aucaagccaguuccauucgu

SEQ ID NO: 470460 - RNA, 20 nt, Human
auccaaagagggugaccgug

SEQ ID NO: 470461 - RNA, 19 nt, Human
cagcuaggcugagcuugug

SEQ ID NO: 470462 - RNA, 20 nt, Human
cagguaccccauagucuucc

SEQ ID NO: 470463 - RNA, 19 nt, Human
cagugauagaaacacuuuc

SEQ ID NO: 470464 - RNA, 21 nt, Human
ccaaccaccagagcacagugu

SEQ ID NO: 470465 - RNA, 23 nt, Human
ccagugauagaaacacuuuccuu

SEQ ID NO: 470466 - RNA, 23 nt, Human
cccuuggucugauuauccuccuu

SEQ ID NO: 470467 - RNA, 26 nt, Human
ccuccugcccuuuacccacccagaaa

SEQ ID NO: 470468 - RNA, 25 nt, Human
cgcaaugccucaaaacggucucuga

SEQ ID NO: 470469 - RNA, 21 nt, Human
cucugacugggcauggggugg

SEQ ID NO: 470470 - RNA, 21 nt, Human
cugauuauccuccuuccagug

SEQ ID NO: 470471 - RNA, 18 nt, Human
cugcuccugcacuagacg

SEQ ID NO: 470472 - RNA, 19 nt, Human
cugcuccugcacuagacgu

SEQ ID NO: 470473 - RNA, 25 nt, Human
cuuggagcccuuggucugauuaucc

SEQ ID NO: 470474 - RNA, 20 nt, Human
gagcacagugucagagguca

SEQ ID NO: 470475 - RNA, 23 nt, Human
gauggaugacuucgauuucugcu

SEQ ID NO: 470476 - RNA, 21 nt, Human
gcaugggguggaagaggccag

SEQ ID NO: 470477 - RNA, 19 nt, Human
gcccaguguugaccacuga

SEQ ID NO: 470478 - RNA, 18 nt, Human
ggagcacgcaucaagcca

SEQ ID NO: 470479 - RNA, 18 nt, Human
ggcugugugguggcagga

SEQ ID NO: 470480 - RNA, 22 nt, Human
gugaauagugagcuuguccaca

SEQ ID NO: 470481 - RNA, 21 nt, Human
uacaauuuccuccugcccuuu

SEQ ID NO: 470482 - RNA, 20 nt, Human
uacccacccagaaauaggau

SEQ ID NO: 470483 - RNA, 19 nt, Human
uaccccauagucuuccugg

SEQ ID NO: 470484 - RNA, 21 nt, Human
uaccccauagucuuccuggag

SEQ ID NO: 470485 - RNA, 21 nt, Human
uagcugauggaugacuucgau

SEQ ID NO: 470486 - RNA, 24 nt, Human
uccugcccuuuacccacccagaaa

SEQ ID NO: 470487 - RNA, 25 nt, Human
uccuuccagugauagaaacacuuuc

SEQ ID NO: 470488 - RNA, 18 nt, Human
uggccgggcccaguguug

SEQ ID NO: 470489 - RNA, 20 nt, Human
ugguggcaggaggagcaguu

SEQ ID NO: 470490 - RNA, 21 nt, Human
ugguggcaggaggagcaguug

SEQ ID NO: 470491 - RNA, 22 nt, Human
ugucagaggucauagacucucu

SEQ ID NO: 470492 - RNA, 21 nt, Human
ugugguggcaggaggagcagu

SEQ ID NO: 470493 - RNA, 27 nt, Human
ugugguggcaggaggagcaguugaggg

SEQ ID NO: 470494 - RNA, 18 nt, Human
uuccagugauagaaacac

SEQ ID NO: 470495 - RNA, 18 nt, Human
uugugugaauagugagcu

SEQ ID NO: 470496 - RNA, 24 nt, Human
aaaguguugggauuacaggcguga

SEQ ID NO: 470497 - RNA, 19 nt, Human
aaccuccgccucccggguc

SEQ ID NO: 470498 - RNA, 19 nt, Human
aagagcugagccaaggaca

SEQ ID NO: 470499 - RNA, 19 nt, Human
aagcugguuccuuggagca

SEQ ID NO: 470500 - RNA, 21 nt, Human
aaguguugggauuacaggcgu

SEQ ID NO: 470501 - RNA, 26 nt, Human
aaguguugggauuacaggcgugagcc

SEQ ID NO: 470502 - RNA, 24 nt, Human
aauguaguggugccaucuuggcuc

SEQ ID NO: 470503 - RNA, 19 nt, Human
acacuggggacuguccugg

SEQ ID NO: 470504 - RNA, 18 nt, Human
acgggguuucaucauguu

SEQ ID NO: 470505 - RNA, 23 nt, Human
acgggguuucaucauguuggcca

SEQ ID NO: 470506 - RNA, 24 nt, Human
acgggguuucaucauguuggccag

SEQ ID NO: 470507 - RNA, 22 nt, Human
agacggggaggcuggcaggaaa

SEQ ID NO: 470508 - RNA, 19 nt, Human
agagcugagccaaggacag

SEQ ID NO: 470509 - RNA, 18 nt, Human
aggaaacguggagcucgg

SEQ ID NO: 470510 - RNA, 23 nt, Human
aggcgugagccacugugccuggc

SEQ ID NO: 470511 - RNA, 18 nt, Human
agguaauccgccugccuc

SEQ ID NO: 470512 - RNA, 22 nt, Human
agguaauccgccugccucggcc

SEQ ID NO: 470513 - RNA, 24 nt, Human
agguaauccgccugccucggccuc

SEQ ID NO: 470514 - RNA, 19 nt, Human
aguagcugagauuacaggc

SEQ ID NO: 470515 - RNA, 24 nt, Human
agugacaagagcugagccaaggaa

SEQ ID NO: 470516 - RNA, 20 nt, Human
agugauucuccugccucagc

SEQ ID NO: 470517 - RNA, 24 nt, Human
agugauucuccugccucagccucc

SEQ ID NO: 470518 - RNA, 25 nt, Human
aucauguuggccaggcuggucuuga

SEQ ID NO: 470519 - RNA, 18 nt, Human
auucuccugccucagccu

SEQ ID NO: 470520 - RNA, 24 nt, Human
auuuuuguauuuuuaguagagacg

SEQ ID NO: 470521 - RNA, 24 nt, Human
caaaguguugggauuacaggcgug

SEQ ID NO: 470522 - RNA, 19 nt, Human
caagagcugagccaaggac

SEQ ID NO: 470523 - RNA, 24 nt, Human
caccaugcccagcuaauuuuugua

SEQ ID NO: 470524 - RNA, 21 nt, Human
cacugcaaccuccgccucccg

SEQ ID NO: 470525 - RNA, 23 nt, Human
cacugcaaccuccgccucccggg

SEQ ID NO: 470526 - RNA, 21 nt, Human
cacugcuggccaaagcugccc

SEQ ID NO: 470527 - RNA, 18 nt, Human
cacuggggacuguccugg

SEQ ID NO: 470528 - RNA, 21 nt, Human
cacuggggacuguccugggcc

SEQ ID NO: 470529 - RNA, 20 nt, Human
cagccuccugaguagcugag

SEQ ID NO: 470530 - RNA, 18 nt, Human
cauguuggccaggcuggu

SEQ ID NO: 470531 - RNA, 20 nt, Human
cauguuggccaggcuggucu

SEQ ID NO: 470532 - RNA, 20 nt, Human
cauguuggccaggcuggucu

SEQ ID NO: 470533 - RNA, 24 nt, Human
cauguuggccaggcuggucuugaa

SEQ ID NO: 470534 - RNA, 22 nt, Human
ccaaaguguugggauuacaggc

SEQ ID NO: 470535 - RNA, 22 nt, Human
ccaaaguguugggauuacaggc

SEQ ID NO: 470536 - RNA, 24 nt, Human
ccaaaguguugggauuacaggcgu

SEQ ID NO: 470537 - RNA, 23 nt, Human
cccggguccgagugauucuccug

SEQ ID NO: 470538 - RNA, 23 nt, Human
ccgagugauucuccugccucagc

SEQ ID NO: 470539 - RNA, 22 nt, Human
ccgccagccagagggaaccugc

SEQ ID NO: 470540 - RNA, 24 nt, Human
ccgccucccggguccgagugauuc

SEQ ID NO: 470541 - RNA, 21 nt, Human
ccggugggagugguggccacu

SEQ ID NO: 470542 - RNA, 19 nt, Human
ccgugucccucgcugccuc

SEQ ID NO: 470543 - RNA, 24 nt, Human
ccucccggguccgagugauucucc

SEQ ID NO: 470544 - RNA, 18 nt, Human
ccugaccucagguaaucc

SEQ ID NO: 470545 - RNA, 21 nt, Human
ccugaccucagguaauccgcc

SEQ ID NO: 470546 - RNA, 23 nt, Human
ccugaccucagguaauccgccug

SEQ ID NO: 470547 - RNA, 19 nt, Human
ccugaguagcugagauuac

SEQ ID NO: 470548 - RNA, 23 nt, Human
ccugaguagcugagauuacaggc

SEQ ID NO: 470549 - RNA, 24 nt, Human
ccugaguagcugagauuacaggcu

SEQ ID NO: 470550 - RNA, 23 nt, Human
ccugccucagccuccugaguagc

SEQ ID NO: 470551 - RNA, 24 nt, Human
ccugccucggccucccaaaguguu

SEQ ID NO: 470552 - RNA, 20 nt, Human
cgagugauucuccugccuca

SEQ ID NO: 470553 - RNA, 25 nt, Human
cucacccacuucguggucucugagg

SEQ ID NO: 470554 - RNA, 24 nt, Human
cucacugcaaccuccgccucccgg

SEQ ID NO: 470555 - RNA, 19 nt, Human
cucccggguccgagugauu

SEQ ID NO: 470556 - RNA, 20 nt, Human
cuccgugucccucgcugccu

SEQ ID NO: 470557 - RNA, 26 nt, Human
cuccugaccucagguaauccgccugc

SEQ ID NO: 470558 - RNA, 23 nt, Human
cugcaaccuccgccucccggguc

SEQ ID NO: 470559 - RNA, 21 nt, Human
cugcccugcgucuccucccca

SEQ ID NO: 470560 - RNA, 23 nt, Human
cugccucagccuccugaguagcu

SEQ ID NO: 470561 - RNA, 22 nt, Human
gacaagagcugagccaaggaca

SEQ ID NO: 470562 - RNA, 24 nt, Human
gaccucagguaauccgccugccuc

SEQ ID NO: 470563 - RNA, 18 nt, Human
gagacgggguuucaucau

SEQ ID NO: 470564 - RNA, 24 nt, Human
gagacgggguuucaucauguuggc

SEQ ID NO: 470565 - RNA, 19 nt, Human
gagccaaggacagugggag

SEQ ID NO: 470566 - RNA, 26 nt, Human
gaguagcugagauuacaggcucuugc

SEQ ID NO: 470567 - RNA, 18 nt, Human
gauuacaggcgugagcca

SEQ ID NO: 470568 - RNA, 21 nt, Human
gauuacaggcgugagccacug

SEQ ID NO: 470569 - RNA, 24 nt, Human
gauuacaggcgugagccacugugc

SEQ ID NO: 470570 - RNA, 24 nt, Human
gauuacaggcucuugccaccaugc

SEQ ID NO: 470571 - RNA, 22 nt, Human
gcccagcuaauuuuuguauuuu

SEQ ID NO: 470572 - RNA, 23 nt, Human
gcuggucuugaacuccugaccuc

SEQ ID NO: 470573 - RNA, 18 nt, Human
ggcaggcuggggugaucu

SEQ ID NO: 470574 - RNA, 19 nt, Human
ggccuggcacuuagaacug

SEQ ID NO: 470575 - RNA, 24 nt, Human
ggcuggucuugaacuccugaccuc

SEQ ID NO: 470576 - RNA, 21 nt, Human
gggagaaacagacggggaggc

SEQ ID NO: 470577 - RNA, 23 nt, Human
gggguuucaucauguuggccagg

SEQ ID NO: 470578 - RNA, 22 nt, Human
ggguuucaucauguuggccagg

SEQ ID NO: 470579 - RNA, 19 nt, Human
ggucuugaacuccugaccu

SEQ ID NO: 470580 - RNA, 23 nt, Human
guagagacgggguuucaucaugu

SEQ ID NO: 470581 - RNA, 24 nt, Human
gugauucuccugccucagccuccu

SEQ ID NO: 470582 - RNA, 18 nt, Human
gugccaucuuggcucacu

SEQ ID NO: 470583 - RNA, 23 nt, Human
uaaaaaauaauacuaaaagcugg

SEQ ID NO: 470584 - RNA, 24 nt, Human
uaauuuuuguauuuuuaguagaga

SEQ ID NO: 470585 - RNA, 22 nt, Human
uacaggcgugagccacugugcc

SEQ ID NO: 470586 - RNA, 22 nt, Human
uacaggcgugagccacugugcc

SEQ ID NO: 470587 - RNA, 23 nt, Human
uacaggcgugagccacugugccu

SEQ ID NO: 470588 - RNA, 24 nt, Human
uaguagagacgggguuucaucaug

SEQ ID NO: 470589 - RNA, 23 nt, Human
ucacugcaaccuccgccucccgg

SEQ ID NO: 470590 - RNA, 24 nt, Human
ucacugcaaccuccgccucccggg

SEQ ID NO: 470591 - RNA, 25 nt, Human
ucacugcaaccuccgccucccgggu

SEQ ID NO: 470592 - RNA, 27 nt, Human
ucacugcaaccuccgccucccgggucc

SEQ ID NO: 470593 - RNA, 21 nt, Human
ucagacccggcuggugugugc

SEQ ID NO: 470594 - RNA, 24 nt, Human
ucccaaaguguugggauuacaggc

SEQ ID NO: 470595 - RNA, 21 nt, Human
ucccggguccgagugauucuc

SEQ ID NO: 470596 - RNA, 24 nt, Human
ucccggguccgagugauucuccug

SEQ ID NO: 470597 - RNA, 18 nt, Human
uccgagugauucuccugc

SEQ ID NO: 470598 - RNA, 23 nt, Human
uccgagugauucuccugccucag

SEQ ID NO: 470599 - RNA, 20 nt, Human
uccugaccucagguaauccg

SEQ ID NO: 470600 - RNA, 24 nt, Human
uccugaguagcugagauuacaggc

SEQ ID NO: 470601 - RNA, 25 nt, Human
uccugggccuccguccccucgggag

SEQ ID NO: 470602 - RNA, 19 nt, Human
uccuuggagcagaaggcuc

SEQ ID NO: 470603 - RNA, 20 nt, Human
ucuacucccgcuaagucugu

SEQ ID NO: 470604 - RNA, 24 nt, Human
ucuccugccucagccuccugagua

SEQ ID NO: 470605 - RNA, 19 nt, Human
ucuuacuuucgcccaggcu

SEQ ID NO: 470606 - RNA, 22 nt, Human
ucuuacuuucgcccaggcugaa

SEQ ID NO: 470607 - RNA, 23 nt, Human
ucuugaacuccugaccucaggua

SEQ ID NO: 470608 - RNA, 24 nt, Human
ugaacuccugaccucagguaaucc

SEQ ID NO: 470609 - RNA, 20 nt, Human
ugacaagagcugagccaagg

SEQ ID NO: 470610 - RNA, 18 nt, Human
ugaccucagguaauccgc

SEQ ID NO: 470611 - RNA, 19 nt, Human
ugaccucagguaauccgcc

SEQ ID NO: 470612 - RNA, 20 nt, Human
ugagacagagucuuacuuuc

SEQ ID NO: 470613 - RNA, 22 nt, Human
ugagauuacaggcucuugccac

SEQ ID NO: 470614 - RNA, 24 nt, Human
ugagauuacaggcucuugccacca

SEQ ID NO: 470615 - RNA, 25 nt, Human
ugagauuacaggcucuugccaccau

SEQ ID NO: 470616 - RNA, 19 nt, Human
ugagccaaggacaguggga

SEQ ID NO: 470617 - RNA, 24 nt, Human
ugccucagccuccugaguagcuga

SEQ ID NO: 470618 - RNA, 24 nt, Human
ugccucggccucccaaaguguugg

SEQ ID NO: 470619 - RNA, 18 nt, Human
ugcggggauggcaugggg

SEQ ID NO: 470620 - RNA, 18 nt, Human
uggccacugggucacugc

SEQ ID NO: 470621 - RNA, 24 nt, Human
uggccaggcuggucuugaacuccu

SEQ ID NO: 470622 - RNA, 25 nt, Human
ugggagaaacagacggggaggcugg

SEQ ID NO: 470623 - RNA, 18 nt, Human
ugggauuacaggcgugag

SEQ ID NO: 470624 - RNA, 21 nt, Human
ugggauuacaggcgugagcca

SEQ ID NO: 470625 - RNA, 22 nt, Human
ugggauuacaggcgugagccac

SEQ ID NO: 470626 - RNA, 22 nt, Human
ugggauuacaggcgugagccac

SEQ ID NO: 470627 - RNA, 22 nt, Human
ugggauuacaggcgugagccac

SEQ ID NO: 470628 - RNA, 23 nt, Human
ugggauuacaggcgugagccacu

SEQ ID NO: 470629 - RNA, 24 nt, Human
ugggauuacaggcgugagccacug

SEQ ID NO: 470630 - RNA, 22 nt, Human
ugguggcagacaggacagccuc

SEQ ID NO: 470631 - RNA, 21 nt, Human
uguauuuuuaguagagacggg

SEQ ID NO: 470632 - RNA, 18 nt, Human
uuaguagagacgggguuu

SEQ ID NO: 470633 - RNA, 20 nt, Human
uuaguagagacgggguuuca

SEQ ID NO: 470634 - RNA, 24 nt, Human
uuaguagagacgggguuucaucau

SEQ ID NO: 470635 - RNA, 18 nt, Human
uucuacuccgugucccuc

SEQ ID NO: 470636 - RNA, 27 nt, Human
uugguggcagacaggacagccucuucu

SEQ ID NO: 470637 - RNA, 23 nt, Human
uuguauuuuuaguagagacgggg

SEQ ID NO: 470638 - RNA, 23 nt, Human
uuucaucauguuggccaggcugu

SEQ ID NO: 470639 - RNA, 23 nt, Human
uuuuuaguagagacgggguuuca

SEQ ID NO: 470640 - RNA, 20 nt, Human
uuuuuguauuuuuaguagag

SEQ ID NO: 470641 - RNA, 22 nt, Human
aaaaaaaaccaugucagagaaa

SEQ ID NO: 470642 - RNA, 26 nt, Human
aaaaaaguaagcgagggagugggcaa

SEQ ID NO: 470643 - RNA, 26 nt, Human
aaaagaaaaaaaaaaccaugucagag

SEQ ID NO: 470644 - RNA, 25 nt, Human
aaacaagcaaagucacuuuugcagg

SEQ ID NO: 470645 - RNA, 20 nt, Human
aaaguaaacaagcaaaguca

SEQ ID NO: 470646 - RNA, 24 nt, Human
aaagugcugggauuacaggcguga

SEQ ID NO: 470647 - RNA, 21 nt, Human
aacauaaggaguauauauaca

SEQ ID NO: 470648 - RNA, 26 nt, Human
aacucaaaaguagguuuuaccaccac

SEQ ID NO: 470649 - RNA, 24 nt, Human
aacucagcauaaacacuuuaguau

SEQ ID NO: 470650 - RNA, 26 nt, Human
aacuccccagaaaugagaggcaccac

SEQ ID NO: 470651 - RNA, 18 nt, Human
aacuguauaacacaugaa

SEQ ID NO: 470652 - RNA, 21 nt, Human
aacuuuguaacuauuacacug

SEQ ID NO: 470653 - RNA, 19 nt, Human
aaggaccacagggugugga

SEQ ID NO: 470654 - RNA, 19 nt, Human
aagugcugggauuacaggc

SEQ ID NO: 470655 - RNA, 19 nt, Human
aagugcugggauuacaggc

SEQ ID NO: 470656 - RNA, 26 nt, Human
aagugcugggauuacaggcgugagcc

SEQ ID NO: 470657 - RNA, 18 nt, Human
aaguuuaaaaugccccuc

SEQ ID NO: 470658 - RNA, 18 nt, Human
acacaaggcaaguagaau

SEQ ID NO: 470659 - RNA, 21 nt, Human
acacacagacaucacucagga

SEQ ID NO: 470660 - RNA, 24 nt, Human
acaggguuucuccauguuggucag

SEQ ID NO: 470661 - RNA, 19 nt, Human
acaugacggggaaaggcag

SEQ ID NO: 470662 - RNA, 25 nt, Human
agaaaaaaaaaaccaugucagagaa

SEQ ID NO: 470663 - RNA, 18 nt, Human
agacaggguuucuccaug

SEQ ID NO: 470664 - RNA, 18 nt, Human
agagagcugcauaaaaau

SEQ ID NO: 470665 - RNA, 20 nt, Human
agccaccacgcccagccacc

SEQ ID NO: 470666 - RNA, 21 nt, Human
agcuaugaucuagucgugaca

SEQ ID NO: 470667 - RNA, 19 nt, Human
agcuggggaggugacuucu

SEQ ID NO: 470668 - RNA, 23 nt, Human
aggcagaaaguaaacaagcaaag

SEQ ID NO: 470669 - RNA, 20 nt, Human
aggcaugcaccaccacaccc

SEQ ID NO: 470670 - RNA, 19 nt, Human
aggcccuuccuuuacaaau

SEQ ID NO: 470671 - RNA, 24 nt, Human
aggugauccgccugccucggccuc

SEQ ID NO: 470672 - RNA, 21 nt, Human
aguagcugggauuacaggcau

SEQ ID NO: 470673 - RNA, 24 nt, Human
agugcaauggcacgaucuuggcuc

SEQ ID NO: 470674 - RNA, 18 nt, Human
agugcugggauuacaggc

SEQ ID NO: 470675 - RNA, 24 nt, Human
auauguacaucuuuuguucacaua

SEQ ID NO: 470676 - RNA, 24 nt, Human
aucaaaaucagauuuuaaaagacc

SEQ ID NO: 470677 - RNA, 18 nt, Human
augucaaauauuucauuc

SEQ ID NO: 470678 - RNA, 21 nt, Human
caaaaacaaauacaguaauug

SEQ ID NO: 470679 - RNA, 26 nt, Human
caaaauacaaacucacuacucccuga

SEQ ID NO: 470680 - RNA, 24 nt, Human
caaagugcugggauuacaggcgug

SEQ ID NO: 470681 - RNA, 21 nt, Human
caacuccccagaaaugagagg

SEQ ID NO: 470682 - RNA, 21 nt, Human
caccacaaccuccgccucccg

SEQ ID NO: 470683 - RNA, 22 nt, Human
cagaaaacucacagcacaacua

SEQ ID NO: 470684 - RNA, 22 nt, Human
caggcaaggaacacacagacau

SEQ ID NO: 470685 - RNA, 24 nt, Human
caggguuucuccauguuggucagg

SEQ ID NO: 470686 - RNA, 22 nt, Human
caggugauccgccugccucggc

SEQ ID NO: 470687 - RNA, 23 nt, Human
caugcaccaccacacccggcuaa

SEQ ID NO: 470688 - RNA, 22 nt, Human
caugugaaaauggggagguaac

SEQ ID NO: 470689 - RNA, 24 nt, Human
cauguuggucaggcuggucuugaa

SEQ ID NO: 470690 - RNA, 22 nt, Human
ccaaagugcugggauuacaggc

SEQ ID NO: 470691 - RNA, 22 nt, Human
ccaaagugcugggauuacaggc

SEQ ID NO: 470692 - RNA, 24 nt, Human
ccaaagugcugggauuacaggcgu

SEQ ID NO: 470693 - RNA, 22 nt, Human
ccaagcaaaauaauaaaauccu

SEQ ID NO: 470694 - RNA, 18 nt, Human
ccacaaccuccgccuccc

SEQ ID NO: 470695 - RNA, 23 nt, Human
ccacaaccuccgccucccggguu

SEQ ID NO: 470696 - RNA, 24 nt, Human
ccacaaccuccgccucccggguuc

SEQ ID NO: 470697 - RNA, 19 nt, Human
ccauguuggucaggcuggu

SEQ ID NO: 470698 - RNA, 21 nt, Human
ccauguuggucaggcuggucu

SEQ ID NO: 470699 - RNA, 21 nt, Human
ccauguuggucaggcuggucu

SEQ ID NO: 470700 - RNA, 22 nt, Human
cccaccaaacagcaguaaucau

SEQ ID NO: 470701 - RNA, 20 nt, Human
ccccagaaaugagaggcacu

SEQ ID NO: 470702 - RNA, 18 nt, Human
cccgaccucaggugaucc

SEQ ID NO: 470703 - RNA, 21 nt, Human
cccgaccucaggugauccgcc

SEQ ID NO: 470704 - RNA, 23 nt, Human
cccgaccucaggugauccgccug

SEQ ID NO: 470705 - RNA, 27 nt, Human
cccggcugcggcgcgcugcggcagggg

SEQ ID NO: 470706 - RNA, 18 nt, Human
cccggguucaagagauuc

SEQ ID NO: 470707 - RNA, 24 nt, Human
cccucuuguugcccaggcuggagu

SEQ ID NO: 470708 - RNA, 23 nt, Human
ccgaguagcugggauuacaggca

SEQ ID NO: 470709 - RNA, 24 nt, Human
ccgaguagcugggauuacaggcau

SEQ ID NO: 470710 - RNA, 18 nt, Human
ccggcugcggcgcgcugc

SEQ ID NO: 470711 - RNA, 18 nt, Human
ccucaguucggagaacuc

SEQ ID NO: 470712 - RNA, 19 nt, Human
ccucauguuauucacuagg

SEQ ID NO: 470713 - RNA, 24 nt, Human
ccucuuguugcccaggcuggagug

SEQ ID NO: 470714 - RNA, 24 nt, Human
ccugccucggccucccaaagugcu

SEQ ID NO: 470715 - RNA, 18 nt, Human
cgaccucaggugauccgc

SEQ ID NO: 470716 - RNA, 24 nt, Human
cgaccucaggugauccgccugccu

SEQ ID NO: 470717 - RNA, 30 nt, Human
cggcuaauuuuguauuuuuaguggagacaa

SEQ ID NO: 470718 - RNA, 22 nt, Human
cucaaaaaagaaaaaaaaaacc

SEQ ID NO: 470719 - RNA, 22 nt, Human
cucaaaauauucuugcucaauc

SEQ ID NO: 470720 - RNA, 24 nt, Human
cucaccacaaccuccgccucccgg

SEQ ID NO: 470721 - RNA, 24 nt, Human
cucaccccaagcaaaauaauaaaa

SEQ ID NO: 470722 - RNA, 24 nt, Human
cuccauguuggucaggcuggucuu

SEQ ID NO: 470723 - RNA, 26 nt, Human
cucccgaccucaggugauccgccugc

SEQ ID NO: 470724 - RNA, 23 nt, Human
cucucccgccccucaccccaagc

SEQ ID NO: 470725 - RNA, 18 nt, Human
cucuuguugcccaggcug

SEQ ID NO: 470726 - RNA, 19 nt, Human
cugcagcggacacgugacg

SEQ ID NO: 470727 - RNA, 22 nt, Human
cugcggcaggggagcuggaggc

SEQ ID NO: 470728 - RNA, 24 nt, Human
cuuguugcccaggcuggagugcaa

SEQ ID NO: 470729 - RNA, 20 nt, Human
cuuuuuuuuuugaaacggag

SEQ ID NO: 470730 - RNA, 22 nt, Human
cuuuuuuuuuugaaacggaguu

SEQ ID NO: 470731 - RNA, 19 nt, Human
gaaaauaaccccacucagg

SEQ ID NO: 470732 - RNA, 23 nt, Human
gaaaggcuuauugaaagacacuu

SEQ ID NO: 470733 - RNA, 21 nt, Human
gaacagaaaacucacagcaca

SEQ ID NO: 470734 - RNA, 22 nt, Human
gaagaugaugacagcuggggag

SEQ ID NO: 470735 - RNA, 23 nt, Human
gaccucaggugauccgccugccu

SEQ ID NO: 470736 - RNA, 24 nt, Human
gaccucaggugauccgccugccuc

SEQ ID NO: 470737 - RNA, 20 nt, Human
gacgaggcugccagccuucc

SEQ ID NO: 470738 - RNA, 20 nt, Human
gagacaggguuucuccaugu

SEQ ID NO: 470739 - RNA, 21 nt, Human
gagacaggguuucuccauguu

SEQ ID NO: 470740 - RNA, 22 nt, Human
gagcaugcacauggauacauga

SEQ ID NO: 470741 - RNA, 24 nt, Human
gaguagcugggauuacaggcaugc

SEQ ID NO: 470742 - RNA, 18 nt, Human
gauuacaggcgugagcca

SEQ ID NO: 470743 - RNA, 21 nt, Human
gauuacaggcgugagccacca

SEQ ID NO: 470744 - RNA, 22 nt, Human
gauuacaggcgugagccaccac

SEQ ID NO: 470745 - RNA, 23 nt, Human
gcagcaacucagcauaaacacuu

SEQ ID NO: 470746 - RNA, 20 nt, Human
gcaggcuuuuuaaacuguau

SEQ ID NO: 470747 - RNA, 19 nt, Human
gcccaggcuggagugcaau

SEQ ID NO: 470748 - RNA, 20 nt, Human
gcggaggcgcgcagcuccgc

SEQ ID NO: 470749 - RNA, 19 nt, Human
gcucuugcaaacugaaaca

SEQ ID NO: 470750 - RNA, 23 nt, Human
gcuggucuugaacucccgaccuc

SEQ ID NO: 470751 - RNA, 19 nt, Human
ggauggugugagagggaaa

SEQ ID NO: 470752 - RNA, 19 nt, Human
ggauuacaggcgugagcca

SEQ ID NO: 470753 - RNA, 19 nt, Human
ggccaugaaacuucauaga

SEQ ID NO: 470754 - RNA, 24 nt, Human
ggcuggucuugaacucccgaccuc

SEQ ID NO: 470755 - RNA, 24 nt, Human
ggggugccucucuggagaagcuuu

SEQ ID NO: 470756 - RNA, 20 nt, Human
gggugccucucuggagaagc

SEQ ID NO: 470757 - RNA, 18 nt, Human
guagcugggauuacaggc

SEQ ID NO: 470758 - RNA, 20 nt, Human
guagcugggauuacaggcau

SEQ ID NO: 470759 - RNA, 21 nt, Human
gugcaugugaaaauggggagg

SEQ ID NO: 470760 - RNA, 20 nt, Human
uaaaauagucaaucugaggc

SEQ ID NO: 470761 - RNA, 20 nt, Human
uaaaauauaacccuugcaca

SEQ ID NO: 470762 - RNA, 25 nt, Human
uaaagguggacaaaaaugccaguca

SEQ ID NO: 470763 - RNA, 21 nt, Human
uaauacuuacuauauguacau

SEQ ID NO: 470764 - RNA, 18 nt, Human
uacaagucugaaaauuaa

SEQ ID NO: 470765 - RNA, 23 nt, Human
uacaggcaugcaccaccacaccc

SEQ ID NO: 470766 - RNA, 24 nt, Human
uacaggcgugagccaccacgccca

SEQ ID NO: 470767 - RNA, 19 nt, Human
uacauaauuuuuaucuaaa

SEQ ID NO: 470768 - RNA, 20 nt, Human
uaccauaaaaaauauuaugu

SEQ ID NO: 470769 - RNA, 24 nt, Human
uagcaaaacacucagugcuuuuga

SEQ ID NO: 470770 - RNA, 19 nt, Human
uagcagagaaaggaucaua

SEQ ID NO: 470771 - RNA, 24 nt, Human
uaguggagacaggguuucuccaug

SEQ ID NO: 470772 - RNA, 23 nt, Human
uauacauauacacauauguauag

SEQ ID NO: 470773 - RNA, 21 nt, Human
uauagaauaucuugcuuuuga

SEQ ID NO: 470774 - RNA, 22 nt, Human
uauauacauauacacauaugua

SEQ ID NO: 470775 - RNA, 24 nt, Human
uauauacauauacacauauguaua

SEQ ID NO: 470776 - RNA, 18 nt, Human
uaugaacagaaaacucac

SEQ ID NO: 470777 - RNA, 25 nt, Human
uauguaaacaacuccccagaaauga

SEQ ID NO: 470778 - RNA, 22 nt, Human
uauuccacucucccgccccuca

SEQ ID NO: 470779 - RNA, 24 nt, Human
uauucuugcucaaucugcuggaag

SEQ ID NO: 470780 - RNA, 22 nt, Human
ucaaaaaagaaaaaaaaaacca

SEQ ID NO: 470781 - RNA, 27 nt, Human
ucaaaaguagguuuuaccaccaccucu

SEQ ID NO: 470782 - RNA, 23 nt, Human
ucaaccauucaaggucucuaaga

SEQ ID NO: 470783 - RNA, 21 nt, Human
ucaagagauucucgucucaaa

SEQ ID NO: 470784 - RNA, 22 nt, Human
ucaaucugaggcagaaaguaaa

SEQ ID NO: 470785 - RNA, 19 nt, Human
ucaauuucuuucuuuuucu

SEQ ID NO: 470786 - RNA, 24 nt, Human
ucaauuucuuucuuuuucuuuuuu

SEQ ID NO: 470787 - RNA, 22 nt, Human
ucacaguauuuugacuuuugga

SEQ ID NO: 470788 - RNA, 24 nt, Human
ucaccacaaccuccgccucccggg

SEQ ID NO: 470789 - RNA, 25 nt, Human
ucaccacaaccuccgccucccgggu

SEQ ID NO: 470790 - RNA, 27 nt, Human
ucaccacaaccuccgccucccggguuc

SEQ ID NO: 470791 - RNA, 20 nt, Human
ucacuacucccugacuugag

SEQ ID NO: 470792 - RNA, 19 nt, Human
ucacugacacuuucccugg

SEQ ID NO: 470793 - RNA, 27 nt, Human
ucagcaaccuuacucauauuccacucu

SEQ ID NO: 470794 - RNA, 20 nt, Human
ucagccccaccaaacagcag

SEQ ID NO: 470795 - RNA, 19 nt, Human
ucaggguagaaauaaaggu

SEQ ID NO: 470796 - RNA, 21 nt, Human
ucaggugauccgccugccucg

SEQ ID NO: 470797 - RNA, 23 nt, Human
ucauauuccacucucccgccccu

SEQ ID NO: 470798 - RNA, 19 nt, Human
uccacucucccgccccuca

SEQ ID NO: 470799 - RNA, 19 nt, Human
uccauguguuuugauccuu

SEQ ID NO: 470800 - RNA, 24 nt, Human
ucccaaagugcugggauuacaggc

SEQ ID NO: 470801 - RNA, 21 nt, Human
ucccgccccucaccccaagca

SEQ ID NO: 470802 - RNA, 23 nt, Human
ucccgccccucaccccaagcaaa

SEQ ID NO: 470803 - RNA, 21 nt, Human
ucccggguucaagagauucuc

SEQ ID NO: 470804 - RNA, 22 nt, Human
ucccggguucaagagauucucg

SEQ ID NO: 470805 - RNA, 23 nt, Human
ucccucuuguugcccaggcugga

SEQ ID NO: 470806 - RNA, 23 nt, Human
uccgaguagcugggauuacaggc

SEQ ID NO: 470807 - RNA, 24 nt, Human
uccgaguagcugggauuacaggca

SEQ ID NO: 470808 - RNA, 19 nt, Human
uccuaaggguaaaaugaac

SEQ ID NO: 470809 - RNA, 19 nt, Human
uccugcucuugcaaacuga

SEQ ID NO: 470810 - RNA, 18 nt, Human
ucggccucccaaagugcu

SEQ ID NO: 470811 - RNA, 25 nt, Human
ucucccgccccucaccccaagcaaa

SEQ ID NO: 470812 - RNA, 21 nt, Human
ucucuagaaagcaaccagcuu

SEQ ID NO: 470813 - RNA, 24 nt, Human
ucucuagaaagcaaccagcuuagu

SEQ ID NO: 470814 - RNA, 22 nt, Human
ucuuguugcccaggcuggagug

SEQ ID NO: 470815 - RNA, 25 nt, Human
ucuuuuuuuuuuuaaagaaacuugg

SEQ ID NO: 470816 - RNA, 19 nt, Human
ugaaaaaaucacguggcug

SEQ ID NO: 470817 - RNA, 20 nt, Human
ugaaaaguuuacaagcuauu

SEQ ID NO: 470818 - RNA, 22 nt, Human
ugaaagacacuucccuuugaaa

SEQ ID NO: 470819 - RNA, 23 nt, Human
ugaauguagguccauguguuuug

SEQ ID NO: 470820 - RNA, 21 nt, Human
ugacagcuggggaggugacuu

SEQ ID NO: 470821 - RNA, 19 nt, Human
ugacuucuuuauuccucuu

SEQ ID NO: 470822 - RNA, 18 nt, Human
ugaggcagaaaguaaaca

SEQ ID NO: 470823 - RNA, 24 nt, Human
ugcaggucuuggcaauucagcauu

SEQ ID NO: 470824 - RNA, 23 nt, Human
ugcauaaaaaucuagcagagaaa

SEQ ID NO: 470825 - RNA, 24 nt, Human
ugccaaguuuuucauuugccccca

SEQ ID NO: 470826 - RNA, 18 nt, Human
ugcccaggcuggagugca

SEQ ID NO: 470827 - RNA, 21 nt, Human
ugcccaggcuggagugcaaug

SEQ ID NO: 470828 - RNA, 24 nt, Human
ugcccaggcuggagugcaauggca

SEQ ID NO: 470829 - RNA, 21 nt, Human
ugccucggccucccaaagugc

SEQ ID NO: 470830 - RNA, 24 nt, Human
ugccucggccucccaaagugcugg

SEQ ID NO: 470831 - RNA, 18 nt, Human
ugcuggaagaugaugaca

SEQ ID NO: 470832 - RNA, 23 nt, Human
ugcuggaagaugaugacagcugg

SEQ ID NO: 470833 - RNA, 24 nt, Human
ugcugggauuacaggcgugagcca

SEQ ID NO: 470834 - RNA, 19 nt, Human
uggaagaugaugacagcug

SEQ ID NO: 470835 - RNA, 23 nt, Human
uggagugcaauggcacgaucuug

SEQ ID NO: 470836 - RNA, 24 nt, Human
uggagugcaauggcacgaucuugg

SEQ ID NO: 470837 - RNA, 24 nt, Human
uggcacgaucuuggcucaccacaa

SEQ ID NO: 470838 - RNA, 21 nt, Human
ugggauuacaggcaugcacca

SEQ ID NO: 470839 - RNA, 24 nt, Human
ugggauuacaggcaugcaccacca

SEQ ID NO: 470840 - RNA, 18 nt, Human
ugggauuacaggcgugag

SEQ ID NO: 470841 - RNA, 19 nt, Human
ugggauuacaggcgugagc

SEQ ID NO: 470842 - RNA, 22 nt, Human
ugggauuacaggcgugagccac

SEQ ID NO: 470843 - RNA, 23 nt, Human
ugggauuacaggcgugagccacc

SEQ ID NO: 470844 - RNA, 24 nt, Human
ugggauuacaggcgugagccacca

SEQ ID NO: 470845 - RNA, 23 nt, Human
uggucaggcuggucuugaacucc

SEQ ID NO: 470846 - RNA, 20 nt, Human
uggugugagagggaaagaau

SEQ ID NO: 470847 - RNA, 20 nt, Human
uguaaacaacuccccagaaa

SEQ ID NO: 470848 - RNA, 21 nt, Human
uguaaagagugauuucccugg

SEQ ID NO: 470849 - RNA, 20 nt, Human
uguugcccaggcuggagugc

SEQ ID NO: 470850 - RNA, 24 nt, Human
uuaguggagacaggguuucuccau

SEQ ID NO: 470851 - RNA, 22 nt, Human
uucauauacuuacgugcaugug

SEQ ID NO: 470852 - RNA, 19 nt, Human
uuccacucucccgccccuc

SEQ ID NO: 470853 - RNA, 24 nt, Human
uucccucuuguugcccaggcugga

SEQ ID NO: 470854 - RNA, 24 nt, Human
uucucaauuucuuucuuuuucuuu

SEQ ID NO: 470855 - RNA, 24 nt, Human
uucucggaaauacaauaacccaug

SEQ ID NO: 470856 - RNA, 18 nt, Human
uugaaagacacuucccuu

SEQ ID NO: 470857 - RNA, 23 nt, Human
uugaaaguaaaaggcuaccauaa

SEQ ID NO: 470858 - RNA, 18 nt, Human
uugcugcuuuucugauga

SEQ ID NO: 470859 - RNA, 24 nt, Human
uuguaaagagugauuucccugggg

SEQ ID NO: 470860 - RNA, 18 nt, Human
uuuaaaaugccccucaaa

SEQ ID NO: 470861 - RNA, 24 nt, Human
uuucccucuuguugcccaggcugg

SEQ ID NO: 470862 - RNA, 21 nt, Human
uuucuccauguuggucaggcu

SEQ ID NO: 470863 - RNA, 22 nt, Human
uuucugaugagauucauucacc

SEQ ID NO: 470864 - RNA, 18 nt, Human
uuugauccuuuuacaggc

SEQ ID NO: 470865 - RNA, 19 nt, Human
uuuuguauuuuuaguggag

SEQ ID NO: 470866 - RNA, 20 nt, Human
uuuuguauuuuuaguggaga

SEQ ID NO: 470867 - RNA, 24 nt, Human
aaacagcaacaaggaccuuauagc

SEQ ID NO: 470868 - RNA, 21 nt, Human
aauagacagugcaaaccauaa

SEQ ID NO: 470869 - RNA, 20 nt, Human
acuucccaccccgcccgccc

SEQ ID NO: 470870 - RNA, 21 nt, Human
agagucgaaagcgauggaacc

SEQ ID NO: 470871 - RNA, 20 nt, Human
augcacguuuccaaugaguu

SEQ ID NO: 470872 - RNA, 21 nt, Human
auggaaccugccugcaccaca

SEQ ID NO: 470873 - RNA, 21 nt, Human
augucacaaacuccagaagac

SEQ ID NO: 470874 - RNA, 21 nt, Human
caacauuauaaacagcaggca

SEQ ID NO: 470875 - RNA, 18 nt, Human
caaguacacaaagagaug

SEQ ID NO: 470876 - RNA, 22 nt, Human
caccacagucugucugggccca

SEQ ID NO: 470877 - RNA, 20 nt, Human
caccccgcccgccccccucc

SEQ ID NO: 470878 - RNA, 24 nt, Human
cacgcacacgccugcucgcugcgc

SEQ ID NO: 470879 - RNA, 25 nt, Human
cacgcacacgccugcucgcugcgca

SEQ ID NO: 470880 - RNA, 21 nt, Human
cagagugguaaacacagggcc

SEQ ID NO: 470881 - RNA, 21 nt, Human
cagaugcauuauuacagcuaa

SEQ ID NO: 470882 - RNA, 25 nt, Human
cagcguaguccagaagcucaauguu

SEQ ID NO: 470883 - RNA, 26 nt, Human
caggcacuucccaccccgcccgcccc

SEQ ID NO: 470884 - RNA, 19 nt, Human
cauuucaacugcaaccagu

SEQ ID NO: 470885 - RNA, 26 nt, Human
ccacauccugccugccccacacacgc

SEQ ID NO: 470886 - RNA, 19 nt, Human
ccagucccgccgcucccug

SEQ ID NO: 470887 - RNA, 23 nt, Human
ccccgcccgccccccuccccccg

SEQ ID NO: 470888 - RNA, 26 nt, Human
ccgccccccuccccccgcccaucucc

SEQ ID NO: 470889 - RNA, 19 nt, Human
ccgccgcaggccucuccuc

SEQ ID NO: 470890 - RNA, 18 nt, Human
ccgccgcucccugccgcc

SEQ ID NO: 470891 - RNA, 19 nt, Human
ccgccgcucccugccgccg

SEQ ID NO: 470892 - RNA, 20 nt, Human
ccgccgcucccugccgccgc

SEQ ID NO: 470893 - RNA, 21 nt, Human
ccgccuccgccuccgccccgc

SEQ ID NO: 470894 - RNA, 19 nt, Human
ccgcucccugccgccgcag

SEQ ID NO: 470895 - RNA, 22 nt, Human
ccuacugcuuuggagugagagu

SEQ ID NO: 470896 - RNA, 19 nt, Human
ccugcaccacauccugccu

SEQ ID NO: 470897 - RNA, 24 nt, Human
ccugcaccacauccugccugcccc

SEQ ID NO: 470898 - RNA, 23 nt, Human
cgccgcgccggccuucgccgccc

SEQ ID NO: 470899 - RNA, 18 nt, Human
cgcucccugccgccgcag

SEQ ID NO: 470900 - RNA, 21 nt, Human
cgcuccggcucggcucggcuc

SEQ ID NO: 470901 - RNA, 22 nt, Human
cggccuucgccgcccgcuccgg

SEQ ID NO: 470902 - RNA, 19 nt, Human
cggcucgggucggcuccgg

SEQ ID NO: 470903 - RNA, 22 nt, Human
cuaagggcaaggaaaagccuau

SEQ ID NO: 470904 - RNA, 19 nt, Human
cuccuccgccuccgccucc

SEQ ID NO: 470905 - RNA, 19 nt, Human
cugggcccagccagcgcug

SEQ ID NO: 470906 - RNA, 22 nt, Human
cuucccaccccgcccgcccccc

SEQ ID NO: 470907 - RNA, 25 nt, Human
gaaccugccugcaccacauccugcc

SEQ ID NO: 470908 - RNA, 22 nt, Human
gccccacacacgcacacgccug

SEQ ID NO: 470909 - RNA, 20 nt, Human
ggcaaggaaaagccuauggc

SEQ ID NO: 470910 - RNA, 23 nt, Human
ggggugaggagugggccagagug

SEQ ID NO: 470911 - RNA, 19 nt, Human
gugagcagcaacgcggccc

SEQ ID NO: 470912 - RNA, 18 nt, Human
uaucacaaacagcaacaa

SEQ ID NO: 470913 - RNA, 22 nt, Human
uaucaguuaucacaaacagcaa

SEQ ID NO: 470914 - RNA, 22 nt, Human
ucaaaucaaugucacaaacucc

SEQ ID NO: 470915 - RNA, 24 nt, Human
ucaguuaucacaaacagcaacaag

SEQ ID NO: 470916 - RNA, 26 nt, Human
uccagaagcucaauguuggauuugcc

SEQ ID NO: 470917 - RNA, 27 nt, Human
ucccaccccgcccgccccccucccccc

SEQ ID NO: 470918 - RNA, 18 nt, Human
uccgccuccgccccgcag

SEQ ID NO: 470919 - RNA, 24 nt, Human
ucgccgcgccggccuucgccgccc

SEQ ID NO: 470920 - RNA, 21 nt, Human
ucucaagagaacaccauccau

SEQ ID NO: 470921 - RNA, 21 nt, Human
ucugccaguaccguacaagua

SEQ ID NO: 470922 - RNA, 22 nt, Human
ugcaccacauccugccugcccc

SEQ ID NO: 470923 - RNA, 24 nt, Human
ugcagagagugagcagcaacgcgg

SEQ ID NO: 470924 - RNA, 23 nt, Human
ugccugccccacacacgcacacg

SEQ ID NO: 470925 - RNA, 19 nt, Human
uggcuuuugaaaaaugacu

SEQ ID NO: 470926 - RNA, 19 nt, Human
uuacaaggacagaggcuac

SEQ ID NO: 470927 - RNA, 21 nt, Human
aaagaagcaccaucccuugca

SEQ ID NO: 470928 - RNA, 25 nt, Human
aaaggcacuggggcagaugugaccg

SEQ ID NO: 470929 - RNA, 21 nt, Human
aagcaucacacugcccgguga

SEQ ID NO: 470930 - RNA, 21 nt, Human
aaggcuggggucaggcagagg

SEQ ID NO: 470931 - RNA, 21 nt, Human
aaggcuggggucaggcagagg

SEQ ID NO: 470932 - RNA, 21 nt, Human
aagugaaaguggcggccccgg

SEQ ID NO: 470933 - RNA, 19 nt, Human
acacacagggcaggugaac

SEQ ID NO: 470934 - RNA, 19 nt, Human
accgcagugcaggcagggc

SEQ ID NO: 470935 - RNA, 19 nt, Human
accgcagugcaggcagggc

SEQ ID NO: 470936 - RNA, 24 nt, Human
acgcagagccggaccugacgggcu

SEQ ID NO: 470937 - RNA, 24 nt, Human
acgcagagccggaccugacgggcu

SEQ ID NO: 470938 - RNA, 20 nt, Human
acgcuacagcaagcaaggcc

SEQ ID NO: 470939 - RNA, 19 nt, Human
acggugcagcggauccagu

SEQ ID NO: 470940 - RNA, 19 nt, Human
agaaagcugacagcugaag

SEQ ID NO: 470941 - RNA, 19 nt, Human
agaaagcugacagcugaag

SEQ ID NO: 470942 - RNA, 21 nt, Human
agcauguggccccaccaucuu

SEQ ID NO: 470943 - RNA, 21 nt, Human
agcauguggccccaccaucuu

SEQ ID NO: 470944 - RNA, 22 nt, Human
aggaggaaacgggaccagccga

SEQ ID NO: 470945 - RNA, 23 nt, Human
aggcagagaaguuagccccagaa

SEQ ID NO: 470946 - RNA, 23 nt, Human
aggcagagaaguuagccccagaa

SEQ ID NO: 470947 - RNA, 23 nt, Human
aggcagaggugggagccgcaggg

SEQ ID NO: 470948 - RNA, 23 nt, Human
aggcagaggugggagccgcaggg

SEQ ID NO: 470949 - RNA, 19 nt, Human
aggcaguugacguggaaac

SEQ ID NO: 470950 - RNA, 20 nt, Human
aggccucuggccaggacccu

SEQ ID NO: 470951 - RNA, 20 nt, Human
aggccucuggccaggacccu

SEQ ID NO: 470952 - RNA, 24 nt, Human
aggcuggggucaggcagagguggg

SEQ ID NO: 470953 - RNA, 24 nt, Human
aggcuggggucaggcagagguggg

SEQ ID NO: 470954 - RNA, 22 nt, Human
aucaccuucagcaucucugucg

SEQ ID NO: 470955 - RNA, 26 nt, Human
caaaggcacuggggcagaugugaccg

SEQ ID NO: 470956 - RNA, 22 nt, Human
caagccccaagggaaggacaaa

SEQ ID NO: 470957 - RNA, 22 nt, Human
caagccccaagggaaggacaaa

SEQ ID NO: 470958 - RNA, 24 nt, Human
caagccccaagggaaggacaaagg

SEQ ID NO: 470959 - RNA, 24 nt, Human
caagccccaagggaaggacaaagg

SEQ ID NO: 470960 - RNA, 19 nt, Human
caagucccggaggaccccc

SEQ ID NO: 470961 - RNA, 18 nt, Human
caccacccagccggggcg

SEQ ID NO: 470962 - RNA, 23 nt, Human
caccacccagccggggcguucca

SEQ ID NO: 470963 - RNA, 19 nt, Human
cagagaaguuagccccaga

SEQ ID NO: 470964 - RNA, 19 nt, Human
cagagaaguuagccccaga

SEQ ID NO: 470965 - RNA, 20 nt, Human
cagcgcauggccucgcccug

SEQ ID NO: 470966 - RNA, 20 nt, Human
caucacacugcccggugacc

SEQ ID NO: 470967 - RNA, 19 nt, Human
cauccgggaccuccacugc

SEQ ID NO: 470968 - RNA, 21 nt, Human
cauccgggaccuccacugccc

SEQ ID NO: 470969 - RNA, 18 nt, Human
ccaagcccugugugugcc

SEQ ID NO: 470970 - RNA, 19 nt, Human
ccaagcccugugugugccu

SEQ ID NO: 470971 - RNA, 21 nt, Human
ccacaucguucugagcccgca

SEQ ID NO: 470972 - RNA, 20 nt, Human
cccaccccguccuccggggc

SEQ ID NO: 470973 - RNA, 21 nt, Human
cccagaaagcugacagcugaa

SEQ ID NO: 470974 - RNA, 21 nt, Human
cccagaaagcugacagcugaa

SEQ ID NO: 470975 - RNA, 20 nt, Human
cccauuuacccugcagcggc

SEQ ID NO: 470976 - RNA, 20 nt, Human
ccccagggccccagcguggg

SEQ ID NO: 470977 - RNA, 23 nt, Human
ccccagggccccagcgugggccc

SEQ ID NO: 470978 - RNA, 24 nt, Human
cccccagggccccagcgugggccc

SEQ ID NO: 470979 - RNA, 18 nt, Human
cccccugggggggaccgu

SEQ ID NO: 470980 - RNA, 24 nt, Human
ccccugggggggaccgugccuccu

SEQ ID NO: 470981 - RNA, 22 nt, Human
cccggguuucaaggcaaagccc

SEQ ID NO: 470982 - RNA, 23 nt, Human
cccugugugugccucgcuguccc

SEQ ID NO: 470983 - RNA, 21 nt, Human
cccuuggugacccagcagauc

SEQ ID NO: 470984 - RNA, 21 nt, Human
ccggcggcggcggacgccgag

SEQ ID NO: 470985 - RNA, 20 nt, Human
ccgggauccugcguggggcg

SEQ ID NO: 470986 - RNA, 24 nt, Human
ccucaggggucaggagcgccuuga

SEQ ID NO: 470987 - RNA, 18 nt, Human
ccucccgggaggccccag

SEQ ID NO: 470988 - RNA, 19 nt, Human
ccucuggccaggggcuaug

SEQ ID NO: 470989 - RNA, 19 nt, Human
ccucuggccaggggcuaug

SEQ ID NO: 470990 - RNA, 25 nt, Human
cgccuugaucucccucuccagcagc

SEQ ID NO: 470991 - RNA, 22 nt, Human
cgguguggcagacggugcagcg

SEQ ID NO: 470992 - RNA, 20 nt, Human
cguccacgaagcucccugag

SEQ ID NO: 470993 - RNA, 20 nt, Human
cguccacgaagcucccugag

SEQ ID NO: 470994 - RNA, 19 nt, Human
cguggcugugcccaucccc

SEQ ID NO: 470995 - RNA, 20 nt, Human
cucauugacaucauccucaa

SEQ ID NO: 470996 - RNA, 22 nt, Human
cuccaaccacaaaggcagagaa

SEQ ID NO: 470997 - RNA, 22 nt, Human
cuccaaccacaaaggcagagaa

SEQ ID NO: 470998 - RNA, 19 nt, Human
cuccagcagcuugcccgag

SEQ ID NO: 470999 - RNA, 20 nt, Human
cuccagcagcuugcccgagc

SEQ ID NO: 471000 - RNA, 18 nt, Human
cuccucccgggaggcccc

SEQ ID NO: 471001 - RNA, 19 nt, Human
cuccucccgggaggcccca

SEQ ID NO: 471002 - RNA, 19 nt, Human
cucucuccucccgggaggc

SEQ ID NO: 471003 - RNA, 19 nt, Human
cugacagcugaaggcgggu

SEQ ID NO: 471004 - RNA, 19 nt, Human
cugacagcugaaggcgggu

SEQ ID NO: 471005 - RNA, 19 nt, Human
cuggcucugaacagguuag

SEQ ID NO: 471006 - RNA, 19 nt, Human
cuggcucugaacagguuag

SEQ ID NO: 471007 - RNA, 21 nt, Human
cugggcccccagggccccagc

SEQ ID NO: 471008 - RNA, 21 nt, Human
gagcgccccuggcgucccggg

SEQ ID NO: 471009 - RNA, 24 nt, Human
gaggccccaguucuucgcaagggg

SEQ ID NO: 471010 - RNA, 21 nt, Human
gaucucccucuccagcagcuu

SEQ ID NO: 471011 - RNA, 25 nt, Human
gcaagccccaagggaaggacaaagg

SEQ ID NO: 471012 - RNA, 25 nt, Human
gcaagccccaagggaaggacaaagg

SEQ ID NO: 471013 - RNA, 24 nt, Human
gcaauggagaugcccaggucuaga

SEQ ID NO: 471014 - RNA, 19 nt, Human
gcagucuccuuccuggcuc

SEQ ID NO: 471015 - RNA, 19 nt, Human
gcagucuccuuccuggcuc

SEQ ID NO: 471016 - RNA, 22 nt, Human
gcagugcaggcagggccccuac

SEQ ID NO: 471017 - RNA, 22 nt, Human
gcagugcaggcagggccccuac

SEQ ID NO: 471018 - RNA, 21 nt, Human
gccucuggccaggggcuaugu

SEQ ID NO: 471019 - RNA, 21 nt, Human
gccucuggccaggggcuaugu

SEQ ID NO: 471020 - RNA, 22 nt, Human
gcggauccagucgcagccgucc

SEQ ID NO: 471021 - RNA, 19 nt, Human
gcggggaggcugagagugc

SEQ ID NO: 471022 - RNA, 19 nt, Human
gcggggaggcugagagugc

SEQ ID NO: 471023 - RNA, 25 nt, Human
gcuggggucaggcagaggugggagc

SEQ ID NO: 471024 - RNA, 25 nt, Human
gcuggggucaggcagaggugggagc

SEQ ID NO: 471025 - RNA, 25 nt, Human
ggaaggacaaaggcacuggggcaga

SEQ ID NO: 471026 - RNA, 25 nt, Human
ggaaggacaaaggcacuggggcaga

SEQ ID NO: 471027 - RNA, 18 nt, Human
ggacugggagggggggcc

SEQ ID NO: 471028 - RNA, 18 nt, Human
ggagccgcaggggagaga

SEQ ID NO: 471029 - RNA, 18 nt, Human
ggagccgcaggggagaga

SEQ ID NO: 471030 - RNA, 18 nt, Human
ggaggcugagagugcuug

SEQ ID NO: 471031 - RNA, 18 nt, Human
ggcagccacaucguucug

SEQ ID NO: 471032 - RNA, 19 nt, Human
ggccuccggcgcggcccaa

SEQ ID NO: 471033 - RNA, 24 nt, Human
gggaagcaucacacugcccgguga

SEQ ID NO: 471034 - RNA, 21 nt, Human
gggaggcugagagugcuuggu

SEQ ID NO: 471035 - RNA, 27 nt, Human
gggcagcgcauggccucggcccggcgg

SEQ ID NO: 471036 - RNA, 20 nt, Human
gggcgggacugggagggggg

SEQ ID NO: 471037 - RNA, 18 nt, Human
ggggucccagcggucccg

SEQ ID NO: 471038 - RNA, 19 nt, Human
guccgcacugggcgcagga

SEQ ID NO: 471039 - RNA, 23 nt, Human
gucgccucauccgggaccuccac

SEQ ID NO: 471040 - RNA, 23 nt, Human
gucuagaaaucgcugguaauccu

SEQ ID NO: 471041 - RNA, 20 nt, Human
guggugggaggaguauggag

SEQ ID NO: 471042 - RNA, 20 nt, Human
guggugggaggaguauggag

SEQ ID NO: 471043 - RNA, 18 nt, Human
uaccacgaucuggcacug

SEQ ID NO: 471044 - RNA, 22 nt, Human
uagcaagaguuccaagaggccg

SEQ ID NO: 471045 - RNA, 22 nt, Human
uagcaagaguuccaagaggccg

SEQ ID NO: 471046 - RNA, 25 nt, Human
uagcaagaguuccaagaggccucag

SEQ ID NO: 471047 - RNA, 25 nt, Human
uagcaagaguuccaagaggccucag

SEQ ID NO: 471048 - RNA, 23 nt, Human
uagcucaguggcaguucugacag

SEQ ID NO: 471049 - RNA, 22 nt, Human
ucccggaggacccccacuugcg

SEQ ID NO: 471050 - RNA, 19 nt, Human
uccugggcccccagggccc

SEQ ID NO: 471051 - RNA, 19 nt, Human
uccugggcccccagggccc

SEQ ID NO: 471052 - RNA, 22 nt, Human
ucgccucauccgggaccuccac

SEQ ID NO: 471053 - RNA, 18 nt, Human
ucgcggguccccggacuc

SEQ ID NO: 471054 - RNA, 23 nt, Human
ucuccugggcccccagggcccca

SEQ ID NO: 471055 - RNA, 21 nt, Human
ucugccgggcagccacaucgu

SEQ ID NO: 471056 - RNA, 19 nt, Human
ucuguaccacgaucuggca

SEQ ID NO: 471057 - RNA, 25 nt, Human
ucuguaccacgaucuggcacugggg

SEQ ID NO: 471058 - RNA, 23 nt, Human
ugacagcugaaggcggggaggcu

SEQ ID NO: 471059 - RNA, 23 nt, Human
ugacagcugaaggcggggaggcu

SEQ ID NO: 471060 - RNA, 20 nt, Human
ugcagucuccuuccuggcuc

SEQ ID NO: 471061 - RNA, 20 nt, Human
ugcagucuccuuccuggcuc

SEQ ID NO: 471062 - RNA, 23 nt, Human
ugcggggucccagcggucccggg

SEQ ID NO: 471063 - RNA, 22 nt, Human
uggagucacacagaggcuccac

SEQ ID NO: 471064 - RNA, 22 nt, Human
uggagucacacagaggcuccac

SEQ ID NO: 471065 - RNA, 21 nt, Human
uggauggccuugcagagcagg

SEQ ID NO: 471066 - RNA, 23 nt, Human
uggcaguucugacagcuugggug

SEQ ID NO: 471067 - RNA, 18 nt, Human
uggccuccggcgcggccc

SEQ ID NO: 471068 - RNA, 20 nt, Human
uggccuccggcgcggcccuc

SEQ ID NO: 471069 - RNA, 22 nt, Human
uggugggaggaguauggaguca

SEQ ID NO: 471070 - RNA, 22 nt, Human
uggugggaggaguauggaguca

SEQ ID NO: 471071 - RNA, 24 nt, Human
ugucuccugggcccccagggcccc

SEQ ID NO: 471072 - RNA, 24 nt, Human
uguggggcugggucagcauguggc

SEQ ID NO: 471073 - RNA, 24 nt, Human
uguggggcugggucagcauguggc

SEQ ID NO: 471074 - RNA, 19 nt, Human
uuccuggcucugaacaggu

SEQ ID NO: 471075 - RNA, 19 nt, Human
uuccuggcucugaacaggu

SEQ ID NO: 471076 - RNA, 20 nt, Human
uuccuggcucugaacagguu

SEQ ID NO: 471077 - RNA, 20 nt, Human
uuccuggcucugaacagguu

SEQ ID NO: 471078 - RNA, 23 nt, Human
uugcaaugguagcugaaggcacu

SEQ ID NO: 471079 - RNA, 24 nt, Human
uuguggugggaggaguauggaguc

SEQ ID NO: 471080 - RNA, 24 nt, Human
uuguggugggaggaguauggaguc

SEQ ID NO: 471081 - RNA, 24 nt, Human
aaaaaagaaaaagaaaauaaagaa

SEQ ID NO: 471082 - RNA, 22 nt, Human
aaaagaaaaagaaaauaaagaa

SEQ ID NO: 471083 - RNA, 25 nt, Human
aaaagagggaacacagagucaauau

SEQ ID NO: 471084 - RNA, 23 nt, Human
aaaaggacagauucagagaagug

SEQ ID NO: 471085 - RNA, 21 nt, Human
aaccacaguaauaauaacuga

SEQ ID NO: 471086 - RNA, 22 nt, Human
aagaaaaagaaaauaaagaaaa

SEQ ID NO: 471087 - RNA, 24 nt, Human
aaggcgcacaucacuuucucuguc

SEQ ID NO: 471088 - RNA, 19 nt, Human
aagggacaaaguaucuaca

SEQ ID NO: 471089 - RNA, 20 nt, Human
aauacugacugucauacaac

SEQ ID NO: 471090 - RNA, 23 nt, Human
aaucacaagaauccacaaaagga

SEQ ID NO: 471091 - RNA, 20 nt, Human
acaucacaaguguguuaaca

SEQ ID NO: 471092 - RNA, 24 nt, Human
acaucacuuucucuguccccccaa

SEQ ID NO: 471093 - RNA, 18 nt, Human
acccccccuuuaaccaag

SEQ ID NO: 471094 - RNA, 22 nt, Human
agaaggcgcacaucacuuucuc

SEQ ID NO: 471095 - RNA, 21 nt, Human
agaguuuuccaaugaccacac

SEQ ID NO: 471096 - RNA, 20 nt, Human
aggguggagggcagggucaa

SEQ ID NO: 471097 - RNA, 24 nt, Human
cacaaaaggacagauucagagaag

SEQ ID NO: 471098 - RNA, 24 nt, Human
cacaagaauccacaaaaggacaga

SEQ ID NO: 471099 - RNA, 22 nt, Human
cacaucacuuucucuguccccc

SEQ ID NO: 471100 - RNA, 23 nt, Human
ccagacagccggugacccccccu

SEQ ID NO: 471101 - RNA, 24 nt, Human
cgcacaucacuuucucuguccccc

SEQ ID NO: 471102 - RNA, 26 nt, Human
cuaagaauuuaaaaaagaaaaagaaa

SEQ ID NO: 471103 - RNA, 21 nt, Human
cucuguccccccaacccugac

SEQ ID NO: 471104 - RNA, 19 nt, Human
cugacugucauacaacuga

SEQ ID NO: 471105 - RNA, 21 nt, Human
gagaaacuguaacucuguaaa

SEQ ID NO: 471106 - RNA, 18 nt, Human
gagaggugaagcugcuuc

SEQ ID NO: 471107 - RNA, 21 nt, Human
gcggcgcugggcgaggcuuua

SEQ ID NO: 471108 - RNA, 21 nt, Human
gcuucggcggcgcugggcgag

SEQ ID NO: 471109 - RNA, 23 nt, Human
ggaaaaucacaagaauccacaaa

SEQ ID NO: 471110 - RNA, 25 nt, Human
ggaaaaucacaagaauccacaaaag

SEQ ID NO: 471111 - RNA, 24 nt, Human
ggugaggaaagcaugugagagaaa

SEQ ID NO: 471112 - RNA, 27 nt, Human
uaaaaaagaaaaagaaaauaaagaaaa

SEQ ID NO: 471113 - RNA, 24 nt, Human
uacaauagaaaaucauuucgugac

SEQ ID NO: 471114 - RNA, 23 nt, Human
uacacuaagaauuuaaaaaagaa

SEQ ID NO: 471115 - RNA, 20 nt, Human
uaguuaaucagaaccacagu

SEQ ID NO: 471116 - RNA, 21 nt, Human
uaguuuugaacagaacagaua

SEQ ID NO: 471117 - RNA, 25 nt, Human
uccgaacaaaauaaaggcuuucaaa

SEQ ID NO: 471118 - RNA, 19 nt, Human
uccugggugaaucuguggc

SEQ ID NO: 471119 - RNA, 25 nt, Human
ugagagaaacuguaacucuguaaac

SEQ ID NO: 471120 - RNA, 19 nt, Human
ugggagaaaguuggagagg

SEQ ID NO: 471121 - RNA, 21 nt, Human
uggggaggguggagggcaggg

SEQ ID NO: 471122 - RNA, 18 nt, Human
ugggugaagaaugaucuu

SEQ ID NO: 471123 - RNA, 22 nt, Human
uguaacucuguaaacaauacua

SEQ ID NO: 471124 - RNA, 18 nt, Human
ugucauacaacugaaaca

SEQ ID NO: 471125 - RNA, 22 nt, Human
uucaaauguuuuaugaagagac

SEQ ID NO: 471126 - RNA, 22 nt, Human
uucugugaccuccugggugaau

SEQ ID NO: 471127 - RNA, 24 nt, Human
uuucccuugcugucauucugugac

SEQ ID NO: 471128 - RNA, 18 nt, Human
uuuuuuuuuuuuaugggu

SEQ ID NO: 471129 - RNA, 24 nt, Human
uuuuuuuuuuuuuuuuuuuauggg

SEQ ID NO: 471130 - RNA, 18 nt, Human
aaaagaccuggccugaac

SEQ ID NO: 471131 - RNA, 24 nt, Human
aaagugcugggauuacaggcguga

SEQ ID NO: 471132 - RNA, 19 nt, Human
aagugcugggauuacaggc

SEQ ID NO: 471133 - RNA, 19 nt, Human
aagugcugggauuacaggc

SEQ ID NO: 471134 - RNA, 26 nt, Human
aagugcugggauuacaggcgugagcc

SEQ ID NO: 471135 - RNA, 25 nt, Human
accucccggguucacaccauucucc

SEQ ID NO: 471136 - RNA, 18 nt, Human
acgggguuucaccauguu

SEQ ID NO: 471137 - RNA, 19 nt, Human
acgggguuucaccauguua

SEQ ID NO: 471138 - RNA, 20 nt, Human
acgggguuucaccauguuag

SEQ ID NO: 471139 - RNA, 24 nt, Human
acgggguuucaccauguuagccag

SEQ ID NO: 471140 - RNA, 25 nt, Human
aggaaugcagagagcagccgguacc

SEQ ID NO: 471141 - RNA, 19 nt, Human
aggcagaugccccgagccc

SEQ ID NO: 471142 - RNA, 18 nt, Human
aggcuucugcacuguggc

SEQ ID NO: 471143 - RNA, 18 nt, Human
aggcuucugcacuguggc

SEQ ID NO: 471144 - RNA, 25 nt, Human
agguuccccaaggcaacucccuguc

SEQ ID NO: 471145 - RNA, 20 nt, Human
agugcaguggcgcgaucucg

SEQ ID NO: 471146 - RNA, 23 nt, Human
agugcaguggcgcgaucucggcu

SEQ ID NO: 471147 - RNA, 24 nt, Human
agugcaguggcgcgaucucggcuc

SEQ ID NO: 471148 - RNA, 18 nt, Human
agugcugggauuacaggc

SEQ ID NO: 471149 - RNA, 21 nt, Human
auggaagguaacuccaggcag

SEQ ID NO: 471150 - RNA, 24 nt, Human
caaaagaccuggccugaacccauc

SEQ ID NO: 471151 - RNA, 24 nt, Human
caaagugcugggauuacaggcgug

SEQ ID NO: 471152 - RNA, 22 nt, Human
caccauguuagccaggacgguc

SEQ ID NO: 471153 - RNA, 23 nt, Human
cacccccagccuguguccaagcc

SEQ ID NO: 471154 - RNA, 24 nt, Human
cacccccagccuguguccaagccc

SEQ ID NO: 471155 - RNA, 19 nt, Human
caccucccggguucacacc

SEQ ID NO: 471156 - RNA, 19 nt, Human
caccuccucuuggcacacc

SEQ ID NO: 471157 - RNA, 22 nt, Human
caccuccucuuggcacaccaaa

SEQ ID NO: 471158 - RNA, 21 nt, Human
cagcagcugcaaggagucgga

SEQ ID NO: 471159 - RNA, 21 nt, Human
caggugcccgccacaacgccc

SEQ ID NO: 471160 - RNA, 22 nt, Human
ccaaagugcugggauuacaggc

SEQ ID NO: 471161 - RNA, 22 nt, Human
ccaaagugcugggauuacaggc

SEQ ID NO: 471162 - RNA, 24 nt, Human
ccaaagugcugggauuacaggcgu

SEQ ID NO: 471163 - RNA, 18 nt, Human
ccacaaggggagggaugc

SEQ ID NO: 471164 - RNA, 18 nt, Human
ccacugcacccaguuggg

SEQ ID NO: 471165 - RNA, 18 nt, Human
ccacugcacccaguuggg

SEQ ID NO: 471166 - RNA, 19 nt, Human
ccacugcacccaguuggga

SEQ ID NO: 471167 - RNA, 20 nt, Human
ccacugcacccaguugggau

SEQ ID NO: 471168 - RNA, 21 nt, Human
cccaaggcaacucccugucau

SEQ ID NO: 471169 - RNA, 22 nt, Human
cccaccuccucuuggcacacca

SEQ ID NO: 471170 - RNA, 22 nt, Human
cccagccuggagugcaguggcg

SEQ ID NO: 471171 - RNA, 22 nt, Human
ccccagccuguguccaagcccc

SEQ ID NO: 471172 - RNA, 18 nt, Human
ccccgagcccaggaaaga

SEQ ID NO: 471173 - RNA, 24 nt, Human
cccuagcaugcgcccacccccaau

SEQ ID NO: 471174 - RNA, 24 nt, Human
cgccucggccucccaaagugcugg

SEQ ID NO: 471175 - RNA, 24 nt, Human
cgggguuucaccauguuagccagg

SEQ ID NO: 471176 - RNA, 22 nt, Human
cuacuccuggccaucaaaagac

SEQ ID NO: 471177 - RNA, 24 nt, Human
cucacuggaagcuccaccucccgg

SEQ ID NO: 471178 - RNA, 24 nt, Human
cucagccuccggaguagcugggac

SEQ ID NO: 471179 - RNA, 21 nt, Human
cucccggguucacaccauucu

SEQ ID NO: 471180 - RNA, 23 nt, Human
cucccucagccuccggaguagcu

SEQ ID NO: 471181 - RNA, 19 nt, Human
cucccugucaucuacuccu

SEQ ID NO: 471182 - RNA, 20 nt, Human
cucugucgcccagccuggag

SEQ ID NO: 471183 - RNA, 27 nt, Human
cugaacccacaaggggagggaugccag

SEQ ID NO: 471184 - RNA, 24 nt, Human
cuggaagcuccaccucccggguuc

SEQ ID NO: 471185 - RNA, 24 nt, Human
gaagguaacuccaggcagaugccc

SEQ ID NO: 471186 - RNA, 21 nt, Human
gaccuggccugaacccauccc

SEQ ID NO: 471187 - RNA, 24 nt, Human
gagacgggguuucaccauguuagc

SEQ ID NO: 471188 - RNA, 18 nt, Human
gauuacaggcgugagcca

SEQ ID NO: 471189 - RNA, 22 nt, Human
gauuacaggcgugagccacugc

SEQ ID NO: 471190 - RNA, 23 nt, Human
gauuacaggcgugagccacugca

SEQ ID NO: 471191 - RNA, 18 nt, Human
gcagguuaugucuggaag

SEQ ID NO: 471192 - RNA, 23 nt, Human
gcccggcuaauuuuuuguauuuu

SEQ ID NO: 471193 - RNA, 19 nt, Human
gcgcccacccccagccugu

SEQ ID NO: 471194 - RNA, 24 nt, Human
ggagucggagagacuuggcaggug

SEQ ID NO: 471195 - RNA, 25 nt, Human
ggggagggaugccagcuuccacugg

SEQ ID NO: 471196 - RNA, 23 nt, Human
gggguuucaccauguuagccagg

SEQ ID NO: 471197 - RNA, 25 nt, Human
ggugggcuaggucgaggcuggggcu

SEQ ID NO: 471198 - RNA, 23 nt, Human
guagagacgggguuucaccaugu

SEQ ID NO: 471199 - RNA, 24 nt, Human
gugcaggcuucugcacuguggccc

SEQ ID NO: 471200 - RNA, 31 nt, Human
uaauuuuuuguauuuuuuuuuuuaguagagg

SEQ ID NO: 471201 - RNA, 19 nt, Human
uacaggcgugagccacugc

SEQ ID NO: 471202 - RNA, 24 nt, Human
uacaggcgugagccacugcaccca

SEQ ID NO: 471203 - RNA, 22 nt, Human
uagagacgggguuucaccaugu

SEQ ID NO: 471204 - RNA, 18 nt, Human
uagcaugcgcccaccccc

SEQ ID NO: 471205 - RNA, 24 nt, Human
uaguagagacgggguuucaccaug

SEQ ID NO: 471206 - RNA, 25 nt, Human
uaguagagacgggguuucaccaugu

SEQ ID NO: 471207 - RNA, 22 nt, Human
ucaaaccacagcagguagccau

SEQ ID NO: 471208 - RNA, 21 nt, Human
ucacaccauucuccucccuca

SEQ ID NO: 471209 - RNA, 24 nt, Human
ucaccauguuagccaggacggucu

SEQ ID NO: 471210 - RNA, 24 nt, Human
ucacuggaagcuccaccucccggg

SEQ ID NO: 471211 - RNA, 25 nt, Human
ucacuggaagcuccaccucccgggu

SEQ ID NO: 471212 - RNA, 24 nt, Human
ucccaaagugcugggauuacaggc

SEQ ID NO: 471213 - RNA, 19 nt, Human
ucccaucuacccaccuccu

SEQ ID NO: 471214 - RNA, 21 nt, Human
ucccggguucacaccauucuc

SEQ ID NO: 471215 - RNA, 21 nt, Human
ucccuagcaugcgcccacccc

SEQ ID NO: 471216 - RNA, 21 nt, Human
ucccucagccuccggaguagc

SEQ ID NO: 471217 - RNA, 24 nt, Human
ucccucagccuccggaguagcugg

SEQ ID NO: 471218 - RNA, 24 nt, Human
ucccugucaucuacuccuggccau

SEQ ID NO: 471219 - RNA, 23 nt, Human
uccugaccuauugauccgcccgc

SEQ ID NO: 471220 - RNA, 22 nt, Human
ucgcccagccuggagugcagug

SEQ ID NO: 471221 - RNA, 26 nt, Human
ucuacccaccuccucuuggcacacca

SEQ ID NO: 471222 - RNA, 24 nt, Human
ucucgcucugucgcccagccugga

SEQ ID NO: 471223 - RNA, 22 nt, Human
ucugcacuguggcccugagagg

SEQ ID NO: 471224 - RNA, 20 nt, Human
ugaacccauccccaugccag

SEQ ID NO: 471225 - RNA, 25 nt, Human
ugacagcagcugcaaggagucggag

SEQ ID NO: 471226 - RNA, 22 nt, Human
ugagacggagucucgcucuguc

SEQ ID NO: 471227 - RNA, 23 nt, Human
ugcgcccacccccagccuguguc

SEQ ID NO: 471228 - RNA, 24 nt, Human
ugcugggauuacaggcgugagcca

SEQ ID NO: 471229 - RNA, 23 nt, Human
uggagugcaguggcgcgaucucg

SEQ ID NO: 471230 - RNA, 24 nt, Human
uggagugcaguggcgcgaucucgg

SEQ ID NO: 471231 - RNA, 18 nt, Human
ugggauuacaggcgugag

SEQ ID NO: 471232 - RNA, 19 nt, Human
ugggauuacaggcgugagc

SEQ ID NO: 471233 - RNA, 21 nt, Human
ugggauuacaggcgugagcca

SEQ ID NO: 471234 - RNA, 22 nt, Human
ugggauuacaggcgugagccac

SEQ ID NO: 471235 - RNA, 22 nt, Human
ugggauuacaggcgugagccac

SEQ ID NO: 471236 - RNA, 24 nt, Human
ugggauuacaggcgugagccacug

SEQ ID NO: 471237 - RNA, 26 nt, Human
ugggauuacaggcgugagccacugca

SEQ ID NO: 471238 - RNA, 30 nt, Human
ugggccugggggaccgagccccacucccuc

SEQ ID NO: 471239 - RNA, 21 nt, Human
ugucgcccagccuggagugca

SEQ ID NO: 471240 - RNA, 21 nt, Human
ugugcaggcuucugcacugug

SEQ ID NO: 471241 - RNA, 18 nt, Human
uuaguagagacgggguuu

SEQ ID NO: 471242 - RNA, 22 nt, Human
uuaguagagacgggguuucacc

SEQ ID NO: 471243 - RNA, 24 nt, Human
uuaguagagacgggguuucaccau

SEQ ID NO: 471244 - RNA, 23 nt, Human
uucaugcagguuaugucuggaag

SEQ ID NO: 471245 - RNA, 24 nt, Human
uugauccgcccgccucggccuccc

SEQ ID NO: 471246 - RNA, 22 nt, Human
uuucaccauguuagccaggacg

SEQ ID NO: 471247 - RNA, 24 nt, Human
uuuuuaguagagacgggguuucac

SEQ ID NO: 471248 - RNA, 25 nt, Human
uuuuuauuuauguauuuauuuuuuu

SEQ ID NO: 471249 - RNA, 29 nt, Human
uuuuuguauuuuuuuuuuuaguagagaag

SEQ ID NO: 471250 - RNA, 23 nt, Human
uuuuuuaguagagacgggguuuc

SEQ ID NO: 471251 - RNA, 30 nt, Human
uuuuuuguauuuuuuuuuuuaguagagacg

SEQ ID NO: 471252 - RNA, 24 nt, Human
uuuuuuuuuuuaguagagacgggg

SEQ ID NO: 471253 - RNA, 21 nt, Human
uuuuuuuuuuuuauggguggu

SEQ ID NO: 471254 - RNA, 24 nt, Human
uuuuuuuuuuuuuuuuuuuauggg

SEQ ID NO: 471255 - RNA, 21 nt, Human
aaauguccucuuaccucuggg

SEQ ID NO: 471256 - RNA, 24 nt, Human
aauguccucuuaccucuggguggc

SEQ ID NO: 471257 - RNA, 19 nt, Human
acagcugccccgugccuca

SEQ ID NO: 471258 - RNA, 19 nt, Human
acaggaaaaugaggcagag

SEQ ID NO: 471259 - RNA, 21 nt, Human
accaagccuguacccaaagac

SEQ ID NO: 471260 - RNA, 20 nt, Human
accuagggcccucagaccca

SEQ ID NO: 471261 - RNA, 20 nt, Human
agagagcagcagggaggaac

SEQ ID NO: 471262 - RNA, 18 nt, Human
agaggagcuacaggaaaa

SEQ ID NO: 471263 - RNA, 23 nt, Human
agcagccaaugagcaaacagaac

SEQ ID NO: 471264 - RNA, 21 nt, Human
agccaaugagcaaacagaacc

SEQ ID NO: 471265 - RNA, 19 nt, Human
aggaaaggugggcauggua

SEQ ID NO: 471266 - RNA, 22 nt, Human
aggaacgggaacagggcagggc

SEQ ID NO: 471267 - RNA, 21 nt, Human
aggagcuacaggaaaaugagg

SEQ ID NO: 471268 - RNA, 20 nt, Human
aggcagaggggcaggcuugg

SEQ ID NO: 471269 - RNA, 22 nt, Human
aggcagaggggcaggcuugggg

SEQ ID NO: 471270 - RNA, 22 nt, Human
aggcagaggggcaggcuugggg

SEQ ID NO: 471271 - RNA, 25 nt, Human
aggcagaggggcaggcuugggggaa

SEQ ID NO: 471272 - RNA, 23 nt, Human
aggcaggagcggcugccucaggc

SEQ ID NO: 471273 - RNA, 22 nt, Human
aggcagggcaggcacagcugcc

SEQ ID NO: 471274 - RNA, 19 nt, Human
aggcuugggggaaggcagc

SEQ ID NO: 471275 - RNA, 18 nt, Human
agggcuucuaggacuucc

SEQ ID NO: 471276 - RNA, 18 nt, Human
aggggcaggcuuggggga

SEQ ID NO: 471277 - RNA, 22 nt, Human
caagccuguacccaaagaccug

SEQ ID NO: 471278 - RNA, 18 nt, Human
cacaaggaagggccccau

SEQ ID NO: 471279 - RNA, 22 nt, Human
cacccauaucuuccuccccacu

SEQ ID NO: 471280 - RNA, 19 nt, Human
cagaagccuuugccugggu

SEQ ID NO: 471281 - RNA, 23 nt, Human
cagcagccaaugagcaaacagaa

SEQ ID NO: 471282 - RNA, 18 nt, Human
cagcagccucccgaggcc

SEQ ID NO: 471283 - RNA, 21 nt, Human
caggagcucacacagagcuaa

SEQ ID NO: 471284 - RNA, 23 nt, Human
ccaagaaaccggcaggagcucac

SEQ ID NO: 471285 - RNA, 23 nt, Human
ccacgcucacccacacuggccca

SEQ ID NO: 471286 - RNA, 22 nt, Human
ccagcagccucccgaggccugg

SEQ ID NO: 471287 - RNA, 22 nt, Human
ccauaucuuccuccccacucug

SEQ ID NO: 471288 - RNA, 23 nt, Human
cccaccaagccuguacccaaaga

SEQ ID NO: 471289 - RNA, 22 nt, Human
cccagggggaccaagggcuucu

SEQ ID NO: 471290 - RNA, 18 nt, Human
cccauaucuuccucccca

SEQ ID NO: 471291 - RNA, 22 nt, Human
ccccuuggaugaacacagcagc

SEQ ID NO: 471292 - RNA, 21 nt, Human
cccucacuucugggagaaccc

SEQ ID NO: 471293 - RNA, 18 nt, Human
ccucagacccagggggac

SEQ ID NO: 471294 - RNA, 21 nt, Human
ccucccaccaagccuguaccc

SEQ ID NO: 471295 - RNA, 21 nt, Human
ccucuggguggcccugggccc

SEQ ID NO: 471296 - RNA, 22 nt, Human
ccuguacccaaagaccuggggc

SEQ ID NO: 471297 - RNA, 23 nt, Human
cucaagggauggagggaaaggcc

SEQ ID NO: 471298 - RNA, 24 nt, Human
cucaagggauggagggaaaggccc

SEQ ID NO: 471299 - RNA, 22 nt, Human
cucacacagagcuaaugcuaaa

SEQ ID NO: 471300 - RNA, 19 nt, Human
cucccaccaagccuguacc

SEQ ID NO: 471301 - RNA, 18 nt, Human
cucccgaggccuggccca

SEQ ID NO: 471302 - RNA, 23 nt, Human
cucugggacugacugacagccaa

SEQ ID NO: 471303 - RNA, 18 nt, Human
cucuggguggcccugggc

SEQ ID NO: 471304 - RNA, 24 nt, Human
cugacagccaagaaaccggcagga

SEQ ID NO: 471305 - RNA, 19 nt, Human
cugguacccaccaccccug

SEQ ID NO: 471306 - RNA, 20 nt, Human
cuuggcucacagaugggggg

SEQ ID NO: 471307 - RNA, 22 nt, Human
gaaccagaggagcuacaggaaa

SEQ ID NO: 471308 - RNA, 27 nt, Human
gagagcagcagggaggaaccgguaccc

SEQ ID NO: 471309 - RNA, 19 nt, Human
gagcagcagggaggaacgg

SEQ ID NO: 471310 - RNA, 19 nt, Human
gagcggcugccucaggcag

SEQ ID NO: 471311 - RNA, 24 nt, Human
gagcggcugccucaggcagaggca

SEQ ID NO: 471312 - RNA, 19 nt, Human
gaggcucuccaugaccuag

SEQ ID NO: 471313 - RNA, 18 nt, Human
gcagaggggcaggcuugg

SEQ ID NO: 471314 - RNA, 22 nt, Human
gcaggcacagcugccccgugcc

SEQ ID NO: 471315 - RNA, 18 nt, Human
ggagggaaaggccccuca

SEQ ID NO: 471316 - RNA, 20 nt, Human
ggauggagggaaaggccccu

SEQ ID NO: 471317 - RNA, 21 nt, Human
ggcuugggggaaggcagcauu

SEQ ID NO: 471318 - RNA, 20 nt, Human
gggaccaagggcuucuagga

SEQ ID NO: 471319 - RNA, 22 nt, Human
gggaccaagggcuucuaggacu

SEQ ID NO: 471320 - RNA, 18 nt, Human
gggcaggcagagagcagc

SEQ ID NO: 471321 - RNA, 19 nt, Human
ggggaccaagggcuucuag

SEQ ID NO: 471322 - RNA, 19 nt, Human
gguggcccugggccccagg

SEQ ID NO: 471323 - RNA, 21 nt, Human
guggcccugggccccaggguu

SEQ ID NO: 471324 - RNA, 20 nt, Human
uacaggaaaaugaggcagag

SEQ ID NO: 471325 - RNA, 18 nt, Human
ucaagggauggagggaaa

SEQ ID NO: 471326 - RNA, 20 nt, Human
ucacuucugggagaaccccc

SEQ ID NO: 471327 - RNA, 23 nt, Human
uccaugaccuagggcccucagac

SEQ ID NO: 471328 - RNA, 21 nt, Human
ucucugguacccaccaccccu

SEQ ID NO: 471329 - RNA, 21 nt, Human
ugaggcagaggggcaggcuug

SEQ ID NO: 471330 - RNA, 19 nt, Human
ugccucaagggauggaggg

SEQ ID NO: 471331 - RNA, 20 nt, Human
ugccuggguccaaaggccag

SEQ ID NO: 471332 - RNA, 24 nt, Human
ugccuggguccaaaggccagggac

SEQ ID NO: 471333 - RNA, 20 nt, Human
ugggagaacccccuuggaug

SEQ ID NO: 471334 - RNA, 24 nt, Human
uguuaauaaauuggcaacacaagg

SEQ ID NO: 471335 - RNA, 23 nt, Human
uuccuccccacucugggacugac

SEQ ID NO: 471336 - RNA, 25 nt, Human
uuggaugaacacagcagccaaugag

SEQ ID NO: 471337 - RNA, 21 nt, Human
acuggcgggcuggcucuuuuu

SEQ ID NO: 471338 - RNA, 23 nt, Human
agagacuggcgggcuggcucuuu

SEQ ID NO: 471339 - RNA, 18 nt, Human
caaggagaaugcuucucu

SEQ ID NO: 471340 - RNA, 19 nt, Human
cacuuuaaaucagugguuc

SEQ ID NO: 471341 - RNA, 20 nt, Human
ccaaggagaaugcuucucuu

SEQ ID NO: 471342 - RNA, 21 nt, Human
cugaagggcuuuugugacuuu

SEQ ID NO: 471343 - RNA, 28 nt, Human
cuggcgggcuggcucuuuucccccuggg

SEQ ID NO: 471344 - RNA, 18 nt, Human
ggcuuuugugacuuuggu

SEQ ID NO: 471345 - RNA, 24 nt, Human
uauuucucccucugauccgcugga

SEQ ID NO: 471346 - RNA, 19 nt, Human
ucacaguauucugaaacug

SEQ ID NO: 471347 - RNA, 23 nt, Human
ucccugugagcaagaugaucuga

SEQ ID NO: 471348 - RNA, 18 nt, Human
ucugaaacaccuucccaa

SEQ ID NO: 471349 - RNA, 24 nt, Human
ugaaacugguaucggagagacugg

SEQ ID NO: 471350 - RNA, 19 nt, Human
ugaucugaaacaccuuccc

SEQ ID NO: 471351 - RNA, 20 nt, Human
ugguaucggagagacuggcg

SEQ ID NO: 471352 - RNA, 18 nt, Human
ugguucuguucucuggag

SEQ ID NO: 471353 - RNA, 18 nt, Human
uucacaguauucugaaac

SEQ ID NO: 471354 - RNA, 24 nt, Human
uuucugaagggcuuuugugacuuu

SEQ ID NO: 471355 - RNA, 24 nt, Human
aaggagcccccggcgggagcaggc

SEQ ID NO: 471356 - RNA, 19 nt, Human
acccagccaacccccucag

SEQ ID NO: 471357 - RNA, 18 nt, Human
agaaagaggcuugcagcg

SEQ ID NO: 471358 - RNA, 20 nt, Human
agacccagccaacccccuca

SEQ ID NO: 471359 - RNA, 23 nt, Human
agccuggaucccaaaugcugcag

SEQ ID NO: 471360 - RNA, 24 nt, Human
agggaagaccaggggcuccuuuga

SEQ ID NO: 471361 - RNA, 22 nt, Human
agucacacagggaagaccaggg

SEQ ID NO: 471362 - RNA, 22 nt, Human
auaaaacacuaguaaaauaggg

SEQ ID NO: 471363 - RNA, 20 nt, Human
auggaaagaacugagucaca

SEQ ID NO: 471364 - RNA, 21 nt, Human
caaggagcccccggcgggagc

SEQ ID NO: 471365 - RNA, 22 nt, Human
caccugagagccugagggcggg

SEQ ID NO: 471366 - RNA, 19 nt, Human
cacuggggcggccgccucc

SEQ ID NO: 471367 - RNA, 23 nt, Human
cagcacuggggcggccgccuccu

SEQ ID NO: 471368 - RNA, 21 nt, Human
caggaaggccacguuccgaug

SEQ ID NO: 471369 - RNA, 20 nt, Human
ccaagcagccacggggaagc

SEQ ID NO: 471370 - RNA, 19 nt, Human
cccaggugggugggggugg

SEQ ID NO: 471371 - RNA, 22 nt, Human
ccccucagcgaccacagugccu

SEQ ID NO: 471372 - RNA, 21 nt, Human
ccgacagcugcacgguccccg

SEQ ID NO: 471373 - RNA, 20 nt, Human
ccgccaccagggcugagggu

SEQ ID NO: 471374 - RNA, 24 nt, Human
ccggccgagcaaggagcccccggc

SEQ ID NO: 471375 - RNA, 21 nt, Human
cgcccgcuucucugccgccac

SEQ ID NO: 471376 - RNA, 21 nt, Human
cuacaaauucucuguaucugg

SEQ ID NO: 471377 - RNA, 19 nt, Human
cugcacgguccccgccucu

SEQ ID NO: 471378 - RNA, 21 nt, Human
cugcagcccacguagcgcuaa

SEQ ID NO: 471379 - RNA, 21 nt, Human
cuuugaggaagagugagguca

SEQ ID NO: 471380 - RNA, 18 nt, Human
gacagcugcacggucccc

SEQ ID NO: 471381 - RNA, 22 nt, Human
gauggaaagaacugagucacac

SEQ ID NO: 471382 - RNA, 20 nt, Human
gccucgcccgcuucucugcc

SEQ ID NO: 471383 - RNA, 25 nt, Human
gccuggaucccaaaugcugcagccc

SEQ ID NO: 471384 - RNA, 26 nt, Human
gcuaauccaugucaccaagcagccac

SEQ ID NO: 471385 - RNA, 19 nt, Human
gcuccuuugaggaagagug

SEQ ID NO: 471386 - RNA, 23 nt, Human
gggcagugugggcucauggcacu

SEQ ID NO: 471387 - RNA, 19 nt, Human
ggguggggguggccuucag

SEQ ID NO: 471388 - RNA, 18 nt, Human
uaauccgagguuuucccu

SEQ ID NO: 471389 - RNA, 19 nt, Human
uaucuggcauauaaaaacu

SEQ ID NO: 471390 - RNA, 18 nt, Human
ucaauaucugagcuggac

SEQ ID NO: 471391 - RNA, 25 nt, Human
ucaccaagcagccacggggaagcca

SEQ ID NO: 471392 - RNA, 22 nt, Human
uccaugucaccaagcagccacg

SEQ ID NO: 471393 - RNA, 19 nt, Human
ucggggucccacauggucc

SEQ ID NO: 471394 - RNA, 18 nt, Human
ucucuuaaagcaaaacau

SEQ ID NO: 471395 - RNA, 24 nt, Human
ucuuucagguccaucgggguccca

SEQ ID NO: 471396 - RNA, 18 nt, Human
ugacacacacguuucccc

SEQ ID NO: 471397 - RNA, 22 nt, Human
ugaggucauauuuuuauugcuu

SEQ ID NO: 471398 - RNA, 18 nt, Human
ugccccucuagguagccu

SEQ ID NO: 471399 - RNA, 19 nt, Human
ugccccucuagguagccug

SEQ ID NO: 471400 - RNA, 21 nt, Human
ugccucgcccgcuucucugcc

SEQ ID NO: 471401 - RNA, 20 nt, Human
uggaucccaaaugcugcagc

SEQ ID NO: 471402 - RNA, 24 nt, Human
uggcacucagacccagccaacccc

SEQ ID NO: 471403 - RNA, 25 nt, Human
ugggaugguaucacuguggccuggg

SEQ ID NO: 471404 - RNA, 19 nt, Human
ugguaucacuguggccugg

SEQ ID NO: 471405 - RNA, 24 nt, Human
ugucacagucagcgcagaaagagg

SEQ ID NO: 471406 - RNA, 22 nt, Human
uuaaauagugaaauaccaacca

SEQ ID NO: 471407 - RNA, 24 nt, Human
uuaguuucccaggugggugggggu

SEQ ID NO: 471408 - RNA, 24 nt, Human
aaaagaugugcaaacaacaaagaa

SEQ ID NO: 471409 - RNA, 22 nt, Human
aaagaugcaacacucaaccccc

SEQ ID NO: 471410 - RNA, 21 nt, Human
aaagcaccuuccaguuccucc

SEQ ID NO: 471411 - RNA, 19 nt, Human
aacacucaacccccgcacg

SEQ ID NO: 471412 - RNA, 22 nt, Human
aaccagaccuaaagcaccuucc

SEQ ID NO: 471413 - RNA, 24 nt, Human
aauacauagaaaaaguacaaauaa

SEQ ID NO: 471414 - RNA, 25 nt, Human
acaacaaagaaugcccgacccugaa

SEQ ID NO: 471415 - RNA, 19 nt, Human
acaagaaaggcaaagaugc

SEQ ID NO: 471416 - RNA, 21 nt, Human
acaggauuauaauacauagaa

SEQ ID NO: 471417 - RNA, 19 nt, Human
acagugagggacgaguggc

SEQ ID NO: 471418 - RNA, 20 nt, Human
accaccuccuccuccuccug

SEQ ID NO: 471419 - RNA, 20 nt, Human
acgcugaagagcagguagac

SEQ ID NO: 471420 - RNA, 21 nt, Human
agauccuacacuuaaagcuca

SEQ ID NO: 471421 - RNA, 21 nt, Human
agauggagguugugugcuugu

SEQ ID NO: 471422 - RNA, 22 nt, Human
aggacagugagggacgaguggc

SEQ ID NO: 471423 - RNA, 22 nt, Human
augcaacacucaacccccgcac

SEQ ID NO: 471424 - RNA, 22 nt, Human
caaccagcagcaucauccauca

SEQ ID NO: 471425 - RNA, 19 nt, Human
caacgacaagaaaggcaaa

SEQ ID NO: 471426 - RNA, 21 nt, Human
cacaauuucugccaaaauaga

SEQ ID NO: 471427 - RNA, 25 nt, Human
caccccacaaaaaugcccacuccca

SEQ ID NO: 471428 - RNA, 22 nt, Human
caccuccugggugucccgggag

SEQ ID NO: 471429 - RNA, 21 nt, Human
cacucccauugacgcugaaga

SEQ ID NO: 471430 - RNA, 21 nt, Human
cagaccccggcacuggugccg

SEQ ID NO: 471431 - RNA, 19 nt, Human
cagcauuauugguauaaaa

SEQ ID NO: 471432 - RNA, 21 nt, Human
caggaaaaaaaauuagacaca

SEQ ID NO: 471433 - RNA, 21 nt, Human
caggacagugagggacgagug

SEQ ID NO: 471434 - RNA, 21 nt, Human
cagguagacgggccccuugcu

SEQ ID NO: 471435 - RNA, 21 nt, Human
ccacgggggacuucaucucgg

SEQ ID NO: 471436 - RNA, 20 nt, Human
ccaggacagugagggacgag

SEQ ID NO: 471437 - RNA, 19 nt, Human
cccaacaccauccagccca

SEQ ID NO: 471438 - RNA, 21 nt, Human
cccaacaccauccagcccaau

SEQ ID NO: 471439 - RNA, 23 nt, Human
cccacaaaaaugcccacucccau

SEQ ID NO: 471440 - RNA, 19 nt, Human
ccccaacaccauccagccc

SEQ ID NO: 471441 - RNA, 20 nt, Human
ccccaacaccauccagccca

SEQ ID NO: 471442 - RNA, 23 nt, Human
cccgacccugaaccagaccuaaa

SEQ ID NO: 471443 - RNA, 26 nt, Human
cccugaaccagaccuaaagcaccuuc

SEQ ID NO: 471444 - RNA, 19 nt, Human
ccuugcgcaccaccuccuc

SEQ ID NO: 471445 - RNA, 18 nt, Human
cgacccugaaccagaccu

SEQ ID NO: 471446 - RNA, 20 nt, Human
cucacagaauaucaaaugac

SEQ ID NO: 471447 - RNA, 24 nt, Human
cuccacacaucaugccccaacacc

SEQ ID NO: 471448 - RNA, 20 nt, Human
cuccuccuggcgcuucucgu

SEQ ID NO: 471449 - RNA, 19 nt, Human
cucggccaccccacaaaaa

SEQ ID NO: 471450 - RNA, 20 nt, Human
cucuaaaugacaaaaugacu

SEQ ID NO: 471451 - RNA, 21 nt, Human
cucuaaaugacaaaaugacuc

SEQ ID NO: 471452 - RNA, 25 nt, Human
cuuccaguuccuccacacaucaugc

SEQ ID NO: 471453 - RNA, 18 nt, Human
gaacugauaauuuucagc

SEQ ID NO: 471454 - RNA, 23 nt, Human
gcaaacaacaaagaaugcccgac

SEQ ID NO: 471455 - RNA, 18 nt, Human
gcaacagaucuggaagga

SEQ ID NO: 471456 - RNA, 21 nt, Human
gccccaacaccauccagccca

SEQ ID NO: 471457 - RNA, 19 nt, Human
gcccgcuuuucagauucca

SEQ ID NO: 471458 - RNA, 20 nt, Human
gcucuaaauacaagucuaau

SEQ ID NO: 471459 - RNA, 23 nt, Human
gggcaaaaaucaacgacaagaaa

SEQ ID NO: 471460 - RNA, 24 nt, Human
uaaaaagaugugcaaacaacaaag

SEQ ID NO: 471461 - RNA, 18 nt, Human
uaaaaagcaauaaaggga

SEQ ID NO: 471462 - RNA, 24 nt, Human
uaaaaagcaauaaagggaugagaa

SEQ ID NO: 471463 - RNA, 25 nt, Human
uaacaaaaauccacuggacaucaaa

SEQ ID NO: 471464 - RNA, 21 nt, Human
uaagcugacaaaaaaaauacu

SEQ ID NO: 471465 - RNA, 21 nt, Human
uaaggcuuguauucuccuaga

SEQ ID NO: 471466 - RNA, 21 nt, Human
uaagggcaccuccuggguguc

SEQ ID NO: 471467 - RNA, 25 nt, Human
uaucaaaugacugaauuuaagaaca

SEQ ID NO: 471468 - RNA, 19 nt, Human
ucaacgacaagaaaggcaa

SEQ ID NO: 471469 - RNA, 22 nt, Human
ucaacgacaagaaaggcaaaga

SEQ ID NO: 471470 - RNA, 19 nt, Human
ucagagggucuuuuggagc

SEQ ID NO: 471471 - RNA, 24 nt, Human
ucagcacuugcuuggcuuuuucua

SEQ ID NO: 471472 - RNA, 24 nt, Human
ucauuccacaaaacaugacagcaa

SEQ ID NO: 471473 - RNA, 19 nt, Human
uccaggacuccauucaggc

SEQ ID NO: 471474 - RNA, 20 nt, Human
uccugggugucccgggaguu

SEQ ID NO: 471475 - RNA, 18 nt, Human
ucgaagauggagguugug

SEQ ID NO: 471476 - RNA, 23 nt, Human
ucuagcagaaaaaucaaaugggu

SEQ ID NO: 471477 - RNA, 19 nt, Human
ucugugcuacaccagaugg

SEQ ID NO: 471478 - RNA, 18 nt, Human
ugaaauuuacaaccagca

SEQ ID NO: 471479 - RNA, 19 nt, Human
ugaaccagaccuaaagcac

SEQ ID NO: 471480 - RNA, 21 nt, Human
ugaaccagaccuaaagcaccu

SEQ ID NO: 471481 - RNA, 26 nt, Human
ugagaccagaccccggcacuggugcc

SEQ ID NO: 471482 - RNA, 23 nt, Human
ugagcucaacggucccucauucc

SEQ ID NO: 471483 - RNA, 24 nt, Human
ugucguccaggacuccauucaggc

SEQ ID NO: 471484 - RNA, 20 nt, Human
ugugcaaacaacaaagaaug

SEQ ID NO: 471485 - RNA, 22 nt, Human
ugugcaaacaacaaagaaugcc

SEQ ID NO: 471486 - RNA, 22 nt, Human
ugugcaaacaacaaagaaugcc

SEQ ID NO: 471487 - RNA, 20 nt, Human
ugugugcuuguaggaacuga

SEQ ID NO: 471488 - RNA, 22 nt, Human
uucaaaaaaaaaaaaaaagugu

SEQ ID NO: 471489 - RNA, 21 nt, Human
uuccuccacacaucaugcccc

SEQ ID NO: 471490 - RNA, 23 nt, Human
uuccuccacacaucaugccccaa

SEQ ID NO: 471491 - RNA, 18 nt, Human
uugcgcaccaccuccucc

SEQ ID NO: 471492 - RNA, 24 nt, Human
uuuacccauucaacaggaaaaaaa

SEQ ID NO: 471493 - RNA, 24 nt, Human
uuucaguauuuucaagagauuuua

SEQ ID NO: 471494 - RNA, 19 nt, Human
uuuguugucguuauucucc

SEQ ID NO: 471495 - RNA, 21 nt, Human
uuuuggagcaaguaguuuuca

SEQ ID NO: 471496 - RNA, 20 nt, Human
uuuuuuuuuuuuuuuuugcu

SEQ ID NO: 471497 - RNA, 23 nt, Human
uuuuuuuuuuuuuuuuuugcuaa

SEQ ID NO: 471498 - RNA, 20 nt, Human
uuuuuuuuuuuuuuuuuugg

SEQ ID NO: 471499 - RNA, 20 nt, Human
aaaacuacaggcauaaguca

SEQ ID NO: 471500 - RNA, 20 nt, Human
aaagagagaaaaaaguccac

SEQ ID NO: 471501 - RNA, 21 nt, Human
aacaaaaccaccaggggcugg

SEQ ID NO: 471502 - RNA, 19 nt, Human
aaggaaaggaaugaacaaa

SEQ ID NO: 471503 - RNA, 23 nt, Human
auaaaggggagacccugccuaca

SEQ ID NO: 471504 - RNA, 18 nt, Human
cacucauccgcagcucca

SEQ ID NO: 471505 - RNA, 18 nt, Human
caggaacaugccugggau

SEQ ID NO: 471506 - RNA, 24 nt, Human
cagguaaauuuucuaauaaggcuu

SEQ ID NO: 471507 - RNA, 21 nt, Human
ccaaaagagagaaaaaagucc

SEQ ID NO: 471508 - RNA, 22 nt, Human
ccaaaagagagaaaaaagucca

SEQ ID NO: 471509 - RNA, 22 nt, Human
cccaaaagagagaaaaaagucc

SEQ ID NO: 471510 - RNA, 20 nt, Human
ccccaaaagagagaaaaaag

SEQ ID NO: 471511 - RNA, 22 nt, Human
ccgcagcuccaggacgccgcac

SEQ ID NO: 471512 - RNA, 21 nt, Human
cgccgcacuccacgcgcugcc

SEQ ID NO: 471513 - RNA, 19 nt, Human
gaacaaaaccaccaggggc

SEQ ID NO: 471514 - RNA, 18 nt, Human
guaaagcgagccugcccc

SEQ ID NO: 471515 - RNA, 24 nt, Human
guaacagcaagguuggccuuuucu

SEQ ID NO: 471516 - RNA, 22 nt, Human
gucaaaccaggcugcagagaac

SEQ ID NO: 471517 - RNA, 18 nt, Human
uaauaaggcuuuugauac

SEQ ID NO: 471518 - RNA, 19 nt, Human
uagcuucccaaacagcuug

SEQ ID NO: 471519 - RNA, 26 nt, Human
uccgcagcuccaggacgccgcacucc

SEQ ID NO: 471520 - RNA, 18 nt, Human
ucuaccuuuccucuugga

SEQ ID NO: 471521 - RNA, 24 nt, Human
ugaaaaccauaaaggggagacccu

SEQ ID NO: 471522 - RNA, 23 nt, Human
uguccccaaaagagagaaaaaag

SEQ ID NO: 471523 - RNA, 23 nt, Human
uuagcuucccaaacagcuugcag

SEQ ID NO: 471524 - RNA, 18 nt, Human
uucuucggcaaugaacaa

SEQ ID NO: 471525 - RNA, 23 nt, Human
uuuuuuauccuguccccaaaaga

SEQ ID NO: 471526 - RNA, 21 nt, Human
acagccuccuuucgggaucaa

SEQ ID NO: 471527 - RNA, 20 nt, Human
accaaguaacacagaccuga

SEQ ID NO: 471528 - RNA, 21 nt, Human
acccaccccaggcccucccuc

SEQ ID NO: 471529 - RNA, 19 nt, Human
accccaggcccucccucuc

SEQ ID NO: 471530 - RNA, 25 nt, Human
acgcagcaugucggggggacaaggc

SEQ ID NO: 471531 - RNA, 25 nt, Human
acuccacccccacacccaccccaga

SEQ ID NO: 471532 - RNA, 19 nt, Human
acugcagcggcggcggcug

SEQ ID NO: 471533 - RNA, 24 nt, Human
agagaggaggaagugggagaggag

SEQ ID NO: 471534 - RNA, 18 nt, Human
agcacaaaugaaggcaga

SEQ ID NO: 471535 - RNA, 18 nt, Human
aggacgagggaggggcag

SEQ ID NO: 471536 - RNA, 19 nt, Human
agggaggggcaggguggca

SEQ ID NO: 471537 - RNA, 23 nt, Human
cacuccacccccacacccacccc

SEQ ID NO: 471538 - RNA, 19 nt, Human
cagagccagcuccguccuc

SEQ ID NO: 471539 - RNA, 23 nt, Human
cagcagccucccaugcuccaggg

SEQ ID NO: 471540 - RNA, 27 nt, Human
cagcaguaauggggccacgacgccaca

SEQ ID NO: 471541 - RNA, 25 nt, Human
cagcaguggggacuagggaggggca

SEQ ID NO: 471542 - RNA, 23 nt, Human
cagcaugucggggggacaaggcg

SEQ ID NO: 471543 - RNA, 23 nt, Human
caggagacugaggcacacagaga

SEQ ID NO: 471544 - RNA, 18 nt, Human
cagggacaccagcgggag

SEQ ID NO: 471545 - RNA, 21 nt, Human
cagggacaccagcgggagccu

SEQ ID NO: 471546 - RNA, 20 nt, Human
caguggggacuagggagggg

SEQ ID NO: 471547 - RNA, 20 nt, Human
ccaccccaggcccucccucu

SEQ ID NO: 471548 - RNA, 19 nt, Human
ccacgcagcuccugccaga

SEQ ID NO: 471549 - RNA, 22 nt, Human
ccacgcagcuccugccagacac

SEQ ID NO: 471550 - RNA, 21 nt, Human
ccacuccacccccacacccac

SEQ ID NO: 471551 - RNA, 22 nt, Human
ccacuccacccccacacccacc

SEQ ID NO: 471552 - RNA, 24 nt, Human
cccacacccaccccagagaggggc

SEQ ID NO: 471553 - RNA, 18 nt, Human
cccaccccagagaggggc

SEQ ID NO: 471554 - RNA, 22 nt, Human
cccaggcccucccucucccuuc

SEQ ID NO: 471555 - RNA, 19 nt, Human
ccccaggcccucccucucc

SEQ ID NO: 471556 - RNA, 18 nt, Human
cccccacacccaccccag

SEQ ID NO: 471557 - RNA, 18 nt, Human
cccggggcaggcggggcc

SEQ ID NO: 471558 - RNA, 18 nt, Human
cccucccucucccuuccu

SEQ ID NO: 471559 - RNA, 24 nt, Human
ccucucccagacccuggugggagu

SEQ ID NO: 471560 - RNA, 20 nt, Human
cgagggaggggcaggguggc

SEQ ID NO: 471561 - RNA, 18 nt, Human
cggggggacaaggcgggg

SEQ ID NO: 471562 - RNA, 24 nt, Human
cugccagacaccgccacucacgcu

SEQ ID NO: 471563 - RNA, 23 nt, Human
gagccagcuccguccucucccag

SEQ ID NO: 471564 - RNA, 21 nt, Human
gagguggcugaagcaaggcag

SEQ ID NO: 471565 - RNA, 20 nt, Human
gcaguggggacuagggaggg

SEQ ID NO: 471566 - RNA, 20 nt, Human
gccacagagccagcuccguc

SEQ ID NO: 471567 - RNA, 19 nt, Human
gcccggggcaggcggggcc

SEQ ID NO: 471568 - RNA, 19 nt, Human
ggacgagggaggggcaggg

SEQ ID NO: 471569 - RNA, 21 nt, Human
ggaggaagugggagaggagga

SEQ ID NO: 471570 - RNA, 22 nt, Human
ggcccggggcaggcggggccuc

SEQ ID NO: 471571 - RNA, 23 nt, Human
gggagugggggacccaccccagg

SEQ ID NO: 471572 - RNA, 19 nt, Human
gggcaaggccacuccaccc

SEQ ID NO: 471573 - RNA, 21 nt, Human
gggcaaggccacuccaccccc

SEQ ID NO: 471574 - RNA, 21 nt, Human
gggcaggcggggccucgggcc

SEQ ID NO: 471575 - RNA, 19 nt, Human
gggcagggacgaccacugc

SEQ ID NO: 471576 - RNA, 19 nt, Human
gggccggggagggcaggga

SEQ ID NO: 471577 - RNA, 21 nt, Human
ggggacuagggaggggcagga

SEQ ID NO: 471578 - RNA, 21 nt, Human
gggugggggcuggggacugca

SEQ ID NO: 471579 - RNA, 25 nt, Human
guaacacagaccugagggguggggg

SEQ ID NO: 471580 - RNA, 24 nt, Human
gucccuguggcuugggguggggag

SEQ ID NO: 471581 - RNA, 24 nt, Human
uaaaaaccaaguaacacagaccug

SEQ ID NO: 471582 - RNA, 20 nt, Human
uagggaggggcaggagaggu

SEQ ID NO: 471583 - RNA, 22 nt, Human
ucagcagccucccaugcuccag

SEQ ID NO: 471584 - RNA, 21 nt, Human
uccacccccacacccacccca

SEQ ID NO: 471585 - RNA, 22 nt, Human
ucccaugcuccagggacaccag

SEQ ID NO: 471586 - RNA, 20 nt, Human
ucucccuuccucagacagcc

SEQ ID NO: 471587 - RNA, 19 nt, Human
ugaggggugggggcugggg

SEQ ID NO: 471588 - RNA, 23 nt, Human
uggcagcacaaaugaaggcagag

SEQ ID NO: 471589 - RNA, 20 nt, Human
uggcugaagcaaggcagcag

SEQ ID NO: 471590 - RNA, 20 nt, Human
ugggagaggaggacgaggga

SEQ ID NO: 471591 - RNA, 20 nt, Human
uggggacuagggaggggcag

SEQ ID NO: 471592 - RNA, 24 nt, Human
uggugggagucccuguggcuuggg

SEQ ID NO: 471593 - RNA, 19 nt, Human
uuaggguucuaucccaacg

SEQ ID NO: 471594 - RNA, 23 nt, Human
uuuuuuuuuuuuuuauccacugg

SEQ ID NO: 471595 - RNA, 22 nt, Human
aacugccucugccugccuaauc

SEQ ID NO: 471596 - RNA, 23 nt, Human
acagagccaagggaccgcccccc

SEQ ID NO: 471597 - RNA, 24 nt, Human
acgccgccguccucggagcugggc

SEQ ID NO: 471598 - RNA, 19 nt, Human
agaagcccauaacugccuc

SEQ ID NO: 471599 - RNA, 20 nt, Human
agaguuccugucccaucucc

SEQ ID NO: 471600 - RNA, 21 nt, Human
agaguuccugucccaucuccu

SEQ ID NO: 471601 - RNA, 22 nt, Human
agaguuccugucccaucuccuc

SEQ ID NO: 471602 - RNA, 18 nt, Human
agccccuuuccugccucc

SEQ ID NO: 471603 - RNA, 20 nt, Human
agccccuuuccugccucccg

SEQ ID NO: 471604 - RNA, 19 nt, Human
agcguaccgugccccccaa

SEQ ID NO: 471605 - RNA, 22 nt, Human
auacgcuggaggcugaggcgcc

SEQ ID NO: 471606 - RNA, 19 nt, Human
caaggcaaguggaggaaug

SEQ ID NO: 471607 - RNA, 19 nt, Human
cacaucgucgauguccucc

SEQ ID NO: 471608 - RNA, 24 nt, Human
cacaucgucgauguccucccuacu

SEQ ID NO: 471609 - RNA, 19 nt, Human
caccccuuccucuccagcu

SEQ ID NO: 471610 - RNA, 19 nt, Human
cagagaucaccagccuggu

SEQ ID NO: 471611 - RNA, 18 nt, Human
cagcgccgggagaugcaa

SEQ ID NO: 471612 - RNA, 18 nt, Human
cagcguaccgugcccccc

SEQ ID NO: 471613 - RNA, 24 nt, Human
cagcguaccgugccccccaacccc

SEQ ID NO: 471614 - RNA, 20 nt, Human
caggcucgugagagcagcgg

SEQ ID NO: 471615 - RNA, 21 nt, Human
cagucccgggccugcgcuccu

SEQ ID NO: 471616 - RNA, 20 nt, Human
caucuccucccacgcucacc

SEQ ID NO: 471617 - RNA, 23 nt, Human
ccagcaggcucgugagagcagcg

SEQ ID NO: 471618 - RNA, 24 nt, Human
ccagggcccucgaccaggccuucc

SEQ ID NO: 471619 - RNA, 18 nt, Human
cccacgcucacccauccc

SEQ ID NO: 471620 - RNA, 23 nt, Human
cccacgcucacccaucccaagga

SEQ ID NO: 471621 - RNA, 21 nt, Human
cccagguaagcucccaggagg

SEQ ID NO: 471622 - RNA, 21 nt, Human
cccauggcugagggcaugggg

SEQ ID NO: 471623 - RNA, 20 nt, Human
cccccaaccccagcugugug

SEQ ID NO: 471624 - RNA, 20 nt, Human
ccccgcgcggcccgggccgc

SEQ ID NO: 471625 - RNA, 25 nt, Human
ccccgcgcggcccgggccgccgcuc

SEQ ID NO: 471626 - RNA, 20 nt, Human
cccucagcggcccgggacaa

SEQ ID NO: 471627 - RNA, 25 nt, Human
cccugagccguaaccuucaaaccuu

SEQ ID NO: 471628 - RNA, 19 nt, Human
ccgggacaccuucaccucg

SEQ ID NO: 471629 - RNA, 22 nt, Human
ccuagaguuccugucccaucuc

SEQ ID NO: 471630 - RNA, 19 nt, Human
ccucaccccuuccucucca

SEQ ID NO: 471631 - RNA, 19 nt, Human
ccucccgucucaggcucag

SEQ ID NO: 471632 - RNA, 21 nt, Human
ccucccuggggguccgggaca

SEQ ID NO: 471633 - RNA, 21 nt, Human
ccucgaccaggccuucccuuc

SEQ ID NO: 471634 - RNA, 20 nt, Human
cgacccuucaggcgcuuccu

SEQ ID NO: 471635 - RNA, 23 nt, Human
cgccgccguccucggagcugggc

SEQ ID NO: 471636 - RNA, 22 nt, Human
cuagccccuuuccugccucccg

SEQ ID NO: 471637 - RNA, 24 nt, Human
cucaccccuuccucuccagcugcu

SEQ ID NO: 471638 - RNA, 21 nt, Human
cuccagcugcugcggucuccg

SEQ ID NO: 471639 - RNA, 18 nt, Human
cucccaggaggggcaggg

SEQ ID NO: 471640 - RNA, 22 nt, Human
cucccuacuccuggcgauccca

SEQ ID NO: 471641 - RNA, 25 nt, Human
cuccugcuucccccucccuacuucc

SEQ ID NO: 471642 - RNA, 23 nt, Human
gaagcccauaacugccucugccu

SEQ ID NO: 471643 - RNA, 18 nt, Human
gaggcgccgguggccggu

SEQ ID NO: 471644 - RNA, 21 nt, Human
gcacggucucuugagaggcca

SEQ ID NO: 471645 - RNA, 22 nt, Human
gccucaccccuuccucuccagc

SEQ ID NO: 471646 - RNA, 20 nt, Human
gcgcggcgucggggcucugg

SEQ ID NO: 471647 - RNA, 24 nt, Human
gcucaccgcugcuuacgcuccgcc

SEQ ID NO: 471648 - RNA, 19 nt, Human
gcucagcguaccgugcccc

SEQ ID NO: 471649 - RNA, 18 nt, Human
ggacaccuucaccucggg

SEQ ID NO: 471650 - RNA, 19 nt, Human
ggagggaggggugacugcu

SEQ ID NO: 471651 - RNA, 21 nt, Human
ggagugguaggaggcggcuca

SEQ ID NO: 471652 - RNA, 19 nt, Human
ggccuggccgccccagcgg

SEQ ID NO: 471653 - RNA, 23 nt, Human
ggcuccgcccucccaauggucua

SEQ ID NO: 471654 - RNA, 22 nt, Human
gggcauggggaacuagcgugga

SEQ ID NO: 471655 - RNA, 22 nt, Human
gggcguccccgcgcggcccggg

SEQ ID NO: 471656 - RNA, 23 nt, Human
guccauucuccugacccggaucu

SEQ ID NO: 471657 - RNA, 22 nt, Human
uaccgugccccccaaccccagc

SEQ ID NO: 471658 - RNA, 19 nt, Human
uaccuucaucugcaggacc

SEQ ID NO: 471659 - RNA, 18 nt, Human
uaggucucugcacguggc

SEQ ID NO: 471660 - RNA, 19 nt, Human
ucccagcuggggugagaag

SEQ ID NO: 471661 - RNA, 22 nt, Human
ucccagcuucuuuaccugagcu

SEQ ID NO: 471662 - RNA, 22 nt, Human
ucccuucucccccucuagcccc

SEQ ID NO: 471663 - RNA, 24 nt, Human
uccucccacgcucacccaucccaa

SEQ ID NO: 471664 - RNA, 18 nt, Human
uccugcuucccccucccu

SEQ ID NO: 471665 - RNA, 21 nt, Human
uccugcuucccccucccuacu

SEQ ID NO: 471666 - RNA, 20 nt, Human
ucuccugacccggaucuccg

SEQ ID NO: 471667 - RNA, 20 nt, Human
ucugcacguggcuucugggc

SEQ ID NO: 471668 - RNA, 21 nt, Human
ucugccugccuaauccagaga

SEQ ID NO: 471669 - RNA, 21 nt, Human
ugagcuggagcaggugcucca

SEQ ID NO: 471670 - RNA, 18 nt, Human
ugauucugggggugugga

SEQ ID NO: 471671 - RNA, 23 nt, Human
ugccccccaaccccagcuguguu

SEQ ID NO: 471672 - RNA, 18 nt, Human
ugcgcgaggagggagggg

SEQ ID NO: 471673 - RNA, 25 nt, Human
ugcuccaggcgccuuaccuucaucu

SEQ ID NO: 471674 - RNA, 24 nt, Human
uggggguguggacagagccaaggg

SEQ ID NO: 471675 - RNA, 23 nt, Human
ugucccaucuccucccacgcuca

SEQ ID NO: 471676 - RNA, 23 nt, Human
ugugcuggagucucauucuccug

SEQ ID NO: 471677 - RNA, 18 nt, Human
uucaucugcaggaccugc

SEQ ID NO: 471678 - RNA, 21 nt, Human
uuccagggcccucgaccaggc

SEQ ID NO: 471679 - RNA, 20 nt, Human
uucuccugacccggaucucc

SEQ ID NO: 471680 - RNA, 24 nt, Human
aaagugcugggauuacaggcguga

SEQ ID NO: 471681 - RNA, 19 nt, Human
aagugcugggauuacaggc

SEQ ID NO: 471682 - RNA, 19 nt, Human
aagugcugggauuacaggc

SEQ ID NO: 471683 - RNA, 26 nt, Human
aagugcugggauuacaggcgugagcc

SEQ ID NO: 471684 - RNA, 21 nt, Human
accuugaggcgcaaggcacuu

SEQ ID NO: 471685 - RNA, 24 nt, Human
acuauguuggccaggcuggucuug

SEQ ID NO: 471686 - RNA, 27 nt, Human
acucuguugcccaggcuggagugaagu

SEQ ID NO: 471687 - RNA, 19 nt, Human
agcagcucuaggcucagga

SEQ ID NO: 471688 - RNA, 21 nt, Human
agcagcucuaggcucaggaag

SEQ ID NO: 471689 - RNA, 21 nt, Human
aggcgucgccucagccuuccg

SEQ ID NO: 471690 - RNA, 24 nt, Human
agugaaguggcgcacucucggcuc

SEQ ID NO: 471691 - RNA, 24 nt, Human
augggguuucacuauguuggccag

SEQ ID NO: 471692 - RNA, 24 nt, Human
auuuuuguauuuuuaguagagaug

SEQ ID NO: 471693 - RNA, 21 nt, Human
caaagugcugggauuacaggc

SEQ ID NO: 471694 - RNA, 21 nt, Human
caaagugcugggauuacaggc

SEQ ID NO: 471695 - RNA, 23 nt, Human
caaagugcugggauuacaggcgu

SEQ ID NO: 471696 - RNA, 24 nt, Human
caaagugcugggauuacaggcgug

SEQ ID NO: 471697 - RNA, 24 nt, Human
cacaaaaggagcugcagaauccug

SEQ ID NO: 471698 - RNA, 20 nt, Human
cacccuagcacuaucggcug

SEQ ID NO: 471699 - RNA, 24 nt, Human
caccucagccccgcaaagugcugg

SEQ ID NO: 471700 - RNA, 21 nt, Human
cacuauguuggccaggcuggu

SEQ ID NO: 471701 - RNA, 24 nt, Human
cacuauguuggccaggcuggucuu

SEQ ID NO: 471702 - RNA, 24 nt, Human
cacucuguugcccaggcuggagug

SEQ ID NO: 471703 - RNA, 18 nt, Human
cacugagcaggaccuugu

SEQ ID NO: 471704 - RNA, 21 nt, Human
cacugcaaacucugccuccca

SEQ ID NO: 471705 - RNA, 21 nt, Human
cagcaacuucucucccugcag

SEQ ID NO: 471706 - RNA, 24 nt, Human
cagcaugcaggcacagcuccucca

SEQ ID NO: 471707 - RNA, 21 nt, Human
cagcccccuuucugcaggcuu

SEQ ID NO: 471708 - RNA, 18 nt, Human
cagcuaggauuacaggug

SEQ ID NO: 471709 - RNA, 22 nt, Human
caggcuagacugcucacauuca

SEQ ID NO: 471710 - RNA, 19 nt, Human
ccaccaagcgcuccccucc

SEQ ID NO: 471711 - RNA, 19 nt, Human
ccacuaaccugaggacagg

SEQ ID NO: 471712 - RNA, 24 nt, Human
ccauacacccagcuaauuuuugua

SEQ ID NO: 471713 - RNA, 22 nt, Human
cccaggcuggagugaaguggcg

SEQ ID NO: 471714 - RNA, 20 nt, Human
cccagguucaagugauuccc

SEQ ID NO: 471715 - RNA, 21 nt, Human
cccagguucaagugauuccca

SEQ ID NO: 471716 - RNA, 26 nt, Human
cccgcaaagugcugggauuacaggcg

SEQ ID NO: 471717 - RNA, 24 nt, Human
ccgcaaagugcugggauuacaggc

SEQ ID NO: 471718 - RNA, 18 nt, Human
ccuaagugggcacaaagc

SEQ ID NO: 471719 - RNA, 22 nt, Human
ccucccagguucaagugauucc

SEQ ID NO: 471720 - RNA, 22 nt, Human
ccuccguaaccuugaggcgcaa

SEQ ID NO: 471721 - RNA, 21 nt, Human
ccugcagcuccgguccgcugu

SEQ ID NO: 471722 - RNA, 24 nt, Human
cgaccugaggugguccaaccaccu

SEQ ID NO: 471723 - RNA, 19 nt, Human
cgccucagccuuccguccg

SEQ ID NO: 471724 - RNA, 25 nt, Human
cgcgccuggccuugacuguggguuu

SEQ ID NO: 471725 - RNA, 21 nt, Human
cggggugagcuccaggcagcu

SEQ ID NO: 471726 - RNA, 24 nt, Human
cucacucuguugcccaggcuggag

SEQ ID NO: 471727 - RNA, 23 nt, Human
cucacugcaaacucugccuccca

SEQ ID NO: 471728 - RNA, 21 nt, Human
cucagccccgcaaagugcugg

SEQ ID NO: 471729 - RNA, 19 nt, Human
cucagcgggggcuggacac

SEQ ID NO: 471730 - RNA, 20 nt, Human
cuccacccucugcccagccc

SEQ ID NO: 471731 - RNA, 19 nt, Human
cuccaggguggguggucac

SEQ ID NO: 471732 - RNA, 18 nt, Human
cucccagguucaagugau

SEQ ID NO: 471733 - RNA, 24 nt, Human
cugcaaacucugccucccagguuc

SEQ ID NO: 471734 - RNA, 24 nt, Human
gagaugggguuucacuauguuggc

SEQ ID NO: 471735 - RNA, 25 nt, Human
gagcagcuaggauuacaggugggcg

SEQ ID NO: 471736 - RNA, 18 nt, Human
gauuacaggcgugagcca

SEQ ID NO: 471737 - RNA, 22 nt, Human
gauuacaggcgugagccaccgc

SEQ ID NO: 471738 - RNA, 22 nt, Human
gauuacaggcgugagccaccgc

SEQ ID NO: 471739 - RNA, 21 nt, Human
gauuacaggugggcgccauac

SEQ ID NO: 471740 - RNA, 24 nt, Human
gcaaagugcugggauuacaggcgu

SEQ ID NO: 471741 - RNA, 24 nt, Human
gcacaucagagcugcuggguagga

SEQ ID NO: 471742 - RNA, 21 nt, Human
gcccccugagcagcuaggauu

SEQ ID NO: 471743 - RNA, 19 nt, Human
gcuggacacugagcaggac

SEQ ID NO: 471744 - RNA, 18 nt, Human
ggcuggucuugaacuccc

SEQ ID NO: 471745 - RNA, 19 nt, Human
gggcaccccgcccugaaug

SEQ ID NO: 471746 - RNA, 20 nt, Human
gggcuuggcacaaaaggagc

SEQ ID NO: 471747 - RNA, 22 nt, Human
gggguuucacuauguuggccag

SEQ ID NO: 471748 - RNA, 18 nt, Human
ggguuucacuauguuggc

SEQ ID NO: 471749 - RNA, 22 nt, Human
ggguuucacuauguuggccagg

SEQ ID NO: 471750 - RNA, 22 nt, Human
ggucuaaguaacacagcagcuc

SEQ ID NO: 471751 - RNA, 22 nt, Human
gugggauuuuuuuuuuuuuuuu

SEQ ID NO: 471752 - RNA, 24 nt, Human
uaauuuuuguauuuuuaguagaga

SEQ ID NO: 471753 - RNA, 22 nt, Human
uacaggcgugagccaccgcgcc

SEQ ID NO: 471754 - RNA, 22 nt, Human
uacaggcgugagccaccgcgcc

SEQ ID NO: 471755 - RNA, 23 nt, Human
uacaggcgugagccaccgcgccu

SEQ ID NO: 471756 - RNA, 22 nt, Human
uagagaugggguuucacuaugu

SEQ ID NO: 471757 - RNA, 21 nt, Human
uaggagggagaugccaagcuu

SEQ ID NO: 471758 - RNA, 21 nt, Human
uaggauuacaggugggcgcca

SEQ ID NO: 471759 - RNA, 22 nt, Human
uaggauuacaggugggcgccau

SEQ ID NO: 471760 - RNA, 23 nt, Human
uaguagagaugggguuucacuau

SEQ ID NO: 471761 - RNA, 24 nt, Human
uaguagagaugggguuucacuaug

SEQ ID NO: 471762 - RNA, 24 nt, Human
uauguuggccaggcuggucuugaa

SEQ ID NO: 471763 - RNA, 22 nt, Human
ucacuauguuggccaggcuggu

SEQ ID NO: 471764 - RNA, 24 nt, Human
ucacucuguugcccaggcuggagu

SEQ ID NO: 471765 - RNA, 18 nt, Human
ucacugcaaacucugccu

SEQ ID NO: 471766 - RNA, 19 nt, Human
ucacugcaaacucugccuc

SEQ ID NO: 471767 - RNA, 24 nt, Human
ucacugcaaacucugccucccagg

SEQ ID NO: 471768 - RNA, 19 nt, Human
ucagagcugcuggguagga

SEQ ID NO: 471769 - RNA, 18 nt, Human
ucagcccccugagcagcu

SEQ ID NO: 471770 - RNA, 22 nt, Human
ucauccaggcuagacugcucac

SEQ ID NO: 471771 - RNA, 19 nt, Human
ucccagguucaagugauuc

SEQ ID NO: 471772 - RNA, 19 nt, Human
ucuaaguaacacagcagcu

SEQ ID NO: 471773 - RNA, 23 nt, Human
ucucacucuguugcccaggcugg

SEQ ID NO: 471774 - RNA, 24 nt, Human
ucucacucuguugcccaggcugga

SEQ ID NO: 471775 - RNA, 26 nt, Human
ucucacucuguugcccaggcuggagu

SEQ ID NO: 471776 - RNA, 27 nt, Human
ucucacucuguugcccaggcuggagug

SEQ ID NO: 471777 - RNA, 18 nt, Human
ucuguugcccaggcugga

SEQ ID NO: 471778 - RNA, 22 nt, Human
ucuguugcccaggcuggaguga

SEQ ID NO: 471779 - RNA, 24 nt, Human
ucuugaacucccgaccugaggugg

SEQ ID NO: 471780 - RNA, 18 nt, Human
ugaacucagcgggggcug

SEQ ID NO: 471781 - RNA, 24 nt, Human
ugacucagcccccugagcagcuag

SEQ ID NO: 471782 - RNA, 22 nt, Human
ugagauggagucucacucuguu

SEQ ID NO: 471783 - RNA, 24 nt, Human
ugauaauacugccuaagugggcac

SEQ ID NO: 471784 - RNA, 20 nt, Human
ugccaccaagcgcuccccuc

SEQ ID NO: 471785 - RNA, 21 nt, Human
ugcccaggcuggagugaagug

SEQ ID NO: 471786 - RNA, 21 nt, Human
ugcccaggcuggagugaagug

SEQ ID NO: 471787 - RNA, 22 nt, Human
ugccccugcagcuccgguccgc

SEQ ID NO: 471788 - RNA, 19 nt, Human
ugccuaagugggcacaaag

SEQ ID NO: 471789 - RNA, 24 nt, Human
ugccuggugggaacgggcuuggca

SEQ ID NO: 471790 - RNA, 24 nt, Human
ugcugggauuacaggcgugagcca

SEQ ID NO: 471791 - RNA, 20 nt, Human
ugcuggguaggagggagaug

SEQ ID NO: 471792 - RNA, 19 nt, Human
uggaagaagagcgggguga

SEQ ID NO: 471793 - RNA, 22 nt, Human
uggaagaagagcggggugagcu

SEQ ID NO: 471794 - RNA, 24 nt, Human
uggagucucacucuguugcccagg

SEQ ID NO: 471795 - RNA, 20 nt, Human
uggcagggauggaggaaggu

SEQ ID NO: 471796 - RNA, 23 nt, Human
uggccaggcuggucuugaacucc

SEQ ID NO: 471797 - RNA, 18 nt, Human
ugggauuacaggcgugag

SEQ ID NO: 471798 - RNA, 19 nt, Human
ugggauuacaggcgugagc

SEQ ID NO: 471799 - RNA, 21 nt, Human
ugggauuacaggcgugagcca

SEQ ID NO: 471800 - RNA, 22 nt, Human
ugggauuacaggcgugagccac

SEQ ID NO: 471801 - RNA, 23 nt, Human
ugggauuacaggcgugagccacc

SEQ ID NO: 471802 - RNA, 24 nt, Human
ugggauuacaggcgugagccaccg

SEQ ID NO: 471803 - RNA, 21 nt, Human
ugggauuuuuuuuuuuuuuuu

SEQ ID NO: 471804 - RNA, 24 nt, Human
ugggguuucacuauguuggccagg

SEQ ID NO: 471805 - RNA, 21 nt, Human
ugugugucuacccucugccug

SEQ ID NO: 471806 - RNA, 21 nt, Human
uguugcccaggcuggagugaa

SEQ ID NO: 471807 - RNA, 18 nt, Human
uuaguagagaugggguuu

SEQ ID NO: 471808 - RNA, 21 nt, Human
uuaguagagaugggguuucac

SEQ ID NO: 471809 - RNA, 21 nt, Human
uuaguagagaugggguuucac

SEQ ID NO: 471810 - RNA, 24 nt, Human
uuaguagagaugggguuucacuau

SEQ ID NO: 471811 - RNA, 23 nt, Human
uucaagugauucccaugacucag

SEQ ID NO: 471812 - RNA, 18 nt, Human
uucccaugacucagcccc

SEQ ID NO: 471813 - RNA, 21 nt, Human
uugcccaggcuggagugaagu

SEQ ID NO: 471814 - RNA, 23 nt, Human
uuguauuuuuaguagagaugggg

SEQ ID NO: 471815 - RNA, 23 nt, Human
uuucacuauguuggccaggcugu

SEQ ID NO: 471816 - RNA, 24 nt, Human
uuuuuaguagagaugggguuucac

SEQ ID NO: 471817 - RNA, 20 nt, Human
uuuuuguauuuuuaguagag

SEQ ID NO: 471818 - RNA, 26 nt, Human
uuuuuuuuuuuugagauggagucuca

SEQ ID NO: 471819 - RNA, 22 nt, Human
uuuuuuuuuuuuuugagaugga

SEQ ID NO: 471820 - RNA, 20 nt, Human
aacaaagaucacagacaaga

SEQ ID NO: 471821 - RNA, 18 nt, Human
aagaaacccagcaaaguc

SEQ ID NO: 471822 - RNA, 20 nt, Human
aagaacaaagaucacagaca

SEQ ID NO: 471823 - RNA, 18 nt, Human
aaguccucucugagccgc

SEQ ID NO: 471824 - RNA, 18 nt, Human
agaaagacaagcccaggg

SEQ ID NO: 471825 - RNA, 18 nt, Human
agaaagacaagcccaggu

SEQ ID NO: 471826 - RNA, 19 nt, Human
agacaagacguuacuaaac

SEQ ID NO: 471827 - RNA, 24 nt, Human
agacaagcccagguggggcccggg

SEQ ID NO: 471828 - RNA, 22 nt, Human
aggugcauguggacacuugaac

SEQ ID NO: 471829 - RNA, 18 nt, Human
auggagagcccacgcccc

SEQ ID NO: 471830 - RNA, 22 nt, Human
caagaacaaagaucacagacaa

SEQ ID NO: 471831 - RNA, 19 nt, Human
caaggagcuucccaaaucc

SEQ ID NO: 471832 - RNA, 19 nt, Human
cacauaacccuugagaaca

SEQ ID NO: 471833 - RNA, 20 nt, Human
caccccugggccaugcuccc

SEQ ID NO: 471834 - RNA, 19 nt, Human
caggccuggugccugagug

SEQ ID NO: 471835 - RNA, 19 nt, Human
cauccccaccacaacgaag

SEQ ID NO: 471836 - RNA, 21 nt, Human
cauccccaccacaacgaagaa

SEQ ID NO: 471837 - RNA, 19 nt, Human
ccaauuccagcauggucag

SEQ ID NO: 471838 - RNA, 18 nt, Human
ccaccugagcccuguucc

SEQ ID NO: 471839 - RNA, 18 nt, Human
ccagcauggucagcacgg

SEQ ID NO: 471840 - RNA, 18 nt, Human
cccaccacaacgaagaaa

SEQ ID NO: 471841 - RNA, 22 nt, Human
ccccugggccaugcucccucug

SEQ ID NO: 471842 - RNA, 21 nt, Human
cccucuaaacagaaagacaag

SEQ ID NO: 471843 - RNA, 18 nt, Human
ccgcagcagcaagcucuc

SEQ ID NO: 471844 - RNA, 19 nt, Human
ccgcagcagcaagcucucu

SEQ ID NO: 471845 - RNA, 19 nt, Human
ccuagagaaugacuguacu

SEQ ID NO: 471846 - RNA, 18 nt, Human
ccucaacaccccugggcc

SEQ ID NO: 471847 - RNA, 31 nt, Human
ccucaacaccccugggccaugcucccucugg

SEQ ID NO: 471848 - RNA, 22 nt, Human
cuccuggaccaggccuggugcc

SEQ ID NO: 471849 - RNA, 19 nt, Human
cucgaggaaugaagcagcc

SEQ ID NO: 471850 - RNA, 19 nt, Human
cuguacuuagaaaguuuug

SEQ ID NO: 471851 - RNA, 23 nt, Human
cuugaaccacgacuguguccaca

SEQ ID NO: 471852 - RNA, 19 nt, Human
gauauguuacacuucccuc

SEQ ID NO: 471853 - RNA, 24 nt, Human
gcaaaguccucucugagccgcuag

SEQ ID NO: 471854 - RNA, 24 nt, Human
guaaagaagaacuuugaggccgca

SEQ ID NO: 471855 - RNA, 19 nt, Human
gugccuuacugcuccaccc

SEQ ID NO: 471856 - RNA, 21 nt, Human
guggacacuugaaccacgacu

SEQ ID NO: 471857 - RNA, 22 nt, Human
guuacuaaacggaccccugcag

SEQ ID NO: 471858 - RNA, 23 nt, Human
uaagagaaaauggcuuuacauga

SEQ ID NO: 471859 - RNA, 21 nt, Human
uaggucccgaauugcagaagg

SEQ ID NO: 471860 - RNA, 19 nt, Human
uauggagagcccacgcccc

SEQ ID NO: 471861 - RNA, 23 nt, Human
ucccucuaaacagaaagacaagc

SEQ ID NO: 471862 - RNA, 19 nt, Human
ucccucugcucuuccaucc

SEQ ID NO: 471863 - RNA, 20 nt, Human
ucucugagccgcuagagucg

SEQ ID NO: 471864 - RNA, 24 nt, Human
ucucugagccgcuagagucgacuu

SEQ ID NO: 471865 - RNA, 24 nt, Human
ucucuggguagugccuuacugcuc

SEQ ID NO: 471866 - RNA, 24 nt, Human
ugcaaggagcuucccaaauccuag

SEQ ID NO: 471867 - RNA, 20 nt, Human
ugcauguggacacuugaacc

SEQ ID NO: 471868 - RNA, 19 nt, Human
ugccugagugugaagacuc

SEQ ID NO: 471869 - RNA, 25 nt, Human
ugcuccacccaccugagcccuguuc

SEQ ID NO: 471870 - RNA, 27 nt, Human
ugcuccacccaccugagcccuguucca

SEQ ID NO: 471871 - RNA, 18 nt, Human
ugcucccucugcucuucc

SEQ ID NO: 471872 - RNA, 22 nt, Human
uggcagauauguuacacuuccc

SEQ ID NO: 471873 - RNA, 22 nt, Human
uguguagacauacuugugaaaa

SEQ ID NO: 471874 - RNA, 26 nt, Human
uguuuuguuuaagagaaaauggcuuu

SEQ ID NO: 471875 - RNA, 19 nt, Human
uucacagaaagaaacccag

SEQ ID NO: 471876 - RNA, 22 nt, Human
uucacagaaagaaacccagcaa

SEQ ID NO: 471877 - RNA, 25 nt, Human
uuccaagugcaaggagcuucccaaa

SEQ ID NO: 471878 - RNA, 24 nt, Human
aaacaucugcaagcugcagaauuc

SEQ ID NO: 471879 - RNA, 20 nt, Human
aagaaagcaaguaaaaaaaa

SEQ ID NO: 471880 - RNA, 21 nt, Human
aaguaaaaaaaauauuacaga

SEQ ID NO: 471881 - RNA, 19 nt, Human
acuuaauaauaagaaauua

SEQ ID NO: 471882 - RNA, 20 nt, Human
agaaagcaaguaaaaaaaau

SEQ ID NO: 471883 - RNA, 19 nt, Human
agaacaucuugauuuacaa

SEQ ID NO: 471884 - RNA, 22 nt, Human
agaacaucuugauuuacaaggg

SEQ ID NO: 471885 - RNA, 19 nt, Human
aggaaacagccaaaagucc

SEQ ID NO: 471886 - RNA, 21 nt, Human
aggacccaaaaaaaucuggcc

SEQ ID NO: 471887 - RNA, 23 nt, Human
aguaagaaagcaaguaaaaaaaa

SEQ ID NO: 471888 - RNA, 22 nt, Human
auaccacauuguuccauuugcu

SEQ ID NO: 471889 - RNA, 25 nt, Human
caaguaaaaaaaauauuacagauga

SEQ ID NO: 471890 - RNA, 18 nt, Human
cacauuguuccauuugcu

SEQ ID NO: 471891 - RNA, 22 nt, Human
ccacauuguuccauuugcuaca

SEQ ID NO: 471892 - RNA, 20 nt, Human
ccgcgccaggccgcccgcac

SEQ ID NO: 471893 - RNA, 23 nt, Human
ccucuaggcauccaggcugaucc

SEQ ID NO: 471894 - RNA, 19 nt, Human
gcgccgcgccaggccgccc

SEQ ID NO: 471895 - RNA, 23 nt, Human
ggaaaaacuugucagggcccagg

SEQ ID NO: 471896 - RNA, 24 nt, Human
ggaaaaacuugucagggcccaggg

SEQ ID NO: 471897 - RNA, 21 nt, Human
ggaaacagccaaaaguccggc

SEQ ID NO: 471898 - RNA, 25 nt, Human
ggcaaugaagacuauuuaaaagaaa

SEQ ID NO: 471899 - RNA, 20 nt, Human
uaaaagaaaugcucagcucu

SEQ ID NO: 471900 - RNA, 18 nt, Human
uaagaaagcaaguaaaaa

SEQ ID NO: 471901 - RNA, 21 nt, Human
uaagaaagcaaguaaaaaaaa

SEQ ID NO: 471902 - RNA, 22 nt, Human
uaaucugcagaacaucuugauu

SEQ ID NO: 471903 - RNA, 25 nt, Human
uaccacauuguuccauuugcuacaa

SEQ ID NO: 471904 - RNA, 19 nt, Human
uagguucacuuaacaucuu

SEQ ID NO: 471905 - RNA, 20 nt, Human
uaugcuguccaaccuacugg

SEQ ID NO: 471906 - RNA, 20 nt, Human
ucuaguccucuaggcaucca

SEQ ID NO: 471907 - RNA, 18 nt, Human
ugaaaacuugcucugcag

SEQ ID NO: 471908 - RNA, 24 nt, Human
ugaucuaguccucuaggcauccag

SEQ ID NO: 471909 - RNA, 18 nt, Human
uuccuuaguccucagcua

SEQ ID NO: 471910 - RNA, 20 nt, Human
uuuaaaauaaauuacuuaau

SEQ ID NO: 471911 - RNA, 22 nt, Human
agcagcagcagccacugcaacc

SEQ ID NO: 471912 - RNA, 24 nt, Human
auaguuuagccucaaaaaaauaaa

SEQ ID NO: 471913 - RNA, 22 nt, Human
cacugcaaccaguucauccugg

SEQ ID NO: 471914 - RNA, 25 nt, Human
cagcagcagcagccacugcaaccag

SEQ ID NO: 471915 - RNA, 22 nt, Human
cagcagcagccacugcaaccag

SEQ ID NO: 471916 - RNA, 20 nt, Human
cccccgcagcagcagcagcc

SEQ ID NO: 471917 - RNA, 26 nt, Human
ccucucagcgcccccgcagcagcagc

SEQ ID NO: 471918 - RNA, 18 nt, Human
ccugggagcugcugcggg

SEQ ID NO: 471919 - RNA, 25 nt, Human
cgcagcagcagcagccacugcaacc

SEQ ID NO: 471920 - RNA, 18 nt, Human
ucauccugggagcugcug

SEQ ID NO: 471921 - RNA, 20 nt, Human
aaacugaauucuauggagcu

SEQ ID NO: 471922 - RNA, 19 nt, Human
aaagaagaagaagaagaaa

SEQ ID NO: 471923 - RNA, 22 nt, Human
aagaagaagaagaaaaaaacac

SEQ ID NO: 471924 - RNA, 18 nt, Human
aagaagaagaagaagaaa

SEQ ID NO: 471925 - RNA, 21 nt, Human
aagaagaagaagaagaaaaaa

SEQ ID NO: 471926 - RNA, 22 nt, Human
aagaagaagaagaagaaaaaaa

SEQ ID NO: 471927 - RNA, 19 nt, Human
acaaaagaagaagaagaag

SEQ ID NO: 471928 - RNA, 20 nt, Human
ccacaaaagaagaagaagaa

SEQ ID NO: 471929 - RNA, 22 nt, Human
cucagaaacugaauucuaugga

SEQ ID NO: 471930 - RNA, 19 nt, Human
cugacgucucacuuugucu

SEQ ID NO: 471931 - RNA, 24 nt, Human
cuguaaguagagacugucacucau

SEQ ID NO: 471932 - RNA, 19 nt, Human
gaagaagaagaagaaaaaa

SEQ ID NO: 471933 - RNA, 21 nt, Human
gcagcuaguaucuccagcuuc

SEQ ID NO: 471934 - RNA, 18 nt, Human
gcuccccugagcucugca

SEQ ID NO: 471935 - RNA, 21 nt, Human
ggugagcagaggaggaaggga

SEQ ID NO: 471936 - RNA, 20 nt, Human
gugagcagaggaggaaggga

SEQ ID NO: 471937 - RNA, 24 nt, Human
ucggugauguggagcagcuccccu

SEQ ID NO: 471938 - RNA, 20 nt, Human
ucuccagcuucagaggcaga

SEQ ID NO: 471939 - RNA, 21 nt, Human
ucugcagcuaguaucuccagc

SEQ ID NO: 471940 - RNA, 21 nt, Human
ugaaaccacaaaagaagaaga

SEQ ID NO: 471941 - RNA, 25 nt, Human
ugaaaccacaaaagaagaagaagaa

SEQ ID NO: 471942 - RNA, 20 nt, Human
ugagcagaggaggaagggag

SEQ ID NO: 471943 - RNA, 22 nt, Human
ugagcagaggaggaagggaggu

SEQ ID NO: 471944 - RNA, 25 nt, Human
acacaaucccaccauccuucccacc

SEQ ID NO: 471945 - RNA, 24 nt, Human
acccgaacccugccuccggcacug

SEQ ID NO: 471946 - RNA, 18 nt, Human
accucaucuucucucucc

SEQ ID NO: 471947 - RNA, 23 nt, Human
acgcacacuugaugcucugcgcc

SEQ ID NO: 471948 - RNA, 24 nt, Human
acgcacccgaacccugccuccccc

SEQ ID NO: 471949 - RNA, 27 nt, Human
agaaagguacacaaucccaccauccuu

SEQ ID NO: 471950 - RNA, 23 nt, Human
augaguuaaggaguucacaucca

SEQ ID NO: 471951 - RNA, 19 nt, Human
caccauccuucccaccucu

SEQ ID NO: 471952 - RNA, 23 nt, Human
caccuuacuugaugaguuaagga

SEQ ID NO: 471953 - RNA, 20 nt, Human
cagccggacuccucugcacc

SEQ ID NO: 471954 - RNA, 22 nt, Human
ccaaaaaggauguaaggaggca

SEQ ID NO: 471955 - RNA, 23 nt, Human
ccaaccucaucuucucucuccuc

SEQ ID NO: 471956 - RNA, 19 nt, Human
cccacgcaacgacuacgca

SEQ ID NO: 471957 - RNA, 19 nt, Human
ccccgcgcagacccgcggc

SEQ ID NO: 471958 - RNA, 24 nt, Human
ccugccuccggcacccuuggccac

SEQ ID NO: 471959 - RNA, 22 nt, Human
cgcccccgccccgcgcagaccc

SEQ ID NO: 471960 - RNA, 18 nt, Human
cgcggcgggcgcccgcgc

SEQ ID NO: 471961 - RNA, 19 nt, Human
cuccgcccagccggacucc

SEQ ID NO: 471962 - RNA, 21 nt, Human
cuccucugcaccacccucgcc

SEQ ID NO: 471963 - RNA, 22 nt, Human
cucuggcugggccuguggucuc

SEQ ID NO: 471964 - RNA, 23 nt, Human
cugcaccacccucgccaccgacg

SEQ ID NO: 471965 - RNA, 21 nt, Human
cuugcugcgcccccgccccgc

SEQ ID NO: 471966 - RNA, 19 nt, Human
gccuguggucucaugugga

SEQ ID NO: 471967 - RNA, 23 nt, Human
gugggaggguugcagcaggaaaa

SEQ ID NO: 471968 - RNA, 21 nt, Human
uagaaagguacacaaucccac

SEQ ID NO: 471969 - RNA, 19 nt, Human
ucccaccauccuucccacc

SEQ ID NO: 471970 - RNA, 26 nt, Human
ucccaccauccuucccaccucuggug

SEQ ID NO: 471971 - RNA, 20 nt, Human
ucccgacaggcucuggcugg

SEQ ID NO: 471972 - RNA, 27 nt, Human
ugcucugcgccuuuugggcagcgccca

SEQ ID NO: 471973 - RNA, 19 nt, Human
uggugggaggguugcagca

SEQ ID NO: 471974 - RNA, 19 nt, Human
uuuuuuuuuuuuuuguugg

SEQ ID NO: 471975 - RNA, 20 nt, Human
uuuuuuuuuuuuuuuuuguu

SEQ ID NO: 471976 - RNA, 24 nt, Human
uuuuuuuuuuuuuuuuuuuguugg

SEQ ID NO: 471977 - RNA, 27 nt, Human
uuuuuuuuuuuuuuuuuuuuuuugggg

SEQ ID NO: 471978 - RNA, 22 nt, Human
aaaaagcagaaaagauccaaaa

SEQ ID NO: 471979 - RNA, 20 nt, Human
aaaaauucaaacuuggacgc

SEQ ID NO: 471980 - RNA, 23 nt, Human
aaaauagcaaacugaagucaaaa

SEQ ID NO: 471981 - RNA, 21 nt, Human
aaaauaucagcaaguaaauga

SEQ ID NO: 471982 - RNA, 23 nt, Human
aaagcucuccacacacaaggccc

SEQ ID NO: 471983 - RNA, 26 nt, Human
aaagcucuccacacacaaggcccuuc

SEQ ID NO: 471984 - RNA, 19 nt, Human
aacagccuucucuuuuucu

SEQ ID NO: 471985 - RNA, 22 nt, Human
aaccacagagacacugaagccc

SEQ ID NO: 471986 - RNA, 20 nt, Human
aacuucacacucagcaaucu

SEQ ID NO: 471987 - RNA, 21 nt, Human
aagaaauucagugauacucag

SEQ ID NO: 471988 - RNA, 22 nt, Human
aagacagaucuuacagauaaua

SEQ ID NO: 471989 - RNA, 20 nt, Human
aagcccagcaacucccaaga

SEQ ID NO: 471990 - RNA, 23 nt, Human
aaucacacacugacaacacagaa

SEQ ID NO: 471991 - RNA, 21 nt, Human
acagcacacaggcagcacgaa

SEQ ID NO: 471992 - RNA, 27 nt, Human
acaggaaaaaaucuguuuccuuuucca

SEQ ID NO: 471993 - RNA, 20 nt, Human
agacugaagcuugacuauga

SEQ ID NO: 471994 - RNA, 20 nt, Human
agcaguucccuuccccacaa

SEQ ID NO: 471995 - RNA, 21 nt, Human
agcucaagcuaagcuggugaa

SEQ ID NO: 471996 - RNA, 19 nt, Human
aggaaaagucuagcauaug

SEQ ID NO: 471997 - RNA, 21 nt, Human
aggaaacuuuacuuacaaucc

SEQ ID NO: 471998 - RNA, 22 nt, Human
aguuaaaaggcaacaacuauga

SEQ ID NO: 471999 - RNA, 19 nt, Human
auaucuauaaacuugaaac

SEQ ID NO: 472000 - RNA, 18 nt, Human
auuaaaaauaaacucugg

SEQ ID NO: 472001 - RNA, 23 nt, Human
auucugguauaaggugcgcagga

SEQ ID NO: 472002 - RNA, 26 nt, Human
auuuucccaaguuccagacugguaaa

SEQ ID NO: 472003 - RNA, 21 nt, Human
caaaaagcacaggcugcccau

SEQ ID NO: 472004 - RNA, 21 nt, Human
caaaagauguccuaaaaaaaa

SEQ ID NO: 472005 - RNA, 22 nt, Human
caaaagcaaauaguugucaaga

SEQ ID NO: 472006 - RNA, 21 nt, Human
caaaauaaccagagcucaagc

SEQ ID NO: 472007 - RNA, 22 nt, Human
caacacagaaauacgaaaugcu

SEQ ID NO: 472008 - RNA, 20 nt, Human
cacacacugacaacacagaa

SEQ ID NO: 472009 - RNA, 21 nt, Human
cagagacacugaagcccagca

SEQ ID NO: 472010 - RNA, 20 nt, Human
cagcuccucgggcgcguccc

SEQ ID NO: 472011 - RNA, 19 nt, Human
caguacuaaugugaucaca

SEQ ID NO: 472012 - RNA, 25 nt, Human
ccaccagauuuuuuuuaaaccaaau

SEQ ID NO: 472013 - RNA, 24 nt, Human
cccaaguuccagacugguaaaaaa

SEQ ID NO: 472014 - RNA, 18 nt, Human
ccgcggccgagcagcgcc

SEQ ID NO: 472015 - RNA, 23 nt, Human
cgaccugcucugaggauggaggg

SEQ ID NO: 472016 - RNA, 21 nt, Human
cgccugggcugccaccugcag

SEQ ID NO: 472017 - RNA, 20 nt, Human
cuaaaaaaaaaaaaaaaaaa

SEQ ID NO: 472018 - RNA, 18 nt, Human
cucggaauuccagaaaga

SEQ ID NO: 472019 - RNA, 21 nt, Human
cucuccacacacaaggcccag

SEQ ID NO: 472020 - RNA, 18 nt, Human
cugaagucaaaaagcaca

SEQ ID NO: 472021 - RNA, 21 nt, Human
cugcuaugugacuaccaaaaa

SEQ ID NO: 472022 - RNA, 25 nt, Human
cuucacacucagcaaucugcucuuc

SEQ ID NO: 472023 - RNA, 22 nt, Human
cuuccuauuucccccuuucaaa

SEQ ID NO: 472024 - RNA, 19 nt, Human
cuuucacacuuuauaagca

SEQ ID NO: 472025 - RNA, 20 nt, Human
gaaaagauccaaaauaacca

SEQ ID NO: 472026 - RNA, 23 nt, Human
gaacuagaagaaaaccauggugg

SEQ ID NO: 472027 - RNA, 23 nt, Human
gaagaaaaccaugguguggauga

SEQ ID NO: 472028 - RNA, 18 nt, Human
gauccaaaauaaccagag

SEQ ID NO: 472029 - RNA, 20 nt, Human
gcucaagcuaagcuggugaa

SEQ ID NO: 472030 - RNA, 26 nt, Human
gcucauuaaaaucuauguuucaaauu

SEQ ID NO: 472031 - RNA, 18 nt, Human
gcucugaggauggagggu

SEQ ID NO: 472032 - RNA, 18 nt, Human
gcuugugcuuucacacuu

SEQ ID NO: 472033 - RNA, 20 nt, Human
gguuagggcaaauguaacuu

SEQ ID NO: 472034 - RNA, 21 nt, Human
guacuaaugugaucacagaaa

SEQ ID NO: 472035 - RNA, 19 nt, Human
guuagaauaaugcccacaa

SEQ ID NO: 472036 - RNA, 21 nt, Human
uaaaaaaagcagaaaagaucc

SEQ ID NO: 472037 - RNA, 21 nt, Human
uaaaauacaaacuacucaaaa

SEQ ID NO: 472038 - RNA, 21 nt, Human
uaaaauauccugacuaccuuc

SEQ ID NO: 472039 - RNA, 20 nt, Human
uaaacaaaucauacaacuga

SEQ ID NO: 472040 - RNA, 25 nt, Human
uaaacaaaucauacaacugaauaga

SEQ ID NO: 472041 - RNA, 26 nt, Human
uaaacaaaucauacaacugaauagaa

SEQ ID NO: 472042 - RNA, 25 nt, Human
uaaaugaaaaucacacauuucucuu

SEQ ID NO: 472043 - RNA, 22 nt, Human
uaaccaauuucacagauagcac

SEQ ID NO: 472044 - RNA, 24 nt, Human
uaauauaauguccaaaaauuucca

SEQ ID NO: 472045 - RNA, 20 nt, Human
uacucagugccaguaauuaa

SEQ ID NO: 472046 - RNA, 18 nt, Human
uacuccaggcucggccgg

SEQ ID NO: 472047 - RNA, 21 nt, Human
uauauuaccaccagauuuuuu

SEQ ID NO: 472048 - RNA, 18 nt, Human
uaucacaagucaguguga

SEQ ID NO: 472049 - RNA, 25 nt, Human
ucacauauuaaaauacaaacuacuc

SEQ ID NO: 472050 - RNA, 26 nt, Human
ucagcaaucugcucuuccuauuuccc

SEQ ID NO: 472051 - RNA, 23 nt, Human
uccaaaauaaccagagcucaagc

SEQ ID NO: 472052 - RNA, 22 nt, Human
uccaaacuacaaaauaucagca

SEQ ID NO: 472053 - RNA, 21 nt, Human
uccacacacaaggcccagaga

SEQ ID NO: 472054 - RNA, 22 nt, Human
ucccuggauuuucccaaguucc

SEQ ID NO: 472055 - RNA, 20 nt, Human
uccuaaaaaaaaaaaaaaaa

SEQ ID NO: 472056 - RNA, 19 nt, Human
ucuagcauaaaggcaaaug

SEQ ID NO: 472057 - RNA, 19 nt, Human
ucuaugaagauucucucca

SEQ ID NO: 472058 - RNA, 21 nt, Human
ucucuaugaagauucucucca

SEQ ID NO: 472059 - RNA, 18 nt, Human
ugaaaccacagagacacu

SEQ ID NO: 472060 - RNA, 21 nt, Human
ugaaaccacagagacacugaa

SEQ ID NO: 472061 - RNA, 21 nt, Human
ugaaagacugaagcuugacua

SEQ ID NO: 472062 - RNA, 21 nt, Human
ugaagcccagcaacucccaag

SEQ ID NO: 472063 - RNA, 20 nt, Human
ugacaacacagaaauacgaa

SEQ ID NO: 472064 - RNA, 20 nt, Human
ugaguuaaaaggcaacaacu

SEQ ID NO: 472065 - RNA, 23 nt, Human
ugaucacagaaaaauagcaaacu

SEQ ID NO: 472066 - RNA, 18 nt, Human
ugcaauggagcuacuaaa

SEQ ID NO: 472067 - RNA, 20 nt, Human
ugcacaagucuauggcuuua

SEQ ID NO: 472068 - RNA, 24 nt, Human
ugcucuuccuauuucccccuuuca

SEQ ID NO: 472069 - RNA, 21 nt, Human
ugcuuucacacuuuauaagca

SEQ ID NO: 472070 - RNA, 20 nt, Human
uggaauaagcaauguaacuc

SEQ ID NO: 472071 - RNA, 21 nt, Human
uggugaaaccacagagacacu

SEQ ID NO: 472072 - RNA, 23 nt, Human
uguccaaaaauuuccaaguaagu

SEQ ID NO: 472073 - RNA, 25 nt, Human
uuaaaaaaagcagaaaagauccaaa

SEQ ID NO: 472074 - RNA, 19 nt, Human
uuaggcaauacuccaggcu

SEQ ID NO: 472075 - RNA, 18 nt, Human
uucaaacuuggacgcagg

SEQ ID NO: 472076 - RNA, 18 nt, Human
uucacagauagcacucau

SEQ ID NO: 472077 - RNA, 22 nt, Human
uuccccacaacgucugccucca

SEQ ID NO: 472078 - RNA, 20 nt, Human
uucucaugcaauggagcuac

SEQ ID NO: 472079 - RNA, 21 nt, Human
uuuauaagcuugugcuuucac

SEQ ID NO: 472080 - RNA, 18 nt, Human
uuucaagacaaaagucac

SEQ ID NO: 472081 - RNA, 24 nt, Human
uuucacagauagcacucauuuaau

SEQ ID NO: 472082 - RNA, 19 nt, Human
uuuccaaguaagugucuac

SEQ ID NO: 472083 - RNA, 18 nt, Human
uuugcacaagucuauggc

SEQ ID NO: 472084 - RNA, 19 nt, Human
aaaugcacuuuccuuuuca

SEQ ID NO: 472085 - RNA, 18 nt, Human
aacauuuuuuggauuuuc

SEQ ID NO: 472086 - RNA, 20 nt, Human
accuccugaauucuuuuuca

SEQ ID NO: 472087 - RNA, 18 nt, Human
agaagcucuguuuuccag

SEQ ID NO: 472088 - RNA, 18 nt, Human
aggucucugcaggcuuua

SEQ ID NO: 472089 - RNA, 22 nt, Human
caacuagaagaccaaaguacag

SEQ ID NO: 472090 - RNA, 24 nt, Human
caacuuacaacuagaagaccaaag

SEQ ID NO: 472091 - RNA, 22 nt, Human
caaugcccaaaaaauugguuca

SEQ ID NO: 472092 - RNA, 18 nt, Human
cagaggucucugcaggcu

SEQ ID NO: 472093 - RNA, 19 nt, Human
cagcaguggauaccagugc

SEQ ID NO: 472094 - RNA, 20 nt, Human
ccaccgagucuacccggcuc

SEQ ID NO: 472095 - RNA, 19 nt, Human
ccaggcuuuuagaauucuc

SEQ ID NO: 472096 - RNA, 20 nt, Human
ccaguagagguaguggaggg

SEQ ID NO: 472097 - RNA, 23 nt, Human
cccaccgagucuacccggcucca

SEQ ID NO: 472098 - RNA, 23 nt, Human
ccuucaaauaugaugcuuaguuu

SEQ ID NO: 472099 - RNA, 18 nt, Human
ccuuguuuugucauauua

SEQ ID NO: 472100 - RNA, 21 nt, Human
ccuuuguaaguuaccuggugc

SEQ ID NO: 472101 - RNA, 20 nt, Human
cgagucuacccggcuccaag

SEQ ID NO: 472102 - RNA, 21 nt, Human
cuacuaguucaauucuauugc

SEQ ID NO: 472103 - RNA, 19 nt, Human
cugcaggcuuuaguuuuca

SEQ ID NO: 472104 - RNA, 18 nt, Human
gaaagucuagggcugaag

SEQ ID NO: 472105 - RNA, 21 nt, Human
gcuuggugugaauuaucuugg

SEQ ID NO: 472106 - RNA, 22 nt, Human
ggagggugcagugacuucauca

SEQ ID NO: 472107 - RNA, 20 nt, Human
ggauguggcuuccugugagc

SEQ ID NO: 472108 - RNA, 21 nt, Human
ggccccaauucugucuuagcu

SEQ ID NO: 472109 - RNA, 20 nt, Human
gggucucgccacccaccgag

SEQ ID NO: 472110 - RNA, 22 nt, Human
gguggcuuggugugaauuaucu

SEQ ID NO: 472111 - RNA, 25 nt, Human
gguugguuuucugguuccuucucau

SEQ ID NO: 472112 - RNA, 24 nt, Human
guuuuuacuuuaagccaucuauuu

SEQ ID NO: 472113 - RNA, 21 nt, Human
uaaucugauagauuuuuccuu

SEQ ID NO: 472114 - RNA, 20 nt, Human
uagaugaaauaaaaaagucc

SEQ ID NO: 472115 - RNA, 21 nt, Human
uagaugaaauaaaaaaguccc

SEQ ID NO: 472116 - RNA, 26 nt, Human
ucaauuauucccccaaauauguuuuc

SEQ ID NO: 472117 - RNA, 19 nt, Human
ucccuugauguauuacucu

SEQ ID NO: 472118 - RNA, 18 nt, Human
ucccuugggguguucccu

SEQ ID NO: 472119 - RNA, 19 nt, Human
uccuucagaggucucugca

SEQ ID NO: 472120 - RNA, 24 nt, Human
ucuauugcugagacuuuccagagc

SEQ ID NO: 472121 - RNA, 19 nt, Human
ugacaguguaccuagguga

SEQ ID NO: 472122 - RNA, 24 nt, Human
ugacuguaucuuuccuucaaauau

SEQ ID NO: 472123 - RNA, 25 nt, Human
ugagaaaucagauuuagaugaaaua

SEQ ID NO: 472124 - RNA, 21 nt, Human
ugcauuucuaaaagugugucc

SEQ ID NO: 472125 - RNA, 23 nt, Human
uggcuuggugugaauuaucuugg

SEQ ID NO: 472126 - RNA, 25 nt, Human
ugggaaagucuagggcugaagacug

SEQ ID NO: 472127 - RNA, 21 nt, Human
ugguacuggggauugucucca

SEQ ID NO: 472128 - RNA, 22 nt, Human
uuaaaauucuuacaaugcccaa

SEQ ID NO: 472129 - RNA, 23 nt, Human
uucaaaauauuaauagugucaaa

SEQ ID NO: 472130 - RNA, 24 nt, Human
uuccaguagagguaguggagggug

SEQ ID NO: 472131 - RNA, 24 nt, Human
uuccaguagagguaguggaggguu

SEQ ID NO: 472132 - RNA, 21 nt, Human
uuccugggugaucuuugugcu

SEQ ID NO: 472133 - RNA, 19 nt, Human
uucucuggccucucccuga

SEQ ID NO: 472134 - RNA, 19 nt, Human
uuggugaugaauuuccugg

SEQ ID NO: 472135 - RNA, 23 nt, Human
uuguuuugucauauuaccaaggu

SEQ ID NO: 472136 - RNA, 22 nt, Human
uuuaagcucugaauuuuuuucu

SEQ ID NO: 472137 - RNA, 24 nt, Human
uuuccucaauuauucccccaaaua

SEQ ID NO: 472138 - RNA, 22 nt, Human
uuucugguuccuucucauuugg

SEQ ID NO: 472139 - RNA, 21 nt, Human
uuugagggggcugaagauagg

SEQ ID NO: 472140 - RNA, 23 nt, Human
uuugccuuucucuggccucuccc

SEQ ID NO: 472141 - RNA, 24 nt, Human
uuuuccaggcuuuuagaauucucu

SEQ ID NO: 472142 - RNA, 21 nt, Human
uuuuuaacuugugugugugug

SEQ ID NO: 472143 - RNA, 20 nt, Human
aagaaaauagcuauucauuu

SEQ ID NO: 472144 - RNA, 18 nt, Human
acacguuccggagguggc

SEQ ID NO: 472145 - RNA, 22 nt, Human
acagaguaaggcccaucucauu

SEQ ID NO: 472146 - RNA, 24 nt, Human
agaaggagggcgcagcccgcgcga

SEQ ID NO: 472147 - RNA, 25 nt, Human
agaccagggaggcccuagcggggga

SEQ ID NO: 472148 - RNA, 26 nt, Human
agcauucaucugguaacuuaagcagc

SEQ ID NO: 472149 - RNA, 18 nt, Human
agcccgcgcgaagguggg

SEQ ID NO: 472150 - RNA, 24 nt, Human
aggcagcgggcgcgggccccgggg

SEQ ID NO: 472151 - RNA, 21 nt, Human
aggcucucuccuccucugccc

SEQ ID NO: 472152 - RNA, 21 nt, Human
agugcgcccaagcggccgccc

SEQ ID NO: 472153 - RNA, 22 nt, Human
aguugcacuuuaaaaaaugaca

SEQ ID NO: 472154 - RNA, 21 nt, Human
aucuuuggagcuuuccuuugg

SEQ ID NO: 472155 - RNA, 22 nt, Human
cagcagggccacagacagaaga

SEQ ID NO: 472156 - RNA, 19 nt, Human
cagccccauucucgucuug

SEQ ID NO: 472157 - RNA, 18 nt, Human
cagcggcggcagcccgag

SEQ ID NO: 472158 - RNA, 19 nt, Human
cagggaagagaaggagggc

SEQ ID NO: 472159 - RNA, 23 nt, Human
cauccuagaucagcgagguccca

SEQ ID NO: 472160 - RNA, 24 nt, Human
cauucauccaccagaauccaucca

SEQ ID NO: 472161 - RNA, 19 nt, Human
cauucucgucuugcaggga

SEQ ID NO: 472162 - RNA, 22 nt, Human
ccaaugggucugcagagcagug

SEQ ID NO: 472163 - RNA, 21 nt, Human
ccacacagaccuggccccggg

SEQ ID NO: 472164 - RNA, 18 nt, Human
ccagcagggccacagaca

SEQ ID NO: 472165 - RNA, 18 nt, Human
ccaggaucacuaguuucu

SEQ ID NO: 472166 - RNA, 20 nt, Human
ccauaaaaaauaaacacuuu

SEQ ID NO: 472167 - RNA, 18 nt, Human
ccccacgccucuccccgc

SEQ ID NO: 472168 - RNA, 19 nt, Human
cccccgggagaggaagggg

SEQ ID NO: 472169 - RNA, 18 nt, Human
ccccgggugcucccccuc

SEQ ID NO: 472170 - RNA, 18 nt, Human
cccgccucugcuccuccg

SEQ ID NO: 472171 - RNA, 20 nt, Human
ccgccugcgcccccggcugc

SEQ ID NO: 472172 - RNA, 18 nt, Human
ccgcucugcuccccacgc

SEQ ID NO: 472173 - RNA, 24 nt, Human
ccggcaagugcgcccaagcggccg

SEQ ID NO: 472174 - RNA, 24 nt, Human
ccuagaucagcgaggucccaagag

SEQ ID NO: 472175 - RNA, 21 nt, Human
cgacagaguaaggcccaucuc

SEQ ID NO: 472176 - RNA, 24 nt, Human
cgcccugcgcucuccgccugcgcc

SEQ ID NO: 472177 - RNA, 21 nt, Human
cgccgggcgcggggcagcggc

SEQ ID NO: 472178 - RNA, 21 nt, Human
cgcugccaggcucucuccucc

SEQ ID NO: 472179 - RNA, 19 nt, Human
cggcccccgggagaggaag

SEQ ID NO: 472180 - RNA, 23 nt, Human
cggcugccccgagcgccgggcgc

SEQ ID NO: 472181 - RNA, 22 nt, Human
cggugcggcgcccgccucugcu

SEQ ID NO: 472182 - RNA, 21 nt, Human
cucagcgccgcucugcucccc

SEQ ID NO: 472183 - RNA, 20 nt, Human
cuccccgcccugcgcucucc

SEQ ID NO: 472184 - RNA, 21 nt, Human
cugccccgagcgccgggcgcg

SEQ ID NO: 472185 - RNA, 24 nt, Human
cugcgggguagcuguggaguguag

SEQ ID NO: 472186 - RNA, 19 nt, Human
cugcuccuccgcugccagg

SEQ ID NO: 472187 - RNA, 24 nt, Human
cuggcaggcugcagagagccgcgu

SEQ ID NO: 472188 - RNA, 24 nt, Human
cuggccccgggugcucccccucca

SEQ ID NO: 472189 - RNA, 24 nt, Human
cuggcugggcgucaggcugguggg

SEQ ID NO: 472190 - RNA, 18 nt, Human
cuuaagcagcaugaagca

SEQ ID NO: 472191 - RNA, 19 nt, Human
gagcgagcgugcggggcgg

SEQ ID NO: 472192 - RNA, 18 nt, Human
gagggcagggaagagaag

SEQ ID NO: 472193 - RNA, 19 nt, Human
gauuacuuauuucucagca

SEQ ID NO: 472194 - RNA, 27 nt, Human
gccccgagcgccgggcgcggggcagcg

SEQ ID NO: 472195 - RNA, 20 nt, Human
gcccgcgcgaagguggccac

SEQ ID NO: 472196 - RNA, 26 nt, Human
gccucuccccgcccugcgcucuccgc

SEQ ID NO: 472197 - RNA, 19 nt, Human
gcgcagcccgcgcgaaggu

SEQ ID NO: 472198 - RNA, 18 nt, Human
gcgcccccggcugccccg

SEQ ID NO: 472199 - RNA, 19 nt, Human
gcggcagcccgagcggcgg

SEQ ID NO: 472200 - RNA, 18 nt, Human
gcgggcgcgggccccggg

SEQ ID NO: 472201 - RNA, 22 nt, Human
gcgugcuggaggcagcgggcgc

SEQ ID NO: 472202 - RNA, 18 nt, Human
gcugggcgucaggcuggu

SEQ ID NO: 472203 - RNA, 18 nt, Human
ggacuccagcagggccac

SEQ ID NO: 472204 - RNA, 21 nt, Human
ggagaggaaggggugcgggga

SEQ ID NO: 472205 - RNA, 23 nt, Human
ggagucuugggaggggcgguggc

SEQ ID NO: 472206 - RNA, 24 nt, Human
ggcacuggcaggcugcagagagcc

SEQ ID NO: 472207 - RNA, 21 nt, Human
ggccaccaacuuuggcccaga

SEQ ID NO: 472208 - RNA, 20 nt, Human
ggcgagccgcuccucuucgc

SEQ ID NO: 472209 - RNA, 22 nt, Human
ggcggggagucgggagcugcgg

SEQ ID NO: 472210 - RNA, 18 nt, Human
gggaagccauuucuccuc

SEQ ID NO: 472211 - RNA, 20 nt, Human
gggcgcgggccccgggggag

SEQ ID NO: 472212 - RNA, 20 nt, Human
ggggcagcggcggcagcccg

SEQ ID NO: 472213 - RNA, 20 nt, Human
ggucugcagagcagugcagc

SEQ ID NO: 472214 - RNA, 23 nt, Human
gguggugugaagggaaagaaaga

SEQ ID NO: 472215 - RNA, 24 nt, Human
gucaggcuggugggcugggaaugu

SEQ ID NO: 472216 - RNA, 20 nt, Human
guggaguguagacacguucc

SEQ ID NO: 472217 - RNA, 23 nt, Human
uaugccugcuuccuccacgucca

SEQ ID NO: 472218 - RNA, 21 nt, Human
ucagcgaggucccaagagugc

SEQ ID NO: 472219 - RNA, 24 nt, Human
uccauggguaggaaaucccagggc

SEQ ID NO: 472220 - RNA, 21 nt, Human
uccccgcccugcgcucuccgc

SEQ ID NO: 472221 - RNA, 19 nt, Human
ucccgggcuuugcuggcuc

SEQ ID NO: 472222 - RNA, 19 nt, Human
ucgccuggccggcaggcug

SEQ ID NO: 472223 - RNA, 20 nt, Human
ucgccuggccggcaggcugg

SEQ ID NO: 472224 - RNA, 18 nt, Human
ucugggcacuggcaggcu

SEQ ID NO: 472225 - RNA, 24 nt, Human
ucuugggaggggcgguggccugcc

SEQ ID NO: 472226 - RNA, 18 nt, Human
ugcgguggcacucugggc

SEQ ID NO: 472227 - RNA, 19 nt, Human
ugcgguggcacucugggca

SEQ ID NO: 472228 - RNA, 19 nt, Human
ugcgguggcacucugggca

SEQ ID NO: 472229 - RNA, 25 nt, Human
ugcuuccuccacguccacacagacc

SEQ ID NO: 472230 - RNA, 22 nt, Human
ugcuucucagggucaggccaau

SEQ ID NO: 472231 - RNA, 19 nt, Human
uggccaccaacuuuggccc

SEQ ID NO: 472232 - RNA, 19 nt, Human
ugggguggugugaagggaa

SEQ ID NO: 472233 - RNA, 18 nt, Human
uggugcucuacacagugc

SEQ ID NO: 472234 - RNA, 24 nt, Human
uggugugaagggaaagaaagaggg

SEQ ID NO: 472235 - RNA, 25 nt, Human
uggugugaagggaaagaaagagggg

SEQ ID NO: 472236 - RNA, 24 nt, Human
ugugaagggaaagaaagaggggca

SEQ ID NO: 472237 - RNA, 18 nt, Human
ugugucuuuaggcugagg

SEQ ID NO: 472238 - RNA, 20 nt, Human
uuagcagugcccgucugucu

SEQ ID NO: 472239 - RNA, 22 nt, Human
uuccaggaucacuaguuucugc

SEQ ID NO: 472240 - RNA, 19 nt, Human
uuccuccacguccacacag

SEQ ID NO: 472241 - RNA, 18 nt, Human
uugaggagucuugggagg

SEQ ID NO: 472242 - RNA, 21 nt, Human
uugcacuuuaaaaaaugacaa

SEQ ID NO: 472243 - RNA, 19 nt, Human
uuguacuguacagcaucau

SEQ ID NO: 472244 - RNA, 26 nt, Human
uuuaaaaaaugacaagaaaauagcua

SEQ ID NO: 472245 - RNA, 20 nt, Human
aaacagagaaccagccgccc

SEQ ID NO: 472246 - RNA, 23 nt, Human
aaccaggagcucauuacuccggu

SEQ ID NO: 472247 - RNA, 20 nt, Human
aagcaaaagucucaaccagc

SEQ ID NO: 472248 - RNA, 19 nt, Human
aauucgggcugaucucccc

SEQ ID NO: 472249 - RNA, 21 nt, Human
acccacugggccucuggacag

SEQ ID NO: 472250 - RNA, 20 nt, Human
acuccgugacucugagccgg

SEQ ID NO: 472251 - RNA, 21 nt, Human
acucugagccgagaagagggg

SEQ ID NO: 472252 - RNA, 19 nt, Human
agaaguaaauggagaggcc

SEQ ID NO: 472253 - RNA, 26 nt, Human
agaggcaggcggcaauuccccaaggg

SEQ ID NO: 472254 - RNA, 21 nt, Human
aggaaacaaguggaagcaaaa

SEQ ID NO: 472255 - RNA, 21 nt, Human
aggaaccaggagcucauuacu

SEQ ID NO: 472256 - RNA, 21 nt, Human
aggauggguacagccucuuug

SEQ ID NO: 472257 - RNA, 21 nt, Human
agggaauucuggcuccaucuu

SEQ ID NO: 472258 - RNA, 21 nt, Human
aggugggaggugacagcacca

SEQ ID NO: 472259 - RNA, 22 nt, Human
agucacgguggcucuggugagg

SEQ ID NO: 472260 - RNA, 18 nt, Human
aguggaagcaaaagucuc

SEQ ID NO: 472261 - RNA, 21 nt, Human
auggcacagggacugugauca

SEQ ID NO: 472262 - RNA, 19 nt, Human
caaaaaaagucaccaacca

SEQ ID NO: 472263 - RNA, 22 nt, Human
caaguggaagcaaaagucucaa

SEQ ID NO: 472264 - RNA, 23 nt, Human
cacaaacagagaaccagccgccc

SEQ ID NO: 472265 - RNA, 22 nt, Human
caccagcaaggccucugaggcc

SEQ ID NO: 472266 - RNA, 21 nt, Human
caccagcgucccacaaacaga

SEQ ID NO: 472267 - RNA, 22 nt, Human
cacccaccuugggagaugaccc

SEQ ID NO: 472268 - RNA, 23 nt, Human
cagagacaccagcgucccacaag

SEQ ID NO: 472269 - RNA, 19 nt, Human
cagcugagagcgcuccccg

SEQ ID NO: 472270 - RNA, 21 nt, Human
caggcucuaaaguuaagaaaa

SEQ ID NO: 472271 - RNA, 23 nt, Human
caggucaucagaaacagucacgg

SEQ ID NO: 472272 - RNA, 22 nt, Human
ccacaaacagagaaccagccgc

SEQ ID NO: 472273 - RNA, 21 nt, Human
ccagagacaccagcgucccac

SEQ ID NO: 472274 - RNA, 21 nt, Human
cccacaaacagagaaccagcc

SEQ ID NO: 472275 - RNA, 21 nt, Human
ccccugggcaauccaggguuu

SEQ ID NO: 472276 - RNA, 20 nt, Human
ccgagaagaggggcggccca

SEQ ID NO: 472277 - RNA, 22 nt, Human
ccuccagagacaccagcguccc

SEQ ID NO: 472278 - RNA, 20 nt, Human
ccucuggacaggagaauggg

SEQ ID NO: 472279 - RNA, 19 nt, Human
ccuggagagauugcugccc

SEQ ID NO: 472280 - RNA, 21 nt, Human
ccuggagagauugcugcccug

SEQ ID NO: 472281 - RNA, 19 nt, Human
cgagaagaggggcggccca

SEQ ID NO: 472282 - RNA, 23 nt, Human
cggaauggaacaggugggaggug

SEQ ID NO: 472283 - RNA, 19 nt, Human
cuccaaggaaacaagugga

SEQ ID NO: 472284 - RNA, 20 nt, Human
cuccagagacaccagcgucc

SEQ ID NO: 472285 - RNA, 24 nt, Human
cugccucccuugaaacucucuucc

SEQ ID NO: 472286 - RNA, 23 nt, Human
cugcuagauugaauccagcugcc

SEQ ID NO: 472287 - RNA, 19 nt, Human
cuugaaacucucuucccaa

SEQ ID NO: 472288 - RNA, 22 nt, Human
gaacccacaaaugugccuucag

SEQ ID NO: 472289 - RNA, 21 nt, Human
gaagaaguaaauggagaggcc

SEQ ID NO: 472290 - RNA, 27 nt, Human
gaagcaaaagucucaaccaaucaacgg

SEQ ID NO: 472291 - RNA, 21 nt, Human
ggagcugcaggccaaguccuc

SEQ ID NO: 472292 - RNA, 24 nt, Human
ggcgaggugggccuaguucaaggc

SEQ ID NO: 472293 - RNA, 20 nt, Human
gggacugggaagauuuaggc

SEQ ID NO: 472294 - RNA, 23 nt, Human
gggcaauccaggguuucuuguuu

SEQ ID NO: 472295 - RNA, 23 nt, Human
gguucaauuccuucucauucaga

SEQ ID NO: 472296 - RNA, 19 nt, Human
gucaggguggcagggccug

SEQ ID NO: 472297 - RNA, 19 nt, Human
ucagccagguuagcaccaa

SEQ ID NO: 472298 - RNA, 21 nt, Human
ucaggaagggccuccagagac

SEQ ID NO: 472299 - RNA, 25 nt, Human
ucauuuaaccgcaaaaaaagucacc

SEQ ID NO: 472300 - RNA, 21 nt, Human
ucccaaggagcugcaggccaa

SEQ ID NO: 472301 - RNA, 19 nt, Human
ucccgaggaaccaggagcu

SEQ ID NO: 472302 - RNA, 19 nt, Human
ucugagccgagaagagggg

SEQ ID NO: 472303 - RNA, 25 nt, Human
ugaacaguggaagucacgcagagag

SEQ ID NO: 472304 - RNA, 21 nt, Human
ugacagcaccagcaaggccuc

SEQ ID NO: 472305 - RNA, 25 nt, Human
ugacagcaccagcaaggccucugag

SEQ ID NO: 472306 - RNA, 25 nt, Human
ugacagcaccagcaaggcuggagac

SEQ ID NO: 472307 - RNA, 24 nt, Human
ugacagcuccacagcgggacuggg

SEQ ID NO: 472308 - RNA, 19 nt, Human
ugaccaaaagaacccuuuu

SEQ ID NO: 472309 - RNA, 24 nt, Human
ugaccaaaagaacccuuuuucuuu

SEQ ID NO: 472310 - RNA, 19 nt, Human
ugaggaaggggaggguccc

SEQ ID NO: 472311 - RNA, 21 nt, Human
ugaggccaggguccacaccca

SEQ ID NO: 472312 - RNA, 23 nt, Human
ugaggccaggguccacacccacc

SEQ ID NO: 472313 - RNA, 20 nt, Human
ugcaaucagggucuccggcc

SEQ ID NO: 472314 - RNA, 19 nt, Human
uggaaaaacaucuccaagg

SEQ ID NO: 472315 - RNA, 22 nt, Human
uggaagcaaaagucucaaccag

SEQ ID NO: 472316 - RNA, 25 nt, Human
uggaaggcacaaaacuucguaaagg

SEQ ID NO: 472317 - RNA, 19 nt, Human
uggagaggccaggacugca

SEQ ID NO: 472318 - RNA, 19 nt, Human
uggcucuggugaggaaggg

SEQ ID NO: 472319 - RNA, 19 nt, Human
uggcugauggggaacccac

SEQ ID NO: 472320 - RNA, 22 nt, Human
ugugggaaggggccccucgcag

SEQ ID NO: 472321 - RNA, 19 nt, Human
uucgggcugaucuccccau

SEQ ID NO: 472322 - RNA, 22 nt, Human
uucguaaaggccuuaagaagcc

SEQ ID NO: 472323 - RNA, 23 nt, Human
uuggaaaaacaucuccaaggaaa

SEQ ID NO: 472324 - RNA, 21 nt, Human
uuggacuuuugguucaauucc

SEQ ID NO: 472325 - RNA, 19 nt, Human
uuuccuaagcuccuaugga

SEQ ID NO: 472326 - RNA, 18 nt, Human
uuuuuuuuuuuuuuuuug

SEQ ID NO: 472327 - RNA, 20 nt, Human
uuuuuuuuuuuuuuuuuggu

SEQ ID NO: 472328 - RNA, 24 nt, Human
uuuuuuuuuuuuuuuuuggucuca

SEQ ID NO: 472329 - RNA, 24 nt, Human
acaacaugauccaugggaaaaccc

SEQ ID NO: 472330 - RNA, 23 nt, Human
acccaccccuggccagccccaac

SEQ ID NO: 472331 - RNA, 19 nt, Human
cacuguggaugccaucagg

SEQ ID NO: 472332 - RNA, 19 nt, Human
cagggccccuggccacuac

SEQ ID NO: 472333 - RNA, 23 nt, Human
caugauccaugggaaaaccccuu

SEQ ID NO: 472334 - RNA, 20 nt, Human
ccaccccuggccagccccaa

SEQ ID NO: 472335 - RNA, 21 nt, Human
ccaccccuggccagccccaac

SEQ ID NO: 472336 - RNA, 23 nt, Human
ccaccccuggccagccccaaccu

SEQ ID NO: 472337 - RNA, 24 nt, Human
cccaaccuugacaucacuguggau

SEQ ID NO: 472338 - RNA, 20 nt, Human
cccaggcuccaaccccaacc

SEQ ID NO: 472339 - RNA, 24 nt, Human
cccaggcuccaaccccaaccugga

SEQ ID NO: 472340 - RNA, 19 nt, Human
ccccaaccuugacaucacu

SEQ ID NO: 472341 - RNA, 20 nt, Human
ccccuggccagccccaaccu

SEQ ID NO: 472342 - RNA, 22 nt, Human
cccuggccagccccaaccuuga

SEQ ID NO: 472343 - RNA, 18 nt, Human
ccuggccagccccaaccu

SEQ ID NO: 472344 - RNA, 22 nt, Human
ccuggccagccccaaccuugac

SEQ ID NO: 472345 - RNA, 23 nt, Human
cguccagggccccuggccacuac

SEQ ID NO: 472346 - RNA, 26 nt, Human
cuaguccacccaccccuggccagccc

SEQ ID NO: 472347 - RNA, 26 nt, Human
gaagcuuguggacaccaggcucugug

SEQ ID NO: 472348 - RNA, 18 nt, Human
gccagccccaaccuugac

SEQ ID NO: 472349 - RNA, 21 nt, Human
gcuccaaccccaaccuggaag

SEQ ID NO: 472350 - RNA, 23 nt, Human
gggccccuggccacuacucccaa

SEQ ID NO: 472351 - RNA, 21 nt, Human
uccguggcuagcguccagggc

SEQ ID NO: 472352 - RNA, 22 nt, Human
ugcuucuaguccacccaccccu

SEQ ID NO: 472353 - RNA, 18 nt, Human
uggaugccaucagggugg

SEQ ID NO: 472354 - RNA, 19 nt, Human
uggccagccccaaccuuga

SEQ ID NO: 472355 - RNA, 20 nt, Human
ugugcagcagcuccguggcu

SEQ ID NO: 472356 - RNA, 18 nt, Human
aaaaaacagagggggaga

SEQ ID NO: 472357 - RNA, 19 nt, Human
aaaagcaguuccaugaagg

SEQ ID NO: 472358 - RNA, 22 nt, Human
aaaagccaaaguccuuuagaua

SEQ ID NO: 472359 - RNA, 22 nt, Human
aaacccaccccucccaccucua

SEQ ID NO: 472360 - RNA, 27 nt, Human
aaagauaaaccaauauuguuugaaagc

SEQ ID NO: 472361 - RNA, 19 nt, Human
aaaugccuaaaccacuucu

SEQ ID NO: 472362 - RNA, 18 nt, Human
aacccagaguagaagcag

SEQ ID NO: 472363 - RNA, 18 nt, Human
aagacaggagcuaaaagc

SEQ ID NO: 472364 - RNA, 25 nt, Human
aaggcagagaugacacagcaaaaaa

SEQ ID NO: 472365 - RNA, 22 nt, Human
aaguguguguaggaacucccuc

SEQ ID NO: 472366 - RNA, 19 nt, Human
acagggcaaaguaaggaaa

SEQ ID NO: 472367 - RNA, 19 nt, Human
accccuagaccuuggccuc

SEQ ID NO: 472368 - RNA, 21 nt, Human
accccuagaccuuggccucca

SEQ ID NO: 472369 - RNA, 21 nt, Human
accucuaacaaaccaaaaugg

SEQ ID NO: 472370 - RNA, 22 nt, Human
agaagcauuauuuuaauguagg

SEQ ID NO: 472371 - RNA, 19 nt, Human
agacauggaucuggguuga

SEQ ID NO: 472372 - RNA, 21 nt, Human
agaccaaugacuaagaccaga

SEQ ID NO: 472373 - RNA, 24 nt, Human
agcaaacagguaaaaucugacauc

SEQ ID NO: 472374 - RNA, 20 nt, Human
agcaguggguuugaaugagg

SEQ ID NO: 472375 - RNA, 21 nt, Human
agcaguggguuugaaugagga

SEQ ID NO: 472376 - RNA, 21 nt, Human
agccccugugggggcagccag

SEQ ID NO: 472377 - RNA, 22 nt, Human
aggcuaaaagaggaauuuccag

SEQ ID NO: 472378 - RNA, 24 nt, Human
agggauuaguaacuugauuccaaa

SEQ ID NO: 472379 - RNA, 21 nt, Human
aguaaggaaagggaugugcca

SEQ ID NO: 472380 - RNA, 20 nt, Human
auagacaccugacuggaauc

SEQ ID NO: 472381 - RNA, 20 nt, Human
auggaaaugucagacaacua

SEQ ID NO: 472382 - RNA, 19 nt, Human
auuccaaauuuucuuccug

SEQ ID NO: 472383 - RNA, 19 nt, Human
auucuuucuuugcaucaug

SEQ ID NO: 472384 - RNA, 22 nt, Human
caaaacccaccccucccaccuc

SEQ ID NO: 472385 - RNA, 26 nt, Human
caaaauggaaaaugacaauucaggca

SEQ ID NO: 472386 - RNA, 18 nt, Human
cacaacuucgcagccucu

SEQ ID NO: 472387 - RNA, 18 nt, Human
cacaucuucacaaaggac

SEQ ID NO: 472388 - RNA, 22 nt, Human
caccccucccaccucuaacaaa

SEQ ID NO: 472389 - RNA, 28 nt, Human
caccccucccaccucuaacaaaccaaag

SEQ ID NO: 472390 - RNA, 21 nt, Human
caccccuccccuuucuacccc

SEQ ID NO: 472391 - RNA, 18 nt, Human
cagagaacuguaaccaca

SEQ ID NO: 472392 - RNA, 24 nt, Human
cagcagcaaacagguaaaauccua

SEQ ID NO: 472393 - RNA, 20 nt, Human
cagggcaagcacugucucaa

SEQ ID NO: 472394 - RNA, 22 nt, Human
caguggggagcugucagaccuu

SEQ ID NO: 472395 - RNA, 20 nt, Human
caguuccaugaaggacagga

SEQ ID NO: 472396 - RNA, 22 nt, Human
cauggaagaaacgcuccccuga

SEQ ID NO: 472397 - RNA, 24 nt, Human
cauuuugaaaagacaggagcuaaa

SEQ ID NO: 472398 - RNA, 22 nt, Human
ccagauggcagcuacuggcuca

SEQ ID NO: 472399 - RNA, 20 nt, Human
cccaccccucccaccucuaa

SEQ ID NO: 472400 - RNA, 21 nt, Human
cccaugacccagaccagccua

SEQ ID NO: 472401 - RNA, 25 nt, Human
cccaugacccagaccagccuaaagc

SEQ ID NO: 472402 - RNA, 26 nt, Human
ccccaccccuccccuuucuaccccua

SEQ ID NO: 472403 - RNA, 21 nt, Human
ccccagaaaucugaggagacc

SEQ ID NO: 472404 - RNA, 23 nt, Human
ccccagaaaucugaggagaccaa

SEQ ID NO: 472405 - RNA, 24 nt, Human
ccccagaaaucugaggagaccucg

SEQ ID NO: 472406 - RNA, 22 nt, Human
ccccaugacccagaccagccua

SEQ ID NO: 472407 - RNA, 18 nt, Human
ccccuccccuuucuaccc

SEQ ID NO: 472408 - RNA, 19 nt, Human
ccccuuucuaccccuagac

SEQ ID NO: 472409 - RNA, 20 nt, Human
cccuccccuuucuaccccua

SEQ ID NO: 472410 - RNA, 20 nt, Human
cccucuggggaggggcgccu

SEQ ID NO: 472411 - RNA, 22 nt, Human
ccuacccauuuuauagaaaaaa

SEQ ID NO: 472412 - RNA, 21 nt, Human
ccucccaccucuaacaaacca

SEQ ID NO: 472413 - RNA, 25 nt, Human
ccucggaacucuggccaggcucccu

SEQ ID NO: 472414 - RNA, 23 nt, Human
ccugccuacccauuuuauagaaa

SEQ ID NO: 472415 - RNA, 21 nt, Human
ccugugggggcagccaguggg

SEQ ID NO: 472416 - RNA, 20 nt, Human
cggaauugcugaggucucac

SEQ ID NO: 472417 - RNA, 21 nt, Human
cgggugccugggaggcuucau

SEQ ID NO: 472418 - RNA, 21 nt, Human
cuaccugguagccccaccccu

SEQ ID NO: 472419 - RNA, 21 nt, Human
cucaaggcagucucaaggcag

SEQ ID NO: 472420 - RNA, 19 nt, Human
cucccugaggggugcaucc

SEQ ID NO: 472421 - RNA, 23 nt, Human
cuccuuguucaaguuccuuauuu

SEQ ID NO: 472422 - RNA, 18 nt, Human
cugguauugcuuuugacc

SEQ ID NO: 472423 - RNA, 20 nt, Human
cuguaaccaaacaaaguuug

SEQ ID NO: 472424 - RNA, 18 nt, Human
cuuacaccccaaguucuu

SEQ ID NO: 472425 - RNA, 18 nt, Human
cuucgcagccucuaagau

SEQ ID NO: 472426 - RNA, 20 nt, Human
cuucucaaaacccaccccuc

SEQ ID NO: 472427 - RNA, 20 nt, Human
cuugacacuggcagguguuu

SEQ ID NO: 472428 - RNA, 21 nt, Human
gaaaacuguaaccaaacaaag

SEQ ID NO: 472429 - RNA, 18 nt, Human
gaaaugaccaacaucaag

SEQ ID NO: 472430 - RNA, 20 nt, Human
gaaaugucagacaacuauga

SEQ ID NO: 472431 - RNA, 23 nt, Human
gaccaguugggauagacaccuga

SEQ ID NO: 472432 - RNA, 24 nt, Human
gaguagaagcaguggagacauggg

SEQ ID NO: 472433 - RNA, 19 nt, Human
gauaagagggacgcuuccc

SEQ ID NO: 472434 - RNA, 21 nt, Human
gaugacacagcaaaaaacaga

SEQ ID NO: 472435 - RNA, 19 nt, Human
gaugacacugagggccacu

SEQ ID NO: 472436 - RNA, 20 nt, Human
gccccagaaaucugaggaga

SEQ ID NO: 472437 - RNA, 20 nt, Human
gccuuuggcuugccuuguug

SEQ ID NO: 472438 - RNA, 22 nt, Human
ggaaagggaugugccagcagug

SEQ ID NO: 472439 - RNA, 19 nt, Human
ggagcuaaaagcaguucca

SEQ ID NO: 472440 - RNA, 20 nt, Human
ggauuggagcuuuugccuua

SEQ ID NO: 472441 - RNA, 22 nt, Human
ggcaagcacugucucaaggcag

SEQ ID NO: 472442 - RNA, 18 nt, Human
ggccaggagucguaccaa

SEQ ID NO: 472443 - RNA, 19 nt, Human
gggcagccaguggggagcc

SEQ ID NO: 472444 - RNA, 24 nt, Human
guuccaugaaggacaggcguuucg

SEQ ID NO: 472445 - RNA, 24 nt, Human
guucuuuguguggcagaacaucua

SEQ ID NO: 472446 - RNA, 21 nt, Human
uaaaacaaaguugguuccuuu

SEQ ID NO: 472447 - RNA, 22 nt, Human
uaaccaaacaaaguuugguuaa

SEQ ID NO: 472448 - RNA, 20 nt, Human
uaacuuguagccauacaccu

SEQ ID NO: 472449 - RNA, 20 nt, Human
uacgguacacuuagcacuug

SEQ ID NO: 472450 - RNA, 23 nt, Human
uacgguacacuuagcacuuguuu

SEQ ID NO: 472451 - RNA, 19 nt, Human
uacuggcucagaaccaggg

SEQ ID NO: 472452 - RNA, 18 nt, Human
uagccauacaccuggcag

SEQ ID NO: 472453 - RNA, 20 nt, Human
ucaaaacccaccccucccac

SEQ ID NO: 472454 - RNA, 19 nt, Human
ucaaggcagucucaaggca

SEQ ID NO: 472455 - RNA, 18 nt, Human
ucacgggccucggaacuc

SEQ ID NO: 472456 - RNA, 22 nt, Human
uccaaaugccuaaaccacuucu

SEQ ID NO: 472457 - RNA, 22 nt, Human
uccagauggcagcuacuggcuc

SEQ ID NO: 472458 - RNA, 21 nt, Human
ucccaccucuaacaaaccaaa

SEQ ID NO: 472459 - RNA, 22 nt, Human
uccguggcugguagcacagggc

SEQ ID NO: 472460 - RNA, 22 nt, Human
ucucaaaacccaccccucccac

SEQ ID NO: 472461 - RNA, 19 nt, Human
ucugaggagaccaaugacu

SEQ ID NO: 472462 - RNA, 22 nt, Human
ugaaaaaauaauaaaauauugu

SEQ ID NO: 472463 - RNA, 21 nt, Human
ugaaaagacaggagcuaaaag

SEQ ID NO: 472464 - RNA, 23 nt, Human
ugaaaagacaggagcuaaaagca

SEQ ID NO: 472465 - RNA, 19 nt, Human
ugacacagcaaaaaacaga

SEQ ID NO: 472466 - RNA, 22 nt, Human
ugacacagcaaaaaacagaggg

SEQ ID NO: 472467 - RNA, 19 nt, Human
ugacuuaguaaugagacag

SEQ ID NO: 472468 - RNA, 21 nt, Human
ugagaaauaggacugagaaau

SEQ ID NO: 472469 - RNA, 24 nt, Human
ugagaaugggucugcccuucucuc

SEQ ID NO: 472470 - RNA, 20 nt, Human
ugaggaucugggugaccagc

SEQ ID NO: 472471 - RNA, 24 nt, Human
ugauuuacaaaagccaaaguccuu

SEQ ID NO: 472472 - RNA, 21 nt, Human
ugcauccuaggagaacugaaa

SEQ ID NO: 472473 - RNA, 21 nt, Human
ugccuaaaccacuucugagcu

SEQ ID NO: 472474 - RNA, 19 nt, Human
ugccuuauccuuacacccc

SEQ ID NO: 472475 - RNA, 23 nt, Human
uggaauccuugacacuggcaggg

SEQ ID NO: 472476 - RNA, 19 nt, Human
uggccaggcucccugaggg

SEQ ID NO: 472477 - RNA, 24 nt, Human
ugguggucuuugagaaugggucug

SEQ ID NO: 472478 - RNA, 23 nt, Human
ugucaacugcuaccugguagccc

SEQ ID NO: 472479 - RNA, 25 nt, Human
ugucacacuuguuuauuucuuuggg

SEQ ID NO: 472480 - RNA, 22 nt, Human
ugugauuuacaaaagccaaagu

SEQ ID NO: 472481 - RNA, 22 nt, Human
ugugggucaguggucaucuugg

SEQ ID NO: 472482 - RNA, 25 nt, Human
ugugggucaguggucaucuuggcag

SEQ ID NO: 472483 - RNA, 20 nt, Human
uucgcagccucuaagauuua

SEQ ID NO: 472484 - RNA, 20 nt, Human
uugcugaggucucacuucuc

SEQ ID NO: 472485 - RNA, 22 nt, Human
uuucuugugguucuccuuguuc

SEQ ID NO: 472486 - RNA, 18 nt, Human
uuuuuuuuuuuuuuuuug

SEQ ID NO: 472487 - RNA, 22 nt, Human
aacccaaucacugggugcccaa

SEQ ID NO: 472488 - RNA, 23 nt, Human
aagcaagcaugaccucgggccac

SEQ ID NO: 472489 - RNA, 22 nt, Human
agcaagcaugaccucgggccac

SEQ ID NO: 472490 - RNA, 20 nt, Human
agcagcaaacccccaaagcu

SEQ ID NO: 472491 - RNA, 20 nt, Human
agccccucccaugucccccc

SEQ ID NO: 472492 - RNA, 24 nt, Human
aggcagaccagcuuuauuuuugaa

SEQ ID NO: 472493 - RNA, 20 nt, Human
agguggaagcaagcaugacc

SEQ ID NO: 472494 - RNA, 19 nt, Human
cauaaaaagugcagcccac

SEQ ID NO: 472495 - RNA, 24 nt, Human
ccaacaaggauccuggcuccuccc

SEQ ID NO: 472496 - RNA, 20 nt, Human
ccccaaagcugucacuuccg

SEQ ID NO: 472497 - RNA, 23 nt, Human
ccccaaagcugucacuuccggga

SEQ ID NO: 472498 - RNA, 21 nt, Human
ccccccuggaaccgacacgcc

SEQ ID NO: 472499 - RNA, 19 nt, Human
ccccuggaaccgacacgcc

SEQ ID NO: 472500 - RNA, 19 nt, Human
ccucccauguccccccugg

SEQ ID NO: 472501 - RNA, 22 nt, Human
ccucgggccacugugcagcccc

SEQ ID NO: 472502 - RNA, 21 nt, Human
cgaaaugaugagauggggcac

SEQ ID NO: 472503 - RNA, 29 nt, Human
cuucuggggcaggagcggugggguacccc

SEQ ID NO: 472504 - RNA, 24 nt, Human
gaaaggaccaaaugcaccugcagg

SEQ ID NO: 472505 - RNA, 26 nt, Human
gacacgccucacaucaagaguggcca

SEQ ID NO: 472506 - RNA, 21 nt, Human
gcaaacccccaaagcugucac

SEQ ID NO: 472507 - RNA, 22 nt, Human
gcacucagaggcacaaagcgac

SEQ ID NO: 472508 - RNA, 30 nt, Human
ggaccaaaugcaccugcagguggaagcaaa

SEQ ID NO: 472509 - RNA, 20 nt, Human
ggagucucuuguuacugcaa

SEQ ID NO: 472510 - RNA, 23 nt, Human
uaacaguauuuagcuagaccaac

SEQ ID NO: 472511 - RNA, 25 nt, Human
uaauuaauaugugccaacucugcac

SEQ ID NO: 472512 - RNA, 19 nt, Human
uaugacacagaacuauaga

SEQ ID NO: 472513 - RNA, 22 nt, Human
ucacaucaagaguggccacacc

SEQ ID NO: 472514 - RNA, 23 nt, Human
uccccuaacaguauuuagcuaga

SEQ ID NO: 472515 - RNA, 23 nt, Human
uccuggccauggaaaggaccaaa

SEQ ID NO: 472516 - RNA, 18 nt, Human
ugaaggcuggccaggaca

SEQ ID NO: 472517 - RNA, 22 nt, Human
ugacacagaacuauagagagaa

SEQ ID NO: 472518 - RNA, 23 nt, Human
ugaugagauggggcacacucccc

SEQ ID NO: 472519 - RNA, 19 nt, Human
ugcccaacuaugacucugc

SEQ ID NO: 472520 - RNA, 20 nt, Human
ugcugguagcaagaucauua

SEQ ID NO: 472521 - RNA, 22 nt, Human
uggaaaggaccaaaugcaccug

SEQ ID NO: 472522 - RNA, 23 nt, Human
uggaaaggaccaaaugcaccugc

SEQ ID NO: 472523 - RNA, 25 nt, Human
uuaaagcccaguuucacuuggccua

SEQ ID NO: 472524 - RNA, 19 nt, Human
uugaaggcuggccaggacc

SEQ ID NO: 472525 - RNA, 20 nt, Human
uuuaaagcccaguuucacuu

SEQ ID NO: 472526 - RNA, 19 nt, Human
aaagcugggcacaggucug

SEQ ID NO: 472527 - RNA, 20 nt, Human
aaauggggccagguauuuga

SEQ ID NO: 472528 - RNA, 21 nt, Human
aauggccaacucaaccccaug

SEQ ID NO: 472529 - RNA, 22 nt, Human
acccccuuucuucacuuuaaga

SEQ ID NO: 472530 - RNA, 18 nt, Human
accccgggagagcuaggg

SEQ ID NO: 472531 - RNA, 19 nt, Human
acuagaggcaagagcagca

SEQ ID NO: 472532 - RNA, 23 nt, Human
acucaaccccauggcugaaagcc

SEQ ID NO: 472533 - RNA, 22 nt, Human
agacaggagacagcauguuccu

SEQ ID NO: 472534 - RNA, 21 nt, Human
agggaggggcaauaugguucc

SEQ ID NO: 472535 - RNA, 22 nt, Human
agggaggggcaauaugguuccc

SEQ ID NO: 472536 - RNA, 20 nt, Human
agguggcucugcagcacgug

SEQ ID NO: 472537 - RNA, 20 nt, Human
aguugcuggaggggguuggg

SEQ ID NO: 472538 - RNA, 18 nt, Human
auauaccucacccauaua

SEQ ID NO: 472539 - RNA, 29 nt, Human
aucccagccucuucccuuucuccgucucu

SEQ ID NO: 472540 - RNA, 25 nt, Human
caaaugacuuaggaugugaaagccc

SEQ ID NO: 472541 - RNA, 22 nt, Human
caacucaaccccauggcugaaa

SEQ ID NO: 472542 - RNA, 23 nt, Human
caagagcagcagagaccauccca

SEQ ID NO: 472543 - RNA, 22 nt, Human
cacuuuaagaaaaucccccaag

SEQ ID NO: 472544 - RNA, 19 nt, Human
cagguauuugacagaugcu

SEQ ID NO: 472545 - RNA, 27 nt, Human
caguucacugggagugacaaaggugac

SEQ ID NO: 472546 - RNA, 20 nt, Human
cauuacaaucugcuccuagg

SEQ ID NO: 472547 - RNA, 23 nt, Human
cccauggcugaaagccgagggac

SEQ ID NO: 472548 - RNA, 24 nt, Human
ccccuaagggagaggacaccccgg

SEQ ID NO: 472549 - RNA, 26 nt, Human
ccccuaagggagaggacaccccggga

SEQ ID NO: 472550 - RNA, 18 nt, Human
cccugggggguuucccuu

SEQ ID NO: 472551 - RNA, 25 nt, Human
cuagagcuccgcucgcaacaaaagc

SEQ ID NO: 472552 - RNA, 25 nt, Human
cucagaccaagguggcucugcagcc

SEQ ID NO: 472553 - RNA, 20 nt, Human
cuggagguuccucgaagcca

SEQ ID NO: 472554 - RNA, 19 nt, Human
cuggcuggcuguaucuugg

SEQ ID NO: 472555 - RNA, 22 nt, Human
cuguaucuuggccugaacagag

SEQ ID NO: 472556 - RNA, 20 nt, Human
cuuggucaucagaggccucc

SEQ ID NO: 472557 - RNA, 23 nt, Human
cuuucuucacuuuaagaaaaucc

SEQ ID NO: 472558 - RNA, 18 nt, Human
gagcugcgcggugcccuc

SEQ ID NO: 472559 - RNA, 26 nt, Human
gaggacaccccgggagagcuaggggu

SEQ ID NO: 472560 - RNA, 20 nt, Human
gaggaggggcugguccucaa

SEQ ID NO: 472561 - RNA, 22 nt, Human
gcagagagaagucucuguuucu

SEQ ID NO: 472562 - RNA, 21 nt, Human
gcccuguaccccagcagauca

SEQ ID NO: 472563 - RNA, 22 nt, Human
gcuagggguucucccagcccug

SEQ ID NO: 472564 - RNA, 20 nt, Human
ggacaacgcguggucaccga

SEQ ID NO: 472565 - RNA, 23 nt, Human
ggcaagagcagcagagaccaucc

SEQ ID NO: 472566 - RNA, 18 nt, Human
ggcacaggucugggucug

SEQ ID NO: 472567 - RNA, 19 nt, Human
gggaagggggaccaaagcu

SEQ ID NO: 472568 - RNA, 19 nt, Human
gggcacaggucugggucug

SEQ ID NO: 472569 - RNA, 18 nt, Human
gguccuggaccaacaggc

SEQ ID NO: 472570 - RNA, 22 nt, Human
guaccccagcagaucagacucc

SEQ ID NO: 472571 - RNA, 21 nt, Human
gugugcugggggacucucacu

SEQ ID NO: 472572 - RNA, 18 nt, Human
guucaggccacuuucugc

SEQ ID NO: 472573 - RNA, 23 nt, Human
uaccccagcagaucagacuccug

SEQ ID NO: 472574 - RNA, 19 nt, Human
ucacacacacacaggaggc

SEQ ID NO: 472575 - RNA, 22 nt, Human
ucagaccaagguggcucugcag

SEQ ID NO: 472576 - RNA, 22 nt, Human
ucagaggccuccugggucccag

SEQ ID NO: 472577 - RNA, 21 nt, Human
ucagaggucaguucaggccac

SEQ ID NO: 472578 - RNA, 18 nt, Human
ucaggccacuuucugcag

SEQ ID NO: 472579 - RNA, 23 nt, Human
ucaguucaggccacuuucugcag

SEQ ID NO: 472580 - RNA, 20 nt, Human
uccccacccccuuucuucac

SEQ ID NO: 472581 - RNA, 27 nt, Human
uccccaguaucucaugaaaggggaggc

SEQ ID NO: 472582 - RNA, 20 nt, Human
uccuaggccacagcaggccc

SEQ ID NO: 472583 - RNA, 21 nt, Human
uccuaggccacagcaggcccu

SEQ ID NO: 472584 - RNA, 24 nt, Human
uccuggaccaacaggcacuucucu

SEQ ID NO: 472585 - RNA, 23 nt, Human
uccugggucccagacgacaggcc

SEQ ID NO: 472586 - RNA, 21 nt, Human
ucuccaugaacuagaggcaag

SEQ ID NO: 472587 - RNA, 24 nt, Human
ucuccaugaacuagaggcaagagc

SEQ ID NO: 472588 - RNA, 19 nt, Human
ucucccagcccuguacccc

SEQ ID NO: 472589 - RNA, 22 nt, Human
ucugcaggguccuggaccaaca

SEQ ID NO: 472590 - RNA, 21 nt, Human
ucuuggccugaacagagacac

SEQ ID NO: 472591 - RNA, 27 nt, Human
ugaaagcccuuggucaucagaggccuc

SEQ ID NO: 472592 - RNA, 22 nt, Human
ugaaagccgagggacaacgcgu

SEQ ID NO: 472593 - RNA, 21 nt, Human
ugaaaggggaggccaagacag

SEQ ID NO: 472594 - RNA, 23 nt, Human
ugaaggaaguuugaugggggagg

SEQ ID NO: 472595 - RNA, 23 nt, Human
ugaaggaaguuugaugggggagg

SEQ ID NO: 472596 - RNA, 26 nt, Human
ugaaggaaguuugaugggggagggag

SEQ ID NO: 472597 - RNA, 21 nt, Human
ugagggaggaggggcuggucc

SEQ ID NO: 472598 - RNA, 18 nt, Human
ugcggagggcccagccca

SEQ ID NO: 472599 - RNA, 23 nt, Human
ugcucagaccaagguggcucugc

SEQ ID NO: 472600 - RNA, 24 nt, Human
ugcucagaccaagguggcucugca

SEQ ID NO: 472601 - RNA, 19 nt, Human
uggcagagagaagucucug

SEQ ID NO: 472602 - RNA, 22 nt, Human
uggcuguaucuuggccugaaca

SEQ ID NO: 472603 - RNA, 21 nt, Human
ugggcacaggucugggucugc

SEQ ID NO: 472604 - RNA, 20 nt, Human
uggggagugugugcuggggg

SEQ ID NO: 472605 - RNA, 18 nt, Human
ugggggagggaggggcaa

SEQ ID NO: 472606 - RNA, 18 nt, Human
uguaguugcuggaggggg

SEQ ID NO: 472607 - RNA, 24 nt, Human
uguucucuucuccccaguaucuca

SEQ ID NO: 472608 - RNA, 19 nt, Human
uuaaauaaacugagagaag

SEQ ID NO: 472609 - RNA, 20 nt, Human
uuaggaugugaaagcccuug

SEQ ID NO: 472610 - RNA, 18 nt, Human
uucucccagcccuguacc

SEQ ID NO: 472611 - RNA, 23 nt, Human
uucuccccaguaucucaugaaag

SEQ ID NO: 472612 - RNA, 22 nt, Human
uuguucucaaggccuccuucca

SEQ ID NO: 472613 - RNA, 24 nt, Human
uuucacagaagugggauauaccuc

SEQ ID NO: 472614 - RNA, 25 nt, Human
aaacaugacuagaaguuuaucacac

SEQ ID NO: 472615 - RNA, 21 nt, Human
aaagauguuuuguggucacaa

SEQ ID NO: 472616 - RNA, 20 nt, Human
aaaugcuaaaagaugugaac

SEQ ID NO: 472617 - RNA, 21 nt, Human
aagcacuguaaaauaaaggca

SEQ ID NO: 472618 - RNA, 19 nt, Human
acagcagcagggcaauggg

SEQ ID NO: 472619 - RNA, 22 nt, Human
accaacuuaucaaaaaaaaaaa

SEQ ID NO: 472620 - RNA, 19 nt, Human
acccugagagauguccggg

SEQ ID NO: 472621 - RNA, 22 nt, Human
acccugagagauguccggguag

SEQ ID NO: 472622 - RNA, 21 nt, Human
accugcuuuuacaaauguccu

SEQ ID NO: 472623 - RNA, 21 nt, Human
acuggaacccucaaaaucaga

SEQ ID NO: 472624 - RNA, 18 nt, Human
agagcacugcaaaacuca

SEQ ID NO: 472625 - RNA, 21 nt, Human
aggauaaggauuuaaaaauau

SEQ ID NO: 472626 - RNA, 22 nt, Human
aggcacagaggcuacaccugcc

SEQ ID NO: 472627 - RNA, 21 nt, Human
agugguuaguuucaggccaag

SEQ ID NO: 472628 - RNA, 21 nt, Human
aucaaaaaaaaaaaaaaaaaa

SEQ ID NO: 472629 - RNA, 21 nt, Human
caaaugauacacagcuccuuc

SEQ ID NO: 472630 - RNA, 23 nt, Human
caauuucuccuuuuaagugagcu

SEQ ID NO: 472631 - RNA, 31 nt, Human
caccaacuuaucaaaaaaaaaaaaaaaaaaa

SEQ ID NO: 472632 - RNA, 21 nt, Human
caccgcccccaaauccugcag

SEQ ID NO: 472633 - RNA, 22 nt, Human
caccgcccccaaauccugcagu

SEQ ID NO: 472634 - RNA, 22 nt, Human
caccuuuuucagaacaaggaua

SEQ ID NO: 472635 - RNA, 22 nt, Human
cagcccacgauacagcauacua

SEQ ID NO: 472636 - RNA, 23 nt, Human
cagugguuaguuucaggccaagc

SEQ ID NO: 472637 - RNA, 18 nt, Human
cccaaauccugcaguggc

SEQ ID NO: 472638 - RNA, 21 nt, Human
ccccaccgcccccaaauccug

SEQ ID NO: 472639 - RNA, 23 nt, Human
ccccaccgcccccaaauccugca

SEQ ID NO: 472640 - RNA, 23 nt, Human
cccccaaauccugcaguggcacc

SEQ ID NO: 472641 - RNA, 25 nt, Human
cuaagcacuguaaaauaaaggcaag

SEQ ID NO: 472642 - RNA, 23 nt, Human
cugcuacaauacauaaaacaaag

SEQ ID NO: 472643 - RNA, 21 nt, Human
cuuaagcuaaacaaaauuuaa

SEQ ID NO: 472644 - RNA, 20 nt, Human
cuuacaccaacuuaucaaaa

SEQ ID NO: 472645 - RNA, 18 nt, Human
cuucauguaaaaaagaug

SEQ ID NO: 472646 - RNA, 21 nt, Human
ggcaccauauuauuaaaaaca

SEQ ID NO: 472647 - RNA, 21 nt, Human
ggguagcgccaggggacaacg

SEQ ID NO: 472648 - RNA, 21 nt, Human
guucugggguugguccaaagu

SEQ ID NO: 472649 - RNA, 21 nt, Human
uaaaaaaucaaaggauaagga

SEQ ID NO: 472650 - RNA, 18 nt, Human
uaaggaauucccguuaag

SEQ ID NO: 472651 - RNA, 23 nt, Human
uaaguuacaaaacuugggcaaag

SEQ ID NO: 472652 - RNA, 20 nt, Human
uacaaaaaaaaaucagaaac

SEQ ID NO: 472653 - RNA, 22 nt, Human
uacaaaaaaaaaucagaaaccu

SEQ ID NO: 472654 - RNA, 23 nt, Human
uacaauacauaaaacaaaguaca

SEQ ID NO: 472655 - RNA, 20 nt, Human
uacacaauuucuccuuuuaa

SEQ ID NO: 472656 - RNA, 20 nt, Human
uacauuuacuggauuguuuu

SEQ ID NO: 472657 - RNA, 20 nt, Human
uagaggcccugcaucuguuu

SEQ ID NO: 472658 - RNA, 20 nt, Human
uagcaauuacaaaaccauga

SEQ ID NO: 472659 - RNA, 24 nt, Human
uaggcaaauguaaaaugcuaaaag

SEQ ID NO: 472660 - RNA, 23 nt, Human
ucaaauaucaauuauuuagcgau

SEQ ID NO: 472661 - RNA, 22 nt, Human
ucagguggaguuccaauguaug

SEQ ID NO: 472662 - RNA, 21 nt, Human
uccaaggguuucauuuaugaa

SEQ ID NO: 472663 - RNA, 23 nt, Human
uccccaccgcccccaaauccugc

SEQ ID NO: 472664 - RNA, 23 nt, Human
ucuguucugggguugguccaaag

SEQ ID NO: 472665 - RNA, 23 nt, Human
ucuuccccaccgcccccaaaucc

SEQ ID NO: 472666 - RNA, 19 nt, Human
ugaaaaaucuaccuuaagg

SEQ ID NO: 472667 - RNA, 22 nt, Human
ugauacacagcuccuucaugua

SEQ ID NO: 472668 - RNA, 19 nt, Human
ugauuuugacacauggcaa

SEQ ID NO: 472669 - RNA, 21 nt, Human
ugccucagagcaagacaucau

SEQ ID NO: 472670 - RNA, 21 nt, Human
uggcucugcucuguucugggg

SEQ ID NO: 472671 - RNA, 23 nt, Human
uguaaaauaaaggcaagagcuaa

SEQ ID NO: 472672 - RNA, 18 nt, Human
uuaaguaccaaaucaaaa

SEQ ID NO: 472673 - RNA, 18 nt, Human
uuacaccaacuuaucaaa

SEQ ID NO: 472674 - RNA, 21 nt, Human
uuagaggcccugcaucuguuu

SEQ ID NO: 472675 - RNA, 24 nt, Human
uucagaacaaggauaauuuacaga

SEQ ID NO: 472676 - RNA, 20 nt, Human
uugcagcugcccucuugaca

SEQ ID NO: 472677 - RNA, 26 nt, Human
uuuacagaaauuauacaaagcagauu

SEQ ID NO: 472678 - RNA, 19 nt, Human
aaaccccagggccuuggca

SEQ ID NO: 472679 - RNA, 23 nt, Human
aaccgugagcaccuugagagcaa

SEQ ID NO: 472680 - RNA, 23 nt, Human
acccacacucucagcaccuucca

SEQ ID NO: 472681 - RNA, 19 nt, Human
acccaguacuucuuccaca

SEQ ID NO: 472682 - RNA, 21 nt, Human
accccacgaccccaccaguua

SEQ ID NO: 472683 - RNA, 19 nt, Human
accccagggccuuggcagg

SEQ ID NO: 472684 - RNA, 19 nt, Human
accuuguagcacuggagcu

SEQ ID NO: 472685 - RNA, 24 nt, Human
agaagccauccuccaaacaaaacc

SEQ ID NO: 472686 - RNA, 18 nt, Human
agacagaaaaaagagaug

SEQ ID NO: 472687 - RNA, 19 nt, Human
agauguguuuguugguugg

SEQ ID NO: 472688 - RNA, 22 nt, Human
agcagcagaagccauccuccaa

SEQ ID NO: 472689 - RNA, 18 nt, Human
agccacaaacagggaccg

SEQ ID NO: 472690 - RNA, 19 nt, Human
aggaaccccuuucccagac

SEQ ID NO: 472691 - RNA, 23 nt, Human
agugcccagccacaaacagggac

SEQ ID NO: 472692 - RNA, 19 nt, Human
cacaccccacgaccccacc

SEQ ID NO: 472693 - RNA, 23 nt, Human
cacacucucagcaccuuccaccc

SEQ ID NO: 472694 - RNA, 25 nt, Human
cacccaguacuucuuccacaaggcc

SEQ ID NO: 472695 - RNA, 21 nt, Human
caccccacgaccccaccaguu

SEQ ID NO: 472696 - RNA, 23 nt, Human
caccccacgaccccaccaguuac

SEQ ID NO: 472697 - RNA, 19 nt, Human
cacccuggaagaaaucugg

SEQ ID NO: 472698 - RNA, 22 nt, Human
cacuccaccagccuucccuggc

SEQ ID NO: 472699 - RNA, 25 nt, Human
cagagaaaaaugaggauuccucuca

SEQ ID NO: 472700 - RNA, 22 nt, Human
cagcagugggugccacaugggu

SEQ ID NO: 472701 - RNA, 23 nt, Human
cagcuccuggaguggcccaggaa

SEQ ID NO: 472702 - RNA, 18 nt, Human
caggggguggaccuugua

SEQ ID NO: 472703 - RNA, 24 nt, Human
cagugggcugcuugcccguguggg

SEQ ID NO: 472704 - RNA, 20 nt, Human
cauaagcagaaacacaccaa

SEQ ID NO: 472705 - RNA, 19 nt, Human
cauagacucuucauuuuau

SEQ ID NO: 472706 - RNA, 20 nt, Human
caucccucacucauagacuc

SEQ ID NO: 472707 - RNA, 22 nt, Human
caucuggguccccagccugcgc

SEQ ID NO: 472708 - RNA, 23 nt, Human
ccaaacaaaaccguaugcaaaac

SEQ ID NO: 472709 - RNA, 21 nt, Human
ccaguacuucuuccacaaggc

SEQ ID NO: 472710 - RNA, 22 nt, Human
cccacacucucagcaccuucca

SEQ ID NO: 472711 - RNA, 21 nt, Human
cccaggaaccccuuucccaga

SEQ ID NO: 472712 - RNA, 19 nt, Human
cccagguucagagauauuc

SEQ ID NO: 472713 - RNA, 20 nt, Human
ccuggaagaaaucuggagcu

SEQ ID NO: 472714 - RNA, 21 nt, Human
cucccgcccaccauucacacc

SEQ ID NO: 472715 - RNA, 22 nt, Human
cucccgcccaccauucacaccc

SEQ ID NO: 472716 - RNA, 21 nt, Human
cuucauuuuauccagcuguuu

SEQ ID NO: 472717 - RNA, 18 nt, Human
cuuccacccaacucagcu

SEQ ID NO: 472718 - RNA, 19 nt, Human
gaaguggcccccacccaca

SEQ ID NO: 472719 - RNA, 25 nt, Human
gagcaggcauaaguuugaauuccau

SEQ ID NO: 472720 - RNA, 22 nt, Human
gcccagacugcuuuuacuuucc

SEQ ID NO: 472721 - RNA, 23 nt, Human
gcccagccacaaacagggaccuc

SEQ ID NO: 472722 - RNA, 24 nt, Human
gcccaggaaccccuuucccagacu

SEQ ID NO: 472723 - RNA, 22 nt, Human
gcucccaaauucugggagcaga

SEQ ID NO: 472724 - RNA, 19 nt, Human
ggccccgagcucucccucc

SEQ ID NO: 472725 - RNA, 18 nt, Human
gggagcaggggguggacc

SEQ ID NO: 472726 - RNA, 22 nt, Human
gggugccacaugggugcucaga

SEQ ID NO: 472727 - RNA, 21 nt, Human
ggugggcgggagcagggggug

SEQ ID NO: 472728 - RNA, 19 nt, Human
gugagcaccuugagagcag

SEQ ID NO: 472729 - RNA, 23 nt, Human
guggcccaggaaccccuuuccca

SEQ ID NO: 472730 - RNA, 23 nt, Human
uaaagcagccagauaaggugggc

SEQ ID NO: 472731 - RNA, 24 nt, Human
uaagcagaaacacaccaaccccgg

SEQ ID NO: 472732 - RNA, 25 nt, Human
uaagcagaaacacaccaacugacaa

SEQ ID NO: 472733 - RNA, 24 nt, Human
uaaguuugaauuccaucugggucc

SEQ ID NO: 472734 - RNA, 25 nt, Human
uacacaaaggccgugcccaauuacc

SEQ ID NO: 472735 - RNA, 19 nt, Human
uacccuaacauaagcagaa

SEQ ID NO: 472736 - RNA, 21 nt, Human
uagcaccaaaaacauuuuccu

SEQ ID NO: 472737 - RNA, 19 nt, Human
uagcacuggagcuaaagca

SEQ ID NO: 472738 - RNA, 23 nt, Human
uagcacuggagcuaaagcagcca

SEQ ID NO: 472739 - RNA, 22 nt, Human
uauauugaugccuccacacccu

SEQ ID NO: 472740 - RNA, 20 nt, Human
ucaccaguuacacaaaggcc

SEQ ID NO: 472741 - RNA, 25 nt, Human
ucagcaccuuccacccaacucagcu

SEQ ID NO: 472742 - RNA, 27 nt, Human
ucagcaccuuccacccaacucagcucc

SEQ ID NO: 472743 - RNA, 25 nt, Human
uccaaacaaaaccguaugcaaaacc

SEQ ID NO: 472744 - RNA, 26 nt, Human
uccaaacuuuuguauuuuuagcagca

SEQ ID NO: 472745 - RNA, 22 nt, Human
uccacaaggcccuaugugagcu

SEQ ID NO: 472746 - RNA, 19 nt, Human
uccccagccugcgcccaga

SEQ ID NO: 472747 - RNA, 19 nt, Human
uccccagccugcgcccaga

SEQ ID NO: 472748 - RNA, 26 nt, Human
ucccgcccaccauucacaccccacga

SEQ ID NO: 472749 - RNA, 23 nt, Human
ucccuggcucugcaucccucacu

SEQ ID NO: 472750 - RNA, 23 nt, Human
ucuuccacaaggcccuaugugag

SEQ ID NO: 472751 - RNA, 24 nt, Human
ugaauagacagaaaaaagagaugu

SEQ ID NO: 472752 - RNA, 24 nt, Human
ugagcucaguuuaaaaccccaggg

SEQ ID NO: 472753 - RNA, 22 nt, Human
ugccacagugagagggcagaga

SEQ ID NO: 472754 - RNA, 25 nt, Human
ugccuccacacccuggaagaaaucu

SEQ ID NO: 472755 - RNA, 24 nt, Human
ugcucagaaguggcccccacccac

SEQ ID NO: 472756 - RNA, 25 nt, Human
ugcucccgcccaccauucacacccc

SEQ ID NO: 472757 - RNA, 18 nt, Human
uggagcucccaaauucug

SEQ ID NO: 472758 - RNA, 18 nt, Human
ugggcgggagcagggggu

SEQ ID NO: 472759 - RNA, 18 nt, Human
uggguccccagccugcgc

SEQ ID NO: 472760 - RNA, 22 nt, Human
uggguccccagccugcgcccag

SEQ ID NO: 472761 - RNA, 22 nt, Human
uuagcagcagaagccauccucc

SEQ ID NO: 472762 - RNA, 19 nt, Human
uucauuuuauccagcuguu

SEQ ID NO: 472763 - RNA, 20 nt, Human
uuccacccaacucagcuccc

SEQ ID NO: 472764 - RNA, 22 nt, Human
uuggcuuuuuacucuuagcacc

SEQ ID NO: 472765 - RNA, 22 nt, Human
uuuccagugaauagacagaaaa

SEQ ID NO: 472766 - RNA, 21 nt, Human
aaaaaaaugaaaguccacaga

SEQ ID NO: 472767 - RNA, 20 nt, Human
aaaaccagucaacugaacac

SEQ ID NO: 472768 - RNA, 23 nt, Human
aaacaggacacaaaaccagucaa

SEQ ID NO: 472769 - RNA, 21 nt, Human
aaaccagucaacugaacacag

SEQ ID NO: 472770 - RNA, 24 nt, Human
aaugccuguagacccauaagccac

SEQ ID NO: 472771 - RNA, 21 nt, Human
acaggacacaaaaccagucaa

SEQ ID NO: 472772 - RNA, 19 nt, Human
acccauaagccacauugga

SEQ ID NO: 472773 - RNA, 23 nt, Human
augccuguagacccauaagccac

SEQ ID NO: 472774 - RNA, 19 nt, Human
caaaaccagucaacugaac

SEQ ID NO: 472775 - RNA, 23 nt, Human
caaaccauggaaaaacuuagccu

SEQ ID NO: 472776 - RNA, 22 nt, Human
cacacaggcuuauugcaaacca

SEQ ID NO: 472777 - RNA, 21 nt, Human
cagaaccuugaaauaaaacau

SEQ ID NO: 472778 - RNA, 19 nt, Human
cagaguuccaccgauaucc

SEQ ID NO: 472779 - RNA, 19 nt, Human
cagcugccgucgaggccgc

SEQ ID NO: 472780 - RNA, 21 nt, Human
cagcuugaccagaguuccacc

SEQ ID NO: 472781 - RNA, 18 nt, Human
ccacacagagucaggucc

SEQ ID NO: 472782 - RNA, 23 nt, Human
ccacuucuuccucuucuucuuca

SEQ ID NO: 472783 - RNA, 21 nt, Human
ccuucagcucgaggugcacgu

SEQ ID NO: 472784 - RNA, 23 nt, Human
cugaacacagagcagcucucuuc

SEQ ID NO: 472785 - RNA, 21 nt, Human
cuuaaaaaaaugaaaguccac

SEQ ID NO: 472786 - RNA, 24 nt, Human
cuuaaaaaaaugaaaguccacaga

SEQ ID NO: 472787 - RNA, 20 nt, Human
cuuagccuuugucccucggc

SEQ ID NO: 472788 - RNA, 25 nt, Human
cuuuggguucaaaauauaccagcuu

SEQ ID NO: 472789 - RNA, 18 nt, Human
gcaaauccucacacugcc

SEQ ID NO: 472790 - RNA, 23 nt, Human
gcuuuuaagacuuuccacuucuu

SEQ ID NO: 472791 - RNA, 24 nt, Human
gcuuuuaagacuuuccacuucuuc

SEQ ID NO: 472792 - RNA, 20 nt, Human
ucccgaaugccuguagaccc

SEQ ID NO: 472793 - RNA, 22 nt, Human
ucccgaaugccuguagacccau

SEQ ID NO: 472794 - RNA, 20 nt, Human
ucucuuaaaaaaaugaaagu

SEQ ID NO: 472795 - RNA, 23 nt, Human
ucuuaaggauuuaucuugaugac

SEQ ID NO: 472796 - RNA, 20 nt, Human
ugacuuagaaaaauacaccu

SEQ ID NO: 472797 - RNA, 22 nt, Human
ugcacagaugauugccaagacc

SEQ ID NO: 472798 - RNA, 23 nt, Human
ugcacagaugauugccaagacca

SEQ ID NO: 472799 - RNA, 21 nt, Human
ugccaagaccauauugacaaa

SEQ ID NO: 472800 - RNA, 24 nt, Human
uguuguuuuuaauauauuuuuccu

SEQ ID NO: 472801 - RNA, 20 nt, Human
uuugucccucggccuaguuc

SEQ ID NO: 472802 - RNA, 28 nt, Human
aaaaaacaggauaucccggagcaaaugc

SEQ ID NO: 472803 - RNA, 25 nt, Human
aacaaaaucagcccaggaacaauga

SEQ ID NO: 472804 - RNA, 26 nt, Human
aagaggccagcgguaagcggugggca

SEQ ID NO: 472805 - RNA, 19 nt, Human
aagcaacaaaaucagccca

SEQ ID NO: 472806 - RNA, 22 nt, Human
agcaacaaaaucagcccaggaa

SEQ ID NO: 472807 - RNA, 20 nt, Human
agggcaguuggagugagcac

SEQ ID NO: 472808 - RNA, 18 nt, Human
agguaugugggcaucugg

SEQ ID NO: 472809 - RNA, 22 nt, Human
augacggcaaagagcacaggua

SEQ ID NO: 472810 - RNA, 18 nt, Human
caaaaucagcccaggaac

SEQ ID NO: 472811 - RNA, 20 nt, Human
ccacgcccucaagucuuccc

SEQ ID NO: 472812 - RNA, 25 nt, Human
ccagugugguccaaugguguugucc

SEQ ID NO: 472813 - RNA, 19 nt, Human
ccaguuucagccaguucca

SEQ ID NO: 472814 - RNA, 24 nt, Human
ccauaguaaugguaaucuccaauu

SEQ ID NO: 472815 - RNA, 20 nt, Human
ccuccaagucccugaggcgg

SEQ ID NO: 472816 - RNA, 21 nt, Human
ccuccaagucccugaggcggc

SEQ ID NO: 472817 - RNA, 25 nt, Human
ccucccacuucuacauccuccaagu

SEQ ID NO: 472818 - RNA, 22 nt, Human
cucccacuucuacauccuccaa

SEQ ID NO: 472819 - RNA, 22 nt, Human
cugcuguuugauagucuuucuu

SEQ ID NO: 472820 - RNA, 21 nt, Human
cuguguggugacauuucuuuc

SEQ ID NO: 472821 - RNA, 30 nt, Human
gccacgcccucaagucuuccaagaggccaa

SEQ ID NO: 472822 - RNA, 25 nt, Human
ggaaacuguuuauuuaguggggaua

SEQ ID NO: 472823 - RNA, 22 nt, Human
gucuccucccacuucuacaucc

SEQ ID NO: 472824 - RNA, 23 nt, Human
uaagccagauugaacauggcuug

SEQ ID NO: 472825 - RNA, 28 nt, Human
uagcuggucuccuucaucuguaaaauuu

SEQ ID NO: 472826 - RNA, 24 nt, Human
uccaggagauuuucucuuuuauug

SEQ ID NO: 472827 - RNA, 22 nt, Human
uccgcuagcucgccugucacuu

SEQ ID NO: 472828 - RNA, 23 nt, Human
ucuccaggagauuuucucuuuuu

SEQ ID NO: 472829 - RNA, 25 nt, Human
ugagcacggacaauucguguugacc

SEQ ID NO: 472830 - RNA, 18 nt, Human
ugagcagguuuuccugug

SEQ ID NO: 472831 - RNA, 22 nt, Human
ugagcagguuuuccugugaucc

SEQ ID NO: 472832 - RNA, 24 nt, Human
ugaggccaaucacaaauaaguccc

SEQ ID NO: 472833 - RNA, 19 nt, Human
ugauuacauuacuagaugu

SEQ ID NO: 472834 - RNA, 22 nt, Human
ugcuguaguguguggcugcugu

SEQ ID NO: 472835 - RNA, 24 nt, Human
uggcucuacaggccacgcccucaa

SEQ ID NO: 472836 - RNA, 21 nt, Human
ugggcaucuggacucguuuga

SEQ ID NO: 472837 - RNA, 19 nt, Human
uguggcugcuguuugauag

SEQ ID NO: 472838 - RNA, 21 nt, Human
uucuucuuuuucuccaggaga

SEQ ID NO: 472839 - RNA, 25 nt, Human
uugauagcuggugaaaauccuccuc

SEQ ID NO: 472840 - RNA, 22 nt, Human
uuugauuucguucacugauacc

SEQ ID NO: 472841 - RNA, 18 nt, Human
aagaaaauaggcaaaaua

SEQ ID NO: 472842 - RNA, 21 nt, Human
acaaacgaagggccgggugug

SEQ ID NO: 472843 - RNA, 24 nt, Human
acacuggcaagaaaauaggcaaaa

SEQ ID NO: 472844 - RNA, 19 nt, Human
accggccuguggcccgggc

SEQ ID NO: 472845 - RNA, 20 nt, Human
agagugcgugugcccugcca

SEQ ID NO: 472846 - RNA, 22 nt, Human
agcacaaucauugcaggccaca

SEQ ID NO: 472847 - RNA, 23 nt, Human
agccagaaccucgagggcuucug

SEQ ID NO: 472848 - RNA, 20 nt, Human
agggaacacggccagagggg

SEQ ID NO: 472849 - RNA, 19 nt, Human
agugggucuggguccccgg

SEQ ID NO: 472850 - RNA, 20 nt, Human
caccccucccuacccucuuu

SEQ ID NO: 472851 - RNA, 31 nt, Human
caccccucccuacccucuuuuggugacuugg

SEQ ID NO: 472852 - RNA, 18 nt, Human
cagucagccucucugcuc

SEQ ID NO: 472853 - RNA, 20 nt, Human
ccagauaaacgcgcgcccac

SEQ ID NO: 472854 - RNA, 23 nt, Human
ccauggcgcgccuggucuccucc

SEQ ID NO: 472855 - RNA, 22 nt, Human
ccauggcgcgccuggucuccuu

SEQ ID NO: 472856 - RNA, 18 nt, Human
cccacgucucugcugggc

SEQ ID NO: 472857 - RNA, 24 nt, Human
cccgcggccagagccaaccauggc

SEQ ID NO: 472858 - RNA, 22 nt, Human
cccggcccccuccagccugggg

SEQ ID NO: 472859 - RNA, 23 nt, Human
cccucccuacccucuuuugguga

SEQ ID NO: 472860 - RNA, 23 nt, Human
ccuccagauaaacgcgcgcccac

SEQ ID NO: 472861 - RNA, 18 nt, Human
ccucccuacccucuuuug

SEQ ID NO: 472862 - RNA, 23 nt, Human
ccucccuacccucuuuuggugac

SEQ ID NO: 472863 - RNA, 20 nt, Human
cgggugggauuggccaauuc

SEQ ID NO: 472864 - RNA, 26 nt, Human
cucccuggucuccucgggggagagau

SEQ ID NO: 472865 - RNA, 22 nt, Human
cuggacacuggcaagaaaauag

SEQ ID NO: 472866 - RNA, 21 nt, Human
cuggguccccggcccccucca

SEQ ID NO: 472867 - RNA, 22 nt, Human
cuugucuuccuggguuacaggg

SEQ ID NO: 472868 - RNA, 24 nt, Human
gaccagaggaaggaacaaggguuu

SEQ ID NO: 472869 - RNA, 18 nt, Human
gagcuugucuuccugggu

SEQ ID NO: 472870 - RNA, 24 nt, Human
gccaggacagacgucauugcugug

SEQ ID NO: 472871 - RNA, 19 nt, Human
gccaggagaggcuggaucc

SEQ ID NO: 472872 - RNA, 21 nt, Human
gcgcgccuggucuccuccaga

SEQ ID NO: 472873 - RNA, 21 nt, Human
gcuggauccccagcucaccgg

SEQ ID NO: 472874 - RNA, 21 nt, Human
gcugugcggugcuugagugcc

SEQ ID NO: 472875 - RNA, 20 nt, Human
gcuucugucccuggaucuuc

SEQ ID NO: 472876 - RNA, 21 nt, Human
ggacaaacgaagggccgggug

SEQ ID NO: 472877 - RNA, 23 nt, Human
ggcccagccagaaccucgagggc

SEQ ID NO: 472878 - RNA, 18 nt, Human
ggcccgggcauccugggc

SEQ ID NO: 472879 - RNA, 18 nt, Human
ggcucugagccggggagg

SEQ ID NO: 472880 - RNA, 21 nt, Human
gggagggaacacggccagagg

SEQ ID NO: 472881 - RNA, 26 nt, Human
gggccgagggugguaacuaggaggag

SEQ ID NO: 472882 - RNA, 21 nt, Human
gguccccggcccccuccagcc

SEQ ID NO: 472883 - RNA, 19 nt, Human
gguggccugggucggugcu

SEQ ID NO: 472884 - RNA, 25 nt, Human
gguuacaggguccugagcuuggccg

SEQ ID NO: 472885 - RNA, 18 nt, Human
uaaaacgccaggagaggc

SEQ ID NO: 472886 - RNA, 20 nt, Human
uaacuaggaggaguggcucu

SEQ ID NO: 472887 - RNA, 20 nt, Human
uagcucaauacucauucaga

SEQ ID NO: 472888 - RNA, 21 nt, Human
ucaaugaccagaggaaggaac

SEQ ID NO: 472889 - RNA, 22 nt, Human
ucagcacgugggcccagccaga

SEQ ID NO: 472890 - RNA, 19 nt, Human
uccccagcucaccggccug

SEQ ID NO: 472891 - RNA, 22 nt, Human
ucgggugggauuggccaauucc

SEQ ID NO: 472892 - RNA, 19 nt, Human
ugacagcccuguguccuuc

SEQ ID NO: 472893 - RNA, 19 nt, Human
ugacuugggguggccuggg

SEQ ID NO: 472894 - RNA, 18 nt, Human
ugcagagggagggccgag

SEQ ID NO: 472895 - RNA, 18 nt, Human
ugcagagggagggccgag

SEQ ID NO: 472896 - RNA, 23 nt, Human
ugcagagggagggccgagggugg

SEQ ID NO: 472897 - RNA, 22 nt, Human
uggccugggucggugcucagcc

SEQ ID NO: 472898 - RNA, 20 nt, Human
uggcucugagccggggaggg

SEQ ID NO: 472899 - RNA, 20 nt, Human
ugggcuugcagagggagggc

SEQ ID NO: 472900 - RNA, 21 nt, Human
uggguccccggcccccuccag

SEQ ID NO: 472901 - RNA, 24 nt, Human
uggguccccggcccccuccagccu

SEQ ID NO: 472902 - RNA, 22 nt, Human
uucuaggcuggggaguagugga

SEQ ID NO: 472903 - RNA, 21 nt, Human
uuuguccaccccucccuaccc

SEQ ID NO: 472904 - RNA, 18 nt, Human
uuuuguccaccccucccu

SEQ ID NO: 472905 - RNA, 21 nt, Human
uuuuguccaccccucccuacc

SEQ ID NO: 472906 - RNA, 21 nt, Human
cgguaggcugggaagugggcc

SEQ ID NO: 472907 - RNA, 24 nt, Human
cuccaccacccucuucgcguuccg

SEQ ID NO: 472908 - RNA, 20 nt, Human
cuggcccaagagucgggcgg

SEQ ID NO: 472909 - RNA, 23 nt, Human
ggaagugggcccaagggcucagg

SEQ ID NO: 472910 - RNA, 18 nt, Human
ggcccaagggcucagggg

SEQ ID NO: 472911 - RNA, 20 nt, Human
ggcggggacggaagcgguag

SEQ ID NO: 472912 - RNA, 21 nt, Human
gugggcccaggcgcuggccca

SEQ ID NO: 472913 - RNA, 19 nt, Human
uagcccgacuccaccaccc

SEQ ID NO: 472914 - RNA, 19 nt, Human
ugcgggggauaggaaagug

SEQ ID NO: 472915 - RNA, 20 nt, Human
uggcccaagagucgggcggg

SEQ ID NO: 472916 - RNA, 26 nt, Human
ugggaagugggcccaagggcucaggg

SEQ ID NO: 472917 - RNA, 26 nt, Human
aaacagaaacuaaaacaaaauaacaa

SEQ ID NO: 472918 - RNA, 22 nt, Human
agagaagccaaaugacuuuccc

SEQ ID NO: 472919 - RNA, 18 nt, Human
agcagggaaugccuuuau

SEQ ID NO: 472920 - RNA, 19 nt, Human
agcagguggcccaggaggg

SEQ ID NO: 472921 - RNA, 21 nt, Human
agcuggucgucacagguagug

SEQ ID NO: 472922 - RNA, 18 nt, Human
aggaaggccauggcggua

SEQ ID NO: 472923 - RNA, 21 nt, Human
aggguacuuacucuccaacua

SEQ ID NO: 472924 - RNA, 24 nt, Human
auaugcaccuuuuuguagagacac

SEQ ID NO: 472925 - RNA, 23 nt, Human
aucagcagguggcccaggagggc

SEQ ID NO: 472926 - RNA, 18 nt, Human
aucaucucucccugcuuc

SEQ ID NO: 472927 - RNA, 25 nt, Human
augaaaaacagaaacuaaaacaaaa

SEQ ID NO: 472928 - RNA, 20 nt, Human
augcaugaagaaacaggcac

SEQ ID NO: 472929 - RNA, 20 nt, Human
augccugugagguaguuggu

SEQ ID NO: 472930 - RNA, 20 nt, Human
caaagcaaaggagaucugag

SEQ ID NO: 472931 - RNA, 21 nt, Human
caacugggccaaucuucacgu

SEQ ID NO: 472932 - RNA, 21 nt, Human
caaggucacacagccugaagg

SEQ ID NO: 472933 - RNA, 21 nt, Human
cacacugagaauccgaaagcc

SEQ ID NO: 472934 - RNA, 20 nt, Human
cacccuugggccugccucca

SEQ ID NO: 472935 - RNA, 25 nt, Human
caccucuguugccuccauuugagag

SEQ ID NO: 472936 - RNA, 23 nt, Human
cagaggcuuucucagaucagccu

SEQ ID NO: 472937 - RNA, 23 nt, Human
cagcaaaucaucucucccugcuu

SEQ ID NO: 472938 - RNA, 19 nt, Human
caggaaggggugugugggg

SEQ ID NO: 472939 - RNA, 18 nt, Human
caguccucucuugagagu

SEQ ID NO: 472940 - RNA, 20 nt, Human
ccauacuucuuccuucuagu

SEQ ID NO: 472941 - RNA, 26 nt, Human
ccccaccagcaaaucaucucucccug

SEQ ID NO: 472942 - RNA, 18 nt, Human
ccccucugugagacugag

SEQ ID NO: 472943 - RNA, 20 nt, Human
ccccucugugagacugaggg

SEQ ID NO: 472944 - RNA, 25 nt, Human
ccuccacacugagaauccgaaagcc

SEQ ID NO: 472945 - RNA, 19 nt, Human
ccucugcagcaagcggccu

SEQ ID NO: 472946 - RNA, 21 nt, Human
cgaaagccaagaugcccaaga

SEQ ID NO: 472947 - RNA, 23 nt, Human
cggggcagugguauaugcaccuu

SEQ ID NO: 472948 - RNA, 24 nt, Human
cgucacagguagugugacacagag

SEQ ID NO: 472949 - RNA, 22 nt, Human
cuuacuggaauccccacugcau

SEQ ID NO: 472950 - RNA, 22 nt, Human
cuugcucugugaccuggccucu

SEQ ID NO: 472951 - RNA, 22 nt, Human
cuuuaacuccauacuucuuccu

SEQ ID NO: 472952 - RNA, 24 nt, Human
gaaaaacagaaacuaaaagggagc

SEQ ID NO: 472953 - RNA, 20 nt, Human
gaaacaggcacagagaagcu

SEQ ID NO: 472954 - RNA, 25 nt, Human
gaagaaacaggcacagagaagccaa

SEQ ID NO: 472955 - RNA, 19 nt, Human
gaggggcaaaggagagagg

SEQ ID NO: 472956 - RNA, 20 nt, Human
gcaggggcgugucucaaccc

SEQ ID NO: 472957 - RNA, 20 nt, Human
gcucugucucucuguuccug

SEQ ID NO: 472958 - RNA, 18 nt, Human
gcuugcuugaugcgggcu

SEQ ID NO: 472959 - RNA, 24 nt, Human
gggcagaggggcucuccugggauc

SEQ ID NO: 472960 - RNA, 24 nt, Human
gggcagugguauaugcaccuuuuu

SEQ ID NO: 472961 - RNA, 20 nt, Human
gguagugugacacagaguug

SEQ ID NO: 472962 - RNA, 18 nt, Human
gucuuguagaagccccuc

SEQ ID NO: 472963 - RNA, 23 nt, Human
uacgucccuccacacugagaauc

SEQ ID NO: 472964 - RNA, 18 nt, Human
uacuggaauccccacugc

SEQ ID NO: 472965 - RNA, 20 nt, Human
uagugugacacagaguuggg

SEQ ID NO: 472966 - RNA, 20 nt, Human
ucaaagcaaaggagaucuga

SEQ ID NO: 472967 - RNA, 22 nt, Human
ucaaagcaaaggagaucugagc

SEQ ID NO: 472968 - RNA, 19 nt, Human
uccaggggcucugcauguc

SEQ ID NO: 472969 - RNA, 18 nt, Human
uccauacuucuuccuucu

SEQ ID NO: 472970 - RNA, 24 nt, Human
uccccagccccaccagcaaaucau

SEQ ID NO: 472971 - RNA, 20 nt, Human
ucuccugggaucuggacugg

SEQ ID NO: 472972 - RNA, 18 nt, Human
ucuguuccugccccuugc

SEQ ID NO: 472973 - RNA, 24 nt, Human
ugaccuggccucucuggaccccag

SEQ ID NO: 472974 - RNA, 24 nt, Human
ugcaugaagaaacaggcacagagg

SEQ ID NO: 472975 - RNA, 23 nt, Human
ugccugugagguaguugguacuu

SEQ ID NO: 472976 - RNA, 19 nt, Human
ugcucugugaccuggccuc

SEQ ID NO: 472977 - RNA, 19 nt, Human
ugggggcggggucggcggc

SEQ ID NO: 472978 - RNA, 18 nt, Human
uguccgggacuccucagu

SEQ ID NO: 472979 - RNA, 19 nt, Human
ugucuuguagaagccccuc

SEQ ID NO: 472980 - RNA, 21 nt, Human
ugucuuguagaagccccucug

SEQ ID NO: 472981 - RNA, 18 nt, Human
uguuccugccccuugcuc

SEQ ID NO: 472982 - RNA, 24 nt, Human
uuauuuaaaaaaaugaaaaacaga

SEQ ID NO: 472983 - RNA, 25 nt, Human
uuccaggggcucugcaugucugguc

SEQ ID NO: 472984 - RNA, 24 nt, Human
uucuagguugugcagacugccacu

SEQ ID NO: 472985 - RNA, 21 nt, Human
uugucuuguagaagccccucu

SEQ ID NO: 472986 - RNA, 25 nt, Human
uuuaaaaaaaugaaaaacagaaacu

SEQ ID NO: 472987 - RNA, 20 nt, Human
uuuccaggugccaucuuccc

SEQ ID NO: 472988 - RNA, 31 nt, Human
uuuuuuuuuuuuuuuuuuuuaaaagcagggg

SEQ ID NO: 472989 - RNA, 23 nt, Human
aaaaaaaaaaaaaaaaacucgag

SEQ ID NO: 472990 - RNA, 18 nt, Human
aaaacccuucgagaguca

SEQ ID NO: 472991 - RNA, 18 nt, Human
aagagagguccagggacc

SEQ ID NO: 472992 - RNA, 18 nt, Human
aagcaccgcaaaugcagc

SEQ ID NO: 472993 - RNA, 22 nt, Human
aagcaccgcaaaugcagcccca

SEQ ID NO: 472994 - RNA, 23 nt, Human
aagcaccgcaaaugcagccccac

SEQ ID NO: 472995 - RNA, 25 nt, Human
aagcaccgcaaaugcagccccacaa

SEQ ID NO: 472996 - RNA, 23 nt, Human
aaggaagaggaagucagcaaagg

SEQ ID NO: 472997 - RNA, 22 nt, Human
aaggacagaggccaaggaagga

SEQ ID NO: 472998 - RNA, 24 nt, Human
acagaggccaaggaaggaaggagg

SEQ ID NO: 472999 - RNA, 21 nt, Human
acaguggggagggcaaagcac

SEQ ID NO: 473000 - RNA, 18 nt, Human
agaggccaaggaaggaag

SEQ ID NO: 473001 - RNA, 19 nt, Human
agccucuaagccuuugccu

SEQ ID NO: 473002 - RNA, 20 nt, Human
aggaagaggaagucagcaaa

SEQ ID NO: 473003 - RNA, 21 nt, Human
aggaaggaaggaggaaacaga

SEQ ID NO: 473004 - RNA, 23 nt, Human
aggaaggaaggaggaaacagagc

SEQ ID NO: 473005 - RNA, 21 nt, Human
agggaaggagagagaaaaaaa

SEQ ID NO: 473006 - RNA, 23 nt, Human
aggggaggaggggguucucaggu

SEQ ID NO: 473007 - RNA, 18 nt, Human
aggggguucucagguguc

SEQ ID NO: 473008 - RNA, 22 nt, Human
agucaaagcaaugcagacuccu

SEQ ID NO: 473009 - RNA, 20 nt, Human
caguggauaggccccucccc

SEQ ID NO: 473010 - RNA, 19 nt, Human
ccaaagccaagaacaaaac

SEQ ID NO: 473011 - RNA, 21 nt, Human
ccaaagccaagaacaaaaccc

SEQ ID NO: 473012 - RNA, 20 nt, Human
ccacaagaggaacuaagcag

SEQ ID NO: 473013 - RNA, 24 nt, Human
ccaccuaggccagcugccaaggac

SEQ ID NO: 473014 - RNA, 21 nt, Human
cccuccccacugccccgaccc

SEQ ID NO: 473015 - RNA, 21 nt, Human
cccuccuauagucugcccacc

SEQ ID NO: 473016 - RNA, 21 nt, Human
ccguccuguggcgaauuccag

SEQ ID NO: 473017 - RNA, 21 nt, Human
cuaagccuuugccuccauacc

SEQ ID NO: 473018 - RNA, 21 nt, Human
gagccucugacacggccgucu

SEQ ID NO: 473019 - RNA, 24 nt, Human
gccaaggacuaggaagagcagugg

SEQ ID NO: 473020 - RNA, 23 nt, Human
gccccuccccacugccccgaccc

SEQ ID NO: 473021 - RNA, 19 nt, Human
ggaaggagagagaaaaaaa

SEQ ID NO: 473022 - RNA, 20 nt, Human
ggaggaaacagagccgcugg

SEQ ID NO: 473023 - RNA, 21 nt, Human
ggccccuccccacugccccga

SEQ ID NO: 473024 - RNA, 18 nt, Human
ggggaggggaggaggggg

SEQ ID NO: 473025 - RNA, 19 nt, Human
gggggaggggaggaggggg

SEQ ID NO: 473026 - RNA, 21 nt, Human
gucuagagaauggaugcaaga

SEQ ID NO: 473027 - RNA, 21 nt, Human
uaaccaaggagagggaaguca

SEQ ID NO: 473028 - RNA, 18 nt, Human
uaagccuuugccuccaua

SEQ ID NO: 473029 - RNA, 19 nt, Human
uaccaaguucacaacaggg

SEQ ID NO: 473030 - RNA, 24 nt, Human
ucaaagcaaugcagacuccuaacc

SEQ ID NO: 473031 - RNA, 21 nt, Human
ucagcaaaggacagaggccaa

SEQ ID NO: 473032 - RNA, 21 nt, Human
uccaaagccaagaacaaaacc

SEQ ID NO: 473033 - RNA, 28 nt, Human
uccaaagccaagaacaaaaccggggucc

SEQ ID NO: 473034 - RNA, 20 nt, Human
uccagggaccacuugccucu

SEQ ID NO: 473035 - RNA, 21 nt, Human
ucccuuggccccucacucaca

SEQ ID NO: 473036 - RNA, 23 nt, Human
ugacacggccgucuagagaaugg

SEQ ID NO: 473037 - RNA, 18 nt, Human
ugccaaggacuaggaaga

SEQ ID NO: 473038 - RNA, 19 nt, Human
ugccaaggacuaggaagag

SEQ ID NO: 473039 - RNA, 23 nt, Human
ugccccgaccccagggugaguuc

SEQ ID NO: 473040 - RNA, 19 nt, Human
ugcugcagggaaggagaga

SEQ ID NO: 473041 - RNA, 18 nt, Human
uucucucucucucucucc

SEQ ID NO: 473042 - RNA, 18 nt, Human
uuuuuuuuuuuuuccuug

SEQ ID NO: 473043 - RNA, 20 nt, Human
aagagaaaggaaauuacaaa

SEQ ID NO: 473044 - RNA, 21 nt, Human
aagagaaaggaaauuacaaac

SEQ ID NO: 473045 - RNA, 20 nt, Human
aggugcugccggccgccuga

SEQ ID NO: 473046 - RNA, 20 nt, Human
cacgcgccgcagccuggacc

SEQ ID NO: 473047 - RNA, 19 nt, Human
caggaucagcuguuuccuc

SEQ ID NO: 473048 - RNA, 20 nt, Human
cagggcaggugcugccggcc

SEQ ID NO: 473049 - RNA, 18 nt, Human
cccccgcccccgcuccgc

SEQ ID NO: 473050 - RNA, 20 nt, Human
cccccgcccccgcuccgccc

SEQ ID NO: 473051 - RNA, 21 nt, Human
cccccgcuccgcccgcucccc

SEQ ID NO: 473052 - RNA, 25 nt, Human
cccccgggugccccgcgcucggccc

SEQ ID NO: 473053 - RNA, 26 nt, Human
ccccgcccccgcuccgcccgcucccc

SEQ ID NO: 473054 - RNA, 23 nt, Human
ccccgcgcucggcccccgccccc

SEQ ID NO: 473055 - RNA, 19 nt, Human
ccccgggugccccgcgcuc

SEQ ID NO: 473056 - RNA, 24 nt, Human
cccugccgcccuggcuggugucca

SEQ ID NO: 473057 - RNA, 23 nt, Human
ccgcccccgcuccgcccgcuccc

SEQ ID NO: 473058 - RNA, 25 nt, Human
ccgcccgcuccccacgcgccgcagc

SEQ ID NO: 473059 - RNA, 21 nt, Human
ccgcgcucggcccccgccccc

SEQ ID NO: 473060 - RNA, 20 nt, Human
ccuggggggugcuggguggg

SEQ ID NO: 473061 - RNA, 22 nt, Human
cgcccgcuccccacgcgccgca

SEQ ID NO: 473062 - RNA, 22 nt, Human
cgggugccccgcgcucggcccc

SEQ ID NO: 473063 - RNA, 21 nt, Human
cugccgcccuggcuggugucc

SEQ ID NO: 473064 - RNA, 22 nt, Human
cuggggggugcugggugggggc

SEQ ID NO: 473065 - RNA, 21 nt, Human
gagcaggaucagcuguuuccu

SEQ ID NO: 473066 - RNA, 20 nt, Human
gccccgcgcucggcccccgc

SEQ ID NO: 473067 - RNA, 18 nt, Human
gcccgcuccccacgcgcc

SEQ ID NO: 473068 - RNA, 18 nt, Human
ggcccccgcccccgcucc

SEQ ID NO: 473069 - RNA, 20 nt, Human
gggggugcugggugggggcg

SEQ ID NO: 473070 - RNA, 18 nt, Human
gugcugccggccgccugg

SEQ ID NO: 473071 - RNA, 23 nt, Human
uagaacccagggcaggugcugcc

SEQ ID NO: 473072 - RNA, 19 nt, Human
ucccaaggccugggagcuc

SEQ ID NO: 473073 - RNA, 21 nt, Human
ucccaaggccugggagcuccu

SEQ ID NO: 473074 - RNA, 22 nt, Human
ucccaaggccugggagcuccug

SEQ ID NO: 473075 - RNA, 25 nt, Human
ugcccugccgcccuggcuggugucc

SEQ ID NO: 473076 - RNA, 19 nt, Human
uggggggugcugggugggg

SEQ ID NO: 473077 - RNA, 21 nt, Human
aaacagaaagccggcgcagga

SEQ ID NO: 473078 - RNA, 22 nt, Human
aaccaaggaaccacguugccag

SEQ ID NO: 473079 - RNA, 21 nt, Human
aaccccacccugcagcaccuc

SEQ ID NO: 473080 - RNA, 23 nt, Human
aacgaaaagggagguagaaagaa

SEQ ID NO: 473081 - RNA, 18 nt, Human
aagacgcuggagaggcca

SEQ ID NO: 473082 - RNA, 21 nt, Human
aaggcagccccauccuccucu

SEQ ID NO: 473083 - RNA, 25 nt, Human
aaggcagccccauccuccucuccug

SEQ ID NO: 473084 - RNA, 18 nt, Human
acacugaguccccugugu

SEQ ID NO: 473085 - RNA, 21 nt, Human
acagagcaaagacgcuggaga

SEQ ID NO: 473086 - RNA, 24 nt, Human
acagagcaaagacgcuggagaggc

SEQ ID NO: 473087 - RNA, 23 nt, Human
acagcccgccagagacacagcaa

SEQ ID NO: 473088 - RNA, 21 nt, Human
acccacccugacggccacacc

SEQ ID NO: 473089 - RNA, 22 nt, Human
acccaggcccaccccacccucc

SEQ ID NO: 473090 - RNA, 22 nt, Human
accucgguggccucaaacccca

SEQ ID NO: 473091 - RNA, 22 nt, Human
agagagaaacccgcugaauagu

SEQ ID NO: 473092 - RNA, 23 nt, Human
agcaaaguccaguggaaccugga

SEQ ID NO: 473093 - RNA, 18 nt, Human
agcagaaucaccaggccu

SEQ ID NO: 473094 - RNA, 19 nt, Human
agcagaaucaccaggccug

SEQ ID NO: 473095 - RNA, 19 nt, Human
agcuguuguggacucuucu

SEQ ID NO: 473096 - RNA, 18 nt, Human
aggacggggccaaguccu

SEQ ID NO: 473097 - RNA, 18 nt, Human
aggcagccccauccuccu

SEQ ID NO: 473098 - RNA, 21 nt, Human
aggcccagagagcagcgagcc

SEQ ID NO: 473099 - RNA, 20 nt, Human
aggcugcagccuggugccag

SEQ ID NO: 473100 - RNA, 21 nt, Human
aggcugcagccuggugccagc

SEQ ID NO: 473101 - RNA, 23 nt, Human
aggcugcagccuggugccagccu

SEQ ID NO: 473102 - RNA, 21 nt, Human
agggauggguggaggccaggg

SEQ ID NO: 473103 - RNA, 23 nt, Human
agucagggcagauggcgacucau

SEQ ID NO: 473104 - RNA, 24 nt, Human
agugaccaagucccacacacugag

SEQ ID NO: 473105 - RNA, 26 nt, Human
augagaugaucagagagaaacccgcu

SEQ ID NO: 473106 - RNA, 21 nt, Human
augcggguucgagagccugcg

SEQ ID NO: 473107 - RNA, 22 nt, Human
augcugggcagggcccaagggg

SEQ ID NO: 473108 - RNA, 18 nt, Human
auggagugaccaaguccc

SEQ ID NO: 473109 - RNA, 19 nt, Human
caaaccccacagacagggg

SEQ ID NO: 473110 - RNA, 21 nt, Human
caaggaaccacguugccagua

SEQ ID NO: 473111 - RNA, 25 nt, Human
caccaaacagaaagccggcgcagga

SEQ ID NO: 473112 - RNA, 18 nt, Human
caccaaccaaggaaccac

SEQ ID NO: 473113 - RNA, 19 nt, Human
caccaaggaggacagcccg

SEQ ID NO: 473114 - RNA, 21 nt, Human
cacccacccugacggccacac

SEQ ID NO: 473115 - RNA, 22 nt, Human
cacccacugcccugggggucuc

SEQ ID NO: 473116 - RNA, 18 nt, Human
caccccacccucccacca

SEQ ID NO: 473117 - RNA, 21 nt, Human
caccgugauggcucuguaacc

SEQ ID NO: 473118 - RNA, 19 nt, Human
caccugccgucagcaaagu

SEQ ID NO: 473119 - RNA, 23 nt, Human
cacugaguccccugugucccggg

SEQ ID NO: 473120 - RNA, 28 nt, Human
cagagcaaagacgcuggagaggccaagg

SEQ ID NO: 473121 - RNA, 22 nt, Human
cagcccgccagagacacagcaa

SEQ ID NO: 473122 - RNA, 21 nt, Human
cagccuggugccagccucaca

SEQ ID NO: 473123 - RNA, 18 nt, Human
caggacagcucccaccaa

SEQ ID NO: 473124 - RNA, 18 nt, Human
caggaggggagagcggcg

SEQ ID NO: 473125 - RNA, 18 nt, Human
cagggcccaaggggugcc

SEQ ID NO: 473126 - RNA, 21 nt, Human
caugagccaccugccgucagc

SEQ ID NO: 473127 - RNA, 18 nt, Human
ccacagugguuuguguuc

SEQ ID NO: 473128 - RNA, 21 nt, Human
ccaccccacccucccaccagc

SEQ ID NO: 473129 - RNA, 29 nt, Human
ccacccucccaccagcuguuguggacucc

SEQ ID NO: 473130 - RNA, 21 nt, Human
ccacugugguugaaggucugg

SEQ ID NO: 473131 - RNA, 21 nt, Human
ccaggccugggaaagccaugc

SEQ ID NO: 473132 - RNA, 18 nt, Human
ccaguggaaccuggaagg

SEQ ID NO: 473133 - RNA, 19 nt, Human
cccacacacugaguccccu

SEQ ID NO: 473134 - RNA, 18 nt, Human
cccacccacccugacggc

SEQ ID NO: 473135 - RNA, 19 nt, Human
cccacccacccugacggcc

SEQ ID NO: 473136 - RNA, 21 nt, Human
cccacccacccugacggccac

SEQ ID NO: 473137 - RNA, 25 nt, Human
cccacccacccugacggccacacca

SEQ ID NO: 473138 - RNA, 21 nt, Human
cccacccucccaccagcuguu

SEQ ID NO: 473139 - RNA, 22 nt, Human
cccaggcacagagcaaagacgc

SEQ ID NO: 473140 - RNA, 21 nt, Human
cccauccuccucuccugggcc

SEQ ID NO: 473141 - RNA, 23 nt, Human
ccccacagacaggggaacuccug

SEQ ID NO: 473142 - RNA, 22 nt, Human
cccccucugaagggaggcacaa

SEQ ID NO: 473143 - RNA, 26 nt, Human
cccugggcuaccaggaugggaacaua

SEQ ID NO: 473144 - RNA, 20 nt, Human
ccgccacccacccacugccc

SEQ ID NO: 473145 - RNA, 22 nt, Human
ccggggacccugggcuaccagg

SEQ ID NO: 473146 - RNA, 21 nt, Human
ccuacagugugcaggacagcu

SEQ ID NO: 473147 - RNA, 20 nt, Human
ccucacauuggcaggcgggc

SEQ ID NO: 473148 - RNA, 18 nt, Human
ccucucugcucguguguc

SEQ ID NO: 473149 - RNA, 20 nt, Human
cgccagggucccggacacag

SEQ ID NO: 473150 - RNA, 18 nt, Human
cgccccucaccugccaag

SEQ ID NO: 473151 - RNA, 22 nt, Human
cgccuacuaacaauaaccccag

SEQ ID NO: 473152 - RNA, 21 nt, Human
cgccuggguccuuggagaggc

SEQ ID NO: 473153 - RNA, 18 nt, Human
cggaaucgccaccaacca

SEQ ID NO: 473154 - RNA, 25 nt, Human
cggcuguguuggccacaccaaacaa

SEQ ID NO: 473155 - RNA, 20 nt, Human
cuagcccgccacccacccac

SEQ ID NO: 473156 - RNA, 19 nt, Human
cuccugggccugcucuggg

SEQ ID NO: 473157 - RNA, 24 nt, Human
cugaagggaggcacaaccccaccc

SEQ ID NO: 473158 - RNA, 19 nt, Human
cugacggccacaccagccu

SEQ ID NO: 473159 - RNA, 24 nt, Human
cugaugcaaagaccacagacucac

SEQ ID NO: 473160 - RNA, 22 nt, Human
cugcaugagcuuccgcaccgug

SEQ ID NO: 473161 - RNA, 21 nt, Human
cugcgccuacuaacaauaacc

SEQ ID NO: 473162 - RNA, 24 nt, Human
cugcgccuacuaacaauaacccca

SEQ ID NO: 473163 - RNA, 19 nt, Human
cuggaggccgauggaggcu

SEQ ID NO: 473164 - RNA, 22 nt, Human
cuggauguuaacagaaaugcca

SEQ ID NO: 473165 - RNA, 23 nt, Human
cugggcagggcccaaggggugcc

SEQ ID NO: 473166 - RNA, 22 nt, Human
cugugguugaaggucuggaggc

SEQ ID NO: 473167 - RNA, 20 nt, Human
cuuuggcgugcuuuuccaca

SEQ ID NO: 473168 - RNA, 20 nt, Human
gacccugggcuaccaggaug

SEQ ID NO: 473169 - RNA, 22 nt, Human
gaggacagcccgccagagacac

SEQ ID NO: 473170 - RNA, 22 nt, Human
gaggcacaaccccacccugcag

SEQ ID NO: 473171 - RNA, 22 nt, Human
gcaccgugauggcucuguaacc

SEQ ID NO: 473172 - RNA, 18 nt, Human
gcccgccccucaccugcc

SEQ ID NO: 473173 - RNA, 18 nt, Human
gcgggcgcugcaggaggc

SEQ ID NO: 473174 - RNA, 20 nt, Human
gcugcagccuggugccagcc

SEQ ID NO: 473175 - RNA, 20 nt, Human
gcuggagaggccaaggccca

SEQ ID NO: 473176 - RNA, 20 nt, Human
gcugggcagggcccaagggg

SEQ ID NO: 473177 - RNA, 21 nt, Human
ggauccacaggaggggagagc

SEQ ID NO: 473178 - RNA, 18 nt, Human
ggcccaccccacccuccc

SEQ ID NO: 473179 - RNA, 20 nt, Human
ggccugcucuggggucugug

SEQ ID NO: 473180 - RNA, 18 nt, Human
ggcugugggguugggagc

SEQ ID NO: 473181 - RNA, 22 nt, Human
gggcugggauuggggaggcugc

SEQ ID NO: 473182 - RNA, 20 nt, Human
gggucuguguguucuggggu

SEQ ID NO: 473183 - RNA, 21 nt, Human
ggguggaggccagggauaccu

SEQ ID NO: 473184 - RNA, 20 nt, Human
gucucuagcccgccacccac

SEQ ID NO: 473185 - RNA, 19 nt, Human
guggacucuucuuaaggag

SEQ ID NO: 473186 - RNA, 23 nt, Human
gugucugacauggagugaccaag

SEQ ID NO: 473187 - RNA, 24 nt, Human
uaacaauaaccccacccacccuga

SEQ ID NO: 473188 - RNA, 24 nt, Human
uaacaauaaccccacccacccuga

SEQ ID NO: 473189 - RNA, 25 nt, Human
uaacaauaaccccacccacccugac

SEQ ID NO: 473190 - RNA, 22 nt, Human
uaacccugauugaugagaugau

SEQ ID NO: 473191 - RNA, 21 nt, Human
ucaaaccccacagacagggga

SEQ ID NO: 473192 - RNA, 23 nt, Human
ucacagaagcuggagguguggcc

SEQ ID NO: 473193 - RNA, 21 nt, Human
ucaggcaacgaaaagggaggu

SEQ ID NO: 473194 - RNA, 22 nt, Human
ucagggcagauggcgacucaug

SEQ ID NO: 473195 - RNA, 19 nt, Human
ucccggggacccugggcua

SEQ ID NO: 473196 - RNA, 23 nt, Human
ucccggggacccugggcuaccag

SEQ ID NO: 473197 - RNA, 18 nt, Human
uccugggcacagaggccc

SEQ ID NO: 473198 - RNA, 21 nt, Human
uccugggcacagaggcccgcc

SEQ ID NO: 473199 - RNA, 20 nt, Human
ucguggugggaaugaggcuc

SEQ ID NO: 473200 - RNA, 19 nt, Human
ucuccugggccugcucugg

SEQ ID NO: 473201 - RNA, 19 nt, Human
ucugacauggagugaccaa

SEQ ID NO: 473202 - RNA, 18 nt, Human
ucuguaacccugauugau

SEQ ID NO: 473203 - RNA, 20 nt, Human
ugaagggaggcacaacccca

SEQ ID NO: 473204 - RNA, 21 nt, Human
ugaagggaggcacaaccccac

SEQ ID NO: 473205 - RNA, 24 nt, Human
ugaccaagucccacacacugaguc

SEQ ID NO: 473206 - RNA, 18 nt, Human
ugagucagggcagauggc

SEQ ID NO: 473207 - RNA, 20 nt, Human
ugagucagggcagauggcga

SEQ ID NO: 473208 - RNA, 20 nt, Human
ugaugcaaagaccacagacu

SEQ ID NO: 473209 - RNA, 18 nt, Human
ugccaaggccccggcugu

SEQ ID NO: 473210 - RNA, 19 nt, Human
ugccaaggccccggcugug

SEQ ID NO: 473211 - RNA, 23 nt, Human
ugcccugggggucucugucaggc

SEQ ID NO: 473212 - RNA, 18 nt, Human
ugcggagggauccacagg

SEQ ID NO: 473213 - RNA, 21 nt, Human
uggaaccuggaaggcagcccc

SEQ ID NO: 473214 - RNA, 18 nt, Human
uggaaggcagccccaucc

SEQ ID NO: 473215 - RNA, 19 nt, Human
uggcaggcgggcgcugcag

SEQ ID NO: 473216 - RNA, 19 nt, Human
uggcagguggggaaacuga

SEQ ID NO: 473217 - RNA, 19 nt, Human
uggcccaggcacagagcaa

SEQ ID NO: 473218 - RNA, 21 nt, Human
uggccucaaaccccacagaca

SEQ ID NO: 473219 - RNA, 22 nt, Human
ugggauuggggaggcugcagcc

SEQ ID NO: 473220 - RNA, 20 nt, Human
ugggcugggauuggggaggc

SEQ ID NO: 473221 - RNA, 21 nt, Human
ugggcugggauuggggaggcu

SEQ ID NO: 473222 - RNA, 24 nt, Human
uggggcccgcccccgaggaaggug

SEQ ID NO: 473223 - RNA, 23 nt, Human
uggugccagccucacauuggcag

SEQ ID NO: 473224 - RNA, 18 nt, Human
uggugggaaugaggcugc

SEQ ID NO: 473225 - RNA, 19 nt, Human
uguggcccaggcacagagc

SEQ ID NO: 473226 - RNA, 24 nt, Human
uguggcccaggcacagagcaaaga

SEQ ID NO: 473227 - RNA, 18 nt, Human
uuuuuuuuuuuuuuuuug

SEQ ID NO: 473228 - RNA, 21 nt, Human
aacccgcuccgcaggccccug

SEQ ID NO: 473229 - RNA, 21 nt, Human
aacuaucguuucccccgcccc

SEQ ID NO: 473230 - RNA, 23 nt, Human
acaccaggacugugccaccacac

SEQ ID NO: 473231 - RNA, 24 nt, Human
acccugcacaaccuccuuccuccu

SEQ ID NO: 473232 - RNA, 27 nt, Human
agaaaugcuacccucauaauugccucc

SEQ ID NO: 473233 - RNA, 22 nt, Human
agaacuaucguuucccccgccc

SEQ ID NO: 473234 - RNA, 27 nt, Human
agacggcgcuggcaccgcgccggcgcg

SEQ ID NO: 473235 - RNA, 20 nt, Human
agcuccgcccucccgacagc

SEQ ID NO: 473236 - RNA, 24 nt, Human
agcuccgcccucccgacagcucca

SEQ ID NO: 473237 - RNA, 23 nt, Human
aggccccugaaccgaaagagggc

SEQ ID NO: 473238 - RNA, 18 nt, Human
agggaagugccugacauu

SEQ ID NO: 473239 - RNA, 18 nt, Human
agggcggggccgggcaga

SEQ ID NO: 473240 - RNA, 26 nt, Human
aucccacccccaccccuacucggcca

SEQ ID NO: 473241 - RNA, 18 nt, Human
aucccgggcccgcagcuc

SEQ ID NO: 473242 - RNA, 21 nt, Human
cacagucauauuugggugguc

SEQ ID NO: 473243 - RNA, 24 nt, Human
caccaggacugugccaccacaccu

SEQ ID NO: 473244 - RNA, 21 nt, Human
caccugucccucuggagucca

SEQ ID NO: 473245 - RNA, 20 nt, Human
cagguccagacccugcacaa

SEQ ID NO: 473246 - RNA, 24 nt, Human
ccacaccaggacugugccaccaca

SEQ ID NO: 473247 - RNA, 21 nt, Human
ccacccacucucccaugacug

SEQ ID NO: 473248 - RNA, 19 nt, Human
ccagacccugcacaaccuc

SEQ ID NO: 473249 - RNA, 19 nt, Human
ccauccacccuccagcugc

SEQ ID NO: 473250 - RNA, 22 nt, Human
cccacccacucucccaugaccu

SEQ ID NO: 473251 - RNA, 23 nt, Human
ccccaacccgcuccgcaggcccc

SEQ ID NO: 473252 - RNA, 29 nt, Human
ccccauccacccuccagcugcucuuccaa

SEQ ID NO: 473253 - RNA, 27 nt, Human
cccccgccccaacccgcuccgcaggcc

SEQ ID NO: 473254 - RNA, 22 nt, Human
cccccggggcuggagggcgugg

SEQ ID NO: 473255 - RNA, 18 nt, Human
ccccggggcuggagggcg

SEQ ID NO: 473256 - RNA, 23 nt, Human
ccccugaaccgaaagagggcggg

SEQ ID NO: 473257 - RNA, 21 nt, Human
ccgagucaauagcagagcugg

SEQ ID NO: 473258 - RNA, 21 nt, Human
ccgcccucccgacagcuccag

SEQ ID NO: 473259 - RNA, 18 nt, Human
ccgccgcgaucccgggcc

SEQ ID NO: 473260 - RNA, 21 nt, Human
ccucagggcucucaggcaggu

SEQ ID NO: 473261 - RNA, 24 nt, Human
ccucagggcucucaggcagguggg

SEQ ID NO: 473262 - RNA, 21 nt, Human
ccuccugccaucccaccccca

SEQ ID NO: 473263 - RNA, 18 nt, Human
ccuccugcggcuccuccu

SEQ ID NO: 473264 - RNA, 24 nt, Human
ccucuggaguccacuuccagucac

SEQ ID NO: 473265 - RNA, 21 nt, Human
ccugccaucccacccccaccc

SEQ ID NO: 473266 - RNA, 22 nt, Human
ccugucccucuggaguccacuu

SEQ ID NO: 473267 - RNA, 21 nt, Human
cgaaagaaaugcuacccucau

SEQ ID NO: 473268 - RNA, 18 nt, Human
cggcgcuggcaccgcgcc

SEQ ID NO: 473269 - RNA, 25 nt, Human
cggcuccuccugccaucccaccccc

SEQ ID NO: 473270 - RNA, 27 nt, Human
cggggccgggcagacggcgcuggcacc

SEQ ID NO: 473271 - RNA, 19 nt, Human
cucaggcagguggggcugu

SEQ ID NO: 473272 - RNA, 18 nt, Human
cuccagccccguccagcc

SEQ ID NO: 473273 - RNA, 24 nt, Human
cuccccauccacccuccagcugcu

SEQ ID NO: 473274 - RNA, 21 nt, Human
cugccuggcucccgguugggg

SEQ ID NO: 473275 - RNA, 18 nt, Human
cugcggcuccuccugcca

SEQ ID NO: 473276 - RNA, 20 nt, Human
cuucagcccugcagguccag

SEQ ID NO: 473277 - RNA, 21 nt, Human
cuugcaaaccucuucucuuac

SEQ ID NO: 473278 - RNA, 24 nt, Human
cuugcaaaccucuucucuuacccu

SEQ ID NO: 473279 - RNA, 18 nt, Human
gaaagaaaugcuacccuc

SEQ ID NO: 473280 - RNA, 18 nt, Human
gagucaauagcagagcug

SEQ ID NO: 473281 - RNA, 20 nt, Human
gcagucagcggaccagugcc

SEQ ID NO: 473282 - RNA, 23 nt, Human
gccaccacaccugucccucugga

SEQ ID NO: 473283 - RNA, 20 nt, Human
gcccucccgacagcuccagc

SEQ ID NO: 473284 - RNA, 19 nt, Human
gcccuguagcuccgcccuc

SEQ ID NO: 473285 - RNA, 20 nt, Human
gcccuguagcuccgcccucc

SEQ ID NO: 473286 - RNA, 22 nt, Human
gccgcgaucccgggcccgcagc

SEQ ID NO: 473287 - RNA, 18 nt, Human
gccuccccauccacccuc

SEQ ID NO: 473288 - RNA, 24 nt, Human
gcuccgcaggccccugaaccgaaa

SEQ ID NO: 473289 - RNA, 22 nt, Human
gcuccgcccucccgacagcucc

SEQ ID NO: 473290 - RNA, 23 nt, Human
gcugaccuuggggccuucccaga

SEQ ID NO: 473291 - RNA, 23 nt, Human
ggcgggucccuucagccuggcag

SEQ ID NO: 473292 - RNA, 19 nt, Human
gguggggcuguugcaugcc

SEQ ID NO: 473293 - RNA, 19 nt, Human
gucuugcaaaccucuucuc

SEQ ID NO: 473294 - RNA, 20 nt, Human
guggucagcaccacaccagg

SEQ ID NO: 473295 - RNA, 20 nt, Human
uacccucauaauugccucca

SEQ ID NO: 473296 - RNA, 20 nt, Human
uaggaaacugaggcccauga

SEQ ID NO: 473297 - RNA, 20 nt, Human
ucagaccaggacucuucugu

SEQ ID NO: 473298 - RNA, 23 nt, Human
uccacaauucacagucauauuug

SEQ ID NO: 473299 - RNA, 19 nt, Human
ucccaugaccuuaucuccc

SEQ ID NO: 473300 - RNA, 25 nt, Human
ucccaugaccuuaucucccccgggg

SEQ ID NO: 473301 - RNA, 27 nt, Human
ucccccgccccaacccgcuccgcaggc

SEQ ID NO: 473302 - RNA, 19 nt, Human
ucccccggggcuggagggc

SEQ ID NO: 473303 - RNA, 20 nt, Human
ucccucuggccuccccaucc

SEQ ID NO: 473304 - RNA, 19 nt, Human
uccgcaggccccugaaccg

SEQ ID NO: 473305 - RNA, 21 nt, Human
uccgcaggccccugaaccgaa

SEQ ID NO: 473306 - RNA, 21 nt, Human
ugagugaacuucagcccugca

SEQ ID NO: 473307 - RNA, 22 nt, Human
ugccaccacaccugucccucug

SEQ ID NO: 473308 - RNA, 26 nt, Human
ugccccuugccgggcugcgcgcucug

SEQ ID NO: 473309 - RNA, 19 nt, Human
ugcuacccucauaauugcc

SEQ ID NO: 473310 - RNA, 22 nt, Human
uggcagucagcggaccagugcc

SEQ ID NO: 473311 - RNA, 25 nt, Human
uggcugggguggggugcaagugggg

SEQ ID NO: 473312 - RNA, 20 nt, Human
ugggguccuucauaagcuga

SEQ ID NO: 473313 - RNA, 23 nt, Human
ugggguggggugcaagugggguc

SEQ ID NO: 473314 - RNA, 23 nt, Human
ugucucgaaagaaaugcuacccu

SEQ ID NO: 473315 - RNA, 18 nt, Human
uugcucccucuggccucc

SEQ ID NO: 473316 - RNA, 18 nt, Human
uuucccccgccccaaccc

SEQ ID NO: 473317 - RNA, 24 nt, Human
aaaaaaaaacacuggguuagaggg

SEQ ID NO: 473318 - RNA, 19 nt, Human
aaaaugcugguuguauccc

SEQ ID NO: 473319 - RNA, 18 nt, Human
aaacauagcuucuucuaa

SEQ ID NO: 473320 - RNA, 20 nt, Human
aaagcaauaaaaauaaaaac

SEQ ID NO: 473321 - RNA, 23 nt, Human
aaauacccaauucugccuagaac

SEQ ID NO: 473322 - RNA, 20 nt, Human
aacauguacacaacaacaac

SEQ ID NO: 473323 - RNA, 18 nt, Human
acaaagcaauaaaaauaa

SEQ ID NO: 473324 - RNA, 22 nt, Human
acaaagcaauaaaaauaaaaac

SEQ ID NO: 473325 - RNA, 23 nt, Human
acaacaacaaaaaaaaacacugg

SEQ ID NO: 473326 - RNA, 23 nt, Human
acaaggacuaaaaagagaauaau

SEQ ID NO: 473327 - RNA, 21 nt, Human
acacgugaaaguuucauaaaa

SEQ ID NO: 473328 - RNA, 22 nt, Human
acccaauacccaacagggugcc

SEQ ID NO: 473329 - RNA, 22 nt, Human
acccaauacccaacagggugcc

SEQ ID NO: 473330 - RNA, 23 nt, Human
agguaaccacaaaaauacaaagc

SEQ ID NO: 473331 - RNA, 27 nt, Human
auaacauguacacaacaacaacaaaaa

SEQ ID NO: 473332 - RNA, 25 nt, Human
aucccucucuucccuucccacccaa

SEQ ID NO: 473333 - RNA, 19 nt, Human
caaaaaaaaacacuggguu

SEQ ID NO: 473334 - RNA, 24 nt, Human
caaaaaaaaacacuggguuagagg

SEQ ID NO: 473335 - RNA, 20 nt, Human
caacagcuccaaccgaucag

SEQ ID NO: 473336 - RNA, 25 nt, Human
cagcgaguaucagcaacugagacuu

SEQ ID NO: 473337 - RNA, 21 nt, Human
cauccuugucucacaaggacu

SEQ ID NO: 473338 - RNA, 19 nt, Human
caugacccugaaagagaaa

SEQ ID NO: 473339 - RNA, 23 nt, Human
ccaauacccaacagggugccaag

SEQ ID NO: 473340 - RNA, 23 nt, Human
ccaauacccaacagggugccaag

SEQ ID NO: 473341 - RNA, 24 nt, Human
cccaauucugccuagaacaugacu

SEQ ID NO: 473342 - RNA, 18 nt, Human
cccucucuucccuuccca

SEQ ID NO: 473343 - RNA, 18 nt, Human
ccugugccuuaaaccaga

SEQ ID NO: 473344 - RNA, 24 nt, Human
cuaaaaagagaauaauguucucau

SEQ ID NO: 473345 - RNA, 19 nt, Human
cucuaccuacuuacugccu

SEQ ID NO: 473346 - RNA, 19 nt, Human
cugaagccugagguucccu

SEQ ID NO: 473347 - RNA, 21 nt, Human
cugagacuucauccuugucuc

SEQ ID NO: 473348 - RNA, 22 nt, Human
cugguacuuuugcauccacacu

SEQ ID NO: 473349 - RNA, 23 nt, Human
cuucccuucccacccaaacauag

SEQ ID NO: 473350 - RNA, 22 nt, Human
gaaaagaaacugaggcugggca

SEQ ID NO: 473351 - RNA, 23 nt, Human
gagacuucauccuugucucacaa

SEQ ID NO: 473352 - RNA, 26 nt, Human
gcuguauucuauuucauuuuuuaaaa

SEQ ID NO: 473353 - RNA, 18 nt, Human
gguucaaugccacaccca

SEQ ID NO: 473354 - RNA, 20 nt, Human
gguuguaucccauuaaacug

SEQ ID NO: 473355 - RNA, 19 nt, Human
guaagugguuacgccuccc

SEQ ID NO: 473356 - RNA, 33 nt, Human
gucacaaucugggagaagccuguccucaauuuu

SEQ ID NO: 473357 - RNA, 19 nt, Human
uaaaagcuagcuccuggua

SEQ ID NO: 473358 - RNA, 22 nt, Human
uacaaagcaauaaaaauaaaaa

SEQ ID NO: 473359 - RNA, 24 nt, Human
uacacaacaacaacaaaaaaaaac

SEQ ID NO: 473360 - RNA, 22 nt, Human
uacccaacagggugccaaguac

SEQ ID NO: 473361 - RNA, 25 nt, Human
uagaaaucaacucaguuuguuuagc

SEQ ID NO: 473362 - RNA, 21 nt, Human
uauguuuguugauuggaguuu

SEQ ID NO: 473363 - RNA, 23 nt, Human
uauguuuguugauuggaguuuac

SEQ ID NO: 473364 - RNA, 25 nt, Human
uauuuucuuaucccucucuucccuu

SEQ ID NO: 473365 - RNA, 21 nt, Human
ucacaaggacuaaaaagagaa

SEQ ID NO: 473366 - RNA, 19 nt, Human
ucacaaucugggagaagcc

SEQ ID NO: 473367 - RNA, 18 nt, Human
ucccugcaggaagggcuc

SEQ ID NO: 473368 - RNA, 21 nt, Human
ucccugcaggaagggcucuug

SEQ ID NO: 473369 - RNA, 21 nt, Human
ucucuucccuucccacccaaa

SEQ ID NO: 473370 - RNA, 24 nt, Human
ugaaagagaaauauauuugacauc

SEQ ID NO: 473371 - RNA, 18 nt, Human
ugacacgaucacauacca

SEQ ID NO: 473372 - RNA, 19 nt, Human
ugagguucccugcaggaag

SEQ ID NO: 473373 - RNA, 20 nt, Human
ugcaggaagggcucuugugg

SEQ ID NO: 473374 - RNA, 22 nt, Human
ugccaaggaacacaaaaggcac

SEQ ID NO: 473375 - RNA, 18 nt, Human
ugccaaguacccaauacc

SEQ ID NO: 473376 - RNA, 22 nt, Human
ugcugguuguaucccauuaaac

SEQ ID NO: 473377 - RNA, 25 nt, Human
uuacaaggaagaaagguauuuucuu

SEQ ID NO: 473378 - RNA, 20 nt, Human
uucacaagucacuucaccau

SEQ ID NO: 473379 - RNA, 21 nt, Human
uucccugcaggaagggcucug

SEQ ID NO: 473380 - RNA, 22 nt, Human
uucccugcaggaagggcucuug

SEQ ID NO: 473381 - RNA, 25 nt, Human
uucccugcaggaagggcucuugugg

SEQ ID NO: 473382 - RNA, 23 nt, Human
uuccggccuguaagugguuacgc

SEQ ID NO: 473383 - RNA, 20 nt, Human
uugacaucaaaacucagcac

SEQ ID NO: 473384 - RNA, 20 nt, Human
uuuuuuaaaaugcugguugu

SEQ ID NO: 473385 - RNA, 20 nt, Human
uuuuuugaucaugacccuga

SEQ ID NO: 473386 - RNA, 22 nt, Human
acacccacacaggacccucugg

SEQ ID NO: 473387 - RNA, 21 nt, Human
aggcaaggaaaggccugcagg

SEQ ID NO: 473388 - RNA, 18 nt, Human
aggcagggaggggagccc

SEQ ID NO: 473389 - RNA, 22 nt, Human
aggcagggaggggagcccuggc

SEQ ID NO: 473390 - RNA, 21 nt, Human
aguggaguggacgggagccca

SEQ ID NO: 473391 - RNA, 20 nt, Human
augggacuuggagggaguuu

SEQ ID NO: 473392 - RNA, 19 nt, Human
cagcaguccagacuagcac

SEQ ID NO: 473393 - RNA, 20 nt, Human
cagccggauggacccccaca

SEQ ID NO: 473394 - RNA, 23 nt, Human
cagccggggucccucugaggccc

SEQ ID NO: 473395 - RNA, 23 nt, Human
ccagccggauggacccccacagg

SEQ ID NO: 473396 - RNA, 22 nt, Human
cccacacaggacccucuggggu

SEQ ID NO: 473397 - RNA, 18 nt, Human
ccccuggggcuccuccuc

SEQ ID NO: 473398 - RNA, 20 nt, Human
ccccuggggcuccuccuccc

SEQ ID NO: 473399 - RNA, 21 nt, Human
ccccuggggcuccuccucccc

SEQ ID NO: 473400 - RNA, 21 nt, Human
ccgcugccgccaucccucguc

SEQ ID NO: 473401 - RNA, 27 nt, Human
ccguuuugccgccuccgccucgcccuc

SEQ ID NO: 473402 - RNA, 19 nt, Human
ccuccgccucgcccucccc

SEQ ID NO: 473403 - RNA, 20 nt, Human
ccuccgccucgcccucccca

SEQ ID NO: 473404 - RNA, 20 nt, Human
ccucugaggccccaggggcc

SEQ ID NO: 473405 - RNA, 23 nt, Human
ccucugaggccccaggggcccga

SEQ ID NO: 473406 - RNA, 18 nt, Human
cgccucgcccuccccagc

SEQ ID NO: 473407 - RNA, 21 nt, Human
cggauggacccccacaggguc

SEQ ID NO: 473408 - RNA, 22 nt, Human
cuccacacccacacaggacccu

SEQ ID NO: 473409 - RNA, 18 nt, Human
gacaggcagggaggggag

SEQ ID NO: 473410 - RNA, 20 nt, Human
gcaacagggugaggggcggg

SEQ ID NO: 473411 - RNA, 20 nt, Human
gcaaggaaaggccugcagga

SEQ ID NO: 473412 - RNA, 19 nt, Human
gcagccggggucccucuga

SEQ ID NO: 473413 - RNA, 20 nt, Human
ggaaaggccugcaggaagac

SEQ ID NO: 473414 - RNA, 19 nt, Human
ggacuggaggggacgcggc

SEQ ID NO: 473415 - RNA, 21 nt, Human
ggcagggaggggagcccuggc

SEQ ID NO: 473416 - RNA, 22 nt, Human
ggcagggaggggagcccuggca

SEQ ID NO: 473417 - RNA, 21 nt, Human
gggacaggcagggaggggagc

SEQ ID NO: 473418 - RNA, 24 nt, Human
ggggacaggcagggaggggagccc

SEQ ID NO: 473419 - RNA, 22 nt, Human
gggucccacagaggcaaggaaa

SEQ ID NO: 473420 - RNA, 28 nt, Human
gguggcaacagggugaggggcgggguug

SEQ ID NO: 473421 - RNA, 22 nt, Human
guuuugccgccuccgccucgcc

SEQ ID NO: 473422 - RNA, 19 nt, Human
uagcaccccuggggcuccu

SEQ ID NO: 473423 - RNA, 23 nt, Human
ucaguggcagccggggucccucu

SEQ ID NO: 473424 - RNA, 22 nt, Human
uccagacuagcaccccuggggc

SEQ ID NO: 473425 - RNA, 19 nt, Human
uccagccggauggaccccc

SEQ ID NO: 473426 - RNA, 18 nt, Human
uccccagcgccgcugccg

SEQ ID NO: 473427 - RNA, 20 nt, Human
ucccucugaggccccagggg

SEQ ID NO: 473428 - RNA, 21 nt, Human
ucccucugaggccccaggggc

SEQ ID NO: 473429 - RNA, 22 nt, Human
ucuccagccggauggaccccca

SEQ ID NO: 473430 - RNA, 20 nt, Human
ucugcucgaccgcccguuuu

SEQ ID NO: 473431 - RNA, 18 nt, Human
ucuguauuuccuuuuaca

SEQ ID NO: 473432 - RNA, 18 nt, Human
ugagaggcuuuucuucuc

SEQ ID NO: 473433 - RNA, 21 nt, Human
ugaggccccaggggcccgagu

SEQ ID NO: 473434 - RNA, 18 nt, Human
ugaggugaggacuugggg

SEQ ID NO: 473435 - RNA, 19 nt, Human
ugcccggagcggacuggag

SEQ ID NO: 473436 - RNA, 19 nt, Human
uggcagaaccauaaucuuc

SEQ ID NO: 473437 - RNA, 22 nt, Human
uggggggguuucuguauuuccu

SEQ ID NO: 473438 - RNA, 21 nt, Human
uuagcaugagaggcuuuucuu

SEQ ID NO: 473439 - RNA, 23 nt, Human
uuuuuuuuuuuuggggggguuuc

SEQ ID NO: 473440 - RNA, 19 nt, Human
uuuuuuuuuuuuuuggggg

SEQ ID NO: 473441 - RNA, 20 nt, Human
uuuuuuuuuuuuuuuggggg

SEQ ID NO: 473442 - RNA, 22 nt, Human
uuuuuuuuuuuuuuuuuggggg

SEQ ID NO: 473443 - RNA, 19 nt, Human
aaaaagguguaaaagguca

SEQ ID NO: 473444 - RNA, 19 nt, Human
aaacaauaugaaacugaaa

SEQ ID NO: 473445 - RNA, 22 nt, Human
aaauucuaaaaccacauaacuc

SEQ ID NO: 473446 - RNA, 20 nt, Human
aacaggacugugaacuugga

SEQ ID NO: 473447 - RNA, 21 nt, Human
accaagcguaucccaguuuca

SEQ ID NO: 473448 - RNA, 19 nt, Human
acccacaccauggagauaa

SEQ ID NO: 473449 - RNA, 24 nt, Human
agauaaaaaagaaauaagguuaaa

SEQ ID NO: 473450 - RNA, 19 nt, Human
agcccccacccauggacag

SEQ ID NO: 473451 - RNA, 18 nt, Human
aggcggaagagagacuga

SEQ ID NO: 473452 - RNA, 25 nt, Human
agguagggugggguguaaaaccaug

SEQ ID NO: 473453 - RNA, 23 nt, Human
auacaguaaaggagggaaggaag

SEQ ID NO: 473454 - RNA, 19 nt, Human
cagaugcuuuaaaaaaaaa

SEQ ID NO: 473455 - RNA, 21 nt, Human
cagcaguauccuuaugagaac

SEQ ID NO: 473456 - RNA, 21 nt, Human
caggcuaacacacagccccca

SEQ ID NO: 473457 - RNA, 21 nt, Human
cauuucugaugaaaauucugg

SEQ ID NO: 473458 - RNA, 18 nt, Human
cccacccacaccauggag

SEQ ID NO: 473459 - RNA, 18 nt, Human
cccccacccauggacagc

SEQ ID NO: 473460 - RNA, 24 nt, Human
cuaacacacagcccccacccaugg

SEQ ID NO: 473461 - RNA, 22 nt, Human
cuaacuggaaacaaaacacuua

SEQ ID NO: 473462 - RNA, 24 nt, Human
cuccucgacaacaacaggacugug

SEQ ID NO: 473463 - RNA, 18 nt, Human
cugguauucuuuaaaaug

SEQ ID NO: 473464 - RNA, 20 nt, Human
cuucuaaauucuaaaaccac

SEQ ID NO: 473465 - RNA, 20 nt, Human
cuucucagccuucucccugc

SEQ ID NO: 473466 - RNA, 21 nt, Human
cuuuaaaauguuuucuucuuc

SEQ ID NO: 473467 - RNA, 25 nt, Human
gaaaagacagcgaacagcuaacugg

SEQ ID NO: 473468 - RNA, 20 nt, Human
gaacuuggauuaggauaaua

SEQ ID NO: 473469 - RNA, 23 nt, Human
gacugagaggagacagaaggaaa

SEQ ID NO: 473470 - RNA, 19 nt, Human
guuuaagcccugaaauuac

SEQ ID NO: 473471 - RNA, 22 nt, Human
uaaaacaaaaaagcuaccaagc

SEQ ID NO: 473472 - RNA, 18 nt, Human
uaaaauguuuucuucuuc

SEQ ID NO: 473473 - RNA, 19 nt, Human
uaacuggaaacaaaacacu

SEQ ID NO: 473474 - RNA, 22 nt, Human
uacaguaaaggagggaaggaag

SEQ ID NO: 473475 - RNA, 18 nt, Human
uacuuuguguuaaaacaa

SEQ ID NO: 473476 - RNA, 21 nt, Human
uaugugaacauuauuugcaaa

SEQ ID NO: 473477 - RNA, 20 nt, Human
uauucaucuguuccccuuca

SEQ ID NO: 473478 - RNA, 22 nt, Human
uauuuuccaaggcauuuacaua

SEQ ID NO: 473479 - RNA, 20 nt, Human
ucccugcuuccucuauguuc

SEQ ID NO: 473480 - RNA, 21 nt, Human
ucuggagaaggugcauauuca

SEQ ID NO: 473481 - RNA, 19 nt, Human
ucuuugcuuuuaggcugaa

SEQ ID NO: 473482 - RNA, 21 nt, Human
ugaaaaagguguaaaagguca

SEQ ID NO: 473483 - RNA, 19 nt, Human
ugaagaugaggcuagggca

SEQ ID NO: 473484 - RNA, 20 nt, Human
ugaaggcugaagaugaggcu

SEQ ID NO: 473485 - RNA, 21 nt, Human
ugagaacagaaacaauaugaa

SEQ ID NO: 473486 - RNA, 18 nt, Human
ugagaggagacagaagga

SEQ ID NO: 473487 - RNA, 23 nt, Human
ugagaggagacagaaggaaaugc

SEQ ID NO: 473488 - RNA, 19 nt, Human
uggaaaagacagcgaacag

SEQ ID NO: 473489 - RNA, 19 nt, Human
uguaacugaauaucuacua

SEQ ID NO: 473490 - RNA, 20 nt, Human
uguaacugaauaucuacuau

SEQ ID NO: 473491 - RNA, 22 nt, Human
uuaaaacaaaaaagcuaccaag

SEQ ID NO: 473492 - RNA, 23 nt, Human
uuaaaacaaaaaagcuaccaagc

SEQ ID NO: 473493 - RNA, 23 nt, Human
aaggggguggggcaagccacugg

SEQ ID NO: 473494 - RNA, 23 nt, Human
agcaugcaccacagugguccucc

SEQ ID NO: 473495 - RNA, 21 nt, Human
auaaggggguggggcaagcca

SEQ ID NO: 473496 - RNA, 22 nt, Human
augcaccacagugguccuccuc

SEQ ID NO: 473497 - RNA, 21 nt, Human
caggcuuucacgcugguuagg

SEQ ID NO: 473498 - RNA, 25 nt, Human
cagugguccuccucauucguccucu

SEQ ID NO: 473499 - RNA, 21 nt, Human
ggaaccaaucagcaugcacca

SEQ ID NO: 473500 - RNA, 26 nt, Human
ggacucaggcuuucacgcugguuagg

SEQ ID NO: 473501 - RNA, 20 nt, Human
uaaggggguggggcaagcca

SEQ ID NO: 473502 - RNA, 26 nt, Human
uaucugggaagguccuucugguggga

SEQ ID NO: 473503 - RNA, 18 nt, Human
ugacugugaggagaaggg

SEQ ID NO: 473504 - RNA, 20 nt, Human
ugacugugaggagaaggggu

SEQ ID NO: 473505 - RNA, 19 nt, Human
ugggaagguccuucuggug

SEQ ID NO: 473506 - RNA, 23 nt, Human
ugggacucaggcuuucacgcugg

SEQ ID NO: 473507 - RNA, 25 nt, Human
uuaggugguggcagcagcuuccugg

SEQ ID NO: 473508 - RNA, 21 nt, Human
uucuggugggacucaggcuuu

SEQ ID NO: 473509 - RNA, 22 nt, Human
accccagggcccaggugggagg

SEQ ID NO: 473510 - RNA, 22 nt, Human
acccuucagagcuagaguuuau

SEQ ID NO: 473511 - RNA, 18 nt, Human
accuaaaccccagggccc

SEQ ID NO: 473512 - RNA, 20 nt, Human
acucuaagggagacuuaagg

SEQ ID NO: 473513 - RNA, 23 nt, Human
agaggacauaccuggaccggggc

SEQ ID NO: 473514 - RNA, 20 nt, Human
aucagaauuagcccccagca

SEQ ID NO: 473515 - RNA, 18 nt, Human
augcuguggggaggggcu

SEQ ID NO: 473516 - RNA, 19 nt, Human
cagaggacauaccuggacc

SEQ ID NO: 473517 - RNA, 22 nt, Human
caugcagaggguuggcugguuu

SEQ ID NO: 473518 - RNA, 22 nt, Human
ccacagagccugggguaaaguu

SEQ ID NO: 473519 - RNA, 18 nt, Human
ccaccagggcuugcucac

SEQ ID NO: 473520 - RNA, 20 nt, Human
cccagcaugcuguggggagg

SEQ ID NO: 473521 - RNA, 18 nt, Human
ccccagggcccagguggg

SEQ ID NO: 473522 - RNA, 21 nt, Human
ccugggcagacggcuuugagg

SEQ ID NO: 473523 - RNA, 30 nt, Human
cuguucuaugaggcuuuucaacaguuucaa

SEQ ID NO: 473524 - RNA, 23 nt, Human
cuuugaggguggcagucuggagg

SEQ ID NO: 473525 - RNA, 24 nt, Human
cuuuucaacaguuucacauccagc

SEQ ID NO: 473526 - RNA, 18 nt, Human
gcgcugccaccagggcuu

SEQ ID NO: 473527 - RNA, 18 nt, Human
uaccuggaccaucagcac

SEQ ID NO: 473528 - RNA, 18 nt, Human
uaggagaggaugguaugu

SEQ ID NO: 473529 - RNA, 23 nt, Human
ucagaauuagcccccagcaugcu

SEQ ID NO: 473530 - RNA, 23 nt, Human
ucagaggacauaccuggaccauc

SEQ ID NO: 473531 - RNA, 31 nt, Human
ucagaggacauaccuggaccaucagcacagg

SEQ ID NO: 473532 - RNA, 23 nt, Human
ucaugguggguugguucaugagc

SEQ ID NO: 473533 - RNA, 27 nt, Human
uccacagagccugggguagcggaccgc

SEQ ID NO: 473534 - RNA, 18 nt, Human
uccuucugaucagcagaa

SEQ ID NO: 473535 - RNA, 21 nt, Human
ugacuucuagaccuaaacccc

SEQ ID NO: 473536 - RNA, 23 nt, Human
ugagcagccuccuguucuaugag

SEQ ID NO: 473537 - RNA, 21 nt, Human
ugcagaaagaugacaucagaa

SEQ ID NO: 473538 - RNA, 22 nt, Human
ugggcagacggcuuugagggug

SEQ ID NO: 473539 - RNA, 21 nt, Human
uggggccugggcagacggcuu

SEQ ID NO: 473540 - RNA, 22 nt, Human
uggguugguucaugagcagccu

SEQ ID NO: 473541 - RNA, 18 nt, Human
ugguauguccacagagcc

SEQ ID NO: 473542 - RNA, 21 nt, Human
ugguauguccacagagccugg

SEQ ID NO: 473543 - RNA, 20 nt, Human
uguggacuuuccuucugauc

SEQ ID NO: 473544 - RNA, 20 nt, Human
uguggggaggggcugcacug

SEQ ID NO: 473545 - RNA, 20 nt, Human
uuucugcagaaagaugacaa

SEQ ID NO: 473546 - RNA, 21 nt, Human
aaaaccccaauguaugaaaca

SEQ ID NO: 473547 - RNA, 18 nt, Human
aaacaauaauugacucua

SEQ ID NO: 473548 - RNA, 24 nt, Human
aagacagaaaacccuuccccaggg

SEQ ID NO: 473549 - RNA, 19 nt, Human
accacgccccccccccccc

SEQ ID NO: 473550 - RNA, 20 nt, Human
accacgccccccccccccca

SEQ ID NO: 473551 - RNA, 19 nt, Human
accccaauguaugaaacaa

SEQ ID NO: 473552 - RNA, 24 nt, Human
acuggccucuggcuacuucugggg

SEQ ID NO: 473553 - RNA, 19 nt, Human
agaaggugcugaauguucc

SEQ ID NO: 473554 - RNA, 21 nt, Human
agacagaaaacccuuccccag

SEQ ID NO: 473555 - RNA, 19 nt, Human
agagguagcauagcuggga

SEQ ID NO: 473556 - RNA, 19 nt, Human
auaagacagaaaacccuuc

SEQ ID NO: 473557 - RNA, 22 nt, Human
auguucaaacuggccucuggcu

SEQ ID NO: 473558 - RNA, 22 nt, Human
cacacagcugggggcauguagc

SEQ ID NO: 473559 - RNA, 20 nt, Human
caccagcaugacugcccauc

SEQ ID NO: 473560 - RNA, 24 nt, Human
cacgcccccccccccccaaugucc

SEQ ID NO: 473561 - RNA, 20 nt, Human
cagcaauauauguucccaaa

SEQ ID NO: 473562 - RNA, 23 nt, Human
cagccucacugccuuccaaucuc

SEQ ID NO: 473563 - RNA, 18 nt, Human
ccccagggcuguaauggg

SEQ ID NO: 473564 - RNA, 25 nt, Human
cccccaaugucccucaagggaguac

SEQ ID NO: 473565 - RNA, 20 nt, Human
cccuauagcugaaaaacucc

SEQ ID NO: 473566 - RNA, 19 nt, Human
cccucugggugaacccugg

SEQ ID NO: 473567 - RNA, 24 nt, Human
ccuauagcugaaaaacuccacaaa

SEQ ID NO: 473568 - RNA, 18 nt, Human
ccucccugcacacagcug

SEQ ID NO: 473569 - RNA, 19 nt, Human
ccucugggugaacccuggg

SEQ ID NO: 473570 - RNA, 22 nt, Human
ccugggaccacgcccccccccc

SEQ ID NO: 473571 - RNA, 23 nt, Human
cgccagaaauaguuacuaaaaca

SEQ ID NO: 473572 - RNA, 24 nt, Human
cgcccccccccccccaaugucccu

SEQ ID NO: 473573 - RNA, 18 nt, Human
cuauuugcaacggucgaa

SEQ ID NO: 473574 - RNA, 23 nt, Human
cucaagggaguacaagagucacc

SEQ ID NO: 473575 - RNA, 27 nt, Human
cugcccauccugcguguccuccuuuca

SEQ ID NO: 473576 - RNA, 22 nt, Human
cuggccucuggcuacuucuggg

SEQ ID NO: 473577 - RNA, 22 nt, Human
gaccacgcccccccccccccaa

SEQ ID NO: 473578 - RNA, 18 nt, Human
gagucaccagcaugacug

SEQ ID NO: 473579 - RNA, 21 nt, Human
gccucacugccuuccaaucuc

SEQ ID NO: 473580 - RNA, 24 nt, Human
gcgacauggugaauauacugucuu

SEQ ID NO: 473581 - RNA, 23 nt, Human
gguuaaauguaagcuuuucccag

SEQ ID NO: 473582 - RNA, 20 nt, Human
gucuauuugcaacggucgaa

SEQ ID NO: 473583 - RNA, 19 nt, Human
uaagacagaaaacccuucc

SEQ ID NO: 473584 - RNA, 24 nt, Human
uacaagagucaccagcaugacugc

SEQ ID NO: 473585 - RNA, 18 nt, Human
uaccuauugaauagaaac

SEQ ID NO: 473586 - RNA, 26 nt, Human
uagaaaaccccaauguaugaaacaag

SEQ ID NO: 473587 - RNA, 22 nt, Human
uagccccuuccccucuggguga

SEQ ID NO: 473588 - RNA, 18 nt, Human
uagcugaaaaacuccaca

SEQ ID NO: 473589 - RNA, 19 nt, Human
uauagaaaaccccaaugua

SEQ ID NO: 473590 - RNA, 19 nt, Human
uaugaaaauggcuacccaa

SEQ ID NO: 473591 - RNA, 21 nt, Human
uauguucccaaacugugagaa

SEQ ID NO: 473592 - RNA, 20 nt, Human
ucaaacuggccucuggcuac

SEQ ID NO: 473593 - RNA, 22 nt, Human
ucaagggaguacaagagucacc

SEQ ID NO: 473594 - RNA, 22 nt, Human
ucacuccauaagacagaaaacc

SEQ ID NO: 473595 - RNA, 20 nt, Human
ucccaaacccagggacaacu

SEQ ID NO: 473596 - RNA, 22 nt, Human
ucccucaagggaguacaagagu

SEQ ID NO: 473597 - RNA, 23 nt, Human
ugagaaggugcugaauguuccca

SEQ ID NO: 473598 - RNA, 24 nt, Human
ugagaaggugcugaauguucccaa

SEQ ID NO: 473599 - RNA, 24 nt, Human
ugcuaagacucacuccauaagaca

SEQ ID NO: 473600 - RNA, 24 nt, Human
ugggaccacgccccccccccccca

SEQ ID NO: 473601 - RNA, 21 nt, Human
ugggugaacccuggggaaauc

SEQ ID NO: 473602 - RNA, 25 nt, Human
ugguguuggcagcgguagugggcug

SEQ ID NO: 473603 - RNA, 20 nt, Human
uguaaugggcauuuaaguuu

SEQ ID NO: 473604 - RNA, 20 nt, Human
uguccucccugcacacagcu

SEQ ID NO: 473605 - RNA, 25 nt, Human
uuccccuccccuauagcugaaaaac

SEQ ID NO: 473606 - RNA, 22 nt, Human
uuucccagcugaaauauauaga

SEQ ID NO: 473607 - RNA, 21 nt, Human
aaacaccacacuauaaaaagc

SEQ ID NO: 473608 - RNA, 19 nt, Human
aacauuuuaaagagauaca

SEQ ID NO: 473609 - RNA, 18 nt, Human
aagcaagaaaacaagaaa

SEQ ID NO: 473610 - RNA, 21 nt, Human
aagcugguuucuucaucuucu

SEQ ID NO: 473611 - RNA, 23 nt, Human
aagcugguuucuuccgugacaca

SEQ ID NO: 473612 - RNA, 20 nt, Human
acaagcaagaaaacaagaaa

SEQ ID NO: 473613 - RNA, 23 nt, Human
acaagcaagaaaacaagaaaaug

SEQ ID NO: 473614 - RNA, 19 nt, Human
accacacuauaaaaagcua

SEQ ID NO: 473615 - RNA, 21 nt, Human
accagaaaaauauacuaaucc

SEQ ID NO: 473616 - RNA, 23 nt, Human
agagaugccucaggggacccaaa

SEQ ID NO: 473617 - RNA, 19 nt, Human
agcaccagggcggggagga

SEQ ID NO: 473618 - RNA, 22 nt, Human
aggaggcuuccccucucugcac

SEQ ID NO: 473619 - RNA, 25 nt, Human
auacaagcaagaaaacaagaaaaug

SEQ ID NO: 473620 - RNA, 21 nt, Human
auggagauaaugacaagguag

SEQ ID NO: 473621 - RNA, 24 nt, Human
auuagauuuuaaaauacaagcaag

SEQ ID NO: 473622 - RNA, 24 nt, Human
caagguagcuccuagaugcacuga

SEQ ID NO: 473623 - RNA, 24 nt, Human
caauggcuaggguuccugaaauuu

SEQ ID NO: 473624 - RNA, 24 nt, Human
caccacacuauaaaaagcuauuaa

SEQ ID NO: 473625 - RNA, 21 nt, Human
caccagauuccaacauaucaa

SEQ ID NO: 473626 - RNA, 19 nt, Human
caccucgguucccuugagc

SEQ ID NO: 473627 - RNA, 18 nt, Human
cagcccagacagggucag

SEQ ID NO: 473628 - RNA, 23 nt, Human
caggaagggugguccggccuccg

SEQ ID NO: 473629 - RNA, 21 nt, Human
caggacgaguaugugaccugg

SEQ ID NO: 473630 - RNA, 19 nt, Human
caggaggcuuccccucucu

SEQ ID NO: 473631 - RNA, 19 nt, Human
cauuucuucuucugcuguu

SEQ ID NO: 473632 - RNA, 21 nt, Human
cccaaacucguggguacgggg

SEQ ID NO: 473633 - RNA, 18 nt, Human
ccuugagcacaagcuugg

SEQ ID NO: 473634 - RNA, 24 nt, Human
cgccaggaagggugguccggccuc

SEQ ID NO: 473635 - RNA, 25 nt, Human
cucacuccuugauacuuucuuucca

SEQ ID NO: 473636 - RNA, 20 nt, Human
cucgccuaacaauaucaaaa

SEQ ID NO: 473637 - RNA, 21 nt, Human
cuugauacuuucuuuccaucu

SEQ ID NO: 473638 - RNA, 20 nt, Human
gaaaacaagaaaaugaaagc

SEQ ID NO: 473639 - RNA, 23 nt, Human
gaaaagaacugaggaggcucccg

SEQ ID NO: 473640 - RNA, 26 nt, Human
gaaaaugaaagcauaaaaagagcauu

SEQ ID NO: 473641 - RNA, 21 nt, Human
gaaguaaacacucccugacag

SEQ ID NO: 473642 - RNA, 20 nt, Human
gagcagcaccagggcgggga

SEQ ID NO: 473643 - RNA, 22 nt, Human
gagugcguccgaaaagaacuga

SEQ ID NO: 473644 - RNA, 20 nt, Human
gaucauuucuucuucugcug

SEQ ID NO: 473645 - RNA, 18 nt, Human
gccauggcuccgggagac

SEQ ID NO: 473646 - RNA, 19 nt, Human
gccggagcugcaggaccca

SEQ ID NO: 473647 - RNA, 24 nt, Human
gccggcucuccgcaccacggcucc

SEQ ID NO: 473648 - RNA, 21 nt, Human
gcguccgaaaagaacugagga

SEQ ID NO: 473649 - RNA, 21 nt, Human
ggcaaaucaggcagaggccug

SEQ ID NO: 473650 - RNA, 19 nt, Human
gggaggccacgaagccggc

SEQ ID NO: 473651 - RNA, 19 nt, Human
gggauuuguaauuaaaaau

SEQ ID NO: 473652 - RNA, 22 nt, Human
ggggaggaacagaaguguaggc

SEQ ID NO: 473653 - RNA, 18 nt, Human
guccgaaaagaacugagg

SEQ ID NO: 473654 - RNA, 28 nt, Human
uaaaaagagcauguggaacuaccagaaa

SEQ ID NO: 473655 - RNA, 20 nt, Human
uaaaucuuuaaagugacagu

SEQ ID NO: 473656 - RNA, 21 nt, Human
uaagaguacuaggccauggcu

SEQ ID NO: 473657 - RNA, 18 nt, Human
uaccacauuguauaaaca

SEQ ID NO: 473658 - RNA, 18 nt, Human
uaucacggaggccaggag

SEQ ID NO: 473659 - RNA, 23 nt, Human
uauuuaaaaauguuggaccacgu

SEQ ID NO: 473660 - RNA, 24 nt, Human
ucaccaaaguuuguuacuguucac

SEQ ID NO: 473661 - RNA, 18 nt, Human
ucccgccggagcugcagg

SEQ ID NO: 473662 - RNA, 23 nt, Human
ucucuuuuucucuucuuaucuuu

SEQ ID NO: 473663 - RNA, 23 nt, Human
ucuucugcuguuuuacuuuuugc

SEQ ID NO: 473664 - RNA, 19 nt, Human
ugaccuggagcagcaccag

SEQ ID NO: 473665 - RNA, 21 nt, Human
ugacuuaacauuuuaaagaga

SEQ ID NO: 473666 - RNA, 18 nt, Human
uggaccacguguacaugu

SEQ ID NO: 473667 - RNA, 24 nt, Human
uggcuucagcucacuccuugauac

SEQ ID NO: 473668 - RNA, 18 nt, Human
ugggaggccacgaagccg

SEQ ID NO: 473669 - RNA, 19 nt, Human
ugggaggccacgaagccgg

SEQ ID NO: 473670 - RNA, 23 nt, Human
uguaggcgaaguaaacacucccu

SEQ ID NO: 473671 - RNA, 22 nt, Human
uuccagggucguccgcgcagga

SEQ ID NO: 473672 - RNA, 19 nt, Human
acaagaacaauaccaggca

SEQ ID NO: 473673 - RNA, 18 nt, Human
acagggcgcaggagccag

SEQ ID NO: 473674 - RNA, 18 nt, Human
acagggcgcaggagccag

SEQ ID NO: 473675 - RNA, 18 nt, Human
augucccgcccugagcga

SEQ ID NO: 473676 - RNA, 20 nt, Human
caagucccggggcuccgcgg

SEQ ID NO: 473677 - RNA, 23 nt, Human
cacagcccagcgcccagcgcucu

SEQ ID NO: 473678 - RNA, 22 nt, Human
caccagcaacgacaggcaaguc

SEQ ID NO: 473679 - RNA, 18 nt, Human
cacccaugucccgcccug

SEQ ID NO: 473680 - RNA, 24 nt, Human
cacuuggcgggcgcgaagcccagg

SEQ ID NO: 473681 - RNA, 22 nt, Human
cagcgggcuccuagccaagccu

SEQ ID NO: 473682 - RNA, 24 nt, Human
cagcgggcuccuagccaagccuca

SEQ ID NO: 473683 - RNA, 19 nt, Human
cagucgguucugcaaagcu

SEQ ID NO: 473684 - RNA, 19 nt, Human
caguggugauggccgcggc

SEQ ID NO: 473685 - RNA, 26 nt, Human
cauagcagacacccuagcccaguacc

SEQ ID NO: 473686 - RNA, 22 nt, Human
ccaagccucauguucccgcgcc

SEQ ID NO: 473687 - RNA, 18 nt, Human
ccaccagcaacgacaggc

SEQ ID NO: 473688 - RNA, 19 nt, Human
ccaguaccugaggugccag

SEQ ID NO: 473689 - RNA, 21 nt, Human
ccauuggcacauccaguccca

SEQ ID NO: 473690 - RNA, 20 nt, Human
cccagcgcccagcgcucucc

SEQ ID NO: 473691 - RNA, 23 nt, Human
ccccgcagagaccguggguccaa

SEQ ID NO: 473692 - RNA, 19 nt, Human
ccgcgcgccuggcccgcag

SEQ ID NO: 473693 - RNA, 20 nt, Human
ccucaggccucggcgccucg

SEQ ID NO: 473694 - RNA, 24 nt, Human
ccuggcccgcagcgggcuccuagc

SEQ ID NO: 473695 - RNA, 25 nt, Human
cgauggagguggccgccacagggcg

SEQ ID NO: 473696 - RNA, 21 nt, Human
cgggcuggggucucggggcgg

SEQ ID NO: 473697 - RNA, 20 nt, Human
cgguggccccgacggcgccu

SEQ ID NO: 473698 - RNA, 20 nt, Human
cuagcccaguaccugaggug

SEQ ID NO: 473699 - RNA, 22 nt, Human
cuggcccgcagcgggcuccuag

SEQ ID NO: 473700 - RNA, 20 nt, Human
gaggugccaggcaggcccug

SEQ ID NO: 473701 - RNA, 19 nt, Human
gcccaguaccugaggugcc

SEQ ID NO: 473702 - RNA, 23 nt, Human
gggcugggcccacuuggcgggcg

SEQ ID NO: 473703 - RNA, 21 nt, Human
guggugauggccgcggcggcg

SEQ ID NO: 473704 - RNA, 22 nt, Human
uaccaggcauagcagacacccu

SEQ ID NO: 473705 - RNA, 21 nt, Human
uagcagacacccuagcccagu

SEQ ID NO: 473706 - RNA, 21 nt, Human
ucccgcgccccagucggccag

SEQ ID NO: 473707 - RNA, 18 nt, Human
ucuccaugcgagcgucgc

SEQ ID NO: 473708 - RNA, 21 nt, Human
ucugcaaagcucccgccccgc

SEQ ID NO: 473709 - RNA, 20 nt, Human
ugacagcaauggacaagaag

SEQ ID NO: 473710 - RNA, 19 nt, Human
ugagcgacccccagugccc

SEQ ID NO: 473711 - RNA, 19 nt, Human
ugcccacaguggugauggc

SEQ ID NO: 473712 - RNA, 20 nt, Human
ugcccgaagggaaagcaagg

SEQ ID NO: 473713 - RNA, 23 nt, Human
aagauuccccagauugacccucc

SEQ ID NO: 473714 - RNA, 23 nt, Human
accucagucucuuucccccuuug

SEQ ID NO: 473715 - RNA, 22 nt, Human
acgcugcagacagaccagagac

SEQ ID NO: 473716 - RNA, 26 nt, Human
acuaagauuccccagauugacccuuu

SEQ ID NO: 473717 - RNA, 22 nt, Human
agccuauuuaaaaccaguccuc

SEQ ID NO: 473718 - RNA, 21 nt, Human
auaacauuugguuuaaggugg

SEQ ID NO: 473719 - RNA, 27 nt, Human
aucaccuugugcauguacuucuuuaag

SEQ ID NO: 473720 - RNA, 25 nt, Human
auuccaaaauucccuuucucuucca

SEQ ID NO: 473721 - RNA, 19 nt, Human
caaaauucccuuucucuuc

SEQ ID NO: 473722 - RNA, 21 nt, Human
caagaccggguccguuucugg

SEQ ID NO: 473723 - RNA, 20 nt, Human
cacccacuguggcuuccagg

SEQ ID NO: 473724 - RNA, 21 nt, Human
cagcaaggugccucaugacca

SEQ ID NO: 473725 - RNA, 19 nt, Human
cauuaaacuccucgcuucc

SEQ ID NO: 473726 - RNA, 22 nt, Human
ccacaucgcuccccaggggcag

SEQ ID NO: 473727 - RNA, 19 nt, Human
ccagguucuucuucuggcu

SEQ ID NO: 473728 - RNA, 22 nt, Human
cccacaucgcuccccaggggca

SEQ ID NO: 473729 - RNA, 22 nt, Human
ccccagauugacccuccccccc

SEQ ID NO: 473730 - RNA, 22 nt, Human
ccuucugcccacaucgcucccc

SEQ ID NO: 473731 - RNA, 22 nt, Human
cgcuucccgcaagcagacucac

SEQ ID NO: 473732 - RNA, 21 nt, Human
gaaccaacuuuauuuuuccua

SEQ ID NO: 473733 - RNA, 21 nt, Human
gggcuguauggucccaccccc

SEQ ID NO: 473734 - RNA, 23 nt, Human
guggcauuaaacuccucgcuucc

SEQ ID NO: 473735 - RNA, 20 nt, Human
uaaaaaacuaagauucccca

SEQ ID NO: 473736 - RNA, 24 nt, Human
uaaaacauaaaaaacuaagauucc

SEQ ID NO: 473737 - RNA, 22 nt, Human
uaaagccuauuuaaaaccaguc

SEQ ID NO: 473738 - RNA, 20 nt, Human
uaacauuugguuuaaggugg

SEQ ID NO: 473739 - RNA, 24 nt, Human
uaagaaccaacuuuauuuuuccua

SEQ ID NO: 473740 - RNA, 22 nt, Human
uaagauuccccagauugacccu

SEQ ID NO: 473741 - RNA, 20 nt, Human
uccagguucuucuucuggcu

SEQ ID NO: 473742 - RNA, 22 nt, Human
uccccagauugacccucccccc

SEQ ID NO: 473743 - RNA, 20 nt, Human
uccccauccuucugcccaca

SEQ ID NO: 473744 - RNA, 19 nt, Human
uccugggcaguuuggacgg

SEQ ID NO: 473745 - RNA, 18 nt, Human
ucuucugaaccugcuagg

SEQ ID NO: 473746 - RNA, 18 nt, Human
ugacgcugcagacagacc

SEQ ID NO: 473747 - RNA, 23 nt, Human
ugacucaauaaauacuuuacaaa

SEQ ID NO: 473748 - RNA, 20 nt, Human
ugagaaauacucauguggua

SEQ ID NO: 473749 - RNA, 23 nt, Human
ugcccacaucgcuccccaggggc

SEQ ID NO: 473750 - RNA, 18 nt, Human
ugcuacuucuuguuuuua

SEQ ID NO: 473751 - RNA, 19 nt, Human
uggcagcuguccuaaaagu

SEQ ID NO: 473752 - RNA, 18 nt, Human
uggccuggggcuguaugg

SEQ ID NO: 473753 - RNA, 18 nt, Human
uggcuuccaaguuguccc

SEQ ID NO: 473754 - RNA, 20 nt, Human
uggggcuguauggucccacc

SEQ ID NO: 473755 - RNA, 25 nt, Human
uguccccauccuucugcccacaucg

SEQ ID NO: 473756 - RNA, 21 nt, Human
ugugguauauacaaauauaca

SEQ ID NO: 473757 - RNA, 26 nt, Human
uuaaaacauaaaaaacuaagauuccc

SEQ ID NO: 473758 - RNA, 21 nt, Human
uuaucuuuuucccauuuguuu

SEQ ID NO: 473759 - RNA, 27 nt, Human
uuccaaaauucccuuucucuuccacuu

SEQ ID NO: 473760 - RNA, 18 nt, Human
uuccccagauugacccuc

SEQ ID NO: 473761 - RNA, 20 nt, Human
uugguggcauuaaacuccuc

SEQ ID NO: 473762 - RNA, 22 nt, Human
uuuugauauauuuccauugcaa

SEQ ID NO: 473763 - RNA, 25 nt, Human
uuuugcagcucauccagcgcucacc

SEQ ID NO: 473764 - RNA, 27 nt, Human
aaaaacaaaugagagaagccgguaccc

SEQ ID NO: 473765 - RNA, 26 nt, Human
aaagcuacauugaaggaccuagacaa

SEQ ID NO: 473766 - RNA, 19 nt, Human
aaugaaaagcuacauugaa

SEQ ID NO: 473767 - RNA, 27 nt, Human
caucccaugagcaaguacgcaggggac

SEQ ID NO: 473768 - RNA, 23 nt, Human
cuacauugaaggaccuagacaaa

SEQ ID NO: 473769 - RNA, 24 nt, Human
gacgugaacauucuggaaggguga

SEQ ID NO: 473770 - RNA, 21 nt, Human
gcaaugaaaagcuacauugaa

SEQ ID NO: 473771 - RNA, 20 nt, Human
gcccugggugccuggugacc

SEQ ID NO: 473772 - RNA, 20 nt, Human
gccugggggcucugugcgcc

SEQ ID NO: 473773 - RNA, 22 nt, Human
gguaucaaaaacaaaugagaga

SEQ ID NO: 473774 - RNA, 21 nt, Human
uaaagcccugcauagaaauuc

SEQ ID NO: 473775 - RNA, 20 nt, Human
uaucuggauagagaaacacc

SEQ ID NO: 473776 - RNA, 22 nt, Human
uaugcagcaccccugggcagaa

SEQ ID NO: 473777 - RNA, 23 nt, Human
uaugcagcaccccugggcagaac

SEQ ID NO: 473778 - RNA, 22 nt, Human
uccucgggauucaggggagcuc

SEQ ID NO: 473779 - RNA, 22 nt, Human
ugcagcaccccugggcagaacu

SEQ ID NO: 473780 - RNA, 22 nt, Human
uggcauggcccugggugccugg

SEQ ID NO: 473781 - RNA, 26 nt, Human
uuagccaagaaugggugucugccgac

SEQ ID NO: 473782 - RNA, 19 nt, Human
uucccuggcauggcccugg

SEQ ID NO: 473783 - RNA, 22 nt, Human
uugcaacaucccaugagcaagu

SEQ ID NO: 473784 - RNA, 19 nt, Human
aaagacagaugcaaccaua

SEQ ID NO: 473785 - RNA, 18 nt, Human
auggaauguaucuuacau

SEQ ID NO: 473786 - RNA, 18 nt, Human
cagaaaaagcuucaagag

SEQ ID NO: 473787 - RNA, 23 nt, Human
ccgcccagcaucccgggccaggu

SEQ ID NO: 473788 - RNA, 20 nt, Human
cgggccagguauccaaggcc

SEQ ID NO: 473789 - RNA, 19 nt, Human
gaagaugcauauaccuucc

SEQ ID NO: 473790 - RNA, 19 nt, Human
gggccagguauccaaggcc

SEQ ID NO: 473791 - RNA, 22 nt, Human
aaccuuggugcucaggucagaa

SEQ ID NO: 473792 - RNA, 19 nt, Human
aagcacccaagcaggaacu

SEQ ID NO: 473793 - RNA, 18 nt, Human
acaaaggcagcugguuug

SEQ ID NO: 473794 - RNA, 19 nt, Human
acacaggcuucugccuuuc

SEQ ID NO: 473795 - RNA, 21 nt, Human
acauacucaugguauccaaaa

SEQ ID NO: 473796 - RNA, 22 nt, Human
acccaguguagacagugaccuu

SEQ ID NO: 473797 - RNA, 24 nt, Human
acugguacaaaguguacccaguca

SEQ ID NO: 473798 - RNA, 22 nt, Human
agcaggaacugcaugugugugg

SEQ ID NO: 473799 - RNA, 22 nt, Human
aggcaggagaaggcuuggagcu

SEQ ID NO: 473800 - RNA, 25 nt, Human
auggaaaaguguugucagcucaagg

SEQ ID NO: 473801 - RNA, 21 nt, Human
caaaccggagcuaaucccccg

SEQ ID NO: 473802 - RNA, 21 nt, Human
caaagcagauguguacacagc

SEQ ID NO: 473803 - RNA, 18 nt, Human
cagcggacgcgcgcggag

SEQ ID NO: 473804 - RNA, 23 nt, Human
cagcuccagcccugcccgggucc

SEQ ID NO: 473805 - RNA, 19 nt, Human
caggacagacccugccuaa

SEQ ID NO: 473806 - RNA, 23 nt, Human
cagggauaccucccuuucucuga

SEQ ID NO: 473807 - RNA, 24 nt, Human
cagguggccacaggacagacccug

SEQ ID NO: 473808 - RNA, 20 nt, Human
caucucugugagcagggaau

SEQ ID NO: 473809 - RNA, 21 nt, Human
ccagcaccgagaacagggcuu

SEQ ID NO: 473810 - RNA, 22 nt, Human
ccagcccagcuccagcccugcc

SEQ ID NO: 473811 - RNA, 21 nt, Human
ccagggcaccagcaggugggc

SEQ ID NO: 473812 - RNA, 20 nt, Human
cccagcaccgagaacagggc

SEQ ID NO: 473813 - RNA, 27 nt, Human
ccccaaguguccccagaagagucccac

SEQ ID NO: 473814 - RNA, 21 nt, Human
ccccgucguuccgcgugggcc

SEQ ID NO: 473815 - RNA, 23 nt, Human
ccccgucguuccgcgugggcccg

SEQ ID NO: 473816 - RNA, 22 nt, Human
ccgccggggcucagagccucca

SEQ ID NO: 473817 - RNA, 21 nt, Human
ccugagcaccagcaucagugg

SEQ ID NO: 473818 - RNA, 23 nt, Human
cgagaacagggcuuggcaccuga

SEQ ID NO: 473819 - RNA, 20 nt, Human
cucaaccuuggugcucaggu

SEQ ID NO: 473820 - RNA, 18 nt, Human
cucacugcuguacuccca

SEQ ID NO: 473821 - RNA, 18 nt, Human
cuccagcccugcccgggu

SEQ ID NO: 473822 - RNA, 20 nt, Human
cucccagcaccgagaacagg

SEQ ID NO: 473823 - RNA, 20 nt, Human
cucccuuucucugaaaaggu

SEQ ID NO: 473824 - RNA, 21 nt, Human
cuggagccuuuggcacaggga

SEQ ID NO: 473825 - RNA, 23 nt, Human
cuucugccuuucucccuucugga

SEQ ID NO: 473826 - RNA, 23 nt, Human
gaaggcacugaagguuuggcuca

SEQ ID NO: 473827 - RNA, 18 nt, Human
gagcuaaucccccggucc

SEQ ID NO: 473828 - RNA, 20 nt, Human
gcaggaacugcaugugugug

SEQ ID NO: 473829 - RNA, 26 nt, Human
gccccgucguuccgcguggggccgcc

SEQ ID NO: 473830 - RNA, 21 nt, Human
gcgcgcccggcccccgguccg

SEQ ID NO: 473831 - RNA, 22 nt, Human
gcuguacucccagcaccgagaa

SEQ ID NO: 473832 - RNA, 18 nt, Human
ggcacagguaaacauaca

SEQ ID NO: 473833 - RNA, 18 nt, Human
gggaauauugucuccuuu

SEQ ID NO: 473834 - RNA, 19 nt, Human
uacccccaaacucaaucca

SEQ ID NO: 473835 - RNA, 20 nt, Human
uagacaagaacuagccucau

SEQ ID NO: 473836 - RNA, 21 nt, Human
uaucucuggcccaaaucccag

SEQ ID NO: 473837 - RNA, 24 nt, Human
uccacuguuggcagcugagcgugu

SEQ ID NO: 473838 - RNA, 22 nt, Human
ucccagagugagcugggcuugg

SEQ ID NO: 473839 - RNA, 25 nt, Human
ucccagcaccgagaacaggguaccc

SEQ ID NO: 473840 - RNA, 18 nt, Human
uccuuugcucacugcugu

SEQ ID NO: 473841 - RNA, 18 nt, Human
uccuuugcucacugcugu

SEQ ID NO: 473842 - RNA, 18 nt, Human
ucucugugagcagggaau

SEQ ID NO: 473843 - RNA, 24 nt, Human
ucucuuaaucaagaggacagagau

SEQ ID NO: 473844 - RNA, 25 nt, Human
ugaaaagguacaagauacaaaggca

SEQ ID NO: 473845 - RNA, 22 nt, Human
ugaaagggauuguccuuggaca

SEQ ID NO: 473846 - RNA, 22 nt, Human
ugagcugggcuuggguccugag

SEQ ID NO: 473847 - RNA, 20 nt, Human
ugcccggguccuagcagcgg

SEQ ID NO: 473848 - RNA, 22 nt, Human
uggaaaaguguugucagcucaa

SEQ ID NO: 473849 - RNA, 18 nt, Human
uggaccccaagugucccc

SEQ ID NO: 473850 - RNA, 23 nt, Human
uggaccccaaguguccccagaag

SEQ ID NO: 473851 - RNA, 19 nt, Human
uggcaccugauaagcaccc

SEQ ID NO: 473852 - RNA, 23 nt, Human
ugguacaaaguguacccagugua

SEQ ID NO: 473853 - RNA, 21 nt, Human
uggugcucaggucagaagccc

SEQ ID NO: 473854 - RNA, 24 nt, Human
uguguacacagcacacuccacaca

SEQ ID NO: 473855 - RNA, 24 nt, Human
uguuugugaaagggauuguccuug

SEQ ID NO: 473856 - RNA, 23 nt, Human
uuaggcacagguaaacauacaua

SEQ ID NO: 473857 - RNA, 19 nt, Human
uuggcaccugauaagcacc

SEQ ID NO: 473858 - RNA, 24 nt, Human
uuggguccugaguugcaggggaga

SEQ ID NO: 473859 - RNA, 24 nt, Human
uuuggcacagggauaccucccuuu

SEQ ID NO: 473860 - RNA, 21 nt, Human
uuuuuuuuuuuuuuuuuauuu

SEQ ID NO: 473861 - RNA, 21 nt, Human
aaaaugcagguagaagacaca

SEQ ID NO: 473862 - RNA, 22 nt, Human
aaagggagaaguuggggaaaca

SEQ ID NO: 473863 - RNA, 19 nt, Human
aaccaggaaggugaggggc

SEQ ID NO: 473864 - RNA, 22 nt, Human
aacccacuuuuccugcccccua

SEQ ID NO: 473865 - RNA, 22 nt, Human
aacccacuuuuccugcccccua

SEQ ID NO: 473866 - RNA, 18 nt, Human
aaccuguccuccacccug

SEQ ID NO: 473867 - RNA, 23 nt, Human
acaacccacuuuuccugcccccu

SEQ ID NO: 473868 - RNA, 19 nt, Human
acccacuuuuccugccccc

SEQ ID NO: 473869 - RNA, 21 nt, Human
acccugaggacccucagggaa

SEQ ID NO: 473870 - RNA, 21 nt, Human
accucaccuaucaacuagggc

SEQ ID NO: 473871 - RNA, 18 nt, Human
agaaguuggggaaacacu

SEQ ID NO: 473872 - RNA, 23 nt, Human
agacaacccacuuuuccugcccc

SEQ ID NO: 473873 - RNA, 26 nt, Human
agacugaagguaaggguuagggaggg

SEQ ID NO: 473874 - RNA, 18 nt, Human
agagaggcaggagcugau

SEQ ID NO: 473875 - RNA, 20 nt, Human
agauguguuucuaguuccug

SEQ ID NO: 473876 - RNA, 22 nt, Human
agccaccugggaccaucaggcc

SEQ ID NO: 473877 - RNA, 20 nt, Human
agcugaaugacccccacccc

SEQ ID NO: 473878 - RNA, 19 nt, Human
aggaggaggcugaagauga

SEQ ID NO: 473879 - RNA, 20 nt, Human
aggaggcccuucaggcuggu

SEQ ID NO: 473880 - RNA, 24 nt, Human
aggggcuggcgccucugagagagc

SEQ ID NO: 473881 - RNA, 22 nt, Human
agguggacuuugaggggggauc

SEQ ID NO: 473882 - RNA, 20 nt, Human
augaggagggggcgugaggc

SEQ ID NO: 473883 - RNA, 22 nt, Human
caaaaugcagguagaagacaca

SEQ ID NO: 473884 - RNA, 19 nt, Human
caggaggaggcugaagaug

SEQ ID NO: 473885 - RNA, 23 nt, Human
caggaugaggagggggcgugagg

SEQ ID NO: 473886 - RNA, 23 nt, Human
ccaaaguauauccagagccaccu

SEQ ID NO: 473887 - RNA, 19 nt, Human
ccaccuguagcacaagagc

SEQ ID NO: 473888 - RNA, 21 nt, Human
cccauuuauuaucagggucac

SEQ ID NO: 473889 - RNA, 23 nt, Human
ccccaccccuucaucugugucua

SEQ ID NO: 473890 - RNA, 23 nt, Human
ccccugagggccuugggaagagg

SEQ ID NO: 473891 - RNA, 26 nt, Human
cccugagggccuugggaagagggugu

SEQ ID NO: 473892 - RNA, 22 nt, Human
ccucagggaaccaggaagguga

SEQ ID NO: 473893 - RNA, 23 nt, Human
ccucagggaaccaggaaggugag

SEQ ID NO: 473894 - RNA, 18 nt, Human
ccuccagccuucuucacc

SEQ ID NO: 473895 - RNA, 22 nt, Human
ccuccagccuucuucacccacc

SEQ ID NO: 473896 - RNA, 23 nt, Human
ccuccggcuggggagggaggggc

SEQ ID NO: 473897 - RNA, 18 nt, Human
ccugggaccaucaggccu

SEQ ID NO: 473898 - RNA, 21 nt, Human
ccugggaccaucaggccucug

SEQ ID NO: 473899 - RNA, 20 nt, Human
ccuggggagggagcacuggg

SEQ ID NO: 473900 - RNA, 22 nt, Human
cggcuggggagggaggggcugg

SEQ ID NO: 473901 - RNA, 19 nt, Human
cuccacccugaggacccuc

SEQ ID NO: 473902 - RNA, 19 nt, Human
cuggcccaggaggaggcug

SEQ ID NO: 473903 - RNA, 18 nt, Human
gaaggugggauggaaggg

SEQ ID NO: 473904 - RNA, 20 nt, Human
gacacacugcuuccuggagg

SEQ ID NO: 473905 - RNA, 19 nt, Human
gacuugaggaaugcuggua

SEQ ID NO: 473906 - RNA, 18 nt, Human
gagagccuugagcgcugc

SEQ ID NO: 473907 - RNA, 19 nt, Human
gaggaggcugaagaugugu

SEQ ID NO: 473908 - RNA, 25 nt, Human
gcccucauggcagagaggcaggagc

SEQ ID NO: 473909 - RNA, 19 nt, Human
gcgcugcucuccagcugca

SEQ ID NO: 473910 - RNA, 21 nt, Human
ggaagaguuggggccccacuc

SEQ ID NO: 473911 - RNA, 22 nt, Human
ggacaugucaccuccagccuuc

SEQ ID NO: 473912 - RNA, 19 nt, Human
ggagaaguuggggaaacac

SEQ ID NO: 473913 - RNA, 20 nt, Human
ggagacugaagguaaggguu

SEQ ID NO: 473914 - RNA, 18 nt, Human
ggagcugauggcuugaaa

SEQ ID NO: 473915 - RNA, 19 nt, Human
gggaaacacugagaggggg

SEQ ID NO: 473916 - RNA, 23 nt, Human
ggugagaaggggggaaggaucca

SEQ ID NO: 473917 - RNA, 22 nt, Human
guggagacugaagguaaggguu

SEQ ID NO: 473918 - RNA, 24 nt, Human
guugugugaccucggacaugucac

SEQ ID NO: 473919 - RNA, 18 nt, Human
uaaaagggagaaguuggg

SEQ ID NO: 473920 - RNA, 29 nt, Human
uacccccggcucuuagagaccauuuaaau

SEQ ID NO: 473921 - RNA, 19 nt, Human
uagaagacacacugugaga

SEQ ID NO: 473922 - RNA, 23 nt, Human
ucacucauccugcagggaaaggc

SEQ ID NO: 473923 - RNA, 21 nt, Human
uccaccuuucugggucucagu

SEQ ID NO: 473924 - RNA, 19 nt, Human
uccgccccaccuguagcac

SEQ ID NO: 473925 - RNA, 18 nt, Human
uccgccccaccuguagcc

SEQ ID NO: 473926 - RNA, 22 nt, Human
ucuccagcugcaucagagcucc

SEQ ID NO: 473927 - RNA, 23 nt, Human
ugacccccaccccuucaucugug

SEQ ID NO: 473928 - RNA, 21 nt, Human
ugagaaggggggaaggaucca

SEQ ID NO: 473929 - RNA, 18 nt, Human
ugagaggggguuauggug

SEQ ID NO: 473930 - RNA, 21 nt, Human
ugaggacccucagggaaccag

SEQ ID NO: 473931 - RNA, 18 nt, Human
ugagggccuugggaagag

SEQ ID NO: 473932 - RNA, 21 nt, Human
ugcagaggaaggaguggggac

SEQ ID NO: 473933 - RNA, 19 nt, Human
ugcagggaaaggccaagug

SEQ ID NO: 473934 - RNA, 20 nt, Human
ugcaugcugcuuuguugugu

SEQ ID NO: 473935 - RNA, 18 nt, Human
ugcccuggugggggccgc

SEQ ID NO: 473936 - RNA, 18 nt, Human
uggaaggggugcaggaug

SEQ ID NO: 473937 - RNA, 18 nt, Human
uggcccaggaggaggcug

SEQ ID NO: 473938 - RNA, 21 nt, Human
ugggaccaucaggccucuggc

SEQ ID NO: 473939 - RNA, 24 nt, Human
ugggaccaucaggccucuggcuag

SEQ ID NO: 473940 - RNA, 18 nt, Human
ugggauuugagcuccaga

SEQ ID NO: 473941 - RNA, 22 nt, Human
ugggcucuggagccugaccacu

SEQ ID NO: 473942 - RNA, 21 nt, Human
uggggacggguugaaggagau

SEQ ID NO: 473943 - RNA, 22 nt, Human
uggggagggaggggcuggcgcc

SEQ ID NO: 473944 - RNA, 20 nt, Human
uguggguaggaaguuuuggg

SEQ ID NO: 473945 - RNA, 20 nt, Human
uuggggaaacacugagaggg

SEQ ID NO: 473946 - RNA, 18 nt, Human
aaaaugccacaaacuggg

SEQ ID NO: 473947 - RNA, 20 nt, Human
aaacuggguggcuuaaacaa

SEQ ID NO: 473948 - RNA, 19 nt, Human
aaugccacaaacugggugg

SEQ ID NO: 473949 - RNA, 19 nt, Human
augccucucuaggcuucug

SEQ ID NO: 473950 - RNA, 22 nt, Human
caucugaaugcccacacacaga

SEQ ID NO: 473951 - RNA, 22 nt, Human
ccacacucuuaccaguccagaa

SEQ ID NO: 473952 - RNA, 22 nt, Human
ccauagcugguucauucaguag

SEQ ID NO: 473953 - RNA, 22 nt, Human
ccucauauccacaagauggcug

SEQ ID NO: 473954 - RNA, 19 nt, Human
cugaaggcucugagggaga

SEQ ID NO: 473955 - RNA, 25 nt, Human
cugaaugcccacacacagacaauuc

SEQ ID NO: 473956 - RNA, 25 nt, Human
cuggugauuuucugucaaucuuugg

SEQ ID NO: 473957 - RNA, 18 nt, Human
cugguucauucaguagcu

SEQ ID NO: 473958 - RNA, 19 nt, Human
cuguguccacauuuccccu

SEQ ID NO: 473959 - RNA, 20 nt, Human
gaaggcucugagggagaaug

SEQ ID NO: 473960 - RNA, 22 nt, Human
gaccuguguccacauuuccccu

SEQ ID NO: 473961 - RNA, 25 nt, Human
guagucuauuuggcucuucccucau

SEQ ID NO: 473962 - RNA, 18 nt, Human
gugcugcuguaacaaaau

SEQ ID NO: 473963 - RNA, 21 nt, Human
guucuagaggcucaaagucca

SEQ ID NO: 473964 - RNA, 21 nt, Human
uaacaaaaugccacaaacugg

SEQ ID NO: 473965 - RNA, 24 nt, Human
uagcugguucauucaguagcucca

SEQ ID NO: 473966 - RNA, 21 nt, Human
uagucuauuuggcucuucccu

SEQ ID NO: 473967 - RNA, 24 nt, Human
uccaagaugaaggugccagcagga

SEQ ID NO: 473968 - RNA, 24 nt, Human
uccccacacucuuaccaguccaga

SEQ ID NO: 473969 - RNA, 19 nt, Human
ugaaugcccacacacagac

SEQ ID NO: 473970 - RNA, 21 nt, Human
ugaaugcccacacacagacaa

SEQ ID NO: 473971 - RNA, 18 nt, Human
ugcugcaugucuacaguu

SEQ ID NO: 473972 - RNA, 19 nt, Human
ugcuguaacaaaaugccac

SEQ ID NO: 473973 - RNA, 18 nt, Human
uggguggcuuaaacaaca

SEQ ID NO: 473974 - RNA, 18 nt, Human
uucacagacaccagucac

SEQ ID NO: 473975 - RNA, 18 nt, Human
uuuuuuuacugggucaga

SEQ ID NO: 473976 - RNA, 22 nt, Human
aaagaacacugguggaaaauag

SEQ ID NO: 473977 - RNA, 21 nt, Human
aaagauuaaggggaaccagga

SEQ ID NO: 473978 - RNA, 25 nt, Human
aaagccacaucuuacaugacacagg

SEQ ID NO: 473979 - RNA, 21 nt, Human
aaaguccucucaacuuuucuu

SEQ ID NO: 473980 - RNA, 24 nt, Human
aaagugcugggauuauaggcguga

SEQ ID NO: 473981 - RNA, 25 nt, Human
aaauccaccccaccugcucgcugcc

SEQ ID NO: 473982 - RNA, 19 nt, Human
aacagccccaagcaccacc

SEQ ID NO: 473983 - RNA, 23 nt, Human
aacagccccaagcaccaccaaac

SEQ ID NO: 473984 - RNA, 19 nt, Human
aaccuccaccucugcaucc

SEQ ID NO: 473985 - RNA, 24 nt, Human
aaccugcuccccuccaccccccac

SEQ ID NO: 473986 - RNA, 24 nt, Human
aacucugaugcugggcaccuacag

SEQ ID NO: 473987 - RNA, 20 nt, Human
aacugagccaauguacugaa

SEQ ID NO: 473988 - RNA, 21 nt, Human
aagauugcaguggccccucga

SEQ ID NO: 473989 - RNA, 22 nt, Human
aagcaccaccaaacaugccccu

SEQ ID NO: 473990 - RNA, 20 nt, Human
aagcagaggugccuauaacc

SEQ ID NO: 473991 - RNA, 23 nt, Human
aagcccagcgagccucccccugg

SEQ ID NO: 473992 - RNA, 19 nt, Human
aagccguggaaauccaccc

SEQ ID NO: 473993 - RNA, 19 nt, Human
aagugcugggauuauaggc

SEQ ID NO: 473994 - RNA, 19 nt, Human
aagugcugggauuauaggc

SEQ ID NO: 473995 - RNA, 18 nt, Human
aaucaagccaaccuggac

SEQ ID NO: 473996 - RNA, 24 nt, Human
aaugaaaggaaaacacaaaaaccu

SEQ ID NO: 473997 - RNA, 24 nt, Human
aauuacaggugugcgcuaccaugc

SEQ ID NO: 473998 - RNA, 22 nt, Human
acaaaaauagacauuaacaagc

SEQ ID NO: 473999 - RNA, 23 nt, Human
acaaaaccaaggcauugucagca

SEQ ID NO: 474000 - RNA, 18 nt, Human
acacucagauacagcgcu

SEQ ID NO: 474001 - RNA, 23 nt, Human
acagaaacaauucuaaagaacac

SEQ ID NO: 474002 - RNA, 21 nt, Human
acagagcccaagaaagugucu

SEQ ID NO: 474003 - RNA, 20 nt, Human
acaggaacagccccaagcac

SEQ ID NO: 474004 - RNA, 23 nt, Human
accaugccuggcuaauuuuugua

SEQ ID NO: 474005 - RNA, 24 nt, Human
accauguugggaaggcugguuucg

SEQ ID NO: 474006 - RNA, 21 nt, Human
accccccccauccuaaaucaa

SEQ ID NO: 474007 - RNA, 18 nt, Human
agaaacaauucuaaagaa

SEQ ID NO: 474008 - RNA, 23 nt, Human
agacacaaacgcuuccaagccug

SEQ ID NO: 474009 - RNA, 23 nt, Human
agacaggaccucucaauugcaga

SEQ ID NO: 474010 - RNA, 19 nt, Human
agacagugcaagacaauua

SEQ ID NO: 474011 - RNA, 20 nt, Human
agccucccgaguagcuggaa

SEQ ID NO: 474012 - RNA, 18 nt, Human
agcuacaaccccaacuaa

SEQ ID NO: 474013 - RNA, 25 nt, Human
aggaaaacacaaaaaccuuacaaaa

SEQ ID NO: 474014 - RNA, 18 nt, Human
aggaacagccccaagcac

SEQ ID NO: 474015 - RNA, 20 nt, Human
aggaacagccccaagcacca

SEQ ID NO: 474016 - RNA, 21 nt, Human
aggaacagccccaagcaccac

SEQ ID NO: 474017 - RNA, 21 nt, Human
aggaagaaguggccuccaggg

SEQ ID NO: 474018 - RNA, 24 nt, Human
aggagaguuuuaaaggaacagacg

SEQ ID NO: 474019 - RNA, 19 nt, Human
aggagcaagcccagcgagc

SEQ ID NO: 474020 - RNA, 18 nt, Human
aggccuggagccagggau

SEQ ID NO: 474021 - RNA, 24 nt, Human
aggcgagcucaguggagccaggga

SEQ ID NO: 474022 - RNA, 24 nt, Human
aggugauucacccgccuuggccuc

SEQ ID NO: 474023 - RNA, 18 nt, Human
aguagcuggaauuacagg

SEQ ID NO: 474024 - RNA, 20 nt, Human
aguuggcuugggcuauggau

SEQ ID NO: 474025 - RNA, 25 nt, Human
auauacccuuccacaacaucauaca

SEQ ID NO: 474026 - RNA, 21 nt, Human
augaagccguggaaauccacc

SEQ ID NO: 474027 - RNA, 18 nt, Human
augggguuucaccauguu

SEQ ID NO: 474028 - RNA, 19 nt, Human
augggguuucaccauguug

SEQ ID NO: 474029 - RNA, 24 nt, Human
augggguuucaccauguugggaag

SEQ ID NO: 474030 - RNA, 21 nt, Human
augugacaguggaucugggac

SEQ ID NO: 474031 - RNA, 22 nt, Human
auucccuuccuccacacuaagu

SEQ ID NO: 474032 - RNA, 24 nt, Human
caaagugcugggauuauaggcgug

SEQ ID NO: 474033 - RNA, 19 nt, Human
caacaaugaaaggaaaaca

SEQ ID NO: 474034 - RNA, 21 nt, Human
caacuaugaugccugccuccc

SEQ ID NO: 474035 - RNA, 20 nt, Human
caagcaccaccaaacaugcc

SEQ ID NO: 474036 - RNA, 21 nt, Human
caagcaccaccaaacaugccc

SEQ ID NO: 474037 - RNA, 22 nt, Human
caagccccuagagaggaagggg

SEQ ID NO: 474038 - RNA, 18 nt, Human
caaguucaggauagucuc

SEQ ID NO: 474039 - RNA, 24 nt, Human
caccauguugggaaggcugguuuc

SEQ ID NO: 474040 - RNA, 21 nt, Human
caccccccaccccccccaucc

SEQ ID NO: 474041 - RNA, 22 nt, Human
caccccccaccccccccauccu

SEQ ID NO: 474042 - RNA, 23 nt, Human
cacccgccuuggccucccaaagu

SEQ ID NO: 474043 - RNA, 24 nt, Human
cacccgccuuggccucccaaagug

SEQ ID NO: 474044 - RNA, 20 nt, Human
caccuaaaacagaaacaauu

SEQ ID NO: 474045 - RNA, 20 nt, Human
cagaagacccauaugucccc

SEQ ID NO: 474046 - RNA, 23 nt, Human
cagacaaaaccaaggcauuguca

SEQ ID NO: 474047 - RNA, 19 nt, Human
cagagcagaucccaagagc

SEQ ID NO: 474048 - RNA, 24 nt, Human
cagaucccaagagccccaggcaug

SEQ ID NO: 474049 - RNA, 24 nt, Human
cagcaucacacagcaaaucucaga

SEQ ID NO: 474050 - RNA, 25 nt, Human
cagcaugggaagacccgcccccaug

SEQ ID NO: 474051 - RNA, 18 nt, Human
cagccccaagcaccacca

SEQ ID NO: 474052 - RNA, 23 nt, Human
cagcccugaguucaccugguccu

SEQ ID NO: 474053 - RNA, 24 nt, Human
cagccuuucaaagacagagcccaa

SEQ ID NO: 474054 - RNA, 19 nt, Human
caggaaaccccccagcccc

SEQ ID NO: 474055 - RNA, 25 nt, Human
caggaacagccccaagcaccaccaa

SEQ ID NO: 474056 - RNA, 26 nt, Human
cagggaaacuccccuuuauaaaacca

SEQ ID NO: 474057 - RNA, 18 nt, Human
ccaaaccauaucaccaag

SEQ ID NO: 474058 - RNA, 23 nt, Human
ccaaagauaggccuuggagaggu

SEQ ID NO: 474059 - RNA, 22 nt, Human
ccaaagugcugggauuauaggc

SEQ ID NO: 474060 - RNA, 24 nt, Human
ccaaagugcugggauuauaggcgu

SEQ ID NO: 474061 - RNA, 22 nt, Human
ccacauuccuugcaacucugau

SEQ ID NO: 474062 - RNA, 18 nt, Human
ccaccccccacccccccc

SEQ ID NO: 474063 - RNA, 19 nt, Human
ccaccccccacccccccca

SEQ ID NO: 474064 - RNA, 22 nt, Human
ccagacccaccccacucuccuc

SEQ ID NO: 474065 - RNA, 24 nt, Human
ccaggccggguaagcaggaucuau

SEQ ID NO: 474066 - RNA, 22 nt, Human
cccaaaugcugucacagaacac

SEQ ID NO: 474067 - RNA, 19 nt, Human
cccaagaaagugucucccc

SEQ ID NO: 474068 - RNA, 21 nt, Human
cccaccugcucgcugccccuc

SEQ ID NO: 474069 - RNA, 21 nt, Human
cccagcgagccucccccugga

SEQ ID NO: 474070 - RNA, 20 nt, Human
cccagguucaagcgauuccc

SEQ ID NO: 474071 - RNA, 23 nt, Human
cccagguucaagcgauuccccug

SEQ ID NO: 474072 - RNA, 18 nt, Human
ccccaccccccccauccu

SEQ ID NO: 474073 - RNA, 23 nt, Human
ccccaccccccccauccuaaauc

SEQ ID NO: 474074 - RNA, 23 nt, Human
ccccccaccccccccauccuaaa

SEQ ID NO: 474075 - RNA, 23 nt, Human
cccgaguagcuggaauuacaggu

SEQ ID NO: 474076 - RNA, 19 nt, Human
cccgccggcucccccagau

SEQ ID NO: 474077 - RNA, 20 nt, Human
cccuccaccccccacccccc

SEQ ID NO: 474078 - RNA, 24 nt, Human
cccuccaccccccaccccccccau

SEQ ID NO: 474079 - RNA, 18 nt, Human
cccugaguucaccugguc

SEQ ID NO: 474080 - RNA, 20 nt, Human
cccuggcaaccucacaggcu

SEQ ID NO: 474081 - RNA, 24 nt, Human
ccgaguagcuggaauuacaggugu

SEQ ID NO: 474082 - RNA, 19 nt, Human
ccucaaccuccaccucugc

SEQ ID NO: 474083 - RNA, 22 nt, Human
ccucaaccuccaccucugcauc

SEQ ID NO: 474084 - RNA, 27 nt, Human
ccucacaggcucaggcgagcucagugg

SEQ ID NO: 474085 - RNA, 18 nt, Human
ccuccaccucccagguuc

SEQ ID NO: 474086 - RNA, 22 nt, Human
ccuccaccucugcauccagaag

SEQ ID NO: 474087 - RNA, 22 nt, Human
ccucccagguucaagcgauucc

SEQ ID NO: 474088 - RNA, 20 nt, Human
ccugaccucaggugauucac

SEQ ID NO: 474089 - RNA, 22 nt, Human
ccugaccucaggugauucaccc

SEQ ID NO: 474090 - RNA, 23 nt, Human
ccugccuuagccucccgaguagc

SEQ ID NO: 474091 - RNA, 19 nt, Human
ccuggcccggggcccugcg

SEQ ID NO: 474092 - RNA, 23 nt, Human
ccuggcccggggcccugcggguc

SEQ ID NO: 474093 - RNA, 24 nt, Human
ccuguguggccuucccuauggggu

SEQ ID NO: 474094 - RNA, 24 nt, Human
ccuucaaccuccccacagccuuuc

SEQ ID NO: 474095 - RNA, 21 nt, Human
cgacacacucaacagaaaucu

SEQ ID NO: 474096 - RNA, 20 nt, Human
cgacaggagagcuccuccac

SEQ ID NO: 474097 - RNA, 18 nt, Human
cggaaauuuuaacuguga

SEQ ID NO: 474098 - RNA, 19 nt, Human
cucaaagcagaggucaaau

SEQ ID NO: 474099 - RNA, 19 nt, Human
cucacuguagccuccaccu

SEQ ID NO: 474100 - RNA, 24 nt, Human
cucacuguagccuccaccucccag

SEQ ID NO: 474101 - RNA, 25 nt, Human
cuccagggaaagaccugaggccuag

SEQ ID NO: 474102 - RNA, 22 nt, Human
cuccccuccaccccccaccccc

SEQ ID NO: 474103 - RNA, 22 nt, Human
cucuccacuuaggagcuggaaa

SEQ ID NO: 474104 - RNA, 24 nt, Human
cugaggccuaguuccugacaaagc

SEQ ID NO: 474105 - RNA, 20 nt, Human
cugccaggucagcucacugc

SEQ ID NO: 474106 - RNA, 23 nt, Human
cugccuuagccucccgaguagcu

SEQ ID NO: 474107 - RNA, 19 nt, Human
cugcuccccuccacccccc

SEQ ID NO: 474108 - RNA, 25 nt, Human
cugcugaaaaauaaacuuuaaacau

SEQ ID NO: 474109 - RNA, 18 nt, Human
cugucaccuaggcuggag

SEQ ID NO: 474110 - RNA, 27 nt, Human
gaaaggaaaacacaaaaaccuuacaaa

SEQ ID NO: 474111 - RNA, 19 nt, Human
gacccaccccacucuccuc

SEQ ID NO: 474112 - RNA, 19 nt, Human
gacccucaauggggguccc

SEQ ID NO: 474113 - RNA, 23 nt, Human
gaccucaggugauucacccgccu

SEQ ID NO: 474114 - RNA, 18 nt, Human
gagaugggguuucaccau

SEQ ID NO: 474115 - RNA, 20 nt, Human
gagaugggguuucaccaugu

SEQ ID NO: 474116 - RNA, 18 nt, Human
gagauuugugucgugacg

SEQ ID NO: 474117 - RNA, 21 nt, Human
gagcagaucccaagagcccca

SEQ ID NO: 474118 - RNA, 21 nt, Human
gagcagcgcuugccugagucc

SEQ ID NO: 474119 - RNA, 25 nt, Human
gaggcucuggucaucaggacccguc

SEQ ID NO: 474120 - RNA, 24 nt, Human
gaguagcuggaauuacaggugugc

SEQ ID NO: 474121 - RNA, 22 nt, Human
gaucccaagagccccaggcaug

SEQ ID NO: 474122 - RNA, 18 nt, Human
gauuauaggcgugagcca

SEQ ID NO: 474123 - RNA, 23 nt, Human
gauuauaggcgugagccaccuca

SEQ ID NO: 474124 - RNA, 24 nt, Human
gauuauaggcgugagccaccucac

SEQ ID NO: 474125 - RNA, 20 nt, Human
gauuuaaaagggagaacaaa

SEQ ID NO: 474126 - RNA, 18 nt, Human
gcaaaggaagagcaaagc

SEQ ID NO: 474127 - RNA, 23 nt, Human
gccaacgccugucagcagccagg

SEQ ID NO: 474128 - RNA, 19 nt, Human
gccaggucagcucacugca

SEQ ID NO: 474129 - RNA, 22 nt, Human
gccuuggccucccaaagugcug

SEQ ID NO: 474130 - RNA, 24 nt, Human
gcgauuccccugccuuagccuccc

SEQ ID NO: 474131 - RNA, 19 nt, Human
gcuggagcgcaauggcacg

SEQ ID NO: 474132 - RNA, 23 nt, Human
gcugguuucgaacuccugaccuc

SEQ ID NO: 474133 - RNA, 21 nt, Human
ggaaaccccccagccccacag

SEQ ID NO: 474134 - RNA, 21 nt, Human
ggaaccaggaagagaacgcuu

SEQ ID NO: 474135 - RNA, 20 nt, Human
ggagcauccuaugccuuuga

SEQ ID NO: 474136 - RNA, 21 nt, Human
ggagucacggccucaaccucc

SEQ ID NO: 474137 - RNA, 24 nt, Human
ggcugguuucgaacuccugaccuc

SEQ ID NO: 474138 - RNA, 18 nt, Human
gggguuucaccauguugg

SEQ ID NO: 474139 - RNA, 24 nt, Human
ggguagggaaggggacaagugagg

SEQ ID NO: 474140 - RNA, 22 nt, Human
ggguuucaccauguugggaagg

SEQ ID NO: 474141 - RNA, 19 nt, Human
gguuucgaacuccugaccu

SEQ ID NO: 474142 - RNA, 23 nt, Human
guagagaugggguuucaccaugu

SEQ ID NO: 474143 - RNA, 24 nt, Human
gugauucacccgccuuggccuccc

SEQ ID NO: 474144 - RNA, 21 nt, Human
gugcagggaaacuccccuuua

SEQ ID NO: 474145 - RNA, 21 nt, Human
uaaaacagccacauccuaggc

SEQ ID NO: 474146 - RNA, 18 nt, Human
uaaaauaacugugccccc

SEQ ID NO: 474147 - RNA, 21 nt, Human
uaaaauaacugugccccccgc

SEQ ID NO: 474148 - RNA, 22 nt, Human
uaaaaugaacuacacucagaua

SEQ ID NO: 474149 - RNA, 21 nt, Human
uaaacaagcagaggugccuau

SEQ ID NO: 474150 - RNA, 20 nt, Human
uaaaguccucucaacuuuuc

SEQ ID NO: 474151 - RNA, 18 nt, Human
uaacacagaugaaucucu

SEQ ID NO: 474152 - RNA, 23 nt, Human
uaacacccgccggcucccccaga

SEQ ID NO: 474153 - RNA, 19 nt, Human
uaaccaaaggaauccccaa

SEQ ID NO: 474154 - RNA, 24 nt, Human
uaaccaaaggaauccccaaagaua

SEQ ID NO: 474155 - RNA, 20 nt, Human
uaacugugccccccgcccca

SEQ ID NO: 474156 - RNA, 24 nt, Human
uaagaguaaaauucugaccuuuaa

SEQ ID NO: 474157 - RNA, 24 nt, Human
uaauuuuuguauuuuuaguagaga

SEQ ID NO: 474158 - RNA, 22 nt, Human
uagagaugggguuucaccaugu

SEQ ID NO: 474159 - RNA, 20 nt, Human
uagaggccauuugcauguag

SEQ ID NO: 474160 - RNA, 23 nt, Human
uaggaagaaguggccuccaggga

SEQ ID NO: 474161 - RNA, 25 nt, Human
uaggagcuggaaaauuucgacacac

SEQ ID NO: 474162 - RNA, 24 nt, Human
uaguagagaugggguuucaccaug

SEQ ID NO: 474163 - RNA, 23 nt, Human
uauaaaaccaucagaucucauga

SEQ ID NO: 474164 - RNA, 22 nt, Human
uauaaaaugaacuacacucaga

SEQ ID NO: 474165 - RNA, 21 nt, Human
uauaaccaaaggaauccccaa

SEQ ID NO: 474166 - RNA, 22 nt, Human
uauacccuuccacaacaucaua

SEQ ID NO: 474167 - RNA, 18 nt, Human
ucaaagacagagcccaag

SEQ ID NO: 474168 - RNA, 19 nt, Human
ucaaagacagagcccaaga

SEQ ID NO: 474169 - RNA, 20 nt, Human
ucaccauguugggaaggcug

SEQ ID NO: 474170 - RNA, 19 nt, Human
ucaccugguccuucuguac

SEQ ID NO: 474171 - RNA, 24 nt, Human
ucacuguagccuccaccucccagg

SEQ ID NO: 474172 - RNA, 25 nt, Human
ucacuguagccuccaccucccaggu

SEQ ID NO: 474173 - RNA, 25 nt, Human
ucacuuucaggucguuucucuccac

SEQ ID NO: 474174 - RNA, 19 nt, Human
uccaccccccacccccccc

SEQ ID NO: 474175 - RNA, 20 nt, Human
uccaccccccacccccccca

SEQ ID NO: 474176 - RNA, 27 nt, Human
uccacuaacacccgccggcucccccag

SEQ ID NO: 474177 - RNA, 24 nt, Human
ucccaaagugcugggauuauaggc

SEQ ID NO: 474178 - RNA, 18 nt, Human
ucccaagagccccaggca

SEQ ID NO: 474179 - RNA, 19 nt, Human
ucccagguucaagcgauuc

SEQ ID NO: 474180 - RNA, 24 nt, Human
ucccagguucaagcgauuccccug

SEQ ID NO: 474181 - RNA, 22 nt, Human
uccccaaagauaggccuuggag

SEQ ID NO: 474182 - RNA, 21 nt, Human
uccccagaccaauguccuucc

SEQ ID NO: 474183 - RNA, 21 nt, Human
ucccccagaugugauggcauc

SEQ ID NO: 474184 - RNA, 21 nt, Human
ucccccagaugugauggcauc

SEQ ID NO: 474185 - RNA, 24 nt, Human
uccccugccuuagccucccgagua

SEQ ID NO: 474186 - RNA, 23 nt, Human
ucccgaguagcuggaauuacagg

SEQ ID NO: 474187 - RNA, 24 nt, Human
ucccgaguagcuggaauuacaggu

SEQ ID NO: 474188 - RNA, 21 nt, Human
ucgacacacucaacagaaauc

SEQ ID NO: 474189 - RNA, 23 nt, Human
ucgcugccccucccugugccccc

SEQ ID NO: 474190 - RNA, 19 nt, Human
ucucuagaauggccaccuu

SEQ ID NO: 474191 - RNA, 18 nt, Human
ucucuggaaacccuugau

SEQ ID NO: 474192 - RNA, 18 nt, Human
ucugucaccuaggcugga

SEQ ID NO: 474193 - RNA, 20 nt, Human
ucuugcucugucaccuaggc

SEQ ID NO: 474194 - RNA, 22 nt, Human
ucuugcucugucaccuaggcug

SEQ ID NO: 474195 - RNA, 23 nt, Human
ucuugcucugucaccuaggcugg

SEQ ID NO: 474196 - RNA, 24 nt, Human
ucuugcucugucaccuaggcugga

SEQ ID NO: 474197 - RNA, 22 nt, Human
ugaaaucaagccaaccuggaca

SEQ ID NO: 474198 - RNA, 24 nt, Human
ugaccucaggugauucacccgccu

SEQ ID NO: 474199 - RNA, 25 nt, Human
ugacucaaccaaacuucuagaagcu

SEQ ID NO: 474200 - RNA, 18 nt, Human
ugagcuggaacucggcuu

SEQ ID NO: 474201 - RNA, 23 nt, Human
ugagugaacuggugaaaucaagc

SEQ ID NO: 474202 - RNA, 22 nt, Human
ugcaccuucaaccuccccacag

SEQ ID NO: 474203 - RNA, 20 nt, Human
ugccacagggaaccccuggc

SEQ ID NO: 474204 - RNA, 19 nt, Human
ugccuguguggccuucccu

SEQ ID NO: 474205 - RNA, 24 nt, Human
ugccuuagccucccgaguagcugg

SEQ ID NO: 474206 - RNA, 24 nt, Human
ugcucugucaccuaggcuggagcg

SEQ ID NO: 474207 - RNA, 18 nt, Human
uggaaaauacacgaacaa

SEQ ID NO: 474208 - RNA, 22 nt, Human
uggaauuacaggugugcgcuac

SEQ ID NO: 474209 - RNA, 24 nt, Human
uggaauuacaggugugcgcuacca

SEQ ID NO: 474210 - RNA, 25 nt, Human
uggaauuacaggugugcgcuaccau

SEQ ID NO: 474211 - RNA, 20 nt, Human
uggagucacggccucaaccu

SEQ ID NO: 474212 - RNA, 19 nt, Human
uggagucuugcucugucac

SEQ ID NO: 474213 - RNA, 24 nt, Human
uggcacgaucucagcucacuguag

SEQ ID NO: 474214 - RNA, 23 nt, Human
uggcagcagacacaaacgcuucc

SEQ ID NO: 474215 - RNA, 22 nt, Human
uggcaggaaaccccccagcccc

SEQ ID NO: 474216 - RNA, 29 nt, Human
uggcagguguggcaggaaaccccccucuu

SEQ ID NO: 474217 - RNA, 18 nt, Human
uggcccggggcccugcgg

SEQ ID NO: 474218 - RNA, 24 nt, Human
ugggaaggcugguuucgaacuccu

SEQ ID NO: 474219 - RNA, 18 nt, Human
ugggauuauaggcgugag

SEQ ID NO: 474220 - RNA, 19 nt, Human
ugggauuauaggcgugagc

SEQ ID NO: 474221 - RNA, 21 nt, Human
ugggauuauaggcgugagcca

SEQ ID NO: 474222 - RNA, 22 nt, Human
ugggauuauaggcgugagccac

SEQ ID NO: 474223 - RNA, 23 nt, Human
ugggauuauaggcgugagccacc

SEQ ID NO: 474224 - RNA, 23 nt, Human
ugggauuauaggcgugagccacc

SEQ ID NO: 474225 - RNA, 24 nt, Human
ugggguuucaccauguugggaagg

SEQ ID NO: 474226 - RNA, 18 nt, Human
uguaggaagaaguggccu

SEQ ID NO: 474227 - RNA, 21 nt, Human
uguaggaagaaguggccucca

SEQ ID NO: 474228 - RNA, 21 nt, Human
uguauuuuuaguagagauggg

SEQ ID NO: 474229 - RNA, 21 nt, Human
ugucaaagaacugagccaaug

SEQ ID NO: 474230 - RNA, 21 nt, Human
uguggagcaaaaauagccucu

SEQ ID NO: 474231 - RNA, 18 nt, Human
uuaaaauaacugugcccc

SEQ ID NO: 474232 - RNA, 22 nt, Human
uuaaaauaacugugccccccgc

SEQ ID NO: 474233 - RNA, 18 nt, Human
uuaguagagaugggguuu

SEQ ID NO: 474234 - RNA, 22 nt, Human
uuaguagagaugggguuucacc

SEQ ID NO: 474235 - RNA, 24 nt, Human
uuaguagagaugggguuucaccau

SEQ ID NO: 474236 - RNA, 22 nt, Human
uucaaccuccccacagccuuuc

SEQ ID NO: 474237 - RNA, 20 nt, Human
uucaagcgauuccccugccu

SEQ ID NO: 474238 - RNA, 24 nt, Human
uucaagcgauuccccugccuuagc

SEQ ID NO: 474239 - RNA, 21 nt, Human
uucaaguucaggauagucuca

SEQ ID NO: 474240 - RNA, 19 nt, Human
uuccccugccuuagccucc

SEQ ID NO: 474241 - RNA, 21 nt, Human
uucucuggaaacccuugacuc

SEQ ID NO: 474242 - RNA, 18 nt, Human
uucugcauucagaagugc

SEQ ID NO: 474243 - RNA, 21 nt, Human
uugagauggagucuugcucug

SEQ ID NO: 474244 - RNA, 19 nt, Human
uugccccucggggguuucc

SEQ ID NO: 474245 - RNA, 22 nt, Human
uugcugaguuuauugagcacac

SEQ ID NO: 474246 - RNA, 31 nt, Human
uugcugggcccuaagaaccugggaggcagcc

SEQ ID NO: 474247 - RNA, 19 nt, Human
uugcuuuguagacagugca

SEQ ID NO: 474248 - RNA, 18 nt, Human
uuggccucccaaagugcu

SEQ ID NO: 474249 - RNA, 22 nt, Human
uuuauauuuuaagucaggugaa

SEQ ID NO: 474250 - RNA, 20 nt, Human
uuuaugugacaguggaucug

SEQ ID NO: 474251 - RNA, 18 nt, Human
uuuauuuuuaaaauaacu

SEQ ID NO: 474252 - RNA, 23 nt, Human
uuucgaacuccugaccucaggug

SEQ ID NO: 474253 - RNA, 20 nt, Human
uuuuguauuuuuaguagaga

SEQ ID NO: 474254 - RNA, 24 nt, Human
uuuuuaguagagaugggguuucac

SEQ ID NO: 474255 - RNA, 20 nt, Human
uuuuuguauuuuuaguagag

SEQ ID NO: 474256 - RNA, 26 nt, Human
uuuuuuauuuuuuugagauggagucu

SEQ ID NO: 474257 - RNA, 24 nt, Human
aagcagaaaaaaagacuaaggcaa

SEQ ID NO: 474258 - RNA, 23 nt, Human
accaagagccccuuccuccaccu

SEQ ID NO: 474259 - RNA, 18 nt, Human
agagccccuuccuccacc

SEQ ID NO: 474260 - RNA, 18 nt, Human
auaaagcagaaaaaaaga

SEQ ID NO: 474261 - RNA, 26 nt, Human
auaaagcagaaaaaaagacuaaggca

SEQ ID NO: 474262 - RNA, 22 nt, Human
caguugauacaccaggaauauc

SEQ ID NO: 474263 - RNA, 28 nt, Human
cauaaagcagaaaaaaagacuaaggcaa

SEQ ID NO: 474264 - RNA, 24 nt, Human
ggaaagaaaguucacuuguaaaag

SEQ ID NO: 474265 - RNA, 18 nt, Human
ggcauaaagcagaaaaaa

SEQ ID NO: 474266 - RNA, 19 nt, Human
guggaaguuuauuuaaaag

SEQ ID NO: 474267 - RNA, 21 nt, Human
uauuucauagauuuuguuuca

SEQ ID NO: 474268 - RNA, 19 nt, Human
ucugcaaagcuucuaaggc

SEQ ID NO: 474269 - RNA, 23 nt, Human
ugaggggcauaaagcagaaaaaa

SEQ ID NO: 474270 - RNA, 20 nt, Human
ugcagcaacuucaauucuug

SEQ ID NO: 474271 - RNA, 18 nt, Human
ugccaugcagucuucagg

SEQ ID NO: 474272 - RNA, 18 nt, Human
ugucaaagaaucagucaa

SEQ ID NO: 474273 - RNA, 23 nt, Human
uuaaaacaggaaagaaaguucac

SEQ ID NO: 474274 - RNA, 19 nt, Human
uucccagugguuacuccaa

SEQ ID NO: 474275 - RNA, 21 nt, Human
uuccuccaccugaaacauucc

SEQ ID NO: 474276 - RNA, 23 nt, Human
uucuugccuccucagaugaaaga

SEQ ID NO: 474277 - RNA, 20 nt, Human
uuuguaagcuucugcaaagc

SEQ ID NO: 474278 - RNA, 19 nt, Human
aaacaggacucugggcaac

SEQ ID NO: 474279 - RNA, 22 nt, Human
aagcgccaccuugagaggccag

SEQ ID NO: 474280 - RNA, 19 nt, Human
aagcucuccccacccaagg

SEQ ID NO: 474281 - RNA, 21 nt, Human
accaccaccaugguucgccau

SEQ ID NO: 474282 - RNA, 18 nt, Human
accugucguugucaguag

SEQ ID NO: 474283 - RNA, 18 nt, Human
acucugauagcugcugug

SEQ ID NO: 474284 - RNA, 21 nt, Human
agaccacagguccagaaagcu

SEQ ID NO: 474285 - RNA, 21 nt, Human
agaggacauucccuccuccug

SEQ ID NO: 474286 - RNA, 22 nt, Human
agaggccaggagcaugcuuaga

SEQ ID NO: 474287 - RNA, 19 nt, Human
agcuacugaaaaauaaaca

SEQ ID NO: 474288 - RNA, 20 nt, Human
agcuacugaaaaauaaacac

SEQ ID NO: 474289 - RNA, 21 nt, Human
agcugaccuacacugaacccc

SEQ ID NO: 474290 - RNA, 22 nt, Human
agcugaccuacacugaacccca

SEQ ID NO: 474291 - RNA, 21 nt, Human
aggaggaaaaagaaauucugg

SEQ ID NO: 474292 - RNA, 23 nt, Human
aggaggaaaaagaaauucuggca

SEQ ID NO: 474293 - RNA, 23 nt, Human
aggccaggagcaugcuuagagga

SEQ ID NO: 474294 - RNA, 20 nt, Human
aggcgccggcggccgcuucc

SEQ ID NO: 474295 - RNA, 21 nt, Human
aggggucaggaaacuauggcc

SEQ ID NO: 474296 - RNA, 18 nt, Human
aggguaaacaggacucug

SEQ ID NO: 474297 - RNA, 26 nt, Human
aucagcugaccuacacugaaccccag

SEQ ID NO: 474298 - RNA, 21 nt, Human
caaaacucaagaauaagaaca

SEQ ID NO: 474299 - RNA, 19 nt, Human
cacacugccccacacccac

SEQ ID NO: 474300 - RNA, 21 nt, Human
cacagccucacaaucccagaa

SEQ ID NO: 474301 - RNA, 18 nt, Human
caccgccaaucugccccu

SEQ ID NO: 474302 - RNA, 21 nt, Human
caccucagugcagccacacag

SEQ ID NO: 474303 - RNA, 20 nt, Human
cacugccccacacccaccgc

SEQ ID NO: 474304 - RNA, 20 nt, Human
cagaaccugugcugcccccu

SEQ ID NO: 474305 - RNA, 19 nt, Human
cagaagucugcccacucuc

SEQ ID NO: 474306 - RNA, 25 nt, Human
cagaaucaagcagacaggcccacca

SEQ ID NO: 474307 - RNA, 20 nt, Human
cagaggaggugaccaaaugc

SEQ ID NO: 474308 - RNA, 18 nt, Human
cagccaccaccccagccc

SEQ ID NO: 474309 - RNA, 19 nt, Human
caggaagcucuccccaccc

SEQ ID NO: 474310 - RNA, 20 nt, Human
caggaugagccagcucccca

SEQ ID NO: 474311 - RNA, 19 nt, Human
caggccccguggugacaga

SEQ ID NO: 474312 - RNA, 24 nt, Human
caggccccguggugacagaccaca

SEQ ID NO: 474313 - RNA, 18 nt, Human
caucuuaaaagcacaacc

SEQ ID NO: 474314 - RNA, 23 nt, Human
ccacaggccgcugagagcugugc

SEQ ID NO: 474315 - RNA, 19 nt, Human
ccagaacaaagcagaaaga

SEQ ID NO: 474316 - RNA, 19 nt, Human
ccccagcacgggccugaac

SEQ ID NO: 474317 - RNA, 23 nt, Human
cccuccacagaagucugcccacu

SEQ ID NO: 474318 - RNA, 20 nt, Human
cccuggagcccagccaugcc

SEQ ID NO: 474319 - RNA, 27 nt, Human
ccucacaaucccagaaccugugcugcc

SEQ ID NO: 474320 - RNA, 19 nt, Human
ccucacacugccccacacc

SEQ ID NO: 474321 - RNA, 18 nt, Human
ccuccacagaagucugcc

SEQ ID NO: 474322 - RNA, 21 nt, Human
ccuccacagaagucugcccac

SEQ ID NO: 474323 - RNA, 23 nt, Human
ccugcauguccugggggcagcca

SEQ ID NO: 474324 - RNA, 21 nt, Human
ccugccuccugaggccagcag

SEQ ID NO: 474325 - RNA, 20 nt, Human
cgggccugaacaggaccagg

SEQ ID NO: 474326 - RNA, 18 nt, Human
cugaauauugaaaaaaaa

SEQ ID NO: 474327 - RNA, 20 nt, Human
cugcccacucuccauacagc

SEQ ID NO: 474328 - RNA, 18 nt, Human
gaaagcuucaaaugguua

SEQ ID NO: 474329 - RNA, 23 nt, Human
gcagccacacagggaagggcugg

SEQ ID NO: 474330 - RNA, 19 nt, Human
gcagccaccaccccagccc

SEQ ID NO: 474331 - RNA, 18 nt, Human
gcaguuccaaggccacag

SEQ ID NO: 474332 - RNA, 18 nt, Human
gcgccaccuugagaggcc

SEQ ID NO: 474333 - RNA, 23 nt, Human
gcuccuggcugccucacaguccg

SEQ ID NO: 474334 - RNA, 20 nt, Human
ggaggguaaacaggacucug

SEQ ID NO: 474335 - RNA, 18 nt, Human
gggcccuccacagaaguc

SEQ ID NO: 474336 - RNA, 23 nt, Human
gugucagauaagaagcaggcccc

SEQ ID NO: 474337 - RNA, 25 nt, Human
uaaacacaaaguguauauacaaaca

SEQ ID NO: 474338 - RNA, 19 nt, Human
uaagaacagaagccaaacc

SEQ ID NO: 474339 - RNA, 23 nt, Human
uaagaacagaagccaaaccacca

SEQ ID NO: 474340 - RNA, 18 nt, Human
uacacugaaccccagaau

SEQ ID NO: 474341 - RNA, 20 nt, Human
ucacagccucacaaucccag

SEQ ID NO: 474342 - RNA, 22 nt, Human
ucagagcaucuuaaaagcacaa

SEQ ID NO: 474343 - RNA, 21 nt, Human
ucagcugaccuacacugaacc

SEQ ID NO: 474344 - RNA, 19 nt, Human
uccacagaagucugcccac

SEQ ID NO: 474345 - RNA, 22 nt, Human
uccaccuucacucacagccuca

SEQ ID NO: 474346 - RNA, 21 nt, Human
uccccagguggaaaggccugc

SEQ ID NO: 474347 - RNA, 22 nt, Human
uccccagguggaaaggccugcc

SEQ ID NO: 474348 - RNA, 19 nt, Human
ucccuggagcccagccaug

SEQ ID NO: 474349 - RNA, 26 nt, Human
ugagaaaggaauuugaguucuuggga

SEQ ID NO: 474350 - RNA, 24 nt, Human
ugagaggccaggagcaugcuuaga

SEQ ID NO: 474351 - RNA, 21 nt, Human
ugagcuagucauucuucccaa

SEQ ID NO: 474352 - RNA, 23 nt, Human
ugccgauggccgcucugcagaau

SEQ ID NO: 474353 - RNA, 18 nt, Human
uggaagcugugugucccc

SEQ ID NO: 474354 - RNA, 24 nt, Human
uggcauagcacaggggucaggaaa

SEQ ID NO: 474355 - RNA, 19 nt, Human
ugggaagaaugaacccugg

SEQ ID NO: 474356 - RNA, 20 nt, Human
ugggaggguaaacaggacuc

SEQ ID NO: 474357 - RNA, 22 nt, Human
ugucagauaagaagcaggcccc

SEQ ID NO: 474358 - RNA, 21 nt, Human
uuuuaauguucaaggggcugu

SEQ ID NO: 474359 - RNA, 21 nt, Human
aaaaaacccuggaugucaacu

SEQ ID NO: 474360 - RNA, 20 nt, Human
aaaaacccuggaugucaacu

SEQ ID NO: 474361 - RNA, 21 nt, Human
aaaaagaagaaaaaaaaaucc

SEQ ID NO: 474362 - RNA, 19 nt, Human
aaaacaaaagcccucaagc

SEQ ID NO: 474363 - RNA, 20 nt, Human
aaaagccaaaaacaaaagcc

SEQ ID NO: 474364 - RNA, 22 nt, Human
aaaagccaaaaacaaaagcccu

SEQ ID NO: 474365 - RNA, 19 nt, Human
aaaagcccucaagccacaa

SEQ ID NO: 474366 - RNA, 25 nt, Human
aaacaaacccaaacaagggcacccc

SEQ ID NO: 474367 - RNA, 22 nt, Human
aaacaacaaaccacaagccuaa

SEQ ID NO: 474368 - RNA, 33 nt, Human
aaacaacaaaccacaagccuaaaugaugaacga

SEQ ID NO: 474369 - RNA, 19 nt, Human
aaacccagcaagacaagcg

SEQ ID NO: 474370 - RNA, 20 nt, Human
aaagcagguuggaaaaguca

SEQ ID NO: 474371 - RNA, 19 nt, Human
aacagagugaaacuccauc

SEQ ID NO: 474372 - RNA, 20 nt, Human
aacagagugaaacuccaucu

SEQ ID NO: 474373 - RNA, 21 nt, Human
aacagagugaaacuccaucuc

SEQ ID NO: 474374 - RNA, 20 nt, Human
aacccaaacaagggcacccc

SEQ ID NO: 474375 - RNA, 21 nt, Human
aagaaacccagcaagacaagc

SEQ ID NO: 474376 - RNA, 22 nt, Human
aagaaacccagcaagacaagcg

SEQ ID NO: 474377 - RNA, 23 nt, Human
aagaagaaaaaaaaauccuauaa

SEQ ID NO: 474378 - RNA, 20 nt, Human
aagcaaaaaucuaaacgggc

SEQ ID NO: 474379 - RNA, 23 nt, Human
aagcaaaaaucuaaacgggcaac

SEQ ID NO: 474380 - RNA, 24 nt, Human
aagcugccauugcacuccagccug

SEQ ID NO: 474381 - RNA, 26 nt, Human
aagggcaccccaaccuguguccaaga

SEQ ID NO: 474382 - RNA, 23 nt, Human
aagguggguggaucaccugaggu

SEQ ID NO: 474383 - RNA, 25 nt, Human
aagguggguggaucaccugagguca

SEQ ID NO: 474384 - RNA, 23 nt, Human
aaucgcuugaaccaggaggugga

SEQ ID NO: 474385 - RNA, 22 nt, Human
aauuuugguuuuuauacagguu

SEQ ID NO: 474386 - RNA, 22 nt, Human
aauuuugguuuuuauauagguu

SEQ ID NO: 474387 - RNA, 22 nt, Human
aauuuugguuuuuauauagguu

SEQ ID NO: 474388 - RNA, 22 nt, Human
acaaaagcccucaagccacaaa

SEQ ID NO: 474389 - RNA, 21 nt, Human
acaaagcaaacggggaagggu

SEQ ID NO: 474390 - RNA, 22 nt, Human
acacacacacuuaaagcuccau

SEQ ID NO: 474391 - RNA, 19 nt, Human
acaccaugaaaaaacaaac

SEQ ID NO: 474392 - RNA, 24 nt, Human
acagagugaaacuccaucucgaaa

SEQ ID NO: 474393 - RNA, 21 nt, Human
acagcccaagcucugcagcug

SEQ ID NO: 474394 - RNA, 23 nt, Human
accaacaugagcacccaguucca

SEQ ID NO: 474395 - RNA, 24 nt, Human
accaacauggugagacuccauuuc

SEQ ID NO: 474396 - RNA, 27 nt, Human
accgcacuccagcgucaggacaucggg

SEQ ID NO: 474397 - RNA, 20 nt, Human
accugagacacaaaauaauu

SEQ ID NO: 474398 - RNA, 24 nt, Human
accugaggucaggaguucgagacc

SEQ ID NO: 474399 - RNA, 22 nt, Human
acgucuucuggcuuggagguga

SEQ ID NO: 474400 - RNA, 24 nt, Human
acuccagccugggcaacagaguga

SEQ ID NO: 474401 - RNA, 20 nt, Human
acuccauuucuacuaaauag

SEQ ID NO: 474402 - RNA, 21 nt, Human
acugaaauagaaaggcaacug

SEQ ID NO: 474403 - RNA, 18 nt, Human
acuggcagcacuuggcaa

SEQ ID NO: 474404 - RNA, 22 nt, Human
acuuucauccagacaaaagcca

SEQ ID NO: 474405 - RNA, 24 nt, Human
agaaaaggccauuggauggagaca

SEQ ID NO: 474406 - RNA, 21 nt, Human
agaaucgcuugaaccaggagg

SEQ ID NO: 474407 - RNA, 20 nt, Human
agacaaaagccaaaaacaaa

SEQ ID NO: 474408 - RNA, 28 nt, Human
agacaaaagccaaaaacaaaagggaccc

SEQ ID NO: 474409 - RNA, 21 nt, Human
agagauacguguccugccuuc

SEQ ID NO: 474410 - RNA, 30 nt, Human
agccaaaaacaaaagcccucaagccacaaa

SEQ ID NO: 474411 - RNA, 23 nt, Human
agccaggugugguggcgcgugcc

SEQ ID NO: 474412 - RNA, 22 nt, Human
agccugaccaacauggugagac

SEQ ID NO: 474413 - RNA, 24 nt, Human
agccugaccaacauggugagacuc

SEQ ID NO: 474414 - RNA, 22 nt, Human
agccugggcaacagagugaaac

SEQ ID NO: 474415 - RNA, 24 nt, Human
agccugggcaacagagugaaacuc

SEQ ID NO: 474416 - RNA, 18 nt, Human
agcgcucauagaaggaau

SEQ ID NO: 474417 - RNA, 22 nt, Human
aggcaggaaaaaaaacccugga

SEQ ID NO: 474418 - RNA, 22 nt, Human
aggcaggagaaucgcuugaacc

SEQ ID NO: 474419 - RNA, 24 nt, Human
aggcaggagaaucgcuugaaccag

SEQ ID NO: 474420 - RNA, 21 nt, Human
aggccaagguggguggaucac

SEQ ID NO: 474421 - RNA, 20 nt, Human
aggcugaggcaggagaaucg

SEQ ID NO: 474422 - RNA, 24 nt, Human
aggcugaggcaggagaaucgcuug

SEQ ID NO: 474423 - RNA, 23 nt, Human
agggcaccccaaccuguguccaa

SEQ ID NO: 474424 - RNA, 19 nt, Human
agguggagguugcaguaag

SEQ ID NO: 474425 - RNA, 20 nt, Human
agguggccaguaaaacccaa

SEQ ID NO: 474426 - RNA, 24 nt, Human
aggugugguggcgcgugccuguaa

SEQ ID NO: 474427 - RNA, 26 nt, Human
aguaaacaacaaaccacaagccuaaa

SEQ ID NO: 474428 - RNA, 24 nt, Human
auaacacacacacacacuuaaagc

SEQ ID NO: 474429 - RNA, 22 nt, Human
aucugugaaugaacugaaauag

SEQ ID NO: 474430 - RNA, 19 nt, Human
augccuauaaucccagcac

SEQ ID NO: 474431 - RNA, 24 nt, Human
auggcuaauaucaaagguagauga

SEQ ID NO: 474432 - RNA, 24 nt, Human
auugcacuccagccugggcaacag

SEQ ID NO: 474433 - RNA, 21 nt, Human
auuuugguuuucauauagguu

SEQ ID NO: 474434 - RNA, 21 nt, Human
auuuugguuuuuauacagguu

SEQ ID NO: 474435 - RNA, 21 nt, Human
auuuugguuuuuauauagguu

SEQ ID NO: 474436 - RNA, 21 nt, Human
caaaaacaaaagcccucaagc

SEQ ID NO: 474437 - RNA, 24 nt, Human
caaaaaucuaaacgggcaccaggg

SEQ ID NO: 474438 - RNA, 19 nt, Human
caaaauucugaagcgcuca

SEQ ID NO: 474439 - RNA, 21 nt, Human
caaaggaacccacccaagccc

SEQ ID NO: 474440 - RNA, 24 nt, Human
caacauggugagacuccauuucua

SEQ ID NO: 474441 - RNA, 21 nt, Human
caagaacacuucaccccaaug

SEQ ID NO: 474442 - RNA, 25 nt, Human
caagaacacuucaccccaaugauga

SEQ ID NO: 474443 - RNA, 19 nt, Human
caagcagcagaugaagaga

SEQ ID NO: 474444 - RNA, 24 nt, Human
caagguggguggaucaccugaggu

SEQ ID NO: 474445 - RNA, 19 nt, Human
cacaaagaacagaggcacc

SEQ ID NO: 474446 - RNA, 20 nt, Human
cacaacugggcaaaacuuuc

SEQ ID NO: 474447 - RNA, 19 nt, Human
cacacauaacacacacaca

SEQ ID NO: 474448 - RNA, 21 nt, Human
cacagcccaagcucugcagcu

SEQ ID NO: 474449 - RNA, 23 nt, Human
caccaugaaaaaacaaaccugua

SEQ ID NO: 474450 - RNA, 25 nt, Human
caccaugaaaaaacaaaccuguaua

SEQ ID NO: 474451 - RNA, 20 nt, Human
caccgcacuccagcgucagg

SEQ ID NO: 474452 - RNA, 20 nt, Human
caccgcacuccagcgucagg

SEQ ID NO: 474453 - RNA, 21 nt, Human
caccgcacuccagcgucaggc

SEQ ID NO: 474454 - RNA, 23 nt, Human
caccugaggucaggaguucgaga

SEQ ID NO: 474455 - RNA, 22 nt, Human
cacuccagccugggcaacagag

SEQ ID NO: 474456 - RNA, 24 nt, Human
cacuccagccugggcaacagagug

SEQ ID NO: 474457 - RNA, 24 nt, Human
cagcacgcugggaggccaaggugg

SEQ ID NO: 474458 - RNA, 18 nt, Human
cagcccaagcucugcagc

SEQ ID NO: 474459 - RNA, 24 nt, Human
cagcuacuugggaggcugaggcag

SEQ ID NO: 474460 - RNA, 19 nt, Human
caggaaacaccugccuucg

SEQ ID NO: 474461 - RNA, 29 nt, Human
caggagguggagguugcaguaacaacggu

SEQ ID NO: 474462 - RNA, 22 nt, Human
caguggggagagggccuggcag

SEQ ID NO: 474463 - RNA, 21 nt, Human
caugccuauaaucccagcacg

SEQ ID NO: 474464 - RNA, 19 nt, Human
cauugcacuccagccuggg

SEQ ID NO: 474465 - RNA, 21 nt, Human
cauugcacuccagccugggca

SEQ ID NO: 474466 - RNA, 22 nt, Human
cauugcacuccagccugggcaa

SEQ ID NO: 474467 - RNA, 24 nt, Human
cauugcacuccagccugggcaaca

SEQ ID NO: 474468 - RNA, 25 nt, Human
cauuuuaaagucacuugauaauucc

SEQ ID NO: 474469 - RNA, 25 nt, Human
ccaaaagacuaacagugaugccuga

SEQ ID NO: 474470 - RNA, 25 nt, Human
ccagaucaagagccgugagauuacu

SEQ ID NO: 474471 - RNA, 20 nt, Human
ccaggagguggagguugcag

SEQ ID NO: 474472 - RNA, 20 nt, Human
ccauugcacuccagccuggg

SEQ ID NO: 474473 - RNA, 21 nt, Human
ccauugcacuccagccugggc

SEQ ID NO: 474474 - RNA, 23 nt, Human
ccauugcacuccagccugggcaa

SEQ ID NO: 474475 - RNA, 24 nt, Human
ccauugcacuccagccugggcaac

SEQ ID NO: 474476 - RNA, 20 nt, Human
ccauuucacuccuccacaaa

SEQ ID NO: 474477 - RNA, 20 nt, Human
cccagcacgcugggaggcca

SEQ ID NO: 474478 - RNA, 19 nt, Human
cccuacaccaugaaaaaac

SEQ ID NO: 474479 - RNA, 23 nt, Human
ccgcacuccagcgucaggccaaa

SEQ ID NO: 474480 - RNA, 22 nt, Human
ccgcgggggccuugcccugugc

SEQ ID NO: 474481 - RNA, 20 nt, Human
ccuauguuccacuucccugu

SEQ ID NO: 474482 - RNA, 18 nt, Human
ccucucugggagaagccu

SEQ ID NO: 474483 - RNA, 24 nt, Human
ccugaccaacauggugagacucca

SEQ ID NO: 474484 - RNA, 25 nt, Human
ccuggaaaaccugccacuuucuucu

SEQ ID NO: 474485 - RNA, 24 nt, Human
ccugggcaacagagugaaacucca

SEQ ID NO: 474486 - RNA, 18 nt, Human
ccuguaaucccagcuacu

SEQ ID NO: 474487 - RNA, 19 nt, Human
ccuguaaucccagcuacuu

SEQ ID NO: 474488 - RNA, 21 nt, Human
ccuguaaucccagcuacuugg

SEQ ID NO: 474489 - RNA, 19 nt, Human
ccuucgguggccagcagug

SEQ ID NO: 474490 - RNA, 24 nt, Human
cgagaccagccugaccaacauggu

SEQ ID NO: 474491 - RNA, 18 nt, Human
cggaaggaagcuugccca

SEQ ID NO: 474492 - RNA, 19 nt, Human
cggaaggaagcuugcccau

SEQ ID NO: 474493 - RNA, 26 nt, Human
cgguuuggggcaguggggagagggcc

SEQ ID NO: 474494 - RNA, 19 nt, Human
cgucuauagagguggccag

SEQ ID NO: 474495 - RNA, 21 nt, Human
cguguugccuuugccuuugcu

SEQ ID NO: 474496 - RNA, 23 nt, Human
cuaggccgguuuggggcaguggg

SEQ ID NO: 474497 - RNA, 26 nt, Human
cucaaaccugcccuccacaaucuauu

SEQ ID NO: 474498 - RNA, 25 nt, Human
cucagacuugaaacuugacgaaaau

SEQ ID NO: 474499 - RNA, 19 nt, Human
cucaugccuauaaucccag

SEQ ID NO: 474500 - RNA, 18 nt, Human
cuccagcgucaggccaaa

SEQ ID NO: 474501 - RNA, 19 nt, Human
cucucucucuaaaaaagaa

SEQ ID NO: 474502 - RNA, 21 nt, Human
cugaaauagaaaggcaacuga

SEQ ID NO: 474503 - RNA, 19 nt, Human
cugccuuccaccauccacc

SEQ ID NO: 474504 - RNA, 21 nt, Human
cugcucaaagcaacuuugcaa

SEQ ID NO: 474505 - RNA, 21 nt, Human
cuuaaagcuccauuucacucc

SEQ ID NO: 474506 - RNA, 19 nt, Human
cuuccuacaucugucguag

SEQ ID NO: 474507 - RNA, 23 nt, Human
cuucuccaaaggaacccacccaa

SEQ ID NO: 474508 - RNA, 20 nt, Human
gaacaaggagauggcuacuu

SEQ ID NO: 474509 - RNA, 18 nt, Human
gaacccacccaagcccgu

SEQ ID NO: 474510 - RNA, 24 nt, Human
gaagcuugcccauuuccgucucca

SEQ ID NO: 474511 - RNA, 19 nt, Human
gaagugagaucugugaaug

SEQ ID NO: 474512 - RNA, 21 nt, Human
gaaugcaaacggucauggacc

SEQ ID NO: 474513 - RNA, 19 nt, Human
gagaacgaggcaguguauu

SEQ ID NO: 474514 - RNA, 23 nt, Human
gagguugcaguaagcugccauug

SEQ ID NO: 474515 - RNA, 24 nt, Human
gaucaccugaggucaggaguucga

SEQ ID NO: 474516 - RNA, 24 nt, Human
gcaaaacuuucauccagacaaaag

SEQ ID NO: 474517 - RNA, 26 nt, Human
gcaaaacuuucauccagacaaaagcc

SEQ ID NO: 474518 - RNA, 27 nt, Human
gcaaaacuuucauccagacaaaagcca

SEQ ID NO: 474519 - RNA, 24 nt, Human
gcacuccagccugggcaacagagu

SEQ ID NO: 474520 - RNA, 21 nt, Human
gcaggguuuacgccagccccg

SEQ ID NO: 474521 - RNA, 24 nt, Human
gccaaaaacaaaagcccucaagcc

SEQ ID NO: 474522 - RNA, 22 nt, Human
gccauugcacuccagccugggc

SEQ ID NO: 474523 - RNA, 24 nt, Human
gccauugcacuccagccugggcaa

SEQ ID NO: 474524 - RNA, 20 nt, Human
gccuguaaucccagcuacuu

SEQ ID NO: 474525 - RNA, 22 nt, Human
gcgcgugccuguaaucccagcu

SEQ ID NO: 474526 - RNA, 21 nt, Human
gcgugugugcaaacacacaua

SEQ ID NO: 474527 - RNA, 18 nt, Human
ggagguugcaguaagcug

SEQ ID NO: 474528 - RNA, 24 nt, Human
ggagguugcaguaagcugccauug

SEQ ID NO: 474529 - RNA, 22 nt, Human
ggaucaccugaggucaggaguu

SEQ ID NO: 474530 - RNA, 20 nt, Human
ggcaccuccuuuuugugaca

SEQ ID NO: 474531 - RNA, 21 nt, Human
ggcaguggggagagggccugg

SEQ ID NO: 474532 - RNA, 22 nt, Human
gggcaguggggagagggccugg

SEQ ID NO: 474533 - RNA, 21 nt, Human
ggucauggacccaaguuaacc

SEQ ID NO: 474534 - RNA, 18 nt, Human
gguccuuggagaucccug

SEQ ID NO: 474535 - RNA, 21 nt, Human
gguggaucaccugaggucagg

SEQ ID NO: 474536 - RNA, 24 nt, Human
gguggcgcgugccuguaaucccag

SEQ ID NO: 474537 - RNA, 24 nt, Human
gguggcucaugccuauaaucccag

SEQ ID NO: 474538 - RNA, 22 nt, Human
guauaaaacagcuuggaaaaca

SEQ ID NO: 474539 - RNA, 20 nt, Human
gucccucaaaccugcccucc

SEQ ID NO: 474540 - RNA, 25 nt, Human
gugugugcaaacacacauaacaccg

SEQ ID NO: 474541 - RNA, 19 nt, Human
uaaaacacaacugggcaaa

SEQ ID NO: 474542 - RNA, 21 nt, Human
uaaagcuccauuucacuccuc

SEQ ID NO: 474543 - RNA, 23 nt, Human
uaacacacacacacacuuaaagc

SEQ ID NO: 474544 - RNA, 18 nt, Human
uaacacacgcgugugugc

SEQ ID NO: 474545 - RNA, 19 nt, Human
uaagacugacaccugagac

SEQ ID NO: 474546 - RNA, 21 nt, Human
uaagacugacaccugagacac

SEQ ID NO: 474547 - RNA, 21 nt, Human
uaauuuugguuuugauaccgg

SEQ ID NO: 474548 - RNA, 23 nt, Human
uacccuacaccaugaaaaaacaa

SEQ ID NO: 474549 - RNA, 24 nt, Human
uacccuacaccaugaaaaaacaaa

SEQ ID NO: 474550 - RNA, 22 nt, Human
uacucagggccagcugcauuuu

SEQ ID NO: 474551 - RNA, 20 nt, Human
uacucugaaguuuccagauc

SEQ ID NO: 474552 - RNA, 21 nt, Human
uauaaaacagcuuggaaaaca

SEQ ID NO: 474553 - RNA, 22 nt, Human
ucaccgcacuccagcgucaggc

SEQ ID NO: 474554 - RNA, 20 nt, Human
ucaccugaggucaggaguuc

SEQ ID NO: 474555 - RNA, 22 nt, Human
ucaggccaaaccuuuccgugga

SEQ ID NO: 474556 - RNA, 20 nt, Human
ucaugggauucaucuggaaa

SEQ ID NO: 474557 - RNA, 23 nt, Human
uccaaaaucaaauaaaaaagaac

SEQ ID NO: 474558 - RNA, 18 nt, Human
uccaagcagcagaugaag

SEQ ID NO: 474559 - RNA, 19 nt, Human
uccacaaagaacagaggca

SEQ ID NO: 474560 - RNA, 20 nt, Human
uccacaaagaacagaggcac

SEQ ID NO: 474561 - RNA, 22 nt, Human
uccacaaagaacagaggcaccu

SEQ ID NO: 474562 - RNA, 21 nt, Human
uccacaaucuauuagagcaua

SEQ ID NO: 474563 - RNA, 23 nt, Human
uccaccaaaacaaacccaaacaa

SEQ ID NO: 474564 - RNA, 28 nt, Human
uccagacaaaagccaaaaacaaaagccc

SEQ ID NO: 474565 - RNA, 18 nt, Human
uccaggcauggacccaaa

SEQ ID NO: 474566 - RNA, 24 nt, Human
ucccaaaagacuaacagugaugcc

SEQ ID NO: 474567 - RNA, 22 nt, Human
uccggcggacacacuggcugcg

SEQ ID NO: 474568 - RNA, 20 nt, Human
uccuggggccggccuggugg

SEQ ID NO: 474569 - RNA, 23 nt, Human
ucgcuugaaccaggagguggagg

SEQ ID NO: 474570 - RNA, 20 nt, Human
ucuaauauugaacccuaacu

SEQ ID NO: 474571 - RNA, 24 nt, Human
ucuguaacuucagaaaaggccauc

SEQ ID NO: 474572 - RNA, 24 nt, Human
ucuguaacuucagaaaaggccauu

SEQ ID NO: 474573 - RNA, 21 nt, Human
ugacagcacaggggggcaccu

SEQ ID NO: 474574 - RNA, 20 nt, Human
ugacaugguccaggcaugga

SEQ ID NO: 474575 - RNA, 21 nt, Human
ugaccaacauggugagacucc

SEQ ID NO: 474576 - RNA, 20 nt, Human
ugagagcaagaaggcuuaau

SEQ ID NO: 474577 - RNA, 20 nt, Human
ugaggaaagcgacuggaaug

SEQ ID NO: 474578 - RNA, 24 nt, Human
ugaggcaggagaaucgcuugaacc

SEQ ID NO: 474579 - RNA, 22 nt, Human
ugcaaguaggcucaaaguaaac

SEQ ID NO: 474580 - RNA, 22 nt, Human
ugcacuccagccugggcaacag

SEQ ID NO: 474581 - RNA, 24 nt, Human
ugccauugcacuccagccugggca

SEQ ID NO: 474582 - RNA, 18 nt, Human
ugcccugugcaggcugcu

SEQ ID NO: 474583 - RNA, 23 nt, Human
ugccuauaaucccagcacgcugg

SEQ ID NO: 474584 - RNA, 24 nt, Human
ugccuauaaucccagcacgcuggg

SEQ ID NO: 474585 - RNA, 24 nt, Human
ugccuguaaucccagcuacuuggg

SEQ ID NO: 474586 - RNA, 22 nt, Human
ugccuuugccuuugcuucauaa

SEQ ID NO: 474587 - RNA, 22 nt, Human
ugcugcagggcugucuucggcg

SEQ ID NO: 474588 - RNA, 23 nt, Human
uggaacaccuaagaaguuuguaa

SEQ ID NO: 474589 - RNA, 19 nt, Human
uggaagaaacccagcaaga

SEQ ID NO: 474590 - RNA, 21 nt, Human
uggacccaaaacaacacuugu

SEQ ID NO: 474591 - RNA, 23 nt, Human
uggaccuggaaaaccugccacuu

SEQ ID NO: 474592 - RNA, 24 nt, Human
uggaucaccugaggucaggaguuc

SEQ ID NO: 474593 - RNA, 27 nt, Human
uggaucaccugaggucaggaguucgag

SEQ ID NO: 474594 - RNA, 22 nt, Human
uggcagcacuuggcaaaaucca

SEQ ID NO: 474595 - RNA, 21 nt, Human
uggcgcgugccuguaauccca

SEQ ID NO: 474596 - RNA, 21 nt, Human
uggcucaugccuauaauccca

SEQ ID NO: 474597 - RNA, 22 nt, Human
uggcucaugccuauaaucccag

SEQ ID NO: 474598 - RNA, 24 nt, Human
uggcucaugccuauaaucccagca

SEQ ID NO: 474599 - RNA, 21 nt, Human
ugggagaagccuccuggcugg

SEQ ID NO: 474600 - RNA, 23 nt, Human
ugggaggccaagguggguggauc

SEQ ID NO: 474601 - RNA, 24 nt, Human
ugggaggccaagguggguggauca

SEQ ID NO: 474602 - RNA, 19 nt, Human
ugggaggcugaggcaggag

SEQ ID NO: 474603 - RNA, 23 nt, Human
ugggaggcugaggcaggagaauc

SEQ ID NO: 474604 - RNA, 24 nt, Human
uggguggaucaccugaggucagga

SEQ ID NO: 474605 - RNA, 24 nt, Human
ugguggcgcgugccuguaauccca

SEQ ID NO: 474606 - RNA, 24 nt, Human
ugguggcucaugccuauaauccca

SEQ ID NO: 474607 - RNA, 25 nt, Human
uggugugccagguuugugauguuuu

SEQ ID NO: 474608 - RNA, 23 nt, Human
ugugcgugucuacaggaagcaga

SEQ ID NO: 474609 - RNA, 23 nt, Human
uuaaaacacaacugggcaaaacu

SEQ ID NO: 474610 - RNA, 27 nt, Human
uuaaaaccaacaugagcacccaguucc

SEQ ID NO: 474611 - RNA, 18 nt, Human
uuaaucuccuucuaauau

SEQ ID NO: 474612 - RNA, 20 nt, Human
uucaucugacaggcccgcug

SEQ ID NO: 474613 - RNA, 18 nt, Human
uuccuacaucugucguag

SEQ ID NO: 474614 - RNA, 23 nt, Human
uugaaccaggagguggagguugc

SEQ ID NO: 474615 - RNA, 20 nt, Human
uugaacucagacuugaaacu

SEQ ID NO: 474616 - RNA, 22 nt, Human
uugcaguaagcugccauugcac

SEQ ID NO: 474617 - RNA, 24 nt, Human
uugggaggcugaggcaggagaauc

SEQ ID NO: 474618 - RNA, 24 nt, Human
uuguuuuggcuacuggcagcacuu

SEQ ID NO: 474619 - RNA, 18 nt, Human
uuuaaggauuaacaagag

SEQ ID NO: 474620 - RNA, 18 nt, Human
uuugcucugcaggauucc

SEQ ID NO: 474621 - RNA, 20 nt, Human
uuugcucugcaggauuccgc

SEQ ID NO: 474622 - RNA, 19 nt, Human
uuuguccucucugggagaa

SEQ ID NO: 474623 - RNA, 18 nt, Human
uuuuuguuauugcuacaa

SEQ ID NO: 474624 - RNA, 21 nt, Human
aagaaacaaaacauuuaaugu

SEQ ID NO: 474625 - RNA, 18 nt, Human
accuaucuacaaacagaa

SEQ ID NO: 474626 - RNA, 23 nt, Human
aggagacugcugcgccacaaccc

SEQ ID NO: 474627 - RNA, 20 nt, Human
cacaacccugccggcguccc

SEQ ID NO: 474628 - RNA, 26 nt, Human
cuaucuacaaacagaauauaacaaaa

SEQ ID NO: 474629 - RNA, 18 nt, Human
cuccaccucagccccggg

SEQ ID NO: 474630 - RNA, 21 nt, Human
cuccaccucagccccgggagc

SEQ ID NO: 474631 - RNA, 25 nt, Human
uaacaaaaggaaaaugugacuuaaa

SEQ ID NO: 474632 - RNA, 21 nt, Human
uauaacaaaaggaaaauguga

SEQ ID NO: 474633 - RNA, 24 nt, Human
uuuggcaauguguacugagagaua

SEQ ID NO: 474634 - RNA, 19 nt, Human
aacuguaacacucuaagca

SEQ ID NO: 474635 - RNA, 30 nt, Human
agcuuguuccuucaaaaaugucucucccag

SEQ ID NO: 474636 - RNA, 23 nt, Human
agucuccacgauggugcauggga

SEQ ID NO: 474637 - RNA, 18 nt, Human
aucacaauagauuugauc

SEQ ID NO: 474638 - RNA, 20 nt, Human
auccagccagucuccacgau

SEQ ID NO: 474639 - RNA, 19 nt, Human
augucucucccaucuucug

SEQ ID NO: 474640 - RNA, 19 nt, Human
cacaauagauuugauccau

SEQ ID NO: 474641 - RNA, 24 nt, Human
cagaaggagacacugaccuauuua

SEQ ID NO: 474642 - RNA, 25 nt, Human
ccagccagucuccacgauggugcaa

SEQ ID NO: 474643 - RNA, 21 nt, Human
cuccacgauggugcaugggau

SEQ ID NO: 474644 - RNA, 23 nt, Human
cuucaaaaaugucucucccaucu

SEQ ID NO: 474645 - RNA, 21 nt, Human
cuucacucugauuugccccuc

SEQ ID NO: 474646 - RNA, 23 nt, Human
gaaggcuaggacaccuccuguaa

SEQ ID NO: 474647 - RNA, 18 nt, Human
gagcacagggcauccagc

SEQ ID NO: 474648 - RNA, 21 nt, Human
uaacuucugugagacccaagu

SEQ ID NO: 474649 - RNA, 24 nt, Human
uaagggggauaaaaaucacaauag

SEQ ID NO: 474650 - RNA, 18 nt, Human
uaggauugaaagcaggca

SEQ ID NO: 474651 - RNA, 20 nt, Human
uaggauugaaagcaggcaac

SEQ ID NO: 474652 - RNA, 21 nt, Human
uaugaaccauuucccagaaaa

SEQ ID NO: 474653 - RNA, 24 nt, Human
uauuuuauuuuucucucugaaaac

SEQ ID NO: 474654 - RNA, 21 nt, Human
uccacgaagcugagaagggug

SEQ ID NO: 474655 - RNA, 24 nt, Human
ucccaggcaggaucaguccuuguu

SEQ ID NO: 474656 - RNA, 24 nt, Human
ucucaguuucuguagaugagaagu

SEQ ID NO: 474657 - RNA, 19 nt, Human
ucucugaaaaccaaggcug

SEQ ID NO: 474658 - RNA, 26 nt, Human
ucuggcuuccucuucacucugauuug

SEQ ID NO: 474659 - RNA, 23 nt, Human
ucuucacucugauuugccccucu

SEQ ID NO: 474660 - RNA, 19 nt, Human
ugaaagcaggcaacuguaa

SEQ ID NO: 474661 - RNA, 28 nt, Human
ugaauugaaaacagguuugcaguggauu

SEQ ID NO: 474662 - RNA, 24 nt, Human
ugaccuauuuauauuccuucucaa

SEQ ID NO: 474663 - RNA, 21 nt, Human
uggggcugcugcagucucauu

SEQ ID NO: 474664 - RNA, 22 nt, Human
uguacucugacaacaacugcag

SEQ ID NO: 474665 - RNA, 18 nt, Human
ugucaggcuuuauauuga

SEQ ID NO: 474666 - RNA, 21 nt, Human
ugucuaaacacuuguauaaag

SEQ ID NO: 474667 - RNA, 23 nt, Human
uuugcuguguucucugcucaggg

SEQ ID NO: 474668 - RNA, 21 nt, Human
aaaaacacuuguucauacagc

SEQ ID NO: 474669 - RNA, 23 nt, Human
aaaaacacuuguucauacagcua

SEQ ID NO: 474670 - RNA, 19 nt, Human
aacaaaauaguaaaauuca

SEQ ID NO: 474671 - RNA, 24 nt, Human
aacaaaauaguaaaauucagggaa

SEQ ID NO: 474672 - RNA, 21 nt, Human
aauaaagaagcaacuaagaga

SEQ ID NO: 474673 - RNA, 19 nt, Human
agauggaauagggaagaug

SEQ ID NO: 474674 - RNA, 24 nt, Human
agcaaaaaaaaaaaauuccaaaaa

SEQ ID NO: 474675 - RNA, 21 nt, Human
agguguggcgcguggcugagc

SEQ ID NO: 474676 - RNA, 22 nt, Human
auuuuauagcuucacaacugaa

SEQ ID NO: 474677 - RNA, 23 nt, Human
cacacauauuuucaaaccaacaa

SEQ ID NO: 474678 - RNA, 23 nt, Human
caguaaauucuguucuaaguauu

SEQ ID NO: 474679 - RNA, 24 nt, Human
cagucuauucaaaaccuuacgaac

SEQ ID NO: 474680 - RNA, 19 nt, Human
cauauuuguuccuuugagg

SEQ ID NO: 474681 - RNA, 22 nt, Human
ccaguguguucucuccauucua

SEQ ID NO: 474682 - RNA, 26 nt, Human
cuaaagaaaauguagaucaauuucag

SEQ ID NO: 474683 - RNA, 25 nt, Human
cucaaaucuucucuuccucuucauc

SEQ ID NO: 474684 - RNA, 19 nt, Human
cuuuauucaucuccucuuc

SEQ ID NO: 474685 - RNA, 20 nt, Human
gcaaguuauuagagaccuau

SEQ ID NO: 474686 - RNA, 21 nt, Human
gggaauucuucagccagaguc

SEQ ID NO: 474687 - RNA, 20 nt, Human
gguguggcgcguggcugagc

SEQ ID NO: 474688 - RNA, 22 nt, Human
uaaaauauucagggaauucuuc

SEQ ID NO: 474689 - RNA, 23 nt, Human
uaaaugcauuugugaucuccagu

SEQ ID NO: 474690 - RNA, 21 nt, Human
uaagagauuuacaagaaugga

SEQ ID NO: 474691 - RNA, 23 nt, Human
uagcaaaaaaaaaaaauuccaaa

SEQ ID NO: 474692 - RNA, 25 nt, Human
uagguauuuuucuuuucuauaaaug

SEQ ID NO: 474693 - RNA, 23 nt, Human
uauggcaugaguuugugcaugug

SEQ ID NO: 474694 - RNA, 21 nt, Human
ucaggguucccuuuuaucgug

SEQ ID NO: 474695 - RNA, 21 nt, Human
uccauacacagcagaagcuua

SEQ ID NO: 474696 - RNA, 25 nt, Human
ucuagcaaaaaaaaaaaauuccaaa

SEQ ID NO: 474697 - RNA, 19 nt, Human
ucuccaguguguucucuca

SEQ ID NO: 474698 - RNA, 19 nt, Human
ucuguguuauaaccuagag

SEQ ID NO: 474699 - RNA, 23 nt, Human
ugaaacaguuggugaaaaagaau

SEQ ID NO: 474700 - RNA, 19 nt, Human
ugaaauaaagaagcaacua

SEQ ID NO: 474701 - RNA, 23 nt, Human
uuaaacuuucucuucugcugggu

SEQ ID NO: 474702 - RNA, 23 nt, Human
uuagauuuuucucuccuuguuuu

SEQ ID NO: 474703 - RNA, 24 nt, Human
uucaaaaccuuacgaaccaaaucc

SEQ ID NO: 474704 - RNA, 22 nt, Human
uuccugaauaucauagcuaauu

SEQ ID NO: 474705 - RNA, 22 nt, Human
uuuagccagguguggcgcgugg

SEQ ID NO: 474706 - RNA, 24 nt, Human
uuugugaucuccaguguguucucu

SEQ ID NO: 474707 - RNA, 20 nt, Human
ggaagggcgggggcagaaug

SEQ ID NO: 474708 - RNA, 19 nt, Human
uacaaaucgcccgcgcccc

SEQ ID NO: 474709 - RNA, 19 nt, Human
aaaaauuagaugagaaagg

SEQ ID NO: 474710 - RNA, 20 nt, Human
aaaagaaaaauccuaugaga

SEQ ID NO: 474711 - RNA, 19 nt, Human
aaacaguuuccacuacuaa

SEQ ID NO: 474712 - RNA, 23 nt, Human
aaagaacucuugucuucgaauug

SEQ ID NO: 474713 - RNA, 29 nt, Human
aaauccuccuccauucaacagggcacucc

SEQ ID NO: 474714 - RNA, 18 nt, Human
aagacucccuccucccga

SEQ ID NO: 474715 - RNA, 22 nt, Human
aagcaagacucccuccucccga

SEQ ID NO: 474716 - RNA, 22 nt, Human
aagcauauugcauacauaagca

SEQ ID NO: 474717 - RNA, 18 nt, Human
acaagcccccaacagaca

SEQ ID NO: 474718 - RNA, 21 nt, Human
accaugaugagauuaucuuac

SEQ ID NO: 474719 - RNA, 20 nt, Human
agaaaaccccugugugaggg

SEQ ID NO: 474720 - RNA, 24 nt, Human
agaggcagcuggaaggucugauug

SEQ ID NO: 474721 - RNA, 18 nt, Human
aggacuaccauugccacu

SEQ ID NO: 474722 - RNA, 23 nt, Human
agugguggaggaugagugagagg

SEQ ID NO: 474723 - RNA, 23 nt, Human
aucaacacaagcccccaacagac

SEQ ID NO: 474724 - RNA, 20 nt, Human
caacaguagagcaaaggacc

SEQ ID NO: 474725 - RNA, 21 nt, Human
caagcaagacucccuccuccc

SEQ ID NO: 474726 - RNA, 23 nt, Human
caagccaauuauccacucaaacc

SEQ ID NO: 474727 - RNA, 21 nt, Human
cauauugcauacauaagcaua

SEQ ID NO: 474728 - RNA, 24 nt, Human
ccacagggucccuuggguaggggg

SEQ ID NO: 474729 - RNA, 27 nt, Human
cccccaacagacaaguacaugagaggc

SEQ ID NO: 474730 - RNA, 18 nt, Human
cccuccucccgauugucc

SEQ ID NO: 474731 - RNA, 23 nt, Human
cuccugaucaacacaagccccca

SEQ ID NO: 474732 - RNA, 22 nt, Human
cucugggagaggcuguuuggag

SEQ ID NO: 474733 - RNA, 23 nt, Human
cugugugagggaaaaaaaaaaaa

SEQ ID NO: 474734 - RNA, 19 nt, Human
gaccaaucauuuuguccac

SEQ ID NO: 474735 - RNA, 19 nt, Human
gagaggcagccgcagaggg

SEQ ID NO: 474736 - RNA, 23 nt, Human
gcagaggggaaacuccauccgga

SEQ ID NO: 474737 - RNA, 20 nt, Human
gcagccgcagaggggaaacu

SEQ ID NO: 474738 - RNA, 21 nt, Human
gcauauuuacacccacaucua

SEQ ID NO: 474739 - RNA, 19 nt, Human
gccaauuauccacucaaac

SEQ ID NO: 474740 - RNA, 19 nt, Human
ggaauccuucaugcccauu

SEQ ID NO: 474741 - RNA, 18 nt, Human
gggaaacuccauccggac

SEQ ID NO: 474742 - RNA, 18 nt, Human
ggggagacaaagggugug

SEQ ID NO: 474743 - RNA, 18 nt, Human
gggggagacaaagggugu

SEQ ID NO: 474744 - RNA, 20 nt, Human
guagagcaaaggaccugacc

SEQ ID NO: 474745 - RNA, 20 nt, Human
guuccaggccacaggguccc

SEQ ID NO: 474746 - RNA, 24 nt, Human
uaaaaauuagaugagaaaggcaaa

SEQ ID NO: 474747 - RNA, 20 nt, Human
uagcucaaaguaauccacag

SEQ ID NO: 474748 - RNA, 18 nt, Human
uaggacuaccauugccac

SEQ ID NO: 474749 - RNA, 28 nt, Human
uaggacuaccauugccacuuccaccaga

SEQ ID NO: 474750 - RNA, 23 nt, Human
uauaagcauauugcauacauagu

SEQ ID NO: 474751 - RNA, 22 nt, Human
uauagcauuucacacugcgguu

SEQ ID NO: 474752 - RNA, 23 nt, Human
uauauacuuuuccauacuucuga

SEQ ID NO: 474753 - RNA, 23 nt, Human
ucaacacaagcccccaacagaca

SEQ ID NO: 474754 - RNA, 23 nt, Human
uccaaacuugagcuccaagaaaa

SEQ ID NO: 474755 - RNA, 21 nt, Human
uccagcuugccaugggcgaga

SEQ ID NO: 474756 - RNA, 23 nt, Human
ugaaaugucuuuagcucaaagua

SEQ ID NO: 474757 - RNA, 20 nt, Human
ugagaaaaugaccacaagcc

SEQ ID NO: 474758 - RNA, 22 nt, Human
ugagaaaaugaccacaagccaa

SEQ ID NO: 474759 - RNA, 20 nt, Human
ugagaaaggcaaagaacucu

SEQ ID NO: 474760 - RNA, 22 nt, Human
ugagaggcagcuggaaggucug

SEQ ID NO: 474761 - RNA, 23 nt, Human
ugagugagaggcagccgcagagg

SEQ ID NO: 474762 - RNA, 21 nt, Human
uggaggaugagugagaggcag

SEQ ID NO: 474763 - RNA, 19 nt, Human
uggggucauccaaacuuga

SEQ ID NO: 474764 - RNA, 21 nt, Human
uggguagggggagacaaaggg

SEQ ID NO: 474765 - RNA, 23 nt, Human
uggguagggggagacaaagggug

SEQ ID NO: 474766 - RNA, 23 nt, Human
uggguagggggagacaaagggug

SEQ ID NO: 474767 - RNA, 21 nt, Human
uuagcucaaaguaauccacag

SEQ ID NO: 474768 - RNA, 23 nt, Human
uucauuugaaggaauccuucaug

SEQ ID NO: 474769 - RNA, 22 nt, Human
uuccacuacuaaaagaaaaauc

SEQ ID NO: 474770 - RNA, 18 nt, Human
aaaaaaccuuucuugauu

SEQ ID NO: 474771 - RNA, 18 nt, Human
aaauacuggaaguggcuu

SEQ ID NO: 474772 - RNA, 23 nt, Human
acaauggccaaaaaauacuggaa

SEQ ID NO: 474773 - RNA, 22 nt, Human
acacugacaauggccaaaaaau

SEQ ID NO: 474774 - RNA, 25 nt, Human
acacugacaauggccaaaaaauacu

SEQ ID NO: 474775 - RNA, 21 nt, Human
acuucuuuuguuuuuauaagg

SEQ ID NO: 474776 - RNA, 19 nt, Human
aguguccaaaagacuuuga

SEQ ID NO: 474777 - RNA, 23 nt, Human
ccaacggucugggagccggcugc

SEQ ID NO: 474778 - RNA, 18 nt, Human
ccagaggccagaaaaacc

SEQ ID NO: 474779 - RNA, 21 nt, Human
ccccgcccccuccucaccugg

SEQ ID NO: 474780 - RNA, 18 nt, Human
ccgccccccugccgcgcc

SEQ ID NO: 474781 - RNA, 18 nt, Human
cucccgccccccugccgc

SEQ ID NO: 474782 - RNA, 23 nt, Human
cucccgccccccugccgcgccuc

SEQ ID NO: 474783 - RNA, 21 nt, Human
cuccucaccugcgcagaccug

SEQ ID NO: 474784 - RNA, 24 nt, Human
cugggcucugacaauuucuuucug

SEQ ID NO: 474785 - RNA, 20 nt, Human
cuuccuagcaaugaccuggu

SEQ ID NO: 474786 - RNA, 21 nt, Human
gaggucgguccugccccgccc

SEQ ID NO: 474787 - RNA, 24 nt, Human
gaucguauuuuaauaaauuuccac

SEQ ID NO: 474788 - RNA, 18 nt, Human
uaaaacggagcuccugag

SEQ ID NO: 474789 - RNA, 23 nt, Human
uaaaacggagcuccugagacccc

SEQ ID NO: 474790 - RNA, 22 nt, Human
uacccagaguucuuccuagcaa

SEQ ID NO: 474791 - RNA, 23 nt, Human
uagcaaugaccuggucugauacu

SEQ ID NO: 474792 - RNA, 21 nt, Human
uaggaaggagcuaucugccag

SEQ ID NO: 474793 - RNA, 24 nt, Human
uaggaaggagcuaucugccagagg

SEQ ID NO: 474794 - RNA, 21 nt, Human
ucugacaauuucuuucugagc

SEQ ID NO: 474795 - RNA, 23 nt, Human
ucugggcucugacaauuucuuuc

SEQ ID NO: 474796 - RNA, 20 nt, Human
ugaauagaaucaagugucca

SEQ ID NO: 474797 - RNA, 19 nt, Human
ugaccuggucugauacugg

SEQ ID NO: 474798 - RNA, 21 nt, Human
ugagacccccuauuuucuagg

SEQ ID NO: 474799 - RNA, 21 nt, Human
ugcgaaggugguuaucauggc

SEQ ID NO: 474800 - RNA, 21 nt, Human
uggauugaauagaaucaagug

SEQ ID NO: 474801 - RNA, 21 nt, Human
ugggauauauaaacgcuaaaa

SEQ ID NO: 474802 - RNA, 18 nt, Human
uggguuucuaucugugac

SEQ ID NO: 474803 - RNA, 20 nt, Human
uuccgcggcucccgcccccc

SEQ ID NO: 474804 - RNA, 19 nt, Human
uuugcugcuauugcaauaa

SEQ ID NO: 474805 - RNA, 21 nt, Human
uuuuuuuuuuucaaaaugauc

SEQ ID NO: 474806 - RNA, 23 nt, Human
aacaacgagggucuauggaagga

SEQ ID NO: 474807 - RNA, 20 nt, Human
aaccacaaggaggaagcaac

SEQ ID NO: 474808 - RNA, 20 nt, Human
aagaauaaccagcccuuuaa

SEQ ID NO: 474809 - RNA, 20 nt, Human
aagcaacaacgagggucuau

SEQ ID NO: 474810 - RNA, 19 nt, Human
acaaggaggaagcaacaac

SEQ ID NO: 474811 - RNA, 21 nt, Human
accacaaggaggaagcaacaa

SEQ ID NO: 474812 - RNA, 24 nt, Human
agaaaagggggcggguugggggug

SEQ ID NO: 474813 - RNA, 24 nt, Human
agagaaaagggggcggguuggggg

SEQ ID NO: 474814 - RNA, 22 nt, Human
agcggaaggagcgguucccaga

SEQ ID NO: 474815 - RNA, 18 nt, Human
agcgguucccagagaaaa

SEQ ID NO: 474816 - RNA, 19 nt, Human
agguuccccucguacguuc

SEQ ID NO: 474817 - RNA, 18 nt, Human
auccggccagaaggacuc

SEQ ID NO: 474818 - RNA, 23 nt, Human
ccccgcagccuccaccccucccg

SEQ ID NO: 474819 - RNA, 23 nt, Human
cccgcagccuccaccccucccgc

SEQ ID NO: 474820 - RNA, 18 nt, Human
ccgcagccuccaccccuc

SEQ ID NO: 474821 - RNA, 19 nt, Human
ccgcgucccgcuuucagaa

SEQ ID NO: 474822 - RNA, 21 nt, Human
ccuccaccccucccgcguccc

SEQ ID NO: 474823 - RNA, 24 nt, Human
cggcuccccgcagccuccaccccu

SEQ ID NO: 474824 - RNA, 20 nt, Human
cuccccgcagccuccacccc

SEQ ID NO: 474825 - RNA, 22 nt, Human
cuccccgcagccuccaccccuc

SEQ ID NO: 474826 - RNA, 25 nt, Human
gaccccggcuccccgcagccuccac

SEQ ID NO: 474827 - RNA, 21 nt, Human
gagcgguucccagagaaaagg

SEQ ID NO: 474828 - RNA, 21 nt, Human
gcagacccacgcgggugaaug

SEQ ID NO: 474829 - RNA, 24 nt, Human
gcgcggacgcggcggggugcgggg

SEQ ID NO: 474830 - RNA, 23 nt, Human
gcggaauccggccagaaggacuc

SEQ ID NO: 474831 - RNA, 24 nt, Human
ggagagaggcgcgcggacgcggcg

SEQ ID NO: 474832 - RNA, 20 nt, Human
ggcggguugggggugcgcgc

SEQ ID NO: 474833 - RNA, 25 nt, Human
gggccggguccucuggggucugggg

SEQ ID NO: 474834 - RNA, 19 nt, Human
ggggagggacaggagaggg

SEQ ID NO: 474835 - RNA, 26 nt, Human
ggggagggacaggagaggggacaggu

SEQ ID NO: 474836 - RNA, 20 nt, Human
gggggccggguccucugggg

SEQ ID NO: 474837 - RNA, 19 nt, Human
gggugcggggaggggcaac

SEQ ID NO: 474838 - RNA, 21 nt, Human
uccccgcagccuccaccccuc

SEQ ID NO: 474839 - RNA, 21 nt, Human
ucgugugcgaccccggcuccc

SEQ ID NO: 474840 - RNA, 18 nt, Human
ucucgcuugggagacuaa

SEQ ID NO: 474841 - RNA, 19 nt, Human
ugggagacuaaaaacccgc

SEQ ID NO: 474842 - RNA, 24 nt, Human
ugugcgaccccggcuccccgcagc

SEQ ID NO: 474843 - RNA, 22 nt, Human
agcccaagcaccgguguugccu

SEQ ID NO: 474844 - RNA, 18 nt, Human
cacagcccaccucccucc

SEQ ID NO: 474845 - RNA, 20 nt, Human
caccugcccguccaugucag

SEQ ID NO: 474846 - RNA, 20 nt, Human
caggagacgacuguaggggc

SEQ ID NO: 474847 - RNA, 30 nt, Human
ccuaccugcaaacuuucaaagauggaagcu

SEQ ID NO: 474848 - RNA, 19 nt, Human
ccucccugguucuguuacu

SEQ ID NO: 474849 - RNA, 22 nt, Human
ccugcaaacuuucaaagaugga

SEQ ID NO: 474850 - RNA, 23 nt, Human
cgagagcacagagucucuggaau

SEQ ID NO: 474851 - RNA, 21 nt, Human
cucagcaggagcccaagcacc

SEQ ID NO: 474852 - RNA, 18 nt, Human
cugggacaggguuccucc

SEQ ID NO: 474853 - RNA, 19 nt, Human
cuucaagaggcacgaaaag

SEQ ID NO: 474854 - RNA, 21 nt, Human
gaacugcucagcaggagccca

SEQ ID NO: 474855 - RNA, 19 nt, Human
gaaucaccuucaagaggca

SEQ ID NO: 474856 - RNA, 22 nt, Human
gaggccacagcccaccucccuc

SEQ ID NO: 474857 - RNA, 20 nt, Human
gcaggaaagaacugcucagc

SEQ ID NO: 474858 - RNA, 18 nt, Human
ggaaagaacugcucagca

SEQ ID NO: 474859 - RNA, 19 nt, Human
gggcaggggaggccacagc

SEQ ID NO: 474860 - RNA, 23 nt, Human
ggggagcucugcagcucaguggc

SEQ ID NO: 474861 - RNA, 20 nt, Human
uagcugcgcugggcccuucg

SEQ ID NO: 474862 - RNA, 22 nt, Human
ucccuggggagcucugcagcuc

SEQ ID NO: 474863 - RNA, 21 nt, Human
ugagagaagugaguguuacug

SEQ ID NO: 474864 - RNA, 18 nt, Human
ugcccguccaugucagca

SEQ ID NO: 474865 - RNA, 18 nt, Human
uguaggggcaggggaggc

SEQ ID NO: 474866 - RNA, 20 nt, Human
ugucagcaccagguggcugu

SEQ ID NO: 474867 - RNA, 20 nt, Human
uguugccugcagggcgggcc

SEQ ID NO: 474868 - RNA, 27 nt, Human
aaaugucuuuucaaagcaguguuaucc

SEQ ID NO: 474869 - RNA, 21 nt, Human
aagagcaacagugaagcagag

SEQ ID NO: 474870 - RNA, 19 nt, Human
accacagcugcgccucugc

SEQ ID NO: 474871 - RNA, 25 nt, Human
accacccacacagucugagaggaca

SEQ ID NO: 474872 - RNA, 23 nt, Human
agaaggccccggcugcguggccc

SEQ ID NO: 474873 - RNA, 23 nt, Human
agaaggccccggcugcguggccc

SEQ ID NO: 474874 - RNA, 21 nt, Human
agccgccagcucaagcucaga

SEQ ID NO: 474875 - RNA, 25 nt, Human
caagcccguacggagcugcggccgg

SEQ ID NO: 474876 - RNA, 19 nt, Human
caccacagcugcgccucug

SEQ ID NO: 474877 - RNA, 21 nt, Human
caccacagcugcgccucugcc

SEQ ID NO: 474878 - RNA, 20 nt, Human
cacucgcucccggaagugga

SEQ ID NO: 474879 - RNA, 22 nt, Human
ccagcucaagcucagaacccga

SEQ ID NO: 474880 - RNA, 21 nt, Human
cccacacagucugagaggaca

SEQ ID NO: 474881 - RNA, 18 nt, Human
cccagcaauccaagcccg

SEQ ID NO: 474882 - RNA, 20 nt, Human
cccguacggagcugcggccg

SEQ ID NO: 474883 - RNA, 23 nt, Human
cggaaucccacgcucccuagccc

SEQ ID NO: 474884 - RNA, 20 nt, Human
cggguccugccggccgaggg

SEQ ID NO: 474885 - RNA, 20 nt, Human
cggguccugccggccgaggg

SEQ ID NO: 474886 - RNA, 20 nt, Human
cguggcccgcggguccugcc

SEQ ID NO: 474887 - RNA, 20 nt, Human
cguggcccgcggguccugcc

SEQ ID NO: 474888 - RNA, 26 nt, Human
cuggagcucccuguccccuuugcuga

SEQ ID NO: 474889 - RNA, 21 nt, Human
gaagugucaucagcuggugaa

SEQ ID NO: 474890 - RNA, 21 nt, Human
gaagugucaucagcuggugaa

SEQ ID NO: 474891 - RNA, 19 nt, Human
gagaaaggugagcuaaucu

SEQ ID NO: 474892 - RNA, 19 nt, Human
gagaaaggugagcuaaucu

SEQ ID NO: 474893 - RNA, 20 nt, Human
gagccgccagcucaagcuca

SEQ ID NO: 474894 - RNA, 21 nt, Human
gcaccgaggcccagcaaucca

SEQ ID NO: 474895 - RNA, 26 nt, Human
gcaucaucaucauuuucuuccaaucu

SEQ ID NO: 474896 - RNA, 18 nt, Human
ggaagugucaucagcugg

SEQ ID NO: 474897 - RNA, 18 nt, Human
ggaagugucaucagcugg

SEQ ID NO: 474898 - RNA, 27 nt, Human
ggcaucaucaucauuuucuuccaaucu

SEQ ID NO: 474899 - RNA, 19 nt, Human
uaacagccgcucacagucc

SEQ ID NO: 474900 - RNA, 24 nt, Human
ucagaacccgagugggggaggcug

SEQ ID NO: 474901 - RNA, 24 nt, Human
uccccacguagucugaaagcuucu

SEQ ID NO: 474902 - RNA, 23 nt, Human
ugagaggacagcugauuccuccc

SEQ ID NO: 474903 - RNA, 23 nt, Human
ugagcgggggaaacggcacucgc

SEQ ID NO: 474904 - RNA, 19 nt, Human
ugagcuccucuugucuucu

SEQ ID NO: 474905 - RNA, 19 nt, Human
uggggugcaccgaggccca

SEQ ID NO: 474906 - RNA, 22 nt, Human
uugcugaaucuuggcgauaauu

SEQ ID NO: 474907 - RNA, 26 nt, Human
uugcugaaucuuggcgauaauuuuuc

SEQ ID NO: 474908 - RNA, 23 nt, Human
uuggcgauaauuuugguuuuuuc

SEQ ID NO: 474909 - RNA, 20 nt, Human
uuuggaagugucaucagcug

SEQ ID NO: 474910 - RNA, 20 nt, Human
uuuggaagugucaucagcug

SEQ ID NO: 474911 - RNA, 21 nt, Human
uuuggaagugucaucagcugg

SEQ ID NO: 474912 - RNA, 23 nt, Human
aaaaggccaacaguggcaagaua

SEQ ID NO: 474913 - RNA, 19 nt, Human
aaaaucaaaaggccaacag

SEQ ID NO: 474914 - RNA, 26 nt, Human
aaacugguuuuauuucauaagauguu

SEQ ID NO: 474915 - RNA, 19 nt, Human
aaacuuacaaaccgccuca

SEQ ID NO: 474916 - RNA, 24 nt, Human
aaggcagguaagggagaagggggu

SEQ ID NO: 474917 - RNA, 27 nt, Human
aaucaggaaguaaaaguuuucccagaa

SEQ ID NO: 474918 - RNA, 18 nt, Human
agguaagggagaaggggg

SEQ ID NO: 474919 - RNA, 24 nt, Human
aucaaaaggccaacaguggcaaga

SEQ ID NO: 474920 - RNA, 21 nt, Human
auguaucuuuaaucaggaagu

SEQ ID NO: 474921 - RNA, 21 nt, Human
caaauaacuccuccagcucca

SEQ ID NO: 474922 - RNA, 22 nt, Human
caacaauguggcaacuggcauc

SEQ ID NO: 474923 - RNA, 21 nt, Human
cagaauucccaaggccaaagc

SEQ ID NO: 474924 - RNA, 21 nt, Human
cagcagcucaacaauguggca

SEQ ID NO: 474925 - RNA, 18 nt, Human
caguaagggggggaggag

SEQ ID NO: 474926 - RNA, 24 nt, Human
ccagcuccagucaucacuuuggug

SEQ ID NO: 474927 - RNA, 27 nt, Human
cccaaggccaaagcuguguccugaggc

SEQ ID NO: 474928 - RNA, 19 nt, Human
cgacccaaaacuuacaaac

SEQ ID NO: 474929 - RNA, 22 nt, Human
cgacccaaaacuuacaaaccgc

SEQ ID NO: 474930 - RNA, 25 nt, Human
cugaggccacugagaguuguuaguu

SEQ ID NO: 474931 - RNA, 23 nt, Human
gacccaaaacuuacaaaccgccu

SEQ ID NO: 474932 - RNA, 22 nt, Human
gcuccagucaucacuuuggugu

SEQ ID NO: 474933 - RNA, 21 nt, Human
gcugcauauguaucuuuaauc

SEQ ID NO: 474934 - RNA, 20 nt, Human
gggggaggagguggccuagc

SEQ ID NO: 474935 - RNA, 19 nt, Human
uauuucauaagauguuuag

SEQ ID NO: 474936 - RNA, 22 nt, Human
ucccaaggccaaagcugugucc

SEQ ID NO: 474937 - RNA, 23 nt, Human
uccccaacauucuagaauggaac

SEQ ID NO: 474938 - RNA, 22 nt, Human
ucuuuaaucaggaaguaaaagu

SEQ ID NO: 474939 - RNA, 23 nt, Human
ugaggccacugagaguuguuagu

SEQ ID NO: 474940 - RNA, 23 nt, Human
ugccccacuccccaacauucuag

SEQ ID NO: 474941 - RNA, 22 nt, Human
uggcaguaagggggggaggagg

SEQ ID NO: 474942 - RNA, 20 nt, Human
uggcaucuucguggcucucu

SEQ ID NO: 474943 - RNA, 26 nt, Human
uggcgaccuaccggaaaaaaaaaaaa

SEQ ID NO: 474944 - RNA, 24 nt, Human
uguguccugaggccacugagaguu

SEQ ID NO: 474945 - RNA, 24 nt, Human
uucaaauaacuccuccagcuccag

SEQ ID NO: 474946 - RNA, 20 nt, Human
uucaagaaaaagugggaaaa

SEQ ID NO: 474947 - RNA, 25 nt, Human
uugcaacagaggcugaaaggggagc

SEQ ID NO: 474948 - RNA, 23 nt, Human
uuuagagacaggcaauggcuggu

SEQ ID NO: 474949 - RNA, 23 nt, Human
uuuuuuuuuuuaaacaaaacugg

SEQ ID NO: 474950 - RNA, 24 nt, Human
aaagucccuccagcccacacaccu

SEQ ID NO: 474951 - RNA, 28 nt, Human
aaagucccuccagcccacacaccugcau

SEQ ID NO: 474952 - RNA, 18 nt, Human
aaauggccucuaagaaga

SEQ ID NO: 474953 - RNA, 21 nt, Human
aacucucucuucuuccaaagc

SEQ ID NO: 474954 - RNA, 21 nt, Human
accuaggugcccuuucugcua

SEQ ID NO: 474955 - RNA, 18 nt, Human
agcaacaccugggaugac

SEQ ID NO: 474956 - RNA, 21 nt, Human
augcuccugcucuaguugcac

SEQ ID NO: 474957 - RNA, 19 nt, Human
caauaaacucagcaacacc

SEQ ID NO: 474958 - RNA, 21 nt, Human
caccugcauagccuccccauu

SEQ ID NO: 474959 - RNA, 22 nt, Human
ccacugcaaucuuugucaaagg

SEQ ID NO: 474960 - RNA, 20 nt, Human
ccagcccacacaccugcaua

SEQ ID NO: 474961 - RNA, 25 nt, Human
cccacacaccugcauagccucccca

SEQ ID NO: 474962 - RNA, 20 nt, Human
ccuccagcccacacaccugc

SEQ ID NO: 474963 - RNA, 22 nt, Human
gcucaauaaacucagcaacacc

SEQ ID NO: 474964 - RNA, 21 nt, Human
gcucuaguugcacuugaccua

SEQ ID NO: 474965 - RNA, 23 nt, Human
guugcacuugaccuaggugcccu

SEQ ID NO: 474966 - RNA, 19 nt, Human
uaagaagaacgaggaacgg

SEQ ID NO: 474967 - RNA, 24 nt, Human
uaagcaagcaggcuaggugugcuc

SEQ ID NO: 474968 - RNA, 28 nt, Human
uagucaacucucucuucuuccaaagcuc

SEQ ID NO: 474969 - RNA, 18 nt, Human
ugcaaagucccuccagcc

SEQ ID NO: 474970 - RNA, 18 nt, Human
ugcuacaugcaaauggcc

SEQ ID NO: 474971 - RNA, 22 nt, Human
uggguccgugcagguaaucaag

SEQ ID NO: 474972 - RNA, 24 nt, Human
ugugcucaauaaacucagcaacac

SEQ ID NO: 474973 - RNA, 19 nt, Human
uuuuauuuuccuacucuuc

SEQ ID NO: 474974 - RNA, 22 nt, Human
aucugagaguuccaccgugagg

SEQ ID NO: 474975 - RNA, 19 nt, Human
augcugucaucugagaguu

SEQ ID NO: 474976 - RNA, 21 nt, Human
auggagccugcggagagaggc

SEQ ID NO: 474977 - RNA, 21 nt, Human
caccgugaggccucgccucuc

SEQ ID NO: 474978 - RNA, 18 nt, Human
cacuccacagaccucugc

SEQ ID NO: 474979 - RNA, 27 nt, Human
cagcaugggccagcguguuuauccccc

SEQ ID NO: 474980 - RNA, 18 nt, Human
cagcguguuuaucccccc

SEQ ID NO: 474981 - RNA, 25 nt, Human
cugcaugcugucaucugagaguucc

SEQ ID NO: 474982 - RNA, 18 nt, Human
cuguaugugcguccacuc

SEQ ID NO: 474983 - RNA, 24 nt, Human
gagcugguuauugguauguguggc

SEQ ID NO: 474984 - RNA, 21 nt, Human
ggccucgccucuccacuccac

SEQ ID NO: 474985 - RNA, 26 nt, Human
guguuuauccccccucuuuuugaacc

SEQ ID NO: 474986 - RNA, 22 nt, Human
ugcauguccccagcucagugca

SEQ ID NO: 474987 - RNA, 19 nt, Human
uuguugcauguccccagcu

SEQ ID NO: 474988 - RNA, 19 nt, Human
aaauagguuuuucagucuu

SEQ ID NO: 474989 - RNA, 20 nt, Human
agguuuuucagucucauaga

SEQ ID NO: 474990 - RNA, 19 nt, Human
agacacagcccccaacccc

SEQ ID NO: 474991 - RNA, 20 nt, Human
agacacagcccccaaccccc

SEQ ID NO: 474992 - RNA, 21 nt, Human
agagacacagcccccaacccc

SEQ ID NO: 474993 - RNA, 24 nt, Human
agccugggcgacagcgcgagacuc

SEQ ID NO: 474994 - RNA, 25 nt, Human
aggcgggaggaucgcucgaguccug

SEQ ID NO: 474995 - RNA, 20 nt, Human
aggcugaggcgggaggaucg

SEQ ID NO: 474996 - RNA, 24 nt, Human
aggcugaggcgggaggaucgcucg

SEQ ID NO: 474997 - RNA, 18 nt, Human
agggagcugggcuggcuc

SEQ ID NO: 474998 - RNA, 18 nt, Human
agggauggagagacacag

SEQ ID NO: 474999 - RNA, 20 nt, Human
auggagagacacagccccca

SEQ ID NO: 475000 - RNA, 23 nt, Human
auugcgcuccagccugggcgaca

SEQ ID NO: 475001 - RNA, 24 nt, Human
auugcgcuccagccugggcgacag

SEQ ID NO: 475002 - RNA, 25 nt, Human
cacagcccccaacccccagggagcu

SEQ ID NO: 475003 - RNA, 19 nt, Human
cauugcgcuccagccuggg

SEQ ID NO: 475004 - RNA, 20 nt, Human
cauugcgcuccagccugggc

SEQ ID NO: 475005 - RNA, 21 nt, Human
cauugcgcuccagccugggcg

SEQ ID NO: 475006 - RNA, 22 nt, Human
cauugcgcuccagccugggcga

SEQ ID NO: 475007 - RNA, 24 nt, Human
cauugcgcuccagccugggcgaca

SEQ ID NO: 475008 - RNA, 20 nt, Human
ccauugcgcuccagccuggg

SEQ ID NO: 475009 - RNA, 21 nt, Human
ccauugcgcuccagccugggc

SEQ ID NO: 475010 - RNA, 22 nt, Human
ccauugcgcuccagccugggcg

SEQ ID NO: 475011 - RNA, 23 nt, Human
ccauugcgcuccagccugggcga

SEQ ID NO: 475012 - RNA, 24 nt, Human
ccauugcgcuccagccugggcgac

SEQ ID NO: 475013 - RNA, 28 nt, Human
cccacgaucuagacagaaaccggggucc

SEQ ID NO: 475014 - RNA, 25 nt, Human
cccacgaucuagacagaaacucguu

SEQ ID NO: 475015 - RNA, 21 nt, Human
ccccaacccccagggagcugg

SEQ ID NO: 475016 - RNA, 24 nt, Human
ccccaacccccagggagcugggcu

SEQ ID NO: 475017 - RNA, 18 nt, Human
cccccaacccccagggag

SEQ ID NO: 475018 - RNA, 23 nt, Human
cccccagggagcugggcuggcuc

SEQ ID NO: 475019 - RNA, 19 nt, Human
cucgugcuccgcgccaccc

SEQ ID NO: 475020 - RNA, 22 nt, Human
cugccgcggggcucgcguccuc

SEQ ID NO: 475021 - RNA, 26 nt, Human
cugggcgacagcgcgagacuccuucu

SEQ ID NO: 475022 - RNA, 20 nt, Human
gagacacagcccccaacccc

SEQ ID NO: 475023 - RNA, 23 nt, Human
gagacuccuucucaaauauagaa

SEQ ID NO: 475024 - RNA, 22 nt, Human
gccauugcgcuccagccugggc

SEQ ID NO: 475025 - RNA, 24 nt, Human
gccauugcgcuccagccugggcga

SEQ ID NO: 475026 - RNA, 21 nt, Human
gcccccaacccccagggagcu

SEQ ID NO: 475027 - RNA, 24 nt, Human
ggagagacacagcccccaaccccc

SEQ ID NO: 475028 - RNA, 21 nt, Human
gugcugcuucucgagaggcug

SEQ ID NO: 475029 - RNA, 24 nt, Human
uccagccugggcgacagcgcgaga

SEQ ID NO: 475030 - RNA, 18 nt, Human
ucccccacgaucuagaca

SEQ ID NO: 475031 - RNA, 25 nt, Human
uccuucucaaauauagaauuuuaaa

SEQ ID NO: 475032 - RNA, 23 nt, Human
ucgcgccauugcgcuccagccug

SEQ ID NO: 475033 - RNA, 22 nt, Human
ugaggcgggaggaucgcucgag

SEQ ID NO: 475034 - RNA, 18 nt, Human
ugaguugggaguugcugu

SEQ ID NO: 475035 - RNA, 22 nt, Human
ugcgcuccagccugggcgacag

SEQ ID NO: 475036 - RNA, 24 nt, Human
uucgcgccauugcgcuccagccug

SEQ ID NO: 475037 - RNA, 18 nt, Human
uuugaagcuuccuccuuu

SEQ ID NO: 475038 - RNA, 20 nt, Human
uuugaagcuuccuccuuugu

SEQ ID NO: 475039 - RNA, 23 nt, Human
uuugaagcuuccuccuuuguaca

SEQ ID NO: 475040 - RNA, 21 nt, Human
uuuuuuuuuuuuuugaguugg

SEQ ID NO: 475041 - RNA, 24 nt, Human
uuuuuuuuuuuuuuuugaguuggg

SEQ ID NO: 475042 - RNA, 18 nt, Human
uuuuuuuuuuuuuuuuug

SEQ ID NO: 475043 - RNA, 18 nt, Human
aaaccuggcaggcaggca

SEQ ID NO: 475044 - RNA, 24 nt, Human
acccagaggccagcagcagaggac

SEQ ID NO: 475045 - RNA, 18 nt, Human
accucgcgccuccccgcc

SEQ ID NO: 475046 - RNA, 20 nt, Human
agaaagugugggcagaagcc

SEQ ID NO: 475047 - RNA, 25 nt, Human
agacaaaggccaggcccaggugaaa

SEQ ID NO: 475048 - RNA, 18 nt, Human
agccaggggcggggcagg

SEQ ID NO: 475049 - RNA, 19 nt, Human
agcccaggcugcccagccu

SEQ ID NO: 475050 - RNA, 23 nt, Human
agccugcacuggcagagcugacg

SEQ ID NO: 475051 - RNA, 23 nt, Human
aggacggggccggggccgggaga

SEQ ID NO: 475052 - RNA, 21 nt, Human
aggcaggcaggagcccguggg

SEQ ID NO: 475053 - RNA, 18 nt, Human
agggagggaagcuagggg

SEQ ID NO: 475054 - RNA, 23 nt, Human
agggauagggagggaagcuagga

SEQ ID NO: 475055 - RNA, 22 nt, Human
aggugcugggggaccgcgggcg

SEQ ID NO: 475056 - RNA, 21 nt, Human
augagcccuggagaucuggaa

SEQ ID NO: 475057 - RNA, 24 nt, Human
cacgacccagaggccagcagcaga

SEQ ID NO: 475058 - RNA, 19 nt, Human
cacuggcagagcugacgga

SEQ ID NO: 475059 - RNA, 24 nt, Human
cagcagaggacggggccggggccg

SEQ ID NO: 475060 - RNA, 22 nt, Human
caggacccccaagcgcagcuca

SEQ ID NO: 475061 - RNA, 22 nt, Human
caggagcccgugggggaggguu

SEQ ID NO: 475062 - RNA, 18 nt, Human
cagggccccccgggugcc

SEQ ID NO: 475063 - RNA, 20 nt, Human
cagggccccccgggugcccc

SEQ ID NO: 475064 - RNA, 23 nt, Human
cagggucauggccuggccccuca

SEQ ID NO: 475065 - RNA, 18 nt, Human
cagguggagacaaaggcc

SEQ ID NO: 475066 - RNA, 18 nt, Human
cauccuuguccuccagga

SEQ ID NO: 475067 - RNA, 21 nt, Human
cccagggccccccgggugccc

SEQ ID NO: 475068 - RNA, 22 nt, Human
ccccaagcgcagcucagucugc

SEQ ID NO: 475069 - RNA, 20 nt, Human
ccccagaaggaccucgcgcc

SEQ ID NO: 475070 - RNA, 25 nt, Human
ccccagaaggaccucgcgccucccc

SEQ ID NO: 475071 - RNA, 19 nt, Human
ccccagggaggugaggggg

SEQ ID NO: 475072 - RNA, 21 nt, Human
cccccaagcgcagcucagucu

SEQ ID NO: 475073 - RNA, 22 nt, Human
cccccaagcgcagcucagucug

SEQ ID NO: 475074 - RNA, 23 nt, Human
cccccagaaggaccucgcgccuc

SEQ ID NO: 475075 - RNA, 18 nt, Human
ccccucauccccagggag

SEQ ID NO: 475076 - RNA, 24 nt, Human
ccgccaggacccccaagcgcagcu

SEQ ID NO: 475077 - RNA, 19 nt, Human
ccgccgggcuccgaccgcc

SEQ ID NO: 475078 - RNA, 20 nt, Human
ccgccgggcuccgaccgccu

SEQ ID NO: 475079 - RNA, 20 nt, Human
ccucaggcugcagggauagg

SEQ ID NO: 475080 - RNA, 18 nt, Human
ccucauccuuguccucca

SEQ ID NO: 475081 - RNA, 21 nt, Human
cgacccagaggccagcagcag

SEQ ID NO: 475082 - RNA, 23 nt, Human
cgacccagggccccccgggugcc

SEQ ID NO: 475083 - RNA, 24 nt, Human
cgccaggacccccaagcgcagcuc

SEQ ID NO: 475084 - RNA, 25 nt, Human
cuaaagcccaggcugcccagccugc

SEQ ID NO: 475085 - RNA, 18 nt, Human
cucauccuuguccuccag

SEQ ID NO: 475086 - RNA, 22 nt, Human
cucgcgccuccccgccgggcuc

SEQ ID NO: 475087 - RNA, 24 nt, Human
gacccagaggccagcagcagagga

SEQ ID NO: 475088 - RNA, 23 nt, Human
gaccucgcgccuccccgccgggc

SEQ ID NO: 475089 - RNA, 20 nt, Human
gacucauaguuguuuuccuu

SEQ ID NO: 475090 - RNA, 18 nt, Human
gagcccuggagaucugga

SEQ ID NO: 475091 - RNA, 23 nt, Human
gcagaagccagcucuaaagccca

SEQ ID NO: 475092 - RNA, 25 nt, Human
gcagaagccagcucuaaagcccagg

SEQ ID NO: 475093 - RNA, 20 nt, Human
gccccgguggagaaggcgcu

SEQ ID NO: 475094 - RNA, 20 nt, Human
gcccuggagaucuggaauga

SEQ ID NO: 475095 - RNA, 25 nt, Human
gccgaaugugcugccggaguccccc

SEQ ID NO: 475096 - RNA, 19 nt, Human
gccuggguucggugcggga

SEQ ID NO: 475097 - RNA, 26 nt, Human
gcguuuggcagacucauaguuguuuu

SEQ ID NO: 475098 - RNA, 19 nt, Human
gcuuggggaggugcugggg

SEQ ID NO: 475099 - RNA, 25 nt, Human
ggagcccagguggggacuuaagggu

SEQ ID NO: 475100 - RNA, 18 nt, Human
ggagggaagcuaggggug

SEQ ID NO: 475101 - RNA, 20 nt, Human
ggcacgacccagaggccagc

SEQ ID NO: 475102 - RNA, 22 nt, Human
ggcaggagcccgugggggaggg

SEQ ID NO: 475103 - RNA, 18 nt, Human
ggcggggcaggagcccag

SEQ ID NO: 475104 - RNA, 21 nt, Human
gggaggugcugggggaccgcg

SEQ ID NO: 475105 - RNA, 19 nt, Human
gggcaggagcccagguggg

SEQ ID NO: 475106 - RNA, 26 nt, Human
gggccggggccgggagagggcgggga

SEQ ID NO: 475107 - RNA, 25 nt, Human
ggggcaggagcccagguggggacuu

SEQ ID NO: 475108 - RNA, 18 nt, Human
gguaugucaggagcuggg

SEQ ID NO: 475109 - RNA, 19 nt, Human
guguggcuuggggaggugc

SEQ ID NO: 475110 - RNA, 18 nt, Human
uauccacauuccuccucc

SEQ ID NO: 475111 - RNA, 19 nt, Human
ucauccuuguccuccagga

SEQ ID NO: 475112 - RNA, 23 nt, Human
uccccagugaccuagaaauccau

SEQ ID NO: 475113 - RNA, 21 nt, Human
uccgccccgacccagggcccc

SEQ ID NO: 475114 - RNA, 22 nt, Human
ucggugcgggacggcccaggcc

SEQ ID NO: 475115 - RNA, 19 nt, Human
ucuaaagcccaggcugccc

SEQ ID NO: 475116 - RNA, 21 nt, Human
ugacagaguauggggugagaa

SEQ ID NO: 475117 - RNA, 19 nt, Human
ugagcguggaaucguugcc

SEQ ID NO: 475118 - RNA, 18 nt, Human
ugaggcagaugugcccag

SEQ ID NO: 475119 - RNA, 23 nt, Human
ugcccagccugcacuggcagagc

SEQ ID NO: 475120 - RNA, 19 nt, Human
ugccccuuugagcguggaa

SEQ ID NO: 475121 - RNA, 19 nt, Human
ugccggaguccccagugac

SEQ ID NO: 475122 - RNA, 19 nt, Human
uggaacacacaggcagcca

SEQ ID NO: 475123 - RNA, 19 nt, Human
uggagacaaaggccaggcc

SEQ ID NO: 475124 - RNA, 26 nt, Human
uggcagugacagaguauggggugaga

SEQ ID NO: 475125 - RNA, 21 nt, Human
ugggaggucaaggccagggcu

SEQ ID NO: 475126 - RNA, 19 nt, Human
aaaaacauauaucuuugga

SEQ ID NO: 475127 - RNA, 23 nt, Human
aaacaauauuuuuccaugucccc

SEQ ID NO: 475128 - RNA, 23 nt, Human
aaacaucuccuuaaauccaaaac

SEQ ID NO: 475129 - RNA, 31 nt, Human
aagaaaaaaacauauaucuuuggaaaagaaa

SEQ ID NO: 475130 - RNA, 23 nt, Human
aagaguucaauuugagaaaaugu

SEQ ID NO: 475131 - RNA, 23 nt, Human
acccaaguaauguccaaacaaua

SEQ ID NO: 475132 - RNA, 19 nt, Human
agacaguugucaugugggu

SEQ ID NO: 475133 - RNA, 21 nt, Human
auagacaguugucaugugggu

SEQ ID NO: 475134 - RNA, 23 nt, Human
aucuccuuaaauccaaaacaaaa

SEQ ID NO: 475135 - RNA, 21 nt, Human
aucuuuggaaaagaauucuga

SEQ ID NO: 475136 - RNA, 18 nt, Human
augaagcaaaugcagccu

SEQ ID NO: 475137 - RNA, 24 nt, Human
caaaacaaaacaauaguuacaagu

SEQ ID NO: 475138 - RNA, 20 nt, Human
caaguaauguccaaacaaua

SEQ ID NO: 475139 - RNA, 20 nt, Human
caaguugucuuucaccuccc

SEQ ID NO: 475140 - RNA, 19 nt, Human
cacacugaaaaauuuaaag

SEQ ID NO: 475141 - RNA, 20 nt, Human
cacagcccucccucgcucuc

SEQ ID NO: 475142 - RNA, 20 nt, Human
caccucccaugucuuaaucu

SEQ ID NO: 475143 - RNA, 18 nt, Human
cagagauguuuacuguga

SEQ ID NO: 475144 - RNA, 19 nt, Human
cagccaguuagcauuggca

SEQ ID NO: 475145 - RNA, 19 nt, Human
cagcccucccucgcucucg

SEQ ID NO: 475146 - RNA, 20 nt, Human
cauguccccccucccccaga

SEQ ID NO: 475147 - RNA, 18 nt, Human
ccagaacacacacaggca

SEQ ID NO: 475148 - RNA, 22 nt, Human
ccauguccccccucccccagaa

SEQ ID NO: 475149 - RNA, 23 nt, Human
cccccucccccagaacacacaca

SEQ ID NO: 475150 - RNA, 24 nt, Human
cuggcaguccucacagcccucccu

SEQ ID NO: 475151 - RNA, 25 nt, Human
cuuugcaugacaguaauuuaaccac

SEQ ID NO: 475152 - RNA, 24 nt, Human
ggugauagguagaacaaggagaaa

SEQ ID NO: 475153 - RNA, 22 nt, Human
guugucauguggguaauacaga

SEQ ID NO: 475154 - RNA, 19 nt, Human
uaaauccaaaacaaaacaa

SEQ ID NO: 475155 - RNA, 26 nt, Human
ucaauagucuauuuuuaucauuuucu

SEQ ID NO: 475156 - RNA, 21 nt, Human
ucaccucccaugucuuaaucu

SEQ ID NO: 475157 - RNA, 23 nt, Human
uccaaaaacauauacuaguaaua

SEQ ID NO: 475158 - RNA, 19 nt, Human
uccaaaacaaaacaauagu

SEQ ID NO: 475159 - RNA, 21 nt, Human
uccauguccccccucccccag

SEQ ID NO: 475160 - RNA, 23 nt, Human
ucccccagaacacacacaggcaa

SEQ ID NO: 475161 - RNA, 19 nt, Human
uccccccucccccagaacc

SEQ ID NO: 475162 - RNA, 19 nt, Human
ucugacaguuuaaauuuga

SEQ ID NO: 475163 - RNA, 25 nt, Human
ugaaaaagaaguuacaugaauagaa

SEQ ID NO: 475164 - RNA, 25 nt, Human
ugaagcaaaugcagccuuaucuguu

SEQ ID NO: 475165 - RNA, 26 nt, Human
ugcuuugguuacaaacaugguuucug

SEQ ID NO: 475166 - RNA, 21 nt, Human
ugucauguggguaauacagag

SEQ ID NO: 475167 - RNA, 24 nt, Human
uguccccccucccccagaacacac

SEQ ID NO: 475168 - RNA, 21 nt, Human
uguggugauagguagaacaag

SEQ ID NO: 475169 - RNA, 22 nt, Human
uguggugauagguagaacaagg

SEQ ID NO: 475170 - RNA, 18 nt, Human
uguuguacagcaugauca

SEQ ID NO: 475171 - RNA, 27 nt, Human
uuaaugaucucauuuaaaauaucccuu

SEQ ID NO: 475172 - RNA, 22 nt, Human
uuacugaucuaaaacaucuccu

SEQ ID NO: 475173 - RNA, 21 nt, Human
uucaugaagaagcuuuuagga

SEQ ID NO: 475174 - RNA, 26 nt, Human
uugaaggauaaaaaucagaguauaaa

SEQ ID NO: 475175 - RNA, 21 nt, Human
uugucccaugguuuaacucug

SEQ ID NO: 475176 - RNA, 21 nt, Human
uugucuuucaccucccauguc

SEQ ID NO: 475177 - RNA, 25 nt, Human
uuuaaaauaucccuucucucaagcu

SEQ ID NO: 475178 - RNA, 18 nt, Human
uuuuccauguccccccuc

SEQ ID NO: 475179 - RNA, 21 nt, Human
cccacauguguccugaggagu

SEQ ID NO: 475180 - RNA, 24 nt, Human
cccacauguguccugaggaguugu

SEQ ID NO: 475181 - RNA, 20 nt, Human
gcggagcacggccucgugcc

SEQ ID NO: 475182 - RNA, 21 nt, Human
gcucucuacuuggcccacaug

SEQ ID NO: 475183 - RNA, 18 nt, Human
ggaaguucacagagccau

SEQ ID NO: 475184 - RNA, 18 nt, Human
ggccaugguccuugaggg

SEQ ID NO: 475185 - RNA, 20 nt, Human
ugagccccacaaccgaccag

SEQ ID NO: 475186 - RNA, 26 nt, Human
uggcagugcaggggaaguucacagag

SEQ ID NO: 475187 - RNA, 20 nt, Human
uuuuuugggaacggcccugg

SEQ ID NO: 475188 - RNA, 23 nt, Human
uuuuuuuuugggaacggcccugg

SEQ ID NO: 475189 - RNA, 24 nt, Human
uuuuuuuuuugggaacggcccugg

SEQ ID NO: 475190 - RNA, 24 nt, Human
uuuuuuuuuuuuuuuuuuuuuggg

SEQ ID NO: 475191 - RNA, 20 nt, Human
acaagaagagguucugagac

SEQ ID NO: 475192 - RNA, 25 nt, Human
caagaugaacaauuaacuucagccc

SEQ ID NO: 475193 - RNA, 21 nt, Human
cccagggaaacacugaaccag

SEQ ID NO: 475194 - RNA, 24 nt, Human
cgggaaugaugggaaaaugcgaca

SEQ ID NO: 475195 - RNA, 18 nt, Human
cucagggcagggggcaga

SEQ ID NO: 475196 - RNA, 19 nt, Human
gaaccagaugcuacaggag

SEQ ID NO: 475197 - RNA, 22 nt, Human
gggaaugaugggaaaaugcgac

SEQ ID NO: 475198 - RNA, 18 nt, Human
ugagacgaggccagcuau

SEQ ID NO: 475199 - RNA, 19 nt, Human
ugagacgaggccagcuaug

SEQ ID NO: 475200 - RNA, 18 nt, Human
ugugcaugagaacuaaag

SEQ ID NO: 475201 - RNA, 21 nt, Human
uucagcccagggaaacacuga

SEQ ID NO: 475202 - RNA, 19 nt, Human
agaccaauaaagggcaggg

SEQ ID NO: 475203 - RNA, 18 nt, Human
agauguuaaauacugccu

SEQ ID NO: 475204 - RNA, 23 nt, Human
ccuguccgcuccgcgggccacca

SEQ ID NO: 475205 - RNA, 24 nt, Human
cgcgggccaccaccgccguuccgu

SEQ ID NO: 475206 - RNA, 21 nt, Human
gagaccaauaaagggcagggc

SEQ ID NO: 475207 - RNA, 22 nt, Human
gggcagggcauacgaaguaagu

SEQ ID NO: 475208 - RNA, 25 nt, Human
uaaaaaaacggaccacaacuuucuu

SEQ ID NO: 475209 - RNA, 18 nt, Human
ucgauggcaacguggcgg

SEQ ID NO: 475210 - RNA, 18 nt, Human
ucugggagaccaauaaag

SEQ ID NO: 475211 - RNA, 20 nt, Human
ugaccauaaaaaaacggacc

SEQ ID NO: 475212 - RNA, 19 nt, Human
aagccaggaaggggcgggg

SEQ ID NO: 475213 - RNA, 21 nt, Human
aaggggccacggcagccuggg

SEQ ID NO: 475214 - RNA, 25 nt, Human
acaccaaaccugccggggcccuggu

SEQ ID NO: 475215 - RNA, 22 nt, Human
acagguaccuucuuacagcagc

SEQ ID NO: 475216 - RNA, 18 nt, Human
accagagcuugcuggagc

SEQ ID NO: 475217 - RNA, 23 nt, Human
acccucgcugggcuguggcccug

SEQ ID NO: 475218 - RNA, 19 nt, Human
acgcucccccaccucaccc

SEQ ID NO: 475219 - RNA, 26 nt, Human
acgcucccccaccucacccucgcugg

SEQ ID NO: 475220 - RNA, 21 nt, Human
agaugcuaggggcagagagcc

SEQ ID NO: 475221 - RNA, 24 nt, Human
agcagcugcccagcccaaggcucc

SEQ ID NO: 475222 - RNA, 19 nt, Human
agccaggaaggggcggggg

SEQ ID NO: 475223 - RNA, 21 nt, Human
agcccuucucuccuucuccuu

SEQ ID NO: 475224 - RNA, 19 nt, Human
aggaaggggcggggguggu

SEQ ID NO: 475225 - RNA, 22 nt, Human
aggagaagguccagaaggugaa

SEQ ID NO: 475226 - RNA, 18 nt, Human
aggccagcagcugcccag

SEQ ID NO: 475227 - RNA, 25 nt, Human
aggggccagggaggagaugcuaggg

SEQ ID NO: 475228 - RNA, 23 nt, Human
agggucagggaggcuggauggcu

SEQ ID NO: 475229 - RNA, 23 nt, Human
agguaccagagcuugcuggagcu

SEQ ID NO: 475230 - RNA, 21 nt, Human
aggugggccgggcacagggcg

SEQ ID NO: 475231 - RNA, 20 nt, Human
aggugggucucagccuggga

SEQ ID NO: 475232 - RNA, 24 nt, Human
caacaguguucagaggugaggccu

SEQ ID NO: 475233 - RNA, 23 nt, Human
caccaaaccugccggggcccugg

SEQ ID NO: 475234 - RNA, 23 nt, Human
caccgugugagccacauacuuuc

SEQ ID NO: 475235 - RNA, 18 nt, Human
cacuggccucacaccgug

SEQ ID NO: 475236 - RNA, 22 nt, Human
cagaagccaggaaggggcgggg

SEQ ID NO: 475237 - RNA, 23 nt, Human
cagcagcugcccagcccaaggcc

SEQ ID NO: 475238 - RNA, 24 nt, Human
cagcagcugcccagcccaaggcuc

SEQ ID NO: 475239 - RNA, 21 nt, Human
caggaaggggcggggguggug

SEQ ID NO: 475240 - RNA, 19 nt, Human
caggcagacugguagcuga

SEQ ID NO: 475241 - RNA, 22 nt, Human
caggguaaaguggggaagaagg

SEQ ID NO: 475242 - RNA, 19 nt, Human
caggugcccucccucaggu

SEQ ID NO: 475243 - RNA, 26 nt, Human
cagugaaugccuccucuccacggucu

SEQ ID NO: 475244 - RNA, 20 nt, Human
ccagccacaugcuccgugcc

SEQ ID NO: 475245 - RNA, 23 nt, Human
ccagccccaccaugcuuccugca

SEQ ID NO: 475246 - RNA, 20 nt, Human
ccaggguaaaguggggaaga

SEQ ID NO: 475247 - RNA, 21 nt, Human
cccaggcucgugaaucgccuc

SEQ ID NO: 475248 - RNA, 23 nt, Human
cccgugguugcagguaccagagc

SEQ ID NO: 475249 - RNA, 19 nt, Human
cccucccucaggugagagu

SEQ ID NO: 475250 - RNA, 23 nt, Human
cccucgcugggcuguggccccuu

SEQ ID NO: 475251 - RNA, 19 nt, Human
cccuggggccagccaagcu

SEQ ID NO: 475252 - RNA, 23 nt, Human
ccgugcccacagaucccuggggc

SEQ ID NO: 475253 - RNA, 21 nt, Human
ccguguggagggucagggagg

SEQ ID NO: 475254 - RNA, 20 nt, Human
ccucagccaggacgcucccc

SEQ ID NO: 475255 - RNA, 24 nt, Human
ccucaggugagaguccacucggcc

SEQ ID NO: 475256 - RNA, 20 nt, Human
ccuccgaaauccauguugaa

SEQ ID NO: 475257 - RNA, 18 nt, Human
ccuccugccuucugcuau

SEQ ID NO: 475258 - RNA, 18 nt, Human
ccugcuccgugccuggca

SEQ ID NO: 475259 - RNA, 18 nt, Human
ccuggccagcaggcgucc

SEQ ID NO: 475260 - RNA, 18 nt, Human
ccugggaccgcccagccc

SEQ ID NO: 475261 - RNA, 22 nt, Human
ccuucucuccuucuccuguguc

SEQ ID NO: 475262 - RNA, 23 nt, Human
cgcugggcuguggcccuggggac

SEQ ID NO: 475263 - RNA, 30 nt, Human
cgucccguccccugcguugggcagcuucaa

SEQ ID NO: 475264 - RNA, 20 nt, Human
cuccacaccugcuccgugcc

SEQ ID NO: 475265 - RNA, 19 nt, Human
cucccccaccucacccucg

SEQ ID NO: 475266 - RNA, 21 nt, Human
cuccucuccacggucuccaac

SEQ ID NO: 475267 - RNA, 18 nt, Human
cuccugugucucuccagg

SEQ ID NO: 475268 - RNA, 21 nt, Human
cucuccacggucuccaugucc

SEQ ID NO: 475269 - RNA, 22 nt, Human
cugcuccgugccuggcagucaa

SEQ ID NO: 475270 - RNA, 18 nt, Human
cugcuccuaagcgccccc

SEQ ID NO: 475271 - RNA, 18 nt, Human
cuguguuccuccgaaauc

SEQ ID NO: 475272 - RNA, 21 nt, Human
cuguguuccuccgaaauccau

SEQ ID NO: 475273 - RNA, 21 nt, Human
cuucaccugcucauccugcuc

SEQ ID NO: 475274 - RNA, 22 nt, Human
cuucugcuaugagaggacacag

SEQ ID NO: 475275 - RNA, 18 nt, Human
cuugcuggagcuggcugg

SEQ ID NO: 475276 - RNA, 20 nt, Human
cuugcuggagcuggcugggc

SEQ ID NO: 475277 - RNA, 22 nt, Human
cuugcuggagcuggcugggcuu

SEQ ID NO: 475278 - RNA, 24 nt, Human
gcaccaccgugugagccacauacu

SEQ ID NO: 475279 - RNA, 24 nt, Human
gcagagagcaguccucgccaaaca

SEQ ID NO: 475280 - RNA, 19 nt, Human
gcagucaugguccaggggc

SEQ ID NO: 475281 - RNA, 24 nt, Human
gccaccacuggccucacaccgugg

SEQ ID NO: 475282 - RNA, 18 nt, Human
gcccaaggcuccuugcac

SEQ ID NO: 475283 - RNA, 18 nt, Human
gcccgugguugcagguac

SEQ ID NO: 475284 - RNA, 25 nt, Human
gcccucagccaggacgcucccccac

SEQ ID NO: 475285 - RNA, 20 nt, Human
gccgggcacagggcggcccg

SEQ ID NO: 475286 - RNA, 22 nt, Human
gccuccucuccacggucuccau

SEQ ID NO: 475287 - RNA, 19 nt, Human
gcggggguggugcggaagc

SEQ ID NO: 475288 - RNA, 19 nt, Human
gcucccccaccucacccuc

SEQ ID NO: 475289 - RNA, 24 nt, Human
gcuuccugcagaugcgagcagcca

SEQ ID NO: 475290 - RNA, 22 nt, Human
ggacgcucccccaccucacccu

SEQ ID NO: 475291 - RNA, 21 nt, Human
ggacucggauccaggccagca

SEQ ID NO: 475292 - RNA, 24 nt, Human
ggauaggagaagguccagaaggug

SEQ ID NO: 475293 - RNA, 22 nt, Human
gggaggcuggauggcuuuuccu

SEQ ID NO: 475294 - RNA, 22 nt, Human
gggcaggacucggauccaggcc

SEQ ID NO: 475295 - RNA, 19 nt, Human
gguaaaguggggaagaagg

SEQ ID NO: 475296 - RNA, 19 nt, Human
ggucuugggaggcugaugu

SEQ ID NO: 475297 - RNA, 21 nt, Human
gugaaugccuccucuccacgg

SEQ ID NO: 475298 - RNA, 19 nt, Human
gugggugaauuucaucaug

SEQ ID NO: 475299 - RNA, 20 nt, Human
guguggagggucagggaggc

SEQ ID NO: 475300 - RNA, 24 nt, Human
guucaguuucacagaagccaggaa

SEQ ID NO: 475301 - RNA, 19 nt, Human
guuucacagaagccaggaa

SEQ ID NO: 475302 - RNA, 19 nt, Human
uacagaauagcccuucucu

SEQ ID NO: 475303 - RNA, 22 nt, Human
uacagcagcacaaaggggccac

SEQ ID NO: 475304 - RNA, 19 nt, Human
uagcccuucucuccuucuc

SEQ ID NO: 475305 - RNA, 25 nt, Human
uaggagaagguccagaaggugaagu

SEQ ID NO: 475306 - RNA, 21 nt, Human
uaggggcagagagccaaggug

SEQ ID NO: 475307 - RNA, 23 nt, Human
ucagccaggacgcucccccaccu

SEQ ID NO: 475308 - RNA, 23 nt, Human
uccacggucuccaugucccuggc

SEQ ID NO: 475309 - RNA, 20 nt, Human
uccaggggccagggaggaga

SEQ ID NO: 475310 - RNA, 18 nt, Human
ucccucaggugagagucc

SEQ ID NO: 475311 - RNA, 20 nt, Human
ucuccaggggccagggagga

SEQ ID NO: 475312 - RNA, 21 nt, Human
ucuccuucuccugugucucuc

SEQ ID NO: 475313 - RNA, 22 nt, Human
ucucugccaaaaccagagucga

SEQ ID NO: 475314 - RNA, 24 nt, Human
ucucugccaaaaccagagucgagg

SEQ ID NO: 475315 - RNA, 21 nt, Human
ucugcaggggaaauggcuguc

SEQ ID NO: 475316 - RNA, 25 nt, Human
ucugcuccuaagcgccccccucacg

SEQ ID NO: 475317 - RNA, 22 nt, Human
ugaccggggccuggccagcagg

SEQ ID NO: 475318 - RNA, 19 nt, Human
ugagaggugagaggugagg

SEQ ID NO: 475319 - RNA, 19 nt, Human
ugagcaguacauuucugcu

SEQ ID NO: 475320 - RNA, 22 nt, Human
ugcacucaugaccggggccugg

SEQ ID NO: 475321 - RNA, 18 nt, Human
ugccuuggugcccagccu

SEQ ID NO: 475322 - RNA, 20 nt, Human
ugcuccuaagcgccccccuc

SEQ ID NO: 475323 - RNA, 21 nt, Human
ugcugugguuucaaugucugu

SEQ ID NO: 475324 - RNA, 21 nt, Human
ugggaccgcccagccccacca

SEQ ID NO: 475325 - RNA, 23 nt, Human
ugggaccgcccagccccaccaug

SEQ ID NO: 475326 - RNA, 23 nt, Human
uggugugggugaauuucaucaug

SEQ ID NO: 475327 - RNA, 19 nt, Human
ugugcuuagcagugaaaau

SEQ ID NO: 475328 - RNA, 21 nt, Human
uguggagggucagggaggcug

SEQ ID NO: 475329 - RNA, 24 nt, Human
uguggcgggauccgccuggcugcu

SEQ ID NO: 475330 - RNA, 19 nt, Human
uguucagaggugaggccuu

SEQ ID NO: 475331 - RNA, 25 nt, Human
uuccugcagaugcgagcagccaggg

SEQ ID NO: 475332 - RNA, 23 nt, Human
uugcagguaccagagcuugcugg

SEQ ID NO: 475333 - RNA, 19 nt, Human
uuucagacuucccagacuc

SEQ ID NO: 475334 - RNA, 19 nt, Human
aaaaauccaaaaacuagcc

SEQ ID NO: 475335 - RNA, 19 nt, Human
aaaaauccaaaaacuagcc

SEQ ID NO: 475336 - RNA, 19 nt, Human
aaagugcugggauuacaga

SEQ ID NO: 475337 - RNA, 24 nt, Human
aaagugcugggauuacagacguga

SEQ ID NO: 475338 - RNA, 18 nt, Human
aacaauaguuuggacucu

SEQ ID NO: 475339 - RNA, 18 nt, Human
aacaccacucucgccauc

SEQ ID NO: 475340 - RNA, 20 nt, Human
aacagagcaagaccccgucu

SEQ ID NO: 475341 - RNA, 22 nt, Human
aacaguggugccugccuccccc

SEQ ID NO: 475342 - RNA, 24 nt, Human
aagugauccacccgccuuggccuc

SEQ ID NO: 475343 - RNA, 19 nt, Human
aagugcugggauuacagac

SEQ ID NO: 475344 - RNA, 26 nt, Human
aagugcugggauuacagacgugagcc

SEQ ID NO: 475345 - RNA, 22 nt, Human
aauccaaaaacuagccagaaau

SEQ ID NO: 475346 - RNA, 23 nt, Human
acaaaaaauccaaaaacuagcca

SEQ ID NO: 475347 - RNA, 22 nt, Human
acagcuccaagaaccuggcacc

SEQ ID NO: 475348 - RNA, 19 nt, Human
acaggguuucaccaugucg

SEQ ID NO: 475349 - RNA, 20 nt, Human
acaggguuucaccaugucgg

SEQ ID NO: 475350 - RNA, 24 nt, Human
acaggguuucaccaugucggccag

SEQ ID NO: 475351 - RNA, 21 nt, Human
accaagaccaaccccuccucu

SEQ ID NO: 475352 - RNA, 24 nt, Human
accauguuggccaggccggucucg

SEQ ID NO: 475353 - RNA, 19 nt, Human
accccgucucaauaaaaaa

SEQ ID NO: 475354 - RNA, 18 nt, Human
accccuccucuuccuuag

SEQ ID NO: 475355 - RNA, 25 nt, Human
acccgccuuggccucccaaagugcu

SEQ ID NO: 475356 - RNA, 18 nt, Human
acgggguuucaccauguu

SEQ ID NO: 475357 - RNA, 23 nt, Human
acgggguuucaccauguuggcca

SEQ ID NO: 475358 - RNA, 24 nt, Human
acgggguuucaccauguuggccag

SEQ ID NO: 475359 - RNA, 25 nt, Human
acuacguugcccaggccggacccga

SEQ ID NO: 475360 - RNA, 24 nt, Human
acugcacuccagccuggacaacag

SEQ ID NO: 475361 - RNA, 24 nt, Human
acugcacuccagccuggacaacag

SEQ ID NO: 475362 - RNA, 25 nt, Human
acugcacugucagacauuuauaaca

SEQ ID NO: 475363 - RNA, 23 nt, Human
agaaagcagaagcccagugcuca

SEQ ID NO: 475364 - RNA, 23 nt, Human
agaauggaguacugauggugggg

SEQ ID NO: 475365 - RNA, 23 nt, Human
agcacuuugggaggccgaggugg

SEQ ID NO: 475366 - RNA, 24 nt, Human
agcacuuugggaggccgagguggg

SEQ ID NO: 475367 - RNA, 20 nt, Human
agcaguaaguaacuacuaau

SEQ ID NO: 475368 - RNA, 18 nt, Human
agccacugugcccagccc

SEQ ID NO: 475369 - RNA, 24 nt, Human
agcgcaggagcgugaucucggcuc

SEQ ID NO: 475370 - RNA, 21 nt, Human
agcggguggggagggaagagu

SEQ ID NO: 475371 - RNA, 19 nt, Human
aggaguucgagaccagccu

SEQ ID NO: 475372 - RNA, 18 nt, Human
aggcaggaggaucaccug

SEQ ID NO: 475373 - RNA, 18 nt, Human
aggcaggaggaucaccug

SEQ ID NO: 475374 - RNA, 24 nt, Human
aggcaggaggaucaccugaaccca

SEQ ID NO: 475375 - RNA, 19 nt, Human
aggccgaggugggaggauc

SEQ ID NO: 475376 - RNA, 23 nt, Human
aggccuugggggaaacaacgguc

SEQ ID NO: 475377 - RNA, 22 nt, Human
aggcgauccgcccaccagccuc

SEQ ID NO: 475378 - RNA, 21 nt, Human
aggcguaagccacugugccca

SEQ ID NO: 475379 - RNA, 24 nt, Human
aggcugaggcaggaggaucaccug

SEQ ID NO: 475380 - RNA, 18 nt, Human
aggugggaggaucacccg

SEQ ID NO: 475381 - RNA, 23 nt, Human
aguaaccgggaccacaggcaugc

SEQ ID NO: 475382 - RNA, 24 nt, Human
agugcugggauuacagacgugagc

SEQ ID NO: 475383 - RNA, 23 nt, Human
auaaaaaaaaaauauucuccuca

SEQ ID NO: 475384 - RNA, 21 nt, Human
auacacuuuuugacaaaacug

SEQ ID NO: 475385 - RNA, 19 nt, Human
augccuauaauccuagcac

SEQ ID NO: 475386 - RNA, 18 nt, Human
auggaguacugauggugg

SEQ ID NO: 475387 - RNA, 24 nt, Human
auuuccauguuuuuaguagagaca

SEQ ID NO: 475388 - RNA, 24 nt, Human
auuucugcacuuuuaguagagacg

SEQ ID NO: 475389 - RNA, 26 nt, Human
caaaaaauccaaaaacuagccagaaa

SEQ ID NO: 475390 - RNA, 19 nt, Human
caaaauauauacugaaaau

SEQ ID NO: 475391 - RNA, 19 nt, Human
caaagcacaaauagggugu

SEQ ID NO: 475392 - RNA, 21 nt, Human
caaagccaccuugccaggaac

SEQ ID NO: 475393 - RNA, 23 nt, Human
caaaguacuaggauuacagucau

SEQ ID NO: 475394 - RNA, 24 nt, Human
caaaguacugauauuaaaggcgua

SEQ ID NO: 475395 - RNA, 24 nt, Human
caaagugcugggauuacagacgug

SEQ ID NO: 475396 - RNA, 18 nt, Human
caacggucugcgcgggag

SEQ ID NO: 475397 - RNA, 22 nt, Human
caagacggagucuugcucuguu

SEQ ID NO: 475398 - RNA, 19 nt, Human
caagaggugagcaucucuc

SEQ ID NO: 475399 - RNA, 22 nt, Human
caagcaauucuccugccucagc

SEQ ID NO: 475400 - RNA, 19 nt, Human
caagcaauucugccucagc

SEQ ID NO: 475401 - RNA, 19 nt, Human
cacaccugcggucccagcc

SEQ ID NO: 475402 - RNA, 21 nt, Human
cacagcucccaccugcccuuc

SEQ ID NO: 475403 - RNA, 19 nt, Human
cacaggcaugcgccaccac

SEQ ID NO: 475404 - RNA, 22 nt, Human
caccaccaugcccagccaauuu

SEQ ID NO: 475405 - RNA, 21 nt, Human
caccaugucggccaggcuggu

SEQ ID NO: 475406 - RNA, 24 nt, Human
caccaugucggccaggcuggucuc

SEQ ID NO: 475407 - RNA, 27 nt, Human
caccaugucggccaggcuggucucaaa

SEQ ID NO: 475408 - RNA, 18 nt, Human
caccauguuggccaggcc

SEQ ID NO: 475409 - RNA, 21 nt, Human
caccauguuggccaggccggu

SEQ ID NO: 475410 - RNA, 24 nt, Human
caccauguuggccaggccggucuc

SEQ ID NO: 475411 - RNA, 27 nt, Human
caccauguuggccaggccggucucgaa

SEQ ID NO: 475412 - RNA, 23 nt, Human
cacccgccuuggccucccaaagu

SEQ ID NO: 475413 - RNA, 24 nt, Human
cacccgccuuggccucccaaagug

SEQ ID NO: 475414 - RNA, 24 nt, Human
caccucagccuuccgaguaacugg

SEQ ID NO: 475415 - RNA, 23 nt, Human
caccugcggucccagccacucgg

SEQ ID NO: 475416 - RNA, 24 nt, Human
caccugcggucccagccacucggg

SEQ ID NO: 475417 - RNA, 20 nt, Human
caccuugccaggaaccacag

SEQ ID NO: 475418 - RNA, 18 nt, Human
cacuacguugcccaggcc

SEQ ID NO: 475419 - RNA, 24 nt, Human
cacuacguugcccaggccggaccc

SEQ ID NO: 475420 - RNA, 23 nt, Human
cacuccagccuggacaacagagc

SEQ ID NO: 475421 - RNA, 18 nt, Human
cacugcacuccagccugg

SEQ ID NO: 475422 - RNA, 19 nt, Human
cacugcacuccagccugga

SEQ ID NO: 475423 - RNA, 21 nt, Human
cacugcacuccagccuggaca

SEQ ID NO: 475424 - RNA, 27 nt, Human
cacugcacuccagccuggacaacagag

SEQ ID NO: 475425 - RNA, 18 nt, Human
cagcaggaacuugggaua

SEQ ID NO: 475426 - RNA, 24 nt, Human
cagccacucgggaggcugaggcag

SEQ ID NO: 475427 - RNA, 20 nt, Human
cagccuccugaguaaccggg

SEQ ID NO: 475428 - RNA, 21 nt, Human
caggccgggugugguggcuca

SEQ ID NO: 475429 - RNA, 21 nt, Human
cagggucucucacuacguugc

SEQ ID NO: 475430 - RNA, 24 nt, Human
caggguuucaccaugucggccagg

SEQ ID NO: 475431 - RNA, 18 nt, Human
cauaccaccacaccuggc

SEQ ID NO: 475432 - RNA, 20 nt, Human
caugccuauaauccuagcac

SEQ ID NO: 475433 - RNA, 24 nt, Human
caugccuauaauccuagcacuuug

SEQ ID NO: 475434 - RNA, 24 nt, Human
caugucggccaggcuggucucaaa

SEQ ID NO: 475435 - RNA, 24 nt, Human
cauguuggccaggccggucucgaa

SEQ ID NO: 475436 - RNA, 22 nt, Human
ccaaagugcugggauuacagac

SEQ ID NO: 475437 - RNA, 24 nt, Human
ccaaagugcugggauuacagacgu

SEQ ID NO: 475438 - RNA, 23 nt, Human
ccaacgaucagagacaauuuguc

SEQ ID NO: 475439 - RNA, 23 nt, Human
ccaagaccaaccccuccucuucc

SEQ ID NO: 475440 - RNA, 20 nt, Human
ccacagacaaaggccacugg

SEQ ID NO: 475441 - RNA, 20 nt, Human
ccaccacgcuuggcuaauuu

SEQ ID NO: 475442 - RNA, 26 nt, Human
ccacugcacucaggcccccuugugac

SEQ ID NO: 475443 - RNA, 19 nt, Human
ccacugcacuccagccugg

SEQ ID NO: 475444 - RNA, 19 nt, Human
ccacugcacuccagccugg

SEQ ID NO: 475445 - RNA, 20 nt, Human
ccacugcacuccagccugga

SEQ ID NO: 475446 - RNA, 21 nt, Human
ccacugcacuccagccuggac

SEQ ID NO: 475447 - RNA, 18 nt, Human
ccacugugcccagcccau

SEQ ID NO: 475448 - RNA, 20 nt, Human
ccaggaguucgagaccagcc

SEQ ID NO: 475449 - RNA, 21 nt, Human
cccaagccggagcgcaggagc

SEQ ID NO: 475450 - RNA, 25 nt, Human
cccaccugcccuuccagacugcaaa

SEQ ID NO: 475451 - RNA, 25 nt, Human
cccagcccaucuuauuuuuuaaaaa

SEQ ID NO: 475452 - RNA, 20 nt, Human
cccccacuuuuucugccucu

SEQ ID NO: 475453 - RNA, 19 nt, Human
cccccuccaccucccccac

SEQ ID NO: 475454 - RNA, 21 nt, Human
cccgccucuacaaaaaaucca

SEQ ID NO: 475455 - RNA, 24 nt, Human
cccugagacaccaagaccaacccc

SEQ ID NO: 475456 - RNA, 21 nt, Human
ccgcccaccagccucccaaag

SEQ ID NO: 475457 - RNA, 24 nt, Human
ccgcccaccucagccuuccgagua

SEQ ID NO: 475458 - RNA, 19 nt, Human
ccgccucggggauucaagc

SEQ ID NO: 475459 - RNA, 24 nt, Human
ccuaaccccugaguuguucaagga

SEQ ID NO: 475460 - RNA, 20 nt, Human
ccucaaauguuaccuggucu

SEQ ID NO: 475461 - RNA, 21 nt, Human
ccucacagcuccaagaaccug

SEQ ID NO: 475462 - RNA, 22 nt, Human
ccucccgccuuagccuuccaaa

SEQ ID NO: 475463 - RNA, 25 nt, Human
ccucccgccuuagccuuccaaagua

SEQ ID NO: 475464 - RNA, 22 nt, Human
ccucuacaaaaaauccaaaaac

SEQ ID NO: 475465 - RNA, 22 nt, Human
ccugaccucaagugauccaccc

SEQ ID NO: 475466 - RNA, 23 nt, Human
ccugaccucaagugauccacccg

SEQ ID NO: 475467 - RNA, 24 nt, Human
ccugaucucaggcgauccgcccac

SEQ ID NO: 475468 - RNA, 20 nt, Human
ccuggccucaagggauccuc

SEQ ID NO: 475469 - RNA, 18 nt, Human
ccuuagacuauucaaccc

SEQ ID NO: 475470 - RNA, 21 nt, Human
cgaggugggaggaucacccga

SEQ ID NO: 475471 - RNA, 22 nt, Human
cgauccgcccaccagccuccca

SEQ ID NO: 475472 - RNA, 23 nt, Human
cgcgcaccaccaugcccagccaa

SEQ ID NO: 475473 - RNA, 24 nt, Human
cggccaggcuggucucaaacuccu

SEQ ID NO: 475474 - RNA, 24 nt, Human
cgggaggcugaggcaggaggauca

SEQ ID NO: 475475 - RNA, 24 nt, Human
cgggguuucaccauguuggccagg

SEQ ID NO: 475476 - RNA, 24 nt, Human
cguguucgugccacugcacuccag

SEQ ID NO: 475477 - RNA, 24 nt, Human
cucaagugauccacccgccuuggc

SEQ ID NO: 475478 - RNA, 24 nt, Human
cucaugccuauaauccuagcacuu

SEQ ID NO: 475479 - RNA, 19 nt, Human
cuccaacaccacucucgcc

SEQ ID NO: 475480 - RNA, 24 nt, Human
cuccugaguaaccgggaccacagg

SEQ ID NO: 475481 - RNA, 22 nt, Human
cucucuacaaaugcuuuuucac

SEQ ID NO: 475482 - RNA, 24 nt, Human
cugcaaccuccgccucauggguuc

SEQ ID NO: 475483 - RNA, 19 nt, Human
cugcacucaggcccccuug

SEQ ID NO: 475484 - RNA, 23 nt, Human
cugccucagccucccgagcggcu

SEQ ID NO: 475485 - RNA, 22 nt, Human
cugcugccuuuggcuucuccua

SEQ ID NO: 475486 - RNA, 22 nt, Human
cuuucuuauuuauuuauuuuug

SEQ ID NO: 475487 - RNA, 24 nt, Human
cuuuuaguagagacgggguuucac

SEQ ID NO: 475488 - RNA, 24 nt, Human
gaccucaagugauccacccgccuu

SEQ ID NO: 475489 - RNA, 21 nt, Human
gacuauucaacccugagacag

SEQ ID NO: 475490 - RNA, 23 nt, Human
gacuccagucauccgcccaccuc

SEQ ID NO: 475491 - RNA, 24 nt, Human
gagacgggguuucaccauguuggc

SEQ ID NO: 475492 - RNA, 24 nt, Human
gagcagaaagcagaagcccagugc

SEQ ID NO: 475493 - RNA, 22 nt, Human
gagcccaggaguucgagaccag

SEQ ID NO: 475494 - RNA, 23 nt, Human
gaggugggaggaucacccgagcc

SEQ ID NO: 475495 - RNA, 26 nt, Human
gaguaacugggaccacuggugcauac

SEQ ID NO: 475496 - RNA, 18 nt, Human
gauauuaaaggcguaagc

SEQ ID NO: 475497 - RNA, 24 nt, Human
gaucacccgagcccaggaguucga

SEQ ID NO: 475498 - RNA, 25 nt, Human
gaucaccugaacccaggagagguug

SEQ ID NO: 475499 - RNA, 26 nt, Human
gaucaccugaacccaggagagguuga

SEQ ID NO: 475500 - RNA, 22 nt, Human
gaucucaggcgauccgcccacc

SEQ ID NO: 475501 - RNA, 18 nt, Human
gauuacagacgugagcca

SEQ ID NO: 475502 - RNA, 22 nt, Human
gauuacagacgugagccacugc

SEQ ID NO: 475503 - RNA, 23 nt, Human
gauuacagacgugagccacugca

SEQ ID NO: 475504 - RNA, 22 nt, Human
gauuacagucaugagucccugc

SEQ ID NO: 475505 - RNA, 23 nt, Human
gauuacagucaugagucccugca

SEQ ID NO: 475506 - RNA, 24 nt, Human
gcacuccagccuggacaacagagc

SEQ ID NO: 475507 - RNA, 21 nt, Human
gcaggaacuugggauaauaaa

SEQ ID NO: 475508 - RNA, 22 nt, Human
gcaggaggaucaccugaaccca

SEQ ID NO: 475509 - RNA, 24 nt, Human
gccagagcagaaagcagaagccca

SEQ ID NO: 475510 - RNA, 22 nt, Human
gcccaagccggagcgcaggagc

SEQ ID NO: 475511 - RNA, 22 nt, Human
gcccaggaguucgagaccagcc

SEQ ID NO: 475512 - RNA, 23 nt, Human
gccggacccgaacuccuggccuc

SEQ ID NO: 475513 - RNA, 25 nt, Human
gccggagcgcaggagcgugaucucg

SEQ ID NO: 475514 - RNA, 23 nt, Human
gccucccccuccaccucccccac

SEQ ID NO: 475515 - RNA, 19 nt, Human
gccugccucccccuccacc

SEQ ID NO: 475516 - RNA, 22 nt, Human
gccuuggccucccaaagugcug

SEQ ID NO: 475517 - RNA, 20 nt, Human
gcgauccgcccaccagccuc

SEQ ID NO: 475518 - RNA, 22 nt, Human
gcgauccgcccaccagccuccc

SEQ ID NO: 475519 - RNA, 24 nt, Human
gcuccaagaaccuggcaccgggag

SEQ ID NO: 475520 - RNA, 23 nt, Human
gcuggucucaaacuccugaccuc

SEQ ID NO: 475521 - RNA, 23 nt, Human
ggaaccacagacaaaggccacug

SEQ ID NO: 475522 - RNA, 22 nt, Human
ggaaucuuuuuccacucugcuu

SEQ ID NO: 475523 - RNA, 23 nt, Human
ggaucacccgagcccaggaguuc

SEQ ID NO: 475524 - RNA, 20 nt, Human
ggauccucccgccuuagccu

SEQ ID NO: 475525 - RNA, 27 nt, Human
ggccgaggugggaggaucacccgagcc

SEQ ID NO: 475526 - RNA, 24 nt, Human
ggccggacccgaacuccuggccuc

SEQ ID NO: 475527 - RNA, 23 nt, Human
ggccgggugugguggcucaugcc

SEQ ID NO: 475528 - RNA, 24 nt, Human
ggccggucucgaacuccugaucuc

SEQ ID NO: 475529 - RNA, 24 nt, Human
ggcuggucucaaacuccugaccuc

SEQ ID NO: 475530 - RNA, 20 nt, Human
gggaccacaggcaugcgcca

SEQ ID NO: 475531 - RNA, 23 nt, Human
gggaccacaggcaugcgccacca

SEQ ID NO: 475532 - RNA, 23 nt, Human
gggaggcugaggcaggaggauca

SEQ ID NO: 475533 - RNA, 21 nt, Human
gggccagagcagaaagcagaa

SEQ ID NO: 475534 - RNA, 23 nt, Human
gggguuucaccauguuggccagg

SEQ ID NO: 475535 - RNA, 24 nt, Human
gggugugguggcucaugccuauaa

SEQ ID NO: 475536 - RNA, 24 nt, Human
gguggcacacaccugcggucccag

SEQ ID NO: 475537 - RNA, 24 nt, Human
gguggcucaugccuauaauccuag

SEQ ID NO: 475538 - RNA, 22 nt, Human
guaagccacugugcccagccca

SEQ ID NO: 475539 - RNA, 23 nt, Human
guagagacgggguuucaccaugu

SEQ ID NO: 475540 - RNA, 24 nt, Human
gucauccgcccaccucagccuucc

SEQ ID NO: 475541 - RNA, 24 nt, Human
gugauccacccgccuuggccuccc

SEQ ID NO: 475542 - RNA, 23 nt, Human
gugcaguggcaccaucucggcuc

SEQ ID NO: 475543 - RNA, 19 nt, Human
guggggagggaagaguuuu

SEQ ID NO: 475544 - RNA, 21 nt, Human
uaacaguggugccugccuccc

SEQ ID NO: 475545 - RNA, 18 nt, Human
uaaguaacuacuaauagc

SEQ ID NO: 475546 - RNA, 24 nt, Human
uaauuuccauguuuuuaguagaga

SEQ ID NO: 475547 - RNA, 24 nt, Human
uacaaaaaauccaaaaacuagcca

SEQ ID NO: 475548 - RNA, 24 nt, Human
uacagacgugagccacugcacuca

SEQ ID NO: 475549 - RNA, 18 nt, Human
uacguugcccaggccgga

SEQ ID NO: 475550 - RNA, 24 nt, Human
uacguugcccaggccggacccgaa

SEQ ID NO: 475551 - RNA, 20 nt, Human
uacuacuggucaacagcagg

SEQ ID NO: 475552 - RNA, 22 nt, Human
uagagacaggguuucaccaugu

SEQ ID NO: 475553 - RNA, 22 nt, Human
uagagacgggguuucaccaugu

SEQ ID NO: 475554 - RNA, 24 nt, Human
uagcacuuugggaggccgaggugg

SEQ ID NO: 475555 - RNA, 19 nt, Human
uagcauacuacuggucaac

SEQ ID NO: 475556 - RNA, 25 nt, Human
uagcauacuacuggucaacagcagg

SEQ ID NO: 475557 - RNA, 18 nt, Human
uaggauuacagucaugag

SEQ ID NO: 475558 - RNA, 24 nt, Human
uaguagagacaggguuucaccaug

SEQ ID NO: 475559 - RNA, 26 nt, Human
uaguagagacaggguuucaccauguc

SEQ ID NO: 475560 - RNA, 24 nt, Human
uaguagagacgggguuucaccaug

SEQ ID NO: 475561 - RNA, 26 nt, Human
uaguagagacgggguuucaccauguu

SEQ ID NO: 475562 - RNA, 23 nt, Human
uaguagauauauauuuucuuccu

SEQ ID NO: 475563 - RNA, 19 nt, Human
uauaacauuuucuuuucuc

SEQ ID NO: 475564 - RNA, 19 nt, Human
uauauauuuucuuccuuau

SEQ ID NO: 475565 - RNA, 24 nt, Human
uauuguaagaauacaguguauaag

SEQ ID NO: 475566 - RNA, 19 nt, Human
ucaaggaucaacugaguuu

SEQ ID NO: 475567 - RNA, 20 nt, Human
ucacagcuccaagaaccugg

SEQ ID NO: 475568 - RNA, 18 nt, Human
ucacaugugggccagagc

SEQ ID NO: 475569 - RNA, 18 nt, Human
ucacugcaaccuccgccu

SEQ ID NO: 475570 - RNA, 23 nt, Human
ucacugcaaccuccgccucaugg

SEQ ID NO: 475571 - RNA, 24 nt, Human
ucacugcaaccuccgccucauggg

SEQ ID NO: 475572 - RNA, 22 nt, Human
ucacugccaccuugaacuccug

SEQ ID NO: 475573 - RNA, 24 nt, Human
ucacugccaccuugaacuccugga

SEQ ID NO: 475574 - RNA, 23 nt, Human
ucagccuuccgaguaacugggac

SEQ ID NO: 475575 - RNA, 26 nt, Human
ucaggccgggugugguggcucaugcc

SEQ ID NO: 475576 - RNA, 18 nt, Human
ucagugcaaccuccgccu

SEQ ID NO: 475577 - RNA, 21 nt, Human
ucagugcaaccuccgccucgg

SEQ ID NO: 475578 - RNA, 22 nt, Human
ucagugcaaccuccgccucggg

SEQ ID NO: 475579 - RNA, 22 nt, Human
ucagugcaaccuccgccucggg

SEQ ID NO: 475580 - RNA, 21 nt, Human
uccaaaaacuagccagaaaug

SEQ ID NO: 475581 - RNA, 23 nt, Human
uccaacaccacucucgccaucuc

SEQ ID NO: 475582 - RNA, 18 nt, Human
ucccaaagugcugggauu

SEQ ID NO: 475583 - RNA, 24 nt, Human
ucccaaagugcugggauuacagac

SEQ ID NO: 475584 - RNA, 19 nt, Human
ucccaggcuggaguacagu

SEQ ID NO: 475585 - RNA, 23 nt, Human
ucccgagcggcugggaccacagg

SEQ ID NO: 475586 - RNA, 18 nt, Human
ucccugagacaccaagac

SEQ ID NO: 475587 - RNA, 21 nt, Human
uccgcccaccucagccuuccg

SEQ ID NO: 475588 - RNA, 24 nt, Human
uccucaaauguuaccuggucucac

SEQ ID NO: 475589 - RNA, 23 nt, Human
uccuggacuccagucauccgccc

SEQ ID NO: 475590 - RNA, 19 nt, Human
uccuuauggcuuucuuauu

SEQ ID NO: 475591 - RNA, 24 nt, Human
ucgcauuguuucccaggcuggagu

SEQ ID NO: 475592 - RNA, 25 nt, Human
ucgggaggcugaggcaggaggauca

SEQ ID NO: 475593 - RNA, 23 nt, Human
ucgugccacugcacuccagccug

SEQ ID NO: 475594 - RNA, 24 nt, Human
ucucacuacguugcccaggccgga

SEQ ID NO: 475595 - RNA, 22 nt, Human
ucucacucucgcccaagccgga

SEQ ID NO: 475596 - RNA, 20 nt, Human
ucuccaacaccacucucgcc

SEQ ID NO: 475597 - RNA, 23 nt, Human
ucucgaacuccugaucucaggcg

SEQ ID NO: 475598 - RNA, 20 nt, Human
ucugccucagccuccugagu

SEQ ID NO: 475599 - RNA, 18 nt, Human
ucuugcucuguuguccag

SEQ ID NO: 475600 - RNA, 19 nt, Human
ucuugcucuguuguccaga

SEQ ID NO: 475601 - RNA, 22 nt, Human
ucuugcucuguuguccagaugg

SEQ ID NO: 475602 - RNA, 25 nt, Human
ucuugcucuguuguccagauggugc

SEQ ID NO: 475603 - RNA, 24 nt, Human
ugaacuccuggacuccagucaucc

SEQ ID NO: 475604 - RNA, 24 nt, Human
ugaccucaagugauccacccgccu

SEQ ID NO: 475605 - RNA, 22 nt, Human
ugacuuuccuuauaacauuuuc

SEQ ID NO: 475606 - RNA, 19 nt, Human
ugagaaaaagucucucuac

SEQ ID NO: 475607 - RNA, 21 nt, Human
ugagacaccaagaccaacccc

SEQ ID NO: 475608 - RNA, 20 nt, Human
ugaggcaggaggaucaccug

SEQ ID NO: 475609 - RNA, 24 nt, Human
ugaggcaggaggaucaccugaacc

SEQ ID NO: 475610 - RNA, 25 nt, Human
ugaggcaggaggaucaccugaaccc

SEQ ID NO: 475611 - RNA, 24 nt, Human
ugauauuaaaggcguaagccacug

SEQ ID NO: 475612 - RNA, 18 nt, Human
ugaucucaggcgauccgc

SEQ ID NO: 475613 - RNA, 18 nt, Human
ugaucucugaacaauagu

SEQ ID NO: 475614 - RNA, 22 nt, Human
ugcaguggcaccaucucggcuc

SEQ ID NO: 475615 - RNA, 23 nt, Human
ugccaccuugaacuccuggacuc

SEQ ID NO: 475616 - RNA, 24 nt, Human
ugccacugcacuccagccuggaca

SEQ ID NO: 475617 - RNA, 20 nt, Human
ugcccaggccggacccgaac

SEQ ID NO: 475618 - RNA, 24 nt, Human
ugccuauaauccuagcacuuuggg

SEQ ID NO: 475619 - RNA, 24 nt, Human
ugccucagccucccgagcggcugg

SEQ ID NO: 475620 - RNA, 24 nt, Human
ugccucagccuccugaguaaccgg

SEQ ID NO: 475621 - RNA, 23 nt, Human
ugccugccucccccuccaccucc

SEQ ID NO: 475622 - RNA, 24 nt, Human
ugcugggauuacagacgugagcca

SEQ ID NO: 475623 - RNA, 22 nt, Human
uggcaccgggaguaagccacug

SEQ ID NO: 475624 - RNA, 24 nt, Human
uggccaggccggucucgaacuccu

SEQ ID NO: 475625 - RNA, 20 nt, Human
uggccucaagggauccuccc

SEQ ID NO: 475626 - RNA, 24 nt, Human
uggccucaagggauccucccgccu

SEQ ID NO: 475627 - RNA, 19 nt, Human
uggcucaugccuauaaucc

SEQ ID NO: 475628 - RNA, 19 nt, Human
uggcucaugccuauaaucc

SEQ ID NO: 475629 - RNA, 24 nt, Human
uggcucaugccuauaauccuagca

SEQ ID NO: 475630 - RNA, 21 nt, Human
ugggaccacaggcgcgcacca

SEQ ID NO: 475631 - RNA, 24 nt, Human
ugggaccacaggcgcgcaccacca

SEQ ID NO: 475632 - RNA, 18 nt, Human
ugggaccacuggugcaua

SEQ ID NO: 475633 - RNA, 21 nt, Human
ugggaccacuggugcauacca

SEQ ID NO: 475634 - RNA, 24 nt, Human
ugggaccacuggugcauaccacca

SEQ ID NO: 475635 - RNA, 19 nt, Human
ugggaggccgaggugggag

SEQ ID NO: 475636 - RNA, 24 nt, Human
ugggaggccgaggugggaggauca

SEQ ID NO: 475637 - RNA, 19 nt, Human
ugggauuacagacgugagc

SEQ ID NO: 475638 - RNA, 21 nt, Human
ugggauuacagacgugagcca

SEQ ID NO: 475639 - RNA, 22 nt, Human
ugggauuacagacgugagccac

SEQ ID NO: 475640 - RNA, 22 nt, Human
ugggauuacagacgugagccac

SEQ ID NO: 475641 - RNA, 24 nt, Human
ugggauuacagacgugagccacug

SEQ ID NO: 475642 - RNA, 24 nt, Human
ugggauuacagacgugagccacug

SEQ ID NO: 475643 - RNA, 20 nt, Human
ugggccagagcagaaagcag

SEQ ID NO: 475644 - RNA, 23 nt, Human
ugguggcacacaccugcgguccc

SEQ ID NO: 475645 - RNA, 22 nt, Human
ugguggcucaugccuauaaucc

SEQ ID NO: 475646 - RNA, 25 nt, Human
ugguggggucaagauacacuuuuug

SEQ ID NO: 475647 - RNA, 21 nt, Human
uguccaagaauagucuaugcc

SEQ ID NO: 475648 - RNA, 23 nt, Human
ugugcagggcaggggguguuggg

SEQ ID NO: 475649 - RNA, 21 nt, Human
ugugucacagcucccaccugc

SEQ ID NO: 475650 - RNA, 19 nt, Human
uguuccuccucacagcucc

SEQ ID NO: 475651 - RNA, 18 nt, Human
uuacuguauuguaagaau

SEQ ID NO: 475652 - RNA, 24 nt, Human
uuaguagagacaggguuucaccau

SEQ ID NO: 475653 - RNA, 18 nt, Human
uuaguagagacgggguuu

SEQ ID NO: 475654 - RNA, 22 nt, Human
uuaguagagacgggguuucacc

SEQ ID NO: 475655 - RNA, 24 nt, Human
uuaguagagacgggguuucaccau

SEQ ID NO: 475656 - RNA, 21 nt, Human
uucaagcaauucuccugccuc

SEQ ID NO: 475657 - RNA, 24 nt, Human
uucaagcaauucuccugccucagc

SEQ ID NO: 475658 - RNA, 21 nt, Human
uucaagcaauucugccucagc

SEQ ID NO: 475659 - RNA, 20 nt, Human
uuccagacugcaaagccacc

SEQ ID NO: 475660 - RNA, 18 nt, Human
uuccuccucacagcucca

SEQ ID NO: 475661 - RNA, 23 nt, Human
uuccuuauaacauuuucuuuucu

SEQ ID NO: 475662 - RNA, 24 nt, Human
uucgugccacugcacuccagccug

SEQ ID NO: 475663 - RNA, 18 nt, Human
uuggccucccaaagugcu

SEQ ID NO: 475664 - RNA, 25 nt, Human
uugggaggccgaggugggaggauca

SEQ ID NO: 475665 - RNA, 21 nt, Human
uugggauaauaaauacaagau

SEQ ID NO: 475666 - RNA, 21 nt, Human
uuuauuuuugagacggagucu

SEQ ID NO: 475667 - RNA, 24 nt, Human
uuucaccaugucggccaggcuggu

SEQ ID NO: 475668 - RNA, 24 nt, Human
uuucaccauguuggccaggccggu

SEQ ID NO: 475669 - RNA, 20 nt, Human
uuuccauguuuuuaguagag

SEQ ID NO: 475670 - RNA, 24 nt, Human
uuugcacugcacugucagacauuu

SEQ ID NO: 475671 - RNA, 24 nt, Human
uuuuuaguagagacaggguuucac

SEQ ID NO: 475672 - RNA, 19 nt, Human
aaaaagcucaucagcagcc

SEQ ID NO: 475673 - RNA, 25 nt, Human
aaaagcacucagccacauccuacuc

SEQ ID NO: 475674 - RNA, 26 nt, Human
aaacaggaaaguagcauaaaaauaua

SEQ ID NO: 475675 - RNA, 23 nt, Human
aaagcaaagccagugcucccuuc

SEQ ID NO: 475676 - RNA, 18 nt, Human
acacgccaaacaccaaca

SEQ ID NO: 475677 - RNA, 18 nt, Human
accaaaaagcucaucagc

SEQ ID NO: 475678 - RNA, 22 nt, Human
agccgggguccaagcgcucccc

SEQ ID NO: 475679 - RNA, 21 nt, Human
aggaaaguagcauaaaaauau

SEQ ID NO: 475680 - RNA, 21 nt, Human
aggcaagaagagagaggccug

SEQ ID NO: 475681 - RNA, 24 nt, Human
caaaaaaaaagcacucagccacau

SEQ ID NO: 475682 - RNA, 21 nt, Human
caauaaaugucucuggggucu

SEQ ID NO: 475683 - RNA, 27 nt, Human
caccaaaaagcucaucagcagccccag

SEQ ID NO: 475684 - RNA, 22 nt, Human
cagccacauccuacuccccaau

SEQ ID NO: 475685 - RNA, 27 nt, Human
caggaaaguagcauaaaaauauagugg

SEQ ID NO: 475686 - RNA, 21 nt, Human
caggcagugcaucugaagcac

SEQ ID NO: 475687 - RNA, 22 nt, Human
cauccaugaccccaacacagag

SEQ ID NO: 475688 - RNA, 21 nt, Human
caucugaagcaccuucuaguu

SEQ ID NO: 475689 - RNA, 22 nt, Human
caucugaagcaccuucuaguua

SEQ ID NO: 475690 - RNA, 18 nt, Human
ccagaggaggccaggugu

SEQ ID NO: 475691 - RNA, 24 nt, Human
ccagcaaggacucuguagcccaga

SEQ ID NO: 475692 - RNA, 20 nt, Human
ccagugccugugggucucau

SEQ ID NO: 475693 - RNA, 23 nt, Human
ccccagcaaggacucuguagccc

SEQ ID NO: 475694 - RNA, 23 nt, Human
ccccgaacccccagcaaggacuc

SEQ ID NO: 475695 - RNA, 20 nt, Human
cccgaacccccagcaaggac

SEQ ID NO: 475696 - RNA, 20 nt, Human
cccuucuccugacgcguccc

SEQ ID NO: 475697 - RNA, 18 nt, Human
ccucugugcggucugguu

SEQ ID NO: 475698 - RNA, 19 nt, Human
ccugacgcgucccagaagc

SEQ ID NO: 475699 - RNA, 21 nt, Human
ccugccuuuaagagccaagag

SEQ ID NO: 475700 - RNA, 25 nt, Human
ccuucuauugccaacccaagggugc

SEQ ID NO: 475701 - RNA, 20 nt, Human
ccuuuaagagccaagagagc

SEQ ID NO: 475702 - RNA, 19 nt, Human
cuggaaucuugguuuucuc

SEQ ID NO: 475703 - RNA, 21 nt, Human
cuggccaaaaaaaaagcacuc

SEQ ID NO: 475704 - RNA, 21 nt, Human
cuuuaaaggcaagaagagaga

SEQ ID NO: 475705 - RNA, 20 nt, Human
gaacccccagcaaggacucu

SEQ ID NO: 475706 - RNA, 18 nt, Human
gaacuccagccgcuucuc

SEQ ID NO: 475707 - RNA, 19 nt, Human
gagccgcucauccaugacc

SEQ ID NO: 475708 - RNA, 22 nt, Human
gagccgcucauccaugacccca

SEQ ID NO: 475709 - RNA, 18 nt, Human
gcucauccaugaccccac

SEQ ID NO: 475710 - RNA, 21 nt, Human
gcugaagccagaggaggccag

SEQ ID NO: 475711 - RNA, 18 nt, Human
ggaaggcuggugcuugcu

SEQ ID NO: 475712 - RNA, 20 nt, Human
ggaggauucuuuaaaggcaa

SEQ ID NO: 475713 - RNA, 21 nt, Human
gggacauguguguuugcgagc

SEQ ID NO: 475714 - RNA, 21 nt, Human
gucaccuucuauugccaaccc

SEQ ID NO: 475715 - RNA, 19 nt, Human
gucccagaagccggggucc

SEQ ID NO: 475716 - RNA, 18 nt, Human
gugaggaaggaggauucu

SEQ ID NO: 475717 - RNA, 19 nt, Human
ucacacgccaaacaccaac

SEQ ID NO: 475718 - RNA, 23 nt, Human
ucagcagccccaggccucugugc

SEQ ID NO: 475719 - RNA, 21 nt, Human
uccaagcgcuccccgaacccc

SEQ ID NO: 475720 - RNA, 25 nt, Human
ucccagaagccgggguccaagcgcu

SEQ ID NO: 475721 - RNA, 25 nt, Human
uccgcuagucuggccaaaaaaaaag

SEQ ID NO: 475722 - RNA, 18 nt, Human
ucuauugccaacccaagg

SEQ ID NO: 475723 - RNA, 19 nt, Human
ucucccaacacaacccaac

SEQ ID NO: 475724 - RNA, 20 nt, Human
ugaaagcaaagccagugcuc

SEQ ID NO: 475725 - RNA, 21 nt, Human
ugaaagcaaagccagugcucc

SEQ ID NO: 475726 - RNA, 18 nt, Human
ugagaagcugaagccaga

SEQ ID NO: 475727 - RNA, 19 nt, Human
ugccaacccaagggugcca

SEQ ID NO: 475728 - RNA, 25 nt, Human
ugcucccuucuccugacgcguccca

SEQ ID NO: 475729 - RNA, 19 nt, Human
uggaaggcuggugcuugcu

SEQ ID NO: 475730 - RNA, 22 nt, Human
ugucacacgccaaacaccaaca

SEQ ID NO: 475731 - RNA, 24 nt, Human
uucuaguuacuauccccaucugga

SEQ ID NO: 475732 - RNA, 25 nt, Human
aaacagucaguaagggacccucugc

SEQ ID NO: 475733 - RNA, 18 nt, Human
aaagugcugggauuacag

SEQ ID NO: 475734 - RNA, 19 nt, Human
aaccagcugaauuaacgca

SEQ ID NO: 475735 - RNA, 23 nt, Human
aagugcugggauuacagccgugu

SEQ ID NO: 475736 - RNA, 21 nt, Human
aauagcugggauuacaggcau

SEQ ID NO: 475737 - RNA, 24 nt, Human
aaugaaauggugcaaucucagcuc

SEQ ID NO: 475738 - RNA, 23 nt, Human
acaaagaugggaaacuuuagcac

SEQ ID NO: 475739 - RNA, 20 nt, Human
acaaggcccccacccaucca

SEQ ID NO: 475740 - RNA, 24 nt, Human
acaaggcccccacccauccaaaca

SEQ ID NO: 475741 - RNA, 19 nt, Human
acacauggggagaaacuca

SEQ ID NO: 475742 - RNA, 25 nt, Human
acaggcagugucguucuuggggacg

SEQ ID NO: 475743 - RNA, 18 nt, Human
acaggguuuugcuauguu

SEQ ID NO: 475744 - RNA, 23 nt, Human
acaggguuuugcuauguuggcca

SEQ ID NO: 475745 - RNA, 24 nt, Human
acaggguuuugcuauguuggccag

SEQ ID NO: 475746 - RNA, 21 nt, Human
accugucauucuaagaaccuc

SEQ ID NO: 475747 - RNA, 21 nt, Human
acucauguugcccaggcugga

SEQ ID NO: 475748 - RNA, 23 nt, Human
acuggucuugaacuccugaccuc

SEQ ID NO: 475749 - RNA, 18 nt, Human
agacaggguuuugcuaug

SEQ ID NO: 475750 - RNA, 18 nt, Human
agccuuccgaauagcugg

SEQ ID NO: 475751 - RNA, 23 nt, Human
agcucagaggcugggauccucca

SEQ ID NO: 475752 - RNA, 20 nt, Human
aggcaugcaccaccaugccc

SEQ ID NO: 475753 - RNA, 24 nt, Human
aggugaucugccaaccuuggccuc

SEQ ID NO: 475754 - RNA, 24 nt, Human
agugauucuccugccucagccuuc

SEQ ID NO: 475755 - RNA, 18 nt, Human
auagcugggauuacaggc

SEQ ID NO: 475756 - RNA, 26 nt, Human
aucaugcuauucucuucccuccaccc

SEQ ID NO: 475757 - RNA, 18 nt, Human
auguauuagaguuaagug

SEQ ID NO: 475758 - RNA, 19 nt, Human
auguuggccagacuggucu

SEQ ID NO: 475759 - RNA, 24 nt, Human
auuuuuguauuuuuaguagagaca

SEQ ID NO: 475760 - RNA, 26 nt, Human
caaagugcugggauuacagccgugug

SEQ ID NO: 475761 - RNA, 21 nt, Human
caacagguaacaacgcuuccu

SEQ ID NO: 475762 - RNA, 27 nt, Human
caaccgauuuuuuuuuuuuuaaggcuu

SEQ ID NO: 475763 - RNA, 20 nt, Human
caagugauucuccugccuca

SEQ ID NO: 475764 - RNA, 22 nt, Human
caagugauucuccugccucagc

SEQ ID NO: 475765 - RNA, 22 nt, Human
cacaagaucacacaugggccag

SEQ ID NO: 475766 - RNA, 24 nt, Human
cacacaugggccagccuacccccc

SEQ ID NO: 475767 - RNA, 22 nt, Human
cacaggcgaaagguugcuuccu

SEQ ID NO: 475768 - RNA, 22 nt, Human
caccaccaugcccagauaauuu

SEQ ID NO: 475769 - RNA, 25 nt, Human
caccccacaagaucacacaugggcc

SEQ ID NO: 475770 - RNA, 21 nt, Human
caccgcaaccuccgccuccug

SEQ ID NO: 475771 - RNA, 22 nt, Human
cacuacacagcaaugcggaggu

SEQ ID NO: 475772 - RNA, 23 nt, Human
cagccgugugccacugcacccaa

SEQ ID NO: 475773 - RNA, 21 nt, Human
cagccuaccccccaucacaag

SEQ ID NO: 475774 - RNA, 25 nt, Human
cagcgcgacgucagccccgcccccc

SEQ ID NO: 475775 - RNA, 22 nt, Human
cagcugaauuaacgcaugcuga

SEQ ID NO: 475776 - RNA, 19 nt, Human
caggguuuugcuauguugg

SEQ ID NO: 475777 - RNA, 23 nt, Human
caggguuuugcuauguuggccag

SEQ ID NO: 475778 - RNA, 23 nt, Human
caguggagaggaggcggaagcuc

SEQ ID NO: 475779 - RNA, 19 nt, Human
cauaaaaccaacucagcuc

SEQ ID NO: 475780 - RNA, 18 nt, Human
caucuuguuacccccgcc

SEQ ID NO: 475781 - RNA, 21 nt, Human
caugcuauucucuucccucca

SEQ ID NO: 475782 - RNA, 20 nt, Human
caugggccagccuacccccc

SEQ ID NO: 475783 - RNA, 18 nt, Human
cauguugcccaggcugga

SEQ ID NO: 475784 - RNA, 23 nt, Human
cauguugcccaggcuggaaugaa

SEQ ID NO: 475785 - RNA, 23 nt, Human
ccaaacaccugucauucuaagaa

SEQ ID NO: 475786 - RNA, 20 nt, Human
ccaaagugcugggauuacag

SEQ ID NO: 475787 - RNA, 24 nt, Human
ccaaagugcugggauuacagccgu

SEQ ID NO: 475788 - RNA, 20 nt, Human
ccacugcacccaaccgauuu

SEQ ID NO: 475789 - RNA, 22 nt, Human
cccacccauccaaacaccuguc

SEQ ID NO: 475790 - RNA, 20 nt, Human
cccccacccauccaaacacc

SEQ ID NO: 475791 - RNA, 20 nt, Human
cccccacccauccaaacacc

SEQ ID NO: 475792 - RNA, 21 nt, Human
cccccacccauccaaacaccu

SEQ ID NO: 475793 - RNA, 19 nt, Human
cccgcaagcgcucucuacc

SEQ ID NO: 475794 - RNA, 24 nt, Human
ccgaauagcugggauuacaggcau

SEQ ID NO: 475795 - RNA, 18 nt, Human
ccgcaaccuccgccuccu

SEQ ID NO: 475796 - RNA, 23 nt, Human
ccgcaaccuccgccuccuggguu

SEQ ID NO: 475797 - RNA, 24 nt, Human
ccgcaaccuccgccuccuggguuc

SEQ ID NO: 475798 - RNA, 19 nt, Human
ccgcagcagcuccgcccgc

SEQ ID NO: 475799 - RNA, 24 nt, Human
ccgccuccuggguucaagugauuc

SEQ ID NO: 475800 - RNA, 22 nt, Human
ccuccgccuccuggguucaagu

SEQ ID NO: 475801 - RNA, 24 nt, Human
ccuccuggguucaagugauucucc

SEQ ID NO: 475802 - RNA, 19 nt, Human
ccuggggggcugaggugaa

SEQ ID NO: 475803 - RNA, 23 nt, Human
ccuggguucaagugauucuccuc

SEQ ID NO: 475804 - RNA, 23 nt, Human
ccuggguucaagugauucuccug

SEQ ID NO: 475805 - RNA, 22 nt, Human
cgaacugcaccccuucccacag

SEQ ID NO: 475806 - RNA, 22 nt, Human
cgacgucagccccgccccccuc

SEQ ID NO: 475807 - RNA, 23 nt, Human
cggcucggguccugauccgcagc

SEQ ID NO: 475808 - RNA, 23 nt, Human
cggguccugauccgcagcagcuc

SEQ ID NO: 475809 - RNA, 20 nt, Human
cgugugccacugcacccaac

SEQ ID NO: 475810 - RNA, 24 nt, Human
cucagccuuccgaauagcugggau

SEQ ID NO: 475811 - RNA, 21 nt, Human
cucauguugcccaggcuggaa

SEQ ID NO: 475812 - RNA, 24 nt, Human
cucauguugcccaggcuggaauga

SEQ ID NO: 475813 - RNA, 20 nt, Human
cuccuggguucaagugauuc

SEQ ID NO: 475814 - RNA, 21 nt, Human
cuccuggguucaagugauucu

SEQ ID NO: 475815 - RNA, 18 nt, Human
cugcaccccuucccacag

SEQ ID NO: 475816 - RNA, 20 nt, Human
cugcaccccuucccacagca

SEQ ID NO: 475817 - RNA, 23 nt, Human
cugccucagccuuccgaauagcu

SEQ ID NO: 475818 - RNA, 18 nt, Human
cugccucagugucucggc

SEQ ID NO: 475819 - RNA, 20 nt, Human
cugggauccuccacgucaca

SEQ ID NO: 475820 - RNA, 20 nt, Human
cuuggcuccugccugggggg

SEQ ID NO: 475821 - RNA, 24 nt, Human
gaauagcugggauuacaggcaugc

SEQ ID NO: 475822 - RNA, 18 nt, Human
gaaugaaauggugcaauc

SEQ ID NO: 475823 - RNA, 23 nt, Human
gaccucaggugaucugccaaccu

SEQ ID NO: 475824 - RNA, 18 nt, Human
gacucgccuccucaagug

SEQ ID NO: 475825 - RNA, 24 nt, Human
gacuggucuugaacuccugaccuc

SEQ ID NO: 475826 - RNA, 23 nt, Human
gauuacagccgugugccacugca

SEQ ID NO: 475827 - RNA, 22 nt, Human
gauuacaggcaugcaccaccau

SEQ ID NO: 475828 - RNA, 19 nt, Human
gccagccuaccccccauca

SEQ ID NO: 475829 - RNA, 19 nt, Human
gcccaggcuggaaugaaau

SEQ ID NO: 475830 - RNA, 19 nt, Human
gccucagugucucggccag

SEQ ID NO: 475831 - RNA, 19 nt, Human
gcuagacucgccuccucaa

SEQ ID NO: 475832 - RNA, 20 nt, Human
gcuauguuggccagacuggu

SEQ ID NO: 475833 - RNA, 24 nt, Human
ggauuacaggcaugcaccaccaug

SEQ ID NO: 475834 - RNA, 18 nt, Human
gggaagugggaucaugcu

SEQ ID NO: 475835 - RNA, 19 nt, Human
ggucuugaacuccugaccu

SEQ ID NO: 475836 - RNA, 23 nt, Human
guagagacaggguuuugcuaugu

SEQ ID NO: 475837 - RNA, 23 nt, Human
gucaagguuaucaucuuugcaga

SEQ ID NO: 475838 - RNA, 20 nt, Human
gucccugcagaaaauaagcc

SEQ ID NO: 475839 - RNA, 24 nt, Human
gugauucuccugccucagccuucc

SEQ ID NO: 475840 - RNA, 19 nt, Human
gugugccacugcacccaac

SEQ ID NO: 475841 - RNA, 24 nt, Human
uaauuuuuguauuuuuaguagaga

SEQ ID NO: 475842 - RNA, 22 nt, Human
uacagccgugugccacugcacc

SEQ ID NO: 475843 - RNA, 24 nt, Human
uacaggcaugcaccaccaugccca

SEQ ID NO: 475844 - RNA, 22 nt, Human
uagagacaggguuuugcuaugu

SEQ ID NO: 475845 - RNA, 24 nt, Human
uaguagagacaggguuuugcuaug

SEQ ID NO: 475846 - RNA, 24 nt, Human
uauguuggccagacuggucuugaa

SEQ ID NO: 475847 - RNA, 19 nt, Human
ucaagugauucuccugccu

SEQ ID NO: 475848 - RNA, 24 nt, Human
ucaccgcaaccuccgccuccuggg

SEQ ID NO: 475849 - RNA, 25 nt, Human
ucaccgcaaccuccgccuccugggu

SEQ ID NO: 475850 - RNA, 26 nt, Human
ucaccgcaaccuccgccuccuggguu

SEQ ID NO: 475851 - RNA, 22 nt, Human
ucacucauguugcccaggcugg

SEQ ID NO: 475852 - RNA, 23 nt, Human
ucacucauguugcccaggcugga

SEQ ID NO: 475853 - RNA, 23 nt, Human
ucaugcuggaacagucugaccau

SEQ ID NO: 475854 - RNA, 22 nt, Human
ucccaaagugcugggauuacag

SEQ ID NO: 475855 - RNA, 23 nt, Human
uccgaauagcugggauuacaggc

SEQ ID NO: 475856 - RNA, 24 nt, Human
uccgaauagcugggauuacaggca

SEQ ID NO: 475857 - RNA, 23 nt, Human
uccuccacgucacaggcaggggu

SEQ ID NO: 475858 - RNA, 21 nt, Human
uccuggguucaagugauucuc

SEQ ID NO: 475859 - RNA, 24 nt, Human
uccuggguucaagugauucuccug

SEQ ID NO: 475860 - RNA, 26 nt, Human
ucuccugccucagccuuccgaauagc

SEQ ID NO: 475861 - RNA, 23 nt, Human
ucuugaacuccugaccucaggug

SEQ ID NO: 475862 - RNA, 20 nt, Human
ugaaauggugcaaucucagc

SEQ ID NO: 475863 - RNA, 23 nt, Human
ugaaauggugcaaucucagcuca

SEQ ID NO: 475864 - RNA, 20 nt, Human
ugacaggcagugucguucuu

SEQ ID NO: 475865 - RNA, 18 nt, Human
ugaccucaggugaucugc

SEQ ID NO: 475866 - RNA, 24 nt, Human
ugaccucaggugaucugccaaccu

SEQ ID NO: 475867 - RNA, 20 nt, Human
ugauucuccugccucagccu

SEQ ID NO: 475868 - RNA, 21 nt, Human
ugcccaggcuggaaugaaaug

SEQ ID NO: 475869 - RNA, 24 nt, Human
ugccucagccuuccgaauagcugg

SEQ ID NO: 475870 - RNA, 24 nt, Human
ugcuauguuggccagacuggucuu

SEQ ID NO: 475871 - RNA, 24 nt, Human
uggccagacuggucuugaacuccu

SEQ ID NO: 475872 - RNA, 22 nt, Human
ugggauuacagccgugugccac

SEQ ID NO: 475873 - RNA, 24 nt, Human
ugggauuacagccgugugccacug

SEQ ID NO: 475874 - RNA, 21 nt, Human
ugggauuacaggcaugcacca

SEQ ID NO: 475875 - RNA, 24 nt, Human
ugggauuacaggcaugcaccacca

SEQ ID NO: 475876 - RNA, 19 nt, Human
uggggggcugaggugaaug

SEQ ID NO: 475877 - RNA, 18 nt, Human
ugggucgggaucgggaau

SEQ ID NO: 475878 - RNA, 23 nt, Human
uggguucaagugauucuccugcc

SEQ ID NO: 475879 - RNA, 24 nt, Human
uggguucaagugauucuccugccu

SEQ ID NO: 475880 - RNA, 24 nt, Human
uggugcaaucucagcucaccgcaa

SEQ ID NO: 475881 - RNA, 18 nt, Human
uuaguagagacaggguuu

SEQ ID NO: 475882 - RNA, 24 nt, Human
uuaguagagacaggguuuugcuau

SEQ ID NO: 475883 - RNA, 21 nt, Human
uucaagugauucuccugccuc

SEQ ID NO: 475884 - RNA, 23 nt, Human
uucaagugauucuccugccucag

SEQ ID NO: 475885 - RNA, 24 nt, Human
uucaagugauucuccugccucagc

SEQ ID NO: 475886 - RNA, 24 nt, Human
uucacucauguugcccaggcugga

SEQ ID NO: 475887 - RNA, 21 nt, Human
uucccagcgcgacgucagccc

SEQ ID NO: 475888 - RNA, 23 nt, Human
uuccgaauagcugggauuacagg

SEQ ID NO: 475889 - RNA, 19 nt, Human
uuuaguagucaagguuauc

SEQ ID NO: 475890 - RNA, 23 nt, Human
uuucacucauguugcccaggcug

SEQ ID NO: 475891 - RNA, 23 nt, Human
uuuugcuauguuggccagacugg

SEQ ID NO: 475892 - RNA, 21 nt, Human
uuuuuaguagagacaggguuu

SEQ ID NO: 475893 - RNA, 21 nt, Human
uuuuuaguagagacaggguuu

SEQ ID NO: 475894 - RNA, 20 nt, Human
uuuuuguauuuuuaguagag

SEQ ID NO: 475895 - RNA, 20 nt, Human
aacaguacccacugagugau

SEQ ID NO: 475896 - RNA, 25 nt, Human
acccuaagacccucucugggugcuc

SEQ ID NO: 475897 - RNA, 21 nt, Human
acgcagaaauacugcgcgauc

SEQ ID NO: 475898 - RNA, 27 nt, Human
agaaaccaucugggcuugacaaagucu

SEQ ID NO: 475899 - RNA, 18 nt, Human
agccauggucacaacagu

SEQ ID NO: 475900 - RNA, 24 nt, Human
caaaauggugcuuguaaugaccca

SEQ ID NO: 475901 - RNA, 19 nt, Human
cacagccauggucacaaca

SEQ ID NO: 475902 - RNA, 27 nt, Human
caccggugccacgcagaaauacugcgc

SEQ ID NO: 475903 - RNA, 23 nt, Human
cagaguggaauucagcacccgcc

SEQ ID NO: 475904 - RNA, 20 nt, Human
cagcacccgccacagcagcc

SEQ ID NO: 475905 - RNA, 18 nt, Human
cagcagccagccaugggg

SEQ ID NO: 475906 - RNA, 22 nt, Human
cagcagccagccauggggugcc

SEQ ID NO: 475907 - RNA, 22 nt, Human
caggaagaaaggaaucauauuc

SEQ ID NO: 475908 - RNA, 23 nt, Human
caggucagaaguggugggaagca

SEQ ID NO: 475909 - RNA, 23 nt, Human
ccauggucacaacaguacccacu

SEQ ID NO: 475910 - RNA, 21 nt, Human
cccaguggauaccuuuagaca

SEQ ID NO: 475911 - RNA, 22 nt, Human
cccgccacagcagccagccaug

SEQ ID NO: 475912 - RNA, 21 nt, Human
cccuaagacccucucuggggg

SEQ ID NO: 475913 - RNA, 22 nt, Human
cuaaaugaacaggccacagguc

SEQ ID NO: 475914 - RNA, 23 nt, Human
cucagaggcuccaucugcauucc

SEQ ID NO: 475915 - RNA, 20 nt, Human
cuccccucuccacauagaag

SEQ ID NO: 475916 - RNA, 19 nt, Human
cucuccacauagaaguggg

SEQ ID NO: 475917 - RNA, 23 nt, Human
cucucugggugcuccccucucca

SEQ ID NO: 475918 - RNA, 21 nt, Human
cugcauuccggggcaggggcu

SEQ ID NO: 475919 - RNA, 19 nt, Human
cuggcagcuagcgccucuc

SEQ ID NO: 475920 - RNA, 18 nt, Human
cugugagucucagaggcu

SEQ ID NO: 475921 - RNA, 27 nt, Human
cuuuacagccgcauccgcaccggugcc

SEQ ID NO: 475922 - RNA, 26 nt, Human
gaacaaauaagcuuaucccucugaaa

SEQ ID NO: 475923 - RNA, 22 nt, Human
gccacagcagccagccaugggg

SEQ ID NO: 475924 - RNA, 23 nt, Human
gggaagcaggcccaguggauacc

SEQ ID NO: 475925 - RNA, 20 nt, Human
gggcugcuggagcuggcagc

SEQ ID NO: 475926 - RNA, 22 nt, Human
guaaauccuaaaacaggaagaa

SEQ ID NO: 475927 - RNA, 26 nt, Human
guggcagggaagucuccucgggaggg

SEQ ID NO: 475928 - RNA, 18 nt, Human
uaacacagccauggucac

SEQ ID NO: 475929 - RNA, 20 nt, Human
uaacagaguggaauucagca

SEQ ID NO: 475930 - RNA, 19 nt, Human
uaaguaaauccuaaaacag

SEQ ID NO: 475931 - RNA, 24 nt, Human
uacagccgcauccgcaccggugcc

SEQ ID NO: 475932 - RNA, 19 nt, Human
uagaagugggcucccggag

SEQ ID NO: 475933 - RNA, 22 nt, Human
uagaagugggcucccggaggcg

SEQ ID NO: 475934 - RNA, 24 nt, Human
ucucagaggcuccaucugcauucc

SEQ ID NO: 475935 - RNA, 28 nt, Human
ucugggcugcuggagcuggggccgaacc

SEQ ID NO: 475936 - RNA, 20 nt, Human
ugaggauggcccugccuggc

SEQ ID NO: 475937 - RNA, 20 nt, Human
ugcugaguaugccuuggggu

SEQ ID NO: 475938 - RNA, 21 nt, Human
ugcuuuacagccgcauccgca

SEQ ID NO: 475939 - RNA, 19 nt, Human
uggcagaggaguggacucc

SEQ ID NO: 475940 - RNA, 20 nt, Human
uggcagaggaguggacucca

SEQ ID NO: 475941 - RNA, 22 nt, Human
uggcagaggaguggacuccagu

SEQ ID NO: 475942 - RNA, 24 nt, Human
uggcagaggaguggacuccagugg

SEQ ID NO: 475943 - RNA, 23 nt, Human
uggcagcuagcgccucucgcucc

SEQ ID NO: 475944 - RNA, 18 nt, Human
uggcagggaagucuccuc

SEQ ID NO: 475945 - RNA, 18 nt, Human
uggccaguuaaucauugu

SEQ ID NO: 475946 - RNA, 21 nt, Human
uggccugaggauggcccugcc

SEQ ID NO: 475947 - RNA, 23 nt, Human
uggccugaggauggcccugccug

SEQ ID NO: 475948 - RNA, 20 nt, Human
ugggcuggccugaggauggc

SEQ ID NO: 475949 - RNA, 23 nt, Human
ugguaggaugggcuggccugagg

SEQ ID NO: 475950 - RNA, 26 nt, Human
ugguaggaugggcuggccugaggaug

SEQ ID NO: 475951 - RNA, 18 nt, Human
ugugguugaauacuugcc

SEQ ID NO: 475952 - RNA, 24 nt, Human
ugugguugaauacuugccuaaggc

SEQ ID NO: 475953 - RNA, 20 nt, Human
uuccugaauucagaaaacua

SEQ ID NO: 475954 - RNA, 29 nt, Human
uuccugaauucagaaaacuaaaugaacaa

SEQ ID NO: 475955 - RNA, 22 nt, Human
uugggcuacccugcccgucucu

SEQ ID NO: 475956 - RNA, 22 nt, Human
aaacugguuuuuauucuaaaca

SEQ ID NO: 475957 - RNA, 19 nt, Human
aagggccugccugugcccc

SEQ ID NO: 475958 - RNA, 22 nt, Human
aagggccugccugugccccacu

SEQ ID NO: 475959 - RNA, 20 nt, Human
aauggaaagacaaggacgga

SEQ ID NO: 475960 - RNA, 21 nt, Human
accccgaaaggccggucgggg

SEQ ID NO: 475961 - RNA, 22 nt, Human
acggagauucuuccgguggcgg

SEQ ID NO: 475962 - RNA, 22 nt, Human
agaacccugaauccauuccgcc

SEQ ID NO: 475963 - RNA, 21 nt, Human
agagcgcgcccggcaaccccg

SEQ ID NO: 475964 - RNA, 18 nt, Human
aggacggucaaggguggu

SEQ ID NO: 475965 - RNA, 24 nt, Human
caaccccgaaaggccggucgggga

SEQ ID NO: 475966 - RNA, 22 nt, Human
cacccaagggccugccugugcc

SEQ ID NO: 475967 - RNA, 21 nt, Human
cagaauggaaagacaaggacg

SEQ ID NO: 475968 - RNA, 19 nt, Human
cagagcgcgcccggcaacc

SEQ ID NO: 475969 - RNA, 18 nt, Human
cagaggugccccugcucc

SEQ ID NO: 475970 - RNA, 21 nt, Human
caugcuggggggccucuccug

SEQ ID NO: 475971 - RNA, 21 nt, Human
ccagcccuuagcacccaaggg

SEQ ID NO: 475972 - RNA, 19 nt, Human
ccccacuguggcccucuuu

SEQ ID NO: 475973 - RNA, 23 nt, Human
ccccgaaaggccggucggggacc

SEQ ID NO: 475974 - RNA, 19 nt, Human
ccccggcugggagucagga

SEQ ID NO: 475975 - RNA, 22 nt, Human
ccccugcuccccacuguggccc

SEQ ID NO: 475976 - RNA, 19 nt, Human
ccccuuugcagagcgcgcc

SEQ ID NO: 475977 - RNA, 21 nt, Human
ccccuuugcagagcgcgcccg

SEQ ID NO: 475978 - RNA, 25 nt, Human
cccgagaacccugaauccauuccgc

SEQ ID NO: 475979 - RNA, 26 nt, Human
cccugcuccccacuguggcccucuuu

SEQ ID NO: 475980 - RNA, 19 nt, Human
ccugccgaccggcuggcgc

SEQ ID NO: 475981 - RNA, 22 nt, Human
cggauagaguagggggucccag

SEQ ID NO: 475982 - RNA, 22 nt, Human
cggggaccccggcugggaguca

SEQ ID NO: 475983 - RNA, 23 nt, Human
cggggaccccggcugggagucag

SEQ ID NO: 475984 - RNA, 24 nt, Human
cgugaccccugccgaccggcuggc

SEQ ID NO: 475985 - RNA, 23 nt, Human
cuccagaggugccccugcucccc

SEQ ID NO: 475986 - RNA, 22 nt, Human
cucccgggcgcgacccgagaac

SEQ ID NO: 475987 - RNA, 24 nt, Human
cuccugccuccagaggugccccug

SEQ ID NO: 475988 - RNA, 21 nt, Human
cuggggggccucuccugccuc

SEQ ID NO: 475989 - RNA, 22 nt, Human
gcagagcgcgcccggcaacccc

SEQ ID NO: 475990 - RNA, 26 nt, Human
gccggucggggaccccggcugggagu

SEQ ID NO: 475991 - RNA, 20 nt, Human
gcuggggggccucuccugcc

SEQ ID NO: 475992 - RNA, 20 nt, Human
ggaucugucugguucgaacu

SEQ ID NO: 475993 - RNA, 19 nt, Human
uacccacaugcagcccagc

SEQ ID NO: 475994 - RNA, 19 nt, Human
uagcucccgggcgcgaccc

SEQ ID NO: 475995 - RNA, 19 nt, Human
uccgcgcacacccggccgc

SEQ ID NO: 475996 - RNA, 23 nt, Human
uccuggggcugugugcuuacugg

SEQ ID NO: 475997 - RNA, 23 nt, Human
ucggggaccccggcugggaguca

SEQ ID NO: 475998 - RNA, 18 nt, Human
ucuaaacacguacuaggg

SEQ ID NO: 475999 - RNA, 18 nt, Human
ugccccugcuccccacug

SEQ ID NO: 476000 - RNA, 24 nt, Human
ugccccugcuccccacuguggccc

SEQ ID NO: 476001 - RNA, 19 nt, Human
uugguugaggacggucaag

SEQ ID NO: 476002 - RNA, 22 nt, Human
uugguugaggacggucaagggu

SEQ ID NO: 476003 - RNA, 20 nt, Human
aaaacagaagcagaaacaca

SEQ ID NO: 476004 - RNA, 21 nt, Human
aaacagaagcagaaacacaca

SEQ ID NO: 476005 - RNA, 21 nt, Human
aaacagaagcagaaacaggga

SEQ ID NO: 476006 - RNA, 20 nt, Human
aaaugcacacagggcugaac

SEQ ID NO: 476007 - RNA, 28 nt, Human
aagccagucccaaggccccuggagccaa

SEQ ID NO: 476008 - RNA, 18 nt, Human
aaggaaccaguccacagc

SEQ ID NO: 476009 - RNA, 23 nt, Human
aaggaggcggcaggaggaggagg

SEQ ID NO: 476010 - RNA, 23 nt, Human
aaggccccuggagccaaggacac

SEQ ID NO: 476011 - RNA, 24 nt, Human
acagcauuuugugcuaauuuccau

SEQ ID NO: 476012 - RNA, 19 nt, Human
acagcugugaggggaccuc

SEQ ID NO: 476013 - RNA, 24 nt, Human
acauggcccgacagccuggguggg

SEQ ID NO: 476014 - RNA, 20 nt, Human
acccggcccuccccuagcgg

SEQ ID NO: 476015 - RNA, 19 nt, Human
acccggggcccuccccugg

SEQ ID NO: 476016 - RNA, 27 nt, Human
accgguccaugauggaaccagucacac

SEQ ID NO: 476017 - RNA, 18 nt, Human
agacagcacaccccgaac

SEQ ID NO: 476018 - RNA, 20 nt, Human
agaccuggacaaggacagca

SEQ ID NO: 476019 - RNA, 18 nt, Human
agacuuaaggcccgcggc

SEQ ID NO: 476020 - RNA, 19 nt, Human
agcaggacuccaaagaggg

SEQ ID NO: 476021 - RNA, 21 nt, Human
agccccaaggaaccaguccac

SEQ ID NO: 476022 - RNA, 21 nt, Human
agcgcaccacauccagacagc

SEQ ID NO: 476023 - RNA, 20 nt, Human
agcggcccuuuccugugccc

SEQ ID NO: 476024 - RNA, 23 nt, Human
aggggccuaccaccagccaggca

SEQ ID NO: 476025 - RNA, 24 nt, Human
aucuagaaaaggaggcggcaggag

SEQ ID NO: 476026 - RNA, 18 nt, Human
augccuguaugucccaca

SEQ ID NO: 476027 - RNA, 21 nt, Human
caagucccaggaagucuccaa

SEQ ID NO: 476028 - RNA, 21 nt, Human
caagucccaggaagucuccaa

SEQ ID NO: 476029 - RNA, 25 nt, Human
cacacacaucacuuaugccuguaug

SEQ ID NO: 476030 - RNA, 23 nt, Human
caccacauccagacagcacaccc

SEQ ID NO: 476031 - RNA, 20 nt, Human
caccagugggucgcugagga

SEQ ID NO: 476032 - RNA, 22 nt, Human
cacccagacagcaggacuccaa

SEQ ID NO: 476033 - RNA, 23 nt, Human
cacggcugcuccugagggacaga

SEQ ID NO: 476034 - RNA, 19 nt, Human
cacucggcgggcucacggc

SEQ ID NO: 476035 - RNA, 20 nt, Human
cacugaucuuuauuccgugu

SEQ ID NO: 476036 - RNA, 21 nt, Human
cagcagcagugaaauacagcu

SEQ ID NO: 476037 - RNA, 21 nt, Human
cagcccaacauggcccgacag

SEQ ID NO: 476038 - RNA, 21 nt, Human
cagcccgggaccagcucacag

SEQ ID NO: 476039 - RNA, 24 nt, Human
cagucacaccuccccuacaccugg

SEQ ID NO: 476040 - RNA, 23 nt, Human
caucaaccaccucgagaagcagg

SEQ ID NO: 476041 - RNA, 23 nt, Human
caugauggaaccagucacaccuc

SEQ ID NO: 476042 - RNA, 20 nt, Human
caugcagccugugacacacc

SEQ ID NO: 476043 - RNA, 18 nt, Human
cauggcccgacagccugg

SEQ ID NO: 476044 - RNA, 24 nt, Human
ccaacaccucucacauucagucuu

SEQ ID NO: 476045 - RNA, 26 nt, Human
ccacccgggacagugaggccagcugc

SEQ ID NO: 476046 - RNA, 23 nt, Human
ccagacagcacaccccgaacauu

SEQ ID NO: 476047 - RNA, 26 nt, Human
ccagacagcacaccccgaacauucca

SEQ ID NO: 476048 - RNA, 19 nt, Human
ccagcagcagugaaauaca

SEQ ID NO: 476049 - RNA, 28 nt, Human
ccagucccaaggccccuggagccaagga

SEQ ID NO: 476050 - RNA, 21 nt, Human
cccacagucucuggcaguguc

SEQ ID NO: 476051 - RNA, 22 nt, Human
cccagacagcaggacuccaaag

SEQ ID NO: 476052 - RNA, 22 nt, Human
ccccugaccugccucuggccgc

SEQ ID NO: 476053 - RNA, 23 nt, Human
cccgcauuccaggggucaugcag

SEQ ID NO: 476054 - RNA, 22 nt, Human
cccgcggcccagacaccccgag

SEQ ID NO: 476055 - RNA, 23 nt, Human
cccggcccuccccuagcggcccu

SEQ ID NO: 476056 - RNA, 19 nt, Human
cccucagacccgcggccca

SEQ ID NO: 476057 - RNA, 18 nt, Human
ccgggacagugaggccag

SEQ ID NO: 476058 - RNA, 24 nt, Human
ccuagcggcccuuuccugugcccc

SEQ ID NO: 476059 - RNA, 23 nt, Human
ccucuggccgccgaacccggggc

SEQ ID NO: 476060 - RNA, 24 nt, Human
ccucuggccgccgaacccggggcc

SEQ ID NO: 476061 - RNA, 18 nt, Human
ccugcccgcauuccaggg

SEQ ID NO: 476062 - RNA, 19 nt, Human
ccugcguggcggggccacu

SEQ ID NO: 476063 - RNA, 20 nt, Human
ccugugccccggguggcccc

SEQ ID NO: 476064 - RNA, 22 nt, Human
ccuuccgcacuuagagccccaa

SEQ ID NO: 476065 - RNA, 19 nt, Human
cgacccccugcccgucugc

SEQ ID NO: 476066 - RNA, 23 nt, Human
cgaggcagucauuuggcaaggac

SEQ ID NO: 476067 - RNA, 23 nt, Human
cgauggcgaggccucccucugcu

SEQ ID NO: 476068 - RNA, 18 nt, Human
cgcagccuucuggccaca

SEQ ID NO: 476069 - RNA, 19 nt, Human
cggcaugaucugagcugga

SEQ ID NO: 476070 - RNA, 19 nt, Human
cggccuccuaggcugcccc

SEQ ID NO: 476071 - RNA, 22 nt, Human
cggcuuggacuccagccuucag

SEQ ID NO: 476072 - RNA, 28 nt, Human
cguuuacauacaugaggaaaugcacaca

SEQ ID NO: 476073 - RNA, 22 nt, Human
cucccgggacuccagagccuag

SEQ ID NO: 476074 - RNA, 21 nt, Human
cugggcccuuccgcacuuaga

SEQ ID NO: 476075 - RNA, 22 nt, Human
cugucccugucuuugucagccc

SEQ ID NO: 476076 - RNA, 24 nt, Human
cuuagagccccaaggaaccagucc

SEQ ID NO: 476077 - RNA, 20 nt, Human
cuuggcccuggaccucaggg

SEQ ID NO: 476078 - RNA, 23 nt, Human
cuugugacggaauccccucccca

SEQ ID NO: 476079 - RNA, 21 nt, Human
cuuuccugugccccggguggc

SEQ ID NO: 476080 - RNA, 24 nt, Human
gaaccaguccacagcgggaaccag

SEQ ID NO: 476081 - RNA, 23 nt, Human
gaaccaguccacggcagaaccgg

SEQ ID NO: 476082 - RNA, 22 nt, Human
gaaccaguccagggcagaacca

SEQ ID NO: 476083 - RNA, 23 nt, Human
gaaccaguccagggcagaaccag

SEQ ID NO: 476084 - RNA, 23 nt, Human
gaaccgguccacggaggaaccgg

SEQ ID NO: 476085 - RNA, 23 nt, Human
gaaccgguccaugauggaaccag

SEQ ID NO: 476086 - RNA, 23 nt, Human
gaaccgguccauggaggaaccgg

SEQ ID NO: 476087 - RNA, 23 nt, Human
gaaccgguccauggcggaaccgg

SEQ ID NO: 476088 - RNA, 21 nt, Human
gacaaggacagcaagucccag

SEQ ID NO: 476089 - RNA, 19 nt, Human
gaccccgggucagcgcaac

SEQ ID NO: 476090 - RNA, 19 nt, Human
gacuguggcuguggcccug

SEQ ID NO: 476091 - RNA, 22 nt, Human
gagaagagcacugugguucagg

SEQ ID NO: 476092 - RNA, 21 nt, Human
gaggaacccuugacccugggg

SEQ ID NO: 476093 - RNA, 19 nt, Human
gaggaaccgguccauggag

SEQ ID NO: 476094 - RNA, 22 nt, Human
gccaacaccucucacauucagu

SEQ ID NO: 476095 - RNA, 19 nt, Human
gccccggacuaggggcagc

SEQ ID NO: 476096 - RNA, 23 nt, Human
gccccuccucaucccucagaccc

SEQ ID NO: 476097 - RNA, 18 nt, Human
gcccuggaccucagggag

SEQ ID NO: 476098 - RNA, 20 nt, Human
gccggcgccuaccugcgugg

SEQ ID NO: 476099 - RNA, 23 nt, Human
gcgcaccacauccagacagcaca

SEQ ID NO: 476100 - RNA, 21 nt, Human
gcucuggcugaggccggcgcc

SEQ ID NO: 476101 - RNA, 22 nt, Human
gcuuggacuccagccuucagcu

SEQ ID NO: 476102 - RNA, 21 nt, Human
ggacagugaggccagcugcgg

SEQ ID NO: 476103 - RNA, 18 nt, Human
ggaggaaccgguccaugg

SEQ ID NO: 476104 - RNA, 20 nt, Human
ggcaggagugguccagggca

SEQ ID NO: 476105 - RNA, 22 nt, Human
ggcuuggacuccagccuucagc

SEQ ID NO: 476106 - RNA, 18 nt, Human
gggcaggagugguccagg

SEQ ID NO: 476107 - RNA, 20 nt, Human
gggcaggagugguccagggc

SEQ ID NO: 476108 - RNA, 20 nt, Human
gggcaggagugguccauggc

SEQ ID NO: 476109 - RNA, 20 nt, Human
gggcaggagugguccauggc

SEQ ID NO: 476110 - RNA, 19 nt, Human
gggcucagggaucagacag

SEQ ID NO: 476111 - RNA, 23 nt, Human
gguggggccaccucacaaggccc

SEQ ID NO: 476112 - RNA, 19 nt, Human
gucacaccuccccuacacc

SEQ ID NO: 476113 - RNA, 20 nt, Human
guccacggcagaaccggucc

SEQ ID NO: 476114 - RNA, 19 nt, Human
gucucuggcaguguccuag

SEQ ID NO: 476115 - RNA, 26 nt, Human
uacaccuggcagaccuggacaaggac

SEQ ID NO: 476116 - RNA, 18 nt, Human
uaccucguuccggcccug

SEQ ID NO: 476117 - RNA, 19 nt, Human
uagagccccaaggaaccag

SEQ ID NO: 476118 - RNA, 22 nt, Human
uagcagcccgggaccagcucac

SEQ ID NO: 476119 - RNA, 21 nt, Human
uagcggcccuuuccugugccc

SEQ ID NO: 476120 - RNA, 21 nt, Human
uaucucagaaaacaaaggcug

SEQ ID NO: 476121 - RNA, 18 nt, Human
uccaaaagcucauuccgc

SEQ ID NO: 476122 - RNA, 22 nt, Human
uccaaaagcucauuccgcuucc

SEQ ID NO: 476123 - RNA, 25 nt, Human
uccacagcgggaaccaguccagggc

SEQ ID NO: 476124 - RNA, 24 nt, Human
uccacggcagaaccgguccagggc

SEQ ID NO: 476125 - RNA, 23 nt, Human
uccagagccuagagccgagaagc

SEQ ID NO: 476126 - RNA, 18 nt, Human
uccagggcaggagugguc

SEQ ID NO: 476127 - RNA, 22 nt, Human
uccagggcaggagugguccaug

SEQ ID NO: 476128 - RNA, 20 nt, Human
uccaggggcucuggcugagg

SEQ ID NO: 476129 - RNA, 23 nt, Human
ucccagccacguuuaaaccaagc

SEQ ID NO: 476130 - RNA, 20 nt, Human
uccccuggaggguggggcca

SEQ ID NO: 476131 - RNA, 18 nt, Human
uccccuggcucucuuugg

SEQ ID NO: 476132 - RNA, 18 nt, Human
ucccucugcucccagccu

SEQ ID NO: 476133 - RNA, 22 nt, Human
ucccugucuuugucagcccuag

SEQ ID NO: 476134 - RNA, 19 nt, Human
uccgcuuccaggcugcggu

SEQ ID NO: 476135 - RNA, 21 nt, Human
uccggcccuggcacccagaca

SEQ ID NO: 476136 - RNA, 20 nt, Human
uccugugccccggguggccc

SEQ ID NO: 476137 - RNA, 22 nt, Human
ucucuggcaguguccuagggcc

SEQ ID NO: 476138 - RNA, 20 nt, Human
ucuggcaguguccuagggcc

SEQ ID NO: 476139 - RNA, 19 nt, Human
ugacccugggguggggaca

SEQ ID NO: 476140 - RNA, 21 nt, Human
ugacggaauccccuccccaau

SEQ ID NO: 476141 - RNA, 18 nt, Human
ugaggaaaugcacacagg

SEQ ID NO: 476142 - RNA, 20 nt, Human
ugccccggacuaggggcagc

SEQ ID NO: 476143 - RNA, 21 nt, Human
ugccuguaugucccacagucu

SEQ ID NO: 476144 - RNA, 21 nt, Human
uggcccgacagccuggguggg

SEQ ID NO: 476145 - RNA, 20 nt, Human
uggcgaggccucccucugcu

SEQ ID NO: 476146 - RNA, 19 nt, Human
ugggaagccagucccaagg

SEQ ID NO: 476147 - RNA, 18 nt, Human
ugggagaggacacggcug

SEQ ID NO: 476148 - RNA, 20 nt, Human
ugggagcaucugacguuugc

SEQ ID NO: 476149 - RNA, 22 nt, Human
uggggcuuccugcacacggccg

SEQ ID NO: 476150 - RNA, 18 nt, Human
ugggguggggacacggaa

SEQ ID NO: 476151 - RNA, 23 nt, Human
ugggguggggacacggaaggcag

SEQ ID NO: 476152 - RNA, 18 nt, Human
uguaugucccacagucuc

SEQ ID NO: 476153 - RNA, 23 nt, Human
uguguccgcagccuucuggccac

SEQ ID NO: 476154 - RNA, 23 nt, Human
uguuuuuagcgcaccacauccag

SEQ ID NO: 476155 - RNA, 20 nt, Human
uucaagguggaaaguaaggc

SEQ ID NO: 476156 - RNA, 20 nt, Human
uuccaggggucaugcagccu

SEQ ID NO: 476157 - RNA, 18 nt, Human
aaaagaaagaauccccag

SEQ ID NO: 476158 - RNA, 21 nt, Human
aacccagggauaaucuggguu

SEQ ID NO: 476159 - RNA, 24 nt, Human
aagaaaauuuaaaaaaaaaaagac

SEQ ID NO: 476160 - RNA, 21 nt, Human
aagcaagggcucugcccaaag

SEQ ID NO: 476161 - RNA, 19 nt, Human
aagcagauggcggggcagg

SEQ ID NO: 476162 - RNA, 22 nt, Human
aaggcccaugggcgagccuggc

SEQ ID NO: 476163 - RNA, 21 nt, Human
aagggcucugcccaaagcuau

SEQ ID NO: 476164 - RNA, 18 nt, Human
agaaagaauccccaguga

SEQ ID NO: 476165 - RNA, 22 nt, Human
agaaggcugcagccgcuggucc

SEQ ID NO: 476166 - RNA, 22 nt, Human
agacggcugggccccaacucuc

SEQ ID NO: 476167 - RNA, 18 nt, Human
agaggaggggcuuggugg

SEQ ID NO: 476168 - RNA, 19 nt, Human
agaggccugggucaggagg

SEQ ID NO: 476169 - RNA, 24 nt, Human
agagguguggagggggagaggagg

SEQ ID NO: 476170 - RNA, 20 nt, Human
agagucucgcggggaggagg

SEQ ID NO: 476171 - RNA, 18 nt, Human
agccaggaagcaagggcu

SEQ ID NO: 476172 - RNA, 20 nt, Human
agccggacucugcgggcggg

SEQ ID NO: 476173 - RNA, 23 nt, Human
agcuggccucuggccgugacaca

SEQ ID NO: 476174 - RNA, 21 nt, Human
aggaggaggaggggauggagc

SEQ ID NO: 476175 - RNA, 19 nt, Human
aggaggggauggagcgguc

SEQ ID NO: 476176 - RNA, 24 nt, Human
aggcaggcagagguguggccacga

SEQ ID NO: 476177 - RNA, 21 nt, Human
aggccugggucaggaggggag

SEQ ID NO: 476178 - RNA, 22 nt, Human
agggggagaggaggggcuuggu

SEQ ID NO: 476179 - RNA, 22 nt, Human
agguguggagggggagaggagg

SEQ ID NO: 476180 - RNA, 24 nt, Human
augccacagaggccugggucagga

SEQ ID NO: 476181 - RNA, 23 nt, Human
auggcggggcagggccagggcug

SEQ ID NO: 476182 - RNA, 24 nt, Human
auuccccccaccucccagcucccc

SEQ ID NO: 476183 - RNA, 23 nt, Human
caagauggagggggagagcugga

SEQ ID NO: 476184 - RNA, 23 nt, Human
cacagagcgcccacauccccacu

SEQ ID NO: 476185 - RNA, 20 nt, Human
cacccacaugcaggccucug

SEQ ID NO: 476186 - RNA, 26 nt, Human
cacccucccgggcagcuugggcccaa

SEQ ID NO: 476187 - RNA, 21 nt, Human
cacugagcuccccccacccuc

SEQ ID NO: 476188 - RNA, 22 nt, Human
cacugagcuccccccacccucc

SEQ ID NO: 476189 - RNA, 19 nt, Human
cacugugccagcugccucc

SEQ ID NO: 476190 - RNA, 21 nt, Human
cagagcgcccacauccccacu

SEQ ID NO: 476191 - RNA, 24 nt, Human
cagaugggguagaacaccaggccc

SEQ ID NO: 476192 - RNA, 18 nt, Human
cagcacuuuggccuggag

SEQ ID NO: 476193 - RNA, 22 nt, Human
cagcaucagccugggaaggagg

SEQ ID NO: 476194 - RNA, 19 nt, Human
cagcaugcccccagcacag

SEQ ID NO: 476195 - RNA, 19 nt, Human
cagcugaacuaagagcccc

SEQ ID NO: 476196 - RNA, 19 nt, Human
caggagcccauggcggugg

SEQ ID NO: 476197 - RNA, 23 nt, Human
cagggccagggcugguccucagc

SEQ ID NO: 476198 - RNA, 19 nt, Human
caguguccucugcccucgc

SEQ ID NO: 476199 - RNA, 18 nt, Human
caugcccccagcacagga

SEQ ID NO: 476200 - RNA, 19 nt, Human
cauuccccccaccucccag

SEQ ID NO: 476201 - RNA, 18 nt, Human
ccacagaggccuggguca

SEQ ID NO: 476202 - RNA, 20 nt, Human
ccacaugcaggccucugccu

SEQ ID NO: 476203 - RNA, 19 nt, Human
ccacugagcuccccccacc

SEQ ID NO: 476204 - RNA, 22 nt, Human
ccagcagcugaacuaagagccc

SEQ ID NO: 476205 - RNA, 23 nt, Human
cccaacucuccucacagguggca

SEQ ID NO: 476206 - RNA, 23 nt, Human
cccacaugcaggccucugccacg

SEQ ID NO: 476207 - RNA, 21 nt, Human
ccccacggaccgcugauuccc

SEQ ID NO: 476208 - RNA, 25 nt, Human
ccccacuguguggccaccccucccg

SEQ ID NO: 476209 - RNA, 18 nt, Human
ccccccaagauggagggg

SEQ ID NO: 476210 - RNA, 20 nt, Human
ccccccacccuccacgcaaa

SEQ ID NO: 476211 - RNA, 23 nt, Human
ccccccacccuccacgcaaacag

SEQ ID NO: 476212 - RNA, 23 nt, Human
ccccccaccucccagcuccccac

SEQ ID NO: 476213 - RNA, 22 nt, Human
cccguccccacgaccccacgga

SEQ ID NO: 476214 - RNA, 20 nt, Human
cccugaagcagccaggaagc

SEQ ID NO: 476215 - RNA, 19 nt, Human
cccugagcccugaagcagc

SEQ ID NO: 476216 - RNA, 20 nt, Human
cccugagcccugaagcagcc

SEQ ID NO: 476217 - RNA, 22 nt, Human
cccugccacugagcucccccca

SEQ ID NO: 476218 - RNA, 21 nt, Human
cccugccggacugccuucccc

SEQ ID NO: 476219 - RNA, 20 nt, Human
ccucccgggcagcuugggcc

SEQ ID NO: 476220 - RNA, 22 nt, Human
ccugagcccugaagcagccagg

SEQ ID NO: 476221 - RNA, 24 nt, Human
ccugccacugagcuccccccaccc

SEQ ID NO: 476222 - RNA, 23 nt, Human
ccuggcugucccccguuccucug

SEQ ID NO: 476223 - RNA, 18 nt, Human
ccugggugcggcuggucc

SEQ ID NO: 476224 - RNA, 22 nt, Human
ccugugucugcacccacccucc

SEQ ID NO: 476225 - RNA, 19 nt, Human
ccuugguaggccaggggga

SEQ ID NO: 476226 - RNA, 24 nt, Human
cgaaaaccaagggagugggaauca

SEQ ID NO: 476227 - RNA, 23 nt, Human
cgaggaaaggaaggaggccagga

SEQ ID NO: 476228 - RNA, 23 nt, Human
cgaggaaggacccaagugagccg

SEQ ID NO: 476229 - RNA, 25 nt, Human
cgccagcacuuccgccacugcagcc

SEQ ID NO: 476230 - RNA, 20 nt, Human
cggcagggucccucucccuu

SEQ ID NO: 476231 - RNA, 19 nt, Human
cgggagggagaagccccaa

SEQ ID NO: 476232 - RNA, 18 nt, Human
cggggccagcacaucccc

SEQ ID NO: 476233 - RNA, 21 nt, Human
cuagccucaggagcccauggc

SEQ ID NO: 476234 - RNA, 19 nt, Human
cucagccugugucugcacc

SEQ ID NO: 476235 - RNA, 20 nt, Human
cucauggcagucauacaaca

SEQ ID NO: 476236 - RNA, 21 nt, Human
cucauggcagucauacaacaa

SEQ ID NO: 476237 - RNA, 24 nt, Human
cuccaggugacugcagcccaaacc

SEQ ID NO: 476238 - RNA, 18 nt, Human
cucugcccucgcccgggc

SEQ ID NO: 476239 - RNA, 18 nt, Human
cugagcccugaagcagcc

SEQ ID NO: 476240 - RNA, 18 nt, Human
cugagcccugaagcagcc

SEQ ID NO: 476241 - RNA, 21 nt, Human
cugcagcccaaacccagggau

SEQ ID NO: 476242 - RNA, 18 nt, Human
cugcccucgcccgggcag

SEQ ID NO: 476243 - RNA, 20 nt, Human
cuggcagcaggaggcucccu

SEQ ID NO: 476244 - RNA, 21 nt, Human
cuguucauuccaggaaggacc

SEQ ID NO: 476245 - RNA, 24 nt, Human
cuugggcccaacugcuccgccccc

SEQ ID NO: 476246 - RNA, 21 nt, Human
gaaagaauccccagugaacac

SEQ ID NO: 476247 - RNA, 18 nt, Human
gaaggagggcugggagcc

SEQ ID NO: 476248 - RNA, 18 nt, Human
gacaugugaguguuucug

SEQ ID NO: 476249 - RNA, 23 nt, Human
gaccccacggaccgcugauuccc

SEQ ID NO: 476250 - RNA, 18 nt, Human
gagaagccccaaagagag

SEQ ID NO: 476251 - RNA, 22 nt, Human
gagccacggcuugccgaccuca

SEQ ID NO: 476252 - RNA, 18 nt, Human
gagcuccccccacccucc

SEQ ID NO: 476253 - RNA, 18 nt, Human
gagggaugcaggcgggaa

SEQ ID NO: 476254 - RNA, 21 nt, Human
gaugggguagaacaccaggcc

SEQ ID NO: 476255 - RNA, 22 nt, Human
gcaagggcucugcccaaagcua

SEQ ID NO: 476256 - RNA, 21 nt, Human
gcacccacccucccgggcagc

SEQ ID NO: 476257 - RNA, 24 nt, Human
gcacugugccagcugccuccuggc

SEQ ID NO: 476258 - RNA, 19 nt, Human
gcaguggggcugcccucgg

SEQ ID NO: 476259 - RNA, 20 nt, Human
gcauccuaaggaggaggagg

SEQ ID NO: 476260 - RNA, 22 nt, Human
gccaggaagacggcugggcccc

SEQ ID NO: 476261 - RNA, 23 nt, Human
gccuggagggagaagggaagcca

SEQ ID NO: 476262 - RNA, 24 nt, Human
gcggggaggaggggcuagaaggcu

SEQ ID NO: 476263 - RNA, 18 nt, Human
gcuccccccacccuccac

SEQ ID NO: 476264 - RNA, 21 nt, Human
gcugucccccguuccucugga

SEQ ID NO: 476265 - RNA, 21 nt, Human
ggaaagaaaauuuaaaaaaaa

SEQ ID NO: 476266 - RNA, 21 nt, Human
ggaaaggaaggaggccaggaa

SEQ ID NO: 476267 - RNA, 20 nt, Human
ggacccaagugagccggcag

SEQ ID NO: 476268 - RNA, 21 nt, Human
ggaggaggaggggauggagcg

SEQ ID NO: 476269 - RNA, 20 nt, Human
ggccugggucaggaggggag

SEQ ID NO: 476270 - RNA, 18 nt, Human
ggccugguggugaggcug

SEQ ID NO: 476271 - RNA, 20 nt, Human
ggcuagaaggcugcagccgc

SEQ ID NO: 476272 - RNA, 20 nt, Human
gggaccauuccccccaccuc

SEQ ID NO: 476273 - RNA, 18 nt, Human
gggagagcuggccucugg

SEQ ID NO: 476274 - RNA, 18 nt, Human
gggagggaugcaggcggg

SEQ ID NO: 476275 - RNA, 18 nt, Human
gggauacccaggggccca

SEQ ID NO: 476276 - RNA, 18 nt, Human
gggauggagcggucgggc

SEQ ID NO: 476277 - RNA, 27 nt, Human
gggcagcaggggcauaagccuugcucc

SEQ ID NO: 476278 - RNA, 19 nt, Human
gggcagggccagggcuggu

SEQ ID NO: 476279 - RNA, 22 nt, Human
gggcugguccucagccuguguc

SEQ ID NO: 476280 - RNA, 20 nt, Human
ggggagaggaggggcuuggu

SEQ ID NO: 476281 - RNA, 18 nt, Human
ggggauggagcggucggg

SEQ ID NO: 476282 - RNA, 22 nt, Human
ggggcccugaaugcccuuccug

SEQ ID NO: 476283 - RNA, 20 nt, Human
gggguagaacaccaggcccu

SEQ ID NO: 476284 - RNA, 25 nt, Human
ggugaaagcagauggcggggcaggg

SEQ ID NO: 476285 - RNA, 23 nt, Human
ggugaaucuagcacuggacaaag

SEQ ID NO: 476286 - RNA, 22 nt, Human
guggggcugcccucggggauca

SEQ ID NO: 476287 - RNA, 18 nt, Human
uaaaaugucacagggacc

SEQ ID NO: 476288 - RNA, 22 nt, Human
uaaaaugucacagggaccaaaa

SEQ ID NO: 476289 - RNA, 22 nt, Human
uaaaugccaggacacuuugccu

SEQ ID NO: 476290 - RNA, 20 nt, Human
uaaggaggaggaggggaugg

SEQ ID NO: 476291 - RNA, 19 nt, Human
uacaaaacuaggagacucu

SEQ ID NO: 476292 - RNA, 18 nt, Human
ucacagggaccaaaauag

SEQ ID NO: 476293 - RNA, 20 nt, Human
ucauauauagauuucuuccu

SEQ ID NO: 476294 - RNA, 21 nt, Human
uccacacacaagcauuggggc

SEQ ID NO: 476295 - RNA, 23 nt, Human
uccccacgaccccacggaccgcu

SEQ ID NO: 476296 - RNA, 22 nt, Human
uccccacuguguggccaccccu

SEQ ID NO: 476297 - RNA, 19 nt, Human
uccccccacccuccacgca

SEQ ID NO: 476298 - RNA, 19 nt, Human
ucccgggcagcuugggccc

SEQ ID NO: 476299 - RNA, 22 nt, Human
ucccguccccacgaccccacgg

SEQ ID NO: 476300 - RNA, 22 nt, Human
ucccugagggaaaccuuugcag

SEQ ID NO: 476301 - RNA, 24 nt, Human
ucccugccacugagcuccccccac

SEQ ID NO: 476302 - RNA, 21 nt, Human
ucccugccggacugccuuccc

SEQ ID NO: 476303 - RNA, 22 nt, Human
uccgcccccccaagauggaggg

SEQ ID NO: 476304 - RNA, 19 nt, Human
uccucugcccucgcccggg

SEQ ID NO: 476305 - RNA, 22 nt, Human
uccuggguggggccugugacuc

SEQ ID NO: 476306 - RNA, 21 nt, Human
ucgggcacauguucccguccc

SEQ ID NO: 476307 - RNA, 20 nt, Human
ucugucacgcauuuaaaaug

SEQ ID NO: 476308 - RNA, 21 nt, Human
ugaaacgggagggagaagccc

SEQ ID NO: 476309 - RNA, 21 nt, Human
ugaaagcagauggcggggcag

SEQ ID NO: 476310 - RNA, 23 nt, Human
ugaagcagccaggaagcaagggc

SEQ ID NO: 476311 - RNA, 20 nt, Human
ugacuccuggugucuggcuc

SEQ ID NO: 476312 - RNA, 23 nt, Human
ugagggaaaccuuugcagaaagu

SEQ ID NO: 476313 - RNA, 24 nt, Human
ugcagcaugccacagaggccuggg

SEQ ID NO: 476314 - RNA, 24 nt, Human
ugcauccuaaggaggaggagggga

SEQ ID NO: 476315 - RNA, 24 nt, Human
ugcccggggugaggugaaucuagc

SEQ ID NO: 476316 - RNA, 25 nt, Human
ugccggacugccuucccccagaagc

SEQ ID NO: 476317 - RNA, 24 nt, Human
ugcugcggucgugggcgacgcugg

SEQ ID NO: 476318 - RNA, 26 nt, Human
uggacaaagguggacaggggagggau

SEQ ID NO: 476319 - RNA, 22 nt, Human
uggacaggggagggaugcaggc

SEQ ID NO: 476320 - RNA, 18 nt, Human
uggagggggagaggaggg

SEQ ID NO: 476321 - RNA, 19 nt, Human
uggcggggcagggccaggg

SEQ ID NO: 476322 - RNA, 23 nt, Human
uggcggggcagggccagggcugg

SEQ ID NO: 476323 - RNA, 22 nt, Human
ugggaaggagggcugggagccc

SEQ ID NO: 476324 - RNA, 22 nt, Human
ugggcccagcacugcaggaucc

SEQ ID NO: 476325 - RNA, 22 nt, Human
ugguccugaccacuccugaggc

SEQ ID NO: 476326 - RNA, 22 nt, Human
uggugccuggcagcaggaggcu

SEQ ID NO: 476327 - RNA, 21 nt, Human
ugguggugaggcuggaggugg

SEQ ID NO: 476328 - RNA, 21 nt, Human
ugucauggugccuggcagcag

SEQ ID NO: 476329 - RNA, 23 nt, Human
ugucauggugccuggcagcagga

SEQ ID NO: 476330 - RNA, 22 nt, Human
ugugacacgaggcucuuccuaa

SEQ ID NO: 476331 - RNA, 18 nt, Human
ugugaguguuucuggucc

SEQ ID NO: 476332 - RNA, 20 nt, Human
uguggccaccccucccgguc

SEQ ID NO: 476333 - RNA, 21 nt, Human
uguucccguccccacgacccc

SEQ ID NO: 476334 - RNA, 21 nt, Human
uuccccccaccucccagcucc

SEQ ID NO: 476335 - RNA, 19 nt, Human
uuugcagaaagugacaagc

SEQ ID NO: 476336 - RNA, 19 nt, Human
aaacugcaaacucuguaac

SEQ ID NO: 476337 - RNA, 21 nt, Human
aaagaucaucuuccagcaguc

SEQ ID NO: 476338 - RNA, 24 nt, Human
aaagcauggaaccaaacugcaaac

SEQ ID NO: 476339 - RNA, 24 nt, Human
aaagugcugggauuacaggcguga

SEQ ID NO: 476340 - RNA, 19 nt, Human
aacugcaaacucuguaacc

SEQ ID NO: 476341 - RNA, 21 nt, Human
aagcauggaaccaaacugcaa

SEQ ID NO: 476342 - RNA, 23 nt, Human
aagucccggggaacaaacaguuu

SEQ ID NO: 476343 - RNA, 24 nt, Human
aagugauccacccgccuccgccuc

SEQ ID NO: 476344 - RNA, 19 nt, Human
aagugcugggauuacaggc

SEQ ID NO: 476345 - RNA, 19 nt, Human
aagugcugggauuacaggc

SEQ ID NO: 476346 - RNA, 26 nt, Human
aagugcugggauuacaggcgugagcc

SEQ ID NO: 476347 - RNA, 20 nt, Human
acaaauagcaaauguacagc

SEQ ID NO: 476348 - RNA, 27 nt, Human
accacaauaagccuacggccuccgauc

SEQ ID NO: 476349 - RNA, 24 nt, Human
accacguuggccaggcuggucucg

SEQ ID NO: 476350 - RNA, 20 nt, Human
acccgccuccgccucccaaa

SEQ ID NO: 476351 - RNA, 20 nt, Human
acgggauuucaccacguugg

SEQ ID NO: 476352 - RNA, 24 nt, Human
acgggauuucaccacguuggccag

SEQ ID NO: 476353 - RNA, 21 nt, Human
acuuuaggaaccccaaaacaa

SEQ ID NO: 476354 - RNA, 27 nt, Human
agagagagacagauuuauuauacagaa

SEQ ID NO: 476355 - RNA, 23 nt, Human
agugcagaaagaucaucuuccag

SEQ ID NO: 476356 - RNA, 18 nt, Human
agugcugggauuacaggc

SEQ ID NO: 476357 - RNA, 24 nt, Human
auaugucuucccuaccuugacugu

SEQ ID NO: 476358 - RNA, 19 nt, Human
aucuuguuuccugccccua

SEQ ID NO: 476359 - RNA, 21 nt, Human
auuccugacugcucucuuuca

SEQ ID NO: 476360 - RNA, 22 nt, Human
caaacugcaaacucuguaaccu

SEQ ID NO: 476361 - RNA, 24 nt, Human
caaagugcugggauuacaggcgug

SEQ ID NO: 476362 - RNA, 27 nt, Human
caagugauccacccgccuccccugaag

SEQ ID NO: 476363 - RNA, 22 nt, Human
cacaauaagccuacggccuccg

SEQ ID NO: 476364 - RNA, 27 nt, Human
cacagucucagugcagaaagaucaucu

SEQ ID NO: 476365 - RNA, 20 nt, Human
caccacaauaagccuacggg

SEQ ID NO: 476366 - RNA, 21 nt, Human
caccacguuggccaggcuggu

SEQ ID NO: 476367 - RNA, 24 nt, Human
caccacguuggccaggcuggucuc

SEQ ID NO: 476368 - RNA, 27 nt, Human
caccacguuggccaggcuggucucgaa

SEQ ID NO: 476369 - RNA, 24 nt, Human
caccaugcccagcuaauuuuugua

SEQ ID NO: 476370 - RNA, 23 nt, Human
cacccgccuccgccucccaaagu

SEQ ID NO: 476371 - RNA, 24 nt, Human
cacguuggccaggcuggucucgaa

SEQ ID NO: 476372 - RNA, 22 nt, Human
cacuagcauuccugacugcucu

SEQ ID NO: 476373 - RNA, 22 nt, Human
cagaggggcucacaucuccccu

SEQ ID NO: 476374 - RNA, 23 nt, Human
cagcaaacucuggugggugauau

SEQ ID NO: 476375 - RNA, 18 nt, Human
cagcucagaccaggguca

SEQ ID NO: 476376 - RNA, 19 nt, Human
cagcucagaccagggucaa

SEQ ID NO: 476377 - RNA, 24 nt, Human
caggcgugagccaccgugcccggc

SEQ ID NO: 476378 - RNA, 18 nt, Human
caguagaaacgggauuuc

SEQ ID NO: 476379 - RNA, 26 nt, Human
caguagaaacgggauuucaccacguu

SEQ ID NO: 476380 - RNA, 20 nt, Human
cauugccuuaucucucccca

SEQ ID NO: 476381 - RNA, 22 nt, Human
ccaaagugcugggauuacaggc

SEQ ID NO: 476382 - RNA, 22 nt, Human
ccaaagugcugggauuacaggc

SEQ ID NO: 476383 - RNA, 24 nt, Human
ccaaagugcugggauuacaggcgu

SEQ ID NO: 476384 - RNA, 21 nt, Human
ccaugcacauugccuuaucuc

SEQ ID NO: 476385 - RNA, 22 nt, Human
cccaguccugugccugcucccc

SEQ ID NO: 476386 - RNA, 21 nt, Human
ccccaaaacaaccagguuugc

SEQ ID NO: 476387 - RNA, 26 nt, Human
ccccaaaacaaccagguuugcaagaa

SEQ ID NO: 476388 - RNA, 18 nt, Human
cccccaugcacauugccu

SEQ ID NO: 476389 - RNA, 24 nt, Human
ccgccuccgccucccaaagugcug

SEQ ID NO: 476390 - RNA, 25 nt, Human
ccuacggccuccgaucuuguuuccu

SEQ ID NO: 476391 - RNA, 21 nt, Human
ccugaccgcaagugauccacc

SEQ ID NO: 476392 - RNA, 22 nt, Human
ccugaccgcaagugauccaccc

SEQ ID NO: 476393 - RNA, 23 nt, Human
ccugaccgcaagugauccacccg

SEQ ID NO: 476394 - RNA, 20 nt, Human
ccuguaaucccagcacuuug

SEQ ID NO: 476395 - RNA, 22 nt, Human
ccuguaaucccagcacuuuggg

SEQ ID NO: 476396 - RNA, 19 nt, Human
ccugugccugcuccccacc

SEQ ID NO: 476397 - RNA, 24 nt, Human
ccuuggcuuccccaaacuccacag

SEQ ID NO: 476398 - RNA, 24 nt, Human
cgccuccgccucccaaagugcugg

SEQ ID NO: 476399 - RNA, 19 nt, Human
cgcgcuuccccaggguccc

SEQ ID NO: 476400 - RNA, 20 nt, Human
cgcuaccaccacccccccca

SEQ ID NO: 476401 - RNA, 24 nt, Human
cgggauuucaccacguuggccagg

SEQ ID NO: 476402 - RNA, 24 nt, Human
cuaccuuggaacuguauuagauaa

SEQ ID NO: 476403 - RNA, 22 nt, Human
cuagcauuccugacugcucucu

SEQ ID NO: 476404 - RNA, 19 nt, Human
cugacugcucucuuucaca

SEQ ID NO: 476405 - RNA, 23 nt, Human
cugucccugaagucccggggaac

SEQ ID NO: 476406 - RNA, 19 nt, Human
cuucccuaccuugacuguc

SEQ ID NO: 476407 - RNA, 20 nt, Human
cuucccuaccuugacugucu

SEQ ID NO: 476408 - RNA, 21 nt, Human
gaauacaggcacgccaccaug

SEQ ID NO: 476409 - RNA, 24 nt, Human
gaccgcaagugauccacccgccuc

SEQ ID NO: 476410 - RNA, 21 nt, Human
gaggggcucacaucuccccuc

SEQ ID NO: 476411 - RNA, 19 nt, Human
gaggggugcaaggcccugc

SEQ ID NO: 476412 - RNA, 18 nt, Human
gauuacaggcgugagcca

SEQ ID NO: 476413 - RNA, 20 nt, Human
gauuacaggcgugagccacc

SEQ ID NO: 476414 - RNA, 21 nt, Human
gauuacaggcgugagccaccg

SEQ ID NO: 476415 - RNA, 22 nt, Human
gcccagcuaauuuuuguauuuu

SEQ ID NO: 476416 - RNA, 19 nt, Human
gccuguaaucccagcacuu

SEQ ID NO: 476417 - RNA, 19 nt, Human
ggaggagcagaggggcuca

SEQ ID NO: 476418 - RNA, 24 nt, Human
ggccagugaugccuguaaucccag

SEQ ID NO: 476419 - RNA, 23 nt, Human
ggccgcgcuuccccagggucccg

SEQ ID NO: 476420 - RNA, 23 nt, Human
gggauuucaccacguuggccagg

SEQ ID NO: 476421 - RNA, 24 nt, Human
ggggggguggagaggggugcaagg

SEQ ID NO: 476422 - RNA, 25 nt, Human
ggggguggagaggggugcaaggccc

SEQ ID NO: 476423 - RNA, 21 nt, Human
ggguggagaggggugcaaggc

SEQ ID NO: 476424 - RNA, 24 nt, Human
gugauccacccgccuccgccuccc

SEQ ID NO: 476425 - RNA, 21 nt, Human
gugaugccuguaaucccagca

SEQ ID NO: 476426 - RNA, 20 nt, Human
guuuguucaguuuuucacca

SEQ ID NO: 476427 - RNA, 21 nt, Human
uaaacaaauagcaaauguaca

SEQ ID NO: 476428 - RNA, 23 nt, Human
uaaccuccuaucugucccugaag

SEQ ID NO: 476429 - RNA, 22 nt, Human
uaauuuuuguauuuucaguaga

SEQ ID NO: 476430 - RNA, 20 nt, Human
uacagaauuggcucugccug

SEQ ID NO: 476431 - RNA, 22 nt, Human
uacaggcacgccaccaugccca

SEQ ID NO: 476432 - RNA, 23 nt, Human
uacaggcgugagccaccgugccc

SEQ ID NO: 476433 - RNA, 24 nt, Human
uacuaugauuguguaugugccgcu

SEQ ID NO: 476434 - RNA, 18 nt, Human
uaggaaccccaaaacaac

SEQ ID NO: 476435 - RNA, 21 nt, Human
uaggaaccccaaaacaaccag

SEQ ID NO: 476436 - RNA, 22 nt, Human
uaggaaccccaaaacaaccagg

SEQ ID NO: 476437 - RNA, 25 nt, Human
ucacaucuccccucugauuccccca

SEQ ID NO: 476438 - RNA, 23 nt, Human
ucaccacuagcauuccugacugc

SEQ ID NO: 476439 - RNA, 22 nt, Human
ucaguuuuucaccacuagcauu

SEQ ID NO: 476440 - RNA, 19 nt, Human
uccacccgccuccgccucc

SEQ ID NO: 476441 - RNA, 23 nt, Human
uccacccgccuccgccucccaaa

SEQ ID NO: 476442 - RNA, 24 nt, Human
ucccaaagugcugggauuacaggc

SEQ ID NO: 476443 - RNA, 20 nt, Human
uccccaaacuccacagucuc

SEQ ID NO: 476444 - RNA, 23 nt, Human
uccccaucuagccaggaaucuau

SEQ ID NO: 476445 - RNA, 21 nt, Human
ucccugaagucccggggaaca

SEQ ID NO: 476446 - RNA, 22 nt, Human
ucccugaagucccggggaacaa

SEQ ID NO: 476447 - RNA, 19 nt, Human
uccugccccuagucggggc

SEQ ID NO: 476448 - RNA, 22 nt, Human
uccugugccugcuccccaccgc

SEQ ID NO: 476449 - RNA, 23 nt, Human
uccuuuagcacaugggaaucugg

SEQ ID NO: 476450 - RNA, 21 nt, Human
ucuccuuuagcacaugggaau

SEQ ID NO: 476451 - RNA, 21 nt, Human
ucucgaacuccugaccgcaag

SEQ ID NO: 476452 - RNA, 21 nt, Human
ucucuuucacaguucuucucc

SEQ ID NO: 476453 - RNA, 21 nt, Human
ugcccggcccaaaggggaaac

SEQ ID NO: 476454 - RNA, 23 nt, Human
ugccuguaaucccagcacuuugg

SEQ ID NO: 476455 - RNA, 23 nt, Human
ugccuguaaucccagcacuuugg

SEQ ID NO: 476456 - RNA, 18 nt, Human
ugccuucaaagcauggaa

SEQ ID NO: 476457 - RNA, 24 nt, Human
ugcugggauuacaggcgugagcca

SEQ ID NO: 476458 - RNA, 24 nt, Human
uggccaggcuggucucgaacuccu

SEQ ID NO: 476459 - RNA, 20 nt, Human
ugggaauacaggcacgccac

SEQ ID NO: 476460 - RNA, 22 nt, Human
ugggaauacaggcacgccacca

SEQ ID NO: 476461 - RNA, 23 nt, Human
ugggaauacaggcacgccaccau

SEQ ID NO: 476462 - RNA, 18 nt, Human
ugggauuacaggcgugag

SEQ ID NO: 476463 - RNA, 21 nt, Human
ugggauuacaggcgugagcca

SEQ ID NO: 476464 - RNA, 22 nt, Human
ugggauuacaggcgugagccac

SEQ ID NO: 476465 - RNA, 23 nt, Human
ugggauuacaggcgugagccacc

SEQ ID NO: 476466 - RNA, 23 nt, Human
ugggauuacaggcgugagccacc

SEQ ID NO: 476467 - RNA, 24 nt, Human
ugggauuacaggcgugagccaccg

SEQ ID NO: 476468 - RNA, 21 nt, Human
uggucucgaacuccugaccgc

SEQ ID NO: 476469 - RNA, 26 nt, Human
ugucuucccuaccuugacugucucca

SEQ ID NO: 476470 - RNA, 24 nt, Human
ugugacaucaacaguuucugguuu

SEQ ID NO: 476471 - RNA, 18 nt, Human
uuccagcagucagcucag

SEQ ID NO: 476472 - RNA, 18 nt, Human
uucuguuuguucaguuuu

SEQ ID NO: 476473 - RNA, 27 nt, Human
uuguguaugugccgcuaccaccacccc

SEQ ID NO: 476474 - RNA, 21 nt, Human
uuucaccacguuggccaggcu

SEQ ID NO: 476475 - RNA, 18 nt, Human
uuuuacaccacuggauac

SEQ ID NO: 476476 - RNA, 24 nt, Human
uuuuucaccacuagcauuccugac

SEQ ID NO: 476477 - RNA, 22 nt, Human
uuuuuuuuuuuuuuuuuuucag

SEQ ID NO: 476478 - RNA, 26 nt, Human
aaaacaauuaaaacaagauaaaaccc

SEQ ID NO: 476479 - RNA, 21 nt, Human
aaaacagauucaaucauuuuc

SEQ ID NO: 476480 - RNA, 22 nt, Human
aaagaaaugacugaguaaauga

SEQ ID NO: 476481 - RNA, 19 nt, Human
aacaagauaaaacccaagu

SEQ ID NO: 476482 - RNA, 21 nt, Human
aauaauaaaaauagugguuuu

SEQ ID NO: 476483 - RNA, 26 nt, Human
acaagauaaaacccaaguggaagcuu

SEQ ID NO: 476484 - RNA, 22 nt, Human
acguaucuuaucuauaaaaaca

SEQ ID NO: 476485 - RNA, 24 nt, Human
acucugaguauuuuccuccauucu

SEQ ID NO: 476486 - RNA, 21 nt, Human
auacaaaaacaauuaaaacaa

SEQ ID NO: 476487 - RNA, 24 nt, Human
aucuaaauuuauuaauauuuugga

SEQ ID NO: 476488 - RNA, 26 nt, Human
caagagacaauaaaaacauagaagua

SEQ ID NO: 476489 - RNA, 19 nt, Human
cacucacucacucucucaa

SEQ ID NO: 476490 - RNA, 24 nt, Human
ccacacgucauaugaugauuuaaa

SEQ ID NO: 476491 - RNA, 20 nt, Human
ccucggcgcccgccuugccc

SEQ ID NO: 476492 - RNA, 19 nt, Human
ccuggaucaggauucggag

SEQ ID NO: 476493 - RNA, 20 nt, Human
cggcgcccgccuugcccgcc

SEQ ID NO: 476494 - RNA, 21 nt, Human
cuaaguaauuauuuucuuuau

SEQ ID NO: 476495 - RNA, 25 nt, Human
cuaggaaaugauuauuuaaaaugga

SEQ ID NO: 476496 - RNA, 21 nt, Human
cucaagaauagguagcacacc

SEQ ID NO: 476497 - RNA, 24 nt, Human
cucaagagacaauaaaaacauaga

SEQ ID NO: 476498 - RNA, 23 nt, Human
cucugaaccacauagaaugcuga

SEQ ID NO: 476499 - RNA, 20 nt, Human
gccuggaucaggauucggag

SEQ ID NO: 476500 - RNA, 24 nt, Human
ggaggcgaggggccccuggccccc

SEQ ID NO: 476501 - RNA, 23 nt, Human
ggauguguacaccuucaugguuu

SEQ ID NO: 476502 - RNA, 24 nt, Human
ggauucggagcuggcuagagggag

SEQ ID NO: 476503 - RNA, 20 nt, Human
ggcccccgccuggaucagga

SEQ ID NO: 476504 - RNA, 18 nt, Human
gggccccuggcccccgcc

SEQ ID NO: 476505 - RNA, 23 nt, Human
ggguuucuggccgcugcgagccu

SEQ ID NO: 476506 - RNA, 23 nt, Human
uaaaaaaaaaacaucaaaucuaa

SEQ ID NO: 476507 - RNA, 21 nt, Human
uaaaacaagauaaaacccaag

SEQ ID NO: 476508 - RNA, 22 nt, Human
uaaaacaagauaaaacccaagu

SEQ ID NO: 476509 - RNA, 23 nt, Human
uaaaacaagauaaaacccaagug

SEQ ID NO: 476510 - RNA, 19 nt, Human
uaaaacccaaguggaagcu

SEQ ID NO: 476511 - RNA, 22 nt, Human
uaaaauaaaagaauaaaaccaa

SEQ ID NO: 476512 - RNA, 24 nt, Human
uaaaauaaucaaguacucugagua

SEQ ID NO: 476513 - RNA, 18 nt, Human
uaaguaauuauuuucuuu

SEQ ID NO: 476514 - RNA, 20 nt, Human
uaauaaaaauagugguuuug

SEQ ID NO: 476515 - RNA, 24 nt, Human
uacacacacuccuaauaauuuaga

SEQ ID NO: 476516 - RNA, 21 nt, Human
uauaucccaauagaaauagag

SEQ ID NO: 476517 - RNA, 19 nt, Human
uaucacaccaaccuaccuu

SEQ ID NO: 476518 - RNA, 18 nt, Human
ucccuguaaaaauaacuu

SEQ ID NO: 476519 - RNA, 20 nt, Human
ucuaaaaaaaaaacaucaaa

SEQ ID NO: 476520 - RNA, 26 nt, Human
ucuaaaaaaaaaacaucaaaucuaac

SEQ ID NO: 476521 - RNA, 19 nt, Human
ucuagcaauagaugaagca

SEQ ID NO: 476522 - RNA, 22 nt, Human
ucuuaacuaaggcucaagagac

SEQ ID NO: 476523 - RNA, 24 nt, Human
ugaaaaaauagacguaucuuaucu

SEQ ID NO: 476524 - RNA, 23 nt, Human
ugcaaaaaucacagcucugaacc

SEQ ID NO: 476525 - RNA, 24 nt, Human
ugcaaaaaucacagcucugaacca

SEQ ID NO: 476526 - RNA, 18 nt, Human
uggaagcucaguccaucu

SEQ ID NO: 476527 - RNA, 22 nt, Human
uuaagauuuggcuguguccuua

SEQ ID NO: 476528 - RNA, 23 nt, Human
uuacuucugauacacacacuccu

SEQ ID NO: 476529 - RNA, 22 nt, Human
uucauaaauuauugauggaaau

SEQ ID NO: 476530 - RNA, 18 nt, Human
uucaugcauuucuacacu

SEQ ID NO: 476531 - RNA, 25 nt, Human
uucaugcauuucuacacuacucuua

SEQ ID NO: 476532 - RNA, 28 nt, Human
uuuauucguaaaauaaaagaauaaaacc

SEQ ID NO: 476533 - RNA, 21 nt, Human
uuugcaaaccucggcgcccgc

SEQ ID NO: 476534 - RNA, 18 nt, Human
aauuccuggguuuccccu

SEQ ID NO: 476535 - RNA, 19 nt, Human
acccuugggggcccugggg

SEQ ID NO: 476536 - RNA, 21 nt, Human
agaagcccuggggccugucuc

SEQ ID NO: 476537 - RNA, 19 nt, Human
caaacccuuuuccucuacc

SEQ ID NO: 476538 - RNA, 19 nt, Human
cacccuugggggcccuggg

SEQ ID NO: 476539 - RNA, 20 nt, Human
cacugugcagagacccuggg

SEQ ID NO: 476540 - RNA, 18 nt, Human
cagccuagcaacgcccaa

SEQ ID NO: 476541 - RNA, 24 nt, Human
cagggccgggcccggcccggcgcc

SEQ ID NO: 476542 - RNA, 24 nt, Human
ccacuuguccccagaugcuaucuc

SEQ ID NO: 476543 - RNA, 21 nt, Human
cccaaacccuuuuccucuacc

SEQ ID NO: 476544 - RNA, 21 nt, Human
cccagaugcuaucuccaaauu

SEQ ID NO: 476545 - RNA, 21 nt, Human
ccccagaugcuaucuccaaau

SEQ ID NO: 476546 - RNA, 20 nt, Human
cccgccgcgcgucgcucgca

SEQ ID NO: 476547 - RNA, 18 nt, Human
ccggcgccgcguuuccuc

SEQ ID NO: 476548 - RNA, 26 nt, Human
ccuagcaacgcccaaacccuuuuccu

SEQ ID NO: 476549 - RNA, 22 nt, Human
ccuggggccugucucuugccuc

SEQ ID NO: 476550 - RNA, 23 nt, Human
ccuucagcuccuuuuguuucggg

SEQ ID NO: 476551 - RNA, 21 nt, Human
cgccgccccgccgcgcgucgc

SEQ ID NO: 476552 - RNA, 23 nt, Human
cgccgcguuuccucucgccgccc

SEQ ID NO: 476553 - RNA, 18 nt, Human
cggcccggcgccgcguuu

SEQ ID NO: 476554 - RNA, 20 nt, Human
cggcccggcgccgcguuucc

SEQ ID NO: 476555 - RNA, 23 nt, Human
cuaaaaagucagugaggguuuau

SEQ ID NO: 476556 - RNA, 19 nt, Human
cuagccagaagcccugggg

SEQ ID NO: 476557 - RNA, 24 nt, Human
cucucaggccaccugccuucagcu

SEQ ID NO: 476558 - RNA, 20 nt, Human
gacccuggguaggggaggcu

SEQ ID NO: 476559 - RNA, 23 nt, Human
gcccggcgccgcguuuccucucg

SEQ ID NO: 476560 - RNA, 18 nt, Human
gcgccgcguuuccucucg

SEQ ID NO: 476561 - RNA, 19 nt, Human
ggaagggaaggccaguggu

SEQ ID NO: 476562 - RNA, 21 nt, Human
gggcccuggggaagggaaggc

SEQ ID NO: 476563 - RNA, 20 nt, Human
ggggaagggaaggccagugg

SEQ ID NO: 476564 - RNA, 19 nt, Human
ggguaggggaggcuggagc

SEQ ID NO: 476565 - RNA, 22 nt, Human
ggguaggggaggcuggagccag

SEQ ID NO: 476566 - RNA, 22 nt, Human
ggguaggggaggcuggagccag

SEQ ID NO: 476567 - RNA, 20 nt, Human
gucagugaggguuuauugag

SEQ ID NO: 476568 - RNA, 21 nt, Human
uaaaaagucagugaggguuua

SEQ ID NO: 476569 - RNA, 21 nt, Human
uagcaugagacacccuugggg

SEQ ID NO: 476570 - RNA, 24 nt, Human
uagccagaagcccuggggccuguc

SEQ ID NO: 476571 - RNA, 19 nt, Human
uauggcuggaaugugggac

SEQ ID NO: 476572 - RNA, 21 nt, Human
uccaaauuccaaguagcaaaa

SEQ ID NO: 476573 - RNA, 19 nt, Human
uccccagaugcuaucucca

SEQ ID NO: 476574 - RNA, 21 nt, Human
uccccagaugcuaucuccaaa

SEQ ID NO: 476575 - RNA, 21 nt, Human
ucgccgccccgccgcgcgucg

SEQ ID NO: 476576 - RNA, 24 nt, Human
ucgccgccccgccgcgcgucgcuc

SEQ ID NO: 476577 - RNA, 22 nt, Human
ucuagccagaagcccuggggcc

SEQ ID NO: 476578 - RNA, 19 nt, Human
ugaguccccaaacaccagc

SEQ ID NO: 476579 - RNA, 18 nt, Human
ugcuaaaaagucagugag

SEQ ID NO: 476580 - RNA, 21 nt, Human
uguccccagaugcuaucucca

SEQ ID NO: 476581 - RNA, 23 nt, Human
ugugcagagacccuggguagggg

SEQ ID NO: 476582 - RNA, 18 nt, Human
uuuuuuuuuuuuuuuuug

SEQ ID NO: 476583 - RNA, 21 nt, Human
uuuuuuuuuuuuuuuuugcaa

SEQ ID NO: 476584 - RNA, 18 nt, Human
aaccccguucccuuuagg

SEQ ID NO: 476585 - RNA, 22 nt, Human
agccaauugaacuaacaacccc

SEQ ID NO: 476586 - RNA, 23 nt, Human
agucauucauguccaguuuuccu

SEQ ID NO: 476587 - RNA, 27 nt, Human
ccaucuggccacucugcaggggagggg

SEQ ID NO: 476588 - RNA, 19 nt, Human
ccggggggaacgacccgcc

SEQ ID NO: 476589 - RNA, 19 nt, Human
cucugcaggggaggggcgg

SEQ ID NO: 476590 - RNA, 22 nt, Human
gaacuaacaaccccguucccuu

SEQ ID NO: 476591 - RNA, 25 nt, Human
gaacuaacaaccccguucccuuuag

SEQ ID NO: 476592 - RNA, 25 nt, Human
gcccagccugguuuuuuccgguaga

SEQ ID NO: 476593 - RNA, 19 nt, Human
ggggaggggcgggggggca

SEQ ID NO: 476594 - RNA, 22 nt, Human
ggggggcagucauucaugucca

SEQ ID NO: 476595 - RNA, 23 nt, Human
uaacaaccccguucccuuuagga

SEQ ID NO: 476596 - RNA, 24 nt, Human
ucacggcggcgcccuaccucuucu

SEQ ID NO: 476597 - RNA, 18 nt, Human
ugccggcguagggcuguc

SEQ ID NO: 476598 - RNA, 21 nt, Human
uuccugccgucagaggagucc

SEQ ID NO: 476599 - RNA, 24 nt, Human
uuuuuuuuuuuuuuuuuuucccag

SEQ ID NO: 476600 - RNA, 19 nt, Human
agggcauguccgcggcuca

SEQ ID NO: 476601 - RNA, 23 nt, Human
ccagcuuccugucucugcacucu

SEQ ID NO: 476602 - RNA, 18 nt, Human
uccgcgagcccgagcucc

SEQ ID NO: 476603 - RNA, 20 nt, Human
uccgcgagcccgagcucccg

SEQ ID NO: 476604 - RNA, 27 nt, Human
uccgcgagcccgagcucccgcuccgaa

SEQ ID NO: 476605 - RNA, 20 nt, Human
ugacuuuauaaagacaucuu

SEQ ID NO: 476606 - RNA, 21 nt, Human
ugcgggaagcaaugcgagggc

SEQ ID NO: 476607 - RNA, 25 nt, Human
aagugcccuugcugggucccaaccc

SEQ ID NO: 476608 - RNA, 23 nt, Human
aauagaacuaauguuuacaauga

SEQ ID NO: 476609 - RNA, 23 nt, Human
acaaugcuaaggaaaaauuuaau

SEQ ID NO: 476610 - RNA, 22 nt, Human
caaaaaacugagacaguagcug

SEQ ID NO: 476611 - RNA, 23 nt, Human
ccaacccccagagauuccgauuc

SEQ ID NO: 476612 - RNA, 24 nt, Human
ccccagagauuccgauucagcaag

SEQ ID NO: 476613 - RNA, 21 nt, Human
ccgcuggauugauucuuugac

SEQ ID NO: 476614 - RNA, 19 nt, Human
cgcuggauugauucuuuga

SEQ ID NO: 476615 - RNA, 25 nt, Human
cugagacaguagcugaaggcuucag

SEQ ID NO: 476616 - RNA, 27 nt, Human
cuuauaaacuuucacuaugugauugcc

SEQ ID NO: 476617 - RNA, 21 nt, Human
cuugcugggucccaaccccca

SEQ ID NO: 476618 - RNA, 23 nt, Human
uaaacuucaaaaaacugagacag

SEQ ID NO: 476619 - RNA, 22 nt, Human
uaagagccccugcuuguuggcu

SEQ ID NO: 476620 - RNA, 22 nt, Human
uaagugcccuugcuggguccca

SEQ ID NO: 476621 - RNA, 21 nt, Human
uagcuucucuuauuucacaua

SEQ ID NO: 476622 - RNA, 19 nt, Human
ucagcaagucugggaugcg

SEQ ID NO: 476623 - RNA, 20 nt, Human
ucagcaagucugggaugcgg

SEQ ID NO: 476624 - RNA, 22 nt, Human
ugaaguccgcugcucaccauau

SEQ ID NO: 476625 - RNA, 25 nt, Human
ugagaauuugcauuucuaacaaguu

SEQ ID NO: 476626 - RNA, 21 nt, Human
ugccuaagagccccugcuugu

SEQ ID NO: 476627 - RNA, 20 nt, Human
ugcugggucccaacccccag

SEQ ID NO: 476628 - RNA, 19 nt, Human
uggaugucuccacgagucc

SEQ ID NO: 476629 - RNA, 22 nt, Human
uucagcaccuggaugucuccac

SEQ ID NO: 476630 - RNA, 21 nt, Human
uuuacaaugcuaaggaaaaau

SEQ ID NO: 476631 - RNA, 24 nt, Human
uuuuuuuuuuuuuuuuuuacaaug

SEQ ID NO: 476632 - RNA, 22 nt, Human
aaaaaguuuccccuuuggcccc

SEQ ID NO: 476633 - RNA, 20 nt, Human
aaaacugaacaaacagaagu

SEQ ID NO: 476634 - RNA, 18 nt, Human
aaaauuagcugggcaugg

SEQ ID NO: 476635 - RNA, 22 nt, Human
aaacaaagcaaagggguaaccc

SEQ ID NO: 476636 - RNA, 24 nt, Human
aaacaaagcaaagggguaacccuc

SEQ ID NO: 476637 - RNA, 25 nt, Human
aaacaaagcaaagggguaacccucg

SEQ ID NO: 476638 - RNA, 21 nt, Human
aaacagaagugauuuuaucua

SEQ ID NO: 476639 - RNA, 19 nt, Human
aagcaagacgccuucucca

SEQ ID NO: 476640 - RNA, 24 nt, Human
aaucacuugaacccaggaggugga

SEQ ID NO: 476641 - RNA, 21 nt, Human
acaaagcaaagggguaacccu

SEQ ID NO: 476642 - RNA, 24 nt, Human
acccaggagguggagguugcggug

SEQ ID NO: 476643 - RNA, 24 nt, Human
acuugcggucaggaguucgagacc

SEQ ID NO: 476644 - RNA, 24 nt, Human
agcacuuugggaggcggaggcggg

SEQ ID NO: 476645 - RNA, 22 nt, Human
agccccucugcuccucccacaa

SEQ ID NO: 476646 - RNA, 24 nt, Human
agccuggccaacguggugaaaucc

SEQ ID NO: 476647 - RNA, 18 nt, Human
aggcaggaaaaucacuug

SEQ ID NO: 476648 - RNA, 23 nt, Human
aggcaggaaaaucacuugaaccc

SEQ ID NO: 476649 - RNA, 24 nt, Human
aggcaggaaaaucacuugaaccca

SEQ ID NO: 476650 - RNA, 19 nt, Human
aggcagggccuugcacccc

SEQ ID NO: 476651 - RNA, 21 nt, Human
aggcggaggcggguggaucac

SEQ ID NO: 476652 - RNA, 26 nt, Human
aggcggguggaucacuugcggucagg

SEQ ID NO: 476653 - RNA, 21 nt, Human
aggcugaggcaggaaaaucac

SEQ ID NO: 476654 - RNA, 24 nt, Human
aggcugaggcaggaaaaucacuug

SEQ ID NO: 476655 - RNA, 20 nt, Human
agguggagguugcggugagc

SEQ ID NO: 476656 - RNA, 24 nt, Human
agguggagguugcggugagcugag

SEQ ID NO: 476657 - RNA, 26 nt, Human
aguaaauuggcagaagaaaaacacaa

SEQ ID NO: 476658 - RNA, 24 nt, Human
aucccgccacugcauuccagcgug

SEQ ID NO: 476659 - RNA, 24 nt, Human
caacguggugaaaucccguuucua

SEQ ID NO: 476660 - RNA, 24 nt, Human
cacgccuguaaucccagcacuuug

SEQ ID NO: 476661 - RNA, 21 nt, Human
cacugcauuccagcgugggug

SEQ ID NO: 476662 - RNA, 20 nt, Human
cagaagaaaaacacaauaga

SEQ ID NO: 476663 - RNA, 22 nt, Human
cagcacuuugggaggcggaggc

SEQ ID NO: 476664 - RNA, 24 nt, Human
cagcacuuugggaggcggaggcgg

SEQ ID NO: 476665 - RNA, 24 nt, Human
cagcuacuugggaggcugaggcag

SEQ ID NO: 476666 - RNA, 21 nt, Human
caggagguggagguugcggug

SEQ ID NO: 476667 - RNA, 24 nt, Human
caggagguggagguugcggugagc

SEQ ID NO: 476668 - RNA, 21 nt, Human
ccaaaaaaaaguuuccccuuu

SEQ ID NO: 476669 - RNA, 20 nt, Human
ccaccucccuggcuuuucca

SEQ ID NO: 476670 - RNA, 20 nt, Human
ccacugcauuccagcguggg

SEQ ID NO: 476671 - RNA, 20 nt, Human
ccacugcauuccagcguggg

SEQ ID NO: 476672 - RNA, 21 nt, Human
ccacugcauuccagcgugggu

SEQ ID NO: 476673 - RNA, 24 nt, Human
ccacugcauuccagcgugggugac

SEQ ID NO: 476674 - RNA, 20 nt, Human
cccacaagaguuuccccuuu

SEQ ID NO: 476675 - RNA, 19 nt, Human
cccaggagguggagguugc

SEQ ID NO: 476676 - RNA, 23 nt, Human
ccccucugcuccucccacaagag

SEQ ID NO: 476677 - RNA, 25 nt, Human
ccccuuuggccccaaaugaagacuu

SEQ ID NO: 476678 - RNA, 23 nt, Human
ccuggccaacguggugaaauccc

SEQ ID NO: 476679 - RNA, 24 nt, Human
ccuggccaacguggugaaaucccg

SEQ ID NO: 476680 - RNA, 21 nt, Human
ccuguauucccagcuacuugg

SEQ ID NO: 476681 - RNA, 22 nt, Human
ccuguauucccagcuacuuggg

SEQ ID NO: 476682 - RNA, 24 nt, Human
cgagaccagccuggccaacguggu

SEQ ID NO: 476683 - RNA, 23 nt, Human
cgccuguaaucccagcacuuugg

SEQ ID NO: 476684 - RNA, 24 nt, Human
cgccuguaaucccagcacuuuggg

SEQ ID NO: 476685 - RNA, 24 nt, Human
cggguggaucacuugcggucagga

SEQ ID NO: 476686 - RNA, 25 nt, Human
cuagauggggagagauaaggcaaug

SEQ ID NO: 476687 - RNA, 22 nt, Human
cucacgccuguaaucccagcac

SEQ ID NO: 476688 - RNA, 24 nt, Human
cucacgccuguaaucccagcacuu

SEQ ID NO: 476689 - RNA, 21 nt, Human
cuugaacccaggagguggagg

SEQ ID NO: 476690 - RNA, 18 nt, Human
cuuggcuggcagcagagg

SEQ ID NO: 476691 - RNA, 23 nt, Human
gagaucccgccacugcauuccag

SEQ ID NO: 476692 - RNA, 25 nt, Human
gaggcggguggaucacuugcgguca

SEQ ID NO: 476693 - RNA, 22 nt, Human
gagguugcggugagcugagauc

SEQ ID NO: 476694 - RNA, 24 nt, Human
gaucacuugcggucaggaguucga

SEQ ID NO: 476695 - RNA, 21 nt, Human
gcagaagaaaaacacaauaga

SEQ ID NO: 476696 - RNA, 20 nt, Human
gcagcagaggcacagcugga

SEQ ID NO: 476697 - RNA, 22 nt, Human
gcaggaaaaucacuugaaccca

SEQ ID NO: 476698 - RNA, 21 nt, Human
gccaacguggugaaaucccgu

SEQ ID NO: 476699 - RNA, 24 nt, Human
gccacugcauuccagcguggguga

SEQ ID NO: 476700 - RNA, 18 nt, Human
gccuguaaagguauggaa

SEQ ID NO: 476701 - RNA, 21 nt, Human
gcuggcagcagaggcacagcu

SEQ ID NO: 476702 - RNA, 18 nt, Human
ggagguugcggugagcug

SEQ ID NO: 476703 - RNA, 22 nt, Human
ggagguugcggugagcugagau

SEQ ID NO: 476704 - RNA, 23 nt, Human
ggagguugcggugagcugagauc

SEQ ID NO: 476705 - RNA, 23 nt, Human
ggcacgguggcucacgccuguaa

SEQ ID NO: 476706 - RNA, 21 nt, Human
ggccgggcacgguggcucacg

SEQ ID NO: 476707 - RNA, 21 nt, Human
ggcucacgccuguaaucccag

SEQ ID NO: 476708 - RNA, 22 nt, Human
ggggguggugguagcggcacau

SEQ ID NO: 476709 - RNA, 19 nt, Human
gguggagguugcggugagc

SEQ ID NO: 476710 - RNA, 23 nt, Human
gguggcucacgccuguaauccca

SEQ ID NO: 476711 - RNA, 24 nt, Human
gguggcucacgccuguaaucccag

SEQ ID NO: 476712 - RNA, 22 nt, Human
guaaugccgauaaaacaaagca

SEQ ID NO: 476713 - RNA, 24 nt, Human
uaaaacaaagcaaagggguaaccc

SEQ ID NO: 476714 - RNA, 21 nt, Human
uaaaauaagcaauugagaggc

SEQ ID NO: 476715 - RNA, 21 nt, Human
uaaauuggcagaagaaaaaca

SEQ ID NO: 476716 - RNA, 23 nt, Human
uacugaaaauacaaaaauuagcu

SEQ ID NO: 476717 - RNA, 20 nt, Human
ucacuugcggucaggaguuc

SEQ ID NO: 476718 - RNA, 23 nt, Human
uccaagguagaaaaaguggagca

SEQ ID NO: 476719 - RNA, 24 nt, Human
uccagcgugggugacaaagcaaga

SEQ ID NO: 476720 - RNA, 24 nt, Human
uccccuuuggccccaaaugaagac

SEQ ID NO: 476721 - RNA, 24 nt, Human
ucccgcacaggccaccagggaaau

SEQ ID NO: 476722 - RNA, 19 nt, Human
ugaaaaacugaacaaacag

SEQ ID NO: 476723 - RNA, 18 nt, Human
ugaaaagggagacgagua

SEQ ID NO: 476724 - RNA, 22 nt, Human
ugagaucccgccacugcauucc

SEQ ID NO: 476725 - RNA, 22 nt, Human
ugagcugagaucccgccacugc

SEQ ID NO: 476726 - RNA, 22 nt, Human
ugaggaacugaagcacaauaca

SEQ ID NO: 476727 - RNA, 20 nt, Human
ugaggcaggaaaaucacuug

SEQ ID NO: 476728 - RNA, 24 nt, Human
ugaggcaggaaaaucacuugaacc

SEQ ID NO: 476729 - RNA, 25 nt, Human
ugaggcaggaaaaucacuugaaccc

SEQ ID NO: 476730 - RNA, 21 nt, Human
ugcaccccucuccaccccccc

SEQ ID NO: 476731 - RNA, 22 nt, Human
ugcaccccucuccaccccccca

SEQ ID NO: 476732 - RNA, 23 nt, Human
ugccuguauucccagcuacuugg

SEQ ID NO: 476733 - RNA, 24 nt, Human
ugccuguauucccagcuacuuggg

SEQ ID NO: 476734 - RNA, 20 nt, Human
ugcggucaggaguucgagac

SEQ ID NO: 476735 - RNA, 18 nt, Human
uggaagagguggaugagg

SEQ ID NO: 476736 - RNA, 24 nt, Human
uggaucacuugcggucaggaguuc

SEQ ID NO: 476737 - RNA, 21 nt, Human
uggcagaagaaaaacacaaua

SEQ ID NO: 476738 - RNA, 23 nt, Human
uggcagaagaaaaacacaauaga

SEQ ID NO: 476739 - RNA, 19 nt, Human
uggcagcagaggcacagcu

SEQ ID NO: 476740 - RNA, 24 nt, Human
uggccaacguggugaaaucccguu

SEQ ID NO: 476741 - RNA, 22 nt, Human
uggcucacgccuguaaucccag

SEQ ID NO: 476742 - RNA, 24 nt, Human
uggcucacgccuguaaucccagca

SEQ ID NO: 476743 - RNA, 24 nt, Human
uggcuggcagcagaggcacagcug

SEQ ID NO: 476744 - RNA, 24 nt, Human
ugggaggcggaggcggguggauca

SEQ ID NO: 476745 - RNA, 24 nt, Human
ugggaggcugaggcaggaaaauca

SEQ ID NO: 476746 - RNA, 20 nt, Human
ugggggggguggugguagcc

SEQ ID NO: 476747 - RNA, 19 nt, Human
uuagcugggcaugguggcg

SEQ ID NO: 476748 - RNA, 22 nt, Human
uuagcugggcaugguggcgugc

SEQ ID NO: 476749 - RNA, 24 nt, Human
uugaacccaggagguggagguugc

SEQ ID NO: 476750 - RNA, 19 nt, Human
uugcggugagcugagaucc

SEQ ID NO: 476751 - RNA, 22 nt, Human
uugcggugagcugagaucccgc

SEQ ID NO: 476752 - RNA, 25 nt, Human
uugggaggcugaggcaggaaaauca

SEQ ID NO: 476753 - RNA, 21 nt, Human
uuuccccuuuggccccaaaug

SEQ ID NO: 476754 - RNA, 23 nt, Human
uuucuacugaaaauacaaaaauu

SEQ ID NO: 476755 - RNA, 19 nt, Human
uuuuuugaaaaacugaaca

SEQ ID NO: 476756 - RNA, 23 nt, Human
uuuuuugaaaaacugaacaaaca

SEQ ID NO: 476757 - RNA, 20 nt, Human
uuuuuuuuuuuuuuuuuugg

SEQ ID NO: 476758 - RNA, 21 nt, Human
aaaaaaaaaaaaagacuugga

SEQ ID NO: 476759 - RNA, 24 nt, Human
aaaaaaaaaaagacuuggauuuua

SEQ ID NO: 476760 - RNA, 20 nt, Human
aaaggcuuucacccccauuc

SEQ ID NO: 476761 - RNA, 21 nt, Human
aacguacauauaguacaccaa

SEQ ID NO: 476762 - RNA, 23 nt, Human
aagaaccaggacgacggggagua

SEQ ID NO: 476763 - RNA, 23 nt, Human
aagcaugugguaaguuagaaaug

SEQ ID NO: 476764 - RNA, 23 nt, Human
aauggguccuuggauucugcaac

SEQ ID NO: 476765 - RNA, 23 nt, Human
accaaacacagcaguacaaacca

SEQ ID NO: 476766 - RNA, 20 nt, Human
acccggaggcucuggaggcu

SEQ ID NO: 476767 - RNA, 18 nt, Human
agaaauguugauagcuga

SEQ ID NO: 476768 - RNA, 18 nt, Human
agacccggaggcucugga

SEQ ID NO: 476769 - RNA, 19 nt, Human
agccguccgggucuggccc

SEQ ID NO: 476770 - RNA, 18 nt, Human
aggaacaagaaccaggac

SEQ ID NO: 476771 - RNA, 18 nt, Human
aggcacaacguacauaua

SEQ ID NO: 476772 - RNA, 22 nt, Human
aggcucuggaggcucuggagcc

SEQ ID NO: 476773 - RNA, 20 nt, Human
aguacaaucaucacugcacu

SEQ ID NO: 476774 - RNA, 19 nt, Human
agugagaaacagacauucu

SEQ ID NO: 476775 - RNA, 24 nt, Human
augacaggaaagugcuccccaaag

SEQ ID NO: 476776 - RNA, 21 nt, Human
auggggcaguaaucagguagc

SEQ ID NO: 476777 - RNA, 22 nt, Human
caaacacagcaguacaaaccac

SEQ ID NO: 476778 - RNA, 24 nt, Human
caaagcagugggagaggcaaugug

SEQ ID NO: 476779 - RNA, 23 nt, Human
caacaaagaaaggcuuucacccc

SEQ ID NO: 476780 - RNA, 19 nt, Human
cacacuccuaauacccaca

SEQ ID NO: 476781 - RNA, 26 nt, Human
cacccggugcacauagugagaaacag

SEQ ID NO: 476782 - RNA, 20 nt, Human
caccgggcccguccccagcc

SEQ ID NO: 476783 - RNA, 21 nt, Human
cagacccggaggcucuggagg

SEQ ID NO: 476784 - RNA, 20 nt, Human
cagcaguacaaaccacuccu

SEQ ID NO: 476785 - RNA, 20 nt, Human
cagcccauccccaaauaaau

SEQ ID NO: 476786 - RNA, 18 nt, Human
caguacaaaccacuccuu

SEQ ID NO: 476787 - RNA, 24 nt, Human
cauauaguacaccaagcauguggu

SEQ ID NO: 476788 - RNA, 24 nt, Human
cauaugaggcacaacguacauaua

SEQ ID NO: 476789 - RNA, 25 nt, Human
cauggcuagaugagcccuggcaggu

SEQ ID NO: 476790 - RNA, 22 nt, Human
cauucccacacuccuaauaccc

SEQ ID NO: 476791 - RNA, 19 nt, Human
ccaaacacagcaguacaaa

SEQ ID NO: 476792 - RNA, 19 nt, Human
ccacacuccuaauacccac

SEQ ID NO: 476793 - RNA, 21 nt, Human
ccagacccggaggcucuggag

SEQ ID NO: 476794 - RNA, 18 nt, Human
ccauucaaggcaaacauu

SEQ ID NO: 476795 - RNA, 20 nt, Human
cccacauugaugucaucuuc

SEQ ID NO: 476796 - RNA, 21 nt, Human
cccgaacccacacagccgcac

SEQ ID NO: 476797 - RNA, 20 nt, Human
cccuucucaggaacaagaac

SEQ ID NO: 476798 - RNA, 18 nt, Human
ccgaacccacacagccgc

SEQ ID NO: 476799 - RNA, 23 nt, Human
ccgaacccacacagccgcaccgg

SEQ ID NO: 476800 - RNA, 22 nt, Human
ccgcucccgaacccacacagcc

SEQ ID NO: 476801 - RNA, 22 nt, Human
ccguugauuuuuaauauuuucu

SEQ ID NO: 476802 - RNA, 21 nt, Human
ccugaccuccaaaagaagugu

SEQ ID NO: 476803 - RNA, 20 nt, Human
ccugugaugaauaaaaucua

SEQ ID NO: 476804 - RNA, 21 nt, Human
cgcucccgaacccacacagcc

SEQ ID NO: 476805 - RNA, 20 nt, Human
cgggaggagccgaagcgccg

SEQ ID NO: 476806 - RNA, 27 nt, Human
cgggaggagccgaagcgccgcccagac

SEQ ID NO: 476807 - RNA, 20 nt, Human
cggggcuagcaggcggcucg

SEQ ID NO: 476808 - RNA, 24 nt, Human
cguacauauaguacaccaagcaug

SEQ ID NO: 476809 - RNA, 19 nt, Human
cguccgggucuggccccug

SEQ ID NO: 476810 - RNA, 18 nt, Human
cucccgaacccacacagc

SEQ ID NO: 476811 - RNA, 22 nt, Human
cucccgaacccacacagccgca

SEQ ID NO: 476812 - RNA, 23 nt, Human
cucccgaacccacacagccgcac

SEQ ID NO: 476813 - RNA, 22 nt, Human
cuccuuggcagacaugugcuuc

SEQ ID NO: 476814 - RNA, 25 nt, Human
cuccuuggcagacaugugcuucuaa

SEQ ID NO: 476815 - RNA, 22 nt, Human
cugaacucccacauugauguca

SEQ ID NO: 476816 - RNA, 22 nt, Human
cuggauauugcccauaucuagu

SEQ ID NO: 476817 - RNA, 24 nt, Human
gaacaagaaccaggacgacgggga

SEQ ID NO: 476818 - RNA, 22 nt, Human
gcaacuccgcucccgaacccac

SEQ ID NO: 476819 - RNA, 20 nt, Human
gcccguccccagccuguggg

SEQ ID NO: 476820 - RNA, 20 nt, Human
gccuguaaucacccggugca

SEQ ID NO: 476821 - RNA, 24 nt, Human
gcugagguacugaaacuaacaaaa

SEQ ID NO: 476822 - RNA, 19 nt, Human
gggaggagccgaagcgccg

SEQ ID NO: 476823 - RNA, 27 nt, Human
gguaaggaaaacuuauagcagaaaaaa

SEQ ID NO: 476824 - RNA, 20 nt, Human
guccuuggauucugcaacuc

SEQ ID NO: 476825 - RNA, 26 nt, Human
guuguccuugauuauucuguccuguu

SEQ ID NO: 476826 - RNA, 19 nt, Human
uagcucuggauggugcucc

SEQ ID NO: 476827 - RNA, 20 nt, Human
uagcugaacuacuaggcuac

SEQ ID NO: 476828 - RNA, 21 nt, Human
uaggcuauacucaccuuaguu

SEQ ID NO: 476829 - RNA, 20 nt, Human
uauaguacaccaagcaugug

SEQ ID NO: 476830 - RNA, 18 nt, Human
uaucacauucccacacuc

SEQ ID NO: 476831 - RNA, 24 nt, Human
ucacucccagcccauccccaaaua

SEQ ID NO: 476832 - RNA, 19 nt, Human
uccagugcgaaagaccucg

SEQ ID NO: 476833 - RNA, 18 nt, Human
uccaugacacagaggaac

SEQ ID NO: 476834 - RNA, 23 nt, Human
ucccacauugaugucaucuucuc

SEQ ID NO: 476835 - RNA, 23 nt, Human
uccccaguuauacugaacuccca

SEQ ID NO: 476836 - RNA, 18 nt, Human
uccgcucccgaacccaca

SEQ ID NO: 476837 - RNA, 30 nt, Human
uccuaauacccacaaaacaagaauuucacu

SEQ ID NO: 476838 - RNA, 25 nt, Human
uccugaccuccaaaagaagugucag

SEQ ID NO: 476839 - RNA, 18 nt, Human
ucucaggaacaagaacca

SEQ ID NO: 476840 - RNA, 25 nt, Human
ucucucaucccaacauuuguucacu

SEQ ID NO: 476841 - RNA, 23 nt, Human
ucuguccugugaugaauaaaauc

SEQ ID NO: 476842 - RNA, 23 nt, Human
ucuucuaguuuauccccaguuau

SEQ ID NO: 476843 - RNA, 23 nt, Human
ucuuuccaaucaucuaggcugga

SEQ ID NO: 476844 - RNA, 20 nt, Human
ucuuuuuccuggaauaucug

SEQ ID NO: 476845 - RNA, 22 nt, Human
ugacaggaaagugcuccccaaa

SEQ ID NO: 476846 - RNA, 22 nt, Human
ugagaaaauguaguuguuccug

SEQ ID NO: 476847 - RNA, 20 nt, Human
ugagucucucucucccuugu

SEQ ID NO: 476848 - RNA, 24 nt, Human
uggaauuucagagcaaagguuguu

SEQ ID NO: 476849 - RNA, 23 nt, Human
uggggcaguaaucagguagcuga

SEQ ID NO: 476850 - RNA, 23 nt, Human
uggguccuuggauucugcaacuc

SEQ ID NO: 476851 - RNA, 25 nt, Human
uguucacucuuuuaugcugucucca

SEQ ID NO: 476852 - RNA, 19 nt, Human
uuauagcagaaaaaagacu

SEQ ID NO: 476853 - RNA, 19 nt, Human
uucacccccauucaaggca

SEQ ID NO: 476854 - RNA, 20 nt, Human
uucacuccaugacacagagg

SEQ ID NO: 476855 - RNA, 25 nt, Human
uucccacacuccuaauacccacaaa

SEQ ID NO: 476856 - RNA, 19 nt, Human
uuccuggaaaaaaaaaaaa

SEQ ID NO: 476857 - RNA, 21 nt, Human
uucucagucuuccagguuaug

SEQ ID NO: 476858 - RNA, 23 nt, Human
uucuggaaaggauuuuugauacu

SEQ ID NO: 476859 - RNA, 23 nt, Human
aaaagaaaagaaaaagacaagag

SEQ ID NO: 476860 - RNA, 19 nt, Human
aagugagaguacaacagcc

SEQ ID NO: 476861 - RNA, 25 nt, Human
acauggcagcucccuucagcucucc

SEQ ID NO: 476862 - RNA, 20 nt, Human
agaaaagaaaaagacaagag

SEQ ID NO: 476863 - RNA, 20 nt, Human
aguuaaaaagaaaagaaaaa

SEQ ID NO: 476864 - RNA, 19 nt, Human
caagagcaagccacugcca

SEQ ID NO: 476865 - RNA, 24 nt, Human
caccuucaguccccggccucgcuu

SEQ ID NO: 476866 - RNA, 21 nt, Human
cagcaggcugaccaaagagug

SEQ ID NO: 476867 - RNA, 21 nt, Human
gaguuucaaguucagagcacu

SEQ ID NO: 476868 - RNA, 20 nt, Human
gcagcucccuucagcucucc

SEQ ID NO: 476869 - RNA, 20 nt, Human
gcgcucaggacuucaagucc

SEQ ID NO: 476870 - RNA, 23 nt, Human
gugaguuucaaguucagagcacu

SEQ ID NO: 476871 - RNA, 22 nt, Human
uaaagugagaguacaacagccc

SEQ ID NO: 476872 - RNA, 22 nt, Human
uaccagcacuuaaauuugucag

SEQ ID NO: 476873 - RNA, 24 nt, Human
uagguggguggauauauucaugua

SEQ ID NO: 476874 - RNA, 20 nt, Human
uauauucauguaugcauaua

SEQ ID NO: 476875 - RNA, 24 nt, Human
ucaucggacauggcagcucccuuc

SEQ ID NO: 476876 - RNA, 23 nt, Human
uccccggccucgcuuuggagucc

SEQ ID NO: 476877 - RNA, 23 nt, Human
ucgacacccacaccuucaguccc

SEQ ID NO: 476878 - RNA, 18 nt, Human
ucuccagugaguuucaag

SEQ ID NO: 476879 - RNA, 23 nt, Human
ucuccagugaguuucaaguucag

SEQ ID NO: 476880 - RNA, 24 nt, Human
ugaccaaagaguggccugucuguu

SEQ ID NO: 476881 - RNA, 22 nt, Human
uggcagcucccuucagcucucc

SEQ ID NO: 476882 - RNA, 19 nt, Human
uggguggauauauucaugu

SEQ ID NO: 476883 - RNA, 23 nt, Human
uguacgaggugagaauccgugca

SEQ ID NO: 476884 - RNA, 25 nt, Human
ugucagcaggcugaccaaagagugg

SEQ ID NO: 476885 - RNA, 21 nt, Human
uucaacuuuaaucuuuugcga

SEQ ID NO: 476886 - RNA, 19 nt, Human
uuugacccagguuaacccu

SEQ ID NO: 476887 - RNA, 29 nt, Human
aaacaaagguaagagucaggagggacccc

SEQ ID NO: 476888 - RNA, 23 nt, Human
aaacucucaacauaucaacacuc

SEQ ID NO: 476889 - RNA, 24 nt, Human
aacacuguauuuuucacuuuuugu

SEQ ID NO: 476890 - RNA, 22 nt, Human
aacgaaaacucaaaaaguugga

SEQ ID NO: 476891 - RNA, 20 nt, Human
aagaagcaguggaaauuggc

SEQ ID NO: 476892 - RNA, 23 nt, Human
aagaggaaagaaaaaaaauccaa

SEQ ID NO: 476893 - RNA, 18 nt, Human
aagccuccuaaaacaaag

SEQ ID NO: 476894 - RNA, 21 nt, Human
aagguaagagucaggagccau

SEQ ID NO: 476895 - RNA, 22 nt, Human
acaaacaauagacaugcccaug

SEQ ID NO: 476896 - RNA, 21 nt, Human
acaaagguaagagucaggagc

SEQ ID NO: 476897 - RNA, 21 nt, Human
acaacacugaaauggacauac

SEQ ID NO: 476898 - RNA, 22 nt, Human
acaacagcaaagugaacauaaa

SEQ ID NO: 476899 - RNA, 19 nt, Human
acaggaaaaagaagcagug

SEQ ID NO: 476900 - RNA, 23 nt, Human
acagugcagauacaaacagcugc

SEQ ID NO: 476901 - RNA, 20 nt, Human
acauacacauuacagauaca

SEQ ID NO: 476902 - RNA, 19 nt, Human
acauuacagauacaaacaa

SEQ ID NO: 476903 - RNA, 18 nt, Human
accaaacaccuuacaaag

SEQ ID NO: 476904 - RNA, 22 nt, Human
accaaacaccuuacaaagguuc

SEQ ID NO: 476905 - RNA, 23 nt, Human
accacaagaaauaaagaccauag

SEQ ID NO: 476906 - RNA, 22 nt, Human
accauaguuggagguuaauggg

SEQ ID NO: 476907 - RNA, 19 nt, Human
agacagaaaacucucaacu

SEQ ID NO: 476908 - RNA, 19 nt, Human
agacugaauuuuugcacga

SEQ ID NO: 476909 - RNA, 22 nt, Human
agagguuucccaaagaaacuaa

SEQ ID NO: 476910 - RNA, 23 nt, Human
agcacacuuuuaauaacccuggu

SEQ ID NO: 476911 - RNA, 22 nt, Human
aggaaagaaaaaaaauccaaaa

SEQ ID NO: 476912 - RNA, 23 nt, Human
aggaaagaaaaaaaauccaaaac

SEQ ID NO: 476913 - RNA, 26 nt, Human
agucuaucaccugcauacuaaaacag

SEQ ID NO: 476914 - RNA, 20 nt, Human
auaauguaaaaagaaagcac

SEQ ID NO: 476915 - RNA, 23 nt, Human
auacacauuacagauacaaacaa

SEQ ID NO: 476916 - RNA, 20 nt, Human
cacaccaggaagggauuuag

SEQ ID NO: 476917 - RNA, 19 nt, Human
cacaggaaaaagaagcagu

SEQ ID NO: 476918 - RNA, 24 nt, Human
cacauuacagauacaaacaauaga

SEQ ID NO: 476919 - RNA, 20 nt, Human
cagacagaaaacucucaaca

SEQ ID NO: 476920 - RNA, 22 nt, Human
cagccagacagaaaacucucaa

SEQ ID NO: 476921 - RNA, 19 nt, Human
caggaaaaagaagcagugg

SEQ ID NO: 476922 - RNA, 20 nt, Human
caggaaagauaagagcaaug

SEQ ID NO: 476923 - RNA, 22 nt, Human
caggaaagauaagagcaaugac

SEQ ID NO: 476924 - RNA, 23 nt, Human
caggagccauacagaaaacagag

SEQ ID NO: 476925 - RNA, 21 nt, Human
ccuaaauccucagugcaacau

SEQ ID NO: 476926 - RNA, 19 nt, Human
ccucgcccggcugaacugg

SEQ ID NO: 476927 - RNA, 19 nt, Human
cucccuaaauccucagugc

SEQ ID NO: 476928 - RNA, 18 nt, Human
cuccuaaaacaaagguaa

SEQ ID NO: 476929 - RNA, 18 nt, Human
cucucccuaaauccucag

SEQ ID NO: 476930 - RNA, 20 nt, Human
cuggaauaaauaaauagcag

SEQ ID NO: 476931 - RNA, 21 nt, Human
cuucacuccuaucuacucucc

SEQ ID NO: 476932 - RNA, 26 nt, Human
gaaaaugggaagugacucaggaaaga

SEQ ID NO: 476933 - RNA, 20 nt, Human
gcagauacaaacagcugcca

SEQ ID NO: 476934 - RNA, 24 nt, Human
gcugaacuggaauucuugcaguua

SEQ ID NO: 476935 - RNA, 24 nt, Human
gugaagaggaaagaaaaaaaaucc

SEQ ID NO: 476936 - RNA, 25 nt, Human
uaaaaaagacauugagguuauggua

SEQ ID NO: 476937 - RNA, 20 nt, Human
uaaaaacaauugagaggugg

SEQ ID NO: 476938 - RNA, 24 nt, Human
uaaaaaggcacaggaaaaagaagc

SEQ ID NO: 476939 - RNA, 24 nt, Human
uaaaauagcaaagagaagggaggc

SEQ ID NO: 476940 - RNA, 19 nt, Human
uaaaauuucaaguaaacac

SEQ ID NO: 476941 - RNA, 22 nt, Human
uaaaauuucaaguaaacacugu

SEQ ID NO: 476942 - RNA, 24 nt, Human
uaauggacagccagaacuuuagau

SEQ ID NO: 476943 - RNA, 24 nt, Human
uacaguaguggaauaaauaaauaa

SEQ ID NO: 476944 - RNA, 18 nt, Human
uacuaaaacagacaacac

SEQ ID NO: 476945 - RNA, 19 nt, Human
uacuuauaaaaaaaugacu

SEQ ID NO: 476946 - RNA, 23 nt, Human
uagacagacacagugcagauaca

SEQ ID NO: 476947 - RNA, 18 nt, Human
uagcacaacuuguuuucg

SEQ ID NO: 476948 - RNA, 21 nt, Human
ucaguauuauuuuaaaaaaau

SEQ ID NO: 476949 - RNA, 22 nt, Human
ucagugcaacauacguccgcag

SEQ ID NO: 476950 - RNA, 24 nt, Human
uccacaaauaaaaauuaaaaacaa

SEQ ID NO: 476951 - RNA, 22 nt, Human
ucccuaauccauuaaagcuaag

SEQ ID NO: 476952 - RNA, 21 nt, Human
ugaaaacagcacuaauacugc

SEQ ID NO: 476953 - RNA, 24 nt, Human
ugaaaacagcacuaauacugcugg

SEQ ID NO: 476954 - RNA, 22 nt, Human
ugaaaccagacucgcaaacugg

SEQ ID NO: 476955 - RNA, 24 nt, Human
ugaaauggacauacacauuacaga

SEQ ID NO: 476956 - RNA, 26 nt, Human
ugaaauggacauacacauuacagaua

SEQ ID NO: 476957 - RNA, 22 nt, Human
ugaaccuccucaacagaaaucu

SEQ ID NO: 476958 - RNA, 21 nt, Human
ugacucaggaaagauaagagc

SEQ ID NO: 476959 - RNA, 25 nt, Human
ugacucaggaaagauaagagcaagg

SEQ ID NO: 476960 - RNA, 21 nt, Human
ugagagguggggaaaauauca

SEQ ID NO: 476961 - RNA, 22 nt, Human
ugagagguggggaaaauaucag

SEQ ID NO: 476962 - RNA, 26 nt, Human
ugccaaaugcuucacuccuaucuacu

SEQ ID NO: 476963 - RNA, 20 nt, Human
ugcuacaguaguggaauaaa

SEQ ID NO: 476964 - RNA, 20 nt, Human
uggaaauuggcuucucccag

SEQ ID NO: 476965 - RNA, 23 nt, Human
uggcauucagacugcuccaggau

SEQ ID NO: 476966 - RNA, 24 nt, Human
uguaaaaagaaagcacacuuuuaa

SEQ ID NO: 476967 - RNA, 21 nt, Human
uguaaagcaggcaguuucuug

SEQ ID NO: 476968 - RNA, 18 nt, Human
uguuaaaaaggcacagga

SEQ ID NO: 476969 - RNA, 20 nt, Human
uuaaauuacagacugaauuu

SEQ ID NO: 476970 - RNA, 23 nt, Human
uuacaaagguucaugaaaccaga

SEQ ID NO: 476971 - RNA, 18 nt, Human
uuaguggugaauguguau

SEQ ID NO: 476972 - RNA, 19 nt, Human
uucuuuacgcugccaaaug

SEQ ID NO: 476973 - RNA, 19 nt, Human
uugaguguuaaaaaggcac

SEQ ID NO: 476974 - RNA, 21 nt, Human
uugauacacaccaggaaggga

SEQ ID NO: 476975 - RNA, 20 nt, Human
uugcugaguuuggaaaaugg

SEQ ID NO: 476976 - RNA, 22 nt, Human
aaaccagcgcagcagaagcugg

SEQ ID NO: 476977 - RNA, 25 nt, Human
accccacgcuccaaaguccaggcug

SEQ ID NO: 476978 - RNA, 21 nt, Human
agagaaguaggugagagggaa

SEQ ID NO: 476979 - RNA, 19 nt, Human
agagacaaggaugagaagg

SEQ ID NO: 476980 - RNA, 19 nt, Human
aucacacacagacauaagg

SEQ ID NO: 476981 - RNA, 24 nt, Human
caaaaagcuagaacaccccugcca

SEQ ID NO: 476982 - RNA, 21 nt, Human
cacacacagacauaaggcacg

SEQ ID NO: 476983 - RNA, 21 nt, Human
cacacagacauaaggcacggu

SEQ ID NO: 476984 - RNA, 22 nt, Human
cacccaccccacgcuccaaagu

SEQ ID NO: 476985 - RNA, 23 nt, Human
caccccacgcuccaaaguccagg

SEQ ID NO: 476986 - RNA, 21 nt, Human
cagugcuuagaguggggagcc

SEQ ID NO: 476987 - RNA, 25 nt, Human
ccaaagccgcaaaccagcgcagcag

SEQ ID NO: 476988 - RNA, 22 nt, Human
ccccaaagaugcggggaguagg

SEQ ID NO: 476989 - RNA, 21 nt, Human
ccccugggugugccgccuccg

SEQ ID NO: 476990 - RNA, 24 nt, Human
cccuuggcguccccccugggugug

SEQ ID NO: 476991 - RNA, 21 nt, Human
ccgccuccgagcucgggcccu

SEQ ID NO: 476992 - RNA, 23 nt, Human
ccucaaaaagcuagaacaccccu

SEQ ID NO: 476993 - RNA, 19 nt, Human
ccucucucucaccuucccc

SEQ ID NO: 476994 - RNA, 23 nt, Human
cguccugcucccuuggcgucccc

SEQ ID NO: 476995 - RNA, 21 nt, Human
cucacucuguccuaacaucac

SEQ ID NO: 476996 - RNA, 19 nt, Human
gaagugaugagaagagggg

SEQ ID NO: 476997 - RNA, 22 nt, Human
gagccauugucccacccacccc

SEQ ID NO: 476998 - RNA, 20 nt, Human
gauuccccaaagaugcgggg

SEQ ID NO: 476999 - RNA, 20 nt, Human
ggaguaggggaggcagugcu

SEQ ID NO: 477000 - RNA, 24 nt, Human
ggggaggcagugcuuagagugggg

SEQ ID NO: 477001 - RNA, 24 nt, Human
guccucaaaaagcuagaacacccc

SEQ ID NO: 477002 - RNA, 23 nt, Human
uaccugagcccaggaugaguaac

SEQ ID NO: 477003 - RNA, 19 nt, Human
ucacacacagacauaaggc

SEQ ID NO: 477004 - RNA, 21 nt, Human
ucccacccaccccacgcucca

SEQ ID NO: 477005 - RNA, 27 nt, Human
ucccacccaccccacgcuccaaagucc

SEQ ID NO: 477006 - RNA, 19 nt, Human
uccccgugacagcugacuu

SEQ ID NO: 477007 - RNA, 21 nt, Human
ucccugcccucgaggagcuca

SEQ ID NO: 477008 - RNA, 20 nt, Human
ucccuuggcguccccccugg

SEQ ID NO: 477009 - RNA, 21 nt, Human
ugagagggaaauuuccaggug

SEQ ID NO: 477010 - RNA, 22 nt, Human
ugaugagaagagggguacccag

SEQ ID NO: 477011 - RNA, 23 nt, Human
ugucccacccaccccacgcucca

SEQ ID NO: 477012 - RNA, 19 nt, Human
uguccuaacaucacaagag

SEQ ID NO: 477013 - RNA, 27 nt, Human
acugggaggaugagguugugcucugcc

SEQ ID NO: 477014 - RNA, 21 nt, Human
agauuugagguaggaggcugg

SEQ ID NO: 477015 - RNA, 20 nt, Human
aggaagaaaauuauaauuaa

SEQ ID NO: 477016 - RNA, 19 nt, Human
aggcaaacucuuuaaccuu

SEQ ID NO: 477017 - RNA, 21 nt, Human
aggucgugcggugagguacug

SEQ ID NO: 477018 - RNA, 19 nt, Human
cacccucucucuucuccag

SEQ ID NO: 477019 - RNA, 22 nt, Human
cauccccuaagcuugucauccu

SEQ ID NO: 477020 - RNA, 22 nt, Human
caucuccaaguggggaaaaaaa

SEQ ID NO: 477021 - RNA, 22 nt, Human
ccacccucucucuucuccagua

SEQ ID NO: 477022 - RNA, 19 nt, Human
cuccaaguggggaaaaaaa

SEQ ID NO: 477023 - RNA, 21 nt, Human
cuuugucuuuucaacauguug

SEQ ID NO: 477024 - RNA, 18 nt, Human
gagcugucagaaacgcuc

SEQ ID NO: 477025 - RNA, 20 nt, Human
gcuuguuuucuggucaugac

SEQ ID NO: 477026 - RNA, 22 nt, Human
gggcuuguuuucuggucaugac

SEQ ID NO: 477027 - RNA, 18 nt, Human
gguucuaauccagauucu

SEQ ID NO: 477028 - RNA, 24 nt, Human
guaauugauccacagccucccagg

SEQ ID NO: 477029 - RNA, 21 nt, Human
ucagaagggggggaaaaggca

SEQ ID NO: 477030 - RNA, 18 nt, Human
uccaguauucuuugucuu

SEQ ID NO: 477031 - RNA, 24 nt, Human
ucccaggaaguccuuguuuuucuu

SEQ ID NO: 477032 - RNA, 21 nt, Human
ucuaagcaaccucaggcaaac

SEQ ID NO: 477033 - RNA, 19 nt, Human
ugagguaggaggcuggcag

SEQ ID NO: 477034 - RNA, 20 nt, Human
ugagguaggaggcuggcagg

SEQ ID NO: 477035 - RNA, 26 nt, Human
ugcucugcccacccucucucuucucc

SEQ ID NO: 477036 - RNA, 22 nt, Human
uuccugcauuucaauuugucau

SEQ ID NO: 477037 - RNA, 20 nt, Human
uuucuggucaugaccucacu

SEQ ID NO: 477038 - RNA, 23 nt, Human
uuucuuaucucugucuuuugugu

SEQ ID NO: 477039 - RNA, 20 nt, Human
uuugccaaugcucaguucuu

SEQ ID NO: 477040 - RNA, 21 nt, Human
uuugccaaugcucaguucuuu

SEQ ID NO: 477041 - RNA, 22 nt, Human
uuugucuuuucaacauguuggu

SEQ ID NO: 477042 - RNA, 18 nt, Human
uuuuucuuaucucugucu

SEQ ID NO: 477043 - RNA, 22 nt, Human
aaaaacagacaggugcggccug

SEQ ID NO: 477044 - RNA, 19 nt, Human
aaaaagcaacgcgaaagcu

SEQ ID NO: 477045 - RNA, 24 nt, Human
aaaguucugggauuaccugccuga

SEQ ID NO: 477046 - RNA, 22 nt, Human
aagcgauccuucugucugggcc

SEQ ID NO: 477047 - RNA, 21 nt, Human
acaggguuucaccauguuggc

SEQ ID NO: 477048 - RNA, 23 nt, Human
acaggguuucaccauguuggcca

SEQ ID NO: 477049 - RNA, 24 nt, Human
acaggguuucaccauguuggccag

SEQ ID NO: 477050 - RNA, 21 nt, Human
aggagcgggcgagcgggcggg

SEQ ID NO: 477051 - RNA, 20 nt, Human
aggcacgcgagaaaaagcaa

SEQ ID NO: 477052 - RNA, 18 nt, Human
aguaugggaacagcugga

SEQ ID NO: 477053 - RNA, 23 nt, Human
aguggagugaacaagaagcccag

SEQ ID NO: 477054 - RNA, 20 nt, Human
caaaaacagacaggugcggc

SEQ ID NO: 477055 - RNA, 20 nt, Human
caaaguucugggauuaccug

SEQ ID NO: 477056 - RNA, 27 nt, Human
caagcgauccuucugucugggccuccc

SEQ ID NO: 477057 - RNA, 19 nt, Human
caccauguuggccaggucu

SEQ ID NO: 477058 - RNA, 20 nt, Human
caccauguuggccaggucuc

SEQ ID NO: 477059 - RNA, 24 nt, Human
cacuucagcuuccugcagagccgg

SEQ ID NO: 477060 - RNA, 20 nt, Human
cagccgccgccgccgccccg

SEQ ID NO: 477061 - RNA, 24 nt, Human
caggguuucaccauguuggccagg

SEQ ID NO: 477062 - RNA, 19 nt, Human
ccaaaaacagacaggugcg

SEQ ID NO: 477063 - RNA, 19 nt, Human
ccaaaaacagacaggugcg

SEQ ID NO: 477064 - RNA, 20 nt, Human
ccaaaguucugggauuaccu

SEQ ID NO: 477065 - RNA, 19 nt, Human
ccacaggagcgggcgagcg

SEQ ID NO: 477066 - RNA, 18 nt, Human
ccccccagaggcagcccc

SEQ ID NO: 477067 - RNA, 22 nt, Human
cccgcagccgccgccgccgccc

SEQ ID NO: 477068 - RNA, 24 nt, Human
cccgcgacuagcggaccccccaga

SEQ ID NO: 477069 - RNA, 21 nt, Human
cccucccggagcccgcacgcu

SEQ ID NO: 477070 - RNA, 21 nt, Human
ccgcagccgccgccgccgccc

SEQ ID NO: 477071 - RNA, 24 nt, Human
ccuccggugaguggcccuagcccu

SEQ ID NO: 477072 - RNA, 18 nt, Human
ccugaccucaagcgaucc

SEQ ID NO: 477073 - RNA, 20 nt, Human
ccugaccucaagcgauccuu

SEQ ID NO: 477074 - RNA, 21 nt, Human
ccugagucacccgcccggccu

SEQ ID NO: 477075 - RNA, 21 nt, Human
ccugcagagccggggcauccu

SEQ ID NO: 477076 - RNA, 21 nt, Human
cgagcgggcgggcgggcgagc

SEQ ID NO: 477077 - RNA, 19 nt, Human
cgcucagaaaaaccacagg

SEQ ID NO: 477078 - RNA, 19 nt, Human
cgggcgggcgggcgggcgg

SEQ ID NO: 477079 - RNA, 22 nt, Human
cgggcgggcgggcgggcggagg

SEQ ID NO: 477080 - RNA, 21 nt, Human
cgggcgggcgggcgggcgggc

SEQ ID NO: 477081 - RNA, 22 nt, Human
cugccccgggcgggcugggccc

SEQ ID NO: 477082 - RNA, 23 nt, Human
gaacuuucccucuggaaggauuu

SEQ ID NO: 477083 - RNA, 22 nt, Human
gacuugacuucaaacaggaagc

SEQ ID NO: 477084 - RNA, 20 nt, Human
gagcgggcgggcgggcgagc

SEQ ID NO: 477085 - RNA, 27 nt, Human
gagcgggcgggcgggcgagcgggcggg

SEQ ID NO: 477086 - RNA, 20 nt, Human
gagcgggcgggcgggcgggc

SEQ ID NO: 477087 - RNA, 26 nt, Human
gcaguggagugaacaagaagcccaga

SEQ ID NO: 477088 - RNA, 21 nt, Human
gcccucuccgggccucucacu

SEQ ID NO: 477089 - RNA, 18 nt, Human
gcgagcgggcgggcgggc

SEQ ID NO: 477090 - RNA, 18 nt, Human
gcgagcgggcgggcgggc

SEQ ID NO: 477091 - RNA, 20 nt, Human
gcgagcgggcgggcgggcgg

SEQ ID NO: 477092 - RNA, 21 nt, Human
gcgagcgggcgggcgggcggg

SEQ ID NO: 477093 - RNA, 21 nt, Human
gcgggcgagcgggcgggcggg

SEQ ID NO: 477094 - RNA, 21 nt, Human
gcgggcgagcgggcgggcggg

SEQ ID NO: 477095 - RNA, 18 nt, Human
gcgggcgggcgggcgggc

SEQ ID NO: 477096 - RNA, 21 nt, Human
gcgggcgggcgggcgggcggg

SEQ ID NO: 477097 - RNA, 21 nt, Human
ggcugggcccucuccgggccu

SEQ ID NO: 477098 - RNA, 22 nt, Human
ggguuucaccauguuggccagg

SEQ ID NO: 477099 - RNA, 24 nt, Human
uaaacaaagaacuuucccucugga

SEQ ID NO: 477100 - RNA, 24 nt, Human
uacaacacuuaaacaaagggacau

SEQ ID NO: 477101 - RNA, 22 nt, Human
uagagacaggguuucaccaugu

SEQ ID NO: 477102 - RNA, 22 nt, Human
uagaggcaguggagugaacaag

SEQ ID NO: 477103 - RNA, 24 nt, Human
uaguagagacaggguuucaccaug

SEQ ID NO: 477104 - RNA, 26 nt, Human
uaguagagacaggguuucaccauguu

SEQ ID NO: 477105 - RNA, 25 nt, Human
uauuuuacuccagcauucccuucca

SEQ ID NO: 477106 - RNA, 18 nt, Human
ucagccucagcauccccu

SEQ ID NO: 477107 - RNA, 24 nt, Human
ucccaaaguucugggauuaccugc

SEQ ID NO: 477108 - RNA, 24 nt, Human
ucgcgcccgcagccgccgccgccg

SEQ ID NO: 477109 - RNA, 18 nt, Human
ugaccucaagcgauccuu

SEQ ID NO: 477110 - RNA, 21 nt, Human
ugaccucaagcgauccuucug

SEQ ID NO: 477111 - RNA, 24 nt, Human
ugaccucaagcgauccuucugucu

SEQ ID NO: 477112 - RNA, 22 nt, Human
ugacuucaaacaggaagcccug

SEQ ID NO: 477113 - RNA, 20 nt, Human
ugacuucaagugcaggcccc

SEQ ID NO: 477114 - RNA, 20 nt, Human
ugacuugacuucaaacagga

SEQ ID NO: 477115 - RNA, 24 nt, Human
ugacuugacuucaaacaggaagcc

SEQ ID NO: 477116 - RNA, 21 nt, Human
ugcaggccccgcccuccuccg

SEQ ID NO: 477117 - RNA, 24 nt, Human
uggcccuagcccuggaggcagcuc

SEQ ID NO: 477118 - RNA, 22 nt, Human
ugggauuaccugccugagucac

SEQ ID NO: 477119 - RNA, 23 nt, Human
ugggccucccaaaguucugggau

SEQ ID NO: 477120 - RNA, 24 nt, Human
uuaguagagacaggguuucaccau

SEQ ID NO: 477121 - RNA, 22 nt, Human
uucaaacaggaagcccugaaga

SEQ ID NO: 477122 - RNA, 19 nt, Human
uuucaccauguuggccagg

SEQ ID NO: 477123 - RNA, 20 nt, Human
uuucaccauguuggccaggu

SEQ ID NO: 477124 - RNA, 24 nt, Human
uuuuuaguagagacaggguuucac

SEQ ID NO: 477125 - RNA, 23 nt, Human
uuuuuuaguagagacaggguuuc

SEQ ID NO: 477126 - RNA, 31 nt, Human
uuuuuuuuuuuuaguagagacaggguuucaa

SEQ ID NO: 477127 - RNA, 24 nt, Human
uuuuuuuuuuuuuuaguagagaca

SEQ ID NO: 477128 - RNA, 29 nt, Human
uuuuuuuuuuuuuuuaguagagacagggg

SEQ ID NO: 477129 - RNA, 20 nt, Human
agaacacaagaaaccuuuga

SEQ ID NO: 477130 - RNA, 23 nt, Human
augauucucucccucuccccacc

SEQ ID NO: 477131 - RNA, 21 nt, Human
cacaagaaaccuuugagacag

SEQ ID NO: 477132 - RNA, 18 nt, Human
caccagaacacaagaaac

SEQ ID NO: 477133 - RNA, 24 nt, Human
cagaacacaagaaaccuuugagac

SEQ ID NO: 477134 - RNA, 25 nt, Human
caugauucucucccucuccccaccc

SEQ ID NO: 477135 - RNA, 20 nt, Human
cgcagcaucauccccaaaga

SEQ ID NO: 477136 - RNA, 18 nt, Human
cucccucuccccaccccc

SEQ ID NO: 477137 - RNA, 21 nt, Human
uacaaaauaacccaauaucca

SEQ ID NO: 477138 - RNA, 22 nt, Human
uacagacaaggacgacccaucc

SEQ ID NO: 477139 - RNA, 25 nt, Human
ucauggaauucaccagaacacaaga

SEQ ID NO: 477140 - RNA, 18 nt, Human
ucucccucuccccacccc

SEQ ID NO: 477141 - RNA, 20 nt, Human
uggaaugcacaauucaugga

SEQ ID NO: 477142 - RNA, 25 nt, Human
uggaauucaccagaacacaagaaac

SEQ ID NO: 477143 - RNA, 19 nt, Human
uucucucccucuccccacc

SEQ ID NO: 477144 - RNA, 21 nt, Human
aaaaagaguggauaccaaaau

SEQ ID NO: 477145 - RNA, 21 nt, Human
aaaaguaaaugaaaggaucaa

SEQ ID NO: 477146 - RNA, 22 nt, Human
aaacaaaaaaauccucauugcu

SEQ ID NO: 477147 - RNA, 24 nt, Human
aaacaugcuaaagaauacauuaaa

SEQ ID NO: 477148 - RNA, 23 nt, Human
aaagaauacugugagaaccugaa

SEQ ID NO: 477149 - RNA, 23 nt, Human
aacagugaccggcacguaacccc

SEQ ID NO: 477150 - RNA, 26 nt, Human
aacauuuuugccugagugucccacua

SEQ ID NO: 477151 - RNA, 25 nt, Human
aacgacaagaauuccucacacaaac

SEQ ID NO: 477152 - RNA, 18 nt, Human
aaggcaacaaucuuccuc

SEQ ID NO: 477153 - RNA, 19 nt, Human
acacucaaacaaaaaaauc

SEQ ID NO: 477154 - RNA, 24 nt, Human
accccacuccuucauuucugcagg

SEQ ID NO: 477155 - RNA, 22 nt, Human
acuaaauuauuuuucucuggcu

SEQ ID NO: 477156 - RNA, 21 nt, Human
agcuucaacauuccuuuggag

SEQ ID NO: 477157 - RNA, 19 nt, Human
aggaagcuccgcaccuauc

SEQ ID NO: 477158 - RNA, 23 nt, Human
aggacuauggcccacuucaacac

SEQ ID NO: 477159 - RNA, 23 nt, Human
augcuaaagaauacauuaaaaca

SEQ ID NO: 477160 - RNA, 21 nt, Human
caaaaguaaaugaaaggauca

SEQ ID NO: 477161 - RNA, 19 nt, Human
caaaauagcuuuuaggaag

SEQ ID NO: 477162 - RNA, 24 nt, Human
caaacaugcguucucccuucuucc

SEQ ID NO: 477163 - RNA, 20 nt, Human
caaacgagagauucgacgua

SEQ ID NO: 477164 - RNA, 22 nt, Human
caacaugucaaagaaagaccaa

SEQ ID NO: 477165 - RNA, 18 nt, Human
caagucccaggucaaaac

SEQ ID NO: 477166 - RNA, 22 nt, Human
cacauucaagaaugggguccca

SEQ ID NO: 477167 - RNA, 19 nt, Human
caccccuccugccucguuc

SEQ ID NO: 477168 - RNA, 23 nt, Human
cacuaaaccgcuuucacagcccu

SEQ ID NO: 477169 - RNA, 23 nt, Human
caguagaguaggguucagcuaug

SEQ ID NO: 477170 - RNA, 22 nt, Human
ccccuccugccucguucaggaa

SEQ ID NO: 477171 - RNA, 26 nt, Human
ccccugaaccucgcaccccuccugcc

SEQ ID NO: 477172 - RNA, 20 nt, Human
cccugaaccucgcaccccuc

SEQ ID NO: 477173 - RNA, 21 nt, Human
cccugaaccucgcaccccucc

SEQ ID NO: 477174 - RNA, 21 nt, Human
ccucaaugccaaauaucuacu

SEQ ID NO: 477175 - RNA, 20 nt, Human
ccucccuaacgacuucggcu

SEQ ID NO: 477176 - RNA, 23 nt, Human
ccuguccugcagcgauugugggg

SEQ ID NO: 477177 - RNA, 22 nt, Human
ccuugggcgucacaagucccag

SEQ ID NO: 477178 - RNA, 19 nt, Human
cgacuucggcugcccgggc

SEQ ID NO: 477179 - RNA, 24 nt, Human
cggcugcccgggcccugccccuga

SEQ ID NO: 477180 - RNA, 22 nt, Human
cucccuucuucccacauucaag

SEQ ID NO: 477181 - RNA, 18 nt, Human
cucgcaccccuccugccu

SEQ ID NO: 477182 - RNA, 23 nt, Human
cugccccugaaccucgcaccccu

SEQ ID NO: 477183 - RNA, 21 nt, Human
cuggaguuuacuuucuuccug

SEQ ID NO: 477184 - RNA, 22 nt, Human
cuucaacacucaaacaaaaaaa

SEQ ID NO: 477185 - RNA, 18 nt, Human
gaauuacaacaacuggaa

SEQ ID NO: 477186 - RNA, 23 nt, Human
gaguagccagaauaagguggcau

SEQ ID NO: 477187 - RNA, 25 nt, Human
gauuuuauuccagaaaggagaaagu

SEQ ID NO: 477188 - RNA, 19 nt, Human
gggcgucacaagucccagg

SEQ ID NO: 477189 - RNA, 23 nt, Human
guaaugaugacagaguuuacaua

SEQ ID NO: 477190 - RNA, 18 nt, Human
gucaaaacgucuccauuc

SEQ ID NO: 477191 - RNA, 21 nt, Human
gucacaagucccaggucaaaa

SEQ ID NO: 477192 - RNA, 21 nt, Human
gucauccuggggagggggagc

SEQ ID NO: 477193 - RNA, 18 nt, Human
uaaaaagaguggauacca

SEQ ID NO: 477194 - RNA, 21 nt, Human
uaaaaguuauaucaaaaacau

SEQ ID NO: 477195 - RNA, 22 nt, Human
uaaaauaaccccacuccuucau

SEQ ID NO: 477196 - RNA, 22 nt, Human
uaaaccgcuuucacagcccucg

SEQ ID NO: 477197 - RNA, 18 nt, Human
uaaauugcugaagagagc

SEQ ID NO: 477198 - RNA, 19 nt, Human
uagcuuuuaggaagacgac

SEQ ID NO: 477199 - RNA, 20 nt, Human
uaguagcuaagagcacgggc

SEQ ID NO: 477200 - RNA, 22 nt, Human
uauauccaugacaaaauugaua

SEQ ID NO: 477201 - RNA, 23 nt, Human
uauaugguagacacgaaacacau

SEQ ID NO: 477202 - RNA, 26 nt, Human
uauuacaaagguuuuagaagaugagg

SEQ ID NO: 477203 - RNA, 21 nt, Human
ucaaaaacaugcuaaagaaua

SEQ ID NO: 477204 - RNA, 18 nt, Human
ucaaaacgucuccauucu

SEQ ID NO: 477205 - RNA, 19 nt, Human
ucaaccaguuauauccaug

SEQ ID NO: 477206 - RNA, 24 nt, Human
ucaagaauggggucccaaacgaga

SEQ ID NO: 477207 - RNA, 18 nt, Human
ucagugacgcgauaugug

SEQ ID NO: 477208 - RNA, 19 nt, Human
ucccaggucaaaacgucuc

SEQ ID NO: 477209 - RNA, 19 nt, Human
ucccuaacgacuucggcug

SEQ ID NO: 477210 - RNA, 20 nt, Human
uccuucauuucugcaggaga

SEQ ID NO: 477211 - RNA, 22 nt, Human
ucgcaccccuccugccucguuc

SEQ ID NO: 477212 - RNA, 27 nt, Human
ucgcaccccuccugccucguucaggaa

SEQ ID NO: 477213 - RNA, 21 nt, Human
ucuacuaagaauuuaaaaaag

SEQ ID NO: 477214 - RNA, 22 nt, Human
ucucccuucuucccacauucaa

SEQ ID NO: 477215 - RNA, 24 nt, Human
ucucuaaauugcauuuacuggccu

SEQ ID NO: 477216 - RNA, 19 nt, Human
ucugcaaacauaaaacugc

SEQ ID NO: 477217 - RNA, 20 nt, Human
ucugcaaacauaaaacugcu

SEQ ID NO: 477218 - RNA, 21 nt, Human
ucugcaaacauaaaacugcuu

SEQ ID NO: 477219 - RNA, 19 nt, Human
ugaaacuuucuauuuccaa

SEQ ID NO: 477220 - RNA, 21 nt, Human
ugacaugaagugugucauccu

SEQ ID NO: 477221 - RNA, 24 nt, Human
ugagaaccugaauacuucaaucaa

SEQ ID NO: 477222 - RNA, 24 nt, Human
ugagcaaacaugcguucucccuuc

SEQ ID NO: 477223 - RNA, 19 nt, Human
ugauaacauuuugcaacau

SEQ ID NO: 477224 - RNA, 21 nt, Human
ugccccugaaccucgcacccc

SEQ ID NO: 477225 - RNA, 23 nt, Human
ugcuaaagaauacauuaaaacaa

SEQ ID NO: 477226 - RNA, 28 nt, Human
ugcuaaagaauacauuaaaacaaacaaa

SEQ ID NO: 477227 - RNA, 23 nt, Human
ugggcugcaaauuauauccauga

SEQ ID NO: 477228 - RNA, 19 nt, Human
uggggaagucaggucaccu

SEQ ID NO: 477229 - RNA, 21 nt, Human
uuaauagucucuuaaauugcu

SEQ ID NO: 477230 - RNA, 18 nt, Human
uucaacacucaaacaaaa

SEQ ID NO: 477231 - RNA, 19 nt, Human
uucucuggcuuaucaacca

SEQ ID NO: 477232 - RNA, 24 nt, Human
uugguggggugaugguuuguaucc

SEQ ID NO: 477233 - RNA, 19 nt, Human
uuugccugagugucccacu

SEQ ID NO: 477234 - RNA, 19 nt, Human
aaagccuuuuguccuucua

SEQ ID NO: 477235 - RNA, 24 nt, Human
aaccucaaggauuuuguuugauac

SEQ ID NO: 477236 - RNA, 24 nt, Human
aaccucaaggauuuuguuugauac

SEQ ID NO: 477237 - RNA, 21 nt, Human
aagagaacugaaaguuggaaa

SEQ ID NO: 477238 - RNA, 21 nt, Human
aagagaacugaaaguuggaaa

SEQ ID NO: 477239 - RNA, 24 nt, Human
aagaguaaggucaucccagugugg

SEQ ID NO: 477240 - RNA, 24 nt, Human
aagaguaaggucaucccagugugg

SEQ ID NO: 477241 - RNA, 23 nt, Human
aagccuuuuggggcaggaagggg

SEQ ID NO: 477242 - RNA, 23 nt, Human
aagccuuuuggggcaggaagggg

SEQ ID NO: 477243 - RNA, 23 nt, Human
aagccuuuuguccuucuaggccc

SEQ ID NO: 477244 - RNA, 23 nt, Human
aagccuuuuguccuucuaggccc

SEQ ID NO: 477245 - RNA, 18 nt, Human
aagcuaacuccugauccu

SEQ ID NO: 477246 - RNA, 18 nt, Human
aaggauuuugcucuuugc

SEQ ID NO: 477247 - RNA, 18 nt, Human
aaggauuuugcucuuugc

SEQ ID NO: 477248 - RNA, 22 nt, Human
aaggauuuugcucuuugcucug

SEQ ID NO: 477249 - RNA, 22 nt, Human
aaggauuuugcucuuugcucug

SEQ ID NO: 477250 - RNA, 18 nt, Human
aaggugguagccacagug

SEQ ID NO: 477251 - RNA, 18 nt, Human
aaggugguagccacagug

SEQ ID NO: 477252 - RNA, 18 nt, Human
acccagcaccccauagca

SEQ ID NO: 477253 - RNA, 19 nt, Human
accccacaccugucaccac

SEQ ID NO: 477254 - RNA, 19 nt, Human
accccacaccugucaccac

SEQ ID NO: 477255 - RNA, 20 nt, Human
acuaaaaugcagguuuccag

SEQ ID NO: 477256 - RNA, 20 nt, Human
acuaaaaugcagguuuccag

SEQ ID NO: 477257 - RNA, 26 nt, Human
agaaacugguaaagcauucgggggag

SEQ ID NO: 477258 - RNA, 26 nt, Human
agaaacugguaaagcauucgggggag

SEQ ID NO: 477259 - RNA, 27 nt, Human
agacaggcgagacuguggaaggccagg

SEQ ID NO: 477260 - RNA, 27 nt, Human
agacaggcgagacuguggaaggccagg

SEQ ID NO: 477261 - RNA, 20 nt, Human
agacuuggaccuagcugaua

SEQ ID NO: 477262 - RNA, 20 nt, Human
agacuuggaccuagcugaua

SEQ ID NO: 477263 - RNA, 23 nt, Human
agaguaaggucaucccagugugg

SEQ ID NO: 477264 - RNA, 23 nt, Human
agaguaaggucaucccagugugg

SEQ ID NO: 477265 - RNA, 21 nt, Human
agcagcugugguuuugccuuu

SEQ ID NO: 477266 - RNA, 18 nt, Human
agcauguuggagacugca

SEQ ID NO: 477267 - RNA, 20 nt, Human
agccaggcagccuccagucc

SEQ ID NO: 477268 - RNA, 20 nt, Human
agccaggcagccuccagucc

SEQ ID NO: 477269 - RNA, 22 nt, Human
agccaggcagccuccagucccc

SEQ ID NO: 477270 - RNA, 22 nt, Human
agccaggcagccuccagucccc

SEQ ID NO: 477271 - RNA, 24 nt, Human
agccaggcagccuccagucccccu

SEQ ID NO: 477272 - RNA, 24 nt, Human
agccaggcagccuccagucccccu

SEQ ID NO: 477273 - RNA, 22 nt, Human
agccagguccaccaaggccaga

SEQ ID NO: 477274 - RNA, 22 nt, Human
agccagguccaccaaggccaga

SEQ ID NO: 477275 - RNA, 19 nt, Human
agccuccagucccccuccu

SEQ ID NO: 477276 - RNA, 22 nt, Human
agccuccagucccccuccuuuc

SEQ ID NO: 477277 - RNA, 22 nt, Human
agcugagggcaaaagccuccua

SEQ ID NO: 477278 - RNA, 22 nt, Human
agcugagggcaaaagccuccua

SEQ ID NO: 477279 - RNA, 22 nt, Human
aggaagaaggaguccauuuuga

SEQ ID NO: 477280 - RNA, 22 nt, Human
aggaagaaggaguccauuuuga

SEQ ID NO: 477281 - RNA, 19 nt, Human
aggagccagcugugccuca

SEQ ID NO: 477282 - RNA, 18 nt, Human
aggcaggaagggaaggug

SEQ ID NO: 477283 - RNA, 18 nt, Human
aggcaggaagggaaggug

SEQ ID NO: 477284 - RNA, 23 nt, Human
aggccagagacagacaggcgaga

SEQ ID NO: 477285 - RNA, 23 nt, Human
aggccagagacagacaggcgaga

SEQ ID NO: 477286 - RNA, 21 nt, Human
agggaaaccuuuuguuugcgg

SEQ ID NO: 477287 - RNA, 21 nt, Human
agggaaaccuuuuguuugcgg

SEQ ID NO: 477288 - RNA, 19 nt, Human
agggcugggcccuucugcc

SEQ ID NO: 477289 - RNA, 19 nt, Human
agggcugggcccuucugcc

SEQ ID NO: 477290 - RNA, 19 nt, Human
aguaguuugaagaaagccu

SEQ ID NO: 477291 - RNA, 18 nt, Human
aucuccuacccuucucuu

SEQ ID NO: 477292 - RNA, 18 nt, Human
aucuccuacccuucucuu

SEQ ID NO: 477293 - RNA, 22 nt, Human
auggaggacaagugggagccca

SEQ ID NO: 477294 - RNA, 22 nt, Human
auggaggacaagugggagccca

SEQ ID NO: 477295 - RNA, 24 nt, Human
auggaggugguccagcacacccag

SEQ ID NO: 477296 - RNA, 23 nt, Human
augguguuucuuguggauuuucu

SEQ ID NO: 477297 - RNA, 18 nt, Human
cacagagggaaaccuuuu

SEQ ID NO: 477298 - RNA, 18 nt, Human
cacagagggaaaccuuuu

SEQ ID NO: 477299 - RNA, 21 nt, Human
caccaccauccugaccaucug

SEQ ID NO: 477300 - RNA, 21 nt, Human
caccaccauccugaccaucug

SEQ ID NO: 477301 - RNA, 19 nt, Human
cacccagcaccccauagca

SEQ ID NO: 477302 - RNA, 18 nt, Human
caccugucaccaccaucc

SEQ ID NO: 477303 - RNA, 18 nt, Human
caccugucaccaccaucc

SEQ ID NO: 477304 - RNA, 19 nt, Human
cagaaggaaaagaguaagg

SEQ ID NO: 477305 - RNA, 20 nt, Human
cagaaggaaaagaguaaggu

SEQ ID NO: 477306 - RNA, 18 nt, Human
cagcagcugagaacuuac

SEQ ID NO: 477307 - RNA, 18 nt, Human
cagcagcugagaacuuac

SEQ ID NO: 477308 - RNA, 19 nt, Human
cagcaucagaauccccugg

SEQ ID NO: 477309 - RNA, 19 nt, Human
cagcaucagaauccccugg

SEQ ID NO: 477310 - RNA, 20 nt, Human
cagccuccagucccccuccu

SEQ ID NO: 477311 - RNA, 18 nt, Human
caggaagggaagguggua

SEQ ID NO: 477312 - RNA, 20 nt, Human
cauccugcccaggccacaaa

SEQ ID NO: 477313 - RNA, 20 nt, Human
cauccugcccaggccacaaa

SEQ ID NO: 477314 - RNA, 23 nt, Human
caugcuggaggcuuccgugcaga

SEQ ID NO: 477315 - RNA, 20 nt, Human
cauuucauuugugccagccu

SEQ ID NO: 477316 - RNA, 19 nt, Human
ccacaggguuccuggccau

SEQ ID NO: 477317 - RNA, 19 nt, Human
ccacaggguuccuggccau

SEQ ID NO: 477318 - RNA, 21 nt, Human
ccacucacucagaguguuugg

SEQ ID NO: 477319 - RNA, 21 nt, Human
ccacucacucagaguguuugg

SEQ ID NO: 477320 - RNA, 18 nt, Human
ccagaguaaaaacggggc

SEQ ID NO: 477321 - RNA, 23 nt, Human
cccaagcugcugugguuuugccu

SEQ ID NO: 477322 - RNA, 19 nt, Human
cccacaccugucaccacca

SEQ ID NO: 477323 - RNA, 19 nt, Human
cccacaccugucaccacca

SEQ ID NO: 477324 - RNA, 19 nt, Human
cccauggcugagggacagc

SEQ ID NO: 477325 - RNA, 18 nt, Human
cccccaguuggaggagga

SEQ ID NO: 477326 - RNA, 18 nt, Human
cccccaguuggaggagga

SEQ ID NO: 477327 - RNA, 21 nt, Human
cccccaguuggaggaggaccc

SEQ ID NO: 477328 - RNA, 21 nt, Human
cccccaguuggaggaggaccc

SEQ ID NO: 477329 - RNA, 18 nt, Human
ccuccagucccccuccuu

SEQ ID NO: 477330 - RNA, 18 nt, Human
ccuccagucccccuccuu

SEQ ID NO: 477331 - RNA, 21 nt, Human
ccuccuagggagggagccagg

SEQ ID NO: 477332 - RNA, 21 nt, Human
ccuccuagggagggagccagg

SEQ ID NO: 477333 - RNA, 21 nt, Human
ccucuggucccagaaggagcu

SEQ ID NO: 477334 - RNA, 21 nt, Human
ccucuggucccagaaggagcu

SEQ ID NO: 477335 - RNA, 20 nt, Human
ccugcuaucagaagcuuaag

SEQ ID NO: 477336 - RNA, 20 nt, Human
ccugcuaucagaagcuuaag

SEQ ID NO: 477337 - RNA, 21 nt, Human
ccugguaaaugcucagcuggc

SEQ ID NO: 477338 - RNA, 21 nt, Human
ccugguaagugcucagcuggc

SEQ ID NO: 477339 - RNA, 22 nt, Human
ccuuuuguccuucuaggccccu

SEQ ID NO: 477340 - RNA, 22 nt, Human
ccuuuuguccuucuaggccccu

SEQ ID NO: 477341 - RNA, 23 nt, Human
cggggagaaagagggcucuaacc

SEQ ID NO: 477342 - RNA, 23 nt, Human
cggggagaaagagggcucuaacc

SEQ ID NO: 477343 - RNA, 24 nt, Human
cuaaagagaauguccagagcuuau

SEQ ID NO: 477344 - RNA, 22 nt, Human
cuaaguucucuucccuuucagc

SEQ ID NO: 477345 - RNA, 20 nt, Human
cuauauuuuaaacaagcauc

SEQ ID NO: 477346 - RNA, 20 nt, Human
cuauauuuuaaacaagcauc

SEQ ID NO: 477347 - RNA, 19 nt, Human
cucacacauuucucagccc

SEQ ID NO: 477348 - RNA, 19 nt, Human
cucacacauuucucagccc

SEQ ID NO: 477349 - RNA, 19 nt, Human
cucacauguaaacugagau

SEQ ID NO: 477350 - RNA, 18 nt, Human
cuccugauccuauugagg

SEQ ID NO: 477351 - RNA, 24 nt, Human
cucgcuggagccaggcagccucca

SEQ ID NO: 477352 - RNA, 24 nt, Human
cucgcuggagccaggcagccucca

SEQ ID NO: 477353 - RNA, 19 nt, Human
cucugcugcaggcuaaccu

SEQ ID NO: 477354 - RNA, 21 nt, Human
cugaaaguuggaaaaggcaca

SEQ ID NO: 477355 - RNA, 21 nt, Human
cugaaaguuggaaaaggcaca

SEQ ID NO: 477356 - RNA, 19 nt, Human
cugcugcaggcuaaccuug

SEQ ID NO: 477357 - RNA, 18 nt, Human
cugcugcggcucugcugc

SEQ ID NO: 477358 - RNA, 18 nt, Human
cugggcccuucugccaag

SEQ ID NO: 477359 - RNA, 18 nt, Human
cugggcccuucugccaag

SEQ ID NO: 477360 - RNA, 18 nt, Human
cugggcccuucugccaag

SEQ ID NO: 477361 - RNA, 19 nt, Human
cugggcccuucugccaagg

SEQ ID NO: 477362 - RNA, 19 nt, Human
cugggcccuucugccaagg

SEQ ID NO: 477363 - RNA, 19 nt, Human
gaagaggugaugagugcag

SEQ ID NO: 477364 - RNA, 25 nt, Human
gacccaauuucagaaggaaaagagu

SEQ ID NO: 477365 - RNA, 25 nt, Human
gacccaauuucagaaggaaaagagu

SEQ ID NO: 477366 - RNA, 20 nt, Human
gagaugguggugaugaugag

SEQ ID NO: 477367 - RNA, 20 nt, Human
gagaugguggugaugaugag

SEQ ID NO: 477368 - RNA, 21 nt, Human
gagggcucuaaccuuuggucc

SEQ ID NO: 477369 - RNA, 21 nt, Human
gagggcucuaaccuuuggucc

SEQ ID NO: 477370 - RNA, 20 nt, Human
gaguaaaaacggggccuuua

SEQ ID NO: 477371 - RNA, 19 nt, Human
gaugaugagggccaaggaa

SEQ ID NO: 477372 - RNA, 21 nt, Human
gcaucagaauccccuggaaca

SEQ ID NO: 477373 - RNA, 21 nt, Human
gcaucagaauccccuggaaca

SEQ ID NO: 477374 - RNA, 20 nt, Human
gccuagggacccauuguggg

SEQ ID NO: 477375 - RNA, 20 nt, Human
gccuagggacccauuguggg

SEQ ID NO: 477376 - RNA, 21 nt, Human
gcuccuggauuucuuuuucuc

SEQ ID NO: 477377 - RNA, 21 nt, Human
gcuccuggauuucuuuuucuc

SEQ ID NO: 477378 - RNA, 18 nt, Human
ggaaaccuuuuguuugcg

SEQ ID NO: 477379 - RNA, 18 nt, Human
ggaaaccuuuuguuugcg

SEQ ID NO: 477380 - RNA, 23 nt, Human
ggaaggugguagccacaguggga

SEQ ID NO: 477381 - RNA, 23 nt, Human
ggaaggugguagccacaguggga

SEQ ID NO: 477382 - RNA, 18 nt, Human
ggagaaagagggcucuaa

SEQ ID NO: 477383 - RNA, 18 nt, Human
ggagaaagagggcucuaa

SEQ ID NO: 477384 - RNA, 23 nt, Human
ggaguccauuuugauaguccugc

SEQ ID NO: 477385 - RNA, 23 nt, Human
ggaguccauuuugauaguccugc

SEQ ID NO: 477386 - RNA, 18 nt, Human
ggcaggaaggggcaaagu

SEQ ID NO: 477387 - RNA, 18 nt, Human
ggcaggaaggggcaaagu

SEQ ID NO: 477388 - RNA, 18 nt, Human
ggccagagacagacaggc

SEQ ID NO: 477389 - RNA, 18 nt, Human
ggccagagacagacaggc

SEQ ID NO: 477390 - RNA, 24 nt, Human
ggcccugcucccccagauaccuua

SEQ ID NO: 477391 - RNA, 19 nt, Human
ggcucuggccugagucggg

SEQ ID NO: 477392 - RNA, 19 nt, Human
ggcucuggccugagucggg

SEQ ID NO: 477393 - RNA, 24 nt, Human
gggacccauuguggggagaagguc

SEQ ID NO: 477394 - RNA, 24 nt, Human
gggacccauuguggggagaagguc

SEQ ID NO: 477395 - RNA, 19 nt, Human
gggcguguggccgaaggag

SEQ ID NO: 477396 - RNA, 21 nt, Human
ggguaugugaaagccuuuugg

SEQ ID NO: 477397 - RNA, 21 nt, Human
ggguaugugaaagccuuuugg

SEQ ID NO: 477398 - RNA, 18 nt, Human
gguagucguggaauucag

SEQ ID NO: 477399 - RNA, 18 nt, Human
gguagucguggaauucag

SEQ ID NO: 477400 - RNA, 20 nt, Human
gguaugugaaagccuuuugg

SEQ ID NO: 477401 - RNA, 18 nt, Human
ggugaaggagccuggccu

SEQ ID NO: 477402 - RNA, 21 nt, Human
ggugauggaggacaaguggga

SEQ ID NO: 477403 - RNA, 22 nt, Human
gguggugaugaugagggccaag

SEQ ID NO: 477404 - RNA, 22 nt, Human
gguggugaugaugagggccaag

SEQ ID NO: 477405 - RNA, 19 nt, Human
guccagcacacccagcacc

SEQ ID NO: 477406 - RNA, 20 nt, Human
gucucggguguccccaaagg

SEQ ID NO: 477407 - RNA, 20 nt, Human
gucucggguguccccaaagg

SEQ ID NO: 477408 - RNA, 23 nt, Human
guggcuguugcugcugcggcucu

SEQ ID NO: 477409 - RNA, 22 nt, Human
guggugccaucauuagggcgug

SEQ ID NO: 477410 - RNA, 20 nt, Human
guguguguauguuugugugu

SEQ ID NO: 477411 - RNA, 20 nt, Human
guguguguauguuugugugu

SEQ ID NO: 477412 - RNA, 20 nt, Human
guguuaaaguuuggucugca

SEQ ID NO: 477413 - RNA, 18 nt, Human
guuaaaguuuggucugca

SEQ ID NO: 477414 - RNA, 18 nt, Human
uaaccugccugccaaaag

SEQ ID NO: 477415 - RNA, 18 nt, Human
uaaccugccugccaaaag

SEQ ID NO: 477416 - RNA, 24 nt, Human
uaagcuaacuccugauccuauuga

SEQ ID NO: 477417 - RNA, 23 nt, Human
uaaguucucuucccuuucagccc

SEQ ID NO: 477418 - RNA, 18 nt, Human
uaaugggcccacuaucac

SEQ ID NO: 477419 - RNA, 18 nt, Human
uaaugggcccacuaucac

SEQ ID NO: 477420 - RNA, 18 nt, Human
uaccagugccugcuauca

SEQ ID NO: 477421 - RNA, 19 nt, Human
uaccuuaguucagcauauu

SEQ ID NO: 477422 - RNA, 19 nt, Human
uaccuuaguucagcauauu

SEQ ID NO: 477423 - RNA, 18 nt, Human
uagaagagagaggacggc

SEQ ID NO: 477424 - RNA, 19 nt, Human
uagggcugggcccuucugc

SEQ ID NO: 477425 - RNA, 19 nt, Human
uagggcugggcccuucugc

SEQ ID NO: 477426 - RNA, 18 nt, Human
uagucguggaauucaggc

SEQ ID NO: 477427 - RNA, 22 nt, Human
uaucuggaguccuccuuugaaa

SEQ ID NO: 477428 - RNA, 24 nt, Human
uaucuguucuuucuccuuaucucc

SEQ ID NO: 477429 - RNA, 24 nt, Human
uaucuguucuuucuccuuaucucc

SEQ ID NO: 477430 - RNA, 21 nt, Human
ucaaagggcccagaguccaaa

SEQ ID NO: 477431 - RNA, 21 nt, Human
ucaaagggcccagaguccaaa

SEQ ID NO: 477432 - RNA, 20 nt, Human
ucaaaucuaaguucucuucc

SEQ ID NO: 477433 - RNA, 22 nt, Human
ucaccaccauccugaccaucug

SEQ ID NO: 477434 - RNA, 22 nt, Human
ucaccaccauccugaccaucug

SEQ ID NO: 477435 - RNA, 19 nt, Human
ucaccagcaucagaauccc

SEQ ID NO: 477436 - RNA, 19 nt, Human
ucaccagcaucagaauccc

SEQ ID NO: 477437 - RNA, 18 nt, Human
ucacuccauccucuuugg

SEQ ID NO: 477438 - RNA, 19 nt, Human
ucagucccauggagguggu

SEQ ID NO: 477439 - RNA, 19 nt, Human
uccacauaaggcuaaaggu

SEQ ID NO: 477440 - RNA, 19 nt, Human
uccacauaaggcuaaaggu

SEQ ID NO: 477441 - RNA, 20 nt, Human
ucccacccucuggucccaga

SEQ ID NO: 477442 - RNA, 20 nt, Human
ucccacccucuggucccaga

SEQ ID NO: 477443 - RNA, 21 nt, Human
ucccacccucuggucccagaa

SEQ ID NO: 477444 - RNA, 21 nt, Human
ucccacccucuggucccagaa

SEQ ID NO: 477445 - RNA, 20 nt, Human
ucccagugugguuauuuucc

SEQ ID NO: 477446 - RNA, 20 nt, Human
ucccagugugguuauuuucc

SEQ ID NO: 477447 - RNA, 21 nt, Human
ucccauggcugagggacagcc

SEQ ID NO: 477448 - RNA, 21 nt, Human
ucccgggggccacuccaaacc

SEQ ID NO: 477449 - RNA, 21 nt, Human
ucccgggggccacuccaaacc

SEQ ID NO: 477450 - RNA, 18 nt, Human
ucccucugaccagccucc

SEQ ID NO: 477451 - RNA, 18 nt, Human
ucccucugaccagccucc

SEQ ID NO: 477452 - RNA, 26 nt, Human
uccuugugauugccugccgguuccac

SEQ ID NO: 477453 - RNA, 20 nt, Human
ucggggagaaagagggcucu

SEQ ID NO: 477454 - RNA, 20 nt, Human
ucggggagaaagagggcucu

SEQ ID NO: 477455 - RNA, 18 nt, Human
ucucacuccauccucuuu

SEQ ID NO: 477456 - RNA, 22 nt, Human
ucucccccacagagggaaaccu

SEQ ID NO: 477457 - RNA, 22 nt, Human
ucucccccacagagggaaaccu

SEQ ID NO: 477458 - RNA, 20 nt, Human
ucuccuacccuucucuuuaa

SEQ ID NO: 477459 - RNA, 20 nt, Human
ucuccuacccuucucuuuaa

SEQ ID NO: 477460 - RNA, 18 nt, Human
ucucucacuccauccucu

SEQ ID NO: 477461 - RNA, 22 nt, Human
ucucucacuccauccucuuugg

SEQ ID NO: 477462 - RNA, 22 nt, Human
ucuguucuuucuccuuaucucc

SEQ ID NO: 477463 - RNA, 22 nt, Human
ucuguucuuucuccuuaucucc

SEQ ID NO: 477464 - RNA, 23 nt, Human
ucuguucuuucuccuuaucuccu

SEQ ID NO: 477465 - RNA, 23 nt, Human
ucuguucuuucuccuuaucuccu

SEQ ID NO: 477466 - RNA, 20 nt, Human
ucuucggggagaaagagggc

SEQ ID NO: 477467 - RNA, 20 nt, Human
ucuucggggagaaagagggc

SEQ ID NO: 477468 - RNA, 21 nt, Human
ucuuuggggagucugggaugc

SEQ ID NO: 477469 - RNA, 21 nt, Human
ugaaagccuuuuggggcagga

SEQ ID NO: 477470 - RNA, 21 nt, Human
ugaaagccuuuuggggcagga

SEQ ID NO: 477471 - RNA, 18 nt, Human
ugaaaguuggaaaaggca

SEQ ID NO: 477472 - RNA, 18 nt, Human
ugaaaguuggaaaaggca

SEQ ID NO: 477473 - RNA, 23 nt, Human
ugaccaucugcaucagaauaagc

SEQ ID NO: 477474 - RNA, 23 nt, Human
ugaccaucugcaucagaauaagc

SEQ ID NO: 477475 - RNA, 22 nt, Human
ugagaccuauaaugauuugcca

SEQ ID NO: 477476 - RNA, 22 nt, Human
ugagaccuauaaugauuugcca

SEQ ID NO: 477477 - RNA, 18 nt, Human
ugagaggaggccaggaug

SEQ ID NO: 477478 - RNA, 27 nt, Human
ugagcccuagacaggaugaggagccag

SEQ ID NO: 477479 - RNA, 24 nt, Human
ugagcgcaggccagcagcugagaa

SEQ ID NO: 477480 - RNA, 18 nt, Human
ugagggacaucaagggca

SEQ ID NO: 477481 - RNA, 18 nt, Human
ugagggccaaggaaaacc

SEQ ID NO: 477482 - RNA, 18 nt, Human
ugagggccaaggaaaacc

SEQ ID NO: 477483 - RNA, 21 nt, Human
ugagggccaaggaaaaccaca

SEQ ID NO: 477484 - RNA, 21 nt, Human
ugagggccaaggaaaaccaca

SEQ ID NO: 477485 - RNA, 24 nt, Human
ugagugcaggccagcagcugagaa

SEQ ID NO: 477486 - RNA, 25 nt, Human
ugauugccugcaggaguuuugaaau

SEQ ID NO: 477487 - RNA, 23 nt, Human
ugcaagaggagggaugauugaag

SEQ ID NO: 477488 - RNA, 21 nt, Human
ugcaccaggaacuguauucaa

SEQ ID NO: 477489 - RNA, 21 nt, Human
ugcaccaggaacuguauucaa

SEQ ID NO: 477490 - RNA, 23 nt, Human
ugcaccaggaacuguauucaagc

SEQ ID NO: 477491 - RNA, 23 nt, Human
ugcaccaggaacuguauucaagc

SEQ ID NO: 477492 - RNA, 22 nt, Human
ugccagggugucuuggcucugg

SEQ ID NO: 477493 - RNA, 22 nt, Human
ugccagggugucuuggcucugg

SEQ ID NO: 477494 - RNA, 19 nt, Human
ugccuagggacccauugug

SEQ ID NO: 477495 - RNA, 19 nt, Human
ugccuagggacccauugug

SEQ ID NO: 477496 - RNA, 21 nt, Human
ugcugugguuuugccuuugau

SEQ ID NO: 477497 - RNA, 24 nt, Human
uggaguggaauucaagagccuaua

SEQ ID NO: 477498 - RNA, 25 nt, Human
uggaguggaauucaagagccuauau

SEQ ID NO: 477499 - RNA, 21 nt, Human
uggcucuggccugagucgggu

SEQ ID NO: 477500 - RNA, 21 nt, Human
uggcucuggccugagucgggu

SEQ ID NO: 477501 - RNA, 19 nt, Human
uggcugagggacagccagg

SEQ ID NO: 477502 - RNA, 22 nt, Human
uggcugagggacagccaggaug

SEQ ID NO: 477503 - RNA, 18 nt, Human
ugggagaugguggugaug

SEQ ID NO: 477504 - RNA, 18 nt, Human
ugggagaugguggugaug

SEQ ID NO: 477505 - RNA, 18 nt, Human
ugggaugcucucagagag

SEQ ID NO: 477506 - RNA, 21 nt, Human
uggggaguugcuaccaaugca

SEQ ID NO: 477507 - RNA, 21 nt, Human
uggggaguugcuaccaaugca

SEQ ID NO: 477508 - RNA, 24 nt, Human
uggggcaggaaggggcaaagugau

SEQ ID NO: 477509 - RNA, 24 nt, Human
uggggcaggaaggggcaaagugau

SEQ ID NO: 477510 - RNA, 24 nt, Human
uggguaaaagggcuuuucacaguu

SEQ ID NO: 477511 - RNA, 24 nt, Human
uggguaaaagggcuuuucacaguu

SEQ ID NO: 477512 - RNA, 21 nt, Human
ugguaccagaggcaaacuucc

SEQ ID NO: 477513 - RNA, 19 nt, Human
uggucugcaccucguuggu

SEQ ID NO: 477514 - RNA, 19 nt, Human
uggucugcaccucguuggu

SEQ ID NO: 477515 - RNA, 25 nt, Human
ugguguguguauguuugugugugug

SEQ ID NO: 477516 - RNA, 25 nt, Human
ugguguguguauguuugugugugug

SEQ ID NO: 477517 - RNA, 19 nt, Human
uguacuuuucuaaagagaa

SEQ ID NO: 477518 - RNA, 19 nt, Human
uguacuuuucuaaagagaa

SEQ ID NO: 477519 - RNA, 18 nt, Human
ugugauugccugcaggag

SEQ ID NO: 477520 - RNA, 18 nt, Human
ugugauugccugcaggag

SEQ ID NO: 477521 - RNA, 18 nt, Human
uguggaaggccagggaga

SEQ ID NO: 477522 - RNA, 18 nt, Human
uguggaaggccagggaga

SEQ ID NO: 477523 - RNA, 23 nt, Human
ugugguuauuuucccagccauca

SEQ ID NO: 477524 - RNA, 23 nt, Human
ugugguuauuuucccagccauca

SEQ ID NO: 477525 - RNA, 18 nt, Human
uguguauguuugugugug

SEQ ID NO: 477526 - RNA, 18 nt, Human
uguguauguuugugugug

SEQ ID NO: 477527 - RNA, 21 nt, Human
uguguauguuugugugugugu

SEQ ID NO: 477528 - RNA, 21 nt, Human
uguguauguuugugugugugu

SEQ ID NO: 477529 - RNA, 21 nt, Human
uguguguauguuugugugugu

SEQ ID NO: 477530 - RNA, 21 nt, Human
uguguguauguuugugugugu

SEQ ID NO: 477531 - RNA, 22 nt, Human
uguguguauguuugugugugug

SEQ ID NO: 477532 - RNA, 19 nt, Human
uguguguguguugggugaa

SEQ ID NO: 477533 - RNA, 19 nt, Human
uguguguguguugggugaa

SEQ ID NO: 477534 - RNA, 23 nt, Human
uguucuugggaaccacaggguuu

SEQ ID NO: 477535 - RNA, 23 nt, Human
uguucuugggaaccacaggguuu

SEQ ID NO: 477536 - RNA, 21 nt, Human
uguuuguguguguguugggug

SEQ ID NO: 477537 - RNA, 21 nt, Human
uguuuguguguguguugggug

SEQ ID NO: 477538 - RNA, 19 nt, Human
uuaggggucucgggugucc

SEQ ID NO: 477539 - RNA, 19 nt, Human
uuaggggucucgggugucc

SEQ ID NO: 477540 - RNA, 24 nt, Human
uuagucccaaggugguaccagagg

SEQ ID NO: 477541 - RNA, 25 nt, Human
uucacaguuucccagcaguugguuu

SEQ ID NO: 477542 - RNA, 22 nt, Human
uugaaaaagucuggggcuuuca

SEQ ID NO: 477543 - RNA, 22 nt, Human
uugaaaaagucuggggcuuuca

SEQ ID NO: 477544 - RNA, 18 nt, Human
uugcggugggccagaguu

SEQ ID NO: 477545 - RNA, 22 nt, Human
uugcucugccauguuuuuccga

SEQ ID NO: 477546 - RNA, 22 nt, Human
uugcucugccauguuuuuccga

SEQ ID NO: 477547 - RNA, 22 nt, Human
uugcugcugcggcucugcugca

SEQ ID NO: 477548 - RNA, 20 nt, Human
uuggaguggaauucaagaga

SEQ ID NO: 477549 - RNA, 20 nt, Human
uuggaguggaauucaagaga

SEQ ID NO: 477550 - RNA, 23 nt, Human
uugguguguguauguuugugugu

SEQ ID NO: 477551 - RNA, 23 nt, Human
uugguguguguauguuugugugu

SEQ ID NO: 477552 - RNA, 26 nt, Human
uugguguguguauguuugugugugug

SEQ ID NO: 477553 - RNA, 26 nt, Human
uugguguguguauguuugugugugug

SEQ ID NO: 477554 - RNA, 24 nt, Human
uuucccagcaguugguuuuugguu

SEQ ID NO: 477555 - RNA, 24 nt, Human
uuucccagcaguugguuuuugguu

SEQ ID NO: 477556 - RNA, 26 nt, Human
uuucccagccaucagaccucuucccc

SEQ ID NO: 477557 - RNA, 26 nt, Human
uuucccagccaucagaccucuucccc

SEQ ID NO: 477558 - RNA, 20 nt, Human
uuucucagcccuccuacccc

SEQ ID NO: 477559 - RNA, 20 nt, Human
uuucucagcccuccuacccc

SEQ ID NO: 477560 - RNA, 19 nt, Human
uuucuuuuucucccccaca

SEQ ID NO: 477561 - RNA, 19 nt, Human
uuucuuuuucucccccaca

SEQ ID NO: 477562 - RNA, 23 nt, Human
uuuucacaguuucccagcaguug

SEQ ID NO: 477563 - RNA, 23 nt, Human
uuuucacaguuucccagcaguug

SEQ ID NO: 477564 - RNA, 22 nt, Human
uuuuugguuuccacauaaggcu

SEQ ID NO: 477565 - RNA, 24 nt, Human
uuuuuuuuucaugaagaccaguuu

SEQ ID NO: 477566 - RNA, 27 nt, Human
aaaaaaaaaaagauaacccccugaagg

SEQ ID NO: 477567 - RNA, 22 nt, Human
aaaaagcaccagaaaaaaaagu

SEQ ID NO: 477568 - RNA, 21 nt, Human
aaaagccaugcaaagccaaag

SEQ ID NO: 477569 - RNA, 18 nt, Human
aaaagcuugcauuuccaa

SEQ ID NO: 477570 - RNA, 25 nt, Human
aaacaguaacucaggaaacaguaac

SEQ ID NO: 477571 - RNA, 19 nt, Human
aaaccagucagaccacuga

SEQ ID NO: 477572 - RNA, 21 nt, Human
aaagccaugcaaagccaaagg

SEQ ID NO: 477573 - RNA, 24 nt, Human
aaaugaaaccagucagaccacuga

SEQ ID NO: 477574 - RNA, 21 nt, Human
aacacacaaaucugagcacca

SEQ ID NO: 477575 - RNA, 19 nt, Human
aacacaguugcguaugugc

SEQ ID NO: 477576 - RNA, 18 nt, Human
aacaguaacugaaguccc

SEQ ID NO: 477577 - RNA, 24 nt, Human
aacaucacuuacgcucccuugaga

SEQ ID NO: 477578 - RNA, 19 nt, Human
aaggaaaaaaagauaugcu

SEQ ID NO: 477579 - RNA, 24 nt, Human
aaugaagugccagacacagcaaug

SEQ ID NO: 477580 - RNA, 24 nt, Human
acaaaaugagauucucugagugcc

SEQ ID NO: 477581 - RNA, 18 nt, Human
acacaaaucugagcacca

SEQ ID NO: 477582 - RNA, 24 nt, Human
acaguaccugaagaaaagccaugc

SEQ ID NO: 477583 - RNA, 21 nt, Human
accacuacacauccuguaaac

SEQ ID NO: 477584 - RNA, 22 nt, Human
accagcuacccucacugagcaa

SEQ ID NO: 477585 - RNA, 30 nt, Human
agaaacaaaaaguugguaauaacaaaaagg

SEQ ID NO: 477586 - RNA, 19 nt, Human
agcccuuguuaagaacaga

SEQ ID NO: 477587 - RNA, 22 nt, Human
aggaaaaaaagauaugcuaaga

SEQ ID NO: 477588 - RNA, 18 nt, Human
agggccuacuuacucucc

SEQ ID NO: 477589 - RNA, 24 nt, Human
agguacaugugaaaaugcaguggu

SEQ ID NO: 477590 - RNA, 22 nt, Human
agguuuucccucaccccccacc

SEQ ID NO: 477591 - RNA, 20 nt, Human
aguaaugagaaacaaaaagu

SEQ ID NO: 477592 - RNA, 19 nt, Human
agucaaagugagacaguca

SEQ ID NO: 477593 - RNA, 21 nt, Human
aguuaagaaaaccaugcauga

SEQ ID NO: 477594 - RNA, 24 nt, Human
aucuucauccgggagcugugugac

SEQ ID NO: 477595 - RNA, 22 nt, Human
auggaacaucacuuacgcuccc

SEQ ID NO: 477596 - RNA, 20 nt, Human
caaaaaguugguaauaacaa

SEQ ID NO: 477597 - RNA, 23 nt, Human
caaagugagacagucaucaaucc

SEQ ID NO: 477598 - RNA, 19 nt, Human
caauccaaaaaagcaccag

SEQ ID NO: 477599 - RNA, 23 nt, Human
caccagaaaaaaaaguuaacacu

SEQ ID NO: 477600 - RNA, 23 nt, Human
cacuaccagguuuucccucaccc

SEQ ID NO: 477601 - RNA, 21 nt, Human
caugcaaaacauggguauagu

SEQ ID NO: 477602 - RNA, 18 nt, Human
cauggcuauuuucucaca

SEQ ID NO: 477603 - RNA, 21 nt, Human
caugugguauaaaaaauaaaa

SEQ ID NO: 477604 - RNA, 19 nt, Human
cauugcacacacgggugaa

SEQ ID NO: 477605 - RNA, 24 nt, Human
ccagaaaaaaaaguuaacacuuag

SEQ ID NO: 477606 - RNA, 25 nt, Human
ccagacacagcaaugccauuauacu

SEQ ID NO: 477607 - RNA, 23 nt, Human
ccccagaaaaaggcauugcacac

SEQ ID NO: 477608 - RNA, 18 nt, Human
cccccaccccccagaaaa

SEQ ID NO: 477609 - RNA, 22 nt, Human
ccccccagaaaaaggcauugca

SEQ ID NO: 477610 - RNA, 25 nt, Human
cccgcggcgacggcaagagggcgag

SEQ ID NO: 477611 - RNA, 21 nt, Human
cccguucccuggccgcggccg

SEQ ID NO: 477612 - RNA, 21 nt, Human
cccucaccccccaccccccag

SEQ ID NO: 477613 - RNA, 23 nt, Human
ccgggagcugugugaccagcgaa

SEQ ID NO: 477614 - RNA, 21 nt, Human
ccucaccccccaccccccaga

SEQ ID NO: 477615 - RNA, 21 nt, Human
ccuguaaacagcugcuuuaaa

SEQ ID NO: 477616 - RNA, 19 nt, Human
cgaccccccggauaccccc

SEQ ID NO: 477617 - RNA, 24 nt, Human
cggggccagcccgguaagcgaccc

SEQ ID NO: 477618 - RNA, 26 nt, Human
cgguaagcgaccccccggauaccccc

SEQ ID NO: 477619 - RNA, 19 nt, Human
cuacacauucacuaccagg

SEQ ID NO: 477620 - RNA, 23 nt, Human
cuaccaacuguuaucuucauccg

SEQ ID NO: 477621 - RNA, 20 nt, Human
cucaccccccaccccccaga

SEQ ID NO: 477622 - RNA, 20 nt, Human
cuggccgcggccgcuucucc

SEQ ID NO: 477623 - RNA, 22 nt, Human
cuguuaauucuaaaaugaaacc

SEQ ID NO: 477624 - RNA, 19 nt, Human
gaacagggggagagagugg

SEQ ID NO: 477625 - RNA, 21 nt, Human
gacgcggaacagggggagaga

SEQ ID NO: 477626 - RNA, 18 nt, Human
gagcaccaucagaguucc

SEQ ID NO: 477627 - RNA, 19 nt, Human
gaggggaaaaaaaaaaaga

SEQ ID NO: 477628 - RNA, 19 nt, Human
gcacaaaugaagucaccau

SEQ ID NO: 477629 - RNA, 21 nt, Human
gccagcccgguaagcgacccc

SEQ ID NO: 477630 - RNA, 19 nt, Human
gcggcgacggcaagagggc

SEQ ID NO: 477631 - RNA, 27 nt, Human
ggaaaaaaagauaugcuaagaguauau

SEQ ID NO: 477632 - RNA, 23 nt, Human
ggaaaacagagaacacaguugcg

SEQ ID NO: 477633 - RNA, 18 nt, Human
ggcaccacaaccaaguac

SEQ ID NO: 477634 - RNA, 19 nt, Human
gggagagaguggcgacaga

SEQ ID NO: 477635 - RNA, 25 nt, Human
gggcaggauuuagugcuuuucuuua

SEQ ID NO: 477636 - RNA, 25 nt, Human
uaaaaaauaaaacauucauauaaga

SEQ ID NO: 477637 - RNA, 24 nt, Human
uaaaaugaaaccagucagaccacu

SEQ ID NO: 477638 - RNA, 21 nt, Human
uaagaaaaaggcaacagaaga

SEQ ID NO: 477639 - RNA, 23 nt, Human
uaagcgaccccccggauaccccc

SEQ ID NO: 477640 - RNA, 21 nt, Human
uaaucguuggaaccgcgaugc

SEQ ID NO: 477641 - RNA, 22 nt, Human
uacacagugcacauaaaauuag

SEQ ID NO: 477642 - RNA, 23 nt, Human
uaccagguuuucccucacccccc

SEQ ID NO: 477643 - RNA, 20 nt, Human
uacugcucaacuaugacaca

SEQ ID NO: 477644 - RNA, 19 nt, Human
uauacaguuuuuauuugua

SEQ ID NO: 477645 - RNA, 20 nt, Human
uaucuggagguggguugggg

SEQ ID NO: 477646 - RNA, 23 nt, Human
uaugaagauuuuccuccaauuuu

SEQ ID NO: 477647 - RNA, 20 nt, Human
uauggacauuuuugcaugug

SEQ ID NO: 477648 - RNA, 18 nt, Human
ucaauccaaaaaagcacc

SEQ ID NO: 477649 - RNA, 22 nt, Human
ucaauccaaaaaagcaccagaa

SEQ ID NO: 477650 - RNA, 21 nt, Human
ucacaccauugccagcggaua

SEQ ID NO: 477651 - RNA, 21 nt, Human
ucagaguuccuacauacugac

SEQ ID NO: 477652 - RNA, 18 nt, Human
uccaaaguucuugaaguu

SEQ ID NO: 477653 - RNA, 23 nt, Human
ucccucaccccccaccccccaga

SEQ ID NO: 477654 - RNA, 23 nt, Human
ucccucaccccccaccccccaga

SEQ ID NO: 477655 - RNA, 30 nt, Human
uccgcggccgagaagccucuuccuggggcc

SEQ ID NO: 477656 - RNA, 20 nt, Human
ucuaccagcuacugcucaac

SEQ ID NO: 477657 - RNA, 24 nt, Human
ucuguaguacaaaacaaugaagua

SEQ ID NO: 477658 - RNA, 18 nt, Human
ucugugguuaauauggaa

SEQ ID NO: 477659 - RNA, 20 nt, Human
ucugugugugauguguggug

SEQ ID NO: 477660 - RNA, 23 nt, Human
ucugugugugauguguggugugu

SEQ ID NO: 477661 - RNA, 23 nt, Human
ugaacacacaaaucugagcacca

SEQ ID NO: 477662 - RNA, 24 nt, Human
ugaagaaaagccaugcaaagccaa

SEQ ID NO: 477663 - RNA, 20 nt, Human
ugaccaaaggguggucccuu

SEQ ID NO: 477664 - RNA, 22 nt, Human
ugacuuauaaaaauaugguacu

SEQ ID NO: 477665 - RNA, 19 nt, Human
ugagaaacaaaaaguuggu

SEQ ID NO: 477666 - RNA, 25 nt, Human
ugagugccugacaaaacgaauuuaa

SEQ ID NO: 477667 - RNA, 19 nt, Human
ugauccagacaaaucacac

SEQ ID NO: 477668 - RNA, 18 nt, Human
ugauuuugguuuucuagg

SEQ ID NO: 477669 - RNA, 25 nt, Human
ugcaaagccaaaggaaaaaaagaua

SEQ ID NO: 477670 - RNA, 19 nt, Human
ugcacauaaaauuagaugu

SEQ ID NO: 477671 - RNA, 20 nt, Human
uggagaggacagucuguggu

SEQ ID NO: 477672 - RNA, 18 nt, Human
uggagguggguuggggaa

SEQ ID NO: 477673 - RNA, 18 nt, Human
uggcaccacaaccaagua

SEQ ID NO: 477674 - RNA, 20 nt, Human
uggcagaagaucagccugua

SEQ ID NO: 477675 - RNA, 22 nt, Human
uggcuucugcaccagcuacccu

SEQ ID NO: 477676 - RNA, 23 nt, Human
uggggcggccgcugacggggagg

SEQ ID NO: 477677 - RNA, 24 nt, Human
ugguggacauauauaucuauauau

SEQ ID NO: 477678 - RNA, 21 nt, Human
uguacuguuagcacaaaugaa

SEQ ID NO: 477679 - RNA, 21 nt, Human
ugucuuuucuuucaguacuua

SEQ ID NO: 477680 - RNA, 21 nt, Human
ugugugugauguguggugugu

SEQ ID NO: 477681 - RNA, 18 nt, Human
uuaagccugacccaaauc

SEQ ID NO: 477682 - RNA, 21 nt, Human
uuagcuaguuaagaaaaccau

SEQ ID NO: 477683 - RNA, 21 nt, Human
uuaugaauaaccuaguuguau

SEQ ID NO: 477684 - RNA, 21 nt, Human
uuauggcagaagaucagccug

SEQ ID NO: 477685 - RNA, 19 nt, Human
uucaguaaugagaaacaaa

SEQ ID NO: 477686 - RNA, 22 nt, Human
uuccuacauacugacauggcua

SEQ ID NO: 477687 - RNA, 20 nt, Human
uugcauuuccaaaguucuug

SEQ ID NO: 477688 - RNA, 18 nt, Human
uuucccucaccccccacc

SEQ ID NO: 477689 - RNA, 23 nt, Human
uuuggauacacuccuaucuggag

SEQ ID NO: 477690 - RNA, 24 nt, Human
uuuugcagccagaaaucaaagcuu

SEQ ID NO: 477691 - RNA, 23 nt, Human
aaaaaaaggccagcucagaaaaa

SEQ ID NO: 477692 - RNA, 20 nt, Human
aaaaaauauggugacacccc

SEQ ID NO: 477693 - RNA, 23 nt, Human
aaaaaauauggugacacccccca

SEQ ID NO: 477694 - RNA, 20 nt, Human
aaaaaggccagcucagaaaa

SEQ ID NO: 477695 - RNA, 20 nt, Human
aaaacagcuaaaguggaggg

SEQ ID NO: 477696 - RNA, 21 nt, Human
aaaagaggcagguggaauaua

SEQ ID NO: 477697 - RNA, 20 nt, Human
aaaaugaaauccuuugcaga

SEQ ID NO: 477698 - RNA, 24 nt, Human
aaaaugaaccaauucuugaaaagu

SEQ ID NO: 477699 - RNA, 25 nt, Human
aaacaaaaaaguaaauucaauccaa

SEQ ID NO: 477700 - RNA, 19 nt, Human
aaacucccaacugcuucuc

SEQ ID NO: 477701 - RNA, 24 nt, Human
aaauccuuugcagagucggugaug

SEQ ID NO: 477702 - RNA, 21 nt, Human
aacacaccuuuccacaaguac

SEQ ID NO: 477703 - RNA, 21 nt, Human
aacacccugcuguaccccaaa

SEQ ID NO: 477704 - RNA, 20 nt, Human
aagcaaaggggcuagugaaa

SEQ ID NO: 477705 - RNA, 24 nt, Human
aagcaagaugacaguucugacuag

SEQ ID NO: 477706 - RNA, 18 nt, Human
aaugacaaccaaacuccc

SEQ ID NO: 477707 - RNA, 24 nt, Human
acacagccacagaggcagaaccuc

SEQ ID NO: 477708 - RNA, 19 nt, Human
accacacuacacacacagc

SEQ ID NO: 477709 - RNA, 24 nt, Human
acccugcuguaccccaaaaugaaa

SEQ ID NO: 477710 - RNA, 23 nt, Human
acccugcuguaccccaaaaugag

SEQ ID NO: 477711 - RNA, 21 nt, Human
accuacuggccaaccacacua

SEQ ID NO: 477712 - RNA, 21 nt, Human
accucauguuuaacacacaca

SEQ ID NO: 477713 - RNA, 19 nt, Human
acugccucacuucuucagc

SEQ ID NO: 477714 - RNA, 24 nt, Human
acuggccaaccacacuacacacac

SEQ ID NO: 477715 - RNA, 21 nt, Human
agaaccucauguuuaacacac

SEQ ID NO: 477716 - RNA, 21 nt, Human
agaccccuuccuucccugccc

SEQ ID NO: 477717 - RNA, 21 nt, Human
agagagcccugggaugaggau

SEQ ID NO: 477718 - RNA, 20 nt, Human
agagccccucaacccugcuu

SEQ ID NO: 477719 - RNA, 19 nt, Human
agaugggcaacuccugggc

SEQ ID NO: 477720 - RNA, 19 nt, Human
agcacagggacuuuggcag

SEQ ID NO: 477721 - RNA, 18 nt, Human
agccaaucuacagcagag

SEQ ID NO: 477722 - RNA, 22 nt, Human
agccacaugcccuggaggugug

SEQ ID NO: 477723 - RNA, 18 nt, Human
agccaccuccucucugga

SEQ ID NO: 477724 - RNA, 18 nt, Human
agccuagugguaacuagc

SEQ ID NO: 477725 - RNA, 18 nt, Human
aggaagaaaacacaaaga

SEQ ID NO: 477726 - RNA, 26 nt, Human
aggaggaaaagaaauuggcaccaggg

SEQ ID NO: 477727 - RNA, 22 nt, Human
aggaggcugacucaacccccca

SEQ ID NO: 477728 - RNA, 20 nt, Human
aggcagguggaauauagccu

SEQ ID NO: 477729 - RNA, 21 nt, Human
aggcagguggaauauagccug

SEQ ID NO: 477730 - RNA, 23 nt, Human
aggcagguggaauauagccuggu

SEQ ID NO: 477731 - RNA, 21 nt, Human
agggaggagccucugagggcc

SEQ ID NO: 477732 - RNA, 21 nt, Human
agggcagagggugaggggaaa

SEQ ID NO: 477733 - RNA, 25 nt, Human
aggggaaaagggucccaucagcaga

SEQ ID NO: 477734 - RNA, 19 nt, Human
auaaaacaaaguuuacgaa

SEQ ID NO: 477735 - RNA, 24 nt, Human
auaaaacuuuauuuuuucaaacac

SEQ ID NO: 477736 - RNA, 24 nt, Human
auggucucucaggcccaauuagag

SEQ ID NO: 477737 - RNA, 27 nt, Human
auggugcccuggggcuuuuggucaacc

SEQ ID NO: 477738 - RNA, 21 nt, Human
auugacccagugucagccaca

SEQ ID NO: 477739 - RNA, 21 nt, Human
auugguuuccugcagucaccu

SEQ ID NO: 477740 - RNA, 23 nt, Human
caaacacagccacagaggcagaa

SEQ ID NO: 477741 - RNA, 21 nt, Human
caaaugauggaugucuucccu

SEQ ID NO: 477742 - RNA, 21 nt, Human
caacagcagugcuggggugag

SEQ ID NO: 477743 - RNA, 21 nt, Human
caaccaaacucccaacugcuu

SEQ ID NO: 477744 - RNA, 24 nt, Human
caacuccugggcucacaguuuccc

SEQ ID NO: 477745 - RNA, 25 nt, Human
caacucuacucaagagggcaaaaga

SEQ ID NO: 477746 - RNA, 22 nt, Human
caagcaaacuauuaaaugcuaa

SEQ ID NO: 477747 - RNA, 19 nt, Human
cacaagcuauugugguggc

SEQ ID NO: 477748 - RNA, 18 nt, Human
cacaaguacacucccaug

SEQ ID NO: 477749 - RNA, 19 nt, Human
cacagcacuuaaaacaccc

SEQ ID NO: 477750 - RNA, 18 nt, Human
caccccuucuucccucuc

SEQ ID NO: 477751 - RNA, 23 nt, Human
caccccuucuucccucucaagga

SEQ ID NO: 477752 - RNA, 19 nt, Human
caccuuuccacaaguacac

SEQ ID NO: 477753 - RNA, 21 nt, Human
cacuuggaccagcuguccugg

SEQ ID NO: 477754 - RNA, 23 nt, Human
cagacugaaaguaauggaauuaa

SEQ ID NO: 477755 - RNA, 20 nt, Human
cagcagugcuggggugagcu

SEQ ID NO: 477756 - RNA, 19 nt, Human
cagccaaucuacagcagag

SEQ ID NO: 477757 - RNA, 23 nt, Human
cagucaccuucccaacagcagug

SEQ ID NO: 477758 - RNA, 25 nt, Human
ccagaaaaugucagguucaauucca

SEQ ID NO: 477759 - RNA, 19 nt, Human
ccagugucagccacaugcc

SEQ ID NO: 477760 - RNA, 21 nt, Human
cccacccuggccaaauucuaa

SEQ ID NO: 477761 - RNA, 22 nt, Human
cccaugcacgcacacacucuca

SEQ ID NO: 477762 - RNA, 26 nt, Human
cccaugcacgcacacacucucacggu

SEQ ID NO: 477763 - RNA, 22 nt, Human
ccccaaccucccuauggucucu

SEQ ID NO: 477764 - RNA, 22 nt, Human
ccccaggauuugacuugcacac

SEQ ID NO: 477765 - RNA, 19 nt, Human
ccccauucccaggcucggc

SEQ ID NO: 477766 - RNA, 26 nt, Human
ccccauucccaggcucggcccccagc

SEQ ID NO: 477767 - RNA, 18 nt, Human
ccccccaccugcauuccc

SEQ ID NO: 477768 - RNA, 22 nt, Human
ccccccaccugcauuccccaau

SEQ ID NO: 477769 - RNA, 21 nt, Human
ccccuagagaccugguagccu

SEQ ID NO: 477770 - RNA, 18 nt, Human
ccccuuccuucccugccc

SEQ ID NO: 477771 - RNA, 22 nt, Human
cccuagagaccugguagccuag

SEQ ID NO: 477772 - RNA, 20 nt, Human
cccuauggucucucaggccc

SEQ ID NO: 477773 - RNA, 25 nt, Human
ccucccgccaccagcuccguuuauc

SEQ ID NO: 477774 - RNA, 19 nt, Human
ccucugagggccagaggcu

SEQ ID NO: 477775 - RNA, 21 nt, Human
ccucuugacuccuugagcaaa

SEQ ID NO: 477776 - RNA, 24 nt, Human
ccugcuguaccccaaaaugaaauc

SEQ ID NO: 477777 - RNA, 19 nt, Human
cgcaaacacaccuuuccac

SEQ ID NO: 477778 - RNA, 26 nt, Human
cggagcccuccacucacccccauucc

SEQ ID NO: 477779 - RNA, 23 nt, Human
cucagaaaaaauauggugacacc

SEQ ID NO: 477780 - RNA, 27 nt, Human
cucggcccccagccuuggggacucgac

SEQ ID NO: 477781 - RNA, 23 nt, Human
cugcuguaccccaaaaugaaauc

SEQ ID NO: 477782 - RNA, 25 nt, Human
cuggccaaccacacuacacacacag

SEQ ID NO: 477783 - RNA, 21 nt, Human
cuuuccacaaguacacuccca

SEQ ID NO: 477784 - RNA, 19 nt, Human
cuuuggcagcaggugggag

SEQ ID NO: 477785 - RNA, 19 nt, Human
gaagcuggcacagccaauc

SEQ ID NO: 477786 - RNA, 21 nt, Human
gacaccccccaccugcauucc

SEQ ID NO: 477787 - RNA, 22 nt, Human
gacacuuguuaguagccaugag

SEQ ID NO: 477788 - RNA, 20 nt, Human
gacauagccaccuccucucu

SEQ ID NO: 477789 - RNA, 18 nt, Human
gaccugguagccuagugg

SEQ ID NO: 477790 - RNA, 20 nt, Human
gacucgacacuuguuaguag

SEQ ID NO: 477791 - RNA, 21 nt, Human
gacuuagaagggcagagggug

SEQ ID NO: 477792 - RNA, 18 nt, Human
gagagagagagauagagc

SEQ ID NO: 477793 - RNA, 19 nt, Human
gagcccuccacucaccccc

SEQ ID NO: 477794 - RNA, 22 nt, Human
gagugaagggcagcugagcugc

SEQ ID NO: 477795 - RNA, 21 nt, Human
gcaccagggaaauuauggccu

SEQ ID NO: 477796 - RNA, 23 nt, Human
gcuacgcaaacacaccuuuccac

SEQ ID NO: 477797 - RNA, 22 nt, Human
gcuccguuuaucuugucccggc

SEQ ID NO: 477798 - RNA, 21 nt, Human
gcuugggaaaauggauuauuc

SEQ ID NO: 477799 - RNA, 20 nt, Human
ggagaagagccaggggagga

SEQ ID NO: 477800 - RNA, 18 nt, Human
ggagcccuccacucaccc

SEQ ID NO: 477801 - RNA, 21 nt, Human
ggaggugugcuccacucuggg

SEQ ID NO: 477802 - RNA, 22 nt, Human
ggaugaggaugccccaggagga

SEQ ID NO: 477803 - RNA, 23 nt, Human
ggcagcaggugggagugaagggc

SEQ ID NO: 477804 - RNA, 20 nt, Human
ggccugaagagggagaagag

SEQ ID NO: 477805 - RNA, 23 nt, Human
gggacugaaugccacuucugguc

SEQ ID NO: 477806 - RNA, 18 nt, Human
gggaggggguggggcuga

SEQ ID NO: 477807 - RNA, 24 nt, Human
gggcagcugagcugccacugggcc

SEQ ID NO: 477808 - RNA, 22 nt, Human
gggccagaggcuuaagaagaca

SEQ ID NO: 477809 - RNA, 19 nt, Human
gggcuuuggggaaaccagg

SEQ ID NO: 477810 - RNA, 19 nt, Human
ggggaggggguggggcuga

SEQ ID NO: 477811 - RNA, 18 nt, Human
guaaagcaaaaugaacca

SEQ ID NO: 477812 - RNA, 24 nt, Human
gugaaaauucaaauagucaaaaca

SEQ ID NO: 477813 - RNA, 18 nt, Human
gugcuggggugagcucac

SEQ ID NO: 477814 - RNA, 25 nt, Human
guggagggagguugcuugcuuuaca

SEQ ID NO: 477815 - RNA, 21 nt, Human
uaaaacacccugcuguacccc

SEQ ID NO: 477816 - RNA, 20 nt, Human
uaaaaccucacaagcuauug

SEQ ID NO: 477817 - RNA, 19 nt, Human
uaaucccauuagcacaggg

SEQ ID NO: 477818 - RNA, 21 nt, Human
uacacacacagcacagaugca

SEQ ID NO: 477819 - RNA, 21 nt, Human
uacuggccaaccacacuacac

SEQ ID NO: 477820 - RNA, 21 nt, Human
uagaaaaaaggaaaacuuggu

SEQ ID NO: 477821 - RNA, 22 nt, Human
uagagccccucaacccugcuuc

SEQ ID NO: 477822 - RNA, 20 nt, Human
uagaucgagcuaguggggag

SEQ ID NO: 477823 - RNA, 21 nt, Human
uagccuagugguaacuagcca

SEQ ID NO: 477824 - RNA, 20 nt, Human
uagccuggacaaucugauga

SEQ ID NO: 477825 - RNA, 20 nt, Human
ucaaaaaggcugggccugga

SEQ ID NO: 477826 - RNA, 25 nt, Human
ucaacccugcuucaguugcccaugu

SEQ ID NO: 477827 - RNA, 19 nt, Human
ucaccuucccaacagcagu

SEQ ID NO: 477828 - RNA, 19 nt, Human
ucacugggcacaggaggag

SEQ ID NO: 477829 - RNA, 23 nt, Human
ucacuugugagccgucuucugcc

SEQ ID NO: 477830 - RNA, 20 nt, Human
ucagaaaaaauauggugaca

SEQ ID NO: 477831 - RNA, 24 nt, Human
ucaggcccaauuagaggcaaauaa

SEQ ID NO: 477832 - RNA, 20 nt, Human
uccacaaguacacucccaug

SEQ ID NO: 477833 - RNA, 20 nt, Human
ucccaucagcagaggagaga

SEQ ID NO: 477834 - RNA, 21 nt, Human
ucccucagugagccccaaccu

SEQ ID NO: 477835 - RNA, 24 nt, Human
ucccuggauucucuagagggccuc

SEQ ID NO: 477836 - RNA, 24 nt, Human
ucccuguuguucuuccagaccuca

SEQ ID NO: 477837 - RNA, 21 nt, Human
ucccuuacaugaggaacuggg

SEQ ID NO: 477838 - RNA, 19 nt, Human
uccugggcucacaguuucc

SEQ ID NO: 477839 - RNA, 19 nt, Human
ucgagcuugcuggagcgag

SEQ ID NO: 477840 - RNA, 24 nt, Human
ucuaugacuuagaagggccggggc

SEQ ID NO: 477841 - RNA, 23 nt, Human
ucucccuuaaggauggugcccug

SEQ ID NO: 477842 - RNA, 24 nt, Human
ucucccuuaaggauggugcccugg

SEQ ID NO: 477843 - RNA, 24 nt, Human
ucucugaggaggcugacucaaccc

SEQ ID NO: 477844 - RNA, 19 nt, Human
ugaagcaaaggggcuagug

SEQ ID NO: 477845 - RNA, 22 nt, Human
ugacucaaccccccacccuggc

SEQ ID NO: 477846 - RNA, 19 nt, Human
ugacuccuugagcaaaccc

SEQ ID NO: 477847 - RNA, 18 nt, Human
ugacuuagaagggcagag

SEQ ID NO: 477848 - RNA, 18 nt, Human
ugagaaaaaaaggccagc

SEQ ID NO: 477849 - RNA, 24 nt, Human
ugagcaaacccaacauccuguaaa

SEQ ID NO: 477850 - RNA, 18 nt, Human
ugagucggagcccuccac

SEQ ID NO: 477851 - RNA, 24 nt, Human
ugaugcuccugacaugcaggagau

SEQ ID NO: 477852 - RNA, 22 nt, Human
ugcccuggggcuuuggggaaac

SEQ ID NO: 477853 - RNA, 20 nt, Human
ugcuauggauuacaagccug

SEQ ID NO: 477854 - RNA, 30 nt, Human
ugcuuuauacauccucagccaaucccucaa

SEQ ID NO: 477855 - RNA, 19 nt, Human
uggaacagaucuacuguug

SEQ ID NO: 477856 - RNA, 24 nt, Human
uggaccagcuguccuggcucaagu

SEQ ID NO: 477857 - RNA, 22 nt, Human
uggaugucuucccuguuguucu

SEQ ID NO: 477858 - RNA, 18 nt, Human
uggcagcaggugggagug

SEQ ID NO: 477859 - RNA, 24 nt, Human
uggcaggaguggaagacaagcaaa

SEQ ID NO: 477860 - RNA, 20 nt, Human
uggcagggauacucacacuc

SEQ ID NO: 477861 - RNA, 18 nt, Human
ugggaagcaagaugacag

SEQ ID NO: 477862 - RNA, 18 nt, Human
uggggaaaccaggaugga

SEQ ID NO: 477863 - RNA, 18 nt, Human
uggggaggggguggggcu

SEQ ID NO: 477864 - RNA, 18 nt, Human
uggggaggggguggggcu

SEQ ID NO: 477865 - RNA, 19 nt, Human
uggggaggggguggggcug

SEQ ID NO: 477866 - RNA, 21 nt, Human
uggggucggcagaccccuucc

SEQ ID NO: 477867 - RNA, 18 nt, Human
uggguccuaggaaacccu

SEQ ID NO: 477868 - RNA, 19 nt, Human
uguagaccuucucccuuaa

SEQ ID NO: 477869 - RNA, 20 nt, Human
ugugcaacucuacucaagag

SEQ ID NO: 477870 - RNA, 23 nt, Human
ugugguggcagcuucaguaugug

SEQ ID NO: 477871 - RNA, 24 nt, Human
uuaaaacacccugcuguaccccaa

SEQ ID NO: 477872 - RNA, 24 nt, Human
uucaaacacagccacagaggcaga

SEQ ID NO: 477873 - RNA, 20 nt, Human
uuccccgagcuggggucggc

SEQ ID NO: 477874 - RNA, 23 nt, Human
uuggaagcuggcacagccaaucu

SEQ ID NO: 477875 - RNA, 23 nt, Human
aaaaaaaaaaaguaacugugaac

SEQ ID NO: 477876 - RNA, 24 nt, Human
aaaacaaaaaaccucauguuggaa

SEQ ID NO: 477877 - RNA, 19 nt, Human
aacugugugugugaacagu

SEQ ID NO: 477878 - RNA, 19 nt, Human
aagaggaaaagaaaagaaa

SEQ ID NO: 477879 - RNA, 19 nt, Human
aagcgcccgauccgcccgc

SEQ ID NO: 477880 - RNA, 21 nt, Human
aauacagaaagugaaauuaaa

SEQ ID NO: 477881 - RNA, 20 nt, Human
acaagaggaaaagaaaagaa

SEQ ID NO: 477882 - RNA, 21 nt, Human
accccauacuuguaccaguua

SEQ ID NO: 477883 - RNA, 22 nt, Human
accccccccaacagccaccagu

SEQ ID NO: 477884 - RNA, 22 nt, Human
acccgcggccgccguucccccc

SEQ ID NO: 477885 - RNA, 21 nt, Human
acuguccuucccauuuggaaa

SEQ ID NO: 477886 - RNA, 26 nt, Human
agagauauacauuuuccaauguaccc

SEQ ID NO: 477887 - RNA, 23 nt, Human
agccaccaccaaccaccggcgca

SEQ ID NO: 477888 - RNA, 18 nt, Human
aggaaaagaaaagaaagg

SEQ ID NO: 477889 - RNA, 24 nt, Human
aguguugaggcagcguagaagaga

SEQ ID NO: 477890 - RNA, 29 nt, Human
auacagaaagugaaauuaaaagggacccc

SEQ ID NO: 477891 - RNA, 25 nt, Human
auccuggagccuccugggaaaagca

SEQ ID NO: 477892 - RNA, 21 nt, Human
caaaauuaaaauacagaaagu

SEQ ID NO: 477893 - RNA, 21 nt, Human
caacagccaccaccaaccacc

SEQ ID NO: 477894 - RNA, 19 nt, Human
caagaggaaaagaaaagaa

SEQ ID NO: 477895 - RNA, 24 nt, Human
caaugaaucccaccauuuucaaau

SEQ ID NO: 477896 - RNA, 23 nt, Human
cacacauggggaacacaccacag

SEQ ID NO: 477897 - RNA, 19 nt, Human
caccccccccaacagccac

SEQ ID NO: 477898 - RNA, 23 nt, Human
cacuaaauacacacauuuccuaa

SEQ ID NO: 477899 - RNA, 18 nt, Human
cagcaaagagcccugccg

SEQ ID NO: 477900 - RNA, 20 nt, Human
cagcgccccccguggccggg

SEQ ID NO: 477901 - RNA, 19 nt, Human
caggaaaacaacuguggua

SEQ ID NO: 477902 - RNA, 19 nt, Human
caggauagggauguggcac

SEQ ID NO: 477903 - RNA, 24 nt, Human
ccaaucagcccuucaacaaaauua

SEQ ID NO: 477904 - RNA, 22 nt, Human
ccaccaccaaccaccggcgcag

SEQ ID NO: 477905 - RNA, 21 nt, Human
ccaccaccuccgccgccaagc

SEQ ID NO: 477906 - RNA, 27 nt, Human
ccaccaccuccgccgccaagcgcccga

SEQ ID NO: 477907 - RNA, 20 nt, Human
cccaccaccuccgccgccaa

SEQ ID NO: 477908 - RNA, 23 nt, Human
cccaccccccccaacagccacca

SEQ ID NO: 477909 - RNA, 20 nt, Human
ccccaccccccccaacagcc

SEQ ID NO: 477910 - RNA, 20 nt, Human
cccccaacagccaccaccaa

SEQ ID NO: 477911 - RNA, 22 nt, Human
cccccaccccccccaacagcca

SEQ ID NO: 477912 - RNA, 23 nt, Human
ccccccaacagccaccaccaacc

SEQ ID NO: 477913 - RNA, 19 nt, Human
cccccccaccccccccaac

SEQ ID NO: 477914 - RNA, 20 nt, Human
cccccguggccgggagcgga

SEQ ID NO: 477915 - RNA, 21 nt, Human
cccgcccgccgccucccacca

SEQ ID NO: 477916 - RNA, 21 nt, Human
cccgccgccucccaccaccuc

SEQ ID NO: 477917 - RNA, 21 nt, Human
cccuccgcaccacccgcggcc

SEQ ID NO: 477918 - RNA, 20 nt, Human
cccugggucuugcaagacuc

SEQ ID NO: 477919 - RNA, 24 nt, Human
ccgcaaggccucccuccgcaccac

SEQ ID NO: 477920 - RNA, 21 nt, Human
ccgccucccaccaccuccgcc

SEQ ID NO: 477921 - RNA, 21 nt, Human
ccgcgcucccgcccgccgccu

SEQ ID NO: 477922 - RNA, 23 nt, Human
ccucccaccaccuccgccgccaa

SEQ ID NO: 477923 - RNA, 19 nt, Human
ccugggucuugcaagacuc

SEQ ID NO: 477924 - RNA, 23 nt, Human
cgaaaggaagacuaaauguaaug

SEQ ID NO: 477925 - RNA, 22 nt, Human
cgcagcgccccccguggccggg

SEQ ID NO: 477926 - RNA, 23 nt, Human
cgccgccaagcgcccgauccgcc

SEQ ID NO: 477927 - RNA, 19 nt, Human
cgccguucccccccacccc

SEQ ID NO: 477928 - RNA, 22 nt, Human
cgccguucccccccaccccccc

SEQ ID NO: 477929 - RNA, 22 nt, Human
cggccgccguucccccccaccc

SEQ ID NO: 477930 - RNA, 21 nt, Human
cuaggcacaagaggaaaagaa

SEQ ID NO: 477931 - RNA, 22 nt, Human
cucaagguaagacuaagauggg

SEQ ID NO: 477932 - RNA, 30 nt, Human
cucccaccaccuccgccgccaagcgcccgg

SEQ ID NO: 477933 - RNA, 23 nt, Human
cucccuccgcaccacccgcggcc

SEQ ID NO: 477934 - RNA, 21 nt, Human
cuggagucaccaguguuguac

SEQ ID NO: 477935 - RNA, 20 nt, Human
cugggugaagggccucugcu

SEQ ID NO: 477936 - RNA, 21 nt, Human
gaauacugaccacacuggcuc

SEQ ID NO: 477937 - RNA, 23 nt, Human
gaaugugcaggaaagccccgcca

SEQ ID NO: 477938 - RNA, 25 nt, Human
gagaaaaagaauccuaaaaaagcca

SEQ ID NO: 477939 - RNA, 21 nt, Human
gaggagcuuggaguuucucca

SEQ ID NO: 477940 - RNA, 22 nt, Human
gaggaguccccagggaacacug

SEQ ID NO: 477941 - RNA, 20 nt, Human
gccaagcgcccgauccgccc

SEQ ID NO: 477942 - RNA, 23 nt, Human
gcccgcaaggccucccuccgcac

SEQ ID NO: 477943 - RNA, 23 nt, Human
gccugacccgcgcucccgcccgc

SEQ ID NO: 477944 - RNA, 21 nt, Human
gcguagaagagaguggcugga

SEQ ID NO: 477945 - RNA, 24 nt, Human
gcucugggugaagggccucugcuc

SEQ ID NO: 477946 - RNA, 20 nt, Human
ggaacacaccacagcuuaga

SEQ ID NO: 477947 - RNA, 22 nt, Human
ggccgggagcggagccgcagcc

SEQ ID NO: 477948 - RNA, 25 nt, Human
ggcgcagcgcagcgccccccguggc

SEQ ID NO: 477949 - RNA, 22 nt, Human
gugauuuccccuaucuccaaac

SEQ ID NO: 477950 - RNA, 19 nt, Human
gugcagagacgcuaucaga

SEQ ID NO: 477951 - RNA, 22 nt, Human
gugcagagacgcuaucagacuu

SEQ ID NO: 477952 - RNA, 19 nt, Human
guucccccccacccccccc

SEQ ID NO: 477953 - RNA, 20 nt, Human
uaacugugaacauauaaaca

SEQ ID NO: 477954 - RNA, 20 nt, Human
uagaagagaguggcuggaga

SEQ ID NO: 477955 - RNA, 18 nt, Human
uagcugauuucuaaaaau

SEQ ID NO: 477956 - RNA, 23 nt, Human
uccaaaaggccacaggauaggga

SEQ ID NO: 477957 - RNA, 24 nt, Human
ucccccccaccccccccaacagcc

SEQ ID NO: 477958 - RNA, 18 nt, Human
ucccgcccgccgccuccc

SEQ ID NO: 477959 - RNA, 19 nt, Human
uccgcaccacccgcggccg

SEQ ID NO: 477960 - RNA, 26 nt, Human
ugaaauaguaacuauuucacuacaaa

SEQ ID NO: 477961 - RNA, 21 nt, Human
ugaacauauaaacagccugca

SEQ ID NO: 477962 - RNA, 21 nt, Human
ugaagggccucugcuccagca

SEQ ID NO: 477963 - RNA, 23 nt, Human
uggauaaaaaacaaaaaaccuca

SEQ ID NO: 477964 - RNA, 21 nt, Human
ugggaaaagcaguggguucuc

SEQ ID NO: 477965 - RNA, 21 nt, Human
ugggagggggagaaaaagaau

SEQ ID NO: 477966 - RNA, 24 nt, Human
uggguagcugauuucuaaaaauca

SEQ ID NO: 477967 - RNA, 18 nt, Human
uucccccccacccccccc

SEQ ID NO: 477968 - RNA, 21 nt, Human
uucccccccaccccccccaac

SEQ ID NO: 477969 - RNA, 24 nt, Human
uucccccccaccccccccaacagc

SEQ ID NO: 477970 - RNA, 24 nt, Human
agaccccugcuccugagacaccag

SEQ ID NO: 477971 - RNA, 20 nt, Human
aucuguagacacagaccccu

SEQ ID NO: 477972 - RNA, 25 nt, Human
caagaagcaaaauguaugaaaauac

SEQ ID NO: 477973 - RNA, 24 nt, Human
cacagaccccugcuccugagacac

SEQ ID NO: 477974 - RNA, 24 nt, Human
cagcccaucuguagacacagaccc

SEQ ID NO: 477975 - RNA, 18 nt, Human
ccagacccuaagccucgg

SEQ ID NO: 477976 - RNA, 24 nt, Human
cccaccccagugugguccggggga

SEQ ID NO: 477977 - RNA, 22 nt, Human
ccugagacaccagccccaggag

SEQ ID NO: 477978 - RNA, 22 nt, Human
cggcucugccaccugucccugc

SEQ ID NO: 477979 - RNA, 21 nt, Human
cuccugagacaccagccccag

SEQ ID NO: 477980 - RNA, 24 nt, Human
cuccugggcccagggacaggcccc

SEQ ID NO: 477981 - RNA, 26 nt, Human
cucggcucugccaccugucccugcug

SEQ ID NO: 477982 - RNA, 18 nt, Human
ggcaagaagcaaaaugua

SEQ ID NO: 477983 - RNA, 19 nt, Human
gucuccagcuguggggggu

SEQ ID NO: 477984 - RNA, 19 nt, Human
uaaggucaucuuguuguuc

SEQ ID NO: 477985 - RNA, 21 nt, Human
uccugggcccagggacaggcc

SEQ ID NO: 477986 - RNA, 22 nt, Human
uccugggcccagggacaggccc

SEQ ID NO: 477987 - RNA, 24 nt, Human
ugaaacaguuaagaaauaagguca

SEQ ID NO: 477988 - RNA, 21 nt, Human
ugccagacccuaagccucggc

SEQ ID NO: 477989 - RNA, 20 nt, Human
ugcugggcaagaagcaaaau

SEQ ID NO: 477990 - RNA, 20 nt, Human
uggcuccugggcccagggac

SEQ ID NO: 477991 - RNA, 21 nt, Human
ugggcaagaagcaaaauguau

SEQ ID NO: 477992 - RNA, 19 nt, Human
uuaagaaauaaggucaucu

SEQ ID NO: 477993 - RNA, 24 nt, Human
aaaguggugagauuacaagcauga

SEQ ID NO: 477994 - RNA, 22 nt, Human
aacaucuauucaugucuuuugc

SEQ ID NO: 477995 - RNA, 24 nt, Human
aagaaauucauaaacucuuuccca

SEQ ID NO: 477996 - RNA, 24 nt, Human
aagagucucacuauguugcccagg

SEQ ID NO: 477997 - RNA, 25 nt, Human
aagcacuccucccaucuuggccucc

SEQ ID NO: 477998 - RNA, 20 nt, Human
aagugauccuccugccuccc

SEQ ID NO: 477999 - RNA, 23 nt, Human
aaucuguagcuuaucuuuuccuc

SEQ ID NO: 478000 - RNA, 19 nt, Human
aauguccaggagcacaacu

SEQ ID NO: 478001 - RNA, 24 nt, Human
acuauguugcccaggcuggucugg

SEQ ID NO: 478002 - RNA, 23 nt, Human
acuccucccaucuuggccuccca

SEQ ID NO: 478003 - RNA, 19 nt, Human
acucuguuacacagguugg

SEQ ID NO: 478004 - RNA, 21 nt, Human
agagguucuuuuuucuccucg

SEQ ID NO: 478005 - RNA, 21 nt, Human
agcugggacuacuggugugug

SEQ ID NO: 478006 - RNA, 20 nt, Human
aggacaucuggguuguuucc

SEQ ID NO: 478007 - RNA, 23 nt, Human
aguagcugggacuacuggugugu

SEQ ID NO: 478008 - RNA, 22 nt, Human
agucauacauaccccacacccc

SEQ ID NO: 478009 - RNA, 24 nt, Human
aguuuuguggccuuuuuuuuuuuu

SEQ ID NO: 478010 - RNA, 20 nt, Human
auaccccugagguacaacca

SEQ ID NO: 478011 - RNA, 20 nt, Human
auagauccucuucagugaaa

SEQ ID NO: 478012 - RNA, 21 nt, Human
auuacaagcaugagcuaccau

SEQ ID NO: 478013 - RNA, 21 nt, Human
auugaucagauauaugguuug

SEQ ID NO: 478014 - RNA, 25 nt, Human
caaacuccugggcucaagugauccu

SEQ ID NO: 478015 - RNA, 20 nt, Human
caaaguccaagaacuuguca

SEQ ID NO: 478016 - RNA, 24 nt, Human
caaaguggugagauuacaagcaug

SEQ ID NO: 478017 - RNA, 22 nt, Human
caagaacuugucaccuagccca

SEQ ID NO: 478018 - RNA, 22 nt, Human
cacccccuccagucccuauccc

SEQ ID NO: 478019 - RNA, 24 nt, Human
caccuagcccaagauccugaagau

SEQ ID NO: 478020 - RNA, 19 nt, Human
cacuauguugcccaggcug

SEQ ID NO: 478021 - RNA, 22 nt, Human
cacuauguugcccaggcugguc

SEQ ID NO: 478022 - RNA, 24 nt, Human
cacuccucccaucuuggccuccca

SEQ ID NO: 478023 - RNA, 24 nt, Human
cacucuguuacacagguuggagug

SEQ ID NO: 478024 - RNA, 24 nt, Human
cacuggauauuuucaucuuucccc

SEQ ID NO: 478025 - RNA, 24 nt, Human
cagccucaaacuccugggcucaag

SEQ ID NO: 478026 - RNA, 20 nt, Human
caggagcacaacugcugggu

SEQ ID NO: 478027 - RNA, 18 nt, Human
cauuucaauaauuuuguc

SEQ ID NO: 478028 - RNA, 20 nt, Human
ccaagaacuugucaccuagc

SEQ ID NO: 478029 - RNA, 23 nt, Human
ccacacccccuccagucccuauc

SEQ ID NO: 478030 - RNA, 22 nt, Human
ccauaauaccccugagguacaa

SEQ ID NO: 478031 - RNA, 22 nt, Human
ccccacacccccuccagucccu

SEQ ID NO: 478032 - RNA, 23 nt, Human
ccgcagccucaaacuccugggcu

SEQ ID NO: 478033 - RNA, 24 nt, Human
ccucacucuguuacacagguugga

SEQ ID NO: 478034 - RNA, 24 nt, Human
ccuccauugaauugcuuuuucacu

SEQ ID NO: 478035 - RNA, 19 nt, Human
ccucccaucuuggccuccc

SEQ ID NO: 478036 - RNA, 18 nt, Human
ccuccugccucccuagua

SEQ ID NO: 478037 - RNA, 22 nt, Human
ccugggcucaagugauccuccu

SEQ ID NO: 478038 - RNA, 23 nt, Human
ccugggcucaagugauccuccug

SEQ ID NO: 478039 - RNA, 21 nt, Human
ccuguuguaggacaucugggu

SEQ ID NO: 478040 - RNA, 27 nt, Human
ccuuuauagucauacauaccccacacc

SEQ ID NO: 478041 - RNA, 22 nt, Human
cgccaugggugucuaauugcuc

SEQ ID NO: 478042 - RNA, 26 nt, Human
cggggcaaaguccaagaacuugucac

SEQ ID NO: 478043 - RNA, 24 nt, Human
cucaagcacuccucccaucuuggc

SEQ ID NO: 478044 - RNA, 27 nt, Human
cucaagugauccuccugccucccuagu

SEQ ID NO: 478045 - RNA, 24 nt, Human
cuccucccaucuuggccucccaaa

SEQ ID NO: 478046 - RNA, 21 nt, Human
cuccugccucccuaguagcug

SEQ ID NO: 478047 - RNA, 23 nt, Human
cuccugggcucaagugauccucc

SEQ ID NO: 478048 - RNA, 26 nt, Human
cuggauauuuucaucuuuccccaaua

SEQ ID NO: 478049 - RNA, 19 nt, Human
cuguuccucugccaauacc

SEQ ID NO: 478050 - RNA, 21 nt, Human
gaccauuugagacugguuuuu

SEQ ID NO: 478051 - RNA, 24 nt, Human
gagugugguggugugaucacagcu

SEQ ID NO: 478052 - RNA, 26 nt, Human
gaguuuuguggccuuuuuuuuuuuuu

SEQ ID NO: 478053 - RNA, 24 nt, Human
gauuacaagcaugagcuaccaugc

SEQ ID NO: 478054 - RNA, 19 nt, Human
gcauucauuuguguguaug

SEQ ID NO: 478055 - RNA, 23 nt, Human
gcuggucuggaacgccuaaccuc

SEQ ID NO: 478056 - RNA, 21 nt, Human
gggcucaagugauccuccugc

SEQ ID NO: 478057 - RNA, 22 nt, Human
gggcucaagugauccuccugcc

SEQ ID NO: 478058 - RNA, 21 nt, Human
guauguagguccauacaacuu

SEQ ID NO: 478059 - RNA, 23 nt, Human
uaaaauauccaguuuguauccuc

SEQ ID NO: 478060 - RNA, 21 nt, Human
uaaguaacuuuacacuggaua

SEQ ID NO: 478061 - RNA, 22 nt, Human
uacaagcaugagcuaccaugcc

SEQ ID NO: 478062 - RNA, 19 nt, Human
uacaugcauucauuugugu

SEQ ID NO: 478063 - RNA, 24 nt, Human
uacaugcauucauuuguguguaug

SEQ ID NO: 478064 - RNA, 18 nt, Human
uaccccacacccccucca

SEQ ID NO: 478065 - RNA, 22 nt, Human
uaccccacacccccuccagucc

SEQ ID NO: 478066 - RNA, 18 nt, Human
uagcccaagauccugaag

SEQ ID NO: 478067 - RNA, 20 nt, Human
uagcccaagauccugaagau

SEQ ID NO: 478068 - RNA, 22 nt, Human
uagcugggacuacuggugugug

SEQ ID NO: 478069 - RNA, 23 nt, Human
uagcuuaucuuuuccucuucuua

SEQ ID NO: 478070 - RNA, 24 nt, Human
uaggacaucuggguuguuuccagu

SEQ ID NO: 478071 - RNA, 20 nt, Human
uaguagcugggacuacuggu

SEQ ID NO: 478072 - RNA, 22 nt, Human
uauguugcccaggcuggucugg

SEQ ID NO: 478073 - RNA, 23 nt, Human
uauguugcccaggcuggucugga

SEQ ID NO: 478074 - RNA, 24 nt, Human
uauguugcccaggcuggucuggaa

SEQ ID NO: 478075 - RNA, 24 nt, Human
ucaccgcagccucaaacuccuggg

SEQ ID NO: 478076 - RNA, 23 nt, Human
ucaucuuuccccauuuugucucc

SEQ ID NO: 478077 - RNA, 25 nt, Human
ucaugugcuuaaccucauaaucaaa

SEQ ID NO: 478078 - RNA, 23 nt, Human
ucccagaguggcuguaccauuuu

SEQ ID NO: 478079 - RNA, 21 nt, Human
uccugggcucaagugauccuc

SEQ ID NO: 478080 - RNA, 22 nt, Human
uccugggcucaagugauccucc

SEQ ID NO: 478081 - RNA, 24 nt, Human
uccugggcucaagugauccuccug

SEQ ID NO: 478082 - RNA, 19 nt, Human
ucucacuauguugcccagg

SEQ ID NO: 478083 - RNA, 23 nt, Human
ucucacuauguugcccaggcugg

SEQ ID NO: 478084 - RNA, 24 nt, Human
ucucacuauguugcccaggcuggu

SEQ ID NO: 478085 - RNA, 26 nt, Human
ucucacuauguugcccaggcuggucu

SEQ ID NO: 478086 - RNA, 22 nt, Human
ucuuauguuuaacuugauuaaa

SEQ ID NO: 478087 - RNA, 23 nt, Human
ucuucagugaaacaucuauucau

SEQ ID NO: 478088 - RNA, 24 nt, Human
ugacuucaguugaguuuuuaguac

SEQ ID NO: 478089 - RNA, 22 nt, Human
ugagaugaggccucacucuguu

SEQ ID NO: 478090 - RNA, 22 nt, Human
ugagauuacaagcaugagcuac

SEQ ID NO: 478091 - RNA, 24 nt, Human
ugagauuacaagcaugagcuacca

SEQ ID NO: 478092 - RNA, 24 nt, Human
ugcaaauucaucucaaucuguagc

SEQ ID NO: 478093 - RNA, 20 nt, Human
ugcgaucauacaguauguga

SEQ ID NO: 478094 - RNA, 30 nt, Human
uggaaugaauguccaggagcacaacugcuu

SEQ ID NO: 478095 - RNA, 24 nt, Human
uggauauuuucaucuuuccccauu

SEQ ID NO: 478096 - RNA, 18 nt, Human
uggccuuuuuuuuuuuuu

SEQ ID NO: 478097 - RNA, 20 nt, Human
ugggcucaagugauccuccu

SEQ ID NO: 478098 - RNA, 24 nt, Human
ugggcucaagugauccuccugccu

SEQ ID NO: 478099 - RNA, 20 nt, Human
uggugagauuacaagcauga

SEQ ID NO: 478100 - RNA, 24 nt, Human
uggugugaucacagcucaccgcag

SEQ ID NO: 478101 - RNA, 18 nt, Human
uguccaggagcacaacug

SEQ ID NO: 478102 - RNA, 19 nt, Human
ugucuguuccucugccaau

SEQ ID NO: 478103 - RNA, 20 nt, Human
uguguguauguagguccaua

SEQ ID NO: 478104 - RNA, 19 nt, Human
uguugcccaggcuggucug

SEQ ID NO: 478105 - RNA, 19 nt, Human
uguuuaaccauguaccugu

SEQ ID NO: 478106 - RNA, 30 nt, Human
uuaaccucauaaucaaauguuauaaucaaa

SEQ ID NO: 478107 - RNA, 21 nt, Human
uuacaugcauucauuugugug

SEQ ID NO: 478108 - RNA, 18 nt, Human
uucuccuguggcuuuuuu

SEQ ID NO: 478109 - RNA, 21 nt, Human
uucucuggaaugaauguccag

SEQ ID NO: 478110 - RNA, 22 nt, Human
uugacguaugugucuguuccuu

SEQ ID NO: 478111 - RNA, 24 nt, Human
uugcgucaucccuuuauagucaua

SEQ ID NO: 478112 - RNA, 21 nt, Human
uuuguauccucaucaguauuu

SEQ ID NO: 478113 - RNA, 23 nt, Human
uuuuuuuuuuuugagaugaggcc

SEQ ID NO: 478114 - RNA, 19 nt, Human
aaaugaugggauuacaggc

SEQ ID NO: 478115 - RNA, 23 nt, Human
aaaugaugggauuacaggcguga

SEQ ID NO: 478116 - RNA, 20 nt, Human
caaaugaugggauuacaggc

SEQ ID NO: 478117 - RNA, 21 nt, Human
caaaugaugggauuacaggcg

SEQ ID NO: 478118 - RNA, 24 nt, Human
caaaugaugggauuacaggcguga

SEQ ID NO: 478119 - RNA, 24 nt, Human
cccuuguaggcagagaugcagagg

SEQ ID NO: 478120 - RNA, 19 nt, Human
gaaacuucugaagagcaga

SEQ ID NO: 478121 - RNA, 22 nt, Human
gauuacaggcgugagccucugc

SEQ ID NO: 478122 - RNA, 22 nt, Human
gauuacaggcgugagccucugc

SEQ ID NO: 478123 - RNA, 23 nt, Human
gcaaaugaugggauuacaggcgu

SEQ ID NO: 478124 - RNA, 22 nt, Human
ggauaugguuuguaucuggagu

SEQ ID NO: 478125 - RNA, 20 nt, Human
uaaaacgaaaaacucaaguu

SEQ ID NO: 478126 - RNA, 22 nt, Human
uaugaagaugaaagggauuuua

SEQ ID NO: 478127 - RNA, 19 nt, Human
ugaagagcagaaacuguga

SEQ ID NO: 478128 - RNA, 19 nt, Human
ugagccucugcgcucccag

SEQ ID NO: 478129 - RNA, 18 nt, Human
ugagguuuguggcugaga

SEQ ID NO: 478130 - RNA, 18 nt, Human
ugggauuacaggcgugag

SEQ ID NO: 478131 - RNA, 19 nt, Human
ugggauuacaggcgugagc

SEQ ID NO: 478132 - RNA, 19 nt, Human
ugggauuacaggcgugagc

SEQ ID NO: 478133 - RNA, 20 nt, Human
ugggauuacaggcgugagcc

SEQ ID NO: 478134 - RNA, 20 nt, Human
ugggauuacaggcgugagcc

SEQ ID NO: 478135 - RNA, 21 nt, Human
ugggauuacaggcgugagccu

SEQ ID NO: 478136 - RNA, 24 nt, Human
ugggauuacaggcgugagccucug

SEQ ID NO: 478137 - RNA, 24 nt, Human
ugggauuacaggcgugagccucug

SEQ ID NO: 478138 - RNA, 19 nt, Human
ugucagagagagaucaagg

SEQ ID NO: 478139 - RNA, 24 nt, Human
aauaccaacccaccccaggagaca

SEQ ID NO: 478140 - RNA, 23 nt, Human
acucauuucccuacaggugaucu

SEQ ID NO: 478141 - RNA, 22 nt, Human
caacccaccccaggagacagcu

SEQ ID NO: 478142 - RNA, 18 nt, Human
ccccaccuccuuguucca

SEQ ID NO: 478143 - RNA, 21 nt, Human
ccccaggagacagcuguccac

SEQ ID NO: 478144 - RNA, 18 nt, Human
cccccaccuccuuguucc

SEQ ID NO: 478145 - RNA, 19 nt, Human
cccccaguuggggaagggg

SEQ ID NO: 478146 - RNA, 19 nt, Human
ccucuuuaauaccaaccca

SEQ ID NO: 478147 - RNA, 21 nt, Human
cgcccacccgaacggcgauca

SEQ ID NO: 478148 - RNA, 21 nt, Human
cugcccccaccuccuuguucc

SEQ ID NO: 478149 - RNA, 24 nt, Human
gggaacacucauuucccuacaggu

SEQ ID NO: 478150 - RNA, 22 nt, Human
ggugaucuuggggagagacugu

SEQ ID NO: 478151 - RNA, 22 nt, Human
uccacgugcaaaacucuucuca

SEQ ID NO: 478152 - RNA, 21 nt, Human
ucccaggcaacccuggagucu

SEQ ID NO: 478153 - RNA, 19 nt, Human
ucgcccacccgaacggcga

SEQ ID NO: 478154 - RNA, 20 nt, Human
uuggggaaggggccacacug

SEQ ID NO: 478155 - RNA, 21 nt, Human
aggcucuggaggaggaagggg

SEQ ID NO: 478156 - RNA, 21 nt, Human
caggcucuggaggaggaaggg

SEQ ID NO: 478157 - RNA, 18 nt, Human
ccugguccagguccccug

SEQ ID NO: 478158 - RNA, 21 nt, Human
cggcggggccugcugagggcu

SEQ ID NO: 478159 - RNA, 21 nt, Human
cggcggggccugcugagggcu

SEQ ID NO: 478160 - RNA, 24 nt, Human
cucuuccuccuuuacuggccucug

SEQ ID NO: 478161 - RNA, 18 nt, Human
cuggccucuggggcucgg

SEQ ID NO: 478162 - RNA, 19 nt, Human
cuuccuccuuuacuggccu

SEQ ID NO: 478163 - RNA, 21 nt, Human
gaggaggaaggggaggaagac

SEQ ID NO: 478164 - RNA, 24 nt, Human
gggguucaggccuuuuuuuuuuug

SEQ ID NO: 478165 - RNA, 25 nt, Human
gggguucaggccuuuuuuuuuuuuu

SEQ ID NO: 478166 - RNA, 19 nt, Human
uagagcaggcucgguuccu

SEQ ID NO: 478167 - RNA, 19 nt, Human
ucaaacuacaacugcauag

SEQ ID NO: 478168 - RNA, 19 nt, Human
ucaaacuacaacugcauag

SEQ ID NO: 478169 - RNA, 19 nt, Human
ucaaacuacaacugcauag

SEQ ID NO: 478170 - RNA, 24 nt, Human
uccgcuguggacagccggcggggc

SEQ ID NO: 478171 - RNA, 24 nt, Human
uccgcuguggacagccggcggggc

SEQ ID NO: 478172 - RNA, 21 nt, Human
ucuggaggaggaaggggagga

SEQ ID NO: 478173 - RNA, 19 nt, Human
uggacagccggcggggccu

SEQ ID NO: 478174 - RNA, 19 nt, Human
uggacagccggcggggccu

SEQ ID NO: 478175 - RNA, 20 nt, Human
uggaggaggaaggggaggaa

SEQ ID NO: 478176 - RNA, 18 nt, Human
ugggguucaggccuuuuu

SEQ ID NO: 478177 - RNA, 20 nt, Human
ugguggaggcaucagcaggg

SEQ ID NO: 478178 - RNA, 20 nt, Human
ugguggaggcaucagcaggg

SEQ ID NO: 478179 - RNA, 18 nt, Human
aaacagaaaaaggagccu

SEQ ID NO: 478180 - RNA, 20 nt, Human
aaacagaaaaaggagccugg

SEQ ID NO: 478181 - RNA, 19 nt, Human
aaacaugcuucuucccaga

SEQ ID NO: 478182 - RNA, 23 nt, Human
accccucugucuucccucuaauc

SEQ ID NO: 478183 - RNA, 18 nt, Human
agaaacagaaaaaggagc

SEQ ID NO: 478184 - RNA, 18 nt, Human
agcaggacuguguaggga

SEQ ID NO: 478185 - RNA, 23 nt, Human
agcaggacuguguagggagccug

SEQ ID NO: 478186 - RNA, 24 nt, Human
aguuucaguuuuauuuuuguauuu

SEQ ID NO: 478187 - RNA, 20 nt, Human
aucucccuuggaccccucug

SEQ ID NO: 478188 - RNA, 22 nt, Human
augagacaccaagaagaugaag

SEQ ID NO: 478189 - RNA, 18 nt, Human
augucauauaggggagaa

SEQ ID NO: 478190 - RNA, 18 nt, Human
caaaauuucuagagaaac

SEQ ID NO: 478191 - RNA, 24 nt, Human
caaguucugcucccuucgucuuuc

SEQ ID NO: 478192 - RNA, 18 nt, Human
cacuggugcagcccgggc

SEQ ID NO: 478193 - RNA, 23 nt, Human
cacuguauuuuuacugaggcagg

SEQ ID NO: 478194 - RNA, 21 nt, Human
cagccucucaggccccuuccu

SEQ ID NO: 478195 - RNA, 20 nt, Human
cauggcucugaggugggaag

SEQ ID NO: 478196 - RNA, 21 nt, Human
ccaacaugucugaacuucauu

SEQ ID NO: 478197 - RNA, 19 nt, Human
ccaccggagucucaggagg

SEQ ID NO: 478198 - RNA, 21 nt, Human
cccagagggauuucaaagaaa

SEQ ID NO: 478199 - RNA, 24 nt, Human
ccccgccagagcccuggcuccccc

SEQ ID NO: 478200 - RNA, 19 nt, Human
ccccgcugagccaucuccu

SEQ ID NO: 478201 - RNA, 19 nt, Human
ccccugggucuuggcggcu

SEQ ID NO: 478202 - RNA, 18 nt, Human
ccccuuccugcugugucu

SEQ ID NO: 478203 - RNA, 23 nt, Human
cccgccagagcccuggcucccca

SEQ ID NO: 478204 - RNA, 18 nt, Human
cccugggucuuggcggcu

SEQ ID NO: 478205 - RNA, 22 nt, Human
ccucucaggccccuuccugcug

SEQ ID NO: 478206 - RNA, 18 nt, Human
ccugcaccaagggcaccc

SEQ ID NO: 478207 - RNA, 20 nt, Human
ccugcguagccaaaggaaga

SEQ ID NO: 478208 - RNA, 18 nt, Human
ccugggguagaauccggg

SEQ ID NO: 478209 - RNA, 18 nt, Human
ccuggguggugcaggaac

SEQ ID NO: 478210 - RNA, 23 nt, Human
cgaccaggcucugaguguaaauc

SEQ ID NO: 478211 - RNA, 18 nt, Human
cgccagagcccuggcucc

SEQ ID NO: 478212 - RNA, 25 nt, Human
cuaccuggagccauuuuuuagcugu

SEQ ID NO: 478213 - RNA, 18 nt, Human
cucccucagauggucuuc

SEQ ID NO: 478214 - RNA, 19 nt, Human
cucuccagagccugcaucc

SEQ ID NO: 478215 - RNA, 21 nt, Human
cucugaggugggaagggugga

SEQ ID NO: 478216 - RNA, 23 nt, Human
cuucuucccagagggauuucaaa

SEQ ID NO: 478217 - RNA, 20 nt, Human
gagucucaggaggcugggga

SEQ ID NO: 478218 - RNA, 20 nt, Human
gagugagaggaggguuuaga

SEQ ID NO: 478219 - RNA, 23 nt, Human
gcagccccgcugagccaucuccu

SEQ ID NO: 478220 - RNA, 18 nt, Human
gcagcuccagacccugcc

SEQ ID NO: 478221 - RNA, 20 nt, Human
gccugcaccaagggcacccc

SEQ ID NO: 478222 - RNA, 18 nt, Human
gcggcuuguccccagcgg

SEQ ID NO: 478223 - RNA, 18 nt, Human
gcuggucccuccccucca

SEQ ID NO: 478224 - RNA, 22 nt, Human
ggccccuuccugcugugucugu

SEQ ID NO: 478225 - RNA, 18 nt, Human
ggccucuuggccccuugg

SEQ ID NO: 478226 - RNA, 22 nt, Human
ggcucugaggugggaagggugg

SEQ ID NO: 478227 - RNA, 18 nt, Human
ggguucguucucaugaag

SEQ ID NO: 478228 - RNA, 21 nt, Human
gucccuccccuccaccccugc

SEQ ID NO: 478229 - RNA, 25 nt, Human
guugaguuaagaaacagaaaaagga

SEQ ID NO: 478230 - RNA, 23 nt, Human
uaaacuuuauuccuaauaugaaa

SEQ ID NO: 478231 - RNA, 18 nt, Human
uagaaaauucucaccaag

SEQ ID NO: 478232 - RNA, 19 nt, Human
ucaaaccaggccuggccau

SEQ ID NO: 478233 - RNA, 23 nt, Human
ucaauaaacaugcuucuucccag

SEQ ID NO: 478234 - RNA, 20 nt, Human
ucaguuuuauuuuuguauuu

SEQ ID NO: 478235 - RNA, 21 nt, Human
ucucaggaggcuggggaggac

SEQ ID NO: 478236 - RNA, 19 nt, Human
ucugcucccuucgucuuuc

SEQ ID NO: 478237 - RNA, 19 nt, Human
ucuggagcaguuucaguuu

SEQ ID NO: 478238 - RNA, 20 nt, Human
ugaaguauccugggguagaa

SEQ ID NO: 478239 - RNA, 20 nt, Human
ugagacaccaagaagaugaa

SEQ ID NO: 478240 - RNA, 18 nt, Human
ugaggacaugagacacca

SEQ ID NO: 478241 - RNA, 20 nt, Human
ugaggcagggcagguucccc

SEQ ID NO: 478242 - RNA, 22 nt, Human
ugaggcagggcagguuccccug

SEQ ID NO: 478243 - RNA, 21 nt, Human
ugaggugggaaggguggagcc

SEQ ID NO: 478244 - RNA, 21 nt, Human
ugaggugggaaggguggagcc

SEQ ID NO: 478245 - RNA, 22 nt, Human
ugaguuaagaaacagaaaaagg

SEQ ID NO: 478246 - RNA, 21 nt, Human
ugccacagggcauccuguucu

SEQ ID NO: 478247 - RNA, 19 nt, Human
ugccuugcacccauccugc

SEQ ID NO: 478248 - RNA, 21 nt, Human
ugcugucgcugugccucccuc

SEQ ID NO: 478249 - RNA, 18 nt, Human
uggagaaagcugcuuucu

SEQ ID NO: 478250 - RNA, 19 nt, Human
uggccccuuggugcagccc

SEQ ID NO: 478251 - RNA, 20 nt, Human
uggccccuuggugcagcccc

SEQ ID NO: 478252 - RNA, 22 nt, Human
ugggaaggguggagccacuccc

SEQ ID NO: 478253 - RNA, 18 nt, Human
uggggaggacacuggaag

SEQ ID NO: 478254 - RNA, 20 nt, Human
ugggguagaauccgggaguc

SEQ ID NO: 478255 - RNA, 21 nt, Human
uggucccuccccuccaccccu

SEQ ID NO: 478256 - RNA, 22 nt, Human
uguuagaaaauucucaccaagg

SEQ ID NO: 478257 - RNA, 22 nt, Human
uucaguggacuuggggagaacu

SEQ ID NO: 478258 - RNA, 24 nt, Human
uuccugcugugucugucugaggcu

SEQ ID NO: 478259 - RNA, 19 nt, Human
uucugacucuuucaccagg

SEQ ID NO: 478260 - RNA, 21 nt, Human
uuuggagaaagcugcuuucug

SEQ ID NO: 478261 - RNA, 22 nt, Human
aaagagggaggggaagaggagg

SEQ ID NO: 478262 - RNA, 20 nt, Human
aaaggcaggugcuggggacu

SEQ ID NO: 478263 - RNA, 29 nt, Human
aacccacaaaaccaucauuaguaaaaaaa

SEQ ID NO: 478264 - RNA, 19 nt, Human
aaccccuucaaguauuggg

SEQ ID NO: 478265 - RNA, 18 nt, Human
aagagggaggggaagagg

SEQ ID NO: 478266 - RNA, 18 nt, Human
agaaagcuccaagcgcug

SEQ ID NO: 478267 - RNA, 18 nt, Human
agaguagaggggaggagg

SEQ ID NO: 478268 - RNA, 22 nt, Human
aggaaacucuccuaccaucucc

SEQ ID NO: 478269 - RNA, 19 nt, Human
agggaggggaagaggagga

SEQ ID NO: 478270 - RNA, 20 nt, Human
aggugcuggggacugggaag

SEQ ID NO: 478271 - RNA, 23 nt, Human
aggugcuggggacugggaaggcu

SEQ ID NO: 478272 - RNA, 22 nt, Human
aucauuaguaaaaaaacaaaac

SEQ ID NO: 478273 - RNA, 22 nt, Human
cagccuacuuauccuccccuuc

SEQ ID NO: 478274 - RNA, 19 nt, Human
cccagccuacuuauccucc

SEQ ID NO: 478275 - RNA, 23 nt, Human
ccccaaaugaaucacaugcugcc

SEQ ID NO: 478276 - RNA, 23 nt, Human
ccgaugcgggacagauuccuucc

SEQ ID NO: 478277 - RNA, 22 nt, Human
ccggaccgggaagacagcaggg

SEQ ID NO: 478278 - RNA, 21 nt, Human
ccuuccauccccaaaugaauc

SEQ ID NO: 478279 - RNA, 18 nt, Human
cgccgcgggcagcgggcc

SEQ ID NO: 478280 - RNA, 21 nt, Human
gagaaguagugagaaaggccg

SEQ ID NO: 478281 - RNA, 22 nt, Human
gccuacuuauccuccccuucuc

SEQ ID NO: 478282 - RNA, 20 nt, Human
gcuuugaaguuucccagccu

SEQ ID NO: 478283 - RNA, 25 nt, Human
ggccggaccgggaagacagcagggu

SEQ ID NO: 478284 - RNA, 19 nt, Human
gggaagacagcagggugcu

SEQ ID NO: 478285 - RNA, 20 nt, Human
ggggacugggaaggcuuuga

SEQ ID NO: 478286 - RNA, 21 nt, Human
ggugcugcgagcaggucuggg

SEQ ID NO: 478287 - RNA, 23 nt, Human
guuagggguucugggcugggacu

SEQ ID NO: 478288 - RNA, 19 nt, Human
guucugggcugggacuugg

SEQ ID NO: 478289 - RNA, 27 nt, Human
uaaaaaaaacccacaaaaccaucauua

SEQ ID NO: 478290 - RNA, 20 nt, Human
uaaaaaaacaaaaccccuuc

SEQ ID NO: 478291 - RNA, 19 nt, Human
uaggaaacucuccuaccau

SEQ ID NO: 478292 - RNA, 20 nt, Human
ucccuuaaaaaaaacccaca

SEQ ID NO: 478293 - RNA, 25 nt, Human
ucccuuaaaaaaaacccacaaaacc

SEQ ID NO: 478294 - RNA, 23 nt, Human
ugaaagagggaggggaagaggag

SEQ ID NO: 478295 - RNA, 18 nt, Human
ugggacuugggguuaugg

SEQ ID NO: 478296 - RNA, 20 nt, Human
uggggacugggaaggcuuug

SEQ ID NO: 478297 - RNA, 21 nt, Human
uuaaaaaaaacccacaaaacc

SEQ ID NO: 478298 - RNA, 23 nt, Human
uuucccagccuacuuauccuccc

SEQ ID NO: 478299 - RNA, 23 nt, Human
aaaguguuggauuacaggcguga

SEQ ID NO: 478300 - RNA, 24 nt, Human
aaccuuuuuuuaccacaaaaugga

SEQ ID NO: 478301 - RNA, 19 nt, Human
aaucuuuuuguuuguuugu

SEQ ID NO: 478302 - RNA, 24 nt, Human
accauguuggccaggcuggucucg

SEQ ID NO: 478303 - RNA, 24 nt, Human
agagucugucacccagguuggagu

SEQ ID NO: 478304 - RNA, 24 nt, Human
agcgauucuccugccucagccucc

SEQ ID NO: 478305 - RNA, 24 nt, Human
aggugauccgcccgccucagccuc

SEQ ID NO: 478306 - RNA, 25 nt, Human
agguuggagugcaguggcgcgaucu

SEQ ID NO: 478307 - RNA, 22 nt, Human
agguuucaccauguuggccagg

SEQ ID NO: 478308 - RNA, 18 nt, Human
aguagcugggaugacagg

SEQ ID NO: 478309 - RNA, 20 nt, Human
agugcaguggcgcgaucucg

SEQ ID NO: 478310 - RNA, 23 nt, Human
agugcaguggcgcgaucucggcu

SEQ ID NO: 478311 - RNA, 24 nt, Human
agugcaguggcgcgaucucggcuc

SEQ ID NO: 478312 - RNA, 18 nt, Human
caaaguguuggauuacag

SEQ ID NO: 478313 - RNA, 20 nt, Human
caaaguguuggauuacaggc

SEQ ID NO: 478314 - RNA, 22 nt, Human
caaaguguuggauuacaggcgu

SEQ ID NO: 478315 - RNA, 24 nt, Human
caaaguguuggauuacaggcguga

SEQ ID NO: 478316 - RNA, 20 nt, Human
caaccucugccucccggguu

SEQ ID NO: 478317 - RNA, 22 nt, Human
caagcgauucuccugccucagc

SEQ ID NO: 478318 - RNA, 24 nt, Human
caccacucucggcuaauuuuugua

SEQ ID NO: 478319 - RNA, 21 nt, Human
caccauguuggccaggcuggu

SEQ ID NO: 478320 - RNA, 24 nt, Human
caccauguuggccaggcuggucuc

SEQ ID NO: 478321 - RNA, 27 nt, Human
caccauguuggccaggcuggucucgaa

SEQ ID NO: 478322 - RNA, 24 nt, Human
cacccagguuggagugcaguggcg

SEQ ID NO: 478323 - RNA, 23 nt, Human
cacggcgccuggccuaaaaccuu

SEQ ID NO: 478324 - RNA, 21 nt, Human
cacugcaaccucugccucccg

SEQ ID NO: 478325 - RNA, 23 nt, Human
cacugcaaccucugccucccggg

SEQ ID NO: 478326 - RNA, 23 nt, Human
cagagucugucacccagguugga

SEQ ID NO: 478327 - RNA, 24 nt, Human
cauguuggccaggcuggucucgaa

SEQ ID NO: 478328 - RNA, 18 nt, Human
cccgaguagcugggauga

SEQ ID NO: 478329 - RNA, 23 nt, Human
cccggguucaagcgauucuccug

SEQ ID NO: 478330 - RNA, 19 nt, Human
ccgcccgccucagccucuc

SEQ ID NO: 478331 - RNA, 24 nt, Human
ccucccggguucaagcgauucucc

SEQ ID NO: 478332 - RNA, 21 nt, Human
ccugacucaggugauccgccc

SEQ ID NO: 478333 - RNA, 19 nt, Human
ccuggaucagggccggagc

SEQ ID NO: 478334 - RNA, 24 nt, Human
cgccucagccucucaaaguguugg

SEQ ID NO: 478335 - RNA, 24 nt, Human
cggagguuucaccauguuggccag

SEQ ID NO: 478336 - RNA, 24 nt, Human
cucaaaguguuggauuacaggcgu

SEQ ID NO: 478337 - RNA, 24 nt, Human
cucacugcaaccucugccucccgg

SEQ ID NO: 478338 - RNA, 24 nt, Human
cucagccucccgaguagcugggau

SEQ ID NO: 478339 - RNA, 25 nt, Human
cuccugacucaggugauccgcccgc

SEQ ID NO: 478340 - RNA, 24 nt, Human
cugcaaccucugccucccggguuc

SEQ ID NO: 478341 - RNA, 23 nt, Human
cugccucagccucccgaguagcu

SEQ ID NO: 478342 - RNA, 23 nt, Human
gacaggugcaugccaccacucuc

SEQ ID NO: 478343 - RNA, 23 nt, Human
gacucaggugauccgcccgccuc

SEQ ID NO: 478344 - RNA, 23 nt, Human
gaguuaacaaaauaucuuuaaua

SEQ ID NO: 478345 - RNA, 18 nt, Human
gauuacaggcgugagcca

SEQ ID NO: 478346 - RNA, 22 nt, Human
gauuacaggcgugagccacggc

SEQ ID NO: 478347 - RNA, 20 nt, Human
gccucagccucccgaguagc

SEQ ID NO: 478348 - RNA, 23 nt, Human
gccucagccucucaaaguguugg

SEQ ID NO: 478349 - RNA, 24 nt, Human
gcgauucuccugccucagccuccc

SEQ ID NO: 478350 - RNA, 18 nt, Human
gcuggacggugggggugg

SEQ ID NO: 478351 - RNA, 20 nt, Human
ggagaccuguaaggcgaagu

SEQ ID NO: 478352 - RNA, 24 nt, Human
ggagguuucaccauguuggccagg

SEQ ID NO: 478353 - RNA, 25 nt, Human
gggugcaguccuggaucagggccgg

SEQ ID NO: 478354 - RNA, 18 nt, Human
gucugucacccagguugg

SEQ ID NO: 478355 - RNA, 22 nt, Human
gugauccgcccgccucagccuc

SEQ ID NO: 478356 - RNA, 24 nt, Human
gugauccgcccgccucagccucuc

SEQ ID NO: 478357 - RNA, 23 nt, Human
guggggguggggugcaguccugg

SEQ ID NO: 478358 - RNA, 18 nt, Human
guuucaccauguuggcca

SEQ ID NO: 478359 - RNA, 19 nt, Human
guuucaccauguuggccag

SEQ ID NO: 478360 - RNA, 25 nt, Human
uaauagagacggagguuucaccaug

SEQ ID NO: 478361 - RNA, 24 nt, Human
uaauuuuuguauuuuuaauagaga

SEQ ID NO: 478362 - RNA, 22 nt, Human
uacaggcgugagccacggcgcc

SEQ ID NO: 478363 - RNA, 22 nt, Human
uacaggcgugagccacggcgcc

SEQ ID NO: 478364 - RNA, 23 nt, Human
uacaggcgugagccacggcgccu

SEQ ID NO: 478365 - RNA, 23 nt, Human
uagcugggaugacaggugcaugc

SEQ ID NO: 478366 - RNA, 23 nt, Human
ucaaaguguuggauuacaggcgu

SEQ ID NO: 478367 - RNA, 24 nt, Human
ucacccagguuggagugcaguggc

SEQ ID NO: 478368 - RNA, 24 nt, Human
ucacugcaaccucugccucccggg

SEQ ID NO: 478369 - RNA, 25 nt, Human
ucacugcaaccucugccucccgggu

SEQ ID NO: 478370 - RNA, 20 nt, Human
ucagccucccgaguagcugg

SEQ ID NO: 478371 - RNA, 23 nt, Human
ucccgaguagcugggaugacagg

SEQ ID NO: 478372 - RNA, 21 nt, Human
ucccggguucaagcgauucuc

SEQ ID NO: 478373 - RNA, 24 nt, Human
ucccggguucaagcgauucuccug

SEQ ID NO: 478374 - RNA, 21 nt, Human
uccgcccgccucagccucuca

SEQ ID NO: 478375 - RNA, 23 nt, Human
ucucaaaguguuggauuacaggc

SEQ ID NO: 478376 - RNA, 24 nt, Human
ucuccugccucagccucccgagua

SEQ ID NO: 478377 - RNA, 22 nt, Human
ucucgaacuccugacucaggug

SEQ ID NO: 478378 - RNA, 18 nt, Human
ucugucacccagguugga

SEQ ID NO: 478379 - RNA, 20 nt, Human
ucugucacccagguuggagu

SEQ ID NO: 478380 - RNA, 24 nt, Human
ucugucacccagguuggagugcag

SEQ ID NO: 478381 - RNA, 24 nt, Human
ugacaggugcaugccaccacucuc

SEQ ID NO: 478382 - RNA, 23 nt, Human
ugacucaggugauccgcccgccu

SEQ ID NO: 478383 - RNA, 24 nt, Human
ugacucaggugauccgcccgccuc

SEQ ID NO: 478384 - RNA, 21 nt, Human
ugcaguccuggaucagggccg

SEQ ID NO: 478385 - RNA, 22 nt, Human
ugcaguggcgcgaucucggcuc

SEQ ID NO: 478386 - RNA, 25 nt, Human
ugccaccacucucggcuaauuuuug

SEQ ID NO: 478387 - RNA, 24 nt, Human
ugccucagccucccgaguagcugg

SEQ ID NO: 478388 - RNA, 23 nt, Human
uggagugcaguggcgcgaucucg

SEQ ID NO: 478389 - RNA, 24 nt, Human
uggagugcaguggcgcgaucucgg

SEQ ID NO: 478390 - RNA, 20 nt, Human
uggauuacaggcgugagcca

SEQ ID NO: 478391 - RNA, 25 nt, Human
uggauuacaggcgugagccacggcg

SEQ ID NO: 478392 - RNA, 24 nt, Human
uggccaggcuggucucgaacuccu

SEQ ID NO: 478393 - RNA, 21 nt, Human
uggcuggacgguggggguggg

SEQ ID NO: 478394 - RNA, 22 nt, Human
ugggaugacaggugcaugccac

SEQ ID NO: 478395 - RNA, 24 nt, Human
ugggaugacaggugcaugccacca

SEQ ID NO: 478396 - RNA, 22 nt, Human
uggggguggggugcaguccugg

SEQ ID NO: 478397 - RNA, 25 nt, Human
uuaauagagacggagguuucaccau

SEQ ID NO: 478398 - RNA, 21 nt, Human
uucaagcgauucuccugccuc

SEQ ID NO: 478399 - RNA, 23 nt, Human
uucaagcgauucuccugccucag

SEQ ID NO: 478400 - RNA, 24 nt, Human
uucaagcgauucuccugccucagc

SEQ ID NO: 478401 - RNA, 23 nt, Human
uuggauggcuggacggugggggu

SEQ ID NO: 478402 - RNA, 18 nt, Human
uuggauuacaggcgugag

SEQ ID NO: 478403 - RNA, 22 nt, Human
uuggauuacaggcgugagccac

SEQ ID NO: 478404 - RNA, 20 nt, Human
uuguuuguuuguuuuguuuu

SEQ ID NO: 478405 - RNA, 18 nt, Human
uuucaccauguuggccag

SEQ ID NO: 478406 - RNA, 24 nt, Human
uuucaccauguuggccaggcuggu

SEQ ID NO: 478407 - RNA, 25 nt, Human
uuuuuaauagagacggagguuucac

SEQ ID NO: 478408 - RNA, 20 nt, Human
uuuuuguauuuuuaauagag

SEQ ID NO: 478409 - RNA, 23 nt, Human
uuuuuguauuuuuaauagagacg

SEQ ID NO: 478410 - RNA, 23 nt, Human
uuuuuguuuguuuguuuuguuuu

SEQ ID NO: 478411 - RNA, 18 nt, Human
aaaagaaggcggagccug

SEQ ID NO: 478412 - RNA, 18 nt, Human
aaaagcaaaaggaaaggu

SEQ ID NO: 478413 - RNA, 19 nt, Human
aagcaaaaggaaagguucu

SEQ ID NO: 478414 - RNA, 18 nt, Human
aagcggcgucccuggggg

SEQ ID NO: 478415 - RNA, 21 nt, Human
aaggcggggccgccgagggga

SEQ ID NO: 478416 - RNA, 20 nt, Human
aaguucacacacacucacac

SEQ ID NO: 478417 - RNA, 22 nt, Human
acacucacacacagaucagaac

SEQ ID NO: 478418 - RNA, 23 nt, Human
accaggaacuucccaaauguccu

SEQ ID NO: 478419 - RNA, 21 nt, Human
accccgcggagaagaaaagaa

SEQ ID NO: 478420 - RNA, 19 nt, Human
acugaaucaccccgcggag

SEQ ID NO: 478421 - RNA, 18 nt, Human
agaagaaaagaaggcgga

SEQ ID NO: 478422 - RNA, 21 nt, Human
agaucgaggggcgcagagugg

SEQ ID NO: 478423 - RNA, 20 nt, Human
aggcggggccgccgagggga

SEQ ID NO: 478424 - RNA, 21 nt, Human
caaacccaaucacuggacuga

SEQ ID NO: 478425 - RNA, 21 nt, Human
cacacacacucacacacagau

SEQ ID NO: 478426 - RNA, 19 nt, Human
cacacucacacacagauca

SEQ ID NO: 478427 - RNA, 18 nt, Human
caccaggaacuucccaaa

SEQ ID NO: 478428 - RNA, 18 nt, Human
cacuggacugaaucaccc

SEQ ID NO: 478429 - RNA, 23 nt, Human
cagguuucuuaucccagggagaa

SEQ ID NO: 478430 - RNA, 20 nt, Human
cauuggguccgcgguaugac

SEQ ID NO: 478431 - RNA, 22 nt, Human
ccacaaacccaaucacuggacu

SEQ ID NO: 478432 - RNA, 21 nt, Human
cccuggggguguggguuuugg

SEQ ID NO: 478433 - RNA, 22 nt, Human
ccgccgaggggagcggggagcg

SEQ ID NO: 478434 - RNA, 20 nt, Human
ccugccgaccuggaggcggg

SEQ ID NO: 478435 - RNA, 21 nt, Human
ccuuaaaaaaagcaaaaggaa

SEQ ID NO: 478436 - RNA, 20 nt, Human
cgggguuuugucagagcugg

SEQ ID NO: 478437 - RNA, 21 nt, Human
cugcagaaagagccugggaga

SEQ ID NO: 478438 - RNA, 18 nt, Human
cugcccggcugcccaggg

SEQ ID NO: 478439 - RNA, 18 nt, Human
cugggauuagcaagaaaa

SEQ ID NO: 478440 - RNA, 21 nt, Human
cuuugagggugagggggccug

SEQ ID NO: 478441 - RNA, 18 nt, Human
gaccaaaccgagguugcu

SEQ ID NO: 478442 - RNA, 18 nt, Human
gcuggagucugggugcug

SEQ ID NO: 478443 - RNA, 19 nt, Human
ggccggugcuggagucugg

SEQ ID NO: 478444 - RNA, 18 nt, Human
gggagcggggacuuggga

SEQ ID NO: 478445 - RNA, 23 nt, Human
gggagcggggagcggggacuugg

SEQ ID NO: 478446 - RNA, 18 nt, Human
gucugggugcuggauggc

SEQ ID NO: 478447 - RNA, 20 nt, Human
gugggggccuuacuacccca

SEQ ID NO: 478448 - RNA, 19 nt, Human
uaaaaaaagcaaaaggaaa

SEQ ID NO: 478449 - RNA, 20 nt, Human
uacagagcguuuacaggcag

SEQ ID NO: 478450 - RNA, 19 nt, Human
uaccuggguggaggaggga

SEQ ID NO: 478451 - RNA, 19 nt, Human
uagggaccaaaccgagguu

SEQ ID NO: 478452 - RNA, 19 nt, Human
uaugacugcagaaagagcc

SEQ ID NO: 478453 - RNA, 23 nt, Human
ucccaaauguccuuaaaaaaagc

SEQ ID NO: 478454 - RNA, 22 nt, Human
ucccugcagccggagugggggu

SEQ ID NO: 478455 - RNA, 22 nt, Human
ucccuggggguguggguuuugg

SEQ ID NO: 478456 - RNA, 21 nt, Human
uccgcgguaugacugcagaaa

SEQ ID NO: 478457 - RNA, 21 nt, Human
uccuacaccaggaacuuccca

SEQ ID NO: 478458 - RNA, 20 nt, Human
ucgcugggacagggucccug

SEQ ID NO: 478459 - RNA, 18 nt, Human
ucggccggugcuggaguc

SEQ ID NO: 478460 - RNA, 25 nt, Human
ucugggugcuggauggcgcagccgg

SEQ ID NO: 478461 - RNA, 18 nt, Human
ugcccggcugcccagggg

SEQ ID NO: 478462 - RNA, 24 nt, Human
ugcuuauagaggaggcgggguuuu

SEQ ID NO: 478463 - RNA, 19 nt, Human
ugggauggguggaagggag

SEQ ID NO: 478464 - RNA, 20 nt, Human
uggggguguggguuuuggag

SEQ ID NO: 478465 - RNA, 24 nt, Human
uuccugaggaacuggauuccgagc

SEQ ID NO: 478466 - RNA, 23 nt, Human
uucugcccggcugcccaggggcu

SEQ ID NO: 478467 - RNA, 23 nt, Human
uugcucgguugggggcgcuacac

SEQ ID NO: 478468 - RNA, 21 nt, Human
aaaaaaaacaacagcagcaga

SEQ ID NO: 478469 - RNA, 22 nt, Human
aaaaaaaacaacagcagcagaa

SEQ ID NO: 478470 - RNA, 22 nt, Human
aaaaaagaaguacaaccaugga

SEQ ID NO: 478471 - RNA, 20 nt, Human
aaacaagauuggccaugagu

SEQ ID NO: 478472 - RNA, 18 nt, Human
aaacagccuccuccccca

SEQ ID NO: 478473 - RNA, 25 nt, Human
aaagugggcagacaacaaaucggua

SEQ ID NO: 478474 - RNA, 23 nt, Human
aagcuaaaaaaaacaacagcagc

SEQ ID NO: 478475 - RNA, 24 nt, Human
aauggaaagaccaauuucacuaga

SEQ ID NO: 478476 - RNA, 23 nt, Human
acaauugcccuuuaaagacucaa

SEQ ID NO: 478477 - RNA, 19 nt, Human
aggacaaacagccuccucc

SEQ ID NO: 478478 - RNA, 19 nt, Human
agggaugggcacacuggga

SEQ ID NO: 478479 - RNA, 23 nt, Human
agggaugggcacacugggaucca

SEQ ID NO: 478480 - RNA, 25 nt, Human
cagcagaacucucugguaguacauc

SEQ ID NO: 478481 - RNA, 20 nt, Human
cagcucagcaaggaaggcag

SEQ ID NO: 478482 - RNA, 21 nt, Human
cccagagagagaaggacaaac

SEQ ID NO: 478483 - RNA, 21 nt, Human
ccccagagagagaaggacaaa

SEQ ID NO: 478484 - RNA, 23 nt, Human
cucaaagaaagaaaagcuaaaaa

SEQ ID NO: 478485 - RNA, 21 nt, Human
cuuuaaagacucaaagaaaga

SEQ ID NO: 478486 - RNA, 20 nt, Human
gagguugagggaugggcaca

SEQ ID NO: 478487 - RNA, 21 nt, Human
ggacaaacagccuccuccccc

SEQ ID NO: 478488 - RNA, 19 nt, Human
ggggacaggcuagcaggaa

SEQ ID NO: 478489 - RNA, 19 nt, Human
gucgguaguccauugucuu

SEQ ID NO: 478490 - RNA, 24 nt, Human
uaaaaaucuuuauauccaaaaaag

SEQ ID NO: 478491 - RNA, 19 nt, Human
uauauccaaaaaagaagua

SEQ ID NO: 478492 - RNA, 26 nt, Human
uauccaaaaaagaaguacaaccuuga

SEQ ID NO: 478493 - RNA, 24 nt, Human
uccccucccucccucuccaggaga

SEQ ID NO: 478494 - RNA, 20 nt, Human
ugacuucaauccagagaggg

SEQ ID NO: 478495 - RNA, 22 nt, Human
ugcagaagaauccagagggaag

SEQ ID NO: 478496 - RNA, 26 nt, Human
uggcacaauaucugggacugguugca

SEQ ID NO: 478497 - RNA, 25 nt, Human
uguugcugcagguuuuuaaaucccc

SEQ ID NO: 478498 - RNA, 26 nt, Human
uuaaaaaaugcauuuaaaaaucuuua

SEQ ID NO: 478499 - RNA, 19 nt, Human
uuaaauccccucccucccu

SEQ ID NO: 478500 - RNA, 18 nt, Human
uucacuagaccuuccuca

SEQ ID NO: 478501 - RNA, 19 nt, Human
uugaagaauaggaaacaag

SEQ ID NO: 478502 - RNA, 23 nt, Human
uuuaaauccccucccucccucuc

SEQ ID NO: 478503 - RNA, 18 nt, Human
uuuuuuuuuuuuuguuuc

SEQ ID NO: 478504 - RNA, 23 nt, Human
uuuuuuuuuuuuuuuguuucaag

SEQ ID NO: 478505 - RNA, 23 nt, Human
uuuuuuuuuuuuuuuuguuucaa

SEQ ID NO: 478506 - RNA, 18 nt, Human
uuuuuuuuuuuuuuuuug

SEQ ID NO: 478507 - RNA, 22 nt, Human
uuuuuuuuuuuuuuuuuuguuu

SEQ ID NO: 478508 - RNA, 21 nt, Human
aaacaaaagauuugaagacaa

SEQ ID NO: 478509 - RNA, 26 nt, Human
aaagaacagcauaguaggauagccau

SEQ ID NO: 478510 - RNA, 22 nt, Human
aaagaaccuaauguuuucaagc

SEQ ID NO: 478511 - RNA, 23 nt, Human
aacacaggcaggaauaacuaccu

SEQ ID NO: 478512 - RNA, 18 nt, Human
aacacuuugggaggcuga

SEQ ID NO: 478513 - RNA, 24 nt, Human
aacacuuugggaggcugagguggg

SEQ ID NO: 478514 - RNA, 20 nt, Human
aacagaaaauucuacaugag

SEQ ID NO: 478515 - RNA, 22 nt, Human
aacccacaaaucucacaaaaag

SEQ ID NO: 478516 - RNA, 20 nt, Human
aacguggcaaaacccugucu

SEQ ID NO: 478517 - RNA, 21 nt, Human
aacuggaguuaaaucaugucc

SEQ ID NO: 478518 - RNA, 23 nt, Human
aagaaccuaauguuuucaagcau

SEQ ID NO: 478519 - RNA, 18 nt, Human
aagcaaaacacaagacca

SEQ ID NO: 478520 - RNA, 19 nt, Human
aagcaaaacacaagaccaa

SEQ ID NO: 478521 - RNA, 22 nt, Human
aagcaaaacacaagaccaauag

SEQ ID NO: 478522 - RNA, 20 nt, Human
aaguucagauauuugaggau

SEQ ID NO: 478523 - RNA, 24 nt, Human
aaugucuguaaucccaacacuuug

SEQ ID NO: 478524 - RNA, 23 nt, Human
acaccagaagcuuguauaagaca

SEQ ID NO: 478525 - RNA, 24 nt, Human
acagaguaagacccugucucagaa

SEQ ID NO: 478526 - RNA, 24 nt, Human
acccugucucuacaaaaaaugcaa

SEQ ID NO: 478527 - RNA, 24 nt, Human
acugcacuccagccugggcgacag

SEQ ID NO: 478528 - RNA, 26 nt, Human
acugcacuccagccugggcgacagag

SEQ ID NO: 478529 - RNA, 20 nt, Human
acuuaggaggcugagguggg

SEQ ID NO: 478530 - RNA, 23 nt, Human
agacagaagccuuggggacaaug

SEQ ID NO: 478531 - RNA, 23 nt, Human
agacagaagccuugggggggacc

SEQ ID NO: 478532 - RNA, 19 nt, Human
agagggauccuuagaacca

SEQ ID NO: 478533 - RNA, 20 nt, Human
agauauguuggaggggcuau

SEQ ID NO: 478534 - RNA, 23 nt, Human
agccaggugugguggcacgcgcc

SEQ ID NO: 478535 - RNA, 22 nt, Human
agccugggcgacagaguaagac

SEQ ID NO: 478536 - RNA, 19 nt, Human
agcuuccaguagaagacuc

SEQ ID NO: 478537 - RNA, 18 nt, Human
aggaagaaaacaaaagau

SEQ ID NO: 478538 - RNA, 23 nt, Human
aggaguucaagaccagccuaagc

SEQ ID NO: 478539 - RNA, 24 nt, Human
aggcugaggugggaggauugcuug

SEQ ID NO: 478540 - RNA, 24 nt, Human
aggcugaggugggcggaucacuug

SEQ ID NO: 478541 - RNA, 21 nt, Human
agggcuucugagcccuucuuu

SEQ ID NO: 478542 - RNA, 21 nt, Human
agggcuucugagcccuucuuu

SEQ ID NO: 478543 - RNA, 22 nt, Human
aggucgaggcugcagugagccg

SEQ ID NO: 478544 - RNA, 22 nt, Human
aggugggaggauugcuugagcu

SEQ ID NO: 478545 - RNA, 24 nt, Human
aggugugguggcacgcgccuguag

SEQ ID NO: 478546 - RNA, 19 nt, Human
aguagacagaagccuuggg

SEQ ID NO: 478547 - RNA, 27 nt, Human
aguagacagaagccuugggggggaccc

SEQ ID NO: 478548 - RNA, 18 nt, Human
aguucaggaguucaagac

SEQ ID NO: 478549 - RNA, 21 nt, Human
aguucaggaguucaagaccag

SEQ ID NO: 478550 - RNA, 25 nt, Human
auaaagauuauuggaaagcuucagu

SEQ ID NO: 478551 - RNA, 20 nt, Human
auaguugucgagaaaggagg

SEQ ID NO: 478552 - RNA, 24 nt, Human
aucacugcacuccagccugggcga

SEQ ID NO: 478553 - RNA, 23 nt, Human
aucacuugaguucaggaguucaa

SEQ ID NO: 478554 - RNA, 24 nt, Human
aucacuugaguucaggaguucaag

SEQ ID NO: 478555 - RNA, 22 nt, Human
auggcuaaugucuguaauccca

SEQ ID NO: 478556 - RNA, 19 nt, Human
auuccauuaccaaagaaca

SEQ ID NO: 478557 - RNA, 24 nt, Human
auugcaucacugcacuccagccug

SEQ ID NO: 478558 - RNA, 22 nt, Human
auuuauaaggcacaaaacccac

SEQ ID NO: 478559 - RNA, 20 nt, Human
caaaaaaugcaaaaauuagc

SEQ ID NO: 478560 - RNA, 21 nt, Human
caaaacccacaaaucucacaa

SEQ ID NO: 478561 - RNA, 22 nt, Human
caacaacaaaacucuuaaaucc

SEQ ID NO: 478562 - RNA, 24 nt, Human
caacacuuugggaggcugaggugg

SEQ ID NO: 478563 - RNA, 22 nt, Human
caacguggcaaaacccugucuc

SEQ ID NO: 478564 - RNA, 24 nt, Human
caacguggcaaaacccugucucua

SEQ ID NO: 478565 - RNA, 19 nt, Human
caagcaaaacacaagacca

SEQ ID NO: 478566 - RNA, 20 nt, Human
caauagaauuaguagacaga

SEQ ID NO: 478567 - RNA, 23 nt, Human
caauauauauuuuuucuuauccc

SEQ ID NO: 478568 - RNA, 18 nt, Human
cacaauucccccauccuc

SEQ ID NO: 478569 - RNA, 22 nt, Human
caccaccuaucccauagaagcu

SEQ ID NO: 478570 - RNA, 22 nt, Human
caccuacuuacuuuccagucca

SEQ ID NO: 478571 - RNA, 19 nt, Human
cacugcacuccagccuggg

SEQ ID NO: 478572 - RNA, 20 nt, Human
cacugcacuccagccugggc

SEQ ID NO: 478573 - RNA, 20 nt, Human
cacugcacuccagccugggc

SEQ ID NO: 478574 - RNA, 22 nt, Human
cacugcacuccagccugggcga

SEQ ID NO: 478575 - RNA, 23 nt, Human
cacugcacuccagccugggcgac

SEQ ID NO: 478576 - RNA, 24 nt, Human
cacugcacuccagccugggcgaca

SEQ ID NO: 478577 - RNA, 26 nt, Human
cacugcacuccagccugggcgacaga

SEQ ID NO: 478578 - RNA, 22 nt, Human
cacuucagagaaaacugccagg

SEQ ID NO: 478579 - RNA, 18 nt, Human
cagaacagaaaauucuac

SEQ ID NO: 478580 - RNA, 20 nt, Human
cagcccgcgcucccgccucg

SEQ ID NO: 478581 - RNA, 24 nt, Human
cagggaccaauccacaguaaacac

SEQ ID NO: 478582 - RNA, 24 nt, Human
cagguacuuaggaggcugaggugg

SEQ ID NO: 478583 - RNA, 22 nt, Human
caucuaagaaaacaauguagcu

SEQ ID NO: 478584 - RNA, 18 nt, Human
caugaagaugauucuccu

SEQ ID NO: 478585 - RNA, 21 nt, Human
caugcacuccgugccgcgccc

SEQ ID NO: 478586 - RNA, 18 nt, Human
cauuccaacagggugagg

SEQ ID NO: 478587 - RNA, 23 nt, Human
ccaacuaauccuaccaagagcuu

SEQ ID NO: 478588 - RNA, 18 nt, Human
ccagcccgcgcucccgcc

SEQ ID NO: 478589 - RNA, 23 nt, Human
ccagccuaagcaacguggcaaaa

SEQ ID NO: 478590 - RNA, 19 nt, Human
cccaagcaccaccuauccc

SEQ ID NO: 478591 - RNA, 21 nt, Human
cccaauaacccagaacagaaa

SEQ ID NO: 478592 - RNA, 23 nt, Human
ccccuggaggccauagucggaau

SEQ ID NO: 478593 - RNA, 20 nt, Human
cccgcggguggcugugaccc

SEQ ID NO: 478594 - RNA, 20 nt, Human
cccgugcgcguagcccagcc

SEQ ID NO: 478595 - RNA, 24 nt, Human
cccucccuucuccuuccaacuuuc

SEQ ID NO: 478596 - RNA, 28 nt, Human
cccucccuucuccuuccaacuuucaaaa

SEQ ID NO: 478597 - RNA, 20 nt, Human
cccuucuccuuccaacuuuc

SEQ ID NO: 478598 - RNA, 21 nt, Human
cccuucuccuuccaacuuuca

SEQ ID NO: 478599 - RNA, 21 nt, Human
ccgccucggggucccggccac

SEQ ID NO: 478600 - RNA, 19 nt, Human
ccguaauaaagaaaacuuc

SEQ ID NO: 478601 - RNA, 20 nt, Human
ccuauuucuuucuagcuucc

SEQ ID NO: 478602 - RNA, 23 nt, Human
ccuuagaaccaacuaauccuacc

SEQ ID NO: 478603 - RNA, 20 nt, Human
ccuucuucccuucugcucuc

SEQ ID NO: 478604 - RNA, 21 nt, Human
cgccuguaguaccagguacuu

SEQ ID NO: 478605 - RNA, 24 nt, Human
cggaucacuugaguucaggaguuc

SEQ ID NO: 478606 - RNA, 19 nt, Human
cggggucccggccacgagc

SEQ ID NO: 478607 - RNA, 19 nt, Human
cgugcgcguagcccagccc

SEQ ID NO: 478608 - RNA, 21 nt, Human
cuagguuaguuuugugggucc

SEQ ID NO: 478609 - RNA, 20 nt, Human
cucaaugccucucaaauauc

SEQ ID NO: 478610 - RNA, 22 nt, Human
cucacccaaaggagccuucagg

SEQ ID NO: 478611 - RNA, 23 nt, Human
cuccacacguugccccacuugcc

SEQ ID NO: 478612 - RNA, 21 nt, Human
cugaaaugggaaaugaacccc

SEQ ID NO: 478613 - RNA, 21 nt, Human
cugcagugagccgugauugca

SEQ ID NO: 478614 - RNA, 18 nt, Human
cuggacuuuggguuccuc

SEQ ID NO: 478615 - RNA, 25 nt, Human
cugucucuacaaaaaaugcaaaaag

SEQ ID NO: 478616 - RNA, 23 nt, Human
cuguuucuagggcaggcgugaug

SEQ ID NO: 478617 - RNA, 20 nt, Human
cuucccucccuucuccuucc

SEQ ID NO: 478618 - RNA, 20 nt, Human
cuucccuucugcucucuucc

SEQ ID NO: 478619 - RNA, 23 nt, Human
cuugaguucaggaguucaagacc

SEQ ID NO: 478620 - RNA, 24 nt, Human
cuuuuaggaauugccccuggaggc

SEQ ID NO: 478621 - RNA, 21 nt, Human
gacagaguaagacccugucuc

SEQ ID NO: 478622 - RNA, 18 nt, Human
gacccugucucagaaaaa

SEQ ID NO: 478623 - RNA, 20 nt, Human
gagcuucccgcggguggcug

SEQ ID NO: 478624 - RNA, 23 nt, Human
gagcuugacuuacaccuucuucc

SEQ ID NO: 478625 - RNA, 21 nt, Human
gaggugggaggauugcuugag

SEQ ID NO: 478626 - RNA, 23 nt, Human
gaucacuugaguucaggaguuca

SEQ ID NO: 478627 - RNA, 24 nt, Human
gaucacuugaguucaggaguucaa

SEQ ID NO: 478628 - RNA, 19 nt, Human
gauucccuggugcaacccc

SEQ ID NO: 478629 - RNA, 21 nt, Human
gcaauaucuucaugccuguuc

SEQ ID NO: 478630 - RNA, 19 nt, Human
gcaaucaagcaaaacacaa

SEQ ID NO: 478631 - RNA, 23 nt, Human
gcacuccagccugggcgacagag

SEQ ID NO: 478632 - RNA, 24 nt, Human
gcacuccagccugggcgacagagu

SEQ ID NO: 478633 - RNA, 19 nt, Human
gccacaacacaucaauccc

SEQ ID NO: 478634 - RNA, 24 nt, Human
gcccgugcgcguagcccagcccgg

SEQ ID NO: 478635 - RNA, 19 nt, Human
gccucggggucccggccac

SEQ ID NO: 478636 - RNA, 23 nt, Human
gcgacagaguaagacccugucuc

SEQ ID NO: 478637 - RNA, 24 nt, Human
gcuggggaggucgaggcugcagug

SEQ ID NO: 478638 - RNA, 22 nt, Human
gcuuccugaauguccacaugaa

SEQ ID NO: 478639 - RNA, 23 nt, Human
gcuucugagcccuucuuuugaca

SEQ ID NO: 478640 - RNA, 23 nt, Human
ggaggcuggacuuuggguuccuc

SEQ ID NO: 478641 - RNA, 23 nt, Human
ggauagccauuccaacaggguga

SEQ ID NO: 478642 - RNA, 23 nt, Human
ggaucacuugaguucaggaguuc

SEQ ID NO: 478643 - RNA, 19 nt, Human
ggcaggaauaacuaccuuc

SEQ ID NO: 478644 - RNA, 20 nt, Human
gggaggauugcuugagcugg

SEQ ID NO: 478645 - RNA, 20 nt, Human
gggaggcugaggugggcgga

SEQ ID NO: 478646 - RNA, 18 nt, Human
guggauuugaacuaaaga

SEQ ID NO: 478647 - RNA, 22 nt, Human
gugggaggauugcuugagcugg

SEQ ID NO: 478648 - RNA, 18 nt, Human
uaaagaucucugcccaca

SEQ ID NO: 478649 - RNA, 19 nt, Human
uaaaguuaaccagcagaau

SEQ ID NO: 478650 - RNA, 18 nt, Human
uaaauuaagagagagaga

SEQ ID NO: 478651 - RNA, 21 nt, Human
uaacuaagggaccucauacug

SEQ ID NO: 478652 - RNA, 25 nt, Human
uaacucucaaguaauccuguagucc

SEQ ID NO: 478653 - RNA, 21 nt, Human
uagaaccaacuaauccuacca

SEQ ID NO: 478654 - RNA, 21 nt, Human
uagacaccagaagcuuguaua

SEQ ID NO: 478655 - RNA, 21 nt, Human
uagagggauccuuagaaccaa

SEQ ID NO: 478656 - RNA, 26 nt, Human
uagcccagcccggcccagcccgcgcu

SEQ ID NO: 478657 - RNA, 22 nt, Human
uaggaggcugaggugggaggau

SEQ ID NO: 478658 - RNA, 24 nt, Human
uaggaggcugaggugggaggauug

SEQ ID NO: 478659 - RNA, 23 nt, Human
uagucaagaucccuucccuuccu

SEQ ID NO: 478660 - RNA, 23 nt, Human
uaguuuuuucaaagguauuuaca

SEQ ID NO: 478661 - RNA, 18 nt, Human
uauccauucagcuuuuag

SEQ ID NO: 478662 - RNA, 21 nt, Human
uauguuuguuuguggccaaaa

SEQ ID NO: 478663 - RNA, 22 nt, Human
uauuggaaagcuucaguugaau

SEQ ID NO: 478664 - RNA, 21 nt, Human
ucacugcacuccagccugggc

SEQ ID NO: 478665 - RNA, 24 nt, Human
ucacugcacuccagccugggcgac

SEQ ID NO: 478666 - RNA, 25 nt, Human
ucaguucaacccaguucaguuuugc

SEQ ID NO: 478667 - RNA, 24 nt, Human
uccagccugggcgacagaguaaga

SEQ ID NO: 478668 - RNA, 23 nt, Human
ucccuggugcaacccccagaucu

SEQ ID NO: 478669 - RNA, 23 nt, Human
uccguaauaaagaaaacuucaaa

SEQ ID NO: 478670 - RNA, 22 nt, Human
uccuuuggcuuucaaacacugc

SEQ ID NO: 478671 - RNA, 25 nt, Human
ucuaagcugaagcagaaccgggguc

SEQ ID NO: 478672 - RNA, 26 nt, Human
ucucaaguaauccuguaguccaccgu

SEQ ID NO: 478673 - RNA, 19 nt, Human
ucugcucuaagcugaagca

SEQ ID NO: 478674 - RNA, 18 nt, Human
ucugcucucuucccuccc

SEQ ID NO: 478675 - RNA, 22 nt, Human
ugaaacuacagugcaguaacca

SEQ ID NO: 478676 - RNA, 19 nt, Human
ugaaaugggaaaugaaccc

SEQ ID NO: 478677 - RNA, 18 nt, Human
ugaacaggugggcaacac

SEQ ID NO: 478678 - RNA, 20 nt, Human
ugacacagccuccuucacug

SEQ ID NO: 478679 - RNA, 19 nt, Human
ugagcuggggaggucgagg

SEQ ID NO: 478680 - RNA, 20 nt, Human
ugaggugggaggauugcuug

SEQ ID NO: 478681 - RNA, 22 nt, Human
ugaggugggaggauugcuugag

SEQ ID NO: 478682 - RNA, 23 nt, Human
ugaggugggaggauugcuugagc

SEQ ID NO: 478683 - RNA, 23 nt, Human
ugaggugggaggauugcuugagc

SEQ ID NO: 478684 - RNA, 21 nt, Human
ugaggugggcggaucacuuga

SEQ ID NO: 478685 - RNA, 22 nt, Human
ugaggugggcggaucacuugag

SEQ ID NO: 478686 - RNA, 22 nt, Human
ugaggugggcggaucacuugag

SEQ ID NO: 478687 - RNA, 23 nt, Human
ugaggugggcggaucacuugagu

SEQ ID NO: 478688 - RNA, 25 nt, Human
ugaggugggcggaucacuugaguug

SEQ ID NO: 478689 - RNA, 20 nt, Human
ugaguaagacaugaaugcca

SEQ ID NO: 478690 - RNA, 24 nt, Human
ugauggcuaaugucuguaauccca

SEQ ID NO: 478691 - RNA, 21 nt, Human
ugcaucacugcacuccagccu

SEQ ID NO: 478692 - RNA, 18 nt, Human
ugcuaaauuuucaggcau

SEQ ID NO: 478693 - RNA, 22 nt, Human
uggaaguaugacugcuuccuag

SEQ ID NO: 478694 - RNA, 28 nt, Human
uggacaacuugaaauccaaaugaaauuc

SEQ ID NO: 478695 - RNA, 24 nt, Human
uggcuaaugucuguaaucccaaca

SEQ ID NO: 478696 - RNA, 20 nt, Human
uggcugggccuccugguggc

SEQ ID NO: 478697 - RNA, 23 nt, Human
ugggaaaugaaccccuagagucu

SEQ ID NO: 478698 - RNA, 18 nt, Human
ugggaggcugaggugggc

SEQ ID NO: 478699 - RNA, 19 nt, Human
ugggaggcugaggugggcg

SEQ ID NO: 478700 - RNA, 24 nt, Human
ugggaggcugaggugggcggauca

SEQ ID NO: 478701 - RNA, 22 nt, Human
uggguuccucuugaaauaauga

SEQ ID NO: 478702 - RNA, 18 nt, Human
uguaucaaguuuucucca

SEQ ID NO: 478703 - RNA, 23 nt, Human
ugucacaggccauuaacaauguu

SEQ ID NO: 478704 - RNA, 19 nt, Human
uguccuagacaccagaagc

SEQ ID NO: 478705 - RNA, 23 nt, Human
ugucuguaaucccaacacuuugg

SEQ ID NO: 478706 - RNA, 23 nt, Human
ugucuguaaucccaacacuuugg

SEQ ID NO: 478707 - RNA, 24 nt, Human
ugucuguaaucccaacacuuuggg

SEQ ID NO: 478708 - RNA, 20 nt, Human
uguugagugaaguacuuucc

SEQ ID NO: 478709 - RNA, 21 nt, Human
uuacaccuucuucccuucugc

SEQ ID NO: 478710 - RNA, 19 nt, Human
uuauauucaagagcuugac

SEQ ID NO: 478711 - RNA, 19 nt, Human
uuccugugcucaucauguc

SEQ ID NO: 478712 - RNA, 25 nt, Human
uucugcucucuucccucccuucucc

SEQ ID NO: 478713 - RNA, 30 nt, Human
uucugcucucuucccucccuucuccuuccc

SEQ ID NO: 478714 - RNA, 23 nt, Human
uugaggauuaacaggagaaaucc

SEQ ID NO: 478715 - RNA, 23 nt, Human
uugcaucacugcacuccagccug

SEQ ID NO: 478716 - RNA, 18 nt, Human
uugcuugagcuggggagg

SEQ ID NO: 478717 - RNA, 20 nt, Human
uuggaaagcuucaguugaau

SEQ ID NO: 478718 - RNA, 25 nt, Human
uugggaggcugaggugggcggauca

SEQ ID NO: 478719 - RNA, 21 nt, Human
uuucugaaguuucuuucauuc

SEQ ID NO: 478720 - RNA, 20 nt, Human
uuugaggauuaacaggagaa

SEQ ID NO: 478721 - RNA, 23 nt, Human
uuuuuugccaagcaaucaagcaa

SEQ ID NO: 478722 - RNA, 18 nt, Human
aacugagacaaaaugaca

SEQ ID NO: 478723 - RNA, 19 nt, Human
acaacugagacaaaaugac

SEQ ID NO: 478724 - RNA, 22 nt, Human
acccucccccagcacgcacaca

SEQ ID NO: 478725 - RNA, 24 nt, Human
acccucccccagcacgcacacaca

SEQ ID NO: 478726 - RNA, 23 nt, Human
agaaagguuccgcuaccgccucc

SEQ ID NO: 478727 - RNA, 24 nt, Human
aguaggaagaaauugcacaacuga

SEQ ID NO: 478728 - RNA, 20 nt, Human
caacugagacaaaaugacaa

SEQ ID NO: 478729 - RNA, 22 nt, Human
cacccacuuccuaccauacagg

SEQ ID NO: 478730 - RNA, 24 nt, Human
cacgcacacacauacucuccugug

SEQ ID NO: 478731 - RNA, 21 nt, Human
caguccuuuugcugucauggu

SEQ ID NO: 478732 - RNA, 18 nt, Human
cccucccccagcacgcac

SEQ ID NO: 478733 - RNA, 18 nt, Human
ccgcuaccgccuccuccu

SEQ ID NO: 478734 - RNA, 22 nt, Human
ccgcuaccgccuccuccugugc

SEQ ID NO: 478735 - RNA, 21 nt, Human
cuaaucagaauaagacuucca

SEQ ID NO: 478736 - RNA, 24 nt, Human
cucauuuggauuucaauguuuccu

SEQ ID NO: 478737 - RNA, 24 nt, Human
cuggacauauugacauauuaaagu

SEQ ID NO: 478738 - RNA, 22 nt, Human
gaaaggcucuugaaacuccuuu

SEQ ID NO: 478739 - RNA, 22 nt, Human
gaagcgagaaccaggcggagga

SEQ ID NO: 478740 - RNA, 21 nt, Human
gacauauugacauauuaaagu

SEQ ID NO: 478741 - RNA, 18 nt, Human
gacuguggaagacaggag

SEQ ID NO: 478742 - RNA, 21 nt, Human
gccacacccacuuccuaccau

SEQ ID NO: 478743 - RNA, 24 nt, Human
gccacacccacuuccuaccauaca

SEQ ID NO: 478744 - RNA, 24 nt, Human
ggcaaguaggaagaaauugcacaa

SEQ ID NO: 478745 - RNA, 21 nt, Human
gucuccagagccaccccuuuc

SEQ ID NO: 478746 - RNA, 18 nt, Human
guucagagauccagacca

SEQ ID NO: 478747 - RNA, 18 nt, Human
uaaauagucuucuuaacu

SEQ ID NO: 478748 - RNA, 20 nt, Human
uacucaggugacuuucuggu

SEQ ID NO: 478749 - RNA, 22 nt, Human
ucagcaaucugcccauguuccu

SEQ ID NO: 478750 - RNA, 23 nt, Human
uccacauaaggaaguuauuccug

SEQ ID NO: 478751 - RNA, 19 nt, Human
uccugggagaaaucagucc

SEQ ID NO: 478752 - RNA, 18 nt, Human
ucucuggacauauugaca

SEQ ID NO: 478753 - RNA, 21 nt, Human
ucugcccauguuccugggaga

SEQ ID NO: 478754 - RNA, 27 nt, Human
ugacaagaaaggcucuugaaacucccu

SEQ ID NO: 478755 - RNA, 22 nt, Human
uggaagacaggagggaguuggg

SEQ ID NO: 478756 - RNA, 18 nt, Human
uggcuuuuuguuuuaagu

SEQ ID NO: 478757 - RNA, 19 nt, Human
ugucauggugucuccagag

SEQ ID NO: 478758 - RNA, 24 nt, Human
uguggaagacaggagggaguuggg

SEQ ID NO: 478759 - RNA, 23 nt, Human
uucaagcaagggcaucagguaaa

SEQ ID NO: 478760 - RNA, 19 nt, Human
uugcuucaacuguuacaaa

SEQ ID NO: 478761 - RNA, 18 nt, Human
uuuauagggccuucaagc

SEQ ID NO: 478762 - RNA, 21 nt, Human
uuuuuguuuuaaguauaagaa

SEQ ID NO: 478763 - RNA, 24 nt, Human
aaaaaaaagaaaaaaaaaucccac

SEQ ID NO: 478764 - RNA, 24 nt, Human
aaaagaaaaaaaaaucccacuaaa

SEQ ID NO: 478765 - RNA, 21 nt, Human
aaaagacaaaacuucuuccug

SEQ ID NO: 478766 - RNA, 18 nt, Human
aaacugaacaauguuucc

SEQ ID NO: 478767 - RNA, 19 nt, Human
aaccuggauuaaccuagca

SEQ ID NO: 478768 - RNA, 20 nt, Human
aaccugguugcuucuaauga

SEQ ID NO: 478769 - RNA, 21 nt, Human
aacuuugaaacaacuaagcag

SEQ ID NO: 478770 - RNA, 24 nt, Human
aagcaaccaacaauaagcaaacag

SEQ ID NO: 478771 - RNA, 22 nt, Human
aagccucagacaguaaucccaa

SEQ ID NO: 478772 - RNA, 25 nt, Human
aagcugcuacagcaaacccaucagg

SEQ ID NO: 478773 - RNA, 20 nt, Human
aagcuuugccaaacuuaaaa

SEQ ID NO: 478774 - RNA, 24 nt, Human
aaggaaacaaaucacaggcgcuaa

SEQ ID NO: 478775 - RNA, 20 nt, Human
aauccuuuuuagcagucagg

SEQ ID NO: 478776 - RNA, 28 nt, Human
acacacacauauaauuuauacacacaua

SEQ ID NO: 478777 - RNA, 24 nt, Human
acauaagcuuugccaaacuuaaaa

SEQ ID NO: 478778 - RNA, 27 nt, Human
accacucccuccccgcgaccccuccug

SEQ ID NO: 478779 - RNA, 23 nt, Human
accuaacacacuucaucuucaac

SEQ ID NO: 478780 - RNA, 23 nt, Human
acuacauaugcacaagacuauag

SEQ ID NO: 478781 - RNA, 20 nt, Human
acucauuugucaagaguuag

SEQ ID NO: 478782 - RNA, 21 nt, Human
acucauuugucaagaguuagg

SEQ ID NO: 478783 - RNA, 20 nt, Human
agaacaccucaaagcaggca

SEQ ID NO: 478784 - RNA, 24 nt, Human
agcaaaacaagaucauuccacaga

SEQ ID NO: 478785 - RNA, 18 nt, Human
agcuggauuuacugcaaa

SEQ ID NO: 478786 - RNA, 18 nt, Human
agcuguuuuugcuugcau

SEQ ID NO: 478787 - RNA, 21 nt, Human
aggagaaagggugguuuuagg

SEQ ID NO: 478788 - RNA, 22 nt, Human
aggaguucuugaggcagcugga

SEQ ID NO: 478789 - RNA, 23 nt, Human
aggcacuuugauguauauuggug

SEQ ID NO: 478790 - RNA, 18 nt, Human
aggcucuuccaaacaaaa

SEQ ID NO: 478791 - RNA, 23 nt, Human
agguuguggagauuaugugguug

SEQ ID NO: 478792 - RNA, 21 nt, Human
agugcagcggcuguugcagcu

SEQ ID NO: 478793 - RNA, 25 nt, Human
auaaacacaaaaggaaacaaaucac

SEQ ID NO: 478794 - RNA, 24 nt, Human
auaaauuuuaagcaauugugcaaa

SEQ ID NO: 478795 - RNA, 27 nt, Human
augcucccacaucuauuaaaagauaca

SEQ ID NO: 478796 - RNA, 24 nt, Human
auugaacugaaauaguaaugccag

SEQ ID NO: 478797 - RNA, 23 nt, Human
caaagugagcagauacuugaucc

SEQ ID NO: 478798 - RNA, 24 nt, Human
caaagugagcagauacuugauccc

SEQ ID NO: 478799 - RNA, 22 nt, Human
caaccaacaauaagcaaacaga

SEQ ID NO: 478800 - RNA, 22 nt, Human
caacuaagcuaccaacccugaa

SEQ ID NO: 478801 - RNA, 24 nt, Human
caacuaagcuaccaacccugaagu

SEQ ID NO: 478802 - RNA, 23 nt, Human
cacaagacuauaguacacacaaa

SEQ ID NO: 478803 - RNA, 21 nt, Human
cacacuaggccagauaaacac

SEQ ID NO: 478804 - RNA, 26 nt, Human
cacuucaucuucaacaacaacaaaaa

SEQ ID NO: 478805 - RNA, 21 nt, Human
cagaaaacuuugaaacaacua

SEQ ID NO: 478806 - RNA, 19 nt, Human
cagauacagcaaacccaua

SEQ ID NO: 478807 - RNA, 20 nt, Human
cagcuguuuuugcuugcauu

SEQ ID NO: 478808 - RNA, 18 nt, Human
caggagaaccugguugcu

SEQ ID NO: 478809 - RNA, 22 nt, Human
caggugcuggcacuuccaacua

SEQ ID NO: 478810 - RNA, 19 nt, Human
cauauaaaauguauauaua

SEQ ID NO: 478811 - RNA, 22 nt, Human
caucacacauuucuucucuugu

SEQ ID NO: 478812 - RNA, 21 nt, Human
ccaacaauaagcaaacagaaa

SEQ ID NO: 478813 - RNA, 22 nt, Human
ccagaccccugccgccugcgcu

SEQ ID NO: 478814 - RNA, 18 nt, Human
ccccgcgaccccuccugc

SEQ ID NO: 478815 - RNA, 25 nt, Human
ccccugccgccugcgcucaccacuc

SEQ ID NO: 478816 - RNA, 26 nt, Human
ccccugccgccugcgcucaccacucc

SEQ ID NO: 478817 - RNA, 20 nt, Human
cccugaaguaagcaagaaaa

SEQ ID NO: 478818 - RNA, 19 nt, Human
ccgcugccaccccagcugc

SEQ ID NO: 478819 - RNA, 19 nt, Human
ccuccccgcgaccccuccu

SEQ ID NO: 478820 - RNA, 20 nt, Human
ccuccguucugcaaggcuuu

SEQ ID NO: 478821 - RNA, 19 nt, Human
ccuccugcgccgcugccac

SEQ ID NO: 478822 - RNA, 21 nt, Human
ccugccgccugcgcucaccac

SEQ ID NO: 478823 - RNA, 21 nt, Human
ccuggaggcggccgccccuuc

SEQ ID NO: 478824 - RNA, 22 nt, Human
ccuggaggcggccgccccuucu

SEQ ID NO: 478825 - RNA, 19 nt, Human
ccugugacgcagccuauag

SEQ ID NO: 478826 - RNA, 20 nt, Human
cgaacuggcggcucuugcug

SEQ ID NO: 478827 - RNA, 22 nt, Human
cgagcgagagcgaaaccgagag

SEQ ID NO: 478828 - RNA, 24 nt, Human
cuccugcgccgcugccaccccagc

SEQ ID NO: 478829 - RNA, 21 nt, Human
cuggaggcggccgccccuucu

SEQ ID NO: 478830 - RNA, 22 nt, Human
cuguaaacaaaauucacaaucu

SEQ ID NO: 478831 - RNA, 24 nt, Human
cuuugguccuugagcacacuuucu

SEQ ID NO: 478832 - RNA, 18 nt, Human
cuuuuuagcagucaggga

SEQ ID NO: 478833 - RNA, 19 nt, Human
gaaaacaacuuuaugcaca

SEQ ID NO: 478834 - RNA, 19 nt, Human
gagcagauacagcaaaccc

SEQ ID NO: 478835 - RNA, 19 nt, Human
gagcgcagcgagcgagagc

SEQ ID NO: 478836 - RNA, 23 nt, Human
gaucacucuuuuuuuuuucuuuu

SEQ ID NO: 478837 - RNA, 24 nt, Human
gaucacucuuuuuuuuuucuuuuu

SEQ ID NO: 478838 - RNA, 24 nt, Human
gcaaacccauauugucaucacaca

SEQ ID NO: 478839 - RNA, 23 nt, Human
gcacuuugauguauauuggugug

SEQ ID NO: 478840 - RNA, 26 nt, Human
gcucaccacucccuccccgcgacccc

SEQ ID NO: 478841 - RNA, 22 nt, Human
ggcuuuuugguuucaccuaaca

SEQ ID NO: 478842 - RNA, 22 nt, Human
gguuggagggagagacagccag

SEQ ID NO: 478843 - RNA, 20 nt, Human
guaaaccuuuaaaaacggca

SEQ ID NO: 478844 - RNA, 19 nt, Human
gugguccagaaaugcagaa

SEQ ID NO: 478845 - RNA, 19 nt, Human
guguauauauacauauaaa

SEQ ID NO: 478846 - RNA, 21 nt, Human
uaaacugauucacaaguugga

SEQ ID NO: 478847 - RNA, 22 nt, Human
uaaagaaacagcacacuaggcc

SEQ ID NO: 478848 - RNA, 21 nt, Human
uaacaaauauaaucucucuuc

SEQ ID NO: 478849 - RNA, 21 nt, Human
uaacaagcguugcauugaaaa

SEQ ID NO: 478850 - RNA, 24 nt, Human
uaagucuuaaaguaaaugcuagaa

SEQ ID NO: 478851 - RNA, 19 nt, Human
uaauuuuuuuagaugugga

SEQ ID NO: 478852 - RNA, 22 nt, Human
uacaaguauuugcaagaaaaaa

SEQ ID NO: 478853 - RNA, 18 nt, Human
uacuguguauauauacau

SEQ ID NO: 478854 - RNA, 21 nt, Human
uauaaaauguauauauacaca

SEQ ID NO: 478855 - RNA, 21 nt, Human
uauauaaaauguauauauaca

SEQ ID NO: 478856 - RNA, 18 nt, Human
ucaaagcaggcaugauug

SEQ ID NO: 478857 - RNA, 25 nt, Human
ucaccaaagaaaaaaaaaaaaagaa

SEQ ID NO: 478858 - RNA, 21 nt, Human
ucaccuggaggcggccgcccc

SEQ ID NO: 478859 - RNA, 19 nt, Human
ucagaucaacaaauguuaa

SEQ ID NO: 478860 - RNA, 21 nt, Human
uccaacugucaaaauggcagu

SEQ ID NO: 478861 - RNA, 18 nt, Human
uccaauaccaaagugagc

SEQ ID NO: 478862 - RNA, 19 nt, Human
uccaucuugguguaggagu

SEQ ID NO: 478863 - RNA, 18 nt, Human
ucccuccuucauuuaauu

SEQ ID NO: 478864 - RNA, 19 nt, Human
ucuugaggcagcuggauuu

SEQ ID NO: 478865 - RNA, 23 nt, Human
ugaacugacagcuuucaacauaa

SEQ ID NO: 478866 - RNA, 24 nt, Human
ugacaaccagaucaaagauguuuc

SEQ ID NO: 478867 - RNA, 20 nt, Human
ugacaggucucucuuuuuuu

SEQ ID NO: 478868 - RNA, 23 nt, Human
ugcaccaaccuacuacuguucau

SEQ ID NO: 478869 - RNA, 23 nt, Human
ugcagugugacaaccagaucaaa

SEQ ID NO: 478870 - RNA, 19 nt, Human
ugccgccugcgcucaccac

SEQ ID NO: 478871 - RNA, 26 nt, Human
ugcuauauaugaaauuacuuuuuuug

SEQ ID NO: 478872 - RNA, 18 nt, Human
uggaaagcgcaagcgaga

SEQ ID NO: 478873 - RNA, 18 nt, Human
uggaaagcgcaagcgaga

SEQ ID NO: 478874 - RNA, 23 nt, Human
uggauugugucaucauaaguucu

SEQ ID NO: 478875 - RNA, 18 nt, Human
uggcagagucagagaccu

SEQ ID NO: 478876 - RNA, 23 nt, Human
uggguaggagaauaagagaaggg

SEQ ID NO: 478877 - RNA, 21 nt, Human
ugguaguaggaggaguuccuu

SEQ ID NO: 478878 - RNA, 20 nt, Human
uguaaacaaaauucacaauc

SEQ ID NO: 478879 - RNA, 21 nt, Human
uguauauauaaaauguauaua

SEQ ID NO: 478880 - RNA, 21 nt, Human
uguauuguuacuauuaauauc

SEQ ID NO: 478881 - RNA, 19 nt, Human
ugucacaggcuauguguuc

SEQ ID NO: 478882 - RNA, 23 nt, Human
ugucaccuggaggcggccgcccc

SEQ ID NO: 478883 - RNA, 18 nt, Human
uguguauauauacauaua

SEQ ID NO: 478884 - RNA, 25 nt, Human
uguguauauauacauauaaaaugua

SEQ ID NO: 478885 - RNA, 19 nt, Human
uuaaccuagcacuaagcau

SEQ ID NO: 478886 - RNA, 22 nt, Human
uuagcaaaacaagaucauucca

SEQ ID NO: 478887 - RNA, 23 nt, Human
uucagaaaacuuugaaacaacua

SEQ ID NO: 478888 - RNA, 19 nt, Human
uucauauagucuacuauau

SEQ ID NO: 478889 - RNA, 22 nt, Human
uucuagaucauagucaaucuac

SEQ ID NO: 478890 - RNA, 18 nt, Human
uucugauaggugagugcc

SEQ ID NO: 478891 - RNA, 21 nt, Human
uugacaucuuccaacuuugua

SEQ ID NO: 478892 - RNA, 18 nt, Human
uuguggagauuauguggu

SEQ ID NO: 478893 - RNA, 20 nt, Human
uuuguuagcaaaacaagauc

SEQ ID NO: 478894 - RNA, 24 nt, Human
uuuuauggcucaccaaagaaaaaa

SEQ ID NO: 478895 - RNA, 22 nt, Human
uuuuugaacugacagcuuucaa

SEQ ID NO: 478896 - RNA, 25 nt, Human
uuuuugguuucaccuaacacacuuc

SEQ ID NO: 478897 - RNA, 19 nt, Human
uuuuuuuucucuccugucu

SEQ ID NO: 478898 - RNA, 18 nt, Human
aaaaaaacaaaacggugg

SEQ ID NO: 478899 - RNA, 18 nt, Human
aaaaaaaccagccaggag

SEQ ID NO: 478900 - RNA, 23 nt, Human
aaaaaaagaaaaaaaaaacaaaa

SEQ ID NO: 478901 - RNA, 19 nt, Human
aaaaaagauaaugaaaaaa

SEQ ID NO: 478902 - RNA, 18 nt, Human
aaaauuagcugggcaugg

SEQ ID NO: 478903 - RNA, 19 nt, Human
aaagagaaagaagacuuga

SEQ ID NO: 478904 - RNA, 22 nt, Human
aaagaguauuuagaauuuaggu

SEQ ID NO: 478905 - RNA, 24 nt, Human
aaagagugagacccugucucaaaa

SEQ ID NO: 478906 - RNA, 24 nt, Human
aaagugcugggauuacaggcguga

SEQ ID NO: 478907 - RNA, 24 nt, Human
aaagugcugggauuacagguguga

SEQ ID NO: 478908 - RNA, 20 nt, Human
aacauggcaaaacccugucu

SEQ ID NO: 478909 - RNA, 21 nt, Human
aacauggcaaaacccugucuc

SEQ ID NO: 478910 - RNA, 23 nt, Human
aaccaaaauuagaacacagacua

SEQ ID NO: 478911 - RNA, 20 nt, Human
aaccuccuucauucaugaga

SEQ ID NO: 478912 - RNA, 23 nt, Human
aagaaucacuugaacccaggagg

SEQ ID NO: 478913 - RNA, 19 nt, Human
aagagaaagaagacuugaa

SEQ ID NO: 478914 - RNA, 25 nt, Human
aagcaggaaguggaagcuggggacc

SEQ ID NO: 478915 - RNA, 21 nt, Human
aagggccccaaacauggccug

SEQ ID NO: 478916 - RNA, 22 nt, Human
aaguaaaacauaaucuuacaaa

SEQ ID NO: 478917 - RNA, 18 nt, Human
aagugcugggauuacagg

SEQ ID NO: 478918 - RNA, 19 nt, Human
aagugcugggauuacaggc

SEQ ID NO: 478919 - RNA, 19 nt, Human
aagugcugggauuacaggc

SEQ ID NO: 478920 - RNA, 19 nt, Human
aagugcugggauuacaggu

SEQ ID NO: 478921 - RNA, 26 nt, Human
aagugcugggauuacaggugugagcc

SEQ ID NO: 478922 - RNA, 18 nt, Human
aaucacuugaacccagga

SEQ ID NO: 478923 - RNA, 24 nt, Human
aaucacuugaacccaggaggcgca

SEQ ID NO: 478924 - RNA, 24 nt, Human
aaucacuugagcccaggaauucga

SEQ ID NO: 478925 - RNA, 25 nt, Human
aaucacuugagcccaggaauucgag

SEQ ID NO: 478926 - RNA, 21 nt, Human
acaccauuuuccugccucagc

SEQ ID NO: 478927 - RNA, 21 nt, Human
acagaaaaaaaccagccagga

SEQ ID NO: 478928 - RNA, 21 nt, Human
acagagcgagacucugucuca

SEQ ID NO: 478929 - RNA, 23 nt, Human
acagagcgagacucugucucaaa

SEQ ID NO: 478930 - RNA, 19 nt, Human
acaggcgccugccaccacg

SEQ ID NO: 478931 - RNA, 18 nt, Human
accauguuggccaggcug

SEQ ID NO: 478932 - RNA, 24 nt, Human
acccaggaggcgcagguugcagug

SEQ ID NO: 478933 - RNA, 24 nt, Human
acccugucucuacaaaaaauacaa

SEQ ID NO: 478934 - RNA, 24 nt, Human
acccugucucuacuaaaaauacaa

SEQ ID NO: 478935 - RNA, 20 nt, Human
acggacagacagacugggcc

SEQ ID NO: 478936 - RNA, 23 nt, Human
acggagccuaggaagccucugcu

SEQ ID NO: 478937 - RNA, 25 nt, Human
acucuauugcccaggcuggagugca

SEQ ID NO: 478938 - RNA, 18 nt, Human
acugcaagcuccgccucc

SEQ ID NO: 478939 - RNA, 24 nt, Human
acugcacuccagccuggacgacag

SEQ ID NO: 478940 - RNA, 26 nt, Human
acugcacuccagccuggacgacagag

SEQ ID NO: 478941 - RNA, 18 nt, Human
acuguacugcagccuggg

SEQ ID NO: 478942 - RNA, 23 nt, Human
acuguacugcagccugggaaaga

SEQ ID NO: 478943 - RNA, 24 nt, Human
acuguacugcagccugggaaagag

SEQ ID NO: 478944 - RNA, 24 nt, Human
acugugucacuguacugcagccug

SEQ ID NO: 478945 - RNA, 24 nt, Human
agaaaaaaaaaacaaaacggugga

SEQ ID NO: 478946 - RNA, 18 nt, Human
agaaaaaaaccagccagg

SEQ ID NO: 478947 - RNA, 18 nt, Human
agaacaagggccccaaac

SEQ ID NO: 478948 - RNA, 23 nt, Human
agaagaacaggcucugaagcagg

SEQ ID NO: 478949 - RNA, 24 nt, Human
agacucugucucaaacaaaaaaaa

SEQ ID NO: 478950 - RNA, 19 nt, Human
agagauggaguuucaccgu

SEQ ID NO: 478951 - RNA, 24 nt, Human
agcacuuugggaggccgagguggg

SEQ ID NO: 478952 - RNA, 22 nt, Human
agcagagaugggguuucaccau

SEQ ID NO: 478953 - RNA, 24 nt, Human
agccuggacaacauggcaaaaccc

SEQ ID NO: 478954 - RNA, 24 nt, Human
agccuggacgacagagcgagacuc

SEQ ID NO: 478955 - RNA, 21 nt, Human
agccuuguuuaagaggcuagu

SEQ ID NO: 478956 - RNA, 23 nt, Human
agcugggcaugguggcaggcgcc

SEQ ID NO: 478957 - RNA, 23 nt, Human
agcuugcagccccaaaaagucuu

SEQ ID NO: 478958 - RNA, 23 nt, Human
aggaauucgagacuagccuggac

SEQ ID NO: 478959 - RNA, 22 nt, Human
aggagucacuuuauuucuuaaa

SEQ ID NO: 478960 - RNA, 23 nt, Human
aggaguucgagaccagucuggcc

SEQ ID NO: 478961 - RNA, 18 nt, Human
aggcagaagaaucacuug

SEQ ID NO: 478962 - RNA, 23 nt, Human
aggcagaagaaucacuugaaccc

SEQ ID NO: 478963 - RNA, 18 nt, Human
aggcaggugaaucacuug

SEQ ID NO: 478964 - RNA, 21 nt, Human
aggccgaggugggcggaucac

SEQ ID NO: 478965 - RNA, 19 nt, Human
aggcgcagguugcagugag

SEQ ID NO: 478966 - RNA, 24 nt, Human
aggcgcagguugcagugagccaag

SEQ ID NO: 478967 - RNA, 20 nt, Human
aggcgccugccaccacgccc

SEQ ID NO: 478968 - RNA, 25 nt, Human
aggcuggagugcaguggcgcaaucu

SEQ ID NO: 478969 - RNA, 24 nt, Human
aggucaaagcugcagugagcugag

SEQ ID NO: 478970 - RNA, 20 nt, Human
aggucucaaaacuacggaac

SEQ ID NO: 478971 - RNA, 24 nt, Human
aggugggcggaucacaaggucagg

SEQ ID NO: 478972 - RNA, 24 nt, Human
agguugaggcagaagaaucacuug

SEQ ID NO: 478973 - RNA, 22 nt, Human
agguugcagugagccaagauug

SEQ ID NO: 478974 - RNA, 21 nt, Human
aguagaagaacaggcucugaa

SEQ ID NO: 478975 - RNA, 18 nt, Human
aguagcugggauuacagg

SEQ ID NO: 478976 - RNA, 24 nt, Human
agucagauccugagaaccauaauc

SEQ ID NO: 478977 - RNA, 21 nt, Human
agucuggccaauaugaaaccc

SEQ ID NO: 478978 - RNA, 21 nt, Human
agucuggccaauaugaaaccc

SEQ ID NO: 478979 - RNA, 24 nt, Human
agugauucuccugccucagccucc

SEQ ID NO: 478980 - RNA, 24 nt, Human
agugcagugacaugaucucggcuc

SEQ ID NO: 478981 - RNA, 20 nt, Human
agugcaguggcgcaaucucg

SEQ ID NO: 478982 - RNA, 24 nt, Human
agugcaguggcgcaaucucggcuc

SEQ ID NO: 478983 - RNA, 21 nt, Human
auaaugaaaaaagagaaagaa

SEQ ID NO: 478984 - RNA, 22 nt, Human
auaauuaugaaaaugaaaacuc

SEQ ID NO: 478985 - RNA, 21 nt, Human
aucacaaggucaggaguucga

SEQ ID NO: 478986 - RNA, 22 nt, Human
auccuagcacuuugggaggcca

SEQ ID NO: 478987 - RNA, 19 nt, Human
augaaaaaagagaaagaag

SEQ ID NO: 478988 - RNA, 21 nt, Human
augaaacccugucucuacuaa

SEQ ID NO: 478989 - RNA, 24 nt, Human
augauccgccugccucagccuccc

SEQ ID NO: 478990 - RNA, 18 nt, Human
auggaguuucaccguguu

SEQ ID NO: 478991 - RNA, 24 nt, Human
auggaguuucaccguguuagccag

SEQ ID NO: 478992 - RNA, 18 nt, Human
augggguuucaccauguu

SEQ ID NO: 478993 - RNA, 22 nt, Human
augggguuucaccauguuggcc

SEQ ID NO: 478994 - RNA, 24 nt, Human
augggguuucaccauguuggccag

SEQ ID NO: 478995 - RNA, 18 nt, Human
auguguucuuuuucugga

SEQ ID NO: 478996 - RNA, 24 nt, Human
auguuggcugggugugguggcuca

SEQ ID NO: 478997 - RNA, 24 nt, Human
auugcagcacugcacuccagccug

SEQ ID NO: 478998 - RNA, 21 nt, Human
caaaauuagaacacagacuac

SEQ ID NO: 478999 - RNA, 24 nt, Human
caaagugcugggauuacaggcgug

SEQ ID NO: 479000 - RNA, 24 nt, Human
caaagugcugggauuacaggugug

SEQ ID NO: 479001 - RNA, 22 nt, Human
caacacuucauacacauaugca

SEQ ID NO: 479002 - RNA, 22 nt, Human
caacauggcaaaacccugucuc

SEQ ID NO: 479003 - RNA, 24 nt, Human
caacauggcaaaacccugucucua

SEQ ID NO: 479004 - RNA, 24 nt, Human
caaggcaggugaaucacuugagcc

SEQ ID NO: 479005 - RNA, 21 nt, Human
caagggccccaaacauggccu

SEQ ID NO: 479006 - RNA, 22 nt, Human
caagugauucuccugccucagc

SEQ ID NO: 479007 - RNA, 18 nt, Human
caauaugaaacccugucu

SEQ ID NO: 479008 - RNA, 19 nt, Human
caauaugaaacccugucuc

SEQ ID NO: 479009 - RNA, 18 nt, Human
cacaccaccaugcccggc

SEQ ID NO: 479010 - RNA, 24 nt, Human
cacaccuguaaucccagcacuuug

SEQ ID NO: 479011 - RNA, 18 nt, Human
caccacggacagacagac

SEQ ID NO: 479012 - RNA, 21 nt, Human
caccauguuggccaggcuggu

SEQ ID NO: 479013 - RNA, 24 nt, Human
caccauguuggccaggcuggucuc

SEQ ID NO: 479014 - RNA, 27 nt, Human
caccauguuggccaggcuggucucaaa

SEQ ID NO: 479015 - RNA, 18 nt, Human
caccguguuagccaggau

SEQ ID NO: 479016 - RNA, 23 nt, Human
caccguguuagccaggauggucu

SEQ ID NO: 479017 - RNA, 24 nt, Human
caccguguuagccaggauggucuu

SEQ ID NO: 479018 - RNA, 24 nt, Human
caccuauagucccugcuacuuggg

SEQ ID NO: 479019 - RNA, 19 nt, Human
caccugagcccggcaaggu

SEQ ID NO: 479020 - RNA, 19 nt, Human
caccuguaaucccagcacu

SEQ ID NO: 479021 - RNA, 24 nt, Human
caccuguaaucccagcacuuuggg

SEQ ID NO: 479022 - RNA, 24 nt, Human
cacuccagccuggacgacagagcg

SEQ ID NO: 479023 - RNA, 24 nt, Human
cacucuauugcccaggcuggagug

SEQ ID NO: 479024 - RNA, 21 nt, Human
cacugcaaccucugccucccg

SEQ ID NO: 479025 - RNA, 23 nt, Human
cacugcaaccucugccucccggg

SEQ ID NO: 479026 - RNA, 18 nt, Human
cacugcacuccagccugg

SEQ ID NO: 479027 - RNA, 18 nt, Human
cacugcacuccagccugg

SEQ ID NO: 479028 - RNA, 19 nt, Human
cacugcacuccagccugga

SEQ ID NO: 479029 - RNA, 19 nt, Human
cacugcacuccagccugga

SEQ ID NO: 479030 - RNA, 20 nt, Human
cacugcacuccagccuggac

SEQ ID NO: 479031 - RNA, 22 nt, Human
cacugcacuccagccuggacga

SEQ ID NO: 479032 - RNA, 24 nt, Human
cacugcacuccagccuggacgaca

SEQ ID NO: 479033 - RNA, 18 nt, Human
cacuguacugcagccugg

SEQ ID NO: 479034 - RNA, 19 nt, Human
cacuguacugcagccuggg

SEQ ID NO: 479035 - RNA, 18 nt, Human
cacuucauacacauaugc

SEQ ID NO: 479036 - RNA, 20 nt, Human
cacuugagcccaggaauucg

SEQ ID NO: 479037 - RNA, 22 nt, Human
cagagaugggguuucaccaugu

SEQ ID NO: 479038 - RNA, 24 nt, Human
cagcacuuugggaggccgaggugg

SEQ ID NO: 479039 - RNA, 23 nt, Human
caggcgccugccaccacgcccgg

SEQ ID NO: 479040 - RNA, 18 nt, Human
cagguugcagugagccaa

SEQ ID NO: 479041 - RNA, 26 nt, Human
caguagcugggacuacaggcgccugc

SEQ ID NO: 479042 - RNA, 23 nt, Human
caucuguaauccuagcacuuugg

SEQ ID NO: 479043 - RNA, 24 nt, Human
caugauccgccugccucagccucc

SEQ ID NO: 479044 - RNA, 24 nt, Human
caugucauuuuauaaaugaguccc

SEQ ID NO: 479045 - RNA, 24 nt, Human
cauguuggccaggcuggucucaaa

SEQ ID NO: 479046 - RNA, 20 nt, Human
ccaaagugcugggauuacag

SEQ ID NO: 479047 - RNA, 21 nt, Human
ccaaagugcugggauuacagg

SEQ ID NO: 479048 - RNA, 21 nt, Human
ccaaagugcugggauuacagg

SEQ ID NO: 479049 - RNA, 22 nt, Human
ccaaagugcugggauuacaggc

SEQ ID NO: 479050 - RNA, 22 nt, Human
ccaaagugcugggauuacaggc

SEQ ID NO: 479051 - RNA, 24 nt, Human
ccaaagugcugggauuacaggcgu

SEQ ID NO: 479052 - RNA, 24 nt, Human
ccaaagugcugggauuacaggugu

SEQ ID NO: 479053 - RNA, 24 nt, Human
ccacggacagacagacugggcccg

SEQ ID NO: 479054 - RNA, 19 nt, Human
ccacugcgcccagccuaaa

SEQ ID NO: 479055 - RNA, 21 nt, Human
ccacugcgcccagccuaaaaa

SEQ ID NO: 479056 - RNA, 23 nt, Human
cccaagcuagagugcagugacau

SEQ ID NO: 479057 - RNA, 23 nt, Human
cccaguagcugggacuacaggcg

SEQ ID NO: 479058 - RNA, 24 nt, Human
cccaucuguaauccuagcacuuug

SEQ ID NO: 479059 - RNA, 19 nt, Human
ccccaaaaagucuucauug

SEQ ID NO: 479060 - RNA, 18 nt, Human
ccccaacacuucauacac

SEQ ID NO: 479061 - RNA, 23 nt, Human
cccgaguagcugggauuacaggu

SEQ ID NO: 479062 - RNA, 24 nt, Human
cccgaguagcugggauuacaggug

SEQ ID NO: 479063 - RNA, 23 nt, Human
cccggguucaagugauucuccuc

SEQ ID NO: 479064 - RNA, 23 nt, Human
cccggguucaagugauucuccug

SEQ ID NO: 479065 - RNA, 23 nt, Human
cccggguugacaccauuuuccug

SEQ ID NO: 479066 - RNA, 21 nt, Human
ccgaguagcugggauuacagg

SEQ ID NO: 479067 - RNA, 26 nt, Human
ccgccugccucagccucccaaagugc

SEQ ID NO: 479068 - RNA, 22 nt, Human
ccggcaaggucaaagcugcagu

SEQ ID NO: 479069 - RNA, 22 nt, Human
ccuauaggucuagcuacuugau

SEQ ID NO: 479070 - RNA, 22 nt, Human
ccuauaggucuagcuacuuggg

SEQ ID NO: 479071 - RNA, 24 nt, Human
ccucccggguucaagugauucucc

SEQ ID NO: 479072 - RNA, 18 nt, Human
ccugaagugauugauagg

SEQ ID NO: 479073 - RNA, 21 nt, Human
ccugaccucaaaugaucugcc

SEQ ID NO: 479074 - RNA, 23 nt, Human
ccugaccucaaaugaucugccug

SEQ ID NO: 479075 - RNA, 23 nt, Human
ccugccucagccucccgaguagc

SEQ ID NO: 479076 - RNA, 22 nt, Human
ccuggacaacauggcaaaaccc

SEQ ID NO: 479077 - RNA, 24 nt, Human
ccuggacaacauggcaaaacccug

SEQ ID NO: 479078 - RNA, 22 nt, Human
ccuggacgacagagcgagacuc

SEQ ID NO: 479079 - RNA, 20 nt, Human
ccuggccucagugaucuggg

SEQ ID NO: 479080 - RNA, 19 nt, Human
cgagaccagucuggccaau

SEQ ID NO: 479081 - RNA, 19 nt, Human
cgccucccggguugacacc

SEQ ID NO: 479082 - RNA, 24 nt, Human
cgcucugucucccaagcuagagug

SEQ ID NO: 479083 - RNA, 18 nt, Human
cggacagacagacugggc

SEQ ID NO: 479084 - RNA, 22 nt, Human
cggaucacaaggucaggaguuc

SEQ ID NO: 479085 - RNA, 21 nt, Human
cggcggcuucucgucucccuc

SEQ ID NO: 479086 - RNA, 24 nt, Human
cggggaggaacagaaaaaaaccag

SEQ ID NO: 479087 - RNA, 24 nt, Human
cuagagugcagugacaugaucucg

SEQ ID NO: 479088 - RNA, 23 nt, Human
cuaguuuuucuucucuuuuccua

SEQ ID NO: 479089 - RNA, 19 nt, Human
cuauuuuuuaaagaacaaa

SEQ ID NO: 479090 - RNA, 22 nt, Human
cucacaccuguaaucccagcac

SEQ ID NO: 479091 - RNA, 24 nt, Human
cucacaccuguaaucccagcacuu

SEQ ID NO: 479092 - RNA, 20 nt, Human
cucacucuauugcccaggcc

SEQ ID NO: 479093 - RNA, 24 nt, Human
cucacugcaaccucugccucccgg

SEQ ID NO: 479094 - RNA, 24 nt, Human
cucagccuccccaguagcugggac

SEQ ID NO: 479095 - RNA, 23 nt, Human
cucagccucccgaguagcuggga

SEQ ID NO: 479096 - RNA, 24 nt, Human
cucccaucuguaauccuagcacuu

SEQ ID NO: 479097 - RNA, 20 nt, Human
cucccggguucaagugauuc

SEQ ID NO: 479098 - RNA, 26 nt, Human
cuccugaccucaaaugaucugccugc

SEQ ID NO: 479099 - RNA, 24 nt, Human
cuccugaccucaugauccgccugc

SEQ ID NO: 479100 - RNA, 22 nt, Human
cuccugccucagccucccgagu

SEQ ID NO: 479101 - RNA, 21 nt, Human
cucgucucccuccaccuucuc

SEQ ID NO: 479102 - RNA, 19 nt, Human
cugcaaccucugccucccg

SEQ ID NO: 479103 - RNA, 23 nt, Human
cugcaaccucugccucccggguu

SEQ ID NO: 479104 - RNA, 24 nt, Human
cugcaaccucugccucccggguuc

SEQ ID NO: 479105 - RNA, 19 nt, Human
cugcagugagcugagacug

SEQ ID NO: 479106 - RNA, 22 nt, Human
cugcagugagcugagacugugu

SEQ ID NO: 479107 - RNA, 23 nt, Human
cugccucagccucccaaagugcu

SEQ ID NO: 479108 - RNA, 24 nt, Human
cugccucagccucccaaagugcug

SEQ ID NO: 479109 - RNA, 23 nt, Human
cugccucagccuccccaguagcu

SEQ ID NO: 479110 - RNA, 23 nt, Human
cugccucagccucccgaguagcu

SEQ ID NO: 479111 - RNA, 23 nt, Human
cugccucccggguucaagugauu

SEQ ID NO: 479112 - RNA, 24 nt, Human
cugcgcccagccuaaaaaucuuua

SEQ ID NO: 479113 - RNA, 29 nt, Human
cugcgcccagccuaaaaaucuuuauugca

SEQ ID NO: 479114 - RNA, 18 nt, Human
cuggccaauaugaaaccc

SEQ ID NO: 479115 - RNA, 21 nt, Human
cuguaauccuagcacuuuggg

SEQ ID NO: 479116 - RNA, 25 nt, Human
cugucucuacaaaaaauacaaaaag

SEQ ID NO: 479117 - RNA, 20 nt, Human
cuugcuaagcacugagaggc

SEQ ID NO: 479118 - RNA, 27 nt, Human
gaaaccuccuucauucaugaggcacuc

SEQ ID NO: 479119 - RNA, 24 nt, Human
gacagagcgagacucugucucaaa

SEQ ID NO: 479120 - RNA, 23 nt, Human
gaccucaaaugaucugccugccu

SEQ ID NO: 479121 - RNA, 22 nt, Human
gaccucaugauccgccugccuc

SEQ ID NO: 479122 - RNA, 24 nt, Human
gaccucaugauccgccugccucag

SEQ ID NO: 479123 - RNA, 21 nt, Human
gacugggcugggcgugguggc

SEQ ID NO: 479124 - RNA, 20 nt, Human
gagaugggguuucaccaugu

SEQ ID NO: 479125 - RNA, 24 nt, Human
gagaugggguuucaccauguuggc

SEQ ID NO: 479126 - RNA, 21 nt, Human
gaggcgcagguugcagugagc

SEQ ID NO: 479127 - RNA, 24 nt, Human
gaggugggcggaucacaaggucag

SEQ ID NO: 479128 - RNA, 26 nt, Human
gaguagcugggauuacaggugcacac

SEQ ID NO: 479129 - RNA, 21 nt, Human
gaucacaaggucaggaguucg

SEQ ID NO: 479130 - RNA, 24 nt, Human
gaucacaaggucaggaguucgaga

SEQ ID NO: 479131 - RNA, 21 nt, Human
gauuacaggugcacaccacca

SEQ ID NO: 479132 - RNA, 18 nt, Human
gauuacaggugugagcca

SEQ ID NO: 479133 - RNA, 22 nt, Human
gauuacaggugugagccacugc

SEQ ID NO: 479134 - RNA, 22 nt, Human
gauuacaggugugagccacugc

SEQ ID NO: 479135 - RNA, 24 nt, Human
gcacuccagccuggacgacagagc

SEQ ID NO: 479136 - RNA, 21 nt, Human
gcacugcacuccagccuggac

SEQ ID NO: 479137 - RNA, 22 nt, Human
gcagaagaaucacuugaaccca

SEQ ID NO: 479138 - RNA, 18 nt, Human
gcagcacugcacuccagc

SEQ ID NO: 479139 - RNA, 23 nt, Human
gcaggugaaucacuugagcccag

SEQ ID NO: 479140 - RNA, 20 nt, Human
gcagguugcagugagccaag

SEQ ID NO: 479141 - RNA, 24 nt, Human
gcagguugcagugagccaagauug

SEQ ID NO: 479142 - RNA, 21 nt, Human
gccaauaugaaacccugucuc

SEQ ID NO: 479143 - RNA, 19 nt, Human
gcccaggcuggagugcagu

SEQ ID NO: 479144 - RNA, 24 nt, Human
gcccggcuauuuuuuuuguauuuu

SEQ ID NO: 479145 - RNA, 23 nt, Human
gccuauaggucuagcuacuuggg

SEQ ID NO: 479146 - RNA, 24 nt, Human
gccuuagcuucccaaagugcuggg

SEQ ID NO: 479147 - RNA, 19 nt, Human
gcuagagugcagugacaug

SEQ ID NO: 479148 - RNA, 20 nt, Human
gcucugaagcaggaagugga

SEQ ID NO: 479149 - RNA, 19 nt, Human
gcuggagugcaguggcgca

SEQ ID NO: 479150 - RNA, 23 nt, Human
gcuggucucaaacuccugaccuc

SEQ ID NO: 479151 - RNA, 18 nt, Human
ggaggaacauaugggaca

SEQ ID NO: 479152 - RNA, 18 nt, Human
ggaguuucaccguguuag

SEQ ID NO: 479153 - RNA, 22 nt, Human
ggaguuucaccguguuagccag

SEQ ID NO: 479154 - RNA, 23 nt, Human
ggaucacaaggucaggaguucga

SEQ ID NO: 479155 - RNA, 24 nt, Human
ggauggucuugaucuccugaccuc

SEQ ID NO: 479156 - RNA, 24 nt, Human
ggccaauaugaaacccugucucua

SEQ ID NO: 479157 - RNA, 23 nt, Human
ggcggaucacaaggucaggaguu

SEQ ID NO: 479158 - RNA, 19 nt, Human
ggcugggugugguggcuca

SEQ ID NO: 479159 - RNA, 21 nt, Human
ggcugggugugguggcucaca

SEQ ID NO: 479160 - RNA, 24 nt, Human
ggcuggucucaaacuccugaccuc

SEQ ID NO: 479161 - RNA, 20 nt, Human
gggaggccgaggugggcgga

SEQ ID NO: 479162 - RNA, 22 nt, Human
gggguuucaccauguuggccag

SEQ ID NO: 479163 - RNA, 24 nt, Human
gggugugguggcucacaccuguaa

SEQ ID NO: 479164 - RNA, 22 nt, Human
ggguucaagugauucuccugcc

SEQ ID NO: 479165 - RNA, 23 nt, Human
ggguucaagugauucuccugccu

SEQ ID NO: 479166 - RNA, 18 nt, Human
ggguuucaccauguuggc

SEQ ID NO: 479167 - RNA, 24 nt, Human
gguggcucacaccuguaaucccag

SEQ ID NO: 479168 - RNA, 18 nt, Human
guacugcagccugggaaa

SEQ ID NO: 479169 - RNA, 23 nt, Human
guagaaccaaaauuagaacacag

SEQ ID NO: 479170 - RNA, 18 nt, Human
guagcugggacuacaggc

SEQ ID NO: 479171 - RNA, 18 nt, Human
guagcugggauuacaggu

SEQ ID NO: 479172 - RNA, 22 nt, Human
gucucaaaaaaaagaaaaaaaa

SEQ ID NO: 479173 - RNA, 21 nt, Human
gucuggccaauaugaaacccu

SEQ ID NO: 479174 - RNA, 24 nt, Human
gugauucuccugccucagccuccc

SEQ ID NO: 479175 - RNA, 23 nt, Human
guggcucacaccuguaaucccag

SEQ ID NO: 479176 - RNA, 20 nt, Human
guggcucccaucuguaaucc

SEQ ID NO: 479177 - RNA, 18 nt, Human
gugugguggcucacaccu

SEQ ID NO: 479178 - RNA, 21 nt, Human
uaagggucaccugagcccggc

SEQ ID NO: 479179 - RNA, 23 nt, Human
uacaggcgccugccaccacgccc

SEQ ID NO: 479180 - RNA, 19 nt, Human
uacaggugugagccacugc

SEQ ID NO: 479181 - RNA, 24 nt, Human
uacaggugugagccacugcgccca

SEQ ID NO: 479182 - RNA, 20 nt, Human
uacugcagccugggaaagag

SEQ ID NO: 479183 - RNA, 22 nt, Human
uagaagaacaggcucugaagca

SEQ ID NO: 479184 - RNA, 24 nt, Human
uagagugcagugacaugaucucgg

SEQ ID NO: 479185 - RNA, 24 nt, Human
uagcacuuugggaggccaaggcag

SEQ ID NO: 479186 - RNA, 25 nt, Human
uagcacuuugggaggccaaggcagg

SEQ ID NO: 479187 - RNA, 24 nt, Human
uagcagagaugggguuucaccaug

SEQ ID NO: 479188 - RNA, 26 nt, Human
uagcagagaugggguuucaccauguu

SEQ ID NO: 479189 - RNA, 24 nt, Human
uagcuacuugggagguugaggcag

SEQ ID NO: 479190 - RNA, 20 nt, Human
uaggaagccucugcucaaaa

SEQ ID NO: 479191 - RNA, 21 nt, Human
uaguagagauggaguuucacc

SEQ ID NO: 479192 - RNA, 24 nt, Human
uaguagagauggaguuucaccgug

SEQ ID NO: 479193 - RNA, 26 nt, Human
uaguagagauggaguuucaccguguu

SEQ ID NO: 479194 - RNA, 19 nt, Human
uauauggauauguguaugu

SEQ ID NO: 479195 - RNA, 19 nt, Human
uauauggauauguguaugu

SEQ ID NO: 479196 - RNA, 18 nt, Human
uaucaaccugaggguauu

SEQ ID NO: 479197 - RNA, 22 nt, Human
uaugaaaaugaaaacucaguca

SEQ ID NO: 479198 - RNA, 19 nt, Human
uauugcccaggcuggagug

SEQ ID NO: 479199 - RNA, 19 nt, Human
ucaagugauucuccugccu

SEQ ID NO: 479200 - RNA, 24 nt, Human
ucacaaggucaggaguucgagacc

SEQ ID NO: 479201 - RNA, 24 nt, Human
ucaccguguuagccaggauggucu

SEQ ID NO: 479202 - RNA, 20 nt, Human
ucaccugagcccggcaaggu

SEQ ID NO: 479203 - RNA, 24 nt, Human
ucacucuauugcccaggcuggagu

SEQ ID NO: 479204 - RNA, 24 nt, Human
ucacugcaaccucugccucccggg

SEQ ID NO: 479205 - RNA, 25 nt, Human
ucacugcaaccucugccucccgggu

SEQ ID NO: 479206 - RNA, 18 nt, Human
ucacugcaagcuccgccu

SEQ ID NO: 479207 - RNA, 19 nt, Human
ucacugcaagcuccgccuc

SEQ ID NO: 479208 - RNA, 24 nt, Human
ucacugcaagcuccgccucccggg

SEQ ID NO: 479209 - RNA, 19 nt, Human
ucacuguacugcagccugg

SEQ ID NO: 479210 - RNA, 25 nt, Human
ucagacuaaaaaagauaaugaaaaa

SEQ ID NO: 479211 - RNA, 18 nt, Human
ucagccuccccaguagcu

SEQ ID NO: 479212 - RNA, 20 nt, Human
ucagccuccccaguagcugg

SEQ ID NO: 479213 - RNA, 20 nt, Human
ucagccucccgaguagcugg

SEQ ID NO: 479214 - RNA, 19 nt, Human
uccaaauaugaaagucagu

SEQ ID NO: 479215 - RNA, 18 nt, Human
uccaccuucuccgggccc

SEQ ID NO: 479216 - RNA, 23 nt, Human
uccagccuggacgacagagcgag

SEQ ID NO: 479217 - RNA, 24 nt, Human
uccagccuggacgacagagcgaga

SEQ ID NO: 479218 - RNA, 23 nt, Human
ucccaaagugcugggauuacagg

SEQ ID NO: 479219 - RNA, 24 nt, Human
ucccaaagugcugggauuacaggc

SEQ ID NO: 479220 - RNA, 22 nt, Human
uccccaguagcugggacuacag

SEQ ID NO: 479221 - RNA, 24 nt, Human
uccccaguagcugggacuacaggc

SEQ ID NO: 479222 - RNA, 23 nt, Human
ucccgaguagcugggauuacagg

SEQ ID NO: 479223 - RNA, 24 nt, Human
ucccgaguagcugggauuacaggu

SEQ ID NO: 479224 - RNA, 21 nt, Human
ucccggguucaagugauucuc

SEQ ID NO: 479225 - RNA, 24 nt, Human
ucccggguucaagugauucuccug

SEQ ID NO: 479226 - RNA, 24 nt, Human
ucccggguugacaccauuuuccug

SEQ ID NO: 479227 - RNA, 21 nt, Human
ucccuccaccuucuccgggcc

SEQ ID NO: 479228 - RNA, 19 nt, Human
ucccuggaaucuaagaaaa

SEQ ID NO: 479229 - RNA, 18 nt, Human
ucccugugggcagugaau

SEQ ID NO: 479230 - RNA, 18 nt, Human
uccugaccucaaaugauc

SEQ ID NO: 479231 - RNA, 24 nt, Human
ucuacuugcuaagcacugagaggc

SEQ ID NO: 479232 - RNA, 24 nt, Human
ucuauugcccaggcuggagugcag

SEQ ID NO: 479233 - RNA, 18 nt, Human
ucucaaacaaaaaaaaag

SEQ ID NO: 479234 - RNA, 23 nt, Human
ucucacucuauugcccaggcugg

SEQ ID NO: 479235 - RNA, 24 nt, Human
ucucacucuauugcccaggcugga

SEQ ID NO: 479236 - RNA, 26 nt, Human
ucucacucuauugcccaggcuggagu

SEQ ID NO: 479237 - RNA, 27 nt, Human
ucucacucuauugcccaggcuggagug

SEQ ID NO: 479238 - RNA, 24 nt, Human
ucucgcucugucucccaagcuaga

SEQ ID NO: 479239 - RNA, 21 nt, Human
ucucuacuaaaaauacaaaaa

SEQ ID NO: 479240 - RNA, 20 nt, Human
ucuggccaauaugaaacccu

SEQ ID NO: 479241 - RNA, 31 nt, Human
ucugucucaaacaaaaaaaaagaagaagaaa

SEQ ID NO: 479242 - RNA, 24 nt, Human
ucugucucccaagcuagagugcag

SEQ ID NO: 479243 - RNA, 20 nt, Human
ugaaucacuugagcccagga

SEQ ID NO: 479244 - RNA, 24 nt, Human
ugaaucacuugagcccaggaauuc

SEQ ID NO: 479245 - RNA, 18 nt, Human
ugaccucaaaugaucugc

SEQ ID NO: 479246 - RNA, 22 nt, Human
ugagacggagucucacucuauu

SEQ ID NO: 479247 - RNA, 22 nt, Human
ugagacggagucucgcucuguc

SEQ ID NO: 479248 - RNA, 23 nt, Human
ugagcccaggaauucgagacuag

SEQ ID NO: 479249 - RNA, 22 nt, Human
ugagccuuguuuaagaggcuag

SEQ ID NO: 479250 - RNA, 22 nt, Human
ugagcugagacugugucacugu

SEQ ID NO: 479251 - RNA, 24 nt, Human
ugaggauacacaagcaucuggcua

SEQ ID NO: 479252 - RNA, 20 nt, Human
ugaggcagaagaaucacuug

SEQ ID NO: 479253 - RNA, 24 nt, Human
ugaggcagaagaaucacuugaacc

SEQ ID NO: 479254 - RNA, 25 nt, Human
ugaggcagaagaaucacuugaaccc

SEQ ID NO: 479255 - RNA, 20 nt, Human
ugauucuccugccucagccu

SEQ ID NO: 479256 - RNA, 20 nt, Human
ugcagccugggaaagaguga

SEQ ID NO: 479257 - RNA, 22 nt, Human
ugcaguggcgcaaucucggcuc

SEQ ID NO: 479258 - RNA, 23 nt, Human
ugcaguggcgcaaucucggcuca

SEQ ID NO: 479259 - RNA, 19 nt, Human
ugccaccacgcccggcuau

SEQ ID NO: 479260 - RNA, 18 nt, Human
ugcccaggcuggagugca

SEQ ID NO: 479261 - RNA, 21 nt, Human
ugcccaggcuggagugcagug

SEQ ID NO: 479262 - RNA, 22 nt, Human
ugcccaggcuggagugcagugg

SEQ ID NO: 479263 - RNA, 24 nt, Human
ugcccaggcuggagugcaguggcg

SEQ ID NO: 479264 - RNA, 24 nt, Human
ugccucagccucccaaagugcugg

SEQ ID NO: 479265 - RNA, 21 nt, Human
ugccucagccuccccaguagc

SEQ ID NO: 479266 - RNA, 24 nt, Human
ugccucagccuccccaguagcugg

SEQ ID NO: 479267 - RNA, 24 nt, Human
ugccucagccucccgaguagcugg

SEQ ID NO: 479268 - RNA, 22 nt, Human
ugccucccggguucaagugauu

SEQ ID NO: 479269 - RNA, 24 nt, Human
ugccuuagcuucccaaagugcugg

SEQ ID NO: 479270 - RNA, 21 nt, Human
ugcucaaaaucucccuguggg

SEQ ID NO: 479271 - RNA, 20 nt, Human
ugcugggauuacaggcguga

SEQ ID NO: 479272 - RNA, 23 nt, Human
ugcugggauuacaggcgugagaa

SEQ ID NO: 479273 - RNA, 24 nt, Human
ugcugggauuacaggugugagcca

SEQ ID NO: 479274 - RNA, 18 nt, Human
ugcugucagaacaagggc

SEQ ID NO: 479275 - RNA, 19 nt, Human
uggacugggcugggcgugg

SEQ ID NO: 479276 - RNA, 23 nt, Human
uggagugcaguggcgcaaucucg

SEQ ID NO: 479277 - RNA, 24 nt, Human
uggagugcaguggcgcaaucucgg

SEQ ID NO: 479278 - RNA, 24 nt, Human
uggaguuucaccguguuagccagg

SEQ ID NO: 479279 - RNA, 21 nt, Human
uggccaauaugaaacccuguc

SEQ ID NO: 479280 - RNA, 24 nt, Human
uggccaggcuggucucaaacuccu

SEQ ID NO: 479281 - RNA, 20 nt, Human
uggccuggccucagugaucu

SEQ ID NO: 479282 - RNA, 21 nt, Human
uggcucacaccuguaauccca

SEQ ID NO: 479283 - RNA, 24 nt, Human
uggcucacaccuguaaucccagca

SEQ ID NO: 479284 - RNA, 19 nt, Human
uggcucccaucuguaaucc

SEQ ID NO: 479285 - RNA, 24 nt, Human
uggcucccaucuguaauccuagca

SEQ ID NO: 479286 - RNA, 20 nt, Human
uggcugggugugguggcuca

SEQ ID NO: 479287 - RNA, 18 nt, Human
ugggaaagagugagaccc

SEQ ID NO: 479288 - RNA, 21 nt, Human
ugggacuacaggcgccugcca

SEQ ID NO: 479289 - RNA, 22 nt, Human
ugggacuacaggcgccugccac

SEQ ID NO: 479290 - RNA, 24 nt, Human
ugggacuacaggcgccugccacca

SEQ ID NO: 479291 - RNA, 24 nt, Human
ugggaggccaaggcaggugaauca

SEQ ID NO: 479292 - RNA, 19 nt, Human
ugggaggccgaggugggcg

SEQ ID NO: 479293 - RNA, 24 nt, Human
ugggaggccgaggugggcggauca

SEQ ID NO: 479294 - RNA, 24 nt, Human
ugggaggcugaaguguaaggguca

SEQ ID NO: 479295 - RNA, 25 nt, Human
ugggaggcugaaguguaagggucaa

SEQ ID NO: 479296 - RNA, 24 nt, Human
ugggagguugaggcagaagaauca

SEQ ID NO: 479297 - RNA, 18 nt, Human
ugggauuacaggcgugag

SEQ ID NO: 479298 - RNA, 18 nt, Human
ugggauuacaggcgugag

SEQ ID NO: 479299 - RNA, 18 nt, Human
ugggauuacaggcgugag

SEQ ID NO: 479300 - RNA, 19 nt, Human
ugggauuacaggcgugaga

SEQ ID NO: 479301 - RNA, 23 nt, Human
ugggauuacaggcgugagaagau

SEQ ID NO: 479302 - RNA, 24 nt, Human
ugggauuacaggcgugagaagaua

SEQ ID NO: 479303 - RNA, 21 nt, Human
ugggauuacaggugcacacca

SEQ ID NO: 479304 - RNA, 22 nt, Human
ugggauuacaggugcacaccac

SEQ ID NO: 479305 - RNA, 22 nt, Human
ugggauuacaggugcacaccac

SEQ ID NO: 479306 - RNA, 24 nt, Human
ugggauuacaggugcacaccacca

SEQ ID NO: 479307 - RNA, 19 nt, Human
ugggauuacaggugugagc

SEQ ID NO: 479308 - RNA, 21 nt, Human
ugggauuacaggugugagcca

SEQ ID NO: 479309 - RNA, 22 nt, Human
ugggauuacaggugugagccac

SEQ ID NO: 479310 - RNA, 22 nt, Human
ugggauuacaggugugagccac

SEQ ID NO: 479311 - RNA, 24 nt, Human
ugggauuacaggugugagccacug

SEQ ID NO: 479312 - RNA, 23 nt, Human
ugggggccagagggccucucggg

SEQ ID NO: 479313 - RNA, 24 nt, Human
ugggguuucaccauguuggccagg

SEQ ID NO: 479314 - RNA, 24 nt, Human
ugguggcucacaccuguaauccca

SEQ ID NO: 479315 - RNA, 22 nt, Human
ugguggcucccaucuguaaucc

SEQ ID NO: 479316 - RNA, 18 nt, Human
ugguuaaaaaggguuguu

SEQ ID NO: 479317 - RNA, 21 nt, Human
uguagucagauccugagaacc

SEQ ID NO: 479318 - RNA, 19 nt, Human
uguauacauauuuuauaua

SEQ ID NO: 479319 - RNA, 21 nt, Human
uguauacauauuuuauauaug

SEQ ID NO: 479320 - RNA, 22 nt, Human
uguauuuuuaguagagauggag

SEQ ID NO: 479321 - RNA, 19 nt, Human
ugucaggaggaacauaugg

SEQ ID NO: 479322 - RNA, 23 nt, Human
uguguuuggguguuuuccagguu

SEQ ID NO: 479323 - RNA, 19 nt, Human
uguuacaugucagaaaguc

SEQ ID NO: 479324 - RNA, 24 nt, Human
uguuuguuuuuugagacggagucu

SEQ ID NO: 479325 - RNA, 23 nt, Human
uguuuuccagguuauccaaauau

SEQ ID NO: 479326 - RNA, 20 nt, Human
uuaaaacagaaaccuccuuc

SEQ ID NO: 479327 - RNA, 18 nt, Human
uuagcagagaugggguuu

SEQ ID NO: 479328 - RNA, 22 nt, Human
uuagcagagaugggguuucacc

SEQ ID NO: 479329 - RNA, 24 nt, Human
uuagcagagaugggguuucaccau

SEQ ID NO: 479330 - RNA, 18 nt, Human
uuagcugggcaugguggc

SEQ ID NO: 479331 - RNA, 24 nt, Human
uuagcugggcaugguggcaggcgc

SEQ ID NO: 479332 - RNA, 18 nt, Human
uuaguagagauggaguuu

SEQ ID NO: 479333 - RNA, 22 nt, Human
uuaguagagauggaguuucacc

SEQ ID NO: 479334 - RNA, 24 nt, Human
uuaguagagauggaguuucaccgu

SEQ ID NO: 479335 - RNA, 21 nt, Human
uucaagugauucuccugccuc

SEQ ID NO: 479336 - RNA, 23 nt, Human
uucaagugauucuccugccucag

SEQ ID NO: 479337 - RNA, 24 nt, Human
uucaagugauucuccugccucagc

SEQ ID NO: 479338 - RNA, 23 nt, Human
uucauugucuuaguagcuugggc

SEQ ID NO: 479339 - RNA, 23 nt, Human
uucuagccuacaucccccaacac

SEQ ID NO: 479340 - RNA, 18 nt, Human
uugaaguuuguguuuggg

SEQ ID NO: 479341 - RNA, 20 nt, Human
uugcagugagccaagauugc

SEQ ID NO: 479342 - RNA, 24 nt, Human
uugcccaggcuggagugcaguggc

SEQ ID NO: 479343 - RNA, 22 nt, Human
uuggcugggugugguggcucac

SEQ ID NO: 479344 - RNA, 25 nt, Human
uugggaggccgaggugggcggauca

SEQ ID NO: 479345 - RNA, 25 nt, Human
uugggaggcugaaguguaaggguca

SEQ ID NO: 479346 - RNA, 23 nt, Human
uuguauuuuuaguagagauggag

SEQ ID NO: 479347 - RNA, 24 nt, Human
uuucaccauguuggccaggcuggu

SEQ ID NO: 479348 - RNA, 19 nt, Human
uuucaccguguuagccagg

SEQ ID NO: 479349 - RNA, 22 nt, Human
uuucuuagauccaccacggaca

SEQ ID NO: 479350 - RNA, 18 nt, Human
uuucuuguaauuuuagca

SEQ ID NO: 479351 - RNA, 22 nt, Human
uuucuuguaauuuuagcagaga

SEQ ID NO: 479352 - RNA, 23 nt, Human
uuuuagcagagaugggguuucac

SEQ ID NO: 479353 - RNA, 24 nt, Human
uuuuuaguagagauggaguuucac

SEQ ID NO: 479354 - RNA, 23 nt, Human
uuuuucuucucuuuuccuauuuu

SEQ ID NO: 479355 - RNA, 21 nt, Human
uuuuuguauuuuuaguagaga

SEQ ID NO: 479356 - RNA, 21 nt, Human
uuuuuuguauuuuuaguagag

SEQ ID NO: 479357 - RNA, 24 nt, Human
uuuuuuguauuuuuaguagagaug

SEQ ID NO: 479358 - RNA, 24 nt, Human
uuuuuuuuguauuuuuaguagaga

SEQ ID NO: 479359 - RNA, 19 nt, Human
aaaagacucccagccacuc

SEQ ID NO: 479360 - RNA, 20 nt, Human
aaaauccuccauccaaucca

SEQ ID NO: 479361 - RNA, 20 nt, Human
aacuggugguguccccacaa

SEQ ID NO: 479362 - RNA, 23 nt, Human
aagcaagaguugagggcaugcaa

SEQ ID NO: 479363 - RNA, 18 nt, Human
aagcacaaaaugcugaca

SEQ ID NO: 479364 - RNA, 25 nt, Human
acacaaccaaaacaucagacagacu

SEQ ID NO: 479365 - RNA, 21 nt, Human
acccaccuucccuucuuacug

SEQ ID NO: 479366 - RNA, 20 nt, Human
accccucagucucagggauc

SEQ ID NO: 479367 - RNA, 25 nt, Human
accccugccaagcaagaguugaggg

SEQ ID NO: 479368 - RNA, 31 nt, Human
acugccucaagcucccauggaccugugggcc

SEQ ID NO: 479369 - RNA, 22 nt, Human
acugggaggaaggguagagcug

SEQ ID NO: 479370 - RNA, 18 nt, Human
agacucccagccacuccu

SEQ ID NO: 479371 - RNA, 19 nt, Human
agccaaaagcacaaaaugc

SEQ ID NO: 479372 - RNA, 21 nt, Human
caaaugcugagccaaaagcac

SEQ ID NO: 479373 - RNA, 18 nt, Human
cacagcccguaaaccccu

SEQ ID NO: 479374 - RNA, 22 nt, Human
caccuucccuucuuacugggag

SEQ ID NO: 479375 - RNA, 19 nt, Human
cagcagcaguggggaggga

SEQ ID NO: 479376 - RNA, 19 nt, Human
cagcagcaguggggaggga

SEQ ID NO: 479377 - RNA, 31 nt, Human
cagcagcaguggggagggagggugggcaacg

SEQ ID NO: 479378 - RNA, 22 nt, Human
cagcaguggggagggagggugg

SEQ ID NO: 479379 - RNA, 21 nt, Human
cagcccguaaaccccucaguc

SEQ ID NO: 479380 - RNA, 21 nt, Human
caggugcccacccaccuuccc

SEQ ID NO: 479381 - RNA, 19 nt, Human
caguggggagggagggugg

SEQ ID NO: 479382 - RNA, 20 nt, Human
caguggggagggaggguggg

SEQ ID NO: 479383 - RNA, 21 nt, Human
ccaguggcaaggaagggcugg

SEQ ID NO: 479384 - RNA, 18 nt, Human
ccaucucgccuguuccca

SEQ ID NO: 479385 - RNA, 21 nt, Human
cccacaaguuagggaaaagac

SEQ ID NO: 479386 - RNA, 20 nt, Human
cccagccacuccuugagaug

SEQ ID NO: 479387 - RNA, 23 nt, Human
ccccaauuccauguauucuucua

SEQ ID NO: 479388 - RNA, 23 nt, Human
cccguaaaccccucagucucagg

SEQ ID NO: 479389 - RNA, 23 nt, Human
ccuccauccaauccaaaugcuga

SEQ ID NO: 479390 - RNA, 20 nt, Human
cugggaggggcaugguuccc

SEQ ID NO: 479391 - RNA, 21 nt, Human
cuugacaacuggugguguccc

SEQ ID NO: 479392 - RNA, 18 nt, Human
cuuucagucucugguacc

SEQ ID NO: 479393 - RNA, 20 nt, Human
gaaaauccuccauccaaucc

SEQ ID NO: 479394 - RNA, 23 nt, Human
gaaaauccuccauccaauccaaa

SEQ ID NO: 479395 - RNA, 19 nt, Human
gaagacaauuauuccaugg

SEQ ID NO: 479396 - RNA, 24 nt, Human
gcccucagacccuacugccuagua

SEQ ID NO: 479397 - RNA, 23 nt, Human
gcugcccagcuuugagaccagug

SEQ ID NO: 479398 - RNA, 18 nt, Human
ggacugggaggggcaugg

SEQ ID NO: 479399 - RNA, 23 nt, Human
ggacugggaggggcaugguucca

SEQ ID NO: 479400 - RNA, 20 nt, Human
ggagaaacgggacugggagg

SEQ ID NO: 479401 - RNA, 20 nt, Human
ggagggagggugggcagggc

SEQ ID NO: 479402 - RNA, 22 nt, Human
ggagggugggcagggcugaagg

SEQ ID NO: 479403 - RNA, 19 nt, Human
gggagggagggugggcagg

SEQ ID NO: 479404 - RNA, 22 nt, Human
gggcauuucuuggagggcuggg

SEQ ID NO: 479405 - RNA, 19 nt, Human
gggcugggggaccacaguc

SEQ ID NO: 479406 - RNA, 21 nt, Human
gggggugcugguagugggacu

SEQ ID NO: 479407 - RNA, 19 nt, Human
guggaagacaauuauucca

SEQ ID NO: 479408 - RNA, 21 nt, Human
uaaccucucagguggaggccu

SEQ ID NO: 479409 - RNA, 21 nt, Human
uaccccugccaagcaagaguu

SEQ ID NO: 479410 - RNA, 23 nt, Human
uauauuuauucacacaaccaaaa

SEQ ID NO: 479411 - RNA, 18 nt, Human
ucagguggaggccugagc

SEQ ID NO: 479412 - RNA, 23 nt, Human
uccaaaugcugagccaaaagcac

SEQ ID NO: 479413 - RNA, 25 nt, Human
uccauggucgguggcgacggagggc

SEQ ID NO: 479414 - RNA, 19 nt, Human
ucccagggaaggugaugug

SEQ ID NO: 479415 - RNA, 27 nt, Human
ucccauggaccugugggcggggaguuc

SEQ ID NO: 479416 - RNA, 24 nt, Human
ucccuguuccaucucgccuguucu

SEQ ID NO: 479417 - RNA, 19 nt, Human
uccuugagaugggugccug

SEQ ID NO: 479418 - RNA, 21 nt, Human
uccuugguuuaugggcauuuc

SEQ ID NO: 479419 - RNA, 25 nt, Human
ucgguggcgacggagggcugguuuc

SEQ ID NO: 479420 - RNA, 22 nt, Human
ucucaggugcccacccaccuuc

SEQ ID NO: 479421 - RNA, 23 nt, Human
ucucagguggaggccugagcccu

SEQ ID NO: 479422 - RNA, 23 nt, Human
ucucagguuauaaccucucaggu

SEQ ID NO: 479423 - RNA, 21 nt, Human
ugaaaauccuccauccaaucc

SEQ ID NO: 479424 - RNA, 23 nt, Human
ugaaaauccuccauccaauccaa

SEQ ID NO: 479425 - RNA, 20 nt, Human
ugaggacuuucacccugucc

SEQ ID NO: 479426 - RNA, 21 nt, Human
ugcaaugggcugcccagcuuu

SEQ ID NO: 479427 - RNA, 18 nt, Human
ugcccacccaccuucccu

SEQ ID NO: 479428 - RNA, 21 nt, Human
ugcccacccaccuucccuucu

SEQ ID NO: 479429 - RNA, 21 nt, Human
ugccucaagcucccauggacc

SEQ ID NO: 479430 - RNA, 21 nt, Human
uggaagacaauuauuccaugg

SEQ ID NO: 479431 - RNA, 24 nt, Human
uggaccugugggcggggaguuaaa

SEQ ID NO: 479432 - RNA, 26 nt, Human
uggaggccugagcccucagacccuac

SEQ ID NO: 479433 - RNA, 23 nt, Human
uggcaccagggaagaguuucgug

SEQ ID NO: 479434 - RNA, 25 nt, Human
uggcaccagggaagaguuucgugga

SEQ ID NO: 479435 - RNA, 23 nt, Human
ugggaaguggaggauucagaucc

SEQ ID NO: 479436 - RNA, 24 nt, Human
ugggaggggcaugguuccaguggg

SEQ ID NO: 479437 - RNA, 19 nt, Human
uggggagggagggugggca

SEQ ID NO: 479438 - RNA, 22 nt, Human
uggggagggagggugggcaggg

SEQ ID NO: 479439 - RNA, 24 nt, Human
uuccauggucgguggcgacggagg

SEQ ID NO: 479440 - RNA, 19 nt, Human
uucccauucuucuccccaa

SEQ ID NO: 479441 - RNA, 21 nt, Human
uugaggacuuucacccugucc

SEQ ID NO: 479442 - RNA, 23 nt, Human
uuugugccgugucuuucagucuc

SEQ ID NO: 479443 - RNA, 20 nt, Human
uuuucccauucuucucccca

SEQ ID NO: 479444 - RNA, 19 nt, Human
uuuuuuuuuuuuccagagg

SEQ ID NO: 479445 - RNA, 28 nt, Human
uuuuuuuuuuuuuuccagaggggaauua

SEQ ID NO: 479446 - RNA, 21 nt, Human
uuuuuuuuuuuuuuuuccaga

SEQ ID NO: 479447 - RNA, 24 nt, Human
uuuuuuuuuuuuuuuuuccagagg

SEQ ID NO: 479448 - RNA, 22 nt, Human
aaaaagaugguagggaacaaaa

SEQ ID NO: 479449 - RNA, 19 nt, Human
aaaaucccacaaauccaua

SEQ ID NO: 479450 - RNA, 19 nt, Human
aaugaaaucaucaucugaa

SEQ ID NO: 479451 - RNA, 26 nt, Human
auaccagagccauucuggagaugcca

SEQ ID NO: 479452 - RNA, 24 nt, Human
aucugaaaaaaaagaugguagggg

SEQ ID NO: 479453 - RNA, 24 nt, Human
caaaguguugccuuugccagugua

SEQ ID NO: 479454 - RNA, 18 nt, Human
cggugcaagcggcgaacu

SEQ ID NO: 479455 - RNA, 18 nt, Human
gagaugccauguaagaaa

SEQ ID NO: 479456 - RNA, 23 nt, Human
ucagaacuggggagaagggucca

SEQ ID NO: 479457 - RNA, 21 nt, Human
ugccauguaagaaaucuggag

SEQ ID NO: 479458 - RNA, 19 nt, Human
ugguagggaacaaaacgug

SEQ ID NO: 479459 - RNA, 22 nt, Human
aaaaauaacaaaaagaccuuac

SEQ ID NO: 479460 - RNA, 22 nt, Human
aaauguugcaaguuauccuacu

SEQ ID NO: 479461 - RNA, 20 nt, Human
aacaaaaagaccuuacuaau

SEQ ID NO: 479462 - RNA, 26 nt, Human
aaccucgcagccgcguucucccaccg

SEQ ID NO: 479463 - RNA, 20 nt, Human
aaucaaagucaucaucuuug

SEQ ID NO: 479464 - RNA, 24 nt, Human
acuaauuauccaaucaaagucauc

SEQ ID NO: 479465 - RNA, 21 nt, Human
agccgcguucucccaccggaa

SEQ ID NO: 479466 - RNA, 20 nt, Human
caacaauaccugauacgaug

SEQ ID NO: 479467 - RNA, 21 nt, Human
caagauguuccugacacauga

SEQ ID NO: 479468 - RNA, 19 nt, Human
cacaacuuaaaguuuuguc

SEQ ID NO: 479469 - RNA, 18 nt, Human
cgaaaaccucgcagccgc

SEQ ID NO: 479470 - RNA, 23 nt, Human
cucuaauaucaacaauaccugau

SEQ ID NO: 479471 - RNA, 23 nt, Human
gagccaaagccgaaaaccucgca

SEQ ID NO: 479472 - RNA, 20 nt, Human
gccgcguucucccaccggaa

SEQ ID NO: 479473 - RNA, 22 nt, Human
guaaaucucuaaaaugugguag

SEQ ID NO: 479474 - RNA, 21 nt, Human
guagguacuuccagagcuaaa

SEQ ID NO: 479475 - RNA, 28 nt, Human
uaaaacauugaaaaaacauuaaaagaca

SEQ ID NO: 479476 - RNA, 20 nt, Human
uaaaucucuaaaauguggua

SEQ ID NO: 479477 - RNA, 21 nt, Human
uaacaaaaagaccuuacuaau

SEQ ID NO: 479478 - RNA, 23 nt, Human
uaacaaaaagaccuuacuaauua

SEQ ID NO: 479479 - RNA, 20 nt, Human
uccagagcuaaauguugcaa

SEQ ID NO: 479480 - RNA, 23 nt, Human
aaacaaccggggcccaggcccag

SEQ ID NO: 479481 - RNA, 22 nt, Human
aaacggccaggcccacgaagca

SEQ ID NO: 479482 - RNA, 18 nt, Human
aacagaaaaccagacccc

SEQ ID NO: 479483 - RNA, 21 nt, Human
aacaggagggccagccucagg

SEQ ID NO: 479484 - RNA, 23 nt, Human
aacgcguugccucaauucacucc

SEQ ID NO: 479485 - RNA, 21 nt, Human
aacggaagaguccuaagacug

SEQ ID NO: 479486 - RNA, 21 nt, Human
aagacccuuccuuuucuucua

SEQ ID NO: 479487 - RNA, 20 nt, Human
aagacgccugagcggcgcgg

SEQ ID NO: 479488 - RNA, 25 nt, Human
aagaguccuaagacugcaaagaccc

SEQ ID NO: 479489 - RNA, 21 nt, Human
aagggccaggagucacggacg

SEQ ID NO: 479490 - RNA, 18 nt, Human
aaguaacagaaaaccaga

SEQ ID NO: 479491 - RNA, 22 nt, Human
aaguaacagaaaaccagacccc

SEQ ID NO: 479492 - RNA, 19 nt, Human
accacagccaccgcaggga

SEQ ID NO: 479493 - RNA, 18 nt, Human
accgcagggaaacaaccg

SEQ ID NO: 479494 - RNA, 18 nt, Human
acgccugagcggcgcggg

SEQ ID NO: 479495 - RNA, 19 nt, Human
agccccugggaggaacccu

SEQ ID NO: 479496 - RNA, 19 nt, Human
aggacucaaauacgucacc

SEQ ID NO: 479497 - RNA, 22 nt, Human
agucuacuuaucugagcccaaa

SEQ ID NO: 479498 - RNA, 23 nt, Human
agucucagcucugccaguuccug

SEQ ID NO: 479499 - RNA, 21 nt, Human
caaaaauacugaguccaccug

SEQ ID NO: 479500 - RNA, 19 nt, Human
caaccggggcccaggccca

SEQ ID NO: 479501 - RNA, 19 nt, Human
cacaacccgcaacgagaag

SEQ ID NO: 479502 - RNA, 23 nt, Human
cacaacccgcaacgagaagcaaa

SEQ ID NO: 479503 - RNA, 19 nt, Human
cacacgcggcucagucacc

SEQ ID NO: 479504 - RNA, 23 nt, Human
caccucaugauaagacagcaaua

SEQ ID NO: 479505 - RNA, 19 nt, Human
cagaaaacugcccucgacu

SEQ ID NO: 479506 - RNA, 22 nt, Human
cagaaaacugcccucgacuaac

SEQ ID NO: 479507 - RNA, 19 nt, Human
cagcgcagcgaaggggcgg

SEQ ID NO: 479508 - RNA, 18 nt, Human
ccaaacgcaaacggccag

SEQ ID NO: 479509 - RNA, 21 nt, Human
ccaaacgcaaacggccaggcc

SEQ ID NO: 479510 - RNA, 25 nt, Human
ccaaacgcaaacggccaggcccacg

SEQ ID NO: 479511 - RNA, 19 nt, Human
ccacagagaagggccagga

SEQ ID NO: 479512 - RNA, 22 nt, Human
ccaccgcagggaaacaaccggg

SEQ ID NO: 479513 - RNA, 22 nt, Human
ccaggcagucggcgccugcgcu

SEQ ID NO: 479514 - RNA, 19 nt, Human
cccacaaaaauacugaguc

SEQ ID NO: 479515 - RNA, 25 nt, Human
cccaggacugaagaaguaccagggc

SEQ ID NO: 479516 - RNA, 18 nt, Human
ccccagaaaacugcccuc

SEQ ID NO: 479517 - RNA, 23 nt, Human
ccgccgggggcugcggacuacag

SEQ ID NO: 479518 - RNA, 22 nt, Human
ccuccuuccaagguucacaggg

SEQ ID NO: 479519 - RNA, 25 nt, Human
ccuccuuccaagguucacagggugg

SEQ ID NO: 479520 - RNA, 19 nt, Human
ccuguagaacccuccuucc

SEQ ID NO: 479521 - RNA, 20 nt, Human
ccuguagaacccuccuucca

SEQ ID NO: 479522 - RNA, 21 nt, Human
ccuuccuuuucuucuagaucc

SEQ ID NO: 479523 - RNA, 20 nt, Human
cgaagcaggaaacacaaccc

SEQ ID NO: 479524 - RNA, 19 nt, Human
cgacuaacagcgcagcgaa

SEQ ID NO: 479525 - RNA, 21 nt, Human
cgagccaagacgccugagcgg

SEQ ID NO: 479526 - RNA, 21 nt, Human
cgcggggggaucgggggaucc

SEQ ID NO: 479527 - RNA, 20 nt, Human
cgcucgagacccuggaacgg

SEQ ID NO: 479528 - RNA, 18 nt, Human
cggccaggcccacgaagc

SEQ ID NO: 479529 - RNA, 19 nt, Human
cggcucagucaccuaggga

SEQ ID NO: 479530 - RNA, 18 nt, Human
cucgagacccuggaacgg

SEQ ID NO: 479531 - RNA, 19 nt, Human
cugcgcccacaaagccgcc

SEQ ID NO: 479532 - RNA, 19 nt, Human
cugcgcccacaaagccgcc

SEQ ID NO: 479533 - RNA, 21 nt, Human
cugcgcccacaaagccgccgg

SEQ ID NO: 479534 - RNA, 22 nt, Human
cugcgcccacaaagccgccggg

SEQ ID NO: 479535 - RNA, 20 nt, Human
cugcucaggagcgugaacga

SEQ ID NO: 479536 - RNA, 19 nt, Human
cuggaacgggaacgaccac

SEQ ID NO: 479537 - RNA, 21 nt, Human
gaagaacagcccgagcucaca

SEQ ID NO: 479538 - RNA, 21 nt, Human
gaagaguucuagcucgcgaca

SEQ ID NO: 479539 - RNA, 20 nt, Human
gagggaccagacuuaaguuc

SEQ ID NO: 479540 - RNA, 18 nt, Human
ggaaaaggccagcgggcc

SEQ ID NO: 479541 - RNA, 18 nt, Human
ggaaggcucugcucagga

SEQ ID NO: 479542 - RNA, 21 nt, Human
gggaaacaaccggggcccagg

SEQ ID NO: 479543 - RNA, 20 nt, Human
gggagcaggaaaaggccagc

SEQ ID NO: 479544 - RNA, 22 nt, Human
ggggcccaggcccaggugggcg

SEQ ID NO: 479545 - RNA, 22 nt, Human
gugaacgacaccgcccgcugca

SEQ ID NO: 479546 - RNA, 19 nt, Human
uaacaccuacgucgcggaa

SEQ ID NO: 479547 - RNA, 21 nt, Human
uaacagaaaaccagaccccau

SEQ ID NO: 479548 - RNA, 20 nt, Human
uaagaaaagauaaaacaaac

SEQ ID NO: 479549 - RNA, 23 nt, Human
uaagacagcaauacaacugcccc

SEQ ID NO: 479550 - RNA, 24 nt, Human
uaaguugaaccaacacaauaauug

SEQ ID NO: 479551 - RNA, 19 nt, Human
uagcucgcgacagccccug

SEQ ID NO: 479552 - RNA, 23 nt, Human
uaggaagaugagcuugccaaaaa

SEQ ID NO: 479553 - RNA, 21 nt, Human
ucagggaaguuuaaaaaaaau

SEQ ID NO: 479554 - RNA, 26 nt, Human
ucaguuagaauuaaauaaauuuucca

SEQ ID NO: 479555 - RNA, 21 nt, Human
ucccaggacugaagaaguacc

SEQ ID NO: 479556 - RNA, 19 nt, Human
ucccccagaaaacugcccu

SEQ ID NO: 479557 - RNA, 20 nt, Human
uccuaagacugcaaagaccc

SEQ ID NO: 479558 - RNA, 20 nt, Human
ucgacuaacagcgcagcgaa

SEQ ID NO: 479559 - RNA, 21 nt, Human
ucucaccacagccauaaggcg

SEQ ID NO: 479560 - RNA, 25 nt, Human
ugaagccaguaagagaaaagacuaa

SEQ ID NO: 479561 - RNA, 24 nt, Human
ugagccacgcggaggaggaagaac

SEQ ID NO: 479562 - RNA, 23 nt, Human
ugcaaagacccuuccuuuucuuc

SEQ ID NO: 479563 - RNA, 21 nt, Human
ugcaaguaacagaaaaccaga

SEQ ID NO: 479564 - RNA, 21 nt, Human
ugcauagauaucauuccaauu

SEQ ID NO: 479565 - RNA, 20 nt, Human
ugcauuuguauauuuuccuu

SEQ ID NO: 479566 - RNA, 22 nt, Human
uggaaaggaacgcguugccuca

SEQ ID NO: 479567 - RNA, 21 nt, Human
uggagaguggcuaaugucccc

SEQ ID NO: 479568 - RNA, 19 nt, Human
uggagugagccacgcggag

SEQ ID NO: 479569 - RNA, 18 nt, Human
uggcgucgaguaaagcac

SEQ ID NO: 479570 - RNA, 22 nt, Human
ugggcauggagugugagggacc

SEQ ID NO: 479571 - RNA, 24 nt, Human
uguagaacccuccuuccaagguuc

SEQ ID NO: 479572 - RNA, 20 nt, Human
ugugucacacacgcggcuca

SEQ ID NO: 479573 - RNA, 20 nt, Human
uuauggcuguuauccuaaca

SEQ ID NO: 479574 - RNA, 23 nt, Human
uuccuguagaacccuccuuccaa

SEQ ID NO: 479575 - RNA, 19 nt, Human
aagaagaagcucaacagcu

SEQ ID NO: 479576 - RNA, 21 nt, Human
aagaagcucaacagcugccaa

SEQ ID NO: 479577 - RNA, 25 nt, Human
aagccagcucuggacugaguucuag

SEQ ID NO: 479578 - RNA, 24 nt, Human
aagucgaguucccuguugacccug

SEQ ID NO: 479579 - RNA, 22 nt, Human
agaaagaaacuaaucuauaaaa

SEQ ID NO: 479580 - RNA, 19 nt, Human
aggaagaagucgaguuccc

SEQ ID NO: 479581 - RNA, 21 nt, Human
aggauggaacuaggggaagaa

SEQ ID NO: 479582 - RNA, 22 nt, Human
auagcaaaauauuuuuggucau

SEQ ID NO: 479583 - RNA, 27 nt, Human
caaagagcauuucccacuuuaugccaa

SEQ ID NO: 479584 - RNA, 24 nt, Human
caagaagaagcucaacagcugguu

SEQ ID NO: 479585 - RNA, 20 nt, Human
cccacuuuaugccaaauguc

SEQ ID NO: 479586 - RNA, 21 nt, Human
ccugaauggcgacucccucug

SEQ ID NO: 479587 - RNA, 21 nt, Human
gaacaaugagaugaagucagg

SEQ ID NO: 479588 - RNA, 19 nt, Human
gaggauggaacuaggggaa

SEQ ID NO: 479589 - RNA, 20 nt, Human
gcaagaagaagcucaacagc

SEQ ID NO: 479590 - RNA, 18 nt, Human
ggaccccauagacuagca

SEQ ID NO: 479591 - RNA, 20 nt, Human
uagaaagaaacuaaucuaua

SEQ ID NO: 479592 - RNA, 22 nt, Human
uagaaagaaacuaaucuauaaa

SEQ ID NO: 479593 - RNA, 26 nt, Human
uauaaaauggagacaauucuccccaa

SEQ ID NO: 479594 - RNA, 22 nt, Human
uaucaagaaggugaacagcuuc

SEQ ID NO: 479595 - RNA, 20 nt, Human
ucaggaagaagucgaguucc

SEQ ID NO: 479596 - RNA, 18 nt, Human
uccaaagagcauuuccca

SEQ ID NO: 479597 - RNA, 21 nt, Human
uccaaagagcauuucccacuu

SEQ ID NO: 479598 - RNA, 25 nt, Human
uccauauacaaagaaagaaauagca

SEQ ID NO: 479599 - RNA, 23 nt, Human
ucuccaauaucaaaaaggucacu

SEQ ID NO: 479600 - RNA, 22 nt, Human
ucucucauagaagagcauaagc

SEQ ID NO: 479601 - RNA, 21 nt, Human
ugacccugaauggcgacuccc

SEQ ID NO: 479602 - RNA, 24 nt, Human
ugacccugaauggcgacucccucu

SEQ ID NO: 479603 - RNA, 23 nt, Human
ugagaugaagucagguuuguguu

SEQ ID NO: 479604 - RNA, 25 nt, Human
ugccaaaugucuuuguaaggacccc

SEQ ID NO: 479605 - RNA, 23 nt, Human
uggagacaauucuccccaauuca

SEQ ID NO: 479606 - RNA, 20 nt, Human
caaaauauaauacauuaaca

SEQ ID NO: 479607 - RNA, 28 nt, Human
caaacauucacacgcaggcaacagaaua

SEQ ID NO: 479608 - RNA, 19 nt, Human
ccuuuggguuuaccaagga

SEQ ID NO: 479609 - RNA, 21 nt, Human
gcaacagaauaagccuuuggg

SEQ ID NO: 479610 - RNA, 24 nt, Human
uuaacagacaaugauauagcucuu

SEQ ID NO: 479611 - RNA, 18 nt, Human
acauaggccuugguuucc

SEQ ID NO: 479612 - RNA, 23 nt, Human
agacauaggccuugguuucccca

SEQ ID NO: 479613 - RNA, 18 nt, Human
uaggccuugguuucccca

SEQ ID NO: 479614 - RNA, 22 nt, Human
aacacaucaguaacagucuuau

SEQ ID NO: 479615 - RNA, 23 nt, Human
aacccaaugguuucgguuacugu

SEQ ID NO: 479616 - RNA, 22 nt, Human
aagaaaaaccuaauuuggcauu

SEQ ID NO: 479617 - RNA, 21 nt, Human
aagcaagagccagucacagag

SEQ ID NO: 479618 - RNA, 22 nt, Human
aagcaagagccagucacagaga

SEQ ID NO: 479619 - RNA, 18 nt, Human
aagcaucacgaccaucuu

SEQ ID NO: 479620 - RNA, 22 nt, Human
aagcccuccgcuccagccccuc

SEQ ID NO: 479621 - RNA, 19 nt, Human
aauagguccuggggcccuu

SEQ ID NO: 479622 - RNA, 18 nt, Human
aaucacucaguugcaucc

SEQ ID NO: 479623 - RNA, 20 nt, Human
aauuggacugacuacauuca

SEQ ID NO: 479624 - RNA, 20 nt, Human
acaccaaaggucagaaacac

SEQ ID NO: 479625 - RNA, 26 nt, Human
acacuggcugccagccacuggggcuu

SEQ ID NO: 479626 - RNA, 21 nt, Human
acagagacacuggcauccaca

SEQ ID NO: 479627 - RNA, 18 nt, Human
acagccuucugcaaaaau

SEQ ID NO: 479628 - RNA, 20 nt, Human
acaggaacgugaccguggag

SEQ ID NO: 479629 - RNA, 18 nt, Human
acaggcacaucugacaug

SEQ ID NO: 479630 - RNA, 21 nt, Human
acaggcacaucugacaugccu

SEQ ID NO: 479631 - RNA, 19 nt, Human
acccagagaaugaagaaag

SEQ ID NO: 479632 - RNA, 19 nt, Human
acuaacaagugaacaacac

SEQ ID NO: 479633 - RNA, 24 nt, Human
agaaaaaccuaauuuggcauuuuu

SEQ ID NO: 479634 - RNA, 23 nt, Human
agaccagacuggcaggaagaagg

SEQ ID NO: 479635 - RNA, 20 nt, Human
agagauggauggauaaugag

SEQ ID NO: 479636 - RNA, 24 nt, Human
aggaacgugaccguggagggaugg

SEQ ID NO: 479637 - RNA, 23 nt, Human
aggaagaagucacaguagacaga

SEQ ID NO: 479638 - RNA, 24 nt, Human
aggaggcauagaacuucuggcucu

SEQ ID NO: 479639 - RNA, 18 nt, Human
aggaggccccggucacgc

SEQ ID NO: 479640 - RNA, 21 nt, Human
auaaaguucucuuaggauaaa

SEQ ID NO: 479641 - RNA, 23 nt, Human
caaaagaaaagcaaccucucccc

SEQ ID NO: 479642 - RNA, 18 nt, Human
caagagccagucacagag

SEQ ID NO: 479643 - RNA, 19 nt, Human
caagugaacaacacaucag

SEQ ID NO: 479644 - RNA, 20 nt, Human
caccaguggucucccaggcu

SEQ ID NO: 479645 - RNA, 20 nt, Human
cacccaagcuacgcuagugc

SEQ ID NO: 479646 - RNA, 20 nt, Human
caccccuccagcccaagccc

SEQ ID NO: 479647 - RNA, 22 nt, Human
caccuugacccaaauguucuga

SEQ ID NO: 479648 - RNA, 19 nt, Human
cagagacacuggcauccac

SEQ ID NO: 479649 - RNA, 26 nt, Human
cagcacuguacacauguggugagcca

SEQ ID NO: 479650 - RNA, 21 nt, Human
cagcucagggcucccgccucg

SEQ ID NO: 479651 - RNA, 18 nt, Human
caggagccggccucagag

SEQ ID NO: 479652 - RNA, 18 nt, Human
caggaugggccucugggc

SEQ ID NO: 479653 - RNA, 18 nt, Human
caggaugggccucugggc

SEQ ID NO: 479654 - RNA, 22 nt, Human
cagggcucccgccucgccuccc

SEQ ID NO: 479655 - RNA, 18 nt, Human
caguagacagagcagcca

SEQ ID NO: 479656 - RNA, 25 nt, Human
caguagacagagcagccagaugccg

SEQ ID NO: 479657 - RNA, 24 nt, Human
caguuacuaacaagugaacaacac

SEQ ID NO: 479658 - RNA, 21 nt, Human
cauaauaaaguucucuuagga

SEQ ID NO: 479659 - RNA, 18 nt, Human
ccacacccagggccccug

SEQ ID NO: 479660 - RNA, 18 nt, Human
ccacugagauuacacagg

SEQ ID NO: 479661 - RNA, 18 nt, Human
cccaggggcccugcuggg

SEQ ID NO: 479662 - RNA, 18 nt, Human
ccccagguuucacuuugc

SEQ ID NO: 479663 - RNA, 21 nt, Human
cccccagguuucacuuugcuc

SEQ ID NO: 479664 - RNA, 19 nt, Human
ccccgccgccuccuccugc

SEQ ID NO: 479665 - RNA, 20 nt, Human
ccccuccagcccaagcccuc

SEQ ID NO: 479666 - RNA, 19 nt, Human
cccuccgcuccagccccuc

SEQ ID NO: 479667 - RNA, 18 nt, Human
cccugcuggggacucgcc

SEQ ID NO: 479668 - RNA, 18 nt, Human
cccuguggggccacuguc

SEQ ID NO: 479669 - RNA, 21 nt, Human
ccgcgcugcccggccucagcu

SEQ ID NO: 479670 - RNA, 21 nt, Human
ccuccaggccucuuugauagc

SEQ ID NO: 479671 - RNA, 22 nt, Human
cgagggcacggggggcgcaggg

SEQ ID NO: 479672 - RNA, 19 nt, Human
cgccgguguccccgccgcc

SEQ ID NO: 479673 - RNA, 23 nt, Human
cgggaagggcagguggcuggaga

SEQ ID NO: 479674 - RNA, 20 nt, Human
cucagacauuuaacuuaucc

SEQ ID NO: 479675 - RNA, 23 nt, Human
cucccgccucgccuccccgagcu

SEQ ID NO: 479676 - RNA, 22 nt, Human
cuccgcccagucugagggcucc

SEQ ID NO: 479677 - RNA, 23 nt, Human
cucgccgguguccccgccgccuc

SEQ ID NO: 479678 - RNA, 21 nt, Human
cugaccucccuaaccugcugg

SEQ ID NO: 479679 - RNA, 20 nt, Human
cugagagggaccgcgcagug

SEQ ID NO: 479680 - RNA, 24 nt, Human
cugagguggagaguagagggguug

SEQ ID NO: 479681 - RNA, 21 nt, Human
cugcaaacagcacuguacaca

SEQ ID NO: 479682 - RNA, 25 nt, Human
cuuggcaguguuugugcagagcucu

SEQ ID NO: 479683 - RNA, 22 nt, Human
cuuggccucagcuuccucugac

SEQ ID NO: 479684 - RNA, 24 nt, Human
gaacccaaugguuucgguuacugu

SEQ ID NO: 479685 - RNA, 18 nt, Human
gaagaaggcccagagcuc

SEQ ID NO: 479686 - RNA, 19 nt, Human
gaagccugugggugccaug

SEQ ID NO: 479687 - RNA, 18 nt, Human
gacaccccuccagcccaa

SEQ ID NO: 479688 - RNA, 30 nt, Human
gacaccccuccagcccaagcccuccgcucu

SEQ ID NO: 479689 - RNA, 19 nt, Human
gagacacuggcauccacac

SEQ ID NO: 479690 - RNA, 19 nt, Human
gagggauggauuauggugg

SEQ ID NO: 479691 - RNA, 23 nt, Human
gauggauaaugaguacaacugcc

SEQ ID NO: 479692 - RNA, 22 nt, Human
gcacucgaagaccagacuggca

SEQ ID NO: 479693 - RNA, 21 nt, Human
gcagagcucugaggaaggaca

SEQ ID NO: 479694 - RNA, 21 nt, Human
gcagugaagaggcucuuugga

SEQ ID NO: 479695 - RNA, 20 nt, Human
gcagugugcggguuuggcaa

SEQ ID NO: 479696 - RNA, 21 nt, Human
gcauguucucugucgugugug

SEQ ID NO: 479697 - RNA, 22 nt, Human
gccaugcuccacagaaggcagg

SEQ ID NO: 479698 - RNA, 24 nt, Human
gccguaugaccccagacugaccuc

SEQ ID NO: 479699 - RNA, 20 nt, Human
gccucgccuccccgagcucc

SEQ ID NO: 479700 - RNA, 23 nt, Human
gcgggacagccuucugcaaaaau

SEQ ID NO: 479701 - RNA, 22 nt, Human
gcucccugucaauguugcugag

SEQ ID NO: 479702 - RNA, 20 nt, Human
gcuugguggguggcacaguu

SEQ ID NO: 479703 - RNA, 22 nt, Human
ggacagcaguacaugguccuca

SEQ ID NO: 479704 - RNA, 22 nt, Human
ggcuggagacccuuccgggagc

SEQ ID NO: 479705 - RNA, 19 nt, Human
gggagcccaggggcccugc

SEQ ID NO: 479706 - RNA, 20 nt, Human
ggggaggcuugguggguggc

SEQ ID NO: 479707 - RNA, 21 nt, Human
gggugugggucuugaacucgg

SEQ ID NO: 479708 - RNA, 19 nt, Human
ggucaggcacaaaaucuca

SEQ ID NO: 479709 - RNA, 18 nt, Human
gguggagaguagaggggu

SEQ ID NO: 479710 - RNA, 23 nt, Human
gguggcaggggagcugagaggga

SEQ ID NO: 479711 - RNA, 21 nt, Human
ggugugugugugugugugugu

SEQ ID NO: 479712 - RNA, 24 nt, Human
gucacaguagacagagcagccaga

SEQ ID NO: 479713 - RNA, 22 nt, Human
gucaccaguggucucccaggcu

SEQ ID NO: 479714 - RNA, 21 nt, Human
gucccagggaccccugccucc

SEQ ID NO: 479715 - RNA, 18 nt, Human
gugccaaggucuaucugu

SEQ ID NO: 479716 - RNA, 23 nt, Human
gugcccccaucacaugucccagc

SEQ ID NO: 479717 - RNA, 21 nt, Human
guggagggauggauuauggug

SEQ ID NO: 479718 - RNA, 18 nt, Human
gugggggcugagguggag

SEQ ID NO: 479719 - RNA, 18 nt, Human
gugggugggggcugaggu

SEQ ID NO: 479720 - RNA, 24 nt, Human
guguggguggcagugaagaggcuc

SEQ ID NO: 479721 - RNA, 33 nt, Human
guguguggggguguguguguguguguguguggu

SEQ ID NO: 479722 - RNA, 21 nt, Human
gugugugugugugugugugag

SEQ ID NO: 479723 - RNA, 20 nt, Human
gugugugugugugugugugu

SEQ ID NO: 479724 - RNA, 21 nt, Human
gugugugugugugugugugug

SEQ ID NO: 479725 - RNA, 21 nt, Human
gugugugugugugugugugug

SEQ ID NO: 479726 - RNA, 25 nt, Human
uaaggugacaccaccagaauccacc

SEQ ID NO: 479727 - RNA, 24 nt, Human
uagaaaacaucgcugucccccucc

SEQ ID NO: 479728 - RNA, 24 nt, Human
ucaagccugcccaggcccuccagg

SEQ ID NO: 479729 - RNA, 23 nt, Human
ucaccaguggucucccaggcugu

SEQ ID NO: 479730 - RNA, 22 nt, Human
ucagcccacaaaagaaaagcaa

SEQ ID NO: 479731 - RNA, 25 nt, Human
ucccagggaccccugccuccgggag

SEQ ID NO: 479732 - RNA, 23 nt, Human
uccccaaacaugugucuugaucu

SEQ ID NO: 479733 - RNA, 20 nt, Human
uccccgccgccuccuccugc

SEQ ID NO: 479734 - RNA, 22 nt, Human
ucccgccucgccuccccgagcu

SEQ ID NO: 479735 - RNA, 21 nt, Human
ucgccgguguccccgccgccu

SEQ ID NO: 479736 - RNA, 26 nt, Human
ucgugugugugugugugggggugugu

SEQ ID NO: 479737 - RNA, 22 nt, Human
ucuauagccuaaacagcugugc

SEQ ID NO: 479738 - RNA, 22 nt, Human
ucucaucuugggucaccuccuc

SEQ ID NO: 479739 - RNA, 21 nt, Human
ucugacaccccuccagcccaa

SEQ ID NO: 479740 - RNA, 18 nt, Human
ucugcagagcucuuuggg

SEQ ID NO: 479741 - RNA, 24 nt, Human
ucugcagagcucuuuggguaguaa

SEQ ID NO: 479742 - RNA, 22 nt, Human
ugaaggcaucaagacaugacca

SEQ ID NO: 479743 - RNA, 22 nt, Human
ugacaccaaaggucagaaacac

SEQ ID NO: 479744 - RNA, 24 nt, Human
ugacaccaaaggucagaaacacuc

SEQ ID NO: 479745 - RNA, 22 nt, Human
ugacaccccuccagcccaagcc

SEQ ID NO: 479746 - RNA, 22 nt, Human
ugagagggaccgcgcagugagc

SEQ ID NO: 479747 - RNA, 24 nt, Human
ugaguacaacugcaaacagcacug

SEQ ID NO: 479748 - RNA, 23 nt, Human
ugcacccaagcuacgcuagugcc

SEQ ID NO: 479749 - RNA, 19 nt, Human
ugcagagcucuuuggguag

SEQ ID NO: 479750 - RNA, 19 nt, Human
ugcccuguggggccacugu

SEQ ID NO: 479751 - RNA, 19 nt, Human
ugccugguucagucaccag

SEQ ID NO: 479752 - RNA, 21 nt, Human
ugccuugcuccaccuugaccc

SEQ ID NO: 479753 - RNA, 24 nt, Human
ugccuugcuccaccuugacccaaa

SEQ ID NO: 479754 - RNA, 24 nt, Human
ugcgagggcacggggggcgcaggg

SEQ ID NO: 479755 - RNA, 22 nt, Human
ugcugagucauguacuuagggu

SEQ ID NO: 479756 - RNA, 20 nt, Human
ugcuggggacucgccggugu

SEQ ID NO: 479757 - RNA, 21 nt, Human
uggagggauggauuauggugg

SEQ ID NO: 479758 - RNA, 18 nt, Human
uggcaggaagaaggccca

SEQ ID NO: 479759 - RNA, 22 nt, Human
uggcaggaagaaggcccagagc

SEQ ID NO: 479760 - RNA, 20 nt, Human
uggcaggggagcugagaggg

SEQ ID NO: 479761 - RNA, 22 nt, Human
uggccucagcuuccucugacac

SEQ ID NO: 479762 - RNA, 23 nt, Human
ugggacggagguuaggccaaugu

SEQ ID NO: 479763 - RNA, 27 nt, Human
ugggagaugugggugggggcugaggug

SEQ ID NO: 479764 - RNA, 22 nt, Human
ugggcuuuccugcauggguuca

SEQ ID NO: 479765 - RNA, 21 nt, Human
ugggggugugugugugugugu

SEQ ID NO: 479766 - RNA, 25 nt, Human
ugggggugugugugugugugugugg

SEQ ID NO: 479767 - RNA, 22 nt, Human
uggugagccaggaggcugggac

SEQ ID NO: 479768 - RNA, 20 nt, Human
uguccccgccgccuccuccu

SEQ ID NO: 479769 - RNA, 22 nt, Human
uguccugaacgcacucgaagac

SEQ ID NO: 479770 - RNA, 19 nt, Human
ugucgugugugugugugug

SEQ ID NO: 479771 - RNA, 19 nt, Human
uguguaggucagcccgaga

SEQ ID NO: 479772 - RNA, 25 nt, Human
ugugugggggugugugugugugugu

SEQ ID NO: 479773 - RNA, 25 nt, Human
ugugugugggggugugugugugugu

SEQ ID NO: 479774 - RNA, 21 nt, Human
ugugugugugggggugugugu

SEQ ID NO: 479775 - RNA, 21 nt, Human
ugugugugugggggugugugu

SEQ ID NO: 479776 - RNA, 21 nt, Human
ugugugugugggggugugugu

SEQ ID NO: 479777 - RNA, 21 nt, Human
ugugugugugggggugugugu

SEQ ID NO: 479778 - RNA, 25 nt, Human
ugugugugugggggugugugugugu

SEQ ID NO: 479779 - RNA, 27 nt, Human
ugugugugugugggggugugugugugu

SEQ ID NO: 479780 - RNA, 30 nt, Human
ugugugugugugugggggugugugugugug

SEQ ID NO: 479781 - RNA, 19 nt, Human
uguguguguguguguguag

SEQ ID NO: 479782 - RNA, 21 nt, Human
uguguguguguguguguaggu

SEQ ID NO: 479783 - RNA, 18 nt, Human
ugugugugugugugugug

SEQ ID NO: 479784 - RNA, 18 nt, Human
ugugugugugugugugug

SEQ ID NO: 479785 - RNA, 18 nt, Human
ugugugugugugugugug

SEQ ID NO: 479786 - RNA, 18 nt, Human
ugugugugugugugugug

SEQ ID NO: 479787 - RNA, 18 nt, Human
ugugugugugugugugug

SEQ ID NO: 479788 - RNA, 18 nt, Human
ugugugugugugugugug

SEQ ID NO: 479789 - RNA, 18 nt, Human
ugugugugugugugugug

SEQ ID NO: 479790 - RNA, 21 nt, Human
ugugugugugugugugugugu

SEQ ID NO: 479791 - RNA, 21 nt, Human
ugugugugugugugugugugu

SEQ ID NO: 479792 - RNA, 21 nt, Human
ugugugugugugugugugugu

SEQ ID NO: 479793 - RNA, 21 nt, Human
ugugugugugugugugugugu

SEQ ID NO: 479794 - RNA, 21 nt, Human
ugugugugugugugugugugu

SEQ ID NO: 479795 - RNA, 21 nt, Human
ugugugugugugugugugugu

SEQ ID NO: 479796 - RNA, 21 nt, Human
ugugugugugugugugugugu

SEQ ID NO: 479797 - RNA, 21 nt, Human
ugugugugugugugugugugu

SEQ ID NO: 479798 - RNA, 21 nt, Human
ugugugugugugugugugugu

SEQ ID NO: 479799 - RNA, 21 nt, Human
ugugugugugugugugugugu

SEQ ID NO: 479800 - RNA, 22 nt, Human
ugugugugugugugugugugua

SEQ ID NO: 479801 - RNA, 22 nt, Human
ugugugugugugugugugugug

SEQ ID NO: 479802 - RNA, 22 nt, Human
ugugugugugugugugugugug

SEQ ID NO: 479803 - RNA, 22 nt, Human
ugugugugugugugugugugug

SEQ ID NO: 479804 - RNA, 22 nt, Human
uguguguguguguguguguguu

SEQ ID NO: 479805 - RNA, 24 nt, Human
uuagaggacagcaacagcacguga

SEQ ID NO: 479806 - RNA, 21 nt, Human
uuaggccaauguugcugcuga

SEQ ID NO: 479807 - RNA, 24 nt, Human
uucugucuacuagagaucauucau

SEQ ID NO: 479808 - RNA, 20 nt, Human
uuggagaugcauguggccag

SEQ ID NO: 479809 - RNA, 18 nt, Human
uuggcaguguuugugcag

SEQ ID NO: 479810 - RNA, 23 nt, Human
uuggcugcguuguucugccuacu

SEQ ID NO: 479811 - RNA, 20 nt, Human
uugguauugcuacagggugu

SEQ ID NO: 479812 - RNA, 22 nt, Human
uuucagaauaugggaugggcuu

SEQ ID NO: 479813 - RNA, 19 nt, Human
uuuggcauuuuuucagaau

SEQ ID NO: 479814 - RNA, 22 nt, Human
uuuucagaauaugggaugggcu

SEQ ID NO: 479815 - RNA, 23 nt, Human
aaaaccuccuccacacauccagg

SEQ ID NO: 479816 - RNA, 19 nt, Human
aaccucagggucucauccc

SEQ ID NO: 479817 - RNA, 19 nt, Human
aaccugaggcacagagaau

SEQ ID NO: 479818 - RNA, 24 nt, Human
acagccaggcuaaugaaaggcaaa

SEQ ID NO: 479819 - RNA, 23 nt, Human
agaauucuccaaagcucccaaaa

SEQ ID NO: 479820 - RNA, 19 nt, Human
agaggaaaagaaauggcag

SEQ ID NO: 479821 - RNA, 22 nt, Human
agaggagaucaaaaccuccucc

SEQ ID NO: 479822 - RNA, 19 nt, Human
agaggucauuuccaucagc

SEQ ID NO: 479823 - RNA, 20 nt, Human
agaucggagauuccugcuaa

SEQ ID NO: 479824 - RNA, 20 nt, Human
agccaggcuaaugaaaggca

SEQ ID NO: 479825 - RNA, 21 nt, Human
aggagcaugggcauuagucca

SEQ ID NO: 479826 - RNA, 20 nt, Human
aucaccuaccuacgcguggc

SEQ ID NO: 479827 - RNA, 19 nt, Human
auccagaauucuccaaagc

SEQ ID NO: 479828 - RNA, 25 nt, Human
augaaaggcaaaccucagggucuca

SEQ ID NO: 479829 - RNA, 27 nt, Human
auggagcagcgucuccaccggccucug

SEQ ID NO: 479830 - RNA, 24 nt, Human
auuauugucuccaagaguuagggg

SEQ ID NO: 479831 - RNA, 25 nt, Human
auuuggaaaguaaggcuguccugcu

SEQ ID NO: 479832 - RNA, 22 nt, Human
caaagcucccaaaaucucagac

SEQ ID NO: 479833 - RNA, 19 nt, Human
cacccuugucccaggaagg

SEQ ID NO: 479834 - RNA, 21 nt, Human
cagaauucuccaaagcuccca

SEQ ID NO: 479835 - RNA, 22 nt, Human
cagaauucuccaaagcucccaa

SEQ ID NO: 479836 - RNA, 19 nt, Human
cagccaggcuaaugaaagg

SEQ ID NO: 479837 - RNA, 23 nt, Human
caggcuaaugaaaggcaaaccuc

SEQ ID NO: 479838 - RNA, 25 nt, Human
caguagguuucuggagguucuugga

SEQ ID NO: 479839 - RNA, 19 nt, Human
cagugggagacuuuccaga

SEQ ID NO: 479840 - RNA, 21 nt, Human
cauaaaagaaaccugaggcac

SEQ ID NO: 479841 - RNA, 23 nt, Human
ccaagaccacaaauggccuuccc

SEQ ID NO: 479842 - RNA, 24 nt, Human
ccagaauucuccaaagcucccaaa

SEQ ID NO: 479843 - RNA, 21 nt, Human
ccaggcagagaccagucugca

SEQ ID NO: 479844 - RNA, 25 nt, Human
ccaggcuaaugaaaggcaaaccuca

SEQ ID NO: 479845 - RNA, 26 nt, Human
ccaguagguuucuggagguucuugga

SEQ ID NO: 479846 - RNA, 22 nt, Human
ccauccuagcaucucuggucac

SEQ ID NO: 479847 - RNA, 23 nt, Human
cccaggcagagaccagucugcac

SEQ ID NO: 479848 - RNA, 23 nt, Human
cccccugccuccauccacaggcc

SEQ ID NO: 479849 - RNA, 23 nt, Human
ccucauguugccauccuagcauc

SEQ ID NO: 479850 - RNA, 25 nt, Human
ccuccuucuaugggccuggaggcag

SEQ ID NO: 479851 - RNA, 24 nt, Human
ccucugagagaaccaagaaagugu

SEQ ID NO: 479852 - RNA, 26 nt, Human
ccuucuaugggccuggaggcaggagc

SEQ ID NO: 479853 - RNA, 18 nt, Human
cuaggagauaaaacuguu

SEQ ID NO: 479854 - RNA, 24 nt, Human
cucagugggagacuuuccagaccc

SEQ ID NO: 479855 - RNA, 18 nt, Human
cugcccugggaaaugauc

SEQ ID NO: 479856 - RNA, 19 nt, Human
cugccuccauccacaggcc

SEQ ID NO: 479857 - RNA, 24 nt, Human
cuuucuaagugcccgguccugccc

SEQ ID NO: 479858 - RNA, 20 nt, Human
gaaaguaaggcuguccugcu

SEQ ID NO: 479859 - RNA, 26 nt, Human
gaccaagaagaggagaucaaaaccuc

SEQ ID NO: 479860 - RNA, 25 nt, Human
gagaucaaaaccuccuccacacauc

SEQ ID NO: 479861 - RNA, 20 nt, Human
gagcaguucugaccaagaag

SEQ ID NO: 479862 - RNA, 20 nt, Human
gaggaggaggcaucccugaa

SEQ ID NO: 479863 - RNA, 22 nt, Human
gcagcaaauaucgauccugcag

SEQ ID NO: 479864 - RNA, 21 nt, Human
ggcuaaugaaaggcaaaccuc

SEQ ID NO: 479865 - RNA, 24 nt, Human
gggagggaacuuguccaagaccac

SEQ ID NO: 479866 - RNA, 23 nt, Human
gguacuaaggagcucaggagaga

SEQ ID NO: 479867 - RNA, 18 nt, Human
uaaaagaaaccugaggca

SEQ ID NO: 479868 - RNA, 18 nt, Human
uaaaagagauuaguggua

SEQ ID NO: 479869 - RNA, 24 nt, Human
uaacuccugaguucccacccuugu

SEQ ID NO: 479870 - RNA, 23 nt, Human
uaauacagauugcuucuacauuu

SEQ ID NO: 479871 - RNA, 18 nt, Human
uagaaugugugugcagag

SEQ ID NO: 479872 - RNA, 18 nt, Human
uagguauucaccauaacc

SEQ ID NO: 479873 - RNA, 19 nt, Human
ucacuucuagggggaggag

SEQ ID NO: 479874 - RNA, 19 nt, Human
ucagcccccugccuccauc

SEQ ID NO: 479875 - RNA, 20 nt, Human
uccaaagcucccaaaaucuc

SEQ ID NO: 479876 - RNA, 27 nt, Human
uccaagaccacaaauggccuucccagg

SEQ ID NO: 479877 - RNA, 21 nt, Human
uccacagaucggagauuccug

SEQ ID NO: 479878 - RNA, 22 nt, Human
uccagaauucuccaaagcuccc

SEQ ID NO: 479879 - RNA, 23 nt, Human
uccaguaagggauuuuauccaga

SEQ ID NO: 479880 - RNA, 23 nt, Human
ucccaggaaggcugggcacaauu

SEQ ID NO: 479881 - RNA, 21 nt, Human
ucccagggugggguggcggug

SEQ ID NO: 479882 - RNA, 23 nt, Human
ucccagggugggguggcgguggu

SEQ ID NO: 479883 - RNA, 21 nt, Human
ucccugaauugcaugucacgu

SEQ ID NO: 479884 - RNA, 23 nt, Human
ucggagauuccugcuaaguccag

SEQ ID NO: 479885 - RNA, 18 nt, Human
ucuagggggaggaggagg

SEQ ID NO: 479886 - RNA, 18 nt, Human
ucucugaggagacuucuc

SEQ ID NO: 479887 - RNA, 25 nt, Human
ucucuggucaccucuguuugcugcu

SEQ ID NO: 479888 - RNA, 18 nt, Human
ucugcaaacucgcuagac

SEQ ID NO: 479889 - RNA, 20 nt, Human
ugaaaggcaaaccucagggu

SEQ ID NO: 479890 - RNA, 19 nt, Human
ugagagaaccaagaaagug

SEQ ID NO: 479891 - RNA, 19 nt, Human
ugagagaaccaagaaagug

SEQ ID NO: 479892 - RNA, 20 nt, Human
ugagcccaggcagagaccag

SEQ ID NO: 479893 - RNA, 22 nt, Human
ugagccuggacucacagacuag

SEQ ID NO: 479894 - RNA, 21 nt, Human
ugaggccuggaacagcuuccu

SEQ ID NO: 479895 - RNA, 19 nt, Human
ugccagaaaucacagaggu

SEQ ID NO: 479896 - RNA, 21 nt, Human
ugccuccuccuucuaugggcc

SEQ ID NO: 479897 - RNA, 25 nt, Human
uggagcagcgucuccaccggccucu

SEQ ID NO: 479898 - RNA, 24 nt, Human
uggcagcaaauaucgauccugcag

SEQ ID NO: 479899 - RNA, 22 nt, Human
uggguguacaaccaacauuaau

SEQ ID NO: 479900 - RNA, 19 nt, Human
ugguaagcucauccaguag

SEQ ID NO: 479901 - RNA, 27 nt, Human
uguccaagaccacaaauuaccauaggg

SEQ ID NO: 479902 - RNA, 23 nt, Human
uguccugcuacuuucagggggua

SEQ ID NO: 479903 - RNA, 19 nt, Human
ugugcagaggaaaagaaau

SEQ ID NO: 479904 - RNA, 21 nt, Human
uguuauaauuuucauaaaaga

SEQ ID NO: 479905 - RNA, 22 nt, Human
uuaguccagggugagucugauc

SEQ ID NO: 479906 - RNA, 25 nt, Human
uugacguuucccccagucaguuccu

SEQ ID NO: 479907 - RNA, 21 nt, Human
uugagcccaggcagagaccag

SEQ ID NO: 479908 - RNA, 21 nt, Human
uugcuucuacauuuggcuauu

SEQ ID NO: 479909 - RNA, 21 nt, Human
uuuccagaccccucauguugc

SEQ ID NO: 479910 - RNA, 19 nt, Human
aaaaaugcugagcaagugu

SEQ ID NO: 479911 - RNA, 19 nt, Human
aaaagauaacagguuugga

SEQ ID NO: 479912 - RNA, 20 nt, Human
aacuugguucuaucagcacu

SEQ ID NO: 479913 - RNA, 20 nt, Human
aagacagggauuggccaagg

SEQ ID NO: 479914 - RNA, 21 nt, Human
aaggcagcuggagaaacagcu

SEQ ID NO: 479915 - RNA, 18 nt, Human
aauaagggaaaaaauuga

SEQ ID NO: 479916 - RNA, 20 nt, Human
aaucagagucaucuuuuccg

SEQ ID NO: 479917 - RNA, 21 nt, Human
aauuguauuauugcucuuagg

SEQ ID NO: 479918 - RNA, 18 nt, Human
acagugcuuuuuuuuuuu

SEQ ID NO: 479919 - RNA, 23 nt, Human
acaucaacaccucugcggccucu

SEQ ID NO: 479920 - RNA, 18 nt, Human
accagcuuaugccguggu

SEQ ID NO: 479921 - RNA, 19 nt, Human
accccgcccucagccgcac

SEQ ID NO: 479922 - RNA, 23 nt, Human
accucagucuccuccucugugag

SEQ ID NO: 479923 - RNA, 21 nt, Human
acuguaaaauccuugacacca

SEQ ID NO: 479924 - RNA, 23 nt, Human
agaaaccaagacagggauuggcc

SEQ ID NO: 479925 - RNA, 19 nt, Human
agaauccagguacgauuca

SEQ ID NO: 479926 - RNA, 27 nt, Human
agagcagaaaccaagacagcagggacu

SEQ ID NO: 479927 - RNA, 22 nt, Human
agauaugauggucagagccuca

SEQ ID NO: 479928 - RNA, 20 nt, Human
aggcaagaccgggccacgcg

SEQ ID NO: 479929 - RNA, 20 nt, Human
aggcagcuggagaaacagcu

SEQ ID NO: 479930 - RNA, 22 nt, Human
aggcugcagugcagagguacca

SEQ ID NO: 479931 - RNA, 23 nt, Human
aggcugcagugcagagguaccau

SEQ ID NO: 479932 - RNA, 18 nt, Human
agguuggcuggggccuug

SEQ ID NO: 479933 - RNA, 23 nt, Human
agugaguggcaguugucuauggu

SEQ ID NO: 479934 - RNA, 24 nt, Human
agugcagagguaccaucucggcuc

SEQ ID NO: 479935 - RNA, 21 nt, Human
aucaugcaaaaaacaaacacu

SEQ ID NO: 479936 - RNA, 21 nt, Human
auucuguugcccaggcugcag

SEQ ID NO: 479937 - RNA, 24 nt, Human
caaagaaucaugcaaaaaacaaac

SEQ ID NO: 479938 - RNA, 22 nt, Human
caacgagagguuggcuggggcc

SEQ ID NO: 479939 - RNA, 19 nt, Human
caccacagacaggguucca

SEQ ID NO: 479940 - RNA, 20 nt, Human
cacccgccucugcucaggcg

SEQ ID NO: 479941 - RNA, 18 nt, Human
caccggagcagaggugca

SEQ ID NO: 479942 - RNA, 25 nt, Human
caccucugcggccucuucuaucucc

SEQ ID NO: 479943 - RNA, 22 nt, Human
cacugcaaccuccaccucuggg

SEQ ID NO: 479944 - RNA, 25 nt, Human
cacugcguauaauguaguuuccaac

SEQ ID NO: 479945 - RNA, 22 nt, Human
cagaggcucagguccaaagcuu

SEQ ID NO: 479946 - RNA, 27 nt, Human
caggcaauucucgugccucagccuccc

SEQ ID NO: 479947 - RNA, 19 nt, Human
cagguaggcacagaaucca

SEQ ID NO: 479948 - RNA, 21 nt, Human
cauccuucuuucuagggcugu

SEQ ID NO: 479949 - RNA, 20 nt, Human
caugucaacgagagguuggc

SEQ ID NO: 479950 - RNA, 24 nt, Human
cauucuguugcccaggcugcagug

SEQ ID NO: 479951 - RNA, 21 nt, Human
ccacacccgccucugcucagg

SEQ ID NO: 479952 - RNA, 19 nt, Human
ccacguagcugggacuaca

SEQ ID NO: 479953 - RNA, 20 nt, Human
cccacacccgccucugcuca

SEQ ID NO: 479954 - RNA, 21 nt, Human
ccuccucugugagauggggau

SEQ ID NO: 479955 - RNA, 19 nt, Human
ccugcaugacagugcuuuu

SEQ ID NO: 479956 - RNA, 23 nt, Human
ccugugguuuccguggccugugu

SEQ ID NO: 479957 - RNA, 24 nt, Human
ccuucgugacauuauuguugcugc

SEQ ID NO: 479958 - RNA, 18 nt, Human
cgagaagagagauguugc

SEQ ID NO: 479959 - RNA, 24 nt, Human
cguagcugggacuacaggcaugug

SEQ ID NO: 479960 - RNA, 23 nt, Human
cucacugcaaccuccaccucugg

SEQ ID NO: 479961 - RNA, 24 nt, Human
cucagccucccacguagcugggac

SEQ ID NO: 479962 - RNA, 23 nt, Human
cucccacguagcugggacuacag

SEQ ID NO: 479963 - RNA, 22 nt, Human
cuccuaugguugcggugaggau

SEQ ID NO: 479964 - RNA, 25 nt, Human
cucgugccucagccucccacguagc

SEQ ID NO: 479965 - RNA, 24 nt, Human
cugcaaccuccaccucugggguuc

SEQ ID NO: 479966 - RNA, 18 nt, Human
gacgcuggcccugugguu

SEQ ID NO: 479967 - RNA, 21 nt, Human
gagcagaaaccaagacaggga

SEQ ID NO: 479968 - RNA, 25 nt, Human
gcaccaaagcccugccuuugggcca

SEQ ID NO: 479969 - RNA, 24 nt, Human
gcagagaaaggagcacuuuccaga

SEQ ID NO: 479970 - RNA, 20 nt, Human
gcucugugggcugccugcgg

SEQ ID NO: 479971 - RNA, 21 nt, Human
gcuggggccuugggacccugc

SEQ ID NO: 479972 - RNA, 19 nt, Human
ggacuacaggcaugugcca

SEQ ID NO: 479973 - RNA, 20 nt, Human
ggagagaugauaucucccuu

SEQ ID NO: 479974 - RNA, 20 nt, Human
ggcaaaagcguggagaagcg

SEQ ID NO: 479975 - RNA, 24 nt, Human
ggcaauucucgugccucagccucc

SEQ ID NO: 479976 - RNA, 19 nt, Human
ggcccagaggcucaggucc

SEQ ID NO: 479977 - RNA, 18 nt, Human
gggaugucaggauccagc

SEQ ID NO: 479978 - RNA, 18 nt, Human
gguaccaucucggcucac

SEQ ID NO: 479979 - RNA, 24 nt, Human
ggugcaggggcgucccgggaagaa

SEQ ID NO: 479980 - RNA, 18 nt, Human
guagcugggacuacaggc

SEQ ID NO: 479981 - RNA, 22 nt, Human
guagcugggacuacaggcaugu

SEQ ID NO: 479982 - RNA, 19 nt, Human
gugcgugccagccucugug

SEQ ID NO: 479983 - RNA, 21 nt, Human
guggaguuuucugcuuuagau

SEQ ID NO: 479984 - RNA, 20 nt, Human
guggccugugucugcccaaa

SEQ ID NO: 479985 - RNA, 22 nt, Human
guggcucugugggcugccugcg

SEQ ID NO: 479986 - RNA, 20 nt, Human
gugggcaccugccuuaaggu

SEQ ID NO: 479987 - RNA, 20 nt, Human
gugggcugccugcggggccu

SEQ ID NO: 479988 - RNA, 21 nt, Human
guggugcgggacucccucggc

SEQ ID NO: 479989 - RNA, 21 nt, Human
uaauuuaccggagcucacacg

SEQ ID NO: 479990 - RNA, 26 nt, Human
uaauuuuuuuuguaaauuaguagaga

SEQ ID NO: 479991 - RNA, 22 nt, Human
uauuugccacgucauuaaccuc

SEQ ID NO: 479992 - RNA, 19 nt, Human
ucacugcaaccuccaccuc

SEQ ID NO: 479993 - RNA, 22 nt, Human
ucacugcaaccuccaccucugg

SEQ ID NO: 479994 - RNA, 23 nt, Human
ucacugcaaccuccaccucuggg

SEQ ID NO: 479995 - RNA, 24 nt, Human
ucacugcaaccuccaccucugggg

SEQ ID NO: 479996 - RNA, 18 nt, Human
ucagggaggcaagaccgg

SEQ ID NO: 479997 - RNA, 22 nt, Human
ucaugcaaaaaacaaacacuga

SEQ ID NO: 479998 - RNA, 24 nt, Human
uccaaagcuuuaugugaccucugg

SEQ ID NO: 479999 - RNA, 20 nt, Human
uccaccucugggguucaggc

SEQ ID NO: 480000 - RNA, 22 nt, Human
uccagaccgcggggcccagagg

SEQ ID NO: 480001 - RNA, 21 nt, Human
uccagugggcaccugccuuaa

SEQ ID NO: 480002 - RNA, 22 nt, Human
uccagugggcaccugccuuaag

SEQ ID NO: 480003 - RNA, 24 nt, Human
uccauagcgguccagaaccggggc

SEQ ID NO: 480004 - RNA, 21 nt, Human
uccauggguagacagcggagg

SEQ ID NO: 480005 - RNA, 23 nt, Human
uccauggguagacagcggagggg

SEQ ID NO: 480006 - RNA, 24 nt, Human
ucccacguagcugggacuacaggc

SEQ ID NO: 480007 - RNA, 18 nt, Human
ucccuuggcaacuugguu

SEQ ID NO: 480008 - RNA, 23 nt, Human
uccgggugaaaugggcuuaauuu

SEQ ID NO: 480009 - RNA, 21 nt, Human
ucuagggcugugguugugggu

SEQ ID NO: 480010 - RNA, 19 nt, Human
ucucauucuguugcccagg

SEQ ID NO: 480011 - RNA, 21 nt, Human
ucucauucuguugcccaggcu

SEQ ID NO: 480012 - RNA, 22 nt, Human
ucucauucuguugcccaggcug

SEQ ID NO: 480013 - RNA, 23 nt, Human
ucucauucuguugcccaggcugc

SEQ ID NO: 480014 - RNA, 24 nt, Human
ucucauucuguugcccaggcugca

SEQ ID NO: 480015 - RNA, 18 nt, Human
ucugcagacuggaccagc

SEQ ID NO: 480016 - RNA, 24 nt, Human
ucuguugcccaggcugcagugcag

SEQ ID NO: 480017 - RNA, 25 nt, Human
ucuguugcccaggcugcagugcaga

SEQ ID NO: 480018 - RNA, 21 nt, Human
ucuguuuuguucaaggcugug

SEQ ID NO: 480019 - RNA, 24 nt, Human
ucuuaggugcucuuguaaugcugg

SEQ ID NO: 480020 - RNA, 22 nt, Human
ucuugcucuguuuuguucaagg

SEQ ID NO: 480021 - RNA, 20 nt, Human
ugacuauaagcaugaguuga

SEQ ID NO: 480022 - RNA, 21 nt, Human
ugaggagaugcuucuggaagu

SEQ ID NO: 480023 - RNA, 20 nt, Human
ugcagagaaaggagcacuuc

SEQ ID NO: 480024 - RNA, 22 nt, Human
ugcagagaaaggagcacuuucc

SEQ ID NO: 480025 - RNA, 23 nt, Human
ugccgugguaacagacuauuccu

SEQ ID NO: 480026 - RNA, 24 nt, Human
ugccgugguaacagacuauuccua

SEQ ID NO: 480027 - RNA, 22 nt, Human
ugccucagccucccacguagcu

SEQ ID NO: 480028 - RNA, 24 nt, Human
ugccucagccucccacguagcugg

SEQ ID NO: 480029 - RNA, 19 nt, Human
ugcggggccugccuggcug

SEQ ID NO: 480030 - RNA, 20 nt, Human
uggagaaacagcuuggucac

SEQ ID NO: 480031 - RNA, 19 nt, Human
uggagaagcggccgcggug

SEQ ID NO: 480032 - RNA, 22 nt, Human
uggccaagggcagggaugacaa

SEQ ID NO: 480033 - RNA, 22 nt, Human
uggcccugugguuuccguggcc

SEQ ID NO: 480034 - RNA, 26 nt, Human
uggcucugugggcugccugcggggcc

SEQ ID NO: 480035 - RNA, 18 nt, Human
ugggacuacaggcaugug

SEQ ID NO: 480036 - RNA, 21 nt, Human
ugggacuacaggcaugugcca

SEQ ID NO: 480037 - RNA, 24 nt, Human
ugggacuacaggcaugugccaaca

SEQ ID NO: 480038 - RNA, 25 nt, Human
ugggcugccugcggggccugccugg

SEQ ID NO: 480039 - RNA, 18 nt, Human
ugguugugggugauugca

SEQ ID NO: 480040 - RNA, 23 nt, Human
ugucagugacuauaagcaugagu

SEQ ID NO: 480041 - RNA, 24 nt, Human
uuauucuuuauuuucaacacagaa

SEQ ID NO: 480042 - RNA, 23 nt, Human
uucucugugaauaagggaaaaaa

SEQ ID NO: 480043 - RNA, 18 nt, Human
uucuuucuagggcugugg

SEQ ID NO: 480044 - RNA, 23 nt, Human
uucuuucuagggcugugguugug

SEQ ID NO: 480045 - RNA, 18 nt, Human
uugaagcauaaaucaucc

SEQ ID NO: 480046 - RNA, 25 nt, Human
uugacaccacagacaggguuccagu

SEQ ID NO: 480047 - RNA, 18 nt, Human
uugcagccaguguggucc

SEQ ID NO: 480048 - RNA, 18 nt, Human
uugcccaggcugcagugc

SEQ ID NO: 480049 - RNA, 20 nt, Human
uuggcuggggccuugggacc

SEQ ID NO: 480050 - RNA, 20 nt, Human
uuuuuguaaauuaguagaga

SEQ ID NO: 480051 - RNA, 20 nt, Human
uuuuuuguaaauuaguagag

SEQ ID NO: 480052 - RNA, 24 nt, Human
uuuuuuuguaaauuaguagagacg

SEQ ID NO: 480053 - RNA, 27 nt, Human
uuuuuuuuuuuugaagacacagucuca

SEQ ID NO: 480054 - RNA, 22 nt, Human
aaaaaaacaaaucacagcauag

SEQ ID NO: 480055 - RNA, 19 nt, Human
aaaaacaguggcuagaaac

SEQ ID NO: 480056 - RNA, 18 nt, Human
aaaacccuacaaaaacug

SEQ ID NO: 480057 - RNA, 22 nt, Human
aaaagaaaacccuuugaaugga

SEQ ID NO: 480058 - RNA, 19 nt, Human
aaaauucuuucaguaaccc

SEQ ID NO: 480059 - RNA, 22 nt, Human
aaacaguggcuagaaacaaagc

SEQ ID NO: 480060 - RNA, 22 nt, Human
aaagaaggcagggauugcugcc

SEQ ID NO: 480061 - RNA, 24 nt, Human
aaagugcugggauuacagguguga

SEQ ID NO: 480062 - RNA, 23 nt, Human
aaauaaaaacaaaguuacacaga

SEQ ID NO: 480063 - RNA, 20 nt, Human
aaccaccacucugagcccua

SEQ ID NO: 480064 - RNA, 20 nt, Human
aaccaccacucugagcccua

SEQ ID NO: 480065 - RNA, 24 nt, Human
aaccccccaucaucaguccccacc

SEQ ID NO: 480066 - RNA, 18 nt, Human
aacccuacaaaaacugaa

SEQ ID NO: 480067 - RNA, 24 nt, Human
aaccucaggugauccgccugccuu

SEQ ID NO: 480068 - RNA, 20 nt, Human
aaccucugccucccgaguuc

SEQ ID NO: 480069 - RNA, 20 nt, Human
aacuucugagcaagcuggcc

SEQ ID NO: 480070 - RNA, 19 nt, Human
aagauacauagaaccauag

SEQ ID NO: 480071 - RNA, 21 nt, Human
aagccacaggcauuaagacca

SEQ ID NO: 480072 - RNA, 24 nt, Human
aagccagagguggucauggagggc

SEQ ID NO: 480073 - RNA, 22 nt, Human
aaggaaacaagaaaaaaaaaac

SEQ ID NO: 480074 - RNA, 22 nt, Human
aagggaaaucaaaugaguugga

SEQ ID NO: 480075 - RNA, 22 nt, Human
aagggaaaucaaaugaguugga

SEQ ID NO: 480076 - RNA, 22 nt, Human
aaguagcugggauuacaggugc

SEQ ID NO: 480077 - RNA, 25 nt, Human
aaguagcugggauuacaggugccug

SEQ ID NO: 480078 - RNA, 22 nt, Human
aaguaugaccaucuuacuuuca

SEQ ID NO: 480079 - RNA, 27 nt, Human
aagucauauaaacugcuuaccugaaau

SEQ ID NO: 480080 - RNA, 27 nt, Human
aagucauauaaacugcuuaccugaaau

SEQ ID NO: 480081 - RNA, 18 nt, Human
aagugcugggauuacagg

SEQ ID NO: 480082 - RNA, 19 nt, Human
aagugcugggauuacaggu

SEQ ID NO: 480083 - RNA, 23 nt, Human
acaacaaaaaagcaguggcugga

SEQ ID NO: 480084 - RNA, 19 nt, Human
acccacagacaucuccuac

SEQ ID NO: 480085 - RNA, 19 nt, Human
acccacagacaucuccuac

SEQ ID NO: 480086 - RNA, 23 nt, Human
accccccaucaucaguccccacc

SEQ ID NO: 480087 - RNA, 22 nt, Human
accugaaauaaaaccccccauc

SEQ ID NO: 480088 - RNA, 22 nt, Human
accugaaauaaaaccccccauc

SEQ ID NO: 480089 - RNA, 19 nt, Human
acgagcaagaaaaccguca

SEQ ID NO: 480090 - RNA, 21 nt, Human
acuugggguggggcagcugca

SEQ ID NO: 480091 - RNA, 18 nt, Human
agaaaaccgucacacccc

SEQ ID NO: 480092 - RNA, 18 nt, Human
agaacacuggacugcauu

SEQ ID NO: 480093 - RNA, 18 nt, Human
agaacacuggacugcauu

SEQ ID NO: 480094 - RNA, 25 nt, Human
agaagaaaaaaaaaaaacaaaucac

SEQ ID NO: 480095 - RNA, 22 nt, Human
agacacaguagccacuagccaa

SEQ ID NO: 480096 - RNA, 23 nt, Human
agagaugggguuucgcauguugg

SEQ ID NO: 480097 - RNA, 19 nt, Human
agaucccuccacaucuauu

SEQ ID NO: 480098 - RNA, 24 nt, Human
agccauuacuucacugucuacaaa

SEQ ID NO: 480099 - RNA, 24 nt, Human
agcccuagggcaaggagcaaagug

SEQ ID NO: 480100 - RNA, 24 nt, Human
agcccuagggcaaggagcaaagug

SEQ ID NO: 480101 - RNA, 22 nt, Human
aggaaacaagaaaaaaaaaaca

SEQ ID NO: 480102 - RNA, 24 nt, Human
aggugauccgccugccuuggccuc

SEQ ID NO: 480103 - RNA, 19 nt, Human
augggguuucgcauguugg

SEQ ID NO: 480104 - RNA, 24 nt, Human
augggguuucgcauguuggccagg

SEQ ID NO: 480105 - RNA, 21 nt, Human
auucuccugccucagccuccc

SEQ ID NO: 480106 - RNA, 22 nt, Human
caaaaaagcaguggcuggaacc

SEQ ID NO: 480107 - RNA, 24 nt, Human
caaagugcugggauuacaggugug

SEQ ID NO: 480108 - RNA, 19 nt, Human
caagaaagcacaccucuaa

SEQ ID NO: 480109 - RNA, 22 nt, Human
caagcaauucuccugccucagc

SEQ ID NO: 480110 - RNA, 27 nt, Human
caagcaauucuccugccucagccuccc

SEQ ID NO: 480111 - RNA, 22 nt, Human
cacaacccaugggcuauacagg

SEQ ID NO: 480112 - RNA, 19 nt, Human
cacacacaugcagacaaga

SEQ ID NO: 480113 - RNA, 19 nt, Human
cacacacaugcagacaaga

SEQ ID NO: 480114 - RNA, 21 nt, Human
cacacagcugucucuggagac

SEQ ID NO: 480115 - RNA, 24 nt, Human
cacagacacaguagccacuagcca

SEQ ID NO: 480116 - RNA, 20 nt, Human
cacccccuaccccucaaucu

SEQ ID NO: 480117 - RNA, 23 nt, Human
cacgagcaagaaaaccgucacac

SEQ ID NO: 480118 - RNA, 18 nt, Human
cacugcaaccucugccuc

SEQ ID NO: 480119 - RNA, 21 nt, Human
cacugcaaccucugccucccg

SEQ ID NO: 480120 - RNA, 19 nt, Human
caggacaucucuugacuga

SEQ ID NO: 480121 - RNA, 18 nt, Human
caggauauaagaaaaacc

SEQ ID NO: 480122 - RNA, 23 nt, Human
cagugagccuuuauccaggcugu

SEQ ID NO: 480123 - RNA, 19 nt, Human
cauccugaaucucccaagg

SEQ ID NO: 480124 - RNA, 21 nt, Human
cauguuggccaggguggucuc

SEQ ID NO: 480125 - RNA, 21 nt, Human
ccaaagugcugggauuacagg

SEQ ID NO: 480126 - RNA, 21 nt, Human
ccaaagugcugggauuacagg

SEQ ID NO: 480127 - RNA, 24 nt, Human
ccaaagugcugggauuacaggugu

SEQ ID NO: 480128 - RNA, 21 nt, Human
ccaaguagcugggauuacagg

SEQ ID NO: 480129 - RNA, 23 nt, Human
cccaaguagcugggauuacaggu

SEQ ID NO: 480130 - RNA, 24 nt, Human
cccaaguagcugggauuacaggug

SEQ ID NO: 480131 - RNA, 22 nt, Human
ccccaucaucaguccccacccu

SEQ ID NO: 480132 - RNA, 22 nt, Human
ccccaucaucaguccccacccu

SEQ ID NO: 480133 - RNA, 23 nt, Human
cccgaguucaagcaauucuccug

SEQ ID NO: 480134 - RNA, 23 nt, Human
cccggccaagggaaaugaccacc

SEQ ID NO: 480135 - RNA, 23 nt, Human
ccgagcccacgagcaagaaaacc

SEQ ID NO: 480136 - RNA, 18 nt, Human
ccuaaccucaggugaucc

SEQ ID NO: 480137 - RNA, 21 nt, Human
ccuaaccucaggugauccgcc

SEQ ID NO: 480138 - RNA, 23 nt, Human
ccuaaccucaggugauccgccug

SEQ ID NO: 480139 - RNA, 18 nt, Human
ccuaccccucaaucucag

SEQ ID NO: 480140 - RNA, 24 nt, Human
ccucccgaguucaagcaauucucc

SEQ ID NO: 480141 - RNA, 23 nt, Human
ccugccucagccucccaaguagc

SEQ ID NO: 480142 - RNA, 22 nt, Human
ccugccuuggccucccaaagug

SEQ ID NO: 480143 - RNA, 24 nt, Human
ccuugcucuauugcccaagcuaga

SEQ ID NO: 480144 - RNA, 22 nt, Human
ccuuggaaaacccuacaaaaac

SEQ ID NO: 480145 - RNA, 23 nt, Human
cgcauguuggccaggguggucuc

SEQ ID NO: 480146 - RNA, 18 nt, Human
cucaaaauguucugaccu

SEQ ID NO: 480147 - RNA, 21 nt, Human
cucaaaauguucugaccuagu

SEQ ID NO: 480148 - RNA, 23 nt, Human
cucacugcaaccucugccucccg

SEQ ID NO: 480149 - RNA, 24 nt, Human
cucacugcaaccucugccucccga

SEQ ID NO: 480150 - RNA, 24 nt, Human
cucagccucccaaguagcugggau

SEQ ID NO: 480151 - RNA, 18 nt, Human
cucccagcacaagccaca

SEQ ID NO: 480152 - RNA, 26 nt, Human
cuccuaaccucaggugauccgccugc

SEQ ID NO: 480153 - RNA, 21 nt, Human
cuccuccacacauggugucag

SEQ ID NO: 480154 - RNA, 20 nt, Human
cucuauugcccaagcuagag

SEQ ID NO: 480155 - RNA, 20 nt, Human
cucugcagcuguuucuucac

SEQ ID NO: 480156 - RNA, 20 nt, Human
cucugcagcuguuucuucac

SEQ ID NO: 480157 - RNA, 22 nt, Human
cugauuugcuccacacagcugu

SEQ ID NO: 480158 - RNA, 23 nt, Human
cugcaaccucugccucccgaguu

SEQ ID NO: 480159 - RNA, 24 nt, Human
cugcaaccucugccucccgaguuc

SEQ ID NO: 480160 - RNA, 23 nt, Human
cugcagcaggacuugacucuacu

SEQ ID NO: 480161 - RNA, 23 nt, Human
cugccucagccucccaaguagcu

SEQ ID NO: 480162 - RNA, 23 nt, Human
cugccuuggccucccaaagugcu

SEQ ID NO: 480163 - RNA, 20 nt, Human
cuucacagcucuacuggcaa

SEQ ID NO: 480164 - RNA, 24 nt, Human
cuuggaaaacccuacaaaaacugg

SEQ ID NO: 480165 - RNA, 24 nt, Human
gaagauggguauaggaguuggcgg

SEQ ID NO: 480166 - RNA, 19 nt, Human
gaaugccaggaaggucaaa

SEQ ID NO: 480167 - RNA, 19 nt, Human
gaaugccaggaaggucaaa

SEQ ID NO: 480168 - RNA, 24 nt, Human
gaccuaguaaugaaaaagaaaacc

SEQ ID NO: 480169 - RNA, 21 nt, Human
gagaagaaaaaaaaaaaacaa

SEQ ID NO: 480170 - RNA, 19 nt, Human
gagaugggguuucgcaugu

SEQ ID NO: 480171 - RNA, 23 nt, Human
gagaugggguuucgcauguuggc

SEQ ID NO: 480172 - RNA, 21 nt, Human
gauagaaacuugggguggggc

SEQ ID NO: 480173 - RNA, 24 nt, Human
gauuacaggugccugacaccaugc

SEQ ID NO: 480174 - RNA, 18 nt, Human
gauuacaggugugagcca

SEQ ID NO: 480175 - RNA, 22 nt, Human
gauuacaggugugagccaccgc

SEQ ID NO: 480176 - RNA, 22 nt, Human
gauuacaggugugagccaccgc

SEQ ID NO: 480177 - RNA, 24 nt, Human
gcaaggagcaaaguguauacaaaa

SEQ ID NO: 480178 - RNA, 24 nt, Human
gcaaggagcaaaguguauacaaaa

SEQ ID NO: 480179 - RNA, 18 nt, Human
gcacaagccacaggcauu

SEQ ID NO: 480180 - RNA, 22 nt, Human
gccuuggccucccaaagugcug

SEQ ID NO: 480181 - RNA, 21 nt, Human
gcucacugcaaccucugccuc

SEQ ID NO: 480182 - RNA, 27 nt, Human
gcucuauugcccaagcuagagugggau

SEQ ID NO: 480183 - RNA, 21 nt, Human
ggaaaacccuacaaaaacuga

SEQ ID NO: 480184 - RNA, 19 nt, Human
ggaagacagucagagaagg

SEQ ID NO: 480185 - RNA, 22 nt, Human
ggacacccccuaccccucaauc

SEQ ID NO: 480186 - RNA, 18 nt, Human
ggaggcagaggugagaac

SEQ ID NO: 480187 - RNA, 22 nt, Human
ggauuuaaguucauuucuucac

SEQ ID NO: 480188 - RNA, 18 nt, Human
ggcccaaaaagaaggcag

SEQ ID NO: 480189 - RNA, 18 nt, Human
gggggggggggugggggg

SEQ ID NO: 480190 - RNA, 21 nt, Human
gggguuucgcauguuggccag

SEQ ID NO: 480191 - RNA, 24 nt, Human
ggucaaauguucucugcagcuguu

SEQ ID NO: 480192 - RNA, 24 nt, Human
ggucaaauguucucugcagcuguu

SEQ ID NO: 480193 - RNA, 19 nt, Human
gguggggggugggggucag

SEQ ID NO: 480194 - RNA, 23 nt, Human
gguggucucgaacuccuaaccuc

SEQ ID NO: 480195 - RNA, 22 nt, Human
guagagaugggguuucgcaugu

SEQ ID NO: 480196 - RNA, 18 nt, Human
guagcugggauuacaggu

SEQ ID NO: 480197 - RNA, 20 nt, Human
gucagcucauaacagggcca

SEQ ID NO: 480198 - RNA, 22 nt, Human
guggugaucaagcucugacucu

SEQ ID NO: 480199 - RNA, 22 nt, Human
guggugaucaagcucugacucu

SEQ ID NO: 480200 - RNA, 24 nt, Human
guucucugcagcuguuucuucaca

SEQ ID NO: 480201 - RNA, 24 nt, Human
guucucugcagcuguuucuucaca

SEQ ID NO: 480202 - RNA, 18 nt, Human
guuggccaggguggucuc

SEQ ID NO: 480203 - RNA, 26 nt, Human
uaaaacagcuccuuuuccugaaucaa

SEQ ID NO: 480204 - RNA, 24 nt, Human
uaaaaccccccaucaucagucccc

SEQ ID NO: 480205 - RNA, 24 nt, Human
uaaaaccccccaucaucagucccc

SEQ ID NO: 480206 - RNA, 26 nt, Human
uaaaauaacucacacacaugcagaca

SEQ ID NO: 480207 - RNA, 26 nt, Human
uaaaauaacucacacacaugcagaca

SEQ ID NO: 480208 - RNA, 22 nt, Human
uaacaaggaucccacuccagca

SEQ ID NO: 480209 - RNA, 18 nt, Human
uaaccucaggugauccgc

SEQ ID NO: 480210 - RNA, 22 nt, Human
uacacagacagguuaguugucc

SEQ ID NO: 480211 - RNA, 23 nt, Human
uacaggugugagccaccgcgccc

SEQ ID NO: 480212 - RNA, 26 nt, Human
uacagguuggacacccccuaccccuc

SEQ ID NO: 480213 - RNA, 24 nt, Human
uacauucacagacacaguagccac

SEQ ID NO: 480214 - RNA, 18 nt, Human
uagaggucaaaggucaag

SEQ ID NO: 480215 - RNA, 18 nt, Human
uagaggucaaaggucaag

SEQ ID NO: 480216 - RNA, 21 nt, Human
uagagugggauggcaugaucu

SEQ ID NO: 480217 - RNA, 24 nt, Human
uagagugggauggcaugaucuugg

SEQ ID NO: 480218 - RNA, 32 nt, Human
uaggaguuggcggggggggggguggggggucg

SEQ ID NO: 480219 - RNA, 19 nt, Human
uauucagagaagcugagcu

SEQ ID NO: 480220 - RNA, 24 nt, Human
ucaaguuaagaccugagcaaagug

SEQ ID NO: 480221 - RNA, 22 nt, Human
ucacagcauaggugaaaagaug

SEQ ID NO: 480222 - RNA, 22 nt, Human
ucacagcauaggugaaaagaug

SEQ ID NO: 480223 - RNA, 24 nt, Human
ucacucccaggcacauuuuguugc

SEQ ID NO: 480224 - RNA, 18 nt, Human
ucacugcaaccucugccu

SEQ ID NO: 480225 - RNA, 19 nt, Human
ucacugcaaccucugccuc

SEQ ID NO: 480226 - RNA, 22 nt, Human
ucacugcaaccucugccucccg

SEQ ID NO: 480227 - RNA, 24 nt, Human
ucacugcaaccucugccucccgag

SEQ ID NO: 480228 - RNA, 21 nt, Human
ucacugucuacaaaauugcag

SEQ ID NO: 480229 - RNA, 18 nt, Human
ucagccucccaaguagcu

SEQ ID NO: 480230 - RNA, 20 nt, Human
ucagccucccaaguagcugg

SEQ ID NO: 480231 - RNA, 20 nt, Human
ucagccugacuugcguugcc

SEQ ID NO: 480232 - RNA, 18 nt, Human
uccacacauggugucaga

SEQ ID NO: 480233 - RNA, 23 nt, Human
ucccaaagugcugggauuacagg

SEQ ID NO: 480234 - RNA, 23 nt, Human
ucccaaguagcugggauuacagg

SEQ ID NO: 480235 - RNA, 24 nt, Human
ucccagcacaagccacaggguacc

SEQ ID NO: 480236 - RNA, 21 nt, Human
ucccgaguucaagcaauucuc

SEQ ID NO: 480237 - RNA, 24 nt, Human
ucccgaguucaagcaauucuccug

SEQ ID NO: 480238 - RNA, 23 nt, Human
ucguagagaugggguuucgcaug

SEQ ID NO: 480239 - RNA, 24 nt, Human
ucucaggauauaagaaaaaccuuu

SEQ ID NO: 480240 - RNA, 26 nt, Human
ucuccugccucagccucccaaguagc

SEQ ID NO: 480241 - RNA, 21 nt, Human
ugaauugguguuuucugaggu

SEQ ID NO: 480242 - RNA, 25 nt, Human
ugacagcaucccuaauuaagccagc

SEQ ID NO: 480243 - RNA, 25 nt, Human
ugacagcaucccuaauuaagccagc

SEQ ID NO: 480244 - RNA, 19 nt, Human
ugaccuaguaaugaaaaag

SEQ ID NO: 480245 - RNA, 23 nt, Human
ugagaaacauucaaccaagguga

SEQ ID NO: 480246 - RNA, 21 nt, Human
ugaguuggagguaacacucua

SEQ ID NO: 480247 - RNA, 21 nt, Human
ugaguuggagguaacacucua

SEQ ID NO: 480248 - RNA, 18 nt, Human
ugauuugcuccacacagc

SEQ ID NO: 480249 - RNA, 21 nt, Human
ugcacacauaaccugucaggc

SEQ ID NO: 480250 - RNA, 22 nt, Human
ugcaggcgcuccguacucgucc

SEQ ID NO: 480251 - RNA, 22 nt, Human
ugccaggaaggucaaauguucu

SEQ ID NO: 480252 - RNA, 22 nt, Human
ugccaggaaggucaaauguucu

SEQ ID NO: 480253 - RNA, 24 nt, Human
ugcccaagcuagagugggauggca

SEQ ID NO: 480254 - RNA, 24 nt, Human
ugccucagccucccaaguagcugg

SEQ ID NO: 480255 - RNA, 24 nt, Human
ugcugggauuacaggugugagcca

SEQ ID NO: 480256 - RNA, 24 nt, Human
uggaagacagucagagaagguagu

SEQ ID NO: 480257 - RNA, 19 nt, Human
uggaggcagaggugagaac

SEQ ID NO: 480258 - RNA, 24 nt, Human
uggaggcagaggugagaacacugg

SEQ ID NO: 480259 - RNA, 24 nt, Human
uggaggcagaggugagaacacugg

SEQ ID NO: 480260 - RNA, 22 nt, Human
uggcacagccauuccaaccugg

SEQ ID NO: 480261 - RNA, 19 nt, Human
uggcaugaucuuggcucac

SEQ ID NO: 480262 - RNA, 21 nt, Human
uggcaugaucuuggcucacug

SEQ ID NO: 480263 - RNA, 24 nt, Human
uggccaggguggucucgaacuccu

SEQ ID NO: 480264 - RNA, 18 nt, Human
uggcuggaacccuacuga

SEQ ID NO: 480265 - RNA, 24 nt, Human
ugggauuacaggugccugacacca

SEQ ID NO: 480266 - RNA, 25 nt, Human
ugggauuacaggugccugacaccau

SEQ ID NO: 480267 - RNA, 19 nt, Human
ugggauuacaggugugagc

SEQ ID NO: 480268 - RNA, 21 nt, Human
ugggauuacaggugugagcca

SEQ ID NO: 480269 - RNA, 22 nt, Human
ugggauuacaggugugagccac

SEQ ID NO: 480270 - RNA, 23 nt, Human
ugggauuacaggugugagccacc

SEQ ID NO: 480271 - RNA, 24 nt, Human
ugggauuacaggugugagccaccg

SEQ ID NO: 480272 - RNA, 20 nt, Human
ugggcaugucauguugcucu

SEQ ID NO: 480273 - RNA, 20 nt, Human
ugggguggggcagcugcagc

SEQ ID NO: 480274 - RNA, 23 nt, Human
ugggguuucgcauguuggccagg

SEQ ID NO: 480275 - RNA, 22 nt, Human
uggugaucaagcucugacucua

SEQ ID NO: 480276 - RNA, 22 nt, Human
uggugaucaagcucugacucua

SEQ ID NO: 480277 - RNA, 20 nt, Human
ugucuagaggucaaagguca

SEQ ID NO: 480278 - RNA, 20 nt, Human
ugucuagaggucaaagguca

SEQ ID NO: 480279 - RNA, 21 nt, Human
uucaagcaauucuccugccuc

SEQ ID NO: 480280 - RNA, 24 nt, Human
uucaagcaauucuccugccucagc

SEQ ID NO: 480281 - RNA, 20 nt, Human
uucacagacacaguagccac

SEQ ID NO: 480282 - RNA, 24 nt, Human
uucacuacagaaucucuacaauaa

SEQ ID NO: 480283 - RNA, 21 nt, Human
uucacugucuacaaaauugca

SEQ ID NO: 480284 - RNA, 18 nt, Human
uucagccugacuugcguu

SEQ ID NO: 480285 - RNA, 23 nt, Human
uucguagagaugggguuucgcau

SEQ ID NO: 480286 - RNA, 25 nt, Human
uugcaaguuaacuccagauagcugc

SEQ ID NO: 480287 - RNA, 21 nt, Human
uugcucaguugcugagccuca

SEQ ID NO: 480288 - RNA, 21 nt, Human
uugcucaguugcugagccuca

SEQ ID NO: 480289 - RNA, 25 nt, Human
uuggaggcagaggugagaacacugg

SEQ ID NO: 480290 - RNA, 18 nt, Human
uuggccucccaaagugcu

SEQ ID NO: 480291 - RNA, 18 nt, Human
uugggguggggcagcugc

SEQ ID NO: 480292 - RNA, 18 nt, Human
uuucgcauguuggccagg

SEQ ID NO: 480293 - RNA, 23 nt, Human
uuucuucacagcucuacuggcaa

SEQ ID NO: 480294 - RNA, 19 nt, Human
uuucuucuuuuucaccaca

SEQ ID NO: 480295 - RNA, 22 nt, Human
uuugaaguaaggggagcuaaca

SEQ ID NO: 480296 - RNA, 24 nt, Human
uuuuggcacagccauuccaaccug

SEQ ID NO: 480297 - RNA, 23 nt, Human
uuuuucguagagaugggguuucg

SEQ ID NO: 480298 - RNA, 24 nt, Human
uuuuucguagagaugggguuucgc

SEQ ID NO: 480299 - RNA, 27 nt, Human
aaccaaaagguggcguaagguuuuacu

SEQ ID NO: 480300 - RNA, 18 nt, Human
aagcaucacagaccaaaa

SEQ ID NO: 480301 - RNA, 19 nt, Human
aagcaucacagaccaaaag

SEQ ID NO: 480302 - RNA, 21 nt, Human
aagcaucacagaccaaaagcc

SEQ ID NO: 480303 - RNA, 22 nt, Human
aagcauuuuguucuccucugua

SEQ ID NO: 480304 - RNA, 18 nt, Human
acagaccaaaagccacaa

SEQ ID NO: 480305 - RNA, 18 nt, Human
accagucuguucaguccu

SEQ ID NO: 480306 - RNA, 21 nt, Human
accagucuguucaguccuggu

SEQ ID NO: 480307 - RNA, 25 nt, Human
agaaacuauagagucuuuauaaacu

SEQ ID NO: 480308 - RNA, 23 nt, Human
agaccaagcaucacagaccaaaa

SEQ ID NO: 480309 - RNA, 21 nt, Human
aucacagaccaaaagccacaa

SEQ ID NO: 480310 - RNA, 24 nt, Human
aucacagaccaaaagccacaaagu

SEQ ID NO: 480311 - RNA, 24 nt, Human
caagcaucacagaccaaaagccac

SEQ ID NO: 480312 - RNA, 26 nt, Human
caagcaucacagaccaaaagccacaa

SEQ ID NO: 480313 - RNA, 19 nt, Human
cagcaaaaugcugcaucug

SEQ ID NO: 480314 - RNA, 20 nt, Human
cccucucccuccucccuucc

SEQ ID NO: 480315 - RNA, 21 nt, Human
cccuguccucccucucccucc

SEQ ID NO: 480316 - RNA, 21 nt, Human
ccuagggccugacaaagugac

SEQ ID NO: 480317 - RNA, 18 nt, Human
ccucccucucccuccucc

SEQ ID NO: 480318 - RNA, 19 nt, Human
ccucccucucccuccuccc

SEQ ID NO: 480319 - RNA, 19 nt, Human
ccucccuuccccuaucuau

SEQ ID NO: 480320 - RNA, 20 nt, Human
ccucuguaacagcacagggc

SEQ ID NO: 480321 - RNA, 20 nt, Human
ccuggucccuuuccaguccc

SEQ ID NO: 480322 - RNA, 18 nt, Human
ccuugcugaaagcauuuu

SEQ ID NO: 480323 - RNA, 21 nt, Human
ccuuuccagccucuggagucc

SEQ ID NO: 480324 - RNA, 23 nt, Human
cugcaguaacuguaugaaauuua

SEQ ID NO: 480325 - RNA, 23 nt, Human
gaagagaagcuuguaagguagca

SEQ ID NO: 480326 - RNA, 20 nt, Human
gagucuuuguaaccagucug

SEQ ID NO: 480327 - RNA, 24 nt, Human
ggagucuuuguaaccagucuguuc

SEQ ID NO: 480328 - RNA, 20 nt, Human
gucaucuccagccaucuguu

SEQ ID NO: 480329 - RNA, 22 nt, Human
gucccggucccuuuccagccuc

SEQ ID NO: 480330 - RNA, 19 nt, Human
gucccuuuccagccucugg

SEQ ID NO: 480331 - RNA, 20 nt, Human
guuaaaaaaaaaaaaaaagu

SEQ ID NO: 480332 - RNA, 19 nt, Human
uaccaauagacaauacuca

SEQ ID NO: 480333 - RNA, 22 nt, Human
uaccaauagacaauacucaggc

SEQ ID NO: 480334 - RNA, 21 nt, Human
uagcagcaaaaugcugcaucu

SEQ ID NO: 480335 - RNA, 25 nt, Human
ucagcucccaggcuuuccagagagu

SEQ ID NO: 480336 - RNA, 28 nt, Human
uccauguggugcacuuuuucaggcauug

SEQ ID NO: 480337 - RNA, 23 nt, Human
ucccggucccuuuccagccucug

SEQ ID NO: 480338 - RNA, 20 nt, Human
uccucccucucccuccuccc

SEQ ID NO: 480339 - RNA, 27 nt, Human
ucuauuugguuaaaaaaaaaaaaaaaa

SEQ ID NO: 480340 - RNA, 21 nt, Human
ucucacaaacucacuuggucu

SEQ ID NO: 480341 - RNA, 19 nt, Human
ucucccuccucccuucccc

SEQ ID NO: 480342 - RNA, 19 nt, Human
ucucccuguccucccucuc

SEQ ID NO: 480343 - RNA, 23 nt, Human
ucuguagugaaaucauucucccc

SEQ ID NO: 480344 - RNA, 24 nt, Human
ugacaaagugacccuggauaaaug

SEQ ID NO: 480345 - RNA, 22 nt, Human
ugagaccaagcaucacagacca

SEQ ID NO: 480346 - RNA, 22 nt, Human
uggaaauauuuugaacacucag

SEQ ID NO: 480347 - RNA, 20 nt, Human
ugguuaaaaaaaaaaaaaaa

SEQ ID NO: 480348 - RNA, 24 nt, Human
uugaacacucagauauaaaaauuc

SEQ ID NO: 480349 - RNA, 19 nt, Human
uugguuaaaaaaaaaaaaa

SEQ ID NO: 480350 - RNA, 22 nt, Human
uugguuaaaaaaaaaaaaaaag

SEQ ID NO: 480351 - RNA, 18 nt, Human
uuguaaccagucuguuca

SEQ ID NO: 480352 - RNA, 21 nt, Human
uuuggagucuuuguaaccagu

SEQ ID NO: 480353 - RNA, 24 nt, Human
uuuuuuuuuuuuuuuuuacucuaa

SEQ ID NO: 480354 - RNA, 26 nt, Human
aaauuuucuacaaugacccaccacau

SEQ ID NO: 480355 - RNA, 19 nt, Human
aacuaugaguuagaaccac

SEQ ID NO: 480356 - RNA, 24 nt, Human
aagaaaaaaaugguaaauaugaaa

SEQ ID NO: 480357 - RNA, 24 nt, Human
aagaaaccaauacauaucagagca

SEQ ID NO: 480358 - RNA, 21 nt, Human
aagaggaaaaagaugguagaa

SEQ ID NO: 480359 - RNA, 21 nt, Human
aaugaggaaauaauggaaaaa

SEQ ID NO: 480360 - RNA, 20 nt, Human
accaccucccucucugaugu

SEQ ID NO: 480361 - RNA, 25 nt, Human
accucggaagacaucagagcagaag

SEQ ID NO: 480362 - RNA, 21 nt, Human
accuugcucuagcuccagucc

SEQ ID NO: 480363 - RNA, 26 nt, Human
agaagaaauucucccucaaacgugga

SEQ ID NO: 480364 - RNA, 20 nt, Human
agcuguauguggugaggaaa

SEQ ID NO: 480365 - RNA, 22 nt, Human
aggcaucuaucauaaagaaaca

SEQ ID NO: 480366 - RNA, 22 nt, Human
auccuccaucgcugucuucaac

SEQ ID NO: 480367 - RNA, 25 nt, Human
caagaaaccaauacauaucagagca

SEQ ID NO: 480368 - RNA, 25 nt, Human
caccgcaacucuagaaucuucaauu

SEQ ID NO: 480369 - RNA, 20 nt, Human
cacuauguugcuuacaguag

SEQ ID NO: 480370 - RNA, 22 nt, Human
cauggaaucugacuacaugcua

SEQ ID NO: 480371 - RNA, 18 nt, Human
ccaccaggcucauucucu

SEQ ID NO: 480372 - RNA, 25 nt, Human
ccaccaggcucauucucucuaaugc

SEQ ID NO: 480373 - RNA, 23 nt, Human
ccaggauaauagaaaucuuucuu

SEQ ID NO: 480374 - RNA, 25 nt, Human
cgugaaauuuguaaauaaaagauga

SEQ ID NO: 480375 - RNA, 21 nt, Human
cucuaaugcccugaugaagcc

SEQ ID NO: 480376 - RNA, 27 nt, Human
gaaaaagaaaacaauuauaaaaaauac

SEQ ID NO: 480377 - RNA, 23 nt, Human
gaacaacuaugaguuagaaccac

SEQ ID NO: 480378 - RNA, 20 nt, Human
gagaagagcuguauguggug

SEQ ID NO: 480379 - RNA, 20 nt, Human
gcuauaagcaccugcucaaa

SEQ ID NO: 480380 - RNA, 21 nt, Human
gcuccaguccauccauccauc

SEQ ID NO: 480381 - RNA, 27 nt, Human
ggaaauaauggaaaaagaccgguaccc

SEQ ID NO: 480382 - RNA, 18 nt, Human
ggagaagagcuguaugug

SEQ ID NO: 480383 - RNA, 19 nt, Human
guaaauaaaagaugaauac

SEQ ID NO: 480384 - RNA, 28 nt, Human
uaaaugcaaagaucauacgaaaauccug

SEQ ID NO: 480385 - RNA, 19 nt, Human
uaagaggaaaaagauggua

SEQ ID NO: 480386 - RNA, 19 nt, Human
uaaguggagaaaccauuaa

SEQ ID NO: 480387 - RNA, 19 nt, Human
uacaguagacuacaaaugu

SEQ ID NO: 480388 - RNA, 23 nt, Human
uacuucaacaaugcaucaccuac

SEQ ID NO: 480389 - RNA, 18 nt, Human
uagaagacacuauguugc

SEQ ID NO: 480390 - RNA, 21 nt, Human
uagcagaugauaagacucucc

SEQ ID NO: 480391 - RNA, 23 nt, Human
uagcagaugauaagacucuccca

SEQ ID NO: 480392 - RNA, 22 nt, Human
ucaauauuugcauauucucuaa

SEQ ID NO: 480393 - RNA, 18 nt, Human
ucacaguaaacccaccag

SEQ ID NO: 480394 - RNA, 23 nt, Human
ucacaguaaacccaccaggcuca

SEQ ID NO: 480395 - RNA, 18 nt, Human
ucauaaagaaacaucacc

SEQ ID NO: 480396 - RNA, 18 nt, Human
ucccucucugauguuucu

SEQ ID NO: 480397 - RNA, 18 nt, Human
ucucagaugguuuggcua

SEQ ID NO: 480398 - RNA, 18 nt, Human
ugaaauagaauaguagug

SEQ ID NO: 480399 - RNA, 20 nt, Human
ugacacaacucgaccuugau

SEQ ID NO: 480400 - RNA, 19 nt, Human
ugagaagaaauucucccuc

SEQ ID NO: 480401 - RNA, 24 nt, Human
ugcucuagcuccaguccauccauc

SEQ ID NO: 480402 - RNA, 18 nt, Human
uggaaaaagacugauaua

SEQ ID NO: 480403 - RNA, 21 nt, Human
ugggauccuccaucgcugucu

SEQ ID NO: 480404 - RNA, 22 nt, Human
ugggauccuccaucgcugucuu

SEQ ID NO: 480405 - RNA, 23 nt, Human
ugggauccuccaucgcugucuuc

SEQ ID NO: 480406 - RNA, 22 nt, Human
uguauguggugaggaaagcggg

SEQ ID NO: 480407 - RNA, 19 nt, Human
ugucaccaccucccucucu

SEQ ID NO: 480408 - RNA, 22 nt, Human
uucaagaaaccaauacauauca

SEQ ID NO: 480409 - RNA, 24 nt, Human
uucaagaaaccaauacauaucaga

SEQ ID NO: 480410 - RNA, 24 nt, Human
uucuacaaugacccaccacaugaa

SEQ ID NO: 480411 - RNA, 25 nt, Human
uucuuagggagaaugcuugccucua

SEQ ID NO: 480412 - RNA, 25 nt, Human
uuucuagcuguuaacaauuaucauu

SEQ ID NO: 480413 - RNA, 21 nt, Human
aaauggcaacaucagagacac

SEQ ID NO: 480414 - RNA, 22 nt, Human
acuaaaauuuuaaccacaaacu

SEQ ID NO: 480415 - RNA, 23 nt, Human
agaauuccugaugagaagaaacu

SEQ ID NO: 480416 - RNA, 20 nt, Human
agacagaaaugaacaacuug

SEQ ID NO: 480417 - RNA, 23 nt, Human
caggagcaccagccuucuuacaa

SEQ ID NO: 480418 - RNA, 23 nt, Human
cauccccuucccuugaaaauuua

SEQ ID NO: 480419 - RNA, 22 nt, Human
ccacugcauugcauaagccuga

SEQ ID NO: 480420 - RNA, 22 nt, Human
ccugccugcuagauuucaggag

SEQ ID NO: 480421 - RNA, 20 nt, Human
cuggaaauacuaugcugcau

SEQ ID NO: 480422 - RNA, 22 nt, Human
cuggauccuucuggaaauacua

SEQ ID NO: 480423 - RNA, 23 nt, Human
cuucuuauucauucuccuggagg

SEQ ID NO: 480424 - RNA, 18 nt, Human
uaagaggcaaauaagaaa

SEQ ID NO: 480425 - RNA, 23 nt, Human
uaguaagcaccugccugcuagau

SEQ ID NO: 480426 - RNA, 23 nt, Human
uccccuucccuugaaaauuuacc

SEQ ID NO: 480427 - RNA, 25 nt, Human
ucgcuccaaagcaugccauuuuuuc

SEQ ID NO: 480428 - RNA, 19 nt, Human
ucuggaaauacuaugcugc

SEQ ID NO: 480429 - RNA, 22 nt, Human
ugaaaauggcaacaucagagac

SEQ ID NO: 480430 - RNA, 22 nt, Human
ugaaaauggcaacaucagagac

SEQ ID NO: 480431 - RNA, 18 nt, Human
ugaagacagaaaugaaca

SEQ ID NO: 480432 - RNA, 24 nt, Human
ugagaagaaacuagaugaauagca

SEQ ID NO: 480433 - RNA, 27 nt, Human
ugagaagaaacuagaugaauagcacau

SEQ ID NO: 480434 - RNA, 24 nt, Human
uggcaacaucagagacacaguuuc

SEQ ID NO: 480435 - RNA, 22 nt, Human
uggggugaaaauggcaacauca

SEQ ID NO: 480436 - RNA, 24 nt, Human
caauaagauuucuucaccggguuc

SEQ ID NO: 480437 - RNA, 19 nt, Human
aaaaacauucacaaccaaa

SEQ ID NO: 480438 - RNA, 28 nt, Human
aaaacauucacaaccaaaggucacccaa

SEQ ID NO: 480439 - RNA, 20 nt, Human
aaaagcaaaaacauucacaa

SEQ ID NO: 480440 - RNA, 22 nt, Human
aaagcaaaaacauucacaacca

SEQ ID NO: 480441 - RNA, 21 nt, Human
aaccaaaggucacccaacaca

SEQ ID NO: 480442 - RNA, 21 nt, Human
aacucgcuccucaaccacccc

SEQ ID NO: 480443 - RNA, 22 nt, Human
aacucgcuccucaaccacccca

SEQ ID NO: 480444 - RNA, 20 nt, Human
aagagugugagcagcuuccu

SEQ ID NO: 480445 - RNA, 18 nt, Human
aagugaccauguaacuca

SEQ ID NO: 480446 - RNA, 20 nt, Human
acaacagaaaauaucucuau

SEQ ID NO: 480447 - RNA, 23 nt, Human
acaaccaaaggucacccaacaca

SEQ ID NO: 480448 - RNA, 25 nt, Human
acagggagaggccacggggcccaaa

SEQ ID NO: 480449 - RNA, 21 nt, Human
acaugagcccugguugggaaa

SEQ ID NO: 480450 - RNA, 20 nt, Human
acccugagucuacacugcuc

SEQ ID NO: 480451 - RNA, 21 nt, Human
accuccaacuucuacagcagc

SEQ ID NO: 480452 - RNA, 23 nt, Human
acuggagugucaggaaagcacug

SEQ ID NO: 480453 - RNA, 19 nt, Human
agaacagcucaucuccccc

SEQ ID NO: 480454 - RNA, 20 nt, Human
agaacagcucaucucccccu

SEQ ID NO: 480455 - RNA, 22 nt, Human
agaacagcucaucucccccuca

SEQ ID NO: 480456 - RNA, 33 nt, Human
agacacuggagugucaggaaagcacugagcuuc

SEQ ID NO: 480457 - RNA, 20 nt, Human
agaggccacggggcccaaaa

SEQ ID NO: 480458 - RNA, 19 nt, Human
agcccggccacagcagcuc

SEQ ID NO: 480459 - RNA, 24 nt, Human
aggucacccaacacaacagaaaau

SEQ ID NO: 480460 - RNA, 22 nt, Human
aucugcgcgaccacgaggucac

SEQ ID NO: 480461 - RNA, 21 nt, Human
caacacaacagaaaauaucuc

SEQ ID NO: 480462 - RNA, 22 nt, Human
caacuucuacagcagcaauuuu

SEQ ID NO: 480463 - RNA, 23 nt, Human
caaggcaaacccgagggaggaac

SEQ ID NO: 480464 - RNA, 19 nt, Human
caauaagccuccauuaguc

SEQ ID NO: 480465 - RNA, 20 nt, Human
caaucccaccucaaaagggg

SEQ ID NO: 480466 - RNA, 23 nt, Human
caaucccaccucaaaagggguua

SEQ ID NO: 480467 - RNA, 23 nt, Human
cacaaccaaaggucacccaacac

SEQ ID NO: 480468 - RNA, 20 nt, Human
cacacugcccagcccggcca

SEQ ID NO: 480469 - RNA, 21 nt, Human
cacagcuccaccuccaacuuc

SEQ ID NO: 480470 - RNA, 26 nt, Human
caccuccaacuucuacagcagcaauu

SEQ ID NO: 480471 - RNA, 26 nt, Human
cacuuccauuuuaagagugugagcag

SEQ ID NO: 480472 - RNA, 19 nt, Human
cagcagcaauuuuuagugg

SEQ ID NO: 480473 - RNA, 19 nt, Human
cagcagcaauuuuuagugg

SEQ ID NO: 480474 - RNA, 20 nt, Human
cagcagccaggagcuguuca

SEQ ID NO: 480475 - RNA, 23 nt, Human
cagcagggaaccaccuaaaaacc

SEQ ID NO: 480476 - RNA, 18 nt, Human
cagcuccaccuccaacuu

SEQ ID NO: 480477 - RNA, 21 nt, Human
cagggccuguggcagccuaac

SEQ ID NO: 480478 - RNA, 19 nt, Human
caugucuccaagaggcaau

SEQ ID NO: 480479 - RNA, 24 nt, Human
ccaaaaacgcaacacgucucaagg

SEQ ID NO: 480480 - RNA, 18 nt, Human
ccagaacgucuucccagg

SEQ ID NO: 480481 - RNA, 20 nt, Human
ccagaacgucuucccagggc

SEQ ID NO: 480482 - RNA, 21 nt, Human
ccaguaguauccauguuuucu

SEQ ID NO: 480483 - RNA, 20 nt, Human
cccaacgagaacccucucgg

SEQ ID NO: 480484 - RNA, 18 nt, Human
ccccaacgagaacccucu

SEQ ID NO: 480485 - RNA, 20 nt, Human
cccggccacagcagcucagc

SEQ ID NO: 480486 - RNA, 21 nt, Human
cccucaugugaaagauuaaau

SEQ ID NO: 480487 - RNA, 18 nt, Human
cccuggcgccucgcgggc

SEQ ID NO: 480488 - RNA, 21 nt, Human
cccugguugggaaagaagaac

SEQ ID NO: 480489 - RNA, 18 nt, Human
ccgcccccgcucgacccc

SEQ ID NO: 480490 - RNA, 22 nt, Human
ccggaagccacgcccccggcgc

SEQ ID NO: 480491 - RNA, 21 nt, Human
ccuacauuccuuguccaggaa

SEQ ID NO: 480492 - RNA, 22 nt, Human
ccucaaccaccccagacacugg

SEQ ID NO: 480493 - RNA, 26 nt, Human
ccugaccugagccuugcgccgguucc

SEQ ID NO: 480494 - RNA, 23 nt, Human
ccuugggucuuagaauaaggcuu

SEQ ID NO: 480495 - RNA, 27 nt, Human
cgccgcggcgacuagcaagcuguggcc

SEQ ID NO: 480496 - RNA, 19 nt, Human
cgcugcggucgggggagga

SEQ ID NO: 480497 - RNA, 20 nt, Human
cuacagcagcaauuuuuagu

SEQ ID NO: 480498 - RNA, 21 nt, Human
cucaaccaccccagacacugg

SEQ ID NO: 480499 - RNA, 20 nt, Human
cuccaacuucuacagcagca

SEQ ID NO: 480500 - RNA, 24 nt, Human
cucgcuccucaaccaccccagaca

SEQ ID NO: 480501 - RNA, 18 nt, Human
cugcggucgggggaggag

SEQ ID NO: 480502 - RNA, 18 nt, Human
cugcggucgggggaggag

SEQ ID NO: 480503 - RNA, 18 nt, Human
cuucuacagcagcaauuu

SEQ ID NO: 480504 - RNA, 19 nt, Human
gaacucgcuccucaaccac

SEQ ID NO: 480505 - RNA, 22 nt, Human
gacacagcacucacuuccuaca

SEQ ID NO: 480506 - RNA, 24 nt, Human
gaccccaacgagaacccucucggc

SEQ ID NO: 480507 - RNA, 18 nt, Human
gaggagcgccugucagcu

SEQ ID NO: 480508 - RNA, 25 nt, Human
gccacgcccccggcgccugccauga

SEQ ID NO: 480509 - RNA, 19 nt, Human
gcuguuggggcacacugcc

SEQ ID NO: 480510 - RNA, 21 nt, Human
ggaacugugggcuucagcaac

SEQ ID NO: 480511 - RNA, 21 nt, Human
ggagaggccacggggcccaaa

SEQ ID NO: 480512 - RNA, 25 nt, Human
gggaaagaagaacuauccagaacgu

SEQ ID NO: 480513 - RNA, 21 nt, Human
gggacgcgagcugggggccgc

SEQ ID NO: 480514 - RNA, 24 nt, Human
ggucacccaacacaacagaaaaua

SEQ ID NO: 480515 - RNA, 22 nt, Human
guaugugacaauucaaguuuuc

SEQ ID NO: 480516 - RNA, 19 nt, Human
gucacagcuccaccuccaa

SEQ ID NO: 480517 - RNA, 23 nt, Human
gucugggaggaagagagaacucg

SEQ ID NO: 480518 - RNA, 24 nt, Human
guucaaguuucaaagacacugcag

SEQ ID NO: 480519 - RNA, 22 nt, Human
guugggaaagaagaacuaucca

SEQ ID NO: 480520 - RNA, 24 nt, Human
uaaaaaacugaaaccaagauuccc

SEQ ID NO: 480521 - RNA, 22 nt, Human
uaaagcaaaaaaaaaaagguca

SEQ ID NO: 480522 - RNA, 24 nt, Human
uaacggacacuuccauuuuaagag

SEQ ID NO: 480523 - RNA, 24 nt, Human
uagaauaaaaaacugaaaccaaga

SEQ ID NO: 480524 - RNA, 22 nt, Human
uagcagccgggcacacuuuggu

SEQ ID NO: 480525 - RNA, 21 nt, Human
uagcauagaauaaaaaacuga

SEQ ID NO: 480526 - RNA, 27 nt, Human
uagcauagaauaaaaaacugaaaccaa

SEQ ID NO: 480527 - RNA, 19 nt, Human
uaucacaaaauuucccaca

SEQ ID NO: 480528 - RNA, 23 nt, Human
ucaaaagggguuaaaagcaaaaa

SEQ ID NO: 480529 - RNA, 20 nt, Human
ucaaacaaguauaauucuca

SEQ ID NO: 480530 - RNA, 18 nt, Human
ucgcuccucaaccacccc

SEQ ID NO: 480531 - RNA, 22 nt, Human
ucucaaggcaaacccgagggag

SEQ ID NO: 480532 - RNA, 23 nt, Human
ucuccaagaggcaaucccaccuc

SEQ ID NO: 480533 - RNA, 23 nt, Human
ucugcgcgaccacgaggucacgc

SEQ ID NO: 480534 - RNA, 21 nt, Human
ucugggaggaagagagaacuc

SEQ ID NO: 480535 - RNA, 21 nt, Human
ucuuagguacugguagacccc

SEQ ID NO: 480536 - RNA, 24 nt, Human
ugaccugagccuugcgcucccugc

SEQ ID NO: 480537 - RNA, 23 nt, Human
ugacggagucgggcaauuccggg

SEQ ID NO: 480538 - RNA, 21 nt, Human
ugcggucgggggaggagcgcc

SEQ ID NO: 480539 - RNA, 21 nt, Human
ugguagcagauccaaaccuug

SEQ ID NO: 480540 - RNA, 18 nt, Human
uguaaaauguaugugaca

SEQ ID NO: 480541 - RNA, 25 nt, Human
uguaaagcaaaaaaaaaaaggucaa

SEQ ID NO: 480542 - RNA, 20 nt, Human
ugugggcuucagcaccucca

SEQ ID NO: 480543 - RNA, 18 nt, Human
uguucaccuuccagaagc

SEQ ID NO: 480544 - RNA, 23 nt, Human
uuaaaagcaaaaacauucacaac

SEQ ID NO: 480545 - RNA, 22 nt, Human
uuaucacaaaauuucccacaaa

SEQ ID NO: 480546 - RNA, 24 nt, Human
uugauucaaacaaguauaauucuc

SEQ ID NO: 480547 - RNA, 21 nt, Human
aaacaugaaguaggagggacc

SEQ ID NO: 480548 - RNA, 18 nt, Human
aaacgagaaaagcuaaua

SEQ ID NO: 480549 - RNA, 21 nt, Human
aacagggugaaaccucguccu

SEQ ID NO: 480550 - RNA, 18 nt, Human
aacuuacugcaaacacac

SEQ ID NO: 480551 - RNA, 22 nt, Human
aaggaaaccuccacaacagccg

SEQ ID NO: 480552 - RNA, 25 nt, Human
aaggcaggugcaucacuucagguca

SEQ ID NO: 480553 - RNA, 21 nt, Human
acaaacucagauuuagugaac

SEQ ID NO: 480554 - RNA, 22 nt, Human
acacugaauccacugcuccugu

SEQ ID NO: 480555 - RNA, 22 nt, Human
acauucuucuacccugcugugu

SEQ ID NO: 480556 - RNA, 20 nt, Human
accagccuggccaacagggu

SEQ ID NO: 480557 - RNA, 19 nt, Human
acgagaaaagcuaauagug

SEQ ID NO: 480558 - RNA, 23 nt, Human
acgagcucauuagaaacuuaaag

SEQ ID NO: 480559 - RNA, 25 nt, Human
acugcaaacacacggugauuaccau

SEQ ID NO: 480560 - RNA, 24 nt, Human
acuuuaugacucaacacuccgcca

SEQ ID NO: 480561 - RNA, 19 nt, Human
agaaguccugaaaugguug

SEQ ID NO: 480562 - RNA, 26 nt, Human
agagagcaggcaaaggugagcgccug

SEQ ID NO: 480563 - RNA, 21 nt, Human
agccaagcugaugaggaaaca

SEQ ID NO: 480564 - RNA, 20 nt, Human
agccaguccguaggaacuga

SEQ ID NO: 480565 - RNA, 23 nt, Human
agccuggccaacagggugaaacc

SEQ ID NO: 480566 - RNA, 19 nt, Human
aggaacugauccuagguuc

SEQ ID NO: 480567 - RNA, 26 nt, Human
aggcaggugcaucacuucaggucagg

SEQ ID NO: 480568 - RNA, 23 nt, Human
agggaccacccaaaaggcuccug

SEQ ID NO: 480569 - RNA, 21 nt, Human
agggcacagagaaauggcaaa

SEQ ID NO: 480570 - RNA, 22 nt, Human
agguguuuucaaguggcagaag

SEQ ID NO: 480571 - RNA, 27 nt, Human
aguacaaccauuaucagaaggucaucc

SEQ ID NO: 480572 - RNA, 23 nt, Human
aguaggauuauuccagaugagau

SEQ ID NO: 480573 - RNA, 19 nt, Human
aucacuauucaaaggcgga

SEQ ID NO: 480574 - RNA, 23 nt, Human
aucacuucaggucaggaguucga

SEQ ID NO: 480575 - RNA, 18 nt, Human
auucaaaggcggagcuuc

SEQ ID NO: 480576 - RNA, 18 nt, Human
auucuuggcacauugucu

SEQ ID NO: 480577 - RNA, 25 nt, Human
caacacaacuccuuugcaccuggag

SEQ ID NO: 480578 - RNA, 23 nt, Human
caacccaguguuucaggaacuga

SEQ ID NO: 480579 - RNA, 20 nt, Human
caacugcaaucaccucccuc

SEQ ID NO: 480580 - RNA, 24 nt, Human
caagcaacugcaaucaccucccuc

SEQ ID NO: 480581 - RNA, 18 nt, Human
caagccaaccaccuuucc

SEQ ID NO: 480582 - RNA, 18 nt, Human
caagcugaugaggaaaca

SEQ ID NO: 480583 - RNA, 24 nt, Human
cacagagaaauggcaaaauaaccg

SEQ ID NO: 480584 - RNA, 22 nt, Human
caccagaucugcaggugccuga

SEQ ID NO: 480585 - RNA, 22 nt, Human
caccucccucacuuuuccacca

SEQ ID NO: 480586 - RNA, 24 nt, Human
cacgccuguaauuccagcaccuug

SEQ ID NO: 480587 - RNA, 24 nt, Human
cacugcuccuguguagauuccuau

SEQ ID NO: 480588 - RNA, 21 nt, Human
cacuuuagauggacuuggcug

SEQ ID NO: 480589 - RNA, 18 nt, Human
caggucaggaguucgaga

SEQ ID NO: 480590 - RNA, 21 nt, Human
caggugagaguaaaaugugug

SEQ ID NO: 480591 - RNA, 19 nt, Human
cauaaccgauauguccaca

SEQ ID NO: 480592 - RNA, 24 nt, Human
caucacuucaggucaggaguucga

SEQ ID NO: 480593 - RNA, 23 nt, Human
cauuuggagauccucuucugcuc

SEQ ID NO: 480594 - RNA, 21 nt, Human
ccaaccaccuuuccaaacauc

SEQ ID NO: 480595 - RNA, 18 nt, Human
ccaagcaacugcaaucac

SEQ ID NO: 480596 - RNA, 19 nt, Human
ccacagggcuuugagucag

SEQ ID NO: 480597 - RNA, 23 nt, Human
ccacccaaaaggcuccuggucac

SEQ ID NO: 480598 - RNA, 19 nt, Human
ccagcaccuugggaagcca

SEQ ID NO: 480599 - RNA, 23 nt, Human
ccaguccguaggaacugaucccc

SEQ ID NO: 480600 - RNA, 22 nt, Human
ccgaucccuggagcugucaaaa

SEQ ID NO: 480601 - RNA, 20 nt, Human
ccgccaaauugguaguuacu

SEQ ID NO: 480602 - RNA, 21 nt, Human
ccuacugccuuuucccucaaa

SEQ ID NO: 480603 - RNA, 22 nt, Human
ccucagccuugacuaacucauu

SEQ ID NO: 480604 - RNA, 29 nt, Human
ccugaacgauucucugcaggccgaccucg

SEQ ID NO: 480605 - RNA, 21 nt, Human
ccuggccaacagggugaaacc

SEQ ID NO: 480606 - RNA, 24 nt, Human
ccuggccaacagggugaaaccucg

SEQ ID NO: 480607 - RNA, 22 nt, Human
ccuguaauuccagcaccuuggg

SEQ ID NO: 480608 - RNA, 24 nt, Human
cgaaacaaaacaugaaguaggauu

SEQ ID NO: 480609 - RNA, 23 nt, Human
cgagaaaagcuaauagugaagau

SEQ ID NO: 480610 - RNA, 24 nt, Human
cgagaccagccuggccaacagggu

SEQ ID NO: 480611 - RNA, 21 nt, Human
cgccuguaauuccagcaccuu

SEQ ID NO: 480612 - RNA, 20 nt, Human
cuaaugaccucuuuauuggu

SEQ ID NO: 480613 - RNA, 24 nt, Human
cuaggccgggcgcgguggcucacg

SEQ ID NO: 480614 - RNA, 24 nt, Human
cucacgccuguaauuccagcaccu

SEQ ID NO: 480615 - RNA, 18 nt, Human
cuccaggccaccuccacc

SEQ ID NO: 480616 - RNA, 22 nt, Human
cuccaggccaccuccacuggcu

SEQ ID NO: 480617 - RNA, 23 nt, Human
cuccugcuguggacucaacacaa

SEQ ID NO: 480618 - RNA, 27 nt, Human
cugcucuucuucaaccucagccuugac

SEQ ID NO: 480619 - RNA, 21 nt, Human
cugcuuugcuuuagaugcccc

SEQ ID NO: 480620 - RNA, 20 nt, Human
cuggugcccgcuccuccuga

SEQ ID NO: 480621 - RNA, 23 nt, Human
cuucaggucaggaguucgagacc

SEQ ID NO: 480622 - RNA, 21 nt, Human
cuuugcaccuggagcaucucc

SEQ ID NO: 480623 - RNA, 22 nt, Human
gaaaccuccacaacagccguau

SEQ ID NO: 480624 - RNA, 21 nt, Human
gaagauaaucccaagggagaa

SEQ ID NO: 480625 - RNA, 19 nt, Human
gaaguccugaaaugguugu

SEQ ID NO: 480626 - RNA, 23 nt, Human
gaccuacugccuuuucccucuuu

SEQ ID NO: 480627 - RNA, 19 nt, Human
gaccugacaccggggcgau

SEQ ID NO: 480628 - RNA, 23 nt, Human
gaccugacaccggggcgauccaa

SEQ ID NO: 480629 - RNA, 21 nt, Human
gagaaaagcuaauagugaaga

SEQ ID NO: 480630 - RNA, 19 nt, Human
gagagaaaagguaaaugag

SEQ ID NO: 480631 - RNA, 21 nt, Human
gagcucauuagaaacuuaaag

SEQ ID NO: 480632 - RNA, 23 nt, Human
gaucagccucauccugcuuugcu

SEQ ID NO: 480633 - RNA, 18 nt, Human
gcuccaggccaccuccac

SEQ ID NO: 480634 - RNA, 19 nt, Human
ggaagccaaggcaggugca

SEQ ID NO: 480635 - RNA, 20 nt, Human
ggcaccguggagccccgcag

SEQ ID NO: 480636 - RNA, 19 nt, Human
ggcagagaguagcaugggc

SEQ ID NO: 480637 - RNA, 23 nt, Human
ggcgcgguggcucacgccuguaa

SEQ ID NO: 480638 - RNA, 23 nt, Human
gguggcucacgccuguaauucca

SEQ ID NO: 480639 - RNA, 24 nt, Human
gguggcucacgccuguaauuccag

SEQ ID NO: 480640 - RNA, 23 nt, Human
guggagacuugccuuugcaugcu

SEQ ID NO: 480641 - RNA, 20 nt, Human
uaaaacaaaacgagaaaagc

SEQ ID NO: 480642 - RNA, 24 nt, Human
uaacaucucacaacuuacugcaaa

SEQ ID NO: 480643 - RNA, 21 nt, Human
uacucuguaagucaccacaaa

SEQ ID NO: 480644 - RNA, 24 nt, Human
uaggugccgaaacaaaacaugaag

SEQ ID NO: 480645 - RNA, 22 nt, Human
uagugaacacugaauccacugc

SEQ ID NO: 480646 - RNA, 22 nt, Human
uauaaaagaauccucuaggccg

SEQ ID NO: 480647 - RNA, 19 nt, Human
ucaaaagggcacagagaaa

SEQ ID NO: 480648 - RNA, 20 nt, Human
ucacuucaggucaggaguuc

SEQ ID NO: 480649 - RNA, 24 nt, Human
ucacuucaggucaggaguucgaga

SEQ ID NO: 480650 - RNA, 19 nt, Human
uccaaaugaccagauccau

SEQ ID NO: 480651 - RNA, 18 nt, Human
uccaagcaacugcaauca

SEQ ID NO: 480652 - RNA, 19 nt, Human
uccaaggaaaccuccacaa

SEQ ID NO: 480653 - RNA, 19 nt, Human
uccacaucgacaacagagc

SEQ ID NO: 480654 - RNA, 19 nt, Human
uccauaguuaugucuagga

SEQ ID NO: 480655 - RNA, 20 nt, Human
uccaugcaggcuuuugcauu

SEQ ID NO: 480656 - RNA, 18 nt, Human
ucccucacuuuuccacca

SEQ ID NO: 480657 - RNA, 24 nt, Human
ucuaggacuggggcaccguggagc

SEQ ID NO: 480658 - RNA, 19 nt, Human
ucugcaggugccugaacug

SEQ ID NO: 480659 - RNA, 23 nt, Human
ucuuucgguuacuggggagcugg

SEQ ID NO: 480660 - RNA, 22 nt, Human
ugaaaaaauaaaacaaaacgag

SEQ ID NO: 480661 - RNA, 21 nt, Human
ugaacaugaagcuuggcgacc

SEQ ID NO: 480662 - RNA, 20 nt, Human
ugaacgauucucugcaggca

SEQ ID NO: 480663 - RNA, 19 nt, Human
ugaccagauccaugcaggc

SEQ ID NO: 480664 - RNA, 20 nt, Human
ugaucagccucauccugcuu

SEQ ID NO: 480665 - RNA, 23 nt, Human
ugcaauucacuuuuccucuggga

SEQ ID NO: 480666 - RNA, 24 nt, Human
ugcaucacuucaggucaggaguuc

SEQ ID NO: 480667 - RNA, 19 nt, Human
ugccucacauuugugucau

SEQ ID NO: 480668 - RNA, 20 nt, Human
ugcugugucaaccugaggga

SEQ ID NO: 480669 - RNA, 19 nt, Human
ugcuuuagaugccccaagu

SEQ ID NO: 480670 - RNA, 20 nt, Human
uggagacuugccuuugcaug

SEQ ID NO: 480671 - RNA, 19 nt, Human
uggagccccgcaggcccag

SEQ ID NO: 480672 - RNA, 18 nt, Human
uggagcugucaaaagggc

SEQ ID NO: 480673 - RNA, 23 nt, Human
uggcaguacaaaugcuggcaccg

SEQ ID NO: 480674 - RNA, 22 nt, Human
uggcucacgccuguaauuccag

SEQ ID NO: 480675 - RNA, 24 nt, Human
uggcucacgccuguaauuccagca

SEQ ID NO: 480676 - RNA, 24 nt, Human
ugggaagccaaggcaggugcauca

SEQ ID NO: 480677 - RNA, 22 nt, Human
uggggcuuguuagcagugggac

SEQ ID NO: 480678 - RNA, 18 nt, Human
ugguacccugaauggucu

SEQ ID NO: 480679 - RNA, 23 nt, Human
ugugaaaaaauaaaacaaaacga

SEQ ID NO: 480680 - RNA, 18 nt, Human
uuaaagacauucuuucau

SEQ ID NO: 480681 - RNA, 19 nt, Human
uucuuuuaccuuccaaaug

SEQ ID NO: 480682 - RNA, 23 nt, Human
uuuccauaguuaugucuaggacu

SEQ ID NO: 480683 - RNA, 23 nt, Human
uuugagucaguucuucaagugcu

SEQ ID NO: 480684 - RNA, 18 nt, Human
uuuuccacaucgacaaca

SEQ ID NO: 480685 - RNA, 18 nt, Human
aaggggaggcccaggcag

SEQ ID NO: 480686 - RNA, 18 nt, Human
acucaaggccugggcaga

SEQ ID NO: 480687 - RNA, 21 nt, Human
aggcaggaaggguggcccagg

SEQ ID NO: 480688 - RNA, 20 nt, Human
aggcaggcagacccaccagg

SEQ ID NO: 480689 - RNA, 22 nt, Human
aggccagagccuagcccaggga

SEQ ID NO: 480690 - RNA, 23 nt, Human
aggguugggucccgguugggggc

SEQ ID NO: 480691 - RNA, 19 nt, Human
caccaggggucccugaagg

SEQ ID NO: 480692 - RNA, 23 nt, Human
caggagggcaugccagguggugg

SEQ ID NO: 480693 - RNA, 18 nt, Human
caggccagagccuagccc

SEQ ID NO: 480694 - RNA, 21 nt, Human
ccaggcaggaaggguggccca

SEQ ID NO: 480695 - RNA, 18 nt, Human
ccagggaggcaggguugg

SEQ ID NO: 480696 - RNA, 22 nt, Human
cgcccgaagggccgcgcgacga

SEQ ID NO: 480697 - RNA, 22 nt, Human
cuagcccagggaggcaggguug

SEQ ID NO: 480698 - RNA, 19 nt, Human
gaaggguggcccaggcagg

SEQ ID NO: 480699 - RNA, 19 nt, Human
gcccgaagggccgcgcgac

SEQ ID NO: 480700 - RNA, 18 nt, Human
gcucgggcgcccgaaggg

SEQ ID NO: 480701 - RNA, 28 nt, Human
ggaguugggugggcaggcaagugggugg

SEQ ID NO: 480702 - RNA, 19 nt, Human
ggcaggcaagugggugggu

SEQ ID NO: 480703 - RNA, 23 nt, Human
gggcagaguggggagcgcccagg

SEQ ID NO: 480704 - RNA, 19 nt, Human
gggcaugccaggugguggg

SEQ ID NO: 480705 - RNA, 20 nt, Human
guggugggggcuggcccagg

SEQ ID NO: 480706 - RNA, 20 nt, Human
uagcccagggaggcaggguu

SEQ ID NO: 480707 - RNA, 23 nt, Human
ucccgguugggggcucuuggagc

SEQ ID NO: 480708 - RNA, 19 nt, Human
uggcccagguaggccaagg

SEQ ID NO: 480709 - RNA, 23 nt, Human
ugggcaggcaaguggguggguug

SEQ ID NO: 480710 - RNA, 22 nt, Human
uggggagcgcccaggaguuggg

SEQ ID NO: 480711 - RNA, 21 nt, Human
uuuuuuuuuugugggagaccc

SEQ ID NO: 480712 - RNA, 19 nt, Human
uuuuuuuuuuuuuuuuugu

SEQ ID NO: 480713 - RNA, 22 nt, Human
uuuuuuuuuuuuuuuuuguggg

SEQ ID NO: 480714 - RNA, 21 nt, Human
aaauauauuuauacuaaagac

SEQ ID NO: 480715 - RNA, 25 nt, Human
aaucuucuuugacuacaaaagaagc

SEQ ID NO: 480716 - RNA, 19 nt, Human
acuaaagacuucccaaucc

SEQ ID NO: 480717 - RNA, 22 nt, Human
agugcuuagaaaagguguaagu

SEQ ID NO: 480718 - RNA, 23 nt, Human
ccaaaagcacuucugcuuuacgg

SEQ ID NO: 480719 - RNA, 20 nt, Human
cccaaaaggcugacugugaa

SEQ ID NO: 480720 - RNA, 18 nt, Human
cccauucaggaagauggc

SEQ ID NO: 480721 - RNA, 18 nt, Human
cucugugcuauagcacuc

SEQ ID NO: 480722 - RNA, 18 nt, Human
cuguuggcccugcagcug

SEQ ID NO: 480723 - RNA, 18 nt, Human
gcacuucugcuuuacgga

SEQ ID NO: 480724 - RNA, 18 nt, Human
gggucucaaaucccauuc

SEQ ID NO: 480725 - RNA, 20 nt, Human
uacuaaagacuucccaaucc

SEQ ID NO: 480726 - RNA, 23 nt, Human
uccaaaaagcugaaauuauauga

SEQ ID NO: 480727 - RNA, 21 nt, Human
ucuauacuuaguuccuucucu

SEQ ID NO: 480728 - RNA, 19 nt, Human
ucuuccaaaaagcugaaau

SEQ ID NO: 480729 - RNA, 18 nt, Human
ugacauucaguaaaguuc

SEQ ID NO: 480730 - RNA, 22 nt, Human
ugguauguggaucauaaaaagg

SEQ ID NO: 480731 - RNA, 18 nt, Human
uguaaauauccaaaagca

SEQ ID NO: 480732 - RNA, 19 nt, Human
uucuuccaaaaagcugaaa

SEQ ID NO: 480733 - RNA, 19 nt, Human
uuugaaauuucuucugccc

SEQ ID NO: 480734 - RNA, 22 nt, Human
aaaauaaaaagcuagcaaaaag

SEQ ID NO: 480735 - RNA, 19 nt, Human
aaagugcugggauuacaga

SEQ ID NO: 480736 - RNA, 24 nt, Human
aaagugcugggauuacagauguga

SEQ ID NO: 480737 - RNA, 23 nt, Human
aacacuuuuuuuuuuuccuuggg

SEQ ID NO: 480738 - RNA, 20 nt, Human
aacaucucuuggaacuacug

SEQ ID NO: 480739 - RNA, 26 nt, Human
aacucagcauuccuucauuuuaauug

SEQ ID NO: 480740 - RNA, 20 nt, Human
aacuucagaacucaaacagc

SEQ ID NO: 480741 - RNA, 18 nt, Human
aagaaacauuagcuguag

SEQ ID NO: 480742 - RNA, 20 nt, Human
aagaaccugauauuuaugcu

SEQ ID NO: 480743 - RNA, 26 nt, Human
aagcugaugugauguacuugugaaau

SEQ ID NO: 480744 - RNA, 18 nt, Human
aagugcugggauuacaga

SEQ ID NO: 480745 - RNA, 23 nt, Human
aaguucucucuuguccaggcauu

SEQ ID NO: 480746 - RNA, 20 nt, Human
aauuaaacacaauacugauu

SEQ ID NO: 480747 - RNA, 18 nt, Human
acagccuggccaagaacc

SEQ ID NO: 480748 - RNA, 24 nt, Human
accaguguauaaaaugaaacuuuu

SEQ ID NO: 480749 - RNA, 22 nt, Human
accaugcaaucccccaccccca

SEQ ID NO: 480750 - RNA, 28 nt, Human
acccagcaagaaacauuagcuguaguuu

SEQ ID NO: 480751 - RNA, 18 nt, Human
acugcagccucgaccucc

SEQ ID NO: 480752 - RNA, 20 nt, Human
acuucagaacucaaacagca

SEQ ID NO: 480753 - RNA, 20 nt, Human
agacaagccacuuaaaccua

SEQ ID NO: 480754 - RNA, 26 nt, Human
agacuauagccacaccaccgugccca

SEQ ID NO: 480755 - RNA, 20 nt, Human
agagaaaaggaagaggagga

SEQ ID NO: 480756 - RNA, 20 nt, Human
agagaggagcauaccugugu

SEQ ID NO: 480757 - RNA, 25 nt, Human
agagcuuguauuuucuccccuccca

SEQ ID NO: 480758 - RNA, 20 nt, Human
agcaaauauacuugcuuucu

SEQ ID NO: 480759 - RNA, 21 nt, Human
agcaauccacccaccucagcc

SEQ ID NO: 480760 - RNA, 22 nt, Human
agcccuguauguacuauaggac

SEQ ID NO: 480761 - RNA, 19 nt, Human
aggaagaggaggaagagcu

SEQ ID NO: 480762 - RNA, 24 nt, Human
aggaccaccuaauuuuagaagucc

SEQ ID NO: 480763 - RNA, 18 nt, Human
aggagacugcaaggucag

SEQ ID NO: 480764 - RNA, 25 nt, Human
aggcuggagugcaguggcgccaucu

SEQ ID NO: 480765 - RNA, 23 nt, Human
aggguucagcuaagaacuacagu

SEQ ID NO: 480766 - RNA, 20 nt, Human
agugcaguggcgccaucuug

SEQ ID NO: 480767 - RNA, 24 nt, Human
agugcaguggcgccaucuuggcuc

SEQ ID NO: 480768 - RNA, 24 nt, Human
agugcugggauuacagaugugagc

SEQ ID NO: 480769 - RNA, 22 nt, Human
auaaaaagcuagcaaaaagcua

SEQ ID NO: 480770 - RNA, 21 nt, Human
aucucuguugcccugugaaaa

SEQ ID NO: 480771 - RNA, 23 nt, Human
augggguuuugccauguugccua

SEQ ID NO: 480772 - RNA, 18 nt, Human
caaaaagcuaguaagaaa

SEQ ID NO: 480773 - RNA, 22 nt, Human
caaaauucugcugaaaacuaac

SEQ ID NO: 480774 - RNA, 24 nt, Human
caaacagcacucacauaacaugga

SEQ ID NO: 480775 - RNA, 22 nt, Human
caaagcaaguuagcuaagaaac

SEQ ID NO: 480776 - RNA, 18 nt, Human
caaggcacugugcuaaga

SEQ ID NO: 480777 - RNA, 24 nt, Human
cacaccaccgugcccagcuaauuu

SEQ ID NO: 480778 - RNA, 23 nt, Human
caccaaaaacuuuucagagccuc

SEQ ID NO: 480779 - RNA, 22 nt, Human
cacccaccucagccuuccaaag

SEQ ID NO: 480780 - RNA, 24 nt, Human
cacccaggcuggagugcaguggcg

SEQ ID NO: 480781 - RNA, 24 nt, Human
caccucagccuuccaaagugcugg

SEQ ID NO: 480782 - RNA, 24 nt, Human
cacucucucacccaggcuggagug

SEQ ID NO: 480783 - RNA, 19 nt, Human
cacugcagccucgaccucc

SEQ ID NO: 480784 - RNA, 18 nt, Human
cacugucaugggccaacc

SEQ ID NO: 480785 - RNA, 20 nt, Human
cagaacucaaacagcacuca

SEQ ID NO: 480786 - RNA, 24 nt, Human
cagcagaaucugcacacaacggag

SEQ ID NO: 480787 - RNA, 20 nt, Human
cagccuccugaguagcucag

SEQ ID NO: 480788 - RNA, 23 nt, Human
cagccucgaccuccuggacucag

SEQ ID NO: 480789 - RNA, 26 nt, Human
caggaggcuucugcuucuuuccuggg

SEQ ID NO: 480790 - RNA, 24 nt, Human
caguggcugcagacagcaugugug

SEQ ID NO: 480791 - RNA, 24 nt, Human
cauacaucagccuccugaguagcu

SEQ ID NO: 480792 - RNA, 18 nt, Human
caucugcugggucucugc

SEQ ID NO: 480793 - RNA, 21 nt, Human
caugguagccuuuucuaaaug

SEQ ID NO: 480794 - RNA, 24 nt, Human
cauguugccuaggcugaucucaaa

SEQ ID NO: 480795 - RNA, 21 nt, Human
ccaaagugcugggauuacaga

SEQ ID NO: 480796 - RNA, 21 nt, Human
ccaaagugcugggauuacaga

SEQ ID NO: 480797 - RNA, 22 nt, Human
ccaaagugcugggauuacagau

SEQ ID NO: 480798 - RNA, 24 nt, Human
ccaaagugcugggauuacagaugu

SEQ ID NO: 480799 - RNA, 20 nt, Human
ccacaguaauagaucugcca

SEQ ID NO: 480800 - RNA, 21 nt, Human
ccaguagugacacauuccuga

SEQ ID NO: 480801 - RNA, 22 nt, Human
ccauguugccuaggcugaucuc

SEQ ID NO: 480802 - RNA, 22 nt, Human
ccccacccccaacacacacaca

SEQ ID NO: 480803 - RNA, 18 nt, Human
cccugagguugaaagcuc

SEQ ID NO: 480804 - RNA, 21 nt, Human
ccuauaaacccugagguugaa

SEQ ID NO: 480805 - RNA, 18 nt, Human
ccuggacucaggugaucc

SEQ ID NO: 480806 - RNA, 24 nt, Human
ccugggcucaagcaauccacccac

SEQ ID NO: 480807 - RNA, 22 nt, Human
cuaagaacuacaguccacucuc

SEQ ID NO: 480808 - RNA, 21 nt, Human
cuaccccccaacacuuuuuuu

SEQ ID NO: 480809 - RNA, 21 nt, Human
cuauagccacaccaccgugcc

SEQ ID NO: 480810 - RNA, 22 nt, Human
cucaaccaugaagaaaaggaaa

SEQ ID NO: 480811 - RNA, 21 nt, Human
cucaagcaauccacccaccuc

SEQ ID NO: 480812 - RNA, 24 nt, Human
cucaagcaauccacccaccucagc

SEQ ID NO: 480813 - RNA, 21 nt, Human
cucacugcagccucgaccucc

SEQ ID NO: 480814 - RNA, 24 nt, Human
cucacugcagccucgaccuccugg

SEQ ID NO: 480815 - RNA, 24 nt, Human
cuccaucacccuguacagugccug

SEQ ID NO: 480816 - RNA, 20 nt, Human
cucccaggguuauaauauaa

SEQ ID NO: 480817 - RNA, 23 nt, Human
cugcagccucgaccuccuggacu

SEQ ID NO: 480818 - RNA, 20 nt, Human
cuggggcaccucugcuccug

SEQ ID NO: 480819 - RNA, 18 nt, Human
cuuugagaugcucugagg

SEQ ID NO: 480820 - RNA, 18 nt, Human
gaacaacggacugcagaa

SEQ ID NO: 480821 - RNA, 23 nt, Human
gaaccuuagcuucuccaucagug

SEQ ID NO: 480822 - RNA, 19 nt, Human
gaagagaaaaggaagagga

SEQ ID NO: 480823 - RNA, 18 nt, Human
gagaugggguuuugccau

SEQ ID NO: 480824 - RNA, 20 nt, Human
gagaugggguuuugccaugu

SEQ ID NO: 480825 - RNA, 26 nt, Human
gagcccccccaucuguacaauaagga

SEQ ID NO: 480826 - RNA, 21 nt, Human
gaggaggaagagcuucagucu

SEQ ID NO: 480827 - RNA, 21 nt, Human
gagggugugaagaaaccuugc

SEQ ID NO: 480828 - RNA, 18 nt, Human
gauagcaacaccaaucuc

SEQ ID NO: 480829 - RNA, 18 nt, Human
gauuacagaugugagcca

SEQ ID NO: 480830 - RNA, 21 nt, Human
gauuacagaugugagccacca

SEQ ID NO: 480831 - RNA, 27 nt, Human
gauuguuuuaaacaguagaaaggguuc

SEQ ID NO: 480832 - RNA, 22 nt, Human
gcaaaaagcuaguaagaaacca

SEQ ID NO: 480833 - RNA, 18 nt, Human
gcgccaucuuggcucacu

SEQ ID NO: 480834 - RNA, 22 nt, Human
gcucaagcaauccacccaccuc

SEQ ID NO: 480835 - RNA, 21 nt, Human
gcucacugcagccucgaccuc

SEQ ID NO: 480836 - RNA, 21 nt, Human
gcugcucaaccaugaagaaaa

SEQ ID NO: 480837 - RNA, 20 nt, Human
gcuggagugcaguggcgcca

SEQ ID NO: 480838 - RNA, 18 nt, Human
gcuucagucuuuguaucu

SEQ ID NO: 480839 - RNA, 20 nt, Human
ggaaaaauuucaagccaggg

SEQ ID NO: 480840 - RNA, 21 nt, Human
ggaaacuacagguccuaggaa

SEQ ID NO: 480841 - RNA, 19 nt, Human
gggguuuugccauguugcc

SEQ ID NO: 480842 - RNA, 22 nt, Human
gggguuuugccauguugccuag

SEQ ID NO: 480843 - RNA, 22 nt, Human
ggguuuugccauguugccuagg

SEQ ID NO: 480844 - RNA, 21 nt, Human
guagaacaacggacugcagaa

SEQ ID NO: 480845 - RNA, 21 nt, Human
gucgagaugggguuuugccau

SEQ ID NO: 480846 - RNA, 23 nt, Human
gugauccucauacaucagccucc

SEQ ID NO: 480847 - RNA, 22 nt, Human
guuccacuuucaaaggcuacag

SEQ ID NO: 480848 - RNA, 23 nt, Human
guuuuaaacaguagaaaggguuc

SEQ ID NO: 480849 - RNA, 21 nt, Human
uaaaaagcaguuccacuuuca

SEQ ID NO: 480850 - RNA, 19 nt, Human
uaaaaagcuagcaaaaagc

SEQ ID NO: 480851 - RNA, 21 nt, Human
uaaaaagcuagcaaaaagcua

SEQ ID NO: 480852 - RNA, 18 nt, Human
uaaaauacaaagcagccc

SEQ ID NO: 480853 - RNA, 24 nt, Human
uaaaauacaaagcagcccgcagca

SEQ ID NO: 480854 - RNA, 25 nt, Human
uaaaauacaaagcagcccgcagcaa

SEQ ID NO: 480855 - RNA, 24 nt, Human
uaaauaaguggcacugcaaagggc

SEQ ID NO: 480856 - RNA, 19 nt, Human
uaacauagauaaccaaagu

SEQ ID NO: 480857 - RNA, 20 nt, Human
uaacuggcuguauguguaug

SEQ ID NO: 480858 - RNA, 24 nt, Human
uaagaaaccagaugucuaguaaag

SEQ ID NO: 480859 - RNA, 22 nt, Human
uaagggucuuaggaggccccuc

SEQ ID NO: 480860 - RNA, 18 nt, Human
uaaucuaaccccucacag

SEQ ID NO: 480861 - RNA, 23 nt, Human
uacagaguuuguuuacauacaag

SEQ ID NO: 480862 - RNA, 19 nt, Human
uacagaugugagccaccac

SEQ ID NO: 480863 - RNA, 23 nt, Human
uacagccuggccaagaacccuuu

SEQ ID NO: 480864 - RNA, 20 nt, Human
uacagugccuggcacagaau

SEQ ID NO: 480865 - RNA, 20 nt, Human
uacaucagccuccugaguag

SEQ ID NO: 480866 - RNA, 19 nt, Human
uacugauuuuacacaccac

SEQ ID NO: 480867 - RNA, 22 nt, Human
uagaacaacggacugcagaaaa

SEQ ID NO: 480868 - RNA, 18 nt, Human
uagaaggaacacuaauac

SEQ ID NO: 480869 - RNA, 19 nt, Human
uagaaggaacacuaauaca

SEQ ID NO: 480870 - RNA, 21 nt, Human
uagcuaagaaacagcauuugu

SEQ ID NO: 480871 - RNA, 20 nt, Human
uagggaugucuucucaaaga

SEQ ID NO: 480872 - RNA, 23 nt, Human
uauaaacuuaggggaauaucacc

SEQ ID NO: 480873 - RNA, 19 nt, Human
uauuuuaagggucuuagga

SEQ ID NO: 480874 - RNA, 20 nt, Human
ucaaaggacccuguaguccu

SEQ ID NO: 480875 - RNA, 19 nt, Human
ucaaauaagccaccccacc

SEQ ID NO: 480876 - RNA, 20 nt, Human
ucaagccaggguaccagugu

SEQ ID NO: 480877 - RNA, 24 nt, Human
ucacccaggcuggagugcaguggc

SEQ ID NO: 480878 - RNA, 18 nt, Human
ucacucaacuacacacuc

SEQ ID NO: 480879 - RNA, 24 nt, Human
ucacucucucacccaggcuggagu

SEQ ID NO: 480880 - RNA, 19 nt, Human
ucacugcagccucgaccuc

SEQ ID NO: 480881 - RNA, 23 nt, Human
ucacugcagccucgaccuccugg

SEQ ID NO: 480882 - RNA, 21 nt, Human
ucagacuauagccacaccacc

SEQ ID NO: 480883 - RNA, 24 nt, Human
ucagacuauagccacaccaccgug

SEQ ID NO: 480884 - RNA, 19 nt, Human
ucagaggagacugcaaggu

SEQ ID NO: 480885 - RNA, 20 nt, Human
ucaggauuugcuuccauacu

SEQ ID NO: 480886 - RNA, 22 nt, Human
ucagugacuucuuagggagaug

SEQ ID NO: 480887 - RNA, 21 nt, Human
uccacccaccucagccuucca

SEQ ID NO: 480888 - RNA, 26 nt, Human
uccauuagggaugucuucccucgugg

SEQ ID NO: 480889 - RNA, 21 nt, Human
uccauuagggaugucuucuca

SEQ ID NO: 480890 - RNA, 21 nt, Human
ucccugggcucaagcaaucca

SEQ ID NO: 480891 - RNA, 26 nt, Human
uccuccgccacagccgcccccgaggg

SEQ ID NO: 480892 - RNA, 23 nt, Human
uccugaagaaacuuccucuuucu

SEQ ID NO: 480893 - RNA, 19 nt, Human
ucuagaaagugacaggacc

SEQ ID NO: 480894 - RNA, 21 nt, Human
ucucaaaggacccuguagucc

SEQ ID NO: 480895 - RNA, 22 nt, Human
ucucacucucucacccaggcug

SEQ ID NO: 480896 - RNA, 23 nt, Human
ucucacucucucacccaggcugg

SEQ ID NO: 480897 - RNA, 24 nt, Human
ucucacucucucacccaggcugga

SEQ ID NO: 480898 - RNA, 24 nt, Human
ucucucacccaggcuggagugcag

SEQ ID NO: 480899 - RNA, 20 nt, Human
ucugaggaauaaagaagggg

SEQ ID NO: 480900 - RNA, 20 nt, Human
ucugaggccaaauccuacua

SEQ ID NO: 480901 - RNA, 24 nt, Human
ucugcacacaacggagucaaagau

SEQ ID NO: 480902 - RNA, 23 nt, Human
ucugccagcuaaacacuucuuau

SEQ ID NO: 480903 - RNA, 21 nt, Human
ucuguaaaccuuccucauugc

SEQ ID NO: 480904 - RNA, 21 nt, Human
ucuguuacuaacuggcuguau

SEQ ID NO: 480905 - RNA, 20 nt, Human
ucuuaaaccaggaaaaaauu

SEQ ID NO: 480906 - RNA, 21 nt, Human
ugaaaaaccugcaaaauuaaa

SEQ ID NO: 480907 - RNA, 19 nt, Human
ugaaaaucccaugccuucu

SEQ ID NO: 480908 - RNA, 21 nt, Human
ugaaagcucuggauagcucac

SEQ ID NO: 480909 - RNA, 21 nt, Human
ugaaauuuuucuuaaguagug

SEQ ID NO: 480910 - RNA, 25 nt, Human
ugaagaaaaggaaagagaaguagaa

SEQ ID NO: 480911 - RNA, 18 nt, Human
ugaccaugcaauccccca

SEQ ID NO: 480912 - RNA, 22 nt, Human
ugaccaugcaaucccccacccc

SEQ ID NO: 480913 - RNA, 19 nt, Human
ugaggaauaaagaagggga

SEQ ID NO: 480914 - RNA, 21 nt, Human
ugaguagcucagacuauagcc

SEQ ID NO: 480915 - RNA, 24 nt, Human
ugauguacuugugaaauaguaugu

SEQ ID NO: 480916 - RNA, 21 nt, Human
ugcaaagggcaaagaaggguu

SEQ ID NO: 480917 - RNA, 23 nt, Human
ugcaauuuuaacaauaacuaaga

SEQ ID NO: 480918 - RNA, 19 nt, Human
ugcagaaaaaaaagaacuc

SEQ ID NO: 480919 - RNA, 22 nt, Human
ugcaguggcgccaucuuggcuc

SEQ ID NO: 480920 - RNA, 24 nt, Human
ugccauguugccuaggcugaucuc

SEQ ID NO: 480921 - RNA, 18 nt, Human
ugcuaagagaugggaaaa

SEQ ID NO: 480922 - RNA, 18 nt, Human
ugcugggauuacagaugu

SEQ ID NO: 480923 - RNA, 24 nt, Human
ugcugggauuacagaugugagcca

SEQ ID NO: 480924 - RNA, 20 nt, Human
uggacucaggugauccucau

SEQ ID NO: 480925 - RNA, 21 nt, Human
uggacuuggagucagaaguuc

SEQ ID NO: 480926 - RNA, 22 nt, Human
uggagucagaaguucugcaacu

SEQ ID NO: 480927 - RNA, 28 nt, Human
uggagugcaguggcgccauccuagcacg

SEQ ID NO: 480928 - RNA, 23 nt, Human
uggagugcaguggcgccaucuug

SEQ ID NO: 480929 - RNA, 24 nt, Human
uggagugcaguggcgccaucuugg

SEQ ID NO: 480930 - RNA, 18 nt, Human
uggcagaguuccaaauaa

SEQ ID NO: 480931 - RNA, 24 nt, Human
uggcucacugcagccucgaccucc

SEQ ID NO: 480932 - RNA, 18 nt, Human
ugggagcagaggauaggc

SEQ ID NO: 480933 - RNA, 18 nt, Human
ugggauuacagaugugag

SEQ ID NO: 480934 - RNA, 19 nt, Human
ugggauuacagaugugagc

SEQ ID NO: 480935 - RNA, 22 nt, Human
ugggauuacagaugugagccac

SEQ ID NO: 480936 - RNA, 24 nt, Human
ugggauuacagaugugagccacca

SEQ ID NO: 480937 - RNA, 22 nt, Human
ugggccaacccacacuagacuc

SEQ ID NO: 480938 - RNA, 22 nt, Human
ugggcucaagcaauccacccac

SEQ ID NO: 480939 - RNA, 24 nt, Human
ugggguuuugccauguugccuagg

SEQ ID NO: 480940 - RNA, 23 nt, Human
uguaacauguuggauuucuuccc

SEQ ID NO: 480941 - RNA, 24 nt, Human
ugucgagaugggguuuugccaugu

SEQ ID NO: 480942 - RNA, 19 nt, Human
ugugagccaccaccuacag

SEQ ID NO: 480943 - RNA, 18 nt, Human
ugugauguacuugugaaa

SEQ ID NO: 480944 - RNA, 20 nt, Human
uguucaaaacucuuagaagu

SEQ ID NO: 480945 - RNA, 20 nt, Human
uguuuuagugaaugaaugaa

SEQ ID NO: 480946 - RNA, 21 nt, Human
uuaaaccaggaaaaaauuaca

SEQ ID NO: 480947 - RNA, 19 nt, Human
uuaccacaugauucauuca

SEQ ID NO: 480948 - RNA, 18 nt, Human
uuaggaaaaauuauuaau

SEQ ID NO: 480949 - RNA, 22 nt, Human
uuauugugauaucugagauauu

SEQ ID NO: 480950 - RNA, 20 nt, Human
uucagagccuccagagcccc

SEQ ID NO: 480951 - RNA, 20 nt, Human
uuccuccgccacagccgccc

SEQ ID NO: 480952 - RNA, 18 nt, Human
uuccucuaaucuaacccc

SEQ ID NO: 480953 - RNA, 21 nt, Human
uuguaaacuugaucaagggcc

SEQ ID NO: 480954 - RNA, 24 nt, Human
uugucgagaugggguuuugccaug

SEQ ID NO: 480955 - RNA, 19 nt, Human
uuuaaaauacaaagcagcc

SEQ ID NO: 480956 - RNA, 18 nt, Human
uuuaaaguugcaauucaa

SEQ ID NO: 480957 - RNA, 24 nt, Human
uuucaaaggcuacagaguuuguuu

SEQ ID NO: 480958 - RNA, 26 nt, Human
uuuccuauaaacccugagguugaaag

SEQ ID NO: 480959 - RNA, 24 nt, Human
uuugucgagaugggguuuugccau

SEQ ID NO: 480960 - RNA, 19 nt, Human
uuuugccauguugccuagg

SEQ ID NO: 480961 - RNA, 22 nt, Human
uuuugugguauaaacuuagggg

SEQ ID NO: 480962 - RNA, 24 nt, Human
uuuuuugucgagaugggguuuugc

SEQ ID NO: 480963 - RNA, 21 nt, Human
aacacagaggaacaaacaaga

SEQ ID NO: 480964 - RNA, 19 nt, Human
aagcaggcaagccaggcag

SEQ ID NO: 480965 - RNA, 26 nt, Human
acaaacaagaaggaaagggcgccaca

SEQ ID NO: 480966 - RNA, 23 nt, Human
acacacacacacacacacacaca

SEQ ID NO: 480967 - RNA, 23 nt, Human
acacacacacacacacacacaca

SEQ ID NO: 480968 - RNA, 30 nt, Human
acacacacacacacacacacacagcccuuu

SEQ ID NO: 480969 - RNA, 19 nt, Human
acagaacacagaggaacaa

SEQ ID NO: 480970 - RNA, 21 nt, Human
acagaacacagaggaacaaac

SEQ ID NO: 480971 - RNA, 20 nt, Human
acagcaggucacaggcagcc

SEQ ID NO: 480972 - RNA, 21 nt, Human
acagcugcugcaggcucugcc

SEQ ID NO: 480973 - RNA, 22 nt, Human
acaggcagcccugucuguggug

SEQ ID NO: 480974 - RNA, 26 nt, Human
acaggggcagccuuccuugauccaca

SEQ ID NO: 480975 - RNA, 22 nt, Human
accagcagccaguggcuccugg

SEQ ID NO: 480976 - RNA, 20 nt, Human
accagccugccacuccuggc

SEQ ID NO: 480977 - RNA, 23 nt, Human
accagccugccacuccuggccuc

SEQ ID NO: 480978 - RNA, 18 nt, Human
accaggcaggagcggccc

SEQ ID NO: 480979 - RNA, 19 nt, Human
accccacgcccagcccacc

SEQ ID NO: 480980 - RNA, 23 nt, Human
accccacgcccagcccaccagcc

SEQ ID NO: 480981 - RNA, 19 nt, Human
acgcccccugggcgacagg

SEQ ID NO: 480982 - RNA, 23 nt, Human
acuggccugaggaagguggcccc

SEQ ID NO: 480983 - RNA, 21 nt, Human
agaaaaccccacgcccagccc

SEQ ID NO: 480984 - RNA, 23 nt, Human
agaagcaggcaagccaggcagaa

SEQ ID NO: 480985 - RNA, 24 nt, Human
agacccucacaccagcagccagug

SEQ ID NO: 480986 - RNA, 23 nt, Human
agagguguuccugggaaacaguu

SEQ ID NO: 480987 - RNA, 23 nt, Human
agcccuugcuccuugugggaggu

SEQ ID NO: 480988 - RNA, 19 nt, Human
aggaacaaacaagaaggaa

SEQ ID NO: 480989 - RNA, 18 nt, Human
aggaacccugaaggcaca

SEQ ID NO: 480990 - RNA, 20 nt, Human
aggcagaagggggcccgggg

SEQ ID NO: 480991 - RNA, 18 nt, Human
aggcagggugacaguggg

SEQ ID NO: 480992 - RNA, 19 nt, Human
aggcagggugacagugggc

SEQ ID NO: 480993 - RNA, 20 nt, Human
aggccagcaggggcgggggg

SEQ ID NO: 480994 - RNA, 21 nt, Human
agggaccccaggacugcacag

SEQ ID NO: 480995 - RNA, 20 nt, Human
aggggacagggagggagggg

SEQ ID NO: 480996 - RNA, 22 nt, Human
agguguuccugggaaacaguuc

SEQ ID NO: 480997 - RNA, 23 nt, Human
auacacacacacacacacacaca

SEQ ID NO: 480998 - RNA, 27 nt, Human
caagccaggaccagcaucuccagggga

SEQ ID NO: 480999 - RNA, 19 nt, Human
caagccaggcagaaggggg

SEQ ID NO: 481000 - RNA, 20 nt, Human
cacacacacacacacacaca

SEQ ID NO: 481001 - RNA, 20 nt, Human
cacacacacacacacacaca

SEQ ID NO: 481002 - RNA, 20 nt, Human
cacacacacacacacacaca

SEQ ID NO: 481003 - RNA, 20 nt, Human
cacacacacacacacacaca

SEQ ID NO: 481004 - RNA, 22 nt, Human
cacacacacacacacacacaca

SEQ ID NO: 481005 - RNA, 26 nt, Human
cacacacacacacacacacacacaca

SEQ ID NO: 481006 - RNA, 31 nt, Human
cacacacauauacauacacacacacacacag

SEQ ID NO: 481007 - RNA, 20 nt, Human
cacacagcccagaccaggca

SEQ ID NO: 481008 - RNA, 19 nt, Human
cacagcccagaccaggcag

SEQ ID NO: 481009 - RNA, 21 nt, Human
caccagcucucugcauccucc

SEQ ID NO: 481010 - RNA, 18 nt, Human
cacccagggcagugggga

SEQ ID NO: 481011 - RNA, 19 nt, Human
cacccuaggcagcaguggg

SEQ ID NO: 481012 - RNA, 28 nt, Human
cacugcauacaugggacagaugugugca

SEQ ID NO: 481013 - RNA, 18 nt, Human
cagaaaaccccacgccca

SEQ ID NO: 481014 - RNA, 22 nt, Human
cagaacacagaggaacaaacaa

SEQ ID NO: 481015 - RNA, 19 nt, Human
cagaugccacucccagccu

SEQ ID NO: 481016 - RNA, 19 nt, Human
cagcagccaguggcuccug

SEQ ID NO: 481017 - RNA, 21 nt, Human
cagcagcccagacccucacac

SEQ ID NO: 481018 - RNA, 19 nt, Human
cagcccagacccucacacc

SEQ ID NO: 481019 - RNA, 25 nt, Human
cagcccagacccucacaccagcagc

SEQ ID NO: 481020 - RNA, 23 nt, Human
cagcgcaggcccagccugggguu

SEQ ID NO: 481021 - RNA, 19 nt, Human
cagcggcaggcugucccag

SEQ ID NO: 481022 - RNA, 20 nt, Human
caggagcaccugaguggggc

SEQ ID NO: 481023 - RNA, 19 nt, Human
caggagcccaccaaguccc

SEQ ID NO: 481024 - RNA, 22 nt, Human
caggcagaagggggcccggggu

SEQ ID NO: 481025 - RNA, 19 nt, Human
caggcucugccucaagucc

SEQ ID NO: 481026 - RNA, 23 nt, Human
caggcugucccaggcccuggggc

SEQ ID NO: 481027 - RNA, 19 nt, Human
cagggcagagggaauaugg

SEQ ID NO: 481028 - RNA, 19 nt, Human
cagggucccacuugccccu

SEQ ID NO: 481029 - RNA, 20 nt, Human
cagggucccacuugccccuc

SEQ ID NO: 481030 - RNA, 18 nt, Human
cagugggagguugcuggc

SEQ ID NO: 481031 - RNA, 26 nt, Human
cauauacauacacacacacacacaca

SEQ ID NO: 481032 - RNA, 21 nt, Human
ccaagccccaccugggcuaag

SEQ ID NO: 481033 - RNA, 25 nt, Human
ccacacacauauacauacacacaca

SEQ ID NO: 481034 - RNA, 24 nt, Human
ccacacagcugcugcaggcucugc

SEQ ID NO: 481035 - RNA, 24 nt, Human
ccacacccgcccgcuucugccaag

SEQ ID NO: 481036 - RNA, 22 nt, Human
ccaccaaguccccagggcagua

SEQ ID NO: 481037 - RNA, 21 nt, Human
ccaccauuuccccacagggua

SEQ ID NO: 481038 - RNA, 19 nt, Human
ccaccugggcuaagccagg

SEQ ID NO: 481039 - RNA, 19 nt, Human
ccacucccggccucagaug

SEQ ID NO: 481040 - RNA, 24 nt, Human
ccagaaaaccccacgcccagccca

SEQ ID NO: 481041 - RNA, 22 nt, Human
ccagaccaggcaggagcggccc

SEQ ID NO: 481042 - RNA, 18 nt, Human
ccagcagaggaguagggc

SEQ ID NO: 481043 - RNA, 18 nt, Human
ccagcccaccagccugcc

SEQ ID NO: 481044 - RNA, 21 nt, Human
ccaggcuauaaugccccugcc

SEQ ID NO: 481045 - RNA, 18 nt, Human
ccaguaccugcgcuccag

SEQ ID NO: 481046 - RNA, 20 nt, Human
ccaugcacccaccauuuccc

SEQ ID NO: 481047 - RNA, 20 nt, Human
cccacacacauauacauaca

SEQ ID NO: 481048 - RNA, 21 nt, Human
cccacacacauauacauacac

SEQ ID NO: 481049 - RNA, 22 nt, Human
cccacacacauauacauacaca

SEQ ID NO: 481050 - RNA, 28 nt, Human
cccacacacauauacauacacacacaca

SEQ ID NO: 481051 - RNA, 19 nt, Human
cccagaaaaccccacgccc

SEQ ID NO: 481052 - RNA, 20 nt, Human
ccccacgcccagcccaccag

SEQ ID NO: 481053 - RNA, 19 nt, Human
ccccagcaggcccagggag

SEQ ID NO: 481054 - RNA, 18 nt, Human
ccccagggcaguacuggg

SEQ ID NO: 481055 - RNA, 21 nt, Human
ccccggaggaacccugaaggc

SEQ ID NO: 481056 - RNA, 20 nt, Human
ccccuccccucaagccagga

SEQ ID NO: 481057 - RNA, 23 nt, Human
ccccugcuggacagcacgccccc

SEQ ID NO: 481058 - RNA, 19 nt, Human
ccccugggcgacaggguca

SEQ ID NO: 481059 - RNA, 21 nt, Human
cccgagagguguuccugggaa

SEQ ID NO: 481060 - RNA, 18 nt, Human
cccucaagccaggaccag

SEQ ID NO: 481061 - RNA, 19 nt, Human
cccugagggcagggcuugg

SEQ ID NO: 481062 - RNA, 21 nt, Human
cccugccacccuggggcucag

SEQ ID NO: 481063 - RNA, 22 nt, Human
cccugcuggacagcacgccccc

SEQ ID NO: 481064 - RNA, 19 nt, Human
cccuggggcuccaccugcu

SEQ ID NO: 481065 - RNA, 21 nt, Human
ccgcccgcuucugccaagccc

SEQ ID NO: 481066 - RNA, 23 nt, Human
ccugccacuccuggccucagaug

SEQ ID NO: 481067 - RNA, 18 nt, Human
ccuggccucagaugccac

SEQ ID NO: 481068 - RNA, 21 nt, Human
ccuggccucagaugccacucc

SEQ ID NO: 481069 - RNA, 18 nt, Human
cgcaggcccagccugggg

SEQ ID NO: 481070 - RNA, 20 nt, Human
cgcccgcuucugccaagccc

SEQ ID NO: 481071 - RNA, 20 nt, Human
cggccucagaugccacuccc

SEQ ID NO: 481072 - RNA, 22 nt, Human
cucacagcccucacaaagggcc

SEQ ID NO: 481073 - RNA, 18 nt, Human
cucagugcccagguggca

SEQ ID NO: 481074 - RNA, 28 nt, Human
cucggugccagggagagccugcucuccc

SEQ ID NO: 481075 - RNA, 21 nt, Human
cucugcccaguucuuaaaagg

SEQ ID NO: 481076 - RNA, 19 nt, Human
cugcagacuugcugggaac

SEQ ID NO: 481077 - RNA, 19 nt, Human
cugccucaaguccagcagc

SEQ ID NO: 481078 - RNA, 20 nt, Human
cugcgcuccagaagcucagg

SEQ ID NO: 481079 - RNA, 19 nt, Human
cugcugcaggcucugccuc

SEQ ID NO: 481080 - RNA, 19 nt, Human
cuugcugggaaccugggac

SEQ ID NO: 481081 - RNA, 19 nt, Human
gaagggggcccgggguccc

SEQ ID NO: 481082 - RNA, 25 nt, Human
gaccaggcaccugcccgauggcuga

SEQ ID NO: 481083 - RNA, 22 nt, Human
gacccgcuaacccacuaauggg

SEQ ID NO: 481084 - RNA, 20 nt, Human
gagcagagggcgggcagagc

SEQ ID NO: 481085 - RNA, 25 nt, Human
gagcaucccccacccagcuguccag

SEQ ID NO: 481086 - RNA, 18 nt, Human
gaggccacagggcagagg

SEQ ID NO: 481087 - RNA, 20 nt, Human
gagggcagggcuugggcagg

SEQ ID NO: 481088 - RNA, 20 nt, Human
gaguagggcuggguaguguc

SEQ ID NO: 481089 - RNA, 21 nt, Human
gauguugacggggccacacca

SEQ ID NO: 481090 - RNA, 19 nt, Human
gcacccagggcagugggga

SEQ ID NO: 481091 - RNA, 18 nt, Human
gcagcccagacccucaca

SEQ ID NO: 481092 - RNA, 23 nt, Human
gcaggccagcaggagcaccugag

SEQ ID NO: 481093 - RNA, 23 nt, Human
gcccgcuucugccaagccccacc

SEQ ID NO: 481094 - RNA, 23 nt, Human
gcccucacaaagggcucgguagc

SEQ ID NO: 481095 - RNA, 25 nt, Human
gcgcagcucacagcccucacaaagg

SEQ ID NO: 481096 - RNA, 22 nt, Human
gcgggcagagcccuugcuccuu

SEQ ID NO: 481097 - RNA, 23 nt, Human
gcggggggugaugggcagaaccu

SEQ ID NO: 481098 - RNA, 20 nt, Human
gcugggcuguggcugauguu

SEQ ID NO: 481099 - RNA, 21 nt, Human
gcuugggcaggccagcaggag

SEQ ID NO: 481100 - RNA, 18 nt, Human
ggacagggagggaggggc

SEQ ID NO: 481101 - RNA, 18 nt, Human
ggacaggugacacgccca

SEQ ID NO: 481102 - RNA, 19 nt, Human
ggacaggugacacgcccac

SEQ ID NO: 481103 - RNA, 20 nt, Human
ggagggaggggcgcccagcc

SEQ ID NO: 481104 - RNA, 19 nt, Human
ggcagagggaauauggggg

SEQ ID NO: 481105 - RNA, 19 nt, Human
ggcagggcuugggcaggcc

SEQ ID NO: 481106 - RNA, 21 nt, Human
ggccagcaggggcggggggug

SEQ ID NO: 481107 - RNA, 22 nt, Human
gggcagagggaauaugggggug

SEQ ID NO: 481108 - RNA, 24 nt, Human
gggcagggcccagaaaaccccacg

SEQ ID NO: 481109 - RNA, 18 nt, Human
gggcuugggcaggccagc

SEQ ID NO: 481110 - RNA, 21 nt, Human
ggguaguguccacacagcugc

SEQ ID NO: 481111 - RNA, 23 nt, Human
gggugcacauccugggcaccagc

SEQ ID NO: 481112 - RNA, 23 nt, Human
gguacaggggcagccuuccuuga

SEQ ID NO: 481113 - RNA, 22 nt, Human
ggucagggaccccaggacugca

SEQ ID NO: 481114 - RNA, 25 nt, Human
gugcacccacacacauauacauaca

SEQ ID NO: 481115 - RNA, 20 nt, Human
uacacacacacacacacaca

SEQ ID NO: 481116 - RNA, 25 nt, Human
uacacacacacacacacacacacac

SEQ ID NO: 481117 - RNA, 26 nt, Human
uacauacacacacacacacacacaca

SEQ ID NO: 481118 - RNA, 20 nt, Human
uaccggggugcaccuuagga

SEQ ID NO: 481119 - RNA, 22 nt, Human
uaccggggugcaccuuaggagc

SEQ ID NO: 481120 - RNA, 19 nt, Human
ucagcuggccagacuccca

SEQ ID NO: 481121 - RNA, 19 nt, Human
uccacacagcugcugcagg

SEQ ID NO: 481122 - RNA, 24 nt, Human
uccacacagcugcugcaggcucug

SEQ ID NO: 481123 - RNA, 23 nt, Human
uccacacccgcccgcuucugcca

SEQ ID NO: 481124 - RNA, 25 nt, Human
ucccagccucagacgcagaugggcc

SEQ ID NO: 481125 - RNA, 21 nt, Human
ucccugagggcagggcuuggg

SEQ ID NO: 481126 - RNA, 23 nt, Human
ucccuggguaggccuggcuccgg

SEQ ID NO: 481127 - RNA, 18 nt, Human
uccugcugucucuggcug

SEQ ID NO: 481128 - RNA, 21 nt, Human
ucuccugcugucucuggcugu

SEQ ID NO: 481129 - RNA, 21 nt, Human
ucucuggcugucagugagacc

SEQ ID NO: 481130 - RNA, 19 nt, Human
ugacuguggccucugccca

SEQ ID NO: 481131 - RNA, 18 nt, Human
ugagggcagggcuugggc

SEQ ID NO: 481132 - RNA, 24 nt, Human
ugaggucagacccgcuaacccacu

SEQ ID NO: 481133 - RNA, 22 nt, Human
ugaggucagacccgcuaacccc

SEQ ID NO: 481134 - RNA, 23 nt, Human
ugagguggccuguccaagguucc

SEQ ID NO: 481135 - RNA, 24 nt, Human
ugcacccacacacauauacauaca

SEQ ID NO: 481136 - RNA, 22 nt, Human
ugcacccaccauuuccccacag

SEQ ID NO: 481137 - RNA, 18 nt, Human
ugccaaggcugcaguucc

SEQ ID NO: 481138 - RNA, 21 nt, Human
ugccacucccagccucagacg

SEQ ID NO: 481139 - RNA, 22 nt, Human
ugcuaagagagcugggggaggu

SEQ ID NO: 481140 - RNA, 22 nt, Human
ugcuuaagacgcacacagaaca

SEQ ID NO: 481141 - RNA, 22 nt, Human
uggacccacacagagccagaag

SEQ ID NO: 481142 - RNA, 21 nt, Human
uggagaaaggagcagaggacu

SEQ ID NO: 481143 - RNA, 20 nt, Human
uggcccagggccuuccaccu

SEQ ID NO: 481144 - RNA, 20 nt, Human
uggccucagaugccacuccc

SEQ ID NO: 481145 - RNA, 22 nt, Human
ugggaaccugggacaggugaca

SEQ ID NO: 481146 - RNA, 24 nt, Human
ugggaugcugcugacccaggagcc

SEQ ID NO: 481147 - RNA, 22 nt, Human
ugggcagaaccuaggggcccca

SEQ ID NO: 481148 - RNA, 24 nt, Human
ugggcgacagggucagggacccca

SEQ ID NO: 481149 - RNA, 23 nt, Human
uggggcugggcuguggcugaugu

SEQ ID NO: 481150 - RNA, 22 nt, Human
uggguaggaaugagcagagggc

SEQ ID NO: 481151 - RNA, 24 nt, Human
uggugugagaucugcagacccacc

SEQ ID NO: 481152 - RNA, 23 nt, Human
uguccacacagcugcugcaggcu

SEQ ID NO: 481153 - RNA, 21 nt, Human
uguccaccaggcuauaaugcc

SEQ ID NO: 481154 - RNA, 22 nt, Human
uguccagucacugccaaggcug

SEQ ID NO: 481155 - RNA, 18 nt, Human
uguggcccagggccuucc

SEQ ID NO: 481156 - RNA, 25 nt, Human
ugugggagguagacaggucucacug

SEQ ID NO: 481157 - RNA, 26 nt, Human
ugugugcacccacacacauauacaua

SEQ ID NO: 481158 - RNA, 21 nt, Human
uguugacggggccacaccagg

SEQ ID NO: 481159 - RNA, 18 nt, Human
uuggacccacacagagcc

SEQ ID NO: 481160 - RNA, 22 nt, Human
uuuuuuuuuuuuuuuuucgcga

SEQ ID NO: 481161 - RNA, 21 nt, Human
uuuuuuuuuuuuuuuuuucgg

SEQ ID NO: 481162 - RNA, 23 nt, Human
aaaaagaaguuaaagcaagaaga

SEQ ID NO: 481163 - RNA, 25 nt, Human
aaacuccaucucaaaaaauaaaaaa

SEQ ID NO: 481164 - RNA, 21 nt, Human
aaagcaagagggccgggcgcu

SEQ ID NO: 481165 - RNA, 19 nt, Human
aacauggugaaacgcuguc

SEQ ID NO: 481166 - RNA, 20 nt, Human
aacauggugaaacgcugucu

SEQ ID NO: 481167 - RNA, 21 nt, Human
aacauggugaaacgcugucuc

SEQ ID NO: 481168 - RNA, 23 nt, Human
aagaucgugccacugcacuccag

SEQ ID NO: 481169 - RNA, 18 nt, Human
aagcaacaauaauacaga

SEQ ID NO: 481170 - RNA, 20 nt, Human
aagcaagaagagagagaggg

SEQ ID NO: 481171 - RNA, 21 nt, Human
aagcucagaagccagggacac

SEQ ID NO: 481172 - RNA, 23 nt, Human
aaucgcuugaaccuggaggugga

SEQ ID NO: 481173 - RNA, 24 nt, Human
aauggcgugaaccugggaggcgga

SEQ ID NO: 481174 - RNA, 20 nt, Human
acagagcgagacuccgucuc

SEQ ID NO: 481175 - RNA, 23 nt, Human
acagagcgagacuccgucucaaa

SEQ ID NO: 481176 - RNA, 24 nt, Human
acagagcgagacuccgucucaaaa

SEQ ID NO: 481177 - RNA, 18 nt, Human
acagagugaaacuccauc

SEQ ID NO: 481178 - RNA, 20 nt, Human
acagagugaaacuccaucuc

SEQ ID NO: 481179 - RNA, 24 nt, Human
acagagugaaacuccaucucaaaa

SEQ ID NO: 481180 - RNA, 21 nt, Human
acagucagacauuacuuuggg

SEQ ID NO: 481181 - RNA, 21 nt, Human
acccccacuccauccuggagg

SEQ ID NO: 481182 - RNA, 21 nt, Human
acccucugcaaaacugcagcc

SEQ ID NO: 481183 - RNA, 24 nt, Human
accgcacuccagccugggcgacag

SEQ ID NO: 481184 - RNA, 26 nt, Human
accgcacuccagccugggcgacagag

SEQ ID NO: 481185 - RNA, 24 nt, Human
acgaggguagaucaugaggucagg

SEQ ID NO: 481186 - RNA, 22 nt, Human
acgcugaguuccacaugccgac

SEQ ID NO: 481187 - RNA, 24 nt, Human
acuccagccugggagacagaguga

SEQ ID NO: 481188 - RNA, 18 nt, Human
acugcacuccagccuggg

SEQ ID NO: 481189 - RNA, 24 nt, Human
acugcacuccagccugggagacag

SEQ ID NO: 481190 - RNA, 18 nt, Human
acuggagccggauguggc

SEQ ID NO: 481191 - RNA, 18 nt, Human
agcacuuugggaggccga

SEQ ID NO: 481192 - RNA, 24 nt, Human
agcacuuugggaggccgaggcggg

SEQ ID NO: 481193 - RNA, 24 nt, Human
agccuggccaacguggugaagccc

SEQ ID NO: 481194 - RNA, 24 nt, Human
agccugggcgacagagcgagacuc

SEQ ID NO: 481195 - RNA, 19 nt, Human
agcgugugccuugccuaca

SEQ ID NO: 481196 - RNA, 22 nt, Human
aggaagcaacaauaauacagaa

SEQ ID NO: 481197 - RNA, 20 nt, Human
aggagaagaggaauccgagc

SEQ ID NO: 481198 - RNA, 24 nt, Human
aggagaagaggaauccgagccgca

SEQ ID NO: 481199 - RNA, 22 nt, Human
aggcaggagaaucgcuugaacc

SEQ ID NO: 481200 - RNA, 24 nt, Human
aggcaggagaaucgcuugaaccug

SEQ ID NO: 481201 - RNA, 22 nt, Human
aggcaggagaauggcgugaacc

SEQ ID NO: 481202 - RNA, 24 nt, Human
aggcaggagaauggcgugaaccug

SEQ ID NO: 481203 - RNA, 24 nt, Human
aggcgagguggugggcgccuguag

SEQ ID NO: 481204 - RNA, 21 nt, Human
aggcggagguugcagugagcc

SEQ ID NO: 481205 - RNA, 24 nt, Human
aggcggagguugcagugagccgag

SEQ ID NO: 481206 - RNA, 26 nt, Human
aggcggguggaccaguugaggucagg

SEQ ID NO: 481207 - RNA, 18 nt, Human
aggcguggcacuggagcc

SEQ ID NO: 481208 - RNA, 20 nt, Human
aggcugaggcaggagaaucg

SEQ ID NO: 481209 - RNA, 24 nt, Human
aggcugaggcaggagaaucgcuug

SEQ ID NO: 481210 - RNA, 19 nt, Human
aggcugaggcaggagaaug

SEQ ID NO: 481211 - RNA, 24 nt, Human
aggugccguggcucacaccuguaa

SEQ ID NO: 481212 - RNA, 24 nt, Human
agguggagguugcagugagccaag

SEQ ID NO: 481213 - RNA, 24 nt, Human
aggugggguggugggcgccuguaa

SEQ ID NO: 481214 - RNA, 19 nt, Human
aguaaaggcgaaggaaagg

SEQ ID NO: 481215 - RNA, 24 nt, Human
aguugaggucaggaguucaagacc

SEQ ID NO: 481216 - RNA, 22 nt, Human
aucacccucugcaaaacugcag

SEQ ID NO: 481217 - RNA, 24 nt, Human
aucgugccacugcacuccagccug

SEQ ID NO: 481218 - RNA, 24 nt, Human
caacguggugaagccccgucucua

SEQ ID NO: 481219 - RNA, 24 nt, Human
caagaccagccuggccaacguggu

SEQ ID NO: 481220 - RNA, 24 nt, Human
cacaccuguaaucccagcacuuug

SEQ ID NO: 481221 - RNA, 24 nt, Human
caccgcacuccagccugggcgaca

SEQ ID NO: 481222 - RNA, 23 nt, Human
caccuguaaucccagcacuuugg

SEQ ID NO: 481223 - RNA, 24 nt, Human
caccuguaaucccagcacuuuggg

SEQ ID NO: 481224 - RNA, 24 nt, Human
cacgccuguaaucccagcacuuug

SEQ ID NO: 481225 - RNA, 22 nt, Human
cacuccagccugggagacagag

SEQ ID NO: 481226 - RNA, 23 nt, Human
cacuccagccugggagacagagu

SEQ ID NO: 481227 - RNA, 24 nt, Human
cacuccagccugggagacagagug

SEQ ID NO: 481228 - RNA, 23 nt, Human
cacuccagccugggcgacagagc

SEQ ID NO: 481229 - RNA, 24 nt, Human
cacuccagccugggcgacagagcg

SEQ ID NO: 481230 - RNA, 18 nt, Human
cacugcacuccagccugg

SEQ ID NO: 481231 - RNA, 19 nt, Human
cacugcacuccagccuggg

SEQ ID NO: 481232 - RNA, 22 nt, Human
cacugcacuccagccugggaga

SEQ ID NO: 481233 - RNA, 24 nt, Human
cacugcacuccagccugggagaca

SEQ ID NO: 481234 - RNA, 24 nt, Human
cacugcacuccagccugggagaca

SEQ ID NO: 481235 - RNA, 18 nt, Human
cagcacuuugggaggccg

SEQ ID NO: 481236 - RNA, 22 nt, Human
cagcacuuugggaggccgaggc

SEQ ID NO: 481237 - RNA, 24 nt, Human
cagcacuuugggaggccgaggcgg

SEQ ID NO: 481238 - RNA, 19 nt, Human
cagcagggacaggcguggc

SEQ ID NO: 481239 - RNA, 24 nt, Human
cagcuacucaggaggcugaggcag

SEQ ID NO: 481240 - RNA, 24 nt, Human
cagcuacuugggaggcugaggcag

SEQ ID NO: 481241 - RNA, 20 nt, Human
cagugcccuccugggacccc

SEQ ID NO: 481242 - RNA, 23 nt, Human
caguugaggucaggaguucaaga

SEQ ID NO: 481243 - RNA, 22 nt, Human
caucgcccuugcucaggagcca

SEQ ID NO: 481244 - RNA, 20 nt, Human
ccaccgcacuccagccuggg

SEQ ID NO: 481245 - RNA, 21 nt, Human
ccaccgcacuccagccugggc

SEQ ID NO: 481246 - RNA, 23 nt, Human
ccaccgcacuccagccugggcga

SEQ ID NO: 481247 - RNA, 23 nt, Human
ccaccgcacuccagccugggcga

SEQ ID NO: 481248 - RNA, 24 nt, Human
ccaccgcacuccagccugggcgac

SEQ ID NO: 481249 - RNA, 19 nt, Human
ccacugcacuccagccugg

SEQ ID NO: 481250 - RNA, 20 nt, Human
ccacugcacuccagccuggg

SEQ ID NO: 481251 - RNA, 22 nt, Human
ccacugcacuccagccugggag

SEQ ID NO: 481252 - RNA, 24 nt, Human
ccacugcacuccagccugggagac

SEQ ID NO: 481253 - RNA, 18 nt, Human
ccaggugggguggugggc

SEQ ID NO: 481254 - RNA, 24 nt, Human
cccacuccauccuggaggggagca

SEQ ID NO: 481255 - RNA, 21 nt, Human
cccccacuccauccuggaggg

SEQ ID NO: 481256 - RNA, 23 nt, Human
cccgcagcagggacaggcguggc

SEQ ID NO: 481257 - RNA, 26 nt, Human
ccuacaguuggggcuggugguggggc

SEQ ID NO: 481258 - RNA, 20 nt, Human
ccuccugggacccucuacca

SEQ ID NO: 481259 - RNA, 18 nt, Human
ccucucccaaguaaaggc

SEQ ID NO: 481260 - RNA, 20 nt, Human
ccuggagguggagguugcag

SEQ ID NO: 481261 - RNA, 23 nt, Human
ccuggccaacguggugaagcccc

SEQ ID NO: 481262 - RNA, 24 nt, Human
ccuggccaacguggugaagccccg

SEQ ID NO: 481263 - RNA, 20 nt, Human
ccuggcuaacauggugaaac

SEQ ID NO: 481264 - RNA, 19 nt, Human
ccugggaggcggagguugc

SEQ ID NO: 481265 - RNA, 22 nt, Human
ccugggcgacagagcgagacuc

SEQ ID NO: 481266 - RNA, 22 nt, Human
ccuguaaucccagcacuuuggg

SEQ ID NO: 481267 - RNA, 21 nt, Human
ccuguaauuccagcuacucag

SEQ ID NO: 481268 - RNA, 22 nt, Human
ccuguaauuccagcuacucagg

SEQ ID NO: 481269 - RNA, 18 nt, Human
ccuguagucccagcuacu

SEQ ID NO: 481270 - RNA, 21 nt, Human
ccuguagucccagcuacuugg

SEQ ID NO: 481271 - RNA, 22 nt, Human
ccuguagucccagcuacuuggg

SEQ ID NO: 481272 - RNA, 24 nt, Human
cgaggcggguggaccaguugaggu

SEQ ID NO: 481273 - RNA, 21 nt, Human
cgaggguagaucaugagguca

SEQ ID NO: 481274 - RNA, 24 nt, Human
cgagguugcgccaccgcacuccag

SEQ ID NO: 481275 - RNA, 24 nt, Human
cgccuguaauuccagcuacucagg

SEQ ID NO: 481276 - RNA, 24 nt, Human
cggguggaccaguugaggucagga

SEQ ID NO: 481277 - RNA, 24 nt, Human
cguggcucacaccuguaaucccag

SEQ ID NO: 481278 - RNA, 24 nt, Human
cucaaaaaauaaaaaaauaaacac

SEQ ID NO: 481279 - RNA, 22 nt, Human
cucacaccuguaaucccagcac

SEQ ID NO: 481280 - RNA, 24 nt, Human
cucacaccuguaaucccagcacuu

SEQ ID NO: 481281 - RNA, 22 nt, Human
cucacgccuguaaucccagcac

SEQ ID NO: 481282 - RNA, 24 nt, Human
cucacgccuguaaucccagcacuu

SEQ ID NO: 481283 - RNA, 19 nt, Human
cuccgucucaaaaaaaaaa

SEQ ID NO: 481284 - RNA, 26 nt, Human
cuccugggacccucuaccacaccauc

SEQ ID NO: 481285 - RNA, 19 nt, Human
cugaguuccacaugccgac

SEQ ID NO: 481286 - RNA, 24 nt, Human
cuggagguggagguugcagugagc

SEQ ID NO: 481287 - RNA, 19 nt, Human
gaagccccgucucuacuaa

SEQ ID NO: 481288 - RNA, 23 nt, Human
gaauacuuuuuauucuugacugu

SEQ ID NO: 481289 - RNA, 20 nt, Human
gacagagugaaacuccaucu

SEQ ID NO: 481290 - RNA, 24 nt, Human
gaccaguugaggucaggaguucaa

SEQ ID NO: 481291 - RNA, 21 nt, Human
gacuacgcugugaaaaccagg

SEQ ID NO: 481292 - RNA, 25 nt, Human
gaggcggguggaccaguugagguca

SEQ ID NO: 481293 - RNA, 23 nt, Human
gagguugcagugagccaagaucg

SEQ ID NO: 481294 - RNA, 23 nt, Human
gagguugcagugagccgagguug

SEQ ID NO: 481295 - RNA, 23 nt, Human
gcacuccagccugggagacagag

SEQ ID NO: 481296 - RNA, 24 nt, Human
gcacuccagccugggcgacagagc

SEQ ID NO: 481297 - RNA, 24 nt, Human
gccaacguggugaagccccgucuc

SEQ ID NO: 481298 - RNA, 20 nt, Human
gccaagaucgugccacugca

SEQ ID NO: 481299 - RNA, 22 nt, Human
gccaccgcacuccagccugggc

SEQ ID NO: 481300 - RNA, 22 nt, Human
gcccuccugggacccucuacca

SEQ ID NO: 481301 - RNA, 18 nt, Human
gccggggaggucggggcg

SEQ ID NO: 481302 - RNA, 23 nt, Human
gccuguaauuccagcuacucagg

SEQ ID NO: 481303 - RNA, 23 nt, Human
gccuguagucccagcuacuuggg

SEQ ID NO: 481304 - RNA, 22 nt, Human
gcgugaaccugggaggcggagg

SEQ ID NO: 481305 - RNA, 18 nt, Human
gcuaacauggugaaacgc

SEQ ID NO: 481306 - RNA, 24 nt, Human
gcuaacauggugaaacgcugucuc

SEQ ID NO: 481307 - RNA, 22 nt, Human
gcugaggcaggagaauggcgug

SEQ ID NO: 481308 - RNA, 21 nt, Human
ggaaaaaccaacagucagagg

SEQ ID NO: 481309 - RNA, 22 nt, Human
ggaccaguugaggucaggaguu

SEQ ID NO: 481310 - RNA, 20 nt, Human
ggagguugcagugagccaag

SEQ ID NO: 481311 - RNA, 24 nt, Human
ggagguugcagugagccaagaucg

SEQ ID NO: 481312 - RNA, 20 nt, Human
ggagguugcagugagccgag

SEQ ID NO: 481313 - RNA, 20 nt, Human
ggagguugcagugagccgag

SEQ ID NO: 481314 - RNA, 24 nt, Human
ggagguugcagugagccgagguug

SEQ ID NO: 481315 - RNA, 21 nt, Human
ggccaggugccguggcucaca

SEQ ID NO: 481316 - RNA, 23 nt, Human
ggcgcuguggcucacgccuguaa

SEQ ID NO: 481317 - RNA, 19 nt, Human
ggguagaucaugaggucag

SEQ ID NO: 481318 - RNA, 25 nt, Human
ggguggaccaguugaggucaggagu

SEQ ID NO: 481319 - RNA, 21 nt, Human
gguagaucaugaggucaggag

SEQ ID NO: 481320 - RNA, 21 nt, Human
gguggaccaguugaggucagg

SEQ ID NO: 481321 - RNA, 23 nt, Human
gguggugggcgccuguaguccca

SEQ ID NO: 481322 - RNA, 24 nt, Human
gguggugggcgccuguagucccag

SEQ ID NO: 481323 - RNA, 20 nt, Human
gucauuuacaggagaagagg

SEQ ID NO: 481324 - RNA, 19 nt, Human
gucucuacuaaaaauacaa

SEQ ID NO: 481325 - RNA, 24 nt, Human
gugaaccugggaggcggagguugc

SEQ ID NO: 481326 - RNA, 22 nt, Human
guggcucacgccuguaauccca

SEQ ID NO: 481327 - RNA, 23 nt, Human
guggugggcgccuguaauuccag

SEQ ID NO: 481328 - RNA, 19 nt, Human
guugcagugagccgagguu

SEQ ID NO: 481329 - RNA, 24 nt, Human
guugcgccaccgcacuccagccug

SEQ ID NO: 481330 - RNA, 20 nt, Human
uaaaauccaaauuaaacagc

SEQ ID NO: 481331 - RNA, 22 nt, Human
uaacauggugaaacgcugucuc

SEQ ID NO: 481332 - RNA, 24 nt, Human
uaacauggugaaacgcugucucua

SEQ ID NO: 481333 - RNA, 24 nt, Human
uaccacaccauccuguuugggcaa

SEQ ID NO: 481334 - RNA, 23 nt, Human
ucagcacggagccugaugcuuag

SEQ ID NO: 481335 - RNA, 23 nt, Human
ucagugcccuccugggacccucu

SEQ ID NO: 481336 - RNA, 24 nt, Human
ucaugaggucaggagauugagacc

SEQ ID NO: 481337 - RNA, 23 nt, Human
uccagccugggcgacagagcgag

SEQ ID NO: 481338 - RNA, 24 nt, Human
uccagccugggcgacagagcgaga

SEQ ID NO: 481339 - RNA, 21 nt, Human
ucccaaguaaaggcgaaggaa

SEQ ID NO: 481340 - RNA, 20 nt, Human
uccccugugaagggaaaaac

SEQ ID NO: 481341 - RNA, 22 nt, Human
uccccugugaagggaaaaacca

SEQ ID NO: 481342 - RNA, 21 nt, Human
uccgucucaaaaaaaaaagaa

SEQ ID NO: 481343 - RNA, 23 nt, Human
ucgcuugaaccuggagguggagg

SEQ ID NO: 481344 - RNA, 23 nt, Human
ucgugccacugcacuccagccug

SEQ ID NO: 481345 - RNA, 18 nt, Human
ucuccagcuugaucaccc

SEQ ID NO: 481346 - RNA, 24 nt, Human
ucucuacuaaaaauacaaaaaauu

SEQ ID NO: 481347 - RNA, 24 nt, Human
ucugcaaaacugcagcccgcagca

SEQ ID NO: 481348 - RNA, 24 nt, Human
ugaaccugggaggcggagguugca

SEQ ID NO: 481349 - RNA, 18 nt, Human
ugacaguucagugcccuc

SEQ ID NO: 481350 - RNA, 24 nt, Human
ugagaccauccuggcuaacauggu

SEQ ID NO: 481351 - RNA, 22 nt, Human
ugagccaagaucgugccacugc

SEQ ID NO: 481352 - RNA, 22 nt, Human
ugagccgagguugcgccaccgc

SEQ ID NO: 481353 - RNA, 18 nt, Human
ugaggaagcaacaauaau

SEQ ID NO: 481354 - RNA, 20 nt, Human
ugaggcaggagaaucgcuug

SEQ ID NO: 481355 - RNA, 24 nt, Human
ugaggcaggagaaucgcuugaacc

SEQ ID NO: 481356 - RNA, 25 nt, Human
ugaggcaggagaaucgcuugaaccu

SEQ ID NO: 481357 - RNA, 23 nt, Human
ugaggcaggagaauggcgugaac

SEQ ID NO: 481358 - RNA, 24 nt, Human
ugaggcaggagaauggcgugaacc

SEQ ID NO: 481359 - RNA, 25 nt, Human
ugaggcaggagaauggcgugaaccu

SEQ ID NO: 481360 - RNA, 21 nt, Human
ugccgacccccacuccauccu

SEQ ID NO: 481361 - RNA, 23 nt, Human
ugccuacaguuggggcugguggu

SEQ ID NO: 481362 - RNA, 24 nt, Human
uggaccaguugaggucaggaguuc

SEQ ID NO: 481363 - RNA, 24 nt, Human
uggccaacguggugaagccccguc

SEQ ID NO: 481364 - RNA, 24 nt, Human
uggcgugaaccugggaggcggagg

SEQ ID NO: 481365 - RNA, 21 nt, Human
uggcucacaccuguaauccca

SEQ ID NO: 481366 - RNA, 22 nt, Human
uggcucacaccuguaaucccag

SEQ ID NO: 481367 - RNA, 24 nt, Human
uggcucacaccuguaaucccagca

SEQ ID NO: 481368 - RNA, 24 nt, Human
uggcucacgccuguaaucccagca

SEQ ID NO: 481369 - RNA, 23 nt, Human
uggcugauucccuugggguuagu

SEQ ID NO: 481370 - RNA, 19 nt, Human
ugggaggccgaggcgggug

SEQ ID NO: 481371 - RNA, 24 nt, Human
ugggaggccgaggcggguggacca

SEQ ID NO: 481372 - RNA, 27 nt, Human
ugggaggccgaucacgaggguagauca

SEQ ID NO: 481373 - RNA, 29 nt, Human
ugggaggcggagguugcagugacaacggu

SEQ ID NO: 481374 - RNA, 24 nt, Human
ugggaggcggagguugcagugagc

SEQ ID NO: 481375 - RNA, 18 nt, Human
ugggaggcugaggcagga

SEQ ID NO: 481376 - RNA, 24 nt, Human
ugggaggcugaggcaggagaaugg

SEQ ID NO: 481377 - RNA, 19 nt, Human
uggugaaacgcugucucua

SEQ ID NO: 481378 - RNA, 21 nt, Human
uggugggcgccuguaauucca

SEQ ID NO: 481379 - RNA, 22 nt, Human
ugguggggcaaggagcagaugg

SEQ ID NO: 481380 - RNA, 24 nt, Human
ugguggggcaaggagcagaugguc

SEQ ID NO: 481381 - RNA, 19 nt, Human
ugugaagggaaaaaccaac

SEQ ID NO: 481382 - RNA, 24 nt, Human
uguggcucacgccuguaaucccag

SEQ ID NO: 481383 - RNA, 22 nt, Human
uuagaaguggaaauguuagaag

SEQ ID NO: 481384 - RNA, 24 nt, Human
uuagccaggcgagguggugggcgc

SEQ ID NO: 481385 - RNA, 24 nt, Human
uuagccaggugggguggugggcgc

SEQ ID NO: 481386 - RNA, 24 nt, Human
uucugucauggucucccucuccca

SEQ ID NO: 481387 - RNA, 23 nt, Human
uugaaccuggagguggagguugc

SEQ ID NO: 481388 - RNA, 22 nt, Human
uugcagugagccaagaucgugc

SEQ ID NO: 481389 - RNA, 22 nt, Human
uugcagugagccgagguugcgc

SEQ ID NO: 481390 - RNA, 18 nt, Human
aacuaaaugcagcucugc

SEQ ID NO: 481391 - RNA, 22 nt, Human
acaacgcuuccuuccuucaaag

SEQ ID NO: 481392 - RNA, 20 nt, Human
ccccaguggaagugaaauug

SEQ ID NO: 481393 - RNA, 18 nt, Human
ccucguucacugcucccc

SEQ ID NO: 481394 - RNA, 21 nt, Human
cgcuuccuuccuucaaaguca

SEQ ID NO: 481395 - RNA, 19 nt, Human
gcuuccuuccuucaaaguc

SEQ ID NO: 481396 - RNA, 19 nt, Human
uccccaguggaagugaaau

SEQ ID NO: 481397 - RNA, 24 nt, Human
ugacuccagucugaagagggugau

SEQ ID NO: 481398 - RNA, 24 nt, Human
ugagccccccucguucacugcucc

SEQ ID NO: 481399 - RNA, 25 nt, Human
uuccaagggcccgccacuaauuccu

SEQ ID NO: 481400 - RNA, 21 nt, Human
aaaguaaauguuugugauucu

SEQ ID NO: 481401 - RNA, 30 nt, Human
aagcagcucacagucggucugccuccccgg

SEQ ID NO: 481402 - RNA, 30 nt, Human; identical to SEQ ID NO: 481401

SEQ ID NO: 481403 - RNA, 20 nt, Human
accagccccgcgccccgacc

SEQ ID NO: 481404 - RNA, 26 nt, Human
accccggacccuccccugaacuuccu

SEQ ID NO: 481405 - RNA, 22 nt, Human
acccggcacccuccccugaacu

SEQ ID NO: 481406 - RNA, 23 nt, Human
agcggcggcccugggaggggccg

SEQ ID NO: 481407 - RNA, 23 nt, Human
agcggcggcccugggaggggccg

SEQ ID NO: 481408 - RNA, 20 nt, Human
aggacccggcacccuccccu

SEQ ID NO: 481409 - RNA, 22 nt, Human
aggaggaagugagguccuggcc

SEQ ID NO: 481410 - RNA, 22 nt, Human
aggaggaagugagguccuggcc

SEQ ID NO: 481411 - RNA, 24 nt, Human
aggcagcugcgggaccuggguggu

SEQ ID NO: 481412 - RNA, 21 nt, Human
aggccccgggaaggaccccgg

SEQ ID NO: 481413 - RNA, 21 nt, Human
agggaggaggcgcgccgcggg

SEQ ID NO: 481414 - RNA, 22 nt, Human
agggaggaggcggcgccgcggg

SEQ ID NO: 481415 - RNA, 22 nt, Human
aggggcagaggaggaagugagg

SEQ ID NO: 481416 - RNA, 24 nt, Human
aggggcagaggaggaagugagguc

SEQ ID NO: 481417 - RNA, 24 nt, Human
aggugggguccgggacagccacgg

SEQ ID NO: 481418 - RNA, 24 nt, Human
aggugggguccgggacagccacgg

SEQ ID NO: 481419 - RNA, 18 nt, Human
caagcagcucacagucgg

SEQ ID NO: 481420 - RNA, 18 nt, Human
caagcagcucacagucgg

SEQ ID NO: 481421 - RNA, 21 nt, Human
cacagaccagccccgcgcccc

SEQ ID NO: 481422 - RNA, 25 nt, Human
cacagcccagccccgcgccccgacc

SEQ ID NO: 481423 - RNA, 21 nt, Human
cacggagggcucugugucccc

SEQ ID NO: 481424 - RNA, 21 nt, Human
cacggagggcucugugucccc

SEQ ID NO: 481425 - RNA, 20 nt, Human
cacugccaucuuucuugcgg

SEQ ID NO: 481426 - RNA, 20 nt, Human
cacugccaucuuucuugcgg

SEQ ID NO: 481427 - RNA, 18 nt, Human
cagcggcagcugcgggac

SEQ ID NO: 481428 - RNA, 20 nt, Human
caggugcugggaggggcagg

SEQ ID NO: 481429 - RNA, 20 nt, Human
caggugcugggaggggcagg

SEQ ID NO: 481430 - RNA, 22 nt, Human
ccaaagccccgccggggugcgc

SEQ ID NO: 481431 - RNA, 22 nt, Human
ccaaagccccgccggggugcgc

SEQ ID NO: 481432 - RNA, 21 nt, Human
ccacugccaucuuucuugcgg

SEQ ID NO: 481433 - RNA, 21 nt, Human
ccacugccaucuuucuugcgg

SEQ ID NO: 481434 - RNA, 20 nt, Human
ccaggccccgggaaggaccc

SEQ ID NO: 481435 - RNA, 19 nt, Human
ccaggcccgggaaggaccc

SEQ ID NO: 481436 - RNA, 20 nt, Human
ccagguggugguucugguuc

SEQ ID NO: 481437 - RNA, 28 nt, Human
cccagccccgcgccccgaccgcgucaca

SEQ ID NO: 481438 - RNA, 22 nt, Human
ccccgggcaccacggagggcuc

SEQ ID NO: 481439 - RNA, 22 nt, Human
ccccgggcaccacggagggcuc

SEQ ID NO: 481440 - RNA, 23 nt, Human
ccccgguggugcguggggggcgg

SEQ ID NO: 481441 - RNA, 23 nt, Human
cccggacccuccccugaacuucc

SEQ ID NO: 481442 - RNA, 19 nt, Human
cccggcacccuccccugaa

SEQ ID NO: 481443 - RNA, 25 nt, Human
cccggcacccuccccugaacuuccc

SEQ ID NO: 481444 - RNA, 18 nt, Human
ccgggacagccacggagc

SEQ ID NO: 481445 - RNA, 18 nt, Human
ccugggugguuccgacac

SEQ ID NO: 481446 - RNA, 22 nt, Human
cgccaggccccgggaaggaccc

SEQ ID NO: 481447 - RNA, 21 nt, Human
cgccaggcccgggaaggaccc

SEQ ID NO: 481448 - RNA, 18 nt, Human
cgccgcggggccacagac

SEQ ID NO: 481449 - RNA, 18 nt, Human
cgcgaggcccccccggug

SEQ ID NO: 481450 - RNA, 24 nt, Human
cgcggccgggcgcucaaaacuccc

SEQ ID NO: 481451 - RNA, 24 nt, Human
cgcggccgggcgcucaaaacuccu

SEQ ID NO: 481452 - RNA, 21 nt, Human
cggcccugggaggggccgggc

SEQ ID NO: 481453 - RNA, 21 nt, Human
cggcccugggaggggccgggc

SEQ ID NO: 481454 - RNA, 24 nt, Human
cggccgguggcgggcggcagggaa

SEQ ID NO: 481455 - RNA, 25 nt, Human
cgggaaggacccggcacccuccccu

SEQ ID NO: 481456 - RNA, 22 nt, Human
cuccagguggugguucugguuc

SEQ ID NO: 481457 - RNA, 21 nt, Human
cuccucgggcuccagguggug

SEQ ID NO: 481458 - RNA, 20 nt, Human
cucgugcacgcugcgcgcgg

SEQ ID NO: 481459 - RNA, 22 nt, Human
cuuccuggcuacucauuuccag

SEQ ID NO: 481460 - RNA, 22 nt, Human
cuuccuggcuacucauuuccag

SEQ ID NO: 481461 - RNA, 18 nt, Human
gaacgggcgcgaccucac

SEQ ID NO: 481462 - RNA, 21 nt, Human
gaagcgucagugacgccgcca

SEQ ID NO: 481463 - RNA, 21 nt, Human
gaagcgucagugacgccgcca

SEQ ID NO: 481464 - RNA, 19 nt, Human
gacggccgcaggaugggga

SEQ ID NO: 481465 - RNA, 19 nt, Human
gacggccgcaggaugggga

SEQ ID NO: 481466 - RNA, 26 nt, Human
gacggccgcaggauggggacaagcag

SEQ ID NO: 481467 - RNA, 26 nt, Human
gacggccgcaggauggggacaagcag

SEQ ID NO: 481468 - RNA, 21 nt, Human
gcccagccccgcgccccgacc

SEQ ID NO: 481469 - RNA, 18 nt, Human
gcccugggaggggccggg

SEQ ID NO: 481470 - RNA, 19 nt, Human
gcgaagcgucagugacgcc

SEQ ID NO: 481471 - RNA, 19 nt, Human
gcgaagcgucagugacgcc

SEQ ID NO: 481472 - RNA, 19 nt, Human
gcgccgcggggccacagac

SEQ ID NO: 481473 - RNA, 23 nt, Human
gcgggcgggggcggugcgaacgg

SEQ ID NO: 481474 - RNA, 18 nt, Human
ggaccagggaggaggcgc

SEQ ID NO: 481475 - RNA, 20 nt, Human
ggcaccacggagggcucugu

SEQ ID NO: 481476 - RNA, 20 nt, Human
ggcaccacggagggcucugu

SEQ ID NO: 481477 - RNA, 18 nt, Human
ggcagaggaggaagugag

SEQ ID NO: 481478 - RNA, 19 nt, Human
ggcagggaagagguggggu

SEQ ID NO: 481479 - RNA, 20 nt, Human
ggcaggggcaggggcagagg

SEQ ID NO: 481480 - RNA, 20 nt, Human
ggcaggggcaggggcagagg

SEQ ID NO: 481481 - RNA, 22 nt, Human
ggcaggggcaggggggaggucc

SEQ ID NO: 481482 - RNA, 22 nt, Human
ggcaggggcaggggggaggucc

SEQ ID NO: 481483 - RNA, 19 nt, Human
ggcccagagguuccggccg

SEQ ID NO: 481484 - RNA, 19 nt, Human
ggcccagagguuccggccg

SEQ ID NO: 481485 - RNA, 21 nt, Human
ggccgguggcgggcggcagga

SEQ ID NO: 481486 - RNA, 19 nt, Human
ggccgguggugggcggcag

SEQ ID NO: 481487 - RNA, 23 nt, Human
ggccgguggugggcggcagagaa

SEQ ID NO: 481488 - RNA, 20 nt, Human
ggcgaucaucugcuuggccu

SEQ ID NO: 481489 - RNA, 19 nt, Human
gggcagaggaggaagugag

SEQ ID NO: 481490 - RNA, 18 nt, Human
gggcggcgcggggcgcgg

SEQ ID NO: 481491 - RNA, 18 nt, Human
gggcggcgcggggcgcgg

SEQ ID NO: 481492 - RNA, 18 nt, Human
gggcgggcugcagggugu

SEQ ID NO: 481493 - RNA, 18 nt, Human
gggcgggcugcagggugu

SEQ ID NO: 481494 - RNA, 19 nt, Human
ggugcgaacgggcgcgacc

SEQ ID NO: 481495 - RNA, 21 nt, Human
gucacagccaaagccccgccg

SEQ ID NO: 481496 - RNA, 21 nt, Human
gucacagccaaagccccgccg

SEQ ID NO: 481497 - RNA, 18 nt, Human
gugggccaggugcuggga

SEQ ID NO: 481498 - RNA, 18 nt, Human
gugggccaggugcuggga

SEQ ID NO: 481499 - RNA, 18 nt, Human
guggugggcggcagagaa

SEQ ID NO: 481500 - RNA, 21 nt, Human
guuccggccgcgaugccguca

SEQ ID NO: 481501 - RNA, 21 nt, Human
guuccggccgcgaugccguca

SEQ ID NO: 481502 - RNA, 25 nt, Human
ucaaaacuccucgugcacgcugcgc

SEQ ID NO: 481503 - RNA, 22 nt, Human
ucauuuccagcgaaguuuaucu

SEQ ID NO: 481504 - RNA, 18 nt, Human
uccccgggcaccacggag

SEQ ID NO: 481505 - RNA, 18 nt, Human
uccccgggcaccacggag

SEQ ID NO: 481506 - RNA, 23 nt, Human
uccccgggcaccacggagggcuc

SEQ ID NO: 481507 - RNA, 23 nt, Human
uccccgggcaccacggagggcuc

SEQ ID NO: 481508 - RNA, 25 nt, Human
uccccgggcaccacggagggcucug

SEQ ID NO: 481509 - RNA, 25 nt, Human
uccccgggcaccacggagggcucug

SEQ ID NO: 481510 - RNA, 20 nt, Human
uccccugaacuuccuggcua

SEQ ID NO: 481511 - RNA, 20 nt, Human
uccccugaacuuccuggcua

SEQ ID NO: 481512 - RNA, 20 nt, Human
uccccugaacuuccuggcua

SEQ ID NO: 481513 - RNA, 20 nt, Human
uccccugaacuuccuggcua

SEQ ID NO: 481514 - RNA, 18 nt, Human
uccucgggcuccaggugg

SEQ ID NO: 481515 - RNA, 19 nt, Human
ucgagggaccagggaggag

SEQ ID NO: 481516 - RNA, 19 nt, Human
ucgagggaccagggaggag

SEQ ID NO: 481517 - RNA, 24 nt, Human
ucgagggaccagggaggaggcggc

SEQ ID NO: 481518 - RNA, 18 nt, Human
ucuugcgggcgggggcgg

SEQ ID NO: 481519 - RNA, 18 nt, Human
ucuugcgggcgggggcgg

SEQ ID NO: 481520 - RNA, 21 nt, Human
ugcguggggggcggcgcgggg

SEQ ID NO: 481521 - RNA, 21 nt, Human
ugcguggggggcggcgcgggg

SEQ ID NO: 481522 - RNA, 22 nt, Human
ugggaggggcaggggcaggggc

SEQ ID NO: 481523 - RNA, 22 nt, Human
ugggaggggcaggggcaggggc

SEQ ID NO: 481524 - RNA, 22 nt, Human
ugggccaggugcugggaggggc

SEQ ID NO: 481525 - RNA, 22 nt, Human
ugggccaggugcugggaggggc

SEQ ID NO: 481526 - RNA, 22 nt, Human
uuaaaguaaauguaugugauuc

SEQ ID NO: 481527 - RNA, 20 nt, Human
uucgagggaccagggaggag

SEQ ID NO: 481528 - RNA, 20 nt, Human
uucgagggaccagggaggag

SEQ ID NO: 481529 - RNA, 21 nt, Human
uugcugcccgugaagaacucg

SEQ ID NO: 481530 - RNA, 18 nt, Human
uuucuugcgggcgggggc

SEQ ID NO: 481531 - RNA, 18 nt, Human
uuucuugcgggcgggggc

SEQ ID NO: 481532 - RNA, 18 nt, Human
uuuuuuuuuuuuuuuuug

SEQ ID NO: 481533 - RNA, 21 nt, Human
agaaaagcaaccaaaaaaagg

SEQ ID NO: 481534 - RNA, 24 nt, Human
aggggugagccuggcccuaaagga

SEQ ID NO: 481535 - RNA, 25 nt, Human
augugguguggacagccugaccugg

SEQ ID NO: 481536 - RNA, 21 nt, Human
cacaacucuccaggcgucucc

SEQ ID NO: 481537 - RNA, 20 nt, Human
cacugugacacaggcagagc

SEQ ID NO: 481538 - RNA, 21 nt, Human
ccaggccuggcugguccccug

SEQ ID NO: 481539 - RNA, 22 nt, Human
cccuggggcguggcgguggggc

SEQ ID NO: 481540 - RNA, 21 nt, Human
cuccucugggcucccaugugg

SEQ ID NO: 481541 - RNA, 22 nt, Human
cuggcccuaaaggaccccucca

SEQ ID NO: 481542 - RNA, 22 nt, Human
cugggggcuguguggggagugg

SEQ ID NO: 481543 - RNA, 19 nt, Human
gccugggggcugugugggg

SEQ ID NO: 481544 - RNA, 22 nt, Human
gcguggcgguggggcugcagug

SEQ ID NO: 481545 - RNA, 20 nt, Human
ggaguggcauccaugugggc

SEQ ID NO: 481546 - RNA, 22 nt, Human
ggcugggcaggccugggggcug

SEQ ID NO: 481547 - RNA, 21 nt, Human
gggcugggcaggccugggggc

SEQ ID NO: 481548 - RNA, 18 nt, Human
gguguggacagccugacc

SEQ ID NO: 481549 - RNA, 23 nt, Human
guggcauccaugugggccucugg

SEQ ID NO: 481550 - RNA, 25 nt, Human
uccccuggggcguggcgguggggcu

SEQ ID NO: 481551 - RNA, 22 nt, Human
ucuccacagcaacggccagucu

SEQ ID NO: 481552 - RNA, 27 nt, Human
ucuccacagcaacggccagucuguccc

SEQ ID NO: 481553 - RNA, 21 nt, Human
ugccaugaggaggugggcugg

SEQ ID NO: 481554 - RNA, 20 nt, Human
ugcccaggguccugcccagg

SEQ ID NO: 481555 - RNA, 18 nt, Human
uggcaaagguugccccag

SEQ ID NO: 481556 - RNA, 20 nt, Human
uggcgugcagauggcgacca

SEQ ID NO: 481557 - RNA, 27 nt, Human
uggcuaaggcgggccccuccuccucug

SEQ ID NO: 481558 - RNA, 19 nt, Human
ugggcagauuuacaaaguc

SEQ ID NO: 481559 - RNA, 20 nt, Human
ugggccucugguccugccca

SEQ ID NO: 481560 - RNA, 21 nt, Human
ugggccucugguccugcccag

SEQ ID NO: 481561 - RNA, 24 nt, Human
ugggcugggcaggccugggggcug

SEQ ID NO: 481562 - RNA, 18 nt, Human
ugggggcuguguggggag

SEQ ID NO: 481563 - RNA, 25 nt, Human
ugguccugcccaggguccugcccag

SEQ ID NO: 481564 - RNA, 24 nt, Human
ugugacacaggcagagccggcuca

SEQ ID NO: 481565 - RNA, 24 nt, Human
uuagaaaagcaaccaaaaaaaggg

SEQ ID NO: 481566 - RNA, 20 nt, Human
uucacauggcuaaggcgggc

SEQ ID NO: 481567 - RNA, 18 nt, Human
aggcaggccccauccgcc

SEQ ID NO: 481568 - RNA, 23 nt, Human
cauccgccaguacauccugggcu

SEQ ID NO: 481569 - RNA, 18 nt, Human
ccauccgccaguacaucc

SEQ ID NO: 481570 - RNA, 22 nt, Human
ccccggggugcaggcaggcccc

SEQ ID NO: 481571 - RNA, 20 nt, Human
ccgccaguacauccugggcu

SEQ ID NO: 481572 - RNA, 19 nt, Human
ccuaaguugaggcagcccc

SEQ ID NO: 481573 - RNA, 21 nt, Human
cuuagccccgccuuugggagc

SEQ ID NO: 481574 - RNA, 18 nt, Human
cuugggauccccgggucc

SEQ ID NO: 481575 - RNA, 19 nt, Human
gaggcagccccucuuggga

SEQ ID NO: 481576 - RNA, 25 nt, Human
ggcaagcucuagcuccucuuagccc

SEQ ID NO: 481577 - RNA, 18 nt, Human
uccaugaaggaggcuccu

SEQ ID NO: 481578 - RNA, 23 nt, Human
ugaggcaagcucuagcuccucuu

SEQ ID NO: 481579 - RNA, 19 nt, Human
aaggcaggcaagggcacug

SEQ ID NO: 481580 - RNA, 21 nt, Human
aggccuggaaccccgggggug

SEQ ID NO: 481581 - RNA, 19 nt, Human
caggcaagggcacugcaca

SEQ ID NO: 481582 - RNA, 20 nt, Human
caugccaggccuggaacccc

SEQ ID NO: 481583 - RNA, 21 nt, Human
cccggggguggcccggguggg

SEQ ID NO: 481584 - RNA, 22 nt, Human
cccugaaccaugccaggccugg

SEQ ID NO: 481585 - RNA, 22 nt, Human
ccggggguggcccgggugggcc

SEQ ID NO: 481586 - RNA, 25 nt, Human
ccuggaaccccggggguggcccggg

SEQ ID NO: 481587 - RNA, 19 nt, Human
ccuugaguccuuuaugcug

SEQ ID NO: 481588 - RNA, 18 nt, Human
cuggugggcagaggcugu

SEQ ID NO: 481589 - RNA, 21 nt, Human
cuucaaggaacaugcuggugg

SEQ ID NO: 481590 - RNA, 18 nt, Human
gagaaaaggagggucccc

SEQ ID NO: 481591 - RNA, 27 nt, Human
gagacaaggccaggcggcuuuauugaa

SEQ ID NO: 481592 - RNA, 19 nt, Human
gcccugaaccaugccaggc

SEQ ID NO: 481593 - RNA, 22 nt, Human
ggccuggaaccccggggguggc

SEQ ID NO: 481594 - RNA, 19 nt, Human
gggauggggagaaaaggag

SEQ ID NO: 481595 - RNA, 22 nt, Human
gguaaggcaggcaagggcacug

SEQ ID NO: 481596 - RNA, 25 nt, Human
ugccaggccuggaaccccgggggug

SEQ ID NO: 481597 - RNA, 22 nt, Human
uggcccgggugggccucggcgg

SEQ ID NO: 481598 - RNA, 18 nt, Human
uggggagaaaaggagggc

SEQ ID NO: 481599 - RNA, 19 nt, Human
uggggguaaggcaggcaag

SEQ ID NO: 481600 - RNA, 24 nt, Human
uuauugaaaaaguggugguggggg

SEQ ID NO: 481601 - RNA, 26 nt, Human
uuuuuuuuuuugacagagacaaggcc

SEQ ID NO: 481602 - RNA, 22 nt, Human
uuuuuuuuuuuuuuuuugacag

SEQ ID NO: 481603 - RNA, 27 nt, Human
uuuuuuuuuuuuuuuuuuuuuuugggg

SEQ ID NO: 481604 - RNA, 19 nt, Human
aagccaacauugaggccag

SEQ ID NO: 481605 - RNA, 20 nt, Human
agaaguagucugggggcugc

SEQ ID NO: 481606 - RNA, 21 nt, Human
aggagguaaggaugagggugg

SEQ ID NO: 481607 - RNA, 20 nt, Human
aguagucugggggcugcugg

SEQ ID NO: 481608 - RNA, 18 nt, Human
aucaugccacuggggggu

SEQ ID NO: 481609 - RNA, 18 nt, Human
auugaggccagguguuuu

SEQ ID NO: 481610 - RNA, 24 nt, Human
caacagauauucccuccuggagcc

SEQ ID NO: 481611 - RNA, 25 nt, Human
caccacaccccugggcacccuuggc

SEQ ID NO: 481612 - RNA, 21 nt, Human
cacccuuggcuuucaggaccc

SEQ ID NO: 481613 - RNA, 19 nt, Human
cagggaacucccuaccucc

SEQ ID NO: 481614 - RNA, 21 nt, Human
cauucaucaugccacuggggg

SEQ ID NO: 481615 - RNA, 24 nt, Human
cauucaucaugccacugggggguu

SEQ ID NO: 481616 - RNA, 19 nt, Human
cauugaggccagguguuuu

SEQ ID NO: 481617 - RNA, 24 nt, Human
ccugggcacccuuggcuuucagga

SEQ ID NO: 481618 - RNA, 19 nt, Human
cugcagccugggucuggcu

SEQ ID NO: 481619 - RNA, 19 nt, Human
cuugcucacacugaggaac

SEQ ID NO: 481620 - RNA, 18 nt, Human
gagacaccacaccccugg

SEQ ID NO: 481621 - RNA, 21 nt, Human
gagcaggucuucuccaggcag

SEQ ID NO: 481622 - RNA, 22 nt, Human
gcagcugagagcaggucuucuc

SEQ ID NO: 481623 - RNA, 19 nt, Human
gcaggucuucuccaggcag

SEQ ID NO: 481624 - RNA, 23 nt, Human
ggaggcuccugggggaggccugc

SEQ ID NO: 481625 - RNA, 25 nt, Human
ggagguaaggaugagggugggcagg

SEQ ID NO: 481626 - RNA, 22 nt, Human
uaacaagccaacauugaggcca

SEQ ID NO: 481627 - RNA, 19 nt, Human
uaccucccagaggucugga

SEQ ID NO: 481628 - RNA, 18 nt, Human
uaggaggagguaaggaug

SEQ ID NO: 481629 - RNA, 26 nt, Human
uccauccuggaggcuccugggggagg

SEQ ID NO: 481630 - RNA, 21 nt, Human
ucccagaggucuggagagacc

SEQ ID NO: 481631 - RNA, 20 nt, Human
ucuccaggcagcuugaguag

SEQ ID NO: 481632 - RNA, 23 nt, Human
ugaggaacggugggcagcugaga

SEQ ID NO: 481633 - RNA, 19 nt, Human
uggaagggguccagccauc

SEQ ID NO: 481634 - RNA, 19 nt, Human
uucagggauagaaguaguc

SEQ ID NO: 481635 - RNA, 25 nt, Human
uugaggccagguguuuucagggaua

SEQ ID NO: 481636 - RNA, 24 nt, Human
aagaaucauuggaauuuuuggggg

SEQ ID NO: 481637 - RNA, 22 nt, Human
aagauaccgcucugggucucac

SEQ ID NO: 481638 - RNA, 22 nt, Human
aaggggaucuggggcuuuuggg

SEQ ID NO: 481639 - RNA, 23 nt, Human
aaggggaucuggggcuuuugggc

SEQ ID NO: 481640 - RNA, 24 nt, Human
aaggggaucuggggcuuuugggcu

SEQ ID NO: 481641 - RNA, 21 nt, Human
agaaucauuggaauuuuuggg

SEQ ID NO: 481642 - RNA, 25 nt, Human
agcucagccuccuuaucuucuccaa

SEQ ID NO: 481643 - RNA, 24 nt, Human
aggucacagggacuuaggacuacg

SEQ ID NO: 481644 - RNA, 20 nt, Human
agguggagagggucuggagc

SEQ ID NO: 481645 - RNA, 20 nt, Human
auaaaguauaauuugucccc

SEQ ID NO: 481646 - RNA, 18 nt, Human
auccacagacucuuccuu

SEQ ID NO: 481647 - RNA, 24 nt, Human
aucuucuccagcacuccuuugcca

SEQ ID NO: 481648 - RNA, 18 nt, Human
auuuccauccacagacuc

SEQ ID NO: 481649 - RNA, 19 nt, Human
caagauggccccuccuccc

SEQ ID NO: 481650 - RNA, 27 nt, Human
caaugcccucccucccgccugcccucc

SEQ ID NO: 481651 - RNA, 21 nt, Human
caccucuuccugccucucuug

SEQ ID NO: 481652 - RNA, 25 nt, Human
ccagcacuccuuugccaccucuucc

SEQ ID NO: 481653 - RNA, 22 nt, Human
ccagucucaagauggccccucc

SEQ ID NO: 481654 - RNA, 23 nt, Human
ccagucucaagauggccccuccu

SEQ ID NO: 481655 - RNA, 22 nt, Human
cccauccuggcaaagauaccgc

SEQ ID NO: 481656 - RNA, 23 nt, Human
cccaugcacagcgccgcaugcca

SEQ ID NO: 481657 - RNA, 25 nt, Human
cccaugcacagcgccgcaugccaau

SEQ ID NO: 481658 - RNA, 23 nt, Human
ccccuccucccugcucccugucg

SEQ ID NO: 481659 - RNA, 21 nt, Human
ccucccucccgccugcccucc

SEQ ID NO: 481660 - RNA, 22 nt, Human
ccuggcaaagauaccgcucugg

SEQ ID NO: 481661 - RNA, 28 nt, Human
ccuuugccaccucuuccugccucucuug

SEQ ID NO: 481662 - RNA, 21 nt, Human
cuccagcacuccuuugccacc

SEQ ID NO: 481663 - RNA, 21 nt, Human
cucccacgcuuccuauuucca

SEQ ID NO: 481664 - RNA, 20 nt, Human
cuccuuugccaccucuuccu

SEQ ID NO: 481665 - RNA, 23 nt, Human
cugaaccuuuugauacccaacag

SEQ ID NO: 481666 - RNA, 24 nt, Human
gaauuuuuggggguggcaacugga

SEQ ID NO: 481667 - RNA, 24 nt, Human
gacucuuccuucuuaaccuaguuc

SEQ ID NO: 481668 - RNA, 21 nt, Human
gacuuaggacuacgugaagug

SEQ ID NO: 481669 - RNA, 19 nt, Human
ggacccucccacgcuuccu

SEQ ID NO: 481670 - RNA, 19 nt, Human
ggaggggugggguggagcu

SEQ ID NO: 481671 - RNA, 21 nt, Human
ggcaggucacagggacuuagg

SEQ ID NO: 481672 - RNA, 19 nt, Human
gguggagagggucuggagc

SEQ ID NO: 481673 - RNA, 24 nt, Human
guggagcucgcagggcaccagucu

SEQ ID NO: 481674 - RNA, 27 nt, Human
uauuuucacccaaggggaagcugggga

SEQ ID NO: 481675 - RNA, 24 nt, Human
uccacagacucuuccuucuuaacc

SEQ ID NO: 481676 - RNA, 19 nt, Human
ucccgccugcccucccucu

SEQ ID NO: 481677 - RNA, 21 nt, Human
ucugaaccuuuugauacccaa

SEQ ID NO: 481678 - RNA, 19 nt, Human
ucugcagacgcccccaucc

SEQ ID NO: 481679 - RNA, 22 nt, Human
ucugcagacgcccccauccugg

SEQ ID NO: 481680 - RNA, 19 nt, Human
ugaaaagaugucaagaauc

SEQ ID NO: 481681 - RNA, 20 nt, Human
ugaagucugggcuguucaug

SEQ ID NO: 481682 - RNA, 21 nt, Human
uggagcucgcagggcaccagu

SEQ ID NO: 481683 - RNA, 22 nt, Human
uggagcucgcagggcaccaguc

SEQ ID NO: 481684 - RNA, 20 nt, Human
uggccccuccucccugcucc

SEQ ID NO: 481685 - RNA, 25 nt, Human
uuggggguggcaacuggacccuccc

SEQ ID NO: 481686 - RNA, 21 nt, Human
uuuagggaguacaagugcggu

SEQ ID NO: 481687 - RNA, 20 nt, Human
uuuguccccuuaccgggaga

SEQ ID NO: 481688 - RNA, 21 nt, Human
uuuuguugauuugcauccuuu

SEQ ID NO: 481689 - RNA, 19 nt, Human
uuuuuuuuuuuuuuguuga

SEQ ID NO: 481690 - RNA, 19 nt, Human
aagacaucugacugugaaa

SEQ ID NO: 481691 - RNA, 24 nt, Human
acaauaaaggguccacauguuaga

SEQ ID NO: 481692 - RNA, 22 nt, Human
agacaucugacugugaaacgac

SEQ ID NO: 481693 - RNA, 22 nt, Human
agguggggcacuggucuucuug

SEQ ID NO: 481694 - RNA, 23 nt, Human
auaaaggguccacauguuagaac

SEQ ID NO: 481695 - RNA, 20 nt, Human
caacagaaaggaaaacaggg

SEQ ID NO: 481696 - RNA, 23 nt, Human
caacauaucucaagacaucugac

SEQ ID NO: 481697 - RNA, 18 nt, Human
cacgguuaccuccccagc

SEQ ID NO: 481698 - RNA, 21 nt, Human
cagcaauaccguaacuuccaa

SEQ ID NO: 481699 - RNA, 20 nt, Human
caggugcagguggcggugau

SEQ ID NO: 481700 - RNA, 23 nt, Human
caucuuguccacuuggaggauua

SEQ ID NO: 481701 - RNA, 19 nt, Human
cauuacacugguggcagac

SEQ ID NO: 481702 - RNA, 21 nt, Human
ccuacuaagauaaaagguggg

SEQ ID NO: 481703 - RNA, 23 nt, Human
ccuccccagcaauaccguaacuu

SEQ ID NO: 481704 - RNA, 18 nt, Human
cuaagauaaaaggugggg

SEQ ID NO: 481705 - RNA, 21 nt, Human
cuuccaaagggagcacauuug

SEQ ID NO: 481706 - RNA, 19 nt, Human
cuuuugguggaugcugcug

SEQ ID NO: 481707 - RNA, 19 nt, Human
gaacauuugagccuacuaa

SEQ ID NO: 481708 - RNA, 25 nt, Human
gauacauuacacugguggcagacuc

SEQ ID NO: 481709 - RNA, 23 nt, Human
ggaaaacagggcuuuuuggccug

SEQ ID NO: 481710 - RNA, 18 nt, Human
ggagcacauuugucacca

SEQ ID NO: 481711 - RNA, 20 nt, Human
gggaaagcaacagaaaggaa

SEQ ID NO: 481712 - RNA, 18 nt, Human
gggagcacauuugucacc

SEQ ID NO: 481713 - RNA, 18 nt, Human
gguggugguuguccucgu

SEQ ID NO: 481714 - RNA, 21 nt, Human
uaaauagaggguugcuugggg

SEQ ID NO: 481715 - RNA, 20 nt, Human
uacacugguggcagacuccu

SEQ ID NO: 481716 - RNA, 18 nt, Human
uaccuccccagcaauacc

SEQ ID NO: 481717 - RNA, 18 nt, Human
uagacaauaaagggucca

SEQ ID NO: 481718 - RNA, 21 nt, Human
uagcauucuggggacuuaggg

SEQ ID NO: 481719 - RNA, 27 nt, Human
uagcauucuggggacuuaggguauguu

SEQ ID NO: 481720 - RNA, 20 nt, Human
ucacgguuaccuccccagca

SEQ ID NO: 481721 - RNA, 26 nt, Human
ucccugugcuuccugaacauuugagc

SEQ ID NO: 481722 - RNA, 20 nt, Human
uccuuaggauuagguaaaua

SEQ ID NO: 481723 - RNA, 27 nt, Human
ucuguaacucaacugcuuuccggccgc

SEQ ID NO: 481724 - RNA, 18 nt, Human
ugaaacgacagcaugucc

SEQ ID NO: 481725 - RNA, 18 nt, Human
uggccuggggacaucuug

SEQ ID NO: 481726 - RNA, 21 nt, Human
uggggaaaaggcccaggugca

SEQ ID NO: 481727 - RNA, 22 nt, Human
uggggacaucuuguccacuugg

SEQ ID NO: 481728 - RNA, 19 nt, Human
ugugagcaguagucacggu

SEQ ID NO: 481729 - RNA, 22 nt, Human
uuacacugguggcagacuccuc

SEQ ID NO: 481730 - RNA, 18 nt, Human
uucuuggugucgcccauc

SEQ ID NO: 481731 - RNA, 20 nt, Human
uuggaaaagugacuuuuggu

SEQ ID NO: 481732 - RNA, 24 nt, Human
uuggggaaaaggcccaggugcagg

SEQ ID NO: 481733 - RNA, 18 nt, Human
uuuuuuuagcuacaucuu

SEQ ID NO: 481734 - RNA, 19 nt, Human
agugggcuggguggugggg

SEQ ID NO: 481735 - RNA, 22 nt, Human
cagugggcugggugguggggga

SEQ ID NO: 481736 - RNA, 25 nt, Human
caucgggccugggcaggacaucauc

SEQ ID NO: 481737 - RNA, 20 nt, Human
cauugagcccucucaggcca

SEQ ID NO: 481738 - RNA, 23 nt, Human
cccccggcuucagcgcggcuccc

SEQ ID NO: 481739 - RNA, 22 nt, Human
ccccgcaccgucgccucgugcc

SEQ ID NO: 481740 - RNA, 19 nt, Human
cccugcucccaucccgcug

SEQ ID NO: 481741 - RNA, 23 nt, Human
ccgcgcgccccgcaccgucgccu

SEQ ID NO: 481742 - RNA, 19 nt, Human
ccggcuucagcgcggcucc

SEQ ID NO: 481743 - RNA, 23 nt, Human
cgcccccggcuucagcgcggcuc

SEQ ID NO: 481744 - RNA, 24 nt, Human
cuccgcgcuggucccgcccccggc

SEQ ID NO: 481745 - RNA, 24 nt, Human
gagcagaguugcuugcaggguccu

SEQ ID NO: 481746 - RNA, 18 nt, Human
gcagugggcuggguggug

SEQ ID NO: 481747 - RNA, 19 nt, Human
gccgccgggggacccugcu

SEQ ID NO: 481748 - RNA, 18 nt, Human
gccuggucacagagcaga

SEQ ID NO: 481749 - RNA, 21 nt, Human
gcuggcccgucgcccgcgcgc

SEQ ID NO: 481750 - RNA, 18 nt, Human
gcuggucccgcccccggc

SEQ ID NO: 481751 - RNA, 22 nt, Human
gcuugcaggguccuaguggcca

SEQ ID NO: 481752 - RNA, 19 nt, Human
ggcccgucgcccgcgcgcc

SEQ ID NO: 481753 - RNA, 25 nt, Human
gggcuggguggugggggagaggguu

SEQ ID NO: 481754 - RNA, 24 nt, Human
gguggugggggagaggguugaaag

SEQ ID NO: 481755 - RNA, 20 nt, Human
ucagaauaaagucucauuuc

SEQ ID NO: 481756 - RNA, 18 nt, Human
uccauugagcccucucag

SEQ ID NO: 481757 - RNA, 20 nt, Human
uccauugagcccucucaggc

SEQ ID NO: 481758 - RNA, 21 nt, Human
uccuaguggccaucgggccug

SEQ ID NO: 481759 - RNA, 24 nt, Human
ucucuguucuuuuuaauaauuuca

SEQ ID NO: 481760 - RNA, 20 nt, Human
uggguggugggggagagggu

SEQ ID NO: 481761 - RNA, 19 nt, Human
uuggguccccgagggucca

SEQ ID NO: 481762 - RNA, 19 nt, Human
uuggguccccgagggucca

SEQ ID NO: 481763 - RNA, 18 nt, Human
uuuuuuuuuuuuuuuuug

SEQ ID NO: 481764 - RNA, 22 nt, Human
agaugucagggcuaagggugcu

SEQ ID NO: 481765 - RNA, 20 nt, Human
uaagggugcuuggaauuaaa

SEQ ID NO: 481766 - RNA, 20 nt, Human
ucacugcauuuugcuuaggu

SEQ ID NO: 481767 - RNA, 22 nt, Human
uguggccccaaagcuugacaga

SEQ ID NO: 481768 - RNA, 25 nt, Human
aaacucggagaaacccgaaccagaa

SEQ ID NO: 481769 - RNA, 18 nt, Human
accccgcucggcgcccgg

SEQ ID NO: 481770 - RNA, 21 nt, Human
agcaaaacucggagaaacccg

SEQ ID NO: 481771 - RNA, 23 nt, Human
agcggggcccccagaccccaggg

SEQ ID NO: 481772 - RNA, 19 nt, Human
aggguucugccugggccuc

SEQ ID NO: 481773 - RNA, 21 nt, Human
caccccagcggggcccccaga

SEQ ID NO: 481774 - RNA, 21 nt, Human
caccucgcucugcuggccggc

SEQ ID NO: 481775 - RNA, 21 nt, Human
cagagucacaggacgcuucug

SEQ ID NO: 481776 - RNA, 19 nt, Human
cagcggggcccccagaccc

SEQ ID NO: 481777 - RNA, 21 nt, Human
caggguccaugcaggguuccu

SEQ ID NO: 481778 - RNA, 28 nt, Human
ccaaagccgugggcggcaccaagccccg

SEQ ID NO: 481779 - RNA, 21 nt, Human
ccagcccgcccggcucccggc

SEQ ID NO: 481780 - RNA, 21 nt, Human
ccagcgaguguccuguaacaa

SEQ ID NO: 481781 - RNA, 27 nt, Human
cccagcgccuccgcccccggccccggc

SEQ ID NO: 481782 - RNA, 20 nt, Human
ccccagaccccagggccaaa

SEQ ID NO: 481783 - RNA, 23 nt, Human
ccccagcgccuccgcccccggcc

SEQ ID NO: 481784 - RNA, 23 nt, Human
ccccagcgccuccgcccccggcc

SEQ ID NO: 481785 - RNA, 25 nt, Human
ccccagcgccuccgcccccggcccg

SEQ ID NO: 481786 - RNA, 28 nt, Human
ccccagggccaaagccgugggcggcacc

SEQ ID NO: 481787 - RNA, 21 nt, Human
cccccagaccccagggccaaa

SEQ ID NO: 481788 - RNA, 24 nt, Human
cccccagcgaguguccuguaacaa

SEQ ID NO: 481789 - RNA, 27 nt, Human
cccccagcgccuccgcccccggcccgc

SEQ ID NO: 481790 - RNA, 18 nt, Human
cccccggccccggccccg

SEQ ID NO: 481791 - RNA, 22 nt, Human
cccccggccccggccccggccc

SEQ ID NO: 481792 - RNA, 18 nt, Human
cccccggcccgcgucccc

SEQ ID NO: 481793 - RNA, 21 nt, Human
cccccggcccgcguccccagc

SEQ ID NO: 481794 - RNA, 26 nt, Human
ccccggccccggccccggcccccagc

SEQ ID NO: 481795 - RNA, 21 nt, Human
cccgcgggcaucgcccgggcg

SEQ ID NO: 481796 - RNA, 21 nt, Human
cccggccccggcccccagcgc

SEQ ID NO: 481797 - RNA, 21 nt, Human
cccggccccggcccccagcgc

SEQ ID NO: 481798 - RNA, 19 nt, Human
cccggcucccggccgcggc

SEQ ID NO: 481799 - RNA, 24 nt, Human
cccggcucccggccgcggcucgac

SEQ ID NO: 481800 - RNA, 25 nt, Human
ccgcccccggccccggccccggccc

SEQ ID NO: 481801 - RNA, 19 nt, Human
ccgccggcaagggcacagg

SEQ ID NO: 481802 - RNA, 20 nt, Human
ccgcgguggcugcaaccugc

SEQ ID NO: 481803 - RNA, 20 nt, Human
ccggcagcuacuccugcuuc

SEQ ID NO: 481804 - RNA, 20 nt, Human
ccggccccggcccccagcgc

SEQ ID NO: 481805 - RNA, 20 nt, Human
ccggccccggcccccagcgc

SEQ ID NO: 481806 - RNA, 25 nt, Human
ccggccccggcccccagcgccuccg

SEQ ID NO: 481807 - RNA, 25 nt, Human
ccggccccggcccccagcgccuccg

SEQ ID NO: 481808 - RNA, 22 nt, Human
ccggcccgcguccccagcccgc

SEQ ID NO: 481809 - RNA, 26 nt, Human
ccuccaccccagcggggcccccagac

SEQ ID NO: 481810 - RNA, 22 nt, Human
ccuccgcccccggccccggccc

SEQ ID NO: 481811 - RNA, 18 nt, Human
ccuccgcccccggcccgc

SEQ ID NO: 481812 - RNA, 18 nt, Human
ccugcuucgcugggcaga

SEQ ID NO: 481813 - RNA, 23 nt, Human
ccugggccgucauccuccccggg

SEQ ID NO: 481814 - RNA, 20 nt, Human
ccuguaacaacgcggggccu

SEQ ID NO: 481815 - RNA, 21 nt, Human
cgcccccggccccggccccgg

SEQ ID NO: 481816 - RNA, 24 nt, Human
cgccggcaagggcacagggccccc

SEQ ID NO: 481817 - RNA, 24 nt, Human
cgccuccgcccccggccccggccc

SEQ ID NO: 481818 - RNA, 28 nt, Human
cgccuccgcccccggccccggccccggc

SEQ ID NO: 481819 - RNA, 23 nt, Human
cgccuccgcccccggcccgcguc

SEQ ID NO: 481820 - RNA, 21 nt, Human
cggaaagggugguggcuggaa

SEQ ID NO: 481821 - RNA, 22 nt, Human
cggauggaggcucguggggccc

SEQ ID NO: 481822 - RNA, 23 nt, Human
cggcccccagcgccuccgccccc

SEQ ID NO: 481823 - RNA, 21 nt, Human
cggcuccggcucgcccggcgg

SEQ ID NO: 481824 - RNA, 23 nt, Human
cgggaggcugacccaguugcccg

SEQ ID NO: 481825 - RNA, 22 nt, Human
cgguggcugcaaccugccgccg

SEQ ID NO: 481826 - RNA, 26 nt, Human
cuccaccccagcggggcccccagacc

SEQ ID NO: 481827 - RNA, 23 nt, Human
cucccggccgcggcucgacuccc

SEQ ID NO: 481828 - RNA, 26 nt, Human
cucggcgcccggccccggccccggcc

SEQ ID NO: 481829 - RNA, 25 nt, Human
cugacccaguugcccgcacagccuc

SEQ ID NO: 481830 - RNA, 19 nt, Human
cuggaaggggaggguggug

SEQ ID NO: 481831 - RNA, 24 nt, Human
gccccuuagugaggugucaccucu

SEQ ID NO: 481832 - RNA, 26 nt, Human
gcccggccccggccccggcccccagc

SEQ ID NO: 481833 - RNA, 25 nt, Human
gcggcgcggucaccgcggaccccgc

SEQ ID NO: 481834 - RNA, 20 nt, Human
gcggggcccccagaccccag

SEQ ID NO: 481835 - RNA, 20 nt, Human
gcucguggggcccggcagcu

SEQ ID NO: 481836 - RNA, 19 nt, Human
gcuggccggcggcgucccc

SEQ ID NO: 481837 - RNA, 20 nt, Human
ggaaagggugguggcuggaa

SEQ ID NO: 481838 - RNA, 18 nt, Human
ggaggcgacggcggcggc

SEQ ID NO: 481839 - RNA, 19 nt, Human
ggcagagaaccagggccug

SEQ ID NO: 481840 - RNA, 22 nt, Human
ggcagcaccucgcucugcuggc

SEQ ID NO: 481841 - RNA, 22 nt, Human
ggcccccagcgccuccgccccc

SEQ ID NO: 481842 - RNA, 22 nt, Human
ggccccggcccccagcgccucc

SEQ ID NO: 481843 - RNA, 22 nt, Human
ggccccggcccccagcgccucc

SEQ ID NO: 481844 - RNA, 19 nt, Human
ggccggcagcaccucgcuc

SEQ ID NO: 481845 - RNA, 20 nt, Human
ggccggcggcguccccgcgg

SEQ ID NO: 481846 - RNA, 19 nt, Human
ggcgacggcggcggccucu

SEQ ID NO: 481847 - RNA, 21 nt, Human
ggcuggaaggggaggguggug

SEQ ID NO: 481848 - RNA, 18 nt, Human
gggcacagggcccccagc

SEQ ID NO: 481849 - RNA, 21 nt, Human
gggcagagaaccagggccugg

SEQ ID NO: 481850 - RNA, 20 nt, Human
guaacaacgcggggccugaa

SEQ ID NO: 481851 - RNA, 23 nt, Human
ucccacagacgcggcuucucucc

SEQ ID NO: 481852 - RNA, 20 nt, Human
uccccagcccgcccggcucc

SEQ ID NO: 481853 - RNA, 21 nt, Human
ucgcugggcagagaaccaggg

SEQ ID NO: 481854 - RNA, 21 nt, Human
ucucuggcgggugcccggucu

SEQ ID NO: 481855 - RNA, 18 nt, Human
uggaaggggaggguggug

SEQ ID NO: 481856 - RNA, 19 nt, Human
uggcuggaaggggagggug

SEQ ID NO: 481857 - RNA, 19 nt, Human
ugggaaggcccgagcggaa

SEQ ID NO: 481858 - RNA, 21 nt, Human
ugggcagagaaccagggccuc

SEQ ID NO: 481859 - RNA, 20 nt, Human
ugguggcuggaaggggaggg

SEQ ID NO: 481860 - RNA, 24 nt, Human
auacacauauauauauauauauau

SEQ ID NO: 481861 - RNA, 19 nt, Human
auauauauauauauauaua

SEQ ID NO: 481862 - RNA, 19 nt, Human
auauauauauauauauaua

SEQ ID NO: 481863 - RNA, 19 nt, Human
auauauauauauauauaua

SEQ ID NO: 481864 - RNA, 19 nt, Human
auauauauauauauauaua

SEQ ID NO: 481865 - RNA, 23 nt, Human
auauauauauauauauguaugua

SEQ ID NO: 481866 - RNA, 29 nt, Human
auauauauauaugcauauauauauauaua

SEQ ID NO: 481867 - RNA, 21 nt, Human
auauauguauguauaugcacu

SEQ ID NO: 481868 - RNA, 25 nt, Human
auguguguguguauacacauauaua

SEQ ID NO: 481869 - RNA, 23 nt, Human
auugcugucugcuccuggcuccu

SEQ ID NO: 481870 - RNA, 21 nt, Human
cacauauauauauauauauau

SEQ ID NO: 481871 - RNA, 22 nt, Human
cacauauauauauauauauaua

SEQ ID NO: 481872 - RNA, 19 nt, Human
caccaugggccacgcaggc

SEQ ID NO: 481873 - RNA, 19 nt, Human
ccggcugucgggcgccugu

SEQ ID NO: 481874 - RNA, 18 nt, Human
ccugugcccugcgggccc

SEQ ID NO: 481875 - RNA, 23 nt, Human
cgccugugcccugcgggcccugc

SEQ ID NO: 481876 - RNA, 24 nt, Human
cgccugugcccugcgggcccugcg

SEQ ID NO: 481877 - RNA, 22 nt, Human
cuccugagguaaagaaggugag

SEQ ID NO: 481878 - RNA, 18 nt, Human
cugcgcgaucccaggugu

SEQ ID NO: 481879 - RNA, 21 nt, Human
gacggggcgggcggugggcgg

SEQ ID NO: 481880 - RNA, 18 nt, Human
gcacuggaagggccacca

SEQ ID NO: 481881 - RNA, 20 nt, Human
gcugucugcuccuggcuccu

SEQ ID NO: 481882 - RNA, 22 nt, Human
ggcgggcggugggcggccgggg

SEQ ID NO: 481883 - RNA, 18 nt, Human
ggcggugggcggccgggg

SEQ ID NO: 481884 - RNA, 24 nt, Human
guguguguauacacauauauauau

SEQ ID NO: 481885 - RNA, 18 nt, Human
uauacacauauauauaua

SEQ ID NO: 481886 - RNA, 20 nt, Human
uauacacauauauauauaua

SEQ ID NO: 481887 - RNA, 20 nt, Human
uauacacauauauauauaua

SEQ ID NO: 481888 - RNA, 24 nt, Human
uauacacauauauauauauauaua

SEQ ID NO: 481889 - RNA, 19 nt, Human
uauauauauauauauauau

SEQ ID NO: 481890 - RNA, 19 nt, Human
uauauauauauauauauau

SEQ ID NO: 481891 - RNA, 19 nt, Human
uauauauauauauauauau

SEQ ID NO: 481892 - RNA, 21 nt, Human
uauauauauauauauaugcau

SEQ ID NO: 481893 - RNA, 19 nt, Human
uauauauauauauaugcau

SEQ ID NO: 481894 - RNA, 22 nt, Human
uauauauauauaugcauauaua

SEQ ID NO: 481895 - RNA, 24 nt, Human
uauauauauauaugcauauauaua

SEQ ID NO: 481896 - RNA, 24 nt, Human
uauauauauaugucugucuaugug

SEQ ID NO: 481897 - RNA, 20 nt, Human
uauauauaugcauauauaua

SEQ ID NO: 481898 - RNA, 20 nt, Human
uauauauaugcauauauaua

SEQ ID NO: 481899 - RNA, 24 nt, Human
uauauauaugcauauauauauaua

SEQ ID NO: 481900 - RNA, 24 nt, Human
uauauauaugcauauauauauaua

SEQ ID NO: 481901 - RNA, 19 nt, Human
uauauauauguauguauau

SEQ ID NO: 481902 - RNA, 18 nt, Human
uauauaugcauauauaua

SEQ ID NO: 481903 - RNA, 22 nt, Human
uauaugcauauauauauauaua

SEQ ID NO: 481904 - RNA, 24 nt, Human
uauaugcauauauauauauauaug

SEQ ID NO: 481905 - RNA, 19 nt, Human
uauauguauguauaugcac

SEQ ID NO: 481906 - RNA, 24 nt, Human
uauaugucugucuaugugugugug

SEQ ID NO: 481907 - RNA, 21 nt, Human
uaugcauauauauauauauau

SEQ ID NO: 481908 - RNA, 24 nt, Human
uaugcauauauauauauauaugua

SEQ ID NO: 481909 - RNA, 24 nt, Human
uaugucugucuaugugugugugua

SEQ ID NO: 481910 - RNA, 18 nt, Human
uauguguguguguauaca

SEQ ID NO: 481911 - RNA, 22 nt, Human
uauguguguguguauacacaua

SEQ ID NO: 481912 - RNA, 23 nt, Human
ugggcggccgggggccccugcga

SEQ ID NO: 481913 - RNA, 18 nt, Human
uguauacacauauauaua

SEQ ID NO: 481914 - RNA, 18 nt, Human
uguauacacauauauaua

SEQ ID NO: 481915 - RNA, 24 nt, Human
uguauacacauauauauauauaua

SEQ ID NO: 481916 - RNA, 20 nt, Human
uguguauacacauauauaua

SEQ ID NO: 481917 - RNA, 24 nt, Human
uguguauacacauauauauauaua

SEQ ID NO: 481918 - RNA, 20 nt, Human
uguguguauacacauauaua

SEQ ID NO: 481919 - RNA, 24 nt, Human
uguguguauacacauauauauaua

SEQ ID NO: 481920 - RNA, 26 nt, Human
uguguguguguauacacauauauaua

SEQ ID NO: 481921 - RNA, 19 nt, Human
aaggaucugacacccugac

SEQ ID NO: 481922 - RNA, 25 nt, Human
augcaacaacaaacgcccaaauuuu

SEQ ID NO: 481923 - RNA, 21 nt, Human
cagugggugccuuaggagucu

SEQ ID NO: 481924 - RNA, 20 nt, Human
cauggaacaggcccagcuaa

SEQ ID NO: 481925 - RNA, 19 nt, Human
cgaagaucaaugcccccuc

SEQ ID NO: 481926 - RNA, 18 nt, Human
gcaacaacaaacgcccaa

SEQ ID NO: 481927 - RNA, 28 nt, Human
gcccaaauuuuccaauagaggacacugc

SEQ ID NO: 481928 - RNA, 18 nt, Human
gcgaucgaagaucaaugc

SEQ ID NO: 481929 - RNA, 20 nt, Human
gucuggaguuuaacuaugca

SEQ ID NO: 481930 - RNA, 24 nt, Human
uaugcagauuugguuuuuagaagg

SEQ ID NO: 481931 - RNA, 23 nt, Human
ugagggcagggcucauguuuugg

SEQ ID NO: 481932 - RNA, 19 nt, Human
ugcagcauucacacacguu

SEQ ID NO: 481933 - RNA, 21 nt, Human
uggaacaggcccagcuaaugu

SEQ ID NO: 481934 - RNA, 22 nt, Human
uggaacaggcccagcuaauguu

SEQ ID NO: 481935 - RNA, 24 nt, Human
uuuuauagcugacccuacguuacu

SEQ ID NO: 481936 - RNA, 27 nt, Human
aaaaaagacagaacaaccaacccaaaa

SEQ ID NO: 481937 - RNA, 19 nt, Human
aaaaagacagaacaaccaa

SEQ ID NO: 481938 - RNA, 23 nt, Human
aaaaagacagaacaaccaaccca

SEQ ID NO: 481939 - RNA, 24 nt, Human
aaaaagacagaacaaccaacccaa

SEQ ID NO: 481940 - RNA, 18 nt, Human
aaccaacccaaaaccagu

SEQ ID NO: 481941 - RNA, 21 nt, Human
aacucacuccacuccguccug

SEQ ID NO: 481942 - RNA, 21 nt, Human
aagaggauagccagcaacagc

SEQ ID NO: 481943 - RNA, 25 nt, Human
aagcagcugacaagagcccagagac

SEQ ID NO: 481944 - RNA, 19 nt, Human
acaaccaacccaaaaccag

SEQ ID NO: 481945 - RNA, 21 nt, Human
agaacaaccaacccaaaacca

SEQ ID NO: 481946 - RNA, 30 nt, Human
agaacaaccaacccaaaaccaguaguaggg

SEQ ID NO: 481947 - RNA, 18 nt, Human
agaagcaaagaggauagc

SEQ ID NO: 481948 - RNA, 21 nt, Human
agacccagcuggccgcgggga

SEQ ID NO: 481949 - RNA, 24 nt, Human
agagaaggugggcacaggccacca

SEQ ID NO: 481950 - RNA, 21 nt, Human
aggaaccucagguucaaaagc

SEQ ID NO: 481951 - RNA, 18 nt, Human
aggaagagaagcccagcu

SEQ ID NO: 481952 - RNA, 20 nt, Human
aggaaugggcggcccagggc

SEQ ID NO: 481953 - RNA, 22 nt, Human
aggacuacaggcgacuguucca

SEQ ID NO: 481954 - RNA, 20 nt, Human
aggaucauaggccacugcca

SEQ ID NO: 481955 - RNA, 18 nt, Human
aggauucauuggaacaca

SEQ ID NO: 481956 - RNA, 20 nt, Human
aggcagaaacuuccagaagc

SEQ ID NO: 481957 - RNA, 22 nt, Human
aggcagaaacuuccagaagcaa

SEQ ID NO: 481958 - RNA, 24 nt, Human
aggcagccucaggaaagcucuggg

SEQ ID NO: 481959 - RNA, 18 nt, Human
aggcagggagggaaggcc

SEQ ID NO: 481960 - RNA, 18 nt, Human
agggagagaaggugggca

SEQ ID NO: 481961 - RNA, 23 nt, Human
agggggaagaaaagaauggcugg

SEQ ID NO: 481962 - RNA, 23 nt, Human
aggggugggggcgagggggcggg

SEQ ID NO: 481963 - RNA, 22 nt, Human
agguacuggagucacaggugcu

SEQ ID NO: 481964 - RNA, 24 nt, Human
aguuggcugcagagcugucuucag

SEQ ID NO: 481965 - RNA, 19 nt, Human
auccaaacucacuccacuc

SEQ ID NO: 481966 - RNA, 22 nt, Human
caaaaccaguaguagguacugg

SEQ ID NO: 481967 - RNA, 22 nt, Human
caaagccagcccacgccaccuc

SEQ ID NO: 481968 - RNA, 26 nt, Human
caaagugcugagaucuccccucugua

SEQ ID NO: 481969 - RNA, 18 nt, Human
cacagaaguccaggcucc

SEQ ID NO: 481970 - RNA, 25 nt, Human
cacagcacacaggggcccuggcagg

SEQ ID NO: 481971 - RNA, 19 nt, Human
cacaggccaccacaucccc

SEQ ID NO: 481972 - RNA, 20 nt, Human
cacaggccaccacauccccc

SEQ ID NO: 481973 - RNA, 23 nt, Human
cacaggggugggggcgagggggc

SEQ ID NO: 481974 - RNA, 22 nt, Human
caccucucccccgggaccccca

SEQ ID NO: 481975 - RNA, 22 nt, Human
cagaacaaccaacccaaaacca

SEQ ID NO: 481976 - RNA, 21 nt, Human
cagcacaaccuucgugcaaag

SEQ ID NO: 481977 - RNA, 21 nt, Human
cagccccggguccggucuccc

SEQ ID NO: 481978 - RNA, 23 nt, Human
cagcgcaaaggccaaagcaccag

SEQ ID NO: 481979 - RNA, 20 nt, Human
cagcgggaggggagguggcg

SEQ ID NO: 481980 - RNA, 23 nt, Human
cagcuaccaggacuacaggcgac

SEQ ID NO: 481981 - RNA, 20 nt, Human
cagcuucuucugcagccccg

SEQ ID NO: 481982 - RNA, 22 nt, Human
caggcagccucaggaaagcucu

SEQ ID NO: 481983 - RNA, 22 nt, Human
caggguggaucaaggagucuca

SEQ ID NO: 481984 - RNA, 21 nt, Human
caguuggcugcagagcugucu

SEQ ID NO: 481985 - RNA, 18 nt, Human
caucagaugaugccaacc

SEQ ID NO: 481986 - RNA, 18 nt, Human
ccaccucucccccgggac

SEQ ID NO: 481987 - RNA, 21 nt, Human
ccaccucuggaggccagggag

SEQ ID NO: 481988 - RNA, 25 nt, Human
ccagcacaaccuucgugcaaagcca

SEQ ID NO: 481989 - RNA, 20 nt, Human
ccagcacacggcgacaguca

SEQ ID NO: 481990 - RNA, 19 nt, Human
ccaguuggagggagguguc

SEQ ID NO: 481991 - RNA, 18 nt, Human
cccaggucgagggaagcc

SEQ ID NO: 481992 - RNA, 19 nt, Human
cccccagccuuuaccuggg

SEQ ID NO: 481993 - RNA, 20 nt, Human
cccccagccuuuaccugggc

SEQ ID NO: 481994 - RNA, 21 nt, Human
cccccgggacccccaacgcuc

SEQ ID NO: 481995 - RNA, 20 nt, Human
ccccggagacccagcuggcc

SEQ ID NO: 481996 - RNA, 22 nt, Human
ccccgggacccccaacgcucag

SEQ ID NO: 481997 - RNA, 22 nt, Human
cccgggacccccaacgcucagg

SEQ ID NO: 481998 - RNA, 25 nt, Human
cccuaggugggcccugcuuacucug

SEQ ID NO: 481999 - RNA, 21 nt, Human
cccugaugggagcgaaggcuc

SEQ ID NO: 482000 - RNA, 19 nt, Human
cccuucuuccuacucuuuc

SEQ ID NO: 482001 - RNA, 20 nt, Human
ccgaacggaccugggucuga

SEQ ID NO: 482002 - RNA, 21 nt, Human
ccgaacggaccugggucugaa

SEQ ID NO: 482003 - RNA, 21 nt, Human
ccucaggaaagcucuggggcu

SEQ ID NO: 482004 - RNA, 19 nt, Human
ccugugugacaaaaagagc

SEQ ID NO: 482005 - RNA, 23 nt, Human
ccuucagcuucuucugcagcccc

SEQ ID NO: 482006 - RNA, 24 nt, Human
ccuucggccuggucauggcagugg

SEQ ID NO: 482007 - RNA, 22 nt, Human
cgaacggaccugggucugaacc

SEQ ID NO: 482008 - RNA, 24 nt, Human
cgaaggcucuggagcacagcacac

SEQ ID NO: 482009 - RNA, 23 nt, Human
cgacacccaggcagggagggaag

SEQ ID NO: 482010 - RNA, 21 nt, Human
cgguccguuuauccaaacuca

SEQ ID NO: 482011 - RNA, 20 nt, Human
cucaggggacagaguugcuc

SEQ ID NO: 482012 - RNA, 22 nt, Human
cuccacaggccacggccucccc

SEQ ID NO: 482013 - RNA, 18 nt, Human
cucccccgggacccccaa

SEQ ID NO: 482014 - RNA, 18 nt, Human
cucuguagggaggaagag

SEQ ID NO: 482015 - RNA, 19 nt, Human
cugcuuacucugccuggga

SEQ ID NO: 482016 - RNA, 20 nt, Human
cugcuuacucugccugggac

SEQ ID NO: 482017 - RNA, 21 nt, Human
cuggagcacagcacacagggg

SEQ ID NO: 482018 - RNA, 21 nt, Human
cuggcaagauucguuuccaag

SEQ ID NO: 482019 - RNA, 20 nt, Human
cuuacucugccugggacugg

SEQ ID NO: 482020 - RNA, 20 nt, Human
cuuccaagccugcacacgcc

SEQ ID NO: 482021 - RNA, 19 nt, Human
cuucgugcaaagccagccc

SEQ ID NO: 482022 - RNA, 20 nt, Human
gaaggcccugaaaucccguu

SEQ ID NO: 482023 - RNA, 21 nt, Human
gaaguccaggcuccuguugcc

SEQ ID NO: 482024 - RNA, 22 nt, Human
gaggaagagaagcccagcucgg

SEQ ID NO: 482025 - RNA, 19 nt, Human
gagggcguucccugccuuc

SEQ ID NO: 482026 - RNA, 22 nt, Human
gauagccagcaacagcccccag

SEQ ID NO: 482027 - RNA, 18 nt, Human
gcagagcugucuucagga

SEQ ID NO: 482028 - RNA, 19 nt, Human
gcagggagggaaggcccug

SEQ ID NO: 482029 - RNA, 21 nt, Human
gcccgacacccaggcagggag

SEQ ID NO: 482030 - RNA, 22 nt, Human
gccuggucauggcaguggaggu

SEQ ID NO: 482031 - RNA, 23 nt, Human
gccuuuaccugggccuccuccac

SEQ ID NO: 482032 - RNA, 22 nt, Human
gcgcucguuauuuccaagcaca

SEQ ID NO: 482033 - RNA, 18 nt, Human
gcguugauuugcaggaag

SEQ ID NO: 482034 - RNA, 24 nt, Human
ggaaugggcggcccagggcccagg

SEQ ID NO: 482035 - RNA, 23 nt, Human
ggagaaggcugagaaggcccggg

SEQ ID NO: 482036 - RNA, 18 nt, Human
ggaggagggagagaaggu

SEQ ID NO: 482037 - RNA, 20 nt, Human
ggaugcguccuuuccugggg

SEQ ID NO: 482038 - RNA, 27 nt, Human
ggccagggagggcugcauuuggcuuuc

SEQ ID NO: 482039 - RNA, 19 nt, Human
ggcccaggguccccggaga

SEQ ID NO: 482040 - RNA, 18 nt, Human
gggacagaguugcuccuu

SEQ ID NO: 482041 - RNA, 19 nt, Human
gggagagauggagaggaag

SEQ ID NO: 482042 - RNA, 23 nt, Human
gggaggggacaaagucagccuuc

SEQ ID NO: 482043 - RNA, 19 nt, Human
ggggugggggcgagggggc

SEQ ID NO: 482044 - RNA, 23 nt, Human
gucgagggaagcuggccccggga

SEQ ID NO: 482045 - RNA, 20 nt, Human
gugaaggccuugagcucugg

SEQ ID NO: 482046 - RNA, 21 nt, Human
gugaggcagaaacuuccagaa

SEQ ID NO: 482047 - RNA, 21 nt, Human
guggaucaaggagucucaaaa

SEQ ID NO: 482048 - RNA, 22 nt, Human
uaaaaaaaagacagaacaacca

SEQ ID NO: 482049 - RNA, 20 nt, Human
uaagacaaagaaaugaaggu

SEQ ID NO: 482050 - RNA, 22 nt, Human
uaauuaaaaaaaagacagaaca

SEQ ID NO: 482051 - RNA, 22 nt, Human
ucaaggccaggcagccucagga

SEQ ID NO: 482052 - RNA, 20 nt, Human
ucacagaagaaaagucucgg

SEQ ID NO: 482053 - RNA, 21 nt, Human
ucaggaaagcucuggggcuuc

SEQ ID NO: 482054 - RNA, 18 nt, Human
ucaggagggggaagaaaa

SEQ ID NO: 482055 - RNA, 18 nt, Human
uccaaacucacuccacuc

SEQ ID NO: 482056 - RNA, 21 nt, Human
uccaagaggagauaauggcuc

SEQ ID NO: 482057 - RNA, 24 nt, Human
uccaccucucccccgggaccccca

SEQ ID NO: 482058 - RNA, 20 nt, Human
uccccaggucgagggaagcu

SEQ ID NO: 482059 - RNA, 23 nt, Human
ucccccgggacccccaacgcuca

SEQ ID NO: 482060 - RNA, 19 nt, Human
uccccggagacccagcugg

SEQ ID NO: 482061 - RNA, 23 nt, Human
uccccggagacccagcuggccgc

SEQ ID NO: 482062 - RNA, 23 nt, Human
ucgggaggagggagagaaggugg

SEQ ID NO: 482063 - RNA, 21 nt, Human
ucggggaggggacaaagucag

SEQ ID NO: 482064 - RNA, 19 nt, Human
ucucuaggguuuuuauugg

SEQ ID NO: 482065 - RNA, 26 nt, Human
ucucuaggguuuuuauuggccacugu

SEQ ID NO: 482066 - RNA, 24 nt, Human
ucuguccaccucucccccgggacc

SEQ ID NO: 482067 - RNA, 21 nt, Human
ugaaguccagucagugggucu

SEQ ID NO: 482068 - RNA, 19 nt, Human
ugacaggaguuguggggcc

SEQ ID NO: 482069 - RNA, 18 nt, Human
ugaggcaaggaugcgcuc

SEQ ID NO: 482070 - RNA, 24 nt, Human
ugaugccaacccugaugggagcga

SEQ ID NO: 482071 - RNA, 21 nt, Human
ugcaaagccagcccacgccac

SEQ ID NO: 482072 - RNA, 19 nt, Human
ugcucccggcucguccccu

SEQ ID NO: 482073 - RNA, 19 nt, Human
uggaaaaacuguaaaacac

SEQ ID NO: 482074 - RNA, 24 nt, Human
uggaaaucacagaagaaaagucuc

SEQ ID NO: 482075 - RNA, 23 nt, Human
uggacagcgggacuggggagggc

SEQ ID NO: 482076 - RNA, 21 nt, Human
uggagagagggagagauggag

SEQ ID NO: 482077 - RNA, 24 nt, Human
uggagagagggagagauggagagg

SEQ ID NO: 482078 - RNA, 21 nt, Human
uggagcggagagaaagggcag

SEQ ID NO: 482079 - RNA, 22 nt, Human
uggagucacaggugcuuaacug

SEQ ID NO: 482080 - RNA, 19 nt, Human
uggaugcguccuuuccugg

SEQ ID NO: 482081 - RNA, 20 nt, Human
uggcagaauaacuuacaaug

SEQ ID NO: 482082 - RNA, 19 nt, Human
uggcccgacacccaggcag

SEQ ID NO: 482083 - RNA, 23 nt, Human
uggcucaacgacgcaggaaccuc

SEQ ID NO: 482084 - RNA, 19 nt, Human
ugggagcgaaggcucugga

SEQ ID NO: 482085 - RNA, 19 nt, Human
ugucuguccaccucucccc

SEQ ID NO: 482086 - RNA, 22 nt, Human
ugucuguccaccucucccccgg

SEQ ID NO: 482087 - RNA, 22 nt, Human
uuaccugggccuccuccacagg

SEQ ID NO: 482088 - RNA, 24 nt, Human
uucaaaagcagcugacaagagccc

SEQ ID NO: 482089 - RNA, 21 nt, Human
uuccccugaccgauggaaccc

SEQ ID NO: 482090 - RNA, 19 nt, Human
uuuaccugggccuccucca

SEQ ID NO: 482091 - RNA, 24 nt, Human
uuucuggcaagauucguuuccaag

SEQ ID NO: 482092 - RNA, 27 nt, Human
uuuugcucccggcucguccccuucuuc

SEQ ID NO: 482093 - RNA, 18 nt, Human
aaaaacacaacagcacgg

SEQ ID NO: 482094 - RNA, 25 nt, Human
aaaacagaaaaacacaacagcacgg

SEQ ID NO: 482095 - RNA, 24 nt, Human
aaacucccaggugguuccaacucu

SEQ ID NO: 482096 - RNA, 21 nt, Human
accuguuucgugaaagagggu

SEQ ID NO: 482097 - RNA, 23 nt, Human
agcaaaacagaaaaacacaacag

SEQ ID NO: 482098 - RNA, 19 nt, Human
caaaacagaaaaacacaac

SEQ ID NO: 482099 - RNA, 20 nt, Human
caagaacaaaucauuauuau

SEQ ID NO: 482100 - RNA, 25 nt, Human
cagaaaaacacaacagcacgguauc

SEQ ID NO: 482101 - RNA, 22 nt, Human
caugagcaagcgaaucaguucc

SEQ ID NO: 482102 - RNA, 22 nt, Human
cgagcaaaacagaaaaacacaa

SEQ ID NO: 482103 - RNA, 21 nt, Human
gagcaaaacagaaaaacacaa

SEQ ID NO: 482104 - RNA, 18 nt, Human
gcaaaacagaaaaacaca

SEQ ID NO: 482105 - RNA, 19 nt, Human
ucccaggugguuccaacuc

SEQ ID NO: 482106 - RNA, 19 nt, Human
uuaagaggacaucuguacc

SEQ ID NO: 482107 - RNA, 19 nt, Human
uucccagagcucccugcug

SEQ ID NO: 482108 - RNA, 22 nt, Human
uugcacuaaacaagaacaaauc

SEQ ID NO: 482109 - RNA, 20 nt, Human
uuuaagaggacaucuguacc

SEQ ID NO: 482110 - RNA, 28 nt, Human
uuucaauacuccuugaaacccuucuuuc

SEQ ID NO: 482111 - RNA, 22 nt, Human
uuucccagagcucccugcugca

SEQ ID NO: 482112 - RNA, 22 nt, Human
uuucuuuuuggucguuuucaau

SEQ ID NO: 482113 - RNA, 22 nt, Human
aaagcgacagagucagagaccc

SEQ ID NO: 482114 - RNA, 19 nt, Human
acuuagagaaaagcgacag

SEQ ID NO: 482115 - RNA, 19 nt, Human
agucagagacccacggggg

SEQ ID NO: 482116 - RNA, 22 nt, Human
cgcccgggccgggcugcggggc

SEQ ID NO: 482117 - RNA, 19 nt, Human
cggggcugcagcgagggcg

SEQ ID NO: 482118 - RNA, 18 nt, Human
gcagcugcugcaggacgc

SEQ ID NO: 482119 - RNA, 19 nt, Human
uggggacacgaacacggcg

SEQ ID NO: 482120 - RNA, 20 nt, Human
cagcgcggcgcgggcggcgg

SEQ ID NO: 482121 - RNA, 21 nt, Human
gagagccuggcuggcgggcgc

SEQ ID NO: 482122 - RNA, 29 nt, Human
gagcccgggccagcgcggcgcgggcggcc

SEQ ID NO: 482123 - RNA, 27 nt, Human
gcgcggcgcgggcggcgggcgcggagg

SEQ ID NO: 482124 - RNA, 19 nt, Human
ggcggcgggcgcggagagc

SEQ ID NO: 482125 - RNA, 24 nt, Human
gggagagcccgggccagcgcggcg

SEQ ID NO: 482126 - RNA, 19 nt, Human
aaaacaaaaccauuaaagc

SEQ ID NO: 482127 - RNA, 22 nt, Human
aaacaggauggcggcgccucuc

SEQ ID NO: 482128 - RNA, 26 nt, Human
aaagggaacuauuacaucuagagauu

SEQ ID NO: 482129 - RNA, 24 nt, Human
aaagugcugggauuauagguguga

SEQ ID NO: 482130 - RNA, 22 nt, Human
aacacaguguggcuggcgggag

SEQ ID NO: 482131 - RNA, 19 nt, Human
aaccucaccgccaguccca

SEQ ID NO: 482132 - RNA, 22 nt, Human
aacucauaaacaucuuuucccc

SEQ ID NO: 482133 - RNA, 20 nt, Human
aagcaaagcagccagggugc

SEQ ID NO: 482134 - RNA, 20 nt, Human
aagccaccuucaaagaagua

SEQ ID NO: 482135 - RNA, 23 nt, Human
aaggacacaguaaacacagaucc

SEQ ID NO: 482136 - RNA, 25 nt, Human
aaggggcaggcaugcagugugcagg

SEQ ID NO: 482137 - RNA, 20 nt, Human
aaggguugccaugguaauau

SEQ ID NO: 482138 - RNA, 19 nt, Human
aagguggcgcggacccaga

SEQ ID NO: 482139 - RNA, 21 nt, Human
aagugauccaccugccuuggc

SEQ ID NO: 482140 - RNA, 24 nt, Human
aagugauccaccugccuuggccuc

SEQ ID NO: 482141 - RNA, 18 nt, Human
aagugcugggauuauagg

SEQ ID NO: 482142 - RNA, 20 nt, Human
aaugagccaaccuguguuug

SEQ ID NO: 482143 - RNA, 19 nt, Human
aauggcagcacaggcggca

SEQ ID NO: 482144 - RNA, 23 nt, Human
acacaagcuugaauucauaguag

SEQ ID NO: 482145 - RNA, 18 nt, Human
accaaaaaauccuaccca

SEQ ID NO: 482146 - RNA, 22 nt, Human
accacguuggccaggcuggucu

SEQ ID NO: 482147 - RNA, 21 nt, Human
accccuauggaugugguuggg

SEQ ID NO: 482148 - RNA, 19 nt, Human
accccugccccaaagaagc

SEQ ID NO: 482149 - RNA, 22 nt, Human
accgcaccugguccuuaaugcu

SEQ ID NO: 482150 - RNA, 22 nt, Human
accuaaaccucaguucaccaaa

SEQ ID NO: 482151 - RNA, 19 nt, Human
accucaguucaccaaaguu

SEQ ID NO: 482152 - RNA, 22 nt, Human
acuccaggaaguuuugcagagg

SEQ ID NO: 482153 - RNA, 19 nt, Human
acucugagcuccugaaguc

SEQ ID NO: 482154 - RNA, 22 nt, Human
agaagcagggaugaguguggga

SEQ ID NO: 482155 - RNA, 19 nt, Human
agagcaccccagcucuacc

SEQ ID NO: 482156 - RNA, 21 nt, Human
agagcaccccagcucuaccaa

SEQ ID NO: 482157 - RNA, 18 nt, Human
agagggcaaacugcccag

SEQ ID NO: 482158 - RNA, 19 nt, Human
agcaggauacagaugcaga

SEQ ID NO: 482159 - RNA, 18 nt, Human
agccaacaggagcagcag

SEQ ID NO: 482160 - RNA, 20 nt, Human
agccaccgcaccugguccuu

SEQ ID NO: 482161 - RNA, 18 nt, Human
aggaacacacaacgcacc

SEQ ID NO: 482162 - RNA, 18 nt, Human
aggaauauucauagucuc

SEQ ID NO: 482163 - RNA, 23 nt, Human
aggcagagauaccacccagauuc

SEQ ID NO: 482164 - RNA, 20 nt, Human
agggaccugugaucccccag

SEQ ID NO: 482165 - RNA, 19 nt, Human
agggagcuguccugggugg

SEQ ID NO: 482166 - RNA, 24 nt, Human
aggggggaagcauguaguuuuagg

SEQ ID NO: 482167 - RNA, 19 nt, Human
agggguugcagcucugcag

SEQ ID NO: 482168 - RNA, 21 nt, Human
aggguugaccucagcagagag

SEQ ID NO: 482169 - RNA, 19 nt, Human
aggugugagccaccgcacc

SEQ ID NO: 482170 - RNA, 24 nt, Human
aguccccucucauggaggaggggg

SEQ ID NO: 482171 - RNA, 19 nt, Human
auccuuggauucaguucuc

SEQ ID NO: 482172 - RNA, 20 nt, Human
augggguuucaccacguugg

SEQ ID NO: 482173 - RNA, 21 nt, Human
caaaauaaagaccugagcuug

SEQ ID NO: 482174 - RNA, 22 nt, Human
caaccugccucaccccugcccc

SEQ ID NO: 482175 - RNA, 21 nt, Human
caacgcaccaaaaaauccuac

SEQ ID NO: 482176 - RNA, 19 nt, Human
caagugccgacggaaacug

SEQ ID NO: 482177 - RNA, 19 nt, Human
cacaacgcaccaaaaaauc

SEQ ID NO: 482178 - RNA, 20 nt, Human
caccacguuggccaggcugg

SEQ ID NO: 482179 - RNA, 21 nt, Human
caccacguuggccaggcuggu

SEQ ID NO: 482180 - RNA, 24 nt, Human
caccacguuggccaggcuggucuu

SEQ ID NO: 482181 - RNA, 27 nt, Human
caccacguuggccaggcuggucuugaa

SEQ ID NO: 482182 - RNA, 22 nt, Human
caccgcaccugguccuuaaugc

SEQ ID NO: 482183 - RNA, 24 nt, Human
caccugccuuggccucccaaagug

SEQ ID NO: 482184 - RNA, 24 nt, Human
cacguuggccaggcuggucuugaa

SEQ ID NO: 482185 - RNA, 22 nt, Human
cacugcauagagacaagaaagc

SEQ ID NO: 482186 - RNA, 23 nt, Human
cagaccuccugguuauacaacca

SEQ ID NO: 482187 - RNA, 27 nt, Human
cagaguaagcaguaaucuccugcugau

SEQ ID NO: 482188 - RNA, 22 nt, Human
cagcacaggcggcaaagcuggg

SEQ ID NO: 482189 - RNA, 21 nt, Human
cagccaacaggagcagcagaa

SEQ ID NO: 482190 - RNA, 23 nt, Human
cagcugcagcauuucaguccccu

SEQ ID NO: 482191 - RNA, 23 nt, Human
cagguagcuccugcucuccugag

SEQ ID NO: 482192 - RNA, 21 nt, Human
caguccccuccccccucaacc

SEQ ID NO: 482193 - RNA, 24 nt, Human
cauuagaaaacaaaaccauuaaag

SEQ ID NO: 482194 - RNA, 18 nt, Human
ccaaaaaauccuacccac

SEQ ID NO: 482195 - RNA, 24 nt, Human
ccaaaaugcuggugcgggaugggc

SEQ ID NO: 482196 - RNA, 21 nt, Human
ccaaagugcugggauuauagg

SEQ ID NO: 482197 - RNA, 24 nt, Human
ccaaagugcugggauuauaggugu

SEQ ID NO: 482198 - RNA, 23 nt, Human
cccaaaccagggagcuguccugg

SEQ ID NO: 482199 - RNA, 21 nt, Human
ccccucaaccugccucacccc

SEQ ID NO: 482200 - RNA, 21 nt, Human
ccuaaaccucaguucaccaaa

SEQ ID NO: 482201 - RNA, 21 nt, Human
ccugaucuuaagugauccacc

SEQ ID NO: 482202 - RNA, 24 nt, Human
ccugccuuggccucccaaagugcu

SEQ ID NO: 482203 - RNA, 22 nt, Human
ccugggugguugcauccuucau

SEQ ID NO: 482204 - RNA, 24 nt, Human
ccuuggguugaaagaauggggagu

SEQ ID NO: 482205 - RNA, 18 nt, Human
cgggaugggcucuaggaa

SEQ ID NO: 482206 - RNA, 18 nt, Human
cguccggagucgucugcu

SEQ ID NO: 482207 - RNA, 22 nt, Human
cguuggccaggcuggucuugaa

SEQ ID NO: 482208 - RNA, 25 nt, Human
cuaaacucauaaacaucuuuucccc

SEQ ID NO: 482209 - RNA, 19 nt, Human
cuagauucugucugggggc

SEQ ID NO: 482210 - RNA, 23 nt, Human
cuagauucugucugggggcuuug

SEQ ID NO: 482211 - RNA, 26 nt, Human
cucaaccugccucaccccugccccaa

SEQ ID NO: 482212 - RNA, 23 nt, Human
cucuaggaacagaaagccaagug

SEQ ID NO: 482213 - RNA, 20 nt, Human
cugaagccuuaguuuuacuu

SEQ ID NO: 482214 - RNA, 27 nt, Human
cugaagccuuaguuuuacuugugcuca

SEQ ID NO: 482215 - RNA, 19 nt, Human
cugcaaauaaaacacccag

SEQ ID NO: 482216 - RNA, 21 nt, Human
cugcaaauaaaacacccagac

SEQ ID NO: 482217 - RNA, 18 nt, Human
cugccaaggagaugaagc

SEQ ID NO: 482218 - RNA, 21 nt, Human
cugggauuauaggugugagcc

SEQ ID NO: 482219 - RNA, 21 nt, Human
cuguuaucuuggugaaauggu

SEQ ID NO: 482220 - RNA, 23 nt, Human
cuuaagugauccaccugccuugg

SEQ ID NO: 482221 - RNA, 24 nt, Human
cuuaagugauccaccugccuuggc

SEQ ID NO: 482222 - RNA, 19 nt, Human
cuugggugcuccaagucug

SEQ ID NO: 482223 - RNA, 21 nt, Human
cuuggucuggccuugcugggc

SEQ ID NO: 482224 - RNA, 24 nt, Human
gaagauaacuccuaggcugucaga

SEQ ID NO: 482225 - RNA, 22 nt, Human
gaaucuucagccgugagcuuca

SEQ ID NO: 482226 - RNA, 19 nt, Human
gaccuugggugcuccaagu

SEQ ID NO: 482227 - RNA, 22 nt, Human
gagaaaggcucucugcagguuc

SEQ ID NO: 482228 - RNA, 18 nt, Human
gagaugggguuucaccac

SEQ ID NO: 482229 - RNA, 24 nt, Human
gagaugggguuucaccacguuggc

SEQ ID NO: 482230 - RNA, 19 nt, Human
gagcagcagaaggggcagg

SEQ ID NO: 482231 - RNA, 21 nt, Human
gagcagcagaaggggcaggca

SEQ ID NO: 482232 - RNA, 24 nt, Human
gaucuuaagugauccaccugccuu

SEQ ID NO: 482233 - RNA, 18 nt, Human
gauuauaggugugagcca

SEQ ID NO: 482234 - RNA, 20 nt, Human
gauuauaggugugagccacc

SEQ ID NO: 482235 - RNA, 23 nt, Human
gauuauaggugugagccaccgca

SEQ ID NO: 482236 - RNA, 18 nt, Human
gccagggugcaagucacc

SEQ ID NO: 482237 - RNA, 18 nt, Human
gccgacuuuaagaauaaa

SEQ ID NO: 482238 - RNA, 22 nt, Human
gccuuggccucccaaagugcug

SEQ ID NO: 482239 - RNA, 22 nt, Human
gccuuuggagaaauaguguggc

SEQ ID NO: 482240 - RNA, 21 nt, Human
gcugacaucuaggaaaaguca

SEQ ID NO: 482241 - RNA, 18 nt, Human
gcugcaacacaguguggc

SEQ ID NO: 482242 - RNA, 22 nt, Human
gcuggaauuccgagaugaagau

SEQ ID NO: 482243 - RNA, 24 nt, Human
gcuuacaucugcucccuccuccau

SEQ ID NO: 482244 - RNA, 19 nt, Human
gcuuuguggguaucuggaa

SEQ ID NO: 482245 - RNA, 19 nt, Human
ggaauccugcagccuuucc

SEQ ID NO: 482246 - RNA, 20 nt, Human
ggcagguauugagaaagaag

SEQ ID NO: 482247 - RNA, 18 nt, Human
ggcauagagacguggugg

SEQ ID NO: 482248 - RNA, 21 nt, Human
ggcccuagcauaaaauuugug

SEQ ID NO: 482249 - RNA, 23 nt, Human
ggcuggucuugaacuccugaucu

SEQ ID NO: 482250 - RNA, 24 nt, Human
gggagaaggggcugggaguaggga

SEQ ID NO: 482251 - RNA, 19 nt, Human
ggggaaaggcagguugcug

SEQ ID NO: 482252 - RNA, 19 nt, Human
ggggaguggaggugacugu

SEQ ID NO: 482253 - RNA, 20 nt, Human
gggggcuuuguggguaucug

SEQ ID NO: 482254 - RNA, 20 nt, Human
gggggggucuccacugggug

SEQ ID NO: 482255 - RNA, 22 nt, Human
gggguuucaccacguuggccag

SEQ ID NO: 482256 - RNA, 23 nt, Human
ggguggaggaaggaagccagggu

SEQ ID NO: 482257 - RNA, 22 nt, Human
ggguuucaccacguuggccagg

SEQ ID NO: 482258 - RNA, 20 nt, Human
gguaucuggaaagguggggc

SEQ ID NO: 482259 - RNA, 20 nt, Human
ggugaaaugguaaaaaaugu

SEQ ID NO: 482260 - RNA, 21 nt, Human
ggugggcuugcggucuugcug

SEQ ID NO: 482261 - RNA, 18 nt, Human
ggugguucgggggucagg

SEQ ID NO: 482262 - RNA, 24 nt, Human
gugauccaccugccuuggccuccc

SEQ ID NO: 482263 - RNA, 20 nt, Human
uaaaacacccagacauuucu

SEQ ID NO: 482264 - RNA, 23 nt, Human
uaaaacacccagacauuucugaa

SEQ ID NO: 482265 - RNA, 24 nt, Human
uaaaacacccagacauuucugaaa

SEQ ID NO: 482266 - RNA, 22 nt, Human
uaagaacggaagcggugagggg

SEQ ID NO: 482267 - RNA, 22 nt, Human
uaagaauaaaaccacggaccuc

SEQ ID NO: 482268 - RNA, 21 nt, Human
uaaguccggaggacagaauga

SEQ ID NO: 482269 - RNA, 23 nt, Human
uaauggcagcacaggcggcaaag

SEQ ID NO: 482270 - RNA, 22 nt, Human
uagagaugggguuucaccacgu

SEQ ID NO: 482271 - RNA, 20 nt, Human
uaggagcaagguaauuccau

SEQ ID NO: 482272 - RNA, 24 nt, Human
uaggagcaagguaauuccauuaca

SEQ ID NO: 482273 - RNA, 19 nt, Human
uaguagagaugggguuuca

SEQ ID NO: 482274 - RNA, 24 nt, Human
uaguagagaugggguuucaccacg

SEQ ID NO: 482275 - RNA, 19 nt, Human
uauacaaccaggaugugug

SEQ ID NO: 482276 - RNA, 23 nt, Human
uauacccaagacaaacuguccaa

SEQ ID NO: 482277 - RNA, 23 nt, Human
uauaggugugagccaccgcaccu

SEQ ID NO: 482278 - RNA, 19 nt, Human
ucaaccugccucaccccug

SEQ ID NO: 482279 - RNA, 21 nt, Human
ucaccccugccccaaagaagc

SEQ ID NO: 482280 - RNA, 22 nt, Human
ucagaaagaauucugugucuuc

SEQ ID NO: 482281 - RNA, 19 nt, Human
ucagccaacaggagcagca

SEQ ID NO: 482282 - RNA, 21 nt, Human
ucaggaacacacaacgcacca

SEQ ID NO: 482283 - RNA, 21 nt, Human
ucagucccugggugccacaug

SEQ ID NO: 482284 - RNA, 20 nt, Human
ucauggaggagggggcuuug

SEQ ID NO: 482285 - RNA, 20 nt, Human
uccacacaguugggcagcca

SEQ ID NO: 482286 - RNA, 27 nt, Human
uccagaacuccuuuuccucccuacucc

SEQ ID NO: 482287 - RNA, 20 nt, Human
uccaggggggcggcgggggg

SEQ ID NO: 482288 - RNA, 23 nt, Human
ucccaaagugcugggauuauagg

SEQ ID NO: 482289 - RNA, 21 nt, Human
ucccaaggaaaaugccuucuu

SEQ ID NO: 482290 - RNA, 22 nt, Human
ucccccaaccuccugaaaauga

SEQ ID NO: 482291 - RNA, 28 nt, Human
uccccuggggagggugggcuugcuucca

SEQ ID NO: 482292 - RNA, 23 nt, Human
uccccuucucucccaaggaaaau

SEQ ID NO: 482293 - RNA, 23 nt, Human
ucccuacuccugcacaguggcua

SEQ ID NO: 482294 - RNA, 18 nt, Human
ucccuauacccaagacaa

SEQ ID NO: 482295 - RNA, 25 nt, Human
uccucuagaaaaggcaguaagaacg

SEQ ID NO: 482296 - RNA, 22 nt, Human
uccuucauuuucuguccaugcc

SEQ ID NO: 482297 - RNA, 21 nt, Human
uccuucugcuggguuguuggu

SEQ ID NO: 482298 - RNA, 23 nt, Human
ucuagagauuacuggcuaaucug

SEQ ID NO: 482299 - RNA, 26 nt, Human
ucucaguucugaaacauaucgcuuua

SEQ ID NO: 482300 - RNA, 22 nt, Human
ucuccaugacuccagauggcug

SEQ ID NO: 482301 - RNA, 18 nt, Human
ucucuugcucucucacca

SEQ ID NO: 482302 - RNA, 22 nt, Human
ucugcagguuccaaaaugcugg

SEQ ID NO: 482303 - RNA, 21 nt, Human
ucuugaacuccugaucuuaag

SEQ ID NO: 482304 - RNA, 19 nt, Human
ucuuuuuuuuuugucagau

SEQ ID NO: 482305 - RNA, 23 nt, Human
ugaaugagaaaacuuucauugga

SEQ ID NO: 482306 - RNA, 19 nt, Human
ugacuucaagaacgaagac

SEQ ID NO: 482307 - RNA, 21 nt, Human
ugagaaaacuuucauuggaga

SEQ ID NO: 482308 - RNA, 21 nt, Human
ugagagcaccccagcucuacc

SEQ ID NO: 482309 - RNA, 23 nt, Human
ugagcaggaagacagggagggaa

SEQ ID NO: 482310 - RNA, 19 nt, Human
ugagugugggagggaggac

SEQ ID NO: 482311 - RNA, 24 nt, Human
ugaucuuaagugauccaccugccu

SEQ ID NO: 482312 - RNA, 19 nt, Human
ugccucaccccugccccaa

SEQ ID NO: 482313 - RNA, 23 nt, Human
ugcuggaauuccgagaugaagau

SEQ ID NO: 482314 - RNA, 18 nt, Human
ugcugggcugaacuccag

SEQ ID NO: 482315 - RNA, 24 nt, Human
ugcuuuccaggggggcggcggggg

SEQ ID NO: 482316 - RNA, 20 nt, Human
uggaaagguggggcgcagcu

SEQ ID NO: 482317 - RNA, 24 nt, Human
uggaaugcaaggguugccauggua

SEQ ID NO: 482318 - RNA, 25 nt, Human
uggccaggccagcccaaaccaggga

SEQ ID NO: 482319 - RNA, 24 nt, Human
uggccaggcuggucuugaacuccu

SEQ ID NO: 482320 - RNA, 20 nt, Human
uggcggcgccucuccagaac

SEQ ID NO: 482321 - RNA, 23 nt, Human
ugggagaaaggcucucugcaggu

SEQ ID NO: 482322 - RNA, 20 nt, Human
ugggagaaggggcugggagu

SEQ ID NO: 482323 - RNA, 19 nt, Human
ugggauuauaggugugagc

SEQ ID NO: 482324 - RNA, 22 nt, Human
ugggauuauaggugugagccac

SEQ ID NO: 482325 - RNA, 23 nt, Human
ugggauuauaggugugagccacc

SEQ ID NO: 482326 - RNA, 24 nt, Human
ugggauuauaggugugagccaccg

SEQ ID NO: 482327 - RNA, 18 nt, Human
ugggcaugggagaccagg

SEQ ID NO: 482328 - RNA, 21 nt, Human
ugggcugaacuccaggaaguu

SEQ ID NO: 482329 - RNA, 24 nt, Human
uggggagggugggcuugcuuccag

SEQ ID NO: 482330 - RNA, 24 nt, Human
ugggguuucaccacguuggccagg

SEQ ID NO: 482331 - RNA, 19 nt, Human
uguccugggugguugcauc

SEQ ID NO: 482332 - RNA, 20 nt, Human
ugucugcuguguggaggaag

SEQ ID NO: 482333 - RNA, 24 nt, Human
ugugcggaauuuauuccuucugcu

SEQ ID NO: 482334 - RNA, 18 nt, Human
uguggagggaagauggcu

SEQ ID NO: 482335 - RNA, 21 nt, Human
uguggcaacccugaagucagc

SEQ ID NO: 482336 - RNA, 23 nt, Human
ugugugaacagggcugggaguug

SEQ ID NO: 482337 - RNA, 21 nt, Human
uuaagugauccaccugccuug

SEQ ID NO: 482338 - RNA, 18 nt, Human
uuaguagagaugggguuu

SEQ ID NO: 482339 - RNA, 22 nt, Human
uuaguagagaugggguuucacc

SEQ ID NO: 482340 - RNA, 24 nt, Human
uuaguagagaugggguuucaccac

SEQ ID NO: 482341 - RNA, 25 nt, Human
uuaguagagaugggguuucaccacg

SEQ ID NO: 482342 - RNA, 19 nt, Human
uucauagucucccacagag

SEQ ID NO: 482343 - RNA, 22 nt, Human
uuccaggggggcggcggggggu

SEQ ID NO: 482344 - RNA, 21 nt, Human
uuccuagcaggggaauuccag

SEQ ID NO: 482345 - RNA, 19 nt, Human
uucuccccuucuggggcag

SEQ ID NO: 482346 - RNA, 21 nt, Human
uucuuuggggaucaagggggu

SEQ ID NO: 482347 - RNA, 21 nt, Human
uugaaagaauggggaguggag

SEQ ID NO: 482348 - RNA, 23 nt, Human
uuggagaccuugggugcuccaag

SEQ ID NO: 482349 - RNA, 18 nt, Human
uuggccucccaaagugcu

SEQ ID NO: 482350 - RNA, 19 nt, Human
uugugugaacagggcuggg

SEQ ID NO: 482351 - RNA, 23 nt, Human
uuuaugauucuaugaaugggaag

SEQ ID NO: 482352 - RNA, 21 nt, Human
uuucaccacguuggccaggcu

SEQ ID NO: 482353 - RNA, 23 nt, Human
uuuccaggggggcggcggggggu

SEQ ID NO: 482354 - RNA, 24 nt, Human
uuuuuaguagagaugggguuucac

SEQ ID NO: 482355 - RNA, 23 nt, Human
uuuuuuaguagagaugggguuuc

SEQ ID NO: 482356 - RNA, 24 nt, Human
uuuuuuuuuuuuuuaguagagaug

SEQ ID NO: 482357 - RNA, 23 nt, Human
cagggugcagaagcgagacucga

SEQ ID NO: 482358 - RNA, 22 nt, Human
agccgcaucgccggcccgcgcu

SEQ ID NO: 482359 - RNA, 18 nt, Human
agcggggccuccuccccc

SEQ ID NO: 482360 - RNA, 24 nt, Human
augcagcauccggggcugaggagc

SEQ ID NO: 482361 - RNA, 20 nt, Human
cagcuccggagugccuggcg

SEQ ID NO: 482362 - RNA, 24 nt, Human
cccccgcgccuccgccucccgggc

SEQ ID NO: 482363 - RNA, 19 nt, Human
ccccgcgccuccgccuccc

SEQ ID NO: 482364 - RNA, 18 nt, Human
cccggagcccgccgcccg

SEQ ID NO: 482365 - RNA, 22 nt, Human
ccgcaucgccggcccgcgcucc

SEQ ID NO: 482366 - RNA, 19 nt, Human
ccgcgcuccuggccgcugc

SEQ ID NO: 482367 - RNA, 21 nt, Human
ccugggccggggcgggggggc

SEQ ID NO: 482368 - RNA, 26 nt, Human
cgccggcccgcgcuccuggccgcugc

SEQ ID NO: 482369 - RNA, 23 nt, Human
cgccugggccggggcgggggggc

SEQ ID NO: 482370 - RNA, 19 nt, Human
cggaaggaugaagucaugc

SEQ ID NO: 482371 - RNA, 19 nt, Human
cggagugccuggcggcggc

SEQ ID NO: 482372 - RNA, 18 nt, Human
cggggugggcgcggggcg

SEQ ID NO: 482373 - RNA, 19 nt, Human
cuggccgcugcgaggcugg

SEQ ID NO: 482374 - RNA, 23 nt, Human
gacugcggcggggcgcgggcggc

SEQ ID NO: 482375 - RNA, 19 nt, Human
gccuccucccccgcgccuc

SEQ ID NO: 482376 - RNA, 18 nt, Human
gcgcggggcgggagcggg

SEQ ID NO: 482377 - RNA, 23 nt, Human
gcgggcgcggggugggcgcgggg

SEQ ID NO: 482378 - RNA, 19 nt, Human
gcggggcgcgggcggcggg

SEQ ID NO: 482379 - RNA, 23 nt, Human
ggagugccuggcggcggcggcgg

SEQ ID NO: 482380 - RNA, 18 nt, Human
ggcccggagcccgccgcc

SEQ ID NO: 482381 - RNA, 26 nt, Human
ggcggcggcggcacggcccugcagcc

SEQ ID NO: 482382 - RNA, 23 nt, Human
gggcuugcugccggaccggcccu

SEQ ID NO: 482383 - RNA, 18 nt, Human
ggggcgcgggcggcgggc

SEQ ID NO: 482384 - RNA, 22 nt, Human
gugccuggcggcggcggcggca

SEQ ID NO: 482385 - RNA, 24 nt, Human
ucccccgcgccuccgccucccggg

SEQ ID NO: 482386 - RNA, 24 nt, Human
ucgccggcccgcgcuccuggccgc

SEQ ID NO: 482387 - RNA, 19 nt, Human
ugaggagccaagcggggcc

SEQ ID NO: 482388 - RNA, 19 nt, Human
uggccgcugcgaggcuggg

SEQ ID NO: 482389 - RNA, 20 nt, Human
uggcggcggcggcggcacgg

SEQ ID NO: 482390 - RNA, 25 nt, Human
uggcggcggcggcggcacggcccug

SEQ ID NO: 482391 - RNA, 19 nt, Human
uggugcugaagcggacagc

SEQ ID NO: 482392 - RNA, 18 nt, Human
acuugcucugccuuccuc

SEQ ID NO: 482393 - RNA, 21 nt, Human
acuugcucugccuuccucccu

SEQ ID NO: 482394 - RNA, 23 nt, Human
caaggcuucuacgccuuggggcu

SEQ ID NO: 482395 - RNA, 20 nt, Human
ccagaaacugcuccugcuaa

SEQ ID NO: 482396 - RNA, 24 nt, Human
cuacgccuuggggcucccuccugg

SEQ ID NO: 482397 - RNA, 20 nt, Human
cuccugcuaagcccugcucc

SEQ ID NO: 482398 - RNA, 25 nt, Human
cugaaaauugcagugacauaggcac

SEQ ID NO: 482399 - RNA, 18 nt, Human
cugcuaagcccugcucca

SEQ ID NO: 482400 - RNA, 21 nt, Human
cuggugggcaccgcuucuccu

SEQ ID NO: 482401 - RNA, 20 nt, Human
gaggggcugccccgcuggca

SEQ ID NO: 482402 - RNA, 21 nt, Human
gccuuggggcucccuccuggg

SEQ ID NO: 482403 - RNA, 22 nt, Human
gcuccugcuaagcccugcucca

SEQ ID NO: 482404 - RNA, 24 nt, Human
ggcuggugcuucuggccagaaacu

SEQ ID NO: 482405 - RNA, 24 nt, Human
uagacaccagguuuggaagagcag

SEQ ID NO: 482406 - RNA, 23 nt, Human
uccagaguugaagcuucugagga

SEQ ID NO: 482407 - RNA, 21 nt, Human
ugaauaugucuccugaaaauu

SEQ ID NO: 482408 - RNA, 24 nt, Human
ugcucugccuuccucccucugccg

SEQ ID NO: 482409 - RNA, 19 nt, Human
uggaagagcagaggaguug

SEQ ID NO: 482410 - RNA, 23 nt, Human
uggcagcaggcuggugcuucugg

SEQ ID NO: 482411 - RNA, 21 nt, Human
uggccagaaacugcuccugcu

SEQ ID NO: 482412 - RNA, 21 nt, Human
uucaacaaggcuucuacgccu

SEQ ID NO: 482413 - RNA, 21 nt, Human
uucuccugcucacagcuucaa

SEQ ID NO: 482414 - RNA, 18 nt, Human
uuggaagagcagaggagu

SEQ ID NO: 482415 - RNA, 18 nt, Human
cagacacaaacaugcgac

SEQ ID NO: 482416 - RNA, 19 nt, Human
cagucgggcuccaaacacc

SEQ ID NO: 482417 - RNA, 23 nt, Human
cccgagggcagucgggcuccaaa

SEQ ID NO: 482418 - RNA, 21 nt, Human
cgggcuccaaacaccaacucu

SEQ ID NO: 482419 - RNA, 20 nt, Human
gcagacacaaacaugcgaca

SEQ ID NO: 482420 - RNA, 22 nt, Human
ggcggcggcgacuccggcuccg

SEQ ID NO: 482421 - RNA, 20 nt, Human
uccaaacaccaacucugucc

SEQ ID NO: 482422 - RNA, 18 nt, Human
ugugcccgagggcagucg

SEQ ID NO: 482423 - RNA, 23 nt, Human
acaccucgguacagcagagacag

SEQ ID NO: 482424 - RNA, 19 nt, Human
acagcagagacagacacga

SEQ ID NO: 482425 - RNA, 23 nt, Human
accaggaggauauacaggaugac

SEQ ID NO: 482426 - RNA, 24 nt, Human
agacacgaagggcgggcgggaggg

SEQ ID NO: 482427 - RNA, 21 nt, Human
agcaaaaccaaaccaagccug

SEQ ID NO: 482428 - RNA, 21 nt, Human
aucaaguucuuggcuucagga

SEQ ID NO: 482429 - RNA, 23 nt, Human
caggaugaccccgcaggcccaga

SEQ ID NO: 482430 - RNA, 20 nt, Human
ccagcaaaaccaaaccaagc

SEQ ID NO: 482431 - RNA, 18 nt, Human
ccagcagcagguucucag

SEQ ID NO: 482432 - RNA, 21 nt, Human
cccuccagagccacuggcugc

SEQ ID NO: 482433 - RNA, 22 nt, Human
ccucaagaccucaggggacaag

SEQ ID NO: 482434 - RNA, 24 nt, Human
ccuccggcuggaaucuccuaaagc

SEQ ID NO: 482435 - RNA, 21 nt, Human
cggcuggaaucuccuaaagcc

SEQ ID NO: 482436 - RNA, 20 nt, Human
cuccagagccacuggcugcg

SEQ ID NO: 482437 - RNA, 25 nt, Human
cuccggcuggaaucuccuaaagccc

SEQ ID NO: 482438 - RNA, 20 nt, Human
cuucaggaguuaccgugucc

SEQ ID NO: 482439 - RNA, 22 nt, Human
gcuaggccaaaaucagccagcu

SEQ ID NO: 482440 - RNA, 26 nt, Human
gguacagcagagacagacacgaaggg

SEQ ID NO: 482441 - RNA, 20 nt, Human
guaaaaaacaccucgguaca

SEQ ID NO: 482442 - RNA, 21 nt, Human
guaaaaaacaccucgguacag

SEQ ID NO: 482443 - RNA, 20 nt, Human
gugaugggaaaucauaggcu

SEQ ID NO: 482444 - RNA, 22 nt, Human
uagggaucuuuccucaagaccu

SEQ ID NO: 482445 - RNA, 21 nt, Human
uccagaaucugauguauacag

SEQ ID NO: 482446 - RNA, 19 nt, Human
uccagagccacuggcugcg

SEQ ID NO: 482447 - RNA, 24 nt, Human
ucuccuaaagccccuguggcugag

SEQ ID NO: 482448 - RNA, 21 nt, Human
ugccagcaaaaccaaaccaag

SEQ ID NO: 482449 - RNA, 19 nt, Human
ugcugauccucaucccaga

SEQ ID NO: 482450 - RNA, 23 nt, Human
ugcugguggaugugguuaacacu

SEQ ID NO: 482451 - RNA, 26 nt, Human
aaaagacaacaaaaaaggaaucagaa

SEQ ID NO: 482452 - RNA, 18 nt, Human
aaaagcccuuguccaucc

SEQ ID NO: 482453 - RNA, 18 nt, Human
aaacaacgaugccaacca

SEQ ID NO: 482454 - RNA, 21 nt, Human
aaacaacgaugccaaccaaaa

SEQ ID NO: 482455 - RNA, 18 nt, Human
aacacuggcccugucccc

SEQ ID NO: 482456 - RNA, 23 nt, Human
aacucacuuccugggaaguuaau

SEQ ID NO: 482457 - RNA, 22 nt, Human
aacuugccuuccacuaacucua

SEQ ID NO: 482458 - RNA, 23 nt, Human
aaguaaaagacaacaaaaaagga

SEQ ID NO: 482459 - RNA, 18 nt, Human
acaaaaaaggaaucagaa

SEQ ID NO: 482460 - RNA, 22 nt, Human
accccccucuccaccauaugcc

SEQ ID NO: 482461 - RNA, 18 nt, Human
acugcugauguccucagg

SEQ ID NO: 482462 - RNA, 21 nt, Human
agaauucuccaacacuggccc

SEQ ID NO: 482463 - RNA, 20 nt, Human
agagagaaggugaaggcugc

SEQ ID NO: 482464 - RNA, 20 nt, Human
agccaggccugcccggcccc

SEQ ID NO: 482465 - RNA, 24 nt, Human
agcccuggugucuucuccagccuc

SEQ ID NO: 482466 - RNA, 23 nt, Human
agcccuuguccauccauguuucc

SEQ ID NO: 482467 - RNA, 23 nt, Human
agccggggagaaacguggaccca

SEQ ID NO: 482468 - RNA, 22 nt, Human
agcugagccaggccugcccggc

SEQ ID NO: 482469 - RNA, 20 nt, Human
aggagggccaagaagaggag

SEQ ID NO: 482470 - RNA, 21 nt, Human
aggagggccaagaagaggagg

SEQ ID NO: 482471 - RNA, 21 nt, Human
aggccaaggagggccaagaag

SEQ ID NO: 482472 - RNA, 21 nt, Human
aucuuggucuccugccucugg

SEQ ID NO: 482473 - RNA, 22 nt, Human
augcagcacgaugggggagggg

SEQ ID NO: 482474 - RNA, 23 nt, Human
augcagcacgaugggggaggggc

SEQ ID NO: 482475 - RNA, 22 nt, Human
auucaaaaacaacgaugccaac

SEQ ID NO: 482476 - RNA, 18 nt, Human
caacaggacacccacacc

SEQ ID NO: 482477 - RNA, 22 nt, Human
caagcagggccucuccccgaac

SEQ ID NO: 482478 - RNA, 21 nt, Human
caaggugggcaggguaccccc

SEQ ID NO: 482479 - RNA, 21 nt, Human
cacaccuguggccaaaagccc

SEQ ID NO: 482480 - RNA, 19 nt, Human
cacauucggcuccuagccu

SEQ ID NO: 482481 - RNA, 21 nt, Human
caccaccccaaggugggcagg

SEQ ID NO: 482482 - RNA, 23 nt, Human
cacccacaccuguggccaaaagc

SEQ ID NO: 482483 - RNA, 19 nt, Human
cacccccgcucugagcagg

SEQ ID NO: 482484 - RNA, 18 nt, Human
caccuguggccaaaagcc

SEQ ID NO: 482485 - RNA, 20 nt, Human
cacugccuuagcccagagga

SEQ ID NO: 482486 - RNA, 19 nt, Human
cagaauucuccaacacugg

SEQ ID NO: 482487 - RNA, 21 nt, Human
caggcgcggagaugcagcggg

SEQ ID NO: 482488 - RNA, 18 nt, Human
caggguaccccccucucc

SEQ ID NO: 482489 - RNA, 25 nt, Human
cagguuaaaaacaaaaguaaaagac

SEQ ID NO: 482490 - RNA, 22 nt, Human
ccacacugccuuagcccagagg

SEQ ID NO: 482491 - RNA, 25 nt, Human
ccacaggccugucgcguccauggcc

SEQ ID NO: 482492 - RNA, 23 nt, Human
ccaccugccagcgugcacacccc

SEQ ID NO: 482493 - RNA, 21 nt, Human
ccaggccugcccggccccagc

SEQ ID NO: 482494 - RNA, 18 nt, Human
cccaagaccccaaaugac

SEQ ID NO: 482495 - RNA, 24 nt, Human
cccagguuaaaaacaaaaguaaaa

SEQ ID NO: 482496 - RNA, 19 nt, Human
ccccacagaaugggucagg

SEQ ID NO: 482497 - RNA, 23 nt, Human
ccccaccgccucgcuggggccca

SEQ ID NO: 482498 - RNA, 20 nt, Human
ccccagcccccugccugcgg

SEQ ID NO: 482499 - RNA, 22 nt, Human
ccccagcccccugccugcgggg

SEQ ID NO: 482500 - RNA, 19 nt, Human
cccccaagaccccaaauga

SEQ ID NO: 482501 - RNA, 25 nt, Human
cccccagccagccucccuucuccaa

SEQ ID NO: 482502 - RNA, 21 nt, Human
ccccugagcuuuccaagggug

SEQ ID NO: 482503 - RNA, 23 nt, Human
ccccugagcuuuccaaggguggg

SEQ ID NO: 482504 - RNA, 25 nt, Human
cccgccccaccgccucgcuggggcc

SEQ ID NO: 482505 - RNA, 18 nt, Human
cccgccccgccccgcccc

SEQ ID NO: 482506 - RNA, 18 nt, Human
cccgccccgccccgcccc

SEQ ID NO: 482507 - RNA, 19 nt, Human
cccgccccgccccgccccc

SEQ ID NO: 482508 - RNA, 20 nt, Human
cccgccccgccccgccccgc

SEQ ID NO: 482509 - RNA, 23 nt, Human
cccugcccccaagaccccaaaug

SEQ ID NO: 482510 - RNA, 18 nt, Human
ccgccccgccccaccgcc

SEQ ID NO: 482511 - RNA, 19 nt, Human
ccgccccgccccaccgccu

SEQ ID NO: 482512 - RNA, 21 nt, Human
ccgccccgccccaccgccucg

SEQ ID NO: 482513 - RNA, 24 nt, Human
ccuccugccccaggccaugccaac

SEQ ID NO: 482514 - RNA, 21 nt, Human
ccucugccuccugccccaggc

SEQ ID NO: 482515 - RNA, 21 nt, Human
ccuggacgugcgugcguggag

SEQ ID NO: 482516 - RNA, 21 nt, Human
ccuuguccauccauguuucca

SEQ ID NO: 482517 - RNA, 18 nt, Human
cggcccggcgggcggccc

SEQ ID NO: 482518 - RNA, 21 nt, Human
cgggaugagugugcugccggg

SEQ ID NO: 482519 - RNA, 23 nt, Human
cgugaucccuccgaccuggacag

SEQ ID NO: 482520 - RNA, 22 nt, Human
cuagccuuaaauagacguagaa

SEQ ID NO: 482521 - RNA, 25 nt, Human
cuccagcacccccgcucugagcagg

SEQ ID NO: 482522 - RNA, 18 nt, Human
cucccccagccagccucc

SEQ ID NO: 482523 - RNA, 21 nt, Human
cucccuucuccaaacaagccc

SEQ ID NO: 482524 - RNA, 21 nt, Human
cuccugccccaggccaugcca

SEQ ID NO: 482525 - RNA, 24 nt, Human
cugccaaauaaucuugggcugugc

SEQ ID NO: 482526 - RNA, 19 nt, Human
cugcccccaagaccccaaa

SEQ ID NO: 482527 - RNA, 18 nt, Human
cugccggguggcccuggg

SEQ ID NO: 482528 - RNA, 19 nt, Human
cugccucugccuccugccc

SEQ ID NO: 482529 - RNA, 20 nt, Human
cugccucugccuccugcccc

SEQ ID NO: 482530 - RNA, 21 nt, Human
cuucuccagccucagcucuag

SEQ ID NO: 482531 - RNA, 19 nt, Human
gagaaacguggacccacug

SEQ ID NO: 482532 - RNA, 18 nt, Human
gagcaggcugacugcuga

SEQ ID NO: 482533 - RNA, 18 nt, Human
gaggauggccucguggga

SEQ ID NO: 482534 - RNA, 18 nt, Human
gagggccaagaagaggag

SEQ ID NO: 482535 - RNA, 20 nt, Human
gagggccaagaagaggagga

SEQ ID NO: 482536 - RNA, 25 nt, Human
gauuggcucuuaacuugccuuccac

SEQ ID NO: 482537 - RNA, 19 nt, Human
gccccaggccaugccaacc

SEQ ID NO: 482538 - RNA, 22 nt, Human
gccccgccccaccgccucgcug

SEQ ID NO: 482539 - RNA, 21 nt, Human
gcugccggguggcccugggug

SEQ ID NO: 482540 - RNA, 22 nt, Human
ggaggauggccucgugggagcc

SEQ ID NO: 482541 - RNA, 18 nt, Human
ggccaagaagaggaggau

SEQ ID NO: 482542 - RNA, 24 nt, Human
ggccaagaagaggaggauggccuc

SEQ ID NO: 482543 - RNA, 19 nt, Human
gggaaccugggcgccgggc

SEQ ID NO: 482544 - RNA, 24 nt, Human
gggauccggguuucucccccagcc

SEQ ID NO: 482545 - RNA, 19 nt, Human
gggcaggguaccccccucu

SEQ ID NO: 482546 - RNA, 23 nt, Human
gggcugcaguccccagcccccug

SEQ ID NO: 482547 - RNA, 22 nt, Human
gggggaggggcgggaguggggc

SEQ ID NO: 482548 - RNA, 22 nt, Human
gguaccccccucuccaccauau

SEQ ID NO: 482549 - RNA, 21 nt, Human
gugcugccggguggcccuggg

SEQ ID NO: 482550 - RNA, 25 nt, Human
gugggggucaaccucuaugagcauu

SEQ ID NO: 482551 - RNA, 21 nt, Human
gugugcugccggguggcccug

SEQ ID NO: 482552 - RNA, 21 nt, Human
uaaaaacaaaaguaaaagaca

SEQ ID NO: 482553 - RNA, 21 nt, Human
uaaaagacaacaaaaaaggaa

SEQ ID NO: 482554 - RNA, 23 nt, Human
uaccccccucuccaccauaugcc

SEQ ID NO: 482555 - RNA, 24 nt, Human
uaggagugugagugcagcucuugg

SEQ ID NO: 482556 - RNA, 24 nt, Human
ucaaaaacaacgaugccaaccaaa

SEQ ID NO: 482557 - RNA, 19 nt, Human
ucagaauucuccaacacug

SEQ ID NO: 482558 - RNA, 23 nt, Human
ucagugauuggcucuuaacuugc

SEQ ID NO: 482559 - RNA, 24 nt, Human
uccaacacuggcccuguccccagu

SEQ ID NO: 482560 - RNA, 18 nt, Human
uccaacaggacacccaca

SEQ ID NO: 482561 - RNA, 22 nt, Human
uccagcacccccgcucugagca

SEQ ID NO: 482562 - RNA, 24 nt, Human
uccauccauguuuccagggcagug

SEQ ID NO: 482563 - RNA, 18 nt, Human
ucccccagccagccuccc

SEQ ID NO: 482564 - RNA, 21 nt, Human
uccccgaacccccagguuaaa

SEQ ID NO: 482565 - RNA, 21 nt, Human
uccgaucaaaguggucccccc

SEQ ID NO: 482566 - RNA, 23 nt, Human
uccgcuucaggccucugcucaga

SEQ ID NO: 482567 - RNA, 21 nt, Human
ucuccugccucugccuccugc

SEQ ID NO: 482568 - RNA, 23 nt, Human
ucuccugccucugccuccugccc

SEQ ID NO: 482569 - RNA, 21 nt, Human
ucugagcaggcugacugcuga

SEQ ID NO: 482570 - RNA, 24 nt, Human
ucuuauagaguuugcucaucgcuu

SEQ ID NO: 482571 - RNA, 20 nt, Human
ugagcaucccaccugggccu

SEQ ID NO: 482572 - RNA, 20 nt, Human
ugaggggugggccucuggag

SEQ ID NO: 482573 - RNA, 18 nt, Human
ugauguccucagggugag

SEQ ID NO: 482574 - RNA, 22 nt, Human
ugcacaccccuccagguucugu

SEQ ID NO: 482575 - RNA, 19 nt, Human
ugcacccacaggcgcggag

SEQ ID NO: 482576 - RNA, 20 nt, Human
ugcacgcgcuccagcacccc

SEQ ID NO: 482577 - RNA, 22 nt, Human
ugccccaggccaugccaaccag

SEQ ID NO: 482578 - RNA, 21 nt, Human
ugccucugccuccugccccag

SEQ ID NO: 482579 - RNA, 19 nt, Human
ugccuuagcccagaggagc

SEQ ID NO: 482580 - RNA, 28 nt, Human
uggccaaaagcccuuguccauccauguu

SEQ ID NO: 482581 - RNA, 18 nt, Human
uggcugccaaauaaucuu

SEQ ID NO: 482582 - RNA, 20 nt, Human
ugggcagggacgauguggug

SEQ ID NO: 482583 - RNA, 23 nt, Human
uggggaucagugauuggcucuua

SEQ ID NO: 482584 - RNA, 24 nt, Human
uguggcagcugagccaggccugcc

SEQ ID NO: 482585 - RNA, 19 nt, Human
ugugguaagccuggccucc

SEQ ID NO: 482586 - RNA, 23 nt, Human
ugugugcaacagaugagcacgcg

SEQ ID NO: 482587 - RNA, 25 nt, Human
uuacagaugcauguaccagugcagg

SEQ ID NO: 482588 - RNA, 23 nt, Human
uugcaugaggggugggccucugg

SEQ ID NO: 482589 - RNA, 24 nt, Human
aaaagaaaaaaaaaaagucaucaa

SEQ ID NO: 482590 - RNA, 22 nt, Human
aaacaagagaagcccugcagaa

SEQ ID NO: 482591 - RNA, 23 nt, Human
aaacaagagaagcccugcagaag

SEQ ID NO: 482592 - RNA, 23 nt, Human
aaacgcggugcagcagcccccca

SEQ ID NO: 482593 - RNA, 19 nt, Human
aaacuaaccaagccccauc

SEQ ID NO: 482594 - RNA, 23 nt, Human
aaagggcagaggaaaugggaagu

SEQ ID NO: 482595 - RNA, 19 nt, Human
aaagugcugggauuacagg

SEQ ID NO: 482596 - RNA, 23 nt, Human
aaagugcugggauuacaggugug

SEQ ID NO: 482597 - RNA, 24 nt, Human
aaagugcugggauuacagguguga

SEQ ID NO: 482598 - RNA, 24 nt, Human
aaccaccuccauggccucagaccc

SEQ ID NO: 482599 - RNA, 19 nt, Human
aacuaaccaagccccaucu

SEQ ID NO: 482600 - RNA, 21 nt, Human
aacuggguggauuuccagccc

SEQ ID NO: 482601 - RNA, 22 nt, Human
aagcaggcugggccuaagacua

SEQ ID NO: 482602 - RNA, 23 nt, Human
aaggaaaaaacaaauaaccagag

SEQ ID NO: 482603 - RNA, 18 nt, Human
aagugcugggauuacagg

SEQ ID NO: 482604 - RNA, 19 nt, Human
aagugcugggauuacaggu

SEQ ID NO: 482605 - RNA, 24 nt, Human
acaaaggggaacuuccugugccaa

SEQ ID NO: 482606 - RNA, 19 nt, Human
acagcugggugcugccuga

SEQ ID NO: 482607 - RNA, 24 nt, Human
accaaauuggucccacagaugagc

SEQ ID NO: 482608 - RNA, 18 nt, Human
accacggcucuggaaggu

SEQ ID NO: 482609 - RNA, 28 nt, Human
acccagcaagcaggccagacgacccuuu

SEQ ID NO: 482610 - RNA, 18 nt, Human
accccacugcccccacag

SEQ ID NO: 482611 - RNA, 21 nt, Human
acccucgaccuccccaggcuc

SEQ ID NO: 482612 - RNA, 24 nt, Human
accucgugauccacccgccuuggc

SEQ ID NO: 482613 - RNA, 22 nt, Human
accugccucucaggaaaggcca

SEQ ID NO: 482614 - RNA, 25 nt, Human
agacaagugagagcgacaggccagg

SEQ ID NO: 482615 - RNA, 18 nt, Human
agacagggucucucugug

SEQ ID NO: 482616 - RNA, 23 nt, Human
agacagggucucucuguguugcc

SEQ ID NO: 482617 - RNA, 23 nt, Human
agaccuggagggcucccugaacc

SEQ ID NO: 482618 - RNA, 25 nt, Human
agaggaaaugggaaguggauggagg

SEQ ID NO: 482619 - RNA, 20 nt, Human
agaguccuuccagcuuuccu

SEQ ID NO: 482620 - RNA, 21 nt, Human
agaguccuuccagcuuuccuc

SEQ ID NO: 482621 - RNA, 21 nt, Human
agcacgaucacggcucgcugc

SEQ ID NO: 482622 - RNA, 23 nt, Human
agccaggagggcaagaggaagug

SEQ ID NO: 482623 - RNA, 22 nt, Human
agcccuuucuguuuuccugacu

SEQ ID NO: 482624 - RNA, 18 nt, Human
agcgacccaggggauguc

SEQ ID NO: 482625 - RNA, 21 nt, Human
agcguacccugaaacuucccu

SEQ ID NO: 482626 - RNA, 21 nt, Human
agcugaucagauggaaacaau

SEQ ID NO: 482627 - RNA, 23 nt, Human
aggaaaaaacaaauaaccagaga

SEQ ID NO: 482628 - RNA, 19 nt, Human
aggagaaacgaagaccugg

SEQ ID NO: 482629 - RNA, 24 nt, Human
aggcagaguccuuccagcuuuccu

SEQ ID NO: 482630 - RNA, 18 nt, Human
aggccagaccaguaggga

SEQ ID NO: 482631 - RNA, 21 nt, Human
aggccagaccaguagggaaag

SEQ ID NO: 482632 - RNA, 23 nt, Human
aggcuuucugggagccacuggca

SEQ ID NO: 482633 - RNA, 19 nt, Human
agggggagguggaaaaggg

SEQ ID NO: 482634 - RNA, 23 nt, Human
aggugugagucaccgcgcccggc

SEQ ID NO: 482635 - RNA, 18 nt, Human
aguagcugggauuacagg

SEQ ID NO: 482636 - RNA, 18 nt, Human
aguccuuuuuuuuuuuuu

SEQ ID NO: 482637 - RNA, 23 nt, Human
agugcaguagcacgaucacggcu

SEQ ID NO: 482638 - RNA, 20 nt, Human
agugcagugacgcgaucucg

SEQ ID NO: 482639 - RNA, 19 nt, Human
aguuaacuggguggauuuc

SEQ ID NO: 482640 - RNA, 19 nt, Human
auccacccgccuuggccuc

SEQ ID NO: 482641 - RNA, 23 nt, Human
aucuagcccccuacucccucuca

SEQ ID NO: 482642 - RNA, 19 nt, Human
aucuuggcuuauccuuuuc

SEQ ID NO: 482643 - RNA, 19 nt, Human
augggguuucaccauguug

SEQ ID NO: 482644 - RNA, 24 nt, Human
augggguuucaccauguuguccag

SEQ ID NO: 482645 - RNA, 30 nt, Human
caaaccccacacacagucacuugguauauc

SEQ ID NO: 482646 - RNA, 22 nt, Human
caaaggaaaaaacaaauaacca

SEQ ID NO: 482647 - RNA, 20 nt, Human
caaccaaacuucccaauauc

SEQ ID NO: 482648 - RNA, 21 nt, Human
caaccaccuccauggccucag

SEQ ID NO: 482649 - RNA, 20 nt, Human
caaccucugccucccagguu

SEQ ID NO: 482650 - RNA, 22 nt, Human
caagccccaucuggugccagaa

SEQ ID NO: 482651 - RNA, 21 nt, Human
cacagcugcugaauacccuuc

SEQ ID NO: 482652 - RNA, 22 nt, Human
caccacagcugcugaauacccu

SEQ ID NO: 482653 - RNA, 24 nt, Human
caccauacuuggcuaauuuuugua

SEQ ID NO: 482654 - RNA, 22 nt, Human
caccauguuguccaggcuaauc

SEQ ID NO: 482655 - RNA, 23 nt, Human
caccauguuguccaggcuaaucu

SEQ ID NO: 482656 - RNA, 24 nt, Human
caccauguuguccaggcuaaucuu

SEQ ID NO: 482657 - RNA, 19 nt, Human
cacccgccuguccagccag

SEQ ID NO: 482658 - RNA, 24 nt, Human
cacccgccuuggccuccgaaagug

SEQ ID NO: 482659 - RNA, 19 nt, Human
cacgcuggagugcagugac

SEQ ID NO: 482660 - RNA, 19 nt, Human
cacuaggagccacaucuag

SEQ ID NO: 482661 - RNA, 18 nt, Human
cacugcaaccucugccuc

SEQ ID NO: 482662 - RNA, 21 nt, Human
cacugcaaccucugccuccca

SEQ ID NO: 482663 - RNA, 20 nt, Human
cagaguccuuccagcuuucc

SEQ ID NO: 482664 - RNA, 22 nt, Human
cagcaagcaggccagacgaccc

SEQ ID NO: 482665 - RNA, 25 nt, Human
cagcaagcaggccagacgacccucu

SEQ ID NO: 482666 - RNA, 23 nt, Human
cagcuacugagggccagcccugc

SEQ ID NO: 482667 - RNA, 19 nt, Human
caggaaaggccagaccagg

SEQ ID NO: 482668 - RNA, 21 nt, Human
caggagaaauguuuccccacc

SEQ ID NO: 482669 - RNA, 21 nt, Human
caggagagucaaccuccaagu

SEQ ID NO: 482670 - RNA, 22 nt, Human
caggcugggccuaagacuaggg

SEQ ID NO: 482671 - RNA, 24 nt, Human
cagggucucucuguguugcccagg

SEQ ID NO: 482672 - RNA, 19 nt, Human
caguucucugccucagucu

SEQ ID NO: 482673 - RNA, 19 nt, Human
cauaccccaacgagugcug

SEQ ID NO: 482674 - RNA, 19 nt, Human
cauccagcacacuggggca

SEQ ID NO: 482675 - RNA, 22 nt, Human
cauggagucaaguccuuuuuuu

SEQ ID NO: 482676 - RNA, 24 nt, Human
cauguuguccaggcuaaucuugaa

SEQ ID NO: 482677 - RNA, 24 nt, Human
ccacacaagcaggcugggccuaag

SEQ ID NO: 482678 - RNA, 22 nt, Human
ccaccaggccaggccagagccc

SEQ ID NO: 482679 - RNA, 22 nt, Human
cccagguucaagcaguucucug

SEQ ID NO: 482680 - RNA, 24 nt, Human
cccauaaacauaaagccaggaggg

SEQ ID NO: 482681 - RNA, 27 nt, Human
ccccacugcccccacagcugggugcug

SEQ ID NO: 482682 - RNA, 19 nt, Human
ccccagaaacucggccucc

SEQ ID NO: 482683 - RNA, 21 nt, Human
ccccagaaacucggccuccag

SEQ ID NO: 482684 - RNA, 20 nt, Human
ccccccagaggcgacgcggc

SEQ ID NO: 482685 - RNA, 24 nt, Human
cccccggaguuuucugcucgccuu

SEQ ID NO: 482686 - RNA, 20 nt, Human
ccccugggccagccaccagg

SEQ ID NO: 482687 - RNA, 23 nt, Human
cccgaguagcugggauuacaggc

SEQ ID NO: 482688 - RNA, 24 nt, Human
cccgaguagcugggauuacaggcg

SEQ ID NO: 482689 - RNA, 20 nt, Human
cccggaguuuucugcucgcc

SEQ ID NO: 482690 - RNA, 21 nt, Human
cccggcccacucccauuuuuu

SEQ ID NO: 482691 - RNA, 22 nt, Human
ccgaaagugcugggauuacagg

SEQ ID NO: 482692 - RNA, 24 nt, Human
ccgaaagugcugggauuacaggug

SEQ ID NO: 482693 - RNA, 22 nt, Human
ccgacucccuuuuuuuuuuuuu

SEQ ID NO: 482694 - RNA, 22 nt, Human
ccgaguagcugggauuacaggc

SEQ ID NO: 482695 - RNA, 19 nt, Human
ccuccagcuggagagggga

SEQ ID NO: 482696 - RNA, 24 nt, Human
ccucccagguucaagcaguucucu

SEQ ID NO: 482697 - RNA, 20 nt, Human
ccugaccucgugauccaccc

SEQ ID NO: 482698 - RNA, 19 nt, Human
ccuggcccuucagaaacug

SEQ ID NO: 482699 - RNA, 24 nt, Human
ccuuuuuuuuuuuuuuuugucccc

SEQ ID NO: 482700 - RNA, 24 nt, Human
cgaaagugcugggauuacaggugu

SEQ ID NO: 482701 - RNA, 23 nt, Human
cgagccaaugagagcuccacccc

SEQ ID NO: 482702 - RNA, 22 nt, Human
cgcagccccaagugucaacaag

SEQ ID NO: 482703 - RNA, 24 nt, Human
cgcagccccaagugucaacaaggg

SEQ ID NO: 482704 - RNA, 24 nt, Human
cgcccacgcuggagugcagugacg

SEQ ID NO: 482705 - RNA, 18 nt, Human
cgcgcccggcccacuccc

SEQ ID NO: 482706 - RNA, 24 nt, Human
cgcucugucgcccacgcuggagug

SEQ ID NO: 482707 - RNA, 18 nt, Human
cuaagcacugcugccccc

SEQ ID NO: 482708 - RNA, 24 nt, Human
cucaaaugcucuguguuuacagcc

SEQ ID NO: 482709 - RNA, 21 nt, Human
cucaacuucacacuccccuac

SEQ ID NO: 482710 - RNA, 24 nt, Human
cucagucucccgaguagcugggau

SEQ ID NO: 482711 - RNA, 20 nt, Human
cucccccaccccacugcccc

SEQ ID NO: 482712 - RNA, 21 nt, Human
cuccuuguuccagaaaggcuc

SEQ ID NO: 482713 - RNA, 19 nt, Human
cucuagaguucacucuagu

SEQ ID NO: 482714 - RNA, 22 nt, Human
cucucaggaaaggccagaccag

SEQ ID NO: 482715 - RNA, 23 nt, Human
cucucccauaaacauaaagccag

SEQ ID NO: 482716 - RNA, 24 nt, Human
cucucuguguugcccaggcuggag

SEQ ID NO: 482717 - RNA, 21 nt, Human
cucuggaaggagucacacuug

SEQ ID NO: 482718 - RNA, 22 nt, Human
cucuguguugcccaggcuggag

SEQ ID NO: 482719 - RNA, 23 nt, Human
cucuuaaguucauguacuuuuua

SEQ ID NO: 482720 - RNA, 24 nt, Human
cugcaaccucugccucccagguuc

SEQ ID NO: 482721 - RNA, 23 nt, Human
cugccucagucucccgaguagcu

SEQ ID NO: 482722 - RNA, 19 nt, Human
cuggaaggagucacacuug

SEQ ID NO: 482723 - RNA, 18 nt, Human
cuggacuuuuagcuacaa

SEQ ID NO: 482724 - RNA, 19 nt, Human
cuggcagcuggugggaugg

SEQ ID NO: 482725 - RNA, 24 nt, Human
cugggagccacuggcagcuggugg

SEQ ID NO: 482726 - RNA, 22 nt, Human
cuucaaaaccagcauucccuaa

SEQ ID NO: 482727 - RNA, 21 nt, Human
cuuggccuccgaaagugcugg

SEQ ID NO: 482728 - RNA, 27 nt, Human
cuuuuuuuuuuuuuuuuuuuuuucuuu

SEQ ID NO: 482729 - RNA, 20 nt, Human
gaaaauccccuuccagcagc

SEQ ID NO: 482730 - RNA, 20 nt, Human
gaagggggagguggaaaagg

SEQ ID NO: 482731 - RNA, 21 nt, Human
gaccucgugauccacccgccu

SEQ ID NO: 482732 - RNA, 21 nt, Human
gaccucgugauccacccgccu

SEQ ID NO: 482733 - RNA, 22 nt, Human
gaccucgugauccacccgccuu

SEQ ID NO: 482734 - RNA, 24 nt, Human
gaccucgugauccacccgccuugg

SEQ ID NO: 482735 - RNA, 20 nt, Human
gacucccuuuuuuuuuuuuu

SEQ ID NO: 482736 - RNA, 23 nt, Human
gacucccuuuuuuuuuuuuuuuu

SEQ ID NO: 482737 - RNA, 29 nt, Human
gacucccuuuuuuuuuuuuuuuuuuuuuu

SEQ ID NO: 482738 - RNA, 20 nt, Human
gagaugggguuucaccaugu

SEQ ID NO: 482739 - RNA, 23 nt, Human
gagaugggguuucaccauguugu

SEQ ID NO: 482740 - RNA, 18 nt, Human
gagccacuuugcuggagc

SEQ ID NO: 482741 - RNA, 18 nt, Human
gagggccagcccugcucu

SEQ ID NO: 482742 - RNA, 27 nt, Human
gaguagcugggauuacaggcgccggcc

SEQ ID NO: 482743 - RNA, 22 nt, Human
gaugggguuucaccauguuguc

SEQ ID NO: 482744 - RNA, 18 nt, Human
gauuacaggcgccggcca

SEQ ID NO: 482745 - RNA, 18 nt, Human
gauuacaggugugaguca

SEQ ID NO: 482746 - RNA, 22 nt, Human
gauuacaggugugagucaccgc

SEQ ID NO: 482747 - RNA, 22 nt, Human
gauuacaggugugagucaccgc

SEQ ID NO: 482748 - RNA, 19 nt, Human
gcaaaacaagucuggcuaa

SEQ ID NO: 482749 - RNA, 22 nt, Human
gcaaccucugccucccagguuc

SEQ ID NO: 482750 - RNA, 19 nt, Human
gcauugucugaugcagcug

SEQ ID NO: 482751 - RNA, 21 nt, Human
gccaagaaggcccagggcucc

SEQ ID NO: 482752 - RNA, 20 nt, Human
gccagaccaguagggaaagg

SEQ ID NO: 482753 - RNA, 19 nt, Human
gccaucuuggcuuauccuu

SEQ ID NO: 482754 - RNA, 19 nt, Human
gcccaggcuggagugcagu

SEQ ID NO: 482755 - RNA, 18 nt, Human
gccgucuuuccccagccc

SEQ ID NO: 482756 - RNA, 24 nt, Human
gccucagucucccgaguagcuggg

SEQ ID NO: 482757 - RNA, 22 nt, Human
gccuuggccuccgaaagugcug

SEQ ID NO: 482758 - RNA, 26 nt, Human
gcucggucagcuaucucagaaaccug

SEQ ID NO: 482759 - RNA, 21 nt, Human
gcugaauacccuuccaggcuu

SEQ ID NO: 482760 - RNA, 21 nt, Human
ggaaacaauggggaagcagag

SEQ ID NO: 482761 - RNA, 18 nt, Human
ggaaaggccuccgcagcc

SEQ ID NO: 482762 - RNA, 24 nt, Human
ggagccacaucuagcccccuacuc

SEQ ID NO: 482763 - RNA, 18 nt, Human
ggagggcaagaggaagug

SEQ ID NO: 482764 - RNA, 24 nt, Human
ggcuaaucuugaauuccugaccuc

SEQ ID NO: 482765 - RNA, 20 nt, Human
ggcugggcaggggcacgagg

SEQ ID NO: 482766 - RNA, 23 nt, Human
gggaaugaaacagaagcaucggg

SEQ ID NO: 482767 - RNA, 20 nt, Human
gggagguggaaaagggcaga

SEQ ID NO: 482768 - RNA, 19 nt, Human
gggccagcccugcucugac

SEQ ID NO: 482769 - RNA, 19 nt, Human
ggggaagcagaguuucccg

SEQ ID NO: 482770 - RNA, 22 nt, Human
gggguuucaccauguuguccag

SEQ ID NO: 482771 - RNA, 23 nt, Human
gggguuucaccauguuguccagg

SEQ ID NO: 482772 - RNA, 19 nt, Human
gggugcugccugauugcug

SEQ ID NO: 482773 - RNA, 19 nt, Human
guagagaugggguuucacc

SEQ ID NO: 482774 - RNA, 21 nt, Human
guagagaugggguuucaccau

SEQ ID NO: 482775 - RNA, 22 nt, Human
guagagaugggguuucaccaug

SEQ ID NO: 482776 - RNA, 23 nt, Human
guagagaugggguuucaccaugu

SEQ ID NO: 482777 - RNA, 18 nt, Human
guagcugggauuacaggc

SEQ ID NO: 482778 - RNA, 18 nt, Human
gucaaaccccacacacag

SEQ ID NO: 482779 - RNA, 31 nt, Human
gucaaguccuuuuuuuuuuuuuuuugucccc

SEQ ID NO: 482780 - RNA, 22 nt, Human
guccuuccagcuuuccuccccc

SEQ ID NO: 482781 - RNA, 22 nt, Human
gugauccacccgccuuggccuc

SEQ ID NO: 482782 - RNA, 24 nt, Human
uaaaaagcaauuucccaaaaugca

SEQ ID NO: 482783 - RNA, 23 nt, Human
uaaaacaacaaaggaaaaaacaa

SEQ ID NO: 482784 - RNA, 22 nt, Human
uaaaagguucaaagcccucuag

SEQ ID NO: 482785 - RNA, 24 nt, Human
uaacagcaccuccuuuccugacug

SEQ ID NO: 482786 - RNA, 22 nt, Human
uaaccaagccccaucuggugcc

SEQ ID NO: 482787 - RNA, 22 nt, Human
uaauuuuuguauuuuucguaga

SEQ ID NO: 482788 - RNA, 24 nt, Human
uaauuuuuguauuuuucguagaga

SEQ ID NO: 482789 - RNA, 19 nt, Human
uacaaagacccagcaagca

SEQ ID NO: 482790 - RNA, 22 nt, Human
uacccugaaacuucccuagcac

SEQ ID NO: 482791 - RNA, 23 nt, Human
uagaaaaaucugcaguccccaga

SEQ ID NO: 482792 - RNA, 24 nt, Human
uagacuaccuguccuuugcucuuc

SEQ ID NO: 482793 - RNA, 22 nt, Human
uagagaugggguuucaccaugu

SEQ ID NO: 482794 - RNA, 23 nt, Human
uagcaaaacaagucuggcuaaac

SEQ ID NO: 482795 - RNA, 21 nt, Human
uaggagccacaucuagccccc

SEQ ID NO: 482796 - RNA, 21 nt, Human
uauggaagccaagaaggccca

SEQ ID NO: 482797 - RNA, 19 nt, Human
ucaaccaaacuucccaaua

SEQ ID NO: 482798 - RNA, 22 nt, Human
ucacaccacagcugaucagaug

SEQ ID NO: 482799 - RNA, 19 nt, Human
ucacugcaaccucugccuc

SEQ ID NO: 482800 - RNA, 24 nt, Human
ucacugcaaccucugccucccagg

SEQ ID NO: 482801 - RNA, 25 nt, Human
ucacugcaaccucugccucccaggu

SEQ ID NO: 482802 - RNA, 23 nt, Human
ucagucucccgaguagcugggau

SEQ ID NO: 482803 - RNA, 21 nt, Human
ucauuaaaagaaaaaaaaaaa

SEQ ID NO: 482804 - RNA, 21 nt, Human
ucccagguucaagcaguucuc

SEQ ID NO: 482805 - RNA, 21 nt, Human
ucccagguucaagcaguucuc

SEQ ID NO: 482806 - RNA, 21 nt, Human
ucccauaaacauaaagccagg

SEQ ID NO: 482807 - RNA, 22 nt, Human
ucccccaccccacugcccccac

SEQ ID NO: 482808 - RNA, 24 nt, Human
ucccgaguagcugggauuacaggc

SEQ ID NO: 482809 - RNA, 18 nt, Human
ucccuagcaccuuggaag

SEQ ID NO: 482810 - RNA, 18 nt, Human
ucccuuuuuuuuuuuuuu

SEQ ID NO: 482811 - RNA, 24 nt, Human
uccgaaagugcugggauuacaggu

SEQ ID NO: 482812 - RNA, 25 nt, Human
uccugugccaagcccugguuuccuc

SEQ ID NO: 482813 - RNA, 19 nt, Human
uccuuccagcuuuccuccc

SEQ ID NO: 482814 - RNA, 24 nt, Human
uccuugagaccacggcucuggaag

SEQ ID NO: 482815 - RNA, 19 nt, Human
uccuuuucauguggggcag

SEQ ID NO: 482816 - RNA, 18 nt, Human
ucgcccacgcuggagugc

SEQ ID NO: 482817 - RNA, 21 nt, Human
ucguagagaugggguuucacc

SEQ ID NO: 482818 - RNA, 24 nt, Human
ucguagagaugggguuucaccaug

SEQ ID NO: 482819 - RNA, 20 nt, Human
ucucccccaccccacugccc

SEQ ID NO: 482820 - RNA, 26 nt, Human
ucucccccaccccacugcccccacag

SEQ ID NO: 482821 - RNA, 18 nt, Human
ucucgcucugucgcccac

SEQ ID NO: 482822 - RNA, 23 nt, Human
ucucgcucugucgcccacgcugg

SEQ ID NO: 482823 - RNA, 24 nt, Human
ucucgcucugucgcccacgcugga

SEQ ID NO: 482824 - RNA, 23 nt, Human
ucucucuguguugcccaggcugg

SEQ ID NO: 482825 - RNA, 24 nt, Human
ucucucuguguugcccaggcugga

SEQ ID NO: 482826 - RNA, 20 nt, Human
ucucuguguugcccaggcug

SEQ ID NO: 482827 - RNA, 21 nt, Human
ucucuguguugcccaggcugg

SEQ ID NO: 482828 - RNA, 23 nt, Human
ucucuguguugcccaggcuggag

SEQ ID NO: 482829 - RNA, 24 nt, Human
ucucuguguugcccaggcuggagu

SEQ ID NO: 482830 - RNA, 18 nt, Human
ucugcaguccccagaaac

SEQ ID NO: 482831 - RNA, 19 nt, Human
ucugguauuucuaggccgu

SEQ ID NO: 482832 - RNA, 24 nt, Human
ucugucgcccacgcuggagugcag

SEQ ID NO: 482833 - RNA, 20 nt, Human
ucuguguugcccaggcugga

SEQ ID NO: 482834 - RNA, 22 nt, Human
ugaaaacaaaaccuuagcaguc

SEQ ID NO: 482835 - RNA, 22 nt, Human
ugaaacagaagcaucgggcauu

SEQ ID NO: 482836 - RNA, 22 nt, Human
ugaaacggagucucgcucuguc

SEQ ID NO: 482837 - RNA, 19 nt, Human
ugaaagcauuucccaccug

SEQ ID NO: 482838 - RNA, 23 nt, Human
ugaaccucaaccaaacuucccaa

SEQ ID NO: 482839 - RNA, 22 nt, Human
ugacaaagagauuuaccagagc

SEQ ID NO: 482840 - RNA, 18 nt, Human
ugagacagggucucucug

SEQ ID NO: 482841 - RNA, 23 nt, Human
ugagacagggucucucuguguug

SEQ ID NO: 482842 - RNA, 23 nt, Human
ugccaugguuuccgguuugcacu

SEQ ID NO: 482843 - RNA, 18 nt, Human
ugcccaggcuggagugca

SEQ ID NO: 482844 - RNA, 19 nt, Human
ugcccaggcuggagugcag

SEQ ID NO: 482845 - RNA, 23 nt, Human
ugccucagucucccgaguagcug

SEQ ID NO: 482846 - RNA, 24 nt, Human
ugccucagucucccgaguagcugg

SEQ ID NO: 482847 - RNA, 22 nt, Human
ugccugaagcugugaaauauau

SEQ ID NO: 482848 - RNA, 18 nt, Human
ugcguuggaucccccagc

SEQ ID NO: 482849 - RNA, 23 nt, Human
ugcguuggaucccccagcuggau

SEQ ID NO: 482850 - RNA, 18 nt, Human
ugcugggauuacaggugu

SEQ ID NO: 482851 - RNA, 24 nt, Human
ugcugggauuacaggugugaguca

SEQ ID NO: 482852 - RNA, 19 nt, Human
ugcuggguuacaaagaccc

SEQ ID NO: 482853 - RNA, 18 nt, Human
ugcuguggguuucaacag

SEQ ID NO: 482854 - RNA, 22 nt, Human
uggaaacaauggggaagcagag

SEQ ID NO: 482855 - RNA, 18 nt, Human
uggaagacaagugagagc

SEQ ID NO: 482856 - RNA, 24 nt, Human
uggaaggugccaugguuuccgguu

SEQ ID NO: 482857 - RNA, 30 nt, Human
uggagggcucccugaaccguccuacggggg

SEQ ID NO: 482858 - RNA, 24 nt, Human
uggagucaaguccuuuuuuuuuuu

SEQ ID NO: 482859 - RNA, 21 nt, Human
uggagugcaguagcacgauca

SEQ ID NO: 482860 - RNA, 24 nt, Human
uggagugcaguagcacgaucacgg

SEQ ID NO: 482861 - RNA, 19 nt, Human
uggagugcagugacgcgau

SEQ ID NO: 482862 - RNA, 23 nt, Human
uggagugcagugacgcgaucucg

SEQ ID NO: 482863 - RNA, 24 nt, Human
uggagugcagugacgcgaucucgg

SEQ ID NO: 482864 - RNA, 22 nt, Human
uggcuaaacuacagucaagagc

SEQ ID NO: 482865 - RNA, 24 nt, Human
ugggaaguggauggaggguuugug

SEQ ID NO: 482866 - RNA, 25 nt, Human
ugggaaucucccaaggcagaguccu

SEQ ID NO: 482867 - RNA, 22 nt, Human
ugggagccacuggcagcugguc

SEQ ID NO: 482868 - RNA, 22 nt, Human
ugggagccacuggcagcuggug

SEQ ID NO: 482869 - RNA, 24 nt, Human
ugggagccacuggcagcugguggg

SEQ ID NO: 482870 - RNA, 21 nt, Human
ugggauuacaggcgccggcca

SEQ ID NO: 482871 - RNA, 22 nt, Human
ugggauuacaggcgccggccac

SEQ ID NO: 482872 - RNA, 24 nt, Human
ugggauuacaggcgccggccacca

SEQ ID NO: 482873 - RNA, 25 nt, Human
ugggauuacaggcgccggccaccau

SEQ ID NO: 482874 - RNA, 18 nt, Human
ugggauuacaggugugag

SEQ ID NO: 482875 - RNA, 18 nt, Human
ugggauuacaggugugag

SEQ ID NO: 482876 - RNA, 21 nt, Human
ugggauuacaggugugaguca

SEQ ID NO: 482877 - RNA, 22 nt, Human
ugggauuacaggugugagucac

SEQ ID NO: 482878 - RNA, 23 nt, Human
ugggauuacaggugugagucacc

SEQ ID NO: 482879 - RNA, 24 nt, Human
ugggauuacaggugugagucaccg

SEQ ID NO: 482880 - RNA, 24 nt, Human
ugggguuucaccauguuguccagg

SEQ ID NO: 482881 - RNA, 25 nt, Human
ugggucucccccaccccacugcccc

SEQ ID NO: 482882 - RNA, 23 nt, Human
ugggugcugccugauugcuggca

SEQ ID NO: 482883 - RNA, 22 nt, Human
uguaaacaagagaagcccugca

SEQ ID NO: 482884 - RNA, 24 nt, Human
uguccaggcuaaucuugaauuccu

SEQ ID NO: 482885 - RNA, 22 nt, Human
uguguugcccaggcuggagugc

SEQ ID NO: 482886 - RNA, 24 nt, Human
uguguugcccaggcuggagugcag

SEQ ID NO: 482887 - RNA, 19 nt, Human
uguuuaaucuuaagccaug

SEQ ID NO: 482888 - RNA, 19 nt, Human
uuaaucuuaagccauguaa

SEQ ID NO: 482889 - RNA, 20 nt, Human
uuaccagagcucggucagcu

SEQ ID NO: 482890 - RNA, 22 nt, Human
uuauccuuuucauguggggcag

SEQ ID NO: 482891 - RNA, 24 nt, Human
uuauuaaauuucaagcccuuucug

SEQ ID NO: 482892 - RNA, 21 nt, Human
uucaaagcccucuaguuaacu

SEQ ID NO: 482893 - RNA, 23 nt, Human
uucaaagcccucuaguuaacugg

SEQ ID NO: 482894 - RNA, 24 nt, Human
uuccugaccucgugauccacccgc

SEQ ID NO: 482895 - RNA, 24 nt, Human
uucguagagaugggguuucaccau

SEQ ID NO: 482896 - RNA, 23 nt, Human
uucuaggccguagggacacucac

SEQ ID NO: 482897 - RNA, 22 nt, Human
uugagacagggucucucugugu

SEQ ID NO: 482898 - RNA, 24 nt, Human
uugagacagggucucucuguguug

SEQ ID NO: 482899 - RNA, 23 nt, Human
uugagaccacggcucuggaaggu

SEQ ID NO: 482900 - RNA, 23 nt, Human
uugcacuaggagccacaucuagc

SEQ ID NO: 482901 - RNA, 24 nt, Human
uugcccaggcuggagugcaguagc

SEQ ID NO: 482902 - RNA, 24 nt, Human
uuguuuugagacagggucucucug

SEQ ID NO: 482903 - RNA, 21 nt, Human
uuucaccauguuguccaggcu

SEQ ID NO: 482904 - RNA, 22 nt, Human
uuugacaaagagauuuaccaga

SEQ ID NO: 482905 - RNA, 24 nt, Human
uuuuucguagagaugggguuucac

SEQ ID NO: 482906 - RNA, 20 nt, Human
uuuuuguauuuuucguagag

SEQ ID NO: 482907 - RNA, 23 nt, Human
uuuuuguauuuuucguagagaug

SEQ ID NO: 482908 - RNA, 22 nt, Human
uuuuuuuuuuuaccauuuugcu

SEQ ID NO: 482909 - RNA, 19 nt, Human
uuuuuuuuuuuucuuuucu

SEQ ID NO: 482910 - RNA, 27 nt, Human
uuuuuuuuuuuuuuuucuuuucugggg

SEQ ID NO: 482911 - RNA, 24 nt, Human
uuuuuuuuuuuuuuuuuuucuuuu

SEQ ID NO: 482912 - RNA, 24 nt, Human
uuuuuuuuuuuuuuuuuuuucuuu

SEQ ID NO: 482913 - RNA, 23 nt, Human
aaacaggaaaaaauguacuucaa

SEQ ID NO: 482914 - RNA, 23 nt, Human
aaaccccaggcuccaaaucaaga

SEQ ID NO: 482915 - RNA, 21 nt, Human
aaauuuugaaaaguuacauug

SEQ ID NO: 482916 - RNA, 26 nt, Human
aacaccuucccgaaaccccaggcucc

SEQ ID NO: 482917 - RNA, 18 nt, Human
acacuucagcaaagaaga

SEQ ID NO: 482918 - RNA, 19 nt, Human
acaggaaaaaauguacuuc

SEQ ID NO: 482919 - RNA, 22 nt, Human
accuucccgaaaccccaggcuc

SEQ ID NO: 482920 - RNA, 22 nt, Human
acuucagcaaagaagauggcac

SEQ ID NO: 482921 - RNA, 20 nt, Human
agccacaaacuggggauucc

SEQ ID NO: 482922 - RNA, 19 nt, Human
augcagcccugaggugucu

SEQ ID NO: 482923 - RNA, 18 nt, Human
augucaaauaauuccuuc

SEQ ID NO: 482924 - RNA, 20 nt, Human
auuguaaacauaaauauuau

SEQ ID NO: 482925 - RNA, 19 nt, Human
caacacuucagcaaagaag

SEQ ID NO: 482926 - RNA, 22 nt, Human
caaucuuugaaagugcaaaaca

SEQ ID NO: 482927 - RNA, 23 nt, Human
cacaucucaucccauaaacacuc

SEQ ID NO: 482928 - RNA, 26 nt, Human
cagguacaauaaauuuguagccaaua

SEQ ID NO: 482929 - RNA, 25 nt, Human
cccauaaacacucuuagaaaaaaau

SEQ ID NO: 482930 - RNA, 26 nt, Human
cccgaaaccccaggcuccaaaucaag

SEQ ID NO: 482931 - RNA, 20 nt, Human
ccgcgcggaccccgcuccuc

SEQ ID NO: 482932 - RNA, 22 nt, Human
ccgcgcucgcucugccugcgcc

SEQ ID NO: 482933 - RNA, 23 nt, Human
ccuccugcccccgccucguccgc

SEQ ID NO: 482934 - RNA, 19 nt, Human
ccugcgccuccugcccccg

SEQ ID NO: 482935 - RNA, 19 nt, Human
cgcggaccccgcuccuccc

SEQ ID NO: 482936 - RNA, 21 nt, Human
cucugugcugcggcgaccucc

SEQ ID NO: 482937 - RNA, 22 nt, Human
cuucccgaaaccccaggcucca

SEQ ID NO: 482938 - RNA, 24 nt, Human
gaaaugaaacaggguagccacaaa

SEQ ID NO: 482939 - RNA, 19 nt, Human
gcacaaguggaaaugaaac

SEQ ID NO: 482940 - RNA, 22 nt, Human
gcuggcaaauuuaagaaucuug

SEQ ID NO: 482941 - RNA, 21 nt, Human
gguucuauuccuucagaggua

SEQ ID NO: 482942 - RNA, 19 nt, Human
uaaauuacauaaacagcca

SEQ ID NO: 482943 - RNA, 23 nt, Human
uaacauuuaaguccagaaaauau

SEQ ID NO: 482944 - RNA, 20 nt, Human
uaagcugaaugcagcccuga

SEQ ID NO: 482945 - RNA, 28 nt, Human
uacagaagauauacauacauacagugug

SEQ ID NO: 482946 - RNA, 23 nt, Human
uaccaaacucuucacgugggccu

SEQ ID NO: 482947 - RNA, 20 nt, Human
uagauuccucaacaccuucc

SEQ ID NO: 482948 - RNA, 23 nt, Human
uagcacaucucaucccauaaaca

SEQ ID NO: 482949 - RNA, 18 nt, Human
uagucuaauugugaaaac

SEQ ID NO: 482950 - RNA, 19 nt, Human
uauugugcucuucugaaau

SEQ ID NO: 482951 - RNA, 21 nt, Human
uauugugcucuucugaaaugu

SEQ ID NO: 482952 - RNA, 23 nt, Human
uauugugcucuucugaaauguua

SEQ ID NO: 482953 - RNA, 18 nt, Human
ucccgaaaccccaggcuc

SEQ ID NO: 482954 - RNA, 18 nt, Human
ucccgcgcucgcucugcc

SEQ ID NO: 482955 - RNA, 24 nt, Human
ucuauagauuccucaacaccuucc

SEQ ID NO: 482956 - RNA, 19 nt, Human
ucuaucccauuuguagcac

SEQ ID NO: 482957 - RNA, 22 nt, Human
ucugugcugcggcgaccucccg

SEQ ID NO: 482958 - RNA, 22 nt, Human
ugcagcccugaggugucucagg

SEQ ID NO: 482959 - RNA, 21 nt, Human
uggcacaguaucuauuaugua

SEQ ID NO: 482960 - RNA, 24 nt, Human
uguaaauuuugaaaaguuacauug

SEQ ID NO: 482961 - RNA, 23 nt, Human
ugugaaaacaggaaaaaauguac

SEQ ID NO: 482962 - RNA, 28 nt, Human
uguggucagguucuauuccccguggucg

SEQ ID NO: 482963 - RNA, 21 nt, Human
uuauuuggcacaguaucuauc

SEQ ID NO: 482964 - RNA, 24 nt, Human
uuccucaacaccuucccgaaaccc

SEQ ID NO: 482965 - RNA, 21 nt, Human
uucuaccaaacucuucacgug

SEQ ID NO: 482966 - RNA, 19 nt, Human
uugcuuugggcauuugaaa

SEQ ID NO: 482967 - RNA, 19 nt, Human
uuguagcacaucucauccc

SEQ ID NO: 482968 - RNA, 21 nt, Human
aaaaacauggaauuuacuggc

SEQ ID NO: 482969 - RNA, 21 nt, Human
aaaacaaacaaacaaacaaac

SEQ ID NO: 482970 - RNA, 20 nt, Human
aaacagaaaugaaaacaguc

SEQ ID NO: 482971 - RNA, 23 nt, Human
aaacagaaaugaaaacagucuga

SEQ ID NO: 482972 - RNA, 26 nt, Human
aaauaaacagugaaggaaaugagaac

SEQ ID NO: 482973 - RNA, 23 nt, Human
aaauaaccggcaggugcaggaac

SEQ ID NO: 482974 - RNA, 22 nt, Human
aacaaacaaacaaacaaaaaua

SEQ ID NO: 482975 - RNA, 19 nt, Human
aacaugaaaaaggggacaa

SEQ ID NO: 482976 - RNA, 24 nt, Human
aacaugaaaaaggggacaagauga

SEQ ID NO: 482977 - RNA, 22 nt, Human
aagauucagcuucuuggaaaua

SEQ ID NO: 482978 - RNA, 19 nt, Human
aagugcaaaugcaaugacc

SEQ ID NO: 482979 - RNA, 23 nt, Human
aauccugcagcugaucuccccaa

SEQ ID NO: 482980 - RNA, 18 nt, Human
acaaacaaacaaacaaac

SEQ ID NO: 482981 - RNA, 20 nt, Human
acccgcccuggccccgcccc

SEQ ID NO: 482982 - RNA, 19 nt, Human
accggcaggugcaggaaca

SEQ ID NO: 482983 - RNA, 24 nt, Human
accugccccucugcaaauuuccac

SEQ ID NO: 482984 - RNA, 25 nt, Human
accuuuucuuaucuauauuuuuggu

SEQ ID NO: 482985 - RNA, 20 nt, Human
acgugugugugugugcgugu

SEQ ID NO: 482986 - RNA, 18 nt, Human
agaacgcagcaccacacu

SEQ ID NO: 482987 - RNA, 24 nt, Human
agagauuaaaacaaacaaacaaac

SEQ ID NO: 482988 - RNA, 22 nt, Human
agcugcuucucauuauuuccca

SEQ ID NO: 482989 - RNA, 22 nt, Human
auagugaaauaaaguuuuuuug

SEQ ID NO: 482990 - RNA, 23 nt, Human
augcauuacccguuuaccacaca

SEQ ID NO: 482991 - RNA, 18 nt, Human
augucucugcuaaaaaca

SEQ ID NO: 482992 - RNA, 22 nt, Human
auguguguguacgugugugugu

SEQ ID NO: 482993 - RNA, 20 nt, Human
auugcacaugaaaguaaggc

SEQ ID NO: 482994 - RNA, 23 nt, Human
caaaacauuccuguuaaaauccu

SEQ ID NO: 482995 - RNA, 20 nt, Human
caagaugauuacuacccucg

SEQ ID NO: 482996 - RNA, 24 nt, Human
caauuaauauaaucccuuucaaau

SEQ ID NO: 482997 - RNA, 23 nt, Human
caccugccccucugcaaauuucc

SEQ ID NO: 482998 - RNA, 25 nt, Human
cagcccuauaugagaaggaaauggc

SEQ ID NO: 482999 - RNA, 22 nt, Human
caucgcucccgccgccaaucgc

SEQ ID NO: 483000 - RNA, 22 nt, Human
ccaccccgccgccgccgcgcac

SEQ ID NO: 483001 - RNA, 21 nt, Human
ccaggggucucacuacucucc

SEQ ID NO: 483002 - RNA, 23 nt, Human
cccaaagauucagcuucuuggaa

SEQ ID NO: 483003 - RNA, 25 nt, Human
cccaugcauuacccguuuaccacac

SEQ ID NO: 483004 - RNA, 29 nt, Human
ccccgcaccaggggucucacuacucuccc

SEQ ID NO: 483005 - RNA, 20 nt, Human
ccccgccccgcggcccacgc

SEQ ID NO: 483006 - RNA, 22 nt, Human
ccccgccgccgccgcgcacccg

SEQ ID NO: 483007 - RNA, 27 nt, Human
ccccgccgccgccgcgcacccgcccug

SEQ ID NO: 483008 - RNA, 21 nt, Human
cccgcccuggccccgccccgc

SEQ ID NO: 483009 - RNA, 23 nt, Human
cccgccgccgccgcgcacccgcc

SEQ ID NO: 483010 - RNA, 21 nt, Human
cccuauaugagaaggaaaugg

SEQ ID NO: 483011 - RNA, 22 nt, Human
cccucugcaaauuuccacaaga

SEQ ID NO: 483012 - RNA, 21 nt, Human
ccgccgccgccgccggcccag

SEQ ID NO: 483013 - RNA, 19 nt, Human
ccggcccagccaccccgcc

SEQ ID NO: 483014 - RNA, 23 nt, Human
ccugcagcugaucuccccaaaac

SEQ ID NO: 483015 - RNA, 20 nt, Human
ccuggccccgccccgcggcc

SEQ ID NO: 483016 - RNA, 22 nt, Human
cgccccgcaccaggggucucac

SEQ ID NO: 483017 - RNA, 22 nt, Human
cgccccgcggcccacgcacagc

SEQ ID NO: 483018 - RNA, 24 nt, Human
cgccccgcggcccacgcacagcuc

SEQ ID NO: 483019 - RNA, 24 nt, Human
cgcccuggccccgccccgcggccc

SEQ ID NO: 483020 - RNA, 18 nt, Human
cgcgaccgggaccccgag

SEQ ID NO: 483021 - RNA, 23 nt, Human
cgggaccccgagcgcgcgccucg

SEQ ID NO: 483022 - RNA, 19 nt, Human
cucacuuuucauuucuacc

SEQ ID NO: 483023 - RNA, 22 nt, Human
cugcagauuucaaaaguugcau

SEQ ID NO: 483024 - RNA, 18 nt, Human
cugccccucugcaaauuu

SEQ ID NO: 483025 - RNA, 21 nt, Human
gaacgcagcaccacacugauc

SEQ ID NO: 483026 - RNA, 18 nt, Human
gcaggaacagcauucuuu

SEQ ID NO: 483027 - RNA, 24 nt, Human
gccccgccccgcggcccacgcaca

SEQ ID NO: 483028 - RNA, 27 nt, Human
gcgcgccucguaccgccgccgccgccg

SEQ ID NO: 483029 - RNA, 25 nt, Human
gcuuuuguucauuucuuuuuucuug

SEQ ID NO: 483030 - RNA, 22 nt, Human
ggaugagauauagccaaaaaca

SEQ ID NO: 483031 - RNA, 23 nt, Human
ggggucucacuacucuccgggag

SEQ ID NO: 483032 - RNA, 20 nt, Human
gggucucacuacucuccggg

SEQ ID NO: 483033 - RNA, 24 nt, Human
gguggcaaauguccaggcaagguu

SEQ ID NO: 483034 - RNA, 24 nt, Human
gugugcgugugugcguguguguug

SEQ ID NO: 483035 - RNA, 21 nt, Human
guguguguacgugugugugug

SEQ ID NO: 483036 - RNA, 21 nt, Human
gugugugugcgugugugcgug

SEQ ID NO: 483037 - RNA, 21 nt, Human
uaaaaaaggcuacaugcguua

SEQ ID NO: 483038 - RNA, 22 nt, Human
uaaaaaaggcuacaugcguuac

SEQ ID NO: 483039 - RNA, 26 nt, Human
uaaaaguuguccaugaaagugcaaau

SEQ ID NO: 483040 - RNA, 22 nt, Human
uaaaauccugcagcugaucucc

SEQ ID NO: 483041 - RNA, 21 nt, Human
uaaacagugaaggaaaugaga

SEQ ID NO: 483042 - RNA, 23 nt, Human
uaaacucugugagcugcuucuca

SEQ ID NO: 483043 - RNA, 19 nt, Human
uaccacacaccugccccuc

SEQ ID NO: 483044 - RNA, 21 nt, Human
uaccgccgccgccgccggccc

SEQ ID NO: 483045 - RNA, 23 nt, Human
uacgugugugugugugcgugugu

SEQ ID NO: 483046 - RNA, 18 nt, Human
uagccccaccuuuucuua

SEQ ID NO: 483047 - RNA, 23 nt, Human
uauguguguguacgugugugugu

SEQ ID NO: 483048 - RNA, 24 nt, Human
ucaugcuuuagcaaaauguucucc

SEQ ID NO: 483049 - RNA, 23 nt, Human
ucauucagacaaaacuauacaaa

SEQ ID NO: 483050 - RNA, 23 nt, Human
ucuaccuucuauauauacacaga

SEQ ID NO: 483051 - RNA, 24 nt, Human
ucucauuauuucccaugcauuacc

SEQ ID NO: 483052 - RNA, 26 nt, Human
ucucugcuaaaaacagaaaugaaaac

SEQ ID NO: 483053 - RNA, 19 nt, Human
ugagaacacacggacccaa

SEQ ID NO: 483054 - RNA, 19 nt, Human
ugagaagaggaagccucuu

SEQ ID NO: 483055 - RNA, 20 nt, Human
ugagaaggaaauggcuucuu

SEQ ID NO: 483056 - RNA, 21 nt, Human
ugagaaggaaauggcuucuuc

SEQ ID NO: 483057 - RNA, 24 nt, Human
ugagaaggaaauggcuucuuccug

SEQ ID NO: 483058 - RNA, 23 nt, Human
ugagauauagccaaaaacaugga

SEQ ID NO: 483059 - RNA, 22 nt, Human
ugcagcugaucuccccaaaacu

SEQ ID NO: 483060 - RNA, 18 nt, Human
uggaaggugguggggaca

SEQ ID NO: 483061 - RNA, 27 nt, Human
uguguacguguguguguggugacacac

SEQ ID NO: 483062 - RNA, 19 nt, Human
uguguacgugugugugugu

SEQ ID NO: 483063 - RNA, 19 nt, Human
uguguacgugugugugugu

SEQ ID NO: 483064 - RNA, 20 nt, Human
ugugugcgugugugcgugug

SEQ ID NO: 483065 - RNA, 21 nt, Human
ugugugcgugugugcgugugu

SEQ ID NO: 483066 - RNA, 22 nt, Human
ugugugcgugugugcgugugug

SEQ ID NO: 483067 - RNA, 26 nt, Human
uguguguacgugugugugugugcgug

SEQ ID NO: 483068 - RNA, 18 nt, Human
ugugugugugugcgugug

SEQ ID NO: 483069 - RNA, 21 nt, Human
ugugugugugugcgugugugc

SEQ ID NO: 483070 - RNA, 22 nt, Human
ugugugugugugcgugugugcg

SEQ ID NO: 483071 - RNA, 28 nt, Human
uuaucuugccauguuauugaccuuugug

SEQ ID NO: 483072 - RNA, 23 nt, Human
uuguucauuucuuuuuucuugau

SEQ ID NO: 483073 - RNA, 18 nt, Human
uuguugcaugucucugcu

SEQ ID NO: 483074 - RNA, 23 nt, Human
uuucaaauauuuucucacuuuuc

SEQ ID NO: 483075 - RNA, 23 nt, Human
uuuguauguguguguacgugugu

SEQ ID NO: 483076 - RNA, 21 nt, Human
uuuuuuuuuuuuugcaguuua

SEQ ID NO: 483077 - RNA, 25 nt, Human
aaccacaagcccggccgugcagccc

SEQ ID NO: 483078 - RNA, 18 nt, Human
acaaaggugaacaggaaa

SEQ ID NO: 483079 - RNA, 24 nt, Human
acaaauaaauaaggcaagucagga

SEQ ID NO: 483080 - RNA, 18 nt, Human
agacggggcacgaccagg

SEQ ID NO: 483081 - RNA, 20 nt, Human
agcgaaggcaguggugggaa

SEQ ID NO: 483082 - RNA, 20 nt, Human
agcggccauucuaccccaca

SEQ ID NO: 483083 - RNA, 23 nt, Human
aggaaacagacgcaaacaugcgg

SEQ ID NO: 483084 - RNA, 21 nt, Human
aggagaggggugugggagcaa

SEQ ID NO: 483085 - RNA, 18 nt, Human
aggagcuggggagcaggg

SEQ ID NO: 483086 - RNA, 18 nt, Human
aggagggacgaggagagg

SEQ ID NO: 483087 - RNA, 21 nt, Human
aggagggggccgagucgggug

SEQ ID NO: 483088 - RNA, 18 nt, Human
aggcaagucaggaggggg

SEQ ID NO: 483089 - RNA, 21 nt, Human
aggggugugggagcaaggcgu

SEQ ID NO: 483090 - RNA, 22 nt, Human
aggggugugggagcaaggcgug

SEQ ID NO: 483091 - RNA, 27 nt, Human
aggggugugggagcaaggcguggggag

SEQ ID NO: 483092 - RNA, 23 nt, Human
caaggucacccccggccugaggg

SEQ ID NO: 483093 - RNA, 22 nt, Human
caggagggacgaggagaggggu

SEQ ID NO: 483094 - RNA, 19 nt, Human
cagggccagagagggagga

SEQ ID NO: 483095 - RNA, 18 nt, Human
ccccagaaagcccucucc

SEQ ID NO: 483096 - RNA, 18 nt, Human
ccccagaaagcccucucc

SEQ ID NO: 483097 - RNA, 19 nt, Human
cccccaggguggugagaaa

SEQ ID NO: 483098 - RNA, 25 nt, Human
cccccgccgcgcuagagaaccacaa

SEQ ID NO: 483099 - RNA, 20 nt, Human
cccgccgcgcuagagaacca

SEQ ID NO: 483100 - RNA, 21 nt, Human
cccgccgcgcuagagaaccac

SEQ ID NO: 483101 - RNA, 22 nt, Human
cccgccgcgcuagagaaccaca

SEQ ID NO: 483102 - RNA, 22 nt, Human
cccggccgugcagcccuccccg

SEQ ID NO: 483103 - RNA, 21 nt, Human
cccugaaacacgaggggcgug

SEQ ID NO: 483104 - RNA, 23 nt, Human
cccugccccagaaagcccucucc

SEQ ID NO: 483105 - RNA, 21 nt, Human
ccugccccagaaagcccucuc

SEQ ID NO: 483106 - RNA, 20 nt, Human
cgaacaaauaaauaaggcaa

SEQ ID NO: 483107 - RNA, 21 nt, Human
cggagucggguggggacacgg

SEQ ID NO: 483108 - RNA, 23 nt, Human
cgggugcaggcaggaggagcugg

SEQ ID NO: 483109 - RNA, 21 nt, Human
cguauaaaccaagcccaugca

SEQ ID NO: 483110 - RNA, 25 nt, Human
gaacaaauaaauaaggcaagucagg

SEQ ID NO: 483111 - RNA, 21 nt, Human
gaagaugcagguauguggggc

SEQ ID NO: 483112 - RNA, 22 nt, Human
gacggggcacgaccaggaggga

SEQ ID NO: 483113 - RNA, 18 nt, Human
gaggagggaggaggccua

SEQ ID NO: 483114 - RNA, 20 nt, Human
gcacgaccaggagggacgag

SEQ ID NO: 483115 - RNA, 23 nt, Human
gcagcggccauucuaccccacac

SEQ ID NO: 483116 - RNA, 26 nt, Human
gcaguggugggaaccgaggcggauac

SEQ ID NO: 483117 - RNA, 19 nt, Human
gcgcggguuuucuggagcc

SEQ ID NO: 483118 - RNA, 18 nt, Human
gcuggggagcaggggcag

SEQ ID NO: 483119 - RNA, 19 nt, Human
ggagucggguggggacacg

SEQ ID NO: 483120 - RNA, 18 nt, Human
gggcaggcagggcuccgg

SEQ ID NO: 483121 - RNA, 21 nt, Human
gggccggggggagggggaguc

SEQ ID NO: 483122 - RNA, 24 nt, Human
gggugcaggcaggaggagcugggg

SEQ ID NO: 483123 - RNA, 24 nt, Human
ggugcagcgauguuuaauggcaau

SEQ ID NO: 483124 - RNA, 21 nt, Human
guuacaguauguacaagaccc

SEQ ID NO: 483125 - RNA, 19 nt, Human
uacaccaccuccccuucgg

SEQ ID NO: 483126 - RNA, 27 nt, Human
uauguacaccaccuccccuucggcccu

SEQ ID NO: 483127 - RNA, 20 nt, Human
ucagcccugaaacacgaggg

SEQ ID NO: 483128 - RNA, 25 nt, Human
ucagcccugaaacacgaggggcgug

SEQ ID NO: 483129 - RNA, 19 nt, Human
ucuaccccacaccgacccc

SEQ ID NO: 483130 - RNA, 24 nt, Human
ucuggagccaggaccaaaagagac

SEQ ID NO: 483131 - RNA, 22 nt, Human
ugacggcggcagcggccauucu

SEQ ID NO: 483132 - RNA, 20 nt, Human
ugcaggcaggaggagcuggg

SEQ ID NO: 483133 - RNA, 20 nt, Human
ugcagguauguggggcgcgg

SEQ ID NO: 483134 - RNA, 22 nt, Human
uggccagagucgggugaugggg

SEQ ID NO: 483135 - RNA, 18 nt, Human
uggggaggagggaggagg

SEQ ID NO: 483136 - RNA, 23 nt, Human
aagaccuaaaaccagccugcagu

SEQ ID NO: 483137 - RNA, 20 nt, Human
aagggcacugcuacagcagc

SEQ ID NO: 483138 - RNA, 22 nt, Human
acaggacaaucucucuucccac

SEQ ID NO: 483139 - RNA, 24 nt, Human
accagcuucugcuaccuucaugcu

SEQ ID NO: 483140 - RNA, 19 nt, Human
accaucuggaaacacaccg

SEQ ID NO: 483141 - RNA, 19 nt, Human
agaaagaaaggguccaaga

SEQ ID NO: 483142 - RNA, 21 nt, Human
agaagaaccaucuggaaacac

SEQ ID NO: 483143 - RNA, 23 nt, Human
agaauaacccccaaaagcucaaa

SEQ ID NO: 483144 - RNA, 18 nt, Human
agagacucuccuaucuca

SEQ ID NO: 483145 - RNA, 19 nt, Human
agagcagagaagcaguuuu

SEQ ID NO: 483146 - RNA, 18 nt, Human
agcugugcuucucagagc

SEQ ID NO: 483147 - RNA, 21 nt, Human
aggacaaucucucuucccacc

SEQ ID NO: 483148 - RNA, 19 nt, Human
augacagggaaaaggaggc

SEQ ID NO: 483149 - RNA, 27 nt, Human
auguggguuuuuuuuuuuuuuuccuuu

SEQ ID NO: 483150 - RNA, 21 nt, Human
caccccaaaucucagccugag

SEQ ID NO: 483151 - RNA, 20 nt, Human
cagaagccauaagcugauga

SEQ ID NO: 483152 - RNA, 20 nt, Human
cagaguuccgccucaccucc

SEQ ID NO: 483153 - RNA, 18 nt, Human
caggacaaucucucuucc

SEQ ID NO: 483154 - RNA, 20 nt, Human
ccaccaaaaaaaaguugcau

SEQ ID NO: 483155 - RNA, 25 nt, Human
ccagagacucuccuaucucacgguu

SEQ ID NO: 483156 - RNA, 26 nt, Human
ccaggauagaauagagaauaaaagga

SEQ ID NO: 483157 - RNA, 24 nt, Human
ccaucuggaaacacaccagcuucu

SEQ ID NO: 483158 - RNA, 22 nt, Human
ccugcaguggagguuucagucc

SEQ ID NO: 483159 - RNA, 22 nt, Human
cuagagggaaaaacaacugaaa

SEQ ID NO: 483160 - RNA, 26 nt, Human
cucagagcagagaagcaguuuuaaga

SEQ ID NO: 483161 - RNA, 21 nt, Human
cucagaguuccgccucaccuc

SEQ ID NO: 483162 - RNA, 21 nt, Human
gaagaaccaucuggaaacaca

SEQ ID NO: 483163 - RNA, 19 nt, Human
gacagggaaaaggaggcag

SEQ ID NO: 483164 - RNA, 19 nt, Human
gagacucuccuaucucacg

SEQ ID NO: 483165 - RNA, 21 nt, Human
ggaaugccagacuccuugaaa

SEQ ID NO: 483166 - RNA, 19 nt, Human
gggcaaagaacccaguggc

SEQ ID NO: 483167 - RNA, 22 nt, Human
gggcagggaucccagagaaaga

SEQ ID NO: 483168 - RNA, 19 nt, Human
ggguuuuuuuuuuuuuuuc

SEQ ID NO: 483169 - RNA, 20 nt, Human
ggguuuuuuuuuuuuuuucc

SEQ ID NO: 483170 - RNA, 21 nt, Human
ggguuuuuuuuuuuuuuuccu

SEQ ID NO: 483171 - RNA, 26 nt, Human
ggugacaggcaccuggcagggaagaa

SEQ ID NO: 483172 - RNA, 25 nt, Human
gguuuuuuuuuuuuuuuccuuuuaa

SEQ ID NO: 483173 - RNA, 26 nt, Human
guagaauaacccccaaaagcucaaag

SEQ ID NO: 483174 - RNA, 23 nt, Human
guccaagacuccauuaacugccc

SEQ ID NO: 483175 - RNA, 23 nt, Human
gugaagggagggcaaagaaccca

SEQ ID NO: 483176 - RNA, 21 nt, Human
guuagaagaaccaucuggaaa

SEQ ID NO: 483177 - RNA, 20 nt, Human
uaaaaccagccugcagugga

SEQ ID NO: 483178 - RNA, 24 nt, Human
uaacuuuauucuauuuucuguaua

SEQ ID NO: 483179 - RNA, 25 nt, Human
uaagagcaaaaagguagaggaaauc

SEQ ID NO: 483180 - RNA, 22 nt, Human
uacagcagcuaguaccagagac

SEQ ID NO: 483181 - RNA, 22 nt, Human
uacauuagcagugcugugcaag

SEQ ID NO: 483182 - RNA, 19 nt, Human
uagaagaaccaucuggaaa

SEQ ID NO: 483183 - RNA, 18 nt, Human
uagaauaacccccaaaag

SEQ ID NO: 483184 - RNA, 23 nt, Human
uagaauaacccccaaaagcucaa

SEQ ID NO: 483185 - RNA, 19 nt, Human
uagaauagagaauaaaagg

SEQ ID NO: 483186 - RNA, 22 nt, Human
ucaaagcuaaaaugcaucauca

SEQ ID NO: 483187 - RNA, 20 nt, Human
ucaucaguccuagucggcag

SEQ ID NO: 483188 - RNA, 21 nt, Human
uccacaggccucaggaaaugg

SEQ ID NO: 483189 - RNA, 18 nt, Human
ugaccugcuaucccaccc

SEQ ID NO: 483190 - RNA, 24 nt, Human
ugcaacccuugccucgcuugucaa

SEQ ID NO: 483191 - RNA, 20 nt, Human
ugccagacuccuugaaauca

SEQ ID NO: 483192 - RNA, 23 nt, Human
ugcuacagcagcuaguaccagag

SEQ ID NO: 483193 - RNA, 19 nt, Human
uggaaugcuagauggccaa

SEQ ID NO: 483194 - RNA, 24 nt, Human
uggaaugcuagauggccaagccuc

SEQ ID NO: 483195 - RNA, 21 nt, Human
uggaccaccugcucagaguuc

SEQ ID NO: 483196 - RNA, 18 nt, Human
uggcagggaagaaggauu

SEQ ID NO: 483197 - RNA, 18 nt, Human
uggcagggaagaaggauu

SEQ ID NO: 483198 - RNA, 23 nt, Human
uggccaagccucagccuuugguc

SEQ ID NO: 483199 - RNA, 24 nt, Human
uggugugaagggagggcaaagaac

SEQ ID NO: 483200 - RNA, 30 nt, Human
uguggguuuuuuuuuuuuuuuccuuuuaaa

SEQ ID NO: 483201 - RNA, 22 nt, Human
uguuaauuccagggacuguuuu

SEQ ID NO: 483202 - RNA, 19 nt, Human
uguucaggugcuuagacag

SEQ ID NO: 483203 - RNA, 21 nt, Human
uuccacaggccucaggaaaug

SEQ ID NO: 483204 - RNA, 22 nt, Human
uugguccagugcaacccuugcc

SEQ ID NO: 483205 - RNA, 25 nt, Human
uuuaagagcaaaaagguagaggaaa

SEQ ID NO: 483206 - RNA, 23 nt, Human
aaacaagcacacaaacaauagac

SEQ ID NO: 483207 - RNA, 23 nt, Human
aaacagccaaaggauguagacaa

SEQ ID NO: 483208 - RNA, 24 nt, Human
aaacuccagaaugugaaguuggca

SEQ ID NO: 483209 - RNA, 21 nt, Human
aaauaaacuccagaaugugaa

SEQ ID NO: 483210 - RNA, 26 nt, Human
aacgacaagaugaaacccaagaggaa

SEQ ID NO: 483211 - RNA, 23 nt, Human
aagaaaugaaauaaacuccagaa

SEQ ID NO: 483212 - RNA, 22 nt, Human
aagacaagugcaggaguaaacc

SEQ ID NO: 483213 - RNA, 20 nt, Human
aagcacacaaacaauagaca

SEQ ID NO: 483214 - RNA, 20 nt, Human
aagcccagaagaaaugcugg

SEQ ID NO: 483215 - RNA, 20 nt, Human
aaggacaacgugauccuaca

SEQ ID NO: 483216 - RNA, 24 nt, Human
agacaagugcaggaguaaaccaag

SEQ ID NO: 483217 - RNA, 24 nt, Human
agacaauaucuuuuugucuuuggu

SEQ ID NO: 483218 - RNA, 18 nt, Human
agacuacagcucaacauc

SEQ ID NO: 483219 - RNA, 22 nt, Human
agcaucucuuaugcucuaaugu

SEQ ID NO: 483220 - RNA, 21 nt, Human
agcccagaagaaaugcuggua

SEQ ID NO: 483221 - RNA, 21 nt, Human
aggaggcagaaaggcccagga

SEQ ID NO: 483222 - RNA, 22 nt, Human
aggaggcagaaaggcccaggac

SEQ ID NO: 483223 - RNA, 23 nt, Human
aggcagaguuaaauuguacagug

SEQ ID NO: 483224 - RNA, 19 nt, Human
aguuucaguaucguaagga

SEQ ID NO: 483225 - RNA, 18 nt, Human
augaaucuuucacuucug

SEQ ID NO: 483226 - RNA, 27 nt, Human
auggaagaaaauggucuucaaaaagaa

SEQ ID NO: 483227 - RNA, 20 nt, Human
auuacacugugcaacccugc

SEQ ID NO: 483228 - RNA, 20 nt, Human
auuuaucuauaccucucuca

SEQ ID NO: 483229 - RNA, 19 nt, Human
caaaacaagcacacaaaca

SEQ ID NO: 483230 - RNA, 21 nt, Human
caaaaugcaaauauuccaaug

SEQ ID NO: 483231 - RNA, 21 nt, Human
caagaaaccuuugcuucucuu

SEQ ID NO: 483232 - RNA, 20 nt, Human
caagcccagaagaaaugcug

SEQ ID NO: 483233 - RNA, 21 nt, Human
cacaaacugaaaagaaaaggc

SEQ ID NO: 483234 - RNA, 20 nt, Human
cacaagcccagaagaaaugc

SEQ ID NO: 483235 - RNA, 23 nt, Human
cagacauuauugagcuugccuau

SEQ ID NO: 483236 - RNA, 23 nt, Human
cauuucuuuguuuucaugcccac

SEQ ID NO: 483237 - RNA, 26 nt, Human
ccaaauaacacaaacugaaaagaaaa

SEQ ID NO: 483238 - RNA, 19 nt, Human
ccagcccugcauugguccu

SEQ ID NO: 483239 - RNA, 19 nt, Human
cccacacagagaacacuaa

SEQ ID NO: 483240 - RNA, 20 nt, Human
ccgggugcccuccucgcacc

SEQ ID NO: 483241 - RNA, 21 nt, Human
cgcaaaacaagcacacaaaca

SEQ ID NO: 483242 - RNA, 25 nt, Human
cgcaaaacaagcacacaaacaauag

SEQ ID NO: 483243 - RNA, 24 nt, Human
cgcaccgggugcccuccucgcacc

SEQ ID NO: 483244 - RNA, 21 nt, Human
cggaaaccagucaagaaggca

SEQ ID NO: 483245 - RNA, 20 nt, Human
cucaacaucacaagcccaga

SEQ ID NO: 483246 - RNA, 20 nt, Human
cugaguaucugugauucugg

SEQ ID NO: 483247 - RNA, 19 nt, Human
cugcccacugaaaauaacc

SEQ ID NO: 483248 - RNA, 19 nt, Human
cuggaugccugagaugguc

SEQ ID NO: 483249 - RNA, 21 nt, Human
cuucaguaggggcauuucuuu

SEQ ID NO: 483250 - RNA, 20 nt, Human
gaacggaaaccagucaagaa

SEQ ID NO: 483251 - RNA, 21 nt, Human
gaagaaaauggucuucaaaaa

SEQ ID NO: 483252 - RNA, 24 nt, Human
gaugcaaaggcaaguuuggaggga

SEQ ID NO: 483253 - RNA, 18 nt, Human
gauuacacugugcaaccc

SEQ ID NO: 483254 - RNA, 19 nt, Human
gcaaaacaagcacacaaac

SEQ ID NO: 483255 - RNA, 18 nt, Human
gcccagaagaaaugcugg

SEQ ID NO: 483256 - RNA, 24 nt, Human
ggagcagcugguagagauucagaa

SEQ ID NO: 483257 - RNA, 22 nt, Human
ggcagacauuauugagcuugcc

SEQ ID NO: 483258 - RNA, 23 nt, Human
ggcauuucuuuguuuucaugccc

SEQ ID NO: 483259 - RNA, 23 nt, Human
gguuaaggguuuaauacuguuua

SEQ ID NO: 483260 - RNA, 18 nt, Human
gguugcccggccuggccu

SEQ ID NO: 483261 - RNA, 20 nt, Human
gguuuaaaauucuuuagaug

SEQ ID NO: 483262 - RNA, 24 nt, Human
uaaaaaauguuccauagcgcaaaa

SEQ ID NO: 483263 - RNA, 24 nt, Human
uaaaaaauuuacagcagcuguaaa

SEQ ID NO: 483264 - RNA, 18 nt, Human
uaaaagaaccagcccugc

SEQ ID NO: 483265 - RNA, 24 nt, Human
uaaacgacaagaugaaacccaaga

SEQ ID NO: 483266 - RNA, 19 nt, Human
uaaacuuucuuauuaaaaa

SEQ ID NO: 483267 - RNA, 22 nt, Human
uaaaguuucaguaucguaagga

SEQ ID NO: 483268 - RNA, 18 nt, Human
uaacacaaacugaaaaga

SEQ ID NO: 483269 - RNA, 19 nt, Human
uaacagcaucucugacuuc

SEQ ID NO: 483270 - RNA, 21 nt, Human
uaaccccaagaaaccuuugcu

SEQ ID NO: 483271 - RNA, 23 nt, Human
uaaguacaagguccagaagcacu

SEQ ID NO: 483272 - RNA, 19 nt, Human
uaagucagguguuucuggc

SEQ ID NO: 483273 - RNA, 22 nt, Human
uacagcucaacaucacaagccc

SEQ ID NO: 483274 - RNA, 22 nt, Human
uaccacauuguccuaugaacuc

SEQ ID NO: 483275 - RNA, 24 nt, Human
uagaaaaacaaccuacagucccau

SEQ ID NO: 483276 - RNA, 24 nt, Human
uagaagcuucaagauggagguuua

SEQ ID NO: 483277 - RNA, 26 nt, Human
uagaccagaauuacauuucaaaagug

SEQ ID NO: 483278 - RNA, 21 nt, Human
uagcgcaaaacaagcacacaa

SEQ ID NO: 483279 - RNA, 21 nt, Human
uaggauuacacugugcaaccc

SEQ ID NO: 483280 - RNA, 22 nt, Human
uaggggcauuucuuuguuuuca

SEQ ID NO: 483281 - RNA, 21 nt, Human
ucagugcuuuccuuauuuguc

SEQ ID NO: 483282 - RNA, 18 nt, Human
ucauuuccuaaaucauuc

SEQ ID NO: 483283 - RNA, 22 nt, Human
uccacacuacugguuaauaacc

SEQ ID NO: 483284 - RNA, 23 nt, Human
uccacuuugccaugccuggaugc

SEQ ID NO: 483285 - RNA, 18 nt, Human
uccgcccucggcuaccac

SEQ ID NO: 483286 - RNA, 22 nt, Human
ucugugauucugggagcagcug

SEQ ID NO: 483287 - RNA, 20 nt, Human
ucuuagucaauuugcucauu

SEQ ID NO: 483288 - RNA, 21 nt, Human
ucuuuggugcacacacucauu

SEQ ID NO: 483289 - RNA, 18 nt, Human
ugaguaucugugauucug

SEQ ID NO: 483290 - RNA, 24 nt, Human
ugcaaaaugcaaauauuccaauga

SEQ ID NO: 483291 - RNA, 20 nt, Human
ugggguuuuucuaauauacu

SEQ ID NO: 483292 - RNA, 18 nt, Human
ugguagagauucagaaug

SEQ ID NO: 483293 - RNA, 25 nt, Human
uguaccacauuguccuaugaacucc

SEQ ID NO: 483294 - RNA, 21 nt, Human
uuccacacuacugguuaauaa

SEQ ID NO: 483295 - RNA, 18 nt, Human
uuccaugguauagaccag

SEQ ID NO: 483296 - RNA, 22 nt, Human
uuccuuggccacauaaaacuag

SEQ ID NO: 483297 - RNA, 23 nt, Human
uugaagguuugcaggccaaaaug

SEQ ID NO: 483298 - RNA, 22 nt, Human
uugcccggccuggccuccccgc

SEQ ID NO: 483299 - RNA, 22 nt, Human
uuggugcacacacucauuuccu

SEQ ID NO: 483300 - RNA, 22 nt, Human
uuguaaauaugaauccaguaga

SEQ ID NO: 483301 - RNA, 19 nt, Human
uuguaucaugcuucuaacc

SEQ ID NO: 483302 - RNA, 21 nt, Human
uuuccuuauuugucaagagcu

SEQ ID NO: 483303 - RNA, 20 nt, Human
uuuguuaaaaccacagguuc

SEQ ID NO: 483304 - RNA, 20 nt, Human
uuuuuuuucagaugcaggua

SEQ ID NO: 483305 - RNA, 20 nt, Human
acuucuccucucugcauccc

SEQ ID NO: 483306 - RNA, 21 nt, Human
agaagacuuccgagguccuuu

SEQ ID NO: 483307 - RNA, 24 nt, Human
aggcagguaaaauaguccaucaag

SEQ ID NO: 483308 - RNA, 20 nt, Human
cacaacauaguucccagggc

SEQ ID NO: 483309 - RNA, 21 nt, Human
cacaccccauaauuauccccu

SEQ ID NO: 483310 - RNA, 21 nt, Human
cagcaagucacucaccggucc

SEQ ID NO: 483311 - RNA, 20 nt, Human
cagcucugucauuugcaucu

SEQ ID NO: 483312 - RNA, 21 nt, Human
caggugccugucacugucugg

SEQ ID NO: 483313 - RNA, 19 nt, Human
cauucugagguugaaaugg

SEQ ID NO: 483314 - RNA, 20 nt, Human
ccccucccuuucuaagcucu

SEQ ID NO: 483315 - RNA, 18 nt, Human
ccccuuucuccaauccca

SEQ ID NO: 483316 - RNA, 21 nt, Human
ccucagguccccuuucuccaa

SEQ ID NO: 483317 - RNA, 23 nt, Human
ccucucugcaucccaguaagggc

SEQ ID NO: 483318 - RNA, 19 nt, Human
cggaugagacugggugggg

SEQ ID NO: 483319 - RNA, 18 nt, Human
cuagguaccauaccugcu

SEQ ID NO: 483320 - RNA, 21 nt, Human
cucacaccccauaauuauccc

SEQ ID NO: 483321 - RNA, 30 nt, Human
cucauugugcagagccccuggcagcuauuu

SEQ ID NO: 483322 - RNA, 21 nt, Human
cucuccuuagaagacuuccga

SEQ ID NO: 483323 - RNA, 21 nt, Human
cucugcauuccagcuugaagu

SEQ ID NO: 483324 - RNA, 25 nt, Human
cuuuccaggcacagcagaacuccag

SEQ ID NO: 483325 - RNA, 18 nt, Human
gagacuggcagaggagga

SEQ ID NO: 483326 - RNA, 18 nt, Human
gagcauaucuguugaaaa

SEQ ID NO: 483327 - RNA, 20 nt, Human
gagcauaucuguugaaaaug

SEQ ID NO: 483328 - RNA, 23 nt, Human
ggaggggagacgggcagguucca

SEQ ID NO: 483329 - RNA, 26 nt, Human
ggcagcaaggaugcuguaugugccac

SEQ ID NO: 483330 - RNA, 20 nt, Human
gguccccuuucuccaauccc

SEQ ID NO: 483331 - RNA, 21 nt, Human
gugcaaccacaacauaguucc

SEQ ID NO: 483332 - RNA, 18 nt, Human
uagaagacuuccgagguc

SEQ ID NO: 483333 - RNA, 19 nt, Human
ucaagucacuucuccucuc

SEQ ID NO: 483334 - RNA, 22 nt, Human
ucaccggucccucacuuuuucc

SEQ ID NO: 483335 - RNA, 18 nt, Human
ucagguccccuuucucca

SEQ ID NO: 483336 - RNA, 19 nt, Human
ucauugugcagagccccug

SEQ ID NO: 483337 - RNA, 21 nt, Human
uccccuuucuccaaucccacg

SEQ ID NO: 483338 - RNA, 25 nt, Human
ucucuaccgagcuuggcagccacag

SEQ ID NO: 483339 - RNA, 19 nt, Human
ucugaagggcuucccuuca

SEQ ID NO: 483340 - RNA, 21 nt, Human
ugaaauggcugcucaggugcc

SEQ ID NO: 483341 - RNA, 20 nt, Human
ugccagguuggugggaggug

SEQ ID NO: 483342 - RNA, 21 nt, Human
uggaggaggggagacgggcag

SEQ ID NO: 483343 - RNA, 19 nt, Human
uggcauuuucaggaagauu

SEQ ID NO: 483344 - RNA, 21 nt, Human
ugguauaaacuuuagcagcaa

SEQ ID NO: 483345 - RNA, 20 nt, Human
uguucugaagggcuucccuu

SEQ ID NO: 483346 - RNA, 20 nt, Human
uguugaaaaugcuuuguugg

SEQ ID NO: 483347 - RNA, 18 nt, Human
uuggugggagguggccga

SEQ ID NO: 483348 - RNA, 20 nt, Human
uuuuuccaucuguuuccuag

SEQ ID NO: 483349 - RNA, 19 nt, Human
uuuuuuuuuuuuuuaacgg

SEQ ID NO: 483350 - RNA, 22 nt, Human
uuuuuuuuuuuuuuuuuaacgg

SEQ ID NO: 483351 - RNA, 21 nt, Human
aaacaacugaaaacaucaaag

SEQ ID NO: 483352 - RNA, 18 nt, Human
aaacagacuggaaaacau

SEQ ID NO: 483353 - RNA, 25 nt, Human
aagaccuggcaccugacggaaaaua

SEQ ID NO: 483354 - RNA, 22 nt, Human
acaacugaaaacaucaaagaca

SEQ ID NO: 483355 - RNA, 18 nt, Human
acugaaaacaucaaagac

SEQ ID NO: 483356 - RNA, 18 nt, Human
agacuggaaaacauggua

SEQ ID NO: 483357 - RNA, 23 nt, Human
agcgagcuaaaaaugaaugcuug

SEQ ID NO: 483358 - RNA, 22 nt, Human
agggaaggcuucauggaggagg

SEQ ID NO: 483359 - RNA, 18 nt, Human
agguauggggaauuuauc

SEQ ID NO: 483360 - RNA, 21 nt, Human
agucaggggccccaaacuggc

SEQ ID NO: 483361 - RNA, 22 nt, Human
aucucacccccggaagccccag

SEQ ID NO: 483362 - RNA, 25 nt, Human
caaacaaacacccccagcgagugaa

SEQ ID NO: 483363 - RNA, 21 nt, Human
caaacaacugaaaacaucaaa

SEQ ID NO: 483364 - RNA, 26 nt, Human
caccaggaagcuuucucaacaugaag

SEQ ID NO: 483365 - RNA, 21 nt, Human
cacugcagaaguuaaacagac

SEQ ID NO: 483366 - RNA, 19 nt, Human
caggggccccaaacuggcu

SEQ ID NO: 483367 - RNA, 19 nt, Human
cauguccagcugcuggagg

SEQ ID NO: 483368 - RNA, 21 nt, Human
cauugaacuccagcucuugau

SEQ ID NO: 483369 - RNA, 25 nt, Human
cauugaacuccagcucuugauuaag

SEQ ID NO: 483370 - RNA, 22 nt, Human
ccaaagucucaaguccccagau

SEQ ID NO: 483371 - RNA, 24 nt, Human
ccauugagcugaagcucaggcccc

SEQ ID NO: 483372 - RNA, 22 nt, Human
cccccggaagccccagagaucc

SEQ ID NO: 483373 - RNA, 21 nt, Human
cccugcugcugcugcugcugc

SEQ ID NO: 483374 - RNA, 22 nt, Human
cccugcugcugcugcugcugcc

SEQ ID NO: 483375 - RNA, 20 nt, Human
ccgaggcuuugucucccacu

SEQ ID NO: 483376 - RNA, 23 nt, Human
ccgaggcuuugucucccacugca

SEQ ID NO: 483377 - RNA, 21 nt, Human
ccgcugcugcuguuagccagg

SEQ ID NO: 483378 - RNA, 26 nt, Human
cgugcgcgcccaugugcgcgugugug

SEQ ID NO: 483379 - RNA, 18 nt, Human
cucaggccccucucacug

SEQ ID NO: 483380 - RNA, 18 nt, Human
cuccccauguccagcugc

SEQ ID NO: 483381 - RNA, 22 nt, Human
cucuggcugcugggugaaaugc

SEQ ID NO: 483382 - RNA, 22 nt, Human
cuggcaccugacggaaaauaaa

SEQ ID NO: 483383 - RNA, 22 nt, Human
cugucgggggugacuugggucg

SEQ ID NO: 483384 - RNA, 22 nt, Human
cuuacuuaucuuuccucuugcc

SEQ ID NO: 483385 - RNA, 19 nt, Human
cuuguggcacacagcaggc

SEQ ID NO: 483386 - RNA, 18 nt, Human
cuuguuuguaaaccuagc

SEQ ID NO: 483387 - RNA, 22 nt, Human
cuuguuuguaaaccuagcagca

SEQ ID NO: 483388 - RNA, 24 nt, Human
gaaaauaaaaggguggccgguacc

SEQ ID NO: 483389 - RNA, 21 nt, Human
gacugucgccuccccaugucc

SEQ ID NO: 483390 - RNA, 20 nt, Human
gaggagucugggcugggacc

SEQ ID NO: 483391 - RNA, 23 nt, Human
gaugguggugaguggugguggug

SEQ ID NO: 483392 - RNA, 19 nt, Human
gcugcugggugaaaugcug

SEQ ID NO: 483393 - RNA, 18 nt, Human
ggagguauauagguuaug

SEQ ID NO: 483394 - RNA, 21 nt, Human
ggcaaacaaacacccccagcg

SEQ ID NO: 483395 - RNA, 22 nt, Human
ggcagaaaguugauagguuaag

SEQ ID NO: 483396 - RNA, 18 nt, Human
ggcugcugggugaaaugc

SEQ ID NO: 483397 - RNA, 23 nt, Human
ggcugcugggugaaaugcugcuc

SEQ ID NO: 483398 - RNA, 21 nt, Human
ggcuuccauugagcugaagcu

SEQ ID NO: 483399 - RNA, 18 nt, Human
ggggugacuuggguuagg

SEQ ID NO: 483400 - RNA, 24 nt, Human
guaaggcaguguagugaaggcacu

SEQ ID NO: 483401 - RNA, 23 nt, Human
uaaaagucuguucagucagugug

SEQ ID NO: 483402 - RNA, 18 nt, Human
uacugggccuugaaggag

SEQ ID NO: 483403 - RNA, 21 nt, Human
uagauaggacugucgccuccc

SEQ ID NO: 483404 - RNA, 19 nt, Human
uaggaggcacaggacaaug

SEQ ID NO: 483405 - RNA, 19 nt, Human
uaggguguccagccucuug

SEQ ID NO: 483406 - RNA, 18 nt, Human
uauguagcuacagaugcu

SEQ ID NO: 483407 - RNA, 24 nt, Human
uauugugaaucucauucuuucuaa

SEQ ID NO: 483408 - RNA, 18 nt, Human
ucaaagacaucuguaggg

SEQ ID NO: 483409 - RNA, 18 nt, Human
ucagcccuccuccuuccu

SEQ ID NO: 483410 - RNA, 18 nt, Human
ucagcccuccuccuuccu

SEQ ID NO: 483411 - RNA, 20 nt, Human
ucaggagcuaggaugucagg

SEQ ID NO: 483412 - RNA, 22 nt, Human
ucauugaacuccagcucuugau

SEQ ID NO: 483413 - RNA, 18 nt, Human
ucccacugcagcuucuuc

SEQ ID NO: 483414 - RNA, 23 nt, Human
ucucucaucuuuuagguguguau

SEQ ID NO: 483415 - RNA, 24 nt, Human
ugaacaaagauucuggcuuucuua

SEQ ID NO: 483416 - RNA, 19 nt, Human
ugaagcaucccaacugaga

SEQ ID NO: 483417 - RNA, 23 nt, Human
ugaagguaaaauuuacugucggg

SEQ ID NO: 483418 - RNA, 18 nt, Human
ugaauucucucaucuuuu

SEQ ID NO: 483419 - RNA, 19 nt, Human
ugagugguggugguggugg

SEQ ID NO: 483420 - RNA, 21 nt, Human
ugccugaguuaucccaggagc

SEQ ID NO: 483421 - RNA, 18 nt, Human
ugcugcugcugccguugc

SEQ ID NO: 483422 - RNA, 21 nt, Human
ugcugcugcugcugcugcugc

SEQ ID NO: 483423 - RNA, 21 nt, Human
ugcugcugcugcugcugcugc

SEQ ID NO: 483424 - RNA, 21 nt, Human
ugcugcugcugcugcugcugc

SEQ ID NO: 483425 - RNA, 21 nt, Human
ugcugcugcugcugcugcugc

SEQ ID NO: 483426 - RNA, 21 nt, Human
ugcugcugcugcugcugcugc

SEQ ID NO: 483427 - RNA, 21 nt, Human
ugcugcugcugcugcugcugc

SEQ ID NO: 483428 - RNA, 20 nt, Human
uggaugggugggggaccgag

SEQ ID NO: 483429 - RNA, 23 nt, Human
uggaugggugggggaccgaggcu

SEQ ID NO: 483430 - RNA, 18 nt, Human
ugguaguucgugcgcgcc

SEQ ID NO: 483431 - RNA, 23 nt, Human
ugguggucgugguuggugguggu

SEQ ID NO: 483432 - RNA, 21 nt, Human
uggugguggucgugguuggug

SEQ ID NO: 483433 - RNA, 18 nt, Human
uggugguggugguggugg

SEQ ID NO: 483434 - RNA, 20 nt, Human
uggugguggugguggugguc

SEQ ID NO: 483435 - RNA, 19 nt, Human
uguagugaaggcacugcag

SEQ ID NO: 483436 - RNA, 21 nt, Human
ugugugaguguaggugugugu

SEQ ID NO: 483437 - RNA, 19 nt, Human
uuaaagccggcucuggcug

SEQ ID NO: 483438 - RNA, 19 nt, Human
uuauguagcuacagaugcu

SEQ ID NO: 483439 - RNA, 21 nt, Human
uugaucagcccuccuccuucc

SEQ ID NO: 483440 - RNA, 23 nt, Human
uugggguggaauuagggaaggcu

SEQ ID NO: 483441 - RNA, 19 nt, Human
aacuguguacagcuuggca

SEQ ID NO: 483442 - RNA, 23 nt, Human
aacuguguacagcuuggcaaggu

SEQ ID NO: 483443 - RNA, 28 nt, Human
aagcaaaugcggcagcaaucuuagagau

SEQ ID NO: 483444 - RNA, 18 nt, Human
cacaggguaucagcaacu

SEQ ID NO: 483445 - RNA, 20 nt, Human
cacaggguaucagcaacugu

SEQ ID NO: 483446 - RNA, 19 nt, Human
cagcacaugaucagaaaua

SEQ ID NO: 483447 - RNA, 21 nt, Human
cagcacaugaucagaaauaug

SEQ ID NO: 483448 - RNA, 19 nt, Human
cagcaguaaaaggcagcac

SEQ ID NO: 483449 - RNA, 22 nt, Human
ccuccagggaggaucuugacuu

SEQ ID NO: 483450 - RNA, 18 nt, Human
cuugccaggaaaugagag

SEQ ID NO: 483451 - RNA, 21 nt, Human
ggcagcaaucuuagagauggu

SEQ ID NO: 483452 - RNA, 21 nt, Human
guaaaaggcagcacaugauca

SEQ ID NO: 483453 - RNA, 18 nt, Human
uaacaagcaaaugcggca

SEQ ID NO: 483454 - RNA, 24 nt, Human
uaggguugugaaagagcuugccag

SEQ ID NO: 483455 - RNA, 19 nt, Human
ugacuucucaguucccacu

SEQ ID NO: 483456 - RNA, 19 nt, Human
ugccaggaaaugagagcug

SEQ ID NO: 483457 - RNA, 26 nt, Human
ugguaugaaaaaagaugaaauggagu

SEQ ID NO: 483458 - RNA, 24 nt, Human
uuagagaugguaugaaaaaagaug

SEQ ID NO: 483459 - RNA, 20 nt, Human
uugccaggaaaugagagcug

SEQ ID NO: 483460 - RNA, 20 nt, Human
uuucaguccuguccuccagg

SEQ ID NO: 483461 - RNA, 29 nt, Human
uuuuuuuuuuuuuuuuuuuuuuaugaaaa

SEQ ID NO: 483462 - RNA, 19 nt, Human
aagaaaacauuccaugagc

SEQ ID NO: 483463 - RNA, 24 nt, Human
agaagcaaagcuucugaaaugagg

SEQ ID NO: 483464 - RNA, 23 nt, Human
gcaacagaagcaaagcuucugaa

SEQ ID NO: 483465 - RNA, 26 nt, Human
ucaaaggauaagaaaacauuccauga

SEQ ID NO: 483466 - RNA, 25 nt, Human
ugaggaguguucaaaggauaagaaa

SEQ ID NO: 483467 - RNA, 19 nt, Human
ugucuauccaugaaagccc

SEQ ID NO: 483468 - RNA, 19 nt, Human
uuaacauucaagcugaagg

SEQ ID NO: 483469 - RNA, 21 nt, Human
uuaacauucaagcugaagguu

SEQ ID NO: 483470 - RNA, 21 nt, Human
uucaaaggauaagaaaacauu

SEQ ID NO: 483471 - RNA, 22 nt, Human
uucaaaggauaagaaaacauuc

SEQ ID NO: 483472 - RNA, 20 nt, Human
aaaaaacaaugugaaaggac

SEQ ID NO: 483473 - RNA, 26 nt, Human
aaaaacaaugugaaaggacaggaaac

SEQ ID NO: 483474 - RNA, 20 nt, Human
aaaaagcagaauaaaagaac

SEQ ID NO: 483475 - RNA, 24 nt, Human
aaaacaaacaaacaagaaaccaga

SEQ ID NO: 483476 - RNA, 22 nt, Human
aaacaaaacaaaacaaaacaaa

SEQ ID NO: 483477 - RNA, 21 nt, Human
aaacaaaacaaaacaaacaaa

SEQ ID NO: 483478 - RNA, 20 nt, Human
aaacaaacaaacaagaaacc

SEQ ID NO: 483479 - RNA, 25 nt, Human
aaacaaacaagaaaccagaauaaag

SEQ ID NO: 483480 - RNA, 23 nt, Human
aaacaagaaaccagaauaaagga

SEQ ID NO: 483481 - RNA, 20 nt, Human
aaagcagaauaaaagaacaa

SEQ ID NO: 483482 - RNA, 19 nt, Human
aacaacucauaaaguuguc

SEQ ID NO: 483483 - RNA, 19 nt, Human
aacacuaacacaccccuac

SEQ ID NO: 483484 - RNA, 18 nt, Human
aacagacuauacauuuuc

SEQ ID NO: 483485 - RNA, 24 nt, Human
aacaggcauacacaugcacaaaca

SEQ ID NO: 483486 - RNA, 23 nt, Human
aagaaaaagauaugugacaaaaa

SEQ ID NO: 483487 - RNA, 22 nt, Human
aagaauuuagccagugaaaaua

SEQ ID NO: 483488 - RNA, 23 nt, Human
aauaaaagaacaaauacaacugg

SEQ ID NO: 483489 - RNA, 20 nt, Human
acaaaacaaaacaaaacaaa

SEQ ID NO: 483490 - RNA, 19 nt, Human
acaaaacaaaacaaacaaa

SEQ ID NO: 483491 - RNA, 21 nt, Human
acaaaacaaacaaacaagaaa

SEQ ID NO: 483492 - RNA, 20 nt, Human
acaacaguacauaauuuaga

SEQ ID NO: 483493 - RNA, 19 nt, Human
acagaaaacaucuauaauc

SEQ ID NO: 483494 - RNA, 21 nt, Human
agaaaaagauaugugacaaaa

SEQ ID NO: 483495 - RNA, 20 nt, Human
agauuuaaaagacaagucag

SEQ ID NO: 483496 - RNA, 21 nt, Human
aggaagaaaugacuagcaaag

SEQ ID NO: 483497 - RNA, 22 nt, Human
aggaagagguagcaaaagggac

SEQ ID NO: 483498 - RNA, 19 nt, Human
aguguugaugacauaugua

SEQ ID NO: 483499 - RNA, 22 nt, Human
auaguaacagaaaaaugugaca

SEQ ID NO: 483500 - RNA, 20 nt, Human
aucaucucuccaauaaaaug

SEQ ID NO: 483501 - RNA, 23 nt, Human
aucaucucuccaauaaaaugcuu

SEQ ID NO: 483502 - RNA, 18 nt, Human
aucuuuacaaauguaagg

SEQ ID NO: 483503 - RNA, 22 nt, Human
augcacaaacacuaacacaccc

SEQ ID NO: 483504 - RNA, 22 nt, Human
caaaacaaaacaaaacaaacaa

SEQ ID NO: 483505 - RNA, 25 nt, Human
caaaacaaaacaaaacaaacaaaca

SEQ ID NO: 483506 - RNA, 18 nt, Human
caaaacaaacaaacaaga

SEQ ID NO: 483507 - RNA, 19 nt, Human
caacaguacauaauuuaga

SEQ ID NO: 483508 - RNA, 18 nt, Human
caagauaaguaauaaacc

SEQ ID NO: 483509 - RNA, 22 nt, Human
cacaugcacaaacacuaacaca

SEQ ID NO: 483510 - RNA, 22 nt, Human
caccaauaauaccacguuugaa

SEQ ID NO: 483511 - RNA, 20 nt, Human
cagaaaacaucuauaaucac

SEQ ID NO: 483512 - RNA, 19 nt, Human
caggaagaaaugacuagca

SEQ ID NO: 483513 - RNA, 24 nt, Human
caugcacaaacacuaacacacccc

SEQ ID NO: 483514 - RNA, 22 nt, Human
caugccaacauuaagaacaggu

SEQ ID NO: 483515 - RNA, 24 nt, Human
cauuugaaauauucuauauacaga

SEQ ID NO: 483516 - RNA, 21 nt, Human
ccaagaaaaagauaugugaca

SEQ ID NO: 483517 - RNA, 20 nt, Human
cccaggaagaaaugacuagc

SEQ ID NO: 483518 - RNA, 22 nt, Human
cuauaugcauauugagcacccc

SEQ ID NO: 483519 - RNA, 25 nt, Human
cuuucauauugcucaauaacaaucg

SEQ ID NO: 483520 - RNA, 20 nt, Human
gaaguugaaaacaacucaua

SEQ ID NO: 483521 - RNA, 21 nt, Human
gcacaaacacuaacacacccc

SEQ ID NO: 483522 - RNA, 22 nt, Human
gcacaaacacuaacacaccccu

SEQ ID NO: 483523 - RNA, 18 nt, Human
gcaucaugggguaaaccu

SEQ ID NO: 483524 - RNA, 21 nt, Human
uaaaaaaaucaagaaauaaag

SEQ ID NO: 483525 - RNA, 21 nt, Human
uaaaaagcagaauaaaagaac

SEQ ID NO: 483526 - RNA, 30 nt, Human
uaaaaagcagaauaaaagaacaaauacaaa

SEQ ID NO: 483527 - RNA, 21 nt, Human
uaaaagaacaaauacaacugg

SEQ ID NO: 483528 - RNA, 25 nt, Human
uaacuacauugugcucuauuuaacc

SEQ ID NO: 483529 - RNA, 20 nt, Human
uaaguaauaaaccaaaaaga

SEQ ID NO: 483530 - RNA, 22 nt, Human
uaaguuuuaguaccuucucaca

SEQ ID NO: 483531 - RNA, 20 nt, Human
uaauaaagaacauuucccuu

SEQ ID NO: 483532 - RNA, 21 nt, Human
uagaaaauuuaaaauuaugaa

SEQ ID NO: 483533 - RNA, 20 nt, Human
uagaaagaaugauuauaaua

SEQ ID NO: 483534 - RNA, 23 nt, Human
uagaagacagauuuaaaagacaa

SEQ ID NO: 483535 - RNA, 23 nt, Human
uagcaaaaaacaaugugaaagga

SEQ ID NO: 483536 - RNA, 19 nt, Human
ucucuguauucccaggaag

SEQ ID NO: 483537 - RNA, 20 nt, Human
ugaaaggacaggaaacuugg

SEQ ID NO: 483538 - RNA, 21 nt, Human
ugaaaggacaggaaacuuggu

SEQ ID NO: 483539 - RNA, 23 nt, Human
ugaaaggacaggaaacuugguua

SEQ ID NO: 483540 - RNA, 27 nt, Human
ugagaaaacaaaacaaaacaaaacaaa

SEQ ID NO: 483541 - RNA, 24 nt, Human
ugccauauuguuugaugcagaugu

SEQ ID NO: 483542 - RNA, 20 nt, Human
ugggcauuagaauaacuacc

SEQ ID NO: 483543 - RNA, 20 nt, Human
ugguggcaaauauauucuga

SEQ ID NO: 483544 - RNA, 22 nt, Human
ugugaaaggacaggaaacuugg

SEQ ID NO: 483545 - RNA, 24 nt, Human
ugugaacaggcauacacaugcaca

SEQ ID NO: 483546 - RNA, 23 nt, Human
uuaaaaagcagaauaaaagaaca

SEQ ID NO: 483547 - RNA, 21 nt, Human
uuaagaugucuauaguuggau

SEQ ID NO: 483548 - RNA, 24 nt, Human
uuagaagacagauuuaaaagacaa

SEQ ID NO: 483549 - RNA, 20 nt, Human
uuaggcaauaauuacugaac

SEQ ID NO: 483550 - RNA, 23 nt, Human
uucaccaauaauaccacguuuga

SEQ ID NO: 483551 - RNA, 24 nt, Human
uuccuuggauucauauaugcaaca

SEQ ID NO: 483552 - RNA, 21 nt, Human
uugaauuaucucacuggcuuu

SEQ ID NO: 483553 - RNA, 23 nt, Human
uugagaaaacaaaacaaaacaaa

SEQ ID NO: 483554 - RNA, 18 nt, Human
uuguaggguuuaagaugu

SEQ ID NO: 483555 - RNA, 23 nt, Human
agcgucugcuggggcagcucugu

SEQ ID NO: 483556 - RNA, 20 nt, Human
aggccuccggcuuccuccag

SEQ ID NO: 483557 - RNA, 20 nt, Human
agggcugggggaaugggcug

SEQ ID NO: 483558 - RNA, 23 nt, Human
aggggcugcagggccgggagggg

SEQ ID NO: 483559 - RNA, 27 nt, Human
caccggguggggcggagcgucugcugg

SEQ ID NO: 483560 - RNA, 23 nt, Human
ccacaggauccccccgcacccac

SEQ ID NO: 483561 - RNA, 19 nt, Human
cccccgggcccggagccgu

SEQ ID NO: 483562 - RNA, 18 nt, Human
cccccggggcuccaucac

SEQ ID NO: 483563 - RNA, 18 nt, Human
ccccgggcccggagccgu

SEQ ID NO: 483564 - RNA, 21 nt, Human
ccccggggcuccaucaccggg

SEQ ID NO: 483565 - RNA, 22 nt, Human
cccgcccuacuggcggcagcau

SEQ ID NO: 483566 - RNA, 19 nt, Human
cccgggcccggagccgucc

SEQ ID NO: 483567 - RNA, 21 nt, Human
ccgcacccacugcaucucucc

SEQ ID NO: 483568 - RNA, 19 nt, Human
ccgcccgcccaggggcugc

SEQ ID NO: 483569 - RNA, 26 nt, Human
ccuccaggcgaccaggcccuccgucc

SEQ ID NO: 483570 - RNA, 20 nt, Human
ccugcuaaggccagcagggc

SEQ ID NO: 483571 - RNA, 25 nt, Human
cgccacagagucucucugcccaggg

SEQ ID NO: 483572 - RNA, 20 nt, Human
cgcccaggggcugcagggcc

SEQ ID NO: 483573 - RNA, 22 nt, Human
cggagcgucugcuggggcagcu

SEQ ID NO: 483574 - RNA, 22 nt, Human
cgggagggggcugcgggcggcg

SEQ ID NO: 483575 - RNA, 20 nt, Human
cuacuggcggcagcaugccu

SEQ ID NO: 483576 - RNA, 25 nt, Human
cuccacgcaggccuccggcuuccuc

SEQ ID NO: 483577 - RNA, 26 nt, Human
cucuggcucucgagaggccggaaagc

SEQ ID NO: 483578 - RNA, 19 nt, Human
cugcaucucucugcccagg

SEQ ID NO: 483579 - RNA, 19 nt, Human
cugccucauaggaugcccc

SEQ ID NO: 483580 - RNA, 20 nt, Human
cugcgcggggcgccuccucc

SEQ ID NO: 483581 - RNA, 23 nt, Human
cuggcggcagcaugccugucccc

SEQ ID NO: 483582 - RNA, 19 nt, Human
cugucucccugcuaaggcc

SEQ ID NO: 483583 - RNA, 18 nt, Human
gcaugccuguccccagca

SEQ ID NO: 483584 - RNA, 18 nt, Human
gccagcagggccaaacug

SEQ ID NO: 483585 - RNA, 18 nt, Human
gcuaggccaggucagcca

SEQ ID NO: 483586 - RNA, 21 nt, Human
ggcagcaugccuguccccagc

SEQ ID NO: 483587 - RNA, 19 nt, Human
ggccgggagggggcugcgg

SEQ ID NO: 483588 - RNA, 18 nt, Human
ggcugggggaaugggcug

SEQ ID NO: 483589 - RNA, 20 nt, Human
gggccuccggcuuggcguuc

SEQ ID NO: 483590 - RNA, 22 nt, Human
gggcugcagggccgggaggggg

SEQ ID NO: 483591 - RNA, 21 nt, Human
gggggcugcgggcggcgcggc

SEQ ID NO: 483592 - RNA, 22 nt, Human
gucagccagggcugggggaaug

SEQ ID NO: 483593 - RNA, 22 nt, Human
uacccugcuccuccccaggcac

SEQ ID NO: 483594 - RNA, 18 nt, Human
ucaccggguggggcggag

SEQ ID NO: 483595 - RNA, 23 nt, Human
ucaccuggcuguccggguccccg

SEQ ID NO: 483596 - RNA, 23 nt, Human
uccccaggcacgacugucccccc

SEQ ID NO: 483597 - RNA, 19 nt, Human
uccccugucucccugcuaa

SEQ ID NO: 483598 - RNA, 20 nt, Human
uccggcuggaucuugucguc

SEQ ID NO: 483599 - RNA, 20 nt, Human
ugaguguguccccaggacug

SEQ ID NO: 483600 - RNA, 18 nt, Human
ugcagugcuugggaucug

SEQ ID NO: 483601 - RNA, 23 nt, Human
ugcuggggcagcucugugggcca

SEQ ID NO: 483602 - RNA, 18 nt, Human
uggggauguguuuauggg

SEQ ID NO: 483603 - RNA, 21 nt, Human
uuccccgaucuguccugccug

SEQ ID NO: 483604 - RNA, 21 nt, Human
aacaggcacacagaagccccc

SEQ ID NO: 483605 - RNA, 20 nt, Human
aagccuuugacacaucaaaa

SEQ ID NO: 483606 - RNA, 21 nt, Human
acacagaagcccccacagucc

SEQ ID NO: 483607 - RNA, 21 nt, Human
acacuggucucuguaaacugg

SEQ ID NO: 483608 - RNA, 20 nt, Human
agagccggccucaugugcca

SEQ ID NO: 483609 - RNA, 19 nt, Human
aggcacacagaagccccca

SEQ ID NO: 483610 - RNA, 19 nt, Human
aggcgccccacccgcugcc

SEQ ID NO: 483611 - RNA, 18 nt, Human
agugucuccaaagcccag

SEQ ID NO: 483612 - RNA, 19 nt, Human
caaaaaccccuggucagaa

SEQ ID NO: 483613 - RNA, 19 nt, Human
caaagcagcaccaggugaa

SEQ ID NO: 483614 - RNA, 25 nt, Human
caaagcccaguguggugccagcugc

SEQ ID NO: 483615 - RNA, 19 nt, Human
caaagugaccacccagagc

SEQ ID NO: 483616 - RNA, 21 nt, Human
cacaggggccacggggcacag

SEQ ID NO: 483617 - RNA, 25 nt, Human
cacaucaaaauguaaaagggaagug

SEQ ID NO: 483618 - RNA, 21 nt, Human
cacccaggcgccccacccgcu

SEQ ID NO: 483619 - RNA, 24 nt, Human
caugcaaaaaccccuggucagaag

SEQ ID NO: 483620 - RNA, 21 nt, Human
ccaaagugaccacccagagca

SEQ ID NO: 483621 - RNA, 20 nt, Human
ccacgggugacaugcugggu

SEQ ID NO: 483622 - RNA, 22 nt, Human
ccagagcagcccugucaagggg

SEQ ID NO: 483623 - RNA, 18 nt, Human
ccagcugccuccuuucuc

SEQ ID NO: 483624 - RNA, 25 nt, Human
ccccacccgcugccucugugcuuuu

SEQ ID NO: 483625 - RNA, 20 nt, Human
ccccauagauuugaaucggg

SEQ ID NO: 483626 - RNA, 18 nt, Human
cccccaccgaacaggcac

SEQ ID NO: 483627 - RNA, 26 nt, Human
ccccgcagugucuccaaagcccagug

SEQ ID NO: 483628 - RNA, 20 nt, Human
cccgcagugucuccaaagcc

SEQ ID NO: 483629 - RNA, 22 nt, Human
cccuccuguccuacugcagaaa

SEQ ID NO: 483630 - RNA, 23 nt, Human
ccgcugccucugugcuuuugggg

SEQ ID NO: 483631 - RNA, 30 nt, Human
ccggccucaugugccaaggagcccacagcu

SEQ ID NO: 483632 - RNA, 21 nt, Human
ccucugccccgggcaaggguu

SEQ ID NO: 483633 - RNA, 19 nt, Human
ccugcuggccuccuuccuc

SEQ ID NO: 483634 - RNA, 19 nt, Human
cggagcugggcagaaggaa

SEQ ID NO: 483635 - RNA, 21 nt, Human
cugcagcuccugcuucaguag

SEQ ID NO: 483636 - RNA, 19 nt, Human
cugggugggacggagcugg

SEQ ID NO: 483637 - RNA, 19 nt, Human
cugguaaagggugaagaug

SEQ ID NO: 483638 - RNA, 20 nt, Human
cugguaaagggugaagaugu

SEQ ID NO: 483639 - RNA, 25 nt, Human
cuguacacacccaaagugaccaccc

SEQ ID NO: 483640 - RNA, 22 nt, Human
cugugugugaccugcacguggu

SEQ ID NO: 483641 - RNA, 21 nt, Human
gaccacccaggcgccccaccc

SEQ ID NO: 483642 - RNA, 18 nt, Human
gaggaacaggacugcauu

SEQ ID NO: 483643 - RNA, 19 nt, Human
gcaaagcuccuguguugac

SEQ ID NO: 483644 - RNA, 21 nt, Human
gccugggcugaggaacaggac

SEQ ID NO: 483645 - RNA, 18 nt, Human
ggcagaaggaagagccug

SEQ ID NO: 483646 - RNA, 20 nt, Human
ggcgccccacccgcugccuc

SEQ ID NO: 483647 - RNA, 24 nt, Human
ggcuguucagacagcaaagcuccu

SEQ ID NO: 483648 - RNA, 21 nt, Human
gggaaggcaugggaagauguc

SEQ ID NO: 483649 - RNA, 23 nt, Human
gggacggagcugggcagaaggaa

SEQ ID NO: 483650 - RNA, 26 nt, Human
gggcgcugggaggacccaagguucuc

SEQ ID NO: 483651 - RNA, 22 nt, Human
gggcugaggaacaggacugcau

SEQ ID NO: 483652 - RNA, 27 nt, Human
gggcugcugggugggacggagcugggc

SEQ ID NO: 483653 - RNA, 20 nt, Human
ggggcacagacccacugaaa

SEQ ID NO: 483654 - RNA, 18 nt, Human
gggugggacggagcuggg

SEQ ID NO: 483655 - RNA, 21 nt, Human
gugcagggcccuggccuucca

SEQ ID NO: 483656 - RNA, 18 nt, Human
guuccugaggcaucgcag

SEQ ID NO: 483657 - RNA, 21 nt, Human
guucugcacggcacgacucuc

SEQ ID NO: 483658 - RNA, 18 nt, Human
guuuuccagagaaguccg

SEQ ID NO: 483659 - RNA, 22 nt, Human
uaacaggcacacagaagccccc

SEQ ID NO: 483660 - RNA, 20 nt, Human
uagaccccagccagugggga

SEQ ID NO: 483661 - RNA, 19 nt, Human
uccaccacccagaggcuuu

SEQ ID NO: 483662 - RNA, 21 nt, Human
uccaccacccagaggcuuuau

SEQ ID NO: 483663 - RNA, 23 nt, Human
uccccgcagugucuccaaagccc

SEQ ID NO: 483664 - RNA, 18 nt, Human
ucuagggaaggcauggga

SEQ ID NO: 483665 - RNA, 25 nt, Human
ucucagguuugcuuuugcaggagcu

SEQ ID NO: 483666 - RNA, 18 nt, Human
ucucugcgggcugcuggg

SEQ ID NO: 483667 - RNA, 20 nt, Human
ucugggacacccccaccgaa

SEQ ID NO: 483668 - RNA, 24 nt, Human
ucuguaaacuggaguuccugaggc

SEQ ID NO: 483669 - RNA, 21 nt, Human
ugaggaacaggacugcauuaa

SEQ ID NO: 483670 - RNA, 21 nt, Human
ugaggguucaagguuagaccc

SEQ ID NO: 483671 - RNA, 24 nt, Human
ugaggguucaagguuagaccccag

SEQ ID NO: 483672 - RNA, 25 nt, Human
ugcaaaaaccccuggucagaagcgc

SEQ ID NO: 483673 - RNA, 18 nt, Human
ugcagaaacauucucagg

SEQ ID NO: 483674 - RNA, 22 nt, Human
ugccagcugccuccuuucucug

SEQ ID NO: 483675 - RNA, 24 nt, Human
ugcugggugggacggagcugggca

SEQ ID NO: 483676 - RNA, 18 nt, Human
uggaguuccugaggcauc

SEQ ID NO: 483677 - RNA, 19 nt, Human
ugggaagaugucccuccug

SEQ ID NO: 483678 - RNA, 18 nt, Human
ugggacacccccaccgaa

SEQ ID NO: 483679 - RNA, 18 nt, Human
ugggacggagcugggcag

SEQ ID NO: 483680 - RNA, 24 nt, Human
ugggcagaaggaagagccugaagu

SEQ ID NO: 483681 - RNA, 18 nt, Human
ugggugggacggagcugg

SEQ ID NO: 483682 - RNA, 19 nt, Human
uggucacuccaaaagccuu

SEQ ID NO: 483683 - RNA, 24 nt, Human
uguaaaagggaagugcagccccca

SEQ ID NO: 483684 - RNA, 19 nt, Human
ugugugcagggcccuggcc

SEQ ID NO: 483685 - RNA, 20 nt, Human
ugugugcagggcccuggccc

SEQ ID NO: 483686 - RNA, 19 nt, Human
uucacugugugugaccugc

SEQ ID NO: 483687 - RNA, 25 nt, Human
uugacacaucaaaauguaaaaggga

SEQ ID NO: 483688 - RNA, 23 nt, Human
uuuuaugucacguguauuuuacu

SEQ ID NO: 483689 - RNA, 22 nt, Human
aaaaagaaugacaaagaacaau

SEQ ID NO: 483690 - RNA, 19 nt, Human
aaacaaacaaagauaucca

SEQ ID NO: 483691 - RNA, 24 nt, Human
aaacaaacaaagauauccaauucg

SEQ ID NO: 483692 - RNA, 23 nt, Human
aacuaagauacuuucucagacac

SEQ ID NO: 483693 - RNA, 24 nt, Human
aagcagagguugcggugagccgag

SEQ ID NO: 483694 - RNA, 24 nt, Human
aaucacuuuaagccaggaagcaga

SEQ ID NO: 483695 - RNA, 20 nt, Human
acaagagugaaacucugucu

SEQ ID NO: 483696 - RNA, 21 nt, Human
acaagagugaaacucugucuc

SEQ ID NO: 483697 - RNA, 19 nt, Human
accacaccaaauaagcagg

SEQ ID NO: 483698 - RNA, 23 nt, Human
accacaccaaauaagcaggguua

SEQ ID NO: 483699 - RNA, 18 nt, Human
accccauucuucuccaag

SEQ ID NO: 483700 - RNA, 24 nt, Human
acccugccucuacuaaaaauacaa

SEQ ID NO: 483701 - RNA, 24 nt, Human
accugaggucgggaguucaagacc

SEQ ID NO: 483702 - RNA, 25 nt, Human
acuccagccugggcaacaagaguga

SEQ ID NO: 483703 - RNA, 22 nt, Human
acucugucucaaacaaacaaac

SEQ ID NO: 483704 - RNA, 21 nt, Human
acuuugagaggccuagguggg

SEQ ID NO: 483705 - RNA, 23 nt, Human
agagguugcggugagccgagauc

SEQ ID NO: 483706 - RNA, 24 nt, Human
agagguugcggugagccgagaucg

SEQ ID NO: 483707 - RNA, 19 nt, Human
agcagaagcuaguugauuu

SEQ ID NO: 483708 - RNA, 24 nt, Human
agccaggaagcagagguugcggug

SEQ ID NO: 483709 - RNA, 23 nt, Human
agcugggugugguggugcaugcc

SEQ ID NO: 483710 - RNA, 21 nt, Human
aggcaggagaaucacuuuaag

SEQ ID NO: 483711 - RNA, 19 nt, Human
aggcugaggcaggagaauc

SEQ ID NO: 483712 - RNA, 22 nt, Human
aggugggcggaucaccugaggu

SEQ ID NO: 483713 - RNA, 24 nt, Human
aucaccugaggucgggaguucaag

SEQ ID NO: 483714 - RNA, 24 nt, Human
aucgugccauugcacuccagccug

SEQ ID NO: 483715 - RNA, 24 nt, Human
auugcacuccagccugggcaacaa

SEQ ID NO: 483716 - RNA, 24 nt, Human
caaagaacaauucuauuuggcuaa

SEQ ID NO: 483717 - RNA, 23 nt, Human
caacaagagugaaacucugucuc

SEQ ID NO: 483718 - RNA, 23 nt, Human
caccugaggucgggaguucaaga

SEQ ID NO: 483719 - RNA, 23 nt, Human
cacuccagccugggcaacaagag

SEQ ID NO: 483720 - RNA, 24 nt, Human
cacuccagccugggcaacaagagu

SEQ ID NO: 483721 - RNA, 25 nt, Human
cacuccagccugggcaacaagagug

SEQ ID NO: 483722 - RNA, 24 nt, Human
cagccugaccaacauggagaaacc

SEQ ID NO: 483723 - RNA, 24 nt, Human
cagcuacucgagaggcugaggcag

SEQ ID NO: 483724 - RNA, 19 nt, Human
caguggggcaacccagcuc

SEQ ID NO: 483725 - RNA, 19 nt, Human
cauugcacuccagccuggg

SEQ ID NO: 483726 - RNA, 21 nt, Human
cauugcacuccagccugggca

SEQ ID NO: 483727 - RNA, 22 nt, Human
cauugcacuccagccugggcaa

SEQ ID NO: 483728 - RNA, 24 nt, Human
cauugcacuccagccugggcaaca

SEQ ID NO: 483729 - RNA, 20 nt, Human
ccauugcacuccagccuggg

SEQ ID NO: 483730 - RNA, 21 nt, Human
ccauugcacuccagccugggc

SEQ ID NO: 483731 - RNA, 23 nt, Human
ccauugcacuccagccugggcaa

SEQ ID NO: 483732 - RNA, 24 nt, Human
ccauugcacuccagccugggcaac

SEQ ID NO: 483733 - RNA, 21 nt, Human
cccccauucccugggugcaag

SEQ ID NO: 483734 - RNA, 22 nt, Human
cccccauucccugggugcaagu

SEQ ID NO: 483735 - RNA, 23 nt, Human
cccuaaccccauucuucuccaag

SEQ ID NO: 483736 - RNA, 22 nt, Human
ccugaccaacauggagaaaccc

SEQ ID NO: 483737 - RNA, 24 nt, Human
ccugaccaacauggagaaacccug

SEQ ID NO: 483738 - RNA, 22 nt, Human
ccuguaaucccagcuacucgag

SEQ ID NO: 483739 - RNA, 24 nt, Human
cgagaggcugaggcaggagaauca

SEQ ID NO: 483740 - RNA, 24 nt, Human
cgagaucgugccauugcacuccag

SEQ ID NO: 483741 - RNA, 18 nt, Human
cggagcacucucugaucc

SEQ ID NO: 483742 - RNA, 24 nt, Human
cggaucaccugaggucgggaguuc

SEQ ID NO: 483743 - RNA, 22 nt, Human
cuaagcuuuaacaugucaauga

SEQ ID NO: 483744 - RNA, 23 nt, Human
cugucucaaacaaacaaacaaag

SEQ ID NO: 483745 - RNA, 21 nt, Human
gagaaacccugccucuacuaa

SEQ ID NO: 483746 - RNA, 23 nt, Human
gaucaccugaggucgggaguuca

SEQ ID NO: 483747 - RNA, 24 nt, Human
gaucaccugaggucgggaguucaa

SEQ ID NO: 483748 - RNA, 22 nt, Human
gcaggagaaucacuuuaagcca

SEQ ID NO: 483749 - RNA, 22 nt, Human
gccauugcacuccagccugggc

SEQ ID NO: 483750 - RNA, 24 nt, Human
gccauugcacuccagccugggcaa

SEQ ID NO: 483751 - RNA, 18 nt, Human
gccuaguguuggagagug

SEQ ID NO: 483752 - RNA, 23 nt, Human
ggaucaccugaggucgggaguuc

SEQ ID NO: 483753 - RNA, 24 nt, Human
gggugugguggugcaugccuguaa

SEQ ID NO: 483754 - RNA, 21 nt, Human
ggugcaugccuguaaucccag

SEQ ID NO: 483755 - RNA, 24 nt, Human
gguggugcaugccuguaaucccag

SEQ ID NO: 483756 - RNA, 22 nt, Human
guggcuuacacacguaauccca

SEQ ID NO: 483757 - RNA, 19 nt, Human
uaaaaauacaaaauuagcu

SEQ ID NO: 483758 - RNA, 21 nt, Human
uaaccacaccaaauaagcagg

SEQ ID NO: 483759 - RNA, 18 nt, Human
uagagacccuaaccccau

SEQ ID NO: 483760 - RNA, 21 nt, Human
uagagacccuaaccccauucu

SEQ ID NO: 483761 - RNA, 18 nt, Human
uagaucucuggaguuagc

SEQ ID NO: 483762 - RNA, 23 nt, Human
uaggugggcggaucaccugaggu

SEQ ID NO: 483763 - RNA, 19 nt, Human
uaguugauuuaaccacacc

SEQ ID NO: 483764 - RNA, 23 nt, Human
uauuaugaaaucauccuaaugaa

SEQ ID NO: 483765 - RNA, 18 nt, Human
ucaguggcugauauugaa

SEQ ID NO: 483766 - RNA, 23 nt, Human
ucgugccauugcacuccagccug

SEQ ID NO: 483767 - RNA, 19 nt, Human
ugagagaguuuucccauuc

SEQ ID NO: 483768 - RNA, 24 nt, Human
ugagaggccuaggugggcggauca

SEQ ID NO: 483769 - RNA, 22 nt, Human
ugagccgagaucgugccauugc

SEQ ID NO: 483770 - RNA, 19 nt, Human
ugaggcaggagaaucacuu

SEQ ID NO: 483771 - RNA, 24 nt, Human
ugaggcaggagaaucacuuuaagc

SEQ ID NO: 483772 - RNA, 26 nt, Human
ugaggcaggagaaucacuuuaagcca

SEQ ID NO: 483773 - RNA, 19 nt, Human
ugcacuccagccugggcaa

SEQ ID NO: 483774 - RNA, 22 nt, Human
ugcacuccagccugggcaacaa

SEQ ID NO: 483775 - RNA, 22 nt, Human
ugcagauacaagcacagugggg

SEQ ID NO: 483776 - RNA, 19 nt, Human
ugccaaaugauuaauuuua

SEQ ID NO: 483777 - RNA, 24 nt, Human
ugccauugcacuccagccugggca

SEQ ID NO: 483778 - RNA, 21 nt, Human
ugccuguaaucccagcuacuc

SEQ ID NO: 483779 - RNA, 22 nt, Human
ugccuguaaucccagcuacucg

SEQ ID NO: 483780 - RNA, 23 nt, Human
ugccuguaaucccagcuacucga

SEQ ID NO: 483781 - RNA, 18 nt, Human
ugggcacuguggcuuaca

SEQ ID NO: 483782 - RNA, 24 nt, Human
ugggcggaucaccugaggucggga

SEQ ID NO: 483783 - RNA, 21 nt, Human
uggugcaugccuguaauccca

SEQ ID NO: 483784 - RNA, 22 nt, Human
uggugcaugccuguaaucccag

SEQ ID NO: 483785 - RNA, 24 nt, Human
ugguggugcaugccuguaauccca

SEQ ID NO: 483786 - RNA, 23 nt, Human
ugucucauagacccccauucccu

SEQ ID NO: 483787 - RNA, 22 nt, Human
uuagcugggugugguggugcau

SEQ ID NO: 483788 - RNA, 24 nt, Human
uuagcugggugugguggugcaugc

SEQ ID NO: 483789 - RNA, 22 nt, Human
uugacaaagauaccucuggagc

SEQ ID NO: 483790 - RNA, 18 nt, Human
uugcggugagccgagauc

SEQ ID NO: 483791 - RNA, 21 nt, Human
uugcggugagccgagaucgug

SEQ ID NO: 483792 - RNA, 22 nt, Human
uugcggugagccgagaucgugc

SEQ ID NO: 483793 - RNA, 23 nt, Human
uugcggugagccgagaucgugcc

SEQ ID NO: 483794 - RNA, 22 nt, Human
uuugcaauuagagacccuaacc

SEQ ID NO: 483795 - RNA, 19 nt, Human
uuuuuuuuuuuuuuuuuaa

SEQ ID NO: 483796 - RNA, 20 nt, Human
aaacggccccaaugcccggc

SEQ ID NO: 483797 - RNA, 22 nt, Human
acacuggaacaccugcagcugc

SEQ ID NO: 483798 - RNA, 23 nt, Human
acugcagacacaccaggagccug

SEQ ID NO: 483799 - RNA, 23 nt, Human
acugcagacacaccaggagccug

SEQ ID NO: 483800 - RNA, 25 nt, Human
agaacagauccugaaguuacacaga

SEQ ID NO: 483801 - RNA, 18 nt, Human
agcaggcaggcugagggu

SEQ ID NO: 483802 - RNA, 18 nt, Human
agcaggcaggcugagggu

SEQ ID NO: 483803 - RNA, 22 nt, Human
aggcaggcugagggucuuccag

SEQ ID NO: 483804 - RNA, 22 nt, Human
aggcaggcugagggucuuccag

SEQ ID NO: 483805 - RNA, 22 nt, Human
aggcuccggaggacgucaagcc

SEQ ID NO: 483806 - RNA, 18 nt, Human
auacagugcaugcaugua

SEQ ID NO: 483807 - RNA, 20 nt, Human
augcaugcauguauugugug

SEQ ID NO: 483808 - RNA, 23 nt, Human
augcccggcaguccggcugggcc

SEQ ID NO: 483809 - RNA, 22 nt, Human
caaacggccccaaugcccggca

SEQ ID NO: 483810 - RNA, 24 nt, Human
cacuaauacaaugcaugcauguag

SEQ ID NO: 483811 - RNA, 24 nt, Human
cacuaauacaaugcaugcauguag

SEQ ID NO: 483812 - RNA, 25 nt, Human
cagcgcguccuucuccugcaggccc

SEQ ID NO: 483813 - RNA, 25 nt, Human
caggagccaccugcacugcagacac

SEQ ID NO: 483814 - RNA, 25 nt, Human
caggagccaccugcacugcagacac

SEQ ID NO: 483815 - RNA, 20 nt, Human
caggagccugggccgcggag

SEQ ID NO: 483816 - RNA, 20 nt, Human
caggagccugggccgcggag

SEQ ID NO: 483817 - RNA, 24 nt, Human
caggagccugggccgcggagccuc

SEQ ID NO: 483818 - RNA, 24 nt, Human
caggagccugggccgcggagccuc

SEQ ID NO: 483819 - RNA, 23 nt, Human
ccaaugcccggcaguccggcugg

SEQ ID NO: 483820 - RNA, 23 nt, Human
ccaaugcccggcaguccggcugg

SEQ ID NO: 483821 - RNA, 24 nt, Human
ccaggccaagucagcgacggcucg

SEQ ID NO: 483822 - RNA, 24 nt, Human
ccaggccaagucagcgacggcucg

SEQ ID NO: 483823 - RNA, 19 nt, Human
ccccaagcuugcccugggc

SEQ ID NO: 483824 - RNA, 22 nt, Human
ccccaagcuugcccugggcccu

SEQ ID NO: 483825 - RNA, 18 nt, Human
ccccaaugcccggcaguc

SEQ ID NO: 483826 - RNA, 18 nt, Human
ccccaaugcccggcaguc

SEQ ID NO: 483827 - RNA, 19 nt, Human
ccccccgccggcaaggcag

SEQ ID NO: 483828 - RNA, 25 nt, Human
cccccugccgccauccuuucugcau

SEQ ID NO: 483829 - RNA, 21 nt, Human
cccugggcccucggcccggcc

SEQ ID NO: 483830 - RNA, 19 nt, Human
cccuggucggggccugcgc

SEQ ID NO: 483831 - RNA, 19 nt, Human
ccgccugagccugcccucc

SEQ ID NO: 483832 - RNA, 23 nt, Human
ccuccgcaaaaugagugccgcuu

SEQ ID NO: 483833 - RNA, 23 nt, Human
ccuccgcaaaaugagugccgcuu

SEQ ID NO: 483834 - RNA, 24 nt, Human
ccugcacugcagacacaccaggag

SEQ ID NO: 483835 - RNA, 24 nt, Human
ccugcacugcagacacaccaggag

SEQ ID NO: 483836 - RNA, 18 nt, Human
ccugugcacuuccugccu

SEQ ID NO: 483837 - RNA, 21 nt, Human
cgcaaaaugagugccgcuuaa

SEQ ID NO: 483838 - RNA, 21 nt, Human
cgcaaaaugagugccgcuuaa

SEQ ID NO: 483839 - RNA, 22 nt, Human
cgcccaacuccaagcagaggcu

SEQ ID NO: 483840 - RNA, 19 nt, Human
cggccccaaugcccggcag

SEQ ID NO: 483841 - RNA, 19 nt, Human
cggccccaaugcccggcag

SEQ ID NO: 483842 - RNA, 19 nt, Human
cgggacagcacaaggccga

SEQ ID NO: 483843 - RNA, 24 nt, Human
cggggcugcagggagggaggagca

SEQ ID NO: 483844 - RNA, 24 nt, Human
cggggcugcagggagggaggagca

SEQ ID NO: 483845 - RNA, 22 nt, Human
cgugugcauggggguggugagc

SEQ ID NO: 483846 - RNA, 22 nt, Human
cgugugcauggggguggugagc

SEQ ID NO: 483847 - RNA, 22 nt, Human
cgugugcauggggguggugagc

SEQ ID NO: 483848 - RNA, 19 nt, Human
cuccacggccaguagcugc

SEQ ID NO: 483849 - RNA, 19 nt, Human
cugcgccccagggcgucgg

SEQ ID NO: 483850 - RNA, 19 nt, Human
cuggugcagagcugcaaag

SEQ ID NO: 483851 - RNA, 19 nt, Human
cugugcgugcagcuccucc

SEQ ID NO: 483852 - RNA, 20 nt, Human
cuugcccugggcccucggcc

SEQ ID NO: 483853 - RNA, 24 nt, Human
gaacagauccugaaguuacacaga

SEQ ID NO: 483854 - RNA, 24 nt, Human
gaacagauccugaaguuacacaga

SEQ ID NO: 483855 - RNA, 18 nt, Human
gacccucagugagggccc

SEQ ID NO: 483856 - RNA, 23 nt, Human
gagaugcugcccggggcugcagg

SEQ ID NO: 483857 - RNA, 23 nt, Human
gagaugcugcccggggcugcagg

SEQ ID NO: 483858 - RNA, 22 nt, Human
gagcucaggacgagcgucucca

SEQ ID NO: 483859 - RNA, 18 nt, Human
gagcuccugggaccuccu

SEQ ID NO: 483860 - RNA, 25 nt, Human
gcaccagauuccucguuccaggcca

SEQ ID NO: 483861 - RNA, 25 nt, Human
gcaccagauuccucguuccaggcca

SEQ ID NO: 483862 - RNA, 24 nt, Human
gccaccugcacugcagacacacca

SEQ ID NO: 483863 - RNA, 24 nt, Human
gccaccugcacugcagacacacca

SEQ ID NO: 483864 - RNA, 21 nt, Human
gccccaaugcccggcaguccg

SEQ ID NO: 483865 - RNA, 21 nt, Human
gccccaaugcccggcaguccg

SEQ ID NO: 483866 - RNA, 21 nt, Human
gcccggcaguccggcugggcc

SEQ ID NO: 483867 - RNA, 22 nt, Human
gcccugggcccucggcccggcc

SEQ ID NO: 483868 - RNA, 18 nt, Human
gccugggccgcggagccu

SEQ ID NO: 483869 - RNA, 18 nt, Human
gccugggccgcggagccu

SEQ ID NO: 483870 - RNA, 21 nt, Human
gcgcagcgcguccuucuccug

SEQ ID NO: 483871 - RNA, 21 nt, Human
gcgucggcacccccggguggc

SEQ ID NO: 483872 - RNA, 21 nt, Human
gcugcagcucauccgccuucu

SEQ ID NO: 483873 - RNA, 21 nt, Human
ggcaggcugagggucuuccag

SEQ ID NO: 483874 - RNA, 21 nt, Human
ggcaggcugagggucuuccag

SEQ ID NO: 483875 - RNA, 22 nt, Human
ggccggugggugugcccugguc

SEQ ID NO: 483876 - RNA, 21 nt, Human
gggcugcagggagggaggagc

SEQ ID NO: 483877 - RNA, 21 nt, Human
gggcugcagggagggaggagc

SEQ ID NO: 483878 - RNA, 22 nt, Human
ggugaaacagaacagauccuga

SEQ ID NO: 483879 - RNA, 22 nt, Human
ggugaaacagaacagauccuga

SEQ ID NO: 483880 - RNA, 22 nt, Human
ggugaaacagaacagauccuga

SEQ ID NO: 483881 - RNA, 21 nt, Human
guccugggggagugagagcuc

SEQ ID NO: 483882 - RNA, 19 nt, Human
gugaaacagaacagauccu

SEQ ID NO: 483883 - RNA, 19 nt, Human
gugaaacagaacagauccu

SEQ ID NO: 483884 - RNA, 19 nt, Human
gugaaacagaacagauccu

SEQ ID NO: 483885 - RNA, 18 nt, Human
gugcccuggucggggccu

SEQ ID NO: 483886 - RNA, 21 nt, Human
guggugagcacccgcauggcc

SEQ ID NO: 483887 - RNA, 21 nt, Human
guggugagcacccgcauggcc

SEQ ID NO: 483888 - RNA, 21 nt, Human
guggugagcacccgcauggcc

SEQ ID NO: 483889 - RNA, 20 nt, Human
guucucccgguccuccuccc

SEQ ID NO: 483890 - RNA, 24 nt, Human
uacaaugcaugcauguauugugug

SEQ ID NO: 483891 - RNA, 24 nt, Human
uacagugcaugcauguauugugug

SEQ ID NO: 483892 - RNA, 22 nt, Human
ucagugagggccccaagcuugc

SEQ ID NO: 483893 - RNA, 19 nt, Human
uccaggucggagcucagga

SEQ ID NO: 483894 - RNA, 28 nt, Human
uccggaggacgucaagccgcugggcgcg

SEQ ID NO: 483895 - RNA, 24 nt, Human
uccugggggagugagagcuccugg

SEQ ID NO: 483896 - RNA, 21 nt, Human
ucgcccagcucccgcaccugc

SEQ ID NO: 483897 - RNA, 18 nt, Human
ucgggcggcuccccgcug

SEQ ID NO: 483898 - RNA, 20 nt, Human
ucgggcggcuccccgcugcu

SEQ ID NO: 483899 - RNA, 22 nt, Human
ucuccagcugcugccgccugag

SEQ ID NO: 483900 - RNA, 22 nt, Human
ucucuuugaggcgccgccgcuc

SEQ ID NO: 483901 - RNA, 25 nt, Human
ugagggccccaagcuugcccugggc

SEQ ID NO: 483902 - RNA, 19 nt, Human
ugcccggcaguccggcugg

SEQ ID NO: 483903 - RNA, 19 nt, Human
ugccgcuuaacaaacggcc

SEQ ID NO: 483904 - RNA, 19 nt, Human
ugccgcuuaacaaacggcc

SEQ ID NO: 483905 - RNA, 20 nt, Human
uggcaggccgggccgguggg

SEQ ID NO: 483906 - RNA, 26 nt, Human
ugggcccucggcccggccgcccaacu

SEQ ID NO: 483907 - RNA, 21 nt, Human
uggggguuccgcaaaaccugc

SEQ ID NO: 483908 - RNA, 24 nt, Human
uguguuacauggugaaacagaaca

SEQ ID NO: 483909 - RNA, 24 nt, Human
uguguuacauggugaaacagaaca

SEQ ID NO: 483910 - RNA, 24 nt, Human
uguguuacauggugaaacagaaca

SEQ ID NO: 483911 - RNA, 22 nt, Human
uuacacagauggcgugugcaug

SEQ ID NO: 483912 - RNA, 22 nt, Human
uuacacagauggcgugugcaug

SEQ ID NO: 483913 - RNA, 22 nt, Human
uuacacagauggcgugugcaug

SEQ ID NO: 483914 - RNA, 19 nt, Human
uuuuuuuuuuuugcggguc

SEQ ID NO: 483915 - RNA, 19 nt, Human
uuuuuuuuuuuugcggguc

SEQ ID NO: 483916 - RNA, 18 nt, Human
uuuuuuuuuuuuuugcgg

SEQ ID NO: 483917 - RNA, 18 nt, Human
uuuuuuuuuuuuuugcgg

SEQ ID NO: 483918 - RNA, 18 nt, Human
uuuuuuuuuuuuuuuuug

SEQ ID NO: 483919 - RNA, 19 nt, Human
uuuuuuuuuuuuuuuuugc

SEQ ID NO: 483920 - RNA, 21 nt, Human
uuuuuuuuuuuuuuuuugcgg

SEQ ID NO: 483921 - RNA, 21 nt, Human
uuuuuuuuuuuuuuuuugcgg

SEQ ID NO: 483922 - RNA, 22 nt, Human
uuuuuuuuuuuuuuuuugcggg

SEQ ID NO: 483923 - RNA, 23 nt, Human
uuuuuuuuuuuuuuuuugcgggu

SEQ ID NO: 483924 - RNA, 25 nt, Human
uuuuuuuuuuuuuuuuuuuugcggg

SEQ ID NO: 483925 - RNA, 27 nt, Human
uuuuuuuuuuuuuuuuuuuuuuugggg

SEQ ID NO: 483926 - RNA, 20 nt, Human
aaaugcuuuuaaugcucuuc

SEQ ID NO: 483927 - RNA, 21 nt, Human
aacaccccacaccccacaccu

SEQ ID NO: 483928 - RNA, 23 nt, Human
agggaccauccccggcugaagcc

SEQ ID NO: 483929 - RNA, 21 nt, Human
cacaccccacaccugcccccc

SEQ ID NO: 483930 - RNA, 18 nt, Human
caccccacaccccacacc

SEQ ID NO: 483931 - RNA, 18 nt, Human
caccccacaccccacacc

SEQ ID NO: 483932 - RNA, 22 nt, Human
caccccacaccccacaccugcc

SEQ ID NO: 483933 - RNA, 24 nt, Human
caggagauacuugagagggaccau

SEQ ID NO: 483934 - RNA, 23 nt, Human
ccacaccugccccccauaccccu

SEQ ID NO: 483935 - RNA, 21 nt, Human
cccacaccccacaccugcccc

SEQ ID NO: 483936 - RNA, 23 nt, Human
cccacaccccacaccugcccccc

SEQ ID NO: 483937 - RNA, 31 nt, Human
cccacaccccacaccugccccccauaccccu

SEQ ID NO: 483938 - RNA, 22 nt, Human
cccauaccccuuccuccaggag

SEQ ID NO: 483939 - RNA, 24 nt, Human
ccccacaccccacaccugcccccc

SEQ ID NO: 483940 - RNA, 22 nt, Human
ccccacaccugccccccauacc

SEQ ID NO: 483941 - RNA, 21 nt, Human
cccccauaccccuuccuccag

SEQ ID NO: 483942 - RNA, 22 nt, Human
ccccccauaccccuuccuccag

SEQ ID NO: 483943 - RNA, 21 nt, Human
cccgcaaagucuccucaagca

SEQ ID NO: 483944 - RNA, 21 nt, Human
ccuccccgcaaagucuccuca

SEQ ID NO: 483945 - RNA, 23 nt, Human
ccugccccccauaccccuuccuc

SEQ ID NO: 483946 - RNA, 20 nt, Human
cuccagugucugcugccucc

SEQ ID NO: 483947 - RNA, 24 nt, Human
cugccuccuccccgcaaagucucc

SEQ ID NO: 483948 - RNA, 18 nt, Human
cugcugccuccuccccgc

SEQ ID NO: 483949 - RNA, 21 nt, Human
gcaaagucuccucaagcacag

SEQ ID NO: 483950 - RNA, 18 nt, Human
ggacaaggggugcuucca

SEQ ID NO: 483951 - RNA, 23 nt, Human
gguuguugcaauggucauaggag

SEQ ID NO: 483952 - RNA, 21 nt, Human
gucugcugccuccuccccgca

SEQ ID NO: 483953 - RNA, 20 nt, Human
uccccgcaaagucuccucaa

SEQ ID NO: 483954 - RNA, 19 nt, Human
ucuccagugucugcugccu

SEQ ID NO: 483955 - RNA, 18 nt, Human
ucuccucaagcacaggac

SEQ ID NO: 483956 - RNA, 22 nt, Human
ucugcugccuccuccccgcaaa

SEQ ID NO: 483957 - RNA, 19 nt, Human
uggccgggaacaccccaca

SEQ ID NO: 483958 - RNA, 23 nt, Human
uuuuuuuuuuuuuuuuuuccuuu

SEQ ID NO: 483959 - RNA, 25 nt, Human
uuuuuuuuuuuuuuuuuuccuuuuu

SEQ ID NO: 483960 - RNA, 27 nt, Human
uuuuuuuuuuuuuuuuuuccuuuuuaa

SEQ ID NO: 483961 - RNA, 21 nt, Human
aaaaaggacgccuuccgugac

SEQ ID NO: 483962 - RNA, 22 nt, Human
aacccuuugguggggagggggc

SEQ ID NO: 483963 - RNA, 21 nt, Human
aagggaccuggcaggcagggc

SEQ ID NO: 483964 - RNA, 23 nt, Human
acaucauuugguuuccuggugcu

SEQ ID NO: 483965 - RNA, 20 nt, Human
accuggcaggcagggcuggc

SEQ ID NO: 483966 - RNA, 22 nt, Human
aggauggaggggagcuacucag

SEQ ID NO: 483967 - RNA, 22 nt, Human
aggcagggggacaggugcuaag

SEQ ID NO: 483968 - RNA, 23 nt, Human
aggccugcagccaccugcucuaa

SEQ ID NO: 483969 - RNA, 22 nt, Human
agggggccccugaagccucggc

SEQ ID NO: 483970 - RNA, 21 nt, Human
aggguagagcgggcaggaggg

SEQ ID NO: 483971 - RNA, 18 nt, Human
agguggggguuagggugg

SEQ ID NO: 483972 - RNA, 19 nt, Human
auauggcagcgacacacgc

SEQ ID NO: 483973 - RNA, 19 nt, Human
caaggucccuucccgggca

SEQ ID NO: 483974 - RNA, 19 nt, Human
cagcagcaagaggcagggg

SEQ ID NO: 483975 - RNA, 22 nt, Human
caggacagcagcaagaggcagg

SEQ ID NO: 483976 - RNA, 18 nt, Human
caggggccgaggacggag

SEQ ID NO: 483977 - RNA, 18 nt, Human
caguaguagggacuggag

SEQ ID NO: 483978 - RNA, 20 nt, Human
caucauuugguuuccugguc

SEQ ID NO: 483979 - RNA, 22 nt, Human
ccaggccccgccgccgccgccg

SEQ ID NO: 483980 - RNA, 22 nt, Human
ccaguucccauagcaaagagag

SEQ ID NO: 483981 - RNA, 23 nt, Human
ccccaaguggccggcaguggccu

SEQ ID NO: 483982 - RNA, 21 nt, Human
ccccgccgccgccgccgcugc

SEQ ID NO: 483983 - RNA, 26 nt, Human
ccccgccgccgccgccgcugcgcccg

SEQ ID NO: 483984 - RNA, 19 nt, Human
ccccugaagccucggcggg

SEQ ID NO: 483985 - RNA, 21 nt, Human
ccgccgccgccgccgcugcgc

SEQ ID NO: 483986 - RNA, 25 nt, Human
ccgccgccgccgccgcugcgcccgg

SEQ ID NO: 483987 - RNA, 20 nt, Human
ccucggcggggccaccccuc

SEQ ID NO: 483988 - RNA, 20 nt, Human
ccuggccaggcuaccuuccc

SEQ ID NO: 483989 - RNA, 21 nt, Human
cgccgccgccgccgcugcgcc

SEQ ID NO: 483990 - RNA, 22 nt, Human
cggcaacaucguguaaaaaagu

SEQ ID NO: 483991 - RNA, 25 nt, Human
cgggcaggaggggggacgagggcuc

SEQ ID NO: 483992 - RNA, 23 nt, Human
cgucacaguaguagggacuggaa

SEQ ID NO: 483993 - RNA, 21 nt, Human
cguuagcuacaaggaaaaagg

SEQ ID NO: 483994 - RNA, 22 nt, Human
cuuccgugacagauccuugagg

SEQ ID NO: 483995 - RNA, 23 nt, Human
gaaaaaggacgccuuccgugaca

SEQ ID NO: 483996 - RNA, 23 nt, Human
gaccuggcaggcagggcuggcag

SEQ ID NO: 483997 - RNA, 19 nt, Human
gauggaggggagcuacuca

SEQ ID NO: 483998 - RNA, 24 nt, Human
gccuggucgucgaaggggaggccc

SEQ ID NO: 483999 - RNA, 19 nt, Human
gcgggggcggcgggcaggg

SEQ ID NO: 484000 - RNA, 21 nt, Human
ggaccuggcaggcagggcugg

SEQ ID NO: 484001 - RNA, 18 nt, Human
ggagggagaggucccugc

SEQ ID NO: 484002 - RNA, 20 nt, Human
ggcaggaggggggacgaggg

SEQ ID NO: 484003 - RNA, 22 nt, Human
ggccgggagguggggguuaggg

SEQ ID NO: 484004 - RNA, 21 nt, Human
ggccuggucgucgaaggggag

SEQ ID NO: 484005 - RNA, 23 nt, Human
ggccuggucgucgaaggggaggc

SEQ ID NO: 484006 - RNA, 18 nt, Human
gggcaggaggggggacga

SEQ ID NO: 484007 - RNA, 22 nt, Human
gggcaggaggggggacgagggc

SEQ ID NO: 484008 - RNA, 21 nt, Human
gggcggggggggaccugcagg

SEQ ID NO: 484009 - RNA, 22 nt, Human
gggcucggggacaggacagcag

SEQ ID NO: 484010 - RNA, 21 nt, Human
ggggaaagccgcccggcgggg

SEQ ID NO: 484011 - RNA, 23 nt, Human
gggggacaggugcuaagggaccu

SEQ ID NO: 484012 - RNA, 23 nt, Human
ggugcugucaguccgcggggcgg

SEQ ID NO: 484013 - RNA, 24 nt, Human
uaaaaaaagcagcaugucacgucc

SEQ ID NO: 484014 - RNA, 18 nt, Human
uacaaggauggaggggag

SEQ ID NO: 484015 - RNA, 18 nt, Human
uauggcagcgacacacgc

SEQ ID NO: 484016 - RNA, 20 nt, Human
uauuuuuucuuucuuuuucu

SEQ ID NO: 484017 - RNA, 18 nt, Human
uccagcagaugacaagcc

SEQ ID NO: 484018 - RNA, 19 nt, Human
ucccauagcaaagagagcu

SEQ ID NO: 484019 - RNA, 20 nt, Human
ucccuccgggcccaaggccu

SEQ ID NO: 484020 - RNA, 21 nt, Human
ugaggugaacccuuugguggg

SEQ ID NO: 484021 - RNA, 22 nt, Human
ugaggugucugugucugcccca

SEQ ID NO: 484022 - RNA, 22 nt, Human
ugcugucaguccgcggggcggg

SEQ ID NO: 484023 - RNA, 21 nt, Human
uggaaaugccgucacaguagu

SEQ ID NO: 484024 - RNA, 21 nt, Human
uggcaggccccauggcgccug

SEQ ID NO: 484025 - RNA, 24 nt, Human
uggccaggcuaccuucccacugga

SEQ ID NO: 484026 - RNA, 23 nt, Human
uggcucggcccggccggccuggc

SEQ ID NO: 484027 - RNA, 19 nt, Human
uggggagggggccccugaa

SEQ ID NO: 484028 - RNA, 23 nt, Human
uggggagggggccccugaagccu

SEQ ID NO: 484029 - RNA, 20 nt, Human
uuaaaaaaagcagcauguca

SEQ ID NO: 484030 - RNA, 23 nt, Human
uucccauagcaaagagagcugug

SEQ ID NO: 484031 - RNA, 24 nt, Human
uuuggagggagaggucccugcaag

SEQ ID NO: 484032 - RNA, 18 nt, Human
uuuucuuuuuuuggaggg

SEQ ID NO: 484033 - RNA, 21 nt, Human
uuuuuuucuuuuuuuggaggg

SEQ ID NO: 484034 - RNA, 28 nt, Human
aacacuuuauuauguauaauuuguacau

SEQ ID NO: 484035 - RNA, 26 nt, Human
aauacaauuuucaaacaaagcuuccc

SEQ ID NO: 484036 - RNA, 26 nt, Human
acaaagcuucccuucuuuacacaaag

SEQ ID NO: 484037 - RNA, 22 nt, Human
acacacguaucaacaccauaca

SEQ ID NO: 484038 - RNA, 22 nt, Human
acuccagggaggaagguguggu

SEQ ID NO: 484039 - RNA, 20 nt, Human
agggauggggauguauggag

SEQ ID NO: 484040 - RNA, 25 nt, Human
caaagcuucccuucuuuacacaaag

SEQ ID NO: 484041 - RNA, 23 nt, Human
cacacguaucaacaccauacagg

SEQ ID NO: 484042 - RNA, 21 nt, Human
cuucacacacguaucaacacc

SEQ ID NO: 484043 - RNA, 20 nt, Human
gccacauacaaaaauacaau

SEQ ID NO: 484044 - RNA, 24 nt, Human
ggaaaagagcccuuucccuucaga

SEQ ID NO: 484045 - RNA, 19 nt, Human
ggaaaguagagggaugggg

SEQ ID NO: 484046 - RNA, 19 nt, Human
uaaauagauacuucacaca

SEQ ID NO: 484047 - RNA, 22 nt, Human
uaauuauuaaaaacacuuuauu

SEQ ID NO: 484048 - RNA, 27 nt, Human
uagagggauggggauguaugacaacgg

SEQ ID NO: 484049 - RNA, 22 nt, Human
uaucaacaccauacaggcauua

SEQ ID NO: 484050 - RNA, 23 nt, Human
uaucuguugcuuaagccaaacuc

SEQ ID NO: 484051 - RNA, 18 nt, Human
ucuguugcuuaagccaaa

SEQ ID NO: 484052 - RNA, 19 nt, Human
ugaaacagcaggaaaagag

SEQ ID NO: 484053 - RNA, 24 nt, Human
ugccaugccacauacaaaaauaca

SEQ ID NO: 484054 - RNA, 22 nt, Human
uguacaugcuucaauuuguguc

SEQ ID NO: 484055 - RNA, 19 nt, Human
uuacacaaagguacacaag

SEQ ID NO: 484056 - RNA, 22 nt, Human
uucauucugccaugccacauac

SEQ ID NO: 484057 - RNA, 19 nt, Human
uugaaacagcaggaaaaga

SEQ ID NO: 484058 - RNA, 24 nt, Human
uuuauuuuccagguuguaaugaca

SEQ ID NO: 484059 - RNA, 22 nt, Human
aaaaagcaaaaacauuuauugc

SEQ ID NO: 484060 - RNA, 22 nt, Human
aaacaaaaagcaaaaacauuua

SEQ ID NO: 484061 - RNA, 22 nt, Human
aaacaacaucagaacaagaaca

SEQ ID NO: 484062 - RNA, 25 nt, Human
aaauaccaaauggcuauaaagagcu

SEQ ID NO: 484063 - RNA, 24 nt, Human
aacaucagaacaagaacacauaua

SEQ ID NO: 484064 - RNA, 27 nt, Human
aagcaaacaagugcaaucuuucaaaca

SEQ ID NO: 484065 - RNA, 20 nt, Human
acaauaacaucaacaaugac

SEQ ID NO: 484066 - RNA, 22 nt, Human
acgaagcaacaauaacaucaac

SEQ ID NO: 484067 - RNA, 19 nt, Human
agcuuguaaaaaaaaauca

SEQ ID NO: 484068 - RNA, 24 nt, Human
aggaaacaacaucagaacaagaac

SEQ ID NO: 484069 - RNA, 22 nt, Human
aggaaaggaaacaggugaacgu

SEQ ID NO: 484070 - RNA, 22 nt, Human
aggugcagacagucuuauuacc

SEQ ID NO: 484071 - RNA, 24 nt, Human
aguuauaucaaaacacuugguggu

SEQ ID NO: 484072 - RNA, 25 nt, Human
caaacaaaaagcaaaaacagggacc

SEQ ID NO: 484073 - RNA, 23 nt, Human
caaacaaaaagcaaaaacauuua

SEQ ID NO: 484074 - RNA, 20 nt, Human
cacagaacuguccucuugcc

SEQ ID NO: 484075 - RNA, 25 nt, Human
cacagaauguuuauuuacuguuuaa

SEQ ID NO: 484076 - RNA, 22 nt, Human
cagcucaaucguaacaacuugc

SEQ ID NO: 484077 - RNA, 23 nt, Human
caggaaacaacaucagaacaaga

SEQ ID NO: 484078 - RNA, 20 nt, Human
cauugcacauauaagaaaac

SEQ ID NO: 484079 - RNA, 22 nt, Human
cccacauauaguaaaagcaaac

SEQ ID NO: 484080 - RNA, 27 nt, Human
cugucauggagccucagaacuauucug

SEQ ID NO: 484081 - RNA, 20 nt, Human
gaaauaccaaauggcuauaa

SEQ ID NO: 484082 - RNA, 23 nt, Human
gaacacauauaaauuaaaggcau

SEQ ID NO: 484083 - RNA, 21 nt, Human
gagacaaaguguacaaagauu

SEQ ID NO: 484084 - RNA, 23 nt, Human
gagcuuuccaaauauuggaaaua

SEQ ID NO: 484085 - RNA, 19 nt, Human
gugagacaaaguguacaaa

SEQ ID NO: 484086 - RNA, 23 nt, Human
guuauaucaaaacacuugguggu

SEQ ID NO: 484087 - RNA, 18 nt, Human
uaaaacgaagcaacaaua

SEQ ID NO: 484088 - RNA, 19 nt, Human
uaaaacgaagcaacaauaa

SEQ ID NO: 484089 - RNA, 18 nt, Human
uaacaucaacaaugacaa

SEQ ID NO: 484090 - RNA, 21 nt, Human
uaacuuaaaaucacuuacaaa

SEQ ID NO: 484091 - RNA, 21 nt, Human
uagaaaagacuucacaugcaa

SEQ ID NO: 484092 - RNA, 20 nt, Human
uaggaaauaccaaauggcua

SEQ ID NO: 484093 - RNA, 21 nt, Human
uaggaaauaccaaauggcuau

SEQ ID NO: 484094 - RNA, 20 nt, Human
ucaaacaaaaagcaaaaaca

SEQ ID NO: 484095 - RNA, 23 nt, Human
ucauuccacuucauugcacauau

SEQ ID NO: 484096 - RNA, 24 nt, Human
ucuagagacacacaaagguagccu

SEQ ID NO: 484097 - RNA, 25 nt, Human
ugaacagaaaauauauuuuacccca

SEQ ID NO: 484098 - RNA, 21 nt, Human
ugcuuuucucuucuagagaca

SEQ ID NO: 484099 - RNA, 20 nt, Human
ugguggugucacuaaguuaa

SEQ ID NO: 484100 - RNA, 21 nt, Human
ugucauggagccucagaacua

SEQ ID NO: 484101 - RNA, 20 nt, Human
uuaaauggauccacagggua

SEQ ID NO: 484102 - RNA, 20 nt, Human
uuuauauuuacauacacauu

SEQ ID NO: 484103 - RNA, 21 nt, Human
agcaaacacgauagaggagac

SEQ ID NO: 484104 - RNA, 19 nt, Human
aggacccgcgggcgcaggg

SEQ ID NO: 484105 - RNA, 18 nt, Human
aggagcugcaagcccgug

SEQ ID NO: 484106 - RNA, 22 nt, Human
caaacacgauagaggagaccag

SEQ ID NO: 484107 - RNA, 24 nt, Human
caagcccguggccuggccugcuac

SEQ ID NO: 484108 - RNA, 22 nt, Human
cacaacacagccuuggaccaug

SEQ ID NO: 484109 - RNA, 25 nt, Human
cacagccccuggagagggggccagg

SEQ ID NO: 484110 - RNA, 23 nt, Human
caccaaacccacccgcgcccugg

SEQ ID NO: 484111 - RNA, 23 nt, Human
cacccgcgcccugggacgcagcc

SEQ ID NO: 484112 - RNA, 23 nt, Human
caccuccgccagccgccuccacc

SEQ ID NO: 484113 - RNA, 21 nt, Human
cacggccgccgagagcaaggg

SEQ ID NO: 484114 - RNA, 21 nt, Human
cagccgccuccacccgcccca

SEQ ID NO: 484115 - RNA, 19 nt, Human
ccaccuccgccagccgccu

SEQ ID NO: 484116 - RNA, 27 nt, Human
ccagccgccuccacccgccccacacca

SEQ ID NO: 484117 - RNA, 20 nt, Human
cccagccugugccgcccucu

SEQ ID NO: 484118 - RNA, 22 nt, Human
ccccagccuuccaccugugcua

SEQ ID NO: 484119 - RNA, 21 nt, Human
cccccggccaggcgguccccg

SEQ ID NO: 484120 - RNA, 22 nt, Human
cccccgggccccagccuuccac

SEQ ID NO: 484121 - RNA, 23 nt, Human
cccccgggccccagccuuccacc

SEQ ID NO: 484122 - RNA, 20 nt, Human
cccgcccccgggccccagcc

SEQ ID NO: 484123 - RNA, 22 nt, Human
cccgcgcccugggacgcagcca

SEQ ID NO: 484124 - RNA, 24 nt, Human
cccgcgcccugggacgcagccacg

SEQ ID NO: 484125 - RNA, 18 nt, Human
cccggggcgcccuccccu

SEQ ID NO: 484126 - RNA, 20 nt, Human
cccugcacgccgggacgcca

SEQ ID NO: 484127 - RNA, 19 nt, Human
ccgcaggcagacagccugg

SEQ ID NO: 484128 - RNA, 20 nt, Human
ccgcccccgggccccagccu

SEQ ID NO: 484129 - RNA, 20 nt, Human
ccgggccccagccuuccacc

SEQ ID NO: 484130 - RNA, 21 nt, Human
ccgggccugugcgcugcccca

SEQ ID NO: 484131 - RNA, 20 nt, Human
ccuccacccgccccacacca

SEQ ID NO: 484132 - RNA, 19 nt, Human
ccucugaggagaggccugg

SEQ ID NO: 484133 - RNA, 20 nt, Human
ccucugaggagaggccuggg

SEQ ID NO: 484134 - RNA, 20 nt, Human
ccugcuacaugcccugcuuc

SEQ ID NO: 484135 - RNA, 21 nt, Human
ccugugcuagcagccuggggc

SEQ ID NO: 484136 - RNA, 18 nt, Human
ccuugcccagaccucccc

SEQ ID NO: 484137 - RNA, 19 nt, Human
ccuugcccagaccuccccu

SEQ ID NO: 484138 - RNA, 20 nt, Human
ccuugcccagaccuccccug

SEQ ID NO: 484139 - RNA, 19 nt, Human
ccuugugcugcgcccgagc

SEQ ID NO: 484140 - RNA, 21 nt, Human
cgccaggaggaggacacggcc

SEQ ID NO: 484141 - RNA, 23 nt, Human
cgccgggacgccaccuccgccag

SEQ ID NO: 484142 - RNA, 22 nt, Human
cgcgggcaggaggcccagcagg

SEQ ID NO: 484143 - RNA, 21 nt, Human
cggcccggguccaggggccgg

SEQ ID NO: 484144 - RNA, 23 nt, Human
cgggagggcccggccaggcggcg

SEQ ID NO: 484145 - RNA, 19 nt, Human
cggugggcgccccggcccg

SEQ ID NO: 484146 - RNA, 21 nt, Human
cuccgccagccgccuccaccc

SEQ ID NO: 484147 - RNA, 20 nt, Human
cucuggggaaauccgccuca

SEQ ID NO: 484148 - RNA, 18 nt, Human
cugugcugggcccgggcc

SEQ ID NO: 484149 - RNA, 23 nt, Human
cuugcccagaccuccccugccca

SEQ ID NO: 484150 - RNA, 20 nt, Human
cuuggaccaugagcagaagc

SEQ ID NO: 484151 - RNA, 18 nt, Human
cuuggagggggcaggagg

SEQ ID NO: 484152 - RNA, 19 nt, Human
gagcagcagguggggagga

SEQ ID NO: 484153 - RNA, 18 nt, Human
gagcccagccugugccgc

SEQ ID NO: 484154 - RNA, 23 nt, Human
gagcccagccugugccgcccucu

SEQ ID NO: 484155 - RNA, 18 nt, Human
gaggaaggaccgcaggca

SEQ ID NO: 484156 - RNA, 19 nt, Human
gaggagcccccggcagagc

SEQ ID NO: 484157 - RNA, 24 nt, Human
gcacacccucagaggagcugcaag

SEQ ID NO: 484158 - RNA, 28 nt, Human
gcacagccccuggagaggggggaacgcc

SEQ ID NO: 484159 - RNA, 19 nt, Human
gcacggaggagcccccggc

SEQ ID NO: 484160 - RNA, 19 nt, Human
gccagccgccuccacccgc

SEQ ID NO: 484161 - RNA, 24 nt, Human
gcccaacacuguggaucagcaaac

SEQ ID NO: 484162 - RNA, 24 nt, Human
gcccagacgcgcccauccugaggg

SEQ ID NO: 484163 - RNA, 22 nt, Human
gccuccacccgccccacaccac

SEQ ID NO: 484164 - RNA, 18 nt, Human
gccugggccucuaacagc

SEQ ID NO: 484165 - RNA, 19 nt, Human
gcugggcccgggccugugc

SEQ ID NO: 484166 - RNA, 20 nt, Human
gcugggcccgggccugugcg

SEQ ID NO: 484167 - RNA, 23 nt, Human
gcuuauauucugggggugcggug

SEQ ID NO: 484168 - RNA, 21 nt, Human
ggaaacacggggugagacagc

SEQ ID NO: 484169 - RNA, 21 nt, Human
ggagagaggaaaagggagggc

SEQ ID NO: 484170 - RNA, 23 nt, Human
ggaggagagaggaaaagggaggg

SEQ ID NO: 484171 - RNA, 20 nt, Human
ggcccgggcggcgcgggagg

SEQ ID NO: 484172 - RNA, 22 nt, Human
ggcgcagagaacuuaggagaga

SEQ ID NO: 484173 - RNA, 23 nt, Human
gggcaguucugugcugggcccgg

SEQ ID NO: 484174 - RNA, 22 nt, Human
gggcggcgcgggagggcccggc

SEQ ID NO: 484175 - RNA, 19 nt, Human
ggggagcagcaggugggga

SEQ ID NO: 484176 - RNA, 18 nt, Human
ggggccuccacucuggcc

SEQ ID NO: 484177 - RNA, 20 nt, Human
gggggcccugaccuuggucc

SEQ ID NO: 484178 - RNA, 18 nt, Human
gugcgguggggcaggggg

SEQ ID NO: 484179 - RNA, 22 nt, Human
guggaugggcugccugcacagc

SEQ ID NO: 484180 - RNA, 20 nt, Human
ucaccaaacccacccgcgcc

SEQ ID NO: 484181 - RNA, 22 nt, Human
uccccggugggcgccccggccc

SEQ ID NO: 484182 - RNA, 18 nt, Human
uccccugucccuugugcu

SEQ ID NO: 484183 - RNA, 24 nt, Human
ucccgcgcgggcaggaggcccagc

SEQ ID NO: 484184 - RNA, 18 nt, Human
ucccggggcgcccucccc

SEQ ID NO: 484185 - RNA, 20 nt, Human
ucccuggucccggggcgccc

SEQ ID NO: 484186 - RNA, 25 nt, Human
ucucuggggaaauccgccucagcuc

SEQ ID NO: 484187 - RNA, 19 nt, Human
ucuggggaaauccgccuca

SEQ ID NO: 484188 - RNA, 18 nt, Human
ugacacacccacauucac

SEQ ID NO: 484189 - RNA, 19 nt, Human
ugaccuugguccccugucc

SEQ ID NO: 484190 - RNA, 18 nt, Human
ugccacgcugacacaccc

SEQ ID NO: 484191 - RNA, 19 nt, Human
ugccgcccucugaggagag

SEQ ID NO: 484192 - RNA, 18 nt, Human
ugcgguggggcagggggg

SEQ ID NO: 484193 - RNA, 22 nt, Human
ugcgguggggcaggggggcccu

SEQ ID NO: 484194 - RNA, 18 nt, Human
ugcuagcagccuggggcc

SEQ ID NO: 484195 - RNA, 25 nt, Human
uggagcccagccugugccgcccucu

SEQ ID NO: 484196 - RNA, 22 nt, Human
ugggcugccugcacagccccug

SEQ ID NO: 484197 - RNA, 23 nt, Human
ugggggugcgguggggcaggggg

SEQ ID NO: 484198 - RNA, 19 nt, Human
ugugcggggagggcccggg

SEQ ID NO: 484199 - RNA, 23 nt, Human
ugugcggggagggcccgggcggc

SEQ ID NO: 484200 - RNA, 19 nt, Human
uguggaucagcaaacacga

SEQ ID NO: 484201 - RNA, 21 nt, Human
aacaucccacaauguacagga

SEQ ID NO: 484202 - RNA, 18 nt, Human
aagaggccacgugcaauc

SEQ ID NO: 484203 - RNA, 25 nt, Human
aauccacggcauucaucugucccuc

SEQ ID NO: 484204 - RNA, 22 nt, Human
acaauguacaggacagccucac

SEQ ID NO: 484205 - RNA, 19 nt, Human
agagacaacacagggauca

SEQ ID NO: 484206 - RNA, 22 nt, Human
agcaaagggugaccuggcccca

SEQ ID NO: 484207 - RNA, 22 nt, Human
agccaaaaaucccuacagacca

SEQ ID NO: 484208 - RNA, 21 nt, Human
aggcagggugaggggcccugg

SEQ ID NO: 484209 - RNA, 21 nt, Human
aggcagggugaggggcccugg

SEQ ID NO: 484210 - RNA, 22 nt, Human
aggcagggugaggggcccuggc

SEQ ID NO: 484211 - RNA, 23 nt, Human
aggcagggugaggggcccuggcc

SEQ ID NO: 484212 - RNA, 19 nt, Human
aggccucagccucuuucag

SEQ ID NO: 484213 - RNA, 18 nt, Human
aggccuggggcaggaaag

SEQ ID NO: 484214 - RNA, 20 nt, Human
aguagccaacuaagacucca

SEQ ID NO: 484215 - RNA, 18 nt, Human
caaaaaucccuacagacc

SEQ ID NO: 484216 - RNA, 20 nt, Human
cacggcauucaucugucccu

SEQ ID NO: 484217 - RNA, 24 nt, Human
cacuggcagagaaagagcagaccu

SEQ ID NO: 484218 - RNA, 22 nt, Human
cagccucacagcaaagggugac

SEQ ID NO: 484219 - RNA, 18 nt, Human
caggaaagcuuuggggug

SEQ ID NO: 484220 - RNA, 21 nt, Human
caggacagccucacagcaaag

SEQ ID NO: 484221 - RNA, 21 nt, Human
caguagugcagagguuaaucc

SEQ ID NO: 484222 - RNA, 21 nt, Human
cccacaauguacaggacagcc

SEQ ID NO: 484223 - RNA, 22 nt, Human
ccccaguccccaggacccgccc

SEQ ID NO: 484224 - RNA, 19 nt, Human
cccgcccccgccccagggc

SEQ ID NO: 484225 - RNA, 18 nt, Human
cccuggaccagccacugc

SEQ ID NO: 484226 - RNA, 22 nt, Human
ccucaguccgcuuccgggccuc

SEQ ID NO: 484227 - RNA, 22 nt, Human
cucagccucuuucaggccuggg

SEQ ID NO: 484228 - RNA, 24 nt, Human
gaccagccacugcucaagaggcca

SEQ ID NO: 484229 - RNA, 23 nt, Human
gagaaccuuuuuguuuggcacca

SEQ ID NO: 484230 - RNA, 23 nt, Human
gcaaagggugaccuggccccaca

SEQ ID NO: 484231 - RNA, 20 nt, Human
gcccuggaccagccacugcu

SEQ ID NO: 484232 - RNA, 19 nt, Human
ggacagccucacagcaaag

SEQ ID NO: 484233 - RNA, 18 nt, Human
ggccuggggcaggaaagc

SEQ ID NO: 484234 - RNA, 20 nt, Human
ggccuggggcaggaaagcuu

SEQ ID NO: 484235 - RNA, 22 nt, Human
gggaucaugggacacaagucac

SEQ ID NO: 484236 - RNA, 24 nt, Human
gggaucaugggacacaagucacua

SEQ ID NO: 484237 - RNA, 21 nt, Human
gggccucggccgcccgcccca

SEQ ID NO: 484238 - RNA, 22 nt, Human
uaagagccugucugucacuggc

SEQ ID NO: 484239 - RNA, 22 nt, Human
uagccaaaaaucccuacagacc

SEQ ID NO: 484240 - RNA, 23 nt, Human
uaggaaaaauuaacaauuuuuaa

SEQ ID NO: 484241 - RNA, 20 nt, Human
uccccaggacccgcccccgc

SEQ ID NO: 484242 - RNA, 21 nt, Human
uccccaggacccgcccccgcc

SEQ ID NO: 484243 - RNA, 18 nt, Human
ucugucccucuuccucca

SEQ ID NO: 484244 - RNA, 19 nt, Human
ucugucccucuuccuccac

SEQ ID NO: 484245 - RNA, 20 nt, Human
ucuuucaggccuggggcagg

SEQ ID NO: 484246 - RNA, 21 nt, Human
ugaccuggccccacaugucag

SEQ ID NO: 484247 - RNA, 25 nt, Human
ugaccuggccccacaugucaguagg

SEQ ID NO: 484248 - RNA, 23 nt, Human
ugaggcaagggacagugcugaac

SEQ ID NO: 484249 - RNA, 23 nt, Human
ugcaagauaaggcagggugaggg

SEQ ID NO: 484250 - RNA, 21 nt, Human
ugcaauauaggaaaaauuaac

SEQ ID NO: 484251 - RNA, 19 nt, Human
ugcaggaaaguccaggccu

SEQ ID NO: 484252 - RNA, 21 nt, Human
ugcucuagagacaacacaggg

SEQ ID NO: 484253 - RNA, 18 nt, Human
uggcauugaggcaaggga

SEQ ID NO: 484254 - RNA, 24 nt, Human
uggggcaggaaagcuuuggggugg

SEQ ID NO: 484255 - RNA, 21 nt, Human
uguagccaaaaaucccuacag

SEQ ID NO: 484256 - RNA, 25 nt, Human
uuaaucccugcucuagagacaacac

SEQ ID NO: 484257 - RNA, 24 nt, Human
uuacagcuguucagacucuaguag

SEQ ID NO: 484258 - RNA, 21 nt, Human
uuccgggccucggccgcccgc

SEQ ID NO: 484259 - RNA, 20 nt, Human
uugcugaucuaugagcgaua

SEQ ID NO: 484260 - RNA, 21 nt, Human
uuguguguagccaaaaauccc

SEQ ID NO: 484261 - RNA, 27 nt, Human
uuucaggccuggggcaggaaagcuuug

SEQ ID NO: 484262 - RNA, 24 nt, Human
aaaacagauaugaccucucaauau

SEQ ID NO: 484263 - RNA, 18 nt, Human
aaaauccagauacagacc

SEQ ID NO: 484264 - RNA, 18 nt, Human
aaacagaaucacauguuu

SEQ ID NO: 484265 - RNA, 21 nt, Human
aaacagucaauuagaaaaagc

SEQ ID NO: 484266 - RNA, 19 nt, Human
aaacagucgaaucaccaga

SEQ ID NO: 484267 - RNA, 18 nt, Human
aaagaaaaacaggcagac

SEQ ID NO: 484268 - RNA, 19 nt, Human
aaagaaaaacaggcagaca

SEQ ID NO: 484269 - RNA, 20 nt, Human
aaagaaaaacaggcagacaa

SEQ ID NO: 484270 - RNA, 24 nt, Human
aaauagccccauagaaguuagggu

SEQ ID NO: 484271 - RNA, 20 nt, Human
aacaaagccaacuucaauaa

SEQ ID NO: 484272 - RNA, 26 nt, Human
aacauuugcuguaacgagcuaaauac

SEQ ID NO: 484273 - RNA, 25 nt, Human
aacccaacuuuuuuuuuuuuucucc

SEQ ID NO: 484274 - RNA, 20 nt, Human
aacucuguguaagaaguauu

SEQ ID NO: 484275 - RNA, 19 nt, Human
aagaaaacauuugcagaag

SEQ ID NO: 484276 - RNA, 22 nt, Human
aagccaaguuuaagaaccacac

SEQ ID NO: 484277 - RNA, 18 nt, Human
aagugggguccagccacc

SEQ ID NO: 484278 - RNA, 20 nt, Human
aaguuagggugaggaggagg

SEQ ID NO: 484279 - RNA, 20 nt, Human
acccaucaguaauucagaau

SEQ ID NO: 484280 - RNA, 22 nt, Human
accccacaauuauuaacacaga

SEQ ID NO: 484281 - RNA, 20 nt, Human
accccgggccguggcugcug

SEQ ID NO: 484282 - RNA, 18 nt, Human
accuaauucauuguuugg

SEQ ID NO: 484283 - RNA, 24 nt, Human
agaaaaacagauaugaccucucaa

SEQ ID NO: 484284 - RNA, 24 nt, Human
agaaaaagaaaugaaugauaaaga

SEQ ID NO: 484285 - RNA, 25 nt, Human
agaaaaagaaaugaaugauaaagaa

SEQ ID NO: 484286 - RNA, 26 nt, Human
agaaaaagaaaugaaugauaaagaaa

SEQ ID NO: 484287 - RNA, 18 nt, Human
agaaaaagcaauacacca

SEQ ID NO: 484288 - RNA, 20 nt, Human
agaagaaaauuuaaaaaaga

SEQ ID NO: 484289 - RNA, 22 nt, Human
agaccauuuaaaaucccgaucu

SEQ ID NO: 484290 - RNA, 19 nt, Human
agagaagcagggcuucuug

SEQ ID NO: 484291 - RNA, 24 nt, Human
agagaagcagggcuucuugccaca

SEQ ID NO: 484292 - RNA, 19 nt, Human
agaggaccaaaaaaaggga

SEQ ID NO: 484293 - RNA, 22 nt, Human
agcagaggaccaaaaaaaggga

SEQ ID NO: 484294 - RNA, 19 nt, Human
agccaggcgcccugagacc

SEQ ID NO: 484295 - RNA, 18 nt, Human
aggcaaggcagaggccag

SEQ ID NO: 484296 - RNA, 21 nt, Human
aggcccaacucacucuuccuc

SEQ ID NO: 484297 - RNA, 19 nt, Human
agggaucccagauauguuu

SEQ ID NO: 484298 - RNA, 24 nt, Human
agucacgaugauagagacagcccc

SEQ ID NO: 484299 - RNA, 24 nt, Human
auaaagaaaaacagauaugaccuc

SEQ ID NO: 484300 - RNA, 23 nt, Human
aucacaaguuacaaaaacuguaa

SEQ ID NO: 484301 - RNA, 19 nt, Human
augacaagaaaacauuugc

SEQ ID NO: 484302 - RNA, 19 nt, Human
augcacaauuuggaaugaa

SEQ ID NO: 484303 - RNA, 23 nt, Human
auugucuuuuuguuuuuguguga

SEQ ID NO: 484304 - RNA, 21 nt, Human
auuucauagcuaacauucaau

SEQ ID NO: 484305 - RNA, 19 nt, Human
caaaaaaagggaucccaga

SEQ ID NO: 484306 - RNA, 19 nt, Human
caacagcagggaaguccac

SEQ ID NO: 484307 - RNA, 24 nt, Human
caacauacuuuagaaauggauaua

SEQ ID NO: 484308 - RNA, 23 nt, Human
caagaaaacauuugcagaagaaa

SEQ ID NO: 484309 - RNA, 22 nt, Human
caauuuucaaaacagaaucaca

SEQ ID NO: 484310 - RNA, 22 nt, Human
cacaauuuggaaugaauugucu

SEQ ID NO: 484311 - RNA, 19 nt, Human
cacccugauggcaacagca

SEQ ID NO: 484312 - RNA, 21 nt, Human
cagaagaaaauuuaaaaaaga

SEQ ID NO: 484313 - RNA, 25 nt, Human
cagauaaaagguagcuuaauauuca

SEQ ID NO: 484314 - RNA, 24 nt, Human
cagauacagaccauuuaaaauccc

SEQ ID NO: 484315 - RNA, 21 nt, Human
cagcagcaccuugaggacggc

SEQ ID NO: 484316 - RNA, 21 nt, Human
cagccaggcgcccugagaccc

SEQ ID NO: 484317 - RNA, 19 nt, Human
cagccauugguauuuauuu

SEQ ID NO: 484318 - RNA, 21 nt, Human
cagucgaaucaccagaagggc

SEQ ID NO: 484319 - RNA, 19 nt, Human
caucagugaacccaucagg

SEQ ID NO: 484320 - RNA, 23 nt, Human
caucuaaaaccccacaauuauua

SEQ ID NO: 484321 - RNA, 24 nt, Human
caucuaggguaguggcucucaaac

SEQ ID NO: 484322 - RNA, 22 nt, Human
ccaagccgcgcccggccccagc

SEQ ID NO: 484323 - RNA, 23 nt, Human
ccacuuggcucuggauuccagga

SEQ ID NO: 484324 - RNA, 23 nt, Human
cccgccaagccgcgcccggcccc

SEQ ID NO: 484325 - RNA, 20 nt, Human
cccggacacuaggcgcgggg

SEQ ID NO: 484326 - RNA, 21 nt, Human
ccgccaagccgcgcccggccc

SEQ ID NO: 484327 - RNA, 21 nt, Human
ccggccccagcugcgucuccg

SEQ ID NO: 484328 - RNA, 20 nt, Human
ccucccgccaagccgcgccc

SEQ ID NO: 484329 - RNA, 19 nt, Human
ccucuugcaucuuguuacc

SEQ ID NO: 484330 - RNA, 23 nt, Human
ccugcgcggcuccgacgcugcuc

SEQ ID NO: 484331 - RNA, 23 nt, Human
cgcgcccggccccagcugcgucu

SEQ ID NO: 484332 - RNA, 19 nt, Human
cgcgcggcgccgccccagg

SEQ ID NO: 484333 - RNA, 22 nt, Human
cggcagcaacgcgagucaagaa

SEQ ID NO: 484334 - RNA, 23 nt, Human
cucacgcacuggcagccucccuc

SEQ ID NO: 484335 - RNA, 18 nt, Human
cucucaaaccuagcuaaa

SEQ ID NO: 484336 - RNA, 19 nt, Human
cucugaggagcugcugaag

SEQ ID NO: 484337 - RNA, 18 nt, Human
cucuggagguggagccag

SEQ ID NO: 484338 - RNA, 20 nt, Human
cugcagacccucccgccaag

SEQ ID NO: 484339 - RNA, 20 nt, Human
cugcaggucuucagccaggu

SEQ ID NO: 484340 - RNA, 20 nt, Human
cugcgcggcuccgacgcugc

SEQ ID NO: 484341 - RNA, 20 nt, Human
cugcugaaggaugaccuagg

SEQ ID NO: 484342 - RNA, 23 nt, Human
cuguaauuacaaauuacaaagaa

SEQ ID NO: 484343 - RNA, 24 nt, Human
cuguuccauuuaucuccuuccucu

SEQ ID NO: 484344 - RNA, 22 nt, Human
cuugaccucaucauuuaggugg

SEQ ID NO: 484345 - RNA, 19 nt, Human
cuuggcucuggauuccagg

SEQ ID NO: 484346 - RNA, 22 nt, Human
gaaaaacaggcagacaaucuug

SEQ ID NO: 484347 - RNA, 20 nt, Human
gaaaaagcaauacaccaaaa

SEQ ID NO: 484348 - RNA, 22 nt, Human
gaaaagauguucuguacaacau

SEQ ID NO: 484349 - RNA, 19 nt, Human
gaaguuagggugaggagga

SEQ ID NO: 484350 - RNA, 25 nt, Human
gacaagaaaacauuugcagaagaaa

SEQ ID NO: 484351 - RNA, 20 nt, Human
gacgcugcucugucuccccu

SEQ ID NO: 484352 - RNA, 21 nt, Human
gagacaccagcuuaacugugg

SEQ ID NO: 484353 - RNA, 26 nt, Human
gaugauagagacagccacagcugcca

SEQ ID NO: 484354 - RNA, 18 nt, Human
gcacuggcagccucccuc

SEQ ID NO: 484355 - RNA, 19 nt, Human
gccccagcuccgccuggcg

SEQ ID NO: 484356 - RNA, 21 nt, Human
gccccaggcacggaggcggca

SEQ ID NO: 484357 - RNA, 25 nt, Human
gcccugagacccgggcacggcgacg

SEQ ID NO: 484358 - RNA, 18 nt, Human
gccuggcgcucuccuccc

SEQ ID NO: 484359 - RNA, 18 nt, Human
gcgcggcuccgacgcugc

SEQ ID NO: 484360 - RNA, 21 nt, Human
gcgucguuccugcucucacuc

SEQ ID NO: 484361 - RNA, 18 nt, Human
gcugaaggaugaccuagg

SEQ ID NO: 484362 - RNA, 23 nt, Human
ggacagcucugaggagcugcuga

SEQ ID NO: 484363 - RNA, 21 nt, Human
ggcaacagcagggaaguccac

SEQ ID NO: 484364 - RNA, 23 nt, Human
ggccgcucugcgucguuccugcu

SEQ ID NO: 484365 - RNA, 21 nt, Human
ggcuucuugacacggaugccc

SEQ ID NO: 484366 - RNA, 20 nt, Human
guccagccaccagcuccauc

SEQ ID NO: 484367 - RNA, 18 nt, Human
gucuccccuguccagucu

SEQ ID NO: 484368 - RNA, 19 nt, Human
guggcugcuggacagcucc

SEQ ID NO: 484369 - RNA, 21 nt, Human
guggggcaucacagucaggug

SEQ ID NO: 484370 - RNA, 25 nt, Human
guucaugggcuucacagcuguuuuu

SEQ ID NO: 484371 - RNA, 19 nt, Human
guugacuaaugaauucugg

SEQ ID NO: 484372 - RNA, 20 nt, Human
uaaaauccagauacagacca

SEQ ID NO: 484373 - RNA, 23 nt, Human
uaaagaaaaacagauaugaccuc

SEQ ID NO: 484374 - RNA, 20 nt, Human
uaaauggaaaacaguuuuca

SEQ ID NO: 484375 - RNA, 23 nt, Human
uaacgagcuaaauaccaaaagcu

SEQ ID NO: 484376 - RNA, 21 nt, Human
uacaaagaaaaacaggcagac

SEQ ID NO: 484377 - RNA, 24 nt, Human
uacaaagaaaaacaggcagacaau

SEQ ID NO: 484378 - RNA, 23 nt, Human
uagaaguuagggugaggaggagg

SEQ ID NO: 484379 - RNA, 19 nt, Human
uagagacagccacagcugc

SEQ ID NO: 484380 - RNA, 22 nt, Human
uagccauuuucucaucuaaaac

SEQ ID NO: 484381 - RNA, 22 nt, Human
uaggcaaggcagaggccagugg

SEQ ID NO: 484382 - RNA, 21 nt, Human
uaggguaguggcucucaaacc

SEQ ID NO: 484383 - RNA, 23 nt, Human
uauagccauuuucucaucuaaaa

SEQ ID NO: 484384 - RNA, 18 nt, Human
uaucacucuucccuuugg

SEQ ID NO: 484385 - RNA, 19 nt, Human
uaucacucuucccuuuggu

SEQ ID NO: 484386 - RNA, 25 nt, Human
uaucagcagaggaccaaaaaaaggg

SEQ ID NO: 484387 - RNA, 24 nt, Human
ucaauuagaaaaagcaauacacca

SEQ ID NO: 484388 - RNA, 24 nt, Human
ucaguaacaacuuuuagaaaaaga

SEQ ID NO: 484389 - RNA, 23 nt, Human
uccacagucacgaugauagagac

SEQ ID NO: 484390 - RNA, 22 nt, Human
uccagauacagaccauuuaaaa

SEQ ID NO: 484391 - RNA, 23 nt, Human
ucccagaggcuccgaggcugcag

SEQ ID NO: 484392 - RNA, 23 nt, Human
ucuccgaggucggccccgcggac

SEQ ID NO: 484393 - RNA, 20 nt, Human
ugaaaaccccgggccguggc

SEQ ID NO: 484394 - RNA, 20 nt, Human
ugaauggccauaccuaauuc

SEQ ID NO: 484395 - RNA, 22 nt, Human
ugaauugucuuuuuguuuuugu

SEQ ID NO: 484396 - RNA, 27 nt, Human
ugacaagaaaacauuugcagaagaaaa

SEQ ID NO: 484397 - RNA, 24 nt, Human
ugacagugucuuuggaaauagccc

SEQ ID NO: 484398 - RNA, 20 nt, Human
ugacauccucuugcaucuug

SEQ ID NO: 484399 - RNA, 22 nt, Human
ugaguggggagaagcagcagca

SEQ ID NO: 484400 - RNA, 21 nt, Human
ugauaaagaaaaacagauaug

SEQ ID NO: 484401 - RNA, 18 nt, Human
ugauguccagaacccaga

SEQ ID NO: 484402 - RNA, 22 nt, Human
ugcaucuuguuaccuaccaaug

SEQ ID NO: 484403 - RNA, 19 nt, Human
ugcucugucuccccugucc

SEQ ID NO: 484404 - RNA, 27 nt, Human
ugcucugucuccccuguccagucucua

SEQ ID NO: 484405 - RNA, 18 nt, Human
ugcuggacagcucugagg

SEQ ID NO: 484406 - RNA, 27 nt, Human
uggaaaacaguuuucaugacaagaaaa

SEQ ID NO: 484407 - RNA, 18 nt, Human
uggaaauagccccauaga

SEQ ID NO: 484408 - RNA, 20 nt, Human
uggaauucccauaauuaaca

SEQ ID NO: 484409 - RNA, 20 nt, Human
uggacugcguuuugcacauc

SEQ ID NO: 484410 - RNA, 22 nt, Human
uggcugcuggacagcucugagg

SEQ ID NO: 484411 - RNA, 23 nt, Human
ugguaguguuuccaggcuucaac

SEQ ID NO: 484412 - RNA, 24 nt, Human
uggugacuccaagauaaagccaag

SEQ ID NO: 484413 - RNA, 19 nt, Human
ugucuccccuguccagucu

SEQ ID NO: 484414 - RNA, 21 nt, Human
ugucuuuggaaauagccccau

SEQ ID NO: 484415 - RNA, 25 nt, Human
uguuccauuuaucuccuuccucuuu

SEQ ID NO: 484416 - RNA, 21 nt, Human
uguuuaaaaaauuuuguccca

SEQ ID NO: 484417 - RNA, 26 nt, Human
uuaaaaacagucaauuagaaaaagca

SEQ ID NO: 484418 - RNA, 21 nt, Human
uuaacacagaucaaacugcag

SEQ ID NO: 484419 - RNA, 24 nt, Human
uuaaccaucacacaggagaauaaa

SEQ ID NO: 484420 - RNA, 23 nt, Human
uuaagcuauuuuuuuaauaaauu

SEQ ID NO: 484421 - RNA, 23 nt, Human
uuaauaaccucauucaauguaau

SEQ ID NO: 484422 - RNA, 18 nt, Human
uuacuggagcaggacagc

SEQ ID NO: 484423 - RNA, 24 nt, Human
uuagaaaaagcaauacaccaaaaa

SEQ ID NO: 484424 - RNA, 22 nt, Human
uucagccaggcgcccugagacc

SEQ ID NO: 484425 - RNA, 19 nt, Human
uucagccaggugacagcac

SEQ ID NO: 484426 - RNA, 25 nt, Human
uucaugacaagaaaacauuugcaga

SEQ ID NO: 484427 - RNA, 23 nt, Human
uuuccaggcuucaacuguguugu

SEQ ID NO: 484428 - RNA, 27 nt, Human
uuucugguuuucauggacugcguuuug

SEQ ID NO: 484429 - RNA, 18 nt, Human
uuugaaucuccucuggug

SEQ ID NO: 484430 - RNA, 21 nt, Human
uuuuuguuuuugugugaaacu

SEQ ID NO: 484431 - RNA, 22 nt, Human
uuuuuuuuuuuuuuuuuuucag

SEQ ID NO: 484432 - RNA, 22 nt, Human
aaaaaacuuaaagacaggagaa

SEQ ID NO: 484433 - RNA, 24 nt, Human
aaaagaaaaaacuuaaagacagga

SEQ ID NO: 484434 - RNA, 19 nt, Human
aaacuguagccauuaagca

SEQ ID NO: 484435 - RNA, 20 nt, Human
aagacaggagaauaugaaaa

SEQ ID NO: 484436 - RNA, 20 nt, Human
aagagaccaaggcuacaguu

SEQ ID NO: 484437 - RNA, 21 nt, Human
aagcagguuaaacuuguuuua

SEQ ID NO: 484438 - RNA, 21 nt, Human
agaaaagaaaaaacuuaaaga

SEQ ID NO: 484439 - RNA, 22 nt, Human
agaaaagaaaaaacuuaaagac

SEQ ID NO: 484440 - RNA, 20 nt, Human
agagaccaaggcuacaguuu

SEQ ID NO: 484441 - RNA, 23 nt, Human
auaaagcaaggacauuauagucc

SEQ ID NO: 484442 - RNA, 19 nt, Human
augguuaagagaccaaggc

SEQ ID NO: 484443 - RNA, 23 nt, Human
caagauggcagugcugcaagccc

SEQ ID NO: 484444 - RNA, 18 nt, Human
caccccaagccuguacau

SEQ ID NO: 484445 - RNA, 21 nt, Human
cauagaaugaaugcuaugaga

SEQ ID NO: 484446 - RNA, 21 nt, Human
ccauugagaaccccuggcuau

SEQ ID NO: 484447 - RNA, 24 nt, Human
cuuccagggcuuacuagaagucua

SEQ ID NO: 484448 - RNA, 23 nt, Human
cuuguucaguaucuggcuagcua

SEQ ID NO: 484449 - RNA, 21 nt, Human
ggagccaccccaagccuguac

SEQ ID NO: 484450 - RNA, 25 nt, Human
uaagagaccaaggcuacaguuuuca

SEQ ID NO: 484451 - RNA, 23 nt, Human
uaguaaguucaaugagaaaagaa

SEQ ID NO: 484452 - RNA, 20 nt, Human
ucacuggacgaggcuuccug

SEQ ID NO: 484453 - RNA, 24 nt, Human
ucucuaaaaauaugccuacuacuu

SEQ ID NO: 484454 - RNA, 21 nt, Human
ugagaaaagaaaaaacuuaaa

SEQ ID NO: 484455 - RNA, 24 nt, Human
ugggaaggccucagaaucauggcg

SEQ ID NO: 484456 - RNA, 25 nt, Human
uuaaagacaggagaauaugaaaaua

SEQ ID NO: 484457 - RNA, 19 nt, Human
uucacauguaaaaacugua

SEQ ID NO: 484458 - RNA, 21 nt, Human
uucacauguaaaaacuguagc

SEQ ID NO: 484459 - RNA, 19 nt, Human
uuccauagaaugaaugcua

SEQ ID NO: 484460 - RNA, 24 nt, Human
uugaaaauuaacagcaauaucuaa

SEQ ID NO: 484461 - RNA, 24 nt, Human
uuuaccucuaacaaaacuuaugua

SEQ ID NO: 484462 - RNA, 23 nt, Human
uuuccauugagaaccccuggcua

SEQ ID NO: 484463 - RNA, 20 nt, Human
aaacccaauuagaacgacag

SEQ ID NO: 484464 - RNA, 24 nt, Human
aaauuggaggaggcauuuugaaga

SEQ ID NO: 484465 - RNA, 21 nt, Human
aaccaggccucuagguucuuc

SEQ ID NO: 484466 - RNA, 26 nt, Human
aagaaagcaaaccaccacaaaccaaa

SEQ ID NO: 484467 - RNA, 23 nt, Human
aagcaaaccaccacaaaccaaac

SEQ ID NO: 484468 - RNA, 22 nt, Human
aagcaagccugaaccaccaagu

SEQ ID NO: 484469 - RNA, 18 nt, Human
aagcagaaaauaaagaga

SEQ ID NO: 484470 - RNA, 23 nt, Human
acagccugacccccucccacccc

SEQ ID NO: 484471 - RNA, 23 nt, Human
acaugcaggagugcacacaugug

SEQ ID NO: 484472 - RNA, 23 nt, Human
acucacauauauauauacauaua

SEQ ID NO: 484473 - RNA, 19 nt, Human
agacaggagagaagagggg

SEQ ID NO: 484474 - RNA, 22 nt, Human
agagagugguaagaaaggaaca

SEQ ID NO: 484475 - RNA, 23 nt, Human
agagagugguaagaaaggaacaa

SEQ ID NO: 484476 - RNA, 19 nt, Human
agcuagcauucuuacaaaa

SEQ ID NO: 484477 - RNA, 20 nt, Human
agcugcagcuggggcuacgg

SEQ ID NO: 484478 - RNA, 21 nt, Human
aggcaguggccauggcugccu

SEQ ID NO: 484479 - RNA, 23 nt, Human
aggccucuagguucuucucuccc

SEQ ID NO: 484480 - RNA, 25 nt, Human
aggcgccggagcucgguggacagcc

SEQ ID NO: 484481 - RNA, 20 nt, Human
aggcucuuucauugaaccgg

SEQ ID NO: 484482 - RNA, 19 nt, Human
agguucuucucucccugcc

SEQ ID NO: 484483 - RNA, 27 nt, Human
auauauacacauaugugugugugugug

SEQ ID NO: 484484 - RNA, 21 nt, Human
auaugugugugugugugugug

SEQ ID NO: 484485 - RNA, 19 nt, Human
augguaaagaaagcaaacc

SEQ ID NO: 484486 - RNA, 22 nt, Human
augguaaagaaagcaaaccacc

SEQ ID NO: 484487 - RNA, 33 nt, Human
augugugcguguguguauauauauauaugugau

SEQ ID NO: 484488 - RNA, 21 nt, Human
augugugugugugugugugug

SEQ ID NO: 484489 - RNA, 22 nt, Human
augugugugugugugugugugu

SEQ ID NO: 484490 - RNA, 23 nt, Human
auguguguguguguguguguguu

SEQ ID NO: 484491 - RNA, 21 nt, Human
caaaccaaaccucucuuacuc

SEQ ID NO: 484492 - RNA, 22 nt, Human
caaagcaagccugaaccaccaa

SEQ ID NO: 484493 - RNA, 27 nt, Human
caacaagaaaaaagaguaguaggaacc

SEQ ID NO: 484494 - RNA, 27 nt, Human
caagcagaaaauaaagagaagggaccc

SEQ ID NO: 484495 - RNA, 22 nt, Human
cacagccugacccccucccacc

SEQ ID NO: 484496 - RNA, 23 nt, Human
cacagccugacccccucccaccc

SEQ ID NO: 484497 - RNA, 23 nt, Human
cacagccugacccccucccaccc

SEQ ID NO: 484498 - RNA, 24 nt, Human
cacauauauauauacauauauaca

SEQ ID NO: 484499 - RNA, 22 nt, Human
cacauaugugugugugugugua

SEQ ID NO: 484500 - RNA, 22 nt, Human
cacccccgcuuggagaggcacu

SEQ ID NO: 484501 - RNA, 24 nt, Human
cauauauauauacauauauacaca

SEQ ID NO: 484502 - RNA, 25 nt, Human
cauauguguguguguguguauauaa

SEQ ID NO: 484503 - RNA, 20 nt, Human
cauucuuacaaaauuggagg

SEQ ID NO: 484504 - RNA, 19 nt, Human
ccaacgugucggccccagg

SEQ ID NO: 484505 - RNA, 18 nt, Human
ccaauuagaacgacaggc

SEQ ID NO: 484506 - RNA, 19 nt, Human
ccaccgaaaccguggcggg

SEQ ID NO: 484507 - RNA, 23 nt, Human
ccagccgcggcuucuucucgcug

SEQ ID NO: 484508 - RNA, 20 nt, Human
ccaggagagagugguaagaa

SEQ ID NO: 484509 - RNA, 24 nt, Human
cccgccucuuccuucucuuccccc

SEQ ID NO: 484510 - RNA, 19 nt, Human
ccgagugagcggucccucc

SEQ ID NO: 484511 - RNA, 19 nt, Human
ccgccucuuccuucucuuc

SEQ ID NO: 484512 - RNA, 19 nt, Human
ccuucucuuccccccuccu

SEQ ID NO: 484513 - RNA, 21 nt, Human
cucacauauauauauacauau

SEQ ID NO: 484514 - RNA, 22 nt, Human
cuccaucccgugcccagacgcu

SEQ ID NO: 484515 - RNA, 23 nt, Human
cucccaaucgaaucccaaauucg

SEQ ID NO: 484516 - RNA, 19 nt, Human
cucccugcccuggguucua

SEQ ID NO: 484517 - RNA, 18 nt, Human
cucgcugucucucuccuc

SEQ ID NO: 484518 - RNA, 20 nt, Human
cucugcacagccugaccccc

SEQ ID NO: 484519 - RNA, 21 nt, Human
cucugcacagccugacccccu

SEQ ID NO: 484520 - RNA, 20 nt, Human
cuggaucaagggaauugaug

SEQ ID NO: 484521 - RNA, 21 nt, Human
cuuucacuccaucccgugccc

SEQ ID NO: 484522 - RNA, 19 nt, Human
gaaaagacauggcaagcag

SEQ ID NO: 484523 - RNA, 18 nt, Human
gacucgccuuccucgccc

SEQ ID NO: 484524 - RNA, 18 nt, Human
gagaggaaggcaguggcc

SEQ ID NO: 484525 - RNA, 22 nt, Human
gauaauugaacaacaagaaaaa

SEQ ID NO: 484526 - RNA, 24 nt, Human
gaugcaaguauguuccagaaaaga

SEQ ID NO: 484527 - RNA, 21 nt, Human
gcaagcagaaaauaaagagaa

SEQ ID NO: 484528 - RNA, 19 nt, Human
gcagcuggggcuacggucc

SEQ ID NO: 484529 - RNA, 25 nt, Human
gcccgccucuuccuucucuuccccc

SEQ ID NO: 484530 - RNA, 23 nt, Human
gccugacccccucccacccccgc

SEQ ID NO: 484531 - RNA, 20 nt, Human
ggaggaggcauuuugaagau

SEQ ID NO: 484532 - RNA, 23 nt, Human
gguggaugcaaguauguuccaga

SEQ ID NO: 484533 - RNA, 22 nt, Human
guaaagaaagcaaaccaccaca

SEQ ID NO: 484534 - RNA, 22 nt, Human
guauauauauauaugugugugu

SEQ ID NO: 484535 - RNA, 21 nt, Human
gucccaacgugucggccccag

SEQ ID NO: 484536 - RNA, 18 nt, Human
gucucuuccuugucuuga

SEQ ID NO: 484537 - RNA, 21 nt, Human
gugugugugugugugugugug

SEQ ID NO: 484538 - RNA, 23 nt, Human
uaaacuuuuauuucaauuucuuu

SEQ ID NO: 484539 - RNA, 23 nt, Human
uaaagaaagcaaaccaccacaaa

SEQ ID NO: 484540 - RNA, 26 nt, Human
uaaagaaagcaaaccaccacaaacca

SEQ ID NO: 484541 - RNA, 22 nt, Human
uaaucccaggaauaccuagcua

SEQ ID NO: 484542 - RNA, 25 nt, Human
uacaaaauuggaggaggcauuuuga

SEQ ID NO: 484543 - RNA, 19 nt, Human
uacacauaugugugugugu

SEQ ID NO: 484544 - RNA, 19 nt, Human
uacagaacugaacaugcag

SEQ ID NO: 484545 - RNA, 24 nt, Human
uacauauauacacauaugugugug

SEQ ID NO: 484546 - RNA, 22 nt, Human
uagaaacuggaaguacagaacu

SEQ ID NO: 484547 - RNA, 22 nt, Human
uagguucaucagagaggaaggc

SEQ ID NO: 484548 - RNA, 22 nt, Human
uauacauauauacacauaugug

SEQ ID NO: 484549 - RNA, 22 nt, Human
uauacucacauauauauauaca

SEQ ID NO: 484550 - RNA, 22 nt, Human
uauacucacauauauauauaca

SEQ ID NO: 484551 - RNA, 23 nt, Human
uauacucacauauauauauacau

SEQ ID NO: 484552 - RNA, 22 nt, Human
uauauacacauaugugugugug

SEQ ID NO: 484553 - RNA, 24 nt, Human
uauauacacauaugugugugugug

SEQ ID NO: 484554 - RNA, 30 nt, Human
uauauacauauauacacauaugugugugug

SEQ ID NO: 484555 - RNA, 24 nt, Human
uauauacucacauauauauauaca

SEQ ID NO: 484556 - RNA, 23 nt, Human
uauauauacauauauacacauau

SEQ ID NO: 484557 - RNA, 22 nt, Human
uauauauacucacauauauaua

SEQ ID NO: 484558 - RNA, 20 nt, Human
uauauauauacauauauaca

SEQ ID NO: 484559 - RNA, 25 nt, Human
uauauauauacauauauacacauau

SEQ ID NO: 484560 - RNA, 28 nt, Human
uauauauauacauauauacacauaugug

SEQ ID NO: 484561 - RNA, 23 nt, Human
uauauauauaugugugugugugu

SEQ ID NO: 484562 - RNA, 19 nt, Human
uauauauaugugugugugu

SEQ ID NO: 484563 - RNA, 19 nt, Human
uauauauaugugugugugu

SEQ ID NO: 484564 - RNA, 19 nt, Human
uauauauaugugugugugu

SEQ ID NO: 484565 - RNA, 20 nt, Human
uauaugugugcgugugugua

SEQ ID NO: 484566 - RNA, 24 nt, Human
uauaugugugcguguguguauaua

SEQ ID NO: 484567 - RNA, 31 nt, Human
uauaugugugcguguguguauauauauauua

SEQ ID NO: 484568 - RNA, 23 nt, Human
uauaugugugugugugugugugu

SEQ ID NO: 484569 - RNA, 18 nt, Human
uaugugugugugugugug

SEQ ID NO: 484570 - RNA, 23 nt, Human
uaugugugugugugugugugugu

SEQ ID NO: 484571 - RNA, 19 nt, Human
ucaaagcaagccugaacca

SEQ ID NO: 484572 - RNA, 19 nt, Human
ucaaagcaagccugaacca

SEQ ID NO: 484573 - RNA, 26 nt, Human
uccccgcaacagccgcuagcuggacu

SEQ ID NO: 484574 - RNA, 19 nt, Human
ucggagcugcagcuggggc

SEQ ID NO: 484575 - RNA, 23 nt, Human
ucucccugcccuggguucuaugg

SEQ ID NO: 484576 - RNA, 20 nt, Human
ucucuuacucuuuuuacaaa

SEQ ID NO: 484577 - RNA, 19 nt, Human
ucucuugggcuggaucaag

SEQ ID NO: 484578 - RNA, 22 nt, Human
ucuuccuucucuuccccccucc

SEQ ID NO: 484579 - RNA, 23 nt, Human
ucuuccuucucuuccccccuccu

SEQ ID NO: 484580 - RNA, 22 nt, Human
ucuugaauggcgaagucagucu

SEQ ID NO: 484581 - RNA, 21 nt, Human
ugaaaauacucagggucuaag

SEQ ID NO: 484582 - RNA, 23 nt, Human
ugaacagugcauuuuagaaacug

SEQ ID NO: 484583 - RNA, 19 nt, Human
ugaccaaaucaaaagacag

SEQ ID NO: 484584 - RNA, 19 nt, Human
ugacccccucccacccccg

SEQ ID NO: 484585 - RNA, 27 nt, Human
ugcagcaacauauaugugugcgugugu

SEQ ID NO: 484586 - RNA, 18 nt, Human
ugccaccaaagcaaacca

SEQ ID NO: 484587 - RNA, 21 nt, Human
ugccuaagagcucagguucaa

SEQ ID NO: 484588 - RNA, 20 nt, Human
ugccuggucucuugggcugg

SEQ ID NO: 484589 - RNA, 19 nt, Human
uggcugccuggucucuugg

SEQ ID NO: 484590 - RNA, 18 nt, Human
ugggcuggaucaagggaa

SEQ ID NO: 484591 - RNA, 18 nt, Human
ugguggaugcaaguaugu

SEQ ID NO: 484592 - RNA, 20 nt, Human
uguguauauauacucacaua

SEQ ID NO: 484593 - RNA, 20 nt, Human
uguguauauauacucacaua

SEQ ID NO: 484594 - RNA, 24 nt, Human
uguguauauauacucacauauaua

SEQ ID NO: 484595 - RNA, 22 nt, Human
uguguauauauauauaucucag

SEQ ID NO: 484596 - RNA, 24 nt, Human
uguguauauauauauaucucagua

SEQ ID NO: 484597 - RNA, 26 nt, Human
uguguauauauauauaucucaguaua

SEQ ID NO: 484598 - RNA, 19 nt, Human
uguguauauauauauaugu

SEQ ID NO: 484599 - RNA, 19 nt, Human
uguguauauauauauaugu

SEQ ID NO: 484600 - RNA, 23 nt, Human
uguguauauauauauaugugugu

SEQ ID NO: 484601 - RNA, 23 nt, Human
uguguauauauauauaugugugu

SEQ ID NO: 484602 - RNA, 20 nt, Human
ugugugcguguguguauaua

SEQ ID NO: 484603 - RNA, 20 nt, Human
ugugugcguguguguauaua

SEQ ID NO: 484604 - RNA, 18 nt, Human
uguguguauauauauaua

SEQ ID NO: 484605 - RNA, 21 nt, Human
uguguguauauauauauaugu

SEQ ID NO: 484606 - RNA, 24 nt, Human
uguguguauauauauauaugugug

SEQ ID NO: 484607 - RNA, 24 nt, Human
uguguguguauauauacucacaua

SEQ ID NO: 484608 - RNA, 18 nt, Human
uguguguguauauauaua

SEQ ID NO: 484609 - RNA, 23 nt, Human
uguguguguguauauauauauau

SEQ ID NO: 484610 - RNA, 23 nt, Human
uguguguguguguauauauauau

SEQ ID NO: 484611 - RNA, 18 nt, Human
uguguguguguguguaua

SEQ ID NO: 484612 - RNA, 20 nt, Human
uguguguguguguguauaua

SEQ ID NO: 484613 - RNA, 20 nt, Human
uguguguguguguguauaua

SEQ ID NO: 484614 - RNA, 18 nt, Human
ugugugugugugugugug

SEQ ID NO: 484615 - RNA, 18 nt, Human
ugugugugugugugugug

SEQ ID NO: 484616 - RNA, 18 nt, Human
ugugugugugugugugug

SEQ ID NO: 484617 - RNA, 22 nt, Human
uguguguguguguguguguaua

SEQ ID NO: 484618 - RNA, 24 nt, Human
uguguguguguguguguguauaua

SEQ ID NO: 484619 - RNA, 22 nt, Human
ugugugugugugugugugugua

SEQ ID NO: 484620 - RNA, 28 nt, Human
uucgcaguagccagccgcggcuucuucu

SEQ ID NO: 484621 - RNA, 22 nt, Human
uucucgcugucucucuccucug

SEQ ID NO: 484622 - RNA, 20 nt, Human
uucuucggagcugcagcugg

SEQ ID NO: 484623 - RNA, 24 nt, Human
aaacaagcagcuaaaagaagggaa

SEQ ID NO: 484624 - RNA, 22 nt, Human
aaacagcaccaaagagguuucc

SEQ ID NO: 484625 - RNA, 23 nt, Human
aaagcgcguaugccgcgcaccag

SEQ ID NO: 484626 - RNA, 21 nt, Human
aacagcuguaggcacaacuuc

SEQ ID NO: 484627 - RNA, 20 nt, Human
aacuccugacccauuuccuc

SEQ ID NO: 484628 - RNA, 25 nt, Human
aagaaaaaaaaaaaaaaaaccucau

SEQ ID NO: 484629 - RNA, 22 nt, Human
aagaagauccaggaggcaacug

SEQ ID NO: 484630 - RNA, 21 nt, Human
aagcaaagaugggucccaaag

SEQ ID NO: 484631 - RNA, 19 nt, Human
aagggaaugguaggaaacc

SEQ ID NO: 484632 - RNA, 21 nt, Human
aagucacaaaaaugccacgga

SEQ ID NO: 484633 - RNA, 20 nt, Human
acagaaaacaaccagugcca

SEQ ID NO: 484634 - RNA, 21 nt, Human
acagcucucaccccucccucu

SEQ ID NO: 484635 - RNA, 19 nt, Human
acaguacuguccagcuucu

SEQ ID NO: 484636 - RNA, 20 nt, Human
accacaaccagcuccucaga

SEQ ID NO: 484637 - RNA, 25 nt, Human
accagucacccaaacuugaccccag

SEQ ID NO: 484638 - RNA, 22 nt, Human
accauagcgguggggaucaugc

SEQ ID NO: 484639 - RNA, 19 nt, Human
accucacaccuucccuuug

SEQ ID NO: 484640 - RNA, 21 nt, Human
accucauucucaguucuccaa

SEQ ID NO: 484641 - RNA, 18 nt, Human
agaauaaccaacaggaga

SEQ ID NO: 484642 - RNA, 20 nt, Human
agacucagaauaaccaacag

SEQ ID NO: 484643 - RNA, 24 nt, Human
agacucagaauaaccaacaggaga

SEQ ID NO: 484644 - RNA, 18 nt, Human
agaggauuggaagagggc

SEQ ID NO: 484645 - RNA, 19 nt, Human
agggagaguggccuuuuag

SEQ ID NO: 484646 - RNA, 22 nt, Human
agggccaguucaaaacugaacc

SEQ ID NO: 484647 - RNA, 27 nt, Human
aguacuguccagcuucuacccaaagau

SEQ ID NO: 484648 - RNA, 24 nt, Human
auuacuaauauaaaaaaaguuaaa

SEQ ID NO: 484649 - RNA, 20 nt, Human
caacuccugacccauuuccu

SEQ ID NO: 484650 - RNA, 18 nt, Human
cacaacuucgugcccuuu

SEQ ID NO: 484651 - RNA, 18 nt, Human
cacagagagcuccuucca

SEQ ID NO: 484652 - RNA, 19 nt, Human
caccaagcgccucacucau

SEQ ID NO: 484653 - RNA, 23 nt, Human
caccagucacccaaacuugaccc

SEQ ID NO: 484654 - RNA, 18 nt, Human
caccccucccucuugcca

SEQ ID NO: 484655 - RNA, 19 nt, Human
cagagggccugagaagagg

SEQ ID NO: 484656 - RNA, 23 nt, Human
caggaggcaacugaaaggaagca

SEQ ID NO: 484657 - RNA, 20 nt, Human
ccaaaaguccuugucccgcu

SEQ ID NO: 484658 - RNA, 23 nt, Human
ccaaaaguccuugucccgcuugg

SEQ ID NO: 484659 - RNA, 24 nt, Human
ccagugaugcaacaccacucugga

SEQ ID NO: 484660 - RNA, 26 nt, Human
cccaaacuugaccccagguuagacaa

SEQ ID NO: 484661 - RNA, 21 nt, Human
ccgcuaggucacagagagcuc

SEQ ID NO: 484662 - RNA, 21 nt, Human
ccucagggccaguucaaaacu

SEQ ID NO: 484663 - RNA, 18 nt, Human
ccuguucagcagucauuu

SEQ ID NO: 484664 - RNA, 28 nt, Human
cgccucacucauuuuggcaggaaaacuu

SEQ ID NO: 484665 - RNA, 22 nt, Human
cucacaccuucccuuugcugcg

SEQ ID NO: 484666 - RNA, 22 nt, Human
cuccaacagcucucaccccucc

SEQ ID NO: 484667 - RNA, 19 nt, Human
cuccccccaaaaguccuug

SEQ ID NO: 484668 - RNA, 19 nt, Human
gagaagaauggggagggcc

SEQ ID NO: 484669 - RNA, 19 nt, Human
gaggacugucgcaccgcca

SEQ ID NO: 484670 - RNA, 18 nt, Human
gagggcaauacuggggaa

SEQ ID NO: 484671 - RNA, 21 nt, Human
gagggcaauacuggggaacag

SEQ ID NO: 484672 - RNA, 22 nt, Human
gccaauacaacuccugacccau

SEQ ID NO: 484673 - RNA, 19 nt, Human
ggaagaggauuggaagagg

SEQ ID NO: 484674 - RNA, 21 nt, Human
ggaagaggauuggaagagggc

SEQ ID NO: 484675 - RNA, 21 nt, Human
ggggaagaggauuggaagagg

SEQ ID NO: 484676 - RNA, 23 nt, Human
ggggaagaggauuggaagagggc

SEQ ID NO: 484677 - RNA, 19 nt, Human
ggggagggccagggaggca

SEQ ID NO: 484678 - RNA, 22 nt, Human
gggugugucacugacugagggu

SEQ ID NO: 484679 - RNA, 19 nt, Human
uaaaacaagcagcuaaaag

SEQ ID NO: 484680 - RNA, 20 nt, Human
uacugacagagaaacuauga

SEQ ID NO: 484681 - RNA, 21 nt, Human
uaugguaacagcuguaggcac

SEQ ID NO: 484682 - RNA, 20 nt, Human
uauuacuaauauaaaaaaag

SEQ ID NO: 484683 - RNA, 23 nt, Human
ucaaaacugaaccuguucacugc

SEQ ID NO: 484684 - RNA, 21 nt, Human
ucacaccuucccuuugcugcg

SEQ ID NO: 484685 - RNA, 25 nt, Human
ucacccaaacuugaccccagguuag

SEQ ID NO: 484686 - RNA, 19 nt, Human
ucaguucuccaacagcucu

SEQ ID NO: 484687 - RNA, 23 nt, Human
uccaggaggcaacugaaaggaag

SEQ ID NO: 484688 - RNA, 21 nt, Human
ucgcuggaaaacaccacaacc

SEQ ID NO: 484689 - RNA, 21 nt, Human
ugaccccagguuagacaaccu

SEQ ID NO: 484690 - RNA, 22 nt, Human
ugagaaaggcuacaaggggaug

SEQ ID NO: 484691 - RNA, 24 nt, Human
ugaugcaacaccacucuggacccc

SEQ ID NO: 484692 - RNA, 19 nt, Human
ugcaacaccacucuggacc

SEQ ID NO: 484693 - RNA, 21 nt, Human
ugcacaagaaacagcaccaaa

SEQ ID NO: 484694 - RNA, 23 nt, Human
uggaaaacaccacaaccagcucc

SEQ ID NO: 484695 - RNA, 21 nt, Human
uggggagggccagggaggcag

SEQ ID NO: 484696 - RNA, 21 nt, Human
uggggagggccagggaggcag

SEQ ID NO: 484697 - RNA, 20 nt, Human
ugucacagagucaacaggcu

SEQ ID NO: 484698 - RNA, 18 nt, Human
uguugggaagugggaaag

SEQ ID NO: 484699 - RNA, 19 nt, Human
uuaaaaagaaaaaaaaaaa

SEQ ID NO: 484700 - RNA, 22 nt, Human
uuaaaaagaaaaaaaaaaaaaa

SEQ ID NO: 484701 - RNA, 26 nt, Human
uuacucuuuucuucccucgcuggaaa

SEQ ID NO: 484702 - RNA, 24 nt, Human
uuucuauaaaugcuuugaaaaaau

SEQ ID NO: 484703 - RNA, 22 nt, Human
aagcagcagcacaaagggcucc

SEQ ID NO: 484704 - RNA, 20 nt, Human
agaagcagcagcacaaaggg

SEQ ID NO: 484705 - RNA, 21 nt, Human
agagggcaaacaggcucugag

SEQ ID NO: 484706 - RNA, 18 nt, Human
agccauagagaugaaacc

SEQ ID NO: 484707 - RNA, 21 nt, Human
aggaagaaaagggagugcaca

SEQ ID NO: 484708 - RNA, 23 nt, Human
aggaagaaaagggagugcacaga

SEQ ID NO: 484709 - RNA, 21 nt, Human
agugcacagagccaugaagca

SEQ ID NO: 484710 - RNA, 23 nt, Human
caaacaggcucugagccaggccu

SEQ ID NO: 484711 - RNA, 19 nt, Human
cacuaagcacagggucaca

SEQ ID NO: 484712 - RNA, 18 nt, Human
cacugagcaugcugccuu

SEQ ID NO: 484713 - RNA, 18 nt, Human
cacuggagucaucuuagg

SEQ ID NO: 484714 - RNA, 20 nt, Human
cagaacacggggacggggaa

SEQ ID NO: 484715 - RNA, 27 nt, Human
cagaaucagagcccagcagggucgucc

SEQ ID NO: 484716 - RNA, 19 nt, Human
cagagcccagcagaacacg

SEQ ID NO: 484717 - RNA, 22 nt, Human
cagcagcacaaagggcucugcc

SEQ ID NO: 484718 - RNA, 23 nt, Human
cagcagcacaaagggcucugccg

SEQ ID NO: 484719 - RNA, 21 nt, Human
cagcagccucucggucaaagc

SEQ ID NO: 484720 - RNA, 18 nt, Human
caggcucugagccaggcc

SEQ ID NO: 484721 - RNA, 19 nt, Human
caggcucugagccaggccu

SEQ ID NO: 484722 - RNA, 19 nt, Human
cccaggguuggcaggugug

SEQ ID NO: 484723 - RNA, 19 nt, Human
ccucagcuuuagaggccca

SEQ ID NO: 484724 - RNA, 19 nt, Human
ccucugacagccauagaga

SEQ ID NO: 484725 - RNA, 20 nt, Human
ccugccagauaucuucccua

SEQ ID NO: 484726 - RNA, 18 nt, Human
cucugccgagacucugcg

SEQ ID NO: 484727 - RNA, 20 nt, Human
cuggagaggaaauggcacuu

SEQ ID NO: 484728 - RNA, 20 nt, Human
cuuuggggauguuuauugca

SEQ ID NO: 484729 - RNA, 22 nt, Human
gaagaaaagggagugcacagag

SEQ ID NO: 484730 - RNA, 18 nt, Human
gagcuccagcagccucuc

SEQ ID NO: 484731 - RNA, 20 nt, Human
gagggaagucaaggaauguu

SEQ ID NO: 484732 - RNA, 18 nt, Human
gcagguguguggaugguu

SEQ ID NO: 484733 - RNA, 23 nt, Human
ggaagaaaagggagugcacagag

SEQ ID NO: 484734 - RNA, 19 nt, Human
ggcagguguguggaugguu

SEQ ID NO: 484735 - RNA, 22 nt, Human
ggggauacucauugggcagaau

SEQ ID NO: 484736 - RNA, 18 nt, Human
ggguacuggggguggagg

SEQ ID NO: 484737 - RNA, 21 nt, Human
ucagagcccagcagaacacgg

SEQ ID NO: 484738 - RNA, 19 nt, Human
ucauugggcagaaucagag

SEQ ID NO: 484739 - RNA, 18 nt, Human
uccagaagcagcagcacu

SEQ ID NO: 484740 - RNA, 21 nt, Human
uccaggguacuggggguggag

SEQ ID NO: 484741 - RNA, 24 nt, Human
uccauagcaaaaacgauuugagaa

SEQ ID NO: 484742 - RNA, 24 nt, Human
uccauagcaaaaacgauuugagaa

SEQ ID NO: 484743 - RNA, 22 nt, Human
ucccacugagcaugcugccuuc

SEQ ID NO: 484744 - RNA, 24 nt, Human
ucccacugagcaugcugccuuccu

SEQ ID NO: 484745 - RNA, 20 nt, Human
ucccgggaggaagggagacu

SEQ ID NO: 484746 - RNA, 20 nt, Human
ucccugaauucuuuauccac

SEQ ID NO: 484747 - RNA, 21 nt, Human
ugcacagagccaugaagcaac

SEQ ID NO: 484748 - RNA, 21 nt, Human
ugccugccagauaucuucccu

SEQ ID NO: 484749 - RNA, 22 nt, Human
ugcuugaauggguggugcuguu

SEQ ID NO: 484750 - RNA, 19 nt, Human
uggggguggaggggucccc

SEQ ID NO: 484751 - RNA, 26 nt, Human
uguggaugguucccugaauuucaaag

SEQ ID NO: 484752 - RNA, 27 nt, Human
uguggaugguucccugaauuucaaagg

SEQ ID NO: 484753 - RNA, 29 nt, Human
uuuuuuuuuuuuuuuuuuuaacuuugggg

SEQ ID NO: 484754 - RNA, 22 nt, Human
aaaaggccagaaccugcacugc

SEQ ID NO: 484755 - RNA, 23 nt, Human
aaacaucccccagggccugaccc

SEQ ID NO: 484756 - RNA, 24 nt, Human
aaacccugcccuggcucucccagg

SEQ ID NO: 484757 - RNA, 19 nt, Human
aaacgguucuaucucagga

SEQ ID NO: 484758 - RNA, 24 nt, Human
aaagugcugggauuacaggcguga

SEQ ID NO: 484759 - RNA, 21 nt, Human
aacccugcccuggcucuccca

SEQ ID NO: 484760 - RNA, 23 nt, Human
aacucagccuccucaagggggca

SEQ ID NO: 484761 - RNA, 19 nt, Human
aaguagcuggggcuacagg

SEQ ID NO: 484762 - RNA, 19 nt, Human
aagugcugggauuacaggc

SEQ ID NO: 484763 - RNA, 19 nt, Human
aagugcugggauuacaggc

SEQ ID NO: 484764 - RNA, 18 nt, Human
acaggguuucaccauguu

SEQ ID NO: 484765 - RNA, 21 nt, Human
acaggguuucaccauguuggc

SEQ ID NO: 484766 - RNA, 24 nt, Human
acaggguuucaccauguuggccag

SEQ ID NO: 484767 - RNA, 26 nt, Human
acaucccccagggccugaccccacug

SEQ ID NO: 484768 - RNA, 18 nt, Human
accaagcccuggcgugca

SEQ ID NO: 484769 - RNA, 24 nt, Human
accauguuggccaggcuggucucg

SEQ ID NO: 484770 - RNA, 20 nt, Human
acugcaagcucugccucccg

SEQ ID NO: 484771 - RNA, 19 nt, Human
agacaagaggaaaacuuug

SEQ ID NO: 484772 - RNA, 19 nt, Human
agagcuggaggccaguggc

SEQ ID NO: 484773 - RNA, 18 nt, Human
agcugcccucgccccgcc

SEQ ID NO: 484774 - RNA, 18 nt, Human
aggaaaccccgaggccaa

SEQ ID NO: 484775 - RNA, 18 nt, Human
aggcccggccaaugaccu

SEQ ID NO: 484776 - RNA, 23 nt, Human
aggcgugagucacugcgcccggc

SEQ ID NO: 484777 - RNA, 22 nt, Human
aggcugcccaccauuggaaaca

SEQ ID NO: 484778 - RNA, 25 nt, Human
aggcuggagugcaguggcgccaucu

SEQ ID NO: 484779 - RNA, 18 nt, Human
agggagcggcugagucag

SEQ ID NO: 484780 - RNA, 21 nt, Human
agggcugcagcaccccccaca

SEQ ID NO: 484781 - RNA, 22 nt, Human
aguagagacaggguuucaccau

SEQ ID NO: 484782 - RNA, 21 nt, Human
agugcaguggcgccaucucag

SEQ ID NO: 484783 - RNA, 23 nt, Human
auccccgccucugcggacucccg

SEQ ID NO: 484784 - RNA, 25 nt, Human
caaaagacaaggcauggcugacucu

SEQ ID NO: 484785 - RNA, 24 nt, Human
caaagugcugggauuacaggcgug

SEQ ID NO: 484786 - RNA, 25 nt, Human
caacacagucccucauugaaccaaa

SEQ ID NO: 484787 - RNA, 21 nt, Human
caccauguuggccaggcuggu

SEQ ID NO: 484788 - RNA, 24 nt, Human
caccauguuggccaggcuggucuc

SEQ ID NO: 484789 - RNA, 27 nt, Human
caccauguuggccaggcuggucucgaa

SEQ ID NO: 484790 - RNA, 23 nt, Human
cacccagcucccuccagggccag

SEQ ID NO: 484791 - RNA, 23 nt, Human
cacugcaagcucugccucccggg

SEQ ID NO: 484792 - RNA, 21 nt, Human
cagcaccccccacaccugcug

SEQ ID NO: 484793 - RNA, 19 nt, Human
cagcccaagggagcggcug

SEQ ID NO: 484794 - RNA, 24 nt, Human
caggcagggaagcaccaagcccug

SEQ ID NO: 484795 - RNA, 21 nt, Human
caggcgcccgccaccacgccc

SEQ ID NO: 484796 - RNA, 24 nt, Human
caggguuucaccauguuggccagg

SEQ ID NO: 484797 - RNA, 23 nt, Human
cagguuacagcuggagaagaggg

SEQ ID NO: 484798 - RNA, 18 nt, Human
caugaaguccaccacggg

SEQ ID NO: 484799 - RNA, 24 nt, Human
cauguuggccaggcuggucucgaa

SEQ ID NO: 484800 - RNA, 20 nt, Human
ccaaagugcugggauuacag

SEQ ID NO: 484801 - RNA, 22 nt, Human
ccaaagugcugggauuacaggc

SEQ ID NO: 484802 - RNA, 22 nt, Human
ccaaagugcugggauuacaggc

SEQ ID NO: 484803 - RNA, 24 nt, Human
ccaaagugcugggauuacaggcgu

SEQ ID NO: 484804 - RNA, 19 nt, Human
ccagggccaggcagggaag

SEQ ID NO: 484805 - RNA, 19 nt, Human
ccaguggcccggccggggc

SEQ ID NO: 484806 - RNA, 19 nt, Human
ccagugucggcugggaggc

SEQ ID NO: 484807 - RNA, 22 nt, Human
ccagugucggcugggaggccug

SEQ ID NO: 484808 - RNA, 23 nt, Human
ccauuggaaacaucccccagggc

SEQ ID NO: 484809 - RNA, 23 nt, Human
cccaaguagcuggggcuacaggc

SEQ ID NO: 484810 - RNA, 19 nt, Human
cccagccccggcccucggc

SEQ ID NO: 484811 - RNA, 22 nt, Human
cccagccccggcccucggcccc

SEQ ID NO: 484812 - RNA, 22 nt, Human
cccaggcuggagugcaguggcg

SEQ ID NO: 484813 - RNA, 21 nt, Human
cccaguggcccggccggggcg

SEQ ID NO: 484814 - RNA, 20 nt, Human
ccccaccccgguggccccuc

SEQ ID NO: 484815 - RNA, 21 nt, Human
cccccagggccugaccccacu

SEQ ID NO: 484816 - RNA, 20 nt, Human
ccccgcccggcucggcuccc

SEQ ID NO: 484817 - RNA, 25 nt, Human
ccccugaagccaggccacccagcuc

SEQ ID NO: 484818 - RNA, 21 nt, Human
cccgccaccacgcccagcuaa

SEQ ID NO: 484819 - RNA, 23 nt, Human
cccgccucagccucccaaguagc

SEQ ID NO: 484820 - RNA, 18 nt, Human
ccgacccaggaaaccccg

SEQ ID NO: 484821 - RNA, 18 nt, Human
ccgccucugcggacuccc

SEQ ID NO: 484822 - RNA, 19 nt, Human
ccugaccucaagugauccg

SEQ ID NO: 484823 - RNA, 24 nt, Human
ccugaccucaagugauccgcccac

SEQ ID NO: 484824 - RNA, 18 nt, Human
ccuggccccacuauccac

SEQ ID NO: 484825 - RNA, 19 nt, Human
ccuggcuccugucuucccc

SEQ ID NO: 484826 - RNA, 21 nt, Human
ccuguggcccaguggcccggc

SEQ ID NO: 484827 - RNA, 24 nt, Human
cgccucagccucccaaguagcugg

SEQ ID NO: 484828 - RNA, 25 nt, Human
cgcucccagccccggcccucggccc

SEQ ID NO: 484829 - RNA, 20 nt, Human
cggcagccuugcaaaauguc

SEQ ID NO: 484830 - RNA, 22 nt, Human
cggcugagucagccuuagaggc

SEQ ID NO: 484831 - RNA, 21 nt, Human
cggggccugagccagagcccc

SEQ ID NO: 484832 - RNA, 24 nt, Human
cgggggucggggagggguccuuuc

SEQ ID NO: 484833 - RNA, 21 nt, Human
cuaggccucccaaagugcugg

SEQ ID NO: 484834 - RNA, 24 nt, Human
cucaaauaacucagccuccucaag

SEQ ID NO: 484835 - RNA, 24 nt, Human
cucaagugauccgcccaccuaggc

SEQ ID NO: 484836 - RNA, 24 nt, Human
cucacugcaagcucugccucccgg

SEQ ID NO: 484837 - RNA, 22 nt, Human
cucagccucccaaguagcuggg

SEQ ID NO: 484838 - RNA, 23 nt, Human
cucccagccccggcccucggccc

SEQ ID NO: 484839 - RNA, 22 nt, Human
cucccaggucugccagccacgc

SEQ ID NO: 484840 - RNA, 24 nt, Human
cucccgcucggacugcguggccgc

SEQ ID NO: 484841 - RNA, 20 nt, Human
cucugucgcccaggcuggag

SEQ ID NO: 484842 - RNA, 21 nt, Human
cugcacccacucaaacgccga

SEQ ID NO: 484843 - RNA, 19 nt, Human
cugcagcaccccccacacc

SEQ ID NO: 484844 - RNA, 21 nt, Human
cugcaucugacaaauccccgc

SEQ ID NO: 484845 - RNA, 20 nt, Human
cuggcgugcaccugcaccca

SEQ ID NO: 484846 - RNA, 22 nt, Human
cuguauuuuuuuaguagagaca

SEQ ID NO: 484847 - RNA, 22 nt, Human
gaccucaagugauccgcccacc

SEQ ID NO: 484848 - RNA, 19 nt, Human
gacugcguggccgcguggc

SEQ ID NO: 484849 - RNA, 18 nt, Human
gagccccuccuggcccag

SEQ ID NO: 484850 - RNA, 26 nt, Human
gagcuggaggccaguggcugcggggg

SEQ ID NO: 484851 - RNA, 23 nt, Human
gaggccuggaggggucuugccuc

SEQ ID NO: 484852 - RNA, 18 nt, Human
gauuacaggcgugaguca

SEQ ID NO: 484853 - RNA, 22 nt, Human
gauuacaggcgugagucacugc

SEQ ID NO: 484854 - RNA, 22 nt, Human
gauuacaggcgugagucacugc

SEQ ID NO: 484855 - RNA, 18 nt, Human
gcagcucagggcagcugg

SEQ ID NO: 484856 - RNA, 18 nt, Human
gcaugugcggcccgagag

SEQ ID NO: 484857 - RNA, 19 nt, Human
gcccaggcuggagugcagu

SEQ ID NO: 484858 - RNA, 20 nt, Human
gcccaggcuggagugcagug

SEQ ID NO: 484859 - RNA, 22 nt, Human
gccccgcccggcucggcucccg

SEQ ID NO: 484860 - RNA, 21 nt, Human
gccgggucugagacucccccg

SEQ ID NO: 484861 - RNA, 18 nt, Human
gccuaggcaggaaguccc

SEQ ID NO: 484862 - RNA, 19 nt, Human
gcgugcaccugcacccacu

SEQ ID NO: 484863 - RNA, 25 nt, Human
gcucugucgcccaggcuggagugca

SEQ ID NO: 484864 - RNA, 19 nt, Human
gcucuuagcaacacagucc

SEQ ID NO: 484865 - RNA, 22 nt, Human
gcugcagcaccccccacaccug

SEQ ID NO: 484866 - RNA, 20 nt, Human
gcuggagugcaguggcgcca

SEQ ID NO: 484867 - RNA, 18 nt, Human
gcugggaggccuggaggg

SEQ ID NO: 484868 - RNA, 20 nt, Human
gcugggaggccuggaggggu

SEQ ID NO: 484869 - RNA, 23 nt, Human
gcuggucucgaacuccugaccuc

SEQ ID NO: 484870 - RNA, 24 nt, Human
ggacucccgggcacagggccgcuc

SEQ ID NO: 484871 - RNA, 19 nt, Human
ggagaagaggggaaaggug

SEQ ID NO: 484872 - RNA, 18 nt, Human
ggagccccuccuggccca

SEQ ID NO: 484873 - RNA, 22 nt, Human
ggaggccaguggcugcgggggu

SEQ ID NO: 484874 - RNA, 20 nt, Human
ggccccuggccccacuaucc

SEQ ID NO: 484875 - RNA, 24 nt, Human
ggccccuggccccacuauccacag

SEQ ID NO: 484876 - RNA, 24 nt, Human
ggcuggucucgaacuccugaccuc

SEQ ID NO: 484877 - RNA, 21 nt, Human
gggcacagggccgcucccagc

SEQ ID NO: 484878 - RNA, 22 nt, Human
ggguuucaccauguuggccagg

SEQ ID NO: 484879 - RNA, 19 nt, Human
ggucucgaacuccugaccu

SEQ ID NO: 484880 - RNA, 23 nt, Human
ggucuugccucccuuguagucac

SEQ ID NO: 484881 - RNA, 23 nt, Human
guccuggcuccugucuuccccug

SEQ ID NO: 484882 - RNA, 19 nt, Human
gugcaccugcacccacuca

SEQ ID NO: 484883 - RNA, 26 nt, Human
uaauuuucuguauuuuuuuaguagag

SEQ ID NO: 484884 - RNA, 18 nt, Human
uacaagcagcucagggca

SEQ ID NO: 484885 - RNA, 24 nt, Human
uacaggcgcccgccaccacgccca

SEQ ID NO: 484886 - RNA, 19 nt, Human
uacaggcgugagucacugc

SEQ ID NO: 484887 - RNA, 22 nt, Human
uagagacaggguuucaccaugu

SEQ ID NO: 484888 - RNA, 20 nt, Human
uagaggccauucuguggccg

SEQ ID NO: 484889 - RNA, 24 nt, Human
uaguagagacaggguuucaccaug

SEQ ID NO: 484890 - RNA, 26 nt, Human
uaguagagacaggguuucaccauguu

SEQ ID NO: 484891 - RNA, 18 nt, Human
ucacugcaagcucugccu

SEQ ID NO: 484892 - RNA, 18 nt, Human
ucacugcaagcucugccu

SEQ ID NO: 484893 - RNA, 24 nt, Human
ucacugcaagcucugccucccggg

SEQ ID NO: 484894 - RNA, 26 nt, Human
ucagcacccaugaaguccaccacggg

SEQ ID NO: 484895 - RNA, 18 nt, Human
ucagccucccaaguagcu

SEQ ID NO: 484896 - RNA, 20 nt, Human
ucagccucccaaguagcugg

SEQ ID NO: 484897 - RNA, 23 nt, Human
ucagccucccaaguagcuggggc

SEQ ID NO: 484898 - RNA, 19 nt, Human
uccacaggccaggcccggc

SEQ ID NO: 484899 - RNA, 24 nt, Human
ucccaaagugcugggauuacaggc

SEQ ID NO: 484900 - RNA, 24 nt, Human
ucccaaguagcuggggcuacaggc

SEQ ID NO: 484901 - RNA, 22 nt, Human
ucccagccccggcccucggccc

SEQ ID NO: 484902 - RNA, 19 nt, Human
ucccccagggccugacccc

SEQ ID NO: 484903 - RNA, 18 nt, Human
uccccgacccaggaaacc

SEQ ID NO: 484904 - RNA, 19 nt, Human
uccccgacccaggaaaccc

SEQ ID NO: 484905 - RNA, 22 nt, Human
uccccgacccaggaaaccccga

SEQ ID NO: 484906 - RNA, 22 nt, Human
uccugcugccacagcccaaggg

SEQ ID NO: 484907 - RNA, 22 nt, Human
ucgcccaggcuggagugcagug

SEQ ID NO: 484908 - RNA, 26 nt, Human
ucucccgccucagccucccaaguagc

SEQ ID NO: 484909 - RNA, 21 nt, Human
ucucgaacuccugaccucaag

SEQ ID NO: 484910 - RNA, 22 nt, Human
ucugaguccguguggccagggc

SEQ ID NO: 484911 - RNA, 19 nt, Human
ucuggcucugucgcccagg

SEQ ID NO: 484912 - RNA, 23 nt, Human
ucuggcucugucgcccaggcugg

SEQ ID NO: 484913 - RNA, 24 nt, Human
ucuggcucugucgcccaggcugga

SEQ ID NO: 484914 - RNA, 24 nt, Human
ucugucgcccaggcuggagugcag

SEQ ID NO: 484915 - RNA, 22 nt, Human
ucuguggccgagagcuggaggc

SEQ ID NO: 484916 - RNA, 22 nt, Human
ucuugaacuacccggcagccuu

SEQ ID NO: 484917 - RNA, 21 nt, Human
ugaagccaggccacccagcuc

SEQ ID NO: 484918 - RNA, 24 nt, Human
ugaaguccaccacgggucucuggg

SEQ ID NO: 484919 - RNA, 18 nt, Human
ugaccucaagugauccgc

SEQ ID NO: 484920 - RNA, 25 nt, Human
ugagccagagcccccgccuccugcu

SEQ ID NO: 484921 - RNA, 24 nt, Human
ugauccgcccaccuaggccuccca

SEQ ID NO: 484922 - RNA, 19 nt, Human
ugcagcaccccccacaccu

SEQ ID NO: 484923 - RNA, 22 nt, Human
ugcaguggcgccaucucagcuc

SEQ ID NO: 484924 - RNA, 24 nt, Human
ugcccccaacgcucuuagcaacac

SEQ ID NO: 484925 - RNA, 21 nt, Human
ugcccucgccccgcccggcuc

SEQ ID NO: 484926 - RNA, 21 nt, Human
ugcccuggcucucccaggucu

SEQ ID NO: 484927 - RNA, 27 nt, Human
ugcccuggcucucccaggucugccagc

SEQ ID NO: 484928 - RNA, 21 nt, Human
ugccgggucugagacuccccc

SEQ ID NO: 484929 - RNA, 19 nt, Human
ugccucccggguucacgcc

SEQ ID NO: 484930 - RNA, 24 nt, Human
ugcgcccggccccagugacuauuc

SEQ ID NO: 484931 - RNA, 24 nt, Human
ugcugggauuacaggcgugaguca

SEQ ID NO: 484932 - RNA, 18 nt, Human
uggagugcaguggcgcca

SEQ ID NO: 484933 - RNA, 28 nt, Human
uggagugcaguggcgccauccuagcacg

SEQ ID NO: 484934 - RNA, 23 nt, Human
uggagugcaguggcgccaucuca

SEQ ID NO: 484935 - RNA, 28 nt, Human
uggagugcaguggcgccauggcucuagc

SEQ ID NO: 484936 - RNA, 24 nt, Human
uggccaggcuggucucgaacuccu

SEQ ID NO: 484937 - RNA, 21 nt, Human
uggcccaggacugaugggcag

SEQ ID NO: 484938 - RNA, 20 nt, Human
uggccgagagcuggaggcca

SEQ ID NO: 484939 - RNA, 22 nt, Human
uggccugggccggccccuggcc

SEQ ID NO: 484940 - RNA, 24 nt, Human
uggcgccaucucagcucacugcaa

SEQ ID NO: 484941 - RNA, 24 nt, Human
uggcucugucgcccaggcuggagu

SEQ ID NO: 484942 - RNA, 24 nt, Human
uggcugcgggggucggggaggggu

SEQ ID NO: 484943 - RNA, 18 nt, Human
ugggauuacaggcgugag

SEQ ID NO: 484944 - RNA, 18 nt, Human
ugggauuacaggcgugag

SEQ ID NO: 484945 - RNA, 21 nt, Human
ugggauuacaggcgugaguca

SEQ ID NO: 484946 - RNA, 22 nt, Human
ugggauuacaggcgugagucac

SEQ ID NO: 484947 - RNA, 22 nt, Human
ugggauuacaggcgugagucac

SEQ ID NO: 484948 - RNA, 24 nt, Human
ugggauuacaggcgugagucacug

SEQ ID NO: 484949 - RNA, 22 nt, Human
uggggcaauccuucucugaacg

SEQ ID NO: 484950 - RNA, 21 nt, Human
uggggcuacaggcgcccgcca

SEQ ID NO: 484951 - RNA, 22 nt, Human
uggggcuacaggcgcccgccac

SEQ ID NO: 484952 - RNA, 24 nt, Human
uggggcuacaggcgcccgccacca

SEQ ID NO: 484953 - RNA, 21 nt, Human
uggugcugcggcgugcaugug

SEQ ID NO: 484954 - RNA, 19 nt, Human
uggugggacccagugucgg

SEQ ID NO: 484955 - RNA, 21 nt, Human
ugucacacgggccacucagca

SEQ ID NO: 484956 - RNA, 20 nt, Human
uguggugggacccagugucg

SEQ ID NO: 484957 - RNA, 21 nt, Human
uguguguggugggacccagug

SEQ ID NO: 484958 - RNA, 19 nt, Human
uuaagacaagaggaaaacu

SEQ ID NO: 484959 - RNA, 24 nt, Human
uuaguagagacaggguuucaccau

SEQ ID NO: 484960 - RNA, 24 nt, Human
uucacgccauugccauucucccgc

SEQ ID NO: 484961 - RNA, 22 nt, Human
uucuguggccgagagcuggagg

SEQ ID NO: 484962 - RNA, 24 nt, Human
uuucaccauguuggccaggcuggu

SEQ ID NO: 484963 - RNA, 23 nt, Human
uuucuguauuuuuuuaguagaga

SEQ ID NO: 484964 - RNA, 22 nt, Human
uuugcagcagcccucaaauaac

SEQ ID NO: 484965 - RNA, 24 nt, Human
uuugcccccaacgcucuuagcaac

SEQ ID NO: 484966 - RNA, 24 nt, Human
uuuuuaguagagacaggguuucac

SEQ ID NO: 484967 - RNA, 23 nt, Human
uuuuuuaguagagacaggguuuc

SEQ ID NO: 484968 - RNA, 18 nt, Human
cacguucagccucccauc

SEQ ID NO: 484969 - RNA, 24 nt, Human
ucuauaauuuacauuaauaacuca

SEQ ID NO: 484970 - RNA, 25 nt, Human
ucuauaauuuacauuaauaacucau

SEQ ID NO: 484971 - RNA, 22 nt, Human
uugagugguuuuaauccucuuc

SEQ ID NO: 484972 - RNA, 18 nt, Human
acccccuuccagcccuug

SEQ ID NO: 484973 - RNA, 21 nt, Human
agcacaucugggugcccuggc

SEQ ID NO: 484974 - RNA, 21 nt, Human
cgggaaggaccggugcggcug

SEQ ID NO: 484975 - RNA, 21 nt, Human
gggagccucgcgugugccggg

SEQ ID NO: 484976 - RNA, 24 nt, Human
gguuucacaacccccuuccagccc

SEQ ID NO: 484977 - RNA, 21 nt, Human
ucacaacccccuuccagcccu

SEQ ID NO: 484978 - RNA, 23 nt, Human
ugccgggaaggaccggugcggcu

SEQ ID NO: 484979 - RNA, 18 nt, Human
uuuuuuuuuugacagacc

SEQ ID NO: 484980 - RNA, 24 nt, Human
uuuuuuuuuuugacagaccaggcu

SEQ ID NO: 484981 - RNA, 22 nt, Human
uuuuuuuuuuuuuuuuugacag

SEQ ID NO: 484982 - RNA, 20 nt, Human
uuuuuuuuuuuuuuuuuugg

SEQ ID NO: 484983 - RNA, 23 nt, Human
aaacaaaacaacaacaacaacaa

SEQ ID NO: 484984 - RNA, 24 nt, Human
aacaaaacaacaacaacaacaaaa

SEQ ID NO: 484985 - RNA, 20 nt, Human
aagaagagcaacacuugcca

SEQ ID NO: 484986 - RNA, 19 nt, Human
aagcagccgaggauacuaa

SEQ ID NO: 484987 - RNA, 19 nt, Human
aagcagccgaggauacuaa

SEQ ID NO: 484988 - RNA, 24 nt, Human
aaugggggaggcgaguuuauuuuu

SEQ ID NO: 484989 - RNA, 18 nt, Human
acaaaacaacaacaacaa

SEQ ID NO: 484990 - RNA, 21 nt, Human
acaaaacaacaacaacaacaa

SEQ ID NO: 484991 - RNA, 23 nt, Human
acaacaacaacaacaaaacuuua

SEQ ID NO: 484992 - RNA, 19 nt, Human
accccgccccccaccccca

SEQ ID NO: 484993 - RNA, 22 nt, Human
accuuccccauccaaaacaaaa

SEQ ID NO: 484994 - RNA, 18 nt, Human
aggcagaaggauuccaga

SEQ ID NO: 484995 - RNA, 23 nt, Human
caaaacaaaacaacaacaacaac

SEQ ID NO: 484996 - RNA, 22 nt, Human
caaaacaacaacaacaacaaaa

SEQ ID NO: 484997 - RNA, 24 nt, Human
caacaacaaaacuuuaccccuuuc

SEQ ID NO: 484998 - RNA, 21 nt, Human
caacaacaacaaaacuuuacc

SEQ ID NO: 484999 - RNA, 22 nt, Human
caacaacaacaaaacuuuaccc

SEQ ID NO: 485000 - RNA, 26 nt, Human
caacaacaacaacaaaacuuuacccc

SEQ ID NO: 485001 - RNA, 21 nt, Human
caccccgccccccacccccag

SEQ ID NO: 485002 - RNA, 19 nt, Human
caccucuuccucgcacucc

SEQ ID NO: 485003 - RNA, 18 nt, Human
cacguccgccgccgccgc

SEQ ID NO: 485004 - RNA, 19 nt, Human
cacguccgccgccgccgcu

SEQ ID NO: 485005 - RNA, 21 nt, Human
cacguccgccgccgccgcucu

SEQ ID NO: 485006 - RNA, 20 nt, Human
cagccgccccccccguccca

SEQ ID NO: 485007 - RNA, 21 nt, Human
cagccgccccccccgucccag

SEQ ID NO: 485008 - RNA, 19 nt, Human
cagccucuuucucacuccc

SEQ ID NO: 485009 - RNA, 21 nt, Human
cauccaaaacaaaacaacaac

SEQ ID NO: 485010 - RNA, 20 nt, Human
ccagucccgcuccgaagccc

SEQ ID NO: 485011 - RNA, 22 nt, Human
cccagggcugcucgcgccagcc

SEQ ID NO: 485012 - RNA, 26 nt, Human
cccauccaaaacaaaacaacaacaac

SEQ ID NO: 485013 - RNA, 19 nt, Human
ccccagggcugcucgcgcc

SEQ ID NO: 485014 - RNA, 22 nt, Human
ccccccccgucccagucccgcu

SEQ ID NO: 485015 - RNA, 27 nt, Human
ccccccgucccagucccgcuccgaagc

SEQ ID NO: 485016 - RNA, 20 nt, Human
ccccgccccccacccccagg

SEQ ID NO: 485017 - RNA, 19 nt, Human
ccccuccgcgcuguguucc

SEQ ID NO: 485018 - RNA, 19 nt, Human
ccccuuccugccuucgccc

SEQ ID NO: 485019 - RNA, 18 nt, Human
cccggagccccucccggg

SEQ ID NO: 485020 - RNA, 18 nt, Human
ccgcacccgcgguuccgc

SEQ ID NO: 485021 - RNA, 23 nt, Human
ccgcgcuguguucccggagcccc

SEQ ID NO: 485022 - RNA, 18 nt, Human
ccgcggcugcccagccgc

SEQ ID NO: 485023 - RNA, 21 nt, Human
ccgugcgcacguccgccgccu

SEQ ID NO: 485024 - RNA, 23 nt, Human
ccucaggggugccgcggcugccc

SEQ ID NO: 485025 - RNA, 18 nt, Human
ccuccugcccgcacccgc

SEQ ID NO: 485026 - RNA, 22 nt, Human
ccuuccugccuucgcccucucc

SEQ ID NO: 485027 - RNA, 25 nt, Human
cgaggauacuaaguaucuucagcua

SEQ ID NO: 485028 - RNA, 20 nt, Human
cgccgccuccugcccgcacc

SEQ ID NO: 485029 - RNA, 24 nt, Human
cggcccaccccgccccccaccccc

SEQ ID NO: 485030 - RNA, 20 nt, Human
cggucccgcugcugccgccg

SEQ ID NO: 485031 - RNA, 23 nt, Human
cuccccuuccugccuucgcccuc

SEQ ID NO: 485032 - RNA, 27 nt, Human
cucggucccgcugcugccgccgccucc

SEQ ID NO: 485033 - RNA, 22 nt, Human
cuuucucacuccccuuccugcc

SEQ ID NO: 485034 - RNA, 19 nt, Human
gaggauacuaaguaucuuc

SEQ ID NO: 485035 - RNA, 21 nt, Human
gcagccgaggauacuaaguau

SEQ ID NO: 485036 - RNA, 23 nt, Human
gccagccgccccccccgucccag

SEQ ID NO: 485037 - RNA, 22 nt, Human
gcccaccccgccccccaccccc

SEQ ID NO: 485038 - RNA, 20 nt, Human
gccggcccaccccgcccccc

SEQ ID NO: 485039 - RNA, 24 nt, Human
gcuccgaagcccccuccucagcuc

SEQ ID NO: 485040 - RNA, 20 nt, Human
gcucgcgccagccgcccccc

SEQ ID NO: 485041 - RNA, 18 nt, Human
gcugcuuucucgcccucu

SEQ ID NO: 485042 - RNA, 24 nt, Human
ggcuagggagaaagauuucagauu

SEQ ID NO: 485043 - RNA, 20 nt, Human
ggguguguaauauaucagau

SEQ ID NO: 485044 - RNA, 21 nt, Human
guccgccgccgccgcucugga

SEQ ID NO: 485045 - RNA, 22 nt, Human
uaaggugaguccuuucucugcu

SEQ ID NO: 485046 - RNA, 19 nt, Human
uccaaaacaaaacaacaac

SEQ ID NO: 485047 - RNA, 20 nt, Human
uccaaacucgaaaaaaaaag

SEQ ID NO: 485048 - RNA, 22 nt, Human
uccaaacucgaaaaaaaaaggu

SEQ ID NO: 485049 - RNA, 20 nt, Human
ucccacagcuggcgcgcacc

SEQ ID NO: 485050 - RNA, 21 nt, Human
uccccauccaaaacaaaacaa

SEQ ID NO: 485051 - RNA, 23 nt, Human
uccccauccaaaacaaaacaaca

SEQ ID NO: 485052 - RNA, 19 nt, Human
ucccgcugcugccgccgcc

SEQ ID NO: 485053 - RNA, 23 nt, Human
ucccgcugcugccgccgccuccu

SEQ ID NO: 485054 - RNA, 23 nt, Human
ucccgcugcugccgccgccuccu

SEQ ID NO: 485055 - RNA, 20 nt, Human
ucccgggccucaggggugcc

SEQ ID NO: 485056 - RNA, 22 nt, Human
uccgaagcccccuccucagcuc

SEQ ID NO: 485057 - RNA, 21 nt, Human
uccgcgcuguguucccggagc

SEQ ID NO: 485058 - RNA, 18 nt, Human
ucgcgccagccgcccccc

SEQ ID NO: 485059 - RNA, 22 nt, Human
ugccgccgccuccugcccgcac

SEQ ID NO: 485060 - RNA, 22 nt, Human
ugccgcggcugcccagccgcac

SEQ ID NO: 485061 - RNA, 22 nt, Human
ugcucgcgccagccgccccccc

SEQ ID NO: 485062 - RNA, 18 nt, Human
uuacugcaacuggaaugg

SEQ ID NO: 485063 - RNA, 23 nt, Human
uuacugcaacuggaaugggggag

SEQ ID NO: 485064 - RNA, 24 nt, Human
uucgcccucucccugccucccuuc

SEQ ID NO: 485065 - RNA, 21 nt, Human
uuucucgcccucuuaauuuca

SEQ ID NO: 485066 - RNA, 19 nt, Human
uuuuuuuuuaaaccaguca

SEQ ID NO: 485067 - RNA, 21 nt, Human
uuuuuuuuuuuuaaaccaguc

SEQ ID NO: 485068 - RNA, 18 nt, Human
aaaccaauaaaagacauc

SEQ ID NO: 485069 - RNA, 18 nt, Human
agaaaccaauaaaagaca

SEQ ID NO: 485070 - RNA, 27 nt, Human
auauacugaaacagacacacacaaaua

SEQ ID NO: 485071 - RNA, 24 nt, Human
auccacccaugagaaaccaauaaa

SEQ ID NO: 485072 - RNA, 19 nt, Human
caccuggaugaacaucaug

SEQ ID NO: 485073 - RNA, 24 nt, Human
ccaaugaugaaaaaaugaucuucc

SEQ ID NO: 485074 - RNA, 18 nt, Human
cccaugagaaaccaauaa

SEQ ID NO: 485075 - RNA, 20 nt, Human
cuuagaauccauauccaccc

SEQ ID NO: 485076 - RNA, 22 nt, Human
cuuccaauaacucaggaguggg

SEQ ID NO: 485077 - RNA, 20 nt, Human
gacacacacaaauaaucugu

SEQ ID NO: 485078 - RNA, 22 nt, Human
ggucaucccucaccuggaugaa

SEQ ID NO: 485079 - RNA, 21 nt, Human
uaacucaggagugggucaucc

SEQ ID NO: 485080 - RNA, 22 nt, Human
uagaauccauauccacccauga

SEQ ID NO: 485081 - RNA, 23 nt, Human
ucagacaggcuagaauccuuaga

SEQ ID NO: 485082 - RNA, 24 nt, Human
uccauauccacccaugagaaacca

SEQ ID NO: 485083 - RNA, 24 nt, Human
ugagaaaccaauaaaagacaucaa

SEQ ID NO: 485084 - RNA, 23 nt, Human
ugugaaauuuuguauugguucag

SEQ ID NO: 485085 - RNA, 19 nt, Human
aaagcucaaaguaaacggc

SEQ ID NO: 485086 - RNA, 18 nt, Human
aacuugugcugucaguga

SEQ ID NO: 485087 - RNA, 23 nt, Human
aagguugccuugaaacacuuauc

SEQ ID NO: 485088 - RNA, 25 nt, Human
aagucuagacaauaucaagaacuga

SEQ ID NO: 485089 - RNA, 21 nt, Human
acaaaaacugacaauguagua

SEQ ID NO: 485090 - RNA, 20 nt, Human
acacagaaaucuaacacaug

SEQ ID NO: 485091 - RNA, 23 nt, Human
acacuuauccccuuuccccucca

SEQ ID NO: 485092 - RNA, 19 nt, Human
acagaaaucuaacacaugc

SEQ ID NO: 485093 - RNA, 22 nt, Human
acaggcuuaguccuuugugggg

SEQ ID NO: 485094 - RNA, 25 nt, Human
acugucuuaccuccucuaccacccu

SEQ ID NO: 485095 - RNA, 21 nt, Human
acuucauuacuggaaaagaaa

SEQ ID NO: 485096 - RNA, 22 nt, Human
agaacuccuucccuucccacuu

SEQ ID NO: 485097 - RNA, 20 nt, Human
agacaaaaacugacaaugua

SEQ ID NO: 485098 - RNA, 19 nt, Human
agacaauaucaagaacuga

SEQ ID NO: 485099 - RNA, 21 nt, Human
agaccacccgggccccgaaga

SEQ ID NO: 485100 - RNA, 24 nt, Human
agccagguuccucuggcaguccca

SEQ ID NO: 485101 - RNA, 23 nt, Human
aggauuucuuaaaaaauuguuuu

SEQ ID NO: 485102 - RNA, 21 nt, Human
aggcuuaguccuuugugggaa

SEQ ID NO: 485103 - RNA, 18 nt, Human
aguccuuugugggaacag

SEQ ID NO: 485104 - RNA, 21 nt, Human
auaauacaccaguaauagcca

SEQ ID NO: 485105 - RNA, 18 nt, Human
auccccuuuccccuccac

SEQ ID NO: 485106 - RNA, 20 nt, Human
auccccuuuccccuccacug

SEQ ID NO: 485107 - RNA, 22 nt, Human
aucucccuuucuccccucccca

SEQ ID NO: 485108 - RNA, 20 nt, Human
auggugccaaugacauuuuu

SEQ ID NO: 485109 - RNA, 23 nt, Human
caaaaacuacacacaugcuacgc

SEQ ID NO: 485110 - RNA, 24 nt, Human
caaaucauuaguugucuguucuuu

SEQ ID NO: 485111 - RNA, 21 nt, Human
caagccucaagccuguccccu

SEQ ID NO: 485112 - RNA, 24 nt, Human
caauaaguuuaggcagggaacacc

SEQ ID NO: 485113 - RNA, 23 nt, Human
caccaguaauagccaaaaacuac

SEQ ID NO: 485114 - RNA, 19 nt, Human
cacccgggccccgaagagc

SEQ ID NO: 485115 - RNA, 22 nt, Human
cacugggaugggugugcaaacu

SEQ ID NO: 485116 - RNA, 24 nt, Human
cagcuuucugguguaaagggugac

SEQ ID NO: 485117 - RNA, 21 nt, Human
cagcuuuuaaacagucucuca

SEQ ID NO: 485118 - RNA, 20 nt, Human
cagucagaugugacaggggc

SEQ ID NO: 485119 - RNA, 19 nt, Human
cauuacuggaaaagaaagg

SEQ ID NO: 485120 - RNA, 21 nt, Human
cauuuaaacaaaguuuacaca

SEQ ID NO: 485121 - RNA, 22 nt, Human
ccacccucuuccucuuccuaac

SEQ ID NO: 485122 - RNA, 20 nt, Human
ccaguaauagccaaaaacua

SEQ ID NO: 485123 - RNA, 19 nt, Human
cccaauaugaaaguuuaau

SEQ ID NO: 485124 - RNA, 21 nt, Human
ccccgaagagcgccucgugcc

SEQ ID NO: 485125 - RNA, 20 nt, Human
ccccuuuccccuccacuggg

SEQ ID NO: 485126 - RNA, 21 nt, Human
ccccuuuccccuccacuggga

SEQ ID NO: 485127 - RNA, 24 nt, Human
cccuccccaucccucccuccccca

SEQ ID NO: 485128 - RNA, 25 nt, Human
cccuccccaucccucccucccccaa

SEQ ID NO: 485129 - RNA, 21 nt, Human
cccuucccacuugaaacccac

SEQ ID NO: 485130 - RNA, 18 nt, Human
cccuuucuccccucccca

SEQ ID NO: 485131 - RNA, 22 nt, Human
cccuuucuccccuccccauccc

SEQ ID NO: 485132 - RNA, 24 nt, Human
ccguaguccugcaaagccagguuc

SEQ ID NO: 485133 - RNA, 20 nt, Human
ccuccucuaccacccucuuc

SEQ ID NO: 485134 - RNA, 21 nt, Human
ccugcaaagccagguuccucu

SEQ ID NO: 485135 - RNA, 22 nt, Human
ccuuccgcccuaucccgcagcc

SEQ ID NO: 485136 - RNA, 25 nt, Human
cuaacacaugccuaaaagaauuuua

SEQ ID NO: 485137 - RNA, 19 nt, Human
cucacgccuauccaagccu

SEQ ID NO: 485138 - RNA, 19 nt, Human
cuccccaucccucccuccc

SEQ ID NO: 485139 - RNA, 24 nt, Human
cucccuuucuccccuccccauccc

SEQ ID NO: 485140 - RNA, 23 nt, Human
cucucccacacacccaauucugc

SEQ ID NO: 485141 - RNA, 20 nt, Human
cuuuuaaacagucucucaca

SEQ ID NO: 485142 - RNA, 19 nt, Human
gcagggcacagaaacuaua

SEQ ID NO: 485143 - RNA, 24 nt, Human
gcccugggcccucuuccaauucac

SEQ ID NO: 485144 - RNA, 20 nt, Human
gcuuguacuguauacucucc

SEQ ID NO: 485145 - RNA, 22 nt, Human
ggcccugggcccucuuccaauu

SEQ ID NO: 485146 - RNA, 22 nt, Human
gggaacaccuuggcuuauaggu

SEQ ID NO: 485147 - RNA, 20 nt, Human
gucagugacugaacccugcc

SEQ ID NO: 485148 - RNA, 20 nt, Human
gucuguucuuuuccauugcu

SEQ ID NO: 485149 - RNA, 23 nt, Human
uaaaaaugcagaguuaacacuau

SEQ ID NO: 485150 - RNA, 24 nt, Human
uaacacuauugggaagaaggcugu

SEQ ID NO: 485151 - RNA, 23 nt, Human
uaacuuaugaacaggcuuagucc

SEQ ID NO: 485152 - RNA, 25 nt, Human
uaacuuaugaacaggcuuaguccuu

SEQ ID NO: 485153 - RNA, 25 nt, Human
uaauagccaaaaacuacacacaugc

SEQ ID NO: 485154 - RNA, 20 nt, Human
uagcaccucuaaggcagaau

SEQ ID NO: 485155 - RNA, 24 nt, Human
uagccaaaaacuacacacaugcua

SEQ ID NO: 485156 - RNA, 23 nt, Human
uagguuucagacuuucacagcuu

SEQ ID NO: 485157 - RNA, 21 nt, Human
ucaggccccaaauguuaauca

SEQ ID NO: 485158 - RNA, 21 nt, Human
ucauagaaggcccuuugcuuu

SEQ ID NO: 485159 - RNA, 20 nt, Human
uccaucuccaaaauggcaac

SEQ ID NO: 485160 - RNA, 22 nt, Human
ucccacacacccaauucugcaa

SEQ ID NO: 485161 - RNA, 19 nt, Human
ucccccaaauaauacacca

SEQ ID NO: 485162 - RNA, 22 nt, Human
uccccuuuccccuccacuggga

SEQ ID NO: 485163 - RNA, 20 nt, Human
uccgcccuaucccgcagccg

SEQ ID NO: 485164 - RNA, 20 nt, Human
uccuccguaguccugcaaag

SEQ ID NO: 485165 - RNA, 22 nt, Human
ucguaugcgccuccucacgccu

SEQ ID NO: 485166 - RNA, 21 nt, Human
ucucccuuucuccccucccca

SEQ ID NO: 485167 - RNA, 18 nt, Human
ucuguucuuuuccauugc

SEQ ID NO: 485168 - RNA, 19 nt, Human
ucuguucuuuuccauugcu

SEQ ID NO: 485169 - RNA, 22 nt, Human
ucuuaccuccucuaccacccuc

SEQ ID NO: 485170 - RNA, 22 nt, Human
ugaaccacugcccaauaugaaa

SEQ ID NO: 485171 - RNA, 21 nt, Human
ugacaggggcugguacucagg

SEQ ID NO: 485172 - RNA, 23 nt, Human
ugacucaagacagagcauuuugg

SEQ ID NO: 485173 - RNA, 18 nt, Human
ugagaccaaggcuuuuga

SEQ ID NO: 485174 - RNA, 19 nt, Human
ugagaccaaggcuuuugaa

SEQ ID NO: 485175 - RNA, 20 nt, Human
ugaugcuacccaucucccuu

SEQ ID NO: 485176 - RNA, 21 nt, Human
ugucaagacaaguagaacucc

SEQ ID NO: 485177 - RNA, 24 nt, Human
ugucuguucuuuuccauugcuuca

SEQ ID NO: 485178 - RNA, 18 nt, Human
ugucuuaccuccucuacc

SEQ ID NO: 485179 - RNA, 22 nt, Human
uguggguuguggagaugcucuu

SEQ ID NO: 485180 - RNA, 18 nt, Human
uguguguguaugugugug

SEQ ID NO: 485181 - RNA, 19 nt, Human
uguguguguaugugugugu

SEQ ID NO: 485182 - RNA, 22 nt, Human
uguuccagaccacccgggcccc

SEQ ID NO: 485183 - RNA, 24 nt, Human
uuacauuuaaacaaaguuuacaca

SEQ ID NO: 485184 - RNA, 24 nt, Human
uucagugaaacuugugcugucagu

SEQ ID NO: 485185 - RNA, 24 nt, Human
uuggaucaauucagugaaacuugu

SEQ ID NO: 485186 - RNA, 18 nt, Human
uugucuuucccuacuguc

SEQ ID NO: 485187 - RNA, 23 nt, Human
uugugcggcccugggcccucuuc

SEQ ID NO: 485188 - RNA, 23 nt, Human
uuuccccuaucaggccccaaaug

SEQ ID NO: 485189 - RNA, 18 nt, Human
uuuguguguguaugugug

SEQ ID NO: 485190 - RNA, 22 nt, Human
uuuuccauugcuucaccauuuc

SEQ ID NO: 485191 - RNA, 23 nt, Human
aaaaaacccccaacaacucuucc

SEQ ID NO: 485192 - RNA, 21 nt, Human
aaaaacccccaacaacucuuc

SEQ ID NO: 485193 - RNA, 18 nt, Human
aaacucaagauugagccu

SEQ ID NO: 485194 - RNA, 26 nt, Human
aaacugccaacaccucuaaccaucug

SEQ ID NO: 485195 - RNA, 18 nt, Human
aaaggaagcaacuacaga

SEQ ID NO: 485196 - RNA, 24 nt, Human
aaauauauauaaaagaacaaugug

SEQ ID NO: 485197 - RNA, 19 nt, Human
aaccagugcuauggaugca

SEQ ID NO: 485198 - RNA, 19 nt, Human
aacccccaacaacucuucc

SEQ ID NO: 485199 - RNA, 24 nt, Human
aacccccaacaacucuuccaacgc

SEQ ID NO: 485200 - RNA, 21 nt, Human
aauaaaguaaacaauauacag

SEQ ID NO: 485201 - RNA, 23 nt, Human
aaugacuauggacauuuccccca

SEQ ID NO: 485202 - RNA, 20 nt, Human
acacacacacacaaaaaaca

SEQ ID NO: 485203 - RNA, 20 nt, Human
acacacacacacacacaaaa

SEQ ID NO: 485204 - RNA, 23 nt, Human
acacacacacacacacaaaaaac

SEQ ID NO: 485205 - RNA, 31 nt, Human
acacacacacacacacacaaaaaacacguag

SEQ ID NO: 485206 - RNA, 28 nt, Human
acacacacacacacacacacaaaaaaca

SEQ ID NO: 485207 - RNA, 23 nt, Human
acacacacacacacacacacaca

SEQ ID NO: 485208 - RNA, 23 nt, Human
acacacacacacacacacacaca

SEQ ID NO: 485209 - RNA, 23 nt, Human
acacacacacacacacacacaca

SEQ ID NO: 485210 - RNA, 23 nt, Human
acacacacacacacacacacaca

SEQ ID NO: 485211 - RNA, 23 nt, Human
acacacacacacacacacacaca

SEQ ID NO: 485212 - RNA, 28 nt, Human
acacacacacacacacacacacaaaaaa

SEQ ID NO: 485213 - RNA, 21 nt, Human
acagcucaagccacauccgaa

SEQ ID NO: 485214 - RNA, 21 nt, Human
acuugauuuucauuaggaugu

SEQ ID NO: 485215 - RNA, 19 nt, Human
agccgggagcugcgcgcgg

SEQ ID NO: 485216 - RNA, 19 nt, Human
aggaauggcccgcuaggga

SEQ ID NO: 485217 - RNA, 19 nt, Human
agggaagggggaggcgggg

SEQ ID NO: 485218 - RNA, 19 nt, Human
aggggagggaagggggagg

SEQ ID NO: 485219 - RNA, 21 nt, Human
aggggagggaagggggaggcg

SEQ ID NO: 485220 - RNA, 24 nt, Human
caaaaaacccccaacaacucuucc

SEQ ID NO: 485221 - RNA, 24 nt, Human
caaaguaaccagugcuauggaugc

SEQ ID NO: 485222 - RNA, 21 nt, Human
caaggggagggaagggggagg

SEQ ID NO: 485223 - RNA, 25 nt, Human
cacacacacacaaaaaacacguaau

SEQ ID NO: 485224 - RNA, 23 nt, Human
cacacacacacacacaaaaaaca

SEQ ID NO: 485225 - RNA, 20 nt, Human
cacacacacacacacacaca

SEQ ID NO: 485226 - RNA, 20 nt, Human
cacacacacacacacacaca

SEQ ID NO: 485227 - RNA, 20 nt, Human
cacacacacacacacacaca

SEQ ID NO: 485228 - RNA, 20 nt, Human
cacacacacacacacacaca

SEQ ID NO: 485229 - RNA, 20 nt, Human
cacacacacacacacacaca

SEQ ID NO: 485230 - RNA, 20 nt, Human
cacacacacacacacacaca

SEQ ID NO: 485231 - RNA, 22 nt, Human
cacacacacacacacacacaca

SEQ ID NO: 485232 - RNA, 26 nt, Human
cacacacacacacacacacacacaca

SEQ ID NO: 485233 - RNA, 26 nt, Human
cacacacacacacacacacacacaca

SEQ ID NO: 485234 - RNA, 26 nt, Human
cacacacacacacacacacacacaca

SEQ ID NO: 485235 - RNA, 18 nt, Human
caccaguauuuacaauaa

SEQ ID NO: 485236 - RNA, 21 nt, Human
cagcagguccuaaacugccaa

SEQ ID NO: 485237 - RNA, 19 nt, Human
cagcucaagccacauccga

SEQ ID NO: 485238 - RNA, 20 nt, Human
cagugcuauggaugcaaaaa

SEQ ID NO: 485239 - RNA, 33 nt, Human
cauuuuauggauacacacacacacacacacagu

SEQ ID NO: 485240 - RNA, 18 nt, Human
ccacauccgaagggggag

SEQ ID NO: 485241 - RNA, 23 nt, Human
cccaacaacucuuccaacgcuac

SEQ ID NO: 485242 - RNA, 20 nt, Human
cccaaggggagggaaggggg

SEQ ID NO: 485243 - RNA, 24 nt, Human
ccccaacaacucuuccaacgcuac

SEQ ID NO: 485244 - RNA, 23 nt, Human
ccuaaacugccaacaccucuaac

SEQ ID NO: 485245 - RNA, 22 nt, Human
ccuccgagcugcuccgggucgc

SEQ ID NO: 485246 - RNA, 24 nt, Human
cgcccggugguccccaaggggagg

SEQ ID NO: 485247 - RNA, 21 nt, Human
cgcgccuacagcucaagccac

SEQ ID NO: 485248 - RNA, 24 nt, Human
cuaguaaaucaaaaucuaagaccc

SEQ ID NO: 485249 - RNA, 19 nt, Human
cuccgggucgcgggucugc

SEQ ID NO: 485250 - RNA, 22 nt, Human
cucuuccaacgcuacuuucaaa

SEQ ID NO: 485251 - RNA, 19 nt, Human
cugaaccaguaaagcaaac

SEQ ID NO: 485252 - RNA, 19 nt, Human
gagccuccauguaaugaau

SEQ ID NO: 485253 - RNA, 21 nt, Human
gagggaagggggaggcggggc

SEQ ID NO: 485254 - RNA, 23 nt, Human
gauaaaggaagcaacuacagaaa

SEQ ID NO: 485255 - RNA, 20 nt, Human
gcgccuacagcucaagccac

SEQ ID NO: 485256 - RNA, 20 nt, Human
gcgggucugcagcgucuccg

SEQ ID NO: 485257 - RNA, 19 nt, Human
gcuuaaaaacaaaaaaaaa

SEQ ID NO: 485258 - RNA, 21 nt, Human
gggagggaagggggaggcggg

SEQ ID NO: 485259 - RNA, 21 nt, Human
ggugaaugcuuaaaaacaaaa

SEQ ID NO: 485260 - RNA, 23 nt, Human
gucugcagcgucuccggcccucc

SEQ ID NO: 485261 - RNA, 20 nt, Human
gugaaugcuuaaaaacaaaa

SEQ ID NO: 485262 - RNA, 23 nt, Human
uaaagaaaaaacaugcaggucaa

SEQ ID NO: 485263 - RNA, 19 nt, Human
uaaaguaaacaauauacag

SEQ ID NO: 485264 - RNA, 20 nt, Human
uaaaguaaacaauauacagu

SEQ ID NO: 485265 - RNA, 24 nt, Human
uaaugacuauggacauuuccccca

SEQ ID NO: 485266 - RNA, 19 nt, Human
uacaaaguuguucuuccug

SEQ ID NO: 485267 - RNA, 25 nt, Human
uacaaaguuguucuuccuggcuuuu

SEQ ID NO: 485268 - RNA, 20 nt, Human
uacacacacacacacacaca

SEQ ID NO: 485269 - RNA, 25 nt, Human
uacacacacacacacacacacacac

SEQ ID NO: 485270 - RNA, 19 nt, Human
uacagcucaagccacaucc

SEQ ID NO: 485271 - RNA, 23 nt, Human
uaccaugguaucaaauguucuuu

SEQ ID NO: 485272 - RNA, 23 nt, Human
uagaaugguccuuaggcucauga

SEQ ID NO: 485273 - RNA, 19 nt, Human
uagaauuacuuauuucacu

SEQ ID NO: 485274 - RNA, 23 nt, Human
uaguaaaucaaaaucuaagaccc

SEQ ID NO: 485275 - RNA, 18 nt, Human
uagucaauguagcaacag

SEQ ID NO: 485276 - RNA, 23 nt, Human
ucaccgccuccgagcugcuccgg

SEQ ID NO: 485277 - RNA, 19 nt, Human
uccuaaacugccaacaccu

SEQ ID NO: 485278 - RNA, 20 nt, Human
ucugcagcgucuccggcccc

SEQ ID NO: 485279 - RNA, 23 nt, Human
ugaaugcuuaaaaacaaaaaaaa

SEQ ID NO: 485280 - RNA, 19 nt, Human
ugaccggagucuccucagc

SEQ ID NO: 485281 - RNA, 20 nt, Human
ugacuauggacauuuccccc

SEQ ID NO: 485282 - RNA, 21 nt, Human
ugagaacacaaguuuugacug

SEQ ID NO: 485283 - RNA, 24 nt, Human
ugccaacaccucuaaccaucugau

SEQ ID NO: 485284 - RNA, 26 nt, Human
uggauacacacacacacacacacaca

SEQ ID NO: 485285 - RNA, 26 nt, Human
uggauacacacacacacacacacagu

SEQ ID NO: 485286 - RNA, 18 nt, Human
uuaaugaagaggaaauga

SEQ ID NO: 485287 - RNA, 22 nt, Human
uuagaaaagcuguucuuuaaug

SEQ ID NO: 485288 - RNA, 26 nt, Human
uucauuaggauguaguuauuuuguca

SEQ ID NO: 485289 - RNA, 24 nt, Human
uuggauaacauuuugauuacuaca

SEQ ID NO: 485290 - RNA, 20 nt, Human
uuuuauggauacacacacac

SEQ ID NO: 485291 - RNA, 22 nt, Human
uuuuauggauacacacacacac

SEQ ID NO: 485292 - RNA, 31 nt, Human
uuuuauggauacacacacacacacacacaca

SEQ ID NO: 485293 - RNA, 18 nt, Human
uuuuuuuuuuuuuuuuug

SEQ ID NO: 485294 - RNA, 21 nt, Human
uuuuuuuuuuuuuuuuugcau

SEQ ID NO: 485295 - RNA, 24 nt, Human
uuuuuuuuuuuuuuuuuugcauaa

SEQ ID NO: 485296 - RNA, 19 nt, Human
agcccggccggcccgcgcu

SEQ ID NO: 485297 - RNA, 19 nt, Human
cagcccggccggcccgcgc

SEQ ID NO: 485298 - RNA, 20 nt, Human
cccccgccgcgccgccgcuc

SEQ ID NO: 485299 - RNA, 22 nt, Human
cccgccgcgccgccgcucgccc

SEQ ID NO: 485300 - RNA, 24 nt, Human
cccgccgcgccgccgcucgccccg

SEQ ID NO: 485301 - RNA, 25 nt, Human
cccgccgcgccgccgcucgccccgc

SEQ ID NO: 485302 - RNA, 22 nt, Human
cccgcgccgccccggcucccgc

SEQ ID NO: 485303 - RNA, 24 nt, Human
ccgcgccgccccggcucccgcguc

SEQ ID NO: 485304 - RNA, 19 nt, Human
ccgcgccgccgcucgcccc

SEQ ID NO: 485305 - RNA, 18 nt, Human
ccggcgcccagcugccgc

SEQ ID NO: 485306 - RNA, 19 nt, Human
ccggcgcccagcugccgcc

SEQ ID NO: 485307 - RNA, 18 nt, Human
cggccggcccgcgcugcc

SEQ ID NO: 485308 - RNA, 22 nt, Human
cucccgccggcgcccagcugcc

SEQ ID NO: 485309 - RNA, 19 nt, Human
gccgccccggccgaaggcc

SEQ ID NO: 485310 - RNA, 18 nt, Human
gccgccccggcucccgcg

SEQ ID NO: 485311 - RNA, 21 nt, Human
gccggcccgcgcugcccgcgc

SEQ ID NO: 485312 - RNA, 20 nt, Human
gcgcccagcugccgccccgg

SEQ ID NO: 485313 - RNA, 18 nt, Human
gcuagcucccgccggcgc

SEQ ID NO: 485314 - RNA, 19 nt, Human
ugcuagcucccgccggcgc

SEQ ID NO: 485315 - RNA, 26 nt, Human
aagggguggguagaaaggagaggagg

SEQ ID NO: 485316 - RNA, 20 nt, Human
cacaagccaccaccgccgcu

SEQ ID NO: 485317 - RNA, 21 nt, Human
caccacaagccaccaccgccg

SEQ ID NO: 485318 - RNA, 18 nt, Human
caccgccgccgcuucugc

SEQ ID NO: 485319 - RNA, 18 nt, Human
cacgcuaacgucugcccu

SEQ ID NO: 485320 - RNA, 18 nt, Human
ccaccgccgccgcuucug

SEQ ID NO: 485321 - RNA, 23 nt, Human
cccgggauugagagugaucacuc

SEQ ID NO: 485322 - RNA, 18 nt, Human
ccgccgccgcuucugcgc

SEQ ID NO: 485323 - RNA, 20 nt, Human
gccgcaccacaagccaccac

SEQ ID NO: 485324 - RNA, 26 nt, Human
guggagcacagugauaagcacauuuu

SEQ ID NO: 485325 - RNA, 18 nt, Human
uaaggccaccaggucccc

SEQ ID NO: 485326 - RNA, 19 nt, Human
ugaaagacuaaggccacca

SEQ ID NO: 485327 - RNA, 23 nt, Human
ugaggccgcaccacaagccacca

SEQ ID NO: 485328 - RNA, 19 nt, Human
uguggagcacagugauaag

SEQ ID NO: 485329 - RNA, 22 nt, Human
uguggagcacagugauaagcac

SEQ ID NO: 485330 - RNA, 24 nt, Human
uguuuaggauagaaaggggugggu

SEQ ID NO: 485331 - RNA, 18 nt, Human
uuuuuuuuuuuuuuuuug

SEQ ID NO: 485332 - RNA, 19 nt, Human
uuuuuuuuuuuuuuuuugu

SEQ ID NO: 485333 - RNA, 21 nt, Human
uuuuuuuuuuuuuuuuugugg

SEQ ID NO: 485334 - RNA, 25 nt, Human
aaaaaaaaaaaaaaaaaagaaagaa

SEQ ID NO: 485335 - RNA, 22 nt, Human
aaaaaaaaaagaaagaaagaaa

SEQ ID NO: 485336 - RNA, 24 nt, Human
aaaacaacaaaaugacacagaaga

SEQ ID NO: 485337 - RNA, 22 nt, Human
aaaacacaacuucuuuacaaaa

SEQ ID NO: 485338 - RNA, 18 nt, Human
aaacagaagcugcccagg

SEQ ID NO: 485339 - RNA, 23 nt, Human
aaacccacacccccaacuaagcg

SEQ ID NO: 485340 - RNA, 23 nt, Human
aaagaaaaaagaaaaacaaaaga

SEQ ID NO: 485341 - RNA, 24 nt, Human
aaagcauccugggccccagucccu

SEQ ID NO: 485342 - RNA, 20 nt, Human
aaccaaaacaacaaaaugac

SEQ ID NO: 485343 - RNA, 19 nt, Human
aacuacccagccccauccc

SEQ ID NO: 485344 - RNA, 22 nt, Human
aagaaagaaaaaagaaaaacaa

SEQ ID NO: 485345 - RNA, 19 nt, Human
aagaagucucccucuccac

SEQ ID NO: 485346 - RNA, 19 nt, Human
aagcaaaagaggggcuggg

SEQ ID NO: 485347 - RNA, 22 nt, Human
aagcagcaaggguggacgaggg

SEQ ID NO: 485348 - RNA, 23 nt, Human
aagcagcaaggguggacgagggg

SEQ ID NO: 485349 - RNA, 18 nt, Human
aagcgucuucuccacagg

SEQ ID NO: 485350 - RNA, 20 nt, Human
aaggaggcuccacucacccu

SEQ ID NO: 485351 - RNA, 18 nt, Human
aagggggcaagaaaccaa

SEQ ID NO: 485352 - RNA, 20 nt, Human
acaaagccaacacacagggc

SEQ ID NO: 485353 - RNA, 23 nt, Human
accaaaacaacaaaaugacacag

SEQ ID NO: 485354 - RNA, 25 nt, Human
accaaaacaacaaaaugacacagaa

SEQ ID NO: 485355 - RNA, 19 nt, Human
accacauacaaaggcaaca

SEQ ID NO: 485356 - RNA, 19 nt, Human
acccaauacacccauuuca

SEQ ID NO: 485357 - RNA, 24 nt, Human
acccaccccucccccggaaccgcc

SEQ ID NO: 485358 - RNA, 21 nt, Human
acccacgcacaauggagaccc

SEQ ID NO: 485359 - RNA, 25 nt, Human
acccccaacuaagcgucuucuccac

SEQ ID NO: 485360 - RNA, 19 nt, Human
acccggaggaagagggagc

SEQ ID NO: 485361 - RNA, 19 nt, Human
acgcuucgcuccagcuacc

SEQ ID NO: 485362 - RNA, 20 nt, Human
agaaaaaccaccacaaacca

SEQ ID NO: 485363 - RNA, 21 nt, Human
agaagggcaaacuaaagguca

SEQ ID NO: 485364 - RNA, 22 nt, Human
agacaagcaaagcacagggaga

SEQ ID NO: 485365 - RNA, 19 nt, Human
agacccgggaaguggccca

SEQ ID NO: 485366 - RNA, 21 nt, Human
agagagggcugggggcaaggg

SEQ ID NO: 485367 - RNA, 23 nt, Human
agagggaaacagaagcugcccag

SEQ ID NO: 485368 - RNA, 18 nt, Human
agaggggaggaaggaggc

SEQ ID NO: 485369 - RNA, 19 nt, Human
agagggguugugggcagcu

SEQ ID NO: 485370 - RNA, 22 nt, Human
agcauccugggccccagucccu

SEQ ID NO: 485371 - RNA, 19 nt, Human
agccauuugagacaagcaa

SEQ ID NO: 485372 - RNA, 19 nt, Human
agcccccuggccaacccag

SEQ ID NO: 485373 - RNA, 18 nt, Human
agcucccgggggcccgcu

SEQ ID NO: 485374 - RNA, 19 nt, Human
agcucccgggggcccgcug

SEQ ID NO: 485375 - RNA, 18 nt, Human
aggaaagagccagggcug

SEQ ID NO: 485376 - RNA, 23 nt, Human
aggaaggaggcuccacucacccu

SEQ ID NO: 485377 - RNA, 23 nt, Human
aggagggcagggggguggggggc

SEQ ID NO: 485378 - RNA, 18 nt, Human
aggccuccgccccauccu

SEQ ID NO: 485379 - RNA, 19 nt, Human
agggagagagggcuggggg

SEQ ID NO: 485380 - RNA, 21 nt, Human
agggaugggucccaacuuacc

SEQ ID NO: 485381 - RNA, 23 nt, Human
agggaugggucccaacuuaccgu

SEQ ID NO: 485382 - RNA, 23 nt, Human
aggggccauccccccaacucugu

SEQ ID NO: 485383 - RNA, 24 nt, Human
aggggcugggacaagccgggaggc

SEQ ID NO: 485384 - RNA, 18 nt, Human
agggugagaacaaagagg

SEQ ID NO: 485385 - RNA, 23 nt, Human
aggguggggugggagcaagagua

SEQ ID NO: 485386 - RNA, 24 nt, Human
agguugggcugaccacccugagga

SEQ ID NO: 485387 - RNA, 21 nt, Human
aucggcacagacccaccccuc

SEQ ID NO: 485388 - RNA, 22 nt, Human
aucggcacagacccaccccucc

SEQ ID NO: 485389 - RNA, 19 nt, Human
auggagcccaaacccacac

SEQ ID NO: 485390 - RNA, 21 nt, Human
caaacccacacccccaacuaa

SEQ ID NO: 485391 - RNA, 25 nt, Human
caaaccucagcuugccgggaccugc

SEQ ID NO: 485392 - RNA, 24 nt, Human
caacaaaaugacacagaagagugg

SEQ ID NO: 485393 - RNA, 25 nt, Human
caacccagcucccuguuggggcuga

SEQ ID NO: 485394 - RNA, 20 nt, Human
caaccuugaccccccaccug

SEQ ID NO: 485395 - RNA, 18 nt, Human
caacuggaaguuuccacg

SEQ ID NO: 485396 - RNA, 18 nt, Human
caacugggaaaggaacag

SEQ ID NO: 485397 - RNA, 20 nt, Human
caagaaaccaaacugcccac

SEQ ID NO: 485398 - RNA, 21 nt, Human
caagggaggccgauccgugca

SEQ ID NO: 485399 - RNA, 23 nt, Human
caagggaggccgauccgugcaag

SEQ ID NO: 485400 - RNA, 22 nt, Human
caauacacccauuucacagaag

SEQ ID NO: 485401 - RNA, 22 nt, Human
cacaaaccaaaacaacaaaaug

SEQ ID NO: 485402 - RNA, 23 nt, Human
cacaaagccaacacacagggcag

SEQ ID NO: 485403 - RNA, 20 nt, Human
cacagcaaaccuccagaccc

SEQ ID NO: 485404 - RNA, 20 nt, Human
caccacaaaccaaaacaaca

SEQ ID NO: 485405 - RNA, 21 nt, Human
caccacaaaccaaaacaacaa

SEQ ID NO: 485406 - RNA, 24 nt, Human
cacccccaacuaagcgucuucucc

SEQ ID NO: 485407 - RNA, 18 nt, Human
caccccucccccggaacc

SEQ ID NO: 485408 - RNA, 18 nt, Human
cacccggcagccuggggc

SEQ ID NO: 485409 - RNA, 20 nt, Human
cacccucggucccauccacu

SEQ ID NO: 485410 - RNA, 19 nt, Human
cacccucugccaguuccuc

SEQ ID NO: 485411 - RNA, 21 nt, Human
caccugggggagggggucagg

SEQ ID NO: 485412 - RNA, 19 nt, Human
cacugcuggagugaggcac

SEQ ID NO: 485413 - RNA, 20 nt, Human
cagaaaccacccagugggcu

SEQ ID NO: 485414 - RNA, 22 nt, Human
cagcaaaccuccagacccaagc

SEQ ID NO: 485415 - RNA, 23 nt, Human
cagcagaacaaacguacaagaca

SEQ ID NO: 485416 - RNA, 18 nt, Human
cagcagaagcagaccacc

SEQ ID NO: 485417 - RNA, 24 nt, Human
cagcccccgccccaacccugcgag

SEQ ID NO: 485418 - RNA, 23 nt, Human
cagcccccuggccaacccagcuc

SEQ ID NO: 485419 - RNA, 18 nt, Human
cagcgaguggggcagacg

SEQ ID NO: 485420 - RNA, 19 nt, Human
cagcuugccgggaccugca

SEQ ID NO: 485421 - RNA, 25 nt, Human
cagggcuggggcagggcauaggggg

SEQ ID NO: 485422 - RNA, 20 nt, Human
caggggcccagcuucuugcc

SEQ ID NO: 485423 - RNA, 19 nt, Human
caggguagggaggggccga

SEQ ID NO: 485424 - RNA, 20 nt, Human
cagggugagaacaaagaggg

SEQ ID NO: 485425 - RNA, 21 nt, Human
caguccaggccuucaaugccc

SEQ ID NO: 485426 - RNA, 22 nt, Human
cauacaaaggcaacaacacuuc

SEQ ID NO: 485427 - RNA, 19 nt, Human
cauccccccaacucugucc

SEQ ID NO: 485428 - RNA, 20 nt, Human
ccaaacccacacccccaacu

SEQ ID NO: 485429 - RNA, 21 nt, Human
ccaacucuguccaccucacac

SEQ ID NO: 485430 - RNA, 23 nt, Human
ccaacuucugaugcccuggcuga

SEQ ID NO: 485431 - RNA, 25 nt, Human
ccacaaaccaaaacaacaaaaugac

SEQ ID NO: 485432 - RNA, 21 nt, Human
ccacagcaaaccuccagaccc

SEQ ID NO: 485433 - RNA, 20 nt, Human
ccacauacaaaggcaacaac

SEQ ID NO: 485434 - RNA, 18 nt, Human
ccaccccucccccggaac

SEQ ID NO: 485435 - RNA, 18 nt, Human
ccacuccacccagcagca

SEQ ID NO: 485436 - RNA, 19 nt, Human
ccagcagaagcagaccacc

SEQ ID NO: 485437 - RNA, 22 nt, Human
ccagccacccccaggggcccag

SEQ ID NO: 485438 - RNA, 19 nt, Human
ccaggcagcagagggaaac

SEQ ID NO: 485439 - RNA, 19 nt, Human
ccagggccugggcccugcc

SEQ ID NO: 485440 - RNA, 23 nt, Human
ccaggggcccagcuucuugccuc

SEQ ID NO: 485441 - RNA, 22 nt, Human
ccagugacaacccccacccucc

SEQ ID NO: 485442 - RNA, 26 nt, Human
ccagugacaacccccacccucccaaa

SEQ ID NO: 485443 - RNA, 19 nt, Human
cccaacuacccagccccau

SEQ ID NO: 485444 - RNA, 22 nt, Human
cccaauacacccauuucacaga

SEQ ID NO: 485445 - RNA, 20 nt, Human
cccacccucccaaaccucag

SEQ ID NO: 485446 - RNA, 22 nt, Human
cccagccacccccaggggccca

SEQ ID NO: 485447 - RNA, 22 nt, Human
cccaguaccagcaaccuugacc

SEQ ID NO: 485448 - RNA, 22 nt, Human
ccccacccucccaaaccucagc

SEQ ID NO: 485449 - RNA, 23 nt, Human
ccccaggggcccagcuucuugcc

SEQ ID NO: 485450 - RNA, 21 nt, Human
ccccauaggccagagaggcug

SEQ ID NO: 485451 - RNA, 23 nt, Human
ccccaugcuggggcggcaccucc

SEQ ID NO: 485452 - RNA, 27 nt, Human
cccccacccucccaaaccucagcuugc

SEQ ID NO: 485453 - RNA, 20 nt, Human
cccccauaggaaucccacaa

SEQ ID NO: 485454 - RNA, 21 nt, Human
cccccaugggcacugcccacc

SEQ ID NO: 485455 - RNA, 18 nt, Human
ccccccaagccccccucc

SEQ ID NO: 485456 - RNA, 27 nt, Human
cccccgccacccccccauaggaauccc

SEQ ID NO: 485457 - RNA, 19 nt, Human
cccccgccccaacccugcg

SEQ ID NO: 485458 - RNA, 25 nt, Human
cccccgccccaacccugcgaggguc

SEQ ID NO: 485459 - RNA, 19 nt, Human
cccccuggagaaaaucacc

SEQ ID NO: 485460 - RNA, 19 nt, Human
ccccgccacccccccauag

SEQ ID NO: 485461 - RNA, 27 nt, Human
ccccgccacccccccauaggaauccca

SEQ ID NO: 485462 - RNA, 20 nt, Human
ccccuggccaacccagcucc

SEQ ID NO: 485463 - RNA, 19 nt, Human
ccccuuucaggccagggag

SEQ ID NO: 485464 - RNA, 21 nt, Human
cccgccacccccccauaggaa

SEQ ID NO: 485465 - RNA, 21 nt, Human
cccuuugccugccugcccucc

SEQ ID NO: 485466 - RNA, 20 nt, Human
ccuaaggcuggggcuguggc

SEQ ID NO: 485467 - RNA, 21 nt, Human
ccuacccccggcuuucuggga

SEQ ID NO: 485468 - RNA, 20 nt, Human
ccucaaggcggugugccugg

SEQ ID NO: 485469 - RNA, 18 nt, Human
ccuccaggaccuccuggc

SEQ ID NO: 485470 - RNA, 22 nt, Human
ccuccugccuaggcaucugcag

SEQ ID NO: 485471 - RNA, 18 nt, Human
ccugcagcuuggguuagc

SEQ ID NO: 485472 - RNA, 22 nt, Human
ccugcauacaguaggcacucac

SEQ ID NO: 485473 - RNA, 20 nt, Human
ccugccccccaugcuggggc

SEQ ID NO: 485474 - RNA, 23 nt, Human
ccuggccuaaggcuggggcugug

SEQ ID NO: 485475 - RNA, 18 nt, Human
ccuggcucaggggcucga

SEQ ID NO: 485476 - RNA, 21 nt, Human
ccugggccccagucccugccg

SEQ ID NO: 485477 - RNA, 21 nt, Human
ccugguacugggcagcugcuc

SEQ ID NO: 485478 - RNA, 20 nt, Human
ccuugggcgggcccaccggc

SEQ ID NO: 485479 - RNA, 23 nt, Human
cgaauccagaauggagcccaaac

SEQ ID NO: 485480 - RNA, 21 nt, Human
cgccuugggcaagugcauggg

SEQ ID NO: 485481 - RNA, 19 nt, Human
cggcacagacccaccccuc

SEQ ID NO: 485482 - RNA, 18 nt, Human
cggguguggagaucuggg

SEQ ID NO: 485483 - RNA, 24 nt, Human
cuagggcuuuccagaaaccaccca

SEQ ID NO: 485484 - RNA, 21 nt, Human
cucaaaccagagacaccagac

SEQ ID NO: 485485 - RNA, 23 nt, Human
cucacccucggucccauccacuc

SEQ ID NO: 485486 - RNA, 19 nt, Human
cucccccgccaccccccca

SEQ ID NO: 485487 - RNA, 19 nt, Human
cuccuggaguucuagcccc

SEQ ID NO: 485488 - RNA, 21 nt, Human
cuggcccaacuucugaugccc

SEQ ID NO: 485489 - RNA, 22 nt, Human
cuggcccaacuucugaugcccu

SEQ ID NO: 485490 - RNA, 22 nt, Human
cugggccaggaggggaggccug

SEQ ID NO: 485491 - RNA, 20 nt, Human
cuggggcagggcauaggggg

SEQ ID NO: 485492 - RNA, 18 nt, Human
gaacaaacguacaagaca

SEQ ID NO: 485493 - RNA, 22 nt, Human
gaacaaacguacaagacagagu

SEQ ID NO: 485494 - RNA, 20 nt, Human
gagcccaaacccacaccccc

SEQ ID NO: 485495 - RNA, 20 nt, Human
gauucuucagcauccucccc

SEQ ID NO: 485496 - RNA, 21 nt, Human
gcaaaguuuagccagcuggga

SEQ ID NO: 485497 - RNA, 21 nt, Human
gcacaggagagcaggaagcaa

SEQ ID NO: 485498 - RNA, 21 nt, Human
gcagcagaacaaacguacaag

SEQ ID NO: 485499 - RNA, 24 nt, Human
gcagccucccauucuuaggaccaa

SEQ ID NO: 485500 - RNA, 19 nt, Human
gcagguucucguagcaccu

SEQ ID NO: 485501 - RNA, 19 nt, Human
gccccaguaccagcaaccu

SEQ ID NO: 485502 - RNA, 22 nt, Human
gccccagucccugccgcauucc

SEQ ID NO: 485503 - RNA, 21 nt, Human
gcgcuaggguucugaucggcc

SEQ ID NO: 485504 - RNA, 18 nt, Human
ggaagaccccgcccuggc

SEQ ID NO: 485505 - RNA, 23 nt, Human
ggaagaccccgcccuggcccaac

SEQ ID NO: 485506 - RNA, 19 nt, Human
ggacgaggggcccauggag

SEQ ID NO: 485507 - RNA, 25 nt, Human
ggacuugaucaucaccucuucccag

SEQ ID NO: 485508 - RNA, 21 nt, Human
ggagacccgggaaguggccca

SEQ ID NO: 485509 - RNA, 18 nt, Human
ggagagagggcugggggc

SEQ ID NO: 485510 - RNA, 20 nt, Human
ggaggggaggccuggugacu

SEQ ID NO: 485511 - RNA, 20 nt, Human
ggcaagaaaccaaacugccc

SEQ ID NO: 485512 - RNA, 21 nt, Human
ggcacgggugccucagcuccc

SEQ ID NO: 485513 - RNA, 19 nt, Human
ggcaggguagggaggggcc

SEQ ID NO: 485514 - RNA, 18 nt, Human
ggccuaaggcuggggcug

SEQ ID NO: 485515 - RNA, 18 nt, Human
ggccugggagggggcauc

SEQ ID NO: 485516 - RNA, 18 nt, Human
ggcugggggcaagggugg

SEQ ID NO: 485517 - RNA, 19 nt, Human
gggaaguggcccagggcug

SEQ ID NO: 485518 - RNA, 22 nt, Human
gggagaugacggaugccccaac

SEQ ID NO: 485519 - RNA, 24 nt, Human
gggaggcuguggccaggcgcaccc

SEQ ID NO: 485520 - RNA, 19 nt, Human
gggaggggagggcuagggc

SEQ ID NO: 485521 - RNA, 24 nt, Human
gggaggggcaggguggacuggggg

SEQ ID NO: 485522 - RNA, 19 nt, Human
gggaggucucccccauagg

SEQ ID NO: 485523 - RNA, 23 nt, Human
gggcagccggaacgcuucgcucc

SEQ ID NO: 485524 - RNA, 18 nt, Human
gggcaggguagggagggg

SEQ ID NO: 485525 - RNA, 18 nt, Human
gggccccagucccugccg

SEQ ID NO: 485526 - RNA, 18 nt, Human
gggcccccccaagccccc

SEQ ID NO: 485527 - RNA, 21 nt, Human
gggcugggggcaagggugggg

SEQ ID NO: 485528 - RNA, 18 nt, Human
ggggaggggagggcuagg

SEQ ID NO: 485529 - RNA, 20 nt, Human
ggggguuaggaaagagccag

SEQ ID NO: 485530 - RNA, 18 nt, Human
ggucagagugggcaccca

SEQ ID NO: 485531 - RNA, 19 nt, Human
ggugggauguggaaggggc

SEQ ID NO: 485532 - RNA, 18 nt, Human
guccaggccuucaaugcc

SEQ ID NO: 485533 - RNA, 18 nt, Human
guccgacagguugggcug

SEQ ID NO: 485534 - RNA, 24 nt, Human
gucucaaaccagagacaccagacc

SEQ ID NO: 485535 - RNA, 19 nt, Human
gugagaacaaagagggguu

SEQ ID NO: 485536 - RNA, 24 nt, Human
uaaaaccaacaaaaagaagucucc

SEQ ID NO: 485537 - RNA, 23 nt, Human
uaaaggucagagugggcacccag

SEQ ID NO: 485538 - RNA, 18 nt, Human
uaaauagcucuuucuccc

SEQ ID NO: 485539 - RNA, 20 nt, Human
uaccaugcaugggcaggggg

SEQ ID NO: 485540 - RNA, 19 nt, Human
uacuuggguggggaggggg

SEQ ID NO: 485541 - RNA, 26 nt, Human
uagcucuuucucccccgccacccccc

SEQ ID NO: 485542 - RNA, 20 nt, Human
uaggaggagauugggcuuug

SEQ ID NO: 485543 - RNA, 21 nt, Human
uauauguauauuuuauauaua

SEQ ID NO: 485544 - RNA, 24 nt, Human
ucaccagcccccuggagaaaauca

SEQ ID NO: 485545 - RNA, 18 nt, Human
ucacucaccugggggagg

SEQ ID NO: 485546 - RNA, 23 nt, Human
ucagaagcaaaagaggggcuggg

SEQ ID NO: 485547 - RNA, 23 nt, Human
uccaaaaccauuuucaccucuuc

SEQ ID NO: 485548 - RNA, 18 nt, Human
uccacagcaaaccuccag

SEQ ID NO: 485549 - RNA, 19 nt, Human
uccacagcaaaccuccaga

SEQ ID NO: 485550 - RNA, 21 nt, Human
uccacuguccugugugggcga

SEQ ID NO: 485551 - RNA, 19 nt, Human
uccaggccuucaaugcccc

SEQ ID NO: 485552 - RNA, 23 nt, Human
uccagggccugggcccugccuuu

SEQ ID NO: 485553 - RNA, 18 nt, Human
ucccaaaccucagcuugc

SEQ ID NO: 485554 - RNA, 22 nt, Human
uccccauaggccaaagcauccu

SEQ ID NO: 485555 - RNA, 21 nt, Human
uccccccaacucuguccaccu

SEQ ID NO: 485556 - RNA, 22 nt, Human
uccccccaacucuguccaccuc

SEQ ID NO: 485557 - RNA, 20 nt, Human
ucccggggaggggagggcua

SEQ ID NO: 485558 - RNA, 20 nt, Human
ucccuuugagcaagcacggg

SEQ ID NO: 485559 - RNA, 23 nt, Human
uccgacagguugggcugaccacc

SEQ ID NO: 485560 - RNA, 24 nt, Human
uccuaagggccccacagcugccag

SEQ ID NO: 485561 - RNA, 18 nt, Human
uccuccaaagauugcagg

SEQ ID NO: 485562 - RNA, 22 nt, Human
uccuccaggaccuccuggcuca

SEQ ID NO: 485563 - RNA, 21 nt, Human
uccuuugcuucaggcaggcug

SEQ ID NO: 485564 - RNA, 23 nt, Human
uccuuugcuucaggcaggcuggg

SEQ ID NO: 485565 - RNA, 25 nt, Human
ucuccccagccacccccaggggccc

SEQ ID NO: 485566 - RNA, 30 nt, Human
ucucccccgccacccccccauaggaauccu

SEQ ID NO: 485567 - RNA, 21 nt, Human
ucuggaaacaccuguaacugg

SEQ ID NO: 485568 - RNA, 20 nt, Human
ucuugccuccugaagccugc

SEQ ID NO: 485569 - RNA, 23 nt, Human
ugaagagcagcagaacaaacgua

SEQ ID NO: 485570 - RNA, 19 nt, Human
ugaagguccgacagguugg

SEQ ID NO: 485571 - RNA, 25 nt, Human
ugacaacccccacccucccaaaccu

SEQ ID NO: 485572 - RNA, 24 nt, Human
ugacaccagcagcgcuuucugaag

SEQ ID NO: 485573 - RNA, 20 nt, Human
ugacuuccacagcaaaccuc

SEQ ID NO: 485574 - RNA, 18 nt, Human
ugagaacaaagagggguu

SEQ ID NO: 485575 - RNA, 19 nt, Human
ugagcaagcacgggugugg

SEQ ID NO: 485576 - RNA, 21 nt, Human
ugaggagggcagggggguggg

SEQ ID NO: 485577 - RNA, 24 nt, Human
ugagucggggagacccucuccugg

SEQ ID NO: 485578 - RNA, 19 nt, Human
ugauacaauauugaagagc

SEQ ID NO: 485579 - RNA, 18 nt, Human
ugcaaaaaaaaaaaaaaa

SEQ ID NO: 485580 - RNA, 21 nt, Human
ugccaaacaggcaggaagccc

SEQ ID NO: 485581 - RNA, 18 nt, Human
ugccaacgugcuucugag

SEQ ID NO: 485582 - RNA, 19 nt, Human
ugcccuggcugauguggag

SEQ ID NO: 485583 - RNA, 20 nt, Human
ugccucagcucccaggcagc

SEQ ID NO: 485584 - RNA, 24 nt, Human
uggaaacaccuguaacuggcaccc

SEQ ID NO: 485585 - RNA, 20 nt, Human
uggaaagcagcaagggugga

SEQ ID NO: 485586 - RNA, 20 nt, Human
uggaauggggucucccucuc

SEQ ID NO: 485587 - RNA, 21 nt, Human
uggagcccaaacccacacccc

SEQ ID NO: 485588 - RNA, 26 nt, Human
uggagcccaaacccacaccccgaggg

SEQ ID NO: 485589 - RNA, 18 nt, Human
uggagcucaggccagcag

SEQ ID NO: 485590 - RNA, 19 nt, Human
uggauucuucagcauccuc

SEQ ID NO: 485591 - RNA, 21 nt, Human
uggcccagggcuggccagcgg

SEQ ID NO: 485592 - RNA, 20 nt, Human
uggcuccagggccugggccc

SEQ ID NO: 485593 - RNA, 21 nt, Human
uggcucuccuccaggaccucc

SEQ ID NO: 485594 - RNA, 25 nt, Human
ugggaaaggaacagaagggggcaag

SEQ ID NO: 485595 - RNA, 19 nt, Human
ugggaccccaacuacccag

SEQ ID NO: 485596 - RNA, 24 nt, Human
ugggaccccaacuacccagccccc

SEQ ID NO: 485597 - RNA, 24 nt, Human
ugggagcaagaguaugacuucggg

SEQ ID NO: 485598 - RNA, 19 nt, Human
ugggagggggcaucuuugg

SEQ ID NO: 485599 - RNA, 20 nt, Human
ugggagggggcaucuuuggc

SEQ ID NO: 485600 - RNA, 19 nt, Human
ugggcagggggugugcccu

SEQ ID NO: 485601 - RNA, 20 nt, Human
ugggcgggcccaccggccug

SEQ ID NO: 485602 - RNA, 19 nt, Human
uggggaccagauggcccaa

SEQ ID NO: 485603 - RNA, 24 nt, Human
ugggggcaaggguggggugggagc

SEQ ID NO: 485604 - RNA, 20 nt, Human
ugggggccccaguaccagca

SEQ ID NO: 485605 - RNA, 24 nt, Human
uggggucucccucucuaucucggu

SEQ ID NO: 485606 - RNA, 18 nt, Human
uggggugggagcaagagu

SEQ ID NO: 485607 - RNA, 18 nt, Human
uggguuagcucccggggg

SEQ ID NO: 485608 - RNA, 19 nt, Human
ugguagcaguccagccccc

SEQ ID NO: 485609 - RNA, 24 nt, Human
uggucagaagcaaaagaggggcug

SEQ ID NO: 485610 - RNA, 25 nt, Human
uuaaaaccaacaaaaagaagucucc

SEQ ID NO: 485611 - RNA, 31 nt, Human
uuaaaaccaacaaaaagaagucucccucucc

SEQ ID NO: 485612 - RNA, 24 nt, Human
uucacuuuccugucauaaaaucac

SEQ ID NO: 485613 - RNA, 24 nt, Human
uuccccugccccauuccagggugg

SEQ ID NO: 485614 - RNA, 22 nt, Human
uugccugccugcccucccaggg

SEQ ID NO: 485615 - RNA, 26 nt, Human
uugugggcuuuagggugacccguggg

SEQ ID NO: 485616 - RNA, 23 nt, Human
uuugccuggcugacuaccugcau

SEQ ID NO: 485617 - RNA, 24 nt, Human
uuuuaaauuaaaaccaacaaaaag

SEQ ID NO: 485618 - RNA, 24 nt, Human
aaaauauaacucuagagauaaucu

SEQ ID NO: 485619 - RNA, 22 nt, Human
aaucuuuccaacaaaaacugag

SEQ ID NO: 485620 - RNA, 22 nt, Human
acgacagaccauaauacucucc

SEQ ID NO: 485621 - RNA, 20 nt, Human
acgcucacucucuccccugg

SEQ ID NO: 485622 - RNA, 19 nt, Human
agccaaaaggccacauccc

SEQ ID NO: 485623 - RNA, 19 nt, Human
aggaaggagggaugaaagg

SEQ ID NO: 485624 - RNA, 22 nt, Human
aggaaggagggaugaaaggggc

SEQ ID NO: 485625 - RNA, 20 nt, Human
aggggcuggugggguggggg

SEQ ID NO: 485626 - RNA, 18 nt, Human
agggggaggaaggaggga

SEQ ID NO: 485627 - RNA, 23 nt, Human
aucuuuccaacaaaaacugaggg

SEQ ID NO: 485628 - RNA, 21 nt, Human
augaaaggggcugguggggug

SEQ ID NO: 485629 - RNA, 19 nt, Human
cacgcucacucucuccccu

SEQ ID NO: 485630 - RNA, 27 nt, Human
cagcgcacgacagaccauaauacucuc

SEQ ID NO: 485631 - RNA, 26 nt, Human
ccacaucccacccagaaauaaaaauc

SEQ ID NO: 485632 - RNA, 21 nt, Human
ccagccaaaaggccacauccc

SEQ ID NO: 485633 - RNA, 18 nt, Human
ccccuaggccgcuuccag

SEQ ID NO: 485634 - RNA, 18 nt, Human
ccuaggccgcuuccagga

SEQ ID NO: 485635 - RNA, 20 nt, Human
ccuaggccgcuuccaggagc

SEQ ID NO: 485636 - RNA, 21 nt, Human
cgaguuuuuuuuuuuuuuuuu

SEQ ID NO: 485637 - RNA, 20 nt, Human
cuagagauaaucuuuccaac

SEQ ID NO: 485638 - RNA, 22 nt, Human
cuccccugcucuccuccuggac

SEQ ID NO: 485639 - RNA, 21 nt, Human
cuccuccuggacacacccacc

SEQ ID NO: 485640 - RNA, 23 nt, Human
cucgaguuuuuuuuuuuuuuuuu

SEQ ID NO: 485641 - RNA, 22 nt, Human
cucuagagauaaucuuuccaac

SEQ ID NO: 485642 - RNA, 24 nt, Human
gaccagccaaaaggccacauccca

SEQ ID NO: 485643 - RNA, 19 nt, Human
gaggaaggagggaugaaag

SEQ ID NO: 485644 - RNA, 20 nt, Human
gaguuuuuuuuuuuuuuuuu

SEQ ID NO: 485645 - RNA, 24 nt, Human
ggagcagaaaagcagcagccagcg

SEQ ID NO: 485646 - RNA, 19 nt, Human
ggagggaugaaaggggcug

SEQ ID NO: 485647 - RNA, 25 nt, Human
ggggaggaaggagggaugaaagggg

SEQ ID NO: 485648 - RNA, 24 nt, Human
guuuuuuuuuuuuuuuuucgaguu

SEQ ID NO: 485649 - RNA, 20 nt, Human
ucccacccagaaauaaaaau

SEQ ID NO: 485650 - RNA, 18 nt, Human
uccccugcucuccuccug

SEQ ID NO: 485651 - RNA, 25 nt, Human
ucuuuccaacaaaaacugaggggga

SEQ ID NO: 485652 - RNA, 18 nt, Human
ugaaaggggcuggugggg

SEQ ID NO: 485653 - RNA, 23 nt, Human
ugagggggaggaaggagggauga

SEQ ID NO: 485654 - RNA, 18 nt, Human
uggacacacccacccagc

SEQ ID NO: 485655 - RNA, 22 nt, Human
ugguggggugggggugacauca

SEQ ID NO: 485656 - RNA, 18 nt, Human
uuuuuuuuuuuuuuuucg

SEQ ID NO: 485657 - RNA, 19 nt, Human
agcagacuuucucaggccu

SEQ ID NO: 485658 - RNA, 19 nt, Human
agguacuggagagcagacu

SEQ ID NO: 485659 - RNA, 23 nt, Human
auugaugguuguuugcagagcgg

SEQ ID NO: 485660 - RNA, 23 nt, Human
cagcagcagguacuggagagcag

SEQ ID NO: 485661 - RNA, 19 nt, Human
gacuuucucaggccugugg

SEQ ID NO: 485662 - RNA, 19 nt, Human
gagcagacuuucucaggcc

SEQ ID NO: 485663 - RNA, 21 nt, Human
uacuggagagcagacuuucuc

SEQ ID NO: 485664 - RNA, 22 nt, Human
ugaaacagaucagcagcaggua

SEQ ID NO: 485665 - RNA, 19 nt, Human
ugcagagcgguugaccagg

SEQ ID NO: 485666 - RNA, 23 nt, Human
uuuacuuauucucccacuuaaaa

SEQ ID NO: 485667 - RNA, 28 nt, Human
aaccacuuaaaauuagccaaauaucuaa

SEQ ID NO: 485668 - RNA, 18 nt, Human
cacucgcaccgacccggc

SEQ ID NO: 485669 - RNA, 21 nt, Human
cacucugcccagccgaccacu

SEQ ID NO: 485670 - RNA, 19 nt, Human
cacugcucccgggagugga

SEQ ID NO: 485671 - RNA, 18 nt, Human
cagcuggcaucauuaaua

SEQ ID NO: 485672 - RNA, 22 nt, Human
ccgacccggccaaagaauaggc

SEQ ID NO: 485673 - RNA, 24 nt, Human
ccggccaaagaauaggcuggcugc

SEQ ID NO: 485674 - RNA, 19 nt, Human
cgacccggccaaagaauag

SEQ ID NO: 485675 - RNA, 21 nt, Human
cucugcccagccgaccacucg

SEQ ID NO: 485676 - RNA, 22 nt, Human
cugcccagccgaccacucgcac

SEQ ID NO: 485677 - RNA, 22 nt, Human
gccgaccacucgcaccgacccg

SEQ ID NO: 485678 - RNA, 20 nt, Human
gggaucagccugcggcgcca

SEQ ID NO: 485679 - RNA, 24 nt, Human
uaaaaccuaaguuaaaaacuguac

SEQ ID NO: 485680 - RNA, 21 nt, Human
uaaguuaaaaacuguacacca

SEQ ID NO: 485681 - RNA, 20 nt, Human
ucuaagacagauacauauac

SEQ ID NO: 485682 - RNA, 19 nt, Human
ugagugauuuacaucuuag

SEQ ID NO: 485683 - RNA, 21 nt, Human
ugcacucugcccagccgacca

SEQ ID NO: 485684 - RNA, 19 nt, Human
uuuuuuaaguuuuccaaau

SEQ ID NO: 485685 - RNA, 19 nt, Human
aaaaagggcacaaugaagc

SEQ ID NO: 485686 - RNA, 19 nt, Human
aagcacacauccccagggc

SEQ ID NO: 485687 - RNA, 23 nt, Human
acaaaaucaagaguucuaaacca

SEQ ID NO: 485688 - RNA, 25 nt, Human
agcgcuggggaucuucgacgcuguu

SEQ ID NO: 485689 - RNA, 21 nt, Human
ccgagcccgcagcgcugggga

SEQ ID NO: 485690 - RNA, 20 nt, Human
cggcccagggagggacgcgg

SEQ ID NO: 485691 - RNA, 22 nt, Human
cggggaaggcaagagugccagc

SEQ ID NO: 485692 - RNA, 20 nt, Human
gaagcacacauccccagggc

SEQ ID NO: 485693 - RNA, 22 nt, Human
gaagcacacauccccagggccc

SEQ ID NO: 485694 - RNA, 22 nt, Human
ggggaucuucgacgcuguagcc

SEQ ID NO: 485695 - RNA, 20 nt, Human
uaccuuaagaaaaaccaauc

SEQ ID NO: 485696 - RNA, 18 nt, Human
ucuaaaccaauaagaaaa

SEQ ID NO: 485697 - RNA, 18 nt, Human
ugaagcacacauccccag

SEQ ID NO: 485698 - RNA, 18 nt, Human
ugaagcacacauccccag

SEQ ID NO: 485699 - RNA, 19 nt, Human
ugaagcacacauccccagg

SEQ ID NO: 485700 - RNA, 22 nt, Human
uucuaaaccaauaagaaaaagg

SEQ ID NO: 485701 - RNA, 25 nt, Human
uuuuuuuuuuuuuuuuuuaccuuaa

SEQ ID NO: 485702 - RNA, 21 nt, Human
aacauagaauaaauauacccu

SEQ ID NO: 485703 - RNA, 25 nt, Human
aaccaguccacaagaauggcccuca

SEQ ID NO: 485704 - RNA, 25 nt, Human
aagaaacuguaauccaguuccagac

SEQ ID NO: 485705 - RNA, 21 nt, Human
acaccugcaccuccaccaacc

SEQ ID NO: 485706 - RNA, 24 nt, Human
accugcaccuccaccaaccagucc

SEQ ID NO: 485707 - RNA, 22 nt, Human
agacaaauucgaacauagaaua

SEQ ID NO: 485708 - RNA, 22 nt, Human
agacaaauucgaacauagaaua

SEQ ID NO: 485709 - RNA, 20 nt, Human
agagauccaccagcuucacu

SEQ ID NO: 485710 - RNA, 22 nt, Human
agcgggacaaggucagugucuu

SEQ ID NO: 485711 - RNA, 23 nt, Human
aggaguaaggaggcagcagcuag

SEQ ID NO: 485712 - RNA, 22 nt, Human
aguaccaggcccugagccucac

SEQ ID NO: 485713 - RNA, 22 nt, Human
aucgcugauaauuaucaucaca

SEQ ID NO: 485714 - RNA, 18 nt, Human
caaaaucuccuccagcuu

SEQ ID NO: 485715 - RNA, 21 nt, Human
caccuccaccaaccaguccac

SEQ ID NO: 485716 - RNA, 24 nt, Human
caccugcaccuccaccaaccaguc

SEQ ID NO: 485717 - RNA, 22 nt, Human
cacgaggugaguugugcuccuc

SEQ ID NO: 485718 - RNA, 22 nt, Human
caggauguugauuuccaugcug

SEQ ID NO: 485719 - RNA, 18 nt, Human
ccaccaaccaguccacaa

SEQ ID NO: 485720 - RNA, 19 nt, Human
ccaguccacaagaauggcc

SEQ ID NO: 485721 - RNA, 24 nt, Human
ccuccagcuucaacauauccaagg

SEQ ID NO: 485722 - RNA, 23 nt, Human
cgaacauagaauaaauauacccu

SEQ ID NO: 485723 - RNA, 19 nt, Human
cgcagaaaaugguaggcga

SEQ ID NO: 485724 - RNA, 22 nt, Human
cgcagaaaaugguaggcgaugg

SEQ ID NO: 485725 - RNA, 23 nt, Human
cgucuuguccaaggcagggauug

SEQ ID NO: 485726 - RNA, 19 nt, Human
cucaaaggacaccugcacc

SEQ ID NO: 485727 - RNA, 22 nt, Human
cugcaccuccaccaaccagucc

SEQ ID NO: 485728 - RNA, 19 nt, Human
gaagcucagagauacugua

SEQ ID NO: 485729 - RNA, 24 nt, Human
gauguacacaaagucauccacacg

SEQ ID NO: 485730 - RNA, 21 nt, Human
gcccuguggcugcugcuagag

SEQ ID NO: 485731 - RNA, 22 nt, Human
ggaaaagacaaagaaaggaaaa

SEQ ID NO: 485732 - RNA, 24 nt, Human
guugugcuccucaaauuuugcugc

SEQ ID NO: 485733 - RNA, 22 nt, Human
uaaaggcaguggcaccaaggag

SEQ ID NO: 485734 - RNA, 23 nt, Human
uaaguauaaacuguuccucucuc

SEQ ID NO: 485735 - RNA, 22 nt, Human
uaccaggcccugagccucacaa

SEQ ID NO: 485736 - RNA, 19 nt, Human
uagcuuggaagccuucucc

SEQ ID NO: 485737 - RNA, 23 nt, Human
ucaaaagacaaauucgaacauag

SEQ ID NO: 485738 - RNA, 23 nt, Human
ucaaaagacaaauucgaacauag

SEQ ID NO: 485739 - RNA, 22 nt, Human
ucaaaaucuccuccagcuucaa

SEQ ID NO: 485740 - RNA, 24 nt, Human
ucaaagaagaccgggugagaauac

SEQ ID NO: 485741 - RNA, 22 nt, Human
ucaaucagaagaaacuguaauc

SEQ ID NO: 485742 - RNA, 22 nt, Human
ucagcugucugaccaaggggug

SEQ ID NO: 485743 - RNA, 22 nt, Human
uccaccaaccaguccacaagaa

SEQ ID NO: 485744 - RNA, 20 nt, Human
uccaugcugaguaccucaga

SEQ ID NO: 485745 - RNA, 19 nt, Human
ucuuguccaaggcagggau

SEQ ID NO: 485746 - RNA, 26 nt, Human
ugagccucacaaucacaggacccguc

SEQ ID NO: 485747 - RNA, 21 nt, Human
ugagccucacaaucacaguuc

SEQ ID NO: 485748 - RNA, 22 nt, Human
ugauuuccaugcugaguaccuc

SEQ ID NO: 485749 - RNA, 21 nt, Human
ugcaccuccaccaaccagucc

SEQ ID NO: 485750 - RNA, 22 nt, Human
ugcuuagcccuguggcugcugc

SEQ ID NO: 485751 - RNA, 24 nt, Human
uggcugcugcuagaguaccaggcc

SEQ ID NO: 485752 - RNA, 22 nt, Human
ugggaaaagacaaagaaaggaa

SEQ ID NO: 485753 - RNA, 22 nt, Human
ugggaaaagacaaagaaaggaa

SEQ ID NO: 485754 - RNA, 21 nt, Human
uguaauccaguuccagacacc

SEQ ID NO: 485755 - RNA, 22 nt, Human
uguaauccaguuccagacaccu

SEQ ID NO: 485756 - RNA, 25 nt, Human
uguacacaaagucauccacacgagg

SEQ ID NO: 485757 - RNA, 19 nt, Human
ugugcuccucaaauuuugc

SEQ ID NO: 485758 - RNA, 18 nt, Human
uguuccucucucucuuuc

SEQ ID NO: 485759 - RNA, 22 nt, Human
uucaaagaagaccgggugagaa

SEQ ID NO: 485760 - RNA, 24 nt, Human
uucaaucagaagaaacuguaaucc

SEQ ID NO: 485761 - RNA, 26 nt, Human
uucagcugcgucuuguccguccaccg

SEQ ID NO: 485762 - RNA, 25 nt, Human
uucagcugcgucuuguccguccacg

SEQ ID NO: 485763 - RNA, 24 nt, Human
uuggaagccuucuccuggacauag

SEQ ID NO: 485764 - RNA, 18 nt, Human
uuggcgacuucaaagaag

SEQ ID NO: 485765 - RNA, 25 nt, Human
aaacgcacgccuccgcugcaacaga

SEQ ID NO: 485766 - RNA, 24 nt, Human
aacagacagaagagaacguggagc

SEQ ID NO: 485767 - RNA, 24 nt, Human
aaccuauaagcauucaauaaaaaa

SEQ ID NO: 485768 - RNA, 22 nt, Human
aacgcuugcccgcaaccaccug

SEQ ID NO: 485769 - RNA, 18 nt, Human
aagcaaacgcacgccucc

SEQ ID NO: 485770 - RNA, 24 nt, Human
acaacgcuugcccgcaaccaccug

SEQ ID NO: 485771 - RNA, 23 nt, Human
acccacuuauuuaaaaaaaaccu

SEQ ID NO: 485772 - RNA, 24 nt, Human
acggcaguggcggcggcggcgccu

SEQ ID NO: 485773 - RNA, 18 nt, Human
agacagaagagaacgugg

SEQ ID NO: 485774 - RNA, 20 nt, Human
agagggcagcccccugccca

SEQ ID NO: 485775 - RNA, 22 nt, Human
agagggcagcccccugcccagc

SEQ ID NO: 485776 - RNA, 27 nt, Human
aggcggcggcggcgacggcaguggcgg

SEQ ID NO: 485777 - RNA, 24 nt, Human
aguggcggcggcggcgccgggagu

SEQ ID NO: 485778 - RNA, 22 nt, Human
auaaaaaacacuuugcccuguu

SEQ ID NO: 485779 - RNA, 21 nt, Human
auggggcugcuccggccugag

SEQ ID NO: 485780 - RNA, 22 nt, Human
auucaauaaaaaacacuuugcc

SEQ ID NO: 485781 - RNA, 20 nt, Human
caaccaccugcuccacuugg

SEQ ID NO: 485782 - RNA, 21 nt, Human
caaccaccugcuccacuuggu

SEQ ID NO: 485783 - RNA, 18 nt, Human
cagaacaccugcgaggag

SEQ ID NO: 485784 - RNA, 25 nt, Human
ccagaacaccugcgaggagagccac

SEQ ID NO: 485785 - RNA, 18 nt, Human
cccagaacaccugcgagg

SEQ ID NO: 485786 - RNA, 24 nt, Human
cccccugcccagcuggcuaugggc

SEQ ID NO: 485787 - RNA, 22 nt, Human
cccuacaccgcgcuggcggccg

SEQ ID NO: 485788 - RNA, 22 nt, Human
cccugcccagcuggcuaugggg

SEQ ID NO: 485789 - RNA, 20 nt, Human
cccuguuugaugccauccac

SEQ ID NO: 485790 - RNA, 20 nt, Human
ccgcgccugcccccuacacc

SEQ ID NO: 485791 - RNA, 24 nt, Human
ccgcgccugcccccuacaccgcgc

SEQ ID NO: 485792 - RNA, 21 nt, Human
ccgcuccuucgcaucccugug

SEQ ID NO: 485793 - RNA, 21 nt, Human
ccggcaggcggcggcggcgac

SEQ ID NO: 485794 - RNA, 19 nt, Human
ccuccacagcuucaagcuu

SEQ ID NO: 485795 - RNA, 22 nt, Human
ccuccgcugcaacagacagaag

SEQ ID NO: 485796 - RNA, 24 nt, Human
cgacggcaguggcggcggcggcgc

SEQ ID NO: 485797 - RNA, 24 nt, Human
cgaggagagccacgccaccguggc

SEQ ID NO: 485798 - RNA, 27 nt, Human
cgcaaccaccugcuccacuugguacaa

SEQ ID NO: 485799 - RNA, 21 nt, Human
cuccacuugguacaacggagc

SEQ ID NO: 485800 - RNA, 22 nt, Human
cuccuucgcaucccuguggacc

SEQ ID NO: 485801 - RNA, 19 nt, Human
gagcccagaacaccugcga

SEQ ID NO: 485802 - RNA, 23 nt, Human
gcaggcggcggcggcgacggcag

SEQ ID NO: 485803 - RNA, 21 nt, Human
gcccuguuugaugccauccac

SEQ ID NO: 485804 - RNA, 22 nt, Human
gccugaggccagggucuugucc

SEQ ID NO: 485805 - RNA, 26 nt, Human
gcggcgacggcaguggcggcggcggc

SEQ ID NO: 485806 - RNA, 19 nt, Human
gcggcggcggcgacggcag

SEQ ID NO: 485807 - RNA, 21 nt, Human
ggcaguggcggcggcggcgcc

SEQ ID NO: 485808 - RNA, 18 nt, Human
gggcagcccccugcccag

SEQ ID NO: 485809 - RNA, 18 nt, Human
guggcggcggcggcgccg

SEQ ID NO: 485810 - RNA, 19 nt, Human
uaaaaaaaaccuauaagca

SEQ ID NO: 485811 - RNA, 19 nt, Human
uaaaagcaaacgcacgccu

SEQ ID NO: 485812 - RNA, 19 nt, Human
uacaaaacaguucaucaaa

SEQ ID NO: 485813 - RNA, 20 nt, Human
uacaaaacaguucaucaaag

SEQ ID NO: 485814 - RNA, 21 nt, Human
uacaacggagcccagaacacc

SEQ ID NO: 485815 - RNA, 21 nt, Human
uagcagcacuuacaaaacagu

SEQ ID NO: 485816 - RNA, 19 nt, Human
uauagcagcacuuacaaaa

SEQ ID NO: 485817 - RNA, 21 nt, Human
uaucuuuauuaaaaaauggau

SEQ ID NO: 485818 - RNA, 20 nt, Human
uccacuugguacaacggagc

SEQ ID NO: 485819 - RNA, 23 nt, Human
ugcuccacuugguacaacggagc

SEQ ID NO: 485820 - RNA, 20 nt, Human
uggaagaaacacucuuccau

SEQ ID NO: 485821 - RNA, 21 nt, Human
uggagcaggcgcgcaacuguc

SEQ ID NO: 485822 - RNA, 18 nt, Human
uggcggcggcggcgccgg

SEQ ID NO: 485823 - RNA, 19 nt, Human
uggcggcggcggcgccggg

SEQ ID NO: 485824 - RNA, 19 nt, Human
uggugucuggagguggcug

SEQ ID NO: 485825 - RNA, 18 nt, Human
ugucccgcuccuucgcaa

SEQ ID NO: 485826 - RNA, 21 nt, Human
aaaaaaaaaauuccuuaggga

SEQ ID NO: 485827 - RNA, 22 nt, Human
aaacaaacuauacagaagacuu

SEQ ID NO: 485828 - RNA, 21 nt, Human
aaacauugcuaugguauagac

SEQ ID NO: 485829 - RNA, 18 nt, Human
aaacuaaaccuuuguaaa

SEQ ID NO: 485830 - RNA, 18 nt, Human
aacacuggauuaaaggaa

SEQ ID NO: 485831 - RNA, 24 nt, Human
aagaaaauagaaguuuaggucaag

SEQ ID NO: 485832 - RNA, 23 nt, Human
aagauaaacacaguaacacugga

SEQ ID NO: 485833 - RNA, 24 nt, Human
aagcaaccuacaugucaagaaagc

SEQ ID NO: 485834 - RNA, 22 nt, Human
aaggaaaaacauugcuauggua

SEQ ID NO: 485835 - RNA, 19 nt, Human
aaucuaguuuucuaaucua

SEQ ID NO: 485836 - RNA, 22 nt, Human
aaucuuggugaauuccaacuug

SEQ ID NO: 485837 - RNA, 19 nt, Human
aaugaagacaucuuuguaa

SEQ ID NO: 485838 - RNA, 23 nt, Human
aauuucuuugguacucccacugu

SEQ ID NO: 485839 - RNA, 23 nt, Human
acaauggaggaauuuagaaagga

SEQ ID NO: 485840 - RNA, 21 nt, Human
accagcuaccgcucggcucag

SEQ ID NO: 485841 - RNA, 21 nt, Human
accuacaugucaagaaagccc

SEQ ID NO: 485842 - RNA, 23 nt, Human
acuagcaaucuaguuuucuaauc

SEQ ID NO: 485843 - RNA, 21 nt, Human
acuuauccaguccaaaacucc

SEQ ID NO: 485844 - RNA, 21 nt, Human
agagcacagguugaacaccau

SEQ ID NO: 485845 - RNA, 21 nt, Human
aggaaaaacauugcuauggua

SEQ ID NO: 485846 - RNA, 21 nt, Human
aggaaggagccacagcauuua

SEQ ID NO: 485847 - RNA, 19 nt, Human
aguaaccuugggaaugaag

SEQ ID NO: 485848 - RNA, 19 nt, Human
aguuucuucaaagggagaa

SEQ ID NO: 485849 - RNA, 18 nt, Human
auaaagccuuagucacac

SEQ ID NO: 485850 - RNA, 18 nt, Human
auagauaaauuagucacc

SEQ ID NO: 485851 - RNA, 18 nt, Human
auauguacacaauuagug

SEQ ID NO: 485852 - RNA, 22 nt, Human
aucaagauaaacacaguaacac

SEQ ID NO: 485853 - RNA, 20 nt, Human
caagaaccaaauugcacuag

SEQ ID NO: 485854 - RNA, 22 nt, Human
caagauaaacacaguaacacug

SEQ ID NO: 485855 - RNA, 27 nt, Human
caagcaaccuacaugucaagaaagccc

SEQ ID NO: 485856 - RNA, 24 nt, Human
cacaauggaggaauuuagaaagga

SEQ ID NO: 485857 - RNA, 19 nt, Human
cagaauggcaguguaacuu

SEQ ID NO: 485858 - RNA, 18 nt, Human
caguauuaaaagguuaag

SEQ ID NO: 485859 - RNA, 22 nt, Human
caguauuaaaagguuaaguuua

SEQ ID NO: 485860 - RNA, 20 nt, Human
ccaacuuguuugcuuaguua

SEQ ID NO: 485861 - RNA, 22 nt, Human
ccgggccggucccgccccgcac

SEQ ID NO: 485862 - RNA, 20 nt, Human
ccuacaugucaagaaagccc

SEQ ID NO: 485863 - RNA, 21 nt, Human
ccuuuguaaacaaguuuaaau

SEQ ID NO: 485864 - RNA, 22 nt, Human
cuaaaaauaaacaguauuaaaa

SEQ ID NO: 485865 - RNA, 23 nt, Human
gcaaccuacaugucaagaaagcc

SEQ ID NO: 485866 - RNA, 19 nt, Human
gcaaucuaguuuucuaauc

SEQ ID NO: 485867 - RNA, 23 nt, Human
gcacuuauccaguccaaaacucc

SEQ ID NO: 485868 - RNA, 20 nt, Human
gggaaugaagacaucuuugu

SEQ ID NO: 485869 - RNA, 23 nt, Human
guaaaacuuuaguaguucaguga

SEQ ID NO: 485870 - RNA, 21 nt, Human
uaaaaaauguguuauggcaag

SEQ ID NO: 485871 - RNA, 18 nt, Human
uaaaacuuuaguaguuca

SEQ ID NO: 485872 - RNA, 23 nt, Human
uaaacacaguaacacuggauuaa

SEQ ID NO: 485873 - RNA, 22 nt, Human
uacagcaaguuuucaugucuuu

SEQ ID NO: 485874 - RNA, 27 nt, Human
uaggaaggagccacagcauuuaucuug

SEQ ID NO: 485875 - RNA, 19 nt, Human
uauagauaaauuagucacc

SEQ ID NO: 485876 - RNA, 19 nt, Human
uauaguuucuucaaaggga

SEQ ID NO: 485877 - RNA, 22 nt, Human
uaucaagauaaacacaguaaca

SEQ ID NO: 485878 - RNA, 21 nt, Human
ucaagaaagccccaguuagga

SEQ ID NO: 485879 - RNA, 23 nt, Human
ucugauaacaaaauaaacuagca

SEQ ID NO: 485880 - RNA, 26 nt, Human
ugaauuccaacuuguuugcuuaguua

SEQ ID NO: 485881 - RNA, 25 nt, Human
ugauaacaaaauaaacuagcaaucu

SEQ ID NO: 485882 - RNA, 18 nt, Human
uggauuaaaggaaaaaca

SEQ ID NO: 485883 - RNA, 20 nt, Human
uggauuaucugggcuucuug

SEQ ID NO: 485884 - RNA, 23 nt, Human
uggcugggcuggggcugcugcuu

SEQ ID NO: 485885 - RNA, 20 nt, Human
ugguauagacugugguuggc

SEQ ID NO: 485886 - RNA, 21 nt, Human
ugguauagacugugguuggcc

SEQ ID NO: 485887 - RNA, 21 nt, Human
uguaaaacuuuaguaguucag

SEQ ID NO: 485888 - RNA, 25 nt, Human
uguaaacaaguccugcuguuucuuu

SEQ ID NO: 485889 - RNA, 23 nt, Human
uguaaacggcuacuucgucuuga

SEQ ID NO: 485890 - RNA, 21 nt, Human
uuagagcacagguugaacacc

SEQ ID NO: 485891 - RNA, 23 nt, Human
uuagagcacagguugaacaccau

SEQ ID NO: 485892 - RNA, 24 nt, Human
uuaucaagauaaacacaguaacac

SEQ ID NO: 485893 - RNA, 21 nt, Human
uucacaaacauaaauaaagcc

SEQ ID NO: 485894 - RNA, 22 nt, Human
uucacaaacauaaauaaagccu

SEQ ID NO: 485895 - RNA, 23 nt, Human
uuuaaaaacaaacuauacagaag

SEQ ID NO: 485896 - RNA, 20 nt, Human
uuuuccucuucuuggccugg

SEQ ID NO: 485897 - RNA, 21 nt, Human
uuuuuagaaaagcuaauuuaa

SEQ ID NO: 485898 - RNA, 24 nt, Human
uuuuuuuuuuuuuuuuuuacuuuu

SEQ ID NO: 485899 - RNA, 27 nt, Human
uuuuuuuuuuuuuuuuuuuacuuuuaa

SEQ ID NO: 485900 - RNA, 22 nt, Human
aaacuaccuauucccccauuua

SEQ ID NO: 485901 - RNA, 19 nt, Human
acuagcagauuauggauuu

SEQ ID NO: 485902 - RNA, 20 nt, Human
agcauacucacucuucugag

SEQ ID NO: 485903 - RNA, 20 nt, Human
aggaaacuaccuauuccccc

SEQ ID NO: 485904 - RNA, 21 nt, Human
auaaaauauacuacaccagau

SEQ ID NO: 485905 - RNA, 21 nt, Human
auaaaauauacuacaccagau

SEQ ID NO: 485906 - RNA, 23 nt, Human
caaaggcaaauaaaauguaauca

SEQ ID NO: 485907 - RNA, 21 nt, Human
cacccgcccgcggccucgcgg

SEQ ID NO: 485908 - RNA, 21 nt, Human
ccaaaguagcuaaagaucuac

SEQ ID NO: 485909 - RNA, 19 nt, Human
cgcacggacugggcgcagc

SEQ ID NO: 485910 - RNA, 18 nt, Human
cuccuccccaaaguagcu

SEQ ID NO: 485911 - RNA, 21 nt, Human
cuucugagaaggggggagggu

SEQ ID NO: 485912 - RNA, 20 nt, Human
cuugcauacuuccaaucugc

SEQ ID NO: 485913 - RNA, 19 nt, Human
gcccgcggccucgcggucc

SEQ ID NO: 485914 - RNA, 24 nt, Human
gcgggggcuuccaaaccugucucg

SEQ ID NO: 485915 - RNA, 18 nt, Human
ggagacgcgccuccaccc

SEQ ID NO: 485916 - RNA, 23 nt, Human
uaaaauaauaccauaguuugaca

SEQ ID NO: 485917 - RNA, 19 nt, Human
uaaagugccaaugucuaaa

SEQ ID NO: 485918 - RNA, 21 nt, Human
ucaacauuuaucaauuccaua

SEQ ID NO: 485919 - RNA, 18 nt, Human
uccaaucugcuuaaagac

SEQ ID NO: 485920 - RNA, 24 nt, Human
uccccaaaguagcuaaagaucuac

SEQ ID NO: 485921 - RNA, 21 nt, Human
ucucgcaggucggggacccac

SEQ ID NO: 485922 - RNA, 18 nt, Human
ugaauaacaaauagaagg

SEQ ID NO: 485923 - RNA, 20 nt, Human
ugagaaggggggagggugaa

SEQ ID NO: 485924 - RNA, 24 nt, Human
ugaguuuucaacuuacugcacugu

SEQ ID NO: 485925 - RNA, 21 nt, Human
ugcaaaacuagcagauuaugg

SEQ ID NO: 485926 - RNA, 18 nt, Human
ugggcgcagcgggggcuu

SEQ ID NO: 485927 - RNA, 21 nt, Human
uggggcaauaggaaugaaaac

SEQ ID NO: 485928 - RNA, 20 nt, Human
uuaacacaaaucucaauuaa

SEQ ID NO: 485929 - RNA, 22 nt, Human
uucccuccuccccaaaguagcu

SEQ ID NO: 485930 - RNA, 22 nt, Human
aaaaaaaaaaaaagaaagggga

SEQ ID NO: 485931 - RNA, 22 nt, Human
aaaaaaaaaaaagaaaggggaa

SEQ ID NO: 485932 - RNA, 25 nt, Human
aaaaaaaaaaagaaaggggaaaggg

SEQ ID NO: 485933 - RNA, 22 nt, Human
aaaaaaaaaagaaaggggaaag

SEQ ID NO: 485934 - RNA, 23 nt, Human
aaaaaaaaaagaaaggggaaagg

SEQ ID NO: 485935 - RNA, 18 nt, Human
aaaaaagaaaggggaaag

SEQ ID NO: 485936 - RNA, 19 nt, Human
aaaaauaagaaaaagcgag

SEQ ID NO: 485937 - RNA, 25 nt, Human
aaagaaaaaaaaaaaaagaaagggg

SEQ ID NO: 485938 - RNA, 23 nt, Human
aaauaagaaaaagcgagacagag

SEQ ID NO: 485939 - RNA, 19 nt, Human
aagggggggaggggagaaa

SEQ ID NO: 485940 - RNA, 24 nt, Human
acgcugaauuauaauuagccacac

SEQ ID NO: 485941 - RNA, 21 nt, Human
agagcuguaggccucacagug

SEQ ID NO: 485942 - RNA, 19 nt, Human
aggcggggggugagaccgg

SEQ ID NO: 485943 - RNA, 23 nt, Human
aggcggugcgcgcgggacgacuc

SEQ ID NO: 485944 - RNA, 28 nt, Human
cccagcuugcuguagcuaccuucuccuc

SEQ ID NO: 485945 - RNA, 22 nt, Human
cccggggaaagcgccuccgagg

SEQ ID NO: 485946 - RNA, 21 nt, Human
ccggccugaggccgccgccgc

SEQ ID NO: 485947 - RNA, 23 nt, Human
ccggccugaggccgccgccgcuc

SEQ ID NO: 485948 - RNA, 18 nt, Human
ccuccucuuccuccuccu

SEQ ID NO: 485949 - RNA, 20 nt, Human
ccuccucuuccuccuccucc

SEQ ID NO: 485950 - RNA, 21 nt, Human
ccuccucuuccuccuccuccu

SEQ ID NO: 485951 - RNA, 20 nt, Human
ccugcuacccagcuugcugu

SEQ ID NO: 485952 - RNA, 21 nt, Human
cgggacgacucggccaacuga

SEQ ID NO: 485953 - RNA, 19 nt, Human
cuaccuucuccuccucuuc

SEQ ID NO: 485954 - RNA, 22 nt, Human
cucauucccaaaguagucuacc

SEQ ID NO: 485955 - RNA, 22 nt, Human
cuccuccucuuccuccuccucc

SEQ ID NO: 485956 - RNA, 24 nt, Human
cucgccauagggcggcgggggccg

SEQ ID NO: 485957 - RNA, 18 nt, Human
cugcggccgcugggucgg

SEQ ID NO: 485958 - RNA, 20 nt, Human
cuguagcuaccuucuccucc

SEQ ID NO: 485959 - RNA, 19 nt, Human
cuucuccuccucuuccucc

SEQ ID NO: 485960 - RNA, 21 nt, Human
cuuuggaucugccugcuaccc

SEQ ID NO: 485961 - RNA, 19 nt, Human
gagaccggcucugccccug

SEQ ID NO: 485962 - RNA, 19 nt, Human
gaguuuuauuuuuuuuuuc

SEQ ID NO: 485963 - RNA, 20 nt, Human
gccugaggccgccgccgcuc

SEQ ID NO: 485964 - RNA, 21 nt, Human
gcuguagcuaccuucuccucc

SEQ ID NO: 485965 - RNA, 25 nt, Human
ggcgcgggcgcgggcgcuggcgcuc

SEQ ID NO: 485966 - RNA, 27 nt, Human
gggaaaaauaagaaaaagccgguaccc

SEQ ID NO: 485967 - RNA, 18 nt, Human
gggaaaggggggaaaaau

SEQ ID NO: 485968 - RNA, 22 nt, Human
gggccggggagaggcggggggu

SEQ ID NO: 485969 - RNA, 21 nt, Human
gggggugagaccggcucugcc

SEQ ID NO: 485970 - RNA, 19 nt, Human
ggugaaagggggggagggg

SEQ ID NO: 485971 - RNA, 19 nt, Human
uaccuucuccuccucuucc

SEQ ID NO: 485972 - RNA, 24 nt, Human
uagccacacaaauaaugagaguuu

SEQ ID NO: 485973 - RNA, 23 nt, Human
uaguuuacacucaaagguagcac

SEQ ID NO: 485974 - RNA, 22 nt, Human
ucaaagguagcacuuguugaaa

SEQ ID NO: 485975 - RNA, 24 nt, Human
ucccaaaguagucuaccuuaguuu

SEQ ID NO: 485976 - RNA, 23 nt, Human
ucgagcgggacgcacggcugcgg

SEQ ID NO: 485977 - RNA, 19 nt, Human
uuaaauaacgcugaauuau

SEQ ID NO: 485978 - RNA, 24 nt, Human
uuccugauuuugcauguucucauu

SEQ ID NO: 485979 - RNA, 21 nt, Human
uucucauaggcgcgcggaggc

SEQ ID NO: 485980 - RNA, 22 nt, Human
uuuggaucugccugcuacccag

SEQ ID NO: 485981 - RNA, 18 nt, Human
uuuuuuuuuuuuuuuuug

SEQ ID NO: 485982 - RNA, 24 nt, Human
uuuuuuuuuuuuuuuuuggucuuu

SEQ ID NO: 485983 - RNA, 22 nt, Human
aaaagaagagagauucugaaaa

SEQ ID NO: 485984 - RNA, 19 nt, Human
aaaccagaaggcuuagaug

SEQ ID NO: 485985 - RNA, 21 nt, Human
aacauaucacccaacuugaaa

SEQ ID NO: 485986 - RNA, 25 nt, Human
aagaacaaaaagaagggaaaccaac

SEQ ID NO: 485987 - RNA, 23 nt, Human
aagccccagaagccucagaagcc

SEQ ID NO: 485988 - RNA, 20 nt, Human
aagggcuuucuuaguuccac

SEQ ID NO: 485989 - RNA, 20 nt, Human
aagugggugacuuuguugac

SEQ ID NO: 485990 - RNA, 20 nt, Human
aauuccucauacaucagugu

SEQ ID NO: 485991 - RNA, 22 nt, Human
acaaaucugaaaucuugcuuga

SEQ ID NO: 485992 - RNA, 24 nt, Human
agaaauuccucauacaucaguguc

SEQ ID NO: 485993 - RNA, 21 nt, Human
agccauuagaaucuaccaaca

SEQ ID NO: 485994 - RNA, 18 nt, Human
agcccacucccugaauug

SEQ ID NO: 485995 - RNA, 21 nt, Human
agccccagaagccucagaagc

SEQ ID NO: 485996 - RNA, 21 nt, Human
auggaaaagacugaagcccca

SEQ ID NO: 485997 - RNA, 19 nt, Human
caaaugcuaauggucacaa

SEQ ID NO: 485998 - RNA, 23 nt, Human
caaguccaagauggcagucggaa

SEQ ID NO: 485999 - RNA, 18 nt, Human
caauagugggaagugggu

SEQ ID NO: 486000 - RNA, 23 nt, Human
cagaaccuggcugggagagccag

SEQ ID NO: 486001 - RNA, 19 nt, Human
cagaagccucagaagcccc

SEQ ID NO: 486002 - RNA, 24 nt, Human
cagaaggcuuagaugaagaacaaa

SEQ ID NO: 486003 - RNA, 19 nt, Human
caucuucuuucuaccaggg

SEQ ID NO: 486004 - RNA, 21 nt, Human
cauggaaaagacugaagcccc

SEQ ID NO: 486005 - RNA, 23 nt, Human
ccacucccugaauuguuugauuu

SEQ ID NO: 486006 - RNA, 23 nt, Human
cccacagucaccacuacuggguu

SEQ ID NO: 486007 - RNA, 19 nt, Human
ccccagaagccucagaagc

SEQ ID NO: 486008 - RNA, 27 nt, Human
cccccauuucuauuucuccucuucggg

SEQ ID NO: 486009 - RNA, 24 nt, Human
cuacuggguuuaauugguuugugc

SEQ ID NO: 486010 - RNA, 21 nt, Human
cucauacaucagugucuccca

SEQ ID NO: 486011 - RNA, 20 nt, Human
cucucuaucccaaguggcug

SEQ ID NO: 486012 - RNA, 18 nt, Human
cucucugguuccaaggga

SEQ ID NO: 486013 - RNA, 18 nt, Human
cugugccaagagucagaa

SEQ ID NO: 486014 - RNA, 19 nt, Human
cuuaguuccacugccagca

SEQ ID NO: 486015 - RNA, 18 nt, Human
gaaaucacuauuuccaag

SEQ ID NO: 486016 - RNA, 19 nt, Human
gaacaaaaagaagggaaac

SEQ ID NO: 486017 - RNA, 18 nt, Human
gaggcagaugcuggcuac

SEQ ID NO: 486018 - RNA, 23 nt, Human
gccccagaagccucagaagcccc

SEQ ID NO: 486019 - RNA, 23 nt, Human
gcugcaauaaagccauuagaauc

SEQ ID NO: 486020 - RNA, 24 nt, Human
ggaaaagacugaagccccagaagc

SEQ ID NO: 486021 - RNA, 18 nt, Human
ggaauauuugguuuugcu

SEQ ID NO: 486022 - RNA, 23 nt, Human
ggaggguggcggggggggggagg

SEQ ID NO: 486023 - RNA, 21 nt, Human
ggggggggaggugauggaaga

SEQ ID NO: 486024 - RNA, 23 nt, Human
ggggggggggaggugauggaaga

SEQ ID NO: 486025 - RNA, 18 nt, Human
uaaaaauucuuccuaagg

SEQ ID NO: 486026 - RNA, 23 nt, Human
uaauggucacaaaucugaaaucu

SEQ ID NO: 486027 - RNA, 23 nt, Human
uaccaacauaucacccaacuuga

SEQ ID NO: 486028 - RNA, 22 nt, Human
uauuugguuuugcucauucauc

SEQ ID NO: 486029 - RNA, 18 nt, Human
ucacuauuuccaaguucu

SEQ ID NO: 486030 - RNA, 21 nt, Human
ucaugaguucuauguucccca

SEQ ID NO: 486031 - RNA, 20 nt, Human
uccaagagcccaaauccugc

SEQ ID NO: 486032 - RNA, 21 nt, Human
uccaagagcccaaauccugcg

SEQ ID NO: 486033 - RNA, 18 nt, Human
ucccauggcuuaggagcu

SEQ ID NO: 486034 - RNA, 18 nt, Human
ucuaucccaaguggcugu

SEQ ID NO: 486035 - RNA, 18 nt, Human
ucucugguacacuuaguc

SEQ ID NO: 486036 - RNA, 20 nt, Human
ucugaaaaauagucagaaaa

SEQ ID NO: 486037 - RNA, 18 nt, Human
ugaagaacaaaaagaagg

SEQ ID NO: 486038 - RNA, 25 nt, Human
ugcaauaaagccauuagaaucuacc

SEQ ID NO: 486039 - RNA, 30 nt, Human
uggaaaagacugaagccccagaagccucag

SEQ ID NO: 486040 - RNA, 22 nt, Human
uggaagaacagaaauuccucau

SEQ ID NO: 486041 - RNA, 18 nt, Human
uggcagugggaggguggc

SEQ ID NO: 486042 - RNA, 24 nt, Human
uggcagugggaggguggcgggggg

SEQ ID NO: 486043 - RNA, 20 nt, Human
uggcucagugugccuggcag

SEQ ID NO: 486044 - RNA, 18 nt, Human
uggcugggagagccaggc

SEQ ID NO: 486045 - RNA, 19 nt, Human
ugggagugaaggggaggca

SEQ ID NO: 486046 - RNA, 24 nt, Human
ugggugacuuuguugacaaaugcu

SEQ ID NO: 486047 - RNA, 24 nt, Human
ugugccuggcaggucacgccugcu

SEQ ID NO: 486048 - RNA, 25 nt, Human
ugugccuggcaggucacgccugcuu

SEQ ID NO: 486049 - RNA, 20 nt, Human
uugaauggagcccacaguca

SEQ ID NO: 486050 - RNA, 19 nt, Human
uugcugacaaguccaagau

SEQ ID NO: 486051 - RNA, 19 nt, Human
uuggcagugggaggguggc

SEQ ID NO: 486052 - RNA, 20 nt, Human
uugguuugugcaagcaauag

SEQ ID NO: 486053 - RNA, 19 nt, Human
uuuccaaguucuuggcagu

SEQ ID NO: 486054 - RNA, 22 nt, Human
uuuugcucauucaucuucuuuc

SEQ ID NO: 486055 - RNA, 18 nt, Human
uuuuuuuuuuuuuuuuug

SEQ ID NO: 486056 - RNA, 20 nt, Human
uuuuuuuuuuuuuuuuugcu

SEQ ID NO: 486057 - RNA, 22 nt, Human
uuuuuuuuuuuuuuuuugcuga

SEQ ID NO: 486058 - RNA, 19 nt, Human
aaaccaaauccaccccagu

SEQ ID NO: 486059 - RNA, 18 nt, Human
aaacucaagaaucagcaa

SEQ ID NO: 486060 - RNA, 22 nt, Human
aaagaccucucccaccccaccc

SEQ ID NO: 486061 - RNA, 20 nt, Human
aaagaccucucccaccccag

SEQ ID NO: 486062 - RNA, 23 nt, Human
aaauuccuucucauuuaagaagc

SEQ ID NO: 486063 - RNA, 21 nt, Human
aaccuccuccuccuccuucug

SEQ ID NO: 486064 - RNA, 20 nt, Human
aacuuaagagcaaaaggaaa

SEQ ID NO: 486065 - RNA, 19 nt, Human
aacuuccuuuuaaaaaaga

SEQ ID NO: 486066 - RNA, 23 nt, Human
aagaacagaaaaaaaccucucuc

SEQ ID NO: 486067 - RNA, 25 nt, Human
aagaccucucccaccccacccccag

SEQ ID NO: 486068 - RNA, 21 nt, Human
aagcauucagugaaagacagc

SEQ ID NO: 486069 - RNA, 18 nt, Human
aaggcgccccccccaccc

SEQ ID NO: 486070 - RNA, 24 nt, Human
aaguauguuccuagaccucauacc

SEQ ID NO: 486071 - RNA, 19 nt, Human
accagcucugucuccuucu

SEQ ID NO: 486072 - RNA, 21 nt, Human
acccccagcccaggcugugua

SEQ ID NO: 486073 - RNA, 18 nt, Human
accuaaggcgcccccccc

SEQ ID NO: 486074 - RNA, 20 nt, Human
accuccuccuccuccuucug

SEQ ID NO: 486075 - RNA, 20 nt, Human
accucucccaccccaccccc

SEQ ID NO: 486076 - RNA, 21 nt, Human
accucucucucucccuuugaa

SEQ ID NO: 486077 - RNA, 21 nt, Human
accuguacuaugaugguuuua

SEQ ID NO: 486078 - RNA, 20 nt, Human
agaauccucccaacaaccca

SEQ ID NO: 486079 - RNA, 21 nt, Human
agaaugucuuugacuuggccc

SEQ ID NO: 486080 - RNA, 20 nt, Human
agaccucucccaccccaccc

SEQ ID NO: 486081 - RNA, 22 nt, Human
agaccucucccaccccaccccc

SEQ ID NO: 486082 - RNA, 27 nt, Human
agaguaaaccuucugcaacaccaacca

SEQ ID NO: 486083 - RNA, 22 nt, Human
agcccaggcuguguaugaaaac

SEQ ID NO: 486084 - RNA, 18 nt, Human
agcugaaguauguuccua

SEQ ID NO: 486085 - RNA, 18 nt, Human
aggaucucccugcucagc

SEQ ID NO: 486086 - RNA, 22 nt, Human
aggcuucccucaccuauauggg

SEQ ID NO: 486087 - RNA, 24 nt, Human
aguaccuaaggcgccccccccacc

SEQ ID NO: 486088 - RNA, 23 nt, Human
agugcuaucccugaaugaguaac

SEQ ID NO: 486089 - RNA, 18 nt, Human
auagaauccucccaacaa

SEQ ID NO: 486090 - RNA, 23 nt, Human
auauucauuucaaagggagggag

SEQ ID NO: 486091 - RNA, 19 nt, Human
augagaaagaacagaaaaa

SEQ ID NO: 486092 - RNA, 19 nt, Human
caaaccagacccauccuuu

SEQ ID NO: 486093 - RNA, 19 nt, Human
caaauucaaaacagucuca

SEQ ID NO: 486094 - RNA, 23 nt, Human
caagacaaagaccuguuuuaaac

SEQ ID NO: 486095 - RNA, 21 nt, Human
caaggcagcuuauuuccaaau

SEQ ID NO: 486096 - RNA, 21 nt, Human
caagucucucgccugguucua

SEQ ID NO: 486097 - RNA, 22 nt, Human
caauccaucuucuucuugaccu

SEQ ID NO: 486098 - RNA, 19 nt, Human
cacauacauaagaauaugc

SEQ ID NO: 486099 - RNA, 21 nt, Human
caccccacccccagcccaggc

SEQ ID NO: 486100 - RNA, 23 nt, Human
caccccaguucugcugacucugc

SEQ ID NO: 486101 - RNA, 22 nt, Human
caccucuuauuauucugacacc

SEQ ID NO: 486102 - RNA, 20 nt, Human
cacgaauaccucccuccuuc

SEQ ID NO: 486103 - RNA, 21 nt, Human
cacuacacagaauacuaugcc

SEQ ID NO: 486104 - RNA, 21 nt, Human
cacuuacuauucccucaccuu

SEQ ID NO: 486105 - RNA, 18 nt, Human
cagaagcauucagugaaa

SEQ ID NO: 486106 - RNA, 20 nt, Human
caggcuucccucaccuauau

SEQ ID NO: 486107 - RNA, 24 nt, Human
caguagcaccucuuauuauucuga

SEQ ID NO: 486108 - RNA, 19 nt, Human
cagugaaagacagccugga

SEQ ID NO: 486109 - RNA, 24 nt, Human
ccaaaugaauaugucccuuccccc

SEQ ID NO: 486110 - RNA, 22 nt, Human
ccaccccacccccagcccaggc

SEQ ID NO: 486111 - RNA, 19 nt, Human
ccacuacacagaauacuau

SEQ ID NO: 486112 - RNA, 20 nt, Human
cccaaccagcucugucuccu

SEQ ID NO: 486113 - RNA, 24 nt, Human
cccaaccagcucugucuccuucua

SEQ ID NO: 486114 - RNA, 21 nt, Human
cccauccucacgccuugagcu

SEQ ID NO: 486115 - RNA, 18 nt, Human
cccccagcccaggcugug

SEQ ID NO: 486116 - RNA, 23 nt, Human
cccccccacccccauucagucug

SEQ ID NO: 486117 - RNA, 18 nt, Human
cccugaccugagggcugu

SEQ ID NO: 486118 - RNA, 23 nt, Human
ccuaaaccuccuccuccuccuuc

SEQ ID NO: 486119 - RNA, 18 nt, Human
ccucuauaacaguaacuu

SEQ ID NO: 486120 - RNA, 22 nt, Human
ccuuccuccccaugucuuccca

SEQ ID NO: 486121 - RNA, 23 nt, Human
ccuuuggccacagaguaaaccuu

SEQ ID NO: 486122 - RNA, 26 nt, Human
cgccccccccacccccauucagucug

SEQ ID NO: 486123 - RNA, 22 nt, Human
cuaaucuacuuuaaacagaugc

SEQ ID NO: 486124 - RNA, 24 nt, Human
cuauaacaguaacuuccuuuuaaa

SEQ ID NO: 486125 - RNA, 22 nt, Human
cuaugcuacuguugcacucucc

SEQ ID NO: 486126 - RNA, 18 nt, Human
cucaaauuccuucucauu

SEQ ID NO: 486127 - RNA, 25 nt, Human
cucauagaauccucccaacaaccca

SEQ ID NO: 486128 - RNA, 24 nt, Human
cuccacaacuuaagagcaaaagga

SEQ ID NO: 486129 - RNA, 20 nt, Human
cucccuccuucccauccuca

SEQ ID NO: 486130 - RNA, 24 nt, Human
cucccuccuucccauccuuacgaa

SEQ ID NO: 486131 - RNA, 25 nt, Human
cucccuuugaaaugaauauacccaa

SEQ ID NO: 486132 - RNA, 25 nt, Human
cuccucucugacccucacuuccaaa

SEQ ID NO: 486133 - RNA, 23 nt, Human
cucuccacaacuuaagagcaaaa

SEQ ID NO: 486134 - RNA, 18 nt, Human
cucucccaccccaccccc

SEQ ID NO: 486135 - RNA, 22 nt, Human
cugacucugcauccucauaugc

SEQ ID NO: 486136 - RNA, 21 nt, Human
cugcacgaauaccucccuccu

SEQ ID NO: 486137 - RNA, 20 nt, Human
cugguuugucuggagaaggc

SEQ ID NO: 486138 - RNA, 18 nt, Human
cuguucagaucacuaaac

SEQ ID NO: 486139 - RNA, 24 nt, Human
cuuacgaauaccucccuccuuccc

SEQ ID NO: 486140 - RNA, 25 nt, Human
cuuccugcugacagccacaaugcuc

SEQ ID NO: 486141 - RNA, 19 nt, Human
gaaggcgaaaagaaucaga

SEQ ID NO: 486142 - RNA, 21 nt, Human
gacccucacuuccaaaccaaa

SEQ ID NO: 486143 - RNA, 21 nt, Human
gagcaaugccgucaagguucu

SEQ ID NO: 486144 - RNA, 18 nt, Human
gaggguggaguuaaauca

SEQ ID NO: 486145 - RNA, 19 nt, Human
ggcaggauccuucacucca

SEQ ID NO: 486146 - RNA, 24 nt, Human
ggccauccucacccugaccugagg

SEQ ID NO: 486147 - RNA, 25 nt, Human
ggccauccucacccugaccugaggg

SEQ ID NO: 486148 - RNA, 20 nt, Human
gugguugccucauagaaucc

SEQ ID NO: 486149 - RNA, 19 nt, Human
guugguggucuccuugccc

SEQ ID NO: 486150 - RNA, 22 nt, Human
guuugucuggagaaggcaucug

SEQ ID NO: 486151 - RNA, 19 nt, Human
uaagaagcuuccccagcuc

SEQ ID NO: 486152 - RNA, 19 nt, Human
uaaggcgccccccccaccc

SEQ ID NO: 486153 - RNA, 20 nt, Human
uacgaauaccucccuccuuc

SEQ ID NO: 486154 - RNA, 21 nt, Human
uacuagguaaucaauccucac

SEQ ID NO: 486155 - RNA, 19 nt, Human
uacuaugccagauacguag

SEQ ID NO: 486156 - RNA, 20 nt, Human
uagaauccucccaacaaccc

SEQ ID NO: 486157 - RNA, 21 nt, Human
uagccaucccccaaauucaaa

SEQ ID NO: 486158 - RNA, 18 nt, Human
uaugugcacaaucauaug

SEQ ID NO: 486159 - RNA, 19 nt, Human
uaugugcacaaucauauga

SEQ ID NO: 486160 - RNA, 18 nt, Human
ucaagaaucagcaauucu

SEQ ID NO: 486161 - RNA, 21 nt, Human
ucaauccucaccuagaucuca

SEQ ID NO: 486162 - RNA, 22 nt, Human
ucaccuuaccuguacuaugaug

SEQ ID NO: 486163 - RNA, 23 nt, Human
ucagcaauucucugaggcuuucu

SEQ ID NO: 486164 - RNA, 23 nt, Human
ucaguagcaccucuuauuauucu

SEQ ID NO: 486165 - RNA, 28 nt, Human
ucagugaaagacagccuggagucugggg

SEQ ID NO: 486166 - RNA, 21 nt, Human
ucccaccccacccccagccca

SEQ ID NO: 486167 - RNA, 22 nt, Human
uccccagcucucccaggccaca

SEQ ID NO: 486168 - RNA, 23 nt, Human
uccccauagcaagacaaagaccu

SEQ ID NO: 486169 - RNA, 23 nt, Human
ucccugaguaguucucaccacuu

SEQ ID NO: 486170 - RNA, 22 nt, Human
uccuucacuccagauauaaucu

SEQ ID NO: 486171 - RNA, 22 nt, Human
ucucccaccccacccccagccc

SEQ ID NO: 486172 - RNA, 22 nt, Human
ucucccaggccacaagucucuc

SEQ ID NO: 486173 - RNA, 24 nt, Human
ucugacccucacuuccaaaccaaa

SEQ ID NO: 486174 - RNA, 22 nt, Human
ucugcucaucccacuacacaga

SEQ ID NO: 486175 - RNA, 22 nt, Human
ucuuaguuuuucaggcuucccu

SEQ ID NO: 486176 - RNA, 20 nt, Human
ugaaaugaauauacccaaaa

SEQ ID NO: 486177 - RNA, 26 nt, Human
ugaaggcgaaaagaaucagagaacag

SEQ ID NO: 486178 - RNA, 19 nt, Human
ugaccuaaaccuccuccuc

SEQ ID NO: 486179 - RNA, 20 nt, Human
ugacuuggcccagaggguag

SEQ ID NO: 486180 - RNA, 20 nt, Human
ugagaaagaacagaaaaaaa

SEQ ID NO: 486181 - RNA, 18 nt, Human
ugccagauacguaggugg

SEQ ID NO: 486182 - RNA, 18 nt, Human
uggagaauagaucucugg

SEQ ID NO: 486183 - RNA, 18 nt, Human
uggauuauuuuguuuuug

SEQ ID NO: 486184 - RNA, 19 nt, Human
ugggaugggaaggaaaucu

SEQ ID NO: 486185 - RNA, 20 nt, Human
ugucucagcucuucuggcca

SEQ ID NO: 486186 - RNA, 21 nt, Human
ugucuggagaaggcaucugga

SEQ ID NO: 486187 - RNA, 21 nt, Human
ugugcaaaucaaucauauaga

SEQ ID NO: 486188 - RNA, 24 nt, Human
uguucaagcucugcaaaccagacc

SEQ ID NO: 486189 - RNA, 20 nt, Human
uuaaaaaagaccucucccac

SEQ ID NO: 486190 - RNA, 24 nt, Human
uuaaaauaagcuggagaauagauc

SEQ ID NO: 486191 - RNA, 22 nt, Human
uuaguuuuucaggcuucccuca

SEQ ID NO: 486192 - RNA, 18 nt, Human
uucaucaacauauuuuga

SEQ ID NO: 486193 - RNA, 21 nt, Human
uucaugucuuuucuccccaua

SEQ ID NO: 486194 - RNA, 22 nt, Human
uuccuccccaugucuucccaac

SEQ ID NO: 486195 - RNA, 24 nt, Human
uucucauuuaagaagcuuccccag

SEQ ID NO: 486196 - RNA, 24 nt, Human
uucuugaccuaaaccuccuccucc

SEQ ID NO: 486197 - RNA, 18 nt, Human
uugaugcaugugaagggg

SEQ ID NO: 486198 - RNA, 19 nt, Human
uugcuuccugcugacagcc

SEQ ID NO: 486199 - RNA, 22 nt, Human
uuggccacagaguaaaccuucu

SEQ ID NO: 486200 - RNA, 20 nt, Human
uuguccuuccuccccauguc

SEQ ID NO: 486201 - RNA, 22 nt, Human
uuucuguugcuucugguuuguc

SEQ ID NO: 486202 - RNA, 23 nt, Human
uuuuguggguuuuaaggcucaag

SEQ ID NO: 486203 - RNA, 24 nt, Human
aaaaugcuaccuaucagagaccag

SEQ ID NO: 486204 - RNA, 24 nt, Human
aaaaugcugggauuacagguguga

SEQ ID NO: 486205 - RNA, 25 nt, Human
aaacaucuaacauuuuaaacuguac

SEQ ID NO: 486206 - RNA, 22 nt, Human
aaauaauuaucagaagccagca

SEQ ID NO: 486207 - RNA, 26 nt, Human
aaaugcugggauuacaggugugagcc

SEQ ID NO: 486208 - RNA, 19 nt, Human
aacacuagccggccaaucc

SEQ ID NO: 486209 - RNA, 19 nt, Human
aacagcucccagggaaauc

SEQ ID NO: 486210 - RNA, 18 nt, Human
aaccacugaagaacagcc

SEQ ID NO: 486211 - RNA, 18 nt, Human
aaccacugaagaacagcc

SEQ ID NO: 486212 - RNA, 23 nt, Human
aagccaaagccaugcuuuaaaaa

SEQ ID NO: 486213 - RNA, 23 nt, Human
aagccaaagccaugcuuuaaaaa

SEQ ID NO: 486214 - RNA, 19 nt, Human
aaguagcugggauuacagg

SEQ ID NO: 486215 - RNA, 25 nt, Human
aaguagcugggauuacaggcacccg

SEQ ID NO: 486216 - RNA, 20 nt, Human
aagugcuggaaaaugcuacc

SEQ ID NO: 486217 - RNA, 22 nt, Human
aauaagaugcagcuucuagcag

SEQ ID NO: 486218 - RNA, 21 nt, Human
aaucaaaguccaaccaauggu

SEQ ID NO: 486219 - RNA, 19 nt, Human
aaugggaaccacugaagaa

SEQ ID NO: 486220 - RNA, 23 nt, Human
aauuuuuguauuuuuaguagaga

SEQ ID NO: 486221 - RNA, 19 nt, Human
acaaucugaugacuccagc

SEQ ID NO: 486222 - RNA, 19 nt, Human
acacagcccaugagcacgu

SEQ ID NO: 486223 - RNA, 19 nt, Human
acaggcacccgccaccacg

SEQ ID NO: 486224 - RNA, 18 nt, Human
acaguucuuuccuuuuuu

SEQ ID NO: 486225 - RNA, 22 nt, Human
acauuuuuuauuuugcaaagcc

SEQ ID NO: 486226 - RNA, 19 nt, Human
accaacaccuguucugcca

SEQ ID NO: 486227 - RNA, 19 nt, Human
acccaggcuggagugcaau

SEQ ID NO: 486228 - RNA, 25 nt, Human
acccaucuuagcuucccaaaaugcu

SEQ ID NO: 486229 - RNA, 22 nt, Human
accuguucugccauuguccccu

SEQ ID NO: 486230 - RNA, 19 nt, Human
acuguacaauaaaccccaa

SEQ ID NO: 486231 - RNA, 26 nt, Human
agaaaaaaugcaagcugguuguagaa

SEQ ID NO: 486232 - RNA, 26 nt, Human
agaaaaaaugcaagcugguuguagaa

SEQ ID NO: 486233 - RNA, 23 nt, Human
agaacagcucccagggaaaucaa

SEQ ID NO: 486234 - RNA, 25 nt, Human
agacaagagacacucacgacagaga

SEQ ID NO: 486235 - RNA, 26 nt, Human
agacaagagacacucacgacagagaa

SEQ ID NO: 486236 - RNA, 19 nt, Human
agagaucacacagcccaug

SEQ ID NO: 486237 - RNA, 20 nt, Human
agaggaagacagccuuugca

SEQ ID NO: 486238 - RNA, 21 nt, Human
agcaaaaagauauggggagaa

SEQ ID NO: 486239 - RNA, 21 nt, Human
agcaaaaagauauggggagaa

SEQ ID NO: 486240 - RNA, 24 nt, Human
agcaagaaaaaugauguaaccuaa

SEQ ID NO: 486241 - RNA, 24 nt, Human
agcgauucucuugccucagccucc

SEQ ID NO: 486242 - RNA, 18 nt, Human
aggaaaguagaggugacc

SEQ ID NO: 486243 - RNA, 18 nt, Human
aggaaaguagaggugacc

SEQ ID NO: 486244 - RNA, 18 nt, Human
aggcucaggaagagacgg

SEQ ID NO: 486245 - RNA, 18 nt, Human
aggcucaggaagagacgg

SEQ ID NO: 486246 - RNA, 24 nt, Human
agggguuucgccauguuggccagg

SEQ ID NO: 486247 - RNA, 21 nt, Human
aguagagagggguuucgccau

SEQ ID NO: 486248 - RNA, 19 nt, Human
agugauccacccaucuuag

SEQ ID NO: 486249 - RNA, 24 nt, Human
agugcaauggcacgaucucggcuc

SEQ ID NO: 486250 - RNA, 18 nt, Human
aguuaaagcuuacaagaa

SEQ ID NO: 486251 - RNA, 18 nt, Human
aguuaaagcuuacaagaa

SEQ ID NO: 486252 - RNA, 21 nt, Human
aguucuggauugccacuuccu

SEQ ID NO: 486253 - RNA, 24 nt, Human
aguucuuuccuuuuuuuuuuuuuu

SEQ ID NO: 486254 - RNA, 24 nt, Human
aguucuuuccuuuuuuuuuuuuuu

SEQ ID NO: 486255 - RNA, 22 nt, Human
aucaaugggaaccacugaagaa

SEQ ID NO: 486256 - RNA, 22 nt, Human
aucagagaccaccccacccuga

SEQ ID NO: 486257 - RNA, 18 nt, Human
auccacucccuucagccu

SEQ ID NO: 486258 - RNA, 24 nt, Human
caaaagacacugugaucugugacu

SEQ ID NO: 486259 - RNA, 24 nt, Human
caaaaugcugggauuacaggugug

SEQ ID NO: 486260 - RNA, 23 nt, Human
caaagcaaaccgacaguuuccua

SEQ ID NO: 486261 - RNA, 24 nt, Human
caaauuuuuguauuuuuaguagag

SEQ ID NO: 486262 - RNA, 26 nt, Human
caaccacauuaaagaaacggaacaaa

SEQ ID NO: 486263 - RNA, 22 nt, Human
caagcgauucucuugccucagc

SEQ ID NO: 486264 - RNA, 27 nt, Human
caagcgauucucuugccucagccuccc

SEQ ID NO: 486265 - RNA, 24 nt, Human
cacaaauuucagaccccuuuaaaa

SEQ ID NO: 486266 - RNA, 22 nt, Human
cacagcccaugagcacguuaag

SEQ ID NO: 486267 - RNA, 23 nt, Human
cacauuuuuuauuuugcaaagcc

SEQ ID NO: 486268 - RNA, 22 nt, Human
caccaugccuagcccaugacag

SEQ ID NO: 486269 - RNA, 23 nt, Human
cacccaucuuagcuucccaaaau

SEQ ID NO: 486270 - RNA, 21 nt, Human
cacucccuucagccucacucc

SEQ ID NO: 486271 - RNA, 21 nt, Human
cacucccuucagccucacucc

SEQ ID NO: 486272 - RNA, 21 nt, Human
cacugcaaccucugccuccug

SEQ ID NO: 486273 - RNA, 23 nt, Human
cacugcaaccucugccuccuggg

SEQ ID NO: 486274 - RNA, 18 nt, Human
cagaaaaaaugcaagcug

SEQ ID NO: 486275 - RNA, 18 nt, Human
cagaaaaaaugcaagcug

SEQ ID NO: 486276 - RNA, 22 nt, Human
cagagaacagcucccagggaaa

SEQ ID NO: 486277 - RNA, 22 nt, Human
cagcaagaaaaaugauguaacc

SEQ ID NO: 486278 - RNA, 22 nt, Human
cagcaagaaaaaugauguaacc

SEQ ID NO: 486279 - RNA, 25 nt, Human
cagcaagaaaaaugauguaaccuaa

SEQ ID NO: 486280 - RNA, 21 nt, Human
cagcaaugaguuuguacccaa

SEQ ID NO: 486281 - RNA, 18 nt, Human
cagcauuucccaaaggcu

SEQ ID NO: 486282 - RNA, 21 nt, Human
cagcgcauugaucacaccaaa

SEQ ID NO: 486283 - RNA, 21 nt, Human
cagcgcauugaucacaccaaa

SEQ ID NO: 486284 - RNA, 18 nt, Human
cagcuuuggcaaauaagc

SEQ ID NO: 486285 - RNA, 21 nt, Human
caggcacccgccaccacgccu

SEQ ID NO: 486286 - RNA, 24 nt, Human
cauguuggccaggcuggucucaaa

SEQ ID NO: 486287 - RNA, 21 nt, Human
ccaaaaugcugggauuacagg

SEQ ID NO: 486288 - RNA, 21 nt, Human
ccaaaaugcugggauuacagg

SEQ ID NO: 486289 - RNA, 24 nt, Human
ccaaaaugcugggauuacaggugu

SEQ ID NO: 486290 - RNA, 21 nt, Human
ccaagacagcaagaaaaauga

SEQ ID NO: 486291 - RNA, 21 nt, Human
ccaagacagcaagaaaaauga

SEQ ID NO: 486292 - RNA, 23 nt, Human
ccaaguagcugggauuacaggca

SEQ ID NO: 486293 - RNA, 21 nt, Human
ccacaaucugaugacuccagc

SEQ ID NO: 486294 - RNA, 20 nt, Human
ccacauuaaagaaacggaac

SEQ ID NO: 486295 - RNA, 20 nt, Human
ccaccacgccuggcaaauuu

SEQ ID NO: 486296 - RNA, 19 nt, Human
ccacuccuuugcuuugauu

SEQ ID NO: 486297 - RNA, 19 nt, Human
ccacuccuuugcuuugauu

SEQ ID NO: 486298 - RNA, 24 nt, Human
ccacugaagaacagccccuucuau

SEQ ID NO: 486299 - RNA, 24 nt, Human
ccacugaagaacagccccuucuau

SEQ ID NO: 486300 - RNA, 19 nt, Human
ccagcuuuggcaaauaagc

SEQ ID NO: 486301 - RNA, 19 nt, Human
ccauguuggccaggcuggu

SEQ ID NO: 486302 - RNA, 22 nt, Human
ccauguuggccaggcuggucuc

SEQ ID NO: 486303 - RNA, 18 nt, Human
cccaagacagcaagaaaa

SEQ ID NO: 486304 - RNA, 18 nt, Human
cccaagacagcaagaaaa

SEQ ID NO: 486305 - RNA, 21 nt, Human
cccaagacagcaagaaaaaug

SEQ ID NO: 486306 - RNA, 21 nt, Human
cccaagacagcaagaaaaaug

SEQ ID NO: 486307 - RNA, 23 nt, Human
cccaaguagcugggauuacaggc

SEQ ID NO: 486308 - RNA, 24 nt, Human
cccaaguagcugggauuacaggca

SEQ ID NO: 486309 - RNA, 25 nt, Human
cccacaaucugaugacuccagcuca

SEQ ID NO: 486310 - RNA, 25 nt, Human
cccacaaucugaugacuccagcuca

SEQ ID NO: 486311 - RNA, 21 nt, Human
cccaugacaguaccuuccuaa

SEQ ID NO: 486312 - RNA, 24 nt, Human
ccuccuggguucaagcgauucucu

SEQ ID NO: 486313 - RNA, 22 nt, Human
ccucuccaaacagugggccccu

SEQ ID NO: 486314 - RNA, 22 nt, Human
ccucuccaaacagugggccccu

SEQ ID NO: 486315 - RNA, 19 nt, Human
ccucugccuccuggguuca

SEQ ID NO: 486316 - RNA, 20 nt, Human
ccugaauaccauccucucca

SEQ ID NO: 486317 - RNA, 20 nt, Human
ccugaauaccauccucucca

SEQ ID NO: 486318 - RNA, 23 nt, Human
ccugaccucaagugauccaccca

SEQ ID NO: 486319 - RNA, 24 nt, Human
ccugaccucaagugauccacccau

SEQ ID NO: 486320 - RNA, 21 nt, Human
ccugagagugucagguuacca

SEQ ID NO: 486321 - RNA, 21 nt, Human
ccugagagugucagguuacca

SEQ ID NO: 486322 - RNA, 21 nt, Human
ccuggguucaagcgauucucu

SEQ ID NO: 486323 - RNA, 24 nt, Human
cgccauguuggccaggcuggucuc

SEQ ID NO: 486324 - RNA, 27 nt, Human
cgccauguuggccaggcuggucucaaa

SEQ ID NO: 486325 - RNA, 24 nt, Human
cgccuggcaaauuuuuguauuuuu

SEQ ID NO: 486326 - RNA, 24 nt, Human
cgcucugucacccaggcuggagug

SEQ ID NO: 486327 - RNA, 20 nt, Human
cggccagagccugagagcaa

SEQ ID NO: 486328 - RNA, 18 nt, Human
cuagagucaaacgcuaac

SEQ ID NO: 486329 - RNA, 18 nt, Human
cuagagucaaacgcuaac

SEQ ID NO: 486330 - RNA, 24 nt, Human
cucaagugauccacccaucuuagc

SEQ ID NO: 486331 - RNA, 24 nt, Human
cucacugcaaccucugccuccugg

SEQ ID NO: 486332 - RNA, 24 nt, Human
cucagccucccaaguagcugggau

SEQ ID NO: 486333 - RNA, 21 nt, Human
cuccuggguucaagcgauucu

SEQ ID NO: 486334 - RNA, 21 nt, Human
cucgcucugucacccaggcug

SEQ ID NO: 486335 - RNA, 24 nt, Human
cucgcucugucacccaggcuggag

SEQ ID NO: 486336 - RNA, 25 nt, Human
cucugucacccaggcuggagugcaa

SEQ ID NO: 486337 - RNA, 21 nt, Human
cugauccacucccuucagccu

SEQ ID NO: 486338 - RNA, 19 nt, Human
cugcaaccucugccuccug

SEQ ID NO: 486339 - RNA, 23 nt, Human
cugcaaccucugccuccuggguu

SEQ ID NO: 486340 - RNA, 24 nt, Human
cugcaaccucugccuccuggguuc

SEQ ID NO: 486341 - RNA, 23 nt, Human
cugugcuaguuuucaagcaugaa

SEQ ID NO: 486342 - RNA, 23 nt, Human
cugugcuaguuuucaagcaugaa

SEQ ID NO: 486343 - RNA, 22 nt, Human
cuucagccacacauugcucuuc

SEQ ID NO: 486344 - RNA, 22 nt, Human
cuucagccucacuccgggcccc

SEQ ID NO: 486345 - RNA, 22 nt, Human
cuucagccucacuccgggcccc

SEQ ID NO: 486346 - RNA, 24 nt, Human
cuugccucagccucccaaguagcu

SEQ ID NO: 486347 - RNA, 25 nt, Human
cuugccucagccucccaaguagcug

SEQ ID NO: 486348 - RNA, 27 nt, Human
gacaguucuuuccuuuuuuuuuuuuuu

SEQ ID NO: 486349 - RNA, 24 nt, Human
gaccucaagugauccacccaucuu

SEQ ID NO: 486350 - RNA, 24 nt, Human
gagaacagcucccagggaaaucaa

SEQ ID NO: 486351 - RNA, 20 nt, Human
gagagggguuucgccauguu

SEQ ID NO: 486352 - RNA, 21 nt, Human
gagccaccaugccuagcccau

SEQ ID NO: 486353 - RNA, 18 nt, Human
gagggguuucgccauguu

SEQ ID NO: 486354 - RNA, 20 nt, Human
gagggguuucgccauguugg

SEQ ID NO: 486355 - RNA, 24 nt, Human
gagggguuucgccauguuggccag

SEQ ID NO: 486356 - RNA, 18 nt, Human
gauuacaggugugagcca

SEQ ID NO: 486357 - RNA, 21 nt, Human
gauuacaggugugagccacca

SEQ ID NO: 486358 - RNA, 24 nt, Human
gauuacaggugugagccaccaugc

SEQ ID NO: 486359 - RNA, 21 nt, Human
gauucucuugccucagccucc

SEQ ID NO: 486360 - RNA, 22 nt, Human
gcaaauaagcaagauguuucug

SEQ ID NO: 486361 - RNA, 22 nt, Human
gcaaauaagcaagauguuucug

SEQ ID NO: 486362 - RNA, 22 nt, Human
gcaaccucugccuccuggguuc

SEQ ID NO: 486363 - RNA, 23 nt, Human
gcagugcucugauccacucccuu

SEQ ID NO: 486364 - RNA, 23 nt, Human
gcagugcucugauccacucccuu

SEQ ID NO: 486365 - RNA, 18 nt, Human
gccauguuggccaggcug

SEQ ID NO: 486366 - RNA, 25 nt, Human
gccauguuggccaggcuggucucaa

SEQ ID NO: 486367 - RNA, 21 nt, Human
gccucacuccgggccccacaa

SEQ ID NO: 486368 - RNA, 21 nt, Human
gccucacuccgggccccacaa

SEQ ID NO: 486369 - RNA, 20 nt, Human
gccucagccucccaaguagc

SEQ ID NO: 486370 - RNA, 24 nt, Human
gcgauucucuugccucagccuccc

SEQ ID NO: 486371 - RNA, 23 nt, Human
gcucugauccacucccuucagcc

SEQ ID NO: 486372 - RNA, 23 nt, Human
gcucugauccacucccuucagcc

SEQ ID NO: 486373 - RNA, 27 nt, Human
gcucugucacccaggcuggagugcaau

SEQ ID NO: 486374 - RNA, 19 nt, Human
gcugcuuuauccaauuggu

SEQ ID NO: 486375 - RNA, 19 nt, Human
gcuggagugcaauggcacg

SEQ ID NO: 486376 - RNA, 23 nt, Human
gcuggucucaaacuccugaccuc

SEQ ID NO: 486377 - RNA, 19 nt, Human
ggagucucugcaagccgac

SEQ ID NO: 486378 - RNA, 19 nt, Human
ggagucucugcaagccgac

SEQ ID NO: 486379 - RNA, 24 nt, Human
ggauuacaggugugagccaccaug

SEQ ID NO: 486380 - RNA, 19 nt, Human
ggccagagccugagagcaa

SEQ ID NO: 486381 - RNA, 24 nt, Human
ggcuggucucaaacuccugaccuc

SEQ ID NO: 486382 - RNA, 18 nt, Human
gggguuucgccauguugg

SEQ ID NO: 486383 - RNA, 22 nt, Human
gggguuucgccauguuggccag

SEQ ID NO: 486384 - RNA, 23 nt, Human
gggguuucgccauguuggccagg

SEQ ID NO: 486385 - RNA, 18 nt, Human
guagcugggauuacaggc

SEQ ID NO: 486386 - RNA, 24 nt, Human
gucucgcucugucacccaggcugg

SEQ ID NO: 486387 - RNA, 22 nt, Human
gugagccaccaugccuagccca

SEQ ID NO: 486388 - RNA, 24 nt, Human
gugauccacccaucuuagcuuccc

SEQ ID NO: 486389 - RNA, 20 nt, Human
guuuacaugacaguucuuuc

SEQ ID NO: 486390 - RNA, 19 nt, Human
uaaagaaacggaacaaaac

SEQ ID NO: 486391 - RNA, 19 nt, Human
uaagaaaaagagaggcauu

SEQ ID NO: 486392 - RNA, 22 nt, Human
uacaggcacccgccaccacgcc

SEQ ID NO: 486393 - RNA, 22 nt, Human
uacaggugugagccaccaugcc

SEQ ID NO: 486394 - RNA, 22 nt, Human
uacaggugugagccaccaugcc

SEQ ID NO: 486395 - RNA, 23 nt, Human
uacaggugugagccaccaugccu

SEQ ID NO: 486396 - RNA, 24 nt, Human
uacuagaauugccaaaagcaaguu

SEQ ID NO: 486397 - RNA, 18 nt, Human
uacuccuuuaccugguua

SEQ ID NO: 486398 - RNA, 21 nt, Human
uagagagggguuucgccaugu

SEQ ID NO: 486399 - RNA, 22 nt, Human
uagcccaugacaguaccuuccu

SEQ ID NO: 486400 - RNA, 23 nt, Human
uaguagagagggguuucgccaug

SEQ ID NO: 486401 - RNA, 20 nt, Human
uaugguucagccccuucagc

SEQ ID NO: 486402 - RNA, 20 nt, Human
uaugguucagccccuucagc

SEQ ID NO: 486403 - RNA, 24 nt, Human
uauuuugcauuuuaaagagagaua

SEQ ID NO: 486404 - RNA, 24 nt, Human
uauuuugcauuuuaaagagagaua

SEQ ID NO: 486405 - RNA, 18 nt, Human
ucaaaucucucuugaguc

SEQ ID NO: 486406 - RNA, 19 nt, Human
ucaagcgauucucuugccu

SEQ ID NO: 486407 - RNA, 18 nt, Human
ucacccaggcuggagugc

SEQ ID NO: 486408 - RNA, 24 nt, Human
ucacugcaaccucugccuccuggg

SEQ ID NO: 486409 - RNA, 25 nt, Human
ucacugcaaccucugccuccugggu

SEQ ID NO: 486410 - RNA, 27 nt, Human
ucacugcaaccucugccuccuggguuc

SEQ ID NO: 486411 - RNA, 19 nt, Human
ucagccucacuccgggccc

SEQ ID NO: 486412 - RNA, 19 nt, Human
ucagccucacuccgggccc

SEQ ID NO: 486413 - RNA, 18 nt, Human
ucagccucccaaguagcu

SEQ ID NO: 486414 - RNA, 20 nt, Human
ucagccucccaaguagcugg

SEQ ID NO: 486415 - RNA, 20 nt, Human
ucagcuucauuuaucugaac

SEQ ID NO: 486416 - RNA, 20 nt, Human
ucagcuucauuuaucugaac

SEQ ID NO: 486417 - RNA, 19 nt, Human
uccaugcauaccuggccau

SEQ ID NO: 486418 - RNA, 23 nt, Human
ucccaaaaugcugggauuacagg

SEQ ID NO: 486419 - RNA, 24 nt, Human
ucccaaguagcugggauuacaggc

SEQ ID NO: 486420 - RNA, 22 nt, Human
ucccagggaaaucaaagcaaac

SEQ ID NO: 486421 - RNA, 18 nt, Human
ucccuucagccucacucc

SEQ ID NO: 486422 - RNA, 18 nt, Human
ucccuucagccucacucc

SEQ ID NO: 486423 - RNA, 24 nt, Human
uccucauaacaaaagucuucagcc

SEQ ID NO: 486424 - RNA, 24 nt, Human
uccugagagugucagguuaccaug

SEQ ID NO: 486425 - RNA, 24 nt, Human
uccugagagugucagguuaccaug

SEQ ID NO: 486426 - RNA, 24 nt, Human
uccugggagcaaggagucucugca

SEQ ID NO: 486427 - RNA, 24 nt, Human
uccugggagcaaggagucucugca

SEQ ID NO: 486428 - RNA, 21 nt, Human
uccuggguucaagcgauucuc

SEQ ID NO: 486429 - RNA, 24 nt, Human
uccuggguucaagcgauucucuug

SEQ ID NO: 486430 - RNA, 22 nt, Human
ucgccauguuggccaggcuggu

SEQ ID NO: 486431 - RNA, 24 nt, Human
ucgccauguuggccaggcuggucu

SEQ ID NO: 486432 - RNA, 24 nt, Human
ucgcucugucacccaggcuggagu

SEQ ID NO: 486433 - RNA, 21 nt, Human
ucuaacauuuuaaacuguaca

SEQ ID NO: 486434 - RNA, 19 nt, Human
ucuccugggagcaaggagu

SEQ ID NO: 486435 - RNA, 19 nt, Human
ucuccugggagcaaggagu

SEQ ID NO: 486436 - RNA, 19 nt, Human
ucucgcucugucacccagg

SEQ ID NO: 486437 - RNA, 23 nt, Human
ucucgcucugucacccaggcugg

SEQ ID NO: 486438 - RNA, 24 nt, Human
ucucgcucugucacccaggcugga

SEQ ID NO: 486439 - RNA, 26 nt, Human
ucucgcucugucacccaggcuggagu

SEQ ID NO: 486440 - RNA, 27 nt, Human
ucucgcucugucacccaggcuggagug

SEQ ID NO: 486441 - RNA, 24 nt, Human
ucugucacccaggcuggagugcaa

SEQ ID NO: 486442 - RNA, 20 nt, Human
ucuuagcuucccaaaaugcu

SEQ ID NO: 486443 - RNA, 26 nt, Human
ucuugccucagccucccaaguagcug

SEQ ID NO: 486444 - RNA, 21 nt, Human
ucuuuaaaaaaaaaaaaagua

SEQ ID NO: 486445 - RNA, 18 nt, Human
ugaaaugccaggcggaua

SEQ ID NO: 486446 - RNA, 19 nt, Human
ugaagaacagccccuucua

SEQ ID NO: 486447 - RNA, 19 nt, Human
ugaagaacagccccuucua

SEQ ID NO: 486448 - RNA, 19 nt, Human
ugacaauugucaccaacac

SEQ ID NO: 486449 - RNA, 18 nt, Human
ugacaguaccuuccuaac

SEQ ID NO: 486450 - RNA, 19 nt, Human
ugagaaagccugaauacca

SEQ ID NO: 486451 - RNA, 19 nt, Human
ugagaaagccugaauacca

SEQ ID NO: 486452 - RNA, 22 nt, Human
ugagauggagucucgcucuguc

SEQ ID NO: 486453 - RNA, 23 nt, Human
ugauccacccaucuuagcuuccc

SEQ ID NO: 486454 - RNA, 22 nt, Human
ugccucagccucccaaguagcu

SEQ ID NO: 486455 - RNA, 24 nt, Human
ugccucagccucccaaguagcugg

SEQ ID NO: 486456 - RNA, 20 nt, Human
ugcucugauccacucccuuc

SEQ ID NO: 486457 - RNA, 20 nt, Human
ugcucugauccacucccuuc

SEQ ID NO: 486458 - RNA, 24 nt, Human
ugcugggauuacaggugugagcca

SEQ ID NO: 486459 - RNA, 23 nt, Human
uggagugcaauggcacgaucucg

SEQ ID NO: 486460 - RNA, 24 nt, Human
uggagugcaauggcacgaucucgg

SEQ ID NO: 486461 - RNA, 23 nt, Human
uggcaaauaagcaagauguuucu

SEQ ID NO: 486462 - RNA, 23 nt, Human
uggcaaauaagcaagauguuucu

SEQ ID NO: 486463 - RNA, 25 nt, Human
uggcaaauaagcaagauguuucugu

SEQ ID NO: 486464 - RNA, 25 nt, Human
uggcaaauaagcaagauguuucugu

SEQ ID NO: 486465 - RNA, 24 nt, Human
uggccaggcuggucucaaacuccu

SEQ ID NO: 486466 - RNA, 19 nt, Human
uggcuuccauuuuuuuuuc

SEQ ID NO: 486467 - RNA, 21 nt, Human
ugggauuacaggcacccgcca

SEQ ID NO: 486468 - RNA, 22 nt, Human
ugggauuacaggcacccgccac

SEQ ID NO: 486469 - RNA, 24 nt, Human
ugggauuacaggcacccgccacca

SEQ ID NO: 486470 - RNA, 18 nt, Human
ugggauuacaggugugag

SEQ ID NO: 486471 - RNA, 22 nt, Human
ugggauuacaggugugagccac

SEQ ID NO: 486472 - RNA, 23 nt, Human
ugggauuacaggugugagccacc

SEQ ID NO: 486473 - RNA, 24 nt, Human
ugggauuacaggugugagccacca

SEQ ID NO: 486474 - RNA, 25 nt, Human
ugggauuacaggugugagccaccau

SEQ ID NO: 486475 - RNA, 22 nt, Human
ugggcagaaaaaaugcaagcug

SEQ ID NO: 486476 - RNA, 22 nt, Human
ugggcagaaaaaaugcaagcug

SEQ ID NO: 486477 - RNA, 20 nt, Human
uggguucaagcgauucucuu

SEQ ID NO: 486478 - RNA, 23 nt, Human
uggguucaagcgauucucuugcc

SEQ ID NO: 486479 - RNA, 24 nt, Human
uggguucaagcgauucucuugccu

SEQ ID NO: 486480 - RNA, 22 nt, Human
ugguaaagugauaagaaaaaga

SEQ ID NO: 486481 - RNA, 21 nt, Human
uguagaaaaaggaguguaugg

SEQ ID NO: 486482 - RNA, 21 nt, Human
uguagaaaaaggaguguaugg

SEQ ID NO: 486483 - RNA, 21 nt, Human
uguaucaaagggaaaugagag

SEQ ID NO: 486484 - RNA, 20 nt, Human
ugucacccaggcuggagugc

SEQ ID NO: 486485 - RNA, 24 nt, Human
ugugagccaccaugccuagcccau

SEQ ID NO: 486486 - RNA, 19 nt, Human
uguguuggcuuccauuuuu

SEQ ID NO: 486487 - RNA, 21 nt, Human
uuaaacuguacaauaaacccc

SEQ ID NO: 486488 - RNA, 27 nt, Human
uuacaugacaguucuuuccuuuuuuuu

SEQ ID NO: 486489 - RNA, 27 nt, Human
uuacaugacaguucuuuccuuuuuuuu

SEQ ID NO: 486490 - RNA, 21 nt, Human
uuaguagagagggguuucgcc

SEQ ID NO: 486491 - RNA, 23 nt, Human
uuaguagagagggguuucgccau

SEQ ID NO: 486492 - RNA, 24 nt, Human
uuaguagagagggguuucgccaug

SEQ ID NO: 486493 - RNA, 23 nt, Human
uucaagcgauucucuugccucag

SEQ ID NO: 486494 - RNA, 20 nt, Human
uucaugaauauuucugaaaa

SEQ ID NO: 486495 - RNA, 20 nt, Human
uuccauuuuuuuuucuguuu

SEQ ID NO: 486496 - RNA, 19 nt, Human
uucugccauuguccccuuc

SEQ ID NO: 486497 - RNA, 19 nt, Human
uugaucacaccaaaagaag

SEQ ID NO: 486498 - RNA, 19 nt, Human
uugaucacaccaaaagaag

SEQ ID NO: 486499 - RNA, 19 nt, Human
uugccuaaaaugagugaug

SEQ ID NO: 486500 - RNA, 20 nt, Human
uuuaaaaaaaaaaaaaguau

SEQ ID NO: 486501 - RNA, 26 nt, Human
uuuaaaauaauuaucagaagccagca

SEQ ID NO: 486502 - RNA, 24 nt, Human
uuuaguagagagggguuucgccau

SEQ ID NO: 486503 - RNA, 24 nt, Human
uuucgccauguuggccaggcuggu

SEQ ID NO: 486504 - RNA, 23 nt, Human
uuucgccauguuggccaggcugu

SEQ ID NO: 486505 - RNA, 20 nt, Human
uuugaaggacaugagaaagc

SEQ ID NO: 486506 - RNA, 20 nt, Human
uuugaaggacaugagaaagc

SEQ ID NO: 486507 - RNA, 18 nt, Human
uuugcagcaaugaguuug

SEQ ID NO: 486508 - RNA, 22 nt, Human
uuugcagcaaugaguuuguacc

SEQ ID NO: 486509 - RNA, 20 nt, Human
uuugcuggaacuccgcuagg

SEQ ID NO: 486510 - RNA, 21 nt, Human
uuugcuggaacuccgcuaggc

SEQ ID NO: 486511 - RNA, 23 nt, Human
uuuuaaacuguacaauaaacccc

SEQ ID NO: 486512 - RNA, 21 nt, Human
uuuugcauaacaucuaugagu

SEQ ID NO: 486513 - RNA, 21 nt, Human
uuuuuaguagagagggguuuc

SEQ ID NO: 486514 - RNA, 18 nt, Human
uuuuuuuuuuuuuuuuug

SEQ ID NO: 486515 - RNA, 18 nt, Human
uuuuuuuuuuuuuuuuug

SEQ ID NO: 486516 - RNA, 18 nt, Human
aacaguuucuggacuuuc

SEQ ID NO: 486517 - RNA, 25 nt, Human
aacgauggagggagggguucagaga

SEQ ID NO: 486518 - RNA, 30 nt, Human
aagcuguuguuuccucaagggaaaacuuuu

SEQ ID NO: 486519 - RNA, 20 nt, Human
acagugaagaaaacgaugga

SEQ ID NO: 486520 - RNA, 22 nt, Human
acccuccuuggccccuucacuc

SEQ ID NO: 486521 - RNA, 19 nt, Human
acuaucucuggucuuggag

SEQ ID NO: 486522 - RNA, 18 nt, Human
agaacaaagaacaagcuc

SEQ ID NO: 486523 - RNA, 21 nt, Human
agaggacucuucaggccacuc

SEQ ID NO: 486524 - RNA, 18 nt, Human
aggcugugcccggccucg

SEQ ID NO: 486525 - RNA, 22 nt, Human
agggacccugggagaggucccu

SEQ ID NO: 486526 - RNA, 18 nt, Human
agguagcugggauugggg

SEQ ID NO: 486527 - RNA, 22 nt, Human
agugaagaaaacgauggaggga

SEQ ID NO: 486528 - RNA, 18 nt, Human
auggagggagggguucag

SEQ ID NO: 486529 - RNA, 20 nt, Human
cacgccccuugcacucaccc

SEQ ID NO: 486530 - RNA, 24 nt, Human
cacuuucaguuuuugguuuagggg

SEQ ID NO: 486531 - RNA, 25 nt, Human
cagcugccauucccgcuggcuugga

SEQ ID NO: 486532 - RNA, 19 nt, Human
cauucccgcuggcuuggag

SEQ ID NO: 486533 - RNA, 18 nt, Human
cauugguugagguagcug

SEQ ID NO: 486534 - RNA, 19 nt, Human
ccacugucacccuccccgc

SEQ ID NO: 486535 - RNA, 24 nt, Human
cccuucacuccagcaggugggaac

SEQ ID NO: 486536 - RNA, 21 nt, Human
ccuauccccaccccagggacc

SEQ ID NO: 486537 - RNA, 25 nt, Human
ccucaccaagccaagaagucucccc

SEQ ID NO: 486538 - RNA, 19 nt, Human
ccucccaucccaguggagc

SEQ ID NO: 486539 - RNA, 22 nt, Human
ccucccaucccaguggagccaa

SEQ ID NO: 486540 - RNA, 23 nt, Human
ccugagcagcuuuuggcgggggg

SEQ ID NO: 486541 - RNA, 22 nt, Human
ccuucacuccagcaggugggaa

SEQ ID NO: 486542 - RNA, 19 nt, Human
ccuugcacucacccuccuu

SEQ ID NO: 486543 - RNA, 22 nt, Human
ccuugggcggccacugucaccc

SEQ ID NO: 486544 - RNA, 23 nt, Human
ccuugggcggccacugucacccu

SEQ ID NO: 486545 - RNA, 24 nt, Human
cucccaucccaguggagccaagag

SEQ ID NO: 486546 - RNA, 19 nt, Human
cucuggucuuggagauaag

SEQ ID NO: 486547 - RNA, 18 nt, Human
cugagugcaugucauccc

SEQ ID NO: 486548 - RNA, 29 nt, Human
cuggagcagggcuugcacucugaggggag

SEQ ID NO: 486549 - RNA, 18 nt, Human
cuggccugcaggaaacac

SEQ ID NO: 486550 - RNA, 19 nt, Human
cuuggccccuucacuccag

SEQ ID NO: 486551 - RNA, 21 nt, Human
cuuucacuuucaguuuuuggu

SEQ ID NO: 486552 - RNA, 18 nt, Human
cuuugaucacgcggaggc

SEQ ID NO: 486553 - RNA, 22 nt, Human
gacgcggcaagugaggggauga

SEQ ID NO: 486554 - RNA, 25 nt, Human
gaggacagugaagaaaaccgguacc

SEQ ID NO: 486555 - RNA, 21 nt, Human
gagggguucagagaguuuguu

SEQ ID NO: 486556 - RNA, 21 nt, Human
gcagcugccauucccgcuggc

SEQ ID NO: 486557 - RNA, 20 nt, Human
ggccagaagguucauucaga

SEQ ID NO: 486558 - RNA, 21 nt, Human
ggcggccacugucacccuccc

SEQ ID NO: 486559 - RNA, 21 nt, Human
uaggggacaauagccucuguu

SEQ ID NO: 486560 - RNA, 21 nt, Human
ucauccccacucuggagccca

SEQ ID NO: 486561 - RNA, 24 nt, Human
ucccacgccccuugcacucacccu

SEQ ID NO: 486562 - RNA, 18 nt, Human
uccccaccccagggaccc

SEQ ID NO: 486563 - RNA, 18 nt, Human
uccccgccccugacauuu

SEQ ID NO: 486564 - RNA, 20 nt, Human
uccccuguugagagccuggg

SEQ ID NO: 486565 - RNA, 19 nt, Human
ucccugagcagcuuuuggc

SEQ ID NO: 486566 - RNA, 20 nt, Human
ucccuuguccucuccuccca

SEQ ID NO: 486567 - RNA, 21 nt, Human
ucggaagagcuggucugagca

SEQ ID NO: 486568 - RNA, 19 nt, Human
ucuggacuuucacuuucag

SEQ ID NO: 486569 - RNA, 20 nt, Human
ugacaaagaacaaagaacaa

SEQ ID NO: 486570 - RNA, 21 nt, Human
ugacaaagaacaaagaacaag

SEQ ID NO: 486571 - RNA, 25 nt, Human
ugacaaagaacaaagaacaagcucg

SEQ ID NO: 486572 - RNA, 18 nt, Human
ugaccagcugauguccgc

SEQ ID NO: 486573 - RNA, 23 nt, Human
uggacuuucacuuucaguuuuug

SEQ ID NO: 486574 - RNA, 19 nt, Human
uggagggagggguucagag

SEQ ID NO: 486575 - RNA, 23 nt, Human
ugugacaaagaacaaagaacaag

SEQ ID NO: 486576 - RNA, 21 nt, Human
uguugucugucugguguuagc

SEQ ID NO: 486577 - RNA, 23 nt, Human
uuaggggacaauagccucuguuu

SEQ ID NO: 486578 - RNA, 18 nt, Human
uugguugagguagcuggg

SEQ ID NO: 486579 - RNA, 21 nt, Human
uuucuggacuuucacuuucag

SEQ ID NO: 486580 - RNA, 19 nt, Human
aauauccacuucuuccagc

SEQ ID NO: 486581 - RNA, 21 nt, Human
aaucacaaucaccuugauuca

SEQ ID NO: 486582 - RNA, 24 nt, Human
acuccagccauuucaccaucaguc

SEQ ID NO: 486583 - RNA, 23 nt, Human
agaauccuuuaaaguuaccacuu

SEQ ID NO: 486584 - RNA, 24 nt, Human
auacagaauccuuuaaaguuacca

SEQ ID NO: 486585 - RNA, 22 nt, Human
aucacaaucaccuugauucaga

SEQ ID NO: 486586 - RNA, 21 nt, Human
auuuuuauuuuuuauuucuua

SEQ ID NO: 486587 - RNA, 22 nt, Human
auuuuuuauuuuuuuccuguag

SEQ ID NO: 486588 - RNA, 18 nt, Human
caacaacauauauggcau

SEQ ID NO: 486589 - RNA, 20 nt, Human
cagccuacugacagucucug

SEQ ID NO: 486590 - RNA, 18 nt, Human
cagcgggaccuuagugac

SEQ ID NO: 486591 - RNA, 23 nt, Human
caugugagugcagcucaaugagc

SEQ ID NO: 486592 - RNA, 23 nt, Human
cccacaccuuugcucacugcuac

SEQ ID NO: 486593 - RNA, 21 nt, Human
ccuuagugacagccuuuguuc

SEQ ID NO: 486594 - RNA, 23 nt, Human
cucaucauugaugucaaaacuuc

SEQ ID NO: 486595 - RNA, 24 nt, Human
cuccagccauuucaccaucaguca

SEQ ID NO: 486596 - RNA, 18 nt, Human
cugauggugaaacagcug

SEQ ID NO: 486597 - RNA, 21 nt, Human
cuguaguccuuccauaagccu

SEQ ID NO: 486598 - RNA, 19 nt, Human
gcagcucaaugagcagcag

SEQ ID NO: 486599 - RNA, 23 nt, Human
ggaaaccuuucacacccacaccu

SEQ ID NO: 486600 - RNA, 22 nt, Human
ggcagcaguagcaucagcagaa

SEQ ID NO: 486601 - RNA, 20 nt, Human
guaguccuuccauaagccuu

SEQ ID NO: 486602 - RNA, 20 nt, Human
uaauaacaacaaucaauaac

SEQ ID NO: 486603 - RNA, 22 nt, Human
uacaguaggcugaaagaagugg

SEQ ID NO: 486604 - RNA, 22 nt, Human
uagcaugccauucaagaaaaug

SEQ ID NO: 486605 - RNA, 22 nt, Human
uaggcugaaagaaguggauauu

SEQ ID NO: 486606 - RNA, 21 nt, Human
ucaaugagcagcagccucucu

SEQ ID NO: 486607 - RNA, 20 nt, Human
ucacaaagucuguauccuca

SEQ ID NO: 486608 - RNA, 19 nt, Human
ucuagaggcaucugccuca

SEQ ID NO: 486609 - RNA, 18 nt, Human
ucucuacuuaugauacug

SEQ ID NO: 486610 - RNA, 22 nt, Human
ucucuacuuaugauacugaguu

SEQ ID NO: 486611 - RNA, 22 nt, Human
ugacgcaccauuaauagugaaa

SEQ ID NO: 486612 - RNA, 21 nt, Human
ugagaagaaacaucagacaca

SEQ ID NO: 486613 - RNA, 24 nt, Human
ugauugaaagguuacuguccacua

SEQ ID NO: 486614 - RNA, 21 nt, Human
ugcugaacuuuuuuuggaaac

SEQ ID NO: 486615 - RNA, 24 nt, Human
uggaaaccuuucacacccacaccu

SEQ ID NO: 486616 - RNA, 22 nt, Human
uggagccucaucauugauguca

SEQ ID NO: 486617 - RNA, 20 nt, Human
uggguccuccagggaagaug

SEQ ID NO: 486618 - RNA, 19 nt, Human
uguguuuuaaguguuggca

SEQ ID NO: 486619 - RNA, 23 nt, Human
uucagaaucacuccagccauuuc

SEQ ID NO: 486620 - RNA, 23 nt, Human
uucagauauugaguaaaucauug

SEQ ID NO: 486621 - RNA, 23 nt, Human
uucaugcugaacuuuuuuuggaa

SEQ ID NO: 486622 - RNA, 22 nt, Human
uugauguugugccaggcaugca

SEQ ID NO: 486623 - RNA, 24 nt, Human
uuuauuuuuauuuuuuauuucuua

SEQ ID NO: 486624 - RNA, 23 nt, Human
aaccagccucaugugcagagggu

SEQ ID NO: 486625 - RNA, 23 nt, Human
aacuccacuucuccuccacccca

SEQ ID NO: 486626 - RNA, 23 nt, Human
aacuccacuucuccuccacccca

SEQ ID NO: 486627 - RNA, 22 nt, Human
accccaaaaacgagagccauga

SEQ ID NO: 486628 - RNA, 22 nt, Human
agaaaggaagaagacagacuaa

SEQ ID NO: 486629 - RNA, 23 nt, Human
agacuaagcagaccaccugaggg

SEQ ID NO: 486630 - RNA, 18 nt, Human
agauguugguaaaccagc

SEQ ID NO: 486631 - RNA, 21 nt, Human
aucccugggccuagacuucug

SEQ ID NO: 486632 - RNA, 24 nt, Human
cacuucuccuccaccccacgcuga

SEQ ID NO: 486633 - RNA, 26 nt, Human
cagaccaccugagguuuuuagaaucu

SEQ ID NO: 486634 - RNA, 23 nt, Human
cagcuccgggccccacugcgccu

SEQ ID NO: 486635 - RNA, 27 nt, Human
caugaccccaaaaacgagagccaugag

SEQ ID NO: 486636 - RNA, 20 nt, Human
ccaaaccaaaucuuccuucc

SEQ ID NO: 486637 - RNA, 22 nt, Human
ccacugcgccuuuuccuagccc

SEQ ID NO: 486638 - RNA, 19 nt, Human
ccccaaaaacgagagccau

SEQ ID NO: 486639 - RNA, 20 nt, Human
ccccacugcgccuuuuccua

SEQ ID NO: 486640 - RNA, 25 nt, Human
ccccacugcgccuuuuccuagcccu

SEQ ID NO: 486641 - RNA, 21 nt, Human
ccccaugaccccaaaaacgag

SEQ ID NO: 486642 - RNA, 22 nt, Human
ccccugugccccugaacuucca

SEQ ID NO: 486643 - RNA, 24 nt, Human
cccuccccaugaccccaaaaacga

SEQ ID NO: 486644 - RNA, 24 nt, Human
cccugaacuuccaaacuccacuuc

SEQ ID NO: 486645 - RNA, 21 nt, Human
ccuccccaugaccccaaaaac

SEQ ID NO: 486646 - RNA, 20 nt, Human
ccugaacuuccaaacuccac

SEQ ID NO: 486647 - RNA, 24 nt, Human
ccuugagaaaggaagaagacagac

SEQ ID NO: 486648 - RNA, 20 nt, Human
cgucaccaggagaacggaag

SEQ ID NO: 486649 - RNA, 20 nt, Human
cugaccaccggggcgguucc

SEQ ID NO: 486650 - RNA, 22 nt, Human
cugcuggauccccaacuggagc

SEQ ID NO: 486651 - RNA, 21 nt, Human
gacuucugucucccucacuuc

SEQ ID NO: 486652 - RNA, 19 nt, Human
gcgguuccuguaggccacg

SEQ ID NO: 486653 - RNA, 24 nt, Human
gugcucagugaugugaagcacaca

SEQ ID NO: 486654 - RNA, 25 nt, Human
uaaaaccaaaccaaaucuuccuucc

SEQ ID NO: 486655 - RNA, 21 nt, Human
uaagcagaccaccugagguuu

SEQ ID NO: 486656 - RNA, 26 nt, Human
uaagcagaccaccugagguuuuuaga

SEQ ID NO: 486657 - RNA, 18 nt, Human
uagcaacagcgcggcagc

SEQ ID NO: 486658 - RNA, 24 nt, Human
uccaaacuccacuucuccuccacc

SEQ ID NO: 486659 - RNA, 24 nt, Human
uccacuugaguuuccaacauaagg

SEQ ID NO: 486660 - RNA, 25 nt, Human
uccccaugaccccaaaaacgagagc

SEQ ID NO: 486661 - RNA, 22 nt, Human
ucccucagggcaaaaguggcua

SEQ ID NO: 486662 - RNA, 19 nt, Human
ucccugggccuagacuucu

SEQ ID NO: 486663 - RNA, 25 nt, Human
uccgggccccacugcgccuuuuccu

SEQ ID NO: 486664 - RNA, 25 nt, Human
ugaacuuccaaacuccacuucuccu

SEQ ID NO: 486665 - RNA, 20 nt, Human
ugagaauaaaaccaaaccaa

SEQ ID NO: 486666 - RNA, 18 nt, Human
ugagggaguagauguugg

SEQ ID NO: 486667 - RNA, 19 nt, Human
ugagggaguagauguuggu

SEQ ID NO: 486668 - RNA, 23 nt, Human
ugaguuuccaacauaaggacacc

SEQ ID NO: 486669 - RNA, 21 nt, Human
ugccccugaacuuccaaacuc

SEQ ID NO: 486670 - RNA, 24 nt, Human
ugccccugaacuuccaaacuccac

SEQ ID NO: 486671 - RNA, 21 nt, Human
ugccccugugccccugaacuu

SEQ ID NO: 486672 - RNA, 23 nt, Human
uggauccccaacuggagccaucc

SEQ ID NO: 486673 - RNA, 19 nt, Human
ugugcagagggucuccugc

SEQ ID NO: 486674 - RNA, 23 nt, Human
uuauaaauuaauuccaggaacgc

SEQ ID NO: 486675 - RNA, 23 nt, Human
uuuuuuuuuuuuuuuuugggauu

SEQ ID NO: 486676 - RNA, 22 nt, Human
uuuuuuuuuuuuuuuuuuuggg

SEQ ID NO: 486677 - RNA, 24 nt, Human
aaacaacaaacuggaccuggauuc

SEQ ID NO: 486678 - RNA, 18 nt, Human
agccccacuuucccuuuc

SEQ ID NO: 486679 - RNA, 22 nt, Human
aggaaacaacaaacuggaccug

SEQ ID NO: 486680 - RNA, 24 nt, Human
aggcgaaggagcucacguuuguaa

SEQ ID NO: 486681 - RNA, 24 nt, Human
auuuuguauacaaauguguagaaa

SEQ ID NO: 486682 - RNA, 19 nt, Human
caccucucccuuuucuucc

SEQ ID NO: 486683 - RNA, 19 nt, Human
cagaaagaugaaaauccau

SEQ ID NO: 486684 - RNA, 19 nt, Human
cagccccacuuucccuuuc

SEQ ID NO: 486685 - RNA, 19 nt, Human
caugucguuuguccccagg

SEQ ID NO: 486686 - RNA, 24 nt, Human
cccuauuucagaagacugaaauaa

SEQ ID NO: 486687 - RNA, 25 nt, Human
cccuccgacagcugccuuauccugg

SEQ ID NO: 486688 - RNA, 19 nt, Human
cccuuuucuuccuguaucc

SEQ ID NO: 486689 - RNA, 19 nt, Human
ccuggaggaaacaacaaac

SEQ ID NO: 486690 - RNA, 22 nt, Human
ccuguggagaaaugggagauga

SEQ ID NO: 486691 - RNA, 21 nt, Human
cucccuuuucuuccuguaucc

SEQ ID NO: 486692 - RNA, 24 nt, Human
cugccuuauccuggaggaaacaac

SEQ ID NO: 486693 - RNA, 19 nt, Human
gagacuaguccuauccaca

SEQ ID NO: 486694 - RNA, 24 nt, Human
gcccuguggagaaaugggagauga

SEQ ID NO: 486695 - RNA, 18 nt, Human
gcuaccagggcuggagaa

SEQ ID NO: 486696 - RNA, 20 nt, Human
uaacgugugcccacuucccc

SEQ ID NO: 486697 - RNA, 19 nt, Human
uacagccccacuuucccuu

SEQ ID NO: 486698 - RNA, 22 nt, Human
uauucuucuugcauuuggugga

SEQ ID NO: 486699 - RNA, 24 nt, Human
ucaccucucccuuuucuuccugua

SEQ ID NO: 486700 - RNA, 23 nt, Human
ugcccuguggagaaaugggagau

SEQ ID NO: 486701 - RNA, 18 nt, Human
uggagaaaugggagauga

SEQ ID NO: 486702 - RNA, 23 nt, Human
ugggagaugauuuuccccuccga

SEQ ID NO: 486703 - RNA, 18 nt, Human
uucagaagacugaaauaa

SEQ ID NO: 486704 - RNA, 22 nt, Human
uucugccacuuccuaguuaugu

SEQ ID NO: 486705 - RNA, 24 nt, Human
aaaaaaaaaaaaaauagacuccug

SEQ ID NO: 486706 - RNA, 23 nt, Human
aaaaaaauagacuccugugauua

SEQ ID NO: 486707 - RNA, 19 nt, Human
aaaaagacaaaagcaagua

SEQ ID NO: 486708 - RNA, 19 nt, Human
aacacggugaaaccccguc

SEQ ID NO: 486709 - RNA, 20 nt, Human
aacacggugaaaccccgucu

SEQ ID NO: 486710 - RNA, 21 nt, Human
aacacggugaaaccccgucuc

SEQ ID NO: 486711 - RNA, 24 nt, Human
aacagagcgagacucugucucaaa

SEQ ID NO: 486712 - RNA, 21 nt, Human
acagagcgagacucugucuca

SEQ ID NO: 486713 - RNA, 24 nt, Human
acagagcgagacucugucucaaaa

SEQ ID NO: 486714 - RNA, 24 nt, Human
accccgucucuacuaaaaauacaa

SEQ ID NO: 486715 - RNA, 26 nt, Human
acuccugugauuaaaaagacaaaagc

SEQ ID NO: 486716 - RNA, 28 nt, Human
acucugucucaaaaaaaaaaaaaaaaaa

SEQ ID NO: 486717 - RNA, 23 nt, Human
acuguacuccgccuaggcaacag

SEQ ID NO: 486718 - RNA, 24 nt, Human
aggcaggagaaugccaugaacccg

SEQ ID NO: 486719 - RNA, 24 nt, Human
aggcggaucuugcagugagccgag

SEQ ID NO: 486720 - RNA, 19 nt, Human
aggcugaggcaggagaaug

SEQ ID NO: 486721 - RNA, 21 nt, Human
cacggccccucgcgcgcccga

SEQ ID NO: 486722 - RNA, 23 nt, Human
cacuguacuccgccuaggcaaca

SEQ ID NO: 486723 - RNA, 23 nt, Human
ccaccacggccccucgcgcgccc

SEQ ID NO: 486724 - RNA, 19 nt, Human
ccacuguacuccgccuagg

SEQ ID NO: 486725 - RNA, 20 nt, Human
ccacuguacuccgccuaggc

SEQ ID NO: 486726 - RNA, 20 nt, Human
ccccucgcgcgcccgaggag

SEQ ID NO: 486727 - RNA, 22 nt, Human
cccggcuggggccgaggagguc

SEQ ID NO: 486728 - RNA, 18 nt, Human
ccgccaccacggccccuc

SEQ ID NO: 486729 - RNA, 20 nt, Human
ccucgcgcgcccgaggagcg

SEQ ID NO: 486730 - RNA, 23 nt, Human
ccuggcuaacacggugaaacccc

SEQ ID NO: 486731 - RNA, 24 nt, Human
ccuggcuaacacggugaaaccccg

SEQ ID NO: 486732 - RNA, 19 nt, Human
ccuguugucccaguugccc

SEQ ID NO: 486733 - RNA, 24 nt, Human
cgagaccauccuggcuaacacggu

SEQ ID NO: 486734 - RNA, 21 nt, Human
cgagagcaccgagucgagccc

SEQ ID NO: 486735 - RNA, 21 nt, Human
cgagaucaggccacuguacuc

SEQ ID NO: 486736 - RNA, 18 nt, Human
cucaaaaaaaaaaaaaaa

SEQ ID NO: 486737 - RNA, 19 nt, Human
cucugucucaaaaaaaaaa

SEQ ID NO: 486738 - RNA, 18 nt, Human
cuggcuaacacggugaaa

SEQ ID NO: 486739 - RNA, 19 nt, Human
cuugcagugagccgagauc

SEQ ID NO: 486740 - RNA, 26 nt, Human
gaaaucccgggcagcagagccggaga

SEQ ID NO: 486741 - RNA, 20 nt, Human
gagagcaccgagucgagccg

SEQ ID NO: 486742 - RNA, 19 nt, Human
gagcccggcuggggccgag

SEQ ID NO: 486743 - RNA, 25 nt, Human
gagcccggcuggggccgagagcacc

SEQ ID NO: 486744 - RNA, 24 nt, Human
gcaacagagcgagacucugucuca

SEQ ID NO: 486745 - RNA, 23 nt, Human
gccacuguacuccgccuaggcaa

SEQ ID NO: 486746 - RNA, 24 nt, Human
gccacuguacuccgccuaggcaac

SEQ ID NO: 486747 - RNA, 19 nt, Human
gcggaucuugcagugagcc

SEQ ID NO: 486748 - RNA, 24 nt, Human
gcuaacacggugaaaccccgucuc

SEQ ID NO: 486749 - RNA, 21 nt, Human
ggagaaugccaugaacccggg

SEQ ID NO: 486750 - RNA, 18 nt, Human
ggcguggugacgggcgcc

SEQ ID NO: 486751 - RNA, 23 nt, Human
guacuccgccuaggcaacagagc

SEQ ID NO: 486752 - RNA, 22 nt, Human
uaacacggugaaaccccgucuc

SEQ ID NO: 486753 - RNA, 24 nt, Human
uaacacggugaaaccccgucucua

SEQ ID NO: 486754 - RNA, 22 nt, Human
ucaaaaaaaaaaaaaaaaaaaa

SEQ ID NO: 486755 - RNA, 23 nt, Human
ucaaaaaaaaaaaaaaaaaaaaa

SEQ ID NO: 486756 - RNA, 24 nt, Human
ucaaaaaaaaaaaaaaaaaaaaau

SEQ ID NO: 486757 - RNA, 19 nt, Human
uccgggcagugugggcgga

SEQ ID NO: 486758 - RNA, 22 nt, Human
ucucuacuaaaaauacaaaaaa

SEQ ID NO: 486759 - RNA, 23 nt, Human
ucugucucaaaaaaaaaaaaaaa

SEQ ID NO: 486760 - RNA, 24 nt, Human
ugaggcaggagaaugccaugaacc

SEQ ID NO: 486761 - RNA, 25 nt, Human
ugaggcaggagaaugccaugaaccc

SEQ ID NO: 486762 - RNA, 19 nt, Human
ugccaugaacccgggaggc

SEQ ID NO: 486763 - RNA, 21 nt, Human
ugucccaguugcccuggaggc

SEQ ID NO: 486764 - RNA, 24 nt, Human
uguccgggcagugugggcggaugc

SEQ ID NO: 486765 - RNA, 22 nt, Human
uuagcugggcguggugacgggc

SEQ ID NO: 486766 - RNA, 24 nt, Human
uuagcugggcguggugacgggcgc

SEQ ID NO: 486767 - RNA, 18 nt, Human
uugcagugagccgagauc

SEQ ID NO: 486768 - RNA, 23 nt, Human
uugcagugagccgagaucaggcc

SEQ ID NO: 486769 - RNA, 25 nt, Human
uugcagugagccgagaucaggccac

SEQ ID NO: 486770 - RNA, 20 nt, Human
aaaucugccuuuugaaacca

SEQ ID NO: 486771 - RNA, 22 nt, Human
aagcccagaaauucagaggaaa

SEQ ID NO: 486772 - RNA, 25 nt, Human
agaccaagcccagaaauucagagga

SEQ ID NO: 486773 - RNA, 27 nt, Human
caaggaacaccaaggugaucuucuucc

SEQ ID NO: 486774 - RNA, 18 nt, Human
cagaauguugggagaaga

SEQ ID NO: 486775 - RNA, 20 nt, Human
cuggugaucauaauggugcu

SEQ ID NO: 486776 - RNA, 23 nt, Human
gaaauaacagaauguugggagaa

SEQ ID NO: 486777 - RNA, 19 nt, Human
gaccaagcccagaaauuca

SEQ ID NO: 486778 - RNA, 21 nt, Human
uauuuucauuaaauuguuuca

SEQ ID NO: 486779 - RNA, 18 nt, Human
ugggagaagauaaaucug

SEQ ID NO: 486780 - RNA, 19 nt, Human
ugggagaagauaaaucugc

SEQ ID NO: 486781 - RNA, 23 nt, Human
uucaaaaguaucagaaauaacag

SEQ ID NO: 486782 - RNA, 24 nt, Human
aaacuaugguuaccaaacagcuau

SEQ ID NO: 486783 - RNA, 18 nt, Human
acagugucuggaaaagga

SEQ ID NO: 486784 - RNA, 22 nt, Human
cacgcgcagcacaagacgcgcg

SEQ ID NO: 486785 - RNA, 22 nt, Human
cggaagcgagaaugcacuuccc

SEQ ID NO: 486786 - RNA, 22 nt, Human
cgggagggcccaaaagcuugcg

SEQ ID NO: 486787 - RNA, 21 nt, Human
cuacugagacuaauuucacgc

SEQ ID NO: 486788 - RNA, 18 nt, Human
cuggaaaaggauguaaca

SEQ ID NO: 486789 - RNA, 19 nt, Human
cuuaaacccgaagagaaga

SEQ ID NO: 486790 - RNA, 20 nt, Human
cuugcuacauaguuuucuca

SEQ ID NO: 486791 - RNA, 25 nt, Human
gaacaagugaaacuaugguuacuac

SEQ ID NO: 486792 - RNA, 19 nt, Human
gaagagaagauaaagguug

SEQ ID NO: 486793 - RNA, 19 nt, Human
guacccccacgauuacaca

SEQ ID NO: 486794 - RNA, 22 nt, Human
uaacaauaaauaacuguagaug

SEQ ID NO: 486795 - RNA, 22 nt, Human
uacaauaaacguuucuuaaacc

SEQ ID NO: 486796 - RNA, 23 nt, Human
uacaaugaauacaaaagcaguug

SEQ ID NO: 486797 - RNA, 21 nt, Human
uacccccacgauuacacagcu

SEQ ID NO: 486798 - RNA, 20 nt, Human
ucccuuucucgggagggccc

SEQ ID NO: 486799 - RNA, 18 nt, Human
ugucuggaaaaggaugua

SEQ ID NO: 486800 - RNA, 18 nt, Human
aaaauuccacagcuguaa

SEQ ID NO: 486801 - RNA, 28 nt, Human
cacagcuguaauccucaggaucacuuug

SEQ ID NO: 486802 - RNA, 24 nt, Human
cuaaagcaaaacauccuguucacu

SEQ ID NO: 486803 - RNA, 24 nt, Human
gacaaaaauuccacagcuguaauc

SEQ ID NO: 486804 - RNA, 18 nt, Human
gcgcggcguggccgggag

SEQ ID NO: 486805 - RNA, 24 nt, Human
gcuccagcggaggaaaaggaaacg

SEQ ID NO: 486806 - RNA, 22 nt, Human
ggcgcggcguggccgggaggaa

SEQ ID NO: 486807 - RNA, 26 nt, Human
uaaagcaaaacauccuguucacugga

SEQ ID NO: 486808 - RNA, 21 nt, Human
uaacaagguaaguaacauaug

SEQ ID NO: 486809 - RNA, 20 nt, Human
ucagugcaauuuuuaaaaaa

SEQ ID NO: 486810 - RNA, 21 nt, Human
uccagcggaggaaaaggaaac

SEQ ID NO: 486811 - RNA, 21 nt, Human
ugcuccagcggaggaaaagga

SEQ ID NO: 486812 - RNA, 24 nt, Human
uucucuccuuuuuucauaugggaa

SEQ ID NO: 486813 - RNA, 28 nt, Human
uuucagaacuuccaaauuucucauuuga

SEQ ID NO: 486814 - RNA, 23 nt, Human
uuuuaugucacugcugcuaaagc

SEQ ID NO: 486815 - RNA, 22 nt, Human
aaacugcauuuauuguguagaa

SEQ ID NO: 486816 - RNA, 19 nt, Human
agagggagaaaaaaaaaaa

SEQ ID NO: 486817 - RNA, 20 nt, Human
cacaauaguagucagaugua

SEQ ID NO: 486818 - RNA, 21 nt, Human
ggagaaaaaaaaaaagccuua

SEQ ID NO: 486819 - RNA, 21 nt, Human
uucagagggagaaaaaaaaaa

SEQ ID NO: 486820 - RNA, 22 nt, Human
uucagagggagaaaaaaaaaaa

SEQ ID NO: 486821 - RNA, 22 nt, Human
ccuccaguaagaagagaguggg

SEQ ID NO: 486822 - RNA, 18 nt, Human
cuuguaaaaugaaguaac

SEQ ID NO: 486823 - RNA, 18 nt, Human
ggcccuccacucuccccu

SEQ ID NO: 486824 - RNA, 19 nt, Human
gguaagugcacccagcagc

SEQ ID NO: 486825 - RNA, 18 nt, Human
uaagugcacccagcagcc

SEQ ID NO: 486826 - RNA, 20 nt, Human
ucagcggcccuccacucucc

SEQ ID NO: 486827 - RNA, 22 nt, Human
ucuccgagaccgggccgcaaac

SEQ ID NO: 486828 - RNA, 18 nt, Human
ugugauggguggggugcc

SEQ ID NO: 486829 - RNA, 23 nt, Human
uugaagucuuacauuuuauuuaa

SEQ ID NO: 486830 - RNA, 19 nt, Human
uuuuuuuuuuuugaagucu

SEQ ID NO: 486831 - RNA, 18 nt, Human
uuuuuuuuuuuuuuuuug

SEQ ID NO: 486832 - RNA, 21 nt, Human
aaggagaauaagaaaacauca

SEQ ID NO: 486833 - RNA, 22 nt, Human
acaaauacagccuucaccuaca

SEQ ID NO: 486834 - RNA, 20 nt, Human
gccaagaauacaaacacaaa

SEQ ID NO: 486835 - RNA, 26 nt, Human
aaaaaaaacucuuuuuucaaaauaga

SEQ ID NO: 486836 - RNA, 23 nt, Human
aaaagagagaagaaaagaaaaaa

SEQ ID NO: 486837 - RNA, 18 nt, Human
aaagaagaaagggagaag

SEQ ID NO: 486838 - RNA, 23 nt, Human
aaagagaaaaacuaaaccauuuc

SEQ ID NO: 486839 - RNA, 23 nt, Human
aaagggagaaggaaagaaaagag

SEQ ID NO: 486840 - RNA, 19 nt, Human
aagaaagggagaaggaaag

SEQ ID NO: 486841 - RNA, 25 nt, Human
aagagagaagaaaagaaaaaagggg

SEQ ID NO: 486842 - RNA, 21 nt, Human
aagcaaauucuuuggagccca

SEQ ID NO: 486843 - RNA, 24 nt, Human
aaggaaagaaaagagagaagaaaa

SEQ ID NO: 486844 - RNA, 19 nt, Human
aaggagacagcacacccag

SEQ ID NO: 486845 - RNA, 24 nt, Human
aagggaacagaugaagcuucagag

SEQ ID NO: 486846 - RNA, 20 nt, Human
acaaagaucaggugaagaaa

SEQ ID NO: 486847 - RNA, 21 nt, Human
acacagaguccuuuaaaaaua

SEQ ID NO: 486848 - RNA, 20 nt, Human
acaugugacuacuggaaaug

SEQ ID NO: 486849 - RNA, 18 nt, Human
agaaaacaaacaccucca

SEQ ID NO: 486850 - RNA, 21 nt, Human
agaaaagagagaagaaaagaa

SEQ ID NO: 486851 - RNA, 22 nt, Human
agaaagggagaaggaaagaaaa

SEQ ID NO: 486852 - RNA, 19 nt, Human
agaagaaaagaaaaaaggg

SEQ ID NO: 486853 - RNA, 21 nt, Human
agaagaaaagaaaaaagggga

SEQ ID NO: 486854 - RNA, 25 nt, Human
agaagaaagggagaaggaaagaaaa

SEQ ID NO: 486855 - RNA, 24 nt, Human
agacagcacacccagcacccccca

SEQ ID NO: 486856 - RNA, 19 nt, Human
agagaagaaaagaaaaaag

SEQ ID NO: 486857 - RNA, 18 nt, Human
agaggaaaaagagaggga

SEQ ID NO: 486858 - RNA, 18 nt, Human
agaggaaaaagagaggga

SEQ ID NO: 486859 - RNA, 24 nt, Human
agaggaaaaagagagggagggcaa

SEQ ID NO: 486860 - RNA, 23 nt, Human
agaugucacuagacaacuggcag

SEQ ID NO: 486861 - RNA, 24 nt, Human
agcaaauucuuuggagcccauggc

SEQ ID NO: 486862 - RNA, 18 nt, Human
agcagucaugucaagaug

SEQ ID NO: 486863 - RNA, 22 nt, Human
agcuaaagagaaaaacuaaacc

SEQ ID NO: 486864 - RNA, 23 nt, Human
aggaaagaaaagagagaagaaaa

SEQ ID NO: 486865 - RNA, 23 nt, Human
auaaaagaucauuaauuguugac

SEQ ID NO: 486866 - RNA, 20 nt, Human
aucccugcaaccccauagaa

SEQ ID NO: 486867 - RNA, 22 nt, Human
augaagcacauauugcagugcu

SEQ ID NO: 486868 - RNA, 22 nt, Human
auucuucuacgaaaacaaaaca

SEQ ID NO: 486869 - RNA, 26 nt, Human
caaaacaaucacaugugacuacugga

SEQ ID NO: 486870 - RNA, 23 nt, Human
caaaauagaagcaguauucuucu

SEQ ID NO: 486871 - RNA, 23 nt, Human
caaccccauagaaagaaaaaaaa

SEQ ID NO: 486872 - RNA, 20 nt, Human
caagcaucagaugucacuag

SEQ ID NO: 486873 - RNA, 18 nt, Human
cacaugugacuacuggaa

SEQ ID NO: 486874 - RNA, 26 nt, Human
cacuuaaaaaaaauucaccaccuaga

SEQ ID NO: 486875 - RNA, 20 nt, Human
cagcacacccagcacccccc

SEQ ID NO: 486876 - RNA, 24 nt, Human
caggauucggggaucuuaaaaguu

SEQ ID NO: 486877 - RNA, 20 nt, Human
ccacugggcauggggugggu

SEQ ID NO: 486878 - RNA, 22 nt, Human
ccauagagcuaaagagaaaaac

SEQ ID NO: 486879 - RNA, 20 nt, Human
cccauagaaagaaaaaaaac

SEQ ID NO: 486880 - RNA, 19 nt, Human
cccauucccagggaaaucc

SEQ ID NO: 486881 - RNA, 25 nt, Human
ccgugccacuuaaaaaaaauucacc

SEQ ID NO: 486882 - RNA, 23 nt, Human
ccugcaaccccauagaaagaaaa

SEQ ID NO: 486883 - RNA, 24 nt, Human
ccugcaaccccauagaaagaaaaa

SEQ ID NO: 486884 - RNA, 22 nt, Human
cgaaaucccaugaagcacauau

SEQ ID NO: 486885 - RNA, 18 nt, Human
cgggcaccguggggugug

SEQ ID NO: 486886 - RNA, 23 nt, Human
cuccuccugcuggcuguuuucuc

SEQ ID NO: 486887 - RNA, 19 nt, Human
cugcagugacuuaccuagu

SEQ ID NO: 486888 - RNA, 22 nt, Human
cugguguggggcugaggaugug

SEQ ID NO: 486889 - RNA, 20 nt, Human
gaacuagaagagguuccaca

SEQ ID NO: 486890 - RNA, 23 nt, Human
gagaagaaaagaaaaaaggggga

SEQ ID NO: 486891 - RNA, 20 nt, Human
gaggugggaagggaacagau

SEQ ID NO: 486892 - RNA, 19 nt, Human
gcaaacauggauguguaau

SEQ ID NO: 486893 - RNA, 21 nt, Human
gcagugcucucugacucucac

SEQ ID NO: 486894 - RNA, 23 nt, Human
ggagaaaacaaacaccuccaaaa

SEQ ID NO: 486895 - RNA, 23 nt, Human
ggcaaagaagaaagggagaagga

SEQ ID NO: 486896 - RNA, 22 nt, Human
gggaaggagacagcacacccag

SEQ ID NO: 486897 - RNA, 25 nt, Human
gggcaugggguggguuggggugggg

SEQ ID NO: 486898 - RNA, 20 nt, Human
ggguggggugggcaguaggg

SEQ ID NO: 486899 - RNA, 18 nt, Human
gugggcaguagggcuagg

SEQ ID NO: 486900 - RNA, 23 nt, Human
guggguugggguggggugggcag

SEQ ID NO: 486901 - RNA, 18 nt, Human
uaaagagaaaaacuaaac

SEQ ID NO: 486902 - RNA, 23 nt, Human
uacugccccucacauuucucuac

SEQ ID NO: 486903 - RNA, 22 nt, Human
uagaaggcaaagaagaaaggga

SEQ ID NO: 486904 - RNA, 18 nt, Human
uagcuaaaaacauaaagc

SEQ ID NO: 486905 - RNA, 22 nt, Human
uagcuaaaaacauaaagcaaau

SEQ ID NO: 486906 - RNA, 23 nt, Human
uauuuuguuguaucccuggcuca

SEQ ID NO: 486907 - RNA, 21 nt, Human
ucaagcagaaaaagaccgugc

SEQ ID NO: 486908 - RNA, 21 nt, Human
ucacuagacaacuggcagucu

SEQ ID NO: 486909 - RNA, 18 nt, Human
uccacacaaagaucaggu

SEQ ID NO: 486910 - RNA, 19 nt, Human
uccacaggaucccuggcca

SEQ ID NO: 486911 - RNA, 19 nt, Human
ucccagggaaauccaucuu

SEQ ID NO: 486912 - RNA, 22 nt, Human
uccucaaccucugagauggugu

SEQ ID NO: 486913 - RNA, 20 nt, Human
ucucaccccugaaauagagc

SEQ ID NO: 486914 - RNA, 23 nt, Human
ugaaaagcacaguaaauguacug

SEQ ID NO: 486915 - RNA, 19 nt, Human
ugaaauagagcuggugugg

SEQ ID NO: 486916 - RNA, 20 nt, Human
ugaaaugccauagagcuaaa

SEQ ID NO: 486917 - RNA, 18 nt, Human
ugagaccacugggcaugg

SEQ ID NO: 486918 - RNA, 19 nt, Human
ugccugggcuacaguccgc

SEQ ID NO: 486919 - RNA, 26 nt, Human
uggaaauguuaguguuacacagaguc

SEQ ID NO: 486920 - RNA, 20 nt, Human
uggcuugccaccuccucccu

SEQ ID NO: 486921 - RNA, 20 nt, Human
uggcuugccaccuccucccu

SEQ ID NO: 486922 - RNA, 21 nt, Human
ugggaaggagacagcacaccc

SEQ ID NO: 486923 - RNA, 24 nt, Human
ugggaaggagacagcacacccagc

SEQ ID NO: 486924 - RNA, 24 nt, Human
uggggggugugaucagauuucaag

SEQ ID NO: 486925 - RNA, 24 nt, Human
ugggguggggugggcaguagggcu

SEQ ID NO: 486926 - RNA, 18 nt, Human
ugguguggggcugaggau

SEQ ID NO: 486927 - RNA, 20 nt, Human
uguggggcugaggauguggg

SEQ ID NO: 486928 - RNA, 24 nt, Human
uguuguacaccaucccugcaaccc

SEQ ID NO: 486929 - RNA, 26 nt, Human
uucaagcagaaaaagaccgugccacu

SEQ ID NO: 486930 - RNA, 22 nt, Human
uucucccauucccagggaaauc

SEQ ID NO: 486931 - RNA, 23 nt, Human
uuguacaccaucccugcaacccc

SEQ ID NO: 486932 - RNA, 19 nt, Human
uuuagaaggcaaagaagaa

SEQ ID NO: 486933 - RNA, 22 nt, Human
aaaaauuccaauuauacaaggg

SEQ ID NO: 486934 - RNA, 22 nt, Human
aaaugucuucuaagaaccuugg

SEQ ID NO: 486935 - RNA, 19 nt, Human
agaacuguaagaaaaucag

SEQ ID NO: 486936 - RNA, 22 nt, Human
agcuaagaaucaaaaauuccaa

SEQ ID NO: 486937 - RNA, 18 nt, Human
aucagacaguaauuauaa

SEQ ID NO: 486938 - RNA, 21 nt, Human
aucaguucuucagagaacuag

SEQ ID NO: 486939 - RNA, 20 nt, Human
cacucaguacuuuuccucca

SEQ ID NO: 486940 - RNA, 22 nt, Human
uaagaaccuuggaaaaccuaau

SEQ ID NO: 486941 - RNA, 18 nt, Human
uagaacuguaagaaaauc

SEQ ID NO: 486942 - RNA, 18 nt, Human
aacugggcccccagcagg

SEQ ID NO: 486943 - RNA, 23 nt, Human
acauccggggcacccgccgccau

SEQ ID NO: 486944 - RNA, 20 nt, Human
caauuuccucgcugccugag

SEQ ID NO: 486945 - RNA, 25 nt, Human
cauccggggcacccgccgccaucac

SEQ ID NO: 486946 - RNA, 20 nt, Human
cccaccaaacugggccccca

SEQ ID NO: 486947 - RNA, 21 nt, Human
cccgccgccaucacccggaag

SEQ ID NO: 486948 - RNA, 21 nt, Human
ccuccaauuuccucgcugccu

SEQ ID NO: 486949 - RNA, 26 nt, Human
cggaaggcgagguggaaaaaagaaga

SEQ ID NO: 486950 - RNA, 21 nt, Human
gagacacuuggugccuccucc

SEQ ID NO: 486951 - RNA, 23 nt, Human
uccacaaaguccaggaagcggac

SEQ ID NO: 486952 - RNA, 28 nt, Human
uccggggcacccgccgccaucacccgga

SEQ ID NO: 486953 - RNA, 22 nt, Human
uccuccacaaaguccaggaaag

SEQ ID NO: 486954 - RNA, 20 nt, Human
ucgcugccugagacacuugg

SEQ ID NO: 486955 - RNA, 22 nt, Human
ugagacacuuggugccuccucc

SEQ ID NO: 486956 - RNA, 24 nt, Human
uggccuccaauuuccucgcugccu

SEQ ID NO: 486957 - RNA, 18 nt, Human
uuuacacaacuaaaggcu

SEQ ID NO: 486958 - RNA, 21 nt, Human
aagaugauaaaacucauuucu

SEQ ID NO: 486959 - RNA, 21 nt, Human
aagucccuucagcagcagcuc

SEQ ID NO: 486960 - RNA, 19 nt, Human
accacaccgggacugcagu

SEQ ID NO: 486961 - RNA, 22 nt, Human
acccgcggcucgcagggcuccg

SEQ ID NO: 486962 - RNA, 21 nt, Human
acgcaggccgcagaggcacgg

SEQ ID NO: 486963 - RNA, 21 nt, Human
acuccauuguuuuccgaggcc

SEQ ID NO: 486964 - RNA, 20 nt, Human
aggcagggcccccaggccuc

SEQ ID NO: 486965 - RNA, 19 nt, Human
agugucugcacaagccugc

SEQ ID NO: 486966 - RNA, 18 nt, Human
cacagccccuguggucag

SEQ ID NO: 486967 - RNA, 20 nt, Human
caccacaccgggacugcagu

SEQ ID NO: 486968 - RNA, 19 nt, Human
cacgcaggccgcagaggca

SEQ ID NO: 486969 - RNA, 23 nt, Human
cacgcaggccgcagaggcacggu

SEQ ID NO: 486970 - RNA, 21 nt, Human
cagcagcagcuccaucccuga

SEQ ID NO: 486971 - RNA, 24 nt, Human
cagcagcagcuccaucccugagug

SEQ ID NO: 486972 - RNA, 20 nt, Human
cagccccuguggucaggccu

SEQ ID NO: 486973 - RNA, 19 nt, Human
caggcccagcggccaggcc

SEQ ID NO: 486974 - RNA, 20 nt, Human
caggcccagcggccaggccu

SEQ ID NO: 486975 - RNA, 20 nt, Human
caggcuguggggcugggggg

SEQ ID NO: 486976 - RNA, 18 nt, Human
caguagaaaagggucaca

SEQ ID NO: 486977 - RNA, 23 nt, Human
ccaaagcucguggccagggccug

SEQ ID NO: 486978 - RNA, 21 nt, Human
ccaccacaccgggacugcagu

SEQ ID NO: 486979 - RNA, 19 nt, Human
ccacugaauuuggcacagg

SEQ ID NO: 486980 - RNA, 19 nt, Human
ccaggccuggcuggcucac

SEQ ID NO: 486981 - RNA, 22 nt, Human
cccuacaagucccuucagcagc

SEQ ID NO: 486982 - RNA, 21 nt, Human
ccuguggucaggccugugggc

SEQ ID NO: 486983 - RNA, 20 nt, Human
cgcaggacccacagccccuu

SEQ ID NO: 486984 - RNA, 22 nt, Human
cgcccggaaggcagggccccca

SEQ ID NO: 486985 - RNA, 23 nt, Human
cgccuggggcccacccgcggcuc

SEQ ID NO: 486986 - RNA, 23 nt, Human
cucccuacaagucccuucagcag

SEQ ID NO: 486987 - RNA, 21 nt, Human
cugcacgcauguguguaugug

SEQ ID NO: 486988 - RNA, 21 nt, Human
cuguggggcuggggggcuguc

SEQ ID NO: 486989 - RNA, 18 nt, Human
gaggaaaagggcgccaga

SEQ ID NO: 486990 - RNA, 21 nt, Human
gccucucccuacaagucccuu

SEQ ID NO: 486991 - RNA, 18 nt, Human
gcgacagagacgacacag

SEQ ID NO: 486992 - RNA, 23 nt, Human
ggccuggcagguagaccaaggcc

SEQ ID NO: 486993 - RNA, 22 nt, Human
gggacccugugagggggugggg

SEQ ID NO: 486994 - RNA, 18 nt, Human
gggaucaaaguccggccg

SEQ ID NO: 486995 - RNA, 19 nt, Human
gggcagcucgggggcacag

SEQ ID NO: 486996 - RNA, 19 nt, Human
ggggacgcaggacccacag

SEQ ID NO: 486997 - RNA, 21 nt, Human
ggggugggggcagcucggggg

SEQ ID NO: 486998 - RNA, 22 nt, Human
ggggugggggcagcucgggggc

SEQ ID NO: 486999 - RNA, 22 nt, Human
gugggggcagcucgggggcaca

SEQ ID NO: 487000 - RNA, 18 nt, Human
ucaccuuggaggggagga

SEQ ID NO: 487001 - RNA, 19 nt, Human
ucaguccauaggaugaugu

SEQ ID NO: 487002 - RNA, 24 nt, Human
ucccugagugucugcacaagccug

SEQ ID NO: 487003 - RNA, 18 nt, Human
ucccuucagcagcagcuc

SEQ ID NO: 487004 - RNA, 24 nt, Human
ugacgagccucucccuacaagucc

SEQ ID NO: 487005 - RNA, 20 nt, Human
ugagggggugggggcagcuc

SEQ ID NO: 487006 - RNA, 18 nt, Human
ugcacaagccugcacgca

SEQ ID NO: 487007 - RNA, 20 nt, Human
ugccagggcgugugugcagg

SEQ ID NO: 487008 - RNA, 19 nt, Human
ugccccaggguccaggagc

SEQ ID NO: 487009 - RNA, 18 nt, Human
uggcagcugggaggcuca

SEQ ID NO: 487010 - RNA, 22 nt, Human
uggcagcugggaggcucaggcu

SEQ ID NO: 487011 - RNA, 23 nt, Human
uggcagcugggaggcucaggcug

SEQ ID NO: 487012 - RNA, 19 nt, Human
uggcagguagaccaaggcc

SEQ ID NO: 487013 - RNA, 21 nt, Human
ugggagaguccgggagaagcg

SEQ ID NO: 487014 - RNA, 21 nt, Human
uggggggcuguccgcugggag

SEQ ID NO: 487015 - RNA, 18 nt, Human
uguaggggcuggggggcc

SEQ ID NO: 487016 - RNA, 18 nt, Human
uguaggggcuggggggcc

SEQ ID NO: 487017 - RNA, 19 nt, Human
uguaggggcuggggggccg

SEQ ID NO: 487018 - RNA, 31 nt, Human
ugucugcacaagccugcacgcauguguguag

SEQ ID NO: 487019 - RNA, 24 nt, Human
ugugggccacguggagagaagguu

SEQ ID NO: 487020 - RNA, 22 nt, Human
ugugugccagggcgugugugca

SEQ ID NO: 487021 - RNA, 23 nt, Human
uguugacgagccucucccuacaa

SEQ ID NO: 487022 - RNA, 19 nt, Human
uuggaggggaggaagccug

SEQ ID NO: 487023 - RNA, 23 nt, Human
uuuuuuuuuuuuuuuuuuaaacg

SEQ ID NO: 487024 - RNA, 22 nt, Human
aacaacaacaaaauuacuauac

SEQ ID NO: 487025 - RNA, 19 nt, Human
accagcacccaacaacaac

SEQ ID NO: 487026 - RNA, 22 nt, Human
agcacaaaguucggugaaugaa

SEQ ID NO: 487027 - RNA, 20 nt, Human
aggcaacaagccugcaagga

SEQ ID NO: 487028 - RNA, 23 nt, Human
caaaauucuggagcuaccagcac

SEQ ID NO: 487029 - RNA, 24 nt, Human
caacaggcaacaagccugcaagga

SEQ ID NO: 487030 - RNA, 24 nt, Human
cacaauaguggucacaaaauucug

SEQ ID NO: 487031 - RNA, 21 nt, Human
caggucaggacagcucacaca

SEQ ID NO: 487032 - RNA, 20 nt, Human
ccacaauaguggucacaaaa

SEQ ID NO: 487033 - RNA, 20 nt, Human
ccagcacccaacaacaacaa

SEQ ID NO: 487034 - RNA, 20 nt, Human
ccagcgccgugucuuuuucc

SEQ ID NO: 487035 - RNA, 19 nt, Human
ccaggucaggacagcucac

SEQ ID NO: 487036 - RNA, 20 nt, Human
cccacaugauuuuauaaagc

SEQ ID NO: 487037 - RNA, 19 nt, Human
ccccccccccccccuuucc

SEQ ID NO: 487038 - RNA, 21 nt, Human
ccccccccccccccuuuccca

SEQ ID NO: 487039 - RNA, 18 nt, Human
ccccccccccccuuuccc

SEQ ID NO: 487040 - RNA, 19 nt, Human
cccccccuuucccauuuga

SEQ ID NO: 487041 - RNA, 23 nt, Human
cccccccuuucccauuugauucc

SEQ ID NO: 487042 - RNA, 22 nt, Human
ccccccuuucccauuugauucc

SEQ ID NO: 487043 - RNA, 20 nt, Human
cccccuuucccauuugauuc

SEQ ID NO: 487044 - RNA, 21 nt, Human
cccccuuucccauuugauucc

SEQ ID NO: 487045 - RNA, 19 nt, Human
cuagacacauaaaagaaca

SEQ ID NO: 487046 - RNA, 20 nt, Human
gcagagacauuuuacccaca

SEQ ID NO: 487047 - RNA, 22 nt, Human
ggcccccccccccccccuuucc

SEQ ID NO: 487048 - RNA, 24 nt, Human
gugaugcagagacauuuuacccac

SEQ ID NO: 487049 - RNA, 27 nt, Human
uagcauuaacaagugaugcagagacau

SEQ ID NO: 487050 - RNA, 23 nt, Human
uauuggaugaagcuaccauuuua

SEQ ID NO: 487051 - RNA, 19 nt, Human
uccaggucaggacagcucc

SEQ ID NO: 487052 - RNA, 20 nt, Human
ucuuuaaccucuggccagaa

SEQ ID NO: 487053 - RNA, 23 nt, Human
ucuuuuuccuucuuucaacaggc

SEQ ID NO: 487054 - RNA, 21 nt, Human
ugcaagugaaauggaggaaua

SEQ ID NO: 487055 - RNA, 19 nt, Human
uucuucaccaagcaaaggc

SEQ ID NO: 487056 - RNA, 22 nt, Human
uugccagcgccgugucuuuuuc

SEQ ID NO: 487057 - RNA, 27 nt, Human
uuuuccuggaagaauuaugaacugaag

SEQ ID NO: 487058 - RNA, 21 nt, Human
ccugcuuugcuuacaggcuga

SEQ ID NO: 487059 - RNA, 22 nt, Human
ccugcuuugcuuacaggcugag

SEQ ID NO: 487060 - RNA, 18 nt, Human
gggaaccugccaguauug

SEQ ID NO: 487061 - RNA, 22 nt, Human
uccugcuuugcuuacaggcuga

SEQ ID NO: 487062 - RNA, 22 nt, Human
ugggcagagaagaucuggaucc

SEQ ID NO: 487063 - RNA, 24 nt, Human
uggugguuguaacucaguuuccag

SEQ ID NO: 487064 - RNA, 23 nt, Human
uguucuagcagagucaguuucac

SEQ ID NO: 487065 - RNA, 24 nt, Human
uuccugcuuugcuuacaggcugag

SEQ ID NO: 487066 - RNA, 23 nt, Human
uuggugguuguaacucaguuucc

SEQ ID NO: 487067 - RNA, 18 nt, Human
aaagaagagagcugagga

SEQ ID NO: 487068 - RNA, 19 nt, Human
aagaaaccaagcucaggac

SEQ ID NO: 487069 - RNA, 20 nt, Human
aagaaaccaagcucaggacu

SEQ ID NO: 487070 - RNA, 26 nt, Human
agcccccagccccagaggugugauuc

SEQ ID NO: 487071 - RNA, 19 nt, Human
ccaccccugagcaccuccu

SEQ ID NO: 487072 - RNA, 22 nt, Human
ccaccccugagcaccuccuucc

SEQ ID NO: 487073 - RNA, 25 nt, Human
ccccugagcaccuccuuccccugga

SEQ ID NO: 487074 - RNA, 23 nt, Human
cucaggacugggguucccaagga

SEQ ID NO: 487075 - RNA, 21 nt, Human
gagcugaggaaggauucucug

SEQ ID NO: 487076 - RNA, 22 nt, Human
gaggaaggauucucugggugcu

SEQ ID NO: 487077 - RNA, 18 nt, Human
ucucuggauacccacccc

SEQ ID NO: 487078 - RNA, 20 nt, Human
ucucuggauacccaccccug

SEQ ID NO: 487079 - RNA, 19 nt, Human
ugagcaccuccuuccccug

SEQ ID NO: 487080 - RNA, 21 nt, Human
ugggaagaaaccaagcucagg

SEQ ID NO: 487081 - RNA, 24 nt, Human
ugggaagaaaccaagcucaggacu

SEQ ID NO: 487082 - RNA, 25 nt, Human
ugggaagaaaccaagcucaggacug

SEQ ID NO: 487083 - RNA, 20 nt, Human
ugggguucccaaggagcagg

SEQ ID NO: 487084 - RNA, 21 nt, Human
uuuuugguggucacuuaauuu

SEQ ID NO: 487085 - RNA, 19 nt, Human
uuuuuuuuuuuuggugguc

SEQ ID NO: 487086 - RNA, 20 nt, Human
uuuuuuuuuuuuuuuuuggu

SEQ ID NO: 487087 - RNA, 22 nt, Human
uuuuuuuuuuuuuuuuuggugg

SEQ ID NO: 487088 - RNA, 27 nt, Human
acaaaaaaaaaugacacuugucuuuca

SEQ ID NO: 487089 - RNA, 23 nt, Human
acagaagauguguuugcacugau

SEQ ID NO: 487090 - RNA, 22 nt, Human
acccucuacaaaaaaaaaugac

SEQ ID NO: 487091 - RNA, 20 nt, Human
agaauucaaggcaaacugcc

SEQ ID NO: 487092 - RNA, 22 nt, Human
aggacaguauuuuugggugaga

SEQ ID NO: 487093 - RNA, 23 nt, Human
auggguuuaacagaagauguguu

SEQ ID NO: 487094 - RNA, 22 nt, Human
cauuuacaugguauauaucacc

SEQ ID NO: 487095 - RNA, 21 nt, Human
ggaauauucuguguauaccaa

SEQ ID NO: 487096 - RNA, 24 nt, Human
ggguaucccagcugugccaucuuu

SEQ ID NO: 487097 - RNA, 24 nt, Human
gguuggguaucccagcugugccau

SEQ ID NO: 487098 - RNA, 19 nt, Human
ugacauuaagugugggcac

SEQ ID NO: 487099 - RNA, 24 nt, Human
ugacauuaagugugggcacaggaa

SEQ ID NO: 487100 - RNA, 22 nt, Human
uggguuuaacagaagauguguu

SEQ ID NO: 487101 - RNA, 21 nt, Human
uuaaaauuauagauugacauu

SEQ ID NO: 487102 - RNA, 18 nt, Human
uucacguaucucuuuucu

SEQ ID NO: 487103 - RNA, 21 nt, Human
uucuguguauaccaauggguu

SEQ ID NO: 487104 - RNA, 21 nt, Human
uuugcacugauuucuggucaa

SEQ ID NO: 487105 - RNA, 19 nt, Human
agccccucagcccccgccc

SEQ ID NO: 487106 - RNA, 19 nt, Human
cacauuccacaaaggaaca

SEQ ID NO: 487107 - RNA, 20 nt, Human
cagcccccgcccgccggccc

SEQ ID NO: 487108 - RNA, 22 nt, Human
cagccccucagcccccgcccgc

SEQ ID NO: 487109 - RNA, 22 nt, Human
ccacaaaggaacaaaaauguac

SEQ ID NO: 487110 - RNA, 22 nt, Human
cccgcccgccggcccaacgccg

SEQ ID NO: 487111 - RNA, 21 nt, Human
ccgcgcuugacgacagccgca

SEQ ID NO: 487112 - RNA, 20 nt, Human
ccucagcccccgcccgccgg

SEQ ID NO: 487113 - RNA, 18 nt, Human
cgccggcccaacgccgcg

SEQ ID NO: 487114 - RNA, 25 nt, Human
cucagcccccgcccgccggcccaac

SEQ ID NO: 487115 - RNA, 24 nt, Human
uacacaaacacuggaguacaugca

SEQ ID NO: 487116 - RNA, 19 nt, Human
uacaugcaacacauuccac

SEQ ID NO: 487117 - RNA, 22 nt, Human
uacaugcaacacauuccacaaa

SEQ ID NO: 487118 - RNA, 24 nt, Human
ucuccccuauuuuuucaagccaga

SEQ ID NO: 487119 - RNA, 22 nt, Human
ugacgacagccgcaaagccccc

SEQ ID NO: 487120 - RNA, 23 nt, Human
uugacgacagccgcaaagccccc

SEQ ID NO: 487121 - RNA, 26 nt, Human
uuuuuuuuuuuuuuuuaauuauuuuu

SEQ ID NO: 487122 - RNA, 29 nt, Human
uacuaugaaauuuuacauacaugauggaa

SEQ ID NO: 487123 - RNA, 23 nt, Human
ugaaacuaucaggaaguuuuacu

SEQ ID NO: 487124 - RNA, 21 nt, Human
uuuuuuuuuuuuuugcagaua

SEQ ID NO: 487125 - RNA, 18 nt, Human
uuuuuuuuuuuuuuuuug

SEQ ID NO: 487126 - RNA, 19 nt, Human
uuuuuuuuuuuuuuuuugc

SEQ ID NO: 487127 - RNA, 21 nt, Human
uuuuuuuuuuuuuuuuugcag

SEQ ID NO: 487128 - RNA, 19 nt, Human
aaacaaucaaaccaccaga

SEQ ID NO: 487129 - RNA, 20 nt, Human
aaagagacugcauauaggua

SEQ ID NO: 487130 - RNA, 20 nt, Human
aacaauggaagugucaaaaa

SEQ ID NO: 487131 - RNA, 20 nt, Human
aaccaccagaacaugauugu

SEQ ID NO: 487132 - RNA, 20 nt, Human
agaauccaaaacaaacaaac

SEQ ID NO: 487133 - RNA, 21 nt, Human
auaggguuuuuuuuuuuucca

SEQ ID NO: 487134 - RNA, 19 nt, Human
auggaaaauaucuaaauua

SEQ ID NO: 487135 - RNA, 25 nt, Human
auggauaaaacuggugcaaauuggu

SEQ ID NO: 487136 - RNA, 18 nt, Human
caaaacaaacaaacaaaa

SEQ ID NO: 487137 - RNA, 23 nt, Human
caaaacaaacaaacaaaaagacg

SEQ ID NO: 487138 - RNA, 22 nt, Human
caaacaaacaaaaagacguugu

SEQ ID NO: 487139 - RNA, 24 nt, Human
caaaccaccagaacaugauuguac

SEQ ID NO: 487140 - RNA, 24 nt, Human
caauacaaacaaaaaauacagaaa

SEQ ID NO: 487141 - RNA, 24 nt, Human
caccagaacaugauuguacaacag

SEQ ID NO: 487142 - RNA, 22 nt, Human
cagaacacccuagacaauucaa

SEQ ID NO: 487143 - RNA, 21 nt, Human
cagcagcagcggaucucgcac

SEQ ID NO: 487144 - RNA, 23 nt, Human
ccaaaacaaacaaacaaaaagac

SEQ ID NO: 487145 - RNA, 19 nt, Human
cgcuccucuccucagcagc

SEQ ID NO: 487146 - RNA, 22 nt, Human
gaauggaaccuuuguauuguaa

SEQ ID NO: 487147 - RNA, 24 nt, Human
uaaagaauccaaaacaaacaaaca

SEQ ID NO: 487148 - RNA, 24 nt, Human
uaaagagggcacuaaaugagaaua

SEQ ID NO: 487149 - RNA, 24 nt, Human
uacaaacaaaaaauacagaaaugc

SEQ ID NO: 487150 - RNA, 23 nt, Human
uacagaacacccuagacaauuca

SEQ ID NO: 487151 - RNA, 21 nt, Human
uaccauaaaguguaaaaaggg

SEQ ID NO: 487152 - RNA, 19 nt, Human
uagagaagcacaguuugca

SEQ ID NO: 487153 - RNA, 22 nt, Human
uauggcaauuuauccucaauga

SEQ ID NO: 487154 - RNA, 24 nt, Human
ucaaacggauccaacaaacacuga

SEQ ID NO: 487155 - RNA, 21 nt, Human
ucaagaacaaaaaaaaaaaua

SEQ ID NO: 487156 - RNA, 23 nt, Human
uccaaaacaaacaaacaaaaaga

SEQ ID NO: 487157 - RNA, 23 nt, Human
ugaucuauaaaugcauuuccccc

SEQ ID NO: 487158 - RNA, 21 nt, Human
ugcauauagguagaaacaggu

SEQ ID NO: 487159 - RNA, 18 nt, Human
ugcugcuguugacgcucc

SEQ ID NO: 487160 - RNA, 20 nt, Human
uggaauauccuguaaacaau

SEQ ID NO: 487161 - RNA, 23 nt, Human
uuuuuacaauacaaacaaaaaau

SEQ ID NO: 487162 - RNA, 23 nt, Human
aaaaaauacugucaucuuccuau

SEQ ID NO: 487163 - RNA, 20 nt, Human
aaaacauaaaacaugaacaa

SEQ ID NO: 487164 - RNA, 21 nt, Human
aaaacuaaacagauuuaaaau

SEQ ID NO: 487165 - RNA, 25 nt, Human
aaaauaacccuucaaaauaccaaau

SEQ ID NO: 487166 - RNA, 23 nt, Human
aaacagcaggaaaaucuaaauca

SEQ ID NO: 487167 - RNA, 20 nt, Human
aaacuuggauaaacucagug

SEQ ID NO: 487168 - RNA, 19 nt, Human
aaccaugaaaccaugcucu

SEQ ID NO: 487169 - RNA, 19 nt, Human
aacuauucauaacaaaaua

SEQ ID NO: 487170 - RNA, 23 nt, Human
aacugagaaacaaaugcagaaca

SEQ ID NO: 487171 - RNA, 24 nt, Human
aagaggagcuagcagaauguagug

SEQ ID NO: 487172 - RNA, 19 nt, Human
aagguacccuccccuaaua

SEQ ID NO: 487173 - RNA, 20 nt, Human
aaguugcuuucccucuccac

SEQ ID NO: 487174 - RNA, 19 nt, Human
aauacugucaucuuccuau

SEQ ID NO: 487175 - RNA, 24 nt, Human
aauugguuucuuuccucugcuucu

SEQ ID NO: 487176 - RNA, 22 nt, Human
acaacaaccucauacccaaagc

SEQ ID NO: 487177 - RNA, 19 nt, Human
acacacauaauuaugggaa

SEQ ID NO: 487178 - RNA, 19 nt, Human
acacgccccuggcuguggc

SEQ ID NO: 487179 - RNA, 19 nt, Human
acacgccccuggcuguggc

SEQ ID NO: 487180 - RNA, 23 nt, Human
acagauuuaaaauacaaauuuuu

SEQ ID NO: 487181 - RNA, 22 nt, Human
acaggcaacaacaaccucauac

SEQ ID NO: 487182 - RNA, 26 nt, Human
acaggcaacaacaaccucauacccaa

SEQ ID NO: 487183 - RNA, 24 nt, Human
acauauacauguacauacauaugg

SEQ ID NO: 487184 - RNA, 31 nt, Human
acauguacauacauaugacacauauacacag

SEQ ID NO: 487185 - RNA, 23 nt, Human
accaauuuuuauaauaacucaua

SEQ ID NO: 487186 - RNA, 24 nt, Human
accugccauauuuauagugcgagc

SEQ ID NO: 487187 - RNA, 18 nt, Human
acugcaguuacugaaguu

SEQ ID NO: 487188 - RNA, 23 nt, Human
acuucuuggugugucuauguagg

SEQ ID NO: 487189 - RNA, 22 nt, Human
agagacaaaaccauacuaaaac

SEQ ID NO: 487190 - RNA, 26 nt, Human
agcaaacagcaggaaaaucuaaauca

SEQ ID NO: 487191 - RNA, 25 nt, Human
agcaacaaaaacaauaggaaaggga

SEQ ID NO: 487192 - RNA, 21 nt, Human
agcaguccauucuuaagcagc

SEQ ID NO: 487193 - RNA, 18 nt, Human
agcucacagucccgaaca

SEQ ID NO: 487194 - RNA, 18 nt, Human
agcucacagucccgaaca

SEQ ID NO: 487195 - RNA, 24 nt, Human
aggaaaaaaaaacauuuggaauau

SEQ ID NO: 487196 - RNA, 19 nt, Human
aggcaacaacaaccucaua

SEQ ID NO: 487197 - RNA, 21 nt, Human
aggcagcaggcgccgaaggcg

SEQ ID NO: 487198 - RNA, 21 nt, Human
aggcagcaggcgccgaaggcg

SEQ ID NO: 487199 - RNA, 23 nt, Human
aggcgccgaaggcggaggcggcu

SEQ ID NO: 487200 - RNA, 23 nt, Human
aggcgccgaaggcggaggcggcu

SEQ ID NO: 487201 - RNA, 20 nt, Human
aggcggaggcggcuucgggg

SEQ ID NO: 487202 - RNA, 20 nt, Human
aggcggaggcggcuucgggg

SEQ ID NO: 487203 - RNA, 23 nt, Human
aucauacuuacaugaaagggcug

SEQ ID NO: 487204 - RNA, 24 nt, Human
caaaagaaugaacugaccugccau

SEQ ID NO: 487205 - RNA, 20 nt, Human
caacaacaaccucauaccca

SEQ ID NO: 487206 - RNA, 23 nt, Human
caauugguuucuuuccucugcuu

SEQ ID NO: 487207 - RNA, 22 nt, Human
cacauauacacacauaauuaug

SEQ ID NO: 487208 - RNA, 21 nt, Human
cagcaacaaaaacaauaggaa

SEQ ID NO: 487209 - RNA, 18 nt, Human
cagcacagagggaaggca

SEQ ID NO: 487210 - RNA, 18 nt, Human
caggcgccgaaggcggag

SEQ ID NO: 487211 - RNA, 20 nt, Human
caggcgccgaaggcggaggg

SEQ ID NO: 487212 - RNA, 20 nt, Human
caggcgccgaaggcggaggg

SEQ ID NO: 487213 - RNA, 23 nt, Human
cauaugacacauauacacacaua

SEQ ID NO: 487214 - RNA, 18 nt, Human
cauuagagacaaaaccau

SEQ ID NO: 487215 - RNA, 20 nt, Human
cauuagagacaaaaccauac

SEQ ID NO: 487216 - RNA, 21 nt, Human
ccccacugcccaggagccagg

SEQ ID NO: 487217 - RNA, 21 nt, Human
ccccacugcccaggagccagg

SEQ ID NO: 487218 - RNA, 20 nt, Human
cccccaggaugcaaaacuaa

SEQ ID NO: 487219 - RNA, 21 nt, Human
cccccaggaugcaaaacuaac

SEQ ID NO: 487220 - RNA, 21 nt, Human
ccccccaggaugcaaaacuaa

SEQ ID NO: 487221 - RNA, 24 nt, Human
cccccgggggcuuccccacugccc

SEQ ID NO: 487222 - RNA, 24 nt, Human
cccccgggggcuuccccacugccc

SEQ ID NO: 487223 - RNA, 19 nt, Human
cccgaacaacaagccuggc

SEQ ID NO: 487224 - RNA, 19 nt, Human
cccgaacaacaagccuggc

SEQ ID NO: 487225 - RNA, 24 nt, Human
cccgaacaacaagccuggccgagg

SEQ ID NO: 487226 - RNA, 24 nt, Human
cccgaacaacaagccuggccgagg

SEQ ID NO: 487227 - RNA, 22 nt, Human
cccgaucgcgcccguggcuacu

SEQ ID NO: 487228 - RNA, 21 nt, Human
ccgaucgcgcccguggcuacu

SEQ ID NO: 487229 - RNA, 19 nt, Human
cgaacaacaagccuggccg

SEQ ID NO: 487230 - RNA, 19 nt, Human
cgaacaacaagccuggccg

SEQ ID NO: 487231 - RNA, 21 nt, Human
cgccccuggcuguggccgcuc

SEQ ID NO: 487232 - RNA, 21 nt, Human
cgccccuggcuguggccgcuc

SEQ ID NO: 487233 - RNA, 24 nt, Human
cgccgggcgccccggggacauucc

SEQ ID NO: 487234 - RNA, 19 nt, Human
cggggucagcgcgccgggc

SEQ ID NO: 487235 - RNA, 19 nt, Human
cggggucagcgcgccgggc

SEQ ID NO: 487236 - RNA, 22 nt, Human
cucauacccaaagcaggauauc

SEQ ID NO: 487237 - RNA, 20 nt, Human
cuccgccgccgccgcgccug

SEQ ID NO: 487238 - RNA, 20 nt, Human
cuccgccgccgccgcgccug

SEQ ID NO: 487239 - RNA, 26 nt, Human
cugcaugcuguauuuuaaagccccuc

SEQ ID NO: 487240 - RNA, 20 nt, Human
cugcuccgccgccgccgcgc

SEQ ID NO: 487241 - RNA, 20 nt, Human
cugcuccgccgccgccgcgc

SEQ ID NO: 487242 - RNA, 22 nt, Human
cugcugcagcugcugcuccgcc

SEQ ID NO: 487243 - RNA, 22 nt, Human
cugcugcagcugcugcuccgcc

SEQ ID NO: 487244 - RNA, 19 nt, Human
cugcugcuccgccgccgcc

SEQ ID NO: 487245 - RNA, 19 nt, Human
cugcugcuccgccgccgcc

SEQ ID NO: 487246 - RNA, 28 nt, Human
cuggcagcagcugcuccggauccucuuc

SEQ ID NO: 487247 - RNA, 20 nt, Human
cuuagcagcaucuuuuucag

SEQ ID NO: 487248 - RNA, 21 nt, Human
cuuuccccuacuucucaaaug

SEQ ID NO: 487249 - RNA, 20 nt, Human
cuuuuucaguuuuuucucuc

SEQ ID NO: 487250 - RNA, 18 nt, Human
cuuuuuuuuuuuaagggc

SEQ ID NO: 487251 - RNA, 20 nt, Human
cuuuuuuuuuuuaagggcaa

SEQ ID NO: 487252 - RNA, 24 nt, Human
gaaaugaaaccuacaggcuucuga

SEQ ID NO: 487253 - RNA, 19 nt, Human
gacaaaaccauacuaaaac

SEQ ID NO: 487254 - RNA, 19 nt, Human
gaggcagcaggcgccgaag

SEQ ID NO: 487255 - RNA, 22 nt, Human
gcaaacagcaggaaaaucuaaa

SEQ ID NO: 487256 - RNA, 24 nt, Human
gcaaagucuucccccggcuuccaa

SEQ ID NO: 487257 - RNA, 25 nt, Human
gcaaagucuucccccggcuuccaaa

SEQ ID NO: 487258 - RNA, 22 nt, Human
gcaguccauucuuaagcagccu

SEQ ID NO: 487259 - RNA, 26 nt, Human
gcaguguauucuucuacacuuuaaaa

SEQ ID NO: 487260 - RNA, 23 nt, Human
gccgggcgccccggggacauucc

SEQ ID NO: 487261 - RNA, 23 nt, Human
gccgggcgccccggggacauucc

SEQ ID NO: 487262 - RNA, 18 nt, Human
gcugcuccgccgccgccg

SEQ ID NO: 487263 - RNA, 18 nt, Human
gcugcuccgccgccgccg

SEQ ID NO: 487264 - RNA, 23 nt, Human
gcugcugcagcugcugcuccgcc

SEQ ID NO: 487265 - RNA, 23 nt, Human
gcugcugcagcugcugcuccgcc

SEQ ID NO: 487266 - RNA, 24 nt, Human
ggcaacaacaaccucauacccaaa

SEQ ID NO: 487267 - RNA, 19 nt, Human
ggcagccgggaggacuuca

SEQ ID NO: 487268 - RNA, 18 nt, Human
ggcuuccccacugcccag

SEQ ID NO: 487269 - RNA, 21 nt, Human
gggaggcagcaggcgccgaag

SEQ ID NO: 487270 - RNA, 21 nt, Human
gggaggcagcaggcgccgaag

SEQ ID NO: 487271 - RNA, 19 nt, Human
gggcuggcagcagcugcuc

SEQ ID NO: 487272 - RNA, 20 nt, Human
gggcugggucguggccagcu

SEQ ID NO: 487273 - RNA, 20 nt, Human
gggcugggucguggccagcu

SEQ ID NO: 487274 - RNA, 21 nt, Human
gggggcuuccccacugcccag

SEQ ID NO: 487275 - RNA, 20 nt, Human
gguuucuuuccucugcuucu

SEQ ID NO: 487276 - RNA, 19 nt, Human
guggcuacucgagcggcag

SEQ ID NO: 487277 - RNA, 22 nt, Human
guuucacagcacagagggaagg

SEQ ID NO: 487278 - RNA, 21 nt, Human
uaaagcacuucauaugaaucc

SEQ ID NO: 487279 - RNA, 19 nt, Human
uaaauauuaccccuuacca

SEQ ID NO: 487280 - RNA, 21 nt, Human
uaacaaaccugagucaaacau

SEQ ID NO: 487281 - RNA, 18 nt, Human
uaacacuguacauguaaa

SEQ ID NO: 487282 - RNA, 19 nt, Human
uaacuaaacugacuuccca

SEQ ID NO: 487283 - RNA, 20 nt, Human
uaacuaaacugacuucccaa

SEQ ID NO: 487284 - RNA, 21 nt, Human
uaacucaaauuggcucagcaa

SEQ ID NO: 487285 - RNA, 23 nt, Human
uaacuugaaaaaaauacugucau

SEQ ID NO: 487286 - RNA, 21 nt, Human
uaagagaagaacagcuuucac

SEQ ID NO: 487287 - RNA, 19 nt, Human
uaauuuuuagacauauaca

SEQ ID NO: 487288 - RNA, 21 nt, Human
uacacacauaauuaugggaaa

SEQ ID NO: 487289 - RNA, 18 nt, Human
uacgcacgggggagggcu

SEQ ID NO: 487290 - RNA, 18 nt, Human
uacgcacgggggagggcu

SEQ ID NO: 487291 - RNA, 21 nt, Human
uagagacaaaaccauacuaaa

SEQ ID NO: 487292 - RNA, 18 nt, Human
uagcagcaucuuuuucag

SEQ ID NO: 487293 - RNA, 19 nt, Human
uagcuucacacaaauuagu

SEQ ID NO: 487294 - RNA, 24 nt, Human
uagcuuuuuuuuuuuaagggcaau

SEQ ID NO: 487295 - RNA, 21 nt, Human
uauauaauguaacacuguaca

SEQ ID NO: 487296 - RNA, 20 nt, Human
uaugcuagcgugugcagcag

SEQ ID NO: 487297 - RNA, 19 nt, Human
ucaaaccaugugugauuac

SEQ ID NO: 487298 - RNA, 19 nt, Human
ucaaugguugggaguaaag

SEQ ID NO: 487299 - RNA, 21 nt, Human
ucagaagaaauauucagugaa

SEQ ID NO: 487300 - RNA, 24 nt, Human
ucagggcagggcaaagucuucccc

SEQ ID NO: 487301 - RNA, 24 nt, Human
ucagggcagggcaaagucuucccc

SEQ ID NO: 487302 - RNA, 22 nt, Human
uccagagaaaagacacugcuau

SEQ ID NO: 487303 - RNA, 25 nt, Human
ucccaaaagaaugaacugaccugcc

SEQ ID NO: 487304 - RNA, 18 nt, Human
ucccgaacaacaagccug

SEQ ID NO: 487305 - RNA, 18 nt, Human
ucccgaacaacaagccug

SEQ ID NO: 487306 - RNA, 25 nt, Human
ucccucuccacugcucguccagaag

SEQ ID NO: 487307 - RNA, 21 nt, Human
uccuaauuggguuaagaacuc

SEQ ID NO: 487308 - RNA, 22 nt, Human
uccucauagaaaugaaaccuac

SEQ ID NO: 487309 - RNA, 20 nt, Human
ucuacacuuuaaaauagagc

SEQ ID NO: 487310 - RNA, 25 nt, Human
ucucagggcagggcaaagucuuccc

SEQ ID NO: 487311 - RNA, 25 nt, Human
ucucagggcagggcaaagucuuccc

SEQ ID NO: 487312 - RNA, 18 nt, Human
ucuguuuucaagucucuu

SEQ ID NO: 487313 - RNA, 22 nt, Human
ugaagaggagcuagcagaaugu

SEQ ID NO: 487314 - RNA, 21 nt, Human
ugaauucugaucuuucacugc

SEQ ID NO: 487315 - RNA, 19 nt, Human
ugacacauauacacacaua

SEQ ID NO: 487316 - RNA, 24 nt, Human
ugacacauauacacacauaauuaa

SEQ ID NO: 487317 - RNA, 23 nt, Human
ugagaaacaaaugcagaacauca

SEQ ID NO: 487318 - RNA, 24 nt, Human
ugagucaaacauucauucaaaugc

SEQ ID NO: 487319 - RNA, 25 nt, Human
ugagucaaacauucauucaaaugcc

SEQ ID NO: 487320 - RNA, 19 nt, Human
uggaggaggagacuucugg

SEQ ID NO: 487321 - RNA, 19 nt, Human
uggauaaacucaguguaac

SEQ ID NO: 487322 - RNA, 20 nt, Human
uggccgagggaggcagcagg

SEQ ID NO: 487323 - RNA, 20 nt, Human
uggccgagggaggcagcagg

SEQ ID NO: 487324 - RNA, 20 nt, Human
uggcucagcaacaaaaacaa

SEQ ID NO: 487325 - RNA, 26 nt, Human
uggugugucuauguaggcacaugugu

SEQ ID NO: 487326 - RNA, 20 nt, Human
uguaacuaaacugacuuccc

SEQ ID NO: 487327 - RNA, 20 nt, Human
uguacauacauaugacacaa

SEQ ID NO: 487328 - RNA, 19 nt, Human
ugucuuuaaaaguauggaa

SEQ ID NO: 487329 - RNA, 20 nt, Human
ugugucuauguaggcacaug

SEQ ID NO: 487330 - RNA, 22 nt, Human
uuaagggcaauugguuucuuuc

SEQ ID NO: 487331 - RNA, 22 nt, Human
uuaauacagagaacuacuuagc

SEQ ID NO: 487332 - RNA, 18 nt, Human
uuacaggcaacaacaacc

SEQ ID NO: 487333 - RNA, 18 nt, Human
uuagugcucuuuuuaauu

SEQ ID NO: 487334 - RNA, 20 nt, Human
uucaaaauaccaaauucaac

SEQ ID NO: 487335 - RNA, 20 nt, Human
uuccagcaagaaguugcuuu

SEQ ID NO: 487336 - RNA, 19 nt, Human
uucucuccauugauuuaaa

SEQ ID NO: 487337 - RNA, 23 nt, Human
uugaagaggagcuagcagaaugu

SEQ ID NO: 487338 - RNA, 20 nt, Human
uuuaaagccccccaggaugc

SEQ ID NO: 487339 - RNA, 24 nt, Human
uuuuuuuuuuuuuuugugacuugg

SEQ ID NO: 487340 - RNA, 18 nt, Human
uuuuuuuuuuuuuuuuug

SEQ ID NO: 487341 - RNA, 23 nt, Human
uuuuuuuuuuuuuuuuugugacu

SEQ ID NO: 487342 - RNA, 22 nt, Human
aaaccuccaucagauccucaau

SEQ ID NO: 487343 - RNA, 22 nt, Human
aaaggccucugcccucggcuug

SEQ ID NO: 487344 - RNA, 26 nt, Human
aaauagucaagugaagaugauuaagc

SEQ ID NO: 487345 - RNA, 23 nt, Human
aaauuaaaauacaauugcacuua

SEQ ID NO: 487346 - RNA, 19 nt, Human
aacaagaccccucuagccu

SEQ ID NO: 487347 - RNA, 18 nt, Human
aacaaugggcagccuccc

SEQ ID NO: 487348 - RNA, 20 nt, Human
aacacggcaucuuccgucuc

SEQ ID NO: 487349 - RNA, 21 nt, Human
aacagaaaauaaauacauaaa

SEQ ID NO: 487350 - RNA, 19 nt, Human
aacagaguuaacauuacaa

SEQ ID NO: 487351 - RNA, 20 nt, Human
aacauggugaaacccugucu

SEQ ID NO: 487352 - RNA, 21 nt, Human
aacauggugaaacccugucuc

SEQ ID NO: 487353 - RNA, 23 nt, Human
aaccaaacaaugggcagccuccc

SEQ ID NO: 487354 - RNA, 19 nt, Human
aaccgugcgugcccaccgc

SEQ ID NO: 487355 - RNA, 20 nt, Human
aaccgugcgugcccaccgcg

SEQ ID NO: 487356 - RNA, 19 nt, Human
aacgacuugcaacaucuuc

SEQ ID NO: 487357 - RNA, 18 nt, Human
aagaccccucuagccuaa

SEQ ID NO: 487358 - RNA, 21 nt, Human
aagcaaauaccgcauccuuuu

SEQ ID NO: 487359 - RNA, 22 nt, Human
aagcacuuauaagcaguuuuuc

SEQ ID NO: 487360 - RNA, 23 nt, Human
aagcagaucauugucacugagau

SEQ ID NO: 487361 - RNA, 20 nt, Human
aagcagucacagcugaguuu

SEQ ID NO: 487362 - RNA, 23 nt, Human
aagcugcccugcaguaacugggc

SEQ ID NO: 487363 - RNA, 25 nt, Human
aaggggaagaagaggugcccugaga

SEQ ID NO: 487364 - RNA, 20 nt, Human
aagugccccagagaagccag

SEQ ID NO: 487365 - RNA, 18 nt, Human
acaaaggccucugcccuc

SEQ ID NO: 487366 - RNA, 24 nt, Human
acagaaaauaaauacauaaaaaac

SEQ ID NO: 487367 - RNA, 30 nt, Human
acagaaaauaaauacauaaaaaaccuccaa

SEQ ID NO: 487368 - RNA, 22 nt, Human
acagagcuggacccagagccac

SEQ ID NO: 487369 - RNA, 19 nt, Human
acagcacuugguuuaaugu

SEQ ID NO: 487370 - RNA, 26 nt, Human
acaugcaccacagaccagccagcucc

SEQ ID NO: 487371 - RNA, 24 nt, Human
acccugucucuacuaaaaauacag

SEQ ID NO: 487372 - RNA, 22 nt, Human
acgccgaugagggcugucgucc

SEQ ID NO: 487373 - RNA, 21 nt, Human
acggggcugcagcuggcggcc

SEQ ID NO: 487374 - RNA, 24 nt, Human
acugcacuccagccuggacaacaa

SEQ ID NO: 487375 - RNA, 25 nt, Human
acugcacuccagccuggacaacaag

SEQ ID NO: 487376 - RNA, 27 nt, Human
acugcacuccagccuggacaacaagag

SEQ ID NO: 487377 - RNA, 18 nt, Human
acugcccuugcuaugcac

SEQ ID NO: 487378 - RNA, 18 nt, Human
acugcugccggcugggaa

SEQ ID NO: 487379 - RNA, 24 nt, Human
acuugaggucaggaguucgagacc

SEQ ID NO: 487380 - RNA, 24 nt, Human
acuuuugauaauuuugagucccca

SEQ ID NO: 487381 - RNA, 24 nt, Human
agaaaaaggaacgacuugcaacau

SEQ ID NO: 487382 - RNA, 22 nt, Human
agaaagcuucaagagcaccuaa

SEQ ID NO: 487383 - RNA, 23 nt, Human
agaaucagagaaagcguugauuu

SEQ ID NO: 487384 - RNA, 25 nt, Human
agaaucagagaaagcguugauuuuu

SEQ ID NO: 487385 - RNA, 20 nt, Human
agacaguuuuggggaacccg

SEQ ID NO: 487386 - RNA, 19 nt, Human
agacccagagacuuccugg

SEQ ID NO: 487387 - RNA, 20 nt, Human
agacuaaauuuacaacagca

SEQ ID NO: 487388 - RNA, 21 nt, Human
agaguuggaugcuuugaacaa

SEQ ID NO: 487389 - RNA, 23 nt, Human
agaucacuugaggucaggaguuc

SEQ ID NO: 487390 - RNA, 22 nt, Human
agaucgcgccacugcacuccag

SEQ ID NO: 487391 - RNA, 21 nt, Human
agaugcggaggcggcaggacc

SEQ ID NO: 487392 - RNA, 20 nt, Human
agauuaaccccaugaaagac

SEQ ID NO: 487393 - RNA, 22 nt, Human
agcacgauuuucacaacuaccu

SEQ ID NO: 487394 - RNA, 22 nt, Human
agcaggacgcggcucgugggga

SEQ ID NO: 487395 - RNA, 20 nt, Human
agccagggaggacagaagcg

SEQ ID NO: 487396 - RNA, 23 nt, Human
agccgggcgugguggcagacgcc

SEQ ID NO: 487397 - RNA, 22 nt, Human
agccuggccaacauggugaaac

SEQ ID NO: 487398 - RNA, 24 nt, Human
agccuggccaacauggugaaaccc

SEQ ID NO: 487399 - RNA, 21 nt, Human
agcugcaugucagaccagccu

SEQ ID NO: 487400 - RNA, 21 nt, Human
aggacagaaaaaggaacgacu

SEQ ID NO: 487401 - RNA, 20 nt, Human
aggagcccggcccacagcgc

SEQ ID NO: 487402 - RNA, 19 nt, Human
aggagccggaggaggagcc

SEQ ID NO: 487403 - RNA, 24 nt, Human
aggagcugcccgugccugcccugu

SEQ ID NO: 487404 - RNA, 21 nt, Human
aggaggagcccggcccacagc

SEQ ID NO: 487405 - RNA, 22 nt, Human
aggaggagcccggcccacagcg

SEQ ID NO: 487406 - RNA, 20 nt, Human
aggaggcugaggcaggagag

SEQ ID NO: 487407 - RNA, 18 nt, Human
aggagggccugcaggucc

SEQ ID NO: 487408 - RNA, 22 nt, Human
aggcaaaaauggcuuaacaauc

SEQ ID NO: 487409 - RNA, 24 nt, Human
aggcaaaaauggcuuaacaaucau

SEQ ID NO: 487410 - RNA, 23 nt, Human
aggcaacagugagauccagaagc

SEQ ID NO: 487411 - RNA, 26 nt, Human
aggcagaucacuugaggucaggaguu

SEQ ID NO: 487412 - RNA, 22 nt, Human
aggcaggagagucgcuugaacc

SEQ ID NO: 487413 - RNA, 24 nt, Human
aggcaggagagucgcuugaaccug

SEQ ID NO: 487414 - RNA, 26 nt, Human
aggcaggcagaucacuugaggucagg

SEQ ID NO: 487415 - RNA, 22 nt, Human
aggcaggcuggacacacugccg

SEQ ID NO: 487416 - RNA, 21 nt, Human
aggcaggcuggacacacugcu

SEQ ID NO: 487417 - RNA, 18 nt, Human
aggcagggcacccugggc

SEQ ID NO: 487418 - RNA, 21 nt, Human
aggcugaggcaggagagucgc

SEQ ID NO: 487419 - RNA, 24 nt, Human
aggcugaggcaggagagucgcuug

SEQ ID NO: 487420 - RNA, 22 nt, Human
agggcaggggggugucaccagc

SEQ ID NO: 487421 - RNA, 23 nt, Human
aggggaagaagaggugcccugag

SEQ ID NO: 487422 - RNA, 18 nt, Human
aggggaagaguccacucu

SEQ ID NO: 487423 - RNA, 20 nt, Human
aggggugcuuggcugggugc

SEQ ID NO: 487424 - RNA, 23 nt, Human
aggggugcuuggcugggugcggu

SEQ ID NO: 487425 - RNA, 21 nt, Human
agggugagguccuggggcugc

SEQ ID NO: 487426 - RNA, 20 nt, Human
aggugcugcccaagagggag

SEQ ID NO: 487427 - RNA, 20 nt, Human
aguguuuucuucccuuuccu

SEQ ID NO: 487428 - RNA, 24 nt, Human
aucacuugaggucaggaguucgag

SEQ ID NO: 487429 - RNA, 22 nt, Human
aucccagcacuuugggaggcca

SEQ ID NO: 487430 - RNA, 24 nt, Human
aucgcgccacugcacuccagccug

SEQ ID NO: 487431 - RNA, 18 nt, Human
aucucagcccuccaugcu

SEQ ID NO: 487432 - RNA, 22 nt, Human
aucuuauugaagaguagucugc

SEQ ID NO: 487433 - RNA, 18 nt, Human
augcaccacagaccagcc

SEQ ID NO: 487434 - RNA, 19 nt, Human
auggcaaaagcaaauaccg

SEQ ID NO: 487435 - RNA, 22 nt, Human
caaaaacacugacaguuccuau

SEQ ID NO: 487436 - RNA, 24 nt, Human
caacauggugaaacccugucucua

SEQ ID NO: 487437 - RNA, 26 nt, Human
caaccaaacaaugggcagccucccag

SEQ ID NO: 487438 - RNA, 25 nt, Human
caacuucuuagguggaaaaagcaac

SEQ ID NO: 487439 - RNA, 18 nt, Human
caagcccaggcuggacug

SEQ ID NO: 487440 - RNA, 24 nt, Human
caaggcaggcagaucacuugaggu

SEQ ID NO: 487441 - RNA, 26 nt, Human
caaggcaggcagaucacuugagguca

SEQ ID NO: 487442 - RNA, 24 nt, Human
caagugccccagagaagccaggga

SEQ ID NO: 487443 - RNA, 18 nt, Human
cacagaaucagagaaagc

SEQ ID NO: 487444 - RNA, 23 nt, Human
cacagaaucagagaaagcguuga

SEQ ID NO: 487445 - RNA, 20 nt, Human
cacaugcaccacagaccagg

SEQ ID NO: 487446 - RNA, 18 nt, Human
caccagcaugccguuggg

SEQ ID NO: 487447 - RNA, 22 nt, Human
caccagggcggcuccugaagac

SEQ ID NO: 487448 - RNA, 20 nt, Human
caccagguggggaaagcugc

SEQ ID NO: 487449 - RNA, 19 nt, Human
cacccgacagugccuggcg

SEQ ID NO: 487450 - RNA, 25 nt, Human
cacccugaacagagcuggacccaga

SEQ ID NO: 487451 - RNA, 23 nt, Human
caccuguaaucccagcacuuugg

SEQ ID NO: 487452 - RNA, 24 nt, Human
caccuguaaucccagcacuuuggg

SEQ ID NO: 487453 - RNA, 20 nt, Human
cacgaccauggccccgcgcg

SEQ ID NO: 487454 - RNA, 18 nt, Human
cacggcaucuuccgucuc

SEQ ID NO: 487455 - RNA, 24 nt, Human
cacuccagccuggacaacaagagc

SEQ ID NO: 487456 - RNA, 18 nt, Human
cacugcacuccagccugg

SEQ ID NO: 487457 - RNA, 19 nt, Human
cacugcacuccagccugga

SEQ ID NO: 487458 - RNA, 21 nt, Human
cacugcacuccagccuggaca

SEQ ID NO: 487459 - RNA, 24 nt, Human
cacugcacuccagccuggacaaca

SEQ ID NO: 487460 - RNA, 22 nt, Human
cacugugcuggggaggaagugg

SEQ ID NO: 487461 - RNA, 23 nt, Human
cacuugaggucaggaguucgaga

SEQ ID NO: 487462 - RNA, 24 nt, Human
cagaucacuugaggucaggaguuc

SEQ ID NO: 487463 - RNA, 27 nt, Human
cagaucacuugaggucaggaguucgag

SEQ ID NO: 487464 - RNA, 24 nt, Human
cagcacuuugggaggccaaggcag

SEQ ID NO: 487465 - RNA, 25 nt, Human
cagcacuuugggaggccaaggcagg

SEQ ID NO: 487466 - RNA, 18 nt, Human
cagcagcagugggccugc

SEQ ID NO: 487467 - RNA, 22 nt, Human
cagcaggacgcggcucgugggg

SEQ ID NO: 487468 - RNA, 23 nt, Human
cagcaggacgcggcucgugggga

SEQ ID NO: 487469 - RNA, 24 nt, Human
cagcagugggccugccugcucucu

SEQ ID NO: 487470 - RNA, 24 nt, Human
cagcaugccguugggacagucaga

SEQ ID NO: 487471 - RNA, 18 nt, Human
cagccagcucccugggua

SEQ ID NO: 487472 - RNA, 23 nt, Human
cagccucccaguucuucaguccc

SEQ ID NO: 487473 - RNA, 24 nt, Human
cagcuacucaggaggcugaggcag

SEQ ID NO: 487474 - RNA, 21 nt, Human
caggagagaccuuccccgcag

SEQ ID NO: 487475 - RNA, 18 nt, Human
caggcagaucacuugagg

SEQ ID NO: 487476 - RNA, 24 nt, Human
caggcagaucacuugaggucagga

SEQ ID NO: 487477 - RNA, 18 nt, Human
cagggacagaaaaccacu

SEQ ID NO: 487478 - RNA, 26 nt, Human
cagggaggacagaagcgaagggcagg

SEQ ID NO: 487479 - RNA, 21 nt, Human
cagggcuagcucucgcugacu

SEQ ID NO: 487480 - RNA, 23 nt, Human
cagggugagguccuggggcugcu

SEQ ID NO: 487481 - RNA, 19 nt, Human
cagugaaaaaacgaucaga

SEQ ID NO: 487482 - RNA, 21 nt, Human
cauagccccaagugccccaga

SEQ ID NO: 487483 - RNA, 21 nt, Human
ccaaauucuacaaaaagcuaa

SEQ ID NO: 487484 - RNA, 20 nt, Human
ccacagugccccggccggac

SEQ ID NO: 487485 - RNA, 22 nt, Human
ccaccuggucuuacaacaugca

SEQ ID NO: 487486 - RNA, 19 nt, Human
ccacugcacuccagccugg

SEQ ID NO: 487487 - RNA, 19 nt, Human
ccacugcacuccagccugg

SEQ ID NO: 487488 - RNA, 20 nt, Human
ccacugcacuccagccugga

SEQ ID NO: 487489 - RNA, 21 nt, Human
ccacugcacuccagccuggac

SEQ ID NO: 487490 - RNA, 22 nt, Human
ccacugcacuccagccuggaca

SEQ ID NO: 487491 - RNA, 19 nt, Human
ccacugccugucgacaucu

SEQ ID NO: 487492 - RNA, 19 nt, Human
ccagaaagcuucaagagca

SEQ ID NO: 487493 - RNA, 21 nt, Human
ccagaaagcuucaagagcacc

SEQ ID NO: 487494 - RNA, 21 nt, Human
cccaagugccccagagaagcc

SEQ ID NO: 487495 - RNA, 20 nt, Human
cccagagccacacacgcccg

SEQ ID NO: 487496 - RNA, 19 nt, Human
cccaguuuugcagacgcuc

SEQ ID NO: 487497 - RNA, 26 nt, Human
ccccagaaagcuucaagagcaccccg

SEQ ID NO: 487498 - RNA, 19 nt, Human
ccccagagaagccagggag

SEQ ID NO: 487499 - RNA, 21 nt, Human
ccccagcccgcccccaggugc

SEQ ID NO: 487500 - RNA, 21 nt, Human
cccccaggugcccgcagccgg

SEQ ID NO: 487501 - RNA, 21 nt, Human
ccccgcgcgcccgcgcgcccg

SEQ ID NO: 487502 - RNA, 21 nt, Human
ccccgcgcgcccgcgcgcccg

SEQ ID NO: 487503 - RNA, 22 nt, Human
ccccgcgcgcccgcgcgcccgc

SEQ ID NO: 487504 - RNA, 21 nt, Human
ccccgcugccucccgcggccg

SEQ ID NO: 487505 - RNA, 21 nt, Human
ccccucggggcucgccccccc

SEQ ID NO: 487506 - RNA, 20 nt, Human
cccgcgcgcccgccgaggcu

SEQ ID NO: 487507 - RNA, 21 nt, Human
cccgcgcgcccgccgaggcuc

SEQ ID NO: 487508 - RNA, 20 nt, Human
cccgcgcgcccgcgcgcccg

SEQ ID NO: 487509 - RNA, 21 nt, Human
cccgcgcgcccgcgcgcccgc

SEQ ID NO: 487510 - RNA, 24 nt, Human
cccgcggccgccgcaggaccggcg

SEQ ID NO: 487511 - RNA, 20 nt, Human
cccgcugccucccgcggccg

SEQ ID NO: 487512 - RNA, 21 nt, Human
cccgucagggggccacgacca

SEQ ID NO: 487513 - RNA, 23 nt, Human
cccgucagggggccacgaccaug

SEQ ID NO: 487514 - RNA, 25 nt, Human
cccucggggcucgcccccccgccuc

SEQ ID NO: 487515 - RNA, 18 nt, Human
cccuggguaccagagggc

SEQ ID NO: 487516 - RNA, 19 nt, Human
cccuggguaccagagggcu

SEQ ID NO: 487517 - RNA, 18 nt, Human
ccgaggcucccgccagcc

SEQ ID NO: 487518 - RNA, 24 nt, Human
ccgccucaccgggucagugaaaaa

SEQ ID NO: 487519 - RNA, 20 nt, Human
ccgcugccucccgcggccgc

SEQ ID NO: 487520 - RNA, 21 nt, Human
ccgcugcugagaggcuucaau

SEQ ID NO: 487521 - RNA, 23 nt, Human
ccggcagagcccggcgggaggcg

SEQ ID NO: 487522 - RNA, 18 nt, Human
ccggcgccgcagcccucg

SEQ ID NO: 487523 - RNA, 21 nt, Human
ccggcgccgcagcccucgcua

SEQ ID NO: 487524 - RNA, 20 nt, Human
ccgugcgugcccaccgcggc

SEQ ID NO: 487525 - RNA, 22 nt, Human
ccgugcgugcccaccgcggccg

SEQ ID NO: 487526 - RNA, 24 nt, Human
ccgugcgugcccaccgcggccgcg

SEQ ID NO: 487527 - RNA, 21 nt, Human
ccuauaaucccagcuacucag

SEQ ID NO: 487528 - RNA, 22 nt, Human
ccucccgcggccgccgcaggac

SEQ ID NO: 487529 - RNA, 21 nt, Human
ccuccggacugucccugacuu

SEQ ID NO: 487530 - RNA, 19 nt, Human
ccucgcuacagcgccuccu

SEQ ID NO: 487531 - RNA, 20 nt, Human
ccucugaaacuguacugugc

SEQ ID NO: 487532 - RNA, 19 nt, Human
ccucugagccagccagccu

SEQ ID NO: 487533 - RNA, 19 nt, Human
ccugcagguccaggcagcu

SEQ ID NO: 487534 - RNA, 23 nt, Human
ccuggacaacaagagcaagacuc

SEQ ID NO: 487535 - RNA, 18 nt, Human
ccuggagucccacccuga

SEQ ID NO: 487536 - RNA, 22 nt, Human
ccuggccaacauggugaaaccc

SEQ ID NO: 487537 - RNA, 24 nt, Human
ccuggccaacauggugaaacccug

SEQ ID NO: 487538 - RNA, 20 nt, Human
ccuggcuccaguucuagagu

SEQ ID NO: 487539 - RNA, 21 nt, Human
ccugggagaaggagguugcag

SEQ ID NO: 487540 - RNA, 22 nt, Human
ccuggggcugcugcgcacagcc

SEQ ID NO: 487541 - RNA, 20 nt, Human
ccuugugcuggucagacuuc

SEQ ID NO: 487542 - RNA, 20 nt, Human
ccuuuaguguugugaauaau

SEQ ID NO: 487543 - RNA, 21 nt, Human
cgacucuaagucagaauuccu

SEQ ID NO: 487544 - RNA, 24 nt, Human
cgacuugcaacaucuuccaacucu

SEQ ID NO: 487545 - RNA, 24 nt, Human
cgagaccagccuggccaacauggu

SEQ ID NO: 487546 - RNA, 23 nt, Human
cgcagagcggcgcugcggggacg

SEQ ID NO: 487547 - RNA, 24 nt, Human
cgccuauaaucccagcuacucagg

SEQ ID NO: 487548 - RNA, 24 nt, Human
cgcggccggcgcccccagcccgcc

SEQ ID NO: 487549 - RNA, 26 nt, Human
cgggccccauuuuuuuuuuuuuuuuu

SEQ ID NO: 487550 - RNA, 20 nt, Human
cggggcggcgggcgcagagc

SEQ ID NO: 487551 - RNA, 19 nt, Human
cggggcugcagcuggcggc

SEQ ID NO: 487552 - RNA, 23 nt, Human
cggggcugcagcuggcggccgac

SEQ ID NO: 487553 - RNA, 21 nt, Human
cgggucagugaaaaaacgauc

SEQ ID NO: 487554 - RNA, 20 nt, Human
cuauucauuuccagggacag

SEQ ID NO: 487555 - RNA, 23 nt, Human
cucagacccagagacuuccugga

SEQ ID NO: 487556 - RNA, 23 nt, Human
cucccggcacaggcaaaaauggc

SEQ ID NO: 487557 - RNA, 20 nt, Human
cuccuggaauauuuugaguu

SEQ ID NO: 487558 - RNA, 18 nt, Human
cuccuuccuugugcuggc

SEQ ID NO: 487559 - RNA, 20 nt, Human
cugaagucaguuucuccucc

SEQ ID NO: 487560 - RNA, 24 nt, Human
cugacaccuguaaucccagcacuu

SEQ ID NO: 487561 - RNA, 22 nt, Human
cugagacuaaauuuacaacagc

SEQ ID NO: 487562 - RNA, 22 nt, Human
cugagucauuugcuugcaccca

SEQ ID NO: 487563 - RNA, 20 nt, Human
cugcagcuggcggccggagc

SEQ ID NO: 487564 - RNA, 23 nt, Human
cugcaugucagaccagccuggga

SEQ ID NO: 487565 - RNA, 23 nt, Human
cugccccgcugccucccgcggcc

SEQ ID NO: 487566 - RNA, 19 nt, Human
cugcggggacggcgggcgc

SEQ ID NO: 487567 - RNA, 27 nt, Human
cugcuaggccucaggggugucugaguu

SEQ ID NO: 487568 - RNA, 20 nt, Human
cuggaauauuuugaguucug

SEQ ID NO: 487569 - RNA, 24 nt, Human
cuggacacacugcugccggcuggg

SEQ ID NO: 487570 - RNA, 24 nt, Human
cuggacccagagccacacacgccc

SEQ ID NO: 487571 - RNA, 24 nt, Human
cuggccaacauggugaaacccugu

SEQ ID NO: 487572 - RNA, 21 nt, Human
cugugcuuuuucccacuuugc

SEQ ID NO: 487573 - RNA, 20 nt, Human
cuguucucagcagcaguggg

SEQ ID NO: 487574 - RNA, 18 nt, Human
cuguugcaguuuucaguc

SEQ ID NO: 487575 - RNA, 23 nt, Human
cuugaaccugggagaaggagguu

SEQ ID NO: 487576 - RNA, 22 nt, Human
cuugcagugggcaacgggcgug

SEQ ID NO: 487577 - RNA, 18 nt, Human
cuuggcugggugcggugg

SEQ ID NO: 487578 - RNA, 20 nt, Human
cuugugacguggguguggac

SEQ ID NO: 487579 - RNA, 24 nt, Human
cuuuuggugaaaguuugggguugg

SEQ ID NO: 487580 - RNA, 26 nt, Human
gaaaaaccaauaguguguuucuucca

SEQ ID NO: 487581 - RNA, 23 nt, Human
gaacacggcaucuuccgucucuc

SEQ ID NO: 487582 - RNA, 26 nt, Human
gaagaaaaaaaaauuuuuuuaaaaag

SEQ ID NO: 487583 - RNA, 21 nt, Human
gacacacaguuucauguucca

SEQ ID NO: 487584 - RNA, 24 nt, Human
gacaccuguaaucccagcacuuug

SEQ ID NO: 487585 - RNA, 19 nt, Human
gacagaaaaaggaacgacu

SEQ ID NO: 487586 - RNA, 21 nt, Human
gacagaagcgaagggcagggg

SEQ ID NO: 487587 - RNA, 19 nt, Human
gacuugcaacaucuuccaa

SEQ ID NO: 487588 - RNA, 21 nt, Human
gagaggcuucaauugcaccug

SEQ ID NO: 487589 - RNA, 21 nt, Human
gagccggaggaggagcccggc

SEQ ID NO: 487590 - RNA, 20 nt, Human
gagcuguugagucauguggu

SEQ ID NO: 487591 - RNA, 19 nt, Human
gaggagcccggcccacagc

SEQ ID NO: 487592 - RNA, 25 nt, Human
gaggagcccggcccacagcgccugc

SEQ ID NO: 487593 - RNA, 23 nt, Human
gaggaggagcccggcccacagcg

SEQ ID NO: 487594 - RNA, 19 nt, Human
gaggcucccgccagccccg

SEQ ID NO: 487595 - RNA, 19 nt, Human
gagguugcagugagccuag

SEQ ID NO: 487596 - RNA, 24 nt, Human
gaucacuugaggucaggaguucga

SEQ ID NO: 487597 - RNA, 19 nt, Human
gcaacaucuuccaacucug

SEQ ID NO: 487598 - RNA, 20 nt, Human
gcacugccuuucaauuacuu

SEQ ID NO: 487599 - RNA, 20 nt, Human
gcagcagugggccugccugc

SEQ ID NO: 487600 - RNA, 24 nt, Human
gccaacauggugaaacccugucuc

SEQ ID NO: 487601 - RNA, 21 nt, Human
gccacacugucuaagguggcu

SEQ ID NO: 487602 - RNA, 19 nt, Human
gccgcggccggcgccccca

SEQ ID NO: 487603 - RNA, 24 nt, Human
gccgcugcugcguaggcgccgggg

SEQ ID NO: 487604 - RNA, 20 nt, Human
gccuagaucgcgccacugca

SEQ ID NO: 487605 - RNA, 23 nt, Human
gcgcggccgaggcgacggggccg

SEQ ID NO: 487606 - RNA, 18 nt, Human
gcgcugcggggacggcgg

SEQ ID NO: 487607 - RNA, 19 nt, Human
gcggaagcauggagggaaa

SEQ ID NO: 487608 - RNA, 20 nt, Human
gcggcccgcagggccggcgg

SEQ ID NO: 487609 - RNA, 19 nt, Human
gcgggcgccggcagagccc

SEQ ID NO: 487610 - RNA, 25 nt, Human
gcuacagcgccuccugccgcggccg

SEQ ID NO: 487611 - RNA, 18 nt, Human
gcugacaccuguaauccc

SEQ ID NO: 487612 - RNA, 19 nt, Human
gcugcccugcaguaacugg

SEQ ID NO: 487613 - RNA, 24 nt, Human
gcuggcggccggagcugcccgggg

SEQ ID NO: 487614 - RNA, 23 nt, Human
gcuguccucugaaacuguacugu

SEQ ID NO: 487615 - RNA, 22 nt, Human
ggaggaagugggccuaggaggg

SEQ ID NO: 487616 - RNA, 20 nt, Human
ggagguugcagugagccuag

SEQ ID NO: 487617 - RNA, 23 nt, Human
ggagguugcagugagccuagauc

SEQ ID NO: 487618 - RNA, 24 nt, Human
ggagguugcagugagccuagaucg

SEQ ID NO: 487619 - RNA, 18 nt, Human
ggcacaggcaaaaauggc

SEQ ID NO: 487620 - RNA, 23 nt, Human
ggccccauuuuuuuuuuuuuuuu

SEQ ID NO: 487621 - RNA, 25 nt, Human
ggccgcugcugcguaggcgccgggg

SEQ ID NO: 487622 - RNA, 21 nt, Human
ggcugacaccuguaaucccag

SEQ ID NO: 487623 - RNA, 18 nt, Human
gggaaaaaaaaaauccaa

SEQ ID NO: 487624 - RNA, 21 nt, Human
gggaaaaaaaaaauccaaugu

SEQ ID NO: 487625 - RNA, 24 nt, Human
gggaaggagacugcuguccucuga

SEQ ID NO: 487626 - RNA, 18 nt, Human
gggagaaggagguugcag

SEQ ID NO: 487627 - RNA, 19 nt, Human
gggcacccugggcaccacg

SEQ ID NO: 487628 - RNA, 24 nt, Human
gggcugcagcuggcggccggagcu

SEQ ID NO: 487629 - RNA, 18 nt, Human
gggcuggggggccagauc

SEQ ID NO: 487630 - RNA, 21 nt, Human
ggggauggccuuaaaaggggu

SEQ ID NO: 487631 - RNA, 24 nt, Human
gggugcgguggcugacaccuguaa

SEQ ID NO: 487632 - RNA, 24 nt, Human
gguggcagacgccuauaaucccag

SEQ ID NO: 487633 - RNA, 23 nt, Human
gguggcugacaccuguaauccca

SEQ ID NO: 487634 - RNA, 24 nt, Human
gguggcugacaccuguaaucccag

SEQ ID NO: 487635 - RNA, 21 nt, Human
gugaaacccugucucuacuaa

SEQ ID NO: 487636 - RNA, 24 nt, Human
gugguuucaguugggggugagggg

SEQ ID NO: 487637 - RNA, 20 nt, Human
uaacagaguuaacauuacaa

SEQ ID NO: 487638 - RNA, 20 nt, Human
uaagguaccaccuggucuua

SEQ ID NO: 487639 - RNA, 23 nt, Human
uacaacaguauuacaaauaguca

SEQ ID NO: 487640 - RNA, 24 nt, Human
uacaacaguauuacaaauagucaa

SEQ ID NO: 487641 - RNA, 25 nt, Human
uacaacaucagggcugugucaugag

SEQ ID NO: 487642 - RNA, 19 nt, Human
uacaaugauugccaucaca

SEQ ID NO: 487643 - RNA, 19 nt, Human
uaccgcauccuuuucuucc

SEQ ID NO: 487644 - RNA, 20 nt, Human
uaccuggauuauuauuaaug

SEQ ID NO: 487645 - RNA, 20 nt, Human
uacuaguuguguucccuaac

SEQ ID NO: 487646 - RNA, 18 nt, Human
uacuuucuuccaagaaag

SEQ ID NO: 487647 - RNA, 25 nt, Human
uagcaacaaggucuucuauaacaac

SEQ ID NO: 487648 - RNA, 21 nt, Human
uagccccaagugccccagaga

SEQ ID NO: 487649 - RNA, 25 nt, Human
uauuaagcacuuauaagcaguuuuu

SEQ ID NO: 487650 - RNA, 19 nt, Human
ucacaagagcuguggcgcc

SEQ ID NO: 487651 - RNA, 19 nt, Human
ucacgggaaggagacugcu

SEQ ID NO: 487652 - RNA, 18 nt, Human
ucacuuaguccuggcucc

SEQ ID NO: 487653 - RNA, 20 nt, Human
ucagaccauuuccuucuguu

SEQ ID NO: 487654 - RNA, 18 nt, Human
ucagcucagggugagguc

SEQ ID NO: 487655 - RNA, 23 nt, Human
ucagcucagggugagguccuggg

SEQ ID NO: 487656 - RNA, 23 nt, Human
ucagcucuggucacagguuuuua

SEQ ID NO: 487657 - RNA, 22 nt, Human
ucagucccugaaggacagaaaa

SEQ ID NO: 487658 - RNA, 21 nt, Human
ucaguuaaggauguuugcuuu

SEQ ID NO: 487659 - RNA, 22 nt, Human
ucaguuaaggauguuugcuuug

SEQ ID NO: 487660 - RNA, 25 nt, Human
ucaguuaaggauguuugcuuugggu

SEQ ID NO: 487661 - RNA, 20 nt, Human
ucaguugggggugaggggaa

SEQ ID NO: 487662 - RNA, 18 nt, Human
ucauggaaggaaauauga

SEQ ID NO: 487663 - RNA, 21 nt, Human
uccacgcaaggugggccccuc

SEQ ID NO: 487664 - RNA, 20 nt, Human
uccacucucauucauagcaa

SEQ ID NO: 487665 - RNA, 23 nt, Human
uccccagaaagcuucaagagcac

SEQ ID NO: 487666 - RNA, 18 nt, Human
ucccgcggccgccgcagg

SEQ ID NO: 487667 - RNA, 18 nt, Human
ucccugaaggacagaaaa

SEQ ID NO: 487668 - RNA, 21 nt, Human
ucccuggguaccagagggcuu

SEQ ID NO: 487669 - RNA, 23 nt, Human
uccgaagcugggaaaggcagaac

SEQ ID NO: 487670 - RNA, 23 nt, Human
uccgucucucaugaugccgguca

SEQ ID NO: 487671 - RNA, 20 nt, Human
uccugaagacucagcucagg

SEQ ID NO: 487672 - RNA, 20 nt, Human
uccuucagcucuggucacag

SEQ ID NO: 487673 - RNA, 23 nt, Human
ucgacaucucagcccuccaugcu

SEQ ID NO: 487674 - RNA, 23 nt, Human
ucgcgccacugcacuccagccug

SEQ ID NO: 487675 - RNA, 24 nt, Human
ucgcuugaaccugggagaaggagg

SEQ ID NO: 487676 - RNA, 21 nt, Human
ucguggggaccccaggagggc

SEQ ID NO: 487677 - RNA, 23 nt, Human
ucuccuggaauauuuugaguucu

SEQ ID NO: 487678 - RNA, 21 nt, Human
ucuucuauaacaacgacucuu

SEQ ID NO: 487679 - RNA, 18 nt, Human
ucuuugguggaagacaag

SEQ ID NO: 487680 - RNA, 24 nt, Human
ugaaccugggagaaggagguugca

SEQ ID NO: 487681 - RNA, 20 nt, Human
ugaagaguagucugcccaca

SEQ ID NO: 487682 - RNA, 22 nt, Human
ugaauaauacuugaaaagccca

SEQ ID NO: 487683 - RNA, 21 nt, Human
ugacacacaguuucauguucc

SEQ ID NO: 487684 - RNA, 18 nt, Human
ugacacagaaucagagaa

SEQ ID NO: 487685 - RNA, 22 nt, Human
ugagccuagaucgcgccacugc

SEQ ID NO: 487686 - RNA, 24 nt, Human
ugaggcaggagagucgcuugaacc

SEQ ID NO: 487687 - RNA, 25 nt, Human
ugaggcaggagagucgcuugaaccu

SEQ ID NO: 487688 - RNA, 21 nt, Human
ugagucauuugcuugcaccca

SEQ ID NO: 487689 - RNA, 18 nt, Human
ugcaagugcccugauuuc

SEQ ID NO: 487690 - RNA, 21 nt, Human
ugcaguuuucaguccuagagu

SEQ ID NO: 487691 - RNA, 20 nt, Human
ugcauggcacaguuugaaua

SEQ ID NO: 487692 - RNA, 21 nt, Human
ugcccgugccugcccuguucu

SEQ ID NO: 487693 - RNA, 18 nt, Human
ugcccuguucucagcagc

SEQ ID NO: 487694 - RNA, 19 nt, Human
ugcuaugcacaccauccca

SEQ ID NO: 487695 - RNA, 19 nt, Human
uggaaaaagcaacuaaggc

SEQ ID NO: 487696 - RNA, 18 nt, Human
uggaagacaagcagcuug

SEQ ID NO: 487697 - RNA, 19 nt, Human
uggaagacaagcagcuugg

SEQ ID NO: 487698 - RNA, 19 nt, Human
uggaauauuuugaguucug

SEQ ID NO: 487699 - RNA, 20 nt, Human
uggaggcacugccuuucaau

SEQ ID NO: 487700 - RNA, 24 nt, Human
uggccaacauggugaaacccuguc

SEQ ID NO: 487701 - RNA, 27 nt, Human
uggccacgccaggccauucugcucuca

SEQ ID NO: 487702 - RNA, 22 nt, Human
uggcgcggccgaggcgacgggg

SEQ ID NO: 487703 - RNA, 22 nt, Human
uggcggccggagcugcccgggg

SEQ ID NO: 487704 - RNA, 24 nt, Human
uggcggggaaagaguugcuuguuu

SEQ ID NO: 487705 - RNA, 24 nt, Human
uggcugacaccuguaaucccagca

SEQ ID NO: 487706 - RNA, 24 nt, Human
ugggagaaggagguugcagugagc

SEQ ID NO: 487707 - RNA, 24 nt, Human
ugggaggccaaggcaggcagauca

SEQ ID NO: 487708 - RNA, 19 nt, Human
ugggccuaggagggccugc

SEQ ID NO: 487709 - RNA, 21 nt, Human
uggggaaagcugcccugcagu

SEQ ID NO: 487710 - RNA, 21 nt, Human
uggggaccccaggagggcuga

SEQ ID NO: 487711 - RNA, 21 nt, Human
uguagccacuggccaccacuc

SEQ ID NO: 487712 - RNA, 24 nt, Human
ugucuuuggaagaaaaaaaaauuu

SEQ ID NO: 487713 - RNA, 20 nt, Human
ugugguuccagugacacccu

SEQ ID NO: 487714 - RNA, 23 nt, Human
ugugugugugcacacacacaucu

SEQ ID NO: 487715 - RNA, 25 nt, Human
ugugugugugcacacacacaucuag

SEQ ID NO: 487716 - RNA, 18 nt, Human
uguuacagggaaggacuc

SEQ ID NO: 487717 - RNA, 19 nt, Human
uguuacagggaaggacucu

SEQ ID NO: 487718 - RNA, 22 nt, Human
uuaaaagcuggccugaccccac

SEQ ID NO: 487719 - RNA, 19 nt, Human
uuaaaagggguaaggggaa

SEQ ID NO: 487720 - RNA, 22 nt, Human
uuaaccccaugaaagacgccga

SEQ ID NO: 487721 - RNA, 18 nt, Human
uuagccgggcgugguggc

SEQ ID NO: 487722 - RNA, 24 nt, Human
uuagccgggcgugguggcagacgc

SEQ ID NO: 487723 - RNA, 24 nt, Human
uucaagagcaccuaaaaauauuca

SEQ ID NO: 487724 - RNA, 23 nt, Human
uucauggcacagacucugcugug

SEQ ID NO: 487725 - RNA, 23 nt, Human
uucauggcacagacucugcugug

SEQ ID NO: 487726 - RNA, 22 nt, Human
uuccagcacaugggagcuucac

SEQ ID NO: 487727 - RNA, 20 nt, Human
uuccagggacagaaaaccac

SEQ ID NO: 487728 - RNA, 25 nt, Human
uuccuucagcucuggucacagguuu

SEQ ID NO: 487729 - RNA, 20 nt, Human
uugaaccugggagaaggagg

SEQ ID NO: 487730 - RNA, 24 nt, Human
uugaaccugggagaaggagguugc

SEQ ID NO: 487731 - RNA, 22 nt, Human
uugcagugagccuagaucgcgc

SEQ ID NO: 487732 - RNA, 19 nt, Human
uuggaagaaaaaaaaauuu

SEQ ID NO: 487733 - RNA, 23 nt, Human
uuguacauagccccaagugcccc

SEQ ID NO: 487734 - RNA, 21 nt, Human
uuguuuuguuuucaaauugug

SEQ ID NO: 487735 - RNA, 23 nt, Human
uuucaguccuagagucuuccuuc

SEQ ID NO: 487736 - RNA, 18 nt, Human
uuucucacuuaguccugg

SEQ ID NO: 487737 - RNA, 23 nt, Human
uuucugugauccaguccccagug

SEQ ID NO: 487738 - RNA, 21 nt, Human
uuucuguugcaguuuucaguc

SEQ ID NO: 487739 - RNA, 23 nt, Human
uuugguuacuccaggccacagca

SEQ ID NO: 487740 - RNA, 23 nt, Human
uuuucaguccuagagucuuccuu

SEQ ID NO: 487741 - RNA, 21 nt, Human
aagcaccccgccccgugcccg

SEQ ID NO: 487742 - RNA, 21 nt, Human
acccacacccgcaccccccac

SEQ ID NO: 487743 - RNA, 22 nt, Human
acccgcaccccccacccaggcc

SEQ ID NO: 487744 - RNA, 20 nt, Human
acccuaagcaccccgccccg

SEQ ID NO: 487745 - RNA, 21 nt, Human
cacacccgcaccccccaccca

SEQ ID NO: 487746 - RNA, 19 nt, Human
cacccacacccgcaccccc

SEQ ID NO: 487747 - RNA, 19 nt, Human
caccccccacccaggcccc

SEQ ID NO: 487748 - RNA, 21 nt, Human
cacccgcaccccccacccagg

SEQ ID NO: 487749 - RNA, 20 nt, Human
cagccgccgccgccgcccca

SEQ ID NO: 487750 - RNA, 18 nt, Human
ccacccacacccgcaccc

SEQ ID NO: 487751 - RNA, 21 nt, Human
cccacacccgcaccccccacc

SEQ ID NO: 487752 - RNA, 23 nt, Human
ccccgugcccgugcccgugccug

SEQ ID NO: 487753 - RNA, 22 nt, Human
cccgugcccgugccugcagccg

SEQ ID NO: 487754 - RNA, 24 nt, Human
cccuaagcaccccgccccucgggg

SEQ ID NO: 487755 - RNA, 18 nt, Human
ccgcaccccccacccagg

SEQ ID NO: 487756 - RNA, 18 nt, Human
ccgccgccccaggacucg

SEQ ID NO: 487757 - RNA, 23 nt, Human
ccuacacugggacagugggacca

SEQ ID NO: 487758 - RNA, 22 nt, Human
ccugcagccgccgccgccgccc

SEQ ID NO: 487759 - RNA, 21 nt, Human
cuaagcaccccgccccgugcc

SEQ ID NO: 487760 - RNA, 23 nt, Human
cuccgccgcuaggcgcgcgccuc

SEQ ID NO: 487761 - RNA, 19 nt, Human
cuccugcacccuaagcacc

SEQ ID NO: 487762 - RNA, 21 nt, Human
cugcagccgccgccgccgccc

SEQ ID NO: 487763 - RNA, 19 nt, Human
gcagccgccgccgccgccc

SEQ ID NO: 487764 - RNA, 21 nt, Human
gccgcagguccccacccacac

SEQ ID NO: 487765 - RNA, 20 nt, Human
gccugcagccgccgccgccg

SEQ ID NO: 487766 - RNA, 20 nt, Human
gcgcgcgccuccugcacccu

SEQ ID NO: 487767 - RNA, 19 nt, Human
gggacagugggaccaggaa

SEQ ID NO: 487768 - RNA, 18 nt, Human
ucagaacacaucuguugc

SEQ ID NO: 487769 - RNA, 19 nt, Human
ucagaacacaucuguugca

SEQ ID NO: 487770 - RNA, 22 nt, Human
uccccacccacacccgcacccc

SEQ ID NO: 487771 - RNA, 20 nt, Human
uccugcacccuaagcacccc

SEQ ID NO: 487772 - RNA, 25 nt, Human
uccugcacccuaagcaccccgcccc

SEQ ID NO: 487773 - RNA, 19 nt, Human
ugcccgugcccgugccugc

SEQ ID NO: 487774 - RNA, 22 nt, Human
uuguagguucagagaaucagaa

SEQ ID NO: 487775 - RNA, 19 nt, Human
aacacuucuuguguuccag

SEQ ID NO: 487776 - RNA, 24 nt, Human
caacacuaagggccaaacccagug

SEQ ID NO: 487777 - RNA, 25 nt, Human
caacacuaagggccaaacccaguga

SEQ ID NO: 487778 - RNA, 23 nt, Human
cccuucccggaaccucggcuccc

SEQ ID NO: 487779 - RNA, 19 nt, Human
ccggaaccucggcuccccc

SEQ ID NO: 487780 - RNA, 26 nt, Human
ccucaaugccacgacgccauuuccua

SEQ ID NO: 487781 - RNA, 26 nt, Human
cuucccggaaccucggcuccccccca

SEQ ID NO: 487782 - RNA, 18 nt, Human
gaaccucggcuccccccc

SEQ ID NO: 487783 - RNA, 20 nt, Human
gacgccauuuccuacuacga

SEQ ID NO: 487784 - RNA, 22 nt, Human
gcaagcacucaauucucuaaau

SEQ ID NO: 487785 - RNA, 21 nt, Human
gcgagcuuuuccuggagguuc

SEQ ID NO: 487786 - RNA, 22 nt, Human
gcucuggcaugcaagauaaucc

SEQ ID NO: 487787 - RNA, 19 nt, Human
ggagguucuaggagggaug

SEQ ID NO: 487788 - RNA, 30 nt, Human
gucaacacuaagggccaaacccagugaacu

SEQ ID NO: 487789 - RNA, 23 nt, Human
uaggagggaugccccucaauggu

SEQ ID NO: 487790 - RNA, 23 nt, Human
uauuccauuccagcgcucuggca

SEQ ID NO: 487791 - RNA, 18 nt, Human
ucucucuccgcagaaccu

SEQ ID NO: 487792 - RNA, 25 nt, Human
ucuuccgcgagcuuuuccuggaggu

SEQ ID NO: 487793 - RNA, 22 nt, Human
ugcaagcacucaauucucuaaa

SEQ ID NO: 487794 - RNA, 21 nt, Human
ugccacgacgccauuuccuac

SEQ ID NO: 487795 - RNA, 22 nt, Human
ugcuaagccaacuggacuacac

SEQ ID NO: 487796 - RNA, 22 nt, Human
uucccagacugcuuggagccuc

SEQ ID NO: 487797 - RNA, 25 nt, Human
uuuaaaaacagaaaaucagaucagu

SEQ ID NO: 487798 - RNA, 23 nt, Human
uuuccuggagguucuaggaggga

SEQ ID NO: 487799 - RNA, 27 nt, Human
aaaagcacaaaugugcauaguucagaa

SEQ ID NO: 487800 - RNA, 19 nt, Human
aaacuuacaaaaaaagcac

SEQ ID NO: 487801 - RNA, 23 nt, Human
aaagaaaaauaccaaauaaauca

SEQ ID NO: 487802 - RNA, 23 nt, Human
aaagguuuuuuuugucuuuuuua

SEQ ID NO: 487803 - RNA, 23 nt, Human
aaaguacaccuuucacaauaaca

SEQ ID NO: 487804 - RNA, 19 nt, Human
acaaaaaaagcacaaaugu

SEQ ID NO: 487805 - RNA, 18 nt, Human
agcggcggcggagggaca

SEQ ID NO: 487806 - RNA, 23 nt, Human
aggugcaaagacugacagugacc

SEQ ID NO: 487807 - RNA, 18 nt, Human
auaaaaggcuuaugcccc

SEQ ID NO: 487808 - RNA, 21 nt, Human
auaaaaggcuuaugccccuaa

SEQ ID NO: 487809 - RNA, 18 nt, Human
augaauuuaagcaaaggu

SEQ ID NO: 487810 - RNA, 27 nt, Human
augaugugccugaggaaaaacagauac

SEQ ID NO: 487811 - RNA, 21 nt, Human
caaaaaaagcacaaaugugca

SEQ ID NO: 487812 - RNA, 23 nt, Human
caaaaaaagcacaaaugugcaua

SEQ ID NO: 487813 - RNA, 23 nt, Human
caaaaaaagcacaaaugugcaua

SEQ ID NO: 487814 - RNA, 26 nt, Human
cacaaaguacaccuuucacaauaaca

SEQ ID NO: 487815 - RNA, 21 nt, Human
cacaauaacacugaaagcagg

SEQ ID NO: 487816 - RNA, 21 nt, Human
caccgagcaccagagccggcc

SEQ ID NO: 487817 - RNA, 23 nt, Human
cagaagaucugcaagagggccau

SEQ ID NO: 487818 - RNA, 24 nt, Human
cagccgcagagcgcggcgcgggug

SEQ ID NO: 487819 - RNA, 22 nt, Human
cauaaaaggcuuaugccccuaa

SEQ ID NO: 487820 - RNA, 22 nt, Human
ccucccgggucagauccuggcc

SEQ ID NO: 487821 - RNA, 21 nt, Human
cgccggaaacgggagcggcgg

SEQ ID NO: 487822 - RNA, 18 nt, Human
cgggagcggcggcggagg

SEQ ID NO: 487823 - RNA, 19 nt, Human
cgggagcggcggcggaggg

SEQ ID NO: 487824 - RNA, 21 nt, Human
cgggagcggcggcggagggac

SEQ ID NO: 487825 - RNA, 21 nt, Human
cugaaagcaggugcaaagacu

SEQ ID NO: 487826 - RNA, 21 nt, Human
gaaaugagcacaaaguacacc

SEQ ID NO: 487827 - RNA, 20 nt, Human
gagcggcggcggagggacac

SEQ ID NO: 487828 - RNA, 19 nt, Human
gauccuggccaucuccccc

SEQ ID NO: 487829 - RNA, 20 nt, Human
gauccuggccaucucccccg

SEQ ID NO: 487830 - RNA, 21 nt, Human
gcaccagagccggccgggaaa

SEQ ID NO: 487831 - RNA, 20 nt, Human
gccuagagccagccgcagag

SEQ ID NO: 487832 - RNA, 23 nt, Human
gcgcgggugcggccuccucccgg

SEQ ID NO: 487833 - RNA, 25 nt, Human
ggaaacgggagcggcggcggaggga

SEQ ID NO: 487834 - RNA, 23 nt, Human
ggccaucucccccgccggaaacg

SEQ ID NO: 487835 - RNA, 18 nt, Human
gggagcggcggcggaggg

SEQ ID NO: 487836 - RNA, 21 nt, Human
uaaaaguugguccaaacuuac

SEQ ID NO: 487837 - RNA, 22 nt, Human
uagaacagcaugaauuuaagca

SEQ ID NO: 487838 - RNA, 23 nt, Human
ucaagagaaagguuguguuuuau

SEQ ID NO: 487839 - RNA, 23 nt, Human
ucaagagaaagguuguguuuuau

SEQ ID NO: 487840 - RNA, 19 nt, Human
uccaaacuuacaaaaaaag

SEQ ID NO: 487841 - RNA, 24 nt, Human
uccaaacuuacaaaaaaagcacaa

SEQ ID NO: 487842 - RNA, 21 nt, Human
ucccccgccggaaacgggagc

SEQ ID NO: 487843 - RNA, 23 nt, Human
ugaaagcaggugcaaagacugac

SEQ ID NO: 487844 - RNA, 22 nt, Human
ugaaaugagcacaaaguacacc

SEQ ID NO: 487845 - RNA, 25 nt, Human
ugcaagaauacaaaauaaaauuguu

SEQ ID NO: 487846 - RNA, 21 nt, Human
ugccugaggaaaaacagauac

SEQ ID NO: 487847 - RNA, 18 nt, Human
uggagguggggaggggcu

SEQ ID NO: 487848 - RNA, 23 nt, Human
uguaugcaagacccuucuccaca

SEQ ID NO: 487849 - RNA, 18 nt, Human
uuaaaacugcaagaauac

SEQ ID NO: 487850 - RNA, 18 nt, Human
uuacauaaaaguuggucc

SEQ ID NO: 487851 - RNA, 22 nt, Human
uugguccaaacuuacaaaaaaa

SEQ ID NO: 487852 - RNA, 19 nt, Human
aaagcagagacuugaaugg

SEQ ID NO: 487853 - RNA, 23 nt, Human
aagcagguggcggugguagcugg

SEQ ID NO: 487854 - RNA, 26 nt, Human
aagcagguggcggugguagcuggggc

SEQ ID NO: 487855 - RNA, 19 nt, Human
acaguggagaggccaggga

SEQ ID NO: 487856 - RNA, 22 nt, Human
agacgaacagugaaaacagagc

SEQ ID NO: 487857 - RNA, 23 nt, Human
agaguggagacaguggagaggcc

SEQ ID NO: 487858 - RNA, 24 nt, Human
agaguggagacaguggagaggcca

SEQ ID NO: 487859 - RNA, 18 nt, Human
agcagguggcggugguag

SEQ ID NO: 487860 - RNA, 18 nt, Human
agcccagugacgagagcc

SEQ ID NO: 487861 - RNA, 21 nt, Human
cagagcccagugacgagagcc

SEQ ID NO: 487862 - RNA, 23 nt, Human
cagagcccagugacgagagccgg

SEQ ID NO: 487863 - RNA, 18 nt, Human
cagccuggugaccucugc

SEQ ID NO: 487864 - RNA, 23 nt, Human
cagguggcggugguagcuggggc

SEQ ID NO: 487865 - RNA, 20 nt, Human
cagugaaaacagagcccagu

SEQ ID NO: 487866 - RNA, 23 nt, Human
ccagugacgagagccggccccuu

SEQ ID NO: 487867 - RNA, 21 nt, Human
ccccaggcugggccgagcagc

SEQ ID NO: 487868 - RNA, 18 nt, Human
ccccggacccccgggccu

SEQ ID NO: 487869 - RNA, 21 nt, Human
cccggacccccgggccuuugg

SEQ ID NO: 487870 - RNA, 22 nt, Human
cgagagccggccccuuggcugg

SEQ ID NO: 487871 - RNA, 19 nt, Human
cgagauggcaucuaucugu

SEQ ID NO: 487872 - RNA, 19 nt, Human
cgggcgagauggcaucuau

SEQ ID NO: 487873 - RNA, 20 nt, Human
cugauggggggcugcaggca

SEQ ID NO: 487874 - RNA, 21 nt, Human
cuuggcuggggacccucccca

SEQ ID NO: 487875 - RNA, 19 nt, Human
gaagccccuugacucaaag

SEQ ID NO: 487876 - RNA, 19 nt, Human
gcaaguagaggaagucagg

SEQ ID NO: 487877 - RNA, 22 nt, Human
gcagguggcggugguagcuggg

SEQ ID NO: 487878 - RNA, 21 nt, Human
gcagugaagccccuugacuca

SEQ ID NO: 487879 - RNA, 26 nt, Human
gccccuugacucaaagcagagacugg

SEQ ID NO: 487880 - RNA, 27 nt, Human
ggagacaguggagaggccagggagggc

SEQ ID NO: 487881 - RNA, 19 nt, Human
ggagaguggagacagugga

SEQ ID NO: 487882 - RNA, 18 nt, Human
gggccuuuggcauaaugc

SEQ ID NO: 487883 - RNA, 21 nt, Human
gugaagccccuugacucaaag

SEQ ID NO: 487884 - RNA, 20 nt, Human
uagaccagccuggugaccuc

SEQ ID NO: 487885 - RNA, 22 nt, Human
uagaccagccuggugaccucug

SEQ ID NO: 487886 - RNA, 20 nt, Human
ucaaagcagagacuugaauu

SEQ ID NO: 487887 - RNA, 19 nt, Human
uccccggacccccgggccu

SEQ ID NO: 487888 - RNA, 23 nt, Human
uccggcucggguggcggccucgu

SEQ ID NO: 487889 - RNA, 21 nt, Human
ugaagccccuugacucaaagc

SEQ ID NO: 487890 - RNA, 25 nt, Human
ugaccucugcccuuccccggacccc

SEQ ID NO: 487891 - RNA, 19 nt, Human
ugacucaaagcagagacuu

SEQ ID NO: 487892 - RNA, 18 nt, Human
ugcaggcagugaagcccc

SEQ ID NO: 487893 - RNA, 19 nt, Human
ugcugauggggggcugcag

SEQ ID NO: 487894 - RNA, 22 nt, Human
uggaagaucauugcuguuugcc

SEQ ID NO: 487895 - RNA, 24 nt, Human
uggagaguggagacaguggagagg

SEQ ID NO: 487896 - RNA, 18 nt, Human
uuuuuuuuuuuuuuuuug

SEQ ID NO: 487897 - RNA, 22 nt, Human
aaaaaccagaaccccccaggug

SEQ ID NO: 487898 - RNA, 23 nt, Human
aaaaaggccacagacuaaccucc

SEQ ID NO: 487899 - RNA, 21 nt, Human
aaaaaguaaaaaccagaaccc

SEQ ID NO: 487900 - RNA, 18 nt, Human
aacagcaucgccucacag

SEQ ID NO: 487901 - RNA, 21 nt, Human
aacaucugguacaaaggguga

SEQ ID NO: 487902 - RNA, 25 nt, Human
aagcagccgcgucaugacggguuuc

SEQ ID NO: 487903 - RNA, 18 nt, Human
aagccucugacgacacag

SEQ ID NO: 487904 - RNA, 20 nt, Human
aagccucugacgacacaggg

SEQ ID NO: 487905 - RNA, 21 nt, Human
aagcgaauggaaaacagcaca

SEQ ID NO: 487906 - RNA, 23 nt, Human
acagggccugccugcaccacgac

SEQ ID NO: 487907 - RNA, 19 nt, Human
agaagccguggaagcgaau

SEQ ID NO: 487908 - RNA, 27 nt, Human
agacaggcuguauggggguccuucaug

SEQ ID NO: 487909 - RNA, 27 nt, Human
agacaggcuguaugggggucggacccc

SEQ ID NO: 487910 - RNA, 24 nt, Human
agcugacuucacaguaguagauac

SEQ ID NO: 487911 - RNA, 21 nt, Human
aggcagaagccguggaagcga

SEQ ID NO: 487912 - RNA, 19 nt, Human
agggugucacugguccugg

SEQ ID NO: 487913 - RNA, 21 nt, Human
agguggucagcaggacuucug

SEQ ID NO: 487914 - RNA, 21 nt, Human
agugccgacuuggggaagugc

SEQ ID NO: 487915 - RNA, 22 nt, Human
cacagggacgcagggugucacu

SEQ ID NO: 487916 - RNA, 21 nt, Human
caccgccggcucggccagucc

SEQ ID NO: 487917 - RNA, 21 nt, Human
cagaaccccccaggugcccau

SEQ ID NO: 487918 - RNA, 22 nt, Human
cagaaccccccaggugcccauc

SEQ ID NO: 487919 - RNA, 23 nt, Human
cagcacagcugacuucacaguag

SEQ ID NO: 487920 - RNA, 24 nt, Human
cagcaucgccucacagcugugcag

SEQ ID NO: 487921 - RNA, 22 nt, Human
cagcggcgccuccucgccgccc

SEQ ID NO: 487922 - RNA, 18 nt, Human
cagcucccuggccccugg

SEQ ID NO: 487923 - RNA, 20 nt, Human
caggccacagggccugccug

SEQ ID NO: 487924 - RNA, 21 nt, Human
cagggccugccugcaccacga

SEQ ID NO: 487925 - RNA, 20 nt, Human
caggggaagccuggcccaag

SEQ ID NO: 487926 - RNA, 23 nt, Human
cagguaaauuguucaaaaauguu

SEQ ID NO: 487927 - RNA, 23 nt, Human
caguaguagauacuggugacacu

SEQ ID NO: 487928 - RNA, 21 nt, Human
ccagaaccccccaggugccca

SEQ ID NO: 487929 - RNA, 20 nt, Human
ccaguccgucagggcgcgcc

SEQ ID NO: 487930 - RNA, 23 nt, Human
ccagugugcaggaguguguuggg

SEQ ID NO: 487931 - RNA, 26 nt, Human
ccaugcgggggcaggacugguggggg

SEQ ID NO: 487932 - RNA, 18 nt, Human
cccaggagggcagugggg

SEQ ID NO: 487933 - RNA, 23 nt, Human
ccccagaugucugcuuccgaagc

SEQ ID NO: 487934 - RNA, 30 nt, Human
ccccaggugcccauccagcagaaggccccu

SEQ ID NO: 487935 - RNA, 19 nt, Human
cccccgccgcccucagccc

SEQ ID NO: 487936 - RNA, 22 nt, Human
cccccgccgcccucagccccgc

SEQ ID NO: 487937 - RNA, 22 nt, Human
ccccucggcgccgccgcccucc

SEQ ID NO: 487938 - RNA, 22 nt, Human
cccgccgcccucagccccgccc

SEQ ID NO: 487939 - RNA, 24 nt, Human
cccucccagcucgggcggcccgcc

SEQ ID NO: 487940 - RNA, 18 nt, Human
ccgcccccgccgcccuca

SEQ ID NO: 487941 - RNA, 21 nt, Human
ccgccgcccucagccccgccc

SEQ ID NO: 487942 - RNA, 19 nt, Human
ccgccgcccucccagcucg

SEQ ID NO: 487943 - RNA, 22 nt, Human
ccggcagcagcggcgccuccuc

SEQ ID NO: 487944 - RNA, 27 nt, Human
ccggcagcagcggcgccuccucgccgc

SEQ ID NO: 487945 - RNA, 22 nt, Human
ccucacagcugugcagacgaac

SEQ ID NO: 487946 - RNA, 21 nt, Human
ccucccagcucgggcggcccg

SEQ ID NO: 487947 - RNA, 20 nt, Human
cgaagcagccgcgucaugac

SEQ ID NO: 487948 - RNA, 24 nt, Human
cgcccucccagcucgggcggcccg

SEQ ID NO: 487949 - RNA, 21 nt, Human
cgccucacagcugugcagacg

SEQ ID NO: 487950 - RNA, 18 nt, Human
cgucccgacggcgcagag

SEQ ID NO: 487951 - RNA, 20 nt, Human
cucagcccagcaggccacag

SEQ ID NO: 487952 - RNA, 19 nt, Human
cugcuuccgaagcagccgc

SEQ ID NO: 487953 - RNA, 18 nt, Human
cugggccacucagugccg

SEQ ID NO: 487954 - RNA, 23 nt, Human
gaacagauguggucuacugccac

SEQ ID NO: 487955 - RNA, 20 nt, Human
gacccagaaugaacuuaaug

SEQ ID NO: 487956 - RNA, 19 nt, Human
gacgacacagggccacaga

SEQ ID NO: 487957 - RNA, 22 nt, Human
gagacaggcuguaugggggucc

SEQ ID NO: 487958 - RNA, 18 nt, Human
gcacugacgcuggaggcc

SEQ ID NO: 487959 - RNA, 23 nt, Human
gcaggaguguguugggugggucu

SEQ ID NO: 487960 - RNA, 20 nt, Human
gcagugggguggcagggcua

SEQ ID NO: 487961 - RNA, 23 nt, Human
gcaucgccucacagcugugcaga

SEQ ID NO: 487962 - RNA, 20 nt, Human
ggagacaggcuguauggggg

SEQ ID NO: 487963 - RNA, 20 nt, Human
ggaggccaucuccagcuccc

SEQ ID NO: 487964 - RNA, 21 nt, Human
ggagggcagugggguggcagg

SEQ ID NO: 487965 - RNA, 19 nt, Human
ggcagcagcggcgccuccu

SEQ ID NO: 487966 - RNA, 21 nt, Human
ggccgcucuccuccccucggc

SEQ ID NO: 487967 - RNA, 24 nt, Human
gggcaggacugguggggggggggg

SEQ ID NO: 487968 - RNA, 19 nt, Human
gggcagggcggggcggggu

SEQ ID NO: 487969 - RNA, 22 nt, Human
gggccggggccagugugcagga

SEQ ID NO: 487970 - RNA, 20 nt, Human
gggcgccgggccccgcgggu

SEQ ID NO: 487971 - RNA, 18 nt, Human
ggggcaggacuggugggg

SEQ ID NO: 487972 - RNA, 19 nt, Human
ggggcagggcggggcgggg

SEQ ID NO: 487973 - RNA, 19 nt, Human
ggggcagggcggggcgggg

SEQ ID NO: 487974 - RNA, 21 nt, Human
ggggggggggcagggcggggc

SEQ ID NO: 487975 - RNA, 21 nt, Human
gggggggggggggcagggcgg

SEQ ID NO: 487976 - RNA, 25 nt, Human
ggguaucccaguggcugcuucgacc

SEQ ID NO: 487977 - RNA, 30 nt, Human
gggugggagacaggcuguauggggguccuu

SEQ ID NO: 487978 - RNA, 19 nt, Human
gucagcaggacuucugcag

SEQ ID NO: 487979 - RNA, 24 nt, Human
uaaaaaaguaaaaaccagaacccc

SEQ ID NO: 487980 - RNA, 18 nt, Human
uaaaaaccagaacccccc

SEQ ID NO: 487981 - RNA, 21 nt, Human
uaggaaaguuucaggaacuag

SEQ ID NO: 487982 - RNA, 20 nt, Human
ucacaagccucugacgacac

SEQ ID NO: 487983 - RNA, 19 nt, Human
ucagcaggacuucugcagc

SEQ ID NO: 487984 - RNA, 19 nt, Human
ucagcaggacuucugcagc

SEQ ID NO: 487985 - RNA, 26 nt, Human
uccaugacuagguggucagcaggaaa

SEQ ID NO: 487986 - RNA, 24 nt, Human
uccaugggccgcucuccucccccc

SEQ ID NO: 487987 - RNA, 24 nt, Human
uccaugggccgcucuccuccccuc

SEQ ID NO: 487988 - RNA, 20 nt, Human
uccccagaugucugcuuccg

SEQ ID NO: 487989 - RNA, 24 nt, Human
uccccucggcgccgccgcccuccc

SEQ ID NO: 487990 - RNA, 20 nt, Human
ucccucagcccagcaggcca

SEQ ID NO: 487991 - RNA, 23 nt, Human
ucgccgccccguccgcgucgucg

SEQ ID NO: 487992 - RNA, 20 nt, Human
ucuacauuuccuuggacaac

SEQ ID NO: 487993 - RNA, 23 nt, Human
ucuccagcucccuggccccugug

SEQ ID NO: 487994 - RNA, 22 nt, Human
ucucggguugucagggguggga

SEQ ID NO: 487995 - RNA, 21 nt, Human
ugacgacacagggccacagag

SEQ ID NO: 487996 - RNA, 24 nt, Human
ugacgcuggaggccaucuccagcu

SEQ ID NO: 487997 - RNA, 19 nt, Human
uggacaagcugugucugcc

SEQ ID NO: 487998 - RNA, 21 nt, Human
uggcaggaggcagaagccgug

SEQ ID NO: 487999 - RNA, 21 nt, Human
uggcaggaggcagaagccgug

SEQ ID NO: 488000 - RNA, 22 nt, Human
uggcagggcuaggcggugcugg

SEQ ID NO: 488001 - RNA, 19 nt, Human
uggcccaagcuguggacaa

SEQ ID NO: 488002 - RNA, 24 nt, Human
uggcuaaaugaaaaaaaggccaca

SEQ ID NO: 488003 - RNA, 18 nt, Human
ugggggggggggggggca

SEQ ID NO: 488004 - RNA, 19 nt, Human
ugggguggcagggcuaggc

SEQ ID NO: 488005 - RNA, 21 nt, Human
ugggguggcagggcuaggcgg

SEQ ID NO: 488006 - RNA, 22 nt, Human
uggucagcaggacuucugcagc

SEQ ID NO: 488007 - RNA, 24 nt, Human
uggucagcaggacuucugcagcug

SEQ ID NO: 488008 - RNA, 19 nt, Human
ugguccugggccuuugucc

SEQ ID NO: 488009 - RNA, 20 nt, Human
uggugggggggggggggggc

SEQ ID NO: 488010 - RNA, 20 nt, Human
ugucaggggugggagacagg

SEQ ID NO: 488011 - RNA, 23 nt, Human
ugucaggggugggagacaggcug

SEQ ID NO: 488012 - RNA, 26 nt, Human
ugugcaauggcuaaaugaaaaaaagg

SEQ ID NO: 488013 - RNA, 18 nt, Human
ugugcaggaguguguugg

SEQ ID NO: 488014 - RNA, 22 nt, Human
uugucuucuucaucuccauauc

SEQ ID NO: 488015 - RNA, 19 nt, Human
aaguagccacaaucuaaca

SEQ ID NO: 488016 - RNA, 18 nt, Human
accagagacuugugaccc

SEQ ID NO: 488017 - RNA, 23 nt, Human
acucgccugcuggcaacucuggc

SEQ ID NO: 488018 - RNA, 20 nt, Human
agcccccugagguccaugca

SEQ ID NO: 488019 - RNA, 20 nt, Human
agcuucuggccccacagccc

SEQ ID NO: 488020 - RNA, 22 nt, Human
augggucccuuuugguaccaga

SEQ ID NO: 488021 - RNA, 20 nt, Human
caagguggggguccaaguuu

SEQ ID NO: 488022 - RNA, 20 nt, Human
caccugccucuucuccuucc

SEQ ID NO: 488023 - RNA, 25 nt, Human
cagcccccugagguccaugcagccc

SEQ ID NO: 488024 - RNA, 22 nt, Human
cagcuucuggccccacagcccc

SEQ ID NO: 488025 - RNA, 20 nt, Human
ccacaagguggggguccaag

SEQ ID NO: 488026 - RNA, 20 nt, Human
ccaugcagcccugugccagc

SEQ ID NO: 488027 - RNA, 19 nt, Human
cccacagcccccugagguc

SEQ ID NO: 488028 - RNA, 23 nt, Human
cccugcucaccugccucuucucc

SEQ ID NO: 488029 - RNA, 18 nt, Human
cgaaccucuucugcccaa

SEQ ID NO: 488030 - RNA, 22 nt, Human
cucgccugcuggcaacucuggc

SEQ ID NO: 488031 - RNA, 18 nt, Human
cucuucuccuuccugucu

SEQ ID NO: 488032 - RNA, 19 nt, Human
cuggccccacagcccccug

SEQ ID NO: 488033 - RNA, 24 nt, Human
gcccccugagguccaugcagcccu

SEQ ID NO: 488034 - RNA, 20 nt, Human
gccugcuggcaacucuggcu

SEQ ID NO: 488035 - RNA, 22 nt, Human
guagccacaaucuaacaagccc

SEQ ID NO: 488036 - RNA, 25 nt, Human
uaacaagcccugcucaccugccucu

SEQ ID NO: 488037 - RNA, 23 nt, Human
ucagucagccaugggucccuuuu

SEQ ID NO: 488038 - RNA, 23 nt, Human
uccaugcagcccugugccagcca

SEQ ID NO: 488039 - RNA, 20 nt, Human
ugacccuggacucgaaccuc

SEQ ID NO: 488040 - RNA, 20 nt, Human
ugggagggggcuccuuggug

SEQ ID NO: 488041 - RNA, 21 nt, Human
ugggucccuuuugguaccaga

SEQ ID NO: 488042 - RNA, 23 nt, Human
uuggggagcucccaguucuuccc

SEQ ID NO: 488043 - RNA, 22 nt, Human
uuuagacuucauaacaaaaaac

SEQ ID NO: 488044 - RNA, 25 nt, Human
aaaagauggcaagccauuuacaaaa

SEQ ID NO: 488045 - RNA, 25 nt, Human
aacagaaaaaaauauauauauuuca

SEQ ID NO: 488046 - RNA, 18 nt, Human
aacuugccgccuccuacu

SEQ ID NO: 488047 - RNA, 21 nt, Human
aagcaaagucaaaaaucagca

SEQ ID NO: 488048 - RNA, 19 nt, Human
aggaagacggcgaguucgg

SEQ ID NO: 488049 - RNA, 19 nt, Human
caucuuauuaacuacuuau

SEQ ID NO: 488050 - RNA, 21 nt, Human
ccuacuggaagucccgcccca

SEQ ID NO: 488051 - RNA, 23 nt, Human
gcagcuacaagcaaagucaaaaa

SEQ ID NO: 488052 - RNA, 27 nt, Human
uguauaaaaacugaugaagccaacauu

SEQ ID NO: 488053 - RNA, 19 nt, Human
uucaucuuauuaacuacuu

SEQ ID NO: 488054 - RNA, 23 nt, Human
uuuuuuuuuuuuuuuuuuaacag

SEQ ID NO: 488055 - RNA, 21 nt, Human
aaaaaaucuaaagagauaagg

SEQ ID NO: 488056 - RNA, 24 nt, Human
aaaacaaaacaaaacaaaaaaccc

SEQ ID NO: 488057 - RNA, 18 nt, Human
aaaaguucuaauguagca

SEQ ID NO: 488058 - RNA, 19 nt, Human
aaacaaaacaaaacaaaaa

SEQ ID NO: 488059 - RNA, 21 nt, Human
aagaagccuuccagaacagcc

SEQ ID NO: 488060 - RNA, 22 nt, Human
acaaaacaaaacaaaaaacccu

SEQ ID NO: 488061 - RNA, 23 nt, Human
acaaaacaaaacaaaaaacccuu

SEQ ID NO: 488062 - RNA, 26 nt, Human
acaaaagaaaacacaccuuuuugguu

SEQ ID NO: 488063 - RNA, 24 nt, Human
accuuaaaaaaaugaaacacacca

SEQ ID NO: 488064 - RNA, 23 nt, Human
acugcaaaaaacaaaacaaaaca

SEQ ID NO: 488065 - RNA, 22 nt, Human
acugcaauuguuuaggcuauaa

SEQ ID NO: 488066 - RNA, 22 nt, Human
agaaaaaauauacuuuuaagaa

SEQ ID NO: 488067 - RNA, 22 nt, Human
agacauaaauaaaauccuccau

SEQ ID NO: 488068 - RNA, 20 nt, Human
agagacacgaggggcccagg

SEQ ID NO: 488069 - RNA, 21 nt, Human
agcagcaaaggauguuuauag

SEQ ID NO: 488070 - RNA, 26 nt, Human
aggaacacugccuugagaaggcacca

SEQ ID NO: 488071 - RNA, 21 nt, Human
aggaaggagcgcccgacggcg

SEQ ID NO: 488072 - RNA, 19 nt, Human
aggcugcaggcacccccag

SEQ ID NO: 488073 - RNA, 23 nt, Human
agggagcauguggggugaggcgg

SEQ ID NO: 488074 - RNA, 26 nt, Human
caaaacaaaaaacccuuauuuaaacc

SEQ ID NO: 488075 - RNA, 23 nt, Human
caaaacaaaacaaaaaacccuua

SEQ ID NO: 488076 - RNA, 25 nt, Human
caaagagacacgaggggcccagggc

SEQ ID NO: 488077 - RNA, 19 nt, Human
caaccuagccuuaaccuuu

SEQ ID NO: 488078 - RNA, 23 nt, Human
caacuggugccugugaucuacaa

SEQ ID NO: 488079 - RNA, 18 nt, Human
caagaagccuuccagaac

SEQ ID NO: 488080 - RNA, 19 nt, Human
caccaccgaggggcuauga

SEQ ID NO: 488081 - RNA, 24 nt, Human
cacccagggcaggugcaugggcug

SEQ ID NO: 488082 - RNA, 18 nt, Human
cacccccagcucacuccc

SEQ ID NO: 488083 - RNA, 25 nt, Human
cacugcaaaaaacaaaacaaaacaa

SEQ ID NO: 488084 - RNA, 21 nt, Human
cagaaucagcagacagggcag

SEQ ID NO: 488085 - RNA, 19 nt, Human
cagcuucccgccgcugagg

SEQ ID NO: 488086 - RNA, 20 nt, Human
cagcuucccgccgcugagga

SEQ ID NO: 488087 - RNA, 19 nt, Human
caggcacccccagcucacu

SEQ ID NO: 488088 - RNA, 19 nt, Human
caggcguuucucauccagc

SEQ ID NO: 488089 - RNA, 18 nt, Human
ccaccgccgcugccgcca

SEQ ID NO: 488090 - RNA, 25 nt, Human
ccagcgccaccgccgcugccgccag

SEQ ID NO: 488091 - RNA, 20 nt, Human
ccccacugguaaugggcugu

SEQ ID NO: 488092 - RNA, 21 nt, Human
cccccagcucacucccugccu

SEQ ID NO: 488093 - RNA, 23 nt, Human
cccgccggguccucugcucagcc

SEQ ID NO: 488094 - RNA, 24 nt, Human
ccgccagcuucccgccgcugagga

SEQ ID NO: 488095 - RNA, 27 nt, Human
ccgccgcugccgccagcuucccgccgc

SEQ ID NO: 488096 - RNA, 21 nt, Human
ccgcugccgccagcuucccgc

SEQ ID NO: 488097 - RNA, 22 nt, Human
ccgcugccgccagcuucccgcc

SEQ ID NO: 488098 - RNA, 25 nt, Human
ccuagccuuaaccuuuuguuucagc

SEQ ID NO: 488099 - RNA, 21 nt, Human
ccuccacaggggggaggugag

SEQ ID NO: 488100 - RNA, 21 nt, Human
ccuccgugggagccagugcuc

SEQ ID NO: 488101 - RNA, 22 nt, Human
ccugcggcagcacccaugacac

SEQ ID NO: 488102 - RNA, 19 nt, Human
cggcagcacccaugacacu

SEQ ID NO: 488103 - RNA, 19 nt, Human
cggcgcggggcggggcgag

SEQ ID NO: 488104 - RNA, 19 nt, Human
cggcuccugauuuucaccc

SEQ ID NO: 488105 - RNA, 26 nt, Human
cuccugauuuucacccaggucucacu

SEQ ID NO: 488106 - RNA, 20 nt, Human
cugugugcggcuccugauuu

SEQ ID NO: 488107 - RNA, 18 nt, Human
gaaggcaccaccgagggg

SEQ ID NO: 488108 - RNA, 18 nt, Human
gaggucccugaagaccaa

SEQ ID NO: 488109 - RNA, 21 nt, Human
gauucagauuucuuucauucu

SEQ ID NO: 488110 - RNA, 22 nt, Human
gcaccagucuaacagagcagcg

SEQ ID NO: 488111 - RNA, 20 nt, Human
gcagcaaggcugggccgcug

SEQ ID NO: 488112 - RNA, 22 nt, Human
ggacauaaugaagaaguaucac

SEQ ID NO: 488113 - RNA, 21 nt, Human
ggcagcacccaugacacuaca

SEQ ID NO: 488114 - RNA, 23 nt, Human
ggcggcugugagcacucagggcu

SEQ ID NO: 488115 - RNA, 23 nt, Human
guagcagcaaaggauguuuauag

SEQ ID NO: 488116 - RNA, 20 nt, Human
uaaaaaaaugaaacacacca

SEQ ID NO: 488117 - RNA, 20 nt, Human
uaaaaaaaugaaacacacca

SEQ ID NO: 488118 - RNA, 22 nt, Human
uaaaauccuccauaauuuacuc

SEQ ID NO: 488119 - RNA, 21 nt, Human
uaagacaaaauacugcccaaa

SEQ ID NO: 488120 - RNA, 19 nt, Human
uaauaaagugagguuuaca

SEQ ID NO: 488121 - RNA, 18 nt, Human
uaaugggcuguucuggga

SEQ ID NO: 488122 - RNA, 19 nt, Human
uaggaagauguggcugugu

SEQ ID NO: 488123 - RNA, 21 nt, Human
uauaaaaguucuaauguagca

SEQ ID NO: 488124 - RNA, 22 nt, Human
uauagaaaaaauauacuuuuaa

SEQ ID NO: 488125 - RNA, 19 nt, Human
ucacugcaaaaaacaaaac

SEQ ID NO: 488126 - RNA, 20 nt, Human
ucccugaagaccaacuggug

SEQ ID NO: 488127 - RNA, 20 nt, Human
ucucacugcagcgcaggaca

SEQ ID NO: 488128 - RNA, 22 nt, Human
ugaaaaaaucuaaagagauaag

SEQ ID NO: 488129 - RNA, 19 nt, Human
ugaaacacaccaacugcaa

SEQ ID NO: 488130 - RNA, 22 nt, Human
ugacacuacagaucaagggguu

SEQ ID NO: 488131 - RNA, 21 nt, Human
ugagaaacagggagcaugugg

SEQ ID NO: 488132 - RNA, 19 nt, Human
ugagugggacgggccuagg

SEQ ID NO: 488133 - RNA, 24 nt, Human
ugcaaaaaacaaaacaaaacaaaa

SEQ ID NO: 488134 - RNA, 19 nt, Human
ugcccaaaacauguaaaac

SEQ ID NO: 488135 - RNA, 24 nt, Human
ugcucacugcaaaaaacaaaacaa

SEQ ID NO: 488136 - RNA, 21 nt, Human
uggaaggcugcaggcaccccc

SEQ ID NO: 488137 - RNA, 24 nt, Human
uguagugaugcucacugcaaaaaa

SEQ ID NO: 488138 - RNA, 20 nt, Human
uguggggugaggcggggcag

SEQ ID NO: 488139 - RNA, 26 nt, Human
uguggggugaggcggggcaggagugg

SEQ ID NO: 488140 - RNA, 24 nt, Human
uucaccuaucuaaagguaaaagga

SEQ ID NO: 488141 - RNA, 23 nt, Human
uucuagacuucaaccuagccuua

SEQ ID NO: 488142 - RNA, 24 nt, Human
uuuguuucagcaccagucuaacag

SEQ ID NO: 488143 - RNA, 25 nt, Human
uuuuguuucagcaccagucuaacag

SEQ ID NO: 488144 - RNA, 24 nt, Human
uuuuuuuuuuuuuuguuugcugga

SEQ ID NO: 488145 - RNA, 20 nt, Human
uuuuuuuuuuuuuuuuuugg

SEQ ID NO: 488146 - RNA, 22 nt, Human
uuuuuuuuuuuuuuuuuuguuu

SEQ ID NO: 488147 - RNA, 23 nt, Human
aaaaagcagacaaguuagaacaa

SEQ ID NO: 488148 - RNA, 19 nt, Human
aaaagaaauucagaaacua

SEQ ID NO: 488149 - RNA, 18 nt, Human
aaaagcagacaaguuaga

SEQ ID NO: 488150 - RNA, 20 nt, Human
aaacaggcugaucaucaagg

SEQ ID NO: 488151 - RNA, 22 nt, Human
aaacugcuaaaaguuacaucuu

SEQ ID NO: 488152 - RNA, 20 nt, Human
aaauuggacauacaaacacu

SEQ ID NO: 488153 - RNA, 19 nt, Human
aacugcaggagggcaaagu

SEQ ID NO: 488154 - RNA, 19 nt, Human
aacuuguaacauaagcgca

SEQ ID NO: 488155 - RNA, 18 nt, Human
aagcagacaaguuagaac

SEQ ID NO: 488156 - RNA, 21 nt, Human
aagcauuacagaucaaaagcu

SEQ ID NO: 488157 - RNA, 23 nt, Human
aaguagaaggcaggcagcaaauu

SEQ ID NO: 488158 - RNA, 22 nt, Human
aaguuuccauacaaaauugucc

SEQ ID NO: 488159 - RNA, 21 nt, Human
acagcaaugguuuacauaugc

SEQ ID NO: 488160 - RNA, 20 nt, Human
acuacaauuauacuaaaguu

SEQ ID NO: 488161 - RNA, 21 nt, Human
agaaacugcaggagggcaaag

SEQ ID NO: 488162 - RNA, 19 nt, Human
agaaauuaggagaaauuaa

SEQ ID NO: 488163 - RNA, 22 nt, Human
agagaagaaacugcaggagggc

SEQ ID NO: 488164 - RNA, 21 nt, Human
agcaggaggagcagcagcagc

SEQ ID NO: 488165 - RNA, 23 nt, Human
agcgguuggagaggagcauugga

SEQ ID NO: 488166 - RNA, 18 nt, Human
aggcacuuaucauuguua

SEQ ID NO: 488167 - RNA, 21 nt, Human
caagaaacugcaaagaaccac

SEQ ID NO: 488168 - RNA, 19 nt, Human
caaguaaauuggacauaca

SEQ ID NO: 488169 - RNA, 19 nt, Human
caaguuagaacaaacauuu

SEQ ID NO: 488170 - RNA, 23 nt, Human
caaguuuccauacaaaauugucc

SEQ ID NO: 488171 - RNA, 19 nt, Human
cacaggaaaccugcccaga

SEQ ID NO: 488172 - RNA, 21 nt, Human
cagacaaguuagaacaaacau

SEQ ID NO: 488173 - RNA, 26 nt, Human
cagaucaaaagcuguauuuacacuua

SEQ ID NO: 488174 - RNA, 24 nt, Human
caggaggagcagcagcagcgcggc

SEQ ID NO: 488175 - RNA, 21 nt, Human
caucaaucugcaauaauuacc

SEQ ID NO: 488176 - RNA, 21 nt, Human
ccagaaacacaugucugcuaa

SEQ ID NO: 488177 - RNA, 19 nt, Human
ccgggcccggaggggcggg

SEQ ID NO: 488178 - RNA, 25 nt, Human
cggggagagcggagcagccgcgcgg

SEQ ID NO: 488179 - RNA, 20 nt, Human
cucauaaucuccagauagcu

SEQ ID NO: 488180 - RNA, 19 nt, Human
cuccagauagcucuuccau

SEQ ID NO: 488181 - RNA, 23 nt, Human
cugggcgcgccgacccgggcccg

SEQ ID NO: 488182 - RNA, 25 nt, Human
gaacugaaauaaacuuugcaaacua

SEQ ID NO: 488183 - RNA, 19 nt, Human
gacccgggcccggaggggc

SEQ ID NO: 488184 - RNA, 18 nt, Human
gagcagcagcagcgcggc

SEQ ID NO: 488185 - RNA, 21 nt, Human
gauuugagaaguagaaggcag

SEQ ID NO: 488186 - RNA, 21 nt, Human
gcccagaucggcgcuuggagc

SEQ ID NO: 488187 - RNA, 25 nt, Human
ggaaauagagggggaugccgguacc

SEQ ID NO: 488188 - RNA, 19 nt, Human
ggaugcuaugagauggggg

SEQ ID NO: 488189 - RNA, 19 nt, Human
ggcucuucucugaaauuca

SEQ ID NO: 488190 - RNA, 20 nt, Human
gggaugcuaugagauggggg

SEQ ID NO: 488191 - RNA, 22 nt, Human
ggggguugggagcagagaagaa

SEQ ID NO: 488192 - RNA, 23 nt, Human
gguugggagcagagaagaaacug

SEQ ID NO: 488193 - RNA, 22 nt, Human
guugggagcagagaagaaacug

SEQ ID NO: 488194 - RNA, 24 nt, Human
uaaaaaagcagacaaguuagaaca

SEQ ID NO: 488195 - RNA, 20 nt, Human
uaaauuggacauacaaacac

SEQ ID NO: 488196 - RNA, 23 nt, Human
uaacauaagcgcaauacauggga

SEQ ID NO: 488197 - RNA, 18 nt, Human
uaacucagguuucaguga

SEQ ID NO: 488198 - RNA, 18 nt, Human
uacauugcccaccaaccu

SEQ ID NO: 488199 - RNA, 21 nt, Human
uauaaauuuacaagaaacugc

SEQ ID NO: 488200 - RNA, 19 nt, Human
uauuacauugcccaccaac

SEQ ID NO: 488201 - RNA, 22 nt, Human
uccauacaaaauuguccaagaa

SEQ ID NO: 488202 - RNA, 20 nt, Human
ugaaaauucaaaucagcuua

SEQ ID NO: 488203 - RNA, 20 nt, Human
ugaaacaggcugaucaucaa

SEQ ID NO: 488204 - RNA, 23 nt, Human
ugaaauaaacuuugcaaacuaca

SEQ ID NO: 488205 - RNA, 23 nt, Human
ugaaugcuaaaucauacucguuu

SEQ ID NO: 488206 - RNA, 23 nt, Human
ugacaacaacuuguaacauaagc

SEQ ID NO: 488207 - RNA, 19 nt, Human
ugagagacaucaaucugca

SEQ ID NO: 488208 - RNA, 23 nt, Human
ugagggcuauuucaacaccaagu

SEQ ID NO: 488209 - RNA, 18 nt, Human
ugcaaagaggagggggaa

SEQ ID NO: 488210 - RNA, 21 nt, Human
ugcccagaucggcgcuuggag

SEQ ID NO: 488211 - RNA, 19 nt, Human
ugcuuucauaaaacuguaa

SEQ ID NO: 488212 - RNA, 19 nt, Human
uggaaauagagggggaugc

SEQ ID NO: 488213 - RNA, 22 nt, Human
uggagcggggagagcggagcag

SEQ ID NO: 488214 - RNA, 19 nt, Human
uggcaggcugggcgcgccg

SEQ ID NO: 488215 - RNA, 24 nt, Human
uguauaaaagcauuacagaucaaa

SEQ ID NO: 488216 - RNA, 19 nt, Human
uuaagucucaacugugaca

SEQ ID NO: 488217 - RNA, 21 nt, Human
uuacaugugaacugaaauaaa

SEQ ID NO: 488218 - RNA, 21 nt, Human
uuccaccucuaccaaauaccu

SEQ ID NO: 488219 - RNA, 24 nt, Human
uugcaauaccuuacaugugaacug

SEQ ID NO: 488220 - RNA, 19 nt, Human
uuucaacaccaaguaaaua

SEQ ID NO: 488221 - RNA, 25 nt, Human
uuuccaagugcuuagguuuuaugag

SEQ ID NO: 488222 - RNA, 19 nt, Human
uuuccauacaaaauugucc

SEQ ID NO: 488223 - RNA, 22 nt, Human
aacgccgcccagccgcgggggu

SEQ ID NO: 488224 - RNA, 21 nt, Human
aaggggguccgcgggggaaac

SEQ ID NO: 488225 - RNA, 24 nt, Human
aaucccgcaccucugggcuccaaa

SEQ ID NO: 488226 - RNA, 19 nt, Human
acccggcuggagggggagg

SEQ ID NO: 488227 - RNA, 23 nt, Human
acgggcccgcggcccugaacgcc

SEQ ID NO: 488228 - RNA, 23 nt, Human
agaaucccgcaccucugggcucc

SEQ ID NO: 488229 - RNA, 18 nt, Human
agcuggucucuguacagc

SEQ ID NO: 488230 - RNA, 22 nt, Human
aggaggaggaauggaagagucc

SEQ ID NO: 488231 - RNA, 18 nt, Human
agggggagggggcgcggc

SEQ ID NO: 488232 - RNA, 18 nt, Human
aggugcccuuggacgggu

SEQ ID NO: 488233 - RNA, 19 nt, Human
cacccggacgggcccgcgg

SEQ ID NO: 488234 - RNA, 25 nt, Human
caccucugggcuccaaagcugcacc

SEQ ID NO: 488235 - RNA, 20 nt, Human
cagaaaggaugcggguuggg

SEQ ID NO: 488236 - RNA, 21 nt, Human
cagaaucccgcaccucugggc

SEQ ID NO: 488237 - RNA, 24 nt, Human
cagauccugccaggacuaggggcc

SEQ ID NO: 488238 - RNA, 18 nt, Human
cagcaccuggacagcucc

SEQ ID NO: 488239 - RNA, 23 nt, Human
cagcauucucccccaggccagga

SEQ ID NO: 488240 - RNA, 22 nt, Human
cagccgccaagggaggguuggg

SEQ ID NO: 488241 - RNA, 21 nt, Human
cagccgcgccccgacggcagg

SEQ ID NO: 488242 - RNA, 20 nt, Human
cagccgcggggguacccggc

SEQ ID NO: 488243 - RNA, 22 nt, Human
cagccuucuuuccucuuaacuc

SEQ ID NO: 488244 - RNA, 21 nt, Human
cagcgcggccgccgggauguc

SEQ ID NO: 488245 - RNA, 25 nt, Human
ccacccccaucucccauucuaaccc

SEQ ID NO: 488246 - RNA, 21 nt, Human
ccacuugacacauaugaaccc

SEQ ID NO: 488247 - RNA, 23 nt, Human
ccagaggcucugccauucacugg

SEQ ID NO: 488248 - RNA, 19 nt, Human
ccccgacggggcacccgga

SEQ ID NO: 488249 - RNA, 22 nt, Human
ccccggggugcccgcccgcgcc

SEQ ID NO: 488250 - RNA, 22 nt, Human
ccccuagaggaggaggaaugga

SEQ ID NO: 488251 - RNA, 21 nt, Human
cccgcgcccccgucgccgcgu

SEQ ID NO: 488252 - RNA, 19 nt, Human
ccgacucugcaacgccacc

SEQ ID NO: 488253 - RNA, 22 nt, Human
ccgccgggaugucgcccccgac

SEQ ID NO: 488254 - RNA, 19 nt, Human
ccgcgcccccgucgccgcg

SEQ ID NO: 488255 - RNA, 21 nt, Human
ccgcgccccgacggcagggcg

SEQ ID NO: 488256 - RNA, 18 nt, Human
ccggcagauccugccagg

SEQ ID NO: 488257 - RNA, 18 nt, Human
ccuagcaaguccccccuc

SEQ ID NO: 488258 - RNA, 21 nt, Human
ccuccguccagccgccaaggg

SEQ ID NO: 488259 - RNA, 22 nt, Human
ccucugggcuccaaagcugcac

SEQ ID NO: 488260 - RNA, 19 nt, Human
ccuggacagcuccagaguc

SEQ ID NO: 488261 - RNA, 20 nt, Human
ccuggggccccggcgugugc

SEQ ID NO: 488262 - RNA, 21 nt, Human
cgacucugcaacgccaccccc

SEQ ID NO: 488263 - RNA, 18 nt, Human
cgcaccucugggcuccaa

SEQ ID NO: 488264 - RNA, 25 nt, Human
cgccgcccagccgcggggguacccg

SEQ ID NO: 488265 - RNA, 18 nt, Human
cgcgugcggaucaccagg

SEQ ID NO: 488266 - RNA, 21 nt, Human
cggggcuggggcccaggagca

SEQ ID NO: 488267 - RNA, 22 nt, Human
cuagcaaguccccccuccgucc

SEQ ID NO: 488268 - RNA, 22 nt, Human
cuccagcauucucccccaggcc

SEQ ID NO: 488269 - RNA, 21 nt, Human
gaacccuuuuuagccucacaa

SEQ ID NO: 488270 - RNA, 21 nt, Human
gacccgccccuucccgacucu

SEQ ID NO: 488271 - RNA, 22 nt, Human
gacccgccccuucccgacucug

SEQ ID NO: 488272 - RNA, 19 nt, Human
gacucugcaacgccacccc

SEQ ID NO: 488273 - RNA, 24 nt, Human
gagcuggucucuguacagcguccc

SEQ ID NO: 488274 - RNA, 20 nt, Human
gccuucuuuccucuuaacuc

SEQ ID NO: 488275 - RNA, 21 nt, Human
gcgggugagcagccgcgcccc

SEQ ID NO: 488276 - RNA, 23 nt, Human
ggagcauggacgagaggcaccag

SEQ ID NO: 488277 - RNA, 24 nt, Human
ggcaggaaaggggguccgcggggg

SEQ ID NO: 488278 - RNA, 18 nt, Human
ggccuucccuuuccauca

SEQ ID NO: 488279 - RNA, 18 nt, Human
ggcgugugcugggcgggu

SEQ ID NO: 488280 - RNA, 18 nt, Human
gggcaucucagcggcgug

SEQ ID NO: 488281 - RNA, 20 nt, Human
gggcccaggagcauggacga

SEQ ID NO: 488282 - RNA, 18 nt, Human
ggggcuggggcccaggag

SEQ ID NO: 488283 - RNA, 24 nt, Human
ggugggggcaucucagcggcgugg

SEQ ID NO: 488284 - RNA, 26 nt, Human
guuguccuggggccccggcgugugcu

SEQ ID NO: 488285 - RNA, 20 nt, Human
uaagugaacagccuucuuuc

SEQ ID NO: 488286 - RNA, 24 nt, Human
uagcauuuauugaacaccuacuau

SEQ ID NO: 488287 - RNA, 31 nt, Human
uagccucacaacucuucgagguagguucugg

SEQ ID NO: 488288 - RNA, 18 nt, Human
uaggggccuucccuuucc

SEQ ID NO: 488289 - RNA, 19 nt, Human
ucccuccagcauucucccc

SEQ ID NO: 488290 - RNA, 30 nt, Human
uccuggggccccggcgugugcugggcgggg

SEQ ID NO: 488291 - RNA, 22 nt, Human
ucucagcggcgugcucccucca

SEQ ID NO: 488292 - RNA, 20 nt, Human
ucucccccaggccaggauug

SEQ ID NO: 488293 - RNA, 21 nt, Human
ucugggguccuuuccccuucu

SEQ ID NO: 488294 - RNA, 20 nt, Human
ugaacgccgcccagccgcgg

SEQ ID NO: 488295 - RNA, 19 nt, Human
ugaagugacuugcccgagg

SEQ ID NO: 488296 - RNA, 24 nt, Human
ugaggaaacugaggaccagagaag

SEQ ID NO: 488297 - RNA, 20 nt, Human
ugaugggggaaaccuggggu

SEQ ID NO: 488298 - RNA, 22 nt, Human
ugcccgcccgcgcccccgucgc

SEQ ID NO: 488299 - RNA, 24 nt, Human
ugcucccuccagcauucuccccca

SEQ ID NO: 488300 - RNA, 21 nt, Human
uggaagaguccgcuccuagca

SEQ ID NO: 488301 - RNA, 22 nt, Human
ugggcuccaaagcugcaccccu

SEQ ID NO: 488302 - RNA, 22 nt, Human
uggggccccggcgugugcuggg

SEQ ID NO: 488303 - RNA, 21 nt, Human
ugggggaaaccuggggugggg

SEQ ID NO: 488304 - RNA, 25 nt, Human
ugggggaaaccuggggugggggcaa

SEQ ID NO: 488305 - RNA, 20 nt, Human
ugggggagggcaggaaaggg

SEQ ID NO: 488306 - RNA, 20 nt, Human
uggucagaaucccgcaccuc

SEQ ID NO: 488307 - RNA, 19 nt, Human
ugugcugggcgggugagca

SEQ ID NO: 488308 - RNA, 21 nt, Human
uuaguaagugaacagccuucu

SEQ ID NO: 488309 - RNA, 20 nt, Human
uucucugacgacugagcugg

SEQ ID NO: 488310 - RNA, 18 nt, Human
uugcccgaggccaggcag

SEQ ID NO: 488311 - RNA, 21 nt, Human
uugggggagggcaggaaaggg

SEQ ID NO: 488312 - RNA, 23 nt, Human
uuuaauaguaacaaaggcuagca

SEQ ID NO: 488313 - RNA, 23 nt, Human
uuuuuuuuuuuuuuuuuuaauag

SEQ ID NO: 488314 - RNA, 22 nt, Human
aaaaaaacaaaaagccagucac

SEQ ID NO: 488315 - RNA, 22 nt, Human
aaacccaggcccggacagagga

SEQ ID NO: 488316 - RNA, 19 nt, Human
aaggagaggaaucacagug

SEQ ID NO: 488317 - RNA, 27 nt, Human
acaaaaagccagucacagggacccaga

SEQ ID NO: 488318 - RNA, 19 nt, Human
acaacagaaaaaaacaaaa

SEQ ID NO: 488319 - RNA, 24 nt, Human
agaaggaagggagaugugggcagg

SEQ ID NO: 488320 - RNA, 24 nt, Human
agagacaaagauuccuggagagag

SEQ ID NO: 488321 - RNA, 18 nt, Human
agagacacacacaccgac

SEQ ID NO: 488322 - RNA, 18 nt, Human
agccagucacagggaccc

SEQ ID NO: 488323 - RNA, 23 nt, Human
agcuggaggccaguggagccagg

SEQ ID NO: 488324 - RNA, 20 nt, Human
aggaagacgcagggagacua

SEQ ID NO: 488325 - RNA, 21 nt, Human
aggaagggagaugugggcagg

SEQ ID NO: 488326 - RNA, 22 nt, Human
aggaagggagaugugggcagga

SEQ ID NO: 488327 - RNA, 20 nt, Human
aggaggagggaggugagagc

SEQ ID NO: 488328 - RNA, 22 nt, Human
aggccuggggccccugggcugc

SEQ ID NO: 488329 - RNA, 23 nt, Human
agggccagggccagggcaggaaa

SEQ ID NO: 488330 - RNA, 25 nt, Human
agucacagggacccagagagaagga

SEQ ID NO: 488331 - RNA, 23 nt, Human
auggacaacagaaaaaaacaaaa

SEQ ID NO: 488332 - RNA, 23 nt, Human
caacagaaaaaaacaaaaagcca

SEQ ID NO: 488333 - RNA, 23 nt, Human
caagacaaugcccagggcuggga

SEQ ID NO: 488334 - RNA, 20 nt, Human
cacaacauccccugcaggag

SEQ ID NO: 488335 - RNA, 21 nt, Human
cagacacagagcauguguaug

SEQ ID NO: 488336 - RNA, 20 nt, Human
cagcuggaggccaguggagc

SEQ ID NO: 488337 - RNA, 18 nt, Human
caggagacagacacagag

SEQ ID NO: 488338 - RNA, 25 nt, Human
cccagccgccucccccuuuccuuuc

SEQ ID NO: 488339 - RNA, 20 nt, Human
cccaggggaagcugacagcu

SEQ ID NO: 488340 - RNA, 19 nt, Human
ccccccccccgcggugggc

SEQ ID NO: 488341 - RNA, 18 nt, Human
ccccuuccucccucuuuc

SEQ ID NO: 488342 - RNA, 26 nt, Human
cccgccuggaccccguggggcucacu

SEQ ID NO: 488343 - RNA, 23 nt, Human
cccggacagaggagcgugucaca

SEQ ID NO: 488344 - RNA, 19 nt, Human
cccugggaggcaggcuggu

SEQ ID NO: 488345 - RNA, 18 nt, Human
cccuuccucccucuuucc

SEQ ID NO: 488346 - RNA, 18 nt, Human
ccgcugccccccccccgc

SEQ ID NO: 488347 - RNA, 22 nt, Human
ccucccucuuuccccuucccca

SEQ ID NO: 488348 - RNA, 23 nt, Human
ccucccucuuuccccuuccccag

SEQ ID NO: 488349 - RNA, 19 nt, Human
ccuggaccccguggggcuc

SEQ ID NO: 488350 - RNA, 25 nt, Human
ccugggaggcaggcugguucccucu

SEQ ID NO: 488351 - RNA, 22 nt, Human
cgcagggccagggccagggcag

SEQ ID NO: 488352 - RNA, 21 nt, Human
cgccuggaccccguggggcuc

SEQ ID NO: 488353 - RNA, 20 nt, Human
cuccccuuccucccucuuuc

SEQ ID NO: 488354 - RNA, 22 nt, Human
cugguucccucucucagcugga

SEQ ID NO: 488355 - RNA, 24 nt, Human
cuuccucccucuuuccccuucccc

SEQ ID NO: 488356 - RNA, 21 nt, Human
gacagggaggaggccuggggc

SEQ ID NO: 488357 - RNA, 23 nt, Human
gaggagggaggugagagcgaggg

SEQ ID NO: 488358 - RNA, 19 nt, Human
gaggccaguggagccagga

SEQ ID NO: 488359 - RNA, 20 nt, Human
gauggacaacagaaaaaaac

SEQ ID NO: 488360 - RNA, 19 nt, Human
gccccggggaagcaaggag

SEQ ID NO: 488361 - RNA, 18 nt, Human
gcccugggaggcaggcug

SEQ ID NO: 488362 - RNA, 20 nt, Human
gccugugcccgcugcccccc

SEQ ID NO: 488363 - RNA, 22 nt, Human
ggaaacccaggcccggacagag

SEQ ID NO: 488364 - RNA, 21 nt, Human
ggaagcaaggagggacacaag

SEQ ID NO: 488365 - RNA, 19 nt, Human
ggaggagggaggugagagc

SEQ ID NO: 488366 - RNA, 18 nt, Human
ggcacaacauccccugca

SEQ ID NO: 488367 - RNA, 18 nt, Human
ggcaggaaacccaggccc

SEQ ID NO: 488368 - RNA, 19 nt, Human
ggcaggaaacccaggcccg

SEQ ID NO: 488369 - RNA, 18 nt, Human
gggcagcaguggcuggaa

SEQ ID NO: 488370 - RNA, 21 nt, Human
gggcaggagacagacacagag

SEQ ID NO: 488371 - RNA, 23 nt, Human
gggcugggaugcccaggggaagc

SEQ ID NO: 488372 - RNA, 25 nt, Human
uagagauggaggccccuccccuucc

SEQ ID NO: 488373 - RNA, 18 nt, Human
uaugaaauuagagaugga

SEQ ID NO: 488374 - RNA, 22 nt, Human
uauuaugaaauuagagauggag

SEQ ID NO: 488375 - RNA, 26 nt, Human
ucagaacugcagagacaaaacgccac

SEQ ID NO: 488376 - RNA, 19 nt, Human
ucagcuggaggccagugga

SEQ ID NO: 488377 - RNA, 20 nt, Human
uccccagccgccucccccuu

SEQ ID NO: 488378 - RNA, 20 nt, Human
uccccugcaggagggugggc

SEQ ID NO: 488379 - RNA, 23 nt, Human
uccccuuccccagccgccucccc

SEQ ID NO: 488380 - RNA, 18 nt, Human
ucccucucucagcuggag

SEQ ID NO: 488381 - RNA, 23 nt, Human
ucucagcuggaggccaguggagc

SEQ ID NO: 488382 - RNA, 19 nt, Human
ucucucagcuggaggccag

SEQ ID NO: 488383 - RNA, 19 nt, Human
ugagagaucgcagggccag

SEQ ID NO: 488384 - RNA, 21 nt, Human
ugcccugggaggcaggcuggu

SEQ ID NO: 488385 - RNA, 21 nt, Human
uggaaguuucucuugauuuug

SEQ ID NO: 488386 - RNA, 24 nt, Human
uggacaacagaaaaaaacaaaaag

SEQ ID NO: 488387 - RNA, 18 nt, Human
uggcuggaaguuucucuu

SEQ ID NO: 488388 - RNA, 24 nt, Human
ugugagcuucagaacugcagagac

SEQ ID NO: 488389 - RNA, 23 nt, Human
uuccccagccgccucccccuuuc

SEQ ID NO: 488390 - RNA, 20 nt, Human
uucucuugauuuugggaugg

SEQ ID NO: 488391 - RNA, 21 nt, Human
uugauuuugggauggacaaca

SEQ ID NO: 488392 - RNA, 22 nt, Human
aaaauacuuuuauccugaauua

SEQ ID NO: 488393 - RNA, 22 nt, Human
aaauggaagcagaaucauaauc

SEQ ID NO: 488394 - RNA, 22 nt, Human
aaccagguaggaaaaggccaga

SEQ ID NO: 488395 - RNA, 24 nt, Human
aacuuacucauucaaaggcuccua

SEQ ID NO: 488396 - RNA, 22 nt, Human
aagcgucccauucagacauucc

SEQ ID NO: 488397 - RNA, 23 nt, Human
aaugaaagaggcaaguauaagga

SEQ ID NO: 488398 - RNA, 22 nt, Human
accugcuguucccaaguggcug

SEQ ID NO: 488399 - RNA, 24 nt, Human
accugcuguucccaaguggcuggg

SEQ ID NO: 488400 - RNA, 23 nt, Human
acucuauaccauuauauguugcc

SEQ ID NO: 488401 - RNA, 22 nt, Human
agaacagaggacacagcagcug

SEQ ID NO: 488402 - RNA, 23 nt, Human
agaggacacagcagcugggaagg

SEQ ID NO: 488403 - RNA, 25 nt, Human
aggaaaaggccagaucuccuuaaaa

SEQ ID NO: 488404 - RNA, 20 nt, Human
aggaucuuguucuguucaug

SEQ ID NO: 488405 - RNA, 19 nt, Human
aggcugccaguggaagcua

SEQ ID NO: 488406 - RNA, 21 nt, Human
aggguggggggaaagagggau

SEQ ID NO: 488407 - RNA, 20 nt, Human
auaaagcuuucagcauaauc

SEQ ID NO: 488408 - RNA, 18 nt, Human
caguagaugcuacauaac

SEQ ID NO: 488409 - RNA, 18 nt, Human
caugaacuggcaaggcca

SEQ ID NO: 488410 - RNA, 26 nt, Human
cauucaagcgucccauucagacauuc

SEQ ID NO: 488411 - RNA, 20 nt, Human
ccaaagcagaggaagacuga

SEQ ID NO: 488412 - RNA, 18 nt, Human
cccaaagcagaggaagac

SEQ ID NO: 488413 - RNA, 18 nt, Human
ccucugagucaugcuagg

SEQ ID NO: 488414 - RNA, 23 nt, Human
ccugcuguucccaaguggcuggg

SEQ ID NO: 488415 - RNA, 23 nt, Human
cucggaaguagaagguagaacag

SEQ ID NO: 488416 - RNA, 22 nt, Human
gaaaaugcccuagacuguccuc

SEQ ID NO: 488417 - RNA, 18 nt, Human
gggaaaagaagagcaaag

SEQ ID NO: 488418 - RNA, 21 nt, Human
guaccaauacaaagaaaugaa

SEQ ID NO: 488419 - RNA, 18 nt, Human
uaaaguuuuaaaaugaga

SEQ ID NO: 488420 - RNA, 18 nt, Human
uaagaauaacacaauuaa

SEQ ID NO: 488421 - RNA, 20 nt, Human
uaagaauaacacaauuaaau

SEQ ID NO: 488422 - RNA, 21 nt, Human
uaauaguguguccucauccua

SEQ ID NO: 488423 - RNA, 21 nt, Human
uaccaauacaaagaaaugaaa

SEQ ID NO: 488424 - RNA, 22 nt, Human
uacucagacuagaaaacugacu

SEQ ID NO: 488425 - RNA, 24 nt, Human
uauuauaugucaauuauuuaaaau

SEQ ID NO: 488426 - RNA, 23 nt, Human
ucaaaaagaaggagaaaguuuua

SEQ ID NO: 488427 - RNA, 18 nt, Human
ucaauucuccaaaauaga

SEQ ID NO: 488428 - RNA, 19 nt, Human
uccaaaauagacuuuuuuu

SEQ ID NO: 488429 - RNA, 18 nt, Human
ucccaaagcagaggaaga

SEQ ID NO: 488430 - RNA, 27 nt, Human
ucccaaguggcuggguaaucuaugggu

SEQ ID NO: 488431 - RNA, 20 nt, Human
ucccuuccaugaauuauuuc

SEQ ID NO: 488432 - RNA, 20 nt, Human
ucuguucauguauaacucag

SEQ ID NO: 488433 - RNA, 23 nt, Human
ugaaagaggcaaguauaaggagg

SEQ ID NO: 488434 - RNA, 25 nt, Human
ugaacagggaccaauacuguaauga

SEQ ID NO: 488435 - RNA, 19 nt, Human
ugagguaaccagguaggaa

SEQ ID NO: 488436 - RNA, 18 nt, Human
ugcccuagacuguccucu

SEQ ID NO: 488437 - RNA, 21 nt, Human
uggcuguagacuuuuagauau

SEQ ID NO: 488438 - RNA, 21 nt, Human
uguucuguucauguauaacuc

SEQ ID NO: 488439 - RNA, 18 nt, Human
uuaaaguguccaaauagc

SEQ ID NO: 488440 - RNA, 24 nt, Human
uuaacaauaauacauaguuuuaga

SEQ ID NO: 488441 - RNA, 20 nt, Human
uuaaucaauaauacuaucug

SEQ ID NO: 488442 - RNA, 20 nt, Human
uuauaaagcuuucagcauaa

SEQ ID NO: 488443 - RNA, 21 nt, Human
uucuacacauucaagcguccc

SEQ ID NO: 488444 - RNA, 22 nt, Human
uugaaacaugacuauguacccc

SEQ ID NO: 488445 - RNA, 22 nt, Human
uuuuucuucuuuuucagcuucc

SEQ ID NO: 488446 - RNA, 23 nt, Human
aaaaggcacaaaaagccuuuuac

SEQ ID NO: 488447 - RNA, 24 nt, Human
acuaguuuauuucauaaaaauaca

SEQ ID NO: 488448 - RNA, 18 nt, Human
agccuuuuacuuauuuuu

SEQ ID NO: 488449 - RNA, 20 nt, Human
aggcaaagagggugaacugg

SEQ ID NO: 488450 - RNA, 18 nt, Human
ccguuguugcuucugucu

SEQ ID NO: 488451 - RNA, 22 nt, Human
ccuuccgagauuguuaggcaaa

SEQ ID NO: 488452 - RNA, 31 nt, Human
cuaguuuauuucauaaaaauacaaaaauauu

SEQ ID NO: 488453 - RNA, 19 nt, Human
gaaaaggcacaaaaagccu

SEQ ID NO: 488454 - RNA, 24 nt, Human
uaaauuauuauaccuaagaaaagg

SEQ ID NO: 488455 - RNA, 20 nt, Human
uaacauagacaguacuuccc

SEQ ID NO: 488456 - RNA, 22 nt, Human
uauggcaguaauagucauuccu

SEQ ID NO: 488457 - RNA, 24 nt, Human
uauggcaguaauagucauuccuau

SEQ ID NO: 488458 - RNA, 23 nt, Human
uauucauucacaaagacuuacug

SEQ ID NO: 488459 - RNA, 23 nt, Human
ucaauuuuugaaagauuuccucc

SEQ ID NO: 488460 - RNA, 22 nt, Human
ucugcaacuucaguggguuguc

SEQ ID NO: 488461 - RNA, 22 nt, Human
ugaaugaauuaacacaaagaca

SEQ ID NO: 488462 - RNA, 19 nt, Human
ugaauuaacacaaagacau

SEQ ID NO: 488463 - RNA, 20 nt, Human
ugaauuaacacaaagacauu

SEQ ID NO: 488464 - RNA, 20 nt, Human
ugaugugauauauuuuccuu

SEQ ID NO: 488465 - RNA, 18 nt, Human
ugucucgguccuucucuu

SEQ ID NO: 488466 - RNA, 20 nt, Human
ugugauauauuuuccuuccg

SEQ ID NO: 488467 - RNA, 19 nt, Human
uuaaaaaucuguaucauuc

SEQ ID NO: 488468 - RNA, 18 nt, Human
uuccguuguugcuucugu

SEQ ID NO: 488469 - RNA, 22 nt, Human
uuguuuguaacuucaauuuuug

SEQ ID NO: 488470 - RNA, 18 nt, Human
aaagcacccagacggacg

SEQ ID NO: 488471 - RNA, 21 nt, Human
aacccaggcccugagccaaga

SEQ ID NO: 488472 - RNA, 24 nt, Human
aagcgucccuagcaucucggaccc

SEQ ID NO: 488473 - RNA, 20 nt, Human
accaccucccucacucaagc

SEQ ID NO: 488474 - RNA, 21 nt, Human
accccaggagcaccgccugga

SEQ ID NO: 488475 - RNA, 23 nt, Human
acccccaucccagcagguagaac

SEQ ID NO: 488476 - RNA, 20 nt, Human
accccgccgccccaaccugg

SEQ ID NO: 488477 - RNA, 23 nt, Human
acggacguccuucccuaagcucc

SEQ ID NO: 488478 - RNA, 23 nt, Human
agagaagagaacaagaaaagucu

SEQ ID NO: 488479 - RNA, 19 nt, Human
agccaggacccggggcucc

SEQ ID NO: 488480 - RNA, 22 nt, Human
aggagggccucucugugagguc

SEQ ID NO: 488481 - RNA, 19 nt, Human
aggcaggacagaggagccg

SEQ ID NO: 488482 - RNA, 21 nt, Human
caagcgucccuagcaucucuu

SEQ ID NO: 488483 - RNA, 18 nt, Human
caccaaagagaggcugac

SEQ ID NO: 488484 - RNA, 23 nt, Human
caccaaagagaggcugaccccca

SEQ ID NO: 488485 - RNA, 18 nt, Human
caccacaugagcaugggu

SEQ ID NO: 488486 - RNA, 22 nt, Human
caccaccucccucacucaagga

SEQ ID NO: 488487 - RNA, 21 nt, Human
caccaccugcgcccuggaccc

SEQ ID NO: 488488 - RNA, 24 nt, Human
caccaccugcgcccuggaccccgc

SEQ ID NO: 488489 - RNA, 22 nt, Human
caccccaggagcaccgccugga

SEQ ID NO: 488490 - RNA, 18 nt, Human
caggugggcagccaggac

SEQ ID NO: 488491 - RNA, 22 nt, Human
ccaccugcgcccuggaccccgc

SEQ ID NO: 488492 - RNA, 24 nt, Human
ccccagaugcugaagcccgcagcc

SEQ ID NO: 488493 - RNA, 18 nt, Human
ccccgccgccccaaccug

SEQ ID NO: 488494 - RNA, 23 nt, Human
cccgcaggcgcuccgggccucca

SEQ ID NO: 488495 - RNA, 22 nt, Human
cccgccgccccaaccuggcccc

SEQ ID NO: 488496 - RNA, 19 nt, Human
cccuaagcucccucaaccc

SEQ ID NO: 488497 - RNA, 26 nt, Human
cccuaagcucccucaacccaggcccu

SEQ ID NO: 488498 - RNA, 23 nt, Human
ccgccccaaccuggccccagaug

SEQ ID NO: 488499 - RNA, 18 nt, Human
ccgccgccccaaccuggc

SEQ ID NO: 488500 - RNA, 23 nt, Human
ccgccgccccaaccuggccccag

SEQ ID NO: 488501 - RNA, 21 nt, Human
ccggccccgaggugcgcggga

SEQ ID NO: 488502 - RNA, 23 nt, Human
ccggcccggcgcaucggccgcac

SEQ ID NO: 488503 - RNA, 23 nt, Human
ccuacccgcaaccucccucgccu

SEQ ID NO: 488504 - RNA, 21 nt, Human
ccucaacccaggcccugagcc

SEQ ID NO: 488505 - RNA, 19 nt, Human
ccuccuagcaggggguggg

SEQ ID NO: 488506 - RNA, 21 nt, Human
ccuggaccccgccgccccaac

SEQ ID NO: 488507 - RNA, 23 nt, Human
ccuggccccagaugcugaagccc

SEQ ID NO: 488508 - RNA, 24 nt, Human
ccuuccuacccgcaaccucccucg

SEQ ID NO: 488509 - RNA, 20 nt, Human
cgcaggcgcuccgggccucc

SEQ ID NO: 488510 - RNA, 20 nt, Human
cgccgcugcuccagcugcgc

SEQ ID NO: 488511 - RNA, 24 nt, Human
cgcggccucagccuccggcccggc

SEQ ID NO: 488512 - RNA, 18 nt, Human
cgcgggacgcagggggcg

SEQ ID NO: 488513 - RNA, 23 nt, Human
cgcguauccucccugauuugagg

SEQ ID NO: 488514 - RNA, 20 nt, Human
cgggccuccagcugcggucg

SEQ ID NO: 488515 - RNA, 26 nt, Human
cucaacccaggcccugagccgguucc

SEQ ID NO: 488516 - RNA, 23 nt, Human
cugcgcguggcuuccgggaaccu

SEQ ID NO: 488517 - RNA, 20 nt, Human
gagcaccgccuggauggagg

SEQ ID NO: 488518 - RNA, 20 nt, Human
gagcauggguggcaggaggg

SEQ ID NO: 488519 - RNA, 18 nt, Human
gcccuuccuacccgcaac

SEQ ID NO: 488520 - RNA, 20 nt, Human
gcgcgcgcaguccgcccuuc

SEQ ID NO: 488521 - RNA, 23 nt, Human
gcuucuucccuccugggcauggu

SEQ ID NO: 488522 - RNA, 18 nt, Human
ggaaggcuguggauggcu

SEQ ID NO: 488523 - RNA, 23 nt, Human
ggaaggcuguggauggcuucuuc

SEQ ID NO: 488524 - RNA, 18 nt, Human
ggacccggggcuccagcg

SEQ ID NO: 488525 - RNA, 24 nt, Human
ggagaagccagccagcaaacugga

SEQ ID NO: 488526 - RNA, 23 nt, Human
ggagcaccgccuggauggagggg

SEQ ID NO: 488527 - RNA, 21 nt, Human
ggauggcuucuucccuccugg

SEQ ID NO: 488528 - RNA, 18 nt, Human
ggcaggugggcagccagg

SEQ ID NO: 488529 - RNA, 24 nt, Human
ggcuucuucccuccugggcauggu

SEQ ID NO: 488530 - RNA, 19 nt, Human
gggagcauggaccggcccc

SEQ ID NO: 488531 - RNA, 18 nt, Human
gggagcuguguggcacag

SEQ ID NO: 488532 - RNA, 18 nt, Human
gguagacggagaagccag

SEQ ID NO: 488533 - RNA, 21 nt, Human
ggugggcagccaggacccggg

SEQ ID NO: 488534 - RNA, 21 nt, Human
guccuucccuaagcucccuca

SEQ ID NO: 488535 - RNA, 21 nt, Human
uaagcagcuacuauaugccaa

SEQ ID NO: 488536 - RNA, 21 nt, Human
uagaacaacacaugaggaagg

SEQ ID NO: 488537 - RNA, 20 nt, Human
ucagccuccggcccggcgca

SEQ ID NO: 488538 - RNA, 20 nt, Human
ucagccuccggcccggcgca

SEQ ID NO: 488539 - RNA, 26 nt, Human
ucccagccccgcagcgcggccucagc

SEQ ID NO: 488540 - RNA, 21 nt, Human
ucccggcaccccaggagcacc

SEQ ID NO: 488541 - RNA, 18 nt, Human
ucccuaagcucccucaac

SEQ ID NO: 488542 - RNA, 23 nt, Human
ucccucacucaagcgucccuagc

SEQ ID NO: 488543 - RNA, 19 nt, Human
ugaaaggaaaccaagucaa

SEQ ID NO: 488544 - RNA, 25 nt, Human
ugaaaggaaaccaagucaaauagug

SEQ ID NO: 488545 - RNA, 23 nt, Human
ugacgucaccaaagagaggcuga

SEQ ID NO: 488546 - RNA, 22 nt, Human
ugagcaggcagggugugacacu

SEQ ID NO: 488547 - RNA, 18 nt, Human
ugccagccccgcaggcgc

SEQ ID NO: 488548 - RNA, 25 nt, Human
ugcccggucccggcaccccaggagc

SEQ ID NO: 488549 - RNA, 25 nt, Human
ugcgcgggacgcagggggcgcgcgc

SEQ ID NO: 488550 - RNA, 18 nt, Human
ugcugaagcccgcagccg

SEQ ID NO: 488551 - RNA, 21 nt, Human
uggaggaaaagcacccagacg

SEQ ID NO: 488552 - RNA, 21 nt, Human
uggcaggagggccucucugug

SEQ ID NO: 488553 - RNA, 19 nt, Human
uggcuuccgggaaccuccu

SEQ ID NO: 488554 - RNA, 20 nt, Human
ugggaccuccuagcaggggg

SEQ ID NO: 488555 - RNA, 21 nt, Human
ugggcagccaggacccggggc

SEQ ID NO: 488556 - RNA, 25 nt, Human
uguggauggcuucuucccuucaaag

SEQ ID NO: 488557 - RNA, 26 nt, Human
uguggauggcuucuucccuucaaagg

SEQ ID NO: 488558 - RNA, 22 nt, Human
uguggguagacggagaagccag

SEQ ID NO: 488559 - RNA, 22 nt, Human
uugcucuggcugggggcggagg

SEQ ID NO: 488560 - RNA, 20 nt, Human
accgagcccgcgaaaauucu

SEQ ID NO: 488561 - RNA, 22 nt, Human
cccccugcgcccagccugccgg

SEQ ID NO: 488562 - RNA, 23 nt, Human
cccccugcgcccagccugccggc

SEQ ID NO: 488563 - RNA, 21 nt, Human
ccccugcgcccagccugccgg

SEQ ID NO: 488564 - RNA, 21 nt, Human
cccugcgcccagccugccggc

SEQ ID NO: 488565 - RNA, 20 nt, Human
ccgggcgggggcucgccccc

SEQ ID NO: 488566 - RNA, 21 nt, Human
ccgggcgggggcucgcccccu

SEQ ID NO: 488567 - RNA, 20 nt, Human
cgagcccgcgaaaauucuga

SEQ ID NO: 488568 - RNA, 21 nt, Human
cugcgcgccgggcgggggcuc

SEQ ID NO: 488569 - RNA, 19 nt, Human
ucaccgagcccgcgaaaau

SEQ ID NO: 488570 - RNA, 20 nt, Human
ugcugcugcgcgccgggcgg

SEQ ID NO: 488571 - RNA, 21 nt, Human
uguacacaaaacugauuuaau

SEQ ID NO: 488572 - RNA, 19 nt, Human
aaacagcccacagucuccc

SEQ ID NO: 488573 - RNA, 21 nt, Human
aagcuguucacauagcagcuu

SEQ ID NO: 488574 - RNA, 22 nt, Human
acauaaaguugcuucgccccuu

SEQ ID NO: 488575 - RNA, 19 nt, Human
caaugucuccccuuccugu

SEQ ID NO: 488576 - RNA, 19 nt, Human
cacauccucagcgacagcc

SEQ ID NO: 488577 - RNA, 18 nt, Human
caccccagagaccucugc

SEQ ID NO: 488578 - RNA, 26 nt, Human
cagcaacagugcccggggucccgcag

SEQ ID NO: 488579 - RNA, 22 nt, Human
cagcgacagccaagacacagag

SEQ ID NO: 488580 - RNA, 18 nt, Human
cagcuuaucuccaccuuc

SEQ ID NO: 488581 - RNA, 24 nt, Human
cccacagucucccgcagcagcaac

SEQ ID NO: 488582 - RNA, 18 nt, Human
ccccagagaccucugcac

SEQ ID NO: 488583 - RNA, 23 nt, Human
ccccagagaccucugcacuugga

SEQ ID NO: 488584 - RNA, 22 nt, Human
ccucaguggcaggcaaugucuc

SEQ ID NO: 488585 - RNA, 24 nt, Human
ccugcacauccucagcgacagcca

SEQ ID NO: 488586 - RNA, 22 nt, Human
cgccccuugcagcuuaucucca

SEQ ID NO: 488587 - RNA, 23 nt, Human
gcagcagcaacagugcccggggu

SEQ ID NO: 488588 - RNA, 21 nt, Human
gccaagacacagaggccaaug

SEQ ID NO: 488589 - RNA, 24 nt, Human
gccaaugguccccaccccagagac

SEQ ID NO: 488590 - RNA, 19 nt, Human
ggaggauugcccaagucag

SEQ ID NO: 488591 - RNA, 18 nt, Human
ggcaagucggauccccuc

SEQ ID NO: 488592 - RNA, 19 nt, Human
uagcagcuuuaaagagaca

SEQ ID NO: 488593 - RNA, 22 nt, Human
ucaguggcaggcaaugucuccc

SEQ ID NO: 488594 - RNA, 24 nt, Human
ucaguggcaggcaaugucuccccu

SEQ ID NO: 488595 - RNA, 22 nt, Human
ucccgcagcagcaacagugccc

SEQ ID NO: 488596 - RNA, 21 nt, Human
ugacauaaaguugcuucgccc

SEQ ID NO: 488597 - RNA, 18 nt, Human
ugcccugcacauccucag

SEQ ID NO: 488598 - RNA, 24 nt, Human
ugcuucgccccuugcagcuuaucu

SEQ ID NO: 488599 - RNA, 18 nt, Human
uguucacauagcagcuuu

SEQ ID NO: 488600 - RNA, 26 nt, Human
aaccccucuaauccaacccucaucgg

SEQ ID NO: 488601 - RNA, 21 nt, Human
aagaucaccaucaggugccgc

SEQ ID NO: 488602 - RNA, 18 nt, Human
aaggccccaaaacaacag

SEQ ID NO: 488603 - RNA, 18 nt, Human
acaugacacaccaagcac

SEQ ID NO: 488604 - RNA, 22 nt, Human
accaccuacaaaugggcaacau

SEQ ID NO: 488605 - RNA, 22 nt, Human
acucugccauuucaggcugcag

SEQ ID NO: 488606 - RNA, 19 nt, Human
agcaccagacucugccauu

SEQ ID NO: 488607 - RNA, 21 nt, Human
aggcugcagugccuucugucc

SEQ ID NO: 488608 - RNA, 22 nt, Human
auccacaugacacaccaagcac

SEQ ID NO: 488609 - RNA, 18 nt, Human
caccacagcuucuuguag

SEQ ID NO: 488610 - RNA, 22 nt, Human
cacgugcugaugguccuccauc

SEQ ID NO: 488611 - RNA, 19 nt, Human
cacucccgcuaaccaagag

SEQ ID NO: 488612 - RNA, 19 nt, Human
cagcacacucccgcuaacc

SEQ ID NO: 488613 - RNA, 20 nt, Human
cagcacuccacucagggaaa

SEQ ID NO: 488614 - RNA, 25 nt, Human
cagcuucccagccccacuuguuccc

SEQ ID NO: 488615 - RNA, 21 nt, Human
caucuucaucccaaaagcgga

SEQ ID NO: 488616 - RNA, 26 nt, Human
ccaacccaaacacaguuaguccugua

SEQ ID NO: 488617 - RNA, 21 nt, Human
ccacaugacacaccaagcaca

SEQ ID NO: 488618 - RNA, 19 nt, Human
ccaucuuuccuccacuucc

SEQ ID NO: 488619 - RNA, 18 nt, Human
ccccagcacuccacucag

SEQ ID NO: 488620 - RNA, 20 nt, Human
cccgcuaaccaagaggugag

SEQ ID NO: 488621 - RNA, 23 nt, Human
ccuacaaaugggcaacaucuaca

SEQ ID NO: 488622 - RNA, 23 nt, Human
ccuggaccuccuccuucccccag

SEQ ID NO: 488623 - RNA, 21 nt, Human
ccuggauggcagcauugaucu

SEQ ID NO: 488624 - RNA, 19 nt, Human
ccuuguguagaaugggggu

SEQ ID NO: 488625 - RNA, 23 nt, Human
cuauacuaacuagaaggagaauc

SEQ ID NO: 488626 - RNA, 19 nt, Human
cuccacucagggaaaauca

SEQ ID NO: 488627 - RNA, 22 nt, Human
cucccaggaaaacccgugccuc

SEQ ID NO: 488628 - RNA, 21 nt, Human
cugaugguccuccaucuuucc

SEQ ID NO: 488629 - RNA, 24 nt, Human
cugcagugccuucuguccaccagc

SEQ ID NO: 488630 - RNA, 20 nt, Human
cugugccuccuauaagccug

SEQ ID NO: 488631 - RNA, 23 nt, Human
gaaaggccccaaaacaacagccc

SEQ ID NO: 488632 - RNA, 22 nt, Human
gaccuccuccuucccccagcac

SEQ ID NO: 488633 - RNA, 22 nt, Human
gaugcaagagagaauccacaug

SEQ ID NO: 488634 - RNA, 29 nt, Human
gccaaucaccacagcuucuuguagagaac

SEQ ID NO: 488635 - RNA, 19 nt, Human
ggauggcagcauugaucuu

SEQ ID NO: 488636 - RNA, 22 nt, Human
gggaaaaucaauuccaucaaaa

SEQ ID NO: 488637 - RNA, 20 nt, Human
gggggugggggugggggcag

SEQ ID NO: 488638 - RNA, 18 nt, Human
ggggugcggggguggggg

SEQ ID NO: 488639 - RNA, 18 nt, Human
gggugggggugggggcaa

SEQ ID NO: 488640 - RNA, 24 nt, Human
gggugggggugggggcagcacacu

SEQ ID NO: 488641 - RNA, 23 nt, Human
gugccuccuauaagccugguauc

SEQ ID NO: 488642 - RNA, 19 nt, Human
uagaaggagaaucuguggu

SEQ ID NO: 488643 - RNA, 23 nt, Human
uaggacccagacagcagcugggc

SEQ ID NO: 488644 - RNA, 18 nt, Human
uaucaucuucaucccaaa

SEQ ID NO: 488645 - RNA, 18 nt, Human
uaucaugaagaugcaaga

SEQ ID NO: 488646 - RNA, 21 nt, Human
ucaucccaaaagcggagaaga

SEQ ID NO: 488647 - RNA, 19 nt, Human
uccacaugacacaccaagc

SEQ ID NO: 488648 - RNA, 23 nt, Human
uccacaugacacaccaagcacaa

SEQ ID NO: 488649 - RNA, 22 nt, Human
ucccagcuguggagccuaagac

SEQ ID NO: 488650 - RNA, 21 nt, Human
ucggccaaaaauauucuucgu

SEQ ID NO: 488651 - RNA, 21 nt, Human
ucucagaacucugagaguggg

SEQ ID NO: 488652 - RNA, 22 nt, Human
ucuccugccaauccuucauccg

SEQ ID NO: 488653 - RNA, 20 nt, Human
ucugccauuucaggcugcag

SEQ ID NO: 488654 - RNA, 23 nt, Human
ucuguccaccagccaaucgagca

SEQ ID NO: 488655 - RNA, 24 nt, Human
ugccgcuuccuuccuguggcuuuc

SEQ ID NO: 488656 - RNA, 24 nt, Human
ugccuugaaaggccccaaaacaac

SEQ ID NO: 488657 - RNA, 22 nt, Human
ugccuuugagaagguccaggau

SEQ ID NO: 488658 - RNA, 21 nt, Human
ugcgggggugggggugggggc

SEQ ID NO: 488659 - RNA, 18 nt, Human
ugggcaacaucuacacuc

SEQ ID NO: 488660 - RNA, 22 nt, Human
ugggcaacaucuacacuccagu

SEQ ID NO: 488661 - RNA, 22 nt, Human
ugggggugcgggggugggggug

SEQ ID NO: 488662 - RNA, 22 nt, Human
ugggggugggggcagcacacuc

SEQ ID NO: 488663 - RNA, 24 nt, Human
ugugguggugaagagcacgaaguc

SEQ ID NO: 488664 - RNA, 22 nt, Human
uguguagaaugggggugcgggg

SEQ ID NO: 488665 - RNA, 27 nt, Human
uuaccaccuacaaaugggcaacaucua

SEQ ID NO: 488666 - RNA, 20 nt, Human
uuccagucagccuggucuuu

SEQ ID NO: 488667 - RNA, 23 nt, Human
uuccagucagccuggucuuuugc

SEQ ID NO: 488668 - RNA, 19 nt, Human
uucccccagcacuccacuc

SEQ ID NO: 488669 - RNA, 19 nt, Human
uuccuccacuuccgcuuca

SEQ ID NO: 488670 - RNA, 20 nt, Human
uucguggaggccucugugcc

SEQ ID NO: 488671 - RNA, 23 nt, Human
uuuccaucuuccagucagccugg

SEQ ID NO: 488672 - RNA, 20 nt, Human
uuucgccugguagaccacag

SEQ ID NO: 488673 - RNA, 18 nt, Human
uuuuuuuuuuuuuuuuug

SEQ ID NO: 488674 - RNA, 25 nt, Human
uuuuuuuuuuuuuuuuuuuguuuuu

SEQ ID NO: 488675 - RNA, 23 nt, Human
gauuccuuuuuuaaaaucaucuc

SEQ ID NO: 488676 - RNA, 18 nt, Human
uucaaagcaucuauugaa

SEQ ID NO: 488677 - RNA, 20 nt, Human
acuuggaaacaaauuugagg

SEQ ID NO: 488678 - RNA, 19 nt, Human
aggcagggaggcagguggg

SEQ ID NO: 488679 - RNA, 21 nt, Human
aggcagggaggcaggugggcc

SEQ ID NO: 488680 - RNA, 23 nt, Human
agggaggcaggugggccucgguc

SEQ ID NO: 488681 - RNA, 24 nt, Human
agggaggcaggugggccucggucc

SEQ ID NO: 488682 - RNA, 23 nt, Human
aucauccaguucagaaccaaaau

SEQ ID NO: 488683 - RNA, 19 nt, Human
cacggcaggcaccaacacc

SEQ ID NO: 488684 - RNA, 23 nt, Human
cagaaugcguucacggcaggcac

SEQ ID NO: 488685 - RNA, 19 nt, Human
cagggcgaagcaggcaggg

SEQ ID NO: 488686 - RNA, 24 nt, Human
cauagaaagacccaaagguuuuca

SEQ ID NO: 488687 - RNA, 18 nt, Human
ccaaagguuuucaacuug

SEQ ID NO: 488688 - RNA, 23 nt, Human
ccagcgcuguugugauuucuucu

SEQ ID NO: 488689 - RNA, 20 nt, Human
ccucacucuguccccaacca

SEQ ID NO: 488690 - RNA, 21 nt, Human
gaggaccacgggccgcaugcu

SEQ ID NO: 488691 - RNA, 20 nt, Human
gcaacgaccucacucugucc

SEQ ID NO: 488692 - RNA, 20 nt, Human
uccagggcgaagcaggcagg

SEQ ID NO: 488693 - RNA, 23 nt, Human
ugccuagcaaacuagcaauucca

SEQ ID NO: 488694 - RNA, 20 nt, Human
ugggccucgguccgccgcaa

SEQ ID NO: 488695 - RNA, 27 nt, Human
uuuuuuuuuguuuuuuuuuuuuuuuuu

SEQ ID NO: 488696 - RNA, 18 nt, Human
uuuuuuuuuuuuuucuug

SEQ ID NO: 488697 - RNA, 20 nt, Human
uuuuuuuuuuuuuucuugcu

SEQ ID NO: 488698 - RNA, 18 nt, Human
uuuuuuuuuuuuuuuuug

SEQ ID NO: 488699 - RNA, 24 nt, Human
uuuuuuuuuuuuuuuuuucuugcu

SEQ ID NO: 488700 - RNA, 25 nt, Human
uuuuuuuuuuuuuuuuuuguuuuuu

SEQ ID NO: 488701 - RNA, 27 nt, Human
uuuuuuuuuuuuuuuuuuuuuuucuuu

SEQ ID NO: 488702 - RNA, 21 nt, Human
aauuucaauauauuuucuuca

SEQ ID NO: 488703 - RNA, 18 nt, Human
gaaauaccauuauacagg

SEQ ID NO: 488704 - RNA, 19 nt, Human
uagguuucuucucuguuac

SEQ ID NO: 488705 - RNA, 21 nt, Human
uagguuucuucucuguuacag

SEQ ID NO: 488706 - RNA, 24 nt, Human
agaaaacauuuaaggcauaaauaa

SEQ ID NO: 488707 - RNA, 21 nt, Human
aggaaggaauggggaagaaaa

SEQ ID NO: 488708 - RNA, 20 nt, Human
cgagggggaggaaggaaugg

SEQ ID NO: 488709 - RNA, 18 nt, Human
cuucacacaguucgcucc

SEQ ID NO: 488710 - RNA, 22 nt, Human
gggaagaaaacauuuaaggcau

SEQ ID NO: 488711 - RNA, 18 nt, Human
uacuaugcaaaacaaggu

SEQ ID NO: 488712 - RNA, 23 nt, Human
uaugacauuacuacuacaaaaaa

SEQ ID NO: 488713 - RNA, 19 nt, Human
ucacacaguucgcucccag

SEQ ID NO: 488714 - RNA, 18 nt, Human
uccuaccgagggggagga

SEQ ID NO: 488715 - RNA, 22 nt, Human
uggaacaugacugguuguuugc

SEQ ID NO: 488716 - RNA, 22 nt, Human
ugugcaguuaccggcuugaagu

SEQ ID NO: 488717 - RNA, 19 nt, Human
uucacacaguucgcuccca

SEQ ID NO: 488718 - RNA, 19 nt, Human
aaagugcugggguuacagg

SEQ ID NO: 488719 - RNA, 24 nt, Human
aaagugcugggguuacaggcguga

SEQ ID NO: 488720 - RNA, 19 nt, Human
aaggacagaggugcccaca

SEQ ID NO: 488721 - RNA, 19 nt, Human
aagugcugggguuacaggc

SEQ ID NO: 488722 - RNA, 26 nt, Human
aagugcugggguuacaggcgugagcc

SEQ ID NO: 488723 - RNA, 22 nt, Human
acaggugcccaccaccacaccc

SEQ ID NO: 488724 - RNA, 23 nt, Human
acaggugcccaccaccacacccg

SEQ ID NO: 488725 - RNA, 24 nt, Human
accucgugaucugcccaccuuggc

SEQ ID NO: 488726 - RNA, 18 nt, Human
acugcaagcugugccucc

SEQ ID NO: 488727 - RNA, 22 nt, Human
agacccucgggcugugcagccu

SEQ ID NO: 488728 - RNA, 24 nt, Human
agcaaggacagaggugcccacaga

SEQ ID NO: 488729 - RNA, 19 nt, Human
agccaccacacccacccca

SEQ ID NO: 488730 - RNA, 20 nt, Human
aggugugggcagaggccagu

SEQ ID NO: 488731 - RNA, 22 nt, Human
augaaggcccugugaugacaug

SEQ ID NO: 488732 - RNA, 18 nt, Human
augggguuucaccauguu

SEQ ID NO: 488733 - RNA, 20 nt, Human
augggguuucaccauguucg

SEQ ID NO: 488734 - RNA, 24 nt, Human
augggguuucaccauguucgccag

SEQ ID NO: 488735 - RNA, 18 nt, Human
auguucgccaggaugguc

SEQ ID NO: 488736 - RNA, 24 nt, Human
caaagugcugggguuacaggcgug

SEQ ID NO: 488737 - RNA, 22 nt, Human
caauucaggaucaccucuccag

SEQ ID NO: 488738 - RNA, 22 nt, Human
cacaccauucuccugccucagc

SEQ ID NO: 488739 - RNA, 20 nt, Human
cacagagcccccuucacccc

SEQ ID NO: 488740 - RNA, 25 nt, Human
cacaucugccucuggcccucagggg

SEQ ID NO: 488741 - RNA, 18 nt, Human
caccauguucgccaggau

SEQ ID NO: 488742 - RNA, 24 nt, Human
caccauguucgccaggauggucuc

SEQ ID NO: 488743 - RNA, 24 nt, Human
cacccaggcuggagugcgugcagu

SEQ ID NO: 488744 - RNA, 27 nt, Human
cacccccagccacacucccgauggccc

SEQ ID NO: 488745 - RNA, 20 nt, Human
cacccccagccacacucccu

SEQ ID NO: 488746 - RNA, 19 nt, Human
cacuacccaaccccauauu

SEQ ID NO: 488747 - RNA, 20 nt, Human
cacuacccaaccccauauug

SEQ ID NO: 488748 - RNA, 23 nt, Human
cacugcaagcugugccuccuggg

SEQ ID NO: 488749 - RNA, 19 nt, Human
cagagcccccuucaccccc

SEQ ID NO: 488750 - RNA, 21 nt, Human
cagcagcaaggacagaggugc

SEQ ID NO: 488751 - RNA, 19 nt, Human
cagccagagacccucgggc

SEQ ID NO: 488752 - RNA, 21 nt, Human
cagggauguccuacuuguccu

SEQ ID NO: 488753 - RNA, 22 nt, Human
caggggcgcuggggaaaggaag

SEQ ID NO: 488754 - RNA, 21 nt, Human
caggugcccaccaccacaccc

SEQ ID NO: 488755 - RNA, 24 nt, Human
caggugcccaccaccacacccggc

SEQ ID NO: 488756 - RNA, 21 nt, Human
caugaaggggcccaccgcccg

SEQ ID NO: 488757 - RNA, 22 nt, Human
ccaaagugcugggguuacaggc

SEQ ID NO: 488758 - RNA, 22 nt, Human
ccaaagugcugggguuacaggc

SEQ ID NO: 488759 - RNA, 24 nt, Human
ccaaagugcugggguuacaggcgu

SEQ ID NO: 488760 - RNA, 21 nt, Human
ccacacccaccccagucuuuc

SEQ ID NO: 488761 - RNA, 18 nt, Human
ccacaucugccucuggcc

SEQ ID NO: 488762 - RNA, 18 nt, Human
ccaccacacccaccccag

SEQ ID NO: 488763 - RNA, 27 nt, Human
ccacccacacuacccaaccccauauug

SEQ ID NO: 488764 - RNA, 19 nt, Human
ccagucccuucuggaggcu

SEQ ID NO: 488765 - RNA, 19 nt, Human
ccagucuuucuuaaugaca

SEQ ID NO: 488766 - RNA, 23 nt, Human
cccacaucugccucuggcccuca

SEQ ID NO: 488767 - RNA, 19 nt, Human
cccaggccagcgagcuucu

SEQ ID NO: 488768 - RNA, 23 nt, Human
ccccaugaaggggcccaccgccc

SEQ ID NO: 488769 - RNA, 23 nt, Human
cccgcagccagagacccucgggc

SEQ ID NO: 488770 - RNA, 21 nt, Human
ccugcagcccacaucugccuc

SEQ ID NO: 488771 - RNA, 21 nt, Human
ccugccacccacacuacccaa

SEQ ID NO: 488772 - RNA, 21 nt, Human
cgugcaguggugcgaucuucg

SEQ ID NO: 488773 - RNA, 23 nt, Human
cuaauuuuuuguauuuuuaguag

SEQ ID NO: 488774 - RNA, 25 nt, Human
cuacccaaccccauauugccacaga

SEQ ID NO: 488775 - RNA, 24 nt, Human
cucacugcaagcugugccuccugg

SEQ ID NO: 488776 - RNA, 24 nt, Human
cucagccucccuaguagcugggac

SEQ ID NO: 488777 - RNA, 21 nt, Human
cuccuggguucacaccauucu

SEQ ID NO: 488778 - RNA, 24 nt, Human
cucgcucugucacccaggcuggag

SEQ ID NO: 488779 - RNA, 22 nt, Human
cucuggcccugucaugaaggcc

SEQ ID NO: 488780 - RNA, 20 nt, Human
cucugucacccaggcuggag

SEQ ID NO: 488781 - RNA, 22 nt, Human
cucuugaccucgugaucugccc

SEQ ID NO: 488782 - RNA, 21 nt, Human
cugaagcccacgucuguccac

SEQ ID NO: 488783 - RNA, 23 nt, Human
cugccucagccucccuaguagcu

SEQ ID NO: 488784 - RNA, 19 nt, Human
cuggcuggcucuggcccug

SEQ ID NO: 488785 - RNA, 21 nt, Human
gaccucgugaucugcccaccu

SEQ ID NO: 488786 - RNA, 24 nt, Human
gaccucgugaucugcccaccuugg

SEQ ID NO: 488787 - RNA, 18 nt, Human
gagaugggguuucaccau

SEQ ID NO: 488788 - RNA, 24 nt, Human
gagaugggguuucaccauguucgc

SEQ ID NO: 488789 - RNA, 21 nt, Human
gaucuggcuucccuuccccac

SEQ ID NO: 488790 - RNA, 22 nt, Human
gccacagagcccccuucacccc

SEQ ID NO: 488791 - RNA, 18 nt, Human
gcccgcagccagagaccc

SEQ ID NO: 488792 - RNA, 21 nt, Human
gcucugucacccaggcuggag

SEQ ID NO: 488793 - RNA, 24 nt, Human
ggggcccaccgcccgcagccagag

SEQ ID NO: 488794 - RNA, 22 nt, Human
gggguuucaccauguucgccag

SEQ ID NO: 488795 - RNA, 20 nt, Human
ggugagccccaugaaggggc

SEQ ID NO: 488796 - RNA, 18 nt, Human
gguuacaggcgugagcca

SEQ ID NO: 488797 - RNA, 22 nt, Human
gguuacaggcgugagccaccac

SEQ ID NO: 488798 - RNA, 24 nt, Human
gguuucaccauguucgccaggaug

SEQ ID NO: 488799 - RNA, 23 nt, Human
guagagaugggguuucaccaugu

SEQ ID NO: 488800 - RNA, 18 nt, Human
gugcaguggugcgaucuu

SEQ ID NO: 488801 - RNA, 19 nt, Human
uaaugugaauccaccaggu

SEQ ID NO: 488802 - RNA, 24 nt, Human
uaauuuuuuguauuuuuaguagag

SEQ ID NO: 488803 - RNA, 25 nt, Human
uaauuuuuuguauuuuuaguagaga

SEQ ID NO: 488804 - RNA, 24 nt, Human
uacaggcgugagccaccacaccca

SEQ ID NO: 488805 - RNA, 19 nt, Human
uacuuguccugcccagcuu

SEQ ID NO: 488806 - RNA, 22 nt, Human
uagagaugggguuucaccaugu

SEQ ID NO: 488807 - RNA, 24 nt, Human
uaguagagaugggguuucaccaug

SEQ ID NO: 488808 - RNA, 26 nt, Human
uaguagagaugggguuucaccauguu

SEQ ID NO: 488809 - RNA, 23 nt, Human
uaguagcugggacgacaggugcc

SEQ ID NO: 488810 - RNA, 18 nt, Human
ucaaggugugggcagagg

SEQ ID NO: 488811 - RNA, 21 nt, Human
ucacaccauucuccugccuca

SEQ ID NO: 488812 - RNA, 18 nt, Human
ucacccaggcuggagugc

SEQ ID NO: 488813 - RNA, 24 nt, Human
ucacugcaagcugugccuccuggg

SEQ ID NO: 488814 - RNA, 24 nt, Human
ucccaaagugcugggguuacaggc

SEQ ID NO: 488815 - RNA, 24 nt, Human
uccuggguucacaccauucuccug

SEQ ID NO: 488816 - RNA, 24 nt, Human
ucgcucugucacccaggcuggagu

SEQ ID NO: 488817 - RNA, 25 nt, Human
ucuccugccucagccucccuaguag

SEQ ID NO: 488818 - RNA, 19 nt, Human
ucucgcucugucacccagg

SEQ ID NO: 488819 - RNA, 22 nt, Human
ucucgcucugucacccaggcug

SEQ ID NO: 488820 - RNA, 23 nt, Human
ucucgcucugucacccaggcugg

SEQ ID NO: 488821 - RNA, 24 nt, Human
ucucgcucugucacccaggcugga

SEQ ID NO: 488822 - RNA, 20 nt, Human
ucugaagcccacgucugucc

SEQ ID NO: 488823 - RNA, 23 nt, Human
ucuggcccugucaugaaggcccu

SEQ ID NO: 488824 - RNA, 23 nt, Human
ucugucacccaggcuggagugcg

SEQ ID NO: 488825 - RNA, 22 nt, Human
ugaccucgugaucugcccaccu

SEQ ID NO: 488826 - RNA, 22 nt, Human
ugagacggagucucgcucuguc

SEQ ID NO: 488827 - RNA, 24 nt, Human
ugaucugcccaccuuggccuccca

SEQ ID NO: 488828 - RNA, 18 nt, Human
ugccacagagcccccuuc

SEQ ID NO: 488829 - RNA, 20 nt, Human
ugccacagagcccccuucac

SEQ ID NO: 488830 - RNA, 21 nt, Human
ugcccaccaccacacccggcu

SEQ ID NO: 488831 - RNA, 24 nt, Human
ugccucagccucccuaguagcugg

SEQ ID NO: 488832 - RNA, 19 nt, Human
ugccuccuggguucacacc

SEQ ID NO: 488833 - RNA, 18 nt, Human
ugggguuacaggcgugag

SEQ ID NO: 488834 - RNA, 19 nt, Human
ugggguuacaggcgugagc

SEQ ID NO: 488835 - RNA, 22 nt, Human
ugggguuacaggcgugagccac

SEQ ID NO: 488836 - RNA, 23 nt, Human
ugggguuacaggcgugagccacc

SEQ ID NO: 488837 - RNA, 24 nt, Human
ugggguuacaggcgugagccacca

SEQ ID NO: 488838 - RNA, 24 nt, Human
ugggguuucaccauguucgccagg

SEQ ID NO: 488839 - RNA, 20 nt, Human
uggguucacaccauucuccu

SEQ ID NO: 488840 - RNA, 21 nt, Human
uguauuuuuaguagagauggg

SEQ ID NO: 488841 - RNA, 21 nt, Human
ugucaugaaggcccugugaug

SEQ ID NO: 488842 - RNA, 30 nt, Human
ugucaugaaggcccugugaugacauggggg

SEQ ID NO: 488843 - RNA, 19 nt, Human
uguccugcccagcuucucc

SEQ ID NO: 488844 - RNA, 19 nt, Human
uuacaggcgugagccacca

SEQ ID NO: 488845 - RNA, 18 nt, Human
uuaguagagaugggguuu

SEQ ID NO: 488846 - RNA, 22 nt, Human
uuaguagagaugggguuucacc

SEQ ID NO: 488847 - RNA, 24 nt, Human
uuaguagagaugggguuucaccau

SEQ ID NO: 488848 - RNA, 27 nt, Human
uuccccaccagcagcaaggacagaggu

SEQ ID NO: 488849 - RNA, 18 nt, Human
uuggccucccaaagugcu

SEQ ID NO: 488850 - RNA, 23 nt, Human
uuguauuuuuaguagagaugggg

SEQ ID NO: 488851 - RNA, 22 nt, Human
uuuaaugugaauccaccaggug

SEQ ID NO: 488852 - RNA, 19 nt, Human
uuucaccauguucgccagg

SEQ ID NO: 488853 - RNA, 20 nt, Human
uuucaccauguucgccagga

SEQ ID NO: 488854 - RNA, 24 nt, Human
uuuuuaguagagaugggguuucac

SEQ ID NO: 488855 - RNA, 21 nt, Human
uuuuuguauuuuuaguagaga

SEQ ID NO: 488856 - RNA, 24 nt, Human
uuuuuuguauuuuuaguagagaug

SEQ ID NO: 488857 - RNA, 24 nt, Human
uuuuuuuuuuugagacggagucuc

SEQ ID NO: 488858 - RNA, 18 nt, Human
accauuucccaccugccu

SEQ ID NO: 488859 - RNA, 21 nt, Human
agaaggaaaagaaacguugaa

SEQ ID NO: 488860 - RNA, 21 nt, Human
aggaaaagaaacguugaaugu

SEQ ID NO: 488861 - RNA, 22 nt, Human
aggucugcaaagcugcagcagg

SEQ ID NO: 488862 - RNA, 21 nt, Human
augaccaaggcgagcaggggc

SEQ ID NO: 488863 - RNA, 19 nt, Human
cagcugaggucugcaaagc

SEQ ID NO: 488864 - RNA, 18 nt, Human
caggacccaguggguuuc

SEQ ID NO: 488865 - RNA, 26 nt, Human
ccucgccacuuuguuguuuucucucu

SEQ ID NO: 488866 - RNA, 21 nt, Human
ccuucaguuuucaaccauuuc

SEQ ID NO: 488867 - RNA, 18 nt, Human
ccuugcucuuugcuagcc

SEQ ID NO: 488868 - RNA, 24 nt, Human
ccuugcucuuugcuagccuuucuc

SEQ ID NO: 488869 - RNA, 24 nt, Human
cuacccuuucuaacacucucuucc

SEQ ID NO: 488870 - RNA, 24 nt, Human
cuccuuggagacuuauucuuucuu

SEQ ID NO: 488871 - RNA, 24 nt, Human
cuggauuuaaaaauagaaauacca

SEQ ID NO: 488872 - RNA, 23 nt, Human
gacccaguggguuuaaauaguuc

SEQ ID NO: 488873 - RNA, 19 nt, Human
gagggccucgccacuuugu

SEQ ID NO: 488874 - RNA, 20 nt, Human
gaucgccagaugcagugccc

SEQ ID NO: 488875 - RNA, 19 nt, Human
ggcagugcucagagucuga

SEQ ID NO: 488876 - RNA, 18 nt, Human
gggcagugcucagagucu

SEQ ID NO: 488877 - RNA, 24 nt, Human
guccuacccuuucuaacacucucu

SEQ ID NO: 488878 - RNA, 19 nt, Human
gugcuccacggcagccucc

SEQ ID NO: 488879 - RNA, 20 nt, Human
uaaaaggaagcuccuugagc

SEQ ID NO: 488880 - RNA, 24 nt, Human
uaacuauaacaccaucuaccuucc

SEQ ID NO: 488881 - RNA, 19 nt, Human
uagaaauaccauuucccac

SEQ ID NO: 488882 - RNA, 23 nt, Human
uagcaaagggauuuguguuuugc

SEQ ID NO: 488883 - RNA, 21 nt, Human
ucagugcuguacaugaccaag

SEQ ID NO: 488884 - RNA, 18 nt, Human
uccacgugucucaguuuc

SEQ ID NO: 488885 - RNA, 21 nt, Human
ucuaccuucaguuuucaacca

SEQ ID NO: 488886 - RNA, 21 nt, Human
ucugcaaagcugcagcaggcu

SEQ ID NO: 488887 - RNA, 18 nt, Human
ucuggagaugcccagcug

SEQ ID NO: 488888 - RNA, 22 nt, Human
ugaccaaggcgagcaggggcag

SEQ ID NO: 488889 - RNA, 24 nt, Human
ugacugaaccuuacgcuuucacuc

SEQ ID NO: 488890 - RNA, 23 nt, Human
ugcagcaggcugacugaaccuua

SEQ ID NO: 488891 - RNA, 23 nt, Human
ugcccagcugaggucugcaaagc

SEQ ID NO: 488892 - RNA, 19 nt, Human
ugcccuggaguuuccuccc

SEQ ID NO: 488893 - RNA, 24 nt, Human
ugcuucauuccuuucagugcugua

SEQ ID NO: 488894 - RNA, 22 nt, Human
uggguagccuauagcuuuccuu

SEQ ID NO: 488895 - RNA, 19 nt, Human
ugggugaggaaggcucuuc

SEQ ID NO: 488896 - RNA, 19 nt, Human
uguggcaggacccaguggg

SEQ ID NO: 488897 - RNA, 22 nt, Human
uguuuugcccucacauagccua

SEQ ID NO: 488898 - RNA, 21 nt, Human
uuaaggcaguuuugugccggc

SEQ ID NO: 488899 - RNA, 23 nt, Human
uuagcaaagggauuuguguuuug

SEQ ID NO: 488900 - RNA, 24 nt, Human
uuauuguagaaggaaaagaaacgu

SEQ ID NO: 488901 - RNA, 18 nt, Human
uuccuguccucaucugcc

SEQ ID NO: 488902 - RNA, 18 nt, Human
uucuaacacucucuuccu

SEQ ID NO: 488903 - RNA, 22 nt, Human
uucuuuggagauuauaggcugu

SEQ ID NO: 488904 - RNA, 22 nt, Human
uugaauguuuaaaacaaaacca

SEQ ID NO: 488905 - RNA, 20 nt, Human
uuuuguggguuugggugagg

SEQ ID NO: 488906 - RNA, 25 nt, Human
uuuuuuuuuuuuuuuuucacauuuu

SEQ ID NO: 488907 - RNA, 21 nt, Human
aaaaaagaaauacauuaugag

SEQ ID NO: 488908 - RNA, 22 nt, Human
aaaaaagaaauacauuaugaga

SEQ ID NO: 488909 - RNA, 18 nt, Human
aaaacaaaacaaaaaaag

SEQ ID NO: 488910 - RNA, 20 nt, Human
aaaacuguaggaacugcuga

SEQ ID NO: 488911 - RNA, 22 nt, Human
aaaagagauuaagaaaaacagu

SEQ ID NO: 488912 - RNA, 24 nt, Human
aaacaaaaaaagaaaauuagcugg

SEQ ID NO: 488913 - RNA, 20 nt, Human
aacaaaacaaaaaaagaaaa

SEQ ID NO: 488914 - RNA, 20 nt, Human
aacauagugagaccacaucu

SEQ ID NO: 488915 - RNA, 20 nt, Human
aacuuguaauaguugcauug

SEQ ID NO: 488916 - RNA, 22 nt, Human
aagaaaaacaguaagccacugg

SEQ ID NO: 488917 - RNA, 23 nt, Human
aagaaagacaaagaaagaggcaa

SEQ ID NO: 488918 - RNA, 21 nt, Human
aagaaagagagagagagagga

SEQ ID NO: 488919 - RNA, 20 nt, Human
aagaagaaagaaagaaagaa

SEQ ID NO: 488920 - RNA, 22 nt, Human
aagaauaccaagaaggcucaac

SEQ ID NO: 488921 - RNA, 20 nt, Human
aagcacacucuucauauacu

SEQ ID NO: 488922 - RNA, 20 nt, Human
aagcagaccuuucuagggau

SEQ ID NO: 488923 - RNA, 22 nt, Human
aagcaggagcucgacauaaagc

SEQ ID NO: 488924 - RNA, 22 nt, Human
aagcugcguuaguaacagauga

SEQ ID NO: 488925 - RNA, 23 nt, Human
aaguucccccagaugccagccaa

SEQ ID NO: 488926 - RNA, 20 nt, Human
aaugauacaaacagaaaaga

SEQ ID NO: 488927 - RNA, 18 nt, Human
acaaaacaaaaaaagaaa

SEQ ID NO: 488928 - RNA, 23 nt, Human
acaaaacaaaacaaaaaaagaaa

SEQ ID NO: 488929 - RNA, 19 nt, Human
acagugccccuaucuacca

SEQ ID NO: 488930 - RNA, 22 nt, Human
acauaaucaauucccacugugu

SEQ ID NO: 488931 - RNA, 28 nt, Human
acaucucuacaaaacaaaacaaaaaaag

SEQ ID NO: 488932 - RNA, 22 nt, Human
accucaaguuuuauuaaaaaac

SEQ ID NO: 488933 - RNA, 22 nt, Human
agaaaagacauguuagucaaaa

SEQ ID NO: 488934 - RNA, 21 nt, Human
agaaagaaagacaaagaaaga

SEQ ID NO: 488935 - RNA, 19 nt, Human
agaaagaagaaagaaagaa

SEQ ID NO: 488936 - RNA, 22 nt, Human
agaaauagugucccccuccccg

SEQ ID NO: 488937 - RNA, 20 nt, Human
agaagaaaaauaaacugaag

SEQ ID NO: 488938 - RNA, 22 nt, Human
agacaaagaaagaggcaagcaa

SEQ ID NO: 488939 - RNA, 22 nt, Human
agacgccagugaugucuaaacu

SEQ ID NO: 488940 - RNA, 21 nt, Human
agagaaaccgugcugccuggg

SEQ ID NO: 488941 - RNA, 18 nt, Human
agaggcaagcaagcagga

SEQ ID NO: 488942 - RNA, 22 nt, Human
agccugggaaacauagugagac

SEQ ID NO: 488943 - RNA, 18 nt, Human
agcugggcaugguggcuc

SEQ ID NO: 488944 - RNA, 23 nt, Human
agcugggcaugguggcucgugcc

SEQ ID NO: 488945 - RNA, 21 nt, Human
aggaaggaaggaaggaaggaa

SEQ ID NO: 488946 - RNA, 21 nt, Human
aggaaggaaggaaggaaggaa

SEQ ID NO: 488947 - RNA, 21 nt, Human
aggaaggaaggaaggaaggaa

SEQ ID NO: 488948 - RNA, 21 nt, Human
aggaaggaaggaaggaaggaa

SEQ ID NO: 488949 - RNA, 21 nt, Human
aggaaggaaggaaggaaggaa

SEQ ID NO: 488950 - RNA, 21 nt, Human
aggaaggaaggaaggaaggaa

SEQ ID NO: 488951 - RNA, 21 nt, Human
aggaaggaaggaaggaaggaa

SEQ ID NO: 488952 - RNA, 21 nt, Human
aggaaggaaggaaggaaggaa

SEQ ID NO: 488953 - RNA, 21 nt, Human
aggaaggaaggaaggaaggaa

SEQ ID NO: 488954 - RNA, 21 nt, Human
aggaaggaaggaaggaaggaa

SEQ ID NO: 488955 - RNA, 21 nt, Human
aggaaggaaggaaggaaggaa

SEQ ID NO: 488956 - RNA, 21 nt, Human
aggaaggaaggaaggaaggga

SEQ ID NO: 488957 - RNA, 23 nt, Human
aggcauaaucagaccauaaacag

SEQ ID NO: 488958 - RNA, 20 nt, Human
aggcuuccauuaacucuuca

SEQ ID NO: 488959 - RNA, 25 nt, Human
auauucuucucucucuuuuucaacu

SEQ ID NO: 488960 - RNA, 24 nt, Human
aucucuacaaaacaaaacaaaaaa

SEQ ID NO: 488961 - RNA, 21 nt, Human
augaaaaaacauucaaacuaa

SEQ ID NO: 488962 - RNA, 21 nt, Human
augaagucaaaaauauaaaau

SEQ ID NO: 488963 - RNA, 21 nt, Human
auuggugucagccacaguuuc

SEQ ID NO: 488964 - RNA, 18 nt, Human
caaaucaguuucaaaaaa

SEQ ID NO: 488965 - RNA, 21 nt, Human
caagaugauucugaauuauaa

SEQ ID NO: 488966 - RNA, 25 nt, Human
caaucaccaaacccugacgaaaagu

SEQ ID NO: 488967 - RNA, 20 nt, Human
cacaauuugggagagaaacc

SEQ ID NO: 488968 - RNA, 19 nt, Human
cacgccuguaauccuaaca

SEQ ID NO: 488969 - RNA, 21 nt, Human
cagaaagaagaaagaaagaaa

SEQ ID NO: 488970 - RNA, 21 nt, Human
cagaaauagugucccccuccc

SEQ ID NO: 488971 - RNA, 19 nt, Human
cagccacaguuucauccug

SEQ ID NO: 488972 - RNA, 21 nt, Human
cagccagacugcuaaauccaa

SEQ ID NO: 488973 - RNA, 21 nt, Human
caggaauccauccaagaacca

SEQ ID NO: 488974 - RNA, 23 nt, Human
caggcgcaggcucacgccuguaa

SEQ ID NO: 488975 - RNA, 19 nt, Human
caucacacuccggggucag

SEQ ID NO: 488976 - RNA, 20 nt, Human
cauguuaauuuuuuucugaa

SEQ ID NO: 488977 - RNA, 20 nt, Human
cauucugccuagccuguacc

SEQ ID NO: 488978 - RNA, 22 nt, Human
cccacacccgaccgggccucua

SEQ ID NO: 488979 - RNA, 25 nt, Human
ccccacacccgaccgggccucuagc

SEQ ID NO: 488980 - RNA, 24 nt, Human
ccccuaucuaccaagaugauucug

SEQ ID NO: 488981 - RNA, 19 nt, Human
cccuccagggagcggccug

SEQ ID NO: 488982 - RNA, 21 nt, Human
ccucaugugggacucuggcau

SEQ ID NO: 488983 - RNA, 20 nt, Human
ccuguaccaaaauuccagaa

SEQ ID NO: 488984 - RNA, 23 nt, Human
ccuguaccaaaauuccagaaaga

SEQ ID NO: 488985 - RNA, 22 nt, Human
ccugucucauaaaacucagaag

SEQ ID NO: 488986 - RNA, 24 nt, Human
cgaagugggaggacugcuugaggc

SEQ ID NO: 488987 - RNA, 18 nt, Human
cgaccgggccucuagcgg

SEQ ID NO: 488988 - RNA, 18 nt, Human
cgccagugaugucuaaac

SEQ ID NO: 488989 - RNA, 26 nt, Human
cuacaaaacaaaacaaaaaaagaaaa

SEQ ID NO: 488990 - RNA, 23 nt, Human
cuaccaagaugauucugaauuau

SEQ ID NO: 488991 - RNA, 20 nt, Human
cucacgccuguaauccuaac

SEQ ID NO: 488992 - RNA, 24 nt, Human
cucacgccuguaauccuaacacuu

SEQ ID NO: 488993 - RNA, 21 nt, Human
cuccaaggaaucaaacgugau

SEQ ID NO: 488994 - RNA, 20 nt, Human
cucgacaguucaucccucca

SEQ ID NO: 488995 - RNA, 19 nt, Human
cugaauuauaauuccauca

SEQ ID NO: 488996 - RNA, 21 nt, Human
cugcuaaauccaacuccuggu

SEQ ID NO: 488997 - RNA, 21 nt, Human
cuggguaaauuacagguuuac

SEQ ID NO: 488998 - RNA, 22 nt, Human
cuuaaaacaugaagucaaaaau

SEQ ID NO: 488999 - RNA, 24 nt, Human
cuuaaaaccucugcaugucucaga

SEQ ID NO: 489000 - RNA, 18 nt, Human
cuuauaauuuuaaccaca

SEQ ID NO: 489001 - RNA, 22 nt, Human
cuugcauuuuacagaagaaaaa

SEQ ID NO: 489002 - RNA, 22 nt, Human
cuuucuagggauagcagucuca

SEQ ID NO: 489003 - RNA, 20 nt, Human
gaaaaaacauucaaacuaaa

SEQ ID NO: 489004 - RNA, 22 nt, Human
gaaaagaaagaaagacaaagaa

SEQ ID NO: 489005 - RNA, 19 nt, Human
gaagaaacucacuugguac

SEQ ID NO: 489006 - RNA, 18 nt, Human
gaccccuuccacuugcga

SEQ ID NO: 489007 - RNA, 24 nt, Human
gacugcuugaggccgggaguuuaa

SEQ ID NO: 489008 - RNA, 19 nt, Human
gaggacgggagccucgugc

SEQ ID NO: 489009 - RNA, 18 nt, Human
gcccugggccccucgaca

SEQ ID NO: 489010 - RNA, 19 nt, Human
ggaaucaaacgugauuaaa

SEQ ID NO: 489011 - RNA, 18 nt, Human
ggcaaggugagccauucu

SEQ ID NO: 489012 - RNA, 18 nt, Human
ggcucacgccuguaaucc

SEQ ID NO: 489013 - RNA, 20 nt, Human
gggcucgggacaagggacag

SEQ ID NO: 489014 - RNA, 18 nt, Human
gucgcaggaggcggggaa

SEQ ID NO: 489015 - RNA, 22 nt, Human
guggagcacuggguaaauuaca

SEQ ID NO: 489016 - RNA, 23 nt, Human
guucaacucucuuaaugagcuga

SEQ ID NO: 489017 - RNA, 24 nt, Human
uaaaaaaaaacuacauguuucuua

SEQ ID NO: 489018 - RNA, 18 nt, Human
uaaaauaauacuccaggc

SEQ ID NO: 489019 - RNA, 21 nt, Human
uaaccgcgacgaccccuucca

SEQ ID NO: 489020 - RNA, 24 nt, Human
uacaaaacaaaacaaaaaaagaaa

SEQ ID NO: 489021 - RNA, 27 nt, Human
uacagaagaaaaauaaacugaaguaaa

SEQ ID NO: 489022 - RNA, 19 nt, Human
uacauguuucuuaauggac

SEQ ID NO: 489023 - RNA, 21 nt, Human
uacuccaggcauaaucagacc

SEQ ID NO: 489024 - RNA, 19 nt, Human
uaggagcugaucaucuagg

SEQ ID NO: 489025 - RNA, 26 nt, Human
uagugagaccacaucucuacaaaaca

SEQ ID NO: 489026 - RNA, 21 nt, Human
uaguugcauuggcuccaagga

SEQ ID NO: 489027 - RNA, 23 nt, Human
uauaaaauaauacuccaggcaua

SEQ ID NO: 489028 - RNA, 25 nt, Human
ucagcugguuuuguacucuuugcaa

SEQ ID NO: 489029 - RNA, 23 nt, Human
uccagaaagaagaaagaaagaaa

SEQ ID NO: 489030 - RNA, 19 nt, Human
uccauuaacucuucauacu

SEQ ID NO: 489031 - RNA, 18 nt, Human
ucccccagaugccagcca

SEQ ID NO: 489032 - RNA, 21 nt, Human
uccucugaagaagccagugga

SEQ ID NO: 489033 - RNA, 23 nt, Human
ucuaggcacauucugccuagccu

SEQ ID NO: 489034 - RNA, 25 nt, Human
ucucagccagaacaucacugagaac

SEQ ID NO: 489035 - RNA, 18 nt, Human
ucucucucuuuuucaacu

SEQ ID NO: 489036 - RNA, 18 nt, Human
ucuuccagcuuucuguca

SEQ ID NO: 489037 - RNA, 24 nt, Human
ucuuugcacugcaugaaauagcug

SEQ ID NO: 489038 - RNA, 18 nt, Human
ugaagaagccaguggagc

SEQ ID NO: 489039 - RNA, 21 nt, Human
ugacuauuucuuccagcuuuc

SEQ ID NO: 489040 - RNA, 24 nt, Human
ugagaacuuguaauaguugcauug

SEQ ID NO: 489041 - RNA, 21 nt, Human
ugagcugcucauauucuuuau

SEQ ID NO: 489042 - RNA, 20 nt, Human
ugauauccuuucuuauuucu

SEQ ID NO: 489043 - RNA, 24 nt, Human
ugccccuaucuaccaagaugauuc

SEQ ID NO: 489044 - RNA, 23 nt, Human
ugcccugggccccucgacaguuc

SEQ ID NO: 489045 - RNA, 19 nt, Human
uggaccgauugcuuucgag

SEQ ID NO: 489046 - RNA, 21 nt, Human
uggcgcaugcuuuucagcugg

SEQ ID NO: 489047 - RNA, 22 nt, Human
ugggacucuggcaugauugucu

SEQ ID NO: 489048 - RNA, 20 nt, Human
ugggaggacugcuugaggcc

SEQ ID NO: 489049 - RNA, 28 nt, Human
uggggugucaggcaagucagcuuaaaaa

SEQ ID NO: 489050 - RNA, 20 nt, Human
ugguaucaaguaaaacccca

SEQ ID NO: 489051 - RNA, 22 nt, Human
ugguggcucgugccuguagucc

SEQ ID NO: 489052 - RNA, 21 nt, Human
uguacuuaagaauaccaagaa

SEQ ID NO: 489053 - RNA, 18 nt, Human
uguccauaaugaauuuaa

SEQ ID NO: 489054 - RNA, 19 nt, Human
uguggcauuuccugaaggu

SEQ ID NO: 489055 - RNA, 23 nt, Human
uuaaaggcuuccauuaacucuuc

SEQ ID NO: 489056 - RNA, 23 nt, Human
uuaagaauaccaagaaggcucaa

SEQ ID NO: 489057 - RNA, 24 nt, Human
uuagcugggcaugguggcucgugc

SEQ ID NO: 489058 - RNA, 18 nt, Human
uucaggaggccgaagugg

SEQ ID NO: 489059 - RNA, 25 nt, Human
uucauccugaagaaacucacuuggu

SEQ ID NO: 489060 - RNA, 20 nt, Human
uuccauuaacucuucauacu

SEQ ID NO: 489061 - RNA, 24 nt, Human
uucuaccacauuauauuuauuaua

SEQ ID NO: 489062 - RNA, 21 nt, Human
uucuucuaaaguuuuuuuaaa

SEQ ID NO: 489063 - RNA, 25 nt, Human
uuguauaaugguaucuacuuucuuc

SEQ ID NO: 489064 - RNA, 19 nt, Human
uuucuagggauagcagucu

SEQ ID NO: 489065 - RNA, 18 nt, Human
uuuuccauaauccuuuaa

SEQ ID NO: 489066 - RNA, 21 nt, Human
accuggugaugucuggcauca

SEQ ID NO: 489067 - RNA, 25 nt, Human
acugccugucaacuucuacaaccug

SEQ ID NO: 489068 - RNA, 19 nt, Human
agggggcacagggcuaagg

SEQ ID NO: 489069 - RNA, 21 nt, Human
agggggcacagggcuaaggcu

SEQ ID NO: 489070 - RNA, 18 nt, Human
cacugcuuggccccuaca

SEQ ID NO: 489071 - RNA, 23 nt, Human
cagggggcacagggcuaaggcug

SEQ ID NO: 489072 - RNA, 20 nt, Human
ccauggcacugccugucaac

SEQ ID NO: 489073 - RNA, 18 nt, Human
cccagcugggcacugcuu

SEQ ID NO: 489074 - RNA, 25 nt, Human
cccccauggcacugccugucaacuu

SEQ ID NO: 489075 - RNA, 23 nt, Human
cgagugaugguggcagcuguuuc

SEQ ID NO: 489076 - RNA, 21 nt, Human
cugggcacugcuuggccccua

SEQ ID NO: 489077 - RNA, 28 nt, Human
cuggugaugucuggcaucaaccccuccc

SEQ ID NO: 489078 - RNA, 19 nt, Human
gcgagugaugguggcagcu

SEQ ID NO: 489079 - RNA, 20 nt, Human
uauuuuggcuguugccccca

SEQ ID NO: 489080 - RNA, 20 nt, Human
ucccccagcugggcacugcu

SEQ ID NO: 489081 - RNA, 23 nt, Human
uggcagcuguuucagggggcaca

SEQ ID NO: 489082 - RNA, 22 nt, Human
uggccccuacaucauuaccccc

SEQ ID NO: 489083 - RNA, 22 nt, Human
ugggcacugcuuggccccuaca

SEQ ID NO: 489084 - RNA, 24 nt, Human
ugucuggcaucaaccccucccaaa

SEQ ID NO: 489085 - RNA, 18 nt, Human
aaaaaagcaaaaaacccc

SEQ ID NO: 489086 - RNA, 20 nt, Human
aaaaacaacagucacacugg

SEQ ID NO: 489087 - RNA, 26 nt, Human
aaaaaccccaaacccacccccaaaca

SEQ ID NO: 489088 - RNA, 21 nt, Human
aaaaaccccaaacccaccccu

SEQ ID NO: 489089 - RNA, 23 nt, Human
aaaaccccaaacccacccccaaa

SEQ ID NO: 489090 - RNA, 19 nt, Human
aaaagccacccguaugaaa

SEQ ID NO: 489091 - RNA, 19 nt, Human
aaaaggaaagaaagacaaa

SEQ ID NO: 489092 - RNA, 19 nt, Human
aaaccccaaacccaccccc

SEQ ID NO: 489093 - RNA, 20 nt, Human
aaagcaaaaaaccccaaacc

SEQ ID NO: 489094 - RNA, 21 nt, Human
aaagcaaaaaaccccaaaccc

SEQ ID NO: 489095 - RNA, 18 nt, Human
aaccccaaacccaccccc

SEQ ID NO: 489096 - RNA, 29 nt, Human
aagaaaccaaggcauuuagcagugggcac

SEQ ID NO: 489097 - RNA, 29 nt, Human
aagaaagacaaaauauaagggaaaagaaa

SEQ ID NO: 489098 - RNA, 21 nt, Human
aagcaaaaaaccccaaaccca

SEQ ID NO: 489099 - RNA, 23 nt, Human
aagccgaagcccaagcaccggaa

SEQ ID NO: 489100 - RNA, 26 nt, Human
aauuaccccugaauaaacuuuagaca

SEQ ID NO: 489101 - RNA, 20 nt, Human
aauuguguguaugcaugugu

SEQ ID NO: 489102 - RNA, 20 nt, Human
accauuacaacaagcagaac

SEQ ID NO: 489103 - RNA, 19 nt, Human
acccacccccaaacaaaaa

SEQ ID NO: 489104 - RNA, 21 nt, Human
accccaaacccacccccaaac

SEQ ID NO: 489105 - RNA, 23 nt, Human
acccccaaacaaaaacaacaguc

SEQ ID NO: 489106 - RNA, 20 nt, Human
acccccaaacaaaaacaacc

SEQ ID NO: 489107 - RNA, 19 nt, Human
agaacaccaauacuuaaaa

SEQ ID NO: 489108 - RNA, 21 nt, Human
agacaauuacaguugaaaaca

SEQ ID NO: 489109 - RNA, 23 nt, Human
agacuuuugccaauucuaaauuu

SEQ ID NO: 489110 - RNA, 18 nt, Human
agauauuagauguuaacu

SEQ ID NO: 489111 - RNA, 18 nt, Human
agcauauggaacagggag

SEQ ID NO: 489112 - RNA, 21 nt, Human
agccgaagcccaagcaccgga

SEQ ID NO: 489113 - RNA, 18 nt, Human
agcuuccaaauagcugag

SEQ ID NO: 489114 - RNA, 25 nt, Human
aguaauuccuuauuuaucugaaagc

SEQ ID NO: 489115 - RNA, 21 nt, Human
aguucaggacuuccaucaggu

SEQ ID NO: 489116 - RNA, 20 nt, Human
auaaaauggccguuuaaccc

SEQ ID NO: 489117 - RNA, 20 nt, Human
auacaaaaauacaaaauuuc

SEQ ID NO: 489118 - RNA, 18 nt, Human
auguuaacuucuggagaa

SEQ ID NO: 489119 - RNA, 18 nt, Human
auuacaugaacuuuuaaa

SEQ ID NO: 489120 - RNA, 21 nt, Human
auuuccaaguucaggacuucc

SEQ ID NO: 489121 - RNA, 26 nt, Human
caaaaaaccccaaacccacccccaaa

SEQ ID NO: 489122 - RNA, 24 nt, Human
caaaaacaacagucacacuggagg

SEQ ID NO: 489123 - RNA, 24 nt, Human
caaacccacccccaaacaaaaaca

SEQ ID NO: 489124 - RNA, 22 nt, Human
caaaucaauacacagaaacuua

SEQ ID NO: 489125 - RNA, 19 nt, Human
caaauguguggaggaugcu

SEQ ID NO: 489126 - RNA, 21 nt, Human
cacuuuuuuuucuuaaagcau

SEQ ID NO: 489127 - RNA, 22 nt, Human
caucaguaaaauaagaucuuga

SEQ ID NO: 489128 - RNA, 20 nt, Human
caugaugcagggauguccaa

SEQ ID NO: 489129 - RNA, 21 nt, Human
caugauuugcucucucaucua

SEQ ID NO: 489130 - RNA, 25 nt, Human
cauucaccauuacaacaagcagaac

SEQ ID NO: 489131 - RNA, 22 nt, Human
ccaaacccacccccaaacaaaa

SEQ ID NO: 489132 - RNA, 24 nt, Human
ccaaacccacccccaaacaaaaac

SEQ ID NO: 489133 - RNA, 22 nt, Human
ccaagcaccggaauuuucaaug

SEQ ID NO: 489134 - RNA, 23 nt, Human
ccaagcaccggaauuuucaaugc

SEQ ID NO: 489135 - RNA, 19 nt, Human
ccacccccaaacaaaaaca

SEQ ID NO: 489136 - RNA, 22 nt, Human
ccacccguaugaaaggaguaca

SEQ ID NO: 489137 - RNA, 21 nt, Human
cccaaacaaaaacaacaguca

SEQ ID NO: 489138 - RNA, 24 nt, Human
cccaaacccacccccaaacaaaaa

SEQ ID NO: 489139 - RNA, 23 nt, Human
cccaagcaccggaauuuucaaug

SEQ ID NO: 489140 - RNA, 23 nt, Human
ccccaaacaaaaacaacagucac

SEQ ID NO: 489141 - RNA, 18 nt, Human
ccccaaacccacccccaa

SEQ ID NO: 489142 - RNA, 20 nt, Human
ccccaaacccacccccaaac

SEQ ID NO: 489143 - RNA, 24 nt, Human
cccuuuucuuuuuuuaccuacuuu

SEQ ID NO: 489144 - RNA, 21 nt, Human
ccucucagcauuacuuaaucu

SEQ ID NO: 489145 - RNA, 18 nt, Human
ccugccaguguguuuuca

SEQ ID NO: 489146 - RNA, 22 nt, Human
cggaugcggucgcgugcgcgca

SEQ ID NO: 489147 - RNA, 22 nt, Human
cugguaggaggcaaugcuuucu

SEQ ID NO: 489148 - RNA, 21 nt, Human
cuuccaaauagcugagauugc

SEQ ID NO: 489149 - RNA, 23 nt, Human
cuugacccacuaggacuuaugca

SEQ ID NO: 489150 - RNA, 21 nt, Human
cuuuuuuuuuuuuuuuuuugg

SEQ ID NO: 489151 - RNA, 18 nt, Human
gaaagauuaucuacccuu

SEQ ID NO: 489152 - RNA, 21 nt, Human
gaaaguccaaaaucugugcgg

SEQ ID NO: 489153 - RNA, 22 nt, Human
gauacuguuuggugauacuagg

SEQ ID NO: 489154 - RNA, 22 nt, Human
gcaaaaaaccccaaacccaccc

SEQ ID NO: 489155 - RNA, 20 nt, Human
gcaccggaauuuucaaugcu

SEQ ID NO: 489156 - RNA, 19 nt, Human
gcaucaguaaaauaagauc

SEQ ID NO: 489157 - RNA, 19 nt, Human
gcuagaguaaagaacacca

SEQ ID NO: 489158 - RNA, 23 nt, Human
guagaacucuggauacucaauga

SEQ ID NO: 489159 - RNA, 23 nt, Human
uaaaaaaauuguaacaaaaagga

SEQ ID NO: 489160 - RNA, 23 nt, Human
uaaaaucuccucuaaguuauuaa

SEQ ID NO: 489161 - RNA, 21 nt, Human
uaaaauggcacacaaucaagu

SEQ ID NO: 489162 - RNA, 21 nt, Human
uaauuguguguaugcaugugu

SEQ ID NO: 489163 - RNA, 24 nt, Human
uacacagaaacuuaaaggcuaaac

SEQ ID NO: 489164 - RNA, 18 nt, Human
uacauuaacaaaaauagc

SEQ ID NO: 489165 - RNA, 22 nt, Human
uacucugaagccgaagcccaag

SEQ ID NO: 489166 - RNA, 24 nt, Human
uauauaaaauggcacacaaucaag

SEQ ID NO: 489167 - RNA, 23 nt, Human
uaugaacuauuaugaaaauuccc

SEQ ID NO: 489168 - RNA, 18 nt, Human
uauguguguguguauaua

SEQ ID NO: 489169 - RNA, 24 nt, Human
uauuaugaaaauucccauauuggg

SEQ ID NO: 489170 - RNA, 20 nt, Human
ucaaaaaggaaagaaagaca

SEQ ID NO: 489171 - RNA, 19 nt, Human
ucacacuggaggaucaaaa

SEQ ID NO: 489172 - RNA, 24 nt, Human
ucagcauuacuuaaucugcaaauc

SEQ ID NO: 489173 - RNA, 23 nt, Human
uccaagugaguagaaccuaauuu

SEQ ID NO: 489174 - RNA, 23 nt, Human
uccugguagcuuccaaauagcug

SEQ ID NO: 489175 - RNA, 19 nt, Human
ucgcugggugccccagcuu

SEQ ID NO: 489176 - RNA, 22 nt, Human
ucugaaagcauaugccuagucu

SEQ ID NO: 489177 - RNA, 24 nt, Human
ucugaaauauuuacuuuacauuaa

SEQ ID NO: 489178 - RNA, 26 nt, Human
ucugaaauauuuacuuuacauuaaca

SEQ ID NO: 489179 - RNA, 19 nt, Human
ucugaagccgaagcccaag

SEQ ID NO: 489180 - RNA, 18 nt, Human
ucugcaaaucaauacaca

SEQ ID NO: 489181 - RNA, 19 nt, Human
ucugucccuucuuuauucc

SEQ ID NO: 489182 - RNA, 25 nt, Human
ucuuugauuggggaaaaccgggguc

SEQ ID NO: 489183 - RNA, 23 nt, Human
ugaaaauucccauauugggccca

SEQ ID NO: 489184 - RNA, 18 nt, Human
ugaauaaaagagaacagc

SEQ ID NO: 489185 - RNA, 19 nt, Human
ugacaaaaauaagcauaaa

SEQ ID NO: 489186 - RNA, 25 nt, Human
uguaacaaaaaggaguuaucgcauu

SEQ ID NO: 489187 - RNA, 19 nt, Human
uguauagcaagcauuugaa

SEQ ID NO: 489188 - RNA, 18 nt, Human
ugucuaguucugguagga

SEQ ID NO: 489189 - RNA, 19 nt, Human
ugugaaaguccaaaaucug

SEQ ID NO: 489190 - RNA, 23 nt, Human
ugugaaaguccaaaaucugugcg

SEQ ID NO: 489191 - RNA, 24 nt, Human
uguguguauauauuguuuuggaau

SEQ ID NO: 489192 - RNA, 20 nt, Human
uguguguguguauauauugu

SEQ ID NO: 489193 - RNA, 19 nt, Human
uucaaaagauucuccuucc

SEQ ID NO: 489194 - RNA, 24 nt, Human
uucaaaagauucuccuuccaugga

SEQ ID NO: 489195 - RNA, 21 nt, Human
uucaccauuacaacaagcaga

SEQ ID NO: 489196 - RNA, 24 nt, Human
uuccaucaggucacuuuggaggga

SEQ ID NO: 489197 - RNA, 18 nt, Human
uucucugauuuuggcuga

SEQ ID NO: 489198 - RNA, 22 nt, Human
uugcucucucaucuauuuggac

SEQ ID NO: 489199 - RNA, 24 nt, Human
uuggagggacaccucuuaaaauug

SEQ ID NO: 489200 - RNA, 18 nt, Human
uuugacaaaaauaagcau

SEQ ID NO: 489201 - RNA, 25 nt, Human
uuuuuuuuuuuuguacagagccugu

SEQ ID NO: 489202 - RNA, 21 nt, Human
uuuuuuuuuuuuuuuguacag

SEQ ID NO: 489203 - RNA, 21 nt, Human
acccacaggagcagcuccugg

SEQ ID NO: 489204 - RNA, 22 nt, Human
accccaucccucccugucccca

SEQ ID NO: 489205 - RNA, 23 nt, Human
accccaucccucccuguccccag

SEQ ID NO: 489206 - RNA, 18 nt, Human
agcugguucucuggcuca

SEQ ID NO: 489207 - RNA, 23 nt, Human
aggaaggguccccuuuauucaga

SEQ ID NO: 489208 - RNA, 24 nt, Human
caucaacccacaggagcagcuccu

SEQ ID NO: 489209 - RNA, 20 nt, Human
caucagggaccccaucccuc

SEQ ID NO: 489210 - RNA, 27 nt, Human
caucagggaccccaucccucccugucc

SEQ ID NO: 489211 - RNA, 20 nt, Human
ccacccagggccuagggcag

SEQ ID NO: 489212 - RNA, 23 nt, Human
cccagggcugggggccuugggga

SEQ ID NO: 489213 - RNA, 23 nt, Human
ccuccucuguggaaaagagccug

SEQ ID NO: 489214 - RNA, 22 nt, Human
ccugcaagcccccgcuuucugc

SEQ ID NO: 489215 - RNA, 18 nt, Human
cucaggcuucauguccuu

SEQ ID NO: 489216 - RNA, 20 nt, Human
cuuccccauccccagggcug

SEQ ID NO: 489217 - RNA, 24 nt, Human
cuuccccauccccagggcuggggg

SEQ ID NO: 489218 - RNA, 23 nt, Human
gagcagcuccuggaggaagcuaa

SEQ ID NO: 489219 - RNA, 18 nt, Human
gcuucauguccuucccca

SEQ ID NO: 489220 - RNA, 22 nt, Human
ggcccauucacuuucccugcaa

SEQ ID NO: 489221 - RNA, 19 nt, Human
uagcugguucucuggcuca

SEQ ID NO: 489222 - RNA, 24 nt, Human
uagcugguucucuggcucaggcuu

SEQ ID NO: 489223 - RNA, 24 nt, Human
uccccagacaccagugucuucuca

SEQ ID NO: 489224 - RNA, 23 nt, Human
uccccagggcugggggccuuggg

SEQ ID NO: 489225 - RNA, 22 nt, Human
ucugcggugaugagaggccuuu

SEQ ID NO: 489226 - RNA, 24 nt, Human
ugcugccugcucuuuccuccucug

SEQ ID NO: 489227 - RNA, 24 nt, Human
ugggccacaggcccauucacuuuc

SEQ ID NO: 489228 - RNA, 23 nt, Human
uuggggacucuccaucaacccac

SEQ ID NO: 489229 - RNA, 21 nt, Human
acccacaagagcagcucccag

SEQ ID NO: 489230 - RNA, 18 nt, Human
acgcuccaucaacccaca

SEQ ID NO: 489231 - RNA, 20 nt, Human
agagcugguucucuggcuca

SEQ ID NO: 489232 - RNA, 22 nt, Human
agaggaaggguccucuuuauuc

SEQ ID NO: 489233 - RNA, 22 nt, Human
caacccacaagagcagcuccca

SEQ ID NO: 489234 - RNA, 21 nt, Human
cagcagggacucccaucccuc

SEQ ID NO: 489235 - RNA, 21 nt, Human
cagggcaaccugucagggucu

SEQ ID NO: 489236 - RNA, 24 nt, Human
caucaacccacaagagcagcuccc

SEQ ID NO: 489237 - RNA, 24 nt, Human
ccaaugagaggaaggguccucuuu

SEQ ID NO: 489238 - RNA, 20 nt, Human
ccacccggagcccagggcaa

SEQ ID NO: 489239 - RNA, 21 nt, Human
ccagggcuggagcuucgagga

SEQ ID NO: 489240 - RNA, 23 nt, Human
cccagggcuggagcuucgaggac

SEQ ID NO: 489241 - RNA, 19 nt, Human
ccccaggccugugucuccu

SEQ ID NO: 489242 - RNA, 21 nt, Human
cccggagcccagggcaaccug

SEQ ID NO: 489243 - RNA, 25 nt, Human
ccggagcccagggcaaccugucagg

SEQ ID NO: 489244 - RNA, 22 nt, Human
ccuguggugaugagaggccuuu

SEQ ID NO: 489245 - RNA, 18 nt, Human
cuccagauauucagcagg

SEQ ID NO: 489246 - RNA, 25 nt, Human
cucccaucccucccuguccccaggc

SEQ ID NO: 489247 - RNA, 18 nt, Human
cuccucaggacucagagc

SEQ ID NO: 489248 - RNA, 22 nt, Human
gacucccaucccucccuguccc

SEQ ID NO: 489249 - RNA, 23 nt, Human
gacucccaucccucccugucccc

SEQ ID NO: 489250 - RNA, 21 nt, Human
gagcccagggcaaccugucag

SEQ ID NO: 489251 - RNA, 20 nt, Human
gagcugcugugacugucggc

SEQ ID NO: 489252 - RNA, 19 nt, Human
gagcugguucucuggcuca

SEQ ID NO: 489253 - RNA, 19 nt, Human
gaggagcugggcuccagga

SEQ ID NO: 489254 - RNA, 19 nt, Human
gcugggugcuuguggucug

SEQ ID NO: 489255 - RNA, 21 nt, Human
ggcaaccugucagggucucca

SEQ ID NO: 489256 - RNA, 22 nt, Human
ucccaucccucccuguccccag

SEQ ID NO: 489257 - RNA, 20 nt, Human
ucucugcugggugcuugugg

SEQ ID NO: 489258 - RNA, 24 nt, Human
ugggccacaggcccauucacuuuc

SEQ ID NO: 489259 - RNA, 19 nt, Human
ugggugcuuguggucugug

SEQ ID NO: 489260 - RNA, 18 nt, Human
uguggagaggagcugggc

SEQ ID NO: 489261 - RNA, 22 nt, Human
uguggagaggagcugggcucca

SEQ ID NO: 489262 - RNA, 23 nt, Human
uucagauccuuuccuggugaccc

SEQ ID NO: 489263 - RNA, 22 nt, Human
uucccgugagcagaaaaagagc

SEQ ID NO: 489264 - RNA, 20 nt, Human
uuccuggugaccccgggugg

SEQ ID NO: 489265 - RNA, 23 nt, Human
uuccuggugaccccgggugggcc

SEQ ID NO: 489266 - RNA, 24 nt, Human
aaaugcagaaacuacaccaaggcu

SEQ ID NO: 489267 - RNA, 20 nt, Human
aagaauccaguccagucugc

SEQ ID NO: 489268 - RNA, 23 nt, Human
aagugucagcaacugcacaaacu

SEQ ID NO: 489269 - RNA, 20 nt, Human
acauuugacgaauggcugca

SEQ ID NO: 489270 - RNA, 22 nt, Human
accaaaccaaauaaaagagaau

SEQ ID NO: 489271 - RNA, 21 nt, Human
agagaauauuugacauuugac

SEQ ID NO: 489272 - RNA, 23 nt, Human
agagaccccaugaaccaaaccaa

SEQ ID NO: 489273 - RNA, 19 nt, Human
agcagggaaaaauggagug

SEQ ID NO: 489274 - RNA, 22 nt, Human
agcauauuuguuaauuuuugca

SEQ ID NO: 489275 - RNA, 18 nt, Human
aggaucacaccaagaguu

SEQ ID NO: 489276 - RNA, 24 nt, Human
aggcugucaccuaaaugagaguuu

SEQ ID NO: 489277 - RNA, 20 nt, Human
augagccacaugagaagccu

SEQ ID NO: 489278 - RNA, 21 nt, Human
auugugacaaucaggaggauc

SEQ ID NO: 489279 - RNA, 20 nt, Human
cacaucucaggcaugagggu

SEQ ID NO: 489280 - RNA, 22 nt, Human
cacucuucccgaaaugcagaaa

SEQ ID NO: 489281 - RNA, 19 nt, Human
cagcuuauaggucuucagg

SEQ ID NO: 489282 - RNA, 18 nt, Human
caguccagucugcaggug

SEQ ID NO: 489283 - RNA, 19 nt, Human
caucuugggaaaaacuguc

SEQ ID NO: 489284 - RNA, 18 nt, Human
cauuaacacuacugucag

SEQ ID NO: 489285 - RNA, 19 nt, Human
ccaaaccaaauaaaagaga

SEQ ID NO: 489286 - RNA, 19 nt, Human
cccgaaaugcagaaacuac

SEQ ID NO: 489287 - RNA, 23 nt, Human
cccgaaaugcagaaacuacacca

SEQ ID NO: 489288 - RNA, 22 nt, Human
cugcaaaauauagugauagcuc

SEQ ID NO: 489289 - RNA, 23 nt, Human
gaaaugcagaaacuacaccaagg

SEQ ID NO: 489290 - RNA, 24 nt, Human
gaagaauccaguccagucugcagg

SEQ ID NO: 489291 - RNA, 21 nt, Human
gaccccaugaaccaaaccaaa

SEQ ID NO: 489292 - RNA, 20 nt, Human
gccacaggagaaaaugggau

SEQ ID NO: 489293 - RNA, 24 nt, Human
gccuacccauuuuaaucaagcagc

SEQ ID NO: 489294 - RNA, 20 nt, Human
gggcgugagaacaggugagu

SEQ ID NO: 489295 - RNA, 20 nt, Human
gucaguuaccaucauuuugg

SEQ ID NO: 489296 - RNA, 18 nt, Human
gucugcagguggauaaua

SEQ ID NO: 489297 - RNA, 19 nt, Human
uaaaacagggcgugagaac

SEQ ID NO: 489298 - RNA, 20 nt, Human
uaaaaugggaauccaggaac

SEQ ID NO: 489299 - RNA, 22 nt, Human
uacagcauuaucuuaccaaauu

SEQ ID NO: 489300 - RNA, 24 nt, Human
uagauuaaagaaugagccacauga

SEQ ID NO: 489301 - RNA, 25 nt, Human
uauuuguuaauuuuugcaacugagu

SEQ ID NO: 489302 - RNA, 19 nt, Human
ucaagagucagggcaguuu

SEQ ID NO: 489303 - RNA, 18 nt, Human
ucaccaggcugucaccua

SEQ ID NO: 489304 - RNA, 20 nt, Human
ucagaauacuucauauuacu

SEQ ID NO: 489305 - RNA, 24 nt, Human
ucagcaacugcacaaacuccuccc

SEQ ID NO: 489306 - RNA, 21 nt, Human
ucauacauuuauuugaguuuu

SEQ ID NO: 489307 - RNA, 24 nt, Human
ugacuaaacauaaggcauuaacac

SEQ ID NO: 489308 - RNA, 18 nt, Human
ugagaagccuacccauuu

SEQ ID NO: 489309 - RNA, 24 nt, Human
ugaugccacaggagaaaaugggau

SEQ ID NO: 489310 - RNA, 22 nt, Human
ugcagaaacuacaccaaggcug

SEQ ID NO: 489311 - RNA, 23 nt, Human
uggcauuuagcaugacuggcucc

SEQ ID NO: 489312 - RNA, 18 nt, Human
ugggaaaaacuguccaca

SEQ ID NO: 489313 - RNA, 21 nt, Human
ugggaaaaacuguccacagca

SEQ ID NO: 489314 - RNA, 18 nt, Human
ugggcagaauaaaggauc

SEQ ID NO: 489315 - RNA, 22 nt, Human
ugucagcaacugcacaaacucc

SEQ ID NO: 489316 - RNA, 21 nt, Human
uuaaagcagaaaggacuuucu

SEQ ID NO: 489317 - RNA, 19 nt, Human
uugugacaaucaggaggau

SEQ ID NO: 489318 - RNA, 22 nt, Human
uuugaaguaugauccauaggca

SEQ ID NO: 489319 - RNA, 22 nt, Human
uuuuaggaaaguuuugucuguu

SEQ ID NO: 489320 - RNA, 21 nt, Human
aaaaagaaaacacuuaaagaa

SEQ ID NO: 489321 - RNA, 18 nt, Human
aaacagacagugagaaca

SEQ ID NO: 489322 - RNA, 24 nt, Human
aaaugcagaaacuacaccagagcu

SEQ ID NO: 489323 - RNA, 21 nt, Human
aacuucacaaagguaucagcc

SEQ ID NO: 489324 - RNA, 23 nt, Human
aagaagaagcaauuuugaauggu

SEQ ID NO: 489325 - RNA, 24 nt, Human
aagaauuggcaauuuuucaaauaa

SEQ ID NO: 489326 - RNA, 24 nt, Human
acagagcgagauuccaucucaaaa

SEQ ID NO: 489327 - RNA, 20 nt, Human
accacagugaaaccccgucu

SEQ ID NO: 489328 - RNA, 24 nt, Human
accccgucucuacuaaaaauacaa

SEQ ID NO: 489329 - RNA, 24 nt, Human
acugcacuccagccugggcgacag

SEQ ID NO: 489330 - RNA, 26 nt, Human
acugcacuccagccugggcgacagag

SEQ ID NO: 489331 - RNA, 19 nt, Human
agaaaacacuuaaagaauu

SEQ ID NO: 489332 - RNA, 20 nt, Human
agaacuuugggaggcugagg

SEQ ID NO: 489333 - RNA, 23 nt, Human
agacagcagauucucacugaacu

SEQ ID NO: 489334 - RNA, 24 nt, Human
agagaccauaguacauuugaacaa

SEQ ID NO: 489335 - RNA, 24 nt, Human
agccugggcgacagagcgagauuc

SEQ ID NO: 489336 - RNA, 18 nt, Human
agccuugguaauauaacc

SEQ ID NO: 489337 - RNA, 19 nt, Human
agcugauugcaaaugcuuu

SEQ ID NO: 489338 - RNA, 24 nt, Human
aggaagaauaaaaacaacugucug

SEQ ID NO: 489339 - RNA, 18 nt, Human
aggcaggagaauggugug

SEQ ID NO: 489340 - RNA, 24 nt, Human
aggcaggagaauggugugaaccca

SEQ ID NO: 489341 - RNA, 27 nt, Human
aggcaggagaauggugugaacccagga

SEQ ID NO: 489342 - RNA, 20 nt, Human
aggcaggcggaccaugaagu

SEQ ID NO: 489343 - RNA, 24 nt, Human
aggcaggcggaccaugaagucagg

SEQ ID NO: 489344 - RNA, 24 nt, Human
aggcggagcuugcagugaguugag

SEQ ID NO: 489345 - RNA, 19 nt, Human
aggcugaggcaggagaaug

SEQ ID NO: 489346 - RNA, 20 nt, Human
aggcugaggcaggcggacca

SEQ ID NO: 489347 - RNA, 20 nt, Human
aggcugaggcaggcggacca

SEQ ID NO: 489348 - RNA, 24 nt, Human
agucaggagauugagaccacagug

SEQ ID NO: 489349 - RNA, 19 nt, Human
aguccaguggcgugaucuu

SEQ ID NO: 489350 - RNA, 23 nt, Human
aguccaguggcgugaucuuaaag

SEQ ID NO: 489351 - RNA, 24 nt, Human
aucgugccacugcacuccagccug

SEQ ID NO: 489352 - RNA, 18 nt, Human
auguuuuuuuccuucugu

SEQ ID NO: 489353 - RNA, 22 nt, Human
auguuuuuuuccuucuguguuu

SEQ ID NO: 489354 - RNA, 21 nt, Human
auuuuccauaaaucuugaaga

SEQ ID NO: 489355 - RNA, 28 nt, Human
caaauauaacaucccaaucaaagccuug

SEQ ID NO: 489356 - RNA, 24 nt, Human
cacaccuguaaucccagaacuuug

SEQ ID NO: 489357 - RNA, 18 nt, Human
cacagugaaaccccgucu

SEQ ID NO: 489358 - RNA, 19 nt, Human
cacagugaaaccccgucuc

SEQ ID NO: 489359 - RNA, 21 nt, Human
cacagugaaaccccgucucua

SEQ ID NO: 489360 - RNA, 23 nt, Human
caccuguaaucccagaacuuugg

SEQ ID NO: 489361 - RNA, 24 nt, Human
caccuguaaucccagaacuuuggg

SEQ ID NO: 489362 - RNA, 23 nt, Human
cacuccagccugggcgacagagc

SEQ ID NO: 489363 - RNA, 24 nt, Human
cacuccagccugggcgacagagcg

SEQ ID NO: 489364 - RNA, 23 nt, Human
cacuccguuaaucuaucauucuc

SEQ ID NO: 489365 - RNA, 19 nt, Human
cacugcacuccagccuggg

SEQ ID NO: 489366 - RNA, 20 nt, Human
cacugcacuccagccugggc

SEQ ID NO: 489367 - RNA, 22 nt, Human
cacugcacuccagccugggcga

SEQ ID NO: 489368 - RNA, 23 nt, Human
cacugcacuccagccugggcgac

SEQ ID NO: 489369 - RNA, 24 nt, Human
cacugcacuccagccugggcgaca

SEQ ID NO: 489370 - RNA, 24 nt, Human
cagaacuuugggaggcugaggcag

SEQ ID NO: 489371 - RNA, 26 nt, Human
cagaacuuugggaggcugaggcaggc

SEQ ID NO: 489372 - RNA, 21 nt, Human
cagcagauucucacugaacuu

SEQ ID NO: 489373 - RNA, 24 nt, Human
cagcuacucaggaggcugaggcag

SEQ ID NO: 489374 - RNA, 20 nt, Human
ccacugcacuccagccuggg

SEQ ID NO: 489375 - RNA, 20 nt, Human
ccacugcacuccagccuggg

SEQ ID NO: 489376 - RNA, 21 nt, Human
ccacugcacuccagccugggc

SEQ ID NO: 489377 - RNA, 21 nt, Human
ccacugcacuccagccugggc

SEQ ID NO: 489378 - RNA, 23 nt, Human
ccacugcacuccagccugggcga

SEQ ID NO: 489379 - RNA, 24 nt, Human
ccacugcacuccagccugggcgac

SEQ ID NO: 489380 - RNA, 24 nt, Human
ccaugaagucaggagauugagacc

SEQ ID NO: 489381 - RNA, 22 nt, Human
ccugggcgacagagcgagauuc

SEQ ID NO: 489382 - RNA, 19 nt, Human
ccuguagucccagcuacuc

SEQ ID NO: 489383 - RNA, 21 nt, Human
ccuguagucccagcuacucag

SEQ ID NO: 489384 - RNA, 24 nt, Human
cgccuguagucccagcuacucagg

SEQ ID NO: 489385 - RNA, 22 nt, Human
cucacaccuguaaucccagaac

SEQ ID NO: 489386 - RNA, 24 nt, Human
cucacaccuguaaucccagaacuu

SEQ ID NO: 489387 - RNA, 18 nt, Human
cugccugcguguucuccu

SEQ ID NO: 489388 - RNA, 19 nt, Human
cuugaaaugcagaaacuac

SEQ ID NO: 489389 - RNA, 24 nt, Human
cuugcagugaguugagaucgugcc

SEQ ID NO: 489390 - RNA, 22 nt, Human
gaaaaagaaaacacuuaaagaa

SEQ ID NO: 489391 - RNA, 23 nt, Human
gaaaaagaaaacacuuaaagaau

SEQ ID NO: 489392 - RNA, 26 nt, Human
gaaaaagaaaacacuuaaagaauugg

SEQ ID NO: 489393 - RNA, 24 nt, Human
gaagaauaaaaacaacugucugcc

SEQ ID NO: 489394 - RNA, 24 nt, Human
gcacuccagccugggcgacagagc

SEQ ID NO: 489395 - RNA, 22 nt, Human
gcaggagaauggugugaaccca

SEQ ID NO: 489396 - RNA, 24 nt, Human
gcaggcggaccaugaagucaggag

SEQ ID NO: 489397 - RNA, 22 nt, Human
gccacugcacuccagccugggc

SEQ ID NO: 489398 - RNA, 24 nt, Human
gccacugcacuccagccugggcga

SEQ ID NO: 489399 - RNA, 19 nt, Human
gcugggcgcgguggcucac

SEQ ID NO: 489400 - RNA, 24 nt, Human
ggagcuugcagugaguugagaucg

SEQ ID NO: 489401 - RNA, 23 nt, Human
ggcgcgguggcucacaccuguaa

SEQ ID NO: 489402 - RNA, 24 nt, Human
gggcguuguggcaggcgccuguag

SEQ ID NO: 489403 - RNA, 23 nt, Human
gguggcucacaccuguaauccca

SEQ ID NO: 489404 - RNA, 24 nt, Human
gguggcucacaccuguaaucccag

SEQ ID NO: 489405 - RNA, 18 nt, Human
guagggagcaaaaguaaa

SEQ ID NO: 489406 - RNA, 22 nt, Human
guggcaggcgccuguaguccca

SEQ ID NO: 489407 - RNA, 24 nt, Human
uaaaacagacagugagaacaagug

SEQ ID NO: 489408 - RNA, 20 nt, Human
uaaaagagaccauaguacau

SEQ ID NO: 489409 - RNA, 24 nt, Human
uaaagacagcagauucucacugaa

SEQ ID NO: 489410 - RNA, 25 nt, Human
uaaagaugcuguuacugucagccau

SEQ ID NO: 489411 - RNA, 21 nt, Human
uaagguauagauagcuuaaaa

SEQ ID NO: 489412 - RNA, 20 nt, Human
uacauuugaacaaagaguug

SEQ ID NO: 489413 - RNA, 23 nt, Human
uccagccugggcgacagagcgag

SEQ ID NO: 489414 - RNA, 24 nt, Human
uccagccugggcgacagagcgaga

SEQ ID NO: 489415 - RNA, 23 nt, Human
uccaucucaaaaaaaaaaaaaaa

SEQ ID NO: 489416 - RNA, 23 nt, Human
ucgugccacugcacuccagccug

SEQ ID NO: 489417 - RNA, 24 nt, Human
ucucuacuaaaaauacaaaaaauu

SEQ ID NO: 489418 - RNA, 24 nt, Human
ucuugaagaagaagcaauuuugaa

SEQ ID NO: 489419 - RNA, 24 nt, Human
ugaaaugcagaaacuacaccagag

SEQ ID NO: 489420 - RNA, 21 nt, Human
ugaagaagaagcaauuuugaa

SEQ ID NO: 489421 - RNA, 21 nt, Human
ugaauuaccauaaacauauga

SEQ ID NO: 489422 - RNA, 24 nt, Human
ugagaucgugccacugcacuccag

SEQ ID NO: 489423 - RNA, 22 nt, Human
ugaggaagaauaaaaacaacug

SEQ ID NO: 489424 - RNA, 23 nt, Human
ugaggcaggagaauggugugaac

SEQ ID NO: 489425 - RNA, 24 nt, Human
ugaggcaggagaauggugugaacc

SEQ ID NO: 489426 - RNA, 25 nt, Human
ugaggcaggagaauggugugaaccc

SEQ ID NO: 489427 - RNA, 24 nt, Human
ugaggcaggcggaccaugaaguca

SEQ ID NO: 489428 - RNA, 22 nt, Human
ugaguugagaucgugccacugc

SEQ ID NO: 489429 - RNA, 18 nt, Human
ugccugcguguucuccuc

SEQ ID NO: 489430 - RNA, 21 nt, Human
uggcucacaccuguaauccca

SEQ ID NO: 489431 - RNA, 22 nt, Human
uggcucacaccuguaaucccag

SEQ ID NO: 489432 - RNA, 20 nt, Human
ugggaggcugaggcaggcgg

SEQ ID NO: 489433 - RNA, 23 nt, Human
uggugggcaacuucacaaagguc

SEQ ID NO: 489434 - RNA, 24 nt, Human
uguggcaggcgccuguagucccag

SEQ ID NO: 489435 - RNA, 25 nt, Human
uuagccgggcguuguggcaggcgcc

SEQ ID NO: 489436 - RNA, 25 nt, Human
uuccaucucaaaaaaaaaaaaaaau

SEQ ID NO: 489437 - RNA, 22 nt, Human
uugcagugaguugagaucgugc

SEQ ID NO: 489438 - RNA, 18 nt, Human
uuuuuuuuuuuuuuuuug

SEQ ID NO: 489439 - RNA, 24 nt, Human
aaaccagauauucgaauuacaagg

SEQ ID NO: 489440 - RNA, 19 nt, Human
acccaggccucacagcccg

SEQ ID NO: 489441 - RNA, 19 nt, Human
accugcuccucuagcccgc

SEQ ID NO: 489442 - RNA, 19 nt, Human
agccacaagcucuaaaguc

SEQ ID NO: 489443 - RNA, 22 nt, Human
aggccucacagcccgcgaguca

SEQ ID NO: 489444 - RNA, 24 nt, Human
aggcggccuccacuccgagcggcc

SEQ ID NO: 489445 - RNA, 23 nt, Human
aucauuuaaaaccagauauucga

SEQ ID NO: 489446 - RNA, 21 nt, Human
caagcucuaaagucuggaaag

SEQ ID NO: 489447 - RNA, 22 nt, Human
cacagaacagguagaaaugaga

SEQ ID NO: 489448 - RNA, 27 nt, Human
caccuuuaacauucaagccacaagcuc

SEQ ID NO: 489449 - RNA, 19 nt, Human
cagaaaauagccuccaaug

SEQ ID NO: 489450 - RNA, 18 nt, Human
cagcccgcgagucagcga

SEQ ID NO: 489451 - RNA, 21 nt, Human
cauauaccuuaacauuugggg

SEQ ID NO: 489452 - RNA, 24 nt, Human
ccaaaaaaucuucacauguaccug

SEQ ID NO: 489453 - RNA, 19 nt, Human
ccaacacagaacagguaga

SEQ ID NO: 489454 - RNA, 20 nt, Human
cccccaggcggccuccacuc

SEQ ID NO: 489455 - RNA, 18 nt, Human
ccucuaucauuuaaaacc

SEQ ID NO: 489456 - RNA, 19 nt, Human
cgacgguuacgaaaccggc

SEQ ID NO: 489457 - RNA, 19 nt, Human
cuucacauguaccugcucc

SEQ ID NO: 489458 - RNA, 21 nt, Human
gcccgagccgacccaggccuc

SEQ ID NO: 489459 - RNA, 30 nt, Human
ucccuugccaacacagaacagguagaaauu

SEQ ID NO: 489460 - RNA, 19 nt, Human
uccgcccguuccgcagccg

SEQ ID NO: 489461 - RNA, 21 nt, Human
uccgcccguuccgcagccgcg

SEQ ID NO: 489462 - RNA, 22 nt, Human
ucuucacauguaccugcuccuc

SEQ ID NO: 489463 - RNA, 21 nt, Human
ugagagcagggugaucaaugg

SEQ ID NO: 489464 - RNA, 18 nt, Human
ugccaaaaaaucuucaca

SEQ ID NO: 489465 - RNA, 21 nt, Human
uuaacauuugggggauuuuga

SEQ ID NO: 489466 - RNA, 24 nt, Human
uucccacaaaaaccucuaucauuu

SEQ ID NO: 489467 - RNA, 19 nt, Human
uucgaauuacaaggcuaac

SEQ ID NO: 489468 - RNA, 24 nt, Human
uuuaaaaccagauauucgaauuac

SEQ ID NO: 489469 - RNA, 22 nt, Human
accccagagaaaagaccuacaa

SEQ ID NO: 489470 - RNA, 19 nt, Human
cagauuaccagaaggcaaa

SEQ ID NO: 489471 - RNA, 19 nt, Human
gaucuuccuuuucucgccc

SEQ ID NO: 489472 - RNA, 19 nt, Human
gggagugaaaaccuacaga

SEQ ID NO: 489473 - RNA, 22 nt, Human
uacagguacagacagguagggg

SEQ ID NO: 489474 - RNA, 18 nt, Human
uaggaaagggcucagaug

SEQ ID NO: 489475 - RNA, 22 nt, Human
uauugaaggauucuucuuccag

SEQ ID NO: 489476 - RNA, 18 nt, Human
ucucgcccugcucucaga

SEQ ID NO: 489477 - RNA, 19 nt, Human
ugccuggacuaggaaaggg

SEQ ID NO: 489478 - RNA, 21 nt, Human
uggagacuccacgggacugca

SEQ ID NO: 489479 - RNA, 18 nt, Human
aaaaggcaacaugaaaau

SEQ ID NO: 489480 - RNA, 24 nt, Human
aacacucuagcgaucccaauuccu

SEQ ID NO: 489481 - RNA, 28 nt, Human
aaggaaacacagugacauauuacaagau

SEQ ID NO: 489482 - RNA, 23 nt, Human
acaaaccugaguagucacuucca

SEQ ID NO: 489483 - RNA, 22 nt, Human
acagggcacuccccaguucucc

SEQ ID NO: 489484 - RNA, 18 nt, Human
accaccaacaaaaauuau

SEQ ID NO: 489485 - RNA, 21 nt, Human
acccucaucuccggcucccau

SEQ ID NO: 489486 - RNA, 23 nt, Human
agggcgggcgccgggcggggggc

SEQ ID NO: 489487 - RNA, 22 nt, Human
auguacaauacauucaccacca

SEQ ID NO: 489488 - RNA, 23 nt, Human
caaaaauuauuuuaaaaggcaac

SEQ ID NO: 489489 - RNA, 22 nt, Human
caaauauauaccugaguuuagc

SEQ ID NO: 489490 - RNA, 28 nt, Human
caacaugaaaauucuguaaacuggaccc

SEQ ID NO: 489491 - RNA, 24 nt, Human
cacagauacaacagauaauuccag

SEQ ID NO: 489492 - RNA, 21 nt, Human
caccagcaugagagagcagcc

SEQ ID NO: 489493 - RNA, 21 nt, Human
cacccacccuucccacuuuau

SEQ ID NO: 489494 - RNA, 22 nt, Human
cacuaaggaaacacagugacau

SEQ ID NO: 489495 - RNA, 25 nt, Human
cagccuccgcgcgguccucggcggg

SEQ ID NO: 489496 - RNA, 22 nt, Human
cagccugucuuccgggcugaag

SEQ ID NO: 489497 - RNA, 21 nt, Human
caguucuccacauuccagucu

SEQ ID NO: 489498 - RNA, 19 nt, Human
cccaccaguuaggaccccc

SEQ ID NO: 489499 - RNA, 19 nt, Human
cccacgaggagggggcggg

SEQ ID NO: 489500 - RNA, 18 nt, Human
ccccacccacccuuccca

SEQ ID NO: 489501 - RNA, 21 nt, Human
cccccauuucuuccgcauccc

SEQ ID NO: 489502 - RNA, 20 nt, Human
cccgcgccacaacaacaacc

SEQ ID NO: 489503 - RNA, 23 nt, Human
ccgccgcggcagcgccgcagccu

SEQ ID NO: 489504 - RNA, 20 nt, Human
ccgcucggcgagugcaggag

SEQ ID NO: 489505 - RNA, 20 nt, Human
cgaccugggacucccgccgc

SEQ ID NO: 489506 - RNA, 20 nt, Human
cgccgcggcagcgccgcagc

SEQ ID NO: 489507 - RNA, 21 nt, Human
cgccgcggcagcgccgcagcc

SEQ ID NO: 489508 - RNA, 21 nt, Human
cgcugcccgcgcucugcccgc

SEQ ID NO: 489509 - RNA, 20 nt, Human
cggcggccgcccccaguccc

SEQ ID NO: 489510 - RNA, 20 nt, Human
cuaaggaaacacagugacau

SEQ ID NO: 489511 - RNA, 20 nt, Human
cucaggauuuggaaaaguca

SEQ ID NO: 489512 - RNA, 22 nt, Human
cucaggauuuggaaaagucauc

SEQ ID NO: 489513 - RNA, 23 nt, Human
cuccucccgcugcugccgccgcu

SEQ ID NO: 489514 - RNA, 24 nt, Human
cucgcugcccgcgcucugcccgcc

SEQ ID NO: 489515 - RNA, 19 nt, Human
cugaaggcuggcuggccac

SEQ ID NO: 489516 - RNA, 22 nt, Human
cugcccgcgccacaacaacaac

SEQ ID NO: 489517 - RNA, 20 nt, Human
cugcggcggcggccgccccc

SEQ ID NO: 489518 - RNA, 20 nt, Human
cuggcuggccacuaaggaaa

SEQ ID NO: 489519 - RNA, 23 nt, Human
gacccccauuucuuccgcauccc

SEQ ID NO: 489520 - RNA, 20 nt, Human
gagaaacagauggggcuagg

SEQ ID NO: 489521 - RNA, 19 nt, Human
gagcagccugucuuccggg

SEQ ID NO: 489522 - RNA, 24 nt, Human
gagcagucugccuccaauggagac

SEQ ID NO: 489523 - RNA, 20 nt, Human
gaggagggggcggggcugcc

SEQ ID NO: 489524 - RNA, 20 nt, Human
gaguguccuuuuagggcccc

SEQ ID NO: 489525 - RNA, 20 nt, Human
gaucccuggccgaggaccuu

SEQ ID NO: 489526 - RNA, 20 nt, Human
gaugaggacgauucaucuuc

SEQ ID NO: 489527 - RNA, 24 nt, Human
gccccucgcugcccgcgcucugcc

SEQ ID NO: 489528 - RNA, 18 nt, Human
gcggggcugcccgcgcca

SEQ ID NO: 489529 - RNA, 22 nt, Human
gcggggggcggcggcgcggggg

SEQ ID NO: 489530 - RNA, 23 nt, Human
gcucaucaaaguuuaaaagcacc

SEQ ID NO: 489531 - RNA, 18 nt, Human
gcugcugccgccgcucgg

SEQ ID NO: 489532 - RNA, 22 nt, Human
ggaaggaaggaaggccuuuagc

SEQ ID NO: 489533 - RNA, 20 nt, Human
ggagaaacagauggggcuag

SEQ ID NO: 489534 - RNA, 18 nt, Human
gggcgccgggcggggggc

SEQ ID NO: 489535 - RNA, 22 nt, Human
gggcgccgggcggggggcggcg

SEQ ID NO: 489536 - RNA, 25 nt, Human
gggcggggggcggcggcgcgggggc

SEQ ID NO: 489537 - RNA, 25 nt, Human
ggggacagguguucucucccccugg

SEQ ID NO: 489538 - RNA, 25 nt, Human
ggggcggaggggccggacgcggggc

SEQ ID NO: 489539 - RNA, 19 nt, Human
gguggcaaaaucaggaagg

SEQ ID NO: 489540 - RNA, 23 nt, Human
gguguucucucucaggcugacug

SEQ ID NO: 489541 - RNA, 23 nt, Human
gugaagggguggagcaggugaug

SEQ ID NO: 489542 - RNA, 22 nt, Human
uaaaaugguuuccuaucacaga

SEQ ID NO: 489543 - RNA, 19 nt, Human
uacaaaccugaguagucac

SEQ ID NO: 489544 - RNA, 18 nt, Human
uacaauacauucaccacc

SEQ ID NO: 489545 - RNA, 24 nt, Human
uacaauacauucaccaccaacaaa

SEQ ID NO: 489546 - RNA, 24 nt, Human
uagggcugguggcaaaaucaggaa

SEQ ID NO: 489547 - RNA, 25 nt, Human
uauaaucgaguccccgccggagaaa

SEQ ID NO: 489548 - RNA, 18 nt, Human
uauacaaaccugaguagu

SEQ ID NO: 489549 - RNA, 21 nt, Human
uauacccccucccccaaguuu

SEQ ID NO: 489550 - RNA, 18 nt, Human
uauacugaaauauuccua

SEQ ID NO: 489551 - RNA, 21 nt, Human
uauuuuaaaucaccaugacug

SEQ ID NO: 489552 - RNA, 24 nt, Human
uccaagaacuuguucuugauagcu

SEQ ID NO: 489553 - RNA, 23 nt, Human
uccccacccacccuucccacuuu

SEQ ID NO: 489554 - RNA, 25 nt, Human
ucccgcggcugcggcggcggccgcc

SEQ ID NO: 489555 - RNA, 21 nt, Human
ucccgcugcugccgccgcucg

SEQ ID NO: 489556 - RNA, 19 nt, Human
uccgcauccccacccaccc

SEQ ID NO: 489557 - RNA, 19 nt, Human
uccgcauccccacccaccc

SEQ ID NO: 489558 - RNA, 22 nt, Human
uccgcauccccacccacccuuc

SEQ ID NO: 489559 - RNA, 21 nt, Human
uccucccgcugcugccgccgc

SEQ ID NO: 489560 - RNA, 21 nt, Human
ucucaggauuuggaaaaguca

SEQ ID NO: 489561 - RNA, 18 nt, Human
ucucucaggcugacugga

SEQ ID NO: 489562 - RNA, 23 nt, Human
ucuugaguauacccccuccccca

SEQ ID NO: 489563 - RNA, 20 nt, Human
ugaaacacucuagcgauccc

SEQ ID NO: 489564 - RNA, 24 nt, Human
ugcaggagccgagggcgggcgccg

SEQ ID NO: 489565 - RNA, 21 nt, Human
ugccuucuagaucacaguccu

SEQ ID NO: 489566 - RNA, 22 nt, Human
uggcaaaaucaggaagggacac

SEQ ID NO: 489567 - RNA, 27 nt, Human
ugggccaccagcaugagagagcagccu

SEQ ID NO: 489568 - RNA, 18 nt, Human
uggggcuaggggcggagg

SEQ ID NO: 489569 - RNA, 22 nt, Human
uggggcuaggggcggaggggcc

SEQ ID NO: 489570 - RNA, 19 nt, Human
uuagggcccgugacuggcu

SEQ ID NO: 489571 - RNA, 21 nt, Human
uugcuuggggcucauuuccuc

SEQ ID NO: 489572 - RNA, 19 nt, Human
uuuccauugcuuggggcuc

SEQ ID NO: 489573 - RNA, 20 nt, Human
aagcccugaccugagcccag

SEQ ID NO: 489574 - RNA, 21 nt, Human
aagugaccaguaaugccacac

SEQ ID NO: 489575 - RNA, 21 nt, Human
acccccucaccuccaccgcac

SEQ ID NO: 489576 - RNA, 22 nt, Human
acccccucaccuccaccgcacu

SEQ ID NO: 489577 - RNA, 21 nt, Human
acugaaaugagaaggacacug

SEQ ID NO: 489578 - RNA, 22 nt, Human
aggcacgugggaacugggccca

SEQ ID NO: 489579 - RNA, 23 nt, Human
aggccagagcccagccaauggga

SEQ ID NO: 489580 - RNA, 25 nt, Human
aggguggcaagggaaccaagcccug

SEQ ID NO: 489581 - RNA, 23 nt, Human
auggggcagcaagaaggguggca

SEQ ID NO: 489582 - RNA, 24 nt, Human
auggggcagcaagaaggguggcaa

SEQ ID NO: 489583 - RNA, 19 nt, Human
caaaggcucugcacagaca

SEQ ID NO: 489584 - RNA, 20 nt, Human
caaaggcucugcacagacaa

SEQ ID NO: 489585 - RNA, 20 nt, Human
caagcccugaccugagccca

SEQ ID NO: 489586 - RNA, 22 nt, Human
caagugaccaguaaugccacac

SEQ ID NO: 489587 - RNA, 26 nt, Human
cacagacauccacaguauuccacacu

SEQ ID NO: 489588 - RNA, 18 nt, Human
cagacauccacaguauuc

SEQ ID NO: 489589 - RNA, 25 nt, Human
ccaagcccugaccugagcccaguga

SEQ ID NO: 489590 - RNA, 18 nt, Human
cccacagguccaggcuca

SEQ ID NO: 489591 - RNA, 22 nt, Human
cucacccccucaccuccaccgc

SEQ ID NO: 489592 - RNA, 20 nt, Human
cugagcccagugaucaggcc

SEQ ID NO: 489593 - RNA, 18 nt, Human
cugggcccagaaaauucc

SEQ ID NO: 489594 - RNA, 23 nt, Human
gaacugggcccagaaaauuccaa

SEQ ID NO: 489595 - RNA, 23 nt, Human
gaccugagcccagugaucaggcc

SEQ ID NO: 489596 - RNA, 18 nt, Human
gggcccagaaaauuccaa

SEQ ID NO: 489597 - RNA, 19 nt, Human
gguccaggcucacccccuc

SEQ ID NO: 489598 - RNA, 22 nt, Human
uaaaaaaaaagccccacaucuc

SEQ ID NO: 489599 - RNA, 25 nt, Human
uaaaaaguagcaucugguguuaaga

SEQ ID NO: 489600 - RNA, 20 nt, Human
uacaaaaugcuacccagcag

SEQ ID NO: 489601 - RNA, 23 nt, Human
uacccagcagggaaaaagaguca

SEQ ID NO: 489602 - RNA, 21 nt, Human
uauuccacacugccuccccca

SEQ ID NO: 489603 - RNA, 24 nt, Human
ucacccccucaccuccaccgcacu

SEQ ID NO: 489604 - RNA, 18 nt, Human
ucaggccagagcccagcc

SEQ ID NO: 489605 - RNA, 22 nt, Human
uccacaguauuccacacugccu

SEQ ID NO: 489606 - RNA, 23 nt, Human
uccaggcucacccccucaccucc

SEQ ID NO: 489607 - RNA, 21 nt, Human
ucuccgggcaauaaacuacaa

SEQ ID NO: 489608 - RNA, 19 nt, Human
ugagaaggacacugaggca

SEQ ID NO: 489609 - RNA, 18 nt, Human
ugaggcacacaggggaag

SEQ ID NO: 489610 - RNA, 19 nt, Human
ugagguuagacugccacga

SEQ ID NO: 489611 - RNA, 23 nt, Human
ugagguuagacugccacgaaagg

SEQ ID NO: 489612 - RNA, 22 nt, Human
ugcuacccagcagggaaaaaga

SEQ ID NO: 489613 - RNA, 21 nt, Human
uggcaagggaaccaagcccug

SEQ ID NO: 489614 - RNA, 21 nt, Human
ugggcccagaaaauuccaaaa

SEQ ID NO: 489615 - RNA, 21 nt, Human
uggggcagcaagaaggguggc

SEQ ID NO: 489616 - RNA, 24 nt, Human
uuaugauuauuuuauuuaaaaaaa

SEQ ID NO: 489617 - RNA, 26 nt, Human
aaaacaacacuacacacacagagaca

SEQ ID NO: 489618 - RNA, 22 nt, Human
aaaauaugucacucaaagccaa

SEQ ID NO: 489619 - RNA, 20 nt, Human
aaagagaaggaaaaaaguga

SEQ ID NO: 489620 - RNA, 21 nt, Human
aaccagaccagaggugggagg

SEQ ID NO: 489621 - RNA, 19 nt, Human
aacccaaaaacaaggaccc

SEQ ID NO: 489622 - RNA, 20 nt, Human
aagaaaaacacagcagagga

SEQ ID NO: 489623 - RNA, 18 nt, Human
aagagccacaaacucaaa

SEQ ID NO: 489624 - RNA, 21 nt, Human
aagagggggcuucaaguggga

SEQ ID NO: 489625 - RNA, 19 nt, Human
aagcaagaagcagagguac

SEQ ID NO: 489626 - RNA, 23 nt, Human
aagcccccaaaacaguuguaaga

SEQ ID NO: 489627 - RNA, 22 nt, Human
acacacagagacauacacuuug

SEQ ID NO: 489628 - RNA, 24 nt, Human
acagugcccugccuuggcugucag

SEQ ID NO: 489629 - RNA, 22 nt, Human
accaaaaaccuaacaaacagua

SEQ ID NO: 489630 - RNA, 22 nt, Human
accacagccuaaaagaggcugg

SEQ ID NO: 489631 - RNA, 22 nt, Human
acuacacacacagagacauaca

SEQ ID NO: 489632 - RNA, 23 nt, Human
acuacacacacagagacauacac

SEQ ID NO: 489633 - RNA, 20 nt, Human
agaaaaacacagcagaggaa

SEQ ID NO: 489634 - RNA, 19 nt, Human
agaaggaaaaaagugauaa

SEQ ID NO: 489635 - RNA, 25 nt, Human
agacccuguaauaacacuggcacca

SEQ ID NO: 489636 - RNA, 22 nt, Human
agagagaggccaagccaauggc

SEQ ID NO: 489637 - RNA, 24 nt, Human
agaggaagggacugacccucugag

SEQ ID NO: 489638 - RNA, 20 nt, Human
agagggaaaguucugcagcc

SEQ ID NO: 489639 - RNA, 23 nt, Human
agagggaggaacagagagaggcc

SEQ ID NO: 489640 - RNA, 24 nt, Human
agcagagaaacacagcaaagcugg

SEQ ID NO: 489641 - RNA, 21 nt, Human
agcaggagauggccauccaaa

SEQ ID NO: 489642 - RNA, 20 nt, Human
agccaauggcugauacuccg

SEQ ID NO: 489643 - RNA, 20 nt, Human
agccacaaacucaaaagaau

SEQ ID NO: 489644 - RNA, 21 nt, Human
agccaguggccauggcaaaug

SEQ ID NO: 489645 - RNA, 18 nt, Human
agcccaggcacccaagcc

SEQ ID NO: 489646 - RNA, 19 nt, Human
agccuaaaagaggcuggca

SEQ ID NO: 489647 - RNA, 21 nt, Human
agcuauuacucuaagcccaga

SEQ ID NO: 489648 - RNA, 21 nt, Human
aggaagccccugacuugcuga

SEQ ID NO: 489649 - RNA, 18 nt, Human
aggaaggacaggugggga

SEQ ID NO: 489650 - RNA, 22 nt, Human
aggacacccuggcccuuagccc

SEQ ID NO: 489651 - RNA, 21 nt, Human
aggagaggagucagugggggc

SEQ ID NO: 489652 - RNA, 23 nt, Human
aggauaggagaagagaggagagg

SEQ ID NO: 489653 - RNA, 21 nt, Human
aggcagaaaagaggagggugg

SEQ ID NO: 489654 - RNA, 24 nt, Human
agggcuuucaagagccacaaacuc

SEQ ID NO: 489655 - RNA, 23 nt, Human
aggggaguaccugggcagcuccc

SEQ ID NO: 489656 - RNA, 21 nt, Human
agggggcagggccuccccaga

SEQ ID NO: 489657 - RNA, 24 nt, Human
aggggucaucgugacuggggcagg

SEQ ID NO: 489658 - RNA, 22 nt, Human
agguagaagacaaggggguugg

SEQ ID NO: 489659 - RNA, 18 nt, Human
augcucacucacccaaga

SEQ ID NO: 489660 - RNA, 22 nt, Human
caaaacaguuguaagagggggc

SEQ ID NO: 489661 - RNA, 22 nt, Human
caaagggccacaggguggacac

SEQ ID NO: 489662 - RNA, 23 nt, Human
caacacuacacacacagagacau

SEQ ID NO: 489663 - RNA, 19 nt, Human
caagaaaaacacagcagag

SEQ ID NO: 489664 - RNA, 20 nt, Human
caagaaaaacacagcagagg

SEQ ID NO: 489665 - RNA, 25 nt, Human
caagcccccaaaacaguuguaagag

SEQ ID NO: 489666 - RNA, 21 nt, Human
caaguuucacccccaccacau

SEQ ID NO: 489667 - RNA, 23 nt, Human
caauagaaggggggcagaucagg

SEQ ID NO: 489668 - RNA, 23 nt, Human
cacaccgacuguaagugcacagu

SEQ ID NO: 489669 - RNA, 21 nt, Human
caccaaaaaccuaacaaacag

SEQ ID NO: 489670 - RNA, 23 nt, Human
caccaaaccccagcuggagccag

SEQ ID NO: 489671 - RNA, 25 nt, Human
caccaaagcuauuacucuaagccca

SEQ ID NO: 489672 - RNA, 24 nt, Human
caccaccucacuuucugaucuaca

SEQ ID NO: 489673 - RNA, 24 nt, Human
cacccagcccaggcacccaagccc

SEQ ID NO: 489674 - RNA, 20 nt, Human
caccguuaacugcuggucuc

SEQ ID NO: 489675 - RNA, 18 nt, Human
cacuucccuccuucuucc

SEQ ID NO: 489676 - RNA, 21 nt, Human
cagaacuagaauccacaucuu

SEQ ID NO: 489677 - RNA, 23 nt, Human
cagagauuuuacagucagggagg

SEQ ID NO: 489678 - RNA, 24 nt, Human
cagcuagcucucuuucacaaaacc

SEQ ID NO: 489679 - RNA, 25 nt, Human
cagcuguucccuccccgccaacccc

SEQ ID NO: 489680 - RNA, 23 nt, Human
caggggaagaaggcagaaaaaaa

SEQ ID NO: 489681 - RNA, 21 nt, Human
cagguccacggagaaaucuca

SEQ ID NO: 489682 - RNA, 19 nt, Human
cagugcccugccuuggcug

SEQ ID NO: 489683 - RNA, 21 nt, Human
cauccaggaaacccaccaaag

SEQ ID NO: 489684 - RNA, 21 nt, Human
ccaaaaacaaggacccgugcc

SEQ ID NO: 489685 - RNA, 23 nt, Human
ccaaagcuauuacucuaagccca

SEQ ID NO: 489686 - RNA, 19 nt, Human
ccacacccagcccaggcac

SEQ ID NO: 489687 - RNA, 22 nt, Human
ccaccaaaaaccuaacaaacag

SEQ ID NO: 489688 - RNA, 18 nt, Human
ccaccucacuuucugauc

SEQ ID NO: 489689 - RNA, 23 nt, Human
ccagaauuggccaaguugccauc

SEQ ID NO: 489690 - RNA, 20 nt, Human
ccagaggugggaggucacca

SEQ ID NO: 489691 - RNA, 22 nt, Human
ccagcccaggcacccaagcccu

SEQ ID NO: 489692 - RNA, 19 nt, Human
ccagcuagcucucuuucac

SEQ ID NO: 489693 - RNA, 19 nt, Human
ccaggcccugccccacacc

SEQ ID NO: 489694 - RNA, 21 nt, Human
ccaggcccugccccacaccca

SEQ ID NO: 489695 - RNA, 19 nt, Human
ccaggcucuaaccgccagc

SEQ ID NO: 489696 - RNA, 22 nt, Human
cccaaaaacaaggacccgugcc

SEQ ID NO: 489697 - RNA, 24 nt, Human
cccaacuucacauccauccaggaa

SEQ ID NO: 489698 - RNA, 18 nt, Human
cccacacccagcccaggc

SEQ ID NO: 489699 - RNA, 23 nt, Human
cccacacccagcccaggcaccca

SEQ ID NO: 489700 - RNA, 24 nt, Human
cccagaaccuugaguacaaucaaa

SEQ ID NO: 489701 - RNA, 20 nt, Human
ccccacacccagcccaggca

SEQ ID NO: 489702 - RNA, 24 nt, Human
ccccacacccagcccaggcacccc

SEQ ID NO: 489703 - RNA, 23 nt, Human
ccccgccaaccccgggcgggcga

SEQ ID NO: 489704 - RNA, 19 nt, Human
cccugaaaaggguuaccuc

SEQ ID NO: 489705 - RNA, 20 nt, Human
cccugccccacacccagccc

SEQ ID NO: 489706 - RNA, 24 nt, Human
ccgccuccccagcaguggggacuc

SEQ ID NO: 489707 - RNA, 19 nt, Human
ccggccuucucugcugggg

SEQ ID NO: 489708 - RNA, 20 nt, Human
ccggccuucucugcuggggc

SEQ ID NO: 489709 - RNA, 23 nt, Human
ccucccaccaaaaaccuaacaaa

SEQ ID NO: 489710 - RNA, 21 nt, Human
ccuccccagcaguggggacuc

SEQ ID NO: 489711 - RNA, 21 nt, Human
ccuccggccuucucugcuggg

SEQ ID NO: 489712 - RNA, 21 nt, Human
ccucugagcacacagugguug

SEQ ID NO: 489713 - RNA, 22 nt, Human
ccugagcugagaagagaggagc

SEQ ID NO: 489714 - RNA, 18 nt, Human
ccuucuuccaggcucuaa

SEQ ID NO: 489715 - RNA, 20 nt, Human
cgagcagcuguugguaccca

SEQ ID NO: 489716 - RNA, 21 nt, Human
cgccaaccccgggcgggcgag

SEQ ID NO: 489717 - RNA, 18 nt, Human
cuaagcccagauccgacc

SEQ ID NO: 489718 - RNA, 25 nt, Human
cucaaagccaaugagugacagaauc

SEQ ID NO: 489719 - RNA, 19 nt, Human
cucacuuucugaucuacac

SEQ ID NO: 489720 - RNA, 23 nt, Human
cuucaaccuuagagaucacucau

SEQ ID NO: 489721 - RNA, 22 nt, Human
cuuccaggcucuaaccgccagc

SEQ ID NO: 489722 - RNA, 25 nt, Human
cuucugcuccaagcccccaaaacag

SEQ ID NO: 489723 - RNA, 22 nt, Human
gaagcacagauugugcauggag

SEQ ID NO: 489724 - RNA, 22 nt, Human
gaagcuuuaggggucaucguga

SEQ ID NO: 489725 - RNA, 23 nt, Human
gacaauggccacuaaccacagcc

SEQ ID NO: 489726 - RNA, 22 nt, Human
gaggaggcucaagagaacucug

SEQ ID NO: 489727 - RNA, 18 nt, Human
gaguauuuccuggccuug

SEQ ID NO: 489728 - RNA, 20 nt, Human
gcaaagcaagaagcagaggu

SEQ ID NO: 489729 - RNA, 23 nt, Human
gcaacaaaaguugaaagcacgga

SEQ ID NO: 489730 - RNA, 21 nt, Human
gcagaaaagaggaggguggug

SEQ ID NO: 489731 - RNA, 24 nt, Human
gcaugggacaauggccacuaacca

SEQ ID NO: 489732 - RNA, 23 nt, Human
gccccacacccagcccaggcacc

SEQ ID NO: 489733 - RNA, 19 nt, Human
gccuuggcccuagugagac

SEQ ID NO: 489734 - RNA, 21 nt, Human
gccuuggcccuagugagacuc

SEQ ID NO: 489735 - RNA, 24 nt, Human
gccuuguuagcugcuguccuccug

SEQ ID NO: 489736 - RNA, 24 nt, Human
gcuccaagcccccaaaacaguugu

SEQ ID NO: 489737 - RNA, 20 nt, Human
gcuggggcuucacacaccca

SEQ ID NO: 489738 - RNA, 24 nt, Human
gcugugccaggcccugccccacac

SEQ ID NO: 489739 - RNA, 21 nt, Human
gcuucuugacauauccaggga

SEQ ID NO: 489740 - RNA, 21 nt, Human
ggaaaguggguucugggucaa

SEQ ID NO: 489741 - RNA, 20 nt, Human
ggaaauaaaaauaugucacu

SEQ ID NO: 489742 - RNA, 22 nt, Human
ggacucaagaaaaacacagcag

SEQ ID NO: 489743 - RNA, 21 nt, Human
ggaggaacagagagaggccaa

SEQ ID NO: 489744 - RNA, 20 nt, Human
ggaguguaaacauuuucccc

SEQ ID NO: 489745 - RNA, 18 nt, Human
ggcaggggaagaaggcag

SEQ ID NO: 489746 - RNA, 21 nt, Human
ggccacuaaccacagccuaaa

SEQ ID NO: 489747 - RNA, 18 nt, Human
ggcccaugggaggcccaa

SEQ ID NO: 489748 - RNA, 20 nt, Human
ggccgaggggagccggggcc

SEQ ID NO: 489749 - RNA, 22 nt, Human
ggcgggggcuuggccugggugc

SEQ ID NO: 489750 - RNA, 21 nt, Human
ggcuuggccugggugcugagu

SEQ ID NO: 489751 - RNA, 20 nt, Human
gggaggucaccaccucacuc

SEQ ID NO: 489752 - RNA, 19 nt, Human
gggcaaaggaagcuuuagg

SEQ ID NO: 489753 - RNA, 22 nt, Human
gggcagggccuccccagaucuc

SEQ ID NO: 489754 - RNA, 18 nt, Human
gggcuucacacacccagu

SEQ ID NO: 489755 - RNA, 22 nt, Human
ggggaagugagugcaaggacuc

SEQ ID NO: 489756 - RNA, 20 nt, Human
ggggcucuggggccgcccag

SEQ ID NO: 489757 - RNA, 21 nt, Human
ggucaucgugacuggggcagg

SEQ ID NO: 489758 - RNA, 24 nt, Human
ggugacuggggcugaacugggggc

SEQ ID NO: 489759 - RNA, 21 nt, Human
guacagagcagggaauguucu

SEQ ID NO: 489760 - RNA, 23 nt, Human
guaccugggcagcucccaggggc

SEQ ID NO: 489761 - RNA, 19 nt, Human
gucaagccuucugccccuc

SEQ ID NO: 489762 - RNA, 24 nt, Human
gugggcaaagcaagaagcagaggu

SEQ ID NO: 489763 - RNA, 23 nt, Human
uaaaaauaugucacucaaagcca

SEQ ID NO: 489764 - RNA, 18 nt, Human
uaaccagaccagaggugg

SEQ ID NO: 489765 - RNA, 25 nt, Human
uaagugugaaauccagccagcuauu

SEQ ID NO: 489766 - RNA, 21 nt, Human
uacacuacauaaaacuuccca

SEQ ID NO: 489767 - RNA, 20 nt, Human
uacccacccagggcccaggc

SEQ ID NO: 489768 - RNA, 23 nt, Human
uagaaggggggcagaucaggggg

SEQ ID NO: 489769 - RNA, 20 nt, Human
uauugaggaagauccugggu

SEQ ID NO: 489770 - RNA, 21 nt, Human
ucaacccaaaaacaaggaccc

SEQ ID NO: 489771 - RNA, 21 nt, Human
ucaaugagaggaagagggaaa

SEQ ID NO: 489772 - RNA, 20 nt, Human
ucacagccucccaccaaaaa

SEQ ID NO: 489773 - RNA, 19 nt, Human
ucacugagauuagguagca

SEQ ID NO: 489774 - RNA, 21 nt, Human
uccauccaggaaacccaccaa

SEQ ID NO: 489775 - RNA, 18 nt, Human
ucccuccccgccaacccc

SEQ ID NO: 489776 - RNA, 24 nt, Human
ucccugagcugagaagagaggagc

SEQ ID NO: 489777 - RNA, 25 nt, Human
uccgcagacccuguaauaacacugg

SEQ ID NO: 489778 - RNA, 20 nt, Human
ucucgagauucugagcccag

SEQ ID NO: 489779 - RNA, 21 nt, Human
ucugcagccugccuuggcccc

SEQ ID NO: 489780 - RNA, 24 nt, Human
ucugcagccugccuuggcccuagu

SEQ ID NO: 489781 - RNA, 19 nt, Human
ucugcagcugugccaggcc

SEQ ID NO: 489782 - RNA, 21 nt, Human
ugaaagcacggagguagaaau

SEQ ID NO: 489783 - RNA, 23 nt, Human
ugaaagcacggagguagaaaugc

SEQ ID NO: 489784 - RNA, 22 nt, Human
ugacagaagguagaagacaagg

SEQ ID NO: 489785 - RNA, 23 nt, Human
ugagaaaacaggcccaggaaaua

SEQ ID NO: 489786 - RNA, 24 nt, Human
ugagagcaugaggaggcucaagag

SEQ ID NO: 489787 - RNA, 26 nt, Human
ugagcacacagugguugacccacaug

SEQ ID NO: 489788 - RNA, 23 nt, Human
ugaggaggcucaagagaacucug

SEQ ID NO: 489789 - RNA, 18 nt, Human
ugagggacuggaagcaca

SEQ ID NO: 489790 - RNA, 20 nt, Human
ugaggguggagggaagugag

SEQ ID NO: 489791 - RNA, 25 nt, Human
ugaggguggagggaagugaguauuu

SEQ ID NO: 489792 - RNA, 19 nt, Human
ugcagaaggacacccuggc

SEQ ID NO: 489793 - RNA, 19 nt, Human
uggaagcacagauugugca

SEQ ID NO: 489794 - RNA, 20 nt, Human
uggaagcacagauugugcau

SEQ ID NO: 489795 - RNA, 24 nt, Human
ugggaggcgggggcuuggccuggg

SEQ ID NO: 489796 - RNA, 24 nt, Human
ugggaggucaccaccucacuuucu

SEQ ID NO: 489797 - RNA, 18 nt, Human
uggggacuaacagagagg

SEQ ID NO: 489798 - RNA, 22 nt, Human
uggggacucucaacccaaaaac

SEQ ID NO: 489799 - RNA, 26 nt, Human
uggggacucucaacccaaaaagggag

SEQ ID NO: 489800 - RNA, 24 nt, Human
uguaauaacacuggcaccaaaccc

SEQ ID NO: 489801 - RNA, 23 nt, Human
uguugguacccacccagggccca

SEQ ID NO: 489802 - RNA, 24 nt, Human
uuaggggucaucgugacuggggca

SEQ ID NO: 489803 - RNA, 21 nt, Human
uuccuagaggaaggacaggug

SEQ ID NO: 489804 - RNA, 21 nt, Human
uucugaucuacacuuccuaga

SEQ ID NO: 489805 - RNA, 23 nt, Human
uuuauuuuuaaaaagagaaggaa

SEQ ID NO: 489806 - RNA, 19 nt, Human
uuucaaggcaugggacaau

SEQ ID NO: 489807 - RNA, 18 nt, Human
uuucacagucacugagau

SEQ ID NO: 489808 - RNA, 23 nt, Human
uuuuugcaagcagcaucagugca

SEQ ID NO: 489809 - RNA, 24 nt, Human
aaacggaagccaccacaucuucuc

SEQ ID NO: 489810 - RNA, 21 nt, Human
aagaacacaggggaggaagac

SEQ ID NO: 489811 - RNA, 22 nt, Human
aagaacacaggggaggaagaca

SEQ ID NO: 489812 - RNA, 19 nt, Human
aagccacugaaggguuuag

SEQ ID NO: 489813 - RNA, 21 nt, Human
aagcgcagucucggcuuccgu

SEQ ID NO: 489814 - RNA, 21 nt, Human
aaggaccaaagcagaccugca

SEQ ID NO: 489815 - RNA, 22 nt, Human
aagggaaccgggaagccacuga

SEQ ID NO: 489816 - RNA, 23 nt, Human
aaggggccgcggcugggacuggg

SEQ ID NO: 489817 - RNA, 20 nt, Human
acacacaagagcaaaacaca

SEQ ID NO: 489818 - RNA, 23 nt, Human
acagcauccaccuccccaauccu

SEQ ID NO: 489819 - RNA, 24 nt, Human
acaggggaggaagacaucucugga

SEQ ID NO: 489820 - RNA, 21 nt, Human
acccaaagggaaccgggaagc

SEQ ID NO: 489821 - RNA, 23 nt, Human
acccaaagggaaccgggaagcca

SEQ ID NO: 489822 - RNA, 18 nt, Human
agacagacggugaagcuc

SEQ ID NO: 489823 - RNA, 26 nt, Human
agacagacggugaagcucaugguuag

SEQ ID NO: 489824 - RNA, 22 nt, Human
agacagcauccaccuccccaau

SEQ ID NO: 489825 - RNA, 24 nt, Human
agcaauaggguauacugagaagga

SEQ ID NO: 489826 - RNA, 24 nt, Human
agcaugugagccggccgaguccca

SEQ ID NO: 489827 - RNA, 21 nt, Human
aggaagacaucucuggagaaa

SEQ ID NO: 489828 - RNA, 18 nt, Human
aggaagagacagacggug

SEQ ID NO: 489829 - RNA, 21 nt, Human
aggcacugggaaugcaaagcc

SEQ ID NO: 489830 - RNA, 19 nt, Human
aggcaggagcagugggagu

SEQ ID NO: 489831 - RNA, 21 nt, Human
aggcaggcaggggcccuaggg

SEQ ID NO: 489832 - RNA, 23 nt, Human
aggcaggcaggggcccuaggguc

SEQ ID NO: 489833 - RNA, 23 nt, Human
aggcagggagggaguugucugug

SEQ ID NO: 489834 - RNA, 23 nt, Human
aggcaggggcccuaggguccagc

SEQ ID NO: 489835 - RNA, 24 nt, Human
aggccacuggccaggucagcuugg

SEQ ID NO: 489836 - RNA, 18 nt, Human
auugccaggagagggcag

SEQ ID NO: 489837 - RNA, 26 nt, Human
caaacggaagccaccacaaucaacgg

SEQ ID NO: 489838 - RNA, 18 nt, Human
caaagaacacaggggagg

SEQ ID NO: 489839 - RNA, 23 nt, Human
caaagaacacaggggaggaagac

SEQ ID NO: 489840 - RNA, 18 nt, Human
caaggagagcauuccagg

SEQ ID NO: 489841 - RNA, 19 nt, Human
cacccccucuuaaaggggc

SEQ ID NO: 489842 - RNA, 19 nt, Human
cagaagcagcuucggguug

SEQ ID NO: 489843 - RNA, 19 nt, Human
cagagggggcccaauaacc

SEQ ID NO: 489844 - RNA, 21 nt, Human
cagcagaucacucucccaucc

SEQ ID NO: 489845 - RNA, 22 nt, Human
cagcauccaccuccccaauccu

SEQ ID NO: 489846 - RNA, 20 nt, Human
cagccccuaaaucggcuccc

SEQ ID NO: 489847 - RNA, 19 nt, Human
cagccucaguuucggccag

SEQ ID NO: 489848 - RNA, 23 nt, Human
cagcuccuuagucagcugguccu

SEQ ID NO: 489849 - RNA, 23 nt, Human
caggacccaaagggaaccgggaa

SEQ ID NO: 489850 - RNA, 18 nt, Human
caggaugcacccuccuuu

SEQ ID NO: 489851 - RNA, 19 nt, Human
caggggcccuaggguccag

SEQ ID NO: 489852 - RNA, 18 nt, Human
cagggugggcuccccugc

SEQ ID NO: 489853 - RNA, 23 nt, Human
cagggugggcuccccugccccuc

SEQ ID NO: 489854 - RNA, 22 nt, Human
cagugggaguggaaagcggggu

SEQ ID NO: 489855 - RNA, 21 nt, Human
caucagcuccuuuuccaguuu

SEQ ID NO: 489856 - RNA, 22 nt, Human
cauucccacuauacccccuaau

SEQ ID NO: 489857 - RNA, 21 nt, Human
ccaacaaacggaagccaccac

SEQ ID NO: 489858 - RNA, 23 nt, Human
ccaccaacaaacggaagccacca

SEQ ID NO: 489859 - RNA, 18 nt, Human
ccacccccucuuaaaggg

SEQ ID NO: 489860 - RNA, 18 nt, Human
ccaccuccuccaccaaca

SEQ ID NO: 489861 - RNA, 18 nt, Human
ccaccuccuccaccaaca

SEQ ID NO: 489862 - RNA, 18 nt, Human
ccacgccgccgaugcugc

SEQ ID NO: 489863 - RNA, 22 nt, Human
ccacuauacccccuaaucuaga

SEQ ID NO: 489864 - RNA, 18 nt, Human
ccagagccucucucagga

SEQ ID NO: 489865 - RNA, 18 nt, Human
ccaggacccaaagggaac

SEQ ID NO: 489866 - RNA, 18 nt, Human
ccaggcacugggaaugca

SEQ ID NO: 489867 - RNA, 19 nt, Human
ccaucagcuccuuuuccag

SEQ ID NO: 489868 - RNA, 23 nt, Human
ccaucccaguugcugccuuggcg

SEQ ID NO: 489869 - RNA, 21 nt, Human
cccaccucaacuccauucugc

SEQ ID NO: 489870 - RNA, 22 nt, Human
cccagacccacuccuucccggg

SEQ ID NO: 489871 - RNA, 21 nt, Human
ccccaauccuccaucagcucc

SEQ ID NO: 489872 - RNA, 21 nt, Human
ccccaggaaccagauguagcc

SEQ ID NO: 489873 - RNA, 23 nt, Human
ccccagggguggacgaaaggccc

SEQ ID NO: 489874 - RNA, 25 nt, Human
ccccagucucucauccucccgggcu

SEQ ID NO: 489875 - RNA, 23 nt, Human
ccccuaaaucggcucccuuugcc

SEQ ID NO: 489876 - RNA, 23 nt, Human
ccccugcccuccucgggaccuca

SEQ ID NO: 489877 - RNA, 19 nt, Human
cccuaggguccagcgcugc

SEQ ID NO: 489878 - RNA, 19 nt, Human
ccgccgaugcugcccgggc

SEQ ID NO: 489879 - RNA, 20 nt, Human
ccuaggguccagcgcugccc

SEQ ID NO: 489880 - RNA, 19 nt, Human
ccucaagcucggcgccuca

SEQ ID NO: 489881 - RNA, 24 nt, Human
ccucgggaccucagcuucaccauc

SEQ ID NO: 489882 - RNA, 24 nt, Human
ccugccaccuccuccaccaacaaa

SEQ ID NO: 489883 - RNA, 19 nt, Human
ccugcggccucaccagggc

SEQ ID NO: 489884 - RNA, 25 nt, Human
ccugggucaccgggcuccccaggag

SEQ ID NO: 489885 - RNA, 20 nt, Human
ccuucaagaguuuaggguuu

SEQ ID NO: 489886 - RNA, 21 nt, Human
ccuucaagaguuuaggguuuu

SEQ ID NO: 489887 - RNA, 19 nt, Human
cgaaaggcccccagucucu

SEQ ID NO: 489888 - RNA, 18 nt, Human
cgaggccugccaccuccu

SEQ ID NO: 489889 - RNA, 21 nt, Human
cgcccgggaccugccccugcc

SEQ ID NO: 489890 - RNA, 21 nt, Human
cggccgagucccagcaacccc

SEQ ID NO: 489891 - RNA, 18 nt, Human
cucacauugccaggagag

SEQ ID NO: 489892 - RNA, 24 nt, Human
cuccgagacucgcucugaccacgc

SEQ ID NO: 489893 - RNA, 18 nt, Human
cugaacuaaggcaggagc

SEQ ID NO: 489894 - RNA, 25 nt, Human
cugugaccccagccccuaaaucggc

SEQ ID NO: 489895 - RNA, 22 nt, Human
cuuccuguucugccuguggagg

SEQ ID NO: 489896 - RNA, 23 nt, Human
gaagacaucucuggagaaagacu

SEQ ID NO: 489897 - RNA, 23 nt, Human
gaagcgccuccugugaccccagc

SEQ ID NO: 489898 - RNA, 22 nt, Human
gacaaagaacacaggggaggaa

SEQ ID NO: 489899 - RNA, 20 nt, Human
gaccugccccugcccuccuc

SEQ ID NO: 489900 - RNA, 20 nt, Human
gagacaaagaacacagggga

SEQ ID NO: 489901 - RNA, 24 nt, Human
gagacucgcucugaccacgccgcc

SEQ ID NO: 489902 - RNA, 22 nt, Human
gagcagugggaguggaaagcgg

SEQ ID NO: 489903 - RNA, 23 nt, Human
gaggaaaaacucagugaucgccc

SEQ ID NO: 489904 - RNA, 23 nt, Human
gcagcuucggguugcacaggcug

SEQ ID NO: 489905 - RNA, 24 nt, Human
gcauccaccuccccaauccuccau

SEQ ID NO: 489906 - RNA, 26 nt, Human
gcccagccccagggguggacgaaagg

SEQ ID NO: 489907 - RNA, 21 nt, Human
gccuggcuggagcucuggggu

SEQ ID NO: 489908 - RNA, 18 nt, Human
gccugggucaccgggcuc

SEQ ID NO: 489909 - RNA, 25 nt, Human
ggaaagcugggggcuggagggacag

SEQ ID NO: 489910 - RNA, 20 nt, Human
ggaccucagcuucaccaucc

SEQ ID NO: 489911 - RNA, 24 nt, Human
ggacuucggagugucgaggagguu

SEQ ID NO: 489912 - RNA, 20 nt, Human
ggaggggaggaucauggagg

SEQ ID NO: 489913 - RNA, 24 nt, Human
ggaugcacccuccuuuggaagcac

SEQ ID NO: 489914 - RNA, 20 nt, Human
ggcagcgucccuggcgccag

SEQ ID NO: 489915 - RNA, 22 nt, Human
ggccgcggcugggacugggcag

SEQ ID NO: 489916 - RNA, 21 nt, Human
ggcgcuguccaggauuccagu

SEQ ID NO: 489917 - RNA, 20 nt, Human
ggcuggagcucugggguccc

SEQ ID NO: 489918 - RNA, 18 nt, Human
ggcuugaacuggguagga

SEQ ID NO: 489919 - RNA, 23 nt, Human
gggaggggaggaucauggagggc

SEQ ID NO: 489920 - RNA, 23 nt, Human
gggcagaggucuuucaacuuucu

SEQ ID NO: 489921 - RNA, 20 nt, Human
gggcagcagggcguccuugg

SEQ ID NO: 489922 - RNA, 23 nt, Human
gggcuguccucccuggccaugcu

SEQ ID NO: 489923 - RNA, 20 nt, Human
ggggcugggccggaugaggg

SEQ ID NO: 489924 - RNA, 22 nt, Human
gguaggagagcgacgguggugg

SEQ ID NO: 489925 - RNA, 19 nt, Human
gucguugacaaauaugggg

SEQ ID NO: 489926 - RNA, 19 nt, Human
gugagugcugguggcagcu

SEQ ID NO: 489927 - RNA, 20 nt, Human
gugcaaggcagggagggagu

SEQ ID NO: 489928 - RNA, 19 nt, Human
uacaacaacacagcaauag

SEQ ID NO: 489929 - RNA, 20 nt, Human
uacacacaagagcaaaacac

SEQ ID NO: 489930 - RNA, 23 nt, Human
uaccaggacccaaagggaaccgg

SEQ ID NO: 489931 - RNA, 18 nt, Human
ucaagaguuuaggguuuu

SEQ ID NO: 489932 - RNA, 22 nt, Human
ucaaggguuauugagagcuuau

SEQ ID NO: 489933 - RNA, 19 nt, Human
ucaggacaaucaaugccuu

SEQ ID NO: 489934 - RNA, 23 nt, Human
ucaguuugucuccuuagacagca

SEQ ID NO: 489935 - RNA, 20 nt, Human
ucaugggacagaaacugugg

SEQ ID NO: 489936 - RNA, 19 nt, Human
uccaccaacaaacggaagc

SEQ ID NO: 489937 - RNA, 24 nt, Human
uccacuucggcuguguucucuggg

SEQ ID NO: 489938 - RNA, 22 nt, Human
uccccacauuccacuucggcug

SEQ ID NO: 489939 - RNA, 23 nt, Human
uccccaggaaccagauguagccc

SEQ ID NO: 489940 - RNA, 27 nt, Human
ucccccauuucauucccacuauacccc

SEQ ID NO: 489941 - RNA, 18 nt, Human
ucccgggcucuagggccc

SEQ ID NO: 489942 - RNA, 18 nt, Human
ucccucaagcucggcgcc

SEQ ID NO: 489943 - RNA, 21 nt, Human
ucccucaagcucggcgccuca

SEQ ID NO: 489944 - RNA, 19 nt, Human
uccuccaccaacaaacgga

SEQ ID NO: 489945 - RNA, 21 nt, Human
ucgcuagggcccagacuccug

SEQ ID NO: 489946 - RNA, 19 nt, Human
ucuggggucccucaagcuc

SEQ ID NO: 489947 - RNA, 18 nt, Human
ucuggguuacccgccgag

SEQ ID NO: 489948 - RNA, 20 nt, Human
ucuguaccaggacccaaagg

SEQ ID NO: 489949 - RNA, 22 nt, Human
ucuguaccaggacccaaaggga

SEQ ID NO: 489950 - RNA, 23 nt, Human
ucuuucaacuuucuggcuuuagu

SEQ ID NO: 489951 - RNA, 23 nt, Human
ugaaaugacaggucuuuggcugg

SEQ ID NO: 489952 - RNA, 21 nt, Human
ugaaggaagagacagacggug

SEQ ID NO: 489953 - RNA, 19 nt, Human
ugacuccuccccaggaacc

SEQ ID NO: 489954 - RNA, 23 nt, Human
ugacuuggccccugggcccauga

SEQ ID NO: 489955 - RNA, 18 nt, Human
ugagcgucugcccagccc

SEQ ID NO: 489956 - RNA, 23 nt, Human
ugcagagcgaagguagugaagga

SEQ ID NO: 489957 - RNA, 23 nt, Human
ugccaggagagggcagcaaccca

SEQ ID NO: 489958 - RNA, 21 nt, Human
ugcccuccucgggaccucagc

SEQ ID NO: 489959 - RNA, 19 nt, Human
uggacccagacccacuccu

SEQ ID NO: 489960 - RNA, 18 nt, Human
uggaugggggcugggccg

SEQ ID NO: 489961 - RNA, 22 nt, Human
uggccaugcuaaggaaucugua

SEQ ID NO: 489962 - RNA, 18 nt, Human
uggcuggagugagugcug

SEQ ID NO: 489963 - RNA, 19 nt, Human
uggcuggaugggggcuggg

SEQ ID NO: 489964 - RNA, 27 nt, Human
ugggaaugcaaagccgacugagauaug

SEQ ID NO: 489965 - RNA, 22 nt, Human
ugggacagaaacugugggguca

SEQ ID NO: 489966 - RNA, 20 nt, Human
ugggaguggaaagcggggug

SEQ ID NO: 489967 - RNA, 21 nt, Human
ugggcagaagcagcuucgggu

SEQ ID NO: 489968 - RNA, 21 nt, Human
ugggggcuggagggacagucc

SEQ ID NO: 489969 - RNA, 25 nt, Human
ugucaugggacagaaacuguggggu

SEQ ID NO: 489970 - RNA, 24 nt, Human
uguccuucaagaguuuaggguuuu

SEQ ID NO: 489971 - RNA, 20 nt, Human
ugucuggggcaggcacugug

SEQ ID NO: 489972 - RNA, 24 nt, Human
ugugaugaguuccuucuccuacag

SEQ ID NO: 489973 - RNA, 23 nt, Human
ugugcaaggcagggagggggaac

SEQ ID NO: 489974 - RNA, 20 nt, Human
uguggaggauggacauggca

SEQ ID NO: 489975 - RNA, 23 nt, Human
uguucucuggguuacccgccgag

SEQ ID NO: 489976 - RNA, 21 nt, Human
uguugggggagccagagccuc

SEQ ID NO: 489977 - RNA, 21 nt, Human
uuacaacaauggaggaaaaac

SEQ ID NO: 489978 - RNA, 22 nt, Human
uuacagugauaguuacaacaac

SEQ ID NO: 489979 - RNA, 20 nt, Human
uucaauacgugcuuaugaac

SEQ ID NO: 489980 - RNA, 19 nt, Human
uucggccaggcacugggaa

SEQ ID NO: 489981 - RNA, 23 nt, Human
uuguugggucucacaagguccag

SEQ ID NO: 489982 - RNA, 19 nt, Human
uuuccaguuucccccaucc

SEQ ID NO: 489983 - RNA, 29 nt, Human
aaacagaaaggaacauaaaaguaugaggu

SEQ ID NO: 489984 - RNA, 21 nt, Human
aaagaagaaaauaugagaaga

SEQ ID NO: 489985 - RNA, 20 nt, Human
aaaggaacauaaaaguauga

SEQ ID NO: 489986 - RNA, 20 nt, Human
aaaguacaauaaaaauacaa

SEQ ID NO: 489987 - RNA, 24 nt, Human
aacacacaaauauauauugcauaa

SEQ ID NO: 489988 - RNA, 21 nt, Human
aaccaagagggcaucacaaaa

SEQ ID NO: 489989 - RNA, 20 nt, Human
aagaagaaaauaugagaaga

SEQ ID NO: 489990 - RNA, 20 nt, Human
aagaguaguccuuaugcagu

SEQ ID NO: 489991 - RNA, 19 nt, Human
aauaaugaaaugcaagaga

SEQ ID NO: 489992 - RNA, 19 nt, Human
acuccauuguguuaccauu

SEQ ID NO: 489993 - RNA, 23 nt, Human
agaaaauaugagaagaguagucc

SEQ ID NO: 489994 - RNA, 20 nt, Human
agaaaggaacauaaaaguau

SEQ ID NO: 489995 - RNA, 19 nt, Human
aggaaaaccaaacauaucg

SEQ ID NO: 489996 - RNA, 20 nt, Human
agggaauaucaaaucagaug

SEQ ID NO: 489997 - RNA, 22 nt, Human
aucuucauaaaaacgcacugga

SEQ ID NO: 489998 - RNA, 24 nt, Human
auuaauaaacuagccaucuggaaa

SEQ ID NO: 489999 - RNA, 23 nt, Human
caaauucuaucuguuaaaaaaag

SEQ ID NO: 490000 - RNA, 23 nt, Human
caaguuagaaauuuugaccauaa

SEQ ID NO: 490001 - RNA, 23 nt, Human
caguagaaacagaaaggaacaua

SEQ ID NO: 490002 - RNA, 24 nt, Human
caucuacaguagaaacagaaagga

SEQ ID NO: 490003 - RNA, 21 nt, Human
caucuggaaaaugaauacaaa

SEQ ID NO: 490004 - RNA, 23 nt, Human
ccaaaauacuaucugacaaacaa

SEQ ID NO: 490005 - RNA, 18 nt, Human
cccuacucuaagucacau

SEQ ID NO: 490006 - RNA, 21 nt, Human
ccuuuaacacuugaagaaaau

SEQ ID NO: 490007 - RNA, 18 nt, Human
cucuaauuaagguacaac

SEQ ID NO: 490008 - RNA, 21 nt, Human
cugagaaaauuuucaaaauau

SEQ ID NO: 490009 - RNA, 21 nt, Human
cuuuaugaaacauauauugcc

SEQ ID NO: 490010 - RNA, 18 nt, Human
gaaaauaugagaagagua

SEQ ID NO: 490011 - RNA, 20 nt, Human
gaggagaaauauauuuggua

SEQ ID NO: 490012 - RNA, 22 nt, Human
ggguuuuuuuuuuuuuuuugga

SEQ ID NO: 490013 - RNA, 28 nt, Human
guaacuggguuuuuuuuuuuuuuuugga

SEQ ID NO: 490014 - RNA, 19 nt, Human
guuuuuuuuuuuuuuuugg

SEQ ID NO: 490015 - RNA, 23 nt, Human
uaaaagaaacuaaacaagaaggc

SEQ ID NO: 490016 - RNA, 26 nt, Human
uaaaagaaacuaaacaagaaggcuca

SEQ ID NO: 490017 - RNA, 21 nt, Human
uaaaguaacauaucuuaaaug

SEQ ID NO: 490018 - RNA, 22 nt, Human
uaaauguucauaauuaaugacc

SEQ ID NO: 490019 - RNA, 22 nt, Human
uaacaucaccuugcauuuacua

SEQ ID NO: 490020 - RNA, 22 nt, Human
uaacuaaauagaacucagacac

SEQ ID NO: 490021 - RNA, 18 nt, Human
uaaggaaaaacacacaaa

SEQ ID NO: 490022 - RNA, 27 nt, Human
uaagguacaacuuagcagauaaaagaa

SEQ ID NO: 490023 - RNA, 24 nt, Human
uaccauauaacauuaaggaaaaac

SEQ ID NO: 490024 - RNA, 19 nt, Human
uaccuuuaacacuugaaga

SEQ ID NO: 490025 - RNA, 25 nt, Human
uaccuuuaacacuugaagaaaauuc

SEQ ID NO: 490026 - RNA, 20 nt, Human
uagaacucagacacaaggca

SEQ ID NO: 490027 - RNA, 19 nt, Human
uagcagaguugauuaccau

SEQ ID NO: 490028 - RNA, 19 nt, Human
uagucuguuagguaaaggg

SEQ ID NO: 490029 - RNA, 18 nt, Human
uccaaaauacuaucugac

SEQ ID NO: 490030 - RNA, 25 nt, Human
ucccagugaugugaacaggguaccc

SEQ ID NO: 490031 - RNA, 24 nt, Human
ucuacaguagaaacagaaaggaac

SEQ ID NO: 490032 - RNA, 23 nt, Human
ucuaucuguuaaaaaaagccacu

SEQ ID NO: 490033 - RNA, 23 nt, Human
ucuucauaaaaacgcacuggaga

SEQ ID NO: 490034 - RNA, 21 nt, Human
ugaaaaauaucuucaucaaag

SEQ ID NO: 490035 - RNA, 19 nt, Human
ugaaacauauauugcccuc

SEQ ID NO: 490036 - RNA, 18 nt, Human
ugaauacaaauuucaaga

SEQ ID NO: 490037 - RNA, 21 nt, Human
ugacauguguauacaaacaca

SEQ ID NO: 490038 - RNA, 25 nt, Human
ugagaagaguaguccuuaugcagug

SEQ ID NO: 490039 - RNA, 21 nt, Human
ugaguaaaugauaaaucuauu

SEQ ID NO: 490040 - RNA, 26 nt, Human
uguagaacgggugccacagauuuuaa

SEQ ID NO: 490041 - RNA, 25 nt, Human
uguauacaaacacauuuaacauggu

SEQ ID NO: 490042 - RNA, 25 nt, Human
uuagcagauaaaagaaacuaaacaa

SEQ ID NO: 490043 - RNA, 24 nt, Human
uuagucuguuagguaaaggguaaa

SEQ ID NO: 490044 - RNA, 22 nt, Human
uucaucagcacaucaauaauga

SEQ ID NO: 490045 - RNA, 22 nt, Human
uucaucaugccaguagcagagu

SEQ ID NO: 490046 - RNA, 19 nt, Human
uuggcaugucucuucagaa

SEQ ID NO: 490047 - RNA, 25 nt, Human
uuuaagguauggcuuuugggaaauc

SEQ ID NO: 490048 - RNA, 18 nt, Human
uuugauuucuuuuccuag

SEQ ID NO: 490049 - RNA, 24 nt, Human
uuuucaaccagaucuucauaaaaa

SEQ ID NO: 490050 - RNA, 22 nt, Human
uuuuccuagugaaaauguaccu

SEQ ID NO: 490051 - RNA, 24 nt, Human
aaagccauucucagucuacaucca

SEQ ID NO: 490052 - RNA, 26 nt, Human
aagaaaaaccaaguucaauuuaccaa

SEQ ID NO: 490053 - RNA, 20 nt, Human
aagacagcucugucccacca

SEQ ID NO: 490054 - RNA, 21 nt, Human
aagacagcucugucccaccaa

SEQ ID NO: 490055 - RNA, 19 nt, Human
agaaggcuguggagaaacu

SEQ ID NO: 490056 - RNA, 30 nt, Human
aggcggcggagugcgggcgguggcggcggg

SEQ ID NO: 490057 - RNA, 21 nt, Human
aggcuguggagaaacugaguc

SEQ ID NO: 490058 - RNA, 21 nt, Human
agugcagagggcucccuuaga

SEQ ID NO: 490059 - RNA, 19 nt, Human
caagacauccgcccacagc

SEQ ID NO: 490060 - RNA, 18 nt, Human
caauacccgacugugcug

SEQ ID NO: 490061 - RNA, 18 nt, Human
cagaaggaagacagcucu

SEQ ID NO: 490062 - RNA, 22 nt, Human
cagaaggacaggugagucucac

SEQ ID NO: 490063 - RNA, 20 nt, Human
cagcaauacccgacugugcu

SEQ ID NO: 490064 - RNA, 19 nt, Human
caggggucuccuucccucc

SEQ ID NO: 490065 - RNA, 26 nt, Human
ccaaaauaucuguauuaucuauaaaa

SEQ ID NO: 490066 - RNA, 22 nt, Human
ccaccaacccuauagcagaaca

SEQ ID NO: 490067 - RNA, 22 nt, Human
ccagaaggacaggugagucuca

SEQ ID NO: 490068 - RNA, 26 nt, Human
cggcggcggcgcggggaggggugcuc

SEQ ID NO: 490069 - RNA, 18 nt, Human
cgggcagaggcggcggag

SEQ ID NO: 490070 - RNA, 19 nt, Human
cgggcagaggcggcggagu

SEQ ID NO: 490071 - RNA, 20 nt, Human
cgggcgguggcggcggcggc

SEQ ID NO: 490072 - RNA, 21 nt, Human
cuacagacuccuugaggagga

SEQ ID NO: 490073 - RNA, 22 nt, Human
cucaaagccauucucagucuac

SEQ ID NO: 490074 - RNA, 22 nt, Human
cuuauucuguggccuccuuucc

SEQ ID NO: 490075 - RNA, 18 nt, Human
cuucccuccccucuugcc

SEQ ID NO: 490076 - RNA, 23 nt, Human
cuuguaucacacaggcuggagaa

SEQ ID NO: 490077 - RNA, 22 nt, Human
gacaggugagucucaccuaggc

SEQ ID NO: 490078 - RNA, 21 nt, Human
gacuccuugaggaggaguaag

SEQ ID NO: 490079 - RNA, 19 nt, Human
gagccugcaggggucuccu

SEQ ID NO: 490080 - RNA, 22 nt, Human
gaggcggcggagugcgggcggu

SEQ ID NO: 490081 - RNA, 22 nt, Human
gaugcugggaaagaaaaaccaa

SEQ ID NO: 490082 - RNA, 32 nt, Human
gcggagugcgggcgguggcggcggcggcgacg

SEQ ID NO: 490083 - RNA, 25 nt, Human
gcggcggagugcgggcgguggcggc

SEQ ID NO: 490084 - RNA, 28 nt, Human
gcggcggagugcgggcgguggcggcggc

SEQ ID NO: 490085 - RNA, 18 nt, Human
gcgggcagaggcggcgga

SEQ ID NO: 490086 - RNA, 22 nt, Human
ggaaagaaaaaccaaguucaau

SEQ ID NO: 490087 - RNA, 18 nt, Human
ggaguaagaccccagaag

SEQ ID NO: 490088 - RNA, 25 nt, Human
ggagugcgggcgguggcggcggcgg

SEQ ID NO: 490089 - RNA, 18 nt, Human
guggcggcggcggcgcgg

SEQ ID NO: 490090 - RNA, 24 nt, Human
uccacgaugcugggaaagaaaaac

SEQ ID NO: 490091 - RNA, 23 nt, Human
ucccuccccucuugccuguucug

SEQ ID NO: 490092 - RNA, 21 nt, Human
uccgcccacagcagugagaag

SEQ ID NO: 490093 - RNA, 22 nt, Human
ucuacauccacgaugcugggaa

SEQ ID NO: 490094 - RNA, 21 nt, Human
ucucaagguggguggagggag

SEQ ID NO: 490095 - RNA, 19 nt, Human
ucuccagaagugcuuaguu

SEQ ID NO: 490096 - RNA, 22 nt, Human
ucuccagaagugcuuaguuuuu

SEQ ID NO: 490097 - RNA, 23 nt, Human
ucugccuggucagagccugcaca

SEQ ID NO: 490098 - RNA, 23 nt, Human
ugaaguuucagaauaagcagcuu

SEQ ID NO: 490099 - RNA, 22 nt, Human
ugcgggcagaggcggcggagug

SEQ ID NO: 490100 - RNA, 19 nt, Human
ugcugggaaagaaaaacca

SEQ ID NO: 490101 - RNA, 23 nt, Human
uggccuccuuuccacuacagacu

SEQ ID NO: 490102 - RNA, 21 nt, Human
uggcggcggcggcgcggggag

SEQ ID NO: 490103 - RNA, 22 nt, Human
uguggagaaacugaguccuccc

SEQ ID NO: 490104 - RNA, 23 nt, Human
uucucagucuacauccacgaugc

SEQ ID NO: 490105 - RNA, 22 nt, Human
aaaaaauuacuuucaaucccac

SEQ ID NO: 490106 - RNA, 26 nt, Human
aaaacaacaacaacaaaaaaacaaac

SEQ ID NO: 490107 - RNA, 23 nt, Human
aaacaacaacaacaaaaaaacaa

SEQ ID NO: 490108 - RNA, 18 nt, Human
aaauaugucagaaaugaa

SEQ ID NO: 490109 - RNA, 20 nt, Human
aacaaagcgagacuccaucu

SEQ ID NO: 490110 - RNA, 22 nt, Human
aacaacaacaaaaaaacaaacu

SEQ ID NO: 490111 - RNA, 19 nt, Human
aacacggugaaaccccguc

SEQ ID NO: 490112 - RNA, 20 nt, Human
aacacggugaaaccccgucu

SEQ ID NO: 490113 - RNA, 21 nt, Human
aacacggugaaaccccgucuc

SEQ ID NO: 490114 - RNA, 18 nt, Human
aacugcuugaacccggga

SEQ ID NO: 490115 - RNA, 24 nt, Human
acaaagcgagacuccaucucaaaa

SEQ ID NO: 490116 - RNA, 21 nt, Human
acaacaacaacaaaaaaacaa

SEQ ID NO: 490117 - RNA, 23 nt, Human
accccgucucuacuaaaauacaa

SEQ ID NO: 490118 - RNA, 21 nt, Human
acgucuguaauccuagcacuu

SEQ ID NO: 490119 - RNA, 26 nt, Human
acuaaaauacaaaaaauuagcugguc

SEQ ID NO: 490120 - RNA, 18 nt, Human
acugcccuccagucuggg

SEQ ID NO: 490121 - RNA, 23 nt, Human
acugcccuccagucugggcaaca

SEQ ID NO: 490122 - RNA, 20 nt, Human
agacaaaugcacagaaguau

SEQ ID NO: 490123 - RNA, 21 nt, Human
agacaaaugcacagaaguauu

SEQ ID NO: 490124 - RNA, 24 nt, Human
agagguugcagugagccgagaucg

SEQ ID NO: 490125 - RNA, 22 nt, Human
agccugggcaacacggugaaac

SEQ ID NO: 490126 - RNA, 24 nt, Human
agccugggcaacacggugaaaccc

SEQ ID NO: 490127 - RNA, 21 nt, Human
aggcagaacugcuugaacccg

SEQ ID NO: 490128 - RNA, 21 nt, Human
aggcagagguugcagugagcc

SEQ ID NO: 490129 - RNA, 24 nt, Human
aggcagagguugcagugagccgag

SEQ ID NO: 490130 - RNA, 21 nt, Human
aggcugaggcagaacugcuug

SEQ ID NO: 490131 - RNA, 24 nt, Human
agucugggcaacaaagcgagacuc

SEQ ID NO: 490132 - RNA, 24 nt, Human
aucgcgccacugcccuccagucug

SEQ ID NO: 490133 - RNA, 27 nt, Human
caaaaaaacaaacuaaauauagaaaua

SEQ ID NO: 490134 - RNA, 23 nt, Human
caacaacaaaaaaacaaacuaaa

SEQ ID NO: 490135 - RNA, 21 nt, Human
caacaacaacaaaaaaacaaa

SEQ ID NO: 490136 - RNA, 24 nt, Human
caacacggugaaaccccgucucua

SEQ ID NO: 490137 - RNA, 24 nt, Human
caccuuuagucacagcuacuuggg

SEQ ID NO: 490138 - RNA, 24 nt, Human
cacugcccuccagucugggcaaca

SEQ ID NO: 490139 - RNA, 24 nt, Human
cagcuacuugggaggcugaggcag

SEQ ID NO: 490140 - RNA, 21 nt, Human
ccacugcccuccagucugggc

SEQ ID NO: 490141 - RNA, 23 nt, Human
ccacugcccuccagucugggcaa

SEQ ID NO: 490142 - RNA, 24 nt, Human
ccacugcccuccagucugggcaac

SEQ ID NO: 490143 - RNA, 23 nt, Human
ccugggcaacacggugaaacccc

SEQ ID NO: 490144 - RNA, 24 nt, Human
ccugggcaacacggugaaaccccg

SEQ ID NO: 490145 - RNA, 20 nt, Human
ccuuuagucacagcuacuug

SEQ ID NO: 490146 - RNA, 18 nt, Human
cgcgccacugcccuccag

SEQ ID NO: 490147 - RNA, 24 nt, Human
cgggaggcagagguugcagugagc

SEQ ID NO: 490148 - RNA, 18 nt, Human
cgucuguaauccuagcac

SEQ ID NO: 490149 - RNA, 23 nt, Human
cgucuguaauccuagcacuucgg

SEQ ID NO: 490150 - RNA, 21 nt, Human
cuaaccacaacuguacuacaa

SEQ ID NO: 490151 - RNA, 23 nt, Human
cugaggcagaacugcuugaaccc

SEQ ID NO: 490152 - RNA, 24 nt, Human
cugcuugaacccgggaggcagagg

SEQ ID NO: 490153 - RNA, 28 nt, Human
gaaaaaaauuacuuucaaucccacuaca

SEQ ID NO: 490154 - RNA, 23 nt, Human
gagaucgcgccacugcccuccag

SEQ ID NO: 490155 - RNA, 22 nt, Human
gcgugcaccuuuagucacagcu

SEQ ID NO: 490156 - RNA, 18 nt, Human
gggcauggcggcgugcac

SEQ ID NO: 490157 - RNA, 21 nt, Human
gguggcuuacgucuguaaucc

SEQ ID NO: 490158 - RNA, 24 nt, Human
gguggcuuacgucuguaauccuag

SEQ ID NO: 490159 - RNA, 22 nt, Human
guucugagagcagccugggcaa

SEQ ID NO: 490160 - RNA, 19 nt, Human
guugcagugagccgagauc

SEQ ID NO: 490161 - RNA, 21 nt, Human
guugcagugagccgagaucgc

SEQ ID NO: 490162 - RNA, 24 nt, Human
uacgucuguaauccuagcacuucg

SEQ ID NO: 490163 - RNA, 24 nt, Human
uagcacuucgguaggccgaggcgg

SEQ ID NO: 490164 - RNA, 24 nt, Human
uccagucugggcaacaaagcgaga

SEQ ID NO: 490165 - RNA, 20 nt, Human
ucgcgccacugcccuccagu

SEQ ID NO: 490166 - RNA, 21 nt, Human
ucucuacuaaaauacaaaaaa

SEQ ID NO: 490167 - RNA, 22 nt, Human
ugagccgagaucgcgccacugc

SEQ ID NO: 490168 - RNA, 21 nt, Human
ugaggcagaacugcuugaacc

SEQ ID NO: 490169 - RNA, 26 nt, Human
ugccagaaauguaaaauaugucagaa

SEQ ID NO: 490170 - RNA, 26 nt, Human
ugccugagcucaggaguucugagagc

SEQ ID NO: 490171 - RNA, 24 nt, Human
uggacagacaaaugcacagaagua

SEQ ID NO: 490172 - RNA, 24 nt, Human
uggacugccugagcucaggaguuc

SEQ ID NO: 490173 - RNA, 19 nt, Human
uggcuuacgucuguaaucc

SEQ ID NO: 490174 - RNA, 24 nt, Human
uggcuuacgucuguaauccuagca

SEQ ID NO: 490175 - RNA, 18 nt, Human
ugggaggcugaggcagaa

SEQ ID NO: 490176 - RNA, 18 nt, Human
ugggaggcugaggcagaa

SEQ ID NO: 490177 - RNA, 19 nt, Human
uuagcugggcauggcggcg

SEQ ID NO: 490178 - RNA, 19 nt, Human
uugcagugagccgagaucg

SEQ ID NO: 490179 - RNA, 22 nt, Human
uugcagugagccgagaucgcgc

SEQ ID NO: 490180 - RNA, 18 nt, Human
uugggaggcugaggcaga

SEQ ID NO: 490181 - RNA, 19 nt, Human
aaacagaauccacaguaaa

SEQ ID NO: 490182 - RNA, 18 nt, Human
ccacaaucgccgccucug

SEQ ID NO: 490183 - RNA, 18 nt, Human
ccugggcagcucagcagc

SEQ ID NO: 490184 - RNA, 19 nt, Human
gaaccgacaccucaaucuc

SEQ ID NO: 490185 - RNA, 23 nt, Human
ucaguuacuguuacuucaugauc

SEQ ID NO: 490186 - RNA, 19 nt, Human
ugucggagccccgcccccg

SEQ ID NO: 490187 - RNA, 21 nt, Human
uuuuugaaaaugccacagggu

SEQ ID NO: 490188 - RNA, 22 nt, Human
uuuuuuuugaaaaugccacagg

SEQ ID NO: 490189 - RNA, 18 nt, Human
uuuuuuuuuuuuuuuuug

SEQ ID NO: 490190 - RNA, 19 nt, Human
aaacaccccacggcccuca

SEQ ID NO: 490191 - RNA, 18 nt, Human
aacacagcucagccaggc

SEQ ID NO: 490192 - RNA, 21 nt, Human
accugcagacgccucccccac

SEQ ID NO: 490193 - RNA, 23 nt, Human
agagaucaggcccagggccuggg

SEQ ID NO: 490194 - RNA, 27 nt, Human
agagcccccccauccacgggucccuuc

SEQ ID NO: 490195 - RNA, 29 nt, Human
agcagguggggccagguggccucaggacc

SEQ ID NO: 490196 - RNA, 22 nt, Human
agcugcccaccgugcuggcccc

SEQ ID NO: 490197 - RNA, 22 nt, Human
aggaaggagauaggugaaaaau

SEQ ID NO: 490198 - RNA, 21 nt, Human
aggcaaggcugggagagggcu

SEQ ID NO: 490199 - RNA, 24 nt, Human
agggaggggcagguuggcugggug

SEQ ID NO: 490200 - RNA, 23 nt, Human
agggcuuguccagggcuccccug

SEQ ID NO: 490201 - RNA, 23 nt, Human
aggggccgggaccuguguggaua

SEQ ID NO: 490202 - RNA, 20 nt, Human
agguggggggagggcggggc

SEQ ID NO: 490203 - RNA, 21 nt, Human
augccggggccggggccggga

SEQ ID NO: 490204 - RNA, 21 nt, Human
caaggcugggagagggcuggg

SEQ ID NO: 490205 - RNA, 24 nt, Human
caccacugucggcgagcaccgugc

SEQ ID NO: 490206 - RNA, 19 nt, Human
cacccaaacaccccacggc

SEQ ID NO: 490207 - RNA, 24 nt, Human
caccgugcuggccccaagcagggc

SEQ ID NO: 490208 - RNA, 24 nt, Human
cauagccccgugacacacaacagg

SEQ ID NO: 490209 - RNA, 22 nt, Human
cauccacggguccccuccgucc

SEQ ID NO: 490210 - RNA, 22 nt, Human
ccacccaaacaccccacggccc

SEQ ID NO: 490211 - RNA, 23 nt, Human
ccaccuacaugccccacgcaagg

SEQ ID NO: 490212 - RNA, 22 nt, Human
ccagggcuccccuggaacacag

SEQ ID NO: 490213 - RNA, 22 nt, Human
ccccagggccacuccugccucu

SEQ ID NO: 490214 - RNA, 24 nt, Human
cccccaggugaccugcagacgccu

SEQ ID NO: 490215 - RNA, 18 nt, Human
ccccccaggugaccugca

SEQ ID NO: 490216 - RNA, 22 nt, Human
cccccccauccacggguccccu

SEQ ID NO: 490217 - RNA, 24 nt, Human
cccgccgcacucgcucagcgaccg

SEQ ID NO: 490218 - RNA, 26 nt, Human
cccgccgcacucgcucagcgaccgcg

SEQ ID NO: 490219 - RNA, 20 nt, Human
cccgcgcaggccgcccgccg

SEQ ID NO: 490220 - RNA, 18 nt, Human
cccgggcggccucagccc

SEQ ID NO: 490221 - RNA, 26 nt, Human
ccgcccgccgccgccgccccugcgcc

SEQ ID NO: 490222 - RNA, 19 nt, Human
ccgccgccgccccugcgcc

SEQ ID NO: 490223 - RNA, 18 nt, Human
ccgccgccgccgccccug

SEQ ID NO: 490224 - RNA, 20 nt, Human
ccggggccggggccgggagc

SEQ ID NO: 490225 - RNA, 18 nt, Human
ccgugguccuccagccgc

SEQ ID NO: 490226 - RNA, 23 nt, Human
ccucaggacgccagagccccccc

SEQ ID NO: 490227 - RNA, 23 nt, Human
ccucccccaccuacaugccccac

SEQ ID NO: 490228 - RNA, 22 nt, Human
ccugcagacgccucccccaccu

SEQ ID NO: 490229 - RNA, 19 nt, Human
ccuugagguuccagagaag

SEQ ID NO: 490230 - RNA, 25 nt, Human
cgccgguuccgcauucccgccgcac

SEQ ID NO: 490231 - RNA, 21 nt, Human
cgggacccccagggccacucc

SEQ ID NO: 490232 - RNA, 22 nt, Human
cucggaaacccccucccugccu

SEQ ID NO: 490233 - RNA, 24 nt, Human
cucugcgcugaggccuggaaguuc

SEQ ID NO: 490234 - RNA, 24 nt, Human
cugcccaccgugcuggccccaagc

SEQ ID NO: 490235 - RNA, 22 nt, Human
cugcgcugaggccuggaaguuc

SEQ ID NO: 490236 - RNA, 18 nt, Human
cuggccccaagcagggcu

SEQ ID NO: 490237 - RNA, 19 nt, Human
cuggccccaagcagggcuc

SEQ ID NO: 490238 - RNA, 22 nt, Human
gacaccacugucggcgagcacc

SEQ ID NO: 490239 - RNA, 18 nt, Human
gagcccccccauccacgg

SEQ ID NO: 490240 - RNA, 21 nt, Human
gaggccuggaaguucccacag

SEQ ID NO: 490241 - RNA, 19 nt, Human
gauaggugaaaaauaaaua

SEQ ID NO: 490242 - RNA, 22 nt, Human
gcagguggggccagguggccuc

SEQ ID NO: 490243 - RNA, 22 nt, Human
gccacguguggugggacggcag

SEQ ID NO: 490244 - RNA, 20 nt, Human
gccgcccgccgccgccgccc

SEQ ID NO: 490245 - RNA, 19 nt, Human
gcugggcgcagaggccacg

SEQ ID NO: 490246 - RNA, 20 nt, Human
ggacccccagggccacuccu

SEQ ID NO: 490247 - RNA, 18 nt, Human
ggagauaggugaaaaaua

SEQ ID NO: 490248 - RNA, 20 nt, Human
ggagcccuggagcccggccu

SEQ ID NO: 490249 - RNA, 21 nt, Human
ggagcccuggagcccggccug

SEQ ID NO: 490250 - RNA, 22 nt, Human
ggagguggggggagggcggggc

SEQ ID NO: 490251 - RNA, 22 nt, Human
ggcagguuggcugggugugguc

SEQ ID NO: 490252 - RNA, 22 nt, Human
ggccugggcugccugccuugag

SEQ ID NO: 490253 - RNA, 27 nt, Human
ggcgcagaggccacguguggugggacg

SEQ ID NO: 490254 - RNA, 24 nt, Human
ggcugggccccccaggugaccugc

SEQ ID NO: 490255 - RNA, 21 nt, Human
gggccggggccgggagcguca

SEQ ID NO: 490256 - RNA, 23 nt, Human
gggcggcggaugccuggccucgg

SEQ ID NO: 490257 - RNA, 25 nt, Human
gggcugggccccccaggugaccugc

SEQ ID NO: 490258 - RNA, 21 nt, Human
gugggacggcagccugcuggc

SEQ ID NO: 490259 - RNA, 21 nt, Human
ucagcccgcgcgccgguuccg

SEQ ID NO: 490260 - RNA, 24 nt, Human
uccacccaaacaccccacggcccu

SEQ ID NO: 490261 - RNA, 22 nt, Human
uccccaaggguucagacaccac

SEQ ID NO: 490262 - RNA, 23 nt, Human
ucggaaacccccucccugccuau

SEQ ID NO: 490263 - RNA, 19 nt, Human
ugaccugcagacgccuccc

SEQ ID NO: 490264 - RNA, 22 nt, Human
ugaccugcagacgccuccccca

SEQ ID NO: 490265 - RNA, 22 nt, Human
ugaccugcagacgccuccccca

SEQ ID NO: 490266 - RNA, 18 nt, Human
ugagggcuuguccagggc

SEQ ID NO: 490267 - RNA, 18 nt, Human
ugccagagccacauuuua

SEQ ID NO: 490268 - RNA, 19 nt, Human
ugcccgggacccccagggc

SEQ ID NO: 490269 - RNA, 22 nt, Human
ugcccgggacccccagggccac

SEQ ID NO: 490270 - RNA, 23 nt, Human
ugcccugaggagcagguggggcc

SEQ ID NO: 490271 - RNA, 22 nt, Human
ugccggggccggggccgggagc

SEQ ID NO: 490272 - RNA, 21 nt, Human
ugcgcccgcgaugccgaugcc

SEQ ID NO: 490273 - RNA, 21 nt, Human
uggaacacagcucagccaggc

SEQ ID NO: 490274 - RNA, 18 nt, Human
uggagguggggggagggc

SEQ ID NO: 490275 - RNA, 20 nt, Human
uggagguggggggagggcgg

SEQ ID NO: 490276 - RNA, 24 nt, Human
uggagguggggggagggcggggcg

SEQ ID NO: 490277 - RNA, 19 nt, Human
uggggggagggcggggcgg

SEQ ID NO: 490278 - RNA, 24 nt, Human
uggugggacggcagccugcuggcc

SEQ ID NO: 490279 - RNA, 24 nt, Human
uguggauaauccacccaaacaccc

SEQ ID NO: 490280 - RNA, 25 nt, Human
uuccaggaugcgacacggggcggcg

SEQ ID NO: 490281 - RNA, 21 nt, Human
uuuaaccaugccagagccaca

SEQ ID NO: 490282 - RNA, 24 nt, Human
aaagggcugggauuaugggcauga

SEQ ID NO: 490283 - RNA, 19 nt, Human
aagacagaggaaaggaaca

SEQ ID NO: 490284 - RNA, 20 nt, Human
aagaugccacuugcaugaug

SEQ ID NO: 490285 - RNA, 24 nt, Human
aagaugccacuugcaugaugcugu

SEQ ID NO: 490286 - RNA, 19 nt, Human
aagcaaagagagaacaucc

SEQ ID NO: 490287 - RNA, 21 nt, Human
aagcaaagagagaacauccag

SEQ ID NO: 490288 - RNA, 20 nt, Human
aaggaaagucccauacaaug

SEQ ID NO: 490289 - RNA, 21 nt, Human
accagauccucagauccccga

SEQ ID NO: 490290 - RNA, 18 nt, Human
accauguccagcuaauuu

SEQ ID NO: 490291 - RNA, 18 nt, Human
acggagaaucagagaguc

SEQ ID NO: 490292 - RNA, 25 nt, Human
acuauguugcccaggcucuucucga

SEQ ID NO: 490293 - RNA, 18 nt, Human
acucugucacccaggcua

SEQ ID NO: 490294 - RNA, 23 nt, Human
acucugucacccaggcuaaguaa

SEQ ID NO: 490295 - RNA, 19 nt, Human
agacaaguaaacuggcccu

SEQ ID NO: 490296 - RNA, 21 nt, Human
agauuuuuuuuuuuuuugaga

SEQ ID NO: 490297 - RNA, 24 nt, Human
agggcugggauuaugggcaugagc

SEQ ID NO: 490298 - RNA, 21 nt, Human
aguagcugggacuacaggcau

SEQ ID NO: 490299 - RNA, 25 nt, Human
aguagcugggacuacaggcauucau

SEQ ID NO: 490300 - RNA, 21 nt, Human
auccuccugccucagcuuccc

SEQ ID NO: 490301 - RNA, 19 nt, Human
augaugcugugggugccuu

SEQ ID NO: 490302 - RNA, 18 nt, Human
auggggucucacuauguu

SEQ ID NO: 490303 - RNA, 19 nt, Human
auggggucucacuauguug

SEQ ID NO: 490304 - RNA, 24 nt, Human
auuuuuuuuuuuuuugagauaggg

SEQ ID NO: 490305 - RNA, 24 nt, Human
caaagggcugggauuaugggcaug

SEQ ID NO: 490306 - RNA, 19 nt, Human
caacagaguucacaggugg

SEQ ID NO: 490307 - RNA, 22 nt, Human
caaguaaacuggcccuuaaugc

SEQ ID NO: 490308 - RNA, 21 nt, Human
cacaacccagcaaguguccuu

SEQ ID NO: 490309 - RNA, 20 nt, Human
cacaaggaguuccagguguu

SEQ ID NO: 490310 - RNA, 25 nt, Human
cacuauguugcccaggcucuucucg

SEQ ID NO: 490311 - RNA, 31 nt, Human
cacuauguugcccaggcucuucucgaacucc

SEQ ID NO: 490312 - RNA, 18 nt, Human
cacucugucacccaggcu

SEQ ID NO: 490313 - RNA, 21 nt, Human
cacucugucacccaggcuaag

SEQ ID NO: 490314 - RNA, 24 nt, Human
cacuguagccaugaccucccuggc

SEQ ID NO: 490315 - RNA, 26 nt, Human
cagauccccgagguggguugcgggga

SEQ ID NO: 490316 - RNA, 20 nt, Human
caguggcagccaguuccuca

SEQ ID NO: 490317 - RNA, 18 nt, Human
cauugcaaugccuccauu

SEQ ID NO: 490318 - RNA, 24 nt, Human
cauugcuuauccuuugauuggggg

SEQ ID NO: 490319 - RNA, 24 nt, Human
ccaaagggcugggauuaugggcau

SEQ ID NO: 490320 - RNA, 18 nt, Human
ccacagcuucaguccugg

SEQ ID NO: 490321 - RNA, 18 nt, Human
ccagagccagaggagaua

SEQ ID NO: 490322 - RNA, 22 nt, Human
cccauggcccgugcgcuccgcc

SEQ ID NO: 490323 - RNA, 19 nt, Human
cccggccgcggcgccucag

SEQ ID NO: 490324 - RNA, 19 nt, Human
cccgugcgcuccgcccggc

SEQ ID NO: 490325 - RNA, 20 nt, Human
cccgugcgcuccgcccggca

SEQ ID NO: 490326 - RNA, 22 nt, Human
cccuggcucaagugauccucuc

SEQ ID NO: 490327 - RNA, 23 nt, Human
cccuggcucaagugauccucuca

SEQ ID NO: 490328 - RNA, 24 nt, Human
ccggaguagcugggacuacaggca

SEQ ID NO: 490329 - RNA, 19 nt, Human
ccucccagcuccuuggguc

SEQ ID NO: 490330 - RNA, 23 nt, Human
ccucccagcuccuugggucucca

SEQ ID NO: 490331 - RNA, 26 nt, Human
ccuccugccucagcuucccaaagggc

SEQ ID NO: 490332 - RNA, 24 nt, Human
ccugccucagcuucccaaagggcu

SEQ ID NO: 490333 - RNA, 24 nt, Human
cgcucugucacccaggcuggaaug

SEQ ID NO: 490334 - RNA, 20 nt, Human
cggcccggcgggcucagcgg

SEQ ID NO: 490335 - RNA, 18 nt, Human
cucaagugauccucucac

SEQ ID NO: 490336 - RNA, 23 nt, Human
cucugucacccaggcuggaaugc

SEQ ID NO: 490337 - RNA, 26 nt, Human
gaaaaugcacauuuucaaggugcuuc

SEQ ID NO: 490338 - RNA, 22 nt, Human
gacuacaggcauucauuaccau

SEQ ID NO: 490339 - RNA, 20 nt, Human
gaguagcugggacuacaggc

SEQ ID NO: 490340 - RNA, 18 nt, Human
gauuaugggcaugagcca

SEQ ID NO: 490341 - RNA, 18 nt, Human
gauuaugggcaugagcca

SEQ ID NO: 490342 - RNA, 22 nt, Human
gauuaugggcaugagccaucac

SEQ ID NO: 490343 - RNA, 21 nt, Human
gcaaacuucuucccacaagga

SEQ ID NO: 490344 - RNA, 20 nt, Human
gcaaagagagaacauccagu

SEQ ID NO: 490345 - RNA, 20 nt, Human
gcacaacccagcaagugucc

SEQ ID NO: 490346 - RNA, 24 nt, Human
gccucagcuucccaaagggcuggg

SEQ ID NO: 490347 - RNA, 19 nt, Human
gcuggaaugcaauggcgca

SEQ ID NO: 490348 - RNA, 22 nt, Human
ggagagggacccggccgcggcg

SEQ ID NO: 490349 - RNA, 23 nt, Human
ggauuaugggcaugagccaucac

SEQ ID NO: 490350 - RNA, 20 nt, Human
ggcaugagccaucacaccca

SEQ ID NO: 490351 - RNA, 18 nt, Human
ggcgccucagccaggccu

SEQ ID NO: 490352 - RNA, 21 nt, Human
gggcacugauggugggcagcc

SEQ ID NO: 490353 - RNA, 22 nt, Human
gggcacugauggugggcagcca

SEQ ID NO: 490354 - RNA, 19 nt, Human
gggcagccagggccgaggu

SEQ ID NO: 490355 - RNA, 18 nt, Human
gggggaggaggggauaga

SEQ ID NO: 490356 - RNA, 22 nt, Human
ggggucucacuauguugcccag

SEQ ID NO: 490357 - RNA, 22 nt, Human
gggucucacuauguugcccagg

SEQ ID NO: 490358 - RNA, 24 nt, Human
ggugcuuccagagccagaggagau

SEQ ID NO: 490359 - RNA, 21 nt, Human
gguugcggggaaggcccaggg

SEQ ID NO: 490360 - RNA, 22 nt, Human
uaaagccacagcuucaguccug

SEQ ID NO: 490361 - RNA, 24 nt, Human
uacacccaacagaguucacaggug

SEQ ID NO: 490362 - RNA, 22 nt, Human
uagagauggggucucacuaugu

SEQ ID NO: 490363 - RNA, 22 nt, Human
uagcagaguacacccaacagag

SEQ ID NO: 490364 - RNA, 24 nt, Human
uagggucucacucugucacccagg

SEQ ID NO: 490365 - RNA, 19 nt, Human
uauguugcccaggcucuuc

SEQ ID NO: 490366 - RNA, 24 nt, Human
uauguugcccaggcucuucucgaa

SEQ ID NO: 490367 - RNA, 20 nt, Human
ucacccaggcuggaaugcaa

SEQ ID NO: 490368 - RNA, 19 nt, Human
ucaccucccuaucugggca

SEQ ID NO: 490369 - RNA, 18 nt, Human
ucaggaaggacacaggcu

SEQ ID NO: 490370 - RNA, 19 nt, Human
ucaguccuggcagaguuca

SEQ ID NO: 490371 - RNA, 18 nt, Human
uccauuucagaugugaga

SEQ ID NO: 490372 - RNA, 19 nt, Human
ucccaaagggcugggauua

SEQ ID NO: 490373 - RNA, 24 nt, Human
ucccaaagggcugggauuaugggc

SEQ ID NO: 490374 - RNA, 25 nt, Human
uccccagaacuuagcagaguacacc

SEQ ID NO: 490375 - RNA, 24 nt, Human
ucccuggcucaagugauccucuca

SEQ ID NO: 490376 - RNA, 24 nt, Human
uccggaguagcugggacuacaggc

SEQ ID NO: 490377 - RNA, 20 nt, Human
uccuugggucuccauugaag

SEQ ID NO: 490378 - RNA, 19 nt, Human
ucucacuauguugcccagg

SEQ ID NO: 490379 - RNA, 26 nt, Human
ucucacuauguugcccaggcucuucu

SEQ ID NO: 490380 - RNA, 27 nt, Human
ucucacuauguugcccaggcucuucuc

SEQ ID NO: 490381 - RNA, 19 nt, Human
ucucacucugucacccagg

SEQ ID NO: 490382 - RNA, 23 nt, Human
ucucacucugucacccaggcuaa

SEQ ID NO: 490383 - RNA, 25 nt, Human
ucucacucugucacccaggcuaagu

SEQ ID NO: 490384 - RNA, 19 nt, Human
ucucgaacuccuggucuca

SEQ ID NO: 490385 - RNA, 19 nt, Human
ucucgcucugucacccagg

SEQ ID NO: 490386 - RNA, 23 nt, Human
ucucgcucugucacccaggcugg

SEQ ID NO: 490387 - RNA, 24 nt, Human
ucucgcucugucacccaggcugga

SEQ ID NO: 490388 - RNA, 26 nt, Human
ucucgcucugucacccaggcuggaau

SEQ ID NO: 490389 - RNA, 27 nt, Human
ucucgcucugucacccaggcuggaaug

SEQ ID NO: 490390 - RNA, 20 nt, Human
ucugucacccaggcuaagua

SEQ ID NO: 490391 - RNA, 24 nt, Human
ucugucacccaggcuggaaugcaa

SEQ ID NO: 490392 - RNA, 22 nt, Human
ugagauagggucucacucuguc

SEQ ID NO: 490393 - RNA, 22 nt, Human
ugauacggagucucgcucuguc

SEQ ID NO: 490394 - RNA, 23 nt, Human
ugccaggaauggcugcugacugc

SEQ ID NO: 490395 - RNA, 24 nt, Human
ugcccaggcucuucucgaacuccu

SEQ ID NO: 490396 - RNA, 24 nt, Human
ugccucagcuucccaaagggcugg

SEQ ID NO: 490397 - RNA, 23 nt, Human
ugcucuguuucucuaacauuuca

SEQ ID NO: 490398 - RNA, 22 nt, Human
ugcugacugcggggcacugaug

SEQ ID NO: 490399 - RNA, 25 nt, Human
uggcagaguucacugccaggaaugg

SEQ ID NO: 490400 - RNA, 25 nt, Human
uggcgcaaucucacugcgcccggaa

SEQ ID NO: 490401 - RNA, 18 nt, Human
uggcucaagugauccucu

SEQ ID NO: 490402 - RNA, 19 nt, Human
ugggacuacaggcauucau

SEQ ID NO: 490403 - RNA, 22 nt, Human
ugggacuacaggcauucauuaa

SEQ ID NO: 490404 - RNA, 24 nt, Human
ugggacuacaggcauucauuacca

SEQ ID NO: 490405 - RNA, 18 nt, Human
ugggauuaugggcaugag

SEQ ID NO: 490406 - RNA, 19 nt, Human
ugggauuaugggcaugagc

SEQ ID NO: 490407 - RNA, 21 nt, Human
ugggauuaugggcaugagcca

SEQ ID NO: 490408 - RNA, 22 nt, Human
ugggauuaugggcaugagccau

SEQ ID NO: 490409 - RNA, 23 nt, Human
ugggauuaugggcaugagccauc

SEQ ID NO: 490410 - RNA, 24 nt, Human
ugggauuaugggcaugagccauca

SEQ ID NO: 490411 - RNA, 24 nt, Human
uggggucucacuauguugcccagg

SEQ ID NO: 490412 - RNA, 25 nt, Human
ugggucagauguuuagcagaaugcc

SEQ ID NO: 490413 - RNA, 26 nt, Human
ugggugccuuuucauugcaaugccuc

SEQ ID NO: 490414 - RNA, 24 nt, Human
uguagagauggggucucacuaugu

SEQ ID NO: 490415 - RNA, 18 nt, Human
ugucacccaggcuaagua

SEQ ID NO: 490416 - RNA, 18 nt, Human
uguccggaguagcuggga

SEQ ID NO: 490417 - RNA, 19 nt, Human
uuaaugcacaacccagcaa

SEQ ID NO: 490418 - RNA, 24 nt, Human
uuaccauguccagcuaauuuuuuu

SEQ ID NO: 490419 - RNA, 22 nt, Human
uucacugccaggaauggcugcu

SEQ ID NO: 490420 - RNA, 24 nt, Human
uucaucuaugcaccagauccucag

SEQ ID NO: 490421 - RNA, 19 nt, Human
uucccacaaggaguuccag

SEQ ID NO: 490422 - RNA, 19 nt, Human
uucugcguggugcuugaag

SEQ ID NO: 490423 - RNA, 23 nt, Human
uugaagcaaagagagaacaucca

SEQ ID NO: 490424 - RNA, 24 nt, Human
uuguagagauggggucucacuaug

SEQ ID NO: 490425 - RNA, 18 nt, Human
uuuguagagauggggucu

SEQ ID NO: 490426 - RNA, 24 nt, Human
uuuguagagauggggucucacuau

SEQ ID NO: 490427 - RNA, 22 nt, Human
uuuuuuuuuugaaggcaagacu

SEQ ID NO: 490428 - RNA, 23 nt, Human
uuuuuuuuuugagauagggucuc

SEQ ID NO: 490429 - RNA, 23 nt, Human
uuuuuuuuuuuugagauaggguc

SEQ ID NO: 490430 - RNA, 26 nt, Human
uuuuuuuuuuuugagauagggucuca

SEQ ID NO: 490431 - RNA, 20 nt, Human
agcuugccugcuguggggcc

SEQ ID NO: 490432 - RNA, 22 nt, Human
aggcacuuucugucccaggaag

SEQ ID NO: 490433 - RNA, 22 nt, Human
agggggaaggaggagagggacc

SEQ ID NO: 490434 - RNA, 23 nt, Human
augagggggaaggaggagaggga

SEQ ID NO: 490435 - RNA, 19 nt, Human
caauucuuuccccaagggg

SEQ ID NO: 490436 - RNA, 21 nt, Human
ccuggaggccgggccccuggg

SEQ ID NO: 490437 - RNA, 18 nt, Human
cucagcuugccugcugug

SEQ ID NO: 490438 - RNA, 21 nt, Human
cuggggaugcagguggaggca

SEQ ID NO: 490439 - RNA, 22 nt, Human
gaaggggagaugagggggaagg

SEQ ID NO: 490440 - RNA, 20 nt, Human
gagggggaaggaggagaggg

SEQ ID NO: 490441 - RNA, 20 nt, Human
gaugagggggaaggaggaga

SEQ ID NO: 490442 - RNA, 24 nt, Human
gaugagggggaaggaggagaggga

SEQ ID NO: 490443 - RNA, 18 nt, Human
gcagguggaggcacuuuc

SEQ ID NO: 490444 - RNA, 21 nt, Human
gcccuggaggccgggccccug

SEQ ID NO: 490445 - RNA, 20 nt, Human
ggaagggaggcaggcgcggg

SEQ ID NO: 490446 - RNA, 21 nt, Human
ggggaaagggguguccuagga

SEQ ID NO: 490447 - RNA, 24 nt, Human
gggggcacaauucuuuccccaagg

SEQ ID NO: 490448 - RNA, 18 nt, Human
uggcggggaagggaggca

SEQ ID NO: 490449 - RNA, 20 nt, Human
uggcggggaagggaggcagg

SEQ ID NO: 490450 - RNA, 22 nt, Human
uggcggggaagggaggcaggcg

SEQ ID NO: 490451 - RNA, 19 nt, Human
uggggccagcgggcccugg

SEQ ID NO: 490452 - RNA, 19 nt, Human
aaggugccuccggaggagg

SEQ ID NO: 490453 - RNA, 19 nt, Human
aaguggcuugugacaugag

SEQ ID NO: 490454 - RNA, 21 nt, Human
accagccgacuggccuuagcc

SEQ ID NO: 490455 - RNA, 22 nt, Human
acccgacgaugcagcacccccc

SEQ ID NO: 490456 - RNA, 19 nt, Human
acgcagggccgcggccggg

SEQ ID NO: 490457 - RNA, 23 nt, Human
acgugaggcuucaagagacucag

SEQ ID NO: 490458 - RNA, 23 nt, Human
agacagagguuccccaggugggg

SEQ ID NO: 490459 - RNA, 21 nt, Human
agacccgccagcaggggccug

SEQ ID NO: 490460 - RNA, 23 nt, Human
agagccccucccgcccagcaccc

SEQ ID NO: 490461 - RNA, 25 nt, Human
agcaggcaagagaguuggggggccg

SEQ ID NO: 490462 - RNA, 18 nt, Human
agccacguggccuuggga

SEQ ID NO: 490463 - RNA, 25 nt, Human
aggcaagagaguuggggggccgggu

SEQ ID NO: 490464 - RNA, 23 nt, Human
aggcccugcaauaugagccgaaa

SEQ ID NO: 490465 - RNA, 20 nt, Human
aggggccuggggcaagaggc

SEQ ID NO: 490466 - RNA, 22 nt, Human
agggggaggcuggucaggggca

SEQ ID NO: 490467 - RNA, 20 nt, Human
caagagacucaguguggggc

SEQ ID NO: 490468 - RNA, 22 nt, Human
caagagaguuggggggccgggu

SEQ ID NO: 490469 - RNA, 20 nt, Human
cacacgcagggccgcggccg

SEQ ID NO: 490470 - RNA, 22 nt, Human
cacagagaaaagacgcaagaca

SEQ ID NO: 490471 - RNA, 18 nt, Human
cacaggcccugaggacac

SEQ ID NO: 490472 - RNA, 21 nt, Human
cacaggcccugaggacacagg

SEQ ID NO: 490473 - RNA, 18 nt, Human
cacuggggcugccaggua

SEQ ID NO: 490474 - RNA, 22 nt, Human
cagcaggggccuggggcaagag

SEQ ID NO: 490475 - RNA, 19 nt, Human
cagcauugcauagugacca

SEQ ID NO: 490476 - RNA, 23 nt, Human
cagccacguggccuugggacgcc

SEQ ID NO: 490477 - RNA, 24 nt, Human
cagccuggaugcuggggucacuaa

SEQ ID NO: 490478 - RNA, 25 nt, Human
cagccuggaugcuggggucacuaag

SEQ ID NO: 490479 - RNA, 25 nt, Human
caggagggagccagcuaacagguca

SEQ ID NO: 490480 - RNA, 21 nt, Human
caggccagagccccucccgcc

SEQ ID NO: 490481 - RNA, 22 nt, Human
caggccccugaaaaggggugac

SEQ ID NO: 490482 - RNA, 21 nt, Human
caggcccugaggacacaggga

SEQ ID NO: 490483 - RNA, 23 nt, Human
cagggcugaggacccaggccaga

SEQ ID NO: 490484 - RNA, 21 nt, Human
caggucaguguucugggcaga

SEQ ID NO: 490485 - RNA, 20 nt, Human
ccacagagaaaagacgcaag

SEQ ID NO: 490486 - RNA, 20 nt, Human
ccacugugcccucagggagc

SEQ ID NO: 490487 - RNA, 21 nt, Human
ccagcacccgcgacgccagcc

SEQ ID NO: 490488 - RNA, 22 nt, Human
ccaggccccugaaaagggguga

SEQ ID NO: 490489 - RNA, 18 nt, Human
cccagcacccgcgacgcc

SEQ ID NO: 490490 - RNA, 19 nt, Human
ccccucccgcccagcaccc

SEQ ID NO: 490491 - RNA, 23 nt, Human
ccccugaaaaggggugaccugaa

SEQ ID NO: 490492 - RNA, 20 nt, Human
ccgggaugcggcuggggcug

SEQ ID NO: 490493 - RNA, 18 nt, Human
cgaaagaccccuggaccc

SEQ ID NO: 490494 - RNA, 23 nt, Human
cgaaagaccccuggacccaaggg

SEQ ID NO: 490495 - RNA, 18 nt, Human
cggaggaggccgggaugc

SEQ ID NO: 490496 - RNA, 19 nt, Human
cggcagccgcgccggcccg

SEQ ID NO: 490497 - RNA, 19 nt, Human
cggcgccccagcacugggg

SEQ ID NO: 490498 - RNA, 21 nt, Human
cggcuggggcugucuggcacg

SEQ ID NO: 490499 - RNA, 22 nt, Human
cgggguggcagcugcccggccu

SEQ ID NO: 490500 - RNA, 20 nt, Human
cucaagaguccacagagaaa

SEQ ID NO: 490501 - RNA, 18 nt, Human
cucagggagccuccccag

SEQ ID NO: 490502 - RNA, 24 nt, Human
cugcaauaugagccgaaagacccc

SEQ ID NO: 490503 - RNA, 21 nt, Human
cuggggcugucuggcacgggg

SEQ ID NO: 490504 - RNA, 22 nt, Human
cuggggcugucuggcacgggga

SEQ ID NO: 490505 - RNA, 20 nt, Human
cuuuaugcgcaggcucuggg

SEQ ID NO: 490506 - RNA, 23 nt, Human
gaccgcggcgccgagcggcagcc

SEQ ID NO: 490507 - RNA, 26 nt, Human
gaggcggggccaagcucacacaggga

SEQ ID NO: 490508 - RNA, 21 nt, Human
gagugggggaggcccugccuc

SEQ ID NO: 490509 - RNA, 24 nt, Human
gcagggccgcggccgggugggcgc

SEQ ID NO: 490510 - RNA, 18 nt, Human
gcccucgcucuccuccug

SEQ ID NO: 490511 - RNA, 20 nt, Human
gcgccagggacuucggggca

SEQ ID NO: 490512 - RNA, 18 nt, Human
gcgccgagcggcagccgc

SEQ ID NO: 490513 - RNA, 19 nt, Human
gcgccgagcggcagccgcg

SEQ ID NO: 490514 - RNA, 24 nt, Human
gcucaggcguccucaagaguccac

SEQ ID NO: 490515 - RNA, 19 nt, Human
ggaugcuggggucacuaag

SEQ ID NO: 490516 - RNA, 20 nt, Human
ggccacccuuucugcccugg

SEQ ID NO: 490517 - RNA, 20 nt, Human
ggcccucgcucuccuccugg

SEQ ID NO: 490518 - RNA, 22 nt, Human
ggccuuagccugaccugcgcug

SEQ ID NO: 490519 - RNA, 20 nt, Human
gggcagaaguggggcacgaa

SEQ ID NO: 490520 - RNA, 20 nt, Human
gggccgaguaccaggagaaa

SEQ ID NO: 490521 - RNA, 20 nt, Human
gggccgcggccgggugggcg

SEQ ID NO: 490522 - RNA, 18 nt, Human
ggggaaggggugcgugaa

SEQ ID NO: 490523 - RNA, 20 nt, Human
ggggaggcuggucaggggca

SEQ ID NO: 490524 - RNA, 18 nt, Human
ggggcgucgggccgggcg

SEQ ID NO: 490525 - RNA, 21 nt, Human
gggugugcaggagggagccag

SEQ ID NO: 490526 - RNA, 24 nt, Human
guaacacaggcccugaggacacag

SEQ ID NO: 490527 - RNA, 19 nt, Human
ucacaggcagcaggcaaga

SEQ ID NO: 490528 - RNA, 27 nt, Human
ucagacgaggccuauagcaaacccacu

SEQ ID NO: 490529 - RNA, 24 nt, Human
uccacagagaaaagacgcaagaca

SEQ ID NO: 490530 - RNA, 18 nt, Human
ucccgcccagcacccgcg

SEQ ID NO: 490531 - RNA, 19 nt, Human
ucccuggaugggccacccu

SEQ ID NO: 490532 - RNA, 23 nt, Human
ucgcucuccuccugggcgagcag

SEQ ID NO: 490533 - RNA, 21 nt, Human
ugacaugagcaacccaggccc

SEQ ID NO: 490534 - RNA, 21 nt, Human
ugaccugcgcugaguggggga

SEQ ID NO: 490535 - RNA, 20 nt, Human
ugcccugggaggaggcucug

SEQ ID NO: 490536 - RNA, 20 nt, Human
ugcggcuggggcugucuggc

SEQ ID NO: 490537 - RNA, 21 nt, Human
uggacccaagggggaggcugg

SEQ ID NO: 490538 - RNA, 19 nt, Human
uggcaaaguggcuuuaugc

SEQ ID NO: 490539 - RNA, 24 nt, Human
uggcaggcccugcaauaugagccg

SEQ ID NO: 490540 - RNA, 20 nt, Human
ugggaggaggcucuggggug

SEQ ID NO: 490541 - RNA, 23 nt, Human
ugggcagaaguggggcacgaagu

SEQ ID NO: 490542 - RNA, 19 nt, Human
uggggcaagaggcggggcc

SEQ ID NO: 490543 - RNA, 24 nt, Human
ugggggaggcccugccucccugcc

SEQ ID NO: 490544 - RNA, 24 nt, Human
uuuggggaaggggugcgugaaggc

SEQ ID NO: 490545 - RNA, 24 nt, Human
aaaaaaaagaccggaaaccacuga

SEQ ID NO: 490546 - RNA, 22 nt, Human
aaagcaauaaauuacaaggccc

SEQ ID NO: 490547 - RNA, 22 nt, Human
aacccacccccugcccacccug

SEQ ID NO: 490548 - RNA, 20 nt, Human
aacgcccuccccacgccccu

SEQ ID NO: 490549 - RNA, 18 nt, Human
aagaagauucacaccacu

SEQ ID NO: 490550 - RNA, 23 nt, Human
acagacacaacccgagagcaccc

SEQ ID NO: 490551 - RNA, 21 nt, Human
accacugccuccaaggagaug

SEQ ID NO: 490552 - RNA, 20 nt, Human
acccaguuuguggggaaggg

SEQ ID NO: 490553 - RNA, 19 nt, Human
accccaaaacgcccucccc

SEQ ID NO: 490554 - RNA, 26 nt, Human
accccaaaacgcccuccccacgcccc

SEQ ID NO: 490555 - RNA, 19 nt, Human
acccccaccccaacccacc

SEQ ID NO: 490556 - RNA, 21 nt, Human
acccccaccccaacccacccc

SEQ ID NO: 490557 - RNA, 19 nt, Human
acccccugcccacccuggg

SEQ ID NO: 490558 - RNA, 24 nt, Human
acccucccagccaccucgaauccu

SEQ ID NO: 490559 - RNA, 18 nt, Human
acccugggcuuccccuac

SEQ ID NO: 490560 - RNA, 19 nt, Human
accuccccuuccgcgaacc

SEQ ID NO: 490561 - RNA, 25 nt, Human
acgcccuccccacgccccugcccgc

SEQ ID NO: 490562 - RNA, 22 nt, Human
agaaaaaaaaaaaaaaaaaaag

SEQ ID NO: 490563 - RNA, 24 nt, Human
agacacaacccgagagcaccccca

SEQ ID NO: 490564 - RNA, 18 nt, Human
agacccagagcaauccga

SEQ ID NO: 490565 - RNA, 19 nt, Human
agaccggaaaccacugaca

SEQ ID NO: 490566 - RNA, 25 nt, Human
agagcacccccaccccaacccaccc

SEQ ID NO: 490567 - RNA, 19 nt, Human
agcacccccaccccaaccc

SEQ ID NO: 490568 - RNA, 19 nt, Human
aggcagggcugggccaggu

SEQ ID NO: 490569 - RNA, 19 nt, Human
aguguggaaacaauggaga

SEQ ID NO: 490570 - RNA, 27 nt, Human
aguuuguggggaaggggcagggggccu

SEQ ID NO: 490571 - RNA, 18 nt, Human
caaccaccucuggcccug

SEQ ID NO: 490572 - RNA, 19 nt, Human
caaggcccccgcagcccuc

SEQ ID NO: 490573 - RNA, 25 nt, Human
caagucccggggcuagcccuccccu

SEQ ID NO: 490574 - RNA, 24 nt, Human
caccccaacccacccccugcccac

SEQ ID NO: 490575 - RNA, 22 nt, Human
cacccccaccccaacccacccc

SEQ ID NO: 490576 - RNA, 23 nt, Human
cacccccaccccaacccaccccc

SEQ ID NO: 490577 - RNA, 22 nt, Human
cacccccaugagcagcaggggu

SEQ ID NO: 490578 - RNA, 22 nt, Human
cacccccugcccacccugggcu

SEQ ID NO: 490579 - RNA, 24 nt, Human
caccucgaauccucucagcccugg

SEQ ID NO: 490580 - RNA, 19 nt, Human
cacuuccucuuuaauugcu

SEQ ID NO: 490581 - RNA, 19 nt, Human
cagagcaauccgagugugg

SEQ ID NO: 490582 - RNA, 19 nt, Human
cagcagggguccugccccu

SEQ ID NO: 490583 - RNA, 23 nt, Human
caggaccgggucuucuuuccgcc

SEQ ID NO: 490584 - RNA, 21 nt, Human
caggcucuugguuccccccgg

SEQ ID NO: 490585 - RNA, 19 nt, Human
cagugggagggaggggcug

SEQ ID NO: 490586 - RNA, 20 nt, Human
caucccuucucccucccaag

SEQ ID NO: 490587 - RNA, 22 nt, Human
cauguccaagcgccuaggagcc

SEQ ID NO: 490588 - RNA, 25 nt, Human
ccacccccaugagcagcaggggucc

SEQ ID NO: 490589 - RNA, 22 nt, Human
ccagaaaaaaaaaaaaaaaaaa

SEQ ID NO: 490590 - RNA, 23 nt, Human
ccagaaaaaaaaaaaaaaaaaaa

SEQ ID NO: 490591 - RNA, 21 nt, Human
ccagugggagggaggggcugg

SEQ ID NO: 490592 - RNA, 19 nt, Human
ccaucccuucucccuccca

SEQ ID NO: 490593 - RNA, 21 nt, Human
ccauguacuaaacccucccuc

SEQ ID NO: 490594 - RNA, 19 nt, Human
ccauguuggggaacaaagc

SEQ ID NO: 490595 - RNA, 22 nt, Human
cccaccccaacccacccccugc

SEQ ID NO: 490596 - RNA, 21 nt, Human
cccaccucucuccccucccca

SEQ ID NO: 490597 - RNA, 24 nt, Human
cccaccucucuccccuccccaauu

SEQ ID NO: 490598 - RNA, 18 nt, Human
ccccaaaacgcccucccc

SEQ ID NO: 490599 - RNA, 18 nt, Human
ccccaaaacgcccucccc

SEQ ID NO: 490600 - RNA, 20 nt, Human
ccccaaaccucagaaggccc

SEQ ID NO: 490601 - RNA, 21 nt, Human
ccccaaaccucagaaggcccc

SEQ ID NO: 490602 - RNA, 22 nt, Human
ccccaagucccggggcuagccc

SEQ ID NO: 490603 - RNA, 24 nt, Human
cccccaaaccucagaaggccccuu

SEQ ID NO: 490604 - RNA, 19 nt, Human
cccccaccccaacccaccc

SEQ ID NO: 490605 - RNA, 21 nt, Human
cccccauccccauguugggga

SEQ ID NO: 490606 - RNA, 28 nt, Human
cccccaugagcagcagggguccugcccu

SEQ ID NO: 490607 - RNA, 22 nt, Human
cccccggacucuuuagcuucca

SEQ ID NO: 490608 - RNA, 21 nt, Human
ccccgcagcccucuuagcccg

SEQ ID NO: 490609 - RNA, 21 nt, Human
ccccuagggggcacaagcggg

SEQ ID NO: 490610 - RNA, 18 nt, Human
ccccugcccacccugggc

SEQ ID NO: 490611 - RNA, 22 nt, Human
ccccugcccacccugggcuucc

SEQ ID NO: 490612 - RNA, 26 nt, Human
ccccugcccacccugggcuuccccua

SEQ ID NO: 490613 - RNA, 19 nt, Human
ccccugcccgcccccaucc

SEQ ID NO: 490614 - RNA, 20 nt, Human
ccccugcccgcccccauccc

SEQ ID NO: 490615 - RNA, 21 nt, Human
cccuaccccaaaacgcccucc

SEQ ID NO: 490616 - RNA, 24 nt, Human
cccuaccccaaaacgcccucccca

SEQ ID NO: 490617 - RNA, 23 nt, Human
cccucccagccaccucgaauccu

SEQ ID NO: 490618 - RNA, 23 nt, Human
cccuccccacgccccugcccgcc

SEQ ID NO: 490619 - RNA, 24 nt, Human
ccuaggagcccguaccgcugggga

SEQ ID NO: 490620 - RNA, 20 nt, Human
ccucccaagauaguaguggg

SEQ ID NO: 490621 - RNA, 19 nt, Human
ccuccccacgccccugccc

SEQ ID NO: 490622 - RNA, 18 nt, Human
ccuccccuuccgcgaacc

SEQ ID NO: 490623 - RNA, 23 nt, Human
ccugcuccaucccuucucccucc

SEQ ID NO: 490624 - RNA, 30 nt, Human
ccuugcccccaccucucuccccuccccaag

SEQ ID NO: 490625 - RNA, 23 nt, Human
cgagagcacccccaccccaaccc

SEQ ID NO: 490626 - RNA, 24 nt, Human
cgagagcacccccaccccaaccca

SEQ ID NO: 490627 - RNA, 21 nt, Human
cgccccaggagccagccuggg

SEQ ID NO: 490628 - RNA, 19 nt, Human
cgugggggcugugcccucg

SEQ ID NO: 490629 - RNA, 20 nt, Human
cuaaacccucccucuggcgu

SEQ ID NO: 490630 - RNA, 24 nt, Human
cuagcccucccauguacuaaaccc

SEQ ID NO: 490631 - RNA, 23 nt, Human
cucguuggggagagggaggugag

SEQ ID NO: 490632 - RNA, 21 nt, Human
cuugccaggcuaacaaccacc

SEQ ID NO: 490633 - RNA, 19 nt, Human
gaaagaauaaugggggagg

SEQ ID NO: 490634 - RNA, 21 nt, Human
gaccggaaaccacugacacag

SEQ ID NO: 490635 - RNA, 22 nt, Human
gagcaauccgaguguggaaaca

SEQ ID NO: 490636 - RNA, 21 nt, Human
gagggggcguguugagcuggg

SEQ ID NO: 490637 - RNA, 22 nt, Human
gcagcccucuuagcccgcuccu

SEQ ID NO: 490638 - RNA, 25 nt, Human
gcccaagggcuggguuggcugaggg

SEQ ID NO: 490639 - RNA, 21 nt, Human
gcccacccugggcuuccccua

SEQ ID NO: 490640 - RNA, 23 nt, Human
gcccuacagcccccaaaccucag

SEQ ID NO: 490641 - RNA, 18 nt, Human
gcccuugcccccuucacu

SEQ ID NO: 490642 - RNA, 24 nt, Human
gcgaaccccgagcggguagaccca

SEQ ID NO: 490643 - RNA, 24 nt, Human
gcugagggaggcagggcugggcca

SEQ ID NO: 490644 - RNA, 18 nt, Human
gcuuccccuaccccaaaa

SEQ ID NO: 490645 - RNA, 22 nt, Human
ggaaacaauggagagggggccg

SEQ ID NO: 490646 - RNA, 23 nt, Human
ggagagggggcguguugagcugg

SEQ ID NO: 490647 - RNA, 21 nt, Human
ggagcugcuccagugggaggg

SEQ ID NO: 490648 - RNA, 25 nt, Human
ggaggcagggcugggcccccaaggg

SEQ ID NO: 490649 - RNA, 21 nt, Human
gggcggggugcggaucggaga

SEQ ID NO: 490650 - RNA, 23 nt, Human
ggguaggaagugcucccgugggg

SEQ ID NO: 490651 - RNA, 20 nt, Human
ggguccugccccucgcugcc

SEQ ID NO: 490652 - RNA, 21 nt, Human
gguaggaagugcucccguggg

SEQ ID NO: 490653 - RNA, 23 nt, Human
gguuggcugagggaggcagggcu

SEQ ID NO: 490654 - RNA, 18 nt, Human
guuugugucuucuggaag

SEQ ID NO: 490655 - RNA, 21 nt, Human
uaccccaaaacgcccucccca

SEQ ID NO: 490656 - RNA, 22 nt, Human
uaccccaaaacgcccuccccac

SEQ ID NO: 490657 - RNA, 23 nt, Human
uaccccagaucaccacgggcgcu

SEQ ID NO: 490658 - RNA, 23 nt, Human
uaccgcuggggaccuccccuucc

SEQ ID NO: 490659 - RNA, 20 nt, Human
uacuaaacccucccucuggc

SEQ ID NO: 490660 - RNA, 26 nt, Human
uagcccucccauguacuaaacccucc

SEQ ID NO: 490661 - RNA, 20 nt, Human
uaggaagugcucccgugggg

SEQ ID NO: 490662 - RNA, 25 nt, Human
uaguagugggagggacccaggcucu

SEQ ID NO: 490663 - RNA, 21 nt, Human
ucacggucacagacacaaccc

SEQ ID NO: 490664 - RNA, 22 nt, Human
ucccucuggcguggcgucgccc

SEQ ID NO: 490665 - RNA, 18 nt, Human
uccgcccuaucacccagu

SEQ ID NO: 490666 - RNA, 23 nt, Human
uccgcgaaccccgagcggguaga

SEQ ID NO: 490667 - RNA, 22 nt, Human
uccucucagcccuggcugggag

SEQ ID NO: 490668 - RNA, 21 nt, Human
ucgaauccucucagcccuggc

SEQ ID NO: 490669 - RNA, 20 nt, Human
ucgcugcccuugcccccuuc

SEQ ID NO: 490670 - RNA, 19 nt, Human
ucuggagcugcuccagugg

SEQ ID NO: 490671 - RNA, 18 nt, Human
ugagggaggcagggcugg

SEQ ID NO: 490672 - RNA, 18 nt, Human
ugccaggcuaacaaccac

SEQ ID NO: 490673 - RNA, 18 nt, Human
ugcccggcccgcgugggg

SEQ ID NO: 490674 - RNA, 18 nt, Human
ugcccggcccgcgugggg

SEQ ID NO: 490675 - RNA, 20 nt, Human
ugcccuugcccccuucacug

SEQ ID NO: 490676 - RNA, 20 nt, Human
ugcuccaucccuucucccuc

SEQ ID NO: 490677 - RNA, 22 nt, Human
uggagagggggcguguugagcc

SEQ ID NO: 490678 - RNA, 24 nt, Human
uggagagggggcguguugagcugg

SEQ ID NO: 490679 - RNA, 20 nt, Human
uggcugagggaggcagggcu

SEQ ID NO: 490680 - RNA, 24 nt, Human
uggcugagggaggcagggcugggc

SEQ ID NO: 490681 - RNA, 20 nt, Human
ugggagaggucacgggggug

SEQ ID NO: 490682 - RNA, 18 nt, Human
ugggagggacccaggcuc

SEQ ID NO: 490683 - RNA, 20 nt, Human
uggggaaggggcagggggcc

SEQ ID NO: 490684 - RNA, 22 nt, Human
uggggagagggaggugaguuug

SEQ ID NO: 490685 - RNA, 25 nt, Human
ugggggaggggucccacuguagggg

SEQ ID NO: 490686 - RNA, 21 nt, Human
uguggggaaggggcagggggc

SEQ ID NO: 490687 - RNA, 24 nt, Human
uuacaaggcccccgcagcccucuu

SEQ ID NO: 490688 - RNA, 23 nt, Human
uuguggggaaggggcagggggcc

SEQ ID NO: 490689 - RNA, 20 nt, Human
aagccaguauucucccugga

SEQ ID NO: 490690 - RNA, 22 nt, Human
aagccaguauucucccuggaca

SEQ ID NO: 490691 - RNA, 24 nt, Human
acuaacacauccaccucggcaaaa

SEQ ID NO: 490692 - RNA, 22 nt, Human
agaagaaaggcgcgggcggagc

SEQ ID NO: 490693 - RNA, 25 nt, Human
agaagaaaggcgcgggcggagcagg

SEQ ID NO: 490694 - RNA, 25 nt, Human
agagauggaauccaaguguuccguu

SEQ ID NO: 490695 - RNA, 24 nt, Human
agcagccauuaaagcccaggcagc

SEQ ID NO: 490696 - RNA, 18 nt, Human
agcuacaacugauuugac

SEQ ID NO: 490697 - RNA, 19 nt, Human
aggaagagggaggggaugc

SEQ ID NO: 490698 - RNA, 22 nt, Human
aggcccgucgcucucuccugug

SEQ ID NO: 490699 - RNA, 23 nt, Human
aggcgccgcgcccggagccgcgc

SEQ ID NO: 490700 - RNA, 19 nt, Human
agggaggggaugcgacggg

SEQ ID NO: 490701 - RNA, 23 nt, Human
auugcaaucacaucguggcaauc

SEQ ID NO: 490702 - RNA, 20 nt, Human
caaagggccgaggcccgucg

SEQ ID NO: 490703 - RNA, 21 nt, Human
caaauauauuuucacacaucu

SEQ ID NO: 490704 - RNA, 23 nt, Human
caacugauuugacacacaccauc

SEQ ID NO: 490705 - RNA, 22 nt, Human
caaggguccugcgccaugugcu

SEQ ID NO: 490706 - RNA, 23 nt, Human
cacaccaucauaggggcuucaaa

SEQ ID NO: 490707 - RNA, 21 nt, Human
cauaggggcuucaaaccugac

SEQ ID NO: 490708 - RNA, 26 nt, Human
caucaaagggccgaggcccgucgcuc

SEQ ID NO: 490709 - RNA, 21 nt, Human
cccccgccgccgccgccccgc

SEQ ID NO: 490710 - RNA, 22 nt, Human
cccccgccgccgccgccccgcg

SEQ ID NO: 490711 - RNA, 21 nt, Human
cccccgcgcgagcccgccgcg

SEQ ID NO: 490712 - RNA, 19 nt, Human
cccccggggagccgggccc

SEQ ID NO: 490713 - RNA, 22 nt, Human
cccccggggagccgggcccgcc

SEQ ID NO: 490714 - RNA, 22 nt, Human
ccccgcgcgagcccgccgcgcg

SEQ ID NO: 490715 - RNA, 22 nt, Human
ccccugggcaguguggccgcgc

SEQ ID NO: 490716 - RNA, 19 nt, Human
cccgccgcgcgccgcccgc

SEQ ID NO: 490717 - RNA, 21 nt, Human
cccgccgcgcgccgcccgccg

SEQ ID NO: 490718 - RNA, 19 nt, Human
cccgcgcgagcccgccgcg

SEQ ID NO: 490719 - RNA, 20 nt, Human
cccgcgcgagcccgccgcgg

SEQ ID NO: 490720 - RNA, 24 nt, Human
cccgcgggccgccgagcccggggc

SEQ ID NO: 490721 - RNA, 19 nt, Human
ccgcccggcgcgccggggc

SEQ ID NO: 490722 - RNA, 21 nt, Human
ccgcccggggggagcgcgccc

SEQ ID NO: 490723 - RNA, 18 nt, Human
ccgccgccgccccgcgcc

SEQ ID NO: 490724 - RNA, 20 nt, Human
ccgccgccgccccgcgcccc

SEQ ID NO: 490725 - RNA, 25 nt, Human
ccgccgccgccgccccgcgccccgg

SEQ ID NO: 490726 - RNA, 21 nt, Human
ccgccgcgcgccgcccgccga

SEQ ID NO: 490727 - RNA, 21 nt, Human
ccgccgcgcuccgagcgccgg

SEQ ID NO: 490728 - RNA, 22 nt, Human
ccgcgcgccccccgccgccgcc

SEQ ID NO: 490729 - RNA, 25 nt, Human
ccgcgcgccccccgccgccgccgcc

SEQ ID NO: 490730 - RNA, 18 nt, Human
ccgcgcgcugcguacugc

SEQ ID NO: 490731 - RNA, 21 nt, Human
ccggggggagcgcgcccccau

SEQ ID NO: 490732 - RNA, 22 nt, Human
ccuccccucccccucgcguccc

SEQ ID NO: 490733 - RNA, 18 nt, Human
ccugagccgcagccgccu

SEQ ID NO: 490734 - RNA, 22 nt, Human
cgaaauauacucgaaaugcuau

SEQ ID NO: 490735 - RNA, 23 nt, Human
cgagcgccggggccgagggccga

SEQ ID NO: 490736 - RNA, 24 nt, Human
cgaggcccgucgcucucuccugug

SEQ ID NO: 490737 - RNA, 22 nt, Human
cgccccgcgccccggggcccgc

SEQ ID NO: 490738 - RNA, 23 nt, Human
cgccgcagcccccggggagccgg

SEQ ID NO: 490739 - RNA, 25 nt, Human
cgccgccccgcgccccggggcccgc

SEQ ID NO: 490740 - RNA, 20 nt, Human
cgccgcccggcgcgccgggg

SEQ ID NO: 490741 - RNA, 19 nt, Human
cgccggggcccccgcgcga

SEQ ID NO: 490742 - RNA, 25 nt, Human
cgccuccccucccccucgcgucccc

SEQ ID NO: 490743 - RNA, 19 nt, Human
cggcgcgccggggcccccg

SEQ ID NO: 490744 - RNA, 19 nt, Human
cgggaagaacucggcugua

SEQ ID NO: 490745 - RNA, 18 nt, Human
cuccuggccguggcgugg

SEQ ID NO: 490746 - RNA, 29 nt, Human
cuccuuguuccucgccuccccucccccuu

SEQ ID NO: 490747 - RNA, 21 nt, Human
cucuuacagucggaaaaaaac

SEQ ID NO: 490748 - RNA, 20 nt, Human
cugagccgcagccgccuucc

SEQ ID NO: 490749 - RNA, 21 nt, Human
cugcagucucccggccgccuc

SEQ ID NO: 490750 - RNA, 27 nt, Human
cuggccguggcguggguccggcccggg

SEQ ID NO: 490751 - RNA, 27 nt, Human
cuucaaaccugacaaacucugugcuug

SEQ ID NO: 490752 - RNA, 20 nt, Human
gaaaaaaacagccuuuugug

SEQ ID NO: 490753 - RNA, 22 nt, Human
gacugaaaaauuaaacagauac

SEQ ID NO: 490754 - RNA, 21 nt, Human
gagagugggugggcgggaggg

SEQ ID NO: 490755 - RNA, 19 nt, Human
gagcagccauuaaagccca

SEQ ID NO: 490756 - RNA, 18 nt, Human
gagcccggggcgccgcag

SEQ ID NO: 490757 - RNA, 21 nt, Human
gagggagguggccaccaggaa

SEQ ID NO: 490758 - RNA, 23 nt, Human
gccccccgccgccgccgccccgc

SEQ ID NO: 490759 - RNA, 19 nt, Human
gccccgaaggaggcuugcu

SEQ ID NO: 490760 - RNA, 21 nt, Human
gccccggggcccgcgggcccc

SEQ ID NO: 490761 - RNA, 22 nt, Human
gccgcagccgccuuccagcccu

SEQ ID NO: 490762 - RNA, 18 nt, Human
gccgcgcccggagccgcg

SEQ ID NO: 490763 - RNA, 18 nt, Human
gcgccggggcccccgcgc

SEQ ID NO: 490764 - RNA, 23 nt, Human
gcgcgggcggagcaggcgcgggg

SEQ ID NO: 490765 - RNA, 19 nt, Human
gcggcgagcaggcgggcac

SEQ ID NO: 490766 - RNA, 19 nt, Human
gcgggugcggccggccccg

SEQ ID NO: 490767 - RNA, 22 nt, Human
ggagcagccauuaaagcccagg

SEQ ID NO: 490768 - RNA, 21 nt, Human
ggcuugaaagaacaugucugg

SEQ ID NO: 490769 - RNA, 27 nt, Human
gggcaguguggccgcgcugcucugggc

SEQ ID NO: 490770 - RNA, 20 nt, Human
gggcggagcaggcgcggggc

SEQ ID NO: 490771 - RNA, 18 nt, Human
ggggaguuuaugaaaagg

SEQ ID NO: 490772 - RNA, 19 nt, Human
ggggugagagugggugggc

SEQ ID NO: 490773 - RNA, 18 nt, Human
gggugagagugggugggc

SEQ ID NO: 490774 - RNA, 20 nt, Human
gguuuugugauuuuguuuga

SEQ ID NO: 490775 - RNA, 23 nt, Human
guuuggggugagagugggugggc

SEQ ID NO: 490776 - RNA, 27 nt, Human
uaaauacauaacacagaagccugugug

SEQ ID NO: 490777 - RNA, 21 nt, Human
uaacacagaagccugugugac

SEQ ID NO: 490778 - RNA, 19 nt, Human
uacuaugugcucaacugcc

SEQ ID NO: 490779 - RNA, 21 nt, Human
uacugcgccgcccggcgcgcc

SEQ ID NO: 490780 - RNA, 21 nt, Human
uagcugaauuugugguuuccu

SEQ ID NO: 490781 - RNA, 19 nt, Human
uauuuuucccauuuuguuu

SEQ ID NO: 490782 - RNA, 21 nt, Human
ucaucaaagggccgaggcccg

SEQ ID NO: 490783 - RNA, 20 nt, Human
uccccucccccucgcguccc

SEQ ID NO: 490784 - RNA, 25 nt, Human
ucccuugugccaccaggacaagggu

SEQ ID NO: 490785 - RNA, 19 nt, Human
uccucgccuccccuccccc

SEQ ID NO: 490786 - RNA, 19 nt, Human
uccugagccgcagccgccu

SEQ ID NO: 490787 - RNA, 18 nt, Human
ucucccuggacagauuag

SEQ ID NO: 490788 - RNA, 19 nt, Human
ugaaagaacaugucuggga

SEQ ID NO: 490789 - RNA, 23 nt, Human
ugacaaacucugugcuugcuucu

SEQ ID NO: 490790 - RNA, 20 nt, Human
ugacuuccugagccgcagcc

SEQ ID NO: 490791 - RNA, 21 nt, Human
ugagagugggugggcgggagg

SEQ ID NO: 490792 - RNA, 21 nt, Human
ugcggccggccccgaaggagg

SEQ ID NO: 490793 - RNA, 28 nt, Human
ugcgggaagaacucggcugaucagugga

SEQ ID NO: 490794 - RNA, 22 nt, Human
uggccgggacgcgcggccggcg

SEQ ID NO: 490795 - RNA, 21 nt, Human
uggcguggguccgcgcgcugc

SEQ ID NO: 490796 - RNA, 18 nt, Human
uggggugagagugggugg

SEQ ID NO: 490797 - RNA, 21 nt, Human
uggggugagagugggugggcg

SEQ ID NO: 490798 - RNA, 22 nt, Human
uguuuggggugagagugggugg

SEQ ID NO: 490799 - RNA, 22 nt, Human
uuaaagcccaggcagccgccgc

SEQ ID NO: 490800 - RNA, 21 nt, Human
uucaaaccugacaaacucugu

SEQ ID NO: 490801 - RNA, 24 nt, Human
uucuuauuuauuuuucccauuuug

SEQ ID NO: 490802 - RNA, 22 nt, Human
uugacacacaccaucauagggg

SEQ ID NO: 490803 - RNA, 20 nt, Human
uuuaugccgucgagcuccuc

SEQ ID NO: 490804 - RNA, 19 nt, Human
accuuagggcagagggcua

SEQ ID NO: 490805 - RNA, 22 nt, Human
agcucaaauccccaacucuccu

SEQ ID NO: 490806 - RNA, 21 nt, Human
aucccucaucccucucugcug

SEQ ID NO: 490807 - RNA, 21 nt, Human
cagcacccccaacuuggugcc

SEQ ID NO: 490808 - RNA, 30 nt, Human
caucauacacacacacaucaaauauguaca

SEQ ID NO: 490809 - RNA, 20 nt, Human
caugggacucacagaucacc

SEQ ID NO: 490810 - RNA, 21 nt, Human
cccaacuuggugccguccucu

SEQ ID NO: 490811 - RNA, 23 nt, Human
ccccaacuuggugccguccucuu

SEQ ID NO: 490812 - RNA, 18 nt, Human
ccccucugcccucuuccu

SEQ ID NO: 490813 - RNA, 21 nt, Human
ccuuggcuucguccucucagc

SEQ ID NO: 490814 - RNA, 21 nt, Human
cuccucccuaauuuccuuggc

SEQ ID NO: 490815 - RNA, 27 nt, Human
cucucugcugcagcucaaauccccaac

SEQ ID NO: 490816 - RNA, 18 nt, Human
cugcagggaggagggucu

SEQ ID NO: 490817 - RNA, 21 nt, Human
cuggccccucugcccucuucc

SEQ ID NO: 490818 - RNA, 25 nt, Human
cuggccccucugcccucuuccuggg

SEQ ID NO: 490819 - RNA, 18 nt, Human
cuguuucaggaugaaggc

SEQ ID NO: 490820 - RNA, 21 nt, Human
cuuccuguuucaggaugaagg

SEQ ID NO: 490821 - RNA, 24 nt, Human
ggaguccuucuggccccucugccc

SEQ ID NO: 490822 - RNA, 18 nt, Human
ggcuucguccucucagca

SEQ ID NO: 490823 - RNA, 23 nt, Human
gucucuuucauccagcaccccca

SEQ ID NO: 490824 - RNA, 21 nt, Human
uauuccaauguacaaaguuua

SEQ ID NO: 490825 - RNA, 23 nt, Human
uccagcacccccaacuuggugcc

SEQ ID NO: 490826 - RNA, 22 nt, Human
ucccucaucccucucugcugca

SEQ ID NO: 490827 - RNA, 21 nt, Human
ucccucucugcugcagcucaa

SEQ ID NO: 490828 - RNA, 24 nt, Human
ucccuuugacucuccucccuaauu

SEQ ID NO: 490829 - RNA, 25 nt, Human
ucccuuugacucuccucccuaauuu

SEQ ID NO: 490830 - RNA, 24 nt, Human
uccucacaggcaccuccgaagggu

SEQ ID NO: 490831 - RNA, 19 nt, Human
uccuugaucccuuugacuc

SEQ ID NO: 490832 - RNA, 25 nt, Human
ucucugugucuguucccacagugcc

SEQ ID NO: 490833 - RNA, 23 nt, Human
ucuuccuguuucaggaugaaggc

SEQ ID NO: 490834 - RNA, 21 nt, Human
ugaggggcuggcacuaggagg

SEQ ID NO: 490835 - RNA, 20 nt, Human
ugaucccuuugacucuccuc

SEQ ID NO: 490836 - RNA, 23 nt, Human
uuccaauguacaaaguuuacaug

SEQ ID NO: 490837 - RNA, 24 nt, Human
uuccaauguacaaaguuuacaugg

SEQ ID NO: 490838 - RNA, 22 nt, Human
aaaaagccaaaggcacguaaaa

SEQ ID NO: 490839 - RNA, 21 nt, Human
aaaaguaugauaacagaugaa

SEQ ID NO: 490840 - RNA, 19 nt, Human
aaacuaaguaugaauacac

SEQ ID NO: 490841 - RNA, 20 nt, Human
aaagagggacccggaggugc

SEQ ID NO: 490842 - RNA, 22 nt, Human
aagcacaaagaaaggucgccgg

SEQ ID NO: 490843 - RNA, 25 nt, Human
aauccccaaaacccauaaaguucaa

SEQ ID NO: 490844 - RNA, 22 nt, Human
acaaaaaggcuuagguguuaaa

SEQ ID NO: 490845 - RNA, 19 nt, Human
acaaagaaaggucgccgga

SEQ ID NO: 490846 - RNA, 20 nt, Human
acaaagaaaggucgccggac

SEQ ID NO: 490847 - RNA, 20 nt, Human
acaagaaaauccccaaaacc

SEQ ID NO: 490848 - RNA, 24 nt, Human
acagaaaaguuuuaacacuggaga

SEQ ID NO: 490849 - RNA, 18 nt, Human
acagggcauaacagguaa

SEQ ID NO: 490850 - RNA, 21 nt, Human
accuuuuaccccaaaggaaaa

SEQ ID NO: 490851 - RNA, 25 nt, Human
acugugguuaguuuguuuuuguacc

SEQ ID NO: 490852 - RNA, 18 nt, Human
aggacugaaccugcggag

SEQ ID NO: 490853 - RNA, 20 nt, Human
agggcggggcggcgcggggc

SEQ ID NO: 490854 - RNA, 24 nt, Human
agguaaaaaaauacuuuguaagaa

SEQ ID NO: 490855 - RNA, 24 nt, Human
auauuuuaacuuuaaaaauaacuu

SEQ ID NO: 490856 - RNA, 18 nt, Human
caaaacugcaaauacagc

SEQ ID NO: 490857 - RNA, 19 nt, Human
caaccaggacaaaccggcc

SEQ ID NO: 490858 - RNA, 24 nt, Human
caagaaaauccccaaaacccauaa

SEQ ID NO: 490859 - RNA, 18 nt, Human
caauccuggccaagccag

SEQ ID NO: 490860 - RNA, 22 nt, Human
caccccggacucccgcacuaaa

SEQ ID NO: 490861 - RNA, 21 nt, Human
cacgcacauacacagcuuaca

SEQ ID NO: 490862 - RNA, 21 nt, Human
ccaaugccuccugaaaauggg

SEQ ID NO: 490863 - RNA, 21 nt, Human
ccaccccccaguaggcgacuu

SEQ ID NO: 490864 - RNA, 20 nt, Human
cccaaaggaaaaaaguuggc

SEQ ID NO: 490865 - RNA, 19 nt, Human
cccaacacaaaacugcaaa

SEQ ID NO: 490866 - RNA, 18 nt, Human
ccccagcgccacccccca

SEQ ID NO: 490867 - RNA, 24 nt, Human
ccccggacucccgcacuaaaacuc

SEQ ID NO: 490868 - RNA, 18 nt, Human
cccgcagggaagcgaggc

SEQ ID NO: 490869 - RNA, 19 nt, Human
cccucccggccgcgguacc

SEQ ID NO: 490870 - RNA, 19 nt, Human
ccgcaccccggacucccgc

SEQ ID NO: 490871 - RNA, 19 nt, Human
ccgcugaggaucccagccg

SEQ ID NO: 490872 - RNA, 23 nt, Human
ccuggccaagccagauuucuugu

SEQ ID NO: 490873 - RNA, 19 nt, Human
ccugugcccuggcccgggg

SEQ ID NO: 490874 - RNA, 24 nt, Human
ccugugcccuggcccggggccaac

SEQ ID NO: 490875 - RNA, 24 nt, Human
cgacucccuaagcacaaagaaagg

SEQ ID NO: 490876 - RNA, 26 nt, Human
cgcauuauccgcuccgagacggcgug

SEQ ID NO: 490877 - RNA, 18 nt, Human
cgcccgggugcacgggga

SEQ ID NO: 490878 - RNA, 24 nt, Human
cgcugaggaucccagccgcugccc

SEQ ID NO: 490879 - RNA, 24 nt, Human
cggcgcggggacucacuggggcgg

SEQ ID NO: 490880 - RNA, 23 nt, Human
cggcggcgcggggacucacuggg

SEQ ID NO: 490881 - RNA, 20 nt, Human
cggggcggccggacgcgagg

SEQ ID NO: 490882 - RNA, 20 nt, Human
cgugaaggcgccccaggccg

SEQ ID NO: 490883 - RNA, 19 nt, Human
cuaagcaauauauagaaaa

SEQ ID NO: 490884 - RNA, 18 nt, Human
cuccgcccgcaccccgga

SEQ ID NO: 490885 - RNA, 27 nt, Human
cucgugcgcccaccucucccgauccca

SEQ ID NO: 490886 - RNA, 18 nt, Human
cugcggagggcggggcgg

SEQ ID NO: 490887 - RNA, 21 nt, Human
cuucaacugugguuaguuugu

SEQ ID NO: 490888 - RNA, 22 nt, Human
cuugaaguaccuauguaaugca

SEQ ID NO: 490889 - RNA, 24 nt, Human
cuuuacaauccguuauugguugcu

SEQ ID NO: 490890 - RNA, 22 nt, Human
cuuuuuauuguguugcuugaag

SEQ ID NO: 490891 - RNA, 25 nt, Human
gaacaucaccaaugccuccugaaaa

SEQ ID NO: 490892 - RNA, 18 nt, Human
gaagaaaaaaaaacuaag

SEQ ID NO: 490893 - RNA, 24 nt, Human
gaaguuccuuaaugugacucgcuc

SEQ ID NO: 490894 - RNA, 20 nt, Human
gaauacacuuuuccaaacac

SEQ ID NO: 490895 - RNA, 19 nt, Human
gaccuagcugugcgagugg

SEQ ID NO: 490896 - RNA, 19 nt, Human
gcaagcgggagaaagggcc

SEQ ID NO: 490897 - RNA, 21 nt, Human
gcaauaaaaagccaaaggcac

SEQ ID NO: 490898 - RNA, 18 nt, Human
gcacaaagaaaggucgcc

SEQ ID NO: 490899 - RNA, 25 nt, Human
gcgcggggacucacuggggcggggc

SEQ ID NO: 490900 - RNA, 25 nt, Human
gcgcggggcggggccggcggcgcgg

SEQ ID NO: 490901 - RNA, 20 nt, Human
gcggcgcggggacucacugg

SEQ ID NO: 490902 - RNA, 20 nt, Human
gcucagcccuucauagcuag

SEQ ID NO: 490903 - RNA, 21 nt, Human
ggccgguggccgggucuccgg

SEQ ID NO: 490904 - RNA, 18 nt, Human
gggcggcgcggggcgggg

SEQ ID NO: 490905 - RNA, 21 nt, Human
ggggacucacuggggcggggc

SEQ ID NO: 490906 - RNA, 19 nt, Human
gucaccguuggacccucgg

SEQ ID NO: 490907 - RNA, 18 nt, Human
gugcacggggacaauagg

SEQ ID NO: 490908 - RNA, 24 nt, Human
uaaaaagccaaaggcacguaaaaa

SEQ ID NO: 490909 - RNA, 25 nt, Human
uaacagaugaagaaaaaaaaacuaa

SEQ ID NO: 490910 - RNA, 24 nt, Human
uaacagguaaaaaaauacuuugua

SEQ ID NO: 490911 - RNA, 22 nt, Human
uaagaacuacaagaaaaucccc

SEQ ID NO: 490912 - RNA, 21 nt, Human
uacaauggaaucccaauggaa

SEQ ID NO: 490913 - RNA, 20 nt, Human
uacagcuccggaagcccuuc

SEQ ID NO: 490914 - RNA, 23 nt, Human
uaccccaaaggaaaaaaguuggc

SEQ ID NO: 490915 - RNA, 22 nt, Human
uaccuauauuuccaaauaacau

SEQ ID NO: 490916 - RNA, 18 nt, Human
uagaaaacccaacacaaa

SEQ ID NO: 490917 - RNA, 26 nt, Human
uagaaaagagucuacaaaaaggcuua

SEQ ID NO: 490918 - RNA, 19 nt, Human
uaguuuguuuuuguaccuu

SEQ ID NO: 490919 - RNA, 19 nt, Human
uaugauaacagaugaagaa

SEQ ID NO: 490920 - RNA, 19 nt, Human
uauguaaugcaaguaugua

SEQ ID NO: 490921 - RNA, 20 nt, Human
uauuguguugcuugaaguac

SEQ ID NO: 490922 - RNA, 21 nt, Human
uauuguguugcuugaaguacc

SEQ ID NO: 490923 - RNA, 24 nt, Human
uauuuuagaaaacccaacacaaaa

SEQ ID NO: 490924 - RNA, 19 nt, Human
ucacuggggcggggcggag

SEQ ID NO: 490925 - RNA, 20 nt, Human
uccagucuugaccacaacca

SEQ ID NO: 490926 - RNA, 21 nt, Human
ucccagccgcugccccgggcc

SEQ ID NO: 490927 - RNA, 23 nt, Human
ucccagccgcugccccgggccuc

SEQ ID NO: 490928 - RNA, 19 nt, Human
ucccgaucccaacaggccg

SEQ ID NO: 490929 - RNA, 24 nt, Human
ucccgcgggcgcacgcaaucccug

SEQ ID NO: 490930 - RNA, 19 nt, Human
uccgggcuagccccgcgcu

SEQ ID NO: 490931 - RNA, 25 nt, Human
ucgugcgcccaccucucccgauccc

SEQ ID NO: 490932 - RNA, 19 nt, Human
ucucaaguggcuucagaag

SEQ ID NO: 490933 - RNA, 22 nt, Human
ucugcaauaaaaagccaaaggc

SEQ ID NO: 490934 - RNA, 26 nt, Human
ugaaaaugggcucugacucacuuccu

SEQ ID NO: 490935 - RNA, 26 nt, Human
ugacccgcagggaagcgaggccaccu

SEQ ID NO: 490936 - RNA, 22 nt, Human
ugagauggggucaaagagaacc

SEQ ID NO: 490937 - RNA, 25 nt, Human
ugauaacagaugaagaaaaaaaaac

SEQ ID NO: 490938 - RNA, 25 nt, Human
ugccccgggccucccgcgggcgcac

SEQ ID NO: 490939 - RNA, 18 nt, Human
ugccugugucuuaccaac

SEQ ID NO: 490940 - RNA, 21 nt, Human
ugccuuuacacuuuacaaucc

SEQ ID NO: 490941 - RNA, 22 nt, Human
ugcgaguggcgggcggugaccc

SEQ ID NO: 490942 - RNA, 19 nt, Human
ugcuauaaaguuccgugaa

SEQ ID NO: 490943 - RNA, 21 nt, Human
ugcugccgcccgggugcacgg

SEQ ID NO: 490944 - RNA, 18 nt, Human
uggcccggggccaaccgg

SEQ ID NO: 490945 - RNA, 20 nt, Human
uggcuucgaaaugagauggg

SEQ ID NO: 490946 - RNA, 23 nt, Human
uggggucaaagagaaccuuccug

SEQ ID NO: 490947 - RNA, 24 nt, Human
ugugagccgaacaucaccaaugcc

SEQ ID NO: 490948 - RNA, 23 nt, Human
uuaaaaguaugauaacagaugaa

SEQ ID NO: 490949 - RNA, 22 nt, Human
uuaaagagggacccggagguga

SEQ ID NO: 490950 - RNA, 19 nt, Human
uugaccacaaccaggacaa

SEQ ID NO: 490951 - RNA, 20 nt, Human
uugcaagcgggagaaagggc

SEQ ID NO: 490952 - RNA, 23 nt, Human
uuuuuuuuuuuuuuuuuaucauu

SEQ ID NO: 490953 - RNA, 22 nt, Human
aaaaaaaaaaaaaaaaaaggac

SEQ ID NO: 490954 - RNA, 26 nt, Human
aaaaaaaaggacuuccucaacaaugu

SEQ ID NO: 490955 - RNA, 25 nt, Human
aaaaaggacuuccucaacaauguaa

SEQ ID NO: 490956 - RNA, 25 nt, Human
aaaacaugauguuccuauauaccaa

SEQ ID NO: 490957 - RNA, 24 nt, Human
aaaggacuuccucaacaauguaaa

SEQ ID NO: 490958 - RNA, 25 nt, Human
aaucacauggcauuuuuuucugcau

SEQ ID NO: 490959 - RNA, 18 nt, Human
acaguaauuucccuucuu

SEQ ID NO: 490960 - RNA, 21 nt, Human
agacaguaauuucccuucuuu

SEQ ID NO: 490961 - RNA, 23 nt, Human
caggauaguuagggcguguuacc

SEQ ID NO: 490962 - RNA, 27 nt, Human
caguaauuucccuucuuuuguagguuu

SEQ ID NO: 490963 - RNA, 21 nt, Human
cauggcauuuuuuucugcaug

SEQ ID NO: 490964 - RNA, 20 nt, Human
ccaucacaguauuauucuga

SEQ ID NO: 490965 - RNA, 21 nt, Human
cccaucacaguauuauucuga

SEQ ID NO: 490966 - RNA, 21 nt, Human
ccccuagaaauaucgccuccg

SEQ ID NO: 490967 - RNA, 21 nt, Human
ccucaacaauguaaagauagg

SEQ ID NO: 490968 - RNA, 24 nt, Human
gucaacauuagaacucuccaccac

SEQ ID NO: 490969 - RNA, 18 nt, Human
guuuuuguggcuggugcu

SEQ ID NO: 490970 - RNA, 24 nt, Human
uaauaaagaauaaaaguuauacaa

SEQ ID NO: 490971 - RNA, 18 nt, Human
ucacaagcuagugggaug

SEQ ID NO: 490972 - RNA, 18 nt, Human
ucaguggaccacauuuuc

SEQ ID NO: 490973 - RNA, 24 nt, Human
ucuccaccacugcggaucuggcuc

SEQ ID NO: 490974 - RNA, 20 nt, Human
ugagaagacacuaaacaagg

SEQ ID NO: 490975 - RNA, 23 nt, Human
ugagaagacacuaaacaaggaug

SEQ ID NO: 490976 - RNA, 21 nt, Human
ugagcaauuaaaaaaaaaaaa

SEQ ID NO: 490977 - RNA, 22 nt, Human
ugagcaauuaaaaaaaaaaaaa

SEQ ID NO: 490978 - RNA, 18 nt, Human
ugcuuacccugaccccaa

SEQ ID NO: 490979 - RNA, 22 nt, Human
uggcccaaacccugcaugacaa

SEQ ID NO: 490980 - RNA, 21 nt, Human
uggcuggugcuuacccugacc

SEQ ID NO: 490981 - RNA, 23 nt, Human
uguuacuaaaagacaaugauuug

SEQ ID NO: 490982 - RNA, 19 nt, Human
uguuacuuucuuuccugca

SEQ ID NO: 490983 - RNA, 20 nt, Human
uuaaaaaaaaaaaaaaaaaa

SEQ ID NO: 490984 - RNA, 24 nt, Human
uucuuauccacccccauucuccuu

SEQ ID NO: 490985 - RNA, 33 nt, Human
uucuugagcaauuaaaaaaaaaaaaaaaaaaaa

SEQ ID NO: 490986 - RNA, 24 nt, Human
uuuucaguggaccacauuuucuua

SEQ ID NO: 490987 - RNA, 20 nt, Human
uuuuuuuuuuuuucagugga

SEQ ID NO: 490988 - RNA, 22 nt, Human
uuuuuuuuuuuuuuuucagugg

SEQ ID NO: 490989 - RNA, 22 nt, Human
uuuuuuuuuuuuuuuuuuucag

SEQ ID NO: 490990 - RNA, 20 nt, Human
aaacaaaacugcguuacaga

SEQ ID NO: 490991 - RNA, 24 nt, Human
aaagugcugggauuacaggcguga

SEQ ID NO: 490992 - RNA, 18 nt, Human
aacuuuuuuuguuguuga

SEQ ID NO: 490993 - RNA, 22 nt, Human
aagaggccagugcccccaagug

SEQ ID NO: 490994 - RNA, 19 nt, Human
aagcugcccuuucaccuga

SEQ ID NO: 490995 - RNA, 22 nt, Human
aaggacaaaucuggaccacgug

SEQ ID NO: 490996 - RNA, 26 nt, Human
aaggacaaaucuggaccacguguaca

SEQ ID NO: 490997 - RNA, 19 nt, Human
aagugcugggauuacaggc

SEQ ID NO: 490998 - RNA, 19 nt, Human
aagugcugggauuacaggc

SEQ ID NO: 490999 - RNA, 26 nt, Human
aagugcugggauuacaggcgugagcc

SEQ ID NO: 491000 - RNA, 19 nt, Human
aauaaauauagagaacuca

SEQ ID NO: 491001 - RNA, 18 nt, Human
aaucuggaccacguguac

SEQ ID NO: 491002 - RNA, 20 nt, Human
aaugccauuuucuaaucuug

SEQ ID NO: 491003 - RNA, 22 nt, Human
accacuucccaaaacuuggcca

SEQ ID NO: 491004 - RNA, 18 nt, Human
accauguugggcaggcug

SEQ ID NO: 491005 - RNA, 18 nt, Human
accauuaaagcugcccuu

SEQ ID NO: 491006 - RNA, 25 nt, Human
acccgccucggccucccaaagugcu

SEQ ID NO: 491007 - RNA, 18 nt, Human
accgcgcccagccgggaa

SEQ ID NO: 491008 - RNA, 22 nt, Human
accuccaccucuuggguucaag

SEQ ID NO: 491009 - RNA, 18 nt, Human
acgagguuucaccauguu

SEQ ID NO: 491010 - RNA, 20 nt, Human
acgagguuucaccauguugg

SEQ ID NO: 491011 - RNA, 25 nt, Human
acgccgaggggcgccggaccguuag

SEQ ID NO: 491012 - RNA, 18 nt, Human
acggauacacacuaaaca

SEQ ID NO: 491013 - RNA, 23 nt, Human
acucagugugaagaaaagacaag

SEQ ID NO: 491014 - RNA, 22 nt, Human
agaacagacgccaaggucaugc

SEQ ID NO: 491015 - RNA, 21 nt, Human
agacaaaagacagacauccga

SEQ ID NO: 491016 - RNA, 22 nt, Human
agacaaaagacagacauccgag

SEQ ID NO: 491017 - RNA, 19 nt, Human
agacagacauccgagacgc

SEQ ID NO: 491018 - RNA, 20 nt, Human
agagccacucaggaaccagc

SEQ ID NO: 491019 - RNA, 24 nt, Human
agauaaucaaccacuucccaaaac

SEQ ID NO: 491020 - RNA, 24 nt, Human
agauguucaauaaauauagagaac

SEQ ID NO: 491021 - RNA, 19 nt, Human
agauuacaggcgugcgcca

SEQ ID NO: 491022 - RNA, 20 nt, Human
agcacuucugauuuuuuuuu

SEQ ID NO: 491023 - RNA, 22 nt, Human
agccagucuggaagagcagccc

SEQ ID NO: 491024 - RNA, 20 nt, Human
aggccccagcagccuucccg

SEQ ID NO: 491025 - RNA, 25 nt, Human
aggcuggagugcaguggcgcaaucu

SEQ ID NO: 491026 - RNA, 24 nt, Human
aggugauccacccgccucggccuc

SEQ ID NO: 491027 - RNA, 22 nt, Human
agguguggaggccccagcagcc

SEQ ID NO: 491028 - RNA, 19 nt, Human
aguagcugagauuacaggc

SEQ ID NO: 491029 - RNA, 23 nt, Human
agugcaguggcgcaaucuuggcu

SEQ ID NO: 491030 - RNA, 24 nt, Human
agugcaguggcgcaaucuuggcuc

SEQ ID NO: 491031 - RNA, 18 nt, Human
agugcugggauuacaggc

SEQ ID NO: 491032 - RNA, 24 nt, Human
agugugaagaaaagacaaggacaa

SEQ ID NO: 491033 - RNA, 19 nt, Human
aucaaugccaggaaauucu

SEQ ID NO: 491034 - RNA, 23 nt, Human
auuauugaaccauuuggcuugca

SEQ ID NO: 491035 - RNA, 20 nt, Human
auuguuaguggguuuugggg

SEQ ID NO: 491036 - RNA, 21 nt, Human
caaaacuuggccacaaaccgu

SEQ ID NO: 491037 - RNA, 21 nt, Human
caaacggccacggccccgcuc

SEQ ID NO: 491038 - RNA, 26 nt, Human
caaacuccugaccuuaggugauccaa

SEQ ID NO: 491039 - RNA, 24 nt, Human
caaagugcugggauuacaggcgug

SEQ ID NO: 491040 - RNA, 18 nt, Human
caaaguuuaagccgcaua

SEQ ID NO: 491041 - RNA, 19 nt, Human
caacccgcagaugcguaca

SEQ ID NO: 491042 - RNA, 23 nt, Human
caagcccggcuguguuaagcacu

SEQ ID NO: 491043 - RNA, 20 nt, Human
caagcgauucuccugccuca

SEQ ID NO: 491044 - RNA, 22 nt, Human
caagcgauucuccugccucagc

SEQ ID NO: 491045 - RNA, 22 nt, Human
cacacgguaccgcaacagcagu

SEQ ID NO: 491046 - RNA, 22 nt, Human
cacacugccagcuuccagagcu

SEQ ID NO: 491047 - RNA, 20 nt, Human
cacacugccggcugcacagg

SEQ ID NO: 491048 - RNA, 19 nt, Human
cacaggcaggcacagccag

SEQ ID NO: 491049 - RNA, 19 nt, Human
caccagagccacucaggaa

SEQ ID NO: 491050 - RNA, 24 nt, Human
caccauguugggcaggcugaucuc

SEQ ID NO: 491051 - RNA, 23 nt, Human
cacccgccucggccucccaaagu

SEQ ID NO: 491052 - RNA, 25 nt, Human
cacggccccgcuccuuacagaucaa

SEQ ID NO: 491053 - RNA, 22 nt, Human
cagagccuaucuagcgggaaug

SEQ ID NO: 491054 - RNA, 24 nt, Human
cagaugcguacagaacugaaaaug

SEQ ID NO: 491055 - RNA, 21 nt, Human
caggcugaucucaaacuccug

SEQ ID NO: 491056 - RNA, 27 nt, Human
caucguggcuucgagacaaaagacaga

SEQ ID NO: 491057 - RNA, 24 nt, Human
cauuucagaucaaauaaugccauu

SEQ ID NO: 491058 - RNA, 20 nt, Human
ccaaaacuuggccacaaacc

SEQ ID NO: 491059 - RNA, 22 nt, Human
ccaaagugcugggauuacaggc

SEQ ID NO: 491060 - RNA, 22 nt, Human
ccaaagugcugggauuacaggc

SEQ ID NO: 491061 - RNA, 24 nt, Human
ccaaagugcugggauuacaggcgu

SEQ ID NO: 491062 - RNA, 22 nt, Human
ccacggauggccagcuuccucc

SEQ ID NO: 491063 - RNA, 21 nt, Human
ccacucaggaaccagccaugc

SEQ ID NO: 491064 - RNA, 19 nt, Human
ccaucguggcuucgagaca

SEQ ID NO: 491065 - RNA, 21 nt, Human
cccacccggcagcaugaggaa

SEQ ID NO: 491066 - RNA, 24 nt, Human
ccccaagugagcagcugcauccgc

SEQ ID NO: 491067 - RNA, 21 nt, Human
cccccaagugagcagcugcau

SEQ ID NO: 491068 - RNA, 18 nt, Human
cccgcggaucaccugaag

SEQ ID NO: 491069 - RNA, 18 nt, Human
ccgcaaccuccaccucuu

SEQ ID NO: 491070 - RNA, 24 nt, Human
ccgcaaccuccaccucuuggguuc

SEQ ID NO: 491071 - RNA, 23 nt, Human
ccucaggcccagauggugugacc

SEQ ID NO: 491072 - RNA, 19 nt, Human
ccuccaccucuuggguuca

SEQ ID NO: 491073 - RNA, 19 nt, Human
ccuccugacugcccccaag

SEQ ID NO: 491074 - RNA, 25 nt, Human
ccucuguugcccaggcuggagugca

SEQ ID NO: 491075 - RNA, 24 nt, Human
ccucuuggguucaagcgauucucc

SEQ ID NO: 491076 - RNA, 22 nt, Human
ccugaccuuaggugauccaccc

SEQ ID NO: 491077 - RNA, 24 nt, Human
cgccucggccucccaaagugcugg

SEQ ID NO: 491078 - RNA, 20 nt, Human
cuaagaggccagugccccca

SEQ ID NO: 491079 - RNA, 21 nt, Human
cuaguagcugagauuacaggc

SEQ ID NO: 491080 - RNA, 23 nt, Human
cuaguagcugagauuacaggcgu

SEQ ID NO: 491081 - RNA, 24 nt, Human
cucaccgcaaccuccaccucuugg

SEQ ID NO: 491082 - RNA, 19 nt, Human
cuccaaacggccacggccc

SEQ ID NO: 491083 - RNA, 24 nt, Human
cucccucuguugcccaggcuggag

SEQ ID NO: 491084 - RNA, 20 nt, Human
cucuguugcccaggcuggag

SEQ ID NO: 491085 - RNA, 20 nt, Human
cugaaaaugccaaauaugua

SEQ ID NO: 491086 - RNA, 19 nt, Human
cugcaaaacccacccggca

SEQ ID NO: 491087 - RNA, 21 nt, Human
cuuaaaucuuugguuucuuuc

SEQ ID NO: 491088 - RNA, 20 nt, Human
cuucugauuuuuuuuucccu

SEQ ID NO: 491089 - RNA, 18 nt, Human
gaaaucacuaagggagcu

SEQ ID NO: 491090 - RNA, 18 nt, Human
gaaaucagagccuaucua

SEQ ID NO: 491091 - RNA, 25 nt, Human
gaacagacgccaaggucaugcuccc

SEQ ID NO: 491092 - RNA, 24 nt, Human
gaccuuaggugauccacccgccuc

SEQ ID NO: 491093 - RNA, 18 nt, Human
gagcuucugcaaaaccca

SEQ ID NO: 491094 - RNA, 20 nt, Human
gaucaccugaagcagggcca

SEQ ID NO: 491095 - RNA, 18 nt, Human
gauuacaggcgugagcca

SEQ ID NO: 491096 - RNA, 22 nt, Human
gauuacaggcgugagccaccgc

SEQ ID NO: 491097 - RNA, 22 nt, Human
gauuacaggcgugagccaccgc

SEQ ID NO: 491098 - RNA, 18 nt, Human
gauuacaggcgugcgcca

SEQ ID NO: 491099 - RNA, 20 nt, Human
gcacagguugcugggcacag

SEQ ID NO: 491100 - RNA, 19 nt, Human
gcaccagggagccacaaag

SEQ ID NO: 491101 - RNA, 20 nt, Human
gccaguguaugggaaacuuu

SEQ ID NO: 491102 - RNA, 20 nt, Human
gccauccuuucacucagacu

SEQ ID NO: 491103 - RNA, 19 nt, Human
gcccaggcuggagugcagu

SEQ ID NO: 491104 - RNA, 20 nt, Human
gcccaggcuggagugcagug

SEQ ID NO: 491105 - RNA, 19 nt, Human
gccgaggggcgccggaccg

SEQ ID NO: 491106 - RNA, 19 nt, Human
gcggcgggcggcgggcggc

SEQ ID NO: 491107 - RNA, 23 nt, Human
gcggcgggcggcgggcggcgggc

SEQ ID NO: 491108 - RNA, 19 nt, Human
gcuggagugcaguggcgca

SEQ ID NO: 491109 - RNA, 23 nt, Human
ggagucucccucuguugcccagg

SEQ ID NO: 491110 - RNA, 25 nt, Human
ggaucaccugaagcagggccacggc

SEQ ID NO: 491111 - RNA, 19 nt, Human
ggcaggccaguguauggga

SEQ ID NO: 491112 - RNA, 19 nt, Human
ggcccagauggugugaccu

SEQ ID NO: 491113 - RNA, 18 nt, Human
ggcccgggcggcgggcgg

SEQ ID NO: 491114 - RNA, 19 nt, Human
ggcgggcggcgggcggcgg

SEQ ID NO: 491115 - RNA, 19 nt, Human
ggcuuaaaaggacaagaug

SEQ ID NO: 491116 - RNA, 20 nt, Human
ggguucaagcgauucuccug

SEQ ID NO: 491117 - RNA, 18 nt, Human
guagcugagauuacaggc

SEQ ID NO: 491118 - RNA, 24 nt, Human
gugauccacccgccucggccuccc

SEQ ID NO: 491119 - RNA, 18 nt, Human
uaaaacuagccuuucuaa

SEQ ID NO: 491120 - RNA, 20 nt, Human
uaaaacucuaaaguacaggu

SEQ ID NO: 491121 - RNA, 23 nt, Human
uaaauaguuuucacacuuuccca

SEQ ID NO: 491122 - RNA, 27 nt, Human
uaacaguaacaaacuugccagugcuuu

SEQ ID NO: 491123 - RNA, 19 nt, Human
uaaccguaaacgaagagga

SEQ ID NO: 491124 - RNA, 24 nt, Human
uaaguuguguauuuuuaguagaga

SEQ ID NO: 491125 - RNA, 20 nt, Human
uaaugugguccauaaaaacc

SEQ ID NO: 491126 - RNA, 24 nt, Human
uaauuaucuuaaauaguuuucaca

SEQ ID NO: 491127 - RNA, 18 nt, Human
uacagacaucaucuacgu

SEQ ID NO: 491128 - RNA, 24 nt, Human
uacaggcgugagccaccgcgccca

SEQ ID NO: 491129 - RNA, 19 nt, Human
uaccucaggcccagauggu

SEQ ID NO: 491130 - RNA, 20 nt, Human
uagaaagagaaugaggccau

SEQ ID NO: 491131 - RNA, 22 nt, Human
uagagacgagguuucaccaugu

SEQ ID NO: 491132 - RNA, 24 nt, Human
uagcaaagggcugcuggcaggugu

SEQ ID NO: 491133 - RNA, 24 nt, Human
uaguagagacgagguuucaccaug

SEQ ID NO: 491134 - RNA, 25 nt, Human
uaguagagacgagguuucaccaugu

SEQ ID NO: 491135 - RNA, 24 nt, Human
uaguagcugagauuacaggcgugc

SEQ ID NO: 491136 - RNA, 19 nt, Human
uaguggguuuuggggcagg

SEQ ID NO: 491137 - RNA, 26 nt, Human
uauaaagcauugguauuugacauuuu

SEQ ID NO: 491138 - RNA, 18 nt, Human
uauagagaacucagugug

SEQ ID NO: 491139 - RNA, 19 nt, Human
ucaagcgauucuccugccu

SEQ ID NO: 491140 - RNA, 23 nt, Human
ucaccgcaaccuccaccucuugg

SEQ ID NO: 491141 - RNA, 24 nt, Human
ucaccgcaaccuccaccucuuggg

SEQ ID NO: 491142 - RNA, 21 nt, Human
ucagacacacgguaccgcaac

SEQ ID NO: 491143 - RNA, 21 nt, Human
ucaggcccagauggugugacc

SEQ ID NO: 491144 - RNA, 22 nt, Human
ucaggcccagauggugugaccu

SEQ ID NO: 491145 - RNA, 19 nt, Human
uccagagggcccacagcag

SEQ ID NO: 491146 - RNA, 24 nt, Human
ucccaaagugcugggauuacaggc

SEQ ID NO: 491147 - RNA, 20 nt, Human
ucccucuguugcccaggcug

SEQ ID NO: 491148 - RNA, 24 nt, Human
ucccucuguugcccaggcuggagu

SEQ ID NO: 491149 - RNA, 19 nt, Human
uccgcugagaguaagcggc

SEQ ID NO: 491150 - RNA, 19 nt, Human
ucgagacaaaagacagaca

SEQ ID NO: 491151 - RNA, 20 nt, Human
ucgccgccgugaugaggcag

SEQ ID NO: 491152 - RNA, 18 nt, Human
ucggccucccaaagugcu

SEQ ID NO: 491153 - RNA, 22 nt, Human
ucucaaacauuucagaucaaau

SEQ ID NO: 491154 - RNA, 23 nt, Human
ucucccucuguugcccaggcugg

SEQ ID NO: 491155 - RNA, 24 nt, Human
ucucccucuguugcccaggcugga

SEQ ID NO: 491156 - RNA, 18 nt, Human
ucugaaaggcugccccgg

SEQ ID NO: 491157 - RNA, 21 nt, Human
ucugaaaggcugccccggaaa

SEQ ID NO: 491158 - RNA, 18 nt, Human
ucuguugcccaggcugga

SEQ ID NO: 491159 - RNA, 24 nt, Human
ucuguugcccaggcuggagugcag

SEQ ID NO: 491160 - RNA, 24 nt, Human
ucuuggguucaagcgauucuccug

SEQ ID NO: 491161 - RNA, 25 nt, Human
ugaaaucacuaagggagcuucugca

SEQ ID NO: 491162 - RNA, 21 nt, Human
ugaacaugaaaugcuuccucu

SEQ ID NO: 491163 - RNA, 21 nt, Human
ugaaggcaaagauaaucaacc

SEQ ID NO: 491164 - RNA, 19 nt, Human
ugacaccaggcacacugcc

SEQ ID NO: 491165 - RNA, 24 nt, Human
ugaccuuaggugauccacccgccu

SEQ ID NO: 491166 - RNA, 18 nt, Human
ugagauuacaggcgugcg

SEQ ID NO: 491167 - RNA, 21 nt, Human
ugagauuacaggcgugcgcca

SEQ ID NO: 491168 - RNA, 18 nt, Human
ugaugaggcaggugugga

SEQ ID NO: 491169 - RNA, 21 nt, Human
ugcagaggaaaccagcgaucc

SEQ ID NO: 491170 - RNA, 22 nt, Human
ugcagaggaaaccagcgaucca

SEQ ID NO: 491171 - RNA, 23 nt, Human
ugcaguggcgcaaucuuggcuca

SEQ ID NO: 491172 - RNA, 18 nt, Human
ugccagugcuuuacacac

SEQ ID NO: 491173 - RNA, 18 nt, Human
ugcccaggcuggagugca

SEQ ID NO: 491174 - RNA, 21 nt, Human
ugcccaggcuggagugcagug

SEQ ID NO: 491175 - RNA, 22 nt, Human
ugcccaggcuggagugcagugg

SEQ ID NO: 491176 - RNA, 24 nt, Human
ugcccaggcuggagugcaguggcg

SEQ ID NO: 491177 - RNA, 24 nt, Human
ugccucagcgucccuaguagcuga

SEQ ID NO: 491178 - RNA, 24 nt, Human
ugcugggauuacaggcgugagcca

SEQ ID NO: 491179 - RNA, 20 nt, Human
ugcuucaaaauauaaaucaa

SEQ ID NO: 491180 - RNA, 24 nt, Human
uggagucucccucuguugcccagg

SEQ ID NO: 491181 - RNA, 23 nt, Human
uggagugcaguggcgcaaucuug

SEQ ID NO: 491182 - RNA, 24 nt, Human
uggagugcaguggcgcaaucuugg

SEQ ID NO: 491183 - RNA, 22 nt, Human
uggcccgggcggcgggcggcgg

SEQ ID NO: 491184 - RNA, 19 nt, Human
ugggauuacaggcgugagc

SEQ ID NO: 491185 - RNA, 21 nt, Human
ugggauuacaggcgugagcca

SEQ ID NO: 491186 - RNA, 22 nt, Human
ugggauuacaggcgugagccac

SEQ ID NO: 491187 - RNA, 23 nt, Human
ugggauuacaggcgugagccacc

SEQ ID NO: 491188 - RNA, 24 nt, Human
ugggauuacaggcgugagccaccg

SEQ ID NO: 491189 - RNA, 23 nt, Human
uggguucaagcgauucuccugcc

SEQ ID NO: 491190 - RNA, 24 nt, Human
uggucgccggagcccuugcgcugc

SEQ ID NO: 491191 - RNA, 18 nt, Human
uguaaggaucaagcagcg

SEQ ID NO: 491192 - RNA, 18 nt, Human
uguauuuuuaguagagac

SEQ ID NO: 491193 - RNA, 23 nt, Human
ugucagacacacgguaccgcaac

SEQ ID NO: 491194 - RNA, 24 nt, Human
uuaaacgugaaaucacuaagggag

SEQ ID NO: 491195 - RNA, 22 nt, Human
uuaacaguaacaaacuugccaa

SEQ ID NO: 491196 - RNA, 22 nt, Human
uuagcggccccugcaguggccc

SEQ ID NO: 491197 - RNA, 24 nt, Human
uuaguagagacgagguuucaccau

SEQ ID NO: 491198 - RNA, 19 nt, Human
uuaguggguuuuggggcag

SEQ ID NO: 491199 - RNA, 21 nt, Human
uucaagcgauucuccugccuc

SEQ ID NO: 491200 - RNA, 23 nt, Human
uucaagcgauucuccugccucag

SEQ ID NO: 491201 - RNA, 24 nt, Human
uucaagcgauucuccugccucagc

SEQ ID NO: 491202 - RNA, 19 nt, Human
uucacacuuucccaguuug

SEQ ID NO: 491203 - RNA, 18 nt, Human
uucaggaacgaagucaaa

SEQ ID NO: 491204 - RNA, 19 nt, Human
uucaggaacgaagucaaac

SEQ ID NO: 491205 - RNA, 20 nt, Human
uucccaguuacucaagauug

SEQ ID NO: 491206 - RNA, 24 nt, Human
uucccggcgcuggcguggaggccc

SEQ ID NO: 491207 - RNA, 23 nt, Human
uucucauauuucaaacaaaacug

SEQ ID NO: 491208 - RNA, 21 nt, Human
uugaaaccagcaagauuagaa

SEQ ID NO: 491209 - RNA, 21 nt, Human
uugguuucuuuccaaccagga

SEQ ID NO: 491210 - RNA, 21 nt, Human
uuucaccauguugggcaggcu

SEQ ID NO: 491211 - RNA, 22 nt, Human
uuugguuucuuuccaaccagga

SEQ ID NO: 491212 - RNA, 24 nt, Human
uuuuuaguagagacgagguuucac

SEQ ID NO: 491213 - RNA, 19 nt, Human
aacccacccccuccucccc

SEQ ID NO: 491214 - RNA, 22 nt, Human
aagccauccucccaucucaucc

SEQ ID NO: 491215 - RNA, 18 nt, Human
aauagcugggauuacaag

SEQ ID NO: 491216 - RNA, 19 nt, Human
acacucucucuuuuuuuuu

SEQ ID NO: 491217 - RNA, 18 nt, Human
acccacccccuccucccc

SEQ ID NO: 491218 - RNA, 18 nt, Human
agccauccucccaucuca

SEQ ID NO: 491219 - RNA, 19 nt, Human
agcggggugcgcuggcuug

SEQ ID NO: 491220 - RNA, 22 nt, Human
agcugggauuacaaguaugggc

SEQ ID NO: 491221 - RNA, 22 nt, Human
aucagugccuugcccagccuug

SEQ ID NO: 491222 - RNA, 26 nt, Human
aucucauccuucccaauagcugggau

SEQ ID NO: 491223 - RNA, 21 nt, Human
caaaccucuggccucaagcca

SEQ ID NO: 491224 - RNA, 24 nt, Human
caaaccucuggccucaagccaucc

SEQ ID NO: 491225 - RNA, 25 nt, Human
caauagcugggauuacaaguauggg

SEQ ID NO: 491226 - RNA, 20 nt, Human
cacacucucucuuuuuuuua

SEQ ID NO: 491227 - RNA, 19 nt, Human
cacccccuccuccccggca

SEQ ID NO: 491228 - RNA, 20 nt, Human
cacgcugcuguucacccaga

SEQ ID NO: 491229 - RNA, 19 nt, Human
cacucucucuuuuuuuuuu

SEQ ID NO: 491230 - RNA, 21 nt, Human
cacuguguugcccuggcuggu

SEQ ID NO: 491231 - RNA, 20 nt, Human
cagaggcugccccgggucug

SEQ ID NO: 491232 - RNA, 18 nt, Human
cagugccuugcccagccu

SEQ ID NO: 491233 - RNA, 23 nt, Human
caucucauccuucccaauagcug

SEQ ID NO: 491234 - RNA, 22 nt, Human
cccaauagcugggauuacaagu

SEQ ID NO: 491235 - RNA, 19 nt, Human
ccccuccuccccggcacag

SEQ ID NO: 491236 - RNA, 21 nt, Human
ccucccaucucauccuuccca

SEQ ID NO: 491237 - RNA, 25 nt, Human
ccucccaucucauccuucccaauag

SEQ ID NO: 491238 - RNA, 19 nt, Human
ccucuggccucaagccauc

SEQ ID NO: 491239 - RNA, 27 nt, Human
ccucuggccucaagccauccucccauc

SEQ ID NO: 491240 - RNA, 18 nt, Human
cgaacccacccccuccuc

SEQ ID NO: 491241 - RNA, 20 nt, Human
cgggaaagguggguguggua

SEQ ID NO: 491242 - RNA, 20 nt, Human
cggucucaaaccucuggccu

SEQ ID NO: 491243 - RNA, 19 nt, Human
cucaagccauccucccauc

SEQ ID NO: 491244 - RNA, 25 nt, Human
cuuuuuuuuuuuuuuuuuuugagaa

SEQ ID NO: 491245 - RNA, 19 nt, Human
gaaggggucucacuguguu

SEQ ID NO: 491246 - RNA, 18 nt, Human
gauuacaaguaugggcca

SEQ ID NO: 491247 - RNA, 18 nt, Human
gauuacaaguaugggcca

SEQ ID NO: 491248 - RNA, 22 nt, Human
gauuacaaguaugggccaucau

SEQ ID NO: 491249 - RNA, 24 nt, Human
ggacugggcagggagucagcgggg

SEQ ID NO: 491250 - RNA, 24 nt, Human
ggauuacaaguaugggccaucaug

SEQ ID NO: 491251 - RNA, 21 nt, Human
ggcagggagucagcggggugc

SEQ ID NO: 491252 - RNA, 18 nt, Human
ggccgggaaaggugggug

SEQ ID NO: 491253 - RNA, 22 nt, Human
gggucucacuguguugcccugg

SEQ ID NO: 491254 - RNA, 21 nt, Human
gugugggcacagcaggcugac

SEQ ID NO: 491255 - RNA, 22 nt, Human
uacaaguaugggccaucaugcc

SEQ ID NO: 491256 - RNA, 23 nt, Human
uacaaguaugggccaucaugccu

SEQ ID NO: 491257 - RNA, 19 nt, Human
ucagcgaacccacccccuc

SEQ ID NO: 491258 - RNA, 21 nt, Human
ucccaucucauccuucccaau

SEQ ID NO: 491259 - RNA, 19 nt, Human
ucucacuguguugcccugg

SEQ ID NO: 491260 - RNA, 20 nt, Human
ucucacuguguugcccuggc

SEQ ID NO: 491261 - RNA, 18 nt, Human
ucuuuuuuuuuuuuuuuu

SEQ ID NO: 491262 - RNA, 24 nt, Human
ugaaggaaucaacuucuggacgga

SEQ ID NO: 491263 - RNA, 23 nt, Human
ugagaaggggucucacuguguug

SEQ ID NO: 491264 - RNA, 23 nt, Human
ugaguaaauucuuaauaaaugcu

SEQ ID NO: 491265 - RNA, 19 nt, Human
ugccccgggucuguccagc

SEQ ID NO: 491266 - RNA, 18 nt, Human
uggaguuuggacugggca

SEQ ID NO: 491267 - RNA, 23 nt, Human
uggaguuuggacugggcagggag

SEQ ID NO: 491268 - RNA, 20 nt, Human
uggccucaagccauccuccc

SEQ ID NO: 491269 - RNA, 21 nt, Human
uggccucaagccauccuccca

SEQ ID NO: 491270 - RNA, 19 nt, Human
uggcuugggccgggaaagg

SEQ ID NO: 491271 - RNA, 19 nt, Human
uggcuugggccgggaaagg

SEQ ID NO: 491272 - RNA, 21 nt, Human
ugggauuacaaguaugggcca

SEQ ID NO: 491273 - RNA, 21 nt, Human
ugggauuacaaguaugggcca

SEQ ID NO: 491274 - RNA, 22 nt, Human
ugggauuacaaguaugggccau

SEQ ID NO: 491275 - RNA, 23 nt, Human
ugggauuacaaguaugggccauc

SEQ ID NO: 491276 - RNA, 24 nt, Human
ugggauuacaaguaugggccauca

SEQ ID NO: 491277 - RNA, 21 nt, Human
ugugugugggcacagcaggcu

SEQ ID NO: 491278 - RNA, 21 nt, Human
uguguugcccuggcuggucgg

SEQ ID NO: 491279 - RNA, 28 nt, Human
uguguugcccuggcuggucggucucaaa

SEQ ID NO: 491280 - RNA, 21 nt, Human
uuagugggugugugugggcac

SEQ ID NO: 491281 - RNA, 18 nt, Human
uuugagaaggggucucac

SEQ ID NO: 491282 - RNA, 23 nt, Human
uuuuuuuuuuuugagaagggguc

SEQ ID NO: 491283 - RNA, 28 nt, Human
uuuuuuuuuuuugagaaggggucucaac

SEQ ID NO: 491284 - RNA, 18 nt, Human
uuuuuuuuuuuuuuuuug

SEQ ID NO: 491285 - RNA, 25 nt, Human
uuuuuuuuuuuuuuuuugagaaggg

SEQ ID NO: 491286 - RNA, 24 nt, Human
aaacuaaacucaagugucaaauaa

SEQ ID NO: 491287 - RNA, 23 nt, Human
aaagaacacuuccaaacggcuaa

SEQ ID NO: 491288 - RNA, 25 nt, Human
aaagaacuguaauaucaaagaacac

SEQ ID NO: 491289 - RNA, 20 nt, Human
aauagcauuaacacacaucc

SEQ ID NO: 491290 - RNA, 24 nt, Human
aggcaaaauggcaggugcucaaag

SEQ ID NO: 491291 - RNA, 24 nt, Human
caaagaacacuuccaaacggcuaa

SEQ ID NO: 491292 - RNA, 23 nt, Human
caacacagguguaacaugugcuu

SEQ ID NO: 491293 - RNA, 18 nt, Human
cacuggguuuauaaaaga

SEQ ID NO: 491294 - RNA, 21 nt, Human
ccagugcaggaguucacuggg

SEQ ID NO: 491295 - RNA, 26 nt, Human
ccgcugccgguuguuagggggagccc

SEQ ID NO: 491296 - RNA, 18 nt, Human
cuaaaauaggcucaaggu

SEQ ID NO: 491297 - RNA, 20 nt, Human
cucaaaagccagauuucaca

SEQ ID NO: 491298 - RNA, 21 nt, Human
cucaaaagccagauuucacac

SEQ ID NO: 491299 - RNA, 19 nt, Human
gcucuuguuuugcuuuuga

SEQ ID NO: 491300 - RNA, 22 nt, Human
ggaaacgaugcaaggcaaaaug

SEQ ID NO: 491301 - RNA, 19 nt, Human
ggaguccgcugccgguugu

SEQ ID NO: 491302 - RNA, 18 nt, Human
uaaaagagaaaacuaaac

SEQ ID NO: 491303 - RNA, 18 nt, Human
uaaaauaggcucaagguc

SEQ ID NO: 491304 - RNA, 20 nt, Human
uaagauccuuuucuucacgc

SEQ ID NO: 491305 - RNA, 21 nt, Human
uaucaaagaacacuuccaaac

SEQ ID NO: 491306 - RNA, 25 nt, Human
ucacaccauggcaggcagugggaac

SEQ ID NO: 491307 - RNA, 23 nt, Human
ucucaaaagccagauuucacacc

SEQ ID NO: 491308 - RNA, 18 nt, Human
ugcuuguggcaacacagg

SEQ ID NO: 491309 - RNA, 19 nt, Human
ugcuuguggcaacacaggu

SEQ ID NO: 491310 - RNA, 21 nt, Human
ugucaaauaaaaacuggagcc

SEQ ID NO: 491311 - RNA, 21 nt, Human
uuaacacacauccaaaugcca

SEQ ID NO: 491312 - RNA, 19 nt, Human
uucuguguuuguggauaug

SEQ ID NO: 491313 - RNA, 24 nt, Human
uucuucacgcuugugugcucuugu

SEQ ID NO: 491314 - RNA, 21 nt, Human
uuguuuugcuuuugagaauua

SEQ ID NO: 491315 - RNA, 20 nt, Human
aaaauucaggccuccaccuc

SEQ ID NO: 491316 - RNA, 23 nt, Human
aaguuuccagccaggcucccaca

SEQ ID NO: 491317 - RNA, 22 nt, Human
accucaaaccucaucaagucaa

SEQ ID NO: 491318 - RNA, 18 nt, Human
agccaggcucccacaaac

SEQ ID NO: 491319 - RNA, 18 nt, Human
aggugccauccagccccg

SEQ ID NO: 491320 - RNA, 28 nt, Human
aucgccaucuuuuccccuuguaccucaa

SEQ ID NO: 491321 - RNA, 19 nt, Human
caaaauucaggccuccacc

SEQ ID NO: 491322 - RNA, 25 nt, Human
caacauggggacuguguucuugaug

SEQ ID NO: 491323 - RNA, 18 nt, Human
cagccaggcucccacaaa

SEQ ID NO: 491324 - RNA, 19 nt, Human
ccaagacuucugcccaccu

SEQ ID NO: 491325 - RNA, 20 nt, Human
ccacccccacacaccaaacc

SEQ ID NO: 491326 - RNA, 20 nt, Human
ccagccuggcagcacuccug

SEQ ID NO: 491327 - RNA, 21 nt, Human
ccagccuggcagcacuccugu

SEQ ID NO: 491328 - RNA, 18 nt, Human
cccacaaacauuacugca

SEQ ID NO: 491329 - RNA, 23 nt, Human
ccccaagacuucugcccaccucc

SEQ ID NO: 491330 - RNA, 26 nt, Human
ccccaagacuucugcccaccucccac

SEQ ID NO: 491331 - RNA, 28 nt, Human
ccccaagacuucugcccaccucccaccc

SEQ ID NO: 491332 - RNA, 23 nt, Human
ccccacacaccaaaccuuccccu

SEQ ID NO: 491333 - RNA, 27 nt, Human
ccccacacaccaaaccuuccccugcua

SEQ ID NO: 491334 - RNA, 22 nt, Human
ccccgacggcgauggaggugga

SEQ ID NO: 491335 - RNA, 23 nt, Human
ccgggguccggccggccccuccc

SEQ ID NO: 491336 - RNA, 23 nt, Human
ccucaaaccucaucaagucaagc

SEQ ID NO: 491337 - RNA, 19 nt, Human
ccucaucaagucaagcucu

SEQ ID NO: 491338 - RNA, 23 nt, Human
ccucaucaagucaagcucugcag

SEQ ID NO: 491339 - RNA, 21 nt, Human
ccuccaccucgcgggcucccg

SEQ ID NO: 491340 - RNA, 21 nt, Human
ccucccacccccacacaccaa

SEQ ID NO: 491341 - RNA, 22 nt, Human
ccucccacccccacacaccaaa

SEQ ID NO: 491342 - RNA, 23 nt, Human
ccucccccgacggcgauggaggu

SEQ ID NO: 491343 - RNA, 22 nt, Human
ccuccuugcccuucaguguucc

SEQ ID NO: 491344 - RNA, 23 nt, Human
cggcagugaccccgggguccggc

SEQ ID NO: 491345 - RNA, 21 nt, Human
cucccacccccacacaccaaa

SEQ ID NO: 491346 - RNA, 23 nt, Human
cucccacccccacacaccaaacc

SEQ ID NO: 491347 - RNA, 22 nt, Human
cuccuugcccuucaguguucca

SEQ ID NO: 491348 - RNA, 24 nt, Human
cugagaaccuccuuugcccauucc

SEQ ID NO: 491349 - RNA, 22 nt, Human
cugcauuuucccccucaacaug

SEQ ID NO: 491350 - RNA, 26 nt, Human
cugcccaccucccacccccacacacc

SEQ ID NO: 491351 - RNA, 19 nt, Human
cuuugcccauuccucccca

SEQ ID NO: 491352 - RNA, 22 nt, Human
cuuugcccauuccuccccaaga

SEQ ID NO: 491353 - RNA, 24 nt, Human
gacuucugcccaccucccaccccc

SEQ ID NO: 491354 - RNA, 19 nt, Human
gaggugccauccagccccg

SEQ ID NO: 491355 - RNA, 21 nt, Human
gcagugaccccgggguccggc

SEQ ID NO: 491356 - RNA, 24 nt, Human
gcccaccucccacccccacacacc

SEQ ID NO: 491357 - RNA, 19 nt, Human
gcggagcgcggggcccggc

SEQ ID NO: 491358 - RNA, 22 nt, Human
gcgggcucccggggcaaggccc

SEQ ID NO: 491359 - RNA, 20 nt, Human
ggcccggccgccucucuuca

SEQ ID NO: 491360 - RNA, 21 nt, Human
ggccggggcggagcgcggggc

SEQ ID NO: 491361 - RNA, 18 nt, Human
uacagccccugaggugcc

SEQ ID NO: 491362 - RNA, 23 nt, Human
uaccucaaaccucaucaagucaa

SEQ ID NO: 491363 - RNA, 20 nt, Human
uaggccggggcggagcgcgg

SEQ ID NO: 491364 - RNA, 18 nt, Human
uaggucccuggaugggac

SEQ ID NO: 491365 - RNA, 23 nt, Human
uccaccucgcgggcucccggggc

SEQ ID NO: 491366 - RNA, 19 nt, Human
uccccaagacuucugccca

SEQ ID NO: 491367 - RNA, 27 nt, Human
ucccccgacggcgauggagguggaggc

SEQ ID NO: 491368 - RNA, 19 nt, Human
uccccugcuacuuucucuu

SEQ ID NO: 491369 - RNA, 19 nt, Human
ucgccaucuuuuccccuug

SEQ ID NO: 491370 - RNA, 21 nt, Human
ucggcagugaccccggggucc

SEQ ID NO: 491371 - RNA, 23 nt, Human
ucucuuaggucccuggaugggac

SEQ ID NO: 491372 - RNA, 21 nt, Human
ugaggugccauccagccccga

SEQ ID NO: 491373 - RNA, 24 nt, Human
ugcauuuucccccucaacaugggg

SEQ ID NO: 491374 - RNA, 23 nt, Human
ugccauccagccccgaccugcuc

SEQ ID NO: 491375 - RNA, 20 nt, Human
uuccucggcagugaccccgg

SEQ ID NO: 491376 - RNA, 22 nt, Human
uucugcccaccucccaccccca

SEQ ID NO: 491377 - RNA, 21 nt, Human
uuuuuuuuuuuucccaaccuc

SEQ ID NO: 491378 - RNA, 25 nt, Human
aaaaaaaaaagaccuugcugggaaa

SEQ ID NO: 491379 - RNA, 24 nt, Human
aacaggauuaagcugcucuugauu

SEQ ID NO: 491380 - RNA, 23 nt, Human
aacggcaaagcucuagggagaga

SEQ ID NO: 491381 - RNA, 19 nt, Human
agggagagaccauagagcc

SEQ ID NO: 491382 - RNA, 22 nt, Human
caauguagaaaaaaaaaagacc

SEQ ID NO: 491383 - RNA, 20 nt, Human
cagcagccgccuccaacggc

SEQ ID NO: 491384 - RNA, 24 nt, Human
cagcagccgccuccaacggcaaag

SEQ ID NO: 491385 - RNA, 23 nt, Human
ccaacuuuuauuuuauuuauuca

SEQ ID NO: 491386 - RNA, 22 nt, Human
cucacaagaccgcagcagccgc

SEQ ID NO: 491387 - RNA, 21 nt, Human
ggucaaacucacaagaccgca

SEQ ID NO: 491388 - RNA, 22 nt, Human
uaagcugcucuugauuuagccc

SEQ ID NO: 491389 - RNA, 22 nt, Human
ugaugagaaacacuguaaaaca

SEQ ID NO: 491390 - RNA, 23 nt, Human
uguaaacaggauuaagcugcucu

SEQ ID NO: 491391 - RNA, 26 nt, Human
uguaaacaggauuaagcugcucuuga

SEQ ID NO: 491392 - RNA, 22 nt, Human
uucaauguagaaaaaaaaaaga

SEQ ID NO: 491393 - RNA, 24 nt, Human
uucacagacgcacaaaaagcucac

SEQ ID NO: 491394 - RNA, 20 nt, Human
uugcugccgcucgacgcugg

SEQ ID NO: 491395 - RNA, 19 nt, Human
aaaccgaaagccuggaagc

SEQ ID NO: 491396 - RNA, 20 nt, Human
aaagaaaccgaaagccugga

SEQ ID NO: 491397 - RNA, 18 nt, Human
aaagauccucccaccuca

SEQ ID NO: 491398 - RNA, 24 nt, Human
aaagugcugggauuacagguguga

SEQ ID NO: 491399 - RNA, 21 nt, Human
aacacagguacccacacccac

SEQ ID NO: 491400 - RNA, 23 nt, Human
aagaaaccgaaagccuggaagcg

SEQ ID NO: 491401 - RNA, 20 nt, Human
aagagaugggaucuugcuau

SEQ ID NO: 491402 - RNA, 24 nt, Human
aagugaucugcccuccuuggccuc

SEQ ID NO: 491403 - RNA, 18 nt, Human
aagugcugggauuacagg

SEQ ID NO: 491404 - RNA, 19 nt, Human
aagugcugggauuacaggu

SEQ ID NO: 491405 - RNA, 26 nt, Human
aagugcugggauuacaggugugagcc

SEQ ID NO: 491406 - RNA, 23 nt, Human
acagcguuuaccauguuggccag

SEQ ID NO: 491407 - RNA, 23 nt, Human
accauguuggccaggcuggucuc

SEQ ID NO: 491408 - RNA, 24 nt, Human
accauguuggccaggcuggucucg

SEQ ID NO: 491409 - RNA, 18 nt, Human
acccacacccacacccag

SEQ ID NO: 491410 - RNA, 25 nt, Human
accccuagcuccgggagucccuuuu

SEQ ID NO: 491411 - RNA, 23 nt, Human
accucagccucccaaguaacugg

SEQ ID NO: 491412 - RNA, 23 nt, Human
accuccucccgugguccuuguug

SEQ ID NO: 491413 - RNA, 24 nt, Human
agccuggaagcggacuuggugcug

SEQ ID NO: 491414 - RNA, 19 nt, Human
aggccgaguccccaccccu

SEQ ID NO: 491415 - RNA, 21 nt, Human
agguacccacacccacaccca

SEQ ID NO: 491416 - RNA, 24 nt, Human
agugaucugcccuccuuggccucc

SEQ ID NO: 491417 - RNA, 24 nt, Human
caaagugcugggauuacaggugug

SEQ ID NO: 491418 - RNA, 22 nt, Human
cacagguacccacacccacacc

SEQ ID NO: 491419 - RNA, 24 nt, Human
cacagguacccacacccacaccca

SEQ ID NO: 491420 - RNA, 21 nt, Human
caccccuagcuccgggagucc

SEQ ID NO: 491421 - RNA, 27 nt, Human
caccucagccucccaaguaacugggaa

SEQ ID NO: 491422 - RNA, 18 nt, Human
cagcaugcuaugacccug

SEQ ID NO: 491423 - RNA, 23 nt, Human
cagcguuuaccauguuggccagg

SEQ ID NO: 491424 - RNA, 18 nt, Human
cagguacccacacccaca

SEQ ID NO: 491425 - RNA, 21 nt, Human
cagguacccacacccacaccc

SEQ ID NO: 491426 - RNA, 23 nt, Human
caugcuaugacccugaacuccug

SEQ ID NO: 491427 - RNA, 24 nt, Human
cauguuggccaggcuggucucgaa

SEQ ID NO: 491428 - RNA, 19 nt, Human
cauuuuuacuagggacagc

SEQ ID NO: 491429 - RNA, 20 nt, Human
ccaaagugcugggauuacag

SEQ ID NO: 491430 - RNA, 21 nt, Human
ccaaagugcugggauuacagg

SEQ ID NO: 491431 - RNA, 21 nt, Human
ccaaagugcugggauuacagg

SEQ ID NO: 491432 - RNA, 24 nt, Human
ccaaagugcugggauuacaggugu

SEQ ID NO: 491433 - RNA, 18 nt, Human
ccaaguaacugggaacac

SEQ ID NO: 491434 - RNA, 20 nt, Human
cccaccucagccucccaagu

SEQ ID NO: 491435 - RNA, 23 nt, Human
cccuagacgccgggaaggcgcac

SEQ ID NO: 491436 - RNA, 21 nt, Human
ccgcugccaccucagccuucg

SEQ ID NO: 491437 - RNA, 18 nt, Human
ccuacaccuccucccgug

SEQ ID NO: 491438 - RNA, 24 nt, Human
ccugaccugaagugaucugcccuc

SEQ ID NO: 491439 - RNA, 21 nt, Human
ccuggaagcggacuuggugcu

SEQ ID NO: 491440 - RNA, 21 nt, Human
cgcggccggacucuccugccc

SEQ ID NO: 491441 - RNA, 23 nt, Human
cggcgcuucucuccuacaccucc

SEQ ID NO: 491442 - RNA, 19 nt, Human
cucccgugguccuuguugu

SEQ ID NO: 491443 - RNA, 23 nt, Human
cuccuggguucaaaagauccucc

SEQ ID NO: 491444 - RNA, 24 nt, Human
cucuccugccgcugccaccucagc

SEQ ID NO: 491445 - RNA, 23 nt, Human
gaacuccugaccugaagugaucu

SEQ ID NO: 491446 - RNA, 18 nt, Human
gauuacaggugugagcca

SEQ ID NO: 491447 - RNA, 21 nt, Human
gauuacaggugugagccacua

SEQ ID NO: 491448 - RNA, 22 nt, Human
gauuacaggugugagccacuac

SEQ ID NO: 491449 - RNA, 19 nt, Human
gcggccggacucuccugcc

SEQ ID NO: 491450 - RNA, 21 nt, Human
ggcgaucgcuguucgcggcgc

SEQ ID NO: 491451 - RNA, 20 nt, Human
gguacccacacccacaccca

SEQ ID NO: 491452 - RNA, 19 nt, Human
ggucucgaacuccugaccu

SEQ ID NO: 491453 - RNA, 26 nt, Human
guccuuguugucucagcugucacugg

SEQ ID NO: 491454 - RNA, 24 nt, Human
gugagccacuacgcccagccuuuu

SEQ ID NO: 491455 - RNA, 24 nt, Human
uaauuuuugcauuuuuacuaggga

SEQ ID NO: 491456 - RNA, 24 nt, Human
uacaggugugagccacuacgccca

SEQ ID NO: 491457 - RNA, 21 nt, Human
uaccauguuggccaggcuggu

SEQ ID NO: 491458 - RNA, 27 nt, Human
uaccauguuggccaggcuggucucgaa

SEQ ID NO: 491459 - RNA, 21 nt, Human
uacccacacccacacccagcu

SEQ ID NO: 491460 - RNA, 23 nt, Human
uacccacacccacacccagcuaa

SEQ ID NO: 491461 - RNA, 19 nt, Human
uacgcccagccuuuugguu

SEQ ID NO: 491462 - RNA, 23 nt, Human
uagacuagggaagcucacaaggg

SEQ ID NO: 491463 - RNA, 28 nt, Human
uaggcacaaucacagcaugcuaugaccc

SEQ ID NO: 491464 - RNA, 21 nt, Human
uagggacagcguuuaccaugu

SEQ ID NO: 491465 - RNA, 18 nt, Human
uauauugcccagguuggu

SEQ ID NO: 491466 - RNA, 19 nt, Human
uauauugcccagguuggua

SEQ ID NO: 491467 - RNA, 22 nt, Human
uauggcuugguuucgcgauugu

SEQ ID NO: 491468 - RNA, 23 nt, Human
uauugcccagguugguaugcagu

SEQ ID NO: 491469 - RNA, 19 nt, Human
ucacugugugaggccgagu

SEQ ID NO: 491470 - RNA, 23 nt, Human
ucccaaagugcugggauuacagg

SEQ ID NO: 491471 - RNA, 27 nt, Human
uccucccaccucagccucccaaguaac

SEQ ID NO: 491472 - RNA, 21 nt, Human
uccuggguucaaaagauccuc

SEQ ID NO: 491473 - RNA, 24 nt, Human
uccuggguucaaaagauccuccca

SEQ ID NO: 491474 - RNA, 21 nt, Human
uccuuggccucccaaagugcu

SEQ ID NO: 491475 - RNA, 21 nt, Human
ucucgaacuccugaccugaag

SEQ ID NO: 491476 - RNA, 20 nt, Human
ucucuccuacaccuccuccc

SEQ ID NO: 491477 - RNA, 23 nt, Human
ucuugcuauauugcccagguugg

SEQ ID NO: 491478 - RNA, 24 nt, Human
ucuugcuauauugcccagguuggu

SEQ ID NO: 491479 - RNA, 25 nt, Human
ugaacuccuggguucaaaagauccu

SEQ ID NO: 491480 - RNA, 20 nt, Human
ugaccugaagugaucugccc

SEQ ID NO: 491481 - RNA, 22 nt, Human
ugaccugaagugaucugcccuc

SEQ ID NO: 491482 - RNA, 18 nt, Human
ugaggccgaguccccacc

SEQ ID NO: 491483 - RNA, 24 nt, Human
ugaucugcccuccuuggccuccca

SEQ ID NO: 491484 - RNA, 21 nt, Human
ugcaguacagcuccgggccag

SEQ ID NO: 491485 - RNA, 22 nt, Human
ugcaguggcuauucguaggcac

SEQ ID NO: 491486 - RNA, 24 nt, Human
ugcugggauuacaggugugagcca

SEQ ID NO: 491487 - RNA, 21 nt, Human
uggaagcggacuuggugcugg

SEQ ID NO: 491488 - RNA, 24 nt, Human
uggccaggcuggucucgaacuccu

SEQ ID NO: 491489 - RNA, 24 nt, Human
ugggaacacagguacccacaccca

SEQ ID NO: 491490 - RNA, 24 nt, Human
ugggaucuugcuauauugcccagg

SEQ ID NO: 491491 - RNA, 18 nt, Human
ugggauuacaggugugag

SEQ ID NO: 491492 - RNA, 19 nt, Human
ugggauuacaggugugagc

SEQ ID NO: 491493 - RNA, 21 nt, Human
ugggauuacaggugugagcca

SEQ ID NO: 491494 - RNA, 22 nt, Human
ugggauuacaggugugagccac

SEQ ID NO: 491495 - RNA, 22 nt, Human
ugggauuacaggugugagccac

SEQ ID NO: 491496 - RNA, 23 nt, Human
ugggauuacaggugugagccacu

SEQ ID NO: 491497 - RNA, 24 nt, Human
ugggauuacaggugugagccacua

SEQ ID NO: 491498 - RNA, 20 nt, Human
uggguucaaaagauccuccc

SEQ ID NO: 491499 - RNA, 21 nt, Human
uggugcugggcgaucgcuguu

SEQ ID NO: 491500 - RNA, 21 nt, Human
ugucacuggacaaaaguccaa

SEQ ID NO: 491501 - RNA, 19 nt, Human
uucaaaagauccucccacc

SEQ ID NO: 491502 - RNA, 24 nt, Human
uucaaaagauccucccaccucagc

SEQ ID NO: 491503 - RNA, 18 nt, Human
uuccagugggggaguucg

SEQ ID NO: 491504 - RNA, 22 nt, Human
uuuuuuuuuuuuuaaagagaug

SEQ ID NO: 491505 - RNA, 22 nt, Human
aaaaaaagaaaaggaaagaaaa

SEQ ID NO: 491506 - RNA, 23 nt, Human
aaaaaagcagcagaaggaaugca

SEQ ID NO: 491507 - RNA, 19 nt, Human
aaaaagcagcagaaggaau

SEQ ID NO: 491508 - RNA, 21 nt, Human
aaaaauacccccaucccaaaa

SEQ ID NO: 491509 - RNA, 23 nt, Human
aaaacaaaugaacaaaaauaccc

SEQ ID NO: 491510 - RNA, 29 nt, Human
aaacaaaaacaaacccaccccaagucugg

SEQ ID NO: 491511 - RNA, 24 nt, Human
aaacaaaugaacaaaaauaccccc

SEQ ID NO: 491512 - RNA, 25 nt, Human
aaacagggcaaaaacaaaugaacaa

SEQ ID NO: 491513 - RNA, 30 nt, Human
aaagaaaaggaaagaaaaaacaaaaacaaa

SEQ ID NO: 491514 - RNA, 26 nt, Human
aacaaaaacaaacccaccccaagucu

SEQ ID NO: 491515 - RNA, 19 nt, Human
aacuucagcuaccgccccc

SEQ ID NO: 491516 - RNA, 23 nt, Human
aagaaaaaacaaaaacaaaccca

SEQ ID NO: 491517 - RNA, 22 nt, Human
aagaaaaggaaagaaaaaacaa

SEQ ID NO: 491518 - RNA, 24 nt, Human
aagaaaaggaaagaaaaaacaaaa

SEQ ID NO: 491519 - RNA, 22 nt, Human
aaggagaaacuaagggauggug

SEQ ID NO: 491520 - RNA, 21 nt, Human
aagucugucuuuucucaaacu

SEQ ID NO: 491521 - RNA, 18 nt, Human
aagugcuguugcugacag

SEQ ID NO: 491522 - RNA, 23 nt, Human
acaaaaacaaacccaccccaagu

SEQ ID NO: 491523 - RNA, 21 nt, Human
acagggcaaaaacaaaugaac

SEQ ID NO: 491524 - RNA, 22 nt, Human
accccaagucugucuuuucuca

SEQ ID NO: 491525 - RNA, 19 nt, Human
aggagaaacuaagggaugg

SEQ ID NO: 491526 - RNA, 19 nt, Human
agggcacugacgcuuccuc

SEQ ID NO: 491527 - RNA, 21 nt, Human
cacuggcccagcccugggugc

SEQ ID NO: 491528 - RNA, 21 nt, Human
cagggcacugacgcuuccucc

SEQ ID NO: 491529 - RNA, 23 nt, Human
ccaguacuauuuauuuggaaguc

SEQ ID NO: 491530 - RNA, 21 nt, Human
cccaaaaaagcagcagaagga

SEQ ID NO: 491531 - RNA, 23 nt, Human
cccaaaaaagcagcagaaggaau

SEQ ID NO: 491532 - RNA, 24 nt, Human
cccaaaaaagcagcagaaggaaug

SEQ ID NO: 491533 - RNA, 20 nt, Human
ccuccaggauucgaguccac

SEQ ID NO: 491534 - RNA, 21 nt, Human
cgacuucccuuucccuuuauu

SEQ ID NO: 491535 - RNA, 25 nt, Human
cggagcuaugcguaaaaaaagaaaa

SEQ ID NO: 491536 - RNA, 22 nt, Human
cugacgcuuccuccaagccuug

SEQ ID NO: 491537 - RNA, 22 nt, Human
cuugcugcaugggcgcucaucc

SEQ ID NO: 491538 - RNA, 24 nt, Human
gaaaaaacaaaaacaaacccaccc

SEQ ID NO: 491539 - RNA, 23 nt, Human
gaaaaggaaagaaaaaacaaaaa

SEQ ID NO: 491540 - RNA, 22 nt, Human
ggagagcgagcugggaucucca

SEQ ID NO: 491541 - RNA, 19 nt, Human
ggaugguguggccuccggc

SEQ ID NO: 491542 - RNA, 22 nt, Human
ggcccagcccugggugcagcca

SEQ ID NO: 491543 - RNA, 25 nt, Human
gggugcagccagcucuugcggggcg

SEQ ID NO: 491544 - RNA, 21 nt, Human
uaaaaaaagaaaaggaaagaa

SEQ ID NO: 491545 - RNA, 26 nt, Human
ucaaaacagggcaaaaacaaaugaac

SEQ ID NO: 491546 - RNA, 22 nt, Human
ucccuuuauuuccuccuccagg

SEQ ID NO: 491547 - RNA, 23 nt, Human
ucccuuuauuuccuccuccagga

SEQ ID NO: 491548 - RNA, 22 nt, Human
ugaacaaaaauacccccauccc

SEQ ID NO: 491549 - RNA, 23 nt, Human
ugacaguggggagagcgagcugg

SEQ ID NO: 491550 - RNA, 27 nt, Human
ugacaguggggagagcgagcugggauc

SEQ ID NO: 491551 - RNA, 18 nt, Human
uggggagagcgagcuggg

SEQ ID NO: 491552 - RNA, 21 nt, Human
uggggagagcgagcugggauc

SEQ ID NO: 491553 - RNA, 24 nt, Human
uuaaccauuuucccugccucucca

SEQ ID NO: 491554 - RNA, 25 nt, Human
uuccuccaagccuugcugcaugggc

SEQ ID NO: 491555 - RNA, 25 nt, Human
uuuauuuggaagucugcgccauggu

SEQ ID NO: 491556 - RNA, 21 nt, Human
uuuuuuuuuugaaaugaccag

SEQ ID NO: 491557 - RNA, 23 nt, Human
aaauucgauuguagaaaaacauc

SEQ ID NO: 491558 - RNA, 22 nt, Human
aacuacuuaaacuccaagacag

SEQ ID NO: 491559 - RNA, 19 nt, Human
aacuauuaaaaaacuguuc

SEQ ID NO: 491560 - RNA, 21 nt, Human
aagaaaacuccccaggugacu

SEQ ID NO: 491561 - RNA, 18 nt, Human
aagaaaagcggagacagc

SEQ ID NO: 491562 - RNA, 19 nt, Human
acgcauugaccuuuaccuc

SEQ ID NO: 491563 - RNA, 21 nt, Human
acuauguaugcauuacaagau

SEQ ID NO: 491564 - RNA, 18 nt, Human
acuugcugggaacauccu

SEQ ID NO: 491565 - RNA, 18 nt, Human
agcccaccucucagaauc

SEQ ID NO: 491566 - RNA, 26 nt, Human
agucaguauuucuugcauauuuaagg

SEQ ID NO: 491567 - RNA, 20 nt, Human
auauaccuacuaucuaacaa

SEQ ID NO: 491568 - RNA, 22 nt, Human
caacaaauguguuagcugaaaa

SEQ ID NO: 491569 - RNA, 22 nt, Human
cagaaucgcgguaacaaaccuc

SEQ ID NO: 491570 - RNA, 25 nt, Human
cagccaagaguauuacaacaagaga

SEQ ID NO: 491571 - RNA, 20 nt, Human
cauccuagcuccuacccacc

SEQ ID NO: 491572 - RNA, 19 nt, Human
cgauuguagaaaaacaucc

SEQ ID NO: 491573 - RNA, 20 nt, Human
cgguaacaaaccucaccucc

SEQ ID NO: 491574 - RNA, 19 nt, Human
cucacuaacucuuuuucaa

SEQ ID NO: 491575 - RNA, 22 nt, Human
cuccuacccaccacucuauuac

SEQ ID NO: 491576 - RNA, 21 nt, Human
gaggcacuguagccuuuuuuu

SEQ ID NO: 491577 - RNA, 19 nt, Human
ggagggacuaaaagcccac

SEQ ID NO: 491578 - RNA, 18 nt, Human
gggaacauccuuugugag

SEQ ID NO: 491579 - RNA, 24 nt, Human
uaacagccaagaguauuacaacaa

SEQ ID NO: 491580 - RNA, 22 nt, Human
uacaacaagagaauauaaaaac

SEQ ID NO: 491581 - RNA, 23 nt, Human
uacagaaaaauuaguacuagaag

SEQ ID NO: 491582 - RNA, 22 nt, Human
uccuagcuccuacccaccacuc

SEQ ID NO: 491583 - RNA, 23 nt, Human
ucuuaugaccauguuaagcaacu

SEQ ID NO: 491584 - RNA, 18 nt, Human
ugaaagaaaagcggagac

SEQ ID NO: 491585 - RNA, 21 nt, Human
ugaaagaaaagcggagacagc

SEQ ID NO: 491586 - RNA, 23 nt, Human
ugaaagaaaagcggagacagcac

SEQ ID NO: 491587 - RNA, 22 nt, Human
ugaugugcugauuauagcuaag

SEQ ID NO: 491588 - RNA, 28 nt, Human
uguaugcauuacaagaugaauaugcaua

SEQ ID NO: 491589 - RNA, 18 nt, Human
ugugggguuagggagaug

SEQ ID NO: 491590 - RNA, 19 nt, Human
uuaaaaaacuguucaauag

SEQ ID NO: 491591 - RNA, 19 nt, Human
uuaaacaacuugcugggaa

SEQ ID NO: 491592 - RNA, 20 nt, Human
uuaaauugaacagagagaag

SEQ ID NO: 491593 - RNA, 21 nt, Human
uuaugaagaaaacuccccagg

SEQ ID NO: 491594 - RNA, 20 nt, Human
uuccauaacagccaagagua

SEQ ID NO: 491595 - RNA, 24 nt, Human
uuuaacaacuugcugggaauuuaa

SEQ ID NO: 491596 - RNA, 18 nt, Human
aaaacaaacaaaaacccc

SEQ ID NO: 491597 - RNA, 24 nt, Human
aaaacaaacaaaaaccccaaagaa

SEQ ID NO: 491598 - RNA, 19 nt, Human
aaaauaagaacuccugaau

SEQ ID NO: 491599 - RNA, 24 nt, Human
aaaguguugggauuacaggcauga

SEQ ID NO: 491600 - RNA, 20 nt, Human
aaccugccaucccuuucaaa

SEQ ID NO: 491601 - RNA, 21 nt, Human
aacuauuaaaaacugcaagcu

SEQ ID NO: 491602 - RNA, 30 nt, Human
aagacaaauaaacuggaucaaccaagggac

SEQ ID NO: 491603 - RNA, 21 nt, Human
aagcuagucucaaacuccugg

SEQ ID NO: 491604 - RNA, 21 nt, Human
aaguguugggauuacaggcau

SEQ ID NO: 491605 - RNA, 26 nt, Human
aaguguugggauuacaggcaugagcc

SEQ ID NO: 491606 - RNA, 20 nt, Human
aauaaaaaauuuccaaaagu

SEQ ID NO: 491607 - RNA, 18 nt, Human
aauagcugggauuacagg

SEQ ID NO: 491608 - RNA, 21 nt, Human
aaugauucucgugccucagcc

SEQ ID NO: 491609 - RNA, 20 nt, Human
acaaaaaccccaaagaacuc

SEQ ID NO: 491610 - RNA, 24 nt, Human
acaacagaguucacaucacccuga

SEQ ID NO: 491611 - RNA, 19 nt, Human
acaccacugcccugacagg

SEQ ID NO: 491612 - RNA, 22 nt, Human
acagagacauagaaaacaacaa

SEQ ID NO: 491613 - RNA, 19 nt, Human
acaguaauuuuuuuuccuu

SEQ ID NO: 491614 - RNA, 21 nt, Human
acauagaaaacaacaaaaugu

SEQ ID NO: 491615 - RNA, 22 nt, Human
acccacagcuccagcuuuccuc

SEQ ID NO: 491616 - RNA, 20 nt, Human
acccugcagugccucccaaa

SEQ ID NO: 491617 - RNA, 23 nt, Human
accugaccaaagucacagccacc

SEQ ID NO: 491618 - RNA, 21 nt, Human
accuggacagcugaaaugauc

SEQ ID NO: 491619 - RNA, 24 nt, Human
accugggcuggagugcaguggcau

SEQ ID NO: 491620 - RNA, 20 nt, Human
acuacacuaucagaacagca

SEQ ID NO: 491621 - RNA, 20 nt, Human
acucacucugucgcccagga

SEQ ID NO: 491622 - RNA, 21 nt, Human
acucugucgcccaggaugcag

SEQ ID NO: 491623 - RNA, 18 nt, Human
acuuuuugaguucucaac

SEQ ID NO: 491624 - RNA, 24 nt, Human
agaaaacaaucccuaauccaaaac

SEQ ID NO: 491625 - RNA, 20 nt, Human
agacugcuggguacugugag

SEQ ID NO: 491626 - RNA, 18 nt, Human
agcaaccacauuucuaaa

SEQ ID NO: 491627 - RNA, 20 nt, Human
agccaguguggcaacugaca

SEQ ID NO: 491628 - RNA, 18 nt, Human
agccuccugaguagcuag

SEQ ID NO: 491629 - RNA, 20 nt, Human
agcuagucucaaacuccugg

SEQ ID NO: 491630 - RNA, 24 nt, Human
agcuagucucaaacuccugguccc

SEQ ID NO: 491631 - RNA, 25 nt, Human
aggaaaaauggaggagaccgguacc

SEQ ID NO: 491632 - RNA, 25 nt, Human
aggcuggagugcaguggugugaucu

SEQ ID NO: 491633 - RNA, 18 nt, Human
aguagcugggacuacagg

SEQ ID NO: 491634 - RNA, 18 nt, Human
aguagcugggauuacagg

SEQ ID NO: 491635 - RNA, 19 nt, Human
agugcaguggcaugaucuc

SEQ ID NO: 491636 - RNA, 21 nt, Human
agugcaguggcaugaucucag

SEQ ID NO: 491637 - RNA, 23 nt, Human
agugcaguggcaugaucucagcu

SEQ ID NO: 491638 - RNA, 23 nt, Human
agugcaguggugugaucuuggcu

SEQ ID NO: 491639 - RNA, 24 nt, Human
agugcaguggugugaucuuggcuc

SEQ ID NO: 491640 - RNA, 24 nt, Human
agugcgguggcgcgaucucugcuc

SEQ ID NO: 491641 - RNA, 21 nt, Human
auacagagacauagaaaacaa

SEQ ID NO: 491642 - RNA, 18 nt, Human
auagcugggauuacaggu

SEQ ID NO: 491643 - RNA, 20 nt, Human
auauuuuuugguagagaugg

SEQ ID NO: 491644 - RNA, 28 nt, Human
auccaggcaacaacagaguucacaucac

SEQ ID NO: 491645 - RNA, 20 nt, Human
augacaaaauguucgguggc

SEQ ID NO: 491646 - RNA, 25 nt, Human
augggguuucacuauguuggccaag

SEQ ID NO: 491647 - RNA, 21 nt, Human
auuccccugccucagccuccc

SEQ ID NO: 491648 - RNA, 25 nt, Human
auuuuuauauuuuuugguagagaug

SEQ ID NO: 491649 - RNA, 23 nt, Human
caaaaaauaaaaaauuuccaaaa

SEQ ID NO: 491650 - RNA, 19 nt, Human
caaacaaaaaccccaaaga

SEQ ID NO: 491651 - RNA, 19 nt, Human
caaacaaaaaccccaaaga

SEQ ID NO: 491652 - RNA, 20 nt, Human
caaacaaaaaccccaaagaa

SEQ ID NO: 491653 - RNA, 24 nt, Human
caaaguguugggauuacaggcaug

SEQ ID NO: 491654 - RNA, 25 nt, Human
caaaugauucucgugccucagccga

SEQ ID NO: 491655 - RNA, 22 nt, Human
caacaaacaugacaaaauguuc

SEQ ID NO: 491656 - RNA, 20 nt, Human
caaccuccaccuccuggguu

SEQ ID NO: 491657 - RNA, 24 nt, Human
caaccuccaccuccuggguuuaag

SEQ ID NO: 491658 - RNA, 21 nt, Human
caaucccuaauccaaaaccgg

SEQ ID NO: 491659 - RNA, 21 nt, Human
cacaccaaacagugcuacuca

SEQ ID NO: 491660 - RNA, 20 nt, Human
cacagcuccagcuuuccucu

SEQ ID NO: 491661 - RNA, 23 nt, Human
caccacugcccugacaggcugcc

SEQ ID NO: 491662 - RNA, 20 nt, Human
caccugaccaaagucacagc

SEQ ID NO: 491663 - RNA, 21 nt, Human
cacuauguuggccaagcuagu

SEQ ID NO: 491664 - RNA, 24 nt, Human
cacuauguuggccaagcuagucuc

SEQ ID NO: 491665 - RNA, 21 nt, Human
cacucacucugucgcccagga

SEQ ID NO: 491666 - RNA, 24 nt, Human
cacucugucgcccaggaugcagug

SEQ ID NO: 491667 - RNA, 23 nt, Human
cacugcaaucuccguguccuggg

SEQ ID NO: 491668 - RNA, 22 nt, Human
cacugcaugcagcugacacaua

SEQ ID NO: 491669 - RNA, 23 nt, Human
cacuguagccucugccuccuggg

SEQ ID NO: 491670 - RNA, 23 nt, Human
cagagacauagaaaacaacaaaa

SEQ ID NO: 491671 - RNA, 24 nt, Human
cagagugcuggaggaaaaauggag

SEQ ID NO: 491672 - RNA, 20 nt, Human
cagaguucacaucacccuga

SEQ ID NO: 491673 - RNA, 22 nt, Human
cagcaaagaaaugacuaaaaga

SEQ ID NO: 491674 - RNA, 24 nt, Human
cagcaggcacuggucccacuuccu

SEQ ID NO: 491675 - RNA, 23 nt, Human
cagcccauauuacaguagguagg

SEQ ID NO: 491676 - RNA, 24 nt, Human
cagccgaauagcugggauuacagg

SEQ ID NO: 491677 - RNA, 19 nt, Human
cagccuccugaguagcuag

SEQ ID NO: 491678 - RNA, 23 nt, Human
cagcucacuguagccucugccuc

SEQ ID NO: 491679 - RNA, 24 nt, Human
caggguacucucauguacuaacug

SEQ ID NO: 491680 - RNA, 22 nt, Human
caugacaaaauguucgguggcc

SEQ ID NO: 491681 - RNA, 21 nt, Human
ccaaagaacucuggcucuuaa

SEQ ID NO: 491682 - RNA, 23 nt, Human
ccaaaguguugggauuacaggca

SEQ ID NO: 491683 - RNA, 24 nt, Human
ccaaaguguugggauuacaggcau

SEQ ID NO: 491684 - RNA, 21 nt, Human
ccacauuucuaaaccuuuuca

SEQ ID NO: 491685 - RNA, 24 nt, Human
ccaccuccuggguuuaagcgacuc

SEQ ID NO: 491686 - RNA, 18 nt, Human
ccaguccaugaaguuugc

SEQ ID NO: 491687 - RNA, 23 nt, Human
ccaucucagccuccugaguagcu

SEQ ID NO: 491688 - RNA, 24 nt, Human
cccaaaguguugggauuacaggca

SEQ ID NO: 491689 - RNA, 19 nt, Human
cccaggcuggagugcagug

SEQ ID NO: 491690 - RNA, 18 nt, Human
ccccaaagaacucuggcu

SEQ ID NO: 491691 - RNA, 20 nt, Human
ccccaaagaacucuggcucu

SEQ ID NO: 491692 - RNA, 33 nt, Human
ccccaaagaacucuggcucuuaaaggaccagga

SEQ ID NO: 491693 - RNA, 19 nt, Human
ccccacccacagcuccagc

SEQ ID NO: 491694 - RNA, 20 nt, Human
ccccccgccccucaagacca

SEQ ID NO: 491695 - RNA, 22 nt, Human
ccccccgccccucaagaccaaa

SEQ ID NO: 491696 - RNA, 19 nt, Human
ccccgccccucaagaccaa

SEQ ID NO: 491697 - RNA, 20 nt, Human
ccccgccccucaagaccaaa

SEQ ID NO: 491698 - RNA, 24 nt, Human
ccccgccccucaagaccaaaauua

SEQ ID NO: 491699 - RNA, 23 nt, Human
cccgaguagcugggacuacaggc

SEQ ID NO: 491700 - RNA, 24 nt, Human
cccgaguagcugggacuacaggca

SEQ ID NO: 491701 - RNA, 23 nt, Human
cccgaguagcugggauuacaggu

SEQ ID NO: 491702 - RNA, 24 nt, Human
cccgaguagcugggauuacaggug

SEQ ID NO: 491703 - RNA, 24 nt, Human
cccucugucaccugggcuggagug

SEQ ID NO: 491704 - RNA, 24 nt, Human
cccugccucagccucccgaguagc

SEQ ID NO: 491705 - RNA, 21 nt, Human
ccgaauagcugggauuacagg

SEQ ID NO: 491706 - RNA, 21 nt, Human
ccgaauagcugggauuacagg

SEQ ID NO: 491707 - RNA, 23 nt, Human
ccgaauagcugggauuacaggug

SEQ ID NO: 491708 - RNA, 24 nt, Human
ccgaauagcugggauuacaggugu

SEQ ID NO: 491709 - RNA, 21 nt, Human
ccgaguagcugggauuacagg

SEQ ID NO: 491710 - RNA, 25 nt, Human
ccgguacuuaucuaccacauccagc

SEQ ID NO: 491711 - RNA, 28 nt, Human
ccucagccgaauagcugggauuacaggu

SEQ ID NO: 491712 - RNA, 23 nt, Human
ccucccaguugauacaauguccc

SEQ ID NO: 491713 - RNA, 24 nt, Human
ccuccuggguugaagugauucucc

SEQ ID NO: 491714 - RNA, 22 nt, Human
ccuccuggguuuaagcgacucu

SEQ ID NO: 491715 - RNA, 24 nt, Human
ccucugccuccuggguugaaguga

SEQ ID NO: 491716 - RNA, 20 nt, Human
ccugaggcauauaacugccu

SEQ ID NO: 491717 - RNA, 19 nt, Human
ccugcagugccucccaaag

SEQ ID NO: 491718 - RNA, 24 nt, Human
ccugccucacccucccgaguagcu

SEQ ID NO: 491719 - RNA, 20 nt, Human
ccuggguucaaaugauucuc

SEQ ID NO: 491720 - RNA, 18 nt, Human
ccuggguuuaagcgacuc

SEQ ID NO: 491721 - RNA, 24 nt, Human
ccuucucucacuacucuaguaugc

SEQ ID NO: 491722 - RNA, 20 nt, Human
ccuuuuucuuugagagaguc

SEQ ID NO: 491723 - RNA, 25 nt, Human
cgaauagcugggauuacaggugugc

SEQ ID NO: 491724 - RNA, 19 nt, Human
cgccucccggauucacgcc

SEQ ID NO: 491725 - RNA, 22 nt, Human
cuaaugccaugccagaaccaaa

SEQ ID NO: 491726 - RNA, 23 nt, Human
cuacugauccacaaguacagaaa

SEQ ID NO: 491727 - RNA, 18 nt, Human
cucacucugucgcccagg

SEQ ID NO: 491728 - RNA, 24 nt, Human
cucacugcaagacccgccucccgg

SEQ ID NO: 491729 - RNA, 24 nt, Human
cucacugcaaucuccguguccugg

SEQ ID NO: 491730 - RNA, 24 nt, Human
cucacuguagccucugccuccugg

SEQ ID NO: 491731 - RNA, 24 nt, Human
cucagccucccgaguagcugggac

SEQ ID NO: 491732 - RNA, 21 nt, Human
cucagccuccugaguagcuag

SEQ ID NO: 491733 - RNA, 24 nt, Human
cucccucugucaccugggcuggag

SEQ ID NO: 491734 - RNA, 23 nt, Human
cuccugaguagcuagaauauagg

SEQ ID NO: 491735 - RNA, 24 nt, Human
cucgcuuugucggcgaggcuggag

SEQ ID NO: 491736 - RNA, 24 nt, Human
cucguucuguugcccaggcuggag

SEQ ID NO: 491737 - RNA, 22 nt, Human
cucucaguagaaugagccccau

SEQ ID NO: 491738 - RNA, 26 nt, Human
cucucccaucucagccuccugaguag

SEQ ID NO: 491739 - RNA, 24 nt, Human
cugcaagacccgccucccggauuc

SEQ ID NO: 491740 - RNA, 21 nt, Human
cugccucacccucccgaguaa

SEQ ID NO: 491741 - RNA, 23 nt, Human
cugccucagccucccgaguagcu

SEQ ID NO: 491742 - RNA, 24 nt, Human
cuggagugcaguggcaugaucuca

SEQ ID NO: 491743 - RNA, 23 nt, Human
cuggaucaaccaagagauggcca

SEQ ID NO: 491744 - RNA, 19 nt, Human
cuguugcccaggcuggagu

SEQ ID NO: 491745 - RNA, 19 nt, Human
cuuagauuuuugggacagc

SEQ ID NO: 491746 - RNA, 21 nt, Human
cuuccugcugagccccaccuc

SEQ ID NO: 491747 - RNA, 23 nt, Human
gaaaacaaucccuaauccaaaac

SEQ ID NO: 491748 - RNA, 24 nt, Human
gaauauaggcauaugccaccauac

SEQ ID NO: 491749 - RNA, 20 nt, Human
gagaugggguuucacuaugu

SEQ ID NO: 491750 - RNA, 24 nt, Human
gagaugggguuucacuauguuggc

SEQ ID NO: 491751 - RNA, 20 nt, Human
gaguagcugggacuacaggc

SEQ ID NO: 491752 - RNA, 27 nt, Human
gaguagcugggacuacaggcaccccag

SEQ ID NO: 491753 - RNA, 24 nt, Human
gaguagcugggauuacaggugcug

SEQ ID NO: 491754 - RNA, 18 nt, Human
gauuacaggcaugagcca

SEQ ID NO: 491755 - RNA, 23 nt, Human
gauuacaggcaugagccacugca

SEQ ID NO: 491756 - RNA, 26 nt, Human
gauuacaggcaugagccacugcaugc

SEQ ID NO: 491757 - RNA, 20 nt, Human
gccaguccaugaaguuugcu

SEQ ID NO: 491758 - RNA, 24 nt, Human
gcccaggcuggagugcaguggugu

SEQ ID NO: 491759 - RNA, 22 nt, Human
gcgaggcuggagugcgguggcg

SEQ ID NO: 491760 - RNA, 21 nt, Human
gcuccagcuuuccucucacuc

SEQ ID NO: 491761 - RNA, 19 nt, Human
gcuggagugcaguggcaug

SEQ ID NO: 491762 - RNA, 19 nt, Human
ggaaaacaaacaaaaaccc

SEQ ID NO: 491763 - RNA, 24 nt, Human
ggaaaacaaacaaaaaccccaaag

SEQ ID NO: 491764 - RNA, 22 nt, Human
ggauuacaggcaugagccacug

SEQ ID NO: 491765 - RNA, 24 nt, Human
ggcuggagugcaguggcaugaucu

SEQ ID NO: 491766 - RNA, 22 nt, Human
ggcuggagugcaguggugugau

SEQ ID NO: 491767 - RNA, 18 nt, Human
gggguuucacuauguugg

SEQ ID NO: 491768 - RNA, 22 nt, Human
gggguuucacuauguuggccaa

SEQ ID NO: 491769 - RNA, 18 nt, Human
ggguuucacuauguuggc

SEQ ID NO: 491770 - RNA, 22 nt, Human
ggguuucacuauguuggccaag

SEQ ID NO: 491771 - RNA, 18 nt, Human
guaauuccucccaaagug

SEQ ID NO: 491772 - RNA, 18 nt, Human
guagagaugggguuucac

SEQ ID NO: 491773 - RNA, 18 nt, Human
guagagaugggguuucac

SEQ ID NO: 491774 - RNA, 22 nt, Human
guagagaugggguuucacuaug

SEQ ID NO: 491775 - RNA, 19 nt, Human
gugauucuccugccucacc

SEQ ID NO: 491776 - RNA, 21 nt, Human
guggaaguggugugagauguu

SEQ ID NO: 491777 - RNA, 20 nt, Human
guuuuuuuuuuuuaccccuu

SEQ ID NO: 491778 - RNA, 22 nt, Human
uaaaaacugcaagcuaauguua

SEQ ID NO: 491779 - RNA, 23 nt, Human
uaaaaacugcaagcuaauguuac

SEQ ID NO: 491780 - RNA, 25 nt, Human
uaaaugcuagugcuuuuuaaugggg

SEQ ID NO: 491781 - RNA, 23 nt, Human
uaacaaaacauuugguuuguauu

SEQ ID NO: 491782 - RNA, 25 nt, Human
uaagaaauaaguaucaugcucucaa

SEQ ID NO: 491783 - RNA, 21 nt, Human
uaagacaaauaaacuggauca

SEQ ID NO: 491784 - RNA, 18 nt, Human
uaagacagaaucucguuc

SEQ ID NO: 491785 - RNA, 22 nt, Human
uaagacagaaucucguucuguu

SEQ ID NO: 491786 - RNA, 25 nt, Human
uaauuuuuauauuuuuugguagaga

SEQ ID NO: 491787 - RNA, 24 nt, Human
uacaaaaucaagagacuaaaacag

SEQ ID NO: 491788 - RNA, 18 nt, Human
uacaaauuaaaaauuuug

SEQ ID NO: 491789 - RNA, 21 nt, Human
uacaauguccacagauguuuc

SEQ ID NO: 491790 - RNA, 20 nt, Human
uacagagagggaaaacauga

SEQ ID NO: 491791 - RNA, 20 nt, Human
uacaggcaugagccacugca

SEQ ID NO: 491792 - RNA, 21 nt, Human
uacuuagauuuuugggacagc

SEQ ID NO: 491793 - RNA, 22 nt, Human
uagagaugggguuucacuaugu

SEQ ID NO: 491794 - RNA, 18 nt, Human
uagcaucuuaucacuauu

SEQ ID NO: 491795 - RNA, 19 nt, Human
uagcccugcugaaaacaaa

SEQ ID NO: 491796 - RNA, 28 nt, Human
uagcuuuucuguuuuuuuuuuuuuuuuu

SEQ ID NO: 491797 - RNA, 24 nt, Human
uauguuggccaagcuagucucaaa

SEQ ID NO: 491798 - RNA, 23 nt, Human
uauuauggcuuugccacaccacu

SEQ ID NO: 491799 - RNA, 19 nt, Human
uauucuugcccaagacuug

SEQ ID NO: 491800 - RNA, 22 nt, Human
ucaccugggcuggagugcagug

SEQ ID NO: 491801 - RNA, 25 nt, Human
ucacuauaauacuuagauuuuuggg

SEQ ID NO: 491802 - RNA, 24 nt, Human
ucacugcaagacccgccucccgga

SEQ ID NO: 491803 - RNA, 20 nt, Human
ucacugcaaucuccgugucc

SEQ ID NO: 491804 - RNA, 24 nt, Human
ucacugcaaucuccguguccuggg

SEQ ID NO: 491805 - RNA, 24 nt, Human
ucacuguagccucugccuccuggg

SEQ ID NO: 491806 - RNA, 25 nt, Human
ucacuguagccucugccuccugggu

SEQ ID NO: 491807 - RNA, 23 nt, Human
ucagccucccgaguagcugggac

SEQ ID NO: 491808 - RNA, 24 nt, Human
ucauuucaaccuccaccuccuggg

SEQ ID NO: 491809 - RNA, 22 nt, Human
uccaggcaacaacagaguucac

SEQ ID NO: 491810 - RNA, 18 nt, Human
ucccaaagagcagagugc

SEQ ID NO: 491811 - RNA, 24 nt, Human
ucccaaaguguugggauuacaggc

SEQ ID NO: 491812 - RNA, 19 nt, Human
uccccacccacagcuccag

SEQ ID NO: 491813 - RNA, 24 nt, Human
uccccugccucagccucccgagua

SEQ ID NO: 491814 - RNA, 24 nt, Human
ucccgaguagcugggacuacaggc

SEQ ID NO: 491815 - RNA, 23 nt, Human
ucccgaguagcugggauuacagg

SEQ ID NO: 491816 - RNA, 24 nt, Human
ucccgaguagcugggauuacaggu

SEQ ID NO: 491817 - RNA, 22 nt, Human
ucccggauucacgccauucccc

SEQ ID NO: 491818 - RNA, 20 nt, Human
ucccucugucaccugggcug

SEQ ID NO: 491819 - RNA, 24 nt, Human
ucccucugucaccugggcuggagu

SEQ ID NO: 491820 - RNA, 23 nt, Human
uccugaguagcuagaauauaggc

SEQ ID NO: 491821 - RNA, 23 nt, Human
uccugcugagccccaccucugac

SEQ ID NO: 491822 - RNA, 19 nt, Human
uccuggguucaaaugauuc

SEQ ID NO: 491823 - RNA, 21 nt, Human
uccuggguucaaaugauucuc

SEQ ID NO: 491824 - RNA, 24 nt, Human
uccuggguugaagugauucuccug

SEQ ID NO: 491825 - RNA, 19 nt, Human
uccuggguuuaagcgacuc

SEQ ID NO: 491826 - RNA, 21 nt, Human
uccuggguuuaagcgacucuc

SEQ ID NO: 491827 - RNA, 22 nt, Human
ucucaaaaaauaaaaaauuucc

SEQ ID NO: 491828 - RNA, 23 nt, Human
ucucccucugucaccugggcugg

SEQ ID NO: 491829 - RNA, 24 nt, Human
ucucccucugucaccugggcugga

SEQ ID NO: 491830 - RNA, 24 nt, Human
ucucgcuuugucggcgaggcugga

SEQ ID NO: 491831 - RNA, 22 nt, Human
ucucguucuguugcccaggcug

SEQ ID NO: 491832 - RNA, 23 nt, Human
ucucguucuguugcccaggcugg

SEQ ID NO: 491833 - RNA, 24 nt, Human
ucucguucuguugcccaggcugga

SEQ ID NO: 491834 - RNA, 18 nt, Human
ucugccuccuggguugaa

SEQ ID NO: 491835 - RNA, 24 nt, Human
ucugucaccugggcuggagugcag

SEQ ID NO: 491836 - RNA, 18 nt, Human
ucuguugcccaggcugga

SEQ ID NO: 491837 - RNA, 19 nt, Human
ucuguugcccaggcuggag

SEQ ID NO: 491838 - RNA, 24 nt, Human
ucuguugcccaggcuggagugcag

SEQ ID NO: 491839 - RNA, 20 nt, Human
ugaaauuuucuggguagcca

SEQ ID NO: 491840 - RNA, 24 nt, Human
ugaaauuuucuggguagccagugu

SEQ ID NO: 491841 - RNA, 22 nt, Human
ugacaggccagcccauauuaca

SEQ ID NO: 491842 - RNA, 23 nt, Human
ugacuaaaagacagguguuuuuu

SEQ ID NO: 491843 - RNA, 24 nt, Human
ugagaaaacaaucccuaauccagc

SEQ ID NO: 491844 - RNA, 18 nt, Human
ugagaauaaguaaaaaaa

SEQ ID NO: 491845 - RNA, 18 nt, Human
ugagacagagucucacuc

SEQ ID NO: 491846 - RNA, 26 nt, Human
ugagacagagucucacucacucuguc

SEQ ID NO: 491847 - RNA, 23 nt, Human
ugagagagucucccucugucacc

SEQ ID NO: 491848 - RNA, 23 nt, Human
ugaggcauauaacugccucccug

SEQ ID NO: 491849 - RNA, 22 nt, Human
ugaggcauauaacugccugaaa

SEQ ID NO: 491850 - RNA, 20 nt, Human
ugaguucucaacauguugga

SEQ ID NO: 491851 - RNA, 21 nt, Human
ugaguuggaugaguccccccg

SEQ ID NO: 491852 - RNA, 19 nt, Human
ugauacaauguccacagau

SEQ ID NO: 491853 - RNA, 21 nt, Human
ugaugaacuauuaaaaacugc

SEQ ID NO: 491854 - RNA, 22 nt, Human
ugcaguggcaugaucucagcuc

SEQ ID NO: 491855 - RNA, 22 nt, Human
ugcaguggugugaucuuggcuc

SEQ ID NO: 491856 - RNA, 20 nt, Human
ugccacaccacugcccugac

SEQ ID NO: 491857 - RNA, 18 nt, Human
ugccagaaccaaaggcua

SEQ ID NO: 491858 - RNA, 19 nt, Human
ugccagaaccaaaggcuaa

SEQ ID NO: 491859 - RNA, 18 nt, Human
ugcccaggcuggagugca

SEQ ID NO: 491860 - RNA, 21 nt, Human
ugcccaggcuggagugcagug

SEQ ID NO: 491861 - RNA, 24 nt, Human
ugcccaggcuggagugcaguggug

SEQ ID NO: 491862 - RNA, 22 nt, Human
ugcccugacaggcugccugagg

SEQ ID NO: 491863 - RNA, 21 nt, Human
ugccucacccucccgaguagc

SEQ ID NO: 491864 - RNA, 24 nt, Human
ugccucacccucccgaguagcugg

SEQ ID NO: 491865 - RNA, 28 nt, Human
ugccucacccucccgaguagcugggauu

SEQ ID NO: 491866 - RNA, 24 nt, Human
ugccucagccucccgaguagcugg

SEQ ID NO: 491867 - RNA, 19 nt, Human
ugccugaaauuuucugggu

SEQ ID NO: 491868 - RNA, 22 nt, Human
ugcugugguacgaucucagcuc

SEQ ID NO: 491869 - RNA, 20 nt, Human
ugcuuuuuaaugggggaaaa

SEQ ID NO: 491870 - RNA, 21 nt, Human
uggaggaaaaauggaggagac

SEQ ID NO: 491871 - RNA, 19 nt, Human
uggagugcaguggcaugau

SEQ ID NO: 491872 - RNA, 24 nt, Human
uggagugcaguggcaugaucucag

SEQ ID NO: 491873 - RNA, 19 nt, Human
uggagugcaguggugugau

SEQ ID NO: 491874 - RNA, 23 nt, Human
uggagugcaguggugugaucuug

SEQ ID NO: 491875 - RNA, 24 nt, Human
uggagugcaguggugugaucuugg

SEQ ID NO: 491876 - RNA, 22 nt, Human
uggagugcgguggcgcgaucuc

SEQ ID NO: 491877 - RNA, 18 nt, Human
uggcaugaucucagcuca

SEQ ID NO: 491878 - RNA, 18 nt, Human
ugggacuacaggcacccc

SEQ ID NO: 491879 - RNA, 19 nt, Human
ugggacuacaggcacccca

SEQ ID NO: 491880 - RNA, 18 nt, Human
ugggauuacaggcaugag

SEQ ID NO: 491881 - RNA, 19 nt, Human
ugggauuacaggcaugagc

SEQ ID NO: 491882 - RNA, 21 nt, Human
ugggauuacaggcaugagcca

SEQ ID NO: 491883 - RNA, 22 nt, Human
ugggauuacaggcaugagccac

SEQ ID NO: 491884 - RNA, 22 nt, Human
ugggauuacaggcaugagccac

SEQ ID NO: 491885 - RNA, 24 nt, Human
ugggauuacaggcaugagccacug

SEQ ID NO: 491886 - RNA, 24 nt, Human
ugggauuacaggcaugagccacug

SEQ ID NO: 491887 - RNA, 19 nt, Human
ugggauuacaggugcuggu

SEQ ID NO: 491888 - RNA, 18 nt, Human
ugggauuacaggugugca

SEQ ID NO: 491889 - RNA, 20 nt, Human
ugggauuacaggugugcaac

SEQ ID NO: 491890 - RNA, 24 nt, Human
ugggguuucacuauguuggccaag

SEQ ID NO: 491891 - RNA, 24 nt, Human
ugguacgaucucagcucacuguag

SEQ ID NO: 491892 - RNA, 23 nt, Human
ugguagagaugggguuucacuau

SEQ ID NO: 491893 - RNA, 24 nt, Human
ugguagagaugggguuucacuaug

SEQ ID NO: 491894 - RNA, 18 nt, Human
uggucaagaaaaagaggg

SEQ ID NO: 491895 - RNA, 21 nt, Human
uguagcaaauaucuuuaggcc

SEQ ID NO: 491896 - RNA, 20 nt, Human
ugucaccugggcuggagugc

SEQ ID NO: 491897 - RNA, 26 nt, Human
ugugaauguuuuguagcuuuucuguu

SEQ ID NO: 491898 - RNA, 18 nt, Human
ugugaguuggaugagucc

SEQ ID NO: 491899 - RNA, 19 nt, Human
uguuccccacccacagcuc

SEQ ID NO: 491900 - RNA, 19 nt, Human
uuaaaacuaauuuagcaac

SEQ ID NO: 491901 - RNA, 21 nt, Human
uuaagagacaucuuguaauga

SEQ ID NO: 491902 - RNA, 23 nt, Human
uucaaaugauucucgugccucag

SEQ ID NO: 491903 - RNA, 19 nt, Human
uuccccacccacagcucca

SEQ ID NO: 491904 - RNA, 19 nt, Human
uuccccugccucagccucc

SEQ ID NO: 491905 - RNA, 20 nt, Human
uucuggguagccaguguggc

SEQ ID NO: 491906 - RNA, 24 nt, Human
uugcccaggcuggagugcaguggu

SEQ ID NO: 491907 - RNA, 24 nt, Human
uugguagagaugggguuucacuau

SEQ ID NO: 491908 - RNA, 20 nt, Human
uuuaagacagaaucucguuc

SEQ ID NO: 491909 - RNA, 20 nt, Human
uuuauauuuuuugguagaga

SEQ ID NO: 491910 - RNA, 23 nt, Human
uuucaaccuccaccuccuggguu

SEQ ID NO: 491911 - RNA, 21 nt, Human
uuucacuauguuggccaagcu

SEQ ID NO: 491912 - RNA, 21 nt, Human
uuucuggguagccaguguggc

SEQ ID NO: 491913 - RNA, 24 nt, Human
uuugucggcgaggcuggagugcgg

SEQ ID NO: 491914 - RNA, 23 nt, Human
uuuuguaauucacuucauucauu

SEQ ID NO: 491915 - RNA, 21 nt, Human
uuuuuauauuuuuugguagag

SEQ ID NO: 491916 - RNA, 24 nt, Human
uuuuugguagagaugggguuucac

SEQ ID NO: 491917 - RNA, 23 nt, Human
uuuuuugguagagaugggguuuc

SEQ ID NO: 491918 - RNA, 20 nt, Human
uuuuuuuuuuugagacagag

SEQ ID NO: 491919 - RNA, 26 nt, Human
uuuuuuuuuuuugagacagagucuca

SEQ ID NO: 491920 - RNA, 18 nt, Human
uuuuuuuuuuuuuuuuug

SEQ ID NO: 491921 - RNA, 21 nt, Human
aaaaauaaauagaucacuuca

SEQ ID NO: 491922 - RNA, 22 nt, Human
aaaaguuaguguuuuaugaagg

SEQ ID NO: 491923 - RNA, 21 nt, Human
aaaauaacaaaaacugaagua

SEQ ID NO: 491924 - RNA, 18 nt, Human
aaacauuugagcugccga

SEQ ID NO: 491925 - RNA, 24 nt, Human
aacacugugaaauccuuugcuuau

SEQ ID NO: 491926 - RNA, 23 nt, Human
aacucauaggcaccaucuucccu

SEQ ID NO: 491927 - RNA, 20 nt, Human
aaugacacugauuucccuca

SEQ ID NO: 491928 - RNA, 22 nt, Human
aauuuuuaauaaccauaaaagc

SEQ ID NO: 491929 - RNA, 18 nt, Human
acaauguucccuuagaug

SEQ ID NO: 491930 - RNA, 21 nt, Human
agaaauagagcauacguccuc

SEQ ID NO: 491931 - RNA, 21 nt, Human
agagaacagagcagagcagau

SEQ ID NO: 491932 - RNA, 21 nt, Human
caaaaaauaacaaaaacugaa

SEQ ID NO: 491933 - RNA, 23 nt, Human
caacaaaaaauaacaaaaacuga

SEQ ID NO: 491934 - RNA, 21 nt, Human
caacuuuaccgauggagauga

SEQ ID NO: 491935 - RNA, 22 nt, Human
caccacuucucuccaccuuccc

SEQ ID NO: 491936 - RNA, 23 nt, Human
caccacuucucuccaccuuccca

SEQ ID NO: 491937 - RNA, 23 nt, Human
caccacuucucuccaccuuccca

SEQ ID NO: 491938 - RNA, 23 nt, Human
cagaauucccagcaucagaccau

SEQ ID NO: 491939 - RNA, 19 nt, Human
cagccaaaaguuauucagg

SEQ ID NO: 491940 - RNA, 25 nt, Human
caggagccucuggcacauaaggucc

SEQ ID NO: 491941 - RNA, 23 nt, Human
ccacuucucuccaccuucccaac

SEQ ID NO: 491942 - RNA, 19 nt, Human
ccccaccacuucucuccac

SEQ ID NO: 491943 - RNA, 21 nt, Human
ccccaccacuucucuccaccu

SEQ ID NO: 491944 - RNA, 24 nt, Human
ccccccaccacuucucuccaccuu

SEQ ID NO: 491945 - RNA, 22 nt, Human
cccccccaccacuucucuccac

SEQ ID NO: 491946 - RNA, 24 nt, Human
cucauaggcaccaucuucccugaa

SEQ ID NO: 491947 - RNA, 19 nt, Human
cuucccaacuuuaccgaug

SEQ ID NO: 491948 - RNA, 21 nt, Human
cuuuaacaaauuuuggugaag

SEQ ID NO: 491949 - RNA, 22 nt, Human
gacuaaaaugcaacaaaaaaua

SEQ ID NO: 491950 - RNA, 24 nt, Human
gacuuugcucagaaacuuuugagu

SEQ ID NO: 491951 - RNA, 22 nt, Human
gagccucuggcacauaaggucc

SEQ ID NO: 491952 - RNA, 18 nt, Human
gcccccccaccacuucuc

SEQ ID NO: 491953 - RNA, 21 nt, Human
ggaaaaucaguaucauaagag

SEQ ID NO: 491954 - RNA, 23 nt, Human
gguuuaauccugcugaauaaagu

SEQ ID NO: 491955 - RNA, 20 nt, Human
gucuugucuaucaugaucuc

SEQ ID NO: 491956 - RNA, 23 nt, Human
guuccauucaugagcuuccucca

SEQ ID NO: 491957 - RNA, 25 nt, Human
uaaaacaucaacugcucauuuugua

SEQ ID NO: 491958 - RNA, 28 nt, Human
uaaaauaaagaaauaacuucccaaagug

SEQ ID NO: 491959 - RNA, 24 nt, Human
uaacaaaaacugaaguagaaacug

SEQ ID NO: 491960 - RNA, 18 nt, Human
uaagguccacaagggcag

SEQ ID NO: 491961 - RNA, 21 nt, Human
uaccuagaacacugugaaauc

SEQ ID NO: 491962 - RNA, 20 nt, Human
uagcaaugcccccccaccac

SEQ ID NO: 491963 - RNA, 24 nt, Human
uagcacaacagccaaaaguuauuc

SEQ ID NO: 491964 - RNA, 23 nt, Human
uaucauaagagucgcacaucuca

SEQ ID NO: 491965 - RNA, 24 nt, Human
uaucaugaucucacauuaaaucug

SEQ ID NO: 491966 - RNA, 22 nt, Human
uaugaccuauauccuggggugc

SEQ ID NO: 491967 - RNA, 25 nt, Human
uaugguggucaggagccucuggcac

SEQ ID NO: 491968 - RNA, 22 nt, Human
ucaacugcucauuuuguaauga

SEQ ID NO: 491969 - RNA, 26 nt, Human
ucagaccaugcauauagaagcacuuu

SEQ ID NO: 491970 - RNA, 21 nt, Human
ucagagcaaaugguacugaag

SEQ ID NO: 491971 - RNA, 20 nt, Human
uccaccuucccaacuuuacc

SEQ ID NO: 491972 - RNA, 22 nt, Human
ucccaaagugucuacuuugaag

SEQ ID NO: 491973 - RNA, 20 nt, Human
ucccugaagaaaaaaucauc

SEQ ID NO: 491974 - RNA, 20 nt, Human
uccuuuguccacugcuccau

SEQ ID NO: 491975 - RNA, 21 nt, Human
ucucaaguuuugguuucaaau

SEQ ID NO: 491976 - RNA, 20 nt, Human
ugaagaaagugaauauaaug

SEQ ID NO: 491977 - RNA, 22 nt, Human
ugaagaaagugaauauaaugac

SEQ ID NO: 491978 - RNA, 18 nt, Human
ugacuuugcucagaaacu

SEQ ID NO: 491979 - RNA, 23 nt, Human
ugagagaacagagcagagcagau

SEQ ID NO: 491980 - RNA, 24 nt, Human
ugauaaguagcaaugccccccucu

SEQ ID NO: 491981 - RNA, 19 nt, Human
ugauugucuuaaugccaca

SEQ ID NO: 491982 - RNA, 19 nt, Human
ugccuaauuucuugcacuc

SEQ ID NO: 491983 - RNA, 18 nt, Human
uguguucucaaguuuugg

SEQ ID NO: 491984 - RNA, 24 nt, Human
uguuuuguucacugaugauuccca

SEQ ID NO: 491985 - RNA, 18 nt, Human
uuacucaaaucugcagaa

SEQ ID NO: 491986 - RNA, 22 nt, Human
uucacagaacauuagaaagaag

SEQ ID NO: 491987 - RNA, 19 nt, Human
uuccaugaaggcagggauu

SEQ ID NO: 491988 - RNA, 22 nt, Human
uuggguguguucucaaguuuug

SEQ ID NO: 491989 - RNA, 24 nt, Human
uuggguguguucucaaguuuuggu

SEQ ID NO: 491990 - RNA, 22 nt, Human
aacacaacugucggaauaaacu

SEQ ID NO: 491991 - RNA, 24 nt, Human
aggaagagcucccccugcauuggg

SEQ ID NO: 491992 - RNA, 18 nt, Human
cagcggcccuuccucucu

SEQ ID NO: 491993 - RNA, 21 nt, Human
ccagacaguucccaggaguga

SEQ ID NO: 491994 - RNA, 24 nt, Human
ccaggagugaggcuggucuuuccu

SEQ ID NO: 491995 - RNA, 21 nt, Human
cccuugguccaggaagagcuc

SEQ ID NO: 491996 - RNA, 20 nt, Human
cuuucugaaggccgggcagu

SEQ ID NO: 491997 - RNA, 25 nt, Human
cuuuuuauucuaacagcacuggggg

SEQ ID NO: 491998 - RNA, 22 nt, Human
gcagugcacagcggcccuuccu

SEQ ID NO: 491999 - RNA, 23 nt, Human
ggccgggcagugcacagcggccc

SEQ ID NO: 492000 - RNA, 20 nt, Human
ggggggcccagccuaccugc

SEQ ID NO: 492001 - RNA, 21 nt, Human
ucccuugguccaggaagagcu

SEQ ID NO: 492002 - RNA, 20 nt, Human
ugaggcuggucuuuccuggc

SEQ ID NO: 492003 - RNA, 22 nt, Human
ugccagacaguucccaggagug

SEQ ID NO: 492004 - RNA, 22 nt, Human
uggcacaacacaacugucggaa

SEQ ID NO: 492005 - RNA, 19 nt, Human
ugggugaaugagcggcucc

SEQ ID NO: 492006 - RNA, 22 nt, Human
uguugggugaaugagcggcucc

SEQ ID NO: 492007 - RNA, 24 nt, Human
uugggugaaugagcggcuccuccc

SEQ ID NO: 492008 - RNA, 20 nt, Human
aaccuggccagagucagcgg

SEQ ID NO: 492009 - RNA, 22 nt, Human
agaagccuuuauugugggagga

SEQ ID NO: 492010 - RNA, 18 nt, Human
aggggccuuugaggaaga

SEQ ID NO: 492011 - RNA, 18 nt, Human
agugagacagggagugag

SEQ ID NO: 492012 - RNA, 21 nt, Human
cuuugaggaagaggaguccug

SEQ ID NO: 492013 - RNA, 26 nt, Human
gaugcaguuccccuuccucccuccag

SEQ ID NO: 492014 - RNA, 18 nt, Human
gcacgggaaccuggccag

SEQ ID NO: 492015 - RNA, 19 nt, Human
ggggccuuugaggaagagg

SEQ ID NO: 492016 - RNA, 22 nt, Human
gggggaggggccuuugaggaag

SEQ ID NO: 492017 - RNA, 23 nt, Human
gucuccgugggggagugagacag

SEQ ID NO: 492018 - RNA, 18 nt, Human
gugguccuugggaccccc

SEQ ID NO: 492019 - RNA, 20 nt, Human
uauugugggaggaucggggu

SEQ ID NO: 492020 - RNA, 20 nt, Human
uggaaggcuggggggaggga

SEQ ID NO: 492021 - RNA, 23 nt, Human
ugggaggaucgggguguccuagg

SEQ ID NO: 492022 - RNA, 18 nt, Human
ugugggaggaucggggug

SEQ ID NO: 492023 - RNA, 19 nt, Human
uguuggacgcggcacggga

SEQ ID NO: 492024 - RNA, 18 nt, Human
uuccccuuccucccucca

SEQ ID NO: 492025 - RNA, 19 nt, Human
uugaggaagaggaguccuc

SEQ ID NO: 492026 - RNA, 20 nt, Human
aacccggccggagucagcgg

SEQ ID NO: 492027 - RNA, 22 nt, Human
agaagccuuuauugugggagga

SEQ ID NO: 492028 - RNA, 18 nt, Human
aggaagaggaggccugga

SEQ ID NO: 492029 - RNA, 23 nt, Human
aggggccuuugaggaagaggagg

SEQ ID NO: 492030 - RNA, 18 nt, Human
agugagacagggagugag

SEQ ID NO: 492031 - RNA, 19 nt, Human
cgggaugggcuuggaaggc

SEQ ID NO: 492032 - RNA, 21 nt, Human
cuccgugggggagugagacag

SEQ ID NO: 492033 - RNA, 21 nt, Human
cuuugaggaagaggaggccug

SEQ ID NO: 492034 - RNA, 25 nt, Human
gagggccccgggagucgggaugggc

SEQ ID NO: 492035 - RNA, 18 nt, Human
gcacgggaacccggccgg

SEQ ID NO: 492036 - RNA, 20 nt, Human
gccuuugaggaagaggaggc

SEQ ID NO: 492037 - RNA, 26 nt, Human
gcuggggggaggggccuuugaggaag

SEQ ID NO: 492038 - RNA, 19 nt, Human
ggggccuuugaggaagagg

SEQ ID NO: 492039 - RNA, 18 nt, Human
gugguccuugggaccccc

SEQ ID NO: 492040 - RNA, 20 nt, Human
uauugugggaggaucggggu

SEQ ID NO: 492041 - RNA, 18 nt, Human
uccccuuccucccuccag

SEQ ID NO: 492042 - RNA, 19 nt, Human
ugagggccccgggagucgg

SEQ ID NO: 492043 - RNA, 20 nt, Human
uggaaggcuggggggaggga

SEQ ID NO: 492044 - RNA, 21 nt, Human
ugggcuuggaaggcugggggg

SEQ ID NO: 492045 - RNA, 18 nt, Human
ugugggaggaucggggug

SEQ ID NO: 492046 - RNA, 19 nt, Human
uguuggacgcggcacggga

SEQ ID NO: 492047 - RNA, 18 nt, Human
uuccccuuccucccucca

SEQ ID NO: 492048 - RNA, 22 nt, Human
aagagguagacaaggccagggg

SEQ ID NO: 492049 - RNA, 23 nt, Human
accucgggguugugggggcggca

SEQ ID NO: 492050 - RNA, 23 nt, Human
aggagguuguaggaugcuggggu

SEQ ID NO: 492051 - RNA, 24 nt, Human
agggaguaggguguaggaaggccu

SEQ ID NO: 492052 - RNA, 18 nt, Human
aucucagagacucagucg

SEQ ID NO: 492053 - RNA, 21 nt, Human
cagcggagcgccccagcccuc

SEQ ID NO: 492054 - RNA, 20 nt, Human
ccccagcccucuccucucac

SEQ ID NO: 492055 - RNA, 22 nt, Human
ccuauggugggguccugggagc

SEQ ID NO: 492056 - RNA, 22 nt, Human
ccucgggguugugggggcggca

SEQ ID NO: 492057 - RNA, 23 nt, Human
cggcaaggccaccaggagguugu

SEQ ID NO: 492058 - RNA, 24 nt, Human
cucgacacuaacccuucggggggc

SEQ ID NO: 492059 - RNA, 19 nt, Human
cugccucguguaccuggcu

SEQ ID NO: 492060 - RNA, 19 nt, Human
gacccgagcaaagugcugg

SEQ ID NO: 492061 - RNA, 22 nt, Human
gagcucgacacuaacccuucgg

SEQ ID NO: 492062 - RNA, 23 nt, Human
gaggcggagaccacggugaagug

SEQ ID NO: 492063 - RNA, 23 nt, Human
gcggagcgccccagcccucuccu

SEQ ID NO: 492064 - RNA, 24 nt, Human
ggcaagagguagacaaggccaggg

SEQ ID NO: 492065 - RNA, 19 nt, Human
uccugggagccaggaggag

SEQ ID NO: 492066 - RNA, 20 nt, Human
uccugggagccaggaggagg

SEQ ID NO: 492067 - RNA, 20 nt, Human
uccugggagccaggaggagg

SEQ ID NO: 492068 - RNA, 18 nt, Human
ucucacugguccagcgcc

SEQ ID NO: 492069 - RNA, 24 nt, Human
ugccuauggugggguccugggagc

SEQ ID NO: 492070 - RNA, 22 nt, Human
ugccucguguaccuggcuuuau

SEQ ID NO: 492071 - RNA, 21 nt, Human
uggcuuuauaccucgggguug

SEQ ID NO: 492072 - RNA, 21 nt, Human
ugggagccaggaggaggccgu

SEQ ID NO: 492073 - RNA, 21 nt, Human
ugggguccugggagccaggag

SEQ ID NO: 492074 - RNA, 22 nt, Human
uggugggguccugggagccagg

SEQ ID NO: 492075 - RNA, 19 nt, Human
accccaguccucuccccuc

SEQ ID NO: 492076 - RNA, 18 nt, Human
aggccagggaggcacagg

SEQ ID NO: 492077 - RNA, 27 nt, Human
cagcggagcaccccaguccucuccccu

SEQ ID NO: 492078 - RNA, 18 nt, Human
caguccucuccccucagu

SEQ ID NO: 492079 - RNA, 20 nt, Human
ccuaugguggggucuuggga

SEQ ID NO: 492080 - RNA, 21 nt, Human
ccucugagacucagucgucga

SEQ ID NO: 492081 - RNA, 23 nt, Human
cggugaagugaccucugagacuc

SEQ ID NO: 492082 - RNA, 22 nt, Human
gagaaguagacaaggccaggga

SEQ ID NO: 492083 - RNA, 23 nt, Human
gaggcggagaccacggugaagug

SEQ ID NO: 492084 - RNA, 20 nt, Human
ggugcguccccugccuggug

SEQ ID NO: 492085 - RNA, 20 nt, Human
uaggaugcuggagugagcug

SEQ ID NO: 492086 - RNA, 24 nt, Human
ugccuaugguggggucuugggaac

SEQ ID NO: 492087 - RNA, 21 nt, Human
ugguggggucuugggaaccag

SEQ ID NO: 492088 - RNA, 22 nt, Human
aagagguagacaaggccagggg

SEQ ID NO: 492089 - RNA, 23 nt, Human
accucgggguugugggggcggca

SEQ ID NO: 492090 - RNA, 24 nt, Human
agggaguaggguguaggaaggccu

SEQ ID NO: 492091 - RNA, 21 nt, Human
cagcggagcgccccagcccuc

SEQ ID NO: 492092 - RNA, 20 nt, Human
ccccagcccucuccucucac

SEQ ID NO: 492093 - RNA, 22 nt, Human
ccuauggugggguccugggagc

SEQ ID NO: 492094 - RNA, 22 nt, Human
ccucgggguugugggggcggca

SEQ ID NO: 492095 - RNA, 23 nt, Human
cggcaaggccaccaggagguugu

SEQ ID NO: 492096 - RNA, 24 nt, Human
cucgacacuaacccuucggggggc

SEQ ID NO: 492097 - RNA, 19 nt, Human
cugccucguguaccuggcu

SEQ ID NO: 492098 - RNA, 22 nt, Human
gagcucgacacuaacccuucgg

SEQ ID NO: 492099 - RNA, 23 nt, Human
gaggcggagaccacggugaagug

SEQ ID NO: 492100 - RNA, 23 nt, Human
gcggagcgccccagcccucuccu

SEQ ID NO: 492101 - RNA, 24 nt, Human
ggcaagagguagacaaggccaggg

SEQ ID NO: 492102 - RNA, 23 nt, Human
ggguccugggagccaggaggagg

SEQ ID NO: 492103 - RNA, 19 nt, Human
uccugggagccaggaggag

SEQ ID NO: 492104 - RNA, 20 nt, Human
uccugggagccaggaggagg

SEQ ID NO: 492105 - RNA, 18 nt, Human
ucucacugguccagcgcc

SEQ ID NO: 492106 - RNA, 20 nt, Human
ugaccucagagacucagucg

SEQ ID NO: 492107 - RNA, 24 nt, Human
ugccuauggugggguccugggagc

SEQ ID NO: 492108 - RNA, 19 nt, Human
uggcuuuaaaccucggggu

SEQ ID NO: 492109 - RNA, 21 nt, Human
ugggagccaggaggaggccgu

SEQ ID NO: 492110 - RNA, 21 nt, Human
ugggguccugggagccaggag

SEQ ID NO: 492111 - RNA, 22 nt, Human
uggugggguccugggagccagg

SEQ ID NO: 492112 - RNA, 22 nt, Human
uguaggaugcuggagugagcuc

SEQ ID NO: 492113 - RNA, 26 nt, Human
aaaacccagggagaggaggcaaggau

SEQ ID NO: 492114 - RNA, 20 nt, Human
aagggguccgggccaggagg

SEQ ID NO: 492115 - RNA, 24 nt, Human
aaugcaggguuuaagggguccggg

SEQ ID NO: 492116 - RNA, 22 nt, Human
accaguagguggccggccuaga

SEQ ID NO: 492117 - RNA, 21 nt, Human
acucccucacgacccccgcca

SEQ ID NO: 492118 - RNA, 25 nt, Human
aggcagaugggcggucaaccggugg

SEQ ID NO: 492119 - RNA, 22 nt, Human
aggcagcguacuccuauugcgc

SEQ ID NO: 492120 - RNA, 21 nt, Human
cagcgacccgcgaaccugcac

SEQ ID NO: 492121 - RNA, 18 nt, Human
cccaagaccccucaggcg

SEQ ID NO: 492122 - RNA, 22 nt, Human
cccccaagaccccucaggcgcc

SEQ ID NO: 492123 - RNA, 22 nt, Human
cccccgccagcgacccgcgaac

SEQ ID NO: 492124 - RNA, 22 nt, Human
ccgcagccccaccaggcacuga

SEQ ID NO: 492125 - RNA, 19 nt, Human
ccgcucccggcgcacuccc

SEQ ID NO: 492126 - RNA, 22 nt, Human
ccuagagcccccaagaccccuc

SEQ ID NO: 492127 - RNA, 27 nt, Human
ccugcacagaccacucggcggcguccc

SEQ ID NO: 492128 - RNA, 23 nt, Human
cgccucccaggcagcguacuccu

SEQ ID NO: 492129 - RNA, 20 nt, Human
cggacacacgggcaccgggc

SEQ ID NO: 492130 - RNA, 19 nt, Human
cuggaaugcaggguuuaag

SEQ ID NO: 492131 - RNA, 18 nt, Human
gagcccccaagaccccuc

SEQ ID NO: 492132 - RNA, 24 nt, Human
gaguggaggaacggacacacgggc

SEQ ID NO: 492133 - RNA, 24 nt, Human
gccccaugcgucgucuccgcugca

SEQ ID NO: 492134 - RNA, 19 nt, Human
gccuagagcccccaagacc

SEQ ID NO: 492135 - RNA, 18 nt, Human
ggagaggaggcaaggaug

SEQ ID NO: 492136 - RNA, 23 nt, Human
uaacaaaacccagggagaggagg

SEQ ID NO: 492137 - RNA, 22 nt, Human
uagagcccccaagaccccucag

SEQ ID NO: 492138 - RNA, 20 nt, Human
ucccaggcagcguacuccua

SEQ ID NO: 492139 - RNA, 19 nt, Human
uccgcagccccaccaggca

SEQ ID NO: 492140 - RNA, 25 nt, Human
ugaacaugucgacggggacaguccc

SEQ ID NO: 492141 - RNA, 22 nt, Human
aaaaccugccagaauuucuaga

SEQ ID NO: 492142 - RNA, 24 nt, Human
aaaaggaagaaagaggagcaaggg

SEQ ID NO: 492143 - RNA, 18 nt, Human
aaaaugccaaucuugaaa

SEQ ID NO: 492144 - RNA, 22 nt, Human
aaacagagaucauuuccugaac

SEQ ID NO: 492145 - RNA, 23 nt, Human
aaacagagaucauuuccugaaca

SEQ ID NO: 492146 - RNA, 21 nt, Human
aacaggauggaaaacauuucu

SEQ ID NO: 492147 - RNA, 18 nt, Human
aaccacacaaucaacaca

SEQ ID NO: 492148 - RNA, 23 nt, Human
aacgagagcacuacucuaggcau

SEQ ID NO: 492149 - RNA, 20 nt, Human
aagaaaaggaagaaagagga

SEQ ID NO: 492150 - RNA, 18 nt, Human
aagaaagaggagcaaggg

SEQ ID NO: 492151 - RNA, 21 nt, Human
aagaagaaagccaacaaagaa

SEQ ID NO: 492152 - RNA, 22 nt, Human
aagcucuaguccaaguuuccag

SEQ ID NO: 492153 - RNA, 26 nt, Human
aauaaauacaaaaaugaaccacacaa

SEQ ID NO: 492154 - RNA, 21 nt, Human
aaucaugguuucagggauuug

SEQ ID NO: 492155 - RNA, 28 nt, Human
aaucucugaagucaaauggccaguuuga

SEQ ID NO: 492156 - RNA, 19 nt, Human
acaauccauguuaaaaacc

SEQ ID NO: 492157 - RNA, 23 nt, Human
acagaaucaagaagaaagccaac

SEQ ID NO: 492158 - RNA, 19 nt, Human
acagaauggacuaugcccc

SEQ ID NO: 492159 - RNA, 19 nt, Human
accacacaaucaacacaua

SEQ ID NO: 492160 - RNA, 19 nt, Human
accacacaaucaacacaua

SEQ ID NO: 492161 - RNA, 24 nt, Human
accacagagagcccuuacaaagac

SEQ ID NO: 492162 - RNA, 20 nt, Human
accccggagaugccuucaaa

SEQ ID NO: 492163 - RNA, 22 nt, Human
agagcgaaaccagagacgcauc

SEQ ID NO: 492164 - RNA, 22 nt, Human
aggaggaggauccgucgcugcc

SEQ ID NO: 492165 - RNA, 22 nt, Human
aucaagaagaaagccaacaaag

SEQ ID NO: 492166 - RNA, 21 nt, Human
aucacacuaacacuauauagu

SEQ ID NO: 492167 - RNA, 21 nt, Human
auggcaacaggguaaaaaagc

SEQ ID NO: 492168 - RNA, 20 nt, Human
augguugccugcaaauucuu

SEQ ID NO: 492169 - RNA, 23 nt, Human
auuaaacaugguugccugcaaau

SEQ ID NO: 492170 - RNA, 24 nt, Human
caaagcagcauaugccucuuagac

SEQ ID NO: 492171 - RNA, 19 nt, Human
caccuuguaagaaaugauu

SEQ ID NO: 492172 - RNA, 18 nt, Human
caguucgagcaggcuaaa

SEQ ID NO: 492173 - RNA, 22 nt, Human
ccaaguaauuaaguaaucucac

SEQ ID NO: 492174 - RNA, 24 nt, Human
ccacagagagcccuuacaaagacu

SEQ ID NO: 492175 - RNA, 20 nt, Human
cccccacagaaucaagaaga

SEQ ID NO: 492176 - RNA, 24 nt, Human
ccgucgcugccgccgucgccgccg

SEQ ID NO: 492177 - RNA, 22 nt, Human
cgaaaccagagacgcaucaaau

SEQ ID NO: 492178 - RNA, 19 nt, Human
cuaaaacaaucauucugcu

SEQ ID NO: 492179 - RNA, 25 nt, Human
cuacaccuccaaagcagcauaugcc

SEQ ID NO: 492180 - RNA, 26 nt, Human
cuagacuauucaccuagauaaacuca

SEQ ID NO: 492181 - RNA, 20 nt, Human
cucuauaauaaagagaaaac

SEQ ID NO: 492182 - RNA, 27 nt, Human
cugcaaaauuccccuuggccaguaacu

SEQ ID NO: 492183 - RNA, 22 nt, Human
cugcuggucuccucauacaugu

SEQ ID NO: 492184 - RNA, 24 nt, Human
cuuauaaaauagaaaaaagcugcu

SEQ ID NO: 492185 - RNA, 22 nt, Human
cuucagggaacaaaaguuccau

SEQ ID NO: 492186 - RNA, 18 nt, Human
cuucuaaaaucuaccauc

SEQ ID NO: 492187 - RNA, 24 nt, Human
cuuuuuuucacuuuggcuuuuucu

SEQ ID NO: 492188 - RNA, 18 nt, Human
gaaaagaaaaggaagaaa

SEQ ID NO: 492189 - RNA, 26 nt, Human
gaaaggaaaagaaaaggaagaaagag

SEQ ID NO: 492190 - RNA, 21 nt, Human
gaacaguuugaaucacaugga

SEQ ID NO: 492191 - RNA, 22 nt, Human
gacgaggcccggccggaaagga

SEQ ID NO: 492192 - RNA, 22 nt, Human
gagcaggcuaaaacaaucauuc

SEQ ID NO: 492193 - RNA, 18 nt, Human
gagcccuuacaaagacua

SEQ ID NO: 492194 - RNA, 22 nt, Human
gaggagcaagggaauaagggag

SEQ ID NO: 492195 - RNA, 24 nt, Human
gcuacaaaauacaacaauaagccu

SEQ ID NO: 492196 - RNA, 18 nt, Human
ggaaaggaaaagaaaagg

SEQ ID NO: 492197 - RNA, 22 nt, Human
ggaggacauacuaucaauacuu

SEQ ID NO: 492198 - RNA, 23 nt, Human
ggaucgaggccgccguuagggaa

SEQ ID NO: 492199 - RNA, 23 nt, Human
ggccggaaaggaaaagaaaagga

SEQ ID NO: 492200 - RNA, 21 nt, Human
guggggaaauaguuucugggc

SEQ ID NO: 492201 - RNA, 22 nt, Human
uaacaccaagacauagaaaaaa

SEQ ID NO: 492202 - RNA, 21 nt, Human
uaacuagcuucagggaacaaa

SEQ ID NO: 492203 - RNA, 21 nt, Human
uaacuggaaauagcauuuuuu

SEQ ID NO: 492204 - RNA, 26 nt, Human
uacaaaauacaacaauaagccuuuaa

SEQ ID NO: 492205 - RNA, 22 nt, Human
uacacccccacagaaucaagaa

SEQ ID NO: 492206 - RNA, 24 nt, Human
uacuuagcagggaauggucuccag

SEQ ID NO: 492207 - RNA, 19 nt, Human
uagcagggaauggucucca

SEQ ID NO: 492208 - RNA, 24 nt, Human
uagcagggaauggucuccagagcc

SEQ ID NO: 492209 - RNA, 18 nt, Human
uagcuucuaaaaucuacc

SEQ ID NO: 492210 - RNA, 19 nt, Human
uaguaagagacuaaaaucc

SEQ ID NO: 492211 - RNA, 20 nt, Human
uaguuucugggcuugcaccc

SEQ ID NO: 492212 - RNA, 26 nt, Human
uauacacauugcaaaacuauucugcg

SEQ ID NO: 492213 - RNA, 23 nt, Human
uauuagugcaaauuaauacccaa

SEQ ID NO: 492214 - RNA, 22 nt, Human
ucaaaucaguaguaacuacuaa

SEQ ID NO: 492215 - RNA, 20 nt, Human
ucaaauggccaguuugacaa

SEQ ID NO: 492216 - RNA, 23 nt, Human
ucacuacaccuccaaaggggccc

SEQ ID NO: 492217 - RNA, 20 nt, Human
ucauuuaacgguagcuggag

SEQ ID NO: 492218 - RNA, 21 nt, Human
uccauaaucaaugaagaaaca

SEQ ID NO: 492219 - RNA, 21 nt, Human
uccccacaacaggauggaaaa

SEQ ID NO: 492220 - RNA, 19 nt, Human
uccgucgcugccgccgucg

SEQ ID NO: 492221 - RNA, 21 nt, Human
ucgcugccgccgucgccgccg

SEQ ID NO: 492222 - RNA, 21 nt, Human
ucuaguccaaguuuccagcug

SEQ ID NO: 492223 - RNA, 24 nt, Human
ucuaugauaguguggguggagaua

SEQ ID NO: 492224 - RNA, 19 nt, Human
ucugcuagggaucugaaga

SEQ ID NO: 492225 - RNA, 20 nt, Human
ucugggcuugcacccgauuu

SEQ ID NO: 492226 - RNA, 24 nt, Human
ucugucagccaaaaaaagauuacu

SEQ ID NO: 492227 - RNA, 23 nt, Human
ugaaccacacaaucaacacauaa

SEQ ID NO: 492228 - RNA, 24 nt, Human
ugaagaaacauuaauaccaaaucc

SEQ ID NO: 492229 - RNA, 18 nt, Human
ugauacuuagcagggaau

SEQ ID NO: 492230 - RNA, 22 nt, Human
ugaucacaauggugguaaccuc

SEQ ID NO: 492231 - RNA, 19 nt, Human
ugaucugucagccaaaaaa

SEQ ID NO: 492232 - RNA, 22 nt, Human
ugauuguguaucuuuuuguauu

SEQ ID NO: 492233 - RNA, 24 nt, Human
ugcuacaaaauacaacaauaagcc

SEQ ID NO: 492234 - RNA, 25 nt, Human
ugcuauaaaacucaauuauuccuag

SEQ ID NO: 492235 - RNA, 23 nt, Human
uggcauugacguugaaagauuuu

SEQ ID NO: 492236 - RNA, 18 nt, Human
ugggccaucuaaaguuuu

SEQ ID NO: 492237 - RNA, 24 nt, Human
uggucuccagagcgaaaccagaga

SEQ ID NO: 492238 - RNA, 20 nt, Human
uggugccaggaagucaugcc

SEQ ID NO: 492239 - RNA, 18 nt, Human
ugguugccugcaaauucu

SEQ ID NO: 492240 - RNA, 20 nt, Human
uguaccaccagaggcaaagc

SEQ ID NO: 492241 - RNA, 21 nt, Human
uguuauacacccccacagaau

SEQ ID NO: 492242 - RNA, 21 nt, Human
uuaauaccaaauccccacaac

SEQ ID NO: 492243 - RNA, 21 nt, Human
uucagcuuggagaucuugcca

SEQ ID NO: 492244 - RNA, 18 nt, Human
uuccacuaucccuuccuu

SEQ ID NO: 492245 - RNA, 24 nt, Human
uucuuccaugcacaaacauuucag

SEQ ID NO: 492246 - RNA, 24 nt, Human
uugcacccgauuuucccuguggug

SEQ ID NO: 492247 - RNA, 23 nt, Human
uuguuaugaaucaaaugaacaug

SEQ ID NO: 492248 - RNA, 21 nt, Human
uuucuagaggaaguaaacgca

SEQ ID NO: 492249 - RNA, 21 nt, Human
uuucugggcuugcacccgauu

SEQ ID NO: 492250 - RNA, 18 nt, Human
uuugcuuuauaccauugg

SEQ ID NO: 492251 - RNA, 18 nt, Human
uuuguauucugaaaauag

SEQ ID NO: 492252 - RNA, 18 nt, Human
aacauuuucacuucugcc

SEQ ID NO: 492253 - RNA, 23 nt, Human
aaccaagaaaaauacgaagcuuc

SEQ ID NO: 492254 - RNA, 22 nt, Human
aaccaguauaaguagagacgca

SEQ ID NO: 492255 - RNA, 23 nt, Human
aagaggacaagaugggaaggaca

SEQ ID NO: 492256 - RNA, 24 nt, Human
aagcaaaccaguauaaguagagac

SEQ ID NO: 492257 - RNA, 22 nt, Human
acgacaaacgcacgcauggacc

SEQ ID NO: 492258 - RNA, 25 nt, Human
acucccuccacugagaaaaagacaa

SEQ ID NO: 492259 - RNA, 18 nt, Human
agacaaaccaacccaagu

SEQ ID NO: 492260 - RNA, 23 nt, Human
agacaaaccaacccaagugguac

SEQ ID NO: 492261 - RNA, 18 nt, Human
agacagaguaaaugcucu

SEQ ID NO: 492262 - RNA, 19 nt, Human
agagccccucacacuuuuc

SEQ ID NO: 492263 - RNA, 18 nt, Human
aggaagcaaagacaaacc

SEQ ID NO: 492264 - RNA, 23 nt, Human
aggaagcaaagacaaaccaaccc

SEQ ID NO: 492265 - RNA, 21 nt, Human
caaacaaacacuagagacuuu

SEQ ID NO: 492266 - RNA, 24 nt, Human
caaacaaacacuagagacuuuagu

SEQ ID NO: 492267 - RNA, 25 nt, Human
caccaaggaaagcugucaaauaaug

SEQ ID NO: 492268 - RNA, 18 nt, Human
caccacacgcaggcuccg

SEQ ID NO: 492269 - RNA, 22 nt, Human
caccacacgcaggcuccgggac

SEQ ID NO: 492270 - RNA, 20 nt, Human
cacgcuugcccccuccuccg

SEQ ID NO: 492271 - RNA, 28 nt, Human
cacuucugccaccacccuuuaugcaguc

SEQ ID NO: 492272 - RNA, 23 nt, Human
cagaguaaaugcucucucaaauc

SEQ ID NO: 492273 - RNA, 18 nt, Human
cagcagggaacuccacuc

SEQ ID NO: 492274 - RNA, 21 nt, Human
cagguccauacacucccucca

SEQ ID NO: 492275 - RNA, 19 nt, Human
ccaacccaagugguacuga

SEQ ID NO: 492276 - RNA, 20 nt, Human
ccacggaaaaacagccacau

SEQ ID NO: 492277 - RNA, 19 nt, Human
ccacugagaaaaagacaaa

SEQ ID NO: 492278 - RNA, 22 nt, Human
ccagguccauacacucccucca

SEQ ID NO: 492279 - RNA, 23 nt, Human
ccagguccauacacucccuccac

SEQ ID NO: 492280 - RNA, 24 nt, Human
ccauuucagcagcaguuucaucca

SEQ ID NO: 492281 - RNA, 18 nt, Human
cccacuccaaaccccagg

SEQ ID NO: 492282 - RNA, 23 nt, Human
cccuccacugagaaaaagacaaa

SEQ ID NO: 492283 - RNA, 22 nt, Human
ccgcgccugcuguuccuucccc

SEQ ID NO: 492284 - RNA, 22 nt, Human
cuccaaaccccaggaaugaccc

SEQ ID NO: 492285 - RNA, 22 nt, Human
cucccuccacugagaaaaagac

SEQ ID NO: 492286 - RNA, 20 nt, Human
cuguuccuuccccacgugaa

SEQ ID NO: 492287 - RNA, 23 nt, Human
cuuacacgacaaacgcacgcaug

SEQ ID NO: 492288 - RNA, 21 nt, Human
gaaaaagacaaauggcuuagg

SEQ ID NO: 492289 - RNA, 19 nt, Human
gacauuuuuauuuucccua

SEQ ID NO: 492290 - RNA, 18 nt, Human
gaggacaagaugggaagg

SEQ ID NO: 492291 - RNA, 20 nt, Human
gaggggcuugcacacacuug

SEQ ID NO: 492292 - RNA, 19 nt, Human
gauguuuccagccaaguga

SEQ ID NO: 492293 - RNA, 22 nt, Human
gcaaagacaaaccaacccaagu

SEQ ID NO: 492294 - RNA, 18 nt, Human
gcagugugugcuaggggc

SEQ ID NO: 492295 - RNA, 23 nt, Human
ggaagcaaagacaaaccaaccca

SEQ ID NO: 492296 - RNA, 21 nt, Human
ggaggucacauguagcugagu

SEQ ID NO: 492297 - RNA, 18 nt, Human
ggcaaccucaccaagcug

SEQ ID NO: 492298 - RNA, 24 nt, Human
ggucuuuuggcaucuugcucugcu

SEQ ID NO: 492299 - RNA, 23 nt, Human
guacugugcguuguauuucuuca

SEQ ID NO: 492300 - RNA, 24 nt, Human
gugaaaccaagaaaaauacgaagc

SEQ ID NO: 492301 - RNA, 19 nt, Human
uaaaugagacagugcaugu

SEQ ID NO: 492302 - RNA, 22 nt, Human
uauagaacuaauagaggaauaa

SEQ ID NO: 492303 - RNA, 19 nt, Human
uaugcagucuggcacauag

SEQ ID NO: 492304 - RNA, 19 nt, Human
ucaaggacgugguguagga

SEQ ID NO: 492305 - RNA, 22 nt, Human
ucagcagcaguuucauccacag

SEQ ID NO: 492306 - RNA, 19 nt, Human
uccacugagaaaaagacaa

SEQ ID NO: 492307 - RNA, 23 nt, Human
uccccacgugaagagccccucac

SEQ ID NO: 492308 - RNA, 19 nt, Human
uccuaaaaauuggaaccau

SEQ ID NO: 492309 - RNA, 23 nt, Human
ucuucauucucuggcaggcuggg

SEQ ID NO: 492310 - RNA, 26 nt, Human
ugaaaccaagaaaaauacgaagcuuc

SEQ ID NO: 492311 - RNA, 20 nt, Human
ugagaaaaagacaaauggcu

SEQ ID NO: 492312 - RNA, 21 nt, Human
ugagcaaacaaacacuagaga

SEQ ID NO: 492313 - RNA, 18 nt, Human
ugaggagcuugcccacca

SEQ ID NO: 492314 - RNA, 20 nt, Human
ugaggggcuugcacacacuu

SEQ ID NO: 492315 - RNA, 24 nt, Human
ugccaccacccuuuaugcagucug

SEQ ID NO: 492316 - RNA, 21 nt, Human
uggcaggcugggaguccaagg

SEQ ID NO: 492317 - RNA, 20 nt, Human
uggggccagguccauacacu

SEQ ID NO: 492318 - RNA, 24 nt, Human
uggguaagcagauuccuaaaaauu

SEQ ID NO: 492319 - RNA, 21 nt, Human
uggucuuuuggcaucuugcuc

SEQ ID NO: 492320 - RNA, 24 nt, Human
ugucuugaguucugaggggcuugc

SEQ ID NO: 492321 - RNA, 22 nt, Human
uguuaaggcaugcagugugugc

SEQ ID NO: 492322 - RNA, 19 nt, Human
uuaaguauccuuuaucuca

SEQ ID NO: 492323 - RNA, 18 nt, Human
uuagaagaaugccuggaa

SEQ ID NO: 492324 - RNA, 21 nt, Human
uucccccacuccaaaccccag

SEQ ID NO: 492325 - RNA, 20 nt, Human
uugauguuuccagccaagug

SEQ ID NO: 492326 - RNA, 19 nt, Human
uuucaagacuccccuauuc

SEQ ID NO: 492327 - RNA, 23 nt, Human
uuuucacuucugccaccacccuu

SEQ ID NO: 492328 - RNA, 23 nt, Human
aaaagcaacacaggaccaaaagc

SEQ ID NO: 492329 - RNA, 23 nt, Human
aaaggcugaaaugcuuuguaaag

SEQ ID NO: 492330 - RNA, 22 nt, Human
aacacaggaccaaaagcaucca

SEQ ID NO: 492331 - RNA, 24 nt, Human
aacuucugagagaagagcugaaaa

SEQ ID NO: 492332 - RNA, 22 nt, Human
aagcccaaguuuaaaaaccaua

SEQ ID NO: 492333 - RNA, 19 nt, Human
aaggauaguuuguguccac

SEQ ID NO: 492334 - RNA, 22 nt, Human
aaggauaguuuguguccaccaa

SEQ ID NO: 492335 - RNA, 21 nt, Human
aaguagauuuuuguuuucagu

SEQ ID NO: 492336 - RNA, 25 nt, Human
aauuagccaauuuuaccgucauuua

SEQ ID NO: 492337 - RNA, 23 nt, Human
acaagccaugcuaacacugagcc

SEQ ID NO: 492338 - RNA, 22 nt, Human
acacaggaccaaaagcauccaa

SEQ ID NO: 492339 - RNA, 21 nt, Human
acaggaccaaaagcauccaac

SEQ ID NO: 492340 - RNA, 21 nt, Human
acauagcugcagacagacucu

SEQ ID NO: 492341 - RNA, 18 nt, Human
acuaggaaucugcauaua

SEQ ID NO: 492342 - RNA, 18 nt, Human
acuccuaacauuuuccuu

SEQ ID NO: 492343 - RNA, 22 nt, Human
acucugcugccucaagauguaa

SEQ ID NO: 492344 - RNA, 23 nt, Human
agacaaaauauacuuuauuguga

SEQ ID NO: 492345 - RNA, 21 nt, Human
agagaagagcugaaaaaaaug

SEQ ID NO: 492346 - RNA, 21 nt, Human
agcacaagccaugcuaacacu

SEQ ID NO: 492347 - RNA, 25 nt, Human
agcugaacuucugagagaagagcug

SEQ ID NO: 492348 - RNA, 23 nt, Human
agugaaggagaccugggaaaaga

SEQ ID NO: 492349 - RNA, 22 nt, Human
aguucuaaaaacccugagcggc

SEQ ID NO: 492350 - RNA, 19 nt, Human
auaagagaucuaggccuuu

SEQ ID NO: 492351 - RNA, 24 nt, Human
auuguguaaugucauaaauuuggg

SEQ ID NO: 492352 - RNA, 23 nt, Human
caacacaggaccaaaagcauccc

SEQ ID NO: 492353 - RNA, 22 nt, Human
cacaggaccaaaagcauccaac

SEQ ID NO: 492354 - RNA, 26 nt, Human
cauaaaacacacuuuuucacucuaac

SEQ ID NO: 492355 - RNA, 23 nt, Human
cauccaacuauuacuuuauuuau

SEQ ID NO: 492356 - RNA, 24 nt, Human
ccagcaguucugucccaucucaga

SEQ ID NO: 492357 - RNA, 26 nt, Human
cccaaguuuaaaaaccauacuccuaa

SEQ ID NO: 492358 - RNA, 23 nt, Human
ccccucggccacccgagucucca

SEQ ID NO: 492359 - RNA, 23 nt, Human
cccucggccacccgagucuccag

SEQ ID NO: 492360 - RNA, 21 nt, Human
cgacagaaauauuucacuaau

SEQ ID NO: 492361 - RNA, 18 nt, Human
cggguuucaacaguaugc

SEQ ID NO: 492362 - RNA, 22 nt, Human
cuaaccaacagcccaguggcaa

SEQ ID NO: 492363 - RNA, 23 nt, Human
cuaaccaacagcccaguggcaaa

SEQ ID NO: 492364 - RNA, 18 nt, Human
cuccaacaagaauauggc

SEQ ID NO: 492365 - RNA, 19 nt, Human
cuugucgcucuucagcugg

SEQ ID NO: 492366 - RNA, 23 nt, Human
gagagaagagcugaaaaaaaugc

SEQ ID NO: 492367 - RNA, 23 nt, Human
gaggaacuuaacuguacucagaa

SEQ ID NO: 492368 - RNA, 24 nt, Human
ggcaaauuuccuuucuagacaaag

SEQ ID NO: 492369 - RNA, 22 nt, Human
ggcaugcuacuaggaaucugca

SEQ ID NO: 492370 - RNA, 20 nt, Human
guaaagcaguauuuuuagac

SEQ ID NO: 492371 - RNA, 24 nt, Human
guugcuucauuucccccuuuucua

SEQ ID NO: 492372 - RNA, 20 nt, Human
uaaaaaccauacuccuaaca

SEQ ID NO: 492373 - RNA, 19 nt, Human
uaaaagcaacacaggacca

SEQ ID NO: 492374 - RNA, 25 nt, Human
uaaaagcaacacaggaccaaaagca

SEQ ID NO: 492375 - RNA, 22 nt, Human
uaacuaggaauggugacaucuu

SEQ ID NO: 492376 - RNA, 19 nt, Human
uaggaggaacuuaacugua

SEQ ID NO: 492377 - RNA, 19 nt, Human
uauggcugaaguucuaaaa

SEQ ID NO: 492378 - RNA, 26 nt, Human
ucaaaaaaucaaugcaaaacugaggg

SEQ ID NO: 492379 - RNA, 23 nt, Human
ucaauuuaguuuaagagaugaaa

SEQ ID NO: 492380 - RNA, 19 nt, Human
ucagugaaggagaccuggg

SEQ ID NO: 492381 - RNA, 22 nt, Human
uccaacaagaauauggcacacc

SEQ ID NO: 492382 - RNA, 21 nt, Human
uccaccagaagcaaauacuag

SEQ ID NO: 492383 - RNA, 23 nt, Human
ucccuuuguaugugaggguacaa

SEQ ID NO: 492384 - RNA, 22 nt, Human
uccgcaguucauuaauccgacu

SEQ ID NO: 492385 - RNA, 19 nt, Human
ucuaaaaacccugagcggc

SEQ ID NO: 492386 - RNA, 22 nt, Human
ucucuucucugaagcuagcaaa

SEQ ID NO: 492387 - RNA, 18 nt, Human
ucuuugggccaagacuga

SEQ ID NO: 492388 - RNA, 23 nt, Human
ugaaauaacuggguuuaaaaaaa

SEQ ID NO: 492389 - RNA, 22 nt, Human
ugaaugcacauugacauucugu

SEQ ID NO: 492390 - RNA, 24 nt, Human
ugagagaagagcugaaaaaaaugc

SEQ ID NO: 492391 - RNA, 20 nt, Human
ugauggaaacuauuaggcuc

SEQ ID NO: 492392 - RNA, 23 nt, Human
ugcaguaucauaccuacuuaauc

SEQ ID NO: 492393 - RNA, 24 nt, Human
ugcauaauauucucucuacacacu

SEQ ID NO: 492394 - RNA, 21 nt, Human
ugcaugaaugcacauugacau

SEQ ID NO: 492395 - RNA, 23 nt, Human
ugccucaagauguaaacauaggg

SEQ ID NO: 492396 - RNA, 23 nt, Human
ugcuaacacugagccuuuagcgc

SEQ ID NO: 492397 - RNA, 23 nt, Human
uggaaaauacaaaauuuaaaaaa

SEQ ID NO: 492398 - RNA, 21 nt, Human
ugggccaagacugacaaggaa

SEQ ID NO: 492399 - RNA, 24 nt, Human
ugguaugaagccccucggccaccu

SEQ ID NO: 492400 - RNA, 23 nt, Human
uguaaugucauaaauuuggggcu

SEQ ID NO: 492401 - RNA, 19 nt, Human
uguaugugaggguacaaag

SEQ ID NO: 492402 - RNA, 26 nt, Human
uuaacggcaucugcauaauauucucu

SEQ ID NO: 492403 - RNA, 18 nt, Human
uucaacuguuuucuaaau

SEQ ID NO: 492404 - RNA, 20 nt, Human
uuuaagagaugaaaaaaaac

SEQ ID NO: 492405 - RNA, 22 nt, Human
uuuaguuuaagagaugaaaaaa

SEQ ID NO: 492406 - RNA, 19 nt, Human
aaacuuuacacauggccuc

SEQ ID NO: 492407 - RNA, 21 nt, Human
aaauguaaaguauccaccuug

SEQ ID NO: 492408 - RNA, 24 nt, Human
aaccucaaaucuuacucccaguac

SEQ ID NO: 492409 - RNA, 23 nt, Human
acaaccaaacauauaaccuucuu

SEQ ID NO: 492410 - RNA, 21 nt, Human
acgaauugcgccgcgcucccc

SEQ ID NO: 492411 - RNA, 23 nt, Human
acgaauugcgccgcgcuccccgc

SEQ ID NO: 492412 - RNA, 19 nt, Human
agaugccgggaggccgccc

SEQ ID NO: 492413 - RNA, 21 nt, Human
aggcaggaaaacgaugaucau

SEQ ID NO: 492414 - RNA, 19 nt, Human
auaaaacccaaacugacua

SEQ ID NO: 492415 - RNA, 23 nt, Human
cacaaaaagacucacuaacuuca

SEQ ID NO: 492416 - RNA, 19 nt, Human
cauaauaaugguuuaagga

SEQ ID NO: 492417 - RNA, 19 nt, Human
cccagccgcuccccuuccu

SEQ ID NO: 492418 - RNA, 20 nt, Human
ccccccgcgggccgacgaau

SEQ ID NO: 492419 - RNA, 21 nt, Human
ccgcgggccgacgaauugcgc

SEQ ID NO: 492420 - RNA, 23 nt, Human
ccucacguuacauauaugaagcc

SEQ ID NO: 492421 - RNA, 18 nt, Human
cgacgaggggaagcggcg

SEQ ID NO: 492422 - RNA, 18 nt, Human
cgccgcgcuccccgcggg

SEQ ID NO: 492423 - RNA, 20 nt, Human
cgccgcgcuccccgcgggcc

SEQ ID NO: 492424 - RNA, 23 nt, Human
cgccgcgcuccccgcgggccuca

SEQ ID NO: 492425 - RNA, 18 nt, Human
cugucacagagaggaaau

SEQ ID NO: 492426 - RNA, 20 nt, Human
cuuaagcauuauguugagug

SEQ ID NO: 492427 - RNA, 23 nt, Human
gaaacacaacagagaggggaggc

SEQ ID NO: 492428 - RNA, 25 nt, Human
gaaggacaauuuuaauuucgucuuc

SEQ ID NO: 492429 - RNA, 22 nt, Human
gcgccgcgcuccccgcgggccu

SEQ ID NO: 492430 - RNA, 27 nt, Human
gcuaaaaugucuuuuccccccgaaaca

SEQ ID NO: 492431 - RNA, 18 nt, Human
gguucugucacagagagg

SEQ ID NO: 492432 - RNA, 18 nt, Human
uaaaacccaaacugacua

SEQ ID NO: 492433 - RNA, 21 nt, Human
uaaaacccaaacugacuaaau

SEQ ID NO: 492434 - RNA, 22 nt, Human
uaacacaaaaagacucacuaac

SEQ ID NO: 492435 - RNA, 22 nt, Human
uaacaugaaauuaaaucaguaa

SEQ ID NO: 492436 - RNA, 25 nt, Human
uaacaugaaauuaaaucaguaacuu

SEQ ID NO: 492437 - RNA, 26 nt, Human
uaacaugaaauuaaaucaguaacuuu

SEQ ID NO: 492438 - RNA, 18 nt, Human
uacacauggccucaaaac

SEQ ID NO: 492439 - RNA, 19 nt, Human
uauuuuggaguaacacaaa

SEQ ID NO: 492440 - RNA, 19 nt, Human
ucaagccgggcggacgagc

SEQ ID NO: 492441 - RNA, 22 nt, Human
ucgccgcgaagaugccgggagg

SEQ ID NO: 492442 - RNA, 19 nt, Human
ugaguggucaucuaaaaaa

SEQ ID NO: 492443 - RNA, 19 nt, Human
ugauaaaacccaaacugac

SEQ ID NO: 492444 - RNA, 20 nt, Human
ugcugauuccagcuuuaaaa

SEQ ID NO: 492445 - RNA, 18 nt, Human
uguguacauaacaauaug

SEQ ID NO: 492446 - RNA, 22 nt, Human
uguguugguucauaucaaaucc

SEQ ID NO: 492447 - RNA, 24 nt, Human
uugcgccgcgcuccccgcgggccu

SEQ ID NO: 492448 - RNA, 20 nt, Human
uuucaacuacaaaccgugaa

SEQ ID NO: 492449 - RNA, 20 nt, Human
agcggcagccagggugggca

SEQ ID NO: 492450 - RNA, 21 nt, Human
ccagcucagucuuccaagggc

SEQ ID NO: 492451 - RNA, 21 nt, Human
ccagggugggcaguggguacc

SEQ ID NO: 492452 - RNA, 25 nt, Human
gacuguacagccuugcugugggggg

SEQ ID NO: 492453 - RNA, 23 nt, Human
gcuggcuuggggcugguucugcu

SEQ ID NO: 492454 - RNA, 21 nt, Human
gggcaggguucccucccgggg

SEQ ID NO: 492455 - RNA, 23 nt, Human
gggcaguggguaccagcacugcc

SEQ ID NO: 492456 - RNA, 18 nt, Human
ucccggggcccuguuggg

SEQ ID NO: 492457 - RNA, 20 nt, Human
uggccaagccagcggauggc

SEQ ID NO: 492458 - RNA, 23 nt, Human
uggcugugggggucccagcucag

SEQ ID NO: 492459 - RNA, 19 nt, Human
uggcuuggggcugguucug

SEQ ID NO: 492460 - RNA, 18 nt, Human
uggguaccagcacugcca

SEQ ID NO: 492461 - RNA, 19 nt, Human
ugugggggguugggggcag

SEQ ID NO: 492462 - RNA, 24 nt, Human
uguugggguucccgccccgggggg

SEQ ID NO: 492463 - RNA, 19 nt, Human
uugggggcaggguucccuc

SEQ ID NO: 492464 - RNA, 19 nt, Human
aaccucugccucuggcuuc

SEQ ID NO: 492465 - RNA, 24 nt, Human
aacuccagcucuccauucuaacac

SEQ ID NO: 492466 - RNA, 24 nt, Human
acccaggcuggaguucaguggcgu

SEQ ID NO: 492467 - RNA, 18 nt, Human
acucugucacccaggcug

SEQ ID NO: 492468 - RNA, 25 nt, Human
acucugucacccaggcuggaguuca

SEQ ID NO: 492469 - RNA, 21 nt, Human
agcccucuccaggccuuguau

SEQ ID NO: 492470 - RNA, 18 nt, Human
aguagcugggauuacagg

SEQ ID NO: 492471 - RNA, 20 nt, Human
aguucaguggcgugaucccg

SEQ ID NO: 492472 - RNA, 24 nt, Human
aguucaguggcgugaucccggcuc

SEQ ID NO: 492473 - RNA, 23 nt, Human
caagaaacaaaguguagaaaugc

SEQ ID NO: 492474 - RNA, 20 nt, Human
caagguaggaauggggugca

SEQ ID NO: 492475 - RNA, 19 nt, Human
cacacagcacuauucugaa

SEQ ID NO: 492476 - RNA, 24 nt, Human
caccuuuguuguacugggcucagg

SEQ ID NO: 492477 - RNA, 22 nt, Human
cacucugucacccaggcuggag

SEQ ID NO: 492478 - RNA, 23 nt, Human
cacucugucacccaggcuggagu

SEQ ID NO: 492479 - RNA, 23 nt, Human
cagcacuauucugaacgaacucc

SEQ ID NO: 492480 - RNA, 20 nt, Human
cagucuccugaguagcuggg

SEQ ID NO: 492481 - RNA, 24 nt, Human
cauugcaaccucugccucuggcuu

SEQ ID NO: 492482 - RNA, 21 nt, Human
ccagcgaauucccaggugggg

SEQ ID NO: 492483 - RNA, 21 nt, Human
cccccagucucaaguggugcu

SEQ ID NO: 492484 - RNA, 23 nt, Human
ccugaguagcugggauuacaggc

SEQ ID NO: 492485 - RNA, 23 nt, Human
ccugaguagcugggauuacaggc

SEQ ID NO: 492486 - RNA, 20 nt, Human
cuauucugaacgaacuccag

SEQ ID NO: 492487 - RNA, 24 nt, Human
cucacucugucacccaggcuggag

SEQ ID NO: 492488 - RNA, 23 nt, Human
cucagucuccugaguagcuggga

SEQ ID NO: 492489 - RNA, 23 nt, Human
cucauugcaaccucugccucugg

SEQ ID NO: 492490 - RNA, 22 nt, Human
cucccugagggcccccaacagc

SEQ ID NO: 492491 - RNA, 22 nt, Human
cugaguagcugggauuacaggc

SEQ ID NO: 492492 - RNA, 20 nt, Human
cugcagugcuccaucucugg

SEQ ID NO: 492493 - RNA, 23 nt, Human
cuggcuucaagcaauucucugcc

SEQ ID NO: 492494 - RNA, 20 nt, Human
gaaaaugcauuaauugggag

SEQ ID NO: 492495 - RNA, 25 nt, Human
gaguagcugggauuacaggcgccca

SEQ ID NO: 492496 - RNA, 24 nt, Human
gccucagucuccugaguagcuggg

SEQ ID NO: 492497 - RNA, 20 nt, Human
gcuucaagcaauucucugcc

SEQ ID NO: 492498 - RNA, 23 nt, Human
gcuucaagcaauucucugccuca

SEQ ID NO: 492499 - RNA, 21 nt, Human
ggagacaagagucucacucug

SEQ ID NO: 492500 - RNA, 22 nt, Human
ggcuggaguucaguggcgugau

SEQ ID NO: 492501 - RNA, 24 nt, Human
ggcuucaagcaauucucugccuca

SEQ ID NO: 492502 - RNA, 18 nt, Human
guagcugggauuacaggc

SEQ ID NO: 492503 - RNA, 18 nt, Human
uacuccaugcugccccca

SEQ ID NO: 492504 - RNA, 19 nt, Human
uagaaaugcuauacacaau

SEQ ID NO: 492505 - RNA, 20 nt, Human
uagaaaugcuauacacaaug

SEQ ID NO: 492506 - RNA, 22 nt, Human
uauaaguugcagggugcaccgu

SEQ ID NO: 492507 - RNA, 26 nt, Human
uaucaguaggaaaugaaaaugcauua

SEQ ID NO: 492508 - RNA, 26 nt, Human
ucaccagguguggggaggggcuugag

SEQ ID NO: 492509 - RNA, 24 nt, Human
ucacucugucacccaggcuggagu

SEQ ID NO: 492510 - RNA, 23 nt, Human
ucagguauaaguugcagggugca

SEQ ID NO: 492511 - RNA, 23 nt, Human
ucagucuccugaguagcugggau

SEQ ID NO: 492512 - RNA, 22 nt, Human
ucauugcaaccucugccucugg

SEQ ID NO: 492513 - RNA, 23 nt, Human
ucccugagggcccccaacagccc

SEQ ID NO: 492514 - RNA, 24 nt, Human
uccugaguagcugggauuacaggc

SEQ ID NO: 492515 - RNA, 23 nt, Human
ucucacucugucacccaggcugg

SEQ ID NO: 492516 - RNA, 24 nt, Human
ucucacucugucacccaggcugga

SEQ ID NO: 492517 - RNA, 26 nt, Human
ucucacucugucacccaggcuggagu

SEQ ID NO: 492518 - RNA, 27 nt, Human
ucucacucugucacccaggcuggaguu

SEQ ID NO: 492519 - RNA, 24 nt, Human
ucugccucagucuccugaguagcu

SEQ ID NO: 492520 - RNA, 23 nt, Human
ucugccucuggcuucaagcaauu

SEQ ID NO: 492521 - RNA, 18 nt, Human
ucugucacccaggcugga

SEQ ID NO: 492522 - RNA, 18 nt, Human
ugcaaccucugccucugg

SEQ ID NO: 492523 - RNA, 22 nt, Human
ugccaaggaccaagaaacaaag

SEQ ID NO: 492524 - RNA, 26 nt, Human
ugccaaggaccaagaaacaaagugua

SEQ ID NO: 492525 - RNA, 22 nt, Human
ugcccccagucucaaguggugc

SEQ ID NO: 492526 - RNA, 20 nt, Human
ugccucagucuccugaguaa

SEQ ID NO: 492527 - RNA, 23 nt, Human
ugccucagucuccugaguagcug

SEQ ID NO: 492528 - RNA, 24 nt, Human
ugccucagucuccugaguagcugg

SEQ ID NO: 492529 - RNA, 22 nt, Human
ugccucuggcuucaagcaauuc

SEQ ID NO: 492530 - RNA, 19 nt, Human
uggaguucaguggcgugau

SEQ ID NO: 492531 - RNA, 24 nt, Human
uggaguucaguggcgugaucccgg

SEQ ID NO: 492532 - RNA, 23 nt, Human
uggcuucaagcaauucucugccu

SEQ ID NO: 492533 - RNA, 19 nt, Human
ugggauuacaggcgcccac

SEQ ID NO: 492534 - RNA, 21 nt, Human
ugggauuacaggcgcccacug

SEQ ID NO: 492535 - RNA, 24 nt, Human
ugggauuacaggcgcccacugcca

SEQ ID NO: 492536 - RNA, 22 nt, Human
uugcaaccucugccucuggcuu

SEQ ID NO: 492537 - RNA, 23 nt, Human
uugcaaccucugccucuggcuuc

SEQ ID NO: 492538 - RNA, 18 nt, Human
uugccuucaccaaggcag

SEQ ID NO: 492539 - RNA, 28 nt, Human
uuuuuuuuuuuuuuuuuuuuuuuggggg

SEQ ID NO: 492540 - RNA, 20 nt, Human
cagccgcugccucgcagagc

SEQ ID NO: 492541 - RNA, 20 nt, Human
cccacaggguccgcagucaa

SEQ ID NO: 492542 - RNA, 19 nt, Human
cucgcagagcugcccgggc

SEQ ID NO: 492543 - RNA, 21 nt, Human
gggcagaaggcggguccgcgg

SEQ ID NO: 492544 - RNA, 24 nt, Human
uccgcagucaaagaaucgcugaac

SEQ ID NO: 492545 - RNA, 23 nt, Human
ugagggcagaaggcggguccgcg

SEQ ID NO: 492546 - RNA, 24 nt, Human
ugagggcagaaggcggguccgcgg

SEQ ID NO: 492547 - RNA, 19 nt, Human
ugcugagggcagaaggcgg

SEQ ID NO: 492548 - RNA, 18 nt, Human
aaaacccugauacaaagc

SEQ ID NO: 492549 - RNA, 18 nt, Human
aaaagaucaggguugaag

SEQ ID NO: 492550 - RNA, 18 nt, Human
aaaaucccagggaggcag

SEQ ID NO: 492551 - RNA, 21 nt, Human
aaagcaguggccagagaggcc

SEQ ID NO: 492552 - RNA, 20 nt, Human
aaccagaagagagggaaacc

SEQ ID NO: 492553 - RNA, 23 nt, Human
aaccuaggagcaggacacuaaga

SEQ ID NO: 492554 - RNA, 22 nt, Human
aagagaagacuggaagacaaaa

SEQ ID NO: 492555 - RNA, 24 nt, Human
aagcggaagcucucccuggcggca

SEQ ID NO: 492556 - RNA, 23 nt, Human
acccagcgaggcagacaggaucu

SEQ ID NO: 492557 - RNA, 18 nt, Human
accccauaagcucccacc

SEQ ID NO: 492558 - RNA, 21 nt, Human
agcagcucccaccugaaccca

SEQ ID NO: 492559 - RNA, 22 nt, Human
agcuuugcuccuccagguucuc

SEQ ID NO: 492560 - RNA, 23 nt, Human
aggcagacaggaucugaaucaag

SEQ ID NO: 492561 - RNA, 20 nt, Human
aucaagcuuugcuccuccag

SEQ ID NO: 492562 - RNA, 22 nt, Human
aucacacaggcccaugccaaca

SEQ ID NO: 492563 - RNA, 19 nt, Human
caaagcaguggccagagag

SEQ ID NO: 492564 - RNA, 21 nt, Human
caacauuuccuuucuccucuc

SEQ ID NO: 492565 - RNA, 23 nt, Human
caacugaaacuguuuauugaaac

SEQ ID NO: 492566 - RNA, 24 nt, Human
caccccacuucccuuaucucccac

SEQ ID NO: 492567 - RNA, 20 nt, Human
caccccauaagcucccaccc

SEQ ID NO: 492568 - RNA, 21 nt, Human
caccccauaagcucccaccca

SEQ ID NO: 492569 - RNA, 18 nt, Human
cagccagccacugcgauc

SEQ ID NO: 492570 - RNA, 21 nt, Human
caggacacuaagagaagacug

SEQ ID NO: 492571 - RNA, 23 nt, Human
caguccuucugccccaccacccc

SEQ ID NO: 492572 - RNA, 25 nt, Human
caucacuguccuggccaagcagcca

SEQ ID NO: 492573 - RNA, 20 nt, Human
ccaccccauaagcucccacc

SEQ ID NO: 492574 - RNA, 23 nt, Human
ccaccugaacccaucaguccccg

SEQ ID NO: 492575 - RNA, 21 nt, Human
ccacugcgaucuaggagugaa

SEQ ID NO: 492576 - RNA, 20 nt, Human
ccagaagagagggaaaccua

SEQ ID NO: 492577 - RNA, 19 nt, Human
ccagagaggccugggaaga

SEQ ID NO: 492578 - RNA, 23 nt, Human
ccagcagcucccaccugaaccca

SEQ ID NO: 492579 - RNA, 25 nt, Human
ccaucugggacaugucccuggucac

SEQ ID NO: 492580 - RNA, 18 nt, Human
cccaccuauacucuucca

SEQ ID NO: 492581 - RNA, 20 nt, Human
cccagcagcucccaccugaa

SEQ ID NO: 492582 - RNA, 21 nt, Human
cccauaagcucccacccagga

SEQ ID NO: 492583 - RNA, 23 nt, Human
ccccaccaccccauaagcuccca

SEQ ID NO: 492584 - RNA, 21 nt, Human
ccccauaagcucccacccagg

SEQ ID NO: 492585 - RNA, 21 nt, Human
ccucucaccccacuucccuua

SEQ ID NO: 492586 - RNA, 20 nt, Human
ccuucugccccaccacccug

SEQ ID NO: 492587 - RNA, 23 nt, Human
cgaggcagacaggaucugaauca

SEQ ID NO: 492588 - RNA, 20 nt, Human
cgcgccgccagucgccgccc

SEQ ID NO: 492589 - RNA, 21 nt, Human
cgcgccgccagucgccgcccu

SEQ ID NO: 492590 - RNA, 19 nt, Human
cggaaggaaacgaguugua

SEQ ID NO: 492591 - RNA, 21 nt, Human
cggcaucacuguccuggccaa

SEQ ID NO: 492592 - RNA, 21 nt, Human
cuagggaaaucaaaaguaaaa

SEQ ID NO: 492593 - RNA, 23 nt, Human
cucagaaacucccaaacccucuu

SEQ ID NO: 492594 - RNA, 27 nt, Human
cuggucaccaagcggaagcucucccug

SEQ ID NO: 492595 - RNA, 21 nt, Human
gaaaaacccugauacaaagca

SEQ ID NO: 492596 - RNA, 22 nt, Human
gaauaccugggagaagaaccag

SEQ ID NO: 492597 - RNA, 18 nt, Human
gcaguggccagagaggcc

SEQ ID NO: 492598 - RNA, 19 nt, Human
gcccgccuguccaccugcc

SEQ ID NO: 492599 - RNA, 22 nt, Human
ggaucugaaucaagcuuugcuc

SEQ ID NO: 492600 - RNA, 23 nt, Human
ggggaccugccaaggacccagcg

SEQ ID NO: 492601 - RNA, 20 nt, Human
uaagagaagacuggaagaca

SEQ ID NO: 492602 - RNA, 21 nt, Human
uaaggaaugggagugaaaagg

SEQ ID NO: 492603 - RNA, 20 nt, Human
uacaaaagcgugaaaaaccc

SEQ ID NO: 492604 - RNA, 20 nt, Human
uacaaagcaguggccagaga

SEQ ID NO: 492605 - RNA, 23 nt, Human
uaggagcaggacacuaagagaag

SEQ ID NO: 492606 - RNA, 26 nt, Human
ucacccagcagcucccaccugaaccc

SEQ ID NO: 492607 - RNA, 19 nt, Human
uccauuagacuaaagcuaa

SEQ ID NO: 492608 - RNA, 23 nt, Human
ucccugccucacccagcagcucc

SEQ ID NO: 492609 - RNA, 22 nt, Human
ucccuggucaccaagcggaagc

SEQ ID NO: 492610 - RNA, 20 nt, Human
ucccuuaucucccaccuaua

SEQ ID NO: 492611 - RNA, 22 nt, Human
ucgcggagcuguccuugcccgc

SEQ ID NO: 492612 - RNA, 22 nt, Human
ucuacaaaagcgugaaaaaccc

SEQ ID NO: 492613 - RNA, 18 nt, Human
ugccaaggacccagcgag

SEQ ID NO: 492614 - RNA, 22 nt, Human
ugccagccugccuccccggggc

SEQ ID NO: 492615 - RNA, 18 nt, Human
ugccucacccagcagcuc

SEQ ID NO: 492616 - RNA, 18 nt, Human
ugggaagagaauaccugg

SEQ ID NO: 492617 - RNA, 21 nt, Human
uuaaugcauuccucacagccc

SEQ ID NO: 492618 - RNA, 22 nt, Human
uucccugccucacccagcagcu

SEQ ID NO: 492619 - RNA, 23 nt, Human
uucccugccucacccagcagcuc

SEQ ID NO: 492620 - RNA, 19 nt, Human
uugcccgccuguccaccug

SEQ ID NO: 492621 - RNA, 20 nt, Human
uuuccuuucuccucucaccc

SEQ ID NO: 492622 - RNA, 18 nt, Human
aaaacauaugaugaccuu

SEQ ID NO: 492623 - RNA, 25 nt, Human
aaaagguggaagccuuaaggccaga

SEQ ID NO: 492624 - RNA, 24 nt, Human
aaacaucugaaaguagggagaaga

SEQ ID NO: 492625 - RNA, 18 nt, Human
aacaggagcaauuagaaa

SEQ ID NO: 492626 - RNA, 22 nt, Human
aaucucagagguugcuucuuuc

SEQ ID NO: 492627 - RNA, 19 nt, Human
acaauucugagucugguac

SEQ ID NO: 492628 - RNA, 23 nt, Human
acagcaugucacaauacggcacu

SEQ ID NO: 492629 - RNA, 21 nt, Human
acauucaccaucaugggaaac

SEQ ID NO: 492630 - RNA, 21 nt, Human
accacuggaaucucagagguu

SEQ ID NO: 492631 - RNA, 23 nt, Human
acccacagacagccugacccagg

SEQ ID NO: 492632 - RNA, 22 nt, Human
acugugccucuacucaaaucac

SEQ ID NO: 492633 - RNA, 19 nt, Human
agagacaagugagacucaa

SEQ ID NO: 492634 - RNA, 21 nt, Human
agcaagcaaugaaaaggugga

SEQ ID NO: 492635 - RNA, 19 nt, Human
aggguuucuucucuuuccu

SEQ ID NO: 492636 - RNA, 23 nt, Human
aucaucuuuucuaacaaacuggc

SEQ ID NO: 492637 - RNA, 21 nt, Human
cacaauucugagucugguacu

SEQ ID NO: 492638 - RNA, 22 nt, Human
cagaaaaacaggagcaauuaga

SEQ ID NO: 492639 - RNA, 22 nt, Human
cagaagcuaugaauuccccaag

SEQ ID NO: 492640 - RNA, 21 nt, Human
cagcaagcaaugaaaaggugg

SEQ ID NO: 492641 - RNA, 26 nt, Human
caggccccgcugcccggccgcugcga

SEQ ID NO: 492642 - RNA, 25 nt, Human
cagucccccccagaaaauuaaucac

SEQ ID NO: 492643 - RNA, 21 nt, Human
ccaaccacuucauacccacag

SEQ ID NO: 492644 - RNA, 21 nt, Human
cccacacaccacuggaaucuc

SEQ ID NO: 492645 - RNA, 18 nt, Human
ccccagaaaauuaaucac

SEQ ID NO: 492646 - RNA, 22 nt, Human
cccccacacaccacuggaaucu

SEQ ID NO: 492647 - RNA, 23 nt, Human
ccccccagaaaauuaaucaccaa

SEQ ID NO: 492648 - RNA, 19 nt, Human
cccgcugcccggccgcugc

SEQ ID NO: 492649 - RNA, 18 nt, Human
ccgccgggccccgcgucc

SEQ ID NO: 492650 - RNA, 20 nt, Human
ccgccgggccccgcgucccc

SEQ ID NO: 492651 - RNA, 19 nt, Human
ccgcgccgccgggccccgc

SEQ ID NO: 492652 - RNA, 18 nt, Human
ccgcugcccggccgcugc

SEQ ID NO: 492653 - RNA, 23 nt, Human
ccucggggcgcgucccaggcccc

SEQ ID NO: 492654 - RNA, 20 nt, Human
ccugcgccgccccgcuccuc

SEQ ID NO: 492655 - RNA, 21 nt, Human
ccuugaagugcagccaaagcu

SEQ ID NO: 492656 - RNA, 21 nt, Human
cggccgcugcgaugcggggcc

SEQ ID NO: 492657 - RNA, 22 nt, Human
cgggccccgcgucccagucccc

SEQ ID NO: 492658 - RNA, 20 nt, Human
cgucccaggccccgcugccc

SEQ ID NO: 492659 - RNA, 22 nt, Human
cuagagccuugaagugcagcca

SEQ ID NO: 492660 - RNA, 22 nt, Human
cugcugaacugagucaguucgu

SEQ ID NO: 492661 - RNA, 19 nt, Human
cuggacauuaacgaaaaag

SEQ ID NO: 492662 - RNA, 25 nt, Human
cuuuccuuucucuuuguuuagucuu

SEQ ID NO: 492663 - RNA, 21 nt, Human
gaaucgccaagucaaaacuuu

SEQ ID NO: 492664 - RNA, 26 nt, Human
gaaucgccaagucaaaacuuucuaac

SEQ ID NO: 492665 - RNA, 18 nt, Human
gaaucucagagguugcuu

SEQ ID NO: 492666 - RNA, 21 nt, Human
gaucuugcccccacacaccac

SEQ ID NO: 492667 - RNA, 20 nt, Human
gcagccaaagcucacaaguc

SEQ ID NO: 492668 - RNA, 23 nt, Human
gguugcuucuuucuccuuuccau

SEQ ID NO: 492669 - RNA, 19 nt, Human
gucaaaacuuucuaacuuc

SEQ ID NO: 492670 - RNA, 24 nt, Human
guugcuucuuucuccuuuccaucu

SEQ ID NO: 492671 - RNA, 23 nt, Human
uaaaacuacugaagcacacuuua

SEQ ID NO: 492672 - RNA, 23 nt, Human
uaaagcaaauugugugaaaauac

SEQ ID NO: 492673 - RNA, 20 nt, Human
uaacucuuguuguucacucu

SEQ ID NO: 492674 - RNA, 18 nt, Human
uaaggccagaagcuauga

SEQ ID NO: 492675 - RNA, 21 nt, Human
uacccagaaaaacaggagcaa

SEQ ID NO: 492676 - RNA, 22 nt, Human
uacuuucuggaguagccaauac

SEQ ID NO: 492677 - RNA, 22 nt, Human
uauccaguuaccaagguauuca

SEQ ID NO: 492678 - RNA, 23 nt, Human
ucaccaaaaauaauccucgugcc

SEQ ID NO: 492679 - RNA, 19 nt, Human
ucccaaccacuucauaccc

SEQ ID NO: 492680 - RNA, 23 nt, Human
ucccccccagaaaauuaaucacc

SEQ ID NO: 492681 - RNA, 20 nt, Human
uccuuucucuuuguuuaguc

SEQ ID NO: 492682 - RNA, 22 nt, Human
ucgccaagucaaaacuuucuaa

SEQ ID NO: 492683 - RNA, 18 nt, Human
ucggggcgcgucccaggc

SEQ ID NO: 492684 - RNA, 21 nt, Human
ucucucagagacaagugagac

SEQ ID NO: 492685 - RNA, 21 nt, Human
ucugguacugguggucugcug

SEQ ID NO: 492686 - RNA, 20 nt, Human
ucuucucuuuccuuucucuu

SEQ ID NO: 492687 - RNA, 19 nt, Human
ucuuucuccuuuccaucuu

SEQ ID NO: 492688 - RNA, 25 nt, Human
ugaaaagguggaagccuuaaggcca

SEQ ID NO: 492689 - RNA, 18 nt, Human
ugaaaguagggagaagaa

SEQ ID NO: 492690 - RNA, 22 nt, Human
ugaaguuagagaugggauacag

SEQ ID NO: 492691 - RNA, 22 nt, Human
ugcagccaaagcucacaagucc

SEQ ID NO: 492692 - RNA, 26 nt, Human
uggaagagagcacccaguguugggcu

SEQ ID NO: 492693 - RNA, 25 nt, Human
uuagagaauacuuucaauguucucu

SEQ ID NO: 492694 - RNA, 24 nt, Human
uucaaaaugcuccucuaucacaau

SEQ ID NO: 492695 - RNA, 21 nt, Human
uucaguuuccaucagaucuug

SEQ ID NO: 492696 - RNA, 22 nt, Human
uucucccaaccacuucauaccc

SEQ ID NO: 492697 - RNA, 18 nt, Human
uuggaacauaugaugaag

SEQ ID NO: 492698 - RNA, 24 nt, Human
uuuguuuagucuucguucucuuuu

SEQ ID NO: 492699 - RNA, 20 nt, Human
uuuuuuuuuuuuuuuuuugg

SEQ ID NO: 492700 - RNA, 21 nt, Human
uuuuuuuuuuuuuuuuuuguc

SEQ ID NO: 492701 - RNA, 18 nt, Human
acaaaccggaaaaccaug

SEQ ID NO: 492702 - RNA, 19 nt, Human
aguuacuagaaaacgacaa

SEQ ID NO: 492703 - RNA, 24 nt, Human
auuuggaguaauggaauuugaagu

SEQ ID NO: 492704 - RNA, 19 nt, Human
ccucugccgccacucgugc

SEQ ID NO: 492705 - RNA, 21 nt, Human
gccucugccgccacucgugcc

SEQ ID NO: 492706 - RNA, 22 nt, Human
uagaaagacauuaaaugucaga

SEQ ID NO: 492707 - RNA, 20 nt, Human
ucaguggagaacgccggauc

SEQ ID NO: 492708 - RNA, 24 nt, Human
uugauacagaaugacaaggcuuau

SEQ ID NO: 492709 - RNA, 20 nt, Human
aaagaggaaccacgaaggug

SEQ ID NO: 492710 - RNA, 22 nt, Human
aaccccagcacguggccaguau

SEQ ID NO: 492711 - RNA, 22 nt, Human
aagguucuuguauucucacugc

SEQ ID NO: 492712 - RNA, 20 nt, Human
acaaggccagggaugguggg

SEQ ID NO: 492713 - RNA, 18 nt, Human
acacgaugaaauccaccc

SEQ ID NO: 492714 - RNA, 20 nt, Human
accuagugcucccagacuca

SEQ ID NO: 492715 - RNA, 24 nt, Human
acucugaguuccugagccccacaa

SEQ ID NO: 492716 - RNA, 21 nt, Human
agacccgagggguggccuggu

SEQ ID NO: 492717 - RNA, 18 nt, Human
agcaggaaggacaagucc

SEQ ID NO: 492718 - RNA, 19 nt, Human
aggaaggaagggcaggcug

SEQ ID NO: 492719 - RNA, 23 nt, Human
aggaggguguggaggcaagaagc

SEQ ID NO: 492720 - RNA, 26 nt, Human
aggcaagaagcaggaaggagggaccc

SEQ ID NO: 492721 - RNA, 23 nt, Human
aggcagugugagagaaauccagg

SEQ ID NO: 492722 - RNA, 19 nt, Human
aggccagggauggugggga

SEQ ID NO: 492723 - RNA, 22 nt, Human
auucaagacagaauuacucuga

SEQ ID NO: 492724 - RNA, 21 nt, Human
caaagugggagugaaugucag

SEQ ID NO: 492725 - RNA, 19 nt, Human
caagaagcaggaaggacaa

SEQ ID NO: 492726 - RNA, 21 nt, Human
cacccucaaagagcaguucca

SEQ ID NO: 492727 - RNA, 25 nt, Human
cagagcucggccucucagagaccgc

SEQ ID NO: 492728 - RNA, 18 nt, Human
ccagcccagcuguagcuc

SEQ ID NO: 492729 - RNA, 21 nt, Human
ccaggcaaucacuguguccac

SEQ ID NO: 492730 - RNA, 22 nt, Human
cccugcaccuccagccauucac

SEQ ID NO: 492731 - RNA, 26 nt, Human
ccuccuggcccugcaccuccagccau

SEQ ID NO: 492732 - RNA, 19 nt, Human
ccucgccuccuccuggccc

SEQ ID NO: 492733 - RNA, 21 nt, Human
ccuggcccugcaccuccagcc

SEQ ID NO: 492734 - RNA, 22 nt, Human
cucagagaccgcugcaggcccu

SEQ ID NO: 492735 - RNA, 25 nt, Human
cuccuggcccugcaccuccagccau

SEQ ID NO: 492736 - RNA, 21 nt, Human
cugaagcacaagacccgaggg

SEQ ID NO: 492737 - RNA, 23 nt, Human
cugcaggcccugccucgccuccu

SEQ ID NO: 492738 - RNA, 24 nt, Human
cugcccaacuggauggaaaauaaa

SEQ ID NO: 492739 - RNA, 23 nt, Human
cugguucugaacagagaccagag

SEQ ID NO: 492740 - RNA, 21 nt, Human
cuguagcucugggccuggaac

SEQ ID NO: 492741 - RNA, 24 nt, Human
cugugugcgcauuccaucaggaag

SEQ ID NO: 492742 - RNA, 20 nt, Human
gacccgagggguggccuggu

SEQ ID NO: 492743 - RNA, 18 nt, Human
gcaaagaggaaccacgaa

SEQ ID NO: 492744 - RNA, 22 nt, Human
gcagagaacagcauugacuuca

SEQ ID NO: 492745 - RNA, 19 nt, Human
gcccugccucgccuccucc

SEQ ID NO: 492746 - RNA, 20 nt, Human
gcccugccucgccuccuccu

SEQ ID NO: 492747 - RNA, 24 nt, Human
gcugaagcacaagacccgaggggu

SEQ ID NO: 492748 - RNA, 20 nt, Human
ggaagucccaggcaaucacu

SEQ ID NO: 492749 - RNA, 21 nt, Human
ggcccaccuagccuuucccug

SEQ ID NO: 492750 - RNA, 18 nt, Human
ggcuguuggacgcggugg

SEQ ID NO: 492751 - RNA, 26 nt, Human
gguguggaggcaagaagcaggaagga

SEQ ID NO: 492752 - RNA, 18 nt, Human
uagucuugagcccagccu

SEQ ID NO: 492753 - RNA, 22 nt, Human
ucaagacagaauuacucugaga

SEQ ID NO: 492754 - RNA, 21 nt, Human
uccaacuucaacaucugugac

SEQ ID NO: 492755 - RNA, 18 nt, Human
uccaguuuguggaagucc

SEQ ID NO: 492756 - RNA, 24 nt, Human
ucccagcccagcuguagcucuggg

SEQ ID NO: 492757 - RNA, 23 nt, Human
ucccaggcaaucacuguguccac

SEQ ID NO: 492758 - RNA, 27 nt, Human
ucuccugcaaagaggaaccacgaaggu

SEQ ID NO: 492759 - RNA, 27 nt, Human
ucuccuggcuaauaauaaauauccagg

SEQ ID NO: 492760 - RNA, 28 nt, Human
ucuuacagugcacacacaugcucccagc

SEQ ID NO: 492761 - RNA, 25 nt, Human
ugaauaggcagugugagagaaaucc

SEQ ID NO: 492762 - RNA, 18 nt, Human
ugagagaaauccaggaug

SEQ ID NO: 492763 - RNA, 24 nt, Human
ugagagaaauccaggauggcugcu

SEQ ID NO: 492764 - RNA, 20 nt, Human
ugagggaaaaggaagcacag

SEQ ID NO: 492765 - RNA, 19 nt, Human
ugaucaaagcaguccacgg

SEQ ID NO: 492766 - RNA, 19 nt, Human
ugcaaagaggaaccacgaa

SEQ ID NO: 492767 - RNA, 22 nt, Human
ugcaaagaggaaccacgaaggu

SEQ ID NO: 492768 - RNA, 22 nt, Human
ugcacacacaugcucccagccc

SEQ ID NO: 492769 - RNA, 23 nt, Human
uggaaaauaaaagguucuuguau

SEQ ID NO: 492770 - RNA, 18 nt, Human
uggaggaaggaagggcag

SEQ ID NO: 492771 - RNA, 21 nt, Human
ugugagagaaauccaggaugg

SEQ ID NO: 492772 - RNA, 18 nt, Human
uucaacaucugugaccuc

SEQ ID NO: 492773 - RNA, 24 nt, Human
uucaagacagaauuacucugagaa

SEQ ID NO: 492774 - RNA, 24 nt, Human
uuccagggcugcuuucuccuggcu

SEQ ID NO: 492775 - RNA, 21 nt, Human
agaaagaccugauaccuacug

SEQ ID NO: 492776 - RNA, 24 nt, Human
agcuccgugggcgcuccugcucgu

SEQ ID NO: 492777 - RNA, 18 nt, Human
cacugagacuucuguggg

SEQ ID NO: 492778 - RNA, 21 nt, Human
cauagaaagaccugauaccua

SEQ ID NO: 492779 - RNA, 22 nt, Human
ccagcguacauuuccccugccc

SEQ ID NO: 492780 - RNA, 24 nt, Human
cuuauguucuggcacugagacuuc

SEQ ID NO: 492781 - RNA, 19 nt, Human
gacuucuguggguaccugu

SEQ ID NO: 492782 - RNA, 18 nt, Human
uacugggaccagacaggg

SEQ ID NO: 492783 - RNA, 19 nt, Human
ugagcugcauagaaagacc

SEQ ID NO: 492784 - RNA, 22 nt, Human
uggcacugagacuucugugggu

SEQ ID NO: 492785 - RNA, 22 nt, Human
ugggaccagacagggggcacag

SEQ ID NO: 492786 - RNA, 18 nt, Human
uuuauugguaaucugccc

SEQ ID NO: 492787 - RNA, 24 nt, Human
augaaguuaaaauauaauuuucau

SEQ ID NO: 492788 - RNA, 18 nt, Human
aaagugcugggauuacaa

SEQ ID NO: 492789 - RNA, 24 nt, Human
aaagugcugggauuacaagcauga

SEQ ID NO: 492790 - RNA, 23 nt, Human
aacaauccucucaacguccagga

SEQ ID NO: 492791 - RNA, 24 nt, Human
aaccagacuuccaacagugcucug

SEQ ID NO: 492792 - RNA, 18 nt, Human
aaggguccaccuuccagc

SEQ ID NO: 492793 - RNA, 19 nt, Human
aagugcugggauuacaagc

SEQ ID NO: 492794 - RNA, 21 nt, Human
aagugcugggauuacaagcau

SEQ ID NO: 492795 - RNA, 18 nt, Human
acaagcaugagucaccgu

SEQ ID NO: 492796 - RNA, 18 nt, Human
acaagcauuuuccccgcu

SEQ ID NO: 492797 - RNA, 22 nt, Human
acaccggaaccgcucauugcca

SEQ ID NO: 492798 - RNA, 19 nt, Human
agagaaaaggggcucuaga

SEQ ID NO: 492799 - RNA, 20 nt, Human
agagaccuccccacaacugg

SEQ ID NO: 492800 - RNA, 22 nt, Human
agccccugccagcagagaaaag

SEQ ID NO: 492801 - RNA, 24 nt, Human
aggaaagugggguggucagaaagg

SEQ ID NO: 492802 - RNA, 18 nt, Human
agggaagcagaugaaacu

SEQ ID NO: 492803 - RNA, 18 nt, Human
aggucuuugcggaugucc

SEQ ID NO: 492804 - RNA, 24 nt, Human
agugcugggauuacaagcaugagu

SEQ ID NO: 492805 - RNA, 19 nt, Human
aguucccagggaagcagau

SEQ ID NO: 492806 - RNA, 21 nt, Human
aucuccuucugcauccugucg

SEQ ID NO: 492807 - RNA, 19 nt, Human
augccgcaagauuccauac

SEQ ID NO: 492808 - RNA, 20 nt, Human
augggguuuuuccauguugg

SEQ ID NO: 492809 - RNA, 24 nt, Human
caaacaauuugacuguugugcaaa

SEQ ID NO: 492810 - RNA, 24 nt, Human
caaagugcugggauuacaagcaug

SEQ ID NO: 492811 - RNA, 24 nt, Human
caacacuguuucugcugccacugu

SEQ ID NO: 492812 - RNA, 19 nt, Human
caccaacagcgccaagggu

SEQ ID NO: 492813 - RNA, 22 nt, Human
caccggaaccgcucauugccaa

SEQ ID NO: 492814 - RNA, 20 nt, Human
caccguguuggcguacaggu

SEQ ID NO: 492815 - RNA, 23 nt, Human
caccguguuggcguacaggucuu

SEQ ID NO: 492816 - RNA, 22 nt, Human
cacuucaugauggaguugaagg

SEQ ID NO: 492817 - RNA, 23 nt, Human
caggugauccgccugccuugccc

SEQ ID NO: 492818 - RNA, 19 nt, Human
ccaaagugcugggauuaca

SEQ ID NO: 492819 - RNA, 24 nt, Human
ccaaagugcugggauuacaagcau

SEQ ID NO: 492820 - RNA, 18 nt, Human
ccaacagugcucugggcc

SEQ ID NO: 492821 - RNA, 24 nt, Human
ccaaggguccaccuuccagcagau

SEQ ID NO: 492822 - RNA, 22 nt, Human
ccaauggugaugaccuggccuu

SEQ ID NO: 492823 - RNA, 24 nt, Human
ccaccaacagcgccaaggguccac

SEQ ID NO: 492824 - RNA, 18 nt, Human
ccagcagagaaaaggggc

SEQ ID NO: 492825 - RNA, 20 nt, Human
ccagggcggugaucuccuuc

SEQ ID NO: 492826 - RNA, 19 nt, Human
ccauguuggugaggcuggu

SEQ ID NO: 492827 - RNA, 21 nt, Human
cccugccagcagagaaaaggg

SEQ ID NO: 492828 - RNA, 21 nt, Human
cccugggcugcugucucaggg

SEQ ID NO: 492829 - RNA, 22 nt, Human
ccgccgccaccaacagcgccaa

SEQ ID NO: 492830 - RNA, 22 nt, Human
ccgccucgucgccccuagcugc

SEQ ID NO: 492831 - RNA, 24 nt, Human
ccuccccacaacuggggcaaaggc

SEQ ID NO: 492832 - RNA, 22 nt, Human
ccuccggacaccggaaccgcuc

SEQ ID NO: 492833 - RNA, 19 nt, Human
ccucgucgccccuagcugc

SEQ ID NO: 492834 - RNA, 20 nt, Human
ccucgucgccccuagcugcc

SEQ ID NO: 492835 - RNA, 18 nt, Human
ccugaccucaggugaucc

SEQ ID NO: 492836 - RNA, 21 nt, Human
ccugaccucaggugauccgcc

SEQ ID NO: 492837 - RNA, 23 nt, Human
ccugaccucaggugauccgccug

SEQ ID NO: 492838 - RNA, 20 nt, Human
ccugcugggaugaggauaaa

SEQ ID NO: 492839 - RNA, 18 nt, Human
ccuggucugaauaugaag

SEQ ID NO: 492840 - RNA, 23 nt, Human
cgccagggcggugaucuccuucu

SEQ ID NO: 492841 - RNA, 23 nt, Human
cgccucgucgccccuagcugcca

SEQ ID NO: 492842 - RNA, 23 nt, Human
cucacacuucacagcugucuccg

SEQ ID NO: 492843 - RNA, 26 nt, Human
cuccugaccucaggugauccgccugc

SEQ ID NO: 492844 - RNA, 20 nt, Human
cucguggaugccgcaagauu

SEQ ID NO: 492845 - RNA, 21 nt, Human
cucugcccugacaaccucagc

SEQ ID NO: 492846 - RNA, 23 nt, Human
cugccagcagacaaagaaccuca

SEQ ID NO: 492847 - RNA, 22 nt, Human
cugcccugacaaccucagccug

SEQ ID NO: 492848 - RNA, 24 nt, Human
cugccuugcccucccaaagugcug

SEQ ID NO: 492849 - RNA, 21 nt, Human
cuggggcaaaggccguggagg

SEQ ID NO: 492850 - RNA, 22 nt, Human
cuucacagcugucuccgccgcc

SEQ ID NO: 492851 - RNA, 18 nt, Human
cuuccaacagugcucugg

SEQ ID NO: 492852 - RNA, 19 nt, Human
gaagcaccugcccugggcc

SEQ ID NO: 492853 - RNA, 18 nt, Human
gacacaagcauuuucccc

SEQ ID NO: 492854 - RNA, 23 nt, Human
gacagcaccguguuggcguacag

SEQ ID NO: 492855 - RNA, 23 nt, Human
gaccucaggugauccgccugccu

SEQ ID NO: 492856 - RNA, 24 nt, Human
gagaugggguuuuuccauguuggu

SEQ ID NO: 492857 - RNA, 18 nt, Human
gauuacaagcaugaguca

SEQ ID NO: 492858 - RNA, 24 nt, Human
gauuacaagcaugagucaccgugc

SEQ ID NO: 492859 - RNA, 18 nt, Human
gcacagagaccuccccac

SEQ ID NO: 492860 - RNA, 22 nt, Human
gcgacacaagcauuuuccccgc

SEQ ID NO: 492861 - RNA, 23 nt, Human
gcgccagggcggugaucuccuuc

SEQ ID NO: 492862 - RNA, 23 nt, Human
gcuggucucaaacuccugaccuc

SEQ ID NO: 492863 - RNA, 24 nt, Human
ggauuacaagcaugagucaccgug

SEQ ID NO: 492864 - RNA, 19 nt, Human
ggcugcugucucagggcag

SEQ ID NO: 492865 - RNA, 24 nt, Human
ggcuggucucaaacuccugaccuc

SEQ ID NO: 492866 - RNA, 18 nt, Human
gggcaaaggccguggagg

SEQ ID NO: 492867 - RNA, 21 nt, Human
ggggacucuaaccagacuucc

SEQ ID NO: 492868 - RNA, 18 nt, Human
gggguuuuuccauguugg

SEQ ID NO: 492869 - RNA, 18 nt, Human
gggguuuuuccauguugg

SEQ ID NO: 492870 - RNA, 22 nt, Human
guggucucguggaugccgcaag

SEQ ID NO: 492871 - RNA, 24 nt, Human
uaguagagaugggguuuuuccaug

SEQ ID NO: 492872 - RNA, 21 nt, Human
uaucucuguuguucucgagga

SEQ ID NO: 492873 - RNA, 21 nt, Human
ucaccauguuucuucucccca

SEQ ID NO: 492874 - RNA, 22 nt, Human
ucacuaagccuggagugccugu

SEQ ID NO: 492875 - RNA, 24 nt, Human
uccaacagugcucugggccccuua

SEQ ID NO: 492876 - RNA, 21 nt, Human
uccauacccaggaaggaaggc

SEQ ID NO: 492877 - RNA, 18 nt, Human
ucccaaagugcugggauu

SEQ ID NO: 492878 - RNA, 24 nt, Human
ucccaaagugcugggauuacaagc

SEQ ID NO: 492879 - RNA, 24 nt, Human
uccccacaacuggggcaaaggccg

SEQ ID NO: 492880 - RNA, 22 nt, Human
uccgccgccaccaacagcgcca

SEQ ID NO: 492881 - RNA, 22 nt, Human
ucugaauaugaagcaccugccc

SEQ ID NO: 492882 - RNA, 18 nt, Human
ugaagcaccugcccuggg

SEQ ID NO: 492883 - RNA, 20 nt, Human
ugaauaugaagcaccugccc

SEQ ID NO: 492884 - RNA, 18 nt, Human
ugaccucaggugauccgc

SEQ ID NO: 492885 - RNA, 24 nt, Human
ugaccucaggugauccgccugccu

SEQ ID NO: 492886 - RNA, 24 nt, Human
ugccuugcccucccaaagugcugg

SEQ ID NO: 492887 - RNA, 24 nt, Human
ugcugggauuacaagcaugaguca

SEQ ID NO: 492888 - RNA, 24 nt, Human
uggaacagcgccuccggacaccgg

SEQ ID NO: 492889 - RNA, 20 nt, Human
uggccaggccgguucuuuuu

SEQ ID NO: 492890 - RNA, 19 nt, Human
uggcccaccaaaggcgaca

SEQ ID NO: 492891 - RNA, 21 nt, Human
ugggauuacaagcaugaguca

SEQ ID NO: 492892 - RNA, 22 nt, Human
ugggauuacaagcaugagucac

SEQ ID NO: 492893 - RNA, 23 nt, Human
ugggauuacaagcaugagucacc

SEQ ID NO: 492894 - RNA, 24 nt, Human
ugggauuacaagcaugagucaccg

SEQ ID NO: 492895 - RNA, 23 nt, Human
ugggccccuuaguaaguucccag

SEQ ID NO: 492896 - RNA, 19 nt, Human
ugggguuuuuccauguugg

SEQ ID NO: 492897 - RNA, 20 nt, Human
ugguaaacaaagccccugcc

SEQ ID NO: 492898 - RNA, 22 nt, Human
ugguaaacaaagccccugccag

SEQ ID NO: 492899 - RNA, 24 nt, Human
uggugaggcuggucucaaacuccu

SEQ ID NO: 492900 - RNA, 21 nt, Human
uggugcugggcgccagggcgg

SEQ ID NO: 492901 - RNA, 22 nt, Human
uguccccaccuucagcucucug

SEQ ID NO: 492902 - RNA, 21 nt, Human
uguuucugcugccacugucac

SEQ ID NO: 492903 - RNA, 18 nt, Human
uuagccuaaacagugagc

SEQ ID NO: 492904 - RNA, 21 nt, Human
uuagccuaaacagugagcugg

SEQ ID NO: 492905 - RNA, 18 nt, Human
uuaguagagaugggguuu

SEQ ID NO: 492906 - RNA, 18 nt, Human
uuaguagagaugggguuu

SEQ ID NO: 492907 - RNA, 24 nt, Human
uuaguagagaugggguuuuuccau

SEQ ID NO: 492908 - RNA, 23 nt, Human
uuaucucuguuguucucgaggaa

SEQ ID NO: 492909 - RNA, 24 nt, Human
uuccauguuggugaggcuggucuc

SEQ ID NO: 492910 - RNA, 22 nt, Human
uucugcugccacugucacuaag

SEQ ID NO: 492911 - RNA, 26 nt, Human
uugaagguggucucguggaugccgca

SEQ ID NO: 492912 - RNA, 22 nt, Human
uugugauguacccaacuaacca

SEQ ID NO: 492913 - RNA, 20 nt, Human
uuucugcugccacugucacu

SEQ ID NO: 492914 - RNA, 27 nt, Human
uuucuuaucucuguuguucucgaggaa

SEQ ID NO: 492915 - RNA, 21 nt, Human
uuuuuaguagagaugggguuu

SEQ ID NO: 492916 - RNA, 22 nt, Human
uuuuuuaguagagaugggguuu

SEQ ID NO: 492917 - RNA, 24 nt, Human
uuuuuuuuuuuuuuaguagagaug

SEQ ID NO: 492918 - RNA, 23 nt, Human
uuuuuuuuuuuuuuuuaguagag

SEQ ID NO: 492919 - RNA, 18 nt, Human
ccgcagcuuccccaauag

SEQ ID NO: 492920 - RNA, 18 nt, Human
gugaagcaggacaaagug

SEQ ID NO: 492921 - RNA, 22 nt, Human
uauauagaacucugcacacuuu

SEQ ID NO: 492922 - RNA, 19 nt, Human
ucaaaggaacuaauccagc

SEQ ID NO: 492923 - RNA, 20 nt, Human
ucaaaggaacuaauccagca

SEQ ID NO: 492924 - RNA, 18 nt, Human
ugaagcaggacaaagugc

SEQ ID NO: 492925 - RNA, 20 nt, Human
uggggagguccgugaagcag

SEQ ID NO: 492926 - RNA, 23 nt, Human
acucuaaaauucgacagaguaaa

SEQ ID NO: 492927 - RNA, 22 nt, Human
agaggauuuacuauguuaaaac

SEQ ID NO: 492928 - RNA, 19 nt, Human
caccuccagcuuuaccguc

SEQ ID NO: 492929 - RNA, 22 nt, Human
ccuccaugaagugugugcacuu

SEQ ID NO: 492930 - RNA, 24 nt, Human
cgggagccugguaggcuucgagca

SEQ ID NO: 492931 - RNA, 23 nt, Human
cucaaauuacuuucucaucuucc

SEQ ID NO: 492932 - RNA, 28 nt, Human
cucaaauuacuuucucaucuuccuaauu

SEQ ID NO: 492933 - RNA, 21 nt, Human
gaaaaggagucccuccaugaa

SEQ ID NO: 492934 - RNA, 22 nt, Human
uacagugugucccgcuccaugg

SEQ ID NO: 492935 - RNA, 18 nt, Human
ucucaaauuacuuucuca

SEQ ID NO: 492936 - RNA, 20 nt, Human
uggauacugaauacaacagc

SEQ ID NO: 492937 - RNA, 22 nt, Human
uguuaaaacguucaugucccaa

SEQ ID NO: 492938 - RNA, 20 nt, Human
uuucuggagaaaaaucagua

SEQ ID NO: 492939 - RNA, 18 nt, Human
aaaaacuaucuccaugcc

SEQ ID NO: 492940 - RNA, 21 nt, Human
aaaaacuaucuccaugccccc

SEQ ID NO: 492941 - RNA, 25 nt, Human
aaacaccacacauauacagcaaaac

SEQ ID NO: 492942 - RNA, 22 nt, Human
aaacacuacaguauguaaaaac

SEQ ID NO: 492943 - RNA, 21 nt, Human
aacuacaaccaucuuucccag

SEQ ID NO: 492944 - RNA, 22 nt, Human
aacucaguugaaccgaagcuaa

SEQ ID NO: 492945 - RNA, 18 nt, Human
acaacacaauacaacaca

SEQ ID NO: 492946 - RNA, 24 nt, Human
acccucuuuaggacaauauuacug

SEQ ID NO: 492947 - RNA, 21 nt, Human
agccacacacacaaaaaaucu

SEQ ID NO: 492948 - RNA, 18 nt, Human
auauucuaaagaaagaga

SEQ ID NO: 492949 - RNA, 21 nt, Human
caaaacgaaacucaguugaac

SEQ ID NO: 492950 - RNA, 27 nt, Human
caaacaccacacauauacagcaaaaca

SEQ ID NO: 492951 - RNA, 21 nt, Human
caaagaguagucuaaagagca

SEQ ID NO: 492952 - RNA, 19 nt, Human
caacagagaagacugucca

SEQ ID NO: 492953 - RNA, 22 nt, Human
cacaacacaauacaacacaaga

SEQ ID NO: 492954 - RNA, 19 nt, Human
cacauauacagcaaaacac

SEQ ID NO: 492955 - RNA, 18 nt, Human
cacauucaaaagugaggc

SEQ ID NO: 492956 - RNA, 26 nt, Human
caccaagaauguauauaguaagccaa

SEQ ID NO: 492957 - RNA, 22 nt, Human
caugcauguuaaugagcagguu

SEQ ID NO: 492958 - RNA, 21 nt, Human
ccaugcccccaucucuccguu

SEQ ID NO: 492959 - RNA, 21 nt, Human
cccaagaaaccuacagaaaua

SEQ ID NO: 492960 - RNA, 18 nt, Human
cuucccuguucccugucc

SEQ ID NO: 492961 - RNA, 24 nt, Human
ggccauauggagguuuccauggaa

SEQ ID NO: 492962 - RNA, 21 nt, Human
gggaaguccucauuugcaacc

SEQ ID NO: 492963 - RNA, 24 nt, Human
guaaaaaccuaacacagcacaaca

SEQ ID NO: 492964 - RNA, 24 nt, Human
uaaaaaccuaacacagcacaaagu

SEQ ID NO: 492965 - RNA, 20 nt, Human
uaaagacaacuacaaccauc

SEQ ID NO: 492966 - RNA, 22 nt, Human
uauauagaaaggccauauggag

SEQ ID NO: 492967 - RNA, 25 nt, Human
uaucuuguaaacaaaauaguaaggu

SEQ ID NO: 492968 - RNA, 22 nt, Human
uccauuuggggagggaaguccu

SEQ ID NO: 492969 - RNA, 18 nt, Human
ucccaaguaccaguuucu

SEQ ID NO: 492970 - RNA, 18 nt, Human
uccuccaguacguaaaaa

SEQ ID NO: 492971 - RNA, 22 nt, Human
ucuccaugcccccaucucuccg

SEQ ID NO: 492972 - RNA, 21 nt, Human
ucugugaucaacagagaagac

SEQ ID NO: 492973 - RNA, 19 nt, Human
ugaaagcaaaauuaaaauc

SEQ ID NO: 492974 - RNA, 18 nt, Human
ugcauuuggaaaauggca

SEQ ID NO: 492975 - RNA, 24 nt, Human
ugcccccaucucuccguuugauuu

SEQ ID NO: 492976 - RNA, 23 nt, Human
ugucauguucuuaagcacauaau

SEQ ID NO: 492977 - RNA, 20 nt, Human
uugcuggcuggcagguuugc

SEQ ID NO: 492978 - RNA, 21 nt, Human
uuuaugaugugagagggucug

SEQ ID NO: 492979 - RNA, 21 nt, Human
uuuauggucauguucugcuuu

SEQ ID NO: 492980 - RNA, 18 nt, Human
uuuuaaaugucaguccca

SEQ ID NO: 492981 - RNA, 19 nt, Human
uuuuaaaugucagucccaa

SEQ ID NO: 492982 - RNA, 19 nt, Human
uuuuauggucauguucugc

SEQ ID NO: 492983 - RNA, 21 nt, Human
aaauggcccacagggaaaggc

SEQ ID NO: 492984 - RNA, 18 nt, Human
accuggcucacugcaugc

SEQ ID NO: 492985 - RNA, 22 nt, Human
agccacugaguaggguaccacc

SEQ ID NO: 492986 - RNA, 19 nt, Human
agcuggauucacugcccag

SEQ ID NO: 492987 - RNA, 18 nt, Human
agcugggcuccagcggag

SEQ ID NO: 492988 - RNA, 18 nt, Human
agggggcuucccugguca

SEQ ID NO: 492989 - RNA, 28 nt, Human
caccuggcucacugcaugcacgugugcg

SEQ ID NO: 492990 - RNA, 21 nt, Human
cagaagugacaggauacggug

SEQ ID NO: 492991 - RNA, 18 nt, Human
caggagccugggagcaag

SEQ ID NO: 492992 - RNA, 19 nt, Human
caggagccugggagcaagg

SEQ ID NO: 492993 - RNA, 22 nt, Human
caggagccugggagcaagggcu

SEQ ID NO: 492994 - RNA, 18 nt, Human
caggcaggagccugggag

SEQ ID NO: 492995 - RNA, 18 nt, Human
cagggggcuucccugguc

SEQ ID NO: 492996 - RNA, 20 nt, Human
ccaaauggcccacagggaaa

SEQ ID NO: 492997 - RNA, 22 nt, Human
ccacagggaaaggcuggggaaa

SEQ ID NO: 492998 - RNA, 21 nt, Human
cccucuuggcuuaucaggggg

SEQ ID NO: 492999 - RNA, 21 nt, Human
ccggccccugccccgcggcac

SEQ ID NO: 493000 - RNA, 19 nt, Human
ccggcggcgccggcgcccc

SEQ ID NO: 493001 - RNA, 18 nt, Human
ccugggagcaagggcugu

SEQ ID NO: 493002 - RNA, 25 nt, Human
cgcggcccggccccugccccgcggc

SEQ ID NO: 493003 - RNA, 18 nt, Human
cggccgagagcccgacag

SEQ ID NO: 493004 - RNA, 21 nt, Human
cggcgccccgcgcgcucucug

SEQ ID NO: 493005 - RNA, 24 nt, Human
cggcggcccgugcuccgccagcgc

SEQ ID NO: 493006 - RNA, 18 nt, Human
cgggaggagcggguggcc

SEQ ID NO: 493007 - RNA, 22 nt, Human
cucccucacauccagaagugac

SEQ ID NO: 493008 - RNA, 23 nt, Human
gaguaggguaccaccuggguccu

SEQ ID NO: 493009 - RNA, 19 nt, Human
gcccacagggaaaggcugg

SEQ ID NO: 493010 - RNA, 19 nt, Human
gcggcgccggcgccccgcg

SEQ ID NO: 493011 - RNA, 18 nt, Human
ggaaaggcuggggaaaag

SEQ ID NO: 493012 - RNA, 21 nt, Human
ggaauggggacgcagcaguuc

SEQ ID NO: 493013 - RNA, 23 nt, Human
ggagccugggagcaagggcugug

SEQ ID NO: 493014 - RNA, 23 nt, Human
ggcccucuuggcuuaucaggggg

SEQ ID NO: 493015 - RNA, 22 nt, Human
ggcucacugcaugcacgugugc

SEQ ID NO: 493016 - RNA, 19 nt, Human
gugcagcugaugcaccugg

SEQ ID NO: 493017 - RNA, 26 nt, Human
uaaccauccuccccuucugucccucc

SEQ ID NO: 493018 - RNA, 22 nt, Human
ucccuccaggaggcagggagga

SEQ ID NO: 493019 - RNA, 22 nt, Human
ucccuggucauccuccagcagc

SEQ ID NO: 493020 - RNA, 20 nt, Human
ucucugcguccggaaugggg

SEQ ID NO: 493021 - RNA, 22 nt, Human
ucugugaccggggcuggccuac

SEQ ID NO: 493022 - RNA, 21 nt, Human
ugaccggggcuggccuacaca

SEQ ID NO: 493023 - RNA, 18 nt, Human
ugaguaggguaccaccug

SEQ ID NO: 493024 - RNA, 19 nt, Human
ugauuguccggggcgacuc

SEQ ID NO: 493025 - RNA, 18 nt, Human
ugcaugcacgugugcgcg

SEQ ID NO: 493026 - RNA, 19 nt, Human
uggauucacugcccaguac

SEQ ID NO: 493027 - RNA, 21 nt, Human
ugggagcaagggcugugcugg

SEQ ID NO: 493028 - RNA, 20 nt, Human
uucacugcccaguacuuguc

SEQ ID NO: 493029 - RNA, 22 nt, Human
uuuaaccggcggcgccggcgcc

SEQ ID NO: 493030 - RNA, 26 nt, Human
aaacaaugaaauccacaagaaauuac

SEQ ID NO: 493031 - RNA, 18 nt, Human
aaaggaaaacgagccugg

SEQ ID NO: 493032 - RNA, 23 nt, Human
acagcaaauggcuacauuccaga

SEQ ID NO: 493033 - RNA, 19 nt, Human
acagccggcaccgcuggcc

SEQ ID NO: 493034 - RNA, 18 nt, Human
agaaucuuguuucccaga

SEQ ID NO: 493035 - RNA, 22 nt, Human
agaaucuuguuucccagauaac

SEQ ID NO: 493036 - RNA, 21 nt, Human
agcagcuccccuccuggccuc

SEQ ID NO: 493037 - RNA, 26 nt, Human
agccggcaccgcuggccaccggcgcg

SEQ ID NO: 493038 - RNA, 18 nt, Human
agcuacaggaaaucuaga

SEQ ID NO: 493039 - RNA, 18 nt, Human
agcuccccuccuggccuc

SEQ ID NO: 493040 - RNA, 24 nt, Human
agcugucacugcaaucuuccucug

SEQ ID NO: 493041 - RNA, 18 nt, Human
agcuucuggcaggagcag

SEQ ID NO: 493042 - RNA, 19 nt, Human
agcuucuggcaggagcagc

SEQ ID NO: 493043 - RNA, 21 nt, Human
agcuucuggcaggagcagcuc

SEQ ID NO: 493044 - RNA, 23 nt, Human
aggaaaucuagaacaaaaucaaa

SEQ ID NO: 493045 - RNA, 19 nt, Human
aggcaaaacaaugaaaucc

SEQ ID NO: 493046 - RNA, 25 nt, Human
aggcaaaacaaugaaauccacaaga

SEQ ID NO: 493047 - RNA, 27 nt, Human
aggcaaaacaaugaaauccacaagaaa

SEQ ID NO: 493048 - RNA, 20 nt, Human
auggcuccggccgcggggaa

SEQ ID NO: 493049 - RNA, 24 nt, Human
auugcaccaggcugcccauggaca

SEQ ID NO: 493050 - RNA, 21 nt, Human
cacagacuccgaggcagcgcu

SEQ ID NO: 493051 - RNA, 21 nt, Human
caccagcgccgucugcccucg

SEQ ID NO: 493052 - RNA, 21 nt, Human
cagcgccgucugcccucgugc

SEQ ID NO: 493053 - RNA, 18 nt, Human
caggggacgcgacgggca

SEQ ID NO: 493054 - RNA, 19 nt, Human
cauggcacugggcuucggc

SEQ ID NO: 493055 - RNA, 20 nt, Human
ccaacccuuccugcacaugc

SEQ ID NO: 493056 - RNA, 19 nt, Human
ccagcuucuggcaggagca

SEQ ID NO: 493057 - RNA, 26 nt, Human
ccagucagccaggaaggucccacagc

SEQ ID NO: 493058 - RNA, 25 nt, Human
cccagauaacagcaaauggcuacau

SEQ ID NO: 493059 - RNA, 19 nt, Human
cccuucguggcugaagaau

SEQ ID NO: 493060 - RNA, 25 nt, Human
ccgcgggcagucauggcacugggcu

SEQ ID NO: 493061 - RNA, 22 nt, Human
ccuguuagaaucuuguuuccca

SEQ ID NO: 493062 - RNA, 23 nt, Human
ccuuccugcacaugcuccuccug

SEQ ID NO: 493063 - RNA, 25 nt, Human
cgagccuggggcccugguggcugca

SEQ ID NO: 493064 - RNA, 23 nt, Human
cgccacacgaucgaccaccagcg

SEQ ID NO: 493065 - RNA, 19 nt, Human
cgccauggagcacggcguu

SEQ ID NO: 493066 - RNA, 21 nt, Human
cgccauggagcacggcguucc

SEQ ID NO: 493067 - RNA, 19 nt, Human
cgcggggaacguccuccgg

SEQ ID NO: 493068 - RNA, 26 nt, Human
cggggagcuggaggaaggagcugggg

SEQ ID NO: 493069 - RNA, 18 nt, Human
cuaaaccaaggagaguaa

SEQ ID NO: 493070 - RNA, 22 nt, Human
cucacugggccuccucucaggu

SEQ ID NO: 493071 - RNA, 23 nt, Human
cuccuggugugguuugugggugg

SEQ ID NO: 493072 - RNA, 25 nt, Human
cugcacaugcuccuccuggagccua

SEQ ID NO: 493073 - RNA, 18 nt, Human
cuggucaucggggggcag

SEQ ID NO: 493074 - RNA, 22 nt, Human
cugucacugcaaucuuccucug

SEQ ID NO: 493075 - RNA, 24 nt, Human
cuuccugcacaugcuccuccugga

SEQ ID NO: 493076 - RNA, 22 nt, Human
gaaaagaauuuuucaaaaaugu

SEQ ID NO: 493077 - RNA, 21 nt, Human
gagccuggggcccugguggcu

SEQ ID NO: 493078 - RNA, 20 nt, Human
gagcuggaggaaggagcugg

SEQ ID NO: 493079 - RNA, 23 nt, Human
gcaaaacaaugaaauccacaaga

SEQ ID NO: 493080 - RNA, 22 nt, Human
gcagaugcacauccaucccuuc

SEQ ID NO: 493081 - RNA, 21 nt, Human
gccuccuggugugguuugugg

SEQ ID NO: 493082 - RNA, 19 nt, Human
gcuccuggucaucgggggg

SEQ ID NO: 493083 - RNA, 24 nt, Human
ggacugggccgucgcacacgccag

SEQ ID NO: 493084 - RNA, 25 nt, Human
ggacugggccgucgcacacgccagc

SEQ ID NO: 493085 - RNA, 21 nt, Human
ggagcuggaggaaggagcugg

SEQ ID NO: 493086 - RNA, 22 nt, Human
ggcaaaacaaugaaauccacaa

SEQ ID NO: 493087 - RNA, 23 nt, Human
ggcaaaacaaugaaauccacaag

SEQ ID NO: 493088 - RNA, 20 nt, Human
ggcagaugcacauccauccc

SEQ ID NO: 493089 - RNA, 22 nt, Human
ggcagaugcacauccaucccuu

SEQ ID NO: 493090 - RNA, 18 nt, Human
ggcccugguggcugcagc

SEQ ID NO: 493091 - RNA, 19 nt, Human
gggcagaugcacauccauc

SEQ ID NO: 493092 - RNA, 22 nt, Human
gggcagaugcacauccaucccu

SEQ ID NO: 493093 - RNA, 19 nt, Human
ggggucgggcuccaugcuc

SEQ ID NO: 493094 - RNA, 20 nt, Human
gggucgggcuccaugcucug

SEQ ID NO: 493095 - RNA, 23 nt, Human
ggugcggggagcuggaggaagga

SEQ ID NO: 493096 - RNA, 25 nt, Human
ggugugaaaugaaaugauggagugg

SEQ ID NO: 493097 - RNA, 18 nt, Human
gucagggccggugggugc

SEQ ID NO: 493098 - RNA, 19 nt, Human
gucccacagccggcaccgc

SEQ ID NO: 493099 - RNA, 18 nt, Human
gugaaaugaaaugaugga

SEQ ID NO: 493100 - RNA, 18 nt, Human
gugcaggguucuuccaag

SEQ ID NO: 493101 - RNA, 20 nt, Human
guggcucuccacaaguggag

SEQ ID NO: 493102 - RNA, 21 nt, Human
uaaaauaacugaacuaagggc

SEQ ID NO: 493103 - RNA, 23 nt, Human
uaaaauaacugaacuaagggcca

SEQ ID NO: 493104 - RNA, 18 nt, Human
uacauuuuaacaauucac

SEQ ID NO: 493105 - RNA, 19 nt, Human
uauaaaggaaaacgagccu

SEQ ID NO: 493106 - RNA, 20 nt, Human
uauuugaaggcaaaacaaug

SEQ ID NO: 493107 - RNA, 19 nt, Human
ucacugcaaucuuccucug

SEQ ID NO: 493108 - RNA, 20 nt, Human
uccagaaaaaaaauaucaac

SEQ ID NO: 493109 - RNA, 24 nt, Human
uccagaaaaaaaauaucaacuuau

SEQ ID NO: 493110 - RNA, 19 nt, Human
uccauggcuccggccgcgg

SEQ ID NO: 493111 - RNA, 26 nt, Human
ucccacagccggcaccgcuggccacc

SEQ ID NO: 493112 - RNA, 26 nt, Human
uccugcacaugcuccuccuggagccu

SEQ ID NO: 493113 - RNA, 19 nt, Human
uccuggagccuaggaggag

SEQ ID NO: 493114 - RNA, 20 nt, Human
uccuggagccuaggaggagg

SEQ ID NO: 493115 - RNA, 20 nt, Human
uccuggccuccccucccuuc

SEQ ID NO: 493116 - RNA, 24 nt, Human
ucguggcugaagaauuuacucggg

SEQ ID NO: 493117 - RNA, 23 nt, Human
ucuggcaggagcagcuccccucc

SEQ ID NO: 493118 - RNA, 18 nt, Human
ucuuaggcugguuuccug

SEQ ID NO: 493119 - RNA, 21 nt, Human
ugaaaaguuggaagauuuugc

SEQ ID NO: 493120 - RNA, 25 nt, Human
ugaaaaguuggaagauuuugcaucc

SEQ ID NO: 493121 - RNA, 18 nt, Human
uggaaggcgcuggcuggg

SEQ ID NO: 493122 - RNA, 21 nt, Human
uggagcacggcguucccacug

SEQ ID NO: 493123 - RNA, 24 nt, Human
uggaguggaaggcgcuggcugggg

SEQ ID NO: 493124 - RNA, 24 nt, Human
uggcaggagcagcuccccuccugg

SEQ ID NO: 493125 - RNA, 20 nt, Human
uucucaaacucgggcccauu

SEQ ID NO: 493126 - RNA, 21 nt, Human
uucuguacaaaugaauggaau

SEQ ID NO: 493127 - RNA, 31 nt, Human
uuggguugaaaaguuggaagauuuugcaucc

SEQ ID NO: 493128 - RNA, 19 nt, Human
uuuuuuuuuuuucuuuaaa

SEQ ID NO: 493129 - RNA, 23 nt, Human
aaaaacacgcucucuucaccucc

SEQ ID NO: 493130 - RNA, 19 nt, Human
aaaaugcugugguuuuccc

SEQ ID NO: 493131 - RNA, 26 nt, Human
aacuugcccuucucccuugaaacuuu

SEQ ID NO: 493132 - RNA, 23 nt, Human
aagacaacaguugaaaacuguau

SEQ ID NO: 493133 - RNA, 19 nt, Human
aaggagcgacuaacuuggc

SEQ ID NO: 493134 - RNA, 19 nt, Human
acauuggaagguuucuuuu

SEQ ID NO: 493135 - RNA, 20 nt, Human
accccagagcaccugucgga

SEQ ID NO: 493136 - RNA, 22 nt, Human
aggaagggcccgggcagcaugg

SEQ ID NO: 493137 - RNA, 19 nt, Human
aggcggaagccaaggugcc

SEQ ID NO: 493138 - RNA, 23 nt, Human
agugcugaaagcugcucagggcc

SEQ ID NO: 493139 - RNA, 18 nt, Human
caagggagcagcaugucc

SEQ ID NO: 493140 - RNA, 21 nt, Human
caccccagagcaccugucgga

SEQ ID NO: 493141 - RNA, 25 nt, Human
caccccagagcaccugucggagacc

SEQ ID NO: 493142 - RNA, 22 nt, Human
cagaagagucaccccagagcac

SEQ ID NO: 493143 - RNA, 19 nt, Human
caggagggcgggcugcggc

SEQ ID NO: 493144 - RNA, 23 nt, Human
caggcucuguagggucuuggagg

SEQ ID NO: 493145 - RNA, 24 nt, Human
ccacgagcccugcccagcgcucac

SEQ ID NO: 493146 - RNA, 21 nt, Human
ccagaugacauggcaaagcua

SEQ ID NO: 493147 - RNA, 20 nt, Human
ccagcagcaggauauugugu

SEQ ID NO: 493148 - RNA, 25 nt, Human
cccccggggcucuggggagggucuc

SEQ ID NO: 493149 - RNA, 23 nt, Human
ccccgccccgcgccgaacccgga

SEQ ID NO: 493150 - RNA, 20 nt, Human
cccgcgccgaacccggaacc

SEQ ID NO: 493151 - RNA, 24 nt, Human
ccgggcagcaugagggagcggcgc

SEQ ID NO: 493152 - RNA, 25 nt, Human
ccuccacaaauacagauugcugcuu

SEQ ID NO: 493153 - RNA, 23 nt, Human
cgucccuucccucagggggcugu

SEQ ID NO: 493154 - RNA, 23 nt, Human
cucuucaccuccagugcugaaag

SEQ ID NO: 493155 - RNA, 19 nt, Human
cugugguuuucccagcagc

SEQ ID NO: 493156 - RNA, 20 nt, Human
gaagauaagcaccaaaccua

SEQ ID NO: 493157 - RNA, 22 nt, Human
gaagauaagcaccaaaccuauu

SEQ ID NO: 493158 - RNA, 24 nt, Human
gagcaagacaacaguugaaaaagg

SEQ ID NO: 493159 - RNA, 18 nt, Human
gagcccugcccagcgcuc

SEQ ID NO: 493160 - RNA, 19 nt, Human
gagcggcgcguccugggac

SEQ ID NO: 493161 - RNA, 22 nt, Human
gcccagcgcucaccaggagggc

SEQ ID NO: 493162 - RNA, 22 nt, Human
gccccgcgccgaacccggaacc

SEQ ID NO: 493163 - RNA, 18 nt, Human
gcccugggcuuggggccc

SEQ ID NO: 493164 - RNA, 19 nt, Human
gcccugggcuuggggccgu

SEQ ID NO: 493165 - RNA, 23 nt, Human
gccgaacccggaaccggcugcgc

SEQ ID NO: 493166 - RNA, 20 nt, Human
gcucggggccgcggucacuc

SEQ ID NO: 493167 - RNA, 20 nt, Human
gcucggggccgcggucacuc

SEQ ID NO: 493168 - RNA, 20 nt, Human
gcuuggggccguggucacuc

SEQ ID NO: 493169 - RNA, 19 nt, Human
ggaggaagggcccgggcag

SEQ ID NO: 493170 - RNA, 21 nt, Human
ggagggcgggcugcggccccc

SEQ ID NO: 493171 - RNA, 22 nt, Human
ggagggcgggcugcggcccccg

SEQ ID NO: 493172 - RNA, 24 nt, Human
ggagggucucacucagaggguaaa

SEQ ID NO: 493173 - RNA, 19 nt, Human
guacaaaagagcaaaacug

SEQ ID NO: 493174 - RNA, 22 nt, Human
guccugggaccugccuccagcc

SEQ ID NO: 493175 - RNA, 19 nt, Human
uaaaaaauagauaaaaugc

SEQ ID NO: 493176 - RNA, 21 nt, Human
uacaaacaaggauaacaggug

SEQ ID NO: 493177 - RNA, 21 nt, Human
uaugcuuauucuuucaaauac

SEQ ID NO: 493178 - RNA, 27 nt, Human
ucccucagggggcugugaaaacaccuu

SEQ ID NO: 493179 - RNA, 25 nt, Human
ucggagacccugcgucccuucccuc

SEQ ID NO: 493180 - RNA, 21 nt, Human
ugagaagaagcaaaaaaguua

SEQ ID NO: 493181 - RNA, 20 nt, Human
ugcucccuucuccugaaaca

SEQ ID NO: 493182 - RNA, 21 nt, Human
ugcucccuucuccugaaacaa

SEQ ID NO: 493183 - RNA, 22 nt, Human
uuaauaaacagaagcauaugcu

SEQ ID NO: 493184 - RNA, 21 nt, Human
uuccaagaaucaaaauuucaa

SEQ ID NO: 493185 - RNA, 20 nt, Human
uuccugaaaacagacuuccg

SEQ ID NO: 493186 - RNA, 21 nt, Human
uuccugagaagaagcaaaaaa

SEQ ID NO: 493187 - RNA, 23 nt, Human
aaaaacggagacaguuaaaagga

SEQ ID NO: 493188 - RNA, 21 nt, Human
aaaaagaaauaaaaaaucagc

SEQ ID NO: 493189 - RNA, 30 nt, Human
aaacaacaggucucaguguauuguaaacaa

SEQ ID NO: 493190 - RNA, 18 nt, Human
aaacagaagcaaggacuc

SEQ ID NO: 493191 - RNA, 20 nt, Human
aaacagaagcaaggacucaa

SEQ ID NO: 493192 - RNA, 20 nt, Human
aagaaaaaaacggagacagu

SEQ ID NO: 493193 - RNA, 20 nt, Human
aagccagaagccaggaggaa

SEQ ID NO: 493194 - RNA, 18 nt, Human
aaugaagaaaccacucua

SEQ ID NO: 493195 - RNA, 20 nt, Human
acaaaccauuccuucccuau

SEQ ID NO: 493196 - RNA, 18 nt, Human
acugccggaacuugucca

SEQ ID NO: 493197 - RNA, 20 nt, Human
agaaauaaaaaaucagcuug

SEQ ID NO: 493198 - RNA, 19 nt, Human
agcaaacagaagcaaggac

SEQ ID NO: 493199 - RNA, 18 nt, Human
aggaaagaaaaagugucu

SEQ ID NO: 493200 - RNA, 23 nt, Human
aggaaagaaaaagugucucccac

SEQ ID NO: 493201 - RNA, 19 nt, Human
auauauauauauauauaua

SEQ ID NO: 493202 - RNA, 19 nt, Human
auauauauauauauauaua

SEQ ID NO: 493203 - RNA, 19 nt, Human
auauauauauauauauaua

SEQ ID NO: 493204 - RNA, 19 nt, Human
auauauauauauauauaua

SEQ ID NO: 493205 - RNA, 23 nt, Human
aucacagcuucuaagauccaaca

SEQ ID NO: 493206 - RNA, 21 nt, Human
augaacugccggaacuugucc

SEQ ID NO: 493207 - RNA, 22 nt, Human
augaguuuccuuuucuguaaag

SEQ ID NO: 493208 - RNA, 23 nt, Human
augcaucuggugcuggcuaauaa

SEQ ID NO: 493209 - RNA, 22 nt, Human
augguaauaaaaugcaauuuuc

SEQ ID NO: 493210 - RNA, 25 nt, Human
auguaggccaacuugugcucucuug

SEQ ID NO: 493211 - RNA, 26 nt, Human
auuuucuuuuccuccaguguucaguu

SEQ ID NO: 493212 - RNA, 21 nt, Human
caaaaaaaaagaaauaaaaaa

SEQ ID NO: 493213 - RNA, 18 nt, Human
cacacaaaacaacagguc

SEQ ID NO: 493214 - RNA, 19 nt, Human
cacacaaaacaacaggucu

SEQ ID NO: 493215 - RNA, 18 nt, Human
caccgcacaaucaagggc

SEQ ID NO: 493216 - RNA, 21 nt, Human
cagcuucuaagauccaacacc

SEQ ID NO: 493217 - RNA, 19 nt, Human
caguguucaguugcuccuc

SEQ ID NO: 493218 - RNA, 18 nt, Human
caugaaugaagaaaccac

SEQ ID NO: 493219 - RNA, 25 nt, Human
cauuucuucuuauggaagccagaag

SEQ ID NO: 493220 - RNA, 23 nt, Human
ccuaucuccucuccugccuucug

SEQ ID NO: 493221 - RNA, 20 nt, Human
ccucuccugccuucugauau

SEQ ID NO: 493222 - RNA, 21 nt, Human
cuucugaggagaaaauguggu

SEQ ID NO: 493223 - RNA, 20 nt, Human
gaguuuccuuuucuguaaag

SEQ ID NO: 493224 - RNA, 21 nt, Human
ggccgaauggucgaaauaaga

SEQ ID NO: 493225 - RNA, 23 nt, Human
ggggaaaauaugacacgauauuu

SEQ ID NO: 493226 - RNA, 24 nt, Human
gguaauaaaaugcaauuuucagaa

SEQ ID NO: 493227 - RNA, 18 nt, Human
ggugaucgaguagaacug

SEQ ID NO: 493228 - RNA, 25 nt, Human
ggugcaacuggguuacuuuugcagg

SEQ ID NO: 493229 - RNA, 23 nt, Human
guaggccaacuugugcucucuug

SEQ ID NO: 493230 - RNA, 21 nt, Human
gugcaucugagccaucacagc

SEQ ID NO: 493231 - RNA, 19 nt, Human
uaaaaagcccaacagagag

SEQ ID NO: 493232 - RNA, 22 nt, Human
uaaaaggacaaccaaaaagaua

SEQ ID NO: 493233 - RNA, 21 nt, Human
uaaacaccaucaaaaccucca

SEQ ID NO: 493234 - RNA, 24 nt, Human
uaacauugauaagcguguuggcca

SEQ ID NO: 493235 - RNA, 23 nt, Human
uaagcagacuauaacucacaagg

SEQ ID NO: 493236 - RNA, 23 nt, Human
uacaucacgauaucaccagucug

SEQ ID NO: 493237 - RNA, 19 nt, Human
uagaaacuagagcccugcu

SEQ ID NO: 493238 - RNA, 19 nt, Human
uagagcccugcugauaggc

SEQ ID NO: 493239 - RNA, 25 nt, Human
uagcaaaaacuuccaucccacuaga

SEQ ID NO: 493240 - RNA, 19 nt, Human
uagcugguuauccucagcc

SEQ ID NO: 493241 - RNA, 19 nt, Human
uauauauauauauauauau

SEQ ID NO: 493242 - RNA, 19 nt, Human
uauauauauauauauauau

SEQ ID NO: 493243 - RNA, 18 nt, Human
ucaaugccugacauucag

SEQ ID NO: 493244 - RNA, 23 nt, Human
ucacaauauauauauauauauau

SEQ ID NO: 493245 - RNA, 23 nt, Human
ucagaagcaucuuggugaucgag

SEQ ID NO: 493246 - RNA, 22 nt, Human
ucagacacuucacagggugcaa

SEQ ID NO: 493247 - RNA, 22 nt, Human
ucagcaggccugaaauucugca

SEQ ID NO: 493248 - RNA, 27 nt, Human
ucagugccugacagaaucagcauuugg

SEQ ID NO: 493249 - RNA, 24 nt, Human
uccaacaccgcacaaucaagggcu

SEQ ID NO: 493250 - RNA, 22 nt, Human
uccuagaaacuagagcccugcu

SEQ ID NO: 493251 - RNA, 19 nt, Human
ucggaggcuuucucaucuc

SEQ ID NO: 493252 - RNA, 24 nt, Human
ucuaaaaacuucaucagcaggccu

SEQ ID NO: 493253 - RNA, 24 nt, Human
ucuauguuuaaaacaagccggggc

SEQ ID NO: 493254 - RNA, 24 nt, Human
ucucccacaauccuucucugggag

SEQ ID NO: 493255 - RNA, 25 nt, Human
ucucccacaauccuucucugggagu

SEQ ID NO: 493256 - RNA, 24 nt, Human
ucuucuuauggaagccagaagcug

SEQ ID NO: 493257 - RNA, 28 nt, Human
ucuuuucuuuucugguccauuuuauuuu

SEQ ID NO: 493258 - RNA, 21 nt, Human
ugagcaaacagaagcaaggac

SEQ ID NO: 493259 - RNA, 24 nt, Human
ugcauuuuuaaauaaaagaaaaaa

SEQ ID NO: 493260 - RNA, 25 nt, Human
ugcauuuuuaaauaaaagaaaaaaa

SEQ ID NO: 493261 - RNA, 24 nt, Human
ugccggaacuuguccacccuuuuu

SEQ ID NO: 493262 - RNA, 22 nt, Human
uggauauggcaucaauuugaug

SEQ ID NO: 493263 - RNA, 24 nt, Human
uggcagauggauugaucuuucaca

SEQ ID NO: 493264 - RNA, 22 nt, Human
uguaaacaccaucaaaaccucc

SEQ ID NO: 493265 - RNA, 22 nt, Human
uucacaauauauauauauauau

SEQ ID NO: 493266 - RNA, 18 nt, Human
uucacaugaaugaagaaa

SEQ ID NO: 493267 - RNA, 21 nt, Human
uucagugccugacagaaucag

SEQ ID NO: 493268 - RNA, 18 nt, Human
uuccuagaaacuagagcc

SEQ ID NO: 493269 - RNA, 25 nt, Human
uuguccacccuuuuugcuagaggca

SEQ ID NO: 493270 - RNA, 23 nt, Human
uuucacaauauauauauauauau

SEQ ID NO: 493271 - RNA, 27 nt, Human
uuuucacaugaaugaagaaaccacucu

SEQ ID NO: 493272 - RNA, 24 nt, Human
uuuuucuccauuucuucuuaugga

SEQ ID NO: 493273 - RNA, 21 nt, Human
aggaaaacaaaaccaggucca

SEQ ID NO: 493274 - RNA, 21 nt, Human
caaaaccagguccaaucuaug

SEQ ID NO: 493275 - RNA, 24 nt, Human
caacaagucaacagcugcaggaaa

SEQ ID NO: 493276 - RNA, 22 nt, Human
caacagcugcaggaaaacaaaa

SEQ ID NO: 493277 - RNA, 19 nt, Human
caggccccaggcagcaagg

SEQ ID NO: 493278 - RNA, 18 nt, Human
gaggaagucaggaaaggc

SEQ ID NO: 493279 - RNA, 20 nt, Human
ucuaagaggaagucaggaaa

SEQ ID NO: 493280 - RNA, 23 nt, Human
ucuaugaucuaagaggaagucag

SEQ ID NO: 493281 - RNA, 18 nt, Human
uggcaaggggaaucccac

SEQ ID NO: 493282 - RNA, 21 nt, Human
uuauuguacuucagggcaaca

SEQ ID NO: 493283 - RNA, 19 nt, Human
uuggaagagagauccaaag

SEQ ID NO: 493284 - RNA, 22 nt, Human
aacacagcaaaggagaccaucu

SEQ ID NO: 493285 - RNA, 18 nt, Human
accauuauaaagaauaag

SEQ ID NO: 493286 - RNA, 19 nt, Human
agccucauugaaagacaaa

SEQ ID NO: 493287 - RNA, 23 nt, Human
caacacaaaagagcgagaagaau

SEQ ID NO: 493288 - RNA, 18 nt, Human
cacacacgcaugugugug

SEQ ID NO: 493289 - RNA, 27 nt, Human
caccaacacugaugauuuaucuuuaau

SEQ ID NO: 493290 - RNA, 24 nt, Human
caucuucauuccaaaucuacaagg

SEQ ID NO: 493291 - RNA, 25 nt, Human
ccaacacugaugauuuaucuuuaau

SEQ ID NO: 493292 - RNA, 20 nt, Human
uaaaccaacacaaaagagcu

SEQ ID NO: 493293 - RNA, 24 nt, Human
uauaugcacacacgcaugugugug

SEQ ID NO: 493294 - RNA, 25 nt, Human
uauaugcacacacgcaugugugugg

SEQ ID NO: 493295 - RNA, 18 nt, Human
ugaaagacaaaaaagaug

SEQ ID NO: 493296 - RNA, 23 nt, Human
ugaaagacaaaaaagaugugcaa

SEQ ID NO: 493297 - RNA, 21 nt, Human
ugcacacacgcaugugugugu

SEQ ID NO: 493298 - RNA, 23 nt, Human
uucuucauaaaccaacacaaaag

SEQ ID NO: 493299 - RNA, 20 nt, Human
accacagaaaggccugcagg

SEQ ID NO: 493300 - RNA, 25 nt, Human
agaaaggccugcaggagccagauug

SEQ ID NO: 493301 - RNA, 20 nt, Human
agaccacagaaaggccugca

SEQ ID NO: 493302 - RNA, 19 nt, Human
agcuggacuggaggggcuu

SEQ ID NO: 493303 - RNA, 21 nt, Human
agugaaaggggcagcccagga

SEQ ID NO: 493304 - RNA, 21 nt, Human
agugauccugggcccagccuc

SEQ ID NO: 493305 - RNA, 23 nt, Human
ccaaagauuuauuuugcaaguga

SEQ ID NO: 493306 - RNA, 21 nt, Human
ccugggcccagccucaaagcu

SEQ ID NO: 493307 - RNA, 20 nt, Human
gaaggcaaggcugagagcag

SEQ ID NO: 493308 - RNA, 21 nt, Human
gcccagccucaaagcuggacu

SEQ ID NO: 493309 - RNA, 21 nt, Human
ggagccagauugcggccccca

SEQ ID NO: 493310 - RNA, 24 nt, Human
gggcagcccaggagacccagaaaa

SEQ ID NO: 493311 - RNA, 19 nt, Human
ugaaaggggcagcccagga

SEQ ID NO: 493312 - RNA, 18 nt, Human
ugauccugggcccagccu

SEQ ID NO: 493313 - RNA, 20 nt, Human
ugcggcccccaggaaaaccc

SEQ ID NO: 493314 - RNA, 26 nt, Human
aaacaagagaugaaauaaagggaccc

SEQ ID NO: 493315 - RNA, 19 nt, Human
aagcagcugcucccuggga

SEQ ID NO: 493316 - RNA, 19 nt, Human
aagccuggucacaguguuc

SEQ ID NO: 493317 - RNA, 24 nt, Human
acacagucgccaucuacaaaagcc

SEQ ID NO: 493318 - RNA, 20 nt, Human
acacuccaucaggaggaagg

SEQ ID NO: 493319 - RNA, 23 nt, Human
acucgauccacgccccacaccac

SEQ ID NO: 493320 - RNA, 24 nt, Human
agaggcccaaagagcuaggucaag

SEQ ID NO: 493321 - RNA, 25 nt, Human
agaggguaaaggagcagcuucugga

SEQ ID NO: 493322 - RNA, 24 nt, Human
aggcagaggccaccuugcacgcag

SEQ ID NO: 493323 - RNA, 26 nt, Human
caaguaacacugcuuacucuugcugu

SEQ ID NO: 493324 - RNA, 22 nt, Human
cacacugcccccguggccacgc

SEQ ID NO: 493325 - RNA, 21 nt, Human
cacaggauccgacacuccagg

SEQ ID NO: 493326 - RNA, 24 nt, Human
cacccaaagccuccugccacagga

SEQ ID NO: 493327 - RNA, 20 nt, Human
cagcaggaggggagagcucu

SEQ ID NO: 493328 - RNA, 21 nt, Human
cagcuacacucgauccacgcc

SEQ ID NO: 493329 - RNA, 20 nt, Human
caggagaggcccaaagagcu

SEQ ID NO: 493330 - RNA, 24 nt, Human
caggcagaggccaccuugcacgca

SEQ ID NO: 493331 - RNA, 24 nt, Human
caguagugagccacccaaagccuc

SEQ ID NO: 493332 - RNA, 29 nt, Human
ccaaagccuccugccacaggagcaguagg

SEQ ID NO: 493333 - RNA, 19 nt, Human
ccacaguggcggccuuggc

SEQ ID NO: 493334 - RNA, 18 nt, Human
ccacccaaagccuccugc

SEQ ID NO: 493335 - RNA, 21 nt, Human
ccagugaugagguggauggag

SEQ ID NO: 493336 - RNA, 22 nt, Human
ccaucuacaaaagccuggucac

SEQ ID NO: 493337 - RNA, 20 nt, Human
cccaaagagcuaggucaagc

SEQ ID NO: 493338 - RNA, 20 nt, Human
cccaaagccuccugccacag

SEQ ID NO: 493339 - RNA, 22 nt, Human
cccaaauaugaaaugccuucuc

SEQ ID NO: 493340 - RNA, 21 nt, Human
ccccacaccacauacaggcug

SEQ ID NO: 493341 - RNA, 19 nt, Human
cccguggccacgcauggcu

SEQ ID NO: 493342 - RNA, 22 nt, Human
cccguggccacgcauggcuguc

SEQ ID NO: 493343 - RNA, 18 nt, Human
cccugggaggggagcggg

SEQ ID NO: 493344 - RNA, 21 nt, Human
cccuugggagugagcaccguc

SEQ ID NO: 493345 - RNA, 22 nt, Human
cguggccacgcauggcugucug

SEQ ID NO: 493346 - RNA, 21 nt, Human
cucacaggauccgacacucca

SEQ ID NO: 493347 - RNA, 21 nt, Human
cucgauccacgccccacacca

SEQ ID NO: 493348 - RNA, 19 nt, Human
cugcugccuccccaugcag

SEQ ID NO: 493349 - RNA, 26 nt, Human
cugcugccuccccaugcaguccagug

SEQ ID NO: 493350 - RNA, 18 nt, Human
gacuuugcaguacaucuc

SEQ ID NO: 493351 - RNA, 23 nt, Human
gagccacccaaagccuccugcca

SEQ ID NO: 493352 - RNA, 21 nt, Human
gcaggagaggcccaaagagcu

SEQ ID NO: 493353 - RNA, 22 nt, Human
gccacccaaagccuccugccac

SEQ ID NO: 493354 - RNA, 20 nt, Human
gcugcuccagagcaauccag

SEQ ID NO: 493355 - RNA, 23 nt, Human
ggcccaaagagcuaggucaagca

SEQ ID NO: 493356 - RNA, 18 nt, Human
gggaggggagcgggagac

SEQ ID NO: 493357 - RNA, 22 nt, Human
gggcaggagaggcccaaagagc

SEQ ID NO: 493358 - RNA, 21 nt, Human
gguaaaggagcagcuucugga

SEQ ID NO: 493359 - RNA, 19 nt, Human
uacaggcugcugucuccca

SEQ ID NO: 493360 - RNA, 23 nt, Human
uacucacaggauccgacacucca

SEQ ID NO: 493361 - RNA, 18 nt, Human
uagugagccacccaaagc

SEQ ID NO: 493362 - RNA, 20 nt, Human
uagugagccacccaaagccu

SEQ ID NO: 493363 - RNA, 22 nt, Human
ucacacugcccccguggccacg

SEQ ID NO: 493364 - RNA, 24 nt, Human
ucacaggauccgacacuccaggca

SEQ ID NO: 493365 - RNA, 19 nt, Human
ucaguagugagccacccaa

SEQ ID NO: 493366 - RNA, 18 nt, Human
uccacgccccacaccaca

SEQ ID NO: 493367 - RNA, 20 nt, Human
uccagugaugagguggaugg

SEQ ID NO: 493368 - RNA, 23 nt, Human
uccucacacugcccccguggcca

SEQ ID NO: 493369 - RNA, 22 nt, Human
ucguaaacaagagaugaaauaa

SEQ ID NO: 493370 - RNA, 22 nt, Human
ugacuggaaaccuuagccccca

SEQ ID NO: 493371 - RNA, 27 nt, Human
ugacuggaaaccuuagcccccaaauau

SEQ ID NO: 493372 - RNA, 22 nt, Human
ugacuggcgacuuugcaguaca

SEQ ID NO: 493373 - RNA, 21 nt, Human
uggaaaccuuagcccccaaau

SEQ ID NO: 493374 - RNA, 22 nt, Human
uugcacuauauuucgucuuccc

SEQ ID NO: 493375 - RNA, 26 nt, Human
uuucacagcuacacucgauccacgcc

SEQ ID NO: 493376 - RNA, 22 nt, Human
aggcugcgcuccgcucccuucg

SEQ ID NO: 493377 - RNA, 21 nt, Human
ccaagguccugcccuggaggc

SEQ ID NO: 493378 - RNA, 21 nt, Human
ccccaggccaggcugcgcucc

SEQ ID NO: 493379 - RNA, 23 nt, Human
ccccaggccaggcugcgcuccgc

SEQ ID NO: 493380 - RNA, 22 nt, Human
ccggccgcgcucggcuccucuu

SEQ ID NO: 493381 - RNA, 23 nt, Human
ccggccugggcuucuccggucau

SEQ ID NO: 493382 - RNA, 21 nt, Human
ccuccaagguccugcccugga

SEQ ID NO: 493383 - RNA, 19 nt, Human
ccuucggacgggcucgguu

SEQ ID NO: 493384 - RNA, 19 nt, Human
gccgcgcucggcuccucuu

SEQ ID NO: 493385 - RNA, 21 nt, Human
ggagaaauccaaggaguggga

SEQ ID NO: 493386 - RNA, 23 nt, Human
ggccccaggccaggcugcgcucc

SEQ ID NO: 493387 - RNA, 22 nt, Human
gggcucagcccagucgccaggg

SEQ ID NO: 493388 - RNA, 22 nt, Human
ucggacgggcucgguuccuucc

SEQ ID NO: 493389 - RNA, 21 nt, Human
ucgguuccuuccggccgcgcu

SEQ ID NO: 493390 - RNA, 24 nt, Human
ucguuguuccucccuccaaggucc

SEQ ID NO: 493391 - RNA, 23 nt, Human
ucugcucguuguuccucccucca

SEQ ID NO: 493392 - RNA, 21 nt, Human
uggaggcuccaggagaaaucc

SEQ ID NO: 493393 - RNA, 20 nt, Human
uguguuacauacacagcacg

SEQ ID NO: 493394 - RNA, 23 nt, Human
aaaaaaacagacacaaaaaguga

SEQ ID NO: 493395 - RNA, 23 nt, Human
aaaaaacagacacaaaaagugau

SEQ ID NO: 493396 - RNA, 20 nt, Human
aaaaaagaacacccugugac

SEQ ID NO: 493397 - RNA, 24 nt, Human
aaaaacccaccaaguagcaacauc

SEQ ID NO: 493398 - RNA, 26 nt, Human
aaaaagaacacccugugacaaagaua

SEQ ID NO: 493399 - RNA, 19 nt, Human
aaaacaaccuucugaccac

SEQ ID NO: 493400 - RNA, 21 nt, Human
aaacaaccuucugaccaccgc

SEQ ID NO: 493401 - RNA, 22 nt, Human
aaacagacacaaaaagugaugc

SEQ ID NO: 493402 - RNA, 25 nt, Human
aaacagacacaaaaagugaugcucg

SEQ ID NO: 493403 - RNA, 22 nt, Human
aaacaguaaauuaaguuccccu

SEQ ID NO: 493404 - RNA, 19 nt, Human
aaacaguaucuuacuaauu

SEQ ID NO: 493405 - RNA, 20 nt, Human
aaaccacguuuuggcugaug

SEQ ID NO: 493406 - RNA, 21 nt, Human
aaauaaaaagguuaagcaacc

SEQ ID NO: 493407 - RNA, 22 nt, Human
aaaucaugaaauccauuuuaac

SEQ ID NO: 493408 - RNA, 23 nt, Human
aacaaugauagcaaagcauaguc

SEQ ID NO: 493409 - RNA, 18 nt, Human
aacaccaccuacaauaca

SEQ ID NO: 493410 - RNA, 20 nt, Human
aacaguaaauuaaguucccc

SEQ ID NO: 493411 - RNA, 26 nt, Human
aaccuugcccuccucacaagcugugc

SEQ ID NO: 493412 - RNA, 25 nt, Human
aagaaagcaauacaagaacaaaacc

SEQ ID NO: 493413 - RNA, 22 nt, Human
aagaacaaaacccaaauacuuu

SEQ ID NO: 493414 - RNA, 25 nt, Human
aagaggagacagaauaacaccagaa

SEQ ID NO: 493415 - RNA, 21 nt, Human
aaguagcaacaucuaugcaaa

SEQ ID NO: 493416 - RNA, 20 nt, Human
aauaaucacaguucaaaaac

SEQ ID NO: 493417 - RNA, 20 nt, Human
aauaugaaaacauuucccuc

SEQ ID NO: 493418 - RNA, 20 nt, Human
aaucacaguucaaaaacuaa

SEQ ID NO: 493419 - RNA, 23 nt, Human
aaucauauaauuucacaauuaaa

SEQ ID NO: 493420 - RNA, 20 nt, Human
acaaagaaagcuuuggcuga

SEQ ID NO: 493421 - RNA, 18 nt, Human
acaaagaagaggagacag

SEQ ID NO: 493422 - RNA, 19 nt, Human
acaaagaagaggagacaga

SEQ ID NO: 493423 - RNA, 23 nt, Human
acuaaaagggguuaccauaaauc

SEQ ID NO: 493424 - RNA, 19 nt, Human
acuccguuacucauuuucu

SEQ ID NO: 493425 - RNA, 29 nt, Human
agaaaaaaaaaaaaacagacacaaaaagg

SEQ ID NO: 493426 - RNA, 18 nt, Human
agacuagagaaaguuagg

SEQ ID NO: 493427 - RNA, 23 nt, Human
agagucccaguaguugccaaaua

SEQ ID NO: 493428 - RNA, 24 nt, Human
aggaagaagacaacccgguaagaa

SEQ ID NO: 493429 - RNA, 21 nt, Human
aggagcucaacaaauacuagu

SEQ ID NO: 493430 - RNA, 19 nt, Human
aggccugaagugcuuggca

SEQ ID NO: 493431 - RNA, 23 nt, Human
agguuaaaaaaaucuuuccauaa

SEQ ID NO: 493432 - RNA, 21 nt, Human
aguagauuuauuuuauguaga

SEQ ID NO: 493433 - RNA, 22 nt, Human
auacuaccacagauaacaaacc

SEQ ID NO: 493434 - RNA, 18 nt, Human
auaggaaaaaaauauuau

SEQ ID NO: 493435 - RNA, 24 nt, Human
caaaaucagugcuggagccaggaa

SEQ ID NO: 493436 - RNA, 19 nt, Human
caaaauuaguggaaaacac

SEQ ID NO: 493437 - RNA, 23 nt, Human
cacaguucaaaaacuaaagugaa

SEQ ID NO: 493438 - RNA, 19 nt, Human
caccacaguuuucucccag

SEQ ID NO: 493439 - RNA, 18 nt, Human
cagaacuaagcucgaacg

SEQ ID NO: 493440 - RNA, 20 nt, Human
cagaauaacaccagaacuaa

SEQ ID NO: 493441 - RNA, 18 nt, Human
cagcaccugcgccgccuc

SEQ ID NO: 493442 - RNA, 23 nt, Human
caggcaaauauggaauauacuga

SEQ ID NO: 493443 - RNA, 22 nt, Human
cauugcacgccgugggacuccg

SEQ ID NO: 493444 - RNA, 26 nt, Human
ccaagaaaaaaaaaaaaacagacaca

SEQ ID NO: 493445 - RNA, 23 nt, Human
ccacacugccuucccccuuugaa

SEQ ID NO: 493446 - RNA, 26 nt, Human
cccaacccuuggacaguucucuagga

SEQ ID NO: 493447 - RNA, 19 nt, Human
cccccgagccggccgggag

SEQ ID NO: 493448 - RNA, 23 nt, Human
ccggcgccuccccucgggcgccu

SEQ ID NO: 493449 - RNA, 22 nt, Human
ccuccccucgggcgccuucucc

SEQ ID NO: 493450 - RNA, 18 nt, Human
cgagccggccgggagccg

SEQ ID NO: 493451 - RNA, 23 nt, Human
cgccgccuccgaaacgcgaucug

SEQ ID NO: 493452 - RNA, 24 nt, Human
cgucacaaccuugcccuccucaca

SEQ ID NO: 493453 - RNA, 18 nt, Human
cucguggaugucauaacu

SEQ ID NO: 493454 - RNA, 27 nt, Human
cuggaaacaguaaauuaaguuccccuu

SEQ ID NO: 493455 - RNA, 24 nt, Human
cuuacuaauauauucuagcuguac

SEQ ID NO: 493456 - RNA, 21 nt, Human
cuucauaaaaaagaacacccu

SEQ ID NO: 493457 - RNA, 22 nt, Human
cuuccagcauaauuccauugug

SEQ ID NO: 493458 - RNA, 25 nt, Human
gaaaaaaaaaaaaacagacacaaaa

SEQ ID NO: 493459 - RNA, 22 nt, Human
gaacaauuuaagguacaaaaca

SEQ ID NO: 493460 - RNA, 18 nt, Human
gaacacccugugacaaag

SEQ ID NO: 493461 - RNA, 19 nt, Human
gacagaaauaaaaaaauuc

SEQ ID NO: 493462 - RNA, 19 nt, Human
gauagaauaaaaccaccaa

SEQ ID NO: 493463 - RNA, 21 nt, Human
gaucuguccggcgccuccccu

SEQ ID NO: 493464 - RNA, 18 nt, Human
gcugaacuugaccgacau

SEQ ID NO: 493465 - RNA, 20 nt, Human
ggaaaaaauucucaccacaa

SEQ ID NO: 493466 - RNA, 20 nt, Human
ggagccaggaagagaauuug

SEQ ID NO: 493467 - RNA, 23 nt, Human
ggagccaggaagagaauuuggau

SEQ ID NO: 493468 - RNA, 19 nt, Human
ggaggaggauggagcucga

SEQ ID NO: 493469 - RNA, 23 nt, Human
ggcgccuucucccccgagccggc

SEQ ID NO: 493470 - RNA, 20 nt, Human
guagaacuuuuauuuggaaa

SEQ ID NO: 493471 - RNA, 21 nt, Human
guuuacagcaccugcgccgcc

SEQ ID NO: 493472 - RNA, 24 nt, Human
uaaaaaaauucauguugaaacuga

SEQ ID NO: 493473 - RNA, 21 nt, Human
uaaaacaaccuucugaccacc

SEQ ID NO: 493474 - RNA, 24 nt, Human
uaacugacagaaauaaaaaaauuc

SEQ ID NO: 493475 - RNA, 22 nt, Human
uaagacaggauuaugguuugca

SEQ ID NO: 493476 - RNA, 24 nt, Human
uaagacaggauuaugguuugcagu

SEQ ID NO: 493477 - RNA, 20 nt, Human
uaagcucgaacgucacaacc

SEQ ID NO: 493478 - RNA, 18 nt, Human
uaagguacaaaacaaaga

SEQ ID NO: 493479 - RNA, 19 nt, Human
uaagguacaaaacaaagaa

SEQ ID NO: 493480 - RNA, 25 nt, Human
uaauguucauuuucucacuucaaaa

SEQ ID NO: 493481 - RNA, 20 nt, Human
uacaaagucuucagcuuugg

SEQ ID NO: 493482 - RNA, 19 nt, Human
uacaguuuuaaauaagaca

SEQ ID NO: 493483 - RNA, 18 nt, Human
uaccacagauaacaaacc

SEQ ID NO: 493484 - RNA, 19 nt, Human
uaccacagauaacaaaccc

SEQ ID NO: 493485 - RNA, 19 nt, Human
uacuaugaauauuaaucca

SEQ ID NO: 493486 - RNA, 22 nt, Human
uagcuguacaaacaugccuguu

SEQ ID NO: 493487 - RNA, 19 nt, Human
uauaacaguauaccaauaa

SEQ ID NO: 493488 - RNA, 21 nt, Human
uaugaaguuagaaggcaucuu

SEQ ID NO: 493489 - RNA, 19 nt, Human
uaugcaaacacaccgaaua

SEQ ID NO: 493490 - RNA, 21 nt, Human
uauuaauccaagccaaaagaa

SEQ ID NO: 493491 - RNA, 19 nt, Human
uauuauuagcacuuuagag

SEQ ID NO: 493492 - RNA, 21 nt, Human
uauugaggaaagguaacaaug

SEQ ID NO: 493493 - RNA, 18 nt, Human
uauuugaagguuauucug

SEQ ID NO: 493494 - RNA, 22 nt, Human
uauuuuauuugaagguuauucu

SEQ ID NO: 493495 - RNA, 28 nt, Human
ucaccaagccaguucucagagacuguau

SEQ ID NO: 493496 - RNA, 23 nt, Human
ucgagcgcugaacuugaccgaca

SEQ ID NO: 493497 - RNA, 18 nt, Human
ucucugggcaaauaggag

SEQ ID NO: 493498 - RNA, 24 nt, Human
ugaaaaacguauacuucuguuuaa

SEQ ID NO: 493499 - RNA, 19 nt, Human
ugaaaaucuuaaugucucc

SEQ ID NO: 493500 - RNA, 23 nt, Human
ugaaagaaagcaauacaagaaca

SEQ ID NO: 493501 - RNA, 20 nt, Human
ugaacuaaaagggguuacca

SEQ ID NO: 493502 - RNA, 19 nt, Human
ugaacuugaccgacaugua

SEQ ID NO: 493503 - RNA, 23 nt, Human
ugaagugcuuggcauuuuauauu

SEQ ID NO: 493504 - RNA, 20 nt, Human
ugaaucauaucuuaaugggg

SEQ ID NO: 493505 - RNA, 18 nt, Human
ugacagaaggagaauauc

SEQ ID NO: 493506 - RNA, 25 nt, Human
ugacaguagacuagagaaaguuagg

SEQ ID NO: 493507 - RNA, 24 nt, Human
ugacucgugagguucaaaaggacc

SEQ ID NO: 493508 - RNA, 24 nt, Human
ugagaaaaagguaaaagcagucaa

SEQ ID NO: 493509 - RNA, 19 nt, Human
ugagauuauuauuagcacu

SEQ ID NO: 493510 - RNA, 21 nt, Human
ugagggaaaaucaugaaaucc

SEQ ID NO: 493511 - RNA, 20 nt, Human
ugcacgccgugggacuccgu

SEQ ID NO: 493512 - RNA, 18 nt, Human
ugcaugacucucuuuaaa

SEQ ID NO: 493513 - RNA, 22 nt, Human
ugcucuucaggaagaagacaac

SEQ ID NO: 493514 - RNA, 24 nt, Human
ugcucuucaggaagaagacaaccc

SEQ ID NO: 493515 - RNA, 20 nt, Human
uggagcacaacugccagaaa

SEQ ID NO: 493516 - RNA, 21 nt, Human
uggcugaugacaaagaagagg

SEQ ID NO: 493517 - RNA, 19 nt, Human
ugggacuccguuacucauu

SEQ ID NO: 493518 - RNA, 21 nt, Human
ugugcauacggagaaaaaccc

SEQ ID NO: 493519 - RNA, 23 nt, Human
ugugcauacggagaaaaacccac

SEQ ID NO: 493520 - RNA, 22 nt, Human
uguguuuugcauuuugagcacc

SEQ ID NO: 493521 - RNA, 25 nt, Human
uguuuuaguuucugacuuaaagguu

SEQ ID NO: 493522 - RNA, 27 nt, Human
uuaaaugcuuagaaaagcacaccaaca

SEQ ID NO: 493523 - RNA, 25 nt, Human
uugaaagaaagcaauacaagaacaa

SEQ ID NO: 493524 - RNA, 19 nt, Human
uuuuucuuuugaggggcug

SEQ ID NO: 493525 - RNA, 23 nt, Human
aaaaaauaacaaauaauaaaggg

SEQ ID NO: 493526 - RNA, 21 nt, Human
aaaauaacaaauaauaaaggg

SEQ ID NO: 493527 - RNA, 24 nt, Human
aacaaauaauaaagggguuauggc

SEQ ID NO: 493528 - RNA, 23 nt, Human
aacaauugaaaaaauucuguuaa

SEQ ID NO: 493529 - RNA, 21 nt, Human
aagcaagggaagacuuauggc

SEQ ID NO: 493530 - RNA, 20 nt, Human
acagcacaugauauaugaag

SEQ ID NO: 493531 - RNA, 23 nt, Human
cagcaucaaccugccuuaaugcu

SEQ ID NO: 493532 - RNA, 28 nt, Human
cauguuuauuucaaaauagcuuuggaag

SEQ ID NO: 493533 - RNA, 19 nt, Human
uacagcacaugauauauga

SEQ ID NO: 493534 - RNA, 23 nt, Human
uagcuuuggaagauacaagcaag

SEQ ID NO: 493535 - RNA, 24 nt, Human
uauuucaaaauagcuuuggaagau

SEQ ID NO: 493536 - RNA, 21 nt, Human
ucuuugguugucucuucagcu

SEQ ID NO: 493537 - RNA, 19 nt, Human
uggaaaacaauugaaaaaa

SEQ ID NO: 493538 - RNA, 18 nt, Human
uggaagauacaagcaagg

SEQ ID NO: 493539 - RNA, 24 nt, Human
uggcaaagcaaugcaaauaaaaaa

SEQ ID NO: 493540 - RNA, 18 nt, Human
aagaacucuuuauuuggu

SEQ ID NO: 493541 - RNA, 20 nt, Human
accacaccguugcgcuuugc

SEQ ID NO: 493542 - RNA, 20 nt, Human
acccccugcgcgcaucgccu

SEQ ID NO: 493543 - RNA, 23 nt, Human
acuucgagggugcgcguuugggg

SEQ ID NO: 493544 - RNA, 19 nt, Human
agaagaacaaggcguaagg

SEQ ID NO: 493545 - RNA, 23 nt, Human
agaauuacaaaauucuggaacca

SEQ ID NO: 493546 - RNA, 19 nt, Human
agacagaaaggagccacca

SEQ ID NO: 493547 - RNA, 19 nt, Human
agagaagcugaaagaugaa

SEQ ID NO: 493548 - RNA, 19 nt, Human
agagagggaccacauugau

SEQ ID NO: 493549 - RNA, 18 nt, Human
aggagccaccauuuucua

SEQ ID NO: 493550 - RNA, 22 nt, Human
agugacuauucaccuggucuca

SEQ ID NO: 493551 - RNA, 26 nt, Human
agugucaaucccaaaccccgaacaac

SEQ ID NO: 493552 - RNA, 18 nt, Human
aucacacuuaaugaaaua

SEQ ID NO: 493553 - RNA, 25 nt, Human
augccauaaaaauaaauauuagaac

SEQ ID NO: 493554 - RNA, 24 nt, Human
caaaauucuggaaccaagucaaug

SEQ ID NO: 493555 - RNA, 26 nt, Human
cagaaaggagccaccauuuucuaucu

SEQ ID NO: 493556 - RNA, 25 nt, Human
cagaacccucagagagcugcuucuc

SEQ ID NO: 493557 - RNA, 18 nt, Human
caucuuuguuuagugggc

SEQ ID NO: 493558 - RNA, 24 nt, Human
ccagugucaaucccaaaccccgaa

SEQ ID NO: 493559 - RNA, 22 nt, Human
ccccgaacaaccaucuuuguuu

SEQ ID NO: 493560 - RNA, 18 nt, Human
ccccugcgcgcaucgccu

SEQ ID NO: 493561 - RNA, 22 nt, Human
cccgagcccagcugcccgaccc

SEQ ID NO: 493562 - RNA, 23 nt, Human
cccgccgcccgagcccagcugcc

SEQ ID NO: 493563 - RNA, 26 nt, Human
cccugcgcgcaucgccuucggccggg

SEQ ID NO: 493564 - RNA, 24 nt, Human
ccgcccgagcccagcugcccgacc

SEQ ID NO: 493565 - RNA, 19 nt, Human
ccgccugccgcgccugugc

SEQ ID NO: 493566 - RNA, 24 nt, Human
ccuacucccgccgcccgagcccag

SEQ ID NO: 493567 - RNA, 23 nt, Human
ccugcgcgcaucgccuucggccg

SEQ ID NO: 493568 - RNA, 19 nt, Human
ccuggaucacagcagcagc

SEQ ID NO: 493569 - RNA, 20 nt, Human
cgacucugacucugcagccu

SEQ ID NO: 493570 - RNA, 18 nt, Human
cgcccgagcccagcugcc

SEQ ID NO: 493571 - RNA, 22 nt, Human
cgcccugguccuggaucacagc

SEQ ID NO: 493572 - RNA, 20 nt, Human
cguggaugugcggggcugga

SEQ ID NO: 493573 - RNA, 22 nt, Human
cucaagcaaacccucaucaaug

SEQ ID NO: 493574 - RNA, 19 nt, Human
cucacuccauuauuagcac

SEQ ID NO: 493575 - RNA, 21 nt, Human
cucccugccgggcccuacucc

SEQ ID NO: 493576 - RNA, 20 nt, Human
cugcagccucccugccuccc

SEQ ID NO: 493577 - RNA, 20 nt, Human
cugccgggcccuacucccgc

SEQ ID NO: 493578 - RNA, 19 nt, Human
cugccucccugccgggccc

SEQ ID NO: 493579 - RNA, 19 nt, Human
cugccucccugccgggccc

SEQ ID NO: 493580 - RNA, 23 nt, Human
cugccucccugccgggcccuacu

SEQ ID NO: 493581 - RNA, 20 nt, Human
gacugaaguuaggggguccc

SEQ ID NO: 493582 - RNA, 24 nt, Human
gagccggugcgcccugguccugga

SEQ ID NO: 493583 - RNA, 21 nt, Human
gauuucguaguuccuuuccuu

SEQ ID NO: 493584 - RNA, 25 nt, Human
gcaagagagggaccacauugauuuc

SEQ ID NO: 493585 - RNA, 18 nt, Human
gccgcgccugugccgcgc

SEQ ID NO: 493586 - RNA, 19 nt, Human
gccgggcccuacucccgcc

SEQ ID NO: 493587 - RNA, 21 nt, Human
gcgcccugguccuggaucaca

SEQ ID NO: 493588 - RNA, 18 nt, Human
gcuuugcuucucuucccc

SEQ ID NO: 493589 - RNA, 20 nt, Human
ggcgcagcccgcgacucuga

SEQ ID NO: 493590 - RNA, 20 nt, Human
ggcgcgguggcagcagcagg

SEQ ID NO: 493591 - RNA, 21 nt, Human
ggcgcgguggcagcagcaggu

SEQ ID NO: 493592 - RNA, 23 nt, Human
ggggacugaaguuaggggguccc

SEQ ID NO: 493593 - RNA, 19 nt, Human
ggugaaagaaauaaaagga

SEQ ID NO: 493594 - RNA, 19 nt, Human
gugcuugucuccacacuga

SEQ ID NO: 493595 - RNA, 23 nt, Human
uaaaaauaaauauuagaacaguu

SEQ ID NO: 493596 - RNA, 21 nt, Human
uaaaauacuuuugcacacugu

SEQ ID NO: 493597 - RNA, 18 nt, Human
uaaggcacaugucuugca

SEQ ID NO: 493598 - RNA, 23 nt, Human
uacuuuugcacacuguaaauuuc

SEQ ID NO: 493599 - RNA, 21 nt, Human
uauacauuacauugacuagau

SEQ ID NO: 493600 - RNA, 22 nt, Human
uaucaaacacuuaugcaaaggu

SEQ ID NO: 493601 - RNA, 22 nt, Human
ucaaaagagcauguauugaaaa

SEQ ID NO: 493602 - RNA, 23 nt, Human
ucaaacacuuaugcaaagguaaa

SEQ ID NO: 493603 - RNA, 19 nt, Human
ucagagagcugcuucucau

SEQ ID NO: 493604 - RNA, 24 nt, Human
uccagugucaaucccaaaccccga

SEQ ID NO: 493605 - RNA, 18 nt, Human
ucuggaaccaagucaaug

SEQ ID NO: 493606 - RNA, 18 nt, Human
ugaaagaaauaaaaggaa

SEQ ID NO: 493607 - RNA, 20 nt, Human
ugaaauagcuucuuauuucu

SEQ ID NO: 493608 - RNA, 20 nt, Human
ugaaguuugggugcauccuu

SEQ ID NO: 493609 - RNA, 23 nt, Human
ugagaagaacaaggcguaagcau

SEQ ID NO: 493610 - RNA, 20 nt, Human
ugauaacaacuuuaucugca

SEQ ID NO: 493611 - RNA, 25 nt, Human
ugcaacuaucugccuccagugucaa

SEQ ID NO: 493612 - RNA, 19 nt, Human
ugcccagggcgcagcccgc

SEQ ID NO: 493613 - RNA, 21 nt, Human
ugcccagggcgcagcccgcga

SEQ ID NO: 493614 - RNA, 18 nt, Human
ugcguggagcgagggcgg

SEQ ID NO: 493615 - RNA, 19 nt, Human
uggaaccaagucaaugagu

SEQ ID NO: 493616 - RNA, 22 nt, Human
uggagcgagggcggccucugcc

SEQ ID NO: 493617 - RNA, 19 nt, Human
ugggugcauccuuuagcaa

SEQ ID NO: 493618 - RNA, 21 nt, Human
ugguacuauauuugugugugu

SEQ ID NO: 493619 - RNA, 20 nt, Human
ugguccuggaucacagcagc

SEQ ID NO: 493620 - RNA, 24 nt, Human
ugugcggggcuggaguucaagacu

SEQ ID NO: 493621 - RNA, 21 nt, Human
uguugcguggagcgagggcgg

SEQ ID NO: 493622 - RNA, 23 nt, Human
uuagcaaaauaagcaugucucac

SEQ ID NO: 493623 - RNA, 20 nt, Human
uuccuaaaaugucugugugc

SEQ ID NO: 493624 - RNA, 19 nt, Human
uugaaguuugaaguuuggg

SEQ ID NO: 493625 - RNA, 19 nt, Human
uuuaaucaaaagagcaugu

SEQ ID NO: 493626 - RNA, 24 nt, Human
uuucacacgauuucguaguuccuu

SEQ ID NO: 493627 - RNA, 22 nt, Human
uuuuuuuuuuuuuuuucuucag

SEQ ID NO: 493628 - RNA, 20 nt, Human
aaaaacugauuaaaauuuga

SEQ ID NO: 493629 - RNA, 21 nt, Human
aaaaagacaaacugacuuugg

SEQ ID NO: 493630 - RNA, 20 nt, Human
aaacaaaagauuacagcagc

SEQ ID NO: 493631 - RNA, 22 nt, Human
aaagaugagaggcacaaaaaga

SEQ ID NO: 493632 - RNA, 23 nt, Human
aagauuacagcagcaagccacca

SEQ ID NO: 493633 - RNA, 24 nt, Human
acaaaaacauaaaaaaaauguucc

SEQ ID NO: 493634 - RNA, 22 nt, Human
acaggcaaggcccaaacaccgg

SEQ ID NO: 493635 - RNA, 21 nt, Human
agaggcacaaaaagacaaacu

SEQ ID NO: 493636 - RNA, 25 nt, Human
agccaccacuucacacaguauuaaa

SEQ ID NO: 493637 - RNA, 19 nt, Human
aggcaaggcccaaacaccg

SEQ ID NO: 493638 - RNA, 24 nt, Human
aggcccaaacaccgggaacggcaa

SEQ ID NO: 493639 - RNA, 20 nt, Human
aguaacacaacaacaaaaca

SEQ ID NO: 493640 - RNA, 18 nt, Human
caaaaagacaaacugacu

SEQ ID NO: 493641 - RNA, 20 nt, Human
caaagaaauacugcaauuau

SEQ ID NO: 493642 - RNA, 22 nt, Human
caacaaaacaaaagauuacagc

SEQ ID NO: 493643 - RNA, 19 nt, Human
caaggcccaaacaccggga

SEQ ID NO: 493644 - RNA, 21 nt, Human
cacaaaccuuuuaagucuaca

SEQ ID NO: 493645 - RNA, 18 nt, Human
caccgucacaggcaaggc

SEQ ID NO: 493646 - RNA, 19 nt, Human
cagcagcaagccaccacuu

SEQ ID NO: 493647 - RNA, 19 nt, Human
caggcaaggcccaaacacc

SEQ ID NO: 493648 - RNA, 18 nt, Human
caguaacacaacaacaaa

SEQ ID NO: 493649 - RNA, 23 nt, Human
cauagaaaaaacugcagagcuuc

SEQ ID NO: 493650 - RNA, 21 nt, Human
ccacuucacacaguauuaaaa

SEQ ID NO: 493651 - RNA, 20 nt, Human
ccuaauguuaacccugaaau

SEQ ID NO: 493652 - RNA, 21 nt, Human
cugaaaugccacauucaguaa

SEQ ID NO: 493653 - RNA, 23 nt, Human
cugaaaugccacauucaguaaca

SEQ ID NO: 493654 - RNA, 24 nt, Human
cugcaauuaugguuaugggcuacu

SEQ ID NO: 493655 - RNA, 19 nt, Human
gaaaugccacauucaguaa

SEQ ID NO: 493656 - RNA, 18 nt, Human
gaaccuaauguuaacccu

SEQ ID NO: 493657 - RNA, 18 nt, Human
gcaagaggaugcguuugc

SEQ ID NO: 493658 - RNA, 22 nt, Human
gcaagccaccacuucacacagu

SEQ ID NO: 493659 - RNA, 18 nt, Human
gccucuucaaguauagga

SEQ ID NO: 493660 - RNA, 21 nt, Human
ggaaauaauguaauagccuuc

SEQ ID NO: 493661 - RNA, 21 nt, Human
ggacacaacuaugguuccuac

SEQ ID NO: 493662 - RNA, 27 nt, Human
gggaacggcaagaggaugccgguaccc

SEQ ID NO: 493663 - RNA, 22 nt, Human
guaacacaacaacaaaacaaaa

SEQ ID NO: 493664 - RNA, 24 nt, Human
guaauagccuuccuuccaucuccc

SEQ ID NO: 493665 - RNA, 21 nt, Human
uaacacaacaacaaaacaaaa

SEQ ID NO: 493666 - RNA, 23 nt, Human
uaacacaacaacaaaacaaaaga

SEQ ID NO: 493667 - RNA, 28 nt, Human
uaacacaacaacaaaacaaaagauuaca

SEQ ID NO: 493668 - RNA, 21 nt, Human
uaacagagaaauacaaagaaa

SEQ ID NO: 493669 - RNA, 22 nt, Human
uaaccaaauugauaccucugua

SEQ ID NO: 493670 - RNA, 20 nt, Human
uaacuaaagguuuuaagagg

SEQ ID NO: 493671 - RNA, 25 nt, Human
uaagaacacaaauccaugaaaaaac

SEQ ID NO: 493672 - RNA, 18 nt, Human
uacauaacacaaaagaaa

SEQ ID NO: 493673 - RNA, 18 nt, Human
uacuauacuaccucagaa

SEQ ID NO: 493674 - RNA, 22 nt, Human
uagaaaaaacugcagagcuuca

SEQ ID NO: 493675 - RNA, 23 nt, Human
uagucucuaaaucaguaacaauu

SEQ ID NO: 493676 - RNA, 23 nt, Human
uaugguuccuaccaguagggaga

SEQ ID NO: 493677 - RNA, 19 nt, Human
uccacaaaccuuuuaaguc

SEQ ID NO: 493678 - RNA, 26 nt, Human
ucccacauagaaaaaacugcagagcu

SEQ ID NO: 493679 - RNA, 21 nt, Human
uccuauaacaucauacugcuu

SEQ ID NO: 493680 - RNA, 24 nt, Human
ucuguaaucuuauuuauguuuccu

SEQ ID NO: 493681 - RNA, 23 nt, Human
ugcagagcuucaucucuuccuua

SEQ ID NO: 493682 - RNA, 18 nt, Human
uggcuuuuaagaaccuaa

SEQ ID NO: 493683 - RNA, 21 nt, Human
uuaacauguaauagucauaaa

SEQ ID NO: 493684 - RNA, 23 nt, Human
uucaaguacuguaagaacacaaa

SEQ ID NO: 493685 - RNA, 24 nt, Human
uugcuuuacuaauuauggaauaau

SEQ ID NO: 493686 - RNA, 20 nt, Human
aagagauagcaaguguucgg

SEQ ID NO: 493687 - RNA, 19 nt, Human
agcccgcgccuggcgcugg

SEQ ID NO: 493688 - RNA, 19 nt, Human
agguggagggagaggcugg

SEQ ID NO: 493689 - RNA, 21 nt, Human
augaaacagcagcagcaagag

SEQ ID NO: 493690 - RNA, 23 nt, Human
cagcagcagcaagagauagcaag

SEQ ID NO: 493691 - RNA, 22 nt, Human
cccgccgccgccaccgagcgca

SEQ ID NO: 493692 - RNA, 22 nt, Human
ccuuccaugaaacagcagcagc

SEQ ID NO: 493693 - RNA, 18 nt, Human
cgggcccgcacggcggag

SEQ ID NO: 493694 - RNA, 18 nt, Human
gagaggcuggcggccggg

SEQ ID NO: 493695 - RNA, 19 nt, Human
ggagaggcuggcggccggg

SEQ ID NO: 493696 - RNA, 21 nt, Human
gggcagggagagguggaggga

SEQ ID NO: 493697 - RNA, 18 nt, Human
gguggagggagaggcugg

SEQ ID NO: 493698 - RNA, 19 nt, Human
uagcaaguguucggaaguc

SEQ ID NO: 493699 - RNA, 21 nt, Human
uagcaaguguucggaagucuc

SEQ ID NO: 493700 - RNA, 19 nt, Human
uaucuccuuccaugaaaca

SEQ ID NO: 493701 - RNA, 20 nt, Human
uccugcgacugccgggcugg

SEQ ID NO: 493702 - RNA, 20 nt, Human
ugaaacagcagcagcaagag

SEQ ID NO: 493703 - RNA, 24 nt, Human
ugaaauagguauaacacuuaaaua

SEQ ID NO: 493704 - RNA, 20 nt, Human
ugggggcagggagaggugga

SEQ ID NO: 493705 - RNA, 21 nt, Human
ugggggcagggagagguggga

SEQ ID NO: 493706 - RNA, 19 nt, Human
uuuuuuuuuuuuuuuuuaa

SEQ ID NO: 493707 - RNA, 27 nt, Human
cagugaguuuacuuucagauggaauuc

SEQ ID NO: 493708 - RNA, 18 nt, Human
ugcuugaggaguauagag

SEQ ID NO: 493709 - RNA, 27 nt, Human
aaaaaaagauaaugaaaugagaagagg

SEQ ID NO: 493710 - RNA, 20 nt, Human
aaaaauaucugaacagucaa

SEQ ID NO: 493711 - RNA, 24 nt, Human
aaacuaguuccauaaagcauuuua

SEQ ID NO: 493712 - RNA, 20 nt, Human
aacaugcuuauacaagaggu

SEQ ID NO: 493713 - RNA, 19 nt, Human
aacauggugaaccccgucu

SEQ ID NO: 493714 - RNA, 20 nt, Human
aacauggugaaccccgucuc

SEQ ID NO: 493715 - RNA, 21 nt, Human
aaccccgucucuacuaaaaaa

SEQ ID NO: 493716 - RNA, 20 nt, Human
aagagauaaugaaggccagg

SEQ ID NO: 493717 - RNA, 22 nt, Human
aagccauagagggcucuaaaac

SEQ ID NO: 493718 - RNA, 18 nt, Human
aaggccuuaaagccauag

SEQ ID NO: 493719 - RNA, 24 nt, Human
aaucacuugaaccugggaggcgga

SEQ ID NO: 493720 - RNA, 20 nt, Human
aaugcuuauuuuuaaauuuc

SEQ ID NO: 493721 - RNA, 20 nt, Human
acaguagaaaaauaucugaa

SEQ ID NO: 493722 - RNA, 25 nt, Human
accccgucucuacuaaaaaauacaa

SEQ ID NO: 493723 - RNA, 18 nt, Human
accgcaauccagccuggg

SEQ ID NO: 493724 - RNA, 20 nt, Human
acgcuaaaagcgggcagugc

SEQ ID NO: 493725 - RNA, 24 nt, Human
acugaaucgagcuguuuauaagaa

SEQ ID NO: 493726 - RNA, 23 nt, Human
agaagcucuucaaaaucgacugu

SEQ ID NO: 493727 - RNA, 23 nt, Human
agaauaccucgaaagaauaccac

SEQ ID NO: 493728 - RNA, 22 nt, Human
agaaucacuugaaccugggagg

SEQ ID NO: 493729 - RNA, 23 nt, Human
agacgcuaaaagcgggcagugcu

SEQ ID NO: 493730 - RNA, 18 nt, Human
agaggaacagaggaacag

SEQ ID NO: 493731 - RNA, 22 nt, Human
agaggaacagaggggaaugucc

SEQ ID NO: 493732 - RNA, 24 nt, Human
agaggaacagaggggaauguccug

SEQ ID NO: 493733 - RNA, 23 nt, Human
agccuggccaacauggugaaccc

SEQ ID NO: 493734 - RNA, 23 nt, Human
aggaauuuaaagcaaagaacagu

SEQ ID NO: 493735 - RNA, 24 nt, Human
aggaugaggcaggagaaucacuug

SEQ ID NO: 493736 - RNA, 22 nt, Human
aggcaggagaaucacuugaacc

SEQ ID NO: 493737 - RNA, 24 nt, Human
aggcaggagaaucacuugaaccug

SEQ ID NO: 493738 - RNA, 22 nt, Human
aggcagguggaucaguugaggg

SEQ ID NO: 493739 - RNA, 24 nt, Human
aggcaugguggcucacgccuguaa

SEQ ID NO: 493740 - RNA, 24 nt, Human
aggcggagguugcagugagcugag

SEQ ID NO: 493741 - RNA, 18 nt, Human
aggcugaggcagguggau

SEQ ID NO: 493742 - RNA, 24 nt, Human
aggcugaggcagguggaucaguug

SEQ ID NO: 493743 - RNA, 25 nt, Human
agggggcaggagaagagaggaacag

SEQ ID NO: 493744 - RNA, 23 nt, Human
caacauggugaaccccgucucua

SEQ ID NO: 493745 - RNA, 21 nt, Human
caagagggacagaaaacacca

SEQ ID NO: 493746 - RNA, 24 nt, Human
caagagggacagaaaacaccagug

SEQ ID NO: 493747 - RNA, 23 nt, Human
caccgcaauccagccugggcaac

SEQ ID NO: 493748 - RNA, 18 nt, Human
cacgccuguaaucccagc

SEQ ID NO: 493749 - RNA, 19 nt, Human
cacgccuguaaucccagcu

SEQ ID NO: 493750 - RNA, 23 nt, Human
cacgccuguaaucccggcggcac

SEQ ID NO: 493751 - RNA, 27 nt, Human
cacgccuguaaucccggcggcacuuug

SEQ ID NO: 493752 - RNA, 21 nt, Human
cacuugaaccugggaggcgga

SEQ ID NO: 493753 - RNA, 20 nt, Human
caggcugguuuuuaaagcac

SEQ ID NO: 493754 - RNA, 20 nt, Human
cauagagggcucuaaaacua

SEQ ID NO: 493755 - RNA, 22 nt, Human
ccaccgcaauccagccugggca

SEQ ID NO: 493756 - RNA, 22 nt, Human
ccgcaauccagccugggcaacu

SEQ ID NO: 493757 - RNA, 22 nt, Human
ccuggccaacauggugaacccc

SEQ ID NO: 493758 - RNA, 23 nt, Human
ccuggccaacauggugaaccccg

SEQ ID NO: 493759 - RNA, 19 nt, Human
ccugggaggcggagguugc

SEQ ID NO: 493760 - RNA, 21 nt, Human
ccuguaaucccagcuacucag

SEQ ID NO: 493761 - RNA, 22 nt, Human
ccuguaaucccagcuacucagg

SEQ ID NO: 493762 - RNA, 19 nt, Human
ccugucgaggaggggcugc

SEQ ID NO: 493763 - RNA, 24 nt, Human
cgccuguaaucccagcuacucagg

SEQ ID NO: 493764 - RNA, 21 nt, Human
cgccuguaaucccggcggcac

SEQ ID NO: 493765 - RNA, 26 nt, Human
cgccuguaaucccggcggcacuuugg

SEQ ID NO: 493766 - RNA, 27 nt, Human
cgccuguaaucccggcggcacuuuggg

SEQ ID NO: 493767 - RNA, 20 nt, Human
cgcgcgggugcccgcagccg

SEQ ID NO: 493768 - RNA, 24 nt, Human
cggcacuuugggaggcugaggcag

SEQ ID NO: 493769 - RNA, 26 nt, Human
cggcacuuugggaggcugaggcaggu

SEQ ID NO: 493770 - RNA, 19 nt, Human
cgggugcccgcagccggcg

SEQ ID NO: 493771 - RNA, 20 nt, Human
cuaaacuauaaauuuagcua

SEQ ID NO: 493772 - RNA, 19 nt, Human
cuacuaaaaaauacaaaaa

SEQ ID NO: 493773 - RNA, 27 nt, Human
cucacgccuguaaucccggcggcacuu

SEQ ID NO: 493774 - RNA, 21 nt, Human
cucuacuaaaaaauacaaaaa

SEQ ID NO: 493775 - RNA, 18 nt, Human
cugcagggugggccuguc

SEQ ID NO: 493776 - RNA, 25 nt, Human
cuuaagacaaaaauucaaauguaac

SEQ ID NO: 493777 - RNA, 24 nt, Human
gaaggccaggcaugguggcucacg

SEQ ID NO: 493778 - RNA, 23 nt, Human
gagacaagccuggccaacauggu

SEQ ID NO: 493779 - RNA, 23 nt, Human
gagacaguggaguggguccaggg

SEQ ID NO: 493780 - RNA, 21 nt, Human
gagguugcagugagcugagac

SEQ ID NO: 493781 - RNA, 24 nt, Human
gaucaguugagguuaggaguuuga

SEQ ID NO: 493782 - RNA, 19 nt, Human
gauuugauaauuuaacuug

SEQ ID NO: 493783 - RNA, 23 nt, Human
gcacuuugggaggcugaggcagg

SEQ ID NO: 493784 - RNA, 23 nt, Human
gcaggagaaucacuugaaccugg

SEQ ID NO: 493785 - RNA, 18 nt, Human
gccaacauggugaacccc

SEQ ID NO: 493786 - RNA, 23 nt, Human
gccaacauggugaaccccgucuc

SEQ ID NO: 493787 - RNA, 22 nt, Human
gccaccgcaauccagccugggc

SEQ ID NO: 493788 - RNA, 22 nt, Human
gccucugcaguuuggagcugca

SEQ ID NO: 493789 - RNA, 22 nt, Human
ggagguugcagugagcugagac

SEQ ID NO: 493790 - RNA, 23 nt, Human
ggagguugcagugagcugagaca

SEQ ID NO: 493791 - RNA, 24 nt, Human
ggagguugcagugagcugagacag

SEQ ID NO: 493792 - RNA, 21 nt, Human
ggcacacgccuguaaucccag

SEQ ID NO: 493793 - RNA, 23 nt, Human
ggcaugguggcacacgccuguaa

SEQ ID NO: 493794 - RNA, 19 nt, Human
gggaauguccuggguggca

SEQ ID NO: 493795 - RNA, 24 nt, Human
gggacagaaaacaccagugguugc

SEQ ID NO: 493796 - RNA, 19 nt, Human
gggcaacugagugagaauc

SEQ ID NO: 493797 - RNA, 26 nt, Human
gggcagugcuguguuuacuuagagac

SEQ ID NO: 493798 - RNA, 24 nt, Human
gguggcacacgccuguaaucccag

SEQ ID NO: 493799 - RNA, 24 nt, Human
gguggcucacgccuguaaucccgg

SEQ ID NO: 493800 - RNA, 18 nt, Human
gugaagaagugaagacgc

SEQ ID NO: 493801 - RNA, 18 nt, Human
gugccaggaauuuaaagc

SEQ ID NO: 493802 - RNA, 24 nt, Human
guugcagugagcugagacagcgcc

SEQ ID NO: 493803 - RNA, 20 nt, Human
uaacuuggaauuuuucugug

SEQ ID NO: 493804 - RNA, 18 nt, Human
uaagacaaaaauucaaau

SEQ ID NO: 493805 - RNA, 20 nt, Human
uaagacaaaaauucaaaugu

SEQ ID NO: 493806 - RNA, 26 nt, Human
uaccuaaacuauaaauuuagcuaaaa

SEQ ID NO: 493807 - RNA, 18 nt, Human
uaugauagguuuucucuu

SEQ ID NO: 493808 - RNA, 19 nt, Human
ucaaugaacaagagggaca

SEQ ID NO: 493809 - RNA, 24 nt, Human
ucacuugaaccugggaggcggagg

SEQ ID NO: 493810 - RNA, 25 nt, Human
ucacuugaaccugggaggcggaggu

SEQ ID NO: 493811 - RNA, 24 nt, Human
uccagccugggcaacugagugaga

SEQ ID NO: 493812 - RNA, 23 nt, Human
uccucgccaggcugguuuuuaaa

SEQ ID NO: 493813 - RNA, 19 nt, Human
uccuggguggcagaacugu

SEQ ID NO: 493814 - RNA, 22 nt, Human
uccuggguggcagaacuguccu

SEQ ID NO: 493815 - RNA, 25 nt, Human
ucucuuauagacaguaaaaagaagu

SEQ ID NO: 493816 - RNA, 23 nt, Human
ucugcaguuuggagcugcaaugg

SEQ ID NO: 493817 - RNA, 24 nt, Human
ucugcaguuuggagcugcaauggc

SEQ ID NO: 493818 - RNA, 24 nt, Human
ucugucuuuaaaaaaaaaaaaaag

SEQ ID NO: 493819 - RNA, 24 nt, Human
ucuuuaaaaaaaaaaaaaagauaa

SEQ ID NO: 493820 - RNA, 24 nt, Human
ugaaccugggaggcggagguugca

SEQ ID NO: 493821 - RNA, 25 nt, Human
ugagaagagccaaacauuuacccua

SEQ ID NO: 493822 - RNA, 20 nt, Human
ugaggcaggagaaucacuug

SEQ ID NO: 493823 - RNA, 24 nt, Human
ugaggcaggagaaucacuugaacc

SEQ ID NO: 493824 - RNA, 25 nt, Human
ugaggcaggagaaucacuugaaccu

SEQ ID NO: 493825 - RNA, 26 nt, Human
ugaggcagguggaucaguugagguua

SEQ ID NO: 493826 - RNA, 22 nt, Human
ugcaauggcugccaguaucggc

SEQ ID NO: 493827 - RNA, 23 nt, Human
ugcaauggcugccaguaucggcu

SEQ ID NO: 493828 - RNA, 21 nt, Human
ugcagggugggccugucgagg

SEQ ID NO: 493829 - RNA, 21 nt, Human
ugccugagcugcagggugggc

SEQ ID NO: 493830 - RNA, 21 nt, Human
uggaguggguccagggcuguc

SEQ ID NO: 493831 - RNA, 24 nt, Human
uggaucaguugagguuaggaguuu

SEQ ID NO: 493832 - RNA, 21 nt, Human
uggcacacgccuguaauccca

SEQ ID NO: 493833 - RNA, 20 nt, Human
uggcucacgccuguaauccc

SEQ ID NO: 493834 - RNA, 23 nt, Human
uggcucacgccuguaaucccggc

SEQ ID NO: 493835 - RNA, 29 nt, Human
ugggaggcggagguugcagugacaacggu

SEQ ID NO: 493836 - RNA, 24 nt, Human
ugggaggcggagguugcagugagc

SEQ ID NO: 493837 - RNA, 24 nt, Human
ugggaggcugaggcagguggauca

SEQ ID NO: 493838 - RNA, 23 nt, Human
ugggcaacugagugagaaucugu

SEQ ID NO: 493839 - RNA, 24 nt, Human
ugguggcacacgccuguaauccca

SEQ ID NO: 493840 - RNA, 23 nt, Human
ugguggcucacgccuguaauccc

SEQ ID NO: 493841 - RNA, 19 nt, Human
uguaaucccagcuacucag

SEQ ID NO: 493842 - RNA, 18 nt, Human
uguccucgccaggcuggu

SEQ ID NO: 493843 - RNA, 19 nt, Human
ugucugggucgcuuucccu

SEQ ID NO: 493844 - RNA, 20 nt, Human
uucauuuuuaaaaaagagau

SEQ ID NO: 493845 - RNA, 24 nt, Human
uugaaccugggaggcggagguugc

SEQ ID NO: 493846 - RNA, 19 nt, Human
uugcagugagcugagacag

SEQ ID NO: 493847 - RNA, 22 nt, Human
uugcagugagcugagacagcgc

SEQ ID NO: 493848 - RNA, 25 nt, Human
uugggaggcugaggcagguggauca

SEQ ID NO: 493849 - RNA, 18 nt, Human
uuggugccugagcugcag

SEQ ID NO: 493850 - RNA, 22 nt, Human
uuuuuuuuuaguacaacaugcu

SEQ ID NO: 493851 - RNA, 24 nt, Human
aaaccaaucacccgagcaaccuug

SEQ ID NO: 493852 - RNA, 24 nt, Human
aacagcaccacugcccccgcuacc

SEQ ID NO: 493853 - RNA, 23 nt, Human
aaccugaaauauauauugaggaa

SEQ ID NO: 493854 - RNA, 22 nt, Human
aagccaguaaaccaaucacccg

SEQ ID NO: 493855 - RNA, 23 nt, Human
agaguuuuguguucuuuuucuuu

SEQ ID NO: 493856 - RNA, 24 nt, Human
agcugggauuacaagcaucugcua

SEQ ID NO: 493857 - RNA, 20 nt, Human
aggaccagaaaaccaagucu

SEQ ID NO: 493858 - RNA, 19 nt, Human
agggaaggccucaacaaca

SEQ ID NO: 493859 - RNA, 20 nt, Human
aggggguuuuaucacauugg

SEQ ID NO: 493860 - RNA, 24 nt, Human
aggggguuuuaucacauuggucag

SEQ ID NO: 493861 - RNA, 21 nt, Human
aguagcugggauuacaagcau

SEQ ID NO: 493862 - RNA, 20 nt, Human
agugcaguugugcgaucucg

SEQ ID NO: 493863 - RNA, 24 nt, Human
aucucuuauaggaaagaugaagac

SEQ ID NO: 493864 - RNA, 22 nt, Human
augccugagccucuugaguagc

SEQ ID NO: 493865 - RNA, 23 nt, Human
augccugagccucuugaguagcu

SEQ ID NO: 493866 - RNA, 20 nt, Human
caacagaccagaauuccaau

SEQ ID NO: 493867 - RNA, 21 nt, Human
caagucuugaaagaaggacuu

SEQ ID NO: 493868 - RNA, 18 nt, Human
cacauuggucaggcuggu

SEQ ID NO: 493869 - RNA, 23 nt, Human
cacugcagccuccaccuuuuggg

SEQ ID NO: 493870 - RNA, 18 nt, Human
cacugcccccgcuaccgc

SEQ ID NO: 493871 - RNA, 28 nt, Human
cagaaaaccaagucuugaaagaaggacc

SEQ ID NO: 493872 - RNA, 22 nt, Human
cauugucaacaaccugaaauau

SEQ ID NO: 493873 - RNA, 18 nt, Human
ccaacagaccagaauucc

SEQ ID NO: 493874 - RNA, 22 nt, Human
ccacugcccccgcuaccgccug

SEQ ID NO: 493875 - RNA, 19 nt, Human
cccaugcuagacauuagag

SEQ ID NO: 493876 - RNA, 20 nt, Human
ccucuccccgccgccgugac

SEQ ID NO: 493877 - RNA, 19 nt, Human
cgccuuaagggaaauaauc

SEQ ID NO: 493878 - RNA, 18 nt, Human
cggggcccccggccgagc

SEQ ID NO: 493879 - RNA, 19 nt, Human
cucacugcagccuccaccu

SEQ ID NO: 493880 - RNA, 24 nt, Human
cucacugcagccuccaccuuuugg

SEQ ID NO: 493881 - RNA, 23 nt, Human
cuccccgccgccgugacccucgu

SEQ ID NO: 493882 - RNA, 21 nt, Human
cucuccccgccgccgugaccc

SEQ ID NO: 493883 - RNA, 23 nt, Human
cugaaaaugcugguagaugcaau

SEQ ID NO: 493884 - RNA, 24 nt, Human
cugagccucuugaguagcugggau

SEQ ID NO: 493885 - RNA, 23 nt, Human
cugcagccuccaccuuuuggguu

SEQ ID NO: 493886 - RNA, 22 nt, Human
cugugugcauuguuccuuaccc

SEQ ID NO: 493887 - RNA, 23 nt, Human
cuucuuuuuuuuaaaaaacaaag

SEQ ID NO: 493888 - RNA, 24 nt, Human
gagaucaguuuugugcgaagccag

SEQ ID NO: 493889 - RNA, 25 nt, Human
gaguagcugggauuacaagcaucug

SEQ ID NO: 493890 - RNA, 24 nt, Human
gauuacaagcaucugcuaccaugc

SEQ ID NO: 493891 - RNA, 22 nt, Human
gcagccuccaccuuuuggguuc

SEQ ID NO: 493892 - RNA, 24 nt, Human
ggggguuuuaucacauuggucagg

SEQ ID NO: 493893 - RNA, 22 nt, Human
gggguuuuaucacauuggucag

SEQ ID NO: 493894 - RNA, 23 nt, Human
gggguuuuaucacauuggucagg

SEQ ID NO: 493895 - RNA, 20 nt, Human
ggguucaagagauucucaug

SEQ ID NO: 493896 - RNA, 18 nt, Human
guagcugggauuacaagc

SEQ ID NO: 493897 - RNA, 18 nt, Human
guuccuuacccaucguag

SEQ ID NO: 493898 - RNA, 20 nt, Human
uaaaccaaucacccgagcaa

SEQ ID NO: 493899 - RNA, 21 nt, Human
uaagauaggcuugauuuguua

SEQ ID NO: 493900 - RNA, 24 nt, Human
uaauuuuugucuuuuuaguagaga

SEQ ID NO: 493901 - RNA, 21 nt, Human
uacaucuucauuggcauuuca

SEQ ID NO: 493902 - RNA, 18 nt, Human
uacuagagaguucuacuc

SEQ ID NO: 493903 - RNA, 22 nt, Human
uagcaauuggaacugaaaaugc

SEQ ID NO: 493904 - RNA, 26 nt, Human
uagggaaggccucaacaacaggugua

SEQ ID NO: 493905 - RNA, 21 nt, Human
uauaggaaagaugaagaccaa

SEQ ID NO: 493906 - RNA, 21 nt, Human
ucacccgagcaaccuuggccc

SEQ ID NO: 493907 - RNA, 18 nt, Human
ucacugcagccuccaccu

SEQ ID NO: 493908 - RNA, 23 nt, Human
ucacugcagccuccaccuuuugg

SEQ ID NO: 493909 - RNA, 24 nt, Human
ucacugcagccuccaccuuuuggg

SEQ ID NO: 493910 - RNA, 25 nt, Human
ucacugcagccuccaccuuuugggu

SEQ ID NO: 493911 - RNA, 25 nt, Human
uccauggacacgccaugguuccaga

SEQ ID NO: 493912 - RNA, 22 nt, Human
uccccgccgccgugacccucgu

SEQ ID NO: 493913 - RNA, 25 nt, Human
uccccgccgccgugacccucguggg

SEQ ID NO: 493914 - RNA, 19 nt, Human
ucgcggcuccaccucuccc

SEQ ID NO: 493915 - RNA, 21 nt, Human
ucgcggcuccaccucuccccg

SEQ ID NO: 493916 - RNA, 23 nt, Human
ucgugggagcgcggcuggaaaau

SEQ ID NO: 493917 - RNA, 24 nt, Human
ucuugaguagcugggauuacaagc

SEQ ID NO: 493918 - RNA, 20 nt, Human
ucuugcuuugucgcccaggg

SEQ ID NO: 493919 - RNA, 24 nt, Human
ucuugcuuugucgcccagggugaa

SEQ ID NO: 493920 - RNA, 19 nt, Human
ugaagugcaguugugcgau

SEQ ID NO: 493921 - RNA, 19 nt, Human
ugaguaguucccaugcuag

SEQ ID NO: 493922 - RNA, 23 nt, Human
ugcagaagaggccaucgccuuaa

SEQ ID NO: 493923 - RNA, 23 nt, Human
ugcauuguuccuuacccaucgua

SEQ ID NO: 493924 - RNA, 22 nt, Human
ugccugagccucuugaguagcu

SEQ ID NO: 493925 - RNA, 19 nt, Human
ugcgaagccaguaaaccaa

SEQ ID NO: 493926 - RNA, 21 nt, Human
uggcaaggggcaccgaggacu

SEQ ID NO: 493927 - RNA, 18 nt, Human
ugggauuacaagcaucug

SEQ ID NO: 493928 - RNA, 22 nt, Human
ugggauuacaagcaucugcuac

SEQ ID NO: 493929 - RNA, 24 nt, Human
ugggauuacaagcaucugcuacca

SEQ ID NO: 493930 - RNA, 18 nt, Human
ugucaacaaccugaaaua

SEQ ID NO: 493931 - RNA, 21 nt, Human
uguuacuggucuuaaugaggg

SEQ ID NO: 493932 - RNA, 23 nt, Human
uuaguagagacaggggguuuuau

SEQ ID NO: 493933 - RNA, 19 nt, Human
uuauuccaacuucuccuuc

SEQ ID NO: 493934 - RNA, 24 nt, Human
uugaaggucuuuuauccauauugg

SEQ ID NO: 493935 - RNA, 18 nt, Human
uuggaacugaaaaugcug

SEQ ID NO: 493936 - RNA, 19 nt, Human
uuggaacugaaaaugcugg

SEQ ID NO: 493937 - RNA, 18 nt, Human
uuucucuucuucuucuuu

SEQ ID NO: 493938 - RNA, 24 nt, Human
uuugucgcccagggugaagugcag

SEQ ID NO: 493939 - RNA, 24 nt, Human
uuuuggguucaagagauucucaug

SEQ ID NO: 493940 - RNA, 22 nt, Human
uuuugucuuuuuaguagagaca

SEQ ID NO: 493941 - RNA, 23 nt, Human
uuuuuaguagagacaggggguuu

SEQ ID NO: 493942 - RNA, 20 nt, Human
uuuuugucuuuuuaguagag

SEQ ID NO: 493943 - RNA, 22 nt, Human
aacaaauauggugucuguaaau

SEQ ID NO: 493944 - RNA, 22 nt, Human
aacacacagacacgagaaaccu

SEQ ID NO: 493945 - RNA, 18 nt, Human
acacacagacacgagaaa

SEQ ID NO: 493946 - RNA, 18 nt, Human
acugagaaacagcaucca

SEQ ID NO: 493947 - RNA, 19 nt, Human
agaagccaaacacacagaa

SEQ ID NO: 493948 - RNA, 21 nt, Human
agacaugcacaagaaaucaag

SEQ ID NO: 493949 - RNA, 22 nt, Human
agccaaacacacagacacgaga

SEQ ID NO: 493950 - RNA, 24 nt, Human
aucaaggaugcaauaguucacaaa

SEQ ID NO: 493951 - RNA, 23 nt, Human
auguagccaucaguuuuagcaga

SEQ ID NO: 493952 - RNA, 24 nt, Human
cacgagaaaccugaccugauacug

SEQ ID NO: 493953 - RNA, 23 nt, Human
cagagacaugcacaagaaaucaa

SEQ ID NO: 493954 - RNA, 23 nt, Human
cauucuugucuuuagaagccaaa

SEQ ID NO: 493955 - RNA, 23 nt, Human
ccgugggugcugcccaaucaggg

SEQ ID NO: 493956 - RNA, 21 nt, Human
ccuuuccuuguggcagggaau

SEQ ID NO: 493957 - RNA, 24 nt, Human
cuaaugugcaagaaaguccucuuu

SEQ ID NO: 493958 - RNA, 20 nt, Human
gacacgagaaaccugaccug

SEQ ID NO: 493959 - RNA, 21 nt, Human
gccaaacacacagacacgaga

SEQ ID NO: 493960 - RNA, 21 nt, Human
uaaaacuaacaaucaguguau

SEQ ID NO: 493961 - RNA, 20 nt, Human
uacugagaaacagcauccac

SEQ ID NO: 493962 - RNA, 18 nt, Human
uccuuuccuuguggcagg

SEQ ID NO: 493963 - RNA, 18 nt, Human
ucugaacauaaaagaaaa

SEQ ID NO: 493964 - RNA, 19 nt, Human
ugagaaacagcauccacug

SEQ ID NO: 493965 - RNA, 23 nt, Human
ugagaaacagcauccacuggagg

SEQ ID NO: 493966 - RNA, 18 nt, Human
ugcagaacaaauauggug

SEQ ID NO: 493967 - RNA, 19 nt, Human
ugggggacuugggugggaa

SEQ ID NO: 493968 - RNA, 22 nt, Human
ugggugcugcccaaucagggca

SEQ ID NO: 493969 - RNA, 22 nt, Human
uucccagaguucaccugucaca

SEQ ID NO: 493970 - RNA, 24 nt, Human
uuuuuaguguggcuugauguuaau

SEQ ID NO: 493971 - RNA, 23 nt, Human
aaaaagcacagacaacauaaccc

SEQ ID NO: 493972 - RNA, 20 nt, Human
aacuaaggggaaaaugaguu

SEQ ID NO: 493973 - RNA, 19 nt, Human
aagcacagacaacauaacc

SEQ ID NO: 493974 - RNA, 23 nt, Human
aagcacagacaacauaaccccua

SEQ ID NO: 493975 - RNA, 23 nt, Human
aagcuaaaaauaaaaagcacaga

SEQ ID NO: 493976 - RNA, 18 nt, Human
agacaacauaaccccuaa

SEQ ID NO: 493977 - RNA, 21 nt, Human
caacauaaccccuaaauuaua

SEQ ID NO: 493978 - RNA, 24 nt, Human
cacuaauauauauaugacuauuuc

SEQ ID NO: 493979 - RNA, 22 nt, Human
ccccuaaauuauagaugaacaa

SEQ ID NO: 493980 - RNA, 19 nt, Human
ccuacccuugaaauuuugg

SEQ ID NO: 493981 - RNA, 24 nt, Human
cuaaaaauaaaaagcacagacaac

SEQ ID NO: 493982 - RNA, 24 nt, Human
gacauucauuugaagcuaaaaaua

SEQ ID NO: 493983 - RNA, 19 nt, Human
guauuuuguuaucuguacu

SEQ ID NO: 493984 - RNA, 22 nt, Human
uaaauuuuaccaguaaagugua

SEQ ID NO: 493985 - RNA, 18 nt, Human
uauuucuuccaucuuccu

SEQ ID NO: 493986 - RNA, 24 nt, Human
ucuuccaucuuccuacccuugaaa

SEQ ID NO: 493987 - RNA, 23 nt, Human
ugaaauuuuggaucuucugcuua

SEQ ID NO: 493988 - RNA, 21 nt, Human
uguuuugccuuuuuuguuuua

SEQ ID NO: 493989 - RNA, 21 nt, Human
uguuuuguuuugccuuuuuug

SEQ ID NO: 493990 - RNA, 21 nt, Human
uuaauuucuacccagauagca

SEQ ID NO: 493991 - RNA, 22 nt, Human
aaaacacccagcacauccugcg

SEQ ID NO: 493992 - RNA, 20 nt, Human
aaacaaaagcaaaaacacag

SEQ ID NO: 493993 - RNA, 25 nt, Human
aaacaaaagcaaaaacacagccaug

SEQ ID NO: 493994 - RNA, 27 nt, Human
aaacacccagcacauccugcguuaagc

SEQ ID NO: 493995 - RNA, 19 nt, Human
aaacauccacgcgcuugug

SEQ ID NO: 493996 - RNA, 20 nt, Human
aaacccggccagggaacugu

SEQ ID NO: 493997 - RNA, 19 nt, Human
aaagcaccugauccaugac

SEQ ID NO: 493998 - RNA, 23 nt, Human
aaaugcugggauuacagguauga

SEQ ID NO: 493999 - RNA, 24 nt, Human
aacguccuggggccaucguggugc

SEQ ID NO: 494000 - RNA, 25 nt, Human
aagcaaaaacacagccaugaaacaa

SEQ ID NO: 494001 - RNA, 22 nt, Human
aagcaaacccaccaacucagga

SEQ ID NO: 494002 - RNA, 25 nt, Human
aagcaauccucccaccuuggccucc

SEQ ID NO: 494003 - RNA, 19 nt, Human
aagcacaggcuccucugag

SEQ ID NO: 494004 - RNA, 20 nt, Human
aagcacaggcuccucugagg

SEQ ID NO: 494005 - RNA, 23 nt, Human
aagcgguuccgcggccccggcgc

SEQ ID NO: 494006 - RNA, 23 nt, Human
aagcuucacaagcaaacccacca

SEQ ID NO: 494007 - RNA, 22 nt, Human
aaggacccuccagggcccucau

SEQ ID NO: 494008 - RNA, 20 nt, Human
aauggcagaagacgcagacc

SEQ ID NO: 494009 - RNA, 18 nt, Human
aauuuauaaacagguccc

SEQ ID NO: 494010 - RNA, 22 nt, Human
aauuucucuccccuuagcucuc

SEQ ID NO: 494011 - RNA, 21 nt, Human
acagagacccagcagcucaaa

SEQ ID NO: 494012 - RNA, 24 nt, Human
acagaggagaagccagggcuggcc

SEQ ID NO: 494013 - RNA, 21 nt, Human
accaaauaaagcaggaggucu

SEQ ID NO: 494014 - RNA, 18 nt, Human
accaaggccuggaacguu

SEQ ID NO: 494015 - RNA, 18 nt, Human
accgcaccuggccucuac

SEQ ID NO: 494016 - RNA, 23 nt, Human
acgcugcugugucucaccaaggc

SEQ ID NO: 494017 - RNA, 18 nt, Human
acugcagcgaguugacag

SEQ ID NO: 494018 - RNA, 24 nt, Human
acuucaccauccagacaagaaacg

SEQ ID NO: 494019 - RNA, 22 nt, Human
agaaaauaaaaaaaacccaaga

SEQ ID NO: 494020 - RNA, 25 nt, Human
agacaagcuggaacagaggagaagc

SEQ ID NO: 494021 - RNA, 21 nt, Human
agacuccaccggcggccccga

SEQ ID NO: 494022 - RNA, 22 nt, Human
agagcugggcagcccucggcaa

SEQ ID NO: 494023 - RNA, 19 nt, Human
agaggagaagccagggcug

SEQ ID NO: 494024 - RNA, 19 nt, Human
agaggagaagccagggcug

SEQ ID NO: 494025 - RNA, 22 nt, Human
agcaaccaacuggcugacuccu

SEQ ID NO: 494026 - RNA, 18 nt, Human
agcaauggggcugggagc

SEQ ID NO: 494027 - RNA, 20 nt, Human
agccaccgcaccuggccucu

SEQ ID NO: 494028 - RNA, 20 nt, Human
agccaugagaaucuaaggcg

SEQ ID NO: 494029 - RNA, 18 nt, Human
agccugugagcauuggac

SEQ ID NO: 494030 - RNA, 18 nt, Human
agcguuuccaggagacgg

SEQ ID NO: 494031 - RNA, 22 nt, Human
agcuaggccugugaggauggca

SEQ ID NO: 494032 - RNA, 22 nt, Human
agcugagauggagacuucaggg

SEQ ID NO: 494033 - RNA, 18 nt, Human
agcugccuuuugccucca

SEQ ID NO: 494034 - RNA, 25 nt, Human
agcugggcagcccucggcaaacccu

SEQ ID NO: 494035 - RNA, 18 nt, Human
aggaaacauguuagggcc

SEQ ID NO: 494036 - RNA, 21 nt, Human
aggaaacauguuagggccugu

SEQ ID NO: 494037 - RNA, 19 nt, Human
aggaaaccagaagcagagc

SEQ ID NO: 494038 - RNA, 22 nt, Human
aggaccugggagggagcagggg

SEQ ID NO: 494039 - RNA, 19 nt, Human
aggaggaauucaggcacug

SEQ ID NO: 494040 - RNA, 18 nt, Human
aggagggagcagugggga

SEQ ID NO: 494041 - RNA, 28 nt, Human
aggcaaaauagcaaaagaaaagggaccc

SEQ ID NO: 494042 - RNA, 18 nt, Human
aggccccugcccacccag

SEQ ID NO: 494043 - RNA, 23 nt, Human
aggcccgagccggcuagcggcgg

SEQ ID NO: 494044 - RNA, 20 nt, Human
aggcccuaguauaggagagg

SEQ ID NO: 494045 - RNA, 20 nt, Human
aggccuggcuggaaauggaa

SEQ ID NO: 494046 - RNA, 21 nt, Human
aggcuggucuccaacucuugg

SEQ ID NO: 494047 - RNA, 18 nt, Human
agggaacugugucauguc

SEQ ID NO: 494048 - RNA, 18 nt, Human
agggaccacagcugcuuc

SEQ ID NO: 494049 - RNA, 18 nt, Human
aguggggaggcuggggaa

SEQ ID NO: 494050 - RNA, 24 nt, Human
aguggggaggcuggggaagaacgg

SEQ ID NO: 494051 - RNA, 24 nt, Human
auaaaagcccgaaacaaaacaccc

SEQ ID NO: 494052 - RNA, 24 nt, Human
auccagcuucuucucagggagggg

SEQ ID NO: 494053 - RNA, 20 nt, Human
augaaacaagaaagacacca

SEQ ID NO: 494054 - RNA, 19 nt, Human
augaacggagugugugaau

SEQ ID NO: 494055 - RNA, 21 nt, Human
augguguacauguauguaugu

SEQ ID NO: 494056 - RNA, 22 nt, Human
augucuguagccuuggaaacac

SEQ ID NO: 494057 - RNA, 19 nt, Human
auguggaugggucagagga

SEQ ID NO: 494058 - RNA, 22 nt, Human
auucuugguaccauccucagag

SEQ ID NO: 494059 - RNA, 21 nt, Human
caaaaacacagccaugaaaca

SEQ ID NO: 494060 - RNA, 22 nt, Human
caaaaagacagugugcaggacc

SEQ ID NO: 494061 - RNA, 24 nt, Human
caaaagcaaaaacacagccaugaa

SEQ ID NO: 494062 - RNA, 24 nt, Human
caaaaugcagcccucuggguuuac

SEQ ID NO: 494063 - RNA, 23 nt, Human
caaacccaccaacucaggagccc

SEQ ID NO: 494064 - RNA, 22 nt, Human
caaagcaggcccugacugcugg

SEQ ID NO: 494065 - RNA, 24 nt, Human
caaauaaagcaggaggucugacug

SEQ ID NO: 494066 - RNA, 22 nt, Human
caacccauucaugaaaacgcug

SEQ ID NO: 494067 - RNA, 19 nt, Human
caacucaggagcccuggau

SEQ ID NO: 494068 - RNA, 22 nt, Human
caagccaauggcagaagacgca

SEQ ID NO: 494069 - RNA, 23 nt, Human
cacaccacacuguccuuccccaa

SEQ ID NO: 494070 - RNA, 24 nt, Human
caccaagccauaaauaaaagcccg

SEQ ID NO: 494071 - RNA, 24 nt, Human
caccauguugcccaggcuggucuc

SEQ ID NO: 494072 - RNA, 27 nt, Human
caccauguugcccaggcuggucuccaa

SEQ ID NO: 494073 - RNA, 23 nt, Human
caccauuucaaaacauccugccu

SEQ ID NO: 494074 - RNA, 19 nt, Human
caccgcaccuggccucuac

SEQ ID NO: 494075 - RNA, 18 nt, Human
cacucauugcugaauggu

SEQ ID NO: 494076 - RNA, 18 nt, Human
cacuuggcuugugcaggc

SEQ ID NO: 494077 - RNA, 21 nt, Human
cagaaacaaaagcaaaaacac

SEQ ID NO: 494078 - RNA, 24 nt, Human
cagacuucaccauccagacaagaa

SEQ ID NO: 494079 - RNA, 21 nt, Human
cagagacccagcagcucaaau

SEQ ID NO: 494080 - RNA, 22 nt, Human
cagaucaacaagagagaaacca

SEQ ID NO: 494081 - RNA, 19 nt, Human
cagaucuuaaacaacgucc

SEQ ID NO: 494082 - RNA, 24 nt, Human
cagccauccagucuucugcuccug

SEQ ID NO: 494083 - RNA, 18 nt, Human
cagccgcaaggaugugga

SEQ ID NO: 494084 - RNA, 21 nt, Human
cagcgagccugcgagaggucc

SEQ ID NO: 494085 - RNA, 25 nt, Human
caggagcccuggauuucagcagaaa

SEQ ID NO: 494086 - RNA, 21 nt, Human
caggaggcgcugcccgcucau

SEQ ID NO: 494087 - RNA, 21 nt, Human
cagggaccacagcugcuucug

SEQ ID NO: 494088 - RNA, 23 nt, Human
caugagcuaggccugugaggaug

SEQ ID NO: 494089 - RNA, 19 nt, Human
cauguugcccaggcugguc

SEQ ID NO: 494090 - RNA, 24 nt, Human
cauguugcccaggcuggucuccaa

SEQ ID NO: 494091 - RNA, 20 nt, Human
ccaaaugcugggauuacagg

SEQ ID NO: 494092 - RNA, 20 nt, Human
ccaaaugcugggauuacagg

SEQ ID NO: 494093 - RNA, 21 nt, Human
ccaaaugcugggauuacaggu

SEQ ID NO: 494094 - RNA, 18 nt, Human
ccaacucuugggcucaag

SEQ ID NO: 494095 - RNA, 22 nt, Human
ccaauagucacaccacacuguc

SEQ ID NO: 494096 - RNA, 23 nt, Human
ccagcaaagcaccugauccauga

SEQ ID NO: 494097 - RNA, 23 nt, Human
ccauuucaaaacauccugccugc

SEQ ID NO: 494098 - RNA, 24 nt, Human
cccaaaugcugggauuacagguau

SEQ ID NO: 494099 - RNA, 20 nt, Human
cccagcaaagcaccugaucc

SEQ ID NO: 494100 - RNA, 21 nt, Human
ccccaaaccccaaggguuccc

SEQ ID NO: 494101 - RNA, 22 nt, Human
ccccaaaugcugggauuacagg

SEQ ID NO: 494102 - RNA, 23 nt, Human
ccccagucccagcccccccgacc

SEQ ID NO: 494103 - RNA, 20 nt, Human
ccccggcgcccgcgcggccc

SEQ ID NO: 494104 - RNA, 21 nt, Human
cccgacccuccgcggcugggg

SEQ ID NO: 494105 - RNA, 22 nt, Human
cccgugagcugccuuuugccuc

SEQ ID NO: 494106 - RNA, 26 nt, Human
cccuccacuaacuacucccaaggacc

SEQ ID NO: 494107 - RNA, 18 nt, Human
cccugcccacccaggaag

SEQ ID NO: 494108 - RNA, 22 nt, Human
cccuggggccgccgcuuuggcu

SEQ ID NO: 494109 - RNA, 18 nt, Human
ccgccgagacuccaccgg

SEQ ID NO: 494110 - RNA, 21 nt, Human
ccguccugcgcagcgagccug

SEQ ID NO: 494111 - RNA, 22 nt, Human
ccguugggucugggugugaugg

SEQ ID NO: 494112 - RNA, 19 nt, Human
ccuaggccugcucaggagg

SEQ ID NO: 494113 - RNA, 25 nt, Human
ccucaaaugccaccuuugacaccca

SEQ ID NO: 494114 - RNA, 22 nt, Human
ccucaggccuccacugcuugga

SEQ ID NO: 494115 - RNA, 23 nt, Human
ccuccuguccucucccucugcca

SEQ ID NO: 494116 - RNA, 24 nt, Human
ccucucuauggggaccugagaauc

SEQ ID NO: 494117 - RNA, 20 nt, Human
ccucuuggcccuaccccaga

SEQ ID NO: 494118 - RNA, 18 nt, Human
ccugcccucgaaauaauc

SEQ ID NO: 494119 - RNA, 20 nt, Human
ccugccuggcgcccuccccg

SEQ ID NO: 494120 - RNA, 20 nt, Human
ccuggugggacuucuccccc

SEQ ID NO: 494121 - RNA, 22 nt, Human
ccuuguccuagaagcuucacaa

SEQ ID NO: 494122 - RNA, 21 nt, Human
cgaaacaaaacacccagcaca

SEQ ID NO: 494123 - RNA, 19 nt, Human
cgccgagacuccaccggcg

SEQ ID NO: 494124 - RNA, 18 nt, Human
cgcugcggggccggucgg

SEQ ID NO: 494125 - RNA, 20 nt, Human
cggcgccagaggcugagcag

SEQ ID NO: 494126 - RNA, 18 nt, Human
cggcgccaggcgggcgcc

SEQ ID NO: 494127 - RNA, 22 nt, Human
cggcuagcggcggcggauuccu

SEQ ID NO: 494128 - RNA, 18 nt, Human
cgggcuucucaggggagg

SEQ ID NO: 494129 - RNA, 24 nt, Human
cguccuggggccaucguggugcug

SEQ ID NO: 494130 - RNA, 22 nt, Human
cuagccccuccuccaaggaccc

SEQ ID NO: 494131 - RNA, 24 nt, Human
cuauaugcugggccgcagaacucc

SEQ ID NO: 494132 - RNA, 20 nt, Human
cucaagcaauccucccaccu

SEQ ID NO: 494133 - RNA, 24 nt, Human
cucaagcaauccucccaccuuggc

SEQ ID NO: 494134 - RNA, 20 nt, Human
cucaagcccucaggccucca

SEQ ID NO: 494135 - RNA, 21 nt, Human
cucaggaggcugcaacccguu

SEQ ID NO: 494136 - RNA, 23 nt, Human
cuccagggcccucauccauuccu

SEQ ID NO: 494137 - RNA, 18 nt, Human
cuccccagucccagcccc

SEQ ID NO: 494138 - RNA, 20 nt, Human
cuccgggcaggugggcaccu

SEQ ID NO: 494139 - RNA, 26 nt, Human
cuccucuaccacccaggccaagaauc

SEQ ID NO: 494140 - RNA, 24 nt, Human
cuccuggggaaggcuccuccuccu

SEQ ID NO: 494141 - RNA, 25 nt, Human
cucuugggcucaagcaauccuccca

SEQ ID NO: 494142 - RNA, 22 nt, Human
cugacugcuggggcugccagcc

SEQ ID NO: 494143 - RNA, 19 nt, Human
cugagccauuucuauaugc

SEQ ID NO: 494144 - RNA, 23 nt, Human
cugcaaaucucugcugcucugga

SEQ ID NO: 494145 - RNA, 23 nt, Human
cugcaguucugaauccacuguuc

SEQ ID NO: 494146 - RNA, 18 nt, Human
cugccaggagccaagugc

SEQ ID NO: 494147 - RNA, 19 nt, Human
cugccuugaggacacagcc

SEQ ID NO: 494148 - RNA, 20 nt, Human
cugcgcagcgagccugcgag

SEQ ID NO: 494149 - RNA, 23 nt, Human
cugcugguuuuccccagccuccc

SEQ ID NO: 494150 - RNA, 19 nt, Human
cugcugugucucaccaagg

SEQ ID NO: 494151 - RNA, 18 nt, Human
cugcuucugccugccagg

SEQ ID NO: 494152 - RNA, 23 nt, Human
cuggcugacuccuguccacgagg

SEQ ID NO: 494153 - RNA, 21 nt, Human
cuggcugcgccuuguccuaga

SEQ ID NO: 494154 - RNA, 19 nt, Human
cuggucuccaacucuuggg

SEQ ID NO: 494155 - RNA, 23 nt, Human
cuucugggccugccagaaacauc

SEQ ID NO: 494156 - RNA, 21 nt, Human
cuugccaacaggcccgggccu

SEQ ID NO: 494157 - RNA, 18 nt, Human
cuuguaagcucuggauac

SEQ ID NO: 494158 - RNA, 20 nt, Human
gaaacaaaagcaaaaacaca

SEQ ID NO: 494159 - RNA, 19 nt, Human
gaaacauccuggccccacg

SEQ ID NO: 494160 - RNA, 19 nt, Human
gaagcuugccaacaggccc

SEQ ID NO: 494161 - RNA, 20 nt, Human
gacacagccauccagucuuc

SEQ ID NO: 494162 - RNA, 21 nt, Human
gacagcaauggggcugggagc

SEQ ID NO: 494163 - RNA, 21 nt, Human
gaccacagcugcuucugccug

SEQ ID NO: 494164 - RNA, 21 nt, Human
gacccagcuugccgucuucag

SEQ ID NO: 494165 - RNA, 19 nt, Human
gacugcuggggcugccagc

SEQ ID NO: 494166 - RNA, 18 nt, Human
gagcagaaugagcuacau

SEQ ID NO: 494167 - RNA, 19 nt, Human
gagcaguggggaggcuggg

SEQ ID NO: 494168 - RNA, 19 nt, Human
gagcugccuuuugccucca

SEQ ID NO: 494169 - RNA, 24 nt, Human
gagcugggcagcccucggcaaacc

SEQ ID NO: 494170 - RNA, 21 nt, Human
gagcugugcgucuucuccggg

SEQ ID NO: 494171 - RNA, 18 nt, Human
gauuacagguaugagcca

SEQ ID NO: 494172 - RNA, 22 nt, Human
gauuacagguaugagccaccgc

SEQ ID NO: 494173 - RNA, 23 nt, Human
gauuacagguaugagccaccgca

SEQ ID NO: 494174 - RNA, 21 nt, Human
gcaacuucgcuuuccuccugg

SEQ ID NO: 494175 - RNA, 21 nt, Human
gcaggggaaggcuucuggcag

SEQ ID NO: 494176 - RNA, 19 nt, Human
gcccagaguaagaaggagg

SEQ ID NO: 494177 - RNA, 20 nt, Human
gccccaggggaauacacuuc

SEQ ID NO: 494178 - RNA, 22 nt, Human
gccccuccuccaaggacccacc

SEQ ID NO: 494179 - RNA, 19 nt, Human
gcccucggcaaacccuugc

SEQ ID NO: 494180 - RNA, 18 nt, Human
gcccuggauuucagcaga

SEQ ID NO: 494181 - RNA, 19 nt, Human
gccugcagggucuccaggc

SEQ ID NO: 494182 - RNA, 21 nt, Human
gcuccuuguaagcucuggaua

SEQ ID NO: 494183 - RNA, 18 nt, Human
gcugggccgcagaacuca

SEQ ID NO: 494184 - RNA, 22 nt, Human
gcuuccacucagccccaauuuc

SEQ ID NO: 494185 - RNA, 21 nt, Human
ggacacaucuucccuccccca

SEQ ID NO: 494186 - RNA, 23 nt, Human
ggagggagcaguggggaggcugg

SEQ ID NO: 494187 - RNA, 22 nt, Human
ggagguggcugcccccucccca

SEQ ID NO: 494188 - RNA, 21 nt, Human
ggauggaggcgcugcggggcc

SEQ ID NO: 494189 - RNA, 18 nt, Human
ggcaaggacaucugggac

SEQ ID NO: 494190 - RNA, 21 nt, Human
ggcagaguggggacagccugu

SEQ ID NO: 494191 - RNA, 21 nt, Human
ggccugccuaggccugcucag

SEQ ID NO: 494192 - RNA, 20 nt, Human
gggagcaguggggaggcugg

SEQ ID NO: 494193 - RNA, 20 nt, Human
ggggaaagguggggccgugg

SEQ ID NO: 494194 - RNA, 20 nt, Human
ggggaccugagaauccugcc

SEQ ID NO: 494195 - RNA, 20 nt, Human
ggggagggggggcauccugg

SEQ ID NO: 494196 - RNA, 19 nt, Human
gggugacuccaaccauauc

SEQ ID NO: 494197 - RNA, 18 nt, Human
guccuuccccaaacccca

SEQ ID NO: 494198 - RNA, 21 nt, Human
gugcauguauugcagaaggac

SEQ ID NO: 494199 - RNA, 25 nt, Human
uaaaaaaaacccaagaguggagacc

SEQ ID NO: 494200 - RNA, 18 nt, Human
uaaauaagucaaguaggc

SEQ ID NO: 494201 - RNA, 23 nt, Human
uaacaccaaauaaagcaggaggu

SEQ ID NO: 494202 - RNA, 21 nt, Human
uaacucggugaccaccugcgg

SEQ ID NO: 494203 - RNA, 21 nt, Human
uacagaaaaacccugugggca

SEQ ID NO: 494204 - RNA, 21 nt, Human
uacagaaacaaaagcaaaaac

SEQ ID NO: 494205 - RNA, 22 nt, Human
uacagguaugagccaccgcacc

SEQ ID NO: 494206 - RNA, 23 nt, Human
uaccauggcaguguaugcuguga

SEQ ID NO: 494207 - RNA, 22 nt, Human
uaccccagaugaggccuggcug

SEQ ID NO: 494208 - RNA, 22 nt, Human
uagcaagggacaagcccuacag

SEQ ID NO: 494209 - RNA, 20 nt, Human
ucaacccaaaaugcagcccu

SEQ ID NO: 494210 - RNA, 24 nt, Human
ucaagcaauccucccaccuuggcc

SEQ ID NO: 494211 - RNA, 19 nt, Human
ucacucaggacccagcuug

SEQ ID NO: 494212 - RNA, 25 nt, Human
ucagcccuugagaucuggcuucgcu

SEQ ID NO: 494213 - RNA, 22 nt, Human
ucaggugggggacacccuuguc

SEQ ID NO: 494214 - RNA, 20 nt, Human
ucccagcccccccgaccucc

SEQ ID NO: 494215 - RNA, 19 nt, Human
uccccaaaugcugggauua

SEQ ID NO: 494216 - RNA, 23 nt, Human
uccccaaaugcugggauuacagg

SEQ ID NO: 494217 - RNA, 26 nt, Human
uccccagucccagcccccccgaccuc

SEQ ID NO: 494218 - RNA, 22 nt, Human
uccccggccgccgagacuccac

SEQ ID NO: 494219 - RNA, 24 nt, Human
uccgcaauuaacccuggggccgcc

SEQ ID NO: 494220 - RNA, 18 nt, Human
uccgggcaggugggcacc

SEQ ID NO: 494221 - RNA, 18 nt, Human
uccucgggccagccuugg

SEQ ID NO: 494222 - RNA, 20 nt, Human
uccuggguuugaggugggag

SEQ ID NO: 494223 - RNA, 21 nt, Human
uccuguccucucccucugcca

SEQ ID NO: 494224 - RNA, 24 nt, Human
ucuaccacccaggccaagaaucaa

SEQ ID NO: 494225 - RNA, 23 nt, Human
ucucaccauguugcccaggcugg

SEQ ID NO: 494226 - RNA, 26 nt, Human
ucucaccauguugcccaggcuggucu

SEQ ID NO: 494227 - RNA, 27 nt, Human
ucucaccauguugcccaggcuggucuc

SEQ ID NO: 494228 - RNA, 23 nt, Human
ucuccaacucuugggcucaagca

SEQ ID NO: 494229 - RNA, 23 nt, Human
ucuccgggcaggugggcaccuug

SEQ ID NO: 494230 - RNA, 23 nt, Human
ucuccucuaccacccaggccaag

SEQ ID NO: 494231 - RNA, 20 nt, Human
ucuggccugcagggucucca

SEQ ID NO: 494232 - RNA, 23 nt, Human
ucuggccugcagggucuccaggc

SEQ ID NO: 494233 - RNA, 22 nt, Human
ucuugggcucaagcaauccucc

SEQ ID NO: 494234 - RNA, 20 nt, Human
ugaaacaagaaagacaccaa

SEQ ID NO: 494235 - RNA, 23 nt, Human
ugaaacaagaaagacaccaagcc

SEQ ID NO: 494236 - RNA, 19 nt, Human
ugaaguugccaauucugcu

SEQ ID NO: 494237 - RNA, 18 nt, Human
ugaaugacuggaguccac

SEQ ID NO: 494238 - RNA, 21 nt, Human
ugacagcaauggggcugggag

SEQ ID NO: 494239 - RNA, 18 nt, Human
ugaccugucucaaacacc

SEQ ID NO: 494240 - RNA, 20 nt, Human
ugacugcuggggcugccagc

SEQ ID NO: 494241 - RNA, 19 nt, Human
ugaggugggaguggggaag

SEQ ID NO: 494242 - RNA, 21 nt, Human
ugaggugggaguggggaaggc

SEQ ID NO: 494243 - RNA, 22 nt, Human
ugaguucugcuccuggguuuga

SEQ ID NO: 494244 - RNA, 18 nt, Human
ugcagaaggacaaaagcc

SEQ ID NO: 494245 - RNA, 19 nt, Human
ugccaggccugaggcagcc

SEQ ID NO: 494246 - RNA, 24 nt, Human
ugcccaggcuggucuccaacucuu

SEQ ID NO: 494247 - RNA, 28 nt, Human
ugcccaggcuggucuccaacucuugggc

SEQ ID NO: 494248 - RNA, 18 nt, Human
ugcgagagguccugccug

SEQ ID NO: 494249 - RNA, 24 nt, Human
ugcugggauuacagguaugagcca

SEQ ID NO: 494250 - RNA, 20 nt, Human
ugcuggggcugccagcucuc

SEQ ID NO: 494251 - RNA, 22 nt, Human
ugcugugucucaccaaggccug

SEQ ID NO: 494252 - RNA, 21 nt, Human
ugcuuccaucuucuccauccc

SEQ ID NO: 494253 - RNA, 21 nt, Human
uggaaaaagaggcccggccac

SEQ ID NO: 494254 - RNA, 20 nt, Human
uggaagaggcgcuccuacag

SEQ ID NO: 494255 - RNA, 22 nt, Human
uggaagggaagcggcgccaggc

SEQ ID NO: 494256 - RNA, 18 nt, Human
uggaggcgcugcggggcc

SEQ ID NO: 494257 - RNA, 22 nt, Human
uggauacugaguucugcuccug

SEQ ID NO: 494258 - RNA, 20 nt, Human
uggaugggucagaggaggua

SEQ ID NO: 494259 - RNA, 21 nt, Human
uggcaaggacaucugggacga

SEQ ID NO: 494260 - RNA, 23 nt, Human
uggcaguagcucccaggcugagg

SEQ ID NO: 494261 - RNA, 31 nt, Human
uggcugcccccuccccagucccagccccccc

SEQ ID NO: 494262 - RNA, 24 nt, Human
uggcugcgccuuguccuagaagcu

SEQ ID NO: 494263 - RNA, 22 nt, Human
uggcuggagcgcuggcuggggg

SEQ ID NO: 494264 - RNA, 21 nt, Human
uggcuucuaugcacaucuggu

SEQ ID NO: 494265 - RNA, 27 nt, Human
uggcuuugagauucaucccacaugggg

SEQ ID NO: 494266 - RNA, 21 nt, Human
ugggaauggggaugggagggg

SEQ ID NO: 494267 - RNA, 19 nt, Human
ugggauuacagguaugagc

SEQ ID NO: 494268 - RNA, 22 nt, Human
ugggauuacagguaugagccac

SEQ ID NO: 494269 - RNA, 23 nt, Human
ugggauuacagguaugagccacc

SEQ ID NO: 494270 - RNA, 24 nt, Human
ugggauuacagguaugagccaccg

SEQ ID NO: 494271 - RNA, 21 nt, Human
uggggaggcuggggaagaacg

SEQ ID NO: 494272 - RNA, 22 nt, Human
uggggaggcuggggaagaacgg

SEQ ID NO: 494273 - RNA, 18 nt, Human
ugggucagaggagguagc

SEQ ID NO: 494274 - RNA, 19 nt, Human
ugggugugauggcccucaa

SEQ ID NO: 494275 - RNA, 22 nt, Human
ugguguccauauuacucaaccc

SEQ ID NO: 494276 - RNA, 21 nt, Human
uguaugguguacauguaugua

SEQ ID NO: 494277 - RNA, 19 nt, Human
uguccaggaaaccagaagc

SEQ ID NO: 494278 - RNA, 20 nt, Human
ugucugcauagaugugugug

SEQ ID NO: 494279 - RNA, 23 nt, Human
ugucuguggccauggcaaggaca

SEQ ID NO: 494280 - RNA, 21 nt, Human
ugugaccugucucaaacaccc

SEQ ID NO: 494281 - RNA, 20 nt, Human
ugugcaggaccugggaggga

SEQ ID NO: 494282 - RNA, 23 nt, Human
uguggaacggcgccagaggcuga

SEQ ID NO: 494283 - RNA, 22 nt, Human
uguggccugccacguggccacc

SEQ ID NO: 494284 - RNA, 22 nt, Human
ugugggguuuggucagcagcug

SEQ ID NO: 494285 - RNA, 18 nt, Human
ugugugcacuugugccuu

SEQ ID NO: 494286 - RNA, 19 nt, Human
uguuuauuuucaagugcau

SEQ ID NO: 494287 - RNA, 22 nt, Human
uuaagcacaggcuccucugagg

SEQ ID NO: 494288 - RNA, 21 nt, Human
uucagagcugguguuccuuug

SEQ ID NO: 494289 - RNA, 20 nt, Human
uuccgcggccccggcgcccg

SEQ ID NO: 494290 - RNA, 19 nt, Human
uucucaggggagggggggc

SEQ ID NO: 494291 - RNA, 20 nt, Human
uuucagagcugguguuccuu

SEQ ID NO: 494292 - RNA, 24 nt, Human
uuucuuuccccugcccugcccucg

SEQ ID NO: 494293 - RNA, 25 nt, Human
uuuggcuggagcgcuggcugggggc

SEQ ID NO: 494294 - RNA, 22 nt, Human
aaagaagaagagcaauacccug

SEQ ID NO: 494295 - RNA, 24 nt, Human
acagauggcagcuucacaggucaa

SEQ ID NO: 494296 - RNA, 22 nt, Human
agagauguaggcaaggcucaga

SEQ ID NO: 494297 - RNA, 22 nt, Human
agcaauacccuguuucacuggu

SEQ ID NO: 494298 - RNA, 24 nt, Human
agggguggggagacugcuugaggu

SEQ ID NO: 494299 - RNA, 20 nt, Human
agguuccccagucuguuuuc

SEQ ID NO: 494300 - RNA, 19 nt, Human
caccagguggcagcaaagc

SEQ ID NO: 494301 - RNA, 24 nt, Human
cagacaggaagaucaagaaaagaa

SEQ ID NO: 494302 - RNA, 20 nt, Human
cagagaaagugacugaggcu

SEQ ID NO: 494303 - RNA, 25 nt, Human
caggaagaucaagaaaagaagaaga

SEQ ID NO: 494304 - RNA, 20 nt, Human
ccagacaggaagaucaagaa

SEQ ID NO: 494305 - RNA, 19 nt, Human
cccaggcacccugugaacu

SEQ ID NO: 494306 - RNA, 26 nt, Human
cccccagacuggaggcauccuggccu

SEQ ID NO: 494307 - RNA, 18 nt, Human
cccugugaacuuaagagc

SEQ ID NO: 494308 - RNA, 22 nt, Human
ccuccaggccacaaagucucug

SEQ ID NO: 494309 - RNA, 19 nt, Human
gaaaaugcuggugagcucu

SEQ ID NO: 494310 - RNA, 18 nt, Human
gaagcaaaugaggaagca

SEQ ID NO: 494311 - RNA, 21 nt, Human
gagcaauacccuguuucacug

SEQ ID NO: 494312 - RNA, 20 nt, Human
gcauccaaccuuguucccac

SEQ ID NO: 494313 - RNA, 21 nt, Human
gcauccaaccuuguucccacu

SEQ ID NO: 494314 - RNA, 18 nt, Human
ggagaagcaaaugaggaa

SEQ ID NO: 494315 - RNA, 18 nt, Human
ggcugggagaagcaaaug

SEQ ID NO: 494316 - RNA, 22 nt, Human
guguggacacaacucacacuca

SEQ ID NO: 494317 - RNA, 26 nt, Human
uaauaggccuccaggccacaaagucu

SEQ ID NO: 494318 - RNA, 18 nt, Human
uaggccuccaggccacaa

SEQ ID NO: 494319 - RNA, 19 nt, Human
ucagugugauacccacaga

SEQ ID NO: 494320 - RNA, 24 nt, Human
ucccccagacuggaggcauccugg

SEQ ID NO: 494321 - RNA, 20 nt, Human
uggaaaaugcuggugagcuc

SEQ ID NO: 494322 - RNA, 20 nt, Human
uggacacaaaaguccuucug

SEQ ID NO: 494323 - RNA, 20 nt, Human
ugggagaagcaaaugaggaa

SEQ ID NO: 494324 - RNA, 25 nt, Human
ugggagaagcaaaugaggaagcugg

SEQ ID NO: 494325 - RNA, 25 nt, Human
uggugagcucuuuggugaaagaucc

SEQ ID NO: 494326 - RNA, 23 nt, Human
ugugauacccacagacauguagu

SEQ ID NO: 494327 - RNA, 23 nt, Human
uguucccacuuccuuccuugaau

SEQ ID NO: 494328 - RNA, 20 nt, Human
uuaguauuaacagauggcag

SEQ ID NO: 494329 - RNA, 28 nt, Human
uuauggaucaauuccacugauacugugu

SEQ ID NO: 494330 - RNA, 20 nt, Human
uucccacuuccuuccuugaa

SEQ ID NO: 494331 - RNA, 24 nt, Human
uuccuugaauccacugggaacucc

SEQ ID NO: 494332 - RNA, 23 nt, Human
uuucacuggugggaugugcugcu

SEQ ID NO: 494333 - RNA, 21 nt, Human
uuuuuuuuuuuuuucuuauuu

SEQ ID NO: 494334 - RNA, 25 nt, Human
uuuuuuuuuuuuuuucuuauuuggg

SEQ ID NO: 494335 - RNA, 21 nt, Human
accaccuccuucuguuuuguc

SEQ ID NO: 494336 - RNA, 21 nt, Human
accggcagcaggcggacagac

SEQ ID NO: 494337 - RNA, 24 nt, Human
auggcagcggcggcggcggcagca

SEQ ID NO: 494338 - RNA, 24 nt, Human
caagggaaccuccccccuggcucg

SEQ ID NO: 494339 - RNA, 25 nt, Human
caagggaaccuccccccuggcucgu

SEQ ID NO: 494340 - RNA, 22 nt, Human
caccacacgggcaggagagaac

SEQ ID NO: 494341 - RNA, 22 nt, Human
cacguucuucccucaucgucca

SEQ ID NO: 494342 - RNA, 20 nt, Human
cagccucucccucagccaag

SEQ ID NO: 494343 - RNA, 18 nt, Human
caguucucagccucuccc

SEQ ID NO: 494344 - RNA, 19 nt, Human
ccaaggaaugaggaaacag

SEQ ID NO: 494345 - RNA, 22 nt, Human
ccaaggcaauggcuaagggagu

SEQ ID NO: 494346 - RNA, 18 nt, Human
ccaggaugaggagccagg

SEQ ID NO: 494347 - RNA, 21 nt, Human
ccccgagagcaccaccuccuu

SEQ ID NO: 494348 - RNA, 24 nt, Human
cccgggcucgggaaaguucucccc

SEQ ID NO: 494349 - RNA, 18 nt, Human
ccggggccugcugccucc

SEQ ID NO: 494350 - RNA, 23 nt, Human
ccucagagcccuguugcucccag

SEQ ID NO: 494351 - RNA, 21 nt, Human
ccugcagcuaauuaaaaccgc

SEQ ID NO: 494352 - RNA, 23 nt, Human
ccuggcuucccuccucagccucc

SEQ ID NO: 494353 - RNA, 19 nt, Human
cgccucugccccccacccg

SEQ ID NO: 494354 - RNA, 22 nt, Human
cggccccggccagcugcggcgc

SEQ ID NO: 494355 - RNA, 25 nt, Human
cguggggaccugucccugugccugg

SEQ ID NO: 494356 - RNA, 23 nt, Human
cucagagcccuguugcucccagg

SEQ ID NO: 494357 - RNA, 24 nt, Human
cucaucguccacaccaggcgucca

SEQ ID NO: 494358 - RNA, 22 nt, Human
cuccccucagcugcccagagga

SEQ ID NO: 494359 - RNA, 19 nt, Human
cuccucagccuccuggccu

SEQ ID NO: 494360 - RNA, 22 nt, Human
cuccuggccucgggaacucauc

SEQ ID NO: 494361 - RNA, 22 nt, Human
cucugcaccgggcgcuggucuc

SEQ ID NO: 494362 - RNA, 24 nt, Human
cugcuucugggccuggacgcuccc

SEQ ID NO: 494363 - RNA, 24 nt, Human
gaaaccaugugcuuuauuuggaac

SEQ ID NO: 494364 - RNA, 20 nt, Human
gaacucaucugcucgucgcc

SEQ ID NO: 494365 - RNA, 20 nt, Human
gaauggagccaggcacugcc

SEQ ID NO: 494366 - RNA, 20 nt, Human
gagcccuggcuucccuccuc

SEQ ID NO: 494367 - RNA, 23 nt, Human
gagccuacagcccagucccccga

SEQ ID NO: 494368 - RNA, 20 nt, Human
gaggaugcccgggagcacag

SEQ ID NO: 494369 - RNA, 23 nt, Human
gaggaugcccgggagcacaggug

SEQ ID NO: 494370 - RNA, 21 nt, Human
gcagcagcggggacucugcac

SEQ ID NO: 494371 - RNA, 24 nt, Human
gcccagucccccgagagcaccacc

SEQ ID NO: 494372 - RNA, 20 nt, Human
gccgcgguggcagcagcggg

SEQ ID NO: 494373 - RNA, 18 nt, Human
gccuucugccgcgguggc

SEQ ID NO: 494374 - RNA, 21 nt, Human
gcgcuggucucugagcccugg

SEQ ID NO: 494375 - RNA, 27 nt, Human
gcggcagcaaacucugggacgaguccc

SEQ ID NO: 494376 - RNA, 23 nt, Human
gcggcggcagcaaacucugggac

SEQ ID NO: 494377 - RNA, 18 nt, Human
ggaccugucccugugccu

SEQ ID NO: 494378 - RNA, 25 nt, Human
ggaugaggagccagggacaggagga

SEQ ID NO: 494379 - RNA, 19 nt, Human
ggcgccucugccccccacc

SEQ ID NO: 494380 - RNA, 21 nt, Human
gggaaaguucucuguccggug

SEQ ID NO: 494381 - RNA, 23 nt, Human
gggcgcuggucucugagcccugg

SEQ ID NO: 494382 - RNA, 27 nt, Human
gggcggccccggccagcugcggcgccc

SEQ ID NO: 494383 - RNA, 25 nt, Human
uacagcccagucccccgagagcacc

SEQ ID NO: 494384 - RNA, 20 nt, Human
uacaggccaggggcuggggu

SEQ ID NO: 494385 - RNA, 20 nt, Human
uagaaaagcugcaaaccacg

SEQ ID NO: 494386 - RNA, 19 nt, Human
uccaggggugucugcccag

SEQ ID NO: 494387 - RNA, 19 nt, Human
ucccccgagagcaccaccu

SEQ ID NO: 494388 - RNA, 23 nt, Human
ucccccgagagcaccaccuccuu

SEQ ID NO: 494389 - RNA, 18 nt, Human
uccccucagcugcccaga

SEQ ID NO: 494390 - RNA, 20 nt, Human
ucccggcugagggcucccgg

SEQ ID NO: 494391 - RNA, 27 nt, Human
ucccuguggccguggggaccugucccu

SEQ ID NO: 494392 - RNA, 19 nt, Human
ucugcucgucgccgaucga

SEQ ID NO: 494393 - RNA, 20 nt, Human
ugaggaaacagguacaggcc

SEQ ID NO: 494394 - RNA, 25 nt, Human
ugcccaguucucagccucucccuca

SEQ ID NO: 494395 - RNA, 21 nt, Human
ugccucccacagcgauggcuc

SEQ ID NO: 494396 - RNA, 21 nt, Human
ugccuggcuccaggcagcaug

SEQ ID NO: 494397 - RNA, 18 nt, Human
uggcagcggcggcggcgg

SEQ ID NO: 494398 - RNA, 19 nt, Human
uggcuaagggagugcggga

SEQ ID NO: 494399 - RNA, 21 nt, Human
uggcucaggggucaccucuug

SEQ ID NO: 494400 - RNA, 19 nt, Human
uggcugcagcugcuucugg

SEQ ID NO: 494401 - RNA, 19 nt, Human
uggcuucccuccucagccu

SEQ ID NO: 494402 - RNA, 22 nt, Human
ugggagagaggcugcuauggca

SEQ ID NO: 494403 - RNA, 23 nt, Human
uggggcucuucuugauuucagcu

SEQ ID NO: 494404 - RNA, 23 nt, Human
uggucucugagcccuggcuuccc

SEQ ID NO: 494405 - RNA, 21 nt, Human
ugucagacuaguucuucccug

SEQ ID NO: 494406 - RNA, 21 nt, Human
ugucggcugagcuccaggggu

SEQ ID NO: 494407 - RNA, 23 nt, Human
uucccugcgcgcggcucucgcuu

SEQ ID NO: 494408 - RNA, 22 nt, Human
uuugcucuggaaaccaugugcu

SEQ ID NO: 494409 - RNA, 22 nt, Human
uuuuuuuuuuuuuugcucugga

SEQ ID NO: 494410 - RNA, 23 nt, Human
uuuuuuuuuuuuuuuugcucugg

SEQ ID NO: 494411 - RNA, 20 nt, Human
uuuuuuuuuuuuuuuuugcu

SEQ ID NO: 494412 - RNA, 24 nt, Human
uuuuuuuuuuuuuuuuugcucugg

SEQ ID NO: 494413 - RNA, 20 nt, Human
uuuuuuuuuuuuuuuuuugg

SEQ ID NO: 494414 - RNA, 26 nt, Human
aaaaaaaaaaaacaaaacacaaaagg

SEQ ID NO: 494415 - RNA, 30 nt, Human
aaaaaaagaacaaaacaaaacaaacaaaaa

SEQ ID NO: 494416 - RNA, 22 nt, Human
aaaaaaccuacguggccaugcu

SEQ ID NO: 494417 - RNA, 22 nt, Human
aaaacacaaaagguagaaucug

SEQ ID NO: 494418 - RNA, 22 nt, Human
aaaacagacuaaacacacuccc

SEQ ID NO: 494419 - RNA, 27 nt, Human
aaaaccaucuccacccacauaacacag

SEQ ID NO: 494420 - RNA, 22 nt, Human
aaacaaaacaguaaugaaagaa

SEQ ID NO: 494421 - RNA, 18 nt, Human
aaacaaacaaaaaaccuc

SEQ ID NO: 494422 - RNA, 21 nt, Human
aaacagacuaaacacacuccc

SEQ ID NO: 494423 - RNA, 19 nt, Human
aaacaggaauaaugagaca

SEQ ID NO: 494424 - RNA, 23 nt, Human
aaacaguaaugaaagaaugaaaa

SEQ ID NO: 494425 - RNA, 21 nt, Human
aacaaaaaaccuacguggcca

SEQ ID NO: 494426 - RNA, 24 nt, Human
aacacaaaagguagaaucugugga

SEQ ID NO: 494427 - RNA, 22 nt, Human
aacacacucccgauacacauaa

SEQ ID NO: 494428 - RNA, 21 nt, Human
aacagagugagacuccgucuc

SEQ ID NO: 494429 - RNA, 22 nt, Human
aacucuggaaagcucuccugaa

SEQ ID NO: 494430 - RNA, 23 nt, Human
aagauugcgccacugcauuccag

SEQ ID NO: 494431 - RNA, 18 nt, Human
aagcaggucugcuacaua

SEQ ID NO: 494432 - RNA, 24 nt, Human
aaguggagguuaaagugagccaag

SEQ ID NO: 494433 - RNA, 27 nt, Human
aauaaaacagacuaaacacacucccga

SEQ ID NO: 494434 - RNA, 24 nt, Human
aauugcuugaaccagggaagugga

SEQ ID NO: 494435 - RNA, 21 nt, Human
acaaaacaaaacaaacaaaaa

SEQ ID NO: 494436 - RNA, 23 nt, Human
acaaaacaaaacaaacaaaaaac

SEQ ID NO: 494437 - RNA, 18 nt, Human
acaaaacaaacaaaaaac

SEQ ID NO: 494438 - RNA, 21 nt, Human
acaaaacaaacaaaaaaccua

SEQ ID NO: 494439 - RNA, 27 nt, Human
acaaaacaguaaugaaagaaugaaaac

SEQ ID NO: 494440 - RNA, 23 nt, Human
acagagugagacuccgucucaaa

SEQ ID NO: 494441 - RNA, 24 nt, Human
acagagugagacuccgucucaaaa

SEQ ID NO: 494442 - RNA, 24 nt, Human
accccgucucuacuaaaaauacaa

SEQ ID NO: 494443 - RNA, 26 nt, Human
acgacggcggcggcagacgaguccuu

SEQ ID NO: 494444 - RNA, 22 nt, Human
acggcgacgacggcggcggcuu

SEQ ID NO: 494445 - RNA, 24 nt, Human
acugcauuccagccuggguaacag

SEQ ID NO: 494446 - RNA, 26 nt, Human
acugcauuccagccuggguaacagag

SEQ ID NO: 494447 - RNA, 23 nt, Human
agaaauggcagagcucugaacaa

SEQ ID NO: 494448 - RNA, 27 nt, Human
agaacaaaacaaaacaaacaaaaaaga

SEQ ID NO: 494449 - RNA, 21 nt, Human
agacaaugaugaaacagcuau

SEQ ID NO: 494450 - RNA, 27 nt, Human
agacaggaugaaaggaacaaaaccaaa

SEQ ID NO: 494451 - RNA, 18 nt, Human
agauacaaaggauaaaac

SEQ ID NO: 494452 - RNA, 23 nt, Human
agccacauaccucacugugccuu

SEQ ID NO: 494453 - RNA, 18 nt, Human
agccggcgccgccgccgc

SEQ ID NO: 494454 - RNA, 24 nt, Human
agccuggguaacagagugagacuc

SEQ ID NO: 494455 - RNA, 23 nt, Human
agcugggcgugguggugugugcc

SEQ ID NO: 494456 - RNA, 24 nt, Human
agcugggcuugcauggugaaaccc

SEQ ID NO: 494457 - RNA, 20 nt, Human
aggaauguucacguuuucug

SEQ ID NO: 494458 - RNA, 21 nt, Human
aggaugaaaggaacaaaacca

SEQ ID NO: 494459 - RNA, 22 nt, Human
aggcaggggaauugcuugaacc

SEQ ID NO: 494460 - RNA, 24 nt, Human
aggcaggggaauugcuugaaccag

SEQ ID NO: 494461 - RNA, 18 nt, Human
aguaaggaauauaaaaau

SEQ ID NO: 494462 - RNA, 21 nt, Human
aucaccuucuuguucagaaag

SEQ ID NO: 494463 - RNA, 22 nt, Human
augaaaaccaucuccacccaca

SEQ ID NO: 494464 - RNA, 22 nt, Human
augagcaucaggcuauuuacaa

SEQ ID NO: 494465 - RNA, 24 nt, Human
caaaaaaacuagcugggcguggug

SEQ ID NO: 494466 - RNA, 24 nt, Human
caaaacaaacaaaaaaccuacgug

SEQ ID NO: 494467 - RNA, 19 nt, Human
caaaacaguaaugaaagaa

SEQ ID NO: 494468 - RNA, 23 nt, Human
caaaggauaaaacaaaacaguaa

SEQ ID NO: 494469 - RNA, 25 nt, Human
caaaggcaaacacugaucaccuucu

SEQ ID NO: 494470 - RNA, 19 nt, Human
caagaaauggcagagcucu

SEQ ID NO: 494471 - RNA, 23 nt, Human
caagaagagaaaaugccaaaucc

SEQ ID NO: 494472 - RNA, 22 nt, Human
cacaacagaacauuuaccagag

SEQ ID NO: 494473 - RNA, 19 nt, Human
cacugcauuccagccuggg

SEQ ID NO: 494474 - RNA, 22 nt, Human
cacugcauuccagccuggguaa

SEQ ID NO: 494475 - RNA, 23 nt, Human
cacugcauuccagccuggguaac

SEQ ID NO: 494476 - RNA, 24 nt, Human
cacugcauuccagccuggguaaca

SEQ ID NO: 494477 - RNA, 20 nt, Human
cagccuggguaacagaguga

SEQ ID NO: 494478 - RNA, 28 nt, Human
cagcuaaaacaggaauaaugagaagacc

SEQ ID NO: 494479 - RNA, 18 nt, Human
caucagguacauuucaag

SEQ ID NO: 494480 - RNA, 18 nt, Human
cauggugaaaccccgucu

SEQ ID NO: 494481 - RNA, 19 nt, Human
cauggugaaaccccgucuc

SEQ ID NO: 494482 - RNA, 21 nt, Human
cauggugaaaccccgucucua

SEQ ID NO: 494483 - RNA, 24 nt, Human
cauuccagccuggguaacagagug

SEQ ID NO: 494484 - RNA, 20 nt, Human
ccacugcauuccagccuggg

SEQ ID NO: 494485 - RNA, 20 nt, Human
ccacugcauuccagccuggg

SEQ ID NO: 494486 - RNA, 21 nt, Human
ccacugcauuccagccugggu

SEQ ID NO: 494487 - RNA, 22 nt, Human
ccacugcauuccagccugggua

SEQ ID NO: 494488 - RNA, 24 nt, Human
ccacugcauuccagccuggguaac

SEQ ID NO: 494489 - RNA, 21 nt, Human
cccacauaacacagacaggau

SEQ ID NO: 494490 - RNA, 20 nt, Human
ccccaaaacacaugagcacc

SEQ ID NO: 494491 - RNA, 19 nt, Human
cccccgagccgcccgcagg

SEQ ID NO: 494492 - RNA, 22 nt, Human
cccccgagccgcccgcaggccc

SEQ ID NO: 494493 - RNA, 23 nt, Human
cccccgagccgcccgcaggcccc

SEQ ID NO: 494494 - RNA, 20 nt, Human
cccccgccgccgcggccugc

SEQ ID NO: 494495 - RNA, 21 nt, Human
ccccgagccgcccgcaggccc

SEQ ID NO: 494496 - RNA, 19 nt, Human
ccccgccgccgcggccugc

SEQ ID NO: 494497 - RNA, 21 nt, Human
ccccgcgccggcgcuuuguuc

SEQ ID NO: 494498 - RNA, 21 nt, Human
ccccgcgcgcccucagcccgg

SEQ ID NO: 494499 - RNA, 18 nt, Human
cccgcaggccccgcgccg

SEQ ID NO: 494500 - RNA, 19 nt, Human
cccgcccccgccgccgcgg

SEQ ID NO: 494501 - RNA, 22 nt, Human
cccugcccgcguccuccggcug

SEQ ID NO: 494502 - RNA, 19 nt, Human
ccgcaggccccgcgcgccc

SEQ ID NO: 494503 - RNA, 19 nt, Human
ccgccgccgccgccgcagg

SEQ ID NO: 494504 - RNA, 24 nt, Human
ccgccgccgccgccgcaggccccg

SEQ ID NO: 494505 - RNA, 18 nt, Human
ccgccgccgccgccgccg

SEQ ID NO: 494506 - RNA, 18 nt, Human
ccgccgccgccgccgccg

SEQ ID NO: 494507 - RNA, 18 nt, Human
ccgccgccgccgccgccg

SEQ ID NO: 494508 - RNA, 18 nt, Human
ccgccgccgccgccgccg

SEQ ID NO: 494509 - RNA, 21 nt, Human
ccgccgccgccgccgccgcag

SEQ ID NO: 494510 - RNA, 24 nt, Human
ccgccgccgccgccgccgccgccg

SEQ ID NO: 494511 - RNA, 24 nt, Human
ccgccgccgccgccgccgccgccg

SEQ ID NO: 494512 - RNA, 22 nt, Human
ccgccgccgccgcgggcccgcc

SEQ ID NO: 494513 - RNA, 19 nt, Human
ccgccgccgcggccugcgc

SEQ ID NO: 494514 - RNA, 21 nt, Human
ccgccgcgcccaucgcggccc

SEQ ID NO: 494515 - RNA, 19 nt, Human
ccgccgcggccugcgccuu

SEQ ID NO: 494516 - RNA, 28 nt, Human
ccgccgggccgccgccgccgccgccggc

SEQ ID NO: 494517 - RNA, 19 nt, Human
ccgcgcccaucgcggcccc

SEQ ID NO: 494518 - RNA, 18 nt, Human
ccgcgccggcgcuuuguc

SEQ ID NO: 494519 - RNA, 24 nt, Human
ccgcgcgcccucagcccgcugccc

SEQ ID NO: 494520 - RNA, 22 nt, Human
ccgcggaggccagcccgcccua

SEQ ID NO: 494521 - RNA, 22 nt, Human
ccggcgccgccgccgcagcugc

SEQ ID NO: 494522 - RNA, 22 nt, Human
ccgucucaaaaaaagaacaaaa

SEQ ID NO: 494523 - RNA, 24 nt, Human
ccuccggcuggcugggcucgguuc

SEQ ID NO: 494524 - RNA, 22 nt, Human
ccuggguaacagagugagacuc

SEQ ID NO: 494525 - RNA, 21 nt, Human
ccuguaaucccagcuacucgg

SEQ ID NO: 494526 - RNA, 20 nt, Human
ccuuuaagaggggaccaugc

SEQ ID NO: 494527 - RNA, 20 nt, Human
cgccacugcauuccagccug

SEQ ID NO: 494528 - RNA, 20 nt, Human
cgccccuugcuuuaaaaccu

SEQ ID NO: 494529 - RNA, 18 nt, Human
cgccgccgccgccgcagg

SEQ ID NO: 494530 - RNA, 19 nt, Human
cgccgccgccgccgcgggc

SEQ ID NO: 494531 - RNA, 21 nt, Human
cgccgccgccgccgcgggccc

SEQ ID NO: 494532 - RNA, 25 nt, Human
cgccgccgccgccgcgggcccgccg

SEQ ID NO: 494533 - RNA, 28 nt, Human
cggcccccgagccgcccgcaggccccuc

SEQ ID NO: 494534 - RNA, 19 nt, Human
cggcgcgcgcuagcggcgg

SEQ ID NO: 494535 - RNA, 26 nt, Human
cggcucgggcgcgagguggcggcggg

SEQ ID NO: 494536 - RNA, 19 nt, Human
cgggcagcgccgccgccgc

SEQ ID NO: 494537 - RNA, 18 nt, Human
cguagccggcgccgccgc

SEQ ID NO: 494538 - RNA, 18 nt, Human
cuacguggccagcugggc

SEQ ID NO: 494539 - RNA, 25 nt, Human
cuacguggccaugcugagcagaguu

SEQ ID NO: 494540 - RNA, 24 nt, Human
cuagcugggcgugguggugugugc

SEQ ID NO: 494541 - RNA, 25 nt, Human
cucaaaaaaagaacaaaacaaaaca

SEQ ID NO: 494542 - RNA, 19 nt, Human
cuccggcuggcugggcucg

SEQ ID NO: 494543 - RNA, 21 nt, Human
cucgcgcgcggggacgcgggg

SEQ ID NO: 494544 - RNA, 25 nt, Human
cugcaaauaaaacagacuaaacaca

SEQ ID NO: 494545 - RNA, 20 nt, Human
cuguguacaucagauuuauu

SEQ ID NO: 494546 - RNA, 21 nt, Human
gaacaaaacaaaacaaacaaa

SEQ ID NO: 494547 - RNA, 22 nt, Human
gaacaaaacaaaacaaacaaaa

SEQ ID NO: 494548 - RNA, 18 nt, Human
gaaguggagguuaaagug

SEQ ID NO: 494549 - RNA, 24 nt, Human
gagaacagccacauaccucacugu

SEQ ID NO: 494550 - RNA, 18 nt, Human
gagcaaagggucucaaaa

SEQ ID NO: 494551 - RNA, 22 nt, Human
gagcaccaaaauugucaaagaa

SEQ ID NO: 494552 - RNA, 23 nt, Human
gagguuaaagugagccaagauug

SEQ ID NO: 494553 - RNA, 24 nt, Human
gcauuccagccuggguaacagagu

SEQ ID NO: 494554 - RNA, 19 nt, Human
gccacugcauuccagccug

SEQ ID NO: 494555 - RNA, 24 nt, Human
gccacugcauuccagccuggguaa

SEQ ID NO: 494556 - RNA, 18 nt, Human
gcccccgccgccgcggcc

SEQ ID NO: 494557 - RNA, 25 nt, Human
gccgcgaggcccggcccgggcagcg

SEQ ID NO: 494558 - RNA, 19 nt, Human
gcgccgccgccgcagcugc

SEQ ID NO: 494559 - RNA, 24 nt, Human
gcuugcauggugaaaccccgucuc

SEQ ID NO: 494560 - RNA, 20 nt, Human
ggagguuaaagugagccaag

SEQ ID NO: 494561 - RNA, 20 nt, Human
ggcagacgaguccgggcucc

SEQ ID NO: 494562 - RNA, 18 nt, Human
ggcccgccgcgcccaucg

SEQ ID NO: 494563 - RNA, 22 nt, Human
ggccgaaugaacuaccacgaga

SEQ ID NO: 494564 - RNA, 27 nt, Human
ggcgcgagguggcggcggcuccucccu

SEQ ID NO: 494565 - RNA, 23 nt, Human
ggcgugguggugugugccuguaa

SEQ ID NO: 494566 - RNA, 20 nt, Human
ggcuugcauggugaaacccc

SEQ ID NO: 494567 - RNA, 21 nt, Human
ggucaagaagagaaaaugccc

SEQ ID NO: 494568 - RNA, 24 nt, Human
gguggugugugccuguaaucccag

SEQ ID NO: 494569 - RNA, 25 nt, Human
guaauacaauucuucagcuaaaaca

SEQ ID NO: 494570 - RNA, 22 nt, Human
gucucaaaaaaagaacaaaaca

SEQ ID NO: 494571 - RNA, 20 nt, Human
guggccaugcugagcagagu

SEQ ID NO: 494572 - RNA, 23 nt, Human
guggugugugccuguaaucccag

SEQ ID NO: 494573 - RNA, 24 nt, Human
guggugugugccuguaaucccagc

SEQ ID NO: 494574 - RNA, 20 nt, Human
gugugccuguaaucccagcu

SEQ ID NO: 494575 - RNA, 24 nt, Human
uaaaacaaaacaguaaugaaagaa

SEQ ID NO: 494576 - RNA, 23 nt, Human
uaaaacagacuaaacacacuccc

SEQ ID NO: 494577 - RNA, 26 nt, Human
uaaacacacucccgauacacauaaau

SEQ ID NO: 494578 - RNA, 23 nt, Human
uaacacagacaggaugaaaggaa

SEQ ID NO: 494579 - RNA, 23 nt, Human
uaacagagugagacuccgucuca

SEQ ID NO: 494580 - RNA, 22 nt, Human
uaagaggggaccaugcccggcg

SEQ ID NO: 494581 - RNA, 24 nt, Human
uaaugagacaaaaugguucugaaa

SEQ ID NO: 494582 - RNA, 24 nt, Human
uaauuaaaaacgucuuuuccagca

SEQ ID NO: 494583 - RNA, 21 nt, Human
uacaaaaaaacuagcugggcg

SEQ ID NO: 494584 - RNA, 23 nt, Human
uacaauucuucagcuaaaacagg

SEQ ID NO: 494585 - RNA, 20 nt, Human
uacauaauguucagcaagaa

SEQ ID NO: 494586 - RNA, 26 nt, Human
uaccacgagaacagccacauaccuca

SEQ ID NO: 494587 - RNA, 20 nt, Human
uaccaugaggggaaaugauc

SEQ ID NO: 494588 - RNA, 18 nt, Human
uagaaucuguggaauguu

SEQ ID NO: 494589 - RNA, 22 nt, Human
uaggccgaaugaacuaccacga

SEQ ID NO: 494590 - RNA, 26 nt, Human
uauguguguguguuucagucugugua

SEQ ID NO: 494591 - RNA, 23 nt, Human
uauuaaggcacauuugaucugag

SEQ ID NO: 494592 - RNA, 26 nt, Human
ucaaaaaaagaacaaaacaaaacaaa

SEQ ID NO: 494593 - RNA, 19 nt, Human
ucagcccgcugcccccgcc

SEQ ID NO: 494594 - RNA, 19 nt, Human
ucaucagguacauuucaag

SEQ ID NO: 494595 - RNA, 23 nt, Human
ucauuucacuuuuguccccaaaa

SEQ ID NO: 494596 - RNA, 19 nt, Human
uccagccuggguaacagag

SEQ ID NO: 494597 - RNA, 23 nt, Human
uccagccuggguaacagagugag

SEQ ID NO: 494598 - RNA, 24 nt, Human
uccagccuggguaacagagugaga

SEQ ID NO: 494599 - RNA, 23 nt, Human
uccccaaaacacaugagcaccaa

SEQ ID NO: 494600 - RNA, 22 nt, Human
uccccaacguuuugauuagggu

SEQ ID NO: 494601 - RNA, 21 nt, Human
uccgcacgcccgcccccgccg

SEQ ID NO: 494602 - RNA, 26 nt, Human
uccgcacgcccgcccccgccgccgcg

SEQ ID NO: 494603 - RNA, 21 nt, Human
ucguagccggcgccgccgccg

SEQ ID NO: 494604 - RNA, 25 nt, Human
ucucuacuaaaaauacaaaaaaacu

SEQ ID NO: 494605 - RNA, 21 nt, Human
ucugaaaaguacaauagaaaa

SEQ ID NO: 494606 - RNA, 28 nt, Human
ucuucagcuaaaacaggaauaaugagac

SEQ ID NO: 494607 - RNA, 18 nt, Human
ugaaaaguacaauagaaa

SEQ ID NO: 494608 - RNA, 22 nt, Human
ugaaaaguacaauagaaaaaua

SEQ ID NO: 494609 - RNA, 18 nt, Human
ugaaaggaacaaaaccaa

SEQ ID NO: 494610 - RNA, 22 nt, Human
ugaaaggaacaaaaccaaauac

SEQ ID NO: 494611 - RNA, 19 nt, Human
ugaagacaaugaugaaaca

SEQ ID NO: 494612 - RNA, 22 nt, Human
ugagccaagauugcgccacugc

SEQ ID NO: 494613 - RNA, 21 nt, Human
ugcauggugaaaccccgucuc

SEQ ID NO: 494614 - RNA, 18 nt, Human
ugccauaggacuggagca

SEQ ID NO: 494615 - RNA, 23 nt, Human
ugccuguaaucccagcuacucgg

SEQ ID NO: 494616 - RNA, 24 nt, Human
ugccuguaaucccagcuacucggg

SEQ ID NO: 494617 - RNA, 18 nt, Human
uggcagagcucugaacaa

SEQ ID NO: 494618 - RNA, 24 nt, Human
ugguggugugugccuguaauccca

SEQ ID NO: 494619 - RNA, 21 nt, Human
uggugugugccuguaauccca

SEQ ID NO: 494620 - RNA, 21 nt, Human
ugucaaagaacacuuaauauu

SEQ ID NO: 494621 - RNA, 25 nt, Human
uguucaaaggcaaacacugaucacc

SEQ ID NO: 494622 - RNA, 25 nt, Human
uuaaaaaaguuuuguucaucaggua

SEQ ID NO: 494623 - RNA, 20 nt, Human
uucagaaagcucaaucuuaa

SEQ ID NO: 494624 - RNA, 20 nt, Human
uucgcacggcgccugucccc

SEQ ID NO: 494625 - RNA, 24 nt, Human
uugcauggugaaaccccgucucua

SEQ ID NO: 494626 - RNA, 23 nt, Human
uugcgccacugcauuccagccug

SEQ ID NO: 494627 - RNA, 24 nt, Human
uugcuugaaccagggaaguggagg

SEQ ID NO: 494628 - RNA, 23 nt, Human
uuucugccauaggacuggagcaa

SEQ ID NO: 494629 - RNA, 20 nt, Human
aaaaguuaaaaguugacacu

SEQ ID NO: 494630 - RNA, 20 nt, Human
aaacaaauauucaaacaagu

SEQ ID NO: 494631 - RNA, 26 nt, Human
aagcaaaugaauuuugucaccaaggg

SEQ ID NO: 494632 - RNA, 26 nt, Human
aauacacaaagugaaaaacuauuaga

SEQ ID NO: 494633 - RNA, 27 nt, Human
aauguacaucuuaaauacauauacaca

SEQ ID NO: 494634 - RNA, 21 nt, Human
acauauacacacaacaacaug

SEQ ID NO: 494635 - RNA, 22 nt, Human
accauacuacauuaaccagccc

SEQ ID NO: 494636 - RNA, 19 nt, Human
agaaaaaaacacagguaga

SEQ ID NO: 494637 - RNA, 22 nt, Human
agaaaaaaacacagguagacuu

SEQ ID NO: 494638 - RNA, 22 nt, Human
agcaaaauaaaggaauauucac

SEQ ID NO: 494639 - RNA, 26 nt, Human
aggagguagaauuuauucuucaagaa

SEQ ID NO: 494640 - RNA, 20 nt, Human
aggcaaaugugucgugaugg

SEQ ID NO: 494641 - RNA, 19 nt, Human
auauacacacaacaacaug

SEQ ID NO: 494642 - RNA, 22 nt, Human
auuuccaacauguauagcaaca

SEQ ID NO: 494643 - RNA, 22 nt, Human
caacaugauuuaugaaagccaa

SEQ ID NO: 494644 - RNA, 30 nt, Human
cacuuugucuuacgcccaaaaguuaaaagg

SEQ ID NO: 494645 - RNA, 22 nt, Human
cagauuagauugcaagcaaaug

SEQ ID NO: 494646 - RNA, 22 nt, Human
cagccuuuuuagaaaaaaacac

SEQ ID NO: 494647 - RNA, 20 nt, Human
cccucccucucaucaucaag

SEQ ID NO: 494648 - RNA, 22 nt, Human
ccgaggcuugcgaguccuccuu

SEQ ID NO: 494649 - RNA, 22 nt, Human
ccucucaucaucaagcagcaaa

SEQ ID NO: 494650 - RNA, 23 nt, Human
cgggagggcaagcggccucaggu

SEQ ID NO: 494651 - RNA, 24 nt, Human
gcccaaaaguuaaaaguugacacu

SEQ ID NO: 494652 - RNA, 23 nt, Human
uaaaacaaauauucaaacaagua

SEQ ID NO: 494653 - RNA, 26 nt, Human
uaaaaugccuauuacuugagguuuuc

SEQ ID NO: 494654 - RNA, 21 nt, Human
uaaccagcccucaccacaguc

SEQ ID NO: 494655 - RNA, 23 nt, Human
uaccauacuacauuaaccagccc

SEQ ID NO: 494656 - RNA, 20 nt, Human
uagaaaaaaacacagguaga

SEQ ID NO: 494657 - RNA, 22 nt, Human
uagaaaaaaacacagguagacu

SEQ ID NO: 494658 - RNA, 18 nt, Human
uagaagcacagauacaca

SEQ ID NO: 494659 - RNA, 19 nt, Human
uagagguccacaguccuuu

SEQ ID NO: 494660 - RNA, 25 nt, Human
uaguagaaauguaguuucuguucau

SEQ ID NO: 494661 - RNA, 25 nt, Human
uauacacacaacaacaugauuuaug

SEQ ID NO: 494662 - RNA, 27 nt, Human
uauaccauacuacauuaaccagcccuc

SEQ ID NO: 494663 - RNA, 23 nt, Human
ucaagcagcaaaauaaaggaaua

SEQ ID NO: 494664 - RNA, 18 nt, Human
ucaugggggaaaaacaca

SEQ ID NO: 494665 - RNA, 22 nt, Human
ucucugaaacccuuggggcaag

SEQ ID NO: 494666 - RNA, 20 nt, Human
ucucuuugauauuauuaaau

SEQ ID NO: 494667 - RNA, 23 nt, Human
ugaaaaacuauuagaauauaaaa

SEQ ID NO: 494668 - RNA, 23 nt, Human
ugacaagacaugaaagauuguuu

SEQ ID NO: 494669 - RNA, 30 nt, Human
ugacugaugucugaagaaugguuucauggg

SEQ ID NO: 494670 - RNA, 26 nt, Human
ugagcagccuuuuuagaaaaaaacac

SEQ ID NO: 494671 - RNA, 22 nt, Human
ugcaagcaaaugaauuuuguca

SEQ ID NO: 494672 - RNA, 21 nt, Human
ugccaggaagagaaccuguuc

SEQ ID NO: 494673 - RNA, 25 nt, Human
ugucugaagaaugguuucauggggg

SEQ ID NO: 494674 - RNA, 23 nt, Human
uuacagauaaaggagugcagacc

SEQ ID NO: 494675 - RNA, 23 nt, Human
uuacuugagguuuucuucucugu

SEQ ID NO: 494676 - RNA, 24 nt, Human
uuacuugagguuuucuucucugua

SEQ ID NO: 494677 - RNA, 24 nt, Human
uuauucuucaagaaauagaacuug

SEQ ID NO: 494678 - RNA, 18 nt, Human
uugcgaguccuccuucuc

SEQ ID NO: 494679 - RNA, 23 nt, Human
uuuggggacagugaacaagugac

SEQ ID NO: 494680 - RNA, 21 nt, Human
aaacggagcaaugacaacagc

SEQ ID NO: 494681 - RNA, 20 nt, Human
aaagguucuuggacagggug

SEQ ID NO: 494682 - RNA, 23 nt, Human
agcaaugacaacagcagugagga

SEQ ID NO: 494683 - RNA, 18 nt, Human
aggcuugaccuuggccac

SEQ ID NO: 494684 - RNA, 22 nt, Human
caaugacaacagcagugaggag

SEQ ID NO: 494685 - RNA, 18 nt, Human
cacaggcuugaccuuggc

SEQ ID NO: 494686 - RNA, 19 nt, Human
ccuuggccacagcucagca

SEQ ID NO: 494687 - RNA, 22 nt, Human
cgagggccgccccugcccgggg

SEQ ID NO: 494688 - RNA, 19 nt, Human
cgccgccucgugccgaauu

SEQ ID NO: 494689 - RNA, 19 nt, Human
cucgccucgagacgccgcc

SEQ ID NO: 494690 - RNA, 21 nt, Human
cugacaacgagggccgccccu

SEQ ID NO: 494691 - RNA, 23 nt, Human
cuugaccuuggccacagcucagc

SEQ ID NO: 494692 - RNA, 21 nt, Human
gacagggugccaggacacacg

SEQ ID NO: 494693 - RNA, 27 nt, Human
gagaggcccugacaacgagggccgccc

SEQ ID NO: 494694 - RNA, 22 nt, Human
gaggcugcacagcgccagcucc

SEQ ID NO: 494695 - RNA, 20 nt, Human
ggagcaaugacaacagcagu

SEQ ID NO: 494696 - RNA, 19 nt, Human
uacaaacacaaacggagca

SEQ ID NO: 494697 - RNA, 19 nt, Human
ucgccucgagacgccgccu

SEQ ID NO: 494698 - RNA, 21 nt, Human
ugacaacagcagugaggagag

SEQ ID NO: 494699 - RNA, 20 nt, Human
ugccaggacacacgcugggg

SEQ ID NO: 494700 - RNA, 24 nt, Human
uggcaacacaggcuugaccuuggc

SEQ ID NO: 494701 - RNA, 21 nt, Human
ugggccagcuuggcccgcacu

SEQ ID NO: 494702 - RNA, 25 nt, Human
uucuuggacagggugccaggacaca

SEQ ID NO: 494703 - RNA, 21 nt, Human
uugaccuuggccacagcucaa

SEQ ID NO: 494704 - RNA, 18 nt, Human
uuuuuuuuuuuuaggguc

SEQ ID NO: 494705 - RNA, 30 nt, Human
uuuuuuuuuuuuuuuuuuuuuuuuuagggg

SEQ ID NO: 494706 - RNA, 21 nt, Human
aacuaaccugaguccagcccc

SEQ ID NO: 494707 - RNA, 21 nt, Human
aagcucugaaggucacacgcu

SEQ ID NO: 494708 - RNA, 21 nt, Human
aaggccugcaccacccuccag

SEQ ID NO: 494709 - RNA, 21 nt, Human
aaguugggagggcagaggggg

SEQ ID NO: 494710 - RNA, 22 nt, Human
acccgggaggagauaaccuucc

SEQ ID NO: 494711 - RNA, 20 nt, Human
cacaguaagaaauauugcac

SEQ ID NO: 494712 - RNA, 20 nt, Human
cacccuccagcuugcagccc

SEQ ID NO: 494713 - RNA, 19 nt, Human
cagccccucagcugccccc

SEQ ID NO: 494714 - RNA, 20 nt, Human
cagccccucagcugcccccc

SEQ ID NO: 494715 - RNA, 26 nt, Human
cagccccucuggggaaaaaagggguu

SEQ ID NO: 494716 - RNA, 21 nt, Human
cccacauacuguccauguccu

SEQ ID NO: 494717 - RNA, 24 nt, Human
ccccacccccaaacuaaccugagu

SEQ ID NO: 494718 - RNA, 25 nt, Human
ccccacccccaaacuaaccugaguc

SEQ ID NO: 494719 - RNA, 20 nt, Human
cccccuauuccacaggcgcc

SEQ ID NO: 494720 - RNA, 21 nt, Human
ccccucagcugccccccagca

SEQ ID NO: 494721 - RNA, 26 nt, Human
ccccugcagccccucagcugcccccc

SEQ ID NO: 494722 - RNA, 22 nt, Human
ccucauuccgccccaaacugga

SEQ ID NO: 494723 - RNA, 20 nt, Human
ccucccuguggcccaaggcc

SEQ ID NO: 494724 - RNA, 23 nt, Human
ccugcaccacccuccagcuugca

SEQ ID NO: 494725 - RNA, 21 nt, Human
ccuguggcaaagugcaggagc

SEQ ID NO: 494726 - RNA, 22 nt, Human
cuccagguuauguacaggggcu

SEQ ID NO: 494727 - RNA, 19 nt, Human
cugcccccacauacugucc

SEQ ID NO: 494728 - RNA, 20 nt, Human
cuugcagcccucacaggagc

SEQ ID NO: 494729 - RNA, 19 nt, Human
gaggagcaggccucauucc

SEQ ID NO: 494730 - RNA, 25 nt, Human
gcaaagugcaggagcccccaccccc

SEQ ID NO: 494731 - RNA, 22 nt, Human
gcaggagcccccacccccaaac

SEQ ID NO: 494732 - RNA, 18 nt, Human
gccccaaacuggagagga

SEQ ID NO: 494733 - RNA, 21 nt, Human
gcucugaaggucacacgcucc

SEQ ID NO: 494734 - RNA, 18 nt, Human
gcuuggaggagggagacu

SEQ ID NO: 494735 - RNA, 22 nt, Human
gcuuggaggagggagacugccc

SEQ ID NO: 494736 - RNA, 21 nt, Human
ggaaggggguauuuacaagag

SEQ ID NO: 494737 - RNA, 22 nt, Human
ggagccauuuugcauaaaguga

SEQ ID NO: 494738 - RNA, 19 nt, Human
ggcuuggaggagggagacu

SEQ ID NO: 494739 - RNA, 21 nt, Human
guccagccccucuggggaaaa

SEQ ID NO: 494740 - RNA, 24 nt, Human
guucuggggaagggggcaagggca

SEQ ID NO: 494741 - RNA, 24 nt, Human
uaaagugaaaagcucugaagguca

SEQ ID NO: 494742 - RNA, 24 nt, Human
uacaacccaaguugggagggcaga

SEQ ID NO: 494743 - RNA, 18 nt, Human
uacuguccauguccugag

SEQ ID NO: 494744 - RNA, 26 nt, Human
uccacaggcgccucccuguggcccaa

SEQ ID NO: 494745 - RNA, 22 nt, Human
uccugcccccacauacugucca

SEQ ID NO: 494746 - RNA, 23 nt, Human
ucugaaggucacacgcuccaggu

SEQ ID NO: 494747 - RNA, 21 nt, Human
ucuggggaagggggcaagggc

SEQ ID NO: 494748 - RNA, 23 nt, Human
ugaggggguacuauaaguccugg

SEQ ID NO: 494749 - RNA, 22 nt, Human
ugaguccagccccucuggggaa

SEQ ID NO: 494750 - RNA, 22 nt, Human
uggcccaaggccugcaccaccc

SEQ ID NO: 494751 - RNA, 24 nt, Human
uggcuuuacccgggaggagauaac

SEQ ID NO: 494752 - RNA, 22 nt, Human
uuacccgggaggagauaaccuu

SEQ ID NO: 494753 - RNA, 24 nt, Human
uucuuagaaaguacaacccaaguu

SEQ ID NO: 494754 - RNA, 27 nt, Human
aacggcuucgugguguggagcuuggcg

SEQ ID NO: 494755 - RNA, 28 nt, Human
aagacagaucucaagguaaagucagaga

SEQ ID NO: 494756 - RNA, 21 nt, Human
aagcgugcugcucaccggccu

SEQ ID NO: 494757 - RNA, 18 nt, Human
accugagccuggagacuc

SEQ ID NO: 494758 - RNA, 25 nt, Human
acggggcgcgggugggccggcuggu

SEQ ID NO: 494759 - RNA, 19 nt, Human
agcagcagucaggcuggga

SEQ ID NO: 494760 - RNA, 19 nt, Human
agcagcagucaggcuggga

SEQ ID NO: 494761 - RNA, 19 nt, Human
agcucugauuucaguugca

SEQ ID NO: 494762 - RNA, 18 nt, Human
aggacaguggggaaauug

SEQ ID NO: 494763 - RNA, 23 nt, Human
aggcacagccuuccugcugcugg

SEQ ID NO: 494764 - RNA, 22 nt, Human
aggggaucagaggacagugggg

SEQ ID NO: 494765 - RNA, 20 nt, Human
caaaaugaacacaaucccug

SEQ ID NO: 494766 - RNA, 20 nt, Human
caagaugccugggggacauc

SEQ ID NO: 494767 - RNA, 22 nt, Human
caaggauccuuguagggucccc

SEQ ID NO: 494768 - RNA, 25 nt, Human
caagguaaagucagagagggcuguc

SEQ ID NO: 494769 - RNA, 24 nt, Human
caaucccugcuuuccugccaagga

SEQ ID NO: 494770 - RNA, 19 nt, Human
cacgccgcucuuuguggcc

SEQ ID NO: 494771 - RNA, 18 nt, Human
cagccugcacgggggcga

SEQ ID NO: 494772 - RNA, 23 nt, Human
cagcuuccccacuuuuuuucugu

SEQ ID NO: 494773 - RNA, 20 nt, Human
caguaugcuggggaguuuag

SEQ ID NO: 494774 - RNA, 19 nt, Human
caucgugcuugccuucggc

SEQ ID NO: 494775 - RNA, 24 nt, Human
cccccagcuuccccacuuuuuuuc

SEQ ID NO: 494776 - RNA, 19 nt, Human
cccggcccuggcccgccgc

SEQ ID NO: 494777 - RNA, 20 nt, Human
cccggcccuggcccgccgcc

SEQ ID NO: 494778 - RNA, 21 nt, Human
ccgccgccugcugcuggcggu

SEQ ID NO: 494779 - RNA, 23 nt, Human
ccgccgucuaccgccaccugugg

SEQ ID NO: 494780 - RNA, 19 nt, Human
ccgcuggggcuccgggcgg

SEQ ID NO: 494781 - RNA, 22 nt, Human
ccggagaguuccuucccuggaa

SEQ ID NO: 494782 - RNA, 25 nt, Human
ccuggcccgccgccugguccccugg

SEQ ID NO: 494783 - RNA, 21 nt, Human
cgccgguccacgccgccgccc

SEQ ID NO: 494784 - RNA, 23 nt, Human
cgccgguccacgccgccgcccac

SEQ ID NO: 494785 - RNA, 20 nt, Human
cgcugcuggggcugccuggc

SEQ ID NO: 494786 - RNA, 25 nt, Human
cgucccggccgccgucuaccgccac

SEQ ID NO: 494787 - RNA, 23 nt, Human
cgugugcgcgcucagcauguacg

SEQ ID NO: 494788 - RNA, 22 nt, Human
cucacgccgcucuuuguggccu

SEQ ID NO: 494789 - RNA, 24 nt, Human
cucacugacagugaaacccucaaa

SEQ ID NO: 494790 - RNA, 20 nt, Human
cucucacuuuucuccuuuug

SEQ ID NO: 494791 - RNA, 23 nt, Human
cucuuuguggccuuccugaccgg

SEQ ID NO: 494792 - RNA, 24 nt, Human
cugacagugaaacccucaaaauga

SEQ ID NO: 494793 - RNA, 24 nt, Human
cugcagguccugaaauuugaugcu

SEQ ID NO: 494794 - RNA, 22 nt, Human
cuggccgcccuguugcucgccg

SEQ ID NO: 494795 - RNA, 22 nt, Human
cugucauagucuuugcaguggg

SEQ ID NO: 494796 - RNA, 22 nt, Human
cuugaucuuggccuuucagggc

SEQ ID NO: 494797 - RNA, 21 nt, Human
gaaagaacagcauucuucagg

SEQ ID NO: 494798 - RNA, 20 nt, Human
gaucaagaugccugggggac

SEQ ID NO: 494799 - RNA, 20 nt, Human
gauucugggggcagaagcuc

SEQ ID NO: 494800 - RNA, 18 nt, Human
gcaggggauguccuuuga

SEQ ID NO: 494801 - RNA, 19 nt, Human
gccaagcgugcugcucacc

SEQ ID NO: 494802 - RNA, 19 nt, Human
gccucggcugcgcagcccg

SEQ ID NO: 494803 - RNA, 21 nt, Human
gcgcugcuggggcugccuggc

SEQ ID NO: 494804 - RNA, 18 nt, Human
gcucacgccgcucuuugu

SEQ ID NO: 494805 - RNA, 19 nt, Human
gcuugugcugcaccuggcg

SEQ ID NO: 494806 - RNA, 24 nt, Human
ggacaggaggcauugguaggggau

SEQ ID NO: 494807 - RNA, 21 nt, Human
ggcaacggcuucguggugugg

SEQ ID NO: 494808 - RNA, 22 nt, Human
ggccugcucagccugcagcgcu

SEQ ID NO: 494809 - RNA, 19 nt, Human
ggcggcacggggcgcgggu

SEQ ID NO: 494810 - RNA, 24 nt, Human
gggaacgagacacugcugagcugg

SEQ ID NO: 494811 - RNA, 18 nt, Human
gggcaggggauguccuuu

SEQ ID NO: 494812 - RNA, 22 nt, Human
ggggcuccgggcggcacggggc

SEQ ID NO: 494813 - RNA, 19 nt, Human
ggucccccagcuuccccac

SEQ ID NO: 494814 - RNA, 26 nt, Human
gucacacuuaggucaucuucucucac

SEQ ID NO: 494815 - RNA, 19 nt, Human
gucgguuggaaugauucug

SEQ ID NO: 494816 - RNA, 18 nt, Human
guggagcuuggcgggcug

SEQ ID NO: 494817 - RNA, 22 nt, Human
gugguucucuccugugcugggg

SEQ ID NO: 494818 - RNA, 20 nt, Human
uaccgccaccuguggaggga

SEQ ID NO: 494819 - RNA, 23 nt, Human
uagcuucuggugcgcuguguccc

SEQ ID NO: 494820 - RNA, 20 nt, Human
uaggaaagaacagcauucuu

SEQ ID NO: 494821 - RNA, 19 nt, Human
uagggucccccagcuuccc

SEQ ID NO: 494822 - RNA, 28 nt, Human
ucaagguaaagucagagagggcugucau

SEQ ID NO: 494823 - RNA, 19 nt, Human
ucacacuuaggucaucuuc

SEQ ID NO: 494824 - RNA, 21 nt, Human
ucacacuuaggucaucuucuc

SEQ ID NO: 494825 - RNA, 24 nt, Human
uccagagcugccugcugcagucac

SEQ ID NO: 494826 - RNA, 24 nt, Human
ucccccagcuuccccacuuuuuuu

SEQ ID NO: 494827 - RNA, 22 nt, Human
ucccugcuuuccugccaaggau

SEQ ID NO: 494828 - RNA, 20 nt, Human
ucccuggaacuucugggcug

SEQ ID NO: 494829 - RNA, 24 nt, Human
uccugcugcuggcggcgcugcugg

SEQ ID NO: 494830 - RNA, 19 nt, Human
uccuuggucggaggagggg

SEQ ID NO: 494831 - RNA, 20 nt, Human
uccuuggucggaggaggggc

SEQ ID NO: 494832 - RNA, 22 nt, Human
ucgccgguccacgccgccgccc

SEQ ID NO: 494833 - RNA, 21 nt, Human
ucuggcuggccgcccuguugc

SEQ ID NO: 494834 - RNA, 20 nt, Human
ucuucucucacuuuucuccu

SEQ ID NO: 494835 - RNA, 21 nt, Human
ugaaagguucugucacgaggg

SEQ ID NO: 494836 - RNA, 27 nt, Human
ugacagugaaacccucaaaaugaacac

SEQ ID NO: 494837 - RNA, 21 nt, Human
ugagccuggagacucugaccg

SEQ ID NO: 494838 - RNA, 21 nt, Human
ugagcgccaucgugcuugccu

SEQ ID NO: 494839 - RNA, 18 nt, Human
ugaggcguuaugcugaaa

SEQ ID NO: 494840 - RNA, 18 nt, Human
ugauggacaguugcaugg

SEQ ID NO: 494841 - RNA, 20 nt, Human
ugcggggcgcccgcuggggc

SEQ ID NO: 494842 - RNA, 18 nt, Human
ugcugcuggcggcgcugc

SEQ ID NO: 494843 - RNA, 19 nt, Human
ugcugcuggcggcgcugcu

SEQ ID NO: 494844 - RNA, 24 nt, Human
ugcuggggaguuuagggacaggag

SEQ ID NO: 494845 - RNA, 20 nt, Human
uggaagcugagacucucacu

SEQ ID NO: 494846 - RNA, 25 nt, Human
uggacaguugcauggaagcugagac

SEQ ID NO: 494847 - RNA, 23 nt, Human
uggcgccucggcugcgcagcccg

SEQ ID NO: 494848 - RNA, 22 nt, Human
uggcggucuggcuggccgcccu

SEQ ID NO: 494849 - RNA, 25 nt, Human
uggcggucuggcuggccgcccuguu

SEQ ID NO: 494850 - RNA, 21 nt, Human
ugggggcagaagcucagagcc

SEQ ID NO: 494851 - RNA, 23 nt, Human
ugggggcagaagcucagagcccc

SEQ ID NO: 494852 - RNA, 18 nt, Human
ugucaucaguaugcuggg

SEQ ID NO: 494853 - RNA, 20 nt, Human
ugucccagcucugauuucag

SEQ ID NO: 494854 - RNA, 23 nt, Human
uucauuuuccagagcugccugcu

SEQ ID NO: 494855 - RNA, 22 nt, Human
uuccugcugcuggcggcgcugc

SEQ ID NO: 494856 - RNA, 18 nt, Human
uuccuggcgccucggcug

SEQ ID NO: 494857 - RNA, 22 nt, Human
uucgcgggccacaggcacagcc

SEQ ID NO: 494858 - RNA, 26 nt, Human
uuuuccagagcugccugccggaaauc

SEQ ID NO: 494859 - RNA, 23 nt, Human
aaacaagcaaauucacgaaaaca

SEQ ID NO: 494860 - RNA, 25 nt, Human
aaacaagcaaauucacgaaaacaga

SEQ ID NO: 494861 - RNA, 21 nt, Human
aagcaaauucacgaaaacaga

SEQ ID NO: 494862 - RNA, 25 nt, Human
acaauggcugucacaugaaaugagg

SEQ ID NO: 494863 - RNA, 18 nt, Human
accaugcaaaaagaagag

SEQ ID NO: 494864 - RNA, 18 nt, Human
agagguagaugugggugc

SEQ ID NO: 494865 - RNA, 19 nt, Human
agagguagaugugggugcu

SEQ ID NO: 494866 - RNA, 23 nt, Human
caaacaagcaaauucacgaaaac

SEQ ID NO: 494867 - RNA, 24 nt, Human
caaacaagcaaauucacgaaaaca

SEQ ID NO: 494868 - RNA, 24 nt, Human
caaauucacgaaaacagaagugcu

SEQ ID NO: 494869 - RNA, 22 nt, Human
caguuugugcaucagucucaca

SEQ ID NO: 494870 - RNA, 18 nt, Human
ccauuuauauguaugaac

SEQ ID NO: 494871 - RNA, 19 nt, Human
cucagauccagugaccgug

SEQ ID NO: 494872 - RNA, 22 nt, Human
gacaguuugugcaucagucuca

SEQ ID NO: 494873 - RNA, 19 nt, Human
gcaaauucacgaaaacaga

SEQ ID NO: 494874 - RNA, 21 nt, Human
gggcaaaaccaugcaaaaaga

SEQ ID NO: 494875 - RNA, 24 nt, Human
uaccaguggccaauuucuuguguu

SEQ ID NO: 494876 - RNA, 24 nt, Human
uauauugguuauuugaucuucagc

SEQ ID NO: 494877 - RNA, 24 nt, Human
uaugaucaaggcuugccuaugucc

SEQ ID NO: 494878 - RNA, 21 nt, Human
uauguaugaacuaugaucaag

SEQ ID NO: 494879 - RNA, 20 nt, Human
ugacucuggaaugcgguccc

SEQ ID NO: 494880 - RNA, 21 nt, Human
ugacucuggaaugcggucccc

SEQ ID NO: 494881 - RNA, 24 nt, Human
uggagcaaggccaagaaauaugcu

SEQ ID NO: 494882 - RNA, 28 nt, Human
ugggcaaaaccaugcaaaaagaagagga

SEQ ID NO: 494883 - RNA, 21 nt, Human
uuaaaugaaguacaguugaag

SEQ ID NO: 494884 - RNA, 26 nt, Human
uucaccaccauuuauauguaugaacu

SEQ ID NO: 494885 - RNA, 19 nt, Human
uuucuuuauuucaccacca

SEQ ID NO: 494886 - RNA, 24 nt, Human
caagcucuggccagaagaccccaa

SEQ ID NO: 494887 - RNA, 19 nt, Human
cagagaaggcugagcagca

SEQ ID NO: 494888 - RNA, 19 nt, Human
ccaggaggggcagagaagg

SEQ ID NO: 494889 - RNA, 21 nt, Human
cccacgaaugacagauuccca

SEQ ID NO: 494890 - RNA, 18 nt, Human
ccccgcccaccccaccgg

SEQ ID NO: 494891 - RNA, 18 nt, Human
ccccgcccaccccaccgg

SEQ ID NO: 494892 - RNA, 19 nt, Human
cccgcccaccccaccggaa

SEQ ID NO: 494893 - RNA, 20 nt, Human
ccuggagaggccauggggcu

SEQ ID NO: 494894 - RNA, 19 nt, Human
cggcacuggguccuaggca

SEQ ID NO: 494895 - RNA, 20 nt, Human
cuggagaggccauggggcug

SEQ ID NO: 494896 - RNA, 27 nt, Human
gaagaccccaaggucugauccuggggu

SEQ ID NO: 494897 - RNA, 23 nt, Human
gaagccccgcccaccccaccgga

SEQ ID NO: 494898 - RNA, 22 nt, Human
gacaagcucuggccagaagacc

SEQ ID NO: 494899 - RNA, 20 nt, Human
gagcagcaccacguggggcu

SEQ ID NO: 494900 - RNA, 23 nt, Human
gccccgcccaccccaccggaaac

SEQ ID NO: 494901 - RNA, 18 nt, Human
ggggcuggccgcggguug

SEQ ID NO: 494902 - RNA, 21 nt, Human
ggguugugggcaugagcacgc

SEQ ID NO: 494903 - RNA, 20 nt, Human
guggaaggagccaguguccg

SEQ ID NO: 494904 - RNA, 23 nt, Human
uauccguagaaggagacgcgaag

SEQ ID NO: 494905 - RNA, 19 nt, Human
uccacagauauccguagaa

SEQ ID NO: 494906 - RNA, 24 nt, Human
ucccaggaggggcagagaaggcug

SEQ ID NO: 494907 - RNA, 21 nt, Human
ucugaagcacccacgaaugac

SEQ ID NO: 494908 - RNA, 21 nt, Human
ugaagcacccacgaaugacag

SEQ ID NO: 494909 - RNA, 18 nt, Human
ugagacguggaaggagcc

SEQ ID NO: 494910 - RNA, 21 nt, Human
ugagcacgccuggagaggcca

SEQ ID NO: 494911 - RNA, 21 nt, Human
uggaaggagccaguguccgca

SEQ ID NO: 494912 - RNA, 20 nt, Human
uuuuuuuuuuuuuuucugcu

SEQ ID NO: 494913 - RNA, 24 nt, Human
uuuuuuuuuuuuuuuuuuucuggg

SEQ ID NO: 494914 - RNA, 24 nt, Human
aaaaagaaaaagauucaguuccua

SEQ ID NO: 494915 - RNA, 21 nt, Human
aaagugucaucugcccuaaaa

SEQ ID NO: 494916 - RNA, 20 nt, Human
aacagagcaagacuccaucu

SEQ ID NO: 494917 - RNA, 19 nt, Human
aacauggugaaaccccguc

SEQ ID NO: 494918 - RNA, 20 nt, Human
aacauggugaaaccccgucu

SEQ ID NO: 494919 - RNA, 21 nt, Human
aacauggugaaaccccgucuc

SEQ ID NO: 494920 - RNA, 19 nt, Human
aacccuuggaucacauggg

SEQ ID NO: 494921 - RNA, 18 nt, Human
aaucaaacuccauccugu

SEQ ID NO: 494922 - RNA, 24 nt, Human
aaugacaagacaaaggcauacaga

SEQ ID NO: 494923 - RNA, 18 nt, Human
aauugcuugaacccggga

SEQ ID NO: 494924 - RNA, 23 nt, Human
acaccacugcacuccagcugggc

SEQ ID NO: 494925 - RNA, 22 nt, Human
acagaccccagggaaauaccca

SEQ ID NO: 494926 - RNA, 24 nt, Human
acagagcaagacuccaucucaaaa

SEQ ID NO: 494927 - RNA, 24 nt, Human
accacugcacuccagcugggcaac

SEQ ID NO: 494928 - RNA, 24 nt, Human
accccgucucuacuaaaaauacaa

SEQ ID NO: 494929 - RNA, 18 nt, Human
acccuuggaucacauggg

SEQ ID NO: 494930 - RNA, 23 nt, Human
acugcacuccagcugggcaacag

SEQ ID NO: 494931 - RNA, 23 nt, Human
acugcacuccagcugggcaacag

SEQ ID NO: 494932 - RNA, 25 nt, Human
agacaaaggcauacagaccccaggg

SEQ ID NO: 494933 - RNA, 20 nt, Human
agacagagguugcaguaagc

SEQ ID NO: 494934 - RNA, 24 nt, Human
agacagagguugcaguaagcugag

SEQ ID NO: 494935 - RNA, 21 nt, Human
agaccccagggaaauacccag

SEQ ID NO: 494936 - RNA, 24 nt, Human
agagguugcaguaagcugagauca

SEQ ID NO: 494937 - RNA, 24 nt, Human
agaugggagaauugcuugaacccg

SEQ ID NO: 494938 - RNA, 19 nt, Human
agccugggcaacaugguga

SEQ ID NO: 494939 - RNA, 22 nt, Human
agccugggcaacauggugaaac

SEQ ID NO: 494940 - RNA, 24 nt, Human
agccugggcaacauggugaaaccc

SEQ ID NO: 494941 - RNA, 23 nt, Human
agcugggcaacagagcaagacuc

SEQ ID NO: 494942 - RNA, 18 nt, Human
agcugggccagguguggu

SEQ ID NO: 494943 - RNA, 19 nt, Human
agcugggccagguguggug

SEQ ID NO: 494944 - RNA, 23 nt, Human
aggaguucgagaccagccugggc

SEQ ID NO: 494945 - RNA, 25 nt, Human
aggcccuagguucuuuacucuagcu

SEQ ID NO: 494946 - RNA, 24 nt, Human
aggcugagaugggagaauugcuug

SEQ ID NO: 494947 - RNA, 18 nt, Human
agggauacacuguccagc

SEQ ID NO: 494948 - RNA, 24 nt, Human
aggugugguggugugugccuguaa

SEQ ID NO: 494949 - RNA, 23 nt, Human
aucacaccacugcacuccagcug

SEQ ID NO: 494950 - RNA, 21 nt, Human
auccagcacuuugggaggcca

SEQ ID NO: 494951 - RNA, 22 nt, Human
caaaaaagaauuagcugggcca

SEQ ID NO: 494952 - RNA, 26 nt, Human
caaacuuaaaaaaaaaauacaaaccc

SEQ ID NO: 494953 - RNA, 22 nt, Human
caacauggugaaaccccgucuc

SEQ ID NO: 494954 - RNA, 24 nt, Human
caacauggugaaaccccgucucua

SEQ ID NO: 494955 - RNA, 23 nt, Human
caagacaaaggcauacagacccc

SEQ ID NO: 494956 - RNA, 23 nt, Human
caagacggguggaucaccugagc

SEQ ID NO: 494957 - RNA, 26 nt, Human
caagacggguggaucaccugagcuca

SEQ ID NO: 494958 - RNA, 19 nt, Human
cacaugggggcuucuggga

SEQ ID NO: 494959 - RNA, 22 nt, Human
cacuccagcugggcaacagagc

SEQ ID NO: 494960 - RNA, 18 nt, Human
cacugcacuccagcuggg

SEQ ID NO: 494961 - RNA, 20 nt, Human
cacugcacuccagcugggca

SEQ ID NO: 494962 - RNA, 21 nt, Human
cacugcacuccagcugggcaa

SEQ ID NO: 494963 - RNA, 23 nt, Human
cacugcacuccagcugggcaaca

SEQ ID NO: 494964 - RNA, 20 nt, Human
cagcacuuugggaggccaag

SEQ ID NO: 494965 - RNA, 26 nt, Human
cagcacuuugggaggccaagacgggu

SEQ ID NO: 494966 - RNA, 18 nt, Human
cagcccagguccaggccc

SEQ ID NO: 494967 - RNA, 18 nt, Human
cauguacauacaaauaug

SEQ ID NO: 494968 - RNA, 19 nt, Human
ccacugcacuccagcuggg

SEQ ID NO: 494969 - RNA, 20 nt, Human
ccacugcacuccagcugggc

SEQ ID NO: 494970 - RNA, 23 nt, Human
ccauccuugcagaaaagagccua

SEQ ID NO: 494971 - RNA, 21 nt, Human
ccccagggaaauacccaguuc

SEQ ID NO: 494972 - RNA, 19 nt, Human
ccccguauucuucccccuc

SEQ ID NO: 494973 - RNA, 22 nt, Human
ccccguauucuucccccucacc

SEQ ID NO: 494974 - RNA, 21 nt, Human
ccgggcacaguggccuaugcc

SEQ ID NO: 494975 - RNA, 23 nt, Human
ccugggcaacauggugaaacccc

SEQ ID NO: 494976 - RNA, 24 nt, Human
ccugggcaacauggugaaaccccg

SEQ ID NO: 494977 - RNA, 19 nt, Human
ccuguaauccagcacuuug

SEQ ID NO: 494978 - RNA, 21 nt, Human
ccuguaaucccagcuacucag

SEQ ID NO: 494979 - RNA, 23 nt, Human
cgaaaaagguccaaaucacugcu

SEQ ID NO: 494980 - RNA, 24 nt, Human
cgagaccagccugggcaacauggu

SEQ ID NO: 494981 - RNA, 24 nt, Human
cggguggaucaccugagcucagga

SEQ ID NO: 494982 - RNA, 20 nt, Human
cuaaaagcaaaugacaagac

SEQ ID NO: 494983 - RNA, 21 nt, Human
cuacuaaaaauacaaaaaaga

SEQ ID NO: 494984 - RNA, 18 nt, Human
cucaggaggcugagaugg

SEQ ID NO: 494985 - RNA, 21 nt, Human
cuccugaaaugggucaagaaa

SEQ ID NO: 494986 - RNA, 20 nt, Human
cugacauugauuugaggaaa

SEQ ID NO: 494987 - RNA, 22 nt, Human
cugagcucaggaguucgagacc

SEQ ID NO: 494988 - RNA, 21 nt, Human
cuuggaucacaugggggcuuc

SEQ ID NO: 494989 - RNA, 19 nt, Human
cuuuacucuagcuaccccc

SEQ ID NO: 494990 - RNA, 23 nt, Human
gagaucacaccacugcacuccag

SEQ ID NO: 494991 - RNA, 24 nt, Human
gagaugggagaauugcuugaaccc

SEQ ID NO: 494992 - RNA, 24 nt, Human
gaucaccugagcucaggaguucga

SEQ ID NO: 494993 - RNA, 22 nt, Human
gccaggugugguggugugugcc

SEQ ID NO: 494994 - RNA, 23 nt, Human
gccaggugugguggugugugccc

SEQ ID NO: 494995 - RNA, 18 nt, Human
gccuguaauccagcacuu

SEQ ID NO: 494996 - RNA, 23 nt, Human
gccuguaauccagcacuuuggga

SEQ ID NO: 494997 - RNA, 20 nt, Human
gcugagaucacaccacugca

SEQ ID NO: 494998 - RNA, 22 nt, Human
ggaguucgagaccagccugggc

SEQ ID NO: 494999 - RNA, 18 nt, Human
ggaucacaugggggcuuc

SEQ ID NO: 495000 - RNA, 23 nt, Human
ggcacaguggccuaugccuguaa

SEQ ID NO: 495001 - RNA, 18 nt, Human
gggcuucugggaaccccc

SEQ ID NO: 495002 - RNA, 22 nt, Human
ggguggaucaccugagcucagg

SEQ ID NO: 495003 - RNA, 24 nt, Human
gguggugugugccuguaaucccag

SEQ ID NO: 495004 - RNA, 24 nt, Human
guggugugugccuguaaucccagc

SEQ ID NO: 495005 - RNA, 25 nt, Human
uaaaaaaaaaauacaaacccuugga

SEQ ID NO: 495006 - RNA, 26 nt, Human
uaaaaaaaaaauacaaacccuuggau

SEQ ID NO: 495007 - RNA, 21 nt, Human
uaaaagcaaaugacaagacaa

SEQ ID NO: 495008 - RNA, 25 nt, Human
uaagcugagaucacaccaaucaacg

SEQ ID NO: 495009 - RNA, 24 nt, Human
uaauccagcacuuugggaggccaa

SEQ ID NO: 495010 - RNA, 21 nt, Human
uacucucccaccaauaccagc

SEQ ID NO: 495011 - RNA, 19 nt, Human
uagcuacccccuauuucuu

SEQ ID NO: 495012 - RNA, 23 nt, Human
uagcuacccccuauuucuuuggu

SEQ ID NO: 495013 - RNA, 24 nt, Human
uaucaggauaaaggagagggcucc

SEQ ID NO: 495014 - RNA, 22 nt, Human
ucacaccacugcacuccagcug

SEQ ID NO: 495015 - RNA, 20 nt, Human
ucaccugagcucaggaguuc

SEQ ID NO: 495016 - RNA, 24 nt, Human
ucaggccgggcacaguggccuaug

SEQ ID NO: 495017 - RNA, 18 nt, Human
ucucaaaaaauaaaaaga

SEQ ID NO: 495018 - RNA, 22 nt, Human
ucucuacuaaaaauacaaaaaa

SEQ ID NO: 495019 - RNA, 20 nt, Human
ugaaaugggucaagaaagaa

SEQ ID NO: 495020 - RNA, 18 nt, Human
ugagaucacaccacugca

SEQ ID NO: 495021 - RNA, 20 nt, Human
ugcagaaaagagccuaaaau

SEQ ID NO: 495022 - RNA, 21 nt, Human
ugcagaaaagagccuaaaauu

SEQ ID NO: 495023 - RNA, 23 nt, Human
ugccuguaauccagcacuuuggg

SEQ ID NO: 495024 - RNA, 24 nt, Human
ugccuguaaucccagcuacucagg

SEQ ID NO: 495025 - RNA, 24 nt, Human
uggaucaccugagcucaggaguuc

SEQ ID NO: 495026 - RNA, 19 nt, Human
uggccuaugccuguaaucc

SEQ ID NO: 495027 - RNA, 19 nt, Human
uggccuaugccuguaaucc

SEQ ID NO: 495028 - RNA, 23 nt, Human
uggccuaugccuguaauccagca

SEQ ID NO: 495029 - RNA, 21 nt, Human
ugggaaaaagugucaucugcc

SEQ ID NO: 495030 - RNA, 20 nt, Human
ugggaacccccguauucuuc

SEQ ID NO: 495031 - RNA, 24 nt, Human
ugggaggccaagacggguggauca

SEQ ID NO: 495032 - RNA, 24 nt, Human
ugguauugucaaaagacaagauuc

SEQ ID NO: 495033 - RNA, 24 nt, Human
ugguggugugugccuguaauccca

SEQ ID NO: 495034 - RNA, 21 nt, Human
uggugugugccuguaauccca

SEQ ID NO: 495035 - RNA, 22 nt, Human
uggugugugccuguaaucccag

SEQ ID NO: 495036 - RNA, 24 nt, Human
uggugugugccuguaaucccagcu

SEQ ID NO: 495037 - RNA, 30 nt, Human
uuagcugggccaggugugguggugugugcc

SEQ ID NO: 495038 - RNA, 19 nt, Human
uugcaguaagcugagauca

SEQ ID NO: 495039 - RNA, 20 nt, Human
uugcaguaagcugagaucac

SEQ ID NO: 495040 - RNA, 24 nt, Human
uugcuugaacccgggagacagagg

SEQ ID NO: 495041 - RNA, 21 nt, Human
uuugaggaaagagaaggggca

SEQ ID NO: 495042 - RNA, 21 nt, Human
uagaaagacaacaguauauaa

SEQ ID NO: 495043 - RNA, 24 nt, Human
ucuuucuucucuacuucuccuccu

SEQ ID NO: 495044 - RNA, 19 nt, Human
aagcagccccugaccgagc

SEQ ID NO: 495045 - RNA, 21 nt, Human
aagcgcggagcucggugagcc

SEQ ID NO: 495046 - RNA, 20 nt, Human
acagacccuuuuuuucccuu

SEQ ID NO: 495047 - RNA, 26 nt, Human
acgccgccgccaccgcuaccgcgaac

SEQ ID NO: 495048 - RNA, 18 nt, Human
agcccccagccccuggca

SEQ ID NO: 495049 - RNA, 18 nt, Human
agccccuggcacgcacgc

SEQ ID NO: 495050 - RNA, 18 nt, Human
aggcggcggagcccccag

SEQ ID NO: 495051 - RNA, 19 nt, Human
caccgcacagugccgcgcc

SEQ ID NO: 495052 - RNA, 25 nt, Human
caccgcgccgcgccgccgcugcacc

SEQ ID NO: 495053 - RNA, 19 nt, Human
cagcgcccgcggccgcgcc

SEQ ID NO: 495054 - RNA, 21 nt, Human
ccaagcagccccugaccgagc

SEQ ID NO: 495055 - RNA, 20 nt, Human
ccagccccuggcacgcacgc

SEQ ID NO: 495056 - RNA, 24 nt, Human
ccccggggcgccugggaaaagccc

SEQ ID NO: 495057 - RNA, 22 nt, Human
cccgaccccggggcgccuggga

SEQ ID NO: 495058 - RNA, 19 nt, Human
cccgcaccgcgccgcgccg

SEQ ID NO: 495059 - RNA, 23 nt, Human
ccgcagcuucggcgccggacucc

SEQ ID NO: 495060 - RNA, 24 nt, Human
ccgcagcuucggcgccggacuccg

SEQ ID NO: 495061 - RNA, 26 nt, Human
ccgccgccaccgcuaccgcgaaccgg

SEQ ID NO: 495062 - RNA, 20 nt, Human
ccgcgccgcgccgccgcugc

SEQ ID NO: 495063 - RNA, 26 nt, Human
ccggggcgguggcgguggcggccuuu

SEQ ID NO: 495064 - RNA, 19 nt, Human
cgcacacggcagcagacug

SEQ ID NO: 495065 - RNA, 24 nt, Human
cgcacagugccgcgccaagcagcc

SEQ ID NO: 495066 - RNA, 25 nt, Human
cgcccgcagcuucggcgccggacuc

SEQ ID NO: 495067 - RNA, 20 nt, Human
cgcgccgccgcugcaccgca

SEQ ID NO: 495068 - RNA, 21 nt, Human
cggcgccggacuccggggcgg

SEQ ID NO: 495069 - RNA, 21 nt, Human
cggggcgguggcgguggcggc

SEQ ID NO: 495070 - RNA, 21 nt, Human
cguuggccacccgaccccggg

SEQ ID NO: 495071 - RNA, 28 nt, Human
cuccggggcgguggcgguggggcaaauc

SEQ ID NO: 495072 - RNA, 22 nt, Human
cugcaccgcacagugccgcgcc

SEQ ID NO: 495073 - RNA, 26 nt, Human
gacagacccuuuuuuucccuuuuuuu

SEQ ID NO: 495074 - RNA, 19 nt, Human
gccugggaaaagcccgcac

SEQ ID NO: 495075 - RNA, 24 nt, Human
gcggagcucggugagccgcaagag

SEQ ID NO: 495076 - RNA, 27 nt, Human
gcgguggcgguggcggccaccgcgcuc

SEQ ID NO: 495077 - RNA, 21 nt, Human
gcuaccgcgaaccggucgcgc

SEQ ID NO: 495078 - RNA, 20 nt, Human
ggcgcuggggacccggcucc

SEQ ID NO: 495079 - RNA, 20 nt, Human
ggggcgguggcgguggcggc

SEQ ID NO: 495080 - RNA, 20 nt, Human
gugccgcgccaagcagcccc

SEQ ID NO: 495081 - RNA, 18 nt, Human
uauuccuccaucuuuagg

SEQ ID NO: 495082 - RNA, 23 nt, Human
ugaugcugccagcuggagcuguu

SEQ ID NO: 495083 - RNA, 22 nt, Human
ugcccgcccgcccgcccgcagc

SEQ ID NO: 495084 - RNA, 18 nt, Human
ugcccuggagagagggaa

SEQ ID NO: 495085 - RNA, 29 nt, Human
uggcgguggcggccaccgcgcucccuucu

SEQ ID NO: 495086 - RNA, 20 nt, Human
ugggaaaagcccgcaccgcg

SEQ ID NO: 495087 - RNA, 21 nt, Human
uggggacccggcucucaagcc

SEQ ID NO: 495088 - RNA, 22 nt, Human
uucccggcgcuggggacccggc

SEQ ID NO: 495089 - RNA, 24 nt, Human
uucccggcgcuggggacccggcuc

SEQ ID NO: 495090 - RNA, 20 nt, Human
uuuuucccuuuuuuuuucuc

SEQ ID NO: 495091 - RNA, 19 nt, Human
uuuuuuuuuuuuuuuuugu

SEQ ID NO: 495092 - RNA, 26 nt, Human
uuuuuuuuuuuuuuuuuuuuuugggg

SEQ ID NO: 495093 - RNA, 21 nt, Human
aaaaaaaugaagcgagauggc

SEQ ID NO: 495094 - RNA, 20 nt, Human
aaaaaucugugaaauguuug

SEQ ID NO: 495095 - RNA, 22 nt, Human
aaaagaccaaguuagcuagaua

SEQ ID NO: 495096 - RNA, 19 nt, Human
aaacaaaaacaggaaaaaa

SEQ ID NO: 495097 - RNA, 30 nt, Human
aaacaaaaacaggaaaaaaaguggcagcaa

SEQ ID NO: 495098 - RNA, 21 nt, Human
aaacaaacaacgaaaaagacc

SEQ ID NO: 495099 - RNA, 24 nt, Human
aaacaaacaacgaaaaagaccaag

SEQ ID NO: 495100 - RNA, 20 nt, Human
aaacaggaaaaaaaguggca

SEQ ID NO: 495101 - RNA, 24 nt, Human
aaacaggaaaaaaaguggcagggu

SEQ ID NO: 495102 - RNA, 22 nt, Human
aaagugaacaguaugacuuucc

SEQ ID NO: 495103 - RNA, 25 nt, Human
aacaaacaacgaaaaagaccaagga

SEQ ID NO: 495104 - RNA, 20 nt, Human
aacaguuuggcccacaucug

SEQ ID NO: 495105 - RNA, 23 nt, Human
aagcuuucaacacaguaguaucu

SEQ ID NO: 495106 - RNA, 21 nt, Human
aaggcuacaaaaacgaaacaa

SEQ ID NO: 495107 - RNA, 27 nt, Human
acaacgaaaaagaccaaguuagcuaga

SEQ ID NO: 495108 - RNA, 22 nt, Human
acauagaggggaccuuccuggc

SEQ ID NO: 495109 - RNA, 24 nt, Human
acgacauuccacacccuauuauca

SEQ ID NO: 495110 - RNA, 18 nt, Human
agacagaaacaaaauaaa

SEQ ID NO: 495111 - RNA, 22 nt, Human
agacagaaacaaaauaaaaauc

SEQ ID NO: 495112 - RNA, 24 nt, Human
agacagaaacaaaauaaaaaucug

SEQ ID NO: 495113 - RNA, 21 nt, Human
auccacaagauuaagcaguuu

SEQ ID NO: 495114 - RNA, 18 nt, Human
auguuuuguacaaaaaua

SEQ ID NO: 495115 - RNA, 19 nt, Human
caaaaauacugucaaaauu

SEQ ID NO: 495116 - RNA, 24 nt, Human
cacaagauuaagcaguuugccaag

SEQ ID NO: 495117 - RNA, 22 nt, Human
cacugacgacauuccacacccu

SEQ ID NO: 495118 - RNA, 19 nt, Human
caucuacaaaauccacaag

SEQ ID NO: 495119 - RNA, 24 nt, Human
caucuacaaaauccacaagauuaa

SEQ ID NO: 495120 - RNA, 21 nt, Human
caugcaaccaacuaaugcaau

SEQ ID NO: 495121 - RNA, 19 nt, Human
ccagaacaguuuggcccac

SEQ ID NO: 495122 - RNA, 21 nt, Human
ccaucuacaaaauccacaaga

SEQ ID NO: 495123 - RNA, 21 nt, Human
cgaaaaagaccaaguuagcua

SEQ ID NO: 495124 - RNA, 18 nt, Human
cgccgaggucucgcagcg

SEQ ID NO: 495125 - RNA, 18 nt, Human
gaaacaaaaacaggaaaa

SEQ ID NO: 495126 - RNA, 21 nt, Human
gcuccgaagaccgagggcggg

SEQ ID NO: 495127 - RNA, 20 nt, Human
ggaguaaaaacaaacaacga

SEQ ID NO: 495128 - RNA, 24 nt, Human
ggcuacaaaaacgaaacaaaaaca

SEQ ID NO: 495129 - RNA, 22 nt, Human
gggguuugauuucuuucgccgg

SEQ ID NO: 495130 - RNA, 22 nt, Human
uacaaaaacgaaacaaaaacag

SEQ ID NO: 495131 - RNA, 20 nt, Human
uacugugucuaagggaaugu

SEQ ID NO: 495132 - RNA, 24 nt, Human
uauuagcacagugucaaaaauguu

SEQ ID NO: 495133 - RNA, 20 nt, Human
ucacgccgaagaaguugggg

SEQ ID NO: 495134 - RNA, 18 nt, Human
uccaguuuagcauauuuu

SEQ ID NO: 495135 - RNA, 26 nt, Human
ugaaaccaucuacaaaauccacaaga

SEQ ID NO: 495136 - RNA, 24 nt, Human
ugaaagugaacaguaugacuuucc

SEQ ID NO: 495137 - RNA, 26 nt, Human
ugauccagaacaguuuggcccacauc

SEQ ID NO: 495138 - RNA, 22 nt, Human
ugcuccgaagaccgagggcggg

SEQ ID NO: 495139 - RNA, 21 nt, Human
uggcaaauuaaaauagaauaa

SEQ ID NO: 495140 - RNA, 20 nt, Human
uggggcagauucggagccgu

SEQ ID NO: 495141 - RNA, 19 nt, Human
uggggggggcggcgggggg

SEQ ID NO: 495142 - RNA, 22 nt, Human
uggggguggggggggcggcggg

SEQ ID NO: 495143 - RNA, 18 nt, Human
uguacucaaaugcauagu

SEQ ID NO: 495144 - RNA, 21 nt, Human
ugucaaaauuuccuaaaaagc

SEQ ID NO: 495145 - RNA, 20 nt, Human
uguuucuuuuaauucacgcc

SEQ ID NO: 495146 - RNA, 19 nt, Human
uuaaaaauuagucuguacu

SEQ ID NO: 495147 - RNA, 23 nt, Human
uuaaaaccaauuuguacaaguuu

SEQ ID NO: 495148 - RNA, 23 nt, Human
uuccaaguucucaaaccuuucaa

SEQ ID NO: 495149 - RNA, 24 nt, Human
uucgaaguucaugcaaccaacuaa

SEQ ID NO: 495150 - RNA, 19 nt, Human
uugaaagugaacaguauga

SEQ ID NO: 495151 - RNA, 24 nt, Human
uuggcccacaucuguuuaaucuuc

SEQ ID NO: 495152 - RNA, 19 nt, Human
uuugcgaauucugcuccga

SEQ ID NO: 495153 - RNA, 24 nt, Human
uuuguacaaaaauacugucaaaau

SEQ ID NO: 495154 - RNA, 25 nt, Human
uuuuuuuuuuuuuuucuuaacuuuu

SEQ ID NO: 495155 - RNA, 22 nt, Human
acuccuaaaaagcauuagcaga

SEQ ID NO: 495156 - RNA, 21 nt, Human
agcugcugcugcuguugcugg

SEQ ID NO: 495157 - RNA, 19 nt, Human
cagacuccuaaaaagcauu

SEQ ID NO: 495158 - RNA, 19 nt, Human
ccaggcaggccaggguaca

SEQ ID NO: 495159 - RNA, 23 nt, Human
ccugugguggggacugcuggagc

SEQ ID NO: 495160 - RNA, 19 nt, Human
cggggccugugguggggac

SEQ ID NO: 495161 - RNA, 22 nt, Human
cugcugcuggagcugcugcugc

SEQ ID NO: 495162 - RNA, 19 nt, Human
cugcuggagcugcugcugc

SEQ ID NO: 495163 - RNA, 22 nt, Human
cuguugcuggagcugcugcugc

SEQ ID NO: 495164 - RNA, 20 nt, Human
gagcugcugcugcugcuggc

SEQ ID NO: 495165 - RNA, 21 nt, Human
gccaggguacagggagguccc

SEQ ID NO: 495166 - RNA, 25 nt, Human
gccaggguacagggaggucccucua

SEQ ID NO: 495167 - RNA, 20 nt, Human
gcugcugcugcuguugcugg

SEQ ID NO: 495168 - RNA, 20 nt, Human
gcugcugcuguaacugcugg

SEQ ID NO: 495169 - RNA, 18 nt, Human
gcugcuggagcugcugcu

SEQ ID NO: 495170 - RNA, 21 nt, Human
gugacugcugcugcugcaauu

SEQ ID NO: 495171 - RNA, 19 nt, Human
ugaguaaaaacaugaacca

SEQ ID NO: 495172 - RNA, 21 nt, Human
ugcagugacugcugcugcugc

SEQ ID NO: 495173 - RNA, 21 nt, Human
ugcugcugcaauugcugcugc

SEQ ID NO: 495174 - RNA, 21 nt, Human
ugcugcugcugcaauugcugc

SEQ ID NO: 495175 - RNA, 18 nt, Human
ugcugcugcuguaacugc

SEQ ID NO: 495176 - RNA, 23 nt, Human
ugcugcugcuguaacugcuggag

SEQ ID NO: 495177 - RNA, 21 nt, Human
ugcugcuguugcuggagcugc

SEQ ID NO: 495178 - RNA, 28 nt, Human
ugcuguugcuggagcugcugcugcugcc

SEQ ID NO: 495179 - RNA, 24 nt, Human
uugcugcugcuggagcugcugcug

SEQ ID NO: 495180 - RNA, 28 nt, Human
uugcugcugcuggagcugcugcugcugu

SEQ ID NO: 495181 - RNA, 19 nt, Human
uugcuggagcugcugcugc

SEQ ID NO: 495182 - RNA, 22 nt, Human
aaaaaacucaguugguugaaac

SEQ ID NO: 495183 - RNA, 21 nt, Human
aaagugucagugcagacacuu

SEQ ID NO: 495184 - RNA, 21 nt, Human
aacaaaacaccccacaaauaa

SEQ ID NO: 495185 - RNA, 21 nt, Human
aacucaguugguugaaacuga

SEQ ID NO: 495186 - RNA, 21 nt, Human
aacuuccucagaccaccgccg

SEQ ID NO: 495187 - RNA, 20 nt, Human
aagaaaaaacucaguugguu

SEQ ID NO: 495188 - RNA, 18 nt, Human
aagaaaaaaguauucugu

SEQ ID NO: 495189 - RNA, 19 nt, Human
aagagaacacaagucuggg

SEQ ID NO: 495190 - RNA, 22 nt, Human
aagagaacacaagucuggguaa

SEQ ID NO: 495191 - RNA, 22 nt, Human
aauaaauagaaaagauauacaa

SEQ ID NO: 495192 - RNA, 20 nt, Human
accccacaaauaauaaaaac

SEQ ID NO: 495193 - RNA, 21 nt, Human
agaaaagauauacaaagugga

SEQ ID NO: 495194 - RNA, 18 nt, Human
agagaacacaagucuggg

SEQ ID NO: 495195 - RNA, 23 nt, Human
agcuacucaaaacaaaacacccc

SEQ ID NO: 495196 - RNA, 19 nt, Human
agguaggauuagcuuucca

SEQ ID NO: 495197 - RNA, 18 nt, Human
auagaacuuccucagacc

SEQ ID NO: 495198 - RNA, 19 nt, Human
auagaacuuccucagacca

SEQ ID NO: 495199 - RNA, 20 nt, Human
caaaagaggccacgaaacua

SEQ ID NO: 495200 - RNA, 22 nt, Human
caaaagcaaagcuaaaauucau

SEQ ID NO: 495201 - RNA, 24 nt, Human
caaauaauaaaaaccccauucccu

SEQ ID NO: 495202 - RNA, 18 nt, Human
caaggcaaacauacauuu

SEQ ID NO: 495203 - RNA, 24 nt, Human
cacgaaacuacagacuacugacga

SEQ ID NO: 495204 - RNA, 22 nt, Human
caggguaguauuauaaccuguu

SEQ ID NO: 495205 - RNA, 22 nt, Human
cagguacacggaauaaaagucc

SEQ ID NO: 495206 - RNA, 21 nt, Human
caucaaucaacaggcagucca

SEQ ID NO: 495207 - RNA, 18 nt, Human
cccacaaauaauaaaaac

SEQ ID NO: 495208 - RNA, 19 nt, Human
cgccgccgcagucugcacc

SEQ ID NO: 495209 - RNA, 20 nt, Human
gaacauaguaaacuagcuga

SEQ ID NO: 495210 - RNA, 22 nt, Human
gaaugacauuuguucaguauga

SEQ ID NO: 495211 - RNA, 22 nt, Human
gacuuuugaaaauauaucauua

SEQ ID NO: 495212 - RNA, 21 nt, Human
gcauuucauaaaauaucuguu

SEQ ID NO: 495213 - RNA, 19 nt, Human
gccaacuccagaccuaaga

SEQ ID NO: 495214 - RNA, 24 nt, Human
guagaggacaacucuugccauaac

SEQ ID NO: 495215 - RNA, 23 nt, Human
uaaaauucauucacugugguuaa

SEQ ID NO: 495216 - RNA, 19 nt, Human
uaaacuagaaugacauuug

SEQ ID NO: 495217 - RNA, 24 nt, Human
uaaacuagaaugacauuuguucag

SEQ ID NO: 495218 - RNA, 20 nt, Human
uaagcauguacuuaaguguc

SEQ ID NO: 495219 - RNA, 19 nt, Human
uacacggaauaaaaguccu

SEQ ID NO: 495220 - RNA, 21 nt, Human
uacacggaauaaaaguccuac

SEQ ID NO: 495221 - RNA, 19 nt, Human
uagaaaagauauacaaagu

SEQ ID NO: 495222 - RNA, 23 nt, Human
uagaaaagauauacaaaguggaa

SEQ ID NO: 495223 - RNA, 24 nt, Human
uagcuuuccaauguagaggacaac

SEQ ID NO: 495224 - RNA, 19 nt, Human
uaucuaaacuagaaugaca

SEQ ID NO: 495225 - RNA, 18 nt, Human
uaugaaaaaacaagggca

SEQ ID NO: 495226 - RNA, 18 nt, Human
uauguuauagggaagaaa

SEQ ID NO: 495227 - RNA, 26 nt, Human
uauucaaggaacauaguaaacuagcu

SEQ ID NO: 495228 - RNA, 26 nt, Human
ucaagggacaugacuuaacagugaag

SEQ ID NO: 495229 - RNA, 26 nt, Human
ucugagaaaggccaaaaaaaagaaaa

SEQ ID NO: 495230 - RNA, 21 nt, Human
ugacaaaauuuaccuuucuua

SEQ ID NO: 495231 - RNA, 22 nt, Human
ugaccccaguuauaaucaaaag

SEQ ID NO: 495232 - RNA, 22 nt, Human
ugacuaagcaugugaucuucac

SEQ ID NO: 495233 - RNA, 23 nt, Human
ugagaaaggccaaaaaaaagaaa

SEQ ID NO: 495234 - RNA, 27 nt, Human
uggaaugaacauagaaaugacuaagca

SEQ ID NO: 495235 - RNA, 28 nt, Human
uggccaacuccagaccuaagagcaauau

SEQ ID NO: 495236 - RNA, 20 nt, Human
ugucaaaaaccucaagucaa

SEQ ID NO: 495237 - RNA, 22 nt, Human
uguuauagggaagaaaacaagu

SEQ ID NO: 495238 - RNA, 20 nt, Human
uuaaaccacuaaauguggca

SEQ ID NO: 495239 - RNA, 18 nt, Human
uucaaaauggcauauuuu

SEQ ID NO: 495240 - RNA, 18 nt, Human
uucacugugguuaaacug

SEQ ID NO: 495241 - RNA, 25 nt, Human
uucuuggugaccccaguuauaauca

SEQ ID NO: 495242 - RNA, 21 nt, Human
aaccaaaugcagaagcagaga

SEQ ID NO: 495243 - RNA, 23 nt, Human
aaccaaccaaaugcagaagcaga

SEQ ID NO: 495244 - RNA, 21 nt, Human
aacugcucuuuaagaggggac

SEQ ID NO: 495245 - RNA, 23 nt, Human
aaggguccccccaacccaccuuu

SEQ ID NO: 495246 - RNA, 23 nt, Human
acaaacgcaguaugcacgcuccu

SEQ ID NO: 495247 - RNA, 25 nt, Human
acacaaacgcaguaugcacgcuccu

SEQ ID NO: 495248 - RNA, 22 nt, Human
agaaagaaaaggguccccccaa

SEQ ID NO: 495249 - RNA, 19 nt, Human
agagaacgacacgcacacc

SEQ ID NO: 495250 - RNA, 18 nt, Human
agagggaagggagauaca

SEQ ID NO: 495251 - RNA, 22 nt, Human
agccauuaaagaacaauacagc

SEQ ID NO: 495252 - RNA, 19 nt, Human
agggaagggagauacagca

SEQ ID NO: 495253 - RNA, 18 nt, Human
aggggacacaugggaaaa

SEQ ID NO: 495254 - RNA, 24 nt, Human
augaaaagccaccuguuauucaca

SEQ ID NO: 495255 - RNA, 22 nt, Human
caaccaaaugcagaagcagaga

SEQ ID NO: 495256 - RNA, 20 nt, Human
caagacagccauuaaagaac

SEQ ID NO: 495257 - RNA, 23 nt, Human
caccaugagggaggcagcccuca

SEQ ID NO: 495258 - RNA, 21 nt, Human
cacgcuccuugccgacagggc

SEQ ID NO: 495259 - RNA, 19 nt, Human
cagaagcagagaacuuaaa

SEQ ID NO: 495260 - RNA, 18 nt, Human
cagcucagagggaaggga

SEQ ID NO: 495261 - RNA, 24 nt, Human
caugaaaagccaccuguuauucac

SEQ ID NO: 495262 - RNA, 19 nt, Human
cauucagaaccgccuggau

SEQ ID NO: 495263 - RNA, 20 nt, Human
ccagacaggauuucugaggu

SEQ ID NO: 495264 - RNA, 21 nt, Human
ccagccagacaggauuucuga

SEQ ID NO: 495265 - RNA, 20 nt, Human
cccaccuuuuuuuuuuuuuc

SEQ ID NO: 495266 - RNA, 20 nt, Human
cccaggggcuucuccccucc

SEQ ID NO: 495267 - RNA, 20 nt, Human
ccggcaguggggacagaggg

SEQ ID NO: 495268 - RNA, 22 nt, Human
cggcaguggggacagagggcac

SEQ ID NO: 495269 - RNA, 20 nt, Human
cggccagaacaaaaaaaaaa

SEQ ID NO: 495270 - RNA, 23 nt, Human
cggccagaacaaaaaaaaaagua

SEQ ID NO: 495271 - RNA, 19 nt, Human
cggcccgggaaacuugcag

SEQ ID NO: 495272 - RNA, 18 nt, Human
cuuucaaagaaagaccca

SEQ ID NO: 495273 - RNA, 19 nt, Human
cuuuuuuuuuuuuuuacuu

SEQ ID NO: 495274 - RNA, 21 nt, Human
gaaaaggguccccccaaccca

SEQ ID NO: 495275 - RNA, 20 nt, Human
gagcgagcgcggcgcgcggc

SEQ ID NO: 495276 - RNA, 23 nt, Human
gagcugacagcuaugagcuuuaa

SEQ ID NO: 495277 - RNA, 21 nt, Human
gaggggacaagaaauuggggg

SEQ ID NO: 495278 - RNA, 18 nt, Human
gcagcccucaagcagcgg

SEQ ID NO: 495279 - RNA, 26 nt, Human
gcagcggauuccuuucaaagaaagac

SEQ ID NO: 495280 - RNA, 21 nt, Human
gccagaacaaaaaaaaaagua

SEQ ID NO: 495281 - RNA, 19 nt, Human
gcgcggcgcgcggcccggg

SEQ ID NO: 495282 - RNA, 18 nt, Human
gcgggcugggaggcgagc

SEQ ID NO: 495283 - RNA, 22 nt, Human
ggacaagaaauugggggguagg

SEQ ID NO: 495284 - RNA, 18 nt, Human
ggacuuuaaauccgcgcc

SEQ ID NO: 495285 - RNA, 18 nt, Human
ggccgcgggcugggaggc

SEQ ID NO: 495286 - RNA, 19 nt, Human
ggcgagcgagcgcggcgcg

SEQ ID NO: 495287 - RNA, 21 nt, Human
ggcgcggcggcggcucgggcc

SEQ ID NO: 495288 - RNA, 19 nt, Human
ggcugggaggcgagcgagc

SEQ ID NO: 495289 - RNA, 24 nt, Human
ggcugggaggcgagcgagcgcggc

SEQ ID NO: 495290 - RNA, 21 nt, Human
gggacagagggcaccgggaaa

SEQ ID NO: 495291 - RNA, 21 nt, Human
uacacaaacgcaguaugcacg

SEQ ID NO: 495292 - RNA, 24 nt, Human
uacacaaacgcaguaugcacgcuc

SEQ ID NO: 495293 - RNA, 22 nt, Human
uagaaagaaaagggucccccca

SEQ ID NO: 495294 - RNA, 18 nt, Human
ucacaggggcugcgcuuc

SEQ ID NO: 495295 - RNA, 19 nt, Human
ucagaaccgccuggaugcu

SEQ ID NO: 495296 - RNA, 20 nt, Human
ucagagcugacagcuaugag

SEQ ID NO: 495297 - RNA, 19 nt, Human
ucggccagaacaaaaaaaa

SEQ ID NO: 495298 - RNA, 24 nt, Human
ucggccagaacaaaaaaaaaagua

SEQ ID NO: 495299 - RNA, 19 nt, Human
ugauaucacagaugcguca

SEQ ID NO: 495300 - RNA, 23 nt, Human
ugcuuugcauaguuaccucugau

SEQ ID NO: 495301 - RNA, 18 nt, Human
uggaagacaagugagaga

SEQ ID NO: 495302 - RNA, 23 nt, Human
uucaaaguggaagacaagugaga

SEQ ID NO: 495303 - RNA, 23 nt, Human
uugggggguaggggacacauggg

SEQ ID NO: 495304 - RNA, 22 nt, Human
uuuaagccuuuaucauuuuucu

SEQ ID NO: 495305 - RNA, 18 nt, Human
agcagcacuuucccucac

SEQ ID NO: 495306 - RNA, 20 nt, Human
cagcagcacuuucccucaac

SEQ ID NO: 495307 - RNA, 22 nt, Human
ccaccgcggcggagcaccgccc

SEQ ID NO: 495308 - RNA, 26 nt, Human
cgcgucugcagacccagcagcagcac

SEQ ID NO: 495309 - RNA, 18 nt, Human
cuggcugccugaguaggu

SEQ ID NO: 495310 - RNA, 24 nt, Human
gcgaagcgauagcaaccgccaccg

SEQ ID NO: 495311 - RNA, 20 nt, Human
gcggagcaccgcccuccccu

SEQ ID NO: 495312 - RNA, 25 nt, Human
gcgucugcagacccagcagcagcac

SEQ ID NO: 495313 - RNA, 22 nt, Human
gcuggcugccugaguagguucu

SEQ ID NO: 495314 - RNA, 24 nt, Human
uacagaaauauguuuaauacuuag

SEQ ID NO: 495315 - RNA, 23 nt, Human
uagcaaccgccaccgcggcggag

SEQ ID NO: 495316 - RNA, 22 nt, Human
ucccucaacucuucucagcugg

SEQ ID NO: 495317 - RNA, 21 nt, Human
ugccugaguagguucugcgaa

SEQ ID NO: 495318 - RNA, 22 nt, Human
uuuuuuggaagaauacagaaau

SEQ ID NO: 495319 - RNA, 18 nt, Human
uuuuuuuuuuuuuuuuug

SEQ ID NO: 495320 - RNA, 18 nt, Human
cccugauuuguacgggac

SEQ ID NO: 495321 - RNA, 22 nt, Human
cucgggggugggcucggaggca

SEQ ID NO: 495322 - RNA, 20 nt, Human
gcgagcucgggggugggcuc

SEQ ID NO: 495323 - RNA, 18 nt, Human
ucagugggcgagaaggag

SEQ ID NO: 495324 - RNA, 25 nt, Human
ucgauaaaagcagcagcccuaauuu

SEQ ID NO: 495325 - RNA, 21 nt, Human
ucugcuagggcgccgggcugg

SEQ ID NO: 495326 - RNA, 18 nt, Human
uugaagcugucccugauu

SEQ ID NO: 495327 - RNA, 21 nt, Human
uuuuauggucacauuuaggcu

SEQ ID NO: 495328 - RNA, 18 nt, Human
uuuuuuuuuuuuuucucg

SEQ ID NO: 495329 - RNA, 21 nt, Human
uuuuuuuuuuuuuuucucgau

SEQ ID NO: 495330 - RNA, 24 nt, Human
uuuuuuuuuuuuuuuuuucucgau

SEQ ID NO: 495331 - RNA, 24 nt, Human
uuuuuuuuuuuuuuuuuuucucgu

SEQ ID NO: 495332 - RNA, 22 nt, Human
uuuuuuuuuuuuuuuuuuuucu

SEQ ID NO: 495333 - RNA, 24 nt, Human
aaagauuugacgauccccagauaa

SEQ ID NO: 495334 - RNA, 23 nt, Human
aaccacguccagcccaggcaaca

SEQ ID NO: 495335 - RNA, 24 nt, Human
agacaaaaccacguccagcccagg

SEQ ID NO: 495336 - RNA, 19 nt, Human
agagaaaaacugacuggaa

SEQ ID NO: 495337 - RNA, 22 nt, Human
cagcagacaaaaccacguccag

SEQ ID NO: 495338 - RNA, 24 nt, Human
cagcagacaaaaccacguccagcc

SEQ ID NO: 495339 - RNA, 23 nt, Human
caggcacuuaagagaaaaacuga

SEQ ID NO: 495340 - RNA, 18 nt, Human
ccagcccaggcaacaacu

SEQ ID NO: 495341 - RNA, 23 nt, Human
cgcugcagaaaaugaaacgagag

SEQ ID NO: 495342 - RNA, 22 nt, Human
gcagcagacaaaaccacgucca

SEQ ID NO: 495343 - RNA, 23 nt, Human
gcagcagacaaaaccacguccag

SEQ ID NO: 495344 - RNA, 20 nt, Human
guugcugugaagaauacagc

SEQ ID NO: 495345 - RNA, 19 nt, Human
uauauacacauauacauua

SEQ ID NO: 495346 - RNA, 21 nt, Human
uauauacacauauacauuaaa

SEQ ID NO: 495347 - RNA, 24 nt, Human
ugaacaaaaguaaacuguuucagu

SEQ ID NO: 495348 - RNA, 20 nt, Human
ugacuggaagaacuuuuauc

SEQ ID NO: 495349 - RNA, 18 nt, Human
uuucucaaguauucacug

SEQ ID NO: 495350 - RNA, 22 nt, Human
uuucucaaguauucacugaaua

SEQ ID NO: 495351 - RNA, 21 nt, Human
aaaguggcagaugaccucauc

SEQ ID NO: 495352 - RNA, 24 nt, Human
aagacccuucacccagaaauagag

SEQ ID NO: 495353 - RNA, 22 nt, Human
aaggaguagaugaaggaggagg

SEQ ID NO: 495354 - RNA, 19 nt, Human
accaagacccuucacccag

SEQ ID NO: 495355 - RNA, 20 nt, Human
agaccccucggugcacuccc

SEQ ID NO: 495356 - RNA, 18 nt, Human
aggaggaggaggggaugu

SEQ ID NO: 495357 - RNA, 18 nt, Human
aggcaaggggagagacug

SEQ ID NO: 495358 - RNA, 23 nt, Human
aggcaaggggagagacugggggc

SEQ ID NO: 495359 - RNA, 19 nt, Human
agggaacagggaggagggg

SEQ ID NO: 495360 - RNA, 24 nt, Human
agggaggaagggaacagggaggag

SEQ ID NO: 495361 - RNA, 19 nt, Human
agggcaucaucgcgcccgu

SEQ ID NO: 495362 - RNA, 23 nt, Human
aggugguaucuucuacagaaagu

SEQ ID NO: 495363 - RNA, 26 nt, Human
auucaauaaauauuuauuauaauuaa

SEQ ID NO: 495364 - RNA, 18 nt, Human
caaggaguagaugaagga

SEQ ID NO: 495365 - RNA, 20 nt, Human
caccuggaaauccucgcaga

SEQ ID NO: 495366 - RNA, 23 nt, Human
cagaagguggccccgucgggcac

SEQ ID NO: 495367 - RNA, 18 nt, Human
cagaugaccucaucuucc

SEQ ID NO: 495368 - RNA, 23 nt, Human
cagcucagcuccccgcgccccgg

SEQ ID NO: 495369 - RNA, 20 nt, Human
cagggaggagggggucaggu

SEQ ID NO: 495370 - RNA, 21 nt, Human
ccaagacccuucacccagaaa

SEQ ID NO: 495371 - RNA, 20 nt, Human
ccaccaagacccuucaccca

SEQ ID NO: 495372 - RNA, 29 nt, Human
ccaccaagacccuucacccagaaauagag

SEQ ID NO: 495373 - RNA, 18 nt, Human
ccacuggguaguuggugc

SEQ ID NO: 495374 - RNA, 23 nt, Human
cccaccaccaagacccuucaccc

SEQ ID NO: 495375 - RNA, 18 nt, Human
ccccgcgccccggcaccu

SEQ ID NO: 495376 - RNA, 21 nt, Human
ccccucggugcacuccacugg

SEQ ID NO: 495377 - RNA, 21 nt, Human
cccgcgccccggcaccuggaa

SEQ ID NO: 495378 - RNA, 22 nt, Human
cccgcgccccggcaccuggaaa

SEQ ID NO: 495379 - RNA, 20 nt, Human
ccucgcagaagguggccccg

SEQ ID NO: 495380 - RNA, 19 nt, Human
ccugcaggcagcucagcuc

SEQ ID NO: 495381 - RNA, 20 nt, Human
cuccagaauaggcaagggga

SEQ ID NO: 495382 - RNA, 21 nt, Human
cuggucuuugacagagcaggg

SEQ ID NO: 495383 - RNA, 21 nt, Human
gaacaaggaguagaugaagga

SEQ ID NO: 495384 - RNA, 19 nt, Human
gaagggaacagggaggagg

SEQ ID NO: 495385 - RNA, 22 nt, Human
gaccucaucuuccacuguccac

SEQ ID NO: 495386 - RNA, 23 nt, Human
gaggaagggaacagggaggaggg

SEQ ID NO: 495387 - RNA, 23 nt, Human
gaggaggaggaggaggaggggau

SEQ ID NO: 495388 - RNA, 18 nt, Human
gcagcucagcuccccgcg

SEQ ID NO: 495389 - RNA, 23 nt, Human
gcaggcagcucagcuccccgcgc

SEQ ID NO: 495390 - RNA, 19 nt, Human
gcucagcuccccgcgcccc

SEQ ID NO: 495391 - RNA, 18 nt, Human
ggaaauccucgcagaagg

SEQ ID NO: 495392 - RNA, 25 nt, Human
ggaggaagggaacagggaggagggg

SEQ ID NO: 495393 - RNA, 21 nt, Human
ggaggaggaggaggaggaggg

SEQ ID NO: 495394 - RNA, 23 nt, Human
ggguccagggguguuccccaggu

SEQ ID NO: 495395 - RNA, 18 nt, Human
ggugggcacggcuuggua

SEQ ID NO: 495396 - RNA, 22 nt, Human
uauagaauuucuguuccgauga

SEQ ID NO: 495397 - RNA, 20 nt, Human
uccuaaaugaagggcucccg

SEQ ID NO: 495398 - RNA, 25 nt, Human
ucggugcacuccacuggguaguugg

SEQ ID NO: 495399 - RNA, 26 nt, Human
ucuguuccgaugaugauuccagggag

SEQ ID NO: 495400 - RNA, 19 nt, Human
ugaaggaggaggaggagga

SEQ ID NO: 495401 - RNA, 23 nt, Human
uggaauuguaaacaccguaucca

SEQ ID NO: 495402 - RNA, 24 nt, Human
uggcguggaggaucacaaaguuau

SEQ ID NO: 495403 - RNA, 20 nt, Human
ugggguccuggccgaugccu

SEQ ID NO: 495404 - RNA, 22 nt, Human
ugggguccuggccgaugccugg

SEQ ID NO: 495405 - RNA, 23 nt, Human
ugggguggugggaguaggugggc

SEQ ID NO: 495406 - RNA, 25 nt, Human
ugggguggugggaguaggugggcac

SEQ ID NO: 495407 - RNA, 18 nt, Human
uguccacagggcacaggg

SEQ ID NO: 495408 - RNA, 19 nt, Human
uucuacagaaaguuggagu

SEQ ID NO: 495409 - RNA, 20 nt, Human
uugacagagcagggguuuuu

SEQ ID NO: 495410 - RNA, 19 nt, Human
uuggaguggcgucuggucu

SEQ ID NO: 495411 - RNA, 20 nt, Human
aacaauagcagaucauaccc

SEQ ID NO: 495412 - RNA, 20 nt, Human
acagcaaaugaauggauauc

SEQ ID NO: 495413 - RNA, 21 nt, Human
agcugucccagaaccggacuc

SEQ ID NO: 495414 - RNA, 20 nt, Human
auaacaauagcagaucauaa

SEQ ID NO: 495415 - RNA, 20 nt, Human
auggcggcggcgacggcagc

SEQ ID NO: 495416 - RNA, 22 nt, Human
caccacugucuccagcuguccc

SEQ ID NO: 495417 - RNA, 22 nt, Human
cagaaccggacucuuccugcca

SEQ ID NO: 495418 - RNA, 23 nt, Human
cagaaccggacucuuccugccau

SEQ ID NO: 495419 - RNA, 22 nt, Human
cagcaaaugaauggauauuucu

SEQ ID NO: 495420 - RNA, 21 nt, Human
caguguuuauagaucaaccca

SEQ ID NO: 495421 - RNA, 19 nt, Human
ccuacgcugcggugccgaa

SEQ ID NO: 495422 - RNA, 19 nt, Human
gcaaauucauaaaugcuga

SEQ ID NO: 495423 - RNA, 27 nt, Human
gcggcggcgacggcagcggugguagca

SEQ ID NO: 495424 - RNA, 22 nt, Human
ggcggcgacggcagcgguggua

SEQ ID NO: 495425 - RNA, 24 nt, Human
uaaaugaacauuugcaauuuuaaa

SEQ ID NO: 495426 - RNA, 25 nt, Human
uaacaauagcagaucauacccuggu

SEQ ID NO: 495427 - RNA, 22 nt, Human
uacaagcuaauuaccacauccu

SEQ ID NO: 495428 - RNA, 20 nt, Human
uagaucaacccaaauauuac

SEQ ID NO: 495429 - RNA, 18 nt, Human
uagcagaucauacccugg

SEQ ID NO: 495430 - RNA, 20 nt, Human
uaguacagcaaaugaaugga

SEQ ID NO: 495431 - RNA, 27 nt, Human
uauuucagucaccaccacugucuccag

SEQ ID NO: 495432 - RNA, 18 nt, Human
ucaccaccacugucucca

SEQ ID NO: 495433 - RNA, 24 nt, Human
uggcggcggcgacggcagcggugg

SEQ ID NO: 495434 - RNA, 22 nt, Human
uucagucaccaccacugucucc

SEQ ID NO: 495435 - RNA, 21 nt, Human
uuccugccaucaaaauggcgg

SEQ ID NO: 495436 - RNA, 20 nt, Human
uucgcaaaauagcuuuccuu

SEQ ID NO: 495437 - RNA, 23 nt, Human
uugcaauuuuaaaaucccaaauc

SEQ ID NO: 495438 - RNA, 19 nt, Human
uuuuuuuuuuuuuuuuugu

SEQ ID NO: 495439 - RNA, 27 nt, Human
uuuuuuuuuuuuuuuuuuuuuuugggg

SEQ ID NO: 495440 - RNA, 19 nt, Human
aaaaaucuguugaaaggau

SEQ ID NO: 495441 - RNA, 19 nt, Human
aagaagaaaaaaguaauag

SEQ ID NO: 495442 - RNA, 18 nt, Human
aauaaccucuuauauaca

SEQ ID NO: 495443 - RNA, 24 nt, Human
aauagauaaaaguucugagagaga

SEQ ID NO: 495444 - RNA, 18 nt, Human
acacagugggacagaaau

SEQ ID NO: 495445 - RNA, 19 nt, Human
acaccuaucaauuucuuuc

SEQ ID NO: 495446 - RNA, 19 nt, Human
agacagcacaguguuuugu

SEQ ID NO: 495447 - RNA, 21 nt, Human
agaggaggaggaggaggaggu

SEQ ID NO: 495448 - RNA, 23 nt, Human
agaggaggaggaggaggaggugg

SEQ ID NO: 495449 - RNA, 18 nt, Human
aggaggaggaggaggagg

SEQ ID NO: 495450 - RNA, 26 nt, Human
aggaggagguggaggaggagggaccc

SEQ ID NO: 495451 - RNA, 23 nt, Human
aggaggagguggaggagggggac

SEQ ID NO: 495452 - RNA, 18 nt, Human
agggauagacagcacagu

SEQ ID NO: 495453 - RNA, 18 nt, Human
agguacuagaauuuacau

SEQ ID NO: 495454 - RNA, 19 nt, Human
agguggaggaggaggcggc

SEQ ID NO: 495455 - RNA, 21 nt, Human
augagacacagugggacagaa

SEQ ID NO: 495456 - RNA, 20 nt, Human
caacaaaaaugaaaaaaagc

SEQ ID NO: 495457 - RNA, 31 nt, Human
caacaaaaaugaaaaaaagcgagacaaaaga

SEQ ID NO: 495458 - RNA, 21 nt, Human
caguauccaagcaaagaaaaa

SEQ ID NO: 495459 - RNA, 26 nt, Human
cauacucauaagaagaaaaaaguaau

SEQ ID NO: 495460 - RNA, 21 nt, Human
ccacaaccuccucugcuccag

SEQ ID NO: 495461 - RNA, 27 nt, Human
ccaccgccacaaccuccucugcuccag

SEQ ID NO: 495462 - RNA, 20 nt, Human
ccgccgccgcuuucuccagc

SEQ ID NO: 495463 - RNA, 20 nt, Human
ccgcuuucuccagccaccgc

SEQ ID NO: 495464 - RNA, 21 nt, Human
cgccacaaccuccucugcucc

SEQ ID NO: 495465 - RNA, 18 nt, Human
cucccaugugagccucua

SEQ ID NO: 495466 - RNA, 23 nt, Human
cucccaugugagccucuaccaug

SEQ ID NO: 495467 - RNA, 18 nt, Human
gagagagaagcaaccuau

SEQ ID NO: 495468 - RNA, 23 nt, Human
gagauuaacaagggugaggacaa

SEQ ID NO: 495469 - RNA, 22 nt, Human
gauuuauuuuggaaucacagua

SEQ ID NO: 495470 - RNA, 21 nt, Human
ggagguggaggaggaggcggc

SEQ ID NO: 495471 - RNA, 23 nt, Human
ggagguggaggaggaggcggcgg

SEQ ID NO: 495472 - RNA, 22 nt, Human
gguacaacaauuaugacauuug

SEQ ID NO: 495473 - RNA, 24 nt, Human
uaaagcgcccggguaucaccggcc

SEQ ID NO: 495474 - RNA, 24 nt, Human
uaagaagaaaaaaguaauagauaa

SEQ ID NO: 495475 - RNA, 18 nt, Human
uagaagagguccaauggc

SEQ ID NO: 495476 - RNA, 20 nt, Human
uagaagagguccaauggcuu

SEQ ID NO: 495477 - RNA, 23 nt, Human
uagaguaaaccauucugagucuc

SEQ ID NO: 495478 - RNA, 20 nt, Human
uccaggaggagaggaggagg

SEQ ID NO: 495479 - RNA, 23 nt, Human
ucuauaaugagacacagugggac

SEQ ID NO: 495480 - RNA, 18 nt, Human
ugaaaaaaagcgagacaa

SEQ ID NO: 495481 - RNA, 22 nt, Human
ugagccucuaccaugugcccag

SEQ ID NO: 495482 - RNA, 25 nt, Human
ugagccucuaccaugugcccaguuu

SEQ ID NO: 495483 - RNA, 23 nt, Human
ugccucagaaguuuaucaauaac

SEQ ID NO: 495484 - RNA, 22 nt, Human
ugcuuguggacauuuuauucac

SEQ ID NO: 495485 - RNA, 18 nt, Human
uggaggaggaggcggcgg

SEQ ID NO: 495486 - RNA, 23 nt, Human
ugugagccucuaccaugugccca

SEQ ID NO: 495487 - RNA, 19 nt, Human
uguucagaagugaaaucca

SEQ ID NO: 495488 - RNA, 23 nt, Human
uguucagaagugaaauccauauu

SEQ ID NO: 495489 - RNA, 24 nt, Human
uuacaccuaucaauuucuuucuuc

SEQ ID NO: 495490 - RNA, 20 nt, Human
uucaauagguacaacaauua

SEQ ID NO: 495491 - RNA, 27 nt, Human
uuucuugagauuaacaagggugaggac

SEQ ID NO: 495492 - RNA, 23 nt, Human
aaaaauguucauugaaugccucc

SEQ ID NO: 495493 - RNA, 23 nt, Human
aaugaagaaaauaauacagagga

SEQ ID NO: 495494 - RNA, 24 nt, Human
acagguauuucauccuaauccuca

SEQ ID NO: 495495 - RNA, 19 nt, Human
agcaccauuugaguuugca

SEQ ID NO: 495496 - RNA, 22 nt, Human
aggugggcgggaugagguggug

SEQ ID NO: 495497 - RNA, 18 nt, Human
auaagaguaaaggaagga

SEQ ID NO: 495498 - RNA, 25 nt, Human
augaagaaaauaauacagaggaaau

SEQ ID NO: 495499 - RNA, 18 nt, Human
caggugggcgggaugagg

SEQ ID NO: 495500 - RNA, 19 nt, Human
cauuggucccaguuuacag

SEQ ID NO: 495501 - RNA, 23 nt, Human
cauuuuuauuuuauaucgugagg

SEQ ID NO: 495502 - RNA, 20 nt, Human
cccacacaggugggcgggau

SEQ ID NO: 495503 - RNA, 23 nt, Human
gaaaauaauacagaggaaauaac

SEQ ID NO: 495504 - RNA, 20 nt, Human
gaagaaaauaauacagagga

SEQ ID NO: 495505 - RNA, 22 nt, Human
gaagaaaauaauacagaggaaa

SEQ ID NO: 495506 - RNA, 21 nt, Human
gaaggagagucagugggucuc

SEQ ID NO: 495507 - RNA, 21 nt, Human
ggcauaagaguaaaggaagga

SEQ ID NO: 495508 - RNA, 22 nt, Human
uaacaacaacuaaaccuuuggc

SEQ ID NO: 495509 - RNA, 22 nt, Human
uacuagaauuuuucccccacaa

SEQ ID NO: 495510 - RNA, 24 nt, Human
ucaaauaaucaaaauacuagaauu

SEQ ID NO: 495511 - RNA, 20 nt, Human
ucagugggucucucccuuuu

SEQ ID NO: 495512 - RNA, 22 nt, Human
ucccccacaagaaugaugggac

SEQ ID NO: 495513 - RNA, 21 nt, Human
ugauucacuggucaagagcuc

SEQ ID NO: 495514 - RNA, 19 nt, Human
uggaggaggagacgcggug

SEQ ID NO: 495515 - RNA, 21 nt, Human
uggauuaucaucggcuggaaa

SEQ ID NO: 495516 - RNA, 24 nt, Human
uggcacugccuaggcacuuucaca

SEQ ID NO: 495517 - RNA, 20 nt, Human
uggcuggcacugccuaggca

SEQ ID NO: 495518 - RNA, 23 nt, Human
uugaaugccuccuauuuggcugg

SEQ ID NO: 495519 - RNA, 19 nt, Human
uuggucccaguuuacagaa

SEQ ID NO: 495520 - RNA, 19 nt, Human
uuucacagguauuucaucc

SEQ ID NO: 495521 - RNA, 20 nt, Human
uuugccacacauuuuuguug

SEQ ID NO: 495522 - RNA, 19 nt, Human
uuuguugcuguaagauuca

SEQ ID NO: 495523 - RNA, 19 nt, Human
acaugggaugaauuuuaag

SEQ ID NO: 495524 - RNA, 19 nt, Human
ccaugaguguuuuuauuua

SEQ ID NO: 495525 - RNA, 22 nt, Human
cuugaagauuuuuuucuucguu

SEQ ID NO: 495526 - RNA, 23 nt, Human
gaagauuuuuuucuucguuaagg

SEQ ID NO: 495527 - RNA, 23 nt, Human
uagaugauuuuaauuucuugaug

SEQ ID NO: 495528 - RNA, 22 nt, Human
uauccaugaguguuuuuauuua

SEQ ID NO: 495529 - RNA, 18 nt, Human
uauuugcucuccuuuacu

SEQ ID NO: 495530 - RNA, 21 nt, Human
uccuuuacuuacauuguuuug

SEQ ID NO: 495531 - RNA, 25 nt, Human
ucucuaguuauuccuggcucaaaug

SEQ ID NO: 495532 - RNA, 21 nt, Human
ucuucuaggucuacuugaaga

SEQ ID NO: 495533 - RNA, 20 nt, Human
ugaguguuuuuauuuaauca

SEQ ID NO: 495534 - RNA, 20 nt, Human
ugggaugaauuuuaagauuc

SEQ ID NO: 495535 - RNA, 18 nt, Human
aaaacaaauaagggcuua

SEQ ID NO: 495536 - RNA, 18 nt, Human
aacaaaaagguaguuuag

SEQ ID NO: 495537 - RNA, 20 nt, Human
aagagcucugagggcaucac

SEQ ID NO: 495538 - RNA, 23 nt, Human
aagagcucugagggcaucacuga

SEQ ID NO: 495539 - RNA, 21 nt, Human
aagcaauaagcuuacagcagc

SEQ ID NO: 495540 - RNA, 22 nt, Human
aaugcuuuauacaaauuccuau

SEQ ID NO: 495541 - RNA, 19 nt, Human
aauucaaucaauaaaguug

SEQ ID NO: 495542 - RNA, 25 nt, Human
acaccuuauuaggaagauauaaaac

SEQ ID NO: 495543 - RNA, 22 nt, Human
acagagcacaaacaugucagac

SEQ ID NO: 495544 - RNA, 22 nt, Human
accaaugccaacacccuuucca

SEQ ID NO: 495545 - RNA, 20 nt, Human
accugggggaacagcaugca

SEQ ID NO: 495546 - RNA, 24 nt, Human
acugguagagagaggaaggcacug

SEQ ID NO: 495547 - RNA, 24 nt, Human
acugguagagagaggaaggcacug

SEQ ID NO: 495548 - RNA, 22 nt, Human
agaagaguaaaugauauuugac

SEQ ID NO: 495549 - RNA, 23 nt, Human
agacgaaaaagaaaauauaccaa

SEQ ID NO: 495550 - RNA, 25 nt, Human
agagaccaaugaaacacaaaacaaa

SEQ ID NO: 495551 - RNA, 21 nt, Human
agagcacaaacaugucagaca

SEQ ID NO: 495552 - RNA, 22 nt, Human
agccagcugagcaaauaaagac

SEQ ID NO: 495553 - RNA, 18 nt, Human
agcuaacagcaagagcuc

SEQ ID NO: 495554 - RNA, 20 nt, Human
aggcagugaaucacaugaag

SEQ ID NO: 495555 - RNA, 22 nt, Human
agguggcugggccccgcggagg

SEQ ID NO: 495556 - RNA, 19 nt, Human
auauauacauaucuauaua

SEQ ID NO: 495557 - RNA, 23 nt, Human
aucuauguauguggcaaaagcca

SEQ ID NO: 495558 - RNA, 20 nt, Human
augaagguacguguguaggu

SEQ ID NO: 495559 - RNA, 18 nt, Human
augauuacucaaugggaa

SEQ ID NO: 495560 - RNA, 23 nt, Human
auggaacagagcacaaacauguc

SEQ ID NO: 495561 - RNA, 22 nt, Human
caaacagaccacaccuuauuag

SEQ ID NO: 495562 - RNA, 22 nt, Human
caaacaugucagacacagcuga

SEQ ID NO: 495563 - RNA, 18 nt, Human
caaaggcacccaaagcua

SEQ ID NO: 495564 - RNA, 25 nt, Human
caaaggcacccaaagcuaaugaaga

SEQ ID NO: 495565 - RNA, 22 nt, Human
caagacucaaauccaggucucc

SEQ ID NO: 495566 - RNA, 21 nt, Human
caaugaaacacaaaacaaaua

SEQ ID NO: 495567 - RNA, 22 nt, Human
cacaaaacaaauaagggcuuaa

SEQ ID NO: 495568 - RNA, 22 nt, Human
cacaacaucacugugagguggg

SEQ ID NO: 495569 - RNA, 23 nt, Human
caccaaugccaacacccuuucca

SEQ ID NO: 495570 - RNA, 21 nt, Human
caccgcuuacagaugaagcaa

SEQ ID NO: 495571 - RNA, 25 nt, Human
cacgcaugaagaauugaaagaauuc

SEQ ID NO: 495572 - RNA, 22 nt, Human
cagaaagucuagcacuuuguuc

SEQ ID NO: 495573 - RNA, 21 nt, Human
cagacuggaaaaguaagagca

SEQ ID NO: 495574 - RNA, 18 nt, Human
cagggauugugugggaag

SEQ ID NO: 495575 - RNA, 24 nt, Human
ccaaugaaacacaaaacaaauaag

SEQ ID NO: 495576 - RNA, 22 nt, Human
cccacaacaucacugugaggug

SEQ ID NO: 495577 - RNA, 27 nt, Human
cccauuacaucuguuuagccacagaaa

SEQ ID NO: 495578 - RNA, 18 nt, Human
ccgcggaggaaguuaagg

SEQ ID NO: 495579 - RNA, 22 nt, Human
ccucuucuaacugguuaaguau

SEQ ID NO: 495580 - RNA, 23 nt, Human
cgcaugaagaauugaaagaauuc

SEQ ID NO: 495581 - RNA, 21 nt, Human
cggacucccgaagguggcugg

SEQ ID NO: 495582 - RNA, 21 nt, Human
cuaguaucaacauaaugagaa

SEQ ID NO: 495583 - RNA, 21 nt, Human
cuccagaaagucuagcacuuu

SEQ ID NO: 495584 - RNA, 25 nt, Human
cuccagacaccaaugccaacacccu

SEQ ID NO: 495585 - RNA, 22 nt, Human
gaacagagcacaaacaugucag

SEQ ID NO: 495586 - RNA, 23 nt, Human
gaacagagcacaaacaugucaga

SEQ ID NO: 495587 - RNA, 21 nt, Human
gagcaccccuucccccaauug

SEQ ID NO: 495588 - RNA, 22 nt, Human
gauacuagaagcugcgguugcu

SEQ ID NO: 495589 - RNA, 18 nt, Human
gccauacucacugcagaa

SEQ ID NO: 495590 - RNA, 23 nt, Human
ggucauuuugggccauaaaauuu

SEQ ID NO: 495591 - RNA, 25 nt, Human
ggucauuuugggccauaaaauuuuu

SEQ ID NO: 495592 - RNA, 21 nt, Human
guuaaguaucauuaucucaau

SEQ ID NO: 495593 - RNA, 23 nt, Human
guuuuguucaguggaaauagacu

SEQ ID NO: 495594 - RNA, 23 nt, Human
guuuuguucaguggaaauagacu

SEQ ID NO: 495595 - RNA, 23 nt, Human
uaaaauaaguauaugaaaagggc

SEQ ID NO: 495596 - RNA, 21 nt, Human
uaaaauggaacagagcacaaa

SEQ ID NO: 495597 - RNA, 21 nt, Human
uaaauuacaaaaccacacuua

SEQ ID NO: 495598 - RNA, 23 nt, Human
uaacuuccaaaagcauauauucu

SEQ ID NO: 495599 - RNA, 22 nt, Human
uaagugacuugcuuacagcuac

SEQ ID NO: 495600 - RNA, 23 nt, Human
uaaugaagaagaguaaaugauau

SEQ ID NO: 495601 - RNA, 20 nt, Human
uacaauacccaaaauucuaa

SEQ ID NO: 495602 - RNA, 19 nt, Human
uagccacagaaagcaucgg

SEQ ID NO: 495603 - RNA, 21 nt, Human
uauauauacauaucuauauau

SEQ ID NO: 495604 - RNA, 23 nt, Human
uauauauacauaucuauauauau

SEQ ID NO: 495605 - RNA, 23 nt, Human
uauuaugauucaaaaaucucccu

SEQ ID NO: 495606 - RNA, 21 nt, Human
uauuugucaccagauuaucac

SEQ ID NO: 495607 - RNA, 22 nt, Human
ucagaguacagggauugugugg

SEQ ID NO: 495608 - RNA, 21 nt, Human
ucagugacuucuucagugucu

SEQ ID NO: 495609 - RNA, 22 nt, Human
uccuagcagcgucagcugccag

SEQ ID NO: 495610 - RNA, 18 nt, Human
uccucaauucuuucccuu

SEQ ID NO: 495611 - RNA, 22 nt, Human
uccucauaagacacaguggcug

SEQ ID NO: 495612 - RNA, 20 nt, Human
ucuuguggcaaaggcaccca

SEQ ID NO: 495613 - RNA, 19 nt, Human
ugaaaagcaacaccaaaac

SEQ ID NO: 495614 - RNA, 26 nt, Human
ugaaacacaaaacaaauaagggcuua

SEQ ID NO: 495615 - RNA, 19 nt, Human
ugaaauagcauucuguaca

SEQ ID NO: 495616 - RNA, 22 nt, Human
ugaaauguguuagauucaggag

SEQ ID NO: 495617 - RNA, 19 nt, Human
ugagaauaguauuuuacug

SEQ ID NO: 495618 - RNA, 18 nt, Human
ugauuuguaauaaauucu

SEQ ID NO: 495619 - RNA, 21 nt, Human
ugcagaaagauuugccuccaa

SEQ ID NO: 495620 - RNA, 26 nt, Human
ugcagaaagauuugccuccaaaguuc

SEQ ID NO: 495621 - RNA, 22 nt, Human
ugcuaugggucagaguacaggg

SEQ ID NO: 495622 - RNA, 21 nt, Human
ugcucaaacacagacggugau

SEQ ID NO: 495623 - RNA, 22 nt, Human
uggaaauagacugguagagaga

SEQ ID NO: 495624 - RNA, 22 nt, Human
uggaaauagacugguagagaga

SEQ ID NO: 495625 - RNA, 25 nt, Human
uggaaauagacugguagagagagga

SEQ ID NO: 495626 - RNA, 22 nt, Human
uggaacagagcacaaacauguc

SEQ ID NO: 495627 - RNA, 21 nt, Human
uggaaggcacacuaaaauuua

SEQ ID NO: 495628 - RNA, 20 nt, Human
uggacaaauauuuucaaagc

SEQ ID NO: 495629 - RNA, 19 nt, Human
uggauacuagaagcugcgg

SEQ ID NO: 495630 - RNA, 24 nt, Human
uggauacuagaagcugcgguugcu

SEQ ID NO: 495631 - RNA, 19 nt, Human
uggcaaaggcacccaaagc

SEQ ID NO: 495632 - RNA, 24 nt, Human
uggcugggccccgcggaggaaguu

SEQ ID NO: 495633 - RNA, 24 nt, Human
uguauauauacauaucuauauaua

SEQ ID NO: 495634 - RNA, 18 nt, Human
uguggcaaaggcacccaa

SEQ ID NO: 495635 - RNA, 20 nt, Human
uguuaaaauggaacagagca

SEQ ID NO: 495636 - RNA, 18 nt, Human
uguuacauauguauauau

SEQ ID NO: 495637 - RNA, 19 nt, Human
uguuacauauguauauaua

SEQ ID NO: 495638 - RNA, 21 nt, Human
uguuuagccacagaaagcauc

SEQ ID NO: 495639 - RNA, 21 nt, Human
uuaagccauguuuagcacuga

SEQ ID NO: 495640 - RNA, 18 nt, Human
uuaaggcaagaaacccau

SEQ ID NO: 495641 - RNA, 25 nt, Human
uuaauauucacacuaccucuucuaa

SEQ ID NO: 495642 - RNA, 22 nt, Human
uuaauuccucaauucuuucccu

SEQ ID NO: 495643 - RNA, 18 nt, Human
uucagugucucagccagc

SEQ ID NO: 495644 - RNA, 18 nt, Human
uugcaggugggcaacccg

SEQ ID NO: 495645 - RNA, 22 nt, Human
uuggaaggcacacuaaaauuua

SEQ ID NO: 495646 - RNA, 24 nt, Human
uuggauuuaccaacacguaggcuu

SEQ ID NO: 495647 - RNA, 21 nt, Human
uuuacuucacugucucaucac

SEQ ID NO: 495648 - RNA, 22 nt, Human
uuuuuuuuuuuuuuuuuccuuu

SEQ ID NO: 495649 - RNA, 25 nt, Human
agaacacuuacauccauacaaucaa

SEQ ID NO: 495650 - RNA, 18 nt, Human
auccauacaaucaacaga

SEQ ID NO: 495651 - RNA, 21 nt, Human
uaagaacacuuacauccauac

SEQ ID NO: 495652 - RNA, 21 nt, Human
uagaaagccacaacagaaaau

SEQ ID NO: 495653 - RNA, 24 nt, Human
aaagugcugggauuacaggcauga

SEQ ID NO: 495654 - RNA, 22 nt, Human
aagagcaguucuuggccuggag

SEQ ID NO: 495655 - RNA, 26 nt, Human
aagcagccugaagucugcgguugagg

SEQ ID NO: 495656 - RNA, 19 nt, Human
aagcccaggaggauggcgg

SEQ ID NO: 495657 - RNA, 22 nt, Human
aaguaauccacccaccucagcc

SEQ ID NO: 495658 - RNA, 19 nt, Human
aagugcugggauuacaggc

SEQ ID NO: 495659 - RNA, 21 nt, Human
aagugcugggauuacaggcau

SEQ ID NO: 495660 - RNA, 26 nt, Human
aagugcugggauuacaggcaugagcc

SEQ ID NO: 495661 - RNA, 18 nt, Human
acaggguuucaccauguu

SEQ ID NO: 495662 - RNA, 23 nt, Human
acaggguuucaccauguuggcca

SEQ ID NO: 495663 - RNA, 24 nt, Human
acaggguuucaccauguuggccag

SEQ ID NO: 495664 - RNA, 24 nt, Human
accaaagugcugggauuacaggca

SEQ ID NO: 495665 - RNA, 24 nt, Human
accauguuggccaggcugguuuug

SEQ ID NO: 495666 - RNA, 21 nt, Human
acccccgccccaucaccuucc

SEQ ID NO: 495667 - RNA, 21 nt, Human
accucagccuaccaaagugcu

SEQ ID NO: 495668 - RNA, 24 nt, Human
aggcagccgcucacucuuaucuuc

SEQ ID NO: 495669 - RNA, 25 nt, Human
agggggaggggcagaaccccuaggg

SEQ ID NO: 495670 - RNA, 25 nt, Human
agggggaggggcagaaccccuaggg

SEQ ID NO: 495671 - RNA, 18 nt, Human
agguccgucuccacuuuc

SEQ ID NO: 495672 - RNA, 21 nt, Human
aggugagcaugaggaguggga

SEQ ID NO: 495673 - RNA, 19 nt, Human
aguaauccacccaccucag

SEQ ID NO: 495674 - RNA, 18 nt, Human
agugcugggauuacaggc

SEQ ID NO: 495675 - RNA, 19 nt, Human
augcaggacccuggggggc

SEQ ID NO: 495676 - RNA, 19 nt, Human
augcaggacccuggggggc

SEQ ID NO: 495677 - RNA, 24 nt, Human
auuggagaggagauuagaugagga

SEQ ID NO: 495678 - RNA, 24 nt, Human
caaagugcugggauuacaggcaug

SEQ ID NO: 495679 - RNA, 19 nt, Human
caagaggccgaggaagccc

SEQ ID NO: 495680 - RNA, 26 nt, Human
cacagcccagaacccagggucagaag

SEQ ID NO: 495681 - RNA, 21 nt, Human
caccauguuggccaggcuggu

SEQ ID NO: 495682 - RNA, 24 nt, Human
caccauguuggccaggcugguuuu

SEQ ID NO: 495683 - RNA, 31 nt, Human
caccauguuggccaggcugguuuugaacucc

SEQ ID NO: 495684 - RNA, 23 nt, Human
cacccaccucagccuaccaaagu

SEQ ID NO: 495685 - RNA, 24 nt, Human
caccucagccuaccaaagugcugg

SEQ ID NO: 495686 - RNA, 19 nt, Human
cagccucagccucugccug

SEQ ID NO: 495687 - RNA, 19 nt, Human
cagccucagccucugccug

SEQ ID NO: 495688 - RNA, 24 nt, Human
caggguuucaccauguuggccagg

SEQ ID NO: 495689 - RNA, 18 nt, Human
caugagccaccaugcccc

SEQ ID NO: 495690 - RNA, 18 nt, Human
caugagccaccaugcccc

SEQ ID NO: 495691 - RNA, 24 nt, Human
cauguuggccaggcugguuuugaa

SEQ ID NO: 495692 - RNA, 22 nt, Human
ccaaagugcugggauuacaggc

SEQ ID NO: 495693 - RNA, 23 nt, Human
ccaaagugcugggauuacaggca

SEQ ID NO: 495694 - RNA, 24 nt, Human
ccaaagugcugggauuacaggcau

SEQ ID NO: 495695 - RNA, 19 nt, Human
ccagggucagaagaugagg

SEQ ID NO: 495696 - RNA, 18 nt, Human
cccagaacccagggucag

SEQ ID NO: 495697 - RNA, 19 nt, Human
ccccagagagggggagggg

SEQ ID NO: 495698 - RNA, 19 nt, Human
ccccagagagggggagggg

SEQ ID NO: 495699 - RNA, 18 nt, Human
ccccaucaccuuccccca

SEQ ID NO: 495700 - RNA, 19 nt, Human
ccccgccccaucaccuucc

SEQ ID NO: 495701 - RNA, 21 nt, Human
ccccgccccaucaccuucccc

SEQ ID NO: 495702 - RNA, 22 nt, Human
ccccgccccaucaccuuccccc

SEQ ID NO: 495703 - RNA, 19 nt, Human
ccccugagguuacuauagg

SEQ ID NO: 495704 - RNA, 22 nt, Human
ccguccccuucacagcccagaa

SEQ ID NO: 495705 - RNA, 24 nt, Human
ccugaccucaaguaauccacccac

SEQ ID NO: 495706 - RNA, 21 nt, Human
ccugcucugugggucucucuc

SEQ ID NO: 495707 - RNA, 18 nt, Human
cggcuaaggaggguuguc

SEQ ID NO: 495708 - RNA, 18 nt, Human
cggcuaaggaggguuguc

SEQ ID NO: 495709 - RNA, 19 nt, Human
cggggccguggccggggcg

SEQ ID NO: 495710 - RNA, 19 nt, Human
cggggcguggccggccccu

SEQ ID NO: 495711 - RNA, 22 nt, Human
cggggcuacgggagcggggcga

SEQ ID NO: 495712 - RNA, 18 nt, Human
cgugcacugugugugugc

SEQ ID NO: 495713 - RNA, 24 nt, Human
cuaacucugcuccccagcuaggau

SEQ ID NO: 495714 - RNA, 26 nt, Human
cucaaguaauccacccaccucagccu

SEQ ID NO: 495715 - RNA, 20 nt, Human
cuggaggggccaugagagug

SEQ ID NO: 495716 - RNA, 22 nt, Human
cuuaucuucgaagucccuccca

SEQ ID NO: 495717 - RNA, 22 nt, Human
gaagucccucccacaccuggcc

SEQ ID NO: 495718 - RNA, 24 nt, Human
gaccucaaguaauccacccaccuc

SEQ ID NO: 495719 - RNA, 20 nt, Human
gagagugcaagacacggggc

SEQ ID NO: 495720 - RNA, 21 nt, Human
gagcaguucuuggccuggagg

SEQ ID NO: 495721 - RNA, 21 nt, Human
gaggguuguccaggcaggcug

SEQ ID NO: 495722 - RNA, 22 nt, Human
gaggguuguccaggcaggcugg

SEQ ID NO: 495723 - RNA, 19 nt, Human
gaugaggcaggggugagca

SEQ ID NO: 495724 - RNA, 18 nt, Human
gauuacaggcaugagcca

SEQ ID NO: 495725 - RNA, 21 nt, Human
gauuacaggcaugagccacca

SEQ ID NO: 495726 - RNA, 24 nt, Human
gauuacaggcaugagccaccaugc

SEQ ID NO: 495727 - RNA, 22 nt, Human
gcagccugaagucugcgguuga

SEQ ID NO: 495728 - RNA, 19 nt, Human
gcaugagccaccaugcccc

SEQ ID NO: 495729 - RNA, 18 nt, Human
gccccaucaccuuccccc

SEQ ID NO: 495730 - RNA, 23 nt, Human
gcuccaggcccccaauguuggug

SEQ ID NO: 495731 - RNA, 23 nt, Human
gcugguuuugaacuccugaccuc

SEQ ID NO: 495732 - RNA, 21 nt, Human
ggaggggcagaaccccuaggg

SEQ ID NO: 495733 - RNA, 21 nt, Human
ggaggggcagaaccccuaggg

SEQ ID NO: 495734 - RNA, 24 nt, Human
ggauuacaggcaugagccaccaug

SEQ ID NO: 495735 - RNA, 20 nt, Human
ggccccggccagguccccuc

SEQ ID NO: 495736 - RNA, 21 nt, Human
ggccguggccggggcggggcu

SEQ ID NO: 495737 - RNA, 18 nt, Human
ggcugcggcuaaggaggg

SEQ ID NO: 495738 - RNA, 18 nt, Human
ggcugcggcuaaggaggg

SEQ ID NO: 495739 - RNA, 24 nt, Human
ggcugguuuugaacuccugaccuc

SEQ ID NO: 495740 - RNA, 18 nt, Human
gggaugcaggacccuggg

SEQ ID NO: 495741 - RNA, 18 nt, Human
gggaugcaggacccuggg

SEQ ID NO: 495742 - RNA, 18 nt, Human
ggggcguggccggccccu

SEQ ID NO: 495743 - RNA, 22 nt, Human
ggguuucaccauguuggccagg

SEQ ID NO: 495744 - RNA, 23 nt, Human
uaaggaggguuguccaggcaggc

SEQ ID NO: 495745 - RNA, 25 nt, Human
uaaggaggguuguccaggcaggcug

SEQ ID NO: 495746 - RNA, 25 nt, Human
uaaggaggguuguccaggcaggcug

SEQ ID NO: 495747 - RNA, 23 nt, Human
uacaggcaugagccaccaugccc

SEQ ID NO: 495748 - RNA, 22 nt, Human
uagagacaggguuucaccaugu

SEQ ID NO: 495749 - RNA, 23 nt, Human
uagcaagaggccgaggaagccca

SEQ ID NO: 495750 - RNA, 24 nt, Human
uaguagagacaggguuucaccaug

SEQ ID NO: 495751 - RNA, 26 nt, Human
uaguagagacaggguuucaccauguu

SEQ ID NO: 495752 - RNA, 21 nt, Human
uauacacaauacaaacgugcg

SEQ ID NO: 495753 - RNA, 21 nt, Human
uccacccaccucagccuacca

SEQ ID NO: 495754 - RNA, 21 nt, Human
uccgucuccacuuucugccuc

SEQ ID NO: 495755 - RNA, 18 nt, Human
uccugcucugugggucuc

SEQ ID NO: 495756 - RNA, 24 nt, Human
ugaacuccugaccucaaguaaucc

SEQ ID NO: 495757 - RNA, 23 nt, Human
ugaccucaaguaauccacccacc

SEQ ID NO: 495758 - RNA, 18 nt, Human
ugagcagguguccaugca

SEQ ID NO: 495759 - RNA, 19 nt, Human
ugaggagugggaauuggag

SEQ ID NO: 495760 - RNA, 22 nt, Human
ugaggagugggaauuggagagg

SEQ ID NO: 495761 - RNA, 23 nt, Human
ugagguuacuauaggggaauggg

SEQ ID NO: 495762 - RNA, 23 nt, Human
ugccucccuccugcucugugggu

SEQ ID NO: 495763 - RNA, 21 nt, Human
ugcgguggccgccagcuuggc

SEQ ID NO: 495764 - RNA, 24 nt, Human
uggaaggggcugcggcuaaggagg

SEQ ID NO: 495765 - RNA, 24 nt, Human
uggaaggggcugcggcuaaggagg

SEQ ID NO: 495766 - RNA, 18 nt, Human
uggcacuguggacgugca

SEQ ID NO: 495767 - RNA, 22 nt, Human
uggccagccccuacugggagcu

SEQ ID NO: 495768 - RNA, 24 nt, Human
uggccaggcugguuuugaacuccu

SEQ ID NO: 495769 - RNA, 22 nt, Human
uggccguggccagccccuacug

SEQ ID NO: 495770 - RNA, 18 nt, Human
ugggaauuggagaggaga

SEQ ID NO: 495771 - RNA, 19 nt, Human
ugggaugcaggacccuggg

SEQ ID NO: 495772 - RNA, 19 nt, Human
ugggaugcaggacccuggg

SEQ ID NO: 495773 - RNA, 18 nt, Human
ugggauuacaggcaugag

SEQ ID NO: 495774 - RNA, 22 nt, Human
ugggauuacaggcaugagccac

SEQ ID NO: 495775 - RNA, 23 nt, Human
ugggauuacaggcaugagccacc

SEQ ID NO: 495776 - RNA, 24 nt, Human
ugggauuacaggcaugagccacca

SEQ ID NO: 495777 - RNA, 25 nt, Human
ugggauuacaggcaugagccaccau

SEQ ID NO: 495778 - RNA, 20 nt, Human
uggggggcuggugccccaga

SEQ ID NO: 495779 - RNA, 20 nt, Human
uggggggcuggugccccaga

SEQ ID NO: 495780 - RNA, 25 nt, Human
uggggggcuggugccccagagaggg

SEQ ID NO: 495781 - RNA, 25 nt, Human
uggggggcuggugccccagagaggg

SEQ ID NO: 495782 - RNA, 22 nt, Human
uguccaggcaggcuggggugga

SEQ ID NO: 495783 - RNA, 22 nt, Human
uguccaggcaggcuggggugga

SEQ ID NO: 495784 - RNA, 20 nt, Human
uguggagggccccugcggug

SEQ ID NO: 495785 - RNA, 23 nt, Human
ugugggucucucugcuuccuggc

SEQ ID NO: 495786 - RNA, 23 nt, Human
uuaguagagacaggguuucacca

SEQ ID NO: 495787 - RNA, 24 nt, Human
uuaguagagacaggguuucaccau

SEQ ID NO: 495788 - RNA, 23 nt, Human
uucacagcccagaacccaggguc

SEQ ID NO: 495789 - RNA, 21 nt, Human
uucgaagucccucccacaccu

SEQ ID NO: 495790 - RNA, 22 nt, Human
uugcagccaggagaucugggga

SEQ ID NO: 495791 - RNA, 24 nt, Human
uuucaccauguuggccaggcuggu

SEQ ID NO: 495792 - RNA, 21 nt, Human
uuuugaacuccugaccucaag

SEQ ID NO: 495793 - RNA, 24 nt, Human
uuuuuaguagagacaggguuucac

SEQ ID NO: 495794 - RNA, 24 nt, Human
uuuuugggauuuuuaguagagaca

SEQ ID NO: 495795 - RNA, 18 nt, Human
uuuuuuuuuuuuuuuuug

SEQ ID NO: 495796 - RNA, 24 nt, Human
uuuuuuuuuuuuuuuuuuuuuggg

SEQ ID NO: 495797 - RNA, 23 nt, Human
aaaacagaaaccacaaagaagga

SEQ ID NO: 495798 - RNA, 18 nt, Human
aaacagaaaccacaaaga

SEQ ID NO: 495799 - RNA, 19 nt, Human
aacaaagcagagaggaaca

SEQ ID NO: 495800 - RNA, 18 nt, Human
aacagaaaccacaaagaa

SEQ ID NO: 495801 - RNA, 19 nt, Human
aacccguccauccacucug

SEQ ID NO: 495802 - RNA, 19 nt, Human
aagaacaaagcagagagga

SEQ ID NO: 495803 - RNA, 25 nt, Human
aagccaguccugaugcgcaagccag

SEQ ID NO: 495804 - RNA, 22 nt, Human
aagcgggugaggcagagagucc

SEQ ID NO: 495805 - RNA, 18 nt, Human
acaaaacagaaaccacaa

SEQ ID NO: 495806 - RNA, 21 nt, Human
acaaaacagaaaccacaaaga

SEQ ID NO: 495807 - RNA, 20 nt, Human
acaaagcagagaggaacaga

SEQ ID NO: 495808 - RNA, 21 nt, Human
acaaagcagagaggaacagag

SEQ ID NO: 495809 - RNA, 22 nt, Human
acaaagcagagaggaacagagu

SEQ ID NO: 495810 - RNA, 23 nt, Human
acaaagcagagaggaacagagug

SEQ ID NO: 495811 - RNA, 18 nt, Human
accacaaagaaggaagag

SEQ ID NO: 495812 - RNA, 23 nt, Human
accccaggacuuccaagggugaa

SEQ ID NO: 495813 - RNA, 19 nt, Human
acccugucacuuccguccc

SEQ ID NO: 495814 - RNA, 23 nt, Human
accugagccgccucucuggcccc

SEQ ID NO: 495815 - RNA, 20 nt, Human
acucugcacuucccaggcag

SEQ ID NO: 495816 - RNA, 19 nt, Human
agaaaccacaaagaaggaa

SEQ ID NO: 495817 - RNA, 20 nt, Human
agaggcugaaggcugcugcc

SEQ ID NO: 495818 - RNA, 21 nt, Human
agaugcaggcagacagagugg

SEQ ID NO: 495819 - RNA, 22 nt, Human
agcaccuucgccccuccccucu

SEQ ID NO: 495820 - RNA, 18 nt, Human
agcaggaggcggccuugg

SEQ ID NO: 495821 - RNA, 20 nt, Human
agcaggaggcggccuuggga

SEQ ID NO: 495822 - RNA, 22 nt, Human
agcucaguccagggaagaacaa

SEQ ID NO: 495823 - RNA, 18 nt, Human
aggcagacagagugggga

SEQ ID NO: 495824 - RNA, 21 nt, Human
aggcaggugggugggcaaggc

SEQ ID NO: 495825 - RNA, 21 nt, Human
aggccuacccgcaacagagga

SEQ ID NO: 495826 - RNA, 21 nt, Human
aggcugaggggauccggcugu

SEQ ID NO: 495827 - RNA, 24 nt, Human
augcaggcagaucccaaagucagg

SEQ ID NO: 495828 - RNA, 19 nt, Human
caaggcacagucccagagg

SEQ ID NO: 495829 - RNA, 20 nt, Human
caccacacccugucacuucc

SEQ ID NO: 495830 - RNA, 19 nt, Human
cacccugucacuuccgucc

SEQ ID NO: 495831 - RNA, 22 nt, Human
caccgaugcaggcagaucccaa

SEQ ID NO: 495832 - RNA, 24 nt, Human
caccuuugcaccgugagucaggag

SEQ ID NO: 495833 - RNA, 19 nt, Human
cacuccaccaccacacccu

SEQ ID NO: 495834 - RNA, 19 nt, Human
cagaucccaaagucagggu

SEQ ID NO: 495835 - RNA, 21 nt, Human
cagcuccccacuccaccacca

SEQ ID NO: 495836 - RNA, 19 nt, Human
caggagauaaagccagucc

SEQ ID NO: 495837 - RNA, 22 nt, Human
cagucuccaggggcccugggcu

SEQ ID NO: 495838 - RNA, 24 nt, Human
caguggcccguggcagggcccucc

SEQ ID NO: 495839 - RNA, 24 nt, Human
ccacacccugucacuuccgucccu

SEQ ID NO: 495840 - RNA, 22 nt, Human
cccacuccaccaccacacccug

SEQ ID NO: 495841 - RNA, 19 nt, Human
ccccacuccaccaccacaa

SEQ ID NO: 495842 - RNA, 21 nt, Human
ccccacuccaccaccacaccc

SEQ ID NO: 495843 - RNA, 18 nt, Human
ccccuccccucuaaaccc

SEQ ID NO: 495844 - RNA, 21 nt, Human
cccuccccaauauccagagga

SEQ ID NO: 495845 - RNA, 24 nt, Human
cccucccccaccacugcccaaacc

SEQ ID NO: 495846 - RNA, 23 nt, Human
cccugggcugaagcgggugaggc

SEQ ID NO: 495847 - RNA, 23 nt, Human
ccucagccauacuccugggcgcg

SEQ ID NO: 495848 - RNA, 22 nt, Human
ccucccccaccacugcccaaaa

SEQ ID NO: 495849 - RNA, 25 nt, Human
ccuccucccugccacccucccaggc

SEQ ID NO: 495850 - RNA, 18 nt, Human
ccucuaaacccguccauc

SEQ ID NO: 495851 - RNA, 18 nt, Human
ccugaggccacagagcug

SEQ ID NO: 495852 - RNA, 24 nt, Human
ccugcgcugagcucaguccaggga

SEQ ID NO: 495853 - RNA, 20 nt, Human
ccugggcgcggguuucggug

SEQ ID NO: 495854 - RNA, 22 nt, Human
ccugggcugaagcgggugaggc

SEQ ID NO: 495855 - RNA, 18 nt, Human
cgacagcugccccucgug

SEQ ID NO: 495856 - RNA, 24 nt, Human
cgaugcaggcagaucccaaaguca

SEQ ID NO: 495857 - RNA, 21 nt, Human
cuccccacuccaccaccacac

SEQ ID NO: 495858 - RNA, 21 nt, Human
cucccccaccacugcccaaac

SEQ ID NO: 495859 - RNA, 20 nt, Human
cugcugccuuccugccuggc

SEQ ID NO: 495860 - RNA, 23 nt, Human
gaagcgggugaggcagagagucc

SEQ ID NO: 495861 - RNA, 19 nt, Human
gacucuguucuugcuagca

SEQ ID NO: 495862 - RNA, 23 nt, Human
gaggggauccggcugugggggcc

SEQ ID NO: 495863 - RNA, 20 nt, Human
gcagagaggaacagagugga

SEQ ID NO: 495864 - RNA, 18 nt, Human
gccagagaggcugaaggc

SEQ ID NO: 495865 - RNA, 22 nt, Human
gccagcuccccacuccaccacc

SEQ ID NO: 495866 - RNA, 21 nt, Human
gcccccucccccaccacugcc

SEQ ID NO: 495867 - RNA, 20 nt, Human
gcccguggcagggcccuccu

SEQ ID NO: 495868 - RNA, 24 nt, Human
gcccguggcagggcccuccugggg

SEQ ID NO: 495869 - RNA, 20 nt, Human
gccugcgcugagcucagucc

SEQ ID NO: 495870 - RNA, 26 nt, Human
ggaagaacaaagcagagaggaacaga

SEQ ID NO: 495871 - RNA, 19 nt, Human
ggccacagagcugggcaac

SEQ ID NO: 495872 - RNA, 20 nt, Human
gggauccggcugugggggcc

SEQ ID NO: 495873 - RNA, 24 nt, Human
gggcaaccugagccgccucucugg

SEQ ID NO: 495874 - RNA, 18 nt, Human
ggggauccggcugugggg

SEQ ID NO: 495875 - RNA, 22 nt, Human
gggugaggcagagaguccugag

SEQ ID NO: 495876 - RNA, 21 nt, Human
ggugaggcagagaguccugag

SEQ ID NO: 495877 - RNA, 20 nt, Human
gugggccagagaggcugaag

SEQ ID NO: 495878 - RNA, 19 nt, Human
uacagcaccuucgccccuc

SEQ ID NO: 495879 - RNA, 23 nt, Human
ucaguccagggaagaacaaagca

SEQ ID NO: 495880 - RNA, 18 nt, Human
uccaagggugaagcuguc

SEQ ID NO: 495881 - RNA, 19 nt, Human
uccaagggugaagcugucc

SEQ ID NO: 495882 - RNA, 23 nt, Human
uccccacuccaccaccacacccu

SEQ ID NO: 495883 - RNA, 22 nt, Human
uccccagcagccaguggcccgu

SEQ ID NO: 495884 - RNA, 21 nt, Human
ucccugccacccucccaggcu

SEQ ID NO: 495885 - RNA, 24 nt, Human
uccucccugccacccucccaggcu

SEQ ID NO: 495886 - RNA, 18 nt, Human
uccuggccagcagaagcc

SEQ ID NO: 495887 - RNA, 18 nt, Human
uccuuggaaggggcagag

SEQ ID NO: 495888 - RNA, 19 nt, Human
ucuccaggggcccugggcu

SEQ ID NO: 495889 - RNA, 18 nt, Human
ugaggccacagagcuggg

SEQ ID NO: 495890 - RNA, 21 nt, Human
ugaggggauccggcugugggg

SEQ ID NO: 495891 - RNA, 25 nt, Human
ugaggggauccggcugugggggccg

SEQ ID NO: 495892 - RNA, 20 nt, Human
ugccacccucccaggcucau

SEQ ID NO: 495893 - RNA, 24 nt, Human
ugcccaaaccuguuuacagcacug

SEQ ID NO: 495894 - RNA, 24 nt, Human
uggaaggggcagaggacucagagg

SEQ ID NO: 495895 - RNA, 22 nt, Human
ugggaaguuguccgagugggcc

SEQ ID NO: 495896 - RNA, 24 nt, Human
uuacagugaugaauagcucuucuu

SEQ ID NO: 495897 - RNA, 18 nt, Human
uuuuuuuuuuuuuuccug

SEQ ID NO: 495898 - RNA, 28 nt, Human
aaacaaaagguacgaacccaucccaaag

SEQ ID NO: 495899 - RNA, 20 nt, Human
aaacagcagagccuaaguga

SEQ ID NO: 495900 - RNA, 18 nt, Human
agcagcaggaacucuugg

SEQ ID NO: 495901 - RNA, 18 nt, Human
agcaggaggcagaaacaa

SEQ ID NO: 495902 - RNA, 22 nt, Human
agccagcacagcaagcagccuc

SEQ ID NO: 495903 - RNA, 20 nt, Human
agcccagcccccagcagcag

SEQ ID NO: 495904 - RNA, 21 nt, Human
agcugcacugcgaaggagauc

SEQ ID NO: 495905 - RNA, 22 nt, Human
aggaaacagaggucagaaguuc

SEQ ID NO: 495906 - RNA, 21 nt, Human
aggcagaaacaaaagguacga

SEQ ID NO: 495907 - RNA, 24 nt, Human
aggcagaaacaaaagguacgaacc

SEQ ID NO: 495908 - RNA, 26 nt, Human
aggcagaaacaaaagguacgaaccca

SEQ ID NO: 495909 - RNA, 20 nt, Human
agggugagaaacagcagagc

SEQ ID NO: 495910 - RNA, 18 nt, Human
agggugcaguguuggagg

SEQ ID NO: 495911 - RNA, 22 nt, Human
agguacgaacccaucccaaagc

SEQ ID NO: 495912 - RNA, 29 nt, Human
auagcaggaggcagaaacaaaagggaccc

SEQ ID NO: 495913 - RNA, 23 nt, Human
augucaagauccagaaucucaaa

SEQ ID NO: 495914 - RNA, 24 nt, Human
caagcagccuccgcauuaguucca

SEQ ID NO: 495915 - RNA, 19 nt, Human
cacugccacuucuggaugg

SEQ ID NO: 495916 - RNA, 20 nt, Human
cagaaucucaaagcaucccc

SEQ ID NO: 495917 - RNA, 18 nt, Human
cagcaagcagccuccgca

SEQ ID NO: 495918 - RNA, 18 nt, Human
cagcagcagcaggaacuc

SEQ ID NO: 495919 - RNA, 18 nt, Human
cauccccucuuuggcucc

SEQ ID NO: 495920 - RNA, 20 nt, Human
ccaagggugagaaacagcag

SEQ ID NO: 495921 - RNA, 20 nt, Human
ccagcacagcaagcagccuc

SEQ ID NO: 495922 - RNA, 18 nt, Human
cggaggaaacagagguca

SEQ ID NO: 495923 - RNA, 22 nt, Human
gaaacaaaagguacgaacccau

SEQ ID NO: 495924 - RNA, 21 nt, Human
gaaacagaggucagaaguucc

SEQ ID NO: 495925 - RNA, 21 nt, Human
gacgaggggggcagggcagaa

SEQ ID NO: 495926 - RNA, 30 nt, Human
gcaguccuuuguuaacagaucauuuguuuu

SEQ ID NO: 495927 - RNA, 26 nt, Human
gcugcacugcgaaggagauccucgug

SEQ ID NO: 495928 - RNA, 20 nt, Human
ggaggaaacagaggucagaa

SEQ ID NO: 495929 - RNA, 21 nt, Human
gggggcagcuguccagugaca

SEQ ID NO: 495930 - RNA, 22 nt, Human
gggggucuacauagcugggacc

SEQ ID NO: 495931 - RNA, 24 nt, Human
gucaagauccagaaucucaaagca

SEQ ID NO: 495932 - RNA, 22 nt, Human
uaagaugggcaugucaagaucc

SEQ ID NO: 495933 - RNA, 19 nt, Human
uacgaacccaucccaaagc

SEQ ID NO: 495934 - RNA, 23 nt, Human
uaggauggggggcagcuguccag

SEQ ID NO: 495935 - RNA, 22 nt, Human
uauccucagucaaaagaaaaau

SEQ ID NO: 495936 - RNA, 19 nt, Human
ucaggacggaggaaacaga

SEQ ID NO: 495937 - RNA, 22 nt, Human
ucaggacggaggaaacagaggu

SEQ ID NO: 495938 - RNA, 20 nt, Human
uccagaaucucaaagcaucc

SEQ ID NO: 495939 - RNA, 24 nt, Human
uccaucauccaagggugagaaaca

SEQ ID NO: 495940 - RNA, 23 nt, Human
ucccaaagcuguugggcacugcc

SEQ ID NO: 495941 - RNA, 21 nt, Human
ucucaaagcauccccucuuug

SEQ ID NO: 495942 - RNA, 19 nt, Human
ugagagucugagucaacac

SEQ ID NO: 495943 - RNA, 19 nt, Human
ugagucaacaccuuggcuc

SEQ ID NO: 495944 - RNA, 21 nt, Human
ugcaaagccagcacagcaagc

SEQ ID NO: 495945 - RNA, 19 nt, Human
ugcacuaacaaaacaugcu

SEQ ID NO: 495946 - RNA, 18 nt, Human
uggcuccaucauccaagg

SEQ ID NO: 495947 - RNA, 21 nt, Human
ugggaccuggcccuggggggu

SEQ ID NO: 495948 - RNA, 20 nt, Human
uguuaacagaucauuuguuu

SEQ ID NO: 495949 - RNA, 19 nt, Human
uuuuuuuuuuuuuuuuugc

SEQ ID NO: 495950 - RNA, 25 nt, Human
uuuuuuuuuuuuuuuuuugcacuaa

SEQ ID NO: 495951 - RNA, 23 nt, Human
uuuuuuuuuuuuuuuuuuuuggg

SEQ ID NO: 495952 - RNA, 21 nt, Human
aaaagaaaacuugagguggag

SEQ ID NO: 495953 - RNA, 21 nt, Human
aaagcacacucucccucuuuu

SEQ ID NO: 495954 - RNA, 19 nt, Human
aacacugggggcgccgggc

SEQ ID NO: 495955 - RNA, 20 nt, Human
aacacugggggcgccgggcg

SEQ ID NO: 495956 - RNA, 20 nt, Human
aacggcacccccccaccccc

SEQ ID NO: 495957 - RNA, 20 nt, Human
aagcacacucucccucuuuu

SEQ ID NO: 495958 - RNA, 20 nt, Human
acccaaagagacaaaaaggg

SEQ ID NO: 495959 - RNA, 21 nt, Human
acccuacaguaaaacaaacga

SEQ ID NO: 495960 - RNA, 19 nt, Human
agccccaggcccuuucagg

SEQ ID NO: 495961 - RNA, 19 nt, Human
caacggcacccccccaccc

SEQ ID NO: 495962 - RNA, 23 nt, Human
caacggcacccccccacccccaa

SEQ ID NO: 495963 - RNA, 20 nt, Human
cacccccccacccccaaccc

SEQ ID NO: 495964 - RNA, 23 nt, Human
cacccccccacccccaacccaag

SEQ ID NO: 495965 - RNA, 19 nt, Human
cacugggggcgccgggcgg

SEQ ID NO: 495966 - RNA, 19 nt, Human
cagccccacaaaagaaaac

SEQ ID NO: 495967 - RNA, 21 nt, Human
ccagugaagcgauggccucgc

SEQ ID NO: 495968 - RNA, 21 nt, Human
cccaagaggacuauacaugga

SEQ ID NO: 495969 - RNA, 24 nt, Human
cccaccaacggcacccccccaccc

SEQ ID NO: 495970 - RNA, 23 nt, Human
cccauagccugucaggcuggggc

SEQ ID NO: 495971 - RNA, 18 nt, Human
ccccacccccaacccaag

SEQ ID NO: 495972 - RNA, 25 nt, Human
cccccaacccaagaggacuauacau

SEQ ID NO: 495973 - RNA, 25 nt, Human
ccccccacccccaacccaagaggac

SEQ ID NO: 495974 - RNA, 23 nt, Human
cccccccacccccaacccaagag

SEQ ID NO: 495975 - RNA, 20 nt, Human
cccuccggcaucaaggcucc

SEQ ID NO: 495976 - RNA, 23 nt, Human
ccgaaggccaggcgguucccucc

SEQ ID NO: 495977 - RNA, 19 nt, Human
ccgcccucagaaaacacug

SEQ ID NO: 495978 - RNA, 19 nt, Human
ccuccgggcgcucucggcg

SEQ ID NO: 495979 - RNA, 18 nt, Human
cggcacccccccaccccc

SEQ ID NO: 495980 - RNA, 19 nt, Human
cucucccaccaacggcacc

SEQ ID NO: 495981 - RNA, 21 nt, Human
cugcccacaggcugagcucag

SEQ ID NO: 495982 - RNA, 19 nt, Human
gagcucagccccaggcccu

SEQ ID NO: 495983 - RNA, 22 nt, Human
gccccaggcccuuucaggcauc

SEQ ID NO: 495984 - RNA, 21 nt, Human
gcggcacagggaguaggauac

SEQ ID NO: 495985 - RNA, 19 nt, Human
ggcgguucccuccgggcgc

SEQ ID NO: 495986 - RNA, 24 nt, Human
guggaguuuuccggucacccaaag

SEQ ID NO: 495987 - RNA, 22 nt, Human
uaaaacaaacgacacuuggggg

SEQ ID NO: 495988 - RNA, 23 nt, Human
uaaaacaaacgacacuugggggg

SEQ ID NO: 495989 - RNA, 19 nt, Human
ucacccaaagagacaaaaa

SEQ ID NO: 495990 - RNA, 21 nt, Human
ucacccaaagagacaaaaagg

SEQ ID NO: 495991 - RNA, 21 nt, Human
ucccaccaacggcaccccccc

SEQ ID NO: 495992 - RNA, 23 nt, Human
ucccaccaacggcacccccccac

SEQ ID NO: 495993 - RNA, 24 nt, Human
ucccaccaacggcacccccccacc

SEQ ID NO: 495994 - RNA, 21 nt, Human
uccccgaaggccaggcgguuc

SEQ ID NO: 495995 - RNA, 22 nt, Human
ugagcucagccccaggcccuuu

SEQ ID NO: 495996 - RNA, 21 nt, Human
ugcagggacagagugaccagg

SEQ ID NO: 495997 - RNA, 18 nt, Human
ugggggcgccgggcggga

SEQ ID NO: 495998 - RNA, 18 nt, Human
aaagcaaauagaacacau

SEQ ID NO: 495999 - RNA, 26 nt, Human
aaagccccuugacaaaauaucugcuu

SEQ ID NO: 496000 - RNA, 22 nt, Human
aacuuuuuuuguuguuguuuuu

SEQ ID NO: 496001 - RNA, 18 nt, Human
aagcaaaugaaaaccaag

SEQ ID NO: 496002 - RNA, 23 nt, Human
aaugucauuuugaaguaaauggc

SEQ ID NO: 496003 - RNA, 24 nt, Human
acacaagaaaaaaaaagccucugg

SEQ ID NO: 496004 - RNA, 20 nt, Human
accuucuucaacccuaucca

SEQ ID NO: 496005 - RNA, 26 nt, Human
agaaaaaaaaagccucugggagaaga

SEQ ID NO: 496006 - RNA, 18 nt, Human
agaucacacuuuuaucuu

SEQ ID NO: 496007 - RNA, 18 nt, Human
auauauccauacauauau

SEQ ID NO: 496008 - RNA, 25 nt, Human
augaaaaccaagacauauuuuucug

SEQ ID NO: 496009 - RNA, 20 nt, Human
caaaaugcaucauucuucuu

SEQ ID NO: 496010 - RNA, 19 nt, Human
cccuugacaaaauaucugc

SEQ ID NO: 496011 - RNA, 21 nt, Human
ccucugggagaagaggauaaa

SEQ ID NO: 496012 - RNA, 20 nt, Human
gcagucuuuagcaaugucau

SEQ ID NO: 496013 - RNA, 21 nt, Human
ggaauaaacagaaaaauacag

SEQ ID NO: 496014 - RNA, 19 nt, Human
uaaaaaacagcauaucaga

SEQ ID NO: 496015 - RNA, 22 nt, Human
uaaagcaaauagaacacauuca

SEQ ID NO: 496016 - RNA, 19 nt, Human
uaagcuagacagacgucga

SEQ ID NO: 496017 - RNA, 18 nt, Human
uacaaugcugauuaaagc

SEQ ID NO: 496018 - RNA, 21 nt, Human
uacacaagaaaaaaaaagccu

SEQ ID NO: 496019 - RNA, 21 nt, Human
uacauaaugcuaugucgugga

SEQ ID NO: 496020 - RNA, 23 nt, Human
uagaaaaauguacaauuuauuaa

SEQ ID NO: 496021 - RNA, 23 nt, Human
uagccagcuggacuccggaacug

SEQ ID NO: 496022 - RNA, 19 nt, Human
uauaguaaaguuaaaaaaa

SEQ ID NO: 496023 - RNA, 22 nt, Human
ucacuuuuucuuagaucacacu

SEQ ID NO: 496024 - RNA, 23 nt, Human
ucuucaacccuauccaugauuuc

SEQ ID NO: 496025 - RNA, 23 nt, Human
ugaaaaccaagacauauuuuucu

SEQ ID NO: 496026 - RNA, 21 nt, Human
ugccacagaagagaacaguuu

SEQ ID NO: 496027 - RNA, 18 nt, Human
ugucaaaaugcaucauuc

SEQ ID NO: 496028 - RNA, 25 nt, Human
uucaaauuggauugucaguuucauc

SEQ ID NO: 496029 - RNA, 21 nt, Human
uucacagaacaaaaaugacaa

SEQ ID NO: 496030 - RNA, 23 nt, Human
uugaagcaggguucucugugcca

SEQ ID NO: 496031 - RNA, 21 nt, Human
uuuuuuuuuuuuuugcaaaua

SEQ ID NO: 496032 - RNA, 21 nt, Human
uuuuuuuuuuuuuuuuugcaa

SEQ ID NO: 496033 - RNA, 23 nt, Human
uuuuuuuuuuuuuuuuugcaaau

SEQ ID NO: 496034 - RNA, 27 nt, Human
uuuuuuuuuuuuuuuuuuuuuuugggg

SEQ ID NO: 496035 - RNA, 19 nt, Human
agagcagcuauggaaggag

SEQ ID NO: 496036 - RNA, 19 nt, Human
cugcugagccauguugcca

SEQ ID NO: 496037 - RNA, 22 nt, Human
uagagcagcuauggaaggagac

SEQ ID NO: 496038 - RNA, 19 nt, Human
uauggaaggagacuacaca

SEQ ID NO: 496039 - RNA, 18 nt, Human
aaaaucuggugagaucca

SEQ ID NO: 496040 - RNA, 23 nt, Human
aaaaugaggcaaauguagcaaaa

SEQ ID NO: 496041 - RNA, 22 nt, Human
aaaccaaauacugcauguccuc

SEQ ID NO: 496042 - RNA, 19 nt, Human
aaccaaauacugcaugucc

SEQ ID NO: 496043 - RNA, 19 nt, Human
aaccaagaagagaagacag

SEQ ID NO: 496044 - RNA, 21 nt, Human
aaccaagaagagaagacagac

SEQ ID NO: 496045 - RNA, 23 nt, Human
aagagaagacagacuugucagaa

SEQ ID NO: 496046 - RNA, 22 nt, Human
aagcagccuuaaaaaagaaaau

SEQ ID NO: 496047 - RNA, 23 nt, Human
acaacaaaccuccacgacaugag

SEQ ID NO: 496048 - RNA, 20 nt, Human
accugggugaugaaauaauc

SEQ ID NO: 496049 - RNA, 24 nt, Human
acuaagcagccuuaaaaaagaaaa

SEQ ID NO: 496050 - RNA, 22 nt, Human
acucugucuuggcuccgugucc

SEQ ID NO: 496051 - RNA, 20 nt, Human
agaaaaccaaauacugcaug

SEQ ID NO: 496052 - RNA, 21 nt, Human
agaaauaauggaugggcuuga

SEQ ID NO: 496053 - RNA, 24 nt, Human
agaaauaauggaugggcuugagac

SEQ ID NO: 496054 - RNA, 19 nt, Human
aggaagccccagggauggg

SEQ ID NO: 496055 - RNA, 18 nt, Human
aggagauuuuuggaaggc

SEQ ID NO: 496056 - RNA, 24 nt, Human
aggagggagaggagccgaaaaaaa

SEQ ID NO: 496057 - RNA, 25 nt, Human
aggcagagcaaaggaagccccaggg

SEQ ID NO: 496058 - RNA, 26 nt, Human
agguaggaggagggagagggggaccc

SEQ ID NO: 496059 - RNA, 24 nt, Human
auaaacacaaagaagggaauaaca

SEQ ID NO: 496060 - RNA, 23 nt, Human
auaaagacacaugcacacgaaug

SEQ ID NO: 496061 - RNA, 19 nt, Human
auccuuagcaaacauggga

SEQ ID NO: 496062 - RNA, 18 nt, Human
auucaggagauuuuugga

SEQ ID NO: 496063 - RNA, 24 nt, Human
cacaaagaagggaauaacagacac

SEQ ID NO: 496064 - RNA, 19 nt, Human
cacgacaugaguuuaccua

SEQ ID NO: 496065 - RNA, 23 nt, Human
cacuggagucuacuugagggcgg

SEQ ID NO: 496066 - RNA, 23 nt, Human
cacuuugucuuuuaggaaguuca

SEQ ID NO: 496067 - RNA, 18 nt, Human
cagaaaaccaaauacugc

SEQ ID NO: 496068 - RNA, 22 nt, Human
cagagcccggauucaggagauu

SEQ ID NO: 496069 - RNA, 20 nt, Human
ccagaaaggccacaccggua

SEQ ID NO: 496070 - RNA, 22 nt, Human
cccuaagaaggugcaguggagg

SEQ ID NO: 496071 - RNA, 18 nt, Human
cccucucuuucuuucucc

SEQ ID NO: 496072 - RNA, 24 nt, Human
cccucucuuucuuucuccucagga

SEQ ID NO: 496073 - RNA, 22 nt, Human
ccuccacgacaugaguuuaccu

SEQ ID NO: 496074 - RNA, 21 nt, Human
ccucccucucuuucuuucucc

SEQ ID NO: 496075 - RNA, 18 nt, Human
ccugagacuaacguagag

SEQ ID NO: 496076 - RNA, 23 nt, Human
ccuguagccagaaaggccggggc

SEQ ID NO: 496077 - RNA, 20 nt, Human
cguguggggcggugggugug

SEQ ID NO: 496078 - RNA, 23 nt, Human
cucccucucuuucuuucuccuca

SEQ ID NO: 496079 - RNA, 18 nt, Human
cucucucucuuuuucucu

SEQ ID NO: 496080 - RNA, 18 nt, Human
cucucucuuuuucucucc

SEQ ID NO: 496081 - RNA, 21 nt, Human
cuuagcaaacaugggaacaga

SEQ ID NO: 496082 - RNA, 21 nt, Human
cuuuguaaauucugggaagag

SEQ ID NO: 496083 - RNA, 21 nt, Human
gaaggcaccuuccaaaauccc

SEQ ID NO: 496084 - RNA, 18 nt, Human
gaagguaggaggagggag

SEQ ID NO: 496085 - RNA, 21 nt, Human
gagccgaaaaaaacaauauua

SEQ ID NO: 496086 - RNA, 24 nt, Human
gauuuuuggaaggcaccuuccaaa

SEQ ID NO: 496087 - RNA, 19 nt, Human
gcagagcaaaggaagcccc

SEQ ID NO: 496088 - RNA, 23 nt, Human
gcgguggguguggccauguucuu

SEQ ID NO: 496089 - RNA, 21 nt, Human
gcucuuccuucuuuacacauu

SEQ ID NO: 496090 - RNA, 22 nt, Human
ggcuugagacaggaaagugugg

SEQ ID NO: 496091 - RNA, 19 nt, Human
gguaugaaaccaagaagag

SEQ ID NO: 496092 - RNA, 21 nt, Human
gguggguguggccauguucuu

SEQ ID NO: 496093 - RNA, 24 nt, Human
uaaaaaaugaggcaaauguagcaa

SEQ ID NO: 496094 - RNA, 22 nt, Human
uaaacacaaagaagggaauaac

SEQ ID NO: 496095 - RNA, 19 nt, Human
uaaguuucaugacuugaaa

SEQ ID NO: 496096 - RNA, 21 nt, Human
uacaacaaaccuccacgacau

SEQ ID NO: 496097 - RNA, 18 nt, Human
uacccccgaaagcuaaaa

SEQ ID NO: 496098 - RNA, 20 nt, Human
uagauuggauagagaaaaug

SEQ ID NO: 496099 - RNA, 18 nt, Human
uaucagaguaacaaauac

SEQ ID NO: 496100 - RNA, 25 nt, Human
uccaaaauccccuucuuugcuagac

SEQ ID NO: 496101 - RNA, 27 nt, Human
uccaaaauccccuucuuugcuagacuc

SEQ ID NO: 496102 - RNA, 24 nt, Human
ucccucucuuucuuucuccucagg

SEQ ID NO: 496103 - RNA, 20 nt, Human
ucucucucucucuuuuucuc

SEQ ID NO: 496104 - RNA, 24 nt, Human
ucucucucuuuuucucucccuccc

SEQ ID NO: 496105 - RNA, 18 nt, Human
uggauagagaaaauguga

SEQ ID NO: 496106 - RNA, 20 nt, Human
uggauagagaaaaugugaua

SEQ ID NO: 496107 - RNA, 24 nt, Human
uggccauguucuugcucuuccuuc

SEQ ID NO: 496108 - RNA, 25 nt, Human
ugggaacagaaaaccaaauacugca

SEQ ID NO: 496109 - RNA, 24 nt, Human
ugucagaagcuagaaagaagagga

SEQ ID NO: 496110 - RNA, 19 nt, Human
uguggccauguucuugcuc

SEQ ID NO: 496111 - RNA, 21 nt, Human
uuaggcacugggcuuaauacc

SEQ ID NO: 496112 - RNA, 21 nt, Human
uugggcaggagauaagaacgg

SEQ ID NO: 496113 - RNA, 23 nt, Human
uuuuucucucucuuugguuuuuu

SEQ ID NO: 496114 - RNA, 18 nt, Human
aaugccaaacauccucuc

SEQ ID NO: 496115 - RNA, 25 nt, Human
acaaaccaaaacuaucuccaaacaa

SEQ ID NO: 496116 - RNA, 22 nt, Human
acaggaugugcagacugauuaa

SEQ ID NO: 496117 - RNA, 21 nt, Human
accacucuggcauaaagcaac

SEQ ID NO: 496118 - RNA, 22 nt, Human
caaacuagguaaauguggguca

SEQ ID NO: 496119 - RNA, 24 nt, Human
caauagcaaugaagcugcuacaua

SEQ ID NO: 496120 - RNA, 19 nt, Human
cacuuuguccccgcgucuc

SEQ ID NO: 496121 - RNA, 23 nt, Human
cacuuuuauucuaaauucaaaga

SEQ ID NO: 496122 - RNA, 20 nt, Human
caggaugaaaaaauauuuaa

SEQ ID NO: 496123 - RNA, 24 nt, Human
cucauuuuuauuauagaacuacca

SEQ ID NO: 496124 - RNA, 18 nt, Human
cuguacaaaccaaaacua

SEQ ID NO: 496125 - RNA, 18 nt, Human
gaaagaauauaauguugc

SEQ ID NO: 496126 - RNA, 22 nt, Human
guaaaauaugcugcaauauaau

SEQ ID NO: 496127 - RNA, 24 nt, Human
gucauauacaacacuuucaauugu

SEQ ID NO: 496128 - RNA, 20 nt, Human
gucugaaagaauauaauguu

SEQ ID NO: 496129 - RNA, 21 nt, Human
uaaaauaugcugcaauauaau

SEQ ID NO: 496130 - RNA, 19 nt, Human
uacaaugccaaacauccuc

SEQ ID NO: 496131 - RNA, 20 nt, Human
uaucuccaaacaacuaaaac

SEQ ID NO: 496132 - RNA, 20 nt, Human
ucaaacaaccauacagaaac

SEQ ID NO: 496133 - RNA, 19 nt, Human
ucaauagcaauguaugcau

SEQ ID NO: 496134 - RNA, 27 nt, Human
ucggcagugacagcucagauguccaag

SEQ ID NO: 496135 - RNA, 19 nt, Human
ugacacaaacuagguaaaa

SEQ ID NO: 496136 - RNA, 21 nt, Human
ugagguaacuucaaaguugcu

SEQ ID NO: 496137 - RNA, 24 nt, Human
ugagguaacuucaaaguugcuucu

SEQ ID NO: 496138 - RNA, 24 nt, Human
uguaugcauaagaaauuuugugaa

SEQ ID NO: 496139 - RNA, 24 nt, Human
ugugcagacugauuaaaguucagg

SEQ ID NO: 496140 - RNA, 20 nt, Human
uguugauagaaucaaacaac

SEQ ID NO: 496141 - RNA, 23 nt, Human
uucaggaugaaaaaauauuuaaa

SEQ ID NO: 496142 - RNA, 18 nt, Human
uuugauaaaacccauuau

SEQ ID NO: 496143 - RNA, 22 nt, Human
aaacaguauuuuucauauucuu

SEQ ID NO: 496144 - RNA, 22 nt, Human
aagcaaagggcaaaagauugug

SEQ ID NO: 496145 - RNA, 18 nt, Human
acaguuuuuauuuuccuu

SEQ ID NO: 496146 - RNA, 23 nt, Human
caauugaucuugagcucuuccua

SEQ ID NO: 496147 - RNA, 21 nt, Human
ccuccugccuccuguagaguc

SEQ ID NO: 496148 - RNA, 22 nt, Human
ccuccugccuccuguagagucc

SEQ ID NO: 496149 - RNA, 23 nt, Human
cucuuccuagagcugauuuuaaa

SEQ ID NO: 496150 - RNA, 20 nt, Human
gaaauguuucuaaggagcag

SEQ ID NO: 496151 - RNA, 18 nt, Human
gacucuuuucucaauuuu

SEQ ID NO: 496152 - RNA, 21 nt, Human
gcuacauucucaucucugacc

SEQ ID NO: 496153 - RNA, 21 nt, Human
gggcaaaagauugugaugcuu

SEQ ID NO: 496154 - RNA, 23 nt, Human
guagaguccacaauacuuguaga

SEQ ID NO: 496155 - RNA, 22 nt, Human
uaacugcagacaucuguuuagc

SEQ ID NO: 496156 - RNA, 20 nt, Human
uaaugagugcuucuucauuu

SEQ ID NO: 496157 - RNA, 18 nt, Human
uaucagaaauaaacucau

SEQ ID NO: 496158 - RNA, 19 nt, Human
uaucagaaauaaacucaug

SEQ ID NO: 496159 - RNA, 28 nt, Human
ucauuuaaaaauaauauaaucuggucac

SEQ ID NO: 496160 - RNA, 20 nt, Human
ucucaucucugaccaugagg

SEQ ID NO: 496161 - RNA, 21 nt, Human
ugacgcagaaaauucuagaug

SEQ ID NO: 496162 - RNA, 19 nt, Human
ugagcucuuccuagagcug

SEQ ID NO: 496163 - RNA, 20 nt, Human
uggacugagucagaccugga

SEQ ID NO: 496164 - RNA, 22 nt, Human
uggcuaauagaaaauacagagu

SEQ ID NO: 496165 - RNA, 18 nt, Human
uuuuuuuuuuuuuuuuug

SEQ ID NO: 496166 - RNA, 20 nt, Human
uuuuuuuuuuuuuuuuuggu

SEQ ID NO: 496167 - RNA, 24 nt, Human
aaaaaaaccaagcggguacucaaa

SEQ ID NO: 496168 - RNA, 26 nt, Human
aaaaaaaccccgaaaaacaaaacaaa

SEQ ID NO: 496169 - RNA, 24 nt, Human
aaaaaaccccgaaaaacaaaacaa

SEQ ID NO: 496170 - RNA, 21 nt, Human
aaaaacaggagaauauccaaa

SEQ ID NO: 496171 - RNA, 23 nt, Human
aaaaaccaagcggguacucaaac

SEQ ID NO: 496172 - RNA, 22 nt, Human
aaaaauacauuucuauuuccuc

SEQ ID NO: 496173 - RNA, 23 nt, Human
aaaacaaaacaaaaacaugcaga

SEQ ID NO: 496174 - RNA, 20 nt, Human
aaaaccccgaaaaacaaaac

SEQ ID NO: 496175 - RNA, 21 nt, Human
aaaaccccgaaaaacaaaaca

SEQ ID NO: 496176 - RNA, 20 nt, Human
aaacaaaacaaaaacaugca

SEQ ID NO: 496177 - RNA, 19 nt, Human
aaagacaacagaacuguau

SEQ ID NO: 496178 - RNA, 24 nt, Human
aaauacacacucaccauaacuaua

SEQ ID NO: 496179 - RNA, 22 nt, Human
aaaugcuaucuacaugcaacuc

SEQ ID NO: 496180 - RNA, 25 nt, Human
aauaaaaacaggagaauauccaaaa

SEQ ID NO: 496181 - RNA, 23 nt, Human
acaaaacaaaaacaugcagagug

SEQ ID NO: 496182 - RNA, 22 nt, Human
acacaacagaaguuaacaugcc

SEQ ID NO: 496183 - RNA, 18 nt, Human
accccgaaaaacaaaaca

SEQ ID NO: 496184 - RNA, 19 nt, Human
acuacaguaaauacacacu

SEQ ID NO: 496185 - RNA, 21 nt, Human
acuagaauagagagcuuucca

SEQ ID NO: 496186 - RNA, 21 nt, Human
acugaaguaaaacacaaaagg

SEQ ID NO: 496187 - RNA, 20 nt, Human
acugcauguucgugcaaaau

SEQ ID NO: 496188 - RNA, 25 nt, Human
agaaauaaaugcuaucuacaugcaa

SEQ ID NO: 496189 - RNA, 21 nt, Human
aggcaaaaguaaaaaucuauc

SEQ ID NO: 496190 - RNA, 18 nt, Human
agucugguuuugcuuuug

SEQ ID NO: 496191 - RNA, 22 nt, Human
aguucuuuccucuuguuagccc

SEQ ID NO: 496192 - RNA, 18 nt, Human
auacagauugcucaagga

SEQ ID NO: 496193 - RNA, 20 nt, Human
auagaauaucugcaucuaca

SEQ ID NO: 496194 - RNA, 25 nt, Human
aucagauuauuuccauuaugucaau

SEQ ID NO: 496195 - RNA, 20 nt, Human
augaauggcacagggcaaaa

SEQ ID NO: 496196 - RNA, 24 nt, Human
auucaaaacacaacagaaguuaac

SEQ ID NO: 496197 - RNA, 22 nt, Human
auucacuggaaagaacaaaccu

SEQ ID NO: 496198 - RNA, 24 nt, Human
caaaacaaaaacaugcagagugcu

SEQ ID NO: 496199 - RNA, 21 nt, Human
caaaauacaauuucugcucua

SEQ ID NO: 496200 - RNA, 21 nt, Human
caacagauguacaaauagcaa

SEQ ID NO: 496201 - RNA, 21 nt, Human
caacauuacggcuugaggagu

SEQ ID NO: 496202 - RNA, 23 nt, Human
caccauaacuauaacuuaguccc

SEQ ID NO: 496203 - RNA, 22 nt, Human
cacccacuaaaaccacugcaaa

SEQ ID NO: 496204 - RNA, 25 nt, Human
caccgccccacgccccccgcggcac

SEQ ID NO: 496205 - RNA, 21 nt, Human
cacugaaguaaaacacaaaag

SEQ ID NO: 496206 - RNA, 20 nt, Human
cagacuccaaucuccucacu

SEQ ID NO: 496207 - RNA, 24 nt, Human
cagauccauucagacuccaaucuc

SEQ ID NO: 496208 - RNA, 20 nt, Human
cagcaaguucauccuccugu

SEQ ID NO: 496209 - RNA, 21 nt, Human
cagcaauauacuggugcugau

SEQ ID NO: 496210 - RNA, 20 nt, Human
cagcuccucagcaccgcccc

SEQ ID NO: 496211 - RNA, 19 nt, Human
caggugcccaucaguuucu

SEQ ID NO: 496212 - RNA, 24 nt, Human
caucaaaaaagggaaguuuuauca

SEQ ID NO: 496213 - RNA, 22 nt, Human
cauugcaccucaaaaguucugc

SEQ ID NO: 496214 - RNA, 24 nt, Human
ccaaaaaaaaaccaagcggguacu

SEQ ID NO: 496215 - RNA, 19 nt, Human
ccaaaggaaugaacaaucc

SEQ ID NO: 496216 - RNA, 21 nt, Human
ccaauaauggaugcuccccuc

SEQ ID NO: 496217 - RNA, 20 nt, Human
cccaaaggaaugaacaaucc

SEQ ID NO: 496218 - RNA, 25 nt, Human
cccaaguugccacuauuuaaaaagu

SEQ ID NO: 496219 - RNA, 21 nt, Human
ccccgaaaaacaaaacaaaaa

SEQ ID NO: 496220 - RNA, 22 nt, Human
ccccgaaaaacaaaacaaaaac

SEQ ID NO: 496221 - RNA, 22 nt, Human
cccgcggcacucugagccagcc

SEQ ID NO: 496222 - RNA, 21 nt, Human
ccgaaaaacaaaacaaaaaca

SEQ ID NO: 496223 - RNA, 20 nt, Human
ccucagcaccgccccacgcc

SEQ ID NO: 496224 - RNA, 21 nt, Human
ccugauaaagucguggcuacu

SEQ ID NO: 496225 - RNA, 20 nt, Human
cgaaaaacaaaacaaaaaca

SEQ ID NO: 496226 - RNA, 24 nt, Human
cgaaaaacaaaacaaaaacaugca

SEQ ID NO: 496227 - RNA, 24 nt, Human
cggcacucugagccagccgcagcc

SEQ ID NO: 496228 - RNA, 19 nt, Human
cggcucggcugcgcuccgc

SEQ ID NO: 496229 - RNA, 23 nt, Human
cggcugcgcuccgcgaacggcga

SEQ ID NO: 496230 - RNA, 19 nt, Human
cuagaauagagagcuuucc

SEQ ID NO: 496231 - RNA, 25 nt, Human
cuaucuacaaagcaauauagcaaaa

SEQ ID NO: 496232 - RNA, 23 nt, Human
cucagaaucucuuggaaaacaga

SEQ ID NO: 496233 - RNA, 24 nt, Human
cucuacaggaaggaguagccuguu

SEQ ID NO: 496234 - RNA, 18 nt, Human
cugauacaguagcaaucc

SEQ ID NO: 496235 - RNA, 22 nt, Human
cuggugcugauguuccaaagau

SEQ ID NO: 496236 - RNA, 20 nt, Human
cuugaggaaggucuugagaa

SEQ ID NO: 496237 - RNA, 19 nt, Human
cuuucauuugccuguucaa

SEQ ID NO: 496238 - RNA, 22 nt, Human
cuuugaauuaaaugcuuaaauu

SEQ ID NO: 496239 - RNA, 19 nt, Human
gaaaaacaaaacaaaaaca

SEQ ID NO: 496240 - RNA, 18 nt, Human
gaaaacgcucacucccuc

SEQ ID NO: 496241 - RNA, 21 nt, Human
gaauaucugcaucuacaucaa

SEQ ID NO: 496242 - RNA, 18 nt, Human
gaauggacacaaugguga

SEQ ID NO: 496243 - RNA, 19 nt, Human
gacaucucuuuuacaaacg

SEQ ID NO: 496244 - RNA, 19 nt, Human
gcaauccuuucauauacuc

SEQ ID NO: 496245 - RNA, 23 nt, Human
gcgagggcugcugcugcugcugc

SEQ ID NO: 496246 - RNA, 22 nt, Human
ggaaaagcguauucuuagggga

SEQ ID NO: 496247 - RNA, 22 nt, Human
gggcugcugcugcugcugcugc

SEQ ID NO: 496248 - RNA, 18 nt, Human
ggguaggggagguagcca

SEQ ID NO: 496249 - RNA, 20 nt, Human
gugaauggacacaaugguga

SEQ ID NO: 496250 - RNA, 18 nt, Human
uaaaaaaaaccccgaaaa

SEQ ID NO: 496251 - RNA, 20 nt, Human
uaaaaaaaaccccgaaaaac

SEQ ID NO: 496252 - RNA, 25 nt, Human
uaaaaaaaaccccgaaaaacaaaac

SEQ ID NO: 496253 - RNA, 23 nt, Human
uaaaaaguaggugaagaaugaua

SEQ ID NO: 496254 - RNA, 24 nt, Human
uaaaagacaacagaacuguauaga

SEQ ID NO: 496255 - RNA, 25 nt, Human
uaaaagcccacauguaccaauaaug

SEQ ID NO: 496256 - RNA, 25 nt, Human
uaaagaaaauacuccaauucuguuc

SEQ ID NO: 496257 - RNA, 21 nt, Human
uaaauacauagcaaaguuuua

SEQ ID NO: 496258 - RNA, 22 nt, Human
uaaauauuucuuguaccaugca

SEQ ID NO: 496259 - RNA, 22 nt, Human
uaaauugaaacaauauuucuga

SEQ ID NO: 496260 - RNA, 19 nt, Human
uaacugaauagugcaucuu

SEQ ID NO: 496261 - RNA, 21 nt, Human
uaagauaacuacuauaccuug

SEQ ID NO: 496262 - RNA, 25 nt, Human
uaaggcaaagaaucuuccugagcca

SEQ ID NO: 496263 - RNA, 23 nt, Human
uaauuaccaaaaaaaaaccaagc

SEQ ID NO: 496264 - RNA, 20 nt, Human
uacaggaaggaguagccugu

SEQ ID NO: 496265 - RNA, 24 nt, Human
uaccaaaaaaaaaccaagcgggua

SEQ ID NO: 496266 - RNA, 18 nt, Human
uaccaauaauggaugcuc

SEQ ID NO: 496267 - RNA, 21 nt, Human
uagcuaagucaacuaaaaauc

SEQ ID NO: 496268 - RNA, 30 nt, Human
uagcuaagucaacuaaaaaucaguuauguu

SEQ ID NO: 496269 - RNA, 18 nt, Human
uaggggaagacaugaaga

SEQ ID NO: 496270 - RNA, 23 nt, Human
uaggggagguagccaggguaaag

SEQ ID NO: 496271 - RNA, 18 nt, Human
uagucacaaucacagucu

SEQ ID NO: 496272 - RNA, 22 nt, Human
uauccaaaaugaaaauauuuga

SEQ ID NO: 496273 - RNA, 23 nt, Human
uauccaggauagacuaaauugaa

SEQ ID NO: 496274 - RNA, 24 nt, Human
uauguaguguugcucaacagaugu

SEQ ID NO: 496275 - RNA, 23 nt, Human
ucaaaaaaugcaguauacuuaua

SEQ ID NO: 496276 - RNA, 24 nt, Human
ucaauuaaaaaaaaccccgaaaaa

SEQ ID NO: 496277 - RNA, 25 nt, Human
ucaauuaaaaaaaaccccgaaaaac

SEQ ID NO: 496278 - RNA, 18 nt, Human
ucacaaucacagucuuug

SEQ ID NO: 496279 - RNA, 21 nt, Human
ucaccagaaagaaucccaagu

SEQ ID NO: 496280 - RNA, 18 nt, Human
uccaaagauaaaagaaaa

SEQ ID NO: 496281 - RNA, 19 nt, Human
uccaauucuguucaacauu

SEQ ID NO: 496282 - RNA, 19 nt, Human
ucuaaagugaaaaguuugu

SEQ ID NO: 496283 - RNA, 22 nt, Human
ucugucuucaucaaaaucacaa

SEQ ID NO: 496284 - RNA, 24 nt, Human
ucuuguuagcccuccaccucgcac

SEQ ID NO: 496285 - RNA, 21 nt, Human
ucuuucuuuuauauaggaugg

SEQ ID NO: 496286 - RNA, 22 nt, Human
ucuuucuuuuauauaggaugga

SEQ ID NO: 496287 - RNA, 18 nt, Human
ugaaccagauaaaucaua

SEQ ID NO: 496288 - RNA, 20 nt, Human
ugaaccagauaaaucauaca

SEQ ID NO: 496289 - RNA, 21 nt, Human
ugaacugucuaccaugaaaac

SEQ ID NO: 496290 - RNA, 19 nt, Human
ugaauagugcaucuuccuu

SEQ ID NO: 496291 - RNA, 23 nt, Human
ugagaaaacgcucacucccucua

SEQ ID NO: 496292 - RNA, 24 nt, Human
ugagaaauagcacuuccuauacaa

SEQ ID NO: 496293 - RNA, 18 nt, Human
ugcugcugcugcuucugc

SEQ ID NO: 496294 - RNA, 19 nt, Human
uggaaagaacaaaccucac

SEQ ID NO: 496295 - RNA, 20 nt, Human
uggagugucuccaaauuaaa

SEQ ID NO: 496296 - RNA, 21 nt, Human
uggagugucuccaaauuaaag

SEQ ID NO: 496297 - RNA, 22 nt, Human
uggaugcuccccucucuuugaa

SEQ ID NO: 496298 - RNA, 21 nt, Human
ugggguuaaagcauguugcug

SEQ ID NO: 496299 - RNA, 20 nt, Human
uggguuuaagggcacagaaa

SEQ ID NO: 496300 - RNA, 21 nt, Human
ugucuccaaauuaaagagagg

SEQ ID NO: 496301 - RNA, 22 nt, Human
uguuggaaaauuuaacuccagg

SEQ ID NO: 496302 - RNA, 22 nt, Human
uuaaaaaaaaccccgaaaaaca

SEQ ID NO: 496303 - RNA, 19 nt, Human
uuagagggauggccaggug

SEQ ID NO: 496304 - RNA, 24 nt, Human
uuauuuuuuaauacaauagcugcc

SEQ ID NO: 496305 - RNA, 24 nt, Human
uucaaaaugaauuuucaucacugu

SEQ ID NO: 496306 - RNA, 20 nt, Human
uucagaaucaccagaaagaa

SEQ ID NO: 496307 - RNA, 25 nt, Human
uuccaaagauaaaagaaaauacagu

SEQ ID NO: 496308 - RNA, 23 nt, Human
uuccuuagguuaauuucuguguu

SEQ ID NO: 496309 - RNA, 21 nt, Human
uugacuauuuauaaaggaugg

SEQ ID NO: 496310 - RNA, 21 nt, Human
uugcugggucguccuuuuuac

SEQ ID NO: 496311 - RNA, 21 nt, Human
uuuccauuucauuugacuaac

SEQ ID NO: 496312 - RNA, 19 nt, Human
uuugacaaacccacccuuc

SEQ ID NO: 496313 - RNA, 24 nt, Human
uuugaguuucaaaaugaauuuuca

SEQ ID NO: 496314 - RNA, 23 nt, Human
aaaaaccacucauugguaagcac

SEQ ID NO: 496315 - RNA, 22 nt, Human
aacacugcuccccuccccuccc

SEQ ID NO: 496316 - RNA, 23 nt, Human
aagcaaaccccauggcugguaga

SEQ ID NO: 496317 - RNA, 19 nt, Human
aagcaagcaaaccccaugg

SEQ ID NO: 496318 - RNA, 20 nt, Human
aagcagcuuggagaaacugg

SEQ ID NO: 496319 - RNA, 22 nt, Human
aaguagugagacugaagcugug

SEQ ID NO: 496320 - RNA, 23 nt, Human
acaggcuacaguugaaucaggca

SEQ ID NO: 496321 - RNA, 22 nt, Human
acccaucucuccuccucccacu

SEQ ID NO: 496322 - RNA, 21 nt, Human
accuggcaguugagucagauu

SEQ ID NO: 496323 - RNA, 18 nt, Human
acucccauccacuuucuc

SEQ ID NO: 496324 - RNA, 23 nt, Human
acuccuaagcaagcaaaccccuu

SEQ ID NO: 496325 - RNA, 21 nt, Human
acucucucugucuccccuaau

SEQ ID NO: 496326 - RNA, 18 nt, Human
acucuuuugucuucaccc

SEQ ID NO: 496327 - RNA, 19 nt, Human
acugcuccccuccccuccc

SEQ ID NO: 496328 - RNA, 23 nt, Human
agaagaagcuaguggcaauccca

SEQ ID NO: 496329 - RNA, 19 nt, Human
agagaggaggguagaaaag

SEQ ID NO: 496330 - RNA, 20 nt, Human
agccagcucgguacuccucc

SEQ ID NO: 496331 - RNA, 22 nt, Human
agggacagcaugggccaggugc

SEQ ID NO: 496332 - RNA, 18 nt, Human
agguauggacagagagga

SEQ ID NO: 496333 - RNA, 21 nt, Human
agugguugaguccuucugcag

SEQ ID NO: 496334 - RNA, 24 nt, Human
aucaugagagaaggccuuuuuaaa

SEQ ID NO: 496335 - RNA, 23 nt, Human
auccacuuucucauagcucaaaa

SEQ ID NO: 496336 - RNA, 22 nt, Human
caacuacuccuaagcaagcaaa

SEQ ID NO: 496337 - RNA, 25 nt, Human
cacagucaaacccaggccuguaauc

SEQ ID NO: 496338 - RNA, 19 nt, Human
cacccaucucuccuccucc

SEQ ID NO: 496339 - RNA, 21 nt, Human
cagaugggucuacauuuuucu

SEQ ID NO: 496340 - RNA, 23 nt, Human
cagcaagaugaggcuugauuaua

SEQ ID NO: 496341 - RNA, 19 nt, Human
cagcaccugggccagcacu

SEQ ID NO: 496342 - RNA, 20 nt, Human
cagcaccugggccagcacuc

SEQ ID NO: 496343 - RNA, 18 nt, Human
cagcacucugcgcuccug

SEQ ID NO: 496344 - RNA, 23 nt, Human
cagcagcagcagcgcagcauucc

SEQ ID NO: 496345 - RNA, 20 nt, Human
cagcggggauggggcaaaau

SEQ ID NO: 496346 - RNA, 19 nt, Human
caggucgugggagcaacaa

SEQ ID NO: 496347 - RNA, 22 nt, Human
ccagaugcucacaugaaaagga

SEQ ID NO: 496348 - RNA, 20 nt, Human
ccagggaacaucgaggcuca

SEQ ID NO: 496349 - RNA, 18 nt, Human
ccauggcugguagacccc

SEQ ID NO: 496350 - RNA, 19 nt, Human
cccagcggggcuccucuuc

SEQ ID NO: 496351 - RNA, 19 nt, Human
cccaugauaccagcaagau

SEQ ID NO: 496352 - RNA, 21 nt, Human
cccgagcagcggggucugaga

SEQ ID NO: 496353 - RNA, 22 nt, Human
cccgggccggggaggcgccacc

SEQ ID NO: 496354 - RNA, 18 nt, Human
cccuccccucccauccca

SEQ ID NO: 496355 - RNA, 18 nt, Human
ccgggccggggaggcgcc

SEQ ID NO: 496356 - RNA, 18 nt, Human
ccuguaaucaccucugaa

SEQ ID NO: 496357 - RNA, 20 nt, Human
ccuucugcagcggggauggg

SEQ ID NO: 496358 - RNA, 22 nt, Human
cgcccggggcuaccgucccggg

SEQ ID NO: 496359 - RNA, 21 nt, Human
cgccucaaggcagugauacag

SEQ ID NO: 496360 - RNA, 22 nt, Human
cgguguuuaauuuuucacaaaa

SEQ ID NO: 496361 - RNA, 19 nt, Human
cuacuccuaagcaagcaaa

SEQ ID NO: 496362 - RNA, 22 nt, Human
cucaagugacuuuccagucugg

SEQ ID NO: 496363 - RNA, 24 nt, Human
cucauagcucaaaaaccacucauu

SEQ ID NO: 496364 - RNA, 21 nt, Human
cuccuccucccacucccaucc

SEQ ID NO: 496365 - RNA, 18 nt, Human
cugcagcaccugggccag

SEQ ID NO: 496366 - RNA, 19 nt, Human
cugcagcaccugggccagc

SEQ ID NO: 496367 - RNA, 19 nt, Human
cugcuccccuccccuccca

SEQ ID NO: 496368 - RNA, 23 nt, Human
gacacccaaguccauagccagcu

SEQ ID NO: 496369 - RNA, 22 nt, Human
gaccccguggguauuuuggcau

SEQ ID NO: 496370 - RNA, 24 nt, Human
gaugccaccaguccaagacuuaga

SEQ ID NO: 496371 - RNA, 20 nt, Human
gccaauuuccuuuucuggca

SEQ ID NO: 496372 - RNA, 27 nt, Human
ggagcgaagccgggaggaggcggggaa

SEQ ID NO: 496373 - RNA, 18 nt, Human
ggagucuuaggggagugg

SEQ ID NO: 496374 - RNA, 19 nt, Human
gggcuccucuucagggcgg

SEQ ID NO: 496375 - RNA, 19 nt, Human
gguacuccuccauucacuc

SEQ ID NO: 496376 - RNA, 20 nt, Human
uaagaaggaugaagauggcg

SEQ ID NO: 496377 - RNA, 19 nt, Human
uacccauuacaggcuacag

SEQ ID NO: 496378 - RNA, 20 nt, Human
uagugcccaauaaccagagu

SEQ ID NO: 496379 - RNA, 24 nt, Human
ucaacacugcuccccuccccuccc

SEQ ID NO: 496380 - RNA, 23 nt, Human
ucaccucugaaacaacuacuccu

SEQ ID NO: 496381 - RNA, 22 nt, Human
ucagggcgguguuuaauuuuuc

SEQ ID NO: 496382 - RNA, 19 nt, Human
uccacuuucucauagcuca

SEQ ID NO: 496383 - RNA, 20 nt, Human
ucccaugauaccagcaagau

SEQ ID NO: 496384 - RNA, 18 nt, Human
uccuaagcaagcaaaccc

SEQ ID NO: 496385 - RNA, 22 nt, Human
uccuccucccacucccauccac

SEQ ID NO: 496386 - RNA, 21 nt, Human
ucucaagugacuuuccagucu

SEQ ID NO: 496387 - RNA, 19 nt, Human
ucuccaacacugacugacc

SEQ ID NO: 496388 - RNA, 18 nt, Human
ucucuccuccucccacuc

SEQ ID NO: 496389 - RNA, 24 nt, Human
ucucuuucuaagaaggaugaagau

SEQ ID NO: 496390 - RNA, 21 nt, Human
ucugcagcaccugggccagca

SEQ ID NO: 496391 - RNA, 18 nt, Human
ucugcagcggggaugggg

SEQ ID NO: 496392 - RNA, 22 nt, Human
ugacugaccccaaacaugcuga

SEQ ID NO: 496393 - RNA, 25 nt, Human
ugacugaccccaaacaugcugagcu

SEQ ID NO: 496394 - RNA, 23 nt, Human
ugagcccagaucaggcuggccgg

SEQ ID NO: 496395 - RNA, 20 nt, Human
ugagcccagaucaggcuggg

SEQ ID NO: 496396 - RNA, 22 nt, Human
ugauauuggcagaagaagcuag

SEQ ID NO: 496397 - RNA, 20 nt, Human
ugauuauaaaaagugcgccu

SEQ ID NO: 496398 - RNA, 20 nt, Human
ugcagcaccugggccagcac

SEQ ID NO: 496399 - RNA, 18 nt, Human
ugcccggaggugucacag

SEQ ID NO: 496400 - RNA, 20 nt, Human
ugcccggaggugucacagga

SEQ ID NO: 496401 - RNA, 20 nt, Human
uggccuuguagguauggaca

SEQ ID NO: 496402 - RNA, 20 nt, Human
uggcugguagaccccguggg

SEQ ID NO: 496403 - RNA, 27 nt, Human
ugucuucacccaucucuccuccuccca

SEQ ID NO: 496404 - RNA, 21 nt, Human
ugugggcucuccaacacugac

SEQ ID NO: 496405 - RNA, 19 nt, Human
uucacccaucucuccuccu

SEQ ID NO: 496406 - RNA, 28 nt, Human
uucaccuggcaguugagucccgaguacg

SEQ ID NO: 496407 - RNA, 28 nt, Human
uuguccuuggccuuguaggucgguuccg

SEQ ID NO: 496408 - RNA, 24 nt, Human
uugucuucacccaucucuccuccu

SEQ ID NO: 496409 - RNA, 21 nt, Human
uuugccagacacccaagucca

SEQ ID NO: 496410 - RNA, 29 nt, Human
uuuguccuuggccuuguaggucgguuccg

SEQ ID NO: 496411 - RNA, 18 nt, Human
uuuucuggcagggccugg

SEQ ID NO: 496412 - RNA, 18 nt, Human
uuuuuuuuuuuuucaccu

SEQ ID NO: 496413 - RNA, 26 nt, Human
uuuuuuuuuuuuucaccuggcaguug

SEQ ID NO: 496414 - RNA, 24 nt, Human
uuuuuuuuuuuuuuuucaccugau

SEQ ID NO: 496415 - RNA, 22 nt, Human
uuuuuuuuuuuuuuuuucaccu

SEQ ID NO: 496416 - RNA, 24 nt, Human
uuuuuuuuuuuuuuuuucaccugg

SEQ ID NO: 496417 - RNA, 19 nt, Human
aaauguccuucuuuacacc

SEQ ID NO: 496418 - RNA, 18 nt, Human
aaccucaagcaucuucuc

SEQ ID NO: 496419 - RNA, 21 nt, Human
agaagaaaaacaggcucucaa

SEQ ID NO: 496420 - RNA, 20 nt, Human
agagaagaaaaacaggcucu

SEQ ID NO: 496421 - RNA, 19 nt, Human
auaagacagaaaacagccc

SEQ ID NO: 496422 - RNA, 27 nt, Human
augaaauuguguguguguguguguggu

SEQ ID NO: 496423 - RNA, 21 nt, Human
caagagguccccucaccagug

SEQ ID NO: 496424 - RNA, 19 nt, Human
caccagugcuuuaaaauaa

SEQ ID NO: 496425 - RNA, 23 nt, Human
cacuccuuaaaaucuaaccucaa

SEQ ID NO: 496426 - RNA, 24 nt, Human
cucaagcaucuucucuggcacugc

SEQ ID NO: 496427 - RNA, 24 nt, Human
gaccaguuuuuuaaaaauugaagg

SEQ ID NO: 496428 - RNA, 21 nt, Human
gagguccccucaccagugcuu

SEQ ID NO: 496429 - RNA, 21 nt, Human
gugugugugugugugugugug

SEQ ID NO: 496430 - RNA, 21 nt, Human
gugugugugugugugugugug

SEQ ID NO: 496431 - RNA, 24 nt, Human
uaaaauguccuucuuuacacccuc

SEQ ID NO: 496432 - RNA, 25 nt, Human
uaaaauguccuucuuuacacccuuc

SEQ ID NO: 496433 - RNA, 25 nt, Human
uaaccucaagcaucuucucuggcac

SEQ ID NO: 496434 - RNA, 23 nt, Human
uaggugugucucauuuuguaauu

SEQ ID NO: 496435 - RNA, 24 nt, Human
uauaugaaugaaauugugugugug

SEQ ID NO: 496436 - RNA, 20 nt, Human
uaugaaugaaauugugugug

SEQ ID NO: 496437 - RNA, 22 nt, Human
ucuguguaugaucauccaggaa

SEQ ID NO: 496438 - RNA, 26 nt, Human
ugaaauugugugugugugugugugug

SEQ ID NO: 496439 - RNA, 22 nt, Human
ugcaauaccauauaugaaugaa

SEQ ID NO: 496440 - RNA, 18 nt, Human
ugugugugugugugugug

SEQ ID NO: 496441 - RNA, 18 nt, Human
ugugugugugugugugug

SEQ ID NO: 496442 - RNA, 18 nt, Human
ugugugugugugugugug

SEQ ID NO: 496443 - RNA, 18 nt, Human
ugugugugugugugugug

SEQ ID NO: 496444 - RNA, 18 nt, Human
ugugugugugugugugug

SEQ ID NO: 496445 - RNA, 18 nt, Human
ugugugugugugugugug

SEQ ID NO: 496446 - RNA, 18 nt, Human
ugugugugugugugugug

SEQ ID NO: 496447 - RNA, 18 nt, Human
ugugugugugugugugug

SEQ ID NO: 496448 - RNA, 18 nt, Human
ugugugugugugugugug

SEQ ID NO: 496449 - RNA, 18 nt, Human
ugugugugugugugugug

SEQ ID NO: 496450 - RNA, 20 nt, Human
ugugugugugugugugugug

SEQ ID NO: 496451 - RNA, 21 nt, Human
ugugugugugugugugugugu

SEQ ID NO: 496452 - RNA, 21 nt, Human
ugugugugugugugugugugu

SEQ ID NO: 496453 - RNA, 21 nt, Human
ugugugugugugugugugugu

SEQ ID NO: 496454 - RNA, 21 nt, Human
ugugugugugugugugugugu

SEQ ID NO: 496455 - RNA, 21 nt, Human
ugugugugugugugugugugu

SEQ ID NO: 496456 - RNA, 21 nt, Human
ugugugugugugugugugugu

SEQ ID NO: 496457 - RNA, 21 nt, Human
ugugugugugugugugugugu

SEQ ID NO: 496458 - RNA, 21 nt, Human
ugugugugugugugugugugu

SEQ ID NO: 496459 - RNA, 21 nt, Human
ugugugugugugugugugugu

SEQ ID NO: 496460 - RNA, 21 nt, Human
ugugugugugugugugugugu

SEQ ID NO: 496461 - RNA, 21 nt, Human
ugugugugugugugugugugu

SEQ ID NO: 496462 - RNA, 21 nt, Human
ugugugugugugugugugugu

SEQ ID NO: 496463 - RNA, 21 nt, Human
ugugugugugugugugugugu

SEQ ID NO: 496464 - RNA, 21 nt, Human
ugugugugugugugugugugu

SEQ ID NO: 496465 - RNA, 21 nt, Human
ugugugugugugugugugugu

SEQ ID NO: 496466 - RNA, 21 nt, Human
ugugugugugugugugugugu

SEQ ID NO: 496467 - RNA, 21 nt, Human
ugugugugugugugugugugu

SEQ ID NO: 496468 - RNA, 22 nt, Human
ugugugugugugugugugugug

SEQ ID NO: 496469 - RNA, 22 nt, Human
ugugugugugugugugugugug

SEQ ID NO: 496470 - RNA, 22 nt, Human
ugugugugugugugugugugug

SEQ ID NO: 496471 - RNA, 22 nt, Human
ugugugugugugugugugugug

SEQ ID NO: 496472 - RNA, 22 nt, Human
ugugugugugugugugugugug

SEQ ID NO: 496473 - RNA, 22 nt, Human
ugugugugugugugugugugug

SEQ ID NO: 496474 - RNA, 22 nt, Human
ugugugugugugugugugugug

SEQ ID NO: 496475 - RNA, 23 nt, Human
uguguguguguguguguguguug

SEQ ID NO: 496476 - RNA, 19 nt, Human
uguuuucguauccuugcuc

SEQ ID NO: 496477 - RNA, 23 nt, Human
uucucuggcacugcggugcccaa

SEQ ID NO: 496478 - RNA, 23 nt, Human
uuuaaaauaucaagauaggugug

SEQ ID NO: 496479 - RNA, 18 nt, Human
aaggaccucaugauuggg

SEQ ID NO: 496480 - RNA, 25 nt, Human
agacgccgacagggggugggggcgg

SEQ ID NO: 496481 - RNA, 22 nt, Human
agagaaggggacgaggcccaga

SEQ ID NO: 496482 - RNA, 18 nt, Human
aggauuugagauccccuc

SEQ ID NO: 496483 - RNA, 22 nt, Human
aggcaagggagacagagagaag

SEQ ID NO: 496484 - RNA, 18 nt, Human
aggggacgaggcccagac

SEQ ID NO: 496485 - RNA, 19 nt, Human
aggggcaguguuuguuaau

SEQ ID NO: 496486 - RNA, 22 nt, Human
agucaugcugaguuuggggaca

SEQ ID NO: 496487 - RNA, 23 nt, Human
aucugcucugagggguuggggau

SEQ ID NO: 496488 - RNA, 19 nt, Human
caaggaccucaugauuggg

SEQ ID NO: 496489 - RNA, 24 nt, Human
cagcgcuggggaccaaaguggaga

SEQ ID NO: 496490 - RNA, 22 nt, Human
cauggggucuguauuugggggu

SEQ ID NO: 496491 - RNA, 24 nt, Human
cauuggggucuucuaggggcugua

SEQ ID NO: 496492 - RNA, 21 nt, Human
ccaggacuguuuuggugucug

SEQ ID NO: 496493 - RNA, 23 nt, Human
ccagguccgcccuggacccccug

SEQ ID NO: 496494 - RNA, 25 nt, Human
ccauaccaggcacaaggaccucaug

SEQ ID NO: 496495 - RNA, 22 nt, Human
ccccagguccgcccuggacccc

SEQ ID NO: 496496 - RNA, 19 nt, Human
cccuggacccccugggccu

SEQ ID NO: 496497 - RNA, 21 nt, Human
ccgcccuggacccccugggcc

SEQ ID NO: 496498 - RNA, 22 nt, Human
ccucaugauuggguuuccuggg

SEQ ID NO: 496499 - RNA, 23 nt, Human
ccuguaauuagcacuuccaggac

SEQ ID NO: 496500 - RNA, 21 nt, Human
ccuucagguucucccucgagc

SEQ ID NO: 496501 - RNA, 20 nt, Human
cgacagggggugggggcgga

SEQ ID NO: 496502 - RNA, 20 nt, Human
cgagggcuggcuaacagggg

SEQ ID NO: 496503 - RNA, 19 nt, Human
cgcccuggacccccugggc

SEQ ID NO: 496504 - RNA, 20 nt, Human
cgcuggggaccaaaguggag

SEQ ID NO: 496505 - RNA, 19 nt, Human
cucuuggaauuuggugucu

SEQ ID NO: 496506 - RNA, 20 nt, Human
cugcucugagggguugggga

SEQ ID NO: 496507 - RNA, 23 nt, Human
cugugggccauguggggugggcu

SEQ ID NO: 496508 - RNA, 24 nt, Human
gacagcgcuggggaccaaagugga

SEQ ID NO: 496509 - RNA, 21 nt, Human
gagaugcuaguggggacucug

SEQ ID NO: 496510 - RNA, 24 nt, Human
gagggguuggggauagggacuagc

SEQ ID NO: 496511 - RNA, 23 nt, Human
gagucaugcugaguuuggggaca

SEQ ID NO: 496512 - RNA, 19 nt, Human
gcccuggacccccugggcc

SEQ ID NO: 496513 - RNA, 21 nt, Human
gcccuggacccccugggccuu

SEQ ID NO: 496514 - RNA, 19 nt, Human
gcuggggaccaaaguggag

SEQ ID NO: 496515 - RNA, 18 nt, Human
ggaaaucuguuaaucugg

SEQ ID NO: 496516 - RNA, 25 nt, Human
ggaaaucuguuaaucugggaaucug

SEQ ID NO: 496517 - RNA, 18 nt, Human
ggagacagagagaagggg

SEQ ID NO: 496518 - RNA, 22 nt, Human
ggagaugcuaguggggacucug

SEQ ID NO: 496519 - RNA, 19 nt, Human
ggaggcaagggagacagag

SEQ ID NO: 496520 - RNA, 18 nt, Human
ggccagcacaggagcugg

SEQ ID NO: 496521 - RNA, 18 nt, Human
gggccauguggggugggc

SEQ ID NO: 496522 - RNA, 20 nt, Human
gggcugguuaugguggguuu

SEQ ID NO: 496523 - RNA, 20 nt, Human
ggggacgaggcccagacgcc

SEQ ID NO: 496524 - RNA, 23 nt, Human
ggggauagggacuagccugaagg

SEQ ID NO: 496525 - RNA, 25 nt, Human
gggggcgggugcagaguugggggca

SEQ ID NO: 496526 - RNA, 21 nt, Human
ggguuucuugagggugcagag

SEQ ID NO: 496527 - RNA, 21 nt, Human
gugcagaggguaggaagacuu

SEQ ID NO: 496528 - RNA, 20 nt, Human
guuugggauccccagagucc

SEQ ID NO: 496529 - RNA, 20 nt, Human
uaagggcuucagggugacca

SEQ ID NO: 496530 - RNA, 23 nt, Human
uauccugacugcagucuccucca

SEQ ID NO: 496531 - RNA, 20 nt, Human
ucagggaaucucuuucuggg

SEQ ID NO: 496532 - RNA, 19 nt, Human
ucagggccuuggggccuuc

SEQ ID NO: 496533 - RNA, 25 nt, Human
uccagggaugggaauuccugugugg

SEQ ID NO: 496534 - RNA, 21 nt, Human
ucccuuagggcuggggcucuu

SEQ ID NO: 496535 - RNA, 24 nt, Human
ucuccaguuuccagggaugggaau

SEQ ID NO: 496536 - RNA, 19 nt, Human
ucuucuugagggauaagac

SEQ ID NO: 496537 - RNA, 22 nt, Human
ucuuugucagguguccagggcc

SEQ ID NO: 496538 - RNA, 25 nt, Human
ugaaugucuguuacucuuuugcuuu

SEQ ID NO: 496539 - RNA, 21 nt, Human
ugacaugaaugucuguuacuc

SEQ ID NO: 496540 - RNA, 18 nt, Human
ugacauggggucuguauu

SEQ ID NO: 496541 - RNA, 19 nt, Human
ugagaggacugauguuaaa

SEQ ID NO: 496542 - RNA, 21 nt, Human
ugagggcacaggggaguuugg

SEQ ID NO: 496543 - RNA, 18 nt, Human
ugaguuuggggacaugca

SEQ ID NO: 496544 - RNA, 20 nt, Human
ugcuaguggggacucugucu

SEQ ID NO: 496545 - RNA, 23 nt, Human
ugcugugggguccuuugaggcca

SEQ ID NO: 496546 - RNA, 23 nt, Human
ugggagccuggaaugcauauccu

SEQ ID NO: 496547 - RNA, 21 nt, Human
ugggauuggauuuucaaauuu

SEQ ID NO: 496548 - RNA, 27 nt, Human
uggggaacaaugacaugaaugucuggc

SEQ ID NO: 496549 - RNA, 24 nt, Human
uggggauagggacuagccugaagg

SEQ ID NO: 496550 - RNA, 18 nt, Human
uggggccuuccauuuauu

SEQ ID NO: 496551 - RNA, 22 nt, Human
uggggugggcuucauacaaggc

SEQ ID NO: 496552 - RNA, 18 nt, Human
uggggugucggugucagg

SEQ ID NO: 496553 - RNA, 18 nt, Human
uggugucuguaaauuagg

SEQ ID NO: 496554 - RNA, 19 nt, Human
uguaaugcauuauguggag

SEQ ID NO: 496555 - RNA, 19 nt, Human
ugugggagcaauggggugu

SEQ ID NO: 496556 - RNA, 19 nt, Human
ugugggguccuuugaggcc

SEQ ID NO: 496557 - RNA, 22 nt, Human
uuccagggaugggaauuccugu

SEQ ID NO: 496558 - RNA, 22 nt, Human
uuccagggaugggaauuccugu

SEQ ID NO: 496559 - RNA, 24 nt, Human
uuccagggaugggaauuccuguga

SEQ ID NO: 496560 - RNA, 22 nt, Human
uugagggguuggaaucuaaggg

SEQ ID NO: 496561 - RNA, 23 nt, Human
uuggggugauauggaaaucuguu

SEQ ID NO: 496562 - RNA, 18 nt, Human
uuuggggacaugcaguga

SEQ ID NO: 496563 - RNA, 20 nt, Human
uuugucagguguccagggcc

SEQ ID NO: 496564 - RNA, 19 nt, Human
uuuguuaaugaaggaaguc

SEQ ID NO: 496565 - RNA, 21 nt, Human
aaaaacacaaaaagaugagug

SEQ ID NO: 496566 - RNA, 20 nt, Human
aacccccacccccuacacuc

SEQ ID NO: 496567 - RNA, 24 nt, Human
acucaacuaauugucaaccagaaa

SEQ ID NO: 496568 - RNA, 18 nt, Human
agaacccccacccccuac

SEQ ID NO: 496569 - RNA, 18 nt, Human
aggauggacccgagaugg

SEQ ID NO: 496570 - RNA, 25 nt, Human
aggccaugauggaaagugggaggug

SEQ ID NO: 496571 - RNA, 25 nt, Human
auaaguccuuugacucauaaggccu

SEQ ID NO: 496572 - RNA, 19 nt, Human
aucuugacaaaguguaaaa

SEQ ID NO: 496573 - RNA, 19 nt, Human
augcauguccauauccauu

SEQ ID NO: 496574 - RNA, 24 nt, Human
cacagucuauucucucugaagcuu

SEQ ID NO: 496575 - RNA, 23 nt, Human
caggaccuauaauuuuaaacuuc

SEQ ID NO: 496576 - RNA, 18 nt, Human
cccccacccccuacacuc

SEQ ID NO: 496577 - RNA, 18 nt, Human
cguaaaugaaaaugaaaa

SEQ ID NO: 496578 - RNA, 20 nt, Human
cuagaacccccacccccuac

SEQ ID NO: 496579 - RNA, 21 nt, Human
cuagaacccccacccccuaca

SEQ ID NO: 496580 - RNA, 22 nt, Human
cuagaacccccacccccuacac

SEQ ID NO: 496581 - RNA, 22 nt, Human
cucuggcauuaacauucacagu

SEQ ID NO: 496582 - RNA, 23 nt, Human
gaaaauucgaaggccccccacaa

SEQ ID NO: 496583 - RNA, 19 nt, Human
gagugaguuaacagagcug

SEQ ID NO: 496584 - RNA, 24 nt, Human
gccuagaacccccacccccuacac

SEQ ID NO: 496585 - RNA, 22 nt, Human
gucuauucucucugaagcuugc

SEQ ID NO: 496586 - RNA, 20 nt, Human
uaaaugcauguccauaucca

SEQ ID NO: 496587 - RNA, 22 nt, Human
uagccuagaacccccacccccu

SEQ ID NO: 496588 - RNA, 23 nt, Human
ucaggccaugauggaaaguggga

SEQ ID NO: 496589 - RNA, 21 nt, Human
ucgaaggccccccacaacuau

SEQ ID NO: 496590 - RNA, 20 nt, Human
ucguuuuuguuuauuggcuu

SEQ ID NO: 496591 - RNA, 21 nt, Human
ucucucugaagcuugcuaccu

SEQ ID NO: 496592 - RNA, 22 nt, Human
ugacucauaaggccuucagcca

SEQ ID NO: 496593 - RNA, 22 nt, Human
ugccucuggcaaaucuuggcca

SEQ ID NO: 496594 - RNA, 23 nt, Human
ugcuucauuauaccucucuggca

SEQ ID NO: 496595 - RNA, 25 nt, Human
uguuaaacaggaccuauaauuuuaa

SEQ ID NO: 496596 - RNA, 21 nt, Human
uuccucuuccuccaggguuca

SEQ ID NO: 496597 - RNA, 25 nt, Human
uuuauaaaccuacuguaccaaucac

SEQ ID NO: 496598 - RNA, 19 nt, Human
uuuugccuuuucguuuuug

SEQ ID NO: 496599 - RNA, 23 nt, Human
uuuuuuuuugccuuuucguuuuu

SEQ ID NO: 496600 - RNA, 19 nt, Human
uuuuuuuuuuuuuuuugcc

SEQ ID NO: 496601 - RNA, 18 nt, Human
uuuuuuuuuuuuuuuuug

SEQ ID NO: 496602 - RNA, 25 nt, Human
uuuuuuuuuuuuuuuuuugccuuuu

SEQ ID NO: 496603 - RNA, 25 nt, Human
aagucacacaaauaaaaucugaaau

SEQ ID NO: 496604 - RNA, 21 nt, Human
acaaauggaugaaacauucug

SEQ ID NO: 496605 - RNA, 21 nt, Human
accaaaagacaaguccaugaa

SEQ ID NO: 496606 - RNA, 24 nt, Human
accaacuccaucuuuugguccaca

SEQ ID NO: 496607 - RNA, 19 nt, Human
auaaaaaccaacuccaucu

SEQ ID NO: 496608 - RNA, 25 nt, Human
aucaccucucauuaaggcugcaccc

SEQ ID NO: 496609 - RNA, 24 nt, Human
aucacuuugauugcagaauaucac

SEQ ID NO: 496610 - RNA, 20 nt, Human
caaaggaaaacggaggggaa

SEQ ID NO: 496611 - RNA, 21 nt, Human
caaccucagguucccagcagc

SEQ ID NO: 496612 - RNA, 23 nt, Human
cacaaauggaugaaacauucugu

SEQ ID NO: 496613 - RNA, 18 nt, Human
cacagcagugaacaagaa

SEQ ID NO: 496614 - RNA, 23 nt, Human
cacuugggugccaggagaaggga

SEQ ID NO: 496615 - RNA, 20 nt, Human
cacuuugauugcagaauauc

SEQ ID NO: 496616 - RNA, 22 nt, Human
cagcuccguuggcaaggcuggg

SEQ ID NO: 496617 - RNA, 19 nt, Human
cagcuuaggaaucaccucu

SEQ ID NO: 496618 - RNA, 20 nt, Human
caguccucagacaaaauaca

SEQ ID NO: 496619 - RNA, 24 nt, Human
ccagccccugcucgggcggccgag

SEQ ID NO: 496620 - RNA, 21 nt, Human
ccgccugaccugaggagugag

SEQ ID NO: 496621 - RNA, 23 nt, Human
ccgcugcguuuucuacgccgccc

SEQ ID NO: 496622 - RNA, 23 nt, Human
ccucagguucccagcagcuuagg

SEQ ID NO: 496623 - RNA, 19 nt, Human
ccuccgacgccaagccgcc

SEQ ID NO: 496624 - RNA, 24 nt, Human
ccugccgccccuuugacaaccuca

SEQ ID NO: 496625 - RNA, 22 nt, Human
cgccaagccgcccaaaccuccc

SEQ ID NO: 496626 - RNA, 19 nt, Human
cgcccaaaccucccgagcg

SEQ ID NO: 496627 - RNA, 22 nt, Human
cgcccaaaccucccgagcgcag

SEQ ID NO: 496628 - RNA, 21 nt, Human
cgccugaccugaggagugagc

SEQ ID NO: 496629 - RNA, 20 nt, Human
cggccgagggcuccgcggcg

SEQ ID NO: 496630 - RNA, 19 nt, Human
cucccggcuagaggaacug

SEQ ID NO: 496631 - RNA, 24 nt, Human
cugaaauggagguuggaaacucag

SEQ ID NO: 496632 - RNA, 20 nt, Human
cugagacagacaggcugaaa

SEQ ID NO: 496633 - RNA, 20 nt, Human
cuggaauuucuaagucacac

SEQ ID NO: 496634 - RNA, 19 nt, Human
gacagacaggcugaaaugg

SEQ ID NO: 496635 - RNA, 23 nt, Human
gcacagcagugaacaagauaccc

SEQ ID NO: 496636 - RNA, 23 nt, Human
gcccgcggccccuucugcagcca

SEQ ID NO: 496637 - RNA, 22 nt, Human
ggguggggcucuccuccgacgc

SEQ ID NO: 496638 - RNA, 22 nt, Human
uaaaacauaaaccccaugacaa

SEQ ID NO: 496639 - RNA, 28 nt, Human
uaaaccccaugacaaaggaaaacggagg

SEQ ID NO: 496640 - RNA, 21 nt, Human
uaaaguagcacagcagugaac

SEQ ID NO: 496641 - RNA, 19 nt, Human
uacaucauuauaccauucu

SEQ ID NO: 496642 - RNA, 20 nt, Human
uacaucauuauaccauucua

SEQ ID NO: 496643 - RNA, 19 nt, Human
uacucauguaaaguagcac

SEQ ID NO: 496644 - RNA, 20 nt, Human
uagcacagcagugaacaaga

SEQ ID NO: 496645 - RNA, 23 nt, Human
uauaccauucuaaaccugguauc

SEQ ID NO: 496646 - RNA, 20 nt, Human
uccaaccaaaagacaagucc

SEQ ID NO: 496647 - RNA, 24 nt, Human
ucgggggccagccacggcggugcc

SEQ ID NO: 496648 - RNA, 18 nt, Human
ugaggagugagcuccgcc

SEQ ID NO: 496649 - RNA, 22 nt, Human
ugauugcagaauaucacuggaa

SEQ ID NO: 496650 - RNA, 18 nt, Human
ugguccacaaauggauga

SEQ ID NO: 496651 - RNA, 20 nt, Human
uuuucagcuccuccaaccuc

SEQ ID NO: 496652 - RNA, 23 nt, Human
uuuuuuuuuugacauuuguuucu

SEQ ID NO: 496653 - RNA, 25 nt, Human
aaggugccccugcucucacuuucug

SEQ ID NO: 496654 - RNA, 22 nt, Human
acuagagugcaguggcuauuca

SEQ ID NO: 496655 - RNA, 24 nt, Human
agcugggauuacaagugcccgcca

SEQ ID NO: 496656 - RNA, 21 nt, Human
agguccagcucauagcaguuc

SEQ ID NO: 496657 - RNA, 18 nt, Human
aguagcugggauuacaag

SEQ ID NO: 496658 - RNA, 20 nt, Human
caaccuuaaacuccugggcu

SEQ ID NO: 496659 - RNA, 22 nt, Human
caagcaauucuccugccucagc

SEQ ID NO: 496660 - RNA, 21 nt, Human
caagugcccgccaccacgccu

SEQ ID NO: 496661 - RNA, 19 nt, Human
cacagcuaucagguccagc

SEQ ID NO: 496662 - RNA, 22 nt, Human
caccacgccuggucugccaaua

SEQ ID NO: 496663 - RNA, 19 nt, Human
ccccaggagcugccugggc

SEQ ID NO: 496664 - RNA, 21 nt, Human
ccucagccuugggaguagcug

SEQ ID NO: 496665 - RNA, 23 nt, Human
ccugccucagccuugggaguagc

SEQ ID NO: 496666 - RNA, 23 nt, Human
ccugggcucaagcaauucuccug

SEQ ID NO: 496667 - RNA, 24 nt, Human
cucaagcaauucuccugccucagc

SEQ ID NO: 496668 - RNA, 21 nt, Human
cucacuuucugcacagcuauc

SEQ ID NO: 496669 - RNA, 24 nt, Human
cucagccuugggaguagcugggau

SEQ ID NO: 496670 - RNA, 21 nt, Human
cuccugggcucaagcaauucu

SEQ ID NO: 496671 - RNA, 23 nt, Human
cuccugggcucaagcaauucucc

SEQ ID NO: 496672 - RNA, 23 nt, Human
cucucacuuucugcacagcuauc

SEQ ID NO: 496673 - RNA, 23 nt, Human
cugccucagccuugggaguagcu

SEQ ID NO: 496674 - RNA, 21 nt, Human
cuuacguagaaaaggugcccc

SEQ ID NO: 496675 - RNA, 18 nt, Human
cuucucaguugggucaag

SEQ ID NO: 496676 - RNA, 22 nt, Human
gggcucaagcaauucuccugcc

SEQ ID NO: 496677 - RNA, 18 nt, Human
guagcugggauuacaagu

SEQ ID NO: 496678 - RNA, 24 nt, Human
uaaacuccugggcucaagcaauuc

SEQ ID NO: 496679 - RNA, 22 nt, Human
uacaagugcccgccaccacgcc

SEQ ID NO: 496680 - RNA, 23 nt, Human
uauguuccccagacuagagugca

SEQ ID NO: 496681 - RNA, 21 nt, Human
uccacugccccaggagcugcc

SEQ ID NO: 496682 - RNA, 21 nt, Human
uccugggcucaagcaauucuc

SEQ ID NO: 496683 - RNA, 22 nt, Human
uccugggcucaagcaauucucc

SEQ ID NO: 496684 - RNA, 24 nt, Human
uccugggcucaagcaauucuccug

SEQ ID NO: 496685 - RNA, 22 nt, Human
ucuccugccucagccuugggag

SEQ ID NO: 496686 - RNA, 21 nt, Human
ugaccuuucuguuacagcuug

SEQ ID NO: 496687 - RNA, 21 nt, Human
ugggauuacaagugcccgcca

SEQ ID NO: 496688 - RNA, 22 nt, Human
ugggauuacaagugcccgccac

SEQ ID NO: 496689 - RNA, 24 nt, Human
ugggauuacaagugcccgccacca

SEQ ID NO: 496690 - RNA, 24 nt, Human
ugggcucaagcaauucuccugccu

SEQ ID NO: 496691 - RNA, 22 nt, Human
uguuccccagacuagagugcag

SEQ ID NO: 496692 - RNA, 32 nt, Human
uuuuuuuuuuuugagauggcaggggucucaac

SEQ ID NO: 496693 - RNA, 25 nt, Human
uuuuuuuuuuuuugagauggcaggg

SEQ ID NO: 496694 - RNA, 23 nt, Human
aagccugcgccaggaaucucugg

SEQ ID NO: 496695 - RNA, 24 nt, Human
acaauaaacgggguggauuccaaa

SEQ ID NO: 496696 - RNA, 23 nt, Human
accucacuguguggccucaacuc

SEQ ID NO: 496697 - RNA, 20 nt, Human
agaaaugcugagucccaggc

SEQ ID NO: 496698 - RNA, 23 nt, Human
agggagcccaguguuuucacuuu

SEQ ID NO: 496699 - RNA, 18 nt, Human
agggcugggacucugcag

SEQ ID NO: 496700 - RNA, 18 nt, Human
augcuggaacugucuaug

SEQ ID NO: 496701 - RNA, 19 nt, Human
cacaaggacagcgguccag

SEQ ID NO: 496702 - RNA, 19 nt, Human
cacuguguggccucaacuc

SEQ ID NO: 496703 - RNA, 21 nt, Human
cagacugaaggcuccuagggg

SEQ ID NO: 496704 - RNA, 21 nt, Human
cagccgggcucuuccucuguc

SEQ ID NO: 496705 - RNA, 22 nt, Human
cagccgggcucuuccucugucc

SEQ ID NO: 496706 - RNA, 20 nt, Human
cauagcucugacaaccugcu

SEQ ID NO: 496707 - RNA, 19 nt, Human
caugguggcugaaagcugg

SEQ ID NO: 496708 - RNA, 20 nt, Human
ccacacguuuacuuuuaaaa

SEQ ID NO: 496709 - RNA, 26 nt, Human
ccagcugcccccucuaaugcuuuucu

SEQ ID NO: 496710 - RNA, 19 nt, Human
cccacagacuccacauagc

SEQ ID NO: 496711 - RNA, 21 nt, Human
ccuccggaagcacaguagucc

SEQ ID NO: 496712 - RNA, 25 nt, Human
ccuggccucgaacucgcgaaccggc

SEQ ID NO: 496713 - RNA, 19 nt, Human
ccugucuggacucucacag

SEQ ID NO: 496714 - RNA, 20 nt, Human
ccugucuggacucucacagu

SEQ ID NO: 496715 - RNA, 24 nt, Human
cgaaaggcccccgccucacucuga

SEQ ID NO: 496716 - RNA, 18 nt, Human
cggcugccccugccaccc

SEQ ID NO: 496717 - RNA, 20 nt, Human
cgggguggauuccaaacguc

SEQ ID NO: 496718 - RNA, 22 nt, Human
cucagcucugaccuucucugac

SEQ ID NO: 496719 - RNA, 21 nt, Human
cuccacauagcucugacaacc

SEQ ID NO: 496720 - RNA, 24 nt, Human
cuccuaggggauuccagcaccacc

SEQ ID NO: 496721 - RNA, 23 nt, Human
cucugacaaccugcuuuccugaa

SEQ ID NO: 496722 - RNA, 21 nt, Human
cugagucccaggccggggccc

SEQ ID NO: 496723 - RNA, 18 nt, Human
cugugaugcuggaacugu

SEQ ID NO: 496724 - RNA, 21 nt, Human
gaaaggcccccgccucacucu

SEQ ID NO: 496725 - RNA, 23 nt, Human
gaacucgcgaaccggcagcucaa

SEQ ID NO: 496726 - RNA, 22 nt, Human
gagcuuguccagcugcccccuc

SEQ ID NO: 496727 - RNA, 21 nt, Human
gagucccaggccggggcccug

SEQ ID NO: 496728 - RNA, 22 nt, Human
gcacaguaguccccguguguca

SEQ ID NO: 496729 - RNA, 22 nt, Human
gccucguuccuggguccuuuca

SEQ ID NO: 496730 - RNA, 20 nt, Human
gcucuguuucucccagacug

SEQ ID NO: 496731 - RNA, 24 nt, Human
ggagcuuguccagcugcccccucu

SEQ ID NO: 496732 - RNA, 18 nt, Human
guugggagcuuguccagc

SEQ ID NO: 496733 - RNA, 22 nt, Human
uaaaaugcccuuuccgcaagga

SEQ ID NO: 496734 - RNA, 23 nt, Human
uagcucugacaaccugcuuuccu

SEQ ID NO: 496735 - RNA, 21 nt, Human
uaggggauuccagcaccacca

SEQ ID NO: 496736 - RNA, 18 nt, Human
uaucagaaaugcugaguc

SEQ ID NO: 496737 - RNA, 18 nt, Human
ucacucagcucugaccuu

SEQ ID NO: 496738 - RNA, 21 nt, Human
ucccagacugaaggcuccuag

SEQ ID NO: 496739 - RNA, 22 nt, Human
ucccaggccggggcccugcccc

SEQ ID NO: 496740 - RNA, 19 nt, Human
ucucacaguugcaggucuc

SEQ ID NO: 496741 - RNA, 22 nt, Human
ucucccagacugaaggcuccua

SEQ ID NO: 496742 - RNA, 26 nt, Human
ucuggcucuguuucucccagacugaa

SEQ ID NO: 496743 - RNA, 27 nt, Human
ugcccccucuaaugcuuuucuccucca

SEQ ID NO: 496744 - RNA, 22 nt, Human
ugccugcugagcuccuauucgu

SEQ ID NO: 496745 - RNA, 20 nt, Human
ugcuuccugucuggacucuc

SEQ ID NO: 496746 - RNA, 18 nt, Human
ugcuuuccugaacgccuc

SEQ ID NO: 496747 - RNA, 19 nt, Human
uggagcggcugccccugcc

SEQ ID NO: 496748 - RNA, 19 nt, Human
uggaggagcucccaggaag

SEQ ID NO: 496749 - RNA, 24 nt, Human
uggguacuuggaggagcucccagg

SEQ ID NO: 496750 - RNA, 25 nt, Human
uggguccuuucacccaccagaccuc

SEQ ID NO: 496751 - RNA, 23 nt, Human
ugucuggacucucacaguugcag

SEQ ID NO: 496752 - RNA, 23 nt, Human
uuccucugucccaugugauaucc

SEQ ID NO: 496753 - RNA, 21 nt, Human
uuccugaacgccucguuccug

SEQ ID NO: 496754 - RNA, 22 nt, Human
uuccuggguccuuucacccacc

SEQ ID NO: 496755 - RNA, 23 nt, Human
uugcaggucucuucuucugguuc

SEQ ID NO: 496756 - RNA, 19 nt, Human
aacaaacccuggccugccc

SEQ ID NO: 496757 - RNA, 21 nt, Human
aacccacccccucggcaacgc

SEQ ID NO: 496758 - RNA, 21 nt, Human
acagacagcgccuccacaaac

SEQ ID NO: 496759 - RNA, 21 nt, Human
acccccgcccaacccaccccc

SEQ ID NO: 496760 - RNA, 26 nt, Human
agagggacagacagcgccuccacaaa

SEQ ID NO: 496761 - RNA, 22 nt, Human
agcgccuccacaaacaaacccu

SEQ ID NO: 496762 - RNA, 21 nt, Human
agggaggggaggcgagggggc

SEQ ID NO: 496763 - RNA, 20 nt, Human
aggggggcccggccccaccc

SEQ ID NO: 496764 - RNA, 21 nt, Human
caaacaaacccuggccugccc

SEQ ID NO: 496765 - RNA, 27 nt, Human
caacccacccccucggcaacgcugcau

SEQ ID NO: 496766 - RNA, 19 nt, Human
cacccccgcccaacccacc

SEQ ID NO: 496767 - RNA, 21 nt, Human
cacccccgcccaacccacccc

SEQ ID NO: 496768 - RNA, 22 nt, Human
cacccccgcccaacccaccccc

SEQ ID NO: 496769 - RNA, 23 nt, Human
cagacagcgccuccacaaacaaa

SEQ ID NO: 496770 - RNA, 22 nt, Human
ccacaaacaaacccuggccugc

SEQ ID NO: 496771 - RNA, 20 nt, Human
ccagacuguguuaaagggcg

SEQ ID NO: 496772 - RNA, 19 nt, Human
cccaguggugcugggcugg

SEQ ID NO: 496773 - RNA, 26 nt, Human
cccccucggcaacgcugcaucagcuu

SEQ ID NO: 496774 - RNA, 22 nt, Human
ccccgcccaacccacccccucg

SEQ ID NO: 496775 - RNA, 18 nt, Human
ccccucggcaacgcugca

SEQ ID NO: 496776 - RNA, 22 nt, Human
cccgcccaacccacccccucgg

SEQ ID NO: 496777 - RNA, 21 nt, Human
cccggccccacccccgcccaa

SEQ ID NO: 496778 - RNA, 22 nt, Human
cccggccccacccccgcccaac

SEQ ID NO: 496779 - RNA, 21 nt, Human
cccugaccugaggcgggccuc

SEQ ID NO: 496780 - RNA, 19 nt, Human
cccuggccugccccggccc

SEQ ID NO: 496781 - RNA, 21 nt, Human
ccucccaccgccccggccuga

SEQ ID NO: 496782 - RNA, 23 nt, Human
ccugaucuguccagggaaagggc

SEQ ID NO: 496783 - RNA, 21 nt, Human
cggcaacgcugcaucagcuuc

SEQ ID NO: 496784 - RNA, 18 nt, Human
gagccggagcaggugagg

SEQ ID NO: 496785 - RNA, 23 nt, Human
gagccggagcaggugaggaccag

SEQ ID NO: 496786 - RNA, 19 nt, Human
gccccacccccgcccaacc

SEQ ID NO: 496787 - RNA, 21 nt, Human
gccuccacaaacaaacccugg

SEQ ID NO: 496788 - RNA, 19 nt, Human
gcuggaaacacagagggac

SEQ ID NO: 496789 - RNA, 22 nt, Human
ggaaacacagagggacagaggg

SEQ ID NO: 496790 - RNA, 18 nt, Human
ggccccacccccgcccaa

SEQ ID NO: 496791 - RNA, 20 nt, Human
gggacagagggacagacagc

SEQ ID NO: 496792 - RNA, 24 nt, Human
gggagugugguagggggacgaggg

SEQ ID NO: 496793 - RNA, 18 nt, Human
gggcccggccccaccccc

SEQ ID NO: 496794 - RNA, 18 nt, Human
gggcgacagggaggggag

SEQ ID NO: 496795 - RNA, 19 nt, Human
ggguaguggucgccaggag

SEQ ID NO: 496796 - RNA, 21 nt, Human
ggucuaggagggggagugugg

SEQ ID NO: 496797 - RNA, 19 nt, Human
uaggagggggaguguggua

SEQ ID NO: 496798 - RNA, 21 nt, Human
uccacaaacaaacccuggccu

SEQ ID NO: 496799 - RNA, 21 nt, Human
ucgccaggagccggagcaggu

SEQ ID NO: 496800 - RNA, 18 nt, Human
ugcugggcuggcagggcg

SEQ ID NO: 496801 - RNA, 22 nt, Human
uuuuuugaguuuaaguuaaaca

SEQ ID NO: 496802 - RNA, 24 nt, Human
uuuuuuuuuuuuuuuuuugaguuu

SEQ ID NO: 496803 - RNA, 20 nt, Human
uuuuuuuuuuuuuuuuuugg

SEQ ID NO: 496804 - RNA, 21 nt, Human
aaaacugaaccaaaauaaugu

SEQ ID NO: 496805 - RNA, 18 nt, Human
aucugauucuucuccuaa

SEQ ID NO: 496806 - RNA, 24 nt, Human
ccuuuaauaucagacuguagagac

SEQ ID NO: 496807 - RNA, 23 nt, Human
ggaaaagcuguauauacaagaca

SEQ ID NO: 496808 - RNA, 26 nt, Human
guuacaauuauauacaugaucugauu

SEQ ID NO: 496809 - RNA, 25 nt, Human
uaaaaaacugaaccaaaagacaagu

SEQ ID NO: 496810 - RNA, 23 nt, Human
uaauguacauuuuaucucuaaac

SEQ ID NO: 496811 - RNA, 21 nt, Human
uacaagacagcaauaugacag

SEQ ID NO: 496812 - RNA, 21 nt, Human
uauauacaagacagcaauaug

SEQ ID NO: 496813 - RNA, 23 nt, Human
uccaaugccuuuaauaucagacu

SEQ ID NO: 496814 - RNA, 24 nt, Human
ucuccuaaaggcuucucugaccau

SEQ ID NO: 496815 - RNA, 18 nt, Human
ugauauccaagauagauc

SEQ ID NO: 496816 - RNA, 21 nt, Human
ugugucauuaaaguccauaua

SEQ ID NO: 496817 - RNA, 23 nt, Human
uguuacaauuauauacaugaucu

SEQ ID NO: 496818 - RNA, 23 nt, Human
uuaaaaaacugaaccaaaauaau

SEQ ID NO: 496819 - RNA, 23 nt, Human
uuaaaguccauauaacaucuucc

SEQ ID NO: 496820 - RNA, 23 nt, Human
uucucugaccauguaugauaucc

SEQ ID NO: 496821 - RNA, 24 nt, Human
uuuaaagaauuuauuuucccauuu

SEQ ID NO: 496822 - RNA, 22 nt, Human
aagcagcagcgggcgguggccc

SEQ ID NO: 496823 - RNA, 19 nt, Human
agagaggggcucgcaggcg

SEQ ID NO: 496824 - RNA, 20 nt, Human
agaggggcucgcaggcggcc

SEQ ID NO: 496825 - RNA, 24 nt, Human
agcagcagcgggcgguggcccugg

SEQ ID NO: 496826 - RNA, 22 nt, Human
agccagggggacacaggcgggg

SEQ ID NO: 496827 - RNA, 18 nt, Human
aggccuccuucugcccaa

SEQ ID NO: 496828 - RNA, 18 nt, Human
agggggacacaggcgggg

SEQ ID NO: 496829 - RNA, 19 nt, Human
caaaagcagcagcgggcgg

SEQ ID NO: 496830 - RNA, 21 nt, Human
cacugcagggcaaagggggac

SEQ ID NO: 496831 - RNA, 20 nt, Human
cagcacaaaagcagcagcgg

SEQ ID NO: 496832 - RNA, 19 nt, Human
cagcagcgggcgguggccc

SEQ ID NO: 496833 - RNA, 21 nt, Human
caggccccggagcgcaaaggg

SEQ ID NO: 496834 - RNA, 21 nt, Human
cccaccggcccucaaccugcu

SEQ ID NO: 496835 - RNA, 18 nt, Human
ccccggagcgcaaagccu

SEQ ID NO: 496836 - RNA, 19 nt, Human
ccggcccucaaccugcugc

SEQ ID NO: 496837 - RNA, 21 nt, Human
ccucaaccugcugcucucaga

SEQ ID NO: 496838 - RNA, 18 nt, Human
ccuccgagcugcugccca

SEQ ID NO: 496839 - RNA, 19 nt, Human
ccuccuucugcccaagguc

SEQ ID NO: 496840 - RNA, 20 nt, Human
ccugcgucuccugcaccucg

SEQ ID NO: 496841 - RNA, 22 nt, Human
ccuuccucccagggggaggcag

SEQ ID NO: 496842 - RNA, 19 nt, Human
cugcucucagagcucgugg

SEQ ID NO: 496843 - RNA, 20 nt, Human
gagccuccgagcugcugccc

SEQ ID NO: 496844 - RNA, 19 nt, Human
gagcgcagccagggggaca

SEQ ID NO: 496845 - RNA, 25 nt, Human
gcagcagcgggcgguggcccugaag

SEQ ID NO: 496846 - RNA, 19 nt, Human
gccccggagcgcaaagccu

SEQ ID NO: 496847 - RNA, 18 nt, Human
ggucugaaggcagagagg

SEQ ID NO: 496848 - RNA, 19 nt, Human
uauuuagaucaaugcgggg

SEQ ID NO: 496849 - RNA, 25 nt, Human
ucagagcgcagccagggggacacag

SEQ ID NO: 496850 - RNA, 25 nt, Human
ucagagcucgugguccagagugcag

SEQ ID NO: 496851 - RNA, 25 nt, Human
ucuccugcaccucgcggagccuccg

SEQ ID NO: 496852 - RNA, 19 nt, Human
ugaaggcagagaggggcuc

SEQ ID NO: 496853 - RNA, 19 nt, Human
ugguccagagugcaggcag

SEQ ID NO: 496854 - RNA, 21 nt, Human
aagcagcugagacuccuaugc

SEQ ID NO: 496855 - RNA, 24 nt, Human
acuugaaaagaugucccucccagg

SEQ ID NO: 496856 - RNA, 20 nt, Human
agagagaggcacuccacaau

SEQ ID NO: 496857 - RNA, 21 nt, Human
agggauugaguuaggggaguu

SEQ ID NO: 496858 - RNA, 18 nt, Human
aucccaucucagguggcu

SEQ ID NO: 496859 - RNA, 25 nt, Human
cagcugagacuccuaugcugcagcc

SEQ ID NO: 496860 - RNA, 19 nt, Human
cccucucucaccaugcccc

SEQ ID NO: 496861 - RNA, 26 nt, Human
ccuaugcugcagccccguccuagaga

SEQ ID NO: 496862 - RNA, 21 nt, Human
ccucucucaccaugccccaac

SEQ ID NO: 496863 - RNA, 20 nt, Human
ccugcuaagacccucucuca

SEQ ID NO: 496864 - RNA, 22 nt, Human
ccugcuaagacccucucucacc

SEQ ID NO: 496865 - RNA, 24 nt, Human
ccuggaccuggauguaagcagcug

SEQ ID NO: 496866 - RNA, 22 nt, Human
cucaccaugccccaacacagcc

SEQ ID NO: 496867 - RNA, 20 nt, Human
gauuccucagucuggagagg

SEQ ID NO: 496868 - RNA, 19 nt, Human
guaucccaucucagguggc

SEQ ID NO: 496869 - RNA, 22 nt, Human
ucagucuggagaggaaaggaag

SEQ ID NO: 496870 - RNA, 19 nt, Human
uccacaaucagaacucuga

SEQ ID NO: 496871 - RNA, 21 nt, Human
uccacaaucagaacucugauu

SEQ ID NO: 496872 - RNA, 23 nt, Human
ugagacuccuaugcugcagcccc

SEQ ID NO: 496873 - RNA, 25 nt, Human
uggcugggccauuagugccauuucc

SEQ ID NO: 496874 - RNA, 18 nt, Human
uuuuuuuuuuuuuuuuug

SEQ ID NO: 496875 - RNA, 31 nt, Human; identical to SEQ ID NO: 314735

SEQ ID NO: 496876 - RNA, 22 nt, Human
aaaccgagguggccgggggcac

SEQ ID NO: 496877 - RNA, 21 nt, Human
aagcaaagcagcagggcuccu

SEQ ID NO: 496878 - RNA, 18 nt, Human
aagcagcagggcuccugg

SEQ ID NO: 496879 - RNA, 21 nt, Human
aagcagcagggcuccuggggg

SEQ ID NO: 496880 - RNA, 18 nt, Human
acacaguaccccccaucc

SEQ ID NO: 496881 - RNA, 22 nt, Human
acaugcacuaguuuggaaaaaa

SEQ ID NO: 496882 - RNA, 22 nt, Human
accaagcaaagcagcagggcuc

SEQ ID NO: 496883 - RNA, 25 nt, Human
accccgcaccccacaccaaauuagg

SEQ ID NO: 496884 - RNA, 23 nt, Human
acccgcuccuccuucuccacccc

SEQ ID NO: 496885 - RNA, 20 nt, Human
acccggcagcgggcgcgcgc

SEQ ID NO: 496886 - RNA, 18 nt, Human
acccggcgggaagagccc

SEQ ID NO: 496887 - RNA, 19 nt, Human
acccggggacccgcuccuc

SEQ ID NO: 496888 - RNA, 23 nt, Human
agaccugagcaggggcuggggcg

SEQ ID NO: 496889 - RNA, 22 nt, Human
agcacagccaccaguguccuca

SEQ ID NO: 496890 - RNA, 23 nt, Human
agcaggggcuggggcggggcugg

SEQ ID NO: 496891 - RNA, 21 nt, Human
agcagugcggcccaggacccu

SEQ ID NO: 496892 - RNA, 21 nt, Human
agcccggggcgggagcggcag

SEQ ID NO: 496893 - RNA, 24 nt, Human
agcggccgggaggggcccggggga

SEQ ID NO: 496894 - RNA, 21 nt, Human
agcugcugucggaggaggagu

SEQ ID NO: 496895 - RNA, 25 nt, Human
aggagagaacaggcuguuuuggaaa

SEQ ID NO: 496896 - RNA, 28 nt, Human
aggcagcggcagcaacuaagauggcggc

SEQ ID NO: 496897 - RNA, 22 nt, Human
aggggcccgggggacuguaucc

SEQ ID NO: 496898 - RNA, 21 nt, Human
aggggcuggggcggggcuggg

SEQ ID NO: 496899 - RNA, 19 nt, Human
aucguggacccuugggacu

SEQ ID NO: 496900 - RNA, 20 nt, Human
augcacuaguuuggaaaaaa

SEQ ID NO: 496901 - RNA, 23 nt, Human
auggcagggggugcucuggggag

SEQ ID NO: 496902 - RNA, 19 nt, Human
caaaaugauugcccaccug

SEQ ID NO: 496903 - RNA, 21 nt, Human
caccaagcaaagcagcagggc

SEQ ID NO: 496904 - RNA, 19 nt, Human
caccccacaccaaauuagg

SEQ ID NO: 496905 - RNA, 22 nt, Human
caccuacuggccgaaaugacuu

SEQ ID NO: 496906 - RNA, 23 nt, Human
cacuagcacaaaggacacaagga

SEQ ID NO: 496907 - RNA, 22 nt, Human
cagcaacuaagauggcggcggc

SEQ ID NO: 496908 - RNA, 18 nt, Human
cagcacagcuagaggccu

SEQ ID NO: 496909 - RNA, 22 nt, Human
cagggaccccgcaccccacacc

SEQ ID NO: 496910 - RNA, 22 nt, Human
caguagagguguugagaggggu

SEQ ID NO: 496911 - RNA, 18 nt, Human
cagugcggcccaggaccc

SEQ ID NO: 496912 - RNA, 22 nt, Human
cauagcacagccaccagugucc

SEQ ID NO: 496913 - RNA, 20 nt, Human
cauguaacuaagagcaaagu

SEQ ID NO: 496914 - RNA, 18 nt, Human
ccacacauagcacagcca

SEQ ID NO: 496915 - RNA, 21 nt, Human
ccacaccaaauuaggaacagg

SEQ ID NO: 496916 - RNA, 19 nt, Human
ccaccaagcaaagcagcag

SEQ ID NO: 496917 - RNA, 23 nt, Human
ccaccaguguccucagaacuagc

SEQ ID NO: 496918 - RNA, 19 nt, Human
ccagccauacucagaccug

SEQ ID NO: 496919 - RNA, 21 nt, Human
ccagucccggguuacacuagc

SEQ ID NO: 496920 - RNA, 21 nt, Human
ccccacaccaaauuaggaaca

SEQ ID NO: 496921 - RNA, 21 nt, Human
cccccagaaccucgggguccu

SEQ ID NO: 496922 - RNA, 22 nt, Human
ccccgccuggagcgcgcgcccg

SEQ ID NO: 496923 - RNA, 24 nt, Human
cccgaggacucauccuucccaccc

SEQ ID NO: 496924 - RNA, 21 nt, Human
cccgcuccgccgaggagcgca

SEQ ID NO: 496925 - RNA, 24 nt, Human
cccuacgcgcgcucccgggcuccu

SEQ ID NO: 496926 - RNA, 22 nt, Human
ccgagcccgucggccccgccug

SEQ ID NO: 496927 - RNA, 18 nt, Human
ccgccgccgccgccgccg

SEQ ID NO: 496928 - RNA, 21 nt, Human
ccgccgccgccgccgccguga

SEQ ID NO: 496929 - RNA, 18 nt, Human
ccgccgccgccgugacgc

SEQ ID NO: 496930 - RNA, 21 nt, Human
ccgcuccuccuucuccacccc

SEQ ID NO: 496931 - RNA, 18 nt, Human
ccucaacuccgcgucccu

SEQ ID NO: 496932 - RNA, 20 nt, Human
ccuccugccgucuccaaaaa

SEQ ID NO: 496933 - RNA, 21 nt, Human
ccucgggguccucgucucccc

SEQ ID NO: 496934 - RNA, 25 nt, Human
ccucgggguccucgucuccccagua

SEQ ID NO: 496935 - RNA, 22 nt, Human
ccugagcaggggcuggggcggg

SEQ ID NO: 496936 - RNA, 26 nt, Human
ccuggccgcagauggagagccucaac

SEQ ID NO: 496937 - RNA, 24 nt, Human
ccuucccacccgcuccgccgagga

SEQ ID NO: 496938 - RNA, 20 nt, Human
cgaccaggcagagggugggc

SEQ ID NO: 496939 - RNA, 19 nt, Human
cgacgcgaggcgcgcgcgc

SEQ ID NO: 496940 - RNA, 21 nt, Human
cgacgcgaggcgcgcgcgcgg

SEQ ID NO: 496941 - RNA, 19 nt, Human
cgagguggccgggggcacg

SEQ ID NO: 496942 - RNA, 20 nt, Human
cgccccccagaaccucgggg

SEQ ID NO: 496943 - RNA, 20 nt, Human
cgccccccagaaccucgggg

SEQ ID NO: 496944 - RNA, 23 nt, Human
cgccgccgccgccgccgugacgc

SEQ ID NO: 496945 - RNA, 19 nt, Human
cgccgugacgcugggccgc

SEQ ID NO: 496946 - RNA, 22 nt, Human
cgccuccgagcccgucggcccc

SEQ ID NO: 496947 - RNA, 23 nt, Human
cgcgcgcggcggacccugggagc

SEQ ID NO: 496948 - RNA, 20 nt, Human
cggagggagcgcgcgcggcg

SEQ ID NO: 496949 - RNA, 18 nt, Human
cggcagggaggcgcgcgg

SEQ ID NO: 496950 - RNA, 18 nt, Human
cggcggacccugggagcg

SEQ ID NO: 496951 - RNA, 21 nt, Human
cguucugaguacggaucgcuc

SEQ ID NO: 496952 - RNA, 21 nt, Human
cuacacaguaccccccauccu

SEQ ID NO: 496953 - RNA, 19 nt, Human
cuagaggccuguggccccc

SEQ ID NO: 496954 - RNA, 19 nt, Human
cucaacuccgcgucccuac

SEQ ID NO: 496955 - RNA, 19 nt, Human
cucagaccugagcaggggc

SEQ ID NO: 496956 - RNA, 19 nt, Human
cuccugggggagagggauu

SEQ ID NO: 496957 - RNA, 23 nt, Human
cucgggguccucgucuccuaagg

SEQ ID NO: 496958 - RNA, 19 nt, Human
cucucccucuggggucugg

SEQ ID NO: 496959 - RNA, 24 nt, Human
cucucggggcucuaggggccuggg

SEQ ID NO: 496960 - RNA, 21 nt, Human
cugcacacggugagaccaggc

SEQ ID NO: 496961 - RNA, 21 nt, Human
cuggccgcagauggagagccu

SEQ ID NO: 496962 - RNA, 19 nt, Human
cuggggccagcugcuccga

SEQ ID NO: 496963 - RNA, 21 nt, Human
cuggggcggggcugggcgggg

SEQ ID NO: 496964 - RNA, 27 nt, Human
cuggggcggggcugggcggggugggcc

SEQ ID NO: 496965 - RNA, 18 nt, Human
gaccccgcaccccacacc

SEQ ID NO: 496966 - RNA, 20 nt, Human
gacccgcuccuccuucucca

SEQ ID NO: 496967 - RNA, 21 nt, Human
gacccgcuccuccuucuccac

SEQ ID NO: 496968 - RNA, 24 nt, Human
gacccgcuccuccuucuccacccc

SEQ ID NO: 496969 - RNA, 23 nt, Human
gacucauccuucccacccgcucc

SEQ ID NO: 496970 - RNA, 20 nt, Human
gacuucgggccaugcgucuc

SEQ ID NO: 496971 - RNA, 20 nt, Human
gagcccgugcucagagcucc

SEQ ID NO: 496972 - RNA, 18 nt, Human
gagcggccgggaggggcc

SEQ ID NO: 496973 - RNA, 20 nt, Human
gaggaggaguguggaaaagg

SEQ ID NO: 496974 - RNA, 24 nt, Human
gaguguggaaaaggggccagggac

SEQ ID NO: 496975 - RNA, 26 nt, Human
gcaaagcagcagggcuccugggggag

SEQ ID NO: 496976 - RNA, 18 nt, Human
gccacugcccagggagcu

SEQ ID NO: 496977 - RNA, 21 nt, Human
gccacugcccagggagcugcu

SEQ ID NO: 496978 - RNA, 22 nt, Human
gccgcagauggagagccucaac

SEQ ID NO: 496979 - RNA, 19 nt, Human
gccgccgccgccgccgccg

SEQ ID NO: 496980 - RNA, 18 nt, Human
gccgugacgcugggccgc

SEQ ID NO: 496981 - RNA, 22 nt, Human
gccucucccucuggggucuggg

SEQ ID NO: 496982 - RNA, 24 nt, Human
gccuggagcgcgcgcccgcggggg

SEQ ID NO: 496983 - RNA, 18 nt, Human
gccuggggccagcugcuc

SEQ ID NO: 496984 - RNA, 19 nt, Human
gcgcggcggacccugggag

SEQ ID NO: 496985 - RNA, 19 nt, Human
gcggacccggcagcgggcg

SEQ ID NO: 496986 - RNA, 19 nt, Human
gcggcgggaggggcgggga

SEQ ID NO: 496987 - RNA, 22 nt, Human
gcggggcugggcggggugggcc

SEQ ID NO: 496988 - RNA, 18 nt, Human
ggacgcggcgcccucccc

SEQ ID NO: 496989 - RNA, 20 nt, Human
ggagcugcugucggaggagg

SEQ ID NO: 496990 - RNA, 26 nt, Human
ggaggccccugugcgagccggauggc

SEQ ID NO: 496991 - RNA, 24 nt, Human
ggagugagcauguuuuacccuuug

SEQ ID NO: 496992 - RNA, 18 nt, Human
ggccgggugagcgguacc

SEQ ID NO: 496993 - RNA, 20 nt, Human
gggagggaggacccggcggg

SEQ ID NO: 496994 - RNA, 24 nt, Human
gggcggggcugggcggggugggcc

SEQ ID NO: 496995 - RNA, 23 nt, Human
gggcgggguggcggcgggagggg

SEQ ID NO: 496996 - RNA, 24 nt, Human
gggcgggguggcggcgggaggggc

SEQ ID NO: 496997 - RNA, 18 nt, Human
gggcucuaggggccuggg

SEQ ID NO: 496998 - RNA, 21 nt, Human
gggcugggcggggugggccuc

SEQ ID NO: 496999 - RNA, 20 nt, Human
gggcuggggcggggcugggc

SEQ ID NO: 497000 - RNA, 18 nt, Human
ggggagaggagcggaggg

SEQ ID NO: 497001 - RNA, 23 nt, Human
ggggaggagagaggagagaacag

SEQ ID NO: 497002 - RNA, 21 nt, Human
ggggcuggggcggggcugggc

SEQ ID NO: 497003 - RNA, 19 nt, Human
gggggcgggguggcggcgg

SEQ ID NO: 497004 - RNA, 22 nt, Human
gggguggcggcgggaggggcgg

SEQ ID NO: 497005 - RNA, 21 nt, Human
gggucuggggagggaggaccc

SEQ ID NO: 497006 - RNA, 20 nt, Human
gggugggagugagcauguuu

SEQ ID NO: 497007 - RNA, 21 nt, Human
ggucugcaggacaccucucag

SEQ ID NO: 497008 - RNA, 18 nt, Human
guggcccccgacucccag

SEQ ID NO: 497009 - RNA, 23 nt, Human
uaagcauaaaccacaaggcugca

SEQ ID NO: 497010 - RNA, 21 nt, Human
uaaggccgggugagcgguacc

SEQ ID NO: 497011 - RNA, 22 nt, Human
uacacaguaccccccauccugg

SEQ ID NO: 497012 - RNA, 22 nt, Human
uagcacagccaccaguguccuc

SEQ ID NO: 497013 - RNA, 21 nt, Human
uagcagucagggucacagaac

SEQ ID NO: 497014 - RNA, 18 nt, Human
uaggggccuggggccagc

SEQ ID NO: 497015 - RNA, 21 nt, Human
uauuaaaaagucaguuaauca

SEQ ID NO: 497016 - RNA, 21 nt, Human
uccucgucuccccaguagagg

SEQ ID NO: 497017 - RNA, 22 nt, Human
uccugcccuaccaccaagcaaa

SEQ ID NO: 497018 - RNA, 22 nt, Human
ucgggguccucgucuccccagu

SEQ ID NO: 497019 - RNA, 24 nt, Human
ucuccugcccuaccaccaagcaaa

SEQ ID NO: 497020 - RNA, 23 nt, Human
ucucucucggguccggcgagggu

SEQ ID NO: 497021 - RNA, 20 nt, Human
ucuggggaggagagaggagg

SEQ ID NO: 497022 - RNA, 18 nt, Human
ucuggggagggaggaccc

SEQ ID NO: 497023 - RNA, 25 nt, Human
ugaaggcagcggcagcaacuaagau

SEQ ID NO: 497024 - RNA, 18 nt, Human
ugagaccaggccacugcc

SEQ ID NO: 497025 - RNA, 19 nt, Human
ugagaccaggccacugccc

SEQ ID NO: 497026 - RNA, 21 nt, Human
ugagaggggucacgaaagggg

SEQ ID NO: 497027 - RNA, 18 nt, Human
ugaguauacacaucugcg

SEQ ID NO: 497028 - RNA, 26 nt, Human
ugauggcagggggugcucuggggagg

SEQ ID NO: 497029 - RNA, 21 nt, Human
ugcccagggagcugcugucgg

SEQ ID NO: 497030 - RNA, 22 nt, Human
ugcggcccaggacccuugucac

SEQ ID NO: 497031 - RNA, 20 nt, Human
uggcagggggugcucugggg

SEQ ID NO: 497032 - RNA, 19 nt, Human
uggcccccgacucccagcc

SEQ ID NO: 497033 - RNA, 18 nt, Human
uggggaggagagaggaga

SEQ ID NO: 497034 - RNA, 24 nt, Human
uggggagggaggacccggcgggac

SEQ ID NO: 497035 - RNA, 20 nt, Human
uggggcggggcugggcgggg

SEQ ID NO: 497036 - RNA, 22 nt, Human
uggggcggggcugggcggggug

SEQ ID NO: 497037 - RNA, 18 nt, Human
ugucaacgagcccagcug

SEQ ID NO: 497038 - RNA, 19 nt, Human
uucaaccccccugauggca

SEQ ID NO: 497039 - RNA, 23 nt, Human
aaaggcucuccaagcuggggaac

SEQ ID NO: 497040 - RNA, 18 nt, Human
aagcaaccuggagucagc

SEQ ID NO: 497041 - RNA, 22 nt, Human
aagggaccauaaggcugagugg

SEQ ID NO: 497042 - RNA, 24 nt, Human
acaaacauguucucagagcuucgu

SEQ ID NO: 497043 - RNA, 18 nt, Human
acuccacccaccaugaag

SEQ ID NO: 497044 - RNA, 21 nt, Human
acuuagggcagaaguggaggc

SEQ ID NO: 497045 - RNA, 20 nt, Human
agaagaaagaagaagcugca

SEQ ID NO: 497046 - RNA, 22 nt, Human
agaccaguuacuauagaaacaa

SEQ ID NO: 497047 - RNA, 21 nt, Human
agagggaagauaggagauaag

SEQ ID NO: 497048 - RNA, 19 nt, Human
agcagaagaaagaagaagc

SEQ ID NO: 497049 - RNA, 20 nt, Human
aggaggagugaaggaugggg

SEQ ID NO: 497050 - RNA, 18 nt, Human
aggauggagauggaaaag

SEQ ID NO: 497051 - RNA, 20 nt, Human
agugaaggauggggacagag

SEQ ID NO: 497052 - RNA, 27 nt, Human
aguuacuauagaaacaauucucuucac

SEQ ID NO: 497053 - RNA, 20 nt, Human
auagaaacaauucucuucac

SEQ ID NO: 497054 - RNA, 20 nt, Human
auagacaugggcauacacug

SEQ ID NO: 497055 - RNA, 18 nt, Human
aucagacccugcuugugg

SEQ ID NO: 497056 - RNA, 20 nt, Human
augaagccuacguuugaccu

SEQ ID NO: 497057 - RNA, 22 nt, Human
augagcagaagaaagaagaagc

SEQ ID NO: 497058 - RNA, 24 nt, Human
caaaggcaaacucugcagacaggu

SEQ ID NO: 497059 - RNA, 21 nt, Human
cacagguugugcauguuagga

SEQ ID NO: 497060 - RNA, 19 nt, Human
cacccccacuccacccacc

SEQ ID NO: 497061 - RNA, 20 nt, Human
cacccccacuccacccacca

SEQ ID NO: 497062 - RNA, 20 nt, Human
cagccacccccacuccaccc

SEQ ID NO: 497063 - RNA, 20 nt, Human
caggaugcuggggaacuuag

SEQ ID NO: 497064 - RNA, 18 nt, Human
caggcucagauagcucug

SEQ ID NO: 497065 - RNA, 18 nt, Human
cagggagugcccaaggcu

SEQ ID NO: 497066 - RNA, 20 nt, Human
ccacaaaagaucacagacca

SEQ ID NO: 497067 - RNA, 19 nt, Human
ccacccccacuccacccac

SEQ ID NO: 497068 - RNA, 23 nt, Human
cccagccacccccacuccaccca

SEQ ID NO: 497069 - RNA, 24 nt, Human
cccagccacccccacuccacccac

SEQ ID NO: 497070 - RNA, 21 nt, Human
ccccacuccacccaccaugaa

SEQ ID NO: 497071 - RNA, 20 nt, Human
ccccagggccuuggggacuc

SEQ ID NO: 497072 - RNA, 21 nt, Human
ccccauggaugaaacacaggg

SEQ ID NO: 497073 - RNA, 21 nt, Human
ccuacguuugaccucauuagc

SEQ ID NO: 497074 - RNA, 18 nt, Human
ccuggagucagcauagga

SEQ ID NO: 497075 - RNA, 22 nt, Human
ccuguguggaaugccuccuggg

SEQ ID NO: 497076 - RNA, 23 nt, Human
ccuuggggacucugagccugggg

SEQ ID NO: 497077 - RNA, 27 nt, Human
ccuuuuaugagcagaagaaagaagaag

SEQ ID NO: 497078 - RNA, 22 nt, Human
cuagggaccagcucugugccug

SEQ ID NO: 497079 - RNA, 22 nt, Human
cucagaaagaagcaaggggaaa

SEQ ID NO: 497080 - RNA, 19 nt, Human
cucaggguccccucugucc

SEQ ID NO: 497081 - RNA, 20 nt, Human
cuccugggcccugugguucu

SEQ ID NO: 497082 - RNA, 25 nt, Human
cugggcccugugguucuguuugcug

SEQ ID NO: 497083 - RNA, 19 nt, Human
cuucacagguugugcaugu

SEQ ID NO: 497084 - RNA, 26 nt, Human
gaaaaaacaaaggcaaacucugcaga

SEQ ID NO: 497085 - RNA, 18 nt, Human
gaagcuggagaaggccuu

SEQ ID NO: 497086 - RNA, 24 nt, Human
gacaaagaggaaucagacauucga

SEQ ID NO: 497087 - RNA, 22 nt, Human
gacuguccuuguuguguguugu

SEQ ID NO: 497088 - RNA, 20 nt, Human
gagccuggggaggugaguga

SEQ ID NO: 497089 - RNA, 21 nt, Human
gagugacacaaaggugggccu

SEQ ID NO: 497090 - RNA, 23 nt, Human
gaugaaacacagggagugcccag

SEQ ID NO: 497091 - RNA, 22 nt, Human
gauugcaaauaugcuucuaauu

SEQ ID NO: 497092 - RNA, 19 nt, Human
gcaggcucagauagcucug

SEQ ID NO: 497093 - RNA, 22 nt, Human
gccccuggcaggguagcugcau

SEQ ID NO: 497094 - RNA, 21 nt, Human
gcuggagaaggccuucccaga

SEQ ID NO: 497095 - RNA, 24 nt, Human
ggaggugagugacacaaagguggg

SEQ ID NO: 497096 - RNA, 22 nt, Human
ggcagugccuguguggaaugcc

SEQ ID NO: 497097 - RNA, 19 nt, Human
gggcccugugguucuguuu

SEQ ID NO: 497098 - RNA, 19 nt, Human
ggugugagcuugaggagga

SEQ ID NO: 497099 - RNA, 19 nt, Human
gugaguuggaaccccaggg

SEQ ID NO: 497100 - RNA, 24 nt, Human
gugggcuccaggaagcuggagaag

SEQ ID NO: 497101 - RNA, 18 nt, Human
guuguguccuuguugucc

SEQ ID NO: 497102 - RNA, 22 nt, Human
uaauacaugcagaaagcgugua

SEQ ID NO: 497103 - RNA, 19 nt, Human
uacaggacaaagucuaccc

SEQ ID NO: 497104 - RNA, 23 nt, Human
uagguuuucagauauauuugccc

SEQ ID NO: 497105 - RNA, 20 nt, Human
uaucaaaaaaagaaagaaau

SEQ ID NO: 497106 - RNA, 20 nt, Human
uaucaaaaaaagaaagaaau

SEQ ID NO: 497107 - RNA, 29 nt, Human
uaucaaaaaaagaaagaaauuagguuuuc

SEQ ID NO: 497108 - RNA, 22 nt, Human
uauggccucagaaagaagcaag

SEQ ID NO: 497109 - RNA, 22 nt, Human
ucaaaaaaagaaagaaauuagg

SEQ ID NO: 497110 - RNA, 23 nt, Human
ucacagaccaguuacuauagaaa

SEQ ID NO: 497111 - RNA, 22 nt, Human
ucagacccugcuuguggccaag

SEQ ID NO: 497112 - RNA, 22 nt, Human
uccacccaccaugaagccuacg

SEQ ID NO: 497113 - RNA, 20 nt, Human
ucccugcaggaaaaaacaaa

SEQ ID NO: 497114 - RNA, 23 nt, Human
ucccugcaggaaaaaacaaaggc

SEQ ID NO: 497115 - RNA, 23 nt, Human
uccuuguugugacuguccuuguu

SEQ ID NO: 497116 - RNA, 22 nt, Human
ugacuguccuuguuguguguug

SEQ ID NO: 497117 - RNA, 19 nt, Human
ugacuguccuuguuguguu

SEQ ID NO: 497118 - RNA, 18 nt, Human
ugagccuggggaggugag

SEQ ID NO: 497119 - RNA, 20 nt, Human
ugagccuggggaggugagug

SEQ ID NO: 497120 - RNA, 19 nt, Human
ugaggaggagugaaggaug

SEQ ID NO: 497121 - RNA, 20 nt, Human
ugaggaggagugaaggaugg

SEQ ID NO: 497122 - RNA, 18 nt, Human
ugagugccccuggcaggg

SEQ ID NO: 497123 - RNA, 23 nt, Human
ugcaggaaaaaacaaaggcaaac

SEQ ID NO: 497124 - RNA, 22 nt, Human
ugccucaacaaggacuuuccuu

SEQ ID NO: 497125 - RNA, 18 nt, Human
ugcugggcuucuuggaac

SEQ ID NO: 497126 - RNA, 25 nt, Human
uggagucagcauaggagaaccuacu

SEQ ID NO: 497127 - RNA, 23 nt, Human
uggccucagaaagaagcaagggg

SEQ ID NO: 497128 - RNA, 25 nt, Human
uggggacucugagccuggggaggug

SEQ ID NO: 497129 - RNA, 20 nt, Human
uggugugagcuugaggagga

SEQ ID NO: 497130 - RNA, 19 nt, Human
ugugguucuguuugcugag

SEQ ID NO: 497131 - RNA, 20 nt, Human
uguguggaaugccuccuggg

SEQ ID NO: 497132 - RNA, 22 nt, Human
uguguguuguguuguguccuuu

SEQ ID NO: 497133 - RNA, 20 nt, Human
uucccugcaggaaaaaacaa

SEQ ID NO: 497134 - RNA, 22 nt, Human
uucuguuugcugagugccccug

SEQ ID NO: 497135 - RNA, 23 nt, Human
uugcaaauaugcuucuaauuccu

SEQ ID NO: 497136 - RNA, 23 nt, Human
uuguguccuuguuguccuuguug

SEQ ID NO: 497137 - RNA, 24 nt, Human
aaacuagaaaaagaucuagaaguu

SEQ ID NO: 497138 - RNA, 22 nt, Human
aacccagccagccccagugcaa

SEQ ID NO: 497139 - RNA, 21 nt, Human
acacacacacacauacacaca

SEQ ID NO: 497140 - RNA, 22 nt, Human
acacauacacacaaggccguga

SEQ ID NO: 497141 - RNA, 24 nt, Human
acaccaggucacggaggaggggcc

SEQ ID NO: 497142 - RNA, 18 nt, Human
acaggacaagaaaggaag

SEQ ID NO: 497143 - RNA, 21 nt, Human
acaggacaagaaaggaaggaa

SEQ ID NO: 497144 - RNA, 23 nt, Human
accaggucacggaggaggggccg

SEQ ID NO: 497145 - RNA, 23 nt, Human
acccaaccccccgccccugcccc

SEQ ID NO: 497146 - RNA, 21 nt, Human
acccccagccccagccccagc

SEQ ID NO: 497147 - RNA, 23 nt, Human
acccccagccccagccccagccc

SEQ ID NO: 497148 - RNA, 21 nt, Human
acucauuucaguccugauccc

SEQ ID NO: 497149 - RNA, 20 nt, Human
acucucccagaacacaggau

SEQ ID NO: 497150 - RNA, 21 nt, Human
agaaaggaaggaaguuggaaa

SEQ ID NO: 497151 - RNA, 25 nt, Human
agaaaggaaggaaguuggaaaggag

SEQ ID NO: 497152 - RNA, 21 nt, Human
agaaaguccuucucccauguc

SEQ ID NO: 497153 - RNA, 18 nt, Human
agcugagggagcccugca

SEQ ID NO: 497154 - RNA, 22 nt, Human
aggaggggccggggcugcagga

SEQ ID NO: 497155 - RNA, 21 nt, Human
aggauggggagaaaggagaga

SEQ ID NO: 497156 - RNA, 23 nt, Human
agggaaggggagaggagaggguu

SEQ ID NO: 497157 - RNA, 20 nt, Human
agggagaaauggggucccca

SEQ ID NO: 497158 - RNA, 19 nt, Human
agggagcaguggugggcug

SEQ ID NO: 497159 - RNA, 24 nt, Human
agggagggggcagagaggggcagg

SEQ ID NO: 497160 - RNA, 18 nt, Human
agggggcagcugccauug

SEQ ID NO: 497161 - RNA, 23 nt, Human
aguggugggcugugagaaggaag

SEQ ID NO: 497162 - RNA, 18 nt, Human
aucccacccccagcccca

SEQ ID NO: 497163 - RNA, 19 nt, Human
aucgucacccucuccccaa

SEQ ID NO: 497164 - RNA, 20 nt, Human
auggagacagggaacuucag

SEQ ID NO: 497165 - RNA, 19 nt, Human
caaccccccgccccugccc

SEQ ID NO: 497166 - RNA, 20 nt, Human
caaccccccgccccugcccc

SEQ ID NO: 497167 - RNA, 20 nt, Human
caagccccaacuugaggcca

SEQ ID NO: 497168 - RNA, 18 nt, Human
caaggggcacaccaggag

SEQ ID NO: 497169 - RNA, 26 nt, Human
cacacacacacacacacacauacaca

SEQ ID NO: 497170 - RNA, 20 nt, Human
cacacacacacacacacaua

SEQ ID NO: 497171 - RNA, 22 nt, Human
cacacacacacacacacauaca

SEQ ID NO: 497172 - RNA, 26 nt, Human
cacacacacacacacacauacacaca

SEQ ID NO: 497173 - RNA, 19 nt, Human
cacacacacacacacauac

SEQ ID NO: 497174 - RNA, 21 nt, Human
cacacccaaccccccgccccu

SEQ ID NO: 497175 - RNA, 19 nt, Human
cacauacacacaaggccgu

SEQ ID NO: 497176 - RNA, 20 nt, Human
caccacacccaaccccccgc

SEQ ID NO: 497177 - RNA, 22 nt, Human
caccagggcagaauucccccuc

SEQ ID NO: 497178 - RNA, 21 nt, Human
cacccaaccccccgccccugc

SEQ ID NO: 497179 - RNA, 22 nt, Human
cacccccagccccagccccagc

SEQ ID NO: 497180 - RNA, 20 nt, Human
cacccggggcccccacgucc

SEQ ID NO: 497181 - RNA, 21 nt, Human
cacccggggcccccacguccc

SEQ ID NO: 497182 - RNA, 23 nt, Human
cagaaaguccuucucccaugucu

SEQ ID NO: 497183 - RNA, 22 nt, Human
cagagaggggcaggaauggagc

SEQ ID NO: 497184 - RNA, 21 nt, Human
cagcccacuuuccaacccagc

SEQ ID NO: 497185 - RNA, 19 nt, Human
cagcccagaagugagggau

SEQ ID NO: 497186 - RNA, 25 nt, Human
cagccccagccccagccauugcaaa

SEQ ID NO: 497187 - RNA, 23 nt, Human
cagcugagggagcccugcagagg

SEQ ID NO: 497188 - RNA, 18 nt, Human
cagggacgaugguccagc

SEQ ID NO: 497189 - RNA, 25 nt, Human
cagggcggacuccagagggcccgcu

SEQ ID NO: 497190 - RNA, 33 nt, Human
caugacgaugccucacacacacacacacacagu

SEQ ID NO: 497191 - RNA, 23 nt, Human
cauuggggguagaaaggcagcug

SEQ ID NO: 497192 - RNA, 24 nt, Human
cauuucaguccugaucccuucacu

SEQ ID NO: 497193 - RNA, 23 nt, Human
ccaacucauuucaguccugaucc

SEQ ID NO: 497194 - RNA, 26 nt, Human
ccagcccacuuuccaacccagccagc

SEQ ID NO: 497195 - RNA, 24 nt, Human
ccaggagcaugacagcccagaagu

SEQ ID NO: 497196 - RNA, 22 nt, Human
cccagacugaaauggaaaugag

SEQ ID NO: 497197 - RNA, 24 nt, Human
cccagacugaaauggaaaugaggu

SEQ ID NO: 497198 - RNA, 24 nt, Human
cccagccccagccccagccauugc

SEQ ID NO: 497199 - RNA, 26 nt, Human
cccagccccagccccagccauugcaa

SEQ ID NO: 497200 - RNA, 25 nt, Human
cccagccccagccccagccccagcc

SEQ ID NO: 497201 - RNA, 23 nt, Human
ccccaggacaugacgaugccuca

SEQ ID NO: 497202 - RNA, 18 nt, Human
cccccacguccccucccg

SEQ ID NO: 497203 - RNA, 19 nt, Human
cccccacguccccucccgu

SEQ ID NO: 497204 - RNA, 22 nt, Human
cccccacguccccucccguccc

SEQ ID NO: 497205 - RNA, 19 nt, Human
cccccagccccagccccag

SEQ ID NO: 497206 - RNA, 22 nt, Human
cccccagccccagccccagccc

SEQ ID NO: 497207 - RNA, 23 nt, Human
cccccagccccagccccagccuu

SEQ ID NO: 497208 - RNA, 22 nt, Human
ccccccgccccugccccaggac

SEQ ID NO: 497209 - RNA, 24 nt, Human
ccccucccucaccacacccaaccc

SEQ ID NO: 497210 - RNA, 18 nt, Human
cccguccccgcagccugg

SEQ ID NO: 497211 - RNA, 23 nt, Human
cccuaggauauguccccucccuc

SEQ ID NO: 497212 - RNA, 18 nt, Human
cccucaccacacccaacc

SEQ ID NO: 497213 - RNA, 20 nt, Human
ccgccccugccccaggacau

SEQ ID NO: 497214 - RNA, 21 nt, Human
ccucacacacacacacacaca

SEQ ID NO: 497215 - RNA, 22 nt, Human
ccucccucaccacacccaaccc

SEQ ID NO: 497216 - RNA, 18 nt, Human
ccucucucccucuugguc

SEQ ID NO: 497217 - RNA, 19 nt, Human
ccuucacucugcacuucuc

SEQ ID NO: 497218 - RNA, 23 nt, Human
cguccccgcagccuggccacacu

SEQ ID NO: 497219 - RNA, 23 nt, Human
cuagaaguuuccugagauccuga

SEQ ID NO: 497220 - RNA, 21 nt, Human
cucacacacacacacacacac

SEQ ID NO: 497221 - RNA, 18 nt, Human
cucaccacacccaacccc

SEQ ID NO: 497222 - RNA, 24 nt, Human
cucaccacacccaaccccccgccc

SEQ ID NO: 497223 - RNA, 25 nt, Human
cucccucaccacacccaaccccccg

SEQ ID NO: 497224 - RNA, 18 nt, Human
cugaaguccagcccacuu

SEQ ID NO: 497225 - RNA, 20 nt, Human
cuuauccuccucccaacuca

SEQ ID NO: 497226 - RNA, 23 nt, Human
gaaagggaagggauagauuaagg

SEQ ID NO: 497227 - RNA, 18 nt, Human
gaaggggagaggagaggg

SEQ ID NO: 497228 - RNA, 18 nt, Human
gaaggggagaggagaggg

SEQ ID NO: 497229 - RNA, 18 nt, Human
gaccucaggacugcaagg

SEQ ID NO: 497230 - RNA, 18 nt, Human
gacuccagagggcccgcu

SEQ ID NO: 497231 - RNA, 22 nt, Human
gagaaggcccugggaaagggaa

SEQ ID NO: 497232 - RNA, 19 nt, Human
gagggggaaaagcuuccca

SEQ ID NO: 497233 - RNA, 19 nt, Human
gcacaccaggagcaugaca

SEQ ID NO: 497234 - RNA, 21 nt, Human
gcagagaggggcaggaaugga

SEQ ID NO: 497235 - RNA, 18 nt, Human
gccagccccagugcaagg

SEQ ID NO: 497236 - RNA, 23 nt, Human
gccccagccccagccccagccuu

SEQ ID NO: 497237 - RNA, 23 nt, Human
ggaggggcagggcggacuccaga

SEQ ID NO: 497238 - RNA, 21 nt, Human
ggccgggggaggggcagggcg

SEQ ID NO: 497239 - RNA, 19 nt, Human
gggaaacaggacaagaaag

SEQ ID NO: 497240 - RNA, 23 nt, Human
gggauggggggccgggggagggg

SEQ ID NO: 497241 - RNA, 21 nt, Human
gggcaggaauggagcagagga

SEQ ID NO: 497242 - RNA, 23 nt, Human
gucacggaggaggggccggggcu

SEQ ID NO: 497243 - RNA, 20 nt, Human
uaagagaagcagggacgaug

SEQ ID NO: 497244 - RNA, 18 nt, Human
uagaaguuuccugagauc

SEQ ID NO: 497245 - RNA, 19 nt, Human
uaggauauguccccucccu

SEQ ID NO: 497246 - RNA, 26 nt, Human
uauguccccucccucaccacacccaa

SEQ ID NO: 497247 - RNA, 21 nt, Human
ucacacacacacacacacaca

SEQ ID NO: 497248 - RNA, 24 nt, Human
ucaccacacccaaccccccgcccc

SEQ ID NO: 497249 - RNA, 20 nt, Human
uccacccccuauaggagcac

SEQ ID NO: 497250 - RNA, 21 nt, Human
ucccacccccagccccagccc

SEQ ID NO: 497251 - RNA, 21 nt, Human
ucccacccccagccccagccu

SEQ ID NO: 497252 - RNA, 20 nt, Human
uccccagacugaaauggaaa

SEQ ID NO: 497253 - RNA, 21 nt, Human
uccccagacugaaauggaaau

SEQ ID NO: 497254 - RNA, 18 nt, Human
ucucccagaacacaggau

SEQ ID NO: 497255 - RNA, 20 nt, Human
ucuccuauagcaggguagac

SEQ ID NO: 497256 - RNA, 19 nt, Human
ucucuguguucccagaaag

SEQ ID NO: 497257 - RNA, 19 nt, Human
ucugaagccucucucccuc

SEQ ID NO: 497258 - RNA, 22 nt, Human
ucuggagugucuguuucaccag

SEQ ID NO: 497259 - RNA, 19 nt, Human
ugaaaacccuaggauaugu

SEQ ID NO: 497260 - RNA, 20 nt, Human
ugaaaggaggacugguucug

SEQ ID NO: 497261 - RNA, 23 nt, Human
ugaagaggaggggaucacuaucu

SEQ ID NO: 497262 - RNA, 21 nt, Human
ugagaaggcccugggaaaggg

SEQ ID NO: 497263 - RNA, 18 nt, Human
ugaggacaagaaaucagc

SEQ ID NO: 497264 - RNA, 18 nt, Human
ugagguggggcgaucaua

SEQ ID NO: 497265 - RNA, 20 nt, Human
ugcacucacgacaacauuga

SEQ ID NO: 497266 - RNA, 18 nt, Human
ugcagagggggaaaagcu

SEQ ID NO: 497267 - RNA, 18 nt, Human
ugccccaggacaugacga

SEQ ID NO: 497268 - RNA, 27 nt, Human
ugccucacacacacacacacacacagu

SEQ ID NO: 497269 - RNA, 29 nt, Human
ugccucacacacacacacacacacauaca

SEQ ID NO: 497270 - RNA, 22 nt, Human
ugcguggggagagguguaggcc

SEQ ID NO: 497271 - RNA, 21 nt, Human
ugcuaagggggcagcugccau

SEQ ID NO: 497272 - RNA, 23 nt, Human
uggaaacaaccugcccugggggu

SEQ ID NO: 497273 - RNA, 18 nt, Human
uggaaaggagggagaaau

SEQ ID NO: 497274 - RNA, 21 nt, Human
uggaaaggagggagaaauggg

SEQ ID NO: 497275 - RNA, 31 nt, Human
uguccccucccucaccacacccaaccccccc

SEQ ID NO: 497276 - RNA, 18 nt, Human
uuacaggaggcggguggu

SEQ ID NO: 497277 - RNA, 24 nt, Human
uuauauauguacacccggggcccc

SEQ ID NO: 497278 - RNA, 31 nt, Human
uucaaucccacccccagccccagccccagcc

SEQ ID NO: 497279 - RNA, 21 nt, Human
uuccaacccagccagccccag

SEQ ID NO: 497280 - RNA, 19 nt, Human
uucucccagccaagcccca

SEQ ID NO: 497281 - RNA, 19 nt, Human
uugaaacuagaaaaagauc

SEQ ID NO: 497282 - RNA, 18 nt, Human
uugcuuauccuccuccca

SEQ ID NO: 497283 - RNA, 21 nt, Human
uuuuccacccccuauaggagc

SEQ ID NO: 497284 - RNA, 18 nt, Human
aggguccccaccccccac

SEQ ID NO: 497285 - RNA, 19 nt, Human
caccccccaccgcaccccc

SEQ ID NO: 497286 - RNA, 23 nt, Human
caccccccaccgcacccccuacc

SEQ ID NO: 497287 - RNA, 25 nt, Human
caccccccaccgcacccccuacccc

SEQ ID NO: 497288 - RNA, 21 nt, Human
cacccccuacccccaccggcu

SEQ ID NO: 497289 - RNA, 18 nt, Human
cagccggcggggacuggg

SEQ ID NO: 497290 - RNA, 21 nt, Human
cagcuccuccaccaccccacc

SEQ ID NO: 497291 - RNA, 21 nt, Human
ccaagagccggagggucccca

SEQ ID NO: 497292 - RNA, 22 nt, Human
ccaccccccaccgcacccccua

SEQ ID NO: 497293 - RNA, 21 nt, Human
ccaccgcacccccuaccccca

SEQ ID NO: 497294 - RNA, 23 nt, Human
cccaagagccggaggguccccac

SEQ ID NO: 497295 - RNA, 23 nt, Human
cccaccgcacccccuacccccac

SEQ ID NO: 497296 - RNA, 23 nt, Human
ccccaagagccggaggguccccu

SEQ ID NO: 497297 - RNA, 19 nt, Human
ccccaccgcacccccuacc

SEQ ID NO: 497298 - RNA, 19 nt, Human
ccccaccggcuccuucccc

SEQ ID NO: 497299 - RNA, 21 nt, Human
ccccaccggcuccuucccccg

SEQ ID NO: 497300 - RNA, 21 nt, Human
cccccaagagccggagggucc

SEQ ID NO: 497301 - RNA, 24 nt, Human
cccccaagagccggagggucccca

SEQ ID NO: 497302 - RNA, 24 nt, Human
cccccaagagccggaggguccccc

SEQ ID NO: 497303 - RNA, 22 nt, Human
ccccccaccgcacccccuaccc

SEQ ID NO: 497304 - RNA, 20 nt, Human
ccccuacccccaccggcucc

SEQ ID NO: 497305 - RNA, 22 nt, Human
ccgcacccccuacccccaccgg

SEQ ID NO: 497306 - RNA, 24 nt, Human
ccgcacccccuacccccaccggcu

SEQ ID NO: 497307 - RNA, 18 nt, Human
ccgcucagcagccggcgg

SEQ ID NO: 497308 - RNA, 22 nt, Human
ccuccaccaccccacccgcuca

SEQ ID NO: 497309 - RNA, 21 nt, Human
cuccuucccccgugccggccu

SEQ ID NO: 497310 - RNA, 20 nt, Human
gacccccaagagccggaggg

SEQ ID NO: 497311 - RNA, 23 nt, Human
gcagcuccuccaccaccccaccc

SEQ ID NO: 497312 - RNA, 22 nt, Human
gcggggacugggacccccaaga

SEQ ID NO: 497313 - RNA, 22 nt, Human
uccccaccccccaccgcacccc

SEQ ID NO: 497314 - RNA, 18 nt, Human
ucugcagcuccuccacca

SEQ ID NO: 497315 - RNA, 23 nt, Human
ugggacccccaagagccggaggg

SEQ ID NO: 497316 - RNA, 21 nt, Human
aagcaaacuaaaggaagaaca

SEQ ID NO: 497317 - RNA, 19 nt, Human
aagucagccgagggcacag

SEQ ID NO: 497318 - RNA, 25 nt, Human
acaaagaacuacuaauguaccauga

SEQ ID NO: 497319 - RNA, 19 nt, Human
acauacuuuccugcaacug

SEQ ID NO: 497320 - RNA, 23 nt, Human
agcuaacauacuuuccugcaacu

SEQ ID NO: 497321 - RNA, 26 nt, Human
agugcaaaagcaaacuaaaggaagaa

SEQ ID NO: 497322 - RNA, 22 nt, Human
auccuuuuuuauuucaggauuu

SEQ ID NO: 497323 - RNA, 18 nt, Human
caaacuaaaggaagaaca

SEQ ID NO: 497324 - RNA, 22 nt, Human
caaccuccaggguggaaaccaa

SEQ ID NO: 497325 - RNA, 18 nt, Human
cacagggugucagcaacc

SEQ ID NO: 497326 - RNA, 22 nt, Human
cacagggugucagcaaccucca

SEQ ID NO: 497327 - RNA, 19 nt, Human
caggucccagaugaagaga

SEQ ID NO: 497328 - RNA, 18 nt, Human
caugaaauguaauacaua

SEQ ID NO: 497329 - RNA, 22 nt, Human
ccuccaggguggaaaccaaccc

SEQ ID NO: 497330 - RNA, 18 nt, Human
cugugccaccggcuggaa

SEQ ID NO: 497331 - RNA, 20 nt, Human
guucccgcuguuacugucau

SEQ ID NO: 497332 - RNA, 24 nt, Human
uaccaugaaauguaauacauauua

SEQ ID NO: 497333 - RNA, 21 nt, Human
uagaacauagacaccuaggug

SEQ ID NO: 497334 - RNA, 18 nt, Human
uaggaugcauuagaucuu

SEQ ID NO: 497335 - RNA, 24 nt, Human
uauagcuaacauacuuuccugcaa

SEQ ID NO: 497336 - RNA, 27 nt, Human
ucccgcuguuacugucauuccuaagau

SEQ ID NO: 497337 - RNA, 21 nt, Human
ugagugcugcccccuggaggc

SEQ ID NO: 497338 - RNA, 21 nt, Human
ugugauagaacauagacaccu

SEQ ID NO: 497339 - RNA, 21 nt, Human
uuaauagcuaagccauucaac

SEQ ID NO: 497340 - RNA, 21 nt, Human
uuucaggauuuccagguccca

SEQ ID NO: 497341 - RNA, 23 nt, Human
uuuuuuuuuuuucaaaaaaguca

SEQ ID NO: 497342 - RNA, 19 nt, Human
augaggaacagaaacaaaa

SEQ ID NO: 497343 - RNA, 21 nt, Human
caugauuuaaugaggaacaga

SEQ ID NO: 497344 - RNA, 24 nt, Human
uacccuuuagccugaugacagcuu

SEQ ID NO: 497345 - RNA, 22 nt, Human
ucauuggcguccucuggcaagc

SEQ ID NO: 497346 - RNA, 20 nt, Human
ucugcagcuucaauacccuu

SEQ ID NO: 497347 - RNA, 23 nt, Human
ugauuguugguguuucaaacuuc

SEQ ID NO: 497348 - RNA, 18 nt, Human
ugguguuucaaacuucau

SEQ ID NO: 497349 - RNA, 26 nt, Human
aaagacuguaaucagucucuaaauaa

SEQ ID NO: 497350 - RNA, 20 nt, Human
aaagcaaacuggcugaagaa

SEQ ID NO: 497351 - RNA, 19 nt, Human
aaagcacacaaacacacag

SEQ ID NO: 497352 - RNA, 27 nt, Human
aaauaaaagcaaacuggcugaagaaaa

SEQ ID NO: 497353 - RNA, 22 nt, Human
acaauacaaagugaacuuugau

SEQ ID NO: 497354 - RNA, 19 nt, Human
acaauauauauauaucaca

SEQ ID NO: 497355 - RNA, 26 nt, Human
agagcacaauauauauauaucacaaa

SEQ ID NO: 497356 - RNA, 18 nt, Human
aucuuugaaagcacacaa

SEQ ID NO: 497357 - RNA, 23 nt, Human
caauauauauauaucacaaacca

SEQ ID NO: 497358 - RNA, 19 nt, Human
caggguacaauacaaagug

SEQ ID NO: 497359 - RNA, 18 nt, Human
ccauacacacugucccca

SEQ ID NO: 497360 - RNA, 19 nt, Human
uaccauacacacugucccc

SEQ ID NO: 497361 - RNA, 23 nt, Human
uaucacaaaccaaaucacacucu

SEQ ID NO: 497362 - RNA, 19 nt, Human
ucaaaaauaaaagcaaacu

SEQ ID NO: 497363 - RNA, 19 nt, Human
uccacauccgggagcuagu

SEQ ID NO: 497364 - RNA, 21 nt, Human
uccccagauaaauaaaauccc

SEQ ID NO: 497365 - RNA, 20 nt, Human
uccccagcuucuccacaucc

SEQ ID NO: 497366 - RNA, 21 nt, Human
uccucccacgccuucucccca

SEQ ID NO: 497367 - RNA, 22 nt, Human
uccucccacgccuucuccccag

SEQ ID NO: 497368 - RNA, 20 nt, Human
ugaaagcacacaaacacaca

SEQ ID NO: 497369 - RNA, 18 nt, Human
ugagaaagacuguaauca

SEQ ID NO: 497370 - RNA, 24 nt, Human
uugaugauguucuuacuugcauuu

SEQ ID NO: 497371 - RNA, 18 nt, Human
agaaggaggccuuccugu

SEQ ID NO: 497372 - RNA, 24 nt, Human
auacugaauucucuugauuguaca

SEQ ID NO: 497373 - RNA, 24 nt, Human
cauuucuauucccuucugaaguuu

SEQ ID NO: 497374 - RNA, 19 nt, Human
ccaguuuucauuccaguca

SEQ ID NO: 497375 - RNA, 26 nt, Human
ccucuggggaccuuucgucccaguuu

SEQ ID NO: 497376 - RNA, 20 nt, Human
ccucuugaaacagggcgagc

SEQ ID NO: 497377 - RNA, 22 nt, Human
ccuuccuguuaacccaacucca

SEQ ID NO: 497378 - RNA, 20 nt, Human
cggcgcggaaggagggcagu

SEQ ID NO: 497379 - RNA, 21 nt, Human
cugcuaguuguccuugaagcu

SEQ ID NO: 497380 - RNA, 24 nt, Human
cuugaagcucuuuuaucucaacag

SEQ ID NO: 497381 - RNA, 21 nt, Human
cuuguaccaaguuuagcagca

SEQ ID NO: 497382 - RNA, 20 nt, Human
gacaaauauacugaauucuc

SEQ ID NO: 497383 - RNA, 21 nt, Human
gagaagacagaacuccaccag

SEQ ID NO: 497384 - RNA, 20 nt, Human
gcaguugcccggcucgcggg

SEQ ID NO: 497385 - RNA, 19 nt, Human
gcucaguuuuccucggcuc

SEQ ID NO: 497386 - RNA, 18 nt, Human
ggcaguugcccggcucgc

SEQ ID NO: 497387 - RNA, 20 nt, Human
uagucugcuaguuguccuug

SEQ ID NO: 497388 - RNA, 18 nt, Human
uccaccagucccuauggg

SEQ ID NO: 497389 - RNA, 21 nt, Human
uccuguuaacccaacuccacc

SEQ ID NO: 497390 - RNA, 18 nt, Human
ucggcucucaggccuacc

SEQ ID NO: 497391 - RNA, 21 nt, Human
ucugaggcccacgcucaguuu

SEQ ID NO: 497392 - RNA, 20 nt, Human
ucugcuaguuguccuugaag

SEQ ID NO: 497393 - RNA, 21 nt, Human
ugacaaauauacugaauucuc

SEQ ID NO: 497394 - RNA, 21 nt, Human
ugagaagacagaacuccaccg

SEQ ID NO: 497395 - RNA, 24 nt, Human
ugccuugacuucuuucugaggccc

SEQ ID NO: 497396 - RNA, 18 nt, Human
ugcuggccauuguuucuu

SEQ ID NO: 497397 - RNA, 20 nt, Human
ugggacaaccacgagaaccu

SEQ ID NO: 497398 - RNA, 22 nt, Human
ugucuaaaauuugccucugggg

SEQ ID NO: 497399 - RNA, 21 nt, Human
uuagagacuuucaguggacuu

SEQ ID NO: 497400 - RNA, 24 nt, Human
uuagcagcaagaggauacuuccuu

SEQ ID NO: 497401 - RNA, 20 nt, Human
aacaaugauggcugcgaucc

SEQ ID NO: 497402 - RNA, 20 nt, Human
aaccuggacaccaaccaaca

SEQ ID NO: 497403 - RNA, 21 nt, Human
aagcaggcgcacuuugucaga

SEQ ID NO: 497404 - RNA, 19 nt, Human
aagcccagagagcaucaag

SEQ ID NO: 497405 - RNA, 24 nt, Human
aaggggccaaaaccaccacaucaa

SEQ ID NO: 497406 - RNA, 23 nt, Human
aagguucuucuuccuccucuuuu

SEQ ID NO: 497407 - RNA, 22 nt, Human
aaguuucaagcuagaggauaua

SEQ ID NO: 497408 - RNA, 18 nt, Human
aaugauggcugcgauccc

SEQ ID NO: 497409 - RNA, 19 nt, Human
acaaaccuggacaccaacc

SEQ ID NO: 497410 - RNA, 21 nt, Human
acaaaccuggacaccaaccaa

SEQ ID NO: 497411 - RNA, 22 nt, Human
acagugccacaaaccuggacac

SEQ ID NO: 497412 - RNA, 18 nt, Human
accaccauaauaggaagc

SEQ ID NO: 497413 - RNA, 25 nt, Human
accuuccucaguagauccuuuauca

SEQ ID NO: 497414 - RNA, 19 nt, Human
acugaaacaucaagaguuc

SEQ ID NO: 497415 - RNA, 19 nt, Human
acugccgccucaacaaagc

SEQ ID NO: 497416 - RNA, 19 nt, Human
aggaaucuucaccacagca

SEQ ID NO: 497417 - RNA, 22 nt, Human
aggcaaagguucuucuuccucc

SEQ ID NO: 497418 - RNA, 19 nt, Human
auaauaggaagcauccaca

SEQ ID NO: 497419 - RNA, 24 nt, Human
aucaagaguucuguagccccagcu

SEQ ID NO: 497420 - RNA, 21 nt, Human
aucaccccaacgaaccuccau

SEQ ID NO: 497421 - RNA, 20 nt, Human
aucgcucuuuccaucuugug

SEQ ID NO: 497422 - RNA, 18 nt, Human
caaaccuggacaccaacc

SEQ ID NO: 497423 - RNA, 21 nt, Human
caaagcaggcgcacuuuguca

SEQ ID NO: 497424 - RNA, 19 nt, Human
caacagaauacucccguuc

SEQ ID NO: 497425 - RNA, 18 nt, Human
caccuuccucaguagauc

SEQ ID NO: 497426 - RNA, 20 nt, Human
cacuuugucagauuuccacu

SEQ ID NO: 497427 - RNA, 23 nt, Human
cagagagacaucccacugaccca

SEQ ID NO: 497428 - RNA, 20 nt, Human
cagcaaaggggccaaaacca

SEQ ID NO: 497429 - RNA, 23 nt, Human
cagcaaaggggccaaaaccacca

SEQ ID NO: 497430 - RNA, 24 nt, Human
caggaguagcaguaacaccaaaau

SEQ ID NO: 497431 - RNA, 21 nt, Human
caucaaagaaacccggucaua

SEQ ID NO: 497432 - RNA, 19 nt, Human
ccacaucaaaccgaucccc

SEQ ID NO: 497433 - RNA, 25 nt, Human
ccaccacaucaaaccgauccccagg

SEQ ID NO: 497434 - RNA, 19 nt, Human
ccgccucaacaaagcccag

SEQ ID NO: 497435 - RNA, 23 nt, Human
ccucaguagauccuuuaucaccc

SEQ ID NO: 497436 - RNA, 23 nt, Human
ccuccauucuuuuaauuccucca

SEQ ID NO: 497437 - RNA, 18 nt, Human
cucgaauauccauuucgc

SEQ ID NO: 497438 - RNA, 24 nt, Human
cuggacaccaaccaacagaauacu

SEQ ID NO: 497439 - RNA, 21 nt, Human
cuugcaccuuccucaguagau

SEQ ID NO: 497440 - RNA, 19 nt, Human
gaggaggcugguguguggg

SEQ ID NO: 497441 - RNA, 19 nt, Human
gcugguguguggguuuggg

SEQ ID NO: 497442 - RNA, 21 nt, Human
ggccaaaaccaccacaucaaa

SEQ ID NO: 497443 - RNA, 20 nt, Human
guauauuugugugugugugu

SEQ ID NO: 497444 - RNA, 20 nt, Human
gugcaggggggggugguggu

SEQ ID NO: 497445 - RNA, 20 nt, Human
guguguguguaaggccucuu

SEQ ID NO: 497446 - RNA, 21 nt, Human
guuuuucuucuuggucuuccu

SEQ ID NO: 497447 - RNA, 19 nt, Human
uaaacuugagcaaaaguuu

SEQ ID NO: 497448 - RNA, 19 nt, Human
uaagccuuugugcucacaa

SEQ ID NO: 497449 - RNA, 23 nt, Human
uaccaggaugcuccaaucgcucu

SEQ ID NO: 497450 - RNA, 23 nt, Human
uauguauagaaaauuguauauuu

SEQ ID NO: 497451 - RNA, 22 nt, Human
ucaacaaagcccagagagcauc

SEQ ID NO: 497452 - RNA, 19 nt, Human
ucauuugauaagccuuugu

SEQ ID NO: 497453 - RNA, 25 nt, Human
uccccaggaguagcaguaacaccaa

SEQ ID NO: 497454 - RNA, 19 nt, Human
uccucuguuucuucaggaa

SEQ ID NO: 497455 - RNA, 25 nt, Human
ucgaccaccauaauaggaagcauug

SEQ ID NO: 497456 - RNA, 18 nt, Human
ucucuagccuugcaccuu

SEQ ID NO: 497457 - RNA, 18 nt, Human
ucuucuuccuccucuuuu

SEQ ID NO: 497458 - RNA, 23 nt, Human
ugaaauguucgccuucucccuuc

SEQ ID NO: 497459 - RNA, 23 nt, Human
ugaauguguggacacaugacuuu

SEQ ID NO: 497460 - RNA, 19 nt, Human
ugaggaggcuggugugugg

SEQ ID NO: 497461 - RNA, 20 nt, Human
ugcaggggggggugguggug

SEQ ID NO: 497462 - RNA, 26 nt, Human
ugccacaaaccuggacaccaaccaac

SEQ ID NO: 497463 - RNA, 19 nt, Human
ugcucacagagagacaucc

SEQ ID NO: 497464 - RNA, 25 nt, Human
uggaacagugccacaaaccuggaca

SEQ ID NO: 497465 - RNA, 19 nt, Human
uggcugugacaauuaauga

SEQ ID NO: 497466 - RNA, 19 nt, Human
uggugguuuuucuucuugg

SEQ ID NO: 497467 - RNA, 20 nt, Human
uggugguuuuucuucuuggu

SEQ ID NO: 497468 - RNA, 22 nt, Human
uguauauuugugugugugugua

SEQ ID NO: 497469 - RNA, 19 nt, Human
uguucgccuucucccuucc

SEQ ID NO: 497470 - RNA, 21 nt, Human
uuagugucauuugauaagccu

SEQ ID NO: 497471 - RNA, 21 nt, Human
uuccucaguagauccuuuauc

SEQ ID NO: 497472 - RNA, 22 nt, Human
uuuaugcaccggcccucaucuc

SEQ ID NO: 497473 - RNA, 22 nt, Human
uuugaaauuuccauuaagagca

SEQ ID NO: 497474 - RNA, 23 nt, Human
cacagaaaggucauugcagucag

SEQ ID NO: 497475 - RNA, 18 nt, Human
ccaauacagaaggaaaga

SEQ ID NO: 497476 - RNA, 20 nt, Human
cgaauggauucuauucugac

SEQ ID NO: 497477 - RNA, 23 nt, Human
ucuauucugaccaauacagaagg

SEQ ID NO: 497478 - RNA, 19 nt, Human
aaacuugccaccaguucug

SEQ ID NO: 497479 - RNA, 22 nt, Human
aaaugcaggaagcuggugagcc

SEQ ID NO: 497480 - RNA, 19 nt, Human
aaccuaagaguccagagaa

SEQ ID NO: 497481 - RNA, 21 nt, Human
aacucccaagcaauuccagac

SEQ ID NO: 497482 - RNA, 22 nt, Human
aagcaggggcaaaggggaaaga

SEQ ID NO: 497483 - RNA, 22 nt, Human
aaggccccgacuucugcuuuuc

SEQ ID NO: 497484 - RNA, 20 nt, Human
acaggcggcacuugcagcag

SEQ ID NO: 497485 - RNA, 20 nt, Human
agccacgcaggaagaagcuu

SEQ ID NO: 497486 - RNA, 21 nt, Human
agccaugagcaauucucuccu

SEQ ID NO: 497487 - RNA, 21 nt, Human
agcccccagcccugcuggccc

SEQ ID NO: 497488 - RNA, 23 nt, Human
aggcacugguggcugggagugcu

SEQ ID NO: 497489 - RNA, 18 nt, Human
agggagcugucccuggac

SEQ ID NO: 497490 - RNA, 19 nt, Human
auggcaacagagggauggc

SEQ ID NO: 497491 - RNA, 26 nt, Human
caacucccaagcaauuccagacguuc

SEQ ID NO: 497492 - RNA, 22 nt, Human
cacgccuccaaggccccgacuu

SEQ ID NO: 497493 - RNA, 21 nt, Human
cacucucuucacucuucuuga

SEQ ID NO: 497494 - RNA, 20 nt, Human
cagcagcuccaggcccuacc

SEQ ID NO: 497495 - RNA, 19 nt, Human
cagcugccugucuguuggu

SEQ ID NO: 497496 - RNA, 23 nt, Human
cagcugccugucuguuggucacu

SEQ ID NO: 497497 - RNA, 24 nt, Human
ccaacucccaagcaauuccagacg

SEQ ID NO: 497498 - RNA, 27 nt, Human
ccaacucccaagcaauuccagacguuc

SEQ ID NO: 497499 - RNA, 20 nt, Human
ccagcccugcuggcccucgg

SEQ ID NO: 497500 - RNA, 22 nt, Human
cccccaggugaacagaucuccg

SEQ ID NO: 497501 - RNA, 21 nt, Human
ccccgacuaagacucccuaga

SEQ ID NO: 497502 - RNA, 23 nt, Human
ccccuccauggcccccaggugaa

SEQ ID NO: 497503 - RNA, 20 nt, Human
cccgacuucugcuuuucuug

SEQ ID NO: 497504 - RNA, 18 nt, Human
cccugcuggcccucgggg

SEQ ID NO: 497505 - RNA, 20 nt, Human
cccugcuggcccucggggaa

SEQ ID NO: 497506 - RNA, 20 nt, Human
cccuggacuuccuggggccc

SEQ ID NO: 497507 - RNA, 19 nt, Human
ccgauggcgaggcaggaca

SEQ ID NO: 497508 - RNA, 20 nt, Human
ccuggggcccaugagagcuc

SEQ ID NO: 497509 - RNA, 21 nt, Human
cgacuaagacucccuagaaac

SEQ ID NO: 497510 - RNA, 26 nt, Human
cgacuaagacucccuagaaacggcac

SEQ ID NO: 497511 - RNA, 20 nt, Human
cuagugaugagaccucuccc

SEQ ID NO: 497512 - RNA, 18 nt, Human
cuccaggcccuaccugga

SEQ ID NO: 497513 - RNA, 20 nt, Human
cucuccucccucuggccuca

SEQ ID NO: 497514 - RNA, 28 nt, Human
cugcugcucuccggagcccccagcccug

SEQ ID NO: 497515 - RNA, 19 nt, Human
cugucccuggacuuccugg

SEQ ID NO: 497516 - RNA, 20 nt, Human
gagcaauucucuccucccuc

SEQ ID NO: 497517 - RNA, 21 nt, Human
gcugucccuggacuuccuggg

SEQ ID NO: 497518 - RNA, 18 nt, Human
ggagcccccagcccugcu

SEQ ID NO: 497519 - RNA, 23 nt, Human
gggcaggcugagaaggacguggg

SEQ ID NO: 497520 - RNA, 22 nt, Human
ggggaagccaaucaagcugaug

SEQ ID NO: 497521 - RNA, 23 nt, Human
uaccuggacccgaggggaaaguc

SEQ ID NO: 497522 - RNA, 18 nt, Human
uagaaacggcacguccuc

SEQ ID NO: 497523 - RNA, 22 nt, Human
uccacacacagagcugggauga

SEQ ID NO: 497524 - RNA, 18 nt, Human
uccaggcccuaccuggac

SEQ ID NO: 497525 - RNA, 20 nt, Human
ucccucuggccucaguuucc

SEQ ID NO: 497526 - RNA, 21 nt, Human
uccggagcccccagcccugcu

SEQ ID NO: 497527 - RNA, 21 nt, Human
uccuggggcccaugagagcuc

SEQ ID NO: 497528 - RNA, 21 nt, Human
ucuagugaugagaccucuccc

SEQ ID NO: 497529 - RNA, 18 nt, Human
ucuccggagcccccagcc

SEQ ID NO: 497530 - RNA, 20 nt, Human
ucugugagauggggagaauc

SEQ ID NO: 497531 - RNA, 22 nt, Human
ugagaaggacgugggccaggua

SEQ ID NO: 497532 - RNA, 22 nt, Human
ugagaaggacgugggccaggua

SEQ ID NO: 497533 - RNA, 21 nt, Human
ugagauggggagaaucuuuga

SEQ ID NO: 497534 - RNA, 21 nt, Human
ugagcaauucucuccucccuc

SEQ ID NO: 497535 - RNA, 24 nt, Human
ugggaugaagcaggggcaaagggg

SEQ ID NO: 497536 - RNA, 18 nt, Human
uggggcccaugagagcuc

SEQ ID NO: 497537 - RNA, 23 nt, Human
uggguccccccuccauggccccc

SEQ ID NO: 497538 - RNA, 22 nt, Human
uggugagccccgacuaagacuc

SEQ ID NO: 497539 - RNA, 25 nt, Human
uuaguggguccccccuccauggccc

SEQ ID NO: 497540 - RNA, 18 nt, Human
uucagcuucuuuugguuc

SEQ ID NO: 497541 - RNA, 21 nt, Human
uuccuugucugugagaugggg

SEQ ID NO: 497542 - RNA, 18 nt, Human
uucuucggcuauuucuag

SEQ ID NO: 497543 - RNA, 18 nt, Human
uucuuggugccgcgcugc

SEQ ID NO: 497544 - RNA, 23 nt, Human
uucuuggugccgcgcugcuuccu

SEQ ID NO: 497545 - RNA, 24 nt, Human
uuggucacuguugucgagggcagg

SEQ ID NO: 497546 - RNA, 20 nt, Human
uuuaguggguccccccucca

SEQ ID NO: 497547 - RNA, 19 nt, Human
aggagcggggagcggcgcc

SEQ ID NO: 497548 - RNA, 24 nt, Human
cgccguugccagcggagaaaggcg

SEQ ID NO: 497549 - RNA, 21 nt, Human
gaggaggagcggggagcggcg

SEQ ID NO: 497550 - RNA, 19 nt, Human
aaguagcccucauguaaaa

SEQ ID NO: 497551 - RNA, 20 nt, Human
aauaaagaacaccuguacag

SEQ ID NO: 497552 - RNA, 21 nt, Human
acuacuucccacccugaacag

SEQ ID NO: 497553 - RNA, 18 nt, Human
agaacugccaaggaacug

SEQ ID NO: 497554 - RNA, 18 nt, Human
agaguuucuucuuuggca

SEQ ID NO: 497555 - RNA, 22 nt, Human
aggcagaggggucagcucgggg

SEQ ID NO: 497556 - RNA, 19 nt, Human
agggagaggguggcacaaa

SEQ ID NO: 497557 - RNA, 20 nt, Human
cacccugaacagaauccagg

SEQ ID NO: 497558 - RNA, 21 nt, Human
cagagguuggaggauuugggg

SEQ ID NO: 497559 - RNA, 28 nt, Human
cagcucugccagcucgaaucagcuccug

SEQ ID NO: 497560 - RNA, 23 nt, Human
caggagcuagagugcuggccagg

SEQ ID NO: 497561 - RNA, 20 nt, Human
cauguaaaauaaagaacacc

SEQ ID NO: 497562 - RNA, 20 nt, Human
cccacccugaacagaaucca

SEQ ID NO: 497563 - RNA, 23 nt, Human
cccucauguaaaauaaagaacac

SEQ ID NO: 497564 - RNA, 27 nt, Human
cugaacagaauccagggaugcucuguc

SEQ ID NO: 497565 - RNA, 19 nt, Human
ggcagggcuguggccccag

SEQ ID NO: 497566 - RNA, 27 nt, Human
gggagaacugccaaggaacuggagggg

SEQ ID NO: 497567 - RNA, 21 nt, Human
gggcagggcuguggccccaga

SEQ ID NO: 497568 - RNA, 18 nt, Human
guaaaauaaagaacaccu

SEQ ID NO: 497569 - RNA, 19 nt, Human
ucagaagcugggguugagg

SEQ ID NO: 497570 - RNA, 21 nt, Human
ucuguccuggacacgucagaa

SEQ ID NO: 497571 - RNA, 19 nt, Human
uggcaagggagaggguggc

SEQ ID NO: 497572 - RNA, 25 nt, Human
ugguuugggggagaacugccaagga

SEQ ID NO: 497573 - RNA, 20 nt, Human
uguggccccagagguuggag

SEQ ID NO: 497574 - RNA, 20 nt, Human
uucccacccugaacagaauc

SEQ ID NO: 497575 - RNA, 21 nt, Human
uuggaggauuuggggggagag

SEQ ID NO: 497576 - RNA, 21 nt, Human
aaacauaguaaguuucaaagc

SEQ ID NO: 497577 - RNA, 23 nt, Human
aagaggccaccaaagaguccauu

SEQ ID NO: 497578 - RNA, 20 nt, Human
aagcugaucccucucuuuuc

SEQ ID NO: 497579 - RNA, 23 nt, Human
aagcugaucccucucuuuuccug

SEQ ID NO: 497580 - RNA, 20 nt, Human
aaguuucaaagcaaauugug

SEQ ID NO: 497581 - RNA, 18 nt, Human
acacugcggugacaggaa

SEQ ID NO: 497582 - RNA, 22 nt, Human
acuacagaagaaaaauaagcaa

SEQ ID NO: 497583 - RNA, 22 nt, Human
agaaaagaauagcucaugccug

SEQ ID NO: 497584 - RNA, 23 nt, Human
agaaaguuaggauuuuagcugaa

SEQ ID NO: 497585 - RNA, 24 nt, Human
agaauaaacauaguaaguuucaaa

SEQ ID NO: 497586 - RNA, 24 nt, Human
agagcccuuucccaguuaagaccc

SEQ ID NO: 497587 - RNA, 21 nt, Human
agagguugauguugagucugg

SEQ ID NO: 497588 - RNA, 19 nt, Human
aguuugaaagacauccaga

SEQ ID NO: 497589 - RNA, 24 nt, Human
aucccucucuuuuccuggugucag

SEQ ID NO: 497590 - RNA, 18 nt, Human
auccgauuuggcauggag

SEQ ID NO: 497591 - RNA, 19 nt, Human
auuagcuuaucaaucugug

SEQ ID NO: 497592 - RNA, 25 nt, Human
caccaaagaguccauuaaacagcca

SEQ ID NO: 497593 - RNA, 20 nt, Human
cagacaaaauacuuuucaaa

SEQ ID NO: 497594 - RNA, 18 nt, Human
cagcaaggacgaggccau

SEQ ID NO: 497595 - RNA, 21 nt, Human
caguuuucuguuacugugcuc

SEQ ID NO: 497596 - RNA, 21 nt, Human
caugccugcccuaagaggcaa

SEQ ID NO: 497597 - RNA, 22 nt, Human
cccacagccuauagauucaaaa

SEQ ID NO: 497598 - RNA, 20 nt, Human
ccugcccuaagaggcaacac

SEQ ID NO: 497599 - RNA, 19 nt, Human
ccuuaaagaggccaccaaa

SEQ ID NO: 497600 - RNA, 22 nt, Human
cguaccgacucucuccgaucua

SEQ ID NO: 497601 - RNA, 23 nt, Human
cugaagcuaguuugaaagacauc

SEQ ID NO: 497602 - RNA, 21 nt, Human
cuuaagaguggccugccccuc

SEQ ID NO: 497603 - RNA, 25 nt, Human
gaacacaacugagguguuaccacac

SEQ ID NO: 497604 - RNA, 20 nt, Human
gcccuaagaggcaacaccac

SEQ ID NO: 497605 - RNA, 18 nt, Human
gcuuuuuacaagucuguu

SEQ ID NO: 497606 - RNA, 19 nt, Human
gggauaugauguggucaca

SEQ ID NO: 497607 - RNA, 20 nt, Human
guggauccgauuuggcaugg

SEQ ID NO: 497608 - RNA, 23 nt, Human
uaaacauaguaaguuucaaagca

SEQ ID NO: 497609 - RNA, 20 nt, Human
uacaagucuguuuucuguua

SEQ ID NO: 497610 - RNA, 21 nt, Human
uacagcacgucaaguuuuaaa

SEQ ID NO: 497611 - RNA, 19 nt, Human
uaccuugccuuaauagauu

SEQ ID NO: 497612 - RNA, 22 nt, Human
uagaauaaacauaguaaguuuc

SEQ ID NO: 497613 - RNA, 23 nt, Human
uaugcaauaccacacacugcggu

SEQ ID NO: 497614 - RNA, 22 nt, Human
uauuacaguguaucuuauccaa

SEQ ID NO: 497615 - RNA, 21 nt, Human
uauugauugagccauagggga

SEQ ID NO: 497616 - RNA, 21 nt, Human
ucaaagcaaauuguguauacc

SEQ ID NO: 497617 - RNA, 19 nt, Human
uccacuacagaagaaaaau

SEQ ID NO: 497618 - RNA, 23 nt, Human
uccagacaaaauacuuuucaaaa

SEQ ID NO: 497619 - RNA, 23 nt, Human
uccgaucuaaauucucuaaacau

SEQ ID NO: 497620 - RNA, 25 nt, Human
ucucuuuuccuggugucaggagaac

SEQ ID NO: 497621 - RNA, 21 nt, Human
ucuguuauaaacagcaaggac

SEQ ID NO: 497622 - RNA, 20 nt, Human
ucuuauaucccuuugggagg

SEQ ID NO: 497623 - RNA, 19 nt, Human
ugaaagacauccagacaaa

SEQ ID NO: 497624 - RNA, 27 nt, Human
ugaaauaucauuaauuagcauuaaaaa

SEQ ID NO: 497625 - RNA, 22 nt, Human
ugaagcugaucccucucuuuuc

SEQ ID NO: 497626 - RNA, 23 nt, Human
ugacaggaagaaaaaaacauuuc

SEQ ID NO: 497627 - RNA, 26 nt, Human
ugacaggaagaaaaaaacauuucaaa

SEQ ID NO: 497628 - RNA, 19 nt, Human
ugcaauaccacacacugcg

SEQ ID NO: 497629 - RNA, 20 nt, Human
ugcaauaccacacacugcgg

SEQ ID NO: 497630 - RNA, 22 nt, Human
ugucaccgaaagcagucucugu

SEQ ID NO: 497631 - RNA, 19 nt, Human
ugugaaaccagaggaucug

SEQ ID NO: 497632 - RNA, 20 nt, Human
ugugaaaccagaggaucuga

SEQ ID NO: 497633 - RNA, 23 nt, Human
ugugaaaccagaggaucugacga

SEQ ID NO: 497634 - RNA, 23 nt, Human
uguggucacagacuccagaaaga

SEQ ID NO: 497635 - RNA, 20 nt, Human
uuaaauaauaucugaagcua

SEQ ID NO: 497636 - RNA, 27 nt, Human
uuaagacccuuuccccuucuguucucc

SEQ ID NO: 497637 - RNA, 24 nt, Human
uuaccacacagagcccuuucccag

SEQ ID NO: 497638 - RNA, 28 nt, Human
uucaaaaaugaaacccacagccuauaga

SEQ ID NO: 497639 - RNA, 18 nt, Human
uucacauccacuacagaa

SEQ ID NO: 497640 - RNA, 19 nt, Human
uuugggaggcccccaaucc

SEQ ID NO: 497641 - RNA, 24 nt, Human
aaacuguugggauuacagguguga

SEQ ID NO: 497642 - RNA, 24 nt, Human
aaagcucugggggaaauucuuggu

SEQ ID NO: 497643 - RNA, 22 nt, Human
aaaggcaucucuagcuccaaag

SEQ ID NO: 497644 - RNA, 21 nt, Human
aacucuuuguaggucugagac

SEQ ID NO: 497645 - RNA, 25 nt, Human
aaggcaucucuagcuccaaagucuu

SEQ ID NO: 497646 - RNA, 24 nt, Human
aagugauccacccgccucggucuu

SEQ ID NO: 497647 - RNA, 21 nt, Human
aagugcaguggugugaucuca

SEQ ID NO: 497648 - RNA, 25 nt, Human
aauuucacacacccagugaaugcug

SEQ ID NO: 497649 - RNA, 18 nt, Human
acaagaauaaauacauua

SEQ ID NO: 497650 - RNA, 18 nt, Human
accauguuggccaggcug

SEQ ID NO: 497651 - RNA, 21 nt, Human
acccaaagaacaaagaagagc

SEQ ID NO: 497652 - RNA, 22 nt, Human
acccgccucggucuuccaaacu

SEQ ID NO: 497653 - RNA, 22 nt, Human
accugcucuggguuguugggga

SEQ ID NO: 497654 - RNA, 18 nt, Human
acuguugggauuacaggu

SEQ ID NO: 497655 - RNA, 21 nt, Human
agaaggacaaaugcaugaaag

SEQ ID NO: 497656 - RNA, 22 nt, Human
agagcagguguugggacuggau

SEQ ID NO: 497657 - RNA, 18 nt, Human
agauggaagggaaggcag

SEQ ID NO: 497658 - RNA, 19 nt, Human
agcaguggcuugagccugg

SEQ ID NO: 497659 - RNA, 21 nt, Human
aggacaaaugcaugaaaaaga

SEQ ID NO: 497660 - RNA, 20 nt, Human
aggcaagagcagguguuggg

SEQ ID NO: 497661 - RNA, 18 nt, Human
aggcaggcaccccggggc

SEQ ID NO: 497662 - RNA, 20 nt, Human
aggcauuuucauuuuauuua

SEQ ID NO: 497663 - RNA, 21 nt, Human
agggaggggaguggugacagg

SEQ ID NO: 497664 - RNA, 20 nt, Human
agggaggguuuuggaggaag

SEQ ID NO: 497665 - RNA, 26 nt, Human
aggggucccagaguggcauugucagc

SEQ ID NO: 497666 - RNA, 21 nt, Human
agguguugggacuggaugacu

SEQ ID NO: 497667 - RNA, 21 nt, Human
agguguugggacuggaugacu

SEQ ID NO: 497668 - RNA, 19 nt, Human
aguaggagacagaucagaa

SEQ ID NO: 497669 - RNA, 19 nt, Human
agugcaguggugugaucuc

SEQ ID NO: 497670 - RNA, 21 nt, Human
agugcaguggugugaucucag

SEQ ID NO: 497671 - RNA, 23 nt, Human
agugcaguggugugaucucagcu

SEQ ID NO: 497672 - RNA, 24 nt, Human
agugcaguggugugaucucagcuc

SEQ ID NO: 497673 - RNA, 24 nt, Human
aguggugugaucucagcucacugc

SEQ ID NO: 497674 - RNA, 23 nt, Human
auggggguuucaccauguuggcc

SEQ ID NO: 497675 - RNA, 26 nt, Human
auucugaagacaaauuucacuuacuu

SEQ ID NO: 497676 - RNA, 20 nt, Human
auuucacacacccagugaau

SEQ ID NO: 497677 - RNA, 23 nt, Human
caagacgauaggucuccuauggc

SEQ ID NO: 497678 - RNA, 20 nt, Human
caagcgauucuccugccuca

SEQ ID NO: 497679 - RNA, 22 nt, Human
caagcgauucuccugccucagc

SEQ ID NO: 497680 - RNA, 19 nt, Human
caagggguguggugaaguc

SEQ ID NO: 497681 - RNA, 19 nt, Human
caaguuccaagacgauagg

SEQ ID NO: 497682 - RNA, 18 nt, Human
cacacgagcgccggcagc

SEQ ID NO: 497683 - RNA, 21 nt, Human
caccauguuggccaggcuggu

SEQ ID NO: 497684 - RNA, 24 nt, Human
caccauguuggccaggcuggucuc

SEQ ID NO: 497685 - RNA, 27 nt, Human
caccauguuggccaggcuggucucaaa

SEQ ID NO: 497686 - RNA, 18 nt, Human
cacugcaaccucugccuc

SEQ ID NO: 497687 - RNA, 21 nt, Human
cacugcaaccucugccuccca

SEQ ID NO: 497688 - RNA, 20 nt, Human
cagaacauucugucaccugu

SEQ ID NO: 497689 - RNA, 21 nt, Human
cagaagccgggucaggcacac

SEQ ID NO: 497690 - RNA, 20 nt, Human
cagcaguggcuugagccugg

SEQ ID NO: 497691 - RNA, 19 nt, Human
cagcuaggggugaagagau

SEQ ID NO: 497692 - RNA, 20 nt, Human
cagcugaucugcuagggugu

SEQ ID NO: 497693 - RNA, 25 nt, Human
caggagagauggggguuucaccaug

SEQ ID NO: 497694 - RNA, 22 nt, Human
caggggacccaaagaacaaaga

SEQ ID NO: 497695 - RNA, 21 nt, Human
cauacugccccaggcugcugg

SEQ ID NO: 497696 - RNA, 21 nt, Human
cauagacccucugaaguccaa

SEQ ID NO: 497697 - RNA, 24 nt, Human
cauguuggccaggcuggucucaaa

SEQ ID NO: 497698 - RNA, 19 nt, Human
ccaaaacagaugugucccu

SEQ ID NO: 497699 - RNA, 21 nt, Human
ccaaacuguugggauuacagg

SEQ ID NO: 497700 - RNA, 21 nt, Human
ccaaacuguugggauuacagg

SEQ ID NO: 497701 - RNA, 21 nt, Human
ccaaacuguugggauuacagg

SEQ ID NO: 497702 - RNA, 24 nt, Human
ccaaacuguugggauuacaggugu

SEQ ID NO: 497703 - RNA, 33 nt, Human
ccaaagcucuggaauuucacacacccagugagg

SEQ ID NO: 497704 - RNA, 25 nt, Human
ccagucacuaacaguuuucugugcu

SEQ ID NO: 497705 - RNA, 20 nt, Human
ccauccccugaacuaaucuu

SEQ ID NO: 497706 - RNA, 23 nt, Human
cccagguucaagcgauucuccug

SEQ ID NO: 497707 - RNA, 19 nt, Human
ccccaggcugcuggaaccc

SEQ ID NO: 497708 - RNA, 21 nt, Human
ccccggugcccccgaagcccg

SEQ ID NO: 497709 - RNA, 24 nt, Human
ccccugaacuaaucuucagaccuc

SEQ ID NO: 497710 - RNA, 24 nt, Human
ccccugaguuaacaguuccugugg

SEQ ID NO: 497711 - RNA, 21 nt, Human
cccgaguagcugggacuacau

SEQ ID NO: 497712 - RNA, 18 nt, Human
cccuggggugauggaccc

SEQ ID NO: 497713 - RNA, 25 nt, Human
ccggcagccacgggaaguggauccc

SEQ ID NO: 497714 - RNA, 30 nt, Human
ccggcagccacgggaaguggauccccucuu

SEQ ID NO: 497715 - RNA, 19 nt, Human
ccuaggaugaagugcagug

SEQ ID NO: 497716 - RNA, 24 nt, Human
ccucccagguucaagcgauucucc

SEQ ID NO: 497717 - RNA, 25 nt, Human
ccuccuacuccagccucccaugugc

SEQ ID NO: 497718 - RNA, 23 nt, Human
ccucugaaguccaacuauggacc

SEQ ID NO: 497719 - RNA, 22 nt, Human
ccugacuucaagugauccaccc

SEQ ID NO: 497720 - RNA, 18 nt, Human
ccugccccaacuucagga

SEQ ID NO: 497721 - RNA, 18 nt, Human
ccugugaaugacucaaug

SEQ ID NO: 497722 - RNA, 19 nt, Human
cgauugaagacugcugauu

SEQ ID NO: 497723 - RNA, 24 nt, Human
cucacugcaaccucugccucccag

SEQ ID NO: 497724 - RNA, 24 nt, Human
cucacugcaaccucugccucccag

SEQ ID NO: 497725 - RNA, 24 nt, Human
cucagccucccgaguagcugggac

SEQ ID NO: 497726 - RNA, 21 nt, Human
cucccaguugggucucucugc

SEQ ID NO: 497727 - RNA, 26 nt, Human
cucugcucccuguuccuucucuucca

SEQ ID NO: 497728 - RNA, 23 nt, Human
cugcaaccucugccucccagguu

SEQ ID NO: 497729 - RNA, 24 nt, Human
cugcaaccucugccucccagguuc

SEQ ID NO: 497730 - RNA, 23 nt, Human
cugccucagccucccgaguagcu

SEQ ID NO: 497731 - RNA, 23 nt, Human
cugcucccuguuccuucucuucc

SEQ ID NO: 497732 - RNA, 23 nt, Human
cuguagucuuccccggugccccc

SEQ ID NO: 497733 - RNA, 19 nt, Human
cugugcgaggcgauggcca

SEQ ID NO: 497734 - RNA, 18 nt, Human
gaaaaagaagaaugauuc

SEQ ID NO: 497735 - RNA, 18 nt, Human
gaaagguuugggaauggu

SEQ ID NO: 497736 - RNA, 23 nt, Human
gaaccccugaguuaacaguuccu

SEQ ID NO: 497737 - RNA, 24 nt, Human
gacuucaagugauccacccgccuc

SEQ ID NO: 497738 - RNA, 23 nt, Human
gaggaaggggagggaagcuggau

SEQ ID NO: 497739 - RNA, 20 nt, Human
gaggccuugggggaagcaga

SEQ ID NO: 497740 - RNA, 20 nt, Human
gaguagcugggacuacaugc

SEQ ID NO: 497741 - RNA, 18 nt, Human
gauuacaggugugagcca

SEQ ID NO: 497742 - RNA, 22 nt, Human
gauuacaggugugagccaccgc

SEQ ID NO: 497743 - RNA, 22 nt, Human
gauuacaggugugagccaccgc

SEQ ID NO: 497744 - RNA, 21 nt, Human
gauucuccugccucagccucc

SEQ ID NO: 497745 - RNA, 20 nt, Human
gccucagccucccgaguagc

SEQ ID NO: 497746 - RNA, 24 nt, Human
gcgauucuccugccucagccuccc

SEQ ID NO: 497747 - RNA, 21 nt, Human
gcggcagcgagguguacagcc

SEQ ID NO: 497748 - RNA, 21 nt, Human
gcuugagccugguggccucag

SEQ ID NO: 497749 - RNA, 18 nt, Human
ggacccaaagaacaaaga

SEQ ID NO: 497750 - RNA, 22 nt, Human
ggagacagagucucgcucuguu

SEQ ID NO: 497751 - RNA, 24 nt, Human
ggagacagaucagaaagggagaua

SEQ ID NO: 497752 - RNA, 23 nt, Human
ggagccaaaacagaugugucccu

SEQ ID NO: 497753 - RNA, 20 nt, Human
ggaugaagugcaguggugug

SEQ ID NO: 497754 - RNA, 22 nt, Human
ggccagcccgugccgcgaacac

SEQ ID NO: 497755 - RNA, 24 nt, Human
ggcuggucucaaacuccugacuuc

SEQ ID NO: 497756 - RNA, 18 nt, Human
ggcuugagccugguggcc

SEQ ID NO: 497757 - RNA, 18 nt, Human
gggaagcagaugauggga

SEQ ID NO: 497758 - RNA, 18 nt, Human
gggagggaagcuggaugg

SEQ ID NO: 497759 - RNA, 28 nt, Human
gggcacucuuugguuugucccguccccg

SEQ ID NO: 497760 - RNA, 23 nt, Human
ggggaagcagaugaugggagggu

SEQ ID NO: 497761 - RNA, 19 nt, Human
ggggguuucaccauguugg

SEQ ID NO: 497762 - RNA, 24 nt, Human
ggggguuucaccauguuggccagg

SEQ ID NO: 497763 - RNA, 22 nt, Human
gggguuucaccauguuggccag

SEQ ID NO: 497764 - RNA, 23 nt, Human
gggguuucaccauguuggccagg

SEQ ID NO: 497765 - RNA, 19 nt, Human
ggguguggggaggugggag

SEQ ID NO: 497766 - RNA, 19 nt, Human
ggucagcugggcaagaagc

SEQ ID NO: 497767 - RNA, 21 nt, Human
gguguggggaggugggaggga

SEQ ID NO: 497768 - RNA, 21 nt, Human
gguucugagucgaacuggagg

SEQ ID NO: 497769 - RNA, 24 nt, Human
gugauccacccgccucggucuucc

SEQ ID NO: 497770 - RNA, 24 nt, Human
guuccuucucuuccagagcagaau

SEQ ID NO: 497771 - RNA, 21 nt, Human
uaaagaguaggagacagauca

SEQ ID NO: 497772 - RNA, 21 nt, Human
uacacucagcugaucugcuag

SEQ ID NO: 497773 - RNA, 23 nt, Human
uacaggugugagccaccgcgccc

SEQ ID NO: 497774 - RNA, 18 nt, Human
uacccaacauugagggcu

SEQ ID NO: 497775 - RNA, 26 nt, Human
uacgagaagucaugcacugcugagcc

SEQ ID NO: 497776 - RNA, 18 nt, Human
uagaaaguuaacauuuug

SEQ ID NO: 497777 - RNA, 18 nt, Human
uagggugugccgagaauu

SEQ ID NO: 497778 - RNA, 19 nt, Human
ucacugcaaccucugccuc

SEQ ID NO: 497779 - RNA, 24 nt, Human
ucacugcaaccucugccucccagg

SEQ ID NO: 497780 - RNA, 25 nt, Human
ucacugcaaccucugccucccaggu

SEQ ID NO: 497781 - RNA, 23 nt, Human
ucagccucccgaguagcugggac

SEQ ID NO: 497782 - RNA, 27 nt, Human
ucagcucacugcaaccucugccuccca

SEQ ID NO: 497783 - RNA, 22 nt, Human
uccaaacuguugggauuacagg

SEQ ID NO: 497784 - RNA, 22 nt, Human
ucccagaguggcauugucagcu

SEQ ID NO: 497785 - RNA, 21 nt, Human
ucccagguucaagcgauucuc

SEQ ID NO: 497786 - RNA, 24 nt, Human
ucccagguucaagcgauucuccug

SEQ ID NO: 497787 - RNA, 21 nt, Human
ucccaugagauuauguaucuu

SEQ ID NO: 497788 - RNA, 21 nt, Human
ucccaugugccugucugccaa

SEQ ID NO: 497789 - RNA, 23 nt, Human
uccccggugcccccgaagcccgg

SEQ ID NO: 497790 - RNA, 18 nt, Human
uccccugaacuaaucuuc

SEQ ID NO: 497791 - RNA, 18 nt, Human
ucccgaguagcugggacu

SEQ ID NO: 497792 - RNA, 18 nt, Human
ucggucuuccaaacuguu

SEQ ID NO: 497793 - RNA, 21 nt, Human
ucuaacaggaaaccagucacu

SEQ ID NO: 497794 - RNA, 24 nt, Human
ucuccugccucagccucccgagua

SEQ ID NO: 497795 - RNA, 22 nt, Human
ucucgaacugcccaguauccac

SEQ ID NO: 497796 - RNA, 18 nt, Human
ucucgcucuguugccuag

SEQ ID NO: 497797 - RNA, 19 nt, Human
ucucgcucuguugccuagg

SEQ ID NO: 497798 - RNA, 19 nt, Human
ucucgcucuguugccuagg

SEQ ID NO: 497799 - RNA, 19 nt, Human
ucucgcucuguugccuagg

SEQ ID NO: 497800 - RNA, 20 nt, Human
ucucgcucuguugccuagga

SEQ ID NO: 497801 - RNA, 24 nt, Human
ucucgcucuguugccuaggaugaa

SEQ ID NO: 497802 - RNA, 24 nt, Human
ucucuggcucccaguugggucucu

SEQ ID NO: 497803 - RNA, 24 nt, Human
ucugcucccuguuccuucucuucc

SEQ ID NO: 497804 - RNA, 18 nt, Human
ucuggaaaaaacauacaa

SEQ ID NO: 497805 - RNA, 23 nt, Human
ucuggguuguuggggaagagggg

SEQ ID NO: 497806 - RNA, 24 nt, Human
ucuguugccuaggaugaagugcag

SEQ ID NO: 497807 - RNA, 23 nt, Human
ucuuucuuuuuuuuuuuugaggg

SEQ ID NO: 497808 - RNA, 19 nt, Human
ugaagugcaguggugugau

SEQ ID NO: 497809 - RNA, 19 nt, Human
ugaagugcaguggugugau

SEQ ID NO: 497810 - RNA, 28 nt, Human
ugaagugcaguggugugauggcucuagc

SEQ ID NO: 497811 - RNA, 18 nt, Human
ugaaugcuggcuuugccc

SEQ ID NO: 497812 - RNA, 21 nt, Human
ugacuucaagugauccacccg

SEQ ID NO: 497813 - RNA, 24 nt, Human
ugacuucaagugauccacccgccu

SEQ ID NO: 497814 - RNA, 20 nt, Human
ugagccucaggccaggccag

SEQ ID NO: 497815 - RNA, 22 nt, Human
ugaguacuugacugagaacauc

SEQ ID NO: 497816 - RNA, 24 nt, Human
ugagucccacuucuuuaaagcucu

SEQ ID NO: 497817 - RNA, 24 nt, Human
ugaguuaacaguuccuguggguaa

SEQ ID NO: 497818 - RNA, 21 nt, Human
ugcacuuaagaccugaaguuc

SEQ ID NO: 497819 - RNA, 22 nt, Human
ugcagucagacaucucuuuucc

SEQ ID NO: 497820 - RNA, 22 nt, Human
ugcaguggugugaucucagcuc

SEQ ID NO: 497821 - RNA, 21 nt, Human
ugccaucuggugguuaugcuu

SEQ ID NO: 497822 - RNA, 24 nt, Human
ugccuaggaugaagugcaguggug

SEQ ID NO: 497823 - RNA, 24 nt, Human
ugccucagccucccgaguagcugg

SEQ ID NO: 497824 - RNA, 20 nt, Human
uggaaaaaacauacaagaau

SEQ ID NO: 497825 - RNA, 21 nt, Human
uggaaaaaacauacaagaaua

SEQ ID NO: 497826 - RNA, 25 nt, Human
uggaaaaggcaucucuagcuccaaa

SEQ ID NO: 497827 - RNA, 23 nt, Human
uggaccccaaguuaagaaccccu

SEQ ID NO: 497828 - RNA, 24 nt, Human
uggaccccaaguuaagaaccccuu

SEQ ID NO: 497829 - RNA, 19 nt, Human
uggaggaaggggagggaag

SEQ ID NO: 497830 - RNA, 21 nt, Human
uggaggaaggggagggaagcu

SEQ ID NO: 497831 - RNA, 18 nt, Human
uggagguaacgagggaaa

SEQ ID NO: 497832 - RNA, 21 nt, Human
uggauucucccccaaagcucu

SEQ ID NO: 497833 - RNA, 24 nt, Human
uggccaggcuggucucaaacuccu

SEQ ID NO: 497834 - RNA, 24 nt, Human
uggcuaaacuugcuuucagcacug

SEQ ID NO: 497835 - RNA, 21 nt, Human
ugggagggaggguuuuggagg

SEQ ID NO: 497836 - RNA, 19 nt, Human
ugggauuacaggugugagc

SEQ ID NO: 497837 - RNA, 21 nt, Human
ugggauuacaggugugagcca

SEQ ID NO: 497838 - RNA, 22 nt, Human
ugggauuacaggugugagccac

SEQ ID NO: 497839 - RNA, 23 nt, Human
ugggauuacaggugugagccacc

SEQ ID NO: 497840 - RNA, 24 nt, Human
ugggauuacaggugugagccaccg

SEQ ID NO: 497841 - RNA, 18 nt, Human
uggggaggugggagggag

SEQ ID NO: 497842 - RNA, 19 nt, Human
uggggaggugggagggagg

SEQ ID NO: 497843 - RNA, 21 nt, Human
ugggggaagcagaugauggga

SEQ ID NO: 497844 - RNA, 23 nt, Human
ugggggaagcagaugaugggagg

SEQ ID NO: 497845 - RNA, 24 nt, Human
uggugugaucucagcucacugcaa

SEQ ID NO: 497846 - RNA, 23 nt, Human
ugguuugucauggcuaaacuugc

SEQ ID NO: 497847 - RNA, 24 nt, Human
uguaguaagggggugggagaagga

SEQ ID NO: 497848 - RNA, 19 nt, Human
uguggggaggugggaggga

SEQ ID NO: 497849 - RNA, 18 nt, Human
uguguuagaaaguuaaca

SEQ ID NO: 497850 - RNA, 26 nt, Human
uguuauggccaugucaagguucugag

SEQ ID NO: 497851 - RNA, 22 nt, Human
uguucaaaacucaccauuuauu

SEQ ID NO: 497852 - RNA, 20 nt, Human
uguucuggaggaaagaaugg

SEQ ID NO: 497853 - RNA, 21 nt, Human
uuaaacuuuuuuuuuaaccug

SEQ ID NO: 497854 - RNA, 21 nt, Human
uucaagcgauucuccugccuc

SEQ ID NO: 497855 - RNA, 23 nt, Human
uucaagcgauucuccugccucag

SEQ ID NO: 497856 - RNA, 24 nt, Human
uucaagcgauucuccugccucagc

SEQ ID NO: 497857 - RNA, 23 nt, Human
uucaagugauccacccgccucgg

SEQ ID NO: 497858 - RNA, 22 nt, Human
uuccccggugcccccgaagccc

SEQ ID NO: 497859 - RNA, 22 nt, Human
uuccuguguaacucccacugaa

SEQ ID NO: 497860 - RNA, 19 nt, Human
uucuuggugggugccagcc

SEQ ID NO: 497861 - RNA, 23 nt, Human
uuggaauaaaguacacucagcug

SEQ ID NO: 497862 - RNA, 21 nt, Human
uugggauuacaggugugagcc

SEQ ID NO: 497863 - RNA, 21 nt, Human
uugggucucucugcucccugu

SEQ ID NO: 497864 - RNA, 25 nt, Human
uuuaaccugaagaaaaucuuugugg

SEQ ID NO: 497865 - RNA, 24 nt, Human
uuucaccauguuggccaggcuggu

SEQ ID NO: 497866 - RNA, 18 nt, Human
uuuggaggaaggggaggg

SEQ ID NO: 497867 - RNA, 21 nt, Human
uuuggaggaaggggagggaag

SEQ ID NO: 497868 - RNA, 22 nt, Human
aagggcacaaggucuuuggucu

SEQ ID NO: 497869 - RNA, 20 nt, Human
aaucuugaacgccaugcccc

SEQ ID NO: 497870 - RNA, 20 nt, Human
accacugagcucagagaggu

SEQ ID NO: 497871 - RNA, 28 nt, Human
agacagaacaacuuaaaacucugcaaaa

SEQ ID NO: 497872 - RNA, 22 nt, Human
agacagggccgggcccucggga

SEQ ID NO: 497873 - RNA, 20 nt, Human
agagugcagcuagaaggucc

SEQ ID NO: 497874 - RNA, 25 nt, Human
agcagcaucuuggguuaacaagagc

SEQ ID NO: 497875 - RNA, 22 nt, Human
agcuugcacuccacaucacgug

SEQ ID NO: 497876 - RNA, 22 nt, Human
aggcaggaggcacagaggggac

SEQ ID NO: 497877 - RNA, 19 nt, Human
agguggucucggcccacgg

SEQ ID NO: 497878 - RNA, 21 nt, Human
aucacguguuuacugaaaaag

SEQ ID NO: 497879 - RNA, 23 nt, Human
cacacaguacagagugcagcuag

SEQ ID NO: 497880 - RNA, 22 nt, Human
cacguguuuacugaaaaagccc

SEQ ID NO: 497881 - RNA, 23 nt, Human
cagacagaacaacuuaaaacucu

SEQ ID NO: 497882 - RNA, 22 nt, Human
cagcccaucagggucacaucag

SEQ ID NO: 497883 - RNA, 24 nt, Human
caggaugaagucaacuugccucuu

SEQ ID NO: 497884 - RNA, 20 nt, Human
caucagggucacaucauggg

SEQ ID NO: 497885 - RNA, 24 nt, Human
caucucucguuuccauuccucccu

SEQ ID NO: 497886 - RNA, 26 nt, Human
caucuuggguuaacaagagcaaggac

SEQ ID NO: 497887 - RNA, 21 nt, Human
caugggcagacagggccgggc

SEQ ID NO: 497888 - RNA, 18 nt, Human
ccacagugaugacagacu

SEQ ID NO: 497889 - RNA, 18 nt, Human
ccacccccgagccacccu

SEQ ID NO: 497890 - RNA, 20 nt, Human
ccauuccucccucacugucc

SEQ ID NO: 497891 - RNA, 18 nt, Human
cccaaaguucccuccuuu

SEQ ID NO: 497892 - RNA, 20 nt, Human
cccagggacaggggaggagg

SEQ ID NO: 497893 - RNA, 18 nt, Human
ccccaaaguucccuccuu

SEQ ID NO: 497894 - RNA, 22 nt, Human
ccccaugggcccagggacaggg

SEQ ID NO: 497895 - RNA, 23 nt, Human
cccccgagccacccuugcccccg

SEQ ID NO: 497896 - RNA, 19 nt, Human
ccccgagccacccuugccc

SEQ ID NO: 497897 - RNA, 19 nt, Human
ccgagccacccuugccccc

SEQ ID NO: 497898 - RNA, 19 nt, Human
ccuccuuuaaaaacacggg

SEQ ID NO: 497899 - RNA, 25 nt, Human
cgagaucgacggugaugcccacugg

SEQ ID NO: 497900 - RNA, 21 nt, Human
cggggaggagggcuggcuggc

SEQ ID NO: 497901 - RNA, 18 nt, Human
cgggugcagccagcgcgg

SEQ ID NO: 497902 - RNA, 21 nt, Human
cucaaaauaccacugagcuca

SEQ ID NO: 497903 - RNA, 22 nt, Human
cucccucacuguccuccuccgc

SEQ ID NO: 497904 - RNA, 30 nt, Human
cuccuccgcggcuccugggaagggcacaaa

SEQ ID NO: 497905 - RNA, 19 nt, Human
cugacccuggcuguacagg

SEQ ID NO: 497906 - RNA, 18 nt, Human
cuggaaugacaggaugaa

SEQ ID NO: 497907 - RNA, 21 nt, Human
gaaaaaauaaacaugauucua

SEQ ID NO: 497908 - RNA, 20 nt, Human
gaagggcacaaggucuuugg

SEQ ID NO: 497909 - RNA, 19 nt, Human
gaaugacaggaugaaguca

SEQ ID NO: 497910 - RNA, 22 nt, Human
gacccagggaggugggcgacga

SEQ ID NO: 497911 - RNA, 20 nt, Human
gaugcccacuggggcacaga

SEQ ID NO: 497912 - RNA, 21 nt, Human
gcaaaagacacuuuaaaaaca

SEQ ID NO: 497913 - RNA, 22 nt, Human
gccacugccgggccccaugggc

SEQ ID NO: 497914 - RNA, 18 nt, Human
gccaugccccggcugcca

SEQ ID NO: 497915 - RNA, 18 nt, Human
gcucacaccagugaaguc

SEQ ID NO: 497916 - RNA, 22 nt, Human
gcuccugggaagggcacaaggu

SEQ ID NO: 497917 - RNA, 21 nt, Human
ggacaggggaggagggacagu

SEQ ID NO: 497918 - RNA, 22 nt, Human
ggaggagggacaguuggcuccc

SEQ ID NO: 497919 - RNA, 18 nt, Human
ggcuggcagaccccaggc

SEQ ID NO: 497920 - RNA, 23 nt, Human
gggaaagggguacaguuaaacau

SEQ ID NO: 497921 - RNA, 19 nt, Human
gggcgggugcgggccuggg

SEQ ID NO: 497922 - RNA, 23 nt, Human
gggcuggcuggcagaccccaggc

SEQ ID NO: 497923 - RNA, 22 nt, Human
ggguacagcauggcggacaagc

SEQ ID NO: 497924 - RNA, 23 nt, Human
guaaauccagguggucucggccc

SEQ ID NO: 497925 - RNA, 25 nt, Human
guuaacaagagcaaggacccaggga

SEQ ID NO: 497926 - RNA, 23 nt, Human
uaaaaacacgggucuagaaaugc

SEQ ID NO: 497927 - RNA, 21 nt, Human
uaccacugagcucagagaggu

SEQ ID NO: 497928 - RNA, 20 nt, Human
uagcagcaucuuggguuaac

SEQ ID NO: 497929 - RNA, 20 nt, Human
uagugggaaggggaggagcu

SEQ ID NO: 497930 - RNA, 24 nt, Human
uccaaaaucuugaacgccaugccc

SEQ ID NO: 497931 - RNA, 19 nt, Human
ucccugggaggaggagcag

SEQ ID NO: 497932 - RNA, 21 nt, Human
ucccugggaggaggagcaggg

SEQ ID NO: 497933 - RNA, 19 nt, Human
uccuuuaaaaacacggguc

SEQ ID NO: 497934 - RNA, 22 nt, Human
ucucguuuccauuccucccuca

SEQ ID NO: 497935 - RNA, 19 nt, Human
ugacaggaugaagucaacu

SEQ ID NO: 497936 - RNA, 21 nt, Human
ugaggcaggaggcacagagcc

SEQ ID NO: 497937 - RNA, 22 nt, Human
ugaggcaggaggcacagagccc

SEQ ID NO: 497938 - RNA, 25 nt, Human
ugauaaaaauuccuuagggugggag

SEQ ID NO: 497939 - RNA, 21 nt, Human
ugauaaaagggagagcugaaa

SEQ ID NO: 497940 - RNA, 19 nt, Human
ugccgggccccaugggccc

SEQ ID NO: 497941 - RNA, 21 nt, Human
uggcagguucugcaguaacac

SEQ ID NO: 497942 - RNA, 19 nt, Human
ugggaagggcacaaggucu

SEQ ID NO: 497943 - RNA, 24 nt, Human
ugggagcaaaaucacauucccaag

SEQ ID NO: 497944 - RNA, 20 nt, Human
ugggaggaggagcaggggcu

SEQ ID NO: 497945 - RNA, 21 nt, Human
ugggaggaggagcaggggcug

SEQ ID NO: 497946 - RNA, 22 nt, Human
ugggaggaggagcaggggcugg

SEQ ID NO: 497947 - RNA, 18 nt, Human
uggucucaggauguugca

SEQ ID NO: 497948 - RNA, 24 nt, Human
uucaucuccaaaaucuugaacgcc

SEQ ID NO: 497949 - RNA, 20 nt, Human
uuccugagggaaagggguac

SEQ ID NO: 497950 - RNA, 18 nt, Human
uuuuuuuuuuuuuuuuug

SEQ ID NO: 497951 - RNA, 23 nt, Human
uuuuuuuuuuuuuuuuuugguuu

SEQ ID NO: 497952 - RNA, 21 nt, Human
aaagcaaacaaauagagguca

SEQ ID NO: 497953 - RNA, 23 nt, Human
aacuacaagggccaucuaaaacg

SEQ ID NO: 497954 - RNA, 21 nt, Human
aagcagaaaggggcccucagc

SEQ ID NO: 497955 - RNA, 25 nt, Human
acaaaggcaguaacugcacucacaa

SEQ ID NO: 497956 - RNA, 18 nt, Human
acguggccuggaggggau

SEQ ID NO: 497957 - RNA, 20 nt, Human
agaggauccaccugguucau

SEQ ID NO: 497958 - RNA, 23 nt, Human
agcuucugguuuggcacauggga

SEQ ID NO: 497959 - RNA, 24 nt, Human
aggccaucgaucugaacccccagc

SEQ ID NO: 497960 - RNA, 19 nt, Human
agggagggagcagggcuac

SEQ ID NO: 497961 - RNA, 21 nt, Human
agggcagggccggcugaagga

SEQ ID NO: 497962 - RNA, 20 nt, Human
aucuaaaacguggccuggag

SEQ ID NO: 497963 - RNA, 21 nt, Human
cacugcucucugcacaucacg

SEQ ID NO: 497964 - RNA, 19 nt, Human
cagaaaggacaacauggac

SEQ ID NO: 497965 - RNA, 21 nt, Human
cagaacacgggaacugacaac

SEQ ID NO: 497966 - RNA, 24 nt, Human
cagagaagcagaaaggggcccuca

SEQ ID NO: 497967 - RNA, 27 nt, Human
cagcuacucuccuggggggaggauccc

SEQ ID NO: 497968 - RNA, 21 nt, Human
caucuguuccccagaucuggg

SEQ ID NO: 497969 - RNA, 23 nt, Human
cauggacaaggccaucgaucuga

SEQ ID NO: 497970 - RNA, 21 nt, Human
ccacacaaaggcaguaacugc

SEQ ID NO: 497971 - RNA, 22 nt, Human
ccacacaaaggcaguaacugca

SEQ ID NO: 497972 - RNA, 23 nt, Human
ccagcagcgauagguuggcaaag

SEQ ID NO: 497973 - RNA, 21 nt, Human
cccacgugcucaucuguuccc

SEQ ID NO: 497974 - RNA, 21 nt, Human
cccgcaacuacaagggccauc

SEQ ID NO: 497975 - RNA, 27 nt, Human
cccgcaacuacaagggccaucuaaaac

SEQ ID NO: 497976 - RNA, 21 nt, Human
ccggcagcgcagcacgcccuu

SEQ ID NO: 497977 - RNA, 19 nt, Human
ccucagcaccacuaggcca

SEQ ID NO: 497978 - RNA, 23 nt, Human
ccucccaggcaugaccucuucuc

SEQ ID NO: 497979 - RNA, 21 nt, Human
cgaugcagcaugacgaucccu

SEQ ID NO: 497980 - RNA, 18 nt, Human
cgcacugucccugccccg

SEQ ID NO: 497981 - RNA, 19 nt, Human
cgcacugucccugccccgg

SEQ ID NO: 497982 - RNA, 20 nt, Human
cucagaacacgggaacugac

SEQ ID NO: 497983 - RNA, 23 nt, Human
cugcagggaggcuguggggaggu

SEQ ID NO: 497984 - RNA, 23 nt, Human
gagaagcagaaaggggcccucag

SEQ ID NO: 497985 - RNA, 20 nt, Human
gagaggauucgaugcagcau

SEQ ID NO: 497986 - RNA, 20 nt, Human
gagggcagggccggcugaag

SEQ ID NO: 497987 - RNA, 22 nt, Human
gaguggcaacucagcagguggg

SEQ ID NO: 497988 - RNA, 19 nt, Human
gaucccuuccucccaggca

SEQ ID NO: 497989 - RNA, 18 nt, Human
gcaguggagcuucugguu

SEQ ID NO: 497990 - RNA, 21 nt, Human
gccuggaggggaugggggcag

SEQ ID NO: 497991 - RNA, 22 nt, Human
ggagagaggauucgaugcagca

SEQ ID NO: 497992 - RNA, 20 nt, Human
ggcagagaagcagaaagggg

SEQ ID NO: 497993 - RNA, 22 nt, Human
ggggagguguggagcaggugca

SEQ ID NO: 497994 - RNA, 19 nt, Human
guucaugaacccucccuca

SEQ ID NO: 497995 - RNA, 21 nt, Human
uaaagaggauccaccugguuc

SEQ ID NO: 497996 - RNA, 24 nt, Human
uaggccagcucucagaaucagaag

SEQ ID NO: 497997 - RNA, 24 nt, Human
uauaacaaaaacuuuuuuuuuuuu

SEQ ID NO: 497998 - RNA, 20 nt, Human
ucagcucacuccagcucccc

SEQ ID NO: 497999 - RNA, 21 nt, Human
ucaucuguuccccagaucugg

SEQ ID NO: 498000 - RNA, 23 nt, Human
ucaugaacccucccucacugcuc

SEQ ID NO: 498001 - RNA, 18 nt, Human
uccggcagcgcagcacgc

SEQ ID NO: 498002 - RNA, 24 nt, Human
ucgcuguaggggucgccgccgccg

SEQ ID NO: 498003 - RNA, 21 nt, Human
ugaacccucccucacugcucu

SEQ ID NO: 498004 - RNA, 22 nt, Human
ugacaacacugcgaguggcaac

SEQ ID NO: 498005 - RNA, 19 nt, Human
ugaggacacccaggacccg

SEQ ID NO: 498006 - RNA, 21 nt, Human
ugccagcagcgauagguuggc

SEQ ID NO: 498007 - RNA, 18 nt, Human
ugcccuggugacuccugu

SEQ ID NO: 498008 - RNA, 21 nt, Human
uggagggcugugcccugguga

SEQ ID NO: 498009 - RNA, 19 nt, Human
uggcacaugggaaaggcug

SEQ ID NO: 498010 - RNA, 19 nt, Human
uggcacaugggaaaggcug

SEQ ID NO: 498011 - RNA, 19 nt, Human
ugggcagagaagcagaaag

SEQ ID NO: 498012 - RNA, 19 nt, Human
uggggcgcaugcgcugaaa

SEQ ID NO: 498013 - RNA, 20 nt, Human
ugguucaugaacccucccuc

SEQ ID NO: 498014 - RNA, 25 nt, Human
uguggggagguguggagcaggugca

SEQ ID NO: 498015 - RNA, 25 nt, Human
uucugguuuggcacaugggaaaggc

SEQ ID NO: 498016 - RNA, 26 nt, Human
uuuaaagaggauccaccugguucaug

SEQ ID NO: 498017 - RNA, 20 nt, Human
aaaaggaagaacccagacaa

SEQ ID NO: 498018 - RNA, 20 nt, Human
aaaggccugagacccugccu

SEQ ID NO: 498019 - RNA, 19 nt, Human
aaagggccaguuguccaaa

SEQ ID NO: 498020 - RNA, 19 nt, Human
aacccugucuucccuuccc

SEQ ID NO: 498021 - RNA, 22 nt, Human
aacccuuccucuuuuauaguuu

SEQ ID NO: 498022 - RNA, 22 nt, Human
aagaacccagacaaaucaccuc

SEQ ID NO: 498023 - RNA, 24 nt, Human
aagacacaagagucauaacaacaa

SEQ ID NO: 498024 - RNA, 21 nt, Human
aagcugcaugccuuuaggagg

SEQ ID NO: 498025 - RNA, 19 nt, Human
aagcugcuggacgaccagg

SEQ ID NO: 498026 - RNA, 22 nt, Human
aauaaaucacaaaaauauacaa

SEQ ID NO: 498027 - RNA, 20 nt, Human
aauaaggggucugggaaaaa

SEQ ID NO: 498028 - RNA, 23 nt, Human
accaccuucucuccaggcuucca

SEQ ID NO: 498029 - RNA, 24 nt, Human
accagggcaggaauucacaugagg

SEQ ID NO: 498030 - RNA, 18 nt, Human
acccaggagcucguggcc

SEQ ID NO: 498031 - RNA, 21 nt, Human
acccccaagagggacugaagc

SEQ ID NO: 498032 - RNA, 25 nt, Human
agaggaggagggccagccaguuggu

SEQ ID NO: 498033 - RNA, 18 nt, Human
agauguugcccaggcugu

SEQ ID NO: 498034 - RNA, 19 nt, Human
agcaagcugcuccuguaca

SEQ ID NO: 498035 - RNA, 21 nt, Human
agccuugccagccacagagga

SEQ ID NO: 498036 - RNA, 20 nt, Human
agcucgaggcaagcuggugg

SEQ ID NO: 498037 - RNA, 22 nt, Human
agcugucuuccucccaacagau

SEQ ID NO: 498038 - RNA, 22 nt, Human
aggagaccucagacuggccagg

SEQ ID NO: 498039 - RNA, 23 nt, Human
aggaggaagggagagcucccuga

SEQ ID NO: 498040 - RNA, 22 nt, Human
aggaggagggccagccaguugg

SEQ ID NO: 498041 - RNA, 21 nt, Human
aggcaagcugguggacuugug

SEQ ID NO: 498042 - RNA, 21 nt, Human
agugggugggccaguuccagg

SEQ ID NO: 498043 - RNA, 20 nt, Human
auguccucuugucuccaccc

SEQ ID NO: 498044 - RNA, 20 nt, Human
caaaggccugagacccugcc

SEQ ID NO: 498045 - RNA, 20 nt, Human
caaaggccugagacccugcc

SEQ ID NO: 498046 - RNA, 23 nt, Human
caacaaaacuccccgagagucaa

SEQ ID NO: 498047 - RNA, 18 nt, Human
caacacagaugcccuccc

SEQ ID NO: 498048 - RNA, 18 nt, Human
caacacagaugcccuccc

SEQ ID NO: 498049 - RNA, 19 nt, Human
caacagauaagccuccacu

SEQ ID NO: 498050 - RNA, 24 nt, Human
caacgcagaugcugaugacugaca

SEQ ID NO: 498051 - RNA, 21 nt, Human
caagacaaucccugguccuaa

SEQ ID NO: 498052 - RNA, 18 nt, Human
cacagcuacccaggagcu

SEQ ID NO: 498053 - RNA, 26 nt, Human
caccucagagcuacucagaggucccu

SEQ ID NO: 498054 - RNA, 19 nt, Human
caccuggagagcagggcac

SEQ ID NO: 498055 - RNA, 19 nt, Human
cacuagggaacaaaagucu

SEQ ID NO: 498056 - RNA, 20 nt, Human
cagacaaaucaccuccaaca

SEQ ID NO: 498057 - RNA, 21 nt, Human
cagacaaaucaccuccaacac

SEQ ID NO: 498058 - RNA, 21 nt, Human
cagagcucuuaguacaguacu

SEQ ID NO: 498059 - RNA, 18 nt, Human
cagaguuucaccugccag

SEQ ID NO: 498060 - RNA, 18 nt, Human
cagaguuucaccugccag

SEQ ID NO: 498061 - RNA, 21 nt, Human
cagcugagucccgacucacca

SEQ ID NO: 498062 - RNA, 19 nt, Human
cagcuuccaaaaggacuug

SEQ ID NO: 498063 - RNA, 22 nt, Human
caguaaaaaacagccuuugcuu

SEQ ID NO: 498064 - RNA, 21 nt, Human
caguggaaggaccaacaugga

SEQ ID NO: 498065 - RNA, 19 nt, Human
cagugggugggccaguucc

SEQ ID NO: 498066 - RNA, 22 nt, Human
caguuccuucuggaaccaaaag

SEQ ID NO: 498067 - RNA, 24 nt, Human
cauaacgccaaaauaaaucacaaa

SEQ ID NO: 498068 - RNA, 21 nt, Human
caugggugucaccaccuucuc

SEQ ID NO: 498069 - RNA, 22 nt, Human
ccaacacagaugcccucccgcc

SEQ ID NO: 498070 - RNA, 20 nt, Human
ccaccuucucuccaggcuuc

SEQ ID NO: 498071 - RNA, 19 nt, Human
ccacugcccccccuaucca

SEQ ID NO: 498072 - RNA, 21 nt, Human
ccacugcccccccuauccagg

SEQ ID NO: 498073 - RNA, 28 nt, Human
cccacauguccucuugucuccaccccca

SEQ ID NO: 498074 - RNA, 23 nt, Human
cccaccaaugucuuuugcucuac

SEQ ID NO: 498075 - RNA, 18 nt, Human
cccacuggggaggccccc

SEQ ID NO: 498076 - RNA, 21 nt, Human
cccccccuauccagggcugga

SEQ ID NO: 498077 - RNA, 20 nt, Human
cccccgcagggugggcaggg

SEQ ID NO: 498078 - RNA, 19 nt, Human
cccccuauccagggcugga

SEQ ID NO: 498079 - RNA, 23 nt, Human
cccugaucacagcuacccaggag

SEQ ID NO: 498080 - RNA, 18 nt, Human
cccugucacaaagggcca

SEQ ID NO: 498081 - RNA, 23 nt, Human
cccuucccaaaaugauauuuaaa

SEQ ID NO: 498082 - RNA, 21 nt, Human
ccucagguucacggugcugcc

SEQ ID NO: 498083 - RNA, 22 nt, Human
ccucccaacagauaagccucca

SEQ ID NO: 498084 - RNA, 23 nt, Human
ccuggagagcagggcacuugggg

SEQ ID NO: 498085 - RNA, 18 nt, Human
ccuggcagucagggcugu

SEQ ID NO: 498086 - RNA, 18 nt, Human
cgccaaaauaaaucacaa

SEQ ID NO: 498087 - RNA, 20 nt, Human
cgcuaggaucacacguguga

SEQ ID NO: 498088 - RNA, 28 nt, Human
cggaggaggaggaggaggaggaagggag

SEQ ID NO: 498089 - RNA, 19 nt, Human
cgugugagaaagaggggcu

SEQ ID NO: 498090 - RNA, 19 nt, Human
cuccugagguuccauaagu

SEQ ID NO: 498091 - RNA, 19 nt, Human
cugcacccaguggaaggac

SEQ ID NO: 498092 - RNA, 18 nt, Human
cugcccccccuauccagg

SEQ ID NO: 498093 - RNA, 20 nt, Human
cugcugcacccaguggaagg

SEQ ID NO: 498094 - RNA, 23 nt, Human
cugcugcacccaguggaaggacc

SEQ ID NO: 498095 - RNA, 18 nt, Human
cugcuggacgaccagguc

SEQ ID NO: 498096 - RNA, 21 nt, Human
cuggaguuuugcagcagggcc

SEQ ID NO: 498097 - RNA, 21 nt, Human
cuggcagaggccagauccccc

SEQ ID NO: 498098 - RNA, 19 nt, Human
cugggaucccaccuccgga

SEQ ID NO: 498099 - RNA, 22 nt, Human
cugucaccugccuacccauuug

SEQ ID NO: 498100 - RNA, 21 nt, Human
cuucccgggacaagaaacccu

SEQ ID NO: 498101 - RNA, 22 nt, Human
cuugccagccacagaggagagg

SEQ ID NO: 498102 - RNA, 22 nt, Human
gaaagaggggcugcaagcugca

SEQ ID NO: 498103 - RNA, 20 nt, Human
gaauaaauaauaaucaggcg

SEQ ID NO: 498104 - RNA, 18 nt, Human
gacaaaucaccuccaaca

SEQ ID NO: 498105 - RNA, 19 nt, Human
gagaucagauugcuggaga

SEQ ID NO: 498106 - RNA, 18 nt, Human
gagcucgaggcaagcugg

SEQ ID NO: 498107 - RNA, 21 nt, Human
gaggucacuguggaggugugu

SEQ ID NO: 498108 - RNA, 23 nt, Human
gaucccaccuccggaggaggagg

SEQ ID NO: 498109 - RNA, 19 nt, Human
gauguugcccaggcuguag

SEQ ID NO: 498110 - RNA, 22 nt, Human
gcagcugaucuccaugccauuu

SEQ ID NO: 498111 - RNA, 19 nt, Human
gcagucagggcugucagga

SEQ ID NO: 498112 - RNA, 23 nt, Human
gccacagaggagaggacauaaag

SEQ ID NO: 498113 - RNA, 18 nt, Human
gcucgaggcaagcuggug

SEQ ID NO: 498114 - RNA, 23 nt, Human
gcuggagauguugcccaggcugu

SEQ ID NO: 498115 - RNA, 21 nt, Human
ggaaggccugcagaguuucac

SEQ ID NO: 498116 - RNA, 18 nt, Human
gggaagaggcaccagggc

SEQ ID NO: 498117 - RNA, 23 nt, Human
gggcagggccuggggagcagggg

SEQ ID NO: 498118 - RNA, 18 nt, Human
gggccagggaagaggagg

SEQ ID NO: 498119 - RNA, 18 nt, Human
ggggagcaggggugagca

SEQ ID NO: 498120 - RNA, 21 nt, Human
guaaaaaacagccuuugcuua

SEQ ID NO: 498121 - RNA, 24 nt, Human
gucauaacaacaaaacuccccgag

SEQ ID NO: 498122 - RNA, 22 nt, Human
gucccacagccuccccaacccu

SEQ ID NO: 498123 - RNA, 22 nt, Human
gugagcaccaccagcacgccgg

SEQ ID NO: 498124 - RNA, 19 nt, Human
uaacagguucccucucuuc

SEQ ID NO: 498125 - RNA, 18 nt, Human
uaaguggguggauaaggc

SEQ ID NO: 498126 - RNA, 20 nt, Human
uacagcgcaggugcucaggc

SEQ ID NO: 498127 - RNA, 21 nt, Human
uacaguacuacuaacuucagc

SEQ ID NO: 498128 - RNA, 19 nt, Human
uacucagaggucccuggca

SEQ ID NO: 498129 - RNA, 21 nt, Human
uaggcugggggccaucuggcu

SEQ ID NO: 498130 - RNA, 21 nt, Human
uaguacaguacuacuaacuuc

SEQ ID NO: 498131 - RNA, 20 nt, Human
ucacguugaccaagcugcug

SEQ ID NO: 498132 - RNA, 20 nt, Human
ucacuguggaggugugugca

SEQ ID NO: 498133 - RNA, 22 nt, Human
ucaggcagcugaucuccaugcc

SEQ ID NO: 498134 - RNA, 19 nt, Human
uccagggcuggacagugcc

SEQ ID NO: 498135 - RNA, 23 nt, Human
ucccccacuagggaacaaaaguc

SEQ ID NO: 498136 - RNA, 24 nt, Human
ucccgcggcucacguugaccaagc

SEQ ID NO: 498137 - RNA, 18 nt, Human
ucccgggacaagaaaccc

SEQ ID NO: 498138 - RNA, 24 nt, Human
ucccuggcagaggccagauccccc

SEQ ID NO: 498139 - RNA, 21 nt, Human
uccguugcuucccgggacaag

SEQ ID NO: 498140 - RNA, 23 nt, Human
ucuauggcuaggagaccucagac

SEQ ID NO: 498141 - RNA, 20 nt, Human
ugacaaaagacacaagaguc

SEQ ID NO: 498142 - RNA, 21 nt, Human
ugagucccgacucaccaggag

SEQ ID NO: 498143 - RNA, 21 nt, Human
ugaugacccucugugagaagg

SEQ ID NO: 498144 - RNA, 21 nt, Human
ugcacagaggucacuguggag

SEQ ID NO: 498145 - RNA, 21 nt, Human
ugcacccaguggaaggaccaa

SEQ ID NO: 498146 - RNA, 21 nt, Human
ugcaccugccccuuuugcuuc

SEQ ID NO: 498147 - RNA, 24 nt, Human
ugcagaguuucaccugccaggcuc

SEQ ID NO: 498148 - RNA, 24 nt, Human
ugcagaguuucaccugccaggcuc

SEQ ID NO: 498149 - RNA, 23 nt, Human
ugcccaggcuguagccguacagc

SEQ ID NO: 498150 - RNA, 22 nt, Human
ugcucuaccuggcagucagggc

SEQ ID NO: 498151 - RNA, 19 nt, Human
uggaguuuugcagcagggc

SEQ ID NO: 498152 - RNA, 19 nt, Human
uggggugaggaaaggagug

SEQ ID NO: 498153 - RNA, 19 nt, Human
ugucaccaccuucucucca

SEQ ID NO: 498154 - RNA, 21 nt, Human
uguccaaagggccagauggga

SEQ ID NO: 498155 - RNA, 21 nt, Human
uguccucuugucuccaccccc

SEQ ID NO: 498156 - RNA, 20 nt, Human
ugucuucccuucccaaaaug

SEQ ID NO: 498157 - RNA, 24 nt, Human
uucagucagacaggcuaucuaucc

SEQ ID NO: 498158 - RNA, 20 nt, Human
uuccucccaacagauaagcc

SEQ ID NO: 498159 - RNA, 20 nt, Human
uugcccaggcuguagccgua

SEQ ID NO: 498160 - RNA, 19 nt, Human
uuggaugcccuuugcaaag

SEQ ID NO: 498161 - RNA, 22 nt, Human
uuggucccacagccuccccaac

SEQ ID NO: 498162 - RNA, 18 nt, Human
acaguaccggaggcaauc

SEQ ID NO: 498163 - RNA, 20 nt, Human
uuccucacaguaccggaggc

SEQ ID NO: 498164 - RNA, 19 nt, Human
aaaagaguccucacccaca

SEQ ID NO: 498165 - RNA, 23 nt, Human
aaaaugucccucacuggggaggg

SEQ ID NO: 498166 - RNA, 23 nt, Human
aaacagccccauacugaggaaca

SEQ ID NO: 498167 - RNA, 24 nt, Human
aaacagccccauacugaggaacaa

SEQ ID NO: 498168 - RNA, 26 nt, Human
aaaccaaaaggaaauaacacuccuaa

SEQ ID NO: 498169 - RNA, 28 nt, Human
aaagaagcuaauaccaagaaggcuuaga

SEQ ID NO: 498170 - RNA, 24 nt, Human
aacagccccauacugaggaacaag

SEQ ID NO: 498171 - RNA, 18 nt, Human
aacccaaagaagcuaaua

SEQ ID NO: 498172 - RNA, 18 nt, Human
aagaagggaacaucuggc

SEQ ID NO: 498173 - RNA, 21 nt, Human
aaggaaguuaccuggaaccca

SEQ ID NO: 498174 - RNA, 26 nt, Human
aaggagcuuuaguccaagggaagacc

SEQ ID NO: 498175 - RNA, 29 nt, Human
acaaagaagggaacaucuggcaaacaguu

SEQ ID NO: 498176 - RNA, 19 nt, Human
agaaacagccccauacuga

SEQ ID NO: 498177 - RNA, 20 nt, Human
agaagaagacuucugagaua

SEQ ID NO: 498178 - RNA, 22 nt, Human
agacagggcugaaugccaagua

SEQ ID NO: 498179 - RNA, 18 nt, Human
agaccaggggagcccugg

SEQ ID NO: 498180 - RNA, 19 nt, Human
agagaccagccccaguucu

SEQ ID NO: 498181 - RNA, 20 nt, Human
agagauuggagaggaauuaa

SEQ ID NO: 498182 - RNA, 22 nt, Human
agagauuggagaggaauuaaca

SEQ ID NO: 498183 - RNA, 22 nt, Human
agagauuugggggcagaaggca

SEQ ID NO: 498184 - RNA, 23 nt, Human
agaggucaucccucagacaaguc

SEQ ID NO: 498185 - RNA, 24 nt, Human
agaugccgaaagcugugaagagcu

SEQ ID NO: 498186 - RNA, 21 nt, Human
aggaacccaaaacuucaagag

SEQ ID NO: 498187 - RNA, 22 nt, Human
aggaaguuaccuggaacccaga

SEQ ID NO: 498188 - RNA, 23 nt, Human
aggacagggcugguaccuuaccc

SEQ ID NO: 498189 - RNA, 20 nt, Human
aggagcgucuuuauuuuaaa

SEQ ID NO: 498190 - RNA, 19 nt, Human
agggcagggaacccuggag

SEQ ID NO: 498191 - RNA, 22 nt, Human
agggcccucaccugggcagggg

SEQ ID NO: 498192 - RNA, 21 nt, Human
agggcgugugugugugugugu

SEQ ID NO: 498193 - RNA, 18 nt, Human
aggggaggagggggcagc

SEQ ID NO: 498194 - RNA, 19 nt, Human
aggggaggagggggcagcc

SEQ ID NO: 498195 - RNA, 22 nt, Human
agucacuuacuguaaagacaga

SEQ ID NO: 498196 - RNA, 19 nt, Human
auugcccucuuccccucca

SEQ ID NO: 498197 - RNA, 26 nt, Human
caccugggcagggggaucagcaugcg

SEQ ID NO: 498198 - RNA, 22 nt, Human
cagaacuuugcaaugcuggaaa

SEQ ID NO: 498199 - RNA, 21 nt, Human
cagaaggcaguacccaagaga

SEQ ID NO: 498200 - RNA, 23 nt, Human
cagaauacacucaaaaagguuuu

SEQ ID NO: 498201 - RNA, 18 nt, Human
cagagcaggacagucaug

SEQ ID NO: 498202 - RNA, 20 nt, Human
cagcaugcgggggaaggggg

SEQ ID NO: 498203 - RNA, 23 nt, Human
cagccccauacugaggaacaaga

SEQ ID NO: 498204 - RNA, 22 nt, Human
cagcccucgcccccgggccccc

SEQ ID NO: 498205 - RNA, 21 nt, Human
cagggggaucagcaugcgggg

SEQ ID NO: 498206 - RNA, 22 nt, Human
caucccucagacaagucaggag

SEQ ID NO: 498207 - RNA, 24 nt, Human
caucccucagacaagucaggagac

SEQ ID NO: 498208 - RNA, 18 nt, Human
caugugacuagcagcaac

SEQ ID NO: 498209 - RNA, 18 nt, Human
ccagcauagugucuggcc

SEQ ID NO: 498210 - RNA, 20 nt, Human
ccaggguggggcugagagga

SEQ ID NO: 498211 - RNA, 19 nt, Human
cccauacugaggaacaaga

SEQ ID NO: 498212 - RNA, 21 nt, Human
cccggcccccucccugcuucc

SEQ ID NO: 498213 - RNA, 19 nt, Human
cccucccugcuuccuggga

SEQ ID NO: 498214 - RNA, 19 nt, Human
ccucaccugggcaggggga

SEQ ID NO: 498215 - RNA, 20 nt, Human
ccucccggcccccucccugc

SEQ ID NO: 498216 - RNA, 22 nt, Human
ccucccugcuuccugggagagg

SEQ ID NO: 498217 - RNA, 21 nt, Human
ccugggauccacgggccgcuc

SEQ ID NO: 498218 - RNA, 21 nt, Human
cgugugugugugugugugugu

SEQ ID NO: 498219 - RNA, 22 nt, Human
cuaacccaaagaagcuaauacc

SEQ ID NO: 498220 - RNA, 23 nt, Human
cuaacccaaagaagcuaauacca

SEQ ID NO: 498221 - RNA, 21 nt, Human
cucccugcuuccugggagagg

SEQ ID NO: 498222 - RNA, 24 nt, Human
cugcccagcauagugucuggccga

SEQ ID NO: 498223 - RNA, 20 nt, Human
cuggccaacaggggacccca

SEQ ID NO: 498224 - RNA, 18 nt, Human
cuucaagagaggagcguc

SEQ ID NO: 498225 - RNA, 18 nt, Human
cuuggggccucccuccag

SEQ ID NO: 498226 - RNA, 24 nt, Human
gaaaauuccuagagcauggaguac

SEQ ID NO: 498227 - RNA, 22 nt, Human
gaacuuugcaaugcuggaaaca

SEQ ID NO: 498228 - RNA, 19 nt, Human
gagaugccgaaagcuguga

SEQ ID NO: 498229 - RNA, 23 nt, Human
gagauuugggggcagaaggcagu

SEQ ID NO: 498230 - RNA, 23 nt, Human
gagccaaucugcacucauggagg

SEQ ID NO: 498231 - RNA, 25 nt, Human
gcaaugcuggaaacacucuauuugc

SEQ ID NO: 498232 - RNA, 27 nt, Human
gcggagauugcccucuuccccuccagg

SEQ ID NO: 498233 - RNA, 22 nt, Human
gcugguaaaaacccagagacau

SEQ ID NO: 498234 - RNA, 18 nt, Human
ggaaaacgacggcgagca

SEQ ID NO: 498235 - RNA, 20 nt, Human
ggaaauaacacuccuaaccc

SEQ ID NO: 498236 - RNA, 25 nt, Human
ggagaagaaagauuggggguggggg

SEQ ID NO: 498237 - RNA, 21 nt, Human
ggcagaaggcaguacccaaga

SEQ ID NO: 498238 - RNA, 27 nt, Human
gggcagagguggcuaggagaggucauc

SEQ ID NO: 498239 - RNA, 23 nt, Human
gggcgugugugugugugugugug

SEQ ID NO: 498240 - RNA, 18 nt, Human
ggggaggggaggaggggg

SEQ ID NO: 498241 - RNA, 18 nt, Human
gggguggguagagggagg

SEQ ID NO: 498242 - RNA, 21 nt, Human
gggguggguagagggaggggc

SEQ ID NO: 498243 - RNA, 18 nt, Human
ggguagagggaggggccg

SEQ ID NO: 498244 - RNA, 19 nt, Human
guaaagacagaaacagccc

SEQ ID NO: 498245 - RNA, 19 nt, Human
guggcuuggggccucccuc

SEQ ID NO: 498246 - RNA, 20 nt, Human
guguguguguguguguaagc

SEQ ID NO: 498247 - RNA, 21 nt, Human
gugugugugugugugugugug

SEQ ID NO: 498248 - RNA, 20 nt, Human
uacaaugaaaagcacaguuc

SEQ ID NO: 498249 - RNA, 19 nt, Human
uaccuuagggccugacagc

SEQ ID NO: 498250 - RNA, 18 nt, Human
uacuguaaagacagaaac

SEQ ID NO: 498251 - RNA, 23 nt, Human
uacuguaaagacagaaacagccc

SEQ ID NO: 498252 - RNA, 22 nt, Human
uagaacaagaagcccauaaagg

SEQ ID NO: 498253 - RNA, 18 nt, Human
uagaagggacucaaacca

SEQ ID NO: 498254 - RNA, 22 nt, Human
uagaccaucagggcaggaaccc

SEQ ID NO: 498255 - RNA, 20 nt, Human
uagagcauggaguaccuucc

SEQ ID NO: 498256 - RNA, 26 nt, Human
uaggagaagaaagauugggggugggg

SEQ ID NO: 498257 - RNA, 18 nt, Human
uaggagagauuggagagg

SEQ ID NO: 498258 - RNA, 21 nt, Human
uaggagaggucaucccucaga

SEQ ID NO: 498259 - RNA, 22 nt, Human
uaguccaagggaagacauaccu

SEQ ID NO: 498260 - RNA, 21 nt, Human
ucaauacagagggaagucaca

SEQ ID NO: 498261 - RNA, 19 nt, Human
ucagagcaggacagucaug

SEQ ID NO: 498262 - RNA, 22 nt, Human
ucagggagacauagaccaucag

SEQ ID NO: 498263 - RNA, 26 nt, Human
ucaugcagacagggcugaaugccaag

SEQ ID NO: 498264 - RNA, 18 nt, Human
uccaagggaagacauacc

SEQ ID NO: 498265 - RNA, 24 nt, Human
ucccucacuggggaggggaggagg

SEQ ID NO: 498266 - RNA, 19 nt, Human
ucccugcuuccugggagag

SEQ ID NO: 498267 - RNA, 20 nt, Human
ugaaaagcacaguucccugg

SEQ ID NO: 498268 - RNA, 22 nt, Human
ugaaaagcacaguucccuggga

SEQ ID NO: 498269 - RNA, 20 nt, Human
ugaacaucugaaauguggca

SEQ ID NO: 498270 - RNA, 18 nt, Human
ugagguaggugggacugg

SEQ ID NO: 498271 - RNA, 21 nt, Human
ugaugacugggauggaggcaa

SEQ ID NO: 498272 - RNA, 25 nt, Human
ugccucugacucaggaaguggaaaa

SEQ ID NO: 498273 - RNA, 24 nt, Human
ugcuaggagagauuggagaggaau

SEQ ID NO: 498274 - RNA, 19 nt, Human
uggaacccagagaagacug

SEQ ID NO: 498275 - RNA, 21 nt, Human
uggaggcauuagcccuggaaa

SEQ ID NO: 498276 - RNA, 25 nt, Human
uggcaaacagugcuauccaacagaa

SEQ ID NO: 498277 - RNA, 21 nt, Human
uggcagcucacagagaagggc

SEQ ID NO: 498278 - RNA, 24 nt, Human
uggcugguaaaaacccagagacau

SEQ ID NO: 498279 - RNA, 18 nt, Human
uggcuuggggccucccuc

SEQ ID NO: 498280 - RNA, 21 nt, Human
uggcuuggggccucccuccag

SEQ ID NO: 498281 - RNA, 24 nt, Human
ugggacugguaaagagaagaagca

SEQ ID NO: 498282 - RNA, 21 nt, Human
ugggagaagacagaaaucuua

SEQ ID NO: 498283 - RNA, 22 nt, Human
ugggagaagacagaaaucuuac

SEQ ID NO: 498284 - RNA, 18 nt, Human
ugggcagggggaucagca

SEQ ID NO: 498285 - RNA, 22 nt, Human
uggggaggggaggagggggcag

SEQ ID NO: 498286 - RNA, 22 nt, Human
uggguagagggaggggccggug

SEQ ID NO: 498287 - RNA, 20 nt, Human
ugugcagggcagggaacccu

SEQ ID NO: 498288 - RNA, 22 nt, Human
ugugcagggcagggaacccugg

SEQ ID NO: 498289 - RNA, 22 nt, Human
uguguguguguguguguaagcu

SEQ ID NO: 498290 - RNA, 18 nt, Human
ugugugugugugugugug

SEQ ID NO: 498291 - RNA, 18 nt, Human
ugugugugugugugugug

SEQ ID NO: 498292 - RNA, 18 nt, Human
ugugugugugugugugug

SEQ ID NO: 498293 - RNA, 18 nt, Human
ugugugugugugugugug

SEQ ID NO: 498294 - RNA, 18 nt, Human
ugugugugugugugugug

SEQ ID NO: 498295 - RNA, 18 nt, Human
ugugugugugugugugug

SEQ ID NO: 498296 - RNA, 18 nt, Human
ugugugugugugugugug

SEQ ID NO: 498297 - RNA, 18 nt, Human
ugugugugugugugugug

SEQ ID NO: 498298 - RNA, 21 nt, Human
ugugugugugugugugugugu

SEQ ID NO: 498299 - RNA, 21 nt, Human
ugugugugugugugugugugu

SEQ ID NO: 498300 - RNA, 21 nt, Human
ugugugugugugugugugugu

SEQ ID NO: 498301 - RNA, 21 nt, Human
ugugugugugugugugugugu

SEQ ID NO: 498302 - RNA, 21 nt, Human
ugugugugugugugugugugu

SEQ ID NO: 498303 - RNA, 21 nt, Human
ugugugugugugugugugugu

SEQ ID NO: 498304 - RNA, 21 nt, Human
ugugugugugugugugugugu

SEQ ID NO: 498305 - RNA, 21 nt, Human
ugugugugugugugugugugu

SEQ ID NO: 498306 - RNA, 21 nt, Human
ugugugugugugugugugugu

SEQ ID NO: 498307 - RNA, 21 nt, Human
ugugugugugugugugugugu

SEQ ID NO: 498308 - RNA, 21 nt, Human
ugugugugugugugugugugu

SEQ ID NO: 498309 - RNA, 21 nt, Human
ugugugugugugugugugugu

SEQ ID NO: 498310 - RNA, 21 nt, Human
ugugugugugugugugugugu

SEQ ID NO: 498311 - RNA, 22 nt, Human
ugugugugugugugugugugua

SEQ ID NO: 498312 - RNA, 22 nt, Human
ugugugugugugugugugugug

SEQ ID NO: 498313 - RNA, 22 nt, Human
ugugugugugugugugugugug

SEQ ID NO: 498314 - RNA, 22 nt, Human
ugugugugugugugugugugug

SEQ ID NO: 498315 - RNA, 22 nt, Human
ugugugugugugugugugugug

SEQ ID NO: 498316 - RNA, 22 nt, Human
ugugugugugugugugugugug

SEQ ID NO: 498317 - RNA, 23 nt, Human
uuacauacuuuuuugugugccuc

SEQ ID NO: 498318 - RNA, 21 nt, Human
uuagagucagggagacauaga

SEQ ID NO: 498319 - RNA, 19 nt, Human
uuccugggagagggggaug

SEQ ID NO: 498320 - RNA, 18 nt, Human
uugggggugggggaaaac

SEQ ID NO: 498321 - RNA, 22 nt, Human
uuugcaaugcuggaaacacucu

SEQ ID NO: 498322 - RNA, 26 nt, Human
aaacauucaacagugucacucaaaug

SEQ ID NO: 498323 - RNA, 19 nt, Human
aaacguccagaaacuacag

SEQ ID NO: 498324 - RNA, 19 nt, Human
aaccagguuucuguuugcu

SEQ ID NO: 498325 - RNA, 23 nt, Human
aagaaagagguacauuuccuugu

SEQ ID NO: 498326 - RNA, 18 nt, Human
acagaggagaaggacuga

SEQ ID NO: 498327 - RNA, 19 nt, Human
agccaaaaaauuuuucucc

SEQ ID NO: 498328 - RNA, 22 nt, Human
auaaagagaugguaaugacccu

SEQ ID NO: 498329 - RNA, 18 nt, Human
auaagagaugagaaggga

SEQ ID NO: 498330 - RNA, 21 nt, Human
augguaaaacaaaaaagauuc

SEQ ID NO: 498331 - RNA, 23 nt, Human
caauacugcacaaacguccagaa

SEQ ID NO: 498332 - RNA, 30 nt, Human
cacaaucaaguccuugccaucaacuugccc

SEQ ID NO: 498333 - RNA, 23 nt, Human
cagagugggacaaauccugcauu

SEQ ID NO: 498334 - RNA, 19 nt, Human
cagauggccccagagcagu

SEQ ID NO: 498335 - RNA, 24 nt, Human
cagcacugaaagcuaaaauguagg

SEQ ID NO: 498336 - RNA, 20 nt, Human
cagcagcaaaaguuuauaau

SEQ ID NO: 498337 - RNA, 21 nt, Human
caguuacuacuacagaugaau

SEQ ID NO: 498338 - RNA, 18 nt, Human
ccccagagcagugcuauc

SEQ ID NO: 498339 - RNA, 20 nt, Human
ccuugccucgcuuuucccuc

SEQ ID NO: 498340 - RNA, 20 nt, Human
cuccacgggcugccgcgucc

SEQ ID NO: 498341 - RNA, 24 nt, Human
cuccuuaugaacucuuuagcaauc

SEQ ID NO: 498342 - RNA, 23 nt, Human
gacuccacgggcugccgcguccu

SEQ ID NO: 498343 - RNA, 20 nt, Human
gaucagauggccccagagca

SEQ ID NO: 498344 - RNA, 26 nt, Human
gcuaaaauguaggacuuugacgaccc

SEQ ID NO: 498345 - RNA, 23 nt, Human
gcucccgauggugaucagauggc

SEQ ID NO: 498346 - RNA, 20 nt, Human
ggagaaggacugaagaaaug

SEQ ID NO: 498347 - RNA, 24 nt, Human
ggaugcuaggaccacugcuuuccc

SEQ ID NO: 498348 - RNA, 19 nt, Human
guaaaacaaaaaagauucc

SEQ ID NO: 498349 - RNA, 20 nt, Human
guuugcuuuucuccugucuu

SEQ ID NO: 498350 - RNA, 22 nt, Human
uaaaaaggcauuuuuagaaaca

SEQ ID NO: 498351 - RNA, 27 nt, Human
uaaaacaaaaaagauuccgacagagga

SEQ ID NO: 498352 - RNA, 19 nt, Human
uaauuuaagggagaaggaa

SEQ ID NO: 498353 - RNA, 18 nt, Human
uacuucucaccuccuuau

SEQ ID NO: 498354 - RNA, 20 nt, Human
ucaaaaccgggccugauugc

SEQ ID NO: 498355 - RNA, 24 nt, Human
ucaacuugccaaaagaauuaaaaa

SEQ ID NO: 498356 - RNA, 25 nt, Human
ucaauacugcacaaacguccagaaa

SEQ ID NO: 498357 - RNA, 27 nt, Human
ucuccugucuuuucaauacugcacaaa

SEQ ID NO: 498358 - RNA, 24 nt, Human
ucuuuagcaaucggccaguuacua

SEQ ID NO: 498359 - RNA, 22 nt, Human
ugaagaaagagguacauuuccu

SEQ ID NO: 498360 - RNA, 18 nt, Human
ugaagaaaugacuuacau

SEQ ID NO: 498361 - RNA, 22 nt, Human
ugagaagggagcuguggguggu

SEQ ID NO: 498362 - RNA, 20 nt, Human
ugauuuuuuuuucucuccuu

SEQ ID NO: 498363 - RNA, 23 nt, Human
ugcaauaaugauaagcugaauac

SEQ ID NO: 498364 - RNA, 28 nt, Human
ugccucgcuuuucccucagccgacucca

SEQ ID NO: 498365 - RNA, 25 nt, Human
ugccuugccucgcuuuucccucagc

SEQ ID NO: 498366 - RNA, 30 nt, Human
ugcuuucccccaugcauuuagcaaucucaa

SEQ ID NO: 498367 - RNA, 25 nt, Human
ugggacaaauccugcauuuucuaau

SEQ ID NO: 498368 - RNA, 21 nt, Human
ugguaaaacaaaaaagauucc

SEQ ID NO: 498369 - RNA, 18 nt, Human
uuaauucugaagaaagag

SEQ ID NO: 498370 - RNA, 19 nt, Human
uuaauucugaagaaagagg

SEQ ID NO: 498371 - RNA, 21 nt, Human
uuaauucugaagaaagaggua

SEQ ID NO: 498372 - RNA, 23 nt, Human
uuagcgucagguuauaaccaggu

SEQ ID NO: 498373 - RNA, 22 nt, Human
uucagaacauaagagaugagaa

SEQ ID NO: 498374 - RNA, 20 nt, Human
uuucuaaguauugagacugc

SEQ ID NO: 498375 - RNA, 24 nt, Human
uuugcucccgauggugaucagaug

SEQ ID NO: 498376 - RNA, 21 nt, Human
aagcaacagcagccauuuccc

SEQ ID NO: 498377 - RNA, 21 nt, Human
cccagaagcaacagcagccau

SEQ ID NO: 498378 - RNA, 20 nt, Human
uggcccagaagcaacagcag

SEQ ID NO: 498379 - RNA, 19 nt, Human
uuagccuagacauuuuaag

SEQ ID NO: 498380 - RNA, 24 nt, Human
aaaaggaccacccaguuacagcac

SEQ ID NO: 498381 - RNA, 19 nt, Human
aaaggaccacccaguuaca

SEQ ID NO: 498382 - RNA, 22 nt, Human
aaaggaccacccaguuacagca

SEQ ID NO: 498383 - RNA, 20 nt, Human
aaccuaacaaccaacugaga

SEQ ID NO: 498384 - RNA, 18 nt, Human
aagaaaacauuuugaagc

SEQ ID NO: 498385 - RNA, 19 nt, Human
aagagaaaauauacucaaa

SEQ ID NO: 498386 - RNA, 20 nt, Human
aaggagcaccaaugggaguc

SEQ ID NO: 498387 - RNA, 22 nt, Human
acaaaauauaccuaaagacuua

SEQ ID NO: 498388 - RNA, 21 nt, Human
acagagcagccuacacaugcc

SEQ ID NO: 498389 - RNA, 22 nt, Human
accaaaucucuccauuauuuac

SEQ ID NO: 498390 - RNA, 21 nt, Human
accaaugggagucagaaaaga

SEQ ID NO: 498391 - RNA, 18 nt, Human
acgugaaacagggaaaua

SEQ ID NO: 498392 - RNA, 23 nt, Human
acuuguugcccaaaaucuuuggg

SEQ ID NO: 498393 - RNA, 19 nt, Human
acuuuauacucaaggaacu

SEQ ID NO: 498394 - RNA, 25 nt, Human
agaaaagaacucuggaguucuccca

SEQ ID NO: 498395 - RNA, 22 nt, Human
agagaaaauauacucaaaucca

SEQ ID NO: 498396 - RNA, 21 nt, Human
agagcagccuacacaugccaa

SEQ ID NO: 498397 - RNA, 18 nt, Human
agaugccaagcaucaaaa

SEQ ID NO: 498398 - RNA, 18 nt, Human
agaugccaagcaucaaaa

SEQ ID NO: 498399 - RNA, 21 nt, Human
agcacucggcggcgguggcgg

SEQ ID NO: 498400 - RNA, 21 nt, Human
agcacucggcggcgguggcgg

SEQ ID NO: 498401 - RNA, 27 nt, Human
agcacucggcggcgguggcgguggcga

SEQ ID NO: 498402 - RNA, 22 nt, Human
agcuaagaucaagaaaaaacaa

SEQ ID NO: 498403 - RNA, 18 nt, Human
agucagaaaagaacucug

SEQ ID NO: 498404 - RNA, 23 nt, Human
auaaaaccuauauacaagcaugu

SEQ ID NO: 498405 - RNA, 20 nt, Human
auagagacagcacucggcgg

SEQ ID NO: 498406 - RNA, 20 nt, Human
auagagacagcacucggcgg

SEQ ID NO: 498407 - RNA, 22 nt, Human
auggaauaaaaauaagcagauc

SEQ ID NO: 498408 - RNA, 22 nt, Human
caaaacagcuuuaaugcuuucu

SEQ ID NO: 498409 - RNA, 22 nt, Human
caaagcacugaagaaugacaug

SEQ ID NO: 498410 - RNA, 22 nt, Human
caacaaaucaagagcaucauaa

SEQ ID NO: 498411 - RNA, 21 nt, Human
caaccuaacaaccaacugaga

SEQ ID NO: 498412 - RNA, 24 nt, Human
caaguauauuaaauuaaggccaaa

SEQ ID NO: 498413 - RNA, 18 nt, Human
cagagcagccuacacaug

SEQ ID NO: 498414 - RNA, 24 nt, Human
cauuacacuccucagguaauuuua

SEQ ID NO: 498415 - RNA, 19 nt, Human
ccccauagacaccucucgc

SEQ ID NO: 498416 - RNA, 19 nt, Human
ccccauagacaccucucgc

SEQ ID NO: 498417 - RNA, 20 nt, Human
cgagcaggagcugcgccgca

SEQ ID NO: 498418 - RNA, 20 nt, Human
cgagcaggagcugcgccgca

SEQ ID NO: 498419 - RNA, 19 nt, Human
cggcggcgguggcgguggc

SEQ ID NO: 498420 - RNA, 19 nt, Human
cggcggcgguggcgguggc

SEQ ID NO: 498421 - RNA, 19 nt, Human
cggcggcgguggcgguggc

SEQ ID NO: 498422 - RNA, 18 nt, Human
cggcgguggcgguggcgg

SEQ ID NO: 498423 - RNA, 18 nt, Human
cggcgguggcgguggcgg

SEQ ID NO: 498424 - RNA, 21 nt, Human
cgguggcgguggcgguggcgg

SEQ ID NO: 498425 - RNA, 21 nt, Human
cgguggcgguggcgguggcgg

SEQ ID NO: 498426 - RNA, 25 nt, Human
cuauaaaaucuucaaagcacugaag

SEQ ID NO: 498427 - RNA, 25 nt, Human
cuauauacaagcauguguguagcuc

SEQ ID NO: 498428 - RNA, 27 nt, Human
cucccaguuccuucugaacuacauuuc

SEQ ID NO: 498429 - RNA, 25 nt, Human
cuccucaguaguuucuugucuuuuu

SEQ ID NO: 498430 - RNA, 22 nt, Human
cuccuccuccuccuccucgcca

SEQ ID NO: 498431 - RNA, 21 nt, Human
cucggcggcgguggcgguggc

SEQ ID NO: 498432 - RNA, 23 nt, Human
cuuaaaaggggucaugcuagaag

SEQ ID NO: 498433 - RNA, 21 nt, Human
gaaggguguaaagcugguuug

SEQ ID NO: 498434 - RNA, 22 nt, Human
gaaugcguuuuuuuuuuucuuu

SEQ ID NO: 498435 - RNA, 19 nt, Human
gacgugaaacagggaaaua

SEQ ID NO: 498436 - RNA, 19 nt, Human
gaguagauaauggguucau

SEQ ID NO: 498437 - RNA, 26 nt, Human
gaucaagaaaaaacaaauuuucugau

SEQ ID NO: 498438 - RNA, 27 nt, Human
gaucaagaaaaaacaaauuuucugaua

SEQ ID NO: 498439 - RNA, 25 nt, Human
gcggcagcgggugccccauagacac

SEQ ID NO: 498440 - RNA, 25 nt, Human
gcggcagcgggugccccauagacac

SEQ ID NO: 498441 - RNA, 20 nt, Human
gcggcgguggcgguggcggu

SEQ ID NO: 498442 - RNA, 20 nt, Human
gcggcgguggcgguggcggu

SEQ ID NO: 498443 - RNA, 23 nt, Human
gcggcgguggcgguggcgguggc

SEQ ID NO: 498444 - RNA, 23 nt, Human
gcggcgguggcgguggcgguggc

SEQ ID NO: 498445 - RNA, 20 nt, Human
gcgguagcggcggcggcagc

SEQ ID NO: 498446 - RNA, 20 nt, Human
gcgguagcggcggcggcagc

SEQ ID NO: 498447 - RNA, 20 nt, Human
gcgguggcgguagcggcggc

SEQ ID NO: 498448 - RNA, 20 nt, Human
gcgguggcgguagcggcggc

SEQ ID NO: 498449 - RNA, 20 nt, Human
gcgguggcgguggcgguagc

SEQ ID NO: 498450 - RNA, 20 nt, Human
gcgguggcgguggcgguagc

SEQ ID NO: 498451 - RNA, 20 nt, Human
gcgguggcgguggcgguggc

SEQ ID NO: 498452 - RNA, 20 nt, Human
gcgguggcgguggcgguggc

SEQ ID NO: 498453 - RNA, 24 nt, Human
gcgguggcgguggcgguggcggua

SEQ ID NO: 498454 - RNA, 24 nt, Human
gcgguggcgguggcgguggcggua

SEQ ID NO: 498455 - RNA, 20 nt, Human
gcugcgccgcaccgugcugc

SEQ ID NO: 498456 - RNA, 22 nt, Human
ggcagcgggugccccauagaca

SEQ ID NO: 498457 - RNA, 22 nt, Human
ggcagcgggugccccauagaca

SEQ ID NO: 498458 - RNA, 20 nt, Human
ggcggcgguggcgguggcgg

SEQ ID NO: 498459 - RNA, 20 nt, Human
ggcggcgguggcgguggcgg

SEQ ID NO: 498460 - RNA, 20 nt, Human
ggcggcgguggcgguggcgg

SEQ ID NO: 498461 - RNA, 20 nt, Human
ggcggcgguggcgguggcgg

SEQ ID NO: 498462 - RNA, 19 nt, Human
ggcgguggcgguggcggug

SEQ ID NO: 498463 - RNA, 19 nt, Human
ggcgguggcgguggcggug

SEQ ID NO: 498464 - RNA, 23 nt, Human
ggcgguggcgguggcgguggcgg

SEQ ID NO: 498465 - RNA, 23 nt, Human
ggcgguggcgguggcgguggcgg

SEQ ID NO: 498466 - RNA, 26 nt, Human
ggcuacaaaauuuaaaaaaaaaaaaa

SEQ ID NO: 498467 - RNA, 20 nt, Human
gguagcggcggcggcagcgg

SEQ ID NO: 498468 - RNA, 20 nt, Human
gguagcggcggcggcagcgg

SEQ ID NO: 498469 - RNA, 25 nt, Human
gguggcgguggcgguggcgguagcg

SEQ ID NO: 498470 - RNA, 21 nt, Human
gucaugcuagaauaaaccuaa

SEQ ID NO: 498471 - RNA, 20 nt, Human
guggcgguagcggcggcggc

SEQ ID NO: 498472 - RNA, 20 nt, Human
guggcgguagcggcggcggc

SEQ ID NO: 498473 - RNA, 23 nt, Human
guggcgguagcggcggcggcagc

SEQ ID NO: 498474 - RNA, 23 nt, Human
guggcgguagcggcggcggcagc

SEQ ID NO: 498475 - RNA, 20 nt, Human
guggcgguggcgguagcggc

SEQ ID NO: 498476 - RNA, 23 nt, Human
guggcgguggcgguagcggcggc

SEQ ID NO: 498477 - RNA, 24 nt, Human
guggcgguggcgguagcggcggcg

SEQ ID NO: 498478 - RNA, 20 nt, Human
guggcgguggcgguggcggu

SEQ ID NO: 498479 - RNA, 20 nt, Human
guggcgguggcgguggcggu

SEQ ID NO: 498480 - RNA, 23 nt, Human
guggcgguggcgguggcgguagc

SEQ ID NO: 498481 - RNA, 21 nt, Human
uaaaaaggaccacccaguuac

SEQ ID NO: 498482 - RNA, 23 nt, Human
uaaaagagccugaguucuucucu

SEQ ID NO: 498483 - RNA, 21 nt, Human
uaaaauaacuguagcuucaac

SEQ ID NO: 498484 - RNA, 25 nt, Human
uaagaucaagaaaaaacaaauuuuc

SEQ ID NO: 498485 - RNA, 18 nt, Human
uaauggguucauuuaguu

SEQ ID NO: 498486 - RNA, 22 nt, Human
uaaugucuaagagaaaauauac

SEQ ID NO: 498487 - RNA, 21 nt, Human
uaauuugguacaaaauauacc

SEQ ID NO: 498488 - RNA, 28 nt, Human
uacaaaauauaccuaaagaccggggccc

SEQ ID NO: 498489 - RNA, 26 nt, Human
uacacaaaaaaaauaagcauuacacu

SEQ ID NO: 498490 - RNA, 21 nt, Human
uaccguaaagucuuccuacac

SEQ ID NO: 498491 - RNA, 20 nt, Human
uagaaacugacagacacuag

SEQ ID NO: 498492 - RNA, 24 nt, Human
uagaaggagcaccaaugggaguca

SEQ ID NO: 498493 - RNA, 20 nt, Human
uagagacagcacucggcggc

SEQ ID NO: 498494 - RNA, 20 nt, Human
uagagacagcacucggcggc

SEQ ID NO: 498495 - RNA, 23 nt, Human
uagccuguuuucucaccugagaa

SEQ ID NO: 498496 - RNA, 25 nt, Human
uagcuucaacaucuugaguaccagu

SEQ ID NO: 498497 - RNA, 26 nt, Human
uaguagguacuuguugcccaaaaucu

SEQ ID NO: 498498 - RNA, 20 nt, Human
uauauacaagcaugugugua

SEQ ID NO: 498499 - RNA, 22 nt, Human
uauuugaucccuucggaauuca

SEQ ID NO: 498500 - RNA, 20 nt, Human
uauuuuguuguuuuguaccc

SEQ ID NO: 498501 - RNA, 24 nt, Human
ucaagagcaucauaagaauggcua

SEQ ID NO: 498502 - RNA, 21 nt, Human
ucacaaauucuuuggcuauga

SEQ ID NO: 498503 - RNA, 21 nt, Human
ucacaaauucuuuggcuauga

SEQ ID NO: 498504 - RNA, 24 nt, Human
ucagaaacacucucuaaagugcaa

SEQ ID NO: 498505 - RNA, 20 nt, Human
ucagcuauauauauauauau

SEQ ID NO: 498506 - RNA, 21 nt, Human
ucauaugguaucucuaauuau

SEQ ID NO: 498507 - RNA, 23 nt, Human
uccacagcgaauuuuuccaaaag

SEQ ID NO: 498508 - RNA, 22 nt, Human
uccaucauuucgggguagaguu

SEQ ID NO: 498509 - RNA, 21 nt, Human
uccuccuccuccuccucgcca

SEQ ID NO: 498510 - RNA, 27 nt, Human
uccuccuccuccuccucgccauagaga

SEQ ID NO: 498511 - RNA, 27 nt, Human
uccuccuccuccuccucgccauagaga

SEQ ID NO: 498512 - RNA, 21 nt, Human
ucgcugaaucgacaguuugcc

SEQ ID NO: 498513 - RNA, 24 nt, Human
ugaaaggggggggaaagguacugu

SEQ ID NO: 498514 - RNA, 18 nt, Human
ugaaggguguaaagcugg

SEQ ID NO: 498515 - RNA, 19 nt, Human
ugaguaccaguuuccuggc

SEQ ID NO: 498516 - RNA, 18 nt, Human
ugauaaaacagguuuaga

SEQ ID NO: 498517 - RNA, 19 nt, Human
ugaugcaacuacuacguug

SEQ ID NO: 498518 - RNA, 21 nt, Human
ugauugaaguguagguaacac

SEQ ID NO: 498519 - RNA, 20 nt, Human
ugcugcgccgucgcuuuucg

SEQ ID NO: 498520 - RNA, 20 nt, Human
uggaauaaaaauaagcagug

SEQ ID NO: 498521 - RNA, 19 nt, Human
uggcauagugagggcacaa

SEQ ID NO: 498522 - RNA, 19 nt, Human
uggcauagugagggcacaa

SEQ ID NO: 498523 - RNA, 21 nt, Human
uggucuggucacauauucugc

SEQ ID NO: 498524 - RNA, 22 nt, Human
ugguuucugaugcaacuacuac

SEQ ID NO: 498525 - RNA, 20 nt, Human
uguaaagcugguuugaaaau

SEQ ID NO: 498526 - RNA, 21 nt, Human
uguaaaguuggcagauuuuuc

SEQ ID NO: 498527 - RNA, 21 nt, Human
ugucacacacgcuugcuaaca

SEQ ID NO: 498528 - RNA, 18 nt, Human
ugugacucauaugguauc

SEQ ID NO: 498529 - RNA, 25 nt, Human
uuaguacugaaaggcagacaauaaa

SEQ ID NO: 498530 - RNA, 20 nt, Human
uuccugaaggguguaaagcu

SEQ ID NO: 498531 - RNA, 19 nt, Human
uucuuuggcuaugaucuac

SEQ ID NO: 498532 - RNA, 19 nt, Human
uucuuuggcuaugaucuac

SEQ ID NO: 498533 - RNA, 21 nt, Human
uugcccaaaaucuuuggccac

SEQ ID NO: 498534 - RNA, 24 nt, Human
uuggagauuugcuaauauuacuga

SEQ ID NO: 498535 - RNA, 22 nt, Human
uuuaaaaaaaaaaaaaggguaa

SEQ ID NO: 498536 - RNA, 20 nt, Human
uuugcacaaccaauuuuccu

SEQ ID NO: 498537 - RNA, 23 nt, Human
uuuuaucagcuauauauauauau

SEQ ID NO: 498538 - RNA, 25 nt, Human
uuuuaucagcuauauauauauauau

SEQ ID NO: 498539 - RNA, 21 nt, Human
uuuuuuuuuuuacuuagcaaa

SEQ ID NO: 498540 - RNA, 22 nt, Human
uuuuuuuuuuuuacuuagcaaa

SEQ ID NO: 498541 - RNA, 18 nt, Human
uuuuuuuuuuuuuuacuu

SEQ ID NO: 498542 - RNA, 30 nt, Human
aaaagaaaaagaaugacaacagguaagagg

SEQ ID NO: 498543 - RNA, 19 nt, Human
aaaauacaacagacaugac

SEQ ID NO: 498544 - RNA, 19 nt, Human
aaaccugaauggcacaaug

SEQ ID NO: 498545 - RNA, 20 nt, Human
aaagagagacuacaaaagug

SEQ ID NO: 498546 - RNA, 18 nt, Human
aacagacaugacccaaaa

SEQ ID NO: 498547 - RNA, 24 nt, Human
acaacucaagaacccaaauuaucu

SEQ ID NO: 498548 - RNA, 18 nt, Human
acgaagccacaaagcuac

SEQ ID NO: 498549 - RNA, 22 nt, Human
acggcagccccuggcccggagc

SEQ ID NO: 498550 - RNA, 25 nt, Human
acggcggcgacggcagccccuggcc

SEQ ID NO: 498551 - RNA, 20 nt, Human
acuaguuuccuucaggauca

SEQ ID NO: 498552 - RNA, 22 nt, Human
agacuuaaaagaugcuucagug

SEQ ID NO: 498553 - RNA, 25 nt, Human
agagauuagcaacaaauuuaaaaga

SEQ ID NO: 498554 - RNA, 19 nt, Human
agaggcuaccugaggggaa

SEQ ID NO: 498555 - RNA, 22 nt, Human
agccccuggcccggagcucuuu

SEQ ID NO: 498556 - RNA, 20 nt, Human
aggaaacgcgagcguggugg

SEQ ID NO: 498557 - RNA, 22 nt, Human
aggaggaaacgcgagcguggug

SEQ ID NO: 498558 - RNA, 20 nt, Human
aggcaaccagagaggagagg

SEQ ID NO: 498559 - RNA, 19 nt, Human
agguacagugugcucaaaa

SEQ ID NO: 498560 - RNA, 22 nt, Human
agguggggaguggaggccugga

SEQ ID NO: 498561 - RNA, 20 nt, Human
augauucuuacuccuccauu

SEQ ID NO: 498562 - RNA, 19 nt, Human
auucauucacuugagugaa

SEQ ID NO: 498563 - RNA, 19 nt, Human
caaaacaacucaagaaccc

SEQ ID NO: 498564 - RNA, 21 nt, Human
caacagacaugacccaaaaau

SEQ ID NO: 498565 - RNA, 22 nt, Human
caacccauuaccuaagaacacc

SEQ ID NO: 498566 - RNA, 22 nt, Human
cacaauggaacacagacuuaaa

SEQ ID NO: 498567 - RNA, 19 nt, Human
cacccugcagagccuggcg

SEQ ID NO: 498568 - RNA, 21 nt, Human
cacgcuugcggaagacggccc

SEQ ID NO: 498569 - RNA, 21 nt, Human
cagcacagagcaauucauuuc

SEQ ID NO: 498570 - RNA, 18 nt, Human
cagcacaguaagcaccac

SEQ ID NO: 498571 - RNA, 21 nt, Human
cagcacaguaagcaccacucu

SEQ ID NO: 498572 - RNA, 21 nt, Human
cagcagaaagcccgucaucuc

SEQ ID NO: 498573 - RNA, 21 nt, Human
caggaucaaauccaggauauu

SEQ ID NO: 498574 - RNA, 23 nt, Human
caggcacacaggcgaagggcaag

SEQ ID NO: 498575 - RNA, 22 nt, Human
caguaaaauuguuugcuuuuca

SEQ ID NO: 498576 - RNA, 25 nt, Human
cauucuggaguucucaugaaugaag

SEQ ID NO: 498577 - RNA, 23 nt, Human
ccaaaacaacucaagaacccaaa

SEQ ID NO: 498578 - RNA, 24 nt, Human
ccacaggaauaaaaaacacuggga

SEQ ID NO: 498579 - RNA, 23 nt, Human
cccacaggaauaaaaaacacugg

SEQ ID NO: 498580 - RNA, 20 nt, Human
cccauaagcuuuuaaaaugc

SEQ ID NO: 498581 - RNA, 22 nt, Human
ccccugcgacuccgugcguguu

SEQ ID NO: 498582 - RNA, 26 nt, Human
cccgacggcggcgacggcagccccuu

SEQ ID NO: 498583 - RNA, 19 nt, Human
cccgccugcggcccucuuc

SEQ ID NO: 498584 - RNA, 26 nt, Human
cccuggcccggagcucuuuucccucu

SEQ ID NO: 498585 - RNA, 19 nt, Human
ccgugcguguucgcucugc

SEQ ID NO: 498586 - RNA, 23 nt, Human
ccgugcguguucgcucugccugu

SEQ ID NO: 498587 - RNA, 20 nt, Human
ccugagcuuccuaccccagu

SEQ ID NO: 498588 - RNA, 19 nt, Human
cgacagggcccgcgaagcg

SEQ ID NO: 498589 - RNA, 22 nt, Human
cgcgcaggagcagaaguaacag

SEQ ID NO: 498590 - RNA, 19 nt, Human
cggaagacggcccgccugc

SEQ ID NO: 498591 - RNA, 22 nt, Human
cggagcucuuuucccucuaccc

SEQ ID NO: 498592 - RNA, 18 nt, Human
cucaguaucuacaaccca

SEQ ID NO: 498593 - RNA, 20 nt, Human
cucuaccccggaucugcucc

SEQ ID NO: 498594 - RNA, 21 nt, Human
cugagaaucagaguaagaauc

SEQ ID NO: 498595 - RNA, 20 nt, Human
cuggaagcccucacagcuca

SEQ ID NO: 498596 - RNA, 21 nt, Human
cuggaguucucaugaaugaag

SEQ ID NO: 498597 - RNA, 21 nt, Human
cuggcgggcugacuccccgac

SEQ ID NO: 498598 - RNA, 24 nt, Human
gaccaucugaaaucacauuacuga

SEQ ID NO: 498599 - RNA, 20 nt, Human
gaguuuuuuuuuuuuuuuuu

SEQ ID NO: 498600 - RNA, 20 nt, Human
gaguuuuuuuuuuuuuuuuu

SEQ ID NO: 498601 - RNA, 25 nt, Human
gcccgcuccucccccuuugcgcgcc

SEQ ID NO: 498602 - RNA, 19 nt, Human
ggaagacucaguaucuaca

SEQ ID NO: 498603 - RNA, 20 nt, Human
ggcagccccuggcccggagc

SEQ ID NO: 498604 - RNA, 28 nt, Human
ggcccggagcucuuuucccucuacccca

SEQ ID NO: 498605 - RNA, 22 nt, Human
ggcgacggcagcggcuccaacc

SEQ ID NO: 498606 - RNA, 19 nt, Human
gggaaggaagcacaaaagg

SEQ ID NO: 498607 - RNA, 20 nt, Human
gggaguggaggccuggaagc

SEQ ID NO: 498608 - RNA, 23 nt, Human
guuuuuuuuuuuuuuuuuuuggg

SEQ ID NO: 498609 - RNA, 22 nt, Human
uaaaaaacacugggaaggggua

SEQ ID NO: 498610 - RNA, 21 nt, Human
uaaaaacaucuuuugucuuca

SEQ ID NO: 498611 - RNA, 20 nt, Human
uaaaacaaaagucuuucugc

SEQ ID NO: 498612 - RNA, 23 nt, Human
uaaaagaugcuucaguggucaac

SEQ ID NO: 498613 - RNA, 19 nt, Human
uaaagacacauuccuguua

SEQ ID NO: 498614 - RNA, 18 nt, Human
uaagaacaccauuuuguu

SEQ ID NO: 498615 - RNA, 21 nt, Human
uacagugugcucaaaagaagc

SEQ ID NO: 498616 - RNA, 19 nt, Human
uacugaaaauacaacagac

SEQ ID NO: 498617 - RNA, 25 nt, Human
uagcaacaaauuuaaaagaaaaaga

SEQ ID NO: 498618 - RNA, 24 nt, Human
ucaacacucauucuggaguucuca

SEQ ID NO: 498619 - RNA, 19 nt, Human
ucagaaaaggaaaggaaga

SEQ ID NO: 498620 - RNA, 30 nt, Human
ucagaaaaggaaaggaagacucaguaucuu

SEQ ID NO: 498621 - RNA, 25 nt, Human
ucagcacagagcaauucauuuccuc

SEQ ID NO: 498622 - RNA, 21 nt, Human
uccaaaacaacucaagaaccc

SEQ ID NO: 498623 - RNA, 23 nt, Human
uccauacuguagucauucaaaaa

SEQ ID NO: 498624 - RNA, 19 nt, Human
ucccccuuugcgcgccccu

SEQ ID NO: 498625 - RNA, 22 nt, Human
ucccuggaagcccucacagcuc

SEQ ID NO: 498626 - RNA, 21 nt, Human
uccgugcguguucgcucugcc

SEQ ID NO: 498627 - RNA, 24 nt, Human
uccgugcguguucgcucugccugu

SEQ ID NO: 498628 - RNA, 25 nt, Human
uccgugcguguucgcucugccugug

SEQ ID NO: 498629 - RNA, 19 nt, Human
ucgcucugcuuuuucauau

SEQ ID NO: 498630 - RNA, 19 nt, Human
ucuaccccggaucugcucc

SEQ ID NO: 498631 - RNA, 25 nt, Human
ucuuaaauaccagcuuauaauacuu

SEQ ID NO: 498632 - RNA, 23 nt, Human
ucuuuugucuucaguaaaacaaa

SEQ ID NO: 498633 - RNA, 23 nt, Human
ugaaaucacauuacugaaaauac

SEQ ID NO: 498634 - RNA, 22 nt, Human
ugacagcaaaccugaauggcac

SEQ ID NO: 498635 - RNA, 24 nt, Human
ugagagaacuagucucgaguuuuu

SEQ ID NO: 498636 - RNA, 18 nt, Human
ugaggaaagcaaaugucc

SEQ ID NO: 498637 - RNA, 20 nt, Human
ugaggaaagcaaauguccuc

SEQ ID NO: 498638 - RNA, 25 nt, Human
ugaggggaaggaagcacaaaaggga

SEQ ID NO: 498639 - RNA, 23 nt, Human
ugcguguucgcucugccugugag

SEQ ID NO: 498640 - RNA, 21 nt, Human
ugcuuuuucauauucuucugg

SEQ ID NO: 498641 - RNA, 21 nt, Human
uggaagcccucacagcucagc

SEQ ID NO: 498642 - RNA, 21 nt, Human
uggaaggaaaaguagagaaau

SEQ ID NO: 498643 - RNA, 21 nt, Human
uggaguagagaagugggagaa

SEQ ID NO: 498644 - RNA, 22 nt, Human
uggaugcugguggcaggaggca

SEQ ID NO: 498645 - RNA, 22 nt, Human
uggcacaauggaacacagacuu

SEQ ID NO: 498646 - RNA, 18 nt, Human
uggcaggaggcaaccaga

SEQ ID NO: 498647 - RNA, 23 nt, Human
uggcgacggcagcggcuccaacc

SEQ ID NO: 498648 - RNA, 22 nt, Human
uggcgggcugacgagcuggcgg

SEQ ID NO: 498649 - RNA, 18 nt, Human
uggugggacuggcuccag

SEQ ID NO: 498650 - RNA, 22 nt, Human
uggugggacuggcuccaggcac

SEQ ID NO: 498651 - RNA, 24 nt, Human
ugugaggaaagcaaauguccucga

SEQ ID NO: 498652 - RNA, 22 nt, Human
uuaaauaccagcuuauaauacu

SEQ ID NO: 498653 - RNA, 23 nt, Human
uucagcacagagcaauucauuuc

SEQ ID NO: 498654 - RNA, 20 nt, Human
uuccauuuucccuggaagcc

SEQ ID NO: 498655 - RNA, 20 nt, Human
uucccuggaagcccucacag

SEQ ID NO: 498656 - RNA, 23 nt, Human
uugaauuacaaagcuacuuuuaa

SEQ ID NO: 498657 - RNA, 23 nt, Human
uuuacaagcaucuuaaauaccag

SEQ ID NO: 498658 - RNA, 18 nt, Human
uuuacagugcaagccaga

SEQ ID NO: 498659 - RNA, 19 nt, Human
uuuuuuuuuuuuuugccag

SEQ ID NO: 498660 - RNA, 21 nt, Human
uuuuuuuuuuuuuugccagug

SEQ ID NO: 498661 - RNA, 22 nt, Human
uuuuuuuuuuuuuuuuugccag

SEQ ID NO: 498662 - RNA, 20 nt, Human
uuuuuuuuuuuuuuuuuugg

SEQ ID NO: 498663 - RNA, 22 nt, Human
acccugacuucccaagagaaca

SEQ ID NO: 498664 - RNA, 22 nt, Human
accuuaauccucaucauagcau

SEQ ID NO: 498665 - RNA, 19 nt, Human
aggcagagagaagaccugg

SEQ ID NO: 498666 - RNA, 20 nt, Human
caagaccccucucucucuuc

SEQ ID NO: 498667 - RNA, 20 nt, Human
caagagaacaacccauucuu

SEQ ID NO: 498668 - RNA, 21 nt, Human
caaggccaggcugucuuccag

SEQ ID NO: 498669 - RNA, 21 nt, Human
caccuuaauccucaucauagc

SEQ ID NO: 498670 - RNA, 19 nt, Human
cagcaaaaagggguccgug

SEQ ID NO: 498671 - RNA, 21 nt, Human
cagcaaaaagggguccguguc

SEQ ID NO: 498672 - RNA, 21 nt, Human
cagucccaacacucaucagca

SEQ ID NO: 498673 - RNA, 23 nt, Human
ccaacacucaucagcaaaaaggg

SEQ ID NO: 498674 - RNA, 19 nt, Human
ccucaguggcaagggugac

SEQ ID NO: 498675 - RNA, 25 nt, Human
ccuucagauuccacugagcuugucu

SEQ ID NO: 498676 - RNA, 21 nt, Human
cgcuuuggcuccugguggucu

SEQ ID NO: 498677 - RNA, 18 nt, Human
cguggcccuaccuaucca

SEQ ID NO: 498678 - RNA, 21 nt, Human
cugggccuggaggcucgcuuu

SEQ ID NO: 498679 - RNA, 23 nt, Human
gacugugugcaggugggcaaggc

SEQ ID NO: 498680 - RNA, 24 nt, Human
gagcuugucuagaaggcuuugggu

SEQ ID NO: 498681 - RNA, 20 nt, Human
ggcugggcacugggagcugc

SEQ ID NO: 498682 - RNA, 18 nt, Human
gggcacugggagcugccg

SEQ ID NO: 498683 - RNA, 23 nt, Human
guggucucuggaggaugcaggca

SEQ ID NO: 498684 - RNA, 19 nt, Human
uacugacccugucccaggc

SEQ ID NO: 498685 - RNA, 18 nt, Human
ucaacaccuuaauccuca

SEQ ID NO: 498686 - RNA, 18 nt, Human
uccaucccaucugauacc

SEQ ID NO: 498687 - RNA, 24 nt, Human
ucccaggccuuuuugugucucgcc

SEQ ID NO: 498688 - RNA, 21 nt, Human
ugacaauuaggcagagagaag

SEQ ID NO: 498689 - RNA, 22 nt, Human
ugacuuguacugacccuguccc

SEQ ID NO: 498690 - RNA, 24 nt, Human
ugaguuguuuaaauugggaagagg

SEQ ID NO: 498691 - RNA, 18 nt, Human
ugcugggccuggaggcuc

SEQ ID NO: 498692 - RNA, 23 nt, Human
uggaggaugcaggcaugaagccu

SEQ ID NO: 498693 - RNA, 20 nt, Human
ugggcacugggagcugccgg

SEQ ID NO: 498694 - RNA, 20 nt, Human
uggguggcugggcacuggga

SEQ ID NO: 498695 - RNA, 18 nt, Human
uguacugacccuguccca

SEQ ID NO: 498696 - RNA, 22 nt, Human
ugucauuuaucucugaaagagg

SEQ ID NO: 498697 - RNA, 18 nt, Human
uguccucucccaggaccu

SEQ ID NO: 498698 - RNA, 22 nt, Human
ugugcaggugggcaaggggaac

SEQ ID NO: 498699 - RNA, 20 nt, Human
uucucccaagucccucauug

SEQ ID NO: 498700 - RNA, 19 nt, Human
uugcugggccuggaggcuc

SEQ ID NO: 498701 - RNA, 18 nt, Human
uuguacugacccuguccc

SEQ ID NO: 498702 - RNA, 28 nt, Human
aaaaaccaaagagaaaccugauggauaa

SEQ ID NO: 498703 - RNA, 22 nt, Human
aagcuaaagcaaacaaaagcaa

SEQ ID NO: 498704 - RNA, 24 nt, Human
aguaauauuuccccccuaaccucc

SEQ ID NO: 498705 - RNA, 22 nt, Human
agucacuagaaucuucuguguc

SEQ ID NO: 498706 - RNA, 24 nt, Human
auggaccacaucacugaagcauuu

SEQ ID NO: 498707 - RNA, 20 nt, Human
caccauguauagucccaagu

SEQ ID NO: 498708 - RNA, 26 nt, Human
cacucuauucaccgcuguuaccaagc

SEQ ID NO: 498709 - RNA, 23 nt, Human
cauuuuucauauguccugcuggu

SEQ ID NO: 498710 - RNA, 19 nt, Human
ccaaagggaaaaugaaaaa

SEQ ID NO: 498711 - RNA, 20 nt, Human
ccaagcuaaagcaaacaaaa

SEQ ID NO: 498712 - RNA, 23 nt, Human
ccccccuaaccuccuguaaguuc

SEQ ID NO: 498713 - RNA, 25 nt, Human
ccucuccguuuacaaaaaccaaaga

SEQ ID NO: 498714 - RNA, 18 nt, Human
cuaaagcaaacaaaagca

SEQ ID NO: 498715 - RNA, 21 nt, Human
cuagaaucuucugugucucaa

SEQ ID NO: 498716 - RNA, 19 nt, Human
cucaauguguuuaacagcu

SEQ ID NO: 498717 - RNA, 24 nt, Human
gucacuagaaucuucugugucuca

SEQ ID NO: 498718 - RNA, 22 nt, Human
uaauggaccacaucacugaagc

SEQ ID NO: 498719 - RNA, 24 nt, Human
uaccaagcuaaagcaaacaaaagc

SEQ ID NO: 498720 - RNA, 21 nt, Human
uacuuaacaaauggauggcac

SEQ ID NO: 498721 - RNA, 23 nt, Human
ucacuagaaucuucugugucuca

SEQ ID NO: 498722 - RNA, 22 nt, Human
ugaagcauuuuucauauguccu

SEQ ID NO: 498723 - RNA, 19 nt, Human
uggauggcacacacucgga

SEQ ID NO: 498724 - RNA, 21 nt, Human
uuaccaagcuaaagcaaacaa

SEQ ID NO: 498725 - RNA, 18 nt, Human
uucugugucucaaugugu

SEQ ID NO: 498726 - RNA, 22 nt, Human
aaaaauuucucccauacaauca

SEQ ID NO: 498727 - RNA, 22 nt, Human
aacaaaacagucuaucuuccag

SEQ ID NO: 498728 - RNA, 20 nt, Human
acuuuuuuuuuucuuugcaa

SEQ ID NO: 498729 - RNA, 22 nt, Human
aggcagaaccaagccguaugga

SEQ ID NO: 498730 - RNA, 23 nt, Human
aguagaucuuaccagggaaaugu

SEQ ID NO: 498731 - RNA, 23 nt, Human
auacuuuuuuuuuucuuugcaaa

SEQ ID NO: 498732 - RNA, 18 nt, Human
aucagguggaacaaaaca

SEQ ID NO: 498733 - RNA, 23 nt, Human
augauuugcuuucaaaaaacucu

SEQ ID NO: 498734 - RNA, 23 nt, Human
caggcagaaccaagccguaugga

SEQ ID NO: 498735 - RNA, 23 nt, Human
ccacuuucuaaggucaaaaauuu

SEQ ID NO: 498736 - RNA, 21 nt, Human
cccauacaaucagguggaaca

SEQ ID NO: 498737 - RNA, 25 nt, Human
uaauauaccauagauauuuacagga

SEQ ID NO: 498738 - RNA, 20 nt, Human
uacagaaugauuugcuuuca

SEQ ID NO: 498739 - RNA, 24 nt, Human
uacuuuuuuuuuucuuugcaaaca

SEQ ID NO: 498740 - RNA, 19 nt, Human
ucccagcugggacugcaag

SEQ ID NO: 498741 - RNA, 19 nt, Human
ugauuugcuuucaaaaaac

SEQ ID NO: 498742 - RNA, 21 nt, Human
ugcaaacaagucuguauuaag

SEQ ID NO: 498743 - RNA, 22 nt, Human
ugcagcugggagauaaugggac

SEQ ID NO: 498744 - RNA, 20 nt, Human
ugcugugcguccaggcagaa

SEQ ID NO: 498745 - RNA, 19 nt, Human
uggaaugucuaugcagcug

SEQ ID NO: 498746 - RNA, 23 nt, Human
uucucccauacaaucagguggaa

SEQ ID NO: 498747 - RNA, 22 nt, Human
aaacaaaaggaggggggcaggg

SEQ ID NO: 498748 - RNA, 21 nt, Human
aaacagccaggagccugggga

SEQ ID NO: 498749 - RNA, 26 nt, Human
aaacagccaggagccuggggaaacag

SEQ ID NO: 498750 - RNA, 18 nt, Human
aaccccaugaggcuucuc

SEQ ID NO: 498751 - RNA, 22 nt, Human
aaggaggggggcaggggacagc

SEQ ID NO: 498752 - RNA, 23 nt, Human
acaaaacaaaaggaggggggcag

SEQ ID NO: 498753 - RNA, 25 nt, Human
acaaaacaaaaggaggggggcaggg

SEQ ID NO: 498754 - RNA, 26 nt, Human
acaaaacaaaaggaggggggcagggg

SEQ ID NO: 498755 - RNA, 25 nt, Human
acccacccuucccucccucucuccu

SEQ ID NO: 498756 - RNA, 23 nt, Human
agaaaggaccuaugucaacccca

SEQ ID NO: 498757 - RNA, 22 nt, Human
agacacuuugcaacaaaaaaua

SEQ ID NO: 498758 - RNA, 24 nt, Human
agagagacacuuugcaacaaaaaa

SEQ ID NO: 498759 - RNA, 19 nt, Human
aggaguagagggcuggcua

SEQ ID NO: 498760 - RNA, 19 nt, Human
auagaguuucucuagagag

SEQ ID NO: 498761 - RNA, 22 nt, Human
auauaaagaauaugaccuccug

SEQ ID NO: 498762 - RNA, 20 nt, Human
aucuccccuacacucuguug

SEQ ID NO: 498763 - RNA, 21 nt, Human
cacccuucccucccucucucc

SEQ ID NO: 498764 - RNA, 20 nt, Human
cacucccacacaucuguccc

SEQ ID NO: 498765 - RNA, 18 nt, Human
cagaccgcucucuccucc

SEQ ID NO: 498766 - RNA, 21 nt, Human
cagauaaacagccaggagccu

SEQ ID NO: 498767 - RNA, 21 nt, Human
cagccuccuccccccauaccc

SEQ ID NO: 498768 - RNA, 21 nt, Human
caggagccuggggaaacaggg

SEQ ID NO: 498769 - RNA, 23 nt, Human
caggggacagccaucaagcccuc

SEQ ID NO: 498770 - RNA, 20 nt, Human
caugaggcuucuccuuuggg

SEQ ID NO: 498771 - RNA, 21 nt, Human
caugaggcuucuccuuugggg

SEQ ID NO: 498772 - RNA, 24 nt, Human
ccaaacuugaugggggggggaugg

SEQ ID NO: 498773 - RNA, 31 nt, Human
ccaagcgcucugucucuccucucucuuuucc

SEQ ID NO: 498774 - RNA, 22 nt, Human
ccacccuucccucccucucucc

SEQ ID NO: 498775 - RNA, 25 nt, Human
ccauacccucugcagcccugcacuc

SEQ ID NO: 498776 - RNA, 20 nt, Human
cccaccaaacuugauggggg

SEQ ID NO: 498777 - RNA, 20 nt, Human
cccggcagccgccucccugu

SEQ ID NO: 498778 - RNA, 24 nt, Human
ccgccucccugugaacggcuccgg

SEQ ID NO: 498779 - RNA, 18 nt, Human
ccuccagcugaguggaag

SEQ ID NO: 498780 - RNA, 22 nt, Human
ccuccagcugaguggaagcaaa

SEQ ID NO: 498781 - RNA, 21 nt, Human
ccucccucucuccuuucgccc

SEQ ID NO: 498782 - RNA, 20 nt, Human
ccucucuccuuucgccccca

SEQ ID NO: 498783 - RNA, 19 nt, Human
ccuuacccacccuucccuc

SEQ ID NO: 498784 - RNA, 21 nt, Human
ccuuacccacccuucccuccc

SEQ ID NO: 498785 - RNA, 21 nt, Human
ccuuacccacccuucccuccc

SEQ ID NO: 498786 - RNA, 22 nt, Human
ccuugggucccaucuguagcuc

SEQ ID NO: 498787 - RNA, 24 nt, Human
cggagguacuaaggugcuaaacug

SEQ ID NO: 498788 - RNA, 19 nt, Human
cuaaagcaagugaagcagc

SEQ ID NO: 498789 - RNA, 21 nt, Human
cuccuccuuacccacccuucc

SEQ ID NO: 498790 - RNA, 18 nt, Human
cucucuccuccuuaccca

SEQ ID NO: 498791 - RNA, 19 nt, Human
cucuugagccuccagcuga

SEQ ID NO: 498792 - RNA, 25 nt, Human
cugacggucccggcagccgccuccc

SEQ ID NO: 498793 - RNA, 23 nt, Human
cugcauuauuuucucuacguugc

SEQ ID NO: 498794 - RNA, 21 nt, Human
cuggaauuggucccagaagcc

SEQ ID NO: 498795 - RNA, 18 nt, Human
gaagaucuucagggcagg

SEQ ID NO: 498796 - RNA, 21 nt, Human
gagcagagccagcuaagagga

SEQ ID NO: 498797 - RNA, 19 nt, Human
gaggcaggacugggggaau

SEQ ID NO: 498798 - RNA, 18 nt, Human
gcuagggcucgaguucug

SEQ ID NO: 498799 - RNA, 25 nt, Human
gcucugucucuccucucucuuuucc

SEQ ID NO: 498800 - RNA, 22 nt, Human
ggaacagagauggcagaaagga

SEQ ID NO: 498801 - RNA, 23 nt, Human
ggagccuggggaaacagggauga

SEQ ID NO: 498802 - RNA, 20 nt, Human
ggcaggggggaggcuggggg

SEQ ID NO: 498803 - RNA, 25 nt, Human
ggcuagggcucgaguucuggcuugg

SEQ ID NO: 498804 - RNA, 28 nt, Human
gggaaacagggaugagaagggcauuggg

SEQ ID NO: 498805 - RNA, 20 nt, Human
ggggaaacagggaugagaag

SEQ ID NO: 498806 - RNA, 21 nt, Human
gggggagaggcaggacugggg

SEQ ID NO: 498807 - RNA, 23 nt, Human
ggggggcaggggacagccaucaa

SEQ ID NO: 498808 - RNA, 19 nt, Human
guguacaaaacaaaaggag

SEQ ID NO: 498809 - RNA, 22 nt, Human
uaaagcaagugaagcagcggag

SEQ ID NO: 498810 - RNA, 22 nt, Human
uaagaggagccaaaugucccug

SEQ ID NO: 498811 - RNA, 23 nt, Human
uaagaggagccaaaugucccuga

SEQ ID NO: 498812 - RNA, 23 nt, Human
uaaucccugacagcagcuggaac

SEQ ID NO: 498813 - RNA, 24 nt, Human
uacaaaacaaaaggaggggggcag

SEQ ID NO: 498814 - RNA, 23 nt, Human
uacccucugcagcccugcacucc

SEQ ID NO: 498815 - RNA, 18 nt, Human
uaggaugggggagaggca

SEQ ID NO: 498816 - RNA, 22 nt, Human
ucccuugggucccaucuguagc

SEQ ID NO: 498817 - RNA, 19 nt, Human
uccuuacccacccuucccu

SEQ ID NO: 498818 - RNA, 20 nt, Human
uccuuuggggcagauaaaca

SEQ ID NO: 498819 - RNA, 18 nt, Human
ucuccucucucuuuucuc

SEQ ID NO: 498820 - RNA, 20 nt, Human
ucucucuuuucucucucucc

SEQ ID NO: 498821 - RNA, 23 nt, Human
ucucucuuuucucucucucucuc

SEQ ID NO: 498822 - RNA, 18 nt, Human
ucugucccugcugauagu

SEQ ID NO: 498823 - RNA, 18 nt, Human
ucugucucuccucucucu

SEQ ID NO: 498824 - RNA, 21 nt, Human
ucugucucuccucucucuuuu

SEQ ID NO: 498825 - RNA, 22 nt, Human
ucuugagccuccagcugagugg

SEQ ID NO: 498826 - RNA, 24 nt, Human
ugaagcagcggagguacuaaggug

SEQ ID NO: 498827 - RNA, 20 nt, Human
ugacagcagcuggaacagag

SEQ ID NO: 498828 - RNA, 18 nt, Human
ugaggccucuuggucucu

SEQ ID NO: 498829 - RNA, 19 nt, Human
ugauaggaugggggagagg

SEQ ID NO: 498830 - RNA, 23 nt, Human
ugcagcagaccgcucucuccucc

SEQ ID NO: 498831 - RNA, 21 nt, Human
uggaacagagauggcagaaag

SEQ ID NO: 498832 - RNA, 19 nt, Human
uggcagaaaggaccuaugu

SEQ ID NO: 498833 - RNA, 21 nt, Human
uggcuaaagcaagugaagcag

SEQ ID NO: 498834 - RNA, 22 nt, Human
uggcuugggcuccaagcucucc

SEQ ID NO: 498835 - RNA, 19 nt, Human
ugggcaggcacaaaggcca

SEQ ID NO: 498836 - RNA, 21 nt, Human
ugggcuccaagcucuccuccu

SEQ ID NO: 498837 - RNA, 22 nt, Human
uggggcagauaaacagccagga

SEQ ID NO: 498838 - RNA, 28 nt, Human
uuagcagccuccuccccccauacccucu

SEQ ID NO: 498839 - RNA, 18 nt, Human
uucucucucucucucucu

SEQ ID NO: 498840 - RNA, 24 nt, Human
uugcagcagaccgcucucuccucc

SEQ ID NO: 498841 - RNA, 21 nt, Human
uuuagcagccuccucccccca

SEQ ID NO: 498842 - RNA, 23 nt, Human
uuugccaauugagcuuuucuuuu

SEQ ID NO: 498843 - RNA, 22 nt, Human
uuuuuuuuuuuuuugccaauug

SEQ ID NO: 498844 - RNA, 22 nt, Human
uuuuuuuuuuuuuuuuugccaa

SEQ ID NO: 498845 - RNA, 23 nt, Human
uuuuuuuuuuuuuuuuugccaau

SEQ ID NO: 498846 - RNA, 20 nt, Human
uuuuuuuuuuuuuuuuuugg

SEQ ID NO: 498847 - RNA, 18 nt, Human
aaagaaggcagacacaaa

SEQ ID NO: 498848 - RNA, 18 nt, Human
aaaguuuuccagccacac

SEQ ID NO: 498849 - RNA, 26 nt, Human
aagaaggcagacacaaaagaacacag

SEQ ID NO: 498850 - RNA, 27 nt, Human
aagcagguacaaggccccuaaaagcaa

SEQ ID NO: 498851 - RNA, 22 nt, Human
aagugaaagaauacagacucaa

SEQ ID NO: 498852 - RNA, 23 nt, Human
aauauuuaauugaaccacucagu

SEQ ID NO: 498853 - RNA, 22 nt, Human
acagacucaaacaauaugccca

SEQ ID NO: 498854 - RNA, 21 nt, Human
acucagucgguacugaaacag

SEQ ID NO: 498855 - RNA, 26 nt, Human
agaaggcagacacaaaagaacacagg

SEQ ID NO: 498856 - RNA, 23 nt, Human
agaauacagacucaaacaauaug

SEQ ID NO: 498857 - RNA, 18 nt, Human
aggcagacacaaaagaac

SEQ ID NO: 498858 - RNA, 22 nt, Human
aggguugaaaggcugaugaacu

SEQ ID NO: 498859 - RNA, 23 nt, Human
agugacaguggcuccuuggggcu

SEQ ID NO: 498860 - RNA, 24 nt, Human
auacagacucaaacaauaugccca

SEQ ID NO: 498861 - RNA, 21 nt, Human
augaagcagguacaaggcccc

SEQ ID NO: 498862 - RNA, 21 nt, Human
augcccacauauguacaguua

SEQ ID NO: 498863 - RNA, 21 nt, Human
auuucaucaucuuaauuucuc

SEQ ID NO: 498864 - RNA, 22 nt, Human
caaacauacaugguauagccac

SEQ ID NO: 498865 - RNA, 18 nt, Human
cagacacaaaagaacaca

SEQ ID NO: 498866 - RNA, 20 nt, Human
cagguaucauuucauuuauu

SEQ ID NO: 498867 - RNA, 26 nt, Human
caucaaaacaaaaaaguuuuccagga

SEQ ID NO: 498868 - RNA, 18 nt, Human
ccacucagucgguacuga

SEQ ID NO: 498869 - RNA, 21 nt, Human
ccccuaaaagcaauuggugag

SEQ ID NO: 498870 - RNA, 20 nt, Human
gaaagaaggcagacacaaaa

SEQ ID NO: 498871 - RNA, 19 nt, Human
gaaggaauacuacucagua

SEQ ID NO: 498872 - RNA, 21 nt, Human
gaaggcagacacaaaagaacc

SEQ ID NO: 498873 - RNA, 18 nt, Human
gccuguguuagugagacc

SEQ ID NO: 498874 - RNA, 23 nt, Human
gcuagauuucaaaccugauuuua

SEQ ID NO: 498875 - RNA, 23 nt, Human
uaacagccagaaucauuacaugc

SEQ ID NO: 498876 - RNA, 24 nt, Human
uaauaagugaaaguacaaacauac

SEQ ID NO: 498877 - RNA, 21 nt, Human
uacaucaaagugaaagaauac

SEQ ID NO: 498878 - RNA, 22 nt, Human
uacaugcuuaacaauacaugca

SEQ ID NO: 498879 - RNA, 20 nt, Human
uaggagauuuuagagaaauu

SEQ ID NO: 498880 - RNA, 20 nt, Human
uaugcccacauauguacagu

SEQ ID NO: 498881 - RNA, 24 nt, Human
uauuacaucaacacaauucugcuu

SEQ ID NO: 498882 - RNA, 20 nt, Human
ucaaagugaaagaauacaga

SEQ ID NO: 498883 - RNA, 25 nt, Human
ucuccauacuagcaauuagcagcua

SEQ ID NO: 498884 - RNA, 24 nt, Human
ugaugcaugaaagaaggcagacac

SEQ ID NO: 498885 - RNA, 20 nt, Human
ugcucaugauaguuucuuca

SEQ ID NO: 498886 - RNA, 26 nt, Human
uucaaaauguauuugaaaaucaaaga

SEQ ID NO: 498887 - RNA, 18 nt, Human
uugaugcaugaaagaagg

SEQ ID NO: 498888 - RNA, 23 nt, Human
uuggggcugaggguugaaaggcu

SEQ ID NO: 498889 - RNA, 24 nt, Human
uuuuaaagcuacaguaauuuuaaa

SEQ ID NO: 498890 - RNA, 22 nt, Human
uuuuuuuuuuuuuuuuccucuu

SEQ ID NO: 498891 - RNA, 25 nt, Human
uuuuuuuuuuuuuuuuuccucuuaa

SEQ ID NO: 498892 - RNA, 21 nt, Human
aaaagucuaagcagguaaaag

SEQ ID NO: 498893 - RNA, 20 nt, Human
aagaauucguuaucucaguc

SEQ ID NO: 498894 - RNA, 23 nt, Human
aagaauucguuaucucagucucu

SEQ ID NO: 498895 - RNA, 25 nt, Human
aagcauauacacaaagauaauauga

SEQ ID NO: 498896 - RNA, 28 nt, Human
aagugacauaucaagaaauuaaaaacac

SEQ ID NO: 498897 - RNA, 22 nt, Human
aaugccucuuuugcucccauuu

SEQ ID NO: 498898 - RNA, 21 nt, Human
acaaagaucaaauuuugaaca

SEQ ID NO: 498899 - RNA, 18 nt, Human
acacacaccacaaaagcu

SEQ ID NO: 498900 - RNA, 25 nt, Human
agcacaaaaauacaaaacaaagauc

SEQ ID NO: 498901 - RNA, 24 nt, Human
caaaacaaagaucaaauuuugaac

SEQ ID NO: 498902 - RNA, 18 nt, Human
caacaaggugcugucucc

SEQ ID NO: 498903 - RNA, 19 nt, Human
cacaaugucuaguuuuuaa

SEQ ID NO: 498904 - RNA, 18 nt, Human
caccuuuguguagaaucu

SEQ ID NO: 498905 - RNA, 20 nt, Human
cacugcuccugcugucccuu

SEQ ID NO: 498906 - RNA, 22 nt, Human
cacugcuccugcugucccuugc

SEQ ID NO: 498907 - RNA, 21 nt, Human
cauauacacaaagauaauaug

SEQ ID NO: 498908 - RNA, 27 nt, Human
cauuaaacaacccaguuaccuuuucuu

SEQ ID NO: 498909 - RNA, 18 nt, Human
cccccacaucugcuuaac

SEQ ID NO: 498910 - RNA, 19 nt, Human
ccccggagccgcuuucucu

SEQ ID NO: 498911 - RNA, 19 nt, Human
cccuuuccugucuuaucag

SEQ ID NO: 498912 - RNA, 18 nt, Human
ccgccgccgucgccacga

SEQ ID NO: 498913 - RNA, 22 nt, Human
ccgccgucgccacgaauccccu

SEQ ID NO: 498914 - RNA, 21 nt, Human
cgccacgaauccccuucccgc

SEQ ID NO: 498915 - RNA, 19 nt, Human
cucagugacuaccuccuag

SEQ ID NO: 498916 - RNA, 21 nt, Human
cucccauuuugugagcuccug

SEQ ID NO: 498917 - RNA, 18 nt, Human
cugucaagagcuuuccuu

SEQ ID NO: 498918 - RNA, 19 nt, Human
gaaaacuugaccuauguca

SEQ ID NO: 498919 - RNA, 23 nt, Human
gaaaagacuauaguaauaaaaaa

SEQ ID NO: 498920 - RNA, 23 nt, Human
gaaacugacaauucagugaauaa

SEQ ID NO: 498921 - RNA, 25 nt, Human
gccaccggcggaaagagacgcaaaa

SEQ ID NO: 498922 - RNA, 18 nt, Human
gcccugcaccgccuggcg

SEQ ID NO: 498923 - RNA, 18 nt, Human
gccgccgccgucgccacg

SEQ ID NO: 498924 - RNA, 23 nt, Human
gcugucccuugccgccgccgucg

SEQ ID NO: 498925 - RNA, 19 nt, Human
gggaggaacagaagugaca

SEQ ID NO: 498926 - RNA, 20 nt, Human
gucccuugccgccgccgucg

SEQ ID NO: 498927 - RNA, 28 nt, Human
gucccuugccgccgccgucgccacgaau

SEQ ID NO: 498928 - RNA, 19 nt, Human
uaaaaaaauaaacuagcau

SEQ ID NO: 498929 - RNA, 21 nt, Human
uaaacaaagaucucaaaggua

SEQ ID NO: 498930 - RNA, 26 nt, Human
uaaacugaaaacacuucacaugaaau

SEQ ID NO: 498931 - RNA, 22 nt, Human
uaacagucaugaugaaauaucc

SEQ ID NO: 498932 - RNA, 26 nt, Human
uacaaaacaaagaucaaauuuugaac

SEQ ID NO: 498933 - RNA, 25 nt, Human
uacagagaaggaaccaaauucuagc

SEQ ID NO: 498934 - RNA, 18 nt, Human
uaccgggacccgccccug

SEQ ID NO: 498935 - RNA, 19 nt, Human
uagcacaaaaauacaaaac

SEQ ID NO: 498936 - RNA, 23 nt, Human
uaguaauaaaaaaauucaauuuc

SEQ ID NO: 498937 - RNA, 23 nt, Human
uauaaaaaaggacuguuaugaaa

SEQ ID NO: 498938 - RNA, 19 nt, Human
uauaauagugccacaugag

SEQ ID NO: 498939 - RNA, 19 nt, Human
uaucucagucucuucaagg

SEQ ID NO: 498940 - RNA, 19 nt, Human
uaugcaaauauucugacac

SEQ ID NO: 498941 - RNA, 21 nt, Human
ucaagaaauuaaaaacacaaa

SEQ ID NO: 498942 - RNA, 20 nt, Human
ucaagagcuuuccuuuuuuu

SEQ ID NO: 498943 - RNA, 22 nt, Human
ucagaagccuuaauuauucucu

SEQ ID NO: 498944 - RNA, 21 nt, Human
ucagugacuaccuccuagagc

SEQ ID NO: 498945 - RNA, 27 nt, Human
uccgacggccgcgcugacagcaccacu

SEQ ID NO: 498946 - RNA, 23 nt, Human
ucguauuuuuuauuacucacaau

SEQ ID NO: 498947 - RNA, 21 nt, Human
ucucuaccacacacaccacaa

SEQ ID NO: 498948 - RNA, 21 nt, Human
ugaaaacacuucacaugaaau

SEQ ID NO: 498949 - RNA, 22 nt, Human
ugaaauaucccuuuccugucuu

SEQ ID NO: 498950 - RNA, 23 nt, Human
ugaaggaaacugacaauucagug

SEQ ID NO: 498951 - RNA, 22 nt, Human
ugaauaacuaaacugaaaacac

SEQ ID NO: 498952 - RNA, 24 nt, Human
ugcccugcccccacaucugcuuaa

SEQ ID NO: 498953 - RNA, 21 nt, Human
ugggaaacaacugucaagagc

SEQ ID NO: 498954 - RNA, 18 nt, Human
uguagaaucucuggcaac

SEQ ID NO: 498955 - RNA, 24 nt, Human
uuaauuauucucuaccacacacac

SEQ ID NO: 498956 - RNA, 18 nt, Human
uucaaaggaggagcggcc

SEQ ID NO: 498957 - RNA, 20 nt, Human
uugaaaagacuauaguaaua

SEQ ID NO: 498958 - RNA, 19 nt, Human
uuuaaccaggagaccauac

SEQ ID NO: 498959 - RNA, 23 nt, Human
aaaagaccagagcaaccccaaua

SEQ ID NO: 498960 - RNA, 21 nt, Human
aaaaugacugacuccaaagag

SEQ ID NO: 498961 - RNA, 20 nt, Human
aaauaacaugaaaccaacuu

SEQ ID NO: 498962 - RNA, 23 nt, Human
aaccacgggcaagucaugccacc

SEQ ID NO: 498963 - RNA, 20 nt, Human
aacccaaagaaagaagcaau

SEQ ID NO: 498964 - RNA, 22 nt, Human
aacccccgaccucaagugaucu

SEQ ID NO: 498965 - RNA, 24 nt, Human
aaguagcugggauuacaggcaugu

SEQ ID NO: 498966 - RNA, 21 nt, Human
aagugaucacaauuuagaagc

SEQ ID NO: 498967 - RNA, 18 nt, Human
aagugcugggauuacagg

SEQ ID NO: 498968 - RNA, 19 nt, Human
aagugcugggauuacaggc

SEQ ID NO: 498969 - RNA, 19 nt, Human
aagugcugggauuacaggc

SEQ ID NO: 498970 - RNA, 23 nt, Human
aagugcugggauuacaggcguga

SEQ ID NO: 498971 - RNA, 22 nt, Human
aaugugaaaacccaaagaaaga

SEQ ID NO: 498972 - RNA, 23 nt, Human
acuauacacauccaacaaacauu

SEQ ID NO: 498973 - RNA, 24 nt, Human
acugucucugucacccaggcugga

SEQ ID NO: 498974 - RNA, 22 nt, Human
acuugacagcaaagcuccaugg

SEQ ID NO: 498975 - RNA, 24 nt, Human
agacagcugaggaugccuaaauca

SEQ ID NO: 498976 - RNA, 22 nt, Human
agccaagcagcaaucaccgaga

SEQ ID NO: 498977 - RNA, 24 nt, Human
agcgauuuuccugccucagccucc

SEQ ID NO: 498978 - RNA, 21 nt, Human
agcucacuggaaccuucuaaa

SEQ ID NO: 498979 - RNA, 25 nt, Human
aggcuggagugcaguggcgugaucu

SEQ ID NO: 498980 - RNA, 18 nt, Human
agggaugggaauaugggg

SEQ ID NO: 498981 - RNA, 23 nt, Human
aguagcugggauuacaggcaugu

SEQ ID NO: 498982 - RNA, 18 nt, Human
agucaaaguuuggguucu

SEQ ID NO: 498983 - RNA, 26 nt, Human
agugaucugcccaccucggucuuccu

SEQ ID NO: 498984 - RNA, 23 nt, Human
agugcaguggcgugaucuuggcu

SEQ ID NO: 498985 - RNA, 24 nt, Human
agugcaguggcgugaucuuggcuc

SEQ ID NO: 498986 - RNA, 24 nt, Human
auagaacacagaaugcaauccucc

SEQ ID NO: 498987 - RNA, 21 nt, Human
caacacaguccugacuguucc

SEQ ID NO: 498988 - RNA, 22 nt, Human
caagcagcaaucaccgagaaua

SEQ ID NO: 498989 - RNA, 22 nt, Human
caagcgauuuuccugccucagc

SEQ ID NO: 498990 - RNA, 22 nt, Human
cacccagccuggaaguaaggac

SEQ ID NO: 498991 - RNA, 24 nt, Human
cacccaggcuggagugcaguggcg

SEQ ID NO: 498992 - RNA, 18 nt, Human
caccuggaaaagacucca

SEQ ID NO: 498993 - RNA, 21 nt, Human
cacuauguugaccaggcuggu

SEQ ID NO: 498994 - RNA, 22 nt, Human
cacuauguugaccaggcugguc

SEQ ID NO: 498995 - RNA, 21 nt, Human
cacugcaaucugugccuccug

SEQ ID NO: 498996 - RNA, 23 nt, Human
cacugcaaucugugccuccuggg

SEQ ID NO: 498997 - RNA, 24 nt, Human
cagagaacacugcaaagcugccau

SEQ ID NO: 498998 - RNA, 27 nt, Human
cagcaaaucgucuccuccaaagcaauc

SEQ ID NO: 498999 - RNA, 26 nt, Human
cagcagagagcuugccauaauccccu

SEQ ID NO: 499000 - RNA, 22 nt, Human
cagcucacuggaaccuucuaaa

SEQ ID NO: 499001 - RNA, 25 nt, Human
caugaagaaaaggaaccaaaaauga

SEQ ID NO: 499002 - RNA, 18 nt, Human
ccaaagaaagaagcaaua

SEQ ID NO: 499003 - RNA, 23 nt, Human
ccaaguagcugggauuacaggca

SEQ ID NO: 499004 - RNA, 24 nt, Human
ccaaguagcugggauuacaggcau

SEQ ID NO: 499005 - RNA, 25 nt, Human
ccaaucacaaaaaacagacagcuga

SEQ ID NO: 499006 - RNA, 25 nt, Human
ccagagguuccauucucccaacuga

SEQ ID NO: 499007 - RNA, 18 nt, Human
ccagcaugaggaggccuu

SEQ ID NO: 499008 - RNA, 19 nt, Human
ccaggcuggucgcaaaccc

SEQ ID NO: 499009 - RNA, 19 nt, Human
ccauuucaggaccuggcua

SEQ ID NO: 499010 - RNA, 23 nt, Human
cccaaguagcugggauuacaggc

SEQ ID NO: 499011 - RNA, 24 nt, Human
cccaaguagcugggauuacaggca

SEQ ID NO: 499012 - RNA, 21 nt, Human
cccaggcuggagugcaguggc

SEQ ID NO: 499013 - RNA, 19 nt, Human
cccgaccucaagugaucug

SEQ ID NO: 499014 - RNA, 24 nt, Human
cccgaccucaagugaucugcccac

SEQ ID NO: 499015 - RNA, 22 nt, Human
ccuaagugcugggauuacaggc

SEQ ID NO: 499016 - RNA, 24 nt, Human
ccuaagugcugggauuacaggcgu

SEQ ID NO: 499017 - RNA, 23 nt, Human
ccugccucagccucccaaguagc

SEQ ID NO: 499018 - RNA, 24 nt, Human
ccugccucagccucccaaguagcu

SEQ ID NO: 499019 - RNA, 23 nt, Human
ccuggguucaagcgauuuuccug

SEQ ID NO: 499020 - RNA, 24 nt, Human
cgaagaaaccaagcuggcuuucug

SEQ ID NO: 499021 - RNA, 18 nt, Human
cgaccucaagugaucugc

SEQ ID NO: 499022 - RNA, 23 nt, Human
cgagaauaauaaagugggugcca

SEQ ID NO: 499023 - RNA, 19 nt, Human
cgcauccuuccagcugcag

SEQ ID NO: 499024 - RNA, 22 nt, Human
cgcucgcauccuuccagcugca

SEQ ID NO: 499025 - RNA, 24 nt, Human
cuaagugcugggauuacaggcgug

SEQ ID NO: 499026 - RNA, 19 nt, Human
cuagaugaggaaaaugacu

SEQ ID NO: 499027 - RNA, 25 nt, Human
cucaagugaucugcccaccucgguc

SEQ ID NO: 499028 - RNA, 24 nt, Human
cucacugcaaucugugccuccugg

SEQ ID NO: 499029 - RNA, 24 nt, Human
cucagccucccaaguagcugggau

SEQ ID NO: 499030 - RNA, 19 nt, Human
cuccaccacagauuuagag

SEQ ID NO: 499031 - RNA, 19 nt, Human
cucugucacccaggcugga

SEQ ID NO: 499032 - RNA, 23 nt, Human
cucugucacccaggcuggagugc

SEQ ID NO: 499033 - RNA, 23 nt, Human
cugaacacagcagagagcuugcc

SEQ ID NO: 499034 - RNA, 21 nt, Human
cugcccaaccagcugcacaac

SEQ ID NO: 499035 - RNA, 23 nt, Human
cugucucugucacccaggcugga

SEQ ID NO: 499036 - RNA, 24 nt, Human
cugucucugucacccaggcuggag

SEQ ID NO: 499037 - RNA, 21 nt, Human
gaaaacccaaagaaagaagca

SEQ ID NO: 499038 - RNA, 25 nt, Human
gaagaaaccaagcuggcuuucuggg

SEQ ID NO: 499039 - RNA, 24 nt, Human
gaccucaagugaucugcccaccuc

SEQ ID NO: 499040 - RNA, 22 nt, Human
gagaaaaaaauuagggauggga

SEQ ID NO: 499041 - RNA, 20 nt, Human
gagaauaauaaagugggugc

SEQ ID NO: 499042 - RNA, 19 nt, Human
gaucaagugcccaaguuug

SEQ ID NO: 499043 - RNA, 22 nt, Human
gaucugcccaccucggucuucc

SEQ ID NO: 499044 - RNA, 23 nt, Human
gaucugcccaccucggucuuccu

SEQ ID NO: 499045 - RNA, 22 nt, Human
gaucugccgccucagccacucc

SEQ ID NO: 499046 - RNA, 18 nt, Human
gauuacaggcaugugcca

SEQ ID NO: 499047 - RNA, 24 nt, Human
gauuacaggcaugugccaccaugc

SEQ ID NO: 499048 - RNA, 19 nt, Human
gauuacaggcgugaguuac

SEQ ID NO: 499049 - RNA, 23 nt, Human
gauuacaggcgugaguuacggca

SEQ ID NO: 499050 - RNA, 21 nt, Human
gcaaaucgucuccuccaaagc

SEQ ID NO: 499051 - RNA, 19 nt, Human
gccuuuguuggaugagcuu

SEQ ID NO: 499052 - RNA, 24 nt, Human
gcgauuuuccugccucagccuccc

SEQ ID NO: 499053 - RNA, 19 nt, Human
gcuggagugcaguggcgug

SEQ ID NO: 499054 - RNA, 23 nt, Human
gcuggucgcaaacccccgaccuc

SEQ ID NO: 499055 - RNA, 24 nt, Human
ggauuacaggcaugugccaccaug

SEQ ID NO: 499056 - RNA, 22 nt, Human
ggcuggagugcaguggcgugau

SEQ ID NO: 499057 - RNA, 25 nt, Human
guacuuucaaaaaagaccagagcaa

SEQ ID NO: 499058 - RNA, 18 nt, Human
guagcugggauuacaggc

SEQ ID NO: 499059 - RNA, 24 nt, Human
gugaucugcccaccucggucuucc

SEQ ID NO: 499060 - RNA, 20 nt, Human
uaacaugaaaccaacuugac

SEQ ID NO: 499061 - RNA, 22 nt, Human
uaacuuggggcacauugcuucu

SEQ ID NO: 499062 - RNA, 24 nt, Human
uaagugcugggauuacaggcguga

SEQ ID NO: 499063 - RNA, 18 nt, Human
uaauuuuuguauuuuuag

SEQ ID NO: 499064 - RNA, 22 nt, Human
uacaggcaugugccaccaugcc

SEQ ID NO: 499065 - RNA, 23 nt, Human
uacuuuccacgaagaaaccaagc

SEQ ID NO: 499066 - RNA, 28 nt, Human
uagaaaggaaucucccugaacacagcag

SEQ ID NO: 499067 - RNA, 22 nt, Human
uaggacaagaucagaauuccag

SEQ ID NO: 499068 - RNA, 24 nt, Human
uaggacaagaucagaauuccagcc

SEQ ID NO: 499069 - RNA, 20 nt, Human
uauacacauccaacaaacau

SEQ ID NO: 499070 - RNA, 23 nt, Human
uauguugaccaggcuggucgcaa

SEQ ID NO: 499071 - RNA, 23 nt, Human
uauguugaccaggcuggucgcaa

SEQ ID NO: 499072 - RNA, 24 nt, Human
uauguugaccaggcuggucgcaaa

SEQ ID NO: 499073 - RNA, 20 nt, Human
ucaaaguuuggguucuuauc

SEQ ID NO: 499074 - RNA, 19 nt, Human
ucaagcgauuuuccugccu

SEQ ID NO: 499075 - RNA, 18 nt, Human
ucacaaaaaacagacagc

SEQ ID NO: 499076 - RNA, 24 nt, Human
ucacccaggcuggagugcaguggc

SEQ ID NO: 499077 - RNA, 24 nt, Human
ucacugcaaucugugccuccuggg

SEQ ID NO: 499078 - RNA, 25 nt, Human
ucacugcaaucugugccuccugggu

SEQ ID NO: 499079 - RNA, 24 nt, Human
ucacuggaaccuucuaaaauggca

SEQ ID NO: 499080 - RNA, 21 nt, Human
ucagaagcuaggacaagauca

SEQ ID NO: 499081 - RNA, 20 nt, Human
ucagccucccaaguagcugg

SEQ ID NO: 499082 - RNA, 20 nt, Human
ucaguagccucuugaagccu

SEQ ID NO: 499083 - RNA, 18 nt, Human
ucaguuccuaggcuaugc

SEQ ID NO: 499084 - RNA, 21 nt, Human
uccaaggucagaagcuaggac

SEQ ID NO: 499085 - RNA, 23 nt, Human
uccaaggucagaagcuaggacaa

SEQ ID NO: 499086 - RNA, 24 nt, Human
ucccaaguagcugggauuacaggc

SEQ ID NO: 499087 - RNA, 23 nt, Human
uccuaagugcugggauuacaggc

SEQ ID NO: 499088 - RNA, 24 nt, Human
uccuaagugcugggauuacaggcg

SEQ ID NO: 499089 - RNA, 21 nt, Human
uccuggguucaagcgauuuuc

SEQ ID NO: 499090 - RNA, 24 nt, Human
uccuggguucaagcgauuuuccug

SEQ ID NO: 499091 - RNA, 20 nt, Human
uccuugcaacucuauauauu

SEQ ID NO: 499092 - RNA, 19 nt, Human
ucuaaaauggcaaagacac

SEQ ID NO: 499093 - RNA, 31 nt, Human
ucucacugucucugucacccaggcuggaguu

SEQ ID NO: 499094 - RNA, 23 nt, Human
ucucugucacccaggcuggagug

SEQ ID NO: 499095 - RNA, 23 nt, Human
ucuguacuuucaaaaaagaccag

SEQ ID NO: 499096 - RNA, 24 nt, Human
ucugucacccaggcuggagugcag

SEQ ID NO: 499097 - RNA, 23 nt, Human
ugaaaacccaaagaaagaagcaa

SEQ ID NO: 499098 - RNA, 22 nt, Human
ugaaauaacaugaaaccaacuu

SEQ ID NO: 499099 - RNA, 25 nt, Human
ugaaauaacaugaaaccaagggagc

SEQ ID NO: 499100 - RNA, 19 nt, Human
ugaagccuacagaagugac

SEQ ID NO: 499101 - RNA, 21 nt, Human
ugaauauaacauagaacacag

SEQ ID NO: 499102 - RNA, 21 nt, Human
ugaccaggcuggucgcaaacc

SEQ ID NO: 499103 - RNA, 26 nt, Human
ugaccaggcuggucgcaaaccccgug

SEQ ID NO: 499104 - RNA, 23 nt, Human
ugacugacuccaaagaguccuug

SEQ ID NO: 499105 - RNA, 21 nt, Human
ugagguucaugaagaaaagga

SEQ ID NO: 499106 - RNA, 24 nt, Human
ugagugcuuuguccaaggucagaa

SEQ ID NO: 499107 - RNA, 19 nt, Human
ugcaccuggaaaagacucc

SEQ ID NO: 499108 - RNA, 22 nt, Human
ugcaguggcgugaucuuggcuc

SEQ ID NO: 499109 - RNA, 26 nt, Human
ugccagcucugcccaaccagcugcac

SEQ ID NO: 499110 - RNA, 21 nt, Human
ugccauugauauuucaguagc

SEQ ID NO: 499111 - RNA, 19 nt, Human
ugcccaucauccucuucaa

SEQ ID NO: 499112 - RNA, 24 nt, Human
ugccucagccucccaaguagcugg

SEQ ID NO: 499113 - RNA, 18 nt, Human
ugcugggauuacaggcgu

SEQ ID NO: 499114 - RNA, 21 nt, Human
uggaaaagacuccaccacaga

SEQ ID NO: 499115 - RNA, 19 nt, Human
uggagugcaguggcgugau

SEQ ID NO: 499116 - RNA, 23 nt, Human
uggagugcaguggcgugaucuug

SEQ ID NO: 499117 - RNA, 24 nt, Human
uggagugcaguggcgugaucuugg

SEQ ID NO: 499118 - RNA, 18 nt, Human
ugggauuacaggcaugug

SEQ ID NO: 499119 - RNA, 21 nt, Human
ugggauuacaggcaugugcca

SEQ ID NO: 499120 - RNA, 22 nt, Human
ugggauuacaggcaugugccac

SEQ ID NO: 499121 - RNA, 24 nt, Human
ugggauuacaggcaugugccacca

SEQ ID NO: 499122 - RNA, 18 nt, Human
ugggauuacaggcgugag

SEQ ID NO: 499123 - RNA, 18 nt, Human
ugggauuacaggcgugag

SEQ ID NO: 499124 - RNA, 18 nt, Human
ugggauuacaggcgugag

SEQ ID NO: 499125 - RNA, 21 nt, Human
ugggauuacaggcgugaguua

SEQ ID NO: 499126 - RNA, 22 nt, Human
ugggauuacaggcgugaguuac

SEQ ID NO: 499127 - RNA, 23 nt, Human
ugggauuacaggcgugaguuacg

SEQ ID NO: 499128 - RNA, 24 nt, Human
ugggauuacaggcgugaguuacgg

SEQ ID NO: 499129 - RNA, 25 nt, Human
ugggauuacaggcgugaguuacggc

SEQ ID NO: 499130 - RNA, 23 nt, Human
ugggguccacuauguugaccagg

SEQ ID NO: 499131 - RNA, 23 nt, Human
uggguucaagcgauuuuccugcc

SEQ ID NO: 499132 - RNA, 24 nt, Human
uggguucaagcgauuuuccugccu

SEQ ID NO: 499133 - RNA, 22 nt, Human
uggguucuuauccuccgcaagu

SEQ ID NO: 499134 - RNA, 19 nt, Human
uggucgcaaacccccgacc

SEQ ID NO: 499135 - RNA, 21 nt, Human
ugucacccaggcuggagugca

SEQ ID NO: 499136 - RNA, 23 nt, Human
ugugaaaacccaaagaaagaagc

SEQ ID NO: 499137 - RNA, 21 nt, Human
uuauauccugcaccacacaua

SEQ ID NO: 499138 - RNA, 23 nt, Human
uucaaaaaagaccagagcaaccc

SEQ ID NO: 499139 - RNA, 21 nt, Human
uucaagcgauuuuccugccuc

SEQ ID NO: 499140 - RNA, 23 nt, Human
uucaagcgauuuuccugccucag

SEQ ID NO: 499141 - RNA, 24 nt, Human
uucaagcgauuuuccugccucagc

SEQ ID NO: 499142 - RNA, 18 nt, Human
uuccaaaggaagauucug

SEQ ID NO: 499143 - RNA, 19 nt, Human
uuccaaaggaagauucugg

SEQ ID NO: 499144 - RNA, 25 nt, Human
uuccagccuccucaguuccuaggcu

SEQ ID NO: 499145 - RNA, 23 nt, Human
uuccguuuuuuaacgaaagagaa

SEQ ID NO: 499146 - RNA, 20 nt, Human
uuggaauauuggaauaacaa

SEQ ID NO: 499147 - RNA, 22 nt, Human
uuggcucacugcaaucugugcc

SEQ ID NO: 499148 - RNA, 27 nt, Human
uuuccaaucacaaaaaacagacagcug

SEQ ID NO: 499149 - RNA, 22 nt, Human
uuucugggaagaaugccagagg

SEQ ID NO: 499150 - RNA, 24 nt, Human
uuuguaaguucuguuuccaaucac

SEQ ID NO: 499151 - RNA, 20 nt, Human
uuuuuguauuuuuaguaaag

SEQ ID NO: 499152 - RNA, 21 nt, Human
aaaaaaaaccuucaaaaaucc

SEQ ID NO: 499153 - RNA, 19 nt, Human
aaaaagacagaugcccuga

SEQ ID NO: 499154 - RNA, 19 nt, Human
aaaaagagucuccacccuc

SEQ ID NO: 499155 - RNA, 18 nt, Human
aaacaggauuuucaugua

SEQ ID NO: 499156 - RNA, 26 nt, Human
aaacugacaccacugcuuuugucuca

SEQ ID NO: 499157 - RNA, 20 nt, Human
aaagaacaacuuggaaagau

SEQ ID NO: 499158 - RNA, 18 nt, Human
aaagaacuguaaacgcag

SEQ ID NO: 499159 - RNA, 19 nt, Human
aaagacguacacugcucua

SEQ ID NO: 499160 - RNA, 21 nt, Human
aaagacguacacugcucuauc

SEQ ID NO: 499161 - RNA, 24 nt, Human
aaagcagcaauucuauguucauag

SEQ ID NO: 499162 - RNA, 19 nt, Human
aaaggcaaaaaugucuaca

SEQ ID NO: 499163 - RNA, 19 nt, Human
aaauagauaaguuacaaug

SEQ ID NO: 499164 - RNA, 23 nt, Human
aacaaaaagacagaugcccugaa

SEQ ID NO: 499165 - RNA, 20 nt, Human
aaccuaagaguuucacugag

SEQ ID NO: 499166 - RNA, 18 nt, Human
aacuaucaccagguaaua

SEQ ID NO: 499167 - RNA, 24 nt, Human
aacuguaucccguugaugcacuaa

SEQ ID NO: 499168 - RNA, 26 nt, Human
aacuguaucccguugaugcacuaacu

SEQ ID NO: 499169 - RNA, 23 nt, Human
aagcggcaggcuuugaugcagaa

SEQ ID NO: 499170 - RNA, 21 nt, Human
aagggcucgcgcucaggcagg

SEQ ID NO: 499171 - RNA, 20 nt, Human
aaucauuuacaagccacaaa

SEQ ID NO: 499172 - RNA, 21 nt, Human
aaugagaggacacggacaaaa

SEQ ID NO: 499173 - RNA, 21 nt, Human
acacacacacacacacacaca

SEQ ID NO: 499174 - RNA, 22 nt, Human
acacacacacagcaaaagcuag

SEQ ID NO: 499175 - RNA, 21 nt, Human
acacaucgcuaacaagcaaga

SEQ ID NO: 499176 - RNA, 22 nt, Human
acauacaaaucauuuacaagcc

SEQ ID NO: 499177 - RNA, 26 nt, Human
acaugacaucuucuguggcuguaccu

SEQ ID NO: 499178 - RNA, 25 nt, Human
accacugcuuuugucucauucaagu

SEQ ID NO: 499179 - RNA, 19 nt, Human
accagguaauauacaguac

SEQ ID NO: 499180 - RNA, 19 nt, Human
accuguaaaugagaauuuc

SEQ ID NO: 499181 - RNA, 21 nt, Human
acugcgugcuuggagcuaggc

SEQ ID NO: 499182 - RNA, 20 nt, Human
acuuggaaagaugaggaggu

SEQ ID NO: 499183 - RNA, 23 nt, Human
agacugcgugcuuggagcuaggc

SEQ ID NO: 499184 - RNA, 23 nt, Human
agagguagcggcggcgacagcgg

SEQ ID NO: 499185 - RNA, 19 nt, Human
agcaagcggcaggcuuuga

SEQ ID NO: 499186 - RNA, 20 nt, Human
agcagcucuggguuccagga

SEQ ID NO: 499187 - RNA, 18 nt, Human
aggaggggaauuauuuga

SEQ ID NO: 499188 - RNA, 19 nt, Human
aggcggcggcaacagggag

SEQ ID NO: 499189 - RNA, 20 nt, Human
agguagcggcggcgacagcg

SEQ ID NO: 499190 - RNA, 21 nt, Human
auaacagagauagaagaggaa

SEQ ID NO: 499191 - RNA, 19 nt, Human
aucugaccuguaaaugaga

SEQ ID NO: 499192 - RNA, 18 nt, Human
auucacaaucugcaguua

SEQ ID NO: 499193 - RNA, 20 nt, Human
caaaacaggaagaaaaggug

SEQ ID NO: 499194 - RNA, 19 nt, Human
caaaugagaggacacggac

SEQ ID NO: 499195 - RNA, 21 nt, Human
caacacaaacaugcaauuccc

SEQ ID NO: 499196 - RNA, 18 nt, Human
caacaccucccccaagcc

SEQ ID NO: 499197 - RNA, 19 nt, Human
caacuaucaccagguaaua

SEQ ID NO: 499198 - RNA, 20 nt, Human
cacacacacacacacacaca

SEQ ID NO: 499199 - RNA, 20 nt, Human
cacacacacacacacacaca

SEQ ID NO: 499200 - RNA, 25 nt, Human
cacacacacagcaaaagcuaaauca

SEQ ID NO: 499201 - RNA, 24 nt, Human
cacacggcauguucucucuuugca

SEQ ID NO: 499202 - RNA, 19 nt, Human
cacagcaaaagcuaaauca

SEQ ID NO: 499203 - RNA, 21 nt, Human
cacagcaaaagcuaaaucauc

SEQ ID NO: 499204 - RNA, 21 nt, Human
caccucccccaagccucgcgg

SEQ ID NO: 499205 - RNA, 20 nt, Human
cacggacaaaaaaguaacaa

SEQ ID NO: 499206 - RNA, 19 nt, Human
cacugcucuaucugaccug

SEQ ID NO: 499207 - RNA, 21 nt, Human
cagacacaucgcuaacaagca

SEQ ID NO: 499208 - RNA, 20 nt, Human
caggauuauaaacugacacc

SEQ ID NO: 499209 - RNA, 20 nt, Human
cauagagcaagcggcaggcu

SEQ ID NO: 499210 - RNA, 23 nt, Human
caucaggauuauaaacugacacc

SEQ ID NO: 499211 - RNA, 18 nt, Human
ccauacagacucauuucc

SEQ ID NO: 499212 - RNA, 24 nt, Human
ccgcugugcuaacuaaaggcacac

SEQ ID NO: 499213 - RNA, 20 nt, Human
ccucauggcuccucauggcu

SEQ ID NO: 499214 - RNA, 19 nt, Human
ccugaaucagacacaucgc

SEQ ID NO: 499215 - RNA, 20 nt, Human
cgccagcgccgguggggcuc

SEQ ID NO: 499216 - RNA, 20 nt, Human
cggcauagagcaagcggcag

SEQ ID NO: 499217 - RNA, 18 nt, Human
cucguauuccgcuguccg

SEQ ID NO: 499218 - RNA, 19 nt, Human
cugcaggcucgucugcgcc

SEQ ID NO: 499219 - RNA, 21 nt, Human
gagaauuucaacaccuccccc

SEQ ID NO: 499220 - RNA, 25 nt, Human
gaggcggcggcaacagggagaggua

SEQ ID NO: 499221 - RNA, 19 nt, Human
gaggggaauuauuugaauc

SEQ ID NO: 499222 - RNA, 22 nt, Human
gcaaaacaggaagaaaagguga

SEQ ID NO: 499223 - RNA, 20 nt, Human
gcaaaagauaaacugcccgc

SEQ ID NO: 499224 - RNA, 19 nt, Human
gcaacgcuggaagaaacac

SEQ ID NO: 499225 - RNA, 24 nt, Human
gcacacacacacacacacacacag

SEQ ID NO: 499226 - RNA, 21 nt, Human
gcagggcgcgccgccagcgcc

SEQ ID NO: 499227 - RNA, 18 nt, Human
gccagcgccgguggggcu

SEQ ID NO: 499228 - RNA, 18 nt, Human
gcgcggcgcgugaucucu

SEQ ID NO: 499229 - RNA, 21 nt, Human
gcggcaacagggagagguagc

SEQ ID NO: 499230 - RNA, 21 nt, Human
gcggcgcggcgcgugaucucu

SEQ ID NO: 499231 - RNA, 25 nt, Human
gcggcggcgacagcggcuucccggc

SEQ ID NO: 499232 - RNA, 26 nt, Human
gcggcggcgacagcggcuucccggcg

SEQ ID NO: 499233 - RNA, 20 nt, Human
ggagaagcuggugcucggug

SEQ ID NO: 499234 - RNA, 24 nt, Human
ggaggggaauuauuugaaucgugg

SEQ ID NO: 499235 - RNA, 21 nt, Human
ggccaaagaacuguaaacgca

SEQ ID NO: 499236 - RNA, 24 nt, Human
ggccaaagaacuguaaacgcagua

SEQ ID NO: 499237 - RNA, 19 nt, Human
gguagcggcggcgacagcg

SEQ ID NO: 499238 - RNA, 25 nt, Human
guagcggcggcgacagcggcuuccc

SEQ ID NO: 499239 - RNA, 23 nt, Human
guauaacagagauagaagaggaa

SEQ ID NO: 499240 - RNA, 18 nt, Human
guccgcucgggcuccacc

SEQ ID NO: 499241 - RNA, 19 nt, Human
gugaaaagcaacuaucacc

SEQ ID NO: 499242 - RNA, 20 nt, Human
gugauaaucaaauaaugaaa

SEQ ID NO: 499243 - RNA, 22 nt, Human
guggggcucaggaggcuccucu

SEQ ID NO: 499244 - RNA, 21 nt, Human
guuuaugccuucaaacuccuc

SEQ ID NO: 499245 - RNA, 19 nt, Human
uaaaagcagcaauucuaug

SEQ ID NO: 499246 - RNA, 18 nt, Human
uaaacugcccgcucgaaa

SEQ ID NO: 499247 - RNA, 19 nt, Human
uaaauagauaaguuacaau

SEQ ID NO: 499248 - RNA, 19 nt, Human
uaacuaaaggcacacggca

SEQ ID NO: 499249 - RNA, 18 nt, Human
uacaacacaaacaugcaa

SEQ ID NO: 499250 - RNA, 18 nt, Human
uaccucacacaaacugag

SEQ ID NO: 499251 - RNA, 20 nt, Human
uagcaaaagauaaacugccc

SEQ ID NO: 499252 - RNA, 24 nt, Human
uaguaaaaagagucuccacccucc

SEQ ID NO: 499253 - RNA, 22 nt, Human
uauaaauagauaaguuacaaug

SEQ ID NO: 499254 - RNA, 19 nt, Human
uauaacagagauagaagag

SEQ ID NO: 499255 - RNA, 21 nt, Human
uauacaacacaaacaugcaau

SEQ ID NO: 499256 - RNA, 24 nt, Human
uauacaguacaugacaucuucugu

SEQ ID NO: 499257 - RNA, 18 nt, Human
uauagcaaaagauaaacu

SEQ ID NO: 499258 - RNA, 22 nt, Human
uaugccuucaaacuccucaauu

SEQ ID NO: 499259 - RNA, 20 nt, Human
ucaaaacugaggcuccucau

SEQ ID NO: 499260 - RNA, 22 nt, Human
uccccaaguaacuguuuaugcc

SEQ ID NO: 499261 - RNA, 18 nt, Human
uccgagcuuacagcggca

SEQ ID NO: 499262 - RNA, 19 nt, Human
ucgcggcgcggcgcgugau

SEQ ID NO: 499263 - RNA, 22 nt, Human
ucggagaagcuggugcucggug

SEQ ID NO: 499264 - RNA, 25 nt, Human
ucuaugccccggcguauaacagaga

SEQ ID NO: 499265 - RNA, 24 nt, Human
ucugcaauuugguauaaauguuag

SEQ ID NO: 499266 - RNA, 22 nt, Human
ucugcaguuaaaauauaaaagc

SEQ ID NO: 499267 - RNA, 23 nt, Human
ugaaaaaaguucauacuaaauau

SEQ ID NO: 499268 - RNA, 22 nt, Human
ugagaauuucaacaccuccccc

SEQ ID NO: 499269 - RNA, 24 nt, Human
ugagaggacacggacaaaaaagua

SEQ ID NO: 499270 - RNA, 19 nt, Human
ugaggagauuccauuuggu

SEQ ID NO: 499271 - RNA, 19 nt, Human
ugcagcuuuuguuaacaaa

SEQ ID NO: 499272 - RNA, 23 nt, Human
uggaaagaugaggaggugagggg

SEQ ID NO: 499273 - RNA, 19 nt, Human
uggaagaaacaccucagaa

SEQ ID NO: 499274 - RNA, 22 nt, Human
ugggaagggucagagacugggc

SEQ ID NO: 499275 - RNA, 22 nt, Human
uguuagugugucuaaaacaagg

SEQ ID NO: 499276 - RNA, 22 nt, Human
uuaaccuaagaguuucacugag

SEQ ID NO: 499277 - RNA, 25 nt, Human
uuaacugcuuaaccuaagaguuuca

SEQ ID NO: 499278 - RNA, 19 nt, Human
uuacauaagacauuucucu

SEQ ID NO: 499279 - RNA, 24 nt, Human
uucauagucuugcaaauguuuucc

SEQ ID NO: 499280 - RNA, 19 nt, Human
uuggcuccuagaaacugaa

SEQ ID NO: 499281 - RNA, 20 nt, Human
uuuaugccuucaaacuccuc

SEQ ID NO: 499282 - RNA, 33 nt, Human
uuuggaaggcacacacacacacacacacacagu

SEQ ID NO: 499283 - RNA, 18 nt, Human
uuuucgcaaauccccaag

SEQ ID NO: 499284 - RNA, 23 nt, Human
aaaaaauaaaaacaccgagguac

SEQ ID NO: 499285 - RNA, 24 nt, Human
aaaagaccacagaaaaagcaccau

SEQ ID NO: 499286 - RNA, 18 nt, Human
aaauaaaaacaccgaggu

SEQ ID NO: 499287 - RNA, 27 nt, Human
aagcauguaacaaaauuuugagcauga

SEQ ID NO: 499288 - RNA, 18 nt, Human
acaaaagcauuaagcaca

SEQ ID NO: 499289 - RNA, 26 nt, Human
acaacaccgaacaacaggcaauccac

SEQ ID NO: 499290 - RNA, 20 nt, Human
accacagaaaaagcaccaug

SEQ ID NO: 499291 - RNA, 19 nt, Human
agcuaugagauaggaaaca

SEQ ID NO: 499292 - RNA, 22 nt, Human
cacaacaccgaacaacaggcaa

SEQ ID NO: 499293 - RNA, 19 nt, Human
cagaaaaagcaccaugccu

SEQ ID NO: 499294 - RNA, 22 nt, Human
cagaaaaagcaccaugccuagg

SEQ ID NO: 499295 - RNA, 22 nt, Human
cagggggacagguauguuccag

SEQ ID NO: 499296 - RNA, 24 nt, Human
cagggggacagguauguuccaggc

SEQ ID NO: 499297 - RNA, 20 nt, Human
cagucagcuaaaaauaacaa

SEQ ID NO: 499298 - RNA, 21 nt, Human
ccacagaaaaagcaccaugcc

SEQ ID NO: 499299 - RNA, 20 nt, Human
cuaugagauaggaaacauga

SEQ ID NO: 499300 - RNA, 24 nt, Human
cuuuuugucuaaaauguuuuuaau

SEQ ID NO: 499301 - RNA, 20 nt, Human
gaaacaugaaagucacaugg

SEQ ID NO: 499302 - RNA, 19 nt, Human
gagcauuagcuuuauuucc

SEQ ID NO: 499303 - RNA, 22 nt, Human
gaugcaaaagaccacagaaaaa

SEQ ID NO: 499304 - RNA, 26 nt, Human
gugaaauggaaaaugaaggcauacaa

SEQ ID NO: 499305 - RNA, 23 nt, Human
uaaaaacaccgagguacuuaagu

SEQ ID NO: 499306 - RNA, 20 nt, Human
uaagaaaaaaaaaauaaaaa

SEQ ID NO: 499307 - RNA, 21 nt, Human
uaagaaacacucuaaucuuau

SEQ ID NO: 499308 - RNA, 19 nt, Human
uaauguuaauuuugaccau

SEQ ID NO: 499309 - RNA, 23 nt, Human
uaauuaauacucuuucuuagcac

SEQ ID NO: 499310 - RNA, 21 nt, Human
uagagcauuagcuuuauuucc

SEQ ID NO: 499311 - RNA, 20 nt, Human
uauauggacaugcacauaua

SEQ ID NO: 499312 - RNA, 25 nt, Human
ucacaacaccgaacaacaggcaauc

SEQ ID NO: 499313 - RNA, 20 nt, Human
ucaggaguuuuccuuuucuu

SEQ ID NO: 499314 - RNA, 21 nt, Human
uccauuagcuuugcuacaaug

SEQ ID NO: 499315 - RNA, 22 nt, Human
uccauuagcuuugcuacaauga

SEQ ID NO: 499316 - RNA, 23 nt, Human
ugaauaacaagcauguaacaaaa

SEQ ID NO: 499317 - RNA, 23 nt, Human
ugacaaggaugaaauauuucaaa

SEQ ID NO: 499318 - RNA, 23 nt, Human
ugagauaggaaacaugaaaguca

SEQ ID NO: 499319 - RNA, 20 nt, Human
ugagaugcaaaagaccacag

SEQ ID NO: 499320 - RNA, 21 nt, Human
ugagaugcaaaagaccacaga

SEQ ID NO: 499321 - RNA, 22 nt, Human
ugcauggaggcugaaugugaaa

SEQ ID NO: 499322 - RNA, 23 nt, Human
ugcccuuuaucaaggcugagaca

SEQ ID NO: 499323 - RNA, 21 nt, Human
ugcggucgcagccagcugagu

SEQ ID NO: 499324 - RNA, 18 nt, Human
uguacaaaacuuuauuau

SEQ ID NO: 499325 - RNA, 20 nt, Human
uguacaaugaaacuuuuugu

SEQ ID NO: 499326 - RNA, 18 nt, Human
uuaagcacaauacacaaa

SEQ ID NO: 499327 - RNA, 23 nt, Human
uuacagucagcuaaaaauaacaa

SEQ ID NO: 499328 - RNA, 18 nt, Human
uuuuuuuuuuucaggccu

SEQ ID NO: 499329 - RNA, 23 nt, Human
uuuuuuuuuuuuuuuuuuucagg

SEQ ID NO: 499330 - RNA, 26 nt, Human
aaaguuaaaaaaagauaaaacauauc

SEQ ID NO: 499331 - RNA, 21 nt, Human
aaccgagcaggagaccggccc

SEQ ID NO: 499332 - RNA, 21 nt, Human
aaguccgcccgccgcgccgcc

SEQ ID NO: 499333 - RNA, 21 nt, Human
agaccggcccccgcucccuca

SEQ ID NO: 499334 - RNA, 20 nt, Human
aggaaggaggacgagcggug

SEQ ID NO: 499335 - RNA, 21 nt, Human
agggaaaagaagggaagagaa

SEQ ID NO: 499336 - RNA, 22 nt, Human
agggaaggaaaagggaaaagaa

SEQ ID NO: 499337 - RNA, 21 nt, Human
caccuccgcuaccgccgccau

SEQ ID NO: 499338 - RNA, 23 nt, Human
caggagaccggcccccgcucccu

SEQ ID NO: 499339 - RNA, 24 nt, Human
ccccgcucccucagcugcgccgga

SEQ ID NO: 499340 - RNA, 19 nt, Human
cccgccgcgccgccgccgc

SEQ ID NO: 499341 - RNA, 20 nt, Human
cccgccgcgccgccgccgcg

SEQ ID NO: 499342 - RNA, 18 nt, Human
ccgccgccgccgucgccg

SEQ ID NO: 499343 - RNA, 21 nt, Human
ccgccgcgccgccgccgcgcc

SEQ ID NO: 499344 - RNA, 22 nt, Human
ccgccgcgccgccgccgcgccu

SEQ ID NO: 499345 - RNA, 20 nt, Human
ccgcgccgccgccgcgccug

SEQ ID NO: 499346 - RNA, 18 nt, Human
ccggaggaggcgcccagu

SEQ ID NO: 499347 - RNA, 22 nt, Human
ccuccgcuaccgccgccaucuu

SEQ ID NO: 499348 - RNA, 19 nt, Human
cgccgcgccgccgccgcgc

SEQ ID NO: 499349 - RNA, 21 nt, Human
cggccgcugagucccgcgucc

SEQ ID NO: 499350 - RNA, 21 nt, Human
cugcguugcgcccggcgcugc

SEQ ID NO: 499351 - RNA, 23 nt, Human
gagaaaauccggccgcugagucc

SEQ ID NO: 499352 - RNA, 26 nt, Human
gccgucagccgccgccgccgucgccg

SEQ ID NO: 499353 - RNA, 20 nt, Human
gcggagcgaggaaggaggac

SEQ ID NO: 499354 - RNA, 19 nt, Human
gcguugcgcccggcgcugc

SEQ ID NO: 499355 - RNA, 20 nt, Human
ggaaggaaaagggaaaagaa

SEQ ID NO: 499356 - RNA, 18 nt, Human
gggacgaaguccgcccgc

SEQ ID NO: 499357 - RNA, 22 nt, Human
guccacucacaccuccgcuacc

SEQ ID NO: 499358 - RNA, 22 nt, Human
uccgcuaccgccgccaucuucc

SEQ ID NO: 499359 - RNA, 21 nt, Human
ucgaugccaauuucaaauagg

SEQ ID NO: 499360 - RNA, 19 nt, Human
ugaccccugcguugcgccc

SEQ ID NO: 499361 - RNA, 19 nt, Human
ugcccgcuccggugugggg

SEQ ID NO: 499362 - RNA, 22 nt, Human
ugggggggagcaggaggaggga

SEQ ID NO: 499363 - RNA, 23 nt, Human
uuucaacaacuaaauuuuaguau

SEQ ID NO: 499364 - RNA, 20 nt, Human
aaacaagacacaaagcuaga

SEQ ID NO: 499365 - RNA, 21 nt, Human
aagacccauguaaccuggcga

SEQ ID NO: 499366 - RNA, 20 nt, Human
aagcacaaaaagaguauuua

SEQ ID NO: 499367 - RNA, 22 nt, Human
aagcacaaaaagaguauuuauc

SEQ ID NO: 499368 - RNA, 22 nt, Human
aaggauggauaacaauaacugu

SEQ ID NO: 499369 - RNA, 23 nt, Human
aaggcuugggguuaaagcauuuc

SEQ ID NO: 499370 - RNA, 24 nt, Human
agacacaaagcuagaagggacccc

SEQ ID NO: 499371 - RNA, 20 nt, Human
agagaacaacucauuugaca

SEQ ID NO: 499372 - RNA, 19 nt, Human
agagcaugaugauggaggc

SEQ ID NO: 499373 - RNA, 21 nt, Human
agcaaauaccaagagaacaac

SEQ ID NO: 499374 - RNA, 20 nt, Human
aggaaaaaaaggauggauaa

SEQ ID NO: 499375 - RNA, 21 nt, Human
augaugauggaggcuccauac

SEQ ID NO: 499376 - RNA, 22 nt, Human
auggucugaaacaagacacaaa

SEQ ID NO: 499377 - RNA, 23 nt, Human
auguaaccuggcgaguuauuggg

SEQ ID NO: 499378 - RNA, 23 nt, Human
caacaaggagaacuuccaaguau

SEQ ID NO: 499379 - RNA, 22 nt, Human
caucacaaaagagcaugaugau

SEQ ID NO: 499380 - RNA, 23 nt, Human
caucacaaaagagcaugaugaug

SEQ ID NO: 499381 - RNA, 21 nt, Human
cauuccacauggucugaaaca

SEQ ID NO: 499382 - RNA, 19 nt, Human
cccauauaaaggcuugggg

SEQ ID NO: 499383 - RNA, 19 nt, Human
cccauguaaccuggcgagu

SEQ ID NO: 499384 - RNA, 21 nt, Human
ccccauauaaaggcuuggggu

SEQ ID NO: 499385 - RNA, 19 nt, Human
ccucagaaaagggucuccc

SEQ ID NO: 499386 - RNA, 20 nt, Human
cuaaccaucaacaaccuucc

SEQ ID NO: 499387 - RNA, 21 nt, Human
cuaaccaucaacaaccuuccu

SEQ ID NO: 499388 - RNA, 23 nt, Human
cugagauuaaggugugagccuac

SEQ ID NO: 499389 - RNA, 23 nt, Human
gaaaagggucucccagaaaugcc

SEQ ID NO: 499390 - RNA, 22 nt, Human
gaagucccccauauaaaggcuu

SEQ ID NO: 499391 - RNA, 19 nt, Human
gacacaaagcuagaagucc

SEQ ID NO: 499392 - RNA, 25 nt, Human
gagcaugaugauggaggcuccauac

SEQ ID NO: 499393 - RNA, 22 nt, Human
gaugguagagcaaauaccaaga

SEQ ID NO: 499394 - RNA, 22 nt, Human
ggucacaggaaaauagcaaaua

SEQ ID NO: 499395 - RNA, 21 nt, Human
uagaagucccccauauaaagg

SEQ ID NO: 499396 - RNA, 21 nt, Human
uagaucagaagcacaaaaaga

SEQ ID NO: 499397 - RNA, 23 nt, Human
uaguaauuaaaauucucucucaa

SEQ ID NO: 499398 - RNA, 22 nt, Human
ucagaagcacaaaaagaguauu

SEQ ID NO: 499399 - RNA, 19 nt, Human
ucagaucaaauguaguaca

SEQ ID NO: 499400 - RNA, 19 nt, Human
ucccccauauaaaggcuug

SEQ ID NO: 499401 - RNA, 25 nt, Human
ucuagggagagaugguagagcaaau

SEQ ID NO: 499402 - RNA, 24 nt, Human
ucucccagaaaugccaaauaaaca

SEQ ID NO: 499403 - RNA, 18 nt, Human
ugggccagggcagguuag

SEQ ID NO: 499404 - RNA, 24 nt, Human
uuaaaauucucucucaagacccuu

SEQ ID NO: 499405 - RNA, 19 nt, Human
uuuagcauuuucuagcuau

SEQ ID NO: 499406 - RNA, 23 nt, Human
uuuuucuuuugauuucaagagcu

SEQ ID NO: 499407 - RNA, 19 nt, Human
aaaaauuucuuucucaacu

SEQ ID NO: 499408 - RNA, 25 nt, Human
aaaacaaaaacaaaaacaaaaauaa

SEQ ID NO: 499409 - RNA, 25 nt, Human
aaaacaaaugagcacuaaaaaaccc

SEQ ID NO: 499410 - RNA, 23 nt, Human
aaaagacuagaaggcaccguaac

SEQ ID NO: 499411 - RNA, 20 nt, Human
aaacaaaaacaaaaauaaca

SEQ ID NO: 499412 - RNA, 19 nt, Human
aaacaaaugagcacuaaaa

SEQ ID NO: 499413 - RNA, 19 nt, Human
aaacaagugcaagagccag

SEQ ID NO: 499414 - RNA, 25 nt, Human
aaacacuagcugucaauuuuuuuuc

SEQ ID NO: 499415 - RNA, 25 nt, Human
aaacacuagcugucaauuuuuuuuc

SEQ ID NO: 499416 - RNA, 19 nt, Human
aaaggagagaaaaauaggc

SEQ ID NO: 499417 - RNA, 23 nt, Human
aacaaaaauaacccgggccucac

SEQ ID NO: 499418 - RNA, 18 nt, Human
aacacugugaaaccccuc

SEQ ID NO: 499419 - RNA, 19 nt, Human
aacacugugaaaccccucu

SEQ ID NO: 499420 - RNA, 20 nt, Human
aacacugugaaaccccucuc

SEQ ID NO: 499421 - RNA, 23 nt, Human
aagaagcagggcaggcacagaug

SEQ ID NO: 499422 - RNA, 20 nt, Human
aagcagggcaggcacagaug

SEQ ID NO: 499423 - RNA, 22 nt, Human
aagccgaaaccacauaaucugg

SEQ ID NO: 499424 - RNA, 18 nt, Human
aaucacuugaacccggga

SEQ ID NO: 499425 - RNA, 18 nt, Human
aaugacaaaaaaaaaaaa

SEQ ID NO: 499426 - RNA, 18 nt, Human
aaugacaaaaaaaaaaaa

SEQ ID NO: 499427 - RNA, 23 nt, Human
acagaaagcacucugccuuucuu

SEQ ID NO: 499428 - RNA, 25 nt, Human
acagaagcaacaacaagaagcaggg

SEQ ID NO: 499429 - RNA, 18 nt, Human
acagagugagacccuguc

SEQ ID NO: 499430 - RNA, 21 nt, Human
acagagugagacccuguccca

SEQ ID NO: 499431 - RNA, 23 nt, Human
acagagugagacccugucucaaa

SEQ ID NO: 499432 - RNA, 24 nt, Human
acagagugagacccugucucaaaa

SEQ ID NO: 499433 - RNA, 23 nt, Human
acauacacacauaauacauaaaa

SEQ ID NO: 499434 - RNA, 24 nt, Human
accacccugcccaacacugugaaa

SEQ ID NO: 499435 - RNA, 23 nt, Human
accccucucuacuaaaaauacaa

SEQ ID NO: 499436 - RNA, 18 nt, Human
acccugucccauacauac

SEQ ID NO: 499437 - RNA, 23 nt, Human
accuaagcccaggaggucaaagc

SEQ ID NO: 499438 - RNA, 18 nt, Human
accuguauucccagcacu

SEQ ID NO: 499439 - RNA, 24 nt, Human
acgccacugcacuccagccugggc

SEQ ID NO: 499440 - RNA, 24 nt, Human
acgccacugcacuccagccugggc

SEQ ID NO: 499441 - RNA, 18 nt, Human
acggaacccaggaacacu

SEQ ID NO: 499442 - RNA, 24 nt, Human
acuccagccugggcaacagaguga

SEQ ID NO: 499443 - RNA, 24 nt, Human
acugcacuccagccugggcaacag

SEQ ID NO: 499444 - RNA, 24 nt, Human
acugcacuccagccugggcaacag

SEQ ID NO: 499445 - RNA, 18 nt, Human
agaaagcacucugccuuu

SEQ ID NO: 499446 - RNA, 19 nt, Human
agacuagaaggcaccguaa

SEQ ID NO: 499447 - RNA, 24 nt, Human
agacugaggcaggaggguugcuug

SEQ ID NO: 499448 - RNA, 20 nt, Human
agccaggugugguggcauac

SEQ ID NO: 499449 - RNA, 22 nt, Human
agccugggcaacagagugagac

SEQ ID NO: 499450 - RNA, 24 nt, Human
agccugggcaacauagcaagaccc

SEQ ID NO: 499451 - RNA, 22 nt, Human
agccugggugacagagugagac

SEQ ID NO: 499452 - RNA, 18 nt, Human
aggaaaaaaauuguaaaa

SEQ ID NO: 499453 - RNA, 20 nt, Human
aggaaaaaaauuguaaaaga

SEQ ID NO: 499454 - RNA, 20 nt, Human
aggaaaaaaauuguaaaaga

SEQ ID NO: 499455 - RNA, 23 nt, Human
aggaguucaagaccagccugggc

SEQ ID NO: 499456 - RNA, 18 nt, Human
aggcaggagaaucacuug

SEQ ID NO: 499457 - RNA, 24 nt, Human
aggcaggagaaucacuugaacccg

SEQ ID NO: 499458 - RNA, 23 nt, Human
aggcaggaggguugcuugaggcc

SEQ ID NO: 499459 - RNA, 20 nt, Human
aggccuguucuggcagcagg

SEQ ID NO: 499460 - RNA, 24 nt, Human
aggcuaaggcaggagaaucacuug

SEQ ID NO: 499461 - RNA, 22 nt, Human
agggagcccaucuaucuccaga

SEQ ID NO: 499462 - RNA, 24 nt, Human
aggguugcuugaggccaggaguuc

SEQ ID NO: 499463 - RNA, 26 nt, Human
agguagguggaucacuugaggccaga

SEQ ID NO: 499464 - RNA, 22 nt, Human
aggugcaguggcucccaccugg

SEQ ID NO: 499465 - RNA, 24 nt, Human
aguggcucccaccuggaaucccag

SEQ ID NO: 499466 - RNA, 18 nt, Human
auauuuuguacaaaaaua

SEQ ID NO: 499467 - RNA, 18 nt, Human
auauuuuguacaaaaaua

SEQ ID NO: 499468 - RNA, 24 nt, Human
aucacgccacugcacuccagccug

SEQ ID NO: 499469 - RNA, 18 nt, Human
augaaaaucagcauauca

SEQ ID NO: 499470 - RNA, 21 nt, Human
augacaaaaaaaaaaaaagga

SEQ ID NO: 499471 - RNA, 18 nt, Human
caaaaauaacaugggugg

SEQ ID NO: 499472 - RNA, 23 nt, Human
caaaacaaaaacaaaaacaaaaa

SEQ ID NO: 499473 - RNA, 21 nt, Human
caaaugagcacuaaaaaaccc

SEQ ID NO: 499474 - RNA, 19 nt, Human
caacaacaagaagcagggc

SEQ ID NO: 499475 - RNA, 26 nt, Human
caacaacaagaagcagggcaggcaca

SEQ ID NO: 499476 - RNA, 22 nt, Human
caacaagaagcagggcaggcac

SEQ ID NO: 499477 - RNA, 22 nt, Human
caacagagugagacccugucuc

SEQ ID NO: 499478 - RNA, 19 nt, Human
caacauagcaagacccugu

SEQ ID NO: 499479 - RNA, 24 nt, Human
caacauagcaagacccuguuucua

SEQ ID NO: 499480 - RNA, 22 nt, Human
cacaaugaaaaucagcauauca

SEQ ID NO: 499481 - RNA, 22 nt, Human
cacaaugaaaaucagcauauca

SEQ ID NO: 499482 - RNA, 24 nt, Human
cacaccuguauucccagcacuuug

SEQ ID NO: 499483 - RNA, 24 nt, Human
caccgcacgcccaugguagccgcg

SEQ ID NO: 499484 - RNA, 19 nt, Human
caccuguauucccagcacu

SEQ ID NO: 499485 - RNA, 24 nt, Human
caccuguauucccagcacuuuggg

SEQ ID NO: 499486 - RNA, 22 nt, Human
cacggaucaacaaaaauaaccc

SEQ ID NO: 499487 - RNA, 20 nt, Human
cacuaaaaaacccaauggcg

SEQ ID NO: 499488 - RNA, 22 nt, Human
cacuccagccugggcaacagag

SEQ ID NO: 499489 - RNA, 24 nt, Human
cacuccagccugggcaacagagug

SEQ ID NO: 499490 - RNA, 18 nt, Human
cacugcacuccagccugg

SEQ ID NO: 499491 - RNA, 19 nt, Human
cacugcacuccagccuggg

SEQ ID NO: 499492 - RNA, 21 nt, Human
cacugcacuccagccugggca

SEQ ID NO: 499493 - RNA, 23 nt, Human
cacugcacuccagccugggcaac

SEQ ID NO: 499494 - RNA, 24 nt, Human
cacugcacuccagccugggcaaca

SEQ ID NO: 499495 - RNA, 22 nt, Human
cacuugaggccagaaguuugaa

SEQ ID NO: 499496 - RNA, 18 nt, Human
cagaggccaaaacugugg

SEQ ID NO: 499497 - RNA, 19 nt, Human
cagaggccaaaacuguggu

SEQ ID NO: 499498 - RNA, 18 nt, Human
cagagugagacccugucc

SEQ ID NO: 499499 - RNA, 24 nt, Human
cagcacuuugcaagacugaggcag

SEQ ID NO: 499500 - RNA, 23 nt, Human
cagcacuuugggaaacuagguag

SEQ ID NO: 499501 - RNA, 20 nt, Human
cagccugggugacagaguga

SEQ ID NO: 499502 - RNA, 25 nt, Human
cauagcaagacccuguuucuacaaa

SEQ ID NO: 499503 - RNA, 18 nt, Human
caugacccaaaguggacu

SEQ ID NO: 499504 - RNA, 23 nt, Human
caugacccaaaguggacugcaga

SEQ ID NO: 499505 - RNA, 22 nt, Human
cauuccagccugggugacagag

SEQ ID NO: 499506 - RNA, 24 nt, Human
cauuccagccugggugacagagug

SEQ ID NO: 499507 - RNA, 22 nt, Human
ccaacacugugaaaccccucuc

SEQ ID NO: 499508 - RNA, 20 nt, Human
ccacugcacuccagccuggg

SEQ ID NO: 499509 - RNA, 20 nt, Human
ccacugcacuccagccuggg

SEQ ID NO: 499510 - RNA, 21 nt, Human
ccacugcacuccagccugggc

SEQ ID NO: 499511 - RNA, 22 nt, Human
ccacugcacuccagccugggca

SEQ ID NO: 499512 - RNA, 23 nt, Human
ccacugcacuccagccugggcaa

SEQ ID NO: 499513 - RNA, 24 nt, Human
ccacugcacuccagccugggcaac

SEQ ID NO: 499514 - RNA, 19 nt, Human
ccagagugaggauguaaaa

SEQ ID NO: 499515 - RNA, 23 nt, Human
ccagcaccaaaaaugggcucacg

SEQ ID NO: 499516 - RNA, 18 nt, Human
ccaggaggucaaagcugc

SEQ ID NO: 499517 - RNA, 18 nt, Human
ccaguuauccggcugucc

SEQ ID NO: 499518 - RNA, 22 nt, Human
cccaaaguggacugcagagcac

SEQ ID NO: 499519 - RNA, 24 nt, Human
cccaccuggaaucccagcacuuug

SEQ ID NO: 499520 - RNA, 19 nt, Human
cccagcaccaaaaaugggc

SEQ ID NO: 499521 - RNA, 25 nt, Human
cccauacauacacacauaauacaua

SEQ ID NO: 499522 - RNA, 24 nt, Human
cccauggccaugaccccaguuauc

SEQ ID NO: 499523 - RNA, 20 nt, Human
ccccuguggucccagcuacg

SEQ ID NO: 499524 - RNA, 21 nt, Human
cccgggauguggggguugcag

SEQ ID NO: 499525 - RNA, 20 nt, Human
cccugucucaaaacaaaaac

SEQ ID NO: 499526 - RNA, 19 nt, Human
cccuguggucccagcuacg

SEQ ID NO: 499527 - RNA, 19 nt, Human
ccgcgcgccggccgucugc

SEQ ID NO: 499528 - RNA, 20 nt, Human
ccgcgcuccccgcgcucccc

SEQ ID NO: 499529 - RNA, 22 nt, Human
ccugggcaacauagcaagaccc

SEQ ID NO: 499530 - RNA, 20 nt, Human
ccugggugacagagugagac

SEQ ID NO: 499531 - RNA, 19 nt, Human
ccuguucuggcagcagggc

SEQ ID NO: 499532 - RNA, 19 nt, Human
cgaccaaugauaaccuuuu

SEQ ID NO: 499533 - RNA, 24 nt, Human
cgagaucacgccacugcacuccag

SEQ ID NO: 499534 - RNA, 25 nt, Human
cgagcggcugcucaccgcacgccca

SEQ ID NO: 499535 - RNA, 19 nt, Human
cgccgccgccggcccgcgc

SEQ ID NO: 499536 - RNA, 20 nt, Human
cgccggcccgcgcuccccgc

SEQ ID NO: 499537 - RNA, 19 nt, Human
cgcucagggcggccagcag

SEQ ID NO: 499538 - RNA, 24 nt, Human
cgcuuguauucccagcuaccuggg

SEQ ID NO: 499539 - RNA, 23 nt, Human
cggcuguccagcuuuccaauuuu

SEQ ID NO: 499540 - RNA, 24 nt, Human
cgggauguggggguugcagugagc

SEQ ID NO: 499541 - RNA, 22 nt, Human
cgguaaaaugacaaaaaaaaaa

SEQ ID NO: 499542 - RNA, 22 nt, Human
cgguaaaaugacaaaaaaaaaa

SEQ ID NO: 499543 - RNA, 21 nt, Human
cguaacaucuaacaccuuucu

SEQ ID NO: 499544 - RNA, 20 nt, Human
cgucauuccagccuggguga

SEQ ID NO: 499545 - RNA, 21 nt, Human
cgucauuccagccugggugac

SEQ ID NO: 499546 - RNA, 23 nt, Human
cgucauuccagccugggugacag

SEQ ID NO: 499547 - RNA, 23 nt, Human
cuagcugucaauuuuuuuucagu

SEQ ID NO: 499548 - RNA, 23 nt, Human
cuagcugucaauuuuuuuucagu

SEQ ID NO: 499549 - RNA, 26 nt, Human
cuagguagguggaucacuugaggcca

SEQ ID NO: 499550 - RNA, 21 nt, Human
cucaaaacaaaaacaaaaaca

SEQ ID NO: 499551 - RNA, 27 nt, Human
cugaaaaauaguagcauuugucuguga

SEQ ID NO: 499552 - RNA, 18 nt, Human
cuggcagcagggcuccug

SEQ ID NO: 499553 - RNA, 18 nt, Human
cuggcuccuauaaauaaa

SEQ ID NO: 499554 - RNA, 22 nt, Human
cugucucaaaacaaaaacaaaa

SEQ ID NO: 499555 - RNA, 20 nt, Human
cuucccauaacucaacgacc

SEQ ID NO: 499556 - RNA, 20 nt, Human
cuucccauaacucaacgacc

SEQ ID NO: 499557 - RNA, 24 nt, Human
cuucgucauuccagccugggugac

SEQ ID NO: 499558 - RNA, 19 nt, Human
gaaaucguuccacugcccu

SEQ ID NO: 499559 - RNA, 31 nt, Human
gaagucgucccgagcggcugcucaccgcacu

SEQ ID NO: 499560 - RNA, 21 nt, Human
gacagaaaugacagaagcaac

SEQ ID NO: 499561 - RNA, 21 nt, Human
gagaacccagcaccaaaaaug

SEQ ID NO: 499562 - RNA, 19 nt, Human
gagcacuaaaaaacccaau

SEQ ID NO: 499563 - RNA, 23 nt, Human
gagccaggugcaguggcucccac

SEQ ID NO: 499564 - RNA, 21 nt, Human
gagcgcucagggcggccagca

SEQ ID NO: 499565 - RNA, 24 nt, Human
gagcggcugcucaccgcacgccca

SEQ ID NO: 499566 - RNA, 24 nt, Human
gaucaccuaagcccaggaggucaa

SEQ ID NO: 499567 - RNA, 24 nt, Human
gaucacuugaggccagaaguuuga

SEQ ID NO: 499568 - RNA, 23 nt, Human
gcacuccagccugggcaacagag

SEQ ID NO: 499569 - RNA, 24 nt, Human
gcacuccagccugggcaacagagu

SEQ ID NO: 499570 - RNA, 22 nt, Human
gcagcaagcaugacccaaagug

SEQ ID NO: 499571 - RNA, 23 nt, Human
gcaggagaaucacuugaacccgg

SEQ ID NO: 499572 - RNA, 22 nt, Human
gccacugcacuccagccugggc

SEQ ID NO: 499573 - RNA, 24 nt, Human
gccacugcacuccagccugggcaa

SEQ ID NO: 499574 - RNA, 22 nt, Human
gccaugaccccaguuauccggc

SEQ ID NO: 499575 - RNA, 19 nt, Human
gcccaacacugugaaaccc

SEQ ID NO: 499576 - RNA, 22 nt, Human
gcccauggccaugaccccagga

SEQ ID NO: 499577 - RNA, 20 nt, Human
gccgagaucacgccacugca

SEQ ID NO: 499578 - RNA, 22 nt, Human
gccgccggcccgcgcuccccgc

SEQ ID NO: 499579 - RNA, 22 nt, Human
ggaaaacauugauuaaaagauc

SEQ ID NO: 499580 - RNA, 22 nt, Human
ggaggccuguucuggcagcagg

SEQ ID NO: 499581 - RNA, 18 nt, Human
ggauggaucuuggacugg

SEQ ID NO: 499582 - RNA, 21 nt, Human
ggcacuguuuacacaguauau

SEQ ID NO: 499583 - RNA, 21 nt, Human
ggcacuguuuacacaguauau

SEQ ID NO: 499584 - RNA, 21 nt, Human
gggaaacuagguagguggauc

SEQ ID NO: 499585 - RNA, 18 nt, Human
ggggacaaaacguggugg

SEQ ID NO: 499586 - RNA, 20 nt, Human
ggggguugcagugagccgag

SEQ ID NO: 499587 - RNA, 19 nt, Human
gggguugcagugagccgag

SEQ ID NO: 499588 - RNA, 21 nt, Human
gggguugcagugagccgagau

SEQ ID NO: 499589 - RNA, 22 nt, Human
gggguugcagugagccgagauc

SEQ ID NO: 499590 - RNA, 23 nt, Human
gggguugcagugagccgagauca

SEQ ID NO: 499591 - RNA, 23 nt, Human
ggguugcuugaggccaggaguuc

SEQ ID NO: 499592 - RNA, 19 nt, Human
ggugaugcaauuagaaagg

SEQ ID NO: 499593 - RNA, 20 nt, Human
gguugcagugagccgagauc

SEQ ID NO: 499594 - RNA, 24 nt, Human
gguugcuugaggccaggaguucaa

SEQ ID NO: 499595 - RNA, 27 nt, Human
guauggaggccuguucuucgucguguc

SEQ ID NO: 499596 - RNA, 25 nt, Human
guggcauaccccuguggucccagcu

SEQ ID NO: 499597 - RNA, 23 nt, Human
gugguucacaccuguauucccag

SEQ ID NO: 499598 - RNA, 19 nt, Human
guugcagugagccgagauc

SEQ ID NO: 499599 - RNA, 24 nt, Human
guuuaugaaaacaagaugugaaga

SEQ ID NO: 499600 - RNA, 19 nt, Human
guuugaaaccacccugccc

SEQ ID NO: 499601 - RNA, 18 nt, Human
uaaaagacaaauauuuug

SEQ ID NO: 499602 - RNA, 18 nt, Human
uaaaagacaaauauuuug

SEQ ID NO: 499603 - RNA, 19 nt, Human
uaaaagacaaauauuuugu

SEQ ID NO: 499604 - RNA, 18 nt, Human
uaaaaugacaaaaaaaaa

SEQ ID NO: 499605 - RNA, 18 nt, Human
uaaaaugacaaaaaaaaa

SEQ ID NO: 499606 - RNA, 19 nt, Human
uaacucaacgaccaaugau

SEQ ID NO: 499607 - RNA, 19 nt, Human
uaacucaacgaccaaugau

SEQ ID NO: 499608 - RNA, 20 nt, Human
uaaggcaggagaaucacuug

SEQ ID NO: 499609 - RNA, 24 nt, Human
uaaggcaggagaaucacuugaacc

SEQ ID NO: 499610 - RNA, 22 nt, Human
uacauacacacauaauacauaa

SEQ ID NO: 499611 - RNA, 25 nt, Human
uagaaggcaccguaacaucuaacac

SEQ ID NO: 499612 - RNA, 24 nt, Human
uagaauagcgguugggucaaagga

SEQ ID NO: 499613 - RNA, 20 nt, Human
uagcauuugucugugaaguu

SEQ ID NO: 499614 - RNA, 22 nt, Human
uagccaggugugguggcauacc

SEQ ID NO: 499615 - RNA, 24 nt, Human
uagguggaucacuugaggccagaa

SEQ ID NO: 499616 - RNA, 21 nt, Human
uaugaaaacaagaugugaaga

SEQ ID NO: 499617 - RNA, 21 nt, Human
uaugugauucaguccaugugc

SEQ ID NO: 499618 - RNA, 21 nt, Human
uaugugauucaguccaugugc

SEQ ID NO: 499619 - RNA, 24 nt, Human
ucaaaagacuagaaggcaccguaa

SEQ ID NO: 499620 - RNA, 23 nt, Human
ucacaccuguauucccagcacuu

SEQ ID NO: 499621 - RNA, 23 nt, Human
ucacgccacugcacuccagccug

SEQ ID NO: 499622 - RNA, 18 nt, Human
uccacauguugauggagc

SEQ ID NO: 499623 - RNA, 23 nt, Human
uccagccugggcaacagagugag

SEQ ID NO: 499624 - RNA, 24 nt, Human
uccagccugggcaacagagugaga

SEQ ID NO: 499625 - RNA, 19 nt, Human
uccagccugggugacagag

SEQ ID NO: 499626 - RNA, 23 nt, Human
uccagccugggugacagagugag

SEQ ID NO: 499627 - RNA, 24 nt, Human
uccagccugggugacagagugaga

SEQ ID NO: 499628 - RNA, 23 nt, Human
uccagcuuuccaauuuuuguagu

SEQ ID NO: 499629 - RNA, 23 nt, Human
uccauugcuguuccucucuagug

SEQ ID NO: 499630 - RNA, 22 nt, Human
ucccucgccgccgccggcccgc

SEQ ID NO: 499631 - RNA, 23 nt, Human
uccucccucgccgccgccggcua

SEQ ID NO: 499632 - RNA, 20 nt, Human
ucgccgccgccggcccgcgc

SEQ ID NO: 499633 - RNA, 19 nt, Human
ucgucauuccagccugggu

SEQ ID NO: 499634 - RNA, 21 nt, Human
ucucccugucuuuuucgcaaa

SEQ ID NO: 499635 - RNA, 21 nt, Human
ucucuacuaaaaauacaaaaa

SEQ ID NO: 499636 - RNA, 19 nt, Human
ugaaaaucagcauaucacc

SEQ ID NO: 499637 - RNA, 19 nt, Human
ugaaaaucagcauaucacc

SEQ ID NO: 499638 - RNA, 22 nt, Human
ugacaaaaaaaaaaaaaggaaa

SEQ ID NO: 499639 - RNA, 20 nt, Human
ugacagaaaugacagaagca

SEQ ID NO: 499640 - RNA, 19 nt, Human
ugacagaagcaacaacaag

SEQ ID NO: 499641 - RNA, 20 nt, Human
ugacccaaaguggacugcag

SEQ ID NO: 499642 - RNA, 21 nt, Human
ugagaacccagcaccaaaaau

SEQ ID NO: 499643 - RNA, 22 nt, Human
ugagccgagaucacgccacugc

SEQ ID NO: 499644 - RNA, 23 nt, Human
ugagcgucccugcacgaggccca

SEQ ID NO: 499645 - RNA, 19 nt, Human
ugaggcaggaggguugcuu

SEQ ID NO: 499646 - RNA, 21 nt, Human
ugaggcaggaggguugcuuga

SEQ ID NO: 499647 - RNA, 24 nt, Human
ugaggcaggaggguugcuugaggc

SEQ ID NO: 499648 - RNA, 25 nt, Human
ugaggcaggaggguugcuugaggcc

SEQ ID NO: 499649 - RNA, 19 nt, Human
ugauggagcuaaccgaggg

SEQ ID NO: 499650 - RNA, 19 nt, Human
ugcccagcauaaaucaacc

SEQ ID NO: 499651 - RNA, 22 nt, Human
uggacugcagagcacaagccga

SEQ ID NO: 499652 - RNA, 23 nt, Human
uggaggccuguucuggcagcagg

SEQ ID NO: 499653 - RNA, 23 nt, Human
uggaucacuugaggccagaaguu

SEQ ID NO: 499654 - RNA, 24 nt, Human
uggaucacuugaggccagaaguuu

SEQ ID NO: 499655 - RNA, 27 nt, Human
uggaucacuugaggccagaaguuugaa

SEQ ID NO: 499656 - RNA, 24 nt, Human
uggcguuuagagagagacacaugc

SEQ ID NO: 499657 - RNA, 24 nt, Human
ugggaggcuaaggcaggagaauca

SEQ ID NO: 499658 - RNA, 20 nt, Human
ugggauuuuagaaauguaug

SEQ ID NO: 499659 - RNA, 20 nt, Human
ugggauuuuagaaauguaug

SEQ ID NO: 499660 - RNA, 21 nt, Human
ugggcaacagagugagacccu

SEQ ID NO: 499661 - RNA, 24 nt, Human
ugggcaacagagugagacccuguc

SEQ ID NO: 499662 - RNA, 22 nt, Human
uggggccacacacuggggguug

SEQ ID NO: 499663 - RNA, 22 nt, Human
uggguagaauuaaaucugacag

SEQ ID NO: 499664 - RNA, 22 nt, Human
uggguagaauuaaaucugacag

SEQ ID NO: 499665 - RNA, 20 nt, Human
ugggucaaaggagagaaaaa

SEQ ID NO: 499666 - RNA, 21 nt, Human
ugggugacagagugagacccu

SEQ ID NO: 499667 - RNA, 20 nt, Human
uggguggggccacacacugg

SEQ ID NO: 499668 - RNA, 23 nt, Human
uggguggggccacacacuggggg

SEQ ID NO: 499669 - RNA, 23 nt, Human
uggugguucacaccuguauuccc

SEQ ID NO: 499670 - RNA, 22 nt, Human
ugguucacaccuguauucccag

SEQ ID NO: 499671 - RNA, 24 nt, Human
ugguucacaccuguauucccagca

SEQ ID NO: 499672 - RNA, 19 nt, Human
ugucccauacauacacaca

SEQ ID NO: 499673 - RNA, 25 nt, Human
ugucucaaaacaaaaacaaaaacaa

SEQ ID NO: 499674 - RNA, 22 nt, Human
ugucuucugagggcuggcuccu

SEQ ID NO: 499675 - RNA, 19 nt, Human
ugugaagacuugucuucac

SEQ ID NO: 499676 - RNA, 22 nt, Human
uuaaaagaucacagaaagcacu

SEQ ID NO: 499677 - RNA, 23 nt, Human
uuagccaggugugguggcauacc

SEQ ID NO: 499678 - RNA, 19 nt, Human
uucccauaacucaacgacc

SEQ ID NO: 499679 - RNA, 19 nt, Human
uucccauaacucaacgacc

SEQ ID NO: 499680 - RNA, 19 nt, Human
uugagagcugaaaauuugc

SEQ ID NO: 499681 - RNA, 19 nt, Human
uugagagcugaaaauuugc

SEQ ID NO: 499682 - RNA, 22 nt, Human
uugaggccaggaguucaagacc

SEQ ID NO: 499683 - RNA, 18 nt, Human
uugcagugagccgagauc

SEQ ID NO: 499684 - RNA, 20 nt, Human
uugcagugagccgagaucac

SEQ ID NO: 499685 - RNA, 21 nt, Human
uugcagugagccgagaucacg

SEQ ID NO: 499686 - RNA, 23 nt, Human
uugcuugaggccaggaguucaag

SEQ ID NO: 499687 - RNA, 18 nt, Human
uugggucaaaggagagaa

SEQ ID NO: 499688 - RNA, 18 nt, Human
uuuauuaguaccauuauu

SEQ ID NO: 499689 - RNA, 20 nt, Human
uuuguacaaaaauacaaagu

SEQ ID NO: 499690 - RNA, 20 nt, Human
uuuguacaaaaauacaaagu

SEQ ID NO: 499691 - RNA, 22 nt, Human
aggaagaaaauaguaauuggga

SEQ ID NO: 499692 - RNA, 19 nt, Human
cugccugaagagcugggaa

SEQ ID NO: 499693 - RNA, 19 nt, Human
gcacugccugaagagcugg

SEQ ID NO: 499694 - RNA, 22 nt, Human
ugagcaugugggcauagcuggg

SEQ ID NO: 499695 - RNA, 21 nt, Human
aaaaaaucuaaaguuaacaaa

SEQ ID NO: 499696 - RNA, 19 nt, Human
aagaugaaucuugaacuca

SEQ ID NO: 499697 - RNA, 26 nt, Human
aaguguaucauguaucuucauagcuu

SEQ ID NO: 499698 - RNA, 21 nt, Human
acaaaaugagaacuguuucaa

SEQ ID NO: 499699 - RNA, 19 nt, Human
acaggauucugaagaugaa

SEQ ID NO: 499700 - RNA, 22 nt, Human
acugugccuggggacaaucuuu

SEQ ID NO: 499701 - RNA, 25 nt, Human
agccaagcgauaaauauaagcaacc

SEQ ID NO: 499702 - RNA, 23 nt, Human
agccauccaauaaauugaaaaua

SEQ ID NO: 499703 - RNA, 18 nt, Human
aggagguggggggugaaa

SEQ ID NO: 499704 - RNA, 21 nt, Human
aggagguggggggugaaaaga

SEQ ID NO: 499705 - RNA, 23 nt, Human
aggauaguuguacaaaguguauc

SEQ ID NO: 499706 - RNA, 19 nt, Human
aguuucuccuucuaaaagg

SEQ ID NO: 499707 - RNA, 18 nt, Human
caaacacuauucuacaug

SEQ ID NO: 499708 - RNA, 19 nt, Human
caaccaaugguacauauaa

SEQ ID NO: 499709 - RNA, 19 nt, Human
cacacuauuggaaaaaauc

SEQ ID NO: 499710 - RNA, 21 nt, Human
cagaguaaaugaacuaagggc

SEQ ID NO: 499711 - RNA, 23 nt, Human
cauggcaagcccuccacugccag

SEQ ID NO: 499712 - RNA, 24 nt, Human
ccaagcgauaaauauaagcaacca

SEQ ID NO: 499713 - RNA, 19 nt, Human
ccccagugauucagauacu

SEQ ID NO: 499714 - RNA, 22 nt, Human
cgacagcacaaguuaauauguc

SEQ ID NO: 499715 - RNA, 20 nt, Human
cgccgcugcaccguccggac

SEQ ID NO: 499716 - RNA, 22 nt, Human
gagguggggggugaaaagagag

SEQ ID NO: 499717 - RNA, 18 nt, Human
gugauucagauacugugc

SEQ ID NO: 499718 - RNA, 22 nt, Human
guggggggugaaaagagagcau

SEQ ID NO: 499719 - RNA, 22 nt, Human
uaaguuacaacaaacaacuuca

SEQ ID NO: 499720 - RNA, 22 nt, Human
uacugacaggcuccauccagau

SEQ ID NO: 499721 - RNA, 21 nt, Human
ucaguuaaauauuuauugaac

SEQ ID NO: 499722 - RNA, 22 nt, Human
ucauaauccccagugauucaga

SEQ ID NO: 499723 - RNA, 19 nt, Human
uccaaagggcagaacuuga

SEQ ID NO: 499724 - RNA, 22 nt, Human
uccaaagggcagaacuugagcc

SEQ ID NO: 499725 - RNA, 23 nt, Human
uccaaagggcagaacuugagccc

SEQ ID NO: 499726 - RNA, 24 nt, Human
ugacaaacacuauucuacaugaaa

SEQ ID NO: 499727 - RNA, 19 nt, Human
ugagucacuagaaaacuaa

SEQ ID NO: 499728 - RNA, 26 nt, Human
uggaaaaaaucuaaaguuaacaaacu

SEQ ID NO: 499729 - RNA, 20 nt, Human
uggacaaaauguauauagua

SEQ ID NO: 499730 - RNA, 19 nt, Human
uggcaagcccuccacugcc

SEQ ID NO: 499731 - RNA, 18 nt, Human
uggucuauuuguuccuca

SEQ ID NO: 499732 - RNA, 23 nt, Human
uguucuccaaagagggugaauca

SEQ ID NO: 499733 - RNA, 23 nt, Human
uuacaacaaacaacuucaaauau

SEQ ID NO: 499734 - RNA, 21 nt, Human
uucuacaugaaacaggaaauc

SEQ ID NO: 499735 - RNA, 20 nt, Human
uuggaaaaaaucuaaaguua

SEQ ID NO: 499736 - RNA, 24 nt, Human
uuuaucacauaguaaggaaugcug

SEQ ID NO: 499737 - RNA, 21 nt, Human
uuuuuuuuuuuuuuuuuucag

SEQ ID NO: 499738 - RNA, 22 nt, Human
agauguuggaguccaguaagcc

SEQ ID NO: 499739 - RNA, 22 nt, Human
cacaagauuuaaggaugccaga

SEQ ID NO: 499740 - RNA, 24 nt, Human
cagauucuauauaagcaugaaaga

SEQ ID NO: 499741 - RNA, 19 nt, Human
cccauaccuaaauuaacug

SEQ ID NO: 499742 - RNA, 21 nt, Human
cuaccaggcuccgaggggcag

SEQ ID NO: 499743 - RNA, 20 nt, Human
gggcuuguggcccacuacca

SEQ ID NO: 499744 - RNA, 27 nt, Human
uaaauuaacuguaaagcuucaaggacc

SEQ ID NO: 499745 - RNA, 22 nt, Human
uaagacaaaagacaaacuauaa

SEQ ID NO: 499746 - RNA, 19 nt, Human
ugaggacagcauucagaac

SEQ ID NO: 499747 - RNA, 23 nt, Human
ugaggacagcauucagaacuguu

SEQ ID NO: 499748 - RNA, 19 nt, Human
uggcccacuaccaggcucc

SEQ ID NO: 499749 - RNA, 24 nt, Human
uggcugaaaaguauucagcaugaa

SEQ ID NO: 499750 - RNA, 24 nt, Human
uggcugaaaaguauucagcauuau

SEQ ID NO: 499751 - RNA, 27 nt, Human
uucagaacuguuaagacaaaagacaaa

SEQ ID NO: 499752 - RNA, 22 nt, Human
aaaaagcuuucaaaacaucuga

SEQ ID NO: 499753 - RNA, 20 nt, Human
aaaacaucugaguuagcuua

SEQ ID NO: 499754 - RNA, 18 nt, Human
acccugaaauauauggga

SEQ ID NO: 499755 - RNA, 19 nt, Human
acccugaaauauaugggaa

SEQ ID NO: 499756 - RNA, 22 nt, Human
auaaugucuucuuuaaacggaa

SEQ ID NO: 499757 - RNA, 21 nt, Human
caccucuguuuaaagaaaaag

SEQ ID NO: 499758 - RNA, 18 nt, Human
gagaggcaugaagcacuu

SEQ ID NO: 499759 - RNA, 24 nt, Human
uaaaugcuuguacuuccugcucua

SEQ ID NO: 499760 - RNA, 19 nt, Human
uaaguuuuacaugacuaca

SEQ ID NO: 499761 - RNA, 18 nt, Human
uagaauaaccacauuugg

SEQ ID NO: 499762 - RNA, 19 nt, Human
uuuuuggcucauuucucca

SEQ ID NO: 499763 - RNA, 20 nt, Human
uuuuuuuuuggcucauuucu

SEQ ID NO: 499764 - RNA, 18 nt, Human
uuuuuuuuuuuuuuuuug

SEQ ID NO: 499765 - RNA, 21 nt, Human
uuuuuuuuuuuuuuuuuggcu

SEQ ID NO: 499766 - RNA, 22 nt, Human
uuuuuuuuuuuuuuuuuuuggc

SEQ ID NO: 499767 - RNA, 21 nt, Human
cagagcaccuuauacuucuaa

SEQ ID NO: 499768 - RNA, 21 nt, Human
ccuccgcaccacgggaacaaa

SEQ ID NO: 499769 - RNA, 23 nt, Human
cuacaaccaagacgcaacuuuac

SEQ ID NO: 499770 - RNA, 18 nt, Human
guaaaguacuucucagag

SEQ ID NO: 499771 - RNA, 19 nt, Human
uaaaguacuucucagagac

SEQ ID NO: 499772 - RNA, 22 nt, Human
ucagauuuuggguaacugguuu

SEQ ID NO: 499773 - RNA, 22 nt, Human
uccgggugugggccuugacccu

SEQ ID NO: 499774 - RNA, 24 nt, Human
uuaggacacuucagagcaccuuau

SEQ ID NO: 499775 - RNA, 25 nt, Human
uuccgggugugggccuugacccucc

SEQ ID NO: 499776 - RNA, 23 nt, Human
uuuaaaguguuacuugaauauuu

SEQ ID NO: 499777 - RNA, 22 nt, Human
aaaacagaaaguaccaacaaaa

SEQ ID NO: 499778 - RNA, 28 nt, Human
aaacagaaaguaccaacaaaagggaccc

SEQ ID NO: 499779 - RNA, 21 nt, Human
aaggaaacaagggagagagca

SEQ ID NO: 499780 - RNA, 19 nt, Human
aaucuauauacccuucccu

SEQ ID NO: 499781 - RNA, 21 nt, Human
aaucuauauacccuucccuuc

SEQ ID NO: 499782 - RNA, 19 nt, Human
accccacauccccagggag

SEQ ID NO: 499783 - RNA, 22 nt, Human
agacuggcucccagaauucuca

SEQ ID NO: 499784 - RNA, 19 nt, Human
agagaggaaaagaaaugac

SEQ ID NO: 499785 - RNA, 22 nt, Human
agagcuggaagcuucgaccucc

SEQ ID NO: 499786 - RNA, 24 nt, Human
agaggcaggcaggcagcugggacc

SEQ ID NO: 499787 - RNA, 19 nt, Human
agcuggaagcuucgaccuc

SEQ ID NO: 499788 - RNA, 22 nt, Human
aggaaaagaaaugacuguagug

SEQ ID NO: 499789 - RNA, 26 nt, Human
aggcaggcagcugggaccccacaucc

SEQ ID NO: 499790 - RNA, 18 nt, Human
aggcaggcaggcagcugg

SEQ ID NO: 499791 - RNA, 22 nt, Human
aggcaggcaggcagcugggacc

SEQ ID NO: 499792 - RNA, 20 nt, Human
aggggaggugaagggucaug

SEQ ID NO: 499793 - RNA, 28 nt, Human
augaagucacaaaaaacagaaaguacca

SEQ ID NO: 499794 - RNA, 24 nt, Human
auggcagcggggagcaauggaaca

SEQ ID NO: 499795 - RNA, 24 nt, Human
caaugacauguaaugaacagggac

SEQ ID NO: 499796 - RNA, 24 nt, Human
cacaaaaaacagaaaguaccaaca

SEQ ID NO: 499797 - RNA, 18 nt, Human
caccaaacucacaaaagg

SEQ ID NO: 499798 - RNA, 21 nt, Human
cagaaaguaccaacaaaaaca

SEQ ID NO: 499799 - RNA, 19 nt, Human
cagaaggcucucugaggac

SEQ ID NO: 499800 - RNA, 18 nt, Human
cagcugggaccccacauc

SEQ ID NO: 499801 - RNA, 19 nt, Human
cagcugggaccccacaucc

SEQ ID NO: 499802 - RNA, 22 nt, Human
cagcuguuccaagccuuuccug

SEQ ID NO: 499803 - RNA, 18 nt, Human
cccaccuacucaaugaca

SEQ ID NO: 499804 - RNA, 22 nt, Human
ccccaccaaacucacaaaagga

SEQ ID NO: 499805 - RNA, 18 nt, Human
ccccagggaggaaacgac

SEQ ID NO: 499806 - RNA, 25 nt, Human
ccggcagcuguuccaagccuuuccu

SEQ ID NO: 499807 - RNA, 23 nt, Human
ccgggcggggccgccgcuccguc

SEQ ID NO: 499808 - RNA, 21 nt, Human
ccuuccccaccaaacucacaa

SEQ ID NO: 499809 - RNA, 22 nt, Human
cucaggauguccagagcuggaa

SEQ ID NO: 499810 - RNA, 22 nt, Human
cugccaccucccugaagagucg

SEQ ID NO: 499811 - RNA, 21 nt, Human
cugggaccccacauccccagg

SEQ ID NO: 499812 - RNA, 19 nt, Human
gacuguagugugacaggau

SEQ ID NO: 499813 - RNA, 23 nt, Human
gagauggccagggccaagaaaga

SEQ ID NO: 499814 - RNA, 19 nt, Human
gcagacuggcucccagaau

SEQ ID NO: 499815 - RNA, 24 nt, Human
gcuccgucaccuccggcagcuguu

SEQ ID NO: 499816 - RNA, 25 nt, Human
gcuccgucaccuccggcagcuguuc

SEQ ID NO: 499817 - RNA, 23 nt, Human
ggaaacaagggagagagcauggc

SEQ ID NO: 499818 - RNA, 25 nt, Human
ggaacacaugaagucacaaaaaaca

SEQ ID NO: 499819 - RNA, 18 nt, Human
ggacagaugcugagcucu

SEQ ID NO: 499820 - RNA, 22 nt, Human
gggacagaugcugagcucuuaa

SEQ ID NO: 499821 - RNA, 21 nt, Human
gggagagagcauggcagcggg

SEQ ID NO: 499822 - RNA, 24 nt, Human
gggcccuauggcucuucagaggcu

SEQ ID NO: 499823 - RNA, 24 nt, Human
gguggcagaaaaaacgccuguggg

SEQ ID NO: 499824 - RNA, 19 nt, Human
ggugggggcccuauggcuc

SEQ ID NO: 499825 - RNA, 22 nt, Human
gugggggcccuauggcucuuca

SEQ ID NO: 499826 - RNA, 21 nt, Human
uacauuugacuccucccuaga

SEQ ID NO: 499827 - RNA, 23 nt, Human
uaccaacaaaaacaugaccuaca

SEQ ID NO: 499828 - RNA, 23 nt, Human
uagagaaggugugaucuauguuu

SEQ ID NO: 499829 - RNA, 23 nt, Human
uaggaacuggggaucaggcaugc

SEQ ID NO: 499830 - RNA, 23 nt, Human
uauacccuucccuuccccaccaa

SEQ ID NO: 499831 - RNA, 18 nt, Human
uauauagauauaugcaua

SEQ ID NO: 499832 - RNA, 20 nt, Human
uauauagauauaugcauaua

SEQ ID NO: 499833 - RNA, 19 nt, Human
ucagaggcugcucaauagg

SEQ ID NO: 499834 - RNA, 22 nt, Human
uccagcgcaccgggcggggccg

SEQ ID NO: 499835 - RNA, 18 nt, Human
ucccaggacccaagggcc

SEQ ID NO: 499836 - RNA, 19 nt, Human
ucccaggacccaagggcca

SEQ ID NO: 499837 - RNA, 18 nt, Human
ucuaggaugaacauguca

SEQ ID NO: 499838 - RNA, 26 nt, Human
ucuaggaugaacauguccagugacuc

SEQ ID NO: 499839 - RNA, 19 nt, Human
ucucagggugugaguaaag

SEQ ID NO: 499840 - RNA, 23 nt, Human
ugaccuacauuugacuccucccu

SEQ ID NO: 499841 - RNA, 21 nt, Human
ugcauauauaccuuuuuuuuu

SEQ ID NO: 499842 - RNA, 23 nt, Human
ugcgucauauuauauauagauau

SEQ ID NO: 499843 - RNA, 24 nt, Human
uggcagacuggcucccagaauucu

SEQ ID NO: 499844 - RNA, 19 nt, Human
ugggaccccacauccccag

SEQ ID NO: 499845 - RNA, 20 nt, Human
ugggaccccacauccccagg

SEQ ID NO: 499846 - RNA, 19 nt, Human
ugggggacuugggcucagg

SEQ ID NO: 499847 - RNA, 20 nt, Human
ugggggacuugggcucagga

SEQ ID NO: 499848 - RNA, 21 nt, Human
uguaaugaacagggacagaug

SEQ ID NO: 499849 - RNA, 20 nt, Human
uguccagagcuggaagcuuc

SEQ ID NO: 499850 - RNA, 24 nt, Human
uguccagagcuggaagcuucgacc

SEQ ID NO: 499851 - RNA, 22 nt, Human
uguggguuaugcuccagacaga

SEQ ID NO: 499852 - RNA, 18 nt, Human
uuuuuuuuuaauacaauc

SEQ ID NO: 499853 - RNA, 18 nt, Human
uuuuuuuuuuuuuuuuug

SEQ ID NO: 499854 - RNA, 19 nt, Human
uuuuuuuuuuuuuuuuugu

SEQ ID NO: 499855 - RNA, 24 nt, Human
aaaaaaaaaaaauuaaaauauaac

SEQ ID NO: 499856 - RNA, 27 nt, Human
aaaaaaaaaaauuaaaauauaaccuga

SEQ ID NO: 499857 - RNA, 19 nt, Human
aaaaacugggagggagaca

SEQ ID NO: 499858 - RNA, 21 nt, Human
aacaaggaaugaggcaggaga

SEQ ID NO: 499859 - RNA, 24 nt, Human
aagaaccuccuggagggaagcuga

SEQ ID NO: 499860 - RNA, 23 nt, Human
aagcugagcagugucugacccug

SEQ ID NO: 499861 - RNA, 25 nt, Human
aagggaacaacuggggaaggaggga

SEQ ID NO: 499862 - RNA, 23 nt, Human
aaucagaaccuguacaaaaaaaa

SEQ ID NO: 499863 - RNA, 18 nt, Human
acacaccgaaaacaaggc

SEQ ID NO: 499864 - RNA, 23 nt, Human
acacagcccagcaucacgucccu

SEQ ID NO: 499865 - RNA, 23 nt, Human
agcaaaagaaaaacugggaggga

SEQ ID NO: 499866 - RNA, 20 nt, Human
agcgcaucuugacgccuggc

SEQ ID NO: 499867 - RNA, 20 nt, Human
aggcaggagagggaaagcag

SEQ ID NO: 499868 - RNA, 19 nt, Human
agggagugggugaggggga

SEQ ID NO: 499869 - RNA, 21 nt, Human
agggcucugggucaucagcca

SEQ ID NO: 499870 - RNA, 18 nt, Human
aggggcaucgaugccacc

SEQ ID NO: 499871 - RNA, 20 nt, Human
agggggaguaacaguuuuuc

SEQ ID NO: 499872 - RNA, 25 nt, Human
aggguggggaggcgcuggugagggg

SEQ ID NO: 499873 - RNA, 20 nt, Human
agguagagaggggaggaaau

SEQ ID NO: 499874 - RNA, 19 nt, Human
augaggcaggagagggaaa

SEQ ID NO: 499875 - RNA, 19 nt, Human
cacagcccagcaucacguc

SEQ ID NO: 499876 - RNA, 23 nt, Human
cacagcccagcaucacgucccuc

SEQ ID NO: 499877 - RNA, 23 nt, Human
cagaagcagcaacagguccuuca

SEQ ID NO: 499878 - RNA, 18 nt, Human
cagcagacccacagcacc

SEQ ID NO: 499879 - RNA, 19 nt, Human
caggagagggaaagcagcg

SEQ ID NO: 499880 - RNA, 21 nt, Human
caggagagggaaagcagcgca

SEQ ID NO: 499881 - RNA, 18 nt, Human
caggguggggaggcgcug

SEQ ID NO: 499882 - RNA, 19 nt, Human
caucagccaaggaggggug

SEQ ID NO: 499883 - RNA, 26 nt, Human
caucccuacccaggugcagccaggag

SEQ ID NO: 499884 - RNA, 18 nt, Human
ccaccaucccuacccagg

SEQ ID NO: 499885 - RNA, 21 nt, Human
cccacagcacccucugucugu

SEQ ID NO: 499886 - RNA, 18 nt, Human
ccugacccaggccuggug

SEQ ID NO: 499887 - RNA, 21 nt, Human
ccuugguguccccuccccacc

SEQ ID NO: 499888 - RNA, 25 nt, Human
cuggagaggagugcccccuccucaa

SEQ ID NO: 499889 - RNA, 21 nt, Human
cuggcucggccucccggcgcc

SEQ ID NO: 499890 - RNA, 23 nt, Human
gaaaagacagaagcagcaacagg

SEQ ID NO: 499891 - RNA, 18 nt, Human
gaaccauuucugccaccc

SEQ ID NO: 499892 - RNA, 20 nt, Human
gaacgccaagccggaaggaa

SEQ ID NO: 499893 - RNA, 23 nt, Human
gaacuggagcugccaacaaggaa

SEQ ID NO: 499894 - RNA, 22 nt, Human
gaaucagaaccuguacaaaaaa

SEQ ID NO: 499895 - RNA, 21 nt, Human
gagcaaaagaaaaacugggag

SEQ ID NO: 499896 - RNA, 23 nt, Human
gaguaacaguuuuucuggaacag

SEQ ID NO: 499897 - RNA, 21 nt, Human
gcagcaggaagaguggccagg

SEQ ID NO: 499898 - RNA, 22 nt, Human
gcccuuacacagagacaagaac

SEQ ID NO: 499899 - RNA, 20 nt, Human
ggaaggagggagugggugag

SEQ ID NO: 499900 - RNA, 21 nt, Human
ggaaggagggagugggugagg

SEQ ID NO: 499901 - RNA, 27 nt, Human
ggcagcaggaagaguggccaggagaga

SEQ ID NO: 499902 - RNA, 20 nt, Human
ggccuggugagugccagcug

SEQ ID NO: 499903 - RNA, 24 nt, Human
gggaaggagggagugggugagggg

SEQ ID NO: 499904 - RNA, 21 nt, Human
gggagugggugagggggagua

SEQ ID NO: 499905 - RNA, 19 nt, Human
gggccuacacaccgaaaac

SEQ ID NO: 499906 - RNA, 23 nt, Human
gguagagaggggaggaaaugggc

SEQ ID NO: 499907 - RNA, 24 nt, Human
guggagcaaaagaaaaacugggag

SEQ ID NO: 499908 - RNA, 23 nt, Human
uaaccagccugacaaaaugacgu

SEQ ID NO: 499909 - RNA, 19 nt, Human
uacacaccgaaaacaaggc

SEQ ID NO: 499910 - RNA, 21 nt, Human
uagucgcuggcucggccuccc

SEQ ID NO: 499911 - RNA, 26 nt, Human
ucagaaccuguacaaaaaaaaaaaaa

SEQ ID NO: 499912 - RNA, 22 nt, Human
ucagagggcucugggucaucag

SEQ ID NO: 499913 - RNA, 19 nt, Human
uccacggccugaacuggag

SEQ ID NO: 499914 - RNA, 19 nt, Human
ucccugggggcugguuaaa

SEQ ID NO: 499915 - RNA, 21 nt, Human
ucccugggggcugguuaaagc

SEQ ID NO: 499916 - RNA, 24 nt, Human
ucgaugccaccaucccuacccagg

SEQ ID NO: 499917 - RNA, 21 nt, Human
ucgcuggcucggccucccggc

SEQ ID NO: 499918 - RNA, 21 nt, Human
ucucuggccuugaaaucuguc

SEQ ID NO: 499919 - RNA, 21 nt, Human
ucugccacccagcagacccac

SEQ ID NO: 499920 - RNA, 18 nt, Human
ugaaaagacagaagcagc

SEQ ID NO: 499921 - RNA, 19 nt, Human
ugaaaagacagaagcagca

SEQ ID NO: 499922 - RNA, 19 nt, Human
ugaaacuguucaaguucag

SEQ ID NO: 499923 - RNA, 18 nt, Human
ugaagggaacaacugggg

SEQ ID NO: 499924 - RNA, 25 nt, Human
ugacguggagcaaaagaaaaacugg

SEQ ID NO: 499925 - RNA, 18 nt, Human
ugcagguagagaggggag

SEQ ID NO: 499926 - RNA, 23 nt, Human
ugccuccggcuuauaaccagccu

SEQ ID NO: 499927 - RNA, 19 nt, Human
uggagcaaaagaaaaacug

SEQ ID NO: 499928 - RNA, 20 nt, Human
ugggggcugguuaaagcugc

SEQ ID NO: 499929 - RNA, 18 nt, Human
ugggugagggggaguaac

SEQ ID NO: 499930 - RNA, 18 nt, Human
uguacaaaaaaaaaaaaa

SEQ ID NO: 499931 - RNA, 20 nt, Human
acuauaguucucagaaacaa

SEQ ID NO: 499932 - RNA, 22 nt, Human
cuucuuuucuucaugauucucu

SEQ ID NO: 499933 - RNA, 20 nt, Human
gaaaacaucagauauccaag

SEQ ID NO: 499934 - RNA, 26 nt, Human
gaaauaacaaaaacuuuuguccaagg

SEQ ID NO: 499935 - RNA, 23 nt, Human
uauccaagccauauuacuauagu

SEQ ID NO: 499936 - RNA, 19 nt, Human
ucagauauccaagccauau

SEQ ID NO: 499937 - RNA, 19 nt, Human
uucuucaugauucucucuc

SEQ ID NO: 499938 - RNA, 18 nt, Human
uuuguauuugaaaacauc

SEQ ID NO: 499939 - RNA, 22 nt, Human
aaaaaacaacccagagaaaaau

SEQ ID NO: 499940 - RNA, 18 nt, Human
aaaauaccacagucuggg

SEQ ID NO: 499941 - RNA, 23 nt, Human
aaacagaaacgaugaucuuugac

SEQ ID NO: 499942 - RNA, 20 nt, Human
aaacgggaggaucacugagc

SEQ ID NO: 499943 - RNA, 23 nt, Human
aaacgggaggaucacugagccca

SEQ ID NO: 499944 - RNA, 24 nt, Human
aaagaaaaacauguauauaaaaga

SEQ ID NO: 499945 - RNA, 22 nt, Human
aaagugcuggcugauuuugcuu

SEQ ID NO: 499946 - RNA, 22 nt, Human
aaaugcccagccuuaauuuauu

SEQ ID NO: 499947 - RNA, 19 nt, Human
aacuugaacaaggcuggug

SEQ ID NO: 499948 - RNA, 19 nt, Human
aagcaaccacuucguugaa

SEQ ID NO: 499949 - RNA, 19 nt, Human
aauaccacagucugggugg

SEQ ID NO: 499950 - RNA, 27 nt, Human
acagacauacagacuguagcacucucu

SEQ ID NO: 499951 - RNA, 24 nt, Human
acauccuuugauggaagcaacacc

SEQ ID NO: 499952 - RNA, 19 nt, Human
accaaauuguuuuuucucc

SEQ ID NO: 499953 - RNA, 25 nt, Human
accucacacuucccaagggccccac

SEQ ID NO: 499954 - RNA, 18 nt, Human
agccagcugugguggugc

SEQ ID NO: 499955 - RNA, 21 nt, Human
agccuggcgacauagugagac

SEQ ID NO: 499956 - RNA, 24 nt, Human
agcuacuuggaaggcugagguggg

SEQ ID NO: 499957 - RNA, 23 nt, Human
agcugugguggugcacaccugua

SEQ ID NO: 499958 - RNA, 22 nt, Human
aggagaaaaugggccuggugaa

SEQ ID NO: 499959 - RNA, 24 nt, Human
aggcugagguggguggauugcuug

SEQ ID NO: 499960 - RNA, 18 nt, Human
aggcugcuauaacaaaau

SEQ ID NO: 499961 - RNA, 22 nt, Human
agguggguggauugcuugaggc

SEQ ID NO: 499962 - RNA, 24 nt, Human
aguggcucacaccuguaaucccag

SEQ ID NO: 499963 - RNA, 23 nt, Human
aguuuugggggauuuuuuugggg

SEQ ID NO: 499964 - RNA, 18 nt, Human
auacagacuguagcacuc

SEQ ID NO: 499965 - RNA, 22 nt, Human
aucccauucaugagggcuccac

SEQ ID NO: 499966 - RNA, 20 nt, Human
augaccucacacuucccaag

SEQ ID NO: 499967 - RNA, 21 nt, Human
auucugauccugaacuccacc

SEQ ID NO: 499968 - RNA, 20 nt, Human
caaaacagaaacgaugaucu

SEQ ID NO: 499969 - RNA, 20 nt, Human
caaacaaaugcccagccuua

SEQ ID NO: 499970 - RNA, 24 nt, Human
caaaccuuuggcuuuauccuaucu

SEQ ID NO: 499971 - RNA, 25 nt, Human
caaauaauccacaacuuaguacauc

SEQ ID NO: 499972 - RNA, 24 nt, Human
caaauacucucauguuuccaauua

SEQ ID NO: 499973 - RNA, 25 nt, Human
caacacugcagaguuuaaaaaaaaa

SEQ ID NO: 499974 - RNA, 24 nt, Human
caauuucacaaauaauccacaacu

SEQ ID NO: 499975 - RNA, 20 nt, Human
cacaacuuaguacauccuuu

SEQ ID NO: 499976 - RNA, 21 nt, Human
cacacagcauuuauuuuguaa

SEQ ID NO: 499977 - RNA, 27 nt, Human
cacacagcauuuauuuuguaagauuaa

SEQ ID NO: 499978 - RNA, 24 nt, Human
cacaccuguaaucccagcacuuug

SEQ ID NO: 499979 - RNA, 24 nt, Human
cacaccuguagucccagcuacuug

SEQ ID NO: 499980 - RNA, 27 nt, Human
cacccauuaucacccacaauucaaaac

SEQ ID NO: 499981 - RNA, 19 nt, Human
caccuguaaucccagcacu

SEQ ID NO: 499982 - RNA, 24 nt, Human
caccuguaaucccagcacuuuggg

SEQ ID NO: 499983 - RNA, 23 nt, Human
caccuguagucccagcuacuugg

SEQ ID NO: 499984 - RNA, 18 nt, Human
cacuccggaaucaccugg

SEQ ID NO: 499985 - RNA, 24 nt, Human
cagcacuuugggaagucgaaacgg

SEQ ID NO: 499986 - RNA, 24 nt, Human
cagccuggcgacauagugagacuu

SEQ ID NO: 499987 - RNA, 21 nt, Human
cagcuacuuggaaggcugagg

SEQ ID NO: 499988 - RNA, 24 nt, Human
cagcuacuuggaaggcugaggugg

SEQ ID NO: 499989 - RNA, 19 nt, Human
cauaaggcacugaucccau

SEQ ID NO: 499990 - RNA, 20 nt, Human
ccacaauucaaaacagaaac

SEQ ID NO: 499991 - RNA, 25 nt, Human
cccauuaucacccacaauucaaaac

SEQ ID NO: 499992 - RNA, 21 nt, Human
ccggaacuaaaaaaagcaacc

SEQ ID NO: 499993 - RNA, 19 nt, Human
ccuggcgacauagugagac

SEQ ID NO: 499994 - RNA, 21 nt, Human
ccuguagucccagcuacuugg

SEQ ID NO: 499995 - RNA, 21 nt, Human
cgaaacgggaggaucacugag

SEQ ID NO: 499996 - RNA, 25 nt, Human
cgaaacgggaggaucacugagccca

SEQ ID NO: 499997 - RNA, 18 nt, Human
cggaaucaccugggagcu

SEQ ID NO: 499998 - RNA, 22 nt, Human
cucacaccuguaaucccagcac

SEQ ID NO: 499999 - RNA, 24 nt, Human
cucacaccuguaaucccagcacuu

SEQ ID NO: 500000 - RNA, 23 nt, Human
cucaugaccucacacuucccaag

SEQ ID NO: 500001 - RNA, 20 nt, Human
cucccacccauuaucaccca

SEQ ID NO: 500002 - RNA, 23 nt, Human
cugcagaguuuaaaaaaaaaaaa

SEQ ID NO: 500003 - RNA, 20 nt, Human
cuggguggcuuauaaacauc

SEQ ID NO: 500004 - RNA, 19 nt, Human
cuucccaagggccccaccu

SEQ ID NO: 500005 - RNA, 21 nt, Human
cuugguccauaaacugaaaaa

SEQ ID NO: 500006 - RNA, 30 nt, Human
gacacagacauacagacuguagcacucucu

SEQ ID NO: 500007 - RNA, 21 nt, Human
gacuguagcacucucccaccc

SEQ ID NO: 500008 - RNA, 19 nt, Human
gaggaucacugagcccagg

SEQ ID NO: 500009 - RNA, 24 nt, Human
gagguggguggauugcuugaggcu

SEQ ID NO: 500010 - RNA, 19 nt, Human
gaucaaagugcuggcugau

SEQ ID NO: 500011 - RNA, 22 nt, Human
gcagaguuuaaaaaaaaaaaaa

SEQ ID NO: 500012 - RNA, 21 nt, Human
gcccugucuccaaaaaacaua

SEQ ID NO: 500013 - RNA, 23 nt, Human
gcuaggagguccaggcugcagug

SEQ ID NO: 500014 - RNA, 21 nt, Human
gcugauuuugcuugugaaggg

SEQ ID NO: 500015 - RNA, 20 nt, Human
gcugcagugaguugugaccc

SEQ ID NO: 500016 - RNA, 24 nt, Human
ggaacuaaaaaaagcaaccacuuc

SEQ ID NO: 500017 - RNA, 25 nt, Human
ggagguccaggcugcagugaguugu

SEQ ID NO: 500018 - RNA, 20 nt, Human
ggauuuuuuugggggggagg

SEQ ID NO: 500019 - RNA, 18 nt, Human
ggcagaaaaaacaacccg

SEQ ID NO: 500020 - RNA, 24 nt, Human
gguggugcacaccuguagucccag

SEQ ID NO: 500021 - RNA, 18 nt, Human
gugaaguggcucacaccu

SEQ ID NO: 500022 - RNA, 19 nt, Human
gugacccggccuggacaaa

SEQ ID NO: 500023 - RNA, 19 nt, Human
gugcuggcugauuuugcuu

SEQ ID NO: 500024 - RNA, 23 nt, Human
guggugcacaccuguagucccag

SEQ ID NO: 500025 - RNA, 21 nt, Human
guuuaaaaaaaaaaaaacaaa

SEQ ID NO: 500026 - RNA, 24 nt, Human
uacuuggaaggcugaggugggugg

SEQ ID NO: 500027 - RNA, 18 nt, Human
uagcucaggggcuugcag

SEQ ID NO: 500028 - RNA, 23 nt, Human
uaucuaauuucaaacaaaugccc

SEQ ID NO: 500029 - RNA, 26 nt, Human
uauuaacaaaauucacauuguacaaa

SEQ ID NO: 500030 - RNA, 21 nt, Human
ucaaacaaaugcccagccuua

SEQ ID NO: 500031 - RNA, 24 nt, Human
ucacucaauuacauaaauucacuc

SEQ ID NO: 500032 - RNA, 23 nt, Human
uccaaaaaacauaaaauaaaaua

SEQ ID NO: 500033 - RNA, 23 nt, Human
uccacuacccuucaaagccagac

SEQ ID NO: 500034 - RNA, 19 nt, Human
ucccaagggccccaccuuc

SEQ ID NO: 500035 - RNA, 22 nt, Human
ucuuauaaucuagcucaggggc

SEQ ID NO: 500036 - RNA, 23 nt, Human
ugagcccaggaguuagagaccag

SEQ ID NO: 500037 - RNA, 23 nt, Human
ugagguggguggauugcuugagg

SEQ ID NO: 500038 - RNA, 24 nt, Human
ugagguggguggauugcuugaggc

SEQ ID NO: 500039 - RNA, 21 nt, Human
ugauccugaacuccacccuaa

SEQ ID NO: 500040 - RNA, 18 nt, Human
ugauucguagacuuucac

SEQ ID NO: 500041 - RNA, 20 nt, Human
ugauucguagacuuucacuc

SEQ ID NO: 500042 - RNA, 24 nt, Human
ugcagaguuuaaaaaaaaaaaaac

SEQ ID NO: 500043 - RNA, 23 nt, Human
ugcuauaacaaaauaccacaguc

SEQ ID NO: 500044 - RNA, 22 nt, Human
uggaaggcugagguggguggau

SEQ ID NO: 500045 - RNA, 24 nt, Human
uggaaggcugagguggguggauug

SEQ ID NO: 500046 - RNA, 21 nt, Human
uggcagaaaaaacaacccaga

SEQ ID NO: 500047 - RNA, 25 nt, Human
uggccaaucucaaauacucucaugu

SEQ ID NO: 500048 - RNA, 21 nt, Human
uggcucacaccuguaauccca

SEQ ID NO: 500049 - RNA, 24 nt, Human
uggcucacaccuguaaucccagca

SEQ ID NO: 500050 - RNA, 23 nt, Human
uggcuuuauccuaucuaauuuca

SEQ ID NO: 500051 - RNA, 18 nt, Human
uggugcacaccuguaguc

SEQ ID NO: 500052 - RNA, 24 nt, Human
ugguggugcacaccuguaguccca

SEQ ID NO: 500053 - RNA, 21 nt, Human
uguacaaaaguacaacgauaa

SEQ ID NO: 500054 - RNA, 27 nt, Human
uguccacuacccuucaaagccagaccc

SEQ ID NO: 500055 - RNA, 23 nt, Human
ugugguucuuucccagaagcauc

SEQ ID NO: 500056 - RNA, 23 nt, Human
uuacaaaccauccacaacuuguu

SEQ ID NO: 500057 - RNA, 21 nt, Human
uuagagaccagccuggcgaca

SEQ ID NO: 500058 - RNA, 23 nt, Human
uucauaaauuacuuaaaaauuug

SEQ ID NO: 500059 - RNA, 23 nt, Human
uugaacaaggcuggugaccuguu

SEQ ID NO: 500060 - RNA, 25 nt, Human
uugaaguuuuaggagaaaaugggcc

SEQ ID NO: 500061 - RNA, 18 nt, Human
uugcuugaggcuaggagg

SEQ ID NO: 500062 - RNA, 24 nt, Human
uugcuugaggcuaggagguccagg

SEQ ID NO: 500063 - RNA, 20 nt, Human
uuggaaggcugaggugggug

SEQ ID NO: 500064 - RNA, 22 nt, Human
uuugcuguaacuugaacaaggc

SEQ ID NO: 500065 - RNA, 21 nt, Human
uuuuauagacaggcaaaacug

SEQ ID NO: 500066 - RNA, 27 nt, Human
aagccggagguggaggaggagggaccc

SEQ ID NO: 500067 - RNA, 21 nt, Human
aaggagcuggaggagccgggg

SEQ ID NO: 500068 - RNA, 19 nt, Human
acccugcuggaggcccugc

SEQ ID NO: 500069 - RNA, 19 nt, Human
agaggaggaaggagcugga

SEQ ID NO: 500070 - RNA, 23 nt, Human
agaggaggaaggagcuggaggag

SEQ ID NO: 500071 - RNA, 19 nt, Human
aggaggaggaggaagagga

SEQ ID NO: 500072 - RNA, 20 nt, Human
augggaggugaguggauggg

SEQ ID NO: 500073 - RNA, 24 nt, Human
cagugaucccccaaaagccggagg

SEQ ID NO: 500074 - RNA, 20 nt, Human
ccggagguggaggaggagga

SEQ ID NO: 500075 - RNA, 18 nt, Human
ccuuuuuuuuuuuuuuuu

SEQ ID NO: 500076 - RNA, 18 nt, Human
cugcuggaggcccugcgg

SEQ ID NO: 500077 - RNA, 18 nt, Human
gaaggagcuggaggagcc

SEQ ID NO: 500078 - RNA, 18 nt, Human
gaggaagaggaggaagga

SEQ ID NO: 500079 - RNA, 19 nt, Human
gaggaggaaggagcuggag

SEQ ID NO: 500080 - RNA, 18 nt, Human
ggaggaggaagaggagga

SEQ ID NO: 500081 - RNA, 18 nt, Human
ggaggaggaggaagagga

SEQ ID NO: 500082 - RNA, 19 nt, Human
uauuaugauuuuuuucucu

SEQ ID NO: 500083 - RNA, 22 nt, Human
ucccccaaaagccggaggugga

SEQ ID NO: 500084 - RNA, 21 nt, Human
ugaucccccaaaagccggagg

SEQ ID NO: 500085 - RNA, 23 nt, Human
uggaggaggaggaggaagaggag

SEQ ID NO: 500086 - RNA, 21 nt, Human
ugggaggugaguggaugggug

SEQ ID NO: 500087 - RNA, 19 nt, Human
ugggugugaauggcugacc

SEQ ID NO: 500088 - RNA, 18 nt, Human
uuuuaccagaaaauaaag

SEQ ID NO: 500089 - RNA, 22 nt, Human
uuuuuuuuuuuuuuuuaccaga

SEQ ID NO: 500090 - RNA, 22 nt, Human
uuuuuuuuuuuuuuuuuaccag

SEQ ID NO: 500091 - RNA, 18 nt, Human
agagcccacccucccgcc

SEQ ID NO: 500092 - RNA, 23 nt, Human
aggaacagugaggaaagcugggc

SEQ ID NO: 500093 - RNA, 24 nt, Human
agggagcagagggcugggcagugg

SEQ ID NO: 500094 - RNA, 22 nt, Human
cccgccuccucuggggagggag

SEQ ID NO: 500095 - RNA, 21 nt, Human
cccucccgccuccucugggga

SEQ ID NO: 500096 - RNA, 23 nt, Human
ccucagaggcucugggcagccag

SEQ ID NO: 500097 - RNA, 19 nt, Human
ccucuggggagggagcaga

SEQ ID NO: 500098 - RNA, 21 nt, Human
cgacccgcuggcagaagcuga

SEQ ID NO: 500099 - RNA, 20 nt, Human
cggccugggccugggacggg

SEQ ID NO: 500100 - RNA, 22 nt, Human
cugaccccugcgcugccucaga

SEQ ID NO: 500101 - RNA, 20 nt, Human
cuggggagggagcagagggc

SEQ ID NO: 500102 - RNA, 18 nt, Human
gagggagcagagggcugg

SEQ ID NO: 500103 - RNA, 23 nt, Human
gccugggacggguggggguggga

SEQ ID NO: 500104 - RNA, 18 nt, Human
gccugggcguagacaucc

SEQ ID NO: 500105 - RNA, 22 nt, Human
gcgcugccucagaggcucuggg

SEQ ID NO: 500106 - RNA, 21 nt, Human
gcugcggcaccggcuucgggc

SEQ ID NO: 500107 - RNA, 19 nt, Human
ggaggagaugaagguggcg

SEQ ID NO: 500108 - RNA, 21 nt, Human
ggccugggacgggugggggug

SEQ ID NO: 500109 - RNA, 22 nt, Human
ggccugggacgggugggggugg

SEQ ID NO: 500110 - RNA, 22 nt, Human
gggccugggacgggugggggug

SEQ ID NO: 500111 - RNA, 19 nt, Human
gggcgcuggcuucggccug

SEQ ID NO: 500112 - RNA, 21 nt, Human
gggggcugcggcaccggcuuc

SEQ ID NO: 500113 - RNA, 23 nt, Human
uagagcccacccucccgccuccu

SEQ ID NO: 500114 - RNA, 24 nt, Human
uagcccggugcgacccgcuggcag

SEQ ID NO: 500115 - RNA, 20 nt, Human
uccacaggaacagugaggaa

SEQ ID NO: 500116 - RNA, 23 nt, Human
ugaggaaagcugggcgcuggcuu

SEQ ID NO: 500117 - RNA, 22 nt, Human
ugccucagaggcucugggcagc

SEQ ID NO: 500118 - RNA, 24 nt, Human
ugccucagaggcucugggcagcca

SEQ ID NO: 500119 - RNA, 19 nt, Human
ugggacggguggggguggg

SEQ ID NO: 500120 - RNA, 18 nt, Human
ugggcaguggucggggag

SEQ ID NO: 500121 - RNA, 20 nt, Human
ugggcaguggucggggagau

SEQ ID NO: 500122 - RNA, 21 nt, Human
ugggccugggacggguggggg

SEQ ID NO: 500123 - RNA, 19 nt, Human
ugggcgcuggcuucggccu

SEQ ID NO: 500124 - RNA, 19 nt, Human
uggggagggagcagagggc

SEQ ID NO: 500125 - RNA, 22 nt, Human
uggggagggagcagagggcugg

SEQ ID NO: 500126 - RNA, 25 nt, Human
uuuuuuuuuuuuuuuuggcuuuuag

SEQ ID NO: 500127 - RNA, 20 nt, Human
uuuuuuuuuuuuuuuuuugg

SEQ ID NO: 500128 - RNA, 25 nt, Human
uuuuuuuuuuuuuuuuuuggcuuuu

SEQ ID NO: 500129 - RNA, 25 nt, Human
agucauuccccaucaagugaacaua

SEQ ID NO: 500130 - RNA, 24 nt, Human
auauacauacauauauacauauau

SEQ ID NO: 500131 - RNA, 22 nt, Human
cagaauuaaaaaaaaaagcaac

SEQ ID NO: 500132 - RNA, 19 nt, Human
cggcacuuaacccgcugcu

SEQ ID NO: 500133 - RNA, 21 nt, Human
gucauuccccaucaagugaac

SEQ ID NO: 500134 - RNA, 24 nt, Human
guuaucuauauccacuuagguaca

SEQ ID NO: 500135 - RNA, 31 nt, Human
uaaaacauaaaacuagaauuuaacaagcaaa

SEQ ID NO: 500136 - RNA, 19 nt, Human
uaaauauacauacauauau

SEQ ID NO: 500137 - RNA, 20 nt, Human
uaaauauauacaugaugcua

SEQ ID NO: 500138 - RNA, 20 nt, Human
uaauggaaaauaacuguuua

SEQ ID NO: 500139 - RNA, 21 nt, Human
uaauggaaaauaacuguuuag

SEQ ID NO: 500140 - RNA, 24 nt, Human
uacauacauauauacauauauaca

SEQ ID NO: 500141 - RNA, 21 nt, Human
uacauauauacauauauacag

SEQ ID NO: 500142 - RNA, 21 nt, Human
uagaaaauaucaauauuauca

SEQ ID NO: 500143 - RNA, 23 nt, Human
uauacagauauacaguacacagu

SEQ ID NO: 500144 - RNA, 22 nt, Human
uauacaguacacaguucuguuu

SEQ ID NO: 500145 - RNA, 20 nt, Human
uauacauauauacagauaua

SEQ ID NO: 500146 - RNA, 24 nt, Human
uauauacauauauacagauauaca

SEQ ID NO: 500147 - RNA, 20 nt, Human
ucaauccuacagaauuaaaa

SEQ ID NO: 500148 - RNA, 21 nt, Human
ugaauaguggucccgcacuca

SEQ ID NO: 500149 - RNA, 22 nt, Human
ugcuacuagaaauauugaagga

SEQ ID NO: 500150 - RNA, 21 nt, Human
uggaaaauaacuguuuagaaa

SEQ ID NO: 500151 - RNA, 23 nt, Human
uguaucuuguuguccuugguuuc

SEQ ID NO: 500152 - RNA, 26 nt, Human
uuguacuuuuuugcuacuuuuuugua

SEQ ID NO: 500153 - RNA, 28 nt, Human
uuuauauuacagugaaaacauuuuauca

SEQ ID NO: 500154 - RNA, 19 nt, Human
uuucuggacuuccuuaaau

SEQ ID NO: 500155 - RNA, 24 nt, Human
uuucugugugaaauagaggaaguu

SEQ ID NO: 500156 - RNA, 21 nt, Human
aaaaacagaaaaagagcuaua

SEQ ID NO: 500157 - RNA, 21 nt, Human
aaaaagaagaucaaagaaaga

SEQ ID NO: 500158 - RNA, 24 nt, Human
aaaacagaaaaagagcuauaucaa

SEQ ID NO: 500159 - RNA, 21 nt, Human
aaaacgaaaugagcaaggaaa

SEQ ID NO: 500160 - RNA, 23 nt, Human
aaaagaaaaagaagaucaaagaa

SEQ ID NO: 500161 - RNA, 24 nt, Human
aacaaaacaaaacgauccuuuuga

SEQ ID NO: 500162 - RNA, 19 nt, Human
aagaaaaagaagaucaaag

SEQ ID NO: 500163 - RNA, 21 nt, Human
aagaaaaagaagaucaaagaa

SEQ ID NO: 500164 - RNA, 25 nt, Human
aagugaacccugaaauacucccucc

SEQ ID NO: 500165 - RNA, 22 nt, Human
acacaggaagcaggguccagga

SEQ ID NO: 500166 - RNA, 18 nt, Human
acagaagcuuccugaacc

SEQ ID NO: 500167 - RNA, 20 nt, Human
acagaagcuuccugaaccua

SEQ ID NO: 500168 - RNA, 25 nt, Human
acccugggccucucucccuaacgau

SEQ ID NO: 500169 - RNA, 20 nt, Human
agaaaaagaagaucaaagaa

SEQ ID NO: 500170 - RNA, 24 nt, Human
agaaaaagaagaucaaagaaagag

SEQ ID NO: 500171 - RNA, 23 nt, Human
agaaaaagagcuauaucaaaugu

SEQ ID NO: 500172 - RNA, 23 nt, Human
agaaaagaaaaagaagaucaaag

SEQ ID NO: 500173 - RNA, 25 nt, Human
agaaaagaaaaagaagaucaaagaa

SEQ ID NO: 500174 - RNA, 22 nt, Human
agcaaggaaaaacagaaaaaga

SEQ ID NO: 500175 - RNA, 23 nt, Human
agcaaggaaaaacagaaaaagag

SEQ ID NO: 500176 - RNA, 22 nt, Human
aggaaaaacagaaaaagagccg

SEQ ID NO: 500177 - RNA, 23 nt, Human
agggggagaaaagaaaaagaaga

SEQ ID NO: 500178 - RNA, 18 nt, Human
aggggugguguggcgggg

SEQ ID NO: 500179 - RNA, 19 nt, Human
aggggugguguggcggggg

SEQ ID NO: 500180 - RNA, 18 nt, Human
augaaggcugcaggcacc

SEQ ID NO: 500181 - RNA, 20 nt, Human
caacccuucggcccaagcca

SEQ ID NO: 500182 - RNA, 19 nt, Human
caacucugggcucagaccu

SEQ ID NO: 500183 - RNA, 23 nt, Human
cacccugggccucucucccuaac

SEQ ID NO: 500184 - RNA, 22 nt, Human
cagaaaaagagcuauaucaaau

SEQ ID NO: 500185 - RNA, 19 nt, Human
cagcucacagcuagcgcgg

SEQ ID NO: 500186 - RNA, 23 nt, Human
cagcuccuggcccagcugccccu

SEQ ID NO: 500187 - RNA, 19 nt, Human
caggaaaacugagauggca

SEQ ID NO: 500188 - RNA, 24 nt, Human
caugaagaaccaagccaaucucac

SEQ ID NO: 500189 - RNA, 19 nt, Human
cauggcuucuuuucucccc

SEQ ID NO: 500190 - RNA, 23 nt, Human
ccaaaacgaaaugagcaaggaaa

SEQ ID NO: 500191 - RNA, 23 nt, Human
ccaccgagcaauccugccuaugc

SEQ ID NO: 500192 - RNA, 27 nt, Human
ccaguccccacccugggccucucuccc

SEQ ID NO: 500193 - RNA, 18 nt, Human
cccaaaacgaaaugagca

SEQ ID NO: 500194 - RNA, 24 nt, Human
ccuaugcuggacaugcaucuuagg

SEQ ID NO: 500195 - RNA, 25 nt, Human
ccugaaauacucccuccgucaacuc

SEQ ID NO: 500196 - RNA, 20 nt, Human
cucccuggugggcugguggg

SEQ ID NO: 500197 - RNA, 22 nt, Human
gaagagaaaugccaggaaaagg

SEQ ID NO: 500198 - RNA, 19 nt, Human
gacacaggguggcgggcgc

SEQ ID NO: 500199 - RNA, 23 nt, Human
gaccgugcagcaaagccacugcc

SEQ ID NO: 500200 - RNA, 21 nt, Human
gagggggagaaaagaaaaaga

SEQ ID NO: 500201 - RNA, 21 nt, Human
gauccguucccagcucuccuu

SEQ ID NO: 500202 - RNA, 18 nt, Human
gaugagggagcccggggc

SEQ ID NO: 500203 - RNA, 22 nt, Human
gcaaggggugguguggcggggg

SEQ ID NO: 500204 - RNA, 24 nt, Human
gcacagcuccuggcccagcugccc

SEQ ID NO: 500205 - RNA, 19 nt, Human
gcagaccucgucgcgugga

SEQ ID NO: 500206 - RNA, 22 nt, Human
gcuuuuggggugcugugagccc

SEQ ID NO: 500207 - RNA, 20 nt, Human
ggaaagcaacgugaggucau

SEQ ID NO: 500208 - RNA, 23 nt, Human
ggaaauuucggucaagagggugg

SEQ ID NO: 500209 - RNA, 22 nt, Human
ggaagcaggguccaggaaaacu

SEQ ID NO: 500210 - RNA, 18 nt, Human
ggaggugggaugagggag

SEQ ID NO: 500211 - RNA, 20 nt, Human
ggaugagggagcccggggca

SEQ ID NO: 500212 - RNA, 21 nt, Human
ggccggcgguccucucccccg

SEQ ID NO: 500213 - RNA, 21 nt, Human
gggaaggugggggcuguggac

SEQ ID NO: 500214 - RNA, 21 nt, Human
gggagccccugaagugaaccc

SEQ ID NO: 500215 - RNA, 18 nt, Human
gggcuggcggcgguggcg

SEQ ID NO: 500216 - RNA, 21 nt, Human
ggggugguguggcgggggcug

SEQ ID NO: 500217 - RNA, 20 nt, Human
gggugguguggcgggggcug

SEQ ID NO: 500218 - RNA, 21 nt, Human
guggaagagaaaugccaggaa

SEQ ID NO: 500219 - RNA, 27 nt, Human
uaaaaacaaaacaaaacgauccuuuug

SEQ ID NO: 500220 - RNA, 19 nt, Human
uaaggcaaauuuuaucucu

SEQ ID NO: 500221 - RNA, 18 nt, Human
uaagggaagcgggaaggu

SEQ ID NO: 500222 - RNA, 18 nt, Human
uacaaucccaauacagua

SEQ ID NO: 500223 - RNA, 23 nt, Human
uagaacaaaaaagagggggagaa

SEQ ID NO: 500224 - RNA, 23 nt, Human
ucaaaaugacuuuucuuuagaac

SEQ ID NO: 500225 - RNA, 23 nt, Human
ucacuaggcagaccucgucgcgu

SEQ ID NO: 500226 - RNA, 19 nt, Human
ucagaccgugcagcaaagc

SEQ ID NO: 500227 - RNA, 19 nt, Human
ucagucugagccggaccua

SEQ ID NO: 500228 - RNA, 23 nt, Human
ucauggcuucuuuucucccuggu

SEQ ID NO: 500229 - RNA, 18 nt, Human
uccggggcggccgagcgc

SEQ ID NO: 500230 - RNA, 19 nt, Human
uccguucccagcucuccuu

SEQ ID NO: 500231 - RNA, 23 nt, Human
ucucccuaacgaucuugucgcuu

SEQ ID NO: 500232 - RNA, 23 nt, Human
ucuuuaaaaacaaaacaaaacga

SEQ ID NO: 500233 - RNA, 19 nt, Human
ucuuuagaacaaaaaagag

SEQ ID NO: 500234 - RNA, 19 nt, Human
ugaacccugaaauacuccc

SEQ ID NO: 500235 - RNA, 19 nt, Human
ugagauggcaaaauaggcc

SEQ ID NO: 500236 - RNA, 19 nt, Human
ugagccggaccuaaccuuc

SEQ ID NO: 500237 - RNA, 18 nt, Human
ugccaggaaaagggguca

SEQ ID NO: 500238 - RNA, 21 nt, Human
uggacacaggguggcgggcgc

SEQ ID NO: 500239 - RNA, 22 nt, Human
uggcccagcugccccucagugg

SEQ ID NO: 500240 - RNA, 18 nt, Human
uggcggcgguggcgacgg

SEQ ID NO: 500241 - RNA, 19 nt, Human
uggcggcgguggcgacggc

SEQ ID NO: 500242 - RNA, 21 nt, Human
ugggagccccugaagugaacc

SEQ ID NO: 500243 - RNA, 22 nt, Human
uggggugcugugagcccagggc

SEQ ID NO: 500244 - RNA, 18 nt, Human
ugguguggcgggggcugg

SEQ ID NO: 500245 - RNA, 19 nt, Human
ugguguggcgggggcuggg

SEQ ID NO: 500246 - RNA, 20 nt, Human
ugucugagugcagagauguu

SEQ ID NO: 500247 - RNA, 24 nt, Human
uucccaguccccacccugggccuc

SEQ ID NO: 500248 - RNA, 24 nt, Human
uuuagaacaaaaaagagggggaga

SEQ ID NO: 500249 - RNA, 22 nt, Human
uuucagaccgugcagcaaagcc

SEQ ID NO: 500250 - RNA, 24 nt, Human
uuuggcaaggggugguguggcggg

SEQ ID NO: 500251 - RNA, 24 nt, Human
aaaaaaauaccaaggucuacaaca

SEQ ID NO: 500252 - RNA, 19 nt, Human
aaacaggacacaaaacuga

SEQ ID NO: 500253 - RNA, 24 nt, Human
aaagauuuuccaggaaugaacuga

SEQ ID NO: 500254 - RNA, 20 nt, Human
aaauaccacaaccaccacca

SEQ ID NO: 500255 - RNA, 22 nt, Human
aaauggaaaguuucccuugauu

SEQ ID NO: 500256 - RNA, 20 nt, Human
aacuuugaacacuacuggca

SEQ ID NO: 500257 - RNA, 22 nt, Human
aagcuaguguaaaauuaaccug

SEQ ID NO: 500258 - RNA, 24 nt, Human
aauacucuccauuggcuuugcuug

SEQ ID NO: 500259 - RNA, 21 nt, Human
aaucccuucugccacugugug

SEQ ID NO: 500260 - RNA, 21 nt, Human
acaaccaccaccacacacaau

SEQ ID NO: 500261 - RNA, 20 nt, Human
acacugacaacagaagcaaa

SEQ ID NO: 500262 - RNA, 23 nt, Human
accacaaccaccaccacacacaa

SEQ ID NO: 500263 - RNA, 21 nt, Human
acuggcaucucauuuacaaag

SEQ ID NO: 500264 - RNA, 20 nt, Human
acuuauaucaagucuuugca

SEQ ID NO: 500265 - RNA, 19 nt, Human
agaaaacugaacaugcccu

SEQ ID NO: 500266 - RNA, 18 nt, Human
auaaaaaggaauauuuau

SEQ ID NO: 500267 - RNA, 20 nt, Human
auacuggauacuugcuuucu

SEQ ID NO: 500268 - RNA, 21 nt, Human
augagagaugcaucagugagc

SEQ ID NO: 500269 - RNA, 18 nt, Human
caaacauucagcaugaag

SEQ ID NO: 500270 - RNA, 23 nt, Human
caacacacugacaacagaagcaa

SEQ ID NO: 500271 - RNA, 18 nt, Human
caagaaauaacuguaaau

SEQ ID NO: 500272 - RNA, 19 nt, Human
caccacacacaauaaagac

SEQ ID NO: 500273 - RNA, 20 nt, Human
cacugugugcgugcgugugu

SEQ ID NO: 500274 - RNA, 20 nt, Human
cacuugaaaaccauuaaaaa

SEQ ID NO: 500275 - RNA, 18 nt, Human
cagcacgaaugggcugcu

SEQ ID NO: 500276 - RNA, 18 nt, Human
cagcaguacucgguuugc

SEQ ID NO: 500277 - RNA, 26 nt, Human
cauacaaaucaucaaaacauuucagu

SEQ ID NO: 500278 - RNA, 18 nt, Human
caugugcaggaugugcag

SEQ ID NO: 500279 - RNA, 22 nt, Human
ccacaaccaccaccacacacaa

SEQ ID NO: 500280 - RNA, 30 nt, Human
ccaccaccacacacaauaaagaccaucucc

SEQ ID NO: 500281 - RNA, 19 nt, Human
ccagguggagcugaccuau

SEQ ID NO: 500282 - RNA, 26 nt, Human
cccaaaccuccauccucucuguuuac

SEQ ID NO: 500283 - RNA, 22 nt, Human
ccccaaaccuccauccucucug

SEQ ID NO: 500284 - RNA, 18 nt, Human
cccuucugccacugugug

SEQ ID NO: 500285 - RNA, 24 nt, Human
ccucaacccaucaccuagguauua

SEQ ID NO: 500286 - RNA, 19 nt, Human
ccucacaaacccuagcuca

SEQ ID NO: 500287 - RNA, 20 nt, Human
ccugcuggugccacagcagg

SEQ ID NO: 500288 - RNA, 20 nt, Human
ccuguaguucgaggugcugu

SEQ ID NO: 500289 - RNA, 22 nt, Human
ccuuccguagcauugaugagag

SEQ ID NO: 500290 - RNA, 21 nt, Human
cgccccaaaccuccauccucu

SEQ ID NO: 500291 - RNA, 19 nt, Human
cugaaaacacuccaaauac

SEQ ID NO: 500292 - RNA, 18 nt, Human
cuggugccacagcagggu

SEQ ID NO: 500293 - RNA, 18 nt, Human
gacagaaaggggaggaag

SEQ ID NO: 500294 - RNA, 21 nt, Human
gcguguguguguuugugcgug

SEQ ID NO: 500295 - RNA, 21 nt, Human
gcugcuguggaacccuguuuc

SEQ ID NO: 500296 - RNA, 19 nt, Human
gcuguccuaggauccuuau

SEQ ID NO: 500297 - RNA, 19 nt, Human
ggcugcuguggaacccugu

SEQ ID NO: 500298 - RNA, 19 nt, Human
guaguacagacacugaaaa

SEQ ID NO: 500299 - RNA, 22 nt, Human
guaguacagacacugaaaacac

SEQ ID NO: 500300 - RNA, 23 nt, Human
gucucuggcaauucgcacuccag

SEQ ID NO: 500301 - RNA, 20 nt, Human
gugauucugaauagcaugaa

SEQ ID NO: 500302 - RNA, 19 nt, Human
gugcaggaugugcagguuu

SEQ ID NO: 500303 - RNA, 23 nt, Human
guuuagaaacacaaaucacauac

SEQ ID NO: 500304 - RNA, 22 nt, Human
uaaaccccgcaugcauuagcuc

SEQ ID NO: 500305 - RNA, 21 nt, Human
uaacccaaaggaaggaacuga

SEQ ID NO: 500306 - RNA, 24 nt, Human
uaaccugagcuuccugcuggugcc

SEQ ID NO: 500307 - RNA, 25 nt, Human
uacaacaguaguacagacacugaaa

SEQ ID NO: 500308 - RNA, 20 nt, Human
uacaagugauucugaauagc

SEQ ID NO: 500309 - RNA, 21 nt, Human
uaccacaaccaccaccacaca

SEQ ID NO: 500310 - RNA, 20 nt, Human
uagaaacacaaaucacauac

SEQ ID NO: 500311 - RNA, 21 nt, Human
uagaaacacaaaucacauaca

SEQ ID NO: 500312 - RNA, 21 nt, Human
uagaagacacugauguguuau

SEQ ID NO: 500313 - RNA, 19 nt, Human
uauuuaaagacaaccaauu

SEQ ID NO: 500314 - RNA, 23 nt, Human
ucaacacacugacaacagaagca

SEQ ID NO: 500315 - RNA, 27 nt, Human
ucaacccaucaccuagguauuaaaccc

SEQ ID NO: 500316 - RNA, 19 nt, Human
ucacagaaaacugaacaug

SEQ ID NO: 500317 - RNA, 21 nt, Human
uccaccaagcagaaguuucug

SEQ ID NO: 500318 - RNA, 18 nt, Human
uccuacugcucuccccua

SEQ ID NO: 500319 - RNA, 21 nt, Human
ugaaaacacuccaaauacugu

SEQ ID NO: 500320 - RNA, 18 nt, Human
ugacaacagaagcaaagg

SEQ ID NO: 500321 - RNA, 18 nt, Human
ugacagaaaggggaggaa

SEQ ID NO: 500322 - RNA, 18 nt, Human
ugagauaacuacuaaugg

SEQ ID NO: 500323 - RNA, 23 nt, Human
ugcauuauuauaaauaccacaac

SEQ ID NO: 500324 - RNA, 21 nt, Human
ugccacagcagggugcuucag

SEQ ID NO: 500325 - RNA, 22 nt, Human
ugccacugugugcgugcgugug

SEQ ID NO: 500326 - RNA, 20 nt, Human
uggcaguuacacagaggacu

SEQ ID NO: 500327 - RNA, 23 nt, Human
uggcaucuuuuuccaacauucua

SEQ ID NO: 500328 - RNA, 23 nt, Human
uguaaauggaaaguuucccuuga

SEQ ID NO: 500329 - RNA, 26 nt, Human
ugucaagacagacuuggcaucuuuuu

SEQ ID NO: 500330 - RNA, 22 nt, Human
ugugugcccacacaugagcaua

SEQ ID NO: 500331 - RNA, 20 nt, Human
ugugugcgugcgugugugug

SEQ ID NO: 500332 - RNA, 21 nt, Human
uguguguguuugugcgugugu

SEQ ID NO: 500333 - RNA, 23 nt, Human
uguguguguuugugcgugugugc

SEQ ID NO: 500334 - RNA, 23 nt, Human
uguguuugugcgugugugcccac

SEQ ID NO: 500335 - RNA, 23 nt, Human
uuaaaagcagacuauuuacaagu

SEQ ID NO: 500336 - RNA, 24 nt, Human
uuaauucacagaaaacugaacaug

SEQ ID NO: 500337 - RNA, 24 nt, Human
uuacauaggugaacgugugccaug

SEQ ID NO: 500338 - RNA, 23 nt, Human
uuccugcuggugccacagcaggg

SEQ ID NO: 500339 - RNA, 21 nt, Human
uugugaaauacucuccauugg

SEQ ID NO: 500340 - RNA, 21 nt, Human
uuucagcacgaaugggcugcu

SEQ ID NO: 500341 - RNA, 24 nt, Human
uuugcugcaccucaacccaucacc

SEQ ID NO: 500342 - RNA, 23 nt, Human
uuuguagaaagccucacaaaccc

SEQ ID NO: 500343 - RNA, 27 nt, Human
aggggaggggaggggccgccagaggcu

SEQ ID NO: 500344 - RNA, 20 nt, Human
caacugagaacccgcugcgg

SEQ ID NO: 500345 - RNA, 20 nt, Human
cugcccagcgagcaacugag

SEQ ID NO: 500346 - RNA, 20 nt, Human
gcaggggaggggaggggccg

SEQ ID NO: 500347 - RNA, 24 nt, Human
ggagccucagggagacagcugggg

SEQ ID NO: 500348 - RNA, 18 nt, Human
uacugggguuaagggcag

SEQ ID NO: 500349 - RNA, 20 nt, Human
uacugggguuaagggcaggg

SEQ ID NO: 500350 - RNA, 18 nt, Human
ucggcagugggagcgcga

SEQ ID NO: 500351 - RNA, 22 nt, Human
ucggcagugggagcgcgaccug

SEQ ID NO: 500352 - RNA, 23 nt, Human
acccuugaagugagcugaaaaac

SEQ ID NO: 500353 - RNA, 20 nt, Human
uacacagugcuuuaauuugg

SEQ ID NO: 500354 - RNA, 22 nt, Human
uacccuugaagugagcugaaaa

SEQ ID NO: 500355 - RNA, 18 nt, Human
aauucugucauuacagca

SEQ ID NO: 500356 - RNA, 21 nt, Human
aggcuguuagaaaucugaagc

SEQ ID NO: 500357 - RNA, 22 nt, Human
aggcuguuagaaaucugaagcu

SEQ ID NO: 500358 - RNA, 24 nt, Human
caaaugcucuccucagaaaguuuc

SEQ ID NO: 500359 - RNA, 19 nt, Human
cucuccucagaaaguuuca

SEQ ID NO: 500360 - RNA, 23 nt, Human
cuucagcuacuggucuauuuugu

SEQ ID NO: 500361 - RNA, 20 nt, Human
cuuccaaugucaaagaaaag

SEQ ID NO: 500362 - RNA, 18 nt, Human
uagaaaucugaagcucaa

SEQ ID NO: 500363 - RNA, 24 nt, Human
uccaaugucaaagaaaagaugauc

SEQ ID NO: 500364 - RNA, 19 nt, Human
ugccuucagcuacuggucu

SEQ ID NO: 500365 - RNA, 18 nt, Human
aaggauggagccuccugc

SEQ ID NO: 500366 - RNA, 20 nt, Human
gggaggagccacagaccuug

SEQ ID NO: 500367 - RNA, 19 nt, Human
gggauggggaugcauaacu

SEQ ID NO: 500368 - RNA, 22 nt, Human
ggggauggggaugcauaacuug

SEQ ID NO: 500369 - RNA, 24 nt, Human
ucaaacuuguauuuauuuucuaag

SEQ ID NO: 500370 - RNA, 20 nt, Human
uggggaugcauaacuugggu

SEQ ID NO: 500371 - RNA, 21 nt, Human
agaaagaaaagaaaugaaaaa

SEQ ID NO: 500372 - RNA, 25 nt, Human
ugaaacaaggccaucagcuuucuca

SEQ ID NO: 500373 - RNA, 21 nt, Human
aaaaaaagguugggagugaag

SEQ ID NO: 500374 - RNA, 21 nt, Human
aaacaaagacagauucagcaa

SEQ ID NO: 500375 - RNA, 23 nt, Human
aaaccagugccagacauggaaga

SEQ ID NO: 500376 - RNA, 20 nt, Human
aaaccagugccagacauggg

SEQ ID NO: 500377 - RNA, 24 nt, Human
aauguuaaaagcugccaggaaaga

SEQ ID NO: 500378 - RNA, 22 nt, Human
acaguaaaaaacaccagcugaa

SEQ ID NO: 500379 - RNA, 18 nt, Human
acauggaccuuggagaaa

SEQ ID NO: 500380 - RNA, 23 nt, Human
agcaagugcaaaggugacuacaa

SEQ ID NO: 500381 - RNA, 23 nt, Human
agccaauacaggaaaucaugaaa

SEQ ID NO: 500382 - RNA, 20 nt, Human
agcugccaggaaagaaaaaa

SEQ ID NO: 500383 - RNA, 21 nt, Human
agcugccaggaaagaaaaaau

SEQ ID NO: 500384 - RNA, 22 nt, Human
aggaaccgguaaaaacccucga

SEQ ID NO: 500385 - RNA, 24 nt, Human
aggaaccgguaaaaacccucgagc

SEQ ID NO: 500386 - RNA, 18 nt, Human
aggaauguaaaaaagcgc

SEQ ID NO: 500387 - RNA, 25 nt, Human
aggcauccgugucaauaccuucagg

SEQ ID NO: 500388 - RNA, 24 nt, Human
agguugggagugaagauuuccaag

SEQ ID NO: 500389 - RNA, 23 nt, Human
agugcagaaacaaagacagauuc

SEQ ID NO: 500390 - RNA, 24 nt, Human
auccaugaaagccaucaugcccaa

SEQ ID NO: 500391 - RNA, 21 nt, Human
auggaaaggcacuguauggca

SEQ ID NO: 500392 - RNA, 21 nt, Human
auggaccuuggagaaauccaa

SEQ ID NO: 500393 - RNA, 28 nt, Human
caaaaccugacaaaacucaaugugcauu

SEQ ID NO: 500394 - RNA, 20 nt, Human
caagugcaaaggugacuaca

SEQ ID NO: 500395 - RNA, 23 nt, Human
cacuguauggcaacugcaagaau

SEQ ID NO: 500396 - RNA, 20 nt, Human
ccacugggcaaggccagcuc

SEQ ID NO: 500397 - RNA, 22 nt, Human
ccagugccagacauggaagacg

SEQ ID NO: 500398 - RNA, 26 nt, Human
cccccugaaaacaaaaccugacaaaa

SEQ ID NO: 500399 - RNA, 18 nt, Human
ccccugaaaacaaaaccu

SEQ ID NO: 500400 - RNA, 25 nt, Human
cccuugguacacccccugaaaacaa

SEQ ID NO: 500401 - RNA, 21 nt, Human
cugacaaaacucaaugugcau

SEQ ID NO: 500402 - RNA, 22 nt, Human
cugcuuaaaaaaacuguuucca

SEQ ID NO: 500403 - RNA, 21 nt, Human
gaagacgauguugaaguagca

SEQ ID NO: 500404 - RNA, 19 nt, Human
gaguguaaaaaggaaccgg

SEQ ID NO: 500405 - RNA, 20 nt, Human
gauuugcaacugugagaaac

SEQ ID NO: 500406 - RNA, 21 nt, Human
gauuugcaacugugagaaacc

SEQ ID NO: 500407 - RNA, 24 nt, Human
gcaacugcaagaaugaaaccaaug

SEQ ID NO: 500408 - RNA, 18 nt, Human
gcaaggaauguaaaaaag

SEQ ID NO: 500409 - RNA, 25 nt, Human
ggaaaucaugaaagaaaccgguacc

SEQ ID NO: 500410 - RNA, 18 nt, Human
ggagugaagauuuccaag

SEQ ID NO: 500411 - RNA, 26 nt, Human
guaaaaaacaccagcugaacacucag

SEQ ID NO: 500412 - RNA, 22 nt, Human
guggugcaggcugcuugccuga

SEQ ID NO: 500413 - RNA, 25 nt, Human
uaaaaaggaaccgguaaaaacccuc

SEQ ID NO: 500414 - RNA, 25 nt, Human
uacacccccugaaaacaaaaccuga

SEQ ID NO: 500415 - RNA, 21 nt, Human
uaccacagagccaauacagga

SEQ ID NO: 500416 - RNA, 22 nt, Human
uagcaaugccagaaaacauauu

SEQ ID NO: 500417 - RNA, 20 nt, Human
uagguguaggcauccguguc

SEQ ID NO: 500418 - RNA, 22 nt, Human
uauugcaaggaauguaaaaaag

SEQ ID NO: 500419 - RNA, 20 nt, Human
uccaagacauggaccuugga

SEQ ID NO: 500420 - RNA, 26 nt, Human
uccaagacauggaccuuggagaaagg

SEQ ID NO: 500421 - RNA, 21 nt, Human
uccaagaguuaacauaccaga

SEQ ID NO: 500422 - RNA, 21 nt, Human
uccaugaaagccaucaugccc

SEQ ID NO: 500423 - RNA, 24 nt, Human
ucccuggucgccaguggcagggug

SEQ ID NO: 500424 - RNA, 23 nt, Human
ugaaaacaaaaccugacaaaacu

SEQ ID NO: 500425 - RNA, 19 nt, Human
ugaaagaaacuguagauau

SEQ ID NO: 500426 - RNA, 21 nt, Human
ugaaagccaucaugcccaaaa

SEQ ID NO: 500427 - RNA, 21 nt, Human
ugaaguagcaaugccagaaaa

SEQ ID NO: 500428 - RNA, 26 nt, Human
ugacaaaacucaaugugcauuaauua

SEQ ID NO: 500429 - RNA, 18 nt, Human
ugaccagcagucccccag

SEQ ID NO: 500430 - RNA, 23 nt, Human
ugcaagaaugaaaccaaugagac

SEQ ID NO: 500431 - RNA, 28 nt, Human
ugccaggaaagaaaaaauauuuuguucc

SEQ ID NO: 500432 - RNA, 18 nt, Human
ugccugaccugccagcuu

SEQ ID NO: 500433 - RNA, 20 nt, Human
ugccugaccugccagcuuug

SEQ ID NO: 500434 - RNA, 20 nt, Human
ugggagugaagauuuccaag

SEQ ID NO: 500435 - RNA, 24 nt, Human
ugguacacccccugaaaacaaaac

SEQ ID NO: 500436 - RNA, 25 nt, Human
uucagguggggguuaaauaaaugga

SEQ ID NO: 500437 - RNA, 20 nt, Human
uugaaguagcaaugccagaa

SEQ ID NO: 500438 - RNA, 21 nt, Human
uugguuuaaaugaagagcaaa

SEQ ID NO: 500439 - RNA, 22 nt, Human
uuugguuuaaaugaagagcaaa

SEQ ID NO: 500440 - RNA, 27 nt, Human
uuuuuuuuuuuuuuuuuccccgcuuuu

SEQ ID NO: 500441 - RNA, 18 nt, Human
uuuuuuuuuuuuuuuuug

SEQ ID NO: 500442 - RNA, 21 nt, Human
uuuuuuuuuuuuuuuuugguu

SEQ ID NO: 500443 - RNA, 26 nt, Human
cacaggcacccucugcucaauauccu

SEQ ID NO: 500444 - RNA, 21 nt, Human
cacccucugcucaauauccuc

SEQ ID NO: 500445 - RNA, 18 nt, Human
cucugcucaauauccucc

SEQ ID NO: 500446 - RNA, 24 nt, Human
aaauaucucucugugcccugaccc

SEQ ID NO: 500447 - RNA, 19 nt, Human
cccccggaaggaagacgag

SEQ ID NO: 500448 - RNA, 19 nt, Human
ccccggaaggaagacgagg

SEQ ID NO: 500449 - RNA, 19 nt, Human
ccucuagcaacuuucccaa

SEQ ID NO: 500450 - RNA, 23 nt, Human
cuccaaaaaauguggcagaggga

SEQ ID NO: 500451 - RNA, 24 nt, Human
gccucuagcaacuuucccaaccuc

SEQ ID NO: 500452 - RNA, 20 nt, Human
ucugaagccucuagcaacuu

SEQ ID NO: 500453 - RNA, 21 nt, Human
ucuggagaacaaagcggcuuc

SEQ ID NO: 500454 - RNA, 22 nt, Human
ucuggagaacaaagcggcuucg

SEQ ID NO: 500455 - RNA, 19 nt, Human
uuaaauaucucucugugcc

SEQ ID NO: 500456 - RNA, 31 nt, Human
aaacaggaguuuuuaaaagacacgacccggg

SEQ ID NO: 500457 - RNA, 22 nt, Human
aagccacgcccuggcccgaaac

SEQ ID NO: 500458 - RNA, 21 nt, Human
acgagaggacgcccugucugc

SEQ ID NO: 500459 - RNA, 22 nt, Human
agaacacacgcaggggccccga

SEQ ID NO: 500460 - RNA, 19 nt, Human
agagggcacagggcgagca

SEQ ID NO: 500461 - RNA, 23 nt, Human
agcggggugacgggggugggggc

SEQ ID NO: 500462 - RNA, 21 nt, Human
aggagcugcccacggaggagg

SEQ ID NO: 500463 - RNA, 18 nt, Human
aggaggccgggcgggggg

SEQ ID NO: 500464 - RNA, 18 nt, Human
aggaggugcugggcaggg

SEQ ID NO: 500465 - RNA, 21 nt, Human
agggcagggguccuccccagg

SEQ ID NO: 500466 - RNA, 24 nt, Human
auccggagagaacacacgcagggg

SEQ ID NO: 500467 - RNA, 20 nt, Human
augaauggaggagaaacagg

SEQ ID NO: 500468 - RNA, 23 nt, Human
augcauuuuugauguggacgaaa

SEQ ID NO: 500469 - RNA, 22 nt, Human
caccgccgcgaacgcgcgcaca

SEQ ID NO: 500470 - RNA, 19 nt, Human
cagcagccgcgugggcgga

SEQ ID NO: 500471 - RNA, 23 nt, Human
ccacccgcgggcagaggagcacg

SEQ ID NO: 500472 - RNA, 27 nt, Human
ccacccgcgggcagaggagcacggggc

SEQ ID NO: 500473 - RNA, 23 nt, Human
ccccgccgcccucgccccgcccg

SEQ ID NO: 500474 - RNA, 20 nt, Human
cccgacaugcaggaggaggc

SEQ ID NO: 500475 - RNA, 23 nt, Human
cccgcaggccccacccgaggagc

SEQ ID NO: 500476 - RNA, 21 nt, Human
cccgccgcccucgccccgccc

SEQ ID NO: 500477 - RNA, 23 nt, Human
cccuucggcggcccuggccucgg

SEQ ID NO: 500478 - RNA, 18 nt, Human
ccgcacccccccgucugc

SEQ ID NO: 500479 - RNA, 18 nt, Human
ccgcagggccaccaggug

SEQ ID NO: 500480 - RNA, 20 nt, Human
ccgccgcccucgccccgccc

SEQ ID NO: 500481 - RNA, 22 nt, Human
ccggaguccgcgugcaggaggg

SEQ ID NO: 500482 - RNA, 21 nt, Human
ccgggagcgaguguucuuccu

SEQ ID NO: 500483 - RNA, 25 nt, Human
ccucaggggccuccgcggaggaucu

SEQ ID NO: 500484 - RNA, 20 nt, Human
ccucgccccgcccgcacccc

SEQ ID NO: 500485 - RNA, 20 nt, Human
ccuguggagggugcaguguu

SEQ ID NO: 500486 - RNA, 23 nt, Human
ccuucggcggcccuggccucggg

SEQ ID NO: 500487 - RNA, 18 nt, Human
cgacccgggagaagucag

SEQ ID NO: 500488 - RNA, 20 nt, Human
cgcccucgccccgcccgcac

SEQ ID NO: 500489 - RNA, 21 nt, Human
cgggcagggcgggccuggggc

SEQ ID NO: 500490 - RNA, 19 nt, Human
cgggcggggggcgaggacu

SEQ ID NO: 500491 - RNA, 22 nt, Human
cguggcguucguaagaagcaaa

SEQ ID NO: 500492 - RNA, 18 nt, Human
cuaggaggccgggcgggg

SEQ ID NO: 500493 - RNA, 22 nt, Human
cucgccccgcccgcaccccccc

SEQ ID NO: 500494 - RNA, 20 nt, Human
cuggccucgggcgcugcugg

SEQ ID NO: 500495 - RNA, 22 nt, Human
gacagagacggauggacagggg

SEQ ID NO: 500496 - RNA, 20 nt, Human
gacccgggagaagucaguga

SEQ ID NO: 500497 - RNA, 24 nt, Human
gagaagcagcagccgcgugggcga

SEQ ID NO: 500498 - RNA, 18 nt, Human
gagcgaguguucuuccuu

SEQ ID NO: 500499 - RNA, 19 nt, Human
gaggcggcgggcgcgggca

SEQ ID NO: 500500 - RNA, 19 nt, Human
gagggcacagggcgagcag

SEQ ID NO: 500501 - RNA, 22 nt, Human
gcagaggggcgcgguggucucu

SEQ ID NO: 500502 - RNA, 19 nt, Human
gcccuucggcggcccuggc

SEQ ID NO: 500503 - RNA, 21 nt, Human
gccgcgaacgcgcgcacaggg

SEQ ID NO: 500504 - RNA, 19 nt, Human
gccggcugcgcgcagggaa

SEQ ID NO: 500505 - RNA, 22 nt, Human
gcgcgggcggucagcggcgggg

SEQ ID NO: 500506 - RNA, 19 nt, Human
gcggagcgauccgaacccc

SEQ ID NO: 500507 - RNA, 21 nt, Human
gcggggugacggggguggggg

SEQ ID NO: 500508 - RNA, 21 nt, Human
ggaaccccgcaggccccaccc

SEQ ID NO: 500509 - RNA, 18 nt, Human
ggagaaacaggggcucgg

SEQ ID NO: 500510 - RNA, 19 nt, Human
ggagcacggggcggacugg

SEQ ID NO: 500511 - RNA, 22 nt, Human
ggaggagaaacaggggcucgga

SEQ ID NO: 500512 - RNA, 23 nt, Human
ggauuaggccacacacgcgccgg

SEQ ID NO: 500513 - RNA, 24 nt, Human
ggauuaggccacacacgcgccggc

SEQ ID NO: 500514 - RNA, 20 nt, Human
ggcagggguccuccccaggg

SEQ ID NO: 500515 - RNA, 26 nt, Human
ggcccgggggcgaggcggcgccuguc

SEQ ID NO: 500516 - RNA, 18 nt, Human
ggccgagggcaggggucc

SEQ ID NO: 500517 - RNA, 19 nt, Human
ggccucgggcgcugcuggg

SEQ ID NO: 500518 - RNA, 25 nt, Human
ggcgcagaggggcgcgguggucucu

SEQ ID NO: 500519 - RNA, 21 nt, Human
ggcgguaaacagcaagagaaa

SEQ ID NO: 500520 - RNA, 24 nt, Human
ggcggucagcggcggggcgcgcuc

SEQ ID NO: 500521 - RNA, 18 nt, Human
gggaggcggcgggcgcgg

SEQ ID NO: 500522 - RNA, 18 nt, Human
gggcagaggagcacgggg

SEQ ID NO: 500523 - RNA, 20 nt, Human
gggcagggcgggccuggggc

SEQ ID NO: 500524 - RNA, 22 nt, Human
gggccaggccggggggcggaga

SEQ ID NO: 500525 - RNA, 19 nt, Human
gggcccgggggcgaggcgg

SEQ ID NO: 500526 - RNA, 27 nt, Human
gggcgcgagggggccaggccggggggc

SEQ ID NO: 500527 - RNA, 25 nt, Human
gggcggacuggggggguccuggggg

SEQ ID NO: 500528 - RNA, 19 nt, Human
gggcgguaaacagcaagag

SEQ ID NO: 500529 - RNA, 18 nt, Human
gggcggucagcggcgggg

SEQ ID NO: 500530 - RNA, 19 nt, Human
gggcggucagcggcggggc

SEQ ID NO: 500531 - RNA, 21 nt, Human
ggggcgggggcuccgcggggc

SEQ ID NO: 500532 - RNA, 21 nt, Human
gggggcggagagcggccgcgu

SEQ ID NO: 500533 - RNA, 22 nt, Human
ggugcaguguucaauggccgag

SEQ ID NO: 500534 - RNA, 23 nt, Human
gugcugggcaggggcgcaggguc

SEQ ID NO: 500535 - RNA, 23 nt, Human
uaaaugcaaagaccucauuuacc

SEQ ID NO: 500536 - RNA, 23 nt, Human
uaagaagcaaaaccuuccagaga

SEQ ID NO: 500537 - RNA, 23 nt, Human
uaagcucgcggcccggggcgcca

SEQ ID NO: 500538 - RNA, 23 nt, Human
uagaagugaacacggccguggcg

SEQ ID NO: 500539 - RNA, 18 nt, Human
uauugcuuuguuuccuuu

SEQ ID NO: 500540 - RNA, 19 nt, Human
ucagcggcggggcgcgcuc

SEQ ID NO: 500541 - RNA, 21 nt, Human
uccuguggagggugcaguguu

SEQ ID NO: 500542 - RNA, 19 nt, Human
uccuucccggggcgcgggc

SEQ ID NO: 500543 - RNA, 18 nt, Human
ucgccccgcccgcacccc

SEQ ID NO: 500544 - RNA, 26 nt, Human
ucuaagcuaagcucgcggcccggggc

SEQ ID NO: 500545 - RNA, 25 nt, Human
ucuguagggggaggggcgggggcuc

SEQ ID NO: 500546 - RNA, 24 nt, Human
ucuuccuucccggggcgcgggcgg

SEQ ID NO: 500547 - RNA, 18 nt, Human
ugaauggaggagaaacag

SEQ ID NO: 500548 - RNA, 19 nt, Human
ugacgggggugggggcugg

SEQ ID NO: 500549 - RNA, 18 nt, Human
ugcaggaggaggcgcagg

SEQ ID NO: 500550 - RNA, 19 nt, Human
ugcaguguucaauggccga

SEQ ID NO: 500551 - RNA, 28 nt, Human
ugccaagccacgcccuggcccgaaacac

SEQ ID NO: 500552 - RNA, 23 nt, Human
ugggaagagcggggugacggggg

SEQ ID NO: 500553 - RNA, 21 nt, Human
ugggcaggggcgcagggucuc

SEQ ID NO: 500554 - RNA, 19 nt, Human
uguggacgaaagggcccgg

SEQ ID NO: 500555 - RNA, 21 nt, Human
uucccggggcgcgggcgguca

SEQ ID NO: 500556 - RNA, 23 nt, Human
uuccuuuaguuuagaagugaaca

SEQ ID NO: 500557 - RNA, 21 nt, Human
uugccgggugagggaggcggc

SEQ ID NO: 500558 - RNA, 19 nt, Human
uuugaaaucacugguguuu

SEQ ID NO: 500559 - RNA, 20 nt, Human
uuugauguggacgaaagggc

SEQ ID NO: 500560 - RNA, 23 nt, Human
uuuuuugaaaucacugguguuua

SEQ ID NO: 500561 - RNA, 18 nt, Human
uuuuuuuuuuuuuuuuug

SEQ ID NO: 500562 - RNA, 23 nt, Human
aacugaaccaaugccuguccuag

SEQ ID NO: 500563 - RNA, 18 nt, Human
ccuucuaggaacugaaga

SEQ ID NO: 500564 - RNA, 21 nt, Human
gcaucaucuucauuuuuaaac

SEQ ID NO: 500565 - RNA, 19 nt, Human
ucaacaagaacauguacag

SEQ ID NO: 500566 - RNA, 19 nt, Human
ugaagaacauccaucuuug

SEQ ID NO: 500567 - RNA, 19 nt, Human
aaacugcugggauuacaga

SEQ ID NO: 500568 - RNA, 24 nt, Human
aaacugcugggauuacagacguga

SEQ ID NO: 500569 - RNA, 19 nt, Human
aaagaaguuuauuuggcuc

SEQ ID NO: 500570 - RNA, 19 nt, Human
aaauagagacaggguuuug

SEQ ID NO: 500571 - RNA, 21 nt, Human
aagaagcugggagagacaggc

SEQ ID NO: 500572 - RNA, 18 nt, Human
aagcagacagacaagugc

SEQ ID NO: 500573 - RNA, 22 nt, Human
aagcagacagacaagugcugac

SEQ ID NO: 500574 - RNA, 22 nt, Human
aagcaugguacugacaucugcu

SEQ ID NO: 500575 - RNA, 21 nt, Human
aagccagcacaaacuacccca

SEQ ID NO: 500576 - RNA, 18 nt, Human
aaggccccagggguccaa

SEQ ID NO: 500577 - RNA, 19 nt, Human
aagugcugggauuacaggc

SEQ ID NO: 500578 - RNA, 19 nt, Human
aagugcugggauuacaggc

SEQ ID NO: 500579 - RNA, 22 nt, Human
aagugcugggauuacaggcgug

SEQ ID NO: 500580 - RNA, 23 nt, Human
aagugcugggauuacaggcguga

SEQ ID NO: 500581 - RNA, 24 nt, Human
aauguuggccagguuggucuugaa

SEQ ID NO: 500582 - RNA, 22 nt, Human
acaagaggacguucugucccuc

SEQ ID NO: 500583 - RNA, 24 nt, Human
acaauguuggccagguuggucuug

SEQ ID NO: 500584 - RNA, 24 nt, Human
acaggguuucacaauguuggccag

SEQ ID NO: 500585 - RNA, 24 nt, Human
acaggguuuugccuguugcccagg

SEQ ID NO: 500586 - RNA, 18 nt, Human
acaguucugcaggcugua

SEQ ID NO: 500587 - RNA, 19 nt, Human
acccaggcuggagugcagu

SEQ ID NO: 500588 - RNA, 19 nt, Human
acgacaggugcgugccacu

SEQ ID NO: 500589 - RNA, 21 nt, Human
acuccuagcaagugauuccaa

SEQ ID NO: 500590 - RNA, 25 nt, Human
acucugucgcccaggcuggacugca

SEQ ID NO: 500591 - RNA, 24 nt, Human
acugcaguggugcuaucaugguuc

SEQ ID NO: 500592 - RNA, 18 nt, Human
agaauucuaggacuccac

SEQ ID NO: 500593 - RNA, 23 nt, Human
agacaggcagguaacaacccagg

SEQ ID NO: 500594 - RNA, 24 nt, Human
agacaggcagguaacaacccaggu

SEQ ID NO: 500595 - RNA, 21 nt, Human
agacaggcagguaacaacccg

SEQ ID NO: 500596 - RNA, 22 nt, Human
agacaggguuuugccuguugcc

SEQ ID NO: 500597 - RNA, 21 nt, Human
agagcagugacuagacuuuuu

SEQ ID NO: 500598 - RNA, 20 nt, Human
agcacaaacuaccccaaugc

SEQ ID NO: 500599 - RNA, 19 nt, Human
agccaccacaccuggccua

SEQ ID NO: 500600 - RNA, 24 nt, Human
agcuagaccuccggcggagaggca

SEQ ID NO: 500601 - RNA, 20 nt, Human
aggacuccaccugccugcug

SEQ ID NO: 500602 - RNA, 19 nt, Human
aggcagguaacaacccagg

SEQ ID NO: 500603 - RNA, 24 nt, Human
aggcgauucgcccgccccagccuc

SEQ ID NO: 500604 - RNA, 25 nt, Human
aggcuggagugcaguggcacaaucu

SEQ ID NO: 500605 - RNA, 22 nt, Human
aggcuuaagugauccuccuacc

SEQ ID NO: 500606 - RNA, 22 nt, Human
aggcuuagaaaaugugcaaauu

SEQ ID NO: 500607 - RNA, 24 nt, Human
agggaggcugccaggguccuguuu

SEQ ID NO: 500608 - RNA, 20 nt, Human
agggugccuuucacucagcu

SEQ ID NO: 500609 - RNA, 25 nt, Human
aguagcugggauuacaggugccugu

SEQ ID NO: 500610 - RNA, 24 nt, Human
agugauucaccugccucagccucc

SEQ ID NO: 500611 - RNA, 19 nt, Human
agugcaguggcacaaucuu

SEQ ID NO: 500612 - RNA, 18 nt, Human
agugcugggauuacaggc

SEQ ID NO: 500613 - RNA, 18 nt, Human
aguggcuggccacccucc

SEQ ID NO: 500614 - RNA, 23 nt, Human
auacaugcgacaugaaugaaaca

SEQ ID NO: 500615 - RNA, 21 nt, Human
auauacacauguacauauaua

SEQ ID NO: 500616 - RNA, 19 nt, Human
aucccaccacaccuggccg

SEQ ID NO: 500617 - RNA, 18 nt, Human
auguacauauauauacac

SEQ ID NO: 500618 - RNA, 20 nt, Human
auguacauauauauacacaa

SEQ ID NO: 500619 - RNA, 24 nt, Human
auguggcacaaacuauaauggaau

SEQ ID NO: 500620 - RNA, 24 nt, Human
auuuuuauauuuuuaguagagaca

SEQ ID NO: 500621 - RNA, 28 nt, Human
caaaacaccaaaauaucacaucaguaua

SEQ ID NO: 500622 - RNA, 24 nt, Human
caaacugcugggauuacagacgug

SEQ ID NO: 500623 - RNA, 22 nt, Human
caaagagacuaaaaaccacuga

SEQ ID NO: 500624 - RNA, 22 nt, Human
caagaucugagggccuuggccu

SEQ ID NO: 500625 - RNA, 22 nt, Human
caagugauucaccugccucagc

SEQ ID NO: 500626 - RNA, 21 nt, Human
caagugcucacccagcccuca

SEQ ID NO: 500627 - RNA, 19 nt, Human
cacaaacuauaauggaaua

SEQ ID NO: 500628 - RNA, 21 nt, Human
cacaauguuggccagguuggu

SEQ ID NO: 500629 - RNA, 24 nt, Human
cacaauguuggccagguuggucuu

SEQ ID NO: 500630 - RNA, 18 nt, Human
cacacacacacacacaca

SEQ ID NO: 500631 - RNA, 20 nt, Human
cacacacacacacacacaua

SEQ ID NO: 500632 - RNA, 22 nt, Human
cacacacacacacacacauaua

SEQ ID NO: 500633 - RNA, 19 nt, Human
cacacacacacacacauau

SEQ ID NO: 500634 - RNA, 22 nt, Human
cacccuccccacucuggccaag

SEQ ID NO: 500635 - RNA, 18 nt, Human
caccugccugcuggggcu

SEQ ID NO: 500636 - RNA, 20 nt, Human
caccuggccuaauuauacau

SEQ ID NO: 500637 - RNA, 21 nt, Human
cacuacaccacuuacaauugc

SEQ ID NO: 500638 - RNA, 20 nt, Human
cacucauggagggaagaagc

SEQ ID NO: 500639 - RNA, 24 nt, Human
cacucugucgcccaggcuggacug

SEQ ID NO: 500640 - RNA, 23 nt, Human
cacugcagccuccaccucccggg

SEQ ID NO: 500641 - RNA, 22 nt, Human
cacugcaggcuugacuucccag

SEQ ID NO: 500642 - RNA, 23 nt, Human
cagccuccaccucccggguucaa

SEQ ID NO: 500643 - RNA, 20 nt, Human
cagccuccugaguagcuggg

SEQ ID NO: 500644 - RNA, 20 nt, Human
cagccuccuggguugcuggg

SEQ ID NO: 500645 - RNA, 24 nt, Human
cagcgagcaccaccgcugaccucc

SEQ ID NO: 500646 - RNA, 20 nt, Human
caggcgauucgcccgccccc

SEQ ID NO: 500647 - RNA, 24 nt, Human
caggguuucacaauguuggccagg

SEQ ID NO: 500648 - RNA, 23 nt, Human
caggguuuugccuguugcccagg

SEQ ID NO: 500649 - RNA, 23 nt, Human
cagguaacaacccaggucugucc

SEQ ID NO: 500650 - RNA, 19 nt, Human
cauauauacacacauauau

SEQ ID NO: 500651 - RNA, 26 nt, Human
ccaaaccgcagcgagcagugggaaac

SEQ ID NO: 500652 - RNA, 22 nt, Human
ccaaacugcugggauuacagac

SEQ ID NO: 500653 - RNA, 24 nt, Human
ccaaacugcugggauuacagacgu

SEQ ID NO: 500654 - RNA, 24 nt, Human
ccaaugcuugggugaguggccaag

SEQ ID NO: 500655 - RNA, 18 nt, Human
ccacauguccaucaaugg

SEQ ID NO: 500656 - RNA, 24 nt, Human
ccaccucccggguucaagugauuc

SEQ ID NO: 500657 - RNA, 20 nt, Human
ccacucuggccaagguccug

SEQ ID NO: 500658 - RNA, 22 nt, Human
cccagagccagcgccucccaag

SEQ ID NO: 500659 - RNA, 21 nt, Human
cccaggcuuaagugauccucc

SEQ ID NO: 500660 - RNA, 19 nt, Human
ccccacuguccuacucucu

SEQ ID NO: 500661 - RNA, 22 nt, Human
cccggguucaagugauucaccu

SEQ ID NO: 500662 - RNA, 23 nt, Human
cccggguucaagugauucaccug

SEQ ID NO: 500663 - RNA, 20 nt, Human
ccggguucaagugauucacc

SEQ ID NO: 500664 - RNA, 22 nt, Human
ccuaagugcugggauuacaggc

SEQ ID NO: 500665 - RNA, 24 nt, Human
ccuaagugcugggauuacaggcgu

SEQ ID NO: 500666 - RNA, 20 nt, Human
ccuacagugcugagggcugu

SEQ ID NO: 500667 - RNA, 18 nt, Human
ccucaagggugacccuuc

SEQ ID NO: 500668 - RNA, 19 nt, Human
ccucacaucaccugucacc

SEQ ID NO: 500669 - RNA, 20 nt, Human
ccucaggcgauucgcccgcc

SEQ ID NO: 500670 - RNA, 22 nt, Human
ccugaguagcugggauuacagg

SEQ ID NO: 500671 - RNA, 23 nt, Human
ccugaguagcugggauuacaggu

SEQ ID NO: 500672 - RNA, 24 nt, Human
ccugaguagcugggauuacaggug

SEQ ID NO: 500673 - RNA, 23 nt, Human
ccugccucagccuccugaguagc

SEQ ID NO: 500674 - RNA, 24 nt, Human
ccugccucagccuccugaguagcu

SEQ ID NO: 500675 - RNA, 22 nt, Human
ccuggccucaggcgauucgccc

SEQ ID NO: 500676 - RNA, 25 nt, Human
ccuggguggcagagagacaagacuc

SEQ ID NO: 500677 - RNA, 22 nt, Human
cgagauggggucucacucuguc

SEQ ID NO: 500678 - RNA, 23 nt, Human
cgcccacagcuagaccuccggcg

SEQ ID NO: 500679 - RNA, 20 nt, Human
cgcugaccuccauccgccgc

SEQ ID NO: 500680 - RNA, 19 nt, Human
cggaaccaugaggugcgcg

SEQ ID NO: 500681 - RNA, 22 nt, Human
cguguauauauacauauauaca

SEQ ID NO: 500682 - RNA, 19 nt, Human
cuaaaaaccacugaauuau

SEQ ID NO: 500683 - RNA, 21 nt, Human
cuaaguaaaugaagccaguca

SEQ ID NO: 500684 - RNA, 21 nt, Human
cuaagugcugggauuacaggc

SEQ ID NO: 500685 - RNA, 21 nt, Human
cucacugcagccuccaccucc

SEQ ID NO: 500686 - RNA, 24 nt, Human
cucacugcagccuccaccucccgg

SEQ ID NO: 500687 - RNA, 24 nt, Human
cucagccuccugaguagcugggau

SEQ ID NO: 500688 - RNA, 20 nt, Human
cucagcuccaccccacuguc

SEQ ID NO: 500689 - RNA, 26 nt, Human
cuccauccgccgcccuaacugucccc

SEQ ID NO: 500690 - RNA, 21 nt, Human
cucccaaacugcugggauuac

SEQ ID NO: 500691 - RNA, 20 nt, Human
cucccggguucaagugauuc

SEQ ID NO: 500692 - RNA, 23 nt, Human
cuccuaccucagccuccuggguu

SEQ ID NO: 500693 - RNA, 19 nt, Human
cuccuggguugcugggacg

SEQ ID NO: 500694 - RNA, 20 nt, Human
cucugcucuggagguucaga

SEQ ID NO: 500695 - RNA, 20 nt, Human
cucuguuacccaggcuggag

SEQ ID NO: 500696 - RNA, 21 nt, Human
cugaguagcugggauuacagg

SEQ ID NO: 500697 - RNA, 23 nt, Human
cugcagccuccaccucccggguu

SEQ ID NO: 500698 - RNA, 24 nt, Human
cugcagccuccaccucccggguuc

SEQ ID NO: 500699 - RNA, 23 nt, Human
cugcuuggcuccugggaaggccu

SEQ ID NO: 500700 - RNA, 23 nt, Human
cuggguugcugggacgacaggug

SEQ ID NO: 500701 - RNA, 25 nt, Human
cugucccuaaagcagcccucuuggg

SEQ ID NO: 500702 - RNA, 18 nt, Human
cuguuacccaggcuggag

SEQ ID NO: 500703 - RNA, 24 nt, Human
cuuaagugauccuccuaccucagc

SEQ ID NO: 500704 - RNA, 20 nt, Human
cuugaacuccugggcucaag

SEQ ID NO: 500705 - RNA, 20 nt, Human
cuuguugccucccagcaccu

SEQ ID NO: 500706 - RNA, 18 nt, Human
gaacagauagggcaggag

SEQ ID NO: 500707 - RNA, 18 nt, Human
gacaggguuuugccuguu

SEQ ID NO: 500708 - RNA, 21 nt, Human
gaccaagccugggaaggcccc

SEQ ID NO: 500709 - RNA, 21 nt, Human
gacuuagguaauauaaaacaa

SEQ ID NO: 500710 - RNA, 22 nt, Human
gagcagugacuagacuuuuucu

SEQ ID NO: 500711 - RNA, 18 nt, Human
gagggcagaacagauagg

SEQ ID NO: 500712 - RNA, 22 nt, Human
gauggcugugguucaguagcca

SEQ ID NO: 500713 - RNA, 18 nt, Human
gauuacagacgugagcca

SEQ ID NO: 500714 - RNA, 21 nt, Human
gauuacagacgugagccacca

SEQ ID NO: 500715 - RNA, 20 nt, Human
gauuacaggcgugaucccac

SEQ ID NO: 500716 - RNA, 24 nt, Human
gauuacaggugccugucaucaugc

SEQ ID NO: 500717 - RNA, 19 nt, Human
gcacaaacuauaauggaau

SEQ ID NO: 500718 - RNA, 18 nt, Human
gcagacuggagaaccacg

SEQ ID NO: 500719 - RNA, 18 nt, Human
gcaguccaugcugcuggc

SEQ ID NO: 500720 - RNA, 23 nt, Human
gccccagccucccuaagugcugg

SEQ ID NO: 500721 - RNA, 22 nt, Human
gcgauucgcccgccccagccuc

SEQ ID NO: 500722 - RNA, 24 nt, Human
gcgauucgcccgccccagccuccc

SEQ ID NO: 500723 - RNA, 20 nt, Human
gcucacaguucugcaggcuu

SEQ ID NO: 500724 - RNA, 25 nt, Human
gcucuguuacccaggcuggagugca

SEQ ID NO: 500725 - RNA, 19 nt, Human
gcuggagugcaguggcaca

SEQ ID NO: 500726 - RNA, 24 nt, Human
ggaggcugccaggguccuguuugg

SEQ ID NO: 500727 - RNA, 20 nt, Human
ggagguucagaauucuagga

SEQ ID NO: 500728 - RNA, 19 nt, Human
ggauuacagacgugagcca

SEQ ID NO: 500729 - RNA, 21 nt, Human
ggcucacaguucugcaggcug

SEQ ID NO: 500730 - RNA, 24 nt, Human
ggguggucuugaacuccugggcuc

SEQ ID NO: 500731 - RNA, 18 nt, Human
ggugaugguugcauguau

SEQ ID NO: 500732 - RNA, 22 nt, Human
gguggugaagacaacgauggag

SEQ ID NO: 500733 - RNA, 23 nt, Human
gucacaaaacaccaaaauaucac

SEQ ID NO: 500734 - RNA, 23 nt, Human
gugauccuccuaccucagccucc

SEQ ID NO: 500735 - RNA, 18 nt, Human
gugauucaccugccucag

SEQ ID NO: 500736 - RNA, 23 nt, Human
gugauucaccugccucagccucc

SEQ ID NO: 500737 - RNA, 19 nt, Human
guguauauauacauauaua

SEQ ID NO: 500738 - RNA, 24 nt, Human
guucaagugauucaccugccucag

SEQ ID NO: 500739 - RNA, 19 nt, Human
uaaagcagcccucuugggc

SEQ ID NO: 500740 - RNA, 24 nt, Human
uaaauaucuacauaggaaauccaa

SEQ ID NO: 500741 - RNA, 24 nt, Human
uaaaugggugaaguguauggcaug

SEQ ID NO: 500742 - RNA, 23 nt, Human
uaacaaaauaaaaagcauauuga

SEQ ID NO: 500743 - RNA, 21 nt, Human
uaacaggccccauucuccaac

SEQ ID NO: 500744 - RNA, 20 nt, Human
uaagugauccuccuaccuca

SEQ ID NO: 500745 - RNA, 27 nt, Human
uaagugauccuccuaccucagccuccu

SEQ ID NO: 500746 - RNA, 19 nt, Human
uaagugcugggauuacagg

SEQ ID NO: 500747 - RNA, 24 nt, Human
uaagugcugggauuacaggcguga

SEQ ID NO: 500748 - RNA, 24 nt, Human
uaauuuuuauauuuuuaguagaga

SEQ ID NO: 500749 - RNA, 19 nt, Human
uacaaggauggcaccaagc

SEQ ID NO: 500750 - RNA, 23 nt, Human
uacaccacuuacaauugcuccaa

SEQ ID NO: 500751 - RNA, 22 nt, Human
uacagacgugagccaccacacc

SEQ ID NO: 500752 - RNA, 21 nt, Human
uacccaggcuggagugcagug

SEQ ID NO: 500753 - RNA, 24 nt, Human
uacccaggcuggagugcaguggca

SEQ ID NO: 500754 - RNA, 20 nt, Human
uaccucagccuccuggguug

SEQ ID NO: 500755 - RNA, 24 nt, Human
uaccucagccuccuggguugcugg

SEQ ID NO: 500756 - RNA, 25 nt, Human
uacguguauauauacauauauacaa

SEQ ID NO: 500757 - RNA, 22 nt, Human
uagagacaggguuucacaaugu

SEQ ID NO: 500758 - RNA, 21 nt, Human
uagagacaggguuuugccugu

SEQ ID NO: 500759 - RNA, 21 nt, Human
uagcaagugauuccaaaccgc

SEQ ID NO: 500760 - RNA, 24 nt, Human
uaguagagacaggguuucacaaug

SEQ ID NO: 500761 - RNA, 22 nt, Human
uauacauauauacacacauaua

SEQ ID NO: 500762 - RNA, 25 nt, Human
uauacauauauacacacauauauac

SEQ ID NO: 500763 - RNA, 19 nt, Human
uauauacacacauauauac

SEQ ID NO: 500764 - RNA, 20 nt, Human
uauauacguguauauauaca

SEQ ID NO: 500765 - RNA, 18 nt, Human
uaucacaucaguauauga

SEQ ID NO: 500766 - RNA, 22 nt, Human
uauccagaagguggaaacaauc

SEQ ID NO: 500767 - RNA, 19 nt, Human
uaugaggcuuagaaaaugu

SEQ ID NO: 500768 - RNA, 20 nt, Human
ucaagugauucaccugccuc

SEQ ID NO: 500769 - RNA, 18 nt, Human
ucacccagcccucacauc

SEQ ID NO: 500770 - RNA, 23 nt, Human
ucacugcagccuccaccucccgg

SEQ ID NO: 500771 - RNA, 23 nt, Human
ucacugcagccuccaccucccgg

SEQ ID NO: 500772 - RNA, 24 nt, Human
ucacugcagccuccaccucccggg

SEQ ID NO: 500773 - RNA, 19 nt, Human
ucacugcaggcuugacuuc

SEQ ID NO: 500774 - RNA, 24 nt, Human
ucacugcaggcuugacuucccagg

SEQ ID NO: 500775 - RNA, 20 nt, Human
ucagccuccugaguagcugg

SEQ ID NO: 500776 - RNA, 21 nt, Human
ucagggugccuuucacucagc

SEQ ID NO: 500777 - RNA, 19 nt, Human
uccaugcugcuggcacaag

SEQ ID NO: 500778 - RNA, 24 nt, Human
ucccaaacugcugggauuacagac

SEQ ID NO: 500779 - RNA, 22 nt, Human
ucccaacaaccagcuuucaagu

SEQ ID NO: 500780 - RNA, 21 nt, Human
ucccaagugcucacccagccc

SEQ ID NO: 500781 - RNA, 29 nt, Human
ucccagagccagcgccucccaagugcuca

SEQ ID NO: 500782 - RNA, 21 nt, Human
ucccaggcuuaagugauccuc

SEQ ID NO: 500783 - RNA, 19 nt, Human
ucccggguucaagugauuc

SEQ ID NO: 500784 - RNA, 24 nt, Human
ucccggguucaagugauucaccug

SEQ ID NO: 500785 - RNA, 24 nt, Human
ucccuaagugcugggauuacaggc

SEQ ID NO: 500786 - RNA, 26 nt, Human
uccuccuaccucagccuccuggguug

SEQ ID NO: 500787 - RNA, 24 nt, Human
uccugaguagcugggauuacaggu

SEQ ID NO: 500788 - RNA, 18 nt, Human
uccuggguugcugggacg

SEQ ID NO: 500789 - RNA, 24 nt, Human
uccuggguugcugggacgacaggu

SEQ ID NO: 500790 - RNA, 24 nt, Human
ucgcccaggcuggacugcaguggu

SEQ ID NO: 500791 - RNA, 23 nt, Human
ucucacucugucgcccaggcugg

SEQ ID NO: 500792 - RNA, 24 nt, Human
ucucacucugucgcccaggcugga

SEQ ID NO: 500793 - RNA, 26 nt, Human
ucucacucugucgcccaggcuggacu

SEQ ID NO: 500794 - RNA, 27 nt, Human
ucucacucugucgcccaggcuggacug

SEQ ID NO: 500795 - RNA, 22 nt, Human
ucucagcuccaccccacugucc

SEQ ID NO: 500796 - RNA, 21 nt, Human
ucucccagagccagcgccucc

SEQ ID NO: 500797 - RNA, 20 nt, Human
ucucuaaggagaggcuggaa

SEQ ID NO: 500798 - RNA, 21 nt, Human
ucucuguucuguauggcugga

SEQ ID NO: 500799 - RNA, 24 nt, Human
ucugucccuaaagcagcccucuug

SEQ ID NO: 500800 - RNA, 24 nt, Human
ucuguuacccaggcuggagugcag

SEQ ID NO: 500801 - RNA, 21 nt, Human
ucuugaacuccugggcucaag

SEQ ID NO: 500802 - RNA, 23 nt, Human
ucuugcucuguuacccaggcugg

SEQ ID NO: 500803 - RNA, 24 nt, Human
ucuugcucuguuacccaggcugga

SEQ ID NO: 500804 - RNA, 25 nt, Human
ugacagaaggugaacaaggagcagg

SEQ ID NO: 500805 - RNA, 20 nt, Human
ugacagcacaaggcucuggu

SEQ ID NO: 500806 - RNA, 22 nt, Human
ugagacagagucuugcucuguu

SEQ ID NO: 500807 - RNA, 19 nt, Human
ugauacagaccccuacgca

SEQ ID NO: 500808 - RNA, 20 nt, Human
ugcaaagagacuaaaaacca

SEQ ID NO: 500809 - RNA, 22 nt, Human
ugcaaagagacuaaaaaccacu

SEQ ID NO: 500810 - RNA, 25 nt, Human
ugcagagggugaccaagccugggaa

SEQ ID NO: 500811 - RNA, 24 nt, Human
ugcccaggguggucuugaacuccu

SEQ ID NO: 500812 - RNA, 28 nt, Human
ugcccaggguggucuugaacuccugggc

SEQ ID NO: 500813 - RNA, 24 nt, Human
ugccucagccuccugaguagcugg

SEQ ID NO: 500814 - RNA, 21 nt, Human
ugccuguugcccagggugguc

SEQ ID NO: 500815 - RNA, 23 nt, Human
ugccuguugcccaggguggucuu

SEQ ID NO: 500816 - RNA, 22 nt, Human
ugcucuggagguucagaauucu

SEQ ID NO: 500817 - RNA, 19 nt, Human
ugcugagggcugugggccu

SEQ ID NO: 500818 - RNA, 24 nt, Human
ugcugggauuacagacgugagcca

SEQ ID NO: 500819 - RNA, 25 nt, Human
ugcugggauuacaggcgugauccca

SEQ ID NO: 500820 - RNA, 24 nt, Human
uggacugcaguggugcuaucaugg

SEQ ID NO: 500821 - RNA, 18 nt, Human
uggagugcaguggcacaa

SEQ ID NO: 500822 - RNA, 23 nt, Human
uggagugcaguggcacaaucuua

SEQ ID NO: 500823 - RNA, 24 nt, Human
uggcacaaucuuaacucacugcag

SEQ ID NO: 500824 - RNA, 24 nt, Human
uggccagguuggucuugaauuccu

SEQ ID NO: 500825 - RNA, 18 nt, Human
uggccucaggcgauucgc

SEQ ID NO: 500826 - RNA, 19 nt, Human
uggcuggaggcaacccagu

SEQ ID NO: 500827 - RNA, 19 nt, Human
ugggagaaagccucccagg

SEQ ID NO: 500828 - RNA, 20 nt, Human
ugggagagacaggcagguaa

SEQ ID NO: 500829 - RNA, 18 nt, Human
ugggauuacagacgugag

SEQ ID NO: 500830 - RNA, 19 nt, Human
ugggauuacagacgugagc

SEQ ID NO: 500831 - RNA, 22 nt, Human
ugggauuacagacgugagccac

SEQ ID NO: 500832 - RNA, 24 nt, Human
ugggauuacagacgugagccacca

SEQ ID NO: 500833 - RNA, 18 nt, Human
ugggauuacaggcgugau

SEQ ID NO: 500834 - RNA, 23 nt, Human
ugggauuacaggcgugaucccac

SEQ ID NO: 500835 - RNA, 25 nt, Human
ugggauuacaggcgugaucccacca

SEQ ID NO: 500836 - RNA, 22 nt, Human
ugggauuacaggugccugucau

SEQ ID NO: 500837 - RNA, 24 nt, Human
ugggauuacaggugccugucauca

SEQ ID NO: 500838 - RNA, 21 nt, Human
ugggcugggcguggcggggga

SEQ ID NO: 500839 - RNA, 24 nt, Human
uggggucucacucugucgcccagg

SEQ ID NO: 500840 - RNA, 23 nt, Human
ugggugaguggccaagcaucaga

SEQ ID NO: 500841 - RNA, 23 nt, Human
uggguugcugggacgacaggugc

SEQ ID NO: 500842 - RNA, 24 nt, Human
uggugcuaucaugguucacugcag

SEQ ID NO: 500843 - RNA, 19 nt, Human
uguauauauacauauauac

SEQ ID NO: 500844 - RNA, 22 nt, Human
uguauauauacauauauacaca

SEQ ID NO: 500845 - RNA, 23 nt, Human
ugucagggugccuuucacucagc

SEQ ID NO: 500846 - RNA, 21 nt, Human
ugucgcccaggcuggacugca

SEQ ID NO: 500847 - RNA, 20 nt, Human
uguguauauacguguauaua

SEQ ID NO: 500848 - RNA, 19 nt, Human
uguguguauauacguguau

SEQ ID NO: 500849 - RNA, 22 nt, Human
uguguguauauacguguauaua

SEQ ID NO: 500850 - RNA, 22 nt, Human
uuacaggcgugaucccaccaca

SEQ ID NO: 500851 - RNA, 24 nt, Human
uuacccaggcuggagugcaguggc

SEQ ID NO: 500852 - RNA, 18 nt, Human
uuaguagagacaggguuu

SEQ ID NO: 500853 - RNA, 21 nt, Human
uucaagugauucaccugccuc

SEQ ID NO: 500854 - RNA, 23 nt, Human
uucaagugauucaccugccucag

SEQ ID NO: 500855 - RNA, 24 nt, Human
uucacugcaggcuugacuucccag

SEQ ID NO: 500856 - RNA, 25 nt, Human
uucccaggcuuaagugauccuccua

SEQ ID NO: 500857 - RNA, 22 nt, Human
uucgagauggggucucacucug

SEQ ID NO: 500858 - RNA, 24 nt, Human
uugcucuguuacccaggcuggagu

SEQ ID NO: 500859 - RNA, 21 nt, Human
uugcugggacgacaggugcgu

SEQ ID NO: 500860 - RNA, 23 nt, Human
uuuauauuuuuaguagagacagg

SEQ ID NO: 500861 - RNA, 24 nt, Human
uuuauauuuuuaguagagacaggg

SEQ ID NO: 500862 - RNA, 19 nt, Human
uuucacaauguuggccagg

SEQ ID NO: 500863 - RNA, 20 nt, Human
uuucacaauguuggccaggu

SEQ ID NO: 500864 - RNA, 18 nt, Human
uuucuauaugcuaacaau

SEQ ID NO: 500865 - RNA, 24 nt, Human
uuuggaggggacaaaauauccaaa

SEQ ID NO: 500866 - RNA, 19 nt, Human
uuuugccuguugcccaggg

SEQ ID NO: 500867 - RNA, 24 nt, Human
uuuuuaguagagacaggguuucac

SEQ ID NO: 500868 - RNA, 20 nt, Human
uuuuuauauuuuuaguagag

SEQ ID NO: 500869 - RNA, 23 nt, Human
cgacucgagaggaaccgggacag

SEQ ID NO: 500870 - RNA, 23 nt, Human
ugguggugacggcauccacgggg

SEQ ID NO: 500871 - RNA, 23 nt, Human
uuccuuguguuuuguacaaaaag

SEQ ID NO: 500872 - RNA, 27 nt, Human
aaaaaaaaacacccaucagaucucauu

SEQ ID NO: 500873 - RNA, 25 nt, Human
aaaaaaaaauuaagaguaaagaaga

SEQ ID NO: 500874 - RNA, 26 nt, Human
aaaaaacaaaacaaaaaaaaacaccc

SEQ ID NO: 500875 - RNA, 22 nt, Human
aaaacaaaaaacaaaacaaaaa

SEQ ID NO: 500876 - RNA, 26 nt, Human
aaaacaaaacaaaaaaaaacacccau

SEQ ID NO: 500877 - RNA, 19 nt, Human
aaaacaucaaaagcucaga

SEQ ID NO: 500878 - RNA, 23 nt, Human
aaacaaaacaaaaaaaaacaccc

SEQ ID NO: 500879 - RNA, 19 nt, Human
aaacacccaucagaucuca

SEQ ID NO: 500880 - RNA, 20 nt, Human
aaacagacauccugccugug

SEQ ID NO: 500881 - RNA, 21 nt, Human
aaagaaaacauacucuuuaua

SEQ ID NO: 500882 - RNA, 22 nt, Human
aacaaggagucuguaaagaaaa

SEQ ID NO: 500883 - RNA, 20 nt, Human
aacauggagaaaccccgucu

SEQ ID NO: 500884 - RNA, 21 nt, Human
aacauggagaaaccccgucuc

SEQ ID NO: 500885 - RNA, 20 nt, Human
aacauggugaaacccugucu

SEQ ID NO: 500886 - RNA, 21 nt, Human
aacauggugaaacccugucuc

SEQ ID NO: 500887 - RNA, 24 nt, Human
aacuccaucucaaaaaacaaaaaa

SEQ ID NO: 500888 - RNA, 21 nt, Human
aagaaagacgcaaauacagaa

SEQ ID NO: 500889 - RNA, 23 nt, Human
aagaacagcaugaggguaaccac

SEQ ID NO: 500890 - RNA, 18 nt, Human
aagaaucccuuuuucuua

SEQ ID NO: 500891 - RNA, 22 nt, Human
aagagaugaaaacauuuacacc

SEQ ID NO: 500892 - RNA, 19 nt, Human
aagcacuaaaaagaaaaca

SEQ ID NO: 500893 - RNA, 24 nt, Human
aagcauuugaaauagaaugaaaua

SEQ ID NO: 500894 - RNA, 24 nt, Human
aaucacuugaacccuggaggaaga

SEQ ID NO: 500895 - RNA, 24 nt, Human
aaucgcuugaacccaggaggcaga

SEQ ID NO: 500896 - RNA, 27 nt, Human
acaaaaaaaaacacccaucagaucuca

SEQ ID NO: 500897 - RNA, 22 nt, Human
acaaaacaaaaaaaaacaccca

SEQ ID NO: 500898 - RNA, 27 nt, Human
acaaaacaaaaaaaaacacccaucaga

SEQ ID NO: 500899 - RNA, 23 nt, Human
acaaaacaaaacaucaaaagcuc

SEQ ID NO: 500900 - RNA, 20 nt, Human
acaagagcaaaacuccaucu

SEQ ID NO: 500901 - RNA, 22 nt, Human
acagagcacuaaacaguuuaac

SEQ ID NO: 500902 - RNA, 20 nt, Human
acauggcagcaggaagaagu

SEQ ID NO: 500903 - RNA, 19 nt, Human
accacugcacuccagccug

SEQ ID NO: 500904 - RNA, 24 nt, Human
acccaggaggcagagguugcggug

SEQ ID NO: 500905 - RNA, 24 nt, Human
accccgucucuacuaaaaauacaa

SEQ ID NO: 500906 - RNA, 24 nt, Human
acccugucucuaccaaaaauauaa

SEQ ID NO: 500907 - RNA, 18 nt, Human
acugcacuccagccuggg

SEQ ID NO: 500908 - RNA, 23 nt, Human
acugcacuccagccugggugacu

SEQ ID NO: 500909 - RNA, 22 nt, Human
acugcuugggugaccuuaggag

SEQ ID NO: 500910 - RNA, 21 nt, Human
agaaaacagacauccugccug

SEQ ID NO: 500911 - RNA, 26 nt, Human
agaaaacauacucuuuauauuugccc

SEQ ID NO: 500912 - RNA, 22 nt, Human
agaaucgcuugaacccaggagg

SEQ ID NO: 500913 - RNA, 26 nt, Human
agacagcaagccuaagagaugaaaac

SEQ ID NO: 500914 - RNA, 22 nt, Human
agacauccugccugugaaaaca

SEQ ID NO: 500915 - RNA, 25 nt, Human
agacgcaaauacagaaaggauaacc

SEQ ID NO: 500916 - RNA, 21 nt, Human
agagaacaaggagucuguaaa

SEQ ID NO: 500917 - RNA, 19 nt, Human
agagguuauagugagccaa

SEQ ID NO: 500918 - RNA, 24 nt, Human
agagguugcggugagccgagaucg

SEQ ID NO: 500919 - RNA, 24 nt, Human
agaucgugugccauugcacuccag

SEQ ID NO: 500920 - RNA, 18 nt, Human
agcacuaaaaagaaaaca

SEQ ID NO: 500921 - RNA, 24 nt, Human
agcacuuugggaggccuagguggg

SEQ ID NO: 500922 - RNA, 22 nt, Human
agcccuucuagagaacaaggag

SEQ ID NO: 500923 - RNA, 22 nt, Human
agccuggccaacauggugaaac

SEQ ID NO: 500924 - RNA, 24 nt, Human
agccuggccaacauggugaaaccc

SEQ ID NO: 500925 - RNA, 24 nt, Human
agcuacuugggaggcugagguggg

SEQ ID NO: 500926 - RNA, 23 nt, Human
agcugggcgugguggugcaugcc

SEQ ID NO: 500927 - RNA, 24 nt, Human
aggagaaauaaaaauuaauuucug

SEQ ID NO: 500928 - RNA, 25 nt, Human
aggagacagcaagccuaagagauga

SEQ ID NO: 500929 - RNA, 24 nt, Human
aggagcaguggcucacgccuguaa

SEQ ID NO: 500930 - RNA, 20 nt, Human
aggaguuugagaccagccug

SEQ ID NO: 500931 - RNA, 21 nt, Human
aggcagaaaacagacauccug

SEQ ID NO: 500932 - RNA, 21 nt, Human
aggcagagguugcggugagcc

SEQ ID NO: 500933 - RNA, 24 nt, Human
aggcagagguugcggugagccgag

SEQ ID NO: 500934 - RNA, 23 nt, Human
aggcaggagaaucgcuugaaccc

SEQ ID NO: 500935 - RNA, 24 nt, Human
aggcaggagaaucgcuugaaccca

SEQ ID NO: 500936 - RNA, 21 nt, Human
aggcccaggcgggcggaucac

SEQ ID NO: 500937 - RNA, 22 nt, Human
aggcgggcggaucaccugaggg

SEQ ID NO: 500938 - RNA, 22 nt, Human
aggcgggcggaucaccugaggu

SEQ ID NO: 500939 - RNA, 24 nt, Human
aggcugaggugggagaaucacuug

SEQ ID NO: 500940 - RNA, 18 nt, Human
aggucgggaguuugaggc

SEQ ID NO: 500941 - RNA, 18 nt, Human
aggugggagaaucacuug

SEQ ID NO: 500942 - RNA, 25 nt, Human
aggugggagaaucacuugaacccug

SEQ ID NO: 500943 - RNA, 22 nt, Human
agguggguggaucgcuugaggu

SEQ ID NO: 500944 - RNA, 18 nt, Human
aguaauguguauaaaauc

SEQ ID NO: 500945 - RNA, 24 nt, Human
aguggcucacgccuguaaucccag

SEQ ID NO: 500946 - RNA, 22 nt, Human
auaaaaauuaauuucugaacca

SEQ ID NO: 500947 - RNA, 18 nt, Human
auagcacguaugcuuuua

SEQ ID NO: 500948 - RNA, 20 nt, Human
aucgcuugaggucaggaguu

SEQ ID NO: 500949 - RNA, 24 nt, Human
aucucaccacugcacuccagccug

SEQ ID NO: 500950 - RNA, 19 nt, Human
aucucgucaggccuccccc

SEQ ID NO: 500951 - RNA, 21 nt, Human
aucucgucaggccucccccaa

SEQ ID NO: 500952 - RNA, 23 nt, Human
augaaacaccaggaauucugaag

SEQ ID NO: 500953 - RNA, 19 nt, Human
augccuguaaucccagcac

SEQ ID NO: 500954 - RNA, 24 nt, Human
augcugaggcaggagaaucgcuug

SEQ ID NO: 500955 - RNA, 24 nt, Human
auugcacuccagucugggcaacaa

SEQ ID NO: 500956 - RNA, 22 nt, Human
caaaaaaaaacacccaucagau

SEQ ID NO: 500957 - RNA, 24 nt, Human
caaaaaaaaacacccaucagaucu

SEQ ID NO: 500958 - RNA, 23 nt, Human
caaaaaacaaaaaacaaaacaaa

SEQ ID NO: 500959 - RNA, 24 nt, Human
caaaaaacaaaacaaaaaaaaaca

SEQ ID NO: 500960 - RNA, 20 nt, Human
caaaacaaaacaucaaaagc

SEQ ID NO: 500961 - RNA, 22 nt, Human
caaaacaaaacaucaaaagcuc

SEQ ID NO: 500962 - RNA, 25 nt, Human
caaaacaucaaaagcucagaguaag

SEQ ID NO: 500963 - RNA, 19 nt, Human
caaaauuagcugggcgugg

SEQ ID NO: 500964 - RNA, 19 nt, Human
caaacacauccuucuucac

SEQ ID NO: 500965 - RNA, 22 nt, Human
caaacuggagagagucauagca

SEQ ID NO: 500966 - RNA, 21 nt, Human
caacaagagcaaaacuccauc

SEQ ID NO: 500967 - RNA, 24 nt, Human
caacauggagaaaccccgucucua

SEQ ID NO: 500968 - RNA, 24 nt, Human
caacauggugaaacccugucucua

SEQ ID NO: 500969 - RNA, 24 nt, Human
caagagcaaaacuccaucucaaaa

SEQ ID NO: 500970 - RNA, 19 nt, Human
cacaagaacagcaugaggg

SEQ ID NO: 500971 - RNA, 21 nt, Human
cacaagaacagcaugagggua

SEQ ID NO: 500972 - RNA, 20 nt, Human
cacaggaccuaacuuacggc

SEQ ID NO: 500973 - RNA, 20 nt, Human
cacagucccacaggcugggg

SEQ ID NO: 500974 - RNA, 25 nt, Human
cacagucccacaggcuggggaggcc

SEQ ID NO: 500975 - RNA, 20 nt, Human
caccacauaaaagugugagg

SEQ ID NO: 500976 - RNA, 24 nt, Human
cacgccuguaaucccagcacuuug

SEQ ID NO: 500977 - RNA, 18 nt, Human
cacuccagccugggugac

SEQ ID NO: 500978 - RNA, 18 nt, Human
cacuccagccugggugac

SEQ ID NO: 500979 - RNA, 22 nt, Human
cacuccagccugggugacucug

SEQ ID NO: 500980 - RNA, 24 nt, Human
cacuccagucugggcaacaagagc

SEQ ID NO: 500981 - RNA, 19 nt, Human
cacugcacuccagccuggg

SEQ ID NO: 500982 - RNA, 19 nt, Human
cacugcacuccagccuggg

SEQ ID NO: 500983 - RNA, 19 nt, Human
cacugcacuccagccuggg

SEQ ID NO: 500984 - RNA, 22 nt, Human
cacugcacuccagccuggguga

SEQ ID NO: 500985 - RNA, 24 nt, Human
cacugcacuccagccugggugacu

SEQ ID NO: 500986 - RNA, 19 nt, Human
cacuugaacccuggaggaa

SEQ ID NO: 500987 - RNA, 19 nt, Human
cagaaacagcaagcuagaa

SEQ ID NO: 500988 - RNA, 19 nt, Human
cagaguaagauaagaaucc

SEQ ID NO: 500989 - RNA, 22 nt, Human
cagaguaagauaagaaucccuu

SEQ ID NO: 500990 - RNA, 24 nt, Human
cagcacuuugggaggcccaggcgg

SEQ ID NO: 500991 - RNA, 24 nt, Human
cagcacuuugggaggccuaggugg

SEQ ID NO: 500992 - RNA, 24 nt, Human
cagccuaaccaacauggagaaacc

SEQ ID NO: 500993 - RNA, 21 nt, Human
cagcuacuugggaggcugagg

SEQ ID NO: 500994 - RNA, 24 nt, Human
cagcuacuugggaggcugaggugg

SEQ ID NO: 500995 - RNA, 19 nt, Human
caguggcaugugcccguag

SEQ ID NO: 500996 - RNA, 24 nt, Human
caugccuguaaucccagcacuuug

SEQ ID NO: 500997 - RNA, 19 nt, Human
cauuaacacuauaaucuac

SEQ ID NO: 500998 - RNA, 18 nt, Human
cauugcacuccagucugg

SEQ ID NO: 500999 - RNA, 19 nt, Human
cauugcacuccagucuggg

SEQ ID NO: 501000 - RNA, 21 nt, Human
cauugcacuccagucugggca

SEQ ID NO: 501001 - RNA, 24 nt, Human
cauugcacuccagucugggcaaca

SEQ ID NO: 501002 - RNA, 24 nt, Human
ccaaaagauagaaugcucauuuga

SEQ ID NO: 501003 - RNA, 20 nt, Human
ccacugcacuccagccuggg

SEQ ID NO: 501004 - RNA, 20 nt, Human
ccacugcacuccagccuggg

SEQ ID NO: 501005 - RNA, 21 nt, Human
ccacugcacuccagccugggu

SEQ ID NO: 501006 - RNA, 21 nt, Human
ccacugcacuccagccugggu

SEQ ID NO: 501007 - RNA, 22 nt, Human
ccacugcacuccagccugggug

SEQ ID NO: 501008 - RNA, 23 nt, Human
ccacugcacuccagccuggguga

SEQ ID NO: 501009 - RNA, 24 nt, Human
ccacugcacuccagccugggugac

SEQ ID NO: 501010 - RNA, 26 nt, Human
ccaucucaaaaaacaaaaaacaaaac

SEQ ID NO: 501011 - RNA, 20 nt, Human
ccauugcacuccagucuggg

SEQ ID NO: 501012 - RNA, 21 nt, Human
ccauugcacuccagucugggc

SEQ ID NO: 501013 - RNA, 23 nt, Human
ccauugcacuccagucugggcaa

SEQ ID NO: 501014 - RNA, 24 nt, Human
ccauugcacuccagucugggcaac

SEQ ID NO: 501015 - RNA, 22 nt, Human
cccccaacgccguccacagccc

SEQ ID NO: 501016 - RNA, 18 nt, Human
cccguagucccagcuacu

SEQ ID NO: 501017 - RNA, 21 nt, Human
cccguagucccagcuacuugg

SEQ ID NO: 501018 - RNA, 23 nt, Human
ccggccggcagaagccccacagu

SEQ ID NO: 501019 - RNA, 25 nt, Human
ccuaagagaugaaaacauuuacacc

SEQ ID NO: 501020 - RNA, 22 nt, Human
ccugaggucgggaguuugaggc

SEQ ID NO: 501021 - RNA, 22 nt, Human
ccuggccaacauggugaaaccc

SEQ ID NO: 501022 - RNA, 24 nt, Human
ccuggccaacauggugaaacccug

SEQ ID NO: 501023 - RNA, 22 nt, Human
ccuguaaucccagcacuuuggg

SEQ ID NO: 501024 - RNA, 19 nt, Human
ccuguaaucccagcuacuc

SEQ ID NO: 501025 - RNA, 22 nt, Human
ccuguaaucccagcuacucgag

SEQ ID NO: 501026 - RNA, 23 nt, Human
cgccuguaaucccagcacuuugg

SEQ ID NO: 501027 - RNA, 24 nt, Human
cgccuguaaucccagcacuuuggg

SEQ ID NO: 501028 - RNA, 24 nt, Human
cggaucaccugaggucgggaguuu

SEQ ID NO: 501029 - RNA, 18 nt, Human
cgggcggaucaccugagg

SEQ ID NO: 501030 - RNA, 24 nt, Human
cgggcggaucaccugaggucggga

SEQ ID NO: 501031 - RNA, 24 nt, Human
cgugugccauugcacuccagucug

SEQ ID NO: 501032 - RNA, 19 nt, Human
cuaaaaaagcauuaaugga

SEQ ID NO: 501033 - RNA, 24 nt, Human
cuagguggguggaucgcuugaggu

SEQ ID NO: 501034 - RNA, 26 nt, Human
cuagguggguggaucgcuugagguca

SEQ ID NO: 501035 - RNA, 31 nt, Human
cucaaaaaacaaaaaacaaaacaaaaaaaag

SEQ ID NO: 501036 - RNA, 22 nt, Human
cucacgccuguaaucccagcac

SEQ ID NO: 501037 - RNA, 24 nt, Human
cucacgccuguaaucccagcacuu

SEQ ID NO: 501038 - RNA, 19 nt, Human
cucagaguaagauaagaau

SEQ ID NO: 501039 - RNA, 18 nt, Human
cuggcagauucuuuuugu

SEQ ID NO: 501040 - RNA, 24 nt, Human
cuggccaacauggugaaacccugu

SEQ ID NO: 501041 - RNA, 24 nt, Human
cugggcaacaagagcaaaacucca

SEQ ID NO: 501042 - RNA, 21 nt, Human
cugggugacucugucucaaaa

SEQ ID NO: 501043 - RNA, 24 nt, Human
gaaaauucccuuacaaaaccauca

SEQ ID NO: 501044 - RNA, 19 nt, Human
gaaauuuuuccaaagcacu

SEQ ID NO: 501045 - RNA, 23 nt, Human
gaaucacuugaacccuggaggaa

SEQ ID NO: 501046 - RNA, 23 nt, Human
gacagcaagccuaagagaugaaa

SEQ ID NO: 501047 - RNA, 21 nt, Human
gagaaaccccgucucuacuaa

SEQ ID NO: 501048 - RNA, 26 nt, Human
gagaaucacuugaacccuggaggaag

SEQ ID NO: 501049 - RNA, 18 nt, Human
gauaaaacaagauauagg

SEQ ID NO: 501050 - RNA, 24 nt, Human
gaucaccugaggucgggaguuuga

SEQ ID NO: 501051 - RNA, 24 nt, Human
gaucgcuugaggucaggaguuuga

SEQ ID NO: 501052 - RNA, 24 nt, Human
gaugaaacaccaggaauucugaag

SEQ ID NO: 501053 - RNA, 21 nt, Human
gauucaugccuguaaucccag

SEQ ID NO: 501054 - RNA, 23 nt, Human
gcaaauacagaaaggauaaccuu

SEQ ID NO: 501055 - RNA, 25 nt, Human
gcaggaagaagugccaagcaaaggg

SEQ ID NO: 501056 - RNA, 22 nt, Human
gcaggagaaucgcuugaaccca

SEQ ID NO: 501057 - RNA, 24 nt, Human
gccaacauggugaaacccugucuc

SEQ ID NO: 501058 - RNA, 19 nt, Human
gccaggagcaguggcucac

SEQ ID NO: 501059 - RNA, 22 nt, Human
gccauugcacuccagucugggc

SEQ ID NO: 501060 - RNA, 23 nt, Human
gccauugcacuccagucugggca

SEQ ID NO: 501061 - RNA, 24 nt, Human
gccauugcacuccagucugggcaa

SEQ ID NO: 501062 - RNA, 24 nt, Human
gcuugaggucaggaguuugagacc

SEQ ID NO: 501063 - RNA, 24 nt, Human
ggaaggggaagcaaacacauccuu

SEQ ID NO: 501064 - RNA, 22 nt, Human
ggaggcagagguugcggugagc

SEQ ID NO: 501065 - RNA, 22 nt, Human
ggaucaccugaggucgggaguu

SEQ ID NO: 501066 - RNA, 24 nt, Human
gggcgugguggugcaugccuguaa

SEQ ID NO: 501067 - RNA, 19 nt, Human
ggucaggaguuugagacca

SEQ ID NO: 501068 - RNA, 19 nt, Human
ggucgggaguuugaggcca

SEQ ID NO: 501069 - RNA, 24 nt, Human
ggugauucaugccuguaaucccag

SEQ ID NO: 501070 - RNA, 24 nt, Human
gguggugcaugccuguaaucccag

SEQ ID NO: 501071 - RNA, 20 nt, Human
gguuaauacuauaucagggu

SEQ ID NO: 501072 - RNA, 19 nt, Human
gugugccauugcacuccag

SEQ ID NO: 501073 - RNA, 26 nt, Human
guugcggugagccgagaucgugugcc

SEQ ID NO: 501074 - RNA, 18 nt, Human
uaaaaauacaaaauuagc

SEQ ID NO: 501075 - RNA, 19 nt, Human
uaaaaauacaaaauuagcu

SEQ ID NO: 501076 - RNA, 20 nt, Human
uacaaaacaaaacaucaaaa

SEQ ID NO: 501077 - RNA, 22 nt, Human
uacacugucaccacauaaaagu

SEQ ID NO: 501078 - RNA, 20 nt, Human
uacauugaaaugccacaaca

SEQ ID NO: 501079 - RNA, 21 nt, Human
uaccaaaaauauaaaaauuag

SEQ ID NO: 501080 - RNA, 25 nt, Human
uaccaaaaauauaaaaauuagccag

SEQ ID NO: 501081 - RNA, 22 nt, Human
uaggagacagcaagccuaagag

SEQ ID NO: 501082 - RNA, 24 nt, Human
uagguggguggaucgcuugagguc

SEQ ID NO: 501083 - RNA, 18 nt, Human
uauguuacaaaacaaaac

SEQ ID NO: 501084 - RNA, 26 nt, Human
uauuacaauacaauaugcaaaccaga

SEQ ID NO: 501085 - RNA, 23 nt, Human
ucaauaguuuacaugguuuucac

SEQ ID NO: 501086 - RNA, 20 nt, Human
ucaauuugguggggacacag

SEQ ID NO: 501087 - RNA, 20 nt, Human
ucaccacauaaaagugugag

SEQ ID NO: 501088 - RNA, 23 nt, Human
ucacugggaaauacaggcagaaa

SEQ ID NO: 501089 - RNA, 23 nt, Human
ucagaucuugggccaggagcagu

SEQ ID NO: 501090 - RNA, 23 nt, Human
ucaugccuguaaucccagcacuu

SEQ ID NO: 501091 - RNA, 22 nt, Human
uccacacauaguuaaauaagau

SEQ ID NO: 501092 - RNA, 30 nt, Human
uccaucucaaaaaacaaaaaacaaaacaaa

SEQ ID NO: 501093 - RNA, 26 nt, Human
ucccaaccccuaggcgaauccagguu

SEQ ID NO: 501094 - RNA, 19 nt, Human
ucgcuugaggucaggaguu

SEQ ID NO: 501095 - RNA, 18 nt, Human
ucucaaaaaaaaauuaag

SEQ ID NO: 501096 - RNA, 22 nt, Human
ucucaaaaaacaaaaaacaaaa

SEQ ID NO: 501097 - RNA, 20 nt, Human
ucucuacuaaaaauacaaaa

SEQ ID NO: 501098 - RNA, 21 nt, Human
ucuuagaaaggucaagcagau

SEQ ID NO: 501099 - RNA, 23 nt, Human
ugaaacaccaggaauucugaaga

SEQ ID NO: 501100 - RNA, 22 nt, Human
ugaaaugccacaacaaaaucuu

SEQ ID NO: 501101 - RNA, 24 nt, Human
ugagaacucaccaucacaagaaca

SEQ ID NO: 501102 - RNA, 23 nt, Human
ugagaccagccuggccaacaugg

SEQ ID NO: 501103 - RNA, 24 nt, Human
ugagaccagccuggccaacauggu

SEQ ID NO: 501104 - RNA, 20 nt, Human
ugaggcaggagaaucgcuug

SEQ ID NO: 501105 - RNA, 24 nt, Human
ugaggcaggagaaucgcuugaacc

SEQ ID NO: 501106 - RNA, 25 nt, Human
ugaggcaggagaaucgcuugaaccc

SEQ ID NO: 501107 - RNA, 24 nt, Human
ugaggccagccuaaccaacaugga

SEQ ID NO: 501108 - RNA, 18 nt, Human
ugaggucaggaguuugag

SEQ ID NO: 501109 - RNA, 18 nt, Human
ugaggucgggaguuugag

SEQ ID NO: 501110 - RNA, 20 nt, Human
ugaggugggagaaucacuug

SEQ ID NO: 501111 - RNA, 24 nt, Human
ugaggugggagaaucacuugaacc

SEQ ID NO: 501112 - RNA, 21 nt, Human
ugauucaugccuguaauccca

SEQ ID NO: 501113 - RNA, 24 nt, Human
ugauucaugccuguaaucccagca

SEQ ID NO: 501114 - RNA, 19 nt, Human
ugcacuccagucugggcaa

SEQ ID NO: 501115 - RNA, 22 nt, Human
ugcacuccagucugggcaacaa

SEQ ID NO: 501116 - RNA, 22 nt, Human
ugcccacugggucccucccaca

SEQ ID NO: 501117 - RNA, 24 nt, Human
ugcccguagucccagcuacuuggg

SEQ ID NO: 501118 - RNA, 23 nt, Human
ugccuguaaucccagcacuuugg

SEQ ID NO: 501119 - RNA, 23 nt, Human
ugccuguaaucccagcacuuugg

SEQ ID NO: 501120 - RNA, 22 nt, Human
ugccuguaaucccagcuacucg

SEQ ID NO: 501121 - RNA, 19 nt, Human
ugcuaaguugcauuguuuu

SEQ ID NO: 501122 - RNA, 23 nt, Human
uggaucgcuugaggucaggaguu

SEQ ID NO: 501123 - RNA, 24 nt, Human
uggaucgcuugaggucaggaguuu

SEQ ID NO: 501124 - RNA, 24 nt, Human
uggcaugugcccguagucccagcu

SEQ ID NO: 501125 - RNA, 24 nt, Human
uggccaacauggugaaacccuguc

SEQ ID NO: 501126 - RNA, 22 nt, Human
uggcucacgccuguaaucccag

SEQ ID NO: 501127 - RNA, 24 nt, Human
uggcucacgccuguaaucccagca

SEQ ID NO: 501128 - RNA, 24 nt, Human
ugggaggcccaggcgggcggauca

SEQ ID NO: 501129 - RNA, 23 nt, Human
ugggaggccuagguggguggauc

SEQ ID NO: 501130 - RNA, 24 nt, Human
ugggaggccuagguggguggaucg

SEQ ID NO: 501131 - RNA, 19 nt, Human
ugggaggcugaggugggag

SEQ ID NO: 501132 - RNA, 24 nt, Human
ugggaggcugaggugggagaauca

SEQ ID NO: 501133 - RNA, 18 nt, Human
ugggccaggagcaguggc

SEQ ID NO: 501134 - RNA, 26 nt, Human
ugggucccucccacaacacguaggga

SEQ ID NO: 501135 - RNA, 24 nt, Human
ugggugaccuuaggagacagcaag

SEQ ID NO: 501136 - RNA, 24 nt, Human
uggguggaucgcuugaggucagga

SEQ ID NO: 501137 - RNA, 20 nt, Human
ugguccagaaacagcaagcu

SEQ ID NO: 501138 - RNA, 24 nt, Human
uggugauucaugccuguaauccca

SEQ ID NO: 501139 - RNA, 21 nt, Human
uggugcaugccuguaauccca

SEQ ID NO: 501140 - RNA, 22 nt, Human
uggugcaugccuguaaucccag

SEQ ID NO: 501141 - RNA, 24 nt, Human
ugguggugcaugccuguaauccca

SEQ ID NO: 501142 - RNA, 23 nt, Human
ugguuugcuaaguugcauuguuu

SEQ ID NO: 501143 - RNA, 21 nt, Human
uguaaagaaaaccaaucaccu

SEQ ID NO: 501144 - RNA, 22 nt, Human
uguaaucccagcuacucgagau

SEQ ID NO: 501145 - RNA, 20 nt, Human
uguauaaaauccaaccacug

SEQ ID NO: 501146 - RNA, 24 nt, Human
uguuacaaaacaaaacaucaaaag

SEQ ID NO: 501147 - RNA, 23 nt, Human
uuaaucucgucaggccuccccca

SEQ ID NO: 501148 - RNA, 19 nt, Human
uuacacugucaccacauaa

SEQ ID NO: 501149 - RNA, 21 nt, Human
uuacuggguuguuccacacau

SEQ ID NO: 501150 - RNA, 22 nt, Human
uuagcugggcgugguggugcau

SEQ ID NO: 501151 - RNA, 24 nt, Human
uuagcugggcgugguggugcaugc

SEQ ID NO: 501152 - RNA, 21 nt, Human
uuaucaguuuuguuuuuuuuu

SEQ ID NO: 501153 - RNA, 21 nt, Human
uucaagacguagaaaagccga

SEQ ID NO: 501154 - RNA, 23 nt, Human
uucaugccuguaaucccagcacu

SEQ ID NO: 501155 - RNA, 18 nt, Human
uugcggugagccgagauc

SEQ ID NO: 501156 - RNA, 21 nt, Human
uugcggugagccgagaucgug

SEQ ID NO: 501157 - RNA, 22 nt, Human
uugcggugagccgagaucgugu

SEQ ID NO: 501158 - RNA, 25 nt, Human
uugggaggcugaggugggagaauca

SEQ ID NO: 501159 - RNA, 21 nt, Human
uuuccauaucaaaagucugua

SEQ ID NO: 501160 - RNA, 18 nt, Human
uuucuuagaaaggucaag

SEQ ID NO: 501161 - RNA, 23 nt, Human
aguauuuuuucaaaguucauaua

SEQ ID NO: 501162 - RNA, 19 nt, Human
caaaguucauauacaggca

SEQ ID NO: 501163 - RNA, 23 nt, Human
uaacaaaaguagagucaaguauu

SEQ ID NO: 501164 - RNA, 23 nt, Human
ucaaaguucauauacaggcacag

SEQ ID NO: 501165 - RNA, 19 nt, Human
uuuucccagagaaacgaau

SEQ ID NO: 501166 - RNA, 21 nt, Human
uuuuuuuuuuuuuuucccaga

SEQ ID NO: 501167 - RNA, 22 nt, Human
uuuuuuuuuuuuuuuuucccag

SEQ ID NO: 501168 - RNA, 18 nt, Human
aaaaucuugcagauauga

SEQ ID NO: 501169 - RNA, 21 nt, Human
aaggaccccagccgguugucc

SEQ ID NO: 501170 - RNA, 27 nt, Human
cccugagccgcggcgcgcaaggacccc

SEQ ID NO: 501171 - RNA, 20 nt, Human
cgcgcaaggaccccagccgg

SEQ ID NO: 501172 - RNA, 24 nt, Human
cuuuucagcaaugaaaaccucuga

SEQ ID NO: 501173 - RNA, 24 nt, Human
gaaaaaaaucuugcagauaugaaa

SEQ ID NO: 501174 - RNA, 18 nt, Human
uaugacauuuucuguuuu

SEQ ID NO: 501175 - RNA, 22 nt, Human
ugaaaaaaaucuugcagauaug

SEQ ID NO: 501176 - RNA, 24 nt, Human
agagguacuauuaguuuguguucc

SEQ ID NO: 501177 - RNA, 18 nt, Human
caaaugcugacucaauau

SEQ ID NO: 501178 - RNA, 23 nt, Human
caggauccuguuaacuuggauuc

SEQ ID NO: 501179 - RNA, 23 nt, Human
ccuggguucuauuuaugggaaag

SEQ ID NO: 501180 - RNA, 19 nt, Human
guucaaaugcugacucaau

SEQ ID NO: 501181 - RNA, 22 nt, Human
uaacuuggauucuuuuauguua

SEQ ID NO: 501182 - RNA, 19 nt, Human
uagcagaaucucuggaaac

SEQ ID NO: 501183 - RNA, 26 nt, Human
uauaaacagauguuuccucacucccc

SEQ ID NO: 501184 - RNA, 23 nt, Human
uauguuaacaauauuuacaucua

SEQ ID NO: 501185 - RNA, 18 nt, Human
uccuguuaacuuggauuc

SEQ ID NO: 501186 - RNA, 21 nt, Human
ugaaaacauuuacuugguuca

SEQ ID NO: 501187 - RNA, 21 nt, Human
ugguagaacuuugucuggccu

SEQ ID NO: 501188 - RNA, 24 nt, Human
uguuuccucacuccccauagguau

SEQ ID NO: 501189 - RNA, 22 nt, Human
uuagaaguuauauuuuaaaaug

SEQ ID NO: 501190 - RNA, 22 nt, Human
uucaugcaauuuugucuuacuu

SEQ ID NO: 501191 - RNA, 18 nt, Human
uuuauguucaugcaauuu

SEQ ID NO: 501192 - RNA, 20 nt, Human
uuuauguucaugcaauuuug

SEQ ID NO: 501193 - RNA, 23 nt, Human
acaaaaucaagagccaggagccc

SEQ ID NO: 501194 - RNA, 20 nt, Human
caaaaucaagagccaggagc

SEQ ID NO: 501195 - RNA, 23 nt, Human
cagcggcuuugugggaugucugu

SEQ ID NO: 501196 - RNA, 20 nt, Human
caggagcccgggaugcggag

SEQ ID NO: 501197 - RNA, 23 nt, Human
cccgggaugcggagaugggccuc

SEQ ID NO: 501198 - RNA, 24 nt, Human
cggcggaccuuggacggccagcgc

SEQ ID NO: 501199 - RNA, 22 nt, Human
cuguggcagacaaaaucaagag

SEQ ID NO: 501200 - RNA, 26 nt, Human
ucaagagccaggagcccgggaugcgg

SEQ ID NO: 501201 - RNA, 23 nt, Human
uggcagacaaaaucaagagccag

SEQ ID NO: 501202 - RNA, 22 nt, Human
uuaauaaaauggcagcggcuuu

SEQ ID NO: 501203 - RNA, 20 nt, Human
uugugggaugucuguggcag

SEQ ID NO: 501204 - RNA, 19 nt, Human
aaaaaaaacacgagucaaa

SEQ ID NO: 501205 - RNA, 23 nt, Human
aaaaaaaacacgagucaaaaaua

SEQ ID NO: 501206 - RNA, 28 nt, Human
aaaagaaaaaaaaaagauuagacagaag

SEQ ID NO: 501207 - RNA, 23 nt, Human
aaaucaagaccaaacuucagaga

SEQ ID NO: 501208 - RNA, 21 nt, Human
aacucugccccggccccccca

SEQ ID NO: 501209 - RNA, 18 nt, Human
aagcaagaaaaaggaugg

SEQ ID NO: 501210 - RNA, 18 nt, Human
aagccacaagcacuuucc

SEQ ID NO: 501211 - RNA, 18 nt, Human
aaguaugaaagcugaggc

SEQ ID NO: 501212 - RNA, 21 nt, Human
aaucucccccuccccacucac

SEQ ID NO: 501213 - RNA, 28 nt, Human
aaugacaagaagcaaaaauauuuguaga

SEQ ID NO: 501214 - RNA, 19 nt, Human
acaaaagaaaaaaaaaaga

SEQ ID NO: 501215 - RNA, 22 nt, Human
acaagcacuuucccgcaccucc

SEQ ID NO: 501216 - RNA, 20 nt, Human
acaauccucccacaucuaga

SEQ ID NO: 501217 - RNA, 22 nt, Human
acucugccccggcccccccacc

SEQ ID NO: 501218 - RNA, 24 nt, Human
agaaaaaaaaaagauuagacagaa

SEQ ID NO: 501219 - RNA, 26 nt, Human
agaagagggguguuagggagaggggu

SEQ ID NO: 501220 - RNA, 19 nt, Human
agaauacuguuguagcucu

SEQ ID NO: 501221 - RNA, 18 nt, Human
agagacaaaucaugagau

SEQ ID NO: 501222 - RNA, 18 nt, Human
agagauugugggagauga

SEQ ID NO: 501223 - RNA, 25 nt, Human
agaguucccagcuggaggcuggagu

SEQ ID NO: 501224 - RNA, 18 nt, Human
agauacccaggcagcagc

SEQ ID NO: 501225 - RNA, 23 nt, Human
agauacccaggcagcagcagccc

SEQ ID NO: 501226 - RNA, 19 nt, Human
agccaggaaucuggacagu

SEQ ID NO: 501227 - RNA, 25 nt, Human
agccaggaaucuggacaguguucug

SEQ ID NO: 501228 - RNA, 25 nt, Human
aggaacagagaagaauaccgguacc

SEQ ID NO: 501229 - RNA, 19 nt, Human
aggccuuccccucagguag

SEQ ID NO: 501230 - RNA, 24 nt, Human
aggcgaggugagaaugcgauuucu

SEQ ID NO: 501231 - RNA, 18 nt, Human
aggcuggaguauccuggg

SEQ ID NO: 501232 - RNA, 21 nt, Human
agggaagaaauagaacuugga

SEQ ID NO: 501233 - RNA, 18 nt, Human
agggagagggguaggggg

SEQ ID NO: 501234 - RNA, 19 nt, Human
agggagccaacgagaagag

SEQ ID NO: 501235 - RNA, 21 nt, Human
agguagcagcgucuccagagc

SEQ ID NO: 501236 - RNA, 18 nt, Human
agugcagauacaaaagaa

SEQ ID NO: 501237 - RNA, 21 nt, Human
auaacguaaaucccaguccca

SEQ ID NO: 501238 - RNA, 19 nt, Human
aucccccucugcccugccu

SEQ ID NO: 501239 - RNA, 21 nt, Human
aucuagagacaaaucaugaga

SEQ ID NO: 501240 - RNA, 25 nt, Human
caagaaaaaggaugguuacacacaa

SEQ ID NO: 501241 - RNA, 18 nt, Human
caagacaagaguuggagc

SEQ ID NO: 501242 - RNA, 21 nt, Human
caagucccuugucccacuccc

SEQ ID NO: 501243 - RNA, 23 nt, Human
cacaagcacuuucccgcaccucc

SEQ ID NO: 501244 - RNA, 18 nt, Human
caccacauuucucuggcu

SEQ ID NO: 501245 - RNA, 19 nt, Human
caccuccuacacucccaaa

SEQ ID NO: 501246 - RNA, 20 nt, Human
caccuccuacacucccaaac

SEQ ID NO: 501247 - RNA, 19 nt, Human
cagaagggaugggauuggc

SEQ ID NO: 501248 - RNA, 21 nt, Human
cagagccugaucugggguccc

SEQ ID NO: 501249 - RNA, 24 nt, Human
cagagucaagucccuugucccacu

SEQ ID NO: 501250 - RNA, 18 nt, Human
cagcagagucaagucccu

SEQ ID NO: 501251 - RNA, 20 nt, Human
cagcagcaaggcgaggugag

SEQ ID NO: 501252 - RNA, 23 nt, Human
cagcccuggagguaaagggcaag

SEQ ID NO: 501253 - RNA, 22 nt, Human
cagcuaugcccuaaauuccacu

SEQ ID NO: 501254 - RNA, 22 nt, Human
cauaaaacaaaucaagaccaaa

SEQ ID NO: 501255 - RNA, 22 nt, Human
ccagagccugaucugggguccc

SEQ ID NO: 501256 - RNA, 21 nt, Human
ccagucuauuuucccuucuua

SEQ ID NO: 501257 - RNA, 20 nt, Human
cccagacagacagcugcagg

SEQ ID NO: 501258 - RNA, 18 nt, Human
ccccagaucccccucugc

SEQ ID NO: 501259 - RNA, 21 nt, Human
cccgcaccuccuacacuccca

SEQ ID NO: 501260 - RNA, 22 nt, Human
cccgcaccuccuacacucccaa

SEQ ID NO: 501261 - RNA, 24 nt, Human
cccggcccccccaccacauuucuc

SEQ ID NO: 501262 - RNA, 20 nt, Human
cccuaaauuccacuuaaucu

SEQ ID NO: 501263 - RNA, 24 nt, Human
ccggcccccccaccacauuucucu

SEQ ID NO: 501264 - RNA, 19 nt, Human
cggggagaggcugagucuu

SEQ ID NO: 501265 - RNA, 22 nt, Human
cucagaccuucuuagugaacuu

SEQ ID NO: 501266 - RNA, 25 nt, Human
cucauaaaacaaaucaagaccaaac

SEQ ID NO: 501267 - RNA, 23 nt, Human
cucccccuccccacucacagacc

SEQ ID NO: 501268 - RNA, 28 nt, Human
cucccucuaccccagaucccccucugcc

SEQ ID NO: 501269 - RNA, 20 nt, Human
cuccuugccuuuccagcucc

SEQ ID NO: 501270 - RNA, 20 nt, Human
cucugcuacuucuggugucu

SEQ ID NO: 501271 - RNA, 19 nt, Human
cucuggcuccauccgggga

SEQ ID NO: 501272 - RNA, 24 nt, Human
cuggaggcuggaguauccuggggu

SEQ ID NO: 501273 - RNA, 21 nt, Human
gaacuuggaauuaaagcagca

SEQ ID NO: 501274 - RNA, 22 nt, Human
gaauaaaucucccccuccccac

SEQ ID NO: 501275 - RNA, 22 nt, Human
gacaguguucugggucauagcc

SEQ ID NO: 501276 - RNA, 18 nt, Human
gagcaguuaacaccacua

SEQ ID NO: 501277 - RNA, 20 nt, Human
gcagauacaaaagaaaaaaa

SEQ ID NO: 501278 - RNA, 20 nt, Human
gcucugcuuuccgcgcuccc

SEQ ID NO: 501279 - RNA, 22 nt, Human
gcuuuccgcgcucccagggggu

SEQ ID NO: 501280 - RNA, 22 nt, Human
ggaaaaaaaaacacgagucaaa

SEQ ID NO: 501281 - RNA, 19 nt, Human
ggaaaccucaaggaugcuc

SEQ ID NO: 501282 - RNA, 20 nt, Human
ggacagagcugauucagggg

SEQ ID NO: 501283 - RNA, 22 nt, Human
ggcaaagaggaacagagaagaa

SEQ ID NO: 501284 - RNA, 19 nt, Human
ggccagagauugugggaga

SEQ ID NO: 501285 - RNA, 21 nt, Human
ggcuguggucuagggagccag

SEQ ID NO: 501286 - RNA, 20 nt, Human
gggaagaaauagaacuugga

SEQ ID NO: 501287 - RNA, 20 nt, Human
gggaugggauuggccuaaaa

SEQ ID NO: 501288 - RNA, 20 nt, Human
ggggagaccccauuccuggu

SEQ ID NO: 501289 - RNA, 20 nt, Human
ggggucccagauacccaggc

SEQ ID NO: 501290 - RNA, 20 nt, Human
gguccaggaaccaugaagcu

SEQ ID NO: 501291 - RNA, 19 nt, Human
guagcucuggcccccugcu

SEQ ID NO: 501292 - RNA, 23 nt, Human
gugggauugagaaugguaugugg

SEQ ID NO: 501293 - RNA, 23 nt, Human
uaaagcagcagcaaggcgaggag

SEQ ID NO: 501294 - RNA, 19 nt, Human
uaagccacaagcacuuucc

SEQ ID NO: 501295 - RNA, 26 nt, Human
uaagggaagaaauagaacuuggaaaa

SEQ ID NO: 501296 - RNA, 20 nt, Human
uaaugagccccuuaaauaga

SEQ ID NO: 501297 - RNA, 24 nt, Human
uaaugagccccuuaaauagaaauu

SEQ ID NO: 501298 - RNA, 18 nt, Human
uaggggguuggacacaag

SEQ ID NO: 501299 - RNA, 18 nt, Human
uauccagaagggauggga

SEQ ID NO: 501300 - RNA, 18 nt, Human
ucaaaaauagaagucacu

SEQ ID NO: 501301 - RNA, 21 nt, Human
uccacuacaaaaauacagagg

SEQ ID NO: 501302 - RNA, 24 nt, Human
ucccaaaccuuguuugaugccaag

SEQ ID NO: 501303 - RNA, 27 nt, Human
ucccagacucccagaggcuucagcucc

SEQ ID NO: 501304 - RNA, 20 nt, Human
ucccagaggcuucagcuccu

SEQ ID NO: 501305 - RNA, 18 nt, Human
ucuaggaaagauguaggg

SEQ ID NO: 501306 - RNA, 24 nt, Human
ucuccagagccugaucuggggucc

SEQ ID NO: 501307 - RNA, 20 nt, Human
ucucccccuccccacucaca

SEQ ID NO: 501308 - RNA, 20 nt, Human
ucucuggcuccauccgggga

SEQ ID NO: 501309 - RNA, 22 nt, Human
ugacaagaagcaaaaauauuug

SEQ ID NO: 501310 - RNA, 21 nt, Human
ugagaauaaaucucccccucc

SEQ ID NO: 501311 - RNA, 22 nt, Human
ugagaauaaaucucccccuccc

SEQ ID NO: 501312 - RNA, 18 nt, Human
ugagaaugcgauuucuag

SEQ ID NO: 501313 - RNA, 20 nt, Human
ugagaaugguauguggaucu

SEQ ID NO: 501314 - RNA, 23 nt, Human
ugauuuaacaucugguuauccag

SEQ ID NO: 501315 - RNA, 22 nt, Human
ugcauugcuauaacguaaaucc

SEQ ID NO: 501316 - RNA, 21 nt, Human
ugccaagaggaguagaacuuc

SEQ ID NO: 501317 - RNA, 19 nt, Human
ugccccggcccccccacca

SEQ ID NO: 501318 - RNA, 24 nt, Human
ugcccugccuuugagaaugccagc

SEQ ID NO: 501319 - RNA, 21 nt, Human
uggagguaaagggcaagcucc

SEQ ID NO: 501320 - RNA, 19 nt, Human
uggauuguuuuuguuucuu

SEQ ID NO: 501321 - RNA, 24 nt, Human
ugguauguggaucucuuuucuugg

SEQ ID NO: 501322 - RNA, 22 nt, Human
uggucuagggagccaggaaucu

SEQ ID NO: 501323 - RNA, 19 nt, Human
uguauaggaguuuaacugg

SEQ ID NO: 501324 - RNA, 21 nt, Human
uguuagggagagggguagggg

SEQ ID NO: 501325 - RNA, 22 nt, Human
uucaucugguucagcagaguca

SEQ ID NO: 501326 - RNA, 22 nt, Human
uuccacuuaaucuaagccacaa

SEQ ID NO: 501327 - RNA, 18 nt, Human
uuccuggucagccagcuu

SEQ ID NO: 501328 - RNA, 20 nt, Human
uugagaaugccagcaauuuc

SEQ ID NO: 501329 - RNA, 26 nt, Human
uuucccgcaccuccuacacucccaaa

SEQ ID NO: 501330 - RNA, 21 nt, Human
aggggccugggagcauagucc

SEQ ID NO: 501331 - RNA, 19 nt, Human
caagcucacagcccucugu

SEQ ID NO: 501332 - RNA, 18 nt, Human
cacccggggcuccggggc

SEQ ID NO: 501333 - RNA, 18 nt, Human
cagucuuagaaaaggggg

SEQ ID NO: 501334 - RNA, 22 nt, Human
cauccccaaggcaccccugggc

SEQ ID NO: 501335 - RNA, 19 nt, Human
ccauccaguucugucugca

SEQ ID NO: 501336 - RNA, 24 nt, Human
cccaccgccagcguuaccuggggc

SEQ ID NO: 501337 - RNA, 18 nt, Human
cuccuggcucugugugua

SEQ ID NO: 501338 - RNA, 18 nt, Human
cuccuggcucugugugua

SEQ ID NO: 501339 - RNA, 20 nt, Human
cucugucugggucucuuuca

SEQ ID NO: 501340 - RNA, 24 nt, Human
cucuguguguauuucccggguccu

SEQ ID NO: 501341 - RNA, 25 nt, Human
cugcuggggucuuggccggcucguc

SEQ ID NO: 501342 - RNA, 19 nt, Human
cugcuggggucuuggccuc

SEQ ID NO: 501343 - RNA, 21 nt, Human
cugcuggggucuuggccucac

SEQ ID NO: 501344 - RNA, 21 nt, Human
cuggaggcccacccaccgcca

SEQ ID NO: 501345 - RNA, 24 nt, Human
cuguaugugugucugcucuuugcu

SEQ ID NO: 501346 - RNA, 23 nt, Human
cugucugggucucuuucaggcug

SEQ ID NO: 501347 - RNA, 23 nt, Human
cugucugggucuguuucaggcug

SEQ ID NO: 501348 - RNA, 23 nt, Human
cugucugggucuguuucaggcug

SEQ ID NO: 501349 - RNA, 23 nt, Human
cugucugggucuguuucaggcug

SEQ ID NO: 501350 - RNA, 23 nt, Human
cugucugggucuguuucaggcug

SEQ ID NO: 501351 - RNA, 20 nt, Human
gagcauaguccuggcggggc

SEQ ID NO: 501352 - RNA, 21 nt, Human
gcgagggaggccgggaggggu

SEQ ID NO: 501353 - RNA, 21 nt, Human
gcgcacccggggcuccggggc

SEQ ID NO: 501354 - RNA, 20 nt, Human
ggcagucuuagaaaaggggg

SEQ ID NO: 501355 - RNA, 18 nt, Human
gggaggggucccugggcg

SEQ ID NO: 501356 - RNA, 27 nt, Human
uacuuuauuucggaucaggcagucuua

SEQ ID NO: 501357 - RNA, 19 nt, Human
ucacgucccauccccaggu

SEQ ID NO: 501358 - RNA, 20 nt, Human
uccaaagaccagggcgcacc

SEQ ID NO: 501359 - RNA, 18 nt, Human
ucccggguccuguggccc

SEQ ID NO: 501360 - RNA, 19 nt, Human
ucccggguccuguggcccu

SEQ ID NO: 501361 - RNA, 20 nt, Human
ucccggguccuguggcccuc

SEQ ID NO: 501362 - RNA, 21 nt, Human
ucucggcggcuuccuccuccc

SEQ ID NO: 501363 - RNA, 18 nt, Human
ucucugcuccaagcugga

SEQ ID NO: 501364 - RNA, 28 nt, Human
ucucugcuggggucuuggccggcucguc

SEQ ID NO: 501365 - RNA, 20 nt, Human
ucugccugucuguccagguc

SEQ ID NO: 501366 - RNA, 18 nt, Human
ucugggucuguuucaggc

SEQ ID NO: 501367 - RNA, 18 nt, Human
ucuguccaggucuguuuu

SEQ ID NO: 501368 - RNA, 20 nt, Human
ucugucugucuguccggguc

SEQ ID NO: 501369 - RNA, 20 nt, Human
ucugucugucuguccggguc

SEQ ID NO: 501370 - RNA, 20 nt, Human
ucugucugucuguccggguc

SEQ ID NO: 501371 - RNA, 20 nt, Human
ucugucugucuguccggguc

SEQ ID NO: 501372 - RNA, 19 nt, Human
ugccucccccauucuggca

SEQ ID NO: 501373 - RNA, 25 nt, Human
ugcuccaagcuggaggcccacccac

SEQ ID NO: 501374 - RNA, 27 nt, Human
ugcuccuggcucuguguguauuucccg

SEQ ID NO: 501375 - RNA, 24 nt, Human
ugcugcgcaucuguugugugugug

SEQ ID NO: 501376 - RNA, 19 nt, Human
ugggagcauaguccuggcg

SEQ ID NO: 501377 - RNA, 25 nt, Human
ugggcggggaguugcugcgcaucug

SEQ ID NO: 501378 - RNA, 19 nt, Human
uguaugugugucugcucuu

SEQ ID NO: 501379 - RNA, 19 nt, Human
uguccgggucuguuucagg

SEQ ID NO: 501380 - RNA, 19 nt, Human
uguccgggucuguuucagg

SEQ ID NO: 501381 - RNA, 19 nt, Human
uguccgggucuguuucagg

SEQ ID NO: 501382 - RNA, 19 nt, Human
uguccgggucuguuucagg

SEQ ID NO: 501383 - RNA, 19 nt, Human
uguccgggucuguuucagg

SEQ ID NO: 501384 - RNA, 22 nt, Human
ugucugccugucucucugucug

SEQ ID NO: 501385 - RNA, 22 nt, Human
ugucugggucuguuucaaucug

SEQ ID NO: 501386 - RNA, 22 nt, Human
ugucugggucuguuucaggcug

SEQ ID NO: 501387 - RNA, 22 nt, Human
ugucugggucuguuucaggcug

SEQ ID NO: 501388 - RNA, 26 nt, Human
ugucugggucuguuucaggcugucug

SEQ ID NO: 501389 - RNA, 22 nt, Human
ugugcgagggaggccgggaggg

SEQ ID NO: 501390 - RNA, 23 nt, Human
uguugugugugugcgucugucug

SEQ ID NO: 501391 - RNA, 23 nt, Human
uguuucaaucugugucugucugu

SEQ ID NO: 501392 - RNA, 27 nt, Human
uguuucagacuacgucugccugucugu

SEQ ID NO: 501393 - RNA, 20 nt, Human
uguuucaggcugugucuggg

SEQ ID NO: 501394 - RNA, 21 nt, Human
uucccggguccuguggcccuc

SEQ ID NO: 501395 - RNA, 23 nt, Human
uugucugggucuguuucaggcug

SEQ ID NO: 501396 - RNA, 23 nt, Human
uugugggccguggcugcuccaaa

SEQ ID NO: 501397 - RNA, 20 nt, Human
uugugugugugcgucugucu

SEQ ID NO: 501398 - RNA, 24 nt, Human
uuucaggcuguaugugugucugcu

SEQ ID NO: 501399 - RNA, 18 nt, Human
uuuuaggcugugucugcc

SEQ ID NO: 501400 - RNA, 22 nt, Human
acagggcacaggagcugcggcc

SEQ ID NO: 501401 - RNA, 25 nt, Human
caccgggccccaacguccgaagccc

SEQ ID NO: 501402 - RNA, 19 nt, Human
ccaccgggccccaacgucc

SEQ ID NO: 501403 - RNA, 20 nt, Human
ccccaacguccgaagcccag

SEQ ID NO: 501404 - RNA, 23 nt, Human
ccccaggcuccugcugagacccc

SEQ ID NO: 501405 - RNA, 23 nt, Human
cccccaggcuccugcugagaccc

SEQ ID NO: 501406 - RNA, 20 nt, Human
ccucgggcaccuauccaccc

SEQ ID NO: 501407 - RNA, 19 nt, Human
ccugcugagaccccccaca

SEQ ID NO: 501408 - RNA, 20 nt, Human
gcaccuauccacccucgugc

SEQ ID NO: 501409 - RNA, 21 nt, Human
gcccagacacgagccccagga

SEQ ID NO: 501410 - RNA, 18 nt, Human
gccccaacguccgaagcc

SEQ ID NO: 501411 - RNA, 23 nt, Human
gccccaggccagcuguaggccuc

SEQ ID NO: 501412 - RNA, 22 nt, Human
gggcacaggagcugcggccagc

SEQ ID NO: 501413 - RNA, 19 nt, Human
guccugacagggcacagga

SEQ ID NO: 501414 - RNA, 23 nt, Human
gugguguguuugagcccucaguc

SEQ ID NO: 501415 - RNA, 19 nt, Human
uauuuggacacagaugggg

SEQ ID NO: 501416 - RNA, 20 nt, Human
uugugguguguuugagcccu

SEQ ID NO: 501417 - RNA, 21 nt, Human
uuuuuuuuuuugugguguguu

SEQ ID NO: 501418 - RNA, 22 nt, Human
uuuuuuuuuuuuuuuguggugu

SEQ ID NO: 501419 - RNA, 19 nt, Human
uuuuuuuuuuuuuuuuugu

SEQ ID NO: 501420 - RNA, 21 nt, Human
uuuuuuuuuuuuuuuuugugg

SEQ ID NO: 501421 - RNA, 24 nt, Human
uuuuuuuuuuuuuuuuuuuuuggg

SEQ ID NO: 501422 - RNA, 23 nt, Human
aaaagaauaccaggaacacacaa

SEQ ID NO: 501423 - RNA, 28 nt, Human
aaacaagcaagcaaacaaaccggacccc

SEQ ID NO: 501424 - RNA, 21 nt, Human
aaacaagcaaguaaacaagca

SEQ ID NO: 501425 - RNA, 24 nt, Human
aagaaacuucauaaguguugcuaa

SEQ ID NO: 501426 - RNA, 24 nt, Human
aagaacacauacucaacuaccuuc

SEQ ID NO: 501427 - RNA, 24 nt, Human
aagcaaacaaaccagcaugugaca

SEQ ID NO: 501428 - RNA, 26 nt, Human
aagcaaacaaaccagcaugugacaga

SEQ ID NO: 501429 - RNA, 18 nt, Human
aagcaagcaaacaaacca

SEQ ID NO: 501430 - RNA, 20 nt, Human
aagcaaguaaacaagcaagg

SEQ ID NO: 501431 - RNA, 21 nt, Human
aagcuguggagagugguuugg

SEQ ID NO: 501432 - RNA, 24 nt, Human
aaguaaacaagcaagcaaacaaac

SEQ ID NO: 501433 - RNA, 24 nt, Human
agcaugugacagaaaacuggcuaa

SEQ ID NO: 501434 - RNA, 22 nt, Human
aggaggcagcuguggugaguga

SEQ ID NO: 501435 - RNA, 18 nt, Human
aggaguuuuaugacuuuc

SEQ ID NO: 501436 - RNA, 25 nt, Human
auucaguggcuugauuccugacauc

SEQ ID NO: 501437 - RNA, 27 nt, Human
caagagcaccacuggaaacuggagacc

SEQ ID NO: 501438 - RNA, 19 nt, Human
caagcaagcaaacaaacca

SEQ ID NO: 501439 - RNA, 23 nt, Human
caagcaaguaaacaagcaagcaa

SEQ ID NO: 501440 - RNA, 23 nt, Human
caaguaaacaagcaagcaaacaa

SEQ ID NO: 501441 - RNA, 23 nt, Human
caauccaguuuuggagccaaaaa

SEQ ID NO: 501442 - RNA, 22 nt, Human
caaugggcaauuuaaaacuggu

SEQ ID NO: 501443 - RNA, 24 nt, Human
cacaaaauauucuucuccucuuuc

SEQ ID NO: 501444 - RNA, 21 nt, Human
caccaggcucaggcagcucag

SEQ ID NO: 501445 - RNA, 19 nt, Human
caccauaaugggggccaau

SEQ ID NO: 501446 - RNA, 21 nt, Human
cagaagcaccauaaugggggc

SEQ ID NO: 501447 - RNA, 24 nt, Human
cagaagcaccauaaugggggccaa

SEQ ID NO: 501448 - RNA, 22 nt, Human
cagcacuagaagcuauuaagaa

SEQ ID NO: 501449 - RNA, 28 nt, Human
cauuccucuucaagagcaccacuggaaa

SEQ ID NO: 501450 - RNA, 20 nt, Human
cauuuccucuuuaagaggaa

SEQ ID NO: 501451 - RNA, 22 nt, Human
ccacuggaaacaucuuuggaau

SEQ ID NO: 501452 - RNA, 18 nt, Human
ccucuggugaccugacuu

SEQ ID NO: 501453 - RNA, 19 nt, Human
cugaagcugguccaugccu

SEQ ID NO: 501454 - RNA, 23 nt, Human
gaagaugugauucuuuuaaugcc

SEQ ID NO: 501455 - RNA, 20 nt, Human
gcaaacaaaccagcauguga

SEQ ID NO: 501456 - RNA, 21 nt, Human
gcucaggaggcagcuguggug

SEQ ID NO: 501457 - RNA, 20 nt, Human
gcuucaaaauaggaaaaaag

SEQ ID NO: 501458 - RNA, 22 nt, Human
gggcaguugaggaagccuuagg

SEQ ID NO: 501459 - RNA, 20 nt, Human
gguaauaauauuagugucuu

SEQ ID NO: 501460 - RNA, 21 nt, Human
gugagacauaaaucaacauga

SEQ ID NO: 501461 - RNA, 21 nt, Human
gugugcacauguguuuugaua

SEQ ID NO: 501462 - RNA, 18 nt, Human
guuugggaggggauuuug

SEQ ID NO: 501463 - RNA, 20 nt, Human
uaaaaagcuguggagagugg

SEQ ID NO: 501464 - RNA, 20 nt, Human
uaaaaagcuguggagagugg

SEQ ID NO: 501465 - RNA, 21 nt, Human
uaaaaagcuguggagaguggu

SEQ ID NO: 501466 - RNA, 19 nt, Human
uaaaagaauaccaggaaca

SEQ ID NO: 501467 - RNA, 23 nt, Human
uaaacaagcaaguaaacaagcaa

SEQ ID NO: 501468 - RNA, 21 nt, Human
uaaagaacacauacucaacua

SEQ ID NO: 501469 - RNA, 19 nt, Human
uaaucugugugcacaugug

SEQ ID NO: 501470 - RNA, 24 nt, Human
uaccaggaacacacaaaauauucu

SEQ ID NO: 501471 - RNA, 26 nt, Human
uagaagcuauuaagagauuuggggca

SEQ ID NO: 501472 - RNA, 20 nt, Human
uaggaaaaaaguagcuacca

SEQ ID NO: 501473 - RNA, 20 nt, Human
uauaaaagaauaccaggaac

SEQ ID NO: 501474 - RNA, 28 nt, Human
ucaaaauaggaaaaaaguagcuaccaca

SEQ ID NO: 501475 - RNA, 23 nt, Human
ucuuccaggaaauccaauaacag

SEQ ID NO: 501476 - RNA, 20 nt, Human
ucuuucuuuugcaauccagu

SEQ ID NO: 501477 - RNA, 23 nt, Human
ucuuucuuuugcaauccaguuuu

SEQ ID NO: 501478 - RNA, 20 nt, Human
ugaguaggaagcuccaucug

SEQ ID NO: 501479 - RNA, 18 nt, Human
uggagagugguuugggag

SEQ ID NO: 501480 - RNA, 18 nt, Human
uguggagagugguuuggg

SEQ ID NO: 501481 - RNA, 22 nt, Human
uuagauuguagcagcacuagaa

SEQ ID NO: 501482 - RNA, 24 nt, Human
uuagugucuucucuucugaagaug

SEQ ID NO: 501483 - RNA, 23 nt, Human
uuugcaccaggcucaggcagcuc

SEQ ID NO: 501484 - RNA, 20 nt, Human
aagagcucaugguauccacc

SEQ ID NO: 501485 - RNA, 27 nt, Human
aagaggccaaacuggguagugggcacc

SEQ ID NO: 501486 - RNA, 22 nt, Human
aagaggccaaacuggguauugc

SEQ ID NO: 501487 - RNA, 25 nt, Human
aaguacugaaggagaggaggccaga

SEQ ID NO: 501488 - RNA, 18 nt, Human
accaccuaauccuaagca

SEQ ID NO: 501489 - RNA, 23 nt, Human
agaaagaaaaaggucuguucuaa

SEQ ID NO: 501490 - RNA, 23 nt, Human
agaggccaaacuggguauugcag

SEQ ID NO: 501491 - RNA, 18 nt, Human
agcaugggguggagagga

SEQ ID NO: 501492 - RNA, 21 nt, Human
agcugugauggccccaccccu

SEQ ID NO: 501493 - RNA, 20 nt, Human
aggagaggaggccagagggg

SEQ ID NO: 501494 - RNA, 18 nt, Human
aggggcuguggggauggg

SEQ ID NO: 501495 - RNA, 22 nt, Human
aguacugaaggagaggaggcca

SEQ ID NO: 501496 - RNA, 23 nt, Human
caaaaauaaaccaagcuguccug

SEQ ID NO: 501497 - RNA, 21 nt, Human
caaaagaggccaaacugggua

SEQ ID NO: 501498 - RNA, 21 nt, Human
caaagcucuagcagccaccau

SEQ ID NO: 501499 - RNA, 18 nt, Human
caagggggcagaagucag

SEQ ID NO: 501500 - RNA, 21 nt, Human
cacggcccacgagccggcagg

SEQ ID NO: 501501 - RNA, 18 nt, Human
cagaacaggaacuggcag

SEQ ID NO: 501502 - RNA, 18 nt, Human
cagcccgcgggcgccgug

SEQ ID NO: 501503 - RNA, 18 nt, Human
caggagggagcugugaug

SEQ ID NO: 501504 - RNA, 20 nt, Human
caggagggcagcccaagcuc

SEQ ID NO: 501505 - RNA, 20 nt, Human
caggccccacgcgagaaaga

SEQ ID NO: 501506 - RNA, 22 nt, Human
ccaccccugugaggaccaccua

SEQ ID NO: 501507 - RNA, 19 nt, Human
ccccaggggccuugucugc

SEQ ID NO: 501508 - RNA, 23 nt, Human
ccccugugaggaccaccuaaucc

SEQ ID NO: 501509 - RNA, 18 nt, Human
ccgccaggugaagagcuc

SEQ ID NO: 501510 - RNA, 18 nt, Human
ccgccccagcccgcgggc

SEQ ID NO: 501511 - RNA, 18 nt, Human
ccggauccggauaugaag

SEQ ID NO: 501512 - RNA, 19 nt, Human
ccgggccuggguaccuggg

SEQ ID NO: 501513 - RNA, 21 nt, Human
ccugaguguccagcaggaggg

SEQ ID NO: 501514 - RNA, 18 nt, Human
ccuggguaccugggcugc

SEQ ID NO: 501515 - RNA, 23 nt, Human
cgcagaagggcaaaggcacggcc

SEQ ID NO: 501516 - RNA, 18 nt, Human
cggcccacgagccggcag

SEQ ID NO: 501517 - RNA, 22 nt, Human
cuaauccuaagcaggggccaaa

SEQ ID NO: 501518 - RNA, 20 nt, Human
cuguggggauggguggggaa

SEQ ID NO: 501519 - RNA, 18 nt, Human
cuucagggcuacuuuuua

SEQ ID NO: 501520 - RNA, 22 nt, Human
cuucagggcuacuuuuuacccc

SEQ ID NO: 501521 - RNA, 23 nt, Human
cuuuacccaggcuggggaccugc

SEQ ID NO: 501522 - RNA, 23 nt, Human
gagggcagcccaagcucuggggg

SEQ ID NO: 501523 - RNA, 18 nt, Human
gaugcaauuccagaagag

SEQ ID NO: 501524 - RNA, 20 nt, Human
gcaggggcuguggggauggg

SEQ ID NO: 501525 - RNA, 23 nt, Human
gccacggagaaggaagaagcgac

SEQ ID NO: 501526 - RNA, 19 nt, Human
gcgagaaagaaaaaggucu

SEQ ID NO: 501527 - RNA, 23 nt, Human
gcgcugggaucugcguuauuaca

SEQ ID NO: 501528 - RNA, 21 nt, Human
gcguggagaggcuucacugaa

SEQ ID NO: 501529 - RNA, 24 nt, Human
ggaggagguccuacaggugguggc

SEQ ID NO: 501530 - RNA, 24 nt, Human
ggagggcagcccaagcucuggggg

SEQ ID NO: 501531 - RNA, 19 nt, Human
ggccuugucugcccgggcc

SEQ ID NO: 501532 - RNA, 20 nt, Human
ggguauugcaggggcugugg

SEQ ID NO: 501533 - RNA, 18 nt, Human
ggguguggggauguggug

SEQ ID NO: 501534 - RNA, 21 nt, Human
guccugaguguccagcaggag

SEQ ID NO: 501535 - RNA, 21 nt, Human
uacaagcaaaagaggccaaac

SEQ ID NO: 501536 - RNA, 18 nt, Human
uacccaggcuggggaccu

SEQ ID NO: 501537 - RNA, 21 nt, Human
uaccccacucucaaaaauaaa

SEQ ID NO: 501538 - RNA, 24 nt, Human
uagcagccaccauuaaggaaaaac

SEQ ID NO: 501539 - RNA, 18 nt, Human
uagcaugggguggagagg

SEQ ID NO: 501540 - RNA, 26 nt, Human
uaggccacggagaaggaagaagcgac

SEQ ID NO: 501541 - RNA, 21 nt, Human
uccggauaugaagggaaggga

SEQ ID NO: 501542 - RNA, 19 nt, Human
uccugagaugaauaaauaa

SEQ ID NO: 501543 - RNA, 20 nt, Human
ucguaggccacggagaagga

SEQ ID NO: 501544 - RNA, 21 nt, Human
ugaacacagaacaggaacugg

SEQ ID NO: 501545 - RNA, 21 nt, Human
ugaaggagaggaggccagagg

SEQ ID NO: 501546 - RNA, 18 nt, Human
ugaagggaagggaucaga

SEQ ID NO: 501547 - RNA, 22 nt, Human
ugagaugaauaaauaaguggca

SEQ ID NO: 501548 - RNA, 23 nt, Human
ugaggaccaccuaauccuaagca

SEQ ID NO: 501549 - RNA, 21 nt, Human
uggcaaugggguguggggaug

SEQ ID NO: 501550 - RNA, 21 nt, Human
ugggaggagguccuacaggug

SEQ ID NO: 501551 - RNA, 21 nt, Human
ugggcugcucuguaaggcaga

SEQ ID NO: 501552 - RNA, 22 nt, Human
uggggauggguggggaaaggcg

SEQ ID NO: 501553 - RNA, 24 nt, Human
ugggguggagaggaaaguggccuc

SEQ ID NO: 501554 - RNA, 20 nt, Human
ugggguguggggauguggug

SEQ ID NO: 501555 - RNA, 20 nt, Human
ugucuugggggagguguccg

SEQ ID NO: 501556 - RNA, 25 nt, Human
uuaaggaaaaacuuuugaaauucac

SEQ ID NO: 501557 - RNA, 24 nt, Human
uuuacccaggcuggggaccugcag

SEQ ID NO: 501558 - RNA, 19 nt, Human
aacccgccgccgcgaccuc

SEQ ID NO: 501559 - RNA, 22 nt, Human
accucuccccaggcuggggugg

SEQ ID NO: 501560 - RNA, 23 nt, Human
agagcgcaggaagcaaacccgcc

SEQ ID NO: 501561 - RNA, 22 nt, Human
agcgagcgggugggcgaggggc

SEQ ID NO: 501562 - RNA, 20 nt, Human
agggagcggagggcagcuca

SEQ ID NO: 501563 - RNA, 19 nt, Human
agggcagcucaucucagag

SEQ ID NO: 501564 - RNA, 27 nt, Human
caacuccccccucccccgggcgcgccc

SEQ ID NO: 501565 - RNA, 20 nt, Human
cagacggggcacagccgggc

SEQ ID NO: 501566 - RNA, 19 nt, Human
cagcccccaacuccccccu

SEQ ID NO: 501567 - RNA, 23 nt, Human
caguaaacaguccuauuguacaa

SEQ ID NO: 501568 - RNA, 22 nt, Human
caucucagagcgcaggaagcaa

SEQ ID NO: 501569 - RNA, 22 nt, Human
cccaacuccccccucccccggg

SEQ ID NO: 501570 - RNA, 24 nt, Human
ccccaacuccccccucccccgggc

SEQ ID NO: 501571 - RNA, 21 nt, Human
cccccaacuccccccuccccc

SEQ ID NO: 501572 - RNA, 22 nt, Human
cccccaacuccccccucccccc

SEQ ID NO: 501573 - RNA, 19 nt, Human
cccccgggcgcgccacccc

SEQ ID NO: 501574 - RNA, 20 nt, Human
cccccgggcgcgccaccccg

SEQ ID NO: 501575 - RNA, 22 nt, Human
cccccgggcgcgccaccccgga

SEQ ID NO: 501576 - RNA, 21 nt, Human
cccgccgccgcgaccucuccc

SEQ ID NO: 501577 - RNA, 21 nt, Human
cgccgccgcgaccucucccca

SEQ ID NO: 501578 - RNA, 18 nt, Human
cggagggagcggagggca

SEQ ID NO: 501579 - RNA, 18 nt, Human
cugggaagcuauccagcc

SEQ ID NO: 501580 - RNA, 18 nt, Human
gcggagggcagcucaucu

SEQ ID NO: 501581 - RNA, 18 nt, Human
ggacguggguggagggag

SEQ ID NO: 501582 - RNA, 22 nt, Human
ggaggugggcaguaaacagucc

SEQ ID NO: 501583 - RNA, 20 nt, Human
gggcagcgagcgggugggcg

SEQ ID NO: 501584 - RNA, 19 nt, Human
gggcaguaaacaguccuau

SEQ ID NO: 501585 - RNA, 23 nt, Human
gggccgggcagcgagcggguggg

SEQ ID NO: 501586 - RNA, 21 nt, Human
ggggcucugagggugcuggga

SEQ ID NO: 501587 - RNA, 26 nt, Human
ggggugggcuggcaggcggagguggg

SEQ ID NO: 501588 - RNA, 20 nt, Human
ggugggcuggcaggcggagg

SEQ ID NO: 501589 - RNA, 21 nt, Human
gucaaccccgguucccuggcc

SEQ ID NO: 501590 - RNA, 19 nt, Human
uauuguacaaauauauagc

SEQ ID NO: 501591 - RNA, 19 nt, Human
uccccaggcuggggugggc

SEQ ID NO: 501592 - RNA, 21 nt, Human
uccccaggcuggggugggcug

SEQ ID NO: 501593 - RNA, 22 nt, Human
uccccaggcuggggugggcugg

SEQ ID NO: 501594 - RNA, 19 nt, Human
uccccccucccccgggcgc

SEQ ID NO: 501595 - RNA, 20 nt, Human
ucccccgggcgcgccacccc

SEQ ID NO: 501596 - RNA, 19 nt, Human
ucccuggcacggggacagg

SEQ ID NO: 501597 - RNA, 20 nt, Human
ugcugggaagcuauccagcc

SEQ ID NO: 501598 - RNA, 18 nt, Human
uggcccaggcgguguuga

SEQ ID NO: 501599 - RNA, 18 nt, Human
ugggagggccuagcugug

SEQ ID NO: 501600 - RNA, 18 nt, Human
uggggugggcuggcaggc

SEQ ID NO: 501601 - RNA, 23 nt, Human
uguggcccaggcgguguugagca

SEQ ID NO: 501602 - RNA, 19 nt, Human
uuuuuuuuuuuugcggggu

SEQ ID NO: 501603 - RNA, 18 nt, Human
uuuuuuuuuuuuugcggg

SEQ ID NO: 501604 - RNA, 18 nt, Human
aagaaaauaagguuuuuc

SEQ ID NO: 501605 - RNA, 18 nt, Human
aauaguugaagacagacu

SEQ ID NO: 501606 - RNA, 23 nt, Human
acagagcuccaauuucaugaaac

SEQ ID NO: 501607 - RNA, 23 nt, Human
accaguaaaucuucccaguucug

SEQ ID NO: 501608 - RNA, 20 nt, Human
accauaguuuucagcaaagc

SEQ ID NO: 501609 - RNA, 18 nt, Human
aguucugaaaaucugaag

SEQ ID NO: 501610 - RNA, 27 nt, Human
cagcaacacucuagcgaagccacgcca

SEQ ID NO: 501611 - RNA, 18 nt, Human
cagcucuuacaaaagaaa

SEQ ID NO: 501612 - RNA, 18 nt, Human
caggaaauaaacagcaac

SEQ ID NO: 501613 - RNA, 18 nt, Human
cccacaccuauauagggu

SEQ ID NO: 501614 - RNA, 24 nt, Human
cccacaccuauauaggguuaacca

SEQ ID NO: 501615 - RNA, 21 nt, Human
cugaaaaucugaagcaacuga

SEQ ID NO: 501616 - RNA, 23 nt, Human
gcagugacaaaaauuucccacac

SEQ ID NO: 501617 - RNA, 23 nt, Human
uaaaauaagacuagaaaauaauu

SEQ ID NO: 501618 - RNA, 23 nt, Human
uaaacagcaacacucuagcgaag

SEQ ID NO: 501619 - RNA, 23 nt, Human
uagcgaagccacgccaaccaaac

SEQ ID NO: 501620 - RNA, 25 nt, Human
uauacagagcuccaauuucaugaaa

SEQ ID NO: 501621 - RNA, 20 nt, Human
uaugcagugacaaaaauuuc

SEQ ID NO: 501622 - RNA, 21 nt, Human
uauuuugucuuuuucaguuua

SEQ ID NO: 501623 - RNA, 26 nt, Human
uguaaaauaagacuagaaaauaauuu

SEQ ID NO: 501624 - RNA, 21 nt, Human
uguuugcucccagcucuuaca

SEQ ID NO: 501625 - RNA, 23 nt, Human
uucccacaccuauauaggguuaa

SEQ ID NO: 501626 - RNA, 18 nt, Human
uucugaaaaucugaagca

SEQ ID NO: 501627 - RNA, 20 nt, Human
aaagaaccauucagcaauaa

SEQ ID NO: 501628 - RNA, 19 nt, Human
aaauucaguguauuuauuu

SEQ ID NO: 501629 - RNA, 21 nt, Human
aacuaaagaaccauucagcaa

SEQ ID NO: 501630 - RNA, 20 nt, Human
aagacuaguuacacuguugc

SEQ ID NO: 501631 - RNA, 23 nt, Human
aguaauauguuuuucuaaaauuc

SEQ ID NO: 501632 - RNA, 21 nt, Human
caaaaugaguaacaaucaaau

SEQ ID NO: 501633 - RNA, 25 nt, Human
caacagcagcagcagcagcaggcug

SEQ ID NO: 501634 - RNA, 21 nt, Human
cagcagcagcagcagcaggcu

SEQ ID NO: 501635 - RNA, 22 nt, Human
cagcagcagcagcagcaggcug

SEQ ID NO: 501636 - RNA, 23 nt, Human
cagcagcagcaggcugaaaacaa

SEQ ID NO: 501637 - RNA, 23 nt, Human
cagcaggcugaaaacaacaacac

SEQ ID NO: 501638 - RNA, 22 nt, Human
caggcugaaaacaacaacacua

SEQ ID NO: 501639 - RNA, 25 nt, Human
caggcugaaaacaacaacacuacaa

SEQ ID NO: 501640 - RNA, 18 nt, Human
cauucagcaauaauggcu

SEQ ID NO: 501641 - RNA, 25 nt, Human
ccaacuggucuuugauuugggucua

SEQ ID NO: 501642 - RNA, 20 nt, Human
ccuugaaaauucaaggcaga

SEQ ID NO: 501643 - RNA, 19 nt, Human
cuguaaguugacaucuaug

SEQ ID NO: 501644 - RNA, 21 nt, Human
gaaaacaacaacacuacaacu

SEQ ID NO: 501645 - RNA, 21 nt, Human
gcaggcugaaaacaacaacac

SEQ ID NO: 501646 - RNA, 27 nt, Human
uaaaaucauuuagaaagccagaaauuc

SEQ ID NO: 501647 - RNA, 22 nt, Human
uacaugcaacauggacaaacac

SEQ ID NO: 501648 - RNA, 22 nt, Human
ucaaggcagaaaguaaaaucau

SEQ ID NO: 501649 - RNA, 23 nt, Human
ugagagcaaaaugaguaacaauc

SEQ ID NO: 501650 - RNA, 23 nt, Human
ugaggggagaaauguuaacucug

SEQ ID NO: 501651 - RNA, 21 nt, Human
ugcaagaacaaauaaaaaaua

SEQ ID NO: 501652 - RNA, 22 nt, Human
uggucacauauuaaagaaacug

SEQ ID NO: 501653 - RNA, 21 nt, Human
uguucugguuuucaugacaau

SEQ ID NO: 501654 - RNA, 18 nt, Human
uuaaagaaacuggcacuu

SEQ ID NO: 501655 - RNA, 24 nt, Human
uuaauaacuaaagaaccauucagc

SEQ ID NO: 501656 - RNA, 20 nt, Human
uucucagagcagggauuuau

SEQ ID NO: 501657 - RNA, 23 nt, Human
aaaaaacccaaaacaccuaaauu

SEQ ID NO: 501658 - RNA, 22 nt, Human
aaaaaaggaaagagacugggua

SEQ ID NO: 501659 - RNA, 22 nt, Human
aaagagagagaaacagcgagag

SEQ ID NO: 501660 - RNA, 18 nt, Human
aaagagagagagagagca

SEQ ID NO: 501661 - RNA, 22 nt, Human
aaagagcagcucaaauuuugau

SEQ ID NO: 501662 - RNA, 25 nt, Human
aaaguaaagaauuaucccagguucu

SEQ ID NO: 501663 - RNA, 18 nt, Human
aaccacacacaacccccc

SEQ ID NO: 501664 - RNA, 24 nt, Human
aaccacacacaaccccccacccca

SEQ ID NO: 501665 - RNA, 27 nt, Human
aaccacacacaaccccccaccccaaaa

SEQ ID NO: 501666 - RNA, 21 nt, Human
aaccccccaccccaaaacuuu

SEQ ID NO: 501667 - RNA, 18 nt, Human
aaggauggauaggaaagg

SEQ ID NO: 501668 - RNA, 23 nt, Human
acacaaccccccaccccaaaacu

SEQ ID NO: 501669 - RNA, 18 nt, Human
accacacacaacccccca

SEQ ID NO: 501670 - RNA, 27 nt, Human
accccccaccccaaaacuuuaaaaauc

SEQ ID NO: 501671 - RNA, 23 nt, Human
agaaacagcgagagcgagcaagc

SEQ ID NO: 501672 - RNA, 20 nt, Human
agaaaccacacacaaccccc

SEQ ID NO: 501673 - RNA, 21 nt, Human
agagaaagagagagagagagc

SEQ ID NO: 501674 - RNA, 27 nt, Human
agagccucuccugagccaucucaauac

SEQ ID NO: 501675 - RNA, 22 nt, Human
agcaaaaaaggaaagagacugg

SEQ ID NO: 501676 - RNA, 20 nt, Human
agcaaaaugugagauggugg

SEQ ID NO: 501677 - RNA, 22 nt, Human
agcaagugagcaaggaauacaa

SEQ ID NO: 501678 - RNA, 21 nt, Human
agcgagacagacagagagaga

SEQ ID NO: 501679 - RNA, 19 nt, Human
aggacacugaagucucugg

SEQ ID NO: 501680 - RNA, 24 nt, Human
agguagaguugaaguaaauguucu

SEQ ID NO: 501681 - RNA, 21 nt, Human
auccagggggaacuggugcca

SEQ ID NO: 501682 - RNA, 24 nt, Human
caaaagccaaagagcagcucaaau

SEQ ID NO: 501683 - RNA, 21 nt, Human
caaaugcagaugauuaccucg

SEQ ID NO: 501684 - RNA, 24 nt, Human
caagaaugccacguucuacaaccu

SEQ ID NO: 501685 - RNA, 25 nt, Human
cacaaccccccaccccaaaacuuua

SEQ ID NO: 501686 - RNA, 18 nt, Human
cacacaaccccccacccc

SEQ ID NO: 501687 - RNA, 20 nt, Human
cacacacaaccccccacccc

SEQ ID NO: 501688 - RNA, 24 nt, Human
cacacacaaccccccaccccaaaa

SEQ ID NO: 501689 - RNA, 26 nt, Human
caccccaaaacuuuaaaaaucaaaga

SEQ ID NO: 501690 - RNA, 18 nt, Human
cagcaaaaaaggaaagag

SEQ ID NO: 501691 - RNA, 24 nt, Human
ccacacacaaccccccaccccaaa

SEQ ID NO: 501692 - RNA, 23 nt, Human
cccaaaacuuuaaaaaucaaaga

SEQ ID NO: 501693 - RNA, 22 nt, Human
cccuuauagcaaaagccaaaga

SEQ ID NO: 501694 - RNA, 24 nt, Human
ccuaaauuaaaauucaaaagaaag

SEQ ID NO: 501695 - RNA, 23 nt, Human
ccucuccugagccaucucaauac

SEQ ID NO: 501696 - RNA, 19 nt, Human
cgagacagacagagagaga

SEQ ID NO: 501697 - RNA, 24 nt, Human
cucaaagagagagaaacagcgaga

SEQ ID NO: 501698 - RNA, 19 nt, Human
gaacacuauucucuuuaaa

SEQ ID NO: 501699 - RNA, 20 nt, Human
gaaugccacguucuacaacc

SEQ ID NO: 501700 - RNA, 23 nt, Human
gacagcuuugcaguagccaaaug

SEQ ID NO: 501701 - RNA, 20 nt, Human
gagagagaaagagagagaga

SEQ ID NO: 501702 - RNA, 20 nt, Human
gagagagagagagaaagaga

SEQ ID NO: 501703 - RNA, 24 nt, Human
gcaaaagccaaagagcagcucaaa

SEQ ID NO: 501704 - RNA, 19 nt, Human
gccacguucuacaaccugc

SEQ ID NO: 501705 - RNA, 25 nt, Human
ggaaaggaaucuuucaggacacuga

SEQ ID NO: 501706 - RNA, 24 nt, Human
guaaugauccucuccauauucucu

SEQ ID NO: 501707 - RNA, 25 nt, Human
guucuuucucucuuccgaccaguaa

SEQ ID NO: 501708 - RNA, 19 nt, Human
uaaaggaaaaaaacccaaa

SEQ ID NO: 501709 - RNA, 21 nt, Human
uaaaggaaaaaaacccaaaac

SEQ ID NO: 501710 - RNA, 23 nt, Human
uaaaggaaaaaaacccaaaacac

SEQ ID NO: 501711 - RNA, 24 nt, Human
uagcaaaagccaaagagcagcuca

SEQ ID NO: 501712 - RNA, 19 nt, Human
ucaaaagaaagaaaccaca

SEQ ID NO: 501713 - RNA, 21 nt, Human
ucaauguaaugauccucucca

SEQ ID NO: 501714 - RNA, 18 nt, Human
ucagcaaaaaaggaaaga

SEQ ID NO: 501715 - RNA, 21 nt, Human
ucagcaaaaaaggaaagagac

SEQ ID NO: 501716 - RNA, 24 nt, Human
ucagcaaaaaaggaaagagacugg

SEQ ID NO: 501717 - RNA, 20 nt, Human
uccaaacaaaugccucaaag

SEQ ID NO: 501718 - RNA, 21 nt, Human
ucccagguucuugggcaucuc

SEQ ID NO: 501719 - RNA, 25 nt, Human
ucccuuauagcaaaagccaaagagc

SEQ ID NO: 501720 - RNA, 23 nt, Human
ugagcaaggaauacaacggacag

SEQ ID NO: 501721 - RNA, 24 nt, Human
ugcccaagaaugccacguucuaca

SEQ ID NO: 501722 - RNA, 23 nt, Human
uggaaggauggauaggaaaggaa

SEQ ID NO: 501723 - RNA, 24 nt, Human
uggggaaaaaguguucacuuaaaa

SEQ ID NO: 501724 - RNA, 23 nt, Human
uguaaugauccucuccauauucu

SEQ ID NO: 501725 - RNA, 19 nt, Human
uguucaagaugcucaaugg

SEQ ID NO: 501726 - RNA, 20 nt, Human
uucaaaagaaagaaaccaca

SEQ ID NO: 501727 - RNA, 22 nt, Human
uuuaaaggaaaaaaacccaaaa

SEQ ID NO: 501728 - RNA, 23 nt, Human
uuucccuuauagcaaaagccaaa

SEQ ID NO: 501729 - RNA, 19 nt, Human
uuugcaguagccaaaugca

SEQ ID NO: 501730 - RNA, 18 nt, Human
uuuuuuuuuuuuuuuuug

SEQ ID NO: 501731 - RNA, 24 nt, Human
uuuuuuuuuuuuuuuuuugaauuu

SEQ ID NO: 501732 - RNA, 21 nt, Human
aaacaaaaccauuuacacgcg

SEQ ID NO: 501733 - RNA, 19 nt, Human
aaaccaaacuacugcgcaa

SEQ ID NO: 501734 - RNA, 22 nt, Human
aaccaaacuacugcgcaaacca

SEQ ID NO: 501735 - RNA, 24 nt, Human
aacuacugcgcaaaccaaacgugc

SEQ ID NO: 501736 - RNA, 23 nt, Human
aagugcagcgucuccuaaggacc

SEQ ID NO: 501737 - RNA, 22 nt, Human
agaaaagcccgccgaggccaag

SEQ ID NO: 501738 - RNA, 22 nt, Human
agacaaggaggggaggggaagg

SEQ ID NO: 501739 - RNA, 21 nt, Human
agagaggccugugagcccagc

SEQ ID NO: 501740 - RNA, 20 nt, Human
agaguuggcucgaagcacag

SEQ ID NO: 501741 - RNA, 22 nt, Human
agcccagcccccuccaccaccc

SEQ ID NO: 501742 - RNA, 19 nt, Human
agccucgagccccgcccag

SEQ ID NO: 501743 - RNA, 20 nt, Human
agccucgagccccgcccagc

SEQ ID NO: 501744 - RNA, 18 nt, Human
aggaagaaguuauaggaa

SEQ ID NO: 501745 - RNA, 19 nt, Human
aggaagggcuggccagggc

SEQ ID NO: 501746 - RNA, 24 nt, Human
aggagcgcugagucucuguccagc

SEQ ID NO: 501747 - RNA, 21 nt, Human
aggcaaggggagugcugggag

SEQ ID NO: 501748 - RNA, 23 nt, Human
aggcaaggggagugcugggagug

SEQ ID NO: 501749 - RNA, 20 nt, Human
aggcggggaaaagagaggcc

SEQ ID NO: 501750 - RNA, 23 nt, Human
aggggaggggaaggggaaagggc

SEQ ID NO: 501751 - RNA, 23 nt, Human
auagggagggcuccguggguccc

SEQ ID NO: 501752 - RNA, 22 nt, Human
augcgugugugugugugugugu

SEQ ID NO: 501753 - RNA, 22 nt, Human
augcgugugugugugugugugu

SEQ ID NO: 501754 - RNA, 21 nt, Human
caaacgugcaaaacaaaacca

SEQ ID NO: 501755 - RNA, 19 nt, Human
caccaccccugcccugugc

SEQ ID NO: 501756 - RNA, 22 nt, Human
caccaccccugcccugugcugu

SEQ ID NO: 501757 - RNA, 24 nt, Human
caccacggggccuaaggggugggg

SEQ ID NO: 501758 - RNA, 21 nt, Human
caccccugcccugugcugucu

SEQ ID NO: 501759 - RNA, 24 nt, Human
cacuaaagucugggcuuucccaaa

SEQ ID NO: 501760 - RNA, 22 nt, Human
cagccacccccaucccugcccc

SEQ ID NO: 501761 - RNA, 21 nt, Human
cagcccagaagacugcaggcg

SEQ ID NO: 501762 - RNA, 22 nt, Human
cagcccagccucuccugccccu

SEQ ID NO: 501763 - RNA, 24 nt, Human
cagcccccuccaccaccccugccc

SEQ ID NO: 501764 - RNA, 18 nt, Human
cagccucgagccccgccc

SEQ ID NO: 501765 - RNA, 18 nt, Human
cagcuacccuucugggcc

SEQ ID NO: 501766 - RNA, 19 nt, Human
caggagaagcuggcgaggg

SEQ ID NO: 501767 - RNA, 20 nt, Human
caggaugcacaaacaaguca

SEQ ID NO: 501768 - RNA, 21 nt, Human
cagggcucuaugcauugggcu

SEQ ID NO: 501769 - RNA, 28 nt, Human
caucccugccccuacacagggccagagg

SEQ ID NO: 501770 - RNA, 23 nt, Human
caugcgugugugugugugugugu

SEQ ID NO: 501771 - RNA, 20 nt, Human
ccaaggcagaaaggacuaca

SEQ ID NO: 501772 - RNA, 24 nt, Human
ccaaggcagaaaggacuacagcag

SEQ ID NO: 501773 - RNA, 23 nt, Human
ccaccccugcccugugcugucug

SEQ ID NO: 501774 - RNA, 20 nt, Human
ccagcccagccucuccugcc

SEQ ID NO: 501775 - RNA, 21 nt, Human
ccagcccccuccaccaccccu

SEQ ID NO: 501776 - RNA, 20 nt, Human
ccagggccucccgcagccca

SEQ ID NO: 501777 - RNA, 28 nt, Human
ccaugcgugugugugugugugugugugu

SEQ ID NO: 501778 - RNA, 19 nt, Human
cccagccacccccaucccu

SEQ ID NO: 501779 - RNA, 19 nt, Human
cccccuccaccaccccugc

SEQ ID NO: 501780 - RNA, 21 nt, Human
cccccuccaccaccccugccc

SEQ ID NO: 501781 - RNA, 19 nt, Human
ccccgcccagcuacccuuc

SEQ ID NO: 501782 - RNA, 21 nt, Human
ccccuacacagggccagaggu

SEQ ID NO: 501783 - RNA, 18 nt, Human
cccggggccccccucggg

SEQ ID NO: 501784 - RNA, 19 nt, Human
ccgcagcccagaagacugc

SEQ ID NO: 501785 - RNA, 18 nt, Human
ccgcggcgccggagcugc

SEQ ID NO: 501786 - RNA, 23 nt, Human
ccgcgucgacccucucucagcag

SEQ ID NO: 501787 - RNA, 20 nt, Human
ccggggccccccucgggugg

SEQ ID NO: 501788 - RNA, 24 nt, Human
ccuccgagaugcugcggccgcggg

SEQ ID NO: 501789 - RNA, 20 nt, Human
ccugcagcuucggcuggaga

SEQ ID NO: 501790 - RNA, 18 nt, Human
ccugccccuacacagggc

SEQ ID NO: 501791 - RNA, 19 nt, Human
ccugccccugcagcuucgg

SEQ ID NO: 501792 - RNA, 28 nt, Human
ccuggcaccagccucgagccccgcccag

SEQ ID NO: 501793 - RNA, 20 nt, Human
ccugggcauggcugggaagc

SEQ ID NO: 501794 - RNA, 21 nt, Human
cgcaaaccaaacgugcaaaac

SEQ ID NO: 501795 - RNA, 23 nt, Human
cgcaaaccaaacgugcaaaacaa

SEQ ID NO: 501796 - RNA, 24 nt, Human
cgccgaggccaaggcagaaaggac

SEQ ID NO: 501797 - RNA, 22 nt, Human
cgccucagcgcgcccagcgcgg

SEQ ID NO: 501798 - RNA, 23 nt, Human
cggagcugcgggugcucggggcg

SEQ ID NO: 501799 - RNA, 24 nt, Human
cggaggcaggagugagaggaaggg

SEQ ID NO: 501800 - RNA, 19 nt, Human
cggccgcgggggcccgugg

SEQ ID NO: 501801 - RNA, 23 nt, Human
cggccgcgucgacccucucucag

SEQ ID NO: 501802 - RNA, 23 nt, Human
cggguggugugccacccagccca

SEQ ID NO: 501803 - RNA, 18 nt, Human
cggugcguccucacucgg

SEQ ID NO: 501804 - RNA, 18 nt, Human
cucaaagugccuguuaga

SEQ ID NO: 501805 - RNA, 22 nt, Human
cuccaccaccccugcccugugc

SEQ ID NO: 501806 - RNA, 23 nt, Human
cuccuaaggaccacaucuauucc

SEQ ID NO: 501807 - RNA, 25 nt, Human
cugcacgcgcgcucgcucgggggcc

SEQ ID NO: 501808 - RNA, 23 nt, Human
cugccccugcagcuucggcugga

SEQ ID NO: 501809 - RNA, 24 nt, Human
cuggcaccagccucgagccccgcc

SEQ ID NO: 501810 - RNA, 19 nt, Human
gaagacaggggaaggcaag

SEQ ID NO: 501811 - RNA, 21 nt, Human
gagaggggaaaggacaccugc

SEQ ID NO: 501812 - RNA, 19 nt, Human
gagcccagcccccuccacc

SEQ ID NO: 501813 - RNA, 19 nt, Human
gagccccgcccagcuaccc

SEQ ID NO: 501814 - RNA, 24 nt, Human
gagucucuguccagcaggaagaag

SEQ ID NO: 501815 - RNA, 22 nt, Human
gcccagcccccuccaccacccc

SEQ ID NO: 501816 - RNA, 21 nt, Human
gccccagaaaagcccgccgag

SEQ ID NO: 501817 - RNA, 24 nt, Human
gccugugagcccagcccccuccac

SEQ ID NO: 501818 - RNA, 23 nt, Human
gcgcaaaccaaacgugcaaaaca

SEQ ID NO: 501819 - RNA, 25 nt, Human
gcgcucgcucgggggccgccucagc

SEQ ID NO: 501820 - RNA, 18 nt, Human
gcgggcugguggcggcgg

SEQ ID NO: 501821 - RNA, 21 nt, Human
gcuauucuaugcuagugacac

SEQ ID NO: 501822 - RNA, 18 nt, Human
ggaaggcaaggggagugc

SEQ ID NO: 501823 - RNA, 19 nt, Human
ggagugagaggaagggcug

SEQ ID NO: 501824 - RNA, 21 nt, Human
ggagugcugggagugaucagg

SEQ ID NO: 501825 - RNA, 22 nt, Human
ggccccagaaaagcccgccgag

SEQ ID NO: 501826 - RNA, 21 nt, Human
gggggcccguggcucgguccg

SEQ ID NO: 501827 - RNA, 20 nt, Human
gugugggcggggcgcaggag

SEQ ID NO: 501828 - RNA, 21 nt, Human
gugugugugugugugugugug

SEQ ID NO: 501829 - RNA, 21 nt, Human
gugugugugugugugugugug

SEQ ID NO: 501830 - RNA, 21 nt, Human
gugugugugugugugugugug

SEQ ID NO: 501831 - RNA, 20 nt, Human
uacacagggccagagguggg

SEQ ID NO: 501832 - RNA, 22 nt, Human
uagaguuggcucgaagcacagu

SEQ ID NO: 501833 - RNA, 20 nt, Human
ucacucggggggcuuggcaa

SEQ ID NO: 501834 - RNA, 20 nt, Human
ucccagccacccccaucccc

SEQ ID NO: 501835 - RNA, 20 nt, Human
ucccggggccccccucgggu

SEQ ID NO: 501836 - RNA, 18 nt, Human
uccgagaugcugcggccg

SEQ ID NO: 501837 - RNA, 19 nt, Human
uccgagaugcugcggccgc

SEQ ID NO: 501838 - RNA, 23 nt, Human
uccugggccccagaaaagcccgc

SEQ ID NO: 501839 - RNA, 19 nt, Human
ucggggcggcggcggcugc

SEQ ID NO: 501840 - RNA, 24 nt, Human
ucucuggggcuagcaucccaggcc

SEQ ID NO: 501841 - RNA, 22 nt, Human
ugcaaaacaaaaccauuuacac

SEQ ID NO: 501842 - RNA, 22 nt, Human
ugcaggcggggaaaagagaggc

SEQ ID NO: 501843 - RNA, 24 nt, Human
ugcccugugcugucugguuggugu

SEQ ID NO: 501844 - RNA, 21 nt, Human
ugcgcaaaccaaacgugcaaa

SEQ ID NO: 501845 - RNA, 22 nt, Human
ugcgggugcucggggcggcggc

SEQ ID NO: 501846 - RNA, 25 nt, Human
ugcgugugugugugugugugugugg

SEQ ID NO: 501847 - RNA, 24 nt, Human
ugcugcggccgcgggggcccgugg

SEQ ID NO: 501848 - RNA, 22 nt, Human
ugcugggagugaucaggggcag

SEQ ID NO: 501849 - RNA, 21 nt, Human
uggcaucucuggggcuagcau

SEQ ID NO: 501850 - RNA, 18 nt, Human
uggcucgaagcacaguga

SEQ ID NO: 501851 - RNA, 18 nt, Human
ugggaaacuagacaagga

SEQ ID NO: 501852 - RNA, 22 nt, Human
ugggaaaugucaccacggggcc

SEQ ID NO: 501853 - RNA, 25 nt, Human
ugugcugucugguuggugucaagug

SEQ ID NO: 501854 - RNA, 21 nt, Human
ugugugugugugguggcaggu

SEQ ID NO: 501855 - RNA, 20 nt, Human
ugugugugugugugguggca

SEQ ID NO: 501856 - RNA, 18 nt, Human
ugugugugugugugugug

SEQ ID NO: 501857 - RNA, 18 nt, Human
ugugugugugugugugug

SEQ ID NO: 501858 - RNA, 18 nt, Human
ugugugugugugugugug

SEQ ID NO: 501859 - RNA, 18 nt, Human
ugugugugugugugugug

SEQ ID NO: 501860 - RNA, 18 nt, Human
ugugugugugugugugug

SEQ ID NO: 501861 - RNA, 18 nt, Human
ugugugugugugugugug

SEQ ID NO: 501862 - RNA, 18 nt, Human
ugugugugugugugugug

SEQ ID NO: 501863 - RNA, 18 nt, Human
ugugugugugugugugug

SEQ ID NO: 501864 - RNA, 20 nt, Human
ugugugugugugugugugug

SEQ ID NO: 501865 - RNA, 21 nt, Human
ugugugugugugugugugugu

SEQ ID NO: 501866 - RNA, 21 nt, Human
ugugugugugugugugugugu

SEQ ID NO: 501867 - RNA, 21 nt, Human
ugugugugugugugugugugu

SEQ ID NO: 501868 - RNA, 21 nt, Human
ugugugugugugugugugugu

SEQ ID NO: 501869 - RNA, 21 nt, Human
ugugugugugugugugugugu

SEQ ID NO: 501870 - RNA, 21 nt, Human
ugugugugugugugugugugu

SEQ ID NO: 501871 - RNA, 21 nt, Human
ugugugugugugugugugugu

SEQ ID NO: 501872 - RNA, 21 nt, Human
ugugugugugugugugugugu

SEQ ID NO: 501873 - RNA, 21 nt, Human
ugugugugugugugugugugu

SEQ ID NO: 501874 - RNA, 21 nt, Human
ugugugugugugugugugugu

SEQ ID NO: 501875 - RNA, 21 nt, Human
ugugugugugugugugugugu

SEQ ID NO: 501876 - RNA, 21 nt, Human
ugugugugugugugugugugu

SEQ ID NO: 501877 - RNA, 22 nt, Human
ugugugugugugugugugugug

SEQ ID NO: 501878 - RNA, 22 nt, Human
ugugugugugugugugugugug

SEQ ID NO: 501879 - RNA, 22 nt, Human
ugugugugugugugugugugug

SEQ ID NO: 501880 - RNA, 22 nt, Human
ugugugugugugugugugugug

SEQ ID NO: 501881 - RNA, 24 nt, Human
uucacaggaugcacaaacaaguug

SEQ ID NO: 501882 - RNA, 19 nt, Human
aaaaauaacaaaacauuug

SEQ ID NO: 501883 - RNA, 22 nt, Human
aagguaaauuauuaauccacuc

SEQ ID NO: 501884 - RNA, 24 nt, Human
aaucacugcaaauuauuuuccaaa

SEQ ID NO: 501885 - RNA, 22 nt, Human
aaugacuccauuguccacuaag

SEQ ID NO: 501886 - RNA, 22 nt, Human
accuuaaaaauacaguucuagu

SEQ ID NO: 501887 - RNA, 21 nt, Human
aggggaaaacaaccuuaaaaa

SEQ ID NO: 501888 - RNA, 18 nt, Human
agguauuacaaacucaac

SEQ ID NO: 501889 - RNA, 22 nt, Human
auagcacacacgugaacaagcc

SEQ ID NO: 501890 - RNA, 22 nt, Human
caaggaaugaaaccauuuuuaa

SEQ ID NO: 501891 - RNA, 19 nt, Human
cacacacgugaacaagcca

SEQ ID NO: 501892 - RNA, 26 nt, Human
cacaguccagguuaaaggaaaacucu

SEQ ID NO: 501893 - RNA, 20 nt, Human
cagugaacaaagaaaaaaug

SEQ ID NO: 501894 - RNA, 22 nt, Human
cauuagaaaaguuuggacucag

SEQ ID NO: 501895 - RNA, 20 nt, Human
ccacuaaguuugggaaauaa

SEQ ID NO: 501896 - RNA, 22 nt, Human
ccacucgcauucaauucuacaa

SEQ ID NO: 501897 - RNA, 20 nt, Human
cccaagagcauuuaaaaaau

SEQ ID NO: 501898 - RNA, 21 nt, Human
cccaagagcauuuaaaaaaua

SEQ ID NO: 501899 - RNA, 22 nt, Human
ccuaccccuagcuaacccaaga

SEQ ID NO: 501900 - RNA, 23 nt, Human
ccuaccccuagcuaacccaagag

SEQ ID NO: 501901 - RNA, 22 nt, Human
cuuguucagaaauauaaucacu

SEQ ID NO: 501902 - RNA, 20 nt, Human
gaacaugggacaucauuuuu

SEQ ID NO: 501903 - RNA, 19 nt, Human
gcucuaaaccaagaguaag

SEQ ID NO: 501904 - RNA, 22 nt, Human
ggaaaacaaccuuaaaaauaca

SEQ ID NO: 501905 - RNA, 21 nt, Human
gggaaaacaaccuuaaaaaua

SEQ ID NO: 501906 - RNA, 23 nt, Human
uaaaaauaacaaaacauuugucu

SEQ ID NO: 501907 - RNA, 26 nt, Human
uaaucacugcaaauuauuuuccaagu

SEQ ID NO: 501908 - RNA, 18 nt, Human
uacaaggaaugaaaccau

SEQ ID NO: 501909 - RNA, 21 nt, Human
uacucuagguagaaaugacuc

SEQ ID NO: 501910 - RNA, 23 nt, Human
uagaacaaacaauuuacugagca

SEQ ID NO: 501911 - RNA, 24 nt, Human
uagagauucucuucccaaagagug

SEQ ID NO: 501912 - RNA, 18 nt, Human
uagccaucaaagauacca

SEQ ID NO: 501913 - RNA, 25 nt, Human
uauggcaacauugcuacuggagaua

SEQ ID NO: 501914 - RNA, 18 nt, Human
ugaacaaagaaaaaaugu

SEQ ID NO: 501915 - RNA, 19 nt, Human
uggcagagcugggaaauga

SEQ ID NO: 501916 - RNA, 23 nt, Human
uggcuuagaacaaacaauuuacu

SEQ ID NO: 501917 - RNA, 19 nt, Human
ugggaaauaaauaauaugg

SEQ ID NO: 501918 - RNA, 21 nt, Human
ugggaaauaaauaauauggca

SEQ ID NO: 501919 - RNA, 22 nt, Human
ugggaaauaaauaauauggcaa

SEQ ID NO: 501920 - RNA, 19 nt, Human
uuacugagcacuuacuaug

SEQ ID NO: 501921 - RNA, 22 nt, Human
uucaaaaugagcugucaaacua

SEQ ID NO: 501922 - RNA, 20 nt, Human
uucuaaaaaacaauauaacu

SEQ ID NO: 501923 - RNA, 19 nt, Human
uuggcccauuuugugaaug

SEQ ID NO: 501924 - RNA, 21 nt, Human
uugggcagugaacaaagaaaa

SEQ ID NO: 501925 - RNA, 24 nt, Human
uuuaggggaaaacaaccuuaaaaa

SEQ ID NO: 501926 - RNA, 26 nt, Human
uuucauagcacacacgugaacaagcc

SEQ ID NO: 501927 - RNA, 21 nt, Human
uuucccaaauuuaugugaaca

SEQ ID NO: 501928 - RNA, 23 nt, Human
aagcuggguccuccccacuucau

SEQ ID NO: 501929 - RNA, 24 nt, Human
agaggaugugggaaucccagcuca

SEQ ID NO: 501930 - RNA, 22 nt, Human
aggagcugguuugacuucaacu

SEQ ID NO: 501931 - RNA, 19 nt, Human
augaggcugcuucuucuug

SEQ ID NO: 501932 - RNA, 20 nt, Human
caaaugaggcugcuucuucu

SEQ ID NO: 501933 - RNA, 20 nt, Human
caccagaaaacaaaugaggc

SEQ ID NO: 501934 - RNA, 18 nt, Human
cagugggcuuccugggcu

SEQ ID NO: 501935 - RNA, 22 nt, Human
ccaaaagccauagguggccacc

SEQ ID NO: 501936 - RNA, 23 nt, Human
cccaaaagccauagguggccacc

SEQ ID NO: 501937 - RNA, 26 nt, Human
cccaaaagccauagguggccaccuac

SEQ ID NO: 501938 - RNA, 18 nt, Human
cccagcuccaggcuucug

SEQ ID NO: 501939 - RNA, 19 nt, Human
cuggaagcuggguccuccc

SEQ ID NO: 501940 - RNA, 19 nt, Human
ggaugcccagcuccaggcu

SEQ ID NO: 501941 - RNA, 22 nt, Human
guacagugggcuuccugggcug

SEQ ID NO: 501942 - RNA, 18 nt, Human
uagccucaucuuucaguc

SEQ ID NO: 501943 - RNA, 22 nt, Human
uaggauggacaggcuguggaua

SEQ ID NO: 501944 - RNA, 24 nt, Human
uagguggccaccuacgaugacacc

SEQ ID NO: 501945 - RNA, 25 nt, Human
ucccaaaagccauagguggccaccu

SEQ ID NO: 501946 - RNA, 23 nt, Human
ucccagauggcuccagguacagu

SEQ ID NO: 501947 - RNA, 25 nt, Human
uccuccccacuucauucugcucaaa

SEQ ID NO: 501948 - RNA, 22 nt, Human
uggaugcccagcuccaggcuuc

SEQ ID NO: 501949 - RNA, 18 nt, Human
ugggaugggcuaggaugg

SEQ ID NO: 501950 - RNA, 23 nt, Human
ugggaugggcuaggauggacagg

SEQ ID NO: 501951 - RNA, 20 nt, Human
aaaacaaccaacucucaaac

SEQ ID NO: 501952 - RNA, 22 nt, Human
aaaaccaccugaaauggaaauc

SEQ ID NO: 501953 - RNA, 23 nt, Human
aaccaccugaaauggaaauccaa

SEQ ID NO: 501954 - RNA, 20 nt, Human
auucaaguugcacuuggcug

SEQ ID NO: 501955 - RNA, 22 nt, Human
caacucucaaacaaaagaggaa

SEQ ID NO: 501956 - RNA, 22 nt, Human
caccacagcucaaggugaccgg

SEQ ID NO: 501957 - RNA, 19 nt, Human
cacuuagaaaaccaccuga

SEQ ID NO: 501958 - RNA, 21 nt, Human
cacuuagaaaaccaccugaaa

SEQ ID NO: 501959 - RNA, 21 nt, Human
cagaaaacgcaaugucuagga

SEQ ID NO: 501960 - RNA, 23 nt, Human
cagcacccagcucugugaccaag

SEQ ID NO: 501961 - RNA, 20 nt, Human
cagcucaaggugaccggcag

SEQ ID NO: 501962 - RNA, 20 nt, Human
ccaacucucaaacaaaagaa

SEQ ID NO: 501963 - RNA, 19 nt, Human
ccccgcgcccggcgccccc

SEQ ID NO: 501964 - RNA, 21 nt, Human
ccccggcccgcccgccucuca

SEQ ID NO: 501965 - RNA, 24 nt, Human
ccugaaauggaaauccaacagccc

SEQ ID NO: 501966 - RNA, 23 nt, Human
ccuuugaucccagaguccaugcg

SEQ ID NO: 501967 - RNA, 25 nt, Human
cggcagcacccagcucugugacugg

SEQ ID NO: 501968 - RNA, 25 nt, Human
cgggagccaccacagcucaaggucg

SEQ ID NO: 501969 - RNA, 18 nt, Human
gaccggcagcacccagcu

SEQ ID NO: 501970 - RNA, 21 nt, Human
gacgugaugggaacuugggag

SEQ ID NO: 501971 - RNA, 22 nt, Human
gaggaaagagccuuugauccca

SEQ ID NO: 501972 - RNA, 20 nt, Human
gaggacauggccgaaccccg

SEQ ID NO: 501973 - RNA, 24 nt, Human
gaggacauggccgaaccccggaca

SEQ ID NO: 501974 - RNA, 18 nt, Human
ggaauuccuccaaaugcu

SEQ ID NO: 501975 - RNA, 18 nt, Human
ggcaucguaagcgcuacc

SEQ ID NO: 501976 - RNA, 19 nt, Human
gggagccaccacagcucaa

SEQ ID NO: 501977 - RNA, 19 nt, Human
uaaaauagaaacauacauu

SEQ ID NO: 501978 - RNA, 19 nt, Human
uccaaaugcuuccaaaaau

SEQ ID NO: 501979 - RNA, 21 nt, Human
uccauacguguuugaaauuca

SEQ ID NO: 501980 - RNA, 22 nt, Human
ugaaauggaaauccaacagccc

SEQ ID NO: 501981 - RNA, 20 nt, Human
uggccgaaccccggacacuc

SEQ ID NO: 501982 - RNA, 18 nt, Human
uggcggcagcccgggcgg

SEQ ID NO: 501983 - RNA, 24 nt, Human
uuuuuuuuuuuuuuuuuuuauuuu

SEQ ID NO: 501984 - RNA, 21 nt, Human
aaaaauacaaacaaaaacaac

SEQ ID NO: 501985 - RNA, 20 nt, Human
aaacaaaaacaacggcuaga

SEQ ID NO: 501986 - RNA, 18 nt, Human
aaacugccaguugaccuu

SEQ ID NO: 501987 - RNA, 20 nt, Human
aagauuauaaaaauugaaga

SEQ ID NO: 501988 - RNA, 22 nt, Human
aagucuuucgcaaugccaauuc

SEQ ID NO: 501989 - RNA, 21 nt, Human
acuacagugugaucgcauuca

SEQ ID NO: 501990 - RNA, 18 nt, Human
agaauaggaaagacugaa

SEQ ID NO: 501991 - RNA, 19 nt, Human
agacaaaaauauagauagg

SEQ ID NO: 501992 - RNA, 18 nt, Human
agacugaaagugccaaug

SEQ ID NO: 501993 - RNA, 23 nt, Human
agagugucaaccugcaaaagcaa

SEQ ID NO: 501994 - RNA, 24 nt, Human
aucagacucgagcucugggaauau

SEQ ID NO: 501995 - RNA, 27 nt, Human
caaaauuaacaaugucucucaaaaucc

SEQ ID NO: 501996 - RNA, 21 nt, Human
caaagguaauaaaacugccag

SEQ ID NO: 501997 - RNA, 22 nt, Human
caaugacaagucauuugaucac

SEQ ID NO: 501998 - RNA, 18 nt, Human
cagauuuaaaagguuuga

SEQ ID NO: 501999 - RNA, 19 nt, Human
caucaucugucaggugaga

SEQ ID NO: 502000 - RNA, 22 nt, Human
cgcaaugccaauucccccaaaa

SEQ ID NO: 502001 - RNA, 24 nt, Human
cuguacuaucacccccgccuuucc

SEQ ID NO: 502002 - RNA, 19 nt, Human
cuucuacuauaucacuaca

SEQ ID NO: 502003 - RNA, 23 nt, Human
ggcuagaauaggaaagacugaaa

SEQ ID NO: 502004 - RNA, 22 nt, Human
gggcagaggggcggagaccucu

SEQ ID NO: 502005 - RNA, 24 nt, Human
gucuuucgcaaugccaauuccccc

SEQ ID NO: 502006 - RNA, 23 nt, Human
guuauuuucuuacauggcuucca

SEQ ID NO: 502007 - RNA, 21 nt, Human
uaaaaagaauaugaagccuug

SEQ ID NO: 502008 - RNA, 19 nt, Human
uacaaacaaaaacaacggc

SEQ ID NO: 502009 - RNA, 21 nt, Human
uacuugaucucuuagagacaa

SEQ ID NO: 502010 - RNA, 24 nt, Human
uaggaaagacugaaagugccaaug

SEQ ID NO: 502011 - RNA, 19 nt, Human
uaggggcagaggggcggag

SEQ ID NO: 502012 - RNA, 23 nt, Human
ucauuuuaaaaagaauaugaagc

SEQ ID NO: 502013 - RNA, 18 nt, Human
uccacaguacagucuggc

SEQ ID NO: 502014 - RNA, 20 nt, Human
ucgcauucagauuuaaaagg

SEQ ID NO: 502015 - RNA, 24 nt, Human
ucucuauuauucugaaaaucuacc

SEQ ID NO: 502016 - RNA, 18 nt, Human
ucucuuagagacaaaaau

SEQ ID NO: 502017 - RNA, 24 nt, Human
ucucuuagagacaaaaauauagau

SEQ ID NO: 502018 - RNA, 18 nt, Human
uggcuuccaacuaauuuu

SEQ ID NO: 502019 - RNA, 20 nt, Human
uucagauuuaaaagguuuga

SEQ ID NO: 502020 - RNA, 19 nt, Human
uugaccuugauagaaacua

SEQ ID NO: 502021 - RNA, 21 nt, Human
uugaccuugauagaaacuaug

SEQ ID NO: 502022 - RNA, 23 nt, Human
uugaucacagauaccucuauguu

SEQ ID NO: 502023 - RNA, 19 nt, Human
uuguuaugaauaugaacaa

SEQ ID NO: 502024 - RNA, 23 nt, Human
uuuaaaauaauauaucugaagac

SEQ ID NO: 502025 - RNA, 21 nt, Human
aagauucuauucuuaaucccc

SEQ ID NO: 502026 - RNA, 19 nt, Human
aagcccagugagaggcacu

SEQ ID NO: 502027 - RNA, 18 nt, Human
accacgggccacguugac

SEQ ID NO: 502028 - RNA, 24 nt, Human
accucaucgcucaggaugucuucc

SEQ ID NO: 502029 - RNA, 19 nt, Human
acuaaaguccucauacuuc

SEQ ID NO: 502030 - RNA, 18 nt, Human
agagcccuuucuguccac

SEQ ID NO: 502031 - RNA, 19 nt, Human
agagcccuuucuguccaca

SEQ ID NO: 502032 - RNA, 19 nt, Human
agcccacuuucccacuccc

SEQ ID NO: 502033 - RNA, 18 nt, Human
aggcagcagcacaagccc

SEQ ID NO: 502034 - RNA, 19 nt, Human
aguagaucuccucccggcc

SEQ ID NO: 502035 - RNA, 21 nt, Human
aucacagcuaugugcccagca

SEQ ID NO: 502036 - RNA, 23 nt, Human
aucacagcuaugugcccagcaca

SEQ ID NO: 502037 - RNA, 24 nt, Human
aucuccucccggccguccccgucg

SEQ ID NO: 502038 - RNA, 24 nt, Human
cacaagcccacuuucccacucccc

SEQ ID NO: 502039 - RNA, 20 nt, Human
caccacgggccacguugacc

SEQ ID NO: 502040 - RNA, 31 nt, Human
cagcagcacaagcccacuuucccacuccccu

SEQ ID NO: 502041 - RNA, 22 nt, Human
cagugacaccaccucccugggc

SEQ ID NO: 502042 - RNA, 24 nt, Human
cagugacaccaccucccugggcac

SEQ ID NO: 502043 - RNA, 21 nt, Human
caucuguguccuaagauaugg

SEQ ID NO: 502044 - RNA, 21 nt, Human
ccacagagcguccggcaaaga

SEQ ID NO: 502045 - RNA, 20 nt, Human
cccagcacagggccuggccu

SEQ ID NO: 502046 - RNA, 19 nt, Human
ccccugcucagcagcuggg

SEQ ID NO: 502047 - RNA, 21 nt, Human
cccugcuggacuccauccgcu

SEQ ID NO: 502048 - RNA, 21 nt, Human
cguccagagcccuuucugucc

SEQ ID NO: 502049 - RNA, 24 nt, Human
cuccccugcuggacuccauccgcu

SEQ ID NO: 502050 - RNA, 29 nt, Human
cucgcagcucuccuuaaccaccgacccca

SEQ ID NO: 502051 - RNA, 21 nt, Human
cugcugugaucacagcuaugu

SEQ ID NO: 502052 - RNA, 19 nt, Human
gauauggucauuagaccca

SEQ ID NO: 502053 - RNA, 18 nt, Human
gcaggcugugaccccgau

SEQ ID NO: 502054 - RNA, 24 nt, Human
uaagauauggucauuagacccacu

SEQ ID NO: 502055 - RNA, 21 nt, Human
uaaguaaugugcauggauggg

SEQ ID NO: 502056 - RNA, 18 nt, Human
uaagugacugguguaagg

SEQ ID NO: 502057 - RNA, 26 nt, Human
uaaucuaaucuccacacuaaccccaa

SEQ ID NO: 502058 - RNA, 28 nt, Human
uagaguagcguccagagcccuuucuguc

SEQ ID NO: 502059 - RNA, 23 nt, Human
uagcucccaggccuuuacauccc

SEQ ID NO: 502060 - RNA, 27 nt, Human
ucagcagcugggcucgcagcucuccuu

SEQ ID NO: 502061 - RNA, 19 nt, Human
uccacacaggccacagagc

SEQ ID NO: 502062 - RNA, 22 nt, Human
ucccugggcacaucuguguccu

SEQ ID NO: 502063 - RNA, 19 nt, Human
ugaucacagcuaugugccc

SEQ ID NO: 502064 - RNA, 18 nt, Human
ugggcuuggggagggucu

SEQ ID NO: 502065 - RNA, 22 nt, Human
ugguguugaggaaguagaucuc

SEQ ID NO: 502066 - RNA, 19 nt, Human
ugguucaugucccaccccu

SEQ ID NO: 502067 - RNA, 20 nt, Human
ugucgcaggcugugaccccg

SEQ ID NO: 502068 - RNA, 20 nt, Human
uuccugaaucaggauuugaa

SEQ ID NO: 502069 - RNA, 22 nt, Human
uuucuguccacacaggccacag

SEQ ID NO: 502070 - RNA, 19 nt, Human
aaacauuuuaaaaagccau

SEQ ID NO: 502071 - RNA, 23 nt, Human
aaagccauccauuaggucaauaa

SEQ ID NO: 502072 - RNA, 19 nt, Human
aaagugcuaggauuacagg

SEQ ID NO: 502073 - RNA, 24 nt, Human
aaagugcuaggauuacaggcauga

SEQ ID NO: 502074 - RNA, 20 nt, Human
aaaugccaaaguuugcugua

SEQ ID NO: 502075 - RNA, 25 nt, Human
aaaugccaaaguuugcuguauagcu

SEQ ID NO: 502076 - RNA, 18 nt, Human
aagcgauucuccacccuc

SEQ ID NO: 502077 - RNA, 20 nt, Human
aaguauagcuugguauaacc

SEQ ID NO: 502078 - RNA, 26 nt, Human
aagugcuaggauuacaggcaugagcc

SEQ ID NO: 502079 - RNA, 19 nt, Human
acacugcggcaacccugaa

SEQ ID NO: 502080 - RNA, 18 nt, Human
acgggguuucacuauguu

SEQ ID NO: 502081 - RNA, 23 nt, Human
acgggguuucacuauguuggcca

SEQ ID NO: 502082 - RNA, 24 nt, Human
acgggguuucacuauguuggccag

SEQ ID NO: 502083 - RNA, 21 nt, Human
acuagaaaaacaaacaucuau

SEQ ID NO: 502084 - RNA, 18 nt, Human
acuauguuggccaggcug

SEQ ID NO: 502085 - RNA, 23 nt, Human
agaaaaacaaacaucuauucugc

SEQ ID NO: 502086 - RNA, 20 nt, Human
agacaagguccgcucaugug

SEQ ID NO: 502087 - RNA, 19 nt, Human
agacagagucucccucugu

SEQ ID NO: 502088 - RNA, 24 nt, Human
agcgauucuccacccucagccucc

SEQ ID NO: 502089 - RNA, 25 nt, Human
aggcuggaguucaguggugagaucu

SEQ ID NO: 502090 - RNA, 19 nt, Human
aguagagacgggguuucac

SEQ ID NO: 502091 - RNA, 23 nt, Human
aguggugagaucuugacucacug

SEQ ID NO: 502092 - RNA, 18 nt, Human
auuuuuuugcuuuucuuu

SEQ ID NO: 502093 - RNA, 18 nt, Human
caaaaaauccuguuccau

SEQ ID NO: 502094 - RNA, 24 nt, Human
caaagugcuaggauuacaggcaug

SEQ ID NO: 502095 - RNA, 21 nt, Human
cacauguauuggucauggaau

SEQ ID NO: 502096 - RNA, 21 nt, Human
cacuauguuggccaggcuggu

SEQ ID NO: 502097 - RNA, 24 nt, Human
cacuauguuggccaggcuggucuc

SEQ ID NO: 502098 - RNA, 20 nt, Human
cacugcaaucuccaccuccc

SEQ ID NO: 502099 - RNA, 21 nt, Human
caugugauuuaguaaucuaag

SEQ ID NO: 502100 - RNA, 19 nt, Human
ccaaagugcuaggauuaca

SEQ ID NO: 502101 - RNA, 24 nt, Human
ccaaagugcuaggauuacaggcau

SEQ ID NO: 502102 - RNA, 24 nt, Human
ccaccucccagguucaagcgauuc

SEQ ID NO: 502103 - RNA, 20 nt, Human
ccaggcuggucuccaacucc

SEQ ID NO: 502104 - RNA, 24 nt, Human
cccaaguaucugagacuacaggug

SEQ ID NO: 502105 - RNA, 20 nt, Human
cccagguucaagcgauucuc

SEQ ID NO: 502106 - RNA, 23 nt, Human
cccucagccucccaaguaucuga

SEQ ID NO: 502107 - RNA, 23 nt, Human
ccggggcagaucauuauccgagg

SEQ ID NO: 502108 - RNA, 24 nt, Human
ccucccagguucaagcgauucucc

SEQ ID NO: 502109 - RNA, 19 nt, Human
ccugaccucaagugaucug

SEQ ID NO: 502110 - RNA, 24 nt, Human
ccugaccucaagugaucugccuac

SEQ ID NO: 502111 - RNA, 19 nt, Human
ccuucuugcucaucugacu

SEQ ID NO: 502112 - RNA, 24 nt, Human
cucaagugaucugccuaccucagc

SEQ ID NO: 502113 - RNA, 24 nt, Human
cucacugcaaucuccaccucccag

SEQ ID NO: 502114 - RNA, 22 nt, Human
cucauuuauugucauguaucac

SEQ ID NO: 502115 - RNA, 23 nt, Human
cuccacauaaaugccaaaguuug

SEQ ID NO: 502116 - RNA, 21 nt, Human
cucccaaguaucugagacuac

SEQ ID NO: 502117 - RNA, 24 nt, Human
cucccucugucgcccaggcuggag

SEQ ID NO: 502118 - RNA, 20 nt, Human
cucugucgcccaggcuggag

SEQ ID NO: 502119 - RNA, 23 nt, Human
cucugucgcccaggcuggaguuc

SEQ ID NO: 502120 - RNA, 24 nt, Human
cugcaaucuccaccucccagguuc

SEQ ID NO: 502121 - RNA, 24 nt, Human
gaccucaagugaucugccuaccuc

SEQ ID NO: 502122 - RNA, 24 nt, Human
gagacgggguuucacuauguuggc

SEQ ID NO: 502123 - RNA, 18 nt, Human
gauuacaggcaugagcca

SEQ ID NO: 502124 - RNA, 22 nt, Human
gauuacaggcaugagccaccgc

SEQ ID NO: 502125 - RNA, 22 nt, Human
gauuacaggcaugagccaccgc

SEQ ID NO: 502126 - RNA, 20 nt, Human
gcccaggcuggaguucagug

SEQ ID NO: 502127 - RNA, 21 nt, Human
gcugguccacugaggugacac

SEQ ID NO: 502128 - RNA, 23 nt, Human
gcuggucuccaacuccugaccuc

SEQ ID NO: 502129 - RNA, 22 nt, Human
ggaaaagaaaggcaugucccau

SEQ ID NO: 502130 - RNA, 22 nt, Human
ggauuacaggcaugagccaccg

SEQ ID NO: 502131 - RNA, 24 nt, Human
ggcuggucuccaacuccugaccuc

SEQ ID NO: 502132 - RNA, 23 nt, Human
gggguuucacuauguuggccagg

SEQ ID NO: 502133 - RNA, 22 nt, Human
ggguuucacuauguuggccagg

SEQ ID NO: 502134 - RNA, 23 nt, Human
ggucauggaauuuccagguaaaa

SEQ ID NO: 502135 - RNA, 23 nt, Human
guagagacgggguuucacuaugu

SEQ ID NO: 502136 - RNA, 18 nt, Human
gucuuggaaguaacuucu

SEQ ID NO: 502137 - RNA, 24 nt, Human
gugaucugccuaccucagccuccc

SEQ ID NO: 502138 - RNA, 25 nt, Human
gugcaugguuugguccucauguugc

SEQ ID NO: 502139 - RNA, 23 nt, Human
guggugagaucuugacucacugc

SEQ ID NO: 502140 - RNA, 20 nt, Human
guucaguggugagaucuuga

SEQ ID NO: 502141 - RNA, 25 nt, Human
uaaaaagccauccauuaggucaaua

SEQ ID NO: 502142 - RNA, 26 nt, Human
uaaaacaguuccauuagagcaaagca

SEQ ID NO: 502143 - RNA, 24 nt, Human
uaauuuuugcauuuuuaguagaga

SEQ ID NO: 502144 - RNA, 22 nt, Human
uacaggcaugagccaccgcgcc

SEQ ID NO: 502145 - RNA, 22 nt, Human
uacccugagcuccucuuugugc

SEQ ID NO: 502146 - RNA, 24 nt, Human
uaccucagccucccaaagugcuag

SEQ ID NO: 502147 - RNA, 20 nt, Human
uagaaaaacaaacaucuauu

SEQ ID NO: 502148 - RNA, 22 nt, Human
uagagacgggguuucacuaugu

SEQ ID NO: 502149 - RNA, 18 nt, Human
uaggauuacaggcaugag

SEQ ID NO: 502150 - RNA, 21 nt, Human
uaggauuacaggcaugagcca

SEQ ID NO: 502151 - RNA, 22 nt, Human
uaggauuacaggcaugagccac

SEQ ID NO: 502152 - RNA, 23 nt, Human
uaggauuacaggcaugagccacc

SEQ ID NO: 502153 - RNA, 24 nt, Human
uaggauuacaggcaugagccaccg

SEQ ID NO: 502154 - RNA, 24 nt, Human
uaggauuacaggcaugagccaccg

SEQ ID NO: 502155 - RNA, 24 nt, Human
uaguagagacgggguuucacuaug

SEQ ID NO: 502156 - RNA, 21 nt, Human
uauaaccacuagaaaaacaaa

SEQ ID NO: 502157 - RNA, 23 nt, Human
uauccgaggacaccaucuugcau

SEQ ID NO: 502158 - RNA, 19 nt, Human
uauguuggccaggcugguc

SEQ ID NO: 502159 - RNA, 24 nt, Human
uauguuggccaggcuggucuccaa

SEQ ID NO: 502160 - RNA, 22 nt, Human
ucacuauguuggccaggcuggu

SEQ ID NO: 502161 - RNA, 23 nt, Human
ucacugcaaucuccaccucccag

SEQ ID NO: 502162 - RNA, 24 nt, Human
ucacugcaaucuccaccucccagg

SEQ ID NO: 502163 - RNA, 25 nt, Human
ucagauuccaacaaugagaaaugcu

SEQ ID NO: 502164 - RNA, 18 nt, Human
ucagccucccaaagugcu

SEQ ID NO: 502165 - RNA, 19 nt, Human
ucaguggugagaucuugac

SEQ ID NO: 502166 - RNA, 24 nt, Human
ucccaaagugcuaggauuacaggc

SEQ ID NO: 502167 - RNA, 23 nt, Human
ucccaaguaucugagacuacagg

SEQ ID NO: 502168 - RNA, 21 nt, Human
ucccagguucaagcgauucuc

SEQ ID NO: 502169 - RNA, 22 nt, Human
ucccagguucaagcgauucucc

SEQ ID NO: 502170 - RNA, 27 nt, Human
uccccaaggcuucguagaauccuccug

SEQ ID NO: 502171 - RNA, 22 nt, Human
ucccccaggcugguccacugag

SEQ ID NO: 502172 - RNA, 20 nt, Human
ucccucugucgcccaggcug

SEQ ID NO: 502173 - RNA, 24 nt, Human
ucccucugucgcccaggcuggagu

SEQ ID NO: 502174 - RNA, 20 nt, Human
uccggggcagaucauuaucc

SEQ ID NO: 502175 - RNA, 18 nt, Human
ucgcccaggcuggaguuc

SEQ ID NO: 502176 - RNA, 23 nt, Human
ucucccucugucgcccaggcugg

SEQ ID NO: 502177 - RNA, 24 nt, Human
ucucccucugucgcccaggcugga

SEQ ID NO: 502178 - RNA, 18 nt, Human
ucugucgcccaggcugga

SEQ ID NO: 502179 - RNA, 20 nt, Human
ucuuuuuuuuugagacagag

SEQ ID NO: 502180 - RNA, 22 nt, Human
ucuuuuuuuuugagacagaguc

SEQ ID NO: 502181 - RNA, 18 nt, Human
ugaccucaagugaucugc

SEQ ID NO: 502182 - RNA, 19 nt, Human
ugaccucaagugaucugcc

SEQ ID NO: 502183 - RNA, 22 nt, Human
ugagacagagucucccucuguc

SEQ ID NO: 502184 - RNA, 23 nt, Human
ugagacagagucucccucugucg

SEQ ID NO: 502185 - RNA, 24 nt, Human
ugagacuacaggugcgcaccacua

SEQ ID NO: 502186 - RNA, 22 nt, Human
ugaucggaaaagaaaggcaugu

SEQ ID NO: 502187 - RNA, 24 nt, Human
ugaucugccuaccucagccuccca

SEQ ID NO: 502188 - RNA, 23 nt, Human
ugcccuagcuccggggcagauca

SEQ ID NO: 502189 - RNA, 20 nt, Human
ugcggcaacccugaaaucac

SEQ ID NO: 502190 - RNA, 20 nt, Human
uggaguucaguggugagauc

SEQ ID NO: 502191 - RNA, 24 nt, Human
uggccaggcuggucuccaacuccu

SEQ ID NO: 502192 - RNA, 20 nt, Human
uguaucacuccucccugaca

SEQ ID NO: 502193 - RNA, 25 nt, Human
uguuaaaagucugucuuggaaguaa

SEQ ID NO: 502194 - RNA, 22 nt, Human
uguugcugcccuagcuccgggg

SEQ ID NO: 502195 - RNA, 22 nt, Human
uuagagcaaagcaucaaaaaau

SEQ ID NO: 502196 - RNA, 18 nt, Human
uuaguagagacgggguuu

SEQ ID NO: 502197 - RNA, 21 nt, Human
uuaguagagacgggguuucac

SEQ ID NO: 502198 - RNA, 21 nt, Human
uuaguagagacgggguuucac

SEQ ID NO: 502199 - RNA, 24 nt, Human
uuaguagagacgggguuucacuau

SEQ ID NO: 502200 - RNA, 23 nt, Human
uucaagcgauucuccacccucag

SEQ ID NO: 502201 - RNA, 24 nt, Human
uucaagcgauucuccacccucagc

SEQ ID NO: 502202 - RNA, 21 nt, Human
uucacacgugaaaacaggaag

SEQ ID NO: 502203 - RNA, 22 nt, Human
uugcuguauagcuuaaauaaac

SEQ ID NO: 502204 - RNA, 23 nt, Human
uugcuguauagcuuaaauaaacu

SEQ ID NO: 502205 - RNA, 24 nt, Human
uuucacuauguuggccaggcuggu

SEQ ID NO: 502206 - RNA, 21 nt, Human
uuuugcauuuuuaguagagac

SEQ ID NO: 502207 - RNA, 24 nt, Human
uuuuuaguagagacgggguuucac

SEQ ID NO: 502208 - RNA, 20 nt, Human
uuuuugcauuuuuaguagag

SEQ ID NO: 502209 - RNA, 19 nt, Human
aaguaaacacucucccggc

SEQ ID NO: 502210 - RNA, 23 nt, Human
cccgccccuuccgcggguccccg

SEQ ID NO: 502211 - RNA, 20 nt, Human
guuuacaccgggcagcgccc

SEQ ID NO: 502212 - RNA, 23 nt, Human
uaaguaaacacucucccggcuca

SEQ ID NO: 502213 - RNA, 18 nt, Human
uccccguuuacaccgggc

SEQ ID NO: 502214 - RNA, 22 nt, Human
uccgcggguccccguuuacacc

SEQ ID NO: 502215 - RNA, 21 nt, Human
ugcauuuacaugucaaucggu

SEQ ID NO: 502216 - RNA, 24 nt, Human
uuuaaguaaacacucucccggcuc

SEQ ID NO: 502217 - RNA, 20 nt, Human
uuugagggcaugauuuuaag

SEQ ID NO: 502218 - RNA, 21 nt, Human
uuuuuuuuuuuugagggcaug

SEQ ID NO: 502219 - RNA, 19 nt, Human
uuuuuuuuuuuuugagggc

SEQ ID NO: 502220 - RNA, 28 nt, Human
uuuuuuuuuuuuuuuuuuuuuuugaggg

SEQ ID NO: 502221 - RNA, 22 nt, Human
acagaguuuuaauucugccaac

SEQ ID NO: 502222 - RNA, 19 nt, Human
acuacaaucacuggcugua

SEQ ID NO: 502223 - RNA, 19 nt, Human
agaaggguggaugccaggg

SEQ ID NO: 502224 - RNA, 20 nt, Human
agacagaaagcuagaagggu

SEQ ID NO: 502225 - RNA, 22 nt, Human
caaaugcaaucaagcugaaaag

SEQ ID NO: 502226 - RNA, 22 nt, Human
caccaccccacucaggcugcac

SEQ ID NO: 502227 - RNA, 23 nt, Human
ccuccaaugagaggaguggaagc

SEQ ID NO: 502228 - RNA, 23 nt, Human
cgcagccggccgcggaggacgcc

SEQ ID NO: 502229 - RNA, 23 nt, Human
cgggcagacuaccggccugcacc

SEQ ID NO: 502230 - RNA, 18 nt, Human
cucagaaagggauuagaa

SEQ ID NO: 502231 - RNA, 26 nt, Human
cugcaccaccccacucaggcugcaca

SEQ ID NO: 502232 - RNA, 23 nt, Human
cugccaacgaucaccacgcagcc

SEQ ID NO: 502233 - RNA, 20 nt, Human
cuuaggaucuccgugggcug

SEQ ID NO: 502234 - RNA, 19 nt, Human
gacagccccgagaacgcaa

SEQ ID NO: 502235 - RNA, 22 nt, Human
gcagccggccgcggaggacgcc

SEQ ID NO: 502236 - RNA, 18 nt, Human
gccuccaaugagaggagu

SEQ ID NO: 502237 - RNA, 23 nt, Human
gggccccagaguacucagaaagg

SEQ ID NO: 502238 - RNA, 18 nt, Human
ggggcuggggcuggggga

SEQ ID NO: 502239 - RNA, 23 nt, Human
gucacagagggcugauuaagggc

SEQ ID NO: 502240 - RNA, 21 nt, Human
uaccggccugcaccaccccac

SEQ ID NO: 502241 - RNA, 25 nt, Human
uccagguuaucugcccagguggcag

SEQ ID NO: 502242 - RNA, 20 nt, Human
ugcaccaccccacucaggcu

SEQ ID NO: 502243 - RNA, 19 nt, Human
ugucacagagggcugauua

SEQ ID NO: 502244 - RNA, 20 nt, Human
uucaauggguacagaguuuu

SEQ ID NO: 502245 - RNA, 24 nt, Human
aaagugcugggauuacaggcguga

SEQ ID NO: 502246 - RNA, 22 nt, Human
aacacucuccuaaaaucaaaua

SEQ ID NO: 502247 - RNA, 24 nt, Human
aagcaauucugccccaaccuccug

SEQ ID NO: 502248 - RNA, 24 nt, Human
aagugauccacccgccucggccuc

SEQ ID NO: 502249 - RNA, 19 nt, Human
aagugcugggauuacaggc

SEQ ID NO: 502250 - RNA, 19 nt, Human
aagugcugggauuacaggc

SEQ ID NO: 502251 - RNA, 26 nt, Human
aagugcugggauuacaggcgugagcc

SEQ ID NO: 502252 - RNA, 24 nt, Human
acaggguuucaccuuauuggccag

SEQ ID NO: 502253 - RNA, 25 nt, Human
acccgccucggccucccaaagugcu

SEQ ID NO: 502254 - RNA, 20 nt, Human
agcaauucugccccaaccuc

SEQ ID NO: 502255 - RNA, 18 nt, Human
agcagaaaugaggacuuc

SEQ ID NO: 502256 - RNA, 22 nt, Human
aggccggcagcaagacagagaa

SEQ ID NO: 502257 - RNA, 20 nt, Human
agggagggagcucaaaagau

SEQ ID NO: 502258 - RNA, 19 nt, Human
aggucacuguggccuaaaa

SEQ ID NO: 502259 - RNA, 20 nt, Human
aguagagacaggguuucacc

SEQ ID NO: 502260 - RNA, 18 nt, Human
aguagcuggguuuacagg

SEQ ID NO: 502261 - RNA, 21 nt, Human
agucagggucuuuuccacgug

SEQ ID NO: 502262 - RNA, 20 nt, Human
agugcaggggugcaaucucg

SEQ ID NO: 502263 - RNA, 24 nt, Human
agugcaggggugcaaucucggcuc

SEQ ID NO: 502264 - RNA, 18 nt, Human
agugcugggauuacaggc

SEQ ID NO: 502265 - RNA, 19 nt, Human
aucuccuuccaucaagcgc

SEQ ID NO: 502266 - RNA, 22 nt, Human
augcuggacggcccagcugcac

SEQ ID NO: 502267 - RNA, 24 nt, Human
auuuuuguauuuuuaguagagaca

SEQ ID NO: 502268 - RNA, 24 nt, Human
caaagugcugggauuacaggcgug

SEQ ID NO: 502269 - RNA, 24 nt, Human
caccaugcucggcuaauuuuugua

SEQ ID NO: 502270 - RNA, 23 nt, Human
cacccgccucggccucccaaagu

SEQ ID NO: 502271 - RNA, 21 nt, Human
caccuuauuggccaggcuggu

SEQ ID NO: 502272 - RNA, 24 nt, Human
caccuuauuggccaggcuggucuc

SEQ ID NO: 502273 - RNA, 19 nt, Human
cacugcaaccucugccccc

SEQ ID NO: 502274 - RNA, 21 nt, Human
cacugcaaccucugcccccug

SEQ ID NO: 502275 - RNA, 23 nt, Human
cacugcaaccucugcccccuggg

SEQ ID NO: 502276 - RNA, 24 nt, Human
cagaagaauuugaagacagucugg

SEQ ID NO: 502277 - RNA, 23 nt, Human
cagcagaaaugaggacuucagug

SEQ ID NO: 502278 - RNA, 24 nt, Human
caggguuucaccuuauuggccagg

SEQ ID NO: 502279 - RNA, 22 nt, Human
ccaaagugcugggauuacaggc

SEQ ID NO: 502280 - RNA, 22 nt, Human
ccaaagugcugggauuacaggc

SEQ ID NO: 502281 - RNA, 24 nt, Human
ccaaagugcugggauuacaggcgu

SEQ ID NO: 502282 - RNA, 19 nt, Human
ccacugcacccggccucaa

SEQ ID NO: 502283 - RNA, 21 nt, Human
ccacugcacccggccucaaag

SEQ ID NO: 502284 - RNA, 23 nt, Human
ccacugcacccggccucaaaggc

SEQ ID NO: 502285 - RNA, 19 nt, Human
cccuggguucaagcaauuc

SEQ ID NO: 502286 - RNA, 21 nt, Human
cccuggguucaagcaauucug

SEQ ID NO: 502287 - RNA, 22 nt, Human
ccugaccucaagugauccaccc

SEQ ID NO: 502288 - RNA, 23 nt, Human
ccugaccucaagugauccacccg

SEQ ID NO: 502289 - RNA, 24 nt, Human
cgccucggccucccaaagugcugg

SEQ ID NO: 502290 - RNA, 21 nt, Human
cucaaaagauauaaagaaguc

SEQ ID NO: 502291 - RNA, 22 nt, Human
cucacugcaaccucugcccccu

SEQ ID NO: 502292 - RNA, 24 nt, Human
cucacugcaaccucugcccccugg

SEQ ID NO: 502293 - RNA, 24 nt, Human
cucccauaagacuagucuacugug

SEQ ID NO: 502294 - RNA, 24 nt, Human
cucucugcucaggagagccggagg

SEQ ID NO: 502295 - RNA, 20 nt, Human
cucugcucaggagagccgga

SEQ ID NO: 502296 - RNA, 23 nt, Human
cugcaaccucugcccccuggguu

SEQ ID NO: 502297 - RNA, 24 nt, Human
cugcaaccucugcccccuggguuc

SEQ ID NO: 502298 - RNA, 23 nt, Human
cugccccaaccuccugaguagcu

SEQ ID NO: 502299 - RNA, 18 nt, Human
cugggagggaaugcagug

SEQ ID NO: 502300 - RNA, 18 nt, Human
gacaggguuucaccuuau

SEQ ID NO: 502301 - RNA, 24 nt, Human
gaccucaagugauccacccgccuc

SEQ ID NO: 502302 - RNA, 20 nt, Human
gacuucaguggaauugacau

SEQ ID NO: 502303 - RNA, 18 nt, Human
gauuacaggcgugagcca

SEQ ID NO: 502304 - RNA, 22 nt, Human
gauuacaggcgugagccacugc

SEQ ID NO: 502305 - RNA, 23 nt, Human
gauuacaggcgugagccacugca

SEQ ID NO: 502306 - RNA, 19 nt, Human
gcccccuggguucaagcaa

SEQ ID NO: 502307 - RNA, 23 nt, Human
gcuggucucgaacuccugaccuc

SEQ ID NO: 502308 - RNA, 24 nt, Human
ggcuggucucgaacuccugaccuc

SEQ ID NO: 502309 - RNA, 23 nt, Human
ggcuguucuuuuuuauuuuuuuu

SEQ ID NO: 502310 - RNA, 19 nt, Human
ggucucgaacuccugaccu

SEQ ID NO: 502311 - RNA, 24 nt, Human
gucagggucuuuuccacgugugga

SEQ ID NO: 502312 - RNA, 24 nt, Human
gugauccacccgccucggccuccc

SEQ ID NO: 502313 - RNA, 18 nt, Human
guucuuuuuuauuuuuuu

SEQ ID NO: 502314 - RNA, 19 nt, Human
guucuuuuuuauuuuuuuu

SEQ ID NO: 502315 - RNA, 24 nt, Human
uaauuuuuguauuuuuaguagaga

SEQ ID NO: 502316 - RNA, 22 nt, Human
uacaaaagcaacacauauucau

SEQ ID NO: 502317 - RNA, 18 nt, Human
uacaggcacaggccacca

SEQ ID NO: 502318 - RNA, 19 nt, Human
uacaggcgugagccacugc

SEQ ID NO: 502319 - RNA, 23 nt, Human
uacaggcgugagccacugcaccc

SEQ ID NO: 502320 - RNA, 18 nt, Human
uacauaauaaaagggagg

SEQ ID NO: 502321 - RNA, 21 nt, Human
uacauaauaaaagggagggag

SEQ ID NO: 502322 - RNA, 24 nt, Human
uagcaggaccucucucuaauggcu

SEQ ID NO: 502323 - RNA, 19 nt, Human
uaggucaaagcauauaaac

SEQ ID NO: 502324 - RNA, 19 nt, Human
uaguagagacaggguuuca

SEQ ID NO: 502325 - RNA, 26 nt, Human
uaguagagacaggguuucaccuuauu

SEQ ID NO: 502326 - RNA, 20 nt, Human
uauuggccaggcuggucucg

SEQ ID NO: 502327 - RNA, 18 nt, Human
ucacugcaaccucugccc

SEQ ID NO: 502328 - RNA, 23 nt, Human
ucacugcaaccucugcccccugg

SEQ ID NO: 502329 - RNA, 24 nt, Human
ucacugcaaccucugcccccuggg

SEQ ID NO: 502330 - RNA, 27 nt, Human
ucacugcaaccucugcccccuggguuc

SEQ ID NO: 502331 - RNA, 23 nt, Human
ucaguggaauugacaucuccuuc

SEQ ID NO: 502332 - RNA, 24 nt, Human
ucccaaagugcugggauuacaggc

SEQ ID NO: 502333 - RNA, 24 nt, Human
uccugaguagcuggguuuacaggc

SEQ ID NO: 502334 - RNA, 18 nt, Human
ucggccucccaaagugcu

SEQ ID NO: 502335 - RNA, 21 nt, Human
ucucgaacuccugaccucaag

SEQ ID NO: 502336 - RNA, 24 nt, Human
ucucguacuguugcccagccugga

SEQ ID NO: 502337 - RNA, 24 nt, Human
ucugcccccuggguucaagcaauu

SEQ ID NO: 502338 - RNA, 24 nt, Human
ugaccucaagugauccacccgccu

SEQ ID NO: 502339 - RNA, 22 nt, Human
ugcacccggccucaaaggcugg

SEQ ID NO: 502340 - RNA, 22 nt, Human
ugcagccuggcccaagagccag

SEQ ID NO: 502341 - RNA, 22 nt, Human
ugcaggggugcaaucucggcuc

SEQ ID NO: 502342 - RNA, 23 nt, Human
ugcaggggugcaaucucggcuca

SEQ ID NO: 502343 - RNA, 24 nt, Human
ugccccaaccuccugaguagcugg

SEQ ID NO: 502344 - RNA, 21 nt, Human
ugcuggacggcccagcugcac

SEQ ID NO: 502345 - RNA, 24 nt, Human
ugcugggauuacaggcgugagcca

SEQ ID NO: 502346 - RNA, 22 nt, Human
uggaacagagucucguacuguu

SEQ ID NO: 502347 - RNA, 19 nt, Human
uggagugcaggggugcaau

SEQ ID NO: 502348 - RNA, 23 nt, Human
uggagugcaggggugcaaucucg

SEQ ID NO: 502349 - RNA, 24 nt, Human
uggagugcaggggugcaaucucgg

SEQ ID NO: 502350 - RNA, 24 nt, Human
uggccaggcuggucucgaacuccu

SEQ ID NO: 502351 - RNA, 18 nt, Human
uggcccaagagccaggac

SEQ ID NO: 502352 - RNA, 18 nt, Human
ugggauuacaggcgugag

SEQ ID NO: 502353 - RNA, 19 nt, Human
ugggauuacaggcgugagc

SEQ ID NO: 502354 - RNA, 21 nt, Human
ugggauuacaggcgugagcca

SEQ ID NO: 502355 - RNA, 22 nt, Human
ugggauuacaggcgugagccac

SEQ ID NO: 502356 - RNA, 22 nt, Human
ugggauuacaggcgugagccac

SEQ ID NO: 502357 - RNA, 24 nt, Human
ugggauuacaggcgugagccacug

SEQ ID NO: 502358 - RNA, 26 nt, Human
ugggauuacaggcgugagccacugca

SEQ ID NO: 502359 - RNA, 22 nt, Human
uggguuuacaggcacaggccac

SEQ ID NO: 502360 - RNA, 24 nt, Human
uggguuuacaggcacaggccacca

SEQ ID NO: 502361 - RNA, 24 nt, Human
uguaaacaaaauuuuaauggcaaa

SEQ ID NO: 502362 - RNA, 23 nt, Human
uguuuguuuuuuuaaaggagucu

SEQ ID NO: 502363 - RNA, 24 nt, Human
uuaguagagacaggguuucaccuu

SEQ ID NO: 502364 - RNA, 25 nt, Human
uuaguagagacaggguuucaccuua

SEQ ID NO: 502365 - RNA, 20 nt, Human
uuauuuuuuuuggaacagag

SEQ ID NO: 502366 - RNA, 21 nt, Human
uucaagcaauucugccccaac

SEQ ID NO: 502367 - RNA, 20 nt, Human
uucaccuuauuggccaggcc

SEQ ID NO: 502368 - RNA, 21 nt, Human
uugaugcuggacggcccagcu

SEQ ID NO: 502369 - RNA, 18 nt, Human
uugcccagccuggagugc

SEQ ID NO: 502370 - RNA, 22 nt, Human
uuucaccuuauuggccaggcug

SEQ ID NO: 502371 - RNA, 24 nt, Human
uuuuuaguagagacaggguuucac

SEQ ID NO: 502372 - RNA, 20 nt, Human
uuuuuguauuuuuaguagag

SEQ ID NO: 502373 - RNA, 21 nt, Human
uuuuuguuuguuuguuuuuuu

SEQ ID NO: 502374 - RNA, 22 nt, Human
uuuuuuuguuuguuuguuuuuu

SEQ ID NO: 502375 - RNA, 21 nt, Human
uuuuuuuuggaacagagucuc

SEQ ID NO: 502376 - RNA, 18 nt, Human
aagaauccaguuccaccc

SEQ ID NO: 502377 - RNA, 21 nt, Human
agaaggcgguggucuccuugc

SEQ ID NO: 502378 - RNA, 22 nt, Human
agaaggcgguggucuccuugcc

SEQ ID NO: 502379 - RNA, 26 nt, Human
agcuccaccuccaucuggauccccau

SEQ ID NO: 502380 - RNA, 20 nt, Human
aggaagaauccaguuccacc

SEQ ID NO: 502381 - RNA, 22 nt, Human
auuccucagguuuuuuugaagc

SEQ ID NO: 502382 - RNA, 21 nt, Human
ccccugcugugaacccaggga

SEQ ID NO: 502383 - RNA, 22 nt, Human
cccuuuucccuuuuggguuguc

SEQ ID NO: 502384 - RNA, 18 nt, Human
ccugcuguggcgcauuuu

SEQ ID NO: 502385 - RNA, 18 nt, Human
ccuugugguccugcugug

SEQ ID NO: 502386 - RNA, 23 nt, Human
cuccaccuccaucuggaucccca

SEQ ID NO: 502387 - RNA, 25 nt, Human
cuuuuguuccuggaacuuccuugac

SEQ ID NO: 502388 - RNA, 18 nt, Human
ggaagcacuggagaaggc

SEQ ID NO: 502389 - RNA, 18 nt, Human
gucccuuuucccuuuugg

SEQ ID NO: 502390 - RNA, 22 nt, Human
uccaccuccaucuggaucccca

SEQ ID NO: 502391 - RNA, 19 nt, Human
uccaggaagaauccaguuc

SEQ ID NO: 502392 - RNA, 23 nt, Human
uccaggaagaauccaguuccacc

SEQ ID NO: 502393 - RNA, 21 nt, Human
uccccauccaggaagaaucca

SEQ ID NO: 502394 - RNA, 19 nt, Human
ucucuggccuugccuggga

SEQ ID NO: 502395 - RNA, 19 nt, Human
ucuggauccccauccagga

SEQ ID NO: 502396 - RNA, 20 nt, Human
ucuuugguguugaugggugg

SEQ ID NO: 502397 - RNA, 20 nt, Human
ucuuuuagggagagccuuuu

SEQ ID NO: 502398 - RNA, 18 nt, Human
ugcccaaggaagcacugg

SEQ ID NO: 502399 - RNA, 21 nt, Human
uggauccccauccaggaagaa

SEQ ID NO: 502400 - RNA, 18 nt, Human
uggcccacuccauuccuc

SEQ ID NO: 502401 - RNA, 20 nt, Human
uggcuggauaguguuggccc

SEQ ID NO: 502402 - RNA, 21 nt, Human
uguggcgcauuuugauugagu

SEQ ID NO: 502403 - RNA, 21 nt, Human
uuccucagguuuuuuugaagc

SEQ ID NO: 502404 - RNA, 21 nt, Human
uuccucagguuuuuuugaagc

SEQ ID NO: 502405 - RNA, 24 nt, Human
uuccuggaacuuccuugacggguc

SEQ ID NO: 502406 - RNA, 18 nt, Human
uugaagcgguggucuuuu

SEQ ID NO: 502407 - RNA, 21 nt, Human
uugccugggaauuacuggcug

SEQ ID NO: 502408 - RNA, 21 nt, Human
uuguuggaaaaugggcuggag

SEQ ID NO: 502409 - RNA, 24 nt, Human
uuuuuugaagcgguggucuuuuag

SEQ ID NO: 502410 - RNA, 25 nt, Human
aaacagccaugugcuagcugaaagc

SEQ ID NO: 502411 - RNA, 18 nt, Human
aacuagggaacaaaaagc

SEQ ID NO: 502412 - RNA, 22 nt, Human
aaggggcaaaaguauuagacau

SEQ ID NO: 502413 - RNA, 23 nt, Human
aagugccuucgcugggcuacucc

SEQ ID NO: 502414 - RNA, 22 nt, Human
acaauguuagcuguuuuuaauc

SEQ ID NO: 502415 - RNA, 21 nt, Human
acccuuagaccaacuagggaa

SEQ ID NO: 502416 - RNA, 19 nt, Human
acugggcuguacucgcccc

SEQ ID NO: 502417 - RNA, 23 nt, Human
agaauauagaaacagccaugugc

SEQ ID NO: 502418 - RNA, 19 nt, Human
agaguuucccacgccuccu

SEQ ID NO: 502419 - RNA, 18 nt, Human
agcaccuuccaaagugcc

SEQ ID NO: 502420 - RNA, 24 nt, Human
agccugggcucaucagaauauaga

SEQ ID NO: 502421 - RNA, 19 nt, Human
aggacugggcuguacucgc

SEQ ID NO: 502422 - RNA, 24 nt, Human
aguaguaaaguuucacgggagaaa

SEQ ID NO: 502423 - RNA, 21 nt, Human
augaacacuagcuggccuaug

SEQ ID NO: 502424 - RNA, 24 nt, Human
cacccugaacgcgccugaucucau

SEQ ID NO: 502425 - RNA, 18 nt, Human
cacccuuuugcaguccuc

SEQ ID NO: 502426 - RNA, 19 nt, Human
cagaguuucccacgccucc

SEQ ID NO: 502427 - RNA, 22 nt, Human
cauagagagauucaguaaccac

SEQ ID NO: 502428 - RNA, 26 nt, Human
cauagagagauucaguaaccaccugu

SEQ ID NO: 502429 - RNA, 22 nt, Human
cccacaacucuggauaaaaagg

SEQ ID NO: 502430 - RNA, 19 nt, Human
cccugaacgcgccugaucu

SEQ ID NO: 502431 - RNA, 19 nt, Human
ccucuguugccccuguguu

SEQ ID NO: 502432 - RNA, 18 nt, Human
ccugguuaguacuuggau

SEQ ID NO: 502433 - RNA, 24 nt, Human
cgaggccgacuccacccuuuugca

SEQ ID NO: 502434 - RNA, 22 nt, Human
cgcugggcuacucccaccuggc

SEQ ID NO: 502435 - RNA, 21 nt, Human
cggccauaucacccugaacgc

SEQ ID NO: 502436 - RNA, 18 nt, Human
cuagcugaaagccauuca

SEQ ID NO: 502437 - RNA, 20 nt, Human
cugaacgcgccugaucucau

SEQ ID NO: 502438 - RNA, 18 nt, Human
cuggcccuugcuuuucau

SEQ ID NO: 502439 - RNA, 26 nt, Human
cuuagaccaacuagggaacaaaaagc

SEQ ID NO: 502440 - RNA, 21 nt, Human
cuuuaaaaucucuuccaaucc

SEQ ID NO: 502441 - RNA, 21 nt, Human
gggcggggccugggcgggggc

SEQ ID NO: 502442 - RNA, 22 nt, Human
gggcggggccugggcgggggcg

SEQ ID NO: 502443 - RNA, 18 nt, Human
uaaaaaggggcaaaagua

SEQ ID NO: 502444 - RNA, 25 nt, Human
uaaacaaacacugaaggccucuuuc

SEQ ID NO: 502445 - RNA, 25 nt, Human
uaaacaaacacugaaggccucuuuc

SEQ ID NO: 502446 - RNA, 20 nt, Human
uacucccaccuggcccuugc

SEQ ID NO: 502447 - RNA, 26 nt, Human
uaguccaauacagacccuuagaccaa

SEQ ID NO: 502448 - RNA, 20 nt, Human
ucagaauauagaaacagcca

SEQ ID NO: 502449 - RNA, 20 nt, Human
ucccggcaggggcggggccu

SEQ ID NO: 502450 - RNA, 18 nt, Human
uccuaaaugcuaaaaucu

SEQ ID NO: 502451 - RNA, 18 nt, Human
ucgcugggcuacucccac

SEQ ID NO: 502452 - RNA, 22 nt, Human
ucuacggccauaucacccugaa

SEQ ID NO: 502453 - RNA, 21 nt, Human
ugaauggaaaguucauagaga

SEQ ID NO: 502454 - RNA, 21 nt, Human
ugagggaaguaaaugacauug

SEQ ID NO: 502455 - RNA, 19 nt, Human
ugagguccaauuugucugu

SEQ ID NO: 502456 - RNA, 18 nt, Human
ugccugcacauguuucuu

SEQ ID NO: 502457 - RNA, 27 nt, Human
uggaaaguucauagagagauucaguaa

SEQ ID NO: 502458 - RNA, 20 nt, Human
ugggagaaauuuuauaaaga

SEQ ID NO: 502459 - RNA, 19 nt, Human
uguuccuggcagcccaagu

SEQ ID NO: 502460 - RNA, 18 nt, Human
uugaauggaaaguucaua

SEQ ID NO: 502461 - RNA, 19 nt, Human
uuuucagacaauguuagcu

SEQ ID NO: 502462 - RNA, 21 nt, Human
aagaaagcagaauggagaacg

SEQ ID NO: 502463 - RNA, 18 nt, Human
aagaucccugagccaggg

SEQ ID NO: 502464 - RNA, 24 nt, Human
aagcagaguccccaggguuugugg

SEQ ID NO: 502465 - RNA, 22 nt, Human
aagcugcaggcuuggccuccau

SEQ ID NO: 502466 - RNA, 28 nt, Human
acacugcuucaggagaggggggaacgcc

SEQ ID NO: 502467 - RNA, 21 nt, Human
acaggaaccacccucccaggc

SEQ ID NO: 502468 - RNA, 20 nt, Human
acaguggguggccugguacc

SEQ ID NO: 502469 - RNA, 18 nt, Human
acccccucuccccccugc

SEQ ID NO: 502470 - RNA, 25 nt, Human
acccccucuccccccugccccccag

SEQ ID NO: 502471 - RNA, 19 nt, Human
acccuguggagcuggcaga

SEQ ID NO: 502472 - RNA, 24 nt, Human
agaaagcagaauggagaacgggac

SEQ ID NO: 502473 - RNA, 23 nt, Human
agaaagcugcaggcuuggccucc

SEQ ID NO: 502474 - RNA, 23 nt, Human
agaccaggggagccuggggccgg

SEQ ID NO: 502475 - RNA, 21 nt, Human
agacuccucugagcucugccc

SEQ ID NO: 502476 - RNA, 18 nt, Human
agccagggaaagcugaug

SEQ ID NO: 502477 - RNA, 22 nt, Human
agccuggggccggcccacugug

SEQ ID NO: 502478 - RNA, 21 nt, Human
agcugggcuggcugugaugga

SEQ ID NO: 502479 - RNA, 21 nt, Human
agcuggucccucugggguccu

SEQ ID NO: 502480 - RNA, 22 nt, Human
aggaccuuggagggaacagucu

SEQ ID NO: 502481 - RNA, 19 nt, Human
agggcugggcagcggguga

SEQ ID NO: 502482 - RNA, 26 nt, Human
agggggcucagccaagcugcugggcc

SEQ ID NO: 502483 - RNA, 22 nt, Human
agguuucuuggggguggaggug

SEQ ID NO: 502484 - RNA, 19 nt, Human
aguagcaggggauccuggg

SEQ ID NO: 502485 - RNA, 21 nt, Human
agucagccuggagccuggagc

SEQ ID NO: 502486 - RNA, 24 nt, Human
agucagccuggagccuggagccag

SEQ ID NO: 502487 - RNA, 18 nt, Human
aguggaugcugagaacag

SEQ ID NO: 502488 - RNA, 21 nt, Human
cacaguggguggccugguacc

SEQ ID NO: 502489 - RNA, 19 nt, Human
caccacgacccaaucccua

SEQ ID NO: 502490 - RNA, 19 nt, Human
caccacucaggcuugcccc

SEQ ID NO: 502491 - RNA, 21 nt, Human
cacggggacuccccgggccag

SEQ ID NO: 502492 - RNA, 24 nt, Human
cacuguguggcaagaaagcagaau

SEQ ID NO: 502493 - RNA, 21 nt, Human
cagagaguggcuacggggagg

SEQ ID NO: 502494 - RNA, 25 nt, Human
cagaguccccaggguuugugcuuuu

SEQ ID NO: 502495 - RNA, 20 nt, Human
cagccaagcagaguccccag

SEQ ID NO: 502496 - RNA, 23 nt, Human
cagccccucccugaacucugucc

SEQ ID NO: 502497 - RNA, 23 nt, Human
cagccgggcugggcuuuggggcc

SEQ ID NO: 502498 - RNA, 20 nt, Human
cagccuggagccuggagcca

SEQ ID NO: 502499 - RNA, 20 nt, Human
cagcugggagggcugggcag

SEQ ID NO: 502500 - RNA, 21 nt, Human
caggcgggagcagcaucucuc

SEQ ID NO: 502501 - RNA, 20 nt, Human
caggggaggccaggcugugu

SEQ ID NO: 502502 - RNA, 19 nt, Human
cagucagccuggagccugg

SEQ ID NO: 502503 - RNA, 23 nt, Human
cagucucugaaccacguuccucc

SEQ ID NO: 502504 - RNA, 20 nt, Human
caguggguggccugguaccc

SEQ ID NO: 502505 - RNA, 22 nt, Human
cauuacccccucuccccccugc

SEQ ID NO: 502506 - RNA, 20 nt, Human
ccaaucaggcgggagcagca

SEQ ID NO: 502507 - RNA, 20 nt, Human
ccacugcauucccacugaac

SEQ ID NO: 502508 - RNA, 19 nt, Human
ccaugcagacaugcggccg

SEQ ID NO: 502509 - RNA, 21 nt, Human
ccauggagggagaauggggcc

SEQ ID NO: 502510 - RNA, 21 nt, Human
ccauuggcuccagcuuugggc

SEQ ID NO: 502511 - RNA, 24 nt, Human
cccacuguguggcaagaaagcaga

SEQ ID NO: 502512 - RNA, 23 nt, Human
cccauggccuccgccauacugcc

SEQ ID NO: 502513 - RNA, 25 nt, Human
ccccacccacugcauucccacugaa

SEQ ID NO: 502514 - RNA, 21 nt, Human
ccccagggccaccauauuggg

SEQ ID NO: 502515 - RNA, 20 nt, Human
cccccagggaagaauuucca

SEQ ID NO: 502516 - RNA, 21 nt, Human
cccccagucagccuggagccu

SEQ ID NO: 502517 - RNA, 26 nt, Human
cccccagucagccuggagccuggagc

SEQ ID NO: 502518 - RNA, 20 nt, Human
cccccauggccuccgccaua

SEQ ID NO: 502519 - RNA, 20 nt, Human
cccccucuccccccugcccc

SEQ ID NO: 502520 - RNA, 18 nt, Human
ccccgggccagcccugag

SEQ ID NO: 502521 - RNA, 19 nt, Human
ccccuagccagacucagcc

SEQ ID NO: 502522 - RNA, 21 nt, Human
ccccuagccagacucagcccc

SEQ ID NO: 502523 - RNA, 22 nt, Human
cccugaguggagcugggcuggc

SEQ ID NO: 502524 - RNA, 21 nt, Human
cccugcucacccuggggcuag

SEQ ID NO: 502525 - RNA, 23 nt, Human
cccuguggagcuggcagagagug

SEQ ID NO: 502526 - RNA, 23 nt, Human
ccucagauucuccaccacgaccc

SEQ ID NO: 502527 - RNA, 21 nt, Human
ccucgccucgcuggccuggga

SEQ ID NO: 502528 - RNA, 19 nt, Human
ccucuccccccugcccccc

SEQ ID NO: 502529 - RNA, 19 nt, Human
ccugcagaccugcucuguc

SEQ ID NO: 502530 - RNA, 20 nt, Human
ccuggacucggccccuagcc

SEQ ID NO: 502531 - RNA, 20 nt, Human
ccuggaggggccaugcggcc

SEQ ID NO: 502532 - RNA, 19 nt, Human
cggccugggaccggguucc

SEQ ID NO: 502533 - RNA, 20 nt, Human
cucacaccggagauuggacc

SEQ ID NO: 502534 - RNA, 24 nt, Human
cucacaccggagauuggacccucc

SEQ ID NO: 502535 - RNA, 20 nt, Human
cucagcccucaccauuggcc

SEQ ID NO: 502536 - RNA, 22 nt, Human
cuccauuacccccucucccccc

SEQ ID NO: 502537 - RNA, 25 nt, Human
cuccugaggccuuggccuuagaggc

SEQ ID NO: 502538 - RNA, 23 nt, Human
cucggccccuagccagacucagc

SEQ ID NO: 502539 - RNA, 24 nt, Human
cucucagcccucaccauuggcucc

SEQ ID NO: 502540 - RNA, 22 nt, Human
cucugaaccacguuccucccgg

SEQ ID NO: 502541 - RNA, 22 nt, Human
cucugggguccugaggugaggg

SEQ ID NO: 502542 - RNA, 23 nt, Human
cugccccccagcuggucccucug

SEQ ID NO: 502543 - RNA, 19 nt, Human
cuggccugggaagggcugg

SEQ ID NO: 502544 - RNA, 19 nt, Human
cuguccccucugccagccc

SEQ ID NO: 502545 - RNA, 19 nt, Human
cuugaaaucccccgccuuc

SEQ ID NO: 502546 - RNA, 19 nt, Human
gaaaacuguugccagccuc

SEQ ID NO: 502547 - RNA, 19 nt, Human
gaaaucccccgccuuccug

SEQ ID NO: 502548 - RNA, 21 nt, Human
gaaccaggacuggggcaagga

SEQ ID NO: 502549 - RNA, 21 nt, Human
gaacucuguccccucugccag

SEQ ID NO: 502550 - RNA, 21 nt, Human
gaagaggagggacacgccccu

SEQ ID NO: 502551 - RNA, 20 nt, Human
gacagccaagcagagucccc

SEQ ID NO: 502552 - RNA, 19 nt, Human
gacgcuucugccaugcaga

SEQ ID NO: 502553 - RNA, 19 nt, Human
gacuggggcaaggagaggc

SEQ ID NO: 502554 - RNA, 21 nt, Human
gccaagcugcugggccauggg

SEQ ID NO: 502555 - RNA, 21 nt, Human
gccagcccugaguggagcugg

SEQ ID NO: 502556 - RNA, 21 nt, Human
gccccaaggccaaggccggca

SEQ ID NO: 502557 - RNA, 21 nt, Human
gcccucaccauuggcuccagc

SEQ ID NO: 502558 - RNA, 21 nt, Human
gccgaggggcccccauggccu

SEQ ID NO: 502559 - RNA, 18 nt, Human
gccggucugugucccagc

SEQ ID NO: 502560 - RNA, 19 nt, Human
gccucuuccccagggccac

SEQ ID NO: 502561 - RNA, 28 nt, Human
gcgugggaggcagaccccuccugguugg

SEQ ID NO: 502562 - RNA, 22 nt, Human
gcuccgcaggggaggccaggcu

SEQ ID NO: 502563 - RNA, 19 nt, Human
gcugaccacccagccacag

SEQ ID NO: 502564 - RNA, 23 nt, Human
gcuuuggggccccacugauccca

SEQ ID NO: 502565 - RNA, 19 nt, Human
ggacuggggcaaggagagg

SEQ ID NO: 502566 - RNA, 19 nt, Human
ggacuggggcaaggagagg

SEQ ID NO: 502567 - RNA, 22 nt, Human
ggagcugggcuggcugugaugg

SEQ ID NO: 502568 - RNA, 23 nt, Human
ggaggggcacuacaggaagagga

SEQ ID NO: 502569 - RNA, 22 nt, Human
ggagguggcuguggccaugcac

SEQ ID NO: 502570 - RNA, 20 nt, Human
ggaguagcaggggauccugg

SEQ ID NO: 502571 - RNA, 20 nt, Human
ggcagagaguggcuacgggg

SEQ ID NO: 502572 - RNA, 20 nt, Human
ggcauucuccauccccagau

SEQ ID NO: 502573 - RNA, 21 nt, Human
ggccaaggccggcaggggugu

SEQ ID NO: 502574 - RNA, 19 nt, Human
ggccccuagccagacucag

SEQ ID NO: 502575 - RNA, 18 nt, Human
ggccugggaagggcuggc

SEQ ID NO: 502576 - RNA, 29 nt, Human
ggcgggagcagcaucucucuccuccuggg

SEQ ID NO: 502577 - RNA, 18 nt, Human
ggcugugugugugugugu

SEQ ID NO: 502578 - RNA, 24 nt, Human
gggaggggcacuacaggaagagga

SEQ ID NO: 502579 - RNA, 20 nt, Human
gggcagagaguggcuacggg

SEQ ID NO: 502580 - RNA, 23 nt, Human
gggcucagccaagcugcugggcc

SEQ ID NO: 502581 - RNA, 21 nt, Human
gggcuccuggacucggccccu

SEQ ID NO: 502582 - RNA, 21 nt, Human
gggcugugcagccagucuggc

SEQ ID NO: 502583 - RNA, 22 nt, Human
ggggcucagccaagcugcuggg

SEQ ID NO: 502584 - RNA, 24 nt, Human
gggguggagguggcuguggccaug

SEQ ID NO: 502585 - RNA, 19 nt, Human
gggugaggggagggagaag

SEQ ID NO: 502586 - RNA, 19 nt, Human
gguggccugcagaccugcu

SEQ ID NO: 502587 - RNA, 21 nt, Human
gugcugggcucccacuagggc

SEQ ID NO: 502588 - RNA, 18 nt, Human
gugggaggcagaccccuc

SEQ ID NO: 502589 - RNA, 18 nt, Human
uaaaaguuucuuggaggc

SEQ ID NO: 502590 - RNA, 24 nt, Human
uacccccucuccccccugcccccc

SEQ ID NO: 502591 - RNA, 19 nt, Human
uacggggaggagaccaggg

SEQ ID NO: 502592 - RNA, 19 nt, Human
uacugggcccaagccucag

SEQ ID NO: 502593 - RNA, 19 nt, Human
uagaagcauagguaguggg

SEQ ID NO: 502594 - RNA, 20 nt, Human
ucagcccucaccauuggcuc

SEQ ID NO: 502595 - RNA, 22 nt, Human
ucagccuggagccuggagccag

SEQ ID NO: 502596 - RNA, 22 nt, Human
ucccagacuccucugagcucug

SEQ ID NO: 502597 - RNA, 22 nt, Human
ucccaggcacagagcagacccc

SEQ ID NO: 502598 - RNA, 21 nt, Human
uccccgggccagcccugagug

SEQ ID NO: 502599 - RNA, 19 nt, Human
uccccucugccagcccaga

SEQ ID NO: 502600 - RNA, 24 nt, Human
ucccgggaccuaagaggaccuugg

SEQ ID NO: 502601 - RNA, 23 nt, Human
ucccugagccagggaaagcugau

SEQ ID NO: 502602 - RNA, 19 nt, Human
ucccuggcugccagucucu

SEQ ID NO: 502603 - RNA, 20 nt, Human
ucccuggcugccagucucug

SEQ ID NO: 502604 - RNA, 23 nt, Human
ucucucuccuccuggggguuucu

SEQ ID NO: 502605 - RNA, 18 nt, Human
ugaaaucccccgccuucc

SEQ ID NO: 502606 - RNA, 22 nt, Human
ugaccacccagccacagcccuc

SEQ ID NO: 502607 - RNA, 22 nt, Human
ugagaacaggaaccacccuccc

SEQ ID NO: 502608 - RNA, 22 nt, Human
ugagccagggaaagcugaugcc

SEQ ID NO: 502609 - RNA, 21 nt, Human
ugagcucugccccgggcuccc

SEQ ID NO: 502610 - RNA, 25 nt, Human
ugaggggagggagaagaucccugag

SEQ ID NO: 502611 - RNA, 23 nt, Human
ugcaggggcacucgagccccuuc

SEQ ID NO: 502612 - RNA, 18 nt, Human
ugccccgggcucccuggc

SEQ ID NO: 502613 - RNA, 22 nt, Human
ugccccgggcucccuggcugcc

SEQ ID NO: 502614 - RNA, 22 nt, Human
ugcuaaggaaugcuugugcucc

SEQ ID NO: 502615 - RNA, 21 nt, Human
ugcuaaggaaugcuugugcuu

SEQ ID NO: 502616 - RNA, 20 nt, Human
ugcugggccaugggaggggc

SEQ ID NO: 502617 - RNA, 21 nt, Human
ugcugggcucccacuagggcu

SEQ ID NO: 502618 - RNA, 18 nt, Human
uggaauguauuauguggg

SEQ ID NO: 502619 - RNA, 25 nt, Human
uggagguuucuuggggguggaggug

SEQ ID NO: 502620 - RNA, 19 nt, Human
uggcagagagugcccucag

SEQ ID NO: 502621 - RNA, 19 nt, Human
uggccuccauuacccccuc

SEQ ID NO: 502622 - RNA, 21 nt, Human
uggcuguggccaugcacuccu

SEQ ID NO: 502623 - RNA, 25 nt, Human
uggcugugugugugugugugugugg

SEQ ID NO: 502624 - RNA, 25 nt, Human
uggcugugugugugugugugugugu

SEQ ID NO: 502625 - RNA, 20 nt, Human
ugggaagggcuggcuggggc

SEQ ID NO: 502626 - RNA, 19 nt, Human
ugggagggcugggcagcgg

SEQ ID NO: 502627 - RNA, 22 nt, Human
ugggagggcugggcagcgggug

SEQ ID NO: 502628 - RNA, 23 nt, Human
uggggcuacugggcccaagccuc

SEQ ID NO: 502629 - RNA, 18 nt, Human
uggggguggagguggcug

SEQ ID NO: 502630 - RNA, 23 nt, Human
uggugaugcucuccugaggccuu

SEQ ID NO: 502631 - RNA, 22 nt, Human
uguggccaugcacuccuuugga

SEQ ID NO: 502632 - RNA, 24 nt, Human
ugugguggugaugcucuccugagg

SEQ ID NO: 502633 - RNA, 21 nt, Human
uguguggcaagaaagcagaau

SEQ ID NO: 502634 - RNA, 19 nt, Human
uguguguguguguguagca

SEQ ID NO: 502635 - RNA, 23 nt, Human
uguguguguguguguagcaaucu

SEQ ID NO: 502636 - RNA, 18 nt, Human
ugugugugugugugugug

SEQ ID NO: 502637 - RNA, 18 nt, Human
ugugugugugugugugug

SEQ ID NO: 502638 - RNA, 18 nt, Human
ugugugugugugugugug

SEQ ID NO: 502639 - RNA, 18 nt, Human
ugugugugugugugugug

SEQ ID NO: 502640 - RNA, 18 nt, Human
ugugugugugugugugug

SEQ ID NO: 502641 - RNA, 18 nt, Human
ugugugugugugugugug

SEQ ID NO: 502642 - RNA, 18 nt, Human
ugugugugugugugugug

SEQ ID NO: 502643 - RNA, 18 nt, Human
ugugugugugugugugug

SEQ ID NO: 502644 - RNA, 18 nt, Human
ugugugugugugugugug

SEQ ID NO: 502645 - RNA, 18 nt, Human
ugugugugugugugugug

SEQ ID NO: 502646 - RNA, 18 nt, Human
ugugugugugugugugug

SEQ ID NO: 502647 - RNA, 22 nt, Human
ugugugugugugugugugugag

SEQ ID NO: 502648 - RNA, 21 nt, Human
ugugugugugugugugugugu

SEQ ID NO: 502649 - RNA, 21 nt, Human
ugugugugugugugugugugu

SEQ ID NO: 502650 - RNA, 21 nt, Human
ugugugugugugugugugugu

SEQ ID NO: 502651 - RNA, 21 nt, Human
ugugugugugugugugugugu

SEQ ID NO: 502652 - RNA, 21 nt, Human
ugugugugugugugugugugu

SEQ ID NO: 502653 - RNA, 21 nt, Human
ugugugugugugugugugugu

SEQ ID NO: 502654 - RNA, 21 nt, Human
ugugugugugugugugugugu

SEQ ID NO: 502655 - RNA, 21 nt, Human
ugugugugugugugugugugu

SEQ ID NO: 502656 - RNA, 21 nt, Human
ugugugugugugugugugugu

SEQ ID NO: 502657 - RNA, 21 nt, Human
ugugugugugugugugugugu

SEQ ID NO: 502658 - RNA, 21 nt, Human
ugugugugugugugugugugu

SEQ ID NO: 502659 - RNA, 21 nt, Human
ugugugugugugugugugugu

SEQ ID NO: 502660 - RNA, 21 nt, Human
ugugugugugugugugugugu

SEQ ID NO: 502661 - RNA, 21 nt, Human
ugugugugugugugugugugu

SEQ ID NO: 502662 - RNA, 21 nt, Human
ugugugugugugugugugugu

SEQ ID NO: 502663 - RNA, 21 nt, Human
ugugugugugugugugugugu

SEQ ID NO: 502664 - RNA, 21 nt, Human
ugugugugugugugugugugu

SEQ ID NO: 502665 - RNA, 21 nt, Human
ugugugugugugugugugugu

SEQ ID NO: 502666 - RNA, 22 nt, Human
ugugugugugugugugugugua

SEQ ID NO: 502667 - RNA, 22 nt, Human
ugugugugugugugugugugug

SEQ ID NO: 502668 - RNA, 22 nt, Human
ugugugugugugugugugugug

SEQ ID NO: 502669 - RNA, 22 nt, Human
ugugugugugugugugugugug

SEQ ID NO: 502670 - RNA, 22 nt, Human
ugugugugugugugugugugug

SEQ ID NO: 502671 - RNA, 22 nt, Human
ugugugugugugugugugugug

SEQ ID NO: 502672 - RNA, 22 nt, Human
ugugugugugugugugugugug

SEQ ID NO: 502673 - RNA, 22 nt, Human
ugugugugugugugugugugug

SEQ ID NO: 502674 - RNA, 22 nt, Human
ugugugugugugugugugugug

SEQ ID NO: 502675 - RNA, 22 nt, Human
uuggggguggagguggcugugg

SEQ ID NO: 502676 - RNA, 24 nt, Human
uuuccagaaagcugcaggcuuggc

SEQ ID NO: 502677 - RNA, 25 nt, Human
uuucuuggggguggagguggcugug

SEQ ID NO: 502678 - RNA, 18 nt, Human
uuuggggccccacugauc

SEQ ID NO: 502679 - RNA, 19 nt, Human
uuuuuuuuuuuuuuuccuu

SEQ ID NO: 502680 - RNA, 19 nt, Human
aaaaggccaagcacagugg

SEQ ID NO: 502681 - RNA, 24 nt, Human
aaagcaccugacucagugccuagc

SEQ ID NO: 502682 - RNA, 20 nt, Human
aaagugcugggauuuacaaa

SEQ ID NO: 502683 - RNA, 25 nt, Human
aaagugcugggauuuacaaacauga

SEQ ID NO: 502684 - RNA, 20 nt, Human
aacauaguaagacugcaucu

SEQ ID NO: 502685 - RNA, 22 nt, Human
aacauuuugggaggccaaggca

SEQ ID NO: 502686 - RNA, 23 nt, Human
aagcacagugcucaugccuguaa

SEQ ID NO: 502687 - RNA, 21 nt, Human
aagcacagugguucaugccug

SEQ ID NO: 502688 - RNA, 20 nt, Human
aagcagaaguacugaaaugu

SEQ ID NO: 502689 - RNA, 18 nt, Human
aaggacugucaggaggga

SEQ ID NO: 502690 - RNA, 23 nt, Human
aaggcaggaggaccacuugaggc

SEQ ID NO: 502691 - RNA, 18 nt, Human
acaaacaugagccaccau

SEQ ID NO: 502692 - RNA, 22 nt, Human
acacauuaaagauugagaagcu

SEQ ID NO: 502693 - RNA, 22 nt, Human
acagaaacauguuccaucuaca

SEQ ID NO: 502694 - RNA, 21 nt, Human
acauaguaagacugcaucucu

SEQ ID NO: 502695 - RNA, 23 nt, Human
acgccagguguuugaauaaagac

SEQ ID NO: 502696 - RNA, 22 nt, Human
agcacaguaaguacucaauaag

SEQ ID NO: 502697 - RNA, 22 nt, Human
agccugggcaacauaguaagac

SEQ ID NO: 502698 - RNA, 23 nt, Human
agccugggcaacauaguaagacu

SEQ ID NO: 502699 - RNA, 19 nt, Human
agcuugccaagcacagugc

SEQ ID NO: 502700 - RNA, 18 nt, Human
aggcaggaggaccacuug

SEQ ID NO: 502701 - RNA, 24 nt, Human
agugguucaugccuguacuaucag

SEQ ID NO: 502702 - RNA, 23 nt, Human
caaaaccaacucggccuucccaa

SEQ ID NO: 502703 - RNA, 23 nt, Human
caaaaccaacucggccuucccaa

SEQ ID NO: 502704 - RNA, 25 nt, Human
caaagugcugggauuuacaaacaug

SEQ ID NO: 502705 - RNA, 25 nt, Human
caacauaguaagacugcaucucuac

SEQ ID NO: 502706 - RNA, 24 nt, Human
caacauuuugggaggccaaggcag

SEQ ID NO: 502707 - RNA, 24 nt, Human
caacauuuugggaggccaaggcag

SEQ ID NO: 502708 - RNA, 26 nt, Human
caaggcaggaggaccacuugaggcca

SEQ ID NO: 502709 - RNA, 18 nt, Human
cacaguuuuguuuguugg

SEQ ID NO: 502710 - RNA, 24 nt, Human
caccuugggaggccaggaguucaa

SEQ ID NO: 502711 - RNA, 19 nt, Human
cagcaccuugggaggccag

SEQ ID NO: 502712 - RNA, 20 nt, Human
cagcaccuugggaggccagg

SEQ ID NO: 502713 - RNA, 21 nt, Human
cagcuggacccccugggagcu

SEQ ID NO: 502714 - RNA, 19 nt, Human
cagcuuacccccuuccaua

SEQ ID NO: 502715 - RNA, 22 nt, Human
cagcuuacccccuuccauaggg

SEQ ID NO: 502716 - RNA, 20 nt, Human
ccaaagugcugggauuuaca

SEQ ID NO: 502717 - RNA, 25 nt, Human
ccaaagugcugggauuuacaaacau

SEQ ID NO: 502718 - RNA, 20 nt, Human
ccuguaauugcaacauuuug

SEQ ID NO: 502719 - RNA, 22 nt, Human
ccuguaauugcaacauuuuggg

SEQ ID NO: 502720 - RNA, 24 nt, Human
ccuguaauugcaacauuuugggag

SEQ ID NO: 502721 - RNA, 22 nt, Human
ccuguacuaucagcaccuuggg

SEQ ID NO: 502722 - RNA, 18 nt, Human
cucaagagaaugaaaucc

SEQ ID NO: 502723 - RNA, 23 nt, Human
cucaauaagcagaaguacugaaa

SEQ ID NO: 502724 - RNA, 24 nt, Human
cucaugccuguaauugcaacauuu

SEQ ID NO: 502725 - RNA, 21 nt, Human
gaaaauccuccuuagcuugcc

SEQ ID NO: 502726 - RNA, 24 nt, Human
gaagauuuuucuggaaguggcugu

SEQ ID NO: 502727 - RNA, 24 nt, Human
gaccacuugaggccaggaguuuga

SEQ ID NO: 502728 - RNA, 18 nt, Human
gcaacauuuugggaggcc

SEQ ID NO: 502729 - RNA, 23 nt, Human
gcuguuggccgacgccagguguu

SEQ ID NO: 502730 - RNA, 23 nt, Human
ggaccacuugaggccaggaguuu

SEQ ID NO: 502731 - RNA, 23 nt, Human
ggauuuacaaacaugagccacca

SEQ ID NO: 502732 - RNA, 24 nt, Human
gggauuuacaaacaugagccacca

SEQ ID NO: 502733 - RNA, 22 nt, Human
guacugaaauguccugacacca

SEQ ID NO: 502734 - RNA, 23 nt, Human
uaaaaggccaagcacagugguuc

SEQ ID NO: 502735 - RNA, 18 nt, Human
uaaagauugagaagcuca

SEQ ID NO: 502736 - RNA, 20 nt, Human
uaagacaacagacucuauaa

SEQ ID NO: 502737 - RNA, 21 nt, Human
uaagacaacagacucuauaac

SEQ ID NO: 502738 - RNA, 23 nt, Human
uacaaaauuuuaaaaggccaagc

SEQ ID NO: 502739 - RNA, 24 nt, Human
uacaaacaugagccaccaugccug

SEQ ID NO: 502740 - RNA, 18 nt, Human
uagcuugccaagcacagu

SEQ ID NO: 502741 - RNA, 22 nt, Human
ucaaaaccaacucggccuuccc

SEQ ID NO: 502742 - RNA, 23 nt, Human
uccaucuacagcguaaacuggaa

SEQ ID NO: 502743 - RNA, 18 nt, Human
ucccaaagugcugggauu

SEQ ID NO: 502744 - RNA, 18 nt, Human
ucucuacaaaauuuuaaa

SEQ ID NO: 502745 - RNA, 20 nt, Human
ucugcuuaagacaacagacu

SEQ ID NO: 502746 - RNA, 21 nt, Human
ugacagcuggacccccuggga

SEQ ID NO: 502747 - RNA, 18 nt, Human
ugacucagugccuagcac

SEQ ID NO: 502748 - RNA, 20 nt, Human
ugacucagugccuagcacag

SEQ ID NO: 502749 - RNA, 18 nt, Human
ugccuguacuaucagcac

SEQ ID NO: 502750 - RNA, 21 nt, Human
ugccuguacuaucagcaccuu

SEQ ID NO: 502751 - RNA, 25 nt, Human
ugcugggauuuacaaacaugagcca

SEQ ID NO: 502752 - RNA, 24 nt, Human
ugggaggccaaggcaggaggacca

SEQ ID NO: 502753 - RNA, 24 nt, Human
ugggaggccaggaguucaaaacca

SEQ ID NO: 502754 - RNA, 18 nt, Human
uguuggugccuugaaaag

SEQ ID NO: 502755 - RNA, 26 nt, Human
uucaaaaccaacucggccuucccaaa

SEQ ID NO: 502756 - RNA, 20 nt, Human
uucacagaaacauguuccau

SEQ ID NO: 502757 - RNA, 21 nt, Human
uucagaaucggcaucuauucc

SEQ ID NO: 502758 - RNA, 20 nt, Human
uuugaauaaagacagcagca

SEQ ID NO: 502759 - RNA, 25 nt, Human
aaaaaggaaaaacaacacaagagaa

SEQ ID NO: 502760 - RNA, 25 nt, Human
aaacaacacaagagaacacauaucg

SEQ ID NO: 502761 - RNA, 23 nt, Human
aaaggcaucucagcaacacagaa

SEQ ID NO: 502762 - RNA, 20 nt, Human
aaagggagcugggaaguccc

SEQ ID NO: 502763 - RNA, 18 nt, Human
aaagucagugaagaccag

SEQ ID NO: 502764 - RNA, 20 nt, Human
aaauaaucacccgagggcaa

SEQ ID NO: 502765 - RNA, 21 nt, Human
aaccguaagggugucauagcc

SEQ ID NO: 502766 - RNA, 23 nt, Human
aagagcaaagguauggaaggaca

SEQ ID NO: 502767 - RNA, 19 nt, Human
aagcaggagcagcgacugg

SEQ ID NO: 502768 - RNA, 20 nt, Human
aagggagcugggaaguccca

SEQ ID NO: 502769 - RNA, 20 nt, Human
aaucacccgagggcaaggcg

SEQ ID NO: 502770 - RNA, 22 nt, Human
aaucgccuuuuucacuuggaac

SEQ ID NO: 502771 - RNA, 18 nt, Human
acaaugaggucaggaaca

SEQ ID NO: 502772 - RNA, 19 nt, Human
acagaaauaugaaagucug

SEQ ID NO: 502773 - RNA, 20 nt, Human
accaagguguacccggggug

SEQ ID NO: 502774 - RNA, 20 nt, Human
accaaugcaacaccuccuug

SEQ ID NO: 502775 - RNA, 21 nt, Human
acccuggacuaagccuccaca

SEQ ID NO: 502776 - RNA, 22 nt, Human
acuauagaggagggcagcugaa

SEQ ID NO: 502777 - RNA, 22 nt, Human
acuguggugccugagaagcuuc

SEQ ID NO: 502778 - RNA, 20 nt, Human
agagagcccggucccaagac

SEQ ID NO: 502779 - RNA, 22 nt, Human
agauuggauccacauguucucg

SEQ ID NO: 502780 - RNA, 21 nt, Human
agcuugaugaccuuguccggg

SEQ ID NO: 502781 - RNA, 24 nt, Human
agcuugaugaccuuguccgggucg

SEQ ID NO: 502782 - RNA, 21 nt, Human
aggagccucgcgcacagcacc

SEQ ID NO: 502783 - RNA, 24 nt, Human
aggcaucucagcaacacagaaaua

SEQ ID NO: 502784 - RNA, 24 nt, Human
agggagcugggaagucccacgaug

SEQ ID NO: 502785 - RNA, 19 nt, Human
agucugucgugaaccacag

SEQ ID NO: 502786 - RNA, 18 nt, Human
aucuggacacaugucaga

SEQ ID NO: 502787 - RNA, 19 nt, Human
auggagucguagccaauuc

SEQ ID NO: 502788 - RNA, 18 nt, Human
auggugccguucugagaa

SEQ ID NO: 502789 - RNA, 18 nt, Human
augucugcagauacucca

SEQ ID NO: 502790 - RNA, 24 nt, Human
auguguccacaaagaugguaaugu

SEQ ID NO: 502791 - RNA, 23 nt, Human
caaaagggagcugggaaguccca

SEQ ID NO: 502792 - RNA, 23 nt, Human
caaaaucuucuucaagagcaaag

SEQ ID NO: 502793 - RNA, 22 nt, Human
caaaggcaagcuugaugaccuu

SEQ ID NO: 502794 - RNA, 20 nt, Human
caaauaaucacccgagggca

SEQ ID NO: 502795 - RNA, 21 nt, Human
caaauaaucacccgagggcaa

SEQ ID NO: 502796 - RNA, 22 nt, Human
caagagaacacauaucguggug

SEQ ID NO: 502797 - RNA, 22 nt, Human
cacacagugugcauuaucuuca

SEQ ID NO: 502798 - RNA, 22 nt, Human
cacagcaccagcagcccgagaa

SEQ ID NO: 502799 - RNA, 27 nt, Human
cacagcaccagcagcccgagaagcagg

SEQ ID NO: 502800 - RNA, 31 nt, Human
caccagcagcccgagaagcaggagcagcgag

SEQ ID NO: 502801 - RNA, 24 nt, Human
caccgugaugagccaaaugcaguc

SEQ ID NO: 502802 - RNA, 22 nt, Human
caccuucccagcaucaccaacc

SEQ ID NO: 502803 - RNA, 23 nt, Human
cacgaugcaccauuuccugggcu

SEQ ID NO: 502804 - RNA, 25 nt, Human
cacgcagucaugucugcagauacuc

SEQ ID NO: 502805 - RNA, 23 nt, Human
cacucgaaagauacugauugccc

SEQ ID NO: 502806 - RNA, 20 nt, Human
cagcagugccgguacugugg

SEQ ID NO: 502807 - RNA, 21 nt, Human
cagccagaaugguccaggugc

SEQ ID NO: 502808 - RNA, 24 nt, Human
cagcccgagaagcaggagcagcga

SEQ ID NO: 502809 - RNA, 24 nt, Human
cagcgacuggaaucuccuccacgc

SEQ ID NO: 502810 - RNA, 18 nt, Human
cagcgagcgucucuguaa

SEQ ID NO: 502811 - RNA, 19 nt, Human
caggguguacccgggcucg

SEQ ID NO: 502812 - RNA, 19 nt, Human
caguaaagccagaguggaa

SEQ ID NO: 502813 - RNA, 19 nt, Human
caguaugauucccacuuaa

SEQ ID NO: 502814 - RNA, 18 nt, Human
cagugccgguacuguggu

SEQ ID NO: 502815 - RNA, 19 nt, Human
cauacagaugcagccaggc

SEQ ID NO: 502816 - RNA, 27 nt, Human
cauuucugccuguggaaccgcuggggg

SEQ ID NO: 502817 - RNA, 21 nt, Human
ccaaauaaucacccgagggca

SEQ ID NO: 502818 - RNA, 21 nt, Human
ccacugaucucuaagaaauca

SEQ ID NO: 502819 - RNA, 24 nt, Human
ccaggugcagucuaaguuguuggg

SEQ ID NO: 502820 - RNA, 23 nt, Human
ccaguuucuguugaucccaugcu

SEQ ID NO: 502821 - RNA, 19 nt, Human
cccgugaugaugauccagg

SEQ ID NO: 502822 - RNA, 19 nt, Human
cccuuguugaggcugucca

SEQ ID NO: 502823 - RNA, 19 nt, Human
ccgccgcgcauccgacgcc

SEQ ID NO: 502824 - RNA, 20 nt, Human
ccgccgcgcauccgacgccu

SEQ ID NO: 502825 - RNA, 20 nt, Human
ccgcuaaauuguccaaucau

SEQ ID NO: 502826 - RNA, 18 nt, Human
ccuggacugagaaugacu

SEQ ID NO: 502827 - RNA, 20 nt, Human
ccuggagcacguaauugucc

SEQ ID NO: 502828 - RNA, 22 nt, Human
cgaaagauacugauugccccac

SEQ ID NO: 502829 - RNA, 18 nt, Human
cgcacagcaccagcagcc

SEQ ID NO: 502830 - RNA, 18 nt, Human
cgcgcauccgacgccucc

SEQ ID NO: 502831 - RNA, 23 nt, Human
cgcguuguucucguacucugaag

SEQ ID NO: 502832 - RNA, 26 nt, Human
cucaggaucacaccacccaaggugcu

SEQ ID NO: 502833 - RNA, 20 nt, Human
cuccacacgcacgcgacacc

SEQ ID NO: 502834 - RNA, 22 nt, Human
cuccacacgcacgcgacaccga

SEQ ID NO: 502835 - RNA, 20 nt, Human
cuccacaguucugacccuuc

SEQ ID NO: 502836 - RNA, 23 nt, Human
cucugcaaaagggagcugggaag

SEQ ID NO: 502837 - RNA, 20 nt, Human
cucuugacuucaacucaauc

SEQ ID NO: 502838 - RNA, 21 nt, Human
cuggcagaguggcgugaggga

SEQ ID NO: 502839 - RNA, 23 nt, Human
cugggcagcaucuugacuccucu

SEQ ID NO: 502840 - RNA, 21 nt, Human
cuguacauuugcaccaacccu

SEQ ID NO: 502841 - RNA, 19 nt, Human
cuuggcaugcagcaagacc

SEQ ID NO: 502842 - RNA, 22 nt, Human
gaagaaccaucaaacacuucca

SEQ ID NO: 502843 - RNA, 21 nt, Human
gaaggucugggcgcccggcuc

SEQ ID NO: 502844 - RNA, 19 nt, Human
gaauguacccaggauaaca

SEQ ID NO: 502845 - RNA, 25 nt, Human
gacuggaaucuccuccaaccggagg

SEQ ID NO: 502846 - RNA, 18 nt, Human
gagcacauacaagaccga

SEQ ID NO: 502847 - RNA, 19 nt, Human
gaguggaagggagaguggu

SEQ ID NO: 502848 - RNA, 23 nt, Human
gauaacacucgaaagauacugau

SEQ ID NO: 502849 - RNA, 22 nt, Human
gaucacaccacccaaggugcuc

SEQ ID NO: 502850 - RNA, 20 nt, Human
gaugcaccauuuccugggcu

SEQ ID NO: 502851 - RNA, 21 nt, Human
gcacagcaccagcagcccgag

SEQ ID NO: 502852 - RNA, 22 nt, Human
gcagguagaguugguuggaagu

SEQ ID NO: 502853 - RNA, 23 nt, Human
gcagucaugucugcagauacucc

SEQ ID NO: 502854 - RNA, 23 nt, Human
gcaguccgcguuguucucguacu

SEQ ID NO: 502855 - RNA, 19 nt, Human
gcaucuugacuccucuuga

SEQ ID NO: 502856 - RNA, 21 nt, Human
gcccgagaagcaggagcagcg

SEQ ID NO: 502857 - RNA, 21 nt, Human
gcccggcucgcuucccucuca

SEQ ID NO: 502858 - RNA, 18 nt, Human
ggaaacccugggcucuca

SEQ ID NO: 502859 - RNA, 19 nt, Human
ggaacugagcguuaaaucc

SEQ ID NO: 502860 - RNA, 19 nt, Human
ggaccgucccaaacagcaa

SEQ ID NO: 502861 - RNA, 18 nt, Human
ggauccacauguucucgc

SEQ ID NO: 502862 - RNA, 23 nt, Human
ggcagcaucuugacuccucuuga

SEQ ID NO: 502863 - RNA, 19 nt, Human
ggcucagccagaauggucc

SEQ ID NO: 502864 - RNA, 25 nt, Human
gggcauugugcuucacauguuggga

SEQ ID NO: 502865 - RNA, 21 nt, Human
gggccggggccggggacgagc

SEQ ID NO: 502866 - RNA, 22 nt, Human
gucccaagacccgccgcgcauc

SEQ ID NO: 502867 - RNA, 19 nt, Human
gucggugguugcugucaga

SEQ ID NO: 502868 - RNA, 24 nt, Human
gucugggaguuaaaauaauuaccc

SEQ ID NO: 502869 - RNA, 19 nt, Human
gugcauuaucuucauacug

SEQ ID NO: 502870 - RNA, 19 nt, Human
guggaaccgcugggggagg

SEQ ID NO: 502871 - RNA, 21 nt, Human
guggaucuggacaguucugua

SEQ ID NO: 502872 - RNA, 18 nt, Human
uaaauucccuuguugagg

SEQ ID NO: 502873 - RNA, 21 nt, Human
uaacugauuacuccugcuugu

SEQ ID NO: 502874 - RNA, 19 nt, Human
uaagcauuucugccugugg

SEQ ID NO: 502875 - RNA, 19 nt, Human
uacccuggacugagaauga

SEQ ID NO: 502876 - RNA, 22 nt, Human
uacccuggacugagaaugacuc

SEQ ID NO: 502877 - RNA, 21 nt, Human
uagguaaaacuucauauaaug

SEQ ID NO: 502878 - RNA, 21 nt, Human
uaguuugauccguagaagacc

SEQ ID NO: 502879 - RNA, 22 nt, Human
uauaacugauuacuccugcuug

SEQ ID NO: 502880 - RNA, 24 nt, Human
ucaaaaucuucuucaagagcaaag

SEQ ID NO: 502881 - RNA, 19 nt, Human
ucagcgucccuccacaggu

SEQ ID NO: 502882 - RNA, 20 nt, Human
uccacacgcacgcgacaccg

SEQ ID NO: 502883 - RNA, 22 nt, Human
uccacgagcccagacgauugca

SEQ ID NO: 502884 - RNA, 20 nt, Human
uccuguuggggcacugaggg

SEQ ID NO: 502885 - RNA, 22 nt, Human
ucguucaccauguaccgaucuc

SEQ ID NO: 502886 - RNA, 21 nt, Human
ucucccaccuucccagcauca

SEQ ID NO: 502887 - RNA, 22 nt, Human
ucugaaauggggguggaucugg

SEQ ID NO: 502888 - RNA, 24 nt, Human
ucugaggcauugaguaugacgugu

SEQ ID NO: 502889 - RNA, 22 nt, Human
ucuguaacucucugacagguga

SEQ ID NO: 502890 - RNA, 26 nt, Human
ucugucgugaaccacagagugaggau

SEQ ID NO: 502891 - RNA, 24 nt, Human
ucuugcuacugauaacuggagagg

SEQ ID NO: 502892 - RNA, 21 nt, Human
ugaaaggcaucucagcaacac

SEQ ID NO: 502893 - RNA, 19 nt, Human
ugaagggaagugcgggcug

SEQ ID NO: 502894 - RNA, 18 nt, Human
ugaagucggaaccugcuc

SEQ ID NO: 502895 - RNA, 19 nt, Human
ugagcacauacaagaccga

SEQ ID NO: 502896 - RNA, 20 nt, Human
ugagcaggacuugguuggug

SEQ ID NO: 502897 - RNA, 18 nt, Human
ugauccguagaagacccu

SEQ ID NO: 502898 - RNA, 21 nt, Human
ugcagccaggcauuuagaacc

SEQ ID NO: 502899 - RNA, 24 nt, Human
ugccuguggaaccgcugggggagg

SEQ ID NO: 502900 - RNA, 20 nt, Human
ugcuuugaaaccuugggcac

SEQ ID NO: 502901 - RNA, 18 nt, Human
uggaaaccagcagcugcc

SEQ ID NO: 502902 - RNA, 18 nt, Human
uggaaggagagcacgucg

SEQ ID NO: 502903 - RNA, 23 nt, Human
uggaaggagagcacgucguucac

SEQ ID NO: 502904 - RNA, 19 nt, Human
uggaagggagagugguaua

SEQ ID NO: 502905 - RNA, 21 nt, Human
uggaagggagagugguauaug

SEQ ID NO: 502906 - RNA, 24 nt, Human
uggaaucccaggaucuggacacau

SEQ ID NO: 502907 - RNA, 24 nt, Human
uggauggagcuuccgugccacuga

SEQ ID NO: 502908 - RNA, 22 nt, Human
uggcacugguacuucacaaaau

SEQ ID NO: 502909 - RNA, 28 nt, Human
uggcauaguucggauacccgugaggaaa

SEQ ID NO: 502910 - RNA, 22 nt, Human
uggcauggucaguggaccagcg

SEQ ID NO: 502911 - RNA, 19 nt, Human
uggcuagguaaaacuucau

SEQ ID NO: 502912 - RNA, 19 nt, Human
ugggaacugagcuugcaag

SEQ ID NO: 502913 - RNA, 23 nt, Human
ugggaagccggggcucaggauca

SEQ ID NO: 502914 - RNA, 22 nt, Human
ugggacccuggacuaagccucc

SEQ ID NO: 502915 - RNA, 21 nt, Human
uggggguggaucuggacaguu

SEQ ID NO: 502916 - RNA, 19 nt, Human
uggucacuccaagcagcga

SEQ ID NO: 502917 - RNA, 22 nt, Human
ugguccaggugcaguccgcguu

SEQ ID NO: 502918 - RNA, 19 nt, Human
uguaccggauuuugucucc

SEQ ID NO: 502919 - RNA, 21 nt, Human
uguggaaccgcugggggaggu

SEQ ID NO: 502920 - RNA, 22 nt, Human
uguggccgaccauucgguaucc

SEQ ID NO: 502921 - RNA, 21 nt, Human
uguggucacuccaagcagcga

SEQ ID NO: 502922 - RNA, 21 nt, Human
uuccagugcaucaaacugcuu

SEQ ID NO: 502923 - RNA, 18 nt, Human
uucccagucugggugcgg

SEQ ID NO: 502924 - RNA, 21 nt, Human
uuccuccgcaggcucccucag

SEQ ID NO: 502925 - RNA, 30 nt, Human
uuccuccgcaggcucccucagcucugcaaa

SEQ ID NO: 502926 - RNA, 20 nt, Human
uuccugggcugacgaugcag

SEQ ID NO: 502927 - RNA, 24 nt, Human
uuggaacugagcguuaaauccuuu

SEQ ID NO: 502928 - RNA, 22 nt, Human
uuuucuggaaucccaggaucug

SEQ ID NO: 502929 - RNA, 21 nt, Human
aaggagagucaaccaggcagc

SEQ ID NO: 502930 - RNA, 25 nt, Human
acagagucuccuauaguacagcaag

SEQ ID NO: 502931 - RNA, 22 nt, Human
acagcagcacuuagcuuccucc

SEQ ID NO: 502932 - RNA, 21 nt, Human
agaaauggcaggagcugcagg

SEQ ID NO: 502933 - RNA, 21 nt, Human
agagucaaccaggcagcccua

SEQ ID NO: 502934 - RNA, 19 nt, Human
agcagcacuuagcuuccuc

SEQ ID NO: 502935 - RNA, 19 nt, Human
aggcccuggcugcccgcac

SEQ ID NO: 502936 - RNA, 21 nt, Human
caaugggaaggagagucaacc

SEQ ID NO: 502937 - RNA, 24 nt, Human
caccuucacuguaaacaaugggaa

SEQ ID NO: 502938 - RNA, 23 nt, Human
cagccaagugagacguuagguau

SEQ ID NO: 502939 - RNA, 20 nt, Human
ccacuaccuccaccucggca

SEQ ID NO: 502940 - RNA, 20 nt, Human
cccauggcggucugcagcca

SEQ ID NO: 502941 - RNA, 20 nt, Human
ccccaaagaggagucccuuc

SEQ ID NO: 502942 - RNA, 19 nt, Human
ccccagggccugaggacuc

SEQ ID NO: 502943 - RNA, 19 nt, Human
ccuuuuccucuuaaagaaa

SEQ ID NO: 502944 - RNA, 23 nt, Human
cugggggcaucuguuuucuucuu

SEQ ID NO: 502945 - RNA, 20 nt, Human
cuuccaaugagaaauggcag

SEQ ID NO: 502946 - RNA, 18 nt, Human
cuuccuccacuaccucca

SEQ ID NO: 502947 - RNA, 24 nt, Human
gcacuuagcuuccuccacuaccuc

SEQ ID NO: 502948 - RNA, 20 nt, Human
gccccuucugggggcaucug

SEQ ID NO: 502949 - RNA, 21 nt, Human
ggccccuucugggggcaucug

SEQ ID NO: 502950 - RNA, 21 nt, Human
gucacuuguggcgcugagcag

SEQ ID NO: 502951 - RNA, 21 nt, Human
uaaccaccugcacugaucccc

SEQ ID NO: 502952 - RNA, 19 nt, Human
ucauaugugacuuuugucc

SEQ ID NO: 502953 - RNA, 23 nt, Human
uccccagggccugaggacuccug

SEQ ID NO: 502954 - RNA, 21 nt, Human
ucccccaaagaggagucccuu

SEQ ID NO: 502955 - RNA, 21 nt, Human
ucuccuauaguacagcaaguu

SEQ ID NO: 502956 - RNA, 20 nt, Human
ucuuaaagaaacagcagcac

SEQ ID NO: 502957 - RNA, 20 nt, Human
ugaaugacaccuucacugua

SEQ ID NO: 502958 - RNA, 22 nt, Human
ugagcagucuucuuccuuuucc

SEQ ID NO: 502959 - RNA, 27 nt, Human
uggaggaacagcagcucugggaccugc

SEQ ID NO: 502960 - RNA, 18 nt, Human
uggauauccacccucccc

SEQ ID NO: 502961 - RNA, 21 nt, Human
uggauauccacccucccccaa

SEQ ID NO: 502962 - RNA, 18 nt, Human
uggcaggagcugcaggua

SEQ ID NO: 502963 - RNA, 26 nt, Human
uggcaggagcugcagguacaauugag

SEQ ID NO: 502964 - RNA, 18 nt, Human
uggcgcugagcagucuuc

SEQ ID NO: 502965 - RNA, 20 nt, Human
ugggggcaucuguuuucuuc

SEQ ID NO: 502966 - RNA, 21 nt, Human
uuaaagaaacagcagcacuua

SEQ ID NO: 502967 - RNA, 19 nt, Human
uuccaaugagaaauggcag

SEQ ID NO: 502968 - RNA, 19 nt, Human
uucuucuuuuuaguuugga

SEQ ID NO: 502969 - RNA, 20 nt, Human
uucuucuuuuuaguuuggau

SEQ ID NO: 502970 - RNA, 24 nt, Human
uuguggcgcugagcagucuucuuc

SEQ ID NO: 502971 - RNA, 21 nt, Human
caagaaauagacucuguacaa

SEQ ID NO: 502972 - RNA, 25 nt, Human
ccccacccacuaccccgcuuccucu

SEQ ID NO: 502973 - RNA, 19 nt, Human
ccccgcuuccucucuucuu

SEQ ID NO: 502974 - RNA, 22 nt, Human
ccuacccccacccacuaccccg

SEQ ID NO: 502975 - RNA, 19 nt, Human
ucccuacccccacccacua

SEQ ID NO: 502976 - RNA, 22 nt, Human
ucccuacccccacccacuaccc

SEQ ID NO: 502977 - RNA, 23 nt, Human
ucccuacccccacccacuacccc

SEQ ID NO: 502978 - RNA, 20 nt, Human
uucccuacccccacccacua

SEQ ID NO: 502979 - RNA, 22 nt, Human
uuucuucccuacccccacccac

SEQ ID NO: 502980 - RNA, 23 nt, Human
aaaucuaugcccuaaccuugcgg

SEQ ID NO: 502981 - RNA, 18 nt, Human
aacaggagaccuccaccc

SEQ ID NO: 502982 - RNA, 21 nt, Human
aaccaguugcacauccaggac

SEQ ID NO: 502983 - RNA, 23 nt, Human
aagcagcuuuagaguguagccaa

SEQ ID NO: 502984 - RNA, 20 nt, Human
aagguuuccuuggggcuuuu

SEQ ID NO: 502985 - RNA, 18 nt, Human
acccgcaaagguuuccuu

SEQ ID NO: 502986 - RNA, 27 nt, Human
agcaagggaggcagcugugcagagaga

SEQ ID NO: 502987 - RNA, 22 nt, Human
aggagggugcggaaaggcuuug

SEQ ID NO: 502988 - RNA, 21 nt, Human
agggguuggcccuucugcagc

SEQ ID NO: 502989 - RNA, 20 nt, Human
agggugcggaaaggcuuuga

SEQ ID NO: 502990 - RNA, 20 nt, Human
auaugugugcaugugugugu

SEQ ID NO: 502991 - RNA, 27 nt, Human
auccucccuaccacuccaaaggagccc

SEQ ID NO: 502992 - RNA, 18 nt, Human
aucugcucugcgccccuc

SEQ ID NO: 502993 - RNA, 21 nt, Human
augacagagggggccucugug

SEQ ID NO: 502994 - RNA, 23 nt, Human
auguguaugugugcaugugcgug

SEQ ID NO: 502995 - RNA, 22 nt, Human
augugugcaugcauguguaugu

SEQ ID NO: 502996 - RNA, 33 nt, Human
augugugcaugugugugcaugcauguguguggu

SEQ ID NO: 502997 - RNA, 18 nt, Human
augugugccuguguaugu

SEQ ID NO: 502998 - RNA, 22 nt, Human
augugugugcaugcaugugugu

SEQ ID NO: 502999 - RNA, 22 nt, Human
augugugugugcauguguaugu

SEQ ID NO: 503000 - RNA, 24 nt, Human
auuucccagcgccccucucugcca

SEQ ID NO: 503001 - RNA, 19 nt, Human
caaagcagcuuuagagugu

SEQ ID NO: 503002 - RNA, 21 nt, Human
cacugugcugugacagacagg

SEQ ID NO: 503003 - RNA, 20 nt, Human
cacuuugccucuggaguuuu

SEQ ID NO: 503004 - RNA, 25 nt, Human
cagcucccgggucugcugguccccu

SEQ ID NO: 503005 - RNA, 23 nt, Human
caggggacagcucccgggucugc

SEQ ID NO: 503006 - RNA, 21 nt, Human
cauauguaugugugcaugcau

SEQ ID NO: 503007 - RNA, 18 nt, Human
caugaaggcaaagcagcu

SEQ ID NO: 503008 - RNA, 21 nt, Human
cauguguauauauguguuugu

SEQ ID NO: 503009 - RNA, 24 nt, Human
cauguguaugugugcaugcaugug

SEQ ID NO: 503010 - RNA, 20 nt, Human
cauguguaugugugcaugug

SEQ ID NO: 503011 - RNA, 18 nt, Human
caugugugugugcauaca

SEQ ID NO: 503012 - RNA, 23 nt, Human
caugugugugugcauacaugugu

SEQ ID NO: 503013 - RNA, 20 nt, Human
caugugugugugcaugugua

SEQ ID NO: 503014 - RNA, 21 nt, Human
caugugugugugcgugcauau

SEQ ID NO: 503015 - RNA, 22 nt, Human
ccacccgcaaagguuuccuugg

SEQ ID NO: 503016 - RNA, 21 nt, Human
ccacccucagggagagcaagg

SEQ ID NO: 503017 - RNA, 21 nt, Human
ccacucaggcccaauguucca

SEQ ID NO: 503018 - RNA, 22 nt, Human
ccaggggaaacccaguuggccc

SEQ ID NO: 503019 - RNA, 21 nt, Human
cccaaagacagaugugagacc

SEQ ID NO: 503020 - RNA, 18 nt, Human
cccaugcaaagagggcuc

SEQ ID NO: 503021 - RNA, 23 nt, Human
ccccacccgcaaagguuuccuug

SEQ ID NO: 503022 - RNA, 22 nt, Human
cccccaugcagaugaaacuccu

SEQ ID NO: 503023 - RNA, 20 nt, Human
cccgcggccguggggcuccg

SEQ ID NO: 503024 - RNA, 20 nt, Human
ccuccugcccagccagggga

SEQ ID NO: 503025 - RNA, 22 nt, Human
ccugcaaagugcccccaugcag

SEQ ID NO: 503026 - RNA, 28 nt, Human
ccugugcauauaugugugcaugugugug

SEQ ID NO: 503027 - RNA, 28 nt, Human
ccuguguaugugugcaugcauguguaug

SEQ ID NO: 503028 - RNA, 20 nt, Human
cgccguccuaggcgccgccc

SEQ ID NO: 503029 - RNA, 31 nt, Human
cgugcauauguaugugugcaugcauguagug

SEQ ID NO: 503030 - RNA, 18 nt, Human
cguggccccacugugcug

SEQ ID NO: 503031 - RNA, 20 nt, Human
cucuccuccugcccagccag

SEQ ID NO: 503032 - RNA, 18 nt, Human
cugauccucccuaccacu

SEQ ID NO: 503033 - RNA, 19 nt, Human
cugcccucuccuccugccc

SEQ ID NO: 503034 - RNA, 25 nt, Human
cuugugguugccagguccacuuugc

SEQ ID NO: 503035 - RNA, 20 nt, Human
gaaaggcuuugagcagggaa

SEQ ID NO: 503036 - RNA, 24 nt, Human
gagcaagggaggcagcugugcaga

SEQ ID NO: 503037 - RNA, 22 nt, Human
gagcagggaagggcugcucucu

SEQ ID NO: 503038 - RNA, 23 nt, Human
gagcuguaguggagccgggcggc

SEQ ID NO: 503039 - RNA, 25 nt, Human
gaggaggggcugcuuuccuauggca

SEQ ID NO: 503040 - RNA, 18 nt, Human
gauuccuuccaggcugcu

SEQ ID NO: 503041 - RNA, 21 nt, Human
gcaugugcacauguaugugug

SEQ ID NO: 503042 - RNA, 21 nt, Human
gcgggaggcgagagcugcccu

SEQ ID NO: 503043 - RNA, 24 nt, Human
gcgguggaggggguggugccugaa

SEQ ID NO: 503044 - RNA, 20 nt, Human
gcuggagcuguaguggagcc

SEQ ID NO: 503045 - RNA, 24 nt, Human
ggacagucaggagggugcggaaag

SEQ ID NO: 503046 - RNA, 21 nt, Human
ggagagccgugugcgggaggc

SEQ ID NO: 503047 - RNA, 18 nt, Human
ggaggggguggugccuga

SEQ ID NO: 503048 - RNA, 19 nt, Human
ggauuccuuccaggcugcu

SEQ ID NO: 503049 - RNA, 19 nt, Human
ggcaggccacccucaggga

SEQ ID NO: 503050 - RNA, 28 nt, Human
gggaaacugcuggccagcaugggugccc

SEQ ID NO: 503051 - RNA, 23 nt, Human
ggggagcccaaagcugcaggguc

SEQ ID NO: 503052 - RNA, 18 nt, Human
gggggagcccaaagcugc

SEQ ID NO: 503053 - RNA, 21 nt, Human
gggggagcccaaagcugcagg

SEQ ID NO: 503054 - RNA, 18 nt, Human
guaacgccccacccgcaa

SEQ ID NO: 503055 - RNA, 21 nt, Human
guaugugcauguguauauaug

SEQ ID NO: 503056 - RNA, 19 nt, Human
guaugugugaggaggggcu

SEQ ID NO: 503057 - RNA, 20 nt, Human
guaugugugcaugugugugu

SEQ ID NO: 503058 - RNA, 23 nt, Human
gugcaaaccaguugcacauccag

SEQ ID NO: 503059 - RNA, 18 nt, Human
gugcaaggccagagaaug

SEQ ID NO: 503060 - RNA, 18 nt, Human
guggcucugccacagccc

SEQ ID NO: 503061 - RNA, 29 nt, Human
gugugugcaugcaugugugugcaugugca

SEQ ID NO: 503062 - RNA, 21 nt, Human
gugugugcauguguaugugug

SEQ ID NO: 503063 - RNA, 21 nt, Human
gugugugcgugcauauguaug

SEQ ID NO: 503064 - RNA, 19 nt, Human
uauaugugugcaugugugu

SEQ ID NO: 503065 - RNA, 22 nt, Human
uauaugugugcaugugugugug

SEQ ID NO: 503066 - RNA, 19 nt, Human
uauauguguuugugugcau

SEQ ID NO: 503067 - RNA, 19 nt, Human
uaugggggagcccaaagcu

SEQ ID NO: 503068 - RNA, 18 nt, Human
uaugugcauguguauaua

SEQ ID NO: 503069 - RNA, 19 nt, Human
uaugugugcaugugugugu

SEQ ID NO: 503070 - RNA, 24 nt, Human
uaugugugcggugcaugugugugu

SEQ ID NO: 503071 - RNA, 24 nt, Human
uauguguuugugugcauggauaug

SEQ ID NO: 503072 - RNA, 22 nt, Human
ucagggagagcaagggaggcag

SEQ ID NO: 503073 - RNA, 20 nt, Human
ucauauguggacaggagagu

SEQ ID NO: 503074 - RNA, 19 nt, Human
uccaggcccuucccacucc

SEQ ID NO: 503075 - RNA, 20 nt, Human
ucccgagguagcugccuccc

SEQ ID NO: 503076 - RNA, 21 nt, Human
ucccgagguagcugccucccu

SEQ ID NO: 503077 - RNA, 21 nt, Human
ucgccguccuaggcgccgccc

SEQ ID NO: 503078 - RNA, 20 nt, Human
ucguggccccacugugcugu

SEQ ID NO: 503079 - RNA, 19 nt, Human
ucuaugcccuaaccuugcg

SEQ ID NO: 503080 - RNA, 19 nt, Human
ucugcccucuccuccugcc

SEQ ID NO: 503081 - RNA, 20 nt, Human
ucugcccucuccuccugccc

SEQ ID NO: 503082 - RNA, 21 nt, Human
ucuggggccucaggagggccc

SEQ ID NO: 503083 - RNA, 24 nt, Human
ucuguaggugaggcuuucuggggc

SEQ ID NO: 503084 - RNA, 22 nt, Human
ucuguguaugugcauguguaua

SEQ ID NO: 503085 - RNA, 19 nt, Human
ucugugugacaguggcucu

SEQ ID NO: 503086 - RNA, 22 nt, Human
ucugugugacaguggcucugcc

SEQ ID NO: 503087 - RNA, 18 nt, Human
ugaagaaauaaauguuga

SEQ ID NO: 503088 - RNA, 20 nt, Human
ugaucaggagagccgugugc

SEQ ID NO: 503089 - RNA, 24 nt, Human
ugcauacaugugugugccugugca

SEQ ID NO: 503090 - RNA, 22 nt, Human
ugcaugcauguaugccugugua

SEQ ID NO: 503091 - RNA, 25 nt, Human
ugcaugcauguaugccuguguaugu

SEQ ID NO: 503092 - RNA, 22 nt, Human
ugcaugcaugugugccugugua

SEQ ID NO: 503093 - RNA, 20 nt, Human
ugcauggauaugugugcggu

SEQ ID NO: 503094 - RNA, 22 nt, Human
ugcauguaugccuguguaugug

SEQ ID NO: 503095 - RNA, 19 nt, Human
ugcaugugugccuguguau

SEQ ID NO: 503096 - RNA, 22 nt, Human
ugcaugugugccuguguaugug

SEQ ID NO: 503097 - RNA, 20 nt, Human
ugcaugugugugugcauaca

SEQ ID NO: 503098 - RNA, 19 nt, Human
ugcaugugugugugcaugu

SEQ ID NO: 503099 - RNA, 21 nt, Human
ugcccaaagacagaugugaga

SEQ ID NO: 503100 - RNA, 19 nt, Human
ugccucugucucccaucuc

SEQ ID NO: 503101 - RNA, 26 nt, Human
ugccugaaucuguuugaacaugaagg

SEQ ID NO: 503102 - RNA, 24 nt, Human
ugcgggcgguggaggggguggugc

SEQ ID NO: 503103 - RNA, 24 nt, Human
ugcguguaugugugcaugugugug

SEQ ID NO: 503104 - RNA, 19 nt, Human
uggaggggguggugccuga

SEQ ID NO: 503105 - RNA, 22 nt, Human
uggcccaccuggccagcagaaa

SEQ ID NO: 503106 - RNA, 19 nt, Human
uggcucugccacagcccuc

SEQ ID NO: 503107 - RNA, 24 nt, Human
ugggacaaggucggcaugcagcug

SEQ ID NO: 503108 - RNA, 24 nt, Human
uguauauauguguuugugugcaug

SEQ ID NO: 503109 - RNA, 19 nt, Human
uguaugccuguguaugugu

SEQ ID NO: 503110 - RNA, 20 nt, Human
uguaugugcauguguauaua

SEQ ID NO: 503111 - RNA, 19 nt, Human
uguaugugugcacguguau

SEQ ID NO: 503112 - RNA, 20 nt, Human
uguaugugugcacguguaug

SEQ ID NO: 503113 - RNA, 22 nt, Human
uguaugugugcacguguaugug

SEQ ID NO: 503114 - RNA, 20 nt, Human
uguaugugugcaugcaugug

SEQ ID NO: 503115 - RNA, 20 nt, Human
uguaugugugcaugugugug

SEQ ID NO: 503116 - RNA, 22 nt, Human
uguaugugugcaugugugugca

SEQ ID NO: 503117 - RNA, 21 nt, Human
uguaugugugcaugugugugu

SEQ ID NO: 503118 - RNA, 22 nt, Human
uguaugugugcaugugugugug

SEQ ID NO: 503119 - RNA, 18 nt, Human
ugugcacauguaugugug

SEQ ID NO: 503120 - RNA, 18 nt, Human
ugugcacauguaugugug

SEQ ID NO: 503121 - RNA, 18 nt, Human
ugugcacguguaugugug

SEQ ID NO: 503122 - RNA, 28 nt, Human
ugugcacguguaugugugcaugugugug

SEQ ID NO: 503123 - RNA, 20 nt, Human
ugugcaggaaguuggugggu

SEQ ID NO: 503124 - RNA, 21 nt, Human
ugugcagugcaaaccaguugc

SEQ ID NO: 503125 - RNA, 23 nt, Human
ugugcauauaugugugcaugugu

SEQ ID NO: 503126 - RNA, 24 nt, Human
ugugcauauaugugugcaugugug

SEQ ID NO: 503127 - RNA, 22 nt, Human
ugugcaugcaugugugccugug

SEQ ID NO: 503128 - RNA, 19 nt, Human
ugugcauggauaugugugc

SEQ ID NO: 503129 - RNA, 19 nt, Human
ugugcauguguauauaugu

SEQ ID NO: 503130 - RNA, 19 nt, Human
ugugcaugugugugugcau

SEQ ID NO: 503131 - RNA, 19 nt, Human
ugugcggugcaugugugug

SEQ ID NO: 503132 - RNA, 19 nt, Human
ugugcgugcauauguaugu

SEQ ID NO: 503133 - RNA, 19 nt, Human
ugugcguguaugugugcau

SEQ ID NO: 503134 - RNA, 21 nt, Human
uguggggugauuucccagcgc

SEQ ID NO: 503135 - RNA, 22 nt, Human
uguguauauauguguuugugug

SEQ ID NO: 503136 - RNA, 22 nt, Human
uguguaugugcauguguauaua

SEQ ID NO: 503137 - RNA, 19 nt, Human
uguguaugugugcacgugu

SEQ ID NO: 503138 - RNA, 25 nt, Human
uguguaugugugcaugcaugugugc

SEQ ID NO: 503139 - RNA, 19 nt, Human
uguguaugugugcaugugc

SEQ ID NO: 503140 - RNA, 19 nt, Human
ugugugaggaggggcugcu

SEQ ID NO: 503141 - RNA, 20 nt, Human
ugugugcacguguaugugug

SEQ ID NO: 503142 - RNA, 19 nt, Human
ugugugcauacaugugugu

SEQ ID NO: 503143 - RNA, 26 nt, Human
ugugugcauacaugugugugccugug

SEQ ID NO: 503144 - RNA, 18 nt, Human
ugugugcaugcauguaug

SEQ ID NO: 503145 - RNA, 26 nt, Human
ugugugcaugcauguaugccugugua

SEQ ID NO: 503146 - RNA, 19 nt, Human
ugugugcaugcauguguau

SEQ ID NO: 503147 - RNA, 19 nt, Human
ugugugcaugcauguguau

SEQ ID NO: 503148 - RNA, 22 nt, Human
ugugugcaugcauguguaugug

SEQ ID NO: 503149 - RNA, 24 nt, Human
ugugugcaugcauguguaugugug

SEQ ID NO: 503150 - RNA, 18 nt, Human
ugugugcaugcaugugug

SEQ ID NO: 503151 - RNA, 26 nt, Human
ugugugcaugcaugugugccugugua

SEQ ID NO: 503152 - RNA, 19 nt, Human
ugugugcaugcaugugugu

SEQ ID NO: 503153 - RNA, 18 nt, Human
ugugugcauggauaugug

SEQ ID NO: 503154 - RNA, 20 nt, Human
ugugugcauggauaugugug

SEQ ID NO: 503155 - RNA, 22 nt, Human
ugugugcauggauaugugugcg

SEQ ID NO: 503156 - RNA, 21 nt, Human
ugugugcaugugcacauguau

SEQ ID NO: 503157 - RNA, 24 nt, Human
ugugugcaugugcacauguaugug

SEQ ID NO: 503158 - RNA, 19 nt, Human
ugugugcaugugcguguau

SEQ ID NO: 503159 - RNA, 19 nt, Human
ugugugcaugugcguguau

SEQ ID NO: 503160 - RNA, 19 nt, Human
ugugugcaugugugugcau

SEQ ID NO: 503161 - RNA, 20 nt, Human
ugugugcaugugugugcaug

SEQ ID NO: 503162 - RNA, 21 nt, Human
ugugugcaugugugugugcau

SEQ ID NO: 503163 - RNA, 22 nt, Human
ugugugcaugugugugugcaug

SEQ ID NO: 503164 - RNA, 23 nt, Human
ugugugcaugugugugugcaugu

SEQ ID NO: 503165 - RNA, 29 nt, Human
ugugugcaugugugugugcauguguaugg

SEQ ID NO: 503166 - RNA, 22 nt, Human
ugugugcaugugugugugcgug

SEQ ID NO: 503167 - RNA, 24 nt, Human
ugugugcaugugugugugcgugca

SEQ ID NO: 503168 - RNA, 19 nt, Human
ugugugccugugcauauau

SEQ ID NO: 503169 - RNA, 22 nt, Human
ugugugccugugcauauaugug

SEQ ID NO: 503170 - RNA, 19 nt, Human
ugugugccuguguaugugu

SEQ ID NO: 503171 - RNA, 21 nt, Human
ugugugcggugcaugugugug

SEQ ID NO: 503172 - RNA, 19 nt, Human
ugugugcgugcauauguau

SEQ ID NO: 503173 - RNA, 24 nt, Human
ugugugcgugcauauguaugugug

SEQ ID NO: 503174 - RNA, 22 nt, Human
ugugugcgugcauauguauguu

SEQ ID NO: 503175 - RNA, 21 nt, Human
ugugugugcauacaugugugu

SEQ ID NO: 503176 - RNA, 24 nt, Human
ugugugugcaugcaugugugugca

SEQ ID NO: 503177 - RNA, 19 nt, Human
ugugugugcaugugcacau

SEQ ID NO: 503178 - RNA, 22 nt, Human
ugugugugugcauacaugugug

SEQ ID NO: 503179 - RNA, 25 nt, Human
ugugugugugcauacaugugugugg

SEQ ID NO: 503180 - RNA, 22 nt, Human
ugugugugugcauguguaugug

SEQ ID NO: 503181 - RNA, 19 nt, Human
ugugugugugcgugcauau

SEQ ID NO: 503182 - RNA, 22 nt, Human
ugugugugugcgugcauaugua

SEQ ID NO: 503183 - RNA, 23 nt, Human
uuacugagucaguaauacuaugc

SEQ ID NO: 503184 - RNA, 19 nt, Human
uucccagcgccccucucug

SEQ ID NO: 503185 - RNA, 21 nt, Human
uugcaagggguuggcccuucu

SEQ ID NO: 503186 - RNA, 23 nt, Human
uuuagaguguagccaacaggaga

SEQ ID NO: 503187 - RNA, 21 nt, Human
uuuucaaccccagggagcccu

SEQ ID NO: 503188 - RNA, 24 nt, Human
aaaagaaacaacaaaacuucagug

SEQ ID NO: 503189 - RNA, 22 nt, Human
aaaucaccuuauaaucucucau

SEQ ID NO: 503190 - RNA, 22 nt, Human
aacaaccccaaucccaaaccaa

SEQ ID NO: 503191 - RNA, 19 nt, Human
aacauccacaaacacagca

SEQ ID NO: 503192 - RNA, 21 nt, Human
aacauccacaaacacagcaaa

SEQ ID NO: 503193 - RNA, 19 nt, Human
aagcucggcagugcuucuc

SEQ ID NO: 503194 - RNA, 22 nt, Human
aagucagcaaaagaaacaacaa

SEQ ID NO: 503195 - RNA, 19 nt, Human
acacaaacucguguugucu

SEQ ID NO: 503196 - RNA, 21 nt, Human
acagguuaucucucuccaaga

SEQ ID NO: 503197 - RNA, 18 nt, Human
acccugaaagcaguaacu

SEQ ID NO: 503198 - RNA, 19 nt, Human
acuacuaagcuacucucca

SEQ ID NO: 503199 - RNA, 20 nt, Human
acugcaugccgcuuuucuca

SEQ ID NO: 503200 - RNA, 23 nt, Human
aggacagugaccaaaaaaaaaga

SEQ ID NO: 503201 - RNA, 23 nt, Human
aggcugcccaacaaccccaaucc

SEQ ID NO: 503202 - RNA, 20 nt, Human
auaacaucuucucucuuucu

SEQ ID NO: 503203 - RNA, 22 nt, Human
caaaagaaacaacaaaacuuca

SEQ ID NO: 503204 - RNA, 19 nt, Human
caaaccaaccucccaggcc

SEQ ID NO: 503205 - RNA, 23 nt, Human
caacaaccccaaucccaaaccaa

SEQ ID NO: 503206 - RNA, 23 nt, Human
caacacacacacacaaacucgug

SEQ ID NO: 503207 - RNA, 22 nt, Human
cacaaacacagcaaacagucca

SEQ ID NO: 503208 - RNA, 20 nt, Human
cacacacacacaaacucgug

SEQ ID NO: 503209 - RNA, 26 nt, Human
caccuagauacuuuuggaaauguucu

SEQ ID NO: 503210 - RNA, 19 nt, Human
cagcaaaagaaacaacaaa

SEQ ID NO: 503211 - RNA, 23 nt, Human
cagcaaaagaaacaacaaaacuu

SEQ ID NO: 503212 - RNA, 20 nt, Human
cagcaccgagaggcccagca

SEQ ID NO: 503213 - RNA, 18 nt, Human
cagcagcaccgagaggcc

SEQ ID NO: 503214 - RNA, 22 nt, Human
caggaagaugcuaauagguaca

SEQ ID NO: 503215 - RNA, 19 nt, Human
caggaaggacuggagggcg

SEQ ID NO: 503216 - RNA, 23 nt, Human
caggauaggccaggugaauggca

SEQ ID NO: 503217 - RNA, 18 nt, Human
caggguacaucuagaggg

SEQ ID NO: 503218 - RNA, 18 nt, Human
ccacaaacacagcaaaca

SEQ ID NO: 503219 - RNA, 20 nt, Human
cccacacuuccacuccugug

SEQ ID NO: 503220 - RNA, 20 nt, Human
ccccaaucccaaaccaaccu

SEQ ID NO: 503221 - RNA, 28 nt, Human
ccccaaucccaaaccaaccucccaggcc

SEQ ID NO: 503222 - RNA, 21 nt, Human
ccuagaaauccuccuggauuc

SEQ ID NO: 503223 - RNA, 24 nt, Human
ccucugcuggucccacugcugcuu

SEQ ID NO: 503224 - RNA, 25 nt, Human
cuacuaagcuacucuccaucaacac

SEQ ID NO: 503225 - RNA, 22 nt, Human
cuagaaauccuccuggauucaa

SEQ ID NO: 503226 - RNA, 20 nt, Human
cuccacaaagaccuguucuc

SEQ ID NO: 503227 - RNA, 19 nt, Human
cuccuggauucaaugacaa

SEQ ID NO: 503228 - RNA, 25 nt, Human
cucuccaucaacacacacacacaaa

SEQ ID NO: 503229 - RNA, 26 nt, Human
cugaaggcaucuccaggaaggacugg

SEQ ID NO: 503230 - RNA, 20 nt, Human
cuggucccacugcugcuuca

SEQ ID NO: 503231 - RNA, 20 nt, Human
cuguggccgccgucagcagc

SEQ ID NO: 503232 - RNA, 21 nt, Human
cuugcaucacccacacuucca

SEQ ID NO: 503233 - RNA, 20 nt, Human
cuugggcaugagaagggcca

SEQ ID NO: 503234 - RNA, 20 nt, Human
gaaagcuuuuuauuugagaa

SEQ ID NO: 503235 - RNA, 25 nt, Human
gaacaccuagauacuuuuggaaaug

SEQ ID NO: 503236 - RNA, 20 nt, Human
gaaucuuuaauagcuacacc

SEQ ID NO: 503237 - RNA, 23 nt, Human
gagauccuuuugccaauaacauc

SEQ ID NO: 503238 - RNA, 22 nt, Human
gaggcgcagaggccgccgcaga

SEQ ID NO: 503239 - RNA, 26 nt, Human
gcccaacaaccccaaucccaaaccaa

SEQ ID NO: 503240 - RNA, 26 nt, Human
gcggccucucucucccgcccgcccga

SEQ ID NO: 503241 - RNA, 25 nt, Human
gcugcccaacaaccccaaucccaaa

SEQ ID NO: 503242 - RNA, 21 nt, Human
gcuggucccacugcugcuuca

SEQ ID NO: 503243 - RNA, 18 nt, Human
ggccaggauaggccaggu

SEQ ID NO: 503244 - RNA, 23 nt, Human
ggccgggcacaggguuggauucc

SEQ ID NO: 503245 - RNA, 23 nt, Human
ggcugcccaacaaccccaauccc

SEQ ID NO: 503246 - RNA, 21 nt, Human
gggaugcuggcugaaggcauc

SEQ ID NO: 503247 - RNA, 19 nt, Human
ggguacaucuagaggguuc

SEQ ID NO: 503248 - RNA, 21 nt, Human
uaaccaaagucagcaaaagaa

SEQ ID NO: 503249 - RNA, 20 nt, Human
uaagcuacucuccaucaaca

SEQ ID NO: 503250 - RNA, 20 nt, Human
uacaaacugucagguggagg

SEQ ID NO: 503251 - RNA, 26 nt, Human
uagauacuuuuggaaauguucuuguu

SEQ ID NO: 503252 - RNA, 23 nt, Human
uauaagggacccugaaagcagua

SEQ ID NO: 503253 - RNA, 19 nt, Human
ucacagagauuagagcucc

SEQ ID NO: 503254 - RNA, 23 nt, Human
ucacccagacagacucuuccaaa

SEQ ID NO: 503255 - RNA, 19 nt, Human
ucaguaacaacccuaagca

SEQ ID NO: 503256 - RNA, 23 nt, Human
uccacaaacacagcaaacagucc

SEQ ID NO: 503257 - RNA, 21 nt, Human
uccacaaagaccuguucucca

SEQ ID NO: 503258 - RNA, 18 nt, Human
ucccaaaccaaccuccca

SEQ ID NO: 503259 - RNA, 21 nt, Human
ucccgcccgcccgaggcgcag

SEQ ID NO: 503260 - RNA, 22 nt, Human
ucccugugaaaucaaucacugc

SEQ ID NO: 503261 - RNA, 24 nt, Human
ucccugugaaaucaaucacugccu

SEQ ID NO: 503262 - RNA, 23 nt, Human
ucuuccaaaaagugucugcccac

SEQ ID NO: 503263 - RNA, 19 nt, Human
ugaaacaacugucuugggc

SEQ ID NO: 503264 - RNA, 18 nt, Human
ugaagauacuacuaagcu

SEQ ID NO: 503265 - RNA, 23 nt, Human
ugaaggcaucuccaggaaggacu

SEQ ID NO: 503266 - RNA, 25 nt, Human
ugagauccuuuugccaauaacaucu

SEQ ID NO: 503267 - RNA, 23 nt, Human
ugcccuagaaauccuccuggauu

SEQ ID NO: 503268 - RNA, 19 nt, Human
uguaaucacagagauuaga

SEQ ID NO: 503269 - RNA, 22 nt, Human
ugucuugggcaugagaagggcc

SEQ ID NO: 503270 - RNA, 23 nt, Human
uguggagucugggaugcuggcug

SEQ ID NO: 503271 - RNA, 21 nt, Human
uuuaaaaggacagugaccaaa

SEQ ID NO: 503272 - RNA, 26 nt, Human
uuugagaacaccuagauacuuuugga

SEQ ID NO: 503273 - RNA, 24 nt, Human
aacuuuacauaauuuucuuccaaa

SEQ ID NO: 503274 - RNA, 18 nt, Human
caaaggagaggcuauuug

SEQ ID NO: 503275 - RNA, 21 nt, Human
caaaggccucuucuaacauuc

SEQ ID NO: 503276 - RNA, 23 nt, Human
ccucuucuaacauucaguaaaga

SEQ ID NO: 503277 - RNA, 25 nt, Human
cgcaaaaaaucugagaaacggcgca

SEQ ID NO: 503278 - RNA, 23 nt, Human
cugaucacuucugaggagaaaca

SEQ ID NO: 503279 - RNA, 23 nt, Human
uccaaaggccucuucuaacauuc

SEQ ID NO: 503280 - RNA, 19 nt, Human
ugaggagaaacacauaaug

SEQ ID NO: 503281 - RNA, 18 nt, Human
uggggaaagguaucgauc

SEQ ID NO: 503282 - RNA, 19 nt, Human
uuaggcucgcaaaaaaucu

SEQ ID NO: 503283 - RNA, 20 nt, Human
uuuauuuauugccucuccca

SEQ ID NO: 503284 - RNA, 24 nt, Human
ucucucacaugcaguggccgcagu

SEQ ID NO: 503285 - RNA, 19 nt, Human
accaugcugccauuccagc

SEQ ID NO: 503286 - RNA, 19 nt, Human
aggcagugguuggugcccg

SEQ ID NO: 503287 - RNA, 21 nt, Human
aggcgggugggaggggacaag

SEQ ID NO: 503288 - RNA, 18 nt, Human
cagcauggaacagugggc

SEQ ID NO: 503289 - RNA, 18 nt, Human
ccauuccagcugcccugc

SEQ ID NO: 503290 - RNA, 20 nt, Human
ccugguguuugucauggcug

SEQ ID NO: 503291 - RNA, 21 nt, Human
cuguggucuugcugaagaggc

SEQ ID NO: 503292 - RNA, 21 nt, Human
ggcaggugggggcaguggucu

SEQ ID NO: 503293 - RNA, 22 nt, Human
ggcuguggucuugcugaagagg

SEQ ID NO: 503294 - RNA, 21 nt, Human
gggcagcauggaacagugggc

SEQ ID NO: 503295 - RNA, 24 nt, Human
gggucaugaggcgggugggagggg

SEQ ID NO: 503296 - RNA, 19 nt, Human
gguagauggcgcagggcag

SEQ ID NO: 503297 - RNA, 18 nt, Human
guuggaggcagugguugg

SEQ ID NO: 503298 - RNA, 19 nt, Human
uaccaugcugccauuccag

SEQ ID NO: 503299 - RNA, 19 nt, Human
ucauggcuguggucuugcu

SEQ ID NO: 503300 - RNA, 24 nt, Human
ucauggcuguggucuugcugaaga

SEQ ID NO: 503301 - RNA, 20 nt, Human
uccagcugcccugcggugac

SEQ ID NO: 503302 - RNA, 20 nt, Human
ugcccgugccgagccuucuu

SEQ ID NO: 503303 - RNA, 18 nt, Human
ugccugugcugagccuuc

SEQ ID NO: 503304 - RNA, 19 nt, Human
ugcugagccuucuugggca

SEQ ID NO: 503305 - RNA, 22 nt, Human
ugguuggugcccgugccgagcc

SEQ ID NO: 503306 - RNA, 24 nt, Human
ugucauggcuguggucuugcugaa

SEQ ID NO: 503307 - RNA, 19 nt, Human
ugugaggcugggucaugag

SEQ ID NO: 503308 - RNA, 21 nt, Human
ugugaggcugggucaugaggc

SEQ ID NO: 503309 - RNA, 18 nt, Human
uuagaagcaaaugugauc

SEQ ID NO: 503310 - RNA, 23 nt, Human
uuagaagcaaaugugaucuauuu

SEQ ID NO: 503311 - RNA, 22 nt, Human
agcacauugggaagagccuccc

SEQ ID NO: 503312 - RNA, 23 nt, Human
aggaugggguggccgcagcugcu

SEQ ID NO: 503313 - RNA, 19 nt, Human
augugaucaugaaaacugu

SEQ ID NO: 503314 - RNA, 19 nt, Human
cagcacucuuaguucaugc

SEQ ID NO: 503315 - RNA, 18 nt, Human
caugaaaacuguggcugc

SEQ ID NO: 503316 - RNA, 20 nt, Human
ccagugguucuccuaggucu

SEQ ID NO: 503317 - RNA, 28 nt, Human
ccucccaccugccauugcuucauuuuca

SEQ ID NO: 503318 - RNA, 23 nt, Human
cugcugugccugcagcuccuucu

SEQ ID NO: 503319 - RNA, 23 nt, Human
cuucagcacucuuaguucaugcc

SEQ ID NO: 503320 - RNA, 22 nt, Human
gccccagaggccuuguggccuc

SEQ ID NO: 503321 - RNA, 22 nt, Human
ggccuuguggccucagcccuug

SEQ ID NO: 503322 - RNA, 18 nt, Human
gggagcugaccugaccag

SEQ ID NO: 503323 - RNA, 19 nt, Human
gggaugccucaaaacacca

SEQ ID NO: 503324 - RNA, 20 nt, Human
gucacagagguuggagggau

SEQ ID NO: 503325 - RNA, 19 nt, Human
gucccuugggcaagaggca

SEQ ID NO: 503326 - RNA, 23 nt, Human
uaggucuucagcacucuuaguuc

SEQ ID NO: 503327 - RNA, 21 nt, Human
uaugaugugaucaugaaaacu

SEQ ID NO: 503328 - RNA, 22 nt, Human
ucacagagguuggagggaugcc

SEQ ID NO: 503329 - RNA, 25 nt, Human
ucacagagguuggagggaugccuca

SEQ ID NO: 503330 - RNA, 18 nt, Human
ucccuguggagcugggag

SEQ ID NO: 503331 - RNA, 19 nt, Human
uccuccucgucgucucagg

SEQ ID NO: 503332 - RNA, 18 nt, Human
uccuguuagcgucagccc

SEQ ID NO: 503333 - RNA, 21 nt, Human
ucucagggcuggagcuguggg

SEQ ID NO: 503334 - RNA, 20 nt, Human
ugccccagaggccuuguggc

SEQ ID NO: 503335 - RNA, 19 nt, Human
uggagcugggagcugaccu

SEQ ID NO: 503336 - RNA, 22 nt, Human
uguggagcugggagcugaccug

SEQ ID NO: 503337 - RNA, 22 nt, Human
aacaaacaaguccaaagcugcu

SEQ ID NO: 503338 - RNA, 22 nt, Human
acaggaaggacaggauccugga

SEQ ID NO: 503339 - RNA, 22 nt, Human
accgcugacuuugcucuuccca

SEQ ID NO: 503340 - RNA, 20 nt, Human
agccacugaagaguccucag

SEQ ID NO: 503341 - RNA, 22 nt, Human
aggcagcucuggauguggaguc

SEQ ID NO: 503342 - RNA, 24 nt, Human
agggaggcagcucuggauguggag

SEQ ID NO: 503343 - RNA, 18 nt, Human
cacaugcaaaauaggaua

SEQ ID NO: 503344 - RNA, 20 nt, Human
caggaaggacaggauccugg

SEQ ID NO: 503345 - RNA, 21 nt, Human
cccagcccccgugcccacagg

SEQ ID NO: 503346 - RNA, 21 nt, Human
ccuggauuaaagggaggcagc

SEQ ID NO: 503347 - RNA, 19 nt, Human
ccugugggacaaacuuguc

SEQ ID NO: 503348 - RNA, 18 nt, Human
gaagaguccucaggagag

SEQ ID NO: 503349 - RNA, 18 nt, Human
gacagcccugugggacaa

SEQ ID NO: 503350 - RNA, 24 nt, Human
gcugacuuugcucuucccagcccc

SEQ ID NO: 503351 - RNA, 20 nt, Human
uacaggacaggaaggacagg

SEQ ID NO: 503352 - RNA, 23 nt, Human
uagugcugauguccacggaaugu

SEQ ID NO: 503353 - RNA, 20 nt, Human
ucucaccccacacuggcaac

SEQ ID NO: 503354 - RNA, 19 nt, Human
ugagaucucaaacacaugc

SEQ ID NO: 503355 - RNA, 18 nt, Human
ugagcacagacccagccc

SEQ ID NO: 503356 - RNA, 21 nt, Human
ugagcacagacccagcccuua

SEQ ID NO: 503357 - RNA, 18 nt, Human
uguccacggaauguggga

SEQ ID NO: 503358 - RNA, 22 nt, Human
aaaaaagauucuuuuauacaaa

SEQ ID NO: 503359 - RNA, 20 nt, Human
aagaacccuacggagagggu

SEQ ID NO: 503360 - RNA, 19 nt, Human
aagaauguggacagaggug

SEQ ID NO: 503361 - RNA, 21 nt, Human
aauaaucagugaauguagaac

SEQ ID NO: 503362 - RNA, 23 nt, Human
acaaaaccgaugaaaaucacacu

SEQ ID NO: 503363 - RNA, 21 nt, Human
agaacugcacagaucuguguu

SEQ ID NO: 503364 - RNA, 19 nt, Human
aggcgcgaauccugcccaa

SEQ ID NO: 503365 - RNA, 19 nt, Human
auguggacagagguggcag

SEQ ID NO: 503366 - RNA, 18 nt, Human
caaaagcacuuuaaugcc

SEQ ID NO: 503367 - RNA, 18 nt, Human
cacagaucuguguuucca

SEQ ID NO: 503368 - RNA, 21 nt, Human
cacugcgcacgcugaaagggc

SEQ ID NO: 503369 - RNA, 23 nt, Human
ccagcagcugguccgguucucuu

SEQ ID NO: 503370 - RNA, 26 nt, Human
ccgcucucuccuggaaaaauggaggc

SEQ ID NO: 503371 - RNA, 22 nt, Human
ccuauccuccuucaaucaagag

SEQ ID NO: 503372 - RNA, 24 nt, Human
cgagcgcacguucacugcgcacgg

SEQ ID NO: 503373 - RNA, 26 nt, Human
cugcagcugagacaggaccggggucc

SEQ ID NO: 503374 - RNA, 18 nt, Human
cuggaaaaauggaggcgc

SEQ ID NO: 503375 - RNA, 23 nt, Human
gacaguuucccugccagcagcug

SEQ ID NO: 503376 - RNA, 21 nt, Human
gacugcagcugagacaggacg

SEQ ID NO: 503377 - RNA, 18 nt, Human
gagaaagaacccuacgga

SEQ ID NO: 503378 - RNA, 18 nt, Human
ggggaggaggguagaguc

SEQ ID NO: 503379 - RNA, 19 nt, Human
gggggaggaggguagaguc

SEQ ID NO: 503380 - RNA, 18 nt, Human
uccaacuuuuuccaccau

SEQ ID NO: 503381 - RNA, 20 nt, Human
uccaagaagaauguggacag

SEQ ID NO: 503382 - RNA, 22 nt, Human
ucucuccuggaaaaauggaggc

SEQ ID NO: 503383 - RNA, 24 nt, Human
ugagacaggacgugggggaggagg

SEQ ID NO: 503384 - RNA, 21 nt, Human
ugcccuauccuccuucaauca

SEQ ID NO: 503385 - RNA, 21 nt, Human
ugggggaggaggguagagucc

SEQ ID NO: 503386 - RNA, 22 nt, Human
ugucaaaagcacuuuaaugccc

SEQ ID NO: 503387 - RNA, 18 nt, Human
aauuauagaauuuccaga

SEQ ID NO: 503388 - RNA, 20 nt, Human
aggguuaggaugcaggucau

SEQ ID NO: 503389 - RNA, 20 nt, Human
ccagguauuuuugaaaaccu

SEQ ID NO: 503390 - RNA, 20 nt, Human
ggaguccuccaccuggcacu

SEQ ID NO: 503391 - RNA, 24 nt, Human
ucauucaaggguuaggaugcaggu

SEQ ID NO: 503392 - RNA, 22 nt, Human
ugggaguccuccaccuggcacu

SEQ ID NO: 503393 - RNA, 23 nt, Human
uucaaggguuaggaugcagguca

SEQ ID NO: 503394 - RNA, 19 nt, Human
uuucuugccagguauuuuu

SEQ ID NO: 503395 - RNA, 20 nt, Human
aaacaauaaggcaggacucu

SEQ ID NO: 503396 - RNA, 22 nt, Human
aaauuaaacuaaaaaccacccc

SEQ ID NO: 503397 - RNA, 18 nt, Human
aagaaccuuguaacaaag

SEQ ID NO: 503398 - RNA, 21 nt, Human
aagcguugucucuuuuaaaca

SEQ ID NO: 503399 - RNA, 22 nt, Human
aaucauaagccauccaguuuuu

SEQ ID NO: 503400 - RNA, 19 nt, Human
acaggaguuuucugcagag

SEQ ID NO: 503401 - RNA, 23 nt, Human
accacuugaggcaaaaggaaucc

SEQ ID NO: 503402 - RNA, 21 nt, Human
aggcaggacucuacauaagca

SEQ ID NO: 503403 - RNA, 23 nt, Human
auaaaaacaaacaauaaggcagg

SEQ ID NO: 503404 - RNA, 23 nt, Human
caagaaccaugugauagaggcac

SEQ ID NO: 503405 - RNA, 21 nt, Human
ccagcugagccagaccgccaa

SEQ ID NO: 503406 - RNA, 23 nt, Human
cccccugcccagcugagccagac

SEQ ID NO: 503407 - RNA, 21 nt, Human
cuugaagagggaacaaaaugu

SEQ ID NO: 503408 - RNA, 19 nt, Human
gcaggacucuacauaagca

SEQ ID NO: 503409 - RNA, 22 nt, Human
gucgaugggaagcuagaaaaga

SEQ ID NO: 503410 - RNA, 21 nt, Human
uaaaaacaaacaauaaggcag

SEQ ID NO: 503411 - RNA, 22 nt, Human
uacauaagcaaaccaagaacaa

SEQ ID NO: 503412 - RNA, 23 nt, Human
uacauaagcaaaccaagaacaau

SEQ ID NO: 503413 - RNA, 23 nt, Human
uacccccugcccagcugagccag

SEQ ID NO: 503414 - RNA, 23 nt, Human
uccaguuuuuaaaauaaaacugu

SEQ ID NO: 503415 - RNA, 22 nt, Human
ucucacauuuuugaaaaccuaa

SEQ ID NO: 503416 - RNA, 24 nt, Human
ugaagagggaacaaaaugugguuc

SEQ ID NO: 503417 - RNA, 21 nt, Human
ugagccagaccgccaacacca

SEQ ID NO: 503418 - RNA, 19 nt, Human
ugccauaaauaaaaacaaa

SEQ ID NO: 503419 - RNA, 22 nt, Human
ugccauaaauaaaaacaaacaa

SEQ ID NO: 503420 - RNA, 21 nt, Human
uuacaacgugcgcacugaccg

SEQ ID NO: 503421 - RNA, 22 nt, Human
uugaaacuacaaaacggauuuc

SEQ ID NO: 503422 - RNA, 19 nt, Human
uuugaaacuacaaaacgga

SEQ ID NO: 503423 - RNA, 21 nt, Human
acugucuuacaaagccaccac

SEQ ID NO: 503424 - RNA, 20 nt, Human
caaagccaccaccuguuccc

SEQ ID NO: 503425 - RNA, 23 nt, Human
ccucaccaacauaggcuuuccug

SEQ ID NO: 503426 - RNA, 23 nt, Human
cgcccgcccaccacagauuucug

SEQ ID NO: 503427 - RNA, 19 nt, Human
ucaccaacauaggcuuucc

SEQ ID NO: 503428 - RNA, 19 nt, Human
ucacucauucucccaucau

SEQ ID NO: 503429 - RNA, 22 nt, Human
ucagaaacuuucuucccaacug

SEQ ID NO: 503430 - RNA, 18 nt, Human
uccugggggauggccugc

SEQ ID NO: 503431 - RNA, 22 nt, Human
ucuccuugcucaccugccgccc

SEQ ID NO: 503432 - RNA, 19 nt, Human
ugguggugccaggcugcag

SEQ ID NO: 503433 - RNA, 19 nt, Human
uuacagacacguucuccuu

SEQ ID NO: 503434 - RNA, 25 nt, Human
uucacucauucucccaucauaaccc

SEQ ID NO: 503435 - RNA, 22 nt, Human
agaaggucagggcccacgagga

SEQ ID NO: 503436 - RNA, 23 nt, Human
agagagaaggucagggcccacga

SEQ ID NO: 503437 - RNA, 20 nt, Human
agcugcuggagacaggagcu

SEQ ID NO: 503438 - RNA, 22 nt, Human
cagaaagcacugcgugauccac

SEQ ID NO: 503439 - RNA, 25 nt, Human
cagcgacaaacaaucaggcccccac

SEQ ID NO: 503440 - RNA, 19 nt, Human
caggcccccacaaugaacu

SEQ ID NO: 503441 - RNA, 22 nt, Human
ccacucgugcugggaccauucc

SEQ ID NO: 503442 - RNA, 18 nt, Human
ccagcgacaaacaaucag

SEQ ID NO: 503443 - RNA, 22 nt, Human
cccacaaugaacuggccacucg

SEQ ID NO: 503444 - RNA, 22 nt, Human
cccacgaggaugcggaggcaga

SEQ ID NO: 503445 - RNA, 23 nt, Human
ccuccagcgacaaacaaucaggc

SEQ ID NO: 503446 - RNA, 19 nt, Human
ccugagggagccugagcca

SEQ ID NO: 503447 - RNA, 21 nt, Human
cgacaaacaaucaggccccca

SEQ ID NO: 503448 - RNA, 22 nt, Human
cuccggagccucugcccggcuc

SEQ ID NO: 503449 - RNA, 21 nt, Human
cugggcuuagcgccucugccc

SEQ ID NO: 503450 - RNA, 22 nt, Human
gaccauucccuaggggaggagg

SEQ ID NO: 503451 - RNA, 18 nt, Human
gagccugagccaaaaaca

SEQ ID NO: 503452 - RNA, 24 nt, Human
gcagaaagcacugcgugauccaca

SEQ ID NO: 503453 - RNA, 18 nt, Human
gcccacgaggaugcggag

SEQ ID NO: 503454 - RNA, 20 nt, Human
gcuggagacaggagcugaug

SEQ ID NO: 503455 - RNA, 20 nt, Human
gggagccugagccaaaaaca

SEQ ID NO: 503456 - RNA, 24 nt, Human
ucaggcccccacaaugaacuggcc

SEQ ID NO: 503457 - RNA, 26 nt, Human
ugagccaaaaacacgggcagaaagca

SEQ ID NO: 503458 - RNA, 24 nt, Human
ugagggagccugagccaaaaacac

SEQ ID NO: 503459 - RNA, 20 nt, Human
ugcccugagggagccugagc

SEQ ID NO: 503460 - RNA, 21 nt, Human
aagcaaauauuauuuuucuua

SEQ ID NO: 503461 - RNA, 25 nt, Human
acaagcaaugucagacacaaggaac

SEQ ID NO: 503462 - RNA, 20 nt, Human
acuuccauucugggagugag

SEQ ID NO: 503463 - RNA, 21 nt, Human
agacagaaauccagaaaaauc

SEQ ID NO: 503464 - RNA, 30 nt, Human
agacagaaauccagaaaaaucuccuuaauu

SEQ ID NO: 503465 - RNA, 19 nt, Human
agugaacaauaaauuaaua

SEQ ID NO: 503466 - RNA, 19 nt, Human
aguggugguucaagggaag

SEQ ID NO: 503467 - RNA, 21 nt, Human
caagaggccuaguauuaaaaa

SEQ ID NO: 503468 - RNA, 26 nt, Human
caagaggccuaguauuaaaaaaauca

SEQ ID NO: 503469 - RNA, 20 nt, Human
cacaaggaacugaaguaacg

SEQ ID NO: 503470 - RNA, 21 nt, Human
gaaguucuuccuugauaccuu

SEQ ID NO: 503471 - RNA, 20 nt, Human
gcaugaaggacuaauccaaa

SEQ ID NO: 503472 - RNA, 18 nt, Human
ggaagaaaccacuaggcu

SEQ ID NO: 503473 - RNA, 20 nt, Human
gggcaccucaugucucaaau

SEQ ID NO: 503474 - RNA, 18 nt, Human
uaaaaaaaucaccaggag

SEQ ID NO: 503475 - RNA, 20 nt, Human
uaacagaacagaagcauaaa

SEQ ID NO: 503476 - RNA, 24 nt, Human
uaacguuuucaaucucauucaggc

SEQ ID NO: 503477 - RNA, 22 nt, Human
uacaaacaagcaaugucagaca

SEQ ID NO: 503478 - RNA, 25 nt, Human
uagaaagaguucuguggauaugaua

SEQ ID NO: 503479 - RNA, 25 nt, Human
uagaaguucuuccuugauaccuugg

SEQ ID NO: 503480 - RNA, 22 nt, Human
uaugauacauagacagaaaucc

SEQ ID NO: 503481 - RNA, 23 nt, Human
ucaacuuucuuuuuaguuuauua

SEQ ID NO: 503482 - RNA, 21 nt, Human
ucaaucagagaucaaauucac

SEQ ID NO: 503483 - RNA, 19 nt, Human
ucuuuuaacagaauuccag

SEQ ID NO: 503484 - RNA, 21 nt, Human
ugaaggaagaaaccacuaggc

SEQ ID NO: 503485 - RNA, 19 nt, Human
ugccuggcucaauauaaaa

SEQ ID NO: 503486 - RNA, 23 nt, Human
ugccuggcucaauauaaaauucc

SEQ ID NO: 503487 - RNA, 20 nt, Human
uggcauuaacugcuagggga

SEQ ID NO: 503488 - RNA, 23 nt, Human
uguggauaugauacauagacaga

SEQ ID NO: 503489 - RNA, 23 nt, Human
uuaguuacaaacaagcaauguca

SEQ ID NO: 503490 - RNA, 18 nt, Human
uucaagcagagacuggag

SEQ ID NO: 503491 - RNA, 19 nt, Human
uucaagggaagacggaaaa

SEQ ID NO: 503492 - RNA, 19 nt, Human
uuccacuagcaaauagggc

SEQ ID NO: 503493 - RNA, 18 nt, Human
uuccagagaagagagcuc

SEQ ID NO: 503494 - RNA, 25 nt, Human
uuccauucugggagugagauaugcu

SEQ ID NO: 503495 - RNA, 23 nt, Human
uuccuugauaccuuggauaaaua

SEQ ID NO: 503496 - RNA, 20 nt, Human
uugguggcccagcuugcaug

SEQ ID NO: 503497 - RNA, 20 nt, Human
uuuucaaucucauucaggcc

SEQ ID NO: 503498 - RNA, 18 nt, Human
uuuuuuuuuuuuuuuuug

SEQ ID NO: 503499 - RNA, 24 nt, Human
uuuuuuuuuuuuuuuuugauuuuu

SEQ ID NO: 503500 - RNA, 22 nt, Human
aacugcuuuucaaagacuaggu

SEQ ID NO: 503501 - RNA, 22 nt, Human
acauaauaaaaaugcaagaaac

SEQ ID NO: 503502 - RNA, 31 nt, Human
uagcaacauaauaaaaaugcaagaaacuagg

SEQ ID NO: 503503 - RNA, 19 nt, Human
ugaagggaaauauggcaua

SEQ ID NO: 503504 - RNA, 23 nt, Human
ugauacagaucaucuuucuaacu

SEQ ID NO: 503505 - RNA, 23 nt, Human
uggaggguugggggaaaaguaua

SEQ ID NO: 503506 - RNA, 18 nt, Human
ugggggaaaaguauagca

SEQ ID NO: 503507 - RNA, 18 nt, Human
uuaguauacggauaacaa

SEQ ID NO: 503508 - RNA, 22 nt, Human
uuaguauacggauaacaaaagu

SEQ ID NO: 503509 - RNA, 23 nt, Human
uucaaauucaaacaaucaaaaca

SEQ ID NO: 503510 - RNA, 22 nt, Human
aaaacacaacaaucagcuacaa

SEQ ID NO: 503511 - RNA, 24 nt, Human
aaagccaaaaaaagaaagaaggga

SEQ ID NO: 503512 - RNA, 21 nt, Human
aacccagcucucaagccccug

SEQ ID NO: 503513 - RNA, 24 nt, Human
aagaaagaggcaaagcuuucagga

SEQ ID NO: 503514 - RNA, 19 nt, Human
aagcaaaagcaaaaaacag

SEQ ID NO: 503515 - RNA, 22 nt, Human
aagcaaaagcaaaaaacaguuu

SEQ ID NO: 503516 - RNA, 24 nt, Human
aagcaaaagcaaaaaacaguuuaa

SEQ ID NO: 503517 - RNA, 20 nt, Human
aagccccuggucagcaaucu

SEQ ID NO: 503518 - RNA, 21 nt, Human
aagcuugaccauaccagaaac

SEQ ID NO: 503519 - RNA, 21 nt, Human
aaucacauuuuuuucuaacau

SEQ ID NO: 503520 - RNA, 28 nt, Human
agaaagaggcaaagcuuucaggacagaa

SEQ ID NO: 503521 - RNA, 23 nt, Human
agcaaaagcaaaaaacaguuuaa

SEQ ID NO: 503522 - RNA, 20 nt, Human
aggagggaaaauagaaccca

SEQ ID NO: 503523 - RNA, 21 nt, Human
augcuggcuccgugggcugga

SEQ ID NO: 503524 - RNA, 19 nt, Human
augugacaguucaugugca

SEQ ID NO: 503525 - RNA, 21 nt, Human
cacaacaaucagcuacaaaca

SEQ ID NO: 503526 - RNA, 19 nt, Human
cacaccccccgcggcgccc

SEQ ID NO: 503527 - RNA, 22 nt, Human
cacaguacagcuaaguacaaaa

SEQ ID NO: 503528 - RNA, 20 nt, Human
caccgccgccgccgcugccg

SEQ ID NO: 503529 - RNA, 22 nt, Human
caccggccaccgccgccgccgc

SEQ ID NO: 503530 - RNA, 22 nt, Human
cacgugcauguccgucacuggu

SEQ ID NO: 503531 - RNA, 23 nt, Human
cagaaccugaucguagcaugcca

SEQ ID NO: 503532 - RNA, 21 nt, Human
cagagaaguccuggcgacgca

SEQ ID NO: 503533 - RNA, 22 nt, Human
cagcccagagaaguccuggcga

SEQ ID NO: 503534 - RNA, 24 nt, Human
cagcugacuccaagcaaagggagu

SEQ ID NO: 503535 - RNA, 20 nt, Human
caucuuguucuuuggcuuca

SEQ ID NO: 503536 - RNA, 20 nt, Human
ccaaagccaaaaaaagaaag

SEQ ID NO: 503537 - RNA, 25 nt, Human
ccaccgccgccgccgcugccgccaa

SEQ ID NO: 503538 - RNA, 23 nt, Human
ccagcuuucaaccccauuacaua

SEQ ID NO: 503539 - RNA, 25 nt, Human
ccaucuaggaaaacgaguuaguugu

SEQ ID NO: 503540 - RNA, 21 nt, Human
cccaaagccaaaaaaagaaag

SEQ ID NO: 503541 - RNA, 24 nt, Human
cccaaagccaaaaaaagaaagaag

SEQ ID NO: 503542 - RNA, 25 nt, Human
cccaaagccaaaaaaagaaagaagg

SEQ ID NO: 503543 - RNA, 18 nt, Human
ccgccgccgccgcugccg

SEQ ID NO: 503544 - RNA, 18 nt, Human
ccgccgccgcuccacggc

SEQ ID NO: 503545 - RNA, 23 nt, Human
ccgccgccgcuccacggcuccgg

SEQ ID NO: 503546 - RNA, 18 nt, Human
ccgccgccgcugccgcca

SEQ ID NO: 503547 - RNA, 26 nt, Human
ccgcggcgcccgcuccgccgccgcuc

SEQ ID NO: 503548 - RNA, 24 nt, Human
ccggcgagcuccgcgcguccgcac

SEQ ID NO: 503549 - RNA, 22 nt, Human
ccuccuccccagcuuucaaccc

SEQ ID NO: 503550 - RNA, 19 nt, Human
cgccgccgcugccgccaaa

SEQ ID NO: 503551 - RNA, 19 nt, Human
cuagagucugauagcuaac

SEQ ID NO: 503552 - RNA, 19 nt, Human
cucauaaucacccuucugc

SEQ ID NO: 503553 - RNA, 18 nt, Human
cuccgcgccacacccccc

SEQ ID NO: 503554 - RNA, 19 nt, Human
gacagaaccugaucguagc

SEQ ID NO: 503555 - RNA, 22 nt, Human
gcaaaagcaaaaaacaguuuaa

SEQ ID NO: 503556 - RNA, 25 nt, Human
gcuaaguacaaaaugcaucaaccua

SEQ ID NO: 503557 - RNA, 22 nt, Human
ggaaaagcaaaagcaaaaaaca

SEQ ID NO: 503558 - RNA, 22 nt, Human
gguucaaaugcuggcuccgugg

SEQ ID NO: 503559 - RNA, 18 nt, Human
gucaaugucuccguuucc

SEQ ID NO: 503560 - RNA, 18 nt, Human
gucaguuugaggagggaa

SEQ ID NO: 503561 - RNA, 18 nt, Human
gugcagcugacuccaagc

SEQ ID NO: 503562 - RNA, 21 nt, Human
gugcauguccgucacuggugg

SEQ ID NO: 503563 - RNA, 24 nt, Human
uaaaacacaacaaucagcuacaaa

SEQ ID NO: 503564 - RNA, 22 nt, Human
uaaacacagcccagagaagucc

SEQ ID NO: 503565 - RNA, 19 nt, Human
uaaauuacugaccuaguga

SEQ ID NO: 503566 - RNA, 20 nt, Human
uaaucgcuccacaggcucag

SEQ ID NO: 503567 - RNA, 20 nt, Human
uacaaacagggcaaagaaaa

SEQ ID NO: 503568 - RNA, 22 nt, Human
uacaaacagggcaaagaaaaug

SEQ ID NO: 503569 - RNA, 23 nt, Human
uacagcaguagauccuccucccc

SEQ ID NO: 503570 - RNA, 21 nt, Human
uagcgcaucuuguucuuuggc

SEQ ID NO: 503571 - RNA, 21 nt, Human
uauacaagguucaaaugcugg

SEQ ID NO: 503572 - RNA, 22 nt, Human
uauuuuauuacaggucucaugu

SEQ ID NO: 503573 - RNA, 24 nt, Human
ucagaacauuccaugauuugcuaa

SEQ ID NO: 503574 - RNA, 21 nt, Human
uccaagcaaagggagucaggg

SEQ ID NO: 503575 - RNA, 18 nt, Human
uccacaggcucagacaca

SEQ ID NO: 503576 - RNA, 18 nt, Human
uccacuagcgcaucuugu

SEQ ID NO: 503577 - RNA, 19 nt, Human
uccacuagcgcaucuuguu

SEQ ID NO: 503578 - RNA, 22 nt, Human
ucccaaagccaaaaaaagaaag

SEQ ID NO: 503579 - RNA, 20 nt, Human
uccccugccucuccguggcu

SEQ ID NO: 503580 - RNA, 25 nt, Human
uccccugccucuccguggcugcaaa

SEQ ID NO: 503581 - RNA, 24 nt, Human
uccucagcacuucacaguaaaccc

SEQ ID NO: 503582 - RNA, 21 nt, Human
ucuccgcgccacaccccccgc

SEQ ID NO: 503583 - RNA, 20 nt, Human
ugaaccacucauaaucaccc

SEQ ID NO: 503584 - RNA, 23 nt, Human
ugacaguucaugugcaagaauca

SEQ ID NO: 503585 - RNA, 23 nt, Human
ugaugcuuuucccaaagccaaaa

SEQ ID NO: 503586 - RNA, 19 nt, Human
ugcaagaaucacuuuuuag

SEQ ID NO: 503587 - RNA, 21 nt, Human
ugcaaguaauuaaaaugcugg

SEQ ID NO: 503588 - RNA, 18 nt, Human
uggcccagcuuauaaggg

SEQ ID NO: 503589 - RNA, 19 nt, Human
ugggaagaagaccauagaa

SEQ ID NO: 503590 - RNA, 19 nt, Human
ugguggccauucuggagug

SEQ ID NO: 503591 - RNA, 21 nt, Human
uuaaaacucuaaguccuuccc

SEQ ID NO: 503592 - RNA, 25 nt, Human
uuacaauuaaaaacucucuugggaa

SEQ ID NO: 503593 - RNA, 18 nt, Human
uucaggacagaaccugau

SEQ ID NO: 503594 - RNA, 21 nt, Human
uucagguccguaaucauucuc

SEQ ID NO: 503595 - RNA, 22 nt, Human
uugucaacacuguccucagcac

SEQ ID NO: 503596 - RNA, 20 nt, Human
uuugaaaucaguaagacuga

SEQ ID NO: 503597 - RNA, 18 nt, Human
acuacagcccacagaauu

SEQ ID NO: 503598 - RNA, 22 nt, Human
agaacaauucuagacacuaccu

SEQ ID NO: 503599 - RNA, 19 nt, Human
agcaauaauggaauguaac

SEQ ID NO: 503600 - RNA, 26 nt, Human
agucacaaugauggcauacuacagcc

SEQ ID NO: 503601 - RNA, 24 nt, Human
auggcauacuacagcccacagaau

SEQ ID NO: 503602 - RNA, 21 nt, Human
auguuucuucucacucugcca

SEQ ID NO: 503603 - RNA, 23 nt, Human
cacaaugauggcauacuacagcc

SEQ ID NO: 503604 - RNA, 18 nt, Human
caccgcgugcugcagccc

SEQ ID NO: 503605 - RNA, 24 nt, Human
caccgcgugcugcagcccacagcc

SEQ ID NO: 503606 - RNA, 18 nt, Human
cagcaaaacaaacugcuc

SEQ ID NO: 503607 - RNA, 26 nt, Human
cagcaaaacaaacugcucaacuaagc

SEQ ID NO: 503608 - RNA, 28 nt, Human
cccacagaauuuaaaucucagcggaccg

SEQ ID NO: 503609 - RNA, 21 nt, Human
cccacagaauuuaaaucucau

SEQ ID NO: 503610 - RNA, 21 nt, Human
ccucuguauccagauagaaau

SEQ ID NO: 503611 - RNA, 20 nt, Human
cgauuuauuccuuauuuucu

SEQ ID NO: 503612 - RNA, 21 nt, Human
cuuaaaugcuaaaaacuucua

SEQ ID NO: 503613 - RNA, 18 nt, Human
gaagaaaaaucugccucu

SEQ ID NO: 503614 - RNA, 21 nt, Human
gacuauuuugaaauauccaaa

SEQ ID NO: 503615 - RNA, 22 nt, Human
gagcauaauuaaaagagaauac

SEQ ID NO: 503616 - RNA, 21 nt, Human
gagcauuucacaccuuaaaug

SEQ ID NO: 503617 - RNA, 20 nt, Human
gcagcccacagccggccgcc

SEQ ID NO: 503618 - RNA, 21 nt, Human
gcagugaacacgcaacccgaa

SEQ ID NO: 503619 - RNA, 21 nt, Human
ggagaacaauucuagacacua

SEQ ID NO: 503620 - RNA, 23 nt, Human
ggcaaaagggaaauacucacuaa

SEQ ID NO: 503621 - RNA, 18 nt, Human
ggguggagacagguuggc

SEQ ID NO: 503622 - RNA, 19 nt, Human
guggccggaaugcucggcc

SEQ ID NO: 503623 - RNA, 20 nt, Human
uaaaaagaguaguuuuagca

SEQ ID NO: 503624 - RNA, 22 nt, Human
uaaaagguccauaucuuaagaa

SEQ ID NO: 503625 - RNA, 27 nt, Human
uaaaugcuaaaaacuucuaacuugcuu

SEQ ID NO: 503626 - RNA, 20 nt, Human
uaacuugcuuuaggaauuag

SEQ ID NO: 503627 - RNA, 20 nt, Human
uaacuugcuuuaggaauugg

SEQ ID NO: 503628 - RNA, 27 nt, Human
uaaugcaacauaaaaauguccagcuuu

SEQ ID NO: 503629 - RNA, 21 nt, Human
uaucaagugaaugaauccaua

SEQ ID NO: 503630 - RNA, 19 nt, Human
uauccagauagaaaugaau

SEQ ID NO: 503631 - RNA, 19 nt, Human
uauggagugaaauacuaau

SEQ ID NO: 503632 - RNA, 18 nt, Human
ugaaauauccaaaaauca

SEQ ID NO: 503633 - RNA, 18 nt, Human
ugaaauauccagcuacaa

SEQ ID NO: 503634 - RNA, 23 nt, Human
ugacuuggccgcggaaggcgugg

SEQ ID NO: 503635 - RNA, 22 nt, Human
ugcugcagcccacagccggccg

SEQ ID NO: 503636 - RNA, 22 nt, Human
uggagacagguuggcagcaaaa

SEQ ID NO: 503637 - RNA, 20 nt, Human
uggcagcaaaacaaacugcu

SEQ ID NO: 503638 - RNA, 21 nt, Human
uggcagcaaaacaaacugcuc

SEQ ID NO: 503639 - RNA, 23 nt, Human
uggcagcaaaacaaacugcucaa

SEQ ID NO: 503640 - RNA, 23 nt, Human
uggcagcaaaacaaacugcucaa

SEQ ID NO: 503641 - RNA, 18 nt, Human
uucauuuccuacucaguu

SEQ ID NO: 503642 - RNA, 19 nt, Human
uuugaaauauccagcuaca

SEQ ID NO: 503643 - RNA, 19 nt, Human
uuuugguugaauuuagaac

SEQ ID NO: 503644 - RNA, 18 nt, Human
acccccaaagccgucccc

SEQ ID NO: 503645 - RNA, 22 nt, Human
agaaagcagcguggaccgagac

SEQ ID NO: 503646 - RNA, 21 nt, Human
agccugggccacgugagccuc

SEQ ID NO: 503647 - RNA, 23 nt, Human
aggaggcugcaggaagcuccagg

SEQ ID NO: 503648 - RNA, 22 nt, Human
aggagggagcagcaggcggcgg

SEQ ID NO: 503649 - RNA, 24 nt, Human
caaggggaaacacaccaacccgcc

SEQ ID NO: 503650 - RNA, 20 nt, Human
caggauggcagcccaggccu

SEQ ID NO: 503651 - RNA, 19 nt, Human
cauguccuuugggaagaaa

SEQ ID NO: 503652 - RNA, 22 nt, Human
ccaagacauaaaaggccgccca

SEQ ID NO: 503653 - RNA, 26 nt, Human
cccaggaaaagcaacgcccccuugcc

SEQ ID NO: 503654 - RNA, 21 nt, Human
cccuaggagggagcagcaggc

SEQ ID NO: 503655 - RNA, 26 nt, Human
cucgugggacccccaaagccgucccc

SEQ ID NO: 503656 - RNA, 22 nt, Human
cucuuuggcacagcacaccugg

SEQ ID NO: 503657 - RNA, 23 nt, Human
cuuuacaucaggugucuccaaga

SEQ ID NO: 503658 - RNA, 23 nt, Human
gagcagcaggcggcggggguucc

SEQ ID NO: 503659 - RNA, 19 nt, Human
gccugggccacgugagccu

SEQ ID NO: 503660 - RNA, 23 nt, Human
uaaacuccuaguccaugucucgu

SEQ ID NO: 503661 - RNA, 22 nt, Human
uacacaaggggaaacacaccaa

SEQ ID NO: 503662 - RNA, 19 nt, Human
uaccgcggcgacacaaccc

SEQ ID NO: 503663 - RNA, 22 nt, Human
uaggagggagcagcaggcggcg

SEQ ID NO: 503664 - RNA, 19 nt, Human
ucagucccugcccgcugcc

SEQ ID NO: 503665 - RNA, 20 nt, Human
uccaggcaugucugugcugg

SEQ ID NO: 503666 - RNA, 23 nt, Human
ucuccaagacauaaaaggccgcc

SEQ ID NO: 503667 - RNA, 22 nt, Human
ugagcucuuuggcacagcacac

SEQ ID NO: 503668 - RNA, 18 nt, Human
ugagggcugguccgggga

SEQ ID NO: 503669 - RNA, 19 nt, Human
ugccagugggaggacggca

SEQ ID NO: 503670 - RNA, 28 nt, Human
ugcguaggaggcugcaggaagcuccagg

SEQ ID NO: 503671 - RNA, 18 nt, Human
uggcagcccaggccacgu

SEQ ID NO: 503672 - RNA, 21 nt, Human
uggcagcccaggccacguggc

SEQ ID NO: 503673 - RNA, 19 nt, Human
ugggaagaaagcagcgugg

SEQ ID NO: 503674 - RNA, 23 nt, Human
ugggaagaaagcagcguggaccg

SEQ ID NO: 503675 - RNA, 21 nt, Human
ugggacccccaaagccguccc

SEQ ID NO: 503676 - RNA, 22 nt, Human
ugggacccccaaagccgucccc

SEQ ID NO: 503677 - RNA, 23 nt, Human
ugggccuuuaacaccugucacuu

SEQ ID NO: 503678 - RNA, 21 nt, Human
aaaaaaagagguagcaaauga

SEQ ID NO: 503679 - RNA, 19 nt, Human
aaacaaaagaccacaacaa

SEQ ID NO: 503680 - RNA, 20 nt, Human
aagagguagcaaaugaaaau

SEQ ID NO: 503681 - RNA, 21 nt, Human
agaaaaaacaaaagaccacaa

SEQ ID NO: 503682 - RNA, 22 nt, Human
agaaaaaacaaaagaccacaac

SEQ ID NO: 503683 - RNA, 24 nt, Human
agagguagcaaaugaaaauuaaag

SEQ ID NO: 503684 - RNA, 18 nt, Human
auaauaaaaaaagaggua

SEQ ID NO: 503685 - RNA, 26 nt, Human
auacuaagagaaaaaacaaaagacca

SEQ ID NO: 503686 - RNA, 18 nt, Human
cagcgcggagcuggaggc

SEQ ID NO: 503687 - RNA, 23 nt, Human
ccgaggccgccgcagccucgugc

SEQ ID NO: 503688 - RNA, 27 nt, Human
cuauacuaagagaaaaaacaaaagacc

SEQ ID NO: 503689 - RNA, 20 nt, Human
cuccgaggccgccgcagccu

SEQ ID NO: 503690 - RNA, 19 nt, Human
gagaaaaaacaaaagacca

SEQ ID NO: 503691 - RNA, 22 nt, Human
guggucagcgucuggcuccgcc

SEQ ID NO: 503692 - RNA, 20 nt, Human
uaaaaugucauuuaagugaa

SEQ ID NO: 503693 - RNA, 22 nt, Human
uaagagaaaaaacaaaagacca

SEQ ID NO: 503694 - RNA, 28 nt, Human
uaagugaaccauuccaaggcauaauaaa

SEQ ID NO: 503695 - RNA, 25 nt, Human
uagguugagagaaugugacuaugaa

SEQ ID NO: 503696 - RNA, 19 nt, Human
uauuccaaauuauagguug

SEQ ID NO: 503697 - RNA, 22 nt, Human
ucauucagauguauacauaaac

SEQ ID NO: 503698 - RNA, 22 nt, Human
uccaaggcauaauaaaaaaaga

SEQ ID NO: 503699 - RNA, 20 nt, Human
ucccggcugccgggcagcgc

SEQ ID NO: 503700 - RNA, 19 nt, Human
uccgaggccgccgcagccu

SEQ ID NO: 503701 - RNA, 20 nt, Human
uccgccgcgcuccgaggccg

SEQ ID NO: 503702 - RNA, 24 nt, Human
ugauugaagcaaaaugaauaaugc

SEQ ID NO: 503703 - RNA, 28 nt, Human
uggaggcggaggagaccgaggagaggaa

SEQ ID NO: 503704 - RNA, 24 nt, Human
ugugacuaugaagaaaguauucua

SEQ ID NO: 503705 - RNA, 20 nt, Human
uuuuuuuuuuuuuuguugga

SEQ ID NO: 503706 - RNA, 20 nt, Human
uuuuuuuuuuuuuuguugga

SEQ ID NO: 503707 - RNA, 20 nt, Human
uuuuuuuuuuuuuuuuuguu

SEQ ID NO: 503708 - RNA, 23 nt, Human
uuuuuuuuuuuuuuuuuuguugg

SEQ ID NO: 503709 - RNA, 18 nt, Human
agaggcagagagccaugc

SEQ ID NO: 503710 - RNA, 18 nt, Human
cagaggcagagagccaug

SEQ ID NO: 503711 - RNA, 21 nt, Human
cagaggcagagagccaugccu

SEQ ID NO: 503712 - RNA, 25 nt, Human
cagaggcagagagccaugccugcau

SEQ ID NO: 503713 - RNA, 23 nt, Human
cagucaguuagcacugauggcaa

SEQ ID NO: 503714 - RNA, 22 nt, Human
ccagcaggauccgugcaccucc

SEQ ID NO: 503715 - RNA, 22 nt, Human
cccacccacugccuuuggccgc

SEQ ID NO: 503716 - RNA, 22 nt, Human
cccagugcccagcaggauccgu

SEQ ID NO: 503717 - RNA, 19 nt, Human
ccuccugccccauuccugu

SEQ ID NO: 503718 - RNA, 21 nt, Human
ccugcccacccacugccuuug

SEQ ID NO: 503719 - RNA, 20 nt, Human
ccuggcccuuaacccuuucc

SEQ ID NO: 503720 - RNA, 21 nt, Human
cugaaccuugagauacaguga

SEQ ID NO: 503721 - RNA, 22 nt, Human
cugcugucucuggcccugggag

SEQ ID NO: 503722 - RNA, 24 nt, Human
cugcugucucuggcccugggagau

SEQ ID NO: 503723 - RNA, 19 nt, Human
cuggcccuuaacccuuucc

SEQ ID NO: 503724 - RNA, 21 nt, Human
ggaccugcccacccacugccu

SEQ ID NO: 503725 - RNA, 22 nt, Human
ggagcccaggagggagggaggg

SEQ ID NO: 503726 - RNA, 23 nt, Human
ggaguugugaccuggagcccagg

SEQ ID NO: 503727 - RNA, 23 nt, Human
guccuggcccuuaacccuuucca

SEQ ID NO: 503728 - RNA, 24 nt, Human
ucaggauuuuaucguuauuuuauu

SEQ ID NO: 503729 - RNA, 18 nt, Human
ucauugccuccugccucu

SEQ ID NO: 503730 - RNA, 20 nt, Human
ucugcugucucuggcccugg

SEQ ID NO: 503731 - RNA, 25 nt, Human
ugccccauuccuguccuggcccuua

SEQ ID NO: 503732 - RNA, 19 nt, Human
ugccuccugccucuaaucu

SEQ ID NO: 503733 - RNA, 20 nt, Human
uggagaggcagucaguuagc

SEQ ID NO: 503734 - RNA, 23 nt, Human
ugggucugcugucucuggcccug

SEQ ID NO: 503735 - RNA, 19 nt, Human
uguccuggcccuuaacccu

SEQ ID NO: 503736 - RNA, 27 nt, Human
uuagcacugauggcaacugguaucucu

SEQ ID NO: 503737 - RNA, 23 nt, Human
uuauuuuauugucauugccuccu

SEQ ID NO: 503738 - RNA, 21 nt, Human
uuggccgcccccugcucccag

SEQ ID NO: 503739 - RNA, 25 nt, Human
uuuuauugucauugccuccugccuc

SEQ ID NO: 503740 - RNA, 22 nt, Human
augaauuucugaaaagauaaag

SEQ ID NO: 503741 - RNA, 23 nt, Human
ggaucauuugauuuuuaaaaaug

SEQ ID NO: 503742 - RNA, 20 nt, Human
ucaugaucagaaaauagagc

SEQ ID NO: 503743 - RNA, 26 nt, Human
ugaucagaaaauagagcaaaauuuca

SEQ ID NO: 503744 - RNA, 19 nt, Human
uuucaugaucagaaaauag

SEQ ID NO: 503745 - RNA, 22 nt, Human
aacugugaggggagggcugugg

SEQ ID NO: 503746 - RNA, 18 nt, Human
agcagcagcaggagcggc

SEQ ID NO: 503747 - RNA, 24 nt, Human
caacugugaggggagggcuguggg

SEQ ID NO: 503748 - RNA, 22 nt, Human
cagaaguaggaaggugccgccc

SEQ ID NO: 503749 - RNA, 24 nt, Human
cagcccgagcagccgcugcggcgg

SEQ ID NO: 503750 - RNA, 21 nt, Human
cccccugccuggcucugggga

SEQ ID NO: 503751 - RNA, 19 nt, Human
cccgacccggccgggccgg

SEQ ID NO: 503752 - RNA, 19 nt, Human
cgcgcagcgcgcggcggcc

SEQ ID NO: 503753 - RNA, 19 nt, Human
cgcgcagcgcgcggcggcc

SEQ ID NO: 503754 - RNA, 24 nt, Human
cggcggcaguagcagcagcaggag

SEQ ID NO: 503755 - RNA, 18 nt, Human
gcgcagcgcgcggcggcc

SEQ ID NO: 503756 - RNA, 20 nt, Human
gcucuggggacuccugcuuc

SEQ ID NO: 503757 - RNA, 20 nt, Human
ggcgcgcagcgcgcggcggc

SEQ ID NO: 503758 - RNA, 23 nt, Human
gggagggcuguggcugggcagaa

SEQ ID NO: 503759 - RNA, 20 nt, Human
uagcagcagcaggagcggcc

SEQ ID NO: 503760 - RNA, 21 nt, Human
uaggaaggugccgccccagug

SEQ ID NO: 503761 - RNA, 18 nt, Human
ucaggcaaacaggugcuc

SEQ ID NO: 503762 - RNA, 19 nt, Human
ucccugggccgcccgaccc

SEQ ID NO: 503763 - RNA, 18 nt, Human
uccggggcgugcucagcc

SEQ ID NO: 503764 - RNA, 19 nt, Human
ugggcagaaguaggaaggu

SEQ ID NO: 503765 - RNA, 21 nt, Human
ugucaagucugucggucccug

SEQ ID NO: 503766 - RNA, 24 nt, Human
ugucaagucugucggucccugggc

SEQ ID NO: 503767 - RNA, 20 nt, Human
gggagggaagcugagagagu

SEQ ID NO: 503768 - RNA, 21 nt, Human
uagaaacugauccugggaggg

SEQ ID NO: 503769 - RNA, 21 nt, Human
ugauccugggagggaagcuga

SEQ ID NO: 503770 - RNA, 21 nt, Human
ugggagggaagcugagagagu

SEQ ID NO: 503771 - RNA, 24 nt, Human
aaaaagccacagaaauaaaaagga

SEQ ID NO: 503772 - RNA, 23 nt, Human
aaaaaggagaucagugguugcca

SEQ ID NO: 503773 - RNA, 18 nt, Human
aaacgccaugcuaaaugg

SEQ ID NO: 503774 - RNA, 24 nt, Human
aaagaacuucacuggucacaaacc

SEQ ID NO: 503775 - RNA, 21 nt, Human
aagaacaauacagaaaggccg

SEQ ID NO: 503776 - RNA, 19 nt, Human
aagaagccagacacaaaag

SEQ ID NO: 503777 - RNA, 27 nt, Human
aagaagccagacacaaaagaccacagu

SEQ ID NO: 503778 - RNA, 18 nt, Human
aaguaccaaaggcugccu

SEQ ID NO: 503779 - RNA, 24 nt, Human
aauuccauaacugaucucaugcca

SEQ ID NO: 503780 - RNA, 26 nt, Human
acaaaacaugaacacacuuucucccc

SEQ ID NO: 503781 - RNA, 22 nt, Human
acaaagcacgcgaaggguagag

SEQ ID NO: 503782 - RNA, 22 nt, Human
acaaagcacgcgaaggguagag

SEQ ID NO: 503783 - RNA, 23 nt, Human
acaaagcacgcgaaggguagagg

SEQ ID NO: 503784 - RNA, 23 nt, Human
acaauggaauuuuauucagccau

SEQ ID NO: 503785 - RNA, 23 nt, Human
acacagcaaaggcacagugaccu

SEQ ID NO: 503786 - RNA, 23 nt, Human
acacagcaaaggcacaguggugu

SEQ ID NO: 503787 - RNA, 22 nt, Human
acagaaauaaaaaggagaucag

SEQ ID NO: 503788 - RNA, 24 nt, Human
acagcaaaggcacagugaccugga

SEQ ID NO: 503789 - RNA, 21 nt, Human
acccucgcucggguccucccg

SEQ ID NO: 503790 - RNA, 18 nt, Human
acuuacagcauguucccu

SEQ ID NO: 503791 - RNA, 19 nt, Human
agaagaagccagacacaaa

SEQ ID NO: 503792 - RNA, 21 nt, Human
agccauagaaaggaaugaaau

SEQ ID NO: 503793 - RNA, 19 nt, Human
aggcuuuacaucccauguu

SEQ ID NO: 503794 - RNA, 20 nt, Human
agggauacucagacuguauu

SEQ ID NO: 503795 - RNA, 21 nt, Human
auacaacacagcaaaggcaca

SEQ ID NO: 503796 - RNA, 24 nt, Human
caaaagacuucccagacaaagcac

SEQ ID NO: 503797 - RNA, 22 nt, Human
caaaauuucugaaugccaacau

SEQ ID NO: 503798 - RNA, 19 nt, Human
caagucuuggaccuauuca

SEQ ID NO: 503799 - RNA, 21 nt, Human
cacaaacgcuuguggaucccc

SEQ ID NO: 503800 - RNA, 26 nt, Human
cacccccaagucuuggaccuauucaa

SEQ ID NO: 503801 - RNA, 19 nt, Human
cagaaauaaaaaggagauc

SEQ ID NO: 503802 - RNA, 24 nt, Human
cagaagaacaauacagaaaggcca

SEQ ID NO: 503803 - RNA, 22 nt, Human
cagcuacagauauuuuaaguac

SEQ ID NO: 503804 - RNA, 22 nt, Human
caugcacaaaauuauuuaaaau

SEQ ID NO: 503805 - RNA, 19 nt, Human
ccacagaaauaaaaaggag

SEQ ID NO: 503806 - RNA, 24 nt, Human
ccagaaaucacagucaaaaugcag

SEQ ID NO: 503807 - RNA, 18 nt, Human
ccagaauagaaaaagcca

SEQ ID NO: 503808 - RNA, 19 nt, Human
ccagcggcaacaaggcugu

SEQ ID NO: 503809 - RNA, 21 nt, Human
ccagguaacacagugacucau

SEQ ID NO: 503810 - RNA, 19 nt, Human
cccccaagucuuggaccua

SEQ ID NO: 503811 - RNA, 19 nt, Human
ccccuacuacgccccagga

SEQ ID NO: 503812 - RNA, 19 nt, Human
cccucgcucggguccuccc

SEQ ID NO: 503813 - RNA, 19 nt, Human
ccuacuacgccccaggaac

SEQ ID NO: 503814 - RNA, 25 nt, Human
ccuacugucucagaagaagccagac

SEQ ID NO: 503815 - RNA, 20 nt, Human
ccuuccuacugucucagaag

SEQ ID NO: 503816 - RNA, 21 nt, Human
ccuugcaaacgccaugcuaaa

SEQ ID NO: 503817 - RNA, 19 nt, Human
cgucauccuaacauccuga

SEQ ID NO: 503818 - RNA, 21 nt, Human
cuaaagccucgagguuagcag

SEQ ID NO: 503819 - RNA, 18 nt, Human
cuagccccaagcauuuca

SEQ ID NO: 503820 - RNA, 18 nt, Human
cucaggagagaaggaaaa

SEQ ID NO: 503821 - RNA, 23 nt, Human
cucaggagagaaggaaaaggaaa

SEQ ID NO: 503822 - RNA, 21 nt, Human
cucuggagggaaaagaaaacu

SEQ ID NO: 503823 - RNA, 19 nt, Human
cuuacagcauguucccugc

SEQ ID NO: 503824 - RNA, 18 nt, Human
cuucccggggaaccccgg

SEQ ID NO: 503825 - RNA, 21 nt, Human
cuucccggggaaccccggcuu

SEQ ID NO: 503826 - RNA, 21 nt, Human
cuuccuggcaagccgagaccc

SEQ ID NO: 503827 - RNA, 22 nt, Human
cuuuaggcuauguauauaaggu

SEQ ID NO: 503828 - RNA, 22 nt, Human
gaaauucaaaacacuucuagcc

SEQ ID NO: 503829 - RNA, 18 nt, Human
gagaucagugguugccag

SEQ ID NO: 503830 - RNA, 26 nt, Human
gagcaucccuaaucugaaaauccaaa

SEQ ID NO: 503831 - RNA, 19 nt, Human
gcaauagaaacugacaugg

SEQ ID NO: 503832 - RNA, 19 nt, Human
gcacagugaccuggacucu

SEQ ID NO: 503833 - RNA, 19 nt, Human
gcauguucccugccauccu

SEQ ID NO: 503834 - RNA, 22 nt, Human
gcgaaggguagaggauauaggu

SEQ ID NO: 503835 - RNA, 19 nt, Human
gcugaucuugauuccugag

SEQ ID NO: 503836 - RNA, 18 nt, Human
ggugccaacacccagaua

SEQ ID NO: 503837 - RNA, 22 nt, Human
gguggaggggaagauagggagu

SEQ ID NO: 503838 - RNA, 23 nt, Human
uaacugaucucaugccagaaauc

SEQ ID NO: 503839 - RNA, 24 nt, Human
uaccaggaaauaaacagggugagg

SEQ ID NO: 503840 - RNA, 19 nt, Human
uagaaaaagccacagaaau

SEQ ID NO: 503841 - RNA, 18 nt, Human
uaguguguacaggcauuu

SEQ ID NO: 503842 - RNA, 23 nt, Human
uauaugaagcauaaaugaauuuc

SEQ ID NO: 503843 - RNA, 19 nt, Human
uauccagaauagaaaaagc

SEQ ID NO: 503844 - RNA, 20 nt, Human
uauguauauaagguguauau

SEQ ID NO: 503845 - RNA, 22 nt, Human
uauuccaaaaucugaaauucaa

SEQ ID NO: 503846 - RNA, 21 nt, Human
ucaaaacacuucuagccccaa

SEQ ID NO: 503847 - RNA, 24 nt, Human
ucaucugguugugaugaucaucuc

SEQ ID NO: 503848 - RNA, 18 nt, Human
uccagaauagaaaaagcc

SEQ ID NO: 503849 - RNA, 23 nt, Human
uccagaauagaaaaagccacaga

SEQ ID NO: 503850 - RNA, 20 nt, Human
uccagguaacacagugacuc

SEQ ID NO: 503851 - RNA, 23 nt, Human
uccccagugagguuguugggaaa

SEQ ID NO: 503852 - RNA, 22 nt, Human
uccccauuauucccagucaugu

SEQ ID NO: 503853 - RNA, 22 nt, Human
ugaaaauccaaaaugcuccaaa

SEQ ID NO: 503854 - RNA, 25 nt, Human
ugaaauucaaaacacuucuagcccc

SEQ ID NO: 503855 - RNA, 22 nt, Human
ugacauggggccaaaagacuuc

SEQ ID NO: 503856 - RNA, 22 nt, Human
ugagagcacagaagaacaauac

SEQ ID NO: 503857 - RNA, 24 nt, Human
ugcagucgaaacuuuguuucaugc

SEQ ID NO: 503858 - RNA, 23 nt, Human
ugccagcggacagguggagggga

SEQ ID NO: 503859 - RNA, 23 nt, Human
ugccauccuuuccauacaacaca

SEQ ID NO: 503860 - RNA, 24 nt, Human
ugccugaggcaaagccuuacuugc

SEQ ID NO: 503861 - RNA, 19 nt, Human
ugcuccaaaauuucaaaau

SEQ ID NO: 503862 - RNA, 21 nt, Human
uggagugaugaaaauguuuug

SEQ ID NO: 503863 - RNA, 18 nt, Human
uggaucuccuaaggccag

SEQ ID NO: 503864 - RNA, 19 nt, Human
uggcagaauaguggcuggg

SEQ ID NO: 503865 - RNA, 21 nt, Human
uggcugaguuccagguaacac

SEQ ID NO: 503866 - RNA, 20 nt, Human
ugguugacagaaguauguau

SEQ ID NO: 503867 - RNA, 24 nt, Human
ugucaaugagguaguaguaugggu

SEQ ID NO: 503868 - RNA, 20 nt, Human
ugugaggcuuuacaucccau

SEQ ID NO: 503869 - RNA, 19 nt, Human
ugugaugaucaucucgagu

SEQ ID NO: 503870 - RNA, 21 nt, Human
uguuuagucuugagucucauc

SEQ ID NO: 503871 - RNA, 23 nt, Human
uucaaaauuucugaaugccaaca

SEQ ID NO: 503872 - RNA, 24 nt, Human
uuccacuuauaugaaauauccaga

SEQ ID NO: 503873 - RNA, 22 nt, Human
uugauuccugaguuuuuuggag

SEQ ID NO: 503874 - RNA, 26 nt, Human
uugcaaaggcacuucgagugcgcggg

SEQ ID NO: 503875 - RNA, 23 nt, Human
uugccagcggacagguggagggg

SEQ ID NO: 503876 - RNA, 19 nt, Human
uuucauguuuagucuugag

SEQ ID NO: 503877 - RNA, 24 nt, Human
uuucuccccagugagguuguuggg

SEQ ID NO: 503878 - RNA, 23 nt, Human
uuugcuggagaacagagggauuc

SEQ ID NO: 503879 - RNA, 22 nt, Human
uuuuaccaggaaauaaacaggg

SEQ ID NO: 503880 - RNA, 22 nt, Human
gacucgcugccgccgcuccuuu

SEQ ID NO: 503881 - RNA, 18 nt, Human
gagaaggaaguuuauugc

SEQ ID NO: 503882 - RNA, 23 nt, Human
ucagguggcccgaggagaaggaa

SEQ ID NO: 503883 - RNA, 20 nt, Human
ucgcugccgccgcucccagc

SEQ ID NO: 503884 - RNA, 19 nt, Human
ugccgccgcucccagcaac

SEQ ID NO: 503885 - RNA, 19 nt, Human
uuuuuuuucagguggcccg

SEQ ID NO: 503886 - RNA, 22 nt, Human
uuuuuuuuuuuuuuuuuucagg

SEQ ID NO: 503887 - RNA, 20 nt, Human
accaggaagagagcacccca

SEQ ID NO: 503888 - RNA, 18 nt, Human
agagaagcagaggaccag

SEQ ID NO: 503889 - RNA, 24 nt, Human
agagcaacugggggacuuacacuu

SEQ ID NO: 503890 - RNA, 19 nt, Human
aggggguggggaggaucca

SEQ ID NO: 503891 - RNA, 19 nt, Human
aguccccccucccggcucc

SEQ ID NO: 503892 - RNA, 22 nt, Human
aguccugguucgcucccucucg

SEQ ID NO: 503893 - RNA, 26 nt, Human
auucacaauauuccaggggggccagc

SEQ ID NO: 503894 - RNA, 20 nt, Human
caccccaccgugggcuccug

SEQ ID NO: 503895 - RNA, 21 nt, Human
cagacagccacuguucccauu

SEQ ID NO: 503896 - RNA, 21 nt, Human
cagagcaacugggggacuuac

SEQ ID NO: 503897 - RNA, 19 nt, Human
cagcccccgcgcuucuccc

SEQ ID NO: 503898 - RNA, 21 nt, Human
caggagcaggagggggugggg

SEQ ID NO: 503899 - RNA, 24 nt, Human
caggagcaggaggggguggggagg

SEQ ID NO: 503900 - RNA, 24 nt, Human
ccccaccucccuagucauucacaa

SEQ ID NO: 503901 - RNA, 22 nt, Human
ccccaggagcaggagggggugg

SEQ ID NO: 503902 - RNA, 22 nt, Human
cccccucccggcuccccgaugg

SEQ ID NO: 503903 - RNA, 18 nt, Human
ccccggccaggcgccccc

SEQ ID NO: 503904 - RNA, 21 nt, Human
ccccugcccugccgucacccc

SEQ ID NO: 503905 - RNA, 26 nt, Human
ccccugcccugccgucaccccagguu

SEQ ID NO: 503906 - RNA, 21 nt, Human
cccggccaggcgcccccugcc

SEQ ID NO: 503907 - RNA, 22 nt, Human
cccggccaggcgcccccugccc

SEQ ID NO: 503908 - RNA, 23 nt, Human
ccggcuccccgauggccuccuuc

SEQ ID NO: 503909 - RNA, 21 nt, Human
ccucccggcuccccgauggcc

SEQ ID NO: 503910 - RNA, 20 nt, Human
ccuccuggaugaccugguug

SEQ ID NO: 503911 - RNA, 21 nt, Human
ccuccuggaugaccugguugu

SEQ ID NO: 503912 - RNA, 24 nt, Human
ccuccuucggggcgcucgcuacuc

SEQ ID NO: 503913 - RNA, 21 nt, Human
ccuccuucuaggagugagagc

SEQ ID NO: 503914 - RNA, 22 nt, Human
ccugccgucaccccaguccugg

SEQ ID NO: 503915 - RNA, 22 nt, Human
ccuggaccagagcaacuggggg

SEQ ID NO: 503916 - RNA, 20 nt, Human
cggcuccccgauggccuccu

SEQ ID NO: 503917 - RNA, 20 nt, Human
cucacacccuccuucuagga

SEQ ID NO: 503918 - RNA, 19 nt, Human
gagaagcagaggaccagga

SEQ ID NO: 503919 - RNA, 20 nt, Human
gagaagcagaggaccaggaa

SEQ ID NO: 503920 - RNA, 25 nt, Human
gcaguccccccucccggcuccccga

SEQ ID NO: 503921 - RNA, 20 nt, Human
gccgucaccccaguccuggu

SEQ ID NO: 503922 - RNA, 19 nt, Human
ggaccagagcaacuggggg

SEQ ID NO: 503923 - RNA, 19 nt, Human
ggauccagagaagcagagg

SEQ ID NO: 503924 - RNA, 24 nt, Human
ggggguggggaggauccagagaag

SEQ ID NO: 503925 - RNA, 24 nt, Human
gggguccucucgcaguccccccuc

SEQ ID NO: 503926 - RNA, 18 nt, Human
gggguggggaggauccag

SEQ ID NO: 503927 - RNA, 19 nt, Human
guccucucgcagucccccc

SEQ ID NO: 503928 - RNA, 19 nt, Human
uccccgauggccuccuucg

SEQ ID NO: 503929 - RNA, 19 nt, Human
uccuggaugaccugguugu

SEQ ID NO: 503930 - RNA, 19 nt, Human
ucucgcaguccccccuccc

SEQ ID NO: 503931 - RNA, 22 nt, Human
ucucugagaaaagggccggccc

SEQ ID NO: 503932 - RNA, 20 nt, Human
ucuugggcagaaauccagcc

SEQ ID NO: 503933 - RNA, 18 nt, Human
ugccagcagcaggacgga

SEQ ID NO: 503934 - RNA, 21 nt, Human
ugccgucaccccaguccuggu

SEQ ID NO: 503935 - RNA, 28 nt, Human
ugcucuaccccaccucccuagucauuca

SEQ ID NO: 503936 - RNA, 26 nt, Human
ugggcagaaauccagccacugcccca

SEQ ID NO: 503937 - RNA, 20 nt, Human
uugagugaucucugagaaaa

SEQ ID NO: 503938 - RNA, 18 nt, Human
uugggcagaaauccagcc

SEQ ID NO: 503939 - RNA, 22 nt, Human
uuuuuuuuuuuuugaggguucu

SEQ ID NO: 503940 - RNA, 24 nt, Human
uuuuuuuuuuuuuuuuuuugaggg

SEQ ID NO: 503941 - RNA, 24 nt, Human
aaacaaacaaauaaauaauaagca

SEQ ID NO: 503942 - RNA, 21 nt, Human
aaacaaacaguagccuucccc

SEQ ID NO: 503943 - RNA, 24 nt, Human
aaacaaacaguagccuuccccagu

SEQ ID NO: 503944 - RNA, 23 nt, Human
aaauccuuccgauagauacgcca

SEQ ID NO: 503945 - RNA, 18 nt, Human
aagcaaacaaaaacaaac

SEQ ID NO: 503946 - RNA, 18 nt, Human
aagcaaacaaaaacaaac

SEQ ID NO: 503947 - RNA, 24 nt, Human
aagggaacauucugaaacuuaguu

SEQ ID NO: 503948 - RNA, 23 nt, Human
aauauaacuaacuguacaagaca

SEQ ID NO: 503949 - RNA, 20 nt, Human
auaggcuuccucgcaggcuu

SEQ ID NO: 503950 - RNA, 18 nt, Human
aucuccuaaucugaauuu

SEQ ID NO: 503951 - RNA, 20 nt, Human
caaaaacaaacaguagccuu

SEQ ID NO: 503952 - RNA, 18 nt, Human
caaacaguagccuucccc

SEQ ID NO: 503953 - RNA, 23 nt, Human
cgucucaggacaggaaacuauuc

SEQ ID NO: 503954 - RNA, 20 nt, Human
gcuguucaaaggguaagcac

SEQ ID NO: 503955 - RNA, 19 nt, Human
ggcgcccggcuccucugcc

SEQ ID NO: 503956 - RNA, 19 nt, Human
uaagcaaacaaaaacaaac

SEQ ID NO: 503957 - RNA, 24 nt, Human
uacaagaagggaacauucugaaac

SEQ ID NO: 503958 - RNA, 18 nt, Human
uagaaucuuuuguaggua

SEQ ID NO: 503959 - RNA, 22 nt, Human
ucacucugcuguucaaagggua

SEQ ID NO: 503960 - RNA, 26 nt, Human
uccauaggcuuccucgcaggcuucug

SEQ ID NO: 503961 - RNA, 24 nt, Human
ucgguuucaguuuaacugaagcga

SEQ ID NO: 503962 - RNA, 21 nt, Human
ucuuguguauagggguaaucu

SEQ ID NO: 503963 - RNA, 21 nt, Human
uuccccaguugcaggggccua

SEQ ID NO: 503964 - RNA, 20 nt, Human
uuccucgcaggcuucugugc

SEQ ID NO: 503965 - RNA, 22 nt, Human
uucgguuucaguuuaacugaag

SEQ ID NO: 503966 - RNA, 22 nt, Human
uugcaggggccuaaaauaucuc

SEQ ID NO: 503967 - RNA, 24 nt, Human
uugcaggggccuaaaauaucuccu

SEQ ID NO: 503968 - RNA, 21 nt, Human
uuuagguuggccauucuugug

SEQ ID NO: 503969 - RNA, 18 nt, Human
uuuugcccuuuuccuucc

SEQ ID NO: 503970 - RNA, 23 nt, Human
ccggccguccuguccugcuccug

SEQ ID NO: 503971 - RNA, 18 nt, Human
ccugcuccugccaggugg

SEQ ID NO: 503972 - RNA, 19 nt, Human
cuguccugcuccugccagg

SEQ ID NO: 503973 - RNA, 18 nt, Human
uuuugguacccacagacu

SEQ ID NO: 503974 - RNA, 18 nt, Human
uuuuuuuuuuuuuuuuug

SEQ ID NO: 503975 - RNA, 20 nt, Human
uuuuuuuuuuuuuuuuuugg

SEQ ID NO: 503976 - RNA, 25 nt, Human
aaaaaaacagaucacauuuugcuga

SEQ ID NO: 503977 - RNA, 26 nt, Human
aaaaaaaccaaaaaggcugggaaagg

SEQ ID NO: 503978 - RNA, 20 nt, Human
aaaaaaccaaaaaggcuggu

SEQ ID NO: 503979 - RNA, 23 nt, Human
aaaagaaaaaaaauaagaaagaa

SEQ ID NO: 503980 - RNA, 23 nt, Human
aaacaaacaguaaaaugauucca

SEQ ID NO: 503981 - RNA, 26 nt, Human
aaacaaacaguaaaaugauuccagag

SEQ ID NO: 503982 - RNA, 19 nt, Human
aaacaaacucaaaucauga

SEQ ID NO: 503983 - RNA, 21 nt, Human
aaacaacaaaauccaaaugca

SEQ ID NO: 503984 - RNA, 19 nt, Human
aaacaccccaaaacaaacu

SEQ ID NO: 503985 - RNA, 24 nt, Human
aaacaccccaaaacaaacucaaau

SEQ ID NO: 503986 - RNA, 19 nt, Human
aaacagcaaaaaagcaaac

SEQ ID NO: 503987 - RNA, 24 nt, Human
aaagcgguuucccuguguguguuu

SEQ ID NO: 503988 - RNA, 18 nt, Human
aaaggacuuucccccuca

SEQ ID NO: 503989 - RNA, 22 nt, Human
aacaccccaaaacaaacucaaa

SEQ ID NO: 503990 - RNA, 24 nt, Human
aaccaaauaugaugugaggucaga

SEQ ID NO: 503991 - RNA, 23 nt, Human
aacuauuuuguaauucuaaacaa

SEQ ID NO: 503992 - RNA, 19 nt, Human
aagaacauuaagacucaug

SEQ ID NO: 503993 - RNA, 23 nt, Human
aagaagcuuccagggcaugccga

SEQ ID NO: 503994 - RNA, 19 nt, Human
aagguaaugaaacuacagg

SEQ ID NO: 503995 - RNA, 20 nt, Human
aaucuaccuccguuuucccu

SEQ ID NO: 503996 - RNA, 23 nt, Human
acaaaacacauaauaaaauaccc

SEQ ID NO: 503997 - RNA, 20 nt, Human
acaaacaucaauucucacag

SEQ ID NO: 503998 - RNA, 21 nt, Human
acaagccaacuauaaccccua

SEQ ID NO: 503999 - RNA, 22 nt, Human
acagaccucuagagacuuaaaa

SEQ ID NO: 504000 - RNA, 24 nt, Human
accacaacuuaauucacagaagca

SEQ ID NO: 504001 - RNA, 23 nt, Human
accugguauauucagagguaccu

SEQ ID NO: 504002 - RNA, 20 nt, Human
acuguuuuuggaaguagucu

SEQ ID NO: 504003 - RNA, 20 nt, Human
acuucucacaagaaacacac

SEQ ID NO: 504004 - RNA, 21 nt, Human
agaaaguacaaaauagcccuc

SEQ ID NO: 504005 - RNA, 18 nt, Human
agaacauuaagacucaug

SEQ ID NO: 504006 - RNA, 25 nt, Human
agacagaagcaaaaaaacugcauca

SEQ ID NO: 504007 - RNA, 22 nt, Human
agacuggagcuuguguuggggc

SEQ ID NO: 504008 - RNA, 20 nt, Human
agcacaagccaacuauaacc

SEQ ID NO: 504009 - RNA, 22 nt, Human
agcugaggccaagaagcuucca

SEQ ID NO: 504010 - RNA, 19 nt, Human
aggaaacagaaacaaaacc

SEQ ID NO: 504011 - RNA, 21 nt, Human
aggaaauccagccggaauucc

SEQ ID NO: 504012 - RNA, 21 nt, Human
aggaagacuggagcuuguguu

SEQ ID NO: 504013 - RNA, 26 nt, Human
agggagauggggaggggagucggcuu

SEQ ID NO: 504014 - RNA, 23 nt, Human
agggcaaaaaaggacuuuccccc

SEQ ID NO: 504015 - RNA, 20 nt, Human
aggggagcugaggccaagaa

SEQ ID NO: 504016 - RNA, 22 nt, Human
aggggagcugaggccaagaagc

SEQ ID NO: 504017 - RNA, 19 nt, Human
agguggguugagguugaga

SEQ ID NO: 504018 - RNA, 24 nt, Human
aguaaaaugauuccagaguagcac

SEQ ID NO: 504019 - RNA, 23 nt, Human
auaaaacaaacaauacucaaaug

SEQ ID NO: 504020 - RNA, 19 nt, Human
aucacaauucucuaauuua

SEQ ID NO: 504021 - RNA, 19 nt, Human
augagagcagggagccucu

SEQ ID NO: 504022 - RNA, 20 nt, Human
augcagguggguugagguug

SEQ ID NO: 504023 - RNA, 22 nt, Human
caaaauagcccucagaggauga

SEQ ID NO: 504024 - RNA, 22 nt, Human
caaauaugaugugaggucagaa

SEQ ID NO: 504025 - RNA, 20 nt, Human
caaauuacuucucacaagaa

SEQ ID NO: 504026 - RNA, 25 nt, Human
caagaaacacacugaagcucuagga

SEQ ID NO: 504027 - RNA, 19 nt, Human
caaucaacccgaaaucaaa

SEQ ID NO: 504028 - RNA, 23 nt, Human
cacaaacacaucuaaauagucca

SEQ ID NO: 504029 - RNA, 26 nt, Human
cacuuauacaaugucuuacaaaaaac

SEQ ID NO: 504030 - RNA, 25 nt, Human
cagaaacaaaaccccucaagagacu

SEQ ID NO: 504031 - RNA, 27 nt, Human
cagacaguuuuuuucucaaacuguuuu

SEQ ID NO: 504032 - RNA, 21 nt, Human
cagaccucuagagacuuaaaa

SEQ ID NO: 504033 - RNA, 20 nt, Human
cagagagaaauaacaaacaa

SEQ ID NO: 504034 - RNA, 22 nt, Human
cagcacaaaaaaacaaauacaa

SEQ ID NO: 504035 - RNA, 24 nt, Human
caggaacuggugcuagguauuugg

SEQ ID NO: 504036 - RNA, 20 nt, Human
cauggugagguugccuucac

SEQ ID NO: 504037 - RNA, 24 nt, Human
ccaacauucugugucccuggacac

SEQ ID NO: 504038 - RNA, 25 nt, Human
ccaauucuaaacuugucuuaucaac

SEQ ID NO: 504039 - RNA, 24 nt, Human
cgggaggaaauccagccggaauuu

SEQ ID NO: 504040 - RNA, 18 nt, Human
cucaguguuuuccucugg

SEQ ID NO: 504041 - RNA, 19 nt, Human
cugggggagaugcaugcag

SEQ ID NO: 504042 - RNA, 22 nt, Human
cuguacauugaaacaguauaaa

SEQ ID NO: 504043 - RNA, 22 nt, Human
cuuuuuuuugagacgccacagg

SEQ ID NO: 504044 - RNA, 20 nt, Human
gacagaagcaaaaaaacugc

SEQ ID NO: 504045 - RNA, 19 nt, Human
gagcggggaaggggagcug

SEQ ID NO: 504046 - RNA, 21 nt, Human
gagcugaggccaagaagcuuc

SEQ ID NO: 504047 - RNA, 18 nt, Human
gaggacagaagaaucaga

SEQ ID NO: 504048 - RNA, 24 nt, Human
gaguagcacaagccaacuauaacc

SEQ ID NO: 504049 - RNA, 19 nt, Human
gcagguggguugagguuga

SEQ ID NO: 504050 - RNA, 19 nt, Human
gcaugugcuauaagaagga

SEQ ID NO: 504051 - RNA, 19 nt, Human
gcugaacacaaacacaucu

SEQ ID NO: 504052 - RNA, 21 nt, Human
ggaaaaugguuuaauauugga

SEQ ID NO: 504053 - RNA, 23 nt, Human
ggaaacaccccaaaacaaacuca

SEQ ID NO: 504054 - RNA, 20 nt, Human
ggagaugcaugcaggugggu

SEQ ID NO: 504055 - RNA, 20 nt, Human
ggauagcaaguuaacaaacu

SEQ ID NO: 504056 - RNA, 24 nt, Human
gggaaaaaagaaaucaagccaaag

SEQ ID NO: 504057 - RNA, 21 nt, Human
gggcaaaaaaggacuuucccc

SEQ ID NO: 504058 - RNA, 22 nt, Human
ggucuuagaaauucaaguggug

SEQ ID NO: 504059 - RNA, 26 nt, Human
gguuuuuuuaaaauuuuauuuuuuuu

SEQ ID NO: 504060 - RNA, 25 nt, Human
guagcacaagccaacuauaaccccu

SEQ ID NO: 504061 - RNA, 20 nt, Human
uaaaaaaaccaaaaaggcug

SEQ ID NO: 504062 - RNA, 25 nt, Human
uaaaaaaaccaaaaaggcugggaaa

SEQ ID NO: 504063 - RNA, 18 nt, Human
uaaaagaaaaaaacagau

SEQ ID NO: 504064 - RNA, 22 nt, Human
uaaaauacccauguuaucaaau

SEQ ID NO: 504065 - RNA, 24 nt, Human
uaaaaugauuccagaguagcacaa

SEQ ID NO: 504066 - RNA, 26 nt, Human
uaaacagcaaaaaagcaaacccuaaa

SEQ ID NO: 504067 - RNA, 19 nt, Human
uaaauuguuuuucguugag

SEQ ID NO: 504068 - RNA, 24 nt, Human
uaaccaaagaacaaaguagucaaa

SEQ ID NO: 504069 - RNA, 18 nt, Human
uaagcaaagggaaaaaag

SEQ ID NO: 504070 - RNA, 24 nt, Human
uaauaaauuucagucuugcaugaa

SEQ ID NO: 504071 - RNA, 20 nt, Human
uaauucucaaaagaaaagca

SEQ ID NO: 504072 - RNA, 20 nt, Human
uacagaccucuagagacuua

SEQ ID NO: 504073 - RNA, 23 nt, Human
uaucaacaaagaacauuaagacu

SEQ ID NO: 504074 - RNA, 19 nt, Human
ucaaucaacccgaaaucaa

SEQ ID NO: 504075 - RNA, 21 nt, Human
ucaaucaaucaacccgaaauc

SEQ ID NO: 504076 - RNA, 25 nt, Human
ucaaucaaucaaucaaucaacccga

SEQ ID NO: 504077 - RNA, 20 nt, Human
ucaauuaaaaaaaccaaaaa

SEQ ID NO: 504078 - RNA, 20 nt, Human
ucagaaagacaucagaaaca

SEQ ID NO: 504079 - RNA, 24 nt, Human
uccaaauuggaaacaccccaaaac

SEQ ID NO: 504080 - RNA, 21 nt, Human
uccacaauuaaaaaaaaugac

SEQ ID NO: 504081 - RNA, 25 nt, Human
uccacaauuaaaaaaaaugacauca

SEQ ID NO: 504082 - RNA, 25 nt, Human
ucuagacuaggacauagccgggguc

SEQ ID NO: 504083 - RNA, 23 nt, Human
ugaaacaguauaaaauauaggua

SEQ ID NO: 504084 - RNA, 27 nt, Human
ugaaaccacaacuuaauucacagaagc

SEQ ID NO: 504085 - RNA, 19 nt, Human
ugacauuauucaaaaaggu

SEQ ID NO: 504086 - RNA, 19 nt, Human
ugacuugugaagaagaaac

SEQ ID NO: 504087 - RNA, 24 nt, Human
ugagaaauaaucaaaaguaguaaa

SEQ ID NO: 504088 - RNA, 22 nt, Human
ugagagcagggagccucugggg

SEQ ID NO: 504089 - RNA, 21 nt, Human
ugagagggagauggggagggg

SEQ ID NO: 504090 - RNA, 21 nt, Human
ugaggccaagaagcuuccagg

SEQ ID NO: 504091 - RNA, 22 nt, Human
uggaaacaccccaaaacaaacu

SEQ ID NO: 504092 - RNA, 22 nt, Human
uggcacaggcccuuugcacccu

SEQ ID NO: 504093 - RNA, 26 nt, Human
uggcucaaauuccaucaaacaacaag

SEQ ID NO: 504094 - RNA, 20 nt, Human
ugggacaugggcacuuauaa

SEQ ID NO: 504095 - RNA, 18 nt, Human
uggggaggggagucggcu

SEQ ID NO: 504096 - RNA, 20 nt, Human
uggggcuguaggcgugacau

SEQ ID NO: 504097 - RNA, 21 nt, Human
ugggggagaugcaugcaggug

SEQ ID NO: 504098 - RNA, 23 nt, Human
uggugcuagguauuuggucagua

SEQ ID NO: 504099 - RNA, 23 nt, Human
ugugaagaagaaacacuccgauu

SEQ ID NO: 504100 - RNA, 24 nt, Human
ugugaagaagaaacacuccgauuc

SEQ ID NO: 504101 - RNA, 19 nt, Human
ugugauaaagaacugagcu

SEQ ID NO: 504102 - RNA, 26 nt, Human
uguuucaacuacacgguuauguucac

SEQ ID NO: 504103 - RNA, 26 nt, Human
uuaaaaaaaccaaaaaggcugggaaa

SEQ ID NO: 504104 - RNA, 18 nt, Human
uuaaaagauaaaagugga

SEQ ID NO: 504105 - RNA, 23 nt, Human
uuagaaauauuauuuaggaguau

SEQ ID NO: 504106 - RNA, 18 nt, Human
uuagaaauucaaguggug

SEQ ID NO: 504107 - RNA, 19 nt, Human
uucaaaacuuucucaccuu

SEQ ID NO: 504108 - RNA, 18 nt, Human
uucacaaugaggacagaa

SEQ ID NO: 504109 - RNA, 25 nt, Human
uucacuuuuuuucuuuaaaagaaaa

SEQ ID NO: 504110 - RNA, 19 nt, Human
uucuaaacuugucuuauca

SEQ ID NO: 504111 - RNA, 20 nt, Human
uugaucuaaacagcaaaaaa

SEQ ID NO: 504112 - RNA, 19 nt, Human
uuggccucguggaauuguu

SEQ ID NO: 504113 - RNA, 20 nt, Human
uugucuaauaauaaauuuca

SEQ ID NO: 504114 - RNA, 21 nt, Human
uuuauccacuuaaagugacug

SEQ ID NO: 504115 - RNA, 18 nt, Human
uuucuuauacuaaucuac

SEQ ID NO: 504116 - RNA, 23 nt, Human
uuuuuguuuuuuugcaucaguag

SEQ ID NO: 504117 - RNA, 23 nt, Human
uuuuuuggagaagggcaaaaaag

SEQ ID NO: 504118 - RNA, 24 nt, Human
uuuuuuuaauuagcacuuaagaua

SEQ ID NO: 504119 - RNA, 24 nt, Human
augaacuugaaguuguuuucauuc

SEQ ID NO: 504120 - RNA, 21 nt, Human
caaauuuauucacagcagcuc

SEQ ID NO: 504121 - RNA, 24 nt, Human
caauccuuauucaaaguacagcua

SEQ ID NO: 504122 - RNA, 18 nt, Human
ccaacaugaacuauuugc

SEQ ID NO: 504123 - RNA, 20 nt, Human
gggagguccaauggcggcag

SEQ ID NO: 504124 - RNA, 20 nt, Human
uaaaagggagguccaauggc

SEQ ID NO: 504125 - RNA, 22 nt, Human
ucuaaagucguccagugcagca

SEQ ID NO: 504126 - RNA, 22 nt, Human
uucaaaguacagcuaguucucc

SEQ ID NO: 504127 - RNA, 24 nt, Human
aaaaaaaaaaaaaaagacacauca

SEQ ID NO: 504128 - RNA, 24 nt, Human
aaaaaaagacacaucaacugcaaa

SEQ ID NO: 504129 - RNA, 22 nt, Human
aaaaagacacaucaacugcaaa

SEQ ID NO: 504130 - RNA, 18 nt, Human
aaacagcagaaaacaggg

SEQ ID NO: 504131 - RNA, 18 nt, Human
aagacacaucaacugcaa

SEQ ID NO: 504132 - RNA, 22 nt, Human
aagacgaagccccggcgaggaa

SEQ ID NO: 504133 - RNA, 18 nt, Human
aaugacaugagcuugaaa

SEQ ID NO: 504134 - RNA, 18 nt, Human
acagcgcugccauuacug

SEQ ID NO: 504135 - RNA, 24 nt, Human
accgaauuuccacuuuucagcaau

SEQ ID NO: 504136 - RNA, 20 nt, Human
aggaaggugggcggaggcgg

SEQ ID NO: 504137 - RNA, 22 nt, Human
aggaaggugggcggaggcggcg

SEQ ID NO: 504138 - RNA, 21 nt, Human
aggcagcccgaaggagugaaa

SEQ ID NO: 504139 - RNA, 19 nt, Human
aggccgccuccccggccgg

SEQ ID NO: 504140 - RNA, 19 nt, Human
aggcggcggcggcggcggc

SEQ ID NO: 504141 - RNA, 24 nt, Human
aggggagggggaggcagcccgaag

SEQ ID NO: 504142 - RNA, 25 nt, Human
aggugggcggaggcggcggcggcgg

SEQ ID NO: 504143 - RNA, 18 nt, Human
auuaaaaaaaaaaaaaaa

SEQ ID NO: 504144 - RNA, 20 nt, Human
auuaaaaaaaaaaaaaaaga

SEQ ID NO: 504145 - RNA, 24 nt, Human
caagcagcaguaucauguuuguca

SEQ ID NO: 504146 - RNA, 19 nt, Human
caccacgcuggaggagagc

SEQ ID NO: 504147 - RNA, 25 nt, Human
cacucauucuuuuaauaaaguuuua

SEQ ID NO: 504148 - RNA, 23 nt, Human
cagcccgaaggagugaaagacga

SEQ ID NO: 504149 - RNA, 21 nt, Human
caggggacaaggggaggggga

SEQ ID NO: 504150 - RNA, 27 nt, Human
ccaaauggugauggcaaugaucuucuc

SEQ ID NO: 504151 - RNA, 19 nt, Human
ccgccuccccggccggccg

SEQ ID NO: 504152 - RNA, 24 nt, Human
cggcgaggaaggugggcggaggcg

SEQ ID NO: 504153 - RNA, 20 nt, Human
cggcggcggcggcggcuguc

SEQ ID NO: 504154 - RNA, 23 nt, Human
cugugcgccgaggccgccucccc

SEQ ID NO: 504155 - RNA, 18 nt, Human
cuugaaauaucucuaggc

SEQ ID NO: 504156 - RNA, 23 nt, Human
cuuuaagauacauuaaaaaaaaa

SEQ ID NO: 504157 - RNA, 18 nt, Human
gaggcacaguccugcuuu

SEQ ID NO: 504158 - RNA, 22 nt, Human
gaggcggcggcggcggcggcug

SEQ ID NO: 504159 - RNA, 22 nt, Human
gcaaugaucuucucacaccacg

SEQ ID NO: 504160 - RNA, 25 nt, Human
gcggcggcggcggcggcugucagcu

SEQ ID NO: 504161 - RNA, 19 nt, Human
ggacaaggggagggggagg

SEQ ID NO: 504162 - RNA, 22 nt, Human
ggcaaggggcaggggacaaggg

SEQ ID NO: 504163 - RNA, 18 nt, Human
ggcggcggcggcggcggc

SEQ ID NO: 504164 - RNA, 24 nt, Human
gggcaaggggcaggggacaagggg

SEQ ID NO: 504165 - RNA, 21 nt, Human
gggcaggggacaaggggaggg

SEQ ID NO: 504166 - RNA, 24 nt, Human
gggcggaggcggcggcggcggcgg

SEQ ID NO: 504167 - RNA, 20 nt, Human
ggggagggggaggcagcccg

SEQ ID NO: 504168 - RNA, 27 nt, Human
ggugggcggaggcggcggcggcggcga

SEQ ID NO: 504169 - RNA, 21 nt, Human
uaagaaaugucauaaugacau

SEQ ID NO: 504170 - RNA, 23 nt, Human
ucacaccacgcuggaggagagcg

SEQ ID NO: 504171 - RNA, 20 nt, Human
ucccacaggaacacaccaaa

SEQ ID NO: 504172 - RNA, 19 nt, Human
ugaaagacgaagccccggc

SEQ ID NO: 504173 - RNA, 20 nt, Human
ugacaugagcuugaaauauc

SEQ ID NO: 504174 - RNA, 24 nt, Human
uggugauggcaaugaucuucucac

SEQ ID NO: 504175 - RNA, 24 nt, Human
uuuuuuuuuuuuuuauuugacaag

SEQ ID NO: 504176 - RNA, 21 nt, Human
uuuuuuuuuuuuuuuuuauuu

SEQ ID NO: 504177 - RNA, 19 nt, Human
acagccugauggaggugcu

SEQ ID NO: 504178 - RNA, 20 nt, Human
agagauuuuccacagccuga

SEQ ID NO: 504179 - RNA, 23 nt, Human
cgggcagccgaggucuguaauca

SEQ ID NO: 504180 - RNA, 22 nt, Human
gagaacagagauuuuccacagc

SEQ ID NO: 504181 - RNA, 18 nt, Human
gcagcuuccgccacgugu

SEQ ID NO: 504182 - RNA, 20 nt, Human
ucuguaaucagaaccgcugg

SEQ ID NO: 504183 - RNA, 24 nt, Human
ugagaacagagauuuuccacagcc

SEQ ID NO: 504184 - RNA, 20 nt, Human
ugcguguaguugucgggcag

SEQ ID NO: 504185 - RNA, 26 nt, Human
uuccacagccugauggaggugcugcu

SEQ ID NO: 504186 - RNA, 27 nt, Human
aaaggggagagcuggcaucccgucggg

SEQ ID NO: 504187 - RNA, 21 nt, Human
aagcacaaaggggagagcugg

SEQ ID NO: 504188 - RNA, 20 nt, Human
acacgcacccccgcaccccc

SEQ ID NO: 504189 - RNA, 23 nt, Human
acagacaggccacaggcaggaac

SEQ ID NO: 504190 - RNA, 19 nt, Human
acccagagccccauucccc

SEQ ID NO: 504191 - RNA, 18 nt, Human
accccaggcucccagcuc

SEQ ID NO: 504192 - RNA, 18 nt, Human
agccccuucccugagcag

SEQ ID NO: 504193 - RNA, 20 nt, Human
aggcaggaacccagagcccc

SEQ ID NO: 504194 - RNA, 21 nt, Human
aggcaggaacccagagcccca

SEQ ID NO: 504195 - RNA, 22 nt, Human
aggccacaggcaggaacccaga

SEQ ID NO: 504196 - RNA, 20 nt, Human
aggcucccagcucccagucu

SEQ ID NO: 504197 - RNA, 23 nt, Human
aguuaguuuuauuuuacucccuu

SEQ ID NO: 504198 - RNA, 18 nt, Human
auggccaagcccccaggc

SEQ ID NO: 504199 - RNA, 22 nt, Human
caacccuccucuucccuggccc

SEQ ID NO: 504200 - RNA, 20 nt, Human
cacccugggcccuccauggg

SEQ ID NO: 504201 - RNA, 20 nt, Human
caccggagccccccaacccu

SEQ ID NO: 504202 - RNA, 18 nt, Human
cacgcacccccgcacccc

SEQ ID NO: 504203 - RNA, 21 nt, Human
cagaggaacggaaggccggca

SEQ ID NO: 504204 - RNA, 19 nt, Human
cauggccaagcccccaggc

SEQ ID NO: 504205 - RNA, 21 nt, Human
cauggccaagcccccaggccc

SEQ ID NO: 504206 - RNA, 18 nt, Human
cauuggguccaagcugca

SEQ ID NO: 504207 - RNA, 19 nt, Human
ccaacugaugcccauacca

SEQ ID NO: 504208 - RNA, 19 nt, Human
ccaagcccccaggcccuga

SEQ ID NO: 504209 - RNA, 19 nt, Human
ccaccccaccuuggcccca

SEQ ID NO: 504210 - RNA, 23 nt, Human
ccaccggagccccccaacccucc

SEQ ID NO: 504211 - RNA, 21 nt, Human
ccagcauggccaagcccccag

SEQ ID NO: 504212 - RNA, 21 nt, Human
ccaggcccugaccaccaccca

SEQ ID NO: 504213 - RNA, 20 nt, Human
cccaacccuccucuucccug

SEQ ID NO: 504214 - RNA, 20 nt, Human
cccauaccaggcacccuggg

SEQ ID NO: 504215 - RNA, 19 nt, Human
ccccaacccuccucuuccc

SEQ ID NO: 504216 - RNA, 23 nt, Human
ccccaccaacugaugcccauacc

SEQ ID NO: 504217 - RNA, 24 nt, Human
ccccaccuuggccccaguggugac

SEQ ID NO: 504218 - RNA, 25 nt, Human
ccccaggcccugaccaccacccauu

SEQ ID NO: 504219 - RNA, 21 nt, Human
ccccaguggugaccaagccag

SEQ ID NO: 504220 - RNA, 26 nt, Human
cccccaacccuccucuucccuggccc

SEQ ID NO: 504221 - RNA, 23 nt, Human
cccccagcauggccaagccccca

SEQ ID NO: 504222 - RNA, 19 nt, Human
cccccaggcccugaccacc

SEQ ID NO: 504223 - RNA, 22 nt, Human
cccccaggcccugaccaccacc

SEQ ID NO: 504224 - RNA, 23 nt, Human
cccccaggcccugaccaccaccc

SEQ ID NO: 504225 - RNA, 25 nt, Human
ccccgcacccccaccaacugaugcc

SEQ ID NO: 504226 - RNA, 27 nt, Human
ccccgcacccccaccaacugaugccca

SEQ ID NO: 504227 - RNA, 18 nt, Human
ccccucugggcagagucu

SEQ ID NO: 504228 - RNA, 20 nt, Human
ccccucugggcagagucugc

SEQ ID NO: 504229 - RNA, 23 nt, Human
ccccucugggcagagucugccug

SEQ ID NO: 504230 - RNA, 26 nt, Human
ccucucuccaccccaccuuggcccca

SEQ ID NO: 504231 - RNA, 21 nt, Human
cggagccccccaacccuccuc

SEQ ID NO: 504232 - RNA, 24 nt, Human
cucccccugggguucagaccacag

SEQ ID NO: 504233 - RNA, 21 nt, Human
cucguaggccucucuccaccc

SEQ ID NO: 504234 - RNA, 18 nt, Human
cugaauuagggaggagga

SEQ ID NO: 504235 - RNA, 19 nt, Human
cugggucugaauuagggag

SEQ ID NO: 504236 - RNA, 20 nt, Human
cuguccaccccaggcuccca

SEQ ID NO: 504237 - RNA, 20 nt, Human
gacacgcacccccgcacccc

SEQ ID NO: 504238 - RNA, 22 nt, Human
gagccccauuugcuguugcagg

SEQ ID NO: 504239 - RNA, 22 nt, Human
gcagggaagcacaaaggggaga

SEQ ID NO: 504240 - RNA, 21 nt, Human
gccccuucccugagcagccug

SEQ ID NO: 504241 - RNA, 18 nt, Human
gcuaaggagaaggcugag

SEQ ID NO: 504242 - RNA, 22 nt, Human
ggaaggccggcaucgcagaagc

SEQ ID NO: 504243 - RNA, 24 nt, Human
ggacacgcacccccgcacccccac

SEQ ID NO: 504244 - RNA, 21 nt, Human
ggccccaguggugaccaagcc

SEQ ID NO: 504245 - RNA, 21 nt, Human
ggcugaagaaggagccccauu

SEQ ID NO: 504246 - RNA, 18 nt, Human
ggcugaggagaagggguc

SEQ ID NO: 504247 - RNA, 18 nt, Human
ggcugccccucugggcag

SEQ ID NO: 504248 - RNA, 20 nt, Human
ggcugccccucugggcagag

SEQ ID NO: 504249 - RNA, 26 nt, Human
gggagggcugaagaaggagccccauu

SEQ ID NO: 504250 - RNA, 24 nt, Human
ggggacacgcacccccgcaccccc

SEQ ID NO: 504251 - RNA, 19 nt, Human
ggugaccaagccagggcac

SEQ ID NO: 504252 - RNA, 18 nt, Human
gguggagucaaugcccca

SEQ ID NO: 504253 - RNA, 23 nt, Human
guccuguccaccccaggcuccca

SEQ ID NO: 504254 - RNA, 18 nt, Human
guggugaccaagccaggg

SEQ ID NO: 504255 - RNA, 22 nt, Human
uaaggagaaggcugaggagaag

SEQ ID NO: 504256 - RNA, 19 nt, Human
uaccaggcacccugggccc

SEQ ID NO: 504257 - RNA, 19 nt, Human
uccagcucaggacaggggu

SEQ ID NO: 504258 - RNA, 19 nt, Human
uccauggguugcugcaggg

SEQ ID NO: 504259 - RNA, 21 nt, Human
uccauggguugcugcagggaa

SEQ ID NO: 504260 - RNA, 24 nt, Human
ucccagucugucucaguuuggggc

SEQ ID NO: 504261 - RNA, 18 nt, Human
ucccugagcagccuggcu

SEQ ID NO: 504262 - RNA, 19 nt, Human
ucccugagcagccuggcug

SEQ ID NO: 504263 - RNA, 21 nt, Human
uccucugccgcuuucagcccc

SEQ ID NO: 504264 - RNA, 23 nt, Human
uccuguccaccccaggcucccag

SEQ ID NO: 504265 - RNA, 19 nt, Human
ucugaauuagggaggagga

SEQ ID NO: 504266 - RNA, 18 nt, Human
ucugggcagagucugccu

SEQ ID NO: 504267 - RNA, 21 nt, Human
ucugggcagagucugccugag

SEQ ID NO: 504268 - RNA, 18 nt, Human
ugaccaagccagggcacu

SEQ ID NO: 504269 - RNA, 23 nt, Human
ugccccacucccccugggguuca

SEQ ID NO: 504270 - RNA, 20 nt, Human
ugccccucugggcagagucu

SEQ ID NO: 504271 - RNA, 21 nt, Human
ugccccucugggcagagucug

SEQ ID NO: 504272 - RNA, 21 nt, Human
uggggcugggaaggggagggc

SEQ ID NO: 504273 - RNA, 24 nt, Human
uggucauaggggcgggcgggcggg

SEQ ID NO: 504274 - RNA, 23 nt, Human
uuuccaccggagccccccaaccc

SEQ ID NO: 504275 - RNA, 19 nt, Human
aaaaacuuagccacaggua

SEQ ID NO: 504276 - RNA, 21 nt, Human
aaaaagaagaggaaauugaag

SEQ ID NO: 504277 - RNA, 20 nt, Human
aaaagagauaaaucagagaa

SEQ ID NO: 504278 - RNA, 23 nt, Human
aaacauacaaaagagauaaauca

SEQ ID NO: 504279 - RNA, 22 nt, Human
aacaaaugaaugaagaaaugaa

SEQ ID NO: 504280 - RNA, 19 nt, Human
aacuacugaaugaacaaau

SEQ ID NO: 504281 - RNA, 22 nt, Human
aacugguagcacaagcagccuu

SEQ ID NO: 504282 - RNA, 24 nt, Human
aagcacaagccguuagccaccaac

SEQ ID NO: 504283 - RNA, 22 nt, Human
aagcagccuuggcaaaacacag

SEQ ID NO: 504284 - RNA, 22 nt, Human
acaaaagagauaaaucagagaa

SEQ ID NO: 504285 - RNA, 22 nt, Human
acaaguuuccucuaaauggcag

SEQ ID NO: 504286 - RNA, 19 nt, Human
acuaugcaggugggcucug

SEQ ID NO: 504287 - RNA, 23 nt, Human
agagaugcugcugagcagaagag

SEQ ID NO: 504288 - RNA, 25 nt, Human
agaggaaaaagaagaggaaauugaa

SEQ ID NO: 504289 - RNA, 21 nt, Human
agccaccaacaaacugguagc

SEQ ID NO: 504290 - RNA, 19 nt, Human
agucacagaggucagagga

SEQ ID NO: 504291 - RNA, 23 nt, Human
agucacagaggucagaggaaaaa

SEQ ID NO: 504292 - RNA, 18 nt, Human
auaaaagacacuuaagcc

SEQ ID NO: 504293 - RNA, 18 nt, Human
auagaagggaauuaccau

SEQ ID NO: 504294 - RNA, 19 nt, Human
caagcagccuuggcaaaac

SEQ ID NO: 504295 - RNA, 21 nt, Human
caagcagccuuggcaaaacac

SEQ ID NO: 504296 - RNA, 22 nt, Human
caauucacaucagacuucagaa

SEQ ID NO: 504297 - RNA, 20 nt, Human
cacgaagcuccuugcuaggg

SEQ ID NO: 504298 - RNA, 18 nt, Human
cagaggaaaaagaagagg

SEQ ID NO: 504299 - RNA, 18 nt, Human
cauagccuagagccaggc

SEQ ID NO: 504300 - RNA, 23 nt, Human
cauggccacaucugagaaaagag

SEQ ID NO: 504301 - RNA, 24 nt, Human
cauuuaaaaaucuacugcaaauua

SEQ ID NO: 504302 - RNA, 22 nt, Human
ccaccaacaaacugguagcaca

SEQ ID NO: 504303 - RNA, 24 nt, Human
ccuagagccaggcacccaggaaau

SEQ ID NO: 504304 - RNA, 19 nt, Human
cguggagggugaagagggu

SEQ ID NO: 504305 - RNA, 20 nt, Human
cuacugcaaauuaaguauaa

SEQ ID NO: 504306 - RNA, 22 nt, Human
cugcugagcagaagaguccugu

SEQ ID NO: 504307 - RNA, 22 nt, Human
cuuggcaaaacacaguuacuau

SEQ ID NO: 504308 - RNA, 22 nt, Human
cuuuuuagcuguguaauucuaa

SEQ ID NO: 504309 - RNA, 21 nt, Human
gaaaauccaaacauacaaaag

SEQ ID NO: 504310 - RNA, 20 nt, Human
gaaagcaacuaauuaagagc

SEQ ID NO: 504311 - RNA, 18 nt, Human
gaguaguaggggguggcg

SEQ ID NO: 504312 - RNA, 23 nt, Human
gcuaaaauagaagggaauuacca

SEQ ID NO: 504313 - RNA, 25 nt, Human
ggaaauagugaaagcaaccgguacc

SEQ ID NO: 504314 - RNA, 21 nt, Human
ggguguugugaggaggguaga

SEQ ID NO: 504315 - RNA, 27 nt, Human
gguuggcugcucagacuguucaggacu

SEQ ID NO: 504316 - RNA, 23 nt, Human
uaagaaaaauuaagucacagagg

SEQ ID NO: 504317 - RNA, 24 nt, Human
uaagccacugaaauagaaaguaaa

SEQ ID NO: 504318 - RNA, 22 nt, Human
uauaucuuauuuugguguuuaa

SEQ ID NO: 504319 - RNA, 20 nt, Human
uauuauaucuuauuuuggug

SEQ ID NO: 504320 - RNA, 21 nt, Human
uauuugcaacuaaaucuaaca

SEQ ID NO: 504321 - RNA, 20 nt, Human
uauuuuaucuuauuuuggug

SEQ ID NO: 504322 - RNA, 24 nt, Human
uauuuugguguuuuuuuuccuuuu

SEQ ID NO: 504323 - RNA, 18 nt, Human
ucaggacauagccuagag

SEQ ID NO: 504324 - RNA, 24 nt, Human
ucauugugagaagcaaaguacacc

SEQ ID NO: 504325 - RNA, 23 nt, Human
uccaaacauacaaaagagauaaa

SEQ ID NO: 504326 - RNA, 19 nt, Human
uccacuguuaaucugggcg

SEQ ID NO: 504327 - RNA, 19 nt, Human
uccuguguucaauuuuguu

SEQ ID NO: 504328 - RNA, 21 nt, Human
ucgauauugaaaauccaaaca

SEQ ID NO: 504329 - RNA, 23 nt, Human
ucgauauugaaaauccaaacaua

SEQ ID NO: 504330 - RNA, 18 nt, Human
ugaaauagaaaguaaaua

SEQ ID NO: 504331 - RNA, 22 nt, Human
ugaagaggguguugugaggagg

SEQ ID NO: 504332 - RNA, 24 nt, Human
ugagaagugguauuuuugaguguu

SEQ ID NO: 504333 - RNA, 18 nt, Human
ugaguguuucaauaaaaa

SEQ ID NO: 504334 - RNA, 22 nt, Human
ugcaaaaacaaauguuuuauua

SEQ ID NO: 504335 - RNA, 23 nt, Human
ugcacagaaucaccuuuaaaaac

SEQ ID NO: 504336 - RNA, 19 nt, Human
ugcaggugggcucuguuuu

SEQ ID NO: 504337 - RNA, 24 nt, Human
ugcugcugagcagaagaguccugu

SEQ ID NO: 504338 - RNA, 23 nt, Human
uggcaaaacacaguuacuaugca

SEQ ID NO: 504339 - RNA, 18 nt, Human
ugggcgauugccauucag

SEQ ID NO: 504340 - RNA, 26 nt, Human
ugguagcacaagcagccuuggcaaaa

SEQ ID NO: 504341 - RNA, 20 nt, Human
ugguauuuuugaguguuuca

SEQ ID NO: 504342 - RNA, 23 nt, Human
uguauuuacaaucuuggguaguc

SEQ ID NO: 504343 - RNA, 20 nt, Human
ugugagaagcaaaguacacc

SEQ ID NO: 504344 - RNA, 18 nt, Human
uguucaggacugcuacug

SEQ ID NO: 504345 - RNA, 24 nt, Human
uuaaaccauaauuauuaggcaaca

SEQ ID NO: 504346 - RNA, 24 nt, Human
uuauuuugguguuuaaauuuguuu

SEQ ID NO: 504347 - RNA, 26 nt, Human
uucagagucugaaaaaucacagaacc

SEQ ID NO: 504348 - RNA, 24 nt, Human
uucauuugacauuuauugcaauaa

SEQ ID NO: 504349 - RNA, 19 nt, Human
uuuuccuuuuuagcugugu

SEQ ID NO: 504350 - RNA, 18 nt, Human
aagaagccccgugauuuc

SEQ ID NO: 504351 - RNA, 23 nt, Human
aagaagccccgugauuucgugau

SEQ ID NO: 504352 - RNA, 23 nt, Human
aggcagaugcugcgaccuugccc

SEQ ID NO: 504353 - RNA, 18 nt, Human
cacagcacuccaccccuc

SEQ ID NO: 504354 - RNA, 24 nt, Human
cacagcacuccaccccuccacacc

SEQ ID NO: 504355 - RNA, 22 nt, Human
caccacgcugccaucucagagu

SEQ ID NO: 504356 - RNA, 22 nt, Human
caccccuccacaccgaagcccg

SEQ ID NO: 504357 - RNA, 23 nt, Human
caccgaagcccgcagcuucucag

SEQ ID NO: 504358 - RNA, 19 nt, Human
cacuccaccccuccacacc

SEQ ID NO: 504359 - RNA, 19 nt, Human
cagcagguucuucccuggg

SEQ ID NO: 504360 - RNA, 20 nt, Human
cagcagguucuucccugggu

SEQ ID NO: 504361 - RNA, 19 nt, Human
cagcuucucaggaaagggc

SEQ ID NO: 504362 - RNA, 21 nt, Human
cagugcauaucaucacacaca

SEQ ID NO: 504363 - RNA, 19 nt, Human
ccccuccacaccgaagccc

SEQ ID NO: 504364 - RNA, 23 nt, Human
ccucugcagaacacucugggccu

SEQ ID NO: 504365 - RNA, 19 nt, Human
cgccagcggaggaacguuc

SEQ ID NO: 504366 - RNA, 24 nt, Human
cuccacaccgaagcccgcagcuuc

SEQ ID NO: 504367 - RNA, 22 nt, Human
cugagccagcagaaagaagccc

SEQ ID NO: 504368 - RNA, 21 nt, Human
gaacacacacauccccugugc

SEQ ID NO: 504369 - RNA, 24 nt, Human
gaacacucugggccucccggcuga

SEQ ID NO: 504370 - RNA, 18 nt, Human
gaguccauuucaaugcug

SEQ ID NO: 504371 - RNA, 23 nt, Human
gcagaaagaagccccgugauuuc

SEQ ID NO: 504372 - RNA, 21 nt, Human
gcgugaccuggggcagggagc

SEQ ID NO: 504373 - RNA, 22 nt, Human
uacaucaggaacacacacaucc

SEQ ID NO: 504374 - RNA, 21 nt, Human
uacgcagccucugcagaacac

SEQ ID NO: 504375 - RNA, 22 nt, Human
ucacagcacuccaccccuccac

SEQ ID NO: 504376 - RNA, 19 nt, Human
ucacagcacuccaccccuu

SEQ ID NO: 504377 - RNA, 19 nt, Human
uccccugugcggagaucug

SEQ ID NO: 504378 - RNA, 20 nt, Human
ucugccuuuuucaguauugg

SEQ ID NO: 504379 - RNA, 21 nt, Human
ugagcaugaggggcuucuugg

SEQ ID NO: 504380 - RNA, 21 nt, Human
ugggccucccggcugagccag

SEQ ID NO: 504381 - RNA, 20 nt, Human
uucuuggugucauuuccacu

SEQ ID NO: 504382 - RNA, 19 nt, Human
uuucaaacuacagaaaagu

SEQ ID NO: 504383 - RNA, 20 nt, Human
aaaauuuucaccacaaaacc

SEQ ID NO: 504384 - RNA, 24 nt, Human
aaacaagcggcccgacaaggggca

SEQ ID NO: 504385 - RNA, 19 nt, Human
aaauauaucucucaauaca

SEQ ID NO: 504386 - RNA, 23 nt, Human
aacacagcugaggaaaauuuaua

SEQ ID NO: 504387 - RNA, 23 nt, Human
aacuauucaaaacugcuaagcag

SEQ ID NO: 504388 - RNA, 27 nt, Human
aacuauucaaaacugcuaagcagccuc

SEQ ID NO: 504389 - RNA, 23 nt, Human
aagcagccuccuguaccacauaa

SEQ ID NO: 504390 - RNA, 22 nt, Human
acaaaaccaauaguuaacuacu

SEQ ID NO: 504391 - RNA, 20 nt, Human
acaaggcagugaacacaugc

SEQ ID NO: 504392 - RNA, 25 nt, Human
acaucaaggaaccaucgucagaaca

SEQ ID NO: 504393 - RNA, 18 nt, Human
aggcagugaacacaugca

SEQ ID NO: 504394 - RNA, 21 nt, Human
auauuguuuucacaucaagga

SEQ ID NO: 504395 - RNA, 20 nt, Human
caaggaaccaucgucagaac

SEQ ID NO: 504396 - RNA, 23 nt, Human
caccacaaaaccaauaguuaacu

SEQ ID NO: 504397 - RNA, 28 nt, Human
ccacaaaaccaauaguuaacuacuaaca

SEQ ID NO: 504398 - RNA, 21 nt, Human
ccaguggagggagaacgaggc

SEQ ID NO: 504399 - RNA, 19 nt, Human
ccuccuguaccacauaagu

SEQ ID NO: 504400 - RNA, 19 nt, Human
cuaagcagccuccuguacc

SEQ ID NO: 504401 - RNA, 20 nt, Human
cugaugugcaacacagcuga

SEQ ID NO: 504402 - RNA, 22 nt, Human
gaaaggacaaggcagugaacac

SEQ ID NO: 504403 - RNA, 20 nt, Human
gaaaggacaaggcagugagg

SEQ ID NO: 504404 - RNA, 23 nt, Human
gaacacaugcauuccaguggagg

SEQ ID NO: 504405 - RNA, 21 nt, Human
ggacaaggcagugaacacaug

SEQ ID NO: 504406 - RNA, 19 nt, Human
ggugacggcagcagccaaa

SEQ ID NO: 504407 - RNA, 24 nt, Human
guagaaaaaguaagaaaauuuuca

SEQ ID NO: 504408 - RNA, 21 nt, Human
uaagaaaauacagauauggua

SEQ ID NO: 504409 - RNA, 21 nt, Human
uaagcagccuccuguaccaca

SEQ ID NO: 504410 - RNA, 24 nt, Human
uaagcagccuccuguaccacauaa

SEQ ID NO: 504411 - RNA, 26 nt, Human
uaagcagccuccuguaccacauaagu

SEQ ID NO: 504412 - RNA, 18 nt, Human
uaggaugauaaugugcaa

SEQ ID NO: 504413 - RNA, 21 nt, Human
uauuguuuucacaucaaggaa

SEQ ID NO: 504414 - RNA, 21 nt, Human
ucaauacagugaucacaccuc

SEQ ID NO: 504415 - RNA, 21 nt, Human
ugacggcagcagccaaacaag

SEQ ID NO: 504416 - RNA, 22 nt, Human
aagcaagagcuguggaggggcu

SEQ ID NO: 504417 - RNA, 23 nt, Human
aagguucucugagaccgacaugg

SEQ ID NO: 504418 - RNA, 21 nt, Human
aggaggagggagggagcuagc

SEQ ID NO: 504419 - RNA, 21 nt, Human
agggagcuagcaagcuaaggc

SEQ ID NO: 504420 - RNA, 19 nt, Human
auaaucggcaagcaagagc

SEQ ID NO: 504421 - RNA, 23 nt, Human
cacccaggaggagggagggagcu

SEQ ID NO: 504422 - RNA, 21 nt, Human
cagcacccaggaggagggagg

SEQ ID NO: 504423 - RNA, 26 nt, Human
ccagaagauaguugacugauaucuuc

SEQ ID NO: 504424 - RNA, 19 nt, Human
cgacaugggggcuagugcu

SEQ ID NO: 504425 - RNA, 18 nt, Human
cucugagaccgacauggg

SEQ ID NO: 504426 - RNA, 19 nt, Human
gcuggugguuacauaaucg

SEQ ID NO: 504427 - RNA, 21 nt, Human
gcuguggaggggcuugcugga

SEQ ID NO: 504428 - RNA, 26 nt, Human
uaacucagagguggggagaagguucu

SEQ ID NO: 504429 - RNA, 20 nt, Human
uaaggcagguggcccuccug

SEQ ID NO: 504430 - RNA, 25 nt, Human
ucaauagcaucaaugcaauccagaa

SEQ ID NO: 504431 - RNA, 25 nt, Human
ucaaugcaauccagaagauaguuga

SEQ ID NO: 504432 - RNA, 21 nt, Human
ugagaccgacaugggggcuag

SEQ ID NO: 504433 - RNA, 24 nt, Human
uggaugcccucagcacccaggagg

SEQ ID NO: 504434 - RNA, 18 nt, Human
uguggaggggcuugcugg

SEQ ID NO: 504435 - RNA, 21 nt, Human
uguggaggggcuugcuggaug

SEQ ID NO: 504436 - RNA, 22 nt, Human
agcaguuggugccaggaggggc

SEQ ID NO: 504437 - RNA, 22 nt, Human
aggcugggcccacuccuacagc

SEQ ID NO: 504438 - RNA, 23 nt, Human
agggacaugggcaggguuuccca

SEQ ID NO: 504439 - RNA, 20 nt, Human
caggggagcaguuggugcca

SEQ ID NO: 504440 - RNA, 18 nt, Human
ccacuccagcugagccug

SEQ ID NO: 504441 - RNA, 18 nt, Human
ccaggaggggcugcgcug

SEQ ID NO: 504442 - RNA, 24 nt, Human
cccaaccacuccagcugagccugg

SEQ ID NO: 504443 - RNA, 20 nt, Human
cccuggccuggccucugugg

SEQ ID NO: 504444 - RNA, 18 nt, Human
cccuggggaagcagggcc

SEQ ID NO: 504445 - RNA, 26 nt, Human
ccguggccauggcagggggguagucc

SEQ ID NO: 504446 - RNA, 19 nt, Human
ccucaggaccugggccacc

SEQ ID NO: 504447 - RNA, 23 nt, Human
ccucuguggcccuaagugucccu

SEQ ID NO: 504448 - RNA, 19 nt, Human
ccuggccuggccucugugg

SEQ ID NO: 504449 - RNA, 23 nt, Human
cgucccugcucuccuagguguca

SEQ ID NO: 504450 - RNA, 21 nt, Human
cuaggugucaagaugcagagg

SEQ ID NO: 504451 - RNA, 19 nt, Human
cucaggaccugggccacca

SEQ ID NO: 504452 - RNA, 23 nt, Human
cucaggaccugggccaccacggg

SEQ ID NO: 504453 - RNA, 20 nt, Human
cuguagggcccuggccuggc

SEQ ID NO: 504454 - RNA, 21 nt, Human
cuuugcagcugggucccagcc

SEQ ID NO: 504455 - RNA, 22 nt, Human
gaccugggccaccacgggaggc

SEQ ID NO: 504456 - RNA, 20 nt, Human
gagggcggggcucaggcagg

SEQ ID NO: 504457 - RNA, 20 nt, Human
gcugcgcugucagucgcugg

SEQ ID NO: 504458 - RNA, 21 nt, Human
ggagcaguuggugccaggagg

SEQ ID NO: 504459 - RNA, 21 nt, Human
gggcggggcucaggcaggugg

SEQ ID NO: 504460 - RNA, 23 nt, Human
ggggugaggaggauuuggaggcc

SEQ ID NO: 504461 - RNA, 22 nt, Human
gggugaggaggauuuggaggcc

SEQ ID NO: 504462 - RNA, 21 nt, Human
ggugaggaggauuuggaggcc

SEQ ID NO: 504463 - RNA, 22 nt, Human
ggugaggaggauuuggaggccu

SEQ ID NO: 504464 - RNA, 19 nt, Human
ggugugggggugaggagga

SEQ ID NO: 504465 - RNA, 19 nt, Human
guggcccuaagugucccug

SEQ ID NO: 504466 - RNA, 22 nt, Human
ucccagugccccacuugcugug

SEQ ID NO: 504467 - RNA, 18 nt, Human
uccgucccugcucuccua

SEQ ID NO: 504468 - RNA, 21 nt, Human
uccuacagccuuugcagcugg

SEQ ID NO: 504469 - RNA, 18 nt, Human
ugagggacaugggcaggg

SEQ ID NO: 504470 - RNA, 18 nt, Human
ugccaguccucaggaccu

SEQ ID NO: 504471 - RNA, 18 nt, Human
uggcaggggagcaguugg

SEQ ID NO: 504472 - RNA, 25 nt, Human
uggccucuguggcccuaaguguccc

SEQ ID NO: 504473 - RNA, 23 nt, Human
ugggggugaggaggauuuggagg

SEQ ID NO: 504474 - RNA, 24 nt, Human
uggugccaggaggggcugcgcugu

SEQ ID NO: 504475 - RNA, 18 nt, Human
ugugggggugaggaggau

SEQ ID NO: 504476 - RNA, 28 nt, Human
aaaagcagcaaggagcugaccgguaccc

SEQ ID NO: 504477 - RNA, 19 nt, Human
aaaauccacccgagugcac

SEQ ID NO: 504478 - RNA, 23 nt, Human
aaacccugauucccccagccccc

SEQ ID NO: 504479 - RNA, 18 nt, Human
aaaggcugcucaggcagg

SEQ ID NO: 504480 - RNA, 18 nt, Human
aaaguccuucagcuucuc

SEQ ID NO: 504481 - RNA, 18 nt, Human
aaauggagggacugccca

SEQ ID NO: 504482 - RNA, 21 nt, Human
aaccaggaaggagccauagcc

SEQ ID NO: 504483 - RNA, 23 nt, Human
aaccaggaaggagccauagccca

SEQ ID NO: 504484 - RNA, 19 nt, Human
aagccucuuaagaacacag

SEQ ID NO: 504485 - RNA, 19 nt, Human
aagcggcuguuugaggagc

SEQ ID NO: 504486 - RNA, 22 nt, Human
aagcugacacccgcuguccuga

SEQ ID NO: 504487 - RNA, 21 nt, Human
aagcuggucuccacacagugc

SEQ ID NO: 504488 - RNA, 21 nt, Human
aaggagacgcgcugcugcugc

SEQ ID NO: 504489 - RNA, 22 nt, Human
aaggagacgcgcugcugcugcc

SEQ ID NO: 504490 - RNA, 18 nt, Human
aaggugccgacccagggc

SEQ ID NO: 504491 - RNA, 23 nt, Human
aauuacaaggugccgacccaggg

SEQ ID NO: 504492 - RNA, 22 nt, Human
acaaacccacagaaaauccacc

SEQ ID NO: 504493 - RNA, 18 nt, Human
acacaugcacacuggcua

SEQ ID NO: 504494 - RNA, 18 nt, Human
acagcccaagucuggguc

SEQ ID NO: 504495 - RNA, 21 nt, Human
acccacagaaaauccacccga

SEQ ID NO: 504496 - RNA, 22 nt, Human
acccacagaaaauccacccgag

SEQ ID NO: 504497 - RNA, 24 nt, Human
acccccaugacacuccccagcccu

SEQ ID NO: 504498 - RNA, 23 nt, Human
acccgagugcacugagcacgcca

SEQ ID NO: 504499 - RNA, 20 nt, Human
acccugauucccccagcccc

SEQ ID NO: 504500 - RNA, 21 nt, Human
accuugauggccuucuugcug

SEQ ID NO: 504501 - RNA, 21 nt, Human
accuugcuccugcuccuucug

SEQ ID NO: 504502 - RNA, 20 nt, Human
acugcaacgggaaagccacg

SEQ ID NO: 504503 - RNA, 18 nt, Human
acugugugggggggccug

SEQ ID NO: 504504 - RNA, 22 nt, Human
agaauuacaaggugccgaccca

SEQ ID NO: 504505 - RNA, 22 nt, Human
agacagaaguccccgccccagc

SEQ ID NO: 504506 - RNA, 21 nt, Human
agcacaggcagacagaagucc

SEQ ID NO: 504507 - RNA, 18 nt, Human
agcagaccugcagggccc

SEQ ID NO: 504508 - RNA, 20 nt, Human
agcagcgcuggguacaagcu

SEQ ID NO: 504509 - RNA, 18 nt, Human
agcagcuuguccuggcug

SEQ ID NO: 504510 - RNA, 18 nt, Human
agccaccucccagccacc

SEQ ID NO: 504511 - RNA, 22 nt, Human
agccgggagguggggaacaggg

SEQ ID NO: 504512 - RNA, 23 nt, Human
agcgugcacuguggggucccagg

SEQ ID NO: 504513 - RNA, 25 nt, Human
agcuguguggccucaagccagccuu

SEQ ID NO: 504514 - RNA, 21 nt, Human
aggaagaaaaaggcaggacag

SEQ ID NO: 504515 - RNA, 23 nt, Human
aggaagaaaaaggcaggacagaa

SEQ ID NO: 504516 - RNA, 26 nt, Human
aggaaggagccauagcccaggcagga

SEQ ID NO: 504517 - RNA, 18 nt, Human
aggaauggggaacccaga

SEQ ID NO: 504518 - RNA, 20 nt, Human
aggacacagggguaugggga

SEQ ID NO: 504519 - RNA, 18 nt, Human
aggagaggguggaguugg

SEQ ID NO: 504520 - RNA, 21 nt, Human
aggagccaccucccagccacc

SEQ ID NO: 504521 - RNA, 24 nt, Human
aggagcuggggguggugguggggg

SEQ ID NO: 504522 - RNA, 18 nt, Human
aggcaaaagcagcgcugg

SEQ ID NO: 504523 - RNA, 22 nt, Human
aggcaagggcucugaagucagg

SEQ ID NO: 504524 - RNA, 20 nt, Human
agggaagcaggucugagcaa

SEQ ID NO: 504525 - RNA, 19 nt, Human
agggcugaggacuucuggu

SEQ ID NO: 504526 - RNA, 24 nt, Human
agugagaaguccagagcucuacag

SEQ ID NO: 504527 - RNA, 25 nt, Human
auacagcagugaagcugaaaugaaa

SEQ ID NO: 504528 - RNA, 22 nt, Human
aucagcugccaccccaucccag

SEQ ID NO: 504529 - RNA, 21 nt, Human
auggagcacaggcagacagaa

SEQ ID NO: 504530 - RNA, 18 nt, Human
caacagcccaagucuggg

SEQ ID NO: 504531 - RNA, 20 nt, Human
caagcacuucacaaccccuc

SEQ ID NO: 504532 - RNA, 25 nt, Human
caauggccugcaccuggcuccggcu

SEQ ID NO: 504533 - RNA, 19 nt, Human
cacccugcagagcuggacc

SEQ ID NO: 504534 - RNA, 23 nt, Human
caccuccccucaaacgaggagcc

SEQ ID NO: 504535 - RNA, 23 nt, Human
cacgcacacaggaaaguccuuca

SEQ ID NO: 504536 - RNA, 25 nt, Human
cacuccccagcccuccaaggccacu

SEQ ID NO: 504537 - RNA, 20 nt, Human
cacugagcacgccagaaauc

SEQ ID NO: 504538 - RNA, 18 nt, Human
cacuguggggucccaggc

SEQ ID NO: 504539 - RNA, 24 nt, Human
cacuuaacaaacccacagaaaauc

SEQ ID NO: 504540 - RNA, 19 nt, Human
cagaauuacaaggugccga

SEQ ID NO: 504541 - RNA, 20 nt, Human
cagagaugccuggagggaaa

SEQ ID NO: 504542 - RNA, 24 nt, Human
cagagcaacagcccaagucugggu

SEQ ID NO: 504543 - RNA, 22 nt, Human
cagagcugccaggccaggcccu

SEQ ID NO: 504544 - RNA, 22 nt, Human
cagcaaggagcugacagagcug

SEQ ID NO: 504545 - RNA, 21 nt, Human
cagcagugaagcugaaaugaa

SEQ ID NO: 504546 - RNA, 19 nt, Human
cagccuccucugggggaca

SEQ ID NO: 504547 - RNA, 20 nt, Human
cagggcuggaggggaggagg

SEQ ID NO: 504548 - RNA, 21 nt, Human
caggggccagcuggcaagagc

SEQ ID NO: 504549 - RNA, 20 nt, Human
cagggucgaggaguugacgg

SEQ ID NO: 504550 - RNA, 19 nt, Human
caucccagucagccuccuc

SEQ ID NO: 504551 - RNA, 19 nt, Human
caugacacuccccagcccu

SEQ ID NO: 504552 - RNA, 22 nt, Human
caugugcccuaggggaagcagg

SEQ ID NO: 504553 - RNA, 24 nt, Human
ccaaggcccuccgaccgcaggcuc

SEQ ID NO: 504554 - RNA, 22 nt, Human
ccagagccucacuuguucaggu

SEQ ID NO: 504555 - RNA, 22 nt, Human
ccagcuuucgcuccuucaugcu

SEQ ID NO: 504556 - RNA, 19 nt, Human
ccaggauggccaagggaug

SEQ ID NO: 504557 - RNA, 23 nt, Human
ccaggccgggccucccgcccaca

SEQ ID NO: 504558 - RNA, 22 nt, Human
ccagggcccgcucaccuugcuc

SEQ ID NO: 504559 - RNA, 21 nt, Human
ccagucguccucguccuccuc

SEQ ID NO: 504560 - RNA, 22 nt, Human
ccaugacacuccccagcccucc

SEQ ID NO: 504561 - RNA, 22 nt, Human
cccacccccaugacacucccca

SEQ ID NO: 504562 - RNA, 19 nt, Human
cccagagccucacuuguuc

SEQ ID NO: 504563 - RNA, 21 nt, Human
cccagagccucacuuguucag

SEQ ID NO: 504564 - RNA, 19 nt, Human
cccauggagcacaggcaga

SEQ ID NO: 504565 - RNA, 25 nt, Human
ccccacccccaugacacuccccagc

SEQ ID NO: 504566 - RNA, 19 nt, Human
ccccacccugcagagcugg

SEQ ID NO: 504567 - RNA, 18 nt, Human
ccccaugacacuccccag

SEQ ID NO: 504568 - RNA, 19 nt, Human
cccccaagucccucuucug

SEQ ID NO: 504569 - RNA, 22 nt, Human
cccccaugacacuccccagccc

SEQ ID NO: 504570 - RNA, 21 nt, Human
cccccuaggauucccagucgu

SEQ ID NO: 504571 - RNA, 19 nt, Human
cccccugcacaccuccugc

SEQ ID NO: 504572 - RNA, 21 nt, Human
ccccgcgcuggggaggccgga

SEQ ID NO: 504573 - RNA, 21 nt, Human
ccccucggcccugccuucugg

SEQ ID NO: 504574 - RNA, 20 nt, Human
ccccugagcuagccaugcuc

SEQ ID NO: 504575 - RNA, 30 nt, Human
ccccugagcuagccaugcucugacagucuu

SEQ ID NO: 504576 - RNA, 24 nt, Human
cccgcccacaccccucggcccugc

SEQ ID NO: 504577 - RNA, 19 nt, Human
cccuccgaccgcaggcucc

SEQ ID NO: 504578 - RNA, 21 nt, Human
cccugcuuccucucuagcccc

SEQ ID NO: 504579 - RNA, 20 nt, Human
cccuggacuggagccgggag

SEQ ID NO: 504580 - RNA, 23 nt, Human
ccucccgagccgagccaccccag

SEQ ID NO: 504581 - RNA, 19 nt, Human
ccucccgcccacaccccuc

SEQ ID NO: 504582 - RNA, 18 nt, Human
ccugcacaccuccugcuu

SEQ ID NO: 504583 - RNA, 22 nt, Human
ccuucugcuucuucuucuccag

SEQ ID NO: 504584 - RNA, 20 nt, Human
cgacccagggcgggcagcgg

SEQ ID NO: 504585 - RNA, 23 nt, Human
cgcagcuuggccuugccgaugcc

SEQ ID NO: 504586 - RNA, 24 nt, Human
cgcccacaccccucggcccugccu

SEQ ID NO: 504587 - RNA, 19 nt, Human
cgcgguugagggugggagu

SEQ ID NO: 504588 - RNA, 25 nt, Human
cuacaggggccgcgguuggccaggg

SEQ ID NO: 504589 - RNA, 20 nt, Human
cuacaguuugaaagccacua

SEQ ID NO: 504590 - RNA, 20 nt, Human
cuagggacaggcccuaugcu

SEQ ID NO: 504591 - RNA, 21 nt, Human
cucaaaaccauagugcccagg

SEQ ID NO: 504592 - RNA, 21 nt, Human
cucagaggcauggggaaaugg

SEQ ID NO: 504593 - RNA, 19 nt, Human
cucggcccugccuucuggc

SEQ ID NO: 504594 - RNA, 23 nt, Human
cucucccacaucaucaggggcac

SEQ ID NO: 504595 - RNA, 18 nt, Human
cugagcccauguuccucu

SEQ ID NO: 504596 - RNA, 18 nt, Human
cugcaaccaccugagcgc

SEQ ID NO: 504597 - RNA, 20 nt, Human
cugcucuaccugcugggaga

SEQ ID NO: 504598 - RNA, 18 nt, Human
cuggauccuguggcgggg

SEQ ID NO: 504599 - RNA, 21 nt, Human
cuguaccugugucugaugccc

SEQ ID NO: 504600 - RNA, 22 nt, Human
cuguaccugugucugaugcccu

SEQ ID NO: 504601 - RNA, 24 nt, Human
cugugugcagauacucccugcuuc

SEQ ID NO: 504602 - RNA, 23 nt, Human
cuguguuuccuaguuagcucaga

SEQ ID NO: 504603 - RNA, 24 nt, Human
cuuccucucuagcccccacccugc

SEQ ID NO: 504604 - RNA, 20 nt, Human
cuuggcacuggagaacaccu

SEQ ID NO: 504605 - RNA, 24 nt, Human
cuuggccuugccgaugcccccagc

SEQ ID NO: 504606 - RNA, 24 nt, Human
gaaacccugauucccccagccccc

SEQ ID NO: 504607 - RNA, 20 nt, Human
gaagacauacuucuuguacc

SEQ ID NO: 504608 - RNA, 24 nt, Human
gagaacaccuguggacacagggac

SEQ ID NO: 504609 - RNA, 19 nt, Human
gagccugcugggagggaag

SEQ ID NO: 504610 - RNA, 18 nt, Human
gagcugggggugguggug

SEQ ID NO: 504611 - RNA, 18 nt, Human
gagggugguuggugggaa

SEQ ID NO: 504612 - RNA, 18 nt, Human
gcagccagcagaccugca

SEQ ID NO: 504613 - RNA, 24 nt, Human
gcagcgcuggguacaagcucaaaa

SEQ ID NO: 504614 - RNA, 22 nt, Human
gcagcuuggccuugccgaugcc

SEQ ID NO: 504615 - RNA, 19 nt, Human
gcaggggccagcuggcaag

SEQ ID NO: 504616 - RNA, 21 nt, Human
gccaaggagaccuucucucca

SEQ ID NO: 504617 - RNA, 20 nt, Human
gcccaagucugggucugggg

SEQ ID NO: 504618 - RNA, 21 nt, Human
gcccaguagccucaggacaca

SEQ ID NO: 504619 - RNA, 26 nt, Human
gccuggagggaaaaggcugagugagg

SEQ ID NO: 504620 - RNA, 18 nt, Human
gccugggccaaggagacc

SEQ ID NO: 504621 - RNA, 21 nt, Human
gccugggcgagaagaaagccc

SEQ ID NO: 504622 - RNA, 18 nt, Human
gcgcgggcauccugugug

SEQ ID NO: 504623 - RNA, 20 nt, Human
gcucaggcagggcuggggaa

SEQ ID NO: 504624 - RNA, 23 nt, Human
gcuccugcuccuucugcuucuuc

SEQ ID NO: 504625 - RNA, 20 nt, Human
gcuguguggccucaagccag

SEQ ID NO: 504626 - RNA, 24 nt, Human
ggaauggggaacccagagccucac

SEQ ID NO: 504627 - RNA, 18 nt, Human
ggacuggagccgggaggu

SEQ ID NO: 504628 - RNA, 24 nt, Human
ggacuggagccgggagguggggaa

SEQ ID NO: 504629 - RNA, 18 nt, Human
ggagaccuucucuccaau

SEQ ID NO: 504630 - RNA, 19 nt, Human
ggagcugacagagcugaug

SEQ ID NO: 504631 - RNA, 22 nt, Human
ggagcugggggugguggugggg

SEQ ID NO: 504632 - RNA, 21 nt, Human
ggaggggaggaggcgaucuug

SEQ ID NO: 504633 - RNA, 23 nt, Human
ggauccuguggcgggggcgucuc

SEQ ID NO: 504634 - RNA, 22 nt, Human
ggcaagagcagggggugggcag

SEQ ID NO: 504635 - RNA, 19 nt, Human
ggcauggggaaauggaggg

SEQ ID NO: 504636 - RNA, 25 nt, Human
ggcugaccauugccuuggaccgcuc

SEQ ID NO: 504637 - RNA, 19 nt, Human
gggaaauggagggacugcc

SEQ ID NO: 504638 - RNA, 24 nt, Human
gggcaagcacuucacaaccccuca

SEQ ID NO: 504639 - RNA, 19 nt, Human
gggcaaggaggaaaggcug

SEQ ID NO: 504640 - RNA, 18 nt, Human
gggccccucaccagcccc

SEQ ID NO: 504641 - RNA, 19 nt, Human
gggggcacaggagggaugg

SEQ ID NO: 504642 - RNA, 25 nt, Human
gggggcccuaagaggcucagagggc

SEQ ID NO: 504643 - RNA, 23 nt, Human
ggggucgaccacuucccugggag

SEQ ID NO: 504644 - RNA, 22 nt, Human
ggguacuuggcacuggagaaca

SEQ ID NO: 504645 - RNA, 23 nt, Human
gggugggagugggggugcacugg

SEQ ID NO: 504646 - RNA, 19 nt, Human
gggugguggugggggcggu

SEQ ID NO: 504647 - RNA, 22 nt, Human
ggugggggcgguggggguggug

SEQ ID NO: 504648 - RNA, 20 nt, Human
gguggugggggcgguggggg

SEQ ID NO: 504649 - RNA, 25 nt, Human
gucaccuccccucaaacgaggagcc

SEQ ID NO: 504650 - RNA, 25 nt, Human
gucagagcaacagcccaagucuggg

SEQ ID NO: 504651 - RNA, 23 nt, Human
guccagggggcggugcuugcucu

SEQ ID NO: 504652 - RNA, 21 nt, Human
gugcacuguggggucccaggc

SEQ ID NO: 504653 - RNA, 19 nt, Human
guggcgcaggcugggugga

SEQ ID NO: 504654 - RNA, 18 nt, Human
guuccgucacccccuccc

SEQ ID NO: 504655 - RNA, 20 nt, Human
guugcggugggggcacagga

SEQ ID NO: 504656 - RNA, 19 nt, Human
guugcugggaagaccccca

SEQ ID NO: 504657 - RNA, 23 nt, Human
uacagcagugaagcugaaaugaa

SEQ ID NO: 504658 - RNA, 20 nt, Human
uaggauugcuuggcaggaga

SEQ ID NO: 504659 - RNA, 23 nt, Human
uaggggaagcaggggccagcugg

SEQ ID NO: 504660 - RNA, 24 nt, Human
uauccaguccuccuggugugugac

SEQ ID NO: 504661 - RNA, 20 nt, Human
ucacuagggacaggcccuau

SEQ ID NO: 504662 - RNA, 22 nt, Human
ucacuauggcucccaaaccagg

SEQ ID NO: 504663 - RNA, 24 nt, Human
ucagagccucagucgaucccugac

SEQ ID NO: 504664 - RNA, 23 nt, Human
ucaggagcugggggugguggugg

SEQ ID NO: 504665 - RNA, 19 nt, Human
ucagggcuggaggggagga

SEQ ID NO: 504666 - RNA, 18 nt, Human
uccaaggccacuguguuu

SEQ ID NO: 504667 - RNA, 23 nt, Human
uccagcuuucgcuccuucaugcu

SEQ ID NO: 504668 - RNA, 21 nt, Human
ucccaaaccaggaaggagcca

SEQ ID NO: 504669 - RNA, 22 nt, Human
ucccaaaccaggaaggagccau

SEQ ID NO: 504670 - RNA, 22 nt, Human
ucccagucguccucguccuccu

SEQ ID NO: 504671 - RNA, 21 nt, Human
uccccacccccaugacacucc

SEQ ID NO: 504672 - RNA, 24 nt, Human
uccccagcccuccaaggccacugu

SEQ ID NO: 504673 - RNA, 22 nt, Human
ucccugcuuccucucuagcccc

SEQ ID NO: 504674 - RNA, 26 nt, Human
ucgcuccuucaugcugcgcagcuugg

SEQ ID NO: 504675 - RNA, 23 nt, Human
ucggcccugccuucuggccauac

SEQ ID NO: 504676 - RNA, 19 nt, Human
ucggugguguugaaaagca

SEQ ID NO: 504677 - RNA, 23 nt, Human
ucuagcccccacccugcagagcu

SEQ ID NO: 504678 - RNA, 25 nt, Human
ucucacugcaacgggaaagccacag

SEQ ID NO: 504679 - RNA, 19 nt, Human
ucucagggggcugcagugg

SEQ ID NO: 504680 - RNA, 21 nt, Human
ucuccaauggccugcaccugg

SEQ ID NO: 504681 - RNA, 24 nt, Human
ucuccaauggccugcaccuggcuc

SEQ ID NO: 504682 - RNA, 25 nt, Human
ucuccaauggccugcaccuggcucc

SEQ ID NO: 504683 - RNA, 28 nt, Human
ucuccacacagugcugguuccgucaccc

SEQ ID NO: 504684 - RNA, 24 nt, Human
ucuccugucacaguuugggcuggg

SEQ ID NO: 504685 - RNA, 26 nt, Human
ucucuaaaaauaucucagggggcugc

SEQ ID NO: 504686 - RNA, 20 nt, Human
ucugguggcggcccagggcu

SEQ ID NO: 504687 - RNA, 18 nt, Human
ugaaaagcagcaaggagc

SEQ ID NO: 504688 - RNA, 21 nt, Human
ugaaaagcagcaaggagcuga

SEQ ID NO: 504689 - RNA, 23 nt, Human
ugaaauggaaacuauucaaaaaa

SEQ ID NO: 504690 - RNA, 20 nt, Human
ugaagagauccgacaucaag

SEQ ID NO: 504691 - RNA, 21 nt, Human
ugacacgcgggcaaaggcucc

SEQ ID NO: 504692 - RNA, 18 nt, Human
ugacacuccccagcccuc

SEQ ID NO: 504693 - RNA, 22 nt, Human
ugacacuccccagcccuccaag

SEQ ID NO: 504694 - RNA, 21 nt, Human
ugacccagcaccgggcacuga

SEQ ID NO: 504695 - RNA, 22 nt, Human
ugagaaagcggcuguuugagga

SEQ ID NO: 504696 - RNA, 19 nt, Human
ugagcuuagagaggaaagc

SEQ ID NO: 504697 - RNA, 18 nt, Human
ugagggugguugguggga

SEQ ID NO: 504698 - RNA, 23 nt, Human
ugaugagaaagcggcuguuugag

SEQ ID NO: 504699 - RNA, 22 nt, Human
ugcaccuggcuccggcucugcu

SEQ ID NO: 504700 - RNA, 23 nt, Human
ugcaccuggcuccggcucugcuc

SEQ ID NO: 504701 - RNA, 18 nt, Human
ugcaggcgcucuggagca

SEQ ID NO: 504702 - RNA, 23 nt, Human
ugccagggccgaucuuggugcca

SEQ ID NO: 504703 - RNA, 20 nt, Human
ugcccuaggggaagcagggg

SEQ ID NO: 504704 - RNA, 21 nt, Human
ugcccuggguccccacuaagc

SEQ ID NO: 504705 - RNA, 21 nt, Human
ugcccuugaucuucucaaucu

SEQ ID NO: 504706 - RNA, 21 nt, Human
ugccuccuacccuugcgccuc

SEQ ID NO: 504707 - RNA, 18 nt, Human
ugccuggggucacagagc

SEQ ID NO: 504708 - RNA, 20 nt, Human
ugccuuggaccgcucuuggc

SEQ ID NO: 504709 - RNA, 24 nt, Human
ugcuccccacccccugcacaccuc

SEQ ID NO: 504710 - RNA, 24 nt, Human
ugcuccugcuccuucugcuucuuc

SEQ ID NO: 504711 - RNA, 20 nt, Human
ugcucugacagucucaguug

SEQ ID NO: 504712 - RNA, 18 nt, Human
ugcugggaagacccccaa

SEQ ID NO: 504713 - RNA, 20 nt, Human
uggaccccugagcuagccuc

SEQ ID NO: 504714 - RNA, 25 nt, Human
uggauccuguggcgggggcgucucu

SEQ ID NO: 504715 - RNA, 19 nt, Human
uggcaagagcagggggugg

SEQ ID NO: 504716 - RNA, 21 nt, Human
uggcaagagcagggggugggc

SEQ ID NO: 504717 - RNA, 21 nt, Human
uggcacuggagaacaccugug

SEQ ID NO: 504718 - RNA, 23 nt, Human
uggcacuggagaacaccugugga

SEQ ID NO: 504719 - RNA, 22 nt, Human
uggccaagggauggugaauauu

SEQ ID NO: 504720 - RNA, 21 nt, Human
uggccuucuugcugcccuuga

SEQ ID NO: 504721 - RNA, 21 nt, Human
uggcgcaggcuggguggagcc

SEQ ID NO: 504722 - RNA, 18 nt, Human
uggcgggggcgucucugc

SEQ ID NO: 504723 - RNA, 21 nt, Human
uggcucccuguccccaccccc

SEQ ID NO: 504724 - RNA, 19 nt, Human
ugggcugcuccccaccccc

SEQ ID NO: 504725 - RNA, 22 nt, Human
uggggcaagcacuucacaaccc

SEQ ID NO: 504726 - RNA, 18 nt, Human
ugggggggccugggcacu

SEQ ID NO: 504727 - RNA, 18 nt, Human
uggguacaagcucaaaac

SEQ ID NO: 504728 - RNA, 23 nt, Human
ugguggcggcccagggcuuccag

SEQ ID NO: 504729 - RNA, 20 nt, Human
uggugggaaacccugauucc

SEQ ID NO: 504730 - RNA, 22 nt, Human
uggugggggcgguggggguggu

SEQ ID NO: 504731 - RNA, 18 nt, Human
ugguguugaaaagcagca

SEQ ID NO: 504732 - RNA, 21 nt, Human
ugguuggugggaaacccugau

SEQ ID NO: 504733 - RNA, 19 nt, Human
ugucauggagcccccuagg

SEQ ID NO: 504734 - RNA, 18 nt, Human
uguccaagagccugcugg

SEQ ID NO: 504735 - RNA, 24 nt, Human
uguccaagagccugcugggaggga

SEQ ID NO: 504736 - RNA, 24 nt, Human
uguccccacccccaugacacuccc

SEQ ID NO: 504737 - RNA, 21 nt, Human
uguggcuguugcggugggggc

SEQ ID NO: 504738 - RNA, 23 nt, Human
uucaaaaaauugagaauuucuga

SEQ ID NO: 504739 - RNA, 22 nt, Human
uucuccugagagggccaggaug

SEQ ID NO: 504740 - RNA, 25 nt, Human
uucuccugucacaguuugggcuggg

SEQ ID NO: 504741 - RNA, 22 nt, Human
uugauggccuucuugcugcccu

SEQ ID NO: 504742 - RNA, 22 nt, Human
uugccagggccgaucuuggugc

SEQ ID NO: 504743 - RNA, 22 nt, Human
uuggugugccguuuucucugga

SEQ ID NO: 504744 - RNA, 19 nt, Human
uugugccacuucuggaugc

SEQ ID NO: 504745 - RNA, 18 nt, Human
aaaacaccaguuuucuaa

SEQ ID NO: 504746 - RNA, 25 nt, Human
aaaaggagggaaacuccuugguaaa

SEQ ID NO: 504747 - RNA, 20 nt, Human
aaacaaaaaaaggagggaaa

SEQ ID NO: 504748 - RNA, 19 nt, Human
aaacagaugguuagaaacu

SEQ ID NO: 504749 - RNA, 25 nt, Human
aagcgaucuucccaccuuggccucc

SEQ ID NO: 504750 - RNA, 21 nt, Human
aagucucuaguuuucgcccca

SEQ ID NO: 504751 - RNA, 26 nt, Human
aagugccaggauuacaggccugagcc

SEQ ID NO: 504752 - RNA, 24 nt, Human
aauggagaaucaaaaauuugcuag

SEQ ID NO: 504753 - RNA, 24 nt, Human
aauggagaaucaaaaauuugcuag

SEQ ID NO: 504754 - RNA, 22 nt, Human
acaaacaaaaaaaggagggaaa

SEQ ID NO: 504755 - RNA, 21 nt, Human
agaaaaaacagaugguuagaa

SEQ ID NO: 504756 - RNA, 24 nt, Human
agaaaguugugaaauauaagggua

SEQ ID NO: 504757 - RNA, 21 nt, Human
agaacaaacccacaaguugga

SEQ ID NO: 504758 - RNA, 20 nt, Human
agccaccacaccuagcccua

SEQ ID NO: 504759 - RNA, 20 nt, Human
aggagagggcacuucugcag

SEQ ID NO: 504760 - RNA, 22 nt, Human
aggagggaaacuccuugguaaa

SEQ ID NO: 504761 - RNA, 23 nt, Human
aggauuacaggccugagccacca

SEQ ID NO: 504762 - RNA, 24 nt, Human
aggggucucgcuauguugcccagg

SEQ ID NO: 504763 - RNA, 24 nt, Human
agugccaggauuacaggccugagc

SEQ ID NO: 504764 - RNA, 22 nt, Human
aucccuaccuuuccacccccaa

SEQ ID NO: 504765 - RNA, 22 nt, Human
aucccucccuuuccacccccaa

SEQ ID NO: 504766 - RNA, 21 nt, Human
augcacuuucuaacuucagca

SEQ ID NO: 504767 - RNA, 24 nt, Human
auggaaaaacagaacaaacccaca

SEQ ID NO: 504768 - RNA, 24 nt, Human
auggaaaaacagaacaaacccaca

SEQ ID NO: 504769 - RNA, 30 nt, Human
auggaaaccagugaagagaggaaacaccgg

SEQ ID NO: 504770 - RNA, 21 nt, Human
augucuggccaaucgucuugg

SEQ ID NO: 504771 - RNA, 23 nt, Human
caaacaaaaaaaggagggaaacu

SEQ ID NO: 504772 - RNA, 24 nt, Human
caaagugccaggauuacaggccug

SEQ ID NO: 504773 - RNA, 27 nt, Human
caagcgaucuucccaccuuggccuccc

SEQ ID NO: 504774 - RNA, 24 nt, Human
caauucaucccucccuuuccaccc

SEQ ID NO: 504775 - RNA, 25 nt, Human
cacaccuagcccuaaaucagaauuu

SEQ ID NO: 504776 - RNA, 21 nt, Human
caggauuacaggccugagcca

SEQ ID NO: 504777 - RNA, 21 nt, Human
caucccuaccuuuccaccccc

SEQ ID NO: 504778 - RNA, 21 nt, Human
caucccucccuuuccaccccc

SEQ ID NO: 504779 - RNA, 22 nt, Human
caucccucccuuuccaccccca

SEQ ID NO: 504780 - RNA, 19 nt, Human
ccaaagugccaggauuaca

SEQ ID NO: 504781 - RNA, 25 nt, Human
ccaauucaucccuaccuuuccaccc

SEQ ID NO: 504782 - RNA, 19 nt, Human
ccaccacaccuagcccuaa

SEQ ID NO: 504783 - RNA, 24 nt, Human
cccaagcaagucucuaguuuucgc

SEQ ID NO: 504784 - RNA, 22 nt, Human
cccaauucaucccuaccuuucc

SEQ ID NO: 504785 - RNA, 22 nt, Human
cccaauucaucccucccuuucc

SEQ ID NO: 504786 - RNA, 19 nt, Human
ccccaauucaucccucccu

SEQ ID NO: 504787 - RNA, 20 nt, Human
cccuaccuuuccacccccaa

SEQ ID NO: 504788 - RNA, 18 nt, Human
cccucccuuuccaccccc

SEQ ID NO: 504789 - RNA, 20 nt, Human
cccucccuuuccacccccaa

SEQ ID NO: 504790 - RNA, 21 nt, Human
ccuauccuguuucuuuagaaa

SEQ ID NO: 504791 - RNA, 24 nt, Human
cgcuauguugcccaggcuggucuu

SEQ ID NO: 504792 - RNA, 27 nt, Human
cgcuauguugcccaggcuggucuugaa

SEQ ID NO: 504793 - RNA, 24 nt, Human
cggcaccacuugggaaggggcugg

SEQ ID NO: 504794 - RNA, 26 nt, Human
cuagcccuaaaucagaauuuuuuaaa

SEQ ID NO: 504795 - RNA, 24 nt, Human
cucaagcgaucuucccaccuuggc

SEQ ID NO: 504796 - RNA, 24 nt, Human
cucaagcgauguucccaccuuggc

SEQ ID NO: 504797 - RNA, 22 nt, Human
cucugaauucaccaggguucua

SEQ ID NO: 504798 - RNA, 27 nt, Human
cucuuggccucaagcgaucuucccacc

SEQ ID NO: 504799 - RNA, 18 nt, Human
cugagccaccacaccuag

SEQ ID NO: 504800 - RNA, 19 nt, Human
gaaaacaccaguuuucuaa

SEQ ID NO: 504801 - RNA, 23 nt, Human
gaaaccagugaagagaggaaaca

SEQ ID NO: 504802 - RNA, 18 nt, Human
gaacaaacccacaaguug

SEQ ID NO: 504803 - RNA, 19 nt, Human
gacauacugccucuccacc

SEQ ID NO: 504804 - RNA, 18 nt, Human
gauuacaggccugagcca

SEQ ID NO: 504805 - RNA, 21 nt, Human
gauuacaggccugagccacca

SEQ ID NO: 504806 - RNA, 22 nt, Human
gcaccacuugggaaggggcugg

SEQ ID NO: 504807 - RNA, 21 nt, Human
gccaggauuacaggccugagc

SEQ ID NO: 504808 - RNA, 24 nt, Human
gccugagccaccacaccuagcccu

SEQ ID NO: 504809 - RNA, 24 nt, Human
gcuauguugcccaggcuggucuug

SEQ ID NO: 504810 - RNA, 24 nt, Human
ggaaaaacagaacaaacccacaag

SEQ ID NO: 504811 - RNA, 24 nt, Human
ggaaaaacagaacaaacccacaag

SEQ ID NO: 504812 - RNA, 19 nt, Human
ggauuacaggccugagcca

SEQ ID NO: 504813 - RNA, 22 nt, Human
ggauuacaggccugagccacca

SEQ ID NO: 504814 - RNA, 19 nt, Human
ggccucaagcgauguuccc

SEQ ID NO: 504815 - RNA, 18 nt, Human
ggugcaaaccuuuacuuc

SEQ ID NO: 504816 - RNA, 19 nt, Human
ggugccuucucuaaacucc

SEQ ID NO: 504817 - RNA, 24 nt, Human
gucucgcuauguugcccaggcugg

SEQ ID NO: 504818 - RNA, 24 nt, Human
uaaaagaacaaaaaucauuuggca

SEQ ID NO: 504819 - RNA, 20 nt, Human
uaaggguacucauggaaacc

SEQ ID NO: 504820 - RNA, 24 nt, Human
uaaggguacucauggaaaccaguc

SEQ ID NO: 504821 - RNA, 24 nt, Human
uaaggguacucauggaaaccagug

SEQ ID NO: 504822 - RNA, 22 nt, Human
uacaggccugagccaccacacc

SEQ ID NO: 504823 - RNA, 23 nt, Human
uauguugcccaggcuggucuuga

SEQ ID NO: 504824 - RNA, 24 nt, Human
uauguugcccaggcuggucuugaa

SEQ ID NO: 504825 - RNA, 18 nt, Human
ucaacaaacaaaaaagga

SEQ ID NO: 504826 - RNA, 22 nt, Human
ucagaucugaggugaugucugg

SEQ ID NO: 504827 - RNA, 24 nt, Human
ucccaaagugccaggauuacaggc

SEQ ID NO: 504828 - RNA, 21 nt, Human
ucccuaccuuuccacccccaa

SEQ ID NO: 504829 - RNA, 21 nt, Human
ucccucccuuuccacccccaa

SEQ ID NO: 504830 - RNA, 23 nt, Human
ucuaaagaaagauuacucugaau

SEQ ID NO: 504831 - RNA, 21 nt, Human
ucucauggaaaaacagaacaa

SEQ ID NO: 504832 - RNA, 21 nt, Human
ucucauggaaaaacagaacaa

SEQ ID NO: 504833 - RNA, 18 nt, Human
ucucgcuauguugcccag

SEQ ID NO: 504834 - RNA, 19 nt, Human
ucucgcuauguugcccagg

SEQ ID NO: 504835 - RNA, 23 nt, Human
ucucgcuauguugcccaggcugg

SEQ ID NO: 504836 - RNA, 24 nt, Human
ucucgcuauguugcccaggcuggu

SEQ ID NO: 504837 - RNA, 26 nt, Human
ucucgcuauguugcccaggcuggucu

SEQ ID NO: 504838 - RNA, 27 nt, Human
ucucgcuauguugcccaggcuggucuu

SEQ ID NO: 504839 - RNA, 22 nt, Human
ugaaaaaaaaccgccaguauuu

SEQ ID NO: 504840 - RNA, 19 nt, Human
ugaaagggaggagguggcc

SEQ ID NO: 504841 - RNA, 20 nt, Human
ugaaagggaggagguggcca

SEQ ID NO: 504842 - RNA, 23 nt, Human
ugaacucucacuuucaaauacca

SEQ ID NO: 504843 - RNA, 23 nt, Human
ugaacucucacuuucaaauacca

SEQ ID NO: 504844 - RNA, 19 nt, Human
ugccaaaccaaagugaaag

SEQ ID NO: 504845 - RNA, 24 nt, Human
ugcccaggcuggucuugaacucuu

SEQ ID NO: 504846 - RNA, 25 nt, Human
ugcuaaucaacaaacaaaaaaagga

SEQ ID NO: 504847 - RNA, 22 nt, Human
ugcuggagucucuuacuuuugg

SEQ ID NO: 504848 - RNA, 22 nt, Human
ugcuggagucucuuacuuuugg

SEQ ID NO: 504849 - RNA, 21 nt, Human
uggaaaaacagaacaaaccca

SEQ ID NO: 504850 - RNA, 21 nt, Human
uggaaaaacagaacaaaccca

SEQ ID NO: 504851 - RNA, 28 nt, Human
uggaaagcaggcauuuuuaccaaagagc

SEQ ID NO: 504852 - RNA, 23 nt, Human
uggaagacgcuggucucagaucu

SEQ ID NO: 504853 - RNA, 21 nt, Human
uggccucaagcgaucuuccca

SEQ ID NO: 504854 - RNA, 21 nt, Human
uggccucaagcgauguuccca

SEQ ID NO: 504855 - RNA, 21 nt, Human
ugggaagagcuaccugcugcc

SEQ ID NO: 504856 - RNA, 24 nt, Human
ugggaagagcuaccugcugcccua

SEQ ID NO: 504857 - RNA, 22 nt, Human
ugggaaggggcugggcucaggg

SEQ ID NO: 504858 - RNA, 24 nt, Human
ugggaguaaggcucugagagaugg

SEQ ID NO: 504859 - RNA, 21 nt, Human
uguauuuuuaucacgcacaua

SEQ ID NO: 504860 - RNA, 23 nt, Human
ugucaugaacucucacuuucaaa

SEQ ID NO: 504861 - RNA, 23 nt, Human
uguucccaccuuggccucccaaa

SEQ ID NO: 504862 - RNA, 24 nt, Human
uuauucucauggaaaaacagaaca

SEQ ID NO: 504863 - RNA, 24 nt, Human
uuauucucauggaaaaacagaaca

SEQ ID NO: 504864 - RNA, 22 nt, Human
uucuaaagaaagauuacucuga

SEQ ID NO: 504865 - RNA, 23 nt, Human
uuggcaguuuuaaguuuaauagg

SEQ ID NO: 504866 - RNA, 22 nt, Human
uuggccucaagcgauguuccca

SEQ ID NO: 504867 - RNA, 25 nt, Human
uuuuggaaaauggagaaucaaaaau

SEQ ID NO: 504868 - RNA, 25 nt, Human
uuuuggaaaauggagaaucaaaaau

SEQ ID NO: 504869 - RNA, 25 nt, Human
uuuuuuuuuaauacagauagggguc

SEQ ID NO: 504870 - RNA, 23 nt, Human
uuuuuuuuuuuugaaaaaaaacc

SEQ ID NO: 504871 - RNA, 27 nt, Human
uuuuuuuuuuuuuuuuuuuuuuugggg

SEQ ID NO: 504872 - RNA, 21 nt, Human
agggagggggguggaguuagg

SEQ ID NO: 504873 - RNA, 23 nt, Human
ccagcccggcuuugcucggcgga

SEQ ID NO: 504874 - RNA, 21 nt, Human
cccagcccggcuuugcucggc

SEQ ID NO: 504875 - RNA, 23 nt, Human
cuccaagcccagcccggcuuugc

SEQ ID NO: 504876 - RNA, 22 nt, Human
cugccagggagggggguggagu

SEQ ID NO: 504877 - RNA, 21 nt, Human
gagcagcuccaagcccagccc

SEQ ID NO: 504878 - RNA, 19 nt, Human
ucagaacucggccuucugc

SEQ ID NO: 504879 - RNA, 20 nt, Human
ugccagggagggggguggag

SEQ ID NO: 504880 - RNA, 20 nt, Human
accaagugcucaguuguucu

SEQ ID NO: 504881 - RNA, 21 nt, Human
cacagagguagaaaugcucau

SEQ ID NO: 504882 - RNA, 18 nt, Human
aaccugaagguggaggcu

SEQ ID NO: 504883 - RNA, 23 nt, Human
aacugugugugugugugugugug

SEQ ID NO: 504884 - RNA, 19 nt, Human
aauguccaauccauccuca

SEQ ID NO: 504885 - RNA, 18 nt, Human
acugaacuccagccaggg

SEQ ID NO: 504886 - RNA, 24 nt, Human
acugaacuccagccagggcaacag

SEQ ID NO: 504887 - RNA, 24 nt, Human
acugaaugagauguuucacuuuuc

SEQ ID NO: 504888 - RNA, 24 nt, Human
acugugugugugugugugugugug

SEQ ID NO: 504889 - RNA, 18 nt, Human
agagaucauucauugaau

SEQ ID NO: 504890 - RNA, 22 nt, Human
aggcaggagaaucacuugaacc

SEQ ID NO: 504891 - RNA, 24 nt, Human
aggcaggagaaucacuugaaccug

SEQ ID NO: 504892 - RNA, 24 nt, Human
aggcugaggcaggagaaucacuug

SEQ ID NO: 504893 - RNA, 19 nt, Human
agguggaggcuguaguaag

SEQ ID NO: 504894 - RNA, 25 nt, Human
agguggaggcuguaguaagccugag

SEQ ID NO: 504895 - RNA, 24 nt, Human
aucaugucacugaacuccagccag

SEQ ID NO: 504896 - RNA, 20 nt, Human
auggcuccuauauuuuuuug

SEQ ID NO: 504897 - RNA, 18 nt, Human
caagcaacuuucaugaca

SEQ ID NO: 504898 - RNA, 18 nt, Human
cacugaacuccagccagg

SEQ ID NO: 504899 - RNA, 19 nt, Human
cacugaacuccagccaggg

SEQ ID NO: 504900 - RNA, 20 nt, Human
cacugaacuccagccagggc

SEQ ID NO: 504901 - RNA, 24 nt, Human
cacugaacuccagccagggcaaca

SEQ ID NO: 504902 - RNA, 21 nt, Human
cacuugugauaacuuucucca

SEQ ID NO: 504903 - RNA, 23 nt, Human
cagaaagaaagauguaggcucau

SEQ ID NO: 504904 - RNA, 20 nt, Human
cagccagggcaacagagcga

SEQ ID NO: 504905 - RNA, 25 nt, Human
caggaagaucaccaacugaaugaga

SEQ ID NO: 504906 - RNA, 19 nt, Human
cccuguaaucccagcuacc

SEQ ID NO: 504907 - RNA, 20 nt, Human
ccuguaaucccagcuaccag

SEQ ID NO: 504908 - RNA, 18 nt, Human
cuuuuuuuuuuuuuuuug

SEQ ID NO: 504909 - RNA, 23 nt, Human
gagaggcugaggcaggagaauca

SEQ ID NO: 504910 - RNA, 22 nt, Human
gcaggagaaucacuugaaccug

SEQ ID NO: 504911 - RNA, 25 nt, Human
ggaggcuguaguaagccugagauca

SEQ ID NO: 504912 - RNA, 18 nt, Human
guaucuguggaugcagcu

SEQ ID NO: 504913 - RNA, 24 nt, Human
gugguuguuuaaacuucagaaaga

SEQ ID NO: 504914 - RNA, 18 nt, Human
gugugugugugugugugu

SEQ ID NO: 504915 - RNA, 21 nt, Human
gugugugugugugugugugug

SEQ ID NO: 504916 - RNA, 21 nt, Human
gugugugugugugugugugug

SEQ ID NO: 504917 - RNA, 20 nt, Human
uaauacauuuuuuuucuuuu

SEQ ID NO: 504918 - RNA, 19 nt, Human
uaccagagaggcugaggca

SEQ ID NO: 504919 - RNA, 21 nt, Human
uaccagagaggcugaggcagg

SEQ ID NO: 504920 - RNA, 23 nt, Human
uagauacaacaucugucuccuug

SEQ ID NO: 504921 - RNA, 20 nt, Human
uaggcucaucgggugguaau

SEQ ID NO: 504922 - RNA, 21 nt, Human
uauuuuuuuguaucuguggau

SEQ ID NO: 504923 - RNA, 21 nt, Human
ucacugaacuccagccagggc

SEQ ID NO: 504924 - RNA, 18 nt, Human
ucccuguaaucccagcua

SEQ ID NO: 504925 - RNA, 22 nt, Human
ucccuguaaucccagcuaccag

SEQ ID NO: 504926 - RNA, 20 nt, Human
uccucacgguagucaucuuu

SEQ ID NO: 504927 - RNA, 22 nt, Human
ucucacaaauucagcugcagac

SEQ ID NO: 504928 - RNA, 21 nt, Human
ucugcugaguucuccuuugua

SEQ ID NO: 504929 - RNA, 21 nt, Human
ugaauauucuucuuuaaaucu

SEQ ID NO: 504930 - RNA, 22 nt, Human
ugagaucaugucacugaacucc

SEQ ID NO: 504931 - RNA, 20 nt, Human
ugaggcaggagaaucacuug

SEQ ID NO: 504932 - RNA, 24 nt, Human
ugaggcaggagaaucacuugaacc

SEQ ID NO: 504933 - RNA, 24 nt, Human
ugaggcaggagaaucacuugaacc

SEQ ID NO: 504934 - RNA, 18 nt, Human
ugaggccucuuguuuucu

SEQ ID NO: 504935 - RNA, 22 nt, Human
uggauuggaaguggcacaucca

SEQ ID NO: 504936 - RNA, 22 nt, Human
uggcacauccaacaaccauaaa

SEQ ID NO: 504937 - RNA, 24 nt, Human
uggcacauccaacaaccauaaaca

SEQ ID NO: 504938 - RNA, 21 nt, Human
uguaauguccaauccauccuc

SEQ ID NO: 504939 - RNA, 20 nt, Human
uguguguguguguguccaua

SEQ ID NO: 504940 - RNA, 22 nt, Human
uguguguguguguguguccaua

SEQ ID NO: 504941 - RNA, 18 nt, Human
ugugugugugugugugug

SEQ ID NO: 504942 - RNA, 18 nt, Human
ugugugugugugugugug

SEQ ID NO: 504943 - RNA, 18 nt, Human
ugugugugugugugugug

SEQ ID NO: 504944 - RNA, 18 nt, Human
ugugugugugugugugug

SEQ ID NO: 504945 - RNA, 18 nt, Human
ugugugugugugugugug

SEQ ID NO: 504946 - RNA, 18 nt, Human
ugugugugugugugugug

SEQ ID NO: 504947 - RNA, 18 nt, Human
ugugugugugugugugug

SEQ ID NO: 504948 - RNA, 18 nt, Human
ugugugugugugugugug

SEQ ID NO: 504949 - RNA, 18 nt, Human
ugugugugugugugugug

SEQ ID NO: 504950 - RNA, 18 nt, Human
ugugugugugugugugug

SEQ ID NO: 504951 - RNA, 18 nt, Human
ugugugugugugugugug

SEQ ID NO: 504952 - RNA, 18 nt, Human
ugugugugugugugugug

SEQ ID NO: 504953 - RNA, 18 nt, Human
ugugugugugugugugug

SEQ ID NO: 504954 - RNA, 18 nt, Human
ugugugugugugugugug

SEQ ID NO: 504955 - RNA, 18 nt, Human
ugugugugugugugugug

SEQ ID NO: 504956 - RNA, 18 nt, Human
ugugugugugugugugug

SEQ ID NO: 504957 - RNA, 18 nt, Human
ugugugugugugugugug

SEQ ID NO: 504958 - RNA, 21 nt, Human
ugugugugugugugugugugu

SEQ ID NO: 504959 - RNA, 21 nt, Human
ugugugugugugugugugugu

SEQ ID NO: 504960 - RNA, 21 nt, Human
ugugugugugugugugugugu

SEQ ID NO: 504961 - RNA, 21 nt, Human
ugugugugugugugugugugu

SEQ ID NO: 504962 - RNA, 21 nt, Human
ugugugugugugugugugugu

SEQ ID NO: 504963 - RNA, 21 nt, Human
ugugugugugugugugugugu

SEQ ID NO: 504964 - RNA, 21 nt, Human
ugugugugugugugugugugu

SEQ ID NO: 504965 - RNA, 21 nt, Human
ugugugugugugugugugugu

SEQ ID NO: 504966 - RNA, 21 nt, Human
ugugugugugugugugugugu

SEQ ID NO: 504967 - RNA, 21 nt, Human
ugugugugugugugugugugu

SEQ ID NO: 504968 - RNA, 21 nt, Human
ugugugugugugugugugugu

SEQ ID NO: 504969 - RNA, 21 nt, Human
ugugugugugugugugugugu

SEQ ID NO: 504970 - RNA, 21 nt, Human
ugugugugugugugugugugu

SEQ ID NO: 504971 - RNA, 21 nt, Human
ugugugugugugugugugugu

SEQ ID NO: 504972 - RNA, 21 nt, Human
ugugugugugugugugugugu

SEQ ID NO: 504973 - RNA, 21 nt, Human
ugugugugugugugugugugu

SEQ ID NO: 504974 - RNA, 21 nt, Human
ugugugugugugugugugugu

SEQ ID NO: 504975 - RNA, 21 nt, Human
ugugugugugugugugugugu

SEQ ID NO: 504976 - RNA, 21 nt, Human
ugugugugugugugugugugu

SEQ ID NO: 504977 - RNA, 21 nt, Human
ugugugugugugugugugugu

SEQ ID NO: 504978 - RNA, 21 nt, Human
ugugugugugugugugugugu

SEQ ID NO: 504979 - RNA, 21 nt, Human
ugugugugugugugugugugu

SEQ ID NO: 504980 - RNA, 21 nt, Human
ugugugugugugugugugugu

SEQ ID NO: 504981 - RNA, 21 nt, Human
ugugugugugugugugugugu

SEQ ID NO: 504982 - RNA, 21 nt, Human
ugugugugugugugugugugu

SEQ ID NO: 504983 - RNA, 21 nt, Human
ugugugugugugugugugugu

SEQ ID NO: 504984 - RNA, 21 nt, Human
ugugugugugugugugugugu

SEQ ID NO: 504985 - RNA, 21 nt, Human
ugugugugugugugugugugu

SEQ ID NO: 504986 - RNA, 21 nt, Human
ugugugugugugugugugugu

SEQ ID NO: 504987 - RNA, 21 nt, Human
ugugugugugugugugugugu

SEQ ID NO: 504988 - RNA, 22 nt, Human
ugugugugugugugugugugug

SEQ ID NO: 504989 - RNA, 22 nt, Human
ugugugugugugugugugugug

SEQ ID NO: 504990 - RNA, 22 nt, Human
ugugugugugugugugugugug

SEQ ID NO: 504991 - RNA, 22 nt, Human
ugugugugugugugugugugug

SEQ ID NO: 504992 - RNA, 22 nt, Human
ugugugugugugugugugugug

SEQ ID NO: 504993 - RNA, 22 nt, Human
ugugugugugugugugugugug

SEQ ID NO: 504994 - RNA, 22 nt, Human
ugugugugugugugugugugug

SEQ ID NO: 504995 - RNA, 22 nt, Human
ugugugugugugugugugugug

SEQ ID NO: 504996 - RNA, 22 nt, Human
ugugugugugugugugugugug

SEQ ID NO: 504997 - RNA, 22 nt, Human
ugugugugugugugugugugug

SEQ ID NO: 504998 - RNA, 22 nt, Human
ugugugugugugugugugugug

SEQ ID NO: 504999 - RNA, 22 nt, Human
ugugugugugugugugugugug

SEQ ID NO: 505000 - RNA, 23 nt, Human
ugugugugugugugugugugugu

SEQ ID NO: 505001 - RNA, 28 nt, Human
uuacuugaaaguaggcuuucuacaaggu

SEQ ID NO: 505002 - RNA, 27 nt, Human
uucaagucuuucaauggauccccccuu

SEQ ID NO: 505003 - RNA, 24 nt, Human
uucuaggguaaccuuuccacuugu

SEQ ID NO: 505004 - RNA, 21 nt, Human
uucuccagcaagaaaugccag

SEQ ID NO: 505005 - RNA, 18 nt, Human
uuucuuuucuuuuacuuu

SEQ ID NO: 505006 - RNA, 22 nt, Human
uuuuguaucuguggaugcagcu

SEQ ID NO: 505007 - RNA, 20 nt, Human
uuuuuuuuuuuuuugccaaa

SEQ ID NO: 505008 - RNA, 23 nt, Human
aaaauaauagagguuuaaauauc

SEQ ID NO: 505009 - RNA, 19 nt, Human
aaaauggacauuuggggac

SEQ ID NO: 505010 - RNA, 23 nt, Human
aaaccaaauuauuucuuccucaa

SEQ ID NO: 505011 - RNA, 23 nt, Human
aaaccagaacaaauagaaaacaa

SEQ ID NO: 505012 - RNA, 22 nt, Human
aagcauguuuucagcaacgugg

SEQ ID NO: 505013 - RNA, 19 nt, Human
aauauccaucucucccagg

SEQ ID NO: 505014 - RNA, 22 nt, Human
aaugacaagaaaaaagucugua

SEQ ID NO: 505015 - RNA, 21 nt, Human
aauggaaugauaaaaccaaag

SEQ ID NO: 505016 - RNA, 21 nt, Human
aauggacgugaacagaacugc

SEQ ID NO: 505017 - RNA, 22 nt, Human
aauugcaggguuuguaaagauu

SEQ ID NO: 505018 - RNA, 22 nt, Human
accacuauugcagaaacacaga

SEQ ID NO: 505019 - RNA, 25 nt, Human
acccuagaaagggggaaacuccgac

SEQ ID NO: 505020 - RNA, 21 nt, Human
acuggauugagaguagacucu

SEQ ID NO: 505021 - RNA, 27 nt, Human
acuucaaaauacuaauucaaaaaaggg

SEQ ID NO: 505022 - RNA, 22 nt, Human
agaggcauccuuuucugaagga

SEQ ID NO: 505023 - RNA, 24 nt, Human
agccaaaccugcuaccugggcccg

SEQ ID NO: 505024 - RNA, 24 nt, Human
aggaaagacaaugauaccacaaaa

SEQ ID NO: 505025 - RNA, 20 nt, Human
aggaggaugaagcugcugcu

SEQ ID NO: 505026 - RNA, 23 nt, Human
aggcagggcuagcccuaaaccca

SEQ ID NO: 505027 - RNA, 21 nt, Human
agggaauuuaaguauuuuucu

SEQ ID NO: 505028 - RNA, 19 nt, Human
augcaacguuaggacucug

SEQ ID NO: 505029 - RNA, 22 nt, Human
auguuguauuaagaugaaguca

SEQ ID NO: 505030 - RNA, 23 nt, Human
caaaaccagaacaaauagaaaac

SEQ ID NO: 505031 - RNA, 20 nt, Human
caaaagaaaaaugauuucau

SEQ ID NO: 505032 - RNA, 22 nt, Human
caaugauaccacaaaacaacac

SEQ ID NO: 505033 - RNA, 23 nt, Human
caaugcacuuaacuuaaagcuuc

SEQ ID NO: 505034 - RNA, 20 nt, Human
caauuaccacauucugucac

SEQ ID NO: 505035 - RNA, 19 nt, Human
cacacccuucauuuuaccc

SEQ ID NO: 505036 - RNA, 20 nt, Human
cagaaucacucauuuaucuc

SEQ ID NO: 505037 - RNA, 25 nt, Human
cagaauuucuggcauauaaacacac

SEQ ID NO: 505038 - RNA, 23 nt, Human
cagagaaugcacauuccacagca

SEQ ID NO: 505039 - RNA, 19 nt, Human
cagcucgaauaagaugcaa

SEQ ID NO: 505040 - RNA, 22 nt, Human
cauauaaacacacauccuccug

SEQ ID NO: 505041 - RNA, 19 nt, Human
cauaugacauauacauaug

SEQ ID NO: 505042 - RNA, 18 nt, Human
cauccauugccggcaaug

SEQ ID NO: 505043 - RNA, 22 nt, Human
cauccucacccuagaaaggggg

SEQ ID NO: 505044 - RNA, 22 nt, Human
caucucaccaccccaaccaagc

SEQ ID NO: 505045 - RNA, 21 nt, Human
cauuuagauuccuaaucauuc

SEQ ID NO: 505046 - RNA, 21 nt, Human
cauuuggggacagaaucacuc

SEQ ID NO: 505047 - RNA, 18 nt, Human
cauuuuacccaagggaga

SEQ ID NO: 505048 - RNA, 22 nt, Human
ccacaaaacaacacucagagaa

SEQ ID NO: 505049 - RNA, 22 nt, Human
ccagaacaaauagaaaacaaca

SEQ ID NO: 505050 - RNA, 23 nt, Human
ccagagucucucagccucacccc

SEQ ID NO: 505051 - RNA, 24 nt, Human
ccccacacccuucauuuuacccaa

SEQ ID NO: 505052 - RNA, 21 nt, Human
cccccgcgcagccaaaccugc

SEQ ID NO: 505053 - RNA, 26 nt, Human
cccccgcgcagccaaaccugcuaccu

SEQ ID NO: 505054 - RNA, 18 nt, Human
cccuaaacccagagucuc

SEQ ID NO: 505055 - RNA, 23 nt, Human
cccuuaguaucugcaggggucaa

SEQ ID NO: 505056 - RNA, 22 nt, Human
ccugcagauaccaacaucugaa

SEQ ID NO: 505057 - RNA, 21 nt, Human
ccugcagauaccgagggcugg

SEQ ID NO: 505058 - RNA, 22 nt, Human
ccuuucaacuaaggaacuccgg

SEQ ID NO: 505059 - RNA, 20 nt, Human
cgacgcgcggcccccgcgca

SEQ ID NO: 505060 - RNA, 26 nt, Human
cgcagccaaaccugcuaccugggccc

SEQ ID NO: 505061 - RNA, 21 nt, Human
cgcgcggcccccgcgcagcca

SEQ ID NO: 505062 - RNA, 23 nt, Human
cgugaacagaacugccagcucga

SEQ ID NO: 505063 - RNA, 22 nt, Human
cuaauccuccaggaaaaucacu

SEQ ID NO: 505064 - RNA, 26 nt, Human
cucagccucaccccugauccgguucc

SEQ ID NO: 505065 - RNA, 18 nt, Human
cucucagccucaccccug

SEQ ID NO: 505066 - RNA, 23 nt, Human
cuucaguuucuuugccuuucccg

SEQ ID NO: 505067 - RNA, 20 nt, Human
gaaacacagaaaaacugagc

SEQ ID NO: 505068 - RNA, 19 nt, Human
gaaagacaaugauaccaca

SEQ ID NO: 505069 - RNA, 24 nt, Human
gauuggacuucuaggcugucagag

SEQ ID NO: 505070 - RNA, 18 nt, Human
gcccuaaacccagagucu

SEQ ID NO: 505071 - RNA, 21 nt, Human
gcccuuaguaucugcaggggu

SEQ ID NO: 505072 - RNA, 22 nt, Human
ggaaagacaaugauaccacaaa

SEQ ID NO: 505073 - RNA, 23 nt, Human
ggacucugccuucaguuucuuug

SEQ ID NO: 505074 - RNA, 25 nt, Human
ggaggcagggcuagccccccaaggg

SEQ ID NO: 505075 - RNA, 22 nt, Human
gggaaacuccgacgcgcggccc

SEQ ID NO: 505076 - RNA, 25 nt, Human
guagaaccauccucacccuagaaag

SEQ ID NO: 505077 - RNA, 22 nt, Human
gucucucagccucaccccugau

SEQ ID NO: 505078 - RNA, 19 nt, Human
uaaaaccgcaaaagauaaa

SEQ ID NO: 505079 - RNA, 21 nt, Human
uaaauacccuaauccuccagg

SEQ ID NO: 505080 - RNA, 24 nt, Human
uaaauauccaucucucccaggaaa

SEQ ID NO: 505081 - RNA, 20 nt, Human
uaauaccuaauaaauguaaa

SEQ ID NO: 505082 - RNA, 21 nt, Human
uacaauuaccacauucuguca

SEQ ID NO: 505083 - RNA, 20 nt, Human
uacccuaauccuccaggaaa

SEQ ID NO: 505084 - RNA, 21 nt, Human
uacccuaauccuccaggaaaa

SEQ ID NO: 505085 - RNA, 25 nt, Human
uagcaaaauggaaugauaaaaccaa

SEQ ID NO: 505086 - RNA, 23 nt, Human
uaggacucugccuucaguuucuu

SEQ ID NO: 505087 - RNA, 18 nt, Human
uaucaucuaugguccugg

SEQ ID NO: 505088 - RNA, 22 nt, Human
uauuacagggugauuggacuuc

SEQ ID NO: 505089 - RNA, 21 nt, Human
ucaaaaaagggaaacuacuaa

SEQ ID NO: 505090 - RNA, 21 nt, Human
ucaaaauacuaauucaaaaaa

SEQ ID NO: 505091 - RNA, 21 nt, Human
ucaaugcacuuaacuuaaagc

SEQ ID NO: 505092 - RNA, 23 nt, Human
ucauucaacacauauuuauuaca

SEQ ID NO: 505093 - RNA, 21 nt, Human
uccaggaaaaucacuucaaaa

SEQ ID NO: 505094 - RNA, 21 nt, Human
uccaucucucccaggaaauug

SEQ ID NO: 505095 - RNA, 19 nt, Human
ucucuaauaacuggauuga

SEQ ID NO: 505096 - RNA, 23 nt, Human
ucuucauucaacacauauuuauu

SEQ ID NO: 505097 - RNA, 18 nt, Human
ugacaguaacuacuauga

SEQ ID NO: 505098 - RNA, 21 nt, Human
ugacauauacauaugaugacu

SEQ ID NO: 505099 - RNA, 22 nt, Human
ugauaaaaccaaagaguaaaag

SEQ ID NO: 505100 - RNA, 18 nt, Human
ugcagauaccaacaucug

SEQ ID NO: 505101 - RNA, 18 nt, Human
ugccccauuccauaaaau

SEQ ID NO: 505102 - RNA, 24 nt, Human
ugccggcaauggacgugaacagaa

SEQ ID NO: 505103 - RNA, 23 nt, Human
uggaaugauaaaaccaaagagua

SEQ ID NO: 505104 - RNA, 22 nt, Human
uggaugagaaaccugcagauac

SEQ ID NO: 505105 - RNA, 19 nt, Human
uggcauauaaacacacauc

SEQ ID NO: 505106 - RNA, 18 nt, Human
ugguguccauguuguauu

SEQ ID NO: 505107 - RNA, 26 nt, Human
uguaaagauucuuuccacuuuuuguc

SEQ ID NO: 505108 - RNA, 21 nt, Human
uguaaaugcuacauaaagagu

SEQ ID NO: 505109 - RNA, 21 nt, Human
ugucacagcagggcgcaccuu

SEQ ID NO: 505110 - RNA, 24 nt, Human
ugugcaaaauauauguacuuuuuc

SEQ ID NO: 505111 - RNA, 21 nt, Human
uuaacuuaaagcuucagguau

SEQ ID NO: 505112 - RNA, 20 nt, Human
uucacccauuucuucauuca

SEQ ID NO: 505113 - RNA, 21 nt, Human
uucaucaauuuacuuugcccc

SEQ ID NO: 505114 - RNA, 20 nt, Human
uuccaugaagacaauggaaa

SEQ ID NO: 505115 - RNA, 22 nt, Human
uugcaguugguugaauccaugg

SEQ ID NO: 505116 - RNA, 19 nt, Human
uuugcaguugguugaaucc

SEQ ID NO: 505117 - RNA, 21 nt, Human
aaaaaaccuccugcacaugcc

SEQ ID NO: 505118 - RNA, 23 nt, Human
aaaaaccuccugcacaugccugg

SEQ ID NO: 505119 - RNA, 20 nt, Human
aaaaucuuucuaaacugugg

SEQ ID NO: 505120 - RNA, 23 nt, Human
aaaccaaaaaaccuccugcacau

SEQ ID NO: 505121 - RNA, 19 nt, Human
aaagugcugggauuacagg

SEQ ID NO: 505122 - RNA, 22 nt, Human
aaagugcugggauuacagggug

SEQ ID NO: 505123 - RNA, 25 nt, Human
aaagugcugggauuacaggguguga

SEQ ID NO: 505124 - RNA, 19 nt, Human
aagcgagcucucuggaauc

SEQ ID NO: 505125 - RNA, 20 nt, Human
aagugcugggauuacagggu

SEQ ID NO: 505126 - RNA, 22 nt, Human
aagugcugggauuacagggugu

SEQ ID NO: 505127 - RNA, 27 nt, Human
aagugcugggauuacagggugugagcu

SEQ ID NO: 505128 - RNA, 18 nt, Human
acugcaccuggccagagu

SEQ ID NO: 505129 - RNA, 19 nt, Human
acuuuuuuuuucuuuucag

SEQ ID NO: 505130 - RNA, 21 nt, Human
agacagagccuucccucugug

SEQ ID NO: 505131 - RNA, 24 nt, Human
aggagcaagcgagcucucuggaaa

SEQ ID NO: 505132 - RNA, 23 nt, Human
aguacaguggcaugaucauggcu

SEQ ID NO: 505133 - RNA, 22 nt, Human
auucauagacagagccuucccu

SEQ ID NO: 505134 - RNA, 25 nt, Human
caaagugcugggauuacagggugug

SEQ ID NO: 505135 - RNA, 22 nt, Human
caacaaaaugcugaaaccaaaa

SEQ ID NO: 505136 - RNA, 21 nt, Human
cagaggcuccaccugaaacuc

SEQ ID NO: 505137 - RNA, 22 nt, Human
caucaccucccagaggcuccac

SEQ ID NO: 505138 - RNA, 24 nt, Human
caucccagccucccaagucacugg

SEQ ID NO: 505139 - RNA, 24 nt, Human
caucuccugggcucaagagauccu

SEQ ID NO: 505140 - RNA, 24 nt, Human
cauguuucccaggcuggucuugaa

SEQ ID NO: 505141 - RNA, 21 nt, Human
ccaaagugcugggauuacagg

SEQ ID NO: 505142 - RNA, 24 nt, Human
ccaaagugcugggauuacagggug

SEQ ID NO: 505143 - RNA, 25 nt, Human
ccaaagugcugggauuacagggugu

SEQ ID NO: 505144 - RNA, 21 nt, Human
ccaguaccaauucccaacaug

SEQ ID NO: 505145 - RNA, 19 nt, Human
ccauguuucccaggcuggu

SEQ ID NO: 505146 - RNA, 21 nt, Human
ccauguuucccaggcuggucu

SEQ ID NO: 505147 - RNA, 22 nt, Human
cccaagucacugggacuauagg

SEQ ID NO: 505148 - RNA, 21 nt, Human
ccucugguguuuucuuagucc

SEQ ID NO: 505149 - RNA, 20 nt, Human
ccugggcucaagagauccuc

SEQ ID NO: 505150 - RNA, 19 nt, Human
cuacugcaccuggccagag

SEQ ID NO: 505151 - RNA, 24 nt, Human
cucaagugaucugccuaccucagc

SEQ ID NO: 505152 - RNA, 24 nt, Human
cucaugaccucaucaccucccaga

SEQ ID NO: 505153 - RNA, 25 nt, Human
cuccugggcucaagagauccuccca

SEQ ID NO: 505154 - RNA, 18 nt, Human
cugaaaccaaaaaaccuc

SEQ ID NO: 505155 - RNA, 19 nt, Human
cugaaaccaaaaaaccucc

SEQ ID NO: 505156 - RNA, 23 nt, Human
cugaaaugucauugggaagaaca

SEQ ID NO: 505157 - RNA, 18 nt, Human
cugguguuuucuuagucc

SEQ ID NO: 505158 - RNA, 20 nt, Human
gaacaaauauccugaaaugu

SEQ ID NO: 505159 - RNA, 22 nt, Human
gaacaccaccaugaccaacuaa

SEQ ID NO: 505160 - RNA, 27 nt, Human
gaccucaucaccucccagaggcuccac

SEQ ID NO: 505161 - RNA, 18 nt, Human
gagauccucccaucccag

SEQ ID NO: 505162 - RNA, 23 nt, Human
gagauccucccaucccagccucc

SEQ ID NO: 505163 - RNA, 18 nt, Human
gagcucaagugaucugcc

SEQ ID NO: 505164 - RNA, 24 nt, Human
gagcucaagugaucugccuaccuc

SEQ ID NO: 505165 - RNA, 20 nt, Human
gauuacagggugugagcuac

SEQ ID NO: 505166 - RNA, 24 nt, Human
gauuacagggugugagcuacugca

SEQ ID NO: 505167 - RNA, 22 nt, Human
gcucacugcaagccugcaucuc

SEQ ID NO: 505168 - RNA, 19 nt, Human
ggaagaacaaaauucacuu

SEQ ID NO: 505169 - RNA, 19 nt, Human
gugaacaccaccaugacca

SEQ ID NO: 505170 - RNA, 24 nt, Human
gugaucugccuaccucagccuccc

SEQ ID NO: 505171 - RNA, 23 nt, Human
uacaguggcaugaucauggcuca

SEQ ID NO: 505172 - RNA, 24 nt, Human
uaccucagccucccaaagugcugg

SEQ ID NO: 505173 - RNA, 19 nt, Human
uacugcaccuggccagagu

SEQ ID NO: 505174 - RNA, 23 nt, Human
uagcaaaauaccaaagauacugg

SEQ ID NO: 505175 - RNA, 21 nt, Human
uaggugaacaccaccaugacc

SEQ ID NO: 505176 - RNA, 19 nt, Human
uaugucuuuagcaauggga

SEQ ID NO: 505177 - RNA, 24 nt, Human
uauugcccacaguucuggagacug

SEQ ID NO: 505178 - RNA, 25 nt, Human
ucacugcaagccugcaucuccuggg

SEQ ID NO: 505179 - RNA, 24 nt, Human
ucacugggacuauaggugaacacc

SEQ ID NO: 505180 - RNA, 23 nt, Human
ucagcaugcaacaaaaugcugaa

SEQ ID NO: 505181 - RNA, 18 nt, Human
ucagccucccaaagugcu

SEQ ID NO: 505182 - RNA, 21 nt, Human
uccaccugaaacucauuugau

SEQ ID NO: 505183 - RNA, 19 nt, Human
uccaguaucaagaugcggc

SEQ ID NO: 505184 - RNA, 23 nt, Human
ucccaaagugcugggauuacagg

SEQ ID NO: 505185 - RNA, 24 nt, Human
ucccaagucacugggacuauaggu

SEQ ID NO: 505186 - RNA, 22 nt, Human
ucccaucccagccucccaaguc

SEQ ID NO: 505187 - RNA, 27 nt, Human
uccucccaucccagccucccaagucac

SEQ ID NO: 505188 - RNA, 18 nt, Human
uccugggcucaagagauc

SEQ ID NO: 505189 - RNA, 22 nt, Human
uccugggcucaagagauccucc

SEQ ID NO: 505190 - RNA, 23 nt, Human
ucuugaacucuugagcucaagug

SEQ ID NO: 505191 - RNA, 23 nt, Human
ugaaaugucauugggaagaacaa

SEQ ID NO: 505192 - RNA, 18 nt, Human
ugaccucaucaccuccca

SEQ ID NO: 505193 - RNA, 18 nt, Human
ugaccucaucaccuccca

SEQ ID NO: 505194 - RNA, 18 nt, Human
ugagcucaagugaucugc

SEQ ID NO: 505195 - RNA, 20 nt, Human
ugagcucaagugaucugccu

SEQ ID NO: 505196 - RNA, 22 nt, Human
ugagcucaagugaucugccuac

SEQ ID NO: 505197 - RNA, 24 nt, Human
ugaucugccuaccucagccuccca

SEQ ID NO: 505198 - RNA, 22 nt, Human
ugauuuggagauuuaaagagua

SEQ ID NO: 505199 - RNA, 24 nt, Human
ugccauguuucccaggcuggucuu

SEQ ID NO: 505200 - RNA, 27 nt, Human
ugccauguuucccaggcuggucuugaa

SEQ ID NO: 505201 - RNA, 23 nt, Human
ugccuggagcaagaaggguugcu

SEQ ID NO: 505202 - RNA, 21 nt, Human
ugcuauagcaaaauaccaaag

SEQ ID NO: 505203 - RNA, 18 nt, Human
ugcugggauuacagggug

SEQ ID NO: 505204 - RNA, 18 nt, Human
uggcaugaucauggcuca

SEQ ID NO: 505205 - RNA, 19 nt, Human
ugggacuauaggugaacac

SEQ ID NO: 505206 - RNA, 22 nt, Human
ugggacuauaggugaacaccac

SEQ ID NO: 505207 - RNA, 24 nt, Human
ugggacuauaggugaacaccacca

SEQ ID NO: 505208 - RNA, 20 nt, Human
ugggauuacagggugugagc

SEQ ID NO: 505209 - RNA, 23 nt, Human
ugggauuacagggugugagcuac

SEQ ID NO: 505210 - RNA, 23 nt, Human
ugggauuacagggugugagcuac

SEQ ID NO: 505211 - RNA, 25 nt, Human
ugggauuacagggugugagcuacug

SEQ ID NO: 505212 - RNA, 26 nt, Human
ugggauuacagggugugagcuacuga

SEQ ID NO: 505213 - RNA, 22 nt, Human
ugucauugggaagaacaaaauu

SEQ ID NO: 505214 - RNA, 23 nt, Human
ugucugguggggacccacuuucu

SEQ ID NO: 505215 - RNA, 19 nt, Human
uuaacccuccacuuccauc

SEQ ID NO: 505216 - RNA, 24 nt, Human
uucccaggcuggucuugaacucuu

SEQ ID NO: 505217 - RNA, 20 nt, Human
uugugaugucaauauuuuua

SEQ ID NO: 505218 - RNA, 20 nt, Human
uuuaacccuccacuuccauc

SEQ ID NO: 505219 - RNA, 19 nt, Human
uuuuuuuuuuuuuuuguga

SEQ ID NO: 505220 - RNA, 22 nt, Human
aaaaaaacagagauaugguaga

SEQ ID NO: 505221 - RNA, 21 nt, Human
aaaaaacugaucugaaucaaa

SEQ ID NO: 505222 - RNA, 27 nt, Human
aaaaacagagauaugguagaaaaagga

SEQ ID NO: 505223 - RNA, 26 nt, Human
aaaacagagauaugguagaaaaagga

SEQ ID NO: 505224 - RNA, 20 nt, Human
aaaacaugcauuccaauaaa

SEQ ID NO: 505225 - RNA, 20 nt, Human
aaacauggucaaaaugucua

SEQ ID NO: 505226 - RNA, 23 nt, Human
aaacauguacacaaaauauaucc

SEQ ID NO: 505227 - RNA, 19 nt, Human
aacaaugacaggucaaccc

SEQ ID NO: 505228 - RNA, 18 nt, Human
aaccauuuagcucuauga

SEQ ID NO: 505229 - RNA, 21 nt, Human
acaaaacaaguaccacaaaga

SEQ ID NO: 505230 - RNA, 22 nt, Human
acauucugacagaauacuaaca

SEQ ID NO: 505231 - RNA, 21 nt, Human
acuuugaaaggagaaggcaau

SEQ ID NO: 505232 - RNA, 25 nt, Human
agauacugauuuuuuuuucuuuaaa

SEQ ID NO: 505233 - RNA, 19 nt, Human
agauaggcuuaaucuucca

SEQ ID NO: 505234 - RNA, 19 nt, Human
agccuauugguccaaugac

SEQ ID NO: 505235 - RNA, 23 nt, Human
agcucuaugagaaacugaaauaa

SEQ ID NO: 505236 - RNA, 18 nt, Human
aggagaaggcaaugaaaa

SEQ ID NO: 505237 - RNA, 20 nt, Human
aguguccagaaacagggcca

SEQ ID NO: 505238 - RNA, 19 nt, Human
auauauauauauauauaua

SEQ ID NO: 505239 - RNA, 19 nt, Human
auauauauauauauauaua

SEQ ID NO: 505240 - RNA, 19 nt, Human
auauauauauauauauaua

SEQ ID NO: 505241 - RNA, 19 nt, Human
auauauauauauauauaua

SEQ ID NO: 505242 - RNA, 19 nt, Human
auauauauauauauauaua

SEQ ID NO: 505243 - RNA, 19 nt, Human
auauauauauauauauaua

SEQ ID NO: 505244 - RNA, 19 nt, Human
auauauauauauauauaua

SEQ ID NO: 505245 - RNA, 19 nt, Human
auauauauauauauauaua

SEQ ID NO: 505246 - RNA, 19 nt, Human
auauauauauauauauaua

SEQ ID NO: 505247 - RNA, 19 nt, Human
auauauauauauauauaua

SEQ ID NO: 505248 - RNA, 19 nt, Human
auauauauauauauauaua

SEQ ID NO: 505249 - RNA, 19 nt, Human
auauauauauauauauaua

SEQ ID NO: 505250 - RNA, 19 nt, Human
auauauauauauauauaua

SEQ ID NO: 505251 - RNA, 19 nt, Human
auauauauauauauauaua

SEQ ID NO: 505252 - RNA, 19 nt, Human
auauauauauauauauaua

SEQ ID NO: 505253 - RNA, 19 nt, Human
auauauauauauauauaua

SEQ ID NO: 505254 - RNA, 19 nt, Human
auauauauauauauauaua

SEQ ID NO: 505255 - RNA, 19 nt, Human
auauauauauauauauaua

SEQ ID NO: 505256 - RNA, 19 nt, Human
auauauauauauauauaua

SEQ ID NO: 505257 - RNA, 25 nt, Human
caaaacaaguaccacaaagaagugu

SEQ ID NO: 505258 - RNA, 22 nt, Human
caagagaauauauguaaaacca

SEQ ID NO: 505259 - RNA, 21 nt, Human
cauacauauauauauauauau

SEQ ID NO: 505260 - RNA, 22 nt, Human
cauacauauauauauauauaua

SEQ ID NO: 505261 - RNA, 22 nt, Human
ccaaaauacaaugcagaucuuc

SEQ ID NO: 505262 - RNA, 21 nt, Human
ccacaaagaagugucacagcc

SEQ ID NO: 505263 - RNA, 24 nt, Human
cccaaaauuuaccuuucacacaaa

SEQ ID NO: 505264 - RNA, 22 nt, Human
cuaaaaaaacagagauauggua

SEQ ID NO: 505265 - RNA, 21 nt, Human
cugguauuaacuuuagggcau

SEQ ID NO: 505266 - RNA, 19 nt, Human
gagaauauauguaaaacca

SEQ ID NO: 505267 - RNA, 18 nt, Human
gcaaacagagagguuugc

SEQ ID NO: 505268 - RNA, 20 nt, Human
gcuuaaagagaaaaaguaac

SEQ ID NO: 505269 - RNA, 20 nt, Human
ggccaaaaaacagggucaga

SEQ ID NO: 505270 - RNA, 19 nt, Human
gggcaugccacagggccau

SEQ ID NO: 505271 - RNA, 18 nt, Human
guaguucuaaaaaaacag

SEQ ID NO: 505272 - RNA, 23 nt, Human
guguguacauacauauauauaua

SEQ ID NO: 505273 - RNA, 26 nt, Human
guguguacauacauauauauauauau

SEQ ID NO: 505274 - RNA, 24 nt, Human
uaaaaaaacagagauaugguagaa

SEQ ID NO: 505275 - RNA, 27 nt, Human
uaaaaaaacagagauaugguagaaaaa

SEQ ID NO: 505276 - RNA, 24 nt, Human
uaaaagagaaacauguacacaaaa

SEQ ID NO: 505277 - RNA, 23 nt, Human
uaaagcagaacaauugucaguuu

SEQ ID NO: 505278 - RNA, 22 nt, Human
uaacagauaggcuuaaucuucc

SEQ ID NO: 505279 - RNA, 24 nt, Human
uaacauaaacaguaugccaaaaac

SEQ ID NO: 505280 - RNA, 21 nt, Human
uaauaacuagaaaacagauac

SEQ ID NO: 505281 - RNA, 20 nt, Human
uacauacauauauauauaua

SEQ ID NO: 505282 - RNA, 20 nt, Human
uacauacauauauauauaua

SEQ ID NO: 505283 - RNA, 20 nt, Human
uacauacauauauauauaua

SEQ ID NO: 505284 - RNA, 22 nt, Human
uacauauauauauauauauaua

SEQ ID NO: 505285 - RNA, 25 nt, Human
uaccacaaagaagugucacagccua

SEQ ID NO: 505286 - RNA, 25 nt, Human
uaccacacaguugaguaguucuaaa

SEQ ID NO: 505287 - RNA, 19 nt, Human
uagcucuaugagaaacuga

SEQ ID NO: 505288 - RNA, 19 nt, Human
uauauauauauauauauau

SEQ ID NO: 505289 - RNA, 19 nt, Human
uauauauauauauauauau

SEQ ID NO: 505290 - RNA, 19 nt, Human
uauauauauauauauauau

SEQ ID NO: 505291 - RNA, 19 nt, Human
uauauauauauauauauau

SEQ ID NO: 505292 - RNA, 19 nt, Human
uauauauauauauauauau

SEQ ID NO: 505293 - RNA, 19 nt, Human
uauauauauauauauauau

SEQ ID NO: 505294 - RNA, 19 nt, Human
uauauauauauauauauau

SEQ ID NO: 505295 - RNA, 19 nt, Human
uauauauauauauauauau

SEQ ID NO: 505296 - RNA, 19 nt, Human
uauauauauauauauauau

SEQ ID NO: 505297 - RNA, 19 nt, Human
uauauauauauauauauau

SEQ ID NO: 505298 - RNA, 19 nt, Human
uauauauauauauauauau

SEQ ID NO: 505299 - RNA, 19 nt, Human
uauauauauauauauauau

SEQ ID NO: 505300 - RNA, 19 nt, Human
uauauauauauauauauau

SEQ ID NO: 505301 - RNA, 23 nt, Human
uaucauuuaaaugacuugacaau

SEQ ID NO: 505302 - RNA, 23 nt, Human
uaugccaaaaacaacagaacaaa

SEQ ID NO: 505303 - RNA, 20 nt, Human
ucacacaaaacaaguaccac

SEQ ID NO: 505304 - RNA, 21 nt, Human
ucacagccuaagaaacugccu

SEQ ID NO: 505305 - RNA, 22 nt, Human
uccuaaguaccauauuucuaag

SEQ ID NO: 505306 - RNA, 24 nt, Human
ucucuuaucuguuccacuggugaa

SEQ ID NO: 505307 - RNA, 19 nt, Human
ucuucauauuugugccucg

SEQ ID NO: 505308 - RNA, 20 nt, Human
ucuuccaguaauuauccugg

SEQ ID NO: 505309 - RNA, 19 nt, Human
ugaaacuaaagcagaacaa

SEQ ID NO: 505310 - RNA, 20 nt, Human
ugaaagaaguggguccagua

SEQ ID NO: 505311 - RNA, 22 nt, Human
ugaaauaaaagaaaauuaagga

SEQ ID NO: 505312 - RNA, 23 nt, Human
ugcagaucuucguaauauuguau

SEQ ID NO: 505313 - RNA, 20 nt, Human
ugccaaaaacaacagaacaa

SEQ ID NO: 505314 - RNA, 21 nt, Human
ugccaaaaacaacagaacaag

SEQ ID NO: 505315 - RNA, 24 nt, Human
uggcaaaguaauaaaauuugucaa

SEQ ID NO: 505316 - RNA, 20 nt, Human
uggcaacaaugacaggucaa

SEQ ID NO: 505317 - RNA, 22 nt, Human
uguacauacauauauauauaua

SEQ ID NO: 505318 - RNA, 18 nt, Human
uguguacauacauauaua

SEQ ID NO: 505319 - RNA, 24 nt, Human
uguguacauacauauauauauaua

SEQ ID NO: 505320 - RNA, 27 nt, Human
uguguacauacauauauauauauauau

SEQ ID NO: 505321 - RNA, 20 nt, Human
uguguguacauacauauaua

SEQ ID NO: 505322 - RNA, 23 nt, Human
uguguguguacauacauauauau

SEQ ID NO: 505323 - RNA, 24 nt, Human
uguguguguacauacauauauaua

SEQ ID NO: 505324 - RNA, 23 nt, Human
uuagggcauauaagguaucuuca

SEQ ID NO: 505325 - RNA, 24 nt, Human
uuaucauuuaaaugacuugacaau

SEQ ID NO: 505326 - RNA, 22 nt, Human
uucaucucuucugaaagaagug

SEQ ID NO: 505327 - RNA, 20 nt, Human
uucauguuaacuuauuuucc

SEQ ID NO: 505328 - RNA, 18 nt, Human
uuguuguuguuguuucca

SEQ ID NO: 505329 - RNA, 20 nt, Human
uuguuguuguuuccaaugcu

SEQ ID NO: 505330 - RNA, 20 nt, Human
uuucacacaaaacaaguacc

SEQ ID NO: 505331 - RNA, 23 nt, Human
uuucuaccucuauuagaccacaa

SEQ ID NO: 505332 - RNA, 21 nt, Human
aauuaagaaaauaugauauau

SEQ ID NO: 505333 - RNA, 24 nt, Human
auuaaaaaguagaaagcuaaaguu

SEQ ID NO: 505334 - RNA, 20 nt, Human
cagcagcgccucagccuggc

SEQ ID NO: 505335 - RNA, 18 nt, Human
ccagcagcagcgccucag

SEQ ID NO: 505336 - RNA, 18 nt, Human
ccagcagcagcgccucag

SEQ ID NO: 505337 - RNA, 21 nt, Human
cgccucagccuggcccaauuu

SEQ ID NO: 505338 - RNA, 18 nt, Human
cgucucggaucggccgcu

SEQ ID NO: 505339 - RNA, 23 nt, Human
cucggaucggccgcuccagcagc

SEQ ID NO: 505340 - RNA, 22 nt, Human
uaaaaugaucaauauacugugc

SEQ ID NO: 505341 - RNA, 23 nt, Human
uaagaaaaagaauccaaaaauaa

SEQ ID NO: 505342 - RNA, 24 nt, Human
uauauaaaaauccaaauuuacaaa

SEQ ID NO: 505343 - RNA, 21 nt, Human
uuaaaaugaucaauauacugu

SEQ ID NO: 505344 - RNA, 19 nt, Human
uuuauauuacaaagugaua

SEQ ID NO: 505345 - RNA, 18 nt, Human
aaccaccucuccccuucc

SEQ ID NO: 505346 - RNA, 21 nt, Human
aagagcugcuauuauuacuac

SEQ ID NO: 505347 - RNA, 21 nt, Human
acagcucugaaggacaucauc

SEQ ID NO: 505348 - RNA, 25 nt, Human
accaccucuccccuuccuuccccca

SEQ ID NO: 505349 - RNA, 24 nt, Human
accucuccccuuccuucccccacu

SEQ ID NO: 505350 - RNA, 22 nt, Human
caaggugaacugagccccuucu

SEQ ID NO: 505351 - RNA, 18 nt, Human
caccagcacagcccucgc

SEQ ID NO: 505352 - RNA, 21 nt, Human
caccucuccccuuccuucccc

SEQ ID NO: 505353 - RNA, 21 nt, Human
cacugcccccauucuuagccc

SEQ ID NO: 505354 - RNA, 21 nt, Human
ccacaagccccgccccugccc

SEQ ID NO: 505355 - RNA, 22 nt, Human
cccacaagccccgccccugccc

SEQ ID NO: 505356 - RNA, 23 nt, Human
cccacaagccccgccccugcccc

SEQ ID NO: 505357 - RNA, 22 nt, Human
cccccauucuuagccccgcccc

SEQ ID NO: 505358 - RNA, 19 nt, Human
ccccgccccucccacaagc

SEQ ID NO: 505359 - RNA, 24 nt, Human
ccccucccacaagccccgccccug

SEQ ID NO: 505360 - RNA, 22 nt, Human
cccgcccaccagcccugcacca

SEQ ID NO: 505361 - RNA, 21 nt, Human
cccugcaccagcacagcccuc

SEQ ID NO: 505362 - RNA, 24 nt, Human
cccugccccggccguuucccuggc

SEQ ID NO: 505363 - RNA, 21 nt, Human
cccuucuguuucuucuguucc

SEQ ID NO: 505364 - RNA, 20 nt, Human
ccuggccccgcccaccagcc

SEQ ID NO: 505365 - RNA, 23 nt, Human
ccuggccccgcccaccagcccug

SEQ ID NO: 505366 - RNA, 19 nt, Human
cgccccugccccggccguu

SEQ ID NO: 505367 - RNA, 23 nt, Human
cucuccccuuccuucccccacug

SEQ ID NO: 505368 - RNA, 21 nt, Human
cucugaaggacaucaucaagg

SEQ ID NO: 505369 - RNA, 20 nt, Human
cugcccccauucuuagcccc

SEQ ID NO: 505370 - RNA, 20 nt, Human
gcucugaaggacaucaucaa

SEQ ID NO: 505371 - RNA, 26 nt, Human
uaaccaccucuccccuuccuuccccc

SEQ ID NO: 505372 - RNA, 21 nt, Human
uagccccgccccucccacaag

SEQ ID NO: 505373 - RNA, 24 nt, Human
ucccccacugcccccauucuuagc

SEQ ID NO: 505374 - RNA, 18 nt, Human
ucccuggccccgcccacc

SEQ ID NO: 505375 - RNA, 18 nt, Human
ucuguuucuucuguuccc

SEQ ID NO: 505376 - RNA, 18 nt, Human
ugcaccagcacagcccuc

SEQ ID NO: 505377 - RNA, 22 nt, Human
uucccuuccucucaucacagcu

SEQ ID NO: 505378 - RNA, 24 nt, Human
uucuuagccccgccccucccacaa

SEQ ID NO: 505379 - RNA, 21 nt, Human
aagagcugcuauuauuacuac

SEQ ID NO: 505380 - RNA, 20 nt, Human
acagagagggggccuccaga

SEQ ID NO: 505381 - RNA, 18 nt, Human
agauggugaugggugggg

SEQ ID NO: 505382 - RNA, 19 nt, Human
aggaauccaaaggucuggg

SEQ ID NO: 505383 - RNA, 18 nt, Human
aggcauauggacuugaaa

SEQ ID NO: 505384 - RNA, 24 nt, Human
agggaggauaaggggaccccaggg

SEQ ID NO: 505385 - RNA, 26 nt, Human
agggaggauaaggggaccccagggcc

SEQ ID NO: 505386 - RNA, 26 nt, Human
auacccgccucuuccgcgaaccccgg

SEQ ID NO: 505387 - RNA, 21 nt, Human
aucaccuuauuucaccuccca

SEQ ID NO: 505388 - RNA, 18 nt, Human
auuuaggagggggcaacc

SEQ ID NO: 505389 - RNA, 18 nt, Human
caaggugaacugagccgc

SEQ ID NO: 505390 - RNA, 18 nt, Human
caccggcacagcccucgc

SEQ ID NO: 505391 - RNA, 23 nt, Human
caccuagcuugggacacagccag

SEQ ID NO: 505392 - RNA, 24 nt, Human
caccucccaacuacacgccccacc

SEQ ID NO: 505393 - RNA, 22 nt, Human
cacgccccaccaugaaugccac

SEQ ID NO: 505394 - RNA, 22 nt, Human
caggguuaagggucucaggagg

SEQ ID NO: 505395 - RNA, 21 nt, Human
cccaacuacacgccccaccau

SEQ ID NO: 505396 - RNA, 28 nt, Human
ccccgcccugaccccgccuuucccuggc

SEQ ID NO: 505397 - RNA, 21 nt, Human
cccgcaucuuccccccauucu

SEQ ID NO: 505398 - RNA, 20 nt, Human
ccugaccccgccuuucccug

SEQ ID NO: 505399 - RNA, 19 nt, Human
ccuggccccgcccaccaga

SEQ ID NO: 505400 - RNA, 23 nt, Human
ccuggccccgcccaccagaccug

SEQ ID NO: 505401 - RNA, 20 nt, Human
cggaagcaccuuaucaaggu

SEQ ID NO: 505402 - RNA, 19 nt, Human
cucaggaggggggacucca

SEQ ID NO: 505403 - RNA, 21 nt, Human
cugaccccgccuuucccuggc

SEQ ID NO: 505404 - RNA, 18 nt, Human
cuggccccgcccaccaga

SEQ ID NO: 505405 - RNA, 21 nt, Human
cuuucccgcaucuucccccca

SEQ ID NO: 505406 - RNA, 22 nt, Human
cuuuggauuuggggucugagag

SEQ ID NO: 505407 - RNA, 21 nt, Human
gaggaauccaaaggucugggu

SEQ ID NO: 505408 - RNA, 22 nt, Human
gcaggguuaagggucucaggag

SEQ ID NO: 505409 - RNA, 21 nt, Human
gcaucuggaggucuucuguug

SEQ ID NO: 505410 - RNA, 19 nt, Human
ggaagcaccuuaucaaggu

SEQ ID NO: 505411 - RNA, 18 nt, Human
ggaggauaaggggacccc

SEQ ID NO: 505412 - RNA, 22 nt, Human
ggcaaccgauaaacuguagaac

SEQ ID NO: 505413 - RNA, 21 nt, Human
gggcagcugaacagagagggg

SEQ ID NO: 505414 - RNA, 19 nt, Human
gggccuccagacuaaaucu

SEQ ID NO: 505415 - RNA, 23 nt, Human
uacuacucuucauagcauaaugu

SEQ ID NO: 505416 - RNA, 23 nt, Human
uagaacugaagaguuuggaauau

SEQ ID NO: 505417 - RNA, 23 nt, Human
uagccaccacgccccuuccuuuc

SEQ ID NO: 505418 - RNA, 18 nt, Human
uaucaaggugaacugagc

SEQ ID NO: 505419 - RNA, 22 nt, Human
ucaucccagcucggaagcaccu

SEQ ID NO: 505420 - RNA, 21 nt, Human
uccaagggagaggaauccaaa

SEQ ID NO: 505421 - RNA, 21 nt, Human
uccaggcauauggacuugaaa

SEQ ID NO: 505422 - RNA, 19 nt, Human
ucccagcucggaagcaccu

SEQ ID NO: 505423 - RNA, 23 nt, Human
ucccgcaucuuccccccauucuu

SEQ ID NO: 505424 - RNA, 21 nt, Human
ucccucuagccaccacgcccc

SEQ ID NO: 505425 - RNA, 18 nt, Human
ucccuggccccgcccacc

SEQ ID NO: 505426 - RNA, 23 nt, Human
ucggaagcaccuuaucaagguga

SEQ ID NO: 505427 - RNA, 25 nt, Human
ucggaagcaccuuaucaaggugaac

SEQ ID NO: 505428 - RNA, 20 nt, Human
ucucggggcuaggaagaccc

SEQ ID NO: 505429 - RNA, 18 nt, Human
ucuguuucuucucuuccc

SEQ ID NO: 505430 - RNA, 25 nt, Human
ugaaagucucggggcuaggaagacc

SEQ ID NO: 505431 - RNA, 20 nt, Human
ugacagauggugaugggugg

SEQ ID NO: 505432 - RNA, 21 nt, Human
uggauuugggcauuccaaggg

SEQ ID NO: 505433 - RNA, 19 nt, Human
uggggugguuugccuuuau

SEQ ID NO: 505434 - RNA, 19 nt, Human
uguugcggaggaugcaggg

SEQ ID NO: 505435 - RNA, 21 nt, Human
uucccuggccccgcccaccuu

SEQ ID NO: 505436 - RNA, 22 nt, Human
uucccuuccucucaucccagcu

SEQ ID NO: 505437 - RNA, 21 nt, Human
uuggaauauuugcauagggga

SEQ ID NO: 505438 - RNA, 23 nt, Human
uuggaauauuugcauaggggagc

SEQ ID NO: 505439 - RNA, 19 nt, Human
uuggauuuggggucugaga

SEQ ID NO: 505440 - RNA, 19 nt, Human
aacucucuuuaauggaggu

SEQ ID NO: 505441 - RNA, 21 nt, Human
agcacaggagcagccaaacua

SEQ ID NO: 505442 - RNA, 23 nt, Human
agcacaggagcagccaaacuauc

SEQ ID NO: 505443 - RNA, 20 nt, Human
augugguggucaauacaagu

SEQ ID NO: 505444 - RNA, 18 nt, Human
cagagaaaauaucccuca

SEQ ID NO: 505445 - RNA, 22 nt, Human
gcgggcuuucacuucaaggcuu

SEQ ID NO: 505446 - RNA, 18 nt, Human
gggagaggcuaauggccc

SEQ ID NO: 505447 - RNA, 23 nt, Human
gguguucuuuuuucuuguucuuu

SEQ ID NO: 505448 - RNA, 18 nt, Human
uacaagugauacagagua

SEQ ID NO: 505449 - RNA, 25 nt, Human
ucccucacagagagaagggagaggc

SEQ ID NO: 505450 - RNA, 23 nt, Human
ucucucuuuugaaugaacauuga

SEQ ID NO: 505451 - RNA, 19 nt, Human
ucuuguucuuuccggugcc

SEQ ID NO: 505452 - RNA, 19 nt, Human
ugacagcacaggagcagcc

SEQ ID NO: 505453 - RNA, 19 nt, Human
ugauaagggagaauugcag

SEQ ID NO: 505454 - RNA, 22 nt, Human
ugggaagauguggauugacaag

SEQ ID NO: 505455 - RNA, 24 nt, Human
uugaaugaacauuggcucacugaa

SEQ ID NO: 505456 - RNA, 19 nt, Human
uugcaggugacagcacagg

SEQ ID NO: 505457 - RNA, 22 nt, Human
uuggcucacugaagaagauaaa

SEQ ID NO: 505458 - RNA, 21 nt, Human
aacacuuuuuauuuagcacau

SEQ ID NO: 505459 - RNA, 18 nt, Human
aacucuccuuaauggagu

SEQ ID NO: 505460 - RNA, 18 nt, Human
aagauauuuggauuagga

SEQ ID NO: 505461 - RNA, 21 nt, Human
aaguggccagggucaaagaua

SEQ ID NO: 505462 - RNA, 22 nt, Human
agacagggaugaagcagaucug

SEQ ID NO: 505463 - RNA, 23 nt, Human
agagaaacaaucccuuugguaac

SEQ ID NO: 505464 - RNA, 18 nt, Human
aggcaugaaguagucacu

SEQ ID NO: 505465 - RNA, 19 nt, Human
auuaauaacacuuuuuauu

SEQ ID NO: 505466 - RNA, 23 nt, Human
auuucagguuaaaguucuguaaa

SEQ ID NO: 505467 - RNA, 19 nt, Human
caucauguagcacggaagu

SEQ ID NO: 505468 - RNA, 21 nt, Human
cuccaugcgggcaaguccuuc

SEQ ID NO: 505469 - RNA, 20 nt, Human
gaaugggaagauuugaugag

SEQ ID NO: 505470 - RNA, 24 nt, Human
gauuucagguuaaaguucuguaaa

SEQ ID NO: 505471 - RNA, 21 nt, Human
ggucagagaagacauaauagu

SEQ ID NO: 505472 - RNA, 20 nt, Human
uaaaaaaagaguugcaggug

SEQ ID NO: 505473 - RNA, 18 nt, Human
uaggaaauucuuugucau

SEQ ID NO: 505474 - RNA, 20 nt, Human
uccuucuccugcacaaauuc

SEQ ID NO: 505475 - RNA, 20 nt, Human
ugaccugaacaacucuccuu

SEQ ID NO: 505476 - RNA, 18 nt, Human
ugagaaaggcaugaagua

SEQ ID NO: 505477 - RNA, 19 nt, Human
ugcugagaaaggcaugaag

SEQ ID NO: 505478 - RNA, 23 nt, Human
ugggaauguccuugauaaaaaaa

SEQ ID NO: 505479 - RNA, 25 nt, Human
uugugcagugaccugaacaacucuc

SEQ ID NO: 505480 - RNA, 21 nt, Human
uuugugcagugaccugaacaa

SEQ ID NO: 505481 - RNA, 21 nt, Human
cacccccaccccaccaggcac

SEQ ID NO: 505482 - RNA, 19 nt, Human
ccucugggcuaggagcagg

SEQ ID NO: 505483 - RNA, 22 nt, Human
ccucugggcuaggagcaggcug

SEQ ID NO: 505484 - RNA, 24 nt, Human
ccucugggcuaggagcaggcuggg

SEQ ID NO: 505485 - RNA, 24 nt, Human
ccuggcacccccaccccaccaggc

SEQ ID NO: 505486 - RNA, 24 nt, Human
cuccucuggacacaccuggcaccc

SEQ ID NO: 505487 - RNA, 19 nt, Human
gcacccccaccccaccagg

SEQ ID NO: 505488 - RNA, 22 nt, Human
gcacccccaccccaccaggcac

SEQ ID NO: 505489 - RNA, 23 nt, Human
ggcacagaggaccaggcaggaca

SEQ ID NO: 505490 - RNA, 21 nt, Human
uguacauuagagccucugggc

SEQ ID NO: 505491 - RNA, 21 nt, Human
aguuugagaaauccugaccuc

SEQ ID NO: 505492 - RNA, 22 nt, Human
gaaucaguuugagaaauccuga

SEQ ID NO: 505493 - RNA, 24 nt, Human
ggggcccugcugccagcccgggag

SEQ ID NO: 505494 - RNA, 25 nt, Human
ugcaaagaaaggaaucaguuugaga

SEQ ID NO: 505495 - RNA, 23 nt, Human
ugggaaaauauuuauuuucaaau

SEQ ID NO: 505496 - RNA, 24 nt, Human
uugaaagcgggggguucagggugu

SEQ ID NO: 505497 - RNA, 18 nt, Human
aacugcaggcguguaaau

SEQ ID NO: 505498 - RNA, 18 nt, Human
acagucucuggguggcau

SEQ ID NO: 505499 - RNA, 21 nt, Human
accacuuccaaguugccuucc

SEQ ID NO: 505500 - RNA, 23 nt, Human
agccagacucccacgugugggcu

SEQ ID NO: 505501 - RNA, 23 nt, Human
auagacagcgacagucucugggu

SEQ ID NO: 505502 - RNA, 19 nt, Human
cacuuccaaguugccuucc

SEQ ID NO: 505503 - RNA, 18 nt, Human
cagauccaggggaguugg

SEQ ID NO: 505504 - RNA, 24 nt, Human
ccaccacuuccaaguugccuuccu

SEQ ID NO: 505505 - RNA, 21 nt, Human
ccacuuccaaguugccuuccu

SEQ ID NO: 505506 - RNA, 21 nt, Human
cccacuguugaggcuggaggc

SEQ ID NO: 505507 - RNA, 20 nt, Human
ccuuguaguuguguaugggu

SEQ ID NO: 505508 - RNA, 21 nt, Human
cuggagacauuaacccugucc

SEQ ID NO: 505509 - RNA, 21 nt, Human
cugggagagugguguagccaa

SEQ ID NO: 505510 - RNA, 21 nt, Human
cugugaacauguguggccguu

SEQ ID NO: 505511 - RNA, 22 nt, Human
gacagacuccggaaaacaacug

SEQ ID NO: 505512 - RNA, 19 nt, Human
gcuaacccagcaguugcuu

SEQ ID NO: 505513 - RNA, 18 nt, Human
ggacugugccucuguggg

SEQ ID NO: 505514 - RNA, 24 nt, Human
gggcugcaguugcagagguggcug

SEQ ID NO: 505515 - RNA, 18 nt, Human
gggguguguggacaucgg

SEQ ID NO: 505516 - RNA, 18 nt, Human
guggaaagcuaacccagc

SEQ ID NO: 505517 - RNA, 24 nt, Human
guugcagagguggcuggggacugu

SEQ ID NO: 505518 - RNA, 24 nt, Human
uaugugcuugugauugcagaugga

SEQ ID NO: 505519 - RNA, 21 nt, Human
ucacaggcugggagaguggug

SEQ ID NO: 505520 - RNA, 19 nt, Human
uccugggcacccaccacuu

SEQ ID NO: 505521 - RNA, 23 nt, Human
uccugggcacccaccacuuccaa

SEQ ID NO: 505522 - RNA, 19 nt, Human
ucucuggguggcaugaccc

SEQ ID NO: 505523 - RNA, 24 nt, Human
ucuggggagccaggacgaugucgu

SEQ ID NO: 505524 - RNA, 19 nt, Human
ucuguggcuugugaaggug

SEQ ID NO: 505525 - RNA, 22 nt, Human
ucuguggcuugugaaggugaca

SEQ ID NO: 505526 - RNA, 19 nt, Human
ugaggguccucguaugucc

SEQ ID NO: 505527 - RNA, 21 nt, Human
ugcaguguacacucuggagac

SEQ ID NO: 505528 - RNA, 18 nt, Human
uggcaugaccccggaggg

SEQ ID NO: 505529 - RNA, 21 nt, Human
uggcaugaccccggagggggc

SEQ ID NO: 505530 - RNA, 18 nt, Human
ugggacagacuccggaaa

SEQ ID NO: 505531 - RNA, 22 nt, Human
ugggagagugguguagccaaga

SEQ ID NO: 505532 - RNA, 23 nt, Human
ugggcugcagauccaggggaguu

SEQ ID NO: 505533 - RNA, 23 nt, Human
uguccaugcccacuguugaggcu

SEQ ID NO: 505534 - RNA, 19 nt, Human
ugugaaggugacagccaga

SEQ ID NO: 505535 - RNA, 20 nt, Human
uguggacaagugguuggggg

SEQ ID NO: 505536 - RNA, 21 nt, Human
uuaaaaaggggugacugaggg

SEQ ID NO: 505537 - RNA, 20 nt, Human
uugcuuuguggcccuuguag

SEQ ID NO: 505538 - RNA, 23 nt, Human
aacacucuauacagaccaugaga

SEQ ID NO: 505539 - RNA, 19 nt, Human
aagcagagaagccaaaucu

SEQ ID NO: 505540 - RNA, 22 nt, Human
aagccaaaucuacuuccccagc

SEQ ID NO: 505541 - RNA, 24 nt, Human
agaagcagagaagccaaaucuacu

SEQ ID NO: 505542 - RNA, 18 nt, Human
agccaucaaaauaauucc

SEQ ID NO: 505543 - RNA, 25 nt, Human
auagaauacuacagauauaacacau

SEQ ID NO: 505544 - RNA, 24 nt, Human
caaaauaauuccuauuuuuauuaa

SEQ ID NO: 505545 - RNA, 22 nt, Human
cacagcuuucuuaaagagcaaa

SEQ ID NO: 505546 - RNA, 22 nt, Human
cacucuauacagaccaugagag

SEQ ID NO: 505547 - RNA, 23 nt, Human
cagcacugauuuggucaucuccu

SEQ ID NO: 505548 - RNA, 21 nt, Human
cagcuuucuuaaagagcaaac

SEQ ID NO: 505549 - RNA, 19 nt, Human
gagaagcagagaagccaaa

SEQ ID NO: 505550 - RNA, 22 nt, Human
gagagagcacaaugcacguaca

SEQ ID NO: 505551 - RNA, 21 nt, Human
gccaaaucuacuuccccagca

SEQ ID NO: 505552 - RNA, 22 nt, Human
uaccaaguauaacacucuauac

SEQ ID NO: 505553 - RNA, 25 nt, Human
uauacagaccaugagagagcacaau

SEQ ID NO: 505554 - RNA, 19 nt, Human
ucagcagcgugcugcuguu

SEQ ID NO: 505555 - RNA, 21 nt, Human
ucucucuccucugagucuuuu

SEQ ID NO: 505556 - RNA, 19 nt, Human
ugaaauuauugagaaaugu

SEQ ID NO: 505557 - RNA, 18 nt, Human
ugagaagcagagaagcca

SEQ ID NO: 505558 - RNA, 20 nt, Human
ugaggucucugguguucugg

SEQ ID NO: 505559 - RNA, 23 nt, Human
ugcagcacauuggaugaagcccg

SEQ ID NO: 505560 - RNA, 21 nt, Human
ugcugcuguuugcugggcugu

SEQ ID NO: 505561 - RNA, 25 nt, Human
uguuugcugggcuguguguguggag

SEQ ID NO: 505562 - RNA, 20 nt, Human
uuccccagcacugauuuggu

SEQ ID NO: 505563 - RNA, 19 nt, Human
uugcugggcugugugugug

SEQ ID NO: 505564 - RNA, 23 nt, Human
aaggaugggcagugcuggaggca

SEQ ID NO: 505565 - RNA, 20 nt, Human
aagggcccaggaagcuccaa

SEQ ID NO: 505566 - RNA, 25 nt, Human
acucuacaaaggugggugggugggu

SEQ ID NO: 505567 - RNA, 18 nt, Human
aggaagcuccaaggacaa

SEQ ID NO: 505568 - RNA, 18 nt, Human
aggacaguggaaaggggc

SEQ ID NO: 505569 - RNA, 18 nt, Human
aggggcaaggaugggcag

SEQ ID NO: 505570 - RNA, 21 nt, Human
cagggaagggcccaggaagcu

SEQ ID NO: 505571 - RNA, 19 nt, Human
ccaggaagcuccaaggaca

SEQ ID NO: 505572 - RNA, 21 nt, Human
ccugaggcccagggaagggcc

SEQ ID NO: 505573 - RNA, 22 nt, Human
cuccaaggacaguggaaagggg

SEQ ID NO: 505574 - RNA, 19 nt, Human
gacgggauggaggguggga

SEQ ID NO: 505575 - RNA, 18 nt, Human
gggcagugcuggaggcag

SEQ ID NO: 505576 - RNA, 22 nt, Human
uccugaggcccagggaagggcc

SEQ ID NO: 505577 - RNA, 25 nt, Human
uggaaaggggcaaggaugggcagug

SEQ ID NO: 505578 - RNA, 24 nt, Human
uuuguuucugggacucuacaaagg

SEQ ID NO: 505579 - RNA, 20 nt, Human
uuuuuuuuuuuuuuugucag

SEQ ID NO: 505580 - RNA, 21 nt, Human
uuuuuuuuuuuuuuugucagc

SEQ ID NO: 505581 - RNA, 19 nt, Human
uuuuuuuuuuuuuuuuugu

SEQ ID NO: 505582 - RNA, 27 nt, Human
uuuuuuuuuuuuuuuuuuuuuuugggg

SEQ ID NO: 505583 - RNA, 19 nt, Human
aaacagguggaugggucag

SEQ ID NO: 505584 - RNA, 24 nt, Human
aaagucacugcaagcuuacauuca

SEQ ID NO: 505585 - RNA, 23 nt, Human
agccaaagcccgcccucggcgcg

SEQ ID NO: 505586 - RNA, 21 nt, Human
cagccaaagcccgcccucggc

SEQ ID NO: 505587 - RNA, 23 nt, Human
cagguggaugggucagaaaguca

SEQ ID NO: 505588 - RNA, 19 nt, Human
cagugaggcccaggcagag

SEQ ID NO: 505589 - RNA, 23 nt, Human
cccacacaaccucuucuccucuu

SEQ ID NO: 505590 - RNA, 19 nt, Human
cccgcagccaaagcccgcc

SEQ ID NO: 505591 - RNA, 20 nt, Human
ccucuucuccucuucugcug

SEQ ID NO: 505592 - RNA, 20 nt, Human
cgcagccaaagcccgcccuc

SEQ ID NO: 505593 - RNA, 22 nt, Human
cucuucuccucuucugcuggga

SEQ ID NO: 505594 - RNA, 20 nt, Human
cugcaggcugucagugaggc

SEQ ID NO: 505595 - RNA, 18 nt, Human
cuuccugcggggcucagu

SEQ ID NO: 505596 - RNA, 19 nt, Human
cuuucaucuccgccauggc

SEQ ID NO: 505597 - RNA, 22 nt, Human
gaugcaguuccugggcccugcg

SEQ ID NO: 505598 - RNA, 22 nt, Human
gccugcccgaugcaguuccugg

SEQ ID NO: 505599 - RNA, 22 nt, Human
ucacugcaagcuuacauucagg

SEQ ID NO: 505600 - RNA, 24 nt, Human
ugcggagaaaggaauaaaagccag

SEQ ID NO: 505601 - RNA, 23 nt, Human
uggcaggaaccggaagugcagca

SEQ ID NO: 505602 - RNA, 23 nt, Human
uguggucuggcaggaaccggaag

SEQ ID NO: 505603 - RNA, 23 nt, Human
uucaugacaaucugcaaaaaaac

SEQ ID NO: 505604 - RNA, 18 nt, Human
accacauuuuguuuaucc

SEQ ID NO: 505605 - RNA, 18 nt, Human
agauaucuaggauggaau

SEQ ID NO: 505606 - RNA, 25 nt, Human
agcugcugaaagccaccaauccgcu

SEQ ID NO: 505607 - RNA, 23 nt, Human
agguccggaacauuuucaccauc

SEQ ID NO: 505608 - RNA, 21 nt, Human
aguggggucagagugggucuc

SEQ ID NO: 505609 - RNA, 23 nt, Human
caccaauccgcuaugcaucucuu

SEQ ID NO: 505610 - RNA, 18 nt, Human
caccuccccacagcugcu

SEQ ID NO: 505611 - RNA, 23 nt, Human
ccccacagcugcugaaagccacc

SEQ ID NO: 505612 - RNA, 19 nt, Human
ccggaacauuuucaccauc

SEQ ID NO: 505613 - RNA, 24 nt, Human
cugaaagccaccaauccgcuaugc

SEQ ID NO: 505614 - RNA, 19 nt, Human
cugucccagacaaccuccu

SEQ ID NO: 505615 - RNA, 19 nt, Human
gaacacuugucucaauuau

SEQ ID NO: 505616 - RNA, 19 nt, Human
gacagaaaaaaaauguaug

SEQ ID NO: 505617 - RNA, 18 nt, Human
gcugaaagccaccaaucc

SEQ ID NO: 505618 - RNA, 21 nt, Human
ggaaagaugcucacagcauau

SEQ ID NO: 505619 - RNA, 22 nt, Human
uaccacgaaauucaccauuuca

SEQ ID NO: 505620 - RNA, 24 nt, Human
uacugugaauagggccgccaugaa

SEQ ID NO: 505621 - RNA, 20 nt, Human
uagcauuuagugcacucaca

SEQ ID NO: 505622 - RNA, 19 nt, Human
uaggauggaauacaggacu

SEQ ID NO: 505623 - RNA, 23 nt, Human
uaugaacaaccuggacagaaaaa

SEQ ID NO: 505624 - RNA, 21 nt, Human
ucacuuuugaugaaucagggg

SEQ ID NO: 505625 - RNA, 23 nt, Human
ucaguaucaugcauucaagguuc

SEQ ID NO: 505626 - RNA, 22 nt, Human
uccucagucccaccuccccaca

SEQ ID NO: 505627 - RNA, 21 nt, Human
ucuaggauggaauacaggacu

SEQ ID NO: 505628 - RNA, 24 nt, Human
ugagguagaauucacauaccacga

SEQ ID NO: 505629 - RNA, 25 nt, Human
ugagguagaauucacauaccacgaa

SEQ ID NO: 505630 - RNA, 21 nt, Human
ugcuucauuccuuuuuauggc

SEQ ID NO: 505631 - RNA, 27 nt, Human
uuagcagucgcuccucagucccaccuc

SEQ ID NO: 505632 - RNA, 24 nt, Human
uucaaaguguccaauucaauagca

SEQ ID NO: 505633 - RNA, 20 nt, Human
uuggccuguucuggaaauuu

SEQ ID NO: 505634 - RNA, 19 nt, Human
uuugcaucugacgucuuuc

SEQ ID NO: 505635 - RNA, 21 nt, Human
acugaggcacaggggccaaca

SEQ ID NO: 505636 - RNA, 18 nt, Human
agacaucuccccgccucu

SEQ ID NO: 505637 - RNA, 21 nt, Human
agguaggugggugggucacug

SEQ ID NO: 505638 - RNA, 21 nt, Human
agguaguuggugcaaagguag

SEQ ID NO: 505639 - RNA, 20 nt, Human
ccccgcaguccuccagcgcc

SEQ ID NO: 505640 - RNA, 21 nt, Human
cccuagauccccgcaguccuc

SEQ ID NO: 505641 - RNA, 19 nt, Human
cgcgggacugaggcacagg

SEQ ID NO: 505642 - RNA, 21 nt, Human
gcccuagauccccgcaguccu

SEQ ID NO: 505643 - RNA, 22 nt, Human
ggcccuagauccccgcaguccu

SEQ ID NO: 505644 - RNA, 18 nt, Human
ggggaaaaagucuuuacu

SEQ ID NO: 505645 - RNA, 23 nt, Human
gguaggugggugggucacugcag

SEQ ID NO: 505646 - RNA, 25 nt, Human
uccccgcaguccuccagcgcccccu

SEQ ID NO: 505647 - RNA, 23 nt, Human
aaaaaaacauuuguucaaaagcu

SEQ ID NO: 505648 - RNA, 18 nt, Human
aaaaagaaaaaagaaaaa

SEQ ID NO: 505649 - RNA, 23 nt, Human
aaaaagaaaaaagaaaaaaacau

SEQ ID NO: 505650 - RNA, 25 nt, Human
aaacaugauuuggcaaucuuuuugc

SEQ ID NO: 505651 - RNA, 23 nt, Human
aacuguuacuucuucugaugccu

SEQ ID NO: 505652 - RNA, 28 nt, Human
aacuuugaaguaggaaauagaaaaaaaa

SEQ ID NO: 505653 - RNA, 21 nt, Human
aagauguuuuuccugagaccc

SEQ ID NO: 505654 - RNA, 19 nt, Human
aagcaaacaugaugaaaau

SEQ ID NO: 505655 - RNA, 19 nt, Human
aaggaagauguuuuuccug

SEQ ID NO: 505656 - RNA, 27 nt, Human
aaguaggaaauagaaaaaaagggaccc

SEQ ID NO: 505657 - RNA, 26 nt, Human
acuuugaaguaggaaauagaaaaaaa

SEQ ID NO: 505658 - RNA, 30 nt, Human
agaaaaaagaaaaaaacauuuguucaaaag

SEQ ID NO: 505659 - RNA, 24 nt, Human
aggaagauguuuuuccugagaccc

SEQ ID NO: 505660 - RNA, 21 nt, Human
caaaaguccuccuaccaaaca

SEQ ID NO: 505661 - RNA, 19 nt, Human
cacuauguggcaccagaac

SEQ ID NO: 505662 - RNA, 18 nt, Human
cagguuaaaaaacaugca

SEQ ID NO: 505663 - RNA, 19 nt, Human
cugaccacuauguggcacc

SEQ ID NO: 505664 - RNA, 21 nt, Human
cuucucuguuccauuucugac

SEQ ID NO: 505665 - RNA, 21 nt, Human
ggaaaagcagguuaaaaaaca

SEQ ID NO: 505666 - RNA, 22 nt, Human
ggaaauagaaaaaaaaucugcu

SEQ ID NO: 505667 - RNA, 20 nt, Human
gugaaucuuuaaucaaugcc

SEQ ID NO: 505668 - RNA, 24 nt, Human
uaaaaaacaugcagaucacucuug

SEQ ID NO: 505669 - RNA, 23 nt, Human
uaccucaaaaguccuccuaccaa

SEQ ID NO: 505670 - RNA, 23 nt, Human
uauugcaaaaaaaaagaaaaaag

SEQ ID NO: 505671 - RNA, 19 nt, Human
ucaaaaguccuccuaccaa

SEQ ID NO: 505672 - RNA, 25 nt, Human
ucaaaaguccuccuaccaaacauga

SEQ ID NO: 505673 - RNA, 23 nt, Human
uccaaaaggugcuaugcaaaaga

SEQ ID NO: 505674 - RNA, 27 nt, Human
ucuuuauugcaaaaaaaaagaaaaaaa

SEQ ID NO: 505675 - RNA, 19 nt, Human
ugaacaaggcuuaagacag

SEQ ID NO: 505676 - RNA, 23 nt, Human
ugcaaaaaaaaagaaaaaagaaa

SEQ ID NO: 505677 - RNA, 21 nt, Human
uggggaaaagcagguuaaaaa

SEQ ID NO: 505678 - RNA, 27 nt, Human
uuaguaugauggcaguaggagcuuuuu

SEQ ID NO: 505679 - RNA, 22 nt, Human
uuauugcaaaaaaaaagaaaaa

SEQ ID NO: 505680 - RNA, 20 nt, Human
uuuccugagacccucugcca

SEQ ID NO: 505681 - RNA, 22 nt, Human
uuucugaccacuauguggcacc

SEQ ID NO: 505682 - RNA, 23 nt, Human
aaaauacgagcagaacuucugag

SEQ ID NO: 505683 - RNA, 21 nt, Human
aaacaaucagugaacuccaac

SEQ ID NO: 505684 - RNA, 22 nt, Human
aaaucuaaucaucuauuuccaa

SEQ ID NO: 505685 - RNA, 19 nt, Human
aaauucacuucacacccac

SEQ ID NO: 505686 - RNA, 19 nt, Human
aaccagaguacccguccug

SEQ ID NO: 505687 - RNA, 25 nt, Human
aagaaaaaaauaauaguuuuaagga

SEQ ID NO: 505688 - RNA, 19 nt, Human
aagaagaaaaaaauaauag

SEQ ID NO: 505689 - RNA, 24 nt, Human
aagaucaaggaacucauucaaaac

SEQ ID NO: 505690 - RNA, 23 nt, Human
aauucagccuuuggaccuuacug

SEQ ID NO: 505691 - RNA, 24 nt, Human
acacccaccuaaaauacgagcaga

SEQ ID NO: 505692 - RNA, 20 nt, Human
accacacgcagaagaaaaau

SEQ ID NO: 505693 - RNA, 21 nt, Human
accacacgcagaagaaaaaua

SEQ ID NO: 505694 - RNA, 21 nt, Human
agaaaacccuauuucugcuga

SEQ ID NO: 505695 - RNA, 21 nt, Human
agaacaggcugaaacucuuga

SEQ ID NO: 505696 - RNA, 27 nt, Human
agaacuucugaggcccaaugaacccau

SEQ ID NO: 505697 - RNA, 25 nt, Human
agaagaaaaaaauaauaguuuuaag

SEQ ID NO: 505698 - RNA, 19 nt, Human
agcgaagggagagcccgga

SEQ ID NO: 505699 - RNA, 21 nt, Human
agcgaagggagagcccggaac

SEQ ID NO: 505700 - RNA, 25 nt, Human
aggaaaucuacagaagggaaucugg

SEQ ID NO: 505701 - RNA, 18 nt, Human
auccugugggaauaauug

SEQ ID NO: 505702 - RNA, 22 nt, Human
aucuuuccuuuccguuuuccuu

SEQ ID NO: 505703 - RNA, 19 nt, Human
caaaaaguauuccuuggag

SEQ ID NO: 505704 - RNA, 23 nt, Human
caaggaacucauucaaaacaaag

SEQ ID NO: 505705 - RNA, 19 nt, Human
cacaguguaauugggucug

SEQ ID NO: 505706 - RNA, 25 nt, Human
cacucaaaauacauuuauugaugaa

SEQ ID NO: 505707 - RNA, 23 nt, Human
cacuucacacccaccuaaaauac

SEQ ID NO: 505708 - RNA, 22 nt, Human
cagaucucuuaaaaugugguuc

SEQ ID NO: 505709 - RNA, 23 nt, Human
cagguacuauaacuuacaccuua

SEQ ID NO: 505710 - RNA, 19 nt, Human
cagugcuuaaagaucaagg

SEQ ID NO: 505711 - RNA, 23 nt, Human
caucacagaaacccuggcacuuu

SEQ ID NO: 505712 - RNA, 23 nt, Human
ccagaguacccguccuguaacuu

SEQ ID NO: 505713 - RNA, 18 nt, Human
ccaggcaagaucgcccau

SEQ ID NO: 505714 - RNA, 25 nt, Human
ccauagaaccaaacauuaauacucc

SEQ ID NO: 505715 - RNA, 25 nt, Human
cccacaguuagaauaaccuuuauuc

SEQ ID NO: 505716 - RNA, 19 nt, Human
cccuuaaacaacaugauua

SEQ ID NO: 505717 - RNA, 25 nt, Human
ccuacuuagaucuucuuuuuuucca

SEQ ID NO: 505718 - RNA, 18 nt, Human
cuagcccuuaaacaacau

SEQ ID NO: 505719 - RNA, 20 nt, Human
cuagcccuuaaacaacauga

SEQ ID NO: 505720 - RNA, 20 nt, Human
cucaaaauacauuuauugau

SEQ ID NO: 505721 - RNA, 24 nt, Human
cugaccccaaaaaguauuccuugg

SEQ ID NO: 505722 - RNA, 22 nt, Human
cugaggcuuggagcgaagggag

SEQ ID NO: 505723 - RNA, 24 nt, Human
cuguaacuuccaucaggaccucaa

SEQ ID NO: 505724 - RNA, 18 nt, Human
cuuggcuucaagcggcug

SEQ ID NO: 505725 - RNA, 21 nt, Human
gagcuucacaaagcaaucuag

SEQ ID NO: 505726 - RNA, 19 nt, Human
ggaauggggaggauggagg

SEQ ID NO: 505727 - RNA, 22 nt, Human
gggaggccauaaacaacucaaa

SEQ ID NO: 505728 - RNA, 19 nt, Human
ggguuuguaaaaugccuua

SEQ ID NO: 505729 - RNA, 20 nt, Human
gugaagugucugcuaccugu

SEQ ID NO: 505730 - RNA, 20 nt, Human
guuuuaaggaaaucuacaga

SEQ ID NO: 505731 - RNA, 23 nt, Human
uaaaaugccuuaagggaggccau

SEQ ID NO: 505732 - RNA, 25 nt, Human
uaaauaagauccaacucuuucuguu

SEQ ID NO: 505733 - RNA, 25 nt, Human
uaagaaaaucaucagugcuuaaaga

SEQ ID NO: 505734 - RNA, 22 nt, Human
uaagauccaacucuuucuguug

SEQ ID NO: 505735 - RNA, 21 nt, Human
uaaggaaaucuacagaaggga

SEQ ID NO: 505736 - RNA, 24 nt, Human
uaaggaaaucuacagaagggaauc

SEQ ID NO: 505737 - RNA, 25 nt, Human
uaccaagagcuucacaaagcaaucu

SEQ ID NO: 505738 - RNA, 20 nt, Human
uauaucuccuagcagggaua

SEQ ID NO: 505739 - RNA, 22 nt, Human
uauguaagucagggagccccuc

SEQ ID NO: 505740 - RNA, 27 nt, Human
ucaauacugaaacuuucuucaccuagc

SEQ ID NO: 505741 - RNA, 22 nt, Human
ucaauaucuuucuaauauaggu

SEQ ID NO: 505742 - RNA, 25 nt, Human
ucacagaaacccuggcacuuugagg

SEQ ID NO: 505743 - RNA, 19 nt, Human
ucaccagaacaggcugaaa

SEQ ID NO: 505744 - RNA, 24 nt, Human
ucagucagaucaauaucuuucuaa

SEQ ID NO: 505745 - RNA, 19 nt, Human
ucucuaccaagagcuucac

SEQ ID NO: 505746 - RNA, 21 nt, Human
ucucuaccaagagcuucacaa

SEQ ID NO: 505747 - RNA, 21 nt, Human
ucugcugaucuuuccuuuccg

SEQ ID NO: 505748 - RNA, 22 nt, Human
ugaaaguaauauaugcuacuua

SEQ ID NO: 505749 - RNA, 20 nt, Human
ugaccacacgcagaagaaaa

SEQ ID NO: 505750 - RNA, 24 nt, Human
ugaucuuuccuuuccguuuuccuu

SEQ ID NO: 505751 - RNA, 21 nt, Human
ugcuuccuugugugggccaaa

SEQ ID NO: 505752 - RNA, 22 nt, Human
ugcuuugcauccucauauauaa

SEQ ID NO: 505753 - RNA, 24 nt, Human
ugucaauuacauuacucuucccug

SEQ ID NO: 505754 - RNA, 22 nt, Human
uuacaccuuaaaaugcuuuguu

SEQ ID NO: 505755 - RNA, 23 nt, Human
uuacaccuuaaaaugcuuuguuu

SEQ ID NO: 505756 - RNA, 19 nt, Human
uugaaugcuuugcauccuc

SEQ ID NO: 505757 - RNA, 23 nt, Human
uugaugcuauuaugacacuuaau

SEQ ID NO: 505758 - RNA, 20 nt, Human
uugauggugaagaugagaaa

SEQ ID NO: 505759 - RNA, 19 nt, Human
uuucucaucuuuuacuugg

SEQ ID NO: 505760 - RNA, 21 nt, Human
uuucucaucuuuuacuuggaa

SEQ ID NO: 505761 - RNA, 20 nt, Human
uuuuagguggcaguagcugg

SEQ ID NO: 505762 - RNA, 21 nt, Human
uuuuuuuucuccccacaguua

SEQ ID NO: 505763 - RNA, 23 nt, Human
aagaaggaagaccgagaaaagga

SEQ ID NO: 505764 - RNA, 19 nt, Human
aagcaagaaggaagaccga

SEQ ID NO: 505765 - RNA, 18 nt, Human
aagugcccgccgagcuau

SEQ ID NO: 505766 - RNA, 24 nt, Human
aauguacaugaauauaaaaagugg

SEQ ID NO: 505767 - RNA, 31 nt, Human
agcagcucccggagcgguggggcggggccuu

SEQ ID NO: 505768 - RNA, 22 nt, Human
aggaagaccgagaaaaggaagc

SEQ ID NO: 505769 - RNA, 19 nt, Human
caaaaagagcuuuagucuc

SEQ ID NO: 505770 - RNA, 23 nt, Human
caaaaagagcuuuagucucgaaa

SEQ ID NO: 505771 - RNA, 18 nt, Human
cagcucccggagcggugg

SEQ ID NO: 505772 - RNA, 28 nt, Human
caguaugguuuuccuauguuuaagaucu

SEQ ID NO: 505773 - RNA, 23 nt, Human
cauacaaaaagagcuuuagucuc

SEQ ID NO: 505774 - RNA, 21 nt, Human
ccagcugccgccgcugcugcc

SEQ ID NO: 505775 - RNA, 21 nt, Human
ccagcugccgccgcugcugcc

SEQ ID NO: 505776 - RNA, 22 nt, Human
ccagcugccgccgcugcugccu

SEQ ID NO: 505777 - RNA, 27 nt, Human
cccggaacucugggcgccggccccgga

SEQ ID NO: 505778 - RNA, 21 nt, Human
cccuaaagcaagaaggaagac

SEQ ID NO: 505779 - RNA, 24 nt, Human
ccgcugcugccuuucccucuccug

SEQ ID NO: 505780 - RNA, 18 nt, Human
ccggccccggaagugccc

SEQ ID NO: 505781 - RNA, 20 nt, Human
ccggucccuaaagcaagaag

SEQ ID NO: 505782 - RNA, 20 nt, Human
ccuccagcugccgccgcugc

SEQ ID NO: 505783 - RNA, 19 nt, Human
cggcugaugagcagcuccc

SEQ ID NO: 505784 - RNA, 22 nt, Human
cuccugccugcacccucccgga

SEQ ID NO: 505785 - RNA, 23 nt, Human
cugcucggcccacccgcaucagg

SEQ ID NO: 505786 - RNA, 21 nt, Human
cugcugccuuucccucuccug

SEQ ID NO: 505787 - RNA, 19 nt, Human
gcaggaaguugcggcugau

SEQ ID NO: 505788 - RNA, 22 nt, Human
gcgguggggcggggccuccucu

SEQ ID NO: 505789 - RNA, 21 nt, Human
gcugcugccuuucccucuccu

SEQ ID NO: 505790 - RNA, 18 nt, Human
ggaacucugggcgccggc

SEQ ID NO: 505791 - RNA, 21 nt, Human
ggaacucugggcgccggcccc

SEQ ID NO: 505792 - RNA, 18 nt, Human
gggccuccucuucuccag

SEQ ID NO: 505793 - RNA, 19 nt, Human
uaaagcaagaaggaagacc

SEQ ID NO: 505794 - RNA, 24 nt, Human
uauuuugguucaaggacucuuccg

SEQ ID NO: 505795 - RNA, 21 nt, Human
ucagaacaguaugguuuuccu

SEQ ID NO: 505796 - RNA, 21 nt, Human
uccagcugccgccgcugcugc

SEQ ID NO: 505797 - RNA, 25 nt, Human
ucccggagcgguggggcggggccuu

SEQ ID NO: 505798 - RNA, 19 nt, Human
ucccuaaagcaagaaggaa

SEQ ID NO: 505799 - RNA, 19 nt, Human
ucccucuccugccugcacc

SEQ ID NO: 505800 - RNA, 26 nt, Human
ucggcaggaaguugcggcugaugagc

SEQ ID NO: 505801 - RNA, 19 nt, Human
ucucgaaagaggaauuacc

SEQ ID NO: 505802 - RNA, 23 nt, Human
ugacacacacgcauacaaaaaga

SEQ ID NO: 505803 - RNA, 24 nt, Human
ugagcagcucccggagcggugggg

SEQ ID NO: 505804 - RNA, 20 nt, Human
ugaugagcagcucccggagc

SEQ ID NO: 505805 - RNA, 19 nt, Human
ugcucggcccacccgcauc

SEQ ID NO: 505806 - RNA, 25 nt, Human
uugacacacacgcauacaaaaagag

SEQ ID NO: 505807 - RNA, 18 nt, Human
caaguaauuacacaaguc

SEQ ID NO: 505808 - RNA, 24 nt, Human
cccugccgcgggcacuccccuucu

SEQ ID NO: 505809 - RNA, 21 nt, Human
cugccgcgggcacuccccuuc

SEQ ID NO: 505810 - RNA, 21 nt, Human
guucuucuaauaauaauaaau

SEQ ID NO: 505811 - RNA, 23 nt, Human
uacacaaguaauuacacaagucc

SEQ ID NO: 505812 - RNA, 22 nt, Human
uucagugauuuuaauguguaag

SEQ ID NO: 505813 - RNA, 19 nt, Human
uuucaaugaacccugccgc

SEQ ID NO: 505814 - RNA, 19 nt, Human
accucauccacuaugacaa

SEQ ID NO: 505815 - RNA, 18 nt, Human
agaagggguggcauuuug

SEQ ID NO: 505816 - RNA, 18 nt, Human
agcggagggagagggggg

SEQ ID NO: 505817 - RNA, 19 nt, Human
aggcagggcggucccaggc

SEQ ID NO: 505818 - RNA, 22 nt, Human
agggagagggggggaccgagcc

SEQ ID NO: 505819 - RNA, 21 nt, Human
aucccaucccuugguccccag

SEQ ID NO: 505820 - RNA, 20 nt, Human
auggugguuacagagacugc

SEQ ID NO: 505821 - RNA, 20 nt, Human
cauuuuguucuguuucuuag

SEQ ID NO: 505822 - RNA, 23 nt, Human
ccacuaugacaagucagcuaugc

SEQ ID NO: 505823 - RNA, 21 nt, Human
cccguggcgacggcggccacg

SEQ ID NO: 505824 - RNA, 21 nt, Human
ccuuugguucauuuaacacua

SEQ ID NO: 505825 - RNA, 19 nt, Human
cgggagugcgaagcggagg

SEQ ID NO: 505826 - RNA, 24 nt, Human
cugcgcugcucgcgcccccacacc

SEQ ID NO: 505827 - RNA, 19 nt, Human
cuugcuguuacucccuuga

SEQ ID NO: 505828 - RNA, 20 nt, Human
cuugggguaagggagggaag

SEQ ID NO: 505829 - RNA, 22 nt, Human
gaaaggcagccucgggggcaca

SEQ ID NO: 505830 - RNA, 22 nt, Human
gaccuucccguacccgacggga

SEQ ID NO: 505831 - RNA, 22 nt, Human
gagggagagggggggaccgagc

SEQ ID NO: 505832 - RNA, 22 nt, Human
gggcccgggcugaggggugggg

SEQ ID NO: 505833 - RNA, 23 nt, Human
gggcugaggggugggggagaggc

SEQ ID NO: 505834 - RNA, 20 nt, Human
ggggaccgagcccgggcccg

SEQ ID NO: 505835 - RNA, 19 nt, Human
ggggagaggccgcccugcg

SEQ ID NO: 505836 - RNA, 20 nt, Human
gggggcacaaaggcagguuu

SEQ ID NO: 505837 - RNA, 21 nt, Human
guggaggacgcuuaggaaaca

SEQ ID NO: 505838 - RNA, 18 nt, Human
guuuguuuuguuuaaaaa

SEQ ID NO: 505839 - RNA, 22 nt, Human
uaaaacucaccugggucccaca

SEQ ID NO: 505840 - RNA, 23 nt, Human
uagaguagggaaucccaucccuu

SEQ ID NO: 505841 - RNA, 21 nt, Human
ucccaucccuugguccccagc

SEQ ID NO: 505842 - RNA, 19 nt, Human
ucccauguacaccaaaucc

SEQ ID NO: 505843 - RNA, 19 nt, Human
uccccagcuaaauacugcg

SEQ ID NO: 505844 - RNA, 22 nt, Human
uccccugguuguuagcucugau

SEQ ID NO: 505845 - RNA, 22 nt, Human
ucccuugguccccagcuaaaua

SEQ ID NO: 505846 - RNA, 21 nt, Human
uccuuugguucauuuaacacu

SEQ ID NO: 505847 - RNA, 21 nt, Human
ugaggcagggcggucccaggc

SEQ ID NO: 505848 - RNA, 18 nt, Human
ugaggggugggggagagg

SEQ ID NO: 505849 - RNA, 21 nt, Human
ugcaaauaaccuacaucauua

SEQ ID NO: 505850 - RNA, 23 nt, Human
ugcagaaaaaaggccuuggcuuc

SEQ ID NO: 505851 - RNA, 20 nt, Human
ugcuccagcacuggccuugc

SEQ ID NO: 505852 - RNA, 25 nt, Human
ugcuccagcccagaccucauccacu

SEQ ID NO: 505853 - RNA, 21 nt, Human
uggaaagaguucuagguuggg

SEQ ID NO: 505854 - RNA, 21 nt, Human
uggccuggauggugguuacag

SEQ ID NO: 505855 - RNA, 21 nt, Human
ugggguaagggagggaaggug

SEQ ID NO: 505856 - RNA, 23 nt, Human
ugggguaagggagggaaggugag

SEQ ID NO: 505857 - RNA, 25 nt, Human
uguucuguuucuuagcagcauuguc

SEQ ID NO: 505858 - RNA, 23 nt, Human
uguuuuguuuaaaaaggaaaagc

SEQ ID NO: 505859 - RNA, 21 nt, Human
uuacuugcagaaaaaaggccu

SEQ ID NO: 505860 - RNA, 21 nt, Human
uucccaaaauugauggcagaa

SEQ ID NO: 505861 - RNA, 20 nt, Human
uucucuggaaagaguucuag

SEQ ID NO: 505862 - RNA, 22 nt, Human
uugggguaagggagggaaggug

SEQ ID NO: 505863 - RNA, 21 nt, Human
aaaacccaacgcagcggcccc

SEQ ID NO: 505864 - RNA, 21 nt, Human
aaacaugaauauaaaccacca

SEQ ID NO: 505865 - RNA, 24 nt, Human
aaacaugaauauaaaccaccacac

SEQ ID NO: 505866 - RNA, 20 nt, Human
aaagagccccguccagacag

SEQ ID NO: 505867 - RNA, 24 nt, Human
aaagugcugggauuacagguguga

SEQ ID NO: 505868 - RNA, 18 nt, Human
aaggaggugucaccaggu

SEQ ID NO: 505869 - RNA, 18 nt, Human
aagugcugggauuacagg

SEQ ID NO: 505870 - RNA, 19 nt, Human
aagugcugggauuacaggu

SEQ ID NO: 505871 - RNA, 26 nt, Human
aagugcugggauuacaggugugagcc

SEQ ID NO: 505872 - RNA, 22 nt, Human
acagaacagcccggucagccuc

SEQ ID NO: 505873 - RNA, 18 nt, Human
acagcgcuggcggcagac

SEQ ID NO: 505874 - RNA, 25 nt, Human
accacacacacgcucaccccgggca

SEQ ID NO: 505875 - RNA, 21 nt, Human
accucccucacaggcuccagc

SEQ ID NO: 505876 - RNA, 23 nt, Human
accucggccucccaaagugcugg

SEQ ID NO: 505877 - RNA, 21 nt, Human
agaacaggggcccuggccuuc

SEQ ID NO: 505878 - RNA, 20 nt, Human
agaacccuaaccccuagaac

SEQ ID NO: 505879 - RNA, 21 nt, Human
agagccccguccagacagccc

SEQ ID NO: 505880 - RNA, 22 nt, Human
agccacaggcggaggcucuggg

SEQ ID NO: 505881 - RNA, 20 nt, Human
agcgaggccuggccucccuc

SEQ ID NO: 505882 - RNA, 24 nt, Human
aggccuggccucccucccugccug

SEQ ID NO: 505883 - RNA, 19 nt, Human
aggugccaccugcccgggg

SEQ ID NO: 505884 - RNA, 22 nt, Human
aggugccaccugcccgggguug

SEQ ID NO: 505885 - RNA, 23 nt, Human
aggugugagccacugugccuggc

SEQ ID NO: 505886 - RNA, 23 nt, Human
aguagcugggauuacaggcaugu

SEQ ID NO: 505887 - RNA, 25 nt, Human
agucuggucucaaacuccugaccuc

SEQ ID NO: 505888 - RNA, 21 nt, Human
agugcaauggcgugaucuuag

SEQ ID NO: 505889 - RNA, 24 nt, Human
agugcaauggcgugaucuuagcuc

SEQ ID NO: 505890 - RNA, 19 nt, Human
aucccacacggccuggcug

SEQ ID NO: 505891 - RNA, 20 nt, Human
auggaacagaagaugcgggc

SEQ ID NO: 505892 - RNA, 20 nt, Human
augggguuucuccauguugg

SEQ ID NO: 505893 - RNA, 21 nt, Human
augggguuucuccauguuggu

SEQ ID NO: 505894 - RNA, 24 nt, Human
augggguuucuccauguuggucag

SEQ ID NO: 505895 - RNA, 19 nt, Human
auuuuaguagagauggggu

SEQ ID NO: 505896 - RNA, 24 nt, Human
caaagugcugggauuacaggugug

SEQ ID NO: 505897 - RNA, 22 nt, Human
caagcaauucuccugccucagc

SEQ ID NO: 505898 - RNA, 18 nt, Human
cacaaggccagccacagc

SEQ ID NO: 505899 - RNA, 22 nt, Human
cacaaggccagccacagccuag

SEQ ID NO: 505900 - RNA, 19 nt, Human
cacagccuagagguccuuc

SEQ ID NO: 505901 - RNA, 21 nt, Human
caccacaaccucugccuccca

SEQ ID NO: 505902 - RNA, 22 nt, Human
caccacaaccucugccucccag

SEQ ID NO: 505903 - RNA, 19 nt, Human
cacucgaaugcagcagggc

SEQ ID NO: 505904 - RNA, 21 nt, Human
cagccaguccugcugcaggca

SEQ ID NO: 505905 - RNA, 21 nt, Human
ccaaagugcugggauuacagg

SEQ ID NO: 505906 - RNA, 21 nt, Human
ccaaagugcugggauuacagg

SEQ ID NO: 505907 - RNA, 24 nt, Human
ccaaagugcugggauuacaggugu

SEQ ID NO: 505908 - RNA, 23 nt, Human
ccacaaccucugccucccagguu

SEQ ID NO: 505909 - RNA, 24 nt, Human
ccacaaccucugccucccagguuc

SEQ ID NO: 505910 - RNA, 20 nt, Human
ccaccacgccuggcuaauuu

SEQ ID NO: 505911 - RNA, 23 nt, Human
ccagacagcccuguuaacaccug

SEQ ID NO: 505912 - RNA, 21 nt, Human
ccaggcccacuccaagcccug

SEQ ID NO: 505913 - RNA, 22 nt, Human
ccauguuggucagucuggucuc

SEQ ID NO: 505914 - RNA, 26 nt, Human
cccacagcaggggcagccaguccugc

SEQ ID NO: 505915 - RNA, 18 nt, Human
cccagauugagggggaag

SEQ ID NO: 505916 - RNA, 23 nt, Human
cccagguucaagcaauucuccug

SEQ ID NO: 505917 - RNA, 22 nt, Human
ccccccacagcaggggcagcca

SEQ ID NO: 505918 - RNA, 21 nt, Human
ccccggccgcccagcugagug

SEQ ID NO: 505919 - RNA, 19 nt, Human
ccccgggcaauccaggccu

SEQ ID NO: 505920 - RNA, 23 nt, Human
cccgaagcgacacuucccuggca

SEQ ID NO: 505921 - RNA, 23 nt, Human
cccgaguagcugggauuacaggc

SEQ ID NO: 505922 - RNA, 24 nt, Human
cccgaguagcugggauuacaggca

SEQ ID NO: 505923 - RNA, 21 nt, Human
cccuaagccugccccggccgc

SEQ ID NO: 505924 - RNA, 23 nt, Human
ccgaguagcugggauuacaggca

SEQ ID NO: 505925 - RNA, 24 nt, Human
ccgaguagcugggauuacaggcau

SEQ ID NO: 505926 - RNA, 25 nt, Human
ccgccaccucccucacaggcuccag

SEQ ID NO: 505927 - RNA, 24 nt, Human
ccucccagguucaagcaauucucc

SEQ ID NO: 505928 - RNA, 19 nt, Human
ccucccucccugccugucc

SEQ ID NO: 505929 - RNA, 20 nt, Human
ccucucguugcccaggcugg

SEQ ID NO: 505930 - RNA, 21 nt, Human
ccucucguugcccaggcugga

SEQ ID NO: 505931 - RNA, 23 nt, Human
ccucucguugcccaggcuggagu

SEQ ID NO: 505932 - RNA, 24 nt, Human
ccugaccucaggugaucuggccac

SEQ ID NO: 505933 - RNA, 23 nt, Human
ccugccucagccucccgaguagc

SEQ ID NO: 505934 - RNA, 23 nt, Human
ccugcugcaggcagaguuucagu

SEQ ID NO: 505935 - RNA, 19 nt, Human
ccuggcacaggaguucugg

SEQ ID NO: 505936 - RNA, 21 nt, Human
ccuggcacaggaguucuggaa

SEQ ID NO: 505937 - RNA, 22 nt, Human
ccuuuggggaaagaacccuaac

SEQ ID NO: 505938 - RNA, 18 nt, Human
cgcccuucccucccgccu

SEQ ID NO: 505939 - RNA, 21 nt, Human
cgggcaaaacccaacgcagcg

SEQ ID NO: 505940 - RNA, 20 nt, Human
cguugcccaggcuggagugc

SEQ ID NO: 505941 - RNA, 21 nt, Human
cuagagguccuuccugguccc

SEQ ID NO: 505942 - RNA, 19 nt, Human
cucacaggcuccagcaggu

SEQ ID NO: 505943 - RNA, 24 nt, Human
cucaccacaaccucugccucccag

SEQ ID NO: 505944 - RNA, 24 nt, Human
cucagccucccgaguagcugggau

SEQ ID NO: 505945 - RNA, 24 nt, Human
cuccauguuggucagucuggucuc

SEQ ID NO: 505946 - RNA, 18 nt, Human
cucccucccugccugucc

SEQ ID NO: 505947 - RNA, 21 nt, Human
cuccugccuccaggaacaagg

SEQ ID NO: 505948 - RNA, 24 nt, Human
cucguugcccaggcuggagugcaa

SEQ ID NO: 505949 - RNA, 19 nt, Human
cucucguugcccaggcugg

SEQ ID NO: 505950 - RNA, 20 nt, Human
cucucguugcccaggcugga

SEQ ID NO: 505951 - RNA, 21 nt, Human
cucucguugcccaggcuggag

SEQ ID NO: 505952 - RNA, 19 nt, Human
cugaaccccccacagcagg

SEQ ID NO: 505953 - RNA, 22 nt, Human
cugccaccucccacacguccgu

SEQ ID NO: 505954 - RNA, 23 nt, Human
cugccucagccucccgaguagcu

SEQ ID NO: 505955 - RNA, 21 nt, Human
cugcggacccgcggguacccu

SEQ ID NO: 505956 - RNA, 18 nt, Human
cugugcccuaagccugcc

SEQ ID NO: 505957 - RNA, 22 nt, Human
cuucccaccacacacacgcuca

SEQ ID NO: 505958 - RNA, 24 nt, Human
gacccccugucccggagucgccuu

SEQ ID NO: 505959 - RNA, 26 nt, Human
gacccgccaccucccucacaggcucc

SEQ ID NO: 505960 - RNA, 24 nt, Human
gaccucaggugaucuggccaccuc

SEQ ID NO: 505961 - RNA, 24 nt, Human
gagaugggguuucuccauguuggu

SEQ ID NO: 505962 - RNA, 23 nt, Human
gaggccuggccucccucccugcc

SEQ ID NO: 505963 - RNA, 25 nt, Human
gaguagcugggauuacaggcaugug

SEQ ID NO: 505964 - RNA, 18 nt, Human
gauuacaggcaugugcca

SEQ ID NO: 505965 - RNA, 18 nt, Human
gauuacaggugugagcca

SEQ ID NO: 505966 - RNA, 21 nt, Human
gauuacaggugugagccacug

SEQ ID NO: 505967 - RNA, 24 nt, Human
gauuacaggugugagccacugugc

SEQ ID NO: 505968 - RNA, 21 nt, Human
gcacaaggccagccacagccu

SEQ ID NO: 505969 - RNA, 21 nt, Human
gcacaggaguucuggagccac

SEQ ID NO: 505970 - RNA, 24 nt, Human
gcccaggcuggagugcaauggcgu

SEQ ID NO: 505971 - RNA, 21 nt, Human
gcccgggguugggggacacuc

SEQ ID NO: 505972 - RNA, 22 nt, Human
gcccgggguugggggacacucg

SEQ ID NO: 505973 - RNA, 21 nt, Human
gccgagacccccugucccgga

SEQ ID NO: 505974 - RNA, 22 nt, Human
gccuggcacaggaguucuggag

SEQ ID NO: 505975 - RNA, 18 nt, Human
gcggacccgcggguaccc

SEQ ID NO: 505976 - RNA, 18 nt, Human
gcggaggcucuggggaaa

SEQ ID NO: 505977 - RNA, 19 nt, Human
gcuggagugcaauggcgug

SEQ ID NO: 505978 - RNA, 18 nt, Human
ggagaggggcagggagga

SEQ ID NO: 505979 - RNA, 19 nt, Human
ggauuacaggcaugugcca

SEQ ID NO: 505980 - RNA, 19 nt, Human
ggcagggaggacgcugagg

SEQ ID NO: 505981 - RNA, 21 nt, Human
ggccuggccucccucccugcc

SEQ ID NO: 505982 - RNA, 22 nt, Human
ggcuggagugcaauggcgugau

SEQ ID NO: 505983 - RNA, 25 nt, Human
gggcuuuggggaaccggaugcaguc

SEQ ID NO: 505984 - RNA, 20 nt, Human
ggggacacucgaaugcagca

SEQ ID NO: 505985 - RNA, 22 nt, Human
gggguuucuccauguuggucag

SEQ ID NO: 505986 - RNA, 19 nt, Human
gggucugcacaaggccagc

SEQ ID NO: 505987 - RNA, 21 nt, Human
ggucccaggcccacuccaagc

SEQ ID NO: 505988 - RNA, 20 nt, Human
guagcugggauuacaggcau

SEQ ID NO: 505989 - RNA, 22 nt, Human
gucaccuaugcaggcuguggcc

SEQ ID NO: 505990 - RNA, 20 nt, Human
gucugcacaaggccagccac

SEQ ID NO: 505991 - RNA, 23 nt, Human
uaacugugcccuaagccugcccc

SEQ ID NO: 505992 - RNA, 21 nt, Human
uaaugaugggcccaucucucc

SEQ ID NO: 505993 - RNA, 24 nt, Human
uaauuuuguauuuuaguagagaug

SEQ ID NO: 505994 - RNA, 27 nt, Human
uacagaacagcccggucagccucgucc

SEQ ID NO: 505995 - RNA, 22 nt, Human
uacaggcaugugccaccacgcc

SEQ ID NO: 505996 - RNA, 22 nt, Human
uacaggugugagccacugugcc

SEQ ID NO: 505997 - RNA, 23 nt, Human
uacaggugugagccacugugccu

SEQ ID NO: 505998 - RNA, 24 nt, Human
uagaacaggggcccuggccuuccc

SEQ ID NO: 505999 - RNA, 18 nt, Human
uagaccccagauugaggg

SEQ ID NO: 506000 - RNA, 23 nt, Human
uagcucaccacaaccucugccuc

SEQ ID NO: 506001 - RNA, 24 nt, Human
uaguagagaugggguuucuccaug

SEQ ID NO: 506002 - RNA, 24 nt, Human
ucaccacaaccucugccucccagg

SEQ ID NO: 506003 - RNA, 25 nt, Human
ucaccacaaccucugccucccaggu

SEQ ID NO: 506004 - RNA, 20 nt, Human
ucagccucccgaguagcugg

SEQ ID NO: 506005 - RNA, 18 nt, Human
uccacaaacaugaauaua

SEQ ID NO: 506006 - RNA, 22 nt, Human
uccacaaacaugaauauaaacc

SEQ ID NO: 506007 - RNA, 27 nt, Human
uccacaaacaugaauauaaaccaccac

SEQ ID NO: 506008 - RNA, 21 nt, Human
uccagacagcccuguuaacac

SEQ ID NO: 506009 - RNA, 23 nt, Human
ucccaaagugcugggauuacagg

SEQ ID NO: 506010 - RNA, 19 nt, Human
ucccaggcccacuccaagc

SEQ ID NO: 506011 - RNA, 22 nt, Human
ucccaggcccacuccaagcccu

SEQ ID NO: 506012 - RNA, 21 nt, Human
ucccaggcccacuccaagccu

SEQ ID NO: 506013 - RNA, 21 nt, Human
ucccagguucaagcaauucuc

SEQ ID NO: 506014 - RNA, 24 nt, Human
ucccagguucaagcaauucuccug

SEQ ID NO: 506015 - RNA, 24 nt, Human
ucccgaguagcugggauuacaggc

SEQ ID NO: 506016 - RNA, 18 nt, Human
ucccggagucgccuggcc

SEQ ID NO: 506017 - RNA, 22 nt, Human
ucccucucguugcccaggcugg

SEQ ID NO: 506018 - RNA, 23 nt, Human
ucccucucguugcccaggcugga

SEQ ID NO: 506019 - RNA, 20 nt, Human
uccuggucccaggcccacuc

SEQ ID NO: 506020 - RNA, 22 nt, Human
uccuuuggggaaagaacccuaa

SEQ ID NO: 506021 - RNA, 22 nt, Human
ucgcggaagccaggucuuccca

SEQ ID NO: 506022 - RNA, 21 nt, Human
ucggaggcuggcgccugccac

SEQ ID NO: 506023 - RNA, 18 nt, Human
ucggccucccaaagugcu

SEQ ID NO: 506024 - RNA, 22 nt, Human
ucuccagugccgcccuucccuc

SEQ ID NO: 506025 - RNA, 24 nt, Human
ucuccugccucagccucccgagua

SEQ ID NO: 506026 - RNA, 18 nt, Human
ugaaaggagaaaugucuu

SEQ ID NO: 506027 - RNA, 24 nt, Human
ugaccucaggugaucuggccaccu

SEQ ID NO: 506028 - RNA, 25 nt, Human
ugaccucaggugaucuggccaccuc

SEQ ID NO: 506029 - RNA, 23 nt, Human
ugaccuggcugagggaaagaggu

SEQ ID NO: 506030 - RNA, 21 nt, Human
ugagggggaagcaaaagagcc

SEQ ID NO: 506031 - RNA, 21 nt, Human
ugagugggacugaaggaggug

SEQ ID NO: 506032 - RNA, 24 nt, Human
ugaucuggccaccucggccuccca

SEQ ID NO: 506033 - RNA, 18 nt, Human
ugcccaggcuggagugca

SEQ ID NO: 506034 - RNA, 21 nt, Human
ugcccaggcuggagugcaaug

SEQ ID NO: 506035 - RNA, 21 nt, Human
ugcccaggcuggagugcaaug

SEQ ID NO: 506036 - RNA, 24 nt, Human
ugcccaggcuggagugcaauggcg

SEQ ID NO: 506037 - RNA, 24 nt, Human
ugccucagccucccgaguagcugg

SEQ ID NO: 506038 - RNA, 24 nt, Human
ugcugggauuacaggugugagcca

SEQ ID NO: 506039 - RNA, 19 nt, Human
uggaacagaagaugcgggc

SEQ ID NO: 506040 - RNA, 19 nt, Human
uggagugcaauggcgugau

SEQ ID NO: 506041 - RNA, 23 nt, Human
uggagugcaauggcgugaucuua

SEQ ID NO: 506042 - RNA, 24 nt, Human
uggagugcaauggcgugaucuuag

SEQ ID NO: 506043 - RNA, 19 nt, Human
uggcccaaggucaucacag

SEQ ID NO: 506044 - RNA, 20 nt, Human
uggccccuaacugugcccuu

SEQ ID NO: 506045 - RNA, 24 nt, Human
uggcgugaucuuagcucaccacaa

SEQ ID NO: 506046 - RNA, 19 nt, Human
ugggaugcuggccccuaau

SEQ ID NO: 506047 - RNA, 18 nt, Human
ugggauuacaggcaugug

SEQ ID NO: 506048 - RNA, 21 nt, Human
ugggauuacaggcaugugcca

SEQ ID NO: 506049 - RNA, 22 nt, Human
ugggauuacaggcaugugccac

SEQ ID NO: 506050 - RNA, 24 nt, Human
ugggauuacaggcaugugccacca

SEQ ID NO: 506051 - RNA, 18 nt, Human
ugggauuacaggugugag

SEQ ID NO: 506052 - RNA, 21 nt, Human
ugggauuacaggugugagcca

SEQ ID NO: 506053 - RNA, 22 nt, Human
ugggauuacaggugugagccac

SEQ ID NO: 506054 - RNA, 22 nt, Human
ugggauuacaggugugagccac

SEQ ID NO: 506055 - RNA, 22 nt, Human
ugggauuacaggugugagccac

SEQ ID NO: 506056 - RNA, 24 nt, Human
ugggauuacaggugugagccacug

SEQ ID NO: 506057 - RNA, 19 nt, Human
ugggguuucuccauguugg

SEQ ID NO: 506058 - RNA, 24 nt, Human
uggucagucuggucucaaacuccu

SEQ ID NO: 506059 - RNA, 21 nt, Human
ugucaccaggugccaccugcc

SEQ ID NO: 506060 - RNA, 19 nt, Human
uuacuggagcugaauuccc

SEQ ID NO: 506061 - RNA, 25 nt, Human
uuagcucaccacaaccucugccucc

SEQ ID NO: 506062 - RNA, 18 nt, Human
uuaguagagaugggguuu

SEQ ID NO: 506063 - RNA, 24 nt, Human
uuaguagagaugggguuucuccau

SEQ ID NO: 506064 - RNA, 21 nt, Human
uucaagcaauucuccugccuc

SEQ ID NO: 506065 - RNA, 24 nt, Human
uucaagcaauucuccugccucagc

SEQ ID NO: 506066 - RNA, 19 nt, Human
uucuggagccacgguccug

SEQ ID NO: 506067 - RNA, 18 nt, Human
uugcccaggcuggagugc

SEQ ID NO: 506068 - RNA, 18 nt, Human
uuucuccauguuggucag

SEQ ID NO: 506069 - RNA, 19 nt, Human
uuuuguauuuuaguagaga

SEQ ID NO: 506070 - RNA, 20 nt, Human
uuuuuuuuuuugaaacagag

SEQ ID NO: 506071 - RNA, 23 nt, Human
uuuuuuuuuuuugaaacagaguu

SEQ ID NO: 506072 - RNA, 18 nt, Human
uuuuuuuuuuuuuuuuug

SEQ ID NO: 506073 - RNA, 19 nt, Human
aaacacaugaauccaauga

SEQ ID NO: 506074 - RNA, 23 nt, Human
aaacaucacgcauuuuaaaaaua

SEQ ID NO: 506075 - RNA, 24 nt, Human
aaggagguuuuuucacauuugguu

SEQ ID NO: 506076 - RNA, 21 nt, Human
aaucagguguggaaggagcug

SEQ ID NO: 506077 - RNA, 21 nt, Human
aauuuucuuuuuaaacauagc

SEQ ID NO: 506078 - RNA, 20 nt, Human
acaacuaggcaguaugugug

SEQ ID NO: 506079 - RNA, 23 nt, Human
acaauuccuugugacuggcccag

SEQ ID NO: 506080 - RNA, 21 nt, Human
acacaaugggaugaaggaggu

SEQ ID NO: 506081 - RNA, 18 nt, Human
acacucccagaacccaga

SEQ ID NO: 506082 - RNA, 22 nt, Human
acagaacacucccagaacccag

SEQ ID NO: 506083 - RNA, 25 nt, Human
accaggcacuguaugcgcccauccu

SEQ ID NO: 506084 - RNA, 18 nt, Human
accccauggaagccucga

SEQ ID NO: 506085 - RNA, 24 nt, Human
accugccacccugaaccgaaacgg

SEQ ID NO: 506086 - RNA, 18 nt, Human
accugcugugccuccuuc

SEQ ID NO: 506087 - RNA, 22 nt, Human
accuuggugccucgugugccca

SEQ ID NO: 506088 - RNA, 25 nt, Human
acgcaaccagggccggcugggagcc

SEQ ID NO: 506089 - RNA, 21 nt, Human
acgugaagcuaggacuccugc

SEQ ID NO: 506090 - RNA, 23 nt, Human
agaacacucccagaacccagaau

SEQ ID NO: 506091 - RNA, 21 nt, Human
agaggaaggaggaguucagag

SEQ ID NO: 506092 - RNA, 22 nt, Human
agaggaaggaggaguucagagg

SEQ ID NO: 506093 - RNA, 19 nt, Human
agccucgacgccauacccc

SEQ ID NO: 506094 - RNA, 24 nt, Human
agcugcuucgagcagcgggaaugu

SEQ ID NO: 506095 - RNA, 18 nt, Human
aggcaaggcugacauaua

SEQ ID NO: 506096 - RNA, 19 nt, Human
agggauucuuuuuuuuuuu

SEQ ID NO: 506097 - RNA, 25 nt, Human
agggauucuuuuuuuuuuuuuuuuu

SEQ ID NO: 506098 - RNA, 20 nt, Human
agugucccugugaacgcucu

SEQ ID NO: 506099 - RNA, 22 nt, Human
auaaaacacaugaauccaauga

SEQ ID NO: 506100 - RNA, 18 nt, Human
auguaagaggcacagaac

SEQ ID NO: 506101 - RNA, 23 nt, Human
caaacucugaggagccucccagg

SEQ ID NO: 506102 - RNA, 21 nt, Human
caacacacacccuuggcccuc

SEQ ID NO: 506103 - RNA, 23 nt, Human
caccaggcacuguaugcgcccau

SEQ ID NO: 506104 - RNA, 19 nt, Human
cacccugaaccgaaacggc

SEQ ID NO: 506105 - RNA, 22 nt, Human
caccugccacccugaaccgaaa

SEQ ID NO: 506106 - RNA, 26 nt, Human
caccuggaacacggguugugcacaaa

SEQ ID NO: 506107 - RNA, 22 nt, Human
cagaaggaagcuggccuccccc

SEQ ID NO: 506108 - RNA, 22 nt, Human
cagaaggaagcuggccuccccc

SEQ ID NO: 506109 - RNA, 21 nt, Human
cagauaaaacacaugaaucca

SEQ ID NO: 506110 - RNA, 27 nt, Human
cagcagacaaacucugaggagccuccc

SEQ ID NO: 506111 - RNA, 19 nt, Human
caguccgcagcucccugcc

SEQ ID NO: 506112 - RNA, 18 nt, Human
cauaaaacaucacgcauu

SEQ ID NO: 506113 - RNA, 20 nt, Human
caugaauccaaugaccuucc

SEQ ID NO: 506114 - RNA, 21 nt, Human
ccacccgaucucacgauggca

SEQ ID NO: 506115 - RNA, 21 nt, Human
ccagacagugucccugugaac

SEQ ID NO: 506116 - RNA, 21 nt, Human
ccauaccccagugcuggacac

SEQ ID NO: 506117 - RNA, 19 nt, Human
ccauggaagccucgacgcc

SEQ ID NO: 506118 - RNA, 25 nt, Human
cccagaacccagaaucugcugucau

SEQ ID NO: 506119 - RNA, 18 nt, Human
cccauccugucagaagga

SEQ ID NO: 506120 - RNA, 23 nt, Human
ccccaccccauggaagccucgac

SEQ ID NO: 506121 - RNA, 23 nt, Human
ccccagacagugucccugugaac

SEQ ID NO: 506122 - RNA, 24 nt, Human
cccccuuuggcuuagacaacacaa

SEQ ID NO: 506123 - RNA, 19 nt, Human
ccccugaccucaggggcuc

SEQ ID NO: 506124 - RNA, 20 nt, Human
cccgacacuugagcuccucc

SEQ ID NO: 506125 - RNA, 19 nt, Human
cccuccaccaccucagcug

SEQ ID NO: 506126 - RNA, 21 nt, Human
ccucacagcugaaaugcugcc

SEQ ID NO: 506127 - RNA, 18 nt, Human
ccucaggggcucccuccc

SEQ ID NO: 506128 - RNA, 21 nt, Human
cgcacaguggcugcuagacac

SEQ ID NO: 506129 - RNA, 20 nt, Human
cggccccugaccucaggggc

SEQ ID NO: 506130 - RNA, 24 nt, Human
cggccccugaccucaggggcuccc

SEQ ID NO: 506131 - RNA, 22 nt, Human
cuaauaccuaaaaaauggacac

SEQ ID NO: 506132 - RNA, 23 nt, Human
cuaauaccuaaaaaauggacaca

SEQ ID NO: 506133 - RNA, 22 nt, Human
cucccuccaccaccucagcugg

SEQ ID NO: 506134 - RNA, 19 nt, Human
cugaauacaauggucauaa

SEQ ID NO: 506135 - RNA, 24 nt, Human
cugacacacggagagucacaggcu

SEQ ID NO: 506136 - RNA, 23 nt, Human
cuggacaccugccacccugaacc

SEQ ID NO: 506137 - RNA, 23 nt, Human
cugggccuugcugcgggcaggug

SEQ ID NO: 506138 - RNA, 18 nt, Human
cuuacauaaccaucagcu

SEQ ID NO: 506139 - RNA, 23 nt, Human
cuugcacugcacccccagacagu

SEQ ID NO: 506140 - RNA, 20 nt, Human
gacacaauuucauaaaacau

SEQ ID NO: 506141 - RNA, 18 nt, Human
gacuccugccugcuuccc

SEQ ID NO: 506142 - RNA, 19 nt, Human
gcacugugccuggcacaug

SEQ ID NO: 506143 - RNA, 19 nt, Human
gcccagcacugugccuggc

SEQ ID NO: 506144 - RNA, 23 nt, Human
gccgcagcaacuuggccggcccg

SEQ ID NO: 506145 - RNA, 20 nt, Human
gcugacguguggugaaaugu

SEQ ID NO: 506146 - RNA, 20 nt, Human
gcugggccuugcugcgggca

SEQ ID NO: 506147 - RNA, 21 nt, Human
ggcagguggcccggaccuugg

SEQ ID NO: 506148 - RNA, 25 nt, Human
ggcuauacagcugcuucgagcagcg

SEQ ID NO: 506149 - RNA, 19 nt, Human
ggugacaggucugccggcu

SEQ ID NO: 506150 - RNA, 21 nt, Human
gugaagcuaggacuccugccu

SEQ ID NO: 506151 - RNA, 24 nt, Human
gugcuggacaccugccacccugaa

SEQ ID NO: 506152 - RNA, 23 nt, Human
guuaagaaguuaagacaaccauu

SEQ ID NO: 506153 - RNA, 22 nt, Human
uaaaaaccugagaagucuaacu

SEQ ID NO: 506154 - RNA, 18 nt, Human
uaaagagagaccaugagg

SEQ ID NO: 506155 - RNA, 25 nt, Human
uaaauaaaaaccugagaagucuaac

SEQ ID NO: 506156 - RNA, 19 nt, Human
uaaauauguacauuccacu

SEQ ID NO: 506157 - RNA, 26 nt, Human
uaacgcacucacacaaccugaaguua

SEQ ID NO: 506158 - RNA, 22 nt, Human
uaagacaaccauuuuuacagau

SEQ ID NO: 506159 - RNA, 18 nt, Human
uacacauuuccuauuuga

SEQ ID NO: 506160 - RNA, 19 nt, Human
uacaggugugccgccucag

SEQ ID NO: 506161 - RNA, 19 nt, Human
uccacaauuuggucacuac

SEQ ID NO: 506162 - RNA, 24 nt, Human
uccacaauuuggucacuacauuug

SEQ ID NO: 506163 - RNA, 18 nt, Human
uccacaugucaugaaaca

SEQ ID NO: 506164 - RNA, 22 nt, Human
uccacaugucaugaaacaccaa

SEQ ID NO: 506165 - RNA, 21 nt, Human
ucccagaacccagaaucugcu

SEQ ID NO: 506166 - RNA, 22 nt, Human
uccgcagacauuuugguuugaa

SEQ ID NO: 506167 - RNA, 21 nt, Human
ucugaacaaggcaaggcugac

SEQ ID NO: 506168 - RNA, 18 nt, Human
ucuggguguuuccugguc

SEQ ID NO: 506169 - RNA, 18 nt, Human
ucuguaacagcaccagcu

SEQ ID NO: 506170 - RNA, 21 nt, Human
ucuuccacaauuuggucacua

SEQ ID NO: 506171 - RNA, 18 nt, Human
ugaaaaugugacccauuu

SEQ ID NO: 506172 - RNA, 19 nt, Human
ugaaaugcugccuccgccg

SEQ ID NO: 506173 - RNA, 20 nt, Human
ugaaauguuacagagagccc

SEQ ID NO: 506174 - RNA, 18 nt, Human
ugaaccgaaacggccccu

SEQ ID NO: 506175 - RNA, 23 nt, Human
ugaacgcucucaucaaagguucu

SEQ ID NO: 506176 - RNA, 24 nt, Human
ugaacugaaaggcaucauuacaaa

SEQ ID NO: 506177 - RNA, 21 nt, Human
ugaagcuguguguucggggaa

SEQ ID NO: 506178 - RNA, 20 nt, Human
ugacagaaaucucuuccaca

SEQ ID NO: 506179 - RNA, 22 nt, Human
ugacagcugaaagcaaaccugu

SEQ ID NO: 506180 - RNA, 23 nt, Human
ugacagcugaaagcaaaccuguu

SEQ ID NO: 506181 - RNA, 21 nt, Human
ugaccucaggggcucccucca

SEQ ID NO: 506182 - RNA, 22 nt, Human
ugagaagucuaacgugaagcua

SEQ ID NO: 506183 - RNA, 23 nt, Human
ugauuacagagaguaucaaacug

SEQ ID NO: 506184 - RNA, 24 nt, Human
ugcaagugacagcugaaagcaaac

SEQ ID NO: 506185 - RNA, 18 nt, Human
ugcacaaaucacaccagg

SEQ ID NO: 506186 - RNA, 21 nt, Human
ugccaaacaccaauuuucuuu

SEQ ID NO: 506187 - RNA, 24 nt, Human
ugccuccuucuccgcagaugcucu

SEQ ID NO: 506188 - RNA, 18 nt, Human
uggacgcaaccagggccg

SEQ ID NO: 506189 - RNA, 22 nt, Human
uggcacaugguggauacucagg

SEQ ID NO: 506190 - RNA, 19 nt, Human
ugggaagagccauccggaa

SEQ ID NO: 506191 - RNA, 21 nt, Human
ugucagaaggaagcuggccuc

SEQ ID NO: 506192 - RNA, 20 nt, Human
uguguucggggaaagguugc

SEQ ID NO: 506193 - RNA, 20 nt, Human
uguuccguuugccaaacacc

SEQ ID NO: 506194 - RNA, 22 nt, Human
uuaaaaauacaaaugagguaua

SEQ ID NO: 506195 - RNA, 20 nt, Human
uuaaauaaaaaccugagaag

SEQ ID NO: 506196 - RNA, 30 nt, Human
uuacagauaaaacacaugaauccaaugacc

SEQ ID NO: 506197 - RNA, 22 nt, Human
uuagacaguucccgacacuuga

SEQ ID NO: 506198 - RNA, 23 nt, Human
uuccuggucugcaguccgcagcu

SEQ ID NO: 506199 - RNA, 24 nt, Human
uuucuuuuuaaacauagcuuguga

SEQ ID NO: 506200 - RNA, 24 nt, Human
uuuucugccauaucuaauaccuaa

SEQ ID NO: 506201 - RNA, 20 nt, Human
uuuuuuuuuuuuuuuuuaac

SEQ ID NO: 506202 - RNA, 19 nt, Human
aaagcccuuacaaggguuc

SEQ ID NO: 506203 - RNA, 18 nt, Human
aagccccaagccccagag

SEQ ID NO: 506204 - RNA, 21 nt, Human
aaggaacuucugagggcaguc

SEQ ID NO: 506205 - RNA, 20 nt, Human
aaggaagaggcugggcacag

SEQ ID NO: 506206 - RNA, 20 nt, Human
aagggagaauuagggaggag

SEQ ID NO: 506207 - RNA, 19 nt, Human
acuggagcagaaaggcaca

SEQ ID NO: 506208 - RNA, 20 nt, Human
agaagcacagaaagcuggcg

SEQ ID NO: 506209 - RNA, 22 nt, Human
agagggucuuugggugccugca

SEQ ID NO: 506210 - RNA, 19 nt, Human
agcugcuggccccacaccc

SEQ ID NO: 506211 - RNA, 22 nt, Human
aggcagaagcacagaaagcugg

SEQ ID NO: 506212 - RNA, 22 nt, Human
aggcugggcacagagggucuuu

SEQ ID NO: 506213 - RNA, 24 nt, Human
agguguaggaaauuuugagacugg

SEQ ID NO: 506214 - RNA, 19 nt, Human
auaauccuggcagcccggg

SEQ ID NO: 506215 - RNA, 24 nt, Human
auccugagaagccccaagccccag

SEQ ID NO: 506216 - RNA, 21 nt, Human
auccuggcagcccggggucug

SEQ ID NO: 506217 - RNA, 20 nt, Human
caaacuggugucugcccccc

SEQ ID NO: 506218 - RNA, 21 nt, Human
caaggaagaggcugggcacag

SEQ ID NO: 506219 - RNA, 23 nt, Human
cacaaccucaaaggccuuguggg

SEQ ID NO: 506220 - RNA, 22 nt, Human
cacccuggacaaggaacuucug

SEQ ID NO: 506221 - RNA, 22 nt, Human
cacugugggugcccacccugga

SEQ ID NO: 506222 - RNA, 22 nt, Human
cagaaagcuggcguugaaacca

SEQ ID NO: 506223 - RNA, 26 nt, Human
cagcaggucuccugccuagcccuguc

SEQ ID NO: 506224 - RNA, 25 nt, Human
ccaagccccagagccagaguuucuc

SEQ ID NO: 506225 - RNA, 26 nt, Human
ccagauauaccagccacagucacaac

SEQ ID NO: 506226 - RNA, 18 nt, Human
ccaguccccaccagcugc

SEQ ID NO: 506227 - RNA, 25 nt, Human
cccaaugaggagcagcaggguaccc

SEQ ID NO: 506228 - RNA, 18 nt, Human
ccccccaagagauccccc

SEQ ID NO: 506229 - RNA, 19 nt, Human
ccccccaagagaucccccc

SEQ ID NO: 506230 - RNA, 18 nt, Human
ccugcuuccguuuuccuu

SEQ ID NO: 506231 - RNA, 25 nt, Human
ccuggagcuaccaggcaagaacccu

SEQ ID NO: 506232 - RNA, 23 nt, Human
cgagaacucaaggaagaggcugg

SEQ ID NO: 506233 - RNA, 19 nt, Human
cucacucuaguccugaggc

SEQ ID NO: 506234 - RNA, 19 nt, Human
cugagaagccccaagcccc

SEQ ID NO: 506235 - RNA, 23 nt, Human
cuggguccuggagcuaccaggca

SEQ ID NO: 506236 - RNA, 21 nt, Human
cuuuagaucagauguguugcu

SEQ ID NO: 506237 - RNA, 20 nt, Human
gaaaccaguccccaccagcu

SEQ ID NO: 506238 - RNA, 20 nt, Human
gagccagucuuuagaucaga

SEQ ID NO: 506239 - RNA, 18 nt, Human
gcacagagggucuuuggg

SEQ ID NO: 506240 - RNA, 23 nt, Human
gcagcccggggucuggagccagu

SEQ ID NO: 506241 - RNA, 19 nt, Human
gccacagggucccuggcuc

SEQ ID NO: 506242 - RNA, 21 nt, Human
gccccuggcugguaccaucuc

SEQ ID NO: 506243 - RNA, 21 nt, Human
ggaagaggcugggcacagagg

SEQ ID NO: 506244 - RNA, 20 nt, Human
ggcagcccggggucuggagc

SEQ ID NO: 506245 - RNA, 19 nt, Human
ggucaugcuugccccuggc

SEQ ID NO: 506246 - RNA, 18 nt, Human
ggugccugcagagcuggg

SEQ ID NO: 506247 - RNA, 26 nt, Human
gucuuugggugccugcagagcuggcc

SEQ ID NO: 506248 - RNA, 18 nt, Human
uaccagccacagucacaa

SEQ ID NO: 506249 - RNA, 24 nt, Human
uaccagccacagucacaaccucaa

SEQ ID NO: 506250 - RNA, 23 nt, Human
uccccaccagcugcuggccccac

SEQ ID NO: 506251 - RNA, 20 nt, Human
uccuggcagcccggggucug

SEQ ID NO: 506252 - RNA, 19 nt, Human
uccuuggaaaaauguaaag

SEQ ID NO: 506253 - RNA, 18 nt, Human
ugagaagccccaagcccc

SEQ ID NO: 506254 - RNA, 19 nt, Human
ugagacuggagcagaaagg

SEQ ID NO: 506255 - RNA, 23 nt, Human
ugcauaauccuggcagcccgggg

SEQ ID NO: 506256 - RNA, 20 nt, Human
ugccugcagagcuggguccu

SEQ ID NO: 506257 - RNA, 21 nt, Human
uggaaaaauguaaagaacugg

SEQ ID NO: 506258 - RNA, 18 nt, Human
uggcaaacuggugucugc

SEQ ID NO: 506259 - RNA, 19 nt, Human
uggcucuggucaugcuugc

SEQ ID NO: 506260 - RNA, 22 nt, Human
ugggggaucagagccacagggu

SEQ ID NO: 506261 - RNA, 23 nt, Human
ugggguggauaaaugggggauca

SEQ ID NO: 506262 - RNA, 19 nt, Human
ugggugccugcagagcugg

SEQ ID NO: 506263 - RNA, 21 nt, Human
uucauuggcaaacuggugucu

SEQ ID NO: 506264 - RNA, 23 nt, Human
uuguggggaaggaagggagaauu

SEQ ID NO: 506265 - RNA, 24 nt, Human
uuuauuaaaaagucagcuauuagg

SEQ ID NO: 506266 - RNA, 21 nt, Human
uuuuccuuuccuuggaaaaau

SEQ ID NO: 506267 - RNA, 20 nt, Human
aaagaccaaccaagcaacca

SEQ ID NO: 506268 - RNA, 19 nt, Human
aaauacucagaaaagacca

SEQ ID NO: 506269 - RNA, 21 nt, Human
aaccaaugugaaucaugagac

SEQ ID NO: 506270 - RNA, 19 nt, Human
aagaaaucaaggucacgaa

SEQ ID NO: 506271 - RNA, 19 nt, Human
aagcaaccaaagcauaaca

SEQ ID NO: 506272 - RNA, 24 nt, Human
aagcacccugucgagcggagacac

SEQ ID NO: 506273 - RNA, 25 nt, Human
aaugcagcaaauccagguggcaaca

SEQ ID NO: 506274 - RNA, 22 nt, Human
acccucugucuuuauuaaauuu

SEQ ID NO: 506275 - RNA, 22 nt, Human
agcagagcaaugcagcaaaucc

SEQ ID NO: 506276 - RNA, 18 nt, Human
agugucuccccccacccc

SEQ ID NO: 506277 - RNA, 22 nt, Human
auaaccaccagguaaaaaaugu

SEQ ID NO: 506278 - RNA, 25 nt, Human
augagugucuccccccacccccggu

SEQ ID NO: 506279 - RNA, 25 nt, Human
caacacuaaaauacucagaaaagac

SEQ ID NO: 506280 - RNA, 19 nt, Human
caaccaagcaaccaaagca

SEQ ID NO: 506281 - RNA, 25 nt, Human
caaccaagcaaccaaagcauaacau

SEQ ID NO: 506282 - RNA, 22 nt, Human
caagcaaccaaagcauaacauc

SEQ ID NO: 506283 - RNA, 24 nt, Human
cacuaaaauacucagaaaagacca

SEQ ID NO: 506284 - RNA, 28 nt, Human
cagcaaauccagguggcaacacuaaaau

SEQ ID NO: 506285 - RNA, 24 nt, Human
cagcucagcagagcaaugcagcaa

SEQ ID NO: 506286 - RNA, 22 nt, Human
ccacccacgagcagaggcccac

SEQ ID NO: 506287 - RNA, 23 nt, Human
cccccaaguccaugcucauaacc

SEQ ID NO: 506288 - RNA, 19 nt, Human
ccccccacccccgguuucc

SEQ ID NO: 506289 - RNA, 20 nt, Human
cccgaugggcucugcccaag

SEQ ID NO: 506290 - RNA, 19 nt, Human
ccuccacgagaaccaccca

SEQ ID NO: 506291 - RNA, 18 nt, Human
cucagucacuguggcccc

SEQ ID NO: 506292 - RNA, 24 nt, Human
cuccccccacccccgguuuccgcu

SEQ ID NO: 506293 - RNA, 22 nt, Human
cuggugauggggccuagaaaug

SEQ ID NO: 506294 - RNA, 20 nt, Human
gaggcccacucgccccgggc

SEQ ID NO: 506295 - RNA, 26 nt, Human
gaggcugugucgggaaucaaacucag

SEQ ID NO: 506296 - RNA, 19 nt, Human
gcaaauccagguggcaaca

SEQ ID NO: 506297 - RNA, 24 nt, Human
ggagacacgcgggagcugaccucc

SEQ ID NO: 506298 - RNA, 23 nt, Human
uaaaauacucagaaaagaccaac

SEQ ID NO: 506299 - RNA, 23 nt, Human
uaacaucagcaauagcacaacca

SEQ ID NO: 506300 - RNA, 21 nt, Human
uaagcguuuuacaaauauuaa

SEQ ID NO: 506301 - RNA, 21 nt, Human
uaauaagcuuacccaaaacua

SEQ ID NO: 506302 - RNA, 22 nt, Human
uauuuccuuuuacaggugaccc

SEQ ID NO: 506303 - RNA, 19 nt, Human
ucacuguggcccccaaguc

SEQ ID NO: 506304 - RNA, 21 nt, Human
ucagaaaagaccaaccaagca

SEQ ID NO: 506305 - RNA, 20 nt, Human
uccccccacccccgguuucc

SEQ ID NO: 506306 - RNA, 27 nt, Human
ugagugucuccccccacccccgguuuc

SEQ ID NO: 506307 - RNA, 23 nt, Human
uuaauaagcuuacccaaaacuac

SEQ ID NO: 506308 - RNA, 23 nt, Human
uuaauacucacaucaaucuuaua

SEQ ID NO: 506309 - RNA, 21 nt, Human
uuacccaaaacuacacagcaa

SEQ ID NO: 506310 - RNA, 24 nt, Human
aaacuuccaagcuacuugggaucc

SEQ ID NO: 506311 - RNA, 27 nt, Human
aaggagggagggagggagugaggaggg

SEQ ID NO: 506312 - RNA, 21 nt, Human
accacuccacacaaaggagca

SEQ ID NO: 506313 - RNA, 23 nt, Human
accuucaagcugugcaaaggcug

SEQ ID NO: 506314 - RNA, 22 nt, Human
acgugcgugugugugugugugu

SEQ ID NO: 506315 - RNA, 22 nt, Human
acgugcgugugugugugugugu

SEQ ID NO: 506316 - RNA, 22 nt, Human
acgugcgugugugugugugugu

SEQ ID NO: 506317 - RNA, 22 nt, Human
agaaaugugauucuccaagaaa

SEQ ID NO: 506318 - RNA, 19 nt, Human
agaaggagggagggaggga

SEQ ID NO: 506319 - RNA, 24 nt, Human
agagaaggagggagggagggagug

SEQ ID NO: 506320 - RNA, 25 nt, Human
agagagaaggagggagggagggagu

SEQ ID NO: 506321 - RNA, 21 nt, Human
agauggccuuuuugaauucua

SEQ ID NO: 506322 - RNA, 24 nt, Human
aggagggagggagggagugaggag

SEQ ID NO: 506323 - RNA, 25 nt, Human
aggagggagggagggagugaggagg

SEQ ID NO: 506324 - RNA, 19 nt, Human
agggagggagggagugagg

SEQ ID NO: 506325 - RNA, 25 nt, Human
agggagggagggagugaggagggag

SEQ ID NO: 506326 - RNA, 22 nt, Human
agugaggagggaggauggggag

SEQ ID NO: 506327 - RNA, 24 nt, Human
caaaggcuggaaaaggaggugagg

SEQ ID NO: 506328 - RNA, 18 nt, Human
caagcugugcaaaggcug

SEQ ID NO: 506329 - RNA, 19 nt, Human
cagaaccuucaagcugugc

SEQ ID NO: 506330 - RNA, 19 nt, Human
ccacaaagaccuaagggca

SEQ ID NO: 506331 - RNA, 21 nt, Human
ccacuccacacaaaggagcaa

SEQ ID NO: 506332 - RNA, 22 nt, Human
ccacugcaaaaggugacagaac

SEQ ID NO: 506333 - RNA, 18 nt, Human
cccacauauaauuuaaga

SEQ ID NO: 506334 - RNA, 22 nt, Human
cuccuacuaagcaauucccuuc

SEQ ID NO: 506335 - RNA, 26 nt, Human
cugacacaccacuccacacaaaggag

SEQ ID NO: 506336 - RNA, 19 nt, Human
cuucaagcugugcaaaggc

SEQ ID NO: 506337 - RNA, 21 nt, Human
cuuucuagauaaaaacccugg

SEQ ID NO: 506338 - RNA, 20 nt, Human
gaaggagggagggagggagu

SEQ ID NO: 506339 - RNA, 21 nt, Human
gaaggagggagggagggagug

SEQ ID NO: 506340 - RNA, 24 nt, Human
gagagagagagagagagagaagga

SEQ ID NO: 506341 - RNA, 19 nt, Human
gagcaaauuaugcugugca

SEQ ID NO: 506342 - RNA, 21 nt, Human
ggaggagauguucaagggcug

SEQ ID NO: 506343 - RNA, 20 nt, Human
ggagggagggagugaggagg

SEQ ID NO: 506344 - RNA, 25 nt, Human
ggagugaggagggaggauggggagc

SEQ ID NO: 506345 - RNA, 18 nt, Human
gggaaaagaaaaguggua

SEQ ID NO: 506346 - RNA, 18 nt, Human
guaacguagaaucuuggc

SEQ ID NO: 506347 - RNA, 22 nt, Human
gucuuguuugucuuuaaccugu

SEQ ID NO: 506348 - RNA, 22 nt, Human
gugaaagcaaaaagauggccuu

SEQ ID NO: 506349 - RNA, 33 nt, Human
guggacgugcguguguguguguguguguguggu

SEQ ID NO: 506350 - RNA, 21 nt, Human
guguggacgugcgugugugug

SEQ ID NO: 506351 - RNA, 21 nt, Human
gugugugugugugugugugug

SEQ ID NO: 506352 - RNA, 24 nt, Human
uaaccuguaaagaaaugugauucu

SEQ ID NO: 506353 - RNA, 24 nt, Human
uaacuucuuucuggaagucccaua

SEQ ID NO: 506354 - RNA, 25 nt, Human
uaagacucuucuagucucuuuggag

SEQ ID NO: 506355 - RNA, 23 nt, Human
uagauaaaaacccuggggucuug

SEQ ID NO: 506356 - RNA, 22 nt, Human
ucccuccuccucccacauauaa

SEQ ID NO: 506357 - RNA, 18 nt, Human
ucuccugggcacaaaaac

SEQ ID NO: 506358 - RNA, 23 nt, Human
ucuccugggcacaaaaacuucca

SEQ ID NO: 506359 - RNA, 22 nt, Human
ucuuuggaggagauguucaagg

SEQ ID NO: 506360 - RNA, 18 nt, Human
ugaaagcaaaaagauggc

SEQ ID NO: 506361 - RNA, 19 nt, Human
ugacacaccacuccacaca

SEQ ID NO: 506362 - RNA, 18 nt, Human
ugacagaaccuucaagcu

SEQ ID NO: 506363 - RNA, 21 nt, Human
ugaggagggaggauggggagc

SEQ ID NO: 506364 - RNA, 23 nt, Human
ugauguucuaucccuccuccucc

SEQ ID NO: 506365 - RNA, 28 nt, Human
uggaccacugcaaaaggugacagaaccu

SEQ ID NO: 506366 - RNA, 23 nt, Human
uggacgugcgugugugugugugu

SEQ ID NO: 506367 - RNA, 24 nt, Human
uggacgugcgugugugugugugug

SEQ ID NO: 506368 - RNA, 22 nt, Human
ugguaaauuuuauugaugugaa

SEQ ID NO: 506369 - RNA, 22 nt, Human
uggugacuuaaacagccacaaa

SEQ ID NO: 506370 - RNA, 21 nt, Human
ugugcaaaggcuggaaaagga

SEQ ID NO: 506371 - RNA, 21 nt, Human
ugugugugugugugugucugu

SEQ ID NO: 506372 - RNA, 22 nt, Human
ugugugugugugugugucugug

SEQ ID NO: 506373 - RNA, 18 nt, Human
ugugugugugugugugug

SEQ ID NO: 506374 - RNA, 18 nt, Human
ugugugugugugugugug

SEQ ID NO: 506375 - RNA, 18 nt, Human
ugugugugugugugugug

SEQ ID NO: 506376 - RNA, 18 nt, Human
ugugugugugugugugug

SEQ ID NO: 506377 - RNA, 18 nt, Human
ugugugugugugugugug

SEQ ID NO: 506378 - RNA, 18 nt, Human
ugugugugugugugugug

SEQ ID NO: 506379 - RNA, 18 nt, Human
ugugugugugugugugug

SEQ ID NO: 506380 - RNA, 18 nt, Human
ugugugugugugugugug

SEQ ID NO: 506381 - RNA, 22 nt, Human
ugugugugugugugugugucug

SEQ ID NO: 506382 - RNA, 21 nt, Human
ugugugugugugugugugugu

SEQ ID NO: 506383 - RNA, 21 nt, Human
ugugugugugugugugugugu

SEQ ID NO: 506384 - RNA, 21 nt, Human
ugugugugugugugugugugu

SEQ ID NO: 506385 - RNA, 21 nt, Human
ugugugugugugugugugugu

SEQ ID NO: 506386 - RNA, 21 nt, Human
ugugugugugugugugugugu

SEQ ID NO: 506387 - RNA, 21 nt, Human
ugugugugugugugugugugu

SEQ ID NO: 506388 - RNA, 21 nt, Human
ugugugugugugugugugugu

SEQ ID NO: 506389 - RNA, 21 nt, Human
ugugugugugugugugugugu

SEQ ID NO: 506390 - RNA, 21 nt, Human
ugugugugugugugugugugu

SEQ ID NO: 506391 - RNA, 21 nt, Human
ugugugugugugugugugugu

SEQ ID NO: 506392 - RNA, 21 nt, Human
ugugugugugugugugugugu

SEQ ID NO: 506393 - RNA, 21 nt, Human
ugugugugugugugugugugu

SEQ ID NO: 506394 - RNA, 21 nt, Human
ugugugugugugugugugugu

SEQ ID NO: 506395 - RNA, 22 nt, Human
ugugugugugugugugugugug

SEQ ID NO: 506396 - RNA, 22 nt, Human
ugugugugugugugugugugug

SEQ ID NO: 506397 - RNA, 22 nt, Human
ugugugugugugugugugugug

SEQ ID NO: 506398 - RNA, 22 nt, Human
ugugugugugugugugugugug

SEQ ID NO: 506399 - RNA, 22 nt, Human
ugugugugugugugugugugug

SEQ ID NO: 506400 - RNA, 22 nt, Human
uguguguguguguguguguguu

SEQ ID NO: 506401 - RNA, 24 nt, Human
uguucuaucccuccuccucccaca

SEQ ID NO: 506402 - RNA, 27 nt, Human
uuaaacagccacaaagaccuaagggcc

SEQ ID NO: 506403 - RNA, 25 nt, Human
uuacauggauucaguuucugaugaa

SEQ ID NO: 506404 - RNA, 18 nt, Human
uucaagggcugacacacc

SEQ ID NO: 506405 - RNA, 20 nt, Human
uucacaguuauuuacucucc

SEQ ID NO: 506406 - RNA, 24 nt, Human
uuggaguuuuagggcacuguugac

SEQ ID NO: 506407 - RNA, 20 nt, Human
uuuggaggagauguucaagg

SEQ ID NO: 506408 - RNA, 19 nt, Human
aacaguaccuacauucagu

SEQ ID NO: 506409 - RNA, 23 nt, Human
accugguuucugccacuugccau

SEQ ID NO: 506410 - RNA, 23 nt, Human
agacaaaagauugaaaaccuuag

SEQ ID NO: 506411 - RNA, 18 nt, Human
aggaagggagaaaaaguc

SEQ ID NO: 506412 - RNA, 22 nt, Human
aggagucauacaaacuucgcca

SEQ ID NO: 506413 - RNA, 20 nt, Human
agucuuugaaguggcuacca

SEQ ID NO: 506414 - RNA, 28 nt, Human
agucuuugaaguggcuaccaggauccuu

SEQ ID NO: 506415 - RNA, 25 nt, Human
caaauagcuuacaauuucugcuaga

SEQ ID NO: 506416 - RNA, 18 nt, Human
cacaucaugccuguugcc

SEQ ID NO: 506417 - RNA, 25 nt, Human
cacucugggcaguugugaccggcua

SEQ ID NO: 506418 - RNA, 20 nt, Human
caguagucauguaggcagag

SEQ ID NO: 506419 - RNA, 19 nt, Human
cauguaaacuucucugugc

SEQ ID NO: 506420 - RNA, 26 nt, Human
cauuguugcucccucagucuuuuuua

SEQ ID NO: 506421 - RNA, 21 nt, Human
cauuucuuccucugaugucca

SEQ ID NO: 506422 - RNA, 19 nt, Human
ccccucuccuccuuucagc

SEQ ID NO: 506423 - RNA, 18 nt, Human
ccccuuuuccccucuccu

SEQ ID NO: 506424 - RNA, 20 nt, Human
ccgugccgccgucgcuuugu

SEQ ID NO: 506425 - RNA, 20 nt, Human
cuccccuuuuccccucuccu

SEQ ID NO: 506426 - RNA, 18 nt, Human
cuuccccuccccuuuucc

SEQ ID NO: 506427 - RNA, 18 nt, Human
cuuucagcugcuguuacu

SEQ ID NO: 506428 - RNA, 21 nt, Human
cuuuccacauuguugcucccu

SEQ ID NO: 506429 - RNA, 19 nt, Human
gccuaagcuuugaaaacuc

SEQ ID NO: 506430 - RNA, 24 nt, Human
gcugcacugcgaagcuguccaaug

SEQ ID NO: 506431 - RNA, 21 nt, Human
guugcucccucagucuuuuuc

SEQ ID NO: 506432 - RNA, 23 nt, Human
uaccaggauccuuugcagaucuc

SEQ ID NO: 506433 - RNA, 24 nt, Human
uagguggaggucguggcuuggccu

SEQ ID NO: 506434 - RNA, 19 nt, Human
uaucuuguuuaccuuaucu

SEQ ID NO: 506435 - RNA, 19 nt, Human
uaugaaauuaguguuccaa

SEQ ID NO: 506436 - RNA, 21 nt, Human
uccuuagaguaccugaauugc

SEQ ID NO: 506437 - RNA, 22 nt, Human
ucuacagugaaaauuguaaaaa

SEQ ID NO: 506438 - RNA, 18 nt, Human
ucuaugcugggugacucc

SEQ ID NO: 506439 - RNA, 20 nt, Human
ucuuccccuccccuuuuccc

SEQ ID NO: 506440 - RNA, 25 nt, Human
ucuuuuauuccuuugguaacuauua

SEQ ID NO: 506441 - RNA, 19 nt, Human
ugagaggaaaggguacuug

SEQ ID NO: 506442 - RNA, 19 nt, Human
ugauaggacugcggugcuc

SEQ ID NO: 506443 - RNA, 20 nt, Human
ugauugucugaggaagggag

SEQ ID NO: 506444 - RNA, 22 nt, Human
ugcaaagagaaugccaaagcag

SEQ ID NO: 506445 - RNA, 22 nt, Human
ugcucccucagucuuuuuuaca

SEQ ID NO: 506446 - RNA, 18 nt, Human
ugggaugucauucacuca

SEQ ID NO: 506447 - RNA, 20 nt, Human
uguaaacuucucugugcugc

SEQ ID NO: 506448 - RNA, 24 nt, Human
uguuccuauacagcuuccuuuccu

SEQ ID NO: 506449 - RNA, 19 nt, Human
uuacugcuguuaauuuacc

SEQ ID NO: 506450 - RNA, 18 nt, Human
uucagccgcuggccgggu

SEQ ID NO: 506451 - RNA, 18 nt, Human
uucgccauuucuuccucu

SEQ ID NO: 506452 - RNA, 21 nt, Human
uucugagcuacagcaaaccuu

SEQ ID NO: 506453 - RNA, 18 nt, Human
uuugaaguggcuaccagg

SEQ ID NO: 506454 - RNA, 24 nt, Human
uuuuuuuuuuuuggaaaggaagcu

SEQ ID NO: 506455 - RNA, 22 nt, Human
uuuuuuuuuuuuuuggaaagga

SEQ ID NO: 506456 - RNA, 18 nt, Human
uuuuuuuuuuuuuuuuug

SEQ ID NO: 506457 - RNA, 18 nt, Human
ccccuucugucgucuucu

SEQ ID NO: 506458 - RNA, 21 nt, Human
cuucucgcagccguagucgac

SEQ ID NO: 506459 - RNA, 23 nt, Human
uauuuugcauguuucaacuguuc

SEQ ID NO: 506460 - RNA, 22 nt, Human
ucugucgucuucucgcagccgu

SEQ ID NO: 506461 - RNA, 19 nt, Human
ugcauguuucaacuguucu

SEQ ID NO: 506462 - RNA, 18 nt, Human
uucaacuguucuucauug

SEQ ID NO: 506463 - RNA, 20 nt, Human
uuuagucacacaauuuuaau

SEQ ID NO: 506464 - RNA, 23 nt, Human
uuuuuuagucacacaauuuuaau

SEQ ID NO: 506465 - RNA, 26 nt, Human
aaaaaugagcaaaauuacaacauggc

SEQ ID NO: 506466 - RNA, 22 nt, Human
aaaauuacaacauggcgggcca

SEQ ID NO: 506467 - RNA, 18 nt, Human
aaaggaaaugagaugggg

SEQ ID NO: 506468 - RNA, 25 nt, Human
aacuccugaguucaagcaauuccuu

SEQ ID NO: 506469 - RNA, 19 nt, Human
aagaagccaagcaucaggu

SEQ ID NO: 506470 - RNA, 18 nt, Human
aagcaaggaggaggcagg

SEQ ID NO: 506471 - RNA, 25 nt, Human
aagccaagcaucagguaaaccagaa

SEQ ID NO: 506472 - RNA, 21 nt, Human
aaggacaccaauuauauugca

SEQ ID NO: 506473 - RNA, 18 nt, Human
aaggaggaggcaggccca

SEQ ID NO: 506474 - RNA, 23 nt, Human
aaggaggaggcaggcccacugca

SEQ ID NO: 506475 - RNA, 20 nt, Human
aagugccuuucuaaagaccc

SEQ ID NO: 506476 - RNA, 23 nt, Human
acagaagacagccacagcuccca

SEQ ID NO: 506477 - RNA, 24 nt, Human
acccagacuggagugcaguggcgu

SEQ ID NO: 506478 - RNA, 18 nt, Human
accccaucuccaaauaca

SEQ ID NO: 506479 - RNA, 19 nt, Human
accccgugaugaugaggau

SEQ ID NO: 506480 - RNA, 20 nt, Human
accucagccccuggaguagc

SEQ ID NO: 506481 - RNA, 22 nt, Human
acgggcuaaaggaaaugagaug

SEQ ID NO: 506482 - RNA, 25 nt, Human
acucagcaccccacugggugccccc

SEQ ID NO: 506483 - RNA, 24 nt, Human
acugaguuuugccauguugcccag

SEQ ID NO: 506484 - RNA, 19 nt, Human
acuggagugcaguggcgug

SEQ ID NO: 506485 - RNA, 24 nt, Human
agaggaaagcccauuuuauggaga

SEQ ID NO: 506486 - RNA, 21 nt, Human
aggaggaccuucugagauucu

SEQ ID NO: 506487 - RNA, 21 nt, Human
aggcgugagccaccacuccca

SEQ ID NO: 506488 - RNA, 23 nt, Human
agggauuauaggcgugagccacc

SEQ ID NO: 506489 - RNA, 24 nt, Human
agggauuauaggcgugagccacca

SEQ ID NO: 506490 - RNA, 18 nt, Human
aguagcugggaugccagg

SEQ ID NO: 506491 - RNA, 19 nt, Human
agugcaguggcgugaucuc

SEQ ID NO: 506492 - RNA, 21 nt, Human
agugcaguggcgugaucucag

SEQ ID NO: 506493 - RNA, 23 nt, Human
agugcaguggcgugaucucagcu

SEQ ID NO: 506494 - RNA, 24 nt, Human
agugcaguggcgugaucucagcuc

SEQ ID NO: 506495 - RNA, 24 nt, Human
aguggcgugaucucagcucacugc

SEQ ID NO: 506496 - RNA, 23 nt, Human
caaaauuacaacauggcgggcca

SEQ ID NO: 506497 - RNA, 24 nt, Human
caaagcgcagggauuauaggcgug

SEQ ID NO: 506498 - RNA, 28 nt, Human
caacuccugaguucaagcaauuccccuu

SEQ ID NO: 506499 - RNA, 24 nt, Human
cacccagacuggagugcaguggcg

SEQ ID NO: 506500 - RNA, 24 nt, Human
caccucagccccuggaguagcugg

SEQ ID NO: 506501 - RNA, 24 nt, Human
cacucccaccccagacucugagga

SEQ ID NO: 506502 - RNA, 21 nt, Human
cagagucuaagauugaggugu

SEQ ID NO: 506503 - RNA, 19 nt, Human
cagcaccccacugggugcc

SEQ ID NO: 506504 - RNA, 21 nt, Human
cagcaccccacugggugcccc

SEQ ID NO: 506505 - RNA, 21 nt, Human
cagccucgaccuucugggcuu

SEQ ID NO: 506506 - RNA, 24 nt, Human
cagccucgaccuucugggcuuaag

SEQ ID NO: 506507 - RNA, 22 nt, Human
cagccugugaagaaggcugccu

SEQ ID NO: 506508 - RNA, 19 nt, Human
cauguugcccaggcugguc

SEQ ID NO: 506509 - RNA, 24 nt, Human
cauguugcccaggcuggucuccaa

SEQ ID NO: 506510 - RNA, 20 nt, Human
ccaaagcgcagggauuauag

SEQ ID NO: 506511 - RNA, 22 nt, Human
ccaaagcgcagggauuauaggc

SEQ ID NO: 506512 - RNA, 22 nt, Human
ccaaagcgcagggauuauaggc

SEQ ID NO: 506513 - RNA, 24 nt, Human
ccaaagcgcagggauuauaggcgu

SEQ ID NO: 506514 - RNA, 27 nt, Human
ccaacuccugaguucaagcaauucuuu

SEQ ID NO: 506515 - RNA, 20 nt, Human
ccaggcuggucuccaacucc

SEQ ID NO: 506516 - RNA, 19 nt, Human
ccauguugcccaggcuggu

SEQ ID NO: 506517 - RNA, 22 nt, Human
ccauguugcccaggcuggucuc

SEQ ID NO: 506518 - RNA, 18 nt, Human
cccacuccugggccuuca

SEQ ID NO: 506519 - RNA, 23 nt, Human
cccacugggugcccccccucaga

SEQ ID NO: 506520 - RNA, 23 nt, Human
cccgggugcuggugcugagcugg

SEQ ID NO: 506521 - RNA, 23 nt, Human
ccgcugggcccagaccucccugg

SEQ ID NO: 506522 - RNA, 21 nt, Human
ccucagccccuggaguagcug

SEQ ID NO: 506523 - RNA, 22 nt, Human
ccuccacagaagacagccacag

SEQ ID NO: 506524 - RNA, 25 nt, Human
ccucccuggcggccacugcagguca

SEQ ID NO: 506525 - RNA, 18 nt, Human
ccucgaccuucugggcuu

SEQ ID NO: 506526 - RNA, 18 nt, Human
ccucggacugccaaagcg

SEQ ID NO: 506527 - RNA, 20 nt, Human
ccugaguucaagcaauuccc

SEQ ID NO: 506528 - RNA, 23 nt, Human
ccugaguucaagcaauuccccug

SEQ ID NO: 506529 - RNA, 20 nt, Human
ccugggccuucauguggucu

SEQ ID NO: 506530 - RNA, 19 nt, Human
ccuucugagauucugccca

SEQ ID NO: 506531 - RNA, 18 nt, Human
cgauggcuauucccccuc

SEQ ID NO: 506532 - RNA, 20 nt, Human
cuaauuuuuuguauuuuuug

SEQ ID NO: 506533 - RNA, 19 nt, Human
cucaaucacccuguuccca

SEQ ID NO: 506534 - RNA, 19 nt, Human
cucacugcagccucgaccu

SEQ ID NO: 506535 - RNA, 24 nt, Human
cucagccccuggaguagcugggau

SEQ ID NO: 506536 - RNA, 21 nt, Human
cuccaaauacagugauauucu

SEQ ID NO: 506537 - RNA, 24 nt, Human
cucucucugucacccagacuggag

SEQ ID NO: 506538 - RNA, 23 nt, Human
cucucugucacccagacuggagu

SEQ ID NO: 506539 - RNA, 23 nt, Human
cucugucacccagacuggagugc

SEQ ID NO: 506540 - RNA, 24 nt, Human
cugaauuccuugggcccaucucuc

SEQ ID NO: 506541 - RNA, 21 nt, Human
cugaccuucaccccgugauga

SEQ ID NO: 506542 - RNA, 22 nt, Human
cugcagccucgaccuucugggc

SEQ ID NO: 506543 - RNA, 24 nt, Human
cuggaguagcugggaugccaggug

SEQ ID NO: 506544 - RNA, 24 nt, Human
cuggagugcaguggcgugaucuca

SEQ ID NO: 506545 - RNA, 24 nt, Human
cuggcaacuuuuuuuuuuuuugga

SEQ ID NO: 506546 - RNA, 22 nt, Human
cugggcuuaagcaaugcuguca

SEQ ID NO: 506547 - RNA, 18 nt, Human
gagccuccuccacagaag

SEQ ID NO: 506548 - RNA, 22 nt, Human
gagccuccuccacagaagacag

SEQ ID NO: 506549 - RNA, 18 nt, Human
gaggaccuucugagauuc

SEQ ID NO: 506550 - RNA, 18 nt, Human
gaggaggcaggcccacug

SEQ ID NO: 506551 - RNA, 22 nt, Human
gaggaggcaggcccacugcagg

SEQ ID NO: 506552 - RNA, 18 nt, Human
gauuauaggcgugagcca

SEQ ID NO: 506553 - RNA, 21 nt, Human
gauuauaggcgugagccacca

SEQ ID NO: 506554 - RNA, 22 nt, Human
gauuauaggcgugagccaccac

SEQ ID NO: 506555 - RNA, 21 nt, Human
gcagugagguagagggagcau

SEQ ID NO: 506556 - RNA, 20 nt, Human
gccauguugcccaggcuggu

SEQ ID NO: 506557 - RNA, 18 nt, Human
gcuccuaaaagcaggagu

SEQ ID NO: 506558 - RNA, 21 nt, Human
gcugagcuggguccaaaaguc

SEQ ID NO: 506559 - RNA, 19 nt, Human
gcugcuucagaaggucuga

SEQ ID NO: 506560 - RNA, 22 nt, Human
ggauuauaggcgugagccacca

SEQ ID NO: 506561 - RNA, 19 nt, Human
ggcacacgggcuaaaggaa

SEQ ID NO: 506562 - RNA, 20 nt, Human
ggcuauucccccucccacuc

SEQ ID NO: 506563 - RNA, 18 nt, Human
ggcugguucugaaccccc

SEQ ID NO: 506564 - RNA, 18 nt, Human
gggauuauaggcgugagc

SEQ ID NO: 506565 - RNA, 23 nt, Human
gggauuauaggcgugagccacca

SEQ ID NO: 506566 - RNA, 22 nt, Human
ggggaggacucugucucucugg

SEQ ID NO: 506567 - RNA, 19 nt, Human
ggguagcccuaaaagaagc

SEQ ID NO: 506568 - RNA, 22 nt, Human
ggguagcccuaaaagaagccaa

SEQ ID NO: 506569 - RNA, 22 nt, Human
ggugucagcaggguugguuucc

SEQ ID NO: 506570 - RNA, 21 nt, Human
gguuaagacuucaacauagaa

SEQ ID NO: 506571 - RNA, 20 nt, Human
guacagacugaguuuugcca

SEQ ID NO: 506572 - RNA, 24 nt, Human
guuuugccauguugcccaggcugg

SEQ ID NO: 506573 - RNA, 18 nt, Human
uaaaaaugagcaaaauua

SEQ ID NO: 506574 - RNA, 20 nt, Human
uaaaaaugagcaaaauuacu

SEQ ID NO: 506575 - RNA, 23 nt, Human
uaaaagaagccaagcaucaggua

SEQ ID NO: 506576 - RNA, 26 nt, Human
uaaccuccccuucuuauaaggacacc

SEQ ID NO: 506577 - RNA, 20 nt, Human
uaagugccuuucuaaagacc

SEQ ID NO: 506578 - RNA, 25 nt, Human
uaauuuuuuguauuuuuuguacaga

SEQ ID NO: 506579 - RNA, 21 nt, Human
uauggagaauuaagagcuuug

SEQ ID NO: 506580 - RNA, 24 nt, Human
ucacugcagccucgaccuucuggg

SEQ ID NO: 506581 - RNA, 18 nt, Human
ucagccccuggaguagcu

SEQ ID NO: 506582 - RNA, 22 nt, Human
ucagccccuggaguagcuggga

SEQ ID NO: 506583 - RNA, 19 nt, Human
uccacacucccaccccaga

SEQ ID NO: 506584 - RNA, 18 nt, Human
uccacagaagacagccac

SEQ ID NO: 506585 - RNA, 21 nt, Human
uccacagaagacagccacagc

SEQ ID NO: 506586 - RNA, 18 nt, Human
ucccuggcggccacugca

SEQ ID NO: 506587 - RNA, 19 nt, Human
ucccuggcggccacugcag

SEQ ID NO: 506588 - RNA, 22 nt, Human
uccuaaguccacacucccaccc

SEQ ID NO: 506589 - RNA, 23 nt, Human
uccuaaguccacacucccacccc

SEQ ID NO: 506590 - RNA, 19 nt, Human
uccugaguucaagcaauuc

SEQ ID NO: 506591 - RNA, 24 nt, Human
uccugaguucaagcaauuccccug

SEQ ID NO: 506592 - RNA, 23 nt, Human
ucuccaacuccugaguucaagca

SEQ ID NO: 506593 - RNA, 24 nt, Human
ucucucucugucacccagacugga

SEQ ID NO: 506594 - RNA, 24 nt, Human
ucucucugucacccagacuggagu

SEQ ID NO: 506595 - RNA, 24 nt, Human
ucugucacccagacuggagugcag

SEQ ID NO: 506596 - RNA, 21 nt, Human
ugaggugucagcaggguuggu

SEQ ID NO: 506597 - RNA, 21 nt, Human
ugaguucaagcaauuccccug

SEQ ID NO: 506598 - RNA, 22 nt, Human
ugcaguggcgugaucucagcuc

SEQ ID NO: 506599 - RNA, 21 nt, Human
ugccaggugccuaccccuaca

SEQ ID NO: 506600 - RNA, 24 nt, Human
ugccauguugcccaggcuggucuc

SEQ ID NO: 506601 - RNA, 27 nt, Human
ugccauguugcccaggcuggucuccaa

SEQ ID NO: 506602 - RNA, 24 nt, Human
ugcccaggcuggucuccaacuccu

SEQ ID NO: 506603 - RNA, 27 nt, Human
ugcccaggcuggucuccaacuccugag

SEQ ID NO: 506604 - RNA, 18 nt, Human
ugcuggagccuccuccac

SEQ ID NO: 506605 - RNA, 19 nt, Human
uggagaauuaagagcuuug

SEQ ID NO: 506606 - RNA, 25 nt, Human
uggaguagcugggaugccaggugcc

SEQ ID NO: 506607 - RNA, 19 nt, Human
uggagugcaguggcgugau

SEQ ID NO: 506608 - RNA, 24 nt, Human
uggagugcaguggcgugaucucag

SEQ ID NO: 506609 - RNA, 25 nt, Human
uggccaggcugguucugaacccccu

SEQ ID NO: 506610 - RNA, 24 nt, Human
uggcgugaucucagcucacugcag

SEQ ID NO: 506611 - RNA, 22 nt, Human
ugggaaugcuggagccuccucc

SEQ ID NO: 506612 - RNA, 21 nt, Human
ugggaggucacaggauugguc

SEQ ID NO: 506613 - RNA, 21 nt, Human
ugggugcccccccucagaguu

SEQ ID NO: 506614 - RNA, 20 nt, Human
ugguucugaacccccucagc

SEQ ID NO: 506615 - RNA, 24 nt, Human
uguacagacugaguuuugccaugu

SEQ ID NO: 506616 - RNA, 23 nt, Human
uuauggagaauuaagagcuuugg

SEQ ID NO: 506617 - RNA, 21 nt, Human
uucaagcaauuccccugccuc

SEQ ID NO: 506618 - RNA, 26 nt, Human
uucaagcaauuccccugccucggacu

SEQ ID NO: 506619 - RNA, 18 nt, Human
uuccaugguucugggagg

SEQ ID NO: 506620 - RNA, 19 nt, Human
uuccucugaggcccccuua

SEQ ID NO: 506621 - RNA, 21 nt, Human
uuggucagccugacguccugg

SEQ ID NO: 506622 - RNA, 24 nt, Human
uuuauggagaauuaagagcuuugg

SEQ ID NO: 506623 - RNA, 23 nt, Human
uuuugccauguugcccaggcugg

SEQ ID NO: 506624 - RNA, 21 nt, Human
uuuuuguauuuuuuguacaga

SEQ ID NO: 506625 - RNA, 18 nt, Human
uuuuuuuuuuuuuuuuug

SEQ ID NO: 506626 - RNA, 22 nt, Human
uuuuuuuuuuuuuuuuuggcuu

SEQ ID NO: 506627 - RNA, 18 nt, Human
aagcccggcgccacccag

SEQ ID NO: 506628 - RNA, 22 nt, Human
aagcgcccccaccgcaggccga

SEQ ID NO: 506629 - RNA, 18 nt, Human
agagaagcagccccgucc

SEQ ID NO: 506630 - RNA, 18 nt, Human
agcagcuuccacuccagg

SEQ ID NO: 506631 - RNA, 22 nt, Human
agccccgucccacacccacccc

SEQ ID NO: 506632 - RNA, 21 nt, Human
agcuccucccacuccgccucc

SEQ ID NO: 506633 - RNA, 21 nt, Human
aggcguccacaggcgcgacga

SEQ ID NO: 506634 - RNA, 20 nt, Human
aucccacccuccccguccca

SEQ ID NO: 506635 - RNA, 18 nt, Human
cacccgggcgaugggagg

SEQ ID NO: 506636 - RNA, 20 nt, Human
cagcagggcaccccacaccc

SEQ ID NO: 506637 - RNA, 24 nt, Human
cagggcaccccacacccgggggac

SEQ ID NO: 506638 - RNA, 22 nt, Human
caucccacccuccccgucccac

SEQ ID NO: 506639 - RNA, 23 nt, Human
ccaagcccggcgccacccagcag

SEQ ID NO: 506640 - RNA, 22 nt, Human
ccacacccaccccugccugcga

SEQ ID NO: 506641 - RNA, 28 nt, Human
cccaccaagcccggcgccacccagcagc

SEQ ID NO: 506642 - RNA, 18 nt, Human
cccacccuccccguccca

SEQ ID NO: 506643 - RNA, 23 nt, Human
cccccaccgcaggccgagcuccg

SEQ ID NO: 506644 - RNA, 18 nt, Human
cccgcaaacccuccuccg

SEQ ID NO: 506645 - RNA, 23 nt, Human
ccgccuuccagcagcuuccacuc

SEQ ID NO: 506646 - RNA, 19 nt, Human
ccggcuguccuggggccug

SEQ ID NO: 506647 - RNA, 30 nt, Human
ccuccccgucccacgaccuccuccugggcc

SEQ ID NO: 506648 - RNA, 22 nt, Human
ccuccuccugggcuaauggcag

SEQ ID NO: 506649 - RNA, 20 nt, Human
ccuggcuccagcuccuccca

SEQ ID NO: 506650 - RNA, 23 nt, Human
cgccucugcgccucggugggucc

SEQ ID NO: 506651 - RNA, 21 nt, Human
cggcgagaagggcacacagug

SEQ ID NO: 506652 - RNA, 24 nt, Human
cgucccacacccaccccugccugc

SEQ ID NO: 506653 - RNA, 22 nt, Human
cuccagggaaagugcagucacc

SEQ ID NO: 506654 - RNA, 27 nt, Human
cugcagagggccgcucuuuccucccag

SEQ ID NO: 506655 - RNA, 22 nt, Human
gaacuuacgggccuggcuccag

SEQ ID NO: 506656 - RNA, 23 nt, Human
gaagcgcccccaccgcaggccga

SEQ ID NO: 506657 - RNA, 25 nt, Human
gaggcuguguagagaagcagccccg

SEQ ID NO: 506658 - RNA, 18 nt, Human
gauggggcucgcggagga

SEQ ID NO: 506659 - RNA, 18 nt, Human
gcaacuacccgcaaaccc

SEQ ID NO: 506660 - RNA, 22 nt, Human
gcagcaacaggcagcaccccgc

SEQ ID NO: 506661 - RNA, 18 nt, Human
gccuaggcguccacaggc

SEQ ID NO: 506662 - RNA, 25 nt, Human
gcugcauucgggccgccucugcgcc

SEQ ID NO: 506663 - RNA, 21 nt, Human
gcuguguagagaagcagcccc

SEQ ID NO: 506664 - RNA, 22 nt, Human
ggccuggcuccagcuccuccca

SEQ ID NO: 506665 - RNA, 21 nt, Human
gggcgaugggaggcgcagcgu

SEQ ID NO: 506666 - RNA, 18 nt, Human
gggcuaauggcagcaaca

SEQ ID NO: 506667 - RNA, 20 nt, Human
gggugaaggugaaggccagc

SEQ ID NO: 506668 - RNA, 19 nt, Human
ggugaaggccagcguagag

SEQ ID NO: 506669 - RNA, 24 nt, Human
guagagaagcagccccgucccaca

SEQ ID NO: 506670 - RNA, 23 nt, Human
guccgccuuccagcagcuuccac

SEQ ID NO: 506671 - RNA, 24 nt, Human
guggcgcugggcaaggacaggcac

SEQ ID NO: 506672 - RNA, 19 nt, Human
uagagaagcagccccgucc

SEQ ID NO: 506673 - RNA, 22 nt, Human
uauuuuauuucucuuggcugca

SEQ ID NO: 506674 - RNA, 18 nt, Human
uccacaggaagcgccccc

SEQ ID NO: 506675 - RNA, 22 nt, Human
ucccacccuccccgucccacga

SEQ ID NO: 506676 - RNA, 20 nt, Human
ucccacgaccuccuccuggg

SEQ ID NO: 506677 - RNA, 20 nt, Human
ucccacuccgccuccagccu

SEQ ID NO: 506678 - RNA, 21 nt, Human
ucccagggucaccgacgaugc

SEQ ID NO: 506679 - RNA, 19 nt, Human
uccgccuuccagcagcuuc

SEQ ID NO: 506680 - RNA, 23 nt, Human
ucucuuggcugcagagggccgcu

SEQ ID NO: 506681 - RNA, 19 nt, Human
ugccuaggcguccacaggc

SEQ ID NO: 506682 - RNA, 19 nt, Human
uggagggucccagggucac

SEQ ID NO: 506683 - RNA, 23 nt, Human
ugggaggcgcagcguccacagga

SEQ ID NO: 506684 - RNA, 20 nt, Human
uuggcugcagagggccgcuc

SEQ ID NO: 506685 - RNA, 21 nt, Human
aaaagaagaaaaauuguacaa

SEQ ID NO: 506686 - RNA, 21 nt, Human
aaacucuuaacguuuacugua

SEQ ID NO: 506687 - RNA, 19 nt, Human
accuauacugaauuacucc

SEQ ID NO: 506688 - RNA, 20 nt, Human
acggaacugggcaguggaca

SEQ ID NO: 506689 - RNA, 21 nt, Human
acugaauuacuccaaaaauaa

SEQ ID NO: 506690 - RNA, 23 nt, Human
agaaaagaagaaaaauuguacaa

SEQ ID NO: 506691 - RNA, 23 nt, Human
auuacacugaauacuuucuaacc

SEQ ID NO: 506692 - RNA, 20 nt, Human
caauauuacacugaauacuu

SEQ ID NO: 506693 - RNA, 23 nt, Human
ccuauacugaauuacuccaaaaa

SEQ ID NO: 506694 - RNA, 23 nt, Human
ccugugcacuagcagguuacuga

SEQ ID NO: 506695 - RNA, 24 nt, Human
cucgcucugucauccacacuggag

SEQ ID NO: 506696 - RNA, 22 nt, Human
cugaauuauucuuaucucaaug

SEQ ID NO: 506697 - RNA, 25 nt, Human
gcaggccaaaggggcuucucccucc

SEQ ID NO: 506698 - RNA, 21 nt, Human
uaaaguacagccugugcacua

SEQ ID NO: 506699 - RNA, 21 nt, Human
uacaaucuuaacuguuuaaaa

SEQ ID NO: 506700 - RNA, 24 nt, Human
ucucgcucugucauccacacugga

SEQ ID NO: 506701 - RNA, 22 nt, Human
ugaggcagggucucgcucuguc

SEQ ID NO: 506702 - RNA, 18 nt, Human
ugaugcaugucugaaguu

SEQ ID NO: 506703 - RNA, 21 nt, Human
ugcacuagcagguuacugaaa

SEQ ID NO: 506704 - RNA, 24 nt, Human
uggcuuucuuuuuuuuuuuuuuuu

SEQ ID NO: 506705 - RNA, 19 nt, Human
uuaaacgaaccuauacuga

SEQ ID NO: 506706 - RNA, 20 nt, Human
uuuuuuuugaggcagggucu

SEQ ID NO: 506707 - RNA, 23 nt, Human
uuuuuuuuuuuugaggcaggguc

SEQ ID NO: 506708 - RNA, 25 nt, Human
uuuuuuuuuuuugaggcagggucuc

SEQ ID NO: 506709 - RNA, 18 nt, Human
uuuuuuuuuuuuuuuuug

SEQ ID NO: 506710 - RNA, 27 nt, Human
uuuuuuuuuuuuuuuuugaggcagggg

SEQ ID NO: 506711 - RNA, 20 nt, Human
aaaaaaaaauccccuaucug

SEQ ID NO: 506712 - RNA, 20 nt, Human
aaaaaaaaauccccuaucug

SEQ ID NO: 506713 - RNA, 23 nt, Human
aaaaauccccuaucugcccaguc

SEQ ID NO: 506714 - RNA, 23 nt, Human
aaaaauccccuaucugcccaguc

SEQ ID NO: 506715 - RNA, 23 nt, Human
aaaacagagauuaaagaaucaau

SEQ ID NO: 506716 - RNA, 19 nt, Human
aaaacugagaaacaagaaa

SEQ ID NO: 506717 - RNA, 19 nt, Human
aaaacugagaaacaagaaa

SEQ ID NO: 506718 - RNA, 19 nt, Human
aaaauccccuaucugcccu

SEQ ID NO: 506719 - RNA, 19 nt, Human
aaaauccccuaucugcccu

SEQ ID NO: 506720 - RNA, 25 nt, Human
aaacauuaaaauugcaccacagaau

SEQ ID NO: 506721 - RNA, 25 nt, Human
aaacauuaaaauugcaccacagaau

SEQ ID NO: 506722 - RNA, 18 nt, Human
aaauacaaccaaaaaccc

SEQ ID NO: 506723 - RNA, 18 nt, Human
aaauacaaccaaaaaccc

SEQ ID NO: 506724 - RNA, 18 nt, Human
aaauacaaccaaaaaccc

SEQ ID NO: 506725 - RNA, 20 nt, Human
aaauacaaccaaaaacccug

SEQ ID NO: 506726 - RNA, 20 nt, Human
aaauacaaccaaaaacccug

SEQ ID NO: 506727 - RNA, 20 nt, Human
aaauacaaccaaaaacccug

SEQ ID NO: 506728 - RNA, 21 nt, Human
aacaacacuguugucagccac

SEQ ID NO: 506729 - RNA, 21 nt, Human
aacaacacuguugucagccac

SEQ ID NO: 506730 - RNA, 26 nt, Human
aacacuguugucagccacuguucacg

SEQ ID NO: 506731 - RNA, 26 nt, Human
aacacuguugucagccacuguucacg

SEQ ID NO: 506732 - RNA, 26 nt, Human
aacacuguugucagccacuguucacg

SEQ ID NO: 506733 - RNA, 21 nt, Human
acaacauaaaaaagaagugau

SEQ ID NO: 506734 - RNA, 18 nt, Human
acagcuuuggaaaacagu

SEQ ID NO: 506735 - RNA, 21 nt, Human
accaaguccaaggcacgcguc

SEQ ID NO: 506736 - RNA, 21 nt, Human
accaaguccaaggcacgcguc

SEQ ID NO: 506737 - RNA, 19 nt, Human
accagugagguuuacagcu

SEQ ID NO: 506738 - RNA, 20 nt, Human
acgccgcggagugggcggac

SEQ ID NO: 506739 - RNA, 25 nt, Human
acgccgcggagugggcggacggcca

SEQ ID NO: 506740 - RNA, 21 nt, Human
agaacaacucaugugcagaca

SEQ ID NO: 506741 - RNA, 21 nt, Human
agaacaacucaugugcagaca

SEQ ID NO: 506742 - RNA, 19 nt, Human
agacgaaaccucugggucc

SEQ ID NO: 506743 - RNA, 19 nt, Human
agacgaaaccucugggucc

SEQ ID NO: 506744 - RNA, 19 nt, Human
agacgaaaccucugggucc

SEQ ID NO: 506745 - RNA, 24 nt, Human
agacgaaaccucuggguccaagca

SEQ ID NO: 506746 - RNA, 24 nt, Human
agacgaaaccucuggguccaagca

SEQ ID NO: 506747 - RNA, 24 nt, Human
agacgaaaccucuggguccaagca

SEQ ID NO: 506748 - RNA, 23 nt, Human
agagacgagggcaagaaagccag

SEQ ID NO: 506749 - RNA, 23 nt, Human
agagacgagggcaagaaagccag

SEQ ID NO: 506750 - RNA, 23 nt, Human
agagugaaaacagagauuaaaga

SEQ ID NO: 506751 - RNA, 18 nt, Human
agcgugugaaucggacau

SEQ ID NO: 506752 - RNA, 23 nt, Human
agggcagcaggaggcauccugga

SEQ ID NO: 506753 - RNA, 19 nt, Human
agggguggauguggcgugc

SEQ ID NO: 506754 - RNA, 19 nt, Human
agggguggauguggcgugc

SEQ ID NO: 506755 - RNA, 24 nt, Human
auagcagaaaacugagaaacaaga

SEQ ID NO: 506756 - RNA, 24 nt, Human
auagcagaaaacugagaaacaaga

SEQ ID NO: 506757 - RNA, 23 nt, Human
augaagcaggaguguguggccuu

SEQ ID NO: 506758 - RNA, 23 nt, Human
augaagcaggaguguguggccuu

SEQ ID NO: 506759 - RNA, 28 nt, Human
auuucauuaauuugaaauuuggggcagg

SEQ ID NO: 506760 - RNA, 28 nt, Human
auuucauuaauuugaaauuuggggcagg

SEQ ID NO: 506761 - RNA, 22 nt, Human
caacaacacuguugucagccac

SEQ ID NO: 506762 - RNA, 21 nt, Human
caacacugaaagcuuggacac

SEQ ID NO: 506763 - RNA, 21 nt, Human
caacacugaaagcuuggacac

SEQ ID NO: 506764 - RNA, 21 nt, Human
caacacugaaagcuuggacac

SEQ ID NO: 506765 - RNA, 21 nt, Human
caaccaaaaacccuggcagac

SEQ ID NO: 506766 - RNA, 21 nt, Human
caaccaaaaacccuggcagac

SEQ ID NO: 506767 - RNA, 22 nt, Human
cacauguagaauaccaagucca

SEQ ID NO: 506768 - RNA, 22 nt, Human
cacauguagaauaccaagucca

SEQ ID NO: 506769 - RNA, 22 nt, Human
cacuguugucagccacuguuca

SEQ ID NO: 506770 - RNA, 22 nt, Human
cacuguugucagccacuguuca

SEQ ID NO: 506771 - RNA, 22 nt, Human
cacuguugucagccacuguuca

SEQ ID NO: 506772 - RNA, 25 nt, Human
cagaaaacugagaaacaagaaaaca

SEQ ID NO: 506773 - RNA, 25 nt, Human
cagaaaacugagaaacaagaaaaca

SEQ ID NO: 506774 - RNA, 21 nt, Human
cagacagggguggauguggcg

SEQ ID NO: 506775 - RNA, 21 nt, Human
cagacagggguggauguggcg

SEQ ID NO: 506776 - RNA, 19 nt, Human
cagagccugagagugaaaa

SEQ ID NO: 506777 - RNA, 20 nt, Human
caggcucacaacaacacugu

SEQ ID NO: 506778 - RNA, 20 nt, Human
caggcucacaacaacacugu

SEQ ID NO: 506779 - RNA, 20 nt, Human
caggcucacaacaacacugu

SEQ ID NO: 506780 - RNA, 22 nt, Human
caucccgguuccagauuuccgc

SEQ ID NO: 506781 - RNA, 21 nt, Human
ccaacacugaaagcuuggaca

SEQ ID NO: 506782 - RNA, 21 nt, Human
ccaacacugaaagcuuggaca

SEQ ID NO: 506783 - RNA, 21 nt, Human
ccaacacugaaagcuuggaca

SEQ ID NO: 506784 - RNA, 23 nt, Human
ccaagcagacagccaggcucaca

SEQ ID NO: 506785 - RNA, 23 nt, Human
ccaagcagacagccaggcucaca

SEQ ID NO: 506786 - RNA, 23 nt, Human
ccaagcagacagccaggcucaca

SEQ ID NO: 506787 - RNA, 23 nt, Human
ccacaacauaaaaaagaagugau

SEQ ID NO: 506788 - RNA, 18 nt, Human
ccagugagguuuacagcu

SEQ ID NO: 506789 - RNA, 21 nt, Human
ccccgcccccucgcgggggcg

SEQ ID NO: 506790 - RNA, 19 nt, Human
cccgcccccucgcgggggc

SEQ ID NO: 506791 - RNA, 22 nt, Human
cccugaaauccuaaauacaacc

SEQ ID NO: 506792 - RNA, 21 nt, Human
ccuucgccuccgacucagugu

SEQ ID NO: 506793 - RNA, 22 nt, Human
cgagggcaagaaagccagucac

SEQ ID NO: 506794 - RNA, 22 nt, Human
cgagggcaagaaagccagucac

SEQ ID NO: 506795 - RNA, 23 nt, Human
cuagggucucgcagccauuuccc

SEQ ID NO: 506796 - RNA, 20 nt, Human
cuccggugcgccugcccucc

SEQ ID NO: 506797 - RNA, 21 nt, Human
cugauggugcagccggugucu

SEQ ID NO: 506798 - RNA, 22 nt, Human
cugcuucccgcugauggugcag

SEQ ID NO: 506799 - RNA, 21 nt, Human
cuggccguggacaauguggaa

SEQ ID NO: 506800 - RNA, 21 nt, Human
cuggccguggacaauguggaa

SEQ ID NO: 506801 - RNA, 25 nt, Human
gaaaacagugacaggaaguccugac

SEQ ID NO: 506802 - RNA, 21 nt, Human
gaaaacugagaaacaagaaaa

SEQ ID NO: 506803 - RNA, 18 nt, Human
gaguguguggccuucgaa

SEQ ID NO: 506804 - RNA, 18 nt, Human
gaguguguggccuucgaa

SEQ ID NO: 506805 - RNA, 22 nt, Human
gcaaagauucccacaacauaaa

SEQ ID NO: 506806 - RNA, 22 nt, Human
gcaaagauucccacaacauaaa

SEQ ID NO: 506807 - RNA, 23 nt, Human
gcagacagccaggcucacaacaa

SEQ ID NO: 506808 - RNA, 23 nt, Human
gcagacagccaggcucacaacaa

SEQ ID NO: 506809 - RNA, 23 nt, Human
gcagacagccaggcucacaacaa

SEQ ID NO: 506810 - RNA, 23 nt, Human
gcggacggccaccgagauggcgc

SEQ ID NO: 506811 - RNA, 22 nt, Human
gugcgccugcccucccgcuccc

SEQ ID NO: 506812 - RNA, 18 nt, Human
gugcguggucgccgcgag

SEQ ID NO: 506813 - RNA, 19 nt, Human
gugugaaucggacauggaa

SEQ ID NO: 506814 - RNA, 19 nt, Human
gugugaaucggacauggaa

SEQ ID NO: 506815 - RNA, 21 nt, Human
uaaauacaaccaaaaacccug

SEQ ID NO: 506816 - RNA, 21 nt, Human
uaaauacaaccaaaaacccug

SEQ ID NO: 506817 - RNA, 21 nt, Human
uaaauacaaccaaaaacccug

SEQ ID NO: 506818 - RNA, 20 nt, Human
uaaauguacaccugaaaauc

SEQ ID NO: 506819 - RNA, 20 nt, Human
uaaauguacaccugaaaauc

SEQ ID NO: 506820 - RNA, 20 nt, Human
uacagcgcuguugucagaac

SEQ ID NO: 506821 - RNA, 20 nt, Human
uacagcgcuguugucagaac

SEQ ID NO: 506822 - RNA, 20 nt, Human
uagcgugugaaucggacaug

SEQ ID NO: 506823 - RNA, 20 nt, Human
uaggugugaacucacuuacc

SEQ ID NO: 506824 - RNA, 20 nt, Human
uaggugugaacucacuuacc

SEQ ID NO: 506825 - RNA, 25 nt, Human
uauagcagaaaacugagaaacaaga

SEQ ID NO: 506826 - RNA, 25 nt, Human
uauagcagaaaacugagaaacaaga

SEQ ID NO: 506827 - RNA, 21 nt, Human
uccaacacugaaagcuuggac

SEQ ID NO: 506828 - RNA, 21 nt, Human
uccaacacugaaagcuuggac

SEQ ID NO: 506829 - RNA, 21 nt, Human
uccaacacugaaagcuuggac

SEQ ID NO: 506830 - RNA, 23 nt, Human
uccaagcagacagccaggcucac

SEQ ID NO: 506831 - RNA, 23 nt, Human
uccaagcagacagccaggcucac

SEQ ID NO: 506832 - RNA, 23 nt, Human
uccaagcagacagccaggcucac

SEQ ID NO: 506833 - RNA, 20 nt, Human
uccccgaacgccgcggagug

SEQ ID NO: 506834 - RNA, 27 nt, Human
uccccgaacgccgcggagugggcggac

SEQ ID NO: 506835 - RNA, 21 nt, Human
uccccuaucugcccagucaaa

SEQ ID NO: 506836 - RNA, 21 nt, Human
uccccuaucugcccagucaaa

SEQ ID NO: 506837 - RNA, 24 nt, Human
ucccugaaauccuaaauacaacca

SEQ ID NO: 506838 - RNA, 24 nt, Human
ucccugaaauccuaaauacaacca

SEQ ID NO: 506839 - RNA, 20 nt, Human
uccgcagcagccaucuugcc

SEQ ID NO: 506840 - RNA, 21 nt, Human
uccgcaggccgcaggccucua

SEQ ID NO: 506841 - RNA, 21 nt, Human
ucggacauggaaaaaaaaaaa

SEQ ID NO: 506842 - RNA, 21 nt, Human
ucggacauggaaaaaaaaaaa

SEQ ID NO: 506843 - RNA, 26 nt, Human
ugaaaaucagaugcaacacuaacuug

SEQ ID NO: 506844 - RNA, 26 nt, Human
ugaaaaucagaugcaacacuaacuug

SEQ ID NO: 506845 - RNA, 20 nt, Human
ugaagcaggaguguguggcc

SEQ ID NO: 506846 - RNA, 20 nt, Human
ugaagcaggaguguguggcc

SEQ ID NO: 506847 - RNA, 19 nt, Human
ugaauugaaaauaguuuua

SEQ ID NO: 506848 - RNA, 19 nt, Human
ugaauugaaaauaguuuua

SEQ ID NO: 506849 - RNA, 18 nt, Human
ugacaggaaguccugaca

SEQ ID NO: 506850 - RNA, 18 nt, Human
ugagaaacaagaaaacau

SEQ ID NO: 506851 - RNA, 21 nt, Human
ugagaaacaagaaaacauuaa

SEQ ID NO: 506852 - RNA, 21 nt, Human
ugagaaacaagaaaacauuaa

SEQ ID NO: 506853 - RNA, 18 nt, Human
ugccagagggccgacgcc

SEQ ID NO: 506854 - RNA, 21 nt, Human
uggaaaaacugaagcguauac

SEQ ID NO: 506855 - RNA, 21 nt, Human
uggaaaaacugaagcguauac

SEQ ID NO: 506856 - RNA, 19 nt, Human
uggaaaacagugacaggaa

SEQ ID NO: 506857 - RNA, 19 nt, Human
uggacaauguggaaaaacu

SEQ ID NO: 506858 - RNA, 19 nt, Human
uggacaauguggaaaaacu

SEQ ID NO: 506859 - RNA, 22 nt, Human
uggacacuuuucccugaaaucc

SEQ ID NO: 506860 - RNA, 21 nt, Human
uggauguggcgugccgggcag

SEQ ID NO: 506861 - RNA, 21 nt, Human
uggauguggcgugccgggcag

SEQ ID NO: 506862 - RNA, 22 nt, Human
uggccguggacaauguggaaaa

SEQ ID NO: 506863 - RNA, 22 nt, Human
uggccguggacaauguggaaaa

SEQ ID NO: 506864 - RNA, 18 nt, Human
uguggguguguagcgugu

SEQ ID NO: 506865 - RNA, 18 nt, Human
uguggguguguagcgugu

SEQ ID NO: 506866 - RNA, 23 nt, Human
uuggacacuuuucccugaaaucc

SEQ ID NO: 506867 - RNA, 23 nt, Human
uuggacacuuuucccugaaaucc

SEQ ID NO: 506868 - RNA, 19 nt, Human
uuggucaucggcucgcgcu

SEQ ID NO: 506869 - RNA, 21 nt, Human
uuuacagcuuuggaaaacagu

SEQ ID NO: 506870 - RNA, 21 nt, Human
aaacacuuaaaaugcaaguuu

SEQ ID NO: 506871 - RNA, 27 nt, Human
aaaccaagggcgggcgaacccucggaa

SEQ ID NO: 506872 - RNA, 20 nt, Human
aaggaggaacagaggcagug

SEQ ID NO: 506873 - RNA, 23 nt, Human
aaugcaaagcucaauacugaaau

SEQ ID NO: 506874 - RNA, 18 nt, Human
aggcucaaggaggaacag

SEQ ID NO: 506875 - RNA, 20 nt, Human
cacuucugggucugcuggug

SEQ ID NO: 506876 - RNA, 24 nt, Human
cagacuaucaaaauuguuagcuuu

SEQ ID NO: 506877 - RNA, 21 nt, Human
gcgaacccucggagguagaac

SEQ ID NO: 506878 - RNA, 18 nt, Human
ggaggaacagaggcagug

SEQ ID NO: 506879 - RNA, 18 nt, Human
gucaaaggagccaaaggc

SEQ ID NO: 506880 - RNA, 22 nt, Human
uaaacacuuaaaaugcaaguuu

SEQ ID NO: 506881 - RNA, 21 nt, Human
uaaauaaacaucuaaugaaga

SEQ ID NO: 506882 - RNA, 21 nt, Human
uaagauaaaacuagagagucu

SEQ ID NO: 506883 - RNA, 19 nt, Human
uaauacaaguuauacagaa

SEQ ID NO: 506884 - RNA, 23 nt, Human
uauuugcuuuuaaacacuuaaaa

SEQ ID NO: 506885 - RNA, 23 nt, Human
ucaaaaccagcaacuucccauga

SEQ ID NO: 506886 - RNA, 24 nt, Human
ucaaaaccagcaacuucccaugaa

SEQ ID NO: 506887 - RNA, 24 nt, Human
ucaaaggagccaaaggcuaaggug

SEQ ID NO: 506888 - RNA, 20 nt, Human
ucccaugaaacuagauagcu

SEQ ID NO: 506889 - RNA, 22 nt, Human
ucuguaauaguggaaaacuuuu

SEQ ID NO: 506890 - RNA, 19 nt, Human
ugaaacuagauagcugaga

SEQ ID NO: 506891 - RNA, 19 nt, Human
ugaaagucaguauuugcuu

SEQ ID NO: 506892 - RNA, 20 nt, Human
ugagaggauccaacagauuu

SEQ ID NO: 506893 - RNA, 24 nt, Human
uguggggcuucgaguggucaaagg

SEQ ID NO: 506894 - RNA, 19 nt, Human
uguuucacccaccacuucu

SEQ ID NO: 506895 - RNA, 24 nt, Human
uuaagauaaaacuagagagucuaa

SEQ ID NO: 506896 - RNA, 25 nt, Human
uucuaaauaaacaucuaaugaagaa

SEQ ID NO: 506897 - RNA, 27 nt, Human
aaaccaagggcgggcgaacccucggaa

SEQ ID NO: 506898 - RNA, 27 nt, Human
aaaccaagggcgggcgaacccucggaa

SEQ ID NO: 506899 - RNA, 20 nt, Human
aaggaggaacagaggcagug

SEQ ID NO: 506900 - RNA, 20 nt, Human
aaggaggaacagaggcagug

SEQ ID NO: 506901 - RNA, 18 nt, Human
aggcucaaggaggaacag

SEQ ID NO: 506902 - RNA, 20 nt, Human
cacuucugggucugcuggug

SEQ ID NO: 506903 - RNA, 20 nt, Human
cacuucugggucugcuggug

SEQ ID NO: 506904 - RNA, 21 nt, Human
gcgaacccucggagguagaac

SEQ ID NO: 506905 - RNA, 21 nt, Human
gcgaacccucggagguagaac

SEQ ID NO: 506906 - RNA, 18 nt, Human
ggaggaacagaggcagug

SEQ ID NO: 506907 - RNA, 18 nt, Human
ggaggaacagaggcagug

SEQ ID NO: 506908 - RNA, 18 nt, Human
gucaaaggagccaaaggc

SEQ ID NO: 506909 - RNA, 18 nt, Human
gucaaaggagccaaaggc

SEQ ID NO: 506910 - RNA, 21 nt, Human
uaagauaaaacuagagagucu

SEQ ID NO: 506911 - RNA, 19 nt, Human
uaauacaaguuauacagaa

SEQ ID NO: 506912 - RNA, 23 nt, Human
ucaaaaccagcaacuucccauga

SEQ ID NO: 506913 - RNA, 24 nt, Human
ucaaaaccagcaacuucccaugaa

SEQ ID NO: 506914 - RNA, 24 nt, Human
ucaaaggagccaaaggcuaaggug

SEQ ID NO: 506915 - RNA, 24 nt, Human
ucaaaggagccaaaggcuaaggug

SEQ ID NO: 506916 - RNA, 20 nt, Human
ucccaugaaacuagauagcu

SEQ ID NO: 506917 - RNA, 22 nt, Human
ucuguaauaguggaaaacuuuu

SEQ ID NO: 506918 - RNA, 19 nt, Human
ugaaacuagauagcugaga

SEQ ID NO: 506919 - RNA, 20 nt, Human
ugagaggauccaacagauuu

SEQ ID NO: 506920 - RNA, 24 nt, Human
uguggggcuucgaguggucaaagg

SEQ ID NO: 506921 - RNA, 24 nt, Human
uguggggcuucgaguggucaaagg

SEQ ID NO: 506922 - RNA, 19 nt, Human
uguuucacccaccacuucu

SEQ ID NO: 506923 - RNA, 19 nt, Human
uguuucacccaccacuucu

SEQ ID NO: 506924 - RNA, 24 nt, Human
uuaagauaaaacuagagagucuaa

SEQ ID NO: 506925 - RNA, 21 nt, Human
aaaaaccucaguccagacgac

SEQ ID NO: 506926 - RNA, 24 nt, Human
aaaaaggaagaaaaagaaaccuga

SEQ ID NO: 506927 - RNA, 18 nt, Human
acagccgcuccaaaagcc

SEQ ID NO: 506928 - RNA, 24 nt, Human
acccgcuccgucgcccuccccaca

SEQ ID NO: 506929 - RNA, 19 nt, Human
agaaagaaauauuuaaaaa

SEQ ID NO: 506930 - RNA, 23 nt, Human
agacgacacccacagccgcucca

SEQ ID NO: 506931 - RNA, 23 nt, Human
aggaagaaaaagaaaccugaagu

SEQ ID NO: 506932 - RNA, 24 nt, Human
auaaaaguuuacaauauaccguaa

SEQ ID NO: 506933 - RNA, 21 nt, Human
caaaagccucgcgcccucccc

SEQ ID NO: 506934 - RNA, 19 nt, Human
cacccacagccgcuccaaa

SEQ ID NO: 506935 - RNA, 22 nt, Human
cacccacagccgcuccaaaagc

SEQ ID NO: 506936 - RNA, 21 nt, Human
cccacagccgcuccaaaagcc

SEQ ID NO: 506937 - RNA, 20 nt, Human
ccccacagccgcggcccgga

SEQ ID NO: 506938 - RNA, 20 nt, Human
ccccccgcccccccccccaa

SEQ ID NO: 506939 - RNA, 25 nt, Human
ccccccgcccccccccccaagguug

SEQ ID NO: 506940 - RNA, 18 nt, Human
cccccgcccccccccccc

SEQ ID NO: 506941 - RNA, 23 nt, Human
cccgcccccccccccaagguuga

SEQ ID NO: 506942 - RNA, 19 nt, Human
cccgcuccgucgcccuccc

SEQ ID NO: 506943 - RNA, 21 nt, Human
cccgcuccgucgcccucccca

SEQ ID NO: 506944 - RNA, 24 nt, Human
cccgcuccgucgcccuccccacag

SEQ ID NO: 506945 - RNA, 24 nt, Human
cgcccuccccacagccgcggcccg

SEQ ID NO: 506946 - RNA, 24 nt, Human
cuccaaaagccucgcgcccucccc

SEQ ID NO: 506947 - RNA, 21 nt, Human
cuccccccgccccccccccca

SEQ ID NO: 506948 - RNA, 24 nt, Human
cugaagacauuuuuuuuaaacccu

SEQ ID NO: 506949 - RNA, 20 nt, Human
gaagaaaaagaaaccugaag

SEQ ID NO: 506950 - RNA, 21 nt, Human
gacgcucggcgcucccgggcc

SEQ ID NO: 506951 - RNA, 22 nt, Human
gacgcucggcgcucccgggccu

SEQ ID NO: 506952 - RNA, 20 nt, Human
gagaaagaaauauuuaaaaa

SEQ ID NO: 506953 - RNA, 24 nt, Human
gagaaagaaauauuuaaaaaccuc

SEQ ID NO: 506954 - RNA, 18 nt, Human
gcccccccccccaagguu

SEQ ID NO: 506955 - RNA, 24 nt, Human
gcccuccccccgccccccccccca

SEQ ID NO: 506956 - RNA, 20 nt, Human
gccucgcgcccuccccccgc

SEQ ID NO: 506957 - RNA, 25 nt, Human
gccucgcgcccuccccccgcccccc

SEQ ID NO: 506958 - RNA, 21 nt, Human
gcggcggcggcggcgacgcuc

SEQ ID NO: 506959 - RNA, 21 nt, Human
gcggcggcggcggcgacgcuc

SEQ ID NO: 506960 - RNA, 20 nt, Human
gcuccgucgcccuccccaca

SEQ ID NO: 506961 - RNA, 21 nt, Human
gcuccgucgcccuccccacag

SEQ ID NO: 506962 - RNA, 18 nt, Human
ggcggcggcggcggcgac

SEQ ID NO: 506963 - RNA, 19 nt, Human
uaaaaaccucaguccagac

SEQ ID NO: 506964 - RNA, 24 nt, Human
uaacauaaaaguuuacaauauacc

SEQ ID NO: 506965 - RNA, 18 nt, Human
uacaauauaccguaaaac

SEQ ID NO: 506966 - RNA, 18 nt, Human
uccaaaaaaaaggaagaa

SEQ ID NO: 506967 - RNA, 20 nt, Human
uccaaaaaaaaggaagaaaa

SEQ ID NO: 506968 - RNA, 21 nt, Human
uccaaaagccucgcgcccucc

SEQ ID NO: 506969 - RNA, 21 nt, Human
uccagacgacacccacagccg

SEQ ID NO: 506970 - RNA, 18 nt, Human
ucccgggccuccucgcuc

SEQ ID NO: 506971 - RNA, 19 nt, Human
uccugggucugggccgugc

SEQ ID NO: 506972 - RNA, 21 nt, Human
ucgcgcccuccccccgccccc

SEQ ID NO: 506973 - RNA, 20 nt, Human
uggaauccugggucugggcc

SEQ ID NO: 506974 - RNA, 19 nt, Human
uugaauuaaagcugaagac

SEQ ID NO: 506975 - RNA, 25 nt, Human
aaaaaaacaaaacaaacacaagguu

SEQ ID NO: 506976 - RNA, 23 nt, Human
aaaaacaaaacaaacacaaaaac

SEQ ID NO: 506977 - RNA, 22 nt, Human
aaacaaaacaaacacaaaaaca

SEQ ID NO: 506978 - RNA, 23 nt, Human
aaacaaaacaaacacaaaaacaa

SEQ ID NO: 506979 - RNA, 24 nt, Human
aaacaaaacaaacacaaaaacaaa

SEQ ID NO: 506980 - RNA, 21 nt, Human
aaacaaacacaaaaacaaaac

SEQ ID NO: 506981 - RNA, 22 nt, Human
aaacaaacacaaaaacaaaaca

SEQ ID NO: 506982 - RNA, 23 nt, Human
aacacaaaaacaaaacaaguaaa

SEQ ID NO: 506983 - RNA, 28 nt, Human
aacacaaaaacaaaacaaguaaaucauc

SEQ ID NO: 506984 - RNA, 26 nt, Human
aacacaaaaacaaaacagcagggacu

SEQ ID NO: 506985 - RNA, 18 nt, Human
aacacggugaaacccugu

SEQ ID NO: 506986 - RNA, 19 nt, Human
aacacggugaaacccuguc

SEQ ID NO: 506987 - RNA, 18 nt, Human
aauacuaagacaaguaaa

SEQ ID NO: 506988 - RNA, 24 nt, Human
aauugcuugaaccugggaggcgga

SEQ ID NO: 506989 - RNA, 20 nt, Human
acaaaacaaacacaaaaacc

SEQ ID NO: 506990 - RNA, 19 nt, Human
acaagagugaaacuccauc

SEQ ID NO: 506991 - RNA, 20 nt, Human
acaagagugaaacuccaucu

SEQ ID NO: 506992 - RNA, 21 nt, Human
acaagagugaaacuccaucuc

SEQ ID NO: 506993 - RNA, 24 nt, Human
acccugucauuacuaaaaaugcaa

SEQ ID NO: 506994 - RNA, 22 nt, Human
agaauugcuugaaccugggagg

SEQ ID NO: 506995 - RNA, 23 nt, Human
agacaaguaaauugucggccagg

SEQ ID NO: 506996 - RNA, 22 nt, Human
agacagguggaucgccugaggu

SEQ ID NO: 506997 - RNA, 26 nt, Human
agacagguggaucgccugaggucagg

SEQ ID NO: 506998 - RNA, 24 nt, Human
agccuggccaacacggugaaaccc

SEQ ID NO: 506999 - RNA, 21 nt, Human
aggaguuggagaccagccugg

SEQ ID NO: 507000 - RNA, 24 nt, Human
aggcacaguggcucacgccuguaa

SEQ ID NO: 507001 - RNA, 22 nt, Human
aggcaggagaauugcuugaacc

SEQ ID NO: 507002 - RNA, 24 nt, Human
aggcaggagaauugcuugaaccug

SEQ ID NO: 507003 - RNA, 24 nt, Human
aggcggagguugcggugagccgag

SEQ ID NO: 507004 - RNA, 21 nt, Human
aggcugaggcaggagaauugc

SEQ ID NO: 507005 - RNA, 24 nt, Human
aggcugaggcaggagaauugcuug

SEQ ID NO: 507006 - RNA, 24 nt, Human
aguggcucacgccuguaaucccag

SEQ ID NO: 507007 - RNA, 21 nt, Human
auaauacuaagacaaguaaau

SEQ ID NO: 507008 - RNA, 23 nt, Human
aucacgccauugcacuccagucu

SEQ ID NO: 507009 - RNA, 22 nt, Human
aucccagcacuuuagaaggcca

SEQ ID NO: 507010 - RNA, 19 nt, Human
auuacuaaaaaugcaaaaa

SEQ ID NO: 507011 - RNA, 21 nt, Human
auugcacuccagucuagguga

SEQ ID NO: 507012 - RNA, 25 nt, Human
auugcacuccagucuaggugacaag

SEQ ID NO: 507013 - RNA, 27 nt, Human
caaaaaaacaaaacaaacacaaaaaca

SEQ ID NO: 507014 - RNA, 26 nt, Human
caaaacaaacacaaaaacaaaacaag

SEQ ID NO: 507015 - RNA, 24 nt, Human
caagacagguggaucgccugaggu

SEQ ID NO: 507016 - RNA, 26 nt, Human
caagacagguggaucgccugagguca

SEQ ID NO: 507017 - RNA, 24 nt, Human
caccuacuugggaggcugaggcag

SEQ ID NO: 507018 - RNA, 23 nt, Human
caccuguagucccaccuacuugg

SEQ ID NO: 507019 - RNA, 24 nt, Human
caccuguagucccaccuacuuggg

SEQ ID NO: 507020 - RNA, 23 nt, Human
cacgccuguaaucccagcacuuu

SEQ ID NO: 507021 - RNA, 24 nt, Human
cacuccagucuaggugacaagagu

SEQ ID NO: 507022 - RNA, 19 nt, Human
cauugcacuccagucuagg

SEQ ID NO: 507023 - RNA, 21 nt, Human
cauugcacuccagucuaggug

SEQ ID NO: 507024 - RNA, 23 nt, Human
cauugcacuccagucuaggugac

SEQ ID NO: 507025 - RNA, 24 nt, Human
cauugcacuccagucuaggugaca

SEQ ID NO: 507026 - RNA, 25 nt, Human
cauugcacuccagucuaggugacaa

SEQ ID NO: 507027 - RNA, 19 nt, Human
ccauugcacuccagucuag

SEQ ID NO: 507028 - RNA, 20 nt, Human
ccauugcacuccagucuagg

SEQ ID NO: 507029 - RNA, 21 nt, Human
ccauugcacuccagucuaggu

SEQ ID NO: 507030 - RNA, 24 nt, Human
ccauugcacuccagucuaggugac

SEQ ID NO: 507031 - RNA, 20 nt, Human
cccuacaccacagccagccc

SEQ ID NO: 507032 - RNA, 23 nt, Human
ccuacaccacagccagcccagga

SEQ ID NO: 507033 - RNA, 20 nt, Human
ccugaggucaggaguuggag

SEQ ID NO: 507034 - RNA, 22 nt, Human
ccuggccaacacggugaaaccc

SEQ ID NO: 507035 - RNA, 24 nt, Human
ccuggccaacacggugaaacccug

SEQ ID NO: 507036 - RNA, 18 nt, Human
cgccuguaaucccagcac

SEQ ID NO: 507037 - RNA, 22 nt, Human
cgccuguaaucccagcacuuua

SEQ ID NO: 507038 - RNA, 23 nt, Human
cucaaaaaaacaaaacaaacaca

SEQ ID NO: 507039 - RNA, 22 nt, Human
cucacgccuguaaucccagcac

SEQ ID NO: 507040 - RNA, 24 nt, Human
cucacgccuguaaucccagcacuu

SEQ ID NO: 507041 - RNA, 24 nt, Human
cuccaucucaaaaaaacaaaacaa

SEQ ID NO: 507042 - RNA, 24 nt, Human
cugaaacauacaaaagccuaaaga

SEQ ID NO: 507043 - RNA, 18 nt, Human
cuggccaacacggugaaa

SEQ ID NO: 507044 - RNA, 24 nt, Human
cuggccaacacggugaaacccugu

SEQ ID NO: 507045 - RNA, 23 nt, Human
gagaucacgccauugcacuccag

SEQ ID NO: 507046 - RNA, 22 nt, Human
gagguugcggugagccgagauc

SEQ ID NO: 507047 - RNA, 18 nt, Human
gaucgccugaggucagga

SEQ ID NO: 507048 - RNA, 23 nt, Human
gaucgccugaggucaggaguugg

SEQ ID NO: 507049 - RNA, 24 nt, Human
gaucgccugaggucaggaguugga

SEQ ID NO: 507050 - RNA, 21 nt, Human
gcaacgcccuacaccacagcc

SEQ ID NO: 507051 - RNA, 22 nt, Human
gccaacacggugaaacccuguc

SEQ ID NO: 507052 - RNA, 22 nt, Human
gcccaggaccgacugaucgcuc

SEQ ID NO: 507053 - RNA, 18 nt, Human
ggagguugcggugagccg

SEQ ID NO: 507054 - RNA, 20 nt, Human
ggagguugcggugagccgag

SEQ ID NO: 507055 - RNA, 22 nt, Human
ggagguugcggugagccgagau

SEQ ID NO: 507056 - RNA, 23 nt, Human
ggagguugcggugagccgagauc

SEQ ID NO: 507057 - RNA, 24 nt, Human
ggagguugcggugagccgagauca

SEQ ID NO: 507058 - RNA, 24 nt, Human
ggcaccuguagucccaccuacuug

SEQ ID NO: 507059 - RNA, 22 nt, Human
ggugugguggcgggcaccugua

SEQ ID NO: 507060 - RNA, 24 nt, Human
gucggccaggcacaguggcucacg

SEQ ID NO: 507061 - RNA, 21 nt, Human
gugaaacccugucauuacuaa

SEQ ID NO: 507062 - RNA, 21 nt, Human
guggaucgccugaggucagga

SEQ ID NO: 507063 - RNA, 19 nt, Human
guugcggugagccgagauc

SEQ ID NO: 507064 - RNA, 22 nt, Human
uaaaauucucuaauguaucuuc

SEQ ID NO: 507065 - RNA, 23 nt, Human
uaagacaaguaaauugucggcca

SEQ ID NO: 507066 - RNA, 21 nt, Human
uaagucuuuagucaaaaauuc

SEQ ID NO: 507067 - RNA, 20 nt, Human
ucaggaguuggagaccagcc

SEQ ID NO: 507068 - RNA, 26 nt, Human
uccaucucaaaaaaacaaaacaaaca

SEQ ID NO: 507069 - RNA, 23 nt, Human
ucucaaaaaaacaaaacaaacac

SEQ ID NO: 507070 - RNA, 23 nt, Human
ugaaccugggaggcggagguugc

SEQ ID NO: 507071 - RNA, 22 nt, Human
ugagccgagaucacgccauugc

SEQ ID NO: 507072 - RNA, 24 nt, Human
ugaggcaggagaauugcuugaacc

SEQ ID NO: 507073 - RNA, 25 nt, Human
ugaggcaggagaauugcuugaaccu

SEQ ID NO: 507074 - RNA, 22 nt, Human
ugcaacgcccuacaccacagcc

SEQ ID NO: 507075 - RNA, 25 nt, Human
ugcacuccagucuaggugacaagag

SEQ ID NO: 507076 - RNA, 21 nt, Human
ugcuugaaccugggaggcgga

SEQ ID NO: 507077 - RNA, 23 nt, Human
uggaucgccugaggucaggaguu

SEQ ID NO: 507078 - RNA, 27 nt, Human
uggaucgccugaggucaggaguuggag

SEQ ID NO: 507079 - RNA, 24 nt, Human
uggccaacacggugaaacccuguc

SEQ ID NO: 507080 - RNA, 22 nt, Human
uggcucacgccuguaaucccag

SEQ ID NO: 507081 - RNA, 24 nt, Human
uggcucacgccuguaaucccagca

SEQ ID NO: 507082 - RNA, 24 nt, Human
ugggaggcggagguugcggugagc

SEQ ID NO: 507083 - RNA, 19 nt, Human
ugggaggcugaggcaggag

SEQ ID NO: 507084 - RNA, 22 nt, Human
ugggaggcugaggcaggagaau

SEQ ID NO: 507085 - RNA, 24 nt, Human
ugguggcgggcaccuguaguccca

SEQ ID NO: 507086 - RNA, 18 nt, Human
uguagucccaccuacuug

SEQ ID NO: 507087 - RNA, 18 nt, Human
uuagccgggugugguggc

SEQ ID NO: 507088 - RNA, 24 nt, Human
uuagccgggugugguggcgggcac

SEQ ID NO: 507089 - RNA, 24 nt, Human
uugaaccugggaggcggagguugc

SEQ ID NO: 507090 - RNA, 20 nt, Human
uugcggugagccgagaucac

SEQ ID NO: 507091 - RNA, 24 nt, Human
uugcuugaaccugggaggcggagg

SEQ ID NO: 507092 - RNA, 23 nt, Human
uugggaggcugaggcaggagaau

SEQ ID NO: 507093 - RNA, 24 nt, Human
aaaaaaaaucgucaucaacagcca

SEQ ID NO: 507094 - RNA, 18 nt, Human
aaaaggagagccggcucc

SEQ ID NO: 507095 - RNA, 18 nt, Human
aaacaaaaugccuggagc

SEQ ID NO: 507096 - RNA, 20 nt, Human
aaagacacauucucugucuc

SEQ ID NO: 507097 - RNA, 19 nt, Human
aagcagaaacagagagguc

SEQ ID NO: 507098 - RNA, 22 nt, Human
aagcagaaacagagaggucacg

SEQ ID NO: 507099 - RNA, 18 nt, Human
aagcagaauccgcgcgcg

SEQ ID NO: 507100 - RNA, 23 nt, Human
aaguguuagaagguagcccagcu

SEQ ID NO: 507101 - RNA, 21 nt, Human
aaugcuggaggagaggaagag

SEQ ID NO: 507102 - RNA, 26 nt, Human
accacacuagaauguacacuccggca

SEQ ID NO: 507103 - RNA, 24 nt, Human
accaguccacgcacuggcucaggc

SEQ ID NO: 507104 - RNA, 23 nt, Human
agacaaaugccccagcuaucccc

SEQ ID NO: 507105 - RNA, 19 nt, Human
agagaaaggcucuggccuc

SEQ ID NO: 507106 - RNA, 21 nt, Human
agagcagccccagaaaagccc

SEQ ID NO: 507107 - RNA, 18 nt, Human
agaggcuguugugggcug

SEQ ID NO: 507108 - RNA, 19 nt, Human
agaggcuguugugggcugg

SEQ ID NO: 507109 - RNA, 21 nt, Human
agauggggcacuggcucuggg

SEQ ID NO: 507110 - RNA, 18 nt, Human
agccaccaguauacacca

SEQ ID NO: 507111 - RNA, 20 nt, Human
agccccagaaaagcccugac

SEQ ID NO: 507112 - RNA, 18 nt, Human
agcggcggcgcggcccgg

SEQ ID NO: 507113 - RNA, 30 nt, Human
agcuagacaaaugccccagcuauccccagg

SEQ ID NO: 507114 - RNA, 19 nt, Human
aggagcccuggccaacagu

SEQ ID NO: 507115 - RNA, 22 nt, Human
aggagcccuggccaacaguuuc

SEQ ID NO: 507116 - RNA, 24 nt, Human
aggcuggccaucuugggcuggggc

SEQ ID NO: 507117 - RNA, 24 nt, Human
agggcugauggcagagaaaggcuc

SEQ ID NO: 507118 - RNA, 21 nt, Human
aucacacuuccgaaaaacaca

SEQ ID NO: 507119 - RNA, 21 nt, Human
augucuggaugccaguggaga

SEQ ID NO: 507120 - RNA, 24 nt, Human
auucaaauucugggugacaauuuc

SEQ ID NO: 507121 - RNA, 27 nt, Human
caaagggucggcuccagccauggacac

SEQ ID NO: 507122 - RNA, 20 nt, Human
caaaugccccagcuaucccc

SEQ ID NO: 507123 - RNA, 23 nt, Human
caagagcagccccagaaaagccc

SEQ ID NO: 507124 - RNA, 27 nt, Human
caccagaaacaaaaugccuggagcuuc

SEQ ID NO: 507125 - RNA, 18 nt, Human
caccagcaagcagaaaca

SEQ ID NO: 507126 - RNA, 27 nt, Human
caccgcgccaccggcgccaucagggcu

SEQ ID NO: 507127 - RNA, 18 nt, Human
cacucagaggcccagcgg

SEQ ID NO: 507128 - RNA, 20 nt, Human
cacuuccgaaaaacacaagg

SEQ ID NO: 507129 - RNA, 19 nt, Human
cagaagacagugaggccac

SEQ ID NO: 507130 - RNA, 20 nt, Human
cagagucaccacucccacau

SEQ ID NO: 507131 - RNA, 24 nt, Human
cagcaccagcaagcagaaacagag

SEQ ID NO: 507132 - RNA, 24 nt, Human
cagccaccaguauacaccacacua

SEQ ID NO: 507133 - RNA, 23 nt, Human
cagcggggccacguccgccuccc

SEQ ID NO: 507134 - RNA, 23 nt, Human
cagcugcagccugggguuguggc

SEQ ID NO: 507135 - RNA, 22 nt, Human
caggagaauagcugguggacac

SEQ ID NO: 507136 - RNA, 19 nt, Human
caggccagccagcccuggg

SEQ ID NO: 507137 - RNA, 22 nt, Human
caggccagccagcccuggguac

SEQ ID NO: 507138 - RNA, 24 nt, Human
caggcuuacuucacuugaacaugg

SEQ ID NO: 507139 - RNA, 18 nt, Human
caguagcaccaagaccag

SEQ ID NO: 507140 - RNA, 21 nt, Human
caguauacaccacacuagaau

SEQ ID NO: 507141 - RNA, 24 nt, Human
caugcccaccgcgccaccggcgcc

SEQ ID NO: 507142 - RNA, 19 nt, Human
ccaccaguauacaccacac

SEQ ID NO: 507143 - RNA, 23 nt, Human
ccacgccugugggucccucuacc

SEQ ID NO: 507144 - RNA, 21 nt, Human
ccagaagacagugaggccacg

SEQ ID NO: 507145 - RNA, 18 nt, Human
ccagcuagacaaaugccc

SEQ ID NO: 507146 - RNA, 22 nt, Human
ccagcuauccccaggggaguua

SEQ ID NO: 507147 - RNA, 18 nt, Human
cccacagauguggaugac

SEQ ID NO: 507148 - RNA, 21 nt, Human
cccaccgcgccaccggcgcca

SEQ ID NO: 507149 - RNA, 18 nt, Human
ccccagaaaagcccugac

SEQ ID NO: 507150 - RNA, 21 nt, Human
ccgcgcgcggcggcggcagcg

SEQ ID NO: 507151 - RNA, 21 nt, Human
ccucccagcguggcucagcuc

SEQ ID NO: 507152 - RNA, 24 nt, Human
ccuccuggcagccacaggagcccu

SEQ ID NO: 507153 - RNA, 22 nt, Human
cgcuggggagugggggagugcu

SEQ ID NO: 507154 - RNA, 19 nt, Human
cgggcaggcccccaugcuu

SEQ ID NO: 507155 - RNA, 19 nt, Human
cggggagaggcaaauggca

SEQ ID NO: 507156 - RNA, 28 nt, Human
cuacagagaauuguguaaaaaaaaaaaa

SEQ ID NO: 507157 - RNA, 19 nt, Human
cucagcucggcucccucaa

SEQ ID NO: 507158 - RNA, 20 nt, Human
cucagcucggcucccucaac

SEQ ID NO: 507159 - RNA, 28 nt, Human
cugcagggggucugagucaagcccuccu

SEQ ID NO: 507160 - RNA, 20 nt, Human
gaagcaucacacuuccgaaa

SEQ ID NO: 507161 - RNA, 21 nt, Human
gaauuguguaaaaaaaaaaaa

SEQ ID NO: 507162 - RNA, 18 nt, Human
gacacagggggacagugg

SEQ ID NO: 507163 - RNA, 22 nt, Human
gacacauucucugucucugggu

SEQ ID NO: 507164 - RNA, 18 nt, Human
gagaaagagaggcuguug

SEQ ID NO: 507165 - RNA, 22 nt, Human
gagaaugcuggaggagaggaag

SEQ ID NO: 507166 - RNA, 18 nt, Human
gaggagaaagagaggcug

SEQ ID NO: 507167 - RNA, 21 nt, Human
gaggagaaugcuggaggagag

SEQ ID NO: 507168 - RNA, 23 nt, Human
gaggcuguugugggcugguucuu

SEQ ID NO: 507169 - RNA, 18 nt, Human
gagugcuuguauguggga

SEQ ID NO: 507170 - RNA, 24 nt, Human
gcacucagaggcccagcggggcca

SEQ ID NO: 507171 - RNA, 21 nt, Human
gcagggggucugagucaagcc

SEQ ID NO: 507172 - RNA, 18 nt, Human
gccccagaaaagcccuga

SEQ ID NO: 507173 - RNA, 25 nt, Human
gccccagaaaagcccugacaggaag

SEQ ID NO: 507174 - RNA, 18 nt, Human
gcccugacaggaagggug

SEQ ID NO: 507175 - RNA, 18 nt, Human
gcgcgcggcggcggcagc

SEQ ID NO: 507176 - RNA, 24 nt, Human
gcggcagcggcggcgcggcccggc

SEQ ID NO: 507177 - RNA, 21 nt, Human
gcggcggcggcagcggcggcg

SEQ ID NO: 507178 - RNA, 19 nt, Human
gcucugggggugucggcuc

SEQ ID NO: 507179 - RNA, 19 nt, Human
gcugauggcagagaaaggc

SEQ ID NO: 507180 - RNA, 19 nt, Human
gcuggccaucuugggcugg

SEQ ID NO: 507181 - RNA, 19 nt, Human
ggagugcuuguauguggga

SEQ ID NO: 507182 - RNA, 22 nt, Human
ggcagcggcggcgcggcccggc

SEQ ID NO: 507183 - RNA, 18 nt, Human
ggccgaggaaguuagagc

SEQ ID NO: 507184 - RNA, 21 nt, Human
ggcggcagcggcggcgcggcc

SEQ ID NO: 507185 - RNA, 18 nt, Human
ggcuggggcucccugggc

SEQ ID NO: 507186 - RNA, 21 nt, Human
gggaggcugcaguauguggag

SEQ ID NO: 507187 - RNA, 19 nt, Human
gggugucggcuccucuccc

SEQ ID NO: 507188 - RNA, 25 nt, Human
gucaucaacagccaccaguauacac

SEQ ID NO: 507189 - RNA, 19 nt, Human
gugagaacauucuuacccc

SEQ ID NO: 507190 - RNA, 21 nt, Human
gugggucccucuacccacggc

SEQ ID NO: 507191 - RNA, 24 nt, Human
guggucugagcuauggcaaaguga

SEQ ID NO: 507192 - RNA, 21 nt, Human
uacauggccacaagaggagcc

SEQ ID NO: 507193 - RNA, 23 nt, Human
uacccacggcccacccacagaug

SEQ ID NO: 507194 - RNA, 21 nt, Human
uacgggcaggcccccaugcug

SEQ ID NO: 507195 - RNA, 25 nt, Human
uagacaaaugccccagcuaucccca

SEQ ID NO: 507196 - RNA, 21 nt, Human
uauacaccacacuagaaugua

SEQ ID NO: 507197 - RNA, 26 nt, Human
uauacaccacacuagaauguacacuc

SEQ ID NO: 507198 - RNA, 27 nt, Human
ucagaggagaaugcuggaggagaggaa

SEQ ID NO: 507199 - RNA, 19 nt, Human
uccacgccugugggucccu

SEQ ID NO: 507200 - RNA, 22 nt, Human
ugaggauccugcaaacaacccc

SEQ ID NO: 507201 - RNA, 18 nt, Human
ugauggcagagaaaggcu

SEQ ID NO: 507202 - RNA, 27 nt, Human
ugauggcagagaaaggcucuccccgag

SEQ ID NO: 507203 - RNA, 20 nt, Human
ugcccgguccacgccugugg

SEQ ID NO: 507204 - RNA, 18 nt, Human
ugccuggagcuucugagc

SEQ ID NO: 507205 - RNA, 20 nt, Human
ugccuggagcuucugagcag

SEQ ID NO: 507206 - RNA, 19 nt, Human
ugcuggaggagaggaagag

SEQ ID NO: 507207 - RNA, 21 nt, Human
uggacacagggggacagugga

SEQ ID NO: 507208 - RNA, 19 nt, Human
uggaggagaggaagaggaa

SEQ ID NO: 507209 - RNA, 23 nt, Human
uggaugacccaaagcagaugucu

SEQ ID NO: 507210 - RNA, 24 nt, Human
uggcagccacaggagcccucucug

SEQ ID NO: 507211 - RNA, 23 nt, Human
uggcaggccagccagcccugggu

SEQ ID NO: 507212 - RNA, 19 nt, Human
ugggcagguaacaaggggg

SEQ ID NO: 507213 - RNA, 18 nt, Human
ugggcuugcaguggggag

SEQ ID NO: 507214 - RNA, 21 nt, Human
ugggcuugcaguggggagggu

SEQ ID NO: 507215 - RNA, 24 nt, Human
ugggcuugcaguggggagggucag

SEQ ID NO: 507216 - RNA, 23 nt, Human
uguaaaaaaaaaaaaaaaaucgu

SEQ ID NO: 507217 - RNA, 22 nt, Human
ugugagaacauucuuaccccua

SEQ ID NO: 507218 - RNA, 22 nt, Human
uguggaggagaaagagaggcug

SEQ ID NO: 507219 - RNA, 20 nt, Human
ugugggcugguucuuaagac

SEQ ID NO: 507220 - RNA, 20 nt, Human
uguguaaaaaaaaaaaaaaa

SEQ ID NO: 507221 - RNA, 23 nt, Human
uucugagaagcagaauccgcgcg

SEQ ID NO: 507222 - RNA, 18 nt, Human
uugcaguggggaggguca

SEQ ID NO: 507223 - RNA, 22 nt, Human
uuggcagucaaagagaagcauc

SEQ ID NO: 507224 - RNA, 23 nt, Human
uugggcuggggcucccugggcuu

SEQ ID NO: 507225 - RNA, 24 nt, Human
uuguguaaaaaaaaaaaaaaaauc

SEQ ID NO: 507226 - RNA, 20 nt, Human
aaacauuuucagcaaaauuc

SEQ ID NO: 507227 - RNA, 21 nt, Human
aaauagugaauuuuaaagcuu

SEQ ID NO: 507228 - RNA, 21 nt, Human
augaagcuaaagaaaagccag

SEQ ID NO: 507229 - RNA, 20 nt, Human
cauuuucagcaaaauucuag

SEQ ID NO: 507230 - RNA, 23 nt, Human
cuaaagaaaagccagaagacuaa

SEQ ID NO: 507231 - RNA, 21 nt, Human
cuucuuccuaaccuuucauug

SEQ ID NO: 507232 - RNA, 26 nt, Human
uaaacuagaagugauaaaauguucag

SEQ ID NO: 507233 - RNA, 21 nt, Human
uaucacaacaugcuuauuuga

SEQ ID NO: 507234 - RNA, 23 nt, Human
uccaaaauaaaagaguauuucau

SEQ ID NO: 507235 - RNA, 20 nt, Human
ugaagcuaaagaaaagccag

SEQ ID NO: 507236 - RNA, 23 nt, Human
ugagaauagcauuuuaaaacauu

SEQ ID NO: 507237 - RNA, 21 nt, Human
uggcuggaugagaauagcauu

SEQ ID NO: 507238 - RNA, 18 nt, Human
uucagcaaaauucuagaa

SEQ ID NO: 507239 - RNA, 23 nt, Human
uugauaguaaaauagugaauuuu

SEQ ID NO: 507240 - RNA, 21 nt, Human
uuuaaagcuucuuccuaaccu

SEQ ID NO: 507241 - RNA, 28 nt, Human
uuuuucaauugucacuagugaucuugau

SEQ ID NO: 507242 - RNA, 19 nt, Human
aagcggcaguagccgcgga

SEQ ID NO: 507243 - RNA, 19 nt, Human
acgccgaaacccagugacg

SEQ ID NO: 507244 - RNA, 23 nt, Human
agacagcugaaccgcuugccaga

SEQ ID NO: 507245 - RNA, 20 nt, Human
agacaggauucuuucaggua

SEQ ID NO: 507246 - RNA, 23 nt, Human
agacgccgaaacccagugacgcc

SEQ ID NO: 507247 - RNA, 19 nt, Human
agagucuuuaggucuucuc

SEQ ID NO: 507248 - RNA, 19 nt, Human
agggagcagacagcugaac

SEQ ID NO: 507249 - RNA, 18 nt, Human
aggucuucucucagccaa

SEQ ID NO: 507250 - RNA, 20 nt, Human
caaagggaauaaacauggug

SEQ ID NO: 507251 - RNA, 26 nt, Human
caaagggaauaaacauggugaaguca

SEQ ID NO: 507252 - RNA, 19 nt, Human
caacaaauacucagaaucc

SEQ ID NO: 507253 - RNA, 19 nt, Human
cagcagugcaacccgacuc

SEQ ID NO: 507254 - RNA, 23 nt, Human
ccagugacgcccuccaccgcucc

SEQ ID NO: 507255 - RNA, 21 nt, Human
ccugcccaacaaauacucaga

SEQ ID NO: 507256 - RNA, 23 nt, Human
ccugcccaacaaauacucagaau

SEQ ID NO: 507257 - RNA, 21 nt, Human
cgccgaaacccagugacgccc

SEQ ID NO: 507258 - RNA, 26 nt, Human
gaucacagcagugcaacccgacucgg

SEQ ID NO: 507259 - RNA, 23 nt, Human
gcagugcaacccgacucguggcc

SEQ ID NO: 507260 - RNA, 20 nt, Human
ggagaccaaauaagacagga

SEQ ID NO: 507261 - RNA, 20 nt, Human
uauggagaccaaauaagaca

SEQ ID NO: 507262 - RNA, 21 nt, Human
uauuuuauugaaggagauaag

SEQ ID NO: 507263 - RNA, 22 nt, Human
uauuuuauugaaggagauaagu

SEQ ID NO: 507264 - RNA, 20 nt, Human
ugaagcggcaguagccgcgg

SEQ ID NO: 507265 - RNA, 21 nt, Human
ugaagcggcaguagccgcgga

SEQ ID NO: 507266 - RNA, 22 nt, Human
aaaaacuaaaaagaaaaugcca

SEQ ID NO: 507267 - RNA, 24 nt, Human
aaaaacuaaaaagaaaaugccacu

SEQ ID NO: 507268 - RNA, 19 nt, Human
aacuugucucuuuaauacc

SEQ ID NO: 507269 - RNA, 18 nt, Human
aagaagaaauucuagucc

SEQ ID NO: 507270 - RNA, 21 nt, Human
agaaaaugccacucaacauca

SEQ ID NO: 507271 - RNA, 22 nt, Human
agcaauaggccagcaggaaaaa

SEQ ID NO: 507272 - RNA, 19 nt, Human
caacaucauugguauagca

SEQ ID NO: 507273 - RNA, 21 nt, Human
caacuguccagaguucucagc

SEQ ID NO: 507274 - RNA, 24 nt, Human
caagccccacgcgccucccggaaa

SEQ ID NO: 507275 - RNA, 21 nt, Human
cagccuuuaaaacuucauuga

SEQ ID NO: 507276 - RNA, 22 nt, Human
caggaaaaaaaauucugugaua

SEQ ID NO: 507277 - RNA, 18 nt, Human
cccggaaacaggcccgcc

SEQ ID NO: 507278 - RNA, 19 nt, Human
ccucaagccccacgcgccu

SEQ ID NO: 507279 - RNA, 25 nt, Human
cggccucaagccccacgcgccuccc

SEQ ID NO: 507280 - RNA, 24 nt, Human
cucaagccccacgcgccucccgga

SEQ ID NO: 507281 - RNA, 21 nt, Human
cucccggaaacaggcccgccc

SEQ ID NO: 507282 - RNA, 20 nt, Human
cucggccucaagccccacgc

SEQ ID NO: 507283 - RNA, 21 nt, Human
cugcucuucauucuuuuccac

SEQ ID NO: 507284 - RNA, 19 nt, Human
cugugauaaacuugucucu

SEQ ID NO: 507285 - RNA, 24 nt, Human
cuugcuucuggauuuuauguuaau

SEQ ID NO: 507286 - RNA, 20 nt, Human
gaaaaaguauuuauuucugc

SEQ ID NO: 507287 - RNA, 18 nt, Human
gagcaaauccaguaucca

SEQ ID NO: 507288 - RNA, 19 nt, Human
gguauagcaauaggccagc

SEQ ID NO: 507289 - RNA, 23 nt, Human
uaguuguagauauggaauauauu

SEQ ID NO: 507290 - RNA, 25 nt, Human
uaguuguagauauggaauauauuuu

SEQ ID NO: 507291 - RNA, 22 nt, Human
uccagaguucucagcuuacgga

SEQ ID NO: 507292 - RNA, 21 nt, Human
ucuccaaaaaauguuaagagg

SEQ ID NO: 507293 - RNA, 24 nt, Human
ucuggauuuuauguuaauuucuga

SEQ ID NO: 507294 - RNA, 21 nt, Human
ucuuuuacugcugcucuucau

SEQ ID NO: 507295 - RNA, 20 nt, Human
uggcagcaagggccguucuc

SEQ ID NO: 507296 - RNA, 25 nt, Human
uguccagaguucucagcuuacggaa

SEQ ID NO: 507297 - RNA, 18 nt, Human
uuaaaggcaaagcaccau

SEQ ID NO: 507298 - RNA, 24 nt, Human
uuaauaccaagaagaaauucuagu

SEQ ID NO: 507299 - RNA, 19 nt, Human
uucugcuccguucauacau

SEQ ID NO: 507300 - RNA, 23 nt, Human
uugguacagccuuuaaaacuuca

SEQ ID NO: 507301 - RNA, 18 nt, Human
uugguauagcaauaggcc

SEQ ID NO: 507302 - RNA, 24 nt, Human
uugguggcagcaagggccguucuc

SEQ ID NO: 507303 - RNA, 20 nt, Human
aaaugacccuugcgcugagg

SEQ ID NO: 507304 - RNA, 19 nt, Human
aacuguauaccaucauaca

SEQ ID NO: 507305 - RNA, 18 nt, Human
cacacucuucggcugccc

SEQ ID NO: 507306 - RNA, 25 nt, Human
caguagcucgggcaccuaagcacac

SEQ ID NO: 507307 - RNA, 22 nt, Human
ccacacucuucggcugcccgga

SEQ ID NO: 507308 - RNA, 24 nt, Human
ccaucauacaaaaaaggauuuuau

SEQ ID NO: 507309 - RNA, 19 nt, Human
cccuugcgcugaggaccgu

SEQ ID NO: 507310 - RNA, 19 nt, Human
ccguuaccuaccacacucu

SEQ ID NO: 507311 - RNA, 21 nt, Human
ccucgugccgaaucuuggcuc

SEQ ID NO: 507312 - RNA, 22 nt, Human
cgacgaaaugacccuugcgcug

SEQ ID NO: 507313 - RNA, 21 nt, Human
cgagggccgucccuucccagc

SEQ ID NO: 507314 - RNA, 21 nt, Human
gggaaaaaaaucaauacaaug

SEQ ID NO: 507315 - RNA, 25 nt, Human
ugcccggacuuagacccucaguagc

SEQ ID NO: 507316 - RNA, 21 nt, Human
uucccagcgacgaaaugaccc

SEQ ID NO: 507317 - RNA, 23 nt, Human
aaaauccuaaaguuaaucucaca

SEQ ID NO: 507318 - RNA, 20 nt, Human
aaacaguaaggaaauacaau

SEQ ID NO: 507319 - RNA, 18 nt, Human
aagcuacaagggagcuga

SEQ ID NO: 507320 - RNA, 19 nt, Human
aaugacacuuuuuuuucag

SEQ ID NO: 507321 - RNA, 21 nt, Human
aaugacacuuuuuuuucagug

SEQ ID NO: 507322 - RNA, 22 nt, Human
agccaguauuaucaucagcaca

SEQ ID NO: 507323 - RNA, 20 nt, Human
aguaaggaaauacaauauua

SEQ ID NO: 507324 - RNA, 20 nt, Human
augaaucacuaguaaaagag

SEQ ID NO: 507325 - RNA, 22 nt, Human
caacucccaaaauaaacagaaa

SEQ ID NO: 507326 - RNA, 23 nt, Human
caagggagcugagaguugauggc

SEQ ID NO: 507327 - RNA, 21 nt, Human
cccaaaauaaacagaaagagc

SEQ ID NO: 507328 - RNA, 21 nt, Human
cccacaaaagcuacaagggag

SEQ ID NO: 507329 - RNA, 18 nt, Human
cccugcaucugcugcugu

SEQ ID NO: 507330 - RNA, 23 nt, Human
ccgcacagagauacuauaucugu

SEQ ID NO: 507331 - RNA, 18 nt, Human
ccugcaucugcugcugug

SEQ ID NO: 507332 - RNA, 19 nt, Human
cucccaaaauaaacagaaa

SEQ ID NO: 507333 - RNA, 20 nt, Human
cuuacacaacaaaaaauccu

SEQ ID NO: 507334 - RNA, 22 nt, Human
uaaaaaaaaacccugcaucugc

SEQ ID NO: 507335 - RNA, 21 nt, Human
uaaauaagaaacccuaaaaag

SEQ ID NO: 507336 - RNA, 18 nt, Human
ugaaucacuaguaaaaga

SEQ ID NO: 507337 - RNA, 22 nt, Human
ugauaaaucaaacuacaucuuu

SEQ ID NO: 507338 - RNA, 20 nt, Human
ugauuuguaaagaaauaaau

SEQ ID NO: 507339 - RNA, 18 nt, Human
uuaaaaaaaaacccugca

SEQ ID NO: 507340 - RNA, 24 nt, Human
uuuuuuuucaguguauuaaucuga

SEQ ID NO: 507341 - RNA, 24 nt, Human
aaaaauugcaaauuggccuuaacc

SEQ ID NO: 507342 - RNA, 21 nt, Human
aaaagcaggugagaaaaauca

SEQ ID NO: 507343 - RNA, 23 nt, Human
aaaaggccugagccaugcaccgc

SEQ ID NO: 507344 - RNA, 19 nt, Human
aaauaccauaugauugguc

SEQ ID NO: 507345 - RNA, 22 nt, Human
aaauuccuuaaagaacaccacc

SEQ ID NO: 507346 - RNA, 18 nt, Human
aacacuuucaguucugcc

SEQ ID NO: 507347 - RNA, 21 nt, Human
aagaaacucaggccuggagac

SEQ ID NO: 507348 - RNA, 20 nt, Human
aagcacaagacaagcugugg

SEQ ID NO: 507349 - RNA, 22 nt, Human
aagcuguggugacucccugaga

SEQ ID NO: 507350 - RNA, 21 nt, Human
aaucauuuuaggggauggagg

SEQ ID NO: 507351 - RNA, 23 nt, Human
aaugacaugugauuuaaaaaucc

SEQ ID NO: 507352 - RNA, 20 nt, Human
accaggccaccaccauaaga

SEQ ID NO: 507353 - RNA, 20 nt, Human
acccacagaaaaggacaaac

SEQ ID NO: 507354 - RNA, 20 nt, Human
accgcaggcucaguacacuu

SEQ ID NO: 507355 - RNA, 19 nt, Human
acuccauagccuuggaaua

SEQ ID NO: 507356 - RNA, 21 nt, Human
agaaaaaacacucugaccucc

SEQ ID NO: 507357 - RNA, 22 nt, Human
agaaaaagcaguaauucagaga

SEQ ID NO: 507358 - RNA, 23 nt, Human
agaaauuccuuaaagaacaccac

SEQ ID NO: 507359 - RNA, 23 nt, Human
agagagcuauauuaaauacuugg

SEQ ID NO: 507360 - RNA, 30 nt, Human
agagcaccgggcaauuuauugcucuuuucc

SEQ ID NO: 507361 - RNA, 18 nt, Human
agcccagcaaaccuuggg

SEQ ID NO: 507362 - RNA, 20 nt, Human
aggccaccaccauaagagag

SEQ ID NO: 507363 - RNA, 21 nt, Human
aguaauucagagaaagaaagg

SEQ ID NO: 507364 - RNA, 18 nt, Human
auaccugaaaacacuuuc

SEQ ID NO: 507365 - RNA, 20 nt, Human
auggaagcagcauuucuggg

SEQ ID NO: 507366 - RNA, 19 nt, Human
caaaacagagaacauaggu

SEQ ID NO: 507367 - RNA, 20 nt, Human
caauuugguuauagaaauuc

SEQ ID NO: 507368 - RNA, 23 nt, Human
cacaagacaagcuguggugacuc

SEQ ID NO: 507369 - RNA, 18 nt, Human
cacagaaaaggacaaaca

SEQ ID NO: 507370 - RNA, 21 nt, Human
cacagaaaaggacaaacaaga

SEQ ID NO: 507371 - RNA, 23 nt, Human
cacagaaccugugaauccccauu

SEQ ID NO: 507372 - RNA, 22 nt, Human
caccgcaggcucaguacacuag

SEQ ID NO: 507373 - RNA, 21 nt, Human
caccucccccccaaaaacaac

SEQ ID NO: 507374 - RNA, 21 nt, Human
cacugcagguaggucucugcc

SEQ ID NO: 507375 - RNA, 19 nt, Human
cacuggcuaaaagcaaagc

SEQ ID NO: 507376 - RNA, 20 nt, Human
cacuguggugaugcacagaa

SEQ ID NO: 507377 - RNA, 21 nt, Human
cagaacucacugcaacugaca

SEQ ID NO: 507378 - RNA, 18 nt, Human
cagaagaaacucaggccu

SEQ ID NO: 507379 - RNA, 18 nt, Human
cagcaaaccuugggaaua

SEQ ID NO: 507380 - RNA, 20 nt, Human
cagcaucuaacaacaccccu

SEQ ID NO: 507381 - RNA, 20 nt, Human
caucaccaggccaccaccau

SEQ ID NO: 507382 - RNA, 21 nt, Human
cauccugaucuuccuaggaga

SEQ ID NO: 507383 - RNA, 20 nt, Human
ccacagaaaaggacaaacaa

SEQ ID NO: 507384 - RNA, 21 nt, Human
ccaccucccccccaaaaacaa

SEQ ID NO: 507385 - RNA, 18 nt, Human
ccagaagaaacucaggcc

SEQ ID NO: 507386 - RNA, 19 nt, Human
ccaucuucacaaucaccac

SEQ ID NO: 507387 - RNA, 22 nt, Human
cccaaagacagaaaaaacacuc

SEQ ID NO: 507388 - RNA, 19 nt, Human
cccauucuaaaauggaauc

SEQ ID NO: 507389 - RNA, 18 nt, Human
ccccaaaaacaacucaac

SEQ ID NO: 507390 - RNA, 19 nt, Human
ccccaggagaauccucucu

SEQ ID NO: 507391 - RNA, 19 nt, Human
ccccaugcugaaugggccc

SEQ ID NO: 507392 - RNA, 24 nt, Human
cccccaaaaacaacucaacuaauu

SEQ ID NO: 507393 - RNA, 23 nt, Human
cccccaccucccccccaaaaaca

SEQ ID NO: 507394 - RNA, 18 nt, Human
cccccuacccccaccucc

SEQ ID NO: 507395 - RNA, 19 nt, Human
cccccuacccccaccuccc

SEQ ID NO: 507396 - RNA, 27 nt, Human
cccccuacccccaccucccccccaaaa

SEQ ID NO: 507397 - RNA, 19 nt, Human
ccccuacccccaccucccc

SEQ ID NO: 507398 - RNA, 20 nt, Human
ccccuacccccaccuccccc

SEQ ID NO: 507399 - RNA, 21 nt, Human
ccccuacccccaccucccccc

SEQ ID NO: 507400 - RNA, 25 nt, Human
ccccuacccccaccucccccccaaa

SEQ ID NO: 507401 - RNA, 18 nt, Human
ccccuagcuucacacggu

SEQ ID NO: 507402 - RNA, 18 nt, Human
cccuacccccaccucccc

SEQ ID NO: 507403 - RNA, 22 nt, Human
cccuacccccaccuccccccca

SEQ ID NO: 507404 - RNA, 19 nt, Human
cccuagcuucacacggucc

SEQ ID NO: 507405 - RNA, 18 nt, Human
ccuagcuucacacggucc

SEQ ID NO: 507406 - RNA, 22 nt, Human
ccugcauucuucugagcugccc

SEQ ID NO: 507407 - RNA, 18 nt, Human
ccuggagacacugcacua

SEQ ID NO: 507408 - RNA, 19 nt, Human
ccuugugccccagcucucc

SEQ ID NO: 507409 - RNA, 23 nt, Human
cggggcugcagggcuggggggcg

SEQ ID NO: 507410 - RNA, 22 nt, Human
cuaaacccacagaaaaggacaa

SEQ ID NO: 507411 - RNA, 22 nt, Human
cuaugauaagugaaaucaaaaa

SEQ ID NO: 507412 - RNA, 21 nt, Human
cucuaagacaccccaggagaa

SEQ ID NO: 507413 - RNA, 22 nt, Human
cucuccuauguguggauuucau

SEQ ID NO: 507414 - RNA, 21 nt, Human
cucuuucugguguucugugcc

SEQ ID NO: 507415 - RNA, 19 nt, Human
cugcagguaggucucugcc

SEQ ID NO: 507416 - RNA, 18 nt, Human
cugccuccaguccccuug

SEQ ID NO: 507417 - RNA, 18 nt, Human
cugccucuaagacacccc

SEQ ID NO: 507418 - RNA, 21 nt, Human
cuggcugcgccuuguaccgga

SEQ ID NO: 507419 - RNA, 21 nt, Human
cuggggggcggcggcggggcc

SEQ ID NO: 507420 - RNA, 23 nt, Human
cuguccucgccgggcugggcgcg

SEQ ID NO: 507421 - RNA, 19 nt, Human
cuucaaguaggaccggucc

SEQ ID NO: 507422 - RNA, 20 nt, Human
cuucugcagugugcugagaa

SEQ ID NO: 507423 - RNA, 22 nt, Human
cuuggcccaaagacagaaaaaa

SEQ ID NO: 507424 - RNA, 25 nt, Human
cuuuguggccgcgcugggggccgcc

SEQ ID NO: 507425 - RNA, 23 nt, Human
cuuuuagaguugaggccaggcug

SEQ ID NO: 507426 - RNA, 18 nt, Human
gaagaaacucaggccugg

SEQ ID NO: 507427 - RNA, 18 nt, Human
gaaucuaccuacacacca

SEQ ID NO: 507428 - RNA, 21 nt, Human
gaaucuguuccagaagaaacu

SEQ ID NO: 507429 - RNA, 22 nt, Human
gagaaagaaaggaaaaugacag

SEQ ID NO: 507430 - RNA, 20 nt, Human
gagcugcccuucugcagugu

SEQ ID NO: 507431 - RNA, 22 nt, Human
gcagcagcugcuggagcgcggc

SEQ ID NO: 507432 - RNA, 22 nt, Human
gcagugugcugagaaacacccc

SEQ ID NO: 507433 - RNA, 23 nt, Human
gccgggcugggcgcggccggggc

SEQ ID NO: 507434 - RNA, 24 nt, Human
gccuccuggugcuguccucgccgg

SEQ ID NO: 507435 - RNA, 20 nt, Human
gcgcggccggggcugcgggg

SEQ ID NO: 507436 - RNA, 22 nt, Human
gcggcagcagcugcuggagcgc

SEQ ID NO: 507437 - RNA, 18 nt, Human
gcggcggcggggccgggc

SEQ ID NO: 507438 - RNA, 19 nt, Human
gcuguccucgccgggcugg

SEQ ID NO: 507439 - RNA, 19 nt, Human
ggaaaagcaggugagaaaa

SEQ ID NO: 507440 - RNA, 19 nt, Human
ggagcaaaucacauauuca

SEQ ID NO: 507441 - RNA, 21 nt, Human
gggaggagcuggcugcgccuu

SEQ ID NO: 507442 - RNA, 23 nt, Human
gggcugggcgcggccggggcugc

SEQ ID NO: 507443 - RNA, 21 nt, Human
gggcugggcggcagcagcugc

SEQ ID NO: 507444 - RNA, 21 nt, Human
gggcugggcggcagcagcugc

SEQ ID NO: 507445 - RNA, 24 nt, Human
ggggaguagucuuccgauuccgag

SEQ ID NO: 507446 - RNA, 24 nt, Human
gggggccgccuccuggugcugucc

SEQ ID NO: 507447 - RNA, 21 nt, Human
gggggcggcggcggggccggg

SEQ ID NO: 507448 - RNA, 22 nt, Human
ggggggcggcggcggggccggg

SEQ ID NO: 507449 - RNA, 21 nt, Human
gguguucugugcccccuaccc

SEQ ID NO: 507450 - RNA, 19 nt, Human
guaaagggaaaccgcuaca

SEQ ID NO: 507451 - RNA, 19 nt, Human
gucucggaggagcuugggg

SEQ ID NO: 507452 - RNA, 22 nt, Human
uaaaaaaaaucauuuuagggga

SEQ ID NO: 507453 - RNA, 20 nt, Human
uaaaagaaagacggucccca

SEQ ID NO: 507454 - RNA, 21 nt, Human
uaaaagcaaagcaaucuggau

SEQ ID NO: 507455 - RNA, 22 nt, Human
uaaaauucccuugaaaauacca

SEQ ID NO: 507456 - RNA, 20 nt, Human
uaaaccugccacguucuaaa

SEQ ID NO: 507457 - RNA, 26 nt, Human
uaaauguaaaagagcaaaaaauuuug

SEQ ID NO: 507458 - RNA, 27 nt, Human
uaaauguccuucuuuucuggacauuuc

SEQ ID NO: 507459 - RNA, 20 nt, Human
uaacaacaccccuugaucug

SEQ ID NO: 507460 - RNA, 24 nt, Human
uaacaacaccccuugaucugcagu

SEQ ID NO: 507461 - RNA, 24 nt, Human
uaacuagucuacuaucaaacugaa

SEQ ID NO: 507462 - RNA, 19 nt, Human
uaagagagcuauauuaaau

SEQ ID NO: 507463 - RNA, 19 nt, Human
uacagugaugugcugggau

SEQ ID NO: 507464 - RNA, 21 nt, Human
uacccccaccucccccccaaa

SEQ ID NO: 507465 - RNA, 19 nt, Human
uagaaagcacuggcuaaaa

SEQ ID NO: 507466 - RNA, 21 nt, Human
uagcagcaaauuaccaucuuc

SEQ ID NO: 507467 - RNA, 19 nt, Human
uaucaaacugaaaagauga

SEQ ID NO: 507468 - RNA, 23 nt, Human
ucauguggagacaauuugggggg

SEQ ID NO: 507469 - RNA, 22 nt, Human
uccacuugggaugcagaacuca

SEQ ID NO: 507470 - RNA, 20 nt, Human
uccauauuaauguagaccau

SEQ ID NO: 507471 - RNA, 19 nt, Human
ucccagagcccagcaaacc

SEQ ID NO: 507472 - RNA, 23 nt, Human
ucccagagcccagcaaaccuugg

SEQ ID NO: 507473 - RNA, 20 nt, Human
uccccauucuaaaauggaau

SEQ ID NO: 507474 - RNA, 19 nt, Human
ucuaaaauggaaucuguuc

SEQ ID NO: 507475 - RNA, 18 nt, Human
ucuaacaacaccccuuga

SEQ ID NO: 507476 - RNA, 19 nt, Human
ucucagacaggacuuggcc

SEQ ID NO: 507477 - RNA, 18 nt, Human
ucugaccuccuggacagc

SEQ ID NO: 507478 - RNA, 19 nt, Human
ucugaccuccuggacagcu

SEQ ID NO: 507479 - RNA, 23 nt, Human
ugaaaaaaaaaaucuguuucuga

SEQ ID NO: 507480 - RNA, 21 nt, Human
ugaaaaauucccaaacaagaa

SEQ ID NO: 507481 - RNA, 21 nt, Human
ugaaaacacuuucaguucugc

SEQ ID NO: 507482 - RNA, 18 nt, Human
ugaguucgggaggagcug

SEQ ID NO: 507483 - RNA, 24 nt, Human
ugcacagaaccugugaauccccau

SEQ ID NO: 507484 - RNA, 23 nt, Human
ugccccagcucuccuaugugugg

SEQ ID NO: 507485 - RNA, 20 nt, Human
ugccuccaguccccuugugc

SEQ ID NO: 507486 - RNA, 24 nt, Human
ugcucuaaaagggggggaaaaaaa

SEQ ID NO: 507487 - RNA, 23 nt, Human
uggaucccagagcccagcaaacc

SEQ ID NO: 507488 - RNA, 18 nt, Human
uggcuaaaagcaaagcaa

SEQ ID NO: 507489 - RNA, 21 nt, Human
ugggaugcagaacucacugca

SEQ ID NO: 507490 - RNA, 23 nt, Human
ugggggaaaaaaaucucagaguc

SEQ ID NO: 507491 - RNA, 23 nt, Human
ugggggccgccuccuggugcugu

SEQ ID NO: 507492 - RNA, 18 nt, Human
ugguugucucguggaucc

SEQ ID NO: 507493 - RNA, 19 nt, Human
uguagaugucugacacuga

SEQ ID NO: 507494 - RNA, 24 nt, Human
ugucaguaaaagaaagacgguccc

SEQ ID NO: 507495 - RNA, 19 nt, Human
ugugaagaagaaagaaccg

SEQ ID NO: 507496 - RNA, 20 nt, Human
uguguguauacauccaaagg

SEQ ID NO: 507497 - RNA, 24 nt, Human
uuagaugagggcuacgguaaaaac

SEQ ID NO: 507498 - RNA, 21 nt, Human
uuccugggucaagcucuuugc

SEQ ID NO: 507499 - RNA, 18 nt, Human
uugaaaauaccauaugau

SEQ ID NO: 507500 - RNA, 23 nt, Human
uugaucugcaguaaaaucaagaa

SEQ ID NO: 507501 - RNA, 22 nt, Human
uuguggccgcgcugggggcccc

SEQ ID NO: 507502 - RNA, 22 nt, Human
aaaaaaaacaaagguaacaaaa

SEQ ID NO: 507503 - RNA, 18 nt, Human
aaaaaacugcgaagucac

SEQ ID NO: 507504 - RNA, 24 nt, Human
aaaaacaaagguaacaaaaccccc

SEQ ID NO: 507505 - RNA, 21 nt, Human
aaaacaaagguaacaaaaccc

SEQ ID NO: 507506 - RNA, 20 nt, Human
aaacaaaaaguuauagaauu

SEQ ID NO: 507507 - RNA, 25 nt, Human
aacaaaacccccaccaacucaaugg

SEQ ID NO: 507508 - RNA, 18 nt, Human
aacucaaugggaaucugc

SEQ ID NO: 507509 - RNA, 18 nt, Human
aagcuacauccaaggaac

SEQ ID NO: 507510 - RNA, 22 nt, Human
aagguaacaaaacccccaccaa

SEQ ID NO: 507511 - RNA, 19 nt, Human
aaguaaacugaaaguccau

SEQ ID NO: 507512 - RNA, 24 nt, Human
acaaaacccccaccaacucaaugg

SEQ ID NO: 507513 - RNA, 23 nt, Human
accacagucccuggacaaagggc

SEQ ID NO: 507514 - RNA, 26 nt, Human
agaaaaaaaacaaagguaacaaaacc

SEQ ID NO: 507515 - RNA, 22 nt, Human
agaaaauaaaguaucugaacaa

SEQ ID NO: 507516 - RNA, 24 nt, Human
agauaaaccuaucacaggaguagc

SEQ ID NO: 507517 - RNA, 23 nt, Human
aggcauucagcaccacgaacaug

SEQ ID NO: 507518 - RNA, 21 nt, Human
aucugaacaaucuucaugagg

SEQ ID NO: 507519 - RNA, 22 nt, Human
augaugcugagaggcauucagc

SEQ ID NO: 507520 - RNA, 21 nt, Human
augauuuuaucauucaagaag

SEQ ID NO: 507521 - RNA, 21 nt, Human
caaaacccccaccaacucaau

SEQ ID NO: 507522 - RNA, 23 nt, Human
caaagguaacaaaacccccacca

SEQ ID NO: 507523 - RNA, 21 nt, Human
caaauaauucauaaauccaac

SEQ ID NO: 507524 - RNA, 24 nt, Human
caacauaaucaaagagauguguaa

SEQ ID NO: 507525 - RNA, 19 nt, Human
caauagaguaagugccaca

SEQ ID NO: 507526 - RNA, 21 nt, Human
cacaaugaaacuaagauaaac

SEQ ID NO: 507527 - RNA, 23 nt, Human
caccaacucaaugggaaucugca

SEQ ID NO: 507528 - RNA, 22 nt, Human
cagcaauggcuaggaagacuuu

SEQ ID NO: 507529 - RNA, 20 nt, Human
cagcaccacgaacauguugu

SEQ ID NO: 507530 - RNA, 22 nt, Human
cagcuuccaauuuccacucucu

SEQ ID NO: 507531 - RNA, 24 nt, Human
cccaccaacucaaugggaaucugc

SEQ ID NO: 507532 - RNA, 25 nt, Human
cccacuuuugaaccuaaaagguuuc

SEQ ID NO: 507533 - RNA, 20 nt, Human
cccagggagacccaguuuca

SEQ ID NO: 507534 - RNA, 20 nt, Human
ccugcuauuccauuuauacc

SEQ ID NO: 507535 - RNA, 18 nt, Human
ccuguaggucgaaaugcc

SEQ ID NO: 507536 - RNA, 23 nt, Human
cgaaaugccaaaaucugauugua

SEQ ID NO: 507537 - RNA, 24 nt, Human
cgaagucacugcccucauccacga

SEQ ID NO: 507538 - RNA, 21 nt, Human
cgcuucauuucuagguagcug

SEQ ID NO: 507539 - RNA, 19 nt, Human
cugugaaguucuccauuau

SEQ ID NO: 507540 - RNA, 21 nt, Human
gaacauguuguucaaacauaa

SEQ ID NO: 507541 - RNA, 18 nt, Human
ggugcuauuucauucaaa

SEQ ID NO: 507542 - RNA, 22 nt, Human
guaagugccacagacaacaaga

SEQ ID NO: 507543 - RNA, 22 nt, Human
uaaaacaucagcaauggcuagg

SEQ ID NO: 507544 - RNA, 21 nt, Human
uagauuuccaggugcccacau

SEQ ID NO: 507545 - RNA, 21 nt, Human
uaggaagacuuucucuuuucc

SEQ ID NO: 507546 - RNA, 19 nt, Human
uagguucaacagcuuaauc

SEQ ID NO: 507547 - RNA, 18 nt, Human
uaguggauacucaaccac

SEQ ID NO: 507548 - RNA, 26 nt, Human
ucauaaauccaaccacagucccugga

SEQ ID NO: 507549 - RNA, 22 nt, Human
uccaaauaauucauaaauccaa

SEQ ID NO: 507550 - RNA, 22 nt, Human
ucccagggagacccaguuucag

SEQ ID NO: 507551 - RNA, 24 nt, Human
ucccuuuagggucuuggcgggaac

SEQ ID NO: 507552 - RNA, 24 nt, Human
ucuguaagcccuuaaaauuaauuu

SEQ ID NO: 507553 - RNA, 20 nt, Human
ugaauuaauuucugguauau

SEQ ID NO: 507554 - RNA, 18 nt, Human
ugagaaaaaaaacaaagg

SEQ ID NO: 507555 - RNA, 21 nt, Human
ugagaaaauaaaguaucugaa

SEQ ID NO: 507556 - RNA, 18 nt, Human
ugaugcagaauauaacug

SEQ ID NO: 507557 - RNA, 20 nt, Human
ugggagaaggugaaccaaug

SEQ ID NO: 507558 - RNA, 19 nt, Human
uguccuuuuccagggcuug

SEQ ID NO: 507559 - RNA, 20 nt, Human
ugucgguagugaugagugaa

SEQ ID NO: 507560 - RNA, 27 nt, Human
uguuuccuuuggucuggggggaggacc

SEQ ID NO: 507561 - RNA, 22 nt, Human
uucaagaaguauuaaucuuaag

SEQ ID NO: 507562 - RNA, 18 nt, Human
uuccugggacaugcccac

SEQ ID NO: 507563 - RNA, 23 nt, Human
uucuagguagcugcuguguucac

SEQ ID NO: 507564 - RNA, 21 nt, Human
uuuccagggcuugauucauaa

SEQ ID NO: 507565 - RNA, 23 nt, Human
uuuccaggugcccacauuuacag

SEQ ID NO: 507566 - RNA, 21 nt, Human
uuugaaccuaaaacaucagca

SEQ ID NO: 507567 - RNA, 18 nt, Human
aaaaacaaacucuuuccc

SEQ ID NO: 507568 - RNA, 18 nt, Human
aaaguaggccccaaaaac

SEQ ID NO: 507569 - RNA, 23 nt, Human
acccugcccgcuggagcccaaau

SEQ ID NO: 507570 - RNA, 24 nt, Human
acuccaaagauuuuauaaaaaaag

SEQ ID NO: 507571 - RNA, 26 nt, Human
agaacagggccagagacccuaaggga

SEQ ID NO: 507572 - RNA, 26 nt, Human
aguuaccagagugggcagaaaaagga

SEQ ID NO: 507573 - RNA, 19 nt, Human
caagaacagggccagagac

SEQ ID NO: 507574 - RNA, 24 nt, Human
caagaacagggccagagacccuaa

SEQ ID NO: 507575 - RNA, 22 nt, Human
cagggcuccugcgugaggcuuc

SEQ ID NO: 507576 - RNA, 23 nt, Human
caugcuggggcaagaacagggcc

SEQ ID NO: 507577 - RNA, 23 nt, Human
cccaaaaacaaacucuuucccac

SEQ ID NO: 507578 - RNA, 18 nt, Human
cccuaagggaaagagccc

SEQ ID NO: 507579 - RNA, 20 nt, Human
cgaggaccccagugaacaag

SEQ ID NO: 507580 - RNA, 19 nt, Human
cuaucuucaaaacugcagu

SEQ ID NO: 507581 - RNA, 24 nt, Human
gaaaaguaggccccaaaaacaaac

SEQ ID NO: 507582 - RNA, 20 nt, Human
gaacaaguuuugggaagugc

SEQ ID NO: 507583 - RNA, 18 nt, Human
gaacagggccagagaccc

SEQ ID NO: 507584 - RNA, 22 nt, Human
gcagagcaauaaguuaccagag

SEQ ID NO: 507585 - RNA, 18 nt, Human
gggcaagaacagggccag

SEQ ID NO: 507586 - RNA, 21 nt, Human
uccacgggggcagggcuccug

SEQ ID NO: 507587 - RNA, 20 nt, Human
uccacggugggcccauaaga

SEQ ID NO: 507588 - RNA, 19 nt, Human
uccauaggcacgaggaccc

SEQ ID NO: 507589 - RNA, 19 nt, Human
ugcgugaggcuuccacaac

SEQ ID NO: 507590 - RNA, 27 nt, Human
ugcucacgcauacuccaaagauuuuau

SEQ ID NO: 507591 - RNA, 20 nt, Human
ugggaagugcugcuccgggc

SEQ ID NO: 507592 - RNA, 20 nt, Human
uuaguuauaaaaagaaggau

SEQ ID NO: 507593 - RNA, 21 nt, Human
aaaauccccucccuguugccu

SEQ ID NO: 507594 - RNA, 19 nt, Human
aaacagccccuugacaaag

SEQ ID NO: 507595 - RNA, 22 nt, Human
aacagagcagagcuggagaagu

SEQ ID NO: 507596 - RNA, 18 nt, Human
aagaagaaacuguggcac

SEQ ID NO: 507597 - RNA, 20 nt, Human
aaggagcagauuaaaauccc

SEQ ID NO: 507598 - RNA, 18 nt, Human
aauccauaaaccuuccuc

SEQ ID NO: 507599 - RNA, 24 nt, Human
acacagaaucccaaaaccccaggg

SEQ ID NO: 507600 - RNA, 18 nt, Human
acccauccuaugaaacuc

SEQ ID NO: 507601 - RNA, 21 nt, Human
acgggcuggccugcauagccc

SEQ ID NO: 507602 - RNA, 18 nt, Human
acuggcuucccaccacua

SEQ ID NO: 507603 - RNA, 23 nt, Human
agacaccgggagaccuggaaaca

SEQ ID NO: 507604 - RNA, 19 nt, Human
agagaaaacagagcagagc

SEQ ID NO: 507605 - RNA, 22 nt, Human
agagccccuccagggucuccuu

SEQ ID NO: 507606 - RNA, 19 nt, Human
agccaacaacccauggccu

SEQ ID NO: 507607 - RNA, 18 nt, Human
agccccacacuguggcug

SEQ ID NO: 507608 - RNA, 19 nt, Human
agcuacaaagucucaagga

SEQ ID NO: 507609 - RNA, 21 nt, Human
agcuacaaagucucaaggacu

SEQ ID NO: 507610 - RNA, 21 nt, Human
agcucuggaaaggccaccggg

SEQ ID NO: 507611 - RNA, 18 nt, Human
agcuggcagcccacugca

SEQ ID NO: 507612 - RNA, 26 nt, Human
aggacuagaaggaagcaccagccuug

SEQ ID NO: 507613 - RNA, 21 nt, Human
aggcugccaccaugagggaag

SEQ ID NO: 507614 - RNA, 22 nt, Human
agggguggagagaggggucaga

SEQ ID NO: 507615 - RNA, 18 nt, Human
auccauaaaccuuccuca

SEQ ID NO: 507616 - RNA, 22 nt, Human
caaacuggacagugauagcuaa

SEQ ID NO: 507617 - RNA, 25 nt, Human
caaacuggacagugauagcuaaccc

SEQ ID NO: 507618 - RNA, 24 nt, Human
caagaagaaacuguggcacggaga

SEQ ID NO: 507619 - RNA, 23 nt, Human
cacacagaaucccaaaaccccag

SEQ ID NO: 507620 - RNA, 18 nt, Human
cacagagcacagguaagc

SEQ ID NO: 507621 - RNA, 20 nt, Human
caccacacagaaucccaaaa

SEQ ID NO: 507622 - RNA, 22 nt, Human
caccagccuuguucugccccag

SEQ ID NO: 507623 - RNA, 24 nt, Human
caccaugggccucccuuccuccag

SEQ ID NO: 507624 - RNA, 19 nt, Human
caccccagcuggccaacug

SEQ ID NO: 507625 - RNA, 23 nt, Human
caccgggaacacaagagccaaca

SEQ ID NO: 507626 - RNA, 24 nt, Human
cagaaucccaaaaccccaggguuc

SEQ ID NO: 507627 - RNA, 21 nt, Human
cagagccccuccagggucucc

SEQ ID NO: 507628 - RNA, 23 nt, Human
cagauuaaaauccccucccuguu

SEQ ID NO: 507629 - RNA, 18 nt, Human
cagccaccacuacguguc

SEQ ID NO: 507630 - RNA, 18 nt, Human
cagcuagagggucugcgc

SEQ ID NO: 507631 - RNA, 21 nt, Human
cagguccguggcuacaacuaa

SEQ ID NO: 507632 - RNA, 21 nt, Human
cagucaccacacagaauccca

SEQ ID NO: 507633 - RNA, 22 nt, Human
caguucccauuccagcucugcu

SEQ ID NO: 507634 - RNA, 20 nt, Human
caugugccuacaugcauuca

SEQ ID NO: 507635 - RNA, 19 nt, Human
cauuauacuaacccugccu

SEQ ID NO: 507636 - RNA, 18 nt, Human
ccaccagagcccccccgu

SEQ ID NO: 507637 - RNA, 19 nt, Human
ccagccagagggucugugc

SEQ ID NO: 507638 - RNA, 24 nt, Human
ccagccagcccaaccucugauugc

SEQ ID NO: 507639 - RNA, 19 nt, Human
ccagggguggagagagggg

SEQ ID NO: 507640 - RNA, 18 nt, Human
cccaggguucugcuugag

SEQ ID NO: 507641 - RNA, 19 nt, Human
cccaugccgggccugaggg

SEQ ID NO: 507642 - RNA, 19 nt, Human
cccucaguguccugcugug

SEQ ID NO: 507643 - RNA, 21 nt, Human
ccuccagggucuccuuggcag

SEQ ID NO: 507644 - RNA, 21 nt, Human
ccucuuugcuggcugcagccu

SEQ ID NO: 507645 - RNA, 23 nt, Human
ccugcauagcccagggguggaga

SEQ ID NO: 507646 - RNA, 20 nt, Human
ccuuccucagcagucaccac

SEQ ID NO: 507647 - RNA, 18 nt, Human
ccuugaccaccagagccc

SEQ ID NO: 507648 - RNA, 24 nt, Human
cggagagauucaguuacuugucca

SEQ ID NO: 507649 - RNA, 21 nt, Human
cggagugagugcuccaccaug

SEQ ID NO: 507650 - RNA, 22 nt, Human
cgggaacacaagagccaacaac

SEQ ID NO: 507651 - RNA, 19 nt, Human
cgggcagacaggcacggag

SEQ ID NO: 507652 - RNA, 21 nt, Human
cgggguggaugcugaggaaga

SEQ ID NO: 507653 - RNA, 21 nt, Human
cuaugaaacucacuccuuugg

SEQ ID NO: 507654 - RNA, 23 nt, Human
cucaaggacuagaaggaagcacc

SEQ ID NO: 507655 - RNA, 22 nt, Human
cugcagccuugcugcucagugg

SEQ ID NO: 507656 - RNA, 20 nt, Human
cugcugccuugaccaccaga

SEQ ID NO: 507657 - RNA, 20 nt, Human
cuugcucuacacguuucugu

SEQ ID NO: 507658 - RNA, 18 nt, Human
gacaaugucucagagaau

SEQ ID NO: 507659 - RNA, 21 nt, Human
gacagugauagcuaacccugu

SEQ ID NO: 507660 - RNA, 20 nt, Human
gccaacuggcuucccaccac

SEQ ID NO: 507661 - RNA, 21 nt, Human
gccagagggucugugcugucc

SEQ ID NO: 507662 - RNA, 18 nt, Human
gcccaugccgggccugag

SEQ ID NO: 507663 - RNA, 21 nt, Human
gccgggccugaggggccuggc

SEQ ID NO: 507664 - RNA, 21 nt, Human
gcuacaacuaaaucccuaguu

SEQ ID NO: 507665 - RNA, 18 nt, Human
ggaacacaagagccaaca

SEQ ID NO: 507666 - RNA, 18 nt, Human
ggagagaggggucagacu

SEQ ID NO: 507667 - RNA, 24 nt, Human
ggcaggggcuguccccuaugagcc

SEQ ID NO: 507668 - RNA, 19 nt, Human
ggccugaggggccuggcuc

SEQ ID NO: 507669 - RNA, 20 nt, Human
ggccugaggggccuggcuca

SEQ ID NO: 507670 - RNA, 21 nt, Human
ggccugaggggccuggcucag

SEQ ID NO: 507671 - RNA, 19 nt, Human
gggagaccuggaaacagcc

SEQ ID NO: 507672 - RNA, 20 nt, Human
gggcaacaggccugggcuca

SEQ ID NO: 507673 - RNA, 19 nt, Human
gggccuggcucagacuuua

SEQ ID NO: 507674 - RNA, 23 nt, Human
ggggcuguccccuaugagccucu

SEQ ID NO: 507675 - RNA, 23 nt, Human
guucucaguccuuuccugugugg

SEQ ID NO: 507676 - RNA, 25 nt, Human
uaaagccacccauccuaugaaacuc

SEQ ID NO: 507677 - RNA, 24 nt, Human
uaaaucccuaguuggggaaucaca

SEQ ID NO: 507678 - RNA, 23 nt, Human
uacaacuaaaucccuaguugggg

SEQ ID NO: 507679 - RNA, 21 nt, Human
uagaaccuauggagacuuggu

SEQ ID NO: 507680 - RNA, 20 nt, Human
uagcugggagcagcguucau

SEQ ID NO: 507681 - RNA, 21 nt, Human
uaugcugucuagcgugucugc

SEQ ID NO: 507682 - RNA, 22 nt, Human
uauuucacuuuaauccgccugu

SEQ ID NO: 507683 - RNA, 21 nt, Human
ucacgggguggaugcugagga

SEQ ID NO: 507684 - RNA, 23 nt, Human
ucagagccccuccagggucuccu

SEQ ID NO: 507685 - RNA, 26 nt, Human
ucaguuccucccaccaaacuggacag

SEQ ID NO: 507686 - RNA, 28 nt, Human
ucaguuccucccaccaaacuggacagug

SEQ ID NO: 507687 - RNA, 19 nt, Human
ucccaccaaacuggacagu

SEQ ID NO: 507688 - RNA, 24 nt, Human
ucccuaguuggggaaucacagagc

SEQ ID NO: 507689 - RNA, 19 nt, Human
ucccuguugccuaccaggu

SEQ ID NO: 507690 - RNA, 18 nt, Human
ucguacaguagauacagu

SEQ ID NO: 507691 - RNA, 22 nt, Human
ucucugugacaugcacccuguc

SEQ ID NO: 507692 - RNA, 20 nt, Human
ucugcugugacuuccucaug

SEQ ID NO: 507693 - RNA, 21 nt, Human
ucuguccucuguucagcucug

SEQ ID NO: 507694 - RNA, 19 nt, Human
ucugugcaucuguccucug

SEQ ID NO: 507695 - RNA, 18 nt, Human
ugagaacugucucucugu

SEQ ID NO: 507696 - RNA, 20 nt, Human
ugagggaagcuggagggagg

SEQ ID NO: 507697 - RNA, 27 nt, Human
ugagugcuccaccaugggccucccuuc

SEQ ID NO: 507698 - RNA, 18 nt, Human
ugaguguagacugggucc

SEQ ID NO: 507699 - RNA, 23 nt, Human
ugaguguagacuggguccaugug

SEQ ID NO: 507700 - RNA, 22 nt, Human
ugcauacuugcgugugugcaca

SEQ ID NO: 507701 - RNA, 19 nt, Human
ugcauccaggacuaugcug

SEQ ID NO: 507702 - RNA, 21 nt, Human
ugccccagccagagggucugu

SEQ ID NO: 507703 - RNA, 21 nt, Human
ugccccagcuagagggucugc

SEQ ID NO: 507704 - RNA, 19 nt, Human
ugccgggccugaggggccu

SEQ ID NO: 507705 - RNA, 22 nt, Human
ugcgugugugcacacgcacaca

SEQ ID NO: 507706 - RNA, 18 nt, Human
ugcucagugggcgguugu

SEQ ID NO: 507707 - RNA, 21 nt, Human
ugcuggcugcagccuugcugc

SEQ ID NO: 507708 - RNA, 22 nt, Human
uggauggguuuugagggucugg

SEQ ID NO: 507709 - RNA, 24 nt, Human
ugggagcagcguucaugugcacug

SEQ ID NO: 507710 - RNA, 24 nt, Human
uggggaaucacagagcacagguaa

SEQ ID NO: 507711 - RNA, 22 nt, Human
ugggguaugccugaauguaacu

SEQ ID NO: 507712 - RNA, 23 nt, Human
uggguuguuuacuccucccacag

SEQ ID NO: 507713 - RNA, 21 nt, Human
ugucaaauccauaaaccuucc

SEQ ID NO: 507714 - RNA, 18 nt, Human
uguccaggaucacagaac

SEQ ID NO: 507715 - RNA, 19 nt, Human
ugugcacacgcacacaugu

SEQ ID NO: 507716 - RNA, 22 nt, Human
ugugcauacuugcgugugugca

SEQ ID NO: 507717 - RNA, 19 nt, Human
uguguggauggaguguugg

SEQ ID NO: 507718 - RNA, 23 nt, Human
uguucguguuuaguguaugucug

SEQ ID NO: 507719 - RNA, 21 nt, Human
uuccucauggcagagccccac

SEQ ID NO: 507720 - RNA, 18 nt, Human
uucugccccagcuagagg

SEQ ID NO: 507721 - RNA, 21 nt, Human
uugacccuuaugucugggugc

SEQ ID NO: 507722 - RNA, 23 nt, Human
uuggauggguuuugagggucugg

SEQ ID NO: 507723 - RNA, 18 nt, Human
aaaacaccuggaaggaca

SEQ ID NO: 507724 - RNA, 18 nt, Human
aaaagaaaacaagagaag

SEQ ID NO: 507725 - RNA, 19 nt, Human
aaaagaaaacaagagaagc

SEQ ID NO: 507726 - RNA, 25 nt, Human
aaaagaaaacaagagaagcaaagaa

SEQ ID NO: 507727 - RNA, 21 nt, Human
aaacaccuggaaggacaagaa

SEQ ID NO: 507728 - RNA, 23 nt, Human
aaacaccuggaaggacaagaaaa

SEQ ID NO: 507729 - RNA, 23 nt, Human
aaacagaccacacaaaggcccuc

SEQ ID NO: 507730 - RNA, 23 nt, Human
aaacaggaaaccagaggugacaa

SEQ ID NO: 507731 - RNA, 23 nt, Human
aaaccccaucucuuacuaaaaaa

SEQ ID NO: 507732 - RNA, 24 nt, Human
aaagugcagggauuacaggcguga

SEQ ID NO: 507733 - RNA, 21 nt, Human
aacacagugacagcaagacua

SEQ ID NO: 507734 - RNA, 19 nt, Human
aacauggcgaaaccccauc

SEQ ID NO: 507735 - RNA, 20 nt, Human
aacauggcgaaaccccaucu

SEQ ID NO: 507736 - RNA, 21 nt, Human
aacauggcgaaaccccaucuc

SEQ ID NO: 507737 - RNA, 21 nt, Human
aacauggcgaaaccccaucuc

SEQ ID NO: 507738 - RNA, 23 nt, Human
aaccaaagauacaaaauucucug

SEQ ID NO: 507739 - RNA, 18 nt, Human
aaccagauugucaaggac

SEQ ID NO: 507740 - RNA, 19 nt, Human
aacugccagaggcauaaaa

SEQ ID NO: 507741 - RNA, 23 nt, Human
aagaucgugccauugcacuccag

SEQ ID NO: 507742 - RNA, 20 nt, Human
aagcaccaaagcauacuuuc

SEQ ID NO: 507743 - RNA, 20 nt, Human
aagcagcaccaucucagcca

SEQ ID NO: 507744 - RNA, 23 nt, Human
aagcuacagaguccaccuagaau

SEQ ID NO: 507745 - RNA, 23 nt, Human
aaggcaggaggaucacuucaguc

SEQ ID NO: 507746 - RNA, 21 nt, Human
aagggauucuccugccucagc

SEQ ID NO: 507747 - RNA, 24 nt, Human
aaucaccugaacccaggaggugga

SEQ ID NO: 507748 - RNA, 25 nt, Human
aaucaccugaacccaggagguggag

SEQ ID NO: 507749 - RNA, 24 nt, Human
aaucagcaguagaaaaaaucagca

SEQ ID NO: 507750 - RNA, 24 nt, Human
aaucaucaacagcaaaguuuuaag

SEQ ID NO: 507751 - RNA, 19 nt, Human
acaagagcgaaacuccauc

SEQ ID NO: 507752 - RNA, 20 nt, Human
acaagagcgaaacuccaucu

SEQ ID NO: 507753 - RNA, 21 nt, Human
acaagagcgaaacuccaucuc

SEQ ID NO: 507754 - RNA, 19 nt, Human
acaccaaagacaaacaaac

SEQ ID NO: 507755 - RNA, 22 nt, Human
acaccaaagacaaacaaacuuc

SEQ ID NO: 507756 - RNA, 20 nt, Human
acaccacugcacuccagucu

SEQ ID NO: 507757 - RNA, 22 nt, Human
acaccacugcacuccagucugc

SEQ ID NO: 507758 - RNA, 20 nt, Human
acagaacgagaccccaucuc

SEQ ID NO: 507759 - RNA, 22 nt, Human
accaaagauacaaaauucucug

SEQ ID NO: 507760 - RNA, 20 nt, Human
accauucaugguaggaaaau

SEQ ID NO: 507761 - RNA, 19 nt, Human
acccaggcuggagugcagu

SEQ ID NO: 507762 - RNA, 23 nt, Human
acccaggcuggagugcaguggug

SEQ ID NO: 507763 - RNA, 20 nt, Human
accgcucccuacuaacccua

SEQ ID NO: 507764 - RNA, 18 nt, Human
accugaaaugaaauaacu

SEQ ID NO: 507765 - RNA, 20 nt, Human
acugaaagcuacagaguccg

SEQ ID NO: 507766 - RNA, 23 nt, Human
acugcacuccagucugcaugaca

SEQ ID NO: 507767 - RNA, 24 nt, Human
acugcacuccagucugcaugacag

SEQ ID NO: 507768 - RNA, 23 nt, Human
acuuuuauuccuugcuuuuagca

SEQ ID NO: 507769 - RNA, 22 nt, Human
agaaaacagaagaaagccaaag

SEQ ID NO: 507770 - RNA, 26 nt, Human
agaaagaaaacagaagaaagccaaag

SEQ ID NO: 507771 - RNA, 25 nt, Human
agaaagccaaagcuuaccacaucag

SEQ ID NO: 507772 - RNA, 18 nt, Human
agaacacugacacccugc

SEQ ID NO: 507773 - RNA, 18 nt, Human
agaagagcccaguuguuc

SEQ ID NO: 507774 - RNA, 19 nt, Human
agacaggaaccugggggcc

SEQ ID NO: 507775 - RNA, 24 nt, Human
agagaggccaaggcaggaggauca

SEQ ID NO: 507776 - RNA, 18 nt, Human
agcaggaaauaugccaaa

SEQ ID NO: 507777 - RNA, 21 nt, Human
agcauagugagacccccaucu

SEQ ID NO: 507778 - RNA, 20 nt, Human
agccgcgcaugguggcaguu

SEQ ID NO: 507779 - RNA, 22 nt, Human
agccugagcagcauagugagac

SEQ ID NO: 507780 - RNA, 24 nt, Human
agcggcucaugccuguaaucccag

SEQ ID NO: 507781 - RNA, 23 nt, Human
aggagguggagacugcagugagc

SEQ ID NO: 507782 - RNA, 24 nt, Human
aggaucacuugaggccaggaguuu

SEQ ID NO: 507783 - RNA, 22 nt, Human
aggcagcaagauaacuugagcc

SEQ ID NO: 507784 - RNA, 20 nt, Human
aggcaggaggaucacuucag

SEQ ID NO: 507785 - RNA, 21 nt, Human
aggcaggcaggucgcuugagg

SEQ ID NO: 507786 - RNA, 23 nt, Human
aggcaggcaggucgcuugagguc

SEQ ID NO: 507787 - RNA, 26 nt, Human
aggcaggcaggucgcuugaggucagg

SEQ ID NO: 507788 - RNA, 24 nt, Human
aggcauagcggcucaugccuguaa

SEQ ID NO: 507789 - RNA, 24 nt, Human
aggcuaaggugggaggaucacuug

SEQ ID NO: 507790 - RNA, 23 nt, Human
aggcuaugggcacccagcaauca

SEQ ID NO: 507791 - RNA, 18 nt, Human
aggcugagagaacacuga

SEQ ID NO: 507792 - RNA, 22 nt, Human
agggauuacaggcgugagccac

SEQ ID NO: 507793 - RNA, 24 nt, Human
agggauuacaggcgugagccaccg

SEQ ID NO: 507794 - RNA, 24 nt, Human
agggauucuccugccucagcaucc

SEQ ID NO: 507795 - RNA, 21 nt, Human
aggucaaaggucaugucuguu

SEQ ID NO: 507796 - RNA, 21 nt, Human
aggugcagcagcuuggugacc

SEQ ID NO: 507797 - RNA, 24 nt, Human
agguggagacugcagugagccaag

SEQ ID NO: 507798 - RNA, 18 nt, Human
aggugggaggaucacuug

SEQ ID NO: 507799 - RNA, 23 nt, Human
aggugggaggaucacuugaggcc

SEQ ID NO: 507800 - RNA, 23 nt, Human
aguaggccgaggauggagaauca

SEQ ID NO: 507801 - RNA, 19 nt, Human
agucacuagaaacagacca

SEQ ID NO: 507802 - RNA, 20 nt, Human
agugcaguggugcaauccug

SEQ ID NO: 507803 - RNA, 24 nt, Human
aguggcucacacuuauaaucccag

SEQ ID NO: 507804 - RNA, 21 nt, Human
auaguaaagucugugaguucc

SEQ ID NO: 507805 - RNA, 24 nt, Human
auagugagacccccaucucuaaaa

SEQ ID NO: 507806 - RNA, 22 nt, Human
auauacuuuucuaauauaucaa

SEQ ID NO: 507807 - RNA, 24 nt, Human
aucacaccacugcacuccagucug

SEQ ID NO: 507808 - RNA, 24 nt, Human
aucuguguauuuuuaguagagaug

SEQ ID NO: 507809 - RNA, 23 nt, Human
augaaauaacuucaacuaaacau

SEQ ID NO: 507810 - RNA, 20 nt, Human
augaagacuuuagucuggaa

SEQ ID NO: 507811 - RNA, 19 nt, Human
augagccauauccugcuuu

SEQ ID NO: 507812 - RNA, 21 nt, Human
augcagcgacccauaacauag

SEQ ID NO: 507813 - RNA, 19 nt, Human
augccuguaaucccagcac

SEQ ID NO: 507814 - RNA, 24 nt, Human
augggguuucgccacgcuggccag

SEQ ID NO: 507815 - RNA, 24 nt, Human
auugcacuccagccugggcgacaa

SEQ ID NO: 507816 - RNA, 25 nt, Human
auugcacuccagccugggcgacaag

SEQ ID NO: 507817 - RNA, 24 nt, Human
caaaauaauggcaucagggauccc

SEQ ID NO: 507818 - RNA, 20 nt, Human
caaacuucuccaaauauguu

SEQ ID NO: 507819 - RNA, 21 nt, Human
caaacuucuccaaauauguuc

SEQ ID NO: 507820 - RNA, 21 nt, Human
caaagugcagggauuacaggc

SEQ ID NO: 507821 - RNA, 23 nt, Human
caaagugcagggauuacaggcgu

SEQ ID NO: 507822 - RNA, 22 nt, Human
caaauuagccgcgcaugguggc

SEQ ID NO: 507823 - RNA, 24 nt, Human
caacauggcgaaaccccaucucuu

SEQ ID NO: 507824 - RNA, 20 nt, Human
caaccuucgccccccagguu

SEQ ID NO: 507825 - RNA, 21 nt, Human
caagagaagcaaagaagguaa

SEQ ID NO: 507826 - RNA, 24 nt, Human
caaggcaggcaggucgcuugaggu

SEQ ID NO: 507827 - RNA, 21 nt, Human
cacaccacugcacuccagucu

SEQ ID NO: 507828 - RNA, 23 nt, Human
cacacuuauaaucccagcaacuu

SEQ ID NO: 507829 - RNA, 20 nt, Human
cacagcacuggaaaacaccu

SEQ ID NO: 507830 - RNA, 27 nt, Human
cacagccacagaugaaugcuguuucug

SEQ ID NO: 507831 - RNA, 21 nt, Human
cacaggggccuccuggggcag

SEQ ID NO: 507832 - RNA, 18 nt, Human
caccaaagacaaacaaac

SEQ ID NO: 507833 - RNA, 22 nt, Human
caccacugcacuccagucugca

SEQ ID NO: 507834 - RNA, 24 nt, Human
cacccaggcuggagugcaguggug

SEQ ID NO: 507835 - RNA, 24 nt, Human
caccccacucaccuucuccugacu

SEQ ID NO: 507836 - RNA, 18 nt, Human
caccuguagucccagcua

SEQ ID NO: 507837 - RNA, 20 nt, Human
caccuguagucccagcuacc

SEQ ID NO: 507838 - RNA, 24 nt, Human
cacgcuggccaggccggucucaaa

SEQ ID NO: 507839 - RNA, 24 nt, Human
cacuccagccugggcgacaagagc

SEQ ID NO: 507840 - RNA, 25 nt, Human
cacuccagccugggcgacaagagcg

SEQ ID NO: 507841 - RNA, 21 nt, Human
cacugcaaccuucgcccccca

SEQ ID NO: 507842 - RNA, 18 nt, Human
cacugcacuccagucugc

SEQ ID NO: 507843 - RNA, 19 nt, Human
cacugcacuccagucugca

SEQ ID NO: 507844 - RNA, 22 nt, Human
cacugcacuccagucugcauga

SEQ ID NO: 507845 - RNA, 24 nt, Human
cacugcacuccagucugcaugaca

SEQ ID NO: 507846 - RNA, 24 nt, Human
cacugcacuccagucugcaugaca

SEQ ID NO: 507847 - RNA, 18 nt, Human
cacugucaucaugcaaag

SEQ ID NO: 507848 - RNA, 23 nt, Human
cacuuauaaucccagcaacuugg

SEQ ID NO: 507849 - RNA, 24 nt, Human
cacuuauaaucccagcaacuuggg

SEQ ID NO: 507850 - RNA, 21 nt, Human
cagaacgagaccccaucucuu

SEQ ID NO: 507851 - RNA, 24 nt, Human
cagaagaaagccaaagcuuaccac

SEQ ID NO: 507852 - RNA, 21 nt, Human
cagauugucaaggacaugcaa

SEQ ID NO: 507853 - RNA, 24 nt, Human
cagcaacuugggaggcuaaggugg

SEQ ID NO: 507854 - RNA, 18 nt, Human
cagcaagauaacuugagc

SEQ ID NO: 507855 - RNA, 18 nt, Human
cagcacuggaaaacaccu

SEQ ID NO: 507856 - RNA, 24 nt, Human
cagcacuuugggaggccaaggcag

SEQ ID NO: 507857 - RNA, 25 nt, Human
cagcacuuugggaggccaaggcagg

SEQ ID NO: 507858 - RNA, 22 nt, Human
cagcagcagcucaugcucugcg

SEQ ID NO: 507859 - RNA, 18 nt, Human
cagcaguagaaaaaaucc

SEQ ID NO: 507860 - RNA, 29 nt, Human
caggagguggagacugcagugacaacggu

SEQ ID NO: 507861 - RNA, 23 nt, Human
caggaguucaggaccagcccgag

SEQ ID NO: 507862 - RNA, 23 nt, Human
caggcaauggagauagauaauau

SEQ ID NO: 507863 - RNA, 18 nt, Human
caggcaggucgcuugagg

SEQ ID NO: 507864 - RNA, 21 nt, Human
cagggcaaaucaggacagugg

SEQ ID NO: 507865 - RNA, 24 nt, Human
caggucgcuugaggucaggagucu

SEQ ID NO: 507866 - RNA, 22 nt, Human
caggucuucaccacugucauua

SEQ ID NO: 507867 - RNA, 21 nt, Human
cauagaccuaugucaaacccu

SEQ ID NO: 507868 - RNA, 20 nt, Human
cauagugagacccccaucuc

SEQ ID NO: 507869 - RNA, 24 nt, Human
caugccuguaaucccagcacuuug

SEQ ID NO: 507870 - RNA, 19 nt, Human
cauugcacuccagccuggg

SEQ ID NO: 507871 - RNA, 21 nt, Human
cauugcacuccagccugggcg

SEQ ID NO: 507872 - RNA, 22 nt, Human
cauugcacuccagccugggcga

SEQ ID NO: 507873 - RNA, 24 nt, Human
cauugcacuccagccugggcgaca

SEQ ID NO: 507874 - RNA, 18 nt, Human
ccacugcacuccagucug

SEQ ID NO: 507875 - RNA, 18 nt, Human
ccacugcacuccagucug

SEQ ID NO: 507876 - RNA, 19 nt, Human
ccacugcacuccagucugc

SEQ ID NO: 507877 - RNA, 24 nt, Human
ccacugcacuccagucugcaugac

SEQ ID NO: 507878 - RNA, 20 nt, Human
ccauugcacuccagccuggg

SEQ ID NO: 507879 - RNA, 21 nt, Human
ccauugcacuccagccugggc

SEQ ID NO: 507880 - RNA, 22 nt, Human
ccauugcacuccagccugggcg

SEQ ID NO: 507881 - RNA, 24 nt, Human
ccauugcacuccagccugggcgac

SEQ ID NO: 507882 - RNA, 20 nt, Human
cccagcaaucaugaggcucu

SEQ ID NO: 507883 - RNA, 18 nt, Human
cccauacacaugcucaca

SEQ ID NO: 507884 - RNA, 18 nt, Human
cccaucuucuccgucuuc

SEQ ID NO: 507885 - RNA, 23 nt, Human
ccccaccaucucugcugucccug

SEQ ID NO: 507886 - RNA, 24 nt, Human
cccccagcugauagacacaggccc

SEQ ID NO: 507887 - RNA, 24 nt, Human
ccccccagguuaaagggauucucc

SEQ ID NO: 507888 - RNA, 23 nt, Human
ccggccaacauggcgaaacccca

SEQ ID NO: 507889 - RNA, 21 nt, Human
ccuccuauaacuccugcuaug

SEQ ID NO: 507890 - RNA, 18 nt, Human
ccugaccucaagugaucc

SEQ ID NO: 507891 - RNA, 19 nt, Human
ccugaccucaagugauccg

SEQ ID NO: 507892 - RNA, 18 nt, Human
ccuggaaggacaagaaaa

SEQ ID NO: 507893 - RNA, 18 nt, Human
ccuggaaggacaagaaaa

SEQ ID NO: 507894 - RNA, 24 nt, Human
ccuguaaucucagcuacucaguag

SEQ ID NO: 507895 - RNA, 20 nt, Human
ccuguagucccagcuaccag

SEQ ID NO: 507896 - RNA, 21 nt, Human
cgaaaccccaucucuuacuaa

SEQ ID NO: 507897 - RNA, 18 nt, Human
cgacgaggcauagcggcu

SEQ ID NO: 507898 - RNA, 20 nt, Human
cgaggauggagaaucaccug

SEQ ID NO: 507899 - RNA, 24 nt, Human
cgaggauggagaaucaccugaacc

SEQ ID NO: 507900 - RNA, 27 nt, Human
cgccacgcuggccaggccggucucaaa

SEQ ID NO: 507901 - RNA, 23 nt, Human
cgccccagccucucaaagugcag

SEQ ID NO: 507902 - RNA, 22 nt, Human
cggcucaugccuguaaucccag

SEQ ID NO: 507903 - RNA, 24 nt, Human
cguuccgucacccaggcuggagug

SEQ ID NO: 507904 - RNA, 22 nt, Human
cuaaauccuaucaaugucagaa

SEQ ID NO: 507905 - RNA, 19 nt, Human
cuagggacaacaggauuuc

SEQ ID NO: 507906 - RNA, 19 nt, Human
cucaagugauccgccccag

SEQ ID NO: 507907 - RNA, 23 nt, Human
cucacacuuauaaucccagcaac

SEQ ID NO: 507908 - RNA, 24 nt, Human
cucacugcaaccuucgccccccag

SEQ ID NO: 507909 - RNA, 24 nt, Human
cucaugccuguaaucccagcacuu

SEQ ID NO: 507910 - RNA, 18 nt, Human
cucuggguuaaagcugga

SEQ ID NO: 507911 - RNA, 19 nt, Human
cucuucccaaggagacuga

SEQ ID NO: 507912 - RNA, 22 nt, Human
cugacccaagauaauauaaccu

SEQ ID NO: 507913 - RNA, 22 nt, Human
cugcagugagccaagaucgugc

SEQ ID NO: 507914 - RNA, 23 nt, Human
cugccucagcauccugaguagcu

SEQ ID NO: 507915 - RNA, 24 nt, Human
cuggacaccaaaguucuccuuccg

SEQ ID NO: 507916 - RNA, 21 nt, Human
cugggaugagaagcccaaggg

SEQ ID NO: 507917 - RNA, 22 nt, Human
cuggguuaaagcuggaagucac

SEQ ID NO: 507918 - RNA, 18 nt, Human
cugugcccuuucagcagc

SEQ ID NO: 507919 - RNA, 22 nt, Human
gaaaaggaaguaacuaccccac

SEQ ID NO: 507920 - RNA, 19 nt, Human
gacagaacgagaccccauc

SEQ ID NO: 507921 - RNA, 25 nt, Human
gacagaacgagaccccaucucuuaa

SEQ ID NO: 507922 - RNA, 26 nt, Human
gaccucaagugauccgccccagccuc

SEQ ID NO: 507923 - RNA, 20 nt, Human
gacuccuuuggcuuucaggg

SEQ ID NO: 507924 - RNA, 20 nt, Human
gacuuagaacaaaagaaaac

SEQ ID NO: 507925 - RNA, 21 nt, Human
gagaagcuugaaaacaacuua

SEQ ID NO: 507926 - RNA, 20 nt, Human
gagaggcagcagagaagggg

SEQ ID NO: 507927 - RNA, 21 nt, Human
gagaugggguuucgccacgcu

SEQ ID NO: 507928 - RNA, 24 nt, Human
gagaugggguuucgccacgcuggc

SEQ ID NO: 507929 - RNA, 24 nt, Human
gaucacuugaggccaggaguuuga

SEQ ID NO: 507930 - RNA, 18 nt, Human
gauuacaggcgugagcca

SEQ ID NO: 507931 - RNA, 21 nt, Human
gauuacaggcgugagccaccg

SEQ ID NO: 507932 - RNA, 24 nt, Human
gauuacaggcgugagccaccgugc

SEQ ID NO: 507933 - RNA, 24 nt, Human
gcaaguucucugggcucuaagaga

SEQ ID NO: 507934 - RNA, 21 nt, Human
gcagcagagaaggggccacga

SEQ ID NO: 507935 - RNA, 18 nt, Human
gcagcagcuuggugaccc

SEQ ID NO: 507936 - RNA, 18 nt, Human
gcaugacagaacgagacc

SEQ ID NO: 507937 - RNA, 24 nt, Human
gcauucuguugcauuaccagugug

SEQ ID NO: 507938 - RNA, 24 nt, Human
gccaacauggcgaaaccccaucuc

SEQ ID NO: 507939 - RNA, 19 nt, Human
gccauugcacuccagccug

SEQ ID NO: 507940 - RNA, 22 nt, Human
gccauugcacuccagccugggc

SEQ ID NO: 507941 - RNA, 24 nt, Human
gccauugcacuccagccugggcga

SEQ ID NO: 507942 - RNA, 20 nt, Human
gcccaacauccauccacagg

SEQ ID NO: 507943 - RNA, 22 nt, Human
gcccaggaguucaggaccagcc

SEQ ID NO: 507944 - RNA, 24 nt, Human
gcgaaacacaaaaaccaaagauac

SEQ ID NO: 507945 - RNA, 24 nt, Human
gcgcaugguggcaguugccuguaa

SEQ ID NO: 507946 - RNA, 20 nt, Human
gcugugaucacaccacugca

SEQ ID NO: 507947 - RNA, 19 nt, Human
ggagaaucaccugaaccca

SEQ ID NO: 507948 - RNA, 19 nt, Human
ggaucacuugaggccagga

SEQ ID NO: 507949 - RNA, 22 nt, Human
ggaucacuugaggccaggaguu

SEQ ID NO: 507950 - RNA, 19 nt, Human
ggccaggaguuugagauca

SEQ ID NO: 507951 - RNA, 27 nt, Human
ggccgaggauggagaaucaccugaacc

SEQ ID NO: 507952 - RNA, 24 nt, Human
ggccggucucaaacuccugaccuc

SEQ ID NO: 507953 - RNA, 23 nt, Human
ggcgaaaccccaucucuuacuaa

SEQ ID NO: 507954 - RNA, 20 nt, Human
ggcucaugccuguaauccca

SEQ ID NO: 507955 - RNA, 23 nt, Human
ggcucaugccuguaaucccagca

SEQ ID NO: 507956 - RNA, 22 nt, Human
gggauuacaggcgugagccacc

SEQ ID NO: 507957 - RNA, 22 nt, Human
gggauuacaggcgugagccacc

SEQ ID NO: 507958 - RNA, 23 nt, Human
gggauuacaggcgugagccaccg

SEQ ID NO: 507959 - RNA, 22 nt, Human
gggguuucgccacgcuggccag

SEQ ID NO: 507960 - RNA, 24 nt, Human
gguggcaguugccuguaaucucag

SEQ ID NO: 507961 - RNA, 22 nt, Human
ggugugguggcaugcaccugua

SEQ ID NO: 507962 - RNA, 21 nt, Human
gugaguggaaagcaaacagga

SEQ ID NO: 507963 - RNA, 18 nt, Human
gugauccgccccagccuc

SEQ ID NO: 507964 - RNA, 24 nt, Human
gugcuuugcaauuuuucucagagu

SEQ ID NO: 507965 - RNA, 19 nt, Human
guuccgucacccaggcugg

SEQ ID NO: 507966 - RNA, 22 nt, Human
guuccgucacccaggcuggagu

SEQ ID NO: 507967 - RNA, 22 nt, Human
uaaaaaaagagaaaagccuucu

SEQ ID NO: 507968 - RNA, 20 nt, Human
uaaaaaacugaauaccccaa

SEQ ID NO: 507969 - RNA, 22 nt, Human
uaaaaaacugaauaccccaaga

SEQ ID NO: 507970 - RNA, 19 nt, Human
uaaacagccaugcuuaagc

SEQ ID NO: 507971 - RNA, 22 nt, Human
uaaauccuaucaaugucagaaa

SEQ ID NO: 507972 - RNA, 33 nt, Human
uaacuucaacuaaacaugucuaucucaguauua

SEQ ID NO: 507973 - RNA, 25 nt, Human
uaacuucauuguagaaaaggacauc

SEQ ID NO: 507974 - RNA, 23 nt, Human
uaacuugagcccaggaguucagg

SEQ ID NO: 507975 - RNA, 24 nt, Human
uaaggugggaggaucacuugaggc

SEQ ID NO: 507976 - RNA, 18 nt, Human
uaauagggauuuuugcuc

SEQ ID NO: 507977 - RNA, 22 nt, Human
uaauagggauuuuugcucuguu

SEQ ID NO: 507978 - RNA, 23 nt, Human
uaaucuguguauuuuuaguagag

SEQ ID NO: 507979 - RNA, 24 nt, Human
uaaucuguguauuuuuaguagaga

SEQ ID NO: 507980 - RNA, 22 nt, Human
uacaaugagcugugaucacacc

SEQ ID NO: 507981 - RNA, 22 nt, Human
uacagaccgcucccuacuaacc

SEQ ID NO: 507982 - RNA, 24 nt, Human
uacaggcgugagccaccgugccca

SEQ ID NO: 507983 - RNA, 19 nt, Human
uacaucagcacagccacag

SEQ ID NO: 507984 - RNA, 23 nt, Human
uacuaaaaaaaaauacacaaauu

SEQ ID NO: 507985 - RNA, 23 nt, Human
uacuccagugaucuuuuagaaag

SEQ ID NO: 507986 - RNA, 20 nt, Human
uacuguuucccauuauaugu

SEQ ID NO: 507987 - RNA, 23 nt, Human
uagaaaccagauugucaaggaca

SEQ ID NO: 507988 - RNA, 25 nt, Human
uagaaagaaaacagaagaaagccaa

SEQ ID NO: 507989 - RNA, 23 nt, Human
uagaacaaaagaaaacaagagaa

SEQ ID NO: 507990 - RNA, 21 nt, Human
uagcacauuucuuaacaggca

SEQ ID NO: 507991 - RNA, 24 nt, Human
uagcggcucaugccuguaauccca

SEQ ID NO: 507992 - RNA, 19 nt, Human
uaggugggugugguggcau

SEQ ID NO: 507993 - RNA, 20 nt, Human
uaggugggugugguggcaug

SEQ ID NO: 507994 - RNA, 18 nt, Human
uaguagagaugggguuuc

SEQ ID NO: 507995 - RNA, 24 nt, Human
uaguagagaugggguuucgccacg

SEQ ID NO: 507996 - RNA, 21 nt, Human
uauaaaccaccuaaacagaau

SEQ ID NO: 507997 - RNA, 20 nt, Human
uauaaagagugagcacaugu

SEQ ID NO: 507998 - RNA, 20 nt, Human
uauagcaaaaacauaaacag

SEQ ID NO: 507999 - RNA, 25 nt, Human
uauauacugaacugggaaauaacau

SEQ ID NO: 508000 - RNA, 19 nt, Human
uauuuugguaagcagacga

SEQ ID NO: 508001 - RNA, 24 nt, Human
ucaaagugcagggauuacaggcgu

SEQ ID NO: 508002 - RNA, 23 nt, Human
ucacaccacugcacuccagucug

SEQ ID NO: 508003 - RNA, 24 nt, Human
ucacccaggcuggagugcaguggu

SEQ ID NO: 508004 - RNA, 18 nt, Human
ucacugcaaccuucgccc

SEQ ID NO: 508005 - RNA, 21 nt, Human
ucacugcaaccuucgcccccc

SEQ ID NO: 508006 - RNA, 24 nt, Human
ucacugcaaccuucgccccccagg

SEQ ID NO: 508007 - RNA, 23 nt, Human
ucacuugaggccaggaguuugag

SEQ ID NO: 508008 - RNA, 20 nt, Human
ucaggacagugggaucuggg

SEQ ID NO: 508009 - RNA, 22 nt, Human
ucaugccuguaaucccagcacu

SEQ ID NO: 508010 - RNA, 21 nt, Human
uccaauuuugacaauaucucu

SEQ ID NO: 508011 - RNA, 19 nt, Human
uccagccugggcgacaaga

SEQ ID NO: 508012 - RNA, 24 nt, Human
uccaucuccaaaaaaaaaaaaaaa

SEQ ID NO: 508013 - RNA, 18 nt, Human
uccauucagcaaaaaggc

SEQ ID NO: 508014 - RNA, 24 nt, Human
ucccguuccgucacccaggcugga

SEQ ID NO: 508015 - RNA, 24 nt, Human
uccgucacccaggcuggagugcag

SEQ ID NO: 508016 - RNA, 24 nt, Human
uccugaguagcugggacaacaggu

SEQ ID NO: 508017 - RNA, 23 nt, Human
ucgugccauugcacuccagccug

SEQ ID NO: 508018 - RNA, 24 nt, Human
ucucaaagugcagggauuacaggc

SEQ ID NO: 508019 - RNA, 21 nt, Human
ucucaguauuuuuuccagcac

SEQ ID NO: 508020 - RNA, 20 nt, Human
ucuccaaaaaaaaaaaaaaa

SEQ ID NO: 508021 - RNA, 22 nt, Human
ucuccauuuaaaaucaucaaca

SEQ ID NO: 508022 - RNA, 21 nt, Human
ucucuuaaaaaaaaaaaaaaa

SEQ ID NO: 508023 - RNA, 23 nt, Human
ucugaagccaaugaugaagacuu

SEQ ID NO: 508024 - RNA, 19 nt, Human
ugaaaugaacacauucuca

SEQ ID NO: 508025 - RNA, 19 nt, Human
ugacagaacgagaccccau

SEQ ID NO: 508026 - RNA, 21 nt, Human
ugacauauguuaacacagcca

SEQ ID NO: 508027 - RNA, 22 nt, Human
ugaccagcucuuuugaaaagcc

SEQ ID NO: 508028 - RNA, 18 nt, Human
ugaccucaagugauccgc

SEQ ID NO: 508029 - RNA, 21 nt, Human
ugagacccccaucucuaaaaa

SEQ ID NO: 508030 - RNA, 21 nt, Human
ugagaggcagcagagaagggg

SEQ ID NO: 508031 - RNA, 22 nt, Human
ugagccaagaucgugccauugc

SEQ ID NO: 508032 - RNA, 23 nt, Human
ugagcccaggaguucaggaccag

SEQ ID NO: 508033 - RNA, 19 nt, Human
ugaggcagcaagauaacuu

SEQ ID NO: 508034 - RNA, 18 nt, Human
ugagguagggauaguggc

SEQ ID NO: 508035 - RNA, 22 nt, Human
ugaguuggcuaacugcaggcau

SEQ ID NO: 508036 - RNA, 24 nt, Human
ugcaccuguagucccagcuaccag

SEQ ID NO: 508037 - RNA, 22 nt, Human
ugcaguggugcaauccuggcuc

SEQ ID NO: 508038 - RNA, 21 nt, Human
ugccucagcauccugaguagc

SEQ ID NO: 508039 - RNA, 24 nt, Human
ugccucagcauccugaguagcugg

SEQ ID NO: 508040 - RNA, 23 nt, Human
ugccuguaaucccagcacuuugg

SEQ ID NO: 508041 - RNA, 24 nt, Human
ugccuguaaucccagcacuuuggg

SEQ ID NO: 508042 - RNA, 19 nt, Human
ugccuguaaucucagcuac

SEQ ID NO: 508043 - RNA, 22 nt, Human
ugccuguaaucucagcuacuca

SEQ ID NO: 508044 - RNA, 23 nt, Human
ugccuguaaucucagcuacucag

SEQ ID NO: 508045 - RNA, 21 nt, Human
uggaaagcaaacaggaaacca

SEQ ID NO: 508046 - RNA, 18 nt, Human
uggaaaugaaacuccagc

SEQ ID NO: 508047 - RNA, 21 nt, Human
uggaauuuaccaccaugagca

SEQ ID NO: 508048 - RNA, 24 nt, Human
uggagugcaguggugcaauccugg

SEQ ID NO: 508049 - RNA, 18 nt, Human
uggcacugggaacacagu

SEQ ID NO: 508050 - RNA, 21 nt, Human
uggcagagauguuuuaaguac

SEQ ID NO: 508051 - RNA, 22 nt, Human
uggcaguugccuguaaucucag

SEQ ID NO: 508052 - RNA, 22 nt, Human
uggcaugcaccuguagucccag

SEQ ID NO: 508053 - RNA, 21 nt, Human
uggccaaacccucccgauguu

SEQ ID NO: 508054 - RNA, 24 nt, Human
uggccaggccggucucaaacuccu

SEQ ID NO: 508055 - RNA, 24 nt, Human
uggcucacacuuauaaucccagca

SEQ ID NO: 508056 - RNA, 23 nt, Human
ugggaggccaaggcaggcagguc

SEQ ID NO: 508057 - RNA, 19 nt, Human
ugggaggcuaaggugggag

SEQ ID NO: 508058 - RNA, 24 nt, Human
ugggaggcuaaggugggaggauca

SEQ ID NO: 508059 - RNA, 18 nt, Human
ugggaggcugaggcagca

SEQ ID NO: 508060 - RNA, 23 nt, Human
ugggaggcugaggcagcaagaua

SEQ ID NO: 508061 - RNA, 20 nt, Human
ugggcucuaagagaaagaga

SEQ ID NO: 508062 - RNA, 24 nt, Human
ugggguuucgccacgcuggccagg

SEQ ID NO: 508063 - RNA, 24 nt, Human
ugguggcaguugccuguaaucuca

SEQ ID NO: 508064 - RNA, 24 nt, Human
ugguggcaugcaccuguaguccca

SEQ ID NO: 508065 - RNA, 24 nt, Human
uguaguaugauugagcacucucaa

SEQ ID NO: 508066 - RNA, 23 nt, Human
ugugcaaaaaucagcaguagaaa

SEQ ID NO: 508067 - RNA, 23 nt, Human
ugugcagcgaaacacaaaaacca

SEQ ID NO: 508068 - RNA, 22 nt, Human
ugugcucauucacauagcuagg

SEQ ID NO: 508069 - RNA, 18 nt, Human
ugugguggcaugcaccug

SEQ ID NO: 508070 - RNA, 23 nt, Human
uuacccaugggaggcugaggcag

SEQ ID NO: 508071 - RNA, 22 nt, Human
uuaggugggugugguggcaugc

SEQ ID NO: 508072 - RNA, 18 nt, Human
uuaguagagaugggguuu

SEQ ID NO: 508073 - RNA, 22 nt, Human
uuaguagagaugggguuucgcc

SEQ ID NO: 508074 - RNA, 23 nt, Human
uuaguagagaugggguuucgcca

SEQ ID NO: 508075 - RNA, 19 nt, Human
uucaagaagugcccccagc

SEQ ID NO: 508076 - RNA, 18 nt, Human
uucaauauauuaaccgag

SEQ ID NO: 508077 - RNA, 19 nt, Human
uucuugggcuguaagaaaa

SEQ ID NO: 508078 - RNA, 22 nt, Human
uugagcccaggaguucaggacc

SEQ ID NO: 508079 - RNA, 21 nt, Human
uugaggccaggaguuugagau

SEQ ID NO: 508080 - RNA, 25 nt, Human
uugggaggcuaaggugggaggauca

SEQ ID NO: 508081 - RNA, 21 nt, Human
uuuacaaaacugaaagcuaca

SEQ ID NO: 508082 - RNA, 20 nt, Human
uuugaaaagccugagaacca

SEQ ID NO: 508083 - RNA, 24 nt, Human
uuuggaacagacaggaaccugggg

SEQ ID NO: 508084 - RNA, 22 nt, Human
uuuuuaguagagaugggguuuc

SEQ ID NO: 508085 - RNA, 23 nt, Human
uuuuuaguagagaugggguuucg

SEQ ID NO: 508086 - RNA, 21 nt, Human
aaucuuguccccacuccuccc

SEQ ID NO: 508087 - RNA, 23 nt, Human
aucuuguccccacuccuccccca

SEQ ID NO: 508088 - RNA, 20 nt, Human
cccccaaucccacacaucug

SEQ ID NO: 508089 - RNA, 23 nt, Human
guccccacuccucccccaauccc

SEQ ID NO: 508090 - RNA, 25 nt, Human
guccccacuccucccccaaucccac

SEQ ID NO: 508091 - RNA, 19 nt, Human
uaagccgguauaaaauaca

SEQ ID NO: 508092 - RNA, 19 nt, Human
ucacuuggagauaaaaaau

SEQ ID NO: 508093 - RNA, 21 nt, Human
ucccacacaucugugcucuuc

SEQ ID NO: 508094 - RNA, 22 nt, Human
uccccacuccucccccaauccc

SEQ ID NO: 508095 - RNA, 19 nt, Human
ucccccaaucccacacauc

SEQ ID NO: 508096 - RNA, 25 nt, Human
uguccccacuccucccccaauccca

SEQ ID NO: 508097 - RNA, 19 nt, Human
aaaacaacaggcgucccca

SEQ ID NO: 508098 - RNA, 27 nt, Human
aaaauaaaaacucaugaaaauauaaga

SEQ ID NO: 508099 - RNA, 24 nt, Human
aaacaacaggcguccccacccccc

SEQ ID NO: 508100 - RNA, 20 nt, Human
aaacccaaauugagccaaaa

SEQ ID NO: 508101 - RNA, 20 nt, Human
aacaacaggcguccccaccc

SEQ ID NO: 508102 - RNA, 22 nt, Human
aacaacaggcguccccaccccc

SEQ ID NO: 508103 - RNA, 19 nt, Human
aacaggcguccccaccccc

SEQ ID NO: 508104 - RNA, 24 nt, Human
aagagaggcugccggaucgcagca

SEQ ID NO: 508105 - RNA, 18 nt, Human
acaaacccaaauugagcc

SEQ ID NO: 508106 - RNA, 22 nt, Human
acaacaggcguccccacccccc

SEQ ID NO: 508107 - RNA, 24 nt, Human
accaacaaacccaaauugagccaa

SEQ ID NO: 508108 - RNA, 24 nt, Human
acccuagaauguggaauacaaaau

SEQ ID NO: 508109 - RNA, 19 nt, Human
agcacuuuaaaaagguaau

SEQ ID NO: 508110 - RNA, 21 nt, Human
agccacacgcuccccgccccg

SEQ ID NO: 508111 - RNA, 19 nt, Human
agccccagcugccaccacg

SEQ ID NO: 508112 - RNA, 26 nt, Human
aggacagaugugccacccuaucucgg

SEQ ID NO: 508113 - RNA, 18 nt, Human
auaaagaaagccuuuucu

SEQ ID NO: 508114 - RNA, 27 nt, Human
auauucuuuagaugccuacuuuugcca

SEQ ID NO: 508115 - RNA, 19 nt, Human
caaauuacagaauacccua

SEQ ID NO: 508116 - RNA, 23 nt, Human
caacaaacccaaauugagccaaa

SEQ ID NO: 508117 - RNA, 21 nt, Human
caacaggcguccccacccccc

SEQ ID NO: 508118 - RNA, 19 nt, Human
caaccucuuagaagacgau

SEQ ID NO: 508119 - RNA, 21 nt, Human
cacagccacacgcuccccgcc

SEQ ID NO: 508120 - RNA, 19 nt, Human
cagcagaugacagacagcu

SEQ ID NO: 508121 - RNA, 21 nt, Human
cagcagaugacagacagcuga

SEQ ID NO: 508122 - RNA, 21 nt, Human
cagccacacgcuccccgcccc

SEQ ID NO: 508123 - RNA, 22 nt, Human
cagccaggacacaagaagggga

SEQ ID NO: 508124 - RNA, 19 nt, Human
cagggcacagaagagcucc

SEQ ID NO: 508125 - RNA, 19 nt, Human
ccaaaacaacaggcguccc

SEQ ID NO: 508126 - RNA, 21 nt, Human
ccaaaacaacaggcgucccca

SEQ ID NO: 508127 - RNA, 21 nt, Human
ccaacaaacccaaauugagcc

SEQ ID NO: 508128 - RNA, 21 nt, Human
ccacacgcuccccgccccgcg

SEQ ID NO: 508129 - RNA, 21 nt, Human
ccagcaucccagccagccagg

SEQ ID NO: 508130 - RNA, 19 nt, Human
ccauccacagccccagcug

SEQ ID NO: 508131 - RNA, 19 nt, Human
cccagccagccaggacaca

SEQ ID NO: 508132 - RNA, 21 nt, Human
cccgccccgcggugauuagga

SEQ ID NO: 508133 - RNA, 22 nt, Human
cccgccccgcggugauuaggaa

SEQ ID NO: 508134 - RNA, 21 nt, Human
cccucccauccacagccccag

SEQ ID NO: 508135 - RNA, 22 nt, Human
ccgaacaccaacagugcugcag

SEQ ID NO: 508136 - RNA, 23 nt, Human
ccucugaagagccaccagcaucc

SEQ ID NO: 508137 - RNA, 24 nt, Human
cgcagcagaugacagacagcugau

SEQ ID NO: 508138 - RNA, 23 nt, Human
cuaggaacaacucauuauucagc

SEQ ID NO: 508139 - RNA, 20 nt, Human
cuccaugugaccaacaaacc

SEQ ID NO: 508140 - RNA, 24 nt, Human
cucccauccacagccccagcugcc

SEQ ID NO: 508141 - RNA, 25 nt, Human
cucguccccauuaagaacacaacca

SEQ ID NO: 508142 - RNA, 25 nt, Human
cucuaggaacaacucauuauucagc

SEQ ID NO: 508143 - RNA, 21 nt, Human
gacaagagagacaguaaggaa

SEQ ID NO: 508144 - RNA, 24 nt, Human
gaccccucccauccacagggcacc

SEQ ID NO: 508145 - RNA, 26 nt, Human
gagagacaguaaggaagauuugaggc

SEQ ID NO: 508146 - RNA, 21 nt, Human
gagggauaaugugccaccacc

SEQ ID NO: 508147 - RNA, 22 nt, Human
gcagugaagagaggcugccgga

SEQ ID NO: 508148 - RNA, 20 nt, Human
gccaaaacaacaggcguccc

SEQ ID NO: 508149 - RNA, 18 nt, Human
gccacccuaucucggauu

SEQ ID NO: 508150 - RNA, 18 nt, Human
gcugcaguaagcugucuc

SEQ ID NO: 508151 - RNA, 21 nt, Human
ggaauuucucacaauccacuc

SEQ ID NO: 508152 - RNA, 18 nt, Human
ggacagaugugccacccu

SEQ ID NO: 508153 - RNA, 24 nt, Human
gucuccucuaggaacaacucauua

SEQ ID NO: 508154 - RNA, 19 nt, Human
gugggagagcaggaaugga

SEQ ID NO: 508155 - RNA, 23 nt, Human
uaauaagauuuuaauaauauugg

SEQ ID NO: 508156 - RNA, 23 nt, Human
uaaucuuuaggauaaagaaagcc

SEQ ID NO: 508157 - RNA, 19 nt, Human
uaggaacaacucauuauuc

SEQ ID NO: 508158 - RNA, 24 nt, Human
uaguaagaaguuauguguaacuuc

SEQ ID NO: 508159 - RNA, 23 nt, Human
uauaagagcacuuuaaaaaggua

SEQ ID NO: 508160 - RNA, 26 nt, Human
ucaaacacauguagauuccaugugac

SEQ ID NO: 508161 - RNA, 22 nt, Human
ucagaucagugugucugcucgu

SEQ ID NO: 508162 - RNA, 22 nt, Human
ucgcagcagaugacagacagcu

SEQ ID NO: 508163 - RNA, 21 nt, Human
ucuccaguugcagaggggccu

SEQ ID NO: 508164 - RNA, 21 nt, Human
ugaaaggcauuagcaaccucu

SEQ ID NO: 508165 - RNA, 18 nt, Human
ugagccaaaacaacaggc

SEQ ID NO: 508166 - RNA, 25 nt, Human
ugagccaaaacaacaggcgucccca

SEQ ID NO: 508167 - RNA, 22 nt, Human
ugaggccuaauuuucuuccaag

SEQ ID NO: 508168 - RNA, 24 nt, Human
ugcaccaggccaccacaggcuccc

SEQ ID NO: 508169 - RNA, 23 nt, Human
ugcaccaggccaccacaggcuuc

SEQ ID NO: 508170 - RNA, 19 nt, Human
ugcggaggaggggcaacac

SEQ ID NO: 508171 - RNA, 20 nt, Human
ugugugcagugggagagcag

SEQ ID NO: 508172 - RNA, 21 nt, Human
uuaaaugagauuaaagagaag

SEQ ID NO: 508173 - RNA, 19 nt, Human
uuauuuguccuuccagcac

SEQ ID NO: 508174 - RNA, 18 nt, Human
uucagaucagugugucug

SEQ ID NO: 508175 - RNA, 22 nt, Human
uuccgggaggguggcugggggu

SEQ ID NO: 508176 - RNA, 18 nt, Human
aaccaaccccuagcuacc

SEQ ID NO: 508177 - RNA, 20 nt, Human
aagaacccuugcccccagug

SEQ ID NO: 508178 - RNA, 21 nt, Human
aagaacccuugcccccagugu

SEQ ID NO: 508179 - RNA, 18 nt, Human
aagacccaauccuucccc

SEQ ID NO: 508180 - RNA, 22 nt, Human
acccaauccuuccccacaccag

SEQ ID NO: 508181 - RNA, 21 nt, Human
agcauuuaauggucagaaaca

SEQ ID NO: 508182 - RNA, 21 nt, Human
aggcuggguucgggucccggg

SEQ ID NO: 508183 - RNA, 21 nt, Human
caagaagaacccuugccccca

SEQ ID NO: 508184 - RNA, 21 nt, Human
caagucccuuuguccccacuc

SEQ ID NO: 508185 - RNA, 19 nt, Human
cagucagccacagaagcug

SEQ ID NO: 508186 - RNA, 24 nt, Human
ccaccuucugaugauaaccaaccc

SEQ ID NO: 508187 - RNA, 21 nt, Human
cccaauccuuccccacaccag

SEQ ID NO: 508188 - RNA, 18 nt, Human
ccccacaccaggcaaagc

SEQ ID NO: 508189 - RNA, 21 nt, Human
ccccacaugcaagaagaaccc

SEQ ID NO: 508190 - RNA, 19 nt, Human
ccccagugucaaaugggau

SEQ ID NO: 508191 - RNA, 26 nt, Human
cccccagugucaaaugggauggggau

SEQ ID NO: 508192 - RNA, 24 nt, Human
cccuauguaagcuguuaacagagu

SEQ ID NO: 508193 - RNA, 24 nt, Human
cccuuuguccccacucucuugucc

SEQ ID NO: 508194 - RNA, 23 nt, Human
ccucgguggagccggggccggug

SEQ ID NO: 508195 - RNA, 18 nt, Human
ccuugaacuugucauagg

SEQ ID NO: 508196 - RNA, 18 nt, Human
cggcgagacgggcugggg

SEQ ID NO: 508197 - RNA, 19 nt, Human
cgggcugggggacccgggc

SEQ ID NO: 508198 - RNA, 22 nt, Human
cuauguaagcuguuaacagagu

SEQ ID NO: 508199 - RNA, 19 nt, Human
cuugcccccagugucaaau

SEQ ID NO: 508200 - RNA, 23 nt, Human
gauggggaugcuagaguuauagu

SEQ ID NO: 508201 - RNA, 23 nt, Human
ggacaagacccaauccuucccca

SEQ ID NO: 508202 - RNA, 21 nt, Human
ggccugaggggagaccaccuu

SEQ ID NO: 508203 - RNA, 18 nt, Human
gggagcggcagaugagca

SEQ ID NO: 508204 - RNA, 18 nt, Human
ggguaggggagaggcugg

SEQ ID NO: 508205 - RNA, 19 nt, Human
uaacagaguucacaggggu

SEQ ID NO: 508206 - RNA, 28 nt, Human
uacaacagcauuuaauggucagaaaaga

SEQ ID NO: 508207 - RNA, 24 nt, Human
uauccuguccucuugguuuuucca

SEQ ID NO: 508208 - RNA, 25 nt, Human
ucucuuguccuugaacuugucauag

SEQ ID NO: 508209 - RNA, 23 nt, Human
ugcuagaguuauaguaaagggga

SEQ ID NO: 508210 - RNA, 18 nt, Human
ugucaaaugggaugggga

SEQ ID NO: 508211 - RNA, 23 nt, Human
uguccuugaacuugucauagggg

SEQ ID NO: 508212 - RNA, 23 nt, Human
uuuguccccacucucuuguccuu

SEQ ID NO: 508213 - RNA, 22 nt, Human
uuuuuuuuuuuuuuuuuuucag

SEQ ID NO: 508214 - RNA, 26 nt, Human
aaccugaccuccaacuuuagagccca

SEQ ID NO: 508215 - RNA, 20 nt, Human
agcagcuaucacuccucugc

SEQ ID NO: 508216 - RNA, 26 nt, Human
agccugaccuccaacuuuagagccca

SEQ ID NO: 508217 - RNA, 18 nt, Human
caaaguagcucaucccac

SEQ ID NO: 508218 - RNA, 23 nt, Human
caauaaauacaaagcuuccucug

SEQ ID NO: 508219 - RNA, 23 nt, Human
caauaaauacaaagcuuccucug

SEQ ID NO: 508220 - RNA, 19 nt, Human
cacugaaauaagaacacug

SEQ ID NO: 508221 - RNA, 19 nt, Human
cacugaaauaagaacacug

SEQ ID NO: 508222 - RNA, 22 nt, Human
cacugauuggggggaggguggg

SEQ ID NO: 508223 - RNA, 22 nt, Human
cacugauuggggggaggguggg

SEQ ID NO: 508224 - RNA, 24 nt, Human
cagagaggugggccuugaagccaa

SEQ ID NO: 508225 - RNA, 24 nt, Human
cagagaggugggccuugaagccaa

SEQ ID NO: 508226 - RNA, 23 nt, Human
ccaauaaauacaaagcuuccucu

SEQ ID NO: 508227 - RNA, 23 nt, Human
ccaauaaauacaaagcuuccucu

SEQ ID NO: 508228 - RNA, 22 nt, Human
cccacugcacgaauugcuugga

SEQ ID NO: 508229 - RNA, 24 nt, Human
ccucagguaaccugaccuccaacu

SEQ ID NO: 508230 - RNA, 24 nt, Human
ccucagguagccugaccuccaacu

SEQ ID NO: 508231 - RNA, 19 nt, Human
cuggcaaaguagcucaucc

SEQ ID NO: 508232 - RNA, 21 nt, Human
cuuuagagcccagaguacaga

SEQ ID NO: 508233 - RNA, 21 nt, Human
cuuuagagcccagaguacaga

SEQ ID NO: 508234 - RNA, 25 nt, Human
gcccagaguacagagaggugggccu

SEQ ID NO: 508235 - RNA, 25 nt, Human
gcccagaguacagagaggugggccu

SEQ ID NO: 508236 - RNA, 21 nt, Human
uaaccugaccuccaacuuuag

SEQ ID NO: 508237 - RNA, 20 nt, Human
ugauuggggggagggugggu

SEQ ID NO: 508238 - RNA, 20 nt, Human
ugauuggggggagggugggu

SEQ ID NO: 508239 - RNA, 26 nt, Human
ugauuggggggaggguggguguugca

SEQ ID NO: 508240 - RNA, 26 nt, Human
ugauuggggggaggguggguguugca

SEQ ID NO: 508241 - RNA, 18 nt, Human
uggagccugacugcccag

SEQ ID NO: 508242 - RNA, 18 nt, Human
uggagccugacugcccag

SEQ ID NO: 508243 - RNA, 26 nt, Human
uugaagccaauaaauacaaagcuucc

SEQ ID NO: 508244 - RNA, 26 nt, Human
uugaagccaauaaauacaaagcuucc

SEQ ID NO: 508245 - RNA, 26 nt, Human
aaaacaagaccaagguaaacaaaaaa

SEQ ID NO: 508246 - RNA, 21 nt, Human
aaacaagaccaagguaaacaa

SEQ ID NO: 508247 - RNA, 18 nt, Human
aaacaaggccuaaugaag

SEQ ID NO: 508248 - RNA, 19 nt, Human
aaacacggugcagcuggug

SEQ ID NO: 508249 - RNA, 19 nt, Human
aaauaaaaauuugagacuc

SEQ ID NO: 508250 - RNA, 20 nt, Human
aaauccaaauuaacuuagcc

SEQ ID NO: 508251 - RNA, 21 nt, Human
aaauggcagccauuauggcaa

SEQ ID NO: 508252 - RNA, 20 nt, Human
aacaaauccaaauuaacuua

SEQ ID NO: 508253 - RNA, 18 nt, Human
aacacggugcagcuggug

SEQ ID NO: 508254 - RNA, 20 nt, Human
aagaggcagaacagggaagg

SEQ ID NO: 508255 - RNA, 22 nt, Human
aagcacuucaaacaaaagaaaa

SEQ ID NO: 508256 - RNA, 25 nt, Human
aagcacuucaaacaaaagaaaaggu

SEQ ID NO: 508257 - RNA, 23 nt, Human
aaggaacacccauccccuuuccu

SEQ ID NO: 508258 - RNA, 26 nt, Human
acacugcaucacauauauuacucugu

SEQ ID NO: 508259 - RNA, 25 nt, Human
acagaauacuagcuuacacuaaaac

SEQ ID NO: 508260 - RNA, 18 nt, Human
acccaucccccugcucca

SEQ ID NO: 508261 - RNA, 19 nt, Human
agaaaaagagggcaaauga

SEQ ID NO: 508262 - RNA, 20 nt, Human
agaaaaagagggcaaaugag

SEQ ID NO: 508263 - RNA, 21 nt, Human
agacaaauaaagauugccccc

SEQ ID NO: 508264 - RNA, 23 nt, Human
agcagcuacccuguguucccaau

SEQ ID NO: 508265 - RNA, 23 nt, Human
agguaaacaaaaaaucuguauuu

SEQ ID NO: 508266 - RNA, 24 nt, Human
aggugguaaauacaaugccauucc

SEQ ID NO: 508267 - RNA, 23 nt, Human
aguaaccugucauucauaaagau

SEQ ID NO: 508268 - RNA, 22 nt, Human
auaaacgcaugacaugugugua

SEQ ID NO: 508269 - RNA, 23 nt, Human
auaagcacuucaaacaaaagaaa

SEQ ID NO: 508270 - RNA, 19 nt, Human
aucuauggcaaaauggcag

SEQ ID NO: 508271 - RNA, 26 nt, Human
augauacuaaagauaaagugacaauu

SEQ ID NO: 508272 - RNA, 20 nt, Human
caaauacaauuccuaauuca

SEQ ID NO: 508273 - RNA, 19 nt, Human
caacaaauacaauuccuaa

SEQ ID NO: 508274 - RNA, 18 nt, Human
caacccaacuccaggaua

SEQ ID NO: 508275 - RNA, 22 nt, Human
caaggaacacccauccccuuuc

SEQ ID NO: 508276 - RNA, 20 nt, Human
cagcuacccuguguucccaa

SEQ ID NO: 508277 - RNA, 20 nt, Human
caggguucagugagggagac

SEQ ID NO: 508278 - RNA, 19 nt, Human
caggucccaaacagaacaa

SEQ ID NO: 508279 - RNA, 20 nt, Human
cagugauuucacaguaggcu

SEQ ID NO: 508280 - RNA, 22 nt, Human
caguggcucuauuauucugcaa

SEQ ID NO: 508281 - RNA, 22 nt, Human
caguuuuucaguuauauggaaa

SEQ ID NO: 508282 - RNA, 24 nt, Human
caugacauguguguagucuaugca

SEQ ID NO: 508283 - RNA, 19 nt, Human
ccaucccccugcuccaacu

SEQ ID NO: 508284 - RNA, 21 nt, Human
ccccuguggcagcauuaaucc

SEQ ID NO: 508285 - RNA, 22 nt, Human
ccuccacuggcaaauauggagc

SEQ ID NO: 508286 - RNA, 23 nt, Human
ccuguauucacuuagaaaaagag

SEQ ID NO: 508287 - RNA, 21 nt, Human
cguguaaacauaugaagcuau

SEQ ID NO: 508288 - RNA, 23 nt, Human
cguguccuguauucacuuagaaa

SEQ ID NO: 508289 - RNA, 20 nt, Human
cuucucaaauucuucuuaaa

SEQ ID NO: 508290 - RNA, 19 nt, Human
gagcaagagcaacagcagc

SEQ ID NO: 508291 - RNA, 18 nt, Human
gcaaugaagggauauguu

SEQ ID NO: 508292 - RNA, 19 nt, Human
gcagaaagcaguugguaca

SEQ ID NO: 508293 - RNA, 22 nt, Human
ggauaccaagugaaaacagcaa

SEQ ID NO: 508294 - RNA, 21 nt, Human
gggaaugaugagacccauacu

SEQ ID NO: 508295 - RNA, 22 nt, Human
ggugagagcaagagcaacagca

SEQ ID NO: 508296 - RNA, 26 nt, Human
guaagacaaauaaagauugccccccu

SEQ ID NO: 508297 - RNA, 19 nt, Human
guccuuugggaucugcccu

SEQ ID NO: 508298 - RNA, 21 nt, Human
uaaaaccuaucuugaggaaac

SEQ ID NO: 508299 - RNA, 22 nt, Human
uaaagaucaaggaguaccucuc

SEQ ID NO: 508300 - RNA, 22 nt, Human
uaacaaauccaaauuaacuuag

SEQ ID NO: 508301 - RNA, 19 nt, Human
uaacuuagccuaaguuucc

SEQ ID NO: 508302 - RNA, 18 nt, Human
uaagacuuaaaacaagac

SEQ ID NO: 508303 - RNA, 18 nt, Human
uaaggcaaaacaguaacc

SEQ ID NO: 508304 - RNA, 22 nt, Human
uaaggcaaaacaguaaccuguc

SEQ ID NO: 508305 - RNA, 19 nt, Human
uaagguuagcaacccaacu

SEQ ID NO: 508306 - RNA, 19 nt, Human
uaaguuuccaaagcuguag

SEQ ID NO: 508307 - RNA, 18 nt, Human
uacaaugccauuccaagg

SEQ ID NO: 508308 - RNA, 20 nt, Human
uacacuaaaaccuaucuuga

SEQ ID NO: 508309 - RNA, 21 nt, Human
uacacugcaucacauauauua

SEQ ID NO: 508310 - RNA, 22 nt, Human
uacagaaaacacggugcagcug

SEQ ID NO: 508311 - RNA, 19 nt, Human
uacuaaagauaaagugaca

SEQ ID NO: 508312 - RNA, 22 nt, Human
uagaaaacaucauagaaauuaa

SEQ ID NO: 508313 - RNA, 18 nt, Human
uauaaacaaggccuaaug

SEQ ID NO: 508314 - RNA, 25 nt, Human
uaugcccauuuccuccacuggcaaa

SEQ ID NO: 508315 - RNA, 21 nt, Human
ucagugagggagacacagacu

SEQ ID NO: 508316 - RNA, 18 nt, Human
ucauaaagaucaaggagu

SEQ ID NO: 508317 - RNA, 18 nt, Human
ucccccugcuccaacucc

SEQ ID NO: 508318 - RNA, 22 nt, Human
uccucaagucucuuggccacuu

SEQ ID NO: 508319 - RNA, 23 nt, Human
ucuacgaacacacagaauacuag

SEQ ID NO: 508320 - RNA, 18 nt, Human
ucuauggcaaaauggcag

SEQ ID NO: 508321 - RNA, 19 nt, Human
ucugcaaaucuguaauuac

SEQ ID NO: 508322 - RNA, 27 nt, Human
ucugcuguuaggccagaaccggggucc

SEQ ID NO: 508323 - RNA, 21 nt, Human
ugaaucaaguaacaaauccaa

SEQ ID NO: 508324 - RNA, 22 nt, Human
ugagaucagaucaagagacagu

SEQ ID NO: 508325 - RNA, 18 nt, Human
ugaggaaacauuaaacca

SEQ ID NO: 508326 - RNA, 20 nt, Human
ugcccauuuccuccacuggc

SEQ ID NO: 508327 - RNA, 19 nt, Human
ugccuuaacaacuucacag

SEQ ID NO: 508328 - RNA, 18 nt, Human
ugccuugccuaugcuccc

SEQ ID NO: 508329 - RNA, 19 nt, Human
uguccuguauucacuuaga

SEQ ID NO: 508330 - RNA, 21 nt, Human
uuagugucuuuuaaaagcuuc

SEQ ID NO: 508331 - RNA, 20 nt, Human
uucaagagauuauaauaguu

SEQ ID NO: 508332 - RNA, 20 nt, Human
uucacaaauaugcaugacac

SEQ ID NO: 508333 - RNA, 18 nt, Human
uucacuuagaaaaagagg

SEQ ID NO: 508334 - RNA, 25 nt, Human
uuccaaggaacacccauccccuuuc

SEQ ID NO: 508335 - RNA, 22 nt, Human
uugcuucucaaauucuucuuaa

SEQ ID NO: 508336 - RNA, 20 nt, Human
uuuaaaagcuuccuaaauau

SEQ ID NO: 508337 - RNA, 21 nt, Human
uuuagugucuuuuaaaagcuu

SEQ ID NO: 508338 - RNA, 22 nt, Human
uuuaugguuuacaaucaaaaug

SEQ ID NO: 508339 - RNA, 23 nt, Human
uuucuuagcaauagaauuccgua

SEQ ID NO: 508340 - RNA, 24 nt, Human
uuuuccaggucccaaacagaacaa

SEQ ID NO: 508341 - RNA, 23 nt, Human
gcagcagaaucagguuuauugga

SEQ ID NO: 508342 - RNA, 24 nt, Human
uuuuuuuuuuuuuuuuuuuuuggg

SEQ ID NO: 508343 - RNA, 22 nt, Human
aaaaagauaaaucacaguguaa

SEQ ID NO: 508344 - RNA, 19 nt, Human
acaagaaccuuugcugaaa

SEQ ID NO: 508345 - RNA, 21 nt, Human
acccagaaguuggugacuaau

SEQ ID NO: 508346 - RNA, 23 nt, Human
aggcagcagugaauuuucagaac

SEQ ID NO: 508347 - RNA, 22 nt, Human
caaaaagauaaaucacagugua

SEQ ID NO: 508348 - RNA, 21 nt, Human
cagcaaaaagauaaaucacag

SEQ ID NO: 508349 - RNA, 20 nt, Human
ccccucagcaaaaagauaaa

SEQ ID NO: 508350 - RNA, 21 nt, Human
gaaccuuugcugaaacaguuu

SEQ ID NO: 508351 - RNA, 23 nt, Human
uacaagaaccuuugcugaaacag

SEQ ID NO: 508352 - RNA, 24 nt, Human
uagugcuccuuaggccuuuaagcu

SEQ ID NO: 508353 - RNA, 23 nt, Human
uauagccaaauguugcuagugcu

SEQ ID NO: 508354 - RNA, 24 nt, Human
uauagccaaauguugcuagugcuc

SEQ ID NO: 508355 - RNA, 21 nt, Human
ucaucuuuggcugggguuaga

SEQ ID NO: 508356 - RNA, 22 nt, Human
ugaaacaguuuccacaaaggca

SEQ ID NO: 508357 - RNA, 20 nt, Human
ugacuagcaaaccaauauag

SEQ ID NO: 508358 - RNA, 24 nt, Human
uggcugggguuagacccagaaguu

SEQ ID NO: 508359 - RNA, 21 nt, Human
uguucugcugucaucuuuggc

SEQ ID NO: 508360 - RNA, 21 nt, Human
uuacacagcaauacacacuuu

SEQ ID NO: 508361 - RNA, 24 nt, Human
uuagacccagaaguuggugacuag

SEQ ID NO: 508362 - RNA, 21 nt, Human
uucucguccuccacucgaggg

SEQ ID NO: 508363 - RNA, 24 nt, Human
uugcugaaacaguuuccacaaagg

SEQ ID NO: 508364 - RNA, 20 nt, Human
uuguucugcugucaucuuug

SEQ ID NO: 508365 - RNA, 22 nt, Human
agaaggagggggcuuggguggu

SEQ ID NO: 508366 - RNA, 25 nt, Human
agauuccacacaaagaaggaggggg

SEQ ID NO: 508367 - RNA, 18 nt, Human
auugcagauuccacacaa

SEQ ID NO: 508368 - RNA, 19 nt, Human
caaaacacaaggccaucac

SEQ ID NO: 508369 - RNA, 21 nt, Human
caaccugggcucagucuggcc

SEQ ID NO: 508370 - RNA, 26 nt, Human
cagccgagccccaaccuagacacggu

SEQ ID NO: 508371 - RNA, 19 nt, Human
caggagaccccagggccac

SEQ ID NO: 508372 - RNA, 20 nt, Human
ccaaccuagacacggucuga

SEQ ID NO: 508373 - RNA, 23 nt, Human
ccacagccgagccccaaccuaga

SEQ ID NO: 508374 - RNA, 22 nt, Human
cccagggccacagccgagcccc

SEQ ID NO: 508375 - RNA, 21 nt, Human
ccgccggugucugggcuccug

SEQ ID NO: 508376 - RNA, 18 nt, Human
cgccugaaaucaaccugg

SEQ ID NO: 508377 - RNA, 18 nt, Human
cugcagcagcuccuagcc

SEQ ID NO: 508378 - RNA, 25 nt, Human
cugcagcagcuccuagccuugcuuc

SEQ ID NO: 508379 - RNA, 19 nt, Human
cuguugcugagccucagcc

SEQ ID NO: 508380 - RNA, 21 nt, Human
gagaggagcaaaacacaaggc

SEQ ID NO: 508381 - RNA, 20 nt, Human
gcuccuagccuugcuucugg

SEQ ID NO: 508382 - RNA, 19 nt, Human
ggaggugcucagcugacug

SEQ ID NO: 508383 - RNA, 19 nt, Human
ggcauggggcuggagggag

SEQ ID NO: 508384 - RNA, 21 nt, Human
ggggcuguugcugagccucag

SEQ ID NO: 508385 - RNA, 23 nt, Human
gggggcuugggugguagcacugg

SEQ ID NO: 508386 - RNA, 20 nt, Human
guugcugagccucagcccca

SEQ ID NO: 508387 - RNA, 19 nt, Human
uaagacaguuaaccuaaac

SEQ ID NO: 508388 - RNA, 24 nt, Human
uacaaaaagucuuuauuucacaga

SEQ ID NO: 508389 - RNA, 22 nt, Human
uccacacaaagaaggagggggc

SEQ ID NO: 508390 - RNA, 21 nt, Human
uccauaguuauggggaaggac

SEQ ID NO: 508391 - RNA, 21 nt, Human
uccgccugaaaucaaccuggg

SEQ ID NO: 508392 - RNA, 23 nt, Human
uccucuccagaaggcucuucuga

SEQ ID NO: 508393 - RNA, 21 nt, Human
uccuggagcugcuguggaguc

SEQ ID NO: 508394 - RNA, 19 nt, Human
ucugagcugagcaggagac

SEQ ID NO: 508395 - RNA, 23 nt, Human
ugagcaggagaccccagggcccc

SEQ ID NO: 508396 - RNA, 21 nt, Human
ugagcaggaugggaggugcuc

SEQ ID NO: 508397 - RNA, 19 nt, Human
ugaggggcuguugcugagc

SEQ ID NO: 508398 - RNA, 21 nt, Human
ugaggggcuguugcugagccu

SEQ ID NO: 508399 - RNA, 20 nt, Human
ugccugggagucuugggguu

SEQ ID NO: 508400 - RNA, 21 nt, Human
ugcucagcugacuguccucuc

SEQ ID NO: 508401 - RNA, 19 nt, Human
ugcuguggagucuauuggu

SEQ ID NO: 508402 - RNA, 18 nt, Human
uggaagccugaggggcug

SEQ ID NO: 508403 - RNA, 20 nt, Human
ugggcucagucuggcccugg

SEQ ID NO: 508404 - RNA, 19 nt, Human
uuggaagccugaggggcug

SEQ ID NO: 508405 - RNA, 23 nt, Human
uuuaagacaguuaaccuaaacuu

SEQ ID NO: 508406 - RNA, 19 nt, Human
aagaagauaaaauucucug

SEQ ID NO: 508407 - RNA, 24 nt, Human
agagaaugcgauucaggaagaugg

SEQ ID NO: 508408 - RNA, 20 nt, Human
agaggcgaguccagguacug

SEQ ID NO: 508409 - RNA, 18 nt, Human
agagggcagggagguuag

SEQ ID NO: 508410 - RNA, 19 nt, Human
aggaagaagauaaaauucu

SEQ ID NO: 508411 - RNA, 21 nt, Human
aggccagaguccaguagagaa

SEQ ID NO: 508412 - RNA, 18 nt, Human
agugguuugcuacugaag

SEQ ID NO: 508413 - RNA, 18 nt, Human
cagcccugguggcaucuc

SEQ ID NO: 508414 - RNA, 20 nt, Human
caguggggguggauaaagac

SEQ ID NO: 508415 - RNA, 23 nt, Human
ccagaguccaguagagaaugcga

SEQ ID NO: 508416 - RNA, 19 nt, Human
ccagugaaccaaugccaag

SEQ ID NO: 508417 - RNA, 20 nt, Human
cccauggucucuacuccugg

SEQ ID NO: 508418 - RNA, 19 nt, Human
cuccagcucaauccuaauc

SEQ ID NO: 508419 - RNA, 22 nt, Human
cugcuggaaggugaccucuuuu

SEQ ID NO: 508420 - RNA, 19 nt, Human
gccugcugccaccucucca

SEQ ID NO: 508421 - RNA, 21 nt, Human
gcugaccacaacagugggggu

SEQ ID NO: 508422 - RNA, 19 nt, Human
gggcagggagguuagcuac

SEQ ID NO: 508423 - RNA, 23 nt, Human
uaaaauucucuggggcugaccac

SEQ ID NO: 508424 - RNA, 20 nt, Human
uagaaaaaugaagacucaua

SEQ ID NO: 508425 - RNA, 20 nt, Human
ucaauccuaauccaccccau

SEQ ID NO: 508426 - RNA, 19 nt, Human
uccacuucccgcgccgccu

SEQ ID NO: 508427 - RNA, 22 nt, Human
uccagccagcaggagcgagagu

SEQ ID NO: 508428 - RNA, 26 nt, Human
ucuccagcucaauccuaauccacccc

SEQ ID NO: 508429 - RNA, 23 nt, Human
ugccuguacuucucaucuucuau

SEQ ID NO: 508430 - RNA, 22 nt, Human
aaaaaaaaaaaaucaaaccagc

SEQ ID NO: 508431 - RNA, 25 nt, Human
aaaaaaaaaaaucaaaccagcaaaa

SEQ ID NO: 508432 - RNA, 29 nt, Human
aaacaagaacaugaaaaaugagggacccc

SEQ ID NO: 508433 - RNA, 20 nt, Human
aaagcggauuuucaaaacca

SEQ ID NO: 508434 - RNA, 21 nt, Human
aacuugccccccugcauagaa

SEQ ID NO: 508435 - RNA, 22 nt, Human
aagaaaaggaagauuuuuaauu

SEQ ID NO: 508436 - RNA, 23 nt, Human
aagccagaagaucuucuccacag

SEQ ID NO: 508437 - RNA, 22 nt, Human
aagccucacagggugggaaggg

SEQ ID NO: 508438 - RNA, 23 nt, Human
aaggaaaacaggagagaggaaag

SEQ ID NO: 508439 - RNA, 22 nt, Human
aaggagaaaaaaaaaacgcugg

SEQ ID NO: 508440 - RNA, 19 nt, Human
aaggagcugggaggugaug

SEQ ID NO: 508441 - RNA, 25 nt, Human
aagggccucccugaacucucacucc

SEQ ID NO: 508442 - RNA, 21 nt, Human
acacagaaaauagaagucaag

SEQ ID NO: 508443 - RNA, 20 nt, Human
acagaaaaugacuugaggau

SEQ ID NO: 508444 - RNA, 19 nt, Human
acagaacacuagagcagcc

SEQ ID NO: 508445 - RNA, 22 nt, Human
acagcccccuucccugucucaa

SEQ ID NO: 508446 - RNA, 20 nt, Human
acaugugcacaucacaugua

SEQ ID NO: 508447 - RNA, 23 nt, Human
acauguggacauacacggccaca

SEQ ID NO: 508448 - RNA, 20 nt, Human
acccuuggaucccaaucccu

SEQ ID NO: 508449 - RNA, 21 nt, Human
accuggaggaccaaucaggcu

SEQ ID NO: 508450 - RNA, 22 nt, Human
agaaaaaaaaaacgcuggaagg

SEQ ID NO: 508451 - RNA, 23 nt, Human
agaaaaaaaaaacgcuggaagga

SEQ ID NO: 508452 - RNA, 24 nt, Human
agaaagcggauuuucaaaaccagg

SEQ ID NO: 508453 - RNA, 22 nt, Human
agaagggagggcaucuuuuuau

SEQ ID NO: 508454 - RNA, 20 nt, Human
agacaaauaaaugagcaagg

SEQ ID NO: 508455 - RNA, 21 nt, Human
agacucagaaaacuuaaggca

SEQ ID NO: 508456 - RNA, 21 nt, Human
agagaaagcggauuuucaaaa

SEQ ID NO: 508457 - RNA, 25 nt, Human
agagaggaaaggaaagaguaucugg

SEQ ID NO: 508458 - RNA, 21 nt, Human
agaggaaggaaaacaggagag

SEQ ID NO: 508459 - RNA, 21 nt, Human
agaguguguaauaaaaggcug

SEQ ID NO: 508460 - RNA, 21 nt, Human
agaucuucuccacacccgcac

SEQ ID NO: 508461 - RNA, 19 nt, Human
agcagccaggggcaaggaa

SEQ ID NO: 508462 - RNA, 21 nt, Human
agcaggagaagggcacuggug

SEQ ID NO: 508463 - RNA, 21 nt, Human
aggaagccgcaacugugcuga

SEQ ID NO: 508464 - RNA, 23 nt, Human
aggaaggaaaacaggagagagga

SEQ ID NO: 508465 - RNA, 23 nt, Human
aggacagauacaugaaucaaugc

SEQ ID NO: 508466 - RNA, 21 nt, Human
aggagaaaaaaaaaacgcugg

SEQ ID NO: 508467 - RNA, 23 nt, Human
aggcaagaugcagggaagccaga

SEQ ID NO: 508468 - RNA, 24 nt, Human
aggcaagaugcagggaagccagaa

SEQ ID NO: 508469 - RNA, 18 nt, Human
aggcagauaccagauuua

SEQ ID NO: 508470 - RNA, 18 nt, Human
aggcauuggagacacucu

SEQ ID NO: 508471 - RNA, 21 nt, Human
aggcugggcgauggagguggg

SEQ ID NO: 508472 - RNA, 20 nt, Human
agggaguaaagacccuaaca

SEQ ID NO: 508473 - RNA, 19 nt, Human
aguuugaacccaggcagga

SEQ ID NO: 508474 - RNA, 24 nt, Human
auaaaaauacugcuacaaagacac

SEQ ID NO: 508475 - RNA, 19 nt, Human
aucaagaaaaggaagauuu

SEQ ID NO: 508476 - RNA, 18 nt, Human
augcagaguugcucggag

SEQ ID NO: 508477 - RNA, 18 nt, Human
caaagcaacuuaggaagc

SEQ ID NO: 508478 - RNA, 25 nt, Human
caaccaguacgcauacaugcagugu

SEQ ID NO: 508479 - RNA, 21 nt, Human
caagaacaugaaaaaugacua

SEQ ID NO: 508480 - RNA, 23 nt, Human
caccccagagggugagauuccug

SEQ ID NO: 508481 - RNA, 21 nt, Human
cagaaaacuuaaggcaucaac

SEQ ID NO: 508482 - RNA, 23 nt, Human
cagagccugcuugcacccaaccc

SEQ ID NO: 508483 - RNA, 20 nt, Human
cagcaccccagagggugaga

SEQ ID NO: 508484 - RNA, 24 nt, Human
cagcgcugaaugcuacagaaauac

SEQ ID NO: 508485 - RNA, 18 nt, Human
cagcugaaaugccaggca

SEQ ID NO: 508486 - RNA, 22 nt, Human
cagggcaguuuuuuuuucuucu

SEQ ID NO: 508487 - RNA, 33 nt, Human
caguacgcauacaugcacuucacacauguggug

SEQ ID NO: 508488 - RNA, 22 nt, Human
cauaaacuaaauacagacaaau

SEQ ID NO: 508489 - RNA, 21 nt, Human
cauacacggccacagguaucg

SEQ ID NO: 508490 - RNA, 24 nt, Human
caucaagaaaaggaagauuuuuaa

SEQ ID NO: 508491 - RNA, 21 nt, Human
cauccaguaaacuugcccccc

SEQ ID NO: 508492 - RNA, 23 nt, Human
cauuagggaguaaagacccuaac

SEQ ID NO: 508493 - RNA, 24 nt, Human
ccaaaccacauccucugggaagag

SEQ ID NO: 508494 - RNA, 20 nt, Human
ccaaaggcaagaugcaggga

SEQ ID NO: 508495 - RNA, 25 nt, Human
ccagacaggagaaugggcugggacu

SEQ ID NO: 508496 - RNA, 18 nt, Human
ccauguuuuccucucccc

SEQ ID NO: 508497 - RNA, 25 nt, Human
ccauuuaaaaaaaaaaaaaaaaaaa

SEQ ID NO: 508498 - RNA, 22 nt, Human
cccaaaucauauauagugcuag

SEQ ID NO: 508499 - RNA, 18 nt, Human
ccccaaaccacauccucu

SEQ ID NO: 508500 - RNA, 23 nt, Human
ccccaauccagaucaagucaagc

SEQ ID NO: 508501 - RNA, 20 nt, Human
ccccuccaucgccaucuugg

SEQ ID NO: 508502 - RNA, 21 nt, Human
cccgcacugggcguggguggg

SEQ ID NO: 508503 - RNA, 25 nt, Human
cccucagccaaagcaacuuaggaag

SEQ ID NO: 508504 - RNA, 21 nt, Human
cccuccaucgccaucuugggc

SEQ ID NO: 508505 - RNA, 18 nt, Human
ccgccgccgccgccgccg

SEQ ID NO: 508506 - RNA, 23 nt, Human
ccgccgccgccgccgccuccccg

SEQ ID NO: 508507 - RNA, 18 nt, Human
ccgccgccgccuccccgu

SEQ ID NO: 508508 - RNA, 20 nt, Human
ccgccgccgccuccccgugc

SEQ ID NO: 508509 - RNA, 22 nt, Human
ccgccgccgccuccccgugcuu

SEQ ID NO: 508510 - RNA, 18 nt, Human
ccgcugccgccucacccg

SEQ ID NO: 508511 - RNA, 19 nt, Human
ccgcugccgccucacccgc

SEQ ID NO: 508512 - RNA, 20 nt, Human
ccggcgcgggggccagggcc

SEQ ID NO: 508513 - RNA, 18 nt, Human
ccuacuguuaaaacagcc

SEQ ID NO: 508514 - RNA, 19 nt, Human
ccugccccaaaccacaucc

SEQ ID NO: 508515 - RNA, 24 nt, Human
ccuuuagcuucuucugggggccgc

SEQ ID NO: 508516 - RNA, 20 nt, Human
cgccgccgccgccuccccgu

SEQ ID NO: 508517 - RNA, 22 nt, Human
cggccucgggggcccgggcccg

SEQ ID NO: 508518 - RNA, 18 nt, Human
cgucaguggcccggggag

SEQ ID NO: 508519 - RNA, 19 nt, Human
cucuggaucacagcccccu

SEQ ID NO: 508520 - RNA, 18 nt, Human
cugaaggagggggaggag

SEQ ID NO: 508521 - RNA, 18 nt, Human
cuggugcugggagagcga

SEQ ID NO: 508522 - RNA, 27 nt, Human
cuuuaaaaaaaaaaaaucaaaccagca

SEQ ID NO: 508523 - RNA, 24 nt, Human
gaaaaaccaaauaaaugacauugu

SEQ ID NO: 508524 - RNA, 22 nt, Human
gaaaacaggagagaggaaagga

SEQ ID NO: 508525 - RNA, 20 nt, Human
gagccugcuugcacccaacc

SEQ ID NO: 508526 - RNA, 22 nt, Human
gagccugcuugcacccaaccca

SEQ ID NO: 508527 - RNA, 20 nt, Human
gaucacagcccccuucccug

SEQ ID NO: 508528 - RNA, 23 nt, Human
gcaaagaccuccuugccagcacc

SEQ ID NO: 508529 - RNA, 18 nt, Human
gcaauaaggagcugggag

SEQ ID NO: 508530 - RNA, 26 nt, Human
gcacugggcgugggugggcugccugg

SEQ ID NO: 508531 - RNA, 23 nt, Human
gcagggcaagcagaagcacugag

SEQ ID NO: 508532 - RNA, 18 nt, Human
gcaguuuuuuuuucuucu

SEQ ID NO: 508533 - RNA, 28 nt, Human
gcauacaugcacuucacacaugugcaca

SEQ ID NO: 508534 - RNA, 21 nt, Human
gccccuccaucgccaucuugg

SEQ ID NO: 508535 - RNA, 21 nt, Human
gccgccgccgccgccgccgcc

SEQ ID NO: 508536 - RNA, 22 nt, Human
gccgccgccgccgccgccgccu

SEQ ID NO: 508537 - RNA, 19 nt, Human
gccgccucacccgccccuc

SEQ ID NO: 508538 - RNA, 20 nt, Human
gccucccugaacucucacuc

SEQ ID NO: 508539 - RNA, 20 nt, Human
gcgcggcgccgcgggcgggg

SEQ ID NO: 508540 - RNA, 23 nt, Human
ggagaaaaaaaaaacgcuggaag

SEQ ID NO: 508541 - RNA, 19 nt, Human
ggagaagggcacuggugcu

SEQ ID NO: 508542 - RNA, 18 nt, Human
ggagacagaacacuagag

SEQ ID NO: 508543 - RNA, 19 nt, Human
ggaggcaggaggauggcag

SEQ ID NO: 508544 - RNA, 18 nt, Human
ggagggggaggaggugga

SEQ ID NO: 508545 - RNA, 21 nt, Human
ggcaaggaaggaggggaagag

SEQ ID NO: 508546 - RNA, 24 nt, Human
ggcccagaaggcagaguuaacucu

SEQ ID NO: 508547 - RNA, 18 nt, Human
ggcgggggcgcggccucg

SEQ ID NO: 508548 - RNA, 21 nt, Human
gggaggagguggaaacguagg

SEQ ID NO: 508549 - RNA, 18 nt, Human
gggcgauggagguggggg

SEQ ID NO: 508550 - RNA, 23 nt, Human
gggcgugggugggcugccugggg

SEQ ID NO: 508551 - RNA, 20 nt, Human
gggggagugaauaauccaug

SEQ ID NO: 508552 - RNA, 18 nt, Human
gucaagccucacagggug

SEQ ID NO: 508553 - RNA, 18 nt, Human
gucugggagaggugugag

SEQ ID NO: 508554 - RNA, 19 nt, Human
gucugggagaggugugaga

SEQ ID NO: 508555 - RNA, 24 nt, Human
uaaaaauacugcuacaaagacaca

SEQ ID NO: 508556 - RNA, 24 nt, Human
uaaaacagccauuuaauucagggc

SEQ ID NO: 508557 - RNA, 19 nt, Human
uaaaaggccaauagauucu

SEQ ID NO: 508558 - RNA, 19 nt, Human
uaaagaaaaaacaaacuga

SEQ ID NO: 508559 - RNA, 24 nt, Human
uaaauacagacaaauaaaugagca

SEQ ID NO: 508560 - RNA, 19 nt, Human
uaacgagauacaaaaccaa

SEQ ID NO: 508561 - RNA, 21 nt, Human
uaacgagauacaaaaccaaca

SEQ ID NO: 508562 - RNA, 18 nt, Human
uaagagccuacuguuaaa

SEQ ID NO: 508563 - RNA, 23 nt, Human
uaagagccuacuguuaaaacagc

SEQ ID NO: 508564 - RNA, 21 nt, Human
uacagaaauacuacaagugac

SEQ ID NO: 508565 - RNA, 21 nt, Human
uacaggcacacauguggacau

SEQ ID NO: 508566 - RNA, 21 nt, Human
uagagcagccaggggcaagga

SEQ ID NO: 508567 - RNA, 19 nt, Human
uaucacaaagaguaugggg

SEQ ID NO: 508568 - RNA, 22 nt, Human
ucaacagugagugacacccgag

SEQ ID NO: 508569 - RNA, 21 nt, Human
ucaacugugaguuauaggcag

SEQ ID NO: 508570 - RNA, 23 nt, Human
ucacauguguaucacaaagagua

SEQ ID NO: 508571 - RNA, 23 nt, Human
uccauggagaacccuuggauccc

SEQ ID NO: 508572 - RNA, 18 nt, Human
ucccagauuacaaaauua

SEQ ID NO: 508573 - RNA, 20 nt, Human
ucccugaacucucacucccc

SEQ ID NO: 508574 - RNA, 18 nt, Human
uccuuuagcuucuucugg

SEQ ID NO: 508575 - RNA, 23 nt, Human
ucgggccgccgccgccgccgccg

SEQ ID NO: 508576 - RNA, 19 nt, Human
ucuacaggcacacaugugg

SEQ ID NO: 508577 - RNA, 22 nt, Human
ugaaaaaccaaauaaaugacau

SEQ ID NO: 508578 - RNA, 24 nt, Human
ugaaaaaccaaauaaaugacauug

SEQ ID NO: 508579 - RNA, 19 nt, Human
ugaagaggaggcaggagga

SEQ ID NO: 508580 - RNA, 20 nt, Human
ugaaggagggggaggaggug

SEQ ID NO: 508581 - RNA, 20 nt, Human
ugacaaagggauuaauaccc

SEQ ID NO: 508582 - RNA, 20 nt, Human
ugacuuggauccauccaugg

SEQ ID NO: 508583 - RNA, 22 nt, Human
ugagaaauggccacuuucuuau

SEQ ID NO: 508584 - RNA, 24 nt, Human
ugagagggcugaggugaaaaacca

SEQ ID NO: 508585 - RNA, 23 nt, Human
ugagccucuggaucacagccccc

SEQ ID NO: 508586 - RNA, 26 nt, Human
ugagccucuggaucacaggacccguc

SEQ ID NO: 508587 - RNA, 23 nt, Human
ugagugacacccgaguauaauaa

SEQ ID NO: 508588 - RNA, 21 nt, Human
ugauccauaccugccugcccc

SEQ ID NO: 508589 - RNA, 24 nt, Human
ugcaaagaccuccuugccagcacc

SEQ ID NO: 508590 - RNA, 18 nt, Human
ugcacccaacccagccag

SEQ ID NO: 508591 - RNA, 22 nt, Human
ugcagaguugcucggaggggag

SEQ ID NO: 508592 - RNA, 20 nt, Human
ugccgccucacccgccccuc

SEQ ID NO: 508593 - RNA, 21 nt, Human
ugccugggccacgguuuccca

SEQ ID NO: 508594 - RNA, 22 nt, Human
ugcuacagaaauacuacaaguc

SEQ ID NO: 508595 - RNA, 21 nt, Human
ugcucggaggggagccagggc

SEQ ID NO: 508596 - RNA, 22 nt, Human
ugcucggaggggagccagggcc

SEQ ID NO: 508597 - RNA, 18 nt, Human
ugcugagagacauuccac

SEQ ID NO: 508598 - RNA, 21 nt, Human
ugcugggagagcgaggugacu

SEQ ID NO: 508599 - RNA, 19 nt, Human
uggaggugggggcccacag

SEQ ID NO: 508600 - RNA, 24 nt, Human
uggaggugggggcccacagggcug

SEQ ID NO: 508601 - RNA, 18 nt, Human
uggcccggggaggcgcgg

SEQ ID NO: 508602 - RNA, 20 nt, Human
ugggagcaggagaagggcac

SEQ ID NO: 508603 - RNA, 19 nt, Human
ugggcaauaaggagcuggg

SEQ ID NO: 508604 - RNA, 18 nt, Human
ugggcgugggugggcugc

SEQ ID NO: 508605 - RNA, 21 nt, Human
uggggcaccguucugaccugg

SEQ ID NO: 508606 - RNA, 20 nt, Human
ugggggcccacagggcuggg

SEQ ID NO: 508607 - RNA, 19 nt, Human
ugguguuagccacagcagc

SEQ ID NO: 508608 - RNA, 22 nt, Human
uguaucuacaggcacacaugug

SEQ ID NO: 508609 - RNA, 20 nt, Human
ugugcacaucacauguagcu

SEQ ID NO: 508610 - RNA, 20 nt, Human
uguuagccacagcagcgcug

SEQ ID NO: 508611 - RNA, 20 nt, Human
uuaaaaaaaaaaaaaaaaaa

SEQ ID NO: 508612 - RNA, 23 nt, Human
uuagagaaggaugcagaguuuga

SEQ ID NO: 508613 - RNA, 23 nt, Human
uucuucuggaagagaggcccaaa

SEQ ID NO: 508614 - RNA, 20 nt, Human
aaguagcugggacuauaggc

SEQ ID NO: 508615 - RNA, 22 nt, Human
aaguagcugggacuauaggcau

SEQ ID NO: 508616 - RNA, 24 nt, Human
aaguagcugggacuauaggcaugc

SEQ ID NO: 508617 - RNA, 21 nt, Human
caaguagcugggacuauaggc

SEQ ID NO: 508618 - RNA, 22 nt, Human
cucucagucucuuugcugucau

SEQ ID NO: 508619 - RNA, 23 nt, Human
cuguucugugcuuugaucaacag

SEQ ID NO: 508620 - RNA, 21 nt, Human
gaaccuguucugugcuuugau

SEQ ID NO: 508621 - RNA, 19 nt, Human
ucaacagucucucagucuc

SEQ ID NO: 508622 - RNA, 20 nt, Human
ugggacuauaggcaugcuac

SEQ ID NO: 508623 - RNA, 21 nt, Human
ugggacuauaggcaugcuacc

SEQ ID NO: 508624 - RNA, 21 nt, Human
ugggacuauaggcaugcuacc

SEQ ID NO: 508625 - RNA, 22 nt, Human
ugggacuauaggcaugcuaccg

SEQ ID NO: 508626 - RNA, 22 nt, Human
uucaugcaguggaaaaguuauu

SEQ ID NO: 508627 - RNA, 19 nt, Human
uuucaugcaguggaaaagu

SEQ ID NO: 508628 - RNA, 19 nt, Human
aaacccuuaaacagaaucc

SEQ ID NO: 508629 - RNA, 18 nt, Human
aacaggaaggggacauga

SEQ ID NO: 508630 - RNA, 20 nt, Human
aacaguaaaacaacaacaac

SEQ ID NO: 508631 - RNA, 23 nt, Human
aacaguaaaacaacaacaacagu

SEQ ID NO: 508632 - RNA, 24 nt, Human
aacaguaaaacaacaacaacaguc

SEQ ID NO: 508633 - RNA, 20 nt, Human
aagaacaggaaggggacaug

SEQ ID NO: 508634 - RNA, 25 nt, Human
aagaagcccaagcugaggacaagua

SEQ ID NO: 508635 - RNA, 23 nt, Human
aauaacaguaaaacaacaacaac

SEQ ID NO: 508636 - RNA, 21 nt, Human
acacuagagauguccaacccc

SEQ ID NO: 508637 - RNA, 20 nt, Human
acaguaaaacaacaacaaaa

SEQ ID NO: 508638 - RNA, 22 nt, Human
accccaagugauuauagaaaaa

SEQ ID NO: 508639 - RNA, 20 nt, Human
acuauuacuauccauauuuu

SEQ ID NO: 508640 - RNA, 22 nt, Human
agaaaaaucaauguggcagcua

SEQ ID NO: 508641 - RNA, 19 nt, Human
agaacaggaaggggacaug

SEQ ID NO: 508642 - RNA, 23 nt, Human
agacagaaugggccgcuuugggg

SEQ ID NO: 508643 - RNA, 18 nt, Human
agagagaagcugggggcg

SEQ ID NO: 508644 - RNA, 21 nt, Human
agccagugggguccagugugu

SEQ ID NO: 508645 - RNA, 22 nt, Human
aggaagaacaggaaggggaccg

SEQ ID NO: 508646 - RNA, 23 nt, Human
aggaaggaagaacaggaagggga

SEQ ID NO: 508647 - RNA, 24 nt, Human
aggaaggaagaacaggaaggggac

SEQ ID NO: 508648 - RNA, 19 nt, Human
aggaaggggacaugagagu

SEQ ID NO: 508649 - RNA, 23 nt, Human
aggaaucaguguuguccaguggg

SEQ ID NO: 508650 - RNA, 22 nt, Human
aggggacaugagagugugucca

SEQ ID NO: 508651 - RNA, 23 nt, Human
aggggcaucagcucccugggugg

SEQ ID NO: 508652 - RNA, 20 nt, Human
aggugaugggcugucgggag

SEQ ID NO: 508653 - RNA, 23 nt, Human
aggugaugggcugucgggagggg

SEQ ID NO: 508654 - RNA, 23 nt, Human
aguacaggagcaggcacaaggaa

SEQ ID NO: 508655 - RNA, 20 nt, Human
auccuauauuucuccccacc

SEQ ID NO: 508656 - RNA, 18 nt, Human
augagaguguguccagga

SEQ ID NO: 508657 - RNA, 23 nt, Human
caaaccccaagugauuauagaaa

SEQ ID NO: 508658 - RNA, 20 nt, Human
cagcugggugggcgacaggg

SEQ ID NO: 508659 - RNA, 19 nt, Human
caugagaguguguccagga

SEQ ID NO: 508660 - RNA, 20 nt, Human
cauuuuccucuccuucuugu

SEQ ID NO: 508661 - RNA, 18 nt, Human
ccacccuuccccaaggga

SEQ ID NO: 508662 - RNA, 21 nt, Human
ccaggaaggggagaaggggca

SEQ ID NO: 508663 - RNA, 20 nt, Human
cccaaaaauguacaaacccc

SEQ ID NO: 508664 - RNA, 19 nt, Human
cccacccuuccccaaggga

SEQ ID NO: 508665 - RNA, 21 nt, Human
cccagcccaccugcagucuca

SEQ ID NO: 508666 - RNA, 21 nt, Human
ccccaaaaauguacaaacccc

SEQ ID NO: 508667 - RNA, 22 nt, Human
ccccaagggauggcuagaggag

SEQ ID NO: 508668 - RNA, 22 nt, Human
cccccaaucccaauauuuacuc

SEQ ID NO: 508669 - RNA, 20 nt, Human
cccugagggaggggcagcug

SEQ ID NO: 508670 - RNA, 20 nt, Human
cccugugccagacacuggcc

SEQ ID NO: 508671 - RNA, 21 nt, Human
ccucacccccagauucucagc

SEQ ID NO: 508672 - RNA, 21 nt, Human
ccucuccuucuuguccuccuc

SEQ ID NO: 508673 - RNA, 22 nt, Human
ccugaucccucgggccuaaggg

SEQ ID NO: 508674 - RNA, 23 nt, Human
ccugaucccucgggccuaagggg

SEQ ID NO: 508675 - RNA, 18 nt, Human
ccugcagucucacugccu

SEQ ID NO: 508676 - RNA, 20 nt, Human
cuauuacuauccauauuuaa

SEQ ID NO: 508677 - RNA, 19 nt, Human
cuccccacccuuccccaag

SEQ ID NO: 508678 - RNA, 18 nt, Human
cucccucuuuccccccaa

SEQ ID NO: 508679 - RNA, 23 nt, Human
cuccucacccccagauucucagc

SEQ ID NO: 508680 - RNA, 21 nt, Human
cucuccuucuuguccuccuca

SEQ ID NO: 508681 - RNA, 18 nt, Human
gaaggaagaacaggaagg

SEQ ID NO: 508682 - RNA, 20 nt, Human
gaaggaagaacaggaagggg

SEQ ID NO: 508683 - RNA, 22 nt, Human
gauggaggaggaagaagcccaa

SEQ ID NO: 508684 - RNA, 18 nt, Human
gcagccaccucuccagga

SEQ ID NO: 508685 - RNA, 20 nt, Human
gccuaagggggugggggcag

SEQ ID NO: 508686 - RNA, 20 nt, Human
gcuccaaugggccaugucca

SEQ ID NO: 508687 - RNA, 23 nt, Human
gcucccucuuuccccccaauccc

SEQ ID NO: 508688 - RNA, 26 nt, Human
ggcgacaggggggcuucuaggaagga

SEQ ID NO: 508689 - RNA, 22 nt, Human
gggccuaagggggugggggcag

SEQ ID NO: 508690 - RNA, 21 nt, Human
gggcuucuaggaaggaagaac

SEQ ID NO: 508691 - RNA, 18 nt, Human
gggggcagcaucucugca

SEQ ID NO: 508692 - RNA, 23 nt, Human
gggggugacugagggcuggggcg

SEQ ID NO: 508693 - RNA, 25 nt, Human
ggugauggaggaggaagaagcccaa

SEQ ID NO: 508694 - RNA, 21 nt, Human
ggugaugggcugucgggaggg

SEQ ID NO: 508695 - RNA, 20 nt, Human
ggugggcccagcccaccugc

SEQ ID NO: 508696 - RNA, 18 nt, Human
guaaaacaacaacaacag

SEQ ID NO: 508697 - RNA, 19 nt, Human
gugacagggagagagaagc

SEQ ID NO: 508698 - RNA, 21 nt, Human
guggagaggaucccauccaca

SEQ ID NO: 508699 - RNA, 24 nt, Human
gugugacagggagagagaagcugg

SEQ ID NO: 508700 - RNA, 23 nt, Human
uaaaaaucugugucucucccccc

SEQ ID NO: 508701 - RNA, 21 nt, Human
uaaacccuuaaacagaaucca

SEQ ID NO: 508702 - RNA, 18 nt, Human
uaaguuaaucaggggacu

SEQ ID NO: 508703 - RNA, 19 nt, Human
uagaaaaaucaauguggca

SEQ ID NO: 508704 - RNA, 22 nt, Human
uagcugacagcaacagacagaa

SEQ ID NO: 508705 - RNA, 21 nt, Human
uaggaaggaagaacaggaagg

SEQ ID NO: 508706 - RNA, 24 nt, Human
uaggaaggaagaacaggaagggga

SEQ ID NO: 508707 - RNA, 23 nt, Human
uaguguaaaaaucugugucucuc

SEQ ID NO: 508708 - RNA, 20 nt, Human
uauagaaaaaucaauguggc

SEQ ID NO: 508709 - RNA, 21 nt, Human
uauagaaaaaucaauguggca

SEQ ID NO: 508710 - RNA, 25 nt, Human
uauagaaaaaucaauguggcagcua

SEQ ID NO: 508711 - RNA, 25 nt, Human
uauccauauuuaacacaugagaacu

SEQ ID NO: 508712 - RNA, 22 nt, Human
ucaggugauggaggaggaagaa

SEQ ID NO: 508713 - RNA, 19 nt, Human
uccacagaaacguauaggc

SEQ ID NO: 508714 - RNA, 22 nt, Human
uccagugugugacagggagaga

SEQ ID NO: 508715 - RNA, 19 nt, Human
ucccugagggaggggcagc

SEQ ID NO: 508716 - RNA, 19 nt, Human
ucccugagggaggggcagc

SEQ ID NO: 508717 - RNA, 21 nt, Human
ucccugagggaggggcagcug

SEQ ID NO: 508718 - RNA, 23 nt, Human
ucccugagggaggggcagcugga

SEQ ID NO: 508719 - RNA, 20 nt, Human
ucccugggugggcccagccc

SEQ ID NO: 508720 - RNA, 22 nt, Human
uccucuccuucuuguccuccuc

SEQ ID NO: 508721 - RNA, 23 nt, Human
ugacagggagagagaagcugggg

SEQ ID NO: 508722 - RNA, 22 nt, Human
ugggggcagcaucucugcaggg

SEQ ID NO: 508723 - RNA, 21 nt, Human
ugggggugacugagggcuggg

SEQ ID NO: 508724 - RNA, 19 nt, Human
ugggugggcgacagggggg

SEQ ID NO: 508725 - RNA, 19 nt, Human
ugucacuggcuuccccugg

SEQ ID NO: 508726 - RNA, 23 nt, Human
uguccaaccccaaggcuaugggc

SEQ ID NO: 508727 - RNA, 26 nt, Human
uguccuccucacccccagauucucaa

SEQ ID NO: 508728 - RNA, 25 nt, Human
ugugugacagggagagagaagcugg

SEQ ID NO: 508729 - RNA, 24 nt, Human
uuacuccacagaaacguauaggcu

SEQ ID NO: 508730 - RNA, 21 nt, Human
uuagaaugcuuccccugugcc

SEQ ID NO: 508731 - RNA, 27 nt, Human
uucacagucacuucauaagguagauac

SEQ ID NO: 508732 - RNA, 27 nt, Human
uuguguccucuuguuuuagugucacug

SEQ ID NO: 508733 - RNA, 20 nt, Human
aaaccuuggaacuuucuaga

SEQ ID NO: 508734 - RNA, 25 nt, Human
accaggaaaagagggcaaagcaaac

SEQ ID NO: 508735 - RNA, 20 nt, Human
agaagaaaacagagcuauaa

SEQ ID NO: 508736 - RNA, 22 nt, Human
agaagaaaacagagcuauaauc

SEQ ID NO: 508737 - RNA, 21 nt, Human
agagcuauaauccacugcguu

SEQ ID NO: 508738 - RNA, 23 nt, Human
agccacaaaccuuggaacuuucu

SEQ ID NO: 508739 - RNA, 21 nt, Human
agccucugucucucaguuuca

SEQ ID NO: 508740 - RNA, 19 nt, Human
aggcaugggugagugguag

SEQ ID NO: 508741 - RNA, 19 nt, Human
caaacaagccucugucucu

SEQ ID NO: 508742 - RNA, 23 nt, Human
ccacugcguuuccccaacccaaa

SEQ ID NO: 508743 - RNA, 24 nt, Human
ccaggcaacuuguaggucucccuu

SEQ ID NO: 508744 - RNA, 21 nt, Human
ccucaaaaacagcuggccucu

SEQ ID NO: 508745 - RNA, 24 nt, Human
cuuuagaauaauucaagccacaaa

SEQ ID NO: 508746 - RNA, 20 nt, Human
gaacauggccaggcacugac

SEQ ID NO: 508747 - RNA, 18 nt, Human
gcaaagcaaacaagccuc

SEQ ID NO: 508748 - RNA, 18 nt, Human
ggcaaagcaaacaagccu

SEQ ID NO: 508749 - RNA, 24 nt, Human
gguagggagugggggugaccagga

SEQ ID NO: 508750 - RNA, 20 nt, Human
gugguaggcauacauccaca

SEQ ID NO: 508751 - RNA, 19 nt, Human
uaauccacugcguuucccc

SEQ ID NO: 508752 - RNA, 21 nt, Human
ucucucaguuucauuaaaugu

SEQ ID NO: 508753 - RNA, 21 nt, Human
ucuucaauuauuucagcuucu

SEQ ID NO: 508754 - RNA, 21 nt, Human
ugaaggagcccggugguaggc

SEQ ID NO: 508755 - RNA, 24 nt, Human
ugcacaguuuuggaaagaagaaaa

SEQ ID NO: 508756 - RNA, 23 nt, Human
uggaacuuucuagagcacugaac

SEQ ID NO: 508757 - RNA, 23 nt, Human
uggagguuucauccaggggugca

SEQ ID NO: 508758 - RNA, 24 nt, Human
uggugaaggagcccggugguaggc

SEQ ID NO: 508759 - RNA, 19 nt, Human
ugguguuggaacuggagua

SEQ ID NO: 508760 - RNA, 19 nt, Human
uguagggaggaccugagcc

SEQ ID NO: 508761 - RNA, 23 nt, Human
uguggagcaggauccucaaaaac

SEQ ID NO: 508762 - RNA, 21 nt, Human
uucuagagcacugaaccccag

SEQ ID NO: 508763 - RNA, 22 nt, Human
uuggaacuuucuagagcacuga

SEQ ID NO: 508764 - RNA, 26 nt, Human
uuguaggucucccuugauggagguuu

SEQ ID NO: 508765 - RNA, 20 nt, Human
aacgccccaaggacagccag

SEQ ID NO: 508766 - RNA, 20 nt, Human
aagccccugggcaggagccc

SEQ ID NO: 508767 - RNA, 21 nt, Human
accacgcccacgacaaacacu

SEQ ID NO: 508768 - RNA, 19 nt, Human
acucaucuuuccuccaacc

SEQ ID NO: 508769 - RNA, 28 nt, Human
acugaaggagugacucaggaaggaggag

SEQ ID NO: 508770 - RNA, 19 nt, Human
agacuuggaggaacuggca

SEQ ID NO: 508771 - RNA, 24 nt, Human
agagggagaagacaggcgcaguca

SEQ ID NO: 508772 - RNA, 21 nt, Human
agcagcaauggcggggccaaa

SEQ ID NO: 508773 - RNA, 23 nt, Human
agccuccugcggacuccaagcag

SEQ ID NO: 508774 - RNA, 19 nt, Human
agcuaacgccugugccugg

SEQ ID NO: 508775 - RNA, 21 nt, Human
aggaacuggcacgaagccaag

SEQ ID NO: 508776 - RNA, 18 nt, Human
aggaaggaggaggggaag

SEQ ID NO: 508777 - RNA, 18 nt, Human
agugguugagagggaggg

SEQ ID NO: 508778 - RNA, 20 nt, Human
aucaggaagaggccgacuuc

SEQ ID NO: 508779 - RNA, 23 nt, Human
augcaggauggaaagaaagauuc

SEQ ID NO: 508780 - RNA, 22 nt, Human
caagccccugggcaggagcccu

SEQ ID NO: 508781 - RNA, 20 nt, Human
caccacacaccggccuaggu

SEQ ID NO: 508782 - RNA, 21 nt, Human
caccagagccuucccuggggg

SEQ ID NO: 508783 - RNA, 18 nt, Human
caccaucaccacacaccg

SEQ ID NO: 508784 - RNA, 21 nt, Human
caccuggaauacgccagcagc

SEQ ID NO: 508785 - RNA, 21 nt, Human
caccuucuucgccggcagaau

SEQ ID NO: 508786 - RNA, 21 nt, Human
cagaagaucccagcugaccac

SEQ ID NO: 508787 - RNA, 23 nt, Human
cagaccacgcccacgacaaacac

SEQ ID NO: 508788 - RNA, 20 nt, Human
cagcaccugcuccaccuggu

SEQ ID NO: 508789 - RNA, 20 nt, Human
cagcaccugcuccaccuggu

SEQ ID NO: 508790 - RNA, 22 nt, Human
cagcagcaauggcggggccaaa

SEQ ID NO: 508791 - RNA, 23 nt, Human
cagcagcaccugcuccaccuggu

SEQ ID NO: 508792 - RNA, 20 nt, Human
cagcaggggcagcuguugca

SEQ ID NO: 508793 - RNA, 23 nt, Human
cagcuuggccaggacagggggcc

SEQ ID NO: 508794 - RNA, 23 nt, Human
caggaagaggccgacuucucccg

SEQ ID NO: 508795 - RNA, 19 nt, Human
cagggccucugucaccugg

SEQ ID NO: 508796 - RNA, 21 nt, Human
cagggccucugucaccuggcc

SEQ ID NO: 508797 - RNA, 23 nt, Human
cagggcuguggggcaggauagag

SEQ ID NO: 508798 - RNA, 23 nt, Human
cagguucuccaccagagccuucc

SEQ ID NO: 508799 - RNA, 21 nt, Human
caguuugcgauuucaccaguc

SEQ ID NO: 508800 - RNA, 18 nt, Human
ccaccaucaccacacacc

SEQ ID NO: 508801 - RNA, 19 nt, Human
ccaccaucaccacacaccg

SEQ ID NO: 508802 - RNA, 22 nt, Human
ccaccaucaccacacaccggcc

SEQ ID NO: 508803 - RNA, 18 nt, Human
ccacgcccacgacaaaca

SEQ ID NO: 508804 - RNA, 22 nt, Human
cccaaggacagccaggacccac

SEQ ID NO: 508805 - RNA, 26 nt, Human
cccacgacaaacacugucuccagagg

SEQ ID NO: 508806 - RNA, 21 nt, Human
ccccaaggacagccaggaccc

SEQ ID NO: 508807 - RNA, 19 nt, Human
ccuccaaccacagagagga

SEQ ID NO: 508808 - RNA, 22 nt, Human
ccuccugcccccgguuuguccc

SEQ ID NO: 508809 - RNA, 26 nt, Human
ccucuuaaggugggcaggacggagau

SEQ ID NO: 508810 - RNA, 20 nt, Human
ccugcagcucugcagaccug

SEQ ID NO: 508811 - RNA, 22 nt, Human
ccugcccccgguuugucccuga

SEQ ID NO: 508812 - RNA, 20 nt, Human
ccugggucccggcagcgcuc

SEQ ID NO: 508813 - RNA, 22 nt, Human
ccuuugcaaacagggguccggu

SEQ ID NO: 508814 - RNA, 22 nt, Human
cgccugugccugggucccggca

SEQ ID NO: 508815 - RNA, 24 nt, Human
cggagaugccacaguggaugccac

SEQ ID NO: 508816 - RNA, 24 nt, Human
cguccuaaggaccucugcugccac

SEQ ID NO: 508817 - RNA, 20 nt, Human
cuauuccaggaggggagcug

SEQ ID NO: 508818 - RNA, 18 nt, Human
cucaggaaggaggagggg

SEQ ID NO: 508819 - RNA, 21 nt, Human
cucaggaaggaggaggggaag

SEQ ID NO: 508820 - RNA, 22 nt, Human
cuccaagcaggaagccuggcuc

SEQ ID NO: 508821 - RNA, 22 nt, Human
cuccacacucuccuccuggguu

SEQ ID NO: 508822 - RNA, 20 nt, Human
cuccaugaugauacgggguu

SEQ ID NO: 508823 - RNA, 24 nt, Human
cuccuggguuucaccuuuguaaca

SEQ ID NO: 508824 - RNA, 22 nt, Human
cucuauagucauguugagagcc

SEQ ID NO: 508825 - RNA, 20 nt, Human
cucuggacuccacacucucc

SEQ ID NO: 508826 - RNA, 21 nt, Human
cugccacagccuccugcggac

SEQ ID NO: 508827 - RNA, 19 nt, Human
cuucacucaucuuuccucc

SEQ ID NO: 508828 - RNA, 18 nt, Human
gaagaggccgacuucucc

SEQ ID NO: 508829 - RNA, 19 nt, Human
gaaggaggaggggaaggug

SEQ ID NO: 508830 - RNA, 20 nt, Human
gaccacggccccuuucucug

SEQ ID NO: 508831 - RNA, 20 nt, Human
gagaagacaggcgcagucag

SEQ ID NO: 508832 - RNA, 24 nt, Human
gagaagacaggcgcagucagcagg

SEQ ID NO: 508833 - RNA, 19 nt, Human
gagagggagggaggugcca

SEQ ID NO: 508834 - RNA, 19 nt, Human
gagagggagggaggugcca

SEQ ID NO: 508835 - RNA, 18 nt, Human
gcacuaugcuggcaaaau

SEQ ID NO: 508836 - RNA, 19 nt, Human
gcagaccacgcccacgaca

SEQ ID NO: 508837 - RNA, 18 nt, Human
gccacaggccuggaugca

SEQ ID NO: 508838 - RNA, 18 nt, Human
gccaggacagggggccgg

SEQ ID NO: 508839 - RNA, 20 nt, Human
gcccaucaggaagaggccga

SEQ ID NO: 508840 - RNA, 19 nt, Human
gcccuguggccacgggauc

SEQ ID NO: 508841 - RNA, 18 nt, Human
gccuaauggcccuuggca

SEQ ID NO: 508842 - RNA, 21 nt, Human
gccugggucccggcagcgcuc

SEQ ID NO: 508843 - RNA, 18 nt, Human
gcucuggacuccacacuc

SEQ ID NO: 508844 - RNA, 22 nt, Human
gcugccacagccuccugcggac

SEQ ID NO: 508845 - RNA, 18 nt, Human
ggaacagacgcccaguuu

SEQ ID NO: 508846 - RNA, 20 nt, Human
ggcaggacggagaugccaca

SEQ ID NO: 508847 - RNA, 24 nt, Human
gggccaaagguagcuuugaccucc

SEQ ID NO: 508848 - RNA, 20 nt, Human
gggcucuggggaggguuuga

SEQ ID NO: 508849 - RNA, 20 nt, Human
ggucagagggagaagacagg

SEQ ID NO: 508850 - RNA, 23 nt, Human
uacaaauccaggcagggcugugg

SEQ ID NO: 508851 - RNA, 19 nt, Human
uagcugugcaggaugcaaa

SEQ ID NO: 508852 - RNA, 20 nt, Human
ucaagugguugagagggagg

SEQ ID NO: 508853 - RNA, 21 nt, Human
ucaccuggccucucuccuggc

SEQ ID NO: 508854 - RNA, 24 nt, Human
ucaccuggccucucuccuggccac

SEQ ID NO: 508855 - RNA, 21 nt, Human
ucaccuucuucgccggcagaa

SEQ ID NO: 508856 - RNA, 23 nt, Human
ucagugacuuuccuccugccccc

SEQ ID NO: 508857 - RNA, 24 nt, Human
uccacacucuccuccuggguuuca

SEQ ID NO: 508858 - RNA, 18 nt, Human
uccaggaggggagcugcc

SEQ ID NO: 508859 - RNA, 23 nt, Human
uccaggaggggagcugcccugga

SEQ ID NO: 508860 - RNA, 24 nt, Human
uccaugaugauacggggucucuau

SEQ ID NO: 508861 - RNA, 23 nt, Human
ucccugaugguggcagaagaucc

SEQ ID NO: 508862 - RNA, 20 nt, Human
ucugcagaccugauguuggg

SEQ ID NO: 508863 - RNA, 20 nt, Human
ucugcccuuccucguccccc

SEQ ID NO: 508864 - RNA, 19 nt, Human
ugagagggagggaggugcc

SEQ ID NO: 508865 - RNA, 21 nt, Human
ugcaaacagggguccggugcc

SEQ ID NO: 508866 - RNA, 24 nt, Human
ugccacagccuccugcggacucca

SEQ ID NO: 508867 - RNA, 22 nt, Human
ugcccaccaucaccacacaccg

SEQ ID NO: 508868 - RNA, 22 nt, Human
ugcccuggaacgccccaaggac

SEQ ID NO: 508869 - RNA, 19 nt, Human
ugcccuuccucgucccgcu

SEQ ID NO: 508870 - RNA, 22 nt, Human
ugccuggccgggggcucugggg

SEQ ID NO: 508871 - RNA, 18 nt, Human
ugccugggucccggcagc

SEQ ID NO: 508872 - RNA, 19 nt, Human
uggaugccacugcugccac

SEQ ID NO: 508873 - RNA, 19 nt, Human
uggcagaagaucccagcug

SEQ ID NO: 508874 - RNA, 24 nt, Human
ugggcaggagcccuguggccacgg

SEQ ID NO: 508875 - RNA, 21 nt, Human
uggggaagggcaugcccacca

SEQ ID NO: 508876 - RNA, 20 nt, Human
uggggucagagggagaagac

SEQ ID NO: 508877 - RNA, 18 nt, Human
ugguugcccaucaggaag

SEQ ID NO: 508878 - RNA, 20 nt, Human
ugugcgcucuuagguuccug

SEQ ID NO: 508879 - RNA, 20 nt, Human
uucaggauucccgcauuuuc

SEQ ID NO: 508880 - RNA, 25 nt, Human
uucccacaggaacaaaggucuccau

SEQ ID NO: 508881 - RNA, 21 nt, Human
uuccucgucccgcuguuccuc

SEQ ID NO: 508882 - RNA, 19 nt, Human
uuucccacaggaacaaagg

SEQ ID NO: 508883 - RNA, 22 nt, Human
aaaaaaaaaaaaaaaagaaaaa

SEQ ID NO: 508884 - RNA, 23 nt, Human
aaaaaaaaaaaaagaaaaaagga

SEQ ID NO: 508885 - RNA, 23 nt, Human
aaaaaaaaagaaaaggcgaagag

SEQ ID NO: 508886 - RNA, 22 nt, Human
aaaaaagaaaaggcgaagagga

SEQ ID NO: 508887 - RNA, 27 nt, Human
aaaaaagacucaucccaacagaguaaa

SEQ ID NO: 508888 - RNA, 26 nt, Human
aaaaaggaaagacaguguuccuuaaa

SEQ ID NO: 508889 - RNA, 23 nt, Human
aaaccagaacauagaacaaagug

SEQ ID NO: 508890 - RNA, 19 nt, Human
aaccacucugaacagaaac

SEQ ID NO: 508891 - RNA, 22 nt, Human
aagaacgugggaaaaccaugaa

SEQ ID NO: 508892 - RNA, 19 nt, Human
aaggagcuucauauauuuu

SEQ ID NO: 508893 - RNA, 22 nt, Human
aauuaaaaaaaaaaaaaaaaga

SEQ ID NO: 508894 - RNA, 22 nt, Human
acagagcaaaguaaaaaaagga

SEQ ID NO: 508895 - RNA, 23 nt, Human
acagagcaaaguaaaaaaaggag

SEQ ID NO: 508896 - RNA, 23 nt, Human
acuaaucugcaugaaaagacaaa

SEQ ID NO: 508897 - RNA, 23 nt, Human
acuaaucugcaugaaaagacaaa

SEQ ID NO: 508898 - RNA, 22 nt, Human
acuccugccucugcuacauuuu

SEQ ID NO: 508899 - RNA, 24 nt, Human
acucugaacagaaacaaaaaaaga

SEQ ID NO: 508900 - RNA, 24 nt, Human
agaaacaaaaaaagacucauccca

SEQ ID NO: 508901 - RNA, 21 nt, Human
agaagccuggcaaaaucuacc

SEQ ID NO: 508902 - RNA, 18 nt, Human
agagaucugggagcgggg

SEQ ID NO: 508903 - RNA, 22 nt, Human
aggaaaaaaaaagaaaaggcga

SEQ ID NO: 508904 - RNA, 28 nt, Human
aggaaaaaaaaagaaaaggcgaagagga

SEQ ID NO: 508905 - RNA, 22 nt, Human
aggaaaaaaaaaggaaagacag

SEQ ID NO: 508906 - RNA, 22 nt, Human
agggaaagagaagguaaaggac

SEQ ID NO: 508907 - RNA, 23 nt, Human
auacugacaggaguuacaccaau

SEQ ID NO: 508908 - RNA, 20 nt, Human
auuaaaaaaaaaaaaaaaga

SEQ ID NO: 508909 - RNA, 24 nt, Human
caaaaccagaacauagaacaaagu

SEQ ID NO: 508910 - RNA, 18 nt, Human
caaaguaaaaaaaggagc

SEQ ID NO: 508911 - RNA, 19 nt, Human
caacaacauaacaaacuua

SEQ ID NO: 508912 - RNA, 25 nt, Human
cacucugaacagaaacaaaaaaaga

SEQ ID NO: 508913 - RNA, 20 nt, Human
caguguguagguugaugugg

SEQ ID NO: 508914 - RNA, 23 nt, Human
ccacucugaacagaaacaaaaaa

SEQ ID NO: 508915 - RNA, 20 nt, Human
ccgauggcggcggcgccucc

SEQ ID NO: 508916 - RNA, 25 nt, Human
ccgauggcggcggcgccuccgcugu

SEQ ID NO: 508917 - RNA, 19 nt, Human
ccgccucucucgucggaga

SEQ ID NO: 508918 - RNA, 27 nt, Human
ccgucgcagacgccaccgucgccgccu

SEQ ID NO: 508919 - RNA, 23 nt, Human
ccucucucgucggagacgggagc

SEQ ID NO: 508920 - RNA, 24 nt, Human
ccugcggcuccggucuggugacga

SEQ ID NO: 508921 - RNA, 18 nt, Human
ccugggacaugcauagga

SEQ ID NO: 508922 - RNA, 19 nt, Human
cgaagaggaaaaaaaaagg

SEQ ID NO: 508923 - RNA, 22 nt, Human
cgaccgauggcggcggcgccuc

SEQ ID NO: 508924 - RNA, 22 nt, Human
cgcagacgccaccgucgccgcc

SEQ ID NO: 508925 - RNA, 21 nt, Human
cgcagcgcucucucgcuccga

SEQ ID NO: 508926 - RNA, 23 nt, Human
cggcggcaggcgcagcgcucucu

SEQ ID NO: 508927 - RNA, 19 nt, Human
cgguacccuuguuggugcu

SEQ ID NO: 508928 - RNA, 26 nt, Human
cuaacuaaucugcaugaaaagacaaa

SEQ ID NO: 508929 - RNA, 26 nt, Human
cuaacuaaucugcaugaaaagacaaa

SEQ ID NO: 508930 - RNA, 24 nt, Human
cuggugacgaccgauggcggcuuu

SEQ ID NO: 508931 - RNA, 19 nt, Human
gaaaaaaaaaggaaagaca

SEQ ID NO: 508932 - RNA, 20 nt, Human
gaaaagacaaaucacgaugg

SEQ ID NO: 508933 - RNA, 23 nt, Human
gaaaagacaaaucacgaugggga

SEQ ID NO: 508934 - RNA, 18 nt, Human
gaagaggaaaaaaaaagg

SEQ ID NO: 508935 - RNA, 23 nt, Human
gacgcgcugucucccgucgcaga

SEQ ID NO: 508936 - RNA, 19 nt, Human
gaugacagcaagaggaaag

SEQ ID NO: 508937 - RNA, 22 nt, Human
gccaaaaugaggauauuuuugc

SEQ ID NO: 508938 - RNA, 22 nt, Human
gccaccgucgccgccucucucg

SEQ ID NO: 508939 - RNA, 26 nt, Human
gccaccgucgccgccucucucgucgg

SEQ ID NO: 508940 - RNA, 21 nt, Human
gccuggcaaaaucuaccaaca

SEQ ID NO: 508941 - RNA, 24 nt, Human
gcggcggcgccuccgcuguugggg

SEQ ID NO: 508942 - RNA, 24 nt, Human
ggagacgggagcaaaacacagaga

SEQ ID NO: 508943 - RNA, 18 nt, Human
ggccgggcucgggagggc

SEQ ID NO: 508944 - RNA, 21 nt, Human
ggcgcagcgcucucucgcucc

SEQ ID NO: 508945 - RNA, 23 nt, Human
gggaaaaauuaaaaaaaaaaaaa

SEQ ID NO: 508946 - RNA, 23 nt, Human
gggaaaaauuaaaaaaaaaaaaa

SEQ ID NO: 508947 - RNA, 28 nt, Human
gggaaaaauuaaaaaaaaaaaaaaagaa

SEQ ID NO: 508948 - RNA, 20 nt, Human
gggagggccugcggcuccgg

SEQ ID NO: 508949 - RNA, 22 nt, Human
gggcacggauggccgggcucgg

SEQ ID NO: 508950 - RNA, 21 nt, Human
gggccugcggcuccggucugg

SEQ ID NO: 508951 - RNA, 18 nt, Human
ggggggaaaaauuaaaaa

SEQ ID NO: 508952 - RNA, 18 nt, Human
ggggggaaaaauuaaaaa

SEQ ID NO: 508953 - RNA, 20 nt, Human
gucaguguguagguugaugu

SEQ ID NO: 508954 - RNA, 21 nt, Human
uaagcucucuggccuguuuua

SEQ ID NO: 508955 - RNA, 21 nt, Human
uaaguacacaccuauuuuccu

SEQ ID NO: 508956 - RNA, 19 nt, Human
uaagucugcuggagucacu

SEQ ID NO: 508957 - RNA, 21 nt, Human
uacaaaaccagaacauagaac

SEQ ID NO: 508958 - RNA, 21 nt, Human
uacaaaaccagaacauagaac

SEQ ID NO: 508959 - RNA, 23 nt, Human
uacaaaaccagaacauagaacaa

SEQ ID NO: 508960 - RNA, 24 nt, Human
uacaaaaccagaacauagaacaaa

SEQ ID NO: 508961 - RNA, 23 nt, Human
uacaagagcacauuacacuaaaa

SEQ ID NO: 508962 - RNA, 18 nt, Human
uaccaauauacugacagg

SEQ ID NO: 508963 - RNA, 23 nt, Human
uagaacaaagugguaaaccacug

SEQ ID NO: 508964 - RNA, 24 nt, Human
uagccaaagaacgugggaaaacca

SEQ ID NO: 508965 - RNA, 23 nt, Human
uaguugaucacaaacuugacauc

SEQ ID NO: 508966 - RNA, 19 nt, Human
uauauauauauauauauau

SEQ ID NO: 508967 - RNA, 18 nt, Human
ucacuaccacuugagugg

SEQ ID NO: 508968 - RNA, 24 nt, Human
uccaaacuccugccucugcuacau

SEQ ID NO: 508969 - RNA, 25 nt, Human
uccaaacuccugccucugcuacauu

SEQ ID NO: 508970 - RNA, 19 nt, Human
uccgacgcgcugucucccg

SEQ ID NO: 508971 - RNA, 22 nt, Human
ucuaccaacaacauaacaaacu

SEQ ID NO: 508972 - RNA, 23 nt, Human
ugaacagaaacaaaaaaagacuc

SEQ ID NO: 508973 - RNA, 25 nt, Human
ugaacagaaacaaaaaaagacucau

SEQ ID NO: 508974 - RNA, 26 nt, Human
ugaacagaaacaaaaaaagacucauc

SEQ ID NO: 508975 - RNA, 23 nt, Human
ugaggccaaaucacuucuacucc

SEQ ID NO: 508976 - RNA, 21 nt, Human
ugauguggcagggaaagagaa

SEQ ID NO: 508977 - RNA, 21 nt, Human
ugcagaaacauccagauuauc

SEQ ID NO: 508978 - RNA, 23 nt, Human
uggauugauagccugauuggccu

SEQ ID NO: 508979 - RNA, 23 nt, Human
uggcaaaaucuaccaacaacaua

SEQ ID NO: 508980 - RNA, 19 nt, Human
uggccgggcucgggagggc

SEQ ID NO: 508981 - RNA, 23 nt, Human
uggccgggcucgggagggccugc

SEQ ID NO: 508982 - RNA, 26 nt, Human
uggcggcggcgccuccgcuguugggg

SEQ ID NO: 508983 - RNA, 27 nt, Human
uggggggaaaaauuaaaaaaaaaaaaa

SEQ ID NO: 508984 - RNA, 21 nt, Human
uggggugaagaagguauaggc

SEQ ID NO: 508985 - RNA, 22 nt, Human
uuaaaaaaaaaaaaaaaagaaa

SEQ ID NO: 508986 - RNA, 20 nt, Human
uuaaaaaaaaaaaaaaagaa

SEQ ID NO: 508987 - RNA, 19 nt, Human
uugauguggcagggaaaga

SEQ ID NO: 508988 - RNA, 20 nt, Human
uuggggggaaaaauuaaaaa

SEQ ID NO: 508989 - RNA, 20 nt, Human
uuggggggaaaaauuaaaaa

SEQ ID NO: 508990 - RNA, 19 nt, Human
uuuauauauauauauauau

SEQ ID NO: 508991 - RNA, 23 nt, Human
uuugcagaaacauccagauuauc

SEQ ID NO: 508992 - RNA, 25 nt, Human
uuuggauugauagccugauuggccu

SEQ ID NO: 508993 - RNA, 21 nt, Human
uuuuauauauauauauauauu

SEQ ID NO: 508994 - RNA, 20 nt, Human
uuuuauauauauauauauuu

SEQ ID NO: 508995 - RNA, 31 nt, Human
uuuuuuuuuuuuuuauauauauauauauauu

SEQ ID NO: 508996 - RNA, 32 nt, Human
uuuuuuuuuuuuuuuauauauauauauauuau

SEQ ID NO: 508997 - RNA, 24 nt, Human
uuuuuuuuuuuuuuuuuuacaaaa

SEQ ID NO: 508998 - RNA, 20 nt, Human
aaaaauccucacaaaacaag

SEQ ID NO: 508999 - RNA, 22 nt, Human
aaaaauccucacaaaacaagaa

SEQ ID NO: 509000 - RNA, 21 nt, Human
aaauucuaaagucuacaaaaa

SEQ ID NO: 509001 - RNA, 18 nt, Human
aacaagaaggaaagguac

SEQ ID NO: 509002 - RNA, 18 nt, Human
aagaaacuuaaagccugu

SEQ ID NO: 509003 - RNA, 23 nt, Human
aagaaggaaagguacaaaaagaa

SEQ ID NO: 509004 - RNA, 22 nt, Human
aagaaucuauaaaagcaaugcc

SEQ ID NO: 509005 - RNA, 23 nt, Human
aagcaaugccacccuaaucuuaa

SEQ ID NO: 509006 - RNA, 21 nt, Human
acaaaacaagaaggaaaggua

SEQ ID NO: 509007 - RNA, 23 nt, Human
acaaaacaagaaggaaagguaca

SEQ ID NO: 509008 - RNA, 18 nt, Human
acaacccauaguuuuugc

SEQ ID NO: 509009 - RNA, 21 nt, Human
acaagaaacaccagauauucc

SEQ ID NO: 509010 - RNA, 26 nt, Human
acagcagugagcacagcaauccaugc

SEQ ID NO: 509011 - RNA, 24 nt, Human
accagcugcccaguacacuagguc

SEQ ID NO: 509012 - RNA, 18 nt, Human
agaaauaaaagagagacc

SEQ ID NO: 509013 - RNA, 19 nt, Human
agauauuccuugcucugcc

SEQ ID NO: 509014 - RNA, 24 nt, Human
caaaaaauaaccugagaccggggc

SEQ ID NO: 509015 - RNA, 21 nt, Human
caaaaaauaaccugagacucu

SEQ ID NO: 509016 - RNA, 19 nt, Human
caaaaaaugcaacaccuga

SEQ ID NO: 509017 - RNA, 20 nt, Human
caacaccugagaaaggccug

SEQ ID NO: 509018 - RNA, 21 nt, Human
caagaaauaacuaaaaacaaa

SEQ ID NO: 509019 - RNA, 24 nt, Human
caagaaggaaagguacaaaaagaa

SEQ ID NO: 509020 - RNA, 19 nt, Human
ccacaaaaauccucacaaa

SEQ ID NO: 509021 - RNA, 22 nt, Human
ccacaaaaauccucacaaaaca

SEQ ID NO: 509022 - RNA, 20 nt, Human
cccagaaauaaaagagagac

SEQ ID NO: 509023 - RNA, 21 nt, Human
ccuugggcaaccaagaaacuu

SEQ ID NO: 509024 - RNA, 18 nt, Human
cugcagcauuuucaggag

SEQ ID NO: 509025 - RNA, 24 nt, Human
cuguugcuuuaaaaucaagaaucu

SEQ ID NO: 509026 - RNA, 19 nt, Human
gaaacuuaaagccuguuuu

SEQ ID NO: 509027 - RNA, 18 nt, Human
gaaggaaagguacaaaaa

SEQ ID NO: 509028 - RNA, 21 nt, Human
gccacaaaaauccucacaaaa

SEQ ID NO: 509029 - RNA, 19 nt, Human
gucaccuuuuacagcagug

SEQ ID NO: 509030 - RNA, 22 nt, Human
uaaaaacaaaaaauaaccugag

SEQ ID NO: 509031 - RNA, 24 nt, Human
uaaaagagagacgugauagaagua

SEQ ID NO: 509032 - RNA, 18 nt, Human
uaaaagcaaugccacccu

SEQ ID NO: 509033 - RNA, 23 nt, Human
uaaaauauuaucaucacaagaaa

SEQ ID NO: 509034 - RNA, 22 nt, Human
uaaagccuguuuuauaucccag

SEQ ID NO: 509035 - RNA, 23 nt, Human
uacaacccauaguuuuugcucca

SEQ ID NO: 509036 - RNA, 24 nt, Human
uagaaguaacagugcucagugcuu

SEQ ID NO: 509037 - RNA, 18 nt, Human
uagguauuucccaaagcu

SEQ ID NO: 509038 - RNA, 20 nt, Human
uagguauuucccaaagcucu

SEQ ID NO: 509039 - RNA, 19 nt, Human
uauucaaauuacaacccau

SEQ ID NO: 509040 - RNA, 22 nt, Human
ucaggaggagucauuagauacu

SEQ ID NO: 509041 - RNA, 18 nt, Human
uccaaaaaaugcaacacc

SEQ ID NO: 509042 - RNA, 21 nt, Human
uccaagaaauaacuaaaaaca

SEQ ID NO: 509043 - RNA, 20 nt, Human
ucccagaaauaaaagagaga

SEQ ID NO: 509044 - RNA, 19 nt, Human
ucuaaagucuacaaaaauc

SEQ ID NO: 509045 - RNA, 20 nt, Human
ucuaaagucuacaaaaaucc

SEQ ID NO: 509046 - RNA, 25 nt, Human
ucuacaaaaauccuguuaaaucaag

SEQ ID NO: 509047 - RNA, 21 nt, Human
ucuuagguauuucccaaagcu

SEQ ID NO: 509048 - RNA, 20 nt, Human
ugagcacagcaauccaugcc

SEQ ID NO: 509049 - RNA, 25 nt, Human
ugagcacagcaauccaugccacaaa

SEQ ID NO: 509050 - RNA, 20 nt, Human
ugcaccgccaccagcugccc

SEQ ID NO: 509051 - RNA, 23 nt, Human
ugccacaaaaauccucacaaaac

SEQ ID NO: 509052 - RNA, 27 nt, Human
ugccacaaaaauccucacaaaacaaga

SEQ ID NO: 509053 - RNA, 22 nt, Human
ugccuagaauaaggcgccacac

SEQ ID NO: 509054 - RNA, 24 nt, Human
ugcucagugcuugcaacccaaguc

SEQ ID NO: 509055 - RNA, 22 nt, Human
uuaaaaucaagaaucuauaaaa

SEQ ID NO: 509056 - RNA, 24 nt, Human
uuuauacugcagcauuuucaggag

SEQ ID NO: 509057 - RNA, 21 nt, Human
aaagagacagggacuuggcaa

SEQ ID NO: 509058 - RNA, 21 nt, Human
aaggacacuauuaagggacac

SEQ ID NO: 509059 - RNA, 22 nt, Human
aauaauaggaccacaugagaaa

SEQ ID NO: 509060 - RNA, 22 nt, Human
acauacucuugagcaaugcuaa

SEQ ID NO: 509061 - RNA, 22 nt, Human
acuauuaagggacacuuuugag

SEQ ID NO: 509062 - RNA, 21 nt, Human
agacagggacuuggcaagugg

SEQ ID NO: 509063 - RNA, 28 nt, Human
agacaggugaacucacaaaguauaggca

SEQ ID NO: 509064 - RNA, 19 nt, Human
aggaaaaacugaugaagua

SEQ ID NO: 509065 - RNA, 22 nt, Human
aggaccacaugagaaacuguuc

SEQ ID NO: 509066 - RNA, 26 nt, Human
auacaccuuucaaaaggaaaaacuga

SEQ ID NO: 509067 - RNA, 19 nt, Human
caacuucagaaggcucugc

SEQ ID NO: 509068 - RNA, 20 nt, Human
caccuuucaaaaggaaaaac

SEQ ID NO: 509069 - RNA, 20 nt, Human
caguagacaaauaauaggac

SEQ ID NO: 509070 - RNA, 24 nt, Human
ccagccuacuuacaaauaaagcua

SEQ ID NO: 509071 - RNA, 23 nt, Human
cuccagagacuguuacacucccu

SEQ ID NO: 509072 - RNA, 23 nt, Human
cucccuuaaguccuucuugguaa

SEQ ID NO: 509073 - RNA, 19 nt, Human
cucuuucuccucgguuugc

SEQ ID NO: 509074 - RNA, 20 nt, Human
cugaaagagacagggacuug

SEQ ID NO: 509075 - RNA, 22 nt, Human
cuucucuuuuuuucucuuucuc

SEQ ID NO: 509076 - RNA, 18 nt, Human
gaaacuguucggcaggug

SEQ ID NO: 509077 - RNA, 19 nt, Human
gaacucacaaaguauaggc

SEQ ID NO: 509078 - RNA, 18 nt, Human
gcucaaagugguccucca

SEQ ID NO: 509079 - RNA, 24 nt, Human
gcuuucuuuuuaacuuguuuagcu

SEQ ID NO: 509080 - RNA, 21 nt, Human
gguauaaacuguauuacaacc

SEQ ID NO: 509081 - RNA, 20 nt, Human
ggugaacucacaaaguauag

SEQ ID NO: 509082 - RNA, 19 nt, Human
uaacuuguuuagcuuuggg

SEQ ID NO: 509083 - RNA, 24 nt, Human
uaaguauagguaauccacaucaaa

SEQ ID NO: 509084 - RNA, 21 nt, Human
uagagcauacacugguauaaa

SEQ ID NO: 509085 - RNA, 23 nt, Human
uaggaccacaugagaaacuguuc

SEQ ID NO: 509086 - RNA, 18 nt, Human
ucaccuuauaaugagaag

SEQ ID NO: 509087 - RNA, 22 nt, Human
ucagaaggcucugcuuucuuuu

SEQ ID NO: 509088 - RNA, 25 nt, Human
ucccuuaaguccuucuugguaaaua

SEQ ID NO: 509089 - RNA, 20 nt, Human
ucuaaucuacagauaauaca

SEQ ID NO: 509090 - RNA, 23 nt, Human
ucuaaucuacagauaauacauua

SEQ ID NO: 509091 - RNA, 21 nt, Human
ucuucagucuuaucagauuuu

SEQ ID NO: 509092 - RNA, 22 nt, Human
ugaaagagacagggacuuggca

SEQ ID NO: 509093 - RNA, 22 nt, Human
ugaaaucuuguuucaaaacauu

SEQ ID NO: 509094 - RNA, 18 nt, Human
ugagaaacuguucggcag

SEQ ID NO: 509095 - RNA, 18 nt, Human
ugucugaaagagacaggg

SEQ ID NO: 509096 - RNA, 23 nt, Human
ugucugaaagagacagggacuug

SEQ ID NO: 509097 - RNA, 19 nt, Human
uuauuucagggaaggacac

SEQ ID NO: 509098 - RNA, 22 nt, Human
uucaaaaggaaaaacugaugaa

SEQ ID NO: 509099 - RNA, 22 nt, Human
uucauacaccuuucaaaaggaa

SEQ ID NO: 509100 - RNA, 23 nt, Human
uuccaaaggcucaaagugguccu

SEQ ID NO: 509101 - RNA, 24 nt, Human
uuccaauaggaagaaguggaguac

SEQ ID NO: 509102 - RNA, 22 nt, Human
uugagcaaugcuaaucugcgcc

SEQ ID NO: 509103 - RNA, 20 nt, Human
uugcucaguauuaagucuca

SEQ ID NO: 509104 - RNA, 21 nt, Human
uuggggaaaacaguuucuucc

SEQ ID NO: 509105 - RNA, 23 nt, Human
aaaaaauuaccuucaaaacccac

SEQ ID NO: 509106 - RNA, 22 nt, Human
aaacuaggauacugcacaaaca

SEQ ID NO: 509107 - RNA, 21 nt, Human
aaagccucaacauaaaaaaau

SEQ ID NO: 509108 - RNA, 25 nt, Human
acaucaauuuggcuucaaaaagacc

SEQ ID NO: 509109 - RNA, 26 nt, Human
caaaacccacugagacauucucacau

SEQ ID NO: 509110 - RNA, 23 nt, Human
caucuucuucaucaucuucauug

SEQ ID NO: 509111 - RNA, 20 nt, Human
ccacaguaacgacgccaugg

SEQ ID NO: 509112 - RNA, 18 nt, Human
ccccugcgucgccucccc

SEQ ID NO: 509113 - RNA, 21 nt, Human
ccgccccugcgucgccucccc

SEQ ID NO: 509114 - RNA, 19 nt, Human
ccgccgccccugcgucgcc

SEQ ID NO: 509115 - RNA, 20 nt, Human
ccgccgccccugcgucgccu

SEQ ID NO: 509116 - RNA, 20 nt, Human
ccgcucgcucuccgccgccc

SEQ ID NO: 509117 - RNA, 20 nt, Human
ccuucaaaacccacugagac

SEQ ID NO: 509118 - RNA, 19 nt, Human
cucuccgccgccccugcgu

SEQ ID NO: 509119 - RNA, 19 nt, Human
cugcaguacucuuaauacc

SEQ ID NO: 509120 - RNA, 24 nt, Human
cuucacaucaauuuggcuucaaaa

SEQ ID NO: 509121 - RNA, 21 nt, Human
uaaaguggagagcugggaucc

SEQ ID NO: 509122 - RNA, 21 nt, Human
uaaaguggagagcugggaucc

SEQ ID NO: 509123 - RNA, 18 nt, Human
uauucaaaaggaucacaa

SEQ ID NO: 509124 - RNA, 25 nt, Human
uauuuugccaucugugacaguuuca

SEQ ID NO: 509125 - RNA, 21 nt, Human
uccgggguuggcugagguuug

SEQ ID NO: 509126 - RNA, 24 nt, Human
ucgaaaaagccucaacauaaaaaa

SEQ ID NO: 509127 - RNA, 20 nt, Human
ucgcucuccgccgccccugc

SEQ ID NO: 509128 - RNA, 23 nt, Human
ucuccgccgccccugcgucgccu

SEQ ID NO: 509129 - RNA, 18 nt, Human
ugaauuagcugccaaauc

SEQ ID NO: 509130 - RNA, 22 nt, Human
ugaguaaaguggagagcuggga

SEQ ID NO: 509131 - RNA, 22 nt, Human
ugggauccuucuguaaaacuuc

SEQ ID NO: 509132 - RNA, 24 nt, Human
uuccacacggugacuggauucuac

SEQ ID NO: 509133 - RNA, 25 nt, Human
uucucacauaaacuaggauacugca

SEQ ID NO: 509134 - RNA, 18 nt, Human
accaccacaccaaagugu

SEQ ID NO: 509135 - RNA, 21 nt, Human
aguguuguuuuuuguuuuuga

SEQ ID NO: 509136 - RNA, 23 nt, Human
cagcaagaagggagauugacaga

SEQ ID NO: 509137 - RNA, 21 nt, Human
gaaaauagcuacguaccauac

SEQ ID NO: 509138 - RNA, 20 nt, Human
gaagggauuuaagggcugcc

SEQ ID NO: 509139 - RNA, 28 nt, Human
guguuguuuuuuguuuuuguuuuuuuuu

SEQ ID NO: 509140 - RNA, 24 nt, Human
uaauauagucauaugaaagcuaau

SEQ ID NO: 509141 - RNA, 25 nt, Human
uguuguuuuuuguuuuuguuuuuuu

SEQ ID NO: 509142 - RNA, 24 nt, Human
uuaaacaaauggagaaaagacaga

SEQ ID NO: 509143 - RNA, 19 nt, Human
uuucccaaaaauacuucca

SEQ ID NO: 509144 - RNA, 18 nt, Human
uuuuuugguuucucuuuu

SEQ ID NO: 509145 - RNA, 18 nt, Human
aacaucauuuauuguuag

SEQ ID NO: 509146 - RNA, 24 nt, Human
aacuucucauccagaacccacccc

SEQ ID NO: 509147 - RNA, 20 nt, Human
acagggcagcccagagccuc

SEQ ID NO: 509148 - RNA, 23 nt, Human
accccucuugcagcccgcucagc

SEQ ID NO: 509149 - RNA, 19 nt, Human
agacccggccagccuuggg

SEQ ID NO: 509150 - RNA, 25 nt, Human
aggagccgacagggcagcccagagc

SEQ ID NO: 509151 - RNA, 20 nt, Human
agguuuuauuucaaguuggg

SEQ ID NO: 509152 - RNA, 24 nt, Human
auaguaguaagaagggugcugcga

SEQ ID NO: 509153 - RNA, 24 nt, Human
caagguucacucucuacucccucg

SEQ ID NO: 509154 - RNA, 18 nt, Human
caaguacguggcuuauca

SEQ ID NO: 509155 - RNA, 22 nt, Human
cagcagcuucuucuccaaugcu

SEQ ID NO: 509156 - RNA, 21 nt, Human
cagcuguuuucccagaugugu

SEQ ID NO: 509157 - RNA, 20 nt, Human
ccagaacccaccccucuugc

SEQ ID NO: 509158 - RNA, 21 nt, Human
ccaugcucagcagcuucuucu

SEQ ID NO: 509159 - RNA, 19 nt, Human
cccagagccucccacugac

SEQ ID NO: 509160 - RNA, 19 nt, Human
ccccucacccucucugucu

SEQ ID NO: 509161 - RNA, 25 nt, Human
ccgacagggcagcccagagccuccc

SEQ ID NO: 509162 - RNA, 21 nt, Human
ccucccacugacaaguguggu

SEQ ID NO: 509163 - RNA, 21 nt, Human
cgagacaggggucugaaguca

SEQ ID NO: 509164 - RNA, 20 nt, Human
cgccccggugcuaauuauuc

SEQ ID NO: 509165 - RNA, 23 nt, Human
cgggagaagcgcacaucagugac

SEQ ID NO: 509166 - RNA, 23 nt, Human
cguggaggcaggacuggaggcug

SEQ ID NO: 509167 - RNA, 18 nt, Human
cucagcagcuucuucucc

SEQ ID NO: 509168 - RNA, 22 nt, Human
cuggccagcagcguaccuuucc

SEQ ID NO: 509169 - RNA, 23 nt, Human
cugggcucaaccccucacccucu

SEQ ID NO: 509170 - RNA, 23 nt, Human
cuguagcuccgaauaggggaugg

SEQ ID NO: 509171 - RNA, 22 nt, Human
gagguugcagcuguuuucccag

SEQ ID NO: 509172 - RNA, 19 nt, Human
gcagcuguuuucccagaug

SEQ ID NO: 509173 - RNA, 21 nt, Human
ggagcaccgugaggaagaagc

SEQ ID NO: 509174 - RNA, 33 nt, Human
gggagauaaggucuucagguuuuauuucaagaa

SEQ ID NO: 509175 - RNA, 19 nt, Human
guauccgagguugcagcug

SEQ ID NO: 509176 - RNA, 18 nt, Human
gucacggacgcgccgcga

SEQ ID NO: 509177 - RNA, 23 nt, Human
uacaaagugaucaaguacguggc

SEQ ID NO: 509178 - RNA, 26 nt, Human
uaccugguuccugggauucucuuuag

SEQ ID NO: 509179 - RNA, 18 nt, Human
uagaucugggcucaaccc

SEQ ID NO: 509180 - RNA, 19 nt, Human
ucaguacgguguguggagc

SEQ ID NO: 509181 - RNA, 22 nt, Human
uccugggauucucuuuaguugu

SEQ ID NO: 509182 - RNA, 18 nt, Human
ucgcguacgguggcuggc

SEQ ID NO: 509183 - RNA, 20 nt, Human
ucuccaaugcuggccagcag

SEQ ID NO: 509184 - RNA, 23 nt, Human
ucugggcucaaccccucacccuc

SEQ ID NO: 509185 - RNA, 19 nt, Human
ucugugagcccagagugca

SEQ ID NO: 509186 - RNA, 21 nt, Human
ugagcccagagugcaagcuga

SEQ ID NO: 509187 - RNA, 22 nt, Human
ugauacaaagucaaaauccacu

SEQ ID NO: 509188 - RNA, 23 nt, Human
uggaggcuggcgauacgaggcgg

SEQ ID NO: 509189 - RNA, 19 nt, Human
uggcgauugguuaccuggu

SEQ ID NO: 509190 - RNA, 18 nt, Human
ugggucaucuuuucuuca

SEQ ID NO: 509191 - RNA, 19 nt, Human
uguggagcuggagcaccgu

SEQ ID NO: 509192 - RNA, 23 nt, Human
uguguucccugcgcagggucugg

SEQ ID NO: 509193 - RNA, 27 nt, Human
uuauuuuccuuccuuuuaaccuucagg

SEQ ID NO: 509194 - RNA, 20 nt, Human
uuccugggauucucuuuagu

SEQ ID NO: 509195 - RNA, 19 nt, Human
uucucauccagaacccacc

SEQ ID NO: 509196 - RNA, 20 nt, Human
uugcagcuguuuucccagau

SEQ ID NO: 509197 - RNA, 22 nt, Human
uuuuaagaguucagcugcgagg

SEQ ID NO: 509198 - RNA, 18 nt, Human
aaauaaacauuugcacuc

SEQ ID NO: 509199 - RNA, 27 nt, Human
aagggauaaauagaacuuuauuuuaaa

SEQ ID NO: 509200 - RNA, 23 nt, Human
acacagccccagcagaagcaggg

SEQ ID NO: 509201 - RNA, 18 nt, Human
agaccccaacccuugaac

SEQ ID NO: 509202 - RNA, 20 nt, Human
agaccccaacccuugaacag

SEQ ID NO: 509203 - RNA, 21 nt, Human
cacagccccagcagaagcagg

SEQ ID NO: 509204 - RNA, 20 nt, Human
cggggaccuagcagacccca

SEQ ID NO: 509205 - RNA, 24 nt, Human
cuucuugcugccauagccuucuac

SEQ ID NO: 509206 - RNA, 23 nt, Human
gaccccaacccuugaacagcugg

SEQ ID NO: 509207 - RNA, 20 nt, Human
gccauagccuucuaccuccc

SEQ ID NO: 509208 - RNA, 21 nt, Human
uagcacucgguauuuggcugc

SEQ ID NO: 509209 - RNA, 18 nt, Human
uggcaggcugcagcugca

SEQ ID NO: 509210 - RNA, 20 nt, Human
aacacccuaauucacaaaag

SEQ ID NO: 509211 - RNA, 22 nt, Human
aacaggcucuggagcucaaucc

SEQ ID NO: 509212 - RNA, 23 nt, Human
aagcacgaaagucuacauuuauu

SEQ ID NO: 509213 - RNA, 18 nt, Human
aagcagcacaggugauuu

SEQ ID NO: 509214 - RNA, 19 nt, Human
aagcggaaaaaaauacgga

SEQ ID NO: 509215 - RNA, 24 nt, Human
acaagacacagaccccuuccgucg

SEQ ID NO: 509216 - RNA, 18 nt, Human
acagccaccggagaccaa

SEQ ID NO: 509217 - RNA, 22 nt, Human
acccggggcuuccagguuccac

SEQ ID NO: 509218 - RNA, 18 nt, Human
acuccauccagggacaau

SEQ ID NO: 509219 - RNA, 18 nt, Human
acugcacuccauccaggg

SEQ ID NO: 509220 - RNA, 25 nt, Human
agccaccggagaccaacagaaaacc

SEQ ID NO: 509221 - RNA, 22 nt, Human
aggcugaagccaagcugugaaa

SEQ ID NO: 509222 - RNA, 19 nt, Human
aggugauuuaggugcaucu

SEQ ID NO: 509223 - RNA, 21 nt, Human
aucaauacaagacacagaccc

SEQ ID NO: 509224 - RNA, 21 nt, Human
augguauuaaaagcaagguuc

SEQ ID NO: 509225 - RNA, 18 nt, Human
caaaauucaugccaaugu

SEQ ID NO: 509226 - RNA, 22 nt, Human
caacagaaaaccuaaugucagc

SEQ ID NO: 509227 - RNA, 18 nt, Human
caagacacagaccccuuc

SEQ ID NO: 509228 - RNA, 20 nt, Human
caagacacagaccccuuccc

SEQ ID NO: 509229 - RNA, 24 nt, Human
caagccuccucugacaagaacugg

SEQ ID NO: 509230 - RNA, 24 nt, Human
caagggacaguuggcgcccagggc

SEQ ID NO: 509231 - RNA, 18 nt, Human
cacccggggcuuccaggu

SEQ ID NO: 509232 - RNA, 21 nt, Human
cagaacacaguuaagggcagc

SEQ ID NO: 509233 - RNA, 19 nt, Human
ccaggaggagaggaaauua

SEQ ID NO: 509234 - RNA, 23 nt, Human
ccaggaggagaggaaauuaagaa

SEQ ID NO: 509235 - RNA, 18 nt, Human
cccagggcgggcugcagg

SEQ ID NO: 509236 - RNA, 20 nt, Human
ccccgcucgcuguccuuuuu

SEQ ID NO: 509237 - RNA, 19 nt, Human
ccggacagccaaggaggau

SEQ ID NO: 509238 - RNA, 20 nt, Human
ccuaaugucagccuuaaaau

SEQ ID NO: 509239 - RNA, 19 nt, Human
ccuccuggcacgguggaaa

SEQ ID NO: 509240 - RNA, 18 nt, Human
ccucuggcuuagggugag

SEQ ID NO: 509241 - RNA, 19 nt, Human
cgcccagggcgggcugcag

SEQ ID NO: 509242 - RNA, 18 nt, Human
cggaaaaaaauacggaga

SEQ ID NO: 509243 - RNA, 23 nt, Human
cggagaccaacagaaaaccuaau

SEQ ID NO: 509244 - RNA, 19 nt, Human
cgugcguuuccucagcacu

SEQ ID NO: 509245 - RNA, 23 nt, Human
cguuccaggcugacgcgcagggc

SEQ ID NO: 509246 - RNA, 22 nt, Human
cuagucucuacagugccccaca

SEQ ID NO: 509247 - RNA, 22 nt, Human
cugauaggcugaagccaagcug

SEQ ID NO: 509248 - RNA, 24 nt, Human
cugccacccggggcuuccagguuc

SEQ ID NO: 509249 - RNA, 21 nt, Human
cuggcacgguggaaauucccc

SEQ ID NO: 509250 - RNA, 19 nt, Human
cuuuccucuggcuuagggu

SEQ ID NO: 509251 - RNA, 18 nt, Human
gaagguggaggaaagcag

SEQ ID NO: 509252 - RNA, 25 nt, Human
gacaaucaaggacagccaccggaga

SEQ ID NO: 509253 - RNA, 22 nt, Human
gagaagguggaggaaagcagca

SEQ ID NO: 509254 - RNA, 24 nt, Human
gagcuggcuagucucuacagugcc

SEQ ID NO: 509255 - RNA, 19 nt, Human
gaggaaagcagcacaggug

SEQ ID NO: 509256 - RNA, 18 nt, Human
gcacgcgccggacagcca

SEQ ID NO: 509257 - RNA, 18 nt, Human
gcccagggcgggcugcag

SEQ ID NO: 509258 - RNA, 20 nt, Human
gcucccuaacaggcucugga

SEQ ID NO: 509259 - RNA, 18 nt, Human
ggaggagaagggcugugg

SEQ ID NO: 509260 - RNA, 22 nt, Human
ggcuuccagguuccacucgaag

SEQ ID NO: 509261 - RNA, 23 nt, Human
gggacaguuggcgcccagggaag

SEQ ID NO: 509262 - RNA, 20 nt, Human
ggggugccagcucaaccccg

SEQ ID NO: 509263 - RNA, 18 nt, Human
ggugacugcacuccaucc

SEQ ID NO: 509264 - RNA, 21 nt, Human
gguggaggaaagcagcacagg

SEQ ID NO: 509265 - RNA, 18 nt, Human
uacagugccccacaccac

SEQ ID NO: 509266 - RNA, 20 nt, Human
uacauuuauuugggacacag

SEQ ID NO: 509267 - RNA, 18 nt, Human
ucacaucccggggugcca

SEQ ID NO: 509268 - RNA, 23 nt, Human
ucagaacacaguuaagggcagca

SEQ ID NO: 509269 - RNA, 19 nt, Human
uccagggccucccauggag

SEQ ID NO: 509270 - RNA, 22 nt, Human
ucccauggaggagaagggcugu

SEQ ID NO: 509271 - RNA, 22 nt, Human
ucccggggugccagcucaaccc

SEQ ID NO: 509272 - RNA, 19 nt, Human
uccucugacaagaacugga

SEQ ID NO: 509273 - RNA, 20 nt, Human
ucgggagcuggcuagucucu

SEQ ID NO: 509274 - RNA, 20 nt, Human
ucuacagugccccacaccac

SEQ ID NO: 509275 - RNA, 23 nt, Human
ucuacagugccccacaccacuga

SEQ ID NO: 509276 - RNA, 19 nt, Human
ugaaacuucagaacacagu

SEQ ID NO: 509277 - RNA, 22 nt, Human
ugacugcacuccauccagggac

SEQ ID NO: 509278 - RNA, 23 nt, Human
ugauaggcugaagccaagcugug

SEQ ID NO: 509279 - RNA, 20 nt, Human
ugccaagggacaguuggcgc

SEQ ID NO: 509280 - RNA, 21 nt, Human
ugccaagggacaguuggcgcc

SEQ ID NO: 509281 - RNA, 23 nt, Human
ugggaaaaaggugacugcacucc

SEQ ID NO: 509282 - RNA, 19 nt, Human
ugggcagggaaaagggggu

SEQ ID NO: 509283 - RNA, 22 nt, Human
ugggcagggaaaaggggguccu

SEQ ID NO: 509284 - RNA, 22 nt, Human
uguggccccucugauucuuggg

SEQ ID NO: 509285 - RNA, 23 nt, Human
uuagugauaaauauauucucuuu

SEQ ID NO: 509286 - RNA, 22 nt, Human
uucaagcggaaaaaaauacgga

SEQ ID NO: 509287 - RNA, 20 nt, Human
uuccucuggcuuagggugag

SEQ ID NO: 509288 - RNA, 18 nt, Human
uucugggaaaaaggugac

SEQ ID NO: 509289 - RNA, 22 nt, Human
aaaagaacaggaauaauuuagg

SEQ ID NO: 509290 - RNA, 18 nt, Human
aaacaaacaaaaagagua

SEQ ID NO: 509291 - RNA, 23 nt, Human
aaccacacuaagaaacaaacaaa

SEQ ID NO: 509292 - RNA, 22 nt, Human
aagaaacaaacaaacaaaaaga

SEQ ID NO: 509293 - RNA, 28 nt, Human
aagaaacaaacaaacaaaaagaguaagg

SEQ ID NO: 509294 - RNA, 19 nt, Human
aagaagaagaaaagcaugg

SEQ ID NO: 509295 - RNA, 19 nt, Human
aagaagaagaaaagcaugg

SEQ ID NO: 509296 - RNA, 24 nt, Human
aagaguaaggaaaauuaggaacac

SEQ ID NO: 509297 - RNA, 18 nt, Human
acacauuuacaaaauacc

SEQ ID NO: 509298 - RNA, 24 nt, Human
acacuaagaaacaaacaaacaaaa

SEQ ID NO: 509299 - RNA, 21 nt, Human
acacuaagaaacaaacaaacc

SEQ ID NO: 509300 - RNA, 19 nt, Human
agaagaagaaaagcaugga

SEQ ID NO: 509301 - RNA, 21 nt, Human
aguucagccauccagcuaccu

SEQ ID NO: 509302 - RNA, 18 nt, Human
caaacaaacaaaaagagu

SEQ ID NO: 509303 - RNA, 25 nt, Human
caauaaaccacacuaagaaacaaac

SEQ ID NO: 509304 - RNA, 30 nt, Human
cacacuaagaaacaaacaaacaaaaagagg

SEQ ID NO: 509305 - RNA, 24 nt, Human
cccauauccagcaguucagccauc

SEQ ID NO: 509306 - RNA, 25 nt, Human
cccauugcaaacagggcuuaaaagc

SEQ ID NO: 509307 - RNA, 21 nt, Human
ccugcuuaaaagaacaggaau

SEQ ID NO: 509308 - RNA, 21 nt, Human
cggcauuguaaaugauuguca

SEQ ID NO: 509309 - RNA, 19 nt, Human
cucacuacagcacucuucg

SEQ ID NO: 509310 - RNA, 22 nt, Human
cucacuacagcacucuucggca

SEQ ID NO: 509311 - RNA, 23 nt, Human
gaaacaaacaaacaaaaagagua

SEQ ID NO: 509312 - RNA, 21 nt, Human
gaagaaaagcauggaguagua

SEQ ID NO: 509313 - RNA, 19 nt, Human
gagugguugauuuaaaaac

SEQ ID NO: 509314 - RNA, 23 nt, Human
gcagcugacauuccacaagcaag

SEQ ID NO: 509315 - RNA, 22 nt, Human
uacacaguguuauuuucuucaa

SEQ ID NO: 509316 - RNA, 25 nt, Human
ucagccauccagcuaccuuugggac

SEQ ID NO: 509317 - RNA, 23 nt, Human
uccaagaagaagaaaagcaugga

SEQ ID NO: 509318 - RNA, 20 nt, Human
uccucuacaaaaaguagggu

SEQ ID NO: 509319 - RNA, 19 nt, Human
ucuccguugcuguguuacc

SEQ ID NO: 509320 - RNA, 19 nt, Human
ucuguucuccguugcugug

SEQ ID NO: 509321 - RNA, 21 nt, Human
ugacacauuuacaaaauacca

SEQ ID NO: 509322 - RNA, 21 nt, Human
ugguggguuccgguauuuccu

SEQ ID NO: 509323 - RNA, 25 nt, Human
uuaaaagaacaggaauaauuuaggc

SEQ ID NO: 509324 - RNA, 19 nt, Human
uucuccguugcuguguuac

SEQ ID NO: 509325 - RNA, 22 nt, Human
uucugcacugggccucgugcuc

SEQ ID NO: 509326 - RNA, 25 nt, Human
uugcaaacagggcuuaaaagccuau

SEQ ID NO: 509327 - RNA, 22 nt, Human
aaaacaaaaaacaaaaacugga

SEQ ID NO: 509328 - RNA, 21 nt, Human
aaaaucucccucagucacaag

SEQ ID NO: 509329 - RNA, 21 nt, Human
aaacaaaaaacaaaaacugga

SEQ ID NO: 509330 - RNA, 21 nt, Human
aaacaaaaaacaaaaacugga

SEQ ID NO: 509331 - RNA, 22 nt, Human
aaacaaaaaacaaaaacuggaa

SEQ ID NO: 509332 - RNA, 27 nt, Human
aaacaaaaacuggaaaacuuuucagaa

SEQ ID NO: 509333 - RNA, 18 nt, Human
aaacaagaacuaagggca

SEQ ID NO: 509334 - RNA, 20 nt, Human
aaacaagaacuaagggcaac

SEQ ID NO: 509335 - RNA, 24 nt, Human
aaagucacccaguaagaaccaaaa

SEQ ID NO: 509336 - RNA, 19 nt, Human
aacugccccccaccccccc

SEQ ID NO: 509337 - RNA, 25 nt, Human
aagaugcuuucacgcuccuggaagu

SEQ ID NO: 509338 - RNA, 21 nt, Human
aagcacaauaaaagagcuaaa

SEQ ID NO: 509339 - RNA, 28 nt, Human
aagcacaauaaaagagcuaaaucacggc

SEQ ID NO: 509340 - RNA, 24 nt, Human
aagcagcaaagccagauuguccca

SEQ ID NO: 509341 - RNA, 20 nt, Human
aagucacccaguaagaacca

SEQ ID NO: 509342 - RNA, 22 nt, Human
acaaaaaacaaaaaacaaaaac

SEQ ID NO: 509343 - RNA, 25 nt, Human
acacagucacuccucaugcccgcau

SEQ ID NO: 509344 - RNA, 21 nt, Human
acagggucacgcacugaggac

SEQ ID NO: 509345 - RNA, 27 nt, Human
acccaguaagaaccaaaagcauaauuu

SEQ ID NO: 509346 - RNA, 19 nt, Human
acccccucugaccagggga

SEQ ID NO: 509347 - RNA, 19 nt, Human
accccucuccccuccccca

SEQ ID NO: 509348 - RNA, 24 nt, Human
accuacacacacaaaacacugaua

SEQ ID NO: 509349 - RNA, 19 nt, Human
acugccccccacccccccc

SEQ ID NO: 509350 - RNA, 23 nt, Human
agaaaaucucccucagucacaag

SEQ ID NO: 509351 - RNA, 25 nt, Human
agaaaaucucccucagucacaagaa

SEQ ID NO: 509352 - RNA, 24 nt, Human
agaaaugacaaaacaccccacaga

SEQ ID NO: 509353 - RNA, 18 nt, Human
agaaggaaaaaauaucau

SEQ ID NO: 509354 - RNA, 23 nt, Human
agacagcccuaaacacuagcuga

SEQ ID NO: 509355 - RNA, 19 nt, Human
agacauuaaacaagaacua

SEQ ID NO: 509356 - RNA, 18 nt, Human
agagacauuaaacaagaa

SEQ ID NO: 509357 - RNA, 24 nt, Human
agcuccgcaaccuccuguggcccu

SEQ ID NO: 509358 - RNA, 21 nt, Human
agcugauuccaaggcuucucu

SEQ ID NO: 509359 - RNA, 24 nt, Human
aguguuggaaauaaagacugagcc

SEQ ID NO: 509360 - RNA, 21 nt, Human
augagaaaacugaggcucagg

SEQ ID NO: 509361 - RNA, 23 nt, Human
augcccgcauguucacuggugcc

SEQ ID NO: 509362 - RNA, 19 nt, Human
auuaagaaaugacaaaaca

SEQ ID NO: 509363 - RNA, 21 nt, Human
auugucccaagucccuacgaa

SEQ ID NO: 509364 - RNA, 25 nt, Human
caacauccaagcuccgcaaccuccu

SEQ ID NO: 509365 - RNA, 22 nt, Human
caacuguaguccaagcucccag

SEQ ID NO: 509366 - RNA, 22 nt, Human
cacacaccaaaaaagauacaag

SEQ ID NO: 509367 - RNA, 22 nt, Human
cacaccaaaaaagauacaagaa

SEQ ID NO: 509368 - RNA, 21 nt, Human
caccaaaaaagauacaagaau

SEQ ID NO: 509369 - RNA, 22 nt, Human
caccaaaaaagauacaagaaug

SEQ ID NO: 509370 - RNA, 25 nt, Human
cacccccacccccucugaccagggg

SEQ ID NO: 509371 - RNA, 19 nt, Human
caccccccccgcccacaca

SEQ ID NO: 509372 - RNA, 24 nt, Human
caccccccccgcccacacaccaaa

SEQ ID NO: 509373 - RNA, 20 nt, Human
cagaacaggaacagacugug

SEQ ID NO: 509374 - RNA, 19 nt, Human
caguagggaucgccauccc

SEQ ID NO: 509375 - RNA, 24 nt, Human
caugcccgcauguucacuggugcc

SEQ ID NO: 509376 - RNA, 18 nt, Human
ccacacaccaaaaaagau

SEQ ID NO: 509377 - RNA, 24 nt, Human
ccacacaccaaaaaagauacaagg

SEQ ID NO: 509378 - RNA, 26 nt, Human
ccaccccccccgcccacacaccaaaa

SEQ ID NO: 509379 - RNA, 19 nt, Human
ccaguaagaaccaaaagca

SEQ ID NO: 509380 - RNA, 22 nt, Human
cccacacaccaaaaaagauaca

SEQ ID NO: 509381 - RNA, 24 nt, Human
cccacagauguauuuggaccaagu

SEQ ID NO: 509382 - RNA, 22 nt, Human
cccacccccucugaccagggga

SEQ ID NO: 509383 - RNA, 20 nt, Human
ccccacccccucugaccagg

SEQ ID NO: 509384 - RNA, 19 nt, Human
cccccacccccacccccuc

SEQ ID NO: 509385 - RNA, 21 nt, Human
cccccacccccacccccucug

SEQ ID NO: 509386 - RNA, 21 nt, Human
ccccccaccccccccgcccac

SEQ ID NO: 509387 - RNA, 24 nt, Human
ccccccccgcccacacaccaaaaa

SEQ ID NO: 509388 - RNA, 20 nt, Human
cccgcccacacaccaaaaag

SEQ ID NO: 509389 - RNA, 29 nt, Human
cccugguuauaacuaugauucauucauuu

SEQ ID NO: 509390 - RNA, 28 nt, Human
ccgcccacacaccaaaaaagauacaaga

SEQ ID NO: 509391 - RNA, 21 nt, Human
ccuacacacacaaaacacuga

SEQ ID NO: 509392 - RNA, 21 nt, Human
ccucaugcccgcauguucacu

SEQ ID NO: 509393 - RNA, 18 nt, Human
ccucccccacccccaccc

SEQ ID NO: 509394 - RNA, 24 nt, Human
ccucccucuggaaacuucuacaga

SEQ ID NO: 509395 - RNA, 19 nt, Human
ccucuugggcagcuuggcc

SEQ ID NO: 509396 - RNA, 26 nt, Human
ccuguggcccuuccagaaaaucuccc

SEQ ID NO: 509397 - RNA, 23 nt, Human
ccuucacccaggaagcuuacaug

SEQ ID NO: 509398 - RNA, 19 nt, Human
cuccaggcauaguucuggg

SEQ ID NO: 509399 - RNA, 18 nt, Human
cucccccacccccacccc

SEQ ID NO: 509400 - RNA, 21 nt, Human
cucccccacccccacccccuc

SEQ ID NO: 509401 - RNA, 22 nt, Human
cuccccucccccacccccaccc

SEQ ID NO: 509402 - RNA, 18 nt, Human
cucuccccucccccaccc

SEQ ID NO: 509403 - RNA, 18 nt, Human
cucugcucagaauaucag

SEQ ID NO: 509404 - RNA, 19 nt, Human
cucuugggcagcuuggccc

SEQ ID NO: 509405 - RNA, 22 nt, Human
cugaacugccccccaccccccc

SEQ ID NO: 509406 - RNA, 21 nt, Human
cugacagacagcccuaaacac

SEQ ID NO: 509407 - RNA, 22 nt, Human
cuggcauaagccaauguucucu

SEQ ID NO: 509408 - RNA, 19 nt, Human
gaacagacuguggauaucc

SEQ ID NO: 509409 - RNA, 20 nt, Human
gaacugccccccaccccccc

SEQ ID NO: 509410 - RNA, 22 nt, Human
gaagucaggcaccuucagcuga

SEQ ID NO: 509411 - RNA, 19 nt, Human
gacaaugaggguuagagag

SEQ ID NO: 509412 - RNA, 22 nt, Human
gaggcuccuuuacuggucucug

SEQ ID NO: 509413 - RNA, 23 nt, Human
gauaauuaaauagcuaagaggaa

SEQ ID NO: 509414 - RNA, 20 nt, Human
gcccacguauaaccauuucu

SEQ ID NO: 509415 - RNA, 21 nt, Human
gcccagauguggugugguauc

SEQ ID NO: 509416 - RNA, 24 nt, Human
ggagucaccuacacacacaaaaca

SEQ ID NO: 509417 - RNA, 21 nt, Human
guacacagucacuccucaugc

SEQ ID NO: 509418 - RNA, 21 nt, Human
gucucugcuuggagacagaca

SEQ ID NO: 509419 - RNA, 20 nt, Human
uaacagcaccucccucugga

SEQ ID NO: 509420 - RNA, 21 nt, Human
uaacagcaccucccucuggaa

SEQ ID NO: 509421 - RNA, 18 nt, Human
uaagaggaaccguuagug

SEQ ID NO: 509422 - RNA, 21 nt, Human
uaagcacaauaaaagagcuaa

SEQ ID NO: 509423 - RNA, 21 nt, Human
uaaguaggacuaaacauucua

SEQ ID NO: 509424 - RNA, 20 nt, Human
uaagucaaagucacccagua

SEQ ID NO: 509425 - RNA, 21 nt, Human
uacaagaauguaagcccagau

SEQ ID NO: 509426 - RNA, 22 nt, Human
uaccagcacuaugaaugauuaa

SEQ ID NO: 509427 - RNA, 21 nt, Human
uacgugugucgugcgugcucc

SEQ ID NO: 509428 - RNA, 20 nt, Human
uagaaagcagcaaagccaga

SEQ ID NO: 509429 - RNA, 24 nt, Human
uagaaagcagcaaagccagauugu

SEQ ID NO: 509430 - RNA, 21 nt, Human
uagcaguagaaagcagcaaag

SEQ ID NO: 509431 - RNA, 18 nt, Human
uagguaccccucuccccu

SEQ ID NO: 509432 - RNA, 21 nt, Human
uauaaccauuucugacagaca

SEQ ID NO: 509433 - RNA, 21 nt, Human
uaucuggcauaagccaauguu

SEQ ID NO: 509434 - RNA, 23 nt, Human
ucaaccuucacccaggaagcuua

SEQ ID NO: 509435 - RNA, 22 nt, Human
ucagaauaucagaacaggaaca

SEQ ID NO: 509436 - RNA, 22 nt, Human
ucagucccaggaguugagcaaa

SEQ ID NO: 509437 - RNA, 20 nt, Human
uccaucaggccacagcuucc

SEQ ID NO: 509438 - RNA, 18 nt, Human
ucccucagucacaagaac

SEQ ID NO: 509439 - RNA, 20 nt, Human
uccugaaagcacugacaggg

SEQ ID NO: 509440 - RNA, 24 nt, Human
ucuggguacuuuccauuccuuuuc

SEQ ID NO: 509441 - RNA, 19 nt, Human
ucuugggcagcuuggcccc

SEQ ID NO: 509442 - RNA, 21 nt, Human
ugaaagcacugacagggucac

SEQ ID NO: 509443 - RNA, 18 nt, Human
ugaagagccucuugggca

SEQ ID NO: 509444 - RNA, 20 nt, Human
ugacagacagcccuaaacac

SEQ ID NO: 509445 - RNA, 20 nt, Human
ugacaggauucagaagguac

SEQ ID NO: 509446 - RNA, 23 nt, Human
ugacagggucacgcacugaggac

SEQ ID NO: 509447 - RNA, 21 nt, Human
ugacugcacaggaccacggcu

SEQ ID NO: 509448 - RNA, 20 nt, Human
ugagccggacuugacauaca

SEQ ID NO: 509449 - RNA, 19 nt, Human
ugaggaccaggaggcuccu

SEQ ID NO: 509450 - RNA, 21 nt, Human
ugaggaccaggaggcuccuuu

SEQ ID NO: 509451 - RNA, 18 nt, Human
ugaggguuagagagaggu

SEQ ID NO: 509452 - RNA, 18 nt, Human
ugaggguuagagagaggu

SEQ ID NO: 509453 - RNA, 22 nt, Human
ugaggguuagagagaggugccu

SEQ ID NO: 509454 - RNA, 25 nt, Human
ugccccccaccccccccgcccacac

SEQ ID NO: 509455 - RNA, 21 nt, Human
ugcccgaaaagaaacagcuga

SEQ ID NO: 509456 - RNA, 18 nt, Human
uggaccaaguaagcacaa

SEQ ID NO: 509457 - RNA, 20 nt, Human
uggcggcauccuggggcggc

SEQ ID NO: 509458 - RNA, 19 nt, Human
ugggcagcuuggccccugg

SEQ ID NO: 509459 - RNA, 19 nt, Human
uuaaauagcuaagaggaac

SEQ ID NO: 509460 - RNA, 19 nt, Human
uucacugaacugcccccca

SEQ ID NO: 509461 - RNA, 19 nt, Human
uucuauuuuaaaacugcau

SEQ ID NO: 509462 - RNA, 25 nt, Human
uucucuggguucuagguaccccucu

SEQ ID NO: 509463 - RNA, 23 nt, Human
uugcuguacuucacaucauaugg

SEQ ID NO: 509464 - RNA, 19 nt, Human
uuuuaccagcacuaugaau

SEQ ID NO: 509465 - RNA, 24 nt, Human
uuuucuauuuuaaaacugcauuca

SEQ ID NO: 509466 - RNA, 23 nt, Human
uuuugcccacguauaaccauuuc

SEQ ID NO: 509467 - RNA, 22 nt, Human
uuuuuuuuuuuuuuuuuaccag

SEQ ID NO: 509468 - RNA, 20 nt, Human
aaagugcugggauuacaggc

SEQ ID NO: 509469 - RNA, 23 nt, Human
aaagugcugggauuacaggcgua

SEQ ID NO: 509470 - RNA, 22 nt, Human
aacaccagugcucccagccccc

SEQ ID NO: 509471 - RNA, 18 nt, Human
aaccaagccugugcaccu

SEQ ID NO: 509472 - RNA, 24 nt, Human
aagaggccaggaagauggggggug

SEQ ID NO: 509473 - RNA, 19 nt, Human
aagugcugggauuacaggc

SEQ ID NO: 509474 - RNA, 19 nt, Human
aagugcugggauuacaggc

SEQ ID NO: 509475 - RNA, 26 nt, Human
aagugcugggauuacaggcguaagcc

SEQ ID NO: 509476 - RNA, 23 nt, Human
aaguucauucuggguuuucaggc

SEQ ID NO: 509477 - RNA, 19 nt, Human
acaccagugcucccagccc

SEQ ID NO: 509478 - RNA, 18 nt, Human
acagauuaagaauguugg

SEQ ID NO: 509479 - RNA, 20 nt, Human
acagugggggcagguccaga

SEQ ID NO: 509480 - RNA, 20 nt, Human
accugauaccucaucauccu

SEQ ID NO: 509481 - RNA, 20 nt, Human
acgcaguucaccagguacgg

SEQ ID NO: 509482 - RNA, 18 nt, Human
acggagccgcagggaagc

SEQ ID NO: 509483 - RNA, 18 nt, Human
acgggguuucaccguguu

SEQ ID NO: 509484 - RNA, 19 nt, Human
acgggguuucaccguguua

SEQ ID NO: 509485 - RNA, 20 nt, Human
acgggguuucaccguguuag

SEQ ID NO: 509486 - RNA, 24 nt, Human
acgggguuucaccguguuagccag

SEQ ID NO: 509487 - RNA, 18 nt, Human
acgggguuucuccauguu

SEQ ID NO: 509488 - RNA, 20 nt, Human
acgggguuucuccauguugg

SEQ ID NO: 509489 - RNA, 24 nt, Human
acgggguuucuccauguuggucag

SEQ ID NO: 509490 - RNA, 22 nt, Human
acuaaaaccaaacauauaugcg

SEQ ID NO: 509491 - RNA, 20 nt, Human
acugcaagcucugccucccg

SEQ ID NO: 509492 - RNA, 19 nt, Human
agagacgggguuucaccgu

SEQ ID NO: 509493 - RNA, 18 nt, Human
agagggagggaagggcug

SEQ ID NO: 509494 - RNA, 23 nt, Human
agcugacgcugacacccagcacg

SEQ ID NO: 509495 - RNA, 18 nt, Human
aggagcugguguuugcug

SEQ ID NO: 509496 - RNA, 23 nt, Human
aggagucggauggcacuuucacu

SEQ ID NO: 509497 - RNA, 18 nt, Human
aggauggacucaagagag

SEQ ID NO: 509498 - RNA, 19 nt, Human
aggcagcugcugcuuucug

SEQ ID NO: 509499 - RNA, 25 nt, Human
aggcuggagugcaguggcacgaucu

SEQ ID NO: 509500 - RNA, 20 nt, Human
aguagagacgggguuucacc

SEQ ID NO: 509501 - RNA, 18 nt, Human
aguagcugggacuacagg

SEQ ID NO: 509502 - RNA, 19 nt, Human
aguagcugggacuacaggc

SEQ ID NO: 509503 - RNA, 20 nt, Human
agugcaguggcacgaucuug

SEQ ID NO: 509504 - RNA, 23 nt, Human
agugcaguggcacgaucuuggcu

SEQ ID NO: 509505 - RNA, 24 nt, Human
agugcaguggcacgaucuuggcuc

SEQ ID NO: 509506 - RNA, 24 nt, Human
aguggcucacgccuguaaucccag

SEQ ID NO: 509507 - RNA, 23 nt, Human
augaaccaagcccaugcaaccuc

SEQ ID NO: 509508 - RNA, 18 nt, Human
augaauucauggaacaga

SEQ ID NO: 509509 - RNA, 19 nt, Human
augcaggccacaguggggg

SEQ ID NO: 509510 - RNA, 21 nt, Human
auggugcagccugugguccca

SEQ ID NO: 509511 - RNA, 21 nt, Human
auugugagugggucuuauggu

SEQ ID NO: 509512 - RNA, 24 nt, Human
caaagugcugggauuacaggcgua

SEQ ID NO: 509513 - RNA, 24 nt, Human
caauagagacgggguuucuccaug

SEQ ID NO: 509514 - RNA, 28 nt, Human
cacaauccgugcuccaggcccucugcac

SEQ ID NO: 509515 - RNA, 18 nt, Human
caccguguuagccaggau

SEQ ID NO: 509516 - RNA, 24 nt, Human
caccguguuagccaggauggucuc

SEQ ID NO: 509517 - RNA, 24 nt, Human
caccuggaaucuggagacauggga

SEQ ID NO: 509518 - RNA, 21 nt, Human
cacgccuguaaucccagccug

SEQ ID NO: 509519 - RNA, 22 nt, Human
cacggcacaggaccaccacaga

SEQ ID NO: 509520 - RNA, 25 nt, Human
cacggcacaggaccaccacagauga

SEQ ID NO: 509521 - RNA, 21 nt, Human
cacgugaacaccagugcuccc

SEQ ID NO: 509522 - RNA, 21 nt, Human
cacuccauucuccugccucag

SEQ ID NO: 509523 - RNA, 22 nt, Human
cacuccauucuccugccucagc

SEQ ID NO: 509524 - RNA, 23 nt, Human
cacugcaagcucugccucccggg

SEQ ID NO: 509525 - RNA, 21 nt, Human
cagaaugaaugaaccaagccc

SEQ ID NO: 509526 - RNA, 20 nt, Human
cagaugauaaaguggccaga

SEQ ID NO: 509527 - RNA, 21 nt, Human
cagcacccugcagcaggaaga

SEQ ID NO: 509528 - RNA, 25 nt, Human
cagcaggaagaaggaaagcuagacc

SEQ ID NO: 509529 - RNA, 19 nt, Human
cagccccccugcacaacuc

SEQ ID NO: 509530 - RNA, 22 nt, Human
cagccccugggggcccauccug

SEQ ID NO: 509531 - RNA, 20 nt, Human
cagcuuccucagccccuggg

SEQ ID NO: 509532 - RNA, 21 nt, Human
caggcgcccgccaccacgccc

SEQ ID NO: 509533 - RNA, 24 nt, Human
caggcguaagccacugugcccggc

SEQ ID NO: 509534 - RNA, 20 nt, Human
cagggcuaagcccaggcugg

SEQ ID NO: 509535 - RNA, 22 nt, Human
cagggcuaagcccaggcugggg

SEQ ID NO: 509536 - RNA, 19 nt, Human
cagugacugcguagccccc

SEQ ID NO: 509537 - RNA, 19 nt, Human
caguggcacgaucuuggcu

SEQ ID NO: 509538 - RNA, 23 nt, Human
cauacaggacagaaauguacaau

SEQ ID NO: 509539 - RNA, 22 nt, Human
ccaaagugcugggauuacaggc

SEQ ID NO: 509540 - RNA, 22 nt, Human
ccaaagugcugggauuacaggc

SEQ ID NO: 509541 - RNA, 24 nt, Human
ccaaagugcugggauuacaggcgu

SEQ ID NO: 509542 - RNA, 25 nt, Human
ccaccuccugagcgucuccccucca

SEQ ID NO: 509543 - RNA, 24 nt, Human
ccagaagcugacgcugacacccag

SEQ ID NO: 509544 - RNA, 19 nt, Human
ccagggcacuuucccagcg

SEQ ID NO: 509545 - RNA, 21 nt, Human
ccauguuggucaggcugaucu

SEQ ID NO: 509546 - RNA, 22 nt, Human
cccaccugcaacaauuuaagag

SEQ ID NO: 509547 - RNA, 23 nt, Human
cccgaguagcugggacuacaggc

SEQ ID NO: 509548 - RNA, 24 nt, Human
cccgaguagcugggacuacaggcg

SEQ ID NO: 509549 - RNA, 21 nt, Human
cccgccaccacgcccagcuaa

SEQ ID NO: 509550 - RNA, 23 nt, Human
cccuccacccaccugauaccuca

SEQ ID NO: 509551 - RNA, 26 nt, Human
cccugcuggcucuaacgccccuccua

SEQ ID NO: 509552 - RNA, 21 nt, Human
ccgguccagggcacuuuccca

SEQ ID NO: 509553 - RNA, 23 nt, Human
ccuauaacccuggauacauacag

SEQ ID NO: 509554 - RNA, 27 nt, Human
ccucccgccucggccucccaauagaga

SEQ ID NO: 509555 - RNA, 22 nt, Human
ccugaccucaggugaucugccc

SEQ ID NO: 509556 - RNA, 20 nt, Human
ccugcaccuggaaucuggag

SEQ ID NO: 509557 - RNA, 23 nt, Human
ccugccucagccucccgaguagc

SEQ ID NO: 509558 - RNA, 23 nt, Human
ccugggggcagguguucugucgg

SEQ ID NO: 509559 - RNA, 21 nt, Human
ccugggggcccauccuguggg

SEQ ID NO: 509560 - RNA, 23 nt, Human
ccugugcaccuccgccuuuccca

SEQ ID NO: 509561 - RNA, 19 nt, Human
cgccucggccucccaauag

SEQ ID NO: 509562 - RNA, 19 nt, Human
cgccuguaaucccagccug

SEQ ID NO: 509563 - RNA, 24 nt, Human
cgguccagggcacuuucccagcgg

SEQ ID NO: 509564 - RNA, 23 nt, Human
cguagccccccuuuguggggugg

SEQ ID NO: 509565 - RNA, 23 nt, Human
cuaaaaccaaacauauaugcgug

SEQ ID NO: 509566 - RNA, 22 nt, Human
cuaagcccaggcuggggguuca

SEQ ID NO: 509567 - RNA, 22 nt, Human
cuacccaggaccccucaggcag

SEQ ID NO: 509568 - RNA, 18 nt, Human
cuagcccugugagccgcc

SEQ ID NO: 509569 - RNA, 21 nt, Human
cuaggccucccaaagugcugg

SEQ ID NO: 509570 - RNA, 20 nt, Human
cucacgccuguaaucccagc

SEQ ID NO: 509571 - RNA, 20 nt, Human
cucacgccuguaaucccagc

SEQ ID NO: 509572 - RNA, 24 nt, Human
cucacugcaagcucugccucccgg

SEQ ID NO: 509573 - RNA, 24 nt, Human
cucagccucccgaguagcugggac

SEQ ID NO: 509574 - RNA, 24 nt, Human
cuccauguuggucaggcugaucuu

SEQ ID NO: 509575 - RNA, 27 nt, Human
cucccagaagcugacgcugacacccag

SEQ ID NO: 509576 - RNA, 23 nt, Human
cucccagccccccugcacaacuc

SEQ ID NO: 509577 - RNA, 24 nt, Human
cuccccuccacccaccugauaccc

SEQ ID NO: 509578 - RNA, 24 nt, Human
cuccccuccacccaccugauaccu

SEQ ID NO: 509579 - RNA, 26 nt, Human
cuccugaccucaggugaucugcccgc

SEQ ID NO: 509580 - RNA, 24 nt, Human
cuccugacuuugugauccucccgc

SEQ ID NO: 509581 - RNA, 21 nt, Human
cuccugagcgucuccccucca

SEQ ID NO: 509582 - RNA, 18 nt, Human
cuccuuggggcugacugg

SEQ ID NO: 509583 - RNA, 20 nt, Human
cucugauggggccuuuguuc

SEQ ID NO: 509584 - RNA, 20 nt, Human
cucugucaaccaggcuggag

SEQ ID NO: 509585 - RNA, 23 nt, Human
cugacuuugugauccucccgccu

SEQ ID NO: 509586 - RNA, 18 nt, Human
cugaucacccaaaacaaa

SEQ ID NO: 509587 - RNA, 22 nt, Human
cugcacugggacaggaccacag

SEQ ID NO: 509588 - RNA, 19 nt, Human
cugcagcuccagccagcca

SEQ ID NO: 509589 - RNA, 23 nt, Human
cugccucagccucccgaguagcu

SEQ ID NO: 509590 - RNA, 18 nt, Human
cugcugcuuucuggaugg

SEQ ID NO: 509591 - RNA, 21 nt, Human
cugggccuggugcgccagcug

SEQ ID NO: 509592 - RNA, 24 nt, Human
cuugcucugucaaccaggcuggag

SEQ ID NO: 509593 - RNA, 21 nt, Human
cuuguuggucuccagcaggga

SEQ ID NO: 509594 - RNA, 21 nt, Human
gaaccugcaccuggaaucugg

SEQ ID NO: 509595 - RNA, 18 nt, Human
gaagaugggggguggcug

SEQ ID NO: 509596 - RNA, 24 nt, Human
gaaggaaagcuagacccuggggag

SEQ ID NO: 509597 - RNA, 19 nt, Human
gaaguccuucccgcaggcc

SEQ ID NO: 509598 - RNA, 18 nt, Human
gaaugaaugaaccaagcc

SEQ ID NO: 509599 - RNA, 22 nt, Human
gaccucaggugaucugcccgcc

SEQ ID NO: 509600 - RNA, 25 nt, Human
gacggagucuugcucugucaaccag

SEQ ID NO: 509601 - RNA, 24 nt, Human
gacuuugugauccucccgccucgg

SEQ ID NO: 509602 - RNA, 24 nt, Human
gagacgggguuucaccguguuagc

SEQ ID NO: 509603 - RNA, 20 nt, Human
gagacgggguuucuccaugu

SEQ ID NO: 509604 - RNA, 23 nt, Human
gagacgggguuucuccauguugg

SEQ ID NO: 509605 - RNA, 24 nt, Human
gagacgggguuucuccauguuggu

SEQ ID NO: 509606 - RNA, 25 nt, Human
gaguagcugggacuacaggcgcccg

SEQ ID NO: 509607 - RNA, 21 nt, Human
gagucucaguucugaucaccc

SEQ ID NO: 509608 - RNA, 18 nt, Human
gauccucccgccucggcc

SEQ ID NO: 509609 - RNA, 18 nt, Human
gauuacaggcguaagcca

SEQ ID NO: 509610 - RNA, 21 nt, Human
gauuacaggcguaagccacug

SEQ ID NO: 509611 - RNA, 24 nt, Human
gauuacaggcguaagccacugugc

SEQ ID NO: 509612 - RNA, 20 nt, Human
gcacaacucucaaagugacc

SEQ ID NO: 509613 - RNA, 18 nt, Human
gcagcaggaagaaggaaa

SEQ ID NO: 509614 - RNA, 24 nt, Human
gcccagcuaauuuuuuuguauuuu

SEQ ID NO: 509615 - RNA, 21 nt, Human
gcccagcucacacgugcugcu

SEQ ID NO: 509616 - RNA, 24 nt, Human
gccccuccuacccaggaccccuca

SEQ ID NO: 509617 - RNA, 21 nt, Human
gccgcagggaagccgccagga

SEQ ID NO: 509618 - RNA, 25 nt, Human
gccucccggguucacuccauucucc

SEQ ID NO: 509619 - RNA, 22 nt, Human
gccuguggucccacgugaacac

SEQ ID NO: 509620 - RNA, 21 nt, Human
gcuaaaaagcaggagggacug

SEQ ID NO: 509621 - RNA, 21 nt, Human
gcucacugcaagcucugccuc

SEQ ID NO: 509622 - RNA, 23 nt, Human
gcugaucuugaacuccugaccuc

SEQ ID NO: 509623 - RNA, 19 nt, Human
gcuggagugcaguggcacg

SEQ ID NO: 509624 - RNA, 19 nt, Human
ggagggaagggcugguguu

SEQ ID NO: 509625 - RNA, 20 nt, Human
ggaggugcuaagaaccugca

SEQ ID NO: 509626 - RNA, 20 nt, Human
ggaugcggacgcaguucacc

SEQ ID NO: 509627 - RNA, 24 nt, Human
ggauggucucgaucuccugacuuu

SEQ ID NO: 509628 - RNA, 24 nt, Human
ggauuacaggcguaagccacugug

SEQ ID NO: 509629 - RNA, 21 nt, Human
ggcacaggaccaccacagaug

SEQ ID NO: 509630 - RNA, 19 nt, Human
ggcaggucagcugcacgga

SEQ ID NO: 509631 - RNA, 18 nt, Human
ggcccagcucacacgugc

SEQ ID NO: 509632 - RNA, 21 nt, Human
ggccgggugcaguggcucacg

SEQ ID NO: 509633 - RNA, 18 nt, Human
ggccuggugcgccagcug

SEQ ID NO: 509634 - RNA, 24 nt, Human
ggcugaucuugaacuccugaccuc

SEQ ID NO: 509635 - RNA, 23 nt, Human
gggaagggcugguguuaggggua

SEQ ID NO: 509636 - RNA, 20 nt, Human
gggacaggguggagcugcca

SEQ ID NO: 509637 - RNA, 20 nt, Human
gggcuggagggcaggucagc

SEQ ID NO: 509638 - RNA, 22 nt, Human
gggggguggcugggauggucug

SEQ ID NO: 509639 - RNA, 20 nt, Human
gggguggggggacagggugg

SEQ ID NO: 509640 - RNA, 23 nt, Human
gggguuucaccguguuagccagg

SEQ ID NO: 509641 - RNA, 23 nt, Human
gggguuucuccauguuggucagg

SEQ ID NO: 509642 - RNA, 24 nt, Human
gggugcaguggcucacgccuguaa

SEQ ID NO: 509643 - RNA, 22 nt, Human
ggguuucaccguguuagccagg

SEQ ID NO: 509644 - RNA, 22 nt, Human
ggguuucuccauguuggucagg

SEQ ID NO: 509645 - RNA, 23 nt, Human
guagagacgggguuucaccgugu

SEQ ID NO: 509646 - RNA, 22 nt, Human
guauccuccuccuccuccucca

SEQ ID NO: 509647 - RNA, 19 nt, Human
gucaaccaggcuggagugc

SEQ ID NO: 509648 - RNA, 24 nt, Human
gucuggggucccacauacauguuc

SEQ ID NO: 509649 - RNA, 24 nt, Human
gugauccucccgccucggccuccc

SEQ ID NO: 509650 - RNA, 23 nt, Human
guggggccugggggcagguguuc

SEQ ID NO: 509651 - RNA, 24 nt, Human
uacaggcgcccgccaccacgccca

SEQ ID NO: 509652 - RNA, 23 nt, Human
uacaggcguaagccacugugccc

SEQ ID NO: 509653 - RNA, 21 nt, Human
uacauacaggacagaaaugua

SEQ ID NO: 509654 - RNA, 22 nt, Human
uacccaggaccccucaggcagc

SEQ ID NO: 509655 - RNA, 24 nt, Human
uacccaggaccccucaggcagcac

SEQ ID NO: 509656 - RNA, 21 nt, Human
uaguagagacgggguuucacc

SEQ ID NO: 509657 - RNA, 24 nt, Human
uaguagagacgggguuucaccgug

SEQ ID NO: 509658 - RNA, 26 nt, Human
uaguagagacgggguuucaccguguu

SEQ ID NO: 509659 - RNA, 26 nt, Human
uaguagagacgggguuucaccguugg

SEQ ID NO: 509660 - RNA, 27 nt, Human
uauaacccuggauacauacaggacaga

SEQ ID NO: 509661 - RNA, 24 nt, Human
ucaccguguuagccaggauggucu

SEQ ID NO: 509662 - RNA, 22 nt, Human
ucacgccuguaaucccagccug

SEQ ID NO: 509663 - RNA, 25 nt, Human
ucacuccauucuccugccucagccu

SEQ ID NO: 509664 - RNA, 18 nt, Human
ucacugcaagcucugccu

SEQ ID NO: 509665 - RNA, 18 nt, Human
ucacugcaagcucugccu

SEQ ID NO: 509666 - RNA, 24 nt, Human
ucacugcaagcucugccucccggg

SEQ ID NO: 509667 - RNA, 20 nt, Human
ucagccccugggggcccauc

SEQ ID NO: 509668 - RNA, 23 nt, Human
ucagccucccgaguagcugggac

SEQ ID NO: 509669 - RNA, 24 nt, Human
uccauguuggucaggcugaucuug

SEQ ID NO: 509670 - RNA, 24 nt, Human
ucccaaagugcugggauuacaggc

SEQ ID NO: 509671 - RNA, 23 nt, Human
ucccagaagcugacgcugacacc

SEQ ID NO: 509672 - RNA, 24 nt, Human
ucccgaguagcugggacuacaggc

SEQ ID NO: 509673 - RNA, 21 nt, Human
ucccggguucacuccauucuc

SEQ ID NO: 509674 - RNA, 24 nt, Human
ucccggguucacuccauucuccug

SEQ ID NO: 509675 - RNA, 22 nt, Human
uccucagccccugggggcccau

SEQ ID NO: 509676 - RNA, 18 nt, Human
uccuccuccagcugcugc

SEQ ID NO: 509677 - RNA, 23 nt, Human
uccugccccuaguccugggcugg

SEQ ID NO: 509678 - RNA, 21 nt, Human
uccuucccgcaggccucgcag

SEQ ID NO: 509679 - RNA, 20 nt, Human
uccuuggggcugacuggcgu

SEQ ID NO: 509680 - RNA, 22 nt, Human
uccuuggggcugacuggcguau

SEQ ID NO: 509681 - RNA, 20 nt, Human
ucuagcccugugagccgccg

SEQ ID NO: 509682 - RNA, 24 nt, Human
ucuccugccucagccucccgagua

SEQ ID NO: 509683 - RNA, 22 nt, Human
ucucugggauggacacaaguuc

SEQ ID NO: 509684 - RNA, 26 nt, Human
ucugcacugggacaggaccacagggc

SEQ ID NO: 509685 - RNA, 19 nt, Human
ucugucaaccaggcuggag

SEQ ID NO: 509686 - RNA, 24 nt, Human
ucugucaaccaggcuggagugcag

SEQ ID NO: 509687 - RNA, 23 nt, Human
ucuugaacuccugaccucaggug

SEQ ID NO: 509688 - RNA, 23 nt, Human
ucuugcucugucaaccaggcugg

SEQ ID NO: 509689 - RNA, 24 nt, Human
ucuugcucugucaaccaggcugga

SEQ ID NO: 509690 - RNA, 23 nt, Human
ugacacaaaggguaccucaugac

SEQ ID NO: 509691 - RNA, 20 nt, Human
ugacccagguggaugggcaa

SEQ ID NO: 509692 - RNA, 18 nt, Human
ugaccucaggugaucugc

SEQ ID NO: 509693 - RNA, 20 nt, Human
ugaccucaggugaucugccc

SEQ ID NO: 509694 - RNA, 24 nt, Human
ugaccucaggugaucugcccgccu

SEQ ID NO: 509695 - RNA, 19 nt, Human
ugacugcguagccccccuu

SEQ ID NO: 509696 - RNA, 19 nt, Human
ugacuggcguauccuccuc

SEQ ID NO: 509697 - RNA, 22 nt, Human
ugacuuugugauccucccgccu

SEQ ID NO: 509698 - RNA, 22 nt, Human
ugagacggagucuugcucuguc

SEQ ID NO: 509699 - RNA, 18 nt, Human
ugagcaaccaugcccggc

SEQ ID NO: 509700 - RNA, 20 nt, Human
ugagcaaccaugcccggcuc

SEQ ID NO: 509701 - RNA, 20 nt, Human
ugagcuggugacacaaaggg

SEQ ID NO: 509702 - RNA, 23 nt, Human
ugcaccuccgccuuucccaccuc

SEQ ID NO: 509703 - RNA, 20 nt, Human
ugcaccuggaaucuggagac

SEQ ID NO: 509704 - RNA, 20 nt, Human
ugcagagggagggaagggcu

SEQ ID NO: 509705 - RNA, 21 nt, Human
ugcaggccacagugggggcag

SEQ ID NO: 509706 - RNA, 24 nt, Human
ugcagugaucucugggauggacac

SEQ ID NO: 509707 - RNA, 23 nt, Human
ugccccuaguccugggcuggagg

SEQ ID NO: 509708 - RNA, 24 nt, Human
ugccucagccucccgaguagcugg

SEQ ID NO: 509709 - RNA, 23 nt, Human
ugcgccagcugccgguccagggc

SEQ ID NO: 509710 - RNA, 24 nt, Human
ugcugggauuacaggcguaagcca

SEQ ID NO: 509711 - RNA, 18 nt, Human
uggaacagaaugaaugaa

SEQ ID NO: 509712 - RNA, 23 nt, Human
uggagugcaguggcacgaucuug

SEQ ID NO: 509713 - RNA, 24 nt, Human
uggagugcaguggcacgaucuugg

SEQ ID NO: 509714 - RNA, 19 nt, Human
uggcccagcucacacgugc

SEQ ID NO: 509715 - RNA, 23 nt, Human
uggcccagcucacacgugcugcu

SEQ ID NO: 509716 - RNA, 25 nt, Human
uggcccagcucacacgugcugcuuc

SEQ ID NO: 509717 - RNA, 21 nt, Human
uggcucacgccuguaauccca

SEQ ID NO: 509718 - RNA, 22 nt, Human
uggcucacgccuguaaucccag

SEQ ID NO: 509719 - RNA, 19 nt, Human
uggcucacugcaagcucug

SEQ ID NO: 509720 - RNA, 19 nt, Human
ugggacaggaccacagggc

SEQ ID NO: 509721 - RNA, 21 nt, Human
ugggacuacaggcgcccgcca

SEQ ID NO: 509722 - RNA, 22 nt, Human
ugggacuacaggcgcccgccac

SEQ ID NO: 509723 - RNA, 24 nt, Human
ugggacuacaggcgcccgccacca

SEQ ID NO: 509724 - RNA, 21 nt, Human
ugggauuacaggcguaagcca

SEQ ID NO: 509725 - RNA, 22 nt, Human
ugggauuacaggcguaagccac

SEQ ID NO: 509726 - RNA, 22 nt, Human
ugggauuacaggcguaagccac

SEQ ID NO: 509727 - RNA, 22 nt, Human
ugggauuacaggcguaagccac

SEQ ID NO: 509728 - RNA, 24 nt, Human
ugggauuacaggcguaagccacug

SEQ ID NO: 509729 - RNA, 26 nt, Human
ugggauuacaggcguaagccacugug

SEQ ID NO: 509730 - RNA, 19 nt, Human
ugggccuggugcgccagcu

SEQ ID NO: 509731 - RNA, 20 nt, Human
ugggcuggagggcaggucag

SEQ ID NO: 509732 - RNA, 22 nt, Human
uggggaggacuaacaaggcagc

SEQ ID NO: 509733 - RNA, 23 nt, Human
uggggccugggggcagguguucu

SEQ ID NO: 509734 - RNA, 21 nt, Human
ugggggcccauccuguggggc

SEQ ID NO: 509735 - RNA, 18 nt, Human
ugggguggggggacaggg

SEQ ID NO: 509736 - RNA, 24 nt, Human
uggucaggcugaucuugaacuccu

SEQ ID NO: 509737 - RNA, 21 nt, Human
uguauuuuuaguagagacggg

SEQ ID NO: 509738 - RNA, 18 nt, Human
uuaguagagacgggguuu

SEQ ID NO: 509739 - RNA, 22 nt, Human
uuaguagagacgggguuucacc

SEQ ID NO: 509740 - RNA, 24 nt, Human
uuaguagagacgggguuucaccgu

SEQ ID NO: 509741 - RNA, 18 nt, Human
uucauggaacagaaugaa

SEQ ID NO: 509742 - RNA, 25 nt, Human
uucugcagagggagggaagggcugg

SEQ ID NO: 509743 - RNA, 23 nt, Human
uuguauuuuuaguagagacgggg

SEQ ID NO: 509744 - RNA, 19 nt, Human
uuuauucacaauccgugcu

SEQ ID NO: 509745 - RNA, 19 nt, Human
uuucaccguguuagccagg

SEQ ID NO: 509746 - RNA, 21 nt, Human
uuucuccauguuggucaggcu

SEQ ID NO: 509747 - RNA, 27 nt, Human
uuugugauccucccgccucggccuccc

SEQ ID NO: 509748 - RNA, 24 nt, Human
uuuuuaguagagacgggguuucac

SEQ ID NO: 509749 - RNA, 21 nt, Human
uuuuuguauuuuuaguagaga

SEQ ID NO: 509750 - RNA, 21 nt, Human
uuuuuuguauuuuuaguagag

SEQ ID NO: 509751 - RNA, 24 nt, Human
uuuuuuguauuuuuaguagagacg

SEQ ID NO: 509752 - RNA, 19 nt, Human
aaaaaaacaaauacaccag

SEQ ID NO: 509753 - RNA, 26 nt, Human
aaaacaaauacaccagugauguuccu

SEQ ID NO: 509754 - RNA, 25 nt, Human
aaacaaauacaccagugauguuccu

SEQ ID NO: 509755 - RNA, 22 nt, Human
aacaaaaaaacaaauacaccag

SEQ ID NO: 509756 - RNA, 20 nt, Human
aagaacccaagcaaacaaac

SEQ ID NO: 509757 - RNA, 21 nt, Human
aagcaaacaaacaaaaaaaca

SEQ ID NO: 509758 - RNA, 19 nt, Human
aagcaaagccagcccagca

SEQ ID NO: 509759 - RNA, 25 nt, Human
acccaagcaaacaaacaaaaaaaca

SEQ ID NO: 509760 - RNA, 22 nt, Human
agagcaaccaaacauuccacag

SEQ ID NO: 509761 - RNA, 22 nt, Human
agcaaagccagcccagcaaacc

SEQ ID NO: 509762 - RNA, 21 nt, Human
agcagcccuggggcaacaaaa

SEQ ID NO: 509763 - RNA, 18 nt, Human
agcagggaaagcaaagcc

SEQ ID NO: 509764 - RNA, 19 nt, Human
agccaacucccacucugcc

SEQ ID NO: 509765 - RNA, 21 nt, Human
agccaacucccacucugcccg

SEQ ID NO: 509766 - RNA, 19 nt, Human
agcgggaagaaaggacuaa

SEQ ID NO: 509767 - RNA, 21 nt, Human
auaaacagggacaagggcuga

SEQ ID NO: 509768 - RNA, 18 nt, Human
caaaaccagugccugcug

SEQ ID NO: 509769 - RNA, 22 nt, Human
caaagccagcccagcaaacccc

SEQ ID NO: 509770 - RNA, 22 nt, Human
cagcaaagcagcccuggggcaa

SEQ ID NO: 509771 - RNA, 18 nt, Human
cagcauggaggagaggac

SEQ ID NO: 509772 - RNA, 18 nt, Human
cagcccagcaaacccucu

SEQ ID NO: 509773 - RNA, 24 nt, Human
cagcgggaagaaaggacuaaugaa

SEQ ID NO: 509774 - RNA, 22 nt, Human
cagcucaccccaccugggacca

SEQ ID NO: 509775 - RNA, 20 nt, Human
cagcuguagcugugggcucc

SEQ ID NO: 509776 - RNA, 19 nt, Human
caggacugcaugccugcug

SEQ ID NO: 509777 - RNA, 24 nt, Human
ccaacucccacucugcccgcugca

SEQ ID NO: 509778 - RNA, 19 nt, Human
ccagcaaggaugcaaaugc

SEQ ID NO: 509779 - RNA, 21 nt, Human
ccagcagggaaagcaaagcca

SEQ ID NO: 509780 - RNA, 19 nt, Human
ccagugccugcuggaagaa

SEQ ID NO: 509781 - RNA, 22 nt, Human
cccaagcaaacaaacaaaaaaa

SEQ ID NO: 509782 - RNA, 24 nt, Human
cccaagcaaacaaacaaaaaaaca

SEQ ID NO: 509783 - RNA, 27 nt, Human
cccaagcaaacaaacaaaaaggaguuc

SEQ ID NO: 509784 - RNA, 20 nt, Human
cccugugggaucugagcuga

SEQ ID NO: 509785 - RNA, 21 nt, Human
ccugcagcuguagcugugggc

SEQ ID NO: 509786 - RNA, 19 nt, Human
cucccacucugcccgcugc

SEQ ID NO: 509787 - RNA, 23 nt, Human
cuccugagugcucagcuagcgug

SEQ ID NO: 509788 - RNA, 19 nt, Human
cucucugucaaucaccaau

SEQ ID NO: 509789 - RNA, 19 nt, Human
cugcagauaaacagggaca

SEQ ID NO: 509790 - RNA, 19 nt, Human
cugcuaacacaaaacagcg

SEQ ID NO: 509791 - RNA, 24 nt, Human
cugcuggaagaacuguccccacgg

SEQ ID NO: 509792 - RNA, 20 nt, Human
cuugcaagucuccuggcugc

SEQ ID NO: 509793 - RNA, 23 nt, Human
gacgccagcagucccugcagcug

SEQ ID NO: 509794 - RNA, 21 nt, Human
gaggacgccagcagucccugc

SEQ ID NO: 509795 - RNA, 18 nt, Human
gcaagucuccuggcugca

SEQ ID NO: 509796 - RNA, 23 nt, Human
gcacaaaguccuccaggauccca

SEQ ID NO: 509797 - RNA, 23 nt, Human
gccagcucaccccaccugggacc

SEQ ID NO: 509798 - RNA, 21 nt, Human
gccugcuggaaguggcaugcu

SEQ ID NO: 509799 - RNA, 22 nt, Human
gcuaaagaggaggcccuguggg

SEQ ID NO: 509800 - RNA, 25 nt, Human
gcugcagauaaacagggacaagggc

SEQ ID NO: 509801 - RNA, 23 nt, Human
gcugcagcacagaaggaugccug

SEQ ID NO: 509802 - RNA, 19 nt, Human
ggaaagcaaagccagccca

SEQ ID NO: 509803 - RNA, 19 nt, Human
ggcaugcuggguuagugag

SEQ ID NO: 509804 - RNA, 24 nt, Human
guccaccccacaugguguuuuggc

SEQ ID NO: 509805 - RNA, 20 nt, Human
guguuuuggccuucaguggc

SEQ ID NO: 509806 - RNA, 18 nt, Human
uaaaggucauugaaacag

SEQ ID NO: 509807 - RNA, 20 nt, Human
uaacacaaaacagcgcacga

SEQ ID NO: 509808 - RNA, 21 nt, Human
uaacacagcuguggccccagc

SEQ ID NO: 509809 - RNA, 22 nt, Human
uaagccuaccugugaaacacaa

SEQ ID NO: 509810 - RNA, 24 nt, Human
ucaccaaucccuugcaagucuccu

SEQ ID NO: 509811 - RNA, 20 nt, Human
ucauugaaacaguaaggggg

SEQ ID NO: 509812 - RNA, 18 nt, Human
ucccauagagcugggcca

SEQ ID NO: 509813 - RNA, 18 nt, Human
ugaaaugcaaucaucauc

SEQ ID NO: 509814 - RNA, 20 nt, Human
ugaacaggccgcagcccacu

SEQ ID NO: 509815 - RNA, 22 nt, Human
ugaugaacucuccugagugcuc

SEQ ID NO: 509816 - RNA, 21 nt, Human
ugcaagaacccaagcaaacaa

SEQ ID NO: 509817 - RNA, 26 nt, Human
ugcaagaacccaagcaaacaaacaaa

SEQ ID NO: 509818 - RNA, 19 nt, Human
ugcacaaaguccuccagga

SEQ ID NO: 509819 - RNA, 21 nt, Human
ugcuggaagaacuguccccac

SEQ ID NO: 509820 - RNA, 18 nt, Human
uggaagaacuguccccac

SEQ ID NO: 509821 - RNA, 19 nt, Human
uggcaccaggaccuggcac

SEQ ID NO: 509822 - RNA, 19 nt, Human
uggcaccaggaccuggcac

SEQ ID NO: 509823 - RNA, 19 nt, Human
ugggaccaggggcagcagc

SEQ ID NO: 509824 - RNA, 24 nt, Human
ugggaccaggggcagcagcaugga

SEQ ID NO: 509825 - RNA, 21 nt, Human
ugggcagcgggaagaaaggac

SEQ ID NO: 509826 - RNA, 19 nt, Human
uguuuuggccuucaguggc

SEQ ID NO: 509827 - RNA, 23 nt, Human
uuagggcauccaaacuguuguga

SEQ ID NO: 509828 - RNA, 19 nt, Human
uuugggagacccugugccc

SEQ ID NO: 509829 - RNA, 20 nt, Human
uuuuuuuuuuuuuugggagg

SEQ ID NO: 509830 - RNA, 22 nt, Human
uuuuuuuuuuuuuuugggaggg

SEQ ID NO: 509831 - RNA, 20 nt, Human
aaacaaugaugaagaauggc

SEQ ID NO: 509832 - RNA, 24 nt, Human
aacaaugaugaagaauggcuguca

SEQ ID NO: 509833 - RNA, 19 nt, Human
auauauauauauauauaua

SEQ ID NO: 509834 - RNA, 19 nt, Human
auauauauauauauauaua

SEQ ID NO: 509835 - RNA, 25 nt, Human
caacccgucagaaccagcaaccgcu

SEQ ID NO: 509836 - RNA, 18 nt, Human
cagaaccagcaaccgcug

SEQ ID NO: 509837 - RNA, 22 nt, Human
ccacagcagaguauaugaucag

SEQ ID NO: 509838 - RNA, 20 nt, Human
cccaggguuuggcauccagc

SEQ ID NO: 509839 - RNA, 25 nt, Human
cugaaggcuucuaccuuacacauga

SEQ ID NO: 509840 - RNA, 27 nt, Human
cuuuucagaccaccccugaaaagcugg

SEQ ID NO: 509841 - RNA, 22 nt, Human
gaaccagcaaccgcuggaaaug

SEQ ID NO: 509842 - RNA, 18 nt, Human
gagauuuaacauuguaca

SEQ ID NO: 509843 - RNA, 19 nt, Human
guauauauauauauauaua

SEQ ID NO: 509844 - RNA, 19 nt, Human
uauauauauauauauauau

SEQ ID NO: 509845 - RNA, 19 nt, Human
uauauauauauauauauau

SEQ ID NO: 509846 - RNA, 21 nt, Human
uaugguauauauauauauaua

SEQ ID NO: 509847 - RNA, 23 nt, Human
ugcacauuaagucuuuacuaccu

SEQ ID NO: 509848 - RNA, 24 nt, Human
uggcguccgggcccggaagccccu

SEQ ID NO: 509849 - RNA, 20 nt, Human
uggcuuuucagaccaccccu

SEQ ID NO: 509850 - RNA, 18 nt, Human
ugguauauauauauauau

SEQ ID NO: 509851 - RNA, 23 nt, Human
ugguauauauauauauauauaua

SEQ ID NO: 509852 - RNA, 23 nt, Human
uuuuaugguauauauauauauau

SEQ ID NO: 509853 - RNA, 19 nt, Human
aagaauugcaggaaggagg

SEQ ID NO: 509854 - RNA, 25 nt, Human
accccacccucccccucccaccuca

SEQ ID NO: 509855 - RNA, 24 nt, Human
accgaagccgcagaagcaaagcca

SEQ ID NO: 509856 - RNA, 23 nt, Human
accuaccccacccucccccuccc

SEQ ID NO: 509857 - RNA, 27 nt, Human
accuaccccacccucccccucccaccu

SEQ ID NO: 509858 - RNA, 20 nt, Human
accucagccacagaggaaca

SEQ ID NO: 509859 - RNA, 21 nt, Human
accucagccacagaggaacaa

SEQ ID NO: 509860 - RNA, 22 nt, Human
acucccuguugccauaacacag

SEQ ID NO: 509861 - RNA, 18 nt, Human
agaacagcguccagcacg

SEQ ID NO: 509862 - RNA, 28 nt, Human
agaagcaaagccaggagcagaauccauu

SEQ ID NO: 509863 - RNA, 22 nt, Human
agcccuccaguccccaaaccag

SEQ ID NO: 509864 - RNA, 24 nt, Human
agccgcagaagcaaagccaggagc

SEQ ID NO: 509865 - RNA, 19 nt, Human
aggccagggcugggcagcc

SEQ ID NO: 509866 - RNA, 18 nt, Human
aggcguuggcggccaccc

SEQ ID NO: 509867 - RNA, 19 nt, Human
aggcguuggcggccacccu

SEQ ID NO: 509868 - RNA, 24 nt, Human
augagaugcccacucccuguugcc

SEQ ID NO: 509869 - RNA, 21 nt, Human
auggcagcggugaccaagcac

SEQ ID NO: 509870 - RNA, 22 nt, Human
caaagagcacacugaacagaac

SEQ ID NO: 509871 - RNA, 21 nt, Human
caagaaggcauggagccuggg

SEQ ID NO: 509872 - RNA, 18 nt, Human
cacacugaacagaacagc

SEQ ID NO: 509873 - RNA, 24 nt, Human
caccauauaauaaacaguucaaaa

SEQ ID NO: 509874 - RNA, 21 nt, Human
caccauggaggacagaaggca

SEQ ID NO: 509875 - RNA, 18 nt, Human
cacccucccccucccacc

SEQ ID NO: 509876 - RNA, 20 nt, Human
caccucagccacagaggaac

SEQ ID NO: 509877 - RNA, 22 nt, Human
caccucagccacagaggaacaa

SEQ ID NO: 509878 - RNA, 22 nt, Human
cagaacagcguccagcacguga

SEQ ID NO: 509879 - RNA, 23 nt, Human
cagaauccauucugccagcgcug

SEQ ID NO: 509880 - RNA, 22 nt, Human
caggagcagaauccauucugcc

SEQ ID NO: 509881 - RNA, 24 nt, Human
caggagcagaauccauucugccag

SEQ ID NO: 509882 - RNA, 25 nt, Human
caggcagaugagaugcccacucccu

SEQ ID NO: 509883 - RNA, 19 nt, Human
caguggacagugguggggg

SEQ ID NO: 509884 - RNA, 18 nt, Human
ccacccucccaagaaggc

SEQ ID NO: 509885 - RNA, 22 nt, Human
ccaccgaagccgcagaagcaaa

SEQ ID NO: 509886 - RNA, 24 nt, Human
ccacgugccuccucggccuucugg

SEQ ID NO: 509887 - RNA, 20 nt, Human
ccaggcuuucucgauaucgg

SEQ ID NO: 509888 - RNA, 23 nt, Human
cccaaaccaguccucggcccugc

SEQ ID NO: 509889 - RNA, 25 nt, Human
cccagcccagcuaggcgcauccucu

SEQ ID NO: 509890 - RNA, 18 nt, Human
ccccacccucccccuccc

SEQ ID NO: 509891 - RNA, 19 nt, Human
ccccacccucccccuccca

SEQ ID NO: 509892 - RNA, 21 nt, Human
ccccucccaccucagccacag

SEQ ID NO: 509893 - RNA, 26 nt, Human
cccucccaccucagccacagaggaac

SEQ ID NO: 509894 - RNA, 19 nt, Human
cccucccccucccaccuca

SEQ ID NO: 509895 - RNA, 22 nt, Human
cccucccccucccaccucagcc

SEQ ID NO: 509896 - RNA, 18 nt, Human
cccugacucuggagaggg

SEQ ID NO: 509897 - RNA, 30 nt, Human
ccucaccauggaggacagaaggcaggggcu

SEQ ID NO: 509898 - RNA, 24 nt, Human
ccucccgacuccuugguccugccu

SEQ ID NO: 509899 - RNA, 24 nt, Human
ccuccucggccuucuggcagggcg

SEQ ID NO: 509900 - RNA, 26 nt, Human
cgaagccgcagaagcaaagccaggag

SEQ ID NO: 509901 - RNA, 19 nt, Human
cgacuccuugguccugccu

SEQ ID NO: 509902 - RNA, 31 nt, Human
cuccaguccccaaaccaguccucggcccugg

SEQ ID NO: 509903 - RNA, 19 nt, Human
cucccccucccaccucagc

SEQ ID NO: 509904 - RNA, 18 nt, Human
cucccugacucuggagag

SEQ ID NO: 509905 - RNA, 20 nt, Human
cugcaguccccguucaaggc

SEQ ID NO: 509906 - RNA, 25 nt, Human
cugccagcccuccaguccccaaacc

SEQ ID NO: 509907 - RNA, 20 nt, Human
gacagugguggggggccagg

SEQ ID NO: 509908 - RNA, 20 nt, Human
gacugcagagaucuccagcc

SEQ ID NO: 509909 - RNA, 23 nt, Human
gagagcugaccacaggcagauga

SEQ ID NO: 509910 - RNA, 22 nt, Human
gcagcggugaccaagcacagcc

SEQ ID NO: 509911 - RNA, 21 nt, Human
gccagggcugggcagcccucc

SEQ ID NO: 509912 - RNA, 20 nt, Human
gccagguuucuggucagugg

SEQ ID NO: 509913 - RNA, 21 nt, Human
gcccugcagccagguuucugg

SEQ ID NO: 509914 - RNA, 19 nt, Human
gcugccagcccuccagucc

SEQ ID NO: 509915 - RNA, 20 nt, Human
ggaggcccuccacgugccuu

SEQ ID NO: 509916 - RNA, 21 nt, Human
ggggccucccgacuccuuggu

SEQ ID NO: 509917 - RNA, 18 nt, Human
ggucaguggacaguggug

SEQ ID NO: 509918 - RNA, 18 nt, Human
ggugaccaagcacagcca

SEQ ID NO: 509919 - RNA, 22 nt, Human
uaccccacccucccccucccac

SEQ ID NO: 509920 - RNA, 28 nt, Human
uaccccacccucccccucccaccucagc

SEQ ID NO: 509921 - RNA, 21 nt, Human
uaggcgcauccucugcggcau

SEQ ID NO: 509922 - RNA, 23 nt, Human
ucaguggacagugguggggggcc

SEQ ID NO: 509923 - RNA, 23 nt, Human
uccauaacugucuccaccgaagc

SEQ ID NO: 509924 - RNA, 18 nt, Human
ucccaagaaggcauggag

SEQ ID NO: 509925 - RNA, 22 nt, Human
uccccaaaccaguccucggccc

SEQ ID NO: 509926 - RNA, 24 nt, Human
ucugagagcugaccacaggcagau

SEQ ID NO: 509927 - RNA, 22 nt, Human
ugagaugaaaucaucauccacc

SEQ ID NO: 509928 - RNA, 27 nt, Human
ugcaaggaacauuuuauuccauaaaau

SEQ ID NO: 509929 - RNA, 24 nt, Human
uggagccugggggcccccagccag

SEQ ID NO: 509930 - RNA, 20 nt, Human
uggaggacagaaggcagggg

SEQ ID NO: 509931 - RNA, 25 nt, Human
uggggagacaucugugcccucacca

SEQ ID NO: 509932 - RNA, 23 nt, Human
ugggggcccccagccaggccccu

SEQ ID NO: 509933 - RNA, 21 nt, Human
uuuuuuuuuuuugcaaggaac

SEQ ID NO: 509934 - RNA, 21 nt, Human
uuuuuuuuuuuuuugcaagga

SEQ ID NO: 509935 - RNA, 21 nt, Human
uuuuuuuuuuuuuuuuugcaa

SEQ ID NO: 509936 - RNA, 20 nt, Human
uuuuuuuuuuuuuuuuuugg

SEQ ID NO: 509937 - RNA, 19 nt, Human
acaaacaccuccaugggcu

SEQ ID NO: 509938 - RNA, 20 nt, Human
acauccaagagaucaaagag

SEQ ID NO: 509939 - RNA, 19 nt, Human
aggcuggggugcaggagaa

SEQ ID NO: 509940 - RNA, 25 nt, Human
agggaggugggaggggcgggcaggg

SEQ ID NO: 509941 - RNA, 21 nt, Human
aggugggaggggcgggcaggg

SEQ ID NO: 509942 - RNA, 23 nt, Human
agguguccgaguccucaggcaug

SEQ ID NO: 509943 - RNA, 24 nt, Human
aucucgccugcccagaaccuucca

SEQ ID NO: 509944 - RNA, 22 nt, Human
auggccgggaaguucugcucca

SEQ ID NO: 509945 - RNA, 19 nt, Human
caccgcuccuccugggcca

SEQ ID NO: 509946 - RNA, 21 nt, Human
caccgcuccuccugggccaug

SEQ ID NO: 509947 - RNA, 27 nt, Human
cagcgugagcuuggucucgucguccac

SEQ ID NO: 509948 - RNA, 26 nt, Human
cauuaacuucaaaccgguccuggacg

SEQ ID NO: 509949 - RNA, 19 nt, Human
ccaugggcugugugggaag

SEQ ID NO: 509950 - RNA, 20 nt, Human
ccuccaugggcuguguggga

SEQ ID NO: 509951 - RNA, 22 nt, Human
cgcccgggccacccggugcagg

SEQ ID NO: 509952 - RNA, 23 nt, Human
cgggcgcucagacacgaguugcu

SEQ ID NO: 509953 - RNA, 24 nt, Human
cgugagcuuggucucgucguccac

SEQ ID NO: 509954 - RNA, 19 nt, Human
cucgcacucaccgcuccuc

SEQ ID NO: 509955 - RNA, 22 nt, Human
cucgcacucaccgcuccuccug

SEQ ID NO: 509956 - RNA, 22 nt, Human
cuggaaauccuugaacugcuga

SEQ ID NO: 509957 - RNA, 21 nt, Human
cuucucaacaguggcgccugg

SEQ ID NO: 509958 - RNA, 21 nt, Human
cuucucaacaguggcgccugg

SEQ ID NO: 509959 - RNA, 24 nt, Human
cuucucacugucuuugaguuugac

SEQ ID NO: 509960 - RNA, 19 nt, Human
gaaauccuugaacugcuga

SEQ ID NO: 509961 - RNA, 19 nt, Human
gaagggaggugggaggggc

SEQ ID NO: 509962 - RNA, 21 nt, Human
gaaguucugccacauuaacuu

SEQ ID NO: 509963 - RNA, 21 nt, Human
gccuggaaaggggaggugaag

SEQ ID NO: 509964 - RNA, 21 nt, Human
gccuggaaaggggaggugaag

SEQ ID NO: 509965 - RNA, 18 nt, Human
gcuccgggugggcggcuc

SEQ ID NO: 509966 - RNA, 18 nt, Human
gcuccgggugggcggcuc

SEQ ID NO: 509967 - RNA, 21 nt, Human
ggaaguucugcuccacgagga

SEQ ID NO: 509968 - RNA, 23 nt, Human
ggaggugggaggggcgggcaggg

SEQ ID NO: 509969 - RNA, 21 nt, Human
ggcgacuccuuugugcgacac

SEQ ID NO: 509970 - RNA, 22 nt, Human
ggcugugugggaagggaggugg

SEQ ID NO: 509971 - RNA, 24 nt, Human
gggaagggaggugggaggggcggg

SEQ ID NO: 509972 - RNA, 20 nt, Human
gggaggugggaggggcgggc

SEQ ID NO: 509973 - RNA, 24 nt, Human
gggccagggccaugcagcgcugca

SEQ ID NO: 509974 - RNA, 25 nt, Human
gguggauggcgauggccgggaaguu

SEQ ID NO: 509975 - RNA, 21 nt, Human
guggauggcgauggccgggaa

SEQ ID NO: 509976 - RNA, 23 nt, Human
guggugcucccugcagccuuggc

SEQ ID NO: 509977 - RNA, 21 nt, Human
ucagacacgaguugcugcgcu

SEQ ID NO: 509978 - RNA, 18 nt, Human
uccaagagaucaaagagc

SEQ ID NO: 509979 - RNA, 22 nt, Human
uccacaaacaccuccaugggcu

SEQ ID NO: 509980 - RNA, 24 nt, Human
uccaugggcugugugggaagggag

SEQ ID NO: 509981 - RNA, 21 nt, Human
ucccagaggaccugcugcacc

SEQ ID NO: 509982 - RNA, 18 nt, Human
ucccugcagccuuggcgg

SEQ ID NO: 509983 - RNA, 19 nt, Human
ucccugcagccuuggcggg

SEQ ID NO: 509984 - RNA, 20 nt, Human
uccgggugggcggcucuggc

SEQ ID NO: 509985 - RNA, 20 nt, Human
uccgggugggcggcucuggc

SEQ ID NO: 509986 - RNA, 27 nt, Human
ucguccacaaacaccuccaugggcugu

SEQ ID NO: 509987 - RNA, 19 nt, Human
ugacucgcucgauguccau

SEQ ID NO: 509988 - RNA, 19 nt, Human
ugcagccuuggcgggcggc

SEQ ID NO: 509989 - RNA, 22 nt, Human
ugcagccuuggcgggcggcucg

SEQ ID NO: 509990 - RNA, 24 nt, Human
ugccaaagcgacccgcccgggcca

SEQ ID NO: 509991 - RNA, 21 nt, Human
ugcccagaaccuuccaguggg

SEQ ID NO: 509992 - RNA, 22 nt, Human
ugcccagaaccuuccagugggc

SEQ ID NO: 509993 - RNA, 19 nt, Human
ugcucccugcagccuuggc

SEQ ID NO: 509994 - RNA, 22 nt, Human
uggaaaggggaggugaagcugc

SEQ ID NO: 509995 - RNA, 19 nt, Human
uggcgauggccgggaaguu

SEQ ID NO: 509996 - RNA, 19 nt, Human
uggcgggcggcucgcacuc

SEQ ID NO: 509997 - RNA, 19 nt, Human
ugggaagggaggugggagg

SEQ ID NO: 509998 - RNA, 20 nt, Human
ugggaagggaggugggaggg

SEQ ID NO: 509999 - RNA, 22 nt, Human
ugggaagggaggugggaggggc

SEQ ID NO: 510000 - RNA, 20 nt, Human
ugggcaucucgccugcccag

SEQ ID NO: 510001 - RNA, 24 nt, Human
uguauguggagaugucgauuuccu

SEQ ID NO: 510002 - RNA, 18 nt, Human
uguccgaguccucaggca

SEQ ID NO: 510003 - RNA, 23 nt, Human
uuaaacuccagcacauccaagag

SEQ ID NO: 510004 - RNA, 23 nt, Human
uuccagugggcgacuccuuugug

SEQ ID NO: 510005 - RNA, 25 nt, Human
uugugcgacacuucccagaggaccu

SEQ ID NO: 510006 - RNA, 24 nt, Human
uuuuuuuuuuuccauaauaacaag

SEQ ID NO: 510007 - RNA, 20 nt, Human
uuuuuuuuuuuuuuuuccau

SEQ ID NO: 510008 - RNA, 24 nt, Human
uuuuuuuuuuuuuuuuuuuuccau

SEQ ID NO: 510009 - RNA, 24 nt, Human
uuuuuuuuuuuuuuuuuuuuuccu

SEQ ID NO: 510010 - RNA, 18 nt, Human
aaccuccuuccucacagc

SEQ ID NO: 510011 - RNA, 30 nt, Human
aagaaaauaaauauuuccacgaggucaagg

SEQ ID NO: 510012 - RNA, 22 nt, Human
aagcccuggcuacugcugcugg

SEQ ID NO: 510013 - RNA, 22 nt, Human
aaguccaagcccuggcuacugc

SEQ ID NO: 510014 - RNA, 26 nt, Human
acccacuccaccuucccauccuggag

SEQ ID NO: 510015 - RNA, 18 nt, Human
acuccggccggguuccag

SEQ ID NO: 510016 - RNA, 22 nt, Human
agccagguuuaaaucccuguuu

SEQ ID NO: 510017 - RNA, 21 nt, Human
agcccuggcuacugcugcugg

SEQ ID NO: 510018 - RNA, 18 nt, Human
agcugcacaaauuguccc

SEQ ID NO: 510019 - RNA, 23 nt, Human
caaagccagguuuaaaucccugu

SEQ ID NO: 510020 - RNA, 22 nt, Human
caagccaaaguacaggggcugg

SEQ ID NO: 510021 - RNA, 20 nt, Human
caccaugucccugcacaaga

SEQ ID NO: 510022 - RNA, 20 nt, Human
cacuccaccuucccauccug

SEQ ID NO: 510023 - RNA, 19 nt, Human
caggggcuggagacggggu

SEQ ID NO: 510024 - RNA, 23 nt, Human
ccaaagccagguuuaaaucccug

SEQ ID NO: 510025 - RNA, 22 nt, Human
ccagguuuaaaucccuguuucu

SEQ ID NO: 510026 - RNA, 24 nt, Human
cccagaaccuccuuccucacagcc

SEQ ID NO: 510027 - RNA, 26 nt, Human
ccucacagccggcgcucagagcuacu

SEQ ID NO: 510028 - RNA, 19 nt, Human
cggggugggaaguggggca

SEQ ID NO: 510029 - RNA, 18 nt, Human
cuugaaguugaugcaaug

SEQ ID NO: 510030 - RNA, 19 nt, Human
cuuggggugauggaggcug

SEQ ID NO: 510031 - RNA, 22 nt, Human
cuuuagaugagcacaguagcuc

SEQ ID NO: 510032 - RNA, 24 nt, Human
gccaaaguacaggggcuggagacg

SEQ ID NO: 510033 - RNA, 19 nt, Human
gcccagaaccuccuuccuc

SEQ ID NO: 510034 - RNA, 21 nt, Human
ggagacggggugggaaguggg

SEQ ID NO: 510035 - RNA, 23 nt, Human
ggagacggggugggaaguggggc

SEQ ID NO: 510036 - RNA, 21 nt, Human
gggaaguggggcaaacacuuu

SEQ ID NO: 510037 - RNA, 19 nt, Human
gggugauggaggcugcagg

SEQ ID NO: 510038 - RNA, 24 nt, Human
uacaggggcuggagacgggguggg

SEQ ID NO: 510039 - RNA, 19 nt, Human
ucacccacuccaccuuccc

SEQ ID NO: 510040 - RNA, 18 nt, Human
ucuguguuagauaugagc

SEQ ID NO: 510041 - RNA, 24 nt, Human
uugaugcaaugugucucuguguua

SEQ ID NO: 510042 - RNA, 23 nt, Human
agauuguagcaaaguguguuuau

SEQ ID NO: 510043 - RNA, 19 nt, Human
agccaagagaacacaaguc

SEQ ID NO: 510044 - RNA, 20 nt, Human
agcggccucggccuccagga

SEQ ID NO: 510045 - RNA, 19 nt, Human
aggcaggacacccuugacc

SEQ ID NO: 510046 - RNA, 23 nt, Human
aggcaggacacccuugaccaugg

SEQ ID NO: 510047 - RNA, 18 nt, Human
caccugcguggcagcucc

SEQ ID NO: 510048 - RNA, 20 nt, Human
cagcuccacgggccaggccc

SEQ ID NO: 510049 - RNA, 19 nt, Human
cagcuggaggaccauccca

SEQ ID NO: 510050 - RNA, 19 nt, Human
caggaagcagcggccggaa

SEQ ID NO: 510051 - RNA, 18 nt, Human
cagguggugcagagacag

SEQ ID NO: 510052 - RNA, 21 nt, Human
caucuugucuguacccccacc

SEQ ID NO: 510053 - RNA, 21 nt, Human
ccaccaccugcguggcaccug

SEQ ID NO: 510054 - RNA, 27 nt, Human
ccagcaauucucuuuaauccucuuucu

SEQ ID NO: 510055 - RNA, 23 nt, Human
ccccaccaccugcguggcaccug

SEQ ID NO: 510056 - RNA, 25 nt, Human
ccuccaggacccggcgcgcagcuuu

SEQ ID NO: 510057 - RNA, 22 nt, Human
ccugcguggcagcuccacgggc

SEQ ID NO: 510058 - RNA, 21 nt, Human
cgcaguaauagcugaguguuc

SEQ ID NO: 510059 - RNA, 23 nt, Human
cguggcagcuccacgggccaggc

SEQ ID NO: 510060 - RNA, 23 nt, Human
cucaggcccuggacccaggcagg

SEQ ID NO: 510061 - RNA, 24 nt, Human
cuuucuuuuccuucuaaaagcuuu

SEQ ID NO: 510062 - RNA, 18 nt, Human
gaccuugugggcagcugg

SEQ ID NO: 510063 - RNA, 19 nt, Human
gaggaggggcugggcugca

SEQ ID NO: 510064 - RNA, 19 nt, Human
gcaccucaguguuuucagc

SEQ ID NO: 510065 - RNA, 20 nt, Human
gcgggagcggccucggccuc

SEQ ID NO: 510066 - RNA, 23 nt, Human
gcugguucagauuggugcucucc

SEQ ID NO: 510067 - RNA, 23 nt, Human
ggaguuggggccguggggaggga

SEQ ID NO: 510068 - RNA, 18 nt, Human
ggcaccugguccucagac

SEQ ID NO: 510069 - RNA, 22 nt, Human
gggagggaaagcgcaguaauag

SEQ ID NO: 510070 - RNA, 24 nt, Human
gggauccauguggcucccucaggc

SEQ ID NO: 510071 - RNA, 19 nt, Human
ggggacugcggggacaacg

SEQ ID NO: 510072 - RNA, 19 nt, Human
ggggagggaaagcgcagua

SEQ ID NO: 510073 - RNA, 21 nt, Human
uaagaaaacgcacuagcaaga

SEQ ID NO: 510074 - RNA, 26 nt, Human
uaauccucuuucuuuuccuucuaaaa

SEQ ID NO: 510075 - RNA, 21 nt, Human
uagcaagauuguagcaaagug

SEQ ID NO: 510076 - RNA, 20 nt, Human
ucagacaccugcguggcacc

SEQ ID NO: 510077 - RNA, 20 nt, Human
uccaccuggcugagugaggc

SEQ ID NO: 510078 - RNA, 18 nt, Human
uccacgggccaggcccac

SEQ ID NO: 510079 - RNA, 21 nt, Human
ucccagcaucuugucuguacc

SEQ ID NO: 510080 - RNA, 23 nt, Human
ucggccuccaggacccggcgcgc

SEQ ID NO: 510081 - RNA, 26 nt, Human
ucuuucuuuuccuucuaaaagcuuuu

SEQ ID NO: 510082 - RNA, 23 nt, Human
ugaguguucagaggaggggcugg

SEQ ID NO: 510083 - RNA, 24 nt, Human
ugaguguucagaggaggggcuggg

SEQ ID NO: 510084 - RNA, 19 nt, Human
ugcaaacagguggugcaga

SEQ ID NO: 510085 - RNA, 18 nt, Human
ugcccuggaguuggggcc

SEQ ID NO: 510086 - RNA, 24 nt, Human
ugcccuggaguuggggccgugggg

SEQ ID NO: 510087 - RNA, 24 nt, Human
ugcugguucagauuggugcucucc

SEQ ID NO: 510088 - RNA, 20 nt, Human
uggcugagugaggcggcagg

SEQ ID NO: 510089 - RNA, 24 nt, Human
ugggagcaccucaguguuuucagc

SEQ ID NO: 510090 - RNA, 19 nt, Human
ugggcugcaggcauugcug

SEQ ID NO: 510091 - RNA, 24 nt, Human
uuaggaucaccagcaauucucuuu

SEQ ID NO: 510092 - RNA, 23 nt, Human
uucagccaagagaacacaagucu

SEQ ID NO: 510093 - RNA, 24 nt, Human
uuuuuacaguaaauagauuaucuu

SEQ ID NO: 510094 - RNA, 18 nt, Human
uuuuuuuuuuuuaggauc

SEQ ID NO: 510095 - RNA, 20 nt, Human
aaagucacugguuuccucca

SEQ ID NO: 510096 - RNA, 18 nt, Human
accccacagcucuggacc

SEQ ID NO: 510097 - RNA, 21 nt, Human
agcaucuuuccaggggcuucc

SEQ ID NO: 510098 - RNA, 21 nt, Human
caacccccggccccgaagcuc

SEQ ID NO: 510099 - RNA, 23 nt, Human
caacccccggccccgaagcuccu

SEQ ID NO: 510100 - RNA, 18 nt, Human
cagcagccgcaccagcca

SEQ ID NO: 510101 - RNA, 19 nt, Human
cagccgcaccagccaaggc

SEQ ID NO: 510102 - RNA, 21 nt, Human
caggggcuucccuacuagcuc

SEQ ID NO: 510103 - RNA, 24 nt, Human
caucuuuccaggggcuucccuacu

SEQ ID NO: 510104 - RNA, 20 nt, Human
ccacugggugucggaggugg

SEQ ID NO: 510105 - RNA, 20 nt, Human
ccagagaccgcgcggaggca

SEQ ID NO: 510106 - RNA, 21 nt, Human
ccagcagccgcaccagccaag

SEQ ID NO: 510107 - RNA, 18 nt, Human
cccaacccccggccccga

SEQ ID NO: 510108 - RNA, 29 nt, Human
cccaacccccggccccgaagccgguuccg

SEQ ID NO: 510109 - RNA, 21 nt, Human
cccacagcucuggaccggcca

SEQ ID NO: 510110 - RNA, 23 nt, Human
cccacagcucuggaccggccacu

SEQ ID NO: 510111 - RNA, 21 nt, Human
cccccggccccgaagcuccuu

SEQ ID NO: 510112 - RNA, 25 nt, Human
cccgaagcuccuucccugccggauc

SEQ ID NO: 510113 - RNA, 21 nt, Human
cccggccccgaagcuccuucc

SEQ ID NO: 510114 - RNA, 18 nt, Human
ccgaagcuccuucccugc

SEQ ID NO: 510115 - RNA, 21 nt, Human
ccgauccgccagagaccgcgc

SEQ ID NO: 510116 - RNA, 23 nt, Human
ccgccagagaccgcgcggaggca

SEQ ID NO: 510117 - RNA, 21 nt, Human
ccuucccugccggauccucuc

SEQ ID NO: 510118 - RNA, 20 nt, Human
cggccccgaagcuccuuccc

SEQ ID NO: 510119 - RNA, 19 nt, Human
cugccggauccucucgccu

SEQ ID NO: 510120 - RNA, 19 nt, Human
gauccgauuccccgauccg

SEQ ID NO: 510121 - RNA, 27 nt, Human
gccccgaagcuccuucccugccggauc

SEQ ID NO: 510122 - RNA, 22 nt, Human
guaaaugugcggcccaaccccc

SEQ ID NO: 510123 - RNA, 18 nt, Human
uacuagcucagccccaua

SEQ ID NO: 510124 - RNA, 21 nt, Human
ucagccccauaaagucacugg

SEQ ID NO: 510125 - RNA, 21 nt, Human
uccacuccgcuucgcgcacgu

SEQ ID NO: 510126 - RNA, 19 nt, Human
uccgggagaccugcccggg

SEQ ID NO: 510127 - RNA, 20 nt, Human
ucggaacgcagcaucuuucc

SEQ ID NO: 510128 - RNA, 23 nt, Human
uggaccagcagccgcaccagcca

SEQ ID NO: 510129 - RNA, 22 nt, Human
ugugcggcccaacccccggccc

SEQ ID NO: 510130 - RNA, 24 nt, Human
uucggaacgcagcaucuuuccagg

SEQ ID NO: 510131 - RNA, 21 nt, Human
uuggcgguaacaaugcucuuu

SEQ ID NO: 510132 - RNA, 25 nt, Human
uuggcgguaacaaugcucuuuauuu

SEQ ID NO: 510133 - RNA, 23 nt, Human
cacgucucagaccaagucgagga

SEQ ID NO: 510134 - RNA, 21 nt, Human
caguuggucuugguauugggg

SEQ ID NO: 510135 - RNA, 18 nt, Human
ucagaccaagucgaggac

SEQ ID NO: 510136 - RNA, 23 nt, Human
ugaagcagauucuggcuuucagu

SEQ ID NO: 510137 - RNA, 21 nt, Human
ugggguaaggggguauugcag

SEQ ID NO: 510138 - RNA, 23 nt, Human
ugggguaaggggguauugcaggu

SEQ ID NO: 510139 - RNA, 18 nt, Human
agcagaagguacaggagu

SEQ ID NO: 510140 - RNA, 23 nt, Human
aggcagggugaccagagagggca

SEQ ID NO: 510141 - RNA, 19 nt, Human
aggcauuuauuugagauga

SEQ ID NO: 510142 - RNA, 23 nt, Human
aggcauuuauuugagaugaggaa

SEQ ID NO: 510143 - RNA, 19 nt, Human
cuguagcucucaaagcaaa

SEQ ID NO: 510144 - RNA, 22 nt, Human
gaaaggaaauugagcagaaggu

SEQ ID NO: 510145 - RNA, 22 nt, Human
ucaaagcaaauuuugagcucau

SEQ ID NO: 510146 - RNA, 21 nt, Human
ugaccagagagggcagacagc

SEQ ID NO: 510147 - RNA, 22 nt, Human
ugagaugaggaaaggaaauuga

SEQ ID NO: 510148 - RNA, 19 nt, Human
ugaggaaaggaaauugagc

SEQ ID NO: 510149 - RNA, 23 nt, Human
uuugagcucauuuuucuuuuucu

SEQ ID NO: 510150 - RNA, 19 nt, Human
auugguggggggugggagg

SEQ ID NO: 510151 - RNA, 21 nt, Human
cacucugaggacaggggugag

SEQ ID NO: 510152 - RNA, 22 nt, Human
cagugcuuuaucuguaugugac

SEQ ID NO: 510153 - RNA, 22 nt, Human
ggaaauagugaaaauuuuagac

SEQ ID NO: 510154 - RNA, 19 nt, Human
ggggggugggagggucacu

SEQ ID NO: 510155 - RNA, 23 nt, Human
ggggggugggagggucacugugg

SEQ ID NO: 510156 - RNA, 22 nt, Human
ggugagugauagccgagaggaa

SEQ ID NO: 510157 - RNA, 20 nt, Human
uacacagcuguuucuauuaa

SEQ ID NO: 510158 - RNA, 25 nt, Human
ucaagaagagcacugaagaguuuau

SEQ ID NO: 510159 - RNA, 21 nt, Human
uccuugggaagcaggaggugg

SEQ ID NO: 510160 - RNA, 19 nt, Human
ugggagggucacuguggug

SEQ ID NO: 510161 - RNA, 19 nt, Human
uggggggugggagggucac

SEQ ID NO: 510162 - RNA, 19 nt, Human
ugguggggggugggagggu

SEQ ID NO: 510163 - RNA, 20 nt, Human
uugguggggggugggagggu

SEQ ID NO: 510164 - RNA, 25 nt, Human
aaaaacuggaaagccugcuagacaa

SEQ ID NO: 510165 - RNA, 21 nt, Human
aaaggcaucaucaaaguucca

SEQ ID NO: 510166 - RNA, 24 nt, Human
aacagugcuguccuuugccuuggc

SEQ ID NO: 510167 - RNA, 21 nt, Human
aagaauccacguggccuccca

SEQ ID NO: 510168 - RNA, 24 nt, Human
accuggacuggggcccccuguggc

SEQ ID NO: 510169 - RNA, 20 nt, Human
agaacccagaguggagcccc

SEQ ID NO: 510170 - RNA, 23 nt, Human
agagaaagaaacugagacccaaa

SEQ ID NO: 510171 - RNA, 21 nt, Human
agaguggagccccgggcugcu

SEQ ID NO: 510172 - RNA, 22 nt, Human
agaguggagccccgggcugcug

SEQ ID NO: 510173 - RNA, 18 nt, Human
agcugauagggagguccu

SEQ ID NO: 510174 - RNA, 21 nt, Human
agcugcaaggcugagaagagg

SEQ ID NO: 510175 - RNA, 22 nt, Human
aggcaaaugguuccaugucccu

SEQ ID NO: 510176 - RNA, 18 nt, Human
aggcagggagggugaggg

SEQ ID NO: 510177 - RNA, 24 nt, Human
aggcagggagggugagggugaggg

SEQ ID NO: 510178 - RNA, 18 nt, Human
aggccaccuggacugggg

SEQ ID NO: 510179 - RNA, 24 nt, Human
aggggucuugccagcuccagaugg

SEQ ID NO: 510180 - RNA, 25 nt, Human
agguggggugggaggagccgcagag

SEQ ID NO: 510181 - RNA, 25 nt, Human
auaaacuuccuuccacuuuacucug

SEQ ID NO: 510182 - RNA, 21 nt, Human
auggcaacuuguuugcagaga

SEQ ID NO: 510183 - RNA, 19 nt, Human
auguucccagguggugagg

SEQ ID NO: 510184 - RNA, 22 nt, Human
caaagaagggucagccaaagcc

SEQ ID NO: 510185 - RNA, 21 nt, Human
caagaauccacguggccuccc

SEQ ID NO: 510186 - RNA, 20 nt, Human
caagggucaagggcuggugu

SEQ ID NO: 510187 - RNA, 25 nt, Human
caccuggacuggggcccccuguggc

SEQ ID NO: 510188 - RNA, 19 nt, Human
cagagaaagaaacugagac

SEQ ID NO: 510189 - RNA, 24 nt, Human
cagagaaagaaacugagacccaaa

SEQ ID NO: 510190 - RNA, 23 nt, Human
ccaaagaagggucagccaaagcc

SEQ ID NO: 510191 - RNA, 23 nt, Human
ccagaguggagccccgggcugcu

SEQ ID NO: 510192 - RNA, 19 nt, Human
ccagggccaggcagggagg

SEQ ID NO: 510193 - RNA, 19 nt, Human
ccaggggagggaggagccc

SEQ ID NO: 510194 - RNA, 20 nt, Human
ccaggggagggaggagccca

SEQ ID NO: 510195 - RNA, 25 nt, Human
cccacgcugaaccccaaagguuuuc

SEQ ID NO: 510196 - RNA, 21 nt, Human
cccagggcaccuacagauaga

SEQ ID NO: 510197 - RNA, 23 nt, Human
cccagguuucuucagaccucucc

SEQ ID NO: 510198 - RNA, 25 nt, Human
cccggaguuaagagggugucugggg

SEQ ID NO: 510199 - RNA, 22 nt, Human
cccuccuauuccucuuugcgcc

SEQ ID NO: 510200 - RNA, 20 nt, Human
ccucccacgcugaaccccaa

SEQ ID NO: 510201 - RNA, 25 nt, Human
ccuccuauuccucuuugcgccugga

SEQ ID NO: 510202 - RNA, 26 nt, Human
ccuguacaaagccaagaauccacgug

SEQ ID NO: 510203 - RNA, 18 nt, Human
ccuugagcugcaaggcug

SEQ ID NO: 510204 - RNA, 24 nt, Human
cgcugaaccccaauuuuggggcuc

SEQ ID NO: 510205 - RNA, 21 nt, Human
cgggagauggggugugggcaa

SEQ ID NO: 510206 - RNA, 22 nt, Human
cuccugagaucaacccuugagc

SEQ ID NO: 510207 - RNA, 22 nt, Human
cugaauaaacuuccuuccacuu

SEQ ID NO: 510208 - RNA, 27 nt, Human
cugcuagacaaauucuaaaagagcugu

SEQ ID NO: 510209 - RNA, 28 nt, Human
cugcuagacaaauucuaaaagagcuguu

SEQ ID NO: 510210 - RNA, 19 nt, Human
cuuauucagcauucggaac

SEQ ID NO: 510211 - RNA, 21 nt, Human
cuucagaccucuccaggcccu

SEQ ID NO: 510212 - RNA, 18 nt, Human
cuucccucuccugggucc

SEQ ID NO: 510213 - RNA, 21 nt, Human
cuuccuguacaaagccaagaa

SEQ ID NO: 510214 - RNA, 19 nt, Human
gagaaagaaacugagaccc

SEQ ID NO: 510215 - RNA, 22 nt, Human
gagcugcaaggcugagaagagg

SEQ ID NO: 510216 - RNA, 22 nt, Human
gagggaggagcccagaggggcc

SEQ ID NO: 510217 - RNA, 25 nt, Human
gcagagaaagaaacugagacccaaa

SEQ ID NO: 510218 - RNA, 21 nt, Human
gccaggggagggaggagccca

SEQ ID NO: 510219 - RNA, 21 nt, Human
gccccgggcugcuggcuccca

SEQ ID NO: 510220 - RNA, 21 nt, Human
gccucccacgcugaaccccaa

SEQ ID NO: 510221 - RNA, 21 nt, Human
gcucuaggcuuggcugcugug

SEQ ID NO: 510222 - RNA, 23 nt, Human
gcuugcucuuguagaucuuccug

SEQ ID NO: 510223 - RNA, 21 nt, Human
ggagggaggagcccagagggg

SEQ ID NO: 510224 - RNA, 23 nt, Human
ggagggaggagcccagaggggcc

SEQ ID NO: 510225 - RNA, 26 nt, Human
ggagugguaggaaaagccaggggagg

SEQ ID NO: 510226 - RNA, 21 nt, Human
ggcaaaugguuccaugucccu

SEQ ID NO: 510227 - RNA, 22 nt, Human
gggagugguaggaaaagccagg

SEQ ID NO: 510228 - RNA, 22 nt, Human
ggggagggaggagcccagaggg

SEQ ID NO: 510229 - RNA, 23 nt, Human
ggggugugggcaacgcucacugu

SEQ ID NO: 510230 - RNA, 22 nt, Human
gggugugggcaacgcucacugu

SEQ ID NO: 510231 - RNA, 20 nt, Human
guacaaagccaagaauccac

SEQ ID NO: 510232 - RNA, 19 nt, Human
guuugcagagaaagaaacu

SEQ ID NO: 510233 - RNA, 25 nt, Human
ucaagggcugguguugaccuugugg

SEQ ID NO: 510234 - RNA, 23 nt, Human
ucccagguuucuucagaccucuc

SEQ ID NO: 510235 - RNA, 20 nt, Human
ucuccuggguccuggacucc

SEQ ID NO: 510236 - RNA, 22 nt, Human
ucuccuggguccuggacuccug

SEQ ID NO: 510237 - RNA, 23 nt, Human
ucugaauaaacuuccuuccacuu

SEQ ID NO: 510238 - RNA, 19 nt, Human
ucuucccucuccugggucc

SEQ ID NO: 510239 - RNA, 18 nt, Human
ugagacccaaagaagggu

SEQ ID NO: 510240 - RNA, 22 nt, Human
ugagaugcuguuaggccaccug

SEQ ID NO: 510241 - RNA, 21 nt, Human
ugaggguaucaggcaggcaga

SEQ ID NO: 510242 - RNA, 23 nt, Human
ugccagcuccagauggacauucc

SEQ ID NO: 510243 - RNA, 25 nt, Human
uggaagaagucagcugauagggagg

SEQ ID NO: 510244 - RNA, 20 nt, Human
uggaaggcaaaccagauggc

SEQ ID NO: 510245 - RNA, 23 nt, Human
uggcaucccuggcauggacacau

SEQ ID NO: 510246 - RNA, 27 nt, Human
uggccucccacgcugaaccccaauuuu

SEQ ID NO: 510247 - RNA, 24 nt, Human
uggcucccagguuucuucagaccu

SEQ ID NO: 510248 - RNA, 19 nt, Human
ugggaggagccgcagagca

SEQ ID NO: 510249 - RNA, 19 nt, Human
ugggaugggguccagggcc

SEQ ID NO: 510250 - RNA, 19 nt, Human
uggggcucacccugugaca

SEQ ID NO: 510251 - RNA, 24 nt, Human
uguacaaagccaagaauccacgug

SEQ ID NO: 510252 - RNA, 22 nt, Human
uguuaggccaccuggacugggg

SEQ ID NO: 510253 - RNA, 24 nt, Human
uuauucagcauucggaacccaguu

SEQ ID NO: 510254 - RNA, 20 nt, Human
uuccuguacaaagccaagaa

SEQ ID NO: 510255 - RNA, 24 nt, Human
uucugaauaaacuuccuuccacuu

SEQ ID NO: 510256 - RNA, 25 nt, Human
uuuuucuuuuuuguauuuuuuuaau

SEQ ID NO: 510257 - RNA, 24 nt, Human
aaagugcugggauuauaggcauga

SEQ ID NO: 510258 - RNA, 20 nt, Human
aaaguucccccgguacccaa

SEQ ID NO: 510259 - RNA, 20 nt, Human
aaaguucccccgguacccaa

SEQ ID NO: 510260 - RNA, 25 nt, Human
aagcaauucucccaccucagccucc

SEQ ID NO: 510261 - RNA, 25 nt, Human
aagcaauucucccaccucagccucc

SEQ ID NO: 510262 - RNA, 19 nt, Human
aagugcugggauuauaggc

SEQ ID NO: 510263 - RNA, 21 nt, Human
aagugcugggauuauaggcau

SEQ ID NO: 510264 - RNA, 18 nt, Human
acagggaaauauauuuuc

SEQ ID NO: 510265 - RNA, 19 nt, Human
acagggaaauauauuuuca

SEQ ID NO: 510266 - RNA, 24 nt, Human
accguguuggccaggcuggucucg

SEQ ID NO: 510267 - RNA, 21 nt, Human
acugcagccucugccuccgcc

SEQ ID NO: 510268 - RNA, 21 nt, Human
acugcagccucugccuccgcc

SEQ ID NO: 510269 - RNA, 19 nt, Human
agagaugggguuucaccgu

SEQ ID NO: 510270 - RNA, 23 nt, Human
agagguggcggcggcggcggcgg

SEQ ID NO: 510271 - RNA, 19 nt, Human
aggcaugagccaccgugcc

SEQ ID NO: 510272 - RNA, 20 nt, Human
aggcaugagccaccgugccu

SEQ ID NO: 510273 - RNA, 23 nt, Human
aggcaugagccaccgugccuggc

SEQ ID NO: 510274 - RNA, 24 nt, Human
aggugauccacccaccuuggccuc

SEQ ID NO: 510275 - RNA, 23 nt, Human
agguggcggcggcggcggcggcu

SEQ ID NO: 510276 - RNA, 20 nt, Human
aguagagaugggguuucacc

SEQ ID NO: 510277 - RNA, 20 nt, Human
agugcaguggcacaaucuug

SEQ ID NO: 510278 - RNA, 20 nt, Human
agugcaguggcacaaucuug

SEQ ID NO: 510279 - RNA, 18 nt, Human
augggguuucaccguguu

SEQ ID NO: 510280 - RNA, 23 nt, Human
augggguuucaccguguuggcca

SEQ ID NO: 510281 - RNA, 24 nt, Human
augggguuucaccguguuggccag

SEQ ID NO: 510282 - RNA, 24 nt, Human
auuuuugcauuuuuaguagagaug

SEQ ID NO: 510283 - RNA, 28 nt, Human
auuuuuuauauauauuuauuuauuuuug

SEQ ID NO: 510284 - RNA, 24 nt, Human
caaagugcugggauuauaggcaug

SEQ ID NO: 510285 - RNA, 27 nt, Human
caagcaauucucccaccucagccuccc

SEQ ID NO: 510286 - RNA, 27 nt, Human
caagcaauucucccaccucagccuccc

SEQ ID NO: 510287 - RNA, 22 nt, Human
cacccaccuuggccucccaaag

SEQ ID NO: 510288 - RNA, 23 nt, Human
cacccaccuuggccucccaaagu

SEQ ID NO: 510289 - RNA, 21 nt, Human
caccguguuggccaggcuggu

SEQ ID NO: 510290 - RNA, 24 nt, Human
caccguguuggccaggcuggucuc

SEQ ID NO: 510291 - RNA, 24 nt, Human
caccucagccucccauguagcugg

SEQ ID NO: 510292 - RNA, 24 nt, Human
caccucagccucccauguagcugg

SEQ ID NO: 510293 - RNA, 30 nt, Human
cacugcagccucugccuccgccuccugggg

SEQ ID NO: 510294 - RNA, 30 nt, Human; identical to SEQ ID NO: 510293

SEQ ID NO: 510295 - RNA, 24 nt, Human
ccaaagugcugggauuauaggcau

SEQ ID NO: 510296 - RNA, 23 nt, Human
ccauguagcugggauuacaggca

SEQ ID NO: 510297 - RNA, 23 nt, Human
ccauguagcugggauuacaggca

SEQ ID NO: 510298 - RNA, 24 nt, Human
ccauguagcugggauuacaggcau

SEQ ID NO: 510299 - RNA, 24 nt, Human
ccauguagcugggauuacaggcau

SEQ ID NO: 510300 - RNA, 23 nt, Human
cccaccucagccucccauguagc

SEQ ID NO: 510301 - RNA, 23 nt, Human
cccaccucagccucccauguagc

SEQ ID NO: 510302 - RNA, 19 nt, Human
cccauguagcugggauuac

SEQ ID NO: 510303 - RNA, 19 nt, Human
cccauguagcugggauuac

SEQ ID NO: 510304 - RNA, 20 nt, Human
ccgccacgcccggcuaauuu

SEQ ID NO: 510305 - RNA, 20 nt, Human
ccgccacgcccggcuaauuu

SEQ ID NO: 510306 - RNA, 26 nt, Human
ccgccuccuggguucaagcaauucuu

SEQ ID NO: 510307 - RNA, 27 nt, Human
ccgccuccuggguucaagcaauucuuu

SEQ ID NO: 510308 - RNA, 18 nt, Human
ccucaaugacgauaauac

SEQ ID NO: 510309 - RNA, 19 nt, Human
ccuccgccuccuggguuca

SEQ ID NO: 510310 - RNA, 19 nt, Human
ccuccgccuccuggguuca

SEQ ID NO: 510311 - RNA, 24 nt, Human
ccuccuggguucaagcaauucucc

SEQ ID NO: 510312 - RNA, 24 nt, Human
ccuccuggguucaagcaauucucc

SEQ ID NO: 510313 - RNA, 24 nt, Human
ccugaccucaggugauccacccac

SEQ ID NO: 510314 - RNA, 20 nt, Human
cgaaauagcuuuuuagaagc

SEQ ID NO: 510315 - RNA, 20 nt, Human
cggcggcggcggcggcuccc

SEQ ID NO: 510316 - RNA, 24 nt, Human
cgguacccaaguuaccauauuaua

SEQ ID NO: 510317 - RNA, 24 nt, Human
cgguacccaaguuaccauauuaua

SEQ ID NO: 510318 - RNA, 22 nt, Human
cucagagguggcggcggcggcg

SEQ ID NO: 510319 - RNA, 24 nt, Human
cucagccucccauguagcugggau

SEQ ID NO: 510320 - RNA, 24 nt, Human
cucagccucccauguagcugggau

SEQ ID NO: 510321 - RNA, 24 nt, Human
cucaggugauccacccaccuuggc

SEQ ID NO: 510322 - RNA, 21 nt, Human
cuccuggguucaagcaauucu

SEQ ID NO: 510323 - RNA, 21 nt, Human
cuccuggguucaagcaauucu

SEQ ID NO: 510324 - RNA, 18 nt, Human
cucuguugcccagggugg

SEQ ID NO: 510325 - RNA, 18 nt, Human
cucuguugcccagggugg

SEQ ID NO: 510326 - RNA, 18 nt, Human
cugcagccucugccuccg

SEQ ID NO: 510327 - RNA, 18 nt, Human
cugcagccucugccuccg

SEQ ID NO: 510328 - RNA, 24 nt, Human
cugcagccucugccuccgccuccu

SEQ ID NO: 510329 - RNA, 24 nt, Human
cugcagccucugccuccgccuccu

SEQ ID NO: 510330 - RNA, 20 nt, Human
cugcucagagguggcggcgg

SEQ ID NO: 510331 - RNA, 24 nt, Human
gaccucaggugauccacccaccuu

SEQ ID NO: 510332 - RNA, 24 nt, Human
gagaugggguuucaccguguuggc

SEQ ID NO: 510333 - RNA, 26 nt, Human
gagcaguacagagucaggcugacugu

SEQ ID NO: 510334 - RNA, 18 nt, Human
gagcaucacuggucucaa

SEQ ID NO: 510335 - RNA, 21 nt, Human
gauuauaggcaugagccaccg

SEQ ID NO: 510336 - RNA, 24 nt, Human
gauuauaggcaugagccaccgugc

SEQ ID NO: 510337 - RNA, 21 nt, Human
gcggcggcggcggcggcuccc

SEQ ID NO: 510338 - RNA, 25 nt, Human
gcggcggcggcggcggcuccccggc

SEQ ID NO: 510339 - RNA, 18 nt, Human
gcucagagguggcggcgg

SEQ ID NO: 510340 - RNA, 23 nt, Human
gcuggucucgaacuccugaccuc

SEQ ID NO: 510341 - RNA, 19 nt, Human
gcugguguggugucggccg

SEQ ID NO: 510342 - RNA, 19 nt, Human
ggauuacaggcaugugccg

SEQ ID NO: 510343 - RNA, 19 nt, Human
ggauuacaggcaugugccg

SEQ ID NO: 510344 - RNA, 20 nt, Human
ggcggcggcggcggcucccc

SEQ ID NO: 510345 - RNA, 18 nt, Human
ggcuccccggcuggugug

SEQ ID NO: 510346 - RNA, 24 nt, Human
ggcuggucucgaacuccugaccuc

SEQ ID NO: 510347 - RNA, 22 nt, Human
gggguuucaccguguuggccag

SEQ ID NO: 510348 - RNA, 22 nt, Human
gggucuugcucuguugcccagg

SEQ ID NO: 510349 - RNA, 22 nt, Human
gggucuugcucuguugcccagg

SEQ ID NO: 510350 - RNA, 19 nt, Human
ggucucgaacuccugaccu

SEQ ID NO: 510351 - RNA, 23 nt, Human
gguggagugcaguggcacaaucu

SEQ ID NO: 510352 - RNA, 23 nt, Human
gguggagugcaguggcacaaucu

SEQ ID NO: 510353 - RNA, 18 nt, Human
guagcugggauuacaggc

SEQ ID NO: 510354 - RNA, 22 nt, Human
guagcugggauuacaggcaugu

SEQ ID NO: 510355 - RNA, 22 nt, Human
guagcugggauuacaggcaugu

SEQ ID NO: 510356 - RNA, 24 nt, Human
gugauccacccaccuuggccuccc

SEQ ID NO: 510357 - RNA, 25 nt, Human
guggcggcggcggcggcggcucccc

SEQ ID NO: 510358 - RNA, 18 nt, Human
uaaaaugacagacaugag

SEQ ID NO: 510359 - RNA, 19 nt, Human
uaaaaugacagacaugagu

SEQ ID NO: 510360 - RNA, 24 nt, Human
uaaaaugacagacaugagugaaac

SEQ ID NO: 510361 - RNA, 22 nt, Human
uaaaugauaugcuuauaaaaug

SEQ ID NO: 510362 - RNA, 24 nt, Human
uaauuuuugcauuuuuaguagaga

SEQ ID NO: 510363 - RNA, 23 nt, Human
uacaggcaugugccgccacgccc

SEQ ID NO: 510364 - RNA, 23 nt, Human
uacaggcaugugccgccacgccc

SEQ ID NO: 510365 - RNA, 21 nt, Human
uagcuuuuuagaagcuuuuua

SEQ ID NO: 510366 - RNA, 21 nt, Human
uaguagagaugggguuucacc

SEQ ID NO: 510367 - RNA, 24 nt, Human
uaguagagaugggguuucaccgug

SEQ ID NO: 510368 - RNA, 25 nt, Human
uaguagagaugggguuucaccgugu

SEQ ID NO: 510369 - RNA, 18 nt, Human
uauaguauaaagauagug

SEQ ID NO: 510370 - RNA, 18 nt, Human
uauaguauaaagauagug

SEQ ID NO: 510371 - RNA, 24 nt, Human
uauaguauaaagauagugaaauac

SEQ ID NO: 510372 - RNA, 24 nt, Human
uauaguauaaagauagugaaauac

SEQ ID NO: 510373 - RNA, 20 nt, Human
uauauauuuauuuauuuuug

SEQ ID NO: 510374 - RNA, 23 nt, Human
uauuuauuuuugagauggggucu

SEQ ID NO: 510375 - RNA, 29 nt, Human
ucaaugacgauaauacacaagucacaagg

SEQ ID NO: 510376 - RNA, 27 nt, Human
ucacaaguuuccugugagugaaacuga

SEQ ID NO: 510377 - RNA, 24 nt, Human
ucaccgagcucuuacucugaaauu

SEQ ID NO: 510378 - RNA, 24 nt, Human
ucaccguguuggccaggcuggucu

SEQ ID NO: 510379 - RNA, 19 nt, Human
ucacugcagccucugccuc

SEQ ID NO: 510380 - RNA, 19 nt, Human
ucacugcagccucugccuc

SEQ ID NO: 510381 - RNA, 19 nt, Human
ucacugcagccucugccuc

SEQ ID NO: 510382 - RNA, 20 nt, Human
ucacugcagccucugccucc

SEQ ID NO: 510383 - RNA, 20 nt, Human
ucacugcagccucugccucc

SEQ ID NO: 510384 - RNA, 21 nt, Human
ucacugcagccucugccuccg

SEQ ID NO: 510385 - RNA, 31 nt, Human
ucacugcagccucugccuccgccuccugggg

SEQ ID NO: 510386 - RNA, 31 nt, Human; identical to SEQ ID NO: 510385

SEQ ID NO: 510387 - RNA, 22 nt, Human
ucagagguggcggcggcggcuu

SEQ ID NO: 510388 - RNA, 24 nt, Human
ucccaaagugcugggauuauaggc

SEQ ID NO: 510389 - RNA, 24 nt, Human
ucccauguagcugggauuacaggc

SEQ ID NO: 510390 - RNA, 24 nt, Human
ucccauguagcugggauuacaggc

SEQ ID NO: 510391 - RNA, 24 nt, Human
uccgccuccuggguucaagcaauu

SEQ ID NO: 510392 - RNA, 24 nt, Human
uccgccuccuggguucaagcaauu

SEQ ID NO: 510393 - RNA, 21 nt, Human
uccuggguucaagcaauucuc

SEQ ID NO: 510394 - RNA, 21 nt, Human
uccuggguucaagcaauucuc

SEQ ID NO: 510395 - RNA, 23 nt, Human
uccuggguucaagcaauucuccc

SEQ ID NO: 510396 - RNA, 23 nt, Human
uccuggguucaagcaauucuccc

SEQ ID NO: 510397 - RNA, 20 nt, Human
ucuaaaguuuuggagaagaa

SEQ ID NO: 510398 - RNA, 26 nt, Human
ucucccaccucagccucccauguagc

SEQ ID NO: 510399 - RNA, 26 nt, Human
ucucccaccucagccucccauguagc

SEQ ID NO: 510400 - RNA, 23 nt, Human
ucucgaacuccugaccucaggug

SEQ ID NO: 510401 - RNA, 24 nt, Human
ucuguugcccaggguggagugcag

SEQ ID NO: 510402 - RNA, 24 nt, Human
ucuguugcccaggguggagugcag

SEQ ID NO: 510403 - RNA, 22 nt, Human
ucuugcucuguugcccagggug

SEQ ID NO: 510404 - RNA, 23 nt, Human
ucuugcucuguugcccagggugg

SEQ ID NO: 510405 - RNA, 23 nt, Human
ucuugcucuguugcccagggugg

SEQ ID NO: 510406 - RNA, 24 nt, Human
ucuugcucuguugcccagggugga

SEQ ID NO: 510407 - RNA, 24 nt, Human
ucuugcucuguugcccagggugga

SEQ ID NO: 510408 - RNA, 25 nt, Human
ugaaugguggaaauucaguaaguac

SEQ ID NO: 510409 - RNA, 25 nt, Human
ugaaugguggaaauucaguaaguac

SEQ ID NO: 510410 - RNA, 21 nt, Human
ugaccucaggugauccaccca

SEQ ID NO: 510411 - RNA, 24 nt, Human
ugaccucaggugauccacccaccu

SEQ ID NO: 510412 - RNA, 28 nt, Human
ugacgauaauacacaagucacaaguuuc

SEQ ID NO: 510413 - RNA, 22 nt, Human
ugagauggggucuugcucuguu

SEQ ID NO: 510414 - RNA, 22 nt, Human
ugagauggggucuugcucuguu

SEQ ID NO: 510415 - RNA, 24 nt, Human
ugauccacccaccuuggccuccca

SEQ ID NO: 510416 - RNA, 19 nt, Human
ugccuccgccuccuggguu

SEQ ID NO: 510417 - RNA, 19 nt, Human
ugccuccgccuccuggguu

SEQ ID NO: 510418 - RNA, 23 nt, Human
uggagugcaguggcacaaucuug

SEQ ID NO: 510419 - RNA, 23 nt, Human
uggagugcaguggcacaaucuug

SEQ ID NO: 510420 - RNA, 24 nt, Human
uggagugcaguggcacaaucuugg

SEQ ID NO: 510421 - RNA, 24 nt, Human
uggagugcaguggcacaaucuugg

SEQ ID NO: 510422 - RNA, 23 nt, Human
uggcacaaucuugggucacugca

SEQ ID NO: 510423 - RNA, 24 nt, Human
uggcacaaucuugggucacugcag

SEQ ID NO: 510424 - RNA, 24 nt, Human
uggccaggcuggucucgaacuccu

SEQ ID NO: 510425 - RNA, 18 nt, Human
uggcggcggcggcggcgg

SEQ ID NO: 510426 - RNA, 18 nt, Human
ugggauuacaggcaugug

SEQ ID NO: 510427 - RNA, 18 nt, Human
ugggauuacaggcaugug

SEQ ID NO: 510428 - RNA, 21 nt, Human
ugggauuacaggcaugugccg

SEQ ID NO: 510429 - RNA, 21 nt, Human
ugggauuacaggcaugugccg

SEQ ID NO: 510430 - RNA, 21 nt, Human
ugggauuacaggcaugugccg

SEQ ID NO: 510431 - RNA, 21 nt, Human
ugggauuacaggcaugugccg

SEQ ID NO: 510432 - RNA, 22 nt, Human
ugggauuacaggcaugugccgc

SEQ ID NO: 510433 - RNA, 22 nt, Human
ugggauuacaggcaugugccgc

SEQ ID NO: 510434 - RNA, 24 nt, Human
ugggauuacaggcaugugccgcca

SEQ ID NO: 510435 - RNA, 24 nt, Human
ugggauuacaggcaugugccgcca

SEQ ID NO: 510436 - RNA, 18 nt, Human
ugggauuauaggcaugag

SEQ ID NO: 510437 - RNA, 21 nt, Human
ugggauuauaggcaugagcca

SEQ ID NO: 510438 - RNA, 22 nt, Human
ugggauuauaggcaugagccac

SEQ ID NO: 510439 - RNA, 23 nt, Human
ugggauuauaggcaugagccacc

SEQ ID NO: 510440 - RNA, 23 nt, Human
ugggauuauaggcaugagccacc

SEQ ID NO: 510441 - RNA, 24 nt, Human
ugggauuauaggcaugagccaccg

SEQ ID NO: 510442 - RNA, 24 nt, Human
uggggucuugcucuguugcccagg

SEQ ID NO: 510443 - RNA, 24 nt, Human
uggggucuugcucuguugcccagg

SEQ ID NO: 510444 - RNA, 24 nt, Human
ugggguuucaccguguuggccagg

SEQ ID NO: 510445 - RNA, 21 nt, Human
uggguucaagcaauucuccca

SEQ ID NO: 510446 - RNA, 21 nt, Human
uggguucaagcaauucuccca

SEQ ID NO: 510447 - RNA, 19 nt, Human
uguagcugggauuacaggc

SEQ ID NO: 510448 - RNA, 19 nt, Human
uguagcugggauuacaggc

SEQ ID NO: 510449 - RNA, 24 nt, Human
uguagcugggauuacaggcaugug

SEQ ID NO: 510450 - RNA, 24 nt, Human
uguagcugggauuacaggcaugug

SEQ ID NO: 510451 - RNA, 18 nt, Human
uuaguagagaugggguuu

SEQ ID NO: 510452 - RNA, 22 nt, Human
uuaguagagaugggguuucacc

SEQ ID NO: 510453 - RNA, 24 nt, Human
uuaguagagaugggguuucaccgu

SEQ ID NO: 510454 - RNA, 24 nt, Human
uucaagcaauucucccaccucagc

SEQ ID NO: 510455 - RNA, 24 nt, Human
uucaagcaauucucccaccucagc

SEQ ID NO: 510456 - RNA, 20 nt, Human
uugaaugguggaaauucagu

SEQ ID NO: 510457 - RNA, 20 nt, Human
uugaaugguggaaauucagu

SEQ ID NO: 510458 - RNA, 21 nt, Human
uugagauggggucuugcucug

SEQ ID NO: 510459 - RNA, 21 nt, Human
uugagauggggucuugcucug

SEQ ID NO: 510460 - RNA, 18 nt, Human
uugcccaggguggagugc

SEQ ID NO: 510461 - RNA, 18 nt, Human
uugcccaggguggagugc

SEQ ID NO: 510462 - RNA, 18 nt, Human
uuggccucccaaagugcu

SEQ ID NO: 510463 - RNA, 23 nt, Human
uugggucacugcagccucugccu

SEQ ID NO: 510464 - RNA, 24 nt, Human
uuuauuuauuuuugagaugggguc

SEQ ID NO: 510465 - RNA, 24 nt, Human
uuuauuuauuuuugagaugggguc

SEQ ID NO: 510466 - RNA, 21 nt, Human
uuuauuuuugagauggggucu

SEQ ID NO: 510467 - RNA, 24 nt, Human
uuucaccguguuggccaggcuggu

SEQ ID NO: 510468 - RNA, 22 nt, Human
uuugagauggggucuugcucug

SEQ ID NO: 510469 - RNA, 22 nt, Human
uuugagauggggucuugcucug

SEQ ID NO: 510470 - RNA, 24 nt, Human
uuuuuaguagagaugggguuucac

SEQ ID NO: 510471 - RNA, 20 nt, Human
uuuuugcauuuuuaguagag

SEQ ID NO: 510472 - RNA, 24 nt, Human
uuuuuuuuuuuuuugaauggugga

SEQ ID NO: 510473 - RNA, 21 nt, Human
uuuuuuuuuuuuuuugaaugg

SEQ ID NO: 510474 - RNA, 21 nt, Human
uuuuuuuuuuuuuuugaaugg

SEQ ID NO: 510475 - RNA, 19 nt, Human
aaaaggcuucugcuccgag

SEQ ID NO: 510476 - RNA, 20 nt, Human
aaacaaaccccaccaucuuc

SEQ ID NO: 510477 - RNA, 23 nt, Human
aaacaaaccccaccaucuuccca

SEQ ID NO: 510478 - RNA, 24 nt, Human
aacaaaccccaccaucuucccaac

SEQ ID NO: 510479 - RNA, 20 nt, Human
accccaccaucuucccaaca

SEQ ID NO: 510480 - RNA, 24 nt, Human
acucgcacccccagccccgcgcac

SEQ ID NO: 510481 - RNA, 21 nt, Human
agccccugacccacuccgcag

SEQ ID NO: 510482 - RNA, 24 nt, Human
agccccugacccacuccgcagucu

SEQ ID NO: 510483 - RNA, 23 nt, Human
aguaaacagggcagucacuuucc

SEQ ID NO: 510484 - RNA, 21 nt, Human
caagcuggcaaacaaacccca

SEQ ID NO: 510485 - RNA, 24 nt, Human
caggaagagacuucagggguggua

SEQ ID NO: 510486 - RNA, 25 nt, Human
cagugaagcuucucucucaaagcuc

SEQ ID NO: 510487 - RNA, 23 nt, Human
ccaccaucuucccaacagccaca

SEQ ID NO: 510488 - RNA, 23 nt, Human
ccccaccaucuucccaacagcca

SEQ ID NO: 510489 - RNA, 20 nt, Human
cccccagccccgcgcaccca

SEQ ID NO: 510490 - RNA, 25 nt, Human
cgcacccccagccccgcgcacccag

SEQ ID NO: 510491 - RNA, 19 nt, Human
cuagcagcaccagccucuu

SEQ ID NO: 510492 - RNA, 23 nt, Human
cuccaagcuggcaaacaaacccc

SEQ ID NO: 510493 - RNA, 19 nt, Human
cucgcagccccugacccac

SEQ ID NO: 510494 - RNA, 20 nt, Human
cucgcagccccugacccacu

SEQ ID NO: 510495 - RNA, 21 nt, Human
gaagagcuuggucguggauaa

SEQ ID NO: 510496 - RNA, 20 nt, Human
gagccccaguuuuuccucag

SEQ ID NO: 510497 - RNA, 19 nt, Human
gaggugcagacuaagcgag

SEQ ID NO: 510498 - RNA, 20 nt, Human
gcacuuccuuuuccuaauuu

SEQ ID NO: 510499 - RNA, 20 nt, Human
ggaagguuugcuccguuuca

SEQ ID NO: 510500 - RNA, 20 nt, Human
gguaggacuuggggcagccc

SEQ ID NO: 510501 - RNA, 24 nt, Human
gugcagacuaagcgagcuccgcag

SEQ ID NO: 510502 - RNA, 24 nt, Human
uagaaugaggccccggaggucgcc

SEQ ID NO: 510503 - RNA, 19 nt, Human
ucagaagauuuuguuccug

SEQ ID NO: 510504 - RNA, 21 nt, Human
uccgcagguggaagagcuugg

SEQ ID NO: 510505 - RNA, 18 nt, Human
ucgcagccccugacccac

SEQ ID NO: 510506 - RNA, 18 nt, Human
ugcagacuaagcgagcuc

SEQ ID NO: 510507 - RNA, 30 nt, Human
ugcuccguuucagugaagcuucucucucaa

SEQ ID NO: 510508 - RNA, 26 nt, Human
uggcaaacaaaccccaccaucuuccc

SEQ ID NO: 510509 - RNA, 20 nt, Human
aaauccaaagcaauuaaaaa

SEQ ID NO: 510510 - RNA, 19 nt, Human
aaccuggagcugaggaggu

SEQ ID NO: 510511 - RNA, 21 nt, Human
aagaacauugcugaugucccc

SEQ ID NO: 510512 - RNA, 23 nt, Human
aagacagaaaacauuuaacaaau

SEQ ID NO: 510513 - RNA, 23 nt, Human
acaaaaaaagagaauaaccuaga

SEQ ID NO: 510514 - RNA, 23 nt, Human
acacuuaacagaagacagaaaac

SEQ ID NO: 510515 - RNA, 19 nt, Human
acagaacaugggcuuugag

SEQ ID NO: 510516 - RNA, 22 nt, Human
acagcucacagagaaggaggug

SEQ ID NO: 510517 - RNA, 24 nt, Human
accaccauggaggagacgagagga

SEQ ID NO: 510518 - RNA, 19 nt, Human
acccaugagaaacugagga

SEQ ID NO: 510519 - RNA, 22 nt, Human
acccccacuacccucacacccc

SEQ ID NO: 510520 - RNA, 19 nt, Human
acuccauguguucucuugg

SEQ ID NO: 510521 - RNA, 25 nt, Human
agacagaaaacauuuaacaaaucca

SEQ ID NO: 510522 - RNA, 24 nt, Human
agacccagcaugcucucuacagaa

SEQ ID NO: 510523 - RNA, 18 nt, Human
agacugacagcucacaga

SEQ ID NO: 510524 - RNA, 24 nt, Human
agagaaaacacacuuaacagaaga

SEQ ID NO: 510525 - RNA, 20 nt, Human
agagaccugccaggggcagu

SEQ ID NO: 510526 - RNA, 19 nt, Human
agaugcccuggccugggcc

SEQ ID NO: 510527 - RNA, 18 nt, Human
agccacaaaaaaagagaa

SEQ ID NO: 510528 - RNA, 22 nt, Human
agccccugggaagcuugggggc

SEQ ID NO: 510529 - RNA, 23 nt, Human
aggaagccccugggaagcuuggg

SEQ ID NO: 510530 - RNA, 26 nt, Human
aggaagccccugggaagcuugggggc

SEQ ID NO: 510531 - RNA, 19 nt, Human
aggguccuucagacuccag

SEQ ID NO: 510532 - RNA, 20 nt, Human
aguggugccaggugacaguc

SEQ ID NO: 510533 - RNA, 25 nt, Human
augguagcuacucagccagugggcc

SEQ ID NO: 510534 - RNA, 19 nt, Human
cacaccccuaccaccaguu

SEQ ID NO: 510535 - RNA, 19 nt, Human
cacccccacuacccucaca

SEQ ID NO: 510536 - RNA, 23 nt, Human
cacccccacuacccucacacccc

SEQ ID NO: 510537 - RNA, 19 nt, Human
caccccuaccaccaguuuc

SEQ ID NO: 510538 - RNA, 18 nt, Human
cacugagucucacagucc

SEQ ID NO: 510539 - RNA, 19 nt, Human
cacugagugguacagauuc

SEQ ID NO: 510540 - RNA, 24 nt, Human
cagaagacagaaaacauuuaacaa

SEQ ID NO: 510541 - RNA, 18 nt, Human
cagagaccugccaggggc

SEQ ID NO: 510542 - RNA, 20 nt, Human
cagugggcuccuauaugcgg

SEQ ID NO: 510543 - RNA, 21 nt, Human
ccaaugccaccacaggacgua

SEQ ID NO: 510544 - RNA, 24 nt, Human
ccacagcugggacccugaccaugc

SEQ ID NO: 510545 - RNA, 20 nt, Human
ccagcagagugccccagugg

SEQ ID NO: 510546 - RNA, 20 nt, Human
ccccagcucaaucuuccucc

SEQ ID NO: 510547 - RNA, 23 nt, Human
cccccacuacccucacaccccua

SEQ ID NO: 510548 - RNA, 22 nt, Human
cccgaggccuuguucugaaaca

SEQ ID NO: 510549 - RNA, 22 nt, Human
cccuaccaccaguuuccccacc

SEQ ID NO: 510550 - RNA, 22 nt, Human
cccugcucucacccacagcugg

SEQ ID NO: 510551 - RNA, 23 nt, Human
ccuauaugcgguacacgucagaa

SEQ ID NO: 510552 - RNA, 22 nt, Human
ccuccucuccucucucuguccc

SEQ ID NO: 510553 - RNA, 25 nt, Human
ccucugaucagucccagccugauuc

SEQ ID NO: 510554 - RNA, 22 nt, Human
ccugccaggggcagugaccacc

SEQ ID NO: 510555 - RNA, 28 nt, Human
ccuggccugggccuuaggacaucuugac

SEQ ID NO: 510556 - RNA, 21 nt, Human
ccuguguggaagugguguagg

SEQ ID NO: 510557 - RNA, 20 nt, Human
cucaaucuuccuccucuccu

SEQ ID NO: 510558 - RNA, 22 nt, Human
cucaaucuuccuccucuccucu

SEQ ID NO: 510559 - RNA, 20 nt, Human
cucugaucagucccagccuc

SEQ ID NO: 510560 - RNA, 23 nt, Human
cugacacccccacuacccucaca

SEQ ID NO: 510561 - RNA, 18 nt, Human
cugaucagucccagccug

SEQ ID NO: 510562 - RNA, 21 nt, Human
gaaacaccugggggcugacac

SEQ ID NO: 510563 - RNA, 24 nt, Human
gaaggguggaggguccggcagggg

SEQ ID NO: 510564 - RNA, 19 nt, Human
gacagcuggacagugcccu

SEQ ID NO: 510565 - RNA, 18 nt, Human
gaggcagacuugggagug

SEQ ID NO: 510566 - RNA, 21 nt, Human
gaggccuuguucugaaacacc

SEQ ID NO: 510567 - RNA, 21 nt, Human
gccacaaaaaaagagaauaac

SEQ ID NO: 510568 - RNA, 19 nt, Human
gccccugggaagcuugggg

SEQ ID NO: 510569 - RNA, 20 nt, Human
gcugacacccccacuacccu

SEQ ID NO: 510570 - RNA, 22 nt, Human
ggaacucucccaaugccaccac

SEQ ID NO: 510571 - RNA, 25 nt, Human
ggagguggcagagaccugccaggaa

SEQ ID NO: 510572 - RNA, 22 nt, Human
ggccuuguucugaaacaccugg

SEQ ID NO: 510573 - RNA, 20 nt, Human
gguggggaugguagcacuga

SEQ ID NO: 510574 - RNA, 18 nt, Human
guggaagugguguagggg

SEQ ID NO: 510575 - RNA, 27 nt, Human
uaacagaagacagaaaacauuuaacaa

SEQ ID NO: 510576 - RNA, 20 nt, Human
uaaccuagacugacagcuca

SEQ ID NO: 510577 - RNA, 20 nt, Human
uagcaggcucuucccugagc

SEQ ID NO: 510578 - RNA, 23 nt, Human
uagccacaaaaaaagagaauaac

SEQ ID NO: 510579 - RNA, 20 nt, Human
uagccagcagagugccccag

SEQ ID NO: 510580 - RNA, 23 nt, Human
uaucccuauauuacccaugagaa

SEQ ID NO: 510581 - RNA, 26 nt, Human
ucacaccccuaccaccaguuucccca

SEQ ID NO: 510582 - RNA, 23 nt, Human
ucacaugcgcaauucccagcccu

SEQ ID NO: 510583 - RNA, 19 nt, Human
uccauguguucucuugggc

SEQ ID NO: 510584 - RNA, 22 nt, Human
ucccagccugauucccguuccc

SEQ ID NO: 510585 - RNA, 20 nt, Human
uccccaguggacagcuggac

SEQ ID NO: 510586 - RNA, 23 nt, Human
uccuccucuccucucucuguccc

SEQ ID NO: 510587 - RNA, 19 nt, Human
ucuacagaagccuuuacug

SEQ ID NO: 510588 - RNA, 20 nt, Human
ucucucugucccuucaccua

SEQ ID NO: 510589 - RNA, 19 nt, Human
ucucugucccuucaccucu

SEQ ID NO: 510590 - RNA, 21 nt, Human
ucucugucccuucaccucuga

SEQ ID NO: 510591 - RNA, 21 nt, Human
ucucuugggccucacagaaca

SEQ ID NO: 510592 - RNA, 21 nt, Human
ucugaaacaccugggggcuga

SEQ ID NO: 510593 - RNA, 19 nt, Human
ucuggggguggcaggagaa

SEQ ID NO: 510594 - RNA, 20 nt, Human
ucuuccuccucuccucucuc

SEQ ID NO: 510595 - RNA, 22 nt, Human
ugaaacaccugggggcugacac

SEQ ID NO: 510596 - RNA, 24 nt, Human
ugaagaacauugcugaugucccca

SEQ ID NO: 510597 - RNA, 19 nt, Human
ugaccaugccaugaggccc

SEQ ID NO: 510598 - RNA, 22 nt, Human
ugagggugggagccaagaggca

SEQ ID NO: 510599 - RNA, 23 nt, Human
ugauucccguucccugaugccuc

SEQ ID NO: 510600 - RNA, 18 nt, Human
ugcagaaaagcauuuccc

SEQ ID NO: 510601 - RNA, 25 nt, Human
ugcagaaaagcauuucccuuucaga

SEQ ID NO: 510602 - RNA, 18 nt, Human
ugccagaugccucuagga

SEQ ID NO: 510603 - RNA, 20 nt, Human
ugccaggggcagugaccacc

SEQ ID NO: 510604 - RNA, 23 nt, Human
ugccaugaggccccuguguggaa

SEQ ID NO: 510605 - RNA, 19 nt, Human
uggagcugaggaggucugg

SEQ ID NO: 510606 - RNA, 21 nt, Human
uggagcugaggaggucugggg

SEQ ID NO: 510607 - RNA, 18 nt, Human
uggaugagcagggacagu

SEQ ID NO: 510608 - RNA, 21 nt, Human
uggcagagaccugccagguga

SEQ ID NO: 510609 - RNA, 22 nt, Human
uggcaggagaauggaugagcag

SEQ ID NO: 510610 - RNA, 22 nt, Human
uggcgagaggagguggcaaccu

SEQ ID NO: 510611 - RNA, 24 nt, Human
ugggagccaagaggcagacuuggg

SEQ ID NO: 510612 - RNA, 20 nt, Human
ugggagugcccgaggccuug

SEQ ID NO: 510613 - RNA, 20 nt, Human
uggugccaggugacaguccc

SEQ ID NO: 510614 - RNA, 21 nt, Human
ugucuacagugcucauaaaug

SEQ ID NO: 510615 - RNA, 20 nt, Human
uguguggaagugguguaggg

SEQ ID NO: 510616 - RNA, 18 nt, Human
uuggcuguugccccagcu

SEQ ID NO: 510617 - RNA, 24 nt, Human
uuguucugaaacaccugggggcug

SEQ ID NO: 510618 - RNA, 18 nt, Human
uuuuccuuuuaauauggu

SEQ ID NO: 510619 - RNA, 20 nt, Human
uuuuuccuuuuaauaugguu

SEQ ID NO: 510620 - RNA, 24 nt, Human
aaauggccuccacacccaaaaaac

SEQ ID NO: 510621 - RNA, 22 nt, Human
acacccaaaaaacaaaaaaaaa

SEQ ID NO: 510622 - RNA, 21 nt, Human
caagcaaacaguuuauugaga

SEQ ID NO: 510623 - RNA, 18 nt, Human
caucaagcaaacaguuua

SEQ ID NO: 510624 - RNA, 23 nt, Human
ccacacccaaaaaacaaaaaaaa

SEQ ID NO: 510625 - RNA, 24 nt, Human
ccacacccaaaaaacaaaaaaaaa

SEQ ID NO: 510626 - RNA, 22 nt, Human
ccuccacacccaaaaaacaaaa

SEQ ID NO: 510627 - RNA, 22 nt, Human
cucuaaaaauggccuccacacc

SEQ ID NO: 510628 - RNA, 18 nt, Human
gccuccacacccaaaaaa

SEQ ID NO: 510629 - RNA, 24 nt, Human
uccacacccaaaaaacaaaaaaaa

SEQ ID NO: 510630 - RNA, 20 nt, Human
aagaccaaccagaugcagga

SEQ ID NO: 510631 - RNA, 20 nt, Human
aagcacccaccuccaugccc

SEQ ID NO: 510632 - RNA, 20 nt, Human
aagcacccaccuccaugccc

SEQ ID NO: 510633 - RNA, 21 nt, Human
acccugaccuucaggccccgg

SEQ ID NO: 510634 - RNA, 20 nt, Human
accucagccuccugaguagc

SEQ ID NO: 510635 - RNA, 23 nt, Human
accucagccuccugaguagcugg

SEQ ID NO: 510636 - RNA, 23 nt, Human
accucagccuccugaguagcugg

SEQ ID NO: 510637 - RNA, 19 nt, Human
acugcagccucagccuccu

SEQ ID NO: 510638 - RNA, 19 nt, Human
acugcagccucagccuccu

SEQ ID NO: 510639 - RNA, 21 nt, Human
agcuggaacuacaagcaccca

SEQ ID NO: 510640 - RNA, 21 nt, Human
agcuggaacuacaagcaccca

SEQ ID NO: 510641 - RNA, 18 nt, Human
aggugcucaauaaagacc

SEQ ID NO: 510642 - RNA, 28 nt, Human
caacuccugagauccaaugauccucccu

SEQ ID NO: 510643 - RNA, 20 nt, Human
caagcacccaccuccaugcc

SEQ ID NO: 510644 - RNA, 26 nt, Human
caaugauccucccaccucggccuccc

SEQ ID NO: 510645 - RNA, 19 nt, Human
cagccuccugaguagcugg

SEQ ID NO: 510646 - RNA, 19 nt, Human
cagccuccugaguagcugg

SEQ ID NO: 510647 - RNA, 19 nt, Human
caguggugcaaucacaacu

SEQ ID NO: 510648 - RNA, 19 nt, Human
caguggugcaaucacaacu

SEQ ID NO: 510649 - RNA, 22 nt, Human
caugcugaucucgaacuccuga

SEQ ID NO: 510650 - RNA, 23 nt, Human
ccaccucagccuccugaguagcu

SEQ ID NO: 510651 - RNA, 20 nt, Human
ccaugcccgccaauugccca

SEQ ID NO: 510652 - RNA, 20 nt, Human
ccaugcccgccaauugccca

SEQ ID NO: 510653 - RNA, 23 nt, Human
cccaccucagccuccugaguagc

SEQ ID NO: 510654 - RNA, 24 nt, Human
cccaccucagccuccugaguagcu

SEQ ID NO: 510655 - RNA, 21 nt, Human
cccugaccuucaggccccggc

SEQ ID NO: 510656 - RNA, 26 nt, Human
ccucccaccucggccuccccuucugc

SEQ ID NO: 510657 - RNA, 22 nt, Human
cgccgcgcaggcggccgcuccu

SEQ ID NO: 510658 - RNA, 25 nt, Human
gaguagcuggaacuacaagcaccca

SEQ ID NO: 510659 - RNA, 25 nt, Human
gaguagcuggaacuacaagcaccca

SEQ ID NO: 510660 - RNA, 18 nt, Human
gcgcaggcggccgcuccu

SEQ ID NO: 510661 - RNA, 20 nt, Human
gcuggaacuacaagcaccca

SEQ ID NO: 510662 - RNA, 20 nt, Human
gcuggaacuacaagcaccca

SEQ ID NO: 510663 - RNA, 23 nt, Human
gggugacccugaccuucaggccc

SEQ ID NO: 510664 - RNA, 23 nt, Human
guggugcaaucacaacucacugc

SEQ ID NO: 510665 - RNA, 23 nt, Human
guggugcaaucacaacucacugc

SEQ ID NO: 510666 - RNA, 24 nt, Human
uaauuuuuuauuuauuuguagaga

SEQ ID NO: 510667 - RNA, 22 nt, Human
uacaagcacccaccuccaugcc

SEQ ID NO: 510668 - RNA, 25 nt, Human
ucaagucauccucccaccucagccu

SEQ ID NO: 510669 - RNA, 25 nt, Human
ucaagucauccucccaccucagccu

SEQ ID NO: 510670 - RNA, 18 nt, Human
ucacugcagccucagccu

SEQ ID NO: 510671 - RNA, 18 nt, Human
ucacugcagccucagccu

SEQ ID NO: 510672 - RNA, 19 nt, Human
ucacugcagccucagccuc

SEQ ID NO: 510673 - RNA, 19 nt, Human
ucacugcagccucagccuc

SEQ ID NO: 510674 - RNA, 22 nt, Human
ucacugcagccucagccuccug

SEQ ID NO: 510675 - RNA, 22 nt, Human
ucacugcagccucagccuccug

SEQ ID NO: 510676 - RNA, 23 nt, Human
ucagccuccugaguagcuggaac

SEQ ID NO: 510677 - RNA, 23 nt, Human
ucagccuccugaguagcuggaac

SEQ ID NO: 510678 - RNA, 23 nt, Human
uccaaugauccucccaccucggc

SEQ ID NO: 510679 - RNA, 18 nt, Human
uccuaggaggaccagaac

SEQ ID NO: 510680 - RNA, 26 nt, Human
uccucccaccucagccuccugaguag

SEQ ID NO: 510681 - RNA, 26 nt, Human
uccucccaccucagccuccugaguag

SEQ ID NO: 510682 - RNA, 23 nt, Human
ucucgaacuccugagauccaaug

SEQ ID NO: 510683 - RNA, 19 nt, Human
ugaccuucaggccccggca

SEQ ID NO: 510684 - RNA, 21 nt, Human
ugaccuucaggccccggcacc

SEQ ID NO: 510685 - RNA, 18 nt, Human
uggaacuacaagcaccca

SEQ ID NO: 510686 - RNA, 18 nt, Human
uggaacuacaagcaccca

SEQ ID NO: 510687 - RNA, 24 nt, Human
uggugcaaucacaacucacugcag

SEQ ID NO: 510688 - RNA, 24 nt, Human
uggugcaaucacaacucacugcag

SEQ ID NO: 510689 - RNA, 24 nt, Human
uucaagucauccucccaccucagc

SEQ ID NO: 510690 - RNA, 24 nt, Human
uucaagucauccucccaccucagc

SEQ ID NO: 510691 - RNA, 28 nt, Human
uuuuuauuuauuuguagagauggagucg

SEQ ID NO: 510692 - RNA, 19 nt, Human
cagccacugcagccugcac

SEQ ID NO: 510693 - RNA, 21 nt, Human
ccagccacugcagccugcacc

SEQ ID NO: 510694 - RNA, 23 nt, Human
ccagccacugcagccugcaccca

SEQ ID NO: 510695 - RNA, 21 nt, Human
uggccgggcgaggacggcgcc

SEQ ID NO: 510696 - RNA, 21 nt, Human
agcaggcuggcccagccuccc

SEQ ID NO: 510697 - RNA, 25 nt, Human
caagucccagaugaagggugacagg

SEQ ID NO: 510698 - RNA, 22 nt, Human
cacacagagcuugggccuggga

SEQ ID NO: 510699 - RNA, 19 nt, Human
cacagagcuugggccuggg

SEQ ID NO: 510700 - RNA, 19 nt, Human
cacucucugccugguccug

SEQ ID NO: 510701 - RNA, 23 nt, Human
cagagcuugggccugggagccuc

SEQ ID NO: 510702 - RNA, 18 nt, Human
cagcaggcuggcccagcc

SEQ ID NO: 510703 - RNA, 21 nt, Human
cagcaggcuggcccagccucc

SEQ ID NO: 510704 - RNA, 19 nt, Human
ccagugcagguugggaugu

SEQ ID NO: 510705 - RNA, 21 nt, Human
cccagccuccccuuuaugaga

SEQ ID NO: 510706 - RNA, 22 nt, Human
cccccagccucacucucugccu

SEQ ID NO: 510707 - RNA, 24 nt, Human
cccccugcgggcagcugggaaggc

SEQ ID NO: 510708 - RNA, 24 nt, Human
ccggcggcggcgacgagcuccccc

SEQ ID NO: 510709 - RNA, 28 nt, Human
ccggcggcggcgacgagcucccccagcu

SEQ ID NO: 510710 - RNA, 24 nt, Human
ccucacucucugccugguccugaa

SEQ ID NO: 510711 - RNA, 23 nt, Human
cuaggguccaccuggucucuccu

SEQ ID NO: 510712 - RNA, 26 nt, Human
cucccccagcuucacgacaucccucc

SEQ ID NO: 510713 - RNA, 18 nt, Human
cugaagcagacagcagca

SEQ ID NO: 510714 - RNA, 22 nt, Human
cugcaugggggcugcagcugcc

SEQ ID NO: 510715 - RNA, 18 nt, Human
cuugggccugggagccuc

SEQ ID NO: 510716 - RNA, 24 nt, Human
gaacaagcgcucgggugggcccca

SEQ ID NO: 510717 - RNA, 20 nt, Human
gaagggugacaggcagcuag

SEQ ID NO: 510718 - RNA, 19 nt, Human
gacagcagcaggcuggccc

SEQ ID NO: 510719 - RNA, 23 nt, Human
gagacuauccuaggguuugacag

SEQ ID NO: 510720 - RNA, 21 nt, Human
ggugugagaacccccagccuc

SEQ ID NO: 510721 - RNA, 18 nt, Human
ucugccugguccugaagc

SEQ ID NO: 510722 - RNA, 26 nt, Human
ugaagcagacagcagcaggcuggccc

SEQ ID NO: 510723 - RNA, 19 nt, Human
ugagaccagaacaagcgcu

SEQ ID NO: 510724 - RNA, 19 nt, Human
ugcaugggggcugcagcug

SEQ ID NO: 510725 - RNA, 21 nt, Human
ugggaaggcaguggccaaagg

SEQ ID NO: 510726 - RNA, 25 nt, Human
ugggagccucuucugcaugggggcu

SEQ ID NO: 510727 - RNA, 22 nt, Human
ugggccccagugcagguuggga

SEQ ID NO: 510728 - RNA, 23 nt, Human
ugggccugggagccucuucugca

SEQ ID NO: 510729 - RNA, 21 nt, Human
ugguccugaagcagacagcag

SEQ ID NO: 510730 - RNA, 22 nt, Human
uuuuuugggccacacugaggca

SEQ ID NO: 510731 - RNA, 20 nt, Human
uuuuuuuuuuuuuugggcca

SEQ ID NO: 510732 - RNA, 26 nt, Human
uuuuuuuuuuuuuuuuuuuuuuuggg

SEQ ID NO: 510733 - RNA, 24 nt, Human
aauuauuggaaaucacaaugcacu

SEQ ID NO: 510734 - RNA, 20 nt, Human
agacagcuuuuagaaccacu

SEQ ID NO: 510735 - RNA, 21 nt, Human
agacuaguuuacaagaccaga

SEQ ID NO: 510736 - RNA, 24 nt, Human
caagccgcccgcagccaaaccaca

SEQ ID NO: 510737 - RNA, 20 nt, Human
caccgaccgaccgccccucg

SEQ ID NO: 510738 - RNA, 19 nt, Human
cagcuaacaugcacaaguc

SEQ ID NO: 510739 - RNA, 20 nt, Human
ccaaaccacagccgggaaag

SEQ ID NO: 510740 - RNA, 23 nt, Human
ccacauugcucuuuucauuaaug

SEQ ID NO: 510741 - RNA, 19 nt, Human
cccaagccgcccgcagcca

SEQ ID NO: 510742 - RNA, 21 nt, Human
cccgcagccaaaccacagccg

SEQ ID NO: 510743 - RNA, 21 nt, Human
ccgcccgcagccaaaccacag

SEQ ID NO: 510744 - RNA, 19 nt, Human
ccggaguggcaccuuucuu

SEQ ID NO: 510745 - RNA, 24 nt, Human
cgcccgcagccaaaccacagccgg

SEQ ID NO: 510746 - RNA, 21 nt, Human
cgcugagacccgggcgcgucc

SEQ ID NO: 510747 - RNA, 22 nt, Human
gcaccuuucuucuucuaccuga

SEQ ID NO: 510748 - RNA, 21 nt, Human
gcccgcagccaaaccacagcc

SEQ ID NO: 510749 - RNA, 21 nt, Human
gcccucacauaaaucuacaca

SEQ ID NO: 510750 - RNA, 21 nt, Human
uaagacuaguuuacaagacca

SEQ ID NO: 510751 - RNA, 22 nt, Human
uacaagaccagaguuuuacaag

SEQ ID NO: 510752 - RNA, 22 nt, Human
ucacauaaaucuacacagcuaa

SEQ ID NO: 510753 - RNA, 24 nt, Human
ucaccgaccgaccgccccucgugc

SEQ ID NO: 510754 - RNA, 19 nt, Human
ugccggaguggcaccuuuc

SEQ ID NO: 510755 - RNA, 23 nt, Human
ugccggaguggcaccuuucuucu

SEQ ID NO: 510756 - RNA, 20 nt, Human
uuuuuuuuuuuuuugaucgg

SEQ ID NO: 510757 - RNA, 18 nt, Human
uuuuuuuuuuuuuuuuug

SEQ ID NO: 510758 - RNA, 24 nt, Human
uuuuuuuuuuuuuuuuugaucggg

SEQ ID NO: 510759 - RNA, 19 nt, Human
aaagggcagguuccuaaac

SEQ ID NO: 510760 - RNA, 18 nt, Human
aaagucagugcccuggag

SEQ ID NO: 510761 - RNA, 25 nt, Human
aaaguuucccagagccaggaagcau

SEQ ID NO: 510762 - RNA, 21 nt, Human
aacagcacccgcugccuuggc

SEQ ID NO: 510763 - RNA, 23 nt, Human
aacugguccaucuggguggccuc

SEQ ID NO: 510764 - RNA, 21 nt, Human
aaggauggagaucuucaccgu

SEQ ID NO: 510765 - RNA, 19 nt, Human
acaauccaagcacgaggcc

SEQ ID NO: 510766 - RNA, 21 nt, Human
acacaggauccucuucaugug

SEQ ID NO: 510767 - RNA, 22 nt, Human
acacugaggacuugggguggcc

SEQ ID NO: 510768 - RNA, 19 nt, Human
acagcagcagcuccgucuc

SEQ ID NO: 510769 - RNA, 18 nt, Human
acagcccucuccccaggc

SEQ ID NO: 510770 - RNA, 19 nt, Human
accugggugcacugcagag

SEQ ID NO: 510771 - RNA, 25 nt, Human
accuuuucuccaagacucuucaggg

SEQ ID NO: 510772 - RNA, 24 nt, Human
acucauguggacacacauccucug

SEQ ID NO: 510773 - RNA, 21 nt, Human
acucauguucauuccuuccuc

SEQ ID NO: 510774 - RNA, 18 nt, Human
acuccauaccacaucaug

SEQ ID NO: 510775 - RNA, 20 nt, Human
agaaccuuuucuccaagacu

SEQ ID NO: 510776 - RNA, 21 nt, Human
agagcacuccccagcugcucc

SEQ ID NO: 510777 - RNA, 22 nt, Human
agaggacagaggcuaggccucg

SEQ ID NO: 510778 - RNA, 21 nt, Human
agaggggacagaggggcugug

SEQ ID NO: 510779 - RNA, 20 nt, Human
agaggugaaccggggcuccc

SEQ ID NO: 510780 - RNA, 23 nt, Human
agccacacggugcggccacagaa

SEQ ID NO: 510781 - RNA, 22 nt, Human
agccacggggugucugccagcc

SEQ ID NO: 510782 - RNA, 20 nt, Human
agcgaggacaccccagugcg

SEQ ID NO: 510783 - RNA, 21 nt, Human
agcuaaguccaccaacagagc

SEQ ID NO: 510784 - RNA, 18 nt, Human
aggaccaggggcugcugc

SEQ ID NO: 510785 - RNA, 22 nt, Human
aggagagaggauggaggagggg

SEQ ID NO: 510786 - RNA, 26 nt, Human
aggcaagcagugcccaggaggccaga

SEQ ID NO: 510787 - RNA, 21 nt, Human
aggcacgcccucauccccaag

SEQ ID NO: 510788 - RNA, 24 nt, Human
aggccaggcaagcagugcccagga

SEQ ID NO: 510789 - RNA, 19 nt, Human
aggcgagcucccugcccuc

SEQ ID NO: 510790 - RNA, 22 nt, Human
aggcggauccagcugcagggcc

SEQ ID NO: 510791 - RNA, 21 nt, Human
agggccaucuucccagacagc

SEQ ID NO: 510792 - RNA, 22 nt, Human
agggggcgggcugcagcaucug

SEQ ID NO: 510793 - RNA, 22 nt, Human
agggugcucucaaaugcccugu

SEQ ID NO: 510794 - RNA, 23 nt, Human
agguccuugaggucccuccgcuc

SEQ ID NO: 510795 - RNA, 18 nt, Human
aguggggggagggaggag

SEQ ID NO: 510796 - RNA, 24 nt, Human
auguucuugguucggcuccugcac

SEQ ID NO: 510797 - RNA, 24 nt, Human
caaaucagagucccugccagcacc

SEQ ID NO: 510798 - RNA, 23 nt, Human
caacgggaaaaaagggcaaaguc

SEQ ID NO: 510799 - RNA, 26 nt, Human
caacuccuugccaggaguaggacacu

SEQ ID NO: 510800 - RNA, 21 nt, Human
caagaagccacugcaggggca

SEQ ID NO: 510801 - RNA, 27 nt, Human
cacacaggauccucuucauguggccca

SEQ ID NO: 510802 - RNA, 22 nt, Human
cacagucagcuguuuauccucc

SEQ ID NO: 510803 - RNA, 23 nt, Human
cacaucgccaggccagcagggcc

SEQ ID NO: 510804 - RNA, 23 nt, Human
caccaugagaagggggcgggcug

SEQ ID NO: 510805 - RNA, 20 nt, Human
cacccccgcaggugcagccc

SEQ ID NO: 510806 - RNA, 20 nt, Human
caccgugcgacacugggcga

SEQ ID NO: 510807 - RNA, 19 nt, Human
cacggccaggcagccaggc

SEQ ID NO: 510808 - RNA, 23 nt, Human
cacucacaccccaagcugaacuc

SEQ ID NO: 510809 - RNA, 22 nt, Human
cagaaugggcagaaaaaguuuc

SEQ ID NO: 510810 - RNA, 22 nt, Human
cagagccaggacagaggcaggg

SEQ ID NO: 510811 - RNA, 19 nt, Human
cagaggcagggcaggggca

SEQ ID NO: 510812 - RNA, 25 nt, Human
cagaggcagggcaggggcagcgcgg

SEQ ID NO: 510813 - RNA, 21 nt, Human
cagcaaccuccucuguccccc

SEQ ID NO: 510814 - RNA, 21 nt, Human
cagcaagaccuuuugcuccag

SEQ ID NO: 510815 - RNA, 18 nt, Human
cagcagagcagcccccag

SEQ ID NO: 510816 - RNA, 20 nt, Human
cagcagagcagcccccagac

SEQ ID NO: 510817 - RNA, 20 nt, Human
cagcagcaggcgacaagaag

SEQ ID NO: 510818 - RNA, 20 nt, Human
cagcccucuccccaggcgag

SEQ ID NO: 510819 - RNA, 22 nt, Human
cagccuccugagcugucggucc

SEQ ID NO: 510820 - RNA, 18 nt, Human
caggcagccaggccagag

SEQ ID NO: 510821 - RNA, 21 nt, Human
cagggauccuuccugccucuc

SEQ ID NO: 510822 - RNA, 21 nt, Human
cagggccaucuucccagacag

SEQ ID NO: 510823 - RNA, 24 nt, Human
caucaacaaacaggggcccuugca

SEQ ID NO: 510824 - RNA, 18 nt, Human
caucacacucucuucguc

SEQ ID NO: 510825 - RNA, 24 nt, Human
caucacgcccagcagcaggcgaca

SEQ ID NO: 510826 - RNA, 19 nt, Human
cauguccccuccccaccca

SEQ ID NO: 510827 - RNA, 21 nt, Human
ccaaaucagagucccugccag

SEQ ID NO: 510828 - RNA, 23 nt, Human
ccaagaacuccauaccacaucau

SEQ ID NO: 510829 - RNA, 22 nt, Human
ccacacggugcggccacagaag

SEQ ID NO: 510830 - RNA, 20 nt, Human
ccaccuuccacccacaucac

SEQ ID NO: 510831 - RNA, 23 nt, Human
ccaccuuccacccacaucacuuc

SEQ ID NO: 510832 - RNA, 21 nt, Human
ccacugcaggggcagacacuc

SEQ ID NO: 510833 - RNA, 25 nt, Human
ccacugcaggggcagacacucagga

SEQ ID NO: 510834 - RNA, 19 nt, Human
ccagcgacaucacgcccag

SEQ ID NO: 510835 - RNA, 20 nt, Human
ccagcugcuccuucugaggc

SEQ ID NO: 510836 - RNA, 21 nt, Human
ccaggccagagccauuuccuc

SEQ ID NO: 510837 - RNA, 21 nt, Human
ccaggcuacugugagcuucuu

SEQ ID NO: 510838 - RNA, 18 nt, Human
cccaacacgucgcaugca

SEQ ID NO: 510839 - RNA, 23 nt, Human
cccaagcugaacucgccuagagc

SEQ ID NO: 510840 - RNA, 22 nt, Human
cccaaggauggagaucuucacc

SEQ ID NO: 510841 - RNA, 26 nt, Human
cccagacagcagcagcuccgucucac

SEQ ID NO: 510842 - RNA, 22 nt, Human
cccagagccaggaagcauuucc

SEQ ID NO: 510843 - RNA, 21 nt, Human
cccaucuacaauguucugggg

SEQ ID NO: 510844 - RNA, 23 nt, Human
ccccaaggauggagaucuucacc

SEQ ID NO: 510845 - RNA, 19 nt, Human
cccccagacagcgaggaca

SEQ ID NO: 510846 - RNA, 22 nt, Human
ccccgcaggugcagcccagcuu

SEQ ID NO: 510847 - RNA, 20 nt, Human
ccccuccccacccaaguucc

SEQ ID NO: 510848 - RNA, 19 nt, Human
ccccucugugguucugggc

SEQ ID NO: 510849 - RNA, 21 nt, Human
ccccucugugguucugggcuu

SEQ ID NO: 510850 - RNA, 19 nt, Human
ccccugcugccugcccaaa

SEQ ID NO: 510851 - RNA, 22 nt, Human
cccgucacacuccagcaagacc

SEQ ID NO: 510852 - RNA, 18 nt, Human
cccuugcaggcugcugug

SEQ ID NO: 510853 - RNA, 19 nt, Human
ccugccagcaccuccagcg

SEQ ID NO: 510854 - RNA, 24 nt, Human
ccuggcccaccagggguccccugg

SEQ ID NO: 510855 - RNA, 20 nt, Human
cgacaagaagccacugcagg

SEQ ID NO: 510856 - RNA, 21 nt, Human
cgaggccaggcaagcagugcc

SEQ ID NO: 510857 - RNA, 19 nt, Human
cggcugaaacgcagccugu

SEQ ID NO: 510858 - RNA, 24 nt, Human
cgggacgccagcccagcaccaaag

SEQ ID NO: 510859 - RNA, 19 nt, Human
cgggccagaacgaccacga

SEQ ID NO: 510860 - RNA, 18 nt, Human
cggucuaugcccaccccc

SEQ ID NO: 510861 - RNA, 19 nt, Human
cucacaccccaagcugaac

SEQ ID NO: 510862 - RNA, 22 nt, Human
cucagagccccggaugucgugc

SEQ ID NO: 510863 - RNA, 23 nt, Human
cucauguucauuccuuccucaca

SEQ ID NO: 510864 - RNA, 19 nt, Human
cugcagcaucugcccaggg

SEQ ID NO: 510865 - RNA, 28 nt, Human
cugcugccugcccaaacugguccaucug

SEQ ID NO: 510866 - RNA, 20 nt, Human
cuggagaaaguguuguuuca

SEQ ID NO: 510867 - RNA, 18 nt, Human
cuggcucagccuccauac

SEQ ID NO: 510868 - RNA, 19 nt, Human
cuggucagugucugugccc

SEQ ID NO: 510869 - RNA, 22 nt, Human
cugugcugggccccagccacgu

SEQ ID NO: 510870 - RNA, 25 nt, Human
cuucagggauccuuccugccucucu

SEQ ID NO: 510871 - RNA, 31 nt, Human
cuuccagugaggcagcuaaguccaccaacaa

SEQ ID NO: 510872 - RNA, 26 nt, Human
cuucccaagacauuuacaagcaccuc

SEQ ID NO: 510873 - RNA, 20 nt, Human
cuugguucggcuccugcacu

SEQ ID NO: 510874 - RNA, 25 nt, Human
gaaacccaaggccuggcucagccuc

SEQ ID NO: 510875 - RNA, 22 nt, Human
gagaagccacggccaggcagcc

SEQ ID NO: 510876 - RNA, 18 nt, Human
gagagaggauggaggagg

SEQ ID NO: 510877 - RNA, 18 nt, Human
gagaggacagaggcuagg

SEQ ID NO: 510878 - RNA, 18 nt, Human
gagagggcggaggcuagg

SEQ ID NO: 510879 - RNA, 29 nt, Human
gagcgggaggagagaggauggaggagggg

SEQ ID NO: 510880 - RNA, 18 nt, Human
gagcuggcauugacggcg

SEQ ID NO: 510881 - RNA, 21 nt, Human
gaggacaccccagugcgggac

SEQ ID NO: 510882 - RNA, 18 nt, Human
gaggagcgggaggagaga

SEQ ID NO: 510883 - RNA, 21 nt, Human
gaggagggaggagcacaggcc

SEQ ID NO: 510884 - RNA, 18 nt, Human
gauggaggagggaggagc

SEQ ID NO: 510885 - RNA, 24 nt, Human
gcaccaaagggcagguuccuaaac

SEQ ID NO: 510886 - RNA, 20 nt, Human
gcagagcagcccccagacag

SEQ ID NO: 510887 - RNA, 19 nt, Human
gccaauggucaugcaggga

SEQ ID NO: 510888 - RNA, 22 nt, Human
gcgggacgccagcccagcacca

SEQ ID NO: 510889 - RNA, 18 nt, Human
gcugcaguugagccccuc

SEQ ID NO: 510890 - RNA, 21 nt, Human
gcuggagaaaguguuguuuca

SEQ ID NO: 510891 - RNA, 23 nt, Human
gcugugcuggggaaacccaaggc

SEQ ID NO: 510892 - RNA, 22 nt, Human
ggacacugaggacuuggggugg

SEQ ID NO: 510893 - RNA, 19 nt, Human
ggacagaggcagggcaggg

SEQ ID NO: 510894 - RNA, 21 nt, Human
ggaccccugcugccugcccaa

SEQ ID NO: 510895 - RNA, 20 nt, Human
ggaccuggacagcgccggca

SEQ ID NO: 510896 - RNA, 18 nt, Human
ggacuugggguggcccug

SEQ ID NO: 510897 - RNA, 22 nt, Human
ggacuugggguggcccugaugu

SEQ ID NO: 510898 - RNA, 19 nt, Human
ggagagaggauggaggagg

SEQ ID NO: 510899 - RNA, 18 nt, Human
ggagcacccaaaggcacg

SEQ ID NO: 510900 - RNA, 24 nt, Human
ggaggcugugcuggggaaacccaa

SEQ ID NO: 510901 - RNA, 21 nt, Human
ggagugggaugggucgcccgu

SEQ ID NO: 510902 - RNA, 18 nt, Human
ggauccagcugcagggcc

SEQ ID NO: 510903 - RNA, 18 nt, Human
ggccagaacgaccacgag

SEQ ID NO: 510904 - RNA, 18 nt, Human
ggcccaccagggccacgc

SEQ ID NO: 510905 - RNA, 23 nt, Human
gggcauccuucaccugggcacug

SEQ ID NO: 510906 - RNA, 24 nt, Human
gggcugcugcagacccagcccggu

SEQ ID NO: 510907 - RNA, 23 nt, Human
guagcugacagaggaaguagcac

SEQ ID NO: 510908 - RNA, 22 nt, Human
guagcuguguuguuauguucga

SEQ ID NO: 510909 - RNA, 27 nt, Human
gugaggcagcuaaguccaccaacagag

SEQ ID NO: 510910 - RNA, 21 nt, Human
guugagccccucugugguucu

SEQ ID NO: 510911 - RNA, 18 nt, Human
guuguuucaaagguagcu

SEQ ID NO: 510912 - RNA, 24 nt, Human
uacacagaacaacuuauguacagc

SEQ ID NO: 510913 - RNA, 19 nt, Human
uagccugaugacucgagag

SEQ ID NO: 510914 - RNA, 21 nt, Human
uagcugacagaggaaguagca

SEQ ID NO: 510915 - RNA, 25 nt, Human
uauguacaugacaauacaagaggcg

SEQ ID NO: 510916 - RNA, 19 nt, Human
ucacugccgccugcucagg

SEQ ID NO: 510917 - RNA, 18 nt, Human
ucagagccaggacagagg

SEQ ID NO: 510918 - RNA, 20 nt, Human
ucagagccaggacagaggca

SEQ ID NO: 510919 - RNA, 19 nt, Human
ucagagccccggaugucgu

SEQ ID NO: 510920 - RNA, 18 nt, Human
ucauguggcccaccuugg

SEQ ID NO: 510921 - RNA, 20 nt, Human
uccacccacaucacuuccag

SEQ ID NO: 510922 - RNA, 22 nt, Human
uccagcaagaccuuuugcucca

SEQ ID NO: 510923 - RNA, 20 nt, Human
uccaggacgaagcugcaguu

SEQ ID NO: 510924 - RNA, 23 nt, Human
uccauaccacaucauguucuugg

SEQ ID NO: 510925 - RNA, 18 nt, Human
ucccacacagaaacacuc

SEQ ID NO: 510926 - RNA, 20 nt, Human
ucccagagccaggaagcauu

SEQ ID NO: 510927 - RNA, 21 nt, Human
ucccaggacuucagggugcuc

SEQ ID NO: 510928 - RNA, 22 nt, Human
ucccccagaggugaaccggggc

SEQ ID NO: 510929 - RNA, 24 nt, Human
ucccuacggggcacagcccucucc

SEQ ID NO: 510930 - RNA, 25 nt, Human
ucccucugccaacccccaucuacaa

SEQ ID NO: 510931 - RNA, 21 nt, Human
uccucauguccccuccccacc

SEQ ID NO: 510932 - RNA, 22 nt, Human
uccuccucauguccccucccca

SEQ ID NO: 510933 - RNA, 22 nt, Human
uccucugucugcagggaugcag

SEQ ID NO: 510934 - RNA, 24 nt, Human
ucucaaaugcccugucucugguca

SEQ ID NO: 510935 - RNA, 23 nt, Human
ucucacucacaccccaagcugaa

SEQ ID NO: 510936 - RNA, 23 nt, Human
ucugggacccuaagaaccccagg

SEQ ID NO: 510937 - RNA, 19 nt, Human
ucuugguucggcuccugca

SEQ ID NO: 510938 - RNA, 22 nt, Human
ucuuugguuccaagaacuccau

SEQ ID NO: 510939 - RNA, 20 nt, Human
ugaaacgcagccuguugcgg

SEQ ID NO: 510940 - RNA, 20 nt, Human
ugacuaaaggaccuggacag

SEQ ID NO: 510941 - RNA, 18 nt, Human
ugacucgagagacggcca

SEQ ID NO: 510942 - RNA, 20 nt, Human
ugagaacuggcugggggcca

SEQ ID NO: 510943 - RNA, 25 nt, Human
ugagaagggggcgggcugcagcauc

SEQ ID NO: 510944 - RNA, 21 nt, Human
ugagagguggaaaagguaaca

SEQ ID NO: 510945 - RNA, 23 nt, Human
ugcgacacugggcgauccgauga

SEQ ID NO: 510946 - RNA, 19 nt, Human
uggaggagggaggagcaca

SEQ ID NO: 510947 - RNA, 21 nt, Human
uggcaagcugucucacucacc

SEQ ID NO: 510948 - RNA, 21 nt, Human
uggcaggaggcgcagaggcca

SEQ ID NO: 510949 - RNA, 19 nt, Human
ugggagagucuuucaucca

SEQ ID NO: 510950 - RNA, 18 nt, Human
ugggcagaaaaaguuucc

SEQ ID NO: 510951 - RNA, 18 nt, Human
ugggccggggcagcagag

SEQ ID NO: 510952 - RNA, 21 nt, Human
ugggccggggcagcagagcag

SEQ ID NO: 510953 - RNA, 21 nt, Human
uggggaaaacaaugagaggug

SEQ ID NO: 510954 - RNA, 19 nt, Human
uggggagugggaugggucg

SEQ ID NO: 510955 - RNA, 23 nt, Human
ugguuccaagaacuccauaccac

SEQ ID NO: 510956 - RNA, 18 nt, Human
uguggaggccacaggcug

SEQ ID NO: 510957 - RNA, 18 nt, Human
uucacugccgccugcuca

SEQ ID NO: 510958 - RNA, 23 nt, Human
uucccagacagcagcagcuccgu

SEQ ID NO: 510959 - RNA, 22 nt, Human
uucucugggugcucaucgcgcc

SEQ ID NO: 510960 - RNA, 19 nt, Human
uucugagaacuggcugggg

SEQ ID NO: 510961 - RNA, 20 nt, Human
uuguuucaaagguagcugug

SEQ ID NO: 510962 - RNA, 18 nt, Human
uuuacaagcaccucugag

SEQ ID NO: 510963 - RNA, 24 nt, Human
uuuauacacagaacaacuuaugua

SEQ ID NO: 510964 - RNA, 25 nt, Human
uuucccagagccaggaagcauuucc

SEQ ID NO: 510965 - RNA, 18 nt, Human
uuucucccucugccaacc

SEQ ID NO: 510966 - RNA, 18 nt, Human
uuugggagccaaagagaa

SEQ ID NO: 510967 - RNA, 18 nt, Human
uuugggagccaaagagaa

SEQ ID NO: 510968 - RNA, 19 nt, Human
aaugacaggggagcgggga

SEQ ID NO: 510969 - RNA, 18 nt, Human
acuggaauguggcaguga

SEQ ID NO: 510970 - RNA, 18 nt, Human
agagucccgccccccacc

SEQ ID NO: 510971 - RNA, 21 nt, Human
agagucccgccccccaccccc

SEQ ID NO: 510972 - RNA, 19 nt, Human
agcuccugaguccagcccu

SEQ ID NO: 510973 - RNA, 23 nt, Human
aggcccccccagcuccugagucc

SEQ ID NO: 510974 - RNA, 24 nt, Human
agguccccccguggccgucccacu

SEQ ID NO: 510975 - RNA, 22 nt, Human
caccgugagagucccgcccccc

SEQ ID NO: 510976 - RNA, 26 nt, Human
cagcaggcgcugaguuucccgaaucg

SEQ ID NO: 510977 - RNA, 22 nt, Human
cagcaggcgcugaguuuccggg

SEQ ID NO: 510978 - RNA, 24 nt, Human
caggaagccucuucccgaaggccu

SEQ ID NO: 510979 - RNA, 23 nt, Human
caggugaggcccccccagcuccu

SEQ ID NO: 510980 - RNA, 19 nt, Human
cauugucccuccugcugcc

SEQ ID NO: 510981 - RNA, 20 nt, Human
ccagaaccccggcaaaggca

SEQ ID NO: 510982 - RNA, 18 nt, Human
cccccaggccgcacaguc

SEQ ID NO: 510983 - RNA, 18 nt, Human
ccccccagcuccugaguc

SEQ ID NO: 510984 - RNA, 18 nt, Human
cccgaaggccucccccuc

SEQ ID NO: 510985 - RNA, 21 nt, Human
cccgaaggccucccccucucc

SEQ ID NO: 510986 - RNA, 27 nt, Human
cccuagccccggccggcggagggcccc

SEQ ID NO: 510987 - RNA, 19 nt, Human
cccugccccagaaccccgg

SEQ ID NO: 510988 - RNA, 19 nt, Human
ccgggccggcggccggggc

SEQ ID NO: 510989 - RNA, 18 nt, Human
ccggguccggcggggucc

SEQ ID NO: 510990 - RNA, 22 nt, Human
ccuggccgcauugucccuccug

SEQ ID NO: 510991 - RNA, 20 nt, Human
ccuuagggggcggcaugggg

SEQ ID NO: 510992 - RNA, 25 nt, Human
cgcauugucccuccugcugcccgug

SEQ ID NO: 510993 - RNA, 23 nt, Human
cggcauggggcucuuucccuggg

SEQ ID NO: 510994 - RNA, 21 nt, Human
cgggaggaagcccggaggagg

SEQ ID NO: 510995 - RNA, 25 nt, Human
cucuucccgaaggccucccccucuc

SEQ ID NO: 510996 - RNA, 18 nt, Human
cugcccgugggcggcccg

SEQ ID NO: 510997 - RNA, 19 nt, Human
cuggccgcauugucccucc

SEQ ID NO: 510998 - RNA, 23 nt, Human
gagcgcccugccccagaaccccg

SEQ ID NO: 510999 - RNA, 20 nt, Human
gaggugggguggggcaggag

SEQ ID NO: 511000 - RNA, 19 nt, Human
gccccagaaccccggcaaa

SEQ ID NO: 511001 - RNA, 21 nt, Human
gccgcauugucccuccugcug

SEQ ID NO: 511002 - RNA, 19 nt, Human
gccggggcucagcacgccc

SEQ ID NO: 511003 - RNA, 18 nt, Human
ggaggugggguggggcag

SEQ ID NO: 511004 - RNA, 20 nt, Human
ggcaggagcgggggcugggg

SEQ ID NO: 511005 - RNA, 23 nt, Human
ggccgaagaccagggggcccagg

SEQ ID NO: 511006 - RNA, 18 nt, Human
ggccuagguccccccgug

SEQ ID NO: 511007 - RNA, 21 nt, Human
ggccucccccucuccagcccc

SEQ ID NO: 511008 - RNA, 22 nt, Human
ggcgcugaguuuccgggaggaa

SEQ ID NO: 511009 - RNA, 22 nt, Human
gggccuagguccccccguggcc

SEQ ID NO: 511010 - RNA, 19 nt, Human
gggcucuuucccuggggcc

SEQ ID NO: 511011 - RNA, 20 nt, Human
ggggagcggggagggucgcc

SEQ ID NO: 511012 - RNA, 21 nt, Human
ggguggggcaggagcgggggc

SEQ ID NO: 511013 - RNA, 24 nt, Human
ucacacccagcuguaaacauguca

SEQ ID NO: 511014 - RNA, 19 nt, Human
uccccuggccgcauugucc

SEQ ID NO: 511015 - RNA, 22 nt, Human
ucccgccccccacccccaggcc

SEQ ID NO: 511016 - RNA, 19 nt, Human
uccugaguccagcccuagg

SEQ ID NO: 511017 - RNA, 24 nt, Human
ucuccagccccuccacuccuggga

SEQ ID NO: 511018 - RNA, 20 nt, Human
ugaggugggcaaggaaggcg

SEQ ID NO: 511019 - RNA, 20 nt, Human
ugagucacacccagcuguaa

SEQ ID NO: 511020 - RNA, 21 nt, Human
ugccaagcaaggcagggcagg

SEQ ID NO: 511021 - RNA, 19 nt, Human
ugccccagaaccccggcaa

SEQ ID NO: 511022 - RNA, 19 nt, Human
ugccgggccggcggccggg

SEQ ID NO: 511023 - RNA, 24 nt, Human
uggcagugaggugggcaaggaagg

SEQ ID NO: 511024 - RNA, 19 nt, Human
uggggcaggagcgggggcu

SEQ ID NO: 511025 - RNA, 24 nt, Human
ugggguggggcaggagcgggggcu

SEQ ID NO: 511026 - RNA, 26 nt, Human
ugggguggggcaggagcgggggcugg

SEQ ID NO: 511027 - RNA, 18 nt, Human
uguggcagugaggugggc

SEQ ID NO: 511028 - RNA, 25 nt, Human
uguggcagugaggugggcaaggaag

SEQ ID NO: 511029 - RNA, 22 nt, Human
uuacugagucacacccagcugu

SEQ ID NO: 511030 - RNA, 22 nt, Human
aaaaaacaaaaaagagacugag

SEQ ID NO: 511031 - RNA, 25 nt, Human
aaaaacaaaaaagagacugaguagc

SEQ ID NO: 511032 - RNA, 18 nt, Human
aaacaaaaaagagacuga

SEQ ID NO: 511033 - RNA, 22 nt, Human
aaacaaaaaagagacugaguag

SEQ ID NO: 511034 - RNA, 21 nt, Human
aaacaauacccagccucccuc

SEQ ID NO: 511035 - RNA, 21 nt, Human
aacaauacccagccucccuca

SEQ ID NO: 511036 - RNA, 21 nt, Human
aagcauccgacgguuccccac

SEQ ID NO: 511037 - RNA, 21 nt, Human
aauggaggccucucucccuuc

SEQ ID NO: 511038 - RNA, 26 nt, Human
acaaaaaagagacugaguagcuacgu

SEQ ID NO: 511039 - RNA, 19 nt, Human
acaaacaauacccagccuc

SEQ ID NO: 511040 - RNA, 19 nt, Human
accacagcaagccggugcu

SEQ ID NO: 511041 - RNA, 23 nt, Human
accccagaguccaagagaauccu

SEQ ID NO: 511042 - RNA, 22 nt, Human
accggggaugcacagucugcau

SEQ ID NO: 511043 - RNA, 19 nt, Human
agacacuuggcaucagugg

SEQ ID NO: 511044 - RNA, 21 nt, Human
agacagugagugaggaccggc

SEQ ID NO: 511045 - RNA, 24 nt, Human
agaggucagaagucggauaaaacc

SEQ ID NO: 511046 - RNA, 18 nt, Human
agcgauccacagguggau

SEQ ID NO: 511047 - RNA, 21 nt, Human
agcugcugggccgggaauccu

SEQ ID NO: 511048 - RNA, 20 nt, Human
aggaaggaguuuggguuugg

SEQ ID NO: 511049 - RNA, 22 nt, Human
aggccucucucccuucgugccc

SEQ ID NO: 511050 - RNA, 26 nt, Human
aggucuuggagagaguccggauagcu

SEQ ID NO: 511051 - RNA, 23 nt, Human
augaguucgugcaccaaacaaaa

SEQ ID NO: 511052 - RNA, 20 nt, Human
augcccagaggucagaaguc

SEQ ID NO: 511053 - RNA, 23 nt, Human
caaaacaaacaaaaaaacaaaaa

SEQ ID NO: 511054 - RNA, 26 nt, Human
caaaacaaacaaaaaaacaaaaaaga

SEQ ID NO: 511055 - RNA, 18 nt, Human
caaaacaacuccaagggu

SEQ ID NO: 511056 - RNA, 19 nt, Human
caaacaauacccagccucc

SEQ ID NO: 511057 - RNA, 22 nt, Human
caaacaauacccagccucccuc

SEQ ID NO: 511058 - RNA, 19 nt, Human
caacccucagcaggaaucu

SEQ ID NO: 511059 - RNA, 21 nt, Human
cacaacauccaguugugcccc

SEQ ID NO: 511060 - RNA, 25 nt, Human
cacacccacucgcucagguuggaaa

SEQ ID NO: 511061 - RNA, 18 nt, Human
caccaucuuugcacacac

SEQ ID NO: 511062 - RNA, 23 nt, Human
caccaucuuugcacacacaccca

SEQ ID NO: 511063 - RNA, 19 nt, Human
caccccugucccggccccg

SEQ ID NO: 511064 - RNA, 23 nt, Human
caccccugucccggccccggggg

SEQ ID NO: 511065 - RNA, 18 nt, Human
cacugagcacaaggacuc

SEQ ID NO: 511066 - RNA, 25 nt, Human
cagcaggugccuugugugcauaccu

SEQ ID NO: 511067 - RNA, 19 nt, Human
cagccauugugcgcgccug

SEQ ID NO: 511068 - RNA, 19 nt, Human
cagcugccacuccagcagg

SEQ ID NO: 511069 - RNA, 19 nt, Human
caggacacuugaguccucc

SEQ ID NO: 511070 - RNA, 19 nt, Human
caggagagacacaagcccc

SEQ ID NO: 511071 - RNA, 23 nt, Human
caggagagacacaagccccaaga

SEQ ID NO: 511072 - RNA, 23 nt, Human
caguagggcucaguugccuggag

SEQ ID NO: 511073 - RNA, 18 nt, Human
cauagccuuuggccaagu

SEQ ID NO: 511074 - RNA, 25 nt, Human
cauuccaacuaucucaaaaucuugu

SEQ ID NO: 511075 - RNA, 19 nt, Human
ccacagcaagccggugcug

SEQ ID NO: 511076 - RNA, 21 nt, Human
ccagcccagcagccucaaccc

SEQ ID NO: 511077 - RNA, 22 nt, Human
ccagcccagcagccucaacccu

SEQ ID NO: 511078 - RNA, 22 nt, Human
ccaugcuaaucccuuaaaguca

SEQ ID NO: 511079 - RNA, 21 nt, Human
cccacaacauccaguugugcc

SEQ ID NO: 511080 - RNA, 23 nt, Human
cccaggcacuucuguucugagca

SEQ ID NO: 511081 - RNA, 23 nt, Human
ccccgggggccaagggccugccc

SEQ ID NO: 511082 - RNA, 22 nt, Human
ccccugucccggccccgggggc

SEQ ID NO: 511083 - RNA, 21 nt, Human
ccccugugggacaauggaggc

SEQ ID NO: 511084 - RNA, 19 nt, Human
cccgcgcgccucucccucc

SEQ ID NO: 511085 - RNA, 18 nt, Human
cccuucgugcccaggccu

SEQ ID NO: 511086 - RNA, 24 nt, Human
ccggugcugugugcucccaauucc

SEQ ID NO: 511087 - RNA, 19 nt, Human
ccucccagccugcccuggc

SEQ ID NO: 511088 - RNA, 23 nt, Human
ccuccugucuccuucugcauucc

SEQ ID NO: 511089 - RNA, 21 nt, Human
ccucucccuccaguaccucuu

SEQ ID NO: 511090 - RNA, 23 nt, Human
ccugcaagcccuguguuccuugc

SEQ ID NO: 511091 - RNA, 23 nt, Human
ccugcccuggccaucaccccagc

SEQ ID NO: 511092 - RNA, 18 nt, Human
ccugucaccaaagaggag

SEQ ID NO: 511093 - RNA, 23 nt, Human
cgacgguuccccacugcucccag

SEQ ID NO: 511094 - RNA, 24 nt, Human
cgcaccaucuuugcacacacaccc

SEQ ID NO: 511095 - RNA, 19 nt, Human
cgcagauccgugacucgca

SEQ ID NO: 511096 - RNA, 20 nt, Human
cgcuccccaccaaggcauug

SEQ ID NO: 511097 - RNA, 23 nt, Human
cgggaauccugcuccccugccga

SEQ ID NO: 511098 - RNA, 18 nt, Human
cucaagaguugaagcauc

SEQ ID NO: 511099 - RNA, 19 nt, Human
cucaagaguugaagcaucc

SEQ ID NO: 511100 - RNA, 21 nt, Human
cuccagcccagcagccucaac

SEQ ID NO: 511101 - RNA, 23 nt, Human
cuccagcccagcagccucaaccc

SEQ ID NO: 511102 - RNA, 23 nt, Human
cuccaguaccucuugugugcacu

SEQ ID NO: 511103 - RNA, 18 nt, Human
cuccuguccagagaagau

SEQ ID NO: 511104 - RNA, 21 nt, Human
cugcaagcccuguguuccuug

SEQ ID NO: 511105 - RNA, 20 nt, Human
cugcuccccugccgagaccu

SEQ ID NO: 511106 - RNA, 21 nt, Human
cugcuccccugccgagaccuc

SEQ ID NO: 511107 - RNA, 24 nt, Human
cugucaccaaagaggagggggccc

SEQ ID NO: 511108 - RNA, 29 nt, Human
cuucaaaacaaacaaaaaaacaaaaaaga

SEQ ID NO: 511109 - RNA, 23 nt, Human
cuucgugcccaggccugggccuc

SEQ ID NO: 511110 - RNA, 23 nt, Human
cuuggggcuccgggccagggaga

SEQ ID NO: 511111 - RNA, 21 nt, Human
gaaucccaaagcugucaccuc

SEQ ID NO: 511112 - RNA, 21 nt, Human
gacacuuggcaucaguggugu

SEQ ID NO: 511113 - RNA, 27 nt, Human
gagaagaguaggaggaugccgguaccc

SEQ ID NO: 511114 - RNA, 21 nt, Human
gagaaggggacauuacaaugc

SEQ ID NO: 511115 - RNA, 19 nt, Human
gagggggccagccucaucc

SEQ ID NO: 511116 - RNA, 20 nt, Human
gcacuucuguucugagcaac

SEQ ID NO: 511117 - RNA, 19 nt, Human
gccagggagagaaggggac

SEQ ID NO: 511118 - RNA, 25 nt, Human
gcccgcuccccaccaaggcauugcc

SEQ ID NO: 511119 - RNA, 21 nt, Human
gccugagcaggacaaggaccc

SEQ ID NO: 511120 - RNA, 19 nt, Human
gccuggagccugcucaucc

SEQ ID NO: 511121 - RNA, 18 nt, Human
gccuugugugcauaccug

SEQ ID NO: 511122 - RNA, 22 nt, Human
gcucagccagugcacugagcac

SEQ ID NO: 511123 - RNA, 18 nt, Human
ggacaauggaggccucuc

SEQ ID NO: 511124 - RNA, 19 nt, Human
ggaggcuuccugucaccaa

SEQ ID NO: 511125 - RNA, 21 nt, Human
ggaguuuggguuugguuucuc

SEQ ID NO: 511126 - RNA, 22 nt, Human
ggaguuuggguuugguuucucu

SEQ ID NO: 511127 - RNA, 20 nt, Human
ggaugcacagucugcauuua

SEQ ID NO: 511128 - RNA, 18 nt, Human
gggcaccggggaugcaca

SEQ ID NO: 511129 - RNA, 23 nt, Human
gggcaccggggaugcacagucug

SEQ ID NO: 511130 - RNA, 26 nt, Human
gggcacucugugucugucccgucccc

SEQ ID NO: 511131 - RNA, 22 nt, Human
gggcagggaugccugagcagga

SEQ ID NO: 511132 - RNA, 20 nt, Human
gggggccaagggccugccag

SEQ ID NO: 511133 - RNA, 24 nt, Human
guaccacagcaagccggugcugug

SEQ ID NO: 511134 - RNA, 22 nt, Human
gucacccuuccugcgcagaucc

SEQ ID NO: 511135 - RNA, 19 nt, Human
guggggcccaggagcaggg

SEQ ID NO: 511136 - RNA, 20 nt, Human
uaaaaccagagaucccagac

SEQ ID NO: 511137 - RNA, 24 nt, Human
uaaaaccagagaucccagaccucc

SEQ ID NO: 511138 - RNA, 24 nt, Human
ucagaagucggauaaaaccagaga

SEQ ID NO: 511139 - RNA, 23 nt, Human
ucagcugccccucagguccucaa

SEQ ID NO: 511140 - RNA, 18 nt, Human
uccaugggaggcuuccug

SEQ ID NO: 511141 - RNA, 21 nt, Human
ucccauugaucuaugugucua

SEQ ID NO: 511142 - RNA, 18 nt, Human
uccccacugcucccagga

SEQ ID NO: 511143 - RNA, 18 nt, Human
ucccuguugccacugccc

SEQ ID NO: 511144 - RNA, 23 nt, Human
uccuauggaaaguaugucccucc

SEQ ID NO: 511145 - RNA, 18 nt, Human
uccugagggcaccgggga

SEQ ID NO: 511146 - RNA, 18 nt, Human
uccuggaugaguucgugc

SEQ ID NO: 511147 - RNA, 21 nt, Human
ucgcucagguuggaaagaugc

SEQ ID NO: 511148 - RNA, 20 nt, Human
ucguguugagggcccuccug

SEQ ID NO: 511149 - RNA, 18 nt, Human
ucucccuccaguaccucu

SEQ ID NO: 511150 - RNA, 23 nt, Human
ucucccuguugccacugccccug

SEQ ID NO: 511151 - RNA, 22 nt, Human
ucucuguggggcccaggagcag

SEQ ID NO: 511152 - RNA, 20 nt, Human
ugaaauacacaaacaauacc

SEQ ID NO: 511153 - RNA, 21 nt, Human
ugaagcauccgacgguucccc

SEQ ID NO: 511154 - RNA, 20 nt, Human
ugagcaggacaaggacccca

SEQ ID NO: 511155 - RNA, 18 nt, Human
ugcccagaggucagaagu

SEQ ID NO: 511156 - RNA, 20 nt, Human
ugcccaggccugggccucug

SEQ ID NO: 511157 - RNA, 21 nt, Human
ugcccaggccugggccucugc

SEQ ID NO: 511158 - RNA, 20 nt, Human
ugccccagacuccuguccag

SEQ ID NO: 511159 - RNA, 21 nt, Human
ugcccuggccaucaccccagc

SEQ ID NO: 511160 - RNA, 19 nt, Human
ugccugagcaggacaagga

SEQ ID NO: 511161 - RNA, 22 nt, Human
ugcugugugcucccaauuccag

SEQ ID NO: 511162 - RNA, 20 nt, Human
uggcagcuaaggcggaugcu

SEQ ID NO: 511163 - RNA, 26 nt, Human
ugggccagaaccaggucuuggagaga

SEQ ID NO: 511164 - RNA, 20 nt, Human
ugugugcauaccuggccaug

SEQ ID NO: 511165 - RNA, 18 nt, Human
uguucuucccgcgcgccu

SEQ ID NO: 511166 - RNA, 22 nt, Human
uguuuugguuaccaugcacuug

SEQ ID NO: 511167 - RNA, 18 nt, Human
uuagagcccagcucucaa

SEQ ID NO: 511168 - RNA, 20 nt, Human
uugugugcacugcccgcucc

SEQ ID NO: 511169 - RNA, 20 nt, Human
aagccugcgguugauccugg

SEQ ID NO: 511170 - RNA, 19 nt, Human
aauguccuugcaagacuga

SEQ ID NO: 511171 - RNA, 21 nt, Human
caagauggagucccuccucuc

SEQ ID NO: 511172 - RNA, 21 nt, Human
cacaaagaaucaaaaaugcag

SEQ ID NO: 511173 - RNA, 19 nt, Human
cagugcagccaugccaggc

SEQ ID NO: 511174 - RNA, 25 nt, Human
ccucucaugauccagccacaaaggc

SEQ ID NO: 511175 - RNA, 18 nt, Human
gaguccuugggaagguuc

SEQ ID NO: 511176 - RNA, 21 nt, Human
gugcagccaugccaggcuggg

SEQ ID NO: 511177 - RNA, 18 nt, Human
uacagugcagccaugcca

SEQ ID NO: 511178 - RNA, 21 nt, Human
uauuuuuuccaugacuuuuuc

SEQ ID NO: 511179 - RNA, 18 nt, Human
uccaugacuuuuuccucc

SEQ ID NO: 511180 - RNA, 18 nt, Human
uccuugggaagguuccag

SEQ ID NO: 511181 - RNA, 21 nt, Human
ugaccaagggacugaagaaag

SEQ ID NO: 511182 - RNA, 26 nt, Human
ugaccaagggacugaagaaagccugc

SEQ ID NO: 511183 - RNA, 19 nt, Human
ugaguccuugggaagguuc

SEQ ID NO: 511184 - RNA, 23 nt, Human
ugccaggcugggggacauggcuc

SEQ ID NO: 511185 - RNA, 18 nt, Human
ugggggacauggcucaag

SEQ ID NO: 511186 - RNA, 20 nt, Human
ugggggacauggcucaagau

SEQ ID NO: 511187 - RNA, 19 nt, Human
aagaaugaaguugcagacc

SEQ ID NO: 511188 - RNA, 24 nt, Human
aagcuucacagcguggaagggaac

SEQ ID NO: 511189 - RNA, 19 nt, Human
aaguugcagacccuugcgg

SEQ ID NO: 511190 - RNA, 19 nt, Human
aaguugcagaccuucgcgg

SEQ ID NO: 511191 - RNA, 23 nt, Human
accaaaagaacaaagcuucacag

SEQ ID NO: 511192 - RNA, 18 nt, Human
acccaacgagugagcagc

SEQ ID NO: 511193 - RNA, 19 nt, Human
agcuacgcagccgccccca

SEQ ID NO: 511194 - RNA, 25 nt, Human
agcuacgcagccgcccccacuccuc

SEQ ID NO: 511195 - RNA, 19 nt, Human
aguaagcccccaaauugcu

SEQ ID NO: 511196 - RNA, 18 nt, Human
caaaugaucaccuagaca

SEQ ID NO: 511197 - RNA, 19 nt, Human
caaaugaucaccuagacac

SEQ ID NO: 511198 - RNA, 21 nt, Human
caaaugaucaccuagacaccc

SEQ ID NO: 511199 - RNA, 22 nt, Human
cagacucugcuccagauccaaa

SEQ ID NO: 511200 - RNA, 24 nt, Human
cagauccaaaugaucaccuagaca

SEQ ID NO: 511201 - RNA, 23 nt, Human
cagcuacgcagccgcccccacuc

SEQ ID NO: 511202 - RNA, 18 nt, Human
cccucaggcuccugggcu

SEQ ID NO: 511203 - RNA, 26 nt, Human
cuccugggcugggaccacagcuacgc

SEQ ID NO: 511204 - RNA, 20 nt, Human
cuggcagaauggcagacucu

SEQ ID NO: 511205 - RNA, 18 nt, Human
gaaugaaguugcagaccc

SEQ ID NO: 511206 - RNA, 19 nt, Human
gcagacccuugcggugagu

SEQ ID NO: 511207 - RNA, 18 nt, Human
gcagccgcccccacuccu

SEQ ID NO: 511208 - RNA, 23 nt, Human
ggaccacagcuacgcagccgccc

SEQ ID NO: 511209 - RNA, 24 nt, Human
uauuacgguucuuaaagauggugu

SEQ ID NO: 511210 - RNA, 21 nt, Human
ucaggcuccugggcugggacc

SEQ ID NO: 511211 - RNA, 20 nt, Human
ucucacugcuuggcaauagu

SEQ ID NO: 511212 - RNA, 20 nt, Human
ugcuccagauccaaaugauc

SEQ ID NO: 511213 - RNA, 23 nt, Human
uggcaauagucucaccacuuggu

SEQ ID NO: 511214 - RNA, 23 nt, Human
uggcaauagucucacugcuuggc

SEQ ID NO: 511215 - RNA, 23 nt, Human
uggcagaauggcagacucugcuc

SEQ ID NO: 511216 - RNA, 26 nt, Human
uuggcgauaggugauagucucaccgc

SEQ ID NO: 511217 - RNA, 28 nt, Human
uuggugauaggugacagucucuucaaag

SEQ ID NO: 511218 - RNA, 27 nt, Human
uuguucauuccucucggugcauucgug

SEQ ID NO: 511219 - RNA, 22 nt, Human
aaacaaacaggagaucuaacag

SEQ ID NO: 511220 - RNA, 20 nt, Human
aaacaggagaucuaacaggc

SEQ ID NO: 511221 - RNA, 25 nt, Human
aaagaagaaaaucacauuucuaaaa

SEQ ID NO: 511222 - RNA, 18 nt, Human
aacagccaugcagccccc

SEQ ID NO: 511223 - RNA, 25 nt, Human
aagaacuuccgacagagcagcacac

SEQ ID NO: 511224 - RNA, 25 nt, Human
aagcaguucucaaaggcaccuccca

SEQ ID NO: 511225 - RNA, 18 nt, Human
aaggcaccucccacgcuc

SEQ ID NO: 511226 - RNA, 20 nt, Human
acacugcugcugcugcaagc

SEQ ID NO: 511227 - RNA, 21 nt, Human
acagauagaucaucaaaaaca

SEQ ID NO: 511228 - RNA, 23 nt, Human
acaggaagacugcugagaggaug

SEQ ID NO: 511229 - RNA, 22 nt, Human
acaggagaaacagcaguugcag

SEQ ID NO: 511230 - RNA, 29 nt, Human
accucuuccugccccuccccucccccaag

SEQ ID NO: 511231 - RNA, 20 nt, Human
agaagaaaaccaccuuggag

SEQ ID NO: 511232 - RNA, 24 nt, Human
agagaagaaaaccaccuuggagga

SEQ ID NO: 511233 - RNA, 19 nt, Human
agagagcaagugugcuuug

SEQ ID NO: 511234 - RNA, 21 nt, Human
agagcaagugugcuuuggggg

SEQ ID NO: 511235 - RNA, 22 nt, Human
agccaugcagcccccacccccc

SEQ ID NO: 511236 - RNA, 19 nt, Human
aggaaaccugaaauagcug

SEQ ID NO: 511237 - RNA, 19 nt, Human
aggaaaccugaaauagcug

SEQ ID NO: 511238 - RNA, 20 nt, Human
aggaaaccugaaauagcugu

SEQ ID NO: 511239 - RNA, 22 nt, Human
aggcaccucccacgcucuaaac

SEQ ID NO: 511240 - RNA, 21 nt, Human
aguuauacuccucacagguca

SEQ ID NO: 511241 - RNA, 23 nt, Human
auaaauacucuaauagcuuaaaa

SEQ ID NO: 511242 - RNA, 21 nt, Human
augaagauaaauacucuaaua

SEQ ID NO: 511243 - RNA, 19 nt, Human
augcagcccccaccccccc

SEQ ID NO: 511244 - RNA, 24 nt, Human
auggcagagcaauuaagcugagug

SEQ ID NO: 511245 - RNA, 24 nt, Human
auguucugccaacugaaacaaaca

SEQ ID NO: 511246 - RNA, 24 nt, Human
auuauacaugcuacccugacgacg

SEQ ID NO: 511247 - RNA, 24 nt, Human
caagcccugcauaggagggacagg

SEQ ID NO: 511248 - RNA, 21 nt, Human
caagcuaacacaggaaaccug

SEQ ID NO: 511249 - RNA, 19 nt, Human
cacccccccaggcaggccc

SEQ ID NO: 511250 - RNA, 21 nt, Human
cagaaaaggcugaagaaaacu

SEQ ID NO: 511251 - RNA, 23 nt, Human
cagaguggguggcuuacuguugg

SEQ ID NO: 511252 - RNA, 21 nt, Human
cagcaguugcaggagguggcc

SEQ ID NO: 511253 - RNA, 18 nt, Human
cagccaccauccuauccc

SEQ ID NO: 511254 - RNA, 21 nt, Human
cagccaugcagcccccacccc

SEQ ID NO: 511255 - RNA, 27 nt, Human
cagcccccacccccccaggcaggcccc

SEQ ID NO: 511256 - RNA, 18 nt, Human
cagcugcuccucccgcag

SEQ ID NO: 511257 - RNA, 18 nt, Human
ccacacugcugcugcugc

SEQ ID NO: 511258 - RNA, 21 nt, Human
ccaccauccuauccccaagcu

SEQ ID NO: 511259 - RNA, 23 nt, Human
ccacccaacagccaugcagcccc

SEQ ID NO: 511260 - RNA, 18 nt, Human
ccacuuuggaccaucuga

SEQ ID NO: 511261 - RNA, 20 nt, Human
ccacuuuggaccaucugauc

SEQ ID NO: 511262 - RNA, 18 nt, Human
ccaggugggaauuaagaa

SEQ ID NO: 511263 - RNA, 18 nt, Human
ccaguccucccucccacc

SEQ ID NO: 511264 - RNA, 18 nt, Human
ccaguccucccucccacc

SEQ ID NO: 511265 - RNA, 20 nt, Human
ccaugcagcccccacccccc

SEQ ID NO: 511266 - RNA, 20 nt, Human
ccccaaagaugugauuggcu

SEQ ID NO: 511267 - RNA, 21 nt, Human
ccccaaagaugugauuggcuu

SEQ ID NO: 511268 - RNA, 23 nt, Human
ccccacccccccaggcaggccca

SEQ ID NO: 511269 - RNA, 23 nt, Human
cccccacccccccaggcaggccc

SEQ ID NO: 511270 - RNA, 20 nt, Human
ccuauccccaagcuaacaca

SEQ ID NO: 511271 - RNA, 18 nt, Human
cuauccccaagcuaacac

SEQ ID NO: 511272 - RNA, 21 nt, Human
cuauccccaagcuaacacagg

SEQ ID NO: 511273 - RNA, 20 nt, Human
cucacaggucaaaagaagaa

SEQ ID NO: 511274 - RNA, 18 nt, Human
cuccagaguggguggcuu

SEQ ID NO: 511275 - RNA, 18 nt, Human
cugcagcuccuucugccu

SEQ ID NO: 511276 - RNA, 19 nt, Human
cugcugcugcaagcccugc

SEQ ID NO: 511277 - RNA, 22 nt, Human
cugcugcugcugcaagcccugc

SEQ ID NO: 511278 - RNA, 19 nt, Human
cuggcugcuacccagcugg

SEQ ID NO: 511279 - RNA, 22 nt, Human
cuucccagggcagagaagccug

SEQ ID NO: 511280 - RNA, 23 nt, Human
cuucugguugucugauggccuuu

SEQ ID NO: 511281 - RNA, 19 nt, Human
gaacugaaccagaaaaggc

SEQ ID NO: 511282 - RNA, 20 nt, Human
gaacugaaccagaaaaggcu

SEQ ID NO: 511283 - RNA, 23 nt, Human
gaacugaaccagaaaaggcugaa

SEQ ID NO: 511284 - RNA, 21 nt, Human
gacaagggaacugaaccagaa

SEQ ID NO: 511285 - RNA, 24 nt, Human
gacacacagcugcuccucccgcag

SEQ ID NO: 511286 - RNA, 24 nt, Human
gacaggaagacugcugagaggaug

SEQ ID NO: 511287 - RNA, 19 nt, Human
gagaaacagcaguugcagg

SEQ ID NO: 511288 - RNA, 19 nt, Human
gagugaggugccggggaca

SEQ ID NO: 511289 - RNA, 18 nt, Human
gauucugugacuccagag

SEQ ID NO: 511290 - RNA, 19 nt, Human
ggcacuaucagugggaguu

SEQ ID NO: 511291 - RNA, 21 nt, Human
ggcgggugacaggaagacugc

SEQ ID NO: 511292 - RNA, 21 nt, Human
gggaguuuucaggaagccaag

SEQ ID NO: 511293 - RNA, 23 nt, Human
ggguacagaucgaguuauuuaag

SEQ ID NO: 511294 - RNA, 19 nt, Human
guacauguugcuuuguggg

SEQ ID NO: 511295 - RNA, 21 nt, Human
gugaguuauugggagaccaga

SEQ ID NO: 511296 - RNA, 24 nt, Human
uaaaacccucgauguauaacacac

SEQ ID NO: 511297 - RNA, 23 nt, Human
uaacacgcucucacaugcacgua

SEQ ID NO: 511298 - RNA, 20 nt, Human
uaagagaagaaaaccaccuu

SEQ ID NO: 511299 - RNA, 23 nt, Human
uagaagacacguauaauggaaca

SEQ ID NO: 511300 - RNA, 23 nt, Human
uagcaaggcuccuaacaggccag

SEQ ID NO: 511301 - RNA, 21 nt, Human
uaggagaucauggagucaagc

SEQ ID NO: 511302 - RNA, 23 nt, Human
uaggagggacaggagaaacagca

SEQ ID NO: 511303 - RNA, 24 nt, Human
ucaaaguauuucauuaaggugcaa

SEQ ID NO: 511304 - RNA, 21 nt, Human
ucacaggucaaaagaagaaaa

SEQ ID NO: 511305 - RNA, 21 nt, Human
uccacuuuggaccaucugauc

SEQ ID NO: 511306 - RNA, 18 nt, Human
ucccagggaugcugagug

SEQ ID NO: 511307 - RNA, 18 nt, Human
ucccagggcagagaagcc

SEQ ID NO: 511308 - RNA, 21 nt, Human
ucccagggcagagaagccugc

SEQ ID NO: 511309 - RNA, 19 nt, Human
uccccaagcuaacacagga

SEQ ID NO: 511310 - RNA, 25 nt, Human
uccccaagcuaacacaggaaaccug

SEQ ID NO: 511311 - RNA, 18 nt, Human
ucccugugcugacacugc

SEQ ID NO: 511312 - RNA, 23 nt, Human
ucccugugcugacacugccaccc

SEQ ID NO: 511313 - RNA, 21 nt, Human
uccugccccuccccuccccca

SEQ ID NO: 511314 - RNA, 22 nt, Human
ucuccagccaccauccuauccc

SEQ ID NO: 511315 - RNA, 20 nt, Human
ugaaacgcccucuuaaggac

SEQ ID NO: 511316 - RNA, 20 nt, Human
ugaaauagcuguaauuuggc

SEQ ID NO: 511317 - RNA, 22 nt, Human
ugacacugccacccaacagcca

SEQ ID NO: 511318 - RNA, 18 nt, Human
ugagagagcaagugugcu

SEQ ID NO: 511319 - RNA, 24 nt, Human
ugagaggaugaugccacaguuggg

SEQ ID NO: 511320 - RNA, 23 nt, Human
ugaguuuauuugcuuguauuuaa

SEQ ID NO: 511321 - RNA, 19 nt, Human
ugcauaggagggacaggag

SEQ ID NO: 511322 - RNA, 20 nt, Human
ugcuggagagcuccaacucu

SEQ ID NO: 511323 - RNA, 23 nt, Human
ugcuucugguugucugauggccu

SEQ ID NO: 511324 - RNA, 19 nt, Human
ugggggauggagauggcca

SEQ ID NO: 511325 - RNA, 21 nt, Human
ugggggauggagauggccaca

SEQ ID NO: 511326 - RNA, 21 nt, Human
uggguggcuuacuguuggugg

SEQ ID NO: 511327 - RNA, 23 nt, Human
ugucacgauauccucacuuaaaa

SEQ ID NO: 511328 - RNA, 26 nt, Human
uguggcauauacauguuugugacacu

SEQ ID NO: 511329 - RNA, 22 nt, Human
uuagaagacacguauaauggaa

SEQ ID NO: 511330 - RNA, 18 nt, Human
uucaucgccaccuucagc

SEQ ID NO: 511331 - RNA, 22 nt, Human
uucucaccucuuccugccccuc

SEQ ID NO: 511332 - RNA, 19 nt, Human
uuggaccaucugaucuucu

SEQ ID NO: 511333 - RNA, 20 nt, Human
uuuaagagaagaaaaccacc

SEQ ID NO: 511334 - RNA, 18 nt, Human
uuugcuuguauuuaaaau

SEQ ID NO: 511335 - RNA, 23 nt, Human
ggacaauaugguaacuggccccc

SEQ ID NO: 511336 - RNA, 20 nt, Human
uuccugaaugucaaggaccc

SEQ ID NO: 511337 - RNA, 26 nt, Human
aaaaaucugucccuuacuaucaggug

SEQ ID NO: 511338 - RNA, 20 nt, Human
aaacucaaaaaaaaaaaaac

SEQ ID NO: 511339 - RNA, 22 nt, Human
acucaaaaaaaaaaaaacaaaa

SEQ ID NO: 511340 - RNA, 28 nt, Human
acucaaaaaaaaaaaaacaaaaccuguc

SEQ ID NO: 511341 - RNA, 18 nt, Human
agaucagagauuaaagac

SEQ ID NO: 511342 - RNA, 24 nt, Human
aucauccuagggacugcuggaggu

SEQ ID NO: 511343 - RNA, 27 nt, Human
caaaaaacuaaaacuacaauuaguucc

SEQ ID NO: 511344 - RNA, 20 nt, Human
caacagccuagaaggcaaaa

SEQ ID NO: 511345 - RNA, 18 nt, Human
caacuacugcaggacugg

SEQ ID NO: 511346 - RNA, 19 nt, Human
cacggagagauggagaaga

SEQ ID NO: 511347 - RNA, 22 nt, Human
cagccuagaaggcaaaauuauu

SEQ ID NO: 511348 - RNA, 18 nt, Human
cagugggaacuaccuggc

SEQ ID NO: 511349 - RNA, 20 nt, Human
ccauggccuucuaacacuaa

SEQ ID NO: 511350 - RNA, 20 nt, Human
cuaaaacuacaauuaguucc

SEQ ID NO: 511351 - RNA, 18 nt, Human
cuccucucgaaaaccuua

SEQ ID NO: 511352 - RNA, 19 nt, Human
cugaacugcauuuugacau

SEQ ID NO: 511353 - RNA, 21 nt, Human
cuuuaaauucugccuucaauu

SEQ ID NO: 511354 - RNA, 18 nt, Human
cuuuaagucuuccuuucc

SEQ ID NO: 511355 - RNA, 20 nt, Human
gacuauguggcaucagaaaa

SEQ ID NO: 511356 - RNA, 23 nt, Human
gcaaagcugacauaaacucaaaa

SEQ ID NO: 511357 - RNA, 23 nt, Human
uaaaaaauauccguagacuacau

SEQ ID NO: 511358 - RNA, 23 nt, Human
uaaacucaaaaaaaaaaaaacaa

SEQ ID NO: 511359 - RNA, 22 nt, Human
uaagcuccauggccuucuaaca

SEQ ID NO: 511360 - RNA, 23 nt, Human
ucacagcaugcccaagcuucugc

SEQ ID NO: 511361 - RNA, 23 nt, Human
ucuguuaucuauccuguuaucaa

SEQ ID NO: 511362 - RNA, 18 nt, Human
ugauaaaaaauauccgua

SEQ ID NO: 511363 - RNA, 26 nt, Human
ugccauaaacauuuccaucaguggga

SEQ ID NO: 511364 - RNA, 18 nt, Human
uggaaaaucacagcaugc

SEQ ID NO: 511365 - RNA, 24 nt, Human
uguugcucuugucugaacugcauu

SEQ ID NO: 511366 - RNA, 22 nt, Human
uuaaaaaucugucccuuacuau

SEQ ID NO: 511367 - RNA, 21 nt, Human
uuagagcaacagccuagaagg

SEQ ID NO: 511368 - RNA, 22 nt, Human
uuccacucacuaucaacuuuaa

SEQ ID NO: 511369 - RNA, 22 nt, Human
uuuaaaaugucuucaguauaca

SEQ ID NO: 511370 - RNA, 21 nt, Human
uuuaaacaaagcagaagugag

SEQ ID NO: 511371 - RNA, 24 nt, Human
uuucuuguuuugaauuuuaaaaag

SEQ ID NO: 511372 - RNA, 21 nt, Human
uuuguuuuguuucuuguuuug

SEQ ID NO: 511373 - RNA, 19 nt, Human
uuuugacauugugauagca

SEQ ID NO: 511374 - RNA, 22 nt, Human
aaccaacccaguaugcaaaacg

SEQ ID NO: 511375 - RNA, 24 nt, Human
aaccaacccaguaugcaaaacgca

SEQ ID NO: 511376 - RNA, 22 nt, Human
aagccagggacaggccugagca

SEQ ID NO: 511377 - RNA, 25 nt, Human
accgcagccccagcaaaccaaccca

SEQ ID NO: 511378 - RNA, 24 nt, Human
acgacauuuauccgcgcagacuga

SEQ ID NO: 511379 - RNA, 18 nt, Human
agaagccagggacaggcc

SEQ ID NO: 511380 - RNA, 18 nt, Human
agauuccccucacggccu

SEQ ID NO: 511381 - RNA, 25 nt, Human
agccggccccucacuccccggcccc

SEQ ID NO: 511382 - RNA, 20 nt, Human
aggcucacaggauaaacacc

SEQ ID NO: 511383 - RNA, 19 nt, Human
agggcccagcgaggugggc

SEQ ID NO: 511384 - RNA, 19 nt, Human
aggugggcucagccggccc

SEQ ID NO: 511385 - RNA, 19 nt, Human
auccggucccgcccgcacc

SEQ ID NO: 511386 - RNA, 19 nt, Human
aucucagacccccgccugc

SEQ ID NO: 511387 - RNA, 21 nt, Human
caaacaaguaggccugcuccu

SEQ ID NO: 511388 - RNA, 24 nt, Human
caaggcggggcgccagggagggcc

SEQ ID NO: 511389 - RNA, 20 nt, Human
caaguaggccugcuccucuc

SEQ ID NO: 511390 - RNA, 20 nt, Human
caccagcacccacacaggga

SEQ ID NO: 511391 - RNA, 20 nt, Human
caccagcagcccccagaagc

SEQ ID NO: 511392 - RNA, 20 nt, Human
cacccgcgacacccugaucu

SEQ ID NO: 511393 - RNA, 22 nt, Human
caccuucguuuuacuccaaggg

SEQ ID NO: 511394 - RNA, 18 nt, Human
cacgacauuuauccgcgc

SEQ ID NO: 511395 - RNA, 19 nt, Human
cacgacauuuauccgcgca

SEQ ID NO: 511396 - RNA, 23 nt, Human
cagcagcccccagaagccaggga

SEQ ID NO: 511397 - RNA, 18 nt, Human
cagcccccagaagccagg

SEQ ID NO: 511398 - RNA, 19 nt, Human
cagcccccagaagccaggg

SEQ ID NO: 511399 - RNA, 21 nt, Human
ccaaggaacugaaaauaccac

SEQ ID NO: 511400 - RNA, 21 nt, Human
ccacccgcgacacccugaucu

SEQ ID NO: 511401 - RNA, 24 nt, Human
ccagcacccacacagggaggacac

SEQ ID NO: 511402 - RNA, 22 nt, Human
ccccagaagccagggacaggcc

SEQ ID NO: 511403 - RNA, 22 nt, Human
ccccagcaaaccaacccaguau

SEQ ID NO: 511404 - RNA, 19 nt, Human
cccccagcaccucagacug

SEQ ID NO: 511405 - RNA, 18 nt, Human
cccccgccgcccccgggc

SEQ ID NO: 511406 - RNA, 22 nt, Human
cccccgccgcccccgggcccac

SEQ ID NO: 511407 - RNA, 23 nt, Human
cccgccugcaaagcugugagagc

SEQ ID NO: 511408 - RNA, 24 nt, Human
cccgcgacacccugaucucagacc

SEQ ID NO: 511409 - RNA, 20 nt, Human
cccgcgcgcucgccgccgcc

SEQ ID NO: 511410 - RNA, 20 nt, Human
ccgcgcgcucgccgccgccc

SEQ ID NO: 511411 - RNA, 25 nt, Human
ccggccccucacuccccggcccccg

SEQ ID NO: 511412 - RNA, 21 nt, Human
ccuaacccccagcaccucaga

SEQ ID NO: 511413 - RNA, 19 nt, Human
cgcacaggcucacaggaua

SEQ ID NO: 511414 - RNA, 20 nt, Human
cggcccccgccgcccccggg

SEQ ID NO: 511415 - RNA, 22 nt, Human
cucacaggauaaacaccuucgu

SEQ ID NO: 511416 - RNA, 25 nt, Human
cugaaaauaccaccagcagccccca

SEQ ID NO: 511417 - RNA, 21 nt, Human
cuggugucacuacgaaaaggg

SEQ ID NO: 511418 - RNA, 23 nt, Human
gagcacacaucucuguuaaagcc

SEQ ID NO: 511419 - RNA, 23 nt, Human
gcacaggcucacaggauaaacac

SEQ ID NO: 511420 - RNA, 22 nt, Human
gcagccccagcaaaccaaccca

SEQ ID NO: 511421 - RNA, 18 nt, Human
gcgaaguauccacacacc

SEQ ID NO: 511422 - RNA, 21 nt, Human
gcgcgcucgccgccgcccaag

SEQ ID NO: 511423 - RNA, 18 nt, Human
gcggcauaugcugucacc

SEQ ID NO: 511424 - RNA, 19 nt, Human
ggacacaggugaaggcaga

SEQ ID NO: 511425 - RNA, 20 nt, Human
ggacgaaauccggucccgcc

SEQ ID NO: 511426 - RNA, 22 nt, Human
ggccccucacuccccggccccc

SEQ ID NO: 511427 - RNA, 23 nt, Human
gggagggcccagcgaggugggcu

SEQ ID NO: 511428 - RNA, 24 nt, Human
uaauuaguuaagauuaggccaugc

SEQ ID NO: 511429 - RNA, 23 nt, Human
uaggaaaaucaguaaucuauuca

SEQ ID NO: 511430 - RNA, 21 nt, Human
uauccacacaccaaggaacug

SEQ ID NO: 511431 - RNA, 21 nt, Human
ucagaggugcuccagcccugg

SEQ ID NO: 511432 - RNA, 21 nt, Human
ucagccggccccucacucccc

SEQ ID NO: 511433 - RNA, 26 nt, Human
ucaguaaucuauucauuaaguuuccu

SEQ ID NO: 511434 - RNA, 20 nt, Human
uccacacaccaaggaacuga

SEQ ID NO: 511435 - RNA, 18 nt, Human
uccccggcccccgccgcc

SEQ ID NO: 511436 - RNA, 18 nt, Human
ugaaaauaccaccagcag

SEQ ID NO: 511437 - RNA, 21 nt, Human
ugaccccccacccgcgacacc

SEQ ID NO: 511438 - RNA, 19 nt, Human
ugacuaggaaaaucaguaa

SEQ ID NO: 511439 - RNA, 23 nt, Human
ugagcagauuccccucacggccu

SEQ ID NO: 511440 - RNA, 20 nt, Human
ugggccccaauccaacacag

SEQ ID NO: 511441 - RNA, 23 nt, Human
uguguaaccgcaaaauuuauaua

SEQ ID NO: 511442 - RNA, 19 nt, Human
uuaaagcccagcucgcggc

SEQ ID NO: 511443 - RNA, 22 nt, Human
uugaaguccuaacccccagcac

SEQ ID NO: 511444 - RNA, 19 nt, Human
uuggacaccagcacccaca

SEQ ID NO: 511445 - RNA, 18 nt, Human
uuguggacauaagauccu

SEQ ID NO: 511446 - RNA, 23 nt, Human
uuuccauacaaaaagggcuccac

SEQ ID NO: 511447 - RNA, 20 nt, Human
uuuuguggacauaagauccu

SEQ ID NO: 511448 - RNA, 25 nt, Human
uuuuuuuuuuuuuuccuuacagggg

SEQ ID NO: 511449 - RNA, 22 nt, Human
aaaaaaaaaaaaaaaaagcugg

SEQ ID NO: 511450 - RNA, 18 nt, Human
aaaaaaaaaaaaaaaagc

SEQ ID NO: 511451 - RNA, 22 nt, Human
aaaaaaaaagcuggcguacucg

SEQ ID NO: 511452 - RNA, 19 nt, Human
aaaaaaaccuccuaaaauu

SEQ ID NO: 511453 - RNA, 19 nt, Human
aaaacacaugaaacgcaca

SEQ ID NO: 511454 - RNA, 24 nt, Human
aaaaccuccuaaaauuaaaagccu

SEQ ID NO: 511455 - RNA, 19 nt, Human
aaaccacgcugaccaguga

SEQ ID NO: 511456 - RNA, 19 nt, Human
aaaggaagcccaaguuguc

SEQ ID NO: 511457 - RNA, 20 nt, Human
aaagucaguuuuugauaggu

SEQ ID NO: 511458 - RNA, 28 nt, Human
aaaucauaaaaauucauguugcgauaaa

SEQ ID NO: 511459 - RNA, 29 nt, Human
aaaucauaaaaauucauguugcgauaaau

SEQ ID NO: 511460 - RNA, 23 nt, Human
aacaaaacuggccaacauucccc

SEQ ID NO: 511461 - RNA, 19 nt, Human
aacaaauuguauaagcaca

SEQ ID NO: 511462 - RNA, 22 nt, Human
aagacacaggaccagagaccca

SEQ ID NO: 511463 - RNA, 19 nt, Human
aagcaccuaugagacugug

SEQ ID NO: 511464 - RNA, 24 nt, Human
aagcagaaauggcaagacuaaguc

SEQ ID NO: 511465 - RNA, 26 nt, Human
aagcagaaauggcaagacuaagucca

SEQ ID NO: 511466 - RNA, 19 nt, Human
aagcucccuggagcucugc

SEQ ID NO: 511467 - RNA, 21 nt, Human
aagcuuguuuguuugcaccua

SEQ ID NO: 511468 - RNA, 21 nt, Human
aaggcaauacccuuuaucuua

SEQ ID NO: 511469 - RNA, 21 nt, Human
aaguugauacuaccaaaaauc

SEQ ID NO: 511470 - RNA, 20 nt, Human
aauacaaucauauacuauga

SEQ ID NO: 511471 - RNA, 23 nt, Human
acacacacuuucugugcuucucu

SEQ ID NO: 511472 - RNA, 18 nt, Human
acauggcuagaagcugga

SEQ ID NO: 511473 - RNA, 19 nt, Human
accacgcugaccagugaca

SEQ ID NO: 511474 - RNA, 25 nt, Human
acccugauaacaccaagaacauucu

SEQ ID NO: 511475 - RNA, 22 nt, Human
agagaaaaaaggggaauuuuaa

SEQ ID NO: 511476 - RNA, 18 nt, Human
agaguccguuaaagacag

SEQ ID NO: 511477 - RNA, 18 nt, Human
agagugaaggaggaaguu

SEQ ID NO: 511478 - RNA, 18 nt, Human
agcaccaacaugugaccu

SEQ ID NO: 511479 - RNA, 19 nt, Human
agcauuauaaucauauacu

SEQ ID NO: 511480 - RNA, 18 nt, Human
agcucaccuacuuuggga

SEQ ID NO: 511481 - RNA, 20 nt, Human
agcugcugccuuuuuuuuuu

SEQ ID NO: 511482 - RNA, 21 nt, Human
aggaaaagaccagcaccacca

SEQ ID NO: 511483 - RNA, 22 nt, Human
aggcaauacccuuuaucuuaac

SEQ ID NO: 511484 - RNA, 21 nt, Human
aggcagcaccaacaugugacc

SEQ ID NO: 511485 - RNA, 24 nt, Human
aggggaaaaaaaacuaaauuaaaa

SEQ ID NO: 511486 - RNA, 27 nt, Human
aggguuugagccaaaauagucgacauc

SEQ ID NO: 511487 - RNA, 18 nt, Human
agugaaggaggaaguugg

SEQ ID NO: 511488 - RNA, 18 nt, Human
aguugagcuccuucuucu

SEQ ID NO: 511489 - RNA, 24 nt, Human
auaacaccaagaacauucuacaua

SEQ ID NO: 511490 - RNA, 22 nt, Human
auagggcccauaggggcaugcc

SEQ ID NO: 511491 - RNA, 19 nt, Human
auauauauuuuaacucuga

SEQ ID NO: 511492 - RNA, 22 nt, Human
auauauuuguauguauguaugu

SEQ ID NO: 511493 - RNA, 18 nt, Human
aucauuuaauugcuuugg

SEQ ID NO: 511494 - RNA, 18 nt, Human
auccaguuaccucuguca

SEQ ID NO: 511495 - RNA, 26 nt, Human
aucuugggaucuuuucacauagggcu

SEQ ID NO: 511496 - RNA, 19 nt, Human
augaacacaugcugaauua

SEQ ID NO: 511497 - RNA, 19 nt, Human
auggagcuguuagagauuc

SEQ ID NO: 511498 - RNA, 27 nt, Human
augucaauggaaauuccaugauauacc

SEQ ID NO: 511499 - RNA, 21 nt, Human
auuuucuuuagccuuucauug

SEQ ID NO: 511500 - RNA, 24 nt, Human
caaaacuaaacaaaacuggccaac

SEQ ID NO: 511501 - RNA, 23 nt, Human
caaaagaaaccccucacaauuac

SEQ ID NO: 511502 - RNA, 21 nt, Human
caacugggcuccauccaugcc

SEQ ID NO: 511503 - RNA, 22 nt, Human
caacugggcuccauccaugcca

SEQ ID NO: 511504 - RNA, 19 nt, Human
caaggacuuguuguaauau

SEQ ID NO: 511505 - RNA, 24 nt, Human
caaguccaaauucaaaugucaaug

SEQ ID NO: 511506 - RNA, 19 nt, Human
caccaauaugauaacacuc

SEQ ID NO: 511507 - RNA, 22 nt, Human
caccacauuuacccagggcucc

SEQ ID NO: 511508 - RNA, 18 nt, Human
caccccuuucuccucucu

SEQ ID NO: 511509 - RNA, 23 nt, Human
cacccuuguaaucccacccuuug

SEQ ID NO: 511510 - RNA, 24 nt, Human
cacucucucccuuccccaggagcg

SEQ ID NO: 511511 - RNA, 23 nt, Human
cagauuacagaugaucauucuaa

SEQ ID NO: 511512 - RNA, 21 nt, Human
cagcuggugacacgacugaua

SEQ ID NO: 511513 - RNA, 21 nt, Human
caggacaugaccaagauugug

SEQ ID NO: 511514 - RNA, 22 nt, Human
caggaccagagacccaauguga

SEQ ID NO: 511515 - RNA, 21 nt, Human
cagggccuuguucuucccagu

SEQ ID NO: 511516 - RNA, 22 nt, Human
caguaaauauugaauaagcucc

SEQ ID NO: 511517 - RNA, 23 nt, Human
cagucucacucucucccuucccc

SEQ ID NO: 511518 - RNA, 22 nt, Human
cauugggcuaaccucagggaga

SEQ ID NO: 511519 - RNA, 18 nt, Human
cauuucagacaacuaguu

SEQ ID NO: 511520 - RNA, 18 nt, Human
ccaaaagaaaccccucac

SEQ ID NO: 511521 - RNA, 21 nt, Human
ccaaaagaaaccccucacaau

SEQ ID NO: 511522 - RNA, 22 nt, Human
ccagcaguuggagugugcccau

SEQ ID NO: 511523 - RNA, 21 nt, Human
ccagcccagcaguuggagugu

SEQ ID NO: 511524 - RNA, 19 nt, Human
ccauugggcuaaccucagg

SEQ ID NO: 511525 - RNA, 19 nt, Human
cccaaguugucuccucuuu

SEQ ID NO: 511526 - RNA, 22 nt, Human
cccagucucacucucucccuuc

SEQ ID NO: 511527 - RNA, 22 nt, Human
ccccaauccuaauacacauaaa

SEQ ID NO: 511528 - RNA, 23 nt, Human
ccccaggagcgacugacuccucu

SEQ ID NO: 511529 - RNA, 22 nt, Human
ccccucacaauuacaaauauuu

SEQ ID NO: 511530 - RNA, 22 nt, Human
cuaacaaaugugacccacucuc

SEQ ID NO: 511531 - RNA, 23 nt, Human
cuaaccuuaacaccaacgucuaa

SEQ ID NO: 511532 - RNA, 23 nt, Human
cuaacuuccucuucuucuauuuu

SEQ ID NO: 511533 - RNA, 19 nt, Human
cucacucucucccuucccc

SEQ ID NO: 511534 - RNA, 18 nt, Human
cucacucucugucuuucc

SEQ ID NO: 511535 - RNA, 21 nt, Human
cucagccuaaucucauccccc

SEQ ID NO: 511536 - RNA, 19 nt, Human
cugcugccuuuuuuuuuuu

SEQ ID NO: 511537 - RNA, 23 nt, Human
cuggauacuuauuucuucacauc

SEQ ID NO: 511538 - RNA, 22 nt, Human
cuggccaacauucccuacccca

SEQ ID NO: 511539 - RNA, 21 nt, Human
cugguuccccuucacccucuc

SEQ ID NO: 511540 - RNA, 22 nt, Human
cuucuugcuuccacauagggcc

SEQ ID NO: 511541 - RNA, 22 nt, Human
cuuuuuuaccacucucuccacc

SEQ ID NO: 511542 - RNA, 28 nt, Human
gaacaaauguccagauucauccauccuc

SEQ ID NO: 511543 - RNA, 27 nt, Human
gagcugcugccuuuuuuuuuuuuuuuu

SEQ ID NO: 511544 - RNA, 28 nt, Human
gagcugcugccuuuuuuuuuuuuuuuuu

SEQ ID NO: 511545 - RNA, 21 nt, Human
gauuacuaaaccucagcuaau

SEQ ID NO: 511546 - RNA, 18 nt, Human
gauuucauaauagucuca

SEQ ID NO: 511547 - RNA, 19 nt, Human
gcagcaccaacaugugacc

SEQ ID NO: 511548 - RNA, 18 nt, Human
gcccaaugccauuugagu

SEQ ID NO: 511549 - RNA, 25 nt, Human
gccuguuucuuucuugaauugccaa

SEQ ID NO: 511550 - RNA, 21 nt, Human
gcucuuuaaacguagccuguu

SEQ ID NO: 511551 - RNA, 22 nt, Human
gcugccuuuuuuuuuuuuuuuu

SEQ ID NO: 511552 - RNA, 25 nt, Human
gcuggaacaucagaaaugacucuag

SEQ ID NO: 511553 - RNA, 30 nt, Human
ggaacaaaccuuauaaaacacaugaaacgg

SEQ ID NO: 511554 - RNA, 23 nt, Human
ggacuuguuguaauauuugggaa

SEQ ID NO: 511555 - RNA, 19 nt, Human
ggagaaacaugauuaggga

SEQ ID NO: 511556 - RNA, 21 nt, Human
ggauucaguucuuaauuuccu

SEQ ID NO: 511557 - RNA, 21 nt, Human
ggcaugccugaggaacacccu

SEQ ID NO: 511558 - RNA, 18 nt, Human
ggcccauaggggcaugcc

SEQ ID NO: 511559 - RNA, 20 nt, Human
gggagggggagaaguggagg

SEQ ID NO: 511560 - RNA, 25 nt, Human
ggggagggggagaaguggaggguuu

SEQ ID NO: 511561 - RNA, 22 nt, Human
ggggauguucugaaaagcucua

SEQ ID NO: 511562 - RNA, 24 nt, Human
gggggaagguuggggguuggggga

SEQ ID NO: 511563 - RNA, 28 nt, Human
gggggugggggagguaagggggaagguu

SEQ ID NO: 511564 - RNA, 20 nt, Human
ggguaguuuuuuuuuuuucu

SEQ ID NO: 511565 - RNA, 23 nt, Human
ggguggugauaaagggggugggg

SEQ ID NO: 511566 - RNA, 24 nt, Human
ggguuucuuucauuuauguguuua

SEQ ID NO: 511567 - RNA, 21 nt, Human
guaaaauacacucaggcaaaa

SEQ ID NO: 511568 - RNA, 22 nt, Human
gucugggugacaaugugauggc

SEQ ID NO: 511569 - RNA, 22 nt, Human
guuaaaaaaaaaaaaaaaaaaa

SEQ ID NO: 511570 - RNA, 24 nt, Human
uaaaacacaugaaacgcacaugag

SEQ ID NO: 511571 - RNA, 23 nt, Human
uaaaucagucaauucuucuugcu

SEQ ID NO: 511572 - RNA, 23 nt, Human
uaacaccaacgucuaaccacaug

SEQ ID NO: 511573 - RNA, 25 nt, Human
uaacccacugaaaauauacauacca

SEQ ID NO: 511574 - RNA, 19 nt, Human
uaagugacugucacuuagc

SEQ ID NO: 511575 - RNA, 24 nt, Human
uaagugacugucacuuagcuauac

SEQ ID NO: 511576 - RNA, 23 nt, Human
uaaugaagcuuaaaaggcuaaac

SEQ ID NO: 511577 - RNA, 18 nt, Human
uacacauuucccuguggg

SEQ ID NO: 511578 - RNA, 23 nt, Human
uaccacucucuccaccugccuag

SEQ ID NO: 511579 - RNA, 20 nt, Human
uacuaugauauauaaauaga

SEQ ID NO: 511580 - RNA, 21 nt, Human
uacuaugauauauaaauagau

SEQ ID NO: 511581 - RNA, 24 nt, Human
uacuaugauuucauaauagucuca

SEQ ID NO: 511582 - RNA, 22 nt, Human
uagauuacuaaaccucagcuaa

SEQ ID NO: 511583 - RNA, 23 nt, Human
uaguucucacucuuuucucgggc

SEQ ID NO: 511584 - RNA, 25 nt, Human
uaguucucacucuuuucucgggcuc

SEQ ID NO: 511585 - RNA, 20 nt, Human
uaguuuuuuuuuuuucuuuu

SEQ ID NO: 511586 - RNA, 21 nt, Human
uauacauaccacauacauggu

SEQ ID NO: 511587 - RNA, 22 nt, Human
uauguauguauguaugugugua

SEQ ID NO: 511588 - RNA, 23 nt, Human
uauguauguauguauguguguau

SEQ ID NO: 511589 - RNA, 23 nt, Human
uauguauguauguguguauguac

SEQ ID NO: 511590 - RNA, 21 nt, Human
uauguauguguguauguacgu

SEQ ID NO: 511591 - RNA, 20 nt, Human
uauguguagcauaugcacgc

SEQ ID NO: 511592 - RNA, 18 nt, Human
uauguguguauguacgua

SEQ ID NO: 511593 - RNA, 18 nt, Human
uauguguguauguacgua

SEQ ID NO: 511594 - RNA, 20 nt, Human
uauugguucagacucaccuu

SEQ ID NO: 511595 - RNA, 20 nt, Human
ucaaagaagcagaaauggca

SEQ ID NO: 511596 - RNA, 23 nt, Human
ucaaagaagcagaaauggcaaga

SEQ ID NO: 511597 - RNA, 20 nt, Human
ucaaaucuucccagauuggu

SEQ ID NO: 511598 - RNA, 25 nt, Human
ucaaaucuucccagauugguagacc

SEQ ID NO: 511599 - RNA, 23 nt, Human
ucaagaaaaucauuguugauccc

SEQ ID NO: 511600 - RNA, 18 nt, Human
ucaccacauuuacccagg

SEQ ID NO: 511601 - RNA, 22 nt, Human
ucacucucucccuuccccagga

SEQ ID NO: 511602 - RNA, 23 nt, Human
ucacugggaaguugauacuacca

SEQ ID NO: 511603 - RNA, 27 nt, Human
ucacugggaaguugauacuaccaaaaa

SEQ ID NO: 511604 - RNA, 19 nt, Human
ucagaaaugacucuaacau

SEQ ID NO: 511605 - RNA, 18 nt, Human
ucauugucucuaugcucu

SEQ ID NO: 511606 - RNA, 18 nt, Human
uccaaaagaaaccccuca

SEQ ID NO: 511607 - RNA, 22 nt, Human
uccaugccaaauagagccaagg

SEQ ID NO: 511608 - RNA, 18 nt, Human
uccauugggcuaaccuca

SEQ ID NO: 511609 - RNA, 18 nt, Human
ucccucuucggggcgccc

SEQ ID NO: 511610 - RNA, 22 nt, Human
uccgcacacugggucaacucug

SEQ ID NO: 511611 - RNA, 25 nt, Human
ucggagcugcugccuuuuuuuuuuu

SEQ ID NO: 511612 - RNA, 23 nt, Human
ucuacugauaaucucccaaagca

SEQ ID NO: 511613 - RNA, 19 nt, Human
ucuauugaacaucuuccuc

SEQ ID NO: 511614 - RNA, 20 nt, Human
ucucccagucucacucucuc

SEQ ID NO: 511615 - RNA, 27 nt, Human
ucugcaacugagaagcacauaugugua

SEQ ID NO: 511616 - RNA, 22 nt, Human
ucugccuccucuuuccuagcuu

SEQ ID NO: 511617 - RNA, 20 nt, Human
ucuggccuuguguauguuuc

SEQ ID NO: 511618 - RNA, 20 nt, Human
ucugugcuucucuuucuccc

SEQ ID NO: 511619 - RNA, 18 nt, Human
ucuucaaaggaacaaacc

SEQ ID NO: 511620 - RNA, 23 nt, Human
ugaaacucugugaauuuuccaaa

SEQ ID NO: 511621 - RNA, 18 nt, Human
ugaacacaugcugaauua

SEQ ID NO: 511622 - RNA, 19 nt, Human
ugaagacacaggaccagag

SEQ ID NO: 511623 - RNA, 20 nt, Human
ugaagacacaggaccagaga

SEQ ID NO: 511624 - RNA, 23 nt, Human
ugaauuuucccgaaaggccauac

SEQ ID NO: 511625 - RNA, 19 nt, Human
ugacaugggccuggagaag

SEQ ID NO: 511626 - RNA, 19 nt, Human
ugaccagugacaugggccu

SEQ ID NO: 511627 - RNA, 21 nt, Human
ugacuccucuuuuuucucacu

SEQ ID NO: 511628 - RNA, 18 nt, Human
ugacuucauuaaacaucu

SEQ ID NO: 511629 - RNA, 22 nt, Human
ugacuugggccacauagaaauu

SEQ ID NO: 511630 - RNA, 18 nt, Human
ugagagcacuacauggcu

SEQ ID NO: 511631 - RNA, 20 nt, Human
ugagcagucuuguuuggaua

SEQ ID NO: 511632 - RNA, 21 nt, Human
ugaggugaagacacaggacca

SEQ ID NO: 511633 - RNA, 22 nt, Human
ugauaacacucuuucuacugau

SEQ ID NO: 511634 - RNA, 21 nt, Human
ugauaugguuacuuacucagc

SEQ ID NO: 511635 - RNA, 18 nt, Human
ugcagcagccuucagccu

SEQ ID NO: 511636 - RNA, 21 nt, Human
ugccaaauagagccaaggcaa

SEQ ID NO: 511637 - RNA, 20 nt, Human
ugccagaguuuuuuuuuuuu

SEQ ID NO: 511638 - RNA, 20 nt, Human
ugccuccugagucaguuccc

SEQ ID NO: 511639 - RNA, 20 nt, Human
ugccuccugagucaguuccc

SEQ ID NO: 511640 - RNA, 18 nt, Human
ugcuaucugucuguggug

SEQ ID NO: 511641 - RNA, 29 nt, Human
ugcugccuuuuuuuuuuuuuuuuuuuuuu

SEQ ID NO: 511642 - RNA, 20 nt, Human
uggaacagagcugggucugu

SEQ ID NO: 511643 - RNA, 22 nt, Human
uggaacagagcugggucuguua

SEQ ID NO: 511644 - RNA, 25 nt, Human
uggaacaucagaaaugacucuaaca

SEQ ID NO: 511645 - RNA, 18 nt, Human
uggaauggacaaaagauc

SEQ ID NO: 511646 - RNA, 21 nt, Human
uggauacuuauuucuucacau

SEQ ID NO: 511647 - RNA, 22 nt, Human
uggcaaaacuaaacaaaacugg

SEQ ID NO: 511648 - RNA, 21 nt, Human
ugggaucuuuucacauagggc

SEQ ID NO: 511649 - RNA, 19 nt, Human
ugggggcagagauaagccc

SEQ ID NO: 511650 - RNA, 19 nt, Human
ugggucuucgaagucucag

SEQ ID NO: 511651 - RNA, 24 nt, Human
ugguagaccaaccccucagggccu

SEQ ID NO: 511652 - RNA, 22 nt, Human
uguagcauaugcacgcgugcau

SEQ ID NO: 511653 - RNA, 24 nt, Human
uguagcauaugcacgcgugcauuu

SEQ ID NO: 511654 - RNA, 24 nt, Human
uguaguaauuauucagguaagucu

SEQ ID NO: 511655 - RNA, 18 nt, Human
uguauguauguauguaug

SEQ ID NO: 511656 - RNA, 18 nt, Human
uguauguauguaugugug

SEQ ID NO: 511657 - RNA, 22 nt, Human
uguauguguguauguacguaua

SEQ ID NO: 511658 - RNA, 22 nt, Human
ugucagaguccguuaaagacag

SEQ ID NO: 511659 - RNA, 19 nt, Human
uguguguauguacguauaa

SEQ ID NO: 511660 - RNA, 20 nt, Human
uuaaaaaaaaaaaaaaaaaa

SEQ ID NO: 511661 - RNA, 23 nt, Human
uuaacucugacuuuuggccauac

SEQ ID NO: 511662 - RNA, 18 nt, Human
uuagaacauuagaaagcu

SEQ ID NO: 511663 - RNA, 23 nt, Human
uuccagaaauucuugcauguucu

SEQ ID NO: 511664 - RNA, 26 nt, Human
uuccaugauauaccggggguugccuc

SEQ ID NO: 511665 - RNA, 25 nt, Human
uucuacauuacugugcgggcaucuc

SEQ ID NO: 511666 - RNA, 22 nt, Human
uucuucuuuuucuggccuugug

SEQ ID NO: 511667 - RNA, 18 nt, Human
uucuuuagccuuucauug

SEQ ID NO: 511668 - RNA, 21 nt, Human
uugcagcagccuucagccuuc

SEQ ID NO: 511669 - RNA, 20 nt, Human
uuucugugcuucucuuucuc

SEQ ID NO: 511670 - RNA, 22 nt, Human
uuucugugcuucucuuucuccc

SEQ ID NO: 511671 - RNA, 21 nt, Human
uuugugggugguuuuuauaga

SEQ ID NO: 511672 - RNA, 23 nt, Human
uuuucaggauuuaagauguuaaa

SEQ ID NO: 511673 - RNA, 24 nt, Human
uuuuucuggccuuguguauguuuc

SEQ ID NO: 511674 - RNA, 23 nt, Human
uuuuuuuuuuuuuuuuuuucagg

SEQ ID NO: 511675 - RNA, 24 nt, Human
aaccauuucuuaguuucccuccca

SEQ ID NO: 511676 - RNA, 19 nt, Human
acaaaaauagauuauauua

SEQ ID NO: 511677 - RNA, 21 nt, Human
acauuccacaaacgauuguca

SEQ ID NO: 511678 - RNA, 21 nt, Human
acgacaggcacuuaaagcuca

SEQ ID NO: 511679 - RNA, 24 nt, Human
auuacauuccacaaacgauuguca

SEQ ID NO: 511680 - RNA, 22 nt, Human
caucaagauuacauuccacaaa

SEQ ID NO: 511681 - RNA, 22 nt, Human
ccacaaagcaccuaaaauaaca

SEQ ID NO: 511682 - RNA, 23 nt, Human
ccucaaagcagugcucaucaccu

SEQ ID NO: 511683 - RNA, 23 nt, Human
ccuguuugcucuucccccacagg

SEQ ID NO: 511684 - RNA, 21 nt, Human
cugaaaagagaugacauucau

SEQ ID NO: 511685 - RNA, 19 nt, Human
cuguuugcucuucccccac

SEQ ID NO: 511686 - RNA, 22 nt, Human
gauacuggaaacugaaaagaga

SEQ ID NO: 511687 - RNA, 18 nt, Human
gcugaauuauaaauacac

SEQ ID NO: 511688 - RNA, 22 nt, Human
uaaaaaggauacuggaaacuga

SEQ ID NO: 511689 - RNA, 22 nt, Human
uaagaaaaaagacuuaccacaa

SEQ ID NO: 511690 - RNA, 23 nt, Human
uaccacaaagcaccuaaaauaac

SEQ ID NO: 511691 - RNA, 24 nt, Human
uaccacaaagcaccuaaaauaaca

SEQ ID NO: 511692 - RNA, 20 nt, Human
ucccaagucucaguaucaag

SEQ ID NO: 511693 - RNA, 22 nt, Human
uccuguuugcucuucccccaca

SEQ ID NO: 511694 - RNA, 20 nt, Human
ugaaaagagaugacauucau

SEQ ID NO: 511695 - RNA, 19 nt, Human
ugcucaucaccuaacugca

SEQ ID NO: 511696 - RNA, 23 nt, Human
uuaguuucccucccaagucucag

SEQ ID NO: 511697 - RNA, 26 nt, Human
aaaacagagagagaauuacuuaggua

SEQ ID NO: 511698 - RNA, 21 nt, Human
aaguuucuuucuucucccucu

SEQ ID NO: 511699 - RNA, 22 nt, Human
agccacugccgggcgcaguccg

SEQ ID NO: 511700 - RNA, 21 nt, Human
aggcggaggcugcuguggucg

SEQ ID NO: 511701 - RNA, 24 nt, Human
aguuucuuucuucucccucuuuuc

SEQ ID NO: 511702 - RNA, 19 nt, Human
aucaguaguuuagcacugg

SEQ ID NO: 511703 - RNA, 27 nt, Human
cacccuuuauuucuuuucauaauuaca

SEQ ID NO: 511704 - RNA, 21 nt, Human
cagcgcagaauaguccggagc

SEQ ID NO: 511705 - RNA, 20 nt, Human
ccagaagcaggcacagguau

SEQ ID NO: 511706 - RNA, 21 nt, Human
ccggagcagcaggaggcggag

SEQ ID NO: 511707 - RNA, 22 nt, Human
ccggagcagcaggaggcggagg

SEQ ID NO: 511708 - RNA, 25 nt, Human
cgcccucggccuccggaccgcgccu

SEQ ID NO: 511709 - RNA, 19 nt, Human
cggagcagcaggaggcgga

SEQ ID NO: 511710 - RNA, 19 nt, Human
cggccuccggaccgcgccu

SEQ ID NO: 511711 - RNA, 21 nt, Human
gagcagcaggaggcggaggcu

SEQ ID NO: 511712 - RNA, 19 nt, Human
gauacaggguuugaacuuc

SEQ ID NO: 511713 - RNA, 19 nt, Human
ucacacuuccaaccccaga

SEQ ID NO: 511714 - RNA, 23 nt, Human
ucaucgauauaccucuuggcuau

SEQ ID NO: 511715 - RNA, 20 nt, Human
ucgcccgcgaagccacugcc

SEQ ID NO: 511716 - RNA, 22 nt, Human
uguagaguuuuaaaauccccua

SEQ ID NO: 511717 - RNA, 20 nt, Human
ugugauaaucuguaaccuaa

SEQ ID NO: 511718 - RNA, 20 nt, Human
uuagaugugcaauucugagc

SEQ ID NO: 511719 - RNA, 25 nt, Human
uucuucucccucuuuuccuguuaga

SEQ ID NO: 511720 - RNA, 22 nt, Human
uuuagcacuggcacaaaacaga

SEQ ID NO: 511721 - RNA, 23 nt, Human
uuuccagccuccuuuuaaacucc

SEQ ID NO: 511722 - RNA, 21 nt, Human
uuuccaucaucgauauaccuc

SEQ ID NO: 511723 - RNA, 24 nt, Human
aaaaugcuaggauuacaggcauga

SEQ ID NO: 511724 - RNA, 25 nt, Human
aaacacagucauguugauuuguuua

SEQ ID NO: 511725 - RNA, 21 nt, Human
aaaggcacuugccaccacacc

SEQ ID NO: 511726 - RNA, 22 nt, Human
aacuacaauuuaaaagccacua

SEQ ID NO: 511727 - RNA, 22 nt, Human
aagaaaccagucuuugaagauu

SEQ ID NO: 511728 - RNA, 23 nt, Human
aagggugggaccagguggaggua

SEQ ID NO: 511729 - RNA, 22 nt, Human
aaguagcugggauuacaggcau

SEQ ID NO: 511730 - RNA, 18 nt, Human
aaguguccugaggccuca

SEQ ID NO: 511731 - RNA, 24 nt, Human
aaguuuuuguauuuuuaguagaga

SEQ ID NO: 511732 - RNA, 24 nt, Human
acaaaucaggccuuguugaaacac

SEQ ID NO: 511733 - RNA, 22 nt, Human
acagaucccugaaguugcuguu

SEQ ID NO: 511734 - RNA, 20 nt, Human
acagguuuguagguuaggag

SEQ ID NO: 511735 - RNA, 21 nt, Human
accacuaauaaaauacaggaa

SEQ ID NO: 511736 - RNA, 18 nt, Human
accauguuggccaggcug

SEQ ID NO: 511737 - RNA, 20 nt, Human
accauguuggccaggcuggu

SEQ ID NO: 511738 - RNA, 23 nt, Human
accauguuggccaggcuggucuc

SEQ ID NO: 511739 - RNA, 21 nt, Human
acccagcuaaguuuuuguauu

SEQ ID NO: 511740 - RNA, 20 nt, Human
accuugaaaccuuacugcug

SEQ ID NO: 511741 - RNA, 18 nt, Human
acggcguuuuaccauguu

SEQ ID NO: 511742 - RNA, 24 nt, Human
acggcguuuuaccauguuggccag

SEQ ID NO: 511743 - RNA, 18 nt, Human
acugaguccauuaaaccu

SEQ ID NO: 511744 - RNA, 24 nt, Human
acugcaguggugcaaucucggcuc

SEQ ID NO: 511745 - RNA, 23 nt, Human
acugcccuacuucccuuucuucu

SEQ ID NO: 511746 - RNA, 20 nt, Human
acuuuucaaagauacaaaag

SEQ ID NO: 511747 - RNA, 19 nt, Human
agagaaaaaguggggcugg

SEQ ID NO: 511748 - RNA, 18 nt, Human
agauuacaauggagcuga

SEQ ID NO: 511749 - RNA, 19 nt, Human
aggcacuugccaccacacc

SEQ ID NO: 511750 - RNA, 25 nt, Human
aggcuggagugcaguggcgcgaucu

SEQ ID NO: 511751 - RNA, 22 nt, Human
aguagcugaagcacaagaaaau

SEQ ID NO: 511752 - RNA, 23 nt, Human
agugcaguggcgcgaucuuggcu

SEQ ID NO: 511753 - RNA, 24 nt, Human
agugcaguggcgcgaucuuggcuc

SEQ ID NO: 511754 - RNA, 19 nt, Human
auaaaauauaccucaugcc

SEQ ID NO: 511755 - RNA, 22 nt, Human
auacagaccauagccaacaaag

SEQ ID NO: 511756 - RNA, 22 nt, Human
auacuaucuuuggagaauguau

SEQ ID NO: 511757 - RNA, 21 nt, Human
auaggccugugaaguaacacu

SEQ ID NO: 511758 - RNA, 23 nt, Human
auauaucuauauauauauuuuua

SEQ ID NO: 511759 - RNA, 19 nt, Human
aucuugaacuacucaauug

SEQ ID NO: 511760 - RNA, 22 nt, Human
augagaucugaagguuuuauaa

SEQ ID NO: 511761 - RNA, 23 nt, Human
caaaauauuccugaagauauuaa

SEQ ID NO: 511762 - RNA, 20 nt, Human
caaccucugccucccagguu

SEQ ID NO: 511763 - RNA, 22 nt, Human
caagaaauaacacaauagugac

SEQ ID NO: 511764 - RNA, 22 nt, Human
caagcgauucuccugccucagc

SEQ ID NO: 511765 - RNA, 22 nt, Human
caagcgauucuccugccucagc

SEQ ID NO: 511766 - RNA, 21 nt, Human
caauugcuauaccuaaaagga

SEQ ID NO: 511767 - RNA, 18 nt, Human
cacaaguuucugccucag

SEQ ID NO: 511768 - RNA, 24 nt, Human
cacccaggcuggagugcaguggcg

SEQ ID NO: 511769 - RNA, 18 nt, Human
cacugcaaccucugccuc

SEQ ID NO: 511770 - RNA, 21 nt, Human
cacugcaaccucugccuccca

SEQ ID NO: 511771 - RNA, 21 nt, Human
cacugcaacuuccgccuccca

SEQ ID NO: 511772 - RNA, 24 nt, Human
cacuguguuacaacugccuacagu

SEQ ID NO: 511773 - RNA, 19 nt, Human
caguggcgcgaucuuggcu

SEQ ID NO: 511774 - RNA, 20 nt, Human
cauccaggcugaacugcagu

SEQ ID NO: 511775 - RNA, 24 nt, Human
cauguuggccaggcuggucucaaa

SEQ ID NO: 511776 - RNA, 24 nt, Human
ccaaaaugcuaggauuacaggcau

SEQ ID NO: 511777 - RNA, 23 nt, Human
ccaaguagcugggauuacaggca

SEQ ID NO: 511778 - RNA, 24 nt, Human
ccaaguagcugggauuacaggcau

SEQ ID NO: 511779 - RNA, 23 nt, Human
cccaaguagcugggauuacaggc

SEQ ID NO: 511780 - RNA, 24 nt, Human
cccaaguagcugggauuacaggca

SEQ ID NO: 511781 - RNA, 20 nt, Human
cccagguucaagcgauucuc

SEQ ID NO: 511782 - RNA, 20 nt, Human
cccagguucaagcgauucuc

SEQ ID NO: 511783 - RNA, 23 nt, Human
cccagguucaagcgauucuccug

SEQ ID NO: 511784 - RNA, 23 nt, Human
cccagguucaagcgauucuccug

SEQ ID NO: 511785 - RNA, 19 nt, Human
cccuacuucccuuucuucu

SEQ ID NO: 511786 - RNA, 24 nt, Human
ccgccucguccucccaaaaugcua

SEQ ID NO: 511787 - RNA, 19 nt, Human
ccgcgcagaauccuaaccc

SEQ ID NO: 511788 - RNA, 21 nt, Human
ccuacaguaaucaguacagua

SEQ ID NO: 511789 - RNA, 24 nt, Human
ccucccagguucaagcgauucucc

SEQ ID NO: 511790 - RNA, 24 nt, Human
ccucccagguucaagcgauucucc

SEQ ID NO: 511791 - RNA, 21 nt, Human
ccucguccucccaaaaugcua

SEQ ID NO: 511792 - RNA, 26 nt, Human
cgcaaaauuaaucugcuccucaauga

SEQ ID NO: 511793 - RNA, 24 nt, Human
cggcguuuuaccauguuggccagg

SEQ ID NO: 511794 - RNA, 21 nt, Human
cucacucucaucauccaggcu

SEQ ID NO: 511795 - RNA, 24 nt, Human
cucacugcaaccucugccucccag

SEQ ID NO: 511796 - RNA, 24 nt, Human
cucacugcaaccucugccucccag

SEQ ID NO: 511797 - RNA, 24 nt, Human
cucagccucccaaguagcugggau

SEQ ID NO: 511798 - RNA, 20 nt, Human
cucaucauccaggcugaacu

SEQ ID NO: 511799 - RNA, 21 nt, Human
cugaaauuauuaaaauguacu

SEQ ID NO: 511800 - RNA, 24 nt, Human
cugcaaccucugccucccagguuc

SEQ ID NO: 511801 - RNA, 23 nt, Human
cugcaacuuccgccucccagguu

SEQ ID NO: 511802 - RNA, 24 nt, Human
cugcaacuuccgccucccagguuc

SEQ ID NO: 511803 - RNA, 23 nt, Human
cugccgcccugugaaaaaggugc

SEQ ID NO: 511804 - RNA, 23 nt, Human
cugccucagccucccaaguagcu

SEQ ID NO: 511805 - RNA, 18 nt, Human
cugccucagccuccugag

SEQ ID NO: 511806 - RNA, 22 nt, Human
cuggaccaaagacuacucaagu

SEQ ID NO: 511807 - RNA, 21 nt, Human
cuguaccuugaaaccuuacug

SEQ ID NO: 511808 - RNA, 19 nt, Human
cuguguccucacccaaauc

SEQ ID NO: 511809 - RNA, 22 nt, Human
cuuccaguccugccaacuuguu

SEQ ID NO: 511810 - RNA, 18 nt, Human
cuucccuuucuucucuau

SEQ ID NO: 511811 - RNA, 19 nt, Human
cuucccuuucuucucuauu

SEQ ID NO: 511812 - RNA, 22 nt, Human
cuucccuuucuucucuauugca

SEQ ID NO: 511813 - RNA, 24 nt, Human
cuuguucugucacccaggcuggag

SEQ ID NO: 511814 - RNA, 18 nt, Human
cuuuauacaguuccccuc

SEQ ID NO: 511815 - RNA, 21 nt, Human
gaacagaccauaaaccuccau

SEQ ID NO: 511816 - RNA, 24 nt, Human
gacaucgagugauccacccgccuc

SEQ ID NO: 511817 - RNA, 19 nt, Human
gagaaaaaguggggcuggg

SEQ ID NO: 511818 - RNA, 18 nt, Human
gauuacaggcaugagcca

SEQ ID NO: 511819 - RNA, 22 nt, Human
gauuacaggcaugagccaccgc

SEQ ID NO: 511820 - RNA, 23 nt, Human
gauuacaggcaugagccaccgca

SEQ ID NO: 511821 - RNA, 21 nt, Human
gauucuccugccucagccucc

SEQ ID NO: 511822 - RNA, 21 nt, Human
gauucuccugccucagccucc

SEQ ID NO: 511823 - RNA, 22 nt, Human
gcaaccucugccucccagguuc

SEQ ID NO: 511824 - RNA, 19 nt, Human
gcagaauccuaaccccagc

SEQ ID NO: 511825 - RNA, 23 nt, Human
gccaccgcaccuagccggcaaac

SEQ ID NO: 511826 - RNA, 20 nt, Human
gccuaggguagggacauccu

SEQ ID NO: 511827 - RNA, 23 nt, Human
gcgauucuccugccucagccucc

SEQ ID NO: 511828 - RNA, 24 nt, Human
gcgauucuccugccucagccuccc

SEQ ID NO: 511829 - RNA, 18 nt, Human
gcuacagauacuacauug

SEQ ID NO: 511830 - RNA, 21 nt, Human
gcucacugcaaccucugccuc

SEQ ID NO: 511831 - RNA, 21 nt, Human
ggacacagccaugguaacauc

SEQ ID NO: 511832 - RNA, 22 nt, Human
ggauuacaggcaugagccaccg

SEQ ID NO: 511833 - RNA, 23 nt, Human
ggcguuuuaccauguuggccagg

SEQ ID NO: 511834 - RNA, 22 nt, Human
ggggaaaucaaaugaguaaugu

SEQ ID NO: 511835 - RNA, 18 nt, Human
guagcugggauuacaggc

SEQ ID NO: 511836 - RNA, 18 nt, Human
guauaaguguccugaggc

SEQ ID NO: 511837 - RNA, 21 nt, Human
gucucauucaaaagggaauaa

SEQ ID NO: 511838 - RNA, 24 nt, Human
gugauccacccgccucguccuccc

SEQ ID NO: 511839 - RNA, 24 nt, Human
guuuuuguauuuuuaguagagacg

SEQ ID NO: 511840 - RNA, 22 nt, Human
uaaaaacacaaccaucuuucca

SEQ ID NO: 511841 - RNA, 25 nt, Human
uaaauggagauaacaguccuggcuu

SEQ ID NO: 511842 - RNA, 21 nt, Human
uaacaacaaauugugacagag

SEQ ID NO: 511843 - RNA, 22 nt, Human
uaaccaugaacacuaauagcca

SEQ ID NO: 511844 - RNA, 20 nt, Human
uaaccuguauucaaaucccu

SEQ ID NO: 511845 - RNA, 24 nt, Human
uaaguuuuuguauuuuuaguagag

SEQ ID NO: 511846 - RNA, 22 nt, Human
uaauucuguucaacccagaagu

SEQ ID NO: 511847 - RNA, 18 nt, Human
uacaaaagaaauuaaaca

SEQ ID NO: 511848 - RNA, 22 nt, Human
uacacacuaucaacggcagagu

SEQ ID NO: 511849 - RNA, 24 nt, Human
uacaggcauccgccguuacaccca

SEQ ID NO: 511850 - RNA, 22 nt, Human
uacaggcaugagccaccgcacc

SEQ ID NO: 511851 - RNA, 23 nt, Human
uacaguaaucaguacaguaauau

SEQ ID NO: 511852 - RNA, 21 nt, Human
uacaguagugcacaguaauau

SEQ ID NO: 511853 - RNA, 21 nt, Human
uaccauguuggccaggcuggu

SEQ ID NO: 511854 - RNA, 27 nt, Human
uaccauguuggccaggcuggucucaaa

SEQ ID NO: 511855 - RNA, 23 nt, Human
uacccaguuugggguauuucuuc

SEQ ID NO: 511856 - RNA, 22 nt, Human
uagagacggcguuuuaccaugu

SEQ ID NO: 511857 - RNA, 18 nt, Human
uaggauuacaggcaugag

SEQ ID NO: 511858 - RNA, 22 nt, Human
uaggauuacaggcaugagccac

SEQ ID NO: 511859 - RNA, 23 nt, Human
uaggauuacaggcaugagccacc

SEQ ID NO: 511860 - RNA, 24 nt, Human
uaggauuacaggcaugagccaccg

SEQ ID NO: 511861 - RNA, 24 nt, Human
uaggauuacaggcaugagccaccg

SEQ ID NO: 511862 - RNA, 22 nt, Human
uagggacauccuuuccagcuca

SEQ ID NO: 511863 - RNA, 18 nt, Human
uaggguauaccaucuagg

SEQ ID NO: 511864 - RNA, 24 nt, Human
uaguagagacggcguuuuaccaug

SEQ ID NO: 511865 - RNA, 18 nt, Human
uaguaugucuuuauacag

SEQ ID NO: 511866 - RNA, 19 nt, Human
uauaagcgucuggcauuuc

SEQ ID NO: 511867 - RNA, 20 nt, Human
uaucccaaaauauuccugaa

SEQ ID NO: 511868 - RNA, 21 nt, Human
uauguagccuaaguauauagu

SEQ ID NO: 511869 - RNA, 24 nt, Human
ucacccaggcuggagugcaguggc

SEQ ID NO: 511870 - RNA, 19 nt, Human
ucacugcaaccucugccuc

SEQ ID NO: 511871 - RNA, 24 nt, Human
ucacugcaaccucugccucccagg

SEQ ID NO: 511872 - RNA, 25 nt, Human
ucacugcaaccucugccucccaggu

SEQ ID NO: 511873 - RNA, 19 nt, Human
ucacugcaacuuccgccuc

SEQ ID NO: 511874 - RNA, 23 nt, Human
ucacugcaacuuccgccucccag

SEQ ID NO: 511875 - RNA, 24 nt, Human
ucacugcaacuuccgccucccagg

SEQ ID NO: 511876 - RNA, 20 nt, Human
ucagccucccaaguagcugg

SEQ ID NO: 511877 - RNA, 21 nt, Human
ucaguacaguaauaugccaua

SEQ ID NO: 511878 - RNA, 20 nt, Human
uccacugcuggcagucauuu

SEQ ID NO: 511879 - RNA, 24 nt, Human
ucccaaaaugcuaggauuacaggc

SEQ ID NO: 511880 - RNA, 24 nt, Human
ucccaaguagcugggauuacaggc

SEQ ID NO: 511881 - RNA, 21 nt, Human
ucccagguucaagcgauucuc

SEQ ID NO: 511882 - RNA, 21 nt, Human
ucccagguucaagcgauucuc

SEQ ID NO: 511883 - RNA, 24 nt, Human
ucccagguucaagcgauucuccug

SEQ ID NO: 511884 - RNA, 24 nt, Human
ucccagguucaagcgauucuccug

SEQ ID NO: 511885 - RNA, 22 nt, Human
ucccuuucuucucuauugcagg

SEQ ID NO: 511886 - RNA, 19 nt, Human
ucuacaguagugcacagua

SEQ ID NO: 511887 - RNA, 25 nt, Human
ucucacucucaucauccaggcugaa

SEQ ID NO: 511888 - RNA, 24 nt, Human
ucugucacccaggcuggagugcag

SEQ ID NO: 511889 - RNA, 22 nt, Human
ucuuguucugucacccaggcug

SEQ ID NO: 511890 - RNA, 23 nt, Human
ucuuguucugucacccaggcugg

SEQ ID NO: 511891 - RNA, 24 nt, Human
ucuuguucugucacccaggcugga

SEQ ID NO: 511892 - RNA, 23 nt, Human
ugacucacccagagccagcuucc

SEQ ID NO: 511893 - RNA, 21 nt, Human
ugagaacagaccauaaaccuc

SEQ ID NO: 511894 - RNA, 23 nt, Human
ugagaacagaccauaaaccucca

SEQ ID NO: 511895 - RNA, 19 nt, Human
ugaggugggauuaaaggca

SEQ ID NO: 511896 - RNA, 23 nt, Human
ugcaacuuccgccucccagguuc

SEQ ID NO: 511897 - RNA, 24 nt, Human
ugcaagcuccuugaaggcagagau

SEQ ID NO: 511898 - RNA, 18 nt, Human
ugcaguggugcaaucucg

SEQ ID NO: 511899 - RNA, 22 nt, Human
ugcaguggugcaaucucggcuc

SEQ ID NO: 511900 - RNA, 24 nt, Human
ugccucagccucccaaguagcugg

SEQ ID NO: 511901 - RNA, 21 nt, Human
ugccucagccuccugaggugg

SEQ ID NO: 511902 - RNA, 23 nt, Human
uggagugcaguggcgcgaucuug

SEQ ID NO: 511903 - RNA, 24 nt, Human
uggagugcaguggcgcgaucuugg

SEQ ID NO: 511904 - RNA, 18 nt, Human
uggcacuagaaacagaac

SEQ ID NO: 511905 - RNA, 24 nt, Human
uggccaggcuggucucaaacuccu

SEQ ID NO: 511906 - RNA, 22 nt, Human
ugggauuaaaggcacuugccac

SEQ ID NO: 511907 - RNA, 24 nt, Human
ugggauuaaaggcacuugccacca

SEQ ID NO: 511908 - RNA, 19 nt, Human
ugggauuacaggcauccgc

SEQ ID NO: 511909 - RNA, 19 nt, Human
ugggauuacaggcauccgc

SEQ ID NO: 511910 - RNA, 20 nt, Human
ugggauuacaggcauccgcc

SEQ ID NO: 511911 - RNA, 20 nt, Human
ugggauuacaggcauccgcc

SEQ ID NO: 511912 - RNA, 21 nt, Human
ugggauuacaggcauccgccg

SEQ ID NO: 511913 - RNA, 21 nt, Human
ugggauuacaggcauccgccg

SEQ ID NO: 511914 - RNA, 24 nt, Human
ugggauuacaggcauccgccguua

SEQ ID NO: 511915 - RNA, 18 nt, Human
uggggcugggagagugga

SEQ ID NO: 511916 - RNA, 22 nt, Human
uguagguuaggagcaauaggcu

SEQ ID NO: 511917 - RNA, 24 nt, Human
uguucugucacccaggcuggagug

SEQ ID NO: 511918 - RNA, 18 nt, Human
uuaaaacugaaggcacua

SEQ ID NO: 511919 - RNA, 18 nt, Human
uuaguagagacggcguuu

SEQ ID NO: 511920 - RNA, 24 nt, Human
uuaguagagacggcguuuuaccau

SEQ ID NO: 511921 - RNA, 22 nt, Human
uuauauccauguugggaguaga

SEQ ID NO: 511922 - RNA, 21 nt, Human
uucaagcgauucuccugccuc

SEQ ID NO: 511923 - RNA, 21 nt, Human
uucaagcgauucuccugccuc

SEQ ID NO: 511924 - RNA, 23 nt, Human
uucaagcgauucuccugccucag

SEQ ID NO: 511925 - RNA, 23 nt, Human
uucaagcgauucuccugccucag

SEQ ID NO: 511926 - RNA, 24 nt, Human
uucaagcgauucuccugccucagc

SEQ ID NO: 511927 - RNA, 24 nt, Human
uucaagcgauucuccugccucagc

SEQ ID NO: 511928 - RNA, 21 nt, Human
uuccucaguaauaggaaacug

SEQ ID NO: 511929 - RNA, 19 nt, Human
uucuguucaacccagaagu

SEQ ID NO: 511930 - RNA, 20 nt, Human
uugacuccuacucuacuguu

SEQ ID NO: 511931 - RNA, 23 nt, Human
uugagacagucuuguucugucac

SEQ ID NO: 511932 - RNA, 24 nt, Human
uuguucugucacccaggcuggagu

SEQ ID NO: 511933 - RNA, 23 nt, Human
uuuauaagcgucuggcauuucca

SEQ ID NO: 511934 - RNA, 19 nt, Human
uuucucaucuguuaaaugg

SEQ ID NO: 511935 - RNA, 20 nt, Human
uuucucaucuguuaaaugga

SEQ ID NO: 511936 - RNA, 24 nt, Human
uuuguagguuaggagcaauaggcu

SEQ ID NO: 511937 - RNA, 21 nt, Human
uuuuuaguagagacggcguuu

SEQ ID NO: 511938 - RNA, 19 nt, Human
uuuuuguauuuuuaguaga

SEQ ID NO: 511939 - RNA, 21 nt, Human
uuuuuguauuuuuaguagaga

SEQ ID NO: 511940 - RNA, 24 nt, Human
uuuuuugagacagucuuguucugu

SEQ ID NO: 511941 - RNA, 19 nt, Human
aaaaguaguaaggacagcc

SEQ ID NO: 511942 - RNA, 23 nt, Human
cucgaguuuuuuuuuuuuuuuuu

SEQ ID NO: 511943 - RNA, 24 nt, Human
cucgaguuuuuuuuuuuuuuuuuc

SEQ ID NO: 511944 - RNA, 20 nt, Human
cuguguaguugugacuucca

SEQ ID NO: 511945 - RNA, 20 nt, Human
gaguuuuuuuuuuuuuuuuu

SEQ ID NO: 511946 - RNA, 18 nt, Human
uagagcgaacacagugag

SEQ ID NO: 511947 - RNA, 22 nt, Human
ugcuaaaugcccuguuuauucu

SEQ ID NO: 511948 - RNA, 24 nt, Human
uuuguaggcugagaaaucucugug

SEQ ID NO: 511949 - RNA, 21 nt, Human
aaacacuaguggcugagagcc

SEQ ID NO: 511950 - RNA, 23 nt, Human
agaagguggccacugagcugacc

SEQ ID NO: 511951 - RNA, 20 nt, Human
aggaagagggauguuguucu

SEQ ID NO: 511952 - RNA, 22 nt, Human
augccuacauggcugugacuau

SEQ ID NO: 511953 - RNA, 23 nt, Human
cacagccauguuccuuacacucu

SEQ ID NO: 511954 - RNA, 19 nt, Human
cagcacagccauguuccuu

SEQ ID NO: 511955 - RNA, 21 nt, Human
caguguuuuccucuuccaucc

SEQ ID NO: 511956 - RNA, 21 nt, Human
ccaacccacccccaagcaccc

SEQ ID NO: 511957 - RNA, 24 nt, Human
cccacccccaagcacccuuguaug

SEQ ID NO: 511958 - RNA, 25 nt, Human
ccccaagcacccuuguaugcauucc

SEQ ID NO: 511959 - RNA, 20 nt, Human
cuauguuaugccuacauggc

SEQ ID NO: 511960 - RNA, 23 nt, Human
cuccaaaccugucccacucucug

SEQ ID NO: 511961 - RNA, 24 nt, Human
cuccaaaccugucccacucucugc

SEQ ID NO: 511962 - RNA, 19 nt, Human
cucuuccauccgugccuca

SEQ ID NO: 511963 - RNA, 23 nt, Human
cugugcacuugcaccccaauccc

SEQ ID NO: 511964 - RNA, 21 nt, Human
cuugggauccccaacccaccc

SEQ ID NO: 511965 - RNA, 22 nt, Human
gcuuuauucagcagccccuuca

SEQ ID NO: 511966 - RNA, 20 nt, Human
gcuuuggcucuccugccuug

SEQ ID NO: 511967 - RNA, 18 nt, Human
ggcagcuuccaauggugc

SEQ ID NO: 511968 - RNA, 19 nt, Human
uauacacuacacaaacacu

SEQ ID NO: 511969 - RNA, 24 nt, Human
ucagaaggaaauuacaauuuugaa

SEQ ID NO: 511970 - RNA, 18 nt, Human
uccccaacccacccccaa

SEQ ID NO: 511971 - RNA, 19 nt, Human
ugaauuggcauugauuuaa

SEQ ID NO: 511972 - RNA, 21 nt, Human
ugagagccagguggggagcug

SEQ ID NO: 511973 - RNA, 24 nt, Human
ugcccugggcuucagaagguggcc

SEQ ID NO: 511974 - RNA, 24 nt, Human
ugccuacauggcugugacuauaua

SEQ ID NO: 511975 - RNA, 22 nt, Human
ugccuugggauccccaacccac

SEQ ID NO: 511976 - RNA, 21 nt, Human
ugggauccccaacccaccccc

SEQ ID NO: 511977 - RNA, 21 nt, Human
ugucccacucucugcauucuu

SEQ ID NO: 511978 - RNA, 24 nt, Human
uguucucaguguuuuccucuucca

SEQ ID NO: 511979 - RNA, 26 nt, Human
uguuuuccucuuccauccgugccuca

SEQ ID NO: 511980 - RNA, 20 nt, Human
uuacagguuucagaagaaga

SEQ ID NO: 511981 - RNA, 24 nt, Human
uuccucugacuccagcuuuggcuc

SEQ ID NO: 511982 - RNA, 21 nt, Human
uuuuccucuuccauccgugcc

SEQ ID NO: 511983 - RNA, 22 nt, Human
aaaccaaagaggccaggagccu

SEQ ID NO: 511984 - RNA, 22 nt, Human
aagucuucugcagcuccaaucu

SEQ ID NO: 511985 - RNA, 24 nt, Human
acaaacugugguuuggccuagagc

SEQ ID NO: 511986 - RNA, 19 nt, Human
acauggcucccccaccucc

SEQ ID NO: 511987 - RNA, 19 nt, Human
acccucugcucccaccacc

SEQ ID NO: 511988 - RNA, 24 nt, Human
agacauggcucccccaccuccuca

SEQ ID NO: 511989 - RNA, 22 nt, Human
auaaaccaaagaggccaggagc

SEQ ID NO: 511990 - RNA, 24 nt, Human
auaaaccaaagaggccaggagccu

SEQ ID NO: 511991 - RNA, 18 nt, Human
aucugguccagaaucauc

SEQ ID NO: 511992 - RNA, 19 nt, Human
augugcuggggaacgugga

SEQ ID NO: 511993 - RNA, 18 nt, Human
caccugggaugugcuggg

SEQ ID NO: 511994 - RNA, 23 nt, Human
cagacauggcucccccaccuccu

SEQ ID NO: 511995 - RNA, 24 nt, Human
caggagccuacuagccacccccau

SEQ ID NO: 511996 - RNA, 22 nt, Human
caggcccgagguugggcugggg

SEQ ID NO: 511997 - RNA, 22 nt, Human
cagggcucuggagcugcucuuc

SEQ ID NO: 511998 - RNA, 19 nt, Human
caucugguccagaaucauc

SEQ ID NO: 511999 - RNA, 18 nt, Human
cauggcucccccaccucc

SEQ ID NO: 512000 - RNA, 18 nt, Human
ccagggcucuggagcugc

SEQ ID NO: 512001 - RNA, 21 nt, Human
ccccggccagggcucuggagc

SEQ ID NO: 512002 - RNA, 21 nt, Human
cccuaaggacccugguggggc

SEQ ID NO: 512003 - RNA, 19 nt, Human
ccugagcacagacauggcu

SEQ ID NO: 512004 - RNA, 24 nt, Human
cuccucacaagguuuuugguacaa

SEQ ID NO: 512005 - RNA, 18 nt, Human
cugugguuuggccuagag

SEQ ID NO: 512006 - RNA, 20 nt, Human
gcagcuugggguccugggcc

SEQ ID NO: 512007 - RNA, 21 nt, Human
gcccgagguugggcuggggag

SEQ ID NO: 512008 - RNA, 23 nt, Human
ggaugugcuggggaacguggagu

SEQ ID NO: 512009 - RNA, 18 nt, Human
ggcuccucaggcuucauc

SEQ ID NO: 512010 - RNA, 18 nt, Human
uaaaccaaagaggccagg

SEQ ID NO: 512011 - RNA, 25 nt, Human
uaaaccaaagaggccaggagccuac

SEQ ID NO: 512012 - RNA, 21 nt, Human
uacuagccacccccauccccu

SEQ ID NO: 512013 - RNA, 24 nt, Human
uagagcaucccuaaggacccuggu

SEQ ID NO: 512014 - RNA, 23 nt, Human
uccccuucccucuuccugagcac

SEQ ID NO: 512015 - RNA, 18 nt, Human
ucccugggcucugcagcu

SEQ ID NO: 512016 - RNA, 23 nt, Human
ucuccuauccugcuaucuuagag

SEQ ID NO: 512017 - RNA, 22 nt, Human
ucugcagcuugggguccugggc

SEQ ID NO: 512018 - RNA, 22 nt, Human
ucugcucccaccaccugggaug

SEQ ID NO: 512019 - RNA, 22 nt, Human
ugcucuucccugggcucugcag

SEQ ID NO: 512020 - RNA, 18 nt, Human
ugcuggggaacguggagu

SEQ ID NO: 512021 - RNA, 21 nt, Human
uggaaggcuccucaggcuuca

SEQ ID NO: 512022 - RNA, 21 nt, Human
uggagcugcucuucccugggc

SEQ ID NO: 512023 - RNA, 18 nt, Human
uggaguggggcagccuga

SEQ ID NO: 512024 - RNA, 21 nt, Human
uggggcaggguacccucugcu

SEQ ID NO: 512025 - RNA, 19 nt, Human
ugugcuggggaacguggag

SEQ ID NO: 512026 - RNA, 22 nt, Human
uuagagcuggaaggcuccucag

SEQ ID NO: 512027 - RNA, 18 nt, Human
aaaguacugggauuacaa

SEQ ID NO: 512028 - RNA, 22 nt, Human
aaaguacugggauuacaagcau

SEQ ID NO: 512029 - RNA, 24 nt, Human
aaaguacugggauuacaagcauga

SEQ ID NO: 512030 - RNA, 21 nt, Human
aaguacugggauuacaagcau

SEQ ID NO: 512031 - RNA, 26 nt, Human
aaguacugggauuacaagcaugagcc

SEQ ID NO: 512032 - RNA, 20 nt, Human
aaguagcugggacuacaggc

SEQ ID NO: 512033 - RNA, 21 nt, Human
aaguagcugggacuacaggca

SEQ ID NO: 512034 - RNA, 25 nt, Human
aaguagcugggacuacaggcaaugc

SEQ ID NO: 512035 - RNA, 21 nt, Human
acaccaagcuaauuuuuguau

SEQ ID NO: 512036 - RNA, 21 nt, Human
accacagccuccuaaaguacu

SEQ ID NO: 512037 - RNA, 24 nt, Human
accauguuggccaggcuggucuug

SEQ ID NO: 512038 - RNA, 18 nt, Human
acucugucacccaggcug

SEQ ID NO: 512039 - RNA, 24 nt, Human
acucugucacccaggcugaagugc

SEQ ID NO: 512040 - RNA, 24 nt, Human
aggcugaagugcaguggcacgacc

SEQ ID NO: 512041 - RNA, 18 nt, Human
agugauccaccuaccacg

SEQ ID NO: 512042 - RNA, 23 nt, Human
agugcaguggcacgaccucagcu

SEQ ID NO: 512043 - RNA, 24 nt, Human
auccaccuaccacagccuccuaaa

SEQ ID NO: 512044 - RNA, 18 nt, Human
augagguuucaccauguu

SEQ ID NO: 512045 - RNA, 20 nt, Human
augagguuucaccauguugg

SEQ ID NO: 512046 - RNA, 24 nt, Human
augcaacaaaacacauggagacuu

SEQ ID NO: 512047 - RNA, 21 nt, Human
auuacaagcaugagccacuac

SEQ ID NO: 512048 - RNA, 18 nt, Human
auucuccugccucagccu

SEQ ID NO: 512049 - RNA, 24 nt, Human
auuuuuguauuuuuaguagagaug

SEQ ID NO: 512050 - RNA, 24 nt, Human
caacaaaacacauggagacuuuga

SEQ ID NO: 512051 - RNA, 22 nt, Human
caagugauucuccugccucagc

SEQ ID NO: 512052 - RNA, 27 nt, Human
caagugauucuccugccucagccuccc

SEQ ID NO: 512053 - RNA, 21 nt, Human
caaugcaccaccacaccaagc

SEQ ID NO: 512054 - RNA, 24 nt, Human
caccacaccaagcuaauuuuugua

SEQ ID NO: 512055 - RNA, 21 nt, Human
caccauguuggccaggcuggu

SEQ ID NO: 512056 - RNA, 23 nt, Human
caccauguuggccaggcuggucu

SEQ ID NO: 512057 - RNA, 24 nt, Human
caccauguuggccaggcuggucuu

SEQ ID NO: 512058 - RNA, 27 nt, Human
caccauguuggccaggcuggucuugaa

SEQ ID NO: 512059 - RNA, 23 nt, Human
cacccaggcugaagugcaguggc

SEQ ID NO: 512060 - RNA, 23 nt, Human
cacucugucacccaggcugaagu

SEQ ID NO: 512061 - RNA, 24 nt, Human
cacucugucacccaggcugaagug

SEQ ID NO: 512062 - RNA, 23 nt, Human
cacugcaaccuccacuuccuggg

SEQ ID NO: 512063 - RNA, 24 nt, Human
cauguuggccaggcuggucuugaa

SEQ ID NO: 512064 - RNA, 23 nt, Human
ccauaaacauuuucaaaaugcag

SEQ ID NO: 512065 - RNA, 22 nt, Human
ccauuuguuagugguuuuuuuc

SEQ ID NO: 512066 - RNA, 23 nt, Human
cccaaguagcugggacuacaggc

SEQ ID NO: 512067 - RNA, 24 nt, Human
cccaaguagcugggacuacaggca

SEQ ID NO: 512068 - RNA, 24 nt, Human
ccgaccucauaguaguuuugauuu

SEQ ID NO: 512069 - RNA, 22 nt, Human
ccuccacuuccuggguucaagu

SEQ ID NO: 512070 - RNA, 24 nt, Human
ccugaccucaagugauccaccuac

SEQ ID NO: 512071 - RNA, 25 nt, Human
ccugaccucaagugauccaccuacc

SEQ ID NO: 512072 - RNA, 23 nt, Human
ccugccucagccucccaaguagc

SEQ ID NO: 512073 - RNA, 23 nt, Human
ccuggguucaagugauucuccuc

SEQ ID NO: 512074 - RNA, 23 nt, Human
ccuggguucaagugauucuccug

SEQ ID NO: 512075 - RNA, 21 nt, Human
cucaagugauccaccuaccac

SEQ ID NO: 512076 - RNA, 24 nt, Human
cucacugcaaccuccacuuccugg

SEQ ID NO: 512077 - RNA, 24 nt, Human
cucagccucccaaguagcugggac

SEQ ID NO: 512078 - RNA, 23 nt, Human
cugcaaccuccacuuccuggguu

SEQ ID NO: 512079 - RNA, 23 nt, Human
cugccucagccucccaaguagcu

SEQ ID NO: 512080 - RNA, 21 nt, Human
cuuccuggguucaagugauuc

SEQ ID NO: 512081 - RNA, 24 nt, Human
cuuccuggguucaagugauucucc

SEQ ID NO: 512082 - RNA, 22 nt, Human
gaccucaagugauccaccuacc

SEQ ID NO: 512083 - RNA, 19 nt, Human
gaccucagcucacugcaac

SEQ ID NO: 512084 - RNA, 21 nt, Human
gagccacuacacccgaccuca

SEQ ID NO: 512085 - RNA, 22 nt, Human
gagguuucaccauguuggccag

SEQ ID NO: 512086 - RNA, 18 nt, Human
gauuacaagcaugagcca

SEQ ID NO: 512087 - RNA, 19 nt, Human
gauuacaagcaugagccac

SEQ ID NO: 512088 - RNA, 21 nt, Human
gauucuccugccucagccucc

SEQ ID NO: 512089 - RNA, 22 nt, Human
gcaaccuccacuuccuggguuc

SEQ ID NO: 512090 - RNA, 19 nt, Human
gcugaagugcaguggcacg

SEQ ID NO: 512091 - RNA, 23 nt, Human
gcuggucuugaacuccugaccuc

SEQ ID NO: 512092 - RNA, 19 nt, Human
ggauuacaagcaugagcca

SEQ ID NO: 512093 - RNA, 24 nt, Human
ggcuggucuugaacuccugaccuc

SEQ ID NO: 512094 - RNA, 19 nt, Human
ggucuugaacuccugaccu

SEQ ID NO: 512095 - RNA, 23 nt, Human
gugauccaccuaccacagccucc

SEQ ID NO: 512096 - RNA, 24 nt, Human
gugauucuccugccucagccuccc

SEQ ID NO: 512097 - RNA, 24 nt, Human
uaaaguacugggauuacaagcaug

SEQ ID NO: 512098 - RNA, 24 nt, Human
uaauuuuuguauuuuuaguagaga

SEQ ID NO: 512099 - RNA, 23 nt, Human
uacaagcaugagccacuacaccc

SEQ ID NO: 512100 - RNA, 23 nt, Human
uacacccgaccucauaguaguuu

SEQ ID NO: 512101 - RNA, 28 nt, Human
uacacuucccuaaugauugaccccuggg

SEQ ID NO: 512102 - RNA, 24 nt, Human
uaccacagccuccuaaaguacugg

SEQ ID NO: 512103 - RNA, 27 nt, Human
uacugggauuacaagcaugagccacua

SEQ ID NO: 512104 - RNA, 22 nt, Human
uagagaugagguuucaccaugu

SEQ ID NO: 512105 - RNA, 24 nt, Human
uaguagagaugagguuucaccaug

SEQ ID NO: 512106 - RNA, 26 nt, Human
uaguagagaugagguuucaccauguu

SEQ ID NO: 512107 - RNA, 19 nt, Human
ucaagugauucuccugccu

SEQ ID NO: 512108 - RNA, 24 nt, Human
ucacugcaaccuccacuuccuggg

SEQ ID NO: 512109 - RNA, 25 nt, Human
ucacugcaaccuccacuuccugggu

SEQ ID NO: 512110 - RNA, 26 nt, Human
ucacugcaaccuccacuuccuggguu

SEQ ID NO: 512111 - RNA, 18 nt, Human
ucagccucccaaguagcu

SEQ ID NO: 512112 - RNA, 20 nt, Human
ucagccucccaaguagcugg

SEQ ID NO: 512113 - RNA, 24 nt, Human
uccauaaacauuuucaaaaugcag

SEQ ID NO: 512114 - RNA, 24 nt, Human
ucccaaguagcugggacuacaggc

SEQ ID NO: 512115 - RNA, 18 nt, Human
uccuaaaguacugggauu

SEQ ID NO: 512116 - RNA, 24 nt, Human
uccuaaaguacugggauuacaagc

SEQ ID NO: 512117 - RNA, 20 nt, Human
uccuggguucaagugauucu

SEQ ID NO: 512118 - RNA, 21 nt, Human
uccuggguucaagugauucuc

SEQ ID NO: 512119 - RNA, 24 nt, Human
uccuggguucaagugauucuccug

SEQ ID NO: 512120 - RNA, 19 nt, Human
ucucacucugucacccagg

SEQ ID NO: 512121 - RNA, 24 nt, Human
ucucacucugucacccaggcugaa

SEQ ID NO: 512122 - RNA, 26 nt, Human
ucucacucugucacccaggcugaagu

SEQ ID NO: 512123 - RNA, 27 nt, Human
ucucacucugucacccaggcugaagug

SEQ ID NO: 512124 - RNA, 26 nt, Human
ucuccugccucagccucccaaguagc

SEQ ID NO: 512125 - RNA, 24 nt, Human
ucugucacccaggcugaagugcag

SEQ ID NO: 512126 - RNA, 21 nt, Human
ucuugaacuccugaccucaag

SEQ ID NO: 512127 - RNA, 19 nt, Human
ugaagugcaguggcacgac

SEQ ID NO: 512128 - RNA, 19 nt, Human
ugaccucaagugauccacc

SEQ ID NO: 512129 - RNA, 20 nt, Human
ugaccucaagugauccaccu

SEQ ID NO: 512130 - RNA, 24 nt, Human
ugagguuucaccauguuggccagg

SEQ ID NO: 512131 - RNA, 24 nt, Human
ugccucagccucccaaguagcugg

SEQ ID NO: 512132 - RNA, 23 nt, Human
uggagacuuugaaaauccuucag

SEQ ID NO: 512133 - RNA, 24 nt, Human
uggcacgaccucagcucacugcaa

SEQ ID NO: 512134 - RNA, 24 nt, Human
uggccaggcuggucuugaacuccu

SEQ ID NO: 512135 - RNA, 22 nt, Human
ugggacuacaggcaaugcacca

SEQ ID NO: 512136 - RNA, 25 nt, Human
ugggacuacaggcaaugcaccacca

SEQ ID NO: 512137 - RNA, 21 nt, Human
ugggauuacaagcaugagcca

SEQ ID NO: 512138 - RNA, 22 nt, Human
ugggauuacaagcaugagccac

SEQ ID NO: 512139 - RNA, 22 nt, Human
ugggauuacaagcaugagccac

SEQ ID NO: 512140 - RNA, 23 nt, Human
ugggauuacaagcaugagccacu

SEQ ID NO: 512141 - RNA, 24 nt, Human
ugggauuacaagcaugagccacua

SEQ ID NO: 512142 - RNA, 24 nt, Human
ugggauuacaagcaugagccacua

SEQ ID NO: 512143 - RNA, 26 nt, Human
ugggauuacaagcaugagccacuaca

SEQ ID NO: 512144 - RNA, 23 nt, Human
uggguucaagugauucuccugcc

SEQ ID NO: 512145 - RNA, 24 nt, Human
uggguucaagugauucuccugccu

SEQ ID NO: 512146 - RNA, 18 nt, Human
uuaguagagaugagguuu

SEQ ID NO: 512147 - RNA, 22 nt, Human
uuaguagagaugagguuucacc

SEQ ID NO: 512148 - RNA, 24 nt, Human
uuaguagagaugagguuucaccau

SEQ ID NO: 512149 - RNA, 19 nt, Human
uuagugguuuuuuucuucu

SEQ ID NO: 512150 - RNA, 21 nt, Human
uucaagugauucuccugccuc

SEQ ID NO: 512151 - RNA, 23 nt, Human
uucaagugauucuccugccucag

SEQ ID NO: 512152 - RNA, 24 nt, Human
uucaagugauucuccugccucagc

SEQ ID NO: 512153 - RNA, 25 nt, Human
uugcucucuaucaccaaauacugua

SEQ ID NO: 512154 - RNA, 24 nt, Human
uuucaccauguuggccaggcuggu

SEQ ID NO: 512155 - RNA, 23 nt, Human
uuuggagacugucucacucuguc

SEQ ID NO: 512156 - RNA, 24 nt, Human
uuuuuaguagagaugagguuucac

SEQ ID NO: 512157 - RNA, 20 nt, Human
uuuuuguauuuuuaguagag

SEQ ID NO: 512158 - RNA, 25 nt, Human
uuuuuuuuuuuuggagacugucuca

SEQ ID NO: 512159 - RNA, 18 nt, Human
uuuuuuuuuuuuuuuuug

SEQ ID NO: 512160 - RNA, 19 nt, Human
aaagaggacacucugguuc

SEQ ID NO: 512161 - RNA, 21 nt, Human
aagggcucaccuucggcuucu

SEQ ID NO: 512162 - RNA, 19 nt, Human
aggcagaggggcaggagcu

SEQ ID NO: 512163 - RNA, 23 nt, Human
aggcagcggcagaggcggauguc

SEQ ID NO: 512164 - RNA, 24 nt, Human
agggcaguggugacaugcugcugu

SEQ ID NO: 512165 - RNA, 18 nt, Human
aggggcaggagcuccugc

SEQ ID NO: 512166 - RNA, 21 nt, Human
aggucuccgacacagccgucu

SEQ ID NO: 512167 - RNA, 23 nt, Human
caccuucggcuucugcguggagg

SEQ ID NO: 512168 - RNA, 20 nt, Human
cacgccgaaaccccccgcca

SEQ ID NO: 512169 - RNA, 23 nt, Human
cagaugaugccucguuccagucc

SEQ ID NO: 512170 - RNA, 20 nt, Human
caggggguguagggggcagg

SEQ ID NO: 512171 - RNA, 18 nt, Human
caguccaucaucaguuuc

SEQ ID NO: 512172 - RNA, 18 nt, Human
ccccccgccaccaaccgg

SEQ ID NO: 512173 - RNA, 18 nt, Human
cccgccaccaaccggcug

SEQ ID NO: 512174 - RNA, 19 nt, Human
ccgaaaccccccgccacca

SEQ ID NO: 512175 - RNA, 22 nt, Human
ccgaaaccccccgccaccaacc

SEQ ID NO: 512176 - RNA, 19 nt, Human
ccgcugcgccaccccgcuc

SEQ ID NO: 512177 - RNA, 18 nt, Human
cgacuggcccucacuacu

SEQ ID NO: 512178 - RNA, 19 nt, Human
cgccgaaggccucgacugu

SEQ ID NO: 512179 - RNA, 23 nt, Human
cgccguccacggcccggcuugga

SEQ ID NO: 512180 - RNA, 18 nt, Human
cucaccuucggcuucugc

SEQ ID NO: 512181 - RNA, 24 nt, Human
cucaccuucggcuucugcguggag

SEQ ID NO: 512182 - RNA, 20 nt, Human
cugcaggggguguagggggc

SEQ ID NO: 512183 - RNA, 18 nt, Human
cugguuccaguuguagcc

SEQ ID NO: 512184 - RNA, 22 nt, Human
gaaaccccccgccaccaaccgg

SEQ ID NO: 512185 - RNA, 20 nt, Human
gaaggccucgacugugaggg

SEQ ID NO: 512186 - RNA, 23 nt, Human
gacgauguggacgcugggaggga

SEQ ID NO: 512187 - RNA, 21 nt, Human
gacuggcuguggcuuggggau

SEQ ID NO: 512188 - RNA, 19 nt, Human
gagcaggccccaccgcccc

SEQ ID NO: 512189 - RNA, 21 nt, Human
gaggaugacucagagaagguc

SEQ ID NO: 512190 - RNA, 21 nt, Human
gccccguccaccucgcggcug

SEQ ID NO: 512191 - RNA, 19 nt, Human
gccggggcccagugcuccg

SEQ ID NO: 512192 - RNA, 21 nt, Human
gcggaugucgggaagcccaga

SEQ ID NO: 512193 - RNA, 22 nt, Human
gcuauaguaguccaggccgagg

SEQ ID NO: 512194 - RNA, 20 nt, Human
ggagaugggucugcaggggg

SEQ ID NO: 512195 - RNA, 22 nt, Human
ggagaugggugggagggggugg

SEQ ID NO: 512196 - RNA, 21 nt, Human
ggaggagaugggugggagggg

SEQ ID NO: 512197 - RNA, 22 nt, Human
ggagggagaugggucugcaggg

SEQ ID NO: 512198 - RNA, 20 nt, Human
ggaggggguggagggagaug

SEQ ID NO: 512199 - RNA, 20 nt, Human
ggcugccggggcccagugcu

SEQ ID NO: 512200 - RNA, 20 nt, Human
gggcaggagcuccugccaga

SEQ ID NO: 512201 - RNA, 23 nt, Human
gguccagucggcacuucaguugg

SEQ ID NO: 512202 - RNA, 19 nt, Human
gucugcaggggguguaggg

SEQ ID NO: 512203 - RNA, 21 nt, Human
gucugcugcuucaccuucugc

SEQ ID NO: 512204 - RNA, 22 nt, Human
gugcugucggaggaugacucag

SEQ ID NO: 512205 - RNA, 21 nt, Human
guggaggagaugggugggagg

SEQ ID NO: 512206 - RNA, 21 nt, Human
guggagggagaugggucugca

SEQ ID NO: 512207 - RNA, 19 nt, Human
uagccugaggcagcggcag

SEQ ID NO: 512208 - RNA, 19 nt, Human
uccacggcccggcuuggag

SEQ ID NO: 512209 - RNA, 19 nt, Human
ucucgcucucccacgccga

SEQ ID NO: 512210 - RNA, 18 nt, Human
ucugcaggggguguaggg

SEQ ID NO: 512211 - RNA, 22 nt, Human
ugaacugggugcugucggagga

SEQ ID NO: 512212 - RNA, 21 nt, Human
ugcaggggguguagggggcag

SEQ ID NO: 512213 - RNA, 20 nt, Human
ugcguggaggagaugggugg

SEQ ID NO: 512214 - RNA, 23 nt, Human
uggagcuacucugaaagaggaca

SEQ ID NO: 512215 - RNA, 18 nt, Human
uggagggagaugggucug

SEQ ID NO: 512216 - RNA, 20 nt, Human
uggccgcugcgccaccccgc

SEQ ID NO: 512217 - RNA, 22 nt, Human
uggcuuggggaugaacuuggcu

SEQ ID NO: 512218 - RNA, 29 nt, Human
uggcuuggggaugaacuuggcuuuggccg

SEQ ID NO: 512219 - RNA, 21 nt, Human
ugggaggcagaggggcagggg

SEQ ID NO: 512220 - RNA, 23 nt, Human
uguagccgggggcagaugaugcc

SEQ ID NO: 512221 - RNA, 19 nt, Human
uguagggggcaggguggga

SEQ ID NO: 512222 - RNA, 19 nt, Human
ugucgggaagcccagaugu

SEQ ID NO: 512223 - RNA, 19 nt, Human
ugugcagaaagggcucacc

SEQ ID NO: 512224 - RNA, 21 nt, Human
uucaccuucugcgguguguag

SEQ ID NO: 512225 - RNA, 27 nt, Human
uuuuaaguuuuguacauuuuuaaaaag

SEQ ID NO: 512226 - RNA, 19 nt, Human
uuuucugaaagccaggaac

SEQ ID NO: 512227 - RNA, 24 nt, Human
uuuuuuuuuucuaaaacuguguuu

SEQ ID NO: 512228 - RNA, 21 nt, Human
aaccaugcuccaaaaaacaaa

SEQ ID NO: 512229 - RNA, 22 nt, Human
aagaaaaacuucagcaaggaga

SEQ ID NO: 512230 - RNA, 24 nt, Human
acaaacuuucaagcucccgguuaa

SEQ ID NO: 512231 - RNA, 22 nt, Human
aggaagagcugaaagacacaug

SEQ ID NO: 512232 - RNA, 21 nt, Human
aucagcgcaugcucgcaauga

SEQ ID NO: 512233 - RNA, 19 nt, Human
augaggaagaaaauuugca

SEQ ID NO: 512234 - RNA, 24 nt, Human
caaagaaccaugcuccaaaaaaca

SEQ ID NO: 512235 - RNA, 21 nt, Human
caacauuuaauuucugcuugu

SEQ ID NO: 512236 - RNA, 21 nt, Human
caagcucccgguuaaucccca

SEQ ID NO: 512237 - RNA, 21 nt, Human
caggguucucgcgggguuagg

SEQ ID NO: 512238 - RNA, 27 nt, Human
ccaaagacaaacuuucaagcucccggu

SEQ ID NO: 512239 - RNA, 24 nt, Human
ccaaucagcgcaugcucgcaauga

SEQ ID NO: 512240 - RNA, 24 nt, Human
cccaaagaaccaugcuccaaaaaa

SEQ ID NO: 512241 - RNA, 25 nt, Human
cccccagguagucuguacauaauuc

SEQ ID NO: 512242 - RNA, 21 nt, Human
cugcuggcucugcucauucug

SEQ ID NO: 512243 - RNA, 23 nt, Human
cugugguggcaaagggacggcac

SEQ ID NO: 512244 - RNA, 20 nt, Human
cuucccaaagaaccaugcuc

SEQ ID NO: 512245 - RNA, 21 nt, Human
gagcugaaagacacaugugcu

SEQ ID NO: 512246 - RNA, 18 nt, Human
gcuccaaaaaacaaaaga

SEQ ID NO: 512247 - RNA, 18 nt, Human
gcucugcucauucugcuu

SEQ ID NO: 512248 - RNA, 22 nt, Human
uaucagguuaccaaagacaaac

SEQ ID NO: 512249 - RNA, 20 nt, Human
ucgcgggguuaggcgucccc

SEQ ID NO: 512250 - RNA, 18 nt, Human
uggcaaagggacggcacu

SEQ ID NO: 512251 - RNA, 21 nt, Human
ugggugaaaaggaagagcuga

SEQ ID NO: 512252 - RNA, 21 nt, Human
ugugguggcaaagggacggca

SEQ ID NO: 512253 - RNA, 24 nt, Human
aaaacggcaacucccagaacuucc

SEQ ID NO: 512254 - RNA, 19 nt, Human
aaacagaaagggagccuuc

SEQ ID NO: 512255 - RNA, 22 nt, Human
aaacagaaagggagccuuccag

SEQ ID NO: 512256 - RNA, 21 nt, Human
aaggaucuucccagggcaucc

SEQ ID NO: 512257 - RNA, 18 nt, Human
aagggagaggggaagggg

SEQ ID NO: 512258 - RNA, 20 nt, Human
acugugacgaacagcaaagc

SEQ ID NO: 512259 - RNA, 20 nt, Human
agaagagggagccggaagcu

SEQ ID NO: 512260 - RNA, 26 nt, Human
agacaauagauggagaaaggggaccc

SEQ ID NO: 512261 - RNA, 20 nt, Human
agagaaagcggcagccaagg

SEQ ID NO: 512262 - RNA, 18 nt, Human
agaggggggagaagaggg

SEQ ID NO: 512263 - RNA, 21 nt, Human
agaucaaacuuccgaaacugc

SEQ ID NO: 512264 - RNA, 21 nt, Human
agcaauggaacagcaauggga

SEQ ID NO: 512265 - RNA, 21 nt, Human
agcccaagggagaggggaagg

SEQ ID NO: 512266 - RNA, 18 nt, Human
aggaggacgggcugagga

SEQ ID NO: 512267 - RNA, 24 nt, Human
aggcccugcaagugcccucugcuc

SEQ ID NO: 512268 - RNA, 27 nt, Human
aggcuguggggagagaaagcggcagcc

SEQ ID NO: 512269 - RNA, 25 nt, Human
agggagccggaagcugggggcacag

SEQ ID NO: 512270 - RNA, 18 nt, Human
augggacagauauuucuc

SEQ ID NO: 512271 - RNA, 23 nt, Human
auuccccacaugcugccccuuuu

SEQ ID NO: 512272 - RNA, 18 nt, Human
caacaauuuuucaucaga

SEQ ID NO: 512273 - RNA, 25 nt, Human
cacagcuugaagacugcucauccca

SEQ ID NO: 512274 - RNA, 23 nt, Human
cacuccuacccauauuccuaagc

SEQ ID NO: 512275 - RNA, 19 nt, Human
cagcaaugggaaagcuagg

SEQ ID NO: 512276 - RNA, 23 nt, Human
cagcaggaacggggcaggggcuc

SEQ ID NO: 512277 - RNA, 24 nt, Human
caggagcucaggaagaugucgcuc

SEQ ID NO: 512278 - RNA, 18 nt, Human
cagggcaaaggagcgcgg

SEQ ID NO: 512279 - RNA, 19 nt, Human
ccaagaacggccaggccgc

SEQ ID NO: 512280 - RNA, 21 nt, Human
ccacaugcugccccuuuuccc

SEQ ID NO: 512281 - RNA, 21 nt, Human
ccaggcccugcaagugcccuc

SEQ ID NO: 512282 - RNA, 20 nt, Human
ccccaagucggaaacggaau

SEQ ID NO: 512283 - RNA, 24 nt, Human
ccccagagaucuaaaugggacaga

SEQ ID NO: 512284 - RNA, 22 nt, Human
cccccaaacguuuugaugaaaa

SEQ ID NO: 512285 - RNA, 18 nt, Human
ccuggggcccggcagggc

SEQ ID NO: 512286 - RNA, 20 nt, Human
ccuugaggcuguggggagag

SEQ ID NO: 512287 - RNA, 19 nt, Human
cgagugggcgggggugggg

SEQ ID NO: 512288 - RNA, 24 nt, Human
cgcggguuggaggaggacgggcug

SEQ ID NO: 512289 - RNA, 21 nt, Human
cggccaggccgcagcaggaac

SEQ ID NO: 512290 - RNA, 21 nt, Human
cucacaaacaacuuggaagcc

SEQ ID NO: 512291 - RNA, 26 nt, Human
cuccugcccgcuaacuaccacagcuu

SEQ ID NO: 512292 - RNA, 19 nt, Human
cugacuacaagucauaaaa

SEQ ID NO: 512293 - RNA, 24 nt, Human
cugacuacaagucauaaaacuuca

SEQ ID NO: 512294 - RNA, 18 nt, Human
cuugaagacugcucaucc

SEQ ID NO: 512295 - RNA, 22 nt, Human
cuuucacuccuacccauauucc

SEQ ID NO: 512296 - RNA, 18 nt, Human
gaaccccaagucggaaac

SEQ ID NO: 512297 - RNA, 20 nt, Human
gacacugugacgaacagcaa

SEQ ID NO: 512298 - RNA, 18 nt, Human
gagcgcggguuggaggag

SEQ ID NO: 512299 - RNA, 18 nt, Human
gaggagagggaaaggcag

SEQ ID NO: 512300 - RNA, 24 nt, Human
gaggagagggaaaggcagucccag

SEQ ID NO: 512301 - RNA, 22 nt, Human
gaggugagagucagguggccug

SEQ ID NO: 512302 - RNA, 21 nt, Human
gcaggagggguggagaggggu

SEQ ID NO: 512303 - RNA, 19 nt, Human
gcggggggcauuccccaca

SEQ ID NO: 512304 - RNA, 24 nt, Human
ggagacacaucuuccucuguuauc

SEQ ID NO: 512305 - RNA, 21 nt, Human
ggagccggaagcugggggcac

SEQ ID NO: 512306 - RNA, 22 nt, Human
ggaggacgggcugaggagaggg

SEQ ID NO: 512307 - RNA, 20 nt, Human
ggcgggggugggguggggug

SEQ ID NO: 512308 - RNA, 20 nt, Human
gggcgggggugggguggggu

SEQ ID NO: 512309 - RNA, 22 nt, Human
ggggagaagagggagccggaag

SEQ ID NO: 512310 - RNA, 20 nt, Human
gggggagaagagggagccgg

SEQ ID NO: 512311 - RNA, 19 nt, Human
ggggugggguggggugggg

SEQ ID NO: 512312 - RNA, 22 nt, Human
ggguagaggggggagaagaggg

SEQ ID NO: 512313 - RNA, 24 nt, Human
ggguagaggggggagaagagggag

SEQ ID NO: 512314 - RNA, 18 nt, Human
gggugggguggggugggg

SEQ ID NO: 512315 - RNA, 26 nt, Human
ggugaaagagacaauagauggagaaa

SEQ ID NO: 512316 - RNA, 24 nt, Human
gugaaaacagccugccugaacccc

SEQ ID NO: 512317 - RNA, 18 nt, Human
guggccuugaggcugugg

SEQ ID NO: 512318 - RNA, 21 nt, Human
gugggcggggguggggugggg

SEQ ID NO: 512319 - RNA, 22 nt, Human
gugggcgggggugggguggggu

SEQ ID NO: 512320 - RNA, 26 nt, Human
guggggugggguggcggguugacggc

SEQ ID NO: 512321 - RNA, 26 nt, Human
uaaaacuucaaacagaaagggagccu

SEQ ID NO: 512322 - RNA, 22 nt, Human
uaaaugucugaagcuggcaggu

SEQ ID NO: 512323 - RNA, 21 nt, Human
uaacuaccacagcuugaagac

SEQ ID NO: 512324 - RNA, 19 nt, Human
uaagcagagguucauaaug

SEQ ID NO: 512325 - RNA, 22 nt, Human
uacaagucauaaaacuucaaac

SEQ ID NO: 512326 - RNA, 18 nt, Human
uaccugaauggaaaauga

SEQ ID NO: 512327 - RNA, 19 nt, Human
uagggccagcguggaggca

SEQ ID NO: 512328 - RNA, 18 nt, Human
uaggguggccuugaggcu

SEQ ID NO: 512329 - RNA, 20 nt, Human
uauggcaggcauggacagga

SEQ ID NO: 512330 - RNA, 19 nt, Human
ucagaucaaacuuccgaaa

SEQ ID NO: 512331 - RNA, 24 nt, Human
ucagcaaaaggauuuguggaaggc

SEQ ID NO: 512332 - RNA, 25 nt, Human
ucagguggccugccauccuggggcc

SEQ ID NO: 512333 - RNA, 21 nt, Human
ucauaaaacuucaaacagaaa

SEQ ID NO: 512334 - RNA, 19 nt, Human
ucccuaaaugucugaagcu

SEQ ID NO: 512335 - RNA, 21 nt, Human
uccuagaacugaaacauucua

SEQ ID NO: 512336 - RNA, 23 nt, Human
ugaaaacagccugccugaacccc

SEQ ID NO: 512337 - RNA, 24 nt, Human
ugaaaacagccugccugaacccca

SEQ ID NO: 512338 - RNA, 23 nt, Human
ugacacugugacgaacagcaaag

SEQ ID NO: 512339 - RNA, 18 nt, Human
ugcaagugcccucugcuc

SEQ ID NO: 512340 - RNA, 21 nt, Human
ugcucaucccaggcccugcaa

SEQ ID NO: 512341 - RNA, 18 nt, Human
uggaacagcaaugggaaa

SEQ ID NO: 512342 - RNA, 23 nt, Human
uggaaggcggggggcauucccca

SEQ ID NO: 512343 - RNA, 25 nt, Human
uggaaggcggggggcauuccccaca

SEQ ID NO: 512344 - RNA, 22 nt, Human
uggagaaaggcauaaugaccau

SEQ ID NO: 512345 - RNA, 21 nt, Human
uggcaggcauggacaggagcu

SEQ ID NO: 512346 - RNA, 18 nt, Human
uggccuugaggcuguggg

SEQ ID NO: 512347 - RNA, 24 nt, Human
uggccuugaggcuguggggagaga

SEQ ID NO: 512348 - RNA, 18 nt, Human
uggcggguagagggggga

SEQ ID NO: 512349 - RNA, 20 nt, Human
ugggaaagcuagggccagcg

SEQ ID NO: 512350 - RNA, 19 nt, Human
ugggaccaggugaugguac

SEQ ID NO: 512351 - RNA, 18 nt, Human
ugggaggagacacaucuu

SEQ ID NO: 512352 - RNA, 21 nt, Human
uggggcccggcagggcaaagg

SEQ ID NO: 512353 - RNA, 20 nt, Human
ugucucagcaauggaacagc

SEQ ID NO: 512354 - RNA, 20 nt, Human
uuaaguuuucagaucucaca

SEQ ID NO: 512355 - RNA, 21 nt, Human
uuccugggucagcaaaaggau

SEQ ID NO: 512356 - RNA, 19 nt, Human
aagcguuuucugcaagaac

SEQ ID NO: 512357 - RNA, 20 nt, Human
aauugucaagagcaguuggu

SEQ ID NO: 512358 - RNA, 21 nt, Human
acacugaagacacaaagaaug

SEQ ID NO: 512359 - RNA, 18 nt, Human
acccagagauacgugguu

SEQ ID NO: 512360 - RNA, 20 nt, Human
accuugagcagguauagaag

SEQ ID NO: 512361 - RNA, 19 nt, Human
acuguacuuucauucaaau

SEQ ID NO: 512362 - RNA, 19 nt, Human
agaguccugggugacaugc

SEQ ID NO: 512363 - RNA, 23 nt, Human
agcaguuggugguucugaaauac

SEQ ID NO: 512364 - RNA, 19 nt, Human
agccaacacugaagacaca

SEQ ID NO: 512365 - RNA, 18 nt, Human
agguugccacuggcaugg

SEQ ID NO: 512366 - RNA, 23 nt, Human
auagagccaugcccacugaccca

SEQ ID NO: 512367 - RNA, 18 nt, Human
caaagaugacaaugaccu

SEQ ID NO: 512368 - RNA, 26 nt, Human
caagccaacacugaagacacaaagaa

SEQ ID NO: 512369 - RNA, 21 nt, Human
cacaguuaugugaacguguca

SEQ ID NO: 512370 - RNA, 21 nt, Human
caccggcagaguccuggguga

SEQ ID NO: 512371 - RNA, 21 nt, Human
caugugcugcacaguuaugug

SEQ ID NO: 512372 - RNA, 26 nt, Human
ccagcggcuccugacuccuguucucu

SEQ ID NO: 512373 - RNA, 19 nt, Human
ccucucggcuuaguaaggg

SEQ ID NO: 512374 - RNA, 24 nt, Human
cuauagguccugccugcaggaaug

SEQ ID NO: 512375 - RNA, 21 nt, Human
ggaauugagaggagcagggcu

SEQ ID NO: 512376 - RNA, 26 nt, Human
ggcuaaggccucccaaugcuguuugu

SEQ ID NO: 512377 - RNA, 25 nt, Human
gugguucugaaauacaauccucagc

SEQ ID NO: 512378 - RNA, 22 nt, Human
uaaaacaagccaacacugaaga

SEQ ID NO: 512379 - RNA, 24 nt, Human
uacagauggaucagcuaaaacaag

SEQ ID NO: 512380 - RNA, 22 nt, Human
uagagccaugcccacugacccc

SEQ ID NO: 512381 - RNA, 22 nt, Human
uagcuguggucuuccuaaguac

SEQ ID NO: 512382 - RNA, 24 nt, Human
uaggaauagagccaugcccacuga

SEQ ID NO: 512383 - RNA, 24 nt, Human
uagguucauugaaaccaggguaac

SEQ ID NO: 512384 - RNA, 19 nt, Human
ucaaccgaaaauaucucuu

SEQ ID NO: 512385 - RNA, 18 nt, Human
ucagagacaugccugcaa

SEQ ID NO: 512386 - RNA, 19 nt, Human
ucauucaaaucuucacgug

SEQ ID NO: 512387 - RNA, 21 nt, Human
ucauugaaaccaggguaacac

SEQ ID NO: 512388 - RNA, 18 nt, Human
ucccggcaugugcugcac

SEQ ID NO: 512389 - RNA, 22 nt, Human
ucuccugccagcggcuccugac

SEQ ID NO: 512390 - RNA, 22 nt, Human
ucugaaauacaauccucagcca

SEQ ID NO: 512391 - RNA, 21 nt, Human
ugaaaccaggguaacaccuuu

SEQ ID NO: 512392 - RNA, 20 nt, Human
ugaaauacaauccucagcca

SEQ ID NO: 512393 - RNA, 18 nt, Human
ugacaugcugucuccugc

SEQ ID NO: 512394 - RNA, 24 nt, Human
ugacaugcugucuccugccagcgg

SEQ ID NO: 512395 - RNA, 19 nt, Human
ugagaggagcagggcuaag

SEQ ID NO: 512396 - RNA, 22 nt, Human
ugaggaauuuuguagcuaccca

SEQ ID NO: 512397 - RNA, 21 nt, Human
ugcugcacaguuaugugaacg

SEQ ID NO: 512398 - RNA, 21 nt, Human
ugucaagagcaguuggugguu

SEQ ID NO: 512399 - RNA, 21 nt, Human
aacugguaccccacaggaccc

SEQ ID NO: 512400 - RNA, 23 nt, Human
aagccccccuucgagcuguggcc

SEQ ID NO: 512401 - RNA, 22 nt, Human
aagggccaggaccugaggggca

SEQ ID NO: 512402 - RNA, 23 nt, Human
acuggaccaaggagccgguugug

SEQ ID NO: 512403 - RNA, 21 nt, Human
agccggccggccgccggccuc

SEQ ID NO: 512404 - RNA, 19 nt, Human
agcuggucccgugagaccc

SEQ ID NO: 512405 - RNA, 21 nt, Human
agggaagaaauaaggccaccu

SEQ ID NO: 512406 - RNA, 22 nt, Human
agggaccuaggacaugcgaggg

SEQ ID NO: 512407 - RNA, 20 nt, Human
agggaguggggagggguggg

SEQ ID NO: 512408 - RNA, 24 nt, Human
agugcccagccacugcugggaggg

SEQ ID NO: 512409 - RNA, 21 nt, Human
cacugcugggaggggguugca

SEQ ID NO: 512410 - RNA, 20 nt, Human
cagaagccccagagcaucac

SEQ ID NO: 512411 - RNA, 24 nt, Human
cagagcaucacaagucuuuguaaa

SEQ ID NO: 512412 - RNA, 22 nt, Human
cagcaggcaccagggcccagau

SEQ ID NO: 512413 - RNA, 19 nt, Human
cagccggccggccgccggc

SEQ ID NO: 512414 - RNA, 22 nt, Human
caggcaccagggcccagauuuc

SEQ ID NO: 512415 - RNA, 25 nt, Human
ccacccaggacaauaaggguugugg

SEQ ID NO: 512416 - RNA, 18 nt, Human
ccauaggggaccagcuuc

SEQ ID NO: 512417 - RNA, 18 nt, Human
ccaucgccuccaccuacg

SEQ ID NO: 512418 - RNA, 23 nt, Human
ccaugaccaggaaaggguggggc

SEQ ID NO: 512419 - RNA, 20 nt, Human
cccaggacaauaaggguugu

SEQ ID NO: 512420 - RNA, 23 nt, Human
ccccaccccggugcagaacugga

SEQ ID NO: 512421 - RNA, 24 nt, Human
ccccagggaagggggagaagacua

SEQ ID NO: 512422 - RNA, 22 nt, Human
cccccacccaccaucacuggcc

SEQ ID NO: 512423 - RNA, 21 nt, Human
ccccgggucccagccccaccc

SEQ ID NO: 512424 - RNA, 18 nt, Human
cccggugcagaacuggac

SEQ ID NO: 512425 - RNA, 19 nt, Human
ccgcgcucucuccgcgggc

SEQ ID NO: 512426 - RNA, 21 nt, Human
ccugaggggcagagagagcuc

SEQ ID NO: 512427 - RNA, 21 nt, Human
cgccggccucccgcgccgcgc

SEQ ID NO: 512428 - RNA, 23 nt, Human
cgggagagaggugguacugaaaa

SEQ ID NO: 512429 - RNA, 26 nt, Human
cggggaaggcccagcccccacccacc

SEQ ID NO: 512430 - RNA, 23 nt, Human
cggugcagaacuggaccaaggag

SEQ ID NO: 512431 - RNA, 18 nt, Human
cgugacccaucgccucca

SEQ ID NO: 512432 - RNA, 22 nt, Human
cuacugaggaucuaaaagacca

SEQ ID NO: 512433 - RNA, 23 nt, Human
cucccgcgccgcgcucucuccgc

SEQ ID NO: 512434 - RNA, 18 nt, Human
cugaaaacacugaccgca

SEQ ID NO: 512435 - RNA, 22 nt, Human
cugggucacuaucacuuggggu

SEQ ID NO: 512436 - RNA, 19 nt, Human
gaagccccagagcaucaca

SEQ ID NO: 512437 - RNA, 22 nt, Human
gaccaggaaaggguggggcuug

SEQ ID NO: 512438 - RNA, 22 nt, Human
gaccuaggacaugcgaggguca

SEQ ID NO: 512439 - RNA, 22 nt, Human
gacugaaaccuggaccccuagc

SEQ ID NO: 512440 - RNA, 24 nt, Human
gaggggugggccuguggcugcagg

SEQ ID NO: 512441 - RNA, 22 nt, Human
gccccagagcaucacaagucuu

SEQ ID NO: 512442 - RNA, 27 nt, Human
gcccucaaaccuuccccgggucccagc

SEQ ID NO: 512443 - RNA, 21 nt, Human
ggaaggacaggucacaacagg

SEQ ID NO: 512444 - RNA, 22 nt, Human
ggagccgguugugcuuaacaug

SEQ ID NO: 512445 - RNA, 20 nt, Human
ggaguggggaggggugggcc

SEQ ID NO: 512446 - RNA, 18 nt, Human
ggaucuaaaagaccacug

SEQ ID NO: 512447 - RNA, 24 nt, Human
ggcccagcccccacccaccaucac

SEQ ID NO: 512448 - RNA, 23 nt, Human
ggcugggucaggccaagaugaau

SEQ ID NO: 512449 - RNA, 22 nt, Human
gggaagggggagaagacuaagu

SEQ ID NO: 512450 - RNA, 26 nt, Human
gggccaggaccugaggggcagagaga

SEQ ID NO: 512451 - RNA, 19 nt, Human
gggcuuggccacagaagcc

SEQ ID NO: 512452 - RNA, 22 nt, Human
gggcuuggccacagaagcccca

SEQ ID NO: 512453 - RNA, 23 nt, Human
gucacuaucacuuagccuuugga

SEQ ID NO: 512454 - RNA, 26 nt, Human
uaaauaaauaaguaaauagccaagug

SEQ ID NO: 512455 - RNA, 18 nt, Human
uaaauagccaagugggca

SEQ ID NO: 512456 - RNA, 18 nt, Human
uaacacucccacgcgcac

SEQ ID NO: 512457 - RNA, 18 nt, Human
uaccccacaggacccaac

SEQ ID NO: 512458 - RNA, 19 nt, Human
uacgggaucagggaguggg

SEQ ID NO: 512459 - RNA, 22 nt, Human
uaggaaccuaaacugguacccc

SEQ ID NO: 512460 - RNA, 18 nt, Human
uaucacuugggguccuga

SEQ ID NO: 512461 - RNA, 20 nt, Human
ucaaggaggggaggugacag

SEQ ID NO: 512462 - RNA, 21 nt, Human
ucaggccaagaugaauccaua

SEQ ID NO: 512463 - RNA, 21 nt, Human
ucagggaguggggaggggugg

SEQ ID NO: 512464 - RNA, 19 nt, Human
uccauaggggaccagcuuc

SEQ ID NO: 512465 - RNA, 20 nt, Human
ucccagccccaccccggugc

SEQ ID NO: 512466 - RNA, 22 nt, Human
ucccagccccaccccggugcag

SEQ ID NO: 512467 - RNA, 21 nt, Human
ucccgcgccgcgcucucuccg

SEQ ID NO: 512468 - RNA, 23 nt, Human
ucuacugaggaucuaaaagacca

SEQ ID NO: 512469 - RNA, 24 nt, Human
ucucucaggcuucuggacuguucu

SEQ ID NO: 512470 - RNA, 20 nt, Human
ugaauccauaggggaccagc

SEQ ID NO: 512471 - RNA, 19 nt, Human
ugacugaaaccuggacccc

SEQ ID NO: 512472 - RNA, 28 nt, Human
ugaggggcagagagagcucuccccgagg

SEQ ID NO: 512473 - RNA, 18 nt, Human
ugcugggaggggguugca

SEQ ID NO: 512474 - RNA, 24 nt, Human
uggaccaaggagccgguugugcuu

SEQ ID NO: 512475 - RNA, 22 nt, Human
uggccacagaagccccagagca

SEQ ID NO: 512476 - RNA, 18 nt, Human
uggcugcaggugcagugg

SEQ ID NO: 512477 - RNA, 20 nt, Human
uggcugcaggugcagugggg

SEQ ID NO: 512478 - RNA, 18 nt, Human
ugggaggggguugcaagg

SEQ ID NO: 512479 - RNA, 20 nt, Human
ugggaggggguugcaagggc

SEQ ID NO: 512480 - RNA, 24 nt, Human
ugggaggggguugcaagggcccuc

SEQ ID NO: 512481 - RNA, 21 nt, Human
ugggguccugauggguccacc

SEQ ID NO: 512482 - RNA, 19 nt, Human
uucccuagaccucugguug

SEQ ID NO: 512483 - RNA, 20 nt, Human
uucccuagaccucugguuga

SEQ ID NO: 512484 - RNA, 19 nt, Human
uuucaaggaggggagguga

SEQ ID NO: 512485 - RNA, 18 nt, Human
aaagaugacaagaaauua

SEQ ID NO: 512486 - RNA, 19 nt, Human
aaagugcuggaauuacagg

SEQ ID NO: 512487 - RNA, 24 nt, Human
aaagugcuggaauuacagguguga

SEQ ID NO: 512488 - RNA, 24 nt, Human
aacccgucccucuccagcugagcc

SEQ ID NO: 512489 - RNA, 24 nt, Human
aacgauucuccugccucagccucc

SEQ ID NO: 512490 - RNA, 20 nt, Human
aaggcaugguggggaaaaca

SEQ ID NO: 512491 - RNA, 24 nt, Human
aagggguuucaccauguuggccag

SEQ ID NO: 512492 - RNA, 26 nt, Human
aagugcuggaauuacaggugugagcc

SEQ ID NO: 512493 - RNA, 19 nt, Human
aaugauccacccaccucag

SEQ ID NO: 512494 - RNA, 18 nt, Human
aauuacaggugugagcca

SEQ ID NO: 512495 - RNA, 21 nt, Human
aauuacaggugugagccacca

SEQ ID NO: 512496 - RNA, 21 nt, Human
acaugggcaccuggcuguggc

SEQ ID NO: 512497 - RNA, 22 nt, Human
accauguuggccaggcuggucu

SEQ ID NO: 512498 - RNA, 23 nt, Human
accucagccucccaaagugcugg

SEQ ID NO: 512499 - RNA, 19 nt, Human
acugaaaucccccaggaag

SEQ ID NO: 512500 - RNA, 25 nt, Human
acuuuguugcccaggcuggagugca

SEQ ID NO: 512501 - RNA, 21 nt, Human
agacugaaaucccccaggaag

SEQ ID NO: 512502 - RNA, 22 nt, Human
agccugucagagaccagcccag

SEQ ID NO: 512503 - RNA, 19 nt, Human
aggcaaguuaucaauaaga

SEQ ID NO: 512504 - RNA, 21 nt, Human
aggcaugugccaccacgccca

SEQ ID NO: 512505 - RNA, 24 nt, Human
agggguuucaccauguuggccagg

SEQ ID NO: 512506 - RNA, 18 nt, Human
aggugugagccaccaagc

SEQ ID NO: 512507 - RNA, 23 nt, Human
aguagcugggaucauaggcaugu

SEQ ID NO: 512508 - RNA, 23 nt, Human
agugcaguggugcagucuuggcu

SEQ ID NO: 512509 - RNA, 24 nt, Human
agugcaguggugcagucuuggcuc

SEQ ID NO: 512510 - RNA, 24 nt, Human
augauccacccaccucagccuccc

SEQ ID NO: 512511 - RNA, 18 nt, Human
augugccaccacgcccag

SEQ ID NO: 512512 - RNA, 24 nt, Human
auuccuggccucaaaugauccacc

SEQ ID NO: 512513 - RNA, 24 nt, Human
caaaaggacagugcgucccaaccc

SEQ ID NO: 512514 - RNA, 22 nt, Human
caaaaguccggcuccaaaacua

SEQ ID NO: 512515 - RNA, 24 nt, Human
caaagugcuggaauuacaggugug

SEQ ID NO: 512516 - RNA, 19 nt, Human
caaaugauccacccaccuc

SEQ ID NO: 512517 - RNA, 21 nt, Human
caccauguuggccaggcuggu

SEQ ID NO: 512518 - RNA, 22 nt, Human
caccauguuggccaggcugguc

SEQ ID NO: 512519 - RNA, 23 nt, Human
caccauguuggccaggcuggucu

SEQ ID NO: 512520 - RNA, 24 nt, Human
caccauguuggccaggcuggucuu

SEQ ID NO: 512521 - RNA, 22 nt, Human
cacccaccucagccucccaaag

SEQ ID NO: 512522 - RNA, 23 nt, Human
cacccaccucagccucccaaagu

SEQ ID NO: 512523 - RNA, 22 nt, Human
cacuuuguugcccaggcuggag

SEQ ID NO: 512524 - RNA, 24 nt, Human
cacuuuguugcccaggcuggagug

SEQ ID NO: 512525 - RNA, 24 nt, Human
cagagucucacuuuguugcccagg

SEQ ID NO: 512526 - RNA, 19 nt, Human
cagcccagcucugaaauca

SEQ ID NO: 512527 - RNA, 24 nt, Human
caguagagaagggguuucaccaug

SEQ ID NO: 512528 - RNA, 25 nt, Human
caguagcugggaucauaggcaugug

SEQ ID NO: 512529 - RNA, 23 nt, Human
cagugcgucccaacccgucccuc

SEQ ID NO: 512530 - RNA, 27 nt, Human
caucuacuaccauauucuuuguucuuc

SEQ ID NO: 512531 - RNA, 21 nt, Human
caugugccaccacgcccagcu

SEQ ID NO: 512532 - RNA, 24 nt, Human
cauguuggccaggcuggucuugaa

SEQ ID NO: 512533 - RNA, 23 nt, Human
cauuccggauucacgaaucauuc

SEQ ID NO: 512534 - RNA, 21 nt, Human
ccaaagugcuggaauuacagg

SEQ ID NO: 512535 - RNA, 24 nt, Human
ccaaagugcuggaauuacaggugu

SEQ ID NO: 512536 - RNA, 26 nt, Human
ccacccaccucagccucccaaagugc

SEQ ID NO: 512537 - RNA, 19 nt, Human
ccacgcccagcuaauuauu

SEQ ID NO: 512538 - RNA, 19 nt, Human
cccaggcuggagugcagug

SEQ ID NO: 512539 - RNA, 22 nt, Human
ccucagacgcggggcgggcccu

SEQ ID NO: 512540 - RNA, 24 nt, Human
ccugccucagccuccccaguagcu

SEQ ID NO: 512541 - RNA, 24 nt, Human
ccuggccucaaaugauccacccac

SEQ ID NO: 512542 - RNA, 21 nt, Human
cgaaucauucuucaaaagucc

SEQ ID NO: 512543 - RNA, 18 nt, Human
cgauucuccugccucagc

SEQ ID NO: 512544 - RNA, 24 nt, Human
cucaaaugauccacccaccucagc

SEQ ID NO: 512545 - RNA, 24 nt, Human
cucacuuuguugcccaggcuggag

SEQ ID NO: 512546 - RNA, 24 nt, Human
cucagccuccccaguagcugggau

SEQ ID NO: 512547 - RNA, 18 nt, Human
cugagccugucagagacc

SEQ ID NO: 512548 - RNA, 19 nt, Human
cuuggcuuccaucuuggca

SEQ ID NO: 512549 - RNA, 19 nt, Human
gaagggguuucaccauguu

SEQ ID NO: 512550 - RNA, 22 nt, Human
gaagggguuucaccauguuggc

SEQ ID NO: 512551 - RNA, 19 nt, Human
gaccuccgcucccucagac

SEQ ID NO: 512552 - RNA, 18 nt, Human
gagaaaagggaauucggc

SEQ ID NO: 512553 - RNA, 19 nt, Human
gcccaggcuggagugcagu

SEQ ID NO: 512554 - RNA, 21 nt, Human
ggaaaacagaugcagagauag

SEQ ID NO: 512555 - RNA, 23 nt, Human
ggcaacuccaaaggcaugguggg

SEQ ID NO: 512556 - RNA, 24 nt, Human
ggccucaaaugauccacccaccuc

SEQ ID NO: 512557 - RNA, 18 nt, Human
gggguuucaccauguugg

SEQ ID NO: 512558 - RNA, 22 nt, Human
gggguuucaccauguuggccag

SEQ ID NO: 512559 - RNA, 23 nt, Human
gggguuucaccauguuggccagg

SEQ ID NO: 512560 - RNA, 20 nt, Human
ggguuaaaacgauucuccug

SEQ ID NO: 512561 - RNA, 20 nt, Human
gucccucuccagcugagccu

SEQ ID NO: 512562 - RNA, 24 nt, Human
gucucacuuuguugcccaggcugg

SEQ ID NO: 512563 - RNA, 22 nt, Human
uaaaaugccgugaugacgcugu

SEQ ID NO: 512564 - RNA, 24 nt, Human
uaauuauuguauuuucaguagaga

SEQ ID NO: 512565 - RNA, 24 nt, Human
uacaggugugagccaccaagccca

SEQ ID NO: 512566 - RNA, 21 nt, Human
uagagaagggguuucaccaug

SEQ ID NO: 512567 - RNA, 22 nt, Human
uagagaagggguuucaccaugu

SEQ ID NO: 512568 - RNA, 21 nt, Human
uauuucuccugcagucucuuu

SEQ ID NO: 512569 - RNA, 20 nt, Human
ucaaaugauccacccaccuc

SEQ ID NO: 512570 - RNA, 21 nt, Human
ucacugcagccugucuucugg

SEQ ID NO: 512571 - RNA, 22 nt, Human
ucacugcagccugucuucuggg

SEQ ID NO: 512572 - RNA, 22 nt, Human
ucacugcagccugucuucuggg

SEQ ID NO: 512573 - RNA, 24 nt, Human
ucacuuuguugcccaggcuggagu

SEQ ID NO: 512574 - RNA, 18 nt, Human
ucagccucccaaagugcu

SEQ ID NO: 512575 - RNA, 18 nt, Human
ucagccuccccaguagcu

SEQ ID NO: 512576 - RNA, 20 nt, Human
ucagccuccccaguagcugg

SEQ ID NO: 512577 - RNA, 24 nt, Human
ucaguagagaagggguuucaccau

SEQ ID NO: 512578 - RNA, 21 nt, Human
uccacccaccucagccuccca

SEQ ID NO: 512579 - RNA, 23 nt, Human
ucccaaagugcuggaauuacagg

SEQ ID NO: 512580 - RNA, 19 nt, Human
ucccaacccgucccucucc

SEQ ID NO: 512581 - RNA, 22 nt, Human
ucccaacccgucccucuccagc

SEQ ID NO: 512582 - RNA, 18 nt, Human
ucccccaggaagaccucc

SEQ ID NO: 512583 - RNA, 25 nt, Human
ucccccaggaagaccuccgcucccu

SEQ ID NO: 512584 - RNA, 19 nt, Human
ucccucuccagcugagccu

SEQ ID NO: 512585 - RNA, 23 nt, Human
ucucacuuuguugcccaggcugg

SEQ ID NO: 512586 - RNA, 24 nt, Human
ucucacuuuguugcccaggcugga

SEQ ID NO: 512587 - RNA, 25 nt, Human
ucuccugccucagccuccccaguag

SEQ ID NO: 512588 - RNA, 24 nt, Human
ucuucuggguuaaaacgauucucc

SEQ ID NO: 512589 - RNA, 23 nt, Human
ugaaaucccccaggaagaccucc

SEQ ID NO: 512590 - RNA, 24 nt, Human
ugauccacccaccucagccuccca

SEQ ID NO: 512591 - RNA, 22 nt, Human
ugcaguggugcagucuuggcuc

SEQ ID NO: 512592 - RNA, 18 nt, Human
ugcccaggcuggagugca

SEQ ID NO: 512593 - RNA, 21 nt, Human
ugcccaggcuggagugcagug

SEQ ID NO: 512594 - RNA, 24 nt, Human
ugcccaggcuggagugcaguggug

SEQ ID NO: 512595 - RNA, 21 nt, Human
ugccucagccuccccaguagc

SEQ ID NO: 512596 - RNA, 24 nt, Human
ugccucagccuccccaguagcugg

SEQ ID NO: 512597 - RNA, 24 nt, Human
ugcuggaauuacaggugugagcca

SEQ ID NO: 512598 - RNA, 18 nt, Human
uggaauuacaggugugag

SEQ ID NO: 512599 - RNA, 19 nt, Human
uggaauuacaggugugagc

SEQ ID NO: 512600 - RNA, 22 nt, Human
uggaauuacaggugugagccac

SEQ ID NO: 512601 - RNA, 24 nt, Human
uggaauuacaggugugagccacca

SEQ ID NO: 512602 - RNA, 28 nt, Human
uggagugcaguggugcaguccuagcacg

SEQ ID NO: 512603 - RNA, 23 nt, Human
uggagugcaguggugcagucuug

SEQ ID NO: 512604 - RNA, 24 nt, Human
uggagugcaguggugcagucuugg

SEQ ID NO: 512605 - RNA, 24 nt, Human
uggccaggcuggucuugaauuccu

SEQ ID NO: 512606 - RNA, 22 nt, Human
uggccucaaaugauccacccac

SEQ ID NO: 512607 - RNA, 18 nt, Human
ugggaucauaggcaugug

SEQ ID NO: 512608 - RNA, 21 nt, Human
ugggaucauaggcaugugcca

SEQ ID NO: 512609 - RNA, 22 nt, Human
ugggaucauaggcaugugccac

SEQ ID NO: 512610 - RNA, 24 nt, Human
ugggaucauaggcaugugccacca

SEQ ID NO: 512611 - RNA, 24 nt, Human
uggugcagucuuggcucacugcag

SEQ ID NO: 512612 - RNA, 21 nt, Human
uguugcccaggcuggagugca

SEQ ID NO: 512613 - RNA, 27 nt, Human
uuccuggccucaaaugauccacccacc

SEQ ID NO: 512614 - RNA, 24 nt, Human
uucuggguuaaaacgauucuccug

SEQ ID NO: 512615 - RNA, 24 nt, Human
uugcccaggcuggagugcaguggu

SEQ ID NO: 512616 - RNA, 24 nt, Human
uuucaccauguuggccaggcuggu

SEQ ID NO: 512617 - RNA, 24 nt, Human
uuuucaguagagaagggguuucac

SEQ ID NO: 512618 - RNA, 26 nt, Human
uuuuuauuuuuugaggcagagucuca

SEQ ID NO: 512619 - RNA, 25 nt, Human
uuuuuuauuuuuugaggcagagucu

SEQ ID NO: 512620 - RNA, 18 nt, Human
aaguuuauuuacaguagg

SEQ ID NO: 512621 - RNA, 22 nt, Human
acagauugugccauccaaaccc

SEQ ID NO: 512622 - RNA, 26 nt, Human
agaaauuaauaaaaagucagaaaucc

SEQ ID NO: 512623 - RNA, 20 nt, Human
aggaacaaucuggucaggug

SEQ ID NO: 512624 - RNA, 22 nt, Human
cagauggagcaagacagcagau

SEQ ID NO: 512625 - RNA, 21 nt, Human
cagcagauggguaaagcacac

SEQ ID NO: 512626 - RNA, 23 nt, Human
ccacaagcacaugaauuguaccu

SEQ ID NO: 512627 - RNA, 27 nt, Human
ccuccaagcaccuguugcgcuuggcuu

SEQ ID NO: 512628 - RNA, 18 nt, Human
cuuggcucuggucucaga

SEQ ID NO: 512629 - RNA, 19 nt, Human
gcugcuccuagucccaggc

SEQ ID NO: 512630 - RNA, 19 nt, Human
guacccaaaccuucugagu

SEQ ID NO: 512631 - RNA, 22 nt, Human
uaaagcacacgcuuucaaucca

SEQ ID NO: 512632 - RNA, 24 nt, Human
ucccaggcuccaacucaagccacu

SEQ ID NO: 512633 - RNA, 22 nt, Human
uccuaagucaguuggaaaaccc

SEQ ID NO: 512634 - RNA, 22 nt, Human
uccuagucccaggcuccaacuc

SEQ ID NO: 512635 - RNA, 20 nt, Human
ucuggucaggugaaguuuau

SEQ ID NO: 512636 - RNA, 22 nt, Human
ugaccuccaagcaccuguugcg

SEQ ID NO: 512637 - RNA, 23 nt, Human
uggaauagaugccuggaucuguc

SEQ ID NO: 512638 - RNA, 18 nt, Human
uuggugccaagucugcuu

SEQ ID NO: 512639 - RNA, 23 nt, Human
uuggugccaagucugcuuuccuu

SEQ ID NO: 512640 - RNA, 27 nt, Human
uuuuucgcugaguugcuugcuucugau

SEQ ID NO: 512641 - RNA, 26 nt, Human
aaaaaucuggaagaauuuacuaagug

SEQ ID NO: 512642 - RNA, 20 nt, Human
aaaagaaagaugucagauaa

SEQ ID NO: 512643 - RNA, 19 nt, Human
aaacaaauagaaaaaucug

SEQ ID NO: 512644 - RNA, 21 nt, Human
aauacugacauugccucaugc

SEQ ID NO: 512645 - RNA, 21 nt, Human
acaaaacccaugccauccaaa

SEQ ID NO: 512646 - RNA, 20 nt, Human
accaaaaucugguuuacauu

SEQ ID NO: 512647 - RNA, 26 nt, Human
acuuuaaggaagugucaaacaaauag

SEQ ID NO: 512648 - RNA, 24 nt, Human
agagcugauguguuuuuuaaauaa

SEQ ID NO: 512649 - RNA, 20 nt, Human
agaguccuucuagcccccuc

SEQ ID NO: 512650 - RNA, 19 nt, Human
agcaauguguauuccuuac

SEQ ID NO: 512651 - RNA, 20 nt, Human
agcagcaagaaguauuccaa

SEQ ID NO: 512652 - RNA, 23 nt, Human
aucguaauaaaagaauuuauguc

SEQ ID NO: 512653 - RNA, 22 nt, Human
caaaaaaguuuggcuggggcag

SEQ ID NO: 512654 - RNA, 18 nt, Human
caaaaauauucacaagug

SEQ ID NO: 512655 - RNA, 26 nt, Human
caauguacucuucuaggcugaauuaa

SEQ ID NO: 512656 - RNA, 20 nt, Human
cacuuccugcccaacaaaau

SEQ ID NO: 512657 - RNA, 21 nt, Human
cagaguccuucuagcccccuc

SEQ ID NO: 512658 - RNA, 19 nt, Human
ccaaauggcauagaaucaa

SEQ ID NO: 512659 - RNA, 18 nt, Human
cucacaaaaauauucaca

SEQ ID NO: 512660 - RNA, 18 nt, Human
gggacacaugaccugaaa

SEQ ID NO: 512661 - RNA, 21 nt, Human
uacugacauugccucaugcac

SEQ ID NO: 512662 - RNA, 19 nt, Human
uaucaugccaaauaccacu

SEQ ID NO: 512663 - RNA, 19 nt, Human
uaugacugaaaaaaugacu

SEQ ID NO: 512664 - RNA, 18 nt, Human
ucacaagugggaguuuuc

SEQ ID NO: 512665 - RNA, 21 nt, Human
ucagaguccuucuagcccccu

SEQ ID NO: 512666 - RNA, 19 nt, Human
ucgcgguuuuccaccagga

SEQ ID NO: 512667 - RNA, 20 nt, Human
ugaaaagaaagaugucagau

SEQ ID NO: 512668 - RNA, 20 nt, Human
ugagacagagcugauguguu

SEQ ID NO: 512669 - RNA, 18 nt, Human
uguaucaguccuucuucu

SEQ ID NO: 512670 - RNA, 20 nt, Human
uuuguaucaguccuucuucu

SEQ ID NO: 512671 - RNA, 19 nt, Human
aaccaagacaauauuuaca

SEQ ID NO: 512672 - RNA, 19 nt, Human
aaccuccaccuccuacguc

SEQ ID NO: 512673 - RNA, 23 nt, Human
aaguaccccugaauggcucaaag

SEQ ID NO: 512674 - RNA, 24 nt, Human
aaugcacaaguaccccugaauggc

SEQ ID NO: 512675 - RNA, 23 nt, Human
accugcggcuuuagccugcgcuu

SEQ ID NO: 512676 - RNA, 23 nt, Human
agaaaggcucaacagacgccuuc

SEQ ID NO: 512677 - RNA, 23 nt, Human
agagaaaccuaaaauguuaauau

SEQ ID NO: 512678 - RNA, 20 nt, Human
caccugcggcuuuagccugc

SEQ ID NO: 512679 - RNA, 23 nt, Human
ccacaaccuccaccuccuacguc

SEQ ID NO: 512680 - RNA, 26 nt, Human
cccgcaagccucaacucaggacuucg

SEQ ID NO: 512681 - RNA, 21 nt, Human
cgacgccucccucacgacuga

SEQ ID NO: 512682 - RNA, 22 nt, Human
cguaagacgaaguggggcuuuu

SEQ ID NO: 512683 - RNA, 24 nt, Human
cucaacagacgccuuccuuucgga

SEQ ID NO: 512684 - RNA, 22 nt, Human
ggaaaggaucccgcaagccuca

SEQ ID NO: 512685 - RNA, 20 nt, Human
uaaugcuagaaacacuaacu

SEQ ID NO: 512686 - RNA, 18 nt, Human
uauuuacaacuauauaca

SEQ ID NO: 512687 - RNA, 18 nt, Human
ucaacagacgccuuccuu

SEQ ID NO: 512688 - RNA, 24 nt, Human
ucaccugcggcuuuagccugcgcu

SEQ ID NO: 512689 - RNA, 19 nt, Human
uccacaaccuccaccuccu

SEQ ID NO: 512690 - RNA, 20 nt, Human
uuacaucuuuuuguguuggu

SEQ ID NO: 512691 - RNA, 22 nt, Human
uucauuuuuacauaaccaagac

SEQ ID NO: 512692 - RNA, 21 nt, Human
uuuaagaaugaaaacaagaaa

SEQ ID NO: 512693 - RNA, 21 nt, Human
uuuuuuuuuuuuuuuuuuaag

SEQ ID NO: 512694 - RNA, 20 nt, Human
aaaaacuuaaaaaaaagucu

SEQ ID NO: 512695 - RNA, 22 nt, Human
aaaagaucaguuacuaugaaaa

SEQ ID NO: 512696 - RNA, 21 nt, Human
aaacaccauggcaaccauuua

SEQ ID NO: 512697 - RNA, 18 nt, Human
aaacagaugccuaccuuc

SEQ ID NO: 512698 - RNA, 21 nt, Human
aaacuccaaagcauuuuggca

SEQ ID NO: 512699 - RNA, 26 nt, Human
aaauagagauaaaaggcaguccacag

SEQ ID NO: 512700 - RNA, 21 nt, Human
aaauccuuagacaaaagauca

SEQ ID NO: 512701 - RNA, 25 nt, Human
aacaagaauagccuccacacaucau

SEQ ID NO: 512702 - RNA, 22 nt, Human
aagcauacaugaccccuagcaa

SEQ ID NO: 512703 - RNA, 22 nt, Human
aagcauuuuggcaaucucggca

SEQ ID NO: 512704 - RNA, 22 nt, Human
aaucuauuuuggacuuuucuua

SEQ ID NO: 512705 - RNA, 20 nt, Human
aauuauuugaaaucauucaa

SEQ ID NO: 512706 - RNA, 22 nt, Human
acacaauguacagacaugaucc

SEQ ID NO: 512707 - RNA, 20 nt, Human
acacacgugcacacacagga

SEQ ID NO: 512708 - RNA, 30 nt, Human
acacaugugcacuugcacacacgugcacag

SEQ ID NO: 512709 - RNA, 19 nt, Human
accccuagcaaucaaagug

SEQ ID NO: 512710 - RNA, 22 nt, Human
acugaaucccccuugcugcagu

SEQ ID NO: 512711 - RNA, 20 nt, Human
agaaacaccauggcaaccau

SEQ ID NO: 512712 - RNA, 21 nt, Human
agaagaggcuauaaagaaaug

SEQ ID NO: 512713 - RNA, 18 nt, Human
agacccuaggauaagcau

SEQ ID NO: 512714 - RNA, 19 nt, Human
aggcagggaggggcuugga

SEQ ID NO: 512715 - RNA, 22 nt, Human
agguaaaaauccuuagacaaaa

SEQ ID NO: 512716 - RNA, 21 nt, Human
auaaaaggcaguccacauuca

SEQ ID NO: 512717 - RNA, 20 nt, Human
augaaaauaacaguuaaaac

SEQ ID NO: 512718 - RNA, 21 nt, Human
caacagguauagauauaaaaa

SEQ ID NO: 512719 - RNA, 26 nt, Human
caagacagauuuacuucagaagucaa

SEQ ID NO: 512720 - RNA, 21 nt, Human
cacauucauauuuucaagaca

SEQ ID NO: 512721 - RNA, 25 nt, Human
cacugaaucccccuugcugcaguuu

SEQ ID NO: 512722 - RNA, 24 nt, Human
cacuugcacacacgugcacacaca

SEQ ID NO: 512723 - RNA, 23 nt, Human
cauacaugaccccuagcaaucaa

SEQ ID NO: 512724 - RNA, 24 nt, Human
cauuuuggcaaucucggcaacacc

SEQ ID NO: 512725 - RNA, 23 nt, Human
cccuuaguacuuuaugcuuuguu

SEQ ID NO: 512726 - RNA, 21 nt, Human
ccuaggugucacucagaagca

SEQ ID NO: 512727 - RNA, 23 nt, Human
ccuccacacaucauuuuuacaaa

SEQ ID NO: 512728 - RNA, 18 nt, Human
cggaaagcagcugcgacu

SEQ ID NO: 512729 - RNA, 23 nt, Human
cggcaacaccggcuuccucggaa

SEQ ID NO: 512730 - RNA, 22 nt, Human
cuacacauuaaugguaaaacac

SEQ ID NO: 512731 - RNA, 21 nt, Human
cucuaggcugcacugccugcu

SEQ ID NO: 512732 - RNA, 20 nt, Human
cuuagaccaaagagagaggu

SEQ ID NO: 512733 - RNA, 18 nt, Human
cuucgaagcauacaugac

SEQ ID NO: 512734 - RNA, 20 nt, Human
cuuuucauucauuacacaau

SEQ ID NO: 512735 - RNA, 22 nt, Human
gaaaauaacaguuaaaacugca

SEQ ID NO: 512736 - RNA, 19 nt, Human
gaguuucuuacacuuggcu

SEQ ID NO: 512737 - RNA, 25 nt, Human
gauggagaaacaagaauagccucca

SEQ ID NO: 512738 - RNA, 18 nt, Human
gauuacauuuaugugcuu

SEQ ID NO: 512739 - RNA, 18 nt, Human
gcaaaaaccaaccucagg

SEQ ID NO: 512740 - RNA, 24 nt, Human
gcaaaaaccaaccucaggcauaca

SEQ ID NO: 512741 - RNA, 18 nt, Human
ggaggggcuuggaagaaa

SEQ ID NO: 512742 - RNA, 27 nt, Human
guaaaacacuuauuuuuagaaacacca

SEQ ID NO: 512743 - RNA, 20 nt, Human
uaaaaaaaaaccccuaugau

SEQ ID NO: 512744 - RNA, 24 nt, Human
uaaacagaugccuaccuuccuuua

SEQ ID NO: 512745 - RNA, 23 nt, Human
uaacauaauaacgcugauguuug

SEQ ID NO: 512746 - RNA, 23 nt, Human
uaaccagagguaaagccagggug

SEQ ID NO: 512747 - RNA, 26 nt, Human
uacacacacacaugugcacuugcaca

SEQ ID NO: 512748 - RNA, 22 nt, Human
uagacauagcuaucaagaguuu

SEQ ID NO: 512749 - RNA, 21 nt, Human
uaggugucacucagaagcauc

SEQ ID NO: 512750 - RNA, 23 nt, Human
uaugaaaauaacaguuaaaacug

SEQ ID NO: 512751 - RNA, 19 nt, Human
uauguccucucuucuguga

SEQ ID NO: 512752 - RNA, 25 nt, Human
uauuacacacacacaugugcacuug

SEQ ID NO: 512753 - RNA, 21 nt, Human
uccacauucauauuuucaaga

SEQ ID NO: 512754 - RNA, 20 nt, Human
ucggcaacaccggcuuccuc

SEQ ID NO: 512755 - RNA, 18 nt, Human
ucucuaggcugcacugcc

SEQ ID NO: 512756 - RNA, 21 nt, Human
ugacuuaggcuccucacaugg

SEQ ID NO: 512757 - RNA, 20 nt, Human
uggaagaaaagauaaaguga

SEQ ID NO: 512758 - RNA, 19 nt, Human
uggugucuggaccacaacc

SEQ ID NO: 512759 - RNA, 19 nt, Human
uguaaaauaauguucugca

SEQ ID NO: 512760 - RNA, 20 nt, Human
uguguuagagaucagaagag

SEQ ID NO: 512761 - RNA, 24 nt, Human
uguguuagagaucagaagaggcua

SEQ ID NO: 512762 - RNA, 28 nt, Human
uguguuauuacacacacacaugugcagg

SEQ ID NO: 512763 - RNA, 24 nt, Human
uuacacacacacaugugcacuugc

SEQ ID NO: 512764 - RNA, 21 nt, Human
uucaauaguuuguugcauguu

SEQ ID NO: 512765 - RNA, 25 nt, Human
uucgaagcauacaugaccccuagca

SEQ ID NO: 512766 - RNA, 20 nt, Human
uucuguucuuuacaaugugu

SEQ ID NO: 512767 - RNA, 24 nt, Human
uuuacuucagaagucaauugaaau

SEQ ID NO: 512768 - RNA, 22 nt, Human
aaaaaacagagacauuaaagga

SEQ ID NO: 512769 - RNA, 20 nt, Human
aaaaacaaaaacaaaacaga

SEQ ID NO: 512770 - RNA, 22 nt, Human
aaaaacagagacauuaaaggaa

SEQ ID NO: 512771 - RNA, 25 nt, Human
aaacaaaaacaaaacagaugguaga

SEQ ID NO: 512772 - RNA, 19 nt, Human
aaacagaugguagagccaa

SEQ ID NO: 512773 - RNA, 21 nt, Human
aaacagaugguagagccaaaa

SEQ ID NO: 512774 - RNA, 22 nt, Human
acagcccaauacaggaucaucc

SEQ ID NO: 512775 - RNA, 19 nt, Human
accucaggacaaagagaaa

SEQ ID NO: 512776 - RNA, 21 nt, Human
acgaaguuggaggaagcccuu

SEQ ID NO: 512777 - RNA, 22 nt, Human
agaauaaaaaauaaacagagga

SEQ ID NO: 512778 - RNA, 22 nt, Human
agacauuuauucacuucaacau

SEQ ID NO: 512779 - RNA, 22 nt, Human
aggaucauccaaaaacacguug

SEQ ID NO: 512780 - RNA, 18 nt, Human
caaaacagaugguagagc

SEQ ID NO: 512781 - RNA, 24 nt, Human
caaaacagaugguagagccaaaaa

SEQ ID NO: 512782 - RNA, 22 nt, Human
caagaauucuuccuuuugaaca

SEQ ID NO: 512783 - RNA, 26 nt, Human
caagauauagauaaaaacaaaaacaa

SEQ ID NO: 512784 - RNA, 22 nt, Human
caauuucacacgaaguuggagg

SEQ ID NO: 512785 - RNA, 21 nt, Human
cauccaaaaacacguugacac

SEQ ID NO: 512786 - RNA, 20 nt, Human
ccgaaaaaccucaggacaaa

SEQ ID NO: 512787 - RNA, 19 nt, Human
ccuccaaggaccacuggca

SEQ ID NO: 512788 - RNA, 19 nt, Human
cgaguuaauaacaacaucu

SEQ ID NO: 512789 - RNA, 22 nt, Human
cuccaaggaccacuggcacucu

SEQ ID NO: 512790 - RNA, 20 nt, Human
cuuggacucgaccuccaagg

SEQ ID NO: 512791 - RNA, 21 nt, Human
gaucauccaaaaacacguuga

SEQ ID NO: 512792 - RNA, 22 nt, Human
gcugaccugcucuagggaugaa

SEQ ID NO: 512793 - RNA, 20 nt, Human
ggacuccggcgccccagcuc

SEQ ID NO: 512794 - RNA, 22 nt, Human
ggcaagaauucuuccuuuugaa

SEQ ID NO: 512795 - RNA, 18 nt, Human
ggcuucaagccacguccu

SEQ ID NO: 512796 - RNA, 20 nt, Human
gggaaggaggcugaccugcu

SEQ ID NO: 512797 - RNA, 19 nt, Human
gugauguuuaaggccagga

SEQ ID NO: 512798 - RNA, 23 nt, Human
uaaaaaauaaacagaggaaauaa

SEQ ID NO: 512799 - RNA, 19 nt, Human
uaaguacagcccaauacag

SEQ ID NO: 512800 - RNA, 24 nt, Human
uaccaagauauagauaaaaacaaa

SEQ ID NO: 512801 - RNA, 23 nt, Human
uagaauaaaaaauaaacagagga

SEQ ID NO: 512802 - RNA, 25 nt, Human
uauagauaaaaacaaaaacaaaaca

SEQ ID NO: 512803 - RNA, 18 nt, Human
uauuucaaauauagcugc

SEQ ID NO: 512804 - RNA, 19 nt, Human
ucaggacaaagagaaagua

SEQ ID NO: 512805 - RNA, 18 nt, Human
ucauccaaaaacacguug

SEQ ID NO: 512806 - RNA, 18 nt, Human
uccuuggacucgaccucc

SEQ ID NO: 512807 - RNA, 23 nt, Human
ugacacuuccaagacacuggcac

SEQ ID NO: 512808 - RNA, 20 nt, Human
ugauguuuaaggccaggagc

SEQ ID NO: 512809 - RNA, 22 nt, Human
uguuuuguuuugcuuguuuuua

SEQ ID NO: 512810 - RNA, 22 nt, Human
uuaaggucagggagugcuagag

SEQ ID NO: 512811 - RNA, 19 nt, Human
uugaacaagaccgaaaaac

SEQ ID NO: 512812 - RNA, 19 nt, Human
uugaacaagaccgaaaaac

SEQ ID NO: 512813 - RNA, 22 nt, Human
uuuuguuuugcuuguuuuuaau

SEQ ID NO: 512814 - RNA, 23 nt, Human
aaaaaucaccacauuuauaagaa

SEQ ID NO: 512815 - RNA, 18 nt, Human
aacagcaccauuaagcca

SEQ ID NO: 512816 - RNA, 21 nt, Human
aagccagaaacuugcagggaa

SEQ ID NO: 512817 - RNA, 19 nt, Human
acugaucaugcugugcaug

SEQ ID NO: 512818 - RNA, 23 nt, Human
agcugcugcugguccgcucuggc

SEQ ID NO: 512819 - RNA, 27 nt, Human
aggcaccaaaaaucgcccuguauaaca

SEQ ID NO: 512820 - RNA, 18 nt, Human
aggcggcggccgcagcgc

SEQ ID NO: 512821 - RNA, 23 nt, Human
aggcggcggccgcagcgcuugag

SEQ ID NO: 512822 - RNA, 19 nt, Human
aucccugcuguaacucuga

SEQ ID NO: 512823 - RNA, 22 nt, Human
caucacccaucacaggcaagcc

SEQ ID NO: 512824 - RNA, 21 nt, Human
cauuaagccauuucaucuagc

SEQ ID NO: 512825 - RNA, 23 nt, Human
ccaaaaaucgcccuguauaacac

SEQ ID NO: 512826 - RNA, 18 nt, Human
ccaaucucaucuacugau

SEQ ID NO: 512827 - RNA, 18 nt, Human
ccaucacaggcaagccag

SEQ ID NO: 512828 - RNA, 22 nt, Human
cccaucacaggcaagccagaaa

SEQ ID NO: 512829 - RNA, 26 nt, Human
cccccaaucucaucuacugaucuuuu

SEQ ID NO: 512830 - RNA, 23 nt, Human
cccggcccggccgcccgcucggc

SEQ ID NO: 512831 - RNA, 23 nt, Human
ccucucuaaaagccucaucaccc

SEQ ID NO: 512832 - RNA, 23 nt, Human
cgccagcccggccgccggugcac

SEQ ID NO: 512833 - RNA, 21 nt, Human
cgcuugagcugcugcuggucc

SEQ ID NO: 512834 - RNA, 19 nt, Human
gcugcugguccgcucuggg

SEQ ID NO: 512835 - RNA, 19 nt, Human
ggcaagccagaaacuugca

SEQ ID NO: 512836 - RNA, 19 nt, Human
ggcccggccgcccgcucga

SEQ ID NO: 512837 - RNA, 19 nt, Human
uaacaccucucuaaaagcc

SEQ ID NO: 512838 - RNA, 22 nt, Human
uaacucccuaauuaacuggccg

SEQ ID NO: 512839 - RNA, 21 nt, Human
uagaagaagcagguaucuuug

SEQ ID NO: 512840 - RNA, 22 nt, Human
uagcucccugucuuuagucuuu

SEQ ID NO: 512841 - RNA, 18 nt, Human
ucaucuagcucccugucu

SEQ ID NO: 512842 - RNA, 20 nt, Human
ucaucugucacacaagacug

SEQ ID NO: 512843 - RNA, 19 nt, Human
ucuaaaagccucaucaccc

SEQ ID NO: 512844 - RNA, 21 nt, Human
ucucuaaaagccucaucaccc

SEQ ID NO: 512845 - RNA, 18 nt, Human
uguaucauauagaagaag

SEQ ID NO: 512846 - RNA, 22 nt, Human
uuauaagaagcucgcugaugcc

SEQ ID NO: 512847 - RNA, 21 nt, Human
uucaucuagcucccugucuuu

SEQ ID NO: 512848 - RNA, 19 nt, Human
uucaucugucacacaagac

SEQ ID NO: 512849 - RNA, 19 nt, Human
uuuacgcaaucugcucucc

SEQ ID NO: 512850 - RNA, 18 nt, Human
uuuuuuuuuuuuuugucc

SEQ ID NO: 512851 - RNA, 20 nt, Human
uuuuuuuuuuuuuuuguccu

SEQ ID NO: 512852 - RNA, 19 nt, Human
uuuuuuuuuuuuuuuuugu

SEQ ID NO: 512853 - RNA, 27 nt, Human
uuuuuuuuuuuuuuuuuuuuuuugggg

SEQ ID NO: 512854 - RNA, 21 nt, Human
aagagggaggagaagaggagg

SEQ ID NO: 512855 - RNA, 18 nt, Human
agaagugagggagggaga

SEQ ID NO: 512856 - RNA, 19 nt, Human
agaggaaggaggggggaga

SEQ ID NO: 512857 - RNA, 21 nt, Human
agaggaaggaggggggagauu

SEQ ID NO: 512858 - RNA, 20 nt, Human
agagggaggagaagaggagg

SEQ ID NO: 512859 - RNA, 22 nt, Human
aggaggaagggaaagggcagaa

SEQ ID NO: 512860 - RNA, 27 nt, Human
aggaggaagggaaagggcagaagugag

SEQ ID NO: 512861 - RNA, 18 nt, Human
aggaggaggaagggaaag

SEQ ID NO: 512862 - RNA, 26 nt, Human
aggaggggggagaugagggaagaggg

SEQ ID NO: 512863 - RNA, 19 nt, Human
aggcacucagggaagauaa

SEQ ID NO: 512864 - RNA, 19 nt, Human
aggcaggcagaugcagagg

SEQ ID NO: 512865 - RNA, 28 nt, Human
agggaggagaagaggaggaggaagggaa

SEQ ID NO: 512866 - RNA, 22 nt, Human
aggggggagaugagggaagagg

SEQ ID NO: 512867 - RNA, 18 nt, Human
augagggaagagggagga

SEQ ID NO: 512868 - RNA, 18 nt, Human
caggaucugugggcucag

SEQ ID NO: 512869 - RNA, 23 nt, Human
caggugguuccugagacagguga

SEQ ID NO: 512870 - RNA, 19 nt, Human
ccacugggaagggacccag

SEQ ID NO: 512871 - RNA, 18 nt, Human
ccaggcacucagggaaga

SEQ ID NO: 512872 - RNA, 18 nt, Human
ccccaggguagcccuccu

SEQ ID NO: 512873 - RNA, 20 nt, Human
ccugagcagcgagcuggccc

SEQ ID NO: 512874 - RNA, 21 nt, Human
cucccaaugugcagaguccac

SEQ ID NO: 512875 - RNA, 21 nt, Human
cucucaggccucccagugguc

SEQ ID NO: 512876 - RNA, 24 nt, Human
cugagcagcgagcuggcccacucu

SEQ ID NO: 512877 - RNA, 23 nt, Human
cugcccuggccgcugcccacagg

SEQ ID NO: 512878 - RNA, 21 nt, Human
gagcagucugcuccccgcugg

SEQ ID NO: 512879 - RNA, 28 nt, Human
gaggaggaagggaaagggcagaagugag

SEQ ID NO: 512880 - RNA, 21 nt, Human
gccucaguuuccccaguggcu

SEQ ID NO: 512881 - RNA, 21 nt, Human
gccugagcagcgagcuggccc

SEQ ID NO: 512882 - RNA, 21 nt, Human
ggaagagggaggagaagagga

SEQ ID NO: 512883 - RNA, 22 nt, Human
gggaagagggaggagaagagga

SEQ ID NO: 512884 - RNA, 22 nt, Human
gggaagagggaggagaagagga

SEQ ID NO: 512885 - RNA, 21 nt, Human
gggggagaugagggaagaggg

SEQ ID NO: 512886 - RNA, 22 nt, Human
ggguggggcagaggaaggaggg

SEQ ID NO: 512887 - RNA, 24 nt, Human
ggugaacucucagccccaggguag

SEQ ID NO: 512888 - RNA, 21 nt, Human
gguggggcagaggaaggaggg

SEQ ID NO: 512889 - RNA, 18 nt, Human
gguuuugccucaguuucc

SEQ ID NO: 512890 - RNA, 21 nt, Human
gugguuccugagacaggugaa

SEQ ID NO: 512891 - RNA, 19 nt, Human
uaaaacagcccagcuaagc

SEQ ID NO: 512892 - RNA, 23 nt, Human
ucagccccaggguagcccuccuc

SEQ ID NO: 512893 - RNA, 24 nt, Human
ugagggaagagggaggagaagagg

SEQ ID NO: 512894 - RNA, 18 nt, Human
ugagggagggagacccag

SEQ ID NO: 512895 - RNA, 21 nt, Human
ugcccuggccgcugcccacag

SEQ ID NO: 512896 - RNA, 22 nt, Human
ugccucaguuuccccaguggcu

SEQ ID NO: 512897 - RNA, 20 nt, Human
ugcuugugguugcaaguguu

SEQ ID NO: 512898 - RNA, 20 nt, Human
ugggaagggacccagggagc

SEQ ID NO: 512899 - RNA, 24 nt, Human
ugggaagggacccagggagcggcg

SEQ ID NO: 512900 - RNA, 18 nt, Human
ugggcucaggugguuccu

SEQ ID NO: 512901 - RNA, 20 nt, Human
uuaaugcaagagggcagguc

SEQ ID NO: 512902 - RNA, 21 nt, Human
uuuauaaggcucccaaugugc

SEQ ID NO: 512903 - RNA, 20 nt, Human
aaauagguaacauuguaaua

SEQ ID NO: 512904 - RNA, 21 nt, Human
aagaaauagguaacaucaaaa

SEQ ID NO: 512905 - RNA, 26 nt, Human
cagaaacuuacaaacugggucaaaaa

SEQ ID NO: 512906 - RNA, 21 nt, Human
caggggucucccuauuaacuu

SEQ ID NO: 512907 - RNA, 23 nt, Human
cuccugcugacagaaacuuacaa

SEQ ID NO: 512908 - RNA, 20 nt, Human
gccccgcaaaccugcucccc

SEQ ID NO: 512909 - RNA, 23 nt, Human
gguaauaggagacccacaagaaa

SEQ ID NO: 512910 - RNA, 18 nt, Human
uacuccugggccuauccu

SEQ ID NO: 512911 - RNA, 23 nt, Human
ucacaauauauaaugagcauccu

SEQ ID NO: 512912 - RNA, 20 nt, Human
ucuccugcugacagaaacuu

SEQ ID NO: 512913 - RNA, 25 nt, Human
ucuccugcugacagaaacuuacaaa

SEQ ID NO: 512914 - RNA, 24 nt, Human
ugggucaaaaacaacauucauuua

SEQ ID NO: 512915 - RNA, 22 nt, Human
uugcuuuuuaaaacuguuuuau

SEQ ID NO: 512916 - RNA, 21 nt, Human
uuuugcuuuuuaaaacuguuu

SEQ ID NO: 512917 - RNA, 20 nt, Human
uuuuuuuuuuuuuugcuuuu

SEQ ID NO: 512918 - RNA, 22 nt, Human
uuuuuuuuuuuuuugcuuuuua

SEQ ID NO: 512919 - RNA, 31 nt, Human
aaaaaucaacaacaacuauauuuuggacaaa

SEQ ID NO: 512920 - RNA, 19 nt, Human
aaagauauaauucuuugga

SEQ ID NO: 512921 - RNA, 22 nt, Human
aaccccuugagaugaaaacaaa

SEQ ID NO: 512922 - RNA, 18 nt, Human
aaccugguucuugaauga

SEQ ID NO: 512923 - RNA, 24 nt, Human
aacuuguucccaucccagucucca

SEQ ID NO: 512924 - RNA, 21 nt, Human
aaggauuugguacaaacugca

SEQ ID NO: 512925 - RNA, 24 nt, Human
acaagaaaaggaugcaaggcuucu

SEQ ID NO: 512926 - RNA, 19 nt, Human
acgauaacggcggaauauc

SEQ ID NO: 512927 - RNA, 22 nt, Human
agaagauggaaacaaaaucaaa

SEQ ID NO: 512928 - RNA, 19 nt, Human
agagauaauagugaagagu

SEQ ID NO: 512929 - RNA, 23 nt, Human
agauaauagugaagaguguggag

SEQ ID NO: 512930 - RNA, 18 nt, Human
agauuuuuuuuuuuuaag

SEQ ID NO: 512931 - RNA, 22 nt, Human
agggcugggaugacuucugagc

SEQ ID NO: 512932 - RNA, 24 nt, Human
augaacaaacacaguucauguaaa

SEQ ID NO: 512933 - RNA, 28 nt, Human
augcaaggcuucuacguuacacuuugga

SEQ ID NO: 512934 - RNA, 21 nt, Human
caaagaagcggccacucaaac

SEQ ID NO: 512935 - RNA, 22 nt, Human
caaagaagcggccacucaaacc

SEQ ID NO: 512936 - RNA, 21 nt, Human
caggagauucagagggcuggg

SEQ ID NO: 512937 - RNA, 19 nt, Human
caggccaaagggaagcuga

SEQ ID NO: 512938 - RNA, 19 nt, Human
caggccaaagggaagcuga

SEQ ID NO: 512939 - RNA, 20 nt, Human
ccaaacagaucccaacacua

SEQ ID NO: 512940 - RNA, 24 nt, Human
ccacgauaacggcggaauaucccu

SEQ ID NO: 512941 - RNA, 24 nt, Human
ccaucccagucuccaaacagaucc

SEQ ID NO: 512942 - RNA, 18 nt, Human
cccagggaaccccuugag

SEQ ID NO: 512943 - RNA, 21 nt, Human
ccccuuaggucagaaugaaca

SEQ ID NO: 512944 - RNA, 23 nt, Human
ccugggccacgauaacggcggaa

SEQ ID NO: 512945 - RNA, 22 nt, Human
cugauggccacaacauuucauu

SEQ ID NO: 512946 - RNA, 22 nt, Human
cuuggcuuucauuucacagggc

SEQ ID NO: 512947 - RNA, 23 nt, Human
cuuuugagucucugauggccaca

SEQ ID NO: 512948 - RNA, 18 nt, Human
gaagauuacagaagaugg

SEQ ID NO: 512949 - RNA, 19 nt, Human
gaaggugcugauuaggacu

SEQ ID NO: 512950 - RNA, 23 nt, Human
gaaggugcugauuaggacuggga

SEQ ID NO: 512951 - RNA, 19 nt, Human
gaggacuucuggcuugaaa

SEQ ID NO: 512952 - RNA, 20 nt, Human
gccugcagccuugucucugg

SEQ ID NO: 512953 - RNA, 20 nt, Human
gggagaguggugacaaagaa

SEQ ID NO: 512954 - RNA, 24 nt, Human
gggagaguggugacaaagaagcgg

SEQ ID NO: 512955 - RNA, 21 nt, Human
gggaugcucaggagccaaggc

SEQ ID NO: 512956 - RNA, 24 nt, Human
gguaagaaauaaaacauagcacag

SEQ ID NO: 512957 - RNA, 22 nt, Human
guggugacaaagaagcggccac

SEQ ID NO: 512958 - RNA, 23 nt, Human
uaaaaaaaaaucaacaacaacua

SEQ ID NO: 512959 - RNA, 23 nt, Human
uaaaacauagcacaggagauuca

SEQ ID NO: 512960 - RNA, 24 nt, Human
uaagaaauaaaacauagcacagga

SEQ ID NO: 512961 - RNA, 24 nt, Human
uacacaagaaaaggaugcaaggcu

SEQ ID NO: 512962 - RNA, 26 nt, Human
uacacaagaaaaggaugcaaggcuuc

SEQ ID NO: 512963 - RNA, 24 nt, Human
uacccaaggcccuuucaauuucua

SEQ ID NO: 512964 - RNA, 22 nt, Human
uagccucccuggguacuuacag

SEQ ID NO: 512965 - RNA, 19 nt, Human
uaggucagaaugaacaaac

SEQ ID NO: 512966 - RNA, 23 nt, Human
uauuaaaguaguucaagacccag

SEQ ID NO: 512967 - RNA, 19 nt, Human
ucaauuucuagcugugaaa

SEQ ID NO: 512968 - RNA, 19 nt, Human
ucccaacacuacguuuguu

SEQ ID NO: 512969 - RNA, 24 nt, Human
ucccaacacuacguuuguuuuucu

SEQ ID NO: 512970 - RNA, 25 nt, Human
uccuuaguauacaugaggcuuacug

SEQ ID NO: 512971 - RNA, 18 nt, Human
ucugucuuguaaaauccu

SEQ ID NO: 512972 - RNA, 24 nt, Human
ugaaaaaaugcugggagaguggug

SEQ ID NO: 512973 - RNA, 22 nt, Human
ugaaaacaaaacaguauucaac

SEQ ID NO: 512974 - RNA, 19 nt, Human
ugaagaguguggagagccu

SEQ ID NO: 512975 - RNA, 20 nt, Human
ugacaaaaauaaauacuuua

SEQ ID NO: 512976 - RNA, 18 nt, Human
ugacuucugagcugcucu

SEQ ID NO: 512977 - RNA, 20 nt, Human
ugagaugaaaacaaaacagu

SEQ ID NO: 512978 - RNA, 18 nt, Human
ugccaugagaccaaauga

SEQ ID NO: 512979 - RNA, 25 nt, Human
ugccaugagaccaaaugacuagaga

SEQ ID NO: 512980 - RNA, 22 nt, Human
uggaaacaaaaucaaaucuuuc

SEQ ID NO: 512981 - RNA, 20 nt, Human
uggcuuucauuucacagggc

SEQ ID NO: 512982 - RNA, 21 nt, Human
ugggagaguggugacaaagaa

SEQ ID NO: 512983 - RNA, 18 nt, Human
uguucccaucccagucuc

SEQ ID NO: 512984 - RNA, 22 nt, Human
uucaugcacuguggugccugau

SEQ ID NO: 512985 - RNA, 27 nt, Human
uugguacaaacugcaggccaaagggaa

SEQ ID NO: 512986 - RNA, 19 nt, Human
uuuaagagaagcuugcuca

SEQ ID NO: 512987 - RNA, 22 nt, Human
uuucacuuucagguacuggagu

SEQ ID NO: 512988 - RNA, 23 nt, Human
uuuuaaggaaauuagccucccug

SEQ ID NO: 512989 - RNA, 22 nt, Human
aaauucacccacagcagaggcc

SEQ ID NO: 512990 - RNA, 25 nt, Human
aagcaauccucccaccucagccucc

SEQ ID NO: 512991 - RNA, 18 nt, Human
aagcaaucuuccuaccuc

SEQ ID NO: 512992 - RNA, 18 nt, Human
aaggugcccuuaggcccc

SEQ ID NO: 512993 - RNA, 22 nt, Human
acagcaggcagccucagccuca

SEQ ID NO: 512994 - RNA, 19 nt, Human
acugcagccuccacuuccu

SEQ ID NO: 512995 - RNA, 20 nt, Human
aggcagaacgggcuccugca

SEQ ID NO: 512996 - RNA, 23 nt, Human
aggccaggcugggaccuccuucc

SEQ ID NO: 512997 - RNA, 21 nt, Human
aggccucaauuagaggccuac

SEQ ID NO: 512998 - RNA, 24 nt, Human
aggcggccuccgagccccugggcc

SEQ ID NO: 512999 - RNA, 20 nt, Human
agggagccacagauggagag

SEQ ID NO: 513000 - RNA, 22 nt, Human
aggggccgcgaggaaggcccag

SEQ ID NO: 513001 - RNA, 19 nt, Human
agguugcccaggcugcucu

SEQ ID NO: 513002 - RNA, 24 nt, Human
auaggucacugcagccuccacuuc

SEQ ID NO: 513003 - RNA, 18 nt, Human
aucacugcucaucccugg

SEQ ID NO: 513004 - RNA, 21 nt, Human
aucucaccuuuguacccugcc

SEQ ID NO: 513005 - RNA, 18 nt, Human
caaaaacccgacuuaaag

SEQ ID NO: 513006 - RNA, 27 nt, Human
caagcaauccucccaccucagccuccc

SEQ ID NO: 513007 - RNA, 27 nt, Human
caagcaaucuuccuaccuccaccuccc

SEQ ID NO: 513008 - RNA, 22 nt, Human
caaugggguagacgcucucaca

SEQ ID NO: 513009 - RNA, 21 nt, Human
cacaguccacguccaucagca

SEQ ID NO: 513010 - RNA, 22 nt, Human
cacaguccacguccaucagcac

SEQ ID NO: 513011 - RNA, 24 nt, Human
cacaguccacguccaucagcaccc

SEQ ID NO: 513012 - RNA, 24 nt, Human
caccucagccuccccaguagcugg

SEQ ID NO: 513013 - RNA, 24 nt, Human
cagaaauucacccacagcagaggc

SEQ ID NO: 513014 - RNA, 20 nt, Human
cagcaggcagccucagccuc

SEQ ID NO: 513015 - RNA, 19 nt, Human
cagccuccacuuccugggc

SEQ ID NO: 513016 - RNA, 23 nt, Human
cagccuccacuuccugggcucaa

SEQ ID NO: 513017 - RNA, 24 nt, Human
cagcgucuugauagguugcccagg

SEQ ID NO: 513018 - RNA, 24 nt, Human
cagggucuugcucugucacccagg

SEQ ID NO: 513019 - RNA, 26 nt, Human
caguagcugggaccacaggcacgcac

SEQ ID NO: 513020 - RNA, 22 nt, Human
caucggaaccugggcaggcuuc

SEQ ID NO: 513021 - RNA, 26 nt, Human
ccacagcagaggccaggccucaauua

SEQ ID NO: 513022 - RNA, 22 nt, Human
ccaccucagccuccccaguagc

SEQ ID NO: 513023 - RNA, 19 nt, Human
ccagaaucucacugcggac

SEQ ID NO: 513024 - RNA, 23 nt, Human
ccaguacagaaauucacccacag

SEQ ID NO: 513025 - RNA, 19 nt, Human
ccaucggaaccugggcagg

SEQ ID NO: 513026 - RNA, 19 nt, Human
cccaacaagccccuguccc

SEQ ID NO: 513027 - RNA, 24 nt, Human
cccacagcagaggccaggccucaa

SEQ ID NO: 513028 - RNA, 20 nt, Human
ccccagccuuacacagaguc

SEQ ID NO: 513029 - RNA, 21 nt, Human
ccccagccuuacacagagucc

SEQ ID NO: 513030 - RNA, 21 nt, Human
cccccaggacagcaggcagcc

SEQ ID NO: 513031 - RNA, 19 nt, Human
ccccugggcacccgugauc

SEQ ID NO: 513032 - RNA, 23 nt, Human
ccccugggcacccgugauccgcc

SEQ ID NO: 513033 - RNA, 21 nt, Human
cccuggaccauucagaaccuc

SEQ ID NO: 513034 - RNA, 22 nt, Human
cccuuaggccccaacaagcccc

SEQ ID NO: 513035 - RNA, 24 nt, Human
cccuuaggccccaacaagccccug

SEQ ID NO: 513036 - RNA, 19 nt, Human
ccgcgaggaaggcccaggg

SEQ ID NO: 513037 - RNA, 18 nt, Human
ccucaguccccaaggccu

SEQ ID NO: 513038 - RNA, 19 nt, Human
ccuccacuuccugggcuca

SEQ ID NO: 513039 - RNA, 25 nt, Human
ccucccaccucagccuccccaguag

SEQ ID NO: 513040 - RNA, 21 nt, Human
ccuccuucccuagggaguccu

SEQ ID NO: 513041 - RNA, 20 nt, Human
ccugggcucaagcaauccuc

SEQ ID NO: 513042 - RNA, 20 nt, Human
ccuuaggccccaacaagccc

SEQ ID NO: 513043 - RNA, 22 nt, Human
cgacuuaaaguagcucagacac

SEQ ID NO: 513044 - RNA, 24 nt, Human
cggaaccugggcaggcuucccaga

SEQ ID NO: 513045 - RNA, 19 nt, Human
cggggcugcaggagaggca

SEQ ID NO: 513046 - RNA, 19 nt, Human
cuacacaaugggguagacg

SEQ ID NO: 513047 - RNA, 24 nt, Human
cuagagcacccagccgccacucag

SEQ ID NO: 513048 - RNA, 24 nt, Human
cucaagcaauccucccaccucagc

SEQ ID NO: 513049 - RNA, 24 nt, Human
cucaagcaaucuuccuaccuccac

SEQ ID NO: 513050 - RNA, 23 nt, Human
cucacaguccacguccaucagca

SEQ ID NO: 513051 - RNA, 24 nt, Human
cucagccuccccaguagcugggac

SEQ ID NO: 513052 - RNA, 24 nt, Human
cuccccaguagcugggaccacagg

SEQ ID NO: 513053 - RNA, 23 nt, Human
cuccccaguuguugcgccauggu

SEQ ID NO: 513054 - RNA, 20 nt, Human
cucugucacccaggcuggag

SEQ ID NO: 513055 - RNA, 23 nt, Human
cugcagccuccacuuccugggcu

SEQ ID NO: 513056 - RNA, 21 nt, Human
cuggccucaagcaaucuuccu

SEQ ID NO: 513057 - RNA, 22 nt, Human
cuggccucaagcaaucuuccua

SEQ ID NO: 513058 - RNA, 19 nt, Human
cugucacccaggcuggagu

SEQ ID NO: 513059 - RNA, 19 nt, Human
cuucccagaggaggcggcc

SEQ ID NO: 513060 - RNA, 24 nt, Human
cuuccugggcucaagcaauccucc

SEQ ID NO: 513061 - RNA, 21 nt, Human
cuugcucugucacccaggcug

SEQ ID NO: 513062 - RNA, 24 nt, Human
cuugcucugucacccaggcuggag

SEQ ID NO: 513063 - RNA, 20 nt, Human
gaggaggcggccuccgagcc

SEQ ID NO: 513064 - RNA, 19 nt, Human
gaguggcaggugucuggga

SEQ ID NO: 513065 - RNA, 21 nt, Human
gauggagagggaugauggggg

SEQ ID NO: 513066 - RNA, 21 nt, Human
gccaacaggggccgcgaggaa

SEQ ID NO: 513067 - RNA, 24 nt, Human
gccccaacaagccccuguccccag

SEQ ID NO: 513068 - RNA, 19 nt, Human
gcuccaucugcaggcacug

SEQ ID NO: 513069 - RNA, 25 nt, Human
gcucugucacccaggcuggaguaca

SEQ ID NO: 513070 - RNA, 26 nt, Human
gcugcuguuguggacucuccgagggu

SEQ ID NO: 513071 - RNA, 21 nt, Human
gcuggaguacaguggugccag

SEQ ID NO: 513072 - RNA, 19 nt, Human
gcuugaggcaucacugcuc

SEQ ID NO: 513073 - RNA, 23 nt, Human
ggacuccuggccucaagcaaucu

SEQ ID NO: 513074 - RNA, 18 nt, Human
ggagagggaugauggggg

SEQ ID NO: 513075 - RNA, 20 nt, Human
ggagagggaugaugggggug

SEQ ID NO: 513076 - RNA, 24 nt, Human
ggaucugggcugugcccggagagg

SEQ ID NO: 513077 - RNA, 19 nt, Human
ggcuccugcaguucccaag

SEQ ID NO: 513078 - RNA, 30 nt, Human
gggguggaucugggcugugcccggagaggg

SEQ ID NO: 513079 - RNA, 18 nt, Human
guagcugggaccacaggc

SEQ ID NO: 513080 - RNA, 21 nt, Human
uacacaaugggguagacgcuc

SEQ ID NO: 513081 - RNA, 27 nt, Human
uacccugcccucacuggcugcgucuca

SEQ ID NO: 513082 - RNA, 18 nt, Human
uaccuccaccuccccagu

SEQ ID NO: 513083 - RNA, 23 nt, Human
uagaggccuacacaaugggguag

SEQ ID NO: 513084 - RNA, 20 nt, Human
uagccaagaugagacucuca

SEQ ID NO: 513085 - RNA, 23 nt, Human
uagguugcccaggcugcucuggg

SEQ ID NO: 513086 - RNA, 19 nt, Human
ucacuagagcacccagccg

SEQ ID NO: 513087 - RNA, 21 nt, Human
ucacuagagcacccagccgcc

SEQ ID NO: 513088 - RNA, 24 nt, Human
ucacugcagccuccacuuccuggg

SEQ ID NO: 513089 - RNA, 18 nt, Human
ucagccuccccaguagcu

SEQ ID NO: 513090 - RNA, 22 nt, Human
ucccaaggugcccuuaggcccc

SEQ ID NO: 513091 - RNA, 20 nt, Human
ucccaccucagccuccccag

SEQ ID NO: 513092 - RNA, 21 nt, Human
ucccaccucagccuccccagu

SEQ ID NO: 513093 - RNA, 18 nt, Human
ucccagggaaggcuuuga

SEQ ID NO: 513094 - RNA, 18 nt, Human
ucccaguacugagaccca

SEQ ID NO: 513095 - RNA, 22 nt, Human
uccccaguagcugggaccacag

SEQ ID NO: 513096 - RNA, 22 nt, Human
ucccugauugaccaccugguuu

SEQ ID NO: 513097 - RNA, 22 nt, Human
uccgccagggccucagucccca

SEQ ID NO: 513098 - RNA, 18 nt, Human
uccugggcucaagcaauc

SEQ ID NO: 513099 - RNA, 21 nt, Human
ucggaaccugggcaggcuucc

SEQ ID NO: 513100 - RNA, 20 nt, Human
ucgguggugcucccugauug

SEQ ID NO: 513101 - RNA, 20 nt, Human
ucugcuucccucuguguggc

SEQ ID NO: 513102 - RNA, 18 nt, Human
ucugucacccaggcugga

SEQ ID NO: 513103 - RNA, 24 nt, Human
ucugucacccaggcuggaguacag

SEQ ID NO: 513104 - RNA, 23 nt, Human
ucuugcucugucacccaggcugg

SEQ ID NO: 513105 - RNA, 24 nt, Human
ucuugcucugucacccaggcugga

SEQ ID NO: 513106 - RNA, 23 nt, Human
ugaugggagucagaggccccagg

SEQ ID NO: 513107 - RNA, 18 nt, Human
ugauggggguggaucugg

SEQ ID NO: 513108 - RNA, 21 nt, Human
ugcaggcacuguuggaaccag

SEQ ID NO: 513109 - RNA, 23 nt, Human
ugcagggggugggggaauugggg

SEQ ID NO: 513110 - RNA, 23 nt, Human
ugcccuuaggccccaacaagccc

SEQ ID NO: 513111 - RNA, 18 nt, Human
ugcucugggacuccuggc

SEQ ID NO: 513112 - RNA, 20 nt, Human
ugcuggagguaggagccaug

SEQ ID NO: 513113 - RNA, 21 nt, Human
ugcuguuguggacucuccgag

SEQ ID NO: 513114 - RNA, 18 nt, Human
uggagagggaugaugggg

SEQ ID NO: 513115 - RNA, 28 nt, Human
uggaguacaguggugccauccuagcacg

SEQ ID NO: 513116 - RNA, 20 nt, Human
uggccucaagcaaucuuccu

SEQ ID NO: 513117 - RNA, 21 nt, Human
uggccucaagcaaucuuccua

SEQ ID NO: 513118 - RNA, 25 nt, Human
uggccucaagcaaucuuccuaccuc

SEQ ID NO: 513119 - RNA, 24 nt, Human
uggcuccaucugcaggcacuguug

SEQ ID NO: 513120 - RNA, 18 nt, Human
uggcugcgucucauuucu

SEQ ID NO: 513121 - RNA, 21 nt, Human
ugggaccacaggcacgcacca

SEQ ID NO: 513122 - RNA, 24 nt, Human
ugggaccacaggcacgcaccacca

SEQ ID NO: 513123 - RNA, 25 nt, Human
ugggggaauuggggccaacaggggc

SEQ ID NO: 513124 - RNA, 22 nt, Human
ugucccagcaucugucucuccg

SEQ ID NO: 513125 - RNA, 22 nt, Human
ugugaggggcagggagccacag

SEQ ID NO: 513126 - RNA, 25 nt, Human
uuccugggcucaagcaauccuccca

SEQ ID NO: 513127 - RNA, 23 nt, Human
uuggaaccaguacccaaggauga

SEQ ID NO: 513128 - RNA, 18 nt, Human
uugguggcggggcugcag

SEQ ID NO: 513129 - RNA, 18 nt, Human
uuuaucagaugcauucac

SEQ ID NO: 513130 - RNA, 24 nt, Human
uuuuuuuuuuuagacagggucuug

SEQ ID NO: 513131 - RNA, 23 nt, Human
uuuuuuuuuuuuagacagggucu

SEQ ID NO: 513132 - RNA, 25 nt, Human
uuuuuuuuuuuuuuuuuagacaggg

SEQ ID NO: 513133 - RNA, 18 nt, Human
aaaaacuaauguggaccu

SEQ ID NO: 513134 - RNA, 20 nt, Human
aaaaggaaguaaguuaugga

SEQ ID NO: 513135 - RNA, 19 nt, Human
aaacccauaaucacaucuc

SEQ ID NO: 513136 - RNA, 23 nt, Human
aaauauguaccaaggaaauacaa

SEQ ID NO: 513137 - RNA, 22 nt, Human
aacuccacuuuuuuucuauuuu

SEQ ID NO: 513138 - RNA, 22 nt, Human
aagccacccaaagauuagggag

SEQ ID NO: 513139 - RNA, 23 nt, Human
aaggaaaccuuugauucauguga

SEQ ID NO: 513140 - RNA, 18 nt, Human
aauaaaggauacugcaca

SEQ ID NO: 513141 - RNA, 23 nt, Human
aauauaacuuuuuacccagccca

SEQ ID NO: 513142 - RNA, 19 nt, Human
aauauacaguaauacacug

SEQ ID NO: 513143 - RNA, 22 nt, Human
aauaucauugcuaccaaguggc

SEQ ID NO: 513144 - RNA, 21 nt, Human
acaaaauaggcuuugccaaac

SEQ ID NO: 513145 - RNA, 18 nt, Human
acauuauaaaauuaacuu

SEQ ID NO: 513146 - RNA, 19 nt, Human
acccagcaacuccgcaguu

SEQ ID NO: 513147 - RNA, 23 nt, Human
acuaaagagacuucaauucacau

SEQ ID NO: 513148 - RNA, 21 nt, Human
acuuuuuacccagcccaggac

SEQ ID NO: 513149 - RNA, 24 nt, Human
agacaaaaaggaaguaaguuaugg

SEQ ID NO: 513150 - RNA, 19 nt, Human
agacaugaaaggaaaccuu

SEQ ID NO: 513151 - RNA, 19 nt, Human
agccgagcuggugaccuca

SEQ ID NO: 513152 - RNA, 21 nt, Human
agccuaggcuaaauagaggac

SEQ ID NO: 513153 - RNA, 21 nt, Human
agcuggugaccucagguaccc

SEQ ID NO: 513154 - RNA, 20 nt, Human
aggcggaggcugauguggcc

SEQ ID NO: 513155 - RNA, 22 nt, Human
aguaaguuauggaagagcacaa

SEQ ID NO: 513156 - RNA, 20 nt, Human
aguggcacuuuuuuccuucu

SEQ ID NO: 513157 - RNA, 21 nt, Human
auaaaaaaauccuuuaaugga

SEQ ID NO: 513158 - RNA, 22 nt, Human
augccuuguuagucagcacaca

SEQ ID NO: 513159 - RNA, 19 nt, Human
caaggaaaccggaacccau

SEQ ID NO: 513160 - RNA, 21 nt, Human
cacuguaccauuguauccuaa

SEQ ID NO: 513161 - RNA, 24 nt, Human
cagcaaaaaggggaaaagcuauuc

SEQ ID NO: 513162 - RNA, 21 nt, Human
cagcacagaaauaaaggauac

SEQ ID NO: 513163 - RNA, 25 nt, Human
cagccgagcuggugaccucagguac

SEQ ID NO: 513164 - RNA, 24 nt, Human
caggguuuggaaaaaaaaaaagua

SEQ ID NO: 513165 - RNA, 23 nt, Human
cagguacccagcccgccccaccc

SEQ ID NO: 513166 - RNA, 25 nt, Human
caguggcacuuuuuuccuucuaucu

SEQ ID NO: 513167 - RNA, 26 nt, Human
caugaaaggaaaccuuugauucaugu

SEQ ID NO: 513168 - RNA, 21 nt, Human
cauuagguuuaguuaacuuaa

SEQ ID NO: 513169 - RNA, 18 nt, Human
ccacccggacgguugccc

SEQ ID NO: 513170 - RNA, 20 nt, Human
ccagcccgccccacccaccc

SEQ ID NO: 513171 - RNA, 22 nt, Human
cccccaucccucuccggccgcu

SEQ ID NO: 513172 - RNA, 22 nt, Human
ccccccaucccucuccggccgc

SEQ ID NO: 513173 - RNA, 18 nt, Human
cccgcggcgaggcucaga

SEQ ID NO: 513174 - RNA, 18 nt, Human
ccgccuccgccgccccug

SEQ ID NO: 513175 - RNA, 23 nt, Human
ccgccuccgccgccccugccucu

SEQ ID NO: 513176 - RNA, 20 nt, Human
ccuaagaggaucuggggaau

SEQ ID NO: 513177 - RNA, 22 nt, Human
cgauuaaaaguaauugcaccca

SEQ ID NO: 513178 - RNA, 21 nt, Human
cgccccugccucuacagccga

SEQ ID NO: 513179 - RNA, 21 nt, Human
cggcccgggugcacccgccag

SEQ ID NO: 513180 - RNA, 21 nt, Human
cucuuaaaauacagcaccgcu

SEQ ID NO: 513181 - RNA, 24 nt, Human
cugauaggcaguggcacuuuuuuc

SEQ ID NO: 513182 - RNA, 20 nt, Human
cuucucucgcugaggguaag

SEQ ID NO: 513183 - RNA, 18 nt, Human
gaagagcacaaagagauu

SEQ ID NO: 513184 - RNA, 20 nt, Human
gacuguaaauagacaugaaa

SEQ ID NO: 513185 - RNA, 20 nt, Human
gagagaacagcacagaaauu

SEQ ID NO: 513186 - RNA, 23 nt, Human
gcacuguaaaauugugaaaacaa

SEQ ID NO: 513187 - RNA, 24 nt, Human
gccacuucuggaacacuucugcaa

SEQ ID NO: 513188 - RNA, 22 nt, Human
gccccacccacccggacgguug

SEQ ID NO: 513189 - RNA, 24 nt, Human
gcgaggcucagacugggugggcgc

SEQ ID NO: 513190 - RNA, 21 nt, Human
gcugacacugcccuggagcac

SEQ ID NO: 513191 - RNA, 19 nt, Human
gggugcgcacuggcggccc

SEQ ID NO: 513192 - RNA, 19 nt, Human
ggguuuggaaaaaaaaaaa

SEQ ID NO: 513193 - RNA, 23 nt, Human
guacccagcccgccccacccacc

SEQ ID NO: 513194 - RNA, 19 nt, Human
gucagugguuuaucacuga

SEQ ID NO: 513195 - RNA, 23 nt, Human
uaaaaacuaauguggaccuuuga

SEQ ID NO: 513196 - RNA, 23 nt, Human
uaaaacagccauuccaacaguuu

SEQ ID NO: 513197 - RNA, 18 nt, Human
uaaaauacagcaccgcug

SEQ ID NO: 513198 - RNA, 22 nt, Human
uaaaggaaagccacccaaagau

SEQ ID NO: 513199 - RNA, 19 nt, Human
uaagcuacaggcuacauuu

SEQ ID NO: 513200 - RNA, 20 nt, Human
uacaaaauaggcuuugccaa

SEQ ID NO: 513201 - RNA, 18 nt, Human
uacacuguagauaaaguu

SEQ ID NO: 513202 - RNA, 26 nt, Human
uaccaaggaaauacaaauuggauaau

SEQ ID NO: 513203 - RNA, 27 nt, Human
uaccaaggaaauacaaauuggauaaug

SEQ ID NO: 513204 - RNA, 24 nt, Human
uacuaaagagacuucaauucacau

SEQ ID NO: 513205 - RNA, 24 nt, Human
uacuccaccuagcauaccaucugu

SEQ ID NO: 513206 - RNA, 18 nt, Human
uagcauaccaucuguacc

SEQ ID NO: 513207 - RNA, 22 nt, Human
uaucaagcauacuccaccuagc

SEQ ID NO: 513208 - RNA, 24 nt, Human
uauguaccaaggaaauacaaauug

SEQ ID NO: 513209 - RNA, 22 nt, Human
uauuuaacuggcaacuauccau

SEQ ID NO: 513210 - RNA, 21 nt, Human
uauuucaaaagcaggguuugg

SEQ ID NO: 513211 - RNA, 21 nt, Human
ucacaguaagacacugauaac

SEQ ID NO: 513212 - RNA, 18 nt, Human
ucagguacccagcccgcc

SEQ ID NO: 513213 - RNA, 21 nt, Human
ucuccauggcaacaaaaaccc

SEQ ID NO: 513214 - RNA, 21 nt, Human
ucucucgcugaggguaagggu

SEQ ID NO: 513215 - RNA, 19 nt, Human
ucucuugcucuucuuuuug

SEQ ID NO: 513216 - RNA, 27 nt, Human
ucucuugcucuucuuuuugucagcaaa

SEQ ID NO: 513217 - RNA, 22 nt, Human
ucuggaacacuucugcaacauc

SEQ ID NO: 513218 - RNA, 22 nt, Human
ugaaaggaaaccuuugauucau

SEQ ID NO: 513219 - RNA, 19 nt, Human
ugcaaagacucuauauugg

SEQ ID NO: 513220 - RNA, 18 nt, Human
ugcaaggaaaccggaacc

SEQ ID NO: 513221 - RNA, 23 nt, Human
ugcccuggagcacucuaggaugc

SEQ ID NO: 513222 - RNA, 23 nt, Human
uggaacacuucugcaacaucuuu

SEQ ID NO: 513223 - RNA, 20 nt, Human
uggaagagcacaaagagauu

SEQ ID NO: 513224 - RNA, 27 nt, Human
uggaagagcacaaagagauugaggaca

SEQ ID NO: 513225 - RNA, 22 nt, Human
uggcauaggaggauucccacag

SEQ ID NO: 513226 - RNA, 24 nt, Human
uguaaaagcaaggccauggguggu

SEQ ID NO: 513227 - RNA, 21 nt, Human
ugugaaaacaaauaacuauga

SEQ ID NO: 513228 - RNA, 21 nt, Human
uguguacacugucuucacaca

SEQ ID NO: 513229 - RNA, 18 nt, Human
uucaacccuaaugucagu

SEQ ID NO: 513230 - RNA, 24 nt, Human
uucccuguaagguuaaaauaaaaa

SEQ ID NO: 513231 - RNA, 23 nt, Human
uuuuuuuuuuuuaaaggaaagcc

SEQ ID NO: 513232 - RNA, 20 nt, Human
uuuuuuuuuuuuuuuaaagg

SEQ ID NO: 513233 - RNA, 25 nt, Human
aaacaaaacacaagagucuucugag

SEQ ID NO: 513234 - RNA, 22 nt, Human
aaacagcaugauccuggaaacu

SEQ ID NO: 513235 - RNA, 21 nt, Human
aaaccaaaacaaaacacaaga

SEQ ID NO: 513236 - RNA, 19 nt, Human
aaagaaaaaaaaaaugcaa

SEQ ID NO: 513237 - RNA, 22 nt, Human
aacaaaacacaagagucuucug

SEQ ID NO: 513238 - RNA, 22 nt, Human
aacaacaugaaggugacaaacu

SEQ ID NO: 513239 - RNA, 25 nt, Human
aaccaaacauuuaaaucuuccaagg

SEQ ID NO: 513240 - RNA, 23 nt, Human
aacccuggaaaaucuguagaaaa

SEQ ID NO: 513241 - RNA, 18 nt, Human
aagaaaagaaaaaucuga

SEQ ID NO: 513242 - RNA, 21 nt, Human
aagcuucuggaccgcagaccu

SEQ ID NO: 513243 - RNA, 21 nt, Human
aaggaaucaaaugaggcuggu

SEQ ID NO: 513244 - RNA, 22 nt, Human
aaugacaggcguaaggggcagg

SEQ ID NO: 513245 - RNA, 27 nt, Human
aaugcaacuuauuaaauuggacauuuu

SEQ ID NO: 513246 - RNA, 18 nt, Human
acaaaauaagaaaagaaa

SEQ ID NO: 513247 - RNA, 20 nt, Human
accaaaacaaaacacaagag

SEQ ID NO: 513248 - RNA, 23 nt, Human
acccagaaguuggagcaggggcc

SEQ ID NO: 513249 - RNA, 21 nt, Human
accgcaagcuucuggaccgcg

SEQ ID NO: 513250 - RNA, 22 nt, Human
acuagacucagacaagccaguc

SEQ ID NO: 513251 - RNA, 24 nt, Human
agaaaaaaaaaaugcaacuuauua

SEQ ID NO: 513252 - RNA, 18 nt, Human
agaaaaaaaaaccaaaac

SEQ ID NO: 513253 - RNA, 18 nt, Human
agagaaaagguaggcugc

SEQ ID NO: 513254 - RNA, 21 nt, Human
agcugcagugugagcaacccc

SEQ ID NO: 513255 - RNA, 20 nt, Human
aggcaaaaauuguaggucca

SEQ ID NO: 513256 - RNA, 23 nt, Human
aggcaaaaauuguagguccaaag

SEQ ID NO: 513257 - RNA, 20 nt, Human
aggcaaaauuuauccacaga

SEQ ID NO: 513258 - RNA, 24 nt, Human
aggcaacagguuaaauauauggca

SEQ ID NO: 513259 - RNA, 21 nt, Human
aggcucuugguccccaguucc

SEQ ID NO: 513260 - RNA, 21 nt, Human
auaaagcagcaaacagcuuug

SEQ ID NO: 513261 - RNA, 24 nt, Human
augacuaauguacacuucaagcau

SEQ ID NO: 513262 - RNA, 22 nt, Human
caaaacacaagagucuucugag

SEQ ID NO: 513263 - RNA, 19 nt, Human
caacagguuaaauauaugg

SEQ ID NO: 513264 - RNA, 23 nt, Human
cacaaaauaagaaaagaaaaauc

SEQ ID NO: 513265 - RNA, 19 nt, Human
cacaagagucuucugagga

SEQ ID NO: 513266 - RNA, 18 nt, Human
cacaagguauucuguuuc
